United States Patent Application Publication US 2014/0004565 A1 - sequence listing, part 114

SEQ ID NO: 2853101 - RNA, 19 nt, Artificial Sequence
  Description of Artificial Sequence: Synthetic oligonucleotide
gggauucugccgagugcuc

SEQ ID NO: 2853102 - RNA, 19 nt, Artificial Sequence
  Description of Artificial Sequence: Synthetic oligonucleotide
gucaccgguggucgggcuu

SEQ ID NO: 2853103 - RNA, 19 nt, Artificial Sequence
  Description of Artificial Sequence: Synthetic oligonucleotide
agcccaggcgucgccgaua

SEQ ID NO: 2853104 - RNA, 19 nt, Artificial Sequence
  Description of Artificial Sequence: Synthetic oligonucleotide
ggcacggcguccccggggu

SEQ ID NO: 2853105 - RNA, 19 nt, Artificial Sequence
  Description of Artificial Sequence: Synthetic oligonucleotide
ggccagggucggccuuagg

SEQ ID NO: 2853106 - RNA, 19 nt, Artificial Sequence
  Description of Artificial Sequence: Synthetic oligonucleotide
guggccagggucggccuua

SEQ ID NO: 2853107 - RNA, 19 nt, Artificial Sequence
  Description of Artificial Sequence: Synthetic oligonucleotide
acggggcgcucguguuggu

SEQ ID NO: 2853108 - RNA, 19 nt, Artificial Sequence
  Description of Artificial Sequence: Synthetic oligonucleotide
cuggaggccugcagggauu

SEQ ID NO: 2853109 - RNA, 19 nt, Artificial Sequence
  Description of Artificial Sequence: Synthetic oligonucleotide
cgaggaggagcccaggcgu

SEQ ID NO: 2853110 - RNA, 19 nt, Artificial Sequence
  Description of Artificial Sequence: Synthetic oligonucleotide
cgcaggaacuguuguugga

SEQ ID NO: 2853111 - RNA, 19 nt, Artificial Sequence
  Description of Artificial Sequence: Synthetic oligonucleotide
ccaacacuguggucaugaa

SEQ ID NO: 2853112 - RNA, 19 nt, Artificial Sequence
  Description of Artificial Sequence: Synthetic oligonucleotide
accgguggucgggcuucug

SEQ ID NO: 2853113 - RNA, 19 nt, Artificial Sequence
  Description of Artificial Sequence: Synthetic oligonucleotide
ccaccagcgagccgcuaga

SEQ ID NO: 2853114 - RNA, 19 nt, Artificial Sequence
  Description of Artificial Sequence: Synthetic oligonucleotide
caggacccgcgcgcuccag

SEQ ID NO: 2853115 - RNA, 19 nt, Artificial Sequence
  Description of Artificial Sequence: Synthetic oligonucleotide
ggcugcagucuuccuaguu

SEQ ID NO: 2853116 - RNA, 19 nt, Artificial Sequence
  Description of Artificial Sequence: Synthetic oligonucleotide
caccagcgagccgcuagaa

SEQ ID NO: 2853117 - RNA, 19 nt, Artificial Sequence
  Description of Artificial Sequence: Synthetic oligonucleotide
cguguuggucuggucagga

SEQ ID NO: 2853118 - RNA, 19 nt, Artificial Sequence
  Description of Artificial Sequence: Synthetic oligonucleotide
cgguggucgggcuucugga

SEQ ID NO: 2853119 - RNA, 19 nt, Artificial Sequence
  Description of Artificial Sequence: Synthetic oligonucleotide
gggguggggcacggcgucc

SEQ ID NO: 2853120 - RNA, 19 nt, Artificial Sequence
  Description of Artificial Sequence: Synthetic oligonucleotide
cgcauuugcugugguucug

SEQ ID NO: 2853121 - RNA, 19 nt, Artificial Sequence
  Description of Artificial Sequence: Synthetic oligonucleotide
gagcccaggcgucgccgau

SEQ ID NO: 2853122 - RNA, 19 nt, Artificial Sequence
  Description of Artificial Sequence: Synthetic oligonucleotide
cguccccgggguacucugc

SEQ ID NO: 2853123 - RNA, 19 nt, Artificial Sequence
  Description of Artificial Sequence: Synthetic oligonucleotide
cugcugcuucaugguuuca

SEQ ID NO: 2853124 - RNA, 19 nt, Artificial Sequence
  Description of Artificial Sequence: Synthetic oligonucleotide
gugggaugggugggacucu

SEQ ID NO: 2853125 - RNA, 19 nt, Artificial Sequence
  Description of Artificial Sequence: Synthetic oligonucleotide
caguggccagggucggccu

SEQ ID NO: 2853126 - RNA, 19 nt, Artificial Sequence
  Description of Artificial Sequence: Synthetic oligonucleotide
gggugggaugggugggacu

SEQ ID NO: 2853127 - RNA, 19 nt, Artificial Sequence
  Description of Artificial Sequence: Synthetic oligonucleotide
gcacugcugaagucgcauu

SEQ ID NO: 2853128 - RNA, 19 nt, Artificial Sequence
  Description of Artificial Sequence: Synthetic oligonucleotide
ccgggguacucugcacuuc

SEQ ID NO: 2853129 - RNA, 19 nt, Artificial Sequence
  Description of Artificial Sequence: Synthetic oligonucleotide
ggucaccgguggucgggcu

SEQ ID NO: 2853130 - RNA, 19 nt, Artificial Sequence
  Description of Artificial Sequence: Synthetic oligonucleotide
gcacuuccgcaggaacugu

SEQ ID NO: 2853131 - RNA, 19 nt, Artificial Sequence
  Description of Artificial Sequence: Synthetic oligonucleotide
ggucggccuuagggagacc

SEQ ID NO: 2853132 - RNA, 19 nt, Artificial Sequence
  Description of Artificial Sequence: Synthetic oligonucleotide
cgcucguguuggucugguc

SEQ ID NO: 2853133 - RNA, 19 nt, Artificial Sequence
  Description of Artificial Sequence: Synthetic oligonucleotide
agccaccagcgagccgcua

SEQ ID NO: 2853134 - RNA, 19 nt, Artificial Sequence
  Description of Artificial Sequence: Synthetic oligonucleotide
gccgagugcucaggagacu

SEQ ID NO: 2853135 - RNA, 19 nt, Artificial Sequence
  Description of Artificial Sequence: Synthetic oligonucleotide
gcgagccgcuagaagggau

SEQ ID NO: 2853136 - RNA, 19 nt, Artificial Sequence
  Description of Artificial Sequence: Synthetic oligonucleotide
cccgggguacucugcacuu

SEQ ID NO: 2853137 - RNA, 19 nt, Artificial Sequence
  Description of Artificial Sequence: Synthetic oligonucleotide
ggcguccccgggguacucu

SEQ ID NO: 2853138 - RNA, 19 nt, Artificial Sequence
  Description of Artificial Sequence: Synthetic oligonucleotide
cggggcgcucguguugguc

SEQ ID NO: 2853139 - RNA, 19 nt, Artificial Sequence
  Description of Artificial Sequence: Synthetic oligonucleotide
ggaggccugcagggauucu

SEQ ID NO: 2853140 - RNA, 19 nt, Artificial Sequence
  Description of Artificial Sequence: Synthetic oligonucleotide
gcgcucguguuggucuggu

SEQ ID NO: 2853141 - RNA, 19 nt, Artificial Sequence
  Description of Artificial Sequence: Synthetic oligonucleotide
gcacggcguccccggggua

SEQ ID NO: 2853142 - RNA, 19 nt, Artificial Sequence
  Description of Artificial Sequence: Synthetic oligonucleotide
caccgguggucgggcuucu

SEQ ID NO: 2853143 - RNA, 19 nt, Artificial Sequence
  Description of Artificial Sequence: Synthetic oligonucleotide
cgucgccgauaguagucau

SEQ ID NO: 2853144 - RNA, 19 nt, Artificial Sequence
  Description of Artificial Sequence: Synthetic oligonucleotide
cccaggcgucgccgauagu

SEQ ID NO: 2853145 - RNA, 19 nt, Artificial Sequence
  Description of Artificial Sequence: Synthetic oligonucleotide
aguaauaugaaauuuauua

SEQ ID NO: 2853146 - RNA, 19 nt, Artificial Sequence
  Description of Artificial Sequence: Synthetic oligonucleotide
uuuucuaguaauaugaaau

SEQ ID NO: 2853147 - RNA, 19 nt, Artificial Sequence
  Description of Artificial Sequence: Synthetic oligonucleotide
uaugaaauuuauuacugug

SEQ ID NO: 2853148 - RNA, 19 nt, Artificial Sequence
  Description of Artificial Sequence: Synthetic oligonucleotide
guaauaugaaauuuauuac

SEQ ID NO: 2853149 - RNA, 19 nt, Artificial Sequence
  Description of Artificial Sequence: Synthetic oligonucleotide
ucuaguaauaugaaauuua

SEQ ID NO: 2853150 - RNA, 19 nt, Artificial Sequence
  Description of Artificial Sequence: Synthetic oligonucleotide
ugaaauuuauuacuguguu

SEQ ID NO: 2853151 - RNA, 19 nt, Artificial Sequence
  Description of Artificial Sequence: Synthetic oligonucleotide
cuugccuuuguacagggcc

SEQ ID NO: 2853152 - RNA, 19 nt, Artificial Sequence
  Description of Artificial Sequence: Synthetic oligonucleotide
uuucuaguaauaugaaauu

SEQ ID NO: 2853153 - RNA, 19 nt, Artificial Sequence
  Description of Artificial Sequence: Synthetic oligonucleotide
cuuuguacagggccaaaag

SEQ ID NO: 2853154 - RNA, 19 nt, Artificial Sequence
  Description of Artificial Sequence: Synthetic oligonucleotide
uccuucuugccuuuguaca

SEQ ID NO: 2853155 - RNA, 19 nt, Artificial Sequence
  Description of Artificial Sequence: Synthetic oligonucleotide
augaaauuuauuacugugu

SEQ ID NO: 2853156 - RNA, 19 nt, Artificial Sequence
  Description of Artificial Sequence: Synthetic oligonucleotide
uucuugccuuuguacaggg

SEQ ID NO: 2853157 - RNA, 19 nt, Artificial Sequence
  Description of Artificial Sequence: Synthetic oligonucleotide
uucuaguaauaugaaauuu

SEQ ID NO: 2853158 - RNA, 19 nt, Artificial Sequence
  Description of Artificial Sequence: Synthetic oligonucleotide
uaguaauaugaaauuuauu

SEQ ID NO: 2853159 - RNA, 19 nt, Artificial Sequence
  Description of Artificial Sequence: Synthetic oligonucleotide
uugccuuuguacagggcca

SEQ ID NO: 2853160 - RNA, 19 nt, Artificial Sequence
  Description of Artificial Sequence: Synthetic oligonucleotide
cuaguaauaugaaauuuau

SEQ ID NO: 2853161 - RNA, 19 nt, Artificial Sequence
  Description of Artificial Sequence: Synthetic oligonucleotide
ucuugccuuuguacagggc

SEQ ID NO: 2853162 - RNA, 19 nt, Artificial Sequence
  Description of Artificial Sequence: Synthetic oligonucleotide
ugccuuuguacagggccaa

SEQ ID NO: 2853163 - RNA, 19 nt, Artificial Sequence
  Description of Artificial Sequence: Synthetic oligonucleotide
ccuuuguacagggccaaaa

SEQ ID NO: 2853164 - RNA, 19 nt, Artificial Sequence
  Description of Artificial Sequence: Synthetic oligonucleotide
gccuuuguacagggccaaa

SEQ ID NO: 2853165 - RNA, 19 nt, Artificial Sequence
  Description of Artificial Sequence: Synthetic oligonucleotide
uauaugagcucccagagcc

SEQ ID NO: 2853166 - RNA, 19 nt, Artificial Sequence
  Description of Artificial Sequence: Synthetic oligonucleotide
uccuuaaagagacuggcgg

SEQ ID NO: 2853167 - RNA, 19 nt, Artificial Sequence
  Description of Artificial Sequence: Synthetic oligonucleotide
aacugcacagccaugaucg

SEQ ID NO: 2853168 - RNA, 19 nt, Artificial Sequence
  Description of Artificial Sequence: Synthetic oligonucleotide
auagguagcaucaacauag

SEQ ID NO: 2853169 - RNA, 19 nt, Artificial Sequence
  Description of Artificial Sequence: Synthetic oligonucleotide
acagccaugaucguggucc

SEQ ID NO: 2853170 - RNA, 19 nt, Artificial Sequence
  Description of Artificial Sequence: Synthetic oligonucleotide
uccauuaaacugcacagcc

SEQ ID NO: 2853171 - RNA, 19 nt, Artificial Sequence
  Description of Artificial Sequence: Synthetic oligonucleotide
gauauaugagcucccagag

SEQ ID NO: 2853172 - RNA, 19 nt, Artificial Sequence
  Description of Artificial Sequence: Synthetic oligonucleotide
aacauagccauagauauau

SEQ ID NO: 2853173 - RNA, 19 nt, Artificial Sequence
  Description of Artificial Sequence: Synthetic oligonucleotide
auaggcgucagcuugucag

SEQ ID NO: 2853174 - RNA, 19 nt, Artificial Sequence
  Description of Artificial Sequence: Synthetic oligonucleotide
guaucgguaacacaucucc

SEQ ID NO: 2853175 - RNA, 19 nt, Artificial Sequence
  Description of Artificial Sequence: Synthetic oligonucleotide
aaacugcacagccaugauc

SEQ ID NO: 2853176 - RNA, 19 nt, Artificial Sequence
  Description of Artificial Sequence: Synthetic oligonucleotide
agauauaugagcucccaga

SEQ ID NO: 2853177 - RNA, 19 nt, Artificial Sequence
  Description of Artificial Sequence: Synthetic oligonucleotide
aaugaugauuccugccauc

SEQ ID NO: 2853178 - RNA, 19 nt, Artificial Sequence
  Description of Artificial Sequence: Synthetic oligonucleotide
auauaugagcucccagagc

SEQ ID NO: 2853179 - RNA, 19 nt, Artificial Sequence
  Description of Artificial Sequence: Synthetic oligonucleotide
uagccauagauauaugagc

SEQ ID NO: 2853180 - RNA, 19 nt, Artificial Sequence
  Description of Artificial Sequence: Synthetic oligonucleotide
agcucgauacuguggaacc

SEQ ID NO: 2853181 - RNA, 19 nt, Artificial Sequence
  Description of Artificial Sequence: Synthetic oligonucleotide
cacaucuccuuaaagagac

SEQ ID NO: 2853182 - RNA, 19 nt, Artificial Sequence
  Description of Artificial Sequence: Synthetic oligonucleotide
uucagcucgauacugugga

SEQ ID NO: 2853183 - RNA, 19 nt, Artificial Sequence
  Description of Artificial Sequence: Synthetic oligonucleotide
aaacgacugccuuaccauc

SEQ ID NO: 2853184 - RNA, 19 nt, Artificial Sequence
  Description of Artificial Sequence: Synthetic oligonucleotide
uuaaacugcacagccauga

SEQ ID NO: 2853185 - RNA, 19 nt, Artificial Sequence
  Description of Artificial Sequence: Synthetic oligonucleotide
acuguggaaccccagcugg

SEQ ID NO: 2853186 - RNA, 19 nt, Artificial Sequence
  Description of Artificial Sequence: Synthetic oligonucleotide
gauacuguggaaccccagc

SEQ ID NO: 2853187 - RNA, 19 nt, Artificial Sequence
  Description of Artificial Sequence: Synthetic oligonucleotide
auagccauagauauaugag

SEQ ID NO: 2853188 - RNA, 19 nt, Artificial Sequence
  Description of Artificial Sequence: Synthetic oligonucleotide
cacgccuccauuaaacugc

SEQ ID NO: 2853189 - RNA, 19 nt, Artificial Sequence
  Description of Artificial Sequence: Synthetic oligonucleotide
auggauaggcgucagcuug

SEQ ID NO: 2853190 - RNA, 19 nt, Artificial Sequence
  Description of Artificial Sequence: Synthetic oligonucleotide
uuccugauagguagcauca

SEQ ID NO: 2853191 - RNA, 19 nt, Artificial Sequence
  Description of Artificial Sequence: Synthetic oligonucleotide
uagauauaugagcucccag

SEQ ID NO: 2853192 - RNA, 19 nt, Artificial Sequence
  Description of Artificial Sequence: Synthetic oligonucleotide
agcaucaacauagccauag

SEQ ID NO: 2853193 - RNA, 19 nt, Artificial Sequence
  Description of Artificial Sequence: Synthetic oligonucleotide
aagauccggucauggauag

SEQ ID NO: 2853194 - RNA, 19 nt, Artificial Sequence
  Description of Artificial Sequence: Synthetic oligonucleotide
ucuccuuaaagagacuggc

SEQ ID NO: 2853195 - RNA, 19 nt, Artificial Sequence
  Description of Artificial Sequence: Synthetic oligonucleotide
gauccggucauggauaggc

SEQ ID NO: 2853196 - RNA, 19 nt, Artificial Sequence
  Description of Artificial Sequence: Synthetic oligonucleotide
ugcuccuagaaccacgccu

SEQ ID NO: 2853197 - RNA, 19 nt, Artificial Sequence
  Description of Artificial Sequence: Synthetic oligonucleotide
acugaguacaccugcccuc

SEQ ID NO: 2853198 - RNA, 19 nt, Artificial Sequence
  Description of Artificial Sequence: Synthetic oligonucleotide
acugcuuggguaucagcgg

SEQ ID NO: 2853199 - RNA, 19 nt, Artificial Sequence
  Description of Artificial Sequence: Synthetic oligonucleotide
aaccacgccuccauuaaac

SEQ ID NO: 2853200 - RNA, 19 nt, Artificial Sequence
  Description of Artificial Sequence: Synthetic oligonucleotide
agaagauccggucauggau

SEQ ID NO: 2853201 - RNA, 19 nt, Artificial Sequence
  Description of Artificial Sequence: Synthetic oligonucleotide
augaucguggucccugugg

SEQ ID NO: 2853202 - RNA, 19 nt, Artificial Sequence
  Description of Artificial Sequence: Synthetic oligonucleotide
cugccuuaccaucauaccc

SEQ ID NO: 2853203 - RNA, 19 nt, Artificial Sequence
  Description of Artificial Sequence: Synthetic oligonucleotide
uccaauggcaaacgacugc

SEQ ID NO: 2853204 - RNA, 19 nt, Artificial Sequence
  Description of Artificial Sequence: Synthetic oligonucleotide
ucauggauaggcgucagcu

SEQ ID NO: 2853205 - RNA, 19 nt, Artificial Sequence
  Description of Artificial Sequence: Synthetic oligonucleotide
uguguguacuagcggaggc

SEQ ID NO: 2853206 - RNA, 19 nt, Artificial Sequence
  Description of Artificial Sequence: Synthetic oligonucleotide
ugauagguagcaucaacau

SEQ ID NO: 2853207 - RNA, 19 nt, Artificial Sequence
  Description of Artificial Sequence: Synthetic oligonucleotide
ucagcuacugcuuggguau

SEQ ID NO: 2853208 - RNA, 19 nt, Artificial Sequence
  Description of Artificial Sequence: Synthetic oligonucleotide
ucugcuccuagaaccacgc

SEQ ID NO: 2853209 - RNA, 19 nt, Artificial Sequence
  Description of Artificial Sequence: Synthetic oligonucleotide
cauagauauaugagcuccc

SEQ ID NO: 2853210 - RNA, 19 nt, Artificial Sequence
  Description of Artificial Sequence: Synthetic oligonucleotide
cauagccauagauauauga

SEQ ID NO: 2853211 - RNA, 19 nt, Artificial Sequence
  Description of Artificial Sequence: Synthetic oligonucleotide
gacagcaucagcuacugcu

SEQ ID NO: 2853212 - RNA, 19 nt, Artificial Sequence
  Description of Artificial Sequence: Synthetic oligonucleotide
agagccuccggcccaaagg

SEQ ID NO: 2853213 - RNA, 19 nt, Artificial Sequence
  Description of Artificial Sequence: Synthetic oligonucleotide
ggcucauucagcucgauac

SEQ ID NO: 2853214 - RNA, 19 nt, Artificial Sequence
  Description of Artificial Sequence: Synthetic oligonucleotide
aguacaccugcccuccuuc

SEQ ID NO: 2853215 - RNA, 19 nt, Artificial Sequence
  Description of Artificial Sequence: Synthetic oligonucleotide
aauggcaaacgacugccuu

SEQ ID NO: 2853216 - RNA, 19 nt, Artificial Sequence
  Description of Artificial Sequence: Synthetic oligonucleotide
agagccuccaauggcaaac

SEQ ID NO: 2853217 - RNA, 19 nt, Artificial Sequence
  Description of Artificial Sequence: Synthetic oligonucleotide
cagccugcaaugaugauuc

SEQ ID NO: 2853218 - RNA, 19 nt, Artificial Sequence
  Description of Artificial Sequence: Synthetic oligonucleotide
cuuccugauagguagcauc

SEQ ID NO: 2853219 - RNA, 19 nt, Artificial Sequence
  Description of Artificial Sequence: Synthetic oligonucleotide
ucagucacccgauuggcaa

SEQ ID NO: 2853220 - RNA, 19 nt, Artificial Sequence
  Description of Artificial Sequence: Synthetic oligonucleotide
cacccgauuggcaauguag

SEQ ID NO: 2853221 - RNA, 19 nt, Artificial Sequence
  Description of Artificial Sequence: Synthetic oligonucleotide
cugauagguagcaucaaca

SEQ ID NO: 2853222 - RNA, 19 nt, Artificial Sequence
  Description of Artificial Sequence: Synthetic oligonucleotide
gaacugaguacaccugccc

SEQ ID NO: 2853223 - RNA, 19 nt, Artificial Sequence
  Description of Artificial Sequence: Synthetic oligonucleotide
ucauucagcucgauacugu

SEQ ID NO: 2853224 - RNA, 19 nt, Artificial Sequence
  Description of Artificial Sequence: Synthetic oligonucleotide
ugaucguggucccugugga

SEQ ID NO: 2853225 - RNA, 19 nt, Artificial Sequence
  Description of Artificial Sequence: Synthetic oligonucleotide
cuagcggaggcucauucag

SEQ ID NO: 2853226 - RNA, 19 nt, Artificial Sequence
  Description of Artificial Sequence: Synthetic oligonucleotide
agcaucagcuacugcuugg

SEQ ID NO: 2853227 - RNA, 19 nt, Artificial Sequence
  Description of Artificial Sequence: Synthetic oligonucleotide
agccauagauauaugagcu

SEQ ID NO: 2853228 - RNA, 19 nt, Artificial Sequence
  Description of Artificial Sequence: Synthetic oligonucleotide
auacuguggaaccccagcu

SEQ ID NO: 2853229 - RNA, 19 nt, Artificial Sequence
  Description of Artificial Sequence: Synthetic oligonucleotide
uacuguggaaccccagcug

SEQ ID NO: 2853230 - RNA, 19 nt, Artificial Sequence
  Description of Artificial Sequence: Synthetic oligonucleotide
acugggaacugaguacacc

SEQ ID NO: 2853231 - RNA, 19 nt, Artificial Sequence
  Description of Artificial Sequence: Synthetic oligonucleotide
ugaugauuccugccaucag

SEQ ID NO: 2853232 - RNA, 19 nt, Artificial Sequence
  Description of Artificial Sequence: Synthetic oligonucleotide
gguuuucccagucuggggc

SEQ ID NO: 2853233 - RNA, 19 nt, Artificial Sequence
  Description of Artificial Sequence: Synthetic oligonucleotide
gacccagugguuguucucg

SEQ ID NO: 2853234 - RNA, 19 nt, Artificial Sequence
  Description of Artificial Sequence: Synthetic oligonucleotide
guagcaucaacauagccau

SEQ ID NO: 2853235 - RNA, 19 nt, Artificial Sequence
  Description of Artificial Sequence: Synthetic oligonucleotide
uuggguaucagcggcugag

SEQ ID NO: 2853236 - RNA, 19 nt, Artificial Sequence
  Description of Artificial Sequence: Synthetic oligonucleotide
aaccccagcugguaaguga

SEQ ID NO: 2853237 - RNA, 19 nt, Artificial Sequence
  Description of Artificial Sequence: Synthetic oligonucleotide
guaagugacagcaucagcu

SEQ ID NO: 2853238 - RNA, 19 nt, Artificial Sequence
  Description of Artificial Sequence: Synthetic oligonucleotide
caucuccuuaaagagacug

SEQ ID NO: 2853239 - RNA, 19 nt, Artificial Sequence
  Description of Artificial Sequence: Synthetic oligonucleotide
ucuguaucgguaacacauc

SEQ ID NO: 2853240 - RNA, 19 nt, Artificial Sequence
  Description of Artificial Sequence: Synthetic oligonucleotide
uucucuguaucgguaacac

SEQ ID NO: 2853241 - RNA, 19 nt, Artificial Sequence
  Description of Artificial Sequence: Synthetic oligonucleotide
uguaucgguaacacaucuc

SEQ ID NO: 2853242 - RNA, 19 nt, Artificial Sequence
  Description of Artificial Sequence: Synthetic oligonucleotide
gguagcaucaacauagcca

SEQ ID NO: 2853243 - RNA, 19 nt, Artificial Sequence
  Description of Artificial Sequence: Synthetic oligonucleotide
gacugccuuaccaucauac

SEQ ID NO: 2853244 - RNA, 19 nt, Artificial Sequence
  Description of Artificial Sequence: Synthetic oligonucleotide
uaucgguaacacaucuccu

SEQ ID NO: 2853245 - RNA, 19 nt, Artificial Sequence
  Description of Artificial Sequence: Synthetic oligonucleotide
cauucagcucgauacugug

SEQ ID NO: 2853246 - RNA, 19 nt, Artificial Sequence
  Description of Artificial Sequence: Synthetic oligonucleotide
gagccuccggcccaaaggc

SEQ ID NO: 2853247 - RNA, 19 nt, Artificial Sequence
  Description of Artificial Sequence: Synthetic oligonucleotide
uguaggacccagugguugu

SEQ ID NO: 2853248 - RNA, 19 nt, Artificial Sequence
  Description of Artificial Sequence: Synthetic oligonucleotide
guaucagcggcugagccug

SEQ ID NO: 2853249 - RNA, 19 nt, Artificial Sequence
  Description of Artificial Sequence: Synthetic oligonucleotide
ccauagauauaugagcucc

SEQ ID NO: 2853250 - RNA, 19 nt, Artificial Sequence
  Description of Artificial Sequence: Synthetic oligonucleotide
caauguaggacccaguggu

SEQ ID NO: 2853251 - RNA, 19 nt, Artificial Sequence
  Description of Artificial Sequence: Synthetic oligonucleotide
ucgguaacacaucuccuua

SEQ ID NO: 2853252 - RNA, 19 nt, Artificial Sequence
  Description of Artificial Sequence: Synthetic oligonucleotide
cagcggcugagccugagcg

SEQ ID NO: 2853253 - RNA, 19 nt, Artificial Sequence
  Description of Artificial Sequence: Synthetic oligonucleotide
ugggaacugaguacaccug

SEQ ID NO: 2853254 - RNA, 19 nt, Artificial Sequence
  Description of Artificial Sequence: Synthetic oligonucleotide
gauagguagcaucaacaua

SEQ ID NO: 2853255 - RNA, 19 nt, Artificial Sequence
  Description of Artificial Sequence: Synthetic oligonucleotide
cucuguaucgguaacacau

SEQ ID NO: 2853256 - RNA, 19 nt, Artificial Sequence
  Description of Artificial Sequence: Synthetic oligonucleotide
aucgguaacacaucuccuu

SEQ ID NO: 2853257 - RNA, 19 nt, Artificial Sequence
  Description of Artificial Sequence: Synthetic oligonucleotide
ccuccauuaaacugcacag

SEQ ID NO: 2853258 - RNA, 19 nt, Artificial Sequence
  Description of Artificial Sequence: Synthetic oligonucleotide
ucccgguuuucccagucug

SEQ ID NO: 2853259 - RNA, 19 nt, Artificial Sequence
  Description of Artificial Sequence: Synthetic oligonucleotide
auagauauaugagcuccca

SEQ ID NO: 2853260 - RNA, 19 nt, Artificial Sequence
  Description of Artificial Sequence: Synthetic oligonucleotide
agcggaggcucauucagcu

SEQ ID NO: 2853261 - RNA, 19 nt, Artificial Sequence
  Description of Artificial Sequence: Synthetic oligonucleotide
aucuccuuaaagagacugg

SEQ ID NO: 2853262 - RNA, 19 nt, Artificial Sequence
  Description of Artificial Sequence: Synthetic oligonucleotide
aacgacugccuuaccauca

SEQ ID NO: 2853263 - RNA, 19 nt, Artificial Sequence
  Description of Artificial Sequence: Synthetic oligonucleotide
ccugcaaugaugauuccug

SEQ ID NO: 2853264 - RNA, 19 nt, Artificial Sequence
  Description of Artificial Sequence: Synthetic oligonucleotide
cucgauacuguggaacccc

SEQ ID NO: 2853265 - RNA, 19 nt, Artificial Sequence
  Description of Artificial Sequence: Synthetic oligonucleotide
aucagcuacugcuugggua

SEQ ID NO: 2853266 - RNA, 19 nt, Artificial Sequence
  Description of Artificial Sequence: Synthetic oligonucleotide
cagugguuguucucgaguc

SEQ ID NO: 2853267 - RNA, 19 nt, Artificial Sequence
  Description of Artificial Sequence: Synthetic oligonucleotide
ucgagucugcuccuagaac

SEQ ID NO: 2853268 - RNA, 19 nt, Artificial Sequence
  Description of Artificial Sequence: Synthetic oligonucleotide
uacuagcggaggcucauuc

SEQ ID NO: 2853269 - RNA, 19 nt, Artificial Sequence
  Description of Artificial Sequence: Synthetic oligonucleotide
ugucagucacccgauuggc

SEQ ID NO: 2853270 - RNA, 19 nt, Artificial Sequence
  Description of Artificial Sequence: Synthetic oligonucleotide
gacuucccgguuuucccag

SEQ ID NO: 2853271 - RNA, 19 nt, Artificial Sequence
  Description of Artificial Sequence: Synthetic oligonucleotide
cuccaauggcaaacgacug

SEQ ID NO: 2853272 - RNA, 19 nt, Artificial Sequence
  Description of Artificial Sequence: Synthetic oligonucleotide
cuccauuaaacugcacagc

SEQ ID NO: 2853273 - RNA, 19 nt, Artificial Sequence
  Description of Artificial Sequence: Synthetic oligonucleotide
uguguacuagcggaggcuc

SEQ ID NO: 2853274 - RNA, 19 nt, Artificial Sequence
  Description of Artificial Sequence: Synthetic oligonucleotide
ucgauacuguggaacccca

SEQ ID NO: 2853275 - RNA, 19 nt, Artificial Sequence
  Description of Artificial Sequence: Synthetic oligonucleotide
auucagcucgauacugugg

SEQ ID NO: 2853276 - RNA, 19 nt, Artificial Sequence
  Description of Artificial Sequence: Synthetic oligonucleotide
uagaaccacgccuccauua

SEQ ID NO: 2853277 - RNA, 19 nt, Artificial Sequence
  Description of Artificial Sequence: Synthetic oligonucleotide
ucucuguaucgguaacaca

SEQ ID NO: 2853278 - RNA, 19 nt, Artificial Sequence
  Description of Artificial Sequence: Synthetic oligonucleotide
uguggagacuucccgguuu

SEQ ID NO: 2853279 - RNA, 19 nt, Artificial Sequence
  Description of Artificial Sequence: Synthetic oligonucleotide
agaaccacgccuccauuaa

SEQ ID NO: 2853280 - RNA, 19 nt, Artificial Sequence
  Description of Artificial Sequence: Synthetic oligonucleotide
uccggucauggauaggcgu

SEQ ID NO: 2853281 - RNA, 19 nt, Artificial Sequence
  Description of Artificial Sequence: Synthetic oligonucleotide
cgagucugcuccuagaacc

SEQ ID NO: 2853282 - RNA, 19 nt, Artificial Sequence
  Description of Artificial Sequence: Synthetic oligonucleotide
cucauucagcucgauacug

SEQ ID NO: 2853283 - RNA, 19 nt, Artificial Sequence
  Description of Artificial Sequence: Synthetic oligonucleotide
ccuuaaagagacuggcggc

SEQ ID NO: 2853284 - RNA, 19 nt, Artificial Sequence
  Description of Artificial Sequence: Synthetic oligonucleotide
agugguuguucucgagucu

SEQ ID NO: 2853285 - RNA, 19 nt, Artificial Sequence
  Description of Artificial Sequence: Synthetic oligonucleotide
uggauaggcgucagcuugu

SEQ ID NO: 2853286 - RNA, 19 nt, Artificial Sequence
  Description of Artificial Sequence: Synthetic oligonucleotide
ugguuguucucgagucugc

SEQ ID NO: 2853287 - RNA, 19 nt, Artificial Sequence
  Description of Artificial Sequence: Synthetic oligonucleotide
cgauuggcaauguaggacc

SEQ ID NO: 2853288 - RNA, 19 nt, Artificial Sequence
  Description of Artificial Sequence: Synthetic oligonucleotide
acuagcggaggcucauuca

SEQ ID NO: 2853289 - RNA, 19 nt, Artificial Sequence
  Description of Artificial Sequence: Synthetic oligonucleotide
agagacuggcggcugugug

SEQ ID NO: 2853290 - RNA, 19 nt, Artificial Sequence
  Description of Artificial Sequence: Synthetic oligonucleotide
uggcaaacgacugccuuac

SEQ ID NO: 2853291 - RNA, 19 nt, Artificial Sequence
  Description of Artificial Sequence: Synthetic oligonucleotide
agacuucccgguuuuccca

SEQ ID NO: 2853292 - RNA, 19 nt, Artificial Sequence
  Description of Artificial Sequence: Synthetic oligonucleotide
auguaggacccagugguug

SEQ ID NO: 2853293 - RNA, 19 nt, Artificial Sequence
  Description of Artificial Sequence: Synthetic oligonucleotide
cauuaaacugcacagccau

SEQ ID NO: 2853294 - RNA, 19 nt, Artificial Sequence
  Description of Artificial Sequence: Synthetic oligonucleotide
gguaagugacagcaucagc

SEQ ID NO: 2853295 - RNA, 19 nt, Artificial Sequence
  Description of Artificial Sequence: Synthetic oligonucleotide
gaucguggucccuguggag

SEQ ID NO: 2853296 - RNA, 19 nt, Artificial Sequence
  Description of Artificial Sequence: Synthetic oligonucleotide
uagcggaggcucauucagc

SEQ ID NO: 2853297 - RNA, 19 nt, Artificial Sequence
  Description of Artificial Sequence: Synthetic oligonucleotide
cuacugcuuggguaucagc

SEQ ID NO: 2853298 - RNA, 19 nt, Artificial Sequence
  Description of Artificial Sequence: Synthetic oligonucleotide
ucucgagucugcuccuaga

SEQ ID NO: 2853299 - RNA, 19 nt, Artificial Sequence
  Description of Artificial Sequence: Synthetic oligonucleotide
cuguguguacuagcggagg

SEQ ID NO: 2853300 - RNA, 19 nt, Artificial Sequence
  Description of Artificial Sequence: Synthetic oligonucleotide
ugagcggcagcagaagauc

SEQ ID NO: 2853301 - RNA, 19 nt, Artificial Sequence
  Description of Artificial Sequence: Synthetic oligonucleotide
gaagauccggucauggaua

SEQ ID NO: 2853302 - RNA, 19 nt, Artificial Sequence
  Description of Artificial Sequence: Synthetic oligonucleotide
ucuggggcgagagccuccg

SEQ ID NO: 2853303 - RNA, 19 nt, Artificial Sequence
  Description of Artificial Sequence: Synthetic oligonucleotide
agcggcugagccugagcgg

SEQ ID NO: 2853304 - RNA, 19 nt, Artificial Sequence
  Description of Artificial Sequence: Synthetic oligonucleotide
ugcuuggguaucagcggcu

SEQ ID NO: 2853305 - RNA, 19 nt, Artificial Sequence
  Description of Artificial Sequence: Synthetic oligonucleotide
acacaucuccuuaaagaga

SEQ ID NO: 2853306 - RNA, 19 nt, Artificial Sequence
  Description of Artificial Sequence: Synthetic oligonucleotide
gccuccauuaaacugcaca

SEQ ID NO: 2853307 - RNA, 19 nt, Artificial Sequence
  Description of Artificial Sequence: Synthetic oligonucleotide
uaggcgucagcuugucagu

SEQ ID NO: 2853308 - RNA, 19 nt, Artificial Sequence
  Description of Artificial Sequence: Synthetic oligonucleotide
augauuccugccaucagau

SEQ ID NO: 2853309 - RNA, 19 nt, Artificial Sequence
  Description of Artificial Sequence: Synthetic oligonucleotide
gucugcuccuagaaccacg

SEQ ID NO: 2853310 - RNA, 19 nt, Artificial Sequence
  Description of Artificial Sequence: Synthetic oligonucleotide
guuguucucgagucugcuc

SEQ ID NO: 2853311 - RNA, 19 nt, Artificial Sequence
  Description of Artificial Sequence: Synthetic oligonucleotide
gcaaacgacugccuuacca

SEQ ID NO: 2853312 - RNA, 19 nt, Artificial Sequence
  Description of Artificial Sequence: Synthetic oligonucleotide
uguucucgagucugcuccu

SEQ ID NO: 2853313 - RNA, 19 nt, Artificial Sequence
  Description of Artificial Sequence: Synthetic oligonucleotide
ggcuguguguacuagcgga

SEQ ID NO: 2853314 - RNA, 19 nt, Artificial Sequence
  Description of Artificial Sequence: Synthetic oligonucleotide
aucguggucccuguggaga

SEQ ID NO: 2853315 - RNA, 19 nt, Artificial Sequence
  Description of Artificial Sequence: Synthetic oligonucleotide
ccaauggcaaacgacugcc

SEQ ID NO: 2853316 - RNA, 19 nt, Artificial Sequence
  Description of Artificial Sequence: Synthetic oligonucleotide
gcagaagauccggucaugg

SEQ ID NO: 2853317 - RNA, 19 nt, Artificial Sequence
  Description of Artificial Sequence: Synthetic oligonucleotide
auuaaacugcacagccaug

SEQ ID NO: 2853318 - RNA, 19 nt, Artificial Sequence
  Description of Artificial Sequence: Synthetic oligonucleotide
agucugcuccuagaaccac

SEQ ID NO: 2853319 - RNA, 19 nt, Artificial Sequence
  Description of Artificial Sequence: Synthetic oligonucleotide
uguacuagcggaggcucau

SEQ ID NO: 2853320 - RNA, 19 nt, Artificial Sequence
  Description of Artificial Sequence: Synthetic oligonucleotide
cuugagggucccagccugc

SEQ ID NO: 2853321 - RNA, 19 nt, Artificial Sequence
  Description of Artificial Sequence: Synthetic oligonucleotide
cugggaacugaguacaccu

SEQ ID NO: 2853322 - RNA, 19 nt, Artificial Sequence
  Description of Artificial Sequence: Synthetic oligonucleotide
ucguggucccuguggagac

SEQ ID NO: 2853323 - RNA, 19 nt, Artificial Sequence
  Description of Artificial Sequence: Synthetic oligonucleotide
cagcucgauacuguggaac

SEQ ID NO: 2853324 - RNA, 19 nt, Artificial Sequence
  Description of Artificial Sequence: Synthetic oligonucleotide
agccugcaaugaugauucc

SEQ ID NO: 2853325 - RNA, 19 nt, Artificial Sequence
  Description of Artificial Sequence: Synthetic oligonucleotide
uucccgguuuucccagucu

SEQ ID NO: 2853326 - RNA, 19 nt, Artificial Sequence
  Description of Artificial Sequence: Synthetic oligonucleotide
aggacccagugguuguucu

SEQ ID NO: 2853327 - RNA, 19 nt, Artificial Sequence
  Description of Artificial Sequence: Synthetic oligonucleotide
aagagacuggcggcugugu

SEQ ID NO: 2853328 - RNA, 19 nt, Artificial Sequence
  Description of Artificial Sequence: Synthetic oligonucleotide
ccagucuggggcgagagcc

SEQ ID NO: 2853329 - RNA, 19 nt, Artificial Sequence
  Description of Artificial Sequence: Synthetic oligonucleotide
gagagccuccggcccaaag

SEQ ID NO: 2853330 - RNA, 19 nt, Artificial Sequence
  Description of Artificial Sequence: Synthetic oligonucleotide
gcucccagagccuccaaug

SEQ ID NO: 2853331 - RNA, 19 nt, Artificial Sequence
  Description of Artificial Sequence: Synthetic oligonucleotide
cggaggcucauucagcucg

SEQ ID NO: 2853332 - RNA, 19 nt, Artificial Sequence
  Description of Artificial Sequence: Synthetic oligonucleotide
augagcucccagagccucc

SEQ ID NO: 2853333 - RNA, 19 nt, Artificial Sequence
  Description of Artificial Sequence: Synthetic oligonucleotide
agcggcagcagaagauccg

SEQ ID NO: 2853334 - RNA, 19 nt, Artificial Sequence
  Description of Artificial Sequence: Synthetic oligonucleotide
ccugauagguagcaucaac

SEQ ID NO: 2853335 - RNA, 19 nt, Artificial Sequence
  Description of Artificial Sequence: Synthetic oligonucleotide
aauguaggacccagugguu

SEQ ID NO: 2853336 - RNA, 19 nt, Artificial Sequence
  Description of Artificial Sequence: Synthetic oligonucleotide
ggguaucagcggcugagcc

SEQ ID NO: 2853337 - RNA, 19 nt, Artificial Sequence
  Description of Artificial Sequence: Synthetic oligonucleotide
gucauggauaggcgucagc

SEQ ID NO: 2853338 - RNA, 19 nt, Artificial Sequence
  Description of Artificial Sequence: Synthetic oligonucleotide
uggguaucagcggcugagc

SEQ ID NO: 2853339 - RNA, 19 nt, Artificial Sequence
  Description of Artificial Sequence: Synthetic oligonucleotide
gcagcagaagauccgguca

SEQ ID NO: 2853340 - RNA, 19 nt, Artificial Sequence
  Description of Artificial Sequence: Synthetic oligonucleotide
uggcaauguaggacccagu

SEQ ID NO: 2853341 - RNA, 19 nt, Artificial Sequence
  Description of Artificial Sequence: Synthetic oligonucleotide
ggaacugaguacaccugcc

SEQ ID NO: 2853342 - RNA, 19 nt, Artificial Sequence
  Description of Artificial Sequence: Synthetic oligonucleotide
gagucugcuccuagaacca

SEQ ID NO: 2853343 - RNA, 19 nt, Artificial Sequence
  Description of Artificial Sequence: Synthetic oligonucleotide
cuuaaagagacuggcggcu

SEQ ID NO: 2853344 - RNA, 19 nt, Artificial Sequence
  Description of Artificial Sequence: Synthetic oligonucleotide
gauaggcgucagcuuguca

SEQ ID NO: 2853345 - RNA, 19 nt, Artificial Sequence
  Description of Artificial Sequence: Synthetic oligonucleotide
caaacgacugccuuaccau

SEQ ID NO: 2853346 - RNA, 19 nt, Artificial Sequence
  Description of Artificial Sequence: Synthetic oligonucleotide
agucacccgauuggcaaug

SEQ ID NO: 2853347 - RNA, 19 nt, Artificial Sequence
  Description of Artificial Sequence: Synthetic oligonucleotide
ggagacuucccgguuuucc

SEQ ID NO: 2853348 - RNA, 19 nt, Artificial Sequence
  Description of Artificial Sequence: Synthetic oligonucleotide
agucuggggcgagagccuc

SEQ ID NO: 2853349 - RNA, 19 nt, Artificial Sequence
  Description of Artificial Sequence: Synthetic oligonucleotide
gcggcuguguguacuagcg

SEQ ID NO: 2853350 - RNA, 19 nt, Artificial Sequence
  Description of Artificial Sequence: Synthetic oligonucleotide
ucagcucgauacuguggaa

SEQ ID NO: 2853351 - RNA, 19 nt, Artificial Sequence
  Description of Artificial Sequence: Synthetic oligonucleotide
caucaacauagccauagau

SEQ ID NO: 2853352 - RNA, 19 nt, Artificial Sequence
  Description of Artificial Sequence: Synthetic oligonucleotide
ugagcucccagagccucca

SEQ ID NO: 2853353 - RNA, 19 nt, Artificial Sequence
  Description of Artificial Sequence: Synthetic oligonucleotide
uuuucccagucuggggcga

SEQ ID NO: 2853354 - RNA, 19 nt, Artificial Sequence
  Description of Artificial Sequence: Synthetic oligonucleotide
gaucuucucuguaucggua

SEQ ID NO: 2853355 - RNA, 19 nt, Artificial Sequence
  Description of Artificial Sequence: Synthetic oligonucleotide
uccuagaaccacgccucca

SEQ ID NO: 2853356 - RNA, 19 nt, Artificial Sequence
  Description of Artificial Sequence: Synthetic oligonucleotide
cagaagauccggucaugga

SEQ ID NO: 2853357 - RNA, 19 nt, Artificial Sequence
  Description of Artificial Sequence: Synthetic oligonucleotide
gagccugagcggcagcaga

SEQ ID NO: 2853358 - RNA, 19 nt, Artificial Sequence
  Description of Artificial Sequence: Synthetic oligonucleotide
cuccuagaaccacgccucc

SEQ ID NO: 2853359 - RNA, 19 nt, Artificial Sequence
  Description of Artificial Sequence: Synthetic oligonucleotide
gucccagccugcaaugaug

SEQ ID NO: 2853360 - RNA, 19 nt, Artificial Sequence
  Description of Artificial Sequence: Synthetic oligonucleotide
aggcgucagcuugucaguc

SEQ ID NO: 2853361 - RNA, 19 nt, Artificial Sequence
  Description of Artificial Sequence: Synthetic oligonucleotide
caugaucguggucccugug

SEQ ID NO: 2853362 - RNA, 19 nt, Artificial Sequence
  Description of Artificial Sequence: Synthetic oligonucleotide
gagacuggcggcugugugu

SEQ ID NO: 2853363 - RNA, 19 nt, Artificial Sequence
  Description of Artificial Sequence: Synthetic oligonucleotide
auccggucauggauaggcg

SEQ ID NO: 2853364 - RNA, 19 nt, Artificial Sequence
  Description of Artificial Sequence: Synthetic oligonucleotide
cucgagucugcuccuagaa

SEQ ID NO: 2853365 - RNA, 19 nt, Artificial Sequence
  Description of Artificial Sequence: Synthetic oligonucleotide
uacaccugcccuccuucuu

SEQ ID NO: 2853366 - RNA, 19 nt, Artificial Sequence
  Description of Artificial Sequence: Synthetic oligonucleotide
ugaguacaccugcccuccu

SEQ ID NO: 2853367 - RNA, 19 nt, Artificial Sequence
  Description of Artificial Sequence: Synthetic oligonucleotide
cccacugggaacugaguac

SEQ ID NO: 2853368 - RNA, 19 nt, Artificial Sequence
  Description of Artificial Sequence: Synthetic oligonucleotide
cagccaugaucgugguccc

SEQ ID NO: 2853369 - RNA, 19 nt, Artificial Sequence
  Description of Artificial Sequence: Synthetic oligonucleotide
cugcacagccaugaucgug

SEQ ID NO: 2853370 - RNA, 19 nt, Artificial Sequence
  Description of Artificial Sequence: Synthetic oligonucleotide
cuguaucgguaacacaucu

SEQ ID NO: 2853371 - RNA, 19 nt, Artificial Sequence
  Description of Artificial Sequence: Synthetic oligonucleotide
ugagggucccagccugcaa

SEQ ID NO: 2853372 - RNA, 19 nt, Artificial Sequence
  Description of Artificial Sequence: Synthetic oligonucleotide
cacugggaacugaguacac

SEQ ID NO: 2853373 - RNA, 19 nt, Artificial Sequence
  Description of Artificial Sequence: Synthetic oligonucleotide
uugagggucccagccugca

SEQ ID NO: 2853374 - RNA, 19 nt, Artificial Sequence
  Description of Artificial Sequence: Synthetic oligonucleotide
gccauagauauaugagcuc

SEQ ID NO: 2853375 - RNA, 19 nt, Artificial Sequence
  Description of Artificial Sequence: Synthetic oligonucleotide
acgacugccuuaccaucau

SEQ ID NO: 2853376 - RNA, 19 nt, Artificial Sequence
  Description of Artificial Sequence: Synthetic oligonucleotide
caucagaucuucucuguau

SEQ ID NO: 2853377 - RNA, 19 nt, Artificial Sequence
  Description of Artificial Sequence: Synthetic oligonucleotide
cccuguggagacuucccgg

SEQ ID NO: 2853378 - RNA, 19 nt, Artificial Sequence
  Description of Artificial Sequence: Synthetic oligonucleotide
cuucccgguuuucccaguc

SEQ ID NO: 2853379 - RNA, 19 nt, Artificial Sequence
  Description of Artificial Sequence: Synthetic oligonucleotide
ucacccgauuggcaaugua

SEQ ID NO: 2853380 - RNA, 19 nt, Artificial Sequence
  Description of Artificial Sequence: Synthetic oligonucleotide
agccuccaauggcaaacga

SEQ ID NO: 2853381 - RNA, 19 nt, Artificial Sequence
  Description of Artificial Sequence: Synthetic oligonucleotide
gaaccccagcugguaagug

SEQ ID NO: 2853382 - RNA, 19 nt, Artificial Sequence
  Description of Artificial Sequence: Synthetic oligonucleotide
ccgauuggcaauguaggac

SEQ ID NO: 2853383 - RNA, 19 nt, Artificial Sequence
  Description of Artificial Sequence: Synthetic oligonucleotide
gaaccacgccuccauuaaa

SEQ ID NO: 2853384 - RNA, 19 nt, Artificial Sequence
  Description of Artificial Sequence: Synthetic oligonucleotide
agcucccagagccuccaau

SEQ ID NO: 2853385 - RNA, 19 nt, Artificial Sequence
  Description of Artificial Sequence: Synthetic oligonucleotide
acuggcggcuguguguacu

SEQ ID NO: 2853386 - RNA, 19 nt, Artificial Sequence
  Description of Artificial Sequence: Synthetic oligonucleotide
gcuguguguacuagcggag

SEQ ID NO: 2853387 - RNA, 19 nt, Artificial Sequence
  Description of Artificial Sequence: Synthetic oligonucleotide
uccugauagguagcaucaa

SEQ ID NO: 2853388 - RNA, 19 nt, Artificial Sequence
  Description of Artificial Sequence: Synthetic oligonucleotide
caacauagccauagauaua

SEQ ID NO: 2853389 - RNA, 19 nt, Artificial Sequence
  Description of Artificial Sequence: Synthetic oligonucleotide
uccugccaucagaucuucu

SEQ ID NO: 2853390 - RNA, 19 nt, Artificial Sequence
  Description of Artificial Sequence: Synthetic oligonucleotide
acauagccauagauauaug

SEQ ID NO: 2853391 - RNA, 19 nt, Artificial Sequence
  Description of Artificial Sequence: Synthetic oligonucleotide
auaugagcucccagagccu

SEQ ID NO: 2853392 - RNA, 19 nt, Artificial Sequence
  Description of Artificial Sequence: Synthetic oligonucleotide
agauccggucauggauagg

SEQ ID NO: 2853393 - RNA, 19 nt, Artificial Sequence
  Description of Artificial Sequence: Synthetic oligonucleotide
gcuccuagaaccacgccuc

SEQ ID NO: 2853394 - RNA, 19 nt, Artificial Sequence
  Description of Artificial Sequence: Synthetic oligonucleotide
ccuccaauggcaaacgacu

SEQ ID NO: 2853395 - RNA, 19 nt, Artificial Sequence
  Description of Artificial Sequence: Synthetic oligonucleotide
acccagugguuguucucga

SEQ ID NO: 2853396 - RNA, 19 nt, Artificial Sequence
  Description of Artificial Sequence: Synthetic oligonucleotide
cugcuccuagaaccacgcc

SEQ ID NO: 2853397 - RNA, 19 nt, Artificial Sequence
  Description of Artificial Sequence: Synthetic oligonucleotide
aggcucauucagcucgaua

SEQ ID NO: 2853398 - RNA, 19 nt, Artificial Sequence
  Description of Artificial Sequence: Synthetic oligonucleotide
agcuacugcuuggguauca

SEQ ID NO: 2853399 - RNA, 19 nt, Artificial Sequence
  Description of Artificial Sequence: Synthetic oligonucleotide
ccauuaaacugcacagcca

SEQ ID NO: 2853400 - RNA, 19 nt, Artificial Sequence
  Description of Artificial Sequence: Synthetic oligonucleotide
gagggucccagccugcaau

SEQ ID NO: 2853401 - RNA, 19 nt, Artificial Sequence
  Description of Artificial Sequence: Synthetic oligonucleotide
acuucccgguuuucccagu

SEQ ID NO: 2853402 - RNA, 19 nt, Artificial Sequence
  Description of Artificial Sequence: Synthetic oligonucleotide
gcggcagcagaagauccgg

SEQ ID NO: 2853403 - RNA, 19 nt, Artificial Sequence
  Description of Artificial Sequence: Synthetic oligonucleotide
ccgguuuucccagucuggg

SEQ ID NO: 2853404 - RNA, 19 nt, Artificial Sequence
  Description of Artificial Sequence: Synthetic oligonucleotide
gccuccggcccaaaggccg

SEQ ID NO: 2853405 - RNA, 19 nt, Artificial Sequence
  Description of Artificial Sequence: Synthetic oligonucleotide
cccgguuuucccagucugg

SEQ ID NO: 2853406 - RNA, 19 nt, Artificial Sequence
  Description of Artificial Sequence: Synthetic oligonucleotide
ggcggcuguguguacuagc

SEQ ID NO: 2853407 - RNA, 19 nt, Artificial Sequence
  Description of Artificial Sequence: Synthetic oligonucleotide
guggaaccccagcugguaa

SEQ ID NO: 2853408 - RNA, 19 nt, Artificial Sequence
  Description of Artificial Sequence: Synthetic oligonucleotide
uaggacccagugguuguuc

SEQ ID NO: 2853409 - RNA, 19 nt, Artificial Sequence
  Description of Artificial Sequence: Synthetic oligonucleotide
uagcaucaacauagccaua

SEQ ID NO: 2853410 - RNA, 19 nt, Artificial Sequence
  Description of Artificial Sequence: Synthetic oligonucleotide
gccaugaucguggucccug

SEQ ID NO: 2853411 - RNA, 19 nt, Artificial Sequence
  Description of Artificial Sequence: Synthetic oligonucleotide
ggucccuguggagacuucc

SEQ ID NO: 2853412 - RNA, 19 nt, Artificial Sequence
  Description of Artificial Sequence: Synthetic oligonucleotide
gucagucacccgauuggca

SEQ ID NO: 2853413 - RNA, 19 nt, Artificial Sequence
  Description of Artificial Sequence: Synthetic oligonucleotide
gguaucagcggcugagccu

SEQ ID NO: 2853414 - RNA, 19 nt, Artificial Sequence
  Description of Artificial Sequence: Synthetic oligonucleotide
gcuacugcuuggguaucag

SEQ ID NO: 2853415 - RNA, 19 nt, Artificial Sequence
  Description of Artificial Sequence: Synthetic oligonucleotide
uaucagcggcugagccuga

SEQ ID NO: 2853416 - RNA, 19 nt, Artificial Sequence
  Description of Artificial Sequence: Synthetic oligonucleotide
ccggucauggauaggcguc

SEQ ID NO: 2853417 - RNA, 19 nt, Artificial Sequence
  Description of Artificial Sequence: Synthetic oligonucleotide
uggcggcuguguguacuag

SEQ ID NO: 2853418 - RNA, 19 nt, Artificial Sequence
  Description of Artificial Sequence: Synthetic oligonucleotide
gccuccaauggcaaacgac

SEQ ID NO: 2853419 - RNA, 19 nt, Artificial Sequence
  Description of Artificial Sequence: Synthetic oligonucleotide
cuuggguaucagcggcuga

SEQ ID NO: 2853420 - RNA, 19 nt, Artificial Sequence
  Description of Artificial Sequence: Synthetic oligonucleotide
gcaucaacauagccauaga

SEQ ID NO: 2853421 - RNA, 19 nt, Artificial Sequence
  Description of Artificial Sequence: Synthetic oligonucleotide
gcucgauacuguggaaccc

SEQ ID NO: 2853422 - RNA, 19 nt, Artificial Sequence
  Description of Artificial Sequence: Synthetic oligonucleotide
gcggcugagccugagcggc

SEQ ID NO: 2853423 - RNA, 19 nt, Artificial Sequence
  Description of Artificial Sequence: Synthetic oligonucleotide
aucagcggcugagccugag

SEQ ID NO: 2853424 - RNA, 19 nt, Artificial Sequence
  Description of Artificial Sequence: Synthetic oligonucleotide
cugagccugagcggcagca

SEQ ID NO: 2853425 - RNA, 19 nt, Artificial Sequence
  Description of Artificial Sequence: Synthetic oligonucleotide
cacagccaugaucgugguc

SEQ ID NO: 2853426 - RNA, 19 nt, Artificial Sequence
  Description of Artificial Sequence: Synthetic oligonucleotide
agcuugucagucacccgau

SEQ ID NO: 2853427 - RNA, 19 nt, Artificial Sequence
  Description of Artificial Sequence: Synthetic oligonucleotide
gcuuggguaucagcggcug

SEQ ID NO: 2853428 - RNA, 19 nt, Artificial Sequence
  Description of Artificial Sequence: Synthetic oligonucleotide
acgccuccauuaaacugca

SEQ ID NO: 2853429 - RNA, 19 nt, Artificial Sequence
  Description of Artificial Sequence: Synthetic oligonucleotide
ggucauggauaggcgucag

SEQ ID NO: 2853430 - RNA, 19 nt, Artificial Sequence
  Description of Artificial Sequence: Synthetic oligonucleotide
uucccagucuggggcgaga

SEQ ID NO: 2853431 - RNA, 19 nt, Artificial Sequence
  Description of Artificial Sequence: Synthetic oligonucleotide
ggcgucagcuugucaguca

SEQ ID NO: 2853432 - RNA, 19 nt, Artificial Sequence
  Description of Artificial Sequence: Synthetic oligonucleotide
guguguacuagcggaggcu

SEQ ID NO: 2853433 - RNA, 19 nt, Artificial Sequence
  Description of Artificial Sequence: Synthetic oligonucleotide
guguacuagcggaggcuca

SEQ ID NO: 2853434 - RNA, 19 nt, Artificial Sequence
  Description of Artificial Sequence: Synthetic oligonucleotide
cgguuuucccagucugggg

SEQ ID NO: 2853435 - RNA, 19 nt, Artificial Sequence
  Description of Artificial Sequence: Synthetic oligonucleotide
uggagacuucccgguuuuc

SEQ ID NO: 2853436 - RNA, 19 nt, Artificial Sequence
  Description of Artificial Sequence: Synthetic oligonucleotide
gggcgagagccuccggccc

SEQ ID NO: 2853437 - RNA, 19 nt, Artificial Sequence
  Description of Artificial Sequence: Synthetic oligonucleotide
caauggcaaacgacugccu

SEQ ID NO: 2853438 - RNA, 19 nt, Artificial Sequence
  Description of Artificial Sequence: Synthetic oligonucleotide
ccacugggaacugaguaca

SEQ ID NO: 2853439 - RNA, 19 nt, Artificial Sequence
  Description of Artificial Sequence: Synthetic oligonucleotide
cauggauaggcgucagcuu

SEQ ID NO: 2853440 - RNA, 19 nt, Artificial Sequence
  Description of Artificial Sequence: Synthetic oligonucleotide
cccgauuggcaauguagga

SEQ ID NO: 2853441 - RNA, 19 nt, Artificial Sequence
  Description of Artificial Sequence: Synthetic oligonucleotide
gcucauucagcucgauacu

SEQ ID NO: 2853442 - RNA, 19 nt, Artificial Sequence
  Description of Artificial Sequence: Synthetic oligonucleotide
gacuggcggcuguguguac

SEQ ID NO: 2853443 - RNA, 19 nt, Artificial Sequence
  Description of Artificial Sequence: Synthetic oligonucleotide
agcugguaagugacagcau

SEQ ID NO: 2853444 - RNA, 19 nt, Artificial Sequence
  Description of Artificial Sequence: Synthetic oligonucleotide
uccggcccaaaggccggug

SEQ ID NO: 2853445 - RNA, 19 nt, Artificial Sequence
  Description of Artificial Sequence: Synthetic oligonucleotide
ggcaaacgacugccuuacc

SEQ ID NO: 2853446 - RNA, 19 nt, Artificial Sequence
  Description of Artificial Sequence: Synthetic oligonucleotide
gaguacaccugcccuccuu

SEQ ID NO: 2853447 - RNA, 19 nt, Artificial Sequence
  Description of Artificial Sequence: Synthetic oligonucleotide
cagagccuccaauggcaaa

SEQ ID NO: 2853448 - RNA, 19 nt, Artificial Sequence
  Description of Artificial Sequence: Synthetic oligonucleotide
gucuggggcgagagccucc

SEQ ID NO: 2853449 - RNA, 19 nt, Artificial Sequence
  Description of Artificial Sequence: Synthetic oligonucleotide
ccuccggcccaaaggccgg

SEQ ID NO: 2853450 - RNA, 19 nt, Artificial Sequence
  Description of Artificial Sequence: Synthetic oligonucleotide
cgauacuguggaaccccag

SEQ ID NO: 2853451 - RNA, 19 nt, Artificial Sequence
  Description of Artificial Sequence: Synthetic oligonucleotide
ggcugagccugagcggcag

SEQ ID NO: 2853452 - RNA, 19 nt, Artificial Sequence
  Description of Artificial Sequence: Synthetic oligonucleotide
cuggggcgagagccuccgg

SEQ ID NO: 2853453 - RNA, 19 nt, Artificial Sequence
  Description of Artificial Sequence: Synthetic oligonucleotide
ccugagcggcagcagaaga

SEQ ID NO: 2853454 - RNA, 19 nt, Artificial Sequence
  Description of Artificial Sequence: Synthetic oligonucleotide
cuggcggcuguguguacua

SEQ ID NO: 2853455 - RNA, 19 nt, Artificial Sequence
  Description of Artificial Sequence: Synthetic oligonucleotide
agccaugaucguggucccu

SEQ ID NO: 2853456 - RNA, 19 nt, Artificial Sequence
  Description of Artificial Sequence: Synthetic oligonucleotide
gcugagccugagcggcagc

SEQ ID NO: 2853457 - RNA, 19 nt, Artificial Sequence
  Description of Artificial Sequence: Synthetic oligonucleotide
ggauaggcgucagcuuguc

SEQ ID NO: 2853458 - RNA, 19 nt, Artificial Sequence
  Description of Artificial Sequence: Synthetic oligonucleotide
cagcuacugcuuggguauc

SEQ ID NO: 2853459 - RNA, 19 nt, Artificial Sequence
  Description of Artificial Sequence: Synthetic oligonucleotide
cggcuguguguacuagcgg

SEQ ID NO: 2853460 - RNA, 19 nt, Artificial Sequence
  Description of Artificial Sequence: Synthetic oligonucleotide
ccggcccaaaggccggugc

SEQ ID NO: 2853461 - RNA, 19 nt, Artificial Sequence
  Description of Artificial Sequence: Synthetic oligonucleotide
ccagugguuguucucgagu

SEQ ID NO: 2853462 - RNA, 19 nt, Artificial Sequence
  Description of Artificial Sequence: Synthetic oligonucleotide
cuagaaccacgccuccauu

SEQ ID NO: 2853463 - RNA, 19 nt, Artificial Sequence
  Description of Artificial Sequence: Synthetic oligonucleotide
cccagucuggggcgagagc

SEQ ID NO: 2853464 - RNA, 19 nt, Artificial Sequence
  Description of Artificial Sequence: Synthetic oligonucleotide
ggaggcucauucagcucga

SEQ ID NO: 2853465 - RNA, 19 nt, Artificial Sequence
  Description of Artificial Sequence: Synthetic oligonucleotide
ccaucagaucuucucugua

SEQ ID NO: 2853466 - RNA, 19 nt, Artificial Sequence
  Description of Artificial Sequence: Synthetic oligonucleotide
cagucuggggcgagagccu

SEQ ID NO: 2853467 - RNA, 19 nt, Artificial Sequence
  Description of Artificial Sequence: Synthetic oligonucleotide
cagucacccgauuggcaau

SEQ ID NO: 2853468 - RNA, 19 nt, Artificial Sequence
  Description of Artificial Sequence: Synthetic oligonucleotide
gcggaggcucauucagcuc

SEQ ID NO: 2853469 - RNA, 19 nt, Artificial Sequence
  Description of Artificial Sequence: Synthetic oligonucleotide
ccuagaaccacgccuccau

SEQ ID NO: 2853470 - RNA, 19 nt, Artificial Sequence
  Description of Artificial Sequence: Synthetic oligonucleotide
ggaaccccagcugguaagu

SEQ ID NO: 2853471 - RNA, 19 nt, Artificial Sequence
  Description of Artificial Sequence: Synthetic oligonucleotide
ggucccagccugcaaugau

SEQ ID NO: 2853472 - RNA, 19 nt, Artificial Sequence
  Description of Artificial Sequence: Synthetic oligonucleotide
gcccaaaggccggugcaga

SEQ ID NO: 2853473 - RNA, 19 nt, Artificial Sequence
  Description of Artificial Sequence: Synthetic oligonucleotide
cgguaacacaucuccuuaa

SEQ ID NO: 2853474 - RNA, 19 nt, Artificial Sequence
  Description of Artificial Sequence: Synthetic oligonucleotide
guggucccuguggagacuu

SEQ ID NO: 2853475 - RNA, 19 nt, Artificial Sequence
  Description of Artificial Sequence: Synthetic oligonucleotide
gggucccagccugcaauga

SEQ ID NO: 2853476 - RNA, 19 nt, Artificial Sequence
  Description of Artificial Sequence: Synthetic oligonucleotide
cuguggagacuucccgguu

SEQ ID NO: 2853477 - RNA, 19 nt, Artificial Sequence
  Description of Artificial Sequence: Synthetic oligonucleotide
ccagccugcaaugaugauu

SEQ ID NO: 2853478 - RNA, 19 nt, Artificial Sequence
  Description of Artificial Sequence: Synthetic oligonucleotide
guaggacccagugguuguu

SEQ ID NO: 2853479 - RNA, 19 nt, Artificial Sequence
  Description of Artificial Sequence: Synthetic oligonucleotide
gaggcucauucagcucgau

SEQ ID NO: 2853480 - RNA, 19 nt, Artificial Sequence
  Description of Artificial Sequence: Synthetic oligonucleotide
ccaugaucguggucccugu

SEQ ID NO: 2853481 - RNA, 19 nt, Artificial Sequence
  Description of Artificial Sequence: Synthetic oligonucleotide
guacuagcggaggcucauu

SEQ ID NO: 2853482 - RNA, 19 nt, Artificial Sequence
  Description of Artificial Sequence: Synthetic oligonucleotide
cggucauggauaggcguca

SEQ ID NO: 2853483 - RNA, 19 nt, Artificial Sequence
  Description of Artificial Sequence: Synthetic oligonucleotide
cgccuccauuaaacugcac

SEQ ID NO: 2853484 - RNA, 19 nt, Artificial Sequence
  Description of Artificial Sequence: Synthetic oligonucleotide
ccuuccugauagguagcau

SEQ ID NO: 2853485 - RNA, 19 nt, Artificial Sequence
  Description of Artificial Sequence: Synthetic oligonucleotide
cgacugccuuaccaucaua

SEQ ID NO: 2853486 - RNA, 19 nt, Artificial Sequence
  Description of Artificial Sequence: Synthetic oligonucleotide
cuccggcccaaaggccggu

SEQ ID NO: 2853487 - RNA, 19 nt, Artificial Sequence
  Description of Artificial Sequence: Synthetic oligonucleotide
cccagccugcaaugaugau

SEQ ID NO: 2853488 - RNA, 19 nt, Artificial Sequence
  Description of Artificial Sequence: Synthetic oligonucleotide
cguggucccuguggagacu

SEQ ID NO: 2853489 - RNA, 19 nt, Artificial Sequence
  Description of Artificial Sequence: Synthetic oligonucleotide
cgagagccuccggcccaaa

SEQ ID NO: 2853490 - RNA, 19 nt, Artificial Sequence
  Description of Artificial Sequence: Synthetic oligonucleotide
ucauaaaagggauucaugg

SEQ ID NO: 2853491 - RNA, 19 nt, Artificial Sequence
  Description of Artificial Sequence: Synthetic oligonucleotide
aaugcauauacuccugagc

SEQ ID NO: 2853492 - RNA, 19 nt, Artificial Sequence
  Description of Artificial Sequence: Synthetic oligonucleotide
uaagucauagacaucagug

SEQ ID NO: 2853493 - RNA, 19 nt, Artificial Sequence
  Description of Artificial Sequence: Synthetic oligonucleotide
uucaaguacauguuguugg

SEQ ID NO: 2853494 - RNA, 19 nt, Artificial Sequence
  Description of Artificial Sequence: Synthetic oligonucleotide
acaguuuucaaguacaugu

SEQ ID NO: 2853495 - RNA, 19 nt, Artificial Sequence
  Description of Artificial Sequence: Synthetic oligonucleotide
ucucaaaugcacuggaucg

SEQ ID NO: 2853496 - RNA, 19 nt, Artificial Sequence
  Description of Artificial Sequence: Synthetic oligonucleotide
uaucaagcuacucacaaug

SEQ ID NO: 2853497 - RNA, 19 nt, Artificial Sequence
  Description of Artificial Sequence: Synthetic oligonucleotide
cuugauuccaucuucuugc

SEQ ID NO: 2853498 - RNA, 19 nt, Artificial Sequence
  Description of Artificial Sequence: Synthetic oligonucleotide
uucauggcaaacuugaugu

SEQ ID NO: 2853499 - RNA, 19 nt, Artificial Sequence
  Description of Artificial Sequence: Synthetic oligonucleotide
uuagcuuacaagauguucu

SEQ ID NO: 2853500 - RNA, 19 nt, Artificial Sequence
  Description of Artificial Sequence: Synthetic oligonucleotide
ugaagcaugaugaaucuca

SEQ ID NO: 2853501 - RNA, 19 nt, Artificial Sequence
  Description of Artificial Sequence: Synthetic oligonucleotide
guuuucgucaaccaggucc

SEQ ID NO: 2853502 - RNA, 19 nt, Artificial Sequence
  Description of Artificial Sequence: Synthetic oligonucleotide
agcaugaugaaucucaugu

SEQ ID NO: 2853503 - RNA, 19 nt, Artificial Sequence
  Description of Artificial Sequence: Synthetic oligonucleotide
ugagcuaugaacugguuca

SEQ ID NO: 2853504 - RNA, 19 nt, Artificial Sequence
  Description of Artificial Sequence: Synthetic oligonucleotide
guggccaacaauuacaaag

SEQ ID NO: 2853505 - RNA, 19 nt, Artificial Sequence
  Description of Artificial Sequence: Synthetic oligonucleotide
acucacaaugcauauacuc

SEQ ID NO: 2853506 - RNA, 19 nt, Artificial Sequence
  Description of Artificial Sequence: Synthetic oligonucleotide
auaaaagggauucauggca

SEQ ID NO: 2853507 - RNA, 19 nt, Artificial Sequence
  Description of Artificial Sequence: Synthetic oligonucleotide
ucugcauuuagcuuacaag

SEQ ID NO: 2853508 - RNA, 19 nt, Artificial Sequence
  Description of Artificial Sequence: Synthetic oligonucleotide
aaugcacuggaucgaauag

SEQ ID NO: 2853509 - RNA, 19 nt, Artificial Sequence
  Description of Artificial Sequence: Synthetic oligonucleotide
uuuaucaagcuacucacaa

SEQ ID NO: 2853510 - RNA, 19 nt, Artificial Sequence
  Description of Artificial Sequence: Synthetic oligonucleotide
cucacaaugcauauacucc

SEQ ID NO: 2853511 - RNA, 19 nt, Artificial Sequence
  Description of Artificial Sequence: Synthetic oligonucleotide
ucgaauaggagaauugggu

SEQ ID NO: 2853512 - RNA, 19 nt, Artificial Sequence
  Description of Artificial Sequence: Synthetic oligonucleotide
uauacuccugagcauaccc

SEQ ID NO: 2853513 - RNA, 19 nt, Artificial Sequence
  Description of Artificial Sequence: Synthetic oligonucleotide
uuuucucucaaaugcacug

SEQ ID NO: 2853514 - RNA, 19 nt, Artificial Sequence
  Description of Artificial Sequence: Synthetic oligonucleotide
ugacacaaaccacucauug

SEQ ID NO: 2853515 - RNA, 19 nt, Artificial Sequence
  Description of Artificial Sequence: Synthetic oligonucleotide
gacaaaagcugacacaaac

SEQ ID NO: 2853516 - RNA, 19 nt, Artificial Sequence
  Description of Artificial Sequence: Synthetic oligonucleotide
augcauauacuccugagca

SEQ ID NO: 2853517 - RNA, 19 nt, Artificial Sequence
  Description of Artificial Sequence: Synthetic oligonucleotide
uguucuuuccaagaaacug

SEQ ID NO: 2853518 - RNA, 19 nt, Artificial Sequence
  Description of Artificial Sequence: Synthetic oligonucleotide
gaucgaauaggagaauugg

SEQ ID NO: 2853519 - RNA, 19 nt, Artificial Sequence
  Description of Artificial Sequence: Synthetic oligonucleotide
uuguuggagagccacaugu

SEQ ID NO: 2853520 - RNA, 19 nt, Artificial Sequence
  Description of Artificial Sequence: Synthetic oligonucleotide
guauaagucauagacauca

SEQ ID NO: 2853521 - RNA, 19 nt, Artificial Sequence
  Description of Artificial Sequence: Synthetic oligonucleotide
ucuugauuccaucuucuug

SEQ ID NO: 2853522 - RNA, 19 nt, Artificial Sequence
  Description of Artificial Sequence: Synthetic oligonucleotide
aguucuugauuccaucuuc

SEQ ID NO: 2853523 - RNA, 19 nt, Artificial Sequence
  Description of Artificial Sequence: Synthetic oligonucleotide
cauaaaagggauucauggc

SEQ ID NO: 2853524 - RNA, 19 nt, Artificial Sequence
  Description of Artificial Sequence: Synthetic oligonucleotide
cuacucacaaugcauauac

SEQ ID NO: 2853525 - RNA, 19 nt, Artificial Sequence
  Description of Artificial Sequence: Synthetic oligonucleotide
acuggauugucaugguggc

SEQ ID NO: 2853526 - RNA, 19 nt, Artificial Sequence
  Description of Artificial Sequence: Synthetic oligonucleotide
gugaagaaguucuugauuc

SEQ ID NO: 2853527 - RNA, 19 nt, Artificial Sequence
  Description of Artificial Sequence: Synthetic oligonucleotide
caugucaugaagcaugaug

SEQ ID NO: 2853528 - RNA, 19 nt, Artificial Sequence
  Description of Artificial Sequence: Synthetic oligonucleotide
gucaaccagguccagagcg

SEQ ID NO: 2853529 - RNA, 19 nt, Artificial Sequence
  Description of Artificial Sequence: Synthetic oligonucleotide
acaaaagcugacacaaacc

SEQ ID NO: 2853530 - RNA, 19 nt, Artificial Sequence
  Description of Artificial Sequence: Synthetic oligonucleotide
caaacuugauguauaaguc

SEQ ID NO: 2853531 - RNA, 19 nt, Artificial Sequence
  Description of Artificial Sequence: Synthetic oligonucleotide
ugauucucagguuuucugc

SEQ ID NO: 2853532 - RNA, 19 nt, Artificial Sequence
  Description of Artificial Sequence: Synthetic oligonucleotide
aaaagcugacacaaaccac

SEQ ID NO: 2853533 - RNA, 19 nt, Artificial Sequence
  Description of Artificial Sequence: Synthetic oligonucleotide
uuuucgucaaccaggucca

SEQ ID NO: 2853534 - RNA, 19 nt, Artificial Sequence
  Description of Artificial Sequence: Synthetic oligonucleotide
ucagguuuucugcauuuag

SEQ ID NO: 2853535 - RNA, 19 nt, Artificial Sequence
  Description of Artificial Sequence: Synthetic oligonucleotide
uccacaguuuucaaguaca

SEQ ID NO: 2853536 - RNA, 19 nt, Artificial Sequence
  Description of Artificial Sequence: Synthetic oligonucleotide
aaucucauguguccagcag

SEQ ID NO: 2853537 - RNA, 19 nt, Artificial Sequence
  Description of Artificial Sequence: Synthetic oligonucleotide
uuuguccacaguuuucaag

SEQ ID NO: 2853538 - RNA, 19 nt, Artificial Sequence
  Description of Artificial Sequence: Synthetic oligonucleotide
gauguucuuuccaagaaac

SEQ ID NO: 2853539 - RNA, 19 nt, Artificial Sequence
  Description of Artificial Sequence: Synthetic oligonucleotide
auucauggcaaacuugaug

SEQ ID NO: 2853540 - RNA, 19 nt, Artificial Sequence
  Description of Artificial Sequence: Synthetic oligonucleotide
agcggcgugagcuaugaac

SEQ ID NO: 2853541 - RNA, 19 nt, Artificial Sequence
  Description of Artificial Sequence: Synthetic oligonucleotide
aauaggagaauuggguuca

SEQ ID NO: 2853542 - RNA, 19 nt, Artificial Sequence
  Description of Artificial Sequence: Synthetic oligonucleotide
uacauguuguuggagagcc

SEQ ID NO: 2853543 - RNA, 19 nt, Artificial Sequence
  Description of Artificial Sequence: Synthetic oligonucleotide
ucacaaugcauauacuccu

SEQ ID NO: 2853544 - RNA, 19 nt, Artificial Sequence
  Description of Artificial Sequence: Synthetic oligonucleotide
uccagcagugacaaaagcu

SEQ ID NO: 2853545 - RNA, 19 nt, Artificial Sequence
  Description of Artificial Sequence: Synthetic oligonucleotide
aaagggauucauggcaaac

SEQ ID NO: 2853546 - RNA, 19 nt, Artificial Sequence
  Description of Artificial Sequence: Synthetic oligonucleotide
gaauaggagaauuggguuc

SEQ ID NO: 2853547 - RNA, 19 nt, Artificial Sequence
  Description of Artificial Sequence: Synthetic oligonucleotide
aguuuucaaguacauguug

SEQ ID NO: 2853548 - RNA, 19 nt, Artificial Sequence
  Description of Artificial Sequence: Synthetic oligonucleotide
aaaccacucauugaauuug

SEQ ID NO: 2853549 - RNA, 19 nt, Artificial Sequence
  Description of Artificial Sequence: Synthetic oligonucleotide
agguuuucugcauuuagcu

SEQ ID NO: 2853550 - RNA, 19 nt, Artificial Sequence
  Description of Artificial Sequence: Synthetic oligonucleotide
ucaagcuacucacaaugca

SEQ ID NO: 2853551 - RNA, 19 nt, Artificial Sequence
  Description of Artificial Sequence: Synthetic oligonucleotide
aaaugcacuggaucgaaua

SEQ ID NO: 2853552 - RNA, 19 nt, Artificial Sequence
  Description of Artificial Sequence: Synthetic oligonucleotide
aagauguucuuuccaagaa

SEQ ID NO: 2853553 - RNA, 19 nt, Artificial Sequence
  Description of Artificial Sequence: Synthetic oligonucleotide
cugcauuuagcuuacaaga

SEQ ID NO: 2853554 - RNA, 19 nt, Artificial Sequence
  Description of Artificial Sequence: Synthetic oligonucleotide
ucgucaaccagguccagag

SEQ ID NO: 2853555 - RNA, 19 nt, Artificial Sequence
  Description of Artificial Sequence: Synthetic oligonucleotide
uaaaagggauucauggcaa

SEQ ID NO: 2853556 - RNA, 19 nt, Artificial Sequence
  Description of Artificial Sequence: Synthetic oligonucleotide
ugcacuggaucgaauagga

SEQ ID NO: 2853557 - RNA, 19 nt, Artificial Sequence
  Description of Artificial Sequence: Synthetic oligonucleotide
agagccacauguuuucguc

SEQ ID NO: 2853558 - RNA, 19 nt, Artificial Sequence
  Description of Artificial Sequence: Synthetic oligonucleotide
uuacaagauguucuuucca

SEQ ID NO: 2853559 - RNA, 19 nt, Artificial Sequence
  Description of Artificial Sequence: Synthetic oligonucleotide
ucucauguguccagcagug

SEQ ID NO: 2853560 - RNA, 19 nt, Artificial Sequence
  Description of Artificial Sequence: Synthetic oligonucleotide
acauguuuucgucaaccag

SEQ ID NO: 2853561 - RNA, 19 nt, Artificial Sequence
  Description of Artificial Sequence: Synthetic oligonucleotide
uauaagucauagacaucag

SEQ ID NO: 2853562 - RNA, 19 nt, Artificial Sequence
  Description of Artificial Sequence: Synthetic oligonucleotide
caaaagcugacacaaacca

SEQ ID NO: 2853563 - RNA, 19 nt, Artificial Sequence
  Description of Artificial Sequence: Synthetic oligonucleotide
cacucauugaauuugucca

SEQ ID NO: 2853564 - RNA, 19 nt, Artificial Sequence
  Description of Artificial Sequence: Synthetic oligonucleotide
ugaagaaguucuugauucc

SEQ ID NO: 2853565 - RNA, 19 nt, Artificial Sequence
  Description of Artificial Sequence: Synthetic oligonucleotide
augucaugaagcaugauga

SEQ ID NO: 2853566 - RNA, 19 nt, Artificial Sequence
  Description of Artificial Sequence: Synthetic oligonucleotide
acaagauguucuuuccaag

SEQ ID NO: 2853567 - RNA, 19 nt, Artificial Sequence
  Description of Artificial Sequence: Synthetic oligonucleotide
ucaaccagguccagagcgg

SEQ ID NO: 2853568 - RNA, 19 nt, Artificial Sequence
  Description of Artificial Sequence: Synthetic oligonucleotide
uuucaaguacauguuguug

SEQ ID NO: 2853569 - RNA, 19 nt, Artificial Sequence
  Description of Artificial Sequence: Synthetic oligonucleotide
uuucucucaaaugcacugg

SEQ ID NO: 2853570 - RNA, 19 nt, Artificial Sequence
  Description of Artificial Sequence: Synthetic oligonucleotide
uugccucaugucaugaagc

SEQ ID NO: 2853571 - RNA, 19 nt, Artificial Sequence
  Description of Artificial Sequence: Synthetic oligonucleotide
guuuucugcauuuagcuua

SEQ ID NO: 2853572 - RNA, 19 nt, Artificial Sequence
  Description of Artificial Sequence: Synthetic oligonucleotide
uggauugucaugguggcca

SEQ ID NO: 2853573 - RNA, 19 nt, Artificial Sequence
  Description of Artificial Sequence: Synthetic oligonucleotide
uuuagcuuacaagauguuc

SEQ ID NO: 2853574 - RNA, 19 nt, Artificial Sequence
  Description of Artificial Sequence: Synthetic oligonucleotide
aacuugauguauaagucau

SEQ ID NO: 2853575 - RNA, 19 nt, Artificial Sequence
  Description of Artificial Sequence: Synthetic oligonucleotide
acaucagugaagaaguucu

SEQ ID NO: 2853576 - RNA, 19 nt, Artificial Sequence
  Description of Artificial Sequence: Synthetic oligonucleotide
auaagucauagacaucagu

SEQ ID NO: 2853577 - RNA, 19 nt, Artificial Sequence
  Description of Artificial Sequence: Synthetic oligonucleotide
agucauagacaucagugaa

SEQ ID NO: 2853578 - RNA, 19 nt, Artificial Sequence
  Description of Artificial Sequence: Synthetic oligonucleotide
agugacaaaagcugacaca

SEQ ID NO: 2853579 - RNA, 19 nt, Artificial Sequence
  Description of Artificial Sequence: Synthetic oligonucleotide
ugcauuuagcuuacaagau

SEQ ID NO: 2853580 - RNA, 19 nt, Artificial Sequence
  Description of Artificial Sequence: Synthetic oligonucleotide
acuuuucucucaaaugcac

SEQ ID NO: 2853581 - RNA, 19 nt, Artificial Sequence
  Description of Artificial Sequence: Synthetic oligonucleotide
uuuucugcauuuagcuuac

SEQ ID NO: 2853582 - RNA, 19 nt, Artificial Sequence
  Description of Artificial Sequence: Synthetic oligonucleotide
uguccagcagugacaaaag

SEQ ID NO: 2853583 - RNA, 19 nt, Artificial Sequence
  Description of Artificial Sequence: Synthetic oligonucleotide
ugagcauaccccacuguga

SEQ ID NO: 2853584 - RNA, 19 nt, Artificial Sequence
  Description of Artificial Sequence: Synthetic oligonucleotide
uucucucaaaugcacugga

SEQ ID NO: 2853585 - RNA, 19 nt, Artificial Sequence
  Description of Artificial Sequence: Synthetic oligonucleotide
aucgaauaggagaauuggg

SEQ ID NO: 2853586 - RNA, 19 nt, Artificial Sequence
  Description of Artificial Sequence: Synthetic oligonucleotide
aagggauucauggcaaacu

SEQ ID NO: 2853587 - RNA, 19 nt, Artificial Sequence
  Description of Artificial Sequence: Synthetic oligonucleotide
gauucucagguuuucugca

SEQ ID NO: 2853588 - RNA, 19 nt, Artificial Sequence
  Description of Artificial Sequence: Synthetic oligonucleotide
cucucaaaugcacuggauc

SEQ ID NO: 2853589 - RNA, 19 nt, Artificial Sequence
  Description of Artificial Sequence: Synthetic oligonucleotide
aucaagcuacucacaaugc

SEQ ID NO: 2853590 - RNA, 19 nt, Artificial Sequence
  Description of Artificial Sequence: Synthetic oligonucleotide
uucugcauuuagcuuacaa

SEQ ID NO: 2853591 - RNA, 19 nt, Artificial Sequence
  Description of Artificial Sequence: Synthetic oligonucleotide
cacuggaucgaauaggaga

SEQ ID NO: 2853592 - RNA, 19 nt, Artificial Sequence
  Description of Artificial Sequence: Synthetic oligonucleotide
caaugcauauacuccugag

SEQ ID NO: 2853593 - RNA, 19 nt, Artificial Sequence
  Description of Artificial Sequence: Synthetic oligonucleotide
agugaagaaguucuugauu

SEQ ID NO: 2853594 - RNA, 19 nt, Artificial Sequence
  Description of Artificial Sequence: Synthetic oligonucleotide
uuuucaaguacauguuguu

SEQ ID NO: 2853595 - RNA, 19 nt, Artificial Sequence
  Description of Artificial Sequence: Synthetic oligonucleotide
acaaaccacucauugaauu

SEQ ID NO: 2853596 - RNA, 19 nt, Artificial Sequence
  Description of Artificial Sequence: Synthetic oligonucleotide
aagcaugaugaaucucaug

SEQ ID NO: 2853597 - RNA, 19 nt, Artificial Sequence
  Description of Artificial Sequence: Synthetic oligonucleotide
augaaucucauguguccag

SEQ ID NO: 2853598 - RNA, 19 nt, Artificial Sequence
  Description of Artificial Sequence: Synthetic oligonucleotide
aaguucuugauuccaucuu

SEQ ID NO: 2853599 - RNA, 19 nt, Artificial Sequence
  Description of Artificial Sequence: Synthetic oligonucleotide
uacuccugagcauacccca

SEQ ID NO: 2853600 - RNA, 19 nt, Artificial Sequence
  Description of Artificial Sequence: Synthetic oligonucleotide
aucucauguguccagcagu

SEQ ID NO: 2853601 - RNA, 19 nt, Artificial Sequence
  Description of Artificial Sequence: Synthetic oligonucleotide
uguauaagucauagacauc

SEQ ID NO: 2853602 - RNA, 19 nt, Artificial Sequence
  Description of Artificial Sequence: Synthetic oligonucleotide
auacuccugagcauacccc

SEQ ID NO: 2853603 - RNA, 19 nt, Artificial Sequence
  Description of Artificial Sequence: Synthetic oligonucleotide
gugauucucagguuuucug

SEQ ID NO: 2853604 - RNA, 19 nt, Artificial Sequence
  Description of Artificial Sequence: Synthetic oligonucleotide
gugacaaaagcugacacaa

SEQ ID NO: 2853605 - RNA, 19 nt, Artificial Sequence
  Description of Artificial Sequence: Synthetic oligonucleotide
cugagcauaccccacugug

SEQ ID NO: 2853606 - RNA, 19 nt, Artificial Sequence
  Description of Artificial Sequence: Synthetic oligonucleotide
aaaagggauucauggcaaa

SEQ ID NO: 2853607 - RNA, 19 nt, Artificial Sequence
  Description of Artificial Sequence: Synthetic oligonucleotide
agauguucuuuccaagaaa

SEQ ID NO: 2853608 - RNA, 19 nt, Artificial Sequence
  Description of Artificial Sequence: Synthetic oligonucleotide
cauguuguuggagagccac

SEQ ID NO: 2853609 - RNA, 19 nt, Artificial Sequence
  Description of Artificial Sequence: Synthetic oligonucleotide
uugauuccaucuucuugcc

SEQ ID NO: 2853610 - RNA, 19 nt, Artificial Sequence
  Description of Artificial Sequence: Synthetic oligonucleotide
acaaugcauauacuccuga

SEQ ID NO: 2853611 - RNA, 19 nt, Artificial Sequence
  Description of Artificial Sequence: Synthetic oligonucleotide
cauauacuccugagcauac

SEQ ID NO: 2853612 - RNA, 19 nt, Artificial Sequence
  Description of Artificial Sequence: Synthetic oligonucleotide
ugaaucucauguguccagc

SEQ ID NO: 2853613 - RNA, 19 nt, Artificial Sequence
  Description of Artificial Sequence: Synthetic oligonucleotide
auauacuccugagcauacc

SEQ ID NO: 2853614 - RNA, 19 nt, Artificial Sequence
  Description of Artificial Sequence: Synthetic oligonucleotide
ugccucaugucaugaagca

SEQ ID NO: 2853615 - RNA, 19 nt, Artificial Sequence
  Description of Artificial Sequence: Synthetic oligonucleotide
caagauguucuuuccaaga

SEQ ID NO: 2853616 - RNA, 19 nt, Artificial Sequence
  Description of Artificial Sequence: Synthetic oligonucleotide
aacugguucagguggcgau

SEQ ID NO: 2853617 - RNA, 19 nt, Artificial Sequence
  Description of Artificial Sequence: Synthetic oligonucleotide
uuaucaagcuacucacaau

SEQ ID NO: 2853618 - RNA, 19 nt, Artificial Sequence
  Description of Artificial Sequence: Synthetic oligonucleotide
gcaaacuugauguauaagu

SEQ ID NO: 2853619 - RNA, 19 nt, Artificial Sequence
  Description of Artificial Sequence: Synthetic oligonucleotide
gaugaaucucaugugucca

SEQ ID NO: 2853620 - RNA, 19 nt, Artificial Sequence
  Description of Artificial Sequence: Synthetic oligonucleotide
uuggagagccacauguuuu

SEQ ID NO: 2853621 - RNA, 19 nt, Artificial Sequence
  Description of Artificial Sequence: Synthetic oligonucleotide
cagugacaaaagcugacac

SEQ ID NO: 2853622 - RNA, 19 nt, Artificial Sequence
  Description of Artificial Sequence: Synthetic oligonucleotide
aucagugaagaaguucuug

SEQ ID NO: 2853623 - RNA, 19 nt, Artificial Sequence
  Description of Artificial Sequence: Synthetic oligonucleotide
acuggaucgaauaggagaa

SEQ ID NO: 2853624 - RNA, 19 nt, Artificial Sequence
  Description of Artificial Sequence: Synthetic oligonucleotide
ugguggccaacaauuacaa

SEQ ID NO: 2853625 - RNA, 19 nt, Artificial Sequence
  Description of Artificial Sequence: Synthetic oligonucleotide
caugguggccaacaauuac

SEQ ID NO: 2853626 - RNA, 19 nt, Artificial Sequence
  Description of Artificial Sequence: Synthetic oligonucleotide
agcagugacaaaagcugac

SEQ ID NO: 2853627 - RNA, 19 nt, Artificial Sequence
  Description of Artificial Sequence: Synthetic oligonucleotide
augcacuggaucgaauagg

SEQ ID NO: 2853628 - RNA, 19 nt, Artificial Sequence
  Description of Artificial Sequence: Synthetic oligonucleotide
auugucaugguggccaaca

SEQ ID NO: 2853629 - RNA, 19 nt, Artificial Sequence
  Description of Artificial Sequence: Synthetic oligonucleotide
ccucaugucaugaagcaug

SEQ ID NO: 2853630 - RNA, 19 nt, Artificial Sequence
  Description of Artificial Sequence: Synthetic oligonucleotide
aucuuuggguucugcuuuc

SEQ ID NO: 2853631 - RNA, 19 nt, Artificial Sequence
  Description of Artificial Sequence: Synthetic oligonucleotide
gauguucaucuuuggguuc

SEQ ID NO: 2853632 - RNA, 19 nt, Artificial Sequence
  Description of Artificial Sequence: Synthetic oligonucleotide
gugagcuaugaacugguuc

SEQ ID NO: 2853633 - RNA, 19 nt, Artificial Sequence
  Description of Artificial Sequence: Synthetic oligonucleotide
ccacucauugaauuugucc

SEQ ID NO: 2853634 - RNA, 19 nt, Artificial Sequence
  Description of Artificial Sequence: Synthetic oligonucleotide
ugucaugaagcaugaugaa

SEQ ID NO: 2853635 - RNA, 19 nt, Artificial Sequence
  Description of Artificial Sequence: Synthetic oligonucleotide
uggagagccacauguuuuc

SEQ ID NO: 2853636 - RNA, 19 nt, Artificial Sequence
  Description of Artificial Sequence: Synthetic oligonucleotide
gcuuacaagauguucuuuc

SEQ ID NO: 2853637 - RNA, 19 nt, Artificial Sequence
  Description of Artificial Sequence: Synthetic oligonucleotide
uccugagcauaccccacug

SEQ ID NO: 2853638 - RNA, 19 nt, Artificial Sequence
  Description of Artificial Sequence: Synthetic oligonucleotide
ugucaugguggccaacaau

SEQ ID NO: 2853639 - RNA, 19 nt, Artificial Sequence
  Description of Artificial Sequence: Synthetic oligonucleotide
cacaaugcauauacuccug

SEQ ID NO: 2853640 - RNA, 19 nt, Artificial Sequence
  Description of Artificial Sequence: Synthetic oligonucleotide
gacauugucuucuguauau

SEQ ID NO: 2853641 - RNA, 19 nt, Artificial Sequence
  Description of Artificial Sequence: Synthetic oligonucleotide
gaaucucauguguccagca

SEQ ID NO: 2853642 - RNA, 19 nt, Artificial Sequence
  Description of Artificial Sequence: Synthetic oligonucleotide
uaccccacugugauucuca

SEQ ID NO: 2853643 - RNA, 19 nt, Artificial Sequence
  Description of Artificial Sequence: Synthetic oligonucleotide
ugugauucucagguuuucu

SEQ ID NO: 2853644 - RNA, 19 nt, Artificial Sequence
  Description of Artificial Sequence: Synthetic oligonucleotide
ggcgauguucaucuuuggg

SEQ ID NO: 2853645 - RNA, 19 nt, Artificial Sequence
  Description of Artificial Sequence: Synthetic oligonucleotide
uguuguuggagagccacau

SEQ ID NO: 2853646 - RNA, 19 nt, Artificial Sequence
  Description of Artificial Sequence: Synthetic oligonucleotide
caugaugaaucucaugugu

SEQ ID NO: 2853647 - RNA, 19 nt, Artificial Sequence
  Description of Artificial Sequence: Synthetic oligonucleotide
ugcauauacuccugagcau

SEQ ID NO: 2853648 - RNA, 19 nt, Artificial Sequence
  Description of Artificial Sequence: Synthetic oligonucleotide
uacucacaaugcauauacu

SEQ ID NO: 2853649 - RNA, 19 nt, Artificial Sequence
  Description of Artificial Sequence: Synthetic oligonucleotide
uggcaaacuugauguauaa

SEQ ID NO: 2853650 - RNA, 19 nt, Artificial Sequence
  Description of Artificial Sequence: Synthetic oligonucleotide
ucaugguggccaacaauua

SEQ ID NO: 2853651 - RNA, 19 nt, Artificial Sequence
  Description of Artificial Sequence: Synthetic oligonucleotide
ugauuccaucuucuugccu

SEQ ID NO: 2853652 - RNA, 19 nt, Artificial Sequence
  Description of Artificial Sequence: Synthetic oligonucleotide
ucucucaaaugcacuggau

SEQ ID NO: 2853653 - RNA, 19 nt, Artificial Sequence
  Description of Artificial Sequence: Synthetic oligonucleotide
augguggccaacaauuaca

SEQ ID NO: 2853654 - RNA, 19 nt, Artificial Sequence
  Description of Artificial Sequence: Synthetic oligonucleotide
ugacaaaagcugacacaaa

SEQ ID NO: 2853655 - RNA, 19 nt, Artificial Sequence
  Description of Artificial Sequence: Synthetic oligonucleotide
guggcgauguucaucuuug

SEQ ID NO: 2853656 - RNA, 19 nt, Artificial Sequence
  Description of Artificial Sequence: Synthetic oligonucleotide
aaccacucauugaauuugu

SEQ ID NO: 2853657 - RNA, 19 nt, Artificial Sequence
  Description of Artificial Sequence: Synthetic oligonucleotide
aagcuacucacaaugcaua

SEQ ID NO: 2853658 - RNA, 19 nt, Artificial Sequence
  Description of Artificial Sequence: Synthetic oligonucleotide
agcuacucacaaugcauau

SEQ ID NO: 2853659 - RNA, 19 nt, Artificial Sequence
  Description of Artificial Sequence: Synthetic oligonucleotide
agacauugucuucuguaua

SEQ ID NO: 2853660 - RNA, 19 nt, Artificial Sequence
  Description of Artificial Sequence: Synthetic oligonucleotide
uguuggagagccacauguu

SEQ ID NO: 2853661 - RNA, 19 nt, Artificial Sequence
  Description of Artificial Sequence: Synthetic oligonucleotide
guuuucaaguacauguugu

SEQ ID NO: 2853662 - RNA, 19 nt, Artificial Sequence
  Description of Artificial Sequence: Synthetic oligonucleotide
uggcgauguucaucuuugg

SEQ ID NO: 2853663 - RNA, 19 nt, Artificial Sequence
  Description of Artificial Sequence: Synthetic oligonucleotide
uagcuuacaagauguucuu

SEQ ID NO: 2853664 - RNA, 19 nt, Artificial Sequence
  Description of Artificial Sequence: Synthetic oligonucleotide
uucucagguuuucugcauu

SEQ ID NO: 2853665 - RNA, 19 nt, Artificial Sequence
  Description of Artificial Sequence: Synthetic oligonucleotide
ucucagguuuucugcauuu

SEQ ID NO: 2853666 - RNA, 19 nt, Artificial Sequence
  Description of Artificial Sequence: Synthetic oligonucleotide
uggaucgaauaggagaauu

SEQ ID NO: 2853667 - RNA, 19 nt, Artificial Sequence
  Description of Artificial Sequence: Synthetic oligonucleotide
guguccagcagugacaaaa

SEQ ID NO: 2853668 - RNA, 19 nt, Artificial Sequence
  Description of Artificial Sequence: Synthetic oligonucleotide
uccagacauugucuucugu

SEQ ID NO: 2853669 - RNA, 19 nt, Artificial Sequence
  Description of Artificial Sequence: Synthetic oligonucleotide
auguuuucgucaaccaggu

SEQ ID NO: 2853670 - RNA, 19 nt, Artificial Sequence
  Description of Artificial Sequence: Synthetic oligonucleotide
auucucagguuuucugcau

SEQ ID NO: 2853671 - RNA, 19 nt, Artificial Sequence
  Description of Artificial Sequence: Synthetic oligonucleotide
auguucaucuuuggguucu

SEQ ID NO: 2853672 - RNA, 19 nt, Artificial Sequence
  Description of Artificial Sequence: Synthetic oligonucleotide
guucagguggcgauguuca

SEQ ID NO: 2853673 - RNA, 19 nt, Artificial Sequence
  Description of Artificial Sequence: Synthetic oligonucleotide
cucaugucaugaagcauga

SEQ ID NO: 2853674 - RNA, 19 nt, Artificial Sequence
  Description of Artificial Sequence: Synthetic oligonucleotide
agccacauguuuucgucaa

SEQ ID NO: 2853675 - RNA, 19 nt, Artificial Sequence
  Description of Artificial Sequence: Synthetic oligonucleotide
gcaugaugaaucucaugug

SEQ ID NO: 2853676 - RNA, 19 nt, Artificial Sequence
  Description of Artificial Sequence: Synthetic oligonucleotide
cacaguuuucaaguacaug

SEQ ID NO: 2853677 - RNA, 19 nt, Artificial Sequence
  Description of Artificial Sequence: Synthetic oligonucleotide
guuguuggagagccacaug

SEQ ID NO: 2853678 - RNA, 19 nt, Artificial Sequence
  Description of Artificial Sequence: Synthetic oligonucleotide
uuccagacauugucuucug

SEQ ID NO: 2853679 - RNA, 19 nt, Artificial Sequence
  Description of Artificial Sequence: Synthetic oligonucleotide
cacauguuuucgucaacca

SEQ ID NO: 2853680 - RNA, 19 nt, Artificial Sequence
  Description of Artificial Sequence: Synthetic oligonucleotide
ggaucgaauaggagaauug

SEQ ID NO: 2853681 - RNA, 19 nt, Artificial Sequence
  Description of Artificial Sequence: Synthetic oligonucleotide
guacauguuguuggagagc

SEQ ID NO: 2853682 - RNA, 19 nt, Artificial Sequence
  Description of Artificial Sequence: Synthetic oligonucleotide
gagcuaugaacugguucag

SEQ ID NO: 2853683 - RNA, 19 nt, Artificial Sequence
  Description of Artificial Sequence: Synthetic oligonucleotide
uugucaugguggccaacaa

SEQ ID NO: 2853684 - RNA, 19 nt, Artificial Sequence
  Description of Artificial Sequence: Synthetic oligonucleotide
guccagcagugacaaaagc

SEQ ID NO: 2853685 - RNA, 19 nt, Artificial Sequence
  Description of Artificial Sequence: Synthetic oligonucleotide
uggguucugcuuucccagc

SEQ ID NO: 2853686 - RNA, 19 nt, Artificial Sequence
  Description of Artificial Sequence: Synthetic oligonucleotide
uguccacaguuuucaagua

SEQ ID NO: 2853687 - RNA, 19 nt, Artificial Sequence
  Description of Artificial Sequence: Synthetic oligonucleotide
ucagguggcgauguucauc

SEQ ID NO: 2853688 - RNA, 19 nt, Artificial Sequence
  Description of Artificial Sequence: Synthetic oligonucleotide
auuuguccacaguuuucaa

SEQ ID NO: 2853689 - RNA, 19 nt, Artificial Sequence
  Description of Artificial Sequence: Synthetic oligonucleotide
caucuucuugccucauguc

SEQ ID NO: 2853690 - RNA, 19 nt, Artificial Sequence
  Description of Artificial Sequence: Synthetic oligonucleotide
ucauggcaaacuugaugua

SEQ ID NO: 2853691 - RNA, 19 nt, Artificial Sequence
  Description of Artificial Sequence: Synthetic oligonucleotide
gcauaccccacugugauuc

SEQ ID NO: 2853692 - RNA, 19 nt, Artificial Sequence
  Description of Artificial Sequence: Synthetic oligonucleotide
aaccagguccagagcggcg

SEQ ID NO: 2853693 - RNA, 19 nt, Artificial Sequence
  Description of Artificial Sequence: Synthetic oligonucleotide
uucgucaaccagguccaga

SEQ ID NO: 2853694 - RNA, 19 nt, Artificial Sequence
  Description of Artificial Sequence: Synthetic oligonucleotide
cuuuucucucaaaugcacu

SEQ ID NO: 2853695 - RNA, 19 nt, Artificial Sequence
  Description of Artificial Sequence: Synthetic oligonucleotide
ggcgugagcuaugaacugg

SEQ ID NO: 2853696 - RNA, 19 nt, Artificial Sequence
  Description of Artificial Sequence: Synthetic oligonucleotide
caagcuacucacaaugcau

SEQ ID NO: 2853697 - RNA, 19 nt, Artificial Sequence
  Description of Artificial Sequence: Synthetic oligonucleotide
acuccugagcauaccccac

SEQ ID NO: 2853698 - RNA, 19 nt, Artificial Sequence
  Description of Artificial Sequence: Synthetic oligonucleotide
cagcagugacaaaagcuga

SEQ ID NO: 2853699 - RNA, 19 nt, Artificial Sequence
  Description of Artificial Sequence: Synthetic oligonucleotide
gagcauaccccacugugau

SEQ ID NO: 2853700 - RNA, 19 nt, Artificial Sequence
  Description of Artificial Sequence: Synthetic oligonucleotide
accccacugugauucucag

SEQ ID NO: 2853701 - RNA, 19 nt, Artificial Sequence
  Description of Artificial Sequence: Synthetic oligonucleotide
uguuuucgucaaccagguc

SEQ ID NO: 2853702 - RNA, 19 nt, Artificial Sequence
  Description of Artificial Sequence: Synthetic oligonucleotide
caaccagguccagagcggc

SEQ ID NO: 2853703 - RNA, 19 nt, Artificial Sequence
  Description of Artificial Sequence: Synthetic oligonucleotide
accacucauugaauuuguc

SEQ ID NO: 2853704 - RNA, 19 nt, Artificial Sequence
  Description of Artificial Sequence: Synthetic oligonucleotide
ccacauguuuucgucaacc

SEQ ID NO: 2853705 - RNA, 19 nt, Artificial Sequence
  Description of Artificial Sequence: Synthetic oligonucleotide
gcgauguucaucuuugggu

SEQ ID NO: 2853706 - RNA, 19 nt, Artificial Sequence
  Description of Artificial Sequence: Synthetic oligonucleotide
cagguggcgauguucaucu

SEQ ID NO: 2853707 - RNA, 19 nt, Artificial Sequence
  Description of Artificial Sequence: Synthetic oligonucleotide
ggcaaacuugauguauaag

SEQ ID NO: 2853708 - RNA, 19 nt, Artificial Sequence
  Description of Artificial Sequence: Synthetic oligonucleotide
auaccccacugugauucuc

SEQ ID NO: 2853709 - RNA, 19 nt, Artificial Sequence
  Description of Artificial Sequence: Synthetic oligonucleotide
auggcaaacuugauguaua

SEQ ID NO: 2853710 - RNA, 19 nt, Artificial Sequence
  Description of Artificial Sequence: Synthetic oligonucleotide
gucaugguggccaacaauu

SEQ ID NO: 2853711 - RNA, 19 nt, Artificial Sequence
  Description of Artificial Sequence: Synthetic oligonucleotide
uguucaucuuuggguucug

SEQ ID NO: 2853712 - RNA, 19 nt, Artificial Sequence
  Description of Artificial Sequence: Synthetic oligonucleotide
cuggauugucaugguggcc

SEQ ID NO: 2853713 - RNA, 19 nt, Artificial Sequence
  Description of Artificial Sequence: Synthetic oligonucleotide
accagguccagagcggcgu

SEQ ID NO: 2853714 - RNA, 19 nt, Artificial Sequence
  Description of Artificial Sequence: Synthetic oligonucleotide
guucaucuuuggguucugc

SEQ ID NO: 2853715 - RNA, 19 nt, Artificial Sequence
  Description of Artificial Sequence: Synthetic oligonucleotide
gcugacacaaaccacucau

SEQ ID NO: 2853716 - RNA, 19 nt, Artificial Sequence
  Description of Artificial Sequence: Synthetic oligonucleotide
acugugauucucagguuuu

SEQ ID NO: 2853717 - RNA, 19 nt, Artificial Sequence
  Description of Artificial Sequence: Synthetic oligonucleotide
ggagagccacauguuuucg

SEQ ID NO: 2853718 - RNA, 19 nt, Artificial Sequence
  Description of Artificial Sequence: Synthetic oligonucleotide
caaaccacucauugaauuu

SEQ ID NO: 2853719 - RNA, 19 nt, Artificial Sequence
  Description of Artificial Sequence: Synthetic oligonucleotide
cagacauugucuucuguau

SEQ ID NO: 2853720 - RNA, 19 nt, Artificial Sequence
  Description of Artificial Sequence: Synthetic oligonucleotide
guuggagagccacauguuu

SEQ ID NO: 2853721 - RNA, 19 nt, Artificial Sequence
  Description of Artificial Sequence: Synthetic oligonucleotide
gagagccacauguuuucgu

SEQ ID NO: 2853722 - RNA, 19 nt, Artificial Sequence
  Description of Artificial Sequence: Synthetic oligonucleotide
agagcggcgugagcuauga

SEQ ID NO: 2853723 - RNA, 19 nt, Artificial Sequence
  Description of Artificial Sequence: Synthetic oligonucleotide
cccacugugauucucaggu

SEQ ID NO: 2853724 - RNA, 19 nt, Artificial Sequence
  Description of Artificial Sequence: Synthetic oligonucleotide
uuucgucaaccagguccag

SEQ ID NO: 2853725 - RNA, 19 nt, Artificial Sequence
  Description of Artificial Sequence: Synthetic oligonucleotide
uccagagcggcgugagcua

SEQ ID NO: 2853726 - RNA, 19 nt, Artificial Sequence
  Description of Artificial Sequence: Synthetic oligonucleotide
agguccagagcggcgugag

SEQ ID NO: 2853727 - RNA, 19 nt, Artificial Sequence
  Description of Artificial Sequence: Synthetic oligonucleotide
cugugauucucagguuuuc

SEQ ID NO: 2853728 - RNA, 19 nt, Artificial Sequence
  Description of Artificial Sequence: Synthetic oligonucleotide
gcauauacuccugagcaua

SEQ ID NO: 2853729 - RNA, 19 nt, Artificial Sequence
  Description of Artificial Sequence: Synthetic oligonucleotide
uucagguggcgauguucau

SEQ ID NO: 2853730 - RNA, 19 nt, Artificial Sequence
  Description of Artificial Sequence: Synthetic oligonucleotide
gauugucaugguggccaac

SEQ ID NO: 2853731 - RNA, 19 nt, Artificial Sequence
  Description of Artificial Sequence: Synthetic oligonucleotide
gguucagguggcgauguuc

SEQ ID NO: 2853732 - RNA, 19 nt, Artificial Sequence
  Description of Artificial Sequence: Synthetic oligonucleotide
gaagcaugaugaaucucau

SEQ ID NO: 2853733 - RNA, 19 nt, Artificial Sequence
  Description of Artificial Sequence: Synthetic oligonucleotide
acuugauguauaagucaua

SEQ ID NO: 2853734 - RNA, 19 nt, Artificial Sequence
  Description of Artificial Sequence: Synthetic oligonucleotide
gcagugacaaaagcugaca

SEQ ID NO: 2853735 - RNA, 19 nt, Artificial Sequence
  Description of Artificial Sequence: Synthetic oligonucleotide
uaggagaauuggguucaua

SEQ ID NO: 2853736 - RNA, 19 nt, Artificial Sequence
  Description of Artificial Sequence: Synthetic oligonucleotide
agcuuacaagauguucuuu

SEQ ID NO: 2853737 - RNA, 19 nt, Artificial Sequence
  Description of Artificial Sequence: Synthetic oligonucleotide
cauggcaaacuugauguau

SEQ ID NO: 2853738 - RNA, 19 nt, Artificial Sequence
  Description of Artificial Sequence: Synthetic oligonucleotide
guccagagcggcgugagcu

SEQ ID NO: 2853739 - RNA, 19 nt, Artificial Sequence
  Description of Artificial Sequence: Synthetic oligonucleotide
auguuguuggagagccaca

SEQ ID NO: 2853740 - RNA, 19 nt, Artificial Sequence
  Description of Artificial Sequence: Synthetic oligonucleotide
ccagacauugucuucugua

SEQ ID NO: 2853741 - RNA, 19 nt, Artificial Sequence
  Description of Artificial Sequence: Synthetic oligonucleotide
cacugugauucucagguuu

SEQ ID NO: 2853742 - RNA, 19 nt, Artificial Sequence
  Description of Artificial Sequence: Synthetic oligonucleotide
caguuuucaaguacauguu

SEQ ID NO: 2853743 - RNA, 19 nt, Artificial Sequence
  Description of Artificial Sequence: Synthetic oligonucleotide
agcauaccccacugugauu

SEQ ID NO: 2853744 - RNA, 19 nt, Artificial Sequence
  Description of Artificial Sequence: Synthetic oligonucleotide
ucaugucaugaagcaugau

SEQ ID NO: 2853745 - RNA, 19 nt, Artificial Sequence
  Description of Artificial Sequence: Synthetic oligonucleotide
uuucugcauuuagcuuaca

SEQ ID NO: 2853746 - RNA, 19 nt, Artificial Sequence
  Description of Artificial Sequence: Synthetic oligonucleotide
gauucauggcaaacuugau

SEQ ID NO: 2853747 - RNA, 19 nt, Artificial Sequence
  Description of Artificial Sequence: Synthetic oligonucleotide
cagagcggcgugagcuaug

SEQ ID NO: 2853748 - RNA, 19 nt, Artificial Sequence
  Description of Artificial Sequence: Synthetic oligonucleotide
gguuuucugcauuuagcuu

SEQ ID NO: 2853749 - RNA, 19 nt, Artificial Sequence
  Description of Artificial Sequence: Synthetic oligonucleotide
acauguuguuggagagcca

SEQ ID NO: 2853750 - RNA, 19 nt, Artificial Sequence
  Description of Artificial Sequence: Synthetic oligonucleotide
gcacuggaucgaauaggag

SEQ ID NO: 2853751 - RNA, 19 nt, Artificial Sequence
  Description of Artificial Sequence: Synthetic oligonucleotide
ccaucuucuugccucaugu

SEQ ID NO: 2853752 - RNA, 19 nt, Artificial Sequence
  Description of Artificial Sequence: Synthetic oligonucleotide
ugguucagguggcgauguu

SEQ ID NO: 2853753 - RNA, 19 nt, Artificial Sequence
  Description of Artificial Sequence: Synthetic oligonucleotide
auaggagaauuggguucau

SEQ ID NO: 2853754 - RNA, 19 nt, Artificial Sequence
  Description of Artificial Sequence: Synthetic oligonucleotide
ccccacugugauucucagg

SEQ ID NO: 2853755 - RNA, 19 nt, Artificial Sequence
  Description of Artificial Sequence: Synthetic oligonucleotide
cucauguguccagcaguga

SEQ ID NO: 2853756 - RNA, 19 nt, Artificial Sequence
  Description of Artificial Sequence: Synthetic oligonucleotide
gcggcgugagcuaugaacu

SEQ ID NO: 2853757 - RNA, 19 nt, Artificial Sequence
  Description of Artificial Sequence: Synthetic oligonucleotide
cugacacaaaccacucauu

SEQ ID NO: 2853758 - RNA, 19 nt, Artificial Sequence
  Description of Artificial Sequence: Synthetic oligonucleotide
gguggccaacaauuacaaa

SEQ ID NO: 2853759 - RNA, 19 nt, Artificial Sequence
  Description of Artificial Sequence: Synthetic oligonucleotide
ggauugucaugguggccaa

SEQ ID NO: 2853760 - RNA, 19 nt, Artificial Sequence
  Description of Artificial Sequence: Synthetic oligonucleotide
cucagguuuucugcauuua

SEQ ID NO: 2853761 - RNA, 19 nt, Artificial Sequence
  Description of Artificial Sequence: Synthetic oligonucleotide
gguggcgauguucaucuuu

SEQ ID NO: 2853762 - RNA, 19 nt, Artificial Sequence
  Description of Artificial Sequence: Synthetic oligonucleotide
cuccugagcauaccccacu

SEQ ID NO: 2853763 - RNA, 19 nt, Artificial Sequence
  Description of Artificial Sequence: Synthetic oligonucleotide
gguccagagcggcgugagc

SEQ ID NO: 2853764 - RNA, 19 nt, Artificial Sequence
  Description of Artificial Sequence: Synthetic oligonucleotide
gcuacucacaaugcauaua

SEQ ID NO: 2853765 - RNA, 19 nt, Artificial Sequence
  Description of Artificial Sequence: Synthetic oligonucleotide
caucagugaagaaguucuu

SEQ ID NO: 2853766 - RNA, 19 nt, Artificial Sequence
  Description of Artificial Sequence: Synthetic oligonucleotide
cgaauaggagaauuggguu

SEQ ID NO: 2853767 - RNA, 19 nt, Artificial Sequence
  Description of Artificial Sequence: Synthetic oligonucleotide
cugguucagguggcgaugu

SEQ ID NO: 2853768 - RNA, 19 nt, Artificial Sequence
  Description of Artificial Sequence: Synthetic oligonucleotide
cauaccccacugugauucu

SEQ ID NO: 2853769 - RNA, 19 nt, Artificial Sequence
  Description of Artificial Sequence: Synthetic oligonucleotide
cgucaaccagguccagagc

SEQ ID NO: 2853770 - RNA, 19 nt, Artificial Sequence
  Description of Artificial Sequence: Synthetic oligonucleotide
cgauguucaucuuuggguu

SEQ ID NO: 2853771 - RNA, 19 nt, Artificial Sequence
  Description of Artificial Sequence: Synthetic oligonucleotide
cagguccagagcggcguga

SEQ ID NO: 2853772 - RNA, 19 nt, Artificial Sequence
  Description of Artificial Sequence: Synthetic oligonucleotide
ccagguccagagcggcgug

SEQ ID NO: 2853773 - RNA, 19 nt, Artificial Sequence
  Description of Artificial Sequence: Synthetic oligonucleotide
cggcgugagcuaugaacug

SEQ ID NO: 2853774 - RNA, 19 nt, Artificial Sequence
  Description of Artificial Sequence: Synthetic oligonucleotide
gagcggcgugagcuaugaa

SEQ ID NO: 2853775 - RNA, 19 nt, Artificial Sequence
  Description of Artificial Sequence: Synthetic oligonucleotide
gcgugagcuaugaacuggu

SEQ ID NO: 2853776 - RNA, 19 nt, Artificial Sequence
  Description of Artificial Sequence: Synthetic oligonucleotide
ccacaguuuucaaguacau

SEQ ID NO: 2853777 - RNA, 19 nt, Artificial Sequence
  Description of Artificial Sequence: Synthetic oligonucleotide
cuggaucgaauaggagaau

SEQ ID NO: 2853778 - RNA, 19 nt, Artificial Sequence
  Description of Artificial Sequence: Synthetic oligonucleotide
ccugagcauaccccacugu

SEQ ID NO: 2853779 - RNA, 19 nt, Artificial Sequence
  Description of Artificial Sequence: Synthetic oligonucleotide
gccucaugucaugaagcau

SEQ ID NO: 2853780 - RNA, 19 nt, Artificial Sequence
  Description of Artificial Sequence: Synthetic oligonucleotide
ccacugugauucucagguu

SEQ ID NO: 2853781 - RNA, 19 nt, Artificial Sequence
  Description of Artificial Sequence: Synthetic oligonucleotide
ccagagcggcgugagcuau

SEQ ID NO: 2853782 - RNA, 19 nt, Artificial Sequence
  Description of Artificial Sequence: Synthetic oligonucleotide
cgugagcuaugaacugguu

SEQ ID NO: 2853783 - RNA, 19 nt, Artificial Sequence
  Description of Artificial Sequence: Synthetic oligonucleotide
uuacuaagcagccagaagg

SEQ ID NO: 2853784 - RNA, 19 nt, Artificial Sequence
  Description of Artificial Sequence: Synthetic oligonucleotide
ugaauguuuacuaagcagc

SEQ ID NO: 2853785 - RNA, 19 nt, Artificial Sequence
  Description of Artificial Sequence: Synthetic oligonucleotide
uguaacuccacacagguca

SEQ ID NO: 2853786 - RNA, 19 nt, Artificial Sequence
  Description of Artificial Sequence: Synthetic oligonucleotide
cuaaaggaaguccagaacc

SEQ ID NO: 2853787 - RNA, 19 nt, Artificial Sequence
  Description of Artificial Sequence: Synthetic oligonucleotide
guccauuucaaauuguucg

SEQ ID NO: 2853788 - RNA, 19 nt, Artificial Sequence
  Description of Artificial Sequence: Synthetic oligonucleotide
auuagaugaggccagcugg

SEQ ID NO: 2853789 - RNA, 19 nt, Artificial Sequence
  Description of Artificial Sequence: Synthetic oligonucleotide
ucguagaugauccuggugc

SEQ ID NO: 2853790 - RNA, 19 nt, Artificial Sequence
  Description of Artificial Sequence: Synthetic oligonucleotide
accagagaaagcuaagggc

SEQ ID NO: 2853791 - RNA, 19 nt, Artificial Sequence
  Description of Artificial Sequence: Synthetic oligonucleotide
acauguauagaccagagaa

SEQ ID NO: 2853792 - RNA, 19 nt, Artificial Sequence
  Description of Artificial Sequence: Synthetic oligonucleotide
aaagcuaagggcuuggcaa

SEQ ID NO: 2853793 - RNA, 19 nt, Artificial Sequence
  Description of Artificial Sequence: Synthetic oligonucleotide
uguugaauguuuacuaagc

SEQ ID NO: 2853794 - RNA, 19 nt, Artificial Sequence
  Description of Artificial Sequence: Synthetic oligonucleotide
aaugggugaguucuugcac

SEQ ID NO: 2853795 - RNA, 19 nt, Artificial Sequence
  Description of Artificial Sequence: Synthetic oligonucleotide
agcaacuccagcuuggagg

SEQ ID NO: 2853796 - RNA, 19 nt, Artificial Sequence
  Description of Artificial Sequence: Synthetic oligonucleotide
uugaauguuuacuaagcag

SEQ ID NO: 2853797 - RNA, 19 nt, Artificial Sequence
  Description of Artificial Sequence: Synthetic oligonucleotide
uccauuguauuacaugucc

SEQ ID NO: 2853798 - RNA, 19 nt, Artificial Sequence
  Description of Artificial Sequence: Synthetic oligonucleotide
ucuguaacuccacacaggu

SEQ ID NO: 2853799 - RNA, 19 nt, Artificial Sequence
  Description of Artificial Sequence: Synthetic oligonucleotide
auguuuacuaagcagccag

SEQ ID NO: 2853800 - RNA, 19 nt, Artificial Sequence
  Description of Artificial Sequence: Synthetic oligonucleotide
acuaaaggaaguccagaac

SEQ ID NO: 2853801 - RNA, 19 nt, Artificial Sequence
  Description of Artificial Sequence: Synthetic oligonucleotide
accaacaauucacucuucc

SEQ ID NO: 2853802 - RNA, 19 nt, Artificial Sequence
  Description of Artificial Sequence: Synthetic oligonucleotide
aacaauucacucuuccaga

SEQ ID NO: 2853803 - RNA, 19 nt, Artificial Sequence
  Description of Artificial Sequence: Synthetic oligonucleotide
gauacccuagaagaggugg

SEQ ID NO: 2853804 - RNA, 19 nt, Artificial Sequence
  Description of Artificial Sequence: Synthetic oligonucleotide
uuguugaauguuuacuaag

SEQ ID NO: 2853805 - RNA, 19 nt, Artificial Sequence
  Description of Artificial Sequence: Synthetic oligonucleotide
uuuacuaagcagccagaag

SEQ ID NO: 2853806 - RNA, 19 nt, Artificial Sequence
  Description of Artificial Sequence: Synthetic oligonucleotide
gaccagagaaagcuaaggg

SEQ ID NO: 2853807 - RNA, 19 nt, Artificial Sequence
  Description of Artificial Sequence: Synthetic oligonucleotide
aacuaaaggaaguccagaa

SEQ ID NO: 2853808 - RNA, 19 nt, Artificial Sequence
  Description of Artificial Sequence: Synthetic oligonucleotide
agaaccaacaauucacucu

SEQ ID NO: 2853809 - RNA, 19 nt, Artificial Sequence
  Description of Artificial Sequence: Synthetic oligonucleotide
uucaaauuguucgucaucu

SEQ ID NO: 2853810 - RNA, 19 nt, Artificial Sequence
  Description of Artificial Sequence: Synthetic oligonucleotide
uuucggucguagaugaucc

SEQ ID NO: 2853811 - RNA, 19 nt, Artificial Sequence
  Description of Artificial Sequence: Synthetic oligonucleotide
caacaauucacucuuccag

SEQ ID NO: 2853812 - RNA, 19 nt, Artificial Sequence
  Description of Artificial Sequence: Synthetic oligonucleotide
acucuuccagauuagauga

SEQ ID NO: 2853813 - RNA, 19 nt, Artificial Sequence
  Description of Artificial Sequence: Synthetic oligonucleotide
ucuuccauuguauuacaug

SEQ ID NO: 2853814 - RNA, 19 nt, Artificial Sequence
  Description of Artificial Sequence: Synthetic oligonucleotide
aggugacauacucuguucc

SEQ ID NO: 2853815 - RNA, 19 nt, Artificial Sequence
  Description of Artificial Sequence: Synthetic oligonucleotide
auguauagaccagagaaag

SEQ ID NO: 2853816 - RNA, 19 nt, Artificial Sequence
  Description of Artificial Sequence: Synthetic oligonucleotide
aaggugacauacucuguuc

SEQ ID NO: 2853817 - RNA, 19 nt, Artificial Sequence
  Description of Artificial Sequence: Synthetic oligonucleotide
uuacauguccauuucaaau

SEQ ID NO: 2853818 - RNA, 19 nt, Artificial Sequence
  Description of Artificial Sequence: Synthetic oligonucleotide
ucuguuaucucuuccucug

SEQ ID NO: 2853819 - RNA, 19 nt, Artificial Sequence
  Description of Artificial Sequence: Synthetic oligonucleotide
uaagggauccuucuguaac

SEQ ID NO: 2853820 - RNA, 19 nt, Artificial Sequence
  Description of Artificial Sequence: Synthetic oligonucleotide
uaaaggaaguccagaacca

SEQ ID NO: 2853821 - RNA, 19 nt, Artificial Sequence
  Description of Artificial Sequence: Synthetic oligonucleotide
uacucuguuccccagugcc

SEQ ID NO: 2853822 - RNA, 19 nt, Artificial Sequence
  Description of Artificial Sequence: Synthetic oligonucleotide
uuggauacccuagaagagg

SEQ ID NO: 2853823 - RNA, 19 nt, Artificial Sequence
  Description of Artificial Sequence: Synthetic oligonucleotide
uucgucaucuguuaucucu

SEQ ID NO: 2853824 - RNA, 19 nt, Artificial Sequence
  Description of Artificial Sequence: Synthetic oligonucleotide
uucuguaacuccacacagg

SEQ ID NO: 2853825 - RNA, 19 nt, Artificial Sequence
  Description of Artificial Sequence: Synthetic oligonucleotide
gaccccgggaaucugaggg

SEQ ID NO: 2853826 - RNA, 19 nt, Artificial Sequence
  Description of Artificial Sequence: Synthetic oligonucleotide
uuugggaggaacauguaua

SEQ ID NO: 2853827 - RNA, 19 nt, Artificial Sequence
  Description of Artificial Sequence: Synthetic oligonucleotide
uugggaggaacauguauag

SEQ ID NO: 2853828 - RNA, 19 nt, Artificial Sequence
  Description of Artificial Sequence: Synthetic oligonucleotide
uccagauuagaugaggcca

SEQ ID NO: 2853829 - RNA, 19 nt, Artificial Sequence
  Description of Artificial Sequence: Synthetic oligonucleotide
gauuagaugaggccagcug

SEQ ID NO: 2853830 - RNA, 19 nt, Artificial Sequence
  Description of Artificial Sequence: Synthetic oligonucleotide
uguauagaccagagaaagc

SEQ ID NO: 2853831 - RNA, 19 nt, Artificial Sequence
  Description of Artificial Sequence: Synthetic oligonucleotide
ucaucuuccauuguauuac

SEQ ID NO: 2853832 - RNA, 19 nt, Artificial Sequence
  Description of Artificial Sequence: Synthetic oligonucleotide
cagaaggugacauacucug

SEQ ID NO: 2853833 - RNA, 19 nt, Artificial Sequence
  Description of Artificial Sequence: Synthetic oligonucleotide
ugaguucuugcacugcagc

SEQ ID NO: 2853834 - RNA, 19 nt, Artificial Sequence
  Description of Artificial Sequence: Synthetic oligonucleotide
aacagggagguguccgggc

SEQ ID NO: 2853835 - RNA, 19 nt, Artificial Sequence
  Description of Artificial Sequence: Synthetic oligonucleotide
ucagaacuaaaggaagucc

SEQ ID NO: 2853836 - RNA, 19 nt, Artificial Sequence
  Description of Artificial Sequence: Synthetic oligonucleotide
aagcuaagggcuuggcaag

SEQ ID NO: 2853837 - RNA, 19 nt, Artificial Sequence
  Description of Artificial Sequence: Synthetic oligonucleotide
acauguccauuucaaauug

SEQ ID NO: 2853838 - RNA, 19 nt, Artificial Sequence
  Description of Artificial Sequence: Synthetic oligonucleotide
ucuuccagauuagaugagg

SEQ ID NO: 2853839 - RNA, 19 nt, Artificial Sequence
  Description of Artificial Sequence: Synthetic oligonucleotide
gaauguuuacuaagcagcc

SEQ ID NO: 2853840 - RNA, 19 nt, Artificial Sequence
  Description of Artificial Sequence: Synthetic oligonucleotide
aacaguggcauaagggauc

SEQ ID NO: 2853841 - RNA, 19 nt, Artificial Sequence
  Description of Artificial Sequence: Synthetic oligonucleotide
aacauguauagaccagaga

SEQ ID NO: 2853842 - RNA, 19 nt, Artificial Sequence
  Description of Artificial Sequence: Synthetic oligonucleotide
uuagaugaggccagcuggc

SEQ ID NO: 2853843 - RNA, 19 nt, Artificial Sequence
  Description of Artificial Sequence: Synthetic oligonucleotide
cuuccagauuagaugaggc

SEQ ID NO: 2853844 - RNA, 19 nt, Artificial Sequence
  Description of Artificial Sequence: Synthetic oligonucleotide
uuguauuacauguccauuu

SEQ ID NO: 2853845 - RNA, 19 nt, Artificial Sequence
  Description of Artificial Sequence: Synthetic oligonucleotide
cuuggauacccuagaagag

SEQ ID NO: 2853846 - RNA, 19 nt, Artificial Sequence
  Description of Artificial Sequence: Synthetic oligonucleotide
cacucuuccagauuagaug

SEQ ID NO: 2853847 - RNA, 19 nt, Artificial Sequence
  Description of Artificial Sequence: Synthetic oligonucleotide
uccauuucaaauuguucgu

SEQ ID NO: 2853848 - RNA, 19 nt, Artificial Sequence
  Description of Artificial Sequence: Synthetic oligonucleotide
aaggaaguccagaaccaac

SEQ ID NO: 2853849 - RNA, 19 nt, Artificial Sequence
  Description of Artificial Sequence: Synthetic oligonucleotide
gaggaacauguauagacca

SEQ ID NO: 2853850 - RNA, 19 nt, Artificial Sequence
  Description of Artificial Sequence: Synthetic oligonucleotide
cuucuguaacuccacacag

SEQ ID NO: 2853851 - RNA, 19 nt, Artificial Sequence
  Description of Artificial Sequence: Synthetic oligonucleotide
aaguccagaaccaacaauu

SEQ ID NO: 2853852 - RNA, 19 nt, Artificial Sequence
  Description of Artificial Sequence: Synthetic oligonucleotide
aauuguucgucaucuguua

SEQ ID NO: 2853853 - RNA, 19 nt, Artificial Sequence
  Description of Artificial Sequence: Synthetic oligonucleotide
agaugaggccagcuggccc

SEQ ID NO: 2853854 - RNA, 19 nt, Artificial Sequence
  Description of Artificial Sequence: Synthetic oligonucleotide
uacauguccauuucaaauu

SEQ ID NO: 2853855 - RNA, 19 nt, Artificial Sequence
  Description of Artificial Sequence: Synthetic oligonucleotide
ugccucagaacuaaaggaa

SEQ ID NO: 2853856 - RNA, 19 nt, Artificial Sequence
  Description of Artificial Sequence: Synthetic oligonucleotide
uaagcagccagaaggugac

SEQ ID NO: 2853857 - RNA, 19 nt, Artificial Sequence
  Description of Artificial Sequence: Synthetic oligonucleotide
uguucgucaucuguuaucu

SEQ ID NO: 2853858 - RNA, 19 nt, Artificial Sequence
  Description of Artificial Sequence: Synthetic oligonucleotide
uuccagauuagaugaggcc

SEQ ID NO: 2853859 - RNA, 19 nt, Artificial Sequence
  Description of Artificial Sequence: Synthetic oligonucleotide
uacuaagcagccagaaggu

SEQ ID NO: 2853860 - RNA, 19 nt, Artificial Sequence
  Description of Artificial Sequence: Synthetic oligonucleotide
uggauacccuagaagaggu

SEQ ID NO: 2853861 - RNA, 19 nt, Artificial Sequence
  Description of Artificial Sequence: Synthetic oligonucleotide
uuucaaauuguucgucauc

SEQ ID NO: 2853862 - RNA, 19 nt, Artificial Sequence
  Description of Artificial Sequence: Synthetic oligonucleotide
guugaauguuuacuaagca

SEQ ID NO: 2853863 - RNA, 19 nt, Artificial Sequence
  Description of Artificial Sequence: Synthetic oligonucleotide
uuggcaagugcccacugcu

SEQ ID NO: 2853864 - RNA, 19 nt, Artificial Sequence
  Description of Artificial Sequence: Synthetic oligonucleotide
gggaggaacauguauagac

SEQ ID NO: 2853865 - RNA, 19 nt, Artificial Sequence
  Description of Artificial Sequence: Synthetic oligonucleotide
uccacacaggucaucuucc

SEQ ID NO: 2853866 - RNA, 19 nt, Artificial Sequence
  Description of Artificial Sequence: Synthetic oligonucleotide
guucuugcacugcagcagg

SEQ ID NO: 2853867 - RNA, 19 nt, Artificial Sequence
  Description of Artificial Sequence: Synthetic oligonucleotide
gaacauguauagaccagag

SEQ ID NO: 2853868 - RNA, 19 nt, Artificial Sequence
  Description of Artificial Sequence: Synthetic oligonucleotide
acaguggcauaagggaucc

SEQ ID NO: 2853869 - RNA, 19 nt, Artificial Sequence
  Description of Artificial Sequence: Synthetic oligonucleotide
aauguuuacuaagcagcca

SEQ ID NO: 2853870 - RNA, 19 nt, Artificial Sequence
  Description of Artificial Sequence: Synthetic oligonucleotide
aucugagggaggcaacagg

SEQ ID NO: 2853871 - RNA, 19 nt, Artificial Sequence
  Description of Artificial Sequence: Synthetic oligonucleotide
aagggcuuggcaagugccc

SEQ ID NO: 2853872 - RNA, 19 nt, Artificial Sequence
  Description of Artificial Sequence: Synthetic oligonucleotide
agaccagagaaagcuaagg

SEQ ID NO: 2853873 - RNA, 19 nt, Artificial Sequence
  Description of Artificial Sequence: Synthetic oligonucleotide
auuucaaauuguucgucau

SEQ ID NO: 2853874 - RNA, 19 nt, Artificial Sequence
  Description of Artificial Sequence: Synthetic oligonucleotide
uguuuacuaagcagccaga

SEQ ID NO: 2853875 - RNA, 19 nt, Artificial Sequence
  Description of Artificial Sequence: Synthetic oligonucleotide
uagaccagagaaagcuaag

SEQ ID NO: 2853876 - RNA, 19 nt, Artificial Sequence
  Description of Artificial Sequence: Synthetic oligonucleotide
uguuaucucuuccucuguc

SEQ ID NO: 2853877 - RNA, 19 nt, Artificial Sequence
  Description of Artificial Sequence: Synthetic oligonucleotide
cuuccauuguauuacaugu

SEQ ID NO: 2853878 - RNA, 19 nt, Artificial Sequence
  Description of Artificial Sequence: Synthetic oligonucleotide
cagaacuaaaggaagucca

SEQ ID NO: 2853879 - RNA, 19 nt, Artificial Sequence
  Description of Artificial Sequence: Synthetic oligonucleotide
auacucuguuccccagugc

SEQ ID NO: 2853880 - RNA, 19 nt, Artificial Sequence
  Description of Artificial Sequence: Synthetic oligonucleotide
uguugggcgaguugugacc

SEQ ID NO: 2853881 - RNA, 19 nt, Artificial Sequence
  Description of Artificial Sequence: Synthetic oligonucleotide
gcugccucagaacuaaagg

SEQ ID NO: 2853882 - RNA, 19 nt, Artificial Sequence
  Description of Artificial Sequence: Synthetic oligonucleotide
auuacauguccauuucaaa

SEQ ID NO: 2853883 - RNA, 19 nt, Artificial Sequence
  Description of Artificial Sequence: Synthetic oligonucleotide
aguucuugcacugcagcag

SEQ ID NO: 2853884 - RNA, 19 nt, Artificial Sequence
  Description of Artificial Sequence: Synthetic oligonucleotide
ucacucuuccagauuagau

SEQ ID NO: 2853885 - RNA, 19 nt, Artificial Sequence
  Description of Artificial Sequence: Synthetic oligonucleotide
ucaaauuguucgucaucug

SEQ ID NO: 2853886 - RNA, 19 nt, Artificial Sequence
  Description of Artificial Sequence: Synthetic oligonucleotide
aacuccacacaggucaucu

SEQ ID NO: 2853887 - RNA, 19 nt, Artificial Sequence
  Description of Artificial Sequence: Synthetic oligonucleotide
uggcaacaguggcauaagg

SEQ ID NO: 2853888 - RNA, 19 nt, Artificial Sequence
  Description of Artificial Sequence: Synthetic oligonucleotide
gaaagcuaagggcuuggca

SEQ ID NO: 2853889 - RNA, 19 nt, Artificial Sequence
  Description of Artificial Sequence: Synthetic oligonucleotide
uauagaccagagaaagcua

SEQ ID NO: 2853890 - RNA, 19 nt, Artificial Sequence
  Description of Artificial Sequence: Synthetic oligonucleotide
cauuucaaauuguucguca

SEQ ID NO: 2853891 - RNA, 19 nt, Artificial Sequence
  Description of Artificial Sequence: Synthetic oligonucleotide
gcaacuccagcuuggaggg

SEQ ID NO: 2853892 - RNA, 19 nt, Artificial Sequence
  Description of Artificial Sequence: Synthetic oligonucleotide
cuaagcagccagaagguga

SEQ ID NO: 2853893 - RNA, 19 nt, Artificial Sequence
  Description of Artificial Sequence: Synthetic oligonucleotide
gagguguccgggcaauggg

SEQ ID NO: 2853894 - RNA, 19 nt, Artificial Sequence
  Description of Artificial Sequence: Synthetic oligonucleotide
uccuucuguaacuccacac

SEQ ID NO: 2853895 - RNA, 19 nt, Artificial Sequence
  Description of Artificial Sequence: Synthetic oligonucleotide
agugccagcccugagggag

SEQ ID NO: 2853896 - RNA, 19 nt, Artificial Sequence
  Description of Artificial Sequence: Synthetic oligonucleotide
aaucugagggaggcaacag

SEQ ID NO: 2853897 - RNA, 19 nt, Artificial Sequence
  Description of Artificial Sequence: Synthetic oligonucleotide
agaacuaaaggaaguccag

SEQ ID NO: 2853898 - RNA, 19 nt, Artificial Sequence
  Description of Artificial Sequence: Synthetic oligonucleotide
ugacauacucuguucccca

SEQ ID NO: 2853899 - RNA, 19 nt, Artificial Sequence
  Description of Artificial Sequence: Synthetic oligonucleotide
guauagaccagagaaagcu

SEQ ID NO: 2853900 - RNA, 19 nt, Artificial Sequence
  Description of Artificial Sequence: Synthetic oligonucleotide
cacaggucaucuuccauug

SEQ ID NO: 2853901 - RNA, 19 nt, Artificial Sequence
  Description of Artificial Sequence: Synthetic oligonucleotide
acaauucacucuuccagau

SEQ ID NO: 2853902 - RNA, 19 nt, Artificial Sequence
  Description of Artificial Sequence: Synthetic oligonucleotide
agggccaggguuugggagg

SEQ ID NO: 2853903 - RNA, 19 nt, Artificial Sequence
  Description of Artificial Sequence: Synthetic oligonucleotide
cauacucuguuccccagug

SEQ ID NO: 2853904 - RNA, 19 nt, Artificial Sequence
  Description of Artificial Sequence: Synthetic oligonucleotide
aacuccagcuuggagggug

SEQ ID NO: 2853905 - RNA, 19 nt, Artificial Sequence
  Description of Artificial Sequence: Synthetic oligonucleotide
aguugugaccccgggaauc

SEQ ID NO: 2853906 - RNA, 19 nt, Artificial Sequence
  Description of Artificial Sequence: Synthetic oligonucleotide
uuccauuguauuacauguc

SEQ ID NO: 2853907 - RNA, 19 nt, Artificial Sequence
  Description of Artificial Sequence: Synthetic oligonucleotide
aagugcccacugcuauccc

SEQ ID NO: 2853908 - RNA, 19 nt, Artificial Sequence
  Description of Artificial Sequence: Synthetic oligonucleotide
agaaagcuaagggcuuggc

SEQ ID NO: 2853909 - RNA, 19 nt, Artificial Sequence
  Description of Artificial Sequence: Synthetic oligonucleotide
ggcaacaguggcauaaggg

SEQ ID NO: 2853910 - RNA, 19 nt, Artificial Sequence
  Description of Artificial Sequence: Synthetic oligonucleotide
gaggugguggcaacagugg

SEQ ID NO: 2853911 - RNA, 19 nt, Artificial Sequence
  Description of Artificial Sequence: Synthetic oligonucleotide
gcaacaguggcauaaggga

SEQ ID NO: 2853912 - RNA, 19 nt, Artificial Sequence
  Description of Artificial Sequence: Synthetic oligonucleotide
uggcauaagggauccuucu

SEQ ID NO: 2853913 - RNA, 19 nt, Artificial Sequence
  Description of Artificial Sequence: Synthetic oligonucleotide
gacauacucuguuccccag

SEQ ID NO: 2853914 - RNA, 19 nt, Artificial Sequence
  Description of Artificial Sequence: Synthetic oligonucleotide
uuguucgucaucuguuauc

SEQ ID NO: 2853915 - RNA, 19 nt, Artificial Sequence
  Description of Artificial Sequence: Synthetic oligonucleotide
cuaagggcuuggcaagugc

SEQ ID NO: 2853916 - RNA, 19 nt, Artificial Sequence
  Description of Artificial Sequence: Synthetic oligonucleotide
aguccagaaccaacaauuc

SEQ ID NO: 2853917 - RNA, 19 nt, Artificial Sequence
  Description of Artificial Sequence: Synthetic oligonucleotide
agaggugguggcaacagug

SEQ ID NO: 2853918 - RNA, 19 nt, Artificial Sequence
  Description of Artificial Sequence: Synthetic oligonucleotide
cugccucagaacuaaagga

SEQ ID NO: 2853919 - RNA, 19 nt, Artificial Sequence
  Description of Artificial Sequence: Synthetic oligonucleotide
gagaaagcuaagggcuugg

SEQ ID NO: 2853920 - RNA, 19 nt, Artificial Sequence
  Description of Artificial Sequence: Synthetic oligonucleotide
ugugaccccgggaaucuga

SEQ ID NO: 2853921 - RNA, 19 nt, Artificial Sequence
  Description of Artificial Sequence: Synthetic oligonucleotide
ugguccagcugccucagaa

SEQ ID NO: 2853922 - RNA, 19 nt, Artificial Sequence
  Description of Artificial Sequence: Synthetic oligonucleotide
gaguucuugcacugcagca

SEQ ID NO: 2853923 - RNA, 19 nt, Artificial Sequence
  Description of Artificial Sequence: Synthetic oligonucleotide
acacaggucaucuuccauu

SEQ ID NO: 2853924 - RNA, 19 nt, Artificial Sequence
  Description of Artificial Sequence: Synthetic oligonucleotide
uggcccuuggauacccuag

SEQ ID NO: 2853925 - RNA, 19 nt, Artificial Sequence
  Description of Artificial Sequence: Synthetic oligonucleotide
aaaggaaguccagaaccaa

SEQ ID NO: 2853926 - RNA, 19 nt, Artificial Sequence
  Description of Artificial Sequence: Synthetic oligonucleotide
gagggugggacuguugggc

SEQ ID NO: 2853927 - RNA, 19 nt, Artificial Sequence
  Description of Artificial Sequence: Synthetic oligonucleotide
cagcaggaacuuucggucg

SEQ ID NO: 2853928 - RNA, 19 nt, Artificial Sequence
  Description of Artificial Sequence: Synthetic oligonucleotide
cauguauagaccagagaaa

SEQ ID NO: 2853929 - RNA, 19 nt, Artificial Sequence
  Description of Artificial Sequence: Synthetic oligonucleotide
agggugggacuguugggcg

SEQ ID NO: 2853930 - RNA, 19 nt, Artificial Sequence
  Description of Artificial Sequence: Synthetic oligonucleotide
cucagaacuaaaggaaguc

SEQ ID NO: 2853931 - RNA, 19 nt, Artificial Sequence
  Description of Artificial Sequence: Synthetic oligonucleotide
cuuucggucguagaugauc

SEQ ID NO: 2853932 - RNA, 19 nt, Artificial Sequence
  Description of Artificial Sequence: Synthetic oligonucleotide
caagugcccacugcuaucc

SEQ ID NO: 2853933 - RNA, 19 nt, Artificial Sequence
  Description of Artificial Sequence: Synthetic oligonucleotide
gaacuaaaggaaguccaga

SEQ ID NO: 2853934 - RNA, 19 nt, Artificial Sequence
  Description of Artificial Sequence: Synthetic oligonucleotide
aagaggugguggcaacagu

SEQ ID NO: 2853935 - RNA, 19 nt, Artificial Sequence
  Description of Artificial Sequence: Synthetic oligonucleotide
aggaaguccagaaccaaca

SEQ ID NO: 2853936 - RNA, 19 nt, Artificial Sequence
  Description of Artificial Sequence: Synthetic oligonucleotide
auuguucgucaucuguuau

SEQ ID NO: 2853937 - RNA, 19 nt, Artificial Sequence
  Description of Artificial Sequence: Synthetic oligonucleotide
auagaccagagaaagcuaa

SEQ ID NO: 2853938 - RNA, 19 nt, Artificial Sequence
  Description of Artificial Sequence: Synthetic oligonucleotide
cuuggcaagugcccacugc

SEQ ID NO: 2853939 - RNA, 19 nt, Artificial Sequence
  Description of Artificial Sequence: Synthetic oligonucleotide
gugacauacucuguucccc

SEQ ID NO: 2853940 - RNA, 19 nt, Artificial Sequence
  Description of Artificial Sequence: Synthetic oligonucleotide
cagaaccaacaauucacuc

SEQ ID NO: 2853941 - RNA, 19 nt, Artificial Sequence
  Description of Artificial Sequence: Synthetic oligonucleotide
auaagggauccuucuguaa

SEQ ID NO: 2853942 - RNA, 19 nt, Artificial Sequence
  Description of Artificial Sequence: Synthetic oligonucleotide
ucggucguagaugauccug

SEQ ID NO: 2853943 - RNA, 19 nt, Artificial Sequence
  Description of Artificial Sequence: Synthetic oligonucleotide
acccuagaagagguggugg

SEQ ID NO: 2853944 - RNA, 19 nt, Artificial Sequence
  Description of Artificial Sequence: Synthetic oligonucleotide
cuucagcaacuccagcuug

SEQ ID NO: 2853945 - RNA, 19 nt, Artificial Sequence
  Description of Artificial Sequence: Synthetic oligonucleotide
agagaaagcuaagggcuug

SEQ ID NO: 2853946 - RNA, 19 nt, Artificial Sequence
  Description of Artificial Sequence: Synthetic oligonucleotide
ggaggaacauguauagacc

SEQ ID NO: 2853947 - RNA, 19 nt, Artificial Sequence
  Description of Artificial Sequence: Synthetic oligonucleotide
gucaucuuccauuguauua

SEQ ID NO: 2853948 - RNA, 19 nt, Artificial Sequence
  Description of Artificial Sequence: Synthetic oligonucleotide
auuguauuacauguccauu

SEQ ID NO: 2853949 - RNA, 19 nt, Artificial Sequence
  Description of Artificial Sequence: Synthetic oligonucleotide
cagccagaaggugacauac

SEQ ID NO: 2853950 - RNA, 19 nt, Artificial Sequence
  Description of Artificial Sequence: Synthetic oligonucleotide
ugagggagggccaggguuu

SEQ ID NO: 2853951 - RNA, 19 nt, Artificial Sequence
  Description of Artificial Sequence: Synthetic oligonucleotide
ucgucaucuguuaucucuu

SEQ ID NO: 2853952 - RNA, 19 nt, Artificial Sequence
  Description of Artificial Sequence: Synthetic oligonucleotide
gaaucugagggaggcaaca

SEQ ID NO: 2853953 - RNA, 19 nt, Artificial Sequence
  Description of Artificial Sequence: Synthetic oligonucleotide
guccagaaccaacaauuca

SEQ ID NO: 2853954 - RNA, 19 nt, Artificial Sequence
  Description of Artificial Sequence: Synthetic oligonucleotide
aggaacauguauagaccag

SEQ ID NO: 2853955 - RNA, 19 nt, Artificial Sequence
  Description of Artificial Sequence: Synthetic oligonucleotide
guugggcgaguugugaccc

SEQ ID NO: 2853956 - RNA, 19 nt, Artificial Sequence
  Description of Artificial Sequence: Synthetic oligonucleotide
acauacucuguuccccagu

SEQ ID NO: 2853957 - RNA, 19 nt, Artificial Sequence
  Description of Artificial Sequence: Synthetic oligonucleotide
agcaggaacuuucggucgu

SEQ ID NO: 2853958 - RNA, 19 nt, Artificial Sequence
  Description of Artificial Sequence: Synthetic oligonucleotide
uccucugucugcuucuguu

SEQ ID NO: 2853959 - RNA, 19 nt, Artificial Sequence
  Description of Artificial Sequence: Synthetic oligonucleotide
uaucccugguccagcugcc

SEQ ID NO: 2853960 - RNA, 19 nt, Artificial Sequence
  Description of Artificial Sequence: Synthetic oligonucleotide
caaauuguucgucaucugu

SEQ ID NO: 2853961 - RNA, 19 nt, Artificial Sequence
  Description of Artificial Sequence: Synthetic oligonucleotide
cuguugggcgaguugugac

SEQ ID NO: 2853962 - RNA, 19 nt, Artificial Sequence
  Description of Artificial Sequence: Synthetic oligonucleotide
gaaggugacauacucuguu

SEQ ID NO: 2853963 - RNA, 19 nt, Artificial Sequence
  Description of Artificial Sequence: Synthetic oligonucleotide
ccagauuagaugaggccag

SEQ ID NO: 2853964 - RNA, 19 nt, Artificial Sequence
  Description of Artificial Sequence: Synthetic oligonucleotide
cucuuccagauuagaugag

SEQ ID NO: 2853965 - RNA, 19 nt, Artificial Sequence
  Description of Artificial Sequence: Synthetic oligonucleotide
uacccuagaagagguggug

SEQ ID NO: 2853966 - RNA, 19 nt, Artificial Sequence
  Description of Artificial Sequence: Synthetic oligonucleotide
gucguagaugauccuggug

SEQ ID NO: 2853967 - RNA, 19 nt, Artificial Sequence
  Description of Artificial Sequence: Synthetic oligonucleotide
gcagcaggaacuuucgguc

SEQ ID NO: 2853968 - RNA, 19 nt, Artificial Sequence
  Description of Artificial Sequence: Synthetic oligonucleotide
acuaagcagccagaaggug

SEQ ID NO: 2853969 - RNA, 19 nt, Artificial Sequence
  Description of Artificial Sequence: Synthetic oligonucleotide
ugggcgaguugugaccccg

SEQ ID NO: 2853970 - RNA, 19 nt, Artificial Sequence
  Description of Artificial Sequence: Synthetic oligonucleotide
agugcccacugcuaucccu

SEQ ID NO: 2853971 - RNA, 19 nt, Artificial Sequence
  Description of Artificial Sequence: Synthetic oligonucleotide
aaccaacaauucacucuuc

SEQ ID NO: 2853972 - RNA, 19 nt, Artificial Sequence
  Description of Artificial Sequence: Synthetic oligonucleotide
aguggcauaagggauccuu

SEQ ID NO: 2853973 - RNA, 19 nt, Artificial Sequence
  Description of Artificial Sequence: Synthetic oligonucleotide
aggaacuuucggucguaga

SEQ ID NO: 2853974 - RNA, 19 nt, Artificial Sequence
  Description of Artificial Sequence: Synthetic oligonucleotide
gaugaggccagcuggcccu

SEQ ID NO: 2853975 - RNA, 19 nt, Artificial Sequence
  Description of Artificial Sequence: Synthetic oligonucleotide
uguccgggcaaugggugag

SEQ ID NO: 2853976 - RNA, 19 nt, Artificial Sequence
  Description of Artificial Sequence: Synthetic oligonucleotide
uucuugcacugcagcagga

SEQ ID NO: 2853977 - RNA, 19 nt, Artificial Sequence
  Description of Artificial Sequence: Synthetic oligonucleotide
guuuacuaagcagccagaa

SEQ ID NO: 2853978 - RNA, 19 nt, Artificial Sequence
  Description of Artificial Sequence: Synthetic oligonucleotide
gauccuucuguaacuccac

SEQ ID NO: 2853979 - RNA, 19 nt, Artificial Sequence
  Description of Artificial Sequence: Synthetic oligonucleotide
acagggagguguccgggca

SEQ ID NO: 2853980 - RNA, 19 nt, Artificial Sequence
  Description of Artificial Sequence: Synthetic oligonucleotide
uagaugaggccagcuggcc

SEQ ID NO: 2853981 - RNA, 19 nt, Artificial Sequence
  Description of Artificial Sequence: Synthetic oligonucleotide
agauuagaugaggccagcu

SEQ ID NO: 2853982 - RNA, 19 nt, Artificial Sequence
  Description of Artificial Sequence: Synthetic oligonucleotide
ugaccccgggaaucugagg

SEQ ID NO: 2853983 - RNA, 19 nt, Artificial Sequence
  Description of Artificial Sequence: Synthetic oligonucleotide
guuaucucuuccucugucu

SEQ ID NO: 2853984 - RNA, 19 nt, Artificial Sequence
  Description of Artificial Sequence: Synthetic oligonucleotide
cauuguauuacauguccau

SEQ ID NO: 2853985 - RNA, 19 nt, Artificial Sequence
  Description of Artificial Sequence: Synthetic oligonucleotide
agcuggcccuuggauaccc

SEQ ID NO: 2853986 - RNA, 19 nt, Artificial Sequence
  Description of Artificial Sequence: Synthetic oligonucleotide
ccagugccagcccugaggg

SEQ ID NO: 2853987 - RNA, 19 nt, Artificial Sequence
  Description of Artificial Sequence: Synthetic oligonucleotide
ggcauaagggauccuucug

SEQ ID NO: 2853988 - RNA, 19 nt, Artificial Sequence
  Description of Artificial Sequence: Synthetic oligonucleotide
uguuccccagugccagccc

SEQ ID NO: 2853989 - RNA, 19 nt, Artificial Sequence
  Description of Artificial Sequence: Synthetic oligonucleotide
ggcaacagggagguguccg

SEQ ID NO: 2853990 - RNA, 19 nt, Artificial Sequence
  Description of Artificial Sequence: Synthetic oligonucleotide
agcugccucagaacuaaag

SEQ ID NO: 2853991 - RNA, 19 nt, Artificial Sequence
  Description of Artificial Sequence: Synthetic oligonucleotide
uuggagggugggacuguug

SEQ ID NO: 2853992 - RNA, 19 nt, Artificial Sequence
  Description of Artificial Sequence: Synthetic oligonucleotide
ucagcaacuccagcuugga

SEQ ID NO: 2853993 - RNA, 19 nt, Artificial Sequence
  Description of Artificial Sequence: Synthetic oligonucleotide
ggaacauguauagaccaga

SEQ ID NO: 2853994 - RNA, 19 nt, Artificial Sequence
  Description of Artificial Sequence: Synthetic oligonucleotide
ugcuaucccugguccagcu

SEQ ID NO: 2853995 - RNA, 19 nt, Artificial Sequence
  Description of Artificial Sequence: Synthetic oligonucleotide
ggugaguucuugcacugca

SEQ ID NO: 2853996 - RNA, 19 nt, Artificial Sequence
  Description of Artificial Sequence: Synthetic oligonucleotide
gaaguccagaaccaacaau

SEQ ID NO: 2853997 - RNA, 19 nt, Artificial Sequence
  Description of Artificial Sequence: Synthetic oligonucleotide
acuguugggcgaguuguga

SEQ ID NO: 2853998 - RNA, 19 nt, Artificial Sequence
  Description of Artificial Sequence: Synthetic oligonucleotide
auucacucuuccagauuag

SEQ ID NO: 2853999 - RNA, 19 nt, Artificial Sequence
  Description of Artificial Sequence: Synthetic oligonucleotide
gccucagaacuaaaggaag

SEQ ID NO: 2854000 - RNA, 19 nt, Artificial Sequence
  Description of Artificial Sequence: Synthetic oligonucleotide
gugaguucuugcacugcag

SEQ ID NO: 2854001 - RNA, 19 nt, Artificial Sequence
  Description of Artificial Sequence: Synthetic oligonucleotide
guuugggaggaacauguau

SEQ ID NO: 2854002 - RNA, 19 nt, Artificial Sequence
  Description of Artificial Sequence: Synthetic oligonucleotide
ugggaggaacauguauaga

SEQ ID NO: 2854003 - RNA, 19 nt, Artificial Sequence
  Description of Artificial Sequence: Synthetic oligonucleotide
aggguuugggaggaacaug

SEQ ID NO: 2854004 - RNA, 19 nt, Artificial Sequence
  Description of Artificial Sequence: Synthetic oligonucleotide
ccagagaaagcuaagggcu

SEQ ID NO: 2854005 - RNA, 19 nt, Artificial Sequence
  Description of Artificial Sequence: Synthetic oligonucleotide
caacagggagguguccggg

SEQ ID NO: 2854006 - RNA, 19 nt, Artificial Sequence
  Description of Artificial Sequence: Synthetic oligonucleotide
uccagcugccucagaacua

SEQ ID NO: 2854007 - RNA, 19 nt, Artificial Sequence
  Description of Artificial Sequence: Synthetic oligonucleotide
ccagcuggcccuuggauac

SEQ ID NO: 2854008 - RNA, 19 nt, Artificial Sequence
  Description of Artificial Sequence: Synthetic oligonucleotide
gcaacagggagguguccgg

SEQ ID NO: 2854009 - RNA, 19 nt, Artificial Sequence
  Description of Artificial Sequence: Synthetic oligonucleotide
auguccauuucaaauuguu

SEQ ID NO: 2854010 - RNA, 19 nt, Artificial Sequence
  Description of Artificial Sequence: Synthetic oligonucleotide
cugcagcaggaacuuucgg

SEQ ID NO: 2854011 - RNA, 19 nt, Artificial Sequence
  Description of Artificial Sequence: Synthetic oligonucleotide
caucuuccauuguauuaca

SEQ ID NO: 2854012 - RNA, 19 nt, Artificial Sequence
  Description of Artificial Sequence: Synthetic oligonucleotide
ggaacuuucggucguagau

SEQ ID NO: 2854013 - RNA, 19 nt, Artificial Sequence
  Description of Artificial Sequence: Synthetic oligonucleotide
agcuuggagggugggacug

SEQ ID NO: 2854014 - RNA, 19 nt, Artificial Sequence
  Description of Artificial Sequence: Synthetic oligonucleotide
uuccccagugccagcccug

SEQ ID NO: 2854015 - RNA, 19 nt, Artificial Sequence
  Description of Artificial Sequence: Synthetic oligonucleotide
cuguuccccagugccagcc

SEQ ID NO: 2854016 - RNA, 19 nt, Artificial Sequence
  Description of Artificial Sequence: Synthetic oligonucleotide
cagauuagaugaggccagc

SEQ ID NO: 2854017 - RNA, 19 nt, Artificial Sequence
  Description of Artificial Sequence: Synthetic oligonucleotide
ggagguguccgggcaaugg

SEQ ID NO: 2854018 - RNA, 19 nt, Artificial Sequence
  Description of Artificial Sequence: Synthetic oligonucleotide
auacccuagaagagguggu

SEQ ID NO: 2854019 - RNA, 19 nt, Artificial Sequence
  Description of Artificial Sequence: Synthetic oligonucleotide
ggagggugggacuguuggg

SEQ ID NO: 2854020 - RNA, 19 nt, Artificial Sequence
  Description of Artificial Sequence: Synthetic oligonucleotide
uuccucugucugcuucugu

SEQ ID NO: 2854021 - RNA, 19 nt, Artificial Sequence
  Description of Artificial Sequence: Synthetic oligonucleotide
cuagaagaggugguggcaa

SEQ ID NO: 2854022 - RNA, 19 nt, Artificial Sequence
  Description of Artificial Sequence: Synthetic oligonucleotide
uucggucguagaugauccu

SEQ ID NO: 2854023 - RNA, 19 nt, Artificial Sequence
  Description of Artificial Sequence: Synthetic oligonucleotide
ggauccuucuguaacucca

SEQ ID NO: 2854024 - RNA, 19 nt, Artificial Sequence
  Description of Artificial Sequence: Synthetic oligonucleotide
caggucaucuuccauugua

SEQ ID NO: 2854025 - RNA, 19 nt, Artificial Sequence
  Description of Artificial Sequence: Synthetic oligonucleotide
aggucaucuuccauuguau

SEQ ID NO: 2854026 - RNA, 19 nt, Artificial Sequence
  Description of Artificial Sequence: Synthetic oligonucleotide
cccuagaagaggugguggc

SEQ ID NO: 2854027 - RNA, 19 nt, Artificial Sequence
  Description of Artificial Sequence: Synthetic oligonucleotide
acaggucaucuuccauugu

SEQ ID NO: 2854028 - RNA, 19 nt, Artificial Sequence
  Description of Artificial Sequence: Synthetic oligonucleotide
guggcaacaguggcauaag

SEQ ID NO: 2854029 - RNA, 19 nt, Artificial Sequence
  Description of Artificial Sequence: Synthetic oligonucleotide
gaggcaacagggagguguc

SEQ ID NO: 2854030 - RNA, 19 nt, Artificial Sequence
  Description of Artificial Sequence: Synthetic oligonucleotide
cccuuggauacccuagaag

SEQ ID NO: 2854031 - RNA, 19 nt, Artificial Sequence
  Description of Artificial Sequence: Synthetic oligonucleotide
ccuucuguaacuccacaca

SEQ ID NO: 2854032 - RNA, 19 nt, Artificial Sequence
  Description of Artificial Sequence: Synthetic oligonucleotide
guggcauaagggauccuuc

SEQ ID NO: 2854033 - RNA, 19 nt, Artificial Sequence
  Description of Artificial Sequence: Synthetic oligonucleotide
ugucugcuucuguuccuuc

SEQ ID NO: 2854034 - RNA, 19 nt, Artificial Sequence
  Description of Artificial Sequence: Synthetic oligonucleotide
gggauccuucuguaacucc

SEQ ID NO: 2854035 - RNA, 19 nt, Artificial Sequence
  Description of Artificial Sequence: Synthetic oligonucleotide
gacuguugggcgaguugug

SEQ ID NO: 2854036 - RNA, 19 nt, Artificial Sequence
  Description of Artificial Sequence: Synthetic oligonucleotide
cagcaacuccagcuuggag

SEQ ID NO: 2854037 - RNA, 19 nt, Artificial Sequence
  Description of Artificial Sequence: Synthetic oligonucleotide
guccagcugccucagaacu

SEQ ID NO: 2854038 - RNA, 19 nt, Artificial Sequence
  Description of Artificial Sequence: Synthetic oligonucleotide
cguagaugauccuggugcc

SEQ ID NO: 2854039 - RNA, 19 nt, Artificial Sequence
  Description of Artificial Sequence: Synthetic oligonucleotide
cccagugccagcccugagg

SEQ ID NO: 2854040 - RNA, 19 nt, Artificial Sequence
  Description of Artificial Sequence: Synthetic oligonucleotide
acuccagcuuggagggugg

SEQ ID NO: 2854041 - RNA, 19 nt, Artificial Sequence
  Description of Artificial Sequence: Synthetic oligonucleotide
agggcuuggcaagugccca

SEQ ID NO: 2854042 - RNA, 19 nt, Artificial Sequence
  Description of Artificial Sequence: Synthetic oligonucleotide
cugagggaggcaacaggga

SEQ ID NO: 2854043 - RNA, 19 nt, Artificial Sequence
  Description of Artificial Sequence: Synthetic oligonucleotide
ccaacaauucacucuucca

SEQ ID NO: 2854044 - RNA, 19 nt, Artificial Sequence
  Description of Artificial Sequence: Synthetic oligonucleotide
gguggcaacaguggcauaa

SEQ ID NO: 2854045 - RNA, 19 nt, Artificial Sequence
  Description of Artificial Sequence: Synthetic oligonucleotide
uugggcgaguugugacccc

SEQ ID NO: 2854046 - RNA, 19 nt, Artificial Sequence
  Description of Artificial Sequence: Synthetic oligonucleotide
caggaacuuucggucguag

SEQ ID NO: 2854047 - RNA, 19 nt, Artificial Sequence
  Description of Artificial Sequence: Synthetic oligonucleotide
gcauaagggauccuucugu

SEQ ID NO: 2854048 - RNA, 19 nt, Artificial Sequence
  Description of Artificial Sequence: Synthetic oligonucleotide
ggcgaguugugaccccggg

SEQ ID NO: 2854049 - RNA, 19 nt, Artificial Sequence
  Description of Artificial Sequence: Synthetic oligonucleotide
cggucguagaugauccugg

SEQ ID NO: 2854050 - RNA, 19 nt, Artificial Sequence
  Description of Artificial Sequence: Synthetic oligonucleotide
gugaccccgggaaucugag

SEQ ID NO: 2854051 - RNA, 19 nt, Artificial Sequence
  Description of Artificial Sequence: Synthetic oligonucleotide
accccgggaaucugaggga

SEQ ID NO: 2854052 - RNA, 19 nt, Artificial Sequence
  Description of Artificial Sequence: Synthetic oligonucleotide
ccauuguauuacaugucca

SEQ ID NO: 2854053 - RNA, 19 nt, Artificial Sequence
  Description of Artificial Sequence: Synthetic oligonucleotide
agcuaagggcuuggcaagu

SEQ ID NO: 2854054 - RNA, 19 nt, Artificial Sequence
  Description of Artificial Sequence: Synthetic oligonucleotide
gggacuguugggcgaguug

SEQ ID NO: 2854055 - RNA, 19 nt, Artificial Sequence
  Description of Artificial Sequence: Synthetic oligonucleotide
ggcaaugggugaguucuug

SEQ ID NO: 2854056 - RNA, 19 nt, Artificial Sequence
  Description of Artificial Sequence: Synthetic oligonucleotide
acucuguuccccagugcca

SEQ ID NO: 2854057 - RNA, 19 nt, Artificial Sequence
  Description of Artificial Sequence: Synthetic oligonucleotide
ggaggcaacagggaggugu

SEQ ID NO: 2854058 - RNA, 19 nt, Artificial Sequence
  Description of Artificial Sequence: Synthetic oligonucleotide
agguguccgggcaaugggu

SEQ ID NO: 2854059 - RNA, 19 nt, Artificial Sequence
  Description of Artificial Sequence: Synthetic oligonucleotide
gguguccgggcaaugggug

SEQ ID NO: 2854060 - RNA, 19 nt, Artificial Sequence
  Description of Artificial Sequence: Synthetic oligonucleotide
gggaaucugagggaggcaa

SEQ ID NO: 2854061 - RNA, 19 nt, Artificial Sequence
  Description of Artificial Sequence: Synthetic oligonucleotide
guucgucaucuguuaucuc

SEQ ID NO: 2854062 - RNA, 19 nt, Artificial Sequence
  Description of Artificial Sequence: Synthetic oligonucleotide
ccauuucaaauuguucguc

SEQ ID NO: 2854063 - RNA, 19 nt, Artificial Sequence
  Description of Artificial Sequence: Synthetic oligonucleotide
cugcuaucccugguccagc

SEQ ID NO: 2854064 - RNA, 19 nt, Artificial Sequence
  Description of Artificial Sequence: Synthetic oligonucleotide
gggagggccaggguuuggg

SEQ ID NO: 2854065 - RNA, 19 nt, Artificial Sequence
  Description of Artificial Sequence: Synthetic oligonucleotide
ggguuugggaggaacaugu

SEQ ID NO: 2854066 - RNA, 19 nt, Artificial Sequence
  Description of Artificial Sequence: Synthetic oligonucleotide
uaacuccacacaggucauc

SEQ ID NO: 2854067 - RNA, 19 nt, Artificial Sequence
  Description of Artificial Sequence: Synthetic oligonucleotide
guguccgggcaauggguga

SEQ ID NO: 2854068 - RNA, 19 nt, Artificial Sequence
  Description of Artificial Sequence: Synthetic oligonucleotide
uugugaccccgggaaucug

SEQ ID NO: 2854069 - RNA, 19 nt, Artificial Sequence
  Description of Artificial Sequence: Synthetic oligonucleotide
gagggagggccaggguuug

SEQ ID NO: 2854070 - RNA, 19 nt, Artificial Sequence
  Description of Artificial Sequence: Synthetic oligonucleotide
acuccacacaggucaucuu

SEQ ID NO: 2854071 - RNA, 19 nt, Artificial Sequence
  Description of Artificial Sequence: Synthetic oligonucleotide
cacugcuaucccuggucca

SEQ ID NO: 2854072 - RNA, 19 nt, Artificial Sequence
  Description of Artificial Sequence: Synthetic oligonucleotide
ccgggaaucugagggaggc

SEQ ID NO: 2854073 - RNA, 19 nt, Artificial Sequence
  Description of Artificial Sequence: Synthetic oligonucleotide
gugccagcccugagggagg

SEQ ID NO: 2854074 - RNA, 19 nt, Artificial Sequence
  Description of Artificial Sequence: Synthetic oligonucleotide
guugugaccccgggaaucu

SEQ ID NO: 2854075 - RNA, 19 nt, Artificial Sequence
  Description of Artificial Sequence: Synthetic oligonucleotide
agcccugagggagggccag

SEQ ID NO: 2854076 - RNA, 19 nt, Artificial Sequence
  Description of Artificial Sequence: Synthetic oligonucleotide
agccagaaggugacauacu

SEQ ID NO: 2854077 - RNA, 19 nt, Artificial Sequence
  Description of Artificial Sequence: Synthetic oligonucleotide
uccccagugccagcccuga

SEQ ID NO: 2854078 - RNA, 19 nt, Artificial Sequence
  Description of Artificial Sequence: Synthetic oligonucleotide
gcaagugcccacugcuauc

SEQ ID NO: 2854079 - RNA, 19 nt, Artificial Sequence
  Description of Artificial Sequence: Synthetic oligonucleotide
ggaaucugagggaggcaac

SEQ ID NO: 2854080 - RNA, 19 nt, Artificial Sequence
  Description of Artificial Sequence: Synthetic oligonucleotide
cccacugcuaucccugguc

SEQ ID NO: 2854081 - RNA, 19 nt, Artificial Sequence
  Description of Artificial Sequence: Synthetic oligonucleotide
ggacuguugggcgaguugu

SEQ ID NO: 2854082 - RNA, 19 nt, Artificial Sequence
  Description of Artificial Sequence: Synthetic oligonucleotide
ggauacccuagaagaggug

SEQ ID NO: 2854083 - RNA, 19 nt, Artificial Sequence
  Description of Artificial Sequence: Synthetic oligonucleotide
cgaguugugaccccgggaa

SEQ ID NO: 2854084 - RNA, 19 nt, Artificial Sequence
  Description of Artificial Sequence: Synthetic oligonucleotide
gcuaucccugguccagcug

SEQ ID NO: 2854085 - RNA, 19 nt, Artificial Sequence
  Description of Artificial Sequence: Synthetic oligonucleotide
ccaggguuugggaggaaca

SEQ ID NO: 2854086 - RNA, 19 nt, Artificial Sequence
  Description of Artificial Sequence: Synthetic oligonucleotide
cagagaaagcuaagggcuu

SEQ ID NO: 2854087 - RNA, 19 nt, Artificial Sequence
  Description of Artificial Sequence: Synthetic oligonucleotide
gcuuggcaagugcccacug

SEQ ID NO: 2854088 - RNA, 19 nt, Artificial Sequence
  Description of Artificial Sequence: Synthetic oligonucleotide
ggcccuuggauacccuaga

SEQ ID NO: 2854089 - RNA, 19 nt, Artificial Sequence
  Description of Artificial Sequence: Synthetic oligonucleotide
cugagggagggccaggguu

SEQ ID NO: 2854090 - RNA, 19 nt, Artificial Sequence
  Description of Artificial Sequence: Synthetic oligonucleotide
gaguugugaccccgggaau

SEQ ID NO: 2854091 - RNA, 19 nt, Artificial Sequence
  Description of Artificial Sequence: Synthetic oligonucleotide
ccucagaacuaaaggaagu

SEQ ID NO: 2854092 - RNA, 19 nt, Artificial Sequence
  Description of Artificial Sequence: Synthetic oligonucleotide
guuccccagugccagcccu

SEQ ID NO: 2854093 - RNA, 19 nt, Artificial Sequence
  Description of Artificial Sequence: Synthetic oligonucleotide
ugggacuguugggcgaguu

SEQ ID NO: 2854094 - RNA, 19 nt, Artificial Sequence
  Description of Artificial Sequence: Synthetic oligonucleotide
cccgggaaucugagggagg

SEQ ID NO: 2854095 - RNA, 19 nt, Artificial Sequence
  Description of Artificial Sequence: Synthetic oligonucleotide
agggagggccaggguuugg

SEQ ID NO: 2854096 - RNA, 19 nt, Artificial Sequence
  Description of Artificial Sequence: Synthetic oligonucleotide
cuguuaucucuuccucugu

SEQ ID NO: 2854097 - RNA, 19 nt, Artificial Sequence
  Description of Artificial Sequence: Synthetic oligonucleotide
uccgggcaaugggugaguu

SEQ ID NO: 2854098 - RNA, 19 nt, Artificial Sequence
  Description of Artificial Sequence: Synthetic oligonucleotide
cuggcccuuggauacccua

SEQ ID NO: 2854099 - RNA, 19 nt, Artificial Sequence
  Description of Artificial Sequence: Synthetic oligonucleotide
agggagguguccgggcaau

SEQ ID NO: 2854100 - RNA, 19 nt, Artificial Sequence
  Description of Artificial Sequence: Synthetic oligonucleotide
gggugaguucuugcacugc

SEQ ID NO: 2854101 - RNA, 19 nt, Artificial Sequence
  Description of Artificial Sequence: Synthetic oligonucleotide
ggucaucuuccauuguauu

SEQ ID NO: 2854102 - RNA, 19 nt, Artificial Sequence
  Description of Artificial Sequence: Synthetic oligonucleotide
gcgaguugugaccccggga

SEQ ID NO: 2854103 - RNA, 19 nt, Artificial Sequence
  Description of Artificial Sequence: Synthetic oligonucleotide
ccagaaggugacauacucu

SEQ ID NO: 2854104 - RNA, 19 nt, Artificial Sequence
  Description of Artificial Sequence: Synthetic oligonucleotide
gggcuuggcaagugcccac

SEQ ID NO: 2854105 - RNA, 19 nt, Artificial Sequence
  Description of Artificial Sequence: Synthetic oligonucleotide
caauucacucuuccagauu

SEQ ID NO: 2854106 - RNA, 19 nt, Artificial Sequence
  Description of Artificial Sequence: Synthetic oligonucleotide
gccaggguuugggaggaac

SEQ ID NO: 2854107 - RNA, 19 nt, Artificial Sequence
  Description of Artificial Sequence: Synthetic oligonucleotide
ggucguagaugauccuggu

SEQ ID NO: 2854108 - RNA, 19 nt, Artificial Sequence
  Description of Artificial Sequence: Synthetic oligonucleotide
ccuagaagaggugguggca

SEQ ID NO: 2854109 - RNA, 19 nt, Artificial Sequence
  Description of Artificial Sequence: Synthetic oligonucleotide
gggugggacuguugggcga

SEQ ID NO: 2854110 - RNA, 19 nt, Artificial Sequence
  Description of Artificial Sequence: Synthetic oligonucleotide
guaacuccacacaggucau

SEQ ID NO: 2854111 - RNA, 19 nt, Artificial Sequence
  Description of Artificial Sequence: Synthetic oligonucleotide
aucccugguccagcugccu

SEQ ID NO: 2854112 - RNA, 19 nt, Artificial Sequence
  Description of Artificial Sequence: Synthetic oligonucleotide
cagcuggcccuuggauacc

SEQ ID NO: 2854113 - RNA, 19 nt, Artificial Sequence
  Description of Artificial Sequence: Synthetic oligonucleotide
ccccgggaaucugagggag

SEQ ID NO: 2854114 - RNA, 19 nt, Artificial Sequence
  Description of Artificial Sequence: Synthetic oligonucleotide
ugguggcaacaguggcaua

SEQ ID NO: 2854115 - RNA, 19 nt, Artificial Sequence
  Description of Artificial Sequence: Synthetic oligonucleotide
gcagccagaaggugacaua

SEQ ID NO: 2854116 - RNA, 19 nt, Artificial Sequence
  Description of Artificial Sequence: Synthetic oligonucleotide
cacacaggucaucuuccau

SEQ ID NO: 2854117 - RNA, 19 nt, Artificial Sequence
  Description of Artificial Sequence: Synthetic oligonucleotide
cagcccugagggagggcca

SEQ ID NO: 2854118 - RNA, 19 nt, Artificial Sequence
  Description of Artificial Sequence: Synthetic oligonucleotide
cagggagguguccgggcaa

SEQ ID NO: 2854119 - RNA, 19 nt, Artificial Sequence
  Description of Artificial Sequence: Synthetic oligonucleotide
gggcgaguugugaccccgg

SEQ ID NO: 2854120 - RNA, 19 nt, Artificial Sequence
  Description of Artificial Sequence: Synthetic oligonucleotide
gcccuuggauacccuagaa

SEQ ID NO: 2854121 - RNA, 19 nt, Artificial Sequence
  Description of Artificial Sequence: Synthetic oligonucleotide
caggguuugggaggaacau

SEQ ID NO: 2854122 - RNA, 19 nt, Artificial Sequence
  Description of Artificial Sequence: Synthetic oligonucleotide
ccagcugccucagaacuaa

SEQ ID NO: 2854123 - RNA, 19 nt, Artificial Sequence
  Description of Artificial Sequence: Synthetic oligonucleotide
cagcuuggagggugggacu

SEQ ID NO: 2854124 - RNA, 19 nt, Artificial Sequence
  Description of Artificial Sequence: Synthetic oligonucleotide
cagugccagcccugaggga

SEQ ID NO: 2854125 - RNA, 19 nt, Artificial Sequence
  Description of Artificial Sequence: Synthetic oligonucleotide
ccgggcaaugggugaguuc

SEQ ID NO: 2854126 - RNA, 19 nt, Artificial Sequence
  Description of Artificial Sequence: Synthetic oligonucleotide
cgggcaaugggugaguucu

SEQ ID NO: 2854127 - RNA, 19 nt, Artificial Sequence
  Description of Artificial Sequence: Synthetic oligonucleotide
gguuugggaggaacaugua

SEQ ID NO: 2854128 - RNA, 19 nt, Artificial Sequence
  Description of Artificial Sequence: Synthetic oligonucleotide
gggagguguccgggcaaug

SEQ ID NO: 2854129 - RNA, 19 nt, Artificial Sequence
  Description of Artificial Sequence: Synthetic oligonucleotide
gggccaggguuugggagga

SEQ ID NO: 2854130 - RNA, 19 nt, Artificial Sequence
  Description of Artificial Sequence: Synthetic oligonucleotide
cagcugccucagaacuaaa

SEQ ID NO: 2854131 - RNA, 19 nt, Artificial Sequence
  Description of Artificial Sequence: Synthetic oligonucleotide
cugucugcuucuguuccuu

SEQ ID NO: 2854132 - RNA, 19 nt, Artificial Sequence
  Description of Artificial Sequence: Synthetic oligonucleotide
cugguccagcugccucaga

SEQ ID NO: 2854133 - RNA, 19 nt, Artificial Sequence
  Description of Artificial Sequence: Synthetic oligonucleotide
ggcuuggcaagugcccacu

SEQ ID NO: 2854134 - RNA, 19 nt, Artificial Sequence
  Description of Artificial Sequence: Synthetic oligonucleotide
cuuggagggugggacuguu

SEQ ID NO: 2854135 - RNA, 19 nt, Artificial Sequence
  Description of Artificial Sequence: Synthetic oligonucleotide
gcaggaacuuucggucgua

SEQ ID NO: 2854136 - RNA, 19 nt, Artificial Sequence
  Description of Artificial Sequence: Synthetic oligonucleotide
ccccagugccagcccugag

SEQ ID NO: 2854137 - RNA, 19 nt, Artificial Sequence
  Description of Artificial Sequence: Synthetic oligonucleotide
guccgggcaaugggugagu

SEQ ID NO: 2854138 - RNA, 19 nt, Artificial Sequence
  Description of Artificial Sequence: Synthetic oligonucleotide
gggaggcaacagggaggug

SEQ ID NO: 2854139 - RNA, 19 nt, Artificial Sequence
  Description of Artificial Sequence: Synthetic oligonucleotide
gcuuggagggugggacugu

SEQ ID NO: 2854140 - RNA, 19 nt, Artificial Sequence
  Description of Artificial Sequence: Synthetic oligonucleotide
gcccacugcuaucccuggu

SEQ ID NO: 2854141 - RNA, 19 nt, Artificial Sequence
  Description of Artificial Sequence: Synthetic oligonucleotide
caacuccagcuuggagggu

SEQ ID NO: 2854142 - RNA, 19 nt, Artificial Sequence
  Description of Artificial Sequence: Synthetic oligonucleotide
gugggacuguugggcgagu

SEQ ID NO: 2854143 - RNA, 19 nt, Artificial Sequence
  Description of Artificial Sequence: Synthetic oligonucleotide
caguggcauaagggauccu

SEQ ID NO: 2854144 - RNA, 19 nt, Artificial Sequence
  Description of Artificial Sequence: Synthetic oligonucleotide
cgggaaucugagggaggca

SEQ ID NO: 2854145 - RNA, 19 nt, Artificial Sequence
  Description of Artificial Sequence: Synthetic oligonucleotide
gcuggcccuuggauacccu

SEQ ID NO: 2854146 - RNA, 19 nt, Artificial Sequence
  Description of Artificial Sequence: Synthetic oligonucleotide
gggcaaugggugaguucuu

SEQ ID NO: 2854147 - RNA, 19 nt, Artificial Sequence
  Description of Artificial Sequence: Synthetic oligonucleotide
ggccaggguuugggaggaa

SEQ ID NO: 2854148 - RNA, 19 nt, Artificial Sequence
  Description of Artificial Sequence: Synthetic oligonucleotide
ucaauggucacacagagcu

SEQ ID NO: 2854149 - RNA, 19 nt, Artificial Sequence
  Description of Artificial Sequence: Synthetic oligonucleotide
aaugguaggccucaucuuc

SEQ ID NO: 2854150 - RNA, 19 nt, Artificial Sequence
  Description of Artificial Sequence: Synthetic oligonucleotide
aacaagcucccacagcacc

SEQ ID NO: 2854151 - RNA, 19 nt, Artificial Sequence
  Description of Artificial Sequence: Synthetic oligonucleotide
uuaaugguaggccucaucu

SEQ ID NO: 2854152 - RNA, 19 nt, Artificial Sequence
  Description of Artificial Sequence: Synthetic oligonucleotide
agagagacuagacaguccg

SEQ ID NO: 2854153 - RNA, 19 nt, Artificial Sequence
  Description of Artificial Sequence: Synthetic oligonucleotide
aauggucacacagagcugg

SEQ ID NO: 2854154 - RNA, 19 nt, Artificial Sequence
  Description of Artificial Sequence: Synthetic oligonucleotide
gaaacaagcucccacagca

SEQ ID NO: 2854155 - RNA, 19 nt, Artificial Sequence
  Description of Artificial Sequence: Synthetic oligonucleotide
auuggugacagaugucacc

SEQ ID NO: 2854156 - RNA, 19 nt, Artificial Sequence
  Description of Artificial Sequence: Synthetic oligonucleotide
gagguagugccguugaccg

SEQ ID NO: 2854157 - RNA, 19 nt, Artificial Sequence
  Description of Artificial Sequence: Synthetic oligonucleotide
gacagaugucaccagagag

SEQ ID NO: 2854158 - RNA, 19 nt, Artificial Sequence
  Description of Artificial Sequence: Synthetic oligonucleotide
aaccaccucuugcaggucc

SEQ ID NO: 2854159 - RNA, 19 nt, Artificial Sequence
  Description of Artificial Sequence: Synthetic oligonucleotide
ucaaagggcagcauguacu

SEQ ID NO: 2854160 - RNA, 19 nt, Artificial Sequence
  Description of Artificial Sequence: Synthetic oligonucleotide
agccaaugauccuuaaugg

SEQ ID NO: 2854161 - RNA, 19 nt, Artificial Sequence
  Description of Artificial Sequence: Synthetic oligonucleotide
auggguguccccuggaggc

SEQ ID NO: 2854162 - RNA, 19 nt, Artificial Sequence
  Description of Artificial Sequence: Synthetic oligonucleotide
auggcguacaugucgauuc

SEQ ID NO: 2854163 - RNA, 19 nt, Artificial Sequence
  Description of Artificial Sequence: Synthetic oligonucleotide
cuucuuguggacaaccacc

SEQ ID NO: 2854164 - RNA, 19 nt, Artificial Sequence
  Description of Artificial Sequence: Synthetic oligonucleotide
caaugauccuuaaugguag

SEQ ID NO: 2854165 - RNA, 19 nt, Artificial Sequence
  Description of Artificial Sequence: Synthetic oligonucleotide
acagagcugggccaggccc

SEQ ID NO: 2854166 - RNA, 19 nt, Artificial Sequence
  Description of Artificial Sequence: Synthetic oligonucleotide
acgagaaacaagcucccac

SEQ ID NO: 2854167 - RNA, 19 nt, Artificial Sequence
  Description of Artificial Sequence: Synthetic oligonucleotide
uugaccgaccuccugauga

SEQ ID NO: 2854168 - RNA, 19 nt, Artificial Sequence
  Description of Artificial Sequence: Synthetic oligonucleotide
guacaugucgauucgcagg

SEQ ID NO: 2854169 - RNA, 19 nt, Artificial Sequence
  Description of Artificial Sequence: Synthetic oligonucleotide
caccagagagacuagacag

SEQ ID NO: 2854170 - RNA, 19 nt, Artificial Sequence
  Description of Artificial Sequence: Synthetic oligonucleotide
auguuucagccaaugaucc

SEQ ID NO: 2854171 - RNA, 19 nt, Artificial Sequence
  Description of Artificial Sequence: Synthetic oligonucleotide
uacaugucgauucgcagga

SEQ ID NO: 2854172 - RNA, 19 nt, Artificial Sequence
  Description of Artificial Sequence: Synthetic oligonucleotide
ucuugcagguccuccaggg

SEQ ID NO: 2854173 - RNA, 19 nt, Artificial Sequence
  Description of Artificial Sequence: Synthetic oligonucleotide
cagccaaugauccuuaaug

SEQ ID NO: 2854174 - RNA, 19 nt, Artificial Sequence
  Description of Artificial Sequence: Synthetic oligonucleotide
cauguacucauccacuggc

SEQ ID NO: 2854175 - RNA, 19 nt, Artificial Sequence
  Description of Artificial Sequence: Synthetic oligonucleotide
ccugcaacgagaaacaagc

SEQ ID NO: 2854176 - RNA, 19 nt, Artificial Sequence
  Description of Artificial Sequence: Synthetic oligonucleotide
gauguuucagccaaugauc

SEQ ID NO: 2854177 - RNA, 19 nt, Artificial Sequence
  Description of Artificial Sequence: Synthetic oligonucleotide
uguacucauccacuggccc

SEQ ID NO: 2854178 - RNA, 19 nt, Artificial Sequence
  Description of Artificial Sequence: Synthetic oligonucleotide
uggacaaccaccucuugca

SEQ ID NO: 2854179 - RNA, 19 nt, Artificial Sequence
  Description of Artificial Sequence: Synthetic oligonucleotide
augcuggacgucuuuaggg

SEQ ID NO: 2854180 - RNA, 19 nt, Artificial Sequence
  Description of Artificial Sequence: Synthetic oligonucleotide
gaugcuggacgucuuuagg

SEQ ID NO: 2854181 - RNA, 19 nt, Artificial Sequence
  Description of Artificial Sequence: Synthetic oligonucleotide
ugcuggacgucuuuagggg

SEQ ID NO: 2854182 - RNA, 19 nt, Artificial Sequence
  Description of Artificial Sequence: Synthetic oligonucleotide
ugcaacgagaaacaagcuc

SEQ ID NO: 2854183 - RNA, 19 nt, Artificial Sequence
  Description of Artificial Sequence: Synthetic oligonucleotide
ucucgugccaaccugccca

SEQ ID NO: 2854184 - RNA, 19 nt, Artificial Sequence
  Description of Artificial Sequence: Synthetic oligonucleotide
cacagcaccagccccaugg

SEQ ID NO: 2854185 - RNA, 19 nt, Artificial Sequence
  Description of Artificial Sequence: Synthetic oligonucleotide
gacaguccgagguagugcc

SEQ ID NO: 2854186 - RNA, 19 nt, Artificial Sequence
  Description of Artificial Sequence: Synthetic oligonucleotide
agacuagacaguccgaggu

SEQ ID NO: 2854187 - RNA, 19 nt, Artificial Sequence
  Description of Artificial Sequence: Synthetic oligonucleotide
ugauccuuaaugguaggcc

SEQ ID NO: 2854188 - RNA, 19 nt, Artificial Sequence
  Description of Artificial Sequence: Synthetic oligonucleotide
ucaccagagagacuagaca

SEQ ID NO: 2854189 - RNA, 19 nt, Artificial Sequence
  Description of Artificial Sequence: Synthetic oligonucleotide
caaucuccuccucaaaggg

SEQ ID NO: 2854190 - RNA, 19 nt, Artificial Sequence
  Description of Artificial Sequence: Synthetic oligonucleotide
gaugucaccagagagacua

SEQ ID NO: 2854191 - RNA, 19 nt, Artificial Sequence
  Description of Artificial Sequence: Synthetic oligonucleotide
uucuuguggacaaccaccu

SEQ ID NO: 2854192 - RNA, 19 nt, Artificial Sequence
  Description of Artificial Sequence: Synthetic oligonucleotide
ucuucuuguggacaaccac

SEQ ID NO: 2854193 - RNA, 19 nt, Artificial Sequence
  Description of Artificial Sequence: Synthetic oligonucleotide
gagacuagacaguccgagg

SEQ ID NO: 2854194 - RNA, 19 nt, Artificial Sequence
  Description of Artificial Sequence: Synthetic oligonucleotide
aaguugauggcacccucca

SEQ ID NO: 2854195 - RNA, 19 nt, Artificial Sequence
  Description of Artificial Sequence: Synthetic oligonucleotide
uuggugacagaugucacca

SEQ ID NO: 2854196 - RNA, 19 nt, Artificial Sequence
  Description of Artificial Sequence: Synthetic oligonucleotide
acauuggugacagauguca

SEQ ID NO: 2854197 - RNA, 19 nt, Artificial Sequence
  Description of Artificial Sequence: Synthetic oligonucleotide
agccccauggcguacaugu

SEQ ID NO: 2854198 - RNA, 19 nt, Artificial Sequence
  Description of Artificial Sequence: Synthetic oligonucleotide
gcaacgagaaacaagcucc

SEQ ID NO: 2854199 - RNA, 19 nt, Artificial Sequence
  Description of Artificial Sequence: Synthetic oligonucleotide
augauccuuaaugguaggc

SEQ ID NO: 2854200 - RNA, 19 nt, Artificial Sequence
  Description of Artificial Sequence: Synthetic oligonucleotide
agccucugcaucguggucc

SEQ ID NO: 2854201 - RNA, 19 nt, Artificial Sequence
  Description of Artificial Sequence: Synthetic oligonucleotide
gaggcgagccucugcaucg

SEQ ID NO: 2854202 - RNA, 19 nt, Artificial Sequence
  Description of Artificial Sequence: Synthetic oligonucleotide
uccacauuggugacagaug

SEQ ID NO: 2854203 - RNA, 19 nt, Artificial Sequence
  Description of Artificial Sequence: Synthetic oligonucleotide
aagggcagcauguacucau

SEQ ID NO: 2854204 - RNA, 19 nt, Artificial Sequence
  Description of Artificial Sequence: Synthetic oligonucleotide
uccucaauggucacacaga

SEQ ID NO: 2854205 - RNA, 19 nt, Artificial Sequence
  Description of Artificial Sequence: Synthetic oligonucleotide
agagacuagacaguccgag

SEQ ID NO: 2854206 - RNA, 19 nt, Artificial Sequence
  Description of Artificial Sequence: Synthetic oligonucleotide
aggcccggauguuucagcc

SEQ ID NO: 2854207 - RNA, 19 nt, Artificial Sequence
  Description of Artificial Sequence: Synthetic oligonucleotide
ucgauucgcaggaaggcgu

SEQ ID NO: 2854208 - RNA, 19 nt, Artificial Sequence
  Description of Artificial Sequence: Synthetic oligonucleotide
cuccugaugagggacaccc

SEQ ID NO: 2854209 - RNA, 19 nt, Artificial Sequence
  Description of Artificial Sequence: Synthetic oligonucleotide
guguuggccaaucuccucc

SEQ ID NO: 2854210 - RNA, 19 nt, Artificial Sequence
  Description of Artificial Sequence: Synthetic oligonucleotide
aaggcgucucucuggaagu

SEQ ID NO: 2854211 - RNA, 19 nt, Artificial Sequence
  Description of Artificial Sequence: Synthetic oligonucleotide
agaggcgagccucugcauc

SEQ ID NO: 2854212 - RNA, 19 nt, Artificial Sequence
  Description of Artificial Sequence: Synthetic oligonucleotide
acuagacaguccgagguag

SEQ ID NO: 2854213 - RNA, 19 nt, Artificial Sequence
  Description of Artificial Sequence: Synthetic oligonucleotide
uugauggcacccuccagca

SEQ ID NO: 2854214 - RNA, 19 nt, Artificial Sequence
  Description of Artificial Sequence: Synthetic oligonucleotide
agaugcuggacgucuuuag

SEQ ID NO: 2854215 - RNA, 19 nt, Artificial Sequence
  Description of Artificial Sequence: Synthetic oligonucleotide
agacaguccgagguagugc

SEQ ID NO: 2854216 - RNA, 19 nt, Artificial Sequence
  Description of Artificial Sequence: Synthetic oligonucleotide
cagaugucaccagagagac

SEQ ID NO: 2854217 - RNA, 19 nt, Artificial Sequence
  Description of Artificial Sequence: Synthetic oligonucleotide
acggguguuggccaaucuc

SEQ ID NO: 2854218 - RNA, 19 nt, Artificial Sequence
  Description of Artificial Sequence: Synthetic oligonucleotide
aaacaagcucccacagcac

SEQ ID NO: 2854219 - RNA, 19 nt, Artificial Sequence
  Description of Artificial Sequence: Synthetic oligonucleotide
agagaggcgagccucugca

SEQ ID NO: 2854220 - RNA, 19 nt, Artificial Sequence
  Description of Artificial Sequence: Synthetic oligonucleotide
caugucgauucgcaggaag

SEQ ID NO: 2854221 - RNA, 19 nt, Artificial Sequence
  Description of Artificial Sequence: Synthetic oligonucleotide
uggcguacaugucgauucg

SEQ ID NO: 2854222 - RNA, 19 nt, Artificial Sequence
  Description of Artificial Sequence: Synthetic oligonucleotide
ugucgauucgcaggaaggc

SEQ ID NO: 2854223 - RNA, 19 nt, Artificial Sequence
  Description of Artificial Sequence: Synthetic oligonucleotide
gaugagggacacccgcucc

SEQ ID NO: 2854224 - RNA, 19 nt, Artificial Sequence
  Description of Artificial Sequence: Synthetic oligonucleotide
guggacaaccaccucuugc

SEQ ID NO: 2854225 - RNA, 19 nt, Artificial Sequence
  Description of Artificial Sequence: Synthetic oligonucleotide
caacgagaaacaagcuccc

SEQ ID NO: 2854226 - RNA, 19 nt, Artificial Sequence
  Description of Artificial Sequence: Synthetic oligonucleotide
augucgauucgcaggaagg

SEQ ID NO: 2854227 - RNA, 19 nt, Artificial Sequence
  Description of Artificial Sequence: Synthetic oligonucleotide
cauggguguccccuggagg

SEQ ID NO: 2854228 - RNA, 19 nt, Artificial Sequence
  Description of Artificial Sequence: Synthetic oligonucleotide
gaaguugauggcacccucc

SEQ ID NO: 2854229 - RNA, 19 nt, Artificial Sequence
  Description of Artificial Sequence: Synthetic oligonucleotide
gauccuuaaugguaggccu

SEQ ID NO: 2854230 - RNA, 19 nt, Artificial Sequence
  Description of Artificial Sequence: Synthetic oligonucleotide
ucucuggaaguugauggca

SEQ ID NO: 2854231 - RNA, 19 nt, Artificial Sequence
  Description of Artificial Sequence: Synthetic oligonucleotide
auguacucauccacuggcc

SEQ ID NO: 2854232 - RNA, 19 nt, Artificial Sequence
  Description of Artificial Sequence: Synthetic oligonucleotide
acagaugucaccagagaga

SEQ ID NO: 2854233 - RNA, 19 nt, Artificial Sequence
  Description of Artificial Sequence: Synthetic oligonucleotide
ucauccacuggcccaucug

SEQ ID NO: 2854234 - RNA, 19 nt, Artificial Sequence
  Description of Artificial Sequence: Synthetic oligonucleotide
aagcucccacagcaccagc

SEQ ID NO: 2854235 - RNA, 19 nt, Artificial Sequence
  Description of Artificial Sequence: Synthetic oligonucleotide
cucuggaaguugauggcac

SEQ ID NO: 2854236 - RNA, 19 nt, Artificial Sequence
  Description of Artificial Sequence: Synthetic oligonucleotide
cucaaagggcagcauguac

SEQ ID NO: 2854237 - RNA, 19 nt, Artificial Sequence
  Description of Artificial Sequence: Synthetic oligonucleotide
cucaauggucacacagagc

SEQ ID NO: 2854238 - RNA, 19 nt, Artificial Sequence
  Description of Artificial Sequence: Synthetic oligonucleotide
ggcagguccacauugguga

SEQ ID NO: 2854239 - RNA, 19 nt, Artificial Sequence
  Description of Artificial Sequence: Synthetic oligonucleotide
caggaaggcgucucucugg

SEQ ID NO: 2854240 - RNA, 19 nt, Artificial Sequence
  Description of Artificial Sequence: Synthetic oligonucleotide
ugcaucguggucccagcac

SEQ ID NO: 2854241 - RNA, 19 nt, Artificial Sequence
  Description of Artificial Sequence: Synthetic oligonucleotide
gucgauucgcaggaaggcg

SEQ ID NO: 2854242 - RNA, 19 nt, Artificial Sequence
  Description of Artificial Sequence: Synthetic oligonucleotide
ucagccaaugauccuuaau

SEQ ID NO: 2854243 - RNA, 19 nt, Artificial Sequence
  Description of Artificial Sequence: Synthetic oligonucleotide
ugaugagggacacccgcuc

SEQ ID NO: 2854244 - RNA, 19 nt, Artificial Sequence
  Description of Artificial Sequence: Synthetic oligonucleotide
ugaccgaccuccugaugag

SEQ ID NO: 2854245 - RNA, 19 nt, Artificial Sequence
  Description of Artificial Sequence: Synthetic oligonucleotide
uguuucagccaaugauccu

SEQ ID NO: 2854246 - RNA, 19 nt, Artificial Sequence
  Description of Artificial Sequence: Synthetic oligonucleotide
ggucacacagagcugggcc

SEQ ID NO: 2854247 - RNA, 19 nt, Artificial Sequence
  Description of Artificial Sequence: Synthetic oligonucleotide
cagcccugcaacgagaaac

SEQ ID NO: 2854248 - RNA, 19 nt, Artificial Sequence
  Description of Artificial Sequence: Synthetic oligonucleotide
uccgagguagugccguuga

SEQ ID NO: 2854249 - RNA, 19 nt, Artificial Sequence
  Description of Artificial Sequence: Synthetic oligonucleotide
uccugaugagggacacccg

SEQ ID NO: 2854250 - RNA, 19 nt, Artificial Sequence
  Description of Artificial Sequence: Synthetic oligonucleotide
cauuggugacagaugucac

SEQ ID NO: 2854251 - RNA, 19 nt, Artificial Sequence
  Description of Artificial Sequence: Synthetic oligonucleotide
uccuuaaugguaggccuca

SEQ ID NO: 2854252 - RNA, 19 nt, Artificial Sequence
  Description of Artificial Sequence: Synthetic oligonucleotide
cuuaaugguaggccucauc

SEQ ID NO: 2854253 - RNA, 19 nt, Artificial Sequence
  Description of Artificial Sequence: Synthetic oligonucleotide
cagagagacuagacagucc

SEQ ID NO: 2854254 - RNA, 19 nt, Artificial Sequence
  Description of Artificial Sequence: Synthetic oligonucleotide
uuucagccaaugauccuua

SEQ ID NO: 2854255 - RNA, 19 nt, Artificial Sequence
  Description of Artificial Sequence: Synthetic oligonucleotide
uagacaguccgagguagug

SEQ ID NO: 2854256 - RNA, 19 nt, Artificial Sequence
  Description of Artificial Sequence: Synthetic oligonucleotide
agugccguugaccgaccuc

SEQ ID NO: 2854257 - RNA, 19 nt, Artificial Sequence
  Description of Artificial Sequence: Synthetic oligonucleotide
ccauguaccgucucgugcc

SEQ ID NO: 2854258 - RNA, 19 nt, Artificial Sequence
  Description of Artificial Sequence: Synthetic oligonucleotide
agcucccacagcaccagcc

SEQ ID NO: 2854259 - RNA, 19 nt, Artificial Sequence
  Description of Artificial Sequence: Synthetic oligonucleotide
acgcagccugcagagaggc

SEQ ID NO: 2854260 - RNA, 19 nt, Artificial Sequence
  Description of Artificial Sequence: Synthetic oligonucleotide
uaggccucaucuucuugug

SEQ ID NO: 2854261 - RNA, 19 nt, Artificial Sequence
  Description of Artificial Sequence: Synthetic oligonucleotide
gccaaucuccuccucaaag

SEQ ID NO: 2854262 - RNA, 19 nt, Artificial Sequence
  Description of Artificial Sequence: Synthetic oligonucleotide
agcacuccucaauggucac

SEQ ID NO: 2854263 - RNA, 19 nt, Artificial Sequence
  Description of Artificial Sequence: Synthetic oligonucleotide
cuccucaaagggcagcaug

SEQ ID NO: 2854264 - RNA, 19 nt, Artificial Sequence
  Description of Artificial Sequence: Synthetic oligonucleotide
gugccguugaccgaccucc

SEQ ID NO: 2854265 - RNA, 19 nt, Artificial Sequence
  Description of Artificial Sequence: Synthetic oligonucleotide
ucugcaucguggucccagc

SEQ ID NO: 2854266 - RNA, 19 nt, Artificial Sequence
  Description of Artificial Sequence: Synthetic oligonucleotide
uuagaugcuggacgucuuu

SEQ ID NO: 2854267 - RNA, 19 nt, Artificial Sequence
  Description of Artificial Sequence: Synthetic oligonucleotide
aggccucaucuucuugugg

SEQ ID NO: 2854268 - RNA, 19 nt, Artificial Sequence
  Description of Artificial Sequence: Synthetic oligonucleotide
cacuccucaauggucacac

SEQ ID NO: 2854269 - RNA, 19 nt, Artificial Sequence
  Description of Artificial Sequence: Synthetic oligonucleotide
uguaccgucucgugccaac

SEQ ID NO: 2854270 - RNA, 19 nt, Artificial Sequence
  Description of Artificial Sequence: Synthetic oligonucleotide
auccuuaaugguaggccuc

SEQ ID NO: 2854271 - RNA, 19 nt, Artificial Sequence
  Description of Artificial Sequence: Synthetic oligonucleotide
uguggacaaccaccucuug

SEQ ID NO: 2854272 - RNA, 19 nt, Artificial Sequence
  Description of Artificial Sequence: Synthetic oligonucleotide
cuuguggacaaccaccucu

SEQ ID NO: 2854273 - RNA, 19 nt, Artificial Sequence
  Description of Artificial Sequence: Synthetic oligonucleotide
aggaaggcgucucucugga

SEQ ID NO: 2854274 - RNA, 19 nt, Artificial Sequence
  Description of Artificial Sequence: Synthetic oligonucleotide
aucguggucccagcacucc

SEQ ID NO: 2854275 - RNA, 19 nt, Artificial Sequence
  Description of Artificial Sequence: Synthetic oligonucleotide
gucccagcacuccucaaug

SEQ ID NO: 2854276 - RNA, 19 nt, Artificial Sequence
  Description of Artificial Sequence: Synthetic oligonucleotide
cuccacgcagccugcagag

SEQ ID NO: 2854277 - RNA, 19 nt, Artificial Sequence
  Description of Artificial Sequence: Synthetic oligonucleotide
ccucaauggucacacagag

SEQ ID NO: 2854278 - RNA, 19 nt, Artificial Sequence
  Description of Artificial Sequence: Synthetic oligonucleotide
uguuggccaaucuccuccu

SEQ ID NO: 2854279 - RNA, 19 nt, Artificial Sequence
  Description of Artificial Sequence: Synthetic oligonucleotide
cagagcugggccaggcccg

SEQ ID NO: 2854280 - RNA, 19 nt, Artificial Sequence
  Description of Artificial Sequence: Synthetic oligonucleotide
uaaugguaggccucaucuu

SEQ ID NO: 2854281 - RNA, 19 nt, Artificial Sequence
  Description of Artificial Sequence: Synthetic oligonucleotide
caucugcagcccugcaacg

SEQ ID NO: 2854282 - RNA, 19 nt, Artificial Sequence
  Description of Artificial Sequence: Synthetic oligonucleotide
gcauguacucauccacugg

SEQ ID NO: 2854283 - RNA, 19 nt, Artificial Sequence
  Description of Artificial Sequence: Synthetic oligonucleotide
accgaccuccugaugaggg

SEQ ID NO: 2854284 - RNA, 19 nt, Artificial Sequence
  Description of Artificial Sequence: Synthetic oligonucleotide
aacgagaaacaagcuccca

SEQ ID NO: 2854285 - RNA, 19 nt, Artificial Sequence
  Description of Artificial Sequence: Synthetic oligonucleotide
guacucauccacuggccca

SEQ ID NO: 2854286 - RNA, 19 nt, Artificial Sequence
  Description of Artificial Sequence: Synthetic oligonucleotide
auucgcaggaaggcgucuc

SEQ ID NO: 2854287 - RNA, 19 nt, Artificial Sequence
  Description of Artificial Sequence: Synthetic oligonucleotide
uucgcaggaaggcgucucu

SEQ ID NO: 2854288 - RNA, 19 nt, Artificial Sequence
  Description of Artificial Sequence: Synthetic oligonucleotide
ugucaccagagagacuaga

SEQ ID NO: 2854289 - RNA, 19 nt, Artificial Sequence
  Description of Artificial Sequence: Synthetic oligonucleotide
ugccaaccugcccaugggu

SEQ ID NO: 2854290 - RNA, 19 nt, Artificial Sequence
  Description of Artificial Sequence: Synthetic oligonucleotide
gacacccgcuccuccacgc

SEQ ID NO: 2854291 - RNA, 19 nt, Artificial Sequence
  Description of Artificial Sequence: Synthetic oligonucleotide
ugcagagaggcgagccucu

SEQ ID NO: 2854292 - RNA, 19 nt, Artificial Sequence
  Description of Artificial Sequence: Synthetic oligonucleotide
augagggacacccgcuccu

SEQ ID NO: 2854293 - RNA, 19 nt, Artificial Sequence
  Description of Artificial Sequence: Synthetic oligonucleotide
aaagggcagcauguacuca

SEQ ID NO: 2854294 - RNA, 19 nt, Artificial Sequence
  Description of Artificial Sequence: Synthetic oligonucleotide
cucuugcagguccuccagg

SEQ ID NO: 2854295 - RNA, 19 nt, Artificial Sequence
  Description of Artificial Sequence: Synthetic oligonucleotide
uggugacagaugucaccag

SEQ ID NO: 2854296 - RNA, 19 nt, Artificial Sequence
  Description of Artificial Sequence: Synthetic oligonucleotide
uccccuggaggcuucccug

SEQ ID NO: 2854297 - RNA, 19 nt, Artificial Sequence
  Description of Artificial Sequence: Synthetic oligonucleotide
accgucucgugccaaccug

SEQ ID NO: 2854298 - RNA, 19 nt, Artificial Sequence
  Description of Artificial Sequence: Synthetic oligonucleotide
cagcacuccucaaugguca

SEQ ID NO: 2854299 - RNA, 19 nt, Artificial Sequence
  Description of Artificial Sequence: Synthetic oligonucleotide
gucacacagagcugggcca

SEQ ID NO: 2854300 - RNA, 19 nt, Artificial Sequence
  Description of Artificial Sequence: Synthetic oligonucleotide
uccuccacgcagccugcag

SEQ ID NO: 2854301 - RNA, 19 nt, Artificial Sequence
  Description of Artificial Sequence: Synthetic oligonucleotide
gucaccagagagacuagac

SEQ ID NO: 2854302 - RNA, 19 nt, Artificial Sequence
  Description of Artificial Sequence: Synthetic oligonucleotide
ccugaugagggacacccgc

SEQ ID NO: 2854303 - RNA, 19 nt, Artificial Sequence
  Description of Artificial Sequence: Synthetic oligonucleotide
ggauguuucagccaaugau

SEQ ID NO: 2854304 - RNA, 19 nt, Artificial Sequence
  Description of Artificial Sequence: Synthetic oligonucleotide
caauggucacacagagcug

SEQ ID NO: 2854305 - RNA, 19 nt, Artificial Sequence
  Description of Artificial Sequence: Synthetic oligonucleotide
ucuuguggacaaccaccuc

SEQ ID NO: 2854306 - RNA, 19 nt, Artificial Sequence
  Description of Artificial Sequence: Synthetic oligonucleotide
uaccgucucgugccaaccu

SEQ ID NO: 2854307 - RNA, 19 nt, Artificial Sequence
  Description of Artificial Sequence: Synthetic oligonucleotide
cacgcagccugcagagagg

SEQ ID NO: 2854308 - RNA, 19 nt, Artificial Sequence
  Description of Artificial Sequence: Synthetic oligonucleotide
gguagugccguugaccgac

SEQ ID NO: 2854309 - RNA, 19 nt, Artificial Sequence
  Description of Artificial Sequence: Synthetic oligonucleotide
agcaccagccccauggcgu

SEQ ID NO: 2854310 - RNA, 19 nt, Artificial Sequence
  Description of Artificial Sequence: Synthetic oligonucleotide
guaggccucaucuucuugu

SEQ ID NO: 2854311 - RNA, 19 nt, Artificial Sequence
  Description of Artificial Sequence: Synthetic oligonucleotide
ggugacagaugucaccaga

SEQ ID NO: 2854312 - RNA, 19 nt, Artificial Sequence
  Description of Artificial Sequence: Synthetic oligonucleotide
gucucucuggaaguugaug

SEQ ID NO: 2854313 - RNA, 19 nt, Artificial Sequence
  Description of Artificial Sequence: Synthetic oligonucleotide
accuccugaugagggacac

SEQ ID NO: 2854314 - RNA, 19 nt, Artificial Sequence
  Description of Artificial Sequence: Synthetic oligonucleotide
cacauuggugacagauguc

SEQ ID NO: 2854315 - RNA, 19 nt, Artificial Sequence
  Description of Artificial Sequence: Synthetic oligonucleotide
cucugcaucguggucccag

SEQ ID NO: 2854316 - RNA, 19 nt, Artificial Sequence
  Description of Artificial Sequence: Synthetic oligonucleotide
ucguggucccagcacuccu

SEQ ID NO: 2854317 - RNA, 19 nt, Artificial Sequence
  Description of Artificial Sequence: Synthetic oligonucleotide
ccaucugcagcccugcaac

SEQ ID NO: 2854318 - RNA, 19 nt, Artificial Sequence
  Description of Artificial Sequence: Synthetic oligonucleotide
gccauguaccgucucgugc

SEQ ID NO: 2854319 - RNA, 19 nt, Artificial Sequence
  Description of Artificial Sequence: Synthetic oligonucleotide
gacuagacaguccgaggua

SEQ ID NO: 2854320 - RNA, 19 nt, Artificial Sequence
  Description of Artificial Sequence: Synthetic oligonucleotide
ccaaugauccuuaauggua

SEQ ID NO: 2854321 - RNA, 19 nt, Artificial Sequence
  Description of Artificial Sequence: Synthetic oligonucleotide
uacucauccacuggcccau

SEQ ID NO: 2854322 - RNA, 19 nt, Artificial Sequence
  Description of Artificial Sequence: Synthetic oligonucleotide
ggccucaucuucuugugga

SEQ ID NO: 2854323 - RNA, 19 nt, Artificial Sequence
  Description of Artificial Sequence: Synthetic oligonucleotide
acaagcucccacagcacca

SEQ ID NO: 2854324 - RNA, 19 nt, Artificial Sequence
  Description of Artificial Sequence: Synthetic oligonucleotide
ggggccauguaccgucucg

SEQ ID NO: 2854325 - RNA, 19 nt, Artificial Sequence
  Description of Artificial Sequence: Synthetic oligonucleotide
accagagagacuagacagu

SEQ ID NO: 2854326 - RNA, 19 nt, Artificial Sequence
  Description of Artificial Sequence: Synthetic oligonucleotide
ucaucuucuuguggacaac

SEQ ID NO: 2854327 - RNA, 19 nt, Artificial Sequence
  Description of Artificial Sequence: Synthetic oligonucleotide
cagcaccagccccauggcg

SEQ ID NO: 2854328 - RNA, 19 nt, Artificial Sequence
  Description of Artificial Sequence: Synthetic oligonucleotide
aucuucuuguggacaacca

SEQ ID NO: 2854329 - RNA, 19 nt, Artificial Sequence
  Description of Artificial Sequence: Synthetic oligonucleotide
uggcccaucugcagcccug

SEQ ID NO: 2854330 - RNA, 19 nt, Artificial Sequence
  Description of Artificial Sequence: Synthetic oligonucleotide
uccagggacggguguuggc

SEQ ID NO: 2854331 - RNA, 19 nt, Artificial Sequence
  Description of Artificial Sequence: Synthetic oligonucleotide
gagggacacccgcuccucc

SEQ ID NO: 2854332 - RNA, 19 nt, Artificial Sequence
  Description of Artificial Sequence: Synthetic oligonucleotide
ggacaaccaccucuugcag

SEQ ID NO: 2854333 - RNA, 19 nt, Artificial Sequence
  Description of Artificial Sequence: Synthetic oligonucleotide
agggacacccgcuccucca

SEQ ID NO: 2854334 - RNA, 19 nt, Artificial Sequence
  Description of Artificial Sequence: Synthetic oligonucleotide
gaccgaccuccugaugagg

SEQ ID NO: 2854335 - RNA, 19 nt, Artificial Sequence
  Description of Artificial Sequence: Synthetic oligonucleotide
uggucacacagagcugggc

SEQ ID NO: 2854336 - RNA, 19 nt, Artificial Sequence
  Description of Artificial Sequence: Synthetic oligonucleotide
uagaugcuggacgucuuua

SEQ ID NO: 2854337 - RNA, 19 nt, Artificial Sequence
  Description of Artificial Sequence: Synthetic oligonucleotide
caggcccggauguuucagc

SEQ ID NO: 2854338 - RNA, 19 nt, Artificial Sequence
  Description of Artificial Sequence: Synthetic oligonucleotide
cagagaggcgagccucugc

SEQ ID NO: 2854339 - RNA, 19 nt, Artificial Sequence
  Description of Artificial Sequence: Synthetic oligonucleotide
acuggcccaucugcagccc

SEQ ID NO: 2854340 - RNA, 19 nt, Artificial Sequence
  Description of Artificial Sequence: Synthetic oligonucleotide
cacagagcugggccaggcc

SEQ ID NO: 2854341 - RNA, 19 nt, Artificial Sequence
  Description of Artificial Sequence: Synthetic oligonucleotide
ggcacccuccagcaccucg

SEQ ID NO: 2854342 - RNA, 19 nt, Artificial Sequence
  Description of Artificial Sequence: Synthetic oligonucleotide
caucguggucccagcacuc

SEQ ID NO: 2854343 - RNA, 19 nt, Artificial Sequence
  Description of Artificial Sequence: Synthetic oligonucleotide
guugaccgaccuccugaug

SEQ ID NO: 2854344 - RNA, 19 nt, Artificial Sequence
  Description of Artificial Sequence: Synthetic oligonucleotide
uucagccaaugauccuuaa

SEQ ID NO: 2854345 - RNA, 19 nt, Artificial Sequence
  Description of Artificial Sequence: Synthetic oligonucleotide
agcccugcaacgagaaaca

SEQ ID NO: 2854346 - RNA, 19 nt, Artificial Sequence
  Description of Artificial Sequence: Synthetic oligonucleotide
cccugcaacgagaaacaag

SEQ ID NO: 2854347 - RNA, 19 nt, Artificial Sequence
  Description of Artificial Sequence: Synthetic oligonucleotide
acccuccagcaccucgggg

SEQ ID NO: 2854348 - RNA, 19 nt, Artificial Sequence
  Description of Artificial Sequence: Synthetic oligonucleotide
aucugcagcccugcaacga

SEQ ID NO: 2854349 - RNA, 19 nt, Artificial Sequence
  Description of Artificial Sequence: Synthetic oligonucleotide
cugcagagaggcgagccuc

SEQ ID NO: 2854350 - RNA, 19 nt, Artificial Sequence
  Description of Artificial Sequence: Synthetic oligonucleotide
ccacgcagccugcagagag

SEQ ID NO: 2854351 - RNA, 19 nt, Artificial Sequence
  Description of Artificial Sequence: Synthetic oligonucleotide
gucucgugccaaccugccc

SEQ ID NO: 2854352 - RNA, 19 nt, Artificial Sequence
  Description of Artificial Sequence: Synthetic oligonucleotide
auggucacacagagcuggg

SEQ ID NO: 2854353 - RNA, 19 nt, Artificial Sequence
  Description of Artificial Sequence: Synthetic oligonucleotide
cguacaugucgauucgcag

SEQ ID NO: 2854354 - RNA, 19 nt, Artificial Sequence
  Description of Artificial Sequence: Synthetic oligonucleotide
uagugccguugaccgaccu

SEQ ID NO: 2854355 - RNA, 19 nt, Artificial Sequence
  Description of Artificial Sequence: Synthetic oligonucleotide
gggcagcauguacucaucc

SEQ ID NO: 2854356 - RNA, 19 nt, Artificial Sequence
  Description of Artificial Sequence: Synthetic oligonucleotide
ggcagcauguacucaucca

SEQ ID NO: 2854357 - RNA, 19 nt, Artificial Sequence
  Description of Artificial Sequence: Synthetic oligonucleotide
acccgcuccuccacgcagc

SEQ ID NO: 2854358 - RNA, 19 nt, Artificial Sequence
  Description of Artificial Sequence: Synthetic oligonucleotide
guaccgucucgugccaacc

SEQ ID NO: 2854359 - RNA, 19 nt, Artificial Sequence
  Description of Artificial Sequence: Synthetic oligonucleotide
ugcccauggguguccccug

SEQ ID NO: 2854360 - RNA, 19 nt, Artificial Sequence
  Description of Artificial Sequence: Synthetic oligonucleotide
gguaggccucaucuucuug

SEQ ID NO: 2854361 - RNA, 19 nt, Artificial Sequence
  Description of Artificial Sequence: Synthetic oligonucleotide
ccagagagacuagacaguc

SEQ ID NO: 2854362 - RNA, 19 nt, Artificial Sequence
  Description of Artificial Sequence: Synthetic oligonucleotide
agggcagcauguacucauc

SEQ ID NO: 2854363 - RNA, 19 nt, Artificial Sequence
  Description of Artificial Sequence: Synthetic oligonucleotide
gcucccacagcaccagccc

SEQ ID NO: 2854364 - RNA, 19 nt, Artificial Sequence
  Description of Artificial Sequence: Synthetic oligonucleotide
caccucuugcagguccucc

SEQ ID NO: 2854365 - RNA, 19 nt, Artificial Sequence
  Description of Artificial Sequence: Synthetic oligonucleotide
agguagugccguugaccga

SEQ ID NO: 2854366 - RNA, 19 nt, Artificial Sequence
  Description of Artificial Sequence: Synthetic oligonucleotide
ccagcacuccucaaugguc

SEQ ID NO: 2854367 - RNA, 19 nt, Artificial Sequence
  Description of Artificial Sequence: Synthetic oligonucleotide
gagagacuagacaguccga

SEQ ID NO: 2854368 - RNA, 19 nt, Artificial Sequence
  Description of Artificial Sequence: Synthetic oligonucleotide
acaguccgagguagugccg

SEQ ID NO: 2854369 - RNA, 19 nt, Artificial Sequence
  Description of Artificial Sequence: Synthetic oligonucleotide
agagcugggccaggcccgg

SEQ ID NO: 2854370 - RNA, 19 nt, Artificial Sequence
  Description of Artificial Sequence: Synthetic oligonucleotide
gccaaugauccuuaauggu

SEQ ID NO: 2854371 - RNA, 19 nt, Artificial Sequence
  Description of Artificial Sequence: Synthetic oligonucleotide
cacccgcuccuccacgcag

SEQ ID NO: 2854372 - RNA, 19 nt, Artificial Sequence
  Description of Artificial Sequence: Synthetic oligonucleotide
cacccuccagcaccucggg

SEQ ID NO: 2854373 - RNA, 19 nt, Artificial Sequence
  Description of Artificial Sequence: Synthetic oligonucleotide
ugguaggccucaucuucuu

SEQ ID NO: 2854374 - RNA, 19 nt, Artificial Sequence
  Description of Artificial Sequence: Synthetic oligonucleotide
acuccucaauggucacaca

SEQ ID NO: 2854375 - RNA, 19 nt, Artificial Sequence
  Description of Artificial Sequence: Synthetic oligonucleotide
guggucccagcacuccuca

SEQ ID NO: 2854376 - RNA, 19 nt, Artificial Sequence
  Description of Artificial Sequence: Synthetic oligonucleotide
cgagaaacaagcucccaca

SEQ ID NO: 2854377 - RNA, 19 nt, Artificial Sequence
  Description of Artificial Sequence: Synthetic oligonucleotide
gcagccugcagagaggcga

SEQ ID NO: 2854378 - RNA, 19 nt, Artificial Sequence
  Description of Artificial Sequence: Synthetic oligonucleotide
ugccguugaccgaccuccu

SEQ ID NO: 2854379 - RNA, 19 nt, Artificial Sequence
  Description of Artificial Sequence: Synthetic oligonucleotide
ugagggacacccgcuccuc

SEQ ID NO: 2854380 - RNA, 19 nt, Artificial Sequence
  Description of Artificial Sequence: Synthetic oligonucleotide
ccagggacggguguuggcc

SEQ ID NO: 2854381 - RNA, 19 nt, Artificial Sequence
  Description of Artificial Sequence: Synthetic oligonucleotide
gguguuggccaaucuccuc

SEQ ID NO: 2854382 - RNA, 19 nt, Artificial Sequence
  Description of Artificial Sequence: Synthetic oligonucleotide
ggacacccgcuccuccacg

SEQ ID NO: 2854383 - RNA, 19 nt, Artificial Sequence
  Description of Artificial Sequence: Synthetic oligonucleotide
auccacuggcccaucugca

SEQ ID NO: 2854384 - RNA, 19 nt, Artificial Sequence
  Description of Artificial Sequence: Synthetic oligonucleotide
ccacauuggugacagaugu

SEQ ID NO: 2854385 - RNA, 19 nt, Artificial Sequence
  Description of Artificial Sequence: Synthetic oligonucleotide
cauguaccgucucgugcca

SEQ ID NO: 2854386 - RNA, 19 nt, Artificial Sequence
  Description of Artificial Sequence: Synthetic oligonucleotide
gaccuccugaugagggaca

SEQ ID NO: 2854387 - RNA, 19 nt, Artificial Sequence
  Description of Artificial Sequence: Synthetic oligonucleotide
gccaaccugcccaugggug

SEQ ID NO: 2854388 - RNA, 19 nt, Artificial Sequence
  Description of Artificial Sequence: Synthetic oligonucleotide
cgagguagugccguugacc

SEQ ID NO: 2854389 - RNA, 19 nt, Artificial Sequence
  Description of Artificial Sequence: Synthetic oligonucleotide
cacacagagcugggccagg

SEQ ID NO: 2854390 - RNA, 19 nt, Artificial Sequence
  Description of Artificial Sequence: Synthetic oligonucleotide
augucaccagagagacuag

SEQ ID NO: 2854391 - RNA, 19 nt, Artificial Sequence
  Description of Artificial Sequence: Synthetic oligonucleotide
cugaugagggacacccgcu

SEQ ID NO: 2854392 - RNA, 19 nt, Artificial Sequence
  Description of Artificial Sequence: Synthetic oligonucleotide
gcacccuccagcaccucgg

SEQ ID NO: 2854393 - RNA, 19 nt, Artificial Sequence
  Description of Artificial Sequence: Synthetic oligonucleotide
ggccauguaccgucucgug

SEQ ID NO: 2854394 - RNA, 19 nt, Artificial Sequence
  Description of Artificial Sequence: Synthetic oligonucleotide
ccgucucgugccaaccugc

SEQ ID NO: 2854395 - RNA, 19 nt, Artificial Sequence
  Description of Artificial Sequence: Synthetic oligonucleotide
caaccugcccauggguguc

SEQ ID NO: 2854396 - RNA, 19 nt, Artificial Sequence
  Description of Artificial Sequence: Synthetic oligonucleotide
gcgagccucugcaucgugg

SEQ ID NO: 2854397 - RNA, 19 nt, Artificial Sequence
  Description of Artificial Sequence: Synthetic oligonucleotide
gccucaucuucuuguggac

SEQ ID NO: 2854398 - RNA, 19 nt, Artificial Sequence
  Description of Artificial Sequence: Synthetic oligonucleotide
cagggacggguguuggcca

SEQ ID NO: 2854399 - RNA, 19 nt, Artificial Sequence
  Description of Artificial Sequence: Synthetic oligonucleotide
guuggccaaucuccuccuc

SEQ ID NO: 2854400 - RNA, 19 nt, Artificial Sequence
  Description of Artificial Sequence: Synthetic oligonucleotide
agggacggguguuggccaa

SEQ ID NO: 2854401 - RNA, 19 nt, Artificial Sequence
  Description of Artificial Sequence: Synthetic oligonucleotide
ucgcaggaaggcgucucuc

SEQ ID NO: 2854402 - RNA, 19 nt, Artificial Sequence
  Description of Artificial Sequence: Synthetic oligonucleotide
guccgagguagugccguug

SEQ ID NO: 2854403 - RNA, 19 nt, Artificial Sequence
  Description of Artificial Sequence: Synthetic oligonucleotide
gccucugcaucgugguccc

SEQ ID NO: 2854404 - RNA, 19 nt, Artificial Sequence
  Description of Artificial Sequence: Synthetic oligonucleotide
ccucuugcagguccuccag

SEQ ID NO: 2854405 - RNA, 19 nt, Artificial Sequence
  Description of Artificial Sequence: Synthetic oligonucleotide
uguccccuggaggcuuccc

SEQ ID NO: 2854406 - RNA, 19 nt, Artificial Sequence
  Description of Artificial Sequence: Synthetic oligonucleotide
auggcacccuccagcaccu

SEQ ID NO: 2854407 - RNA, 19 nt, Artificial Sequence
  Description of Artificial Sequence: Synthetic oligonucleotide
accaccucuugcagguccu

SEQ ID NO: 2854408 - RNA, 19 nt, Artificial Sequence
  Description of Artificial Sequence: Synthetic oligonucleotide
gcuuagaugcuggacgucu

SEQ ID NO: 2854409 - RNA, 19 nt, Artificial Sequence
  Description of Artificial Sequence: Synthetic oligonucleotide
ggcguacaugucgauucgc

SEQ ID NO: 2854410 - RNA, 19 nt, Artificial Sequence
  Description of Artificial Sequence: Synthetic oligonucleotide
uccuccagggacggguguu

SEQ ID NO: 2854411 - RNA, 19 nt, Artificial Sequence
  Description of Artificial Sequence: Synthetic oligonucleotide
ccauggguguccccuggag

SEQ ID NO: 2854412 - RNA, 19 nt, Artificial Sequence
  Description of Artificial Sequence: Synthetic oligonucleotide
guagugccguugaccgacc

SEQ ID NO: 2854413 - RNA, 19 nt, Artificial Sequence
  Description of Artificial Sequence: Synthetic oligonucleotide
gcccggauguuucagccaa

SEQ ID NO: 2854414 - RNA, 19 nt, Artificial Sequence
  Description of Artificial Sequence: Synthetic oligonucleotide
cuagacaguccgagguagu

SEQ ID NO: 2854415 - RNA, 19 nt, Artificial Sequence
  Description of Artificial Sequence: Synthetic oligonucleotide
gcguacaugucgauucgca

SEQ ID NO: 2854416 - RNA, 19 nt, Artificial Sequence
  Description of Artificial Sequence: Synthetic oligonucleotide
cgcuccuccacgcagccug

SEQ ID NO: 2854417 - RNA, 19 nt, Artificial Sequence
  Description of Artificial Sequence: Synthetic oligonucleotide
agaugucaccagagagacu

SEQ ID NO: 2854418 - RNA, 19 nt, Artificial Sequence
  Description of Artificial Sequence: Synthetic oligonucleotide
cugcaucguggucccagca

SEQ ID NO: 2854419 - RNA, 19 nt, Artificial Sequence
  Description of Artificial Sequence: Synthetic oligonucleotide
gcaucguggucccagcacu

SEQ ID NO: 2854420 - RNA, 19 nt, Artificial Sequence
  Description of Artificial Sequence: Synthetic oligonucleotide
aguccgagguagugccguu

SEQ ID NO: 2854421 - RNA, 19 nt, Artificial Sequence
  Description of Artificial Sequence: Synthetic oligonucleotide
gcccauggguguccccugg

SEQ ID NO: 2854422 - RNA, 19 nt, Artificial Sequence
  Description of Artificial Sequence: Synthetic oligonucleotide
gcagguccuccagggacgg

SEQ ID NO: 2854423 - RNA, 19 nt, Artificial Sequence
  Description of Artificial Sequence: Synthetic oligonucleotide
uggucccagcacuccucaa

SEQ ID NO: 2854424 - RNA, 19 nt, Artificial Sequence
  Description of Artificial Sequence: Synthetic oligonucleotide
gacggguguuggccaaucu

SEQ ID NO: 2854425 - RNA, 19 nt, Artificial Sequence
  Description of Artificial Sequence: Synthetic oligonucleotide
ggcgucucucuggaaguug

SEQ ID NO: 2854426 - RNA, 19 nt, Artificial Sequence
  Description of Artificial Sequence: Synthetic oligonucleotide
cccauggcguacaugucga

SEQ ID NO: 2854427 - RNA, 19 nt, Artificial Sequence
  Description of Artificial Sequence: Synthetic oligonucleotide
cugcaacgagaaacaagcu

SEQ ID NO: 2854428 - RNA, 19 nt, Artificial Sequence
  Description of Artificial Sequence: Synthetic oligonucleotide
cuuagaugcuggacgucuu

SEQ ID NO: 2854429 - RNA, 19 nt, Artificial Sequence
  Description of Artificial Sequence: Synthetic oligonucleotide
accagccccauggcguaca

SEQ ID NO: 2854430 - RNA, 19 nt, Artificial Sequence
  Description of Artificial Sequence: Synthetic oligonucleotide
ccggauguuucagccaaug

SEQ ID NO: 2854431 - RNA, 19 nt, Artificial Sequence
  Description of Artificial Sequence: Synthetic oligonucleotide
ccguugaccgaccuccuga

SEQ ID NO: 2854432 - RNA, 19 nt, Artificial Sequence
  Description of Artificial Sequence: Synthetic oligonucleotide
gggacacccgcuccuccac

SEQ ID NO: 2854433 - RNA, 19 nt, Artificial Sequence
  Description of Artificial Sequence: Synthetic oligonucleotide
gauucgcaggaaggcgucu

SEQ ID NO: 2854434 - RNA, 19 nt, Artificial Sequence
  Description of Artificial Sequence: Synthetic oligonucleotide
acaugucgauucgcaggaa

SEQ ID NO: 2854435 - RNA, 19 nt, Artificial Sequence
  Description of Artificial Sequence: Synthetic oligonucleotide
gcgucucucuggaaguuga

SEQ ID NO: 2854436 - RNA, 19 nt, Artificial Sequence
  Description of Artificial Sequence: Synthetic oligonucleotide
gccguugaccgaccuccug

SEQ ID NO: 2854437 - RNA, 19 nt, Artificial Sequence
  Description of Artificial Sequence: Synthetic oligonucleotide
gcugggccaggcccggaug

SEQ ID NO: 2854438 - RNA, 19 nt, Artificial Sequence
  Description of Artificial Sequence: Synthetic oligonucleotide
cgucucgugccaaccugcc

SEQ ID NO: 2854439 - RNA, 19 nt, Artificial Sequence
  Description of Artificial Sequence: Synthetic oligonucleotide
ucgugccaaccugcccaug

SEQ ID NO: 2854440 - RNA, 19 nt, Artificial Sequence
  Description of Artificial Sequence: Synthetic oligonucleotide
gguccuccagggacgggug

SEQ ID NO: 2854441 - RNA, 19 nt, Artificial Sequence
  Description of Artificial Sequence: Synthetic oligonucleotide
ggucccagcacuccucaau

SEQ ID NO: 2854442 - RNA, 19 nt, Artificial Sequence
  Description of Artificial Sequence: Synthetic oligonucleotide
auguaccgucucgugccaa

SEQ ID NO: 2854443 - RNA, 19 nt, Artificial Sequence
  Description of Artificial Sequence: Synthetic oligonucleotide
guccccuggaggcuucccu

SEQ ID NO: 2854444 - RNA, 19 nt, Artificial Sequence
  Description of Artificial Sequence: Synthetic oligonucleotide
gagaggcgagccucugcau

SEQ ID NO: 2854445 - RNA, 19 nt, Artificial Sequence
  Description of Artificial Sequence: Synthetic oligonucleotide
ggcccggauguuucagcca

SEQ ID NO: 2854446 - RNA, 19 nt, Artificial Sequence
  Description of Artificial Sequence: Synthetic oligonucleotide
ccucaucuucuuguggaca

SEQ ID NO: 2854447 - RNA, 19 nt, Artificial Sequence
  Description of Artificial Sequence: Synthetic oligonucleotide
cgauucgcaggaaggcguc

SEQ ID NO: 2854448 - RNA, 19 nt, Artificial Sequence
  Description of Artificial Sequence: Synthetic oligonucleotide
aggcgucucucuggaaguu

SEQ ID NO: 2854449 - RNA, 19 nt, Artificial Sequence
  Description of Artificial Sequence: Synthetic oligonucleotide
ggcgagccucugcaucgug

SEQ ID NO: 2854450 - RNA, 19 nt, Artificial Sequence
  Description of Artificial Sequence: Synthetic oligonucleotide
aggcgagccucugcaucgu

SEQ ID NO: 2854451 - RNA, 19 nt, Artificial Sequence
  Description of Artificial Sequence: Synthetic oligonucleotide
caaccaccucuugcagguc

SEQ ID NO: 2854452 - RNA, 19 nt, Artificial Sequence
  Description of Artificial Sequence: Synthetic oligonucleotide
ggcccaucugcagcccugc

SEQ ID NO: 2854453 - RNA, 19 nt, Artificial Sequence
  Description of Artificial Sequence: Synthetic oligonucleotide
cugggccaggcccggaugu

SEQ ID NO: 2854454 - RNA, 19 nt, Artificial Sequence
  Description of Artificial Sequence: Synthetic oligonucleotide
ccuccacgcagccugcaga

SEQ ID NO: 2854455 - RNA, 19 nt, Artificial Sequence
  Description of Artificial Sequence: Synthetic oligonucleotide
cugcccauggguguccccu

SEQ ID NO: 2854456 - RNA, 19 nt, Artificial Sequence
  Description of Artificial Sequence: Synthetic oligonucleotide
cauggcguacaugucgauu

SEQ ID NO: 2854457 - RNA, 19 nt, Artificial Sequence
  Description of Artificial Sequence: Synthetic oligonucleotide
cgaccuccugaugagggac

SEQ ID NO: 2854458 - RNA, 19 nt, Artificial Sequence
  Description of Artificial Sequence: Synthetic oligonucleotide
ggcuuagaugcuggacguc

SEQ ID NO: 2854459 - RNA, 19 nt, Artificial Sequence
  Description of Artificial Sequence: Synthetic oligonucleotide
caguccgagguagugccgu

SEQ ID NO: 2854460 - RNA, 19 nt, Artificial Sequence
  Description of Artificial Sequence: Synthetic oligonucleotide
gcagagaggcgagccucug

SEQ ID NO: 2854461 - RNA, 19 nt, Artificial Sequence
  Description of Artificial Sequence: Synthetic oligonucleotide
cguggucccagcacuccuc

SEQ ID NO: 2854462 - RNA, 19 nt, Artificial Sequence
  Description of Artificial Sequence: Synthetic oligonucleotide
ggccaaucuccuccucaaa

SEQ ID NO: 2854463 - RNA, 19 nt, Artificial Sequence
  Description of Artificial Sequence: Synthetic oligonucleotide
guguccccuggaggcuucc

SEQ ID NO: 2854464 - RNA, 19 nt, Artificial Sequence
  Description of Artificial Sequence: Synthetic oligonucleotide
ugggccaggcccggauguu

SEQ ID NO: 2854465 - RNA, 19 nt, Artificial Sequence
  Description of Artificial Sequence: Synthetic oligonucleotide
ccaaccugcccaugggugu

SEQ ID NO: 2854466 - RNA, 19 nt, Artificial Sequence
  Description of Artificial Sequence: Synthetic oligonucleotide
cccgcuccuccacgcagcc

SEQ ID NO: 2854467 - RNA, 19 nt, Artificial Sequence
  Description of Artificial Sequence: Synthetic oligonucleotide
ccaggcccggauguuucag

SEQ ID NO: 2854468 - RNA, 19 nt, Artificial Sequence
  Description of Artificial Sequence: Synthetic oligonucleotide
cagccccauggcguacaug

SEQ ID NO: 2854469 - RNA, 19 nt, Artificial Sequence
  Description of Artificial Sequence: Synthetic oligonucleotide
cggauguuucagccaauga

SEQ ID NO: 2854470 - RNA, 19 nt, Artificial Sequence
  Description of Artificial Sequence: Synthetic oligonucleotide
cccaucugcagcccugcaa

SEQ ID NO: 2854471 - RNA, 19 nt, Artificial Sequence
  Description of Artificial Sequence: Synthetic oligonucleotide
ccgagguagugccguugac

SEQ ID NO: 2854472 - RNA, 19 nt, Artificial Sequence
  Description of Artificial Sequence: Synthetic oligonucleotide
ggacggguguuggccaauc

SEQ ID NO: 2854473 - RNA, 19 nt, Artificial Sequence
  Description of Artificial Sequence: Synthetic oligonucleotide
ccuccagggacggguguug

SEQ ID NO: 2854474 - RNA, 19 nt, Artificial Sequence
  Description of Artificial Sequence: Synthetic oligonucleotide
ggaaggcgucucucuggaa

SEQ ID NO: 2854475 - RNA, 19 nt, Artificial Sequence
  Description of Artificial Sequence: Synthetic oligonucleotide
ggccaggcccggauguuuc

SEQ ID NO: 2854476 - RNA, 19 nt, Artificial Sequence
  Description of Artificial Sequence: Synthetic oligonucleotide
gcacuccucaauggucaca

SEQ ID NO: 2854477 - RNA, 19 nt, Artificial Sequence
  Description of Artificial Sequence: Synthetic oligonucleotide
caccagccccauggcguac

SEQ ID NO: 2854478 - RNA, 19 nt, Artificial Sequence
  Description of Artificial Sequence: Synthetic oligonucleotide
ggguguuggccaaucuccu

SEQ ID NO: 2854479 - RNA, 19 nt, Artificial Sequence
  Description of Artificial Sequence: Synthetic oligonucleotide
ccgaccuccugaugaggga

SEQ ID NO: 2854480 - RNA, 19 nt, Artificial Sequence
  Description of Artificial Sequence: Synthetic oligonucleotide
cucgugccaaccugcccau

SEQ ID NO: 2854481 - RNA, 19 nt, Artificial Sequence
  Description of Artificial Sequence: Synthetic oligonucleotide
cccagcacuccucaauggu

SEQ ID NO: 2854482 - RNA, 19 nt, Artificial Sequence
  Description of Artificial Sequence: Synthetic oligonucleotide
gcaccagccccauggcgua

SEQ ID NO: 2854483 - RNA, 19 nt, Artificial Sequence
  Description of Artificial Sequence: Synthetic oligonucleotide
gccaggcccggauguuuca

SEQ ID NO: 2854484 - RNA, 19 nt, Artificial Sequence
  Description of Artificial Sequence: Synthetic oligonucleotide
gcuccuccacgcagccugc

SEQ ID NO: 2854485 - RNA, 19 nt, Artificial Sequence
  Description of Artificial Sequence: Synthetic oligonucleotide
cuggcccaucugcagcccu

SEQ ID NO: 2854486 - RNA, 19 nt, Artificial Sequence
  Description of Artificial Sequence: Synthetic oligonucleotide
cgcagccugcagagaggcg

SEQ ID NO: 2854487 - RNA, 19 nt, Artificial Sequence
  Description of Artificial Sequence: Synthetic oligonucleotide
gguccacauuggugacaga

SEQ ID NO: 2854488 - RNA, 19 nt, Artificial Sequence
  Description of Artificial Sequence: Synthetic oligonucleotide
gggccauguaccgucucgu

SEQ ID NO: 2854489 - RNA, 19 nt, Artificial Sequence
  Description of Artificial Sequence: Synthetic oligonucleotide
gguguccccuggaggcuuc

SEQ ID NO: 2854490 - RNA, 19 nt, Artificial Sequence
  Description of Artificial Sequence: Synthetic oligonucleotide
ccugcagagaggcgagccu

SEQ ID NO: 2854491 - RNA, 19 nt, Artificial Sequence
  Description of Artificial Sequence: Synthetic oligonucleotide
ccucaaagggcagcaugua

SEQ ID NO: 2854492 - RNA, 19 nt, Artificial Sequence
  Description of Artificial Sequence: Synthetic oligonucleotide
uggcacccuccagcaccuc

SEQ ID NO: 2854493 - RNA, 19 nt, Artificial Sequence
  Description of Artificial Sequence: Synthetic oligonucleotide
gcccaucugcagcccugca

SEQ ID NO: 2854494 - RNA, 19 nt, Artificial Sequence
  Description of Artificial Sequence: Synthetic oligonucleotide
cccauggguguccccugga

SEQ ID NO: 2854495 - RNA, 19 nt, Artificial Sequence
  Description of Artificial Sequence: Synthetic oligonucleotide
gccccauggcguacauguc

SEQ ID NO: 2854496 - RNA, 19 nt, Artificial Sequence
  Description of Artificial Sequence: Synthetic oligonucleotide
cgcaggaaggcgucucucu

SEQ ID NO: 2854497 - RNA, 19 nt, Artificial Sequence
  Description of Artificial Sequence: Synthetic oligonucleotide
ccaccucuugcagguccuc

SEQ ID NO: 2854498 - RNA, 19 nt, Artificial Sequence
  Description of Artificial Sequence: Synthetic oligonucleotide
ccacagcaccagccccaug

SEQ ID NO: 2854499 - RNA, 19 nt, Artificial Sequence
  Description of Artificial Sequence: Synthetic oligonucleotide
cguugaccgaccuccugau

SEQ ID NO: 2854500 - RNA, 19 nt, Artificial Sequence
  Description of Artificial Sequence: Synthetic oligonucleotide
ggguguccccuggaggcuu

SEQ ID NO: 2854501 - RNA, 19 nt, Artificial Sequence
  Description of Artificial Sequence: Synthetic oligonucleotide
gggccaggcccggauguuu

SEQ ID NO: 2854502 - RNA, 19 nt, Artificial Sequence
  Description of Artificial Sequence: Synthetic oligonucleotide
ccuuaaugguaggccucau

SEQ ID NO: 2854503 - RNA, 19 nt, Artificial Sequence
  Description of Artificial Sequence: Synthetic oligonucleotide
gggacggguguuggccaau

SEQ ID NO: 2854504 - RNA, 19 nt, Artificial Sequence
  Description of Artificial Sequence: Synthetic oligonucleotide
cgucucucuggaaguugau

SEQ ID NO: 2854505 - RNA, 19 nt, Artificial Sequence
  Description of Artificial Sequence: Synthetic oligonucleotide
cccggauguuucagccaau

SEQ ID NO: 2854506 - RNA, 19 nt, Artificial Sequence
  Description of Artificial Sequence: Synthetic oligonucleotide
ccagccccauggcguacau

SEQ ID NO: 2854507 - RNA, 19 nt, Artificial Sequence
  Description of Artificial Sequence: Synthetic oligonucleotide
ccucugcaucgugguccca

SEQ ID NO: 2854508 - RNA, 19 nt, Artificial Sequence
  Description of Artificial Sequence: Synthetic oligonucleotide
cccacagcaccagccccau

SEQ ID NO: 2854509 - RNA, 19 nt, Artificial Sequence
  Description of Artificial Sequence: Synthetic oligonucleotide
ccgcuccuccacgcagccu

SEQ ID NO: 2854510 - RNA, 19 nt, Artificial Sequence
  Description of Artificial Sequence: Synthetic oligonucleotide
agugaugaugagcucaucc

SEQ ID NO: 2854511 - RNA, 19 nt, Artificial Sequence
  Description of Artificial Sequence: Synthetic oligonucleotide
aaagcguuagguuugcuca

SEQ ID NO: 2854512 - RNA, 19 nt, Artificial Sequence
  Description of Artificial Sequence: Synthetic oligonucleotide
ucauacuuggucauguaag

SEQ ID NO: 2854513 - RNA, 19 nt, Artificial Sequence
  Description of Artificial Sequence: Synthetic oligonucleotide
uccuucauggcaaugagca

SEQ ID NO: 2854514 - RNA, 19 nt, Artificial Sequence
  Description of Artificial Sequence: Synthetic oligonucleotide
aaucucaacauucuccuga

SEQ ID NO: 2854515 - RNA, 19 nt, Artificial Sequence
  Description of Artificial Sequence: Synthetic oligonucleotide
uagaaucucaacauucucc

SEQ ID NO: 2854516 - RNA, 19 nt, Artificial Sequence
  Description of Artificial Sequence: Synthetic oligonucleotide
aucacaggggcacacaucg

SEQ ID NO: 2854517 - RNA, 19 nt, Artificial Sequence
  Description of Artificial Sequence: Synthetic oligonucleotide
gaugauugggaucuuccgg

SEQ ID NO: 2854518 - RNA, 19 nt, Artificial Sequence
  Description of Artificial Sequence: Synthetic oligonucleotide
auagcuuccaucuggcagg

SEQ ID NO: 2854519 - RNA, 19 nt, Artificial Sequence
  Description of Artificial Sequence: Synthetic oligonucleotide
uccagcuccaccaucacag

SEQ ID NO: 2854520 - RNA, 19 nt, Artificial Sequence
  Description of Artificial Sequence: Synthetic oligonucleotide
aaucuucauagcuuccauc

SEQ ID NO: 2854521 - RNA, 19 nt, Artificial Sequence
  Description of Artificial Sequence: Synthetic oligonucleotide
cucaacauucuccugaccc

SEQ ID NO: 2854522 - RNA, 19 nt, Artificial Sequence
  Description of Artificial Sequence: Synthetic oligonucleotide
augauugggaucuuccggg

SEQ ID NO: 2854523 - RNA, 19 nt, Artificial Sequence
  Description of Artificial Sequence: Synthetic oligonucleotide
guuagguuugcucagucag

SEQ ID NO: 2854524 - RNA, 19 nt, Artificial Sequence
  Description of Artificial Sequence: Synthetic oligonucleotide
uuccaagucaucuaguccu

SEQ ID NO: 2854525 - RNA, 19 nt, Artificial Sequence
  Description of Artificial Sequence: Synthetic oligonucleotide
ucguugucugacaugaugc

SEQ ID NO: 2854526 - RNA, 19 nt, Artificial Sequence
  Description of Artificial Sequence: Synthetic oligonucleotide
uacuuggucauguaaggag

SEQ ID NO: 2854527 - RNA, 19 nt, Artificial Sequence
  Description of Artificial Sequence: Synthetic oligonucleotide
aaauuguccucguugucug

SEQ ID NO: 2854528 - RNA, 19 nt, Artificial Sequence
  Description of Artificial Sequence: Synthetic oligonucleotide
acaucaucaaagucaucgc

SEQ ID NO: 2854529 - RNA, 19 nt, Artificial Sequence
  Description of Artificial Sequence: Synthetic oligonucleotide
aucuucauagcuuccaucu

SEQ ID NO: 2854530 - RNA, 19 nt, Artificial Sequence
  Description of Artificial Sequence: Synthetic oligonucleotide
agaaucucaacauucuccu

SEQ ID NO: 2854531 - RNA, 19 nt, Artificial Sequence
  Description of Artificial Sequence: Synthetic oligonucleotide
cauacuuggucauguaagg

SEQ ID NO: 2854532 - RNA, 19 nt, Artificial Sequence
  Description of Artificial Sequence: Synthetic oligonucleotide
uuuggaaagcguuagguuu

SEQ ID NO: 2854533 - RNA, 19 nt, Artificial Sequence
  Description of Artificial Sequence: Synthetic oligonucleotide
cuucauagcuuccaucugg

SEQ ID NO: 2854534 - RNA, 19 nt, Artificial Sequence
  Description of Artificial Sequence: Synthetic oligonucleotide
gaugagcucauccacgccc

SEQ ID NO: 2854535 - RNA, 19 nt, Artificial Sequence
  Description of Artificial Sequence: Synthetic oligonucleotide
agaggguagaaucucaaca

SEQ ID NO: 2854536 - RNA, 19 nt, Artificial Sequence
  Description of Artificial Sequence: Synthetic oligonucleotide
uuuccaagucaucuagucc

SEQ ID NO: 2854537 - RNA, 19 nt, Artificial Sequence
  Description of Artificial Sequence: Synthetic oligonucleotide
ugaugauugggaucuuccg

SEQ ID NO: 2854538 - RNA, 19 nt, Artificial Sequence
  Description of Artificial Sequence: Synthetic oligonucleotide
uucaccagaggguagaauc

SEQ ID NO: 2854539 - RNA, 19 nt, Artificial Sequence
  Description of Artificial Sequence: Synthetic oligonucleotide
auguaaggaguggugaugc

SEQ ID NO: 2854540 - RNA, 19 nt, Artificial Sequence
  Description of Artificial Sequence: Synthetic oligonucleotide
cauuuuccaagucaucuag

SEQ ID NO: 2854541 - RNA, 19 nt, Artificial Sequence
  Description of Artificial Sequence: Synthetic oligonucleotide
ugagcaaagggucugucuc

SEQ ID NO: 2854542 - RNA, 19 nt, Artificial Sequence
  Description of Artificial Sequence: Synthetic oligonucleotide
uucauggcaaugagcaaag

SEQ ID NO: 2854543 - RNA, 19 nt, Artificial Sequence
  Description of Artificial Sequence: Synthetic oligonucleotide
cauagcuuccaucuggcag

SEQ ID NO: 2854544 - RNA, 19 nt, Artificial Sequence
  Description of Artificial Sequence: Synthetic oligonucleotide
gaugaugagcucauccacg

SEQ ID NO: 2854545 - RNA, 19 nt, Artificial Sequence
  Description of Artificial Sequence: Synthetic oligonucleotide
uuggaaagcguuagguuug

SEQ ID NO: 2854546 - RNA, 19 nt, Artificial Sequence
  Description of Artificial Sequence: Synthetic oligonucleotide
aaugaugauugggaucuuc

SEQ ID NO: 2854547 - RNA, 19 nt, Artificial Sequence
  Description of Artificial Sequence: Synthetic oligonucleotide
ucugguuggccuguggucg

SEQ ID NO: 2854548 - RNA, 19 nt, Artificial Sequence
  Description of Artificial Sequence: Synthetic oligonucleotide
uaguccuucguccucuucc

SEQ ID NO: 2854549 - RNA, 19 nt, Artificial Sequence
  Description of Artificial Sequence: Synthetic oligonucleotide
uuuuccaagucaucuaguc

SEQ ID NO: 2854550 - RNA, 19 nt, Artificial Sequence
  Description of Artificial Sequence: Synthetic oligonucleotide
ugaugaugagcucauccac

SEQ ID NO: 2854551 - RNA, 19 nt, Artificial Sequence
  Description of Artificial Sequence: Synthetic oligonucleotide
gucgaaauuguccucguug

SEQ ID NO: 2854552 - RNA, 19 nt, Artificial Sequence
  Description of Artificial Sequence: Synthetic oligonucleotide
guggucguucaccagaggg

SEQ ID NO: 2854553 - RNA, 19 nt, Artificial Sequence
  Description of Artificial Sequence: Synthetic oligonucleotide
uugaguuccuucauggcaa

SEQ ID NO: 2854554 - RNA, 19 nt, Artificial Sequence
  Description of Artificial Sequence: Synthetic oligonucleotide
uaaggaguggugaugcgcu

SEQ ID NO: 2854555 - RNA, 19 nt, Artificial Sequence
  Description of Artificial Sequence: Synthetic oligonucleotide
augaugauugggaucuucc

SEQ ID NO: 2854556 - RNA, 19 nt, Artificial Sequence
  Description of Artificial Sequence: Synthetic oligonucleotide
ucgaaauuguccucguugu

SEQ ID NO: 2854557 - RNA, 19 nt, Artificial Sequence
  Description of Artificial Sequence: Synthetic oligonucleotide
uucauagcuuccaucuggc

SEQ ID NO: 2854558 - RNA, 19 nt, Artificial Sequence
  Description of Artificial Sequence: Synthetic oligonucleotide
aucucaacauucuccugac

SEQ ID NO: 2854559 - RNA, 19 nt, Artificial Sequence
  Description of Artificial Sequence: Synthetic oligonucleotide
caucaucaaagucaucgcc

SEQ ID NO: 2854560 - RNA, 19 nt, Artificial Sequence
  Description of Artificial Sequence: Synthetic oligonucleotide
uucguccucuuccacauca

SEQ ID NO: 2854561 - RNA, 19 nt, Artificial Sequence
  Description of Artificial Sequence: Synthetic oligonucleotide
uaacggcgaaugaugauug

SEQ ID NO: 2854562 - RNA, 19 nt, Artificial Sequence
  Description of Artificial Sequence: Synthetic oligonucleotide
aaagucaucgccgucgaaa

SEQ ID NO: 2854563 - RNA, 19 nt, Artificial Sequence
  Description of Artificial Sequence: Synthetic oligonucleotide
cucuuccacaucaucaaag

SEQ ID NO: 2854564 - RNA, 19 nt, Artificial Sequence
  Description of Artificial Sequence: Synthetic oligonucleotide
gucaucuaguccuucgucc

SEQ ID NO: 2854565 - RNA, 19 nt, Artificial Sequence
  Description of Artificial Sequence: Synthetic oligonucleotide
aguggugaugcgcuucugg

SEQ ID NO: 2854566 - RNA, 19 nt, Artificial Sequence
  Description of Artificial Sequence: Synthetic oligonucleotide
aucgccgucgaaauugucc

SEQ ID NO: 2854567 - RNA, 19 nt, Artificial Sequence
  Description of Artificial Sequence: Synthetic oligonucleotide
caagucaucuaguccuucg

SEQ ID NO: 2854568 - RNA, 19 nt, Artificial Sequence
  Description of Artificial Sequence: Synthetic oligonucleotide
caucuggcagguaacggcg

SEQ ID NO: 2854569 - RNA, 19 nt, Artificial Sequence
  Description of Artificial Sequence: Synthetic oligonucleotide
ugcucagucagugaugaug

SEQ ID NO: 2854570 - RNA, 19 nt, Artificial Sequence
  Description of Artificial Sequence: Synthetic oligonucleotide
agucaucuaguccuucguc

SEQ ID NO: 2854571 - RNA, 19 nt, Artificial Sequence
  Description of Artificial Sequence: Synthetic oligonucleotide
gaaagcguuagguuugcuc

SEQ ID NO: 2854572 - RNA, 19 nt, Artificial Sequence
  Description of Artificial Sequence: Synthetic oligonucleotide
auggcaaugagcaaagggu

SEQ ID NO: 2854573 - RNA, 19 nt, Artificial Sequence
  Description of Artificial Sequence: Synthetic oligonucleotide
cacaucgcgaucuggagug

SEQ ID NO: 2854574 - RNA, 19 nt, Artificial Sequence
  Description of Artificial Sequence: Synthetic oligonucleotide
aucuggagugcccgggugc

SEQ ID NO: 2854575 - RNA, 19 nt, Artificial Sequence
  Description of Artificial Sequence: Synthetic oligonucleotide
ucaacauucuccugacccu

SEQ ID NO: 2854576 - RNA, 19 nt, Artificial Sequence
  Description of Artificial Sequence: Synthetic oligonucleotide
aagucaucuaguccuucgu

SEQ ID NO: 2854577 - RNA, 19 nt, Artificial Sequence
  Description of Artificial Sequence: Synthetic oligonucleotide
uggcaaugagcaaaggguc

SEQ ID NO: 2854578 - RNA, 19 nt, Artificial Sequence
  Description of Artificial Sequence: Synthetic oligonucleotide
ucagucagugaugaugagc

SEQ ID NO: 2854579 - RNA, 19 nt, Artificial Sequence
  Description of Artificial Sequence: Synthetic oligonucleotide
uuuuggaaagcguuagguu

SEQ ID NO: 2854580 - RNA, 19 nt, Artificial Sequence
  Description of Artificial Sequence: Synthetic oligonucleotide
aagcguuagguuugcucag

SEQ ID NO: 2854581 - RNA, 19 nt, Artificial Sequence
  Description of Artificial Sequence: Synthetic oligonucleotide
cacgccccaaucuucauag

SEQ ID NO: 2854582 - RNA, 19 nt, Artificial Sequence
  Description of Artificial Sequence: Synthetic oligonucleotide
aaugagcaaagggucuguc

SEQ ID NO: 2854583 - RNA, 19 nt, Artificial Sequence
  Description of Artificial Sequence: Synthetic oligonucleotide
aagucaucgccgucgaaau

SEQ ID NO: 2854584 - RNA, 19 nt, Artificial Sequence
  Description of Artificial Sequence: Synthetic oligonucleotide
ucaucuaguccuucguccu

SEQ ID NO: 2854585 - RNA, 19 nt, Artificial Sequence
  Description of Artificial Sequence: Synthetic oligonucleotide
ucuucauagcuuccaucug

SEQ ID NO: 2854586 - RNA, 19 nt, Artificial Sequence
  Description of Artificial Sequence: Synthetic oligonucleotide
ucaccagaggguagaaucu

SEQ ID NO: 2854587 - RNA, 19 nt, Artificial Sequence
  Description of Artificial Sequence: Synthetic oligonucleotide
aacauucuccugacccucc

SEQ ID NO: 2854588 - RNA, 19 nt, Artificial Sequence
  Description of Artificial Sequence: Synthetic oligonucleotide
uguaaggaguggugaugcg

SEQ ID NO: 2854589 - RNA, 19 nt, Artificial Sequence
  Description of Artificial Sequence: Synthetic oligonucleotide
cagguaacggcgaaugaug

SEQ ID NO: 2854590 - RNA, 19 nt, Artificial Sequence
  Description of Artificial Sequence: Synthetic oligonucleotide
aacggcgaaugaugauugg

SEQ ID NO: 2854591 - RNA, 19 nt, Artificial Sequence
  Description of Artificial Sequence: Synthetic oligonucleotide
cacaggggcacacaucgcg

SEQ ID NO: 2854592 - RNA, 19 nt, Artificial Sequence
  Description of Artificial Sequence: Synthetic oligonucleotide
cuugaguuccuucauggca

SEQ ID NO: 2854593 - RNA, 19 nt, Artificial Sequence
  Description of Artificial Sequence: Synthetic oligonucleotide
uuagguuugcucagucagu

SEQ ID NO: 2854594 - RNA, 19 nt, Artificial Sequence
  Description of Artificial Sequence: Synthetic oligonucleotide
uagguuugcucagucagug

SEQ ID NO: 2854595 - RNA, 19 nt, Artificial Sequence
  Description of Artificial Sequence: Synthetic oligonucleotide
auugggaucuuccgggccu

SEQ ID NO: 2854596 - RNA, 19 nt, Artificial Sequence
  Description of Artificial Sequence: Synthetic oligonucleotide
ucaaagucaucgccgucga

SEQ ID NO: 2854597 - RNA, 19 nt, Artificial Sequence
  Description of Artificial Sequence: Synthetic oligonucleotide
agcaaagggucugucuccc

SEQ ID NO: 2854598 - RNA, 19 nt, Artificial Sequence
  Description of Artificial Sequence: Synthetic oligonucleotide
cucguugucugacaugaug

SEQ ID NO: 2854599 - RNA, 19 nt, Artificial Sequence
  Description of Artificial Sequence: Synthetic oligonucleotide
gucaucgccgucgaaauug

SEQ ID NO: 2854600 - RNA, 19 nt, Artificial Sequence
  Description of Artificial Sequence: Synthetic oligonucleotide
uacacgggcucgcucauac

SEQ ID NO: 2854601 - RNA, 19 nt, Artificial Sequence
  Description of Artificial Sequence: Synthetic oligonucleotide
uggucguucaccagagggu

SEQ ID NO: 2854602 - RNA, 19 nt, Artificial Sequence
  Description of Artificial Sequence: Synthetic oligonucleotide
uuggucauguaaggagugg

SEQ ID NO: 2854603 - RNA, 19 nt, Artificial Sequence
  Description of Artificial Sequence: Synthetic oligonucleotide
ggugaugcgcuucugguug

SEQ ID NO: 2854604 - RNA, 19 nt, Artificial Sequence
  Description of Artificial Sequence: Synthetic oligonucleotide
cuuggucauguaaggagug

SEQ ID NO: 2854605 - RNA, 19 nt, Artificial Sequence
  Description of Artificial Sequence: Synthetic oligonucleotide
auuguccucguugucugac

SEQ ID NO: 2854606 - RNA, 19 nt, Artificial Sequence
  Description of Artificial Sequence: Synthetic oligonucleotide
uccaccaucacaggggcac

SEQ ID NO: 2854607 - RNA, 19 nt, Artificial Sequence
  Description of Artificial Sequence: Synthetic oligonucleotide
ucagugaugaugagcucau

SEQ ID NO: 2854608 - RNA, 19 nt, Artificial Sequence
  Description of Artificial Sequence: Synthetic oligonucleotide
ucgccgucgaaauuguccu

SEQ ID NO: 2854609 - RNA, 19 nt, Artificial Sequence
  Description of Artificial Sequence: Synthetic oligonucleotide
gauugggaucuuccgggcc

SEQ ID NO: 2854610 - RNA, 19 nt, Artificial Sequence
  Description of Artificial Sequence: Synthetic oligonucleotide
gccuugaguuccuucaugg

SEQ ID NO: 2854611 - RNA, 19 nt, Artificial Sequence
  Description of Artificial Sequence: Synthetic oligonucleotide
guagaaucucaacauucuc

SEQ ID NO: 2854612 - RNA, 19 nt, Artificial Sequence
  Description of Artificial Sequence: Synthetic oligonucleotide
uuccaucuggcagguaacg

SEQ ID NO: 2854613 - RNA, 19 nt, Artificial Sequence
  Description of Artificial Sequence: Synthetic oligonucleotide
uccaucuggcagguaacgg

SEQ ID NO: 2854614 - RNA, 19 nt, Artificial Sequence
  Description of Artificial Sequence: Synthetic oligonucleotide
guaaggaguggugaugcgc

SEQ ID NO: 2854615 - RNA, 19 nt, Artificial Sequence
  Description of Artificial Sequence: Synthetic oligonucleotide
ugauugggaucuuccgggc

SEQ ID NO: 2854616 - RNA, 19 nt, Artificial Sequence
  Description of Artificial Sequence: Synthetic oligonucleotide
gaaucucaacauucuccug

SEQ ID NO: 2854617 - RNA, 19 nt, Artificial Sequence
  Description of Artificial Sequence: Synthetic oligonucleotide
augagcaaagggucugucu

SEQ ID NO: 2854618 - RNA, 19 nt, Artificial Sequence
  Description of Artificial Sequence: Synthetic oligonucleotide
gaaauuguccucguugucu

SEQ ID NO: 2854619 - RNA, 19 nt, Artificial Sequence
  Description of Artificial Sequence: Synthetic oligonucleotide
acggcgaaugaugauuggg

SEQ ID NO: 2854620 - RNA, 19 nt, Artificial Sequence
  Description of Artificial Sequence: Synthetic oligonucleotide
ucauccacgccccaaucuu

SEQ ID NO: 2854621 - RNA, 19 nt, Artificial Sequence
  Description of Artificial Sequence: Synthetic oligonucleotide
uccuucguccucuuccaca

SEQ ID NO: 2854622 - RNA, 19 nt, Artificial Sequence
  Description of Artificial Sequence: Synthetic oligonucleotide
cagucagugaugaugagcu

SEQ ID NO: 2854623 - RNA, 19 nt, Artificial Sequence
  Description of Artificial Sequence: Synthetic oligonucleotide
augagcucauccacgcccc

SEQ ID NO: 2854624 - RNA, 19 nt, Artificial Sequence
  Description of Artificial Sequence: Synthetic oligonucleotide
aauuguccucguugucuga

SEQ ID NO: 2854625 - RNA, 19 nt, Artificial Sequence
  Description of Artificial Sequence: Synthetic oligonucleotide
acacaucgcgaucuggagu

SEQ ID NO: 2854626 - RNA, 19 nt, Artificial Sequence
  Description of Artificial Sequence: Synthetic oligonucleotide
ugaugagcucauccacgcc

SEQ ID NO: 2854627 - RNA, 19 nt, Artificial Sequence
  Description of Artificial Sequence: Synthetic oligonucleotide
acuuggucauguaaggagu

SEQ ID NO: 2854628 - RNA, 19 nt, Artificial Sequence
  Description of Artificial Sequence: Synthetic oligonucleotide
cauguaaggaguggugaug

SEQ ID NO: 2854629 - RNA, 19 nt, Artificial Sequence
  Description of Artificial Sequence: Synthetic oligonucleotide
uguggucguucaccagagg

SEQ ID NO: 2854630 - RNA, 19 nt, Artificial Sequence
  Description of Artificial Sequence: Synthetic oligonucleotide
ucucaacauucuccugacc

SEQ ID NO: 2854631 - RNA, 19 nt, Artificial Sequence
  Description of Artificial Sequence: Synthetic oligonucleotide
gucagugaugaugagcuca

SEQ ID NO: 2854632 - RNA, 19 nt, Artificial Sequence
  Description of Artificial Sequence: Synthetic oligonucleotide
gaggguagaaucucaacau

SEQ ID NO: 2854633 - RNA, 19 nt, Artificial Sequence
  Description of Artificial Sequence: Synthetic oligonucleotide
ugcgcuucugguuggccug

SEQ ID NO: 2854634 - RNA, 19 nt, Artificial Sequence
  Description of Artificial Sequence: Synthetic oligonucleotide
cacacaucgcgaucuggag

SEQ ID NO: 2854635 - RNA, 19 nt, Artificial Sequence
  Description of Artificial Sequence: Synthetic oligonucleotide
uggucauguaaggaguggu

SEQ ID NO: 2854636 - RNA, 19 nt, Artificial Sequence
  Description of Artificial Sequence: Synthetic oligonucleotide
uggcagguaacggcgaaug

SEQ ID NO: 2854637 - RNA, 19 nt, Artificial Sequence
  Description of Artificial Sequence: Synthetic oligonucleotide
uguccucguugucugacau

SEQ ID NO: 2854638 - RNA, 19 nt, Artificial Sequence
  Description of Artificial Sequence: Synthetic oligonucleotide
agucagugaugaugagcuc

SEQ ID NO: 2854639 - RNA, 19 nt, Artificial Sequence
  Description of Artificial Sequence: Synthetic oligonucleotide
cuguggucguucaccagag

SEQ ID NO: 2854640 - RNA, 19 nt, Artificial Sequence
  Description of Artificial Sequence: Synthetic oligonucleotide
cuuccaucuggcagguaac

SEQ ID NO: 2854641 - RNA, 19 nt, Artificial Sequence
  Description of Artificial Sequence: Synthetic oligonucleotide
aguccuucguccucuucca

SEQ ID NO: 2854642 - RNA, 19 nt, Artificial Sequence
  Description of Artificial Sequence: Synthetic oligonucleotide
gucauguaaggagugguga

SEQ ID NO: 2854643 - RNA, 19 nt, Artificial Sequence
  Description of Artificial Sequence: Synthetic oligonucleotide
uucugguuggccugugguc

SEQ ID NO: 2854644 - RNA, 19 nt, Artificial Sequence
  Description of Artificial Sequence: Synthetic oligonucleotide
cuucauggcaaugagcaaa

SEQ ID NO: 2854645 - RNA, 19 nt, Artificial Sequence
  Description of Artificial Sequence: Synthetic oligonucleotide
auacuuggucauguaagga

SEQ ID NO: 2854646 - RNA, 19 nt, Artificial Sequence
  Description of Artificial Sequence: Synthetic oligonucleotide
ucauagcuuccaucuggca

SEQ ID NO: 2854647 - RNA, 19 nt, Artificial Sequence
  Description of Artificial Sequence: Synthetic oligonucleotide
gaucuggagugcccgggug

SEQ ID NO: 2854648 - RNA, 19 nt, Artificial Sequence
  Description of Artificial Sequence: Synthetic oligonucleotide
ucaucgccgucgaaauugu

SEQ ID NO: 2854649 - RNA, 19 nt, Artificial Sequence
  Description of Artificial Sequence: Synthetic oligonucleotide
cagaggguagaaucucaac

SEQ ID NO: 2854650 - RNA, 19 nt, Artificial Sequence
  Description of Artificial Sequence: Synthetic oligonucleotide
ucauggcaaugagcaaagg

SEQ ID NO: 2854651 - RNA, 19 nt, Artificial Sequence
  Description of Artificial Sequence: Synthetic oligonucleotide
ccaucuggcagguaacggc

SEQ ID NO: 2854652 - RNA, 19 nt, Artificial Sequence
  Description of Artificial Sequence: Synthetic oligonucleotide
aucgcgaucuggagugccc

SEQ ID NO: 2854653 - RNA, 19 nt, Artificial Sequence
  Description of Artificial Sequence: Synthetic oligonucleotide
aggguagaaucucaacauu

SEQ ID NO: 2854654 - RNA, 19 nt, Artificial Sequence
  Description of Artificial Sequence: Synthetic oligonucleotide
ugcccgggugcccaguaca

SEQ ID NO: 2854655 - RNA, 19 nt, Artificial Sequence
  Description of Artificial Sequence: Synthetic oligonucleotide
ucguucaccagaggguaga

SEQ ID NO: 2854656 - RNA, 19 nt, Artificial Sequence
  Description of Artificial Sequence: Synthetic oligonucleotide
uggccuguggucguucacc

SEQ ID NO: 2854657 - RNA, 19 nt, Artificial Sequence
  Description of Artificial Sequence: Synthetic oligonucleotide
ucuggagugcccgggugcc

SEQ ID NO: 2854658 - RNA, 19 nt, Artificial Sequence
  Description of Artificial Sequence: Synthetic oligonucleotide
ucuggcagguaacggcgaa

SEQ ID NO: 2854659 - RNA, 19 nt, Artificial Sequence
  Description of Artificial Sequence: Synthetic oligonucleotide
ugucugacaugaugccuuc

SEQ ID NO: 2854660 - RNA, 19 nt, Artificial Sequence
  Description of Artificial Sequence: Synthetic oligonucleotide
gugaugcgcuucugguugg

SEQ ID NO: 2854661 - RNA, 19 nt, Artificial Sequence
  Description of Artificial Sequence: Synthetic oligonucleotide
aggaguggugaugcgcuuc

SEQ ID NO: 2854662 - RNA, 19 nt, Artificial Sequence
  Description of Artificial Sequence: Synthetic oligonucleotide
ugcccaguacacgggcucg

SEQ ID NO: 2854663 - RNA, 19 nt, Artificial Sequence
  Description of Artificial Sequence: Synthetic oligonucleotide
uuguccucguugucugaca

SEQ ID NO: 2854664 - RNA, 19 nt, Artificial Sequence
  Description of Artificial Sequence: Synthetic oligonucleotide
caguacacgggcucgcuca

SEQ ID NO: 2854665 - RNA, 19 nt, Artificial Sequence
  Description of Artificial Sequence: Synthetic oligonucleotide
aggggcacacaucgcgauc

SEQ ID NO: 2854666 - RNA, 19 nt, Artificial Sequence
  Description of Artificial Sequence: Synthetic oligonucleotide
guuugcucagucagugaug

SEQ ID NO: 2854667 - RNA, 19 nt, Artificial Sequence
  Description of Artificial Sequence: Synthetic oligonucleotide
auuuuccaagucaucuagu

SEQ ID NO: 2854668 - RNA, 19 nt, Artificial Sequence
  Description of Artificial Sequence: Synthetic oligonucleotide
uggaaagcguuagguuugc

SEQ ID NO: 2854669 - RNA, 19 nt, Artificial Sequence
  Description of Artificial Sequence: Synthetic oligonucleotide
ggguagaaucucaacauuc

SEQ ID NO: 2854670 - RNA, 19 nt, Artificial Sequence
  Description of Artificial Sequence: Synthetic oligonucleotide
caucacaggggcacacauc

SEQ ID NO: 2854671 - RNA, 19 nt, Artificial Sequence
  Description of Artificial Sequence: Synthetic oligonucleotide
uccaagucaucuaguccuu

SEQ ID NO: 2854672 - RNA, 19 nt, Artificial Sequence
  Description of Artificial Sequence: Synthetic oligonucleotide
ucacaggggcacacaucgc

SEQ ID NO: 2854673 - RNA, 19 nt, Artificial Sequence
  Description of Artificial Sequence: Synthetic oligonucleotide
caacauucuccugacccuc

SEQ ID NO: 2854674 - RNA, 19 nt, Artificial Sequence
  Description of Artificial Sequence: Synthetic oligonucleotide
gcuuccaucuggcagguaa

SEQ ID NO: 2854675 - RNA, 19 nt, Artificial Sequence
  Description of Artificial Sequence: Synthetic oligonucleotide
acauucuccugacccuccu

SEQ ID NO: 2854676 - RNA, 19 nt, Artificial Sequence
  Description of Artificial Sequence: Synthetic oligonucleotide
uucuccugacccuccuccu

SEQ ID NO: 2854677 - RNA, 19 nt, Artificial Sequence
  Description of Artificial Sequence: Synthetic oligonucleotide
gccgucgaaauuguccucg

SEQ ID NO: 2854678 - RNA, 19 nt, Artificial Sequence
  Description of Artificial Sequence: Synthetic oligonucleotide
agguaacggcgaaugauga

SEQ ID NO: 2854679 - RNA, 19 nt, Artificial Sequence
  Description of Artificial Sequence: Synthetic oligonucleotide
cauccacgccccaaucuuc

SEQ ID NO: 2854680 - RNA, 19 nt, Artificial Sequence
  Description of Artificial Sequence: Synthetic oligonucleotide
acgccccaaucuucauagc

SEQ ID NO: 2854681 - RNA, 19 nt, Artificial Sequence
  Description of Artificial Sequence: Synthetic oligonucleotide
cucagucagugaugaugag

SEQ ID NO: 2854682 - RNA, 19 nt, Artificial Sequence
  Description of Artificial Sequence: Synthetic oligonucleotide
ugaguuccuucauggcaau

SEQ ID NO: 2854683 - RNA, 19 nt, Artificial Sequence
  Description of Artificial Sequence: Synthetic oligonucleotide
agguuugcucagucaguga

SEQ ID NO: 2854684 - RNA, 19 nt, Artificial Sequence
  Description of Artificial Sequence: Synthetic oligonucleotide
agcucauccacgccccaau

SEQ ID NO: 2854685 - RNA, 19 nt, Artificial Sequence
  Description of Artificial Sequence: Synthetic oligonucleotide
cugcauuuuccaagucauc

SEQ ID NO: 2854686 - RNA, 19 nt, Artificial Sequence
  Description of Artificial Sequence: Synthetic oligonucleotide
ggaucuuccgggccuugag

SEQ ID NO: 2854687 - RNA, 19 nt, Artificial Sequence
  Description of Artificial Sequence: Synthetic oligonucleotide
gcucagucagugaugauga

SEQ ID NO: 2854688 - RNA, 19 nt, Artificial Sequence
  Description of Artificial Sequence: Synthetic oligonucleotide
ugacccuccuccucugcau

SEQ ID NO: 2854689 - RNA, 19 nt, Artificial Sequence
  Description of Artificial Sequence: Synthetic oligonucleotide
gcgaaugaugauugggauc

SEQ ID NO: 2854690 - RNA, 19 nt, Artificial Sequence
  Description of Artificial Sequence: Synthetic oligonucleotide
acaucgcgaucuggagugc

SEQ ID NO: 2854691 - RNA, 19 nt, Artificial Sequence
  Description of Artificial Sequence: Synthetic oligonucleotide
ggucauguaaggaguggug

SEQ ID NO: 2854692 - RNA, 19 nt, Artificial Sequence
  Description of Artificial Sequence: Synthetic oligonucleotide
gcaaugagcaaagggucug

SEQ ID NO: 2854693 - RNA, 19 nt, Artificial Sequence
  Description of Artificial Sequence: Synthetic oligonucleotide
gaugcgcuucugguuggcc

SEQ ID NO: 2854694 - RNA, 19 nt, Artificial Sequence
  Description of Artificial Sequence: Synthetic oligonucleotide
gcucgcucauacuugguca

SEQ ID NO: 2854695 - RNA, 19 nt, Artificial Sequence
  Description of Artificial Sequence: Synthetic oligonucleotide
ugagcucauccacgcccca

SEQ ID NO: 2854696 - RNA, 19 nt, Artificial Sequence
  Description of Artificial Sequence: Synthetic oligonucleotide
ccgggugcccaguacacgg

SEQ ID NO: 2854697 - RNA, 19 nt, Artificial Sequence
  Description of Artificial Sequence: Synthetic oligonucleotide
ccuugaguuccuucauggc

SEQ ID NO: 2854698 - RNA, 19 nt, Artificial Sequence
  Description of Artificial Sequence: Synthetic oligonucleotide
uuggccuguggucguucac

SEQ ID NO: 2854699 - RNA, 19 nt, Artificial Sequence
  Description of Artificial Sequence: Synthetic oligonucleotide
gcuccaccaucacaggggc

SEQ ID NO: 2854700 - RNA, 19 nt, Artificial Sequence
  Description of Artificial Sequence: Synthetic oligonucleotide
gaucuuccgggccuugagu

SEQ ID NO: 2854701 - RNA, 19 nt, Artificial Sequence
  Description of Artificial Sequence: Synthetic oligonucleotide
uggagugcccgggugccca

SEQ ID NO: 2854702 - RNA, 19 nt, Artificial Sequence
  Description of Artificial Sequence: Synthetic oligonucleotide
guaacggcgaaugaugauu

SEQ ID NO: 2854703 - RNA, 19 nt, Artificial Sequence
  Description of Artificial Sequence: Synthetic oligonucleotide
caucgcgaucuggagugcc

SEQ ID NO: 2854704 - RNA, 19 nt, Artificial Sequence
  Description of Artificial Sequence: Synthetic oligonucleotide
accagaggguagaaucuca

SEQ ID NO: 2854705 - RNA, 19 nt, Artificial Sequence
  Description of Artificial Sequence: Synthetic oligonucleotide
aguacacgggcucgcucau

SEQ ID NO: 2854706 - RNA, 19 nt, Artificial Sequence
  Description of Artificial Sequence: Synthetic oligonucleotide
gguagaaucucaacauucu

SEQ ID NO: 2854707 - RNA, 19 nt, Artificial Sequence
  Description of Artificial Sequence: Synthetic oligonucleotide
guccucguugucugacaug

SEQ ID NO: 2854708 - RNA, 19 nt, Artificial Sequence
  Description of Artificial Sequence: Synthetic oligonucleotide
ccccaaucuucauagcuuc

SEQ ID NO: 2854709 - RNA, 19 nt, Artificial Sequence
  Description of Artificial Sequence: Synthetic oligonucleotide
gguuugcucagucagugau

SEQ ID NO: 2854710 - RNA, 19 nt, Artificial Sequence
  Description of Artificial Sequence: Synthetic oligonucleotide
ucgcucauacuuggucaug

SEQ ID NO: 2854711 - RNA, 19 nt, Artificial Sequence
  Description of Artificial Sequence: Synthetic oligonucleotide
cguugucugacaugaugcc

SEQ ID NO: 2854712 - RNA, 19 nt, Artificial Sequence
  Description of Artificial Sequence: Synthetic oligonucleotide
cauucuccugacccuccuc

SEQ ID NO: 2854713 - RNA, 19 nt, Artificial Sequence
  Description of Artificial Sequence: Synthetic oligonucleotide
ucguccucuuccacaucau

SEQ ID NO: 2854714 - RNA, 19 nt, Artificial Sequence
  Description of Artificial Sequence: Synthetic oligonucleotide
agcguuagguuugcucagu

SEQ ID NO: 2854715 - RNA, 19 nt, Artificial Sequence
  Description of Artificial Sequence: Synthetic oligonucleotide
caccagaggguagaaucuc

SEQ ID NO: 2854716 - RNA, 19 nt, Artificial Sequence
  Description of Artificial Sequence: Synthetic oligonucleotide
ugaugcgcuucugguuggc

SEQ ID NO: 2854717 - RNA, 19 nt, Artificial Sequence
  Description of Artificial Sequence: Synthetic oligonucleotide
gugcccaguacacgggcuc

SEQ ID NO: 2854718 - RNA, 19 nt, Artificial Sequence
  Description of Artificial Sequence: Synthetic oligonucleotide
guugucugacaugaugccu

SEQ ID NO: 2854719 - RNA, 19 nt, Artificial Sequence
  Description of Artificial Sequence: Synthetic oligonucleotide
gucguucaccagaggguag

SEQ ID NO: 2854720 - RNA, 19 nt, Artificial Sequence
  Description of Artificial Sequence: Synthetic oligonucleotide
ggcucgcucauacuugguc

SEQ ID NO: 2854721 - RNA, 19 nt, Artificial Sequence
  Description of Artificial Sequence: Synthetic oligonucleotide
guuggccuguggucguuca

SEQ ID NO: 2854722 - RNA, 19 nt, Artificial Sequence
  Description of Artificial Sequence: Synthetic oligonucleotide
auccacgccccaaucuuca

SEQ ID NO: 2854723 - RNA, 19 nt, Artificial Sequence
  Description of Artificial Sequence: Synthetic oligonucleotide
acaggggcacacaucgcga

SEQ ID NO: 2854724 - RNA, 19 nt, Artificial Sequence
  Description of Artificial Sequence: Synthetic oligonucleotide
gcauuuuccaagucaucua

SEQ ID NO: 2854725 - RNA, 19 nt, Artificial Sequence
  Description of Artificial Sequence: Synthetic oligonucleotide
cuucugguuggccuguggu

SEQ ID NO: 2854726 - RNA, 19 nt, Artificial Sequence
  Description of Artificial Sequence: Synthetic oligonucleotide
cccaaucuucauagcuucc

SEQ ID NO: 2854727 - RNA, 19 nt, Artificial Sequence
  Description of Artificial Sequence: Synthetic oligonucleotide
cuaguccuucguccucuuc

SEQ ID NO: 2854728 - RNA, 19 nt, Artificial Sequence
  Description of Artificial Sequence: Synthetic oligonucleotide
agucaucgccgucgaaauu

SEQ ID NO: 2854729 - RNA, 19 nt, Artificial Sequence
  Description of Artificial Sequence: Synthetic oligonucleotide
ggcacacaucgcgaucugg

SEQ ID NO: 2854730 - RNA, 19 nt, Artificial Sequence
  Description of Artificial Sequence: Synthetic oligonucleotide
acgggcucgcucauacuug

SEQ ID NO: 2854731 - RNA, 19 nt, Artificial Sequence
  Description of Artificial Sequence: Synthetic oligonucleotide
uagcuuccaucuggcaggu

SEQ ID NO: 2854732 - RNA, 19 nt, Artificial Sequence
  Description of Artificial Sequence: Synthetic oligonucleotide
ccuguggucguucaccaga

SEQ ID NO: 2854733 - RNA, 19 nt, Artificial Sequence
  Description of Artificial Sequence: Synthetic oligonucleotide
accaucacaggggcacaca

SEQ ID NO: 2854734 - RNA, 19 nt, Artificial Sequence
  Description of Artificial Sequence: Synthetic oligonucleotide
cugacccuccuccucugca

SEQ ID NO: 2854735 - RNA, 19 nt, Artificial Sequence
  Description of Artificial Sequence: Synthetic oligonucleotide
cgaaugaugauugggaucu

SEQ ID NO: 2854736 - RNA, 19 nt, Artificial Sequence
  Description of Artificial Sequence: Synthetic oligonucleotide
cucauccacgccccaaucu

SEQ ID NO: 2854737 - RNA, 19 nt, Artificial Sequence
  Description of Artificial Sequence: Synthetic oligonucleotide
gcacacaucgcgaucugga

SEQ ID NO: 2854738 - RNA, 19 nt, Artificial Sequence
  Description of Artificial Sequence: Synthetic oligonucleotide
caaucuucauagcuuccau

SEQ ID NO: 2854739 - RNA, 19 nt, Artificial Sequence
  Description of Artificial Sequence: Synthetic oligonucleotide
gggugcccaguacacgggc

SEQ ID NO: 2854740 - RNA, 19 nt, Artificial Sequence
  Description of Artificial Sequence: Synthetic oligonucleotide
cuccagcuccaccaucaca

SEQ ID NO: 2854741 - RNA, 19 nt, Artificial Sequence
  Description of Artificial Sequence: Synthetic oligonucleotide
acacgggcucgcucauacu

SEQ ID NO: 2854742 - RNA, 19 nt, Artificial Sequence
  Description of Artificial Sequence: Synthetic oligonucleotide
caccaucacaggggcacac

SEQ ID NO: 2854743 - RNA, 19 nt, Artificial Sequence
  Description of Artificial Sequence: Synthetic oligonucleotide
gcgaucuggagugcccggg

SEQ ID NO: 2854744 - RNA, 19 nt, Artificial Sequence
  Description of Artificial Sequence: Synthetic oligonucleotide
ggcgaaugaugauugggau

SEQ ID NO: 2854745 - RNA, 19 nt, Artificial Sequence
  Description of Artificial Sequence: Synthetic oligonucleotide
caucgccgucgaaauuguc

SEQ ID NO: 2854746 - RNA, 19 nt, Artificial Sequence
  Description of Artificial Sequence: Synthetic oligonucleotide
uccacgccccaaucuucau

SEQ ID NO: 2854747 - RNA, 19 nt, Artificial Sequence
  Description of Artificial Sequence: Synthetic oligonucleotide
guccuucguccucuuccac

SEQ ID NO: 2854748 - RNA, 19 nt, Artificial Sequence
  Description of Artificial Sequence: Synthetic oligonucleotide
gaguggugaugcgcuucug

SEQ ID NO: 2854749 - RNA, 19 nt, Artificial Sequence
  Description of Artificial Sequence: Synthetic oligonucleotide
ggucguucaccagagggua

SEQ ID NO: 2854750 - RNA, 19 nt, Artificial Sequence
  Description of Artificial Sequence: Synthetic oligonucleotide
ggccuguggucguucacca

SEQ ID NO: 2854751 - RNA, 19 nt, Artificial Sequence
  Description of Artificial Sequence: Synthetic oligonucleotide
uugcucagucagugaugau

SEQ ID NO: 2854752 - RNA, 19 nt, Artificial Sequence
  Description of Artificial Sequence: Synthetic oligonucleotide
aucuggcagguaacggcga

SEQ ID NO: 2854753 - RNA, 19 nt, Artificial Sequence
  Description of Artificial Sequence: Synthetic oligonucleotide
cuucguccucuuccacauc

SEQ ID NO: 2854754 - RNA, 19 nt, Artificial Sequence
  Description of Artificial Sequence: Synthetic oligonucleotide
ggcagguaacggcgaauga

SEQ ID NO: 2854755 - RNA, 19 nt, Artificial Sequence
  Description of Artificial Sequence: Synthetic oligonucleotide
gcguuagguuugcucaguc

SEQ ID NO: 2854756 - RNA, 19 nt, Artificial Sequence
  Description of Artificial Sequence: Synthetic oligonucleotide
cgggcucgcucauacuugg

SEQ ID NO: 2854757 - RNA, 19 nt, Artificial Sequence
  Description of Artificial Sequence: Synthetic oligonucleotide
ugggaucuuccgggccuug

SEQ ID NO: 2854758 - RNA, 19 nt, Artificial Sequence
  Description of Artificial Sequence: Synthetic oligonucleotide
cucgcucauacuuggucau

SEQ ID NO: 2854759 - RNA, 19 nt, Artificial Sequence
  Description of Artificial Sequence: Synthetic oligonucleotide
uugggaucuuccgggccuu

SEQ ID NO: 2854760 - RNA, 19 nt, Artificial Sequence
  Description of Artificial Sequence: Synthetic oligonucleotide
ggcaaugagcaaagggucu

SEQ ID NO: 2854761 - RNA, 19 nt, Artificial Sequence
  Description of Artificial Sequence: Synthetic oligonucleotide
cggcgaaugaugauuggga

SEQ ID NO: 2854762 - RNA, 19 nt, Artificial Sequence
  Description of Artificial Sequence: Synthetic oligonucleotide
cuccugacccuccuccucu

SEQ ID NO: 2854763 - RNA, 19 nt, Artificial Sequence
  Description of Artificial Sequence: Synthetic oligonucleotide
ggaguggugaugcgcuucu

SEQ ID NO: 2854764 - RNA, 19 nt, Artificial Sequence
  Description of Artificial Sequence: Synthetic oligonucleotide
cacgggcucgcucauacuu

SEQ ID NO: 2854765 - RNA, 19 nt, Artificial Sequence
  Description of Artificial Sequence: Synthetic oligonucleotide
gagcucauccacgccccaa

SEQ ID NO: 2854766 - RNA, 19 nt, Artificial Sequence
  Description of Artificial Sequence: Synthetic oligonucleotide
cuggagugcccgggugccc

SEQ ID NO: 2854767 - RNA, 19 nt, Artificial Sequence
  Description of Artificial Sequence: Synthetic oligonucleotide
cgaaauuguccucguuguc

SEQ ID NO: 2854768 - RNA, 19 nt, Artificial Sequence
  Description of Artificial Sequence: Synthetic oligonucleotide
ccagaggguagaaucucaa

SEQ ID NO: 2854769 - RNA, 19 nt, Artificial Sequence
  Description of Artificial Sequence: Synthetic oligonucleotide
cagugaugaugagcucauc

SEQ ID NO: 2854770 - RNA, 19 nt, Artificial Sequence
  Description of Artificial Sequence: Synthetic oligonucleotide
gcucauccacgccccaauc

SEQ ID NO: 2854771 - RNA, 19 nt, Artificial Sequence
  Description of Artificial Sequence: Synthetic oligonucleotide
gcagguaacggcgaaugau

SEQ ID NO: 2854772 - RNA, 19 nt, Artificial Sequence
  Description of Artificial Sequence: Synthetic oligonucleotide
gguaacggcgaaugaugau

SEQ ID NO: 2854773 - RNA, 19 nt, Artificial Sequence
  Description of Artificial Sequence: Synthetic oligonucleotide
gccuguggucguucaccag

SEQ ID NO: 2854774 - RNA, 19 nt, Artificial Sequence
  Description of Artificial Sequence: Synthetic oligonucleotide
cguuagguuugcucaguca

SEQ ID NO: 2854775 - RNA, 19 nt, Artificial Sequence
  Description of Artificial Sequence: Synthetic oligonucleotide
caaugagcaaagggucugu

SEQ ID NO: 2854776 - RNA, 19 nt, Artificial Sequence
  Description of Artificial Sequence: Synthetic oligonucleotide
caaagucaucgccgucgaa

SEQ ID NO: 2854777 - RNA, 19 nt, Artificial Sequence
  Description of Artificial Sequence: Synthetic oligonucleotide
cuccaccaucacaggggca

SEQ ID NO: 2854778 - RNA, 19 nt, Artificial Sequence
  Description of Artificial Sequence: Synthetic oligonucleotide
gugcccgggugcccaguac

SEQ ID NO: 2854779 - RNA, 19 nt, Artificial Sequence
  Description of Artificial Sequence: Synthetic oligonucleotide
ggggcacacaucgcgaucu

SEQ ID NO: 2854780 - RNA, 19 nt, Artificial Sequence
  Description of Artificial Sequence: Synthetic oligonucleotide
ccaguacacgggcucgcuc

SEQ ID NO: 2854781 - RNA, 19 nt, Artificial Sequence
  Description of Artificial Sequence: Synthetic oligonucleotide
cgggccuugaguuccuuca

SEQ ID NO: 2854782 - RNA, 19 nt, Artificial Sequence
  Description of Artificial Sequence: Synthetic oligonucleotide
gggcacacaucgcgaucug

SEQ ID NO: 2854783 - RNA, 19 nt, Artificial Sequence
  Description of Artificial Sequence: Synthetic oligonucleotide
ggagugcccgggugcccag

SEQ ID NO: 2854784 - RNA, 19 nt, Artificial Sequence
  Description of Artificial Sequence: Synthetic oligonucleotide
ccugacccuccuccucugc

SEQ ID NO: 2854785 - RNA, 19 nt, Artificial Sequence
  Description of Artificial Sequence: Synthetic oligonucleotide
gacccuccuccucugcauu

SEQ ID NO: 2854786 - RNA, 19 nt, Artificial Sequence
  Description of Artificial Sequence: Synthetic oligonucleotide
ccaagucaucuaguccuuc

SEQ ID NO: 2854787 - RNA, 19 nt, Artificial Sequence
  Description of Artificial Sequence: Synthetic oligonucleotide
ccuccucugcauuuuccaa

SEQ ID NO: 2854788 - RNA, 19 nt, Artificial Sequence
  Description of Artificial Sequence: Synthetic oligonucleotide
guucaccagaggguagaau

SEQ ID NO: 2854789 - RNA, 19 nt, Artificial Sequence
  Description of Artificial Sequence: Synthetic oligonucleotide
cgcgaucuggagugcccgg

SEQ ID NO: 2854790 - RNA, 19 nt, Artificial Sequence
  Description of Artificial Sequence: Synthetic oligonucleotide
cgggugcccaguacacggg

SEQ ID NO: 2854791 - RNA, 19 nt, Artificial Sequence
  Description of Artificial Sequence: Synthetic oligonucleotide
ccuucguccucuuccacau

SEQ ID NO: 2854792 - RNA, 19 nt, Artificial Sequence
  Description of Artificial Sequence: Synthetic oligonucleotide
ugguuggccuguggucguu

SEQ ID NO: 2854793 - RNA, 19 nt, Artificial Sequence
  Description of Artificial Sequence: Synthetic oligonucleotide
caggggcacacaucgcgau

SEQ ID NO: 2854794 - RNA, 19 nt, Artificial Sequence
  Description of Artificial Sequence: Synthetic oligonucleotide
ccucuuccacaucaucaaa

SEQ ID NO: 2854795 - RNA, 19 nt, Artificial Sequence
  Description of Artificial Sequence: Synthetic oligonucleotide
cccgggugcccaguacacg

SEQ ID NO: 2854796 - RNA, 19 nt, Artificial Sequence
  Description of Artificial Sequence: Synthetic oligonucleotide
gguuggccuguggucguuc

SEQ ID NO: 2854797 - RNA, 19 nt, Artificial Sequence
  Description of Artificial Sequence: Synthetic oligonucleotide
gggaucuuccgggccuuga

SEQ ID NO: 2854798 - RNA, 19 nt, Artificial Sequence
  Description of Artificial Sequence: Synthetic oligonucleotide
gcccaguacacgggcucgc

SEQ ID NO: 2854799 - RNA, 19 nt, Artificial Sequence
  Description of Artificial Sequence: Synthetic oligonucleotide
ccgggccuugaguuccuuc

SEQ ID NO: 2854800 - RNA, 19 nt, Artificial Sequence
  Description of Artificial Sequence: Synthetic oligonucleotide
gccccaaucuucauagcuu

SEQ ID NO: 2854801 - RNA, 19 nt, Artificial Sequence
  Description of Artificial Sequence: Synthetic oligonucleotide
gcccgggugcccaguacac

SEQ ID NO: 2854802 - RNA, 19 nt, Artificial Sequence
  Description of Artificial Sequence: Synthetic oligonucleotide
ccaucacaggggcacacau

SEQ ID NO: 2854803 - RNA, 19 nt, Artificial Sequence
  Description of Artificial Sequence: Synthetic oligonucleotide
cgccccaaucuucauagcu

SEQ ID NO: 2854804 - RNA, 19 nt, Artificial Sequence
  Description of Artificial Sequence: Synthetic oligonucleotide
ggugcccaguacacgggcu

SEQ ID NO: 2854805 - RNA, 19 nt, Artificial Sequence
  Description of Artificial Sequence: Synthetic oligonucleotide
uccgggccuugaguuccuu

SEQ ID NO: 2854806 - RNA, 19 nt, Artificial Sequence
  Description of Artificial Sequence: Synthetic oligonucleotide
guacacgggcucgcucaua

SEQ ID NO: 2854807 - RNA, 19 nt, Artificial Sequence
  Description of Artificial Sequence: Synthetic oligonucleotide
gggccuugaguuccuucau

SEQ ID NO: 2854808 - RNA, 19 nt, Artificial Sequence
  Description of Artificial Sequence: Synthetic oligonucleotide
cuggcagguaacggcgaau

SEQ ID NO: 2854809 - RNA, 19 nt, Artificial Sequence
  Description of Artificial Sequence: Synthetic oligonucleotide
ccacgccccaaucuucaua

SEQ ID NO: 2854810 - RNA, 19 nt, Artificial Sequence
  Description of Artificial Sequence: Synthetic oligonucleotide
ggaaagcguuagguuugcu

SEQ ID NO: 2854811 - RNA, 19 nt, Artificial Sequence
  Description of Artificial Sequence: Synthetic oligonucleotide
cgccgucgaaauuguccuc

SEQ ID NO: 2854812 - RNA, 19 nt, Artificial Sequence
  Description of Artificial Sequence: Synthetic oligonucleotide
agcuuccaucuggcaggua

SEQ ID NO: 2854813 - RNA, 19 nt, Artificial Sequence
  Description of Artificial Sequence: Synthetic oligonucleotide
cgcucauacuuggucaugu

SEQ ID NO: 2854814 - RNA, 19 nt, Artificial Sequence
  Description of Artificial Sequence: Synthetic oligonucleotide
gagugcccgggugcccagu

SEQ ID NO: 2854815 - RNA, 19 nt, Artificial Sequence
  Description of Artificial Sequence: Synthetic oligonucleotide
ccaccaucacaggggcaca

SEQ ID NO: 2854816 - RNA, 19 nt, Artificial Sequence
  Description of Artificial Sequence: Synthetic oligonucleotide
ccgucgaaauuguccucgu

SEQ ID NO: 2854817 - RNA, 19 nt, Artificial Sequence
  Description of Artificial Sequence: Synthetic oligonucleotide
cguucaccagaggguagaa

SEQ ID NO: 2854818 - RNA, 19 nt, Artificial Sequence
  Description of Artificial Sequence: Synthetic oligonucleotide
cgaucuggagugcccgggu

SEQ ID NO: 2854819 - RNA, 19 nt, Artificial Sequence
  Description of Artificial Sequence: Synthetic oligonucleotide
gggcucgcucauacuuggu

SEQ ID NO: 2854820 - RNA, 19 nt, Artificial Sequence
  Description of Artificial Sequence: Synthetic oligonucleotide
gcgcuucugguuggccugu

SEQ ID NO: 2854821 - RNA, 19 nt, Artificial Sequence
  Description of Artificial Sequence: Synthetic oligonucleotide
ccucguugucugacaugau

SEQ ID NO: 2854822 - RNA, 19 nt, Artificial Sequence
  Description of Artificial Sequence: Synthetic oligonucleotide
cccaguacacgggcucgcu

SEQ ID NO: 2854823 - RNA, 19 nt, Artificial Sequence
  Description of Artificial Sequence: Synthetic oligonucleotide
cgucgaaauuguccucguu

SEQ ID NO: 2854824 - RNA, 19 nt, Artificial Sequence
  Description of Artificial Sequence: Synthetic oligonucleotide
acaaauacccaucagacag

SEQ ID NO: 2854825 - RNA, 19 nt, Artificial Sequence
  Description of Artificial Sequence: Synthetic oligonucleotide
uuaauugucucuaggaugc

SEQ ID NO: 2854826 - RNA, 19 nt, Artificial Sequence
  Description of Artificial Sequence: Synthetic oligonucleotide
auacccaucagacagcgcc

SEQ ID NO: 2854827 - RNA, 19 nt, Artificial Sequence
  Description of Artificial Sequence: Synthetic oligonucleotide
auggaacuaacaaauaccc

SEQ ID NO: 2854828 - RNA, 19 nt, Artificial Sequence
  Description of Artificial Sequence: Synthetic oligonucleotide
ugauggaacuaacaaauac

SEQ ID NO: 2854829 - RNA, 19 nt, Artificial Sequence
  Description of Artificial Sequence: Synthetic oligonucleotide
acgaagaguucauaguccc

SEQ ID NO: 2854830 - RNA, 19 nt, Artificial Sequence
  Description of Artificial Sequence: Synthetic oligonucleotide
cuugauuucacgagagccg

SEQ ID NO: 2854831 - RNA, 19 nt, Artificial Sequence
  Description of Artificial Sequence: Synthetic oligonucleotide
gauggaacuaacaaauacc

SEQ ID NO: 2854832 - RNA, 19 nt, Artificial Sequence
  Description of Artificial Sequence: Synthetic oligonucleotide
caaaccaaccgagagaugg

SEQ ID NO: 2854833 - RNA, 19 nt, Artificial Sequence
  Description of Artificial Sequence: Synthetic oligonucleotide
accgacgugcuguagacgc

SEQ ID NO: 2854834 - RNA, 19 nt, Artificial Sequence
  Description of Artificial Sequence: Synthetic oligonucleotide
acuagcucguauuggauuc

SEQ ID NO: 2854835 - RNA, 19 nt, Artificial Sequence
  Description of Artificial Sequence: Synthetic oligonucleotide
uggaaugggcauuuaauug

SEQ ID NO: 2854836 - RNA, 19 nt, Artificial Sequence
  Description of Artificial Sequence: Synthetic oligonucleotide
ggagauguccacuagcucg

SEQ ID NO: 2854837 - RNA, 19 nt, Artificial Sequence
  Description of Artificial Sequence: Synthetic oligonucleotide
aacuaacaaauacccauca

SEQ ID NO: 2854838 - RNA, 19 nt, Artificial Sequence
  Description of Artificial Sequence: Synthetic oligonucleotide
aaauacccaucagacagcg

SEQ ID NO: 2854839 - RNA, 19 nt, Artificial Sequence
  Description of Artificial Sequence: Synthetic oligonucleotide
aguguguucuguuccacgg

SEQ ID NO: 2854840 - RNA, 19 nt, Artificial Sequence
  Description of Artificial Sequence: Synthetic oligonucleotide
auuggauucgcuucccauc

SEQ ID NO: 2854841 - RNA, 19 nt, Artificial Sequence
  Description of Artificial Sequence: Synthetic oligonucleotide
cuaggaugcucccaggacg

SEQ ID NO: 2854842 - RNA, 19 nt, Artificial Sequence
  Description of Artificial Sequence: Synthetic oligonucleotide
gaguucauaguccccacag

SEQ ID NO: 2854843 - RNA, 19 nt, Artificial Sequence
  Description of Artificial Sequence: Synthetic oligonucleotide
accgagagaugguaggagc

SEQ ID NO: 2854844 - RNA, 19 nt, Artificial Sequence
  Description of Artificial Sequence: Synthetic oligonucleotide
aacucuugcaguguguucu

SEQ ID NO: 2854845 - RNA, 19 nt, Artificial Sequence
  Description of Artificial Sequence: Synthetic oligonucleotide
uugauuucacgagagccgg

SEQ ID NO: 2854846 - RNA, 19 nt, Artificial Sequence
  Description of Artificial Sequence: Synthetic oligonucleotide
caucucaucucgcagggcg

SEQ ID NO: 2854847 - RNA, 19 nt, Artificial Sequence
  Description of Artificial Sequence: Synthetic oligonucleotide
uccccguugacaaucuggg

SEQ ID NO: 2854848 - RNA, 19 nt, Artificial Sequence
  Description of Artificial Sequence: Synthetic oligonucleotide
ucagacagcgccaggcagg

SEQ ID NO: 2854849 - RNA, 19 nt, Artificial Sequence
  Description of Artificial Sequence: Synthetic oligonucleotide
uucccaucuaggaugcggg

SEQ ID NO: 2854850 - RNA, 19 nt, Artificial Sequence
  Description of Artificial Sequence: Synthetic oligonucleotide
aagaguucauaguccccac

SEQ ID NO: 2854851 - RNA, 19 nt, Artificial Sequence
  Description of Artificial Sequence: Synthetic oligonucleotide
agggagguagccccaaggc

SEQ ID NO: 2854852 - RNA, 19 nt, Artificial Sequence
  Description of Artificial Sequence: Synthetic oligonucleotide
uaggaugcucccaggacgg

SEQ ID NO: 2854853 - RNA, 19 nt, Artificial Sequence
  Description of Artificial Sequence: Synthetic oligonucleotide
cauuuaauugucucuagga

SEQ ID NO: 2854854 - RNA, 19 nt, Artificial Sequence
  Description of Artificial Sequence: Synthetic oligonucleotide
ucagggcuuacucaggcca

SEQ ID NO: 2854855 - RNA, 19 nt, Artificial Sequence
  Description of Artificial Sequence: Synthetic oligonucleotide
augggcauuuaauugucuc

SEQ ID NO: 2854856 - RNA, 19 nt, Artificial Sequence
  Description of Artificial Sequence: Synthetic oligonucleotide
aggaucgcaucucaucucg

SEQ ID NO: 2854857 - RNA, 19 nt, Artificial Sequence
  Description of Artificial Sequence: Synthetic oligonucleotide
uucaggaacucuugcagug

SEQ ID NO: 2854858 - RNA, 19 nt, Artificial Sequence
  Description of Artificial Sequence: Synthetic oligonucleotide
ugggacuugauuucacgag

SEQ ID NO: 2854859 - RNA, 19 nt, Artificial Sequence
  Description of Artificial Sequence: Synthetic oligonucleotide
acuaacaaauacccaucag

SEQ ID NO: 2854860 - RNA, 19 nt, Artificial Sequence
  Description of Artificial Sequence: Synthetic oligonucleotide
aaggaucgcaucucaucuc

SEQ ID NO: 2854861 - RNA, 19 nt, Artificial Sequence
  Description of Artificial Sequence: Synthetic oligonucleotide
uguuccacggccuccacga

SEQ ID NO: 2854862 - RNA, 19 nt, Artificial Sequence
  Description of Artificial Sequence: Synthetic oligonucleotide
gaaggggacacgcaaacca

SEQ ID NO: 2854863 - RNA, 19 nt, Artificial Sequence
  Description of Artificial Sequence: Synthetic oligonucleotide
ucguauuggauucgcuucc

SEQ ID NO: 2854864 - RNA, 19 nt, Artificial Sequence
  Description of Artificial Sequence: Synthetic oligonucleotide
aauugucucuaggaugcuc

SEQ ID NO: 2854865 - RNA, 19 nt, Artificial Sequence
  Description of Artificial Sequence: Synthetic oligonucleotide
acucaggccagcuucagga

SEQ ID NO: 2854866 - RNA, 19 nt, Artificial Sequence
  Description of Artificial Sequence: Synthetic oligonucleotide
ugggagauguccacuagcu

SEQ ID NO: 2854867 - RNA, 19 nt, Artificial Sequence
  Description of Artificial Sequence: Synthetic oligonucleotide
uccacuagcucguauugga

SEQ ID NO: 2854868 - RNA, 19 nt, Artificial Sequence
  Description of Artificial Sequence: Synthetic oligonucleotide
cacgaagaguucauagucc

SEQ ID NO: 2854869 - RNA, 19 nt, Artificial Sequence
  Description of Artificial Sequence: Synthetic oligonucleotide
ucgcaucucaucucgcagg

SEQ ID NO: 2854870 - RNA, 19 nt, Artificial Sequence
  Description of Artificial Sequence: Synthetic oligonucleotide
ucgcuucccaucuaggaug

SEQ ID NO: 2854871 - RNA, 19 nt, Artificial Sequence
  Description of Artificial Sequence: Synthetic oligonucleotide
uguccacuagcucguauug

SEQ ID NO: 2854872 - RNA, 19 nt, Artificial Sequence
  Description of Artificial Sequence: Synthetic oligonucleotide
uggaacuaacaaauaccca

SEQ ID NO: 2854873 - RNA, 19 nt, Artificial Sequence
  Description of Artificial Sequence: Synthetic oligonucleotide
uggcugauggaacuaacaa

SEQ ID NO: 2854874 - RNA, 19 nt, Artificial Sequence
  Description of Artificial Sequence: Synthetic oligonucleotide
acgcgcagaccacucaugc

SEQ ID NO: 2854875 - RNA, 19 nt, Artificial Sequence
  Description of Artificial Sequence: Synthetic oligonucleotide
ucuaggaugcucccaggac

SEQ ID NO: 2854876 - RNA, 19 nt, Artificial Sequence
  Description of Artificial Sequence: Synthetic oligonucleotide
ugggcauuuaauugucucu

SEQ ID NO: 2854877 - RNA, 19 nt, Artificial Sequence
  Description of Artificial Sequence: Synthetic oligonucleotide
uccacgaagaguucauagu

SEQ ID NO: 2854878 - RNA, 19 nt, Artificial Sequence
  Description of Artificial Sequence: Synthetic oligonucleotide
cucguauuggauucgcuuc

SEQ ID NO: 2854879 - RNA, 19 nt, Artificial Sequence
  Description of Artificial Sequence: Synthetic oligonucleotide
cacgcaaaccaaccgagag

SEQ ID NO: 2854880 - RNA, 19 nt, Artificial Sequence
  Description of Artificial Sequence: Synthetic oligonucleotide
cuccacgaagaguucauag

SEQ ID NO: 2854881 - RNA, 19 nt, Artificial Sequence
  Description of Artificial Sequence: Synthetic oligonucleotide
aucagggcuuacucaggcc

SEQ ID NO: 2854882 - RNA, 19 nt, Artificial Sequence
  Description of Artificial Sequence: Synthetic oligonucleotide
agaugguaggagcggcagc

SEQ ID NO: 2854883 - RNA, 19 nt, Artificial Sequence
  Description of Artificial Sequence: Synthetic oligonucleotide
caaauacccaucagacagc

SEQ ID NO: 2854884 - RNA, 19 nt, Artificial Sequence
  Description of Artificial Sequence: Synthetic oligonucleotide
gucucuaggaugcucccag

SEQ ID NO: 2854885 - RNA, 19 nt, Artificial Sequence
  Description of Artificial Sequence: Synthetic oligonucleotide
gcauuuaauugucucuagg

SEQ ID NO: 2854886 - RNA, 19 nt, Artificial Sequence
  Description of Artificial Sequence: Synthetic oligonucleotide
uuucacgagagccggugac

SEQ ID NO: 2854887 - RNA, 19 nt, Artificial Sequence
  Description of Artificial Sequence: Synthetic oligonucleotide
gacacgcaaaccaaccgag

SEQ ID NO: 2854888 - RNA, 19 nt, Artificial Sequence
  Description of Artificial Sequence: Synthetic oligonucleotide
acugcggggccuuuggcag

SEQ ID NO: 2854889 - RNA, 19 nt, Artificial Sequence
  Description of Artificial Sequence: Synthetic oligonucleotide
guccccacaguacuggucc

SEQ ID NO: 2854890 - RNA, 19 nt, Artificial Sequence
  Description of Artificial Sequence: Synthetic oligonucleotide
ucacgagagccggugaccg

SEQ ID NO: 2854891 - RNA, 19 nt, Artificial Sequence
  Description of Artificial Sequence: Synthetic oligonucleotide
auucgcuucccaucuagga

SEQ ID NO: 2854892 - RNA, 19 nt, Artificial Sequence
  Description of Artificial Sequence: Synthetic oligonucleotide
gauuucacgagagccggug

SEQ ID NO: 2854893 - RNA, 19 nt, Artificial Sequence
  Description of Artificial Sequence: Synthetic oligonucleotide
gggacagccagcaucaggg

SEQ ID NO: 2854894 - RNA, 19 nt, Artificial Sequence
  Description of Artificial Sequence: Synthetic oligonucleotide
gaacuaacaaauacccauc

SEQ ID NO: 2854895 - RNA, 19 nt, Artificial Sequence
  Description of Artificial Sequence: Synthetic oligonucleotide
aucgcaucucaucucgcag

SEQ ID NO: 2854896 - RNA, 19 nt, Artificial Sequence
  Description of Artificial Sequence: Synthetic oligonucleotide
uauuggauucgcuucccau

SEQ ID NO: 2854897 - RNA, 19 nt, Artificial Sequence
  Description of Artificial Sequence: Synthetic oligonucleotide
aucagacagcgccaggcag

SEQ ID NO: 2854898 - RNA, 19 nt, Artificial Sequence
  Description of Artificial Sequence: Synthetic oligonucleotide
cuugcaguguguucuguuc

SEQ ID NO: 2854899 - RNA, 19 nt, Artificial Sequence
  Description of Artificial Sequence: Synthetic oligonucleotide
caggcagggagguagcccc

SEQ ID NO: 2854900 - RNA, 19 nt, Artificial Sequence
  Description of Artificial Sequence: Synthetic oligonucleotide
uacucaggccagcuucagg

SEQ ID NO: 2854901 - RNA, 19 nt, Artificial Sequence
  Description of Artificial Sequence: Synthetic oligonucleotide
gacuugauuucacgagagc

SEQ ID NO: 2854902 - RNA, 19 nt, Artificial Sequence
  Description of Artificial Sequence: Synthetic oligonucleotide
aaccgagagaugguaggag

SEQ ID NO: 2854903 - RNA, 19 nt, Artificial Sequence
  Description of Artificial Sequence: Synthetic oligonucleotide
cuucccaucuaggaugcgg

SEQ ID NO: 2854904 - RNA, 19 nt, Artificial Sequence
  Description of Artificial Sequence: Synthetic oligonucleotide
gacaaucugggguggggug

SEQ ID NO: 2854905 - RNA, 19 nt, Artificial Sequence
  Description of Artificial Sequence: Synthetic oligonucleotide
caucagggcuuacucaggc

SEQ ID NO: 2854906 - RNA, 19 nt, Artificial Sequence
  Description of Artificial Sequence: Synthetic oligonucleotide
uacugguccccguugacaa

SEQ ID NO: 2854907 - RNA, 19 nt, Artificial Sequence
  Description of Artificial Sequence: Synthetic oligonucleotide
ggaacuaacaaauacccau

SEQ ID NO: 2854908 - RNA, 19 nt, Artificial Sequence
  Description of Artificial Sequence: Synthetic oligonucleotide
gaugcgggucacuucacuc

SEQ ID NO: 2854909 - RNA, 19 nt, Artificial Sequence
  Description of Artificial Sequence: Synthetic oligonucleotide
guucauaguccccacagua

SEQ ID NO: 2854910 - RNA, 19 nt, Artificial Sequence
  Description of Artificial Sequence: Synthetic oligonucleotide
aauacccaucagacagcgc

SEQ ID NO: 2854911 - RNA, 19 nt, Artificial Sequence
  Description of Artificial Sequence: Synthetic oligonucleotide
gauucgcuucccaucuagg

SEQ ID NO: 2854912 - RNA, 19 nt, Artificial Sequence
  Description of Artificial Sequence: Synthetic oligonucleotide
ucaggccagcuucaggaac

SEQ ID NO: 2854913 - RNA, 19 nt, Artificial Sequence
  Description of Artificial Sequence: Synthetic oligonucleotide
ucucuaggaugcucccagg

SEQ ID NO: 2854914 - RNA, 19 nt, Artificial Sequence
  Description of Artificial Sequence: Synthetic oligonucleotide
aggacggggacugcggggc

SEQ ID NO: 2854915 - RNA, 19 nt, Artificial Sequence
  Description of Artificial Sequence: Synthetic oligonucleotide
gagccggugaccgacgugc

SEQ ID NO: 2854916 - RNA, 19 nt, Artificial Sequence
  Description of Artificial Sequence: Synthetic oligonucleotide
ucucgcagggcguuguccu

SEQ ID NO: 2854917 - RNA, 19 nt, Artificial Sequence
  Description of Artificial Sequence: Synthetic oligonucleotide
ugcaguguguucuguucca

SEQ ID NO: 2854918 - RNA, 19 nt, Artificial Sequence
  Description of Artificial Sequence: Synthetic oligonucleotide
ugcgggucacuucacucug

SEQ ID NO: 2854919 - RNA, 19 nt, Artificial Sequence
  Description of Artificial Sequence: Synthetic oligonucleotide
uguucuguuccacggccuc

SEQ ID NO: 2854920 - RNA, 19 nt, Artificial Sequence
  Description of Artificial Sequence: Synthetic oligonucleotide
aguggaaugggcauuuaau

SEQ ID NO: 2854921 - RNA, 19 nt, Artificial Sequence
  Description of Artificial Sequence: Synthetic oligonucleotide
gaucgcaucucaucucgca

SEQ ID NO: 2854922 - RNA, 19 nt, Artificial Sequence
  Description of Artificial Sequence: Synthetic oligonucleotide
ucuggcugauggaacuaac

SEQ ID NO: 2854923 - RNA, 19 nt, Artificial Sequence
  Description of Artificial Sequence: Synthetic oligonucleotide
ugaccgacgugcuguagac

SEQ ID NO: 2854924 - RNA, 19 nt, Artificial Sequence
  Description of Artificial Sequence: Synthetic oligonucleotide
acaguacugguccccguug

SEQ ID NO: 2854925 - RNA, 19 nt, Artificial Sequence
  Description of Artificial Sequence: Synthetic oligonucleotide
gagaugguaggagcggcag

SEQ ID NO: 2854926 - RNA, 19 nt, Artificial Sequence
  Description of Artificial Sequence: Synthetic oligonucleotide
gcuguagacgcgcagacca

SEQ ID NO: 2854927 - RNA, 19 nt, Artificial Sequence
  Description of Artificial Sequence: Synthetic oligonucleotide
agcucuggcugauggaacu

SEQ ID NO: 2854928 - RNA, 19 nt, Artificial Sequence
  Description of Artificial Sequence: Synthetic oligonucleotide
acgagagccggugaccgac

SEQ ID NO: 2854929 - RNA, 19 nt, Artificial Sequence
  Description of Artificial Sequence: Synthetic oligonucleotide
gaaugggcauuuaauuguc

SEQ ID NO: 2854930 - RNA, 19 nt, Artificial Sequence
  Description of Artificial Sequence: Synthetic oligonucleotide
acgcaaaccaaccgagaga

SEQ ID NO: 2854931 - RNA, 19 nt, Artificial Sequence
  Description of Artificial Sequence: Synthetic oligonucleotide
uugucucuaggaugcuccc

SEQ ID NO: 2854932 - RNA, 19 nt, Artificial Sequence
  Description of Artificial Sequence: Synthetic oligonucleotide
gagagaugguaggagcggc

SEQ ID NO: 2854933 - RNA, 19 nt, Artificial Sequence
  Description of Artificial Sequence: Synthetic oligonucleotide
ugccaaggaucgcaucuca

SEQ ID NO: 2854934 - RNA, 19 nt, Artificial Sequence
  Description of Artificial Sequence: Synthetic oligonucleotide
gcagagcucuggcugaugg

SEQ ID NO: 2854935 - RNA, 19 nt, Artificial Sequence
  Description of Artificial Sequence: Synthetic oligonucleotide
augcgggucacuucacucu

SEQ ID NO: 2854936 - RNA, 19 nt, Artificial Sequence
  Description of Artificial Sequence: Synthetic oligonucleotide
uuggcagagcucuggcuga

SEQ ID NO: 2854937 - RNA, 19 nt, Artificial Sequence
  Description of Artificial Sequence: Synthetic oligonucleotide
uacccaucagacagcgcca

SEQ ID NO: 2854938 - RNA, 19 nt, Artificial Sequence
  Description of Artificial Sequence: Synthetic oligonucleotide
aucucgcagggcguugucc

SEQ ID NO: 2854939 - RNA, 19 nt, Artificial Sequence
  Description of Artificial Sequence: Synthetic oligonucleotide
aaugggcauuuaauugucu

SEQ ID NO: 2854940 - RNA, 19 nt, Artificial Sequence
  Description of Artificial Sequence: Synthetic oligonucleotide
cagggcguuguccugggag

SEQ ID NO: 2854941 - RNA, 19 nt, Artificial Sequence
  Description of Artificial Sequence: Synthetic oligonucleotide
uucacgagagccggugacc

SEQ ID NO: 2854942 - RNA, 19 nt, Artificial Sequence
  Description of Artificial Sequence: Synthetic oligonucleotide
agaguucauaguccccaca

SEQ ID NO: 2854943 - RNA, 19 nt, Artificial Sequence
  Description of Artificial Sequence: Synthetic oligonucleotide
guggccuugggguugccug

SEQ ID NO: 2854944 - RNA, 19 nt, Artificial Sequence
  Description of Artificial Sequence: Synthetic oligonucleotide
ggcauuuaauugucucuag

SEQ ID NO: 2854945 - RNA, 19 nt, Artificial Sequence
  Description of Artificial Sequence: Synthetic oligonucleotide
gggacacgcaaaccaaccg

SEQ ID NO: 2854946 - RNA, 19 nt, Artificial Sequence
  Description of Artificial Sequence: Synthetic oligonucleotide
ucuaggaugcgggucacuu

SEQ ID NO: 2854947 - RNA, 19 nt, Artificial Sequence
  Description of Artificial Sequence: Synthetic oligonucleotide
auguccacuagcucguauu

SEQ ID NO: 2854948 - RNA, 19 nt, Artificial Sequence
  Description of Artificial Sequence: Synthetic oligonucleotide
ggaaugggcauuuaauugu

SEQ ID NO: 2854949 - RNA, 19 nt, Artificial Sequence
  Description of Artificial Sequence: Synthetic oligonucleotide
auuucacgagagccgguga

SEQ ID NO: 2854950 - RNA, 19 nt, Artificial Sequence
  Description of Artificial Sequence: Synthetic oligonucleotide
ggauucgcuucccaucuag

SEQ ID NO: 2854951 - RNA, 19 nt, Artificial Sequence
  Description of Artificial Sequence: Synthetic oligonucleotide
gcugggacuugauuucacg

SEQ ID NO: 2854952 - RNA, 19 nt, Artificial Sequence
  Description of Artificial Sequence: Synthetic oligonucleotide
aaaccaaccgagagauggu

SEQ ID NO: 2854953 - RNA, 19 nt, Artificial Sequence
  Description of Artificial Sequence: Synthetic oligonucleotide
ccaaccgagagaugguagg

SEQ ID NO: 2854954 - RNA, 19 nt, Artificial Sequence
  Description of Artificial Sequence: Synthetic oligonucleotide
ugacaaucugggguggggu

SEQ ID NO: 2854955 - RNA, 19 nt, Artificial Sequence
  Description of Artificial Sequence: Synthetic oligonucleotide
uaggagcggcagcugcacg

SEQ ID NO: 2854956 - RNA, 19 nt, Artificial Sequence
  Description of Artificial Sequence: Synthetic oligonucleotide
cugggacuugauuucacga

SEQ ID NO: 2854957 - RNA, 19 nt, Artificial Sequence
  Description of Artificial Sequence: Synthetic oligonucleotide
uguagacgcgcagaccacu

SEQ ID NO: 2854958 - RNA, 19 nt, Artificial Sequence
  Description of Artificial Sequence: Synthetic oligonucleotide
cuagcucguauuggauucg

SEQ ID NO: 2854959 - RNA, 19 nt, Artificial Sequence
  Description of Artificial Sequence: Synthetic oligonucleotide
gcaagggacagccagcauc

SEQ ID NO: 2854960 - RNA, 19 nt, Artificial Sequence
  Description of Artificial Sequence: Synthetic oligonucleotide
gaacucuugcaguguguuc

SEQ ID NO: 2854961 - RNA, 19 nt, Artificial Sequence
  Description of Artificial Sequence: Synthetic oligonucleotide
gacugcggggccuuuggca

SEQ ID NO: 2854962 - RNA, 19 nt, Artificial Sequence
  Description of Artificial Sequence: Synthetic oligonucleotide
guugacaaucugggguggg

SEQ ID NO: 2854963 - RNA, 19 nt, Artificial Sequence
  Description of Artificial Sequence: Synthetic oligonucleotide
ucuugcaguguguucuguu

SEQ ID NO: 2854964 - RNA, 19 nt, Artificial Sequence
  Description of Artificial Sequence: Synthetic oligonucleotide
gcgcagaccacucaugcug

SEQ ID NO: 2854965 - RNA, 19 nt, Artificial Sequence
  Description of Artificial Sequence: Synthetic oligonucleotide
gaugguaggagcggcagcu

SEQ ID NO: 2854966 - RNA, 19 nt, Artificial Sequence
  Description of Artificial Sequence: Synthetic oligonucleotide
ccacgaagaguucauaguc

SEQ ID NO: 2854967 - RNA, 19 nt, Artificial Sequence
  Description of Artificial Sequence: Synthetic oligonucleotide
acucuugcaguguguucug

SEQ ID NO: 2854968 - RNA, 19 nt, Artificial Sequence
  Description of Artificial Sequence: Synthetic oligonucleotide
uagacgcgcagaccacuca

SEQ ID NO: 2854969 - RNA, 19 nt, Artificial Sequence
  Description of Artificial Sequence: Synthetic oligonucleotide
ccgagagaugguaggagcg

SEQ ID NO: 2854970 - RNA, 19 nt, Artificial Sequence
  Description of Artificial Sequence: Synthetic oligonucleotide
ggacuugauuucacgagag

SEQ ID NO: 2854971 - RNA, 19 nt, Artificial Sequence
  Description of Artificial Sequence: Synthetic oligonucleotide
ugauuucacgagagccggu

SEQ ID NO: 2854972 - RNA, 19 nt, Artificial Sequence
  Description of Artificial Sequence: Synthetic oligonucleotide
aaucuggggugggguggcc

SEQ ID NO: 2854973 - RNA, 19 nt, Artificial Sequence
  Description of Artificial Sequence: Synthetic oligonucleotide
acggccuccacgaagaguu

SEQ ID NO: 2854974 - RNA, 19 nt, Artificial Sequence
  Description of Artificial Sequence: Synthetic oligonucleotide
cuggcugauggaacuaaca

SEQ ID NO: 2854975 - RNA, 19 nt, Artificial Sequence
  Description of Artificial Sequence: Synthetic oligonucleotide
agggcuuacucaggccagc

SEQ ID NO: 2854976 - RNA, 19 nt, Artificial Sequence
  Description of Artificial Sequence: Synthetic oligonucleotide
aggggacacgcaaaccaac

SEQ ID NO: 2854977 - RNA, 19 nt, Artificial Sequence
  Description of Artificial Sequence: Synthetic oligonucleotide
guccacuagcucguauugg

SEQ ID NO: 2854978 - RNA, 19 nt, Artificial Sequence
  Description of Artificial Sequence: Synthetic oligonucleotide
gggacuugauuucacgaga

SEQ ID NO: 2854979 - RNA, 19 nt, Artificial Sequence
  Description of Artificial Sequence: Synthetic oligonucleotide
cuguuccacggccuccacg

SEQ ID NO: 2854980 - RNA, 19 nt, Artificial Sequence
  Description of Artificial Sequence: Synthetic oligonucleotide
ucgcagggcguuguccugg

SEQ ID NO: 2854981 - RNA, 19 nt, Artificial Sequence
  Description of Artificial Sequence: Synthetic oligonucleotide
cuaggaugcgggucacuuc

SEQ ID NO: 2854982 - RNA, 19 nt, Artificial Sequence
  Description of Artificial Sequence: Synthetic oligonucleotide
ugcugggacuugauuucac

SEQ ID NO: 2854983 - RNA, 19 nt, Artificial Sequence
  Description of Artificial Sequence: Synthetic oligonucleotide
aaggggacacgcaaaccaa

SEQ ID NO: 2854984 - RNA, 19 nt, Artificial Sequence
  Description of Artificial Sequence: Synthetic oligonucleotide
uggccuugggguugccugc

SEQ ID NO: 2854985 - RNA, 19 nt, Artificial Sequence
  Description of Artificial Sequence: Synthetic oligonucleotide
uuacucaggccagcuucag

SEQ ID NO: 2854986 - RNA, 19 nt, Artificial Sequence
  Description of Artificial Sequence: Synthetic oligonucleotide
gaccacucaugcugcagga

SEQ ID NO: 2854987 - RNA, 19 nt, Artificial Sequence
  Description of Artificial Sequence: Synthetic oligonucleotide
aaccaaccgagagauggua

SEQ ID NO: 2854988 - RNA, 19 nt, Artificial Sequence
  Description of Artificial Sequence: Synthetic oligonucleotide
accaaccgagagaugguag

SEQ ID NO: 2854989 - RNA, 19 nt, Artificial Sequence
  Description of Artificial Sequence: Synthetic oligonucleotide
gggagguagccccaaggcc

SEQ ID NO: 2854990 - RNA, 19 nt, Artificial Sequence
  Description of Artificial Sequence: Synthetic oligonucleotide
gguugccugccaaggaucg

SEQ ID NO: 2854991 - RNA, 19 nt, Artificial Sequence
  Description of Artificial Sequence: Synthetic oligonucleotide
cagggcuuacucaggccag

SEQ ID NO: 2854992 - RNA, 19 nt, Artificial Sequence
  Description of Artificial Sequence: Synthetic oligonucleotide
gugaccgacgugcuguaga

SEQ ID NO: 2854993 - RNA, 19 nt, Artificial Sequence
  Description of Artificial Sequence: Synthetic oligonucleotide
guggaaugggcauuuaauu

SEQ ID NO: 2854994 - RNA, 19 nt, Artificial Sequence
  Description of Artificial Sequence: Synthetic oligonucleotide
ugucucuaggaugcuccca

SEQ ID NO: 2854995 - RNA, 19 nt, Artificial Sequence
  Description of Artificial Sequence: Synthetic oligonucleotide
ggcugauggaacuaacaaa

SEQ ID NO: 2854996 - RNA, 19 nt, Artificial Sequence
  Description of Artificial Sequence: Synthetic oligonucleotide
caggacggggacugcgggg

SEQ ID NO: 2854997 - RNA, 19 nt, Artificial Sequence
  Description of Artificial Sequence: Synthetic oligonucleotide
ugcuguagacgcgcagacc

SEQ ID NO: 2854998 - RNA, 19 nt, Artificial Sequence
  Description of Artificial Sequence: Synthetic oligonucleotide
gcugauggaacuaacaaau

SEQ ID NO: 2854999 - RNA, 19 nt, Artificial Sequence
  Description of Artificial Sequence: Synthetic oligonucleotide
ggacacgcaaaccaaccga

SEQ ID NO: 2855000 - RNA, 19 nt, Artificial Sequence
  Description of Artificial Sequence: Synthetic oligonucleotide
ccacucaugcugcaggaag

SEQ ID NO: 2855001 - RNA, 19 nt, Artificial Sequence
  Description of Artificial Sequence: Synthetic oligonucleotide
agacgcgcagaccacucau

SEQ ID NO: 2855002 - RNA, 19 nt, Artificial Sequence
  Description of Artificial Sequence: Synthetic oligonucleotide
gugcuguagacgcgcagac

SEQ ID NO: 2855003 - RNA, 19 nt, Artificial Sequence
  Description of Artificial Sequence: Synthetic oligonucleotide
uagcucguauuggauucgc

SEQ ID NO: 2855004 - RNA, 19 nt, Artificial Sequence
  Description of Artificial Sequence: Synthetic oligonucleotide
cucuaggaugcucccagga

SEQ ID NO: 2855005 - RNA, 19 nt, Artificial Sequence
  Description of Artificial Sequence: Synthetic oligonucleotide
ccguugacaaucuggggug

SEQ ID NO: 2855006 - RNA, 19 nt, Artificial Sequence
  Description of Artificial Sequence: Synthetic oligonucleotide
guauuggauucgcuuccca

SEQ ID NO: 2855007 - RNA, 19 nt, Artificial Sequence
  Description of Artificial Sequence: Synthetic oligonucleotide
ucccaucuaggaugcgggu

SEQ ID NO: 2855008 - RNA, 19 nt, Artificial Sequence
  Description of Artificial Sequence: Synthetic oligonucleotide
acgugcuguagacgcgcag

SEQ ID NO: 2855009 - RNA, 19 nt, Artificial Sequence
  Description of Artificial Sequence: Synthetic oligonucleotide
gaccgacgugcuguagacg

SEQ ID NO: 2855010 - RNA, 19 nt, Artificial Sequence
  Description of Artificial Sequence: Synthetic oligonucleotide
cuguagacgcgcagaccac

SEQ ID NO: 2855011 - RNA, 19 nt, Artificial Sequence
  Description of Artificial Sequence: Synthetic oligonucleotide
uagccccaaggccuggcaa

SEQ ID NO: 2855012 - RNA, 19 nt, Artificial Sequence
  Description of Artificial Sequence: Synthetic oligonucleotide
uaauugucucuaggaugcu

SEQ ID NO: 2855013 - RNA, 19 nt, Artificial Sequence
  Description of Artificial Sequence: Synthetic oligonucleotide
ugguccccguugacaaucu

SEQ ID NO: 2855014 - RNA, 19 nt, Artificial Sequence
  Description of Artificial Sequence: Synthetic oligonucleotide
ccaucagacagcgccaggc

SEQ ID NO: 2855015 - RNA, 19 nt, Artificial Sequence
  Description of Artificial Sequence: Synthetic oligonucleotide
cugguccccguugacaauc

SEQ ID NO: 2855016 - RNA, 19 nt, Artificial Sequence
  Description of Artificial Sequence: Synthetic oligonucleotide
cugauggaacuaacaaaua

SEQ ID NO: 2855017 - RNA, 19 nt, Artificial Sequence
  Description of Artificial Sequence: Synthetic oligonucleotide
caucagacagcgccaggca

SEQ ID NO: 2855018 - RNA, 19 nt, Artificial Sequence
  Description of Artificial Sequence: Synthetic oligonucleotide
ccagcaucagggcuuacuc

SEQ ID NO: 2855019 - RNA, 19 nt, Artificial Sequence
  Description of Artificial Sequence: Synthetic oligonucleotide
gggacugcggggccuuugg

SEQ ID NO: 2855020 - RNA, 19 nt, Artificial Sequence
  Description of Artificial Sequence: Synthetic oligonucleotide
uccccacaguacugguccc

SEQ ID NO: 2855021 - RNA, 19 nt, Artificial Sequence
  Description of Artificial Sequence: Synthetic oligonucleotide
cagcaucagggcuuacuca

SEQ ID NO: 2855022 - RNA, 19 nt, Artificial Sequence
  Description of Artificial Sequence: Synthetic oligonucleotide
acccaucagacagcgccag

SEQ ID NO: 2855023 - RNA, 19 nt, Artificial Sequence
  Description of Artificial Sequence: Synthetic oligonucleotide
agagccggugaccgacgug

SEQ ID NO: 2855024 - RNA, 19 nt, Artificial Sequence
  Description of Artificial Sequence: Synthetic oligonucleotide
gacgcgcagaccacucaug

SEQ ID NO: 2855025 - RNA, 19 nt, Artificial Sequence
  Description of Artificial Sequence: Synthetic oligonucleotide
ggaugcucccaggacgggg

SEQ ID NO: 2855026 - RNA, 19 nt, Artificial Sequence
  Description of Artificial Sequence: Synthetic oligonucleotide
ggggacacgcaaaccaacc

SEQ ID NO: 2855027 - RNA, 19 nt, Artificial Sequence
  Description of Artificial Sequence: Synthetic oligonucleotide
caaggccuggcaagggaca

SEQ ID NO: 2855028 - RNA, 19 nt, Artificial Sequence
  Description of Artificial Sequence: Synthetic oligonucleotide
guacugguccccguugaca

SEQ ID NO: 2855029 - RNA, 19 nt, Artificial Sequence
  Description of Artificial Sequence: Synthetic oligonucleotide
gagcucuggcugauggaac

SEQ ID NO: 2855030 - RNA, 19 nt, Artificial Sequence
  Description of Artificial Sequence: Synthetic oligonucleotide
acagcgccaggcagggagg

SEQ ID NO: 2855031 - RNA, 19 nt, Artificial Sequence
  Description of Artificial Sequence: Synthetic oligonucleotide
guaggagcggcagcugcac

SEQ ID NO: 2855032 - RNA, 19 nt, Artificial Sequence
  Description of Artificial Sequence: Synthetic oligonucleotide
ccaucuaggaugcggguca

SEQ ID NO: 2855033 - RNA, 19 nt, Artificial Sequence
  Description of Artificial Sequence: Synthetic oligonucleotide
ugccugccaaggaucgcau

SEQ ID NO: 2855034 - RNA, 19 nt, Artificial Sequence
  Description of Artificial Sequence: Synthetic oligonucleotide
caguggaaugggcauuuaa

SEQ ID NO: 2855035 - RNA, 19 nt, Artificial Sequence
  Description of Artificial Sequence: Synthetic oligonucleotide
caaccgagagaugguagga

SEQ ID NO: 2855036 - RNA, 19 nt, Artificial Sequence
  Description of Artificial Sequence: Synthetic oligonucleotide
ggagguagccccaaggccu

SEQ ID NO: 2855037 - RNA, 19 nt, Artificial Sequence
  Description of Artificial Sequence: Synthetic oligonucleotide
ucucaucucgcagggcguu

SEQ ID NO: 2855038 - RNA, 19 nt, Artificial Sequence
  Description of Artificial Sequence: Synthetic oligonucleotide
aucucaucucgcagggcgu

SEQ ID NO: 2855039 - RNA, 19 nt, Artificial Sequence
  Description of Artificial Sequence: Synthetic oligonucleotide
guagacgcgcagaccacuc

SEQ ID NO: 2855040 - RNA, 19 nt, Artificial Sequence
  Description of Artificial Sequence: Synthetic oligonucleotide
aggaugcgggucacuucac

SEQ ID NO: 2855041 - RNA, 19 nt, Artificial Sequence
  Description of Artificial Sequence: Synthetic oligonucleotide
cugccaaggaucgcaucuc

SEQ ID NO: 2855042 - RNA, 19 nt, Artificial Sequence
  Description of Artificial Sequence: Synthetic oligonucleotide
acacgcaaaccaaccgaga

SEQ ID NO: 2855043 - RNA, 19 nt, Artificial Sequence
  Description of Artificial Sequence: Synthetic oligonucleotide
cgcaucucaucucgcaggg

SEQ ID NO: 2855044 - RNA, 19 nt, Artificial Sequence
  Description of Artificial Sequence: Synthetic oligonucleotide
cucgcagggcguuguccug

SEQ ID NO: 2855045 - RNA, 19 nt, Artificial Sequence
  Description of Artificial Sequence: Synthetic oligonucleotide
guagccccaaggccuggca

SEQ ID NO: 2855046 - RNA, 19 nt, Artificial Sequence
  Description of Artificial Sequence: Synthetic oligonucleotide
gcaucagggcuuacucagg

SEQ ID NO: 2855047 - RNA, 19 nt, Artificial Sequence
  Description of Artificial Sequence: Synthetic oligonucleotide
aggaugcucccaggacggg

SEQ ID NO: 2855048 - RNA, 19 nt, Artificial Sequence
  Description of Artificial Sequence: Synthetic oligonucleotide
guugccugccaaggaucgc

SEQ ID NO: 2855049 - RNA, 19 nt, Artificial Sequence
  Description of Artificial Sequence: Synthetic oligonucleotide
caucuaggaugcgggucac

SEQ ID NO: 2855050 - RNA, 19 nt, Artificial Sequence
  Description of Artificial Sequence: Synthetic oligonucleotide
agcucguauuggauucgcu

SEQ ID NO: 2855051 - RNA, 19 nt, Artificial Sequence
  Description of Artificial Sequence: Synthetic oligonucleotide
gcucccaggacggggacug

SEQ ID NO: 2855052 - RNA, 19 nt, Artificial Sequence
  Description of Artificial Sequence: Synthetic oligonucleotide
cacuagcucguauuggauu

SEQ ID NO: 2855053 - RNA, 19 nt, Artificial Sequence
  Description of Artificial Sequence: Synthetic oligonucleotide
ccugggagauguccacuag

SEQ ID NO: 2855054 - RNA, 19 nt, Artificial Sequence
  Description of Artificial Sequence: Synthetic oligonucleotide
cccaggacggggacugcgg

SEQ ID NO: 2855055 - RNA, 19 nt, Artificial Sequence
  Description of Artificial Sequence: Synthetic oligonucleotide
cccguugacaaucuggggu

SEQ ID NO: 2855056 - RNA, 19 nt, Artificial Sequence
  Description of Artificial Sequence: Synthetic oligonucleotide
cgcagaccacucaugcugc

SEQ ID NO: 2855057 - RNA, 19 nt, Artificial Sequence
  Description of Artificial Sequence: Synthetic oligonucleotide
accacucaugcugcaggaa

SEQ ID NO: 2855058 - RNA, 19 nt, Artificial Sequence
  Description of Artificial Sequence: Synthetic oligonucleotide
cccacaguacugguccccg

SEQ ID NO: 2855059 - RNA, 19 nt, Artificial Sequence
  Description of Artificial Sequence: Synthetic oligonucleotide
ccccguugacaaucugggg

SEQ ID NO: 2855060 - RNA, 19 nt, Artificial Sequence
  Description of Artificial Sequence: Synthetic oligonucleotide
gggccuuuggcagagcucu

SEQ ID NO: 2855061 - RNA, 19 nt, Artificial Sequence
  Description of Artificial Sequence: Synthetic oligonucleotide
caucucgcagggcguuguc

SEQ ID NO: 2855062 - RNA, 19 nt, Artificial Sequence
  Description of Artificial Sequence: Synthetic oligonucleotide
gcucguauuggauucgcuu

SEQ ID NO: 2855063 - RNA, 19 nt, Artificial Sequence
  Description of Artificial Sequence: Synthetic oligonucleotide
cgcuucccaucuaggaugc

SEQ ID NO: 2855064 - RNA, 19 nt, Artificial Sequence
  Description of Artificial Sequence: Synthetic oligonucleotide
ccgacgugcuguagacgcg

SEQ ID NO: 2855065 - RNA, 19 nt, Artificial Sequence
  Description of Artificial Sequence: Synthetic oligonucleotide
gacgugcuguagacgcgca

SEQ ID NO: 2855066 - RNA, 19 nt, Artificial Sequence
  Description of Artificial Sequence: Synthetic oligonucleotide
gccccaaggccuggcaagg

SEQ ID NO: 2855067 - RNA, 19 nt, Artificial Sequence
  Description of Artificial Sequence: Synthetic oligonucleotide
ggaucgcaucucaucucgc

SEQ ID NO: 2855068 - RNA, 19 nt, Artificial Sequence
  Description of Artificial Sequence: Synthetic oligonucleotide
agguagccccaaggccugg

SEQ ID NO: 2855069 - RNA, 19 nt, Artificial Sequence
  Description of Artificial Sequence: Synthetic oligonucleotide
ccaggcagggagguagccc

SEQ ID NO: 2855070 - RNA, 19 nt, Artificial Sequence
  Description of Artificial Sequence: Synthetic oligonucleotide
gagagccggugaccgacgu

SEQ ID NO: 2855071 - RNA, 19 nt, Artificial Sequence
  Description of Artificial Sequence: Synthetic oligonucleotide
ccugccaaggaucgcaucu

SEQ ID NO: 2855072 - RNA, 19 nt, Artificial Sequence
  Description of Artificial Sequence: Synthetic oligonucleotide
gcagggagguagccccaag

SEQ ID NO: 2855073 - RNA, 19 nt, Artificial Sequence
  Description of Artificial Sequence: Synthetic oligonucleotide
cguauuggauucgcuuccc

SEQ ID NO: 2855074 - RNA, 19 nt, Artificial Sequence
  Description of Artificial Sequence: Synthetic oligonucleotide
cccaucuaggaugcggguc

SEQ ID NO: 2855075 - RNA, 19 nt, Artificial Sequence
  Description of Artificial Sequence: Synthetic oligonucleotide
gguagccccaaggccuggc

SEQ ID NO: 2855076 - RNA, 19 nt, Artificial Sequence
  Description of Artificial Sequence: Synthetic oligonucleotide
gguccccguugacaaucug

SEQ ID NO: 2855077 - RNA, 19 nt, Artificial Sequence
  Description of Artificial Sequence: Synthetic oligonucleotide
ggugaccgacgugcuguag

SEQ ID NO: 2855078 - RNA, 19 nt, Artificial Sequence
  Description of Artificial Sequence: Synthetic oligonucleotide
cccaucagacagcgccagg

SEQ ID NO: 2855079 - RNA, 19 nt, Artificial Sequence
  Description of Artificial Sequence: Synthetic oligonucleotide
cacgagagccggugaccga

SEQ ID NO: 2855080 - RNA, 19 nt, Artificial Sequence
  Description of Artificial Sequence: Synthetic oligonucleotide
ggaacucuugcaguguguu

SEQ ID NO: 2855081 - RNA, 19 nt, Artificial Sequence
  Description of Artificial Sequence: Synthetic oligonucleotide
gggguugccugccaaggau

SEQ ID NO: 2855082 - RNA, 19 nt, Artificial Sequence
  Description of Artificial Sequence: Synthetic oligonucleotide
ggccuccacgaagaguuca

SEQ ID NO: 2855083 - RNA, 19 nt, Artificial Sequence
  Description of Artificial Sequence: Synthetic oligonucleotide
cacaguacugguccccguu

SEQ ID NO: 2855084 - RNA, 19 nt, Artificial Sequence
  Description of Artificial Sequence: Synthetic oligonucleotide
cgacgugcuguagacgcgc

SEQ ID NO: 2855085 - RNA, 19 nt, Artificial Sequence
  Description of Artificial Sequence: Synthetic oligonucleotide
ggcguuguccugggagaug

SEQ ID NO: 2855086 - RNA, 19 nt, Artificial Sequence
  Description of Artificial Sequence: Synthetic oligonucleotide
gcaaaccaaccgagagaug

SEQ ID NO: 2855087 - RNA, 19 nt, Artificial Sequence
  Description of Artificial Sequence: Synthetic oligonucleotide
agauguccacuagcucgua

SEQ ID NO: 2855088 - RNA, 19 nt, Artificial Sequence
  Description of Artificial Sequence: Synthetic oligonucleotide
guuccacggccuccacgaa

SEQ ID NO: 2855089 - RNA, 19 nt, Artificial Sequence
  Description of Artificial Sequence: Synthetic oligonucleotide
gcagaccacucaugcugca

SEQ ID NO: 2855090 - RNA, 19 nt, Artificial Sequence
  Description of Artificial Sequence: Synthetic oligonucleotide
ggaugcgggucacuucacu

SEQ ID NO: 2855091 - RNA, 19 nt, Artificial Sequence
  Description of Artificial Sequence: Synthetic oligonucleotide
gcguuguccugggagaugu

SEQ ID NO: 2855092 - RNA, 19 nt, Artificial Sequence
  Description of Artificial Sequence: Synthetic oligonucleotide
gcaucucaucucgcagggc

SEQ ID NO: 2855093 - RNA, 19 nt, Artificial Sequence
  Description of Artificial Sequence: Synthetic oligonucleotide
ggccuugggguugccugcc

SEQ ID NO: 2855094 - RNA, 19 nt, Artificial Sequence
  Description of Artificial Sequence: Synthetic oligonucleotide
cgagagccggugaccgacg

SEQ ID NO: 2855095 - RNA, 19 nt, Artificial Sequence
  Description of Artificial Sequence: Synthetic oligonucleotide
gccggugaccgacgugcug

SEQ ID NO: 2855096 - RNA, 19 nt, Artificial Sequence
  Description of Artificial Sequence: Synthetic oligonucleotide
cugcggggccuuuggcaga

SEQ ID NO: 2855097 - RNA, 19 nt, Artificial Sequence
  Description of Artificial Sequence: Synthetic oligonucleotide
ggacggggacugcggggcc

SEQ ID NO: 2855098 - RNA, 19 nt, Artificial Sequence
  Description of Artificial Sequence: Synthetic oligonucleotide
agccagcaucagggcuuac

SEQ ID NO: 2855099 - RNA, 19 nt, Artificial Sequence
  Description of Artificial Sequence: Synthetic oligonucleotide
ccccacaguacuggucccc

SEQ ID NO: 2855100 - RNA, 19 nt, Artificial Sequence
  Description of Artificial Sequence: Synthetic oligonucleotide
gcuucccaucuaggaugcg

SEQ ID NO: 2855101 - RNA, 19 nt, Artificial Sequence
  Description of Artificial Sequence: Synthetic oligonucleotide
cgcaaaccaaccgagagau

SEQ ID NO: 2855102 - RNA, 19 nt, Artificial Sequence
  Description of Artificial Sequence: Synthetic oligonucleotide
cucccaggacggggacugc

SEQ ID NO: 2855103 - RNA, 19 nt, Artificial Sequence
  Description of Artificial Sequence: Synthetic oligonucleotide
ggggccuuuggcagagcuc

SEQ ID NO: 2855104 - RNA, 19 nt, Artificial Sequence
  Description of Artificial Sequence: Synthetic oligonucleotide
agccggugaccgacgugcu

SEQ ID NO: 2855105 - RNA, 19 nt, Artificial Sequence
  Description of Artificial Sequence: Synthetic oligonucleotide
cgugcuguagacgcgcaga

SEQ ID NO: 2855106 - RNA, 19 nt, Artificial Sequence
  Description of Artificial Sequence: Synthetic oligonucleotide
gccugccaaggaucgcauc

SEQ ID NO: 2855107 - RNA, 19 nt, Artificial Sequence
  Description of Artificial Sequence: Synthetic oligonucleotide
cgcagggcguuguccuggg

SEQ ID NO: 2855108 - RNA, 19 nt, Artificial Sequence
  Description of Artificial Sequence: Synthetic oligonucleotide
gggguggccuugggguugc

SEQ ID NO: 2855109 - RNA, 19 nt, Artificial Sequence
  Description of Artificial Sequence: Synthetic oligonucleotide
gacggggacugcggggccu

SEQ ID NO: 2855110 - RNA, 19 nt, Artificial Sequence
  Description of Artificial Sequence: Synthetic oligonucleotide
ccccaaggccuggcaaggg

SEQ ID NO: 2855111 - RNA, 19 nt, Artificial Sequence
  Description of Artificial Sequence: Synthetic oligonucleotide
ggggacugcggggccuuug

SEQ ID NO: 2855112 - RNA, 19 nt, Artificial Sequence
  Description of Artificial Sequence: Synthetic oligonucleotide
gccagcaucagggcuuacu

SEQ ID NO: 2855113 - RNA, 19 nt, Artificial Sequence
  Description of Artificial Sequence: Synthetic oligonucleotide
ggccuuuggcagagcucug

SEQ ID NO: 2855114 - RNA, 19 nt, Artificial Sequence
  Description of Artificial Sequence: Synthetic oligonucleotide
acggggacugcggggccuu

SEQ ID NO: 2855115 - RNA, 19 nt, Artificial Sequence
  Description of Artificial Sequence: Synthetic oligonucleotide
agcgccaggcagggaggua

SEQ ID NO: 2855116 - RNA, 19 nt, Artificial Sequence
  Description of Artificial Sequence: Synthetic oligonucleotide
ccggugaccgacgugcugu

SEQ ID NO: 2855117 - RNA, 19 nt, Artificial Sequence
  Description of Artificial Sequence: Synthetic oligonucleotide
ccacuagcucguauuggau

SEQ ID NO: 2855118 - RNA, 19 nt, Artificial Sequence
  Description of Artificial Sequence: Synthetic oligonucleotide
ggcuuacucaggccagcuu

SEQ ID NO: 2855119 - RNA, 19 nt, Artificial Sequence
  Description of Artificial Sequence: Synthetic oligonucleotide
gggcuuacucaggccagcu

SEQ ID NO: 2855120 - RNA, 19 nt, Artificial Sequence
  Description of Artificial Sequence: Synthetic oligonucleotide
gcagggcguuguccuggga

SEQ ID NO: 2855121 - RNA, 19 nt, Artificial Sequence
  Description of Artificial Sequence: Synthetic oligonucleotide
gccaaggaucgcaucucau

SEQ ID NO: 2855122 - RNA, 19 nt, Artificial Sequence
  Description of Artificial Sequence: Synthetic oligonucleotide
ggcaagggacagccagcau

SEQ ID NO: 2855123 - RNA, 19 nt, Artificial Sequence
  Description of Artificial Sequence: Synthetic oligonucleotide
gccuccacgaagaguucau

SEQ ID NO: 2855124 - RNA, 19 nt, Artificial Sequence
  Description of Artificial Sequence: Synthetic oligonucleotide
ccuccacgaagaguucaua

SEQ ID NO: 2855125 - RNA, 19 nt, Artificial Sequence
  Description of Artificial Sequence: Synthetic oligonucleotide
cagcgccaggcagggaggu

SEQ ID NO: 2855126 - RNA, 19 nt, Artificial Sequence
  Description of Artificial Sequence: Synthetic oligonucleotide
ccacaguacugguccccgu

SEQ ID NO: 2855127 - RNA, 19 nt, Artificial Sequence
  Description of Artificial Sequence: Synthetic oligonucleotide
cgcgcagaccacucaugcu

SEQ ID NO: 2855128 - RNA, 19 nt, Artificial Sequence
  Description of Artificial Sequence: Synthetic oligonucleotide
cggggccuuuggcagagcu

SEQ ID NO: 2855129 - RNA, 19 nt, Artificial Sequence
  Description of Artificial Sequence: Synthetic oligonucleotide
ccaguggaaugggcauuua

SEQ ID NO: 2855130 - RNA, 19 nt, Artificial Sequence
  Description of Artificial Sequence: Synthetic oligonucleotide
gcggggccuuuggcagagc

SEQ ID NO: 2855131 - RNA, 19 nt, Artificial Sequence
  Description of Artificial Sequence: Synthetic oligonucleotide
cggugaccgacgugcugua

SEQ ID NO: 2855132 - RNA, 19 nt, Artificial Sequence
  Description of Artificial Sequence: Synthetic oligonucleotide
cggggacugcggggccuuu

SEQ ID NO: 2855133 - RNA, 19 nt, Artificial Sequence
  Description of Artificial Sequence: Synthetic oligonucleotide
aagacauugagauagcaag

SEQ ID NO: 2855134 - RNA, 19 nt, Artificial Sequence
  Description of Artificial Sequence: Synthetic oligonucleotide
aaacugaagacauugagau

SEQ ID NO: 2855135 - RNA, 19 nt, Artificial Sequence
  Description of Artificial Sequence: Synthetic oligonucleotide
aauccuuuggagcagaaca

SEQ ID NO: 2855136 - RNA, 19 nt, Artificial Sequence
  Description of Artificial Sequence: Synthetic oligonucleotide
aaugugguaggguagaagu

SEQ ID NO: 2855137 - RNA, 19 nt, Artificial Sequence
  Description of Artificial Sequence: Synthetic oligonucleotide
acugaagacauugagauag

SEQ ID NO: 2855138 - RNA, 19 nt, Artificial Sequence
  Description of Artificial Sequence: Synthetic oligonucleotide
uguuucuccacucuguaag

SEQ ID NO: 2855139 - RNA, 19 nt, Artificial Sequence
  Description of Artificial Sequence: Synthetic oligonucleotide
uuaaagauaggcacagugc

SEQ ID NO: 2855140 - RNA, 19 nt, Artificial Sequence
  Description of Artificial Sequence: Synthetic oligonucleotide
uaaagauaggcacagugca

SEQ ID NO: 2855141 - RNA, 19 nt, Artificial Sequence
  Description of Artificial Sequence: Synthetic oligonucleotide
uugaaggacauguuaaucc

SEQ ID NO: 2855142 - RNA, 19 nt, Artificial Sequence
  Description of Artificial Sequence: Synthetic oligonucleotide
ucuguaaguggcaggaugg

SEQ ID NO: 2855143 - RNA, 19 nt, Artificial Sequence
  Description of Artificial Sequence: Synthetic oligonucleotide
uuuggagcagaacaagcgg

SEQ ID NO: 2855144 - RNA, 19 nt, Artificial Sequence
  Description of Artificial Sequence: Synthetic oligonucleotide
cauguuaauccuuuggagc

SEQ ID NO: 2855145 - RNA, 19 nt, Artificial Sequence
  Description of Artificial Sequence: Synthetic oligonucleotide
auagcaaggggcucaaugg

SEQ ID NO: 2855146 - RNA, 19 nt, Artificial Sequence
  Description of Artificial Sequence: Synthetic oligonucleotide
uggaguuaaagauaggcac

SEQ ID NO: 2855147 - RNA, 19 nt, Artificial Sequence
  Description of Artificial Sequence: Synthetic oligonucleotide
guuaaagauaggcacagug

SEQ ID NO: 2855148 - RNA, 19 nt, Artificial Sequence
  Description of Artificial Sequence: Synthetic oligonucleotide
aggaugguggcauuguggc

SEQ ID NO: 2855149 - RNA, 19 nt, Artificial Sequence
  Description of Artificial Sequence: Synthetic oligonucleotide
cauugagauagcaaggggc

SEQ ID NO: 2855150 - RNA, 19 nt, Artificial Sequence
  Description of Artificial Sequence: Synthetic oligonucleotide
guaggguagaaguagcugg

SEQ ID NO: 2855151 - RNA, 19 nt, Artificial Sequence
  Description of Artificial Sequence: Synthetic oligonucleotide
cagagcuuuaccaagggcc

SEQ ID NO: 2855152 - RNA, 19 nt, Artificial Sequence
  Description of Artificial Sequence: Synthetic oligonucleotide
uuuaccaagggccuguccu

SEQ ID NO: 2855153 - RNA, 19 nt, Artificial Sequence
  Description of Artificial Sequence: Synthetic oligonucleotide
cuuuggagcagaacaagcg

SEQ ID NO: 2855154 - RNA, 19 nt, Artificial Sequence
  Description of Artificial Sequence: Synthetic oligonucleotide
gauagcaaggggcucaaug

SEQ ID NO: 2855155 - RNA, 19 nt, Artificial Sequence
  Description of Artificial Sequence: Synthetic oligonucleotide
ugagcuaaccccacuagca

SEQ ID NO: 2855156 - RNA, 19 nt, Artificial Sequence
  Description of Artificial Sequence: Synthetic oligonucleotide
gacauugagauagcaaggg

SEQ ID NO: 2855157 - RNA, 19 nt, Artificial Sequence
  Description of Artificial Sequence: Synthetic oligonucleotide
acauguuaauccuuuggag

SEQ ID NO: 2855158 - RNA, 19 nt, Artificial Sequence
  Description of Artificial Sequence: Synthetic oligonucleotide
auguuaauccuuuggagca

SEQ ID NO: 2855159 - RNA, 19 nt, Artificial Sequence
  Description of Artificial Sequence: Synthetic oligonucleotide
ucuugaggggauuagcccc

SEQ ID NO: 2855160 - RNA, 19 nt, Artificial Sequence
  Description of Artificial Sequence: Synthetic oligonucleotide
aagucaccagaccuguuuc

SEQ ID NO: 2855161 - RNA, 19 nt, Artificial Sequence
  Description of Artificial Sequence: Synthetic oligonucleotide
ugcgguuguaucgugaggg

SEQ ID NO: 2855162 - RNA, 19 nt, Artificial Sequence
  Description of Artificial Sequence: Synthetic oligonucleotide
ugaucagagcuuuaccaag

SEQ ID NO: 2855163 - RNA, 19 nt, Artificial Sequence
  Description of Artificial Sequence: Synthetic oligonucleotide
agaacaagcggagccagcc

SEQ ID NO: 2855164 - RNA, 19 nt, Artificial Sequence
  Description of Artificial Sequence: Synthetic oligonucleotide
guaaguggcaggauggugg

SEQ ID NO: 2855165 - RNA, 19 nt, Artificial Sequence
  Description of Artificial Sequence: Synthetic oligonucleotide
ugugguaggguagaaguag

SEQ ID NO: 2855166 - RNA, 19 nt, Artificial Sequence
  Description of Artificial Sequence: Synthetic oligonucleotide
uucuccacucuguaagugg

SEQ ID NO: 2855167 - RNA, 19 nt, Artificial Sequence
  Description of Artificial Sequence: Synthetic oligonucleotide
cuucuugaggggauuagcc

SEQ ID NO: 2855168 - RNA, 19 nt, Artificial Sequence
  Description of Artificial Sequence: Synthetic oligonucleotide
ugaaggacauguuaauccu

SEQ ID NO: 2855169 - RNA, 19 nt, Artificial Sequence
  Description of Artificial Sequence: Synthetic oligonucleotide
agcuaaccccacuagcacc

SEQ ID NO: 2855170 - RNA, 19 nt, Artificial Sequence
  Description of Artificial Sequence: Synthetic oligonucleotide
agcaccgccaaacugaaga

SEQ ID NO: 2855171 - RNA, 19 nt, Artificial Sequence
  Description of Artificial Sequence: Synthetic oligonucleotide
gacauguuaauccuuugga

SEQ ID NO: 2855172 - RNA, 19 nt, Artificial Sequence
  Description of Artificial Sequence: Synthetic oligonucleotide
aaagauaggcacagugcac

SEQ ID NO: 2855173 - RNA, 19 nt, Artificial Sequence
  Description of Artificial Sequence: Synthetic oligonucleotide
guugaucagagcuuuacca

SEQ ID NO: 2855174 - RNA, 19 nt, Artificial Sequence
  Description of Artificial Sequence: Synthetic oligonucleotide
uguugaucagagcuuuacc

SEQ ID NO: 2855175 - RNA, 19 nt, Artificial Sequence
  Description of Artificial Sequence: Synthetic oligonucleotide
gaugaccacaccuaugaca

SEQ ID NO: 2855176 - RNA, 19 nt, Artificial Sequence
  Description of Artificial Sequence: Synthetic oligonucleotide
acauugagauagcaagggg

SEQ ID NO: 2855177 - RNA, 19 nt, Artificial Sequence
  Description of Artificial Sequence: Synthetic oligonucleotide
aacaagcggagccagccug

SEQ ID NO: 2855178 - RNA, 19 nt, Artificial Sequence
  Description of Artificial Sequence: Synthetic oligonucleotide
augaccacaccuaugacag

SEQ ID NO: 2855179 - RNA, 19 nt, Artificial Sequence
  Description of Artificial Sequence: Synthetic oligonucleotide
aagauaggcacagugcaca

SEQ ID NO: 2855180 - RNA, 19 nt, Artificial Sequence
  Description of Artificial Sequence: Synthetic oligonucleotide
uguaucgugaggggcaagg

SEQ ID NO: 2855181 - RNA, 19 nt, Artificial Sequence
  Description of Artificial Sequence: Synthetic oligonucleotide
gaguuaaagauaggcacag

SEQ ID NO: 2855182 - RNA, 19 nt, Artificial Sequence
  Description of Artificial Sequence: Synthetic oligonucleotide
ucugagcuaaccccacuag

SEQ ID NO: 2855183 - RNA, 19 nt, Artificial Sequence
  Description of Artificial Sequence: Synthetic oligonucleotide
uucuugaggggauuagccc

SEQ ID NO: 2855184 - RNA, 19 nt, Artificial Sequence
  Description of Artificial Sequence: Synthetic oligonucleotide
gaucagagcuuuaccaagg

SEQ ID NO: 2855185 - RNA, 19 nt, Artificial Sequence
  Description of Artificial Sequence: Synthetic oligonucleotide
gguagaaguagcuggugcg

SEQ ID NO: 2855186 - RNA, 19 nt, Artificial Sequence
  Description of Artificial Sequence: Synthetic oligonucleotide
ucuccacucuguaaguggc

SEQ ID NO: 2855187 - RNA, 19 nt, Artificial Sequence
  Description of Artificial Sequence: Synthetic oligonucleotide
gagcagaacaagcggagcc

SEQ ID NO: 2855188 - RNA, 19 nt, Artificial Sequence
  Description of Artificial Sequence: Synthetic oligonucleotide
ucuccgagaaugugguagg

SEQ ID NO: 2855189 - RNA, 19 nt, Artificial Sequence
  Description of Artificial Sequence: Synthetic oligonucleotide
aguggggccucacugggac

SEQ ID NO: 2855190 - RNA, 19 nt, Artificial Sequence
  Description of Artificial Sequence: Synthetic oligonucleotide
uugaucagagcuuuaccaa

SEQ ID NO: 2855191 - RNA, 19 nt, Artificial Sequence
  Description of Artificial Sequence: Synthetic oligonucleotide
uggagcagaacaagcggag

SEQ ID NO: 2855192 - RNA, 19 nt, Artificial Sequence
  Description of Artificial Sequence: Synthetic oligonucleotide
caaacugaagacauugaga

SEQ ID NO: 2855193 - RNA, 19 nt, Artificial Sequence
  Description of Artificial Sequence: Synthetic oligonucleotide
acuucuugaggggauuagc

SEQ ID NO: 2855194 - RNA, 19 nt, Artificial Sequence
  Description of Artificial Sequence: Synthetic oligonucleotide
ucugugaugaccacaccua

SEQ ID NO: 2855195 - RNA, 19 nt, Artificial Sequence
  Description of Artificial Sequence: Synthetic oligonucleotide
uaucgugaggggcaagggc

SEQ ID NO: 2855196 - RNA, 19 nt, Artificial Sequence
  Description of Artificial Sequence: Synthetic oligonucleotide
aucagagcuuuaccaaggg

SEQ ID NO: 2855197 - RNA, 19 nt, Artificial Sequence
  Description of Artificial Sequence: Synthetic oligonucleotide
ucagagcucuccgagaaug

SEQ ID NO: 2855198 - RNA, 19 nt, Artificial Sequence
  Description of Artificial Sequence: Synthetic oligonucleotide
ggcauuguggcuuuucugc

SEQ ID NO: 2855199 - RNA, 19 nt, Artificial Sequence
  Description of Artificial Sequence: Synthetic oligonucleotide
aggaccuccaggucacgcc

SEQ ID NO: 2855200 - RNA, 19 nt, Artificial Sequence
  Description of Artificial Sequence: Synthetic oligonucleotide
ucagagcuuuaccaagggc

SEQ ID NO: 2855201 - RNA, 19 nt, Artificial Sequence
  Description of Artificial Sequence: Synthetic oligonucleotide
ugggagucugagcuaaccc

SEQ ID NO: 2855202 - RNA, 19 nt, Artificial Sequence
  Description of Artificial Sequence: Synthetic oligonucleotide
uuugaaggacauguuaauc

SEQ ID NO: 2855203 - RNA, 19 nt, Artificial Sequence
  Description of Artificial Sequence: Synthetic oligonucleotide
uaagucaccagaccuguuu

SEQ ID NO: 2855204 - RNA, 19 nt, Artificial Sequence
  Description of Artificial Sequence: Synthetic oligonucleotide
aucgugaggggcaagggcg

SEQ ID NO: 2855205 - RNA, 19 nt, Artificial Sequence
  Description of Artificial Sequence: Synthetic oligonucleotide
ggacauguuaauccuuugg

SEQ ID NO: 2855206 - RNA, 19 nt, Artificial Sequence
  Description of Artificial Sequence: Synthetic oligonucleotide
cugucugugaugaccacac

SEQ ID NO: 2855207 - RNA, 19 nt, Artificial Sequence
  Description of Artificial Sequence: Synthetic oligonucleotide
agacauugagauagcaagg

SEQ ID NO: 2855208 - RNA, 19 nt, Artificial Sequence
  Description of Artificial Sequence: Synthetic oligonucleotide
ucaaugggcugugaggacc

SEQ ID NO: 2855209 - RNA, 19 nt, Artificial Sequence
  Description of Artificial Sequence: Synthetic oligonucleotide
accuaugacagcacuugcc

SEQ ID NO: 2855210 - RNA, 19 nt, Artificial Sequence
  Description of Artificial Sequence: Synthetic oligonucleotide
agcuggugcgguuguaucg

SEQ ID NO: 2855211 - RNA, 19 nt, Artificial Sequence
  Description of Artificial Sequence: Synthetic oligonucleotide
auugagauagcaaggggcu

SEQ ID NO: 2855212 - RNA, 19 nt, Artificial Sequence
  Description of Artificial Sequence: Synthetic oligonucleotide
ucugcccuggaguuaaaga

SEQ ID NO: 2855213 - RNA, 19 nt, Artificial Sequence
  Description of Artificial Sequence: Synthetic oligonucleotide
ugagauagcaaggggcuca

SEQ ID NO: 2855214 - RNA, 19 nt, Artificial Sequence
  Description of Artificial Sequence: Synthetic oligonucleotide
acgccuaagucaccagacc

SEQ ID NO: 2855215 - RNA, 19 nt, Artificial Sequence
  Description of Artificial Sequence: Synthetic oligonucleotide
gauggcugugcucagagcu

SEQ ID NO: 2855216 - RNA, 19 nt, Artificial Sequence
  Description of Artificial Sequence: Synthetic oligonucleotide
cucuccgagaaugugguag

SEQ ID NO: 2855217 - RNA, 19 nt, Artificial Sequence
  Description of Artificial Sequence: Synthetic oligonucleotide
gacagcacuugccacccag

SEQ ID NO: 2855218 - RNA, 19 nt, Artificial Sequence
  Description of Artificial Sequence: Synthetic oligonucleotide
acuagcaccgccaaacuga

SEQ ID NO: 2855219 - RNA, 19 nt, Artificial Sequence
  Description of Artificial Sequence: Synthetic oligonucleotide
cucuguaaguggcaggaug

SEQ ID NO: 2855220 - RNA, 19 nt, Artificial Sequence
  Description of Artificial Sequence: Synthetic oligonucleotide
uaaguggcaggaugguggc

SEQ ID NO: 2855221 - RNA, 19 nt, Artificial Sequence
  Description of Artificial Sequence: Synthetic oligonucleotide
uaggguagaaguagcuggu

SEQ ID NO: 2855222 - RNA, 19 nt, Artificial Sequence
  Description of Artificial Sequence: Synthetic oligonucleotide
guagaaguagcuggugcgg

SEQ ID NO: 2855223 - RNA, 19 nt, Artificial Sequence
  Description of Artificial Sequence: Synthetic oligonucleotide
caggucacgccuaagucac

SEQ ID NO: 2855224 - RNA, 19 nt, Artificial Sequence
  Description of Artificial Sequence: Synthetic oligonucleotide
uguaacucggggugggagu

SEQ ID NO: 2855225 - RNA, 19 nt, Artificial Sequence
  Description of Artificial Sequence: Synthetic oligonucleotide
aggggauuagccccuccac

SEQ ID NO: 2855226 - RNA, 19 nt, Artificial Sequence
  Description of Artificial Sequence: Synthetic oligonucleotide
uuuuguugaucagagcuuu

SEQ ID NO: 2855227 - RNA, 19 nt, Artificial Sequence
  Description of Artificial Sequence: Synthetic oligonucleotide
acaguggggccucacuggg

SEQ ID NO: 2855228 - RNA, 19 nt, Artificial Sequence
  Description of Artificial Sequence: Synthetic oligonucleotide
cauuguggcuuuucugccc

SEQ ID NO: 2855229 - RNA, 19 nt, Artificial Sequence
  Description of Artificial Sequence: Synthetic oligonucleotide
uguuaauccuuuggagcag

SEQ ID NO: 2855230 - RNA, 19 nt, Artificial Sequence
  Description of Artificial Sequence: Synthetic oligonucleotide
agcacuugccacccagcac

SEQ ID NO: 2855231 - RNA, 19 nt, Artificial Sequence
  Description of Artificial Sequence: Synthetic oligonucleotide
auuguggcuuuucugcccu

SEQ ID NO: 2855232 - RNA, 19 nt, Artificial Sequence
  Description of Artificial Sequence: Synthetic oligonucleotide
ugaagacauugagauagca

SEQ ID NO: 2855233 - RNA, 19 nt, Artificial Sequence
  Description of Artificial Sequence: Synthetic oligonucleotide
uuguugaucagagcuuuac

SEQ ID NO: 2855234 - RNA, 19 nt, Artificial Sequence
  Description of Artificial Sequence: Synthetic oligonucleotide
acaccuaugacagcacuug

SEQ ID NO: 2855235 - RNA, 19 nt, Artificial Sequence
  Description of Artificial Sequence: Synthetic oligonucleotide
gaaugugguaggguagaag

SEQ ID NO: 2855236 - RNA, 19 nt, Artificial Sequence
  Description of Artificial Sequence: Synthetic oligonucleotide
ucacgccuaagucaccaga

SEQ ID NO: 2855237 - RNA, 19 nt, Artificial Sequence
  Description of Artificial Sequence: Synthetic oligonucleotide
uuuucugcccuggaguuaa

SEQ ID NO: 2855238 - RNA, 19 nt, Artificial Sequence
  Description of Artificial Sequence: Synthetic oligonucleotide
uccuuuggagcagaacaag

SEQ ID NO: 2855239 - RNA, 19 nt, Artificial Sequence
  Description of Artificial Sequence: Synthetic oligonucleotide
uccacucuguaaguggcag

SEQ ID NO: 2855240 - RNA, 19 nt, Artificial Sequence
  Description of Artificial Sequence: Synthetic oligonucleotide
cugagcuaaccccacuagc

SEQ ID NO: 2855241 - RNA, 19 nt, Artificial Sequence
  Description of Artificial Sequence: Synthetic oligonucleotide
uccaggucacgccuaaguc

SEQ ID NO: 2855242 - RNA, 19 nt, Artificial Sequence
  Description of Artificial Sequence: Synthetic oligonucleotide
uggcuuuucugcccuggag

SEQ ID NO: 2855243 - RNA, 19 nt, Artificial Sequence
  Description of Artificial Sequence: Synthetic oligonucleotide
uguaaguggcaggauggug

SEQ ID NO: 2855244 - RNA, 19 nt, Artificial Sequence
  Description of Artificial Sequence: Synthetic oligonucleotide
agauaggcacagugcacag

SEQ ID NO: 2855245 - RNA, 19 nt, Artificial Sequence
  Description of Artificial Sequence: Synthetic oligonucleotide
cacaguggggccucacugg

SEQ ID NO: 2855246 - RNA, 19 nt, Artificial Sequence
  Description of Artificial Sequence: Synthetic oligonucleotide
ucugacuucuugaggggau

SEQ ID NO: 2855247 - RNA, 19 nt, Artificial Sequence
  Description of Artificial Sequence: Synthetic oligonucleotide
ccuggaguuaaagauaggc

SEQ ID NO: 2855248 - RNA, 19 nt, Artificial Sequence
  Description of Artificial Sequence: Synthetic oligonucleotide
ugugcucagagcucuccga

SEQ ID NO: 2855249 - RNA, 19 nt, Artificial Sequence
  Description of Artificial Sequence: Synthetic oligonucleotide
gaagacauugagauagcaa

SEQ ID NO: 2855250 - RNA, 19 nt, Artificial Sequence
  Description of Artificial Sequence: Synthetic oligonucleotide
ccaaacugaagacauugag

SEQ ID NO: 2855251 - RNA, 19 nt, Artificial Sequence
  Description of Artificial Sequence: Synthetic oligonucleotide
gagcuaaccccacuagcac

SEQ ID NO: 2855252 - RNA, 19 nt, Artificial Sequence
  Description of Artificial Sequence: Synthetic oligonucleotide
cuaugacagcacuugccac

SEQ ID NO: 2855253 - RNA, 19 nt, Artificial Sequence
  Description of Artificial Sequence: Synthetic oligonucleotide
aacugaagacauugagaua

SEQ ID NO: 2855254 - RNA, 19 nt, Artificial Sequence
  Description of Artificial Sequence: Synthetic oligonucleotide
uguggcuuuucugcccugg

SEQ ID NO: 2855255 - RNA, 19 nt, Artificial Sequence
  Description of Artificial Sequence: Synthetic oligonucleotide
uuucuccacucuguaagug

SEQ ID NO: 2855256 - RNA, 19 nt, Artificial Sequence
  Description of Artificial Sequence: Synthetic oligonucleotide
uggcauuguggcuuuucug

SEQ ID NO: 2855257 - RNA, 19 nt, Artificial Sequence
  Description of Artificial Sequence: Synthetic oligonucleotide
uaggcacagugcacagugg

SEQ ID NO: 2855258 - RNA, 19 nt, Artificial Sequence
  Description of Artificial Sequence: Synthetic oligonucleotide
aagcggagccagccugccc

SEQ ID NO: 2855259 - RNA, 19 nt, Artificial Sequence
  Description of Artificial Sequence: Synthetic oligonucleotide
ggcucaaugggcugugagg

SEQ ID NO: 2855260 - RNA, 19 nt, Artificial Sequence
  Description of Artificial Sequence: Synthetic oligonucleotide
ugggaccugucugugauga

SEQ ID NO: 2855261 - RNA, 19 nt, Artificial Sequence
  Description of Artificial Sequence: Synthetic oligonucleotide
cacgccuaagucaccagac

SEQ ID NO: 2855262 - RNA, 19 nt, Artificial Sequence
  Description of Artificial Sequence: Synthetic oligonucleotide
aaggacauguuaauccuuu

SEQ ID NO: 2855263 - RNA, 19 nt, Artificial Sequence
  Description of Artificial Sequence: Synthetic oligonucleotide
gaccacaccuaugacagca

SEQ ID NO: 2855264 - RNA, 19 nt, Artificial Sequence
  Description of Artificial Sequence: Synthetic oligonucleotide
acugggaccugucugugau

SEQ ID NO: 2855265 - RNA, 19 nt, Artificial Sequence
  Description of Artificial Sequence: Synthetic oligonucleotide
gggagucugagcuaacccc

SEQ ID NO: 2855266 - RNA, 19 nt, Artificial Sequence
  Description of Artificial Sequence: Synthetic oligonucleotide
agcggagccagccugccca

SEQ ID NO: 2855267 - RNA, 19 nt, Artificial Sequence
  Description of Artificial Sequence: Synthetic oligonucleotide
gggcaagggcguuugaagg

SEQ ID NO: 2855268 - RNA, 19 nt, Artificial Sequence
  Description of Artificial Sequence: Synthetic oligonucleotide
cugaagacauugagauagc

SEQ ID NO: 2855269 - RNA, 19 nt, Artificial Sequence
  Description of Artificial Sequence: Synthetic oligonucleotide
ugggcugugaggaccucca

SEQ ID NO: 2855270 - RNA, 19 nt, Artificial Sequence
  Description of Artificial Sequence: Synthetic oligonucleotide
ugcccuggaguuaaagaua

SEQ ID NO: 2855271 - RNA, 19 nt, Artificial Sequence
  Description of Artificial Sequence: Synthetic oligonucleotide
ugaugaccacaccuaugac

SEQ ID NO: 2855272 - RNA, 19 nt, Artificial Sequence
  Description of Artificial Sequence: Synthetic oligonucleotide
agccagccugcccacgagc

SEQ ID NO: 2855273 - RNA, 19 nt, Artificial Sequence
  Description of Artificial Sequence: Synthetic oligonucleotide
aggacauguuaauccuuug

SEQ ID NO: 2855274 - RNA, 19 nt, Artificial Sequence
  Description of Artificial Sequence: Synthetic oligonucleotide
uuaauccuuuggagcagaa

SEQ ID NO: 2855275 - RNA, 19 nt, Artificial Sequence
  Description of Artificial Sequence: Synthetic oligonucleotide
uugccacccagcacuggag

SEQ ID NO: 2855276 - RNA, 19 nt, Artificial Sequence
  Description of Artificial Sequence: Synthetic oligonucleotide
agagcuuuaccaagggccu

SEQ ID NO: 2855277 - RNA, 19 nt, Artificial Sequence
  Description of Artificial Sequence: Synthetic oligonucleotide
uccuguaacucgggguggg

SEQ ID NO: 2855278 - RNA, 19 nt, Artificial Sequence
  Description of Artificial Sequence: Synthetic oligonucleotide
uuaccaagggccuguccuc

SEQ ID NO: 2855279 - RNA, 19 nt, Artificial Sequence
  Description of Artificial Sequence: Synthetic oligonucleotide
cagcacuggagacaccagc

SEQ ID NO: 2855280 - RNA, 19 nt, Artificial Sequence
  Description of Artificial Sequence: Synthetic oligonucleotide
agaccuguuucuccacucu

SEQ ID NO: 2855281 - RNA, 19 nt, Artificial Sequence
  Description of Artificial Sequence: Synthetic oligonucleotide
cacagugcacaguggggcc

SEQ ID NO: 2855282 - RNA, 19 nt, Artificial Sequence
  Description of Artificial Sequence: Synthetic oligonucleotide
gugcucagagcucuccgag

SEQ ID NO: 2855283 - RNA, 19 nt, Artificial Sequence
  Description of Artificial Sequence: Synthetic oligonucleotide
aaguagcuggugcgguugu

SEQ ID NO: 2855284 - RNA, 19 nt, Artificial Sequence
  Description of Artificial Sequence: Synthetic oligonucleotide
ggguagaaguagcuggugc

SEQ ID NO: 2855285 - RNA, 19 nt, Artificial Sequence
  Description of Artificial Sequence: Synthetic oligonucleotide
gacuucuugaggggauuag

SEQ ID NO: 2855286 - RNA, 19 nt, Artificial Sequence
  Description of Artificial Sequence: Synthetic oligonucleotide
accagaccuguuucuccac

SEQ ID NO: 2855287 - RNA, 19 nt, Artificial Sequence
  Description of Artificial Sequence: Synthetic oligonucleotide
gagaaugugguaggguaga

SEQ ID NO: 2855288 - RNA, 19 nt, Artificial Sequence
  Description of Artificial Sequence: Synthetic oligonucleotide
cugugcucagagcucuccg

SEQ ID NO: 2855289 - RNA, 19 nt, Artificial Sequence
  Description of Artificial Sequence: Synthetic oligonucleotide
uaauccuuuggagcagaac

SEQ ID NO: 2855290 - RNA, 19 nt, Artificial Sequence
  Description of Artificial Sequence: Synthetic oligonucleotide
gcuaaccccacuagcaccg

SEQ ID NO: 2855291 - RNA, 19 nt, Artificial Sequence
  Description of Artificial Sequence: Synthetic oligonucleotide
ugcccacgagcacagcucu

SEQ ID NO: 2855292 - RNA, 19 nt, Artificial Sequence
  Description of Artificial Sequence: Synthetic oligonucleotide
acaagcggagccagccugc

SEQ ID NO: 2855293 - RNA, 19 nt, Artificial Sequence
  Description of Artificial Sequence: Synthetic oligonucleotide
augggcugugaggaccucc

SEQ ID NO: 2855294 - RNA, 19 nt, Artificial Sequence
  Description of Artificial Sequence: Synthetic oligonucleotide
ggugcgguuguaucgugag

SEQ ID NO: 2855295 - RNA, 19 nt, Artificial Sequence
  Description of Artificial Sequence: Synthetic oligonucleotide
ugucugugaugaccacacc

SEQ ID NO: 2855296 - RNA, 19 nt, Artificial Sequence
  Description of Artificial Sequence: Synthetic oligonucleotide
ccuuuggagcagaacaagc

SEQ ID NO: 2855297 - RNA, 19 nt, Artificial Sequence
  Description of Artificial Sequence: Synthetic oligonucleotide
uuuguugaucagagcuuua

SEQ ID NO: 2855298 - RNA, 19 nt, Artificial Sequence
  Description of Artificial Sequence: Synthetic oligonucleotide
ugcacaguggggccucacu

SEQ ID NO: 2855299 - RNA, 19 nt, Artificial Sequence
  Description of Artificial Sequence: Synthetic oligonucleotide
cuuuaccaagggccugucc

SEQ ID NO: 2855300 - RNA, 19 nt, Artificial Sequence
  Description of Artificial Sequence: Synthetic oligonucleotide
guaucgugaggggcaaggg

SEQ ID NO: 2855301 - RNA, 19 nt, Artificial Sequence
  Description of Artificial Sequence: Synthetic oligonucleotide
acuggagacaccagcagau

SEQ ID NO: 2855302 - RNA, 19 nt, Artificial Sequence
  Description of Artificial Sequence: Synthetic oligonucleotide
uaaccccacuagcaccgcc

SEQ ID NO: 2855303 - RNA, 19 nt, Artificial Sequence
  Description of Artificial Sequence: Synthetic oligonucleotide
guccuccuccuguaacucg

SEQ ID NO: 2855304 - RNA, 19 nt, Artificial Sequence
  Description of Artificial Sequence: Synthetic oligonucleotide
ggcugugaggaccuccagg

SEQ ID NO: 2855305 - RNA, 19 nt, Artificial Sequence
  Description of Artificial Sequence: Synthetic oligonucleotide
gucugugaugaccacaccu

SEQ ID NO: 2855306 - RNA, 19 nt, Artificial Sequence
  Description of Artificial Sequence: Synthetic oligonucleotide
accagcagauggcugugcu

SEQ ID NO: 2855307 - RNA, 19 nt, Artificial Sequence
  Description of Artificial Sequence: Synthetic oligonucleotide
ugcucagagcucuccgaga

SEQ ID NO: 2855308 - RNA, 19 nt, Artificial Sequence
  Description of Artificial Sequence: Synthetic oligonucleotide
caccuaugacagcacuugc

SEQ ID NO: 2855309 - RNA, 19 nt, Artificial Sequence
  Description of Artificial Sequence: Synthetic oligonucleotide
ggggcaagggcguuugaag

SEQ ID NO: 2855310 - RNA, 19 nt, Artificial Sequence
  Description of Artificial Sequence: Synthetic oligonucleotide
agcagaacaagcggagcca

SEQ ID NO: 2855311 - RNA, 19 nt, Artificial Sequence
  Description of Artificial Sequence: Synthetic oligonucleotide
cacagcucugacuucuuga

SEQ ID NO: 2855312 - RNA, 19 nt, Artificial Sequence
  Description of Artificial Sequence: Synthetic oligonucleotide
gaccugucugugaugacca

SEQ ID NO: 2855313 - RNA, 19 nt, Artificial Sequence
  Description of Artificial Sequence: Synthetic oligonucleotide
ggaguuaaagauaggcaca

SEQ ID NO: 2855314 - RNA, 19 nt, Artificial Sequence
  Description of Artificial Sequence: Synthetic oligonucleotide
cacuagcaccgccaaacug

SEQ ID NO: 2855315 - RNA, 19 nt, Artificial Sequence
  Description of Artificial Sequence: Synthetic oligonucleotide
uggugcgguuguaucguga

SEQ ID NO: 2855316 - RNA, 19 nt, Artificial Sequence
  Description of Artificial Sequence: Synthetic oligonucleotide
uucugcccuggaguuaaag

SEQ ID NO: 2855317 - RNA, 19 nt, Artificial Sequence
  Description of Artificial Sequence: Synthetic oligonucleotide
aguggcaggaugguggcau

SEQ ID NO: 2855318 - RNA, 19 nt, Artificial Sequence
  Description of Artificial Sequence: Synthetic oligonucleotide
accgccaaacugaagacau

SEQ ID NO: 2855319 - RNA, 19 nt, Artificial Sequence
  Description of Artificial Sequence: Synthetic oligonucleotide
gguaggguagaaguagcug

SEQ ID NO: 2855320 - RNA, 19 nt, Artificial Sequence
  Description of Artificial Sequence: Synthetic oligonucleotide
gggauuagccccuccacuc

SEQ ID NO: 2855321 - RNA, 19 nt, Artificial Sequence
  Description of Artificial Sequence: Synthetic oligonucleotide
agagcucuccgagaaugug

SEQ ID NO: 2855322 - RNA, 19 nt, Artificial Sequence
  Description of Artificial Sequence: Synthetic oligonucleotide
uccgagaaugugguagggu

SEQ ID NO: 2855323 - RNA, 19 nt, Artificial Sequence
  Description of Artificial Sequence: Synthetic oligonucleotide
aaggggcucaaugggcugu

SEQ ID NO: 2855324 - RNA, 19 nt, Artificial Sequence
  Description of Artificial Sequence: Synthetic oligonucleotide
cuguaacucggggugggag

SEQ ID NO: 2855325 - RNA, 19 nt, Artificial Sequence
  Description of Artificial Sequence: Synthetic oligonucleotide
gugguaggguagaaguagc

SEQ ID NO: 2855326 - RNA, 19 nt, Artificial Sequence
  Description of Artificial Sequence: Synthetic oligonucleotide
accugucugugaugaccac

SEQ ID NO: 2855327 - RNA, 19 nt, Artificial Sequence
  Description of Artificial Sequence: Synthetic oligonucleotide
ucgugaggggcaagggcgu

SEQ ID NO: 2855328 - RNA, 19 nt, Artificial Sequence
  Description of Artificial Sequence: Synthetic oligonucleotide
uaccaagggccuguccucc

SEQ ID NO: 2855329 - RNA, 19 nt, Artificial Sequence
  Description of Artificial Sequence: Synthetic oligonucleotide
gcauuguggcuuuucugcc

SEQ ID NO: 2855330 - RNA, 19 nt, Artificial Sequence
  Description of Artificial Sequence: Synthetic oligonucleotide
cucaaugggcugugaggac

SEQ ID NO: 2855331 - RNA, 19 nt, Artificial Sequence
  Description of Artificial Sequence: Synthetic oligonucleotide
cagaccuguuucuccacuc

SEQ ID NO: 2855332 - RNA, 19 nt, Artificial Sequence
  Description of Artificial Sequence: Synthetic oligonucleotide
ugaggggauuagccccucc

SEQ ID NO: 2855333 - RNA, 19 nt, Artificial Sequence
  Description of Artificial Sequence: Synthetic oligonucleotide
cagaacaagcggagccagc

SEQ ID NO: 2855334 - RNA, 19 nt, Artificial Sequence
  Description of Artificial Sequence: Synthetic oligonucleotide
cacucuguaaguggcagga

SEQ ID NO: 2855335 - RNA, 19 nt, Artificial Sequence
  Description of Artificial Sequence: Synthetic oligonucleotide
ggaccugucugugaugacc

SEQ ID NO: 2855336 - RNA, 19 nt, Artificial Sequence
  Description of Artificial Sequence: Synthetic oligonucleotide
guuugaaggacauguuaau

SEQ ID NO: 2855337 - RNA, 19 nt, Artificial Sequence
  Description of Artificial Sequence: Synthetic oligonucleotide
cuugccacccagcacugga

SEQ ID NO: 2855338 - RNA, 19 nt, Artificial Sequence
  Description of Artificial Sequence: Synthetic oligonucleotide
gugcgguuguaucgugagg

SEQ ID NO: 2855339 - RNA, 19 nt, Artificial Sequence
  Description of Artificial Sequence: Synthetic oligonucleotide
agcuuuaccaagggccugu

SEQ ID NO: 2855340 - RNA, 19 nt, Artificial Sequence
  Description of Artificial Sequence: Synthetic oligonucleotide
cagcagauggcugugcuca

SEQ ID NO: 2855341 - RNA, 19 nt, Artificial Sequence
  Description of Artificial Sequence: Synthetic oligonucleotide
aacucggggugggagucug

SEQ ID NO: 2855342 - RNA, 19 nt, Artificial Sequence
  Description of Artificial Sequence: Synthetic oligonucleotide
guuaauccuuuggagcaga

SEQ ID NO: 2855343 - RNA, 19 nt, Artificial Sequence
  Description of Artificial Sequence: Synthetic oligonucleotide
agucugagcuaaccccacu

SEQ ID NO: 2855344 - RNA, 19 nt, Artificial Sequence
  Description of Artificial Sequence: Synthetic oligonucleotide
gcccuggaguuaaagauag

SEQ ID NO: 2855345 - RNA, 19 nt, Artificial Sequence
  Description of Artificial Sequence: Synthetic oligonucleotide
uugagauagcaaggggcuc

SEQ ID NO: 2855346 - RNA, 19 nt, Artificial Sequence
  Description of Artificial Sequence: Synthetic oligonucleotide
gaugguggcauuguggcuu

SEQ ID NO: 2855347 - RNA, 19 nt, Artificial Sequence
  Description of Artificial Sequence: Synthetic oligonucleotide
gcucugacuucuugagggg

SEQ ID NO: 2855348 - RNA, 19 nt, Artificial Sequence
  Description of Artificial Sequence: Synthetic oligonucleotide
gguuguaucgugaggggca

SEQ ID NO: 2855349 - RNA, 19 nt, Artificial Sequence
  Description of Artificial Sequence: Synthetic oligonucleotide
auggcugugcucagagcuc

SEQ ID NO: 2855350 - RNA, 19 nt, Artificial Sequence
  Description of Artificial Sequence: Synthetic oligonucleotide
aguuaaagauaggcacagu

SEQ ID NO: 2855351 - RNA, 19 nt, Artificial Sequence
  Description of Artificial Sequence: Synthetic oligonucleotide
gugggagucugagcuaacc

SEQ ID NO: 2855352 - RNA, 19 nt, Artificial Sequence
  Description of Artificial Sequence: Synthetic oligonucleotide
ccuaugacagcacuugcca

SEQ ID NO: 2855353 - RNA, 19 nt, Artificial Sequence
  Description of Artificial Sequence: Synthetic oligonucleotide
uagcuggugcgguuguauc

SEQ ID NO: 2855354 - RNA, 19 nt, Artificial Sequence
  Description of Artificial Sequence: Synthetic oligonucleotide
agcagauggcugugcucag

SEQ ID NO: 2855355 - RNA, 19 nt, Artificial Sequence
  Description of Artificial Sequence: Synthetic oligonucleotide
gcucaaugggcugugagga

SEQ ID NO: 2855356 - RNA, 19 nt, Artificial Sequence
  Description of Artificial Sequence: Synthetic oligonucleotide
uggcugugcucagagcucu

SEQ ID NO: 2855357 - RNA, 19 nt, Artificial Sequence
  Description of Artificial Sequence: Synthetic oligonucleotide
aaugggcugugaggaccuc

SEQ ID NO: 2855358 - RNA, 19 nt, Artificial Sequence
  Description of Artificial Sequence: Synthetic oligonucleotide
uguccuccuccuguaacuc

SEQ ID NO: 2855359 - RNA, 19 nt, Artificial Sequence
  Description of Artificial Sequence: Synthetic oligonucleotide
aagggcguuugaaggacau

SEQ ID NO: 2855360 - RNA, 19 nt, Artificial Sequence
  Description of Artificial Sequence: Synthetic oligonucleotide
accacaccuaugacagcac

SEQ ID NO: 2855361 - RNA, 19 nt, Artificial Sequence
  Description of Artificial Sequence: Synthetic oligonucleotide
gaggaccuccaggucacgc

SEQ ID NO: 2855362 - RNA, 19 nt, Artificial Sequence
  Description of Artificial Sequence: Synthetic oligonucleotide
ugaccacaccuaugacagc

SEQ ID NO: 2855363 - RNA, 19 nt, Artificial Sequence
  Description of Artificial Sequence: Synthetic oligonucleotide
gcacagugcacaguggggc

SEQ ID NO: 2855364 - RNA, 19 nt, Artificial Sequence
  Description of Artificial Sequence: Synthetic oligonucleotide
guaacucggggugggaguc

SEQ ID NO: 2855365 - RNA, 19 nt, Artificial Sequence
  Description of Artificial Sequence: Synthetic oligonucleotide
caaggggcucaaugggcug

SEQ ID NO: 2855366 - RNA, 19 nt, Artificial Sequence
  Description of Artificial Sequence: Synthetic oligonucleotide
cuccgagaaugugguaggg

SEQ ID NO: 2855367 - RNA, 19 nt, Artificial Sequence
  Description of Artificial Sequence: Synthetic oligonucleotide
gcacaguggggccucacug

SEQ ID NO: 2855368 - RNA, 19 nt, Artificial Sequence
  Description of Artificial Sequence: Synthetic oligonucleotide
gucacgccuaagucaccag

SEQ ID NO: 2855369 - RNA, 19 nt, Artificial Sequence
  Description of Artificial Sequence: Synthetic oligonucleotide
ucacugggaccugucugug

SEQ ID NO: 2855370 - RNA, 19 nt, Artificial Sequence
  Description of Artificial Sequence: Synthetic oligonucleotide
ucggggugggagucugagc

SEQ ID NO: 2855371 - RNA, 19 nt, Artificial Sequence
  Description of Artificial Sequence: Synthetic oligonucleotide
gucugagcuaaccccacua

SEQ ID NO: 2855372 - RNA, 19 nt, Artificial Sequence
  Description of Artificial Sequence: Synthetic oligonucleotide
cccacuagcaccgccaaac

SEQ ID NO: 2855373 - RNA, 19 nt, Artificial Sequence
  Description of Artificial Sequence: Synthetic oligonucleotide
ugacuucuugaggggauua

SEQ ID NO: 2855374 - RNA, 19 nt, Artificial Sequence
  Description of Artificial Sequence: Synthetic oligonucleotide
cugcccuggaguuaaagau

SEQ ID NO: 2855375 - RNA, 19 nt, Artificial Sequence
  Description of Artificial Sequence: Synthetic oligonucleotide
ggcacagugcacagugggg

SEQ ID NO: 2855376 - RNA, 19 nt, Artificial Sequence
  Description of Artificial Sequence: Synthetic oligonucleotide
gcgguuguaucgugagggg

SEQ ID NO: 2855377 - RNA, 19 nt, Artificial Sequence
  Description of Artificial Sequence: Synthetic oligonucleotide
ggcaagggcguuugaagga

SEQ ID NO: 2855378 - RNA, 19 nt, Artificial Sequence
  Description of Artificial Sequence: Synthetic oligonucleotide
gcugugaggaccuccaggu

SEQ ID NO: 2855379 - RNA, 19 nt, Artificial Sequence
  Description of Artificial Sequence: Synthetic oligonucleotide
gagcuuuaccaagggccug

SEQ ID NO: 2855380 - RNA, 19 nt, Artificial Sequence
  Description of Artificial Sequence: Synthetic oligonucleotide
cuagcaccgccaaacugaa

SEQ ID NO: 2855381 - RNA, 19 nt, Artificial Sequence
  Description of Artificial Sequence: Synthetic oligonucleotide
gucaccagaccuguuucuc

SEQ ID NO: 2855382 - RNA, 19 nt, Artificial Sequence
  Description of Artificial Sequence: Synthetic oligonucleotide
ggagucugagcuaacccca

SEQ ID NO: 2855383 - RNA, 19 nt, Artificial Sequence
  Description of Artificial Sequence: Synthetic oligonucleotide
cgagaaugugguaggguag

SEQ ID NO: 2855384 - RNA, 19 nt, Artificial Sequence
  Description of Artificial Sequence: Synthetic oligonucleotide
guuucuccacucuguaagu

SEQ ID NO: 2855385 - RNA, 19 nt, Artificial Sequence
  Description of Artificial Sequence: Synthetic oligonucleotide
uagcaccgccaaacugaag

SEQ ID NO: 2855386 - RNA, 19 nt, Artificial Sequence
  Description of Artificial Sequence: Synthetic oligonucleotide
gagccagccugcccacgag

SEQ ID NO: 2855387 - RNA, 19 nt, Artificial Sequence
  Description of Artificial Sequence: Synthetic oligonucleotide
cucggggugggagucugag

SEQ ID NO: 2855388 - RNA, 19 nt, Artificial Sequence
  Description of Artificial Sequence: Synthetic oligonucleotide
gagucugagcuaaccccac

SEQ ID NO: 2855389 - RNA, 19 nt, Artificial Sequence
  Description of Artificial Sequence: Synthetic oligonucleotide
gggcucaaugggcugugag

SEQ ID NO: 2855390 - RNA, 19 nt, Artificial Sequence
  Description of Artificial Sequence: Synthetic oligonucleotide
cucacugggaccugucugu

SEQ ID NO: 2855391 - RNA, 19 nt, Artificial Sequence
  Description of Artificial Sequence: Synthetic oligonucleotide
cguuugaaggacauguuaa

SEQ ID NO: 2855392 - RNA, 19 nt, Artificial Sequence
  Description of Artificial Sequence: Synthetic oligonucleotide
acagugcacaguggggccu

SEQ ID NO: 2855393 - RNA, 19 nt, Artificial Sequence
  Description of Artificial Sequence: Synthetic oligonucleotide
cuggagacaccagcagaug

SEQ ID NO: 2855394 - RNA, 19 nt, Artificial Sequence
  Description of Artificial Sequence: Synthetic oligonucleotide
gcagaacaagcggagccag

SEQ ID NO: 2855395 - RNA, 19 nt, Artificial Sequence
  Description of Artificial Sequence: Synthetic oligonucleotide
ggcuuuucugcccuggagu

SEQ ID NO: 2855396 - RNA, 19 nt, Artificial Sequence
  Description of Artificial Sequence: Synthetic oligonucleotide
uuguaucgugaggggcaag

SEQ ID NO: 2855397 - RNA, 19 nt, Artificial Sequence
  Description of Artificial Sequence: Synthetic oligonucleotide
ccaggucacgccuaaguca

SEQ ID NO: 2855398 - RNA, 19 nt, Artificial Sequence
  Description of Artificial Sequence: Synthetic oligonucleotide
gagacaccagcagauggcu

SEQ ID NO: 2855399 - RNA, 19 nt, Artificial Sequence
  Description of Artificial Sequence: Synthetic oligonucleotide
cacuugccacccagcacug

SEQ ID NO: 2855400 - RNA, 19 nt, Artificial Sequence
  Description of Artificial Sequence: Synthetic oligonucleotide
cagcacuugccacccagca

SEQ ID NO: 2855401 - RNA, 19 nt, Artificial Sequence
  Description of Artificial Sequence: Synthetic oligonucleotide
ggagcagaacaagcggagc

SEQ ID NO: 2855402 - RNA, 19 nt, Artificial Sequence
  Description of Artificial Sequence: Synthetic oligonucleotide
ugaggaccuccaggucacg

SEQ ID NO: 2855403 - RNA, 19 nt, Artificial Sequence
  Description of Artificial Sequence: Synthetic oligonucleotide
uuguggcuuuucugcccug

SEQ ID NO: 2855404 - RNA, 19 nt, Artificial Sequence
  Description of Artificial Sequence: Synthetic oligonucleotide
guggcauuguggcuuuucu

SEQ ID NO: 2855405 - RNA, 19 nt, Artificial Sequence
  Description of Artificial Sequence: Synthetic oligonucleotide
gcucagagcucuccgagaa

SEQ ID NO: 2855406 - RNA, 19 nt, Artificial Sequence
  Description of Artificial Sequence: Synthetic oligonucleotide
gcaggaugguggcauugug

SEQ ID NO: 2855407 - RNA, 19 nt, Artificial Sequence
  Description of Artificial Sequence: Synthetic oligonucleotide
acuugccacccagcacugg

SEQ ID NO: 2855408 - RNA, 19 nt, Artificial Sequence
  Description of Artificial Sequence: Synthetic oligonucleotide
gaacaagcggagccagccu

SEQ ID NO: 2855409 - RNA, 19 nt, Artificial Sequence
  Description of Artificial Sequence: Synthetic oligonucleotide
ccacucuguaaguggcagg

SEQ ID NO: 2855410 - RNA, 19 nt, Artificial Sequence
  Description of Artificial Sequence: Synthetic oligonucleotide
gcguuugaaggacauguua

SEQ ID NO: 2855411 - RNA, 19 nt, Artificial Sequence
  Description of Artificial Sequence: Synthetic oligonucleotide
cuugaggggauuagccccu

SEQ ID NO: 2855412 - RNA, 19 nt, Artificial Sequence
  Description of Artificial Sequence: Synthetic oligonucleotide
cucugacuucuugagggga

SEQ ID NO: 2855413 - RNA, 19 nt, Artificial Sequence
  Description of Artificial Sequence: Synthetic oligonucleotide
acaccagcagauggcugug

SEQ ID NO: 2855414 - RNA, 19 nt, Artificial Sequence
  Description of Artificial Sequence: Synthetic oligonucleotide
gagcacagcucugacuucu

SEQ ID NO: 2855415 - RNA, 19 nt, Artificial Sequence
  Description of Artificial Sequence: Synthetic oligonucleotide
caagggcguuugaaggaca

SEQ ID NO: 2855416 - RNA, 19 nt, Artificial Sequence
  Description of Artificial Sequence: Synthetic oligonucleotide
cuggugcgguuguaucgug

SEQ ID NO: 2855417 - RNA, 19 nt, Artificial Sequence
  Description of Artificial Sequence: Synthetic oligonucleotide
aaguggcaggaugguggca

SEQ ID NO: 2855418 - RNA, 19 nt, Artificial Sequence
  Description of Artificial Sequence: Synthetic oligonucleotide
ccucacugggaccugucug

SEQ ID NO: 2855419 - RNA, 19 nt, Artificial Sequence
  Description of Artificial Sequence: Synthetic oligonucleotide
guuguaucgugaggggcaa

SEQ ID NO: 2855420 - RNA, 19 nt, Artificial Sequence
  Description of Artificial Sequence: Synthetic oligonucleotide
agacaccagcagauggcug

SEQ ID NO: 2855421 - RNA, 19 nt, Artificial Sequence
  Description of Artificial Sequence: Synthetic oligonucleotide
caagcggagccagccugcc

SEQ ID NO: 2855422 - RNA, 19 nt, Artificial Sequence
  Description of Artificial Sequence: Synthetic oligonucleotide
augugguaggguagaagua

SEQ ID NO: 2855423 - RNA, 19 nt, Artificial Sequence
  Description of Artificial Sequence: Synthetic oligonucleotide
cgccaaacugaagacauug

SEQ ID NO: 2855424 - RNA, 19 nt, Artificial Sequence
  Description of Artificial Sequence: Synthetic oligonucleotide
aggggcaagggcguuugaa

SEQ ID NO: 2855425 - RNA, 19 nt, Artificial Sequence
  Description of Artificial Sequence: Synthetic oligonucleotide
gcaagggcguuugaaggac

SEQ ID NO: 2855426 - RNA, 19 nt, Artificial Sequence
  Description of Artificial Sequence: Synthetic oligonucleotide
gggcguuugaaggacaugu

SEQ ID NO: 2855427 - RNA, 19 nt, Artificial Sequence
  Description of Artificial Sequence: Synthetic oligonucleotide
gcaccgccaaacugaagac

SEQ ID NO: 2855428 - RNA, 19 nt, Artificial Sequence
  Description of Artificial Sequence: Synthetic oligonucleotide
aggucacgccuaagucacc

SEQ ID NO: 2855429 - RNA, 19 nt, Artificial Sequence
  Description of Artificial Sequence: Synthetic oligonucleotide
guggcuuuucugcccugga

SEQ ID NO: 2855430 - RNA, 19 nt, Artificial Sequence
  Description of Artificial Sequence: Synthetic oligonucleotide
cuaaccccacuagcaccgc

SEQ ID NO: 2855431 - RNA, 19 nt, Artificial Sequence
  Description of Artificial Sequence: Synthetic oligonucleotide
cuguccuccuccuguaacu

SEQ ID NO: 2855432 - RNA, 19 nt, Artificial Sequence
  Description of Artificial Sequence: Synthetic oligonucleotide
accuccaggucacgccuaa

SEQ ID NO: 2855433 - RNA, 19 nt, Artificial Sequence
  Description of Artificial Sequence: Synthetic oligonucleotide
ccgagaaugugguagggua

SEQ ID NO: 2855434 - RNA, 19 nt, Artificial Sequence
  Description of Artificial Sequence: Synthetic oligonucleotide
gagauagcaaggggcucaa

SEQ ID NO: 2855435 - RNA, 19 nt, Artificial Sequence
  Description of Artificial Sequence: Synthetic oligonucleotide
uaacucggggugggagucu

SEQ ID NO: 2855436 - RNA, 19 nt, Artificial Sequence
  Description of Artificial Sequence: Synthetic oligonucleotide
agggcguuugaaggacaug

SEQ ID NO: 2855437 - RNA, 19 nt, Artificial Sequence
  Description of Artificial Sequence: Synthetic oligonucleotide
ccuguccuccuccuguaac

SEQ ID NO: 2855438 - RNA, 19 nt, Artificial Sequence
  Description of Artificial Sequence: Synthetic oligonucleotide
ggucacgccuaagucacca

SEQ ID NO: 2855439 - RNA, 19 nt, Artificial Sequence
  Description of Artificial Sequence: Synthetic oligonucleotide
cuccaggucacgccuaagu

SEQ ID NO: 2855440 - RNA, 19 nt, Artificial Sequence
  Description of Artificial Sequence: Synthetic oligonucleotide
gaaggacauguuaauccuu

SEQ ID NO: 2855441 - RNA, 19 nt, Artificial Sequence
  Description of Artificial Sequence: Synthetic oligonucleotide
uuucugcccuggaguuaaa

SEQ ID NO: 2855442 - RNA, 19 nt, Artificial Sequence
  Description of Artificial Sequence: Synthetic oligonucleotide
caccgccaaacugaagaca

SEQ ID NO: 2855443 - RNA, 19 nt, Artificial Sequence
  Description of Artificial Sequence: Synthetic oligonucleotide
gcugugcucagagcucucc

SEQ ID NO: 2855444 - RNA, 19 nt, Artificial Sequence
  Description of Artificial Sequence: Synthetic oligonucleotide
acucuguaaguggcaggau

SEQ ID NO: 2855445 - RNA, 19 nt, Artificial Sequence
  Description of Artificial Sequence: Synthetic oligonucleotide
agccugcccacgagcacag

SEQ ID NO: 2855446 - RNA, 19 nt, Artificial Sequence
  Description of Artificial Sequence: Synthetic oligonucleotide
cagccugcccacgagcaca

SEQ ID NO: 2855447 - RNA, 19 nt, Artificial Sequence
  Description of Artificial Sequence: Synthetic oligonucleotide
aggggcucaaugggcugug

SEQ ID NO: 2855448 - RNA, 19 nt, Artificial Sequence
  Description of Artificial Sequence: Synthetic oligonucleotide
ggagccagccugcccacga

SEQ ID NO: 2855449 - RNA, 19 nt, Artificial Sequence
  Description of Artificial Sequence: Synthetic oligonucleotide
cugugaugaccacaccuau

SEQ ID NO: 2855450 - RNA, 19 nt, Artificial Sequence
  Description of Artificial Sequence: Synthetic oligonucleotide
ggggauuagccccuccacu

SEQ ID NO: 2855451 - RNA, 19 nt, Artificial Sequence
  Description of Artificial Sequence: Synthetic oligonucleotide
cacugggaccugucuguga

SEQ ID NO: 2855452 - RNA, 19 nt, Artificial Sequence
  Description of Artificial Sequence: Synthetic oligonucleotide
gccaaacugaagacauuga

SEQ ID NO: 2855453 - RNA, 19 nt, Artificial Sequence
  Description of Artificial Sequence: Synthetic oligonucleotide
cacaccuaugacagcacuu

SEQ ID NO: 2855454 - RNA, 19 nt, Artificial Sequence
  Description of Artificial Sequence: Synthetic oligonucleotide
uugaggggauuagccccuc

SEQ ID NO: 2855455 - RNA, 19 nt, Artificial Sequence
  Description of Artificial Sequence: Synthetic oligonucleotide
ccagcacuggagacaccag

SEQ ID NO: 2855456 - RNA, 19 nt, Artificial Sequence
  Description of Artificial Sequence: Synthetic oligonucleotide
cccuggaguuaaagauagg

SEQ ID NO: 2855457 - RNA, 19 nt, Artificial Sequence
  Description of Artificial Sequence: Synthetic oligonucleotide
ccagcagauggcugugcuc

SEQ ID NO: 2855458 - RNA, 19 nt, Artificial Sequence
  Description of Artificial Sequence: Synthetic oligonucleotide
cacgagcacagcucugacu

SEQ ID NO: 2855459 - RNA, 19 nt, Artificial Sequence
  Description of Artificial Sequence: Synthetic oligonucleotide
cuuuucugcccuggaguua

SEQ ID NO: 2855460 - RNA, 19 nt, Artificial Sequence
  Description of Artificial Sequence: Synthetic oligonucleotide
guagcuggugcgguuguau

SEQ ID NO: 2855461 - RNA, 19 nt, Artificial Sequence
  Description of Artificial Sequence: Synthetic oligonucleotide
cccagcacuggagacacca

SEQ ID NO: 2855462 - RNA, 19 nt, Artificial Sequence
  Description of Artificial Sequence: Synthetic oligonucleotide
cagagcucuccgagaaugu

SEQ ID NO: 2855463 - RNA, 19 nt, Artificial Sequence
  Description of Artificial Sequence: Synthetic oligonucleotide
gcuuuucugcccuggaguu

SEQ ID NO: 2855464 - RNA, 19 nt, Artificial Sequence
  Description of Artificial Sequence: Synthetic oligonucleotide
cagugcacaguggggccuc

SEQ ID NO: 2855465 - RNA, 19 nt, Artificial Sequence
  Description of Artificial Sequence: Synthetic oligonucleotide
ggaccuccaggucacgccu

SEQ ID NO: 2855466 - RNA, 19 nt, Artificial Sequence
  Description of Artificial Sequence: Synthetic oligonucleotide
aguagcuggugcgguugua

SEQ ID NO: 2855467 - RNA, 19 nt, Artificial Sequence
  Description of Artificial Sequence: Synthetic oligonucleotide
cgguuguaucgugaggggc

SEQ ID NO: 2855468 - RNA, 19 nt, Artificial Sequence
  Description of Artificial Sequence: Synthetic oligonucleotide
gggcugugaggaccuccag

SEQ ID NO: 2855469 - RNA, 19 nt, Artificial Sequence
  Description of Artificial Sequence: Synthetic oligonucleotide
caguggggccucacuggga

SEQ ID NO: 2855470 - RNA, 19 nt, Artificial Sequence
  Description of Artificial Sequence: Synthetic oligonucleotide
gggugggagucugagcuaa

SEQ ID NO: 2855471 - RNA, 19 nt, Artificial Sequence
  Description of Artificial Sequence: Synthetic oligonucleotide
gaggggcaagggcguuuga

SEQ ID NO: 2855472 - RNA, 19 nt, Artificial Sequence
  Description of Artificial Sequence: Synthetic oligonucleotide
agugcacaguggggccuca

SEQ ID NO: 2855473 - RNA, 19 nt, Artificial Sequence
  Description of Artificial Sequence: Synthetic oligonucleotide
agauagcaaggggcucaau

SEQ ID NO: 2855474 - RNA, 19 nt, Artificial Sequence
  Description of Artificial Sequence: Synthetic oligonucleotide
ccuguuucuccacucugua

SEQ ID NO: 2855475 - RNA, 19 nt, Artificial Sequence
  Description of Artificial Sequence: Synthetic oligonucleotide
cuguaaguggcaggauggu

SEQ ID NO: 2855476 - RNA, 19 nt, Artificial Sequence
  Description of Artificial Sequence: Synthetic oligonucleotide
ccacgagcacagcucugac

SEQ ID NO: 2855477 - RNA, 19 nt, Artificial Sequence
  Description of Artificial Sequence: Synthetic oligonucleotide
gggaccugucugugaugac

SEQ ID NO: 2855478 - RNA, 19 nt, Artificial Sequence
  Description of Artificial Sequence: Synthetic oligonucleotide
gccagccugcccacgagca

SEQ ID NO: 2855479 - RNA, 19 nt, Artificial Sequence
  Description of Artificial Sequence: Synthetic oligonucleotide
gcuggugcgguuguaucgu

SEQ ID NO: 2855480 - RNA, 19 nt, Artificial Sequence
  Description of Artificial Sequence: Synthetic oligonucleotide
cggggugggagucugagcu

SEQ ID NO: 2855481 - RNA, 19 nt, Artificial Sequence
  Description of Artificial Sequence: Synthetic oligonucleotide
agcacagcucugacuucuu

SEQ ID NO: 2855482 - RNA, 19 nt, Artificial Sequence
  Description of Artificial Sequence: Synthetic oligonucleotide
cccacgagcacagcucuga

SEQ ID NO: 2855483 - RNA, 19 nt, Artificial Sequence
  Description of Artificial Sequence: Synthetic oligonucleotide
ccaagggccuguccuccuc

SEQ ID NO: 2855484 - RNA, 19 nt, Artificial Sequence
  Description of Artificial Sequence: Synthetic oligonucleotide
gcagauggcugugcucaga

SEQ ID NO: 2855485 - RNA, 19 nt, Artificial Sequence
  Description of Artificial Sequence: Synthetic oligonucleotide
ccagccugcccacgagcac

SEQ ID NO: 2855486 - RNA, 19 nt, Artificial Sequence
  Description of Artificial Sequence: Synthetic oligonucleotide
cuaagucaccagaccuguu

SEQ ID NO: 2855487 - RNA, 19 nt, Artificial Sequence
  Description of Artificial Sequence: Synthetic oligonucleotide
gaccuccaggucacgccua

SEQ ID NO: 2855488 - RNA, 19 nt, Artificial Sequence
  Description of Artificial Sequence: Synthetic oligonucleotide
gcuuuaccaagggccuguc

SEQ ID NO: 2855489 - RNA, 19 nt, Artificial Sequence
  Description of Artificial Sequence: Synthetic oligonucleotide
ggugggagucugagcuaac

SEQ ID NO: 2855490 - RNA, 19 nt, Artificial Sequence
  Description of Artificial Sequence: Synthetic oligonucleotide
gugcacaguggggccucac

SEQ ID NO: 2855491 - RNA, 19 nt, Artificial Sequence
  Description of Artificial Sequence: Synthetic oligonucleotide
cucagagcucuccgagaau

SEQ ID NO: 2855492 - RNA, 19 nt, Artificial Sequence
  Description of Artificial Sequence: Synthetic oligonucleotide
cgccuaagucaccagaccu

SEQ ID NO: 2855493 - RNA, 19 nt, Artificial Sequence
  Description of Artificial Sequence: Synthetic oligonucleotide
ggcaggaugguggcauugu

SEQ ID NO: 2855494 - RNA, 19 nt, Artificial Sequence
  Description of Artificial Sequence: Synthetic oligonucleotide
ccugcccacgagcacagcu

SEQ ID NO: 2855495 - RNA, 19 nt, Artificial Sequence
  Description of Artificial Sequence: Synthetic oligonucleotide
acucggggugggagucuga

SEQ ID NO: 2855496 - RNA, 19 nt, Artificial Sequence
  Description of Artificial Sequence: Synthetic oligonucleotide
cugacuucuugaggggauu

SEQ ID NO: 2855497 - RNA, 19 nt, Artificial Sequence
  Description of Artificial Sequence: Synthetic oligonucleotide
ggggugggagucugagcua

SEQ ID NO: 2855498 - RNA, 19 nt, Artificial Sequence
  Description of Artificial Sequence: Synthetic oligonucleotide
gccucacugggaccugucu

SEQ ID NO: 2855499 - RNA, 19 nt, Artificial Sequence
  Description of Artificial Sequence: Synthetic oligonucleotide
cgagcacagcucugacuuc

SEQ ID NO: 2855500 - RNA, 19 nt, Artificial Sequence
  Description of Artificial Sequence: Synthetic oligonucleotide
gcggagccagccugcccac

SEQ ID NO: 2855501 - RNA, 19 nt, Artificial Sequence
  Description of Artificial Sequence: Synthetic oligonucleotide
ccacaccuaugacagcacu

SEQ ID NO: 2855502 - RNA, 19 nt, Artificial Sequence
  Description of Artificial Sequence: Synthetic oligonucleotide
guggcaggaugguggcauu

SEQ ID NO: 2855503 - RNA, 19 nt, Artificial Sequence
  Description of Artificial Sequence: Synthetic oligonucleotide
gccuguccuccuccuguaa

SEQ ID NO: 2855504 - RNA, 19 nt, Artificial Sequence
  Description of Artificial Sequence: Synthetic oligonucleotide
ccuccaggucacgccuaag

SEQ ID NO: 2855505 - RNA, 19 nt, Artificial Sequence
  Description of Artificial Sequence: Synthetic oligonucleotide
ggcguuugaaggacauguu

SEQ ID NO: 2855506 - RNA, 19 nt, Artificial Sequence
  Description of Artificial Sequence: Synthetic oligonucleotide
ggccucacugggaccuguc

SEQ ID NO: 2855507 - RNA, 19 nt, Artificial Sequence
  Description of Artificial Sequence: Synthetic oligonucleotide
gcucuccgagaauguggua

SEQ ID NO: 2855508 - RNA, 19 nt, Artificial Sequence
  Description of Artificial Sequence: Synthetic oligonucleotide
ccacuagcaccgccaaacu

SEQ ID NO: 2855509 - RNA, 19 nt, Artificial Sequence
  Description of Artificial Sequence: Synthetic oligonucleotide
gcccacgagcacagcucug

SEQ ID NO: 2855510 - RNA, 19 nt, Artificial Sequence
  Description of Artificial Sequence: Synthetic oligonucleotide
ccuguaacucgggguggga

SEQ ID NO: 2855511 - RNA, 19 nt, Artificial Sequence
  Description of Artificial Sequence: Synthetic oligonucleotide
gugaggggcaagggcguuu

SEQ ID NO: 2855512 - RNA, 19 nt, Artificial Sequence
  Description of Artificial Sequence: Synthetic oligonucleotide
ggcugugcucagagcucuc

SEQ ID NO: 2855513 - RNA, 19 nt, Artificial Sequence
  Description of Artificial Sequence: Synthetic oligonucleotide
ggggcucaaugggcuguga

SEQ ID NO: 2855514 - RNA, 19 nt, Artificial Sequence
  Description of Artificial Sequence: Synthetic oligonucleotide
cggagccagccugcccacg

SEQ ID NO: 2855515 - RNA, 19 nt, Artificial Sequence
  Description of Artificial Sequence: Synthetic oligonucleotide
gccugcccacgagcacagc

SEQ ID NO: 2855516 - RNA, 19 nt, Artificial Sequence
  Description of Artificial Sequence: Synthetic oligonucleotide
gggccucacugggaccugu

SEQ ID NO: 2855517 - RNA, 19 nt, Artificial Sequence
  Description of Artificial Sequence: Synthetic oligonucleotide
ccgccaaacugaagacauu

SEQ ID NO: 2855518 - RNA, 19 nt, Artificial Sequence
  Description of Artificial Sequence: Synthetic oligonucleotide
cgugaggggcaagggcguu

SEQ ID NO: 2855519 - RNA, 19 nt, Artificial Sequence
  Description of Artificial Sequence: Synthetic oligonucleotide
aaaauuuacagauaaaugc

SEQ ID NO: 2855520 - RNA, 19 nt, Artificial Sequence
  Description of Artificial Sequence: Synthetic oligonucleotide
acauauacaacuuucaggc

SEQ ID NO: 2855521 - RNA, 19 nt, Artificial Sequence
  Description of Artificial Sequence: Synthetic oligonucleotide
aaaagugaugcuaaaaugc

SEQ ID NO: 2855522 - RNA, 19 nt, Artificial Sequence
  Description of Artificial Sequence: Synthetic oligonucleotide
aacauauacaacuuucagg

SEQ ID NO: 2855523 - RNA, 19 nt, Artificial Sequence
  Description of Artificial Sequence: Synthetic oligonucleotide
caaacuuuaaaauuuacag

SEQ ID NO: 2855524 - RNA, 19 nt, Artificial Sequence
  Description of Artificial Sequence: Synthetic oligonucleotide
gauaaaugcaguuuaauac

SEQ ID NO: 2855525 - RNA, 19 nt, Artificial Sequence
  Description of Artificial Sequence: Synthetic oligonucleotide
aaugcaguuuaauacugcc

SEQ ID NO: 2855526 - RNA, 19 nt, Artificial Sequence
  Description of Artificial Sequence: Synthetic oligonucleotide
aaaauaaugucuucagaag

SEQ ID NO: 2855527 - RNA, 19 nt, Artificial Sequence
  Description of Artificial Sequence: Synthetic oligonucleotide
uaaacaacaggauacauga

SEQ ID NO: 2855528 - RNA, 19 nt, Artificial Sequence
  Description of Artificial Sequence: Synthetic oligonucleotide
uuuaacuucguucuuagcu

SEQ ID NO: 2855529 - RNA, 19 nt, Artificial Sequence
  Description of Artificial Sequence: Synthetic oligonucleotide
aauuuauacagucaaacuu

SEQ ID NO: 2855530 - RNA, 19 nt, Artificial Sequence
  Description of Artificial Sequence: Synthetic oligonucleotide
uaaaauuuacagauaaaug

SEQ ID NO: 2855531 - RNA, 19 nt, Artificial Sequence
  Description of Artificial Sequence: Synthetic oligonucleotide
ucucuuaacauauacaacu

SEQ ID NO: 2855532 - RNA, 19 nt, Artificial Sequence
  Description of Artificial Sequence: Synthetic oligonucleotide
acugauaauuuauacaguc

SEQ ID NO: 2855533 - RNA, 19 nt, Artificial Sequence
  Description of Artificial Sequence: Synthetic oligonucleotide
agaaguguacaacugaaac

SEQ ID NO: 2855534 - RNA, 19 nt, Artificial Sequence
  Description of Artificial Sequence: Synthetic oligonucleotide
aaacuuuugaaagacggcg

SEQ ID NO: 2855535 - RNA, 19 nt, Artificial Sequence
  Description of Artificial Sequence: Synthetic oligonucleotide
ucauuaaacaacaggauac

SEQ ID NO: 2855536 - RNA, 19 nt, Artificial Sequence
  Description of Artificial Sequence: Synthetic oligonucleotide
uacaugacugcauagagag

SEQ ID NO: 2855537 - RNA, 19 nt, Artificial Sequence
  Description of Artificial Sequence: Synthetic oligonucleotide
auaauuuauacagucaaac

SEQ ID NO: 2855538 - RNA, 19 nt, Artificial Sequence
  Description of Artificial Sequence: Synthetic oligonucleotide
uaaaauaaugucuucagaa

SEQ ID NO: 2855539 - RNA, 19 nt, Artificial Sequence
  Description of Artificial Sequence: Synthetic oligonucleotide
gaugcuaaaaugcagagga

SEQ ID NO: 2855540 - RNA, 19 nt, Artificial Sequence
  Description of Artificial Sequence: Synthetic oligonucleotide
aaauaaugucuucagaagu

SEQ ID NO: 2855541 - RNA, 19 nt, Artificial Sequence
  Description of Artificial Sequence: Synthetic oligonucleotide
uguaggauaaagaauggug

SEQ ID NO: 2855542 - RNA, 19 nt, Artificial Sequence
  Description of Artificial Sequence: Synthetic oligonucleotide
uuaugaacacauuuuauug

SEQ ID NO: 2855543 - RNA, 19 nt, Artificial Sequence
  Description of Artificial Sequence: Synthetic oligonucleotide
aauacugccaccgagaaau

SEQ ID NO: 2855544 - RNA, 19 nt, Artificial Sequence
  Description of Artificial Sequence: Synthetic oligonucleotide
aaacuuuaaaauuuacaga

SEQ ID NO: 2855545 - RNA, 19 nt, Artificial Sequence
  Description of Artificial Sequence: Synthetic oligonucleotide
agaaauacaucucuuaaca

SEQ ID NO: 2855546 - RNA, 19 nt, Artificial Sequence
  Description of Artificial Sequence: Synthetic oligonucleotide
uaaagaaugguguacaaaa

SEQ ID NO: 2855547 - RNA, 19 nt, Artificial Sequence
  Description of Artificial Sequence: Synthetic oligonucleotide
aauuuaacuucguucuuag

SEQ ID NO: 2855548 - RNA, 19 nt, Artificial Sequence
  Description of Artificial Sequence: Synthetic oligonucleotide
uaucaaguugguuugauga

SEQ ID NO: 2855549 - RNA, 19 nt, Artificial Sequence
  Description of Artificial Sequence: Synthetic oligonucleotide
aacaacaggauacaugacu

SEQ ID NO: 2855550 - RNA, 19 nt, Artificial Sequence
  Description of Artificial Sequence: Synthetic oligonucleotide
gguuugaugaauuagccgg

SEQ ID NO: 2855551 - RNA, 19 nt, Artificial Sequence
  Description of Artificial Sequence: Synthetic oligonucleotide
cauagagaggcauagaaac

SEQ ID NO: 2855552 - RNA, 19 nt, Artificial Sequence
  Description of Artificial Sequence: Synthetic oligonucleotide
ugaugaauuagccgguugg

SEQ ID NO: 2855553 - RNA, 19 nt, Artificial Sequence
  Description of Artificial Sequence: Synthetic oligonucleotide
ugauaauuuauacagucaa

SEQ ID NO: 2855554 - RNA, 19 nt, Artificial Sequence
  Description of Artificial Sequence: Synthetic oligonucleotide
ucaaaagccaacuacagua

SEQ ID NO: 2855555 - RNA, 19 nt, Artificial Sequence
  Description of Artificial Sequence: Synthetic oligonucleotide
uuaaacaacaggauacaug

SEQ ID NO: 2855556 - RNA, 19 nt, Artificial Sequence
  Description of Artificial Sequence: Synthetic oligonucleotide
ugaaguaucaaguugguuu

SEQ ID NO: 2855557 - RNA, 19 nt, Artificial Sequence
  Description of Artificial Sequence: Synthetic oligonucleotide
uccauugucauccucauuc

SEQ ID NO: 2855558 - RNA, 19 nt, Artificial Sequence
  Description of Artificial Sequence: Synthetic oligonucleotide
aguggucucagcuucauuc

SEQ ID NO: 2855559 - RNA, 19 nt, Artificial Sequence
  Description of Artificial Sequence: Synthetic oligonucleotide
guauguaggauaaagaaug

SEQ ID NO: 2855560 - RNA, 19 nt, Artificial Sequence
  Description of Artificial Sequence: Synthetic oligonucleotide
auaaaugcaguuuaauacu

SEQ ID NO: 2855561 - RNA, 19 nt, Artificial Sequence
  Description of Artificial Sequence: Synthetic oligonucleotide
aaauuuacagauaaaugca

SEQ ID NO: 2855562 - RNA, 19 nt, Artificial Sequence
  Description of Artificial Sequence: Synthetic oligonucleotide
gacaaauuuaacuucguuc

SEQ ID NO: 2855563 - RNA, 19 nt, Artificial Sequence
  Description of Artificial Sequence: Synthetic oligonucleotide
auagaaaccauggaagugg

SEQ ID NO: 2855564 - RNA, 19 nt, Artificial Sequence
  Description of Artificial Sequence: Synthetic oligonucleotide
uauacagucaaacuuuaaa

SEQ ID NO: 2855565 - RNA, 19 nt, Artificial Sequence
  Description of Artificial Sequence: Synthetic oligonucleotide
uuaacauauacaacuuuca

SEQ ID NO: 2855566 - RNA, 19 nt, Artificial Sequence
  Description of Artificial Sequence: Synthetic oligonucleotide
uaacauauacaacuuucag

SEQ ID NO: 2855567 - RNA, 19 nt, Artificial Sequence
  Description of Artificial Sequence: Synthetic oligonucleotide
ucauucaaaagccaacuac

SEQ ID NO: 2855568 - RNA, 19 nt, Artificial Sequence
  Description of Artificial Sequence: Synthetic oligonucleotide
aaauacaucucuuaacaua

SEQ ID NO: 2855569 - RNA, 19 nt, Artificial Sequence
  Description of Artificial Sequence: Synthetic oligonucleotide
gauacaugacugcauagag

SEQ ID NO: 2855570 - RNA, 19 nt, Artificial Sequence
  Description of Artificial Sequence: Synthetic oligonucleotide
ggacugauaauuuauacag

SEQ ID NO: 2855571 - RNA, 19 nt, Artificial Sequence
  Description of Artificial Sequence: Synthetic oligonucleotide
uuuaauacugccaccgaga

SEQ ID NO: 2855572 - RNA, 19 nt, Artificial Sequence
  Description of Artificial Sequence: Synthetic oligonucleotide
ucauccucauucaaaagcc

SEQ ID NO: 2855573 - RNA, 19 nt, Artificial Sequence
  Description of Artificial Sequence: Synthetic oligonucleotide
cuuaacauauacaacuuuc

SEQ ID NO: 2855574 - RNA, 19 nt, Artificial Sequence
  Description of Artificial Sequence: Synthetic oligonucleotide
uagcucauuaaacaacagg

SEQ ID NO: 2855575 - RNA, 19 nt, Artificial Sequence
  Description of Artificial Sequence: Synthetic oligonucleotide
ugcaguuuaauacugccac

SEQ ID NO: 2855576 - RNA, 19 nt, Artificial Sequence
  Description of Artificial Sequence: Synthetic oligonucleotide
uuaaaauaaugucuucaga

SEQ ID NO: 2855577 - RNA, 19 nt, Artificial Sequence
  Description of Artificial Sequence: Synthetic oligonucleotide
aguuuugaaggucugaagu

SEQ ID NO: 2855578 - RNA, 19 nt, Artificial Sequence
  Description of Artificial Sequence: Synthetic oligonucleotide
uauguauguaggauaaaga

SEQ ID NO: 2855579 - RNA, 19 nt, Artificial Sequence
  Description of Artificial Sequence: Synthetic oligonucleotide
aaugucuucagaaguguac

SEQ ID NO: 2855580 - RNA, 19 nt, Artificial Sequence
  Description of Artificial Sequence: Synthetic oligonucleotide
uauguaggauaaagaaugg

SEQ ID NO: 2855581 - RNA, 19 nt, Artificial Sequence
  Description of Artificial Sequence: Synthetic oligonucleotide
acugaaacuuuugaaagac

SEQ ID NO: 2855582 - RNA, 19 nt, Artificial Sequence
  Description of Artificial Sequence: Synthetic oligonucleotide
auauacaacuuucaggcca

SEQ ID NO: 2855583 - RNA, 19 nt, Artificial Sequence
  Description of Artificial Sequence: Synthetic oligonucleotide
aauuuacagauaaaugcag

SEQ ID NO: 2855584 - RNA, 19 nt, Artificial Sequence
  Description of Artificial Sequence: Synthetic oligonucleotide
caggccacaguuuugaagg

SEQ ID NO: 2855585 - RNA, 19 nt, Artificial Sequence
  Description of Artificial Sequence: Synthetic oligonucleotide
gaaguaucaaguugguuug

SEQ ID NO: 2855586 - RNA, 19 nt, Artificial Sequence
  Description of Artificial Sequence: Synthetic oligonucleotide
uaauuuauacagucaaacu

SEQ ID NO: 2855587 - RNA, 19 nt, Artificial Sequence
  Description of Artificial Sequence: Synthetic oligonucleotide
ucagcuucauucuucaucu

SEQ ID NO: 2855588 - RNA, 19 nt, Artificial Sequence
  Description of Artificial Sequence: Synthetic oligonucleotide
uaaaugcaguuuaauacug

SEQ ID NO: 2855589 - RNA, 19 nt, Artificial Sequence
  Description of Artificial Sequence: Synthetic oligonucleotide
caacugaaacuuuugaaag

SEQ ID NO: 2855590 - RNA, 19 nt, Artificial Sequence
  Description of Artificial Sequence: Synthetic oligonucleotide
aauacaucucuuaacauau

SEQ ID NO: 2855591 - RNA, 19 nt, Artificial Sequence
  Description of Artificial Sequence: Synthetic oligonucleotide
acaacugaaacuuuugaaa

SEQ ID NO: 2855592 - RNA, 19 nt, Artificial Sequence
  Description of Artificial Sequence: Synthetic oligonucleotide
ucuucagaaguguacaacu

SEQ ID NO: 2855593 - RNA, 19 nt, Artificial Sequence
  Description of Artificial Sequence: Synthetic oligonucleotide
uguauguaggauaaagaau

SEQ ID NO: 2855594 - RNA, 19 nt, Artificial Sequence
  Description of Artificial Sequence: Synthetic oligonucleotide
uugguuugaugaauuagcc

SEQ ID NO: 2855595 - RNA, 19 nt, Artificial Sequence
  Description of Artificial Sequence: Synthetic oligonucleotide
caugacugcauagagaggc

SEQ ID NO: 2855596 - RNA, 19 nt, Artificial Sequence
  Description of Artificial Sequence: Synthetic oligonucleotide
ucuuccauugucauccuca

SEQ ID NO: 2855597 - RNA, 19 nt, Artificial Sequence
  Description of Artificial Sequence: Synthetic oligonucleotide
uguacaacugaaacuuuug

SEQ ID NO: 2855598 - RNA, 19 nt, Artificial Sequence
  Description of Artificial Sequence: Synthetic oligonucleotide
aagacggcgucucagcguc

SEQ ID NO: 2855599 - RNA, 19 nt, Artificial Sequence
  Description of Artificial Sequence: Synthetic oligonucleotide
auguauguaggauaaagaa

SEQ ID NO: 2855600 - RNA, 19 nt, Artificial Sequence
  Description of Artificial Sequence: Synthetic oligonucleotide
uacaucucuuaacauauac

SEQ ID NO: 2855601 - RNA, 19 nt, Artificial Sequence
  Description of Artificial Sequence: Synthetic oligonucleotide
agggacugauaauuuauac

SEQ ID NO: 2855602 - RNA, 19 nt, Artificial Sequence
  Description of Artificial Sequence: Synthetic oligonucleotide
aacugaaacuuuugaaaga

SEQ ID NO: 2855603 - RNA, 19 nt, Artificial Sequence
  Description of Artificial Sequence: Synthetic oligonucleotide
aaguguacaacugaaacuu

SEQ ID NO: 2855604 - RNA, 19 nt, Artificial Sequence
  Description of Artificial Sequence: Synthetic oligonucleotide
ucuuagcucauuaaacaac

SEQ ID NO: 2855605 - RNA, 19 nt, Artificial Sequence
  Description of Artificial Sequence: Synthetic oligonucleotide
gucauccucauucaaaagc

SEQ ID NO: 2855606 - RNA, 19 nt, Artificial Sequence
  Description of Artificial Sequence: Synthetic oligonucleotide
uacagauaaaugcaguuua

SEQ ID NO: 2855607 - RNA, 19 nt, Artificial Sequence
  Description of Artificial Sequence: Synthetic oligonucleotide
ugguuugaugaauuagccg

SEQ ID NO: 2855608 - RNA, 19 nt, Artificial Sequence
  Description of Artificial Sequence: Synthetic oligonucleotide
gucugaaguaucaaguugg

SEQ ID NO: 2855609 - RNA, 19 nt, Artificial Sequence
  Description of Artificial Sequence: Synthetic oligonucleotide
acauuuuauugccuugccg

SEQ ID NO: 2855610 - RNA, 19 nt, Artificial Sequence
  Description of Artificial Sequence: Synthetic oligonucleotide
ugcauagagaggcauagaa

SEQ ID NO: 2855611 - RNA, 19 nt, Artificial Sequence
  Description of Artificial Sequence: Synthetic oligonucleotide
uuaacuucguucuuagcuc

SEQ ID NO: 2855612 - RNA, 19 nt, Artificial Sequence
  Description of Artificial Sequence: Synthetic oligonucleotide
uucagaaguguacaacuga

SEQ ID NO: 2855613 - RNA, 19 nt, Artificial Sequence
  Description of Artificial Sequence: Synthetic oligonucleotide
aacacauuuuauugccuug

SEQ ID NO: 2855614 - RNA, 19 nt, Artificial Sequence
  Description of Artificial Sequence: Synthetic oligonucleotide
ugcagaggaaucuucauuc

SEQ ID NO: 2855615 - RNA, 19 nt, Artificial Sequence
  Description of Artificial Sequence: Synthetic oligonucleotide
gagaaauacaucucuuaac

SEQ ID NO: 2855616 - RNA, 19 nt, Artificial Sequence
  Description of Artificial Sequence: Synthetic oligonucleotide
cuauguauguaggauaaag

SEQ ID NO: 2855617 - RNA, 19 nt, Artificial Sequence
  Description of Artificial Sequence: Synthetic oligonucleotide
auuuuauugccuugccguc

SEQ ID NO: 2855618 - RNA, 19 nt, Artificial Sequence
  Description of Artificial Sequence: Synthetic oligonucleotide
acuuuugaaagacggcguc

SEQ ID NO: 2855619 - RNA, 19 nt, Artificial Sequence
  Description of Artificial Sequence: Synthetic oligonucleotide
ugaauuagccgguuggcac

SEQ ID NO: 2855620 - RNA, 19 nt, Artificial Sequence
  Description of Artificial Sequence: Synthetic oligonucleotide
agcucauuaaacaacagga

SEQ ID NO: 2855621 - RNA, 19 nt, Artificial Sequence
  Description of Artificial Sequence: Synthetic oligonucleotide
guuuaauacugccaccgag

SEQ ID NO: 2855622 - RNA, 19 nt, Artificial Sequence
  Description of Artificial Sequence: Synthetic oligonucleotide
aaagugaugcuaaaaugca

SEQ ID NO: 2855623 - RNA, 19 nt, Artificial Sequence
  Description of Artificial Sequence: Synthetic oligonucleotide
agauaaaugcaguuuaaua

SEQ ID NO: 2855624 - RNA, 19 nt, Artificial Sequence
  Description of Artificial Sequence: Synthetic oligonucleotide
acacauuuuauugccuugc

SEQ ID NO: 2855625 - RNA, 19 nt, Artificial Sequence
  Description of Artificial Sequence: Synthetic oligonucleotide
uuuacagauaaaugcaguu

SEQ ID NO: 2855626 - RNA, 19 nt, Artificial Sequence
  Description of Artificial Sequence: Synthetic oligonucleotide
aggauaaagaaugguguac

SEQ ID NO: 2855627 - RNA, 19 nt, Artificial Sequence
  Description of Artificial Sequence: Synthetic oligonucleotide
guugguuugaugaauuagc

SEQ ID NO: 2855628 - RNA, 19 nt, Artificial Sequence
  Description of Artificial Sequence: Synthetic oligonucleotide
auuuaacuucguucuuagc

SEQ ID NO: 2855629 - RNA, 19 nt, Artificial Sequence
  Description of Artificial Sequence: Synthetic oligonucleotide
caucucuuaacauauacaa

SEQ ID NO: 2855630 - RNA, 19 nt, Artificial Sequence
  Description of Artificial Sequence: Synthetic oligonucleotide
gaaagacggcgucucagcg

SEQ ID NO: 2855631 - RNA, 19 nt, Artificial Sequence
  Description of Artificial Sequence: Synthetic oligonucleotide
uacaacugaaacuuuugaa

SEQ ID NO: 2855632 - RNA, 19 nt, Artificial Sequence
  Description of Artificial Sequence: Synthetic oligonucleotide
ucagaaguguacaacugaa

SEQ ID NO: 2855633 - RNA, 19 nt, Artificial Sequence
  Description of Artificial Sequence: Synthetic oligonucleotide
uuaauacugccaccgagaa

SEQ ID NO: 2855634 - RNA, 19 nt, Artificial Sequence
  Description of Artificial Sequence: Synthetic oligonucleotide
agaggcauagaaaccaugg

SEQ ID NO: 2855635 - RNA, 19 nt, Artificial Sequence
  Description of Artificial Sequence: Synthetic oligonucleotide
uauacaacuuucaggccac

SEQ ID NO: 2855636 - RNA, 19 nt, Artificial Sequence
  Description of Artificial Sequence: Synthetic oligonucleotide
caguuuaauacugccaccg

SEQ ID NO: 2855637 - RNA, 19 nt, Artificial Sequence
  Description of Artificial Sequence: Synthetic oligonucleotide
acagucaaacuuuaaaauu

SEQ ID NO: 2855638 - RNA, 19 nt, Artificial Sequence
  Description of Artificial Sequence: Synthetic oligonucleotide
aaaagccaacuacaguaga

SEQ ID NO: 2855639 - RNA, 19 nt, Artificial Sequence
  Description of Artificial Sequence: Synthetic oligonucleotide
uuuucuauguauguaggau

SEQ ID NO: 2855640 - RNA, 19 nt, Artificial Sequence
  Description of Artificial Sequence: Synthetic oligonucleotide
uucaaaagccaacuacagu

SEQ ID NO: 2855641 - RNA, 19 nt, Artificial Sequence
  Description of Artificial Sequence: Synthetic oligonucleotide
auagagaggcauagaaacc

SEQ ID NO: 2855642 - RNA, 19 nt, Artificial Sequence
  Description of Artificial Sequence: Synthetic oligonucleotide
uagagaggcauagaaacca

SEQ ID NO: 2855643 - RNA, 19 nt, Artificial Sequence
  Description of Artificial Sequence: Synthetic oligonucleotide
  modified_base (9)..(9): a, c, u, g, unknown or other
ugagcugcngacaaauuua

SEQ ID NO: 2855644 - RNA, 19 nt, Artificial Sequence
  Description of Artificial Sequence: Synthetic oligonucleotide
uugaaggucugaaguauca

SEQ ID NO: 2855645 - RNA, 19 nt, Artificial Sequence
  Description of Artificial Sequence: Synthetic oligonucleotide
cuuagcucauuaaacaaca

SEQ ID NO: 2855646 - RNA, 19 nt, Artificial Sequence
  Description of Artificial Sequence: Synthetic oligonucleotide
uucuuagcucauuaaacaa

SEQ ID NO: 2855647 - RNA, 19 nt, Artificial Sequence
  Description of Artificial Sequence: Synthetic oligonucleotide
uucacugcagaauuucuuc

SEQ ID NO: 2855648 - RNA, 19 nt, Artificial Sequence
  Description of Artificial Sequence: Synthetic oligonucleotide
uuuauacagucaaacuuua

SEQ ID NO: 2855649 - RNA, 19 nt, Artificial Sequence
  Description of Artificial Sequence: Synthetic oligonucleotide
uuagcucauuaaacaacag

SEQ ID NO: 2855650 - RNA, 19 nt, Artificial Sequence
  Description of Artificial Sequence: Synthetic oligonucleotide
  modified_base (4)..(4): a, c, u, g, unknown or other
ugcngacaaauuuaacuuc

SEQ ID NO: 2855651 - RNA, 19 nt, Artificial Sequence
  Description of Artificial Sequence: Synthetic oligonucleotide
ugaugcuaaaaugcagagg

SEQ ID NO: 2855652 - RNA, 19 nt, Artificial Sequence
  Description of Artificial Sequence: Synthetic oligonucleotide
aaggucugaaguaucaagu

SEQ ID NO: 2855653 - RNA, 19 nt, Artificial Sequence
  Description of Artificial Sequence: Synthetic oligonucleotide
caaaagccaacuacaguag

SEQ ID NO: 2855654 - RNA, 19 nt, Artificial Sequence
  Description of Artificial Sequence: Synthetic oligonucleotide
aacaggauacaugacugca

SEQ ID NO: 2855655 - RNA, 19 nt, Artificial Sequence
  Description of Artificial Sequence: Synthetic oligonucleotide
aaauuuaacuucguucuua

SEQ ID NO: 2855656 - RNA, 19 nt, Artificial Sequence
  Description of Artificial Sequence: Synthetic oligonucleotide
ucaggccacaguuuugaag

SEQ ID NO: 2855657 - RNA, 19 nt, Artificial Sequence
  Description of Artificial Sequence: Synthetic oligonucleotide
auuuauacagucaaacuuu

SEQ ID NO: 2855658 - RNA, 19 nt, Artificial Sequence
  Description of Artificial Sequence: Synthetic oligonucleotide
cugaaacuuuugaaagacg

SEQ ID NO: 2855659 - RNA, 19 nt, Artificial Sequence
  Description of Artificial Sequence: Synthetic oligonucleotide
ucguucuuagcucauuaaa

SEQ ID NO: 2855660 - RNA, 19 nt, Artificial Sequence
  Description of Artificial Sequence: Synthetic oligonucleotide
ugaaagacggcgucucagc

SEQ ID NO: 2855661 - RNA, 19 nt, Artificial Sequence
  Description of Artificial Sequence: Synthetic oligonucleotide
ggaaucuucauucacugca

SEQ ID NO: 2855662 - RNA, 19 nt, Artificial Sequence
  Description of Artificial Sequence: Synthetic oligonucleotide
ucacugcagaauuucuucc

SEQ ID NO: 2855663 - RNA, 19 nt, Artificial Sequence
  Description of Artificial Sequence: Synthetic oligonucleotide
ucuuaacauauacaacuuu

SEQ ID NO: 2855664 - RNA, 19 nt, Artificial Sequence
  Description of Artificial Sequence: Synthetic oligonucleotide
aaugcagaggaaucuucau

SEQ ID NO: 2855665 - RNA, 19 nt, Artificial Sequence
  Description of Artificial Sequence: Synthetic oligonucleotide
ucuuuaaaauaaugucuuc

SEQ ID NO: 2855666 - RNA, 19 nt, Artificial Sequence
  Description of Artificial Sequence: Synthetic oligonucleotide
aguugguuugaugaauuag

SEQ ID NO: 2855667 - RNA, 19 nt, Artificial Sequence
  Description of Artificial Sequence: Synthetic oligonucleotide
cuugccgucuuuaaaauaa

SEQ ID NO: 2855668 - RNA, 19 nt, Artificial Sequence
  Description of Artificial Sequence: Synthetic oligonucleotide
uugaugaauuagccgguug

SEQ ID NO: 2855669 - RNA, 19 nt, Artificial Sequence
  Description of Artificial Sequence: Synthetic oligonucleotide
acaacaggauacaugacug

SEQ ID NO: 2855670 - RNA, 19 nt, Artificial Sequence
  Description of Artificial Sequence: Synthetic oligonucleotide
aaucuucauucacugcaga

SEQ ID NO: 2855671 - RNA, 19 nt, Artificial Sequence
  Description of Artificial Sequence: Synthetic oligonucleotide
gugaugcuaaaaugcagag

SEQ ID NO: 2855672 - RNA, 19 nt, Artificial Sequence
  Description of Artificial Sequence: Synthetic oligonucleotide
uggaaguggucucagcuuc

SEQ ID NO: 2855673 - RNA, 19 nt, Artificial Sequence
  Description of Artificial Sequence: Synthetic oligonucleotide
uuugaaggucugaaguauc

SEQ ID NO: 2855674 - RNA, 19 nt, Artificial Sequence
  Description of Artificial Sequence: Synthetic oligonucleotide
uuuugaaggucugaaguau

SEQ ID NO: 2855675 - RNA, 19 nt, Artificial Sequence
  Description of Artificial Sequence: Synthetic oligonucleotide
uaacuucguucuuagcuca

SEQ ID NO: 2855676 - RNA, 19 nt, Artificial Sequence
  Description of Artificial Sequence: Synthetic oligonucleotide
ugaacacauuuuauugccu

SEQ ID NO: 2855677 - RNA, 19 nt, Artificial Sequence
  Description of Artificial Sequence: Synthetic oligonucleotide
auucaaaagccaacuacag

SEQ ID NO: 2855678 - RNA, 19 nt, Artificial Sequence
  Description of Artificial Sequence: Synthetic oligonucleotide
acugcauagagaggcauag

SEQ ID NO: 2855679 - RNA, 19 nt, Artificial Sequence
  Description of Artificial Sequence: Synthetic oligonucleotide
acaacuuucaggccacagu

SEQ ID NO: 2855680 - RNA, 19 nt, Artificial Sequence
  Description of Artificial Sequence: Synthetic oligonucleotide
cuucccuuuucuauguaug

SEQ ID NO: 2855681 - RNA, 19 nt, Artificial Sequence
  Description of Artificial Sequence: Synthetic oligonucleotide
uuggcacuuaugaacacau

SEQ ID NO: 2855682 - RNA, 19 nt, Artificial Sequence
  Description of Artificial Sequence: Synthetic oligonucleotide
agugaugcuaaaaugcaga

SEQ ID NO: 2855683 - RNA, 19 nt, Artificial Sequence
  Description of Artificial Sequence: Synthetic oligonucleotide
cauauacaacuuucaggcc

SEQ ID NO: 2855684 - RNA, 19 nt, Artificial Sequence
  Description of Artificial Sequence: Synthetic oligonucleotide
aaagacggcgucucagcgu

SEQ ID NO: 2855685 - RNA, 19 nt, Artificial Sequence
  Description of Artificial Sequence: Synthetic oligonucleotide
cuucagaaguguacaacug

SEQ ID NO: 2855686 - RNA, 19 nt, Artificial Sequence
  Description of Artificial Sequence: Synthetic oligonucleotide
gaaguguacaacugaaacu

SEQ ID NO: 2855687 - RNA, 19 nt, Artificial Sequence
  Description of Artificial Sequence: Synthetic oligonucleotide
gaugaauuagccgguuggc

SEQ ID NO: 2855688 - RNA, 19 nt, Artificial Sequence
  Description of Artificial Sequence: Synthetic oligonucleotide
ugcuaaaaugcagaggaau

SEQ ID NO: 2855689 - RNA, 19 nt, Artificial Sequence
  Description of Artificial Sequence: Synthetic oligonucleotide
gaaucuucauucacugcag

SEQ ID NO: 2855690 - RNA, 19 nt, Artificial Sequence
  Description of Artificial Sequence: Synthetic oligonucleotide
ucugaaguaucaaguuggu

SEQ ID NO: 2855691 - RNA, 19 nt, Artificial Sequence
  Description of Artificial Sequence: Synthetic oligonucleotide
cauuuuauugccuugccgu

SEQ ID NO: 2855692 - RNA, 19 nt, Artificial Sequence
  Description of Artificial Sequence: Synthetic oligonucleotide
  modified_base (3)..(3): a, c, u, g, unknown or other
gcngacaaauuuaacuucg

SEQ ID NO: 2855693 - RNA, 19 nt, Artificial Sequence
  Description of Artificial Sequence: Synthetic oligonucleotide
uaggauaaagaauggugua

SEQ ID NO: 2855694 - RNA, 19 nt, Artificial Sequence
  Description of Artificial Sequence: Synthetic oligonucleotide
uuucuucccuuuucuaugu

SEQ ID NO: 2855695 - RNA, 19 nt, Artificial Sequence
  Description of Artificial Sequence: Synthetic oligonucleotide
uugaaagacggcgucucag

SEQ ID NO: 2855696 - RNA, 19 nt, Artificial Sequence
  Description of Artificial Sequence: Synthetic oligonucleotide
ugccgucuuuaaaauaaug

SEQ ID NO: 2855697 - RNA, 19 nt, Artificial Sequence
  Description of Artificial Sequence: Synthetic oligonucleotide
aacuuuugaaagacggcgu

SEQ ID NO: 2855698 - RNA, 19 nt, Artificial Sequence
  Description of Artificial Sequence: Synthetic oligonucleotide
ugccuugccgucuuuaaaa

SEQ ID NO: 2855699 - RNA, 19 nt, Artificial Sequence
  Description of Artificial Sequence: Synthetic oligonucleotide
aaacaacaggauacaugac

SEQ ID NO: 2855700 - RNA, 19 nt, Artificial Sequence
  Description of Artificial Sequence: Synthetic oligonucleotide
ugucauccucauucaaaag

SEQ ID NO: 2855701 - RNA, 19 nt, Artificial Sequence
  Description of Artificial Sequence: Synthetic oligonucleotide
uuucaggccacaguuuuga

SEQ ID NO: 2855702 - RNA, 19 nt, Artificial Sequence
  Description of Artificial Sequence: Synthetic oligonucleotide
aggauacaugacugcauag

SEQ ID NO: 2855703 - RNA, 19 nt, Artificial Sequence
  Description of Artificial Sequence: Synthetic oligonucleotide
cugauaauuuauacaguca

SEQ ID NO: 2855704 - RNA, 19 nt, Artificial Sequence
  Description of Artificial Sequence: Synthetic oligonucleotide
gauaaagaaugguguacaa

SEQ ID NO: 2855705 - RNA, 19 nt, Artificial Sequence
  Description of Artificial Sequence: Synthetic oligonucleotide
uuugaaagacggcgucuca

SEQ ID NO: 2855706 - RNA, 19 nt, Artificial Sequence
  Description of Artificial Sequence: Synthetic oligonucleotide
auuuacagauaaaugcagu

SEQ ID NO: 2855707 - RNA, 19 nt, Artificial Sequence
  Description of Artificial Sequence: Synthetic oligonucleotide
uucccuuuucuauguaugu

SEQ ID NO: 2855708 - RNA, 19 nt, Artificial Sequence
  Description of Artificial Sequence: Synthetic oligonucleotide
cacugcagaauuucuuccc

SEQ ID NO: 2855709 - RNA, 19 nt, Artificial Sequence
  Description of Artificial Sequence: Synthetic oligonucleotide
cauagaaaccauggaagug

SEQ ID NO: 2855710 - RNA, 19 nt, Artificial Sequence
  Description of Artificial Sequence: Synthetic oligonucleotide
uuacagauaaaugcaguuu

SEQ ID NO: 2855711 - RNA, 19 nt, Artificial Sequence
  Description of Artificial Sequence: Synthetic oligonucleotide
uuuugaaagacggcgucuc

SEQ ID NO: 2855712 - RNA, 19 nt, Artificial Sequence
  Description of Artificial Sequence: Synthetic oligonucleotide
auaaugucuucagaagugu

SEQ ID NO: 2855713 - RNA, 19 nt, Artificial Sequence
  Description of Artificial Sequence: Synthetic oligonucleotide
guaucaaguugguuugaug

SEQ ID NO: 2855714 - RNA, 19 nt, Artificial Sequence
  Description of Artificial Sequence: Synthetic oligonucleotide
  modified_base (17)..(17): a, c, u, g, unknown or other
ucagcgucugagcugcnga

SEQ ID NO: 2855715 - RNA, 19 nt, Artificial Sequence
  Description of Artificial Sequence: Synthetic oligonucleotide
cucauuaaacaacaggaua

SEQ ID NO: 2855716 - RNA, 19 nt, Artificial Sequence
  Description of Artificial Sequence: Synthetic oligonucleotide
uuauacagucaaacuuuaa

SEQ ID NO: 2855717 - RNA, 19 nt, Artificial Sequence
  Description of Artificial Sequence: Synthetic oligonucleotide
uagaaaccauggaaguggu

SEQ ID NO: 2855718 - RNA, 19 nt, Artificial Sequence
  Description of Artificial Sequence: Synthetic oligonucleotide
acugcagaauuucuucccu

SEQ ID NO: 2855719 - RNA, 19 nt, Artificial Sequence
  Description of Artificial Sequence: Synthetic oligonucleotide
aaagccaacuacaguagaa

SEQ ID NO: 2855720 - RNA, 19 nt, Artificial Sequence
  Description of Artificial Sequence: Synthetic oligonucleotide
ucauucacugcagaauuuc

SEQ ID NO: 2855721 - RNA, 19 nt, Artificial Sequence
  Description of Artificial Sequence: Synthetic oligonucleotide
uuuuauugccuugccgucu

SEQ ID NO: 2855722 - RNA, 19 nt, Artificial Sequence
  Description of Artificial Sequence: Synthetic oligonucleotide
acuuucaggccacaguuuu

SEQ ID NO: 2855723 - RNA, 19 nt, Artificial Sequence
  Description of Artificial Sequence: Synthetic oligonucleotide
gauaauuuauacagucaaa

SEQ ID NO: 2855724 - RNA, 19 nt, Artificial Sequence
  Description of Artificial Sequence: Synthetic oligonucleotide
cacauuuuauugccuugcc

SEQ ID NO: 2855725 - RNA, 19 nt, Artificial Sequence
  Description of Artificial Sequence: Synthetic oligonucleotide
caguuuugaaggucugaag

SEQ ID NO: 2855726 - RNA, 19 nt, Artificial Sequence
  Description of Artificial Sequence: Synthetic oligonucleotide
guacaacugaaacuuuuga

SEQ ID NO: 2855727 - RNA, 19 nt, Artificial Sequence
  Description of Artificial Sequence: Synthetic oligonucleotide
caacaggauacaugacugc

SEQ ID NO: 2855728 - RNA, 19 nt, Artificial Sequence
  Description of Artificial Sequence: Synthetic oligonucleotide
ucaaguugguuugaugaau

SEQ ID NO: 2855729 - RNA, 19 nt, Artificial Sequence
  Description of Artificial Sequence: Synthetic oligonucleotide
aguuuaauacugccaccga

SEQ ID NO: 2855730 - RNA, 19 nt, Artificial Sequence
  Description of Artificial Sequence: Synthetic oligonucleotide
agaggaaucuucauucacu

SEQ ID NO: 2855731 - RNA, 19 nt, Artificial Sequence
  Description of Artificial Sequence: Synthetic oligonucleotide
aagccaacuacaguagaaa

SEQ ID NO: 2855732 - RNA, 19 nt, Artificial Sequence
  Description of Artificial Sequence: Synthetic oligonucleotide
ggucugaaguaucaaguug

SEQ ID NO: 2855733 - RNA, 19 nt, Artificial Sequence
  Description of Artificial Sequence: Synthetic oligonucleotide
cuuuucuauguauguagga

SEQ ID NO: 2855734 - RNA, 19 nt, Artificial Sequence
  Description of Artificial Sequence: Synthetic oligonucleotide
aucaaguugguuugaugaa

SEQ ID NO: 2855735 - RNA, 19 nt, Artificial Sequence
  Description of Artificial Sequence: Synthetic oligonucleotide
uaaugucuucagaagugua

SEQ ID NO: 2855736 - RNA, 19 nt, Artificial Sequence
  Description of Artificial Sequence: Synthetic oligonucleotide
cuuaugaacacauuuuauu

SEQ ID NO: 2855737 - RNA, 19 nt, Artificial Sequence
  Description of Artificial Sequence: Synthetic oligonucleotide
aaguugguuugaugaauua

SEQ ID NO: 2855738 - RNA, 19 nt, Artificial Sequence
  Description of Artificial Sequence: Synthetic oligonucleotide
uuuauugccuugccgucuu

SEQ ID NO: 2855739 - RNA, 19 nt, Artificial Sequence
  Description of Artificial Sequence: Synthetic oligonucleotide
guaggauaaagaauggugu

SEQ ID NO: 2855740 - RNA, 19 nt, Artificial Sequence
  Description of Artificial Sequence: Synthetic oligonucleotide
guuuugaaggucugaagua

SEQ ID NO: 2855741 - RNA, 19 nt, Artificial Sequence
  Description of Artificial Sequence: Synthetic oligonucleotide
ccuuuucuauguauguagg

SEQ ID NO: 2855742 - RNA, 19 nt, Artificial Sequence
  Description of Artificial Sequence: Synthetic oligonucleotide
augucuucagaaguguaca

SEQ ID NO: 2855743 - RNA, 19 nt, Artificial Sequence
  Description of Artificial Sequence: Synthetic oligonucleotide
uucguucuuagcucauuaa

SEQ ID NO: 2855744 - RNA, 19 nt, Artificial Sequence
  Description of Artificial Sequence: Synthetic oligonucleotide
cccuuuucuauguauguag

SEQ ID NO: 2855745 - RNA, 19 nt, Artificial Sequence
  Description of Artificial Sequence: Synthetic oligonucleotide
uacaacuuucaggccacag

SEQ ID NO: 2855746 - RNA, 19 nt, Artificial Sequence
  Description of Artificial Sequence: Synthetic oligonucleotide
ccgucuuuaaaauaauguc

SEQ ID NO: 2855747 - RNA, 19 nt, Artificial Sequence
  Description of Artificial Sequence: Synthetic oligonucleotide
auuaaacaacaggauacau

SEQ ID NO: 2855748 - RNA, 19 nt, Artificial Sequence
  Description of Artificial Sequence: Synthetic oligonucleotide
acaguuuugaaggucugaa

SEQ ID NO: 2855749 - RNA, 19 nt, Artificial Sequence
  Description of Artificial Sequence: Synthetic oligonucleotide
ugcagaauuucuucccuuu

SEQ ID NO: 2855750 - RNA, 19 nt, Artificial Sequence
  Description of Artificial Sequence: Synthetic oligonucleotide
ugucuucagaaguguacaa

SEQ ID NO: 2855751 - RNA, 19 nt, Artificial Sequence
  Description of Artificial Sequence: Synthetic oligonucleotide
cuucaucucuuccauuguc

SEQ ID NO: 2855752 - RNA, 19 nt, Artificial Sequence
  Description of Artificial Sequence: Synthetic oligonucleotide
gaggcauagaaaccaugga

SEQ ID NO: 2855753 - RNA, 19 nt, Artificial Sequence
  Description of Artificial Sequence: Synthetic oligonucleotide
gggacugauaauuuauaca

SEQ ID NO: 2855754 - RNA, 19 nt, Artificial Sequence
  Description of Artificial Sequence: Synthetic oligonucleotide
agccaacuacaguagaaaa

SEQ ID NO: 2855755 - RNA, 19 nt, Artificial Sequence
  Description of Artificial Sequence: Synthetic oligonucleotide
acaucucuuaacauauaca

SEQ ID NO: 2855756 - RNA, 19 nt, Artificial Sequence
  Description of Artificial Sequence: Synthetic oligonucleotide
cagaggaaucuucauucac

SEQ ID NO: 2855757 - RNA, 19 nt, Artificial Sequence
  Description of Artificial Sequence: Synthetic oligonucleotide
uucauucacugcagaauuu

SEQ ID NO: 2855758 - RNA, 19 nt, Artificial Sequence
  Description of Artificial Sequence: Synthetic oligonucleotide
auugucauccucauucaaa

SEQ ID NO: 2855759 - RNA, 19 nt, Artificial Sequence
  Description of Artificial Sequence: Synthetic oligonucleotide
  modified_base (6)..(6): a, c, u, g, unknown or other
gcugcngacaaauuuaacu

SEQ ID NO: 2855760 - RNA, 19 nt, Artificial Sequence
  Description of Artificial Sequence: Synthetic oligonucleotide
gaaauacaucucuuaacau

SEQ ID NO: 2855761 - RNA, 19 nt, Artificial Sequence
  Description of Artificial Sequence: Synthetic oligonucleotide
aggucugaaguaucaaguu

SEQ ID NO: 2855762 - RNA, 19 nt, Artificial Sequence
  Description of Artificial Sequence: Synthetic oligonucleotide
cauuaaacaacaggauaca

SEQ ID NO: 2855763 - RNA, 19 nt, Artificial Sequence
  Description of Artificial Sequence: Synthetic oligonucleotide
gucaaacuuuaaaauuuac

SEQ ID NO: 2855764 - RNA, 19 nt, Artificial Sequence
  Description of Artificial Sequence: Synthetic oligonucleotide
acuuaugaacacauuuuau

SEQ ID NO: 2855765 - RNA, 19 nt, Artificial Sequence
  Description of Artificial Sequence: Synthetic oligonucleotide
auguaggauaaagaauggu

SEQ ID NO: 2855766 - RNA, 19 nt, Artificial Sequence
  Description of Artificial Sequence: Synthetic oligonucleotide
uaauacugccaccgagaaa

SEQ ID NO: 2855767 - RNA, 19 nt, Artificial Sequence
  Description of Artificial Sequence: Synthetic oligonucleotide
augaauuagccgguuggca

SEQ ID NO: 2855768 - RNA, 19 nt, Artificial Sequence
  Description of Artificial Sequence: Synthetic oligonucleotide
gucucagcgucugagcugc

SEQ ID NO: 2855769 - RNA, 19 nt, Artificial Sequence
  Description of Artificial Sequence: Synthetic oligonucleotide
  modified_base (7)..(7): a, c, u, g, unknown or other
agcugcngacaaauuuaac

SEQ ID NO: 2855770 - RNA, 19 nt, Artificial Sequence
  Description of Artificial Sequence: Synthetic oligonucleotide
cacuuaugaacacauuuua

SEQ ID NO: 2855771 - RNA, 19 nt, Artificial Sequence
  Description of Artificial Sequence: Synthetic oligonucleotide
auacaugacugcauagaga

SEQ ID NO: 2855772 - RNA, 19 nt, Artificial Sequence
  Description of Artificial Sequence: Synthetic oligonucleotide
ggauaaagaaugguguaca

SEQ ID NO: 2855773 - RNA, 19 nt, Artificial Sequence
  Description of Artificial Sequence: Synthetic oligonucleotide
acugccaccgagaaauaca

SEQ ID NO: 2855774 - RNA, 19 nt, Artificial Sequence
  Description of Artificial Sequence: Synthetic oligonucleotide
augcagaggaaucuucauu

SEQ ID NO: 2855775 - RNA, 19 nt, Artificial Sequence
  Description of Artificial Sequence: Synthetic oligonucleotide
cagucaaacuuuaaaauuu

SEQ ID NO: 2855776 - RNA, 19 nt, Artificial Sequence
  Description of Artificial Sequence: Synthetic oligonucleotide
aaccauggaaguggucuca

SEQ ID NO: 2855777 - RNA, 19 nt, Artificial Sequence
  Description of Artificial Sequence: Synthetic oligonucleotide
cguucuuagcucauuaaac

SEQ ID NO: 2855778 - RNA, 19 nt, Artificial Sequence
  Description of Artificial Sequence: Synthetic oligonucleotide
gaauuagccgguuggcacu

SEQ ID NO: 2855779 - RNA, 19 nt, Artificial Sequence
  Description of Artificial Sequence: Synthetic oligonucleotide
gucuucagaaguguacaac

SEQ ID NO: 2855780 - RNA, 19 nt, Artificial Sequence
  Description of Artificial Sequence: Synthetic oligonucleotide
auugccuugccgucuuuaa

SEQ ID NO: 2855781 - RNA, 19 nt, Artificial Sequence
  Description of Artificial Sequence: Synthetic oligonucleotide
gcuaaaaugcagaggaauc

SEQ ID NO: 2855782 - RNA, 19 nt, Artificial Sequence
  Description of Artificial Sequence: Synthetic oligonucleotide
gagaggcauagaaaccaug

SEQ ID NO: 2855783 - RNA, 19 nt, Artificial Sequence
  Description of Artificial Sequence: Synthetic oligonucleotide
ccgguuggcacuuaugaac

SEQ ID NO: 2855784 - RNA, 19 nt, Artificial Sequence
  Description of Artificial Sequence: Synthetic oligonucleotide
auggaaguggucucagcuu

SEQ ID NO: 2855785 - RNA, 19 nt, Artificial Sequence
  Description of Artificial Sequence: Synthetic oligonucleotide
aaguaucaaguugguuuga

SEQ ID NO: 2855786 - RNA, 19 nt, Artificial Sequence
  Description of Artificial Sequence: Synthetic oligonucleotide
agucaaacuuuaaaauuua

SEQ ID NO: 2855787 - RNA, 19 nt, Artificial Sequence
  Description of Artificial Sequence: Synthetic oligonucleotide
cuaaaaugcagaggaaucu

SEQ ID NO: 2855788 - RNA, 19 nt, Artificial Sequence
  Description of Artificial Sequence: Synthetic oligonucleotide
gaacacauuuuauugccuu

SEQ ID NO: 2855789 - RNA, 19 nt, Artificial Sequence
  Description of Artificial Sequence: Synthetic oligonucleotide
uugccuugccgucuuuaaa

SEQ ID NO: 2855790 - RNA, 19 nt, Artificial Sequence
  Description of Artificial Sequence: Synthetic oligonucleotide
gucuuuaaaauaaugucuu

SEQ ID NO: 2855791 - RNA, 19 nt, Artificial Sequence
  Description of Artificial Sequence: Synthetic oligonucleotide
cauggaaguggucucagcu

SEQ ID NO: 2855792 - RNA, 19 nt, Artificial Sequence
  Description of Artificial Sequence: Synthetic oligonucleotide
  modified_base (16)..(16): a, c, u, g, unknown or other
cagcgucugagcugcngac

SEQ ID NO: 2855793 - RNA, 19 nt, Artificial Sequence
  Description of Artificial Sequence: Synthetic oligonucleotide
aguaucaaguugguuugau

SEQ ID NO: 2855794 - RNA, 19 nt, Artificial Sequence
  Description of Artificial Sequence: Synthetic oligonucleotide
  modified_base (5)..(5): a, c, u, g, unknown or other
cugcngacaaauuuaacuu

SEQ ID NO: 2855795 - RNA, 19 nt, Artificial Sequence
  Description of Artificial Sequence: Synthetic oligonucleotide
gccaccgagaaauacaucu

SEQ ID NO: 2855796 - RNA, 19 nt, Artificial Sequence
  Description of Artificial Sequence: Synthetic oligonucleotide
acuuuaaaauuuacagaua

SEQ ID NO: 2855797 - RNA, 19 nt, Artificial Sequence
  Description of Artificial Sequence: Synthetic oligonucleotide
uugccgucuuuaaaauaau

SEQ ID NO: 2855798 - RNA, 19 nt, Artificial Sequence
  Description of Artificial Sequence: Synthetic oligonucleotide
uuugaugaauuagccgguu

SEQ ID NO: 2855799 - RNA, 19 nt, Artificial Sequence
  Description of Artificial Sequence: Synthetic oligonucleotide
caucucuuccauugucauc

SEQ ID NO: 2855800 - RNA, 19 nt, Artificial Sequence
  Description of Artificial Sequence: Synthetic oligonucleotide
uuagccgguuggcacuuau

SEQ ID NO: 2855801 - RNA, 19 nt, Artificial Sequence
  Description of Artificial Sequence: Synthetic oligonucleotide
gcaguuuaauacugccacc

SEQ ID NO: 2855802 - RNA, 19 nt, Artificial Sequence
  Description of Artificial Sequence: Synthetic oligonucleotide
acagauaaaugcaguuuaa

SEQ ID NO: 2855803 - RNA, 19 nt, Artificial Sequence
  Description of Artificial Sequence: Synthetic oligonucleotide
augcaguuuaauacugcca

SEQ ID NO: 2855804 - RNA, 19 nt, Artificial Sequence
  Description of Artificial Sequence: Synthetic oligonucleotide
  modified_base (11)..(11): a, c, u, g, unknown or other
ucugagcugcngacaaauu

SEQ ID NO: 2855805 - RNA, 19 nt, Artificial Sequence
  Description of Artificial Sequence: Synthetic oligonucleotide
ggauacaugacugcauaga

SEQ ID NO: 2855806 - RNA, 19 nt, Artificial Sequence
  Description of Artificial Sequence: Synthetic oligonucleotide
uacugccaccgagaaauac

SEQ ID NO: 2855807 - RNA, 19 nt, Artificial Sequence
  Description of Artificial Sequence: Synthetic oligonucleotide
cauccucauucaaaagcca

SEQ ID NO: 2855808 - RNA, 19 nt, Artificial Sequence
  Description of Artificial Sequence: Synthetic oligonucleotide
ucccuuuucuauguaugua

SEQ ID NO: 2855809 - RNA, 19 nt, Artificial Sequence
  Description of Artificial Sequence: Synthetic oligonucleotide
uagccgguuggcacuuaug

SEQ ID NO: 2855810 - RNA, 19 nt, Artificial Sequence
  Description of Artificial Sequence: Synthetic oligonucleotide
acaugacugcauagagagg

SEQ ID NO: 2855811 - RNA, 19 nt, Artificial Sequence
  Description of Artificial Sequence: Synthetic oligonucleotide
aauuagccgguuggcacuu

SEQ ID NO: 2855812 - RNA, 19 nt, Artificial Sequence
  Description of Artificial Sequence: Synthetic oligonucleotide
cuucauucacugcagaauu

SEQ ID NO: 2855813 - RNA, 19 nt, Artificial Sequence
  Description of Artificial Sequence: Synthetic oligonucleotide
ugacugcauagagaggcau

SEQ ID NO: 2855814 - RNA, 19 nt, Artificial Sequence
  Description of Artificial Sequence: Synthetic oligonucleotide
auucacugcagaauuucuu

SEQ ID NO: 2855815 - RNA, 19 nt, Artificial Sequence
  Description of Artificial Sequence: Synthetic oligonucleotide
cagaaguguacaacugaaa

SEQ ID NO: 2855816 - RNA, 19 nt, Artificial Sequence
  Description of Artificial Sequence: Synthetic oligonucleotide
  modified_base (10)..(10): a, c, u, g, unknown or other
cugagcugcngacaaauuu

SEQ ID NO: 2855817 - RNA, 19 nt, Artificial Sequence
  Description of Artificial Sequence: Synthetic oligonucleotide
caggauacaugacugcaua

SEQ ID NO: 2855818 - RNA, 19 nt, Artificial Sequence
  Description of Artificial Sequence: Synthetic oligonucleotide
agaaaccauggaagugguc

SEQ ID NO: 2855819 - RNA, 19 nt, Artificial Sequence
  Description of Artificial Sequence: Synthetic oligonucleotide
accauggaaguggucucag

SEQ ID NO: 2855820 - RNA, 19 nt, Artificial Sequence
  Description of Artificial Sequence: Synthetic oligonucleotide
aacuuucaggccacaguuu

SEQ ID NO: 2855821 - RNA, 19 nt, Artificial Sequence
  Description of Artificial Sequence: Synthetic oligonucleotide
ggcacuuaugaacacauuu

SEQ ID NO: 2855822 - RNA, 19 nt, Artificial Sequence
  Description of Artificial Sequence: Synthetic oligonucleotide
cuucguucuuagcucauua

SEQ ID NO: 2855823 - RNA, 19 nt, Artificial Sequence
  Description of Artificial Sequence: Synthetic oligonucleotide
caacuuucaggccacaguu

SEQ ID NO: 2855824 - RNA, 19 nt, Artificial Sequence
  Description of Artificial Sequence: Synthetic oligonucleotide
gacugauaauuuauacagu

SEQ ID NO: 2855825 - RNA, 19 nt, Artificial Sequence
  Description of Artificial Sequence: Synthetic oligonucleotide
acaggauacaugacugcau

SEQ ID NO: 2855826 - RNA, 19 nt, Artificial Sequence
  Description of Artificial Sequence: Synthetic oligonucleotide
uauugccuugccgucuuua

SEQ ID NO: 2855827 - RNA, 19 nt, Artificial Sequence
  Description of Artificial Sequence: Synthetic oligonucleotide
cucauucaaaagccaacua

SEQ ID NO: 2855828 - RNA, 19 nt, Artificial Sequence
  Description of Artificial Sequence: Synthetic oligonucleotide
  modified_base (8)..(8): a, c, u, g, unknown or other
gagcugcngacaaauuuaa

SEQ ID NO: 2855829 - RNA, 19 nt, Artificial Sequence
  Description of Artificial Sequence: Synthetic oligonucleotide
uucaggccacaguuuugaa

SEQ ID NO: 2855830 - RNA, 19 nt, Artificial Sequence
  Description of Artificial Sequence: Synthetic oligonucleotide
cgucuuuaaaauaaugucu

SEQ ID NO: 2855831 - RNA, 19 nt, Artificial Sequence
  Description of Artificial Sequence: Synthetic oligonucleotide
gagggacugauaauuuaua

SEQ ID NO: 2855832 - RNA, 19 nt, Artificial Sequence
  Description of Artificial Sequence: Synthetic oligonucleotide
cucuuaacauauacaacuu

SEQ ID NO: 2855833 - RNA, 19 nt, Artificial Sequence
  Description of Artificial Sequence: Synthetic oligonucleotide
cauucuucaucucuuccau

SEQ ID NO: 2855834 - RNA, 19 nt, Artificial Sequence
  Description of Artificial Sequence: Synthetic oligonucleotide
cauucacugcagaauuucu

SEQ ID NO: 2855835 - RNA, 19 nt, Artificial Sequence
  Description of Artificial Sequence: Synthetic oligonucleotide
uuccauugucauccucauu

SEQ ID NO: 2855836 - RNA, 19 nt, Artificial Sequence
  Description of Artificial Sequence: Synthetic oligonucleotide
aggccacaguuuugaaggu

SEQ ID NO: 2855837 - RNA, 19 nt, Artificial Sequence
  Description of Artificial Sequence: Synthetic oligonucleotide
caccgagaaauacaucucu

SEQ ID NO: 2855838 - RNA, 19 nt, Artificial Sequence
  Description of Artificial Sequence: Synthetic oligonucleotide
cauugucauccucauucaa

SEQ ID NO: 2855839 - RNA, 19 nt, Artificial Sequence
  Description of Artificial Sequence: Synthetic oligonucleotide
  modified_base (18)..(18): a, c, u, g, unknown or other
cucagcgucugagcugcng

SEQ ID NO: 2855840 - RNA, 19 nt, Artificial Sequence
  Description of Artificial Sequence: Synthetic oligonucleotide
ugccaccgagaaauacauc

SEQ ID NO: 2855841 - RNA, 19 nt, Artificial Sequence
  Description of Artificial Sequence: Synthetic oligonucleotide
caaguugguuugaugaauu

SEQ ID NO: 2855842 - RNA, 19 nt, Artificial Sequence
  Description of Artificial Sequence: Synthetic oligonucleotide
agagaggcauagaaaccau

SEQ ID NO: 2855843 - RNA, 19 nt, Artificial Sequence
  Description of Artificial Sequence: Synthetic oligonucleotide
guuugaugaauuagccggu

SEQ ID NO: 2855844 - RNA, 19 nt, Artificial Sequence
  Description of Artificial Sequence: Synthetic oligonucleotide
uggcacuuaugaacacauu

SEQ ID NO: 2855845 - RNA, 19 nt, Artificial Sequence
  Description of Artificial Sequence: Synthetic oligonucleotide
gccgucuuuaaaauaaugu

SEQ ID NO: 2855846 - RNA, 19 nt, Artificial Sequence
  Description of Artificial Sequence: Synthetic oligonucleotide
gacggcgucucagcgucug

SEQ ID NO: 2855847 - RNA, 19 nt, Artificial Sequence
  Description of Artificial Sequence: Synthetic oligonucleotide
guggucucagcuucauucu

SEQ ID NO: 2855848 - RNA, 19 nt, Artificial Sequence
  Description of Artificial Sequence: Synthetic oligonucleotide
ucucagcuucauucuucau

SEQ ID NO: 2855849 - RNA, 19 nt, Artificial Sequence
  Description of Artificial Sequence: Synthetic oligonucleotide
aacuucguucuuagcucau

SEQ ID NO: 2855850 - RNA, 19 nt, Artificial Sequence
  Description of Artificial Sequence: Synthetic oligonucleotide
accgagaaauacaucucuu

SEQ ID NO: 2855851 - RNA, 19 nt, Artificial Sequence
  Description of Artificial Sequence: Synthetic oligonucleotide
cacaguuuugaaggucuga

SEQ ID NO: 2855852 - RNA, 19 nt, Artificial Sequence
  Description of Artificial Sequence: Synthetic oligonucleotide
cucuuccauugucauccuc

SEQ ID NO: 2855853 - RNA, 19 nt, Artificial Sequence
  Description of Artificial Sequence: Synthetic oligonucleotide
  modified_base (14)..(14): a, c, u, g, unknown or other
gcgucugagcugcngacaa

SEQ ID NO: 2855854 - RNA, 19 nt, Artificial Sequence
  Description of Artificial Sequence: Synthetic oligonucleotide
  modified_base (2)..(2): a, c, u, g, unknown or other
cngacaaauuuaacuucgu

SEQ ID NO: 2855855 - RNA, 19 nt, Artificial Sequence
  Description of Artificial Sequence: Synthetic oligonucleotide
cuuuugaaagacggcgucu

SEQ ID NO: 2855856 - RNA, 19 nt, Artificial Sequence
  Description of Artificial Sequence: Synthetic oligonucleotide
ggcgucucagcgucugagc

SEQ ID NO: 2855857 - RNA, 19 nt, Artificial Sequence
  Description of Artificial Sequence: Synthetic oligonucleotide
gacugcauagagaggcaua

SEQ ID NO: 2855858 - RNA, 19 nt, Artificial Sequence
  Description of Artificial Sequence: Synthetic oligonucleotide
aguguacaacugaaacuuu

SEQ ID NO: 2855859 - RNA, 19 nt, Artificial Sequence
  Description of Artificial Sequence: Synthetic oligonucleotide
cgagaaauacaucucuuaa

SEQ ID NO: 2855860 - RNA, 19 nt, Artificial Sequence
  Description of Artificial Sequence: Synthetic oligonucleotide
gcauagagaggcauagaaa

SEQ ID NO: 2855861 - RNA, 19 nt, Artificial Sequence
  Description of Artificial Sequence: Synthetic oligonucleotide
ggucucagcuucauucuuc

SEQ ID NO: 2855862 - RNA, 19 nt, Artificial Sequence
  Description of Artificial Sequence: Synthetic oligonucleotide
ccaccgagaaauacaucuc

SEQ ID NO: 2855863 - RNA, 19 nt, Artificial Sequence
  Description of Artificial Sequence: Synthetic oligonucleotide
uuauugccuugccgucuuu

SEQ ID NO: 2855864 - RNA, 19 nt, Artificial Sequence
  Description of Artificial Sequence: Synthetic oligonucleotide
augcuaaaaugcagaggaa

SEQ ID NO: 2855865 - RNA, 19 nt, Artificial Sequence
  Description of Artificial Sequence: Synthetic oligonucleotide
cugccaccgagaaauacau

SEQ ID NO: 2855866 - RNA, 19 nt, Artificial Sequence
  Description of Artificial Sequence: Synthetic oligonucleotide
  modified_base (12)..(12): a, c, u, g, unknown or other
gucugagcugcngacaaau

SEQ ID NO: 2855867 - RNA, 19 nt, Artificial Sequence
  Description of Artificial Sequence: Synthetic oligonucleotide
acuucguucuuagcucauu

SEQ ID NO: 2855868 - RNA, 19 nt, Artificial Sequence
  Description of Artificial Sequence: Synthetic oligonucleotide
cagauaaaugcaguuuaau

SEQ ID NO: 2855869 - RNA, 19 nt, Artificial Sequence
  Description of Artificial Sequence: Synthetic oligonucleotide
cuuccauugucauccucau

SEQ ID NO: 2855870 - RNA, 19 nt, Artificial Sequence
  Description of Artificial Sequence: Synthetic oligonucleotide
guguacaacugaaacuuuu

SEQ ID NO: 2855871 - RNA, 19 nt, Artificial Sequence
  Description of Artificial Sequence: Synthetic oligonucleotide
ccauggaaguggucucagc

SEQ ID NO: 2855872 - RNA, 19 nt, Artificial Sequence
  Description of Artificial Sequence: Synthetic oligonucleotide
auacaucucuuaacauaua

SEQ ID NO: 2855873 - RNA, 19 nt, Artificial Sequence
  Description of Artificial Sequence: Synthetic oligonucleotide
auacaacuuucaggccaca

SEQ ID NO: 2855874 - RNA, 19 nt, Artificial Sequence
  Description of Artificial Sequence: Synthetic oligonucleotide
ccgagaaauacaucucuua

SEQ ID NO: 2855875 - RNA, 19 nt, Artificial Sequence
  Description of Artificial Sequence: Synthetic oligonucleotide
ggagggacugauaauuuau

SEQ ID NO: 2855876 - RNA, 19 nt, Artificial Sequence
  Description of Artificial Sequence: Synthetic oligonucleotide
ccacaguuuugaaggucug

SEQ ID NO: 2855877 - RNA, 19 nt, Artificial Sequence
  Description of Artificial Sequence: Synthetic oligonucleotide
  modified_base (19)..(19): a, c, u, g, unknown or other
ucucagcgucugagcugcn

SEQ ID NO: 2855878 - RNA, 19 nt, Artificial Sequence
  Description of Artificial Sequence: Synthetic oligonucleotide
gccacaguuuugaaggucu

SEQ ID NO: 2855879 - RNA, 19 nt, Artificial Sequence
  Description of Artificial Sequence: Synthetic oligonucleotide
cgguuggcacuuaugaaca

SEQ ID NO: 2855880 - RNA, 19 nt, Artificial Sequence
  Description of Artificial Sequence: Synthetic oligonucleotide
gcucauuaaacaacaggau

SEQ ID NO: 2855881 - RNA, 19 nt, Artificial Sequence
  Description of Artificial Sequence: Synthetic oligonucleotide
gcacuuaugaacacauuuu

SEQ ID NO: 2855882 - RNA, 19 nt, Artificial Sequence
  Description of Artificial Sequence: Synthetic oligonucleotide
cugcauagagaggcauaga

SEQ ID NO: 2855883 - RNA, 19 nt, Artificial Sequence
  Description of Artificial Sequence: Synthetic oligonucleotide
gaaguggucucagcuucau

SEQ ID NO: 2855884 - RNA, 19 nt, Artificial Sequence
  Description of Artificial Sequence: Synthetic oligonucleotide
ggccacaguuuugaagguc

SEQ ID NO: 2855885 - RNA, 19 nt, Artificial Sequence
  Description of Artificial Sequence: Synthetic oligonucleotide
ggaaguggucucagcuuca

SEQ ID NO: 2855886 - RNA, 19 nt, Artificial Sequence
  Description of Artificial Sequence: Synthetic oligonucleotide
acggcgucucagcgucuga

SEQ ID NO: 2855887 - RNA, 19 nt, Artificial Sequence
  Description of Artificial Sequence: Synthetic oligonucleotide
gccgguuggcacuuaugaa

SEQ ID NO: 2855888 - RNA, 19 nt, Artificial Sequence
  Description of Artificial Sequence: Synthetic oligonucleotide
ccucauucaaaagccaacu

SEQ ID NO: 2855889 - RNA, 19 nt, Artificial Sequence
  Description of Artificial Sequence: Synthetic oligonucleotide
gcgucucagcgucugagcu

SEQ ID NO: 2855890 - RNA, 19 nt, Artificial Sequence
  Description of Artificial Sequence: Synthetic oligonucleotide
cgucucagcgucugagcug

SEQ ID NO: 2855891 - RNA, 19 nt, Artificial Sequence
  Description of Artificial Sequence: Synthetic oligonucleotide
cugcagaauuucuucccuu

SEQ ID NO: 2855892 - RNA, 19 nt, Artificial Sequence
  Description of Artificial Sequence: Synthetic oligonucleotide
gcagaauuucuucccuuuu

SEQ ID NO: 2855893 - RNA, 19 nt, Artificial Sequence
  Description of Artificial Sequence: Synthetic oligonucleotide
cugaaguaucaaguugguu

SEQ ID NO: 2855894 - RNA, 19 nt, Artificial Sequence
  Description of Artificial Sequence: Synthetic oligonucleotide
ccuugccgucuuuaaaaua

SEQ ID NO: 2855895 - RNA, 19 nt, Artificial Sequence
  Description of Artificial Sequence: Synthetic oligonucleotide
auacugccaccgagaaaua

SEQ ID NO: 2855896 - RNA, 19 nt, Artificial Sequence
  Description of Artificial Sequence: Synthetic oligonucleotide
gccuugccgucuuuaaaau

SEQ ID NO: 2855897 - RNA, 19 nt, Artificial Sequence
  Description of Artificial Sequence: Synthetic oligonucleotide
auuagccgguuggcacuua

SEQ ID NO: 2855898 - RNA, 19 nt, Artificial Sequence
  Description of Artificial Sequence: Synthetic oligonucleotide
agacggcgucucagcgucu

SEQ ID NO: 2855899 - RNA, 19 nt, Artificial Sequence
  Description of Artificial Sequence: Synthetic oligonucleotide
cggcgucucagcgucugag

SEQ ID NO: 2855900 - RNA, 19 nt, Artificial Sequence
  Description of Artificial Sequence: Synthetic oligonucleotide
  modified_base (13)..(13): a, c, u, g, unknown or other
cgucugagcugcngacaaa

SEQ ID NO: 2855901 - RNA, 19 nt, Artificial Sequence
  Description of Artificial Sequence: Synthetic oligonucleotide
  modified_base (1)..(1): a, c, u, g, unknown or other
ngacaaauuuaacuucguu

SEQ ID NO: 2855902 - RNA, 19 nt, Artificial Sequence
  Description of Artificial Sequence: Synthetic oligonucleotide
ucuuguuggacucugggug

SEQ ID NO: 2855903 - RNA, 19 nt, Artificial Sequence
  Description of Artificial Sequence: Synthetic oligonucleotide
cuuguuggacucugggugg

SEQ ID NO: 2855904 - RNA, 19 nt, Artificial Sequence
  Description of Artificial Sequence: Synthetic oligonucleotide
cucugcagacucuuguugg

SEQ ID NO: 2855905 - RNA, 19 nt, Artificial Sequence
  Description of Artificial Sequence: Synthetic oligonucleotide
ucugcagacucuuguugga

SEQ ID NO: 2855906 - RNA, 19 nt, Artificial Sequence
  Description of Artificial Sequence: Synthetic oligonucleotide
ugcagacucuuguuggacu

SEQ ID NO: 2855907 - RNA, 19 nt, Artificial Sequence
  Description of Artificial Sequence: Synthetic oligonucleotide
uuguuggacucuggguggg

SEQ ID NO: 2855908 - RNA, 19 nt, Artificial Sequence
  Description of Artificial Sequence: Synthetic oligonucleotide
uggacucuggguggggucc

SEQ ID NO: 2855909 - RNA, 19 nt, Artificial Sequence
  Description of Artificial Sequence: Synthetic oligonucleotide
gacucuuguuggacucugg

SEQ ID NO: 2855910 - RNA, 19 nt, Artificial Sequence
  Description of Artificial Sequence: Synthetic oligonucleotide
uguuggacucugggugggg

SEQ ID NO: 2855911 - RNA, 19 nt, Artificial Sequence
  Description of Artificial Sequence: Synthetic oligonucleotide
agacucuuguuggacucug

SEQ ID NO: 2855912 - RNA, 19 nt, Artificial Sequence
  Description of Artificial Sequence: Synthetic oligonucleotide
uuggacucugggugggguc

SEQ ID NO: 2855913 - RNA, 19 nt, Artificial Sequence
  Description of Artificial Sequence: Synthetic oligonucleotide
agggccaccugauccucug

SEQ ID NO: 2855914 - RNA, 19 nt, Artificial Sequence
  Description of Artificial Sequence: Synthetic oligonucleotide
gcagacucuuguuggacuc

SEQ ID NO: 2855915 - RNA, 19 nt, Artificial Sequence
  Description of Artificial Sequence: Synthetic oligonucleotide
cugcagacucuuguuggac

SEQ ID NO: 2855916 - RNA, 19 nt, Artificial Sequence
  Description of Artificial Sequence: Synthetic oligonucleotide
cucuuguuggacucugggu

SEQ ID NO: 2855917 - RNA, 19 nt, Artificial Sequence
  Description of Artificial Sequence: Synthetic oligonucleotide
accugauccucugcagacu

SEQ ID NO: 2855918 - RNA, 19 nt, Artificial Sequence
  Description of Artificial Sequence: Synthetic oligonucleotide
gccaccugauccucugcag

SEQ ID NO: 2855919 - RNA, 19 nt, Artificial Sequence
  Description of Artificial Sequence: Synthetic oligonucleotide
gacucugggugggguccgc

SEQ ID NO: 2855920 - RNA, 19 nt, Artificial Sequence
  Description of Artificial Sequence: Synthetic oligonucleotide
ggacucugggugggguccg

SEQ ID NO: 2855921 - RNA, 19 nt, Artificial Sequence
  Description of Artificial Sequence: Synthetic oligonucleotide
guuggacucuggguggggu

SEQ ID NO: 2855922 - RNA, 19 nt, Artificial Sequence
  Description of Artificial Sequence: Synthetic oligonucleotide
gggccaccugauccucugc

SEQ ID NO: 2855923 - RNA, 19 nt, Artificial Sequence
  Description of Artificial Sequence: Synthetic oligonucleotide
cucugggugggguccgccu

SEQ ID NO: 2855924 - RNA, 19 nt, Artificial Sequence
  Description of Artificial Sequence: Synthetic oligonucleotide
cagacucuuguuggacucu

SEQ ID NO: 2855925 - RNA, 19 nt, Artificial Sequence
  Description of Artificial Sequence: Synthetic oligonucleotide
cagggccaccugauccucu

SEQ ID NO: 2855926 - RNA, 19 nt, Artificial Sequence
  Description of Artificial Sequence: Synthetic oligonucleotide
aaagcuauaaaagagaggc

SEQ ID NO: 2855927 - RNA, 19 nt, Artificial Sequence
  Description of Artificial Sequence: Synthetic oligonucleotide
ucuaaaagcuauaaaagag

SEQ ID NO: 2855928 - RNA, 19 nt, Artificial Sequence
  Description of Artificial Sequence: Synthetic oligonucleotide
uaaaagcuauaaaagagag

SEQ ID NO: 2855929 - RNA, 19 nt, Artificial Sequence
  Description of Artificial Sequence: Synthetic oligonucleotide
uccaucacaaaauacauac

SEQ ID NO: 2855930 - RNA, 19 nt, Artificial Sequence
  Description of Artificial Sequence: Synthetic oligonucleotide
uauugauagauuuccagag

SEQ ID NO: 2855931 - RNA, 19 nt, Artificial Sequence
  Description of Artificial Sequence: Synthetic oligonucleotide
aaauacauacaguacuuug

SEQ ID NO: 2855932 - RNA, 19 nt, Artificial Sequence
  Description of Artificial Sequence: Synthetic oligonucleotide
acaaaauacauacaguacu

SEQ ID NO: 2855933 - RNA, 19 nt, Artificial Sequence
  Description of Artificial Sequence: Synthetic oligonucleotide
ucauccaucacaaaauaca

SEQ ID NO: 2855934 - RNA, 19 nt, Artificial Sequence
  Description of Artificial Sequence: Synthetic oligonucleotide
acaguauugauagauuucc

SEQ ID NO: 2855935 - RNA, 19 nt, Artificial Sequence
  Description of Artificial Sequence: Synthetic oligonucleotide
caucacaaaauacauacag

SEQ ID NO: 2855936 - RNA, 19 nt, Artificial Sequence
  Description of Artificial Sequence: Synthetic oligonucleotide
ucaaagaugaucucgguau

SEQ ID NO: 2855937 - RNA, 19 nt, Artificial Sequence
  Description of Artificial Sequence: Synthetic oligonucleotide
aguauugauagauuuccag

SEQ ID NO: 2855938 - RNA, 19 nt, Artificial Sequence
  Description of Artificial Sequence: Synthetic oligonucleotide
uugauagauuuccagagaa

SEQ ID NO: 2855939 - RNA, 19 nt, Artificial Sequence
  Description of Artificial Sequence: Synthetic oligonucleotide
aauacauacaguacuuuga

SEQ ID NO: 2855940 - RNA, 19 nt, Artificial Sequence
  Description of Artificial Sequence: Synthetic oligonucleotide
gaugaucucgguaucacag

SEQ ID NO: 2855941 - RNA, 19 nt, Artificial Sequence
  Description of Artificial Sequence: Synthetic oligonucleotide
aaaagcuauaaaagagagg

SEQ ID NO: 2855942 - RNA, 19 nt, Artificial Sequence
  Description of Artificial Sequence: Synthetic oligonucleotide
agcuauaaaagagaggcug

SEQ ID NO: 2855943 - RNA, 19 nt, Artificial Sequence
  Description of Artificial Sequence: Synthetic oligonucleotide
cuaaaagcuauaaaagaga

SEQ ID NO: 2855944 - RNA, 19 nt, Artificial Sequence
  Description of Artificial Sequence: Synthetic oligonucleotide
ugauagauuuccagagaag

SEQ ID NO: 2855945 - RNA, 19 nt, Artificial Sequence
  Description of Artificial Sequence: Synthetic oligonucleotide
gucuaaaagcuauaaaaga

SEQ ID NO: 2855946 - RNA, 19 nt, Artificial Sequence
  Description of Artificial Sequence: Synthetic oligonucleotide
aagaugaucucgguaucac

SEQ ID NO: 2855947 - RNA, 19 nt, Artificial Sequence
  Description of Artificial Sequence: Synthetic oligonucleotide
uugggugcaaaccccaggc

SEQ ID NO: 2855948 - RNA, 19 nt, Artificial Sequence
  Description of Artificial Sequence: Synthetic oligonucleotide
uagauuuccagagaaguaa

SEQ ID NO: 2855949 - RNA, 19 nt, Artificial Sequence
  Description of Artificial Sequence: Synthetic oligonucleotide
guauugauagauuuccaga

SEQ ID NO: 2855950 - RNA, 19 nt, Artificial Sequence
  Description of Artificial Sequence: Synthetic oligonucleotide
uaucacaguauugauagau

SEQ ID NO: 2855951 - RNA, 19 nt, Artificial Sequence
  Description of Artificial Sequence: Synthetic oligonucleotide
ggucuaaaagcuauaaaag

SEQ ID NO: 2855952 - RNA, 19 nt, Artificial Sequence
  Description of Artificial Sequence: Synthetic oligonucleotide
auugauagauuuccagaga

SEQ ID NO: 2855953 - RNA, 19 nt, Artificial Sequence
  Description of Artificial Sequence: Synthetic oligonucleotide
auacauacaguacuuugau

SEQ ID NO: 2855954 - RNA, 19 nt, Artificial Sequence
  Description of Artificial Sequence: Synthetic oligonucleotide
ucacaguauugauagauuu

SEQ ID NO: 2855955 - RNA, 19 nt, Artificial Sequence
  Description of Artificial Sequence: Synthetic oligonucleotide
augucaaagaugaucucgg

SEQ ID NO: 2855956 - RNA, 19 nt, Artificial Sequence
  Description of Artificial Sequence: Synthetic oligonucleotide
auugggugcaaaccccagg

SEQ ID NO: 2855957 - RNA, 19 nt, Artificial Sequence
  Description of Artificial Sequence: Synthetic oligonucleotide
gggucuaaaagcuauaaaa

SEQ ID NO: 2855958 - RNA, 19 nt, Artificial Sequence
  Description of Artificial Sequence: Synthetic oligonucleotide
aaagaugaucucgguauca

SEQ ID NO: 2855959 - RNA, 19 nt, Artificial Sequence
  Description of Artificial Sequence: Synthetic oligonucleotide
aaaccccaggccaagcagg

SEQ ID NO: 2855960 - RNA, 19 nt, Artificial Sequence
  Description of Artificial Sequence: Synthetic oligonucleotide
aaaauacauacaguacuuu

SEQ ID NO: 2855961 - RNA, 19 nt, Artificial Sequence
  Description of Artificial Sequence: Synthetic oligonucleotide
cacaguauugauagauuuc

SEQ ID NO: 2855962 - RNA, 19 nt, Artificial Sequence
  Description of Artificial Sequence: Synthetic oligonucleotide
ugaucucgguaucacagua

SEQ ID NO: 2855963 - RNA, 19 nt, Artificial Sequence
  Description of Artificial Sequence: Synthetic oligonucleotide
ucucgguaucacaguauug

SEQ ID NO: 2855964 - RNA, 19 nt, Artificial Sequence
  Description of Artificial Sequence: Synthetic oligonucleotide
aucacaaaauacauacagu

SEQ ID NO: 2855965 - RNA, 19 nt, Artificial Sequence
  Description of Artificial Sequence: Synthetic oligonucleotide
uacauacaguacuuugauc

SEQ ID NO: 2855966 - RNA, 19 nt, Artificial Sequence
  Description of Artificial Sequence: Synthetic oligonucleotide
cucgguaucacaguauuga

SEQ ID NO: 2855967 - RNA, 19 nt, Artificial Sequence
  Description of Artificial Sequence: Synthetic oligonucleotide
agaugaucucgguaucaca

SEQ ID NO: 2855968 - RNA, 19 nt, Artificial Sequence
  Description of Artificial Sequence: Synthetic oligonucleotide
caaaccccaggccaagcag

SEQ ID NO: 2855969 - RNA, 19 nt, Artificial Sequence
  Description of Artificial Sequence: Synthetic oligonucleotide
aauugggugcaaaccccag

SEQ ID NO: 2855970 - RNA, 19 nt, Artificial Sequence
  Description of Artificial Sequence: Synthetic oligonucleotide
aucucgguaucacaguauu

SEQ ID NO: 2855971 - RNA, 19 nt, Artificial Sequence
  Description of Artificial Sequence: Synthetic oligonucleotide
augaucucgguaucacagu

SEQ ID NO: 2855972 - RNA, 19 nt, Artificial Sequence
  Description of Artificial Sequence: Synthetic oligonucleotide
caaagaugaucucgguauc

SEQ ID NO: 2855973 - RNA, 19 nt, Artificial Sequence
  Description of Artificial Sequence: Synthetic oligonucleotide
aagcuauaaaagagaggcu

SEQ ID NO: 2855974 - RNA, 19 nt, Artificial Sequence
  Description of Artificial Sequence: Synthetic oligonucleotide
aaccccaggccaagcaggg

SEQ ID NO: 2855975 - RNA, 19 nt, Artificial Sequence
  Description of Artificial Sequence: Synthetic oligonucleotide
ucgguaucacaguauugau

SEQ ID NO: 2855976 - RNA, 19 nt, Artificial Sequence
  Description of Artificial Sequence: Synthetic oligonucleotide
ugggugcaaaccccaggcc

SEQ ID NO: 2855977 - RNA, 19 nt, Artificial Sequence
  Description of Artificial Sequence: Synthetic oligonucleotide
gucaaagaugaucucggua

SEQ ID NO: 2855978 - RNA, 19 nt, Artificial Sequence
  Description of Artificial Sequence: Synthetic oligonucleotide
caaaauacauacaguacuu

SEQ ID NO: 2855979 - RNA, 19 nt, Artificial Sequence
  Description of Artificial Sequence: Synthetic oligonucleotide
caguauugauagauuucca

SEQ ID NO: 2855980 - RNA, 19 nt, Artificial Sequence
  Description of Artificial Sequence: Synthetic oligonucleotide
cauccaucacaaaauacau

SEQ ID NO: 2855981 - RNA, 19 nt, Artificial Sequence
  Description of Artificial Sequence: Synthetic oligonucleotide
cuauaaaagagaggcugaa

SEQ ID NO: 2855982 - RNA, 19 nt, Artificial Sequence
  Description of Artificial Sequence: Synthetic oligonucleotide
aggggucuaaaagcuauaa

SEQ ID NO: 2855983 - RNA, 19 nt, Artificial Sequence
  Description of Artificial Sequence: Synthetic oligonucleotide
uaggggucuaaaagcuaua

SEQ ID NO: 2855984 - RNA, 19 nt, Artificial Sequence
  Description of Artificial Sequence: Synthetic oligonucleotide
gcuauaaaagagaggcuga

SEQ ID NO: 2855985 - RNA, 19 nt, Artificial Sequence
  Description of Artificial Sequence: Synthetic oligonucleotide
aucacaguauugauagauu

SEQ ID NO: 2855986 - RNA, 19 nt, Artificial Sequence
  Description of Artificial Sequence: Synthetic oligonucleotide
gggugcaaaccccaggcca

SEQ ID NO: 2855987 - RNA, 19 nt, Artificial Sequence
  Description of Artificial Sequence: Synthetic oligonucleotide
guaucacaguauugauaga

SEQ ID NO: 2855988 - RNA, 19 nt, Artificial Sequence
  Description of Artificial Sequence: Synthetic oligonucleotide
ugcaaaccccaggccaagc

SEQ ID NO: 2855989 - RNA, 19 nt, Artificial Sequence
  Description of Artificial Sequence: Synthetic oligonucleotide
guaggggucuaaaagcuau

SEQ ID NO: 2855990 - RNA, 19 nt, Artificial Sequence
  Description of Artificial Sequence: Synthetic oligonucleotide
ggggucuaaaagcuauaaa

SEQ ID NO: 2855991 - RNA, 19 nt, Artificial Sequence
  Description of Artificial Sequence: Synthetic oligonucleotide
gugcaaaccccaggccaag

SEQ ID NO: 2855992 - RNA, 19 nt, Artificial Sequence
  Description of Artificial Sequence: Synthetic oligonucleotide
ccaucacaaaauacauaca

SEQ ID NO: 2855993 - RNA, 19 nt, Artificial Sequence
  Description of Artificial Sequence: Synthetic oligonucleotide
gaucucgguaucacaguau

SEQ ID NO: 2855994 - RNA, 19 nt, Artificial Sequence
  Description of Artificial Sequence: Synthetic oligonucleotide
ggugcaaaccccaggccaa

SEQ ID NO: 2855995 - RNA, 19 nt, Artificial Sequence
  Description of Artificial Sequence: Synthetic oligonucleotide
cgguaucacaguauugaua

SEQ ID NO: 2855996 - RNA, 19 nt, Artificial Sequence
  Description of Artificial Sequence: Synthetic oligonucleotide
aaggaguuauuauacgugg

SEQ ID NO: 2855997 - RNA, 19 nt, Artificial Sequence
  Description of Artificial Sequence: Synthetic oligonucleotide
guuggguugacccacauag

SEQ ID NO: 2855998 - RNA, 19 nt, Artificial Sequence
  Description of Artificial Sequence: Synthetic oligonucleotide
gauaaggaguuauuauacg

SEQ ID NO: 2855999 - RNA, 19 nt, Artificial Sequence
  Description of Artificial Sequence: Synthetic oligonucleotide
auuauacguggccagggcc

SEQ ID NO: 2856000 - RNA, 19 nt, Artificial Sequence
  Description of Artificial Sequence: Synthetic oligonucleotide
uuguccauaagaguggugg

SEQ ID NO: 2856001 - RNA, 19 nt, Artificial Sequence
  Description of Artificial Sequence: Synthetic oligonucleotide
auaagagugguggauauac

SEQ ID NO: 2856002 - RNA, 19 nt, Artificial Sequence
  Description of Artificial Sequence: Synthetic oligonucleotide
aagagugguggauauacug

SEQ ID NO: 2856003 - RNA, 19 nt, Artificial Sequence
  Description of Artificial Sequence: Synthetic oligonucleotide
uaaggaguuauuauacgug

SEQ ID NO: 2856004 - RNA, 19 nt, Artificial Sequence
  Description of Artificial Sequence: Synthetic oligonucleotide
ugaugcuggaccaugggag

SEQ ID NO: 2856005 - RNA, 19 nt, Artificial Sequence
  Description of Artificial Sequence: Synthetic oligonucleotide
guuuccagaguaaacagcg

SEQ ID NO: 2856006 - RNA, 19 nt, Artificial Sequence
  Description of Artificial Sequence: Synthetic oligonucleotide
auaaggaguuauuauacgu

SEQ ID NO: 2856007 - RNA, 19 nt, Artificial Sequence
  Description of Artificial Sequence: Synthetic oligonucleotide
ugcuugguggugaaguugg

SEQ ID NO: 2856008 - RNA, 19 nt, Artificial Sequence
  Description of Artificial Sequence: Synthetic oligonucleotide
acuuucauccagucaaagg

SEQ ID NO: 2856009 - RNA, 19 nt, Artificial Sequence
  Description of Artificial Sequence: Synthetic oligonucleotide
accacuuacgucugcuucc

SEQ ID NO: 2856010 - RNA, 19 nt, Artificial Sequence
  Description of Artificial Sequence: Synthetic oligonucleotide
aguuauuauacguggccag

SEQ ID NO: 2856011 - RNA, 19 nt, Artificial Sequence
  Description of Artificial Sequence: Synthetic oligonucleotide
gagaaggcgucucugaagc

SEQ ID NO: 2856012 - RNA, 19 nt, Artificial Sequence
  Description of Artificial Sequence: Synthetic oligonucleotide
uggguugacccacauagcc

SEQ ID NO: 2856013 - RNA, 19 nt, Artificial Sequence
  Description of Artificial Sequence: Synthetic oligonucleotide
aagcaggggagcgacaggc

SEQ ID NO: 2856014 - RNA, 19 nt, Artificial Sequence
  Description of Artificial Sequence: Synthetic oligonucleotide
uuauuauacguggccaggg

SEQ ID NO: 2856015 - RNA, 19 nt, Artificial Sequence
  Description of Artificial Sequence: Synthetic oligonucleotide
gaguaaacagcggagcgcg

SEQ ID NO: 2856016 - RNA, 19 nt, Artificial Sequence
  Description of Artificial Sequence: Synthetic oligonucleotide
agaugagagguuuccagag

SEQ ID NO: 2856017 - RNA, 19 nt, Artificial Sequence
  Description of Artificial Sequence: Synthetic oligonucleotide
uccagaguaaacagcggag

SEQ ID NO: 2856018 - RNA, 19 nt, Artificial Sequence
  Description of Artificial Sequence: Synthetic oligonucleotide
uccgugagcugcuuggugg

SEQ ID NO: 2856019 - RNA, 19 nt, Artificial Sequence
  Description of Artificial Sequence: Synthetic oligonucleotide
uuccagaguaaacagcgga

SEQ ID NO: 2856020 - RNA, 19 nt, Artificial Sequence
  Description of Artificial Sequence: Synthetic oligonucleotide
uuauacguggccagggcca

SEQ ID NO: 2856021 - RNA, 19 nt, Artificial Sequence
  Description of Artificial Sequence: Synthetic oligonucleotide
gaaguuggugcgcacugcg

SEQ ID NO: 2856022 - RNA, 19 nt, Artificial Sequence
  Description of Artificial Sequence: Synthetic oligonucleotide
auagccauacucuccaacu

SEQ ID NO: 2856023 - RNA, 19 nt, Artificial Sequence
  Description of Artificial Sequence: Synthetic oligonucleotide
uuugacuuucauccaguca

SEQ ID NO: 2856024 - RNA, 19 nt, Artificial Sequence
  Description of Artificial Sequence: Synthetic oligonucleotide
agaguaaacagcggagcgc

SEQ ID NO: 2856025 - RNA, 19 nt, Artificial Sequence
  Description of Artificial Sequence: Synthetic oligonucleotide
uauuauacguggccagggc

SEQ ID NO: 2856026 - RNA, 19 nt, Artificial Sequence
  Description of Artificial Sequence: Synthetic oligonucleotide
gucucguugagcugcaggg

SEQ ID NO: 2856027 - RNA, 19 nt, Artificial Sequence
  Description of Artificial Sequence: Synthetic oligonucleotide
gagugguggauauacugag

SEQ ID NO: 2856028 - RNA, 19 nt, Artificial Sequence
  Description of Artificial Sequence: Synthetic oligonucleotide
gcuaucuccacccugcgcg

SEQ ID NO: 2856029 - RNA, 19 nt, Artificial Sequence
  Description of Artificial Sequence: Synthetic oligonucleotide
aguaccgaccacuuacguc

SEQ ID NO: 2856030 - RNA, 19 nt, Artificial Sequence
  Description of Artificial Sequence: Synthetic oligonucleotide
gugguggauauacugaggc

SEQ ID NO: 2856031 - RNA, 19 nt, Artificial Sequence
  Description of Artificial Sequence: Synthetic oligonucleotide
uaaacagcggagcgcgacg

SEQ ID NO: 2856032 - RNA, 19 nt, Artificial Sequence
  Description of Artificial Sequence: Synthetic oligonucleotide
ucagguacuuguugaagug

SEQ ID NO: 2856033 - RNA, 19 nt, Artificial Sequence
  Description of Artificial Sequence: Synthetic oligonucleotide
uuuccagaguaaacagcgg

SEQ ID NO: 2856034 - RNA, 19 nt, Artificial Sequence
  Description of Artificial Sequence: Synthetic oligonucleotide
cagaguaaacagcggagcg

SEQ ID NO: 2856035 - RNA, 19 nt, Artificial Sequence
  Description of Artificial Sequence: Synthetic oligonucleotide
uuucauccagucaaagguc

SEQ ID NO: 2856036 - RNA, 19 nt, Artificial Sequence
  Description of Artificial Sequence: Synthetic oligonucleotide
uuugggaggguuucuuuug

SEQ ID NO: 2856037 - RNA, 19 nt, Artificial Sequence
  Description of Artificial Sequence: Synthetic oligonucleotide
cucuuguccauaagagugg

SEQ ID NO: 2856038 - RNA, 19 nt, Artificial Sequence
  Description of Artificial Sequence: Synthetic oligonucleotide
guuauuauacguggccagg

SEQ ID NO: 2856039 - RNA, 19 nt, Artificial Sequence
  Description of Artificial Sequence: Synthetic oligonucleotide
ugguggauauacugaggcg

SEQ ID NO: 2856040 - RNA, 19 nt, Artificial Sequence
  Description of Artificial Sequence: Synthetic oligonucleotide
cccagcauaacccuggugg

SEQ ID NO: 2856041 - RNA, 19 nt, Artificial Sequence
  Description of Artificial Sequence: Synthetic oligonucleotide
agcauaacccugguggugg

SEQ ID NO: 2856042 - RNA, 19 nt, Artificial Sequence
  Description of Artificial Sequence: Synthetic oligonucleotide
acuuucccuguuuugggag

SEQ ID NO: 2856043 - RNA, 19 nt, Artificial Sequence
  Description of Artificial Sequence: Synthetic oligonucleotide
cuuucauccagucaaaggu

SEQ ID NO: 2856044 - RNA, 19 nt, Artificial Sequence
  Description of Artificial Sequence: Synthetic oligonucleotide
aacuuucccuguuuuggga

SEQ ID NO: 2856045 - RNA, 19 nt, Artificial Sequence
  Description of Artificial Sequence: Synthetic oligonucleotide
gauauacugaggcgagccc

SEQ ID NO: 2856046 - RNA, 19 nt, Artificial Sequence
  Description of Artificial Sequence: Synthetic oligonucleotide
ggaguuauuauacguggcc

SEQ ID NO: 2856047 - RNA, 19 nt, Artificial Sequence
  Description of Artificial Sequence: Synthetic oligonucleotide
aaaggucugcgcuggagaa

SEQ ID NO: 2856048 - RNA, 19 nt, Artificial Sequence
  Description of Artificial Sequence: Synthetic oligonucleotide
cauacucuccaacuuuccc

SEQ ID NO: 2856049 - RNA, 19 nt, Artificial Sequence
  Description of Artificial Sequence: Synthetic oligonucleotide
caacuuucccuguuuuggg

SEQ ID NO: 2856050 - RNA, 19 nt, Artificial Sequence
  Description of Artificial Sequence: Synthetic oligonucleotide
gaccaugggagaugagagg

SEQ ID NO: 2856051 - RNA, 19 nt, Artificial Sequence
  Description of Artificial Sequence: Synthetic oligonucleotide
auaacccuggugguggugg

SEQ ID NO: 2856052 - RNA, 19 nt, Artificial Sequence
  Description of Artificial Sequence: Synthetic oligonucleotide
ggagcgacaggcuucuugg

SEQ ID NO: 2856053 - RNA, 19 nt, Artificial Sequence
  Description of Artificial Sequence: Synthetic oligonucleotide
cacugcguuggguugaccc

SEQ ID NO: 2856054 - RNA, 19 nt, Artificial Sequence
  Description of Artificial Sequence: Synthetic oligonucleotide
aggaguuauuauacguggc

SEQ ID NO: 2856055 - RNA, 19 nt, Artificial Sequence
  Description of Artificial Sequence: Synthetic oligonucleotide
ucguugagcugcagggacg

SEQ ID NO: 2856056 - RNA, 19 nt, Artificial Sequence
  Description of Artificial Sequence: Synthetic oligonucleotide
gacgcggcuaucuccaccc

SEQ ID NO: 2856057 - RNA, 19 nt, Artificial Sequence
  Description of Artificial Sequence: Synthetic oligonucleotide
uacugaggcgagcccaccg

SEQ ID NO: 2856058 - RNA, 19 nt, Artificial Sequence
  Description of Artificial Sequence: Synthetic oligonucleotide
gaaggcgucucugaagcag

SEQ ID NO: 2856059 - RNA, 19 nt, Artificial Sequence
  Description of Artificial Sequence: Synthetic oligonucleotide
aaacagcggagcgcgacgg

SEQ ID NO: 2856060 - RNA, 19 nt, Artificial Sequence
  Description of Artificial Sequence: Synthetic oligonucleotide
uggugaugcuggaccaugg

SEQ ID NO: 2856061 - RNA, 19 nt, Artificial Sequence
  Description of Artificial Sequence: Synthetic oligonucleotide
gagaugagagguuuccaga

SEQ ID NO: 2856062 - RNA, 19 nt, Artificial Sequence
  Description of Artificial Sequence: Synthetic oligonucleotide
uucaccugggucucguuga

SEQ ID NO: 2856063 - RNA, 19 nt, Artificial Sequence
  Description of Artificial Sequence: Synthetic oligonucleotide
uggaccaugggagaugaga

SEQ ID NO: 2856064 - RNA, 19 nt, Artificial Sequence
  Description of Artificial Sequence: Synthetic oligonucleotide
agcuccgugagcugcuugg

SEQ ID NO: 2856065 - RNA, 19 nt, Artificial Sequence
  Description of Artificial Sequence: Synthetic oligonucleotide
guaccgaccacuuacgucu

SEQ ID NO: 2856066 - RNA, 19 nt, Artificial Sequence
  Description of Artificial Sequence: Synthetic oligonucleotide
ggagaugagagguuuccag

SEQ ID NO: 2856067 - RNA, 19 nt, Artificial Sequence
  Description of Artificial Sequence: Synthetic oligonucleotide
uauacugaggcgagcccac

SEQ ID NO: 2856068 - RNA, 19 nt, Artificial Sequence
  Description of Artificial Sequence: Synthetic oligonucleotide
cuuucccuguuuugggagg

SEQ ID NO: 2856069 - RNA, 19 nt, Artificial Sequence
  Description of Artificial Sequence: Synthetic oligonucleotide
agagguuuccagaguaaac

SEQ ID NO: 2856070 - RNA, 19 nt, Artificial Sequence
  Description of Artificial Sequence: Synthetic oligonucleotide
uugagcugcagggacgcgg

SEQ ID NO: 2856071 - RNA, 19 nt, Artificial Sequence
  Description of Artificial Sequence: Synthetic oligonucleotide
ugcucuuguccauaagagu

SEQ ID NO: 2856072 - RNA, 19 nt, Artificial Sequence
  Description of Artificial Sequence: Synthetic oligonucleotide
ucugcgcuggagaaggcgu

SEQ ID NO: 2856073 - RNA, 19 nt, Artificial Sequence
  Description of Artificial Sequence: Synthetic oligonucleotide
ggauaaggaguuauuauac

SEQ ID NO: 2856074 - RNA, 19 nt, Artificial Sequence
  Description of Artificial Sequence: Synthetic oligonucleotide
gaguuauuauacguggcca

SEQ ID NO: 2856075 - RNA, 19 nt, Artificial Sequence
  Description of Artificial Sequence: Synthetic oligonucleotide
uccaacuuucccuguuuug

SEQ ID NO: 2856076 - RNA, 19 nt, Artificial Sequence
  Description of Artificial Sequence: Synthetic oligonucleotide
agucaaaggucugcgcugg

SEQ ID NO: 2856077 - RNA, 19 nt, Artificial Sequence
  Description of Artificial Sequence: Synthetic oligonucleotide
uuucccuguuuugggaggg

SEQ ID NO: 2856078 - RNA, 19 nt, Artificial Sequence
  Description of Artificial Sequence: Synthetic oligonucleotide
ucucugaagcaggggagcg

SEQ ID NO: 2856079 - RNA, 19 nt, Artificial Sequence
  Description of Artificial Sequence: Synthetic oligonucleotide
augagagguuuccagagua

SEQ ID NO: 2856080 - RNA, 19 nt, Artificial Sequence
  Description of Artificial Sequence: Synthetic oligonucleotide
uuuugggaggguuucuuuu

SEQ ID NO: 2856081 - RNA, 19 nt, Artificial Sequence
  Description of Artificial Sequence: Synthetic oligonucleotide
gcucuuguccauaagagug

SEQ ID NO: 2856082 - RNA, 19 nt, Artificial Sequence
  Description of Artificial Sequence: Synthetic oligonucleotide
ugagcugcagggacgcggc

SEQ ID NO: 2856083 - RNA, 19 nt, Artificial Sequence
  Description of Artificial Sequence: Synthetic oligonucleotide
uaagagugguggauauacu

SEQ ID NO: 2856084 - RNA, 19 nt, Artificial Sequence
  Description of Artificial Sequence: Synthetic oligonucleotide
ucgugucagguacuuguug

SEQ ID NO: 2856085 - RNA, 19 nt, Artificial Sequence
  Description of Artificial Sequence: Synthetic oligonucleotide
guggcuggcguggagaggg

SEQ ID NO: 2856086 - RNA, 19 nt, Artificial Sequence
  Description of Artificial Sequence: Synthetic oligonucleotide
aaggcgucucugaagcagg

SEQ ID NO: 2856087 - RNA, 19 nt, Artificial Sequence
  Description of Artificial Sequence: Synthetic oligonucleotide
accaugggagaugagaggu

SEQ ID NO: 2856088 - RNA, 19 nt, Artificial Sequence
  Description of Artificial Sequence: Synthetic oligonucleotide
uguccauaagaguggugga

SEQ ID NO: 2856089 - RNA, 19 nt, Artificial Sequence
  Description of Artificial Sequence: Synthetic oligonucleotide
auauacugaggcgagccca

SEQ ID NO: 2856090 - RNA, 19 nt, Artificial Sequence
  Description of Artificial Sequence: Synthetic oligonucleotide
aggguuucuuuugacuuuc

SEQ ID NO: 2856091 - RNA, 19 nt, Artificial Sequence
  Description of Artificial Sequence: Synthetic oligonucleotide
uugggaggguuucuuuuga

SEQ ID NO: 2856092 - RNA, 19 nt, Artificial Sequence
  Description of Artificial Sequence: Synthetic oligonucleotide
ugggagaugagagguuucc

SEQ ID NO: 2856093 - RNA, 19 nt, Artificial Sequence
  Description of Artificial Sequence: Synthetic oligonucleotide
ucugaagcaggggagcgac

SEQ ID NO: 2856094 - RNA, 19 nt, Artificial Sequence
  Description of Artificial Sequence: Synthetic oligonucleotide
cauagccauacucuccaac

SEQ ID NO: 2856095 - RNA, 19 nt, Artificial Sequence
  Description of Artificial Sequence: Synthetic oligonucleotide
ucaaaggucugcgcuggag

SEQ ID NO: 2856096 - RNA, 19 nt, Artificial Sequence
  Description of Artificial Sequence: Synthetic oligonucleotide
ucauccagucaaaggucug

SEQ ID NO: 2856097 - RNA, 19 nt, Artificial Sequence
  Description of Artificial Sequence: Synthetic oligonucleotide
gugcucuuguccauaagag

SEQ ID NO: 2856098 - RNA, 19 nt, Artificial Sequence
  Description of Artificial Sequence: Synthetic oligonucleotide
gaccacuuacgucugcuuc

SEQ ID NO: 2856099 - RNA, 19 nt, Artificial Sequence
  Description of Artificial Sequence: Synthetic oligonucleotide
gggaguaccgaccacuuac

SEQ ID NO: 2856100 - RNA, 19 nt, Artificial Sequence
  Description of Artificial Sequence: Synthetic oligonucleotide
agcgacaggcuucuuggug

SEQ ID NO: 2856101 - RNA, 19 nt, Artificial Sequence
  Description of Artificial Sequence: Synthetic oligonucleotide
ugagagguuuccagaguaa

SEQ ID NO: 2856102 - RNA, 19 nt, Artificial Sequence
  Description of Artificial Sequence: Synthetic oligonucleotide
gacccacauagccauacuc

SEQ ID NO: 2856103 - RNA, 19 nt, Artificial Sequence
  Description of Artificial Sequence: Synthetic oligonucleotide
cagguacuuguugaagugg

SEQ ID NO: 2856104 - RNA, 19 nt, Artificial Sequence
  Description of Artificial Sequence: Synthetic oligonucleotide
uuggguugacccacauagc

SEQ ID NO: 2856105 - RNA, 19 nt, Artificial Sequence
  Description of Artificial Sequence: Synthetic oligonucleotide
gaugcuggaccaugggaga

SEQ ID NO: 2856106 - RNA, 19 nt, Artificial Sequence
  Description of Artificial Sequence: Synthetic oligonucleotide
gcgacaggcuucuuggugg

SEQ ID NO: 2856107 - RNA, 19 nt, Artificial Sequence
  Description of Artificial Sequence: Synthetic oligonucleotide
gugaaguuggugcgcacug

SEQ ID NO: 2856108 - RNA, 19 nt, Artificial Sequence
  Description of Artificial Sequence: Synthetic oligonucleotide
cucguugagcugcagggac

SEQ ID NO: 2856109 - RNA, 19 nt, Artificial Sequence
  Description of Artificial Sequence: Synthetic oligonucleotide
ggauauacugaggcgagcc

SEQ ID NO: 2856110 - RNA, 19 nt, Artificial Sequence
  Description of Artificial Sequence: Synthetic oligonucleotide
gacuuucauccagucaaag

SEQ ID NO: 2856111 - RNA, 19 nt, Artificial Sequence
  Description of Artificial Sequence: Synthetic oligonucleotide
aacagcggagcgcgacggg

SEQ ID NO: 2856112 - RNA, 19 nt, Artificial Sequence
  Description of Artificial Sequence: Synthetic oligonucleotide
agagugguggauauacuga

SEQ ID NO: 2856113 - RNA, 19 nt, Artificial Sequence
  Description of Artificial Sequence: Synthetic oligonucleotide
agaucuucaccugggucuc

SEQ ID NO: 2856114 - RNA, 19 nt, Artificial Sequence
  Description of Artificial Sequence: Synthetic oligonucleotide
ccaacuuucccuguuuugg

SEQ ID NO: 2856115 - RNA, 19 nt, Artificial Sequence
  Description of Artificial Sequence: Synthetic oligonucleotide
auccagucaaaggucugcg

SEQ ID NO: 2856116 - RNA, 19 nt, Artificial Sequence
  Description of Artificial Sequence: Synthetic oligonucleotide
uccagucaaaggucugcgc

SEQ ID NO: 2856117 - RNA, 19 nt, Artificial Sequence
  Description of Artificial Sequence: Synthetic oligonucleotide
cugggucucguugagcugc

SEQ ID NO: 2856118 - RNA, 19 nt, Artificial Sequence
  Description of Artificial Sequence: Synthetic oligonucleotide
cagucaaaggucugcgcug

SEQ ID NO: 2856119 - RNA, 19 nt, Artificial Sequence
  Description of Artificial Sequence: Synthetic oligonucleotide
uccauaagagugguggaua

SEQ ID NO: 2856120 - RNA, 19 nt, Artificial Sequence
  Description of Artificial Sequence: Synthetic oligonucleotide
gaagcaggggagcgacagg

SEQ ID NO: 2856121 - RNA, 19 nt, Artificial Sequence
  Description of Artificial Sequence: Synthetic oligonucleotide
ugaggcgagcccaccgugc

SEQ ID NO: 2856122 - RNA, 19 nt, Artificial Sequence
  Description of Artificial Sequence: Synthetic oligonucleotide
ggugcucuuguccauaaga

SEQ ID NO: 2856123 - RNA, 19 nt, Artificial Sequence
  Description of Artificial Sequence: Synthetic oligonucleotide
gguggauauacugaggcga

SEQ ID NO: 2856124 - RNA, 19 nt, Artificial Sequence
  Description of Artificial Sequence: Synthetic oligonucleotide
cuggugguggugguggugg

SEQ ID NO: 2856125 - RNA, 19 nt, Artificial Sequence
  Description of Artificial Sequence: Synthetic oligonucleotide
uugacccacauagccauac

SEQ ID NO: 2856126 - RNA, 19 nt, Artificial Sequence
  Description of Artificial Sequence: Synthetic oligonucleotide
acugcguuggguugaccca

SEQ ID NO: 2856127 - RNA, 19 nt, Artificial Sequence
  Description of Artificial Sequence: Synthetic oligonucleotide
cuucaccugggucucguug

SEQ ID NO: 2856128 - RNA, 19 nt, Artificial Sequence
  Description of Artificial Sequence: Synthetic oligonucleotide
ugacuuucauccagucaaa

SEQ ID NO: 2856129 - RNA, 19 nt, Artificial Sequence
  Description of Artificial Sequence: Synthetic oligonucleotide
guggauauacugaggcgag

SEQ ID NO: 2856130 - RNA, 19 nt, Artificial Sequence
  Description of Artificial Sequence: Synthetic oligonucleotide
gggauaaggaguuauuaua

SEQ ID NO: 2856131 - RNA, 19 nt, Artificial Sequence
  Description of Artificial Sequence: Synthetic oligonucleotide
uuggugcgcacugcguugg

SEQ ID NO: 2856132 - RNA, 19 nt, Artificial Sequence
  Description of Artificial Sequence: Synthetic oligonucleotide
guuggugcgcacugcguug

SEQ ID NO: 2856133 - RNA, 19 nt, Artificial Sequence
  Description of Artificial Sequence: Synthetic oligonucleotide
ugguggugaugcuggacca

SEQ ID NO: 2856134 - RNA, 19 nt, Artificial Sequence
  Description of Artificial Sequence: Synthetic oligonucleotide
ggaccaugggagaugagag

SEQ ID NO: 2856135 - RNA, 19 nt, Artificial Sequence
  Description of Artificial Sequence: Synthetic oligonucleotide
uauacguggccagggccag

SEQ ID NO: 2856136 - RNA, 19 nt, Artificial Sequence
  Description of Artificial Sequence: Synthetic oligonucleotide
ugguggcuggcguggagag

SEQ ID NO: 2856137 - RNA, 19 nt, Artificial Sequence
  Description of Artificial Sequence: Synthetic oligonucleotide
ggagaaggcgucucugaag

SEQ ID NO: 2856138 - RNA, 19 nt, Artificial Sequence
  Description of Artificial Sequence: Synthetic oligonucleotide
aaggucugcgcuggagaag

SEQ ID NO: 2856139 - RNA, 19 nt, Artificial Sequence
  Description of Artificial Sequence: Synthetic oligonucleotide
aguuggugcgcacugcguu

SEQ ID NO: 2856140 - RNA, 19 nt, Artificial Sequence
  Description of Artificial Sequence: Synthetic oligonucleotide
acccacauagccauacucu

SEQ ID NO: 2856141 - RNA, 19 nt, Artificial Sequence
  Description of Artificial Sequence: Synthetic oligonucleotide
uagccauacucuccaacuu

SEQ ID NO: 2856142 - RNA, 19 nt, Artificial Sequence
  Description of Artificial Sequence: Synthetic oligonucleotide
ggugaugcuggaccauggg

SEQ ID NO: 2856143 - RNA, 19 nt, Artificial Sequence
  Description of Artificial Sequence: Synthetic oligonucleotide
agccauacucuccaacuuu

SEQ ID NO: 2856144 - RNA, 19 nt, Artificial Sequence
  Description of Artificial Sequence: Synthetic oligonucleotide
guaaacagcggagcgcgac

SEQ ID NO: 2856145 - RNA, 19 nt, Artificial Sequence
  Description of Artificial Sequence: Synthetic oligonucleotide
ugcgcacugcguuggguug

SEQ ID NO: 2856146 - RNA, 19 nt, Artificial Sequence
  Description of Artificial Sequence: Synthetic oligonucleotide
caaaggucugcgcuggaga

SEQ ID NO: 2856147 - RNA, 19 nt, Artificial Sequence
  Description of Artificial Sequence: Synthetic oligonucleotide
cuaucuccacccugcgcgc

SEQ ID NO: 2856148 - RNA, 19 nt, Artificial Sequence
  Description of Artificial Sequence: Synthetic oligonucleotide
cuugguggugaaguuggug

SEQ ID NO: 2856149 - RNA, 19 nt, Artificial Sequence
  Description of Artificial Sequence: Synthetic oligonucleotide
cagggacgcggcuaucucc

SEQ ID NO: 2856150 - RNA, 19 nt, Artificial Sequence
  Description of Artificial Sequence: Synthetic oligonucleotide
gaggcgagcccaccgugcc

SEQ ID NO: 2856151 - RNA, 19 nt, Artificial Sequence
  Description of Artificial Sequence: Synthetic oligonucleotide
acugaggcgagcccaccgu

SEQ ID NO: 2856152 - RNA, 19 nt, Artificial Sequence
  Description of Artificial Sequence: Synthetic oligonucleotide
ggcucuggugcucuugucc

SEQ ID NO: 2856153 - RNA, 19 nt, Artificial Sequence
  Description of Artificial Sequence: Synthetic oligonucleotide
gguuuccagaguaaacagc

SEQ ID NO: 2856154 - RNA, 19 nt, Artificial Sequence
  Description of Artificial Sequence: Synthetic oligonucleotide
agaggggauaaggaguuau

SEQ ID NO: 2856155 - RNA, 19 nt, Artificial Sequence
  Description of Artificial Sequence: Synthetic oligonucleotide
uggauauacugaggcgagc

SEQ ID NO: 2856156 - RNA, 19 nt, Artificial Sequence
  Description of Artificial Sequence: Synthetic oligonucleotide
acagcggagcgcgacgggg

SEQ ID NO: 2856157 - RNA, 19 nt, Artificial Sequence
  Description of Artificial Sequence: Synthetic oligonucleotide
cuuguccauaagaguggug

SEQ ID NO: 2856158 - RNA, 19 nt, Artificial Sequence
  Description of Artificial Sequence: Synthetic oligonucleotide
ucucguugagcugcaggga

SEQ ID NO: 2856159 - RNA, 19 nt, Artificial Sequence
  Description of Artificial Sequence: Synthetic oligonucleotide
ugggaggguuucuuuugac

SEQ ID NO: 2856160 - RNA, 19 nt, Artificial Sequence
  Description of Artificial Sequence: Synthetic oligonucleotide
uggugcucuuguccauaag

SEQ ID NO: 2856161 - RNA, 19 nt, Artificial Sequence
  Description of Artificial Sequence: Synthetic oligonucleotide
accgaccacuuacgucugc

SEQ ID NO: 2856162 - RNA, 19 nt, Artificial Sequence
  Description of Artificial Sequence: Synthetic oligonucleotide
ugacccacauagccauacu

SEQ ID NO: 2856163 - RNA, 19 nt, Artificial Sequence
  Description of Artificial Sequence: Synthetic oligonucleotide
auacugaggcgagcccacc

SEQ ID NO: 2856164 - RNA, 19 nt, Artificial Sequence
  Description of Artificial Sequence: Synthetic oligonucleotide
aggggauaaggaguuauua

SEQ ID NO: 2856165 - RNA, 19 nt, Artificial Sequence
  Description of Artificial Sequence: Synthetic oligonucleotide
gagagguuuccagaguaaa

SEQ ID NO: 2856166 - RNA, 19 nt, Artificial Sequence
  Description of Artificial Sequence: Synthetic oligonucleotide
uugguggcuggcguggaga

SEQ ID NO: 2856167 - RNA, 19 nt, Artificial Sequence
  Description of Artificial Sequence: Synthetic oligonucleotide
uguuuugggaggguuucuu

SEQ ID NO: 2856168 - RNA, 19 nt, Artificial Sequence
  Description of Artificial Sequence: Synthetic oligonucleotide
accagaucuucaccugggu

SEQ ID NO: 2856169 - RNA, 19 nt, Artificial Sequence
  Description of Artificial Sequence: Synthetic oligonucleotide
gucucugaagcaggggagc

SEQ ID NO: 2856170 - RNA, 19 nt, Artificial Sequence
  Description of Artificial Sequence: Synthetic oligonucleotide
gucugcgcuggagaaggcg

SEQ ID NO: 2856171 - RNA, 19 nt, Artificial Sequence
  Description of Artificial Sequence: Synthetic oligonucleotide
aucuccacccugcgcgcuc

SEQ ID NO: 2856172 - RNA, 19 nt, Artificial Sequence
  Description of Artificial Sequence: Synthetic oligonucleotide
ggaguaccgaccacuuacg

SEQ ID NO: 2856173 - RNA, 19 nt, Artificial Sequence
  Description of Artificial Sequence: Synthetic oligonucleotide
ccacauagccauacucucc

SEQ ID NO: 2856174 - RNA, 19 nt, Artificial Sequence
  Description of Artificial Sequence: Synthetic oligonucleotide
ugcagggacgcggcuaucu

SEQ ID NO: 2856175 - RNA, 19 nt, Artificial Sequence
  Description of Artificial Sequence: Synthetic oligonucleotide
aggcgagcccaccgugccc

SEQ ID NO: 2856176 - RNA, 19 nt, Artificial Sequence
  Description of Artificial Sequence: Synthetic oligonucleotide
agcgcgacggggaguaccg

SEQ ID NO: 2856177 - RNA, 19 nt, Artificial Sequence
  Description of Artificial Sequence: Synthetic oligonucleotide
ccagaguaaacagcggagc

SEQ ID NO: 2856178 - RNA, 19 nt, Artificial Sequence
  Description of Artificial Sequence: Synthetic oligonucleotide
agaaggcgucucugaagca

SEQ ID NO: 2856179 - RNA, 19 nt, Artificial Sequence
  Description of Artificial Sequence: Synthetic oligonucleotide
ugcuggaccaugggagaug

SEQ ID NO: 2856180 - RNA, 19 nt, Artificial Sequence
  Description of Artificial Sequence: Synthetic oligonucleotide
cugcuugguggugaaguug

SEQ ID NO: 2856181 - RNA, 19 nt, Artificial Sequence
  Description of Artificial Sequence: Synthetic oligonucleotide
ucuccacccugcgcgcucg

SEQ ID NO: 2856182 - RNA, 19 nt, Artificial Sequence
  Description of Artificial Sequence: Synthetic oligonucleotide
uaccgaccacuuacgucug

SEQ ID NO: 2856183 - RNA, 19 nt, Artificial Sequence
  Description of Artificial Sequence: Synthetic oligonucleotide
aaguuggugcgcacugcgu

SEQ ID NO: 2856184 - RNA, 19 nt, Artificial Sequence
  Description of Artificial Sequence: Synthetic oligonucleotide
cuggagaaggcgucucuga

SEQ ID NO: 2856185 - RNA, 19 nt, Artificial Sequence
  Description of Artificial Sequence: Synthetic oligonucleotide
ugcguuggguugacccaca

SEQ ID NO: 2856186 - RNA, 19 nt, Artificial Sequence
  Description of Artificial Sequence: Synthetic oligonucleotide
augggagaugagagguuuc

SEQ ID NO: 2856187 - RNA, 19 nt, Artificial Sequence
  Description of Artificial Sequence: Synthetic oligonucleotide
acggggaguaccgaccacu

SEQ ID NO: 2856188 - RNA, 19 nt, Artificial Sequence
  Description of Artificial Sequence: Synthetic oligonucleotide
caggggagcgacaggcuuc

SEQ ID NO: 2856189 - RNA, 19 nt, Artificial Sequence
  Description of Artificial Sequence: Synthetic oligonucleotide
gggagcgacaggcuucuug

SEQ ID NO: 2856190 - RNA, 19 nt, Artificial Sequence
  Description of Artificial Sequence: Synthetic oligonucleotide
gaucuucaccugggucucg

SEQ ID NO: 2856191 - RNA, 19 nt, Artificial Sequence
  Description of Artificial Sequence: Synthetic oligonucleotide
agcggagcgcgacggggag

SEQ ID NO: 2856192 - RNA, 19 nt, Artificial Sequence
  Description of Artificial Sequence: Synthetic oligonucleotide
cuugguggcuggcguggag

SEQ ID NO: 2856193 - RNA, 19 nt, Artificial Sequence
  Description of Artificial Sequence: Synthetic oligonucleotide
cccacauagccauacucuc

SEQ ID NO: 2856194 - RNA, 19 nt, Artificial Sequence
  Description of Artificial Sequence: Synthetic oligonucleotide
aggcucuggugcucuuguc

SEQ ID NO: 2856195 - RNA, 19 nt, Artificial Sequence
  Description of Artificial Sequence: Synthetic oligonucleotide
uggugcgcacugcguuggg

SEQ ID NO: 2856196 - RNA, 19 nt, Artificial Sequence
  Description of Artificial Sequence: Synthetic oligonucleotide
ccauacucuccaacuuucc

SEQ ID NO: 2856197 - RNA, 19 nt, Artificial Sequence
  Description of Artificial Sequence: Synthetic oligonucleotide
uaacccugguggugguggu

SEQ ID NO: 2856198 - RNA, 19 nt, Artificial Sequence
  Description of Artificial Sequence: Synthetic oligonucleotide
gcguggagaggggauaagg

SEQ ID NO: 2856199 - RNA, 19 nt, Artificial Sequence
  Description of Artificial Sequence: Synthetic oligonucleotide
gcgucucugaagcagggga

SEQ ID NO: 2856200 - RNA, 19 nt, Artificial Sequence
  Description of Artificial Sequence: Synthetic oligonucleotide
ugggucucguugagcugca

SEQ ID NO: 2856201 - RNA, 19 nt, Artificial Sequence
  Description of Artificial Sequence: Synthetic oligonucleotide
cugaggcgagcccaccgug

SEQ ID NO: 2856202 - RNA, 19 nt, Artificial Sequence
  Description of Artificial Sequence: Synthetic oligonucleotide
gagcgcgacggggaguacc

SEQ ID NO: 2856203 - RNA, 19 nt, Artificial Sequence
  Description of Artificial Sequence: Synthetic oligonucleotide
cugcguuggguugacccac

SEQ ID NO: 2856204 - RNA, 19 nt, Artificial Sequence
  Description of Artificial Sequence: Synthetic oligonucleotide
cagcauaacccugguggug

SEQ ID NO: 2856205 - RNA, 19 nt, Artificial Sequence
  Description of Artificial Sequence: Synthetic oligonucleotide
aacccugguggugguggug

SEQ ID NO: 2856206 - RNA, 19 nt, Artificial Sequence
  Description of Artificial Sequence: Synthetic oligonucleotide
gugguggugguggugguga

SEQ ID NO: 2856207 - RNA, 19 nt, Artificial Sequence
  Description of Artificial Sequence: Synthetic oligonucleotide
agggacgcggcuaucucca

SEQ ID NO: 2856208 - RNA, 19 nt, Artificial Sequence
  Description of Artificial Sequence: Synthetic oligonucleotide
acucuccaacuuucccugu

SEQ ID NO: 2856209 - RNA, 19 nt, Artificial Sequence
  Description of Artificial Sequence: Synthetic oligonucleotide
uggugaaguuggugcgcac

SEQ ID NO: 2856210 - RNA, 19 nt, Artificial Sequence
  Description of Artificial Sequence: Synthetic oligonucleotide
ugcgcuggagaaggcgucu

SEQ ID NO: 2856211 - RNA, 19 nt, Artificial Sequence
  Description of Artificial Sequence: Synthetic oligonucleotide
ggaggguuucuuuugacuu

SEQ ID NO: 2856212 - RNA, 19 nt, Artificial Sequence
  Description of Artificial Sequence: Synthetic oligonucleotide
gcucuggugcucuugucca

SEQ ID NO: 2856213 - RNA, 19 nt, Artificial Sequence
  Description of Artificial Sequence: Synthetic oligonucleotide
acauagccauacucuccaa

SEQ ID NO: 2856214 - RNA, 19 nt, Artificial Sequence
  Description of Artificial Sequence: Synthetic oligonucleotide
gcucgugucagguacuugu

SEQ ID NO: 2856215 - RNA, 19 nt, Artificial Sequence
  Description of Artificial Sequence: Synthetic oligonucleotide
gaggguuucuuuugacuuu

SEQ ID NO: 2856216 - RNA, 19 nt, Artificial Sequence
  Description of Artificial Sequence: Synthetic oligonucleotide
guggugaaguuggugcgca

SEQ ID NO: 2856217 - RNA, 19 nt, Artificial Sequence
  Description of Artificial Sequence: Synthetic oligonucleotide
ccagaucuucaccuggguc

SEQ ID NO: 2856218 - RNA, 19 nt, Artificial Sequence
  Description of Artificial Sequence: Synthetic oligonucleotide
ggggauaaggaguuauuau

SEQ ID NO: 2856219 - RNA, 19 nt, Artificial Sequence
  Description of Artificial Sequence: Synthetic oligonucleotide
gaguaccgaccacuuacgu

SEQ ID NO: 2856220 - RNA, 19 nt, Artificial Sequence
  Description of Artificial Sequence: Synthetic oligonucleotide
aggcgucucugaagcaggg

SEQ ID NO: 2856221 - RNA, 19 nt, Artificial Sequence
  Description of Artificial Sequence: Synthetic oligonucleotide
cuucuccagcuccgugagc

SEQ ID NO: 2856222 - RNA, 19 nt, Artificial Sequence
  Description of Artificial Sequence: Synthetic oligonucleotide
gcggcuaucuccacccugc

SEQ ID NO: 2856223 - RNA, 19 nt, Artificial Sequence
  Description of Artificial Sequence: Synthetic oligonucleotide
cugcgcuggagaaggcguc

SEQ ID NO: 2856224 - RNA, 19 nt, Artificial Sequence
  Description of Artificial Sequence: Synthetic oligonucleotide
cauaacccuggugguggug

SEQ ID NO: 2856225 - RNA, 19 nt, Artificial Sequence
  Description of Artificial Sequence: Synthetic oligonucleotide
ucuugguggcuggcgugga

SEQ ID NO: 2856226 - RNA, 19 nt, Artificial Sequence
  Description of Artificial Sequence: Synthetic oligonucleotide
ggcuaucuccacccugcgc

SEQ ID NO: 2856227 - RNA, 19 nt, Artificial Sequence
  Description of Artificial Sequence: Synthetic oligonucleotide
aggggagcgacaggcuucu

SEQ ID NO: 2856228 - RNA, 19 nt, Artificial Sequence
  Description of Artificial Sequence: Synthetic oligonucleotide
uaucuccacccugcgcgcu

SEQ ID NO: 2856229 - RNA, 19 nt, Artificial Sequence
  Description of Artificial Sequence: Synthetic oligonucleotide
uggcguggagaggggauaa

SEQ ID NO: 2856230 - RNA, 19 nt, Artificial Sequence
  Description of Artificial Sequence: Synthetic oligonucleotide
cgugucagguacuuguuga

SEQ ID NO: 2856231 - RNA, 19 nt, Artificial Sequence
  Description of Artificial Sequence: Synthetic oligonucleotide
gccauacucuccaacuuuc

SEQ ID NO: 2856232 - RNA, 19 nt, Artificial Sequence
  Description of Artificial Sequence: Synthetic oligonucleotide
gacggggaguaccgaccac

SEQ ID NO: 2856233 - RNA, 19 nt, Artificial Sequence
  Description of Artificial Sequence: Synthetic oligonucleotide
cacccugcgcgcucguguc

SEQ ID NO: 2856234 - RNA, 19 nt, Artificial Sequence
  Description of Artificial Sequence: Synthetic oligonucleotide
guugagcugcagggacgcg

SEQ ID NO: 2856235 - RNA, 19 nt, Artificial Sequence
  Description of Artificial Sequence: Synthetic oligonucleotide
ccuguuuugggaggguuuc

SEQ ID NO: 2856236 - RNA, 19 nt, Artificial Sequence
  Description of Artificial Sequence: Synthetic oligonucleotide
ucccuguuuugggaggguu

SEQ ID NO: 2856237 - RNA, 19 nt, Artificial Sequence
  Description of Artificial Sequence: Synthetic oligonucleotide
cgucucugaagcaggggag

SEQ ID NO: 2856238 - RNA, 19 nt, Artificial Sequence
  Description of Artificial Sequence: Synthetic oligonucleotide
ugguggugguggugguggu

SEQ ID NO: 2856239 - RNA, 19 nt, Artificial Sequence
  Description of Artificial Sequence: Synthetic oligonucleotide
ggacgcggcuaucuccacc

SEQ ID NO: 2856240 - RNA, 19 nt, Artificial Sequence
  Description of Artificial Sequence: Synthetic oligonucleotide
guuuugggaggguuucuuu

SEQ ID NO: 2856241 - RNA, 19 nt, Artificial Sequence
  Description of Artificial Sequence: Synthetic oligonucleotide
gggaggguuucuuuugacu

SEQ ID NO: 2856242 - RNA, 19 nt, Artificial Sequence
  Description of Artificial Sequence: Synthetic oligonucleotide
augcuggaccaugggagau

SEQ ID NO: 2856243 - RNA, 19 nt, Artificial Sequence
  Description of Artificial Sequence: Synthetic oligonucleotide
cuggugcucuuguccauaa

SEQ ID NO: 2856244 - RNA, 19 nt, Artificial Sequence
  Description of Artificial Sequence: Synthetic oligonucleotide
auacguggccagggccagg

SEQ ID NO: 2856245 - RNA, 19 nt, Artificial Sequence
  Description of Artificial Sequence: Synthetic oligonucleotide
aguaaacagcggagcgcga

SEQ ID NO: 2856246 - RNA, 19 nt, Artificial Sequence
  Description of Artificial Sequence: Synthetic oligonucleotide
uucccuguuuugggagggu

SEQ ID NO: 2856247 - RNA, 19 nt, Artificial Sequence
  Description of Artificial Sequence: Synthetic oligonucleotide
gcgcgcucgugucagguac

SEQ ID NO: 2856248 - RNA, 19 nt, Artificial Sequence
  Description of Artificial Sequence: Synthetic oligonucleotide
cuggaccaugggagaugag

SEQ ID NO: 2856249 - RNA, 19 nt, Artificial Sequence
  Description of Artificial Sequence: Synthetic oligonucleotide
ggcgucucugaagcagggg

SEQ ID NO: 2856250 - RNA, 19 nt, Artificial Sequence
  Description of Artificial Sequence: Synthetic oligonucleotide
ugcgcgcucgugucaggua

SEQ ID NO: 2856251 - RNA, 19 nt, Artificial Sequence
  Description of Artificial Sequence: Synthetic oligonucleotide
gcuggaccaugggagauga

SEQ ID NO: 2856252 - RNA, 19 nt, Artificial Sequence
  Description of Artificial Sequence: Synthetic oligonucleotide
gagcugcuugguggugaag

SEQ ID NO: 2856253 - RNA, 19 nt, Artificial Sequence
  Description of Artificial Sequence: Synthetic oligonucleotide
ccagucaaaggucugcgcu

SEQ ID NO: 2856254 - RNA, 19 nt, Artificial Sequence
  Description of Artificial Sequence: Synthetic oligonucleotide
cacuuacgucugcuuccug

SEQ ID NO: 2856255 - RNA, 19 nt, Artificial Sequence
  Description of Artificial Sequence: Synthetic oligonucleotide
guccauaagagugguggau

SEQ ID NO: 2856256 - RNA, 19 nt, Artificial Sequence
  Description of Artificial Sequence: Synthetic oligonucleotide
cguggagaggggauaagga

SEQ ID NO: 2856257 - RNA, 19 nt, Artificial Sequence
  Description of Artificial Sequence: Synthetic oligonucleotide
uggugguggugguggugau

SEQ ID NO: 2856258 - RNA, 19 nt, Artificial Sequence
  Description of Artificial Sequence: Synthetic oligonucleotide
gucaaaggucugcgcugga

SEQ ID NO: 2856259 - RNA, 19 nt, Artificial Sequence
  Description of Artificial Sequence: Synthetic oligonucleotide
caugggagaugagagguuu

SEQ ID NO: 2856260 - RNA, 19 nt, Artificial Sequence
  Description of Artificial Sequence: Synthetic oligonucleotide
ggugguggugaugcuggac

SEQ ID NO: 2856261 - RNA, 19 nt, Artificial Sequence
  Description of Artificial Sequence: Synthetic oligonucleotide
cucugaagcaggggagcga

SEQ ID NO: 2856262 - RNA, 19 nt, Artificial Sequence
  Description of Artificial Sequence: Synthetic oligonucleotide
gcgacggggaguaccgacc

SEQ ID NO: 2856263 - RNA, 19 nt, Artificial Sequence
  Description of Artificial Sequence: Synthetic oligonucleotide
cugaagcaggggagcgaca

SEQ ID NO: 2856264 - RNA, 19 nt, Artificial Sequence
  Description of Artificial Sequence: Synthetic oligonucleotide
agcaggggagcgacaggcu

SEQ ID NO: 2856265 - RNA, 19 nt, Artificial Sequence
  Description of Artificial Sequence: Synthetic oligonucleotide
uccacccugcgcgcucgug

SEQ ID NO: 2856266 - RNA, 19 nt, Artificial Sequence
  Description of Artificial Sequence: Synthetic oligonucleotide
cagcggagcgcgacgggga

SEQ ID NO: 2856267 - RNA, 19 nt, Artificial Sequence
  Description of Artificial Sequence: Synthetic oligonucleotide
agcugcagggacgcggcua

SEQ ID NO: 2856268 - RNA, 19 nt, Artificial Sequence
  Description of Artificial Sequence: Synthetic oligonucleotide
acccugcgcgcucguguca

SEQ ID NO: 2856269 - RNA, 19 nt, Artificial Sequence
  Description of Artificial Sequence: Synthetic oligonucleotide
gggagaugagagguuucca

SEQ ID NO: 2856270 - RNA, 19 nt, Artificial Sequence
  Description of Artificial Sequence: Synthetic oligonucleotide
ggugaaguuggugcgcacu

SEQ ID NO: 2856271 - RNA, 19 nt, Artificial Sequence
  Description of Artificial Sequence: Synthetic oligonucleotide
gagcgacaggcuucuuggu

SEQ ID NO: 2856272 - RNA, 19 nt, Artificial Sequence
  Description of Artificial Sequence: Synthetic oligonucleotide
gguggugguggugguggug

SEQ ID NO: 2856273 - RNA, 19 nt, Artificial Sequence
  Description of Artificial Sequence: Synthetic oligonucleotide
gaggggauaaggaguuauu

SEQ ID NO: 2856274 - RNA, 19 nt, Artificial Sequence
  Description of Artificial Sequence: Synthetic oligonucleotide
gugcgcacugcguuggguu

SEQ ID NO: 2856275 - RNA, 19 nt, Artificial Sequence
  Description of Artificial Sequence: Synthetic oligonucleotide
acgcggcuaucuccacccu

SEQ ID NO: 2856276 - RNA, 19 nt, Artificial Sequence
  Description of Artificial Sequence: Synthetic oligonucleotide
gcagggacgcggcuaucuc

SEQ ID NO: 2856277 - RNA, 19 nt, Artificial Sequence
  Description of Artificial Sequence: Synthetic oligonucleotide
caggcucuggugcucuugu

SEQ ID NO: 2856278 - RNA, 19 nt, Artificial Sequence
  Description of Artificial Sequence: Synthetic oligonucleotide
ccugggucucguugagcug

SEQ ID NO: 2856279 - RNA, 19 nt, Artificial Sequence
  Description of Artificial Sequence: Synthetic oligonucleotide
gagaggggauaaggaguua

SEQ ID NO: 2856280 - RNA, 19 nt, Artificial Sequence
  Description of Artificial Sequence: Synthetic oligonucleotide
cuccaacuuucccuguuuu

SEQ ID NO: 2856281 - RNA, 19 nt, Artificial Sequence
  Description of Artificial Sequence: Synthetic oligonucleotide
acguggccagggccaggcu

SEQ ID NO: 2856282 - RNA, 19 nt, Artificial Sequence
  Description of Artificial Sequence: Synthetic oligonucleotide
ccauaagagugguggauau

SEQ ID NO: 2856283 - RNA, 19 nt, Artificial Sequence
  Description of Artificial Sequence: Synthetic oligonucleotide
ggcguggagaggggauaag

SEQ ID NO: 2856284 - RNA, 19 nt, Artificial Sequence
  Description of Artificial Sequence: Synthetic oligonucleotide
cucgugucagguacuuguu

SEQ ID NO: 2856285 - RNA, 19 nt, Artificial Sequence
  Description of Artificial Sequence: Synthetic oligonucleotide
ccagcauaacccugguggu

SEQ ID NO: 2856286 - RNA, 19 nt, Artificial Sequence
  Description of Artificial Sequence: Synthetic oligonucleotide
cuggcguggagaggggaua

SEQ ID NO: 2856287 - RNA, 19 nt, Artificial Sequence
  Description of Artificial Sequence: Synthetic oligonucleotide
cgcgacggggaguaccgac

SEQ ID NO: 2856288 - RNA, 19 nt, Artificial Sequence
  Description of Artificial Sequence: Synthetic oligonucleotide
cuguuuugggaggguuucu

SEQ ID NO: 2856289 - RNA, 19 nt, Artificial Sequence
  Description of Artificial Sequence: Synthetic oligonucleotide
ggggaguaccgaccacuua

SEQ ID NO: 2856290 - RNA, 19 nt, Artificial Sequence
  Description of Artificial Sequence: Synthetic oligonucleotide
gcugcuugguggugaaguu

SEQ ID NO: 2856291 - RNA, 19 nt, Artificial Sequence
  Description of Artificial Sequence: Synthetic oligonucleotide
cccugcgcgcucgugucag

SEQ ID NO: 2856292 - RNA, 19 nt, Artificial Sequence
  Description of Artificial Sequence: Synthetic oligonucleotide
ccugcgcgcucgugucagg

SEQ ID NO: 2856293 - RNA, 19 nt, Artificial Sequence
  Description of Artificial Sequence: Synthetic oligonucleotide
ccuggugguggugguggug

SEQ ID NO: 2856294 - RNA, 19 nt, Artificial Sequence
  Description of Artificial Sequence: Synthetic oligonucleotide
ggucugcgcuggagaaggc

SEQ ID NO: 2856295 - RNA, 19 nt, Artificial Sequence
  Description of Artificial Sequence: Synthetic oligonucleotide
cucuggugcucuuguccau

SEQ ID NO: 2856296 - RNA, 19 nt, Artificial Sequence
  Description of Artificial Sequence: Synthetic oligonucleotide
ccccagcauaacccuggug

SEQ ID NO: 2856297 - RNA, 19 nt, Artificial Sequence
  Description of Artificial Sequence: Synthetic oligonucleotide
gggacgcggcuaucuccac

SEQ ID NO: 2856298 - RNA, 19 nt, Artificial Sequence
  Description of Artificial Sequence: Synthetic oligonucleotide
cggcuaucuccacccugcg

SEQ ID NO: 2856299 - RNA, 19 nt, Artificial Sequence
  Description of Artificial Sequence: Synthetic oligonucleotide
cgcggcuaucuccacccug

SEQ ID NO: 2856300 - RNA, 19 nt, Artificial Sequence
  Description of Artificial Sequence: Synthetic oligonucleotide
gcaggggagcgacaggcuu

SEQ ID NO: 2856301 - RNA, 19 nt, Artificial Sequence
  Description of Artificial Sequence: Synthetic oligonucleotide
gagcugcagggacgcggcu

SEQ ID NO: 2856302 - RNA, 19 nt, Artificial Sequence
  Description of Artificial Sequence: Synthetic oligonucleotide
gcauaacccuggugguggu

SEQ ID NO: 2856303 - RNA, 19 nt, Artificial Sequence
  Description of Artificial Sequence: Synthetic oligonucleotide
ggcuggcguggagagggga

SEQ ID NO: 2856304 - RNA, 19 nt, Artificial Sequence
  Description of Artificial Sequence: Synthetic oligonucleotide
gggucucguugagcugcag

SEQ ID NO: 2856305 - RNA, 19 nt, Artificial Sequence
  Description of Artificial Sequence: Synthetic oligonucleotide
cgacggggaguaccgacca

SEQ ID NO: 2856306 - RNA, 19 nt, Artificial Sequence
  Description of Artificial Sequence: Synthetic oligonucleotide
gcgcacugcguuggguuga

SEQ ID NO: 2856307 - RNA, 19 nt, Artificial Sequence
  Description of Artificial Sequence: Synthetic oligonucleotide
cugcagggacgcggcuauc

SEQ ID NO: 2856308 - RNA, 19 nt, Artificial Sequence
  Description of Artificial Sequence: Synthetic oligonucleotide
cugcgcgcucgugucaggu

SEQ ID NO: 2856309 - RNA, 19 nt, Artificial Sequence
  Description of Artificial Sequence: Synthetic oligonucleotide
ggugcgcacugcguugggu

SEQ ID NO: 2856310 - RNA, 19 nt, Artificial Sequence
  Description of Artificial Sequence: Synthetic oligonucleotide
gcgcuggagaaggcgucuc

SEQ ID NO: 2856311 - RNA, 19 nt, Artificial Sequence
  Description of Artificial Sequence: Synthetic oligonucleotide
gcacugcguuggguugacc

SEQ ID NO: 2856312 - RNA, 19 nt, Artificial Sequence
  Description of Artificial Sequence: Synthetic oligonucleotide
ccgugagcugcuugguggu

SEQ ID NO: 2856313 - RNA, 19 nt, Artificial Sequence
  Description of Artificial Sequence: Synthetic oligonucleotide
ccacuuacgucugcuuccu

SEQ ID NO: 2856314 - RNA, 19 nt, Artificial Sequence
  Description of Artificial Sequence: Synthetic oligonucleotide
cccuguuuugggaggguuu

SEQ ID NO: 2856315 - RNA, 19 nt, Artificial Sequence
  Description of Artificial Sequence: Synthetic oligonucleotide
gcuggcguggagaggggau

SEQ ID NO: 2856316 - RNA, 19 nt, Artificial Sequence
  Description of Artificial Sequence: Synthetic oligonucleotide
ccacccugcgcgcucgugu

SEQ ID NO: 2856317 - RNA, 19 nt, Artificial Sequence
  Description of Artificial Sequence: Synthetic oligonucleotide
ccgaccacuuacgucugcu

SEQ ID NO: 2856318 - RNA, 19 nt, Artificial Sequence
  Description of Artificial Sequence: Synthetic oligonucleotide
gcuccgugagcugcuuggu

SEQ ID NO: 2856319 - RNA, 19 nt, Artificial Sequence
  Description of Artificial Sequence: Synthetic oligonucleotide
cguuggguugacccacaua

SEQ ID NO: 2856320 - RNA, 19 nt, Artificial Sequence
  Description of Artificial Sequence: Synthetic oligonucleotide
ccaugggagaugagagguu

SEQ ID NO: 2856321 - RNA, 19 nt, Artificial Sequence
  Description of Artificial Sequence: Synthetic oligonucleotide
gcuugguggugaaguuggu

SEQ ID NO: 2856322 - RNA, 19 nt, Artificial Sequence
  Description of Artificial Sequence: Synthetic oligonucleotide
cgcacugcguuggguugac

SEQ ID NO: 2856323 - RNA, 19 nt, Artificial Sequence
  Description of Artificial Sequence: Synthetic oligonucleotide
cgcucgugucagguacuug

SEQ ID NO: 2856324 - RNA, 19 nt, Artificial Sequence
  Description of Artificial Sequence: Synthetic oligonucleotide
ggagcgcgacggggaguac

SEQ ID NO: 2856325 - RNA, 19 nt, Artificial Sequence
  Description of Artificial Sequence: Synthetic oligonucleotide
gcguuggguugacccacau

SEQ ID NO: 2856326 - RNA, 19 nt, Artificial Sequence
  Description of Artificial Sequence: Synthetic oligonucleotide
cggagcgcgacggggagua

SEQ ID NO: 2856327 - RNA, 19 nt, Artificial Sequence
  Description of Artificial Sequence: Synthetic oligonucleotide
gcgcgacggggaguaccga

SEQ ID NO: 2856328 - RNA, 19 nt, Artificial Sequence
  Description of Artificial Sequence: Synthetic oligonucleotide
cuccacccugcgcgcucgu

SEQ ID NO: 2856329 - RNA, 19 nt, Artificial Sequence
  Description of Artificial Sequence: Synthetic oligonucleotide
cgcuggagaaggcgucucu

SEQ ID NO: 2856330 - RNA, 19 nt, Artificial Sequence
  Description of Artificial Sequence: Synthetic oligonucleotide
cgaccacuuacgucugcuu

SEQ ID NO: 2856331 - RNA, 19 nt, Artificial Sequence
  Description of Artificial Sequence: Synthetic oligonucleotide
cggggaguaccgaccacuu

SEQ ID NO: 2856332 - RNA, 19 nt, Artificial Sequence
  Description of Artificial Sequence: Synthetic oligonucleotide
gcgcucgugucagguacuu

SEQ ID NO: 2856333 - RNA, 19 nt, Artificial Sequence
  Description of Artificial Sequence: Synthetic oligonucleotide
cgcgcucgugucagguacu

SEQ ID NO: 2856334 - RNA, 19 nt, Artificial Sequence
  Description of Artificial Sequence: Synthetic oligonucleotide
gcggagcgcgacggggagu

SEQ ID NO: 2856335 - RNA, 19 nt, Artificial Sequence
  Description of Artificial Sequence: Synthetic oligonucleotide
gccaggcucuggugcucuu

SEQ ID NO: 2856336 - RNA, 19 nt, Artificial Sequence
  Description of Artificial Sequence: Synthetic oligonucleotide
ggggagcgacaggcuucuu

SEQ ID NO: 2856337 - RNA, 19 nt, Artificial Sequence
  Description of Artificial Sequence: Synthetic oligonucleotide
auuuaauuaaccuuccugg

SEQ ID NO: 2856338 - RNA, 19 nt, Artificial Sequence
  Description of Artificial Sequence: Synthetic oligonucleotide
aauguuagcauuuaauuaa

SEQ ID NO: 2856339 - RNA, 19 nt, Artificial Sequence
  Description of Artificial Sequence: Synthetic oligonucleotide
aacuuauccagguugacag

SEQ ID NO: 2856340 - RNA, 19 nt, Artificial Sequence
  Description of Artificial Sequence: Synthetic oligonucleotide
uauuugucgaaguugaucc

SEQ ID NO: 2856341 - RNA, 19 nt, Artificial Sequence
  Description of Artificial Sequence: Synthetic oligonucleotide
uuggcuuucacgaugacag

SEQ ID NO: 2856342 - RNA, 19 nt, Artificial Sequence
  Description of Artificial Sequence: Synthetic oligonucleotide
aaaauguuagcauuuaauu

SEQ ID NO: 2856343 - RNA, 19 nt, Artificial Sequence
  Description of Artificial Sequence: Synthetic oligonucleotide
agaacuuuguaguagcccg

SEQ ID NO: 2856344 - RNA, 19 nt, Artificial Sequence
  Description of Artificial Sequence: Synthetic oligonucleotide
uuuaauuaaccuuccuggg

SEQ ID NO: 2856345 - RNA, 19 nt, Artificial Sequence
  Description of Artificial Sequence: Synthetic oligonucleotide
cuuuguaguagcccgaucg

SEQ ID NO: 2856346 - RNA, 19 nt, Artificial Sequence
  Description of Artificial Sequence: Synthetic oligonucleotide
aaauguuagcauuuaauua

SEQ ID NO: 2856347 - RNA, 19 nt, Artificial Sequence
  Description of Artificial Sequence: Synthetic oligonucleotide
aagugguaaugccucauac

SEQ ID NO: 2856348 - RNA, 19 nt, Artificial Sequence
  Description of Artificial Sequence: Synthetic oligonucleotide
aaauuuggcuuucacgaug

SEQ ID NO: 2856349 - RNA, 19 nt, Artificial Sequence
  Description of Artificial Sequence: Synthetic oligonucleotide
ucugguuccucuuuaagug

SEQ ID NO: 2856350 - RNA, 19 nt, Artificial Sequence
  Description of Artificial Sequence: Synthetic oligonucleotide
agugguaaugccucauacc

SEQ ID NO: 2856351 - RNA, 19 nt, Artificial Sequence
  Description of Artificial Sequence: Synthetic oligonucleotide
uagcauuuaauuaaccuuc

SEQ ID NO: 2856352 - RNA, 19 nt, Artificial Sequence
  Description of Artificial Sequence: Synthetic oligonucleotide
uuaucuucucuucagcucu

SEQ ID NO: 2856353 - RNA, 19 nt, Artificial Sequence
  Description of Artificial Sequence: Synthetic oligonucleotide
uugacaguggggcagaaac

SEQ ID NO: 2856354 - RNA, 19 nt, Artificial Sequence
  Description of Artificial Sequence: Synthetic oligonucleotide
ucuuccucagucuggacgg

SEQ ID NO: 2856355 - RNA, 19 nt, Artificial Sequence
  Description of Artificial Sequence: Synthetic oligonucleotide
uucuuggcagcauugaccc

SEQ ID NO: 2856356 - RNA, 19 nt, Artificial Sequence
  Description of Artificial Sequence: Synthetic oligonucleotide
cauuuaauuaaccuuccug

SEQ ID NO: 2856357 - RNA, 19 nt, Artificial Sequence
  Description of Artificial Sequence: Synthetic oligonucleotide
ucuuuaagugguaaugccu

SEQ ID NO: 2856358 - RNA, 19 nt, Artificial Sequence
  Description of Artificial Sequence: Synthetic oligonucleotide
ucgaaguugauccuguggu

SEQ ID NO: 2856359 - RNA, 19 nt, Artificial Sequence
  Description of Artificial Sequence: Synthetic oligonucleotide
uuagcauuuaauuaaccuu

SEQ ID NO: 2856360 - RNA, 19 nt, Artificial Sequence
  Description of Artificial Sequence: Synthetic oligonucleotide
aagccaccaggacacaggc

SEQ ID NO: 2856361 - RNA, 19 nt, Artificial Sequence
  Description of Artificial Sequence: Synthetic oligonucleotide
ugguauuugucgaaguuga

SEQ ID NO: 2856362 - RNA, 19 nt, Artificial Sequence
  Description of Artificial Sequence: Synthetic oligonucleotide
aauuaaccuuccuggguag

SEQ ID NO: 2856363 - RNA, 19 nt, Artificial Sequence
  Description of Artificial Sequence: Synthetic oligonucleotide
uaauuaaccuuccugggua

SEQ ID NO: 2856364 - RNA, 19 nt, Artificial Sequence
  Description of Artificial Sequence: Synthetic oligonucleotide
gaaguugauccuguggugg

SEQ ID NO: 2856365 - RNA, 19 nt, Artificial Sequence
  Description of Artificial Sequence: Synthetic oligonucleotide
guguccacaacuuauccag

SEQ ID NO: 2856366 - RNA, 19 nt, Artificial Sequence
  Description of Artificial Sequence: Synthetic oligonucleotide
gguaguucaagccaccagg

SEQ ID NO: 2856367 - RNA, 19 nt, Artificial Sequence
  Description of Artificial Sequence: Synthetic oligonucleotide
cuuuaagugguaaugccuc

SEQ ID NO: 2856368 - RNA, 19 nt, Artificial Sequence
  Description of Artificial Sequence: Synthetic oligonucleotide
ucccaaaguacccuggaug

SEQ ID NO: 2856369 - RNA, 19 nt, Artificial Sequence
  Description of Artificial Sequence: Synthetic oligonucleotide
acaggcaccuccaacaccc

SEQ ID NO: 2856370 - RNA, 19 nt, Artificial Sequence
  Description of Artificial Sequence: Synthetic oligonucleotide
agcagcuccagucuuguuc

SEQ ID NO: 2856371 - RNA, 19 nt, Artificial Sequence
  Description of Artificial Sequence: Synthetic oligonucleotide
aguucaagccaccaggaca

SEQ ID NO: 2856372 - RNA, 19 nt, Artificial Sequence
  Description of Artificial Sequence: Synthetic oligonucleotide
uuuaccgaugcgaccgugg

SEQ ID NO: 2856373 - RNA, 19 nt, Artificial Sequence
  Description of Artificial Sequence: Synthetic oligonucleotide
caugccuccagcauucccg

SEQ ID NO: 2856374 - RNA, 19 nt, Artificial Sequence
  Description of Artificial Sequence: Synthetic oligonucleotide
accuccaacacccuuuauc

SEQ ID NO: 2856375 - RNA, 19 nt, Artificial Sequence
  Description of Artificial Sequence: Synthetic oligonucleotide
uguuagcauuuaauuaacc

SEQ ID NO: 2856376 - RNA, 19 nt, Artificial Sequence
  Description of Artificial Sequence: Synthetic oligonucleotide
uauccagguugacaguggg

SEQ ID NO: 2856377 - RNA, 19 nt, Artificial Sequence
  Description of Artificial Sequence: Synthetic oligonucleotide
uuuguaguagcccgaucgc

SEQ ID NO: 2856378 - RNA, 19 nt, Artificial Sequence
  Description of Artificial Sequence: Synthetic oligonucleotide
uuuaucuucucuucagcuc

SEQ ID NO: 2856379 - RNA, 19 nt, Artificial Sequence
  Description of Artificial Sequence: Synthetic oligonucleotide
gaucgcacaacgucgauga

SEQ ID NO: 2856380 - RNA, 19 nt, Artificial Sequence
  Description of Artificial Sequence: Synthetic oligonucleotide
cucuuuaagugguaaugcc

SEQ ID NO: 2856381 - RNA, 19 nt, Artificial Sequence
  Description of Artificial Sequence: Synthetic oligonucleotide
augcuugcgguguuuaccg

SEQ ID NO: 2856382 - RNA, 19 nt, Artificial Sequence
  Description of Artificial Sequence: Synthetic oligonucleotide
guguuuaccgaugcgaccg

SEQ ID NO: 2856383 - RNA, 19 nt, Artificial Sequence
  Description of Artificial Sequence: Synthetic oligonucleotide
gugguaaugccucauacca

SEQ ID NO: 2856384 - RNA, 19 nt, Artificial Sequence
  Description of Artificial Sequence: Synthetic oligonucleotide
uuccccagaacuuuguagu

SEQ ID NO: 2856385 - RNA, 19 nt, Artificial Sequence
  Description of Artificial Sequence: Synthetic oligonucleotide
gucuuccucagucuggacg

SEQ ID NO: 2856386 - RNA, 19 nt, Artificial Sequence
  Description of Artificial Sequence: Synthetic oligonucleotide
uguaguagcccgaucgcac

SEQ ID NO: 2856387 - RNA, 19 nt, Artificial Sequence
  Description of Artificial Sequence: Synthetic oligonucleotide
uccagguugacaguggggc

SEQ ID NO: 2856388 - RNA, 19 nt, Artificial Sequence
  Description of Artificial Sequence: Synthetic oligonucleotide
ccaacuuucccaaaguacc

SEQ ID NO: 2856389 - RNA, 19 nt, Artificial Sequence
  Description of Artificial Sequence: Synthetic oligonucleotide
aaugccucauaccaacuuu

SEQ ID NO: 2856390 - RNA, 19 nt, Artificial Sequence
  Description of Artificial Sequence: Synthetic oligonucleotide
accaacuuucccaaaguac

SEQ ID NO: 2856391 - RNA, 19 nt, Artificial Sequence
  Description of Artificial Sequence: Synthetic oligonucleotide
uccucuuuaagugguaaug

SEQ ID NO: 2856392 - RNA, 19 nt, Artificial Sequence
  Description of Artificial Sequence: Synthetic oligonucleotide
agcauuuaauuaaccuucc

SEQ ID NO: 2856393 - RNA, 19 nt, Artificial Sequence
  Description of Artificial Sequence: Synthetic oligonucleotide
gaugggagcagcuccaguc

SEQ ID NO: 2856394 - RNA, 19 nt, Artificial Sequence
  Description of Artificial Sequence: Synthetic oligonucleotide
gacacaggcaccuccaaca

SEQ ID NO: 2856395 - RNA, 19 nt, Artificial Sequence
  Description of Artificial Sequence: Synthetic oligonucleotide
acaacgucgaugaugggag

SEQ ID NO: 2856396 - RNA, 19 nt, Artificial Sequence
  Description of Artificial Sequence: Synthetic oligonucleotide
uuucacgaugacagguugc

SEQ ID NO: 2856397 - RNA, 19 nt, Artificial Sequence
  Description of Artificial Sequence: Synthetic oligonucleotide
aauuuggcuuucacgauga

SEQ ID NO: 2856398 - RNA, 19 nt, Artificial Sequence
  Description of Artificial Sequence: Synthetic oligonucleotide
guuagcauuuaauuaaccu

SEQ ID NO: 2856399 - RNA, 19 nt, Artificial Sequence
  Description of Artificial Sequence: Synthetic oligonucleotide
gucgaaguugauccugugg

SEQ ID NO: 2856400 - RNA, 19 nt, Artificial Sequence
  Description of Artificial Sequence: Synthetic oligonucleotide
uuuaagugguaaugccuca

SEQ ID NO: 2856401 - RNA, 19 nt, Artificial Sequence
  Description of Artificial Sequence: Synthetic oligonucleotide
uccuggguaguucaagcca

SEQ ID NO: 2856402 - RNA, 19 nt, Artificial Sequence
  Description of Artificial Sequence: Synthetic oligonucleotide
uuugucgaaguugauccug

SEQ ID NO: 2856403 - RNA, 19 nt, Artificial Sequence
  Description of Artificial Sequence: Synthetic oligonucleotide
gaugcgaccguggccaugg

SEQ ID NO: 2856404 - RNA, 19 nt, Artificial Sequence
  Description of Artificial Sequence: Synthetic oligonucleotide
agcauugacccgugucugc

SEQ ID NO: 2856405 - RNA, 19 nt, Artificial Sequence
  Description of Artificial Sequence: Synthetic oligonucleotide
agcccgaucgcacaacguc

SEQ ID NO: 2856406 - RNA, 19 nt, Artificial Sequence
  Description of Artificial Sequence: Synthetic oligonucleotide
uguccacaacuuauccagg

SEQ ID NO: 2856407 - RNA, 19 nt, Artificial Sequence
  Description of Artificial Sequence: Synthetic oligonucleotide
cuuccccagaacuuuguag

SEQ ID NO: 2856408 - RNA, 19 nt, Artificial Sequence
  Description of Artificial Sequence: Synthetic oligonucleotide
gaugcuugcgguguuuacc

SEQ ID NO: 2856409 - RNA, 19 nt, Artificial Sequence
  Description of Artificial Sequence: Synthetic oligonucleotide
caacuuucccaaaguaccc

SEQ ID NO: 2856410 - RNA, 19 nt, Artificial Sequence
  Description of Artificial Sequence: Synthetic oligonucleotide
uuagggagcuuucccuucc

SEQ ID NO: 2856411 - RNA, 19 nt, Artificial Sequence
  Description of Artificial Sequence: Synthetic oligonucleotide
cuuccuggguaguucaagc

SEQ ID NO: 2856412 - RNA, 19 nt, Artificial Sequence
  Description of Artificial Sequence: Synthetic oligonucleotide
auguuagcauuuaauuaac

SEQ ID NO: 2856413 - RNA, 19 nt, Artificial Sequence
  Description of Artificial Sequence: Synthetic oligonucleotide
ugcucacugaccagugucc

SEQ ID NO: 2856414 - RNA, 19 nt, Artificial Sequence
  Description of Artificial Sequence: Synthetic oligonucleotide
aacacccuuuaucuucucu

SEQ ID NO: 2856415 - RNA, 19 nt, Artificial Sequence
  Description of Artificial Sequence: Synthetic oligonucleotide
augguauuugucgaaguug

SEQ ID NO: 2856416 - RNA, 19 nt, Artificial Sequence
  Description of Artificial Sequence: Synthetic oligonucleotide
cuuucccaaaguacccugg

SEQ ID NO: 2856417 - RNA, 19 nt, Artificial Sequence
  Description of Artificial Sequence: Synthetic oligonucleotide
aaguugauccugugguggu

SEQ ID NO: 2856418 - RNA, 19 nt, Artificial Sequence
  Description of Artificial Sequence: Synthetic oligonucleotide
cugguuccucuuuaagugg

SEQ ID NO: 2856419 - RNA, 19 nt, Artificial Sequence
  Description of Artificial Sequence: Synthetic oligonucleotide
uugcuuagggagcuuuccc

SEQ ID NO: 2856420 - RNA, 19 nt, Artificial Sequence
  Description of Artificial Sequence: Synthetic oligonucleotide
aguguccacaacuuaucca

SEQ ID NO: 2856421 - RNA, 19 nt, Artificial Sequence
  Description of Artificial Sequence: Synthetic oligonucleotide
uuaccgaugcgaccguggc

SEQ ID NO: 2856422 - RNA, 19 nt, Artificial Sequence
  Description of Artificial Sequence: Synthetic oligonucleotide
cuuguucuuggcagcauug

SEQ ID NO: 2856423 - RNA, 19 nt, Artificial Sequence
  Description of Artificial Sequence: Synthetic oligonucleotide
gguaaugccucauaccaac

SEQ ID NO: 2856424 - RNA, 19 nt, Artificial Sequence
  Description of Artificial Sequence: Synthetic oligonucleotide
cuuauccagguugacagug

SEQ ID NO: 2856425 - RNA, 19 nt, Artificial Sequence
  Description of Artificial Sequence: Synthetic oligonucleotide
uuucccaaaguacccugga

SEQ ID NO: 2856426 - RNA, 19 nt, Artificial Sequence
  Description of Artificial Sequence: Synthetic oligonucleotide
cuucucuucagcucuucug

SEQ ID NO: 2856427 - RNA, 19 nt, Artificial Sequence
  Description of Artificial Sequence: Synthetic oligonucleotide
uuuggcuuucacgaugaca

SEQ ID NO: 2856428 - RNA, 19 nt, Artificial Sequence
  Description of Artificial Sequence: Synthetic oligonucleotide
caagccaccaggacacagg

SEQ ID NO: 2856429 - RNA, 19 nt, Artificial Sequence
  Description of Artificial Sequence: Synthetic oligonucleotide
guucuuggcagcauugacc

SEQ ID NO: 2856430 - RNA, 19 nt, Artificial Sequence
  Description of Artificial Sequence: Synthetic oligonucleotide
acgaugacagguugcuuag

SEQ ID NO: 2856431 - RNA, 19 nt, Artificial Sequence
  Description of Artificial Sequence: Synthetic oligonucleotide
aaccuuccuggguaguuca

SEQ ID NO: 2856432 - RNA, 19 nt, Artificial Sequence
  Description of Artificial Sequence: Synthetic oligonucleotide
auaccaacuuucccaaagu

SEQ ID NO: 2856433 - RNA, 19 nt, Artificial Sequence
  Description of Artificial Sequence: Synthetic oligonucleotide
ugcuuagggagcuuucccu

SEQ ID NO: 2856434 - RNA, 19 nt, Artificial Sequence
  Description of Artificial Sequence: Synthetic oligonucleotide
uuccuggguaguucaagcc

SEQ ID NO: 2856435 - RNA, 19 nt, Artificial Sequence
  Description of Artificial Sequence: Synthetic oligonucleotide
guucaagccaccaggacac

SEQ ID NO: 2856436 - RNA, 19 nt, Artificial Sequence
  Description of Artificial Sequence: Synthetic oligonucleotide
cccaaaguacccuggaugg

SEQ ID NO: 2856437 - RNA, 19 nt, Artificial Sequence
  Description of Artificial Sequence: Synthetic oligonucleotide
augccuccagcauucccgc

SEQ ID NO: 2856438 - RNA, 19 nt, Artificial Sequence
  Description of Artificial Sequence: Synthetic oligonucleotide
ugccucauaccaacuuucc

SEQ ID NO: 2856439 - RNA, 19 nt, Artificial Sequence
  Description of Artificial Sequence: Synthetic oligonucleotide
uggaugguauuugucgaag

SEQ ID NO: 2856440 - RNA, 19 nt, Artificial Sequence
  Description of Artificial Sequence: Synthetic oligonucleotide
acuuucccaaaguacccug

SEQ ID NO: 2856441 - RNA, 19 nt, Artificial Sequence
  Description of Artificial Sequence: Synthetic oligonucleotide
cuuucacgaugacagguug

SEQ ID NO: 2856442 - RNA, 19 nt, Artificial Sequence
  Description of Artificial Sequence: Synthetic oligonucleotide
ugguuccucuuuaaguggu

SEQ ID NO: 2856443 - RNA, 19 nt, Artificial Sequence
  Description of Artificial Sequence: Synthetic oligonucleotide
uucacgaugacagguugcu

SEQ ID NO: 2856444 - RNA, 19 nt, Artificial Sequence
  Description of Artificial Sequence: Synthetic oligonucleotide
uugucgaaguugauccugu

SEQ ID NO: 2856445 - RNA, 19 nt, Artificial Sequence
  Description of Artificial Sequence: Synthetic oligonucleotide
cagaacuuuguaguagccc

SEQ ID NO: 2856446 - RNA, 19 nt, Artificial Sequence
  Description of Artificial Sequence: Synthetic oligonucleotide
aacuuucccaaaguacccu

SEQ ID NO: 2856447 - RNA, 19 nt, Artificial Sequence
  Description of Artificial Sequence: Synthetic oligonucleotide
guauuugucgaaguugauc

SEQ ID NO: 2856448 - RNA, 19 nt, Artificial Sequence
  Description of Artificial Sequence: Synthetic oligonucleotide
ugcgguguuuaccgaugcg

SEQ ID NO: 2856449 - RNA, 19 nt, Artificial Sequence
  Description of Artificial Sequence: Synthetic oligonucleotide
uaaugccucauaccaacuu

SEQ ID NO: 2856450 - RNA, 19 nt, Artificial Sequence
  Description of Artificial Sequence: Synthetic oligonucleotide
acucugguuccucuuuaag

SEQ ID NO: 2856451 - RNA, 19 nt, Artificial Sequence
  Description of Artificial Sequence: Synthetic oligonucleotide
guagcccgaucgcacaacg

SEQ ID NO: 2856452 - RNA, 19 nt, Artificial Sequence
  Description of Artificial Sequence: Synthetic oligonucleotide
caguguccacaacuuaucc

SEQ ID NO: 2856453 - RNA, 19 nt, Artificial Sequence
  Description of Artificial Sequence: Synthetic oligonucleotide
uaccaacuuucccaaagua

SEQ ID NO: 2856454 - RNA, 19 nt, Artificial Sequence
  Description of Artificial Sequence: Synthetic oligonucleotide
gauccugugguggugcaug

SEQ ID NO: 2856455 - RNA, 19 nt, Artificial Sequence
  Description of Artificial Sequence: Synthetic oligonucleotide
cgcacaacgucgaugaugg

SEQ ID NO: 2856456 - RNA, 19 nt, Artificial Sequence
  Description of Artificial Sequence: Synthetic oligonucleotide
auugacccgugucugcuca

SEQ ID NO: 2856457 - RNA, 19 nt, Artificial Sequence
  Description of Artificial Sequence: Synthetic oligonucleotide
agucuggacggcauggcgg

SEQ ID NO: 2856458 - RNA, 19 nt, Artificial Sequence
  Description of Artificial Sequence: Synthetic oligonucleotide
aacgucgaugaugggagca

SEQ ID NO: 2856459 - RNA, 19 nt, Artificial Sequence
  Description of Artificial Sequence: Synthetic oligonucleotide
agggagcuuucccuucccc

SEQ ID NO: 2856460 - RNA, 19 nt, Artificial Sequence
  Description of Artificial Sequence: Synthetic oligonucleotide
auccugugguggugcaugc

SEQ ID NO: 2856461 - RNA, 19 nt, Artificial Sequence
  Description of Artificial Sequence: Synthetic oligonucleotide
uaagugguaaugccucaua

SEQ ID NO: 2856462 - RNA, 19 nt, Artificial Sequence
  Description of Artificial Sequence: Synthetic oligonucleotide
ucuuguucuuggcagcauu

SEQ ID NO: 2856463 - RNA, 19 nt, Artificial Sequence
  Description of Artificial Sequence: Synthetic oligonucleotide
acuuuguaguagcccgauc

SEQ ID NO: 2856464 - RNA, 19 nt, Artificial Sequence
  Description of Artificial Sequence: Synthetic oligonucleotide
cccuggaugguauuugucg

SEQ ID NO: 2856465 - RNA, 19 nt, Artificial Sequence
  Description of Artificial Sequence: Synthetic oligonucleotide
aaacucugguuccucuuua

SEQ ID NO: 2856466 - RNA, 19 nt, Artificial Sequence
  Description of Artificial Sequence: Synthetic oligonucleotide
uaguucaagccaccaggac

SEQ ID NO: 2856467 - RNA, 19 nt, Artificial Sequence
  Description of Artificial Sequence: Synthetic oligonucleotide
ucgcacaacgucgaugaug

SEQ ID NO: 2856468 - RNA, 19 nt, Artificial Sequence
  Description of Artificial Sequence: Synthetic oligonucleotide
auuugucgaaguugauccu

SEQ ID NO: 2856469 - RNA, 19 nt, Artificial Sequence
  Description of Artificial Sequence: Synthetic oligonucleotide
uugcgguguuuaccgaugc

SEQ ID NO: 2856470 - RNA, 19 nt, Artificial Sequence
  Description of Artificial Sequence: Synthetic oligonucleotide
cuugcgguguuuaccgaug

SEQ ID NO: 2856471 - RNA, 19 nt, Artificial Sequence
  Description of Artificial Sequence: Synthetic oligonucleotide
ugguaaugccucauaccaa

SEQ ID NO: 2856472 - RNA, 19 nt, Artificial Sequence
  Description of Artificial Sequence: Synthetic oligonucleotide
gacagguugcuuagggagc

SEQ ID NO: 2856473 - RNA, 19 nt, Artificial Sequence
  Description of Artificial Sequence: Synthetic oligonucleotide
uuucccuuccccagaacuu

SEQ ID NO: 2856474 - RNA, 19 nt, Artificial Sequence
  Description of Artificial Sequence: Synthetic oligonucleotide
accgaugcgaccguggcca

SEQ ID NO: 2856475 - RNA, 19 nt, Artificial Sequence
  Description of Artificial Sequence: Synthetic oligonucleotide
aacucugguuccucuuuaa

SEQ ID NO: 2856476 - RNA, 19 nt, Artificial Sequence
  Description of Artificial Sequence: Synthetic oligonucleotide
uuccgggucuuccucaguc

SEQ ID NO: 2856477 - RNA, 19 nt, Artificial Sequence
  Description of Artificial Sequence: Synthetic oligonucleotide
ugaccaguguccacaacuu

SEQ ID NO: 2856478 - RNA, 19 nt, Artificial Sequence
  Description of Artificial Sequence: Synthetic oligonucleotide
ggggcagaaacucugguuc

SEQ ID NO: 2856479 - RNA, 19 nt, Artificial Sequence
  Description of Artificial Sequence: Synthetic oligonucleotide
uuguaguagcccgaucgca

SEQ ID NO: 2856480 - RNA, 19 nt, Artificial Sequence
  Description of Artificial Sequence: Synthetic oligonucleotide
ccagucuuguucuuggcag

SEQ ID NO: 2856481 - RNA, 19 nt, Artificial Sequence
  Description of Artificial Sequence: Synthetic oligonucleotide
augccucauaccaacuuuc

SEQ ID NO: 2856482 - RNA, 19 nt, Artificial Sequence
  Description of Artificial Sequence: Synthetic oligonucleotide
guugcuuagggagcuuucc

SEQ ID NO: 2856483 - RNA, 19 nt, Artificial Sequence
  Description of Artificial Sequence: Synthetic oligonucleotide
ucaagccaccaggacacag

SEQ ID NO: 2856484 - RNA, 19 nt, Artificial Sequence
  Description of Artificial Sequence: Synthetic oligonucleotide
cucagucuggacggcaugg

SEQ ID NO: 2856485 - RNA, 19 nt, Artificial Sequence
  Description of Artificial Sequence: Synthetic oligonucleotide
cacaacuuauccagguuga

SEQ ID NO: 2856486 - RNA, 19 nt, Artificial Sequence
  Description of Artificial Sequence: Synthetic oligonucleotide
ucucuucagcucuucugcu

SEQ ID NO: 2856487 - RNA, 19 nt, Artificial Sequence
  Description of Artificial Sequence: Synthetic oligonucleotide
ggagcuuucccuuccccag

SEQ ID NO: 2856488 - RNA, 19 nt, Artificial Sequence
  Description of Artificial Sequence: Synthetic oligonucleotide
aguuuccgggucuuccuca

SEQ ID NO: 2856489 - RNA, 19 nt, Artificial Sequence
  Description of Artificial Sequence: Synthetic oligonucleotide
auuuggcuuucacgaugac

SEQ ID NO: 2856490 - RNA, 19 nt, Artificial Sequence
  Description of Artificial Sequence: Synthetic oligonucleotide
cagucuuguucuuggcagc

SEQ ID NO: 2856491 - RNA, 19 nt, Artificial Sequence
  Description of Artificial Sequence: Synthetic oligonucleotide
uggcuuucacgaugacagg

SEQ ID NO: 2856492 - RNA, 19 nt, Artificial Sequence
  Description of Artificial Sequence: Synthetic oligonucleotide
ugucugcucacugaccagu

SEQ ID NO: 2856493 - RNA, 19 nt, Artificial Sequence
  Description of Artificial Sequence: Synthetic oligonucleotide
acccuuuaucuucucuuca

SEQ ID NO: 2856494 - RNA, 19 nt, Artificial Sequence
  Description of Artificial Sequence: Synthetic oligonucleotide
guugauccugugguggugc

SEQ ID NO: 2856495 - RNA, 19 nt, Artificial Sequence
  Description of Artificial Sequence: Synthetic oligonucleotide
uccacaacuuauccagguu

SEQ ID NO: 2856496 - RNA, 19 nt, Artificial Sequence
  Description of Artificial Sequence: Synthetic oligonucleotide
aaaguacccuggaugguau

SEQ ID NO: 2856497 - RNA, 19 nt, Artificial Sequence
  Description of Artificial Sequence: Synthetic oligonucleotide
uuaagugguaaugccucau

SEQ ID NO: 2856498 - RNA, 19 nt, Artificial Sequence
  Description of Artificial Sequence: Synthetic oligonucleotide
cuuagggagcuuucccuuc

SEQ ID NO: 2856499 - RNA, 19 nt, Artificial Sequence
  Description of Artificial Sequence: Synthetic oligonucleotide
aacuuuguaguagcccgau

SEQ ID NO: 2856500 - RNA, 19 nt, Artificial Sequence
  Description of Artificial Sequence: Synthetic oligonucleotide
cugcucacugaccaguguc

SEQ ID NO: 2856501 - RNA, 19 nt, Artificial Sequence
  Description of Artificial Sequence: Synthetic oligonucleotide
ucugcucacugaccagugu

SEQ ID NO: 2856502 - RNA, 19 nt, Artificial Sequence
  Description of Artificial Sequence: Synthetic oligonucleotide
cagucuggacggcauggcg

SEQ ID NO: 2856503 - RNA, 19 nt, Artificial Sequence
  Description of Artificial Sequence: Synthetic oligonucleotide
cacccuuuaucuucucuuc

SEQ ID NO: 2856504 - RNA, 19 nt, Artificial Sequence
  Description of Artificial Sequence: Synthetic oligonucleotide
acuuauccagguugacagu

SEQ ID NO: 2856505 - RNA, 19 nt, Artificial Sequence
  Description of Artificial Sequence: Synthetic oligonucleotide
ugucgaaguugauccugug

SEQ ID NO: 2856506 - RNA, 19 nt, Artificial Sequence
  Description of Artificial Sequence: Synthetic oligonucleotide
cucauaccaacuuucccaa

SEQ ID NO: 2856507 - RNA, 19 nt, Artificial Sequence
  Description of Artificial Sequence: Synthetic oligonucleotide
ucuuggcagcauugacccg

SEQ ID NO: 2856508 - RNA, 19 nt, Artificial Sequence
  Description of Artificial Sequence: Synthetic oligonucleotide
cacgaugacagguugcuua

SEQ ID NO: 2856509 - RNA, 19 nt, Artificial Sequence
  Description of Artificial Sequence: Synthetic oligonucleotide
gaugaugggagcagcucca

SEQ ID NO: 2856510 - RNA, 19 nt, Artificial Sequence
  Description of Artificial Sequence: Synthetic oligonucleotide
ccacaacuuauccagguug

SEQ ID NO: 2856511 - RNA, 19 nt, Artificial Sequence
  Description of Artificial Sequence: Synthetic oligonucleotide
uuccucuuuaagugguaau

SEQ ID NO: 2856512 - RNA, 19 nt, Artificial Sequence
  Description of Artificial Sequence: Synthetic oligonucleotide
uucccaaaguacccuggau

SEQ ID NO: 2856513 - RNA, 19 nt, Artificial Sequence
  Description of Artificial Sequence: Synthetic oligonucleotide
acugaccaguguccacaac

SEQ ID NO: 2856514 - RNA, 19 nt, Artificial Sequence
  Description of Artificial Sequence: Synthetic oligonucleotide
uacccuggaugguauuugu

SEQ ID NO: 2856515 - RNA, 19 nt, Artificial Sequence
  Description of Artificial Sequence: Synthetic oligonucleotide
gucuggacggcauggcggc

SEQ ID NO: 2856516 - RNA, 19 nt, Artificial Sequence
  Description of Artificial Sequence: Synthetic oligonucleotide
ccucauaccaacuuuccca

SEQ ID NO: 2856517 - RNA, 19 nt, Artificial Sequence
  Description of Artificial Sequence: Synthetic oligonucleotide
gguguuuaccgaugcgacc

SEQ ID NO: 2856518 - RNA, 19 nt, Artificial Sequence
  Description of Artificial Sequence: Synthetic oligonucleotide
guuuccgggucuuccucag

SEQ ID NO: 2856519 - RNA, 19 nt, Artificial Sequence
  Description of Artificial Sequence: Synthetic oligonucleotide
uaccgaugcgaccguggcc

SEQ ID NO: 2856520 - RNA, 19 nt, Artificial Sequence
  Description of Artificial Sequence: Synthetic oligonucleotide
gaugguauuugucgaaguu

SEQ ID NO: 2856521 - RNA, 19 nt, Artificial Sequence
  Description of Artificial Sequence: Synthetic oligonucleotide
cccagaacuuuguaguagc

SEQ ID NO: 2856522 - RNA, 19 nt, Artificial Sequence
  Description of Artificial Sequence: Synthetic oligonucleotide
cagguugacaguggggcag

SEQ ID NO: 2856523 - RNA, 19 nt, Artificial Sequence
  Description of Artificial Sequence: Synthetic oligonucleotide
cacaacgucgaugauggga

SEQ ID NO: 2856524 - RNA, 19 nt, Artificial Sequence
  Description of Artificial Sequence: Synthetic oligonucleotide
uguuuaccgaugcgaccgu

SEQ ID NO: 2856525 - RNA, 19 nt, Artificial Sequence
  Description of Artificial Sequence: Synthetic oligonucleotide
aguggggcagaaacucugg

SEQ ID NO: 2856526 - RNA, 19 nt, Artificial Sequence
  Description of Artificial Sequence: Synthetic oligonucleotide
ugguggugcaugccuccag

SEQ ID NO: 2856527 - RNA, 19 nt, Artificial Sequence
  Description of Artificial Sequence: Synthetic oligonucleotide
aguagcccgaucgcacaac

SEQ ID NO: 2856528 - RNA, 19 nt, Artificial Sequence
  Description of Artificial Sequence: Synthetic oligonucleotide
cauucccgcggccuccugg

SEQ ID NO: 2856529 - RNA, 19 nt, Artificial Sequence
  Description of Artificial Sequence: Synthetic oligonucleotide
acagguugcuuagggagcu

SEQ ID NO: 2856530 - RNA, 19 nt, Artificial Sequence
  Description of Artificial Sequence: Synthetic oligonucleotide
ccucuuuaagugguaaugc

SEQ ID NO: 2856531 - RNA, 19 nt, Artificial Sequence
  Description of Artificial Sequence: Synthetic oligonucleotide
cuggguaguucaagccacc

SEQ ID NO: 2856532 - RNA, 19 nt, Artificial Sequence
  Description of Artificial Sequence: Synthetic oligonucleotide
uggccccggaguuuccggg

SEQ ID NO: 2856533 - RNA, 19 nt, Artificial Sequence
  Description of Artificial Sequence: Synthetic oligonucleotide
guaguagcccgaucgcaca

SEQ ID NO: 2856534 - RNA, 19 nt, Artificial Sequence
  Description of Artificial Sequence: Synthetic oligonucleotide
uccuggaugcuugcggugu

SEQ ID NO: 2856535 - RNA, 19 nt, Artificial Sequence
  Description of Artificial Sequence: Synthetic oligonucleotide
guaguucaagccaccagga

SEQ ID NO: 2856536 - RNA, 19 nt, Artificial Sequence
  Description of Artificial Sequence: Synthetic oligonucleotide
ucccuuccccagaacuuug

SEQ ID NO: 2856537 - RNA, 19 nt, Artificial Sequence
  Description of Artificial Sequence: Synthetic oligonucleotide
ugaugggagcagcuccagu

SEQ ID NO: 2856538 - RNA, 19 nt, Artificial Sequence
  Description of Artificial Sequence: Synthetic oligonucleotide
uuaaccuuccuggguaguu

SEQ ID NO: 2856539 - RNA, 19 nt, Artificial Sequence
  Description of Artificial Sequence: Synthetic oligonucleotide
uagggagcuuucccuuccc

SEQ ID NO: 2856540 - RNA, 19 nt, Artificial Sequence
  Description of Artificial Sequence: Synthetic oligonucleotide
uggggcagaaacucugguu

SEQ ID NO: 2856541 - RNA, 19 nt, Artificial Sequence
  Description of Artificial Sequence: Synthetic oligonucleotide
uaaccuuccuggguaguuc

SEQ ID NO: 2856542 - RNA, 19 nt, Artificial Sequence
  Description of Artificial Sequence: Synthetic oligonucleotide
ucagucuggacggcauggc

SEQ ID NO: 2856543 - RNA, 19 nt, Artificial Sequence
  Description of Artificial Sequence: Synthetic oligonucleotide
uggugcaugccuccagcau

SEQ ID NO: 2856544 - RNA, 19 nt, Artificial Sequence
  Description of Artificial Sequence: Synthetic oligonucleotide
cugaccaguguccacaacu

SEQ ID NO: 2856545 - RNA, 19 nt, Artificial Sequence
  Description of Artificial Sequence: Synthetic oligonucleotide
uggccauggcucacguggc

SEQ ID NO: 2856546 - RNA, 19 nt, Artificial Sequence
  Description of Artificial Sequence: Synthetic oligonucleotide
uuggcagcauugacccgug

SEQ ID NO: 2856547 - RNA, 19 nt, Artificial Sequence
  Description of Artificial Sequence: Synthetic oligonucleotide
uaguagcccgaucgcacaa

SEQ ID NO: 2856548 - RNA, 19 nt, Artificial Sequence
  Description of Artificial Sequence: Synthetic oligonucleotide
uggguaguucaagccacca

SEQ ID NO: 2856549 - RNA, 19 nt, Artificial Sequence
  Description of Artificial Sequence: Synthetic oligonucleotide
gaguuuccgggucuuccuc

SEQ ID NO: 2856550 - RNA, 19 nt, Artificial Sequence
  Description of Artificial Sequence: Synthetic oligonucleotide
caacuuauccagguugaca

SEQ ID NO: 2856551 - RNA, 19 nt, Artificial Sequence
  Description of Artificial Sequence: Synthetic oligonucleotide
cucugguuccucuuuaagu

SEQ ID NO: 2856552 - RNA, 19 nt, Artificial Sequence
  Description of Artificial Sequence: Synthetic oligonucleotide
uccagcauucccgcggccu

SEQ ID NO: 2856553 - RNA, 19 nt, Artificial Sequence
  Description of Artificial Sequence: Synthetic oligonucleotide
gaacuuuguaguagcccga

SEQ ID NO: 2856554 - RNA, 19 nt, Artificial Sequence
  Description of Artificial Sequence: Synthetic oligonucleotide
cuuucccuuccccagaacu

SEQ ID NO: 2856555 - RNA, 19 nt, Artificial Sequence
  Description of Artificial Sequence: Synthetic oligonucleotide
ucgaugaugggagcagcuc

SEQ ID NO: 2856556 - RNA, 19 nt, Artificial Sequence
  Description of Artificial Sequence: Synthetic oligonucleotide
cacaggcaccuccaacacc

SEQ ID NO: 2856557 - RNA, 19 nt, Artificial Sequence
  Description of Artificial Sequence: Synthetic oligonucleotide
uugauccugugguggugca

SEQ ID NO: 2856558 - RNA, 19 nt, Artificial Sequence
  Description of Artificial Sequence: Synthetic oligonucleotide
guacccuggaugguauuug

SEQ ID NO: 2856559 - RNA, 19 nt, Artificial Sequence
  Description of Artificial Sequence: Synthetic oligonucleotide
auucccgcggccuccugga

SEQ ID NO: 2856560 - RNA, 19 nt, Artificial Sequence
  Description of Artificial Sequence: Synthetic oligonucleotide
acgucgaugaugggagcag

SEQ ID NO: 2856561 - RNA, 19 nt, Artificial Sequence
  Description of Artificial Sequence: Synthetic oligonucleotide
ggguaguucaagccaccag

SEQ ID NO: 2856562 - RNA, 19 nt, Artificial Sequence
  Description of Artificial Sequence: Synthetic oligonucleotide
uccgggucuuccucagucu

SEQ ID NO: 2856563 - RNA, 19 nt, Artificial Sequence
  Description of Artificial Sequence: Synthetic oligonucleotide
cucacugaccaguguccac

SEQ ID NO: 2856564 - RNA, 19 nt, Artificial Sequence
  Description of Artificial Sequence: Synthetic oligonucleotide
ucauaccaacuuucccaaa

SEQ ID NO: 2856565 - RNA, 19 nt, Artificial Sequence
  Description of Artificial Sequence: Synthetic oligonucleotide
ugcgaccguggccauggcu

SEQ ID NO: 2856566 - RNA, 19 nt, Artificial Sequence
  Description of Artificial Sequence: Synthetic oligonucleotide
gguggugcaugccuccagc

SEQ ID NO: 2856567 - RNA, 19 nt, Artificial Sequence
  Description of Artificial Sequence: Synthetic oligonucleotide
uccccagaacuuuguagua

SEQ ID NO: 2856568 - RNA, 19 nt, Artificial Sequence
  Description of Artificial Sequence: Synthetic oligonucleotide
ccuggguaguucaagccac

SEQ ID NO: 2856569 - RNA, 19 nt, Artificial Sequence
  Description of Artificial Sequence: Synthetic oligonucleotide
aguugauccugugguggug

SEQ ID NO: 2856570 - RNA, 19 nt, Artificial Sequence
  Description of Artificial Sequence: Synthetic oligonucleotide
gacccgugucugcucacug

SEQ ID NO: 2856571 - RNA, 19 nt, Artificial Sequence
  Description of Artificial Sequence: Synthetic oligonucleotide
auccagguugacagugggg

SEQ ID NO: 2856572 - RNA, 19 nt, Artificial Sequence
  Description of Artificial Sequence: Synthetic oligonucleotide
ucccgcggccuccuggaug

SEQ ID NO: 2856573 - RNA, 19 nt, Artificial Sequence
  Description of Artificial Sequence: Synthetic oligonucleotide
auuaaccuuccuggguagu

SEQ ID NO: 2856574 - RNA, 19 nt, Artificial Sequence
  Description of Artificial Sequence: Synthetic oligonucleotide
ccagaacuuuguaguagcc

SEQ ID NO: 2856575 - RNA, 19 nt, Artificial Sequence
  Description of Artificial Sequence: Synthetic oligonucleotide
gugucugcucacugaccag

SEQ ID NO: 2856576 - RNA, 19 nt, Artificial Sequence
  Description of Artificial Sequence: Synthetic oligonucleotide
uaucuucucuucagcucuu

SEQ ID NO: 2856577 - RNA, 19 nt, Artificial Sequence
  Description of Artificial Sequence: Synthetic oligonucleotide
gccuccuggaugcuugcgg

SEQ ID NO: 2856578 - RNA, 19 nt, Artificial Sequence
  Description of Artificial Sequence: Synthetic oligonucleotide
caacgucgaugaugggagc

SEQ ID NO: 2856579 - RNA, 19 nt, Artificial Sequence
  Description of Artificial Sequence: Synthetic oligonucleotide
aguacccuggaugguauuu

SEQ ID NO: 2856580 - RNA, 19 nt, Artificial Sequence
  Description of Artificial Sequence: Synthetic oligonucleotide
gaaacucugguuccucuuu

SEQ ID NO: 2856581 - RNA, 19 nt, Artificial Sequence
  Description of Artificial Sequence: Synthetic oligonucleotide
gccucauaccaacuuuccc

SEQ ID NO: 2856582 - RNA, 19 nt, Artificial Sequence
  Description of Artificial Sequence: Synthetic oligonucleotide
uucccuuccccagaacuuu

SEQ ID NO: 2856583 - RNA, 19 nt, Artificial Sequence
  Description of Artificial Sequence: Synthetic oligonucleotide
agcuccagucuuguucuug

SEQ ID NO: 2856584 - RNA, 19 nt, Artificial Sequence
  Description of Artificial Sequence: Synthetic oligonucleotide
uagcccgaucgcacaacgu

SEQ ID NO: 2856585 - RNA, 19 nt, Artificial Sequence
  Description of Artificial Sequence: Synthetic oligonucleotide
agcuuucccuuccccagaa

SEQ ID NO: 2856586 - RNA, 19 nt, Artificial Sequence
  Description of Artificial Sequence: Synthetic oligonucleotide
aaguacccuggaugguauu

SEQ ID NO: 2856587 - RNA, 19 nt, Artificial Sequence
  Description of Artificial Sequence: Synthetic oligonucleotide
cagcauugacccgugucug

SEQ ID NO: 2856588 - RNA, 19 nt, Artificial Sequence
  Description of Artificial Sequence: Synthetic oligonucleotide
acccgugucugcucacuga

SEQ ID NO: 2856589 - RNA, 19 nt, Artificial Sequence
  Description of Artificial Sequence: Synthetic oligonucleotide
uuuccgggucuuccucagu

SEQ ID NO: 2856590 - RNA, 19 nt, Artificial Sequence
  Description of Artificial Sequence: Synthetic oligonucleotide
uggacggcauggcggcggc

SEQ ID NO: 2856591 - RNA, 19 nt, Artificial Sequence
  Description of Artificial Sequence: Synthetic oligonucleotide
guggccccggaguuuccgg

SEQ ID NO: 2856592 - RNA, 19 nt, Artificial Sequence
  Description of Artificial Sequence: Synthetic oligonucleotide
ugccuccagcauucccgcg

SEQ ID NO: 2856593 - RNA, 19 nt, Artificial Sequence
  Description of Artificial Sequence: Synthetic oligonucleotide
cuggaugguauuugucgaa

SEQ ID NO: 2856594 - RNA, 19 nt, Artificial Sequence
  Description of Artificial Sequence: Synthetic oligonucleotide
ugcuugcgguguuuaccga

SEQ ID NO: 2856595 - RNA, 19 nt, Artificial Sequence
  Description of Artificial Sequence: Synthetic oligonucleotide
augaugggagcagcuccag

SEQ ID NO: 2856596 - RNA, 19 nt, Artificial Sequence
  Description of Artificial Sequence: Synthetic oligonucleotide
cauugacccgugucugcuc

SEQ ID NO: 2856597 - RNA, 19 nt, Artificial Sequence
  Description of Artificial Sequence: Synthetic oligonucleotide
ggcagcauugacccguguc

SEQ ID NO: 2856598 - RNA, 19 nt, Artificial Sequence
  Description of Artificial Sequence: Synthetic oligonucleotide
uuccucagucuggacggca

SEQ ID NO: 2856599 - RNA, 19 nt, Artificial Sequence
  Description of Artificial Sequence: Synthetic oligonucleotide
acccuggaugguauuuguc

SEQ ID NO: 2856600 - RNA, 19 nt, Artificial Sequence
  Description of Artificial Sequence: Synthetic oligonucleotide
guccacaacuuauccaggu

SEQ ID NO: 2856601 - RNA, 19 nt, Artificial Sequence
  Description of Artificial Sequence: Synthetic oligonucleotide
uucagcucuucugcugaaa

SEQ ID NO: 2856602 - RNA, 19 nt, Artificial Sequence
  Description of Artificial Sequence: Synthetic oligonucleotide
cuccuggaugcuugcggug

SEQ ID NO: 2856603 - RNA, 19 nt, Artificial Sequence
  Description of Artificial Sequence: Synthetic oligonucleotide
ucuggacggcauggcggcg

SEQ ID NO: 2856604 - RNA, 19 nt, Artificial Sequence
  Description of Artificial Sequence: Synthetic oligonucleotide
cuuggcagcauugacccgu

SEQ ID NO: 2856605 - RNA, 19 nt, Artificial Sequence
  Description of Artificial Sequence: Synthetic oligonucleotide
ccaguguccacaacuuauc

SEQ ID NO: 2856606 - RNA, 19 nt, Artificial Sequence
  Description of Artificial Sequence: Synthetic oligonucleotide
guuccucuuuaagugguaa

SEQ ID NO: 2856607 - RNA, 19 nt, Artificial Sequence
  Description of Artificial Sequence: Synthetic oligonucleotide
accguggccauggcucacg

SEQ ID NO: 2856608 - RNA, 19 nt, Artificial Sequence
  Description of Artificial Sequence: Synthetic oligonucleotide
guuuaccgaugcgaccgug

SEQ ID NO: 2856609 - RNA, 19 nt, Artificial Sequence
  Description of Artificial Sequence: Synthetic oligonucleotide
ccaggacacaggcaccucc

SEQ ID NO: 2856610 - RNA, 19 nt, Artificial Sequence
  Description of Artificial Sequence: Synthetic oligonucleotide
gcccgaucgcacaacgucg

SEQ ID NO: 2856611 - RNA, 19 nt, Artificial Sequence
  Description of Artificial Sequence: Synthetic oligonucleotide
gcagcauugacccgugucu

SEQ ID NO: 2856612 - RNA, 19 nt, Artificial Sequence
  Description of Artificial Sequence: Synthetic oligonucleotide
acaguggggcagaaacucu

SEQ ID NO: 2856613 - RNA, 19 nt, Artificial Sequence
  Description of Artificial Sequence: Synthetic oligonucleotide
guggugcaugccuccagca

SEQ ID NO: 2856614 - RNA, 19 nt, Artificial Sequence
  Description of Artificial Sequence: Synthetic oligonucleotide
uccugugguggugcaugcc

SEQ ID NO: 2856615 - RNA, 19 nt, Artificial Sequence
  Description of Artificial Sequence: Synthetic oligonucleotide
gugcaugccuccagcauuc

SEQ ID NO: 2856616 - RNA, 19 nt, Artificial Sequence
  Description of Artificial Sequence: Synthetic oligonucleotide
uggaugcuugcgguguuua

SEQ ID NO: 2856617 - RNA, 19 nt, Artificial Sequence
  Description of Artificial Sequence: Synthetic oligonucleotide
gaccaguguccacaacuua

SEQ ID NO: 2856618 - RNA, 19 nt, Artificial Sequence
  Description of Artificial Sequence: Synthetic oligonucleotide
ggacacaggcaccuccaac

SEQ ID NO: 2856619 - RNA, 19 nt, Artificial Sequence
  Description of Artificial Sequence: Synthetic oligonucleotide
ccuggaugguauuugucga

SEQ ID NO: 2856620 - RNA, 19 nt, Artificial Sequence
  Description of Artificial Sequence: Synthetic oligonucleotide
gucugcucacugaccagug

SEQ ID NO: 2856621 - RNA, 19 nt, Artificial Sequence
  Description of Artificial Sequence: Synthetic oligonucleotide
gggagcuuucccuucccca

SEQ ID NO: 2856622 - RNA, 19 nt, Artificial Sequence
  Description of Artificial Sequence: Synthetic oligonucleotide
cauggcucacguggccccg

SEQ ID NO: 2856623 - RNA, 19 nt, Artificial Sequence
  Description of Artificial Sequence: Synthetic oligonucleotide
uugacccgugucugcucac

SEQ ID NO: 2856624 - RNA, 19 nt, Artificial Sequence
  Description of Artificial Sequence: Synthetic oligonucleotide
augcgaccguggccauggc

SEQ ID NO: 2856625 - RNA, 19 nt, Artificial Sequence
  Description of Artificial Sequence: Synthetic oligonucleotide
gcagcuccagucuuguucu

SEQ ID NO: 2856626 - RNA, 19 nt, Artificial Sequence
  Description of Artificial Sequence: Synthetic oligonucleotide
cccgcggccuccuggaugc

SEQ ID NO: 2856627 - RNA, 19 nt, Artificial Sequence
  Description of Artificial Sequence: Synthetic oligonucleotide
gcgguguuuaccgaugcga

SEQ ID NO: 2856628 - RNA, 19 nt, Artificial Sequence
  Description of Artificial Sequence: Synthetic oligonucleotide
ggaugcuugcgguguuuac

SEQ ID NO: 2856629 - RNA, 19 nt, Artificial Sequence
  Description of Artificial Sequence: Synthetic oligonucleotide
cacguggccccggaguuuc

SEQ ID NO: 2856630 - RNA, 19 nt, Artificial Sequence
  Description of Artificial Sequence: Synthetic oligonucleotide
agguugcuuagggagcuuu

SEQ ID NO: 2856631 - RNA, 19 nt, Artificial Sequence
  Description of Artificial Sequence: Synthetic oligonucleotide
cagaaacucugguuccucu

SEQ ID NO: 2856632 - RNA, 19 nt, Artificial Sequence
  Description of Artificial Sequence: Synthetic oligonucleotide
cgaaguugauccuguggug

SEQ ID NO: 2856633 - RNA, 19 nt, Artificial Sequence
  Description of Artificial Sequence: Synthetic oligonucleotide
uucaagccaccaggacaca

SEQ ID NO: 2856634 - RNA, 19 nt, Artificial Sequence
  Description of Artificial Sequence: Synthetic oligonucleotide
ugauccugugguggugcau

SEQ ID NO: 2856635 - RNA, 19 nt, Artificial Sequence
  Description of Artificial Sequence: Synthetic oligonucleotide
ugcaugccuccagcauucc

SEQ ID NO: 2856636 - RNA, 19 nt, Artificial Sequence
  Description of Artificial Sequence: Synthetic oligonucleotide
gcgaccguggccauggcuc

SEQ ID NO: 2856637 - RNA, 19 nt, Artificial Sequence
  Description of Artificial Sequence: Synthetic oligonucleotide
cgguguuuaccgaugcgac

SEQ ID NO: 2856638 - RNA, 19 nt, Artificial Sequence
  Description of Artificial Sequence: Synthetic oligonucleotide
ccauggcucacguggcccc

SEQ ID NO: 2856639 - RNA, 19 nt, Artificial Sequence
  Description of Artificial Sequence: Synthetic oligonucleotide
uggcucacguggccccgga

SEQ ID NO: 2856640 - RNA, 19 nt, Artificial Sequence
  Description of Artificial Sequence: Synthetic oligonucleotide
cccgugucugcucacugac

SEQ ID NO: 2856641 - RNA, 19 nt, Artificial Sequence
  Description of Artificial Sequence: Synthetic oligonucleotide
ccccagaacuuuguaguag

SEQ ID NO: 2856642 - RNA, 19 nt, Artificial Sequence
  Description of Artificial Sequence: Synthetic oligonucleotide
ggaugguauuugucgaagu

SEQ ID NO: 2856643 - RNA, 19 nt, Artificial Sequence
  Description of Artificial Sequence: Synthetic oligonucleotide
gcaugccuccagcauuccc

SEQ ID NO: 2856644 - RNA, 19 nt, Artificial Sequence
  Description of Artificial Sequence: Synthetic oligonucleotide
cgugucugcucacugacca

SEQ ID NO: 2856645 - RNA, 19 nt, Artificial Sequence
  Description of Artificial Sequence: Synthetic oligonucleotide
auggcucacguggccccgg

SEQ ID NO: 2856646 - RNA, 19 nt, Artificial Sequence
  Description of Artificial Sequence: Synthetic oligonucleotide
cagcauucccgcggccucc

SEQ ID NO: 2856647 - RNA, 19 nt, Artificial Sequence
  Description of Artificial Sequence: Synthetic oligonucleotide
ucacgaugacagguugcuu

SEQ ID NO: 2856648 - RNA, 19 nt, Artificial Sequence
  Description of Artificial Sequence: Synthetic oligonucleotide
gcauuuaauuaaccuuccu

SEQ ID NO: 2856649 - RNA, 19 nt, Artificial Sequence
  Description of Artificial Sequence: Synthetic oligonucleotide
caacacccuuuaucuucuc

SEQ ID NO: 2856650 - RNA, 19 nt, Artificial Sequence
  Description of Artificial Sequence: Synthetic oligonucleotide
ccuuccuggguaguucaag

SEQ ID NO: 2856651 - RNA, 19 nt, Artificial Sequence
  Description of Artificial Sequence: Synthetic oligonucleotide
guaaugccucauaccaacu

SEQ ID NO: 2856652 - RNA, 19 nt, Artificial Sequence
  Description of Artificial Sequence: Synthetic oligonucleotide
aucgcacaacgucgaugau

SEQ ID NO: 2856653 - RNA, 19 nt, Artificial Sequence
  Description of Artificial Sequence: Synthetic oligonucleotide
uggcagcauugacccgugu

SEQ ID NO: 2856654 - RNA, 19 nt, Artificial Sequence
  Description of Artificial Sequence: Synthetic oligonucleotide
ggcuuucacgaugacaggu

SEQ ID NO: 2856655 - RNA, 19 nt, Artificial Sequence
  Description of Artificial Sequence: Synthetic oligonucleotide
aggcaccuccaacacccuu

SEQ ID NO: 2856656 - RNA, 19 nt, Artificial Sequence
  Description of Artificial Sequence: Synthetic oligonucleotide
cacugaccaguguccacaa

SEQ ID NO: 2856657 - RNA, 19 nt, Artificial Sequence
  Description of Artificial Sequence: Synthetic oligonucleotide
gccauggcucacguggccc

SEQ ID NO: 2856658 - RNA, 19 nt, Artificial Sequence
  Description of Artificial Sequence: Synthetic oligonucleotide
ggugcaugccuccagcauu

SEQ ID NO: 2856659 - RNA, 19 nt, Artificial Sequence
  Description of Artificial Sequence: Synthetic oligonucleotide
ggccauggcucacguggcc

SEQ ID NO: 2856660 - RNA, 19 nt, Artificial Sequence
  Description of Artificial Sequence: Synthetic oligonucleotide
guugacaguggggcagaaa

SEQ ID NO: 2856661 - RNA, 19 nt, Artificial Sequence
  Description of Artificial Sequence: Synthetic oligonucleotide
ggaguuuccgggucuuccu

SEQ ID NO: 2856662 - RNA, 19 nt, Artificial Sequence
  Description of Artificial Sequence: Synthetic oligonucleotide
ccaccaggacacaggcacc

SEQ ID NO: 2856663 - RNA, 19 nt, Artificial Sequence
  Description of Artificial Sequence: Synthetic oligonucleotide
gguugcuuagggagcuuuc

SEQ ID NO: 2856664 - RNA, 19 nt, Artificial Sequence
  Description of Artificial Sequence: Synthetic oligonucleotide
cuccagcauucccgcggcc

SEQ ID NO: 2856665 - RNA, 19 nt, Artificial Sequence
  Description of Artificial Sequence: Synthetic oligonucleotide
ccgggucuuccucagucug

SEQ ID NO: 2856666 - RNA, 19 nt, Artificial Sequence
  Description of Artificial Sequence: Synthetic oligonucleotide
gucgaugaugggagcagcu

SEQ ID NO: 2856667 - RNA, 19 nt, Artificial Sequence
  Description of Artificial Sequence: Synthetic oligonucleotide
gggagcagcuccagucuug

SEQ ID NO: 2856668 - RNA, 19 nt, Artificial Sequence
  Description of Artificial Sequence: Synthetic oligonucleotide
guggggcagaaacucuggu

SEQ ID NO: 2856669 - RNA, 19 nt, Artificial Sequence
  Description of Artificial Sequence: Synthetic oligonucleotide
agcauucccgcggccuccu

SEQ ID NO: 2856670 - RNA, 19 nt, Artificial Sequence
  Description of Artificial Sequence: Synthetic oligonucleotide
gcagaaacucugguuccuc

SEQ ID NO: 2856671 - RNA, 19 nt, Artificial Sequence
  Description of Artificial Sequence: Synthetic oligonucleotide
cgggucuuccucagucugg

SEQ ID NO: 2856672 - RNA, 19 nt, Artificial Sequence
  Description of Artificial Sequence: Synthetic oligonucleotide
ccgugucugcucacugacc

SEQ ID NO: 2856673 - RNA, 19 nt, Artificial Sequence
  Description of Artificial Sequence: Synthetic oligonucleotide
ucacguggccccggaguuu

SEQ ID NO: 2856674 - RNA, 19 nt, Artificial Sequence
  Description of Artificial Sequence: Synthetic oligonucleotide
gcacaacgucgaugauggg

SEQ ID NO: 2856675 - RNA, 19 nt, Artificial Sequence
  Description of Artificial Sequence: Synthetic oligonucleotide
gcucacugaccagugucca

SEQ ID NO: 2856676 - RNA, 19 nt, Artificial Sequence
  Description of Artificial Sequence: Synthetic oligonucleotide
ggucuuccucagucuggac

SEQ ID NO: 2856677 - RNA, 19 nt, Artificial Sequence
  Description of Artificial Sequence: Synthetic oligonucleotide
cggaguuuccgggucuucc

SEQ ID NO: 2856678 - RNA, 19 nt, Artificial Sequence
  Description of Artificial Sequence: Synthetic oligonucleotide
ccagcauucccgcggccuc

SEQ ID NO: 2856679 - RNA, 19 nt, Artificial Sequence
  Description of Artificial Sequence: Synthetic oligonucleotide
uucccgcggccuccuggau

SEQ ID NO: 2856680 - RNA, 19 nt, Artificial Sequence
  Description of Artificial Sequence: Synthetic oligonucleotide
ccaacacccuuuaucuucu

SEQ ID NO: 2856681 - RNA, 19 nt, Artificial Sequence
  Description of Artificial Sequence: Synthetic oligonucleotide
ccagguugacaguggggca

SEQ ID NO: 2856682 - RNA, 19 nt, Artificial Sequence
  Description of Artificial Sequence: Synthetic oligonucleotide
gcuuagggagcuuucccuu

SEQ ID NO: 2856683 - RNA, 19 nt, Artificial Sequence
  Description of Artificial Sequence: Synthetic oligonucleotide
acguggccccggaguuucc

SEQ ID NO: 2856684 - RNA, 19 nt, Artificial Sequence
  Description of Artificial Sequence: Synthetic oligonucleotide
gaccguggccauggcucac

SEQ ID NO: 2856685 - RNA, 19 nt, Artificial Sequence
  Description of Artificial Sequence: Synthetic oligonucleotide
gcuuucccuuccccagaac

SEQ ID NO: 2856686 - RNA, 19 nt, Artificial Sequence
  Description of Artificial Sequence: Synthetic oligonucleotide
cccgaucgcacaacgucga

SEQ ID NO: 2856687 - RNA, 19 nt, Artificial Sequence
  Description of Artificial Sequence: Synthetic oligonucleotide
ggccuccuggaugcuugcg

SEQ ID NO: 2856688 - RNA, 19 nt, Artificial Sequence
  Description of Artificial Sequence: Synthetic oligonucleotide
ggcucacguggccccggag

SEQ ID NO: 2856689 - RNA, 19 nt, Artificial Sequence
  Description of Artificial Sequence: Synthetic oligonucleotide
gcuugcgguguuuaccgau

SEQ ID NO: 2856690 - RNA, 19 nt, Artificial Sequence
  Description of Artificial Sequence: Synthetic oligonucleotide
cucacguggccccggaguu

SEQ ID NO: 2856691 - RNA, 19 nt, Artificial Sequence
  Description of Artificial Sequence: Synthetic oligonucleotide
cgaucgcacaacgucgaug

SEQ ID NO: 2856692 - RNA, 19 nt, Artificial Sequence
  Description of Artificial Sequence: Synthetic oligonucleotide
caccaggacacaggcaccu

SEQ ID NO: 2856693 - RNA, 19 nt, Artificial Sequence
  Description of Artificial Sequence: Synthetic oligonucleotide
gcaccuccaacacccuuua

SEQ ID NO: 2856694 - RNA, 19 nt, Artificial Sequence
  Description of Artificial Sequence: Synthetic oligonucleotide
accuuccuggguaguucaa

SEQ ID NO: 2856695 - RNA, 19 nt, Artificial Sequence
  Description of Artificial Sequence: Synthetic oligonucleotide
cgucgaugaugggagcagc

SEQ ID NO: 2856696 - RNA, 19 nt, Artificial Sequence
  Description of Artificial Sequence: Synthetic oligonucleotide
gcauugacccgugucugcu

SEQ ID NO: 2856697 - RNA, 19 nt, Artificial Sequence
  Description of Artificial Sequence: Synthetic oligonucleotide
cgaugacagguugcuuagg

SEQ ID NO: 2856698 - RNA, 19 nt, Artificial Sequence
  Description of Artificial Sequence: Synthetic oligonucleotide
ggagcagcuccagucuugu

SEQ ID NO: 2856699 - RNA, 19 nt, Artificial Sequence
  Description of Artificial Sequence: Synthetic oligonucleotide
gguuccucuuuaaguggua

SEQ ID NO: 2856700 - RNA, 19 nt, Artificial Sequence
  Description of Artificial Sequence: Synthetic oligonucleotide
gcuuucacgaugacagguu

SEQ ID NO: 2856701 - RNA, 19 nt, Artificial Sequence
  Description of Artificial Sequence: Synthetic oligonucleotide
ccuccuggaugcuugcggu

SEQ ID NO: 2856702 - RNA, 19 nt, Artificial Sequence
  Description of Artificial Sequence: Synthetic oligonucleotide
gguauuugucgaaguugau

SEQ ID NO: 2856703 - RNA, 19 nt, Artificial Sequence
  Description of Artificial Sequence: Synthetic oligonucleotide
ggcaccuccaacacccuuu

SEQ ID NO: 2856704 - RNA, 19 nt, Artificial Sequence
  Description of Artificial Sequence: Synthetic oligonucleotide
gccccggaguuuccggguc

SEQ ID NO: 2856705 - RNA, 19 nt, Artificial Sequence
  Description of Artificial Sequence: Synthetic oligonucleotide
cguggccccggaguuuccg

SEQ ID NO: 2856706 - RNA, 19 nt, Artificial Sequence
  Description of Artificial Sequence: Synthetic oligonucleotide
ccuuccccagaacuuugua

SEQ ID NO: 2856707 - RNA, 19 nt, Artificial Sequence
  Description of Artificial Sequence: Synthetic oligonucleotide
gguugacaguggggcagaa

SEQ ID NO: 2856708 - RNA, 19 nt, Artificial Sequence
  Description of Artificial Sequence: Synthetic oligonucleotide
gcauucccgcggccuccug

SEQ ID NO: 2856709 - RNA, 19 nt, Artificial Sequence
  Description of Artificial Sequence: Synthetic oligonucleotide
cguggccauggcucacgug

SEQ ID NO: 2856710 - RNA, 19 nt, Artificial Sequence
  Description of Artificial Sequence: Synthetic oligonucleotide
caggcaccuccaacacccu

SEQ ID NO: 2856711 - RNA, 19 nt, Artificial Sequence
  Description of Artificial Sequence: Synthetic oligonucleotide
ggccccggaguuuccgggu

SEQ ID NO: 2856712 - RNA, 19 nt, Artificial Sequence
  Description of Artificial Sequence: Synthetic oligonucleotide
cgaccguggccauggcuca

SEQ ID NO: 2856713 - RNA, 19 nt, Artificial Sequence
  Description of Artificial Sequence: Synthetic oligonucleotide
cuggaugcuugcgguguuu

SEQ ID NO: 2856714 - RNA, 19 nt, Artificial Sequence
  Description of Artificial Sequence: Synthetic oligonucleotide
cccuuccccagaacuuugu

SEQ ID NO: 2856715 - RNA, 19 nt, Artificial Sequence
  Description of Artificial Sequence: Synthetic oligonucleotide
caccuccaacacccuuuau

SEQ ID NO: 2856716 - RNA, 19 nt, Artificial Sequence
  Description of Artificial Sequence: Synthetic oligonucleotide
cgaugcgaccguggccaug

SEQ ID NO: 2856717 - RNA, 19 nt, Artificial Sequence
  Description of Artificial Sequence: Synthetic oligonucleotide
cagcuccagucuuguucuu

SEQ ID NO: 2856718 - RNA, 19 nt, Artificial Sequence
  Description of Artificial Sequence: Synthetic oligonucleotide
cagguugcuuagggagcuu

SEQ ID NO: 2856719 - RNA, 19 nt, Artificial Sequence
  Description of Artificial Sequence: Synthetic oligonucleotide
ccuggaugcuugcgguguu

SEQ ID NO: 2856720 - RNA, 19 nt, Artificial Sequence
  Description of Artificial Sequence: Synthetic oligonucleotide
ccccggaguuuccgggucu

SEQ ID NO: 2856721 - RNA, 19 nt, Artificial Sequence
  Description of Artificial Sequence: Synthetic oligonucleotide
ccguggccauggcucacgu

SEQ ID NO: 2856722 - RNA, 19 nt, Artificial Sequence
  Description of Artificial Sequence: Synthetic oligonucleotide
ccgaucgcacaacgucgau

SEQ ID NO: 2856723 - RNA, 19 nt, Artificial Sequence
  Description of Artificial Sequence: Synthetic oligonucleotide
ccgaugcgaccguggccau

SEQ ID NO: 2856724 - RNA, 19 nt, Artificial Sequence
  Description of Artificial Sequence: Synthetic oligonucleotide
cccggaguuuccgggucuu

SEQ ID NO: 2856725 - RNA, 19 nt, Artificial Sequence
  Description of Artificial Sequence: Synthetic oligonucleotide
cgcggccuccuggaugcuu

SEQ ID NO: 2856726 - RNA, 19 nt, Artificial Sequence
  Description of Artificial Sequence: Synthetic oligonucleotide
ccgcggccuccuggaugcu

SEQ ID NO: 2856727 - RNA, 19 nt, Artificial Sequence
  Description of Artificial Sequence: Synthetic oligonucleotide
aauauaacaaucaauaucc

SEQ ID NO: 2856728 - RNA, 19 nt, Artificial Sequence
  Description of Artificial Sequence: Synthetic oligonucleotide
aaaauaaagagucagaaau

SEQ ID NO: 2856729 - RNA, 19 nt, Artificial Sequence
  Description of Artificial Sequence: Synthetic oligonucleotide
ucaaauauaacaaucaaua

SEQ ID NO: 2856730 - RNA, 19 nt, Artificial Sequence
  Description of Artificial Sequence: Synthetic oligonucleotide
aaaaugaccuaaauaaagc

SEQ ID NO: 2856731 - RNA, 19 nt, Artificial Sequence
  Description of Artificial Sequence: Synthetic oligonucleotide
aauaaaagguuuccguugg

SEQ ID NO: 2856732 - RNA, 19 nt, Artificial Sequence
  Description of Artificial Sequence: Synthetic oligonucleotide
acaaucaauaucccuaacc

SEQ ID NO: 2856733 - RNA, 19 nt, Artificial Sequence
  Description of Artificial Sequence: Synthetic oligonucleotide
uuugcugccacucaacagg

SEQ ID NO: 2856734 - RNA, 19 nt, Artificial Sequence
  Description of Artificial Sequence: Synthetic oligonucleotide
ucaaagagaagacaugucc

SEQ ID NO: 2856735 - RNA, 19 nt, Artificial Sequence
  Description of Artificial Sequence: Synthetic oligonucleotide
aaauaaaagguuuccguug

SEQ ID NO: 2856736 - RNA, 19 nt, Artificial Sequence
  Description of Artificial Sequence: Synthetic oligonucleotide
cuuaaguucaaauauaaca

SEQ ID NO: 2856737 - RNA, 19 nt, Artificial Sequence
  Description of Artificial Sequence: Synthetic oligonucleotide
aauaaagcaccagagcucg

SEQ ID NO: 2856738 - RNA, 19 nt, Artificial Sequence
  Description of Artificial Sequence: Synthetic oligonucleotide
gaauagaagaacuugguga

SEQ ID NO: 2856739 - RNA, 19 nt, Artificial Sequence
  Description of Artificial Sequence: Synthetic oligonucleotide
aagccagccaaucacaauc

SEQ ID NO: 2856740 - RNA, 19 nt, Artificial Sequence
  Description of Artificial Sequence: Synthetic oligonucleotide
agaacuuggugauaugagc

SEQ ID NO: 2856741 - RNA, 19 nt, Artificial Sequence
  Description of Artificial Sequence: Synthetic oligonucleotide
aaaugaccuaaauaaagca

SEQ ID NO: 2856742 - RNA, 19 nt, Artificial Sequence
  Description of Artificial Sequence: Synthetic oligonucleotide
aguuuaagcagccaaucgg

SEQ ID NO: 2856743 - RNA, 19 nt, Artificial Sequence
  Description of Artificial Sequence: Synthetic oligonucleotide
aaugaccuaaauaaagcac

SEQ ID NO: 2856744 - RNA, 19 nt, Artificial Sequence
  Description of Artificial Sequence: Synthetic oligonucleotide
aauagaagaacuuggugau

SEQ ID NO: 2856745 - RNA, 19 nt, Artificial Sequence
  Description of Artificial Sequence: Synthetic oligonucleotide
aaaauaaaagguuuccguu

SEQ ID NO: 2856746 - RNA, 19 nt, Artificial Sequence
  Description of Artificial Sequence: Synthetic oligonucleotide
aagaaggucguuugcugcc

SEQ ID NO: 2856747 - RNA, 19 nt, Artificial Sequence
  Description of Artificial Sequence: Synthetic oligonucleotide
aucacaaaccaccacuggc

SEQ ID NO: 2856748 - RNA, 19 nt, Artificial Sequence
  Description of Artificial Sequence: Synthetic oligonucleotide
caaucaauaucccuaaccc

SEQ ID NO: 2856749 - RNA, 19 nt, Artificial Sequence
  Description of Artificial Sequence: Synthetic oligonucleotide
ucggaauagaagaacuugg

SEQ ID NO: 2856750 - RNA, 19 nt, Artificial Sequence
  Description of Artificial Sequence: Synthetic oligonucleotide
auaugagcagaacaccugc

SEQ ID NO: 2856751 - RNA, 19 nt, Artificial Sequence
  Description of Artificial Sequence: Synthetic oligonucleotide
augaccuaaauaaagcacc

SEQ ID NO: 2856752 - RNA, 19 nt, Artificial Sequence
  Description of Artificial Sequence: Synthetic oligonucleotide
ucugcauucggaauagaag

SEQ ID NO: 2856753 - RNA, 19 nt, Artificial Sequence
  Description of Artificial Sequence: Synthetic oligonucleotide
auccuuuuccaguuuaagc

SEQ ID NO: 2856754 - RNA, 19 nt, Artificial Sequence
  Description of Artificial Sequence: Synthetic oligonucleotide
aaaagguuuccguugguca

SEQ ID NO: 2856755 - RNA, 19 nt, Artificial Sequence
  Description of Artificial Sequence: Synthetic oligonucleotide
aauaaagagucagaaauaa

SEQ ID NO: 2856756 - RNA, 19 nt, Artificial Sequence
  Description of Artificial Sequence: Synthetic oligonucleotide
aaucacaauccuuuuccag

SEQ ID NO: 2856757 - RNA, 19 nt, Artificial Sequence
  Description of Artificial Sequence: Synthetic oligonucleotide
aaauaaagcaccagagcuc

SEQ ID NO: 2856758 - RNA, 19 nt, Artificial Sequence
  Description of Artificial Sequence: Synthetic oligonucleotide
cuaaauaaagcaccagagc

SEQ ID NO: 2856759 - RNA, 19 nt, Artificial Sequence
  Description of Artificial Sequence: Synthetic oligonucleotide
uucaaauauaacaaucaau

SEQ ID NO: 2856760 - RNA, 19 nt, Artificial Sequence
  Description of Artificial Sequence: Synthetic oligonucleotide
uuuccguuggucaagauuu

SEQ ID NO: 2856761 - RNA, 19 nt, Artificial Sequence
  Description of Artificial Sequence: Synthetic oligonucleotide
aaagagaagacauguccca

SEQ ID NO: 2856762 - RNA, 19 nt, Artificial Sequence
  Description of Artificial Sequence: Synthetic oligonucleotide
auaucccuaacccuguuuc

SEQ ID NO: 2856763 - RNA, 19 nt, Artificial Sequence
  Description of Artificial Sequence: Synthetic oligonucleotide
uauaacaaucaauaucccu

SEQ ID NO: 2856764 - RNA, 19 nt, Artificial Sequence
  Description of Artificial Sequence: Synthetic oligonucleotide
uuggucaagauuuaaaauu

SEQ ID NO: 2856765 - RNA, 19 nt, Artificial Sequence
  Description of Artificial Sequence: Synthetic oligonucleotide
aaucacaaaccaccacugg

SEQ ID NO: 2856766 - RNA, 19 nt, Artificial Sequence
  Description of Artificial Sequence: Synthetic oligonucleotide
caaagagaagacauguccc

SEQ ID NO: 2856767 - RNA, 19 nt, Artificial Sequence
  Description of Artificial Sequence: Synthetic oligonucleotide
aaucaauaucccuaacccu

SEQ ID NO: 2856768 - RNA, 19 nt, Artificial Sequence
  Description of Artificial Sequence: Synthetic oligonucleotide
aagccaacuaccgaaggcg

SEQ ID NO: 2856769 - RNA, 19 nt, Artificial Sequence
  Description of Artificial Sequence: Synthetic oligonucleotide
ugauaugagcagaacaccu

SEQ ID NO: 2856770 - RNA, 19 nt, Artificial Sequence
  Description of Artificial Sequence: Synthetic oligonucleotide
cuuaagccaaucacaaacc

SEQ ID NO: 2856771 - RNA, 19 nt, Artificial Sequence
  Description of Artificial Sequence: Synthetic oligonucleotide
aacuuggugauaugagcag

SEQ ID NO: 2856772 - RNA, 19 nt, Artificial Sequence
  Description of Artificial Sequence: Synthetic oligonucleotide
ucacaaaccaccacuggca

SEQ ID NO: 2856773 - RNA, 19 nt, Artificial Sequence
  Description of Artificial Sequence: Synthetic oligonucleotide
aacaaucaauaucccuaac

SEQ ID NO: 2856774 - RNA, 19 nt, Artificial Sequence
  Description of Artificial Sequence: Synthetic oligonucleotide
uuaagccaaucacaaacca

SEQ ID NO: 2856775 - RNA, 19 nt, Artificial Sequence
  Description of Artificial Sequence: Synthetic oligonucleotide
uggugauaugagcagaaca

SEQ ID NO: 2856776 - RNA, 19 nt, Artificial Sequence
  Description of Artificial Sequence: Synthetic oligonucleotide
aagacaugucccacaagcc

SEQ ID NO: 2856777 - RNA, 19 nt, Artificial Sequence
  Description of Artificial Sequence: Synthetic oligonucleotide
cuuccugcagccaaucacg

SEQ ID NO: 2856778 - RNA, 19 nt, Artificial Sequence
  Description of Artificial Sequence: Synthetic oligonucleotide
guuuaagcagccaaucggg

SEQ ID NO: 2856779 - RNA, 19 nt, Artificial Sequence
  Description of Artificial Sequence: Synthetic oligonucleotide
accuaaauaaagcaccaga

SEQ ID NO: 2856780 - RNA, 19 nt, Artificial Sequence
  Description of Artificial Sequence: Synthetic oligonucleotide
aucacaauccuuuuccagu

SEQ ID NO: 2856781 - RNA, 19 nt, Artificial Sequence
  Description of Artificial Sequence: Synthetic oligonucleotide
uuucuuaaguucaaauaua

SEQ ID NO: 2856782 - RNA, 19 nt, Artificial Sequence
  Description of Artificial Sequence: Synthetic oligonucleotide
gaagaaggucguuugcugc

SEQ ID NO: 2856783 - RNA, 19 nt, Artificial Sequence
  Description of Artificial Sequence: Synthetic oligonucleotide
ucuuaaguucaaauauaac

SEQ ID NO: 2856784 - RNA, 19 nt, Artificial Sequence
  Description of Artificial Sequence: Synthetic oligonucleotide
uuaagcagccaaucgggcc

SEQ ID NO: 2856785 - RNA, 19 nt, Artificial Sequence
  Description of Artificial Sequence: Synthetic oligonucleotide
gagcagaacaccugcagcc

SEQ ID NO: 2856786 - RNA, 19 nt, Artificial Sequence
  Description of Artificial Sequence: Synthetic oligonucleotide
uuuuccaguuuaagcagcc

SEQ ID NO: 2856787 - RNA, 19 nt, Artificial Sequence
  Description of Artificial Sequence: Synthetic oligonucleotide
uaaguucaaauauaacaau

SEQ ID NO: 2856788 - RNA, 19 nt, Artificial Sequence
  Description of Artificial Sequence: Synthetic oligonucleotide
acgaguccaucccuuaagc

SEQ ID NO: 2856789 - RNA, 19 nt, Artificial Sequence
  Description of Artificial Sequence: Synthetic oligonucleotide
uucggaauagaagaacuug

SEQ ID NO: 2856790 - RNA, 19 nt, Artificial Sequence
  Description of Artificial Sequence: Synthetic oligonucleotide
aagagaagacaugucccac

SEQ ID NO: 2856791 - RNA, 19 nt, Artificial Sequence
  Description of Artificial Sequence: Synthetic oligonucleotide
ugaccuaaauaaagcacca

SEQ ID NO: 2856792 - RNA, 19 nt, Artificial Sequence
  Description of Artificial Sequence: Synthetic oligonucleotide
uuuaagcagccaaucgggc

SEQ ID NO: 2856793 - RNA, 19 nt, Artificial Sequence
  Description of Artificial Sequence: Synthetic oligonucleotide
uaagcagccaaucgggccu

SEQ ID NO: 2856794 - RNA, 19 nt, Artificial Sequence
  Description of Artificial Sequence: Synthetic oligonucleotide
ugagcagaacaccugcagc

SEQ ID NO: 2856795 - RNA, 19 nt, Artificial Sequence
  Description of Artificial Sequence: Synthetic oligonucleotide
auaacaaucaauaucccua

SEQ ID NO: 2856796 - RNA, 19 nt, Artificial Sequence
  Description of Artificial Sequence: Synthetic oligonucleotide
uguuucugcauucggaaua

SEQ ID NO: 2856797 - RNA, 19 nt, Artificial Sequence
  Description of Artificial Sequence: Synthetic oligonucleotide
gagggagggaagaaggucg

SEQ ID NO: 2856798 - RNA, 19 nt, Artificial Sequence
  Description of Artificial Sequence: Synthetic oligonucleotide
ugucccacaagccagccaa

SEQ ID NO: 2856799 - RNA, 19 nt, Artificial Sequence
  Description of Artificial Sequence: Synthetic oligonucleotide
aagaacuuggugauaugag

SEQ ID NO: 2856800 - RNA, 19 nt, Artificial Sequence
  Description of Artificial Sequence: Synthetic oligonucleotide
aacaccugcagccaaucaa

SEQ ID NO: 2856801 - RNA, 19 nt, Artificial Sequence
  Description of Artificial Sequence: Synthetic oligonucleotide
uaagccaaucacaaaccac

SEQ ID NO: 2856802 - RNA, 19 nt, Artificial Sequence
  Description of Artificial Sequence: Synthetic oligonucleotide
ccuaaauaaagcaccagag

SEQ ID NO: 2856803 - RNA, 19 nt, Artificial Sequence
  Description of Artificial Sequence: Synthetic oligonucleotide
aaagguuuccguuggucaa

SEQ ID NO: 2856804 - RNA, 19 nt, Artificial Sequence
  Description of Artificial Sequence: Synthetic oligonucleotide
aaagcaccagagcucggag

SEQ ID NO: 2856805 - RNA, 19 nt, Artificial Sequence
  Description of Artificial Sequence: Synthetic oligonucleotide
gaagccaacuaccgaaggc

SEQ ID NO: 2856806 - RNA, 19 nt, Artificial Sequence
  Description of Artificial Sequence: Synthetic oligonucleotide
auauaacaaucaauauccc

SEQ ID NO: 2856807 - RNA, 19 nt, Artificial Sequence
  Description of Artificial Sequence: Synthetic oligonucleotide
uaacaaucaauaucccuaa

SEQ ID NO: 2856808 - RNA, 19 nt, Artificial Sequence
  Description of Artificial Sequence: Synthetic oligonucleotide
cugcauucggaauagaaga

SEQ ID NO: 2856809 - RNA, 19 nt, Artificial Sequence
  Description of Artificial Sequence: Synthetic oligonucleotide
cucaacagggagaggagcc

SEQ ID NO: 2856810 - RNA, 19 nt, Artificial Sequence
  Description of Artificial Sequence: Synthetic oligonucleotide
gaguccaucccuuaagcca

SEQ ID NO: 2856811 - RNA, 19 nt, Artificial Sequence
  Description of Artificial Sequence: Synthetic oligonucleotide
acuggcaucucccuugaug

SEQ ID NO: 2856812 - RNA, 19 nt, Artificial Sequence
  Description of Artificial Sequence: Synthetic oligonucleotide
caguuuaagcagccaaucg

SEQ ID NO: 2856813 - RNA, 19 nt, Artificial Sequence
  Description of Artificial Sequence: Synthetic oligonucleotide
aaauaaagagucagaaaua

SEQ ID NO: 2856814 - RNA, 19 nt, Artificial Sequence
  Description of Artificial Sequence: Synthetic oligonucleotide
uucugcauucggaauagaa

SEQ ID NO: 2856815 - RNA, 19 nt, Artificial Sequence
  Description of Artificial Sequence: Synthetic oligonucleotide
gaacuuggugauaugagca

SEQ ID NO: 2856816 - RNA, 19 nt, Artificial Sequence
  Description of Artificial Sequence: Synthetic oligonucleotide
agacaugucccacaagcca

SEQ ID NO: 2856817 - RNA, 19 nt, Artificial Sequence
  Description of Artificial Sequence: Synthetic oligonucleotide
caucccuuaagccaaucac

SEQ ID NO: 2856818 - RNA, 19 nt, Artificial Sequence
  Description of Artificial Sequence: Synthetic oligonucleotide
gauaugagcagaacaccug

SEQ ID NO: 2856819 - RNA, 19 nt, Artificial Sequence
  Description of Artificial Sequence: Synthetic oligonucleotide
uuccaguuuaagcagccaa

SEQ ID NO: 2856820 - RNA, 19 nt, Artificial Sequence
  Description of Artificial Sequence: Synthetic oligonucleotide
ucaauaucccuaacccugu

SEQ ID NO: 2856821 - RNA, 19 nt, Artificial Sequence
  Description of Artificial Sequence: Synthetic oligonucleotide
augagcagaacaccugcag

SEQ ID NO: 2856822 - RNA, 19 nt, Artificial Sequence
  Description of Artificial Sequence: Synthetic oligonucleotide
gaagaacuuggugauauga

SEQ ID NO: 2856823 - RNA, 19 nt, Artificial Sequence
  Description of Artificial Sequence: Synthetic oligonucleotide
gacaugucccacaagccag

SEQ ID NO: 2856824 - RNA, 19 nt, Artificial Sequence
  Description of Artificial Sequence: Synthetic oligonucleotide
ccaaucacaauccuuuucc

SEQ ID NO: 2856825 - RNA, 19 nt, Artificial Sequence
  Description of Artificial Sequence: Synthetic oligonucleotide
uagaagaacuuggugauau

SEQ ID NO: 2856826 - RNA, 19 nt, Artificial Sequence
  Description of Artificial Sequence: Synthetic oligonucleotide
agcucggagagcuuccggg

SEQ ID NO: 2856827 - RNA, 19 nt, Artificial Sequence
  Description of Artificial Sequence: Synthetic oligonucleotide
ccugcagccaaucaaagag

SEQ ID NO: 2856828 - RNA, 19 nt, Artificial Sequence
  Description of Artificial Sequence: Synthetic oligonucleotide
gagggaagaaggucguuug

SEQ ID NO: 2856829 - RNA, 19 nt, Artificial Sequence
  Description of Artificial Sequence: Synthetic oligonucleotide
ugcagccaaucaaagagaa

SEQ ID NO: 2856830 - RNA, 19 nt, Artificial Sequence
  Description of Artificial Sequence: Synthetic oligonucleotide
acucaacagggagaggagc

SEQ ID NO: 2856831 - RNA, 19 nt, Artificial Sequence
  Description of Artificial Sequence: Synthetic oligonucleotide
ggugauaugagcagaacac

SEQ ID NO: 2856832 - RNA, 19 nt, Artificial Sequence
  Description of Artificial Sequence: Synthetic oligonucleotide
ggaauagaagaacuuggug

SEQ ID NO: 2856833 - RNA, 19 nt, Artificial Sequence
  Description of Artificial Sequence: Synthetic oligonucleotide
uaugagcagaacaccugca

SEQ ID NO: 2856834 - RNA, 19 nt, Artificial Sequence
  Description of Artificial Sequence: Synthetic oligonucleotide
aauaucccuaacccuguuu

SEQ ID NO: 2856835 - RNA, 19 nt, Artificial Sequence
  Description of Artificial Sequence: Synthetic oligonucleotide
ugcauucggaauagaagaa

SEQ ID NO: 2856836 - RNA, 19 nt, Artificial Sequence
  Description of Artificial Sequence: Synthetic oligonucleotide
uugaugccagcccugcuga

SEQ ID NO: 2856837 - RNA, 19 nt, Artificial Sequence
  Description of Artificial Sequence: Synthetic oligonucleotide
agggagaggagccccacag

SEQ ID NO: 2856838 - RNA, 19 nt, Artificial Sequence
  Description of Artificial Sequence: Synthetic oligonucleotide
ucucccuugaugccagccc

SEQ ID NO: 2856839 - RNA, 19 nt, Artificial Sequence
  Description of Artificial Sequence: Synthetic oligonucleotide
cuugaugccagcccugcug

SEQ ID NO: 2856840 - RNA, 19 nt, Artificial Sequence
  Description of Artificial Sequence: Synthetic oligonucleotide
uccaguuuaagcagccaau

SEQ ID NO: 2856841 - RNA, 19 nt, Artificial Sequence
  Description of Artificial Sequence: Synthetic oligonucleotide
uccggggaagccaacuacc

SEQ ID NO: 2856842 - RNA, 19 nt, Artificial Sequence
  Description of Artificial Sequence: Synthetic oligonucleotide
agagaagacaugucccaca

SEQ ID NO: 2856843 - RNA, 19 nt, Artificial Sequence
  Description of Artificial Sequence: Synthetic oligonucleotide
accacuggcaucucccuug

SEQ ID NO: 2856844 - RNA, 19 nt, Artificial Sequence
  Description of Artificial Sequence: Synthetic oligonucleotide
ugccacucaacagggagag

SEQ ID NO: 2856845 - RNA, 19 nt, Artificial Sequence
  Description of Artificial Sequence: Synthetic oligonucleotide
ugcugaguggcuggggugg

SEQ ID NO: 2856846 - RNA, 19 nt, Artificial Sequence
  Description of Artificial Sequence: Synthetic oligonucleotide
uaaaagguuuccguugguc

SEQ ID NO: 2856847 - RNA, 19 nt, Artificial Sequence
  Description of Artificial Sequence: Synthetic oligonucleotide
aacccuguuucugcauucg

SEQ ID NO: 2856848 - RNA, 19 nt, Artificial Sequence
  Description of Artificial Sequence: Synthetic oligonucleotide
aucaaagagaagacauguc

SEQ ID NO: 2856849 - RNA, 19 nt, Artificial Sequence
  Description of Artificial Sequence: Synthetic oligonucleotide
uaaagcaccagagcucgga

SEQ ID NO: 2856850 - RNA, 19 nt, Artificial Sequence
  Description of Artificial Sequence: Synthetic oligonucleotide
agccaaucaaagagaagac

SEQ ID NO: 2856851 - RNA, 19 nt, Artificial Sequence
  Description of Artificial Sequence: Synthetic oligonucleotide
gugauaugagcagaacacc

SEQ ID NO: 2856852 - RNA, 19 nt, Artificial Sequence
  Description of Artificial Sequence: Synthetic oligonucleotide
guuucugcauucggaauag

SEQ ID NO: 2856853 - RNA, 19 nt, Artificial Sequence
  Description of Artificial Sequence: Synthetic oligonucleotide
aagguuuccguuggucaag

SEQ ID NO: 2856854 - RNA, 19 nt, Artificial Sequence
  Description of Artificial Sequence: Synthetic oligonucleotide
ucccuaacccuguuucugc

SEQ ID NO: 2856855 - RNA, 19 nt, Artificial Sequence
  Description of Artificial Sequence: Synthetic oligonucleotide
ucacaauccuuuuccaguu

SEQ ID NO: 2856856 - RNA, 19 nt, Artificial Sequence
  Description of Artificial Sequence: Synthetic oligonucleotide
ucgggccucuucacgaucc

SEQ ID NO: 2856857 - RNA, 19 nt, Artificial Sequence
  Description of Artificial Sequence: Synthetic oligonucleotide
acaaaccaccacuggcauc

SEQ ID NO: 2856858 - RNA, 19 nt, Artificial Sequence
  Description of Artificial Sequence: Synthetic oligonucleotide
agccagccaaucacaaucc

SEQ ID NO: 2856859 - RNA, 19 nt, Artificial Sequence
  Description of Artificial Sequence: Synthetic oligonucleotide
uuccggggaagccaacuac

SEQ ID NO: 2856860 - RNA, 19 nt, Artificial Sequence
  Description of Artificial Sequence: Synthetic oligonucleotide
gagaagacaugucccacaa

SEQ ID NO: 2856861 - RNA, 19 nt, Artificial Sequence
  Description of Artificial Sequence: Synthetic oligonucleotide
gaccuaaauaaagcaccag

SEQ ID NO: 2856862 - RNA, 19 nt, Artificial Sequence
  Description of Artificial Sequence: Synthetic oligonucleotide
acaauccuuuuccaguuua

SEQ ID NO: 2856863 - RNA, 19 nt, Artificial Sequence
  Description of Artificial Sequence: Synthetic oligonucleotide
ucaacagggagaggagccc

SEQ ID NO: 2856864 - RNA, 19 nt, Artificial Sequence
  Description of Artificial Sequence: Synthetic oligonucleotide
augccagcccugcugagug

SEQ ID NO: 2856865 - RNA, 19 nt, Artificial Sequence
  Description of Artificial Sequence: Synthetic oligonucleotide
uaucccuaacccuguuucu

SEQ ID NO: 2856866 - RNA, 19 nt, Artificial Sequence
  Description of Artificial Sequence: Synthetic oligonucleotide
auaaaagguuuccguuggu

SEQ ID NO: 2856867 - RNA, 19 nt, Artificial Sequence
  Description of Artificial Sequence: Synthetic oligonucleotide
cacgaguccaucccuuaag

SEQ ID NO: 2856868 - RNA, 19 nt, Artificial Sequence
  Description of Artificial Sequence: Synthetic oligonucleotide
agccaacuaccgaaggcgc

SEQ ID NO: 2856869 - RNA, 19 nt, Artificial Sequence
  Description of Artificial Sequence: Synthetic oligonucleotide
gcugccacucaacagggag

SEQ ID NO: 2856870 - RNA, 19 nt, Artificial Sequence
  Description of Artificial Sequence: Synthetic oligonucleotide
agaagacaugucccacaag

SEQ ID NO: 2856871 - RNA, 19 nt, Artificial Sequence
  Description of Artificial Sequence: Synthetic oligonucleotide
cauucggaauagaagaacu

SEQ ID NO: 2856872 - RNA, 19 nt, Artificial Sequence
  Description of Artificial Sequence: Synthetic oligonucleotide
caaauauaacaaucaauau

SEQ ID NO: 2856873 - RNA, 19 nt, Artificial Sequence
  Description of Artificial Sequence: Synthetic oligonucleotide
agccaaucgggccucuuca

SEQ ID NO: 2856874 - RNA, 19 nt, Artificial Sequence
  Description of Artificial Sequence: Synthetic oligonucleotide
acaugucccacaagccagc

SEQ ID NO: 2856875 - RNA, 19 nt, Artificial Sequence
  Description of Artificial Sequence: Synthetic oligonucleotide
uucuuccugcagccaauca

SEQ ID NO: 2856876 - RNA, 19 nt, Artificial Sequence
  Description of Artificial Sequence: Synthetic oligonucleotide
cacucaacagggagaggag

SEQ ID NO: 2856877 - RNA, 19 nt, Artificial Sequence
  Description of Artificial Sequence: Synthetic oligonucleotide
aggucguuugcugccacuc

SEQ ID NO: 2856878 - RNA, 19 nt, Artificial Sequence
  Description of Artificial Sequence: Synthetic oligonucleotide
ucguuugcugccacucaac

SEQ ID NO: 2856879 - RNA, 19 nt, Artificial Sequence
  Description of Artificial Sequence: Synthetic oligonucleotide
uuccugcagccaaucacga

SEQ ID NO: 2856880 - RNA, 19 nt, Artificial Sequence
  Description of Artificial Sequence: Synthetic oligonucleotide
guuggucaagauuuaaaau

SEQ ID NO: 2856881 - RNA, 19 nt, Artificial Sequence
  Description of Artificial Sequence: Synthetic oligonucleotide
ggaagccaacuaccgaagg

SEQ ID NO: 2856882 - RNA, 19 nt, Artificial Sequence
  Description of Artificial Sequence: Synthetic oligonucleotide
uaacccuguuucugcauuc

SEQ ID NO: 2856883 - RNA, 19 nt, Artificial Sequence
  Description of Artificial Sequence: Synthetic oligonucleotide
agagcuuccggggaagcca

SEQ ID NO: 2856884 - RNA, 19 nt, Artificial Sequence
  Description of Artificial Sequence: Synthetic oligonucleotide
aaggucguuugcugccacu

SEQ ID NO: 2856885 - RNA, 19 nt, Artificial Sequence
  Description of Artificial Sequence: Synthetic oligonucleotide
acuuggugauaugagcaga

SEQ ID NO: 2856886 - RNA, 19 nt, Artificial Sequence
  Description of Artificial Sequence: Synthetic oligonucleotide
aaucgggccucuucacgau

SEQ ID NO: 2856887 - RNA, 19 nt, Artificial Sequence
  Description of Artificial Sequence: Synthetic oligonucleotide
ucacgaguccaucccuuaa

SEQ ID NO: 2856888 - RNA, 19 nt, Artificial Sequence
  Description of Artificial Sequence: Synthetic oligonucleotide
ccaaucacgaguccauccc

SEQ ID NO: 2856889 - RNA, 19 nt, Artificial Sequence
  Description of Artificial Sequence: Synthetic oligonucleotide
uaccgaaggcgcaaauuuu

SEQ ID NO: 2856890 - RNA, 19 nt, Artificial Sequence
  Description of Artificial Sequence: Synthetic oligonucleotide
uccugcagccaaucacgag

SEQ ID NO: 2856891 - RNA, 19 nt, Artificial Sequence
  Description of Artificial Sequence: Synthetic oligonucleotide
aucccuaacccuguuucug

SEQ ID NO: 2856892 - RNA, 19 nt, Artificial Sequence
  Description of Artificial Sequence: Synthetic oligonucleotide
caaucgggccucuucacga

SEQ ID NO: 2856893 - RNA, 19 nt, Artificial Sequence
  Description of Artificial Sequence: Synthetic oligonucleotide
cugcagccaaucacgaguc

SEQ ID NO: 2856894 - RNA, 19 nt, Artificial Sequence
  Description of Artificial Sequence: Synthetic oligonucleotide
aacuaccgaaggcgcaaau

SEQ ID NO: 2856895 - RNA, 19 nt, Artificial Sequence
  Description of Artificial Sequence: Synthetic oligonucleotide
caaucacaauccuuuucca

SEQ ID NO: 2856896 - RNA, 19 nt, Artificial Sequence
  Description of Artificial Sequence: Synthetic oligonucleotide
uuuccaguuuaagcagcca

SEQ ID NO: 2856897 - RNA, 19 nt, Artificial Sequence
  Description of Artificial Sequence: Synthetic oligonucleotide
uuggugauaugagcagaac

SEQ ID NO: 2856898 - RNA, 19 nt, Artificial Sequence
  Description of Artificial Sequence: Synthetic oligonucleotide
caaaccaccacuggcaucu

SEQ ID NO: 2856899 - RNA, 19 nt, Artificial Sequence
  Description of Artificial Sequence: Synthetic oligonucleotide
aguccaucccuuaagccaa

SEQ ID NO: 2856900 - RNA, 19 nt, Artificial Sequence
  Description of Artificial Sequence: Synthetic oligonucleotide
gagcucggagagcuuccgg

SEQ ID NO: 2856901 - RNA, 19 nt, Artificial Sequence
  Description of Artificial Sequence: Synthetic oligonucleotide
ugcagccaaucacgagucc

SEQ ID NO: 2856902 - RNA, 19 nt, Artificial Sequence
  Description of Artificial Sequence: Synthetic oligonucleotide
aucgggccucuucacgauc

SEQ ID NO: 2856903 - RNA, 19 nt, Artificial Sequence
  Description of Artificial Sequence: Synthetic oligonucleotide
gccaaucacgaguccaucc

SEQ ID NO: 2856904 - RNA, 19 nt, Artificial Sequence
  Description of Artificial Sequence: Synthetic oligonucleotide
ucggagagcuuccggggaa

SEQ ID NO: 2856905 - RNA, 19 nt, Artificial Sequence
  Description of Artificial Sequence: Synthetic oligonucleotide
caccugcagccaaucaaag

SEQ ID NO: 2856906 - RNA, 19 nt, Artificial Sequence
  Description of Artificial Sequence: Synthetic oligonucleotide
cagagcucggagagcuucc

SEQ ID NO: 2856907 - RNA, 19 nt, Artificial Sequence
  Description of Artificial Sequence: Synthetic oligonucleotide
uggcaucucccuugaugcc

SEQ ID NO: 2856908 - RNA, 19 nt, Artificial Sequence
  Description of Artificial Sequence: Synthetic oligonucleotide
ucccuugaugccagcccug

SEQ ID NO: 2856909 - RNA, 19 nt, Artificial Sequence
  Description of Artificial Sequence: Synthetic oligonucleotide
aaucacgaguccaucccuu

SEQ ID NO: 2856910 - RNA, 19 nt, Artificial Sequence
  Description of Artificial Sequence: Synthetic oligonucleotide
aagcagccaaucgggccuc

SEQ ID NO: 2856911 - RNA, 19 nt, Artificial Sequence
  Description of Artificial Sequence: Synthetic oligonucleotide
agagcucggagagcuuccg

SEQ ID NO: 2856912 - RNA, 19 nt, Artificial Sequence
  Description of Artificial Sequence: Synthetic oligonucleotide
gaacaccugcagccaauca

SEQ ID NO: 2856913 - RNA, 19 nt, Artificial Sequence
  Description of Artificial Sequence: Synthetic oligonucleotide
gaaggucguuugcugccac

SEQ ID NO: 2856914 - RNA, 19 nt, Artificial Sequence
  Description of Artificial Sequence: Synthetic oligonucleotide
ggggaagccaacuaccgaa

SEQ ID NO: 2856915 - RNA, 19 nt, Artificial Sequence
  Description of Artificial Sequence: Synthetic oligonucleotide
cugcagccaaucaaagaga

SEQ ID NO: 2856916 - RNA, 19 nt, Artificial Sequence
  Description of Artificial Sequence: Synthetic oligonucleotide
acaccugcagccaaucaaa

SEQ ID NO: 2856917 - RNA, 19 nt, Artificial Sequence
  Description of Artificial Sequence: Synthetic oligonucleotide
uuucuuccugcagccaauc

SEQ ID NO: 2856918 - RNA, 19 nt, Artificial Sequence
  Description of Artificial Sequence: Synthetic oligonucleotide
auucggaauagaagaacuu

SEQ ID NO: 2856919 - RNA, 19 nt, Artificial Sequence
  Description of Artificial Sequence: Synthetic oligonucleotide
agcagaacaccugcagcca

SEQ ID NO: 2856920 - RNA, 19 nt, Artificial Sequence
  Description of Artificial Sequence: Synthetic oligonucleotide
gcucggagagcuuccgggg

SEQ ID NO: 2856921 - RNA, 19 nt, Artificial Sequence
  Description of Artificial Sequence: Synthetic oligonucleotide
ccaaucaaagagaagacau

SEQ ID NO: 2856922 - RNA, 19 nt, Artificial Sequence
  Description of Artificial Sequence: Synthetic oligonucleotide
agccaaucacgaguccauc

SEQ ID NO: 2856923 - RNA, 19 nt, Artificial Sequence
  Description of Artificial Sequence: Synthetic oligonucleotide
ugaugccagcccugcugag

SEQ ID NO: 2856924 - RNA, 19 nt, Artificial Sequence
  Description of Artificial Sequence: Synthetic oligonucleotide
ccacaagccagccaaucac

SEQ ID NO: 2856925 - RNA, 19 nt, Artificial Sequence
  Description of Artificial Sequence: Synthetic oligonucleotide
acagggagaggagccccac

SEQ ID NO: 2856926 - RNA, 19 nt, Artificial Sequence
  Description of Artificial Sequence: Synthetic oligonucleotide
uccguuggucaagauuuaa

SEQ ID NO: 2856927 - RNA, 19 nt, Artificial Sequence
  Description of Artificial Sequence: Synthetic oligonucleotide
gaguggcugggguggggag

SEQ ID NO: 2856928 - RNA, 19 nt, Artificial Sequence
  Description of Artificial Sequence: Synthetic oligonucleotide
gguuucuuccugcagccaa

SEQ ID NO: 2856929 - RNA, 19 nt, Artificial Sequence
  Description of Artificial Sequence: Synthetic oligonucleotide
gucguuugcugccacucaa

SEQ ID NO: 2856930 - RNA, 19 nt, Artificial Sequence
  Description of Artificial Sequence: Synthetic oligonucleotide
agaaggucguuugcugcca

SEQ ID NO: 2856931 - RNA, 19 nt, Artificial Sequence
  Description of Artificial Sequence: Synthetic oligonucleotide
acuaccgaaggcgcaaauu

SEQ ID NO: 2856932 - RNA, 19 nt, Artificial Sequence
  Description of Artificial Sequence: Synthetic oligonucleotide
ccaaucgggccucuucacg

SEQ ID NO: 2856933 - RNA, 19 nt, Artificial Sequence
  Description of Artificial Sequence: Synthetic oligonucleotide
gcauucggaauagaagaac

SEQ ID NO: 2856934 - RNA, 19 nt, Artificial Sequence
  Description of Artificial Sequence: Synthetic oligonucleotide
cugcugaguggcuggggug

SEQ ID NO: 2856935 - RNA, 19 nt, Artificial Sequence
  Description of Artificial Sequence: Synthetic oligonucleotide
aucacgaguccaucccuua

SEQ ID NO: 2856936 - RNA, 19 nt, Artificial Sequence
  Description of Artificial Sequence: Synthetic oligonucleotide
cagccaaucacaauccuuu

SEQ ID NO: 2856937 - RNA, 19 nt, Artificial Sequence
  Description of Artificial Sequence: Synthetic oligonucleotide
caauccuuuuccaguuuaa

SEQ ID NO: 2856938 - RNA, 19 nt, Artificial Sequence
  Description of Artificial Sequence: Synthetic oligonucleotide
agccaaucacaaaccacca

SEQ ID NO: 2856939 - RNA, 19 nt, Artificial Sequence
  Description of Artificial Sequence: Synthetic oligonucleotide
guuuccguuggucaagauu

SEQ ID NO: 2856940 - RNA, 19 nt, Artificial Sequence
  Description of Artificial Sequence: Synthetic oligonucleotide
ugccagcccugcugagugg

SEQ ID NO: 2856941 - RNA, 19 nt, Artificial Sequence
  Description of Artificial Sequence: Synthetic oligonucleotide
uuccguuggucaagauuua

SEQ ID NO: 2856942 - RNA, 19 nt, Artificial Sequence
  Description of Artificial Sequence: Synthetic oligonucleotide
auaaagcaccagagcucgg

SEQ ID NO: 2856943 - RNA, 19 nt, Artificial Sequence
  Description of Artificial Sequence: Synthetic oligonucleotide
caugucccacaagccagcc

SEQ ID NO: 2856944 - RNA, 19 nt, Artificial Sequence
  Description of Artificial Sequence: Synthetic oligonucleotide
cuaccgaaggcgcaaauuu

SEQ ID NO: 2856945 - RNA, 19 nt, Artificial Sequence
  Description of Artificial Sequence: Synthetic oligonucleotide
cugccacucaacagggaga

SEQ ID NO: 2856946 - RNA, 19 nt, Artificial Sequence
  Description of Artificial Sequence: Synthetic oligonucleotide
gccaaucacaauccuuuuc

SEQ ID NO: 2856947 - RNA, 19 nt, Artificial Sequence
  Description of Artificial Sequence: Synthetic oligonucleotide
agccaaucacaauccuuuu

SEQ ID NO: 2856948 - RNA, 19 nt, Artificial Sequence
  Description of Artificial Sequence: Synthetic oligonucleotide
ccaaucacaaaccaccacu

SEQ ID NO: 2856949 - RNA, 19 nt, Artificial Sequence
  Description of Artificial Sequence: Synthetic oligonucleotide
acaagccagccaaucacaa

SEQ ID NO: 2856950 - RNA, 19 nt, Artificial Sequence
  Description of Artificial Sequence: Synthetic oligonucleotide
aaaccaccacuggcaucuc

SEQ ID NO: 2856951 - RNA, 19 nt, Artificial Sequence
  Description of Artificial Sequence: Synthetic oligonucleotide
ugcugccacucaacaggga

SEQ ID NO: 2856952 - RNA, 19 nt, Artificial Sequence
  Description of Artificial Sequence: Synthetic oligonucleotide
ccggggaagccaacuaccg

SEQ ID NO: 2856953 - RNA, 19 nt, Artificial Sequence
  Description of Artificial Sequence: Synthetic oligonucleotide
ucccacaagccagccaauc

SEQ ID NO: 2856954 - RNA, 19 nt, Artificial Sequence
  Description of Artificial Sequence: Synthetic oligonucleotide
auagaagaacuuggugaua

SEQ ID NO: 2856955 - RNA, 19 nt, Artificial Sequence
  Description of Artificial Sequence: Synthetic oligonucleotide
uuucugcauucggaauaga

SEQ ID NO: 2856956 - RNA, 19 nt, Artificial Sequence
  Description of Artificial Sequence: Synthetic oligonucleotide
gccaaucaaagagaagaca

SEQ ID NO: 2856957 - RNA, 19 nt, Artificial Sequence
  Description of Artificial Sequence: Synthetic oligonucleotide
cagccaaucgggccucuuc

SEQ ID NO: 2856958 - RNA, 19 nt, Artificial Sequence
  Description of Artificial Sequence: Synthetic oligonucleotide
cguuggucaagauuuaaaa

SEQ ID NO: 2856959 - RNA, 19 nt, Artificial Sequence
  Description of Artificial Sequence: Synthetic oligonucleotide
ccuguuucugcauucggaa

SEQ ID NO: 2856960 - RNA, 19 nt, Artificial Sequence
  Description of Artificial Sequence: Synthetic oligonucleotide
ccaguuuaagcagccaauc

SEQ ID NO: 2856961 - RNA, 19 nt, Artificial Sequence
  Description of Artificial Sequence: Synthetic oligonucleotide
ccacucaacagggagagga

SEQ ID NO: 2856962 - RNA, 19 nt, Artificial Sequence
  Description of Artificial Sequence: Synthetic oligonucleotide
gggaagccaacuaccgaag

SEQ ID NO: 2856963 - RNA, 19 nt, Artificial Sequence
  Description of Artificial Sequence: Synthetic oligonucleotide
agguuuccguuggucaaga

SEQ ID NO: 2856964 - RNA, 19 nt, Artificial Sequence
  Description of Artificial Sequence: Synthetic oligonucleotide
cgaguccaucccuuaagcc

SEQ ID NO: 2856965 - RNA, 19 nt, Artificial Sequence
  Description of Artificial Sequence: Synthetic oligonucleotide
cucggagagcuuccgggga

SEQ ID NO: 2856966 - RNA, 19 nt, Artificial Sequence
  Description of Artificial Sequence: Synthetic oligonucleotide
agggagggaagaaggucgu

SEQ ID NO: 2856967 - RNA, 19 nt, Artificial Sequence
  Description of Artificial Sequence: Synthetic oligonucleotide
ggcaucucccuugaugcca

SEQ ID NO: 2856968 - RNA, 19 nt, Artificial Sequence
  Description of Artificial Sequence: Synthetic oligonucleotide
gcagccaaucacgagucca

SEQ ID NO: 2856969 - RNA, 19 nt, Artificial Sequence
  Description of Artificial Sequence: Synthetic oligonucleotide
gcagccaaucaaagagaag

SEQ ID NO: 2856970 - RNA, 19 nt, Artificial Sequence
  Description of Artificial Sequence: Synthetic oligonucleotide
caaucacgaguccaucccu

SEQ ID NO: 2856971 - RNA, 19 nt, Artificial Sequence
  Description of Artificial Sequence: Synthetic oligonucleotide
gcaucucccuugaugccag

SEQ ID NO: 2856972 - RNA, 19 nt, Artificial Sequence
  Description of Artificial Sequence: Synthetic oligonucleotide
cugaguggcuggggugggg

SEQ ID NO: 2856973 - RNA, 19 nt, Artificial Sequence
  Description of Artificial Sequence: Synthetic oligonucleotide
ccugcagccaaucacgagu

SEQ ID NO: 2856974 - RNA, 19 nt, Artificial Sequence
  Description of Artificial Sequence: Synthetic oligonucleotide
caucucccuugaugccagc

SEQ ID NO: 2856975 - RNA, 19 nt, Artificial Sequence
  Description of Artificial Sequence: Synthetic oligonucleotide
uccaucccuuaagccaauc

SEQ ID NO: 2856976 - RNA, 19 nt, Artificial Sequence
  Description of Artificial Sequence: Synthetic oligonucleotide
agguuucuuccugcagcca

SEQ ID NO: 2856977 - RNA, 19 nt, Artificial Sequence
  Description of Artificial Sequence: Synthetic oligonucleotide
cuaacccuguuucugcauu

SEQ ID NO: 2856978 - RNA, 19 nt, Artificial Sequence
  Description of Artificial Sequence: Synthetic oligonucleotide
ggucguuugcugccacuca

SEQ ID NO: 2856979 - RNA, 19 nt, Artificial Sequence
  Description of Artificial Sequence: Synthetic oligonucleotide
cucccuugaugccagcccu

SEQ ID NO: 2856980 - RNA, 19 nt, Artificial Sequence
  Description of Artificial Sequence: Synthetic oligonucleotide
gggagcagagggagggaag

SEQ ID NO: 2856981 - RNA, 19 nt, Artificial Sequence
  Description of Artificial Sequence: Synthetic oligonucleotide
cuuccggggaagccaacua

SEQ ID NO: 2856982 - RNA, 19 nt, Artificial Sequence
  Description of Artificial Sequence: Synthetic oligonucleotide
cccuguuucugcauucgga

SEQ ID NO: 2856983 - RNA, 19 nt, Artificial Sequence
  Description of Artificial Sequence: Synthetic oligonucleotide
cuguuucugcauucggaau

SEQ ID NO: 2856984 - RNA, 19 nt, Artificial Sequence
  Description of Artificial Sequence: Synthetic oligonucleotide
gagcuuccggggaagccaa

SEQ ID NO: 2856985 - RNA, 19 nt, Artificial Sequence
  Description of Artificial Sequence: Synthetic oligonucleotide
cagcccugcugaguggcug

SEQ ID NO: 2856986 - RNA, 19 nt, Artificial Sequence
  Description of Artificial Sequence: Synthetic oligonucleotide
caccagagcucggagagcu

SEQ ID NO: 2856987 - RNA, 19 nt, Artificial Sequence
  Description of Artificial Sequence: Synthetic oligonucleotide
gccaaucgggccucuucac

SEQ ID NO: 2856988 - RNA, 19 nt, Artificial Sequence
  Description of Artificial Sequence: Synthetic oligonucleotide
gagcagagggagggaagaa

SEQ ID NO: 2856989 - RNA, 19 nt, Artificial Sequence
  Description of Artificial Sequence: Synthetic oligonucleotide
ggccucuucacgauccuaa

SEQ ID NO: 2856990 - RNA, 19 nt, Artificial Sequence
  Description of Artificial Sequence: Synthetic oligonucleotide
ccaucccuuaagccaauca

SEQ ID NO: 2856991 - RNA, 19 nt, Artificial Sequence
  Description of Artificial Sequence: Synthetic oligonucleotide
cccacaagccagccaauca

SEQ ID NO: 2856992 - RNA, 19 nt, Artificial Sequence
  Description of Artificial Sequence: Synthetic oligonucleotide
gcagaacaccugcagccaa

SEQ ID NO: 2856993 - RNA, 19 nt, Artificial Sequence
  Description of Artificial Sequence: Synthetic oligonucleotide
ccguuggucaagauuuaaa

SEQ ID NO: 2856994 - RNA, 19 nt, Artificial Sequence
  Description of Artificial Sequence: Synthetic oligonucleotide
cagccaaucacgaguccau

SEQ ID NO: 2856995 - RNA, 19 nt, Artificial Sequence
  Description of Artificial Sequence: Synthetic oligonucleotide
agcuuccggggaagccaac

SEQ ID NO: 2856996 - RNA, 19 nt, Artificial Sequence
  Description of Artificial Sequence: Synthetic oligonucleotide
caagccagccaaucacaau

SEQ ID NO: 2856997 - RNA, 19 nt, Artificial Sequence
  Description of Artificial Sequence: Synthetic oligonucleotide
gccagcccugcugaguggc

SEQ ID NO: 2856998 - RNA, 19 nt, Artificial Sequence
  Description of Artificial Sequence: Synthetic oligonucleotide
guuucuuccugcagccaau

SEQ ID NO: 2856999 - RNA, 19 nt, Artificial Sequence
  Description of Artificial Sequence: Synthetic oligonucleotide
gcugaguggcugggguggg

SEQ ID NO: 2857000 - RNA, 19 nt, Artificial Sequence
  Description of Artificial Sequence: Synthetic oligonucleotide
cagggagaggagccccaca

SEQ ID NO: 2857001 - RNA, 19 nt, Artificial Sequence
  Description of Artificial Sequence: Synthetic oligonucleotide
cccuugaugccagcccugc

SEQ ID NO: 2857002 - RNA, 19 nt, Artificial Sequence
  Description of Artificial Sequence: Synthetic oligonucleotide
cguuugcugccacucaaca

SEQ ID NO: 2857003 - RNA, 19 nt, Artificial Sequence
  Description of Artificial Sequence: Synthetic oligonucleotide
cagaacaccugcagccaau

SEQ ID NO: 2857004 - RNA, 19 nt, Artificial Sequence
  Description of Artificial Sequence: Synthetic oligonucleotide
ggagggaagaaggucguuu

SEQ ID NO: 2857005 - RNA, 19 nt, Artificial Sequence
  Description of Artificial Sequence: Synthetic oligonucleotide
ccucuucacgauccuaaaa

SEQ ID NO: 2857006 - RNA, 19 nt, Artificial Sequence
  Description of Artificial Sequence: Synthetic oligonucleotide
gccucuucacgauccuaaa

SEQ ID NO: 2857007 - RNA, 19 nt, Artificial Sequence
  Description of Artificial Sequence: Synthetic oligonucleotide
cggaauagaagaacuuggu

SEQ ID NO: 2857008 - RNA, 19 nt, Artificial Sequence
  Description of Artificial Sequence: Synthetic oligonucleotide
gccaacuaccgaaggcgca

SEQ ID NO: 2857009 - RNA, 19 nt, Artificial Sequence
  Description of Artificial Sequence: Synthetic oligonucleotide
ccaacuaccgaaggcgcaa

SEQ ID NO: 2857010 - RNA, 19 nt, Artificial Sequence
  Description of Artificial Sequence: Synthetic oligonucleotide
cccuaacccuguuucugca

SEQ ID NO: 2857011 - RNA, 19 nt, Artificial Sequence
  Description of Artificial Sequence: Synthetic oligonucleotide
caacuaccgaaggcgcaaa

SEQ ID NO: 2857012 - RNA, 19 nt, Artificial Sequence
  Description of Artificial Sequence: Synthetic oligonucleotide
gccacucaacagggagagg

SEQ ID NO: 2857013 - RNA, 19 nt, Artificial Sequence
  Description of Artificial Sequence: Synthetic oligonucleotide
cacaauccuuuuccaguuu

SEQ ID NO: 2857014 - RNA, 19 nt, Artificial Sequence
  Description of Artificial Sequence: Synthetic oligonucleotide
cccuuaagccaaucacaaa

SEQ ID NO: 2857015 - RNA, 19 nt, Artificial Sequence
  Description of Artificial Sequence: Synthetic oligonucleotide
caauaucccuaacccuguu

SEQ ID NO: 2857016 - RNA, 19 nt, Artificial Sequence
  Description of Artificial Sequence: Synthetic oligonucleotide
agcagccaaucgggccucu

SEQ ID NO: 2857017 - RNA, 19 nt, Artificial Sequence
  Description of Artificial Sequence: Synthetic oligonucleotide
ccugcugaguggcuggggu

SEQ ID NO: 2857018 - RNA, 19 nt, Artificial Sequence
  Description of Artificial Sequence: Synthetic oligonucleotide
gcccugcugaguggcuggg

SEQ ID NO: 2857019 - RNA, 19 nt, Artificial Sequence
  Description of Artificial Sequence: Synthetic oligonucleotide
gccagccaaucacaauccu

SEQ ID NO: 2857020 - RNA, 19 nt, Artificial Sequence
  Description of Artificial Sequence: Synthetic oligonucleotide
ccagccaaucacaauccuu

SEQ ID NO: 2857021 - RNA, 19 nt, Artificial Sequence
  Description of Artificial Sequence: Synthetic oligonucleotide
gcuuccggggaagccaacu

SEQ ID NO: 2857022 - RNA, 19 nt, Artificial Sequence
  Description of Artificial Sequence: Synthetic oligonucleotide
cccugcugaguggcugggg

SEQ ID NO: 2857023 - RNA, 19 nt, Artificial Sequence
  Description of Artificial Sequence: Synthetic oligonucleotide
ccacuggcaucucccuuga

SEQ ID NO: 2857024 - RNA, 19 nt, Artificial Sequence
  Description of Artificial Sequence: Synthetic oligonucleotide
accagagcucggagagcuu

SEQ ID NO: 2857025 - RNA, 19 nt, Artificial Sequence
  Description of Artificial Sequence: Synthetic oligonucleotide
cggagagcuuccggggaag

SEQ ID NO: 2857026 - RNA, 19 nt, Artificial Sequence
  Description of Artificial Sequence: Synthetic oligonucleotide
gguuuccguuggucaagau

SEQ ID NO: 2857027 - RNA, 19 nt, Artificial Sequence
  Description of Artificial Sequence: Synthetic oligonucleotide
cggggaagccaacuaccga

SEQ ID NO: 2857028 - RNA, 19 nt, Artificial Sequence
  Description of Artificial Sequence: Synthetic oligonucleotide
caccacuggcaucucccuu

SEQ ID NO: 2857029 - RNA, 19 nt, Artificial Sequence
  Description of Artificial Sequence: Synthetic oligonucleotide
ccuaacccuguuucugcau

SEQ ID NO: 2857030 - RNA, 19 nt, Artificial Sequence
  Description of Artificial Sequence: Synthetic oligonucleotide
ccaccacuggcaucucccu

SEQ ID NO: 2857031 - RNA, 19 nt, Artificial Sequence
  Description of Artificial Sequence: Synthetic oligonucleotide
gggccucuucacgauccua

SEQ ID NO: 2857032 - RNA, 19 nt, Artificial Sequence
  Description of Artificial Sequence: Synthetic oligonucleotide
gucccacaagccagccaau

SEQ ID NO: 2857033 - RNA, 19 nt, Artificial Sequence
  Description of Artificial Sequence: Synthetic oligonucleotide
guccaucccuuaagccaau

SEQ ID NO: 2857034 - RNA, 19 nt, Artificial Sequence
  Description of Artificial Sequence: Synthetic oligonucleotide
ccuugaugccagcccugcu

SEQ ID NO: 2857035 - RNA, 19 nt, Artificial Sequence
  Description of Artificial Sequence: Synthetic oligonucleotide
cacuggcaucucccuugau

SEQ ID NO: 2857036 - RNA, 19 nt, Artificial Sequence
  Description of Artificial Sequence: Synthetic oligonucleotide
gggagggaagaaggucguu

SEQ ID NO: 2857037 - RNA, 19 nt, Artificial Sequence
  Description of Artificial Sequence: Synthetic oligonucleotide
ccagcccugcugaguggcu

SEQ ID NO: 2857038 - RNA, 19 nt, Artificial Sequence
  Description of Artificial Sequence: Synthetic oligonucleotide
gcagccaaucgggccucuu

SEQ ID NO: 2857039 - RNA, 19 nt, Artificial Sequence
  Description of Artificial Sequence: Synthetic oligonucleotide
uauucuuuaggucauaucu

SEQ ID NO: 2857040 - RNA, 19 nt, Artificial Sequence
  Description of Artificial Sequence: Synthetic oligonucleotide
uuuuacaauauucuuuagg

SEQ ID NO: 2857041 - RNA, 19 nt, Artificial Sequence
  Description of Artificial Sequence: Synthetic oligonucleotide
uuuacaauauucuuuaggu

SEQ ID NO: 2857042 - RNA, 19 nt, Artificial Sequence
  Description of Artificial Sequence: Synthetic oligonucleotide
uacaauauucuuuagguca

SEQ ID NO: 2857043 - RNA, 19 nt, Artificial Sequence
  Description of Artificial Sequence: Synthetic oligonucleotide
uucaccaugaccaucagca

SEQ ID NO: 2857044 - RNA, 19 nt, Artificial Sequence
  Description of Artificial Sequence: Synthetic oligonucleotide
uauaaguugacuuuucugu

SEQ ID NO: 2857045 - RNA, 19 nt, Artificial Sequence
  Description of Artificial Sequence: Synthetic oligonucleotide
aacuuggacauguuauucc

SEQ ID NO: 2857046 - RNA, 19 nt, Artificial Sequence
  Description of Artificial Sequence: Synthetic oligonucleotide
uagaaugugaauaugaguu

SEQ ID NO: 2857047 - RNA, 19 nt, Artificial Sequence
  Description of Artificial Sequence: Synthetic oligonucleotide
uaugaguucucauuagugg

SEQ ID NO: 2857048 - RNA, 19 nt, Artificial Sequence
  Description of Artificial Sequence: Synthetic oligonucleotide
uuuguagugaggaggaucc

SEQ ID NO: 2857049 - RNA, 19 nt, Artificial Sequence
  Description of Artificial Sequence: Synthetic oligonucleotide
uguuauuccagucugucca

SEQ ID NO: 2857050 - RNA, 19 nt, Artificial Sequence
  Description of Artificial Sequence: Synthetic oligonucleotide
aaauaaggcugccauagug

SEQ ID NO: 2857051 - RNA, 19 nt, Artificial Sequence
  Description of Artificial Sequence: Synthetic oligonucleotide
uguagcuuguaucauaugu

SEQ ID NO: 2857052 - RNA, 19 nt, Artificial Sequence
  Description of Artificial Sequence: Synthetic oligonucleotide
uuuagguuuuacaauauuc

SEQ ID NO: 2857053 - RNA, 19 nt, Artificial Sequence
  Description of Artificial Sequence: Synthetic oligonucleotide
uaaaucuaugggcugauug

SEQ ID NO: 2857054 - RNA, 19 nt, Artificial Sequence
  Description of Artificial Sequence: Synthetic oligonucleotide
ugaguagcuacucauauaa

SEQ ID NO: 2857055 - RNA, 19 nt, Artificial Sequence
  Description of Artificial Sequence: Synthetic oligonucleotide
aaaguaguguccaaacugg

SEQ ID NO: 2857056 - RNA, 19 nt, Artificial Sequence
  Description of Artificial Sequence: Synthetic oligonucleotide
auaaauaaggcugccauag

SEQ ID NO: 2857057 - RNA, 19 nt, Artificial Sequence
  Description of Artificial Sequence: Synthetic oligonucleotide
ucucgcuuaaaucuauggg

SEQ ID NO: 2857058 - RNA, 19 nt, Artificial Sequence
  Description of Artificial Sequence: Synthetic oligonucleotide
gaucauaccaagcaccaag

SEQ ID NO: 2857059 - RNA, 19 nt, Artificial Sequence
  Description of Artificial Sequence: Synthetic oligonucleotide
uuccaauugccuaucaaag

SEQ ID NO: 2857060 - RNA, 19 nt, Artificial Sequence
  Description of Artificial Sequence: Synthetic oligonucleotide
aaaucuaugggcugauugu

SEQ ID NO: 2857061 - RNA, 19 nt, Artificial Sequence
  Description of Artificial Sequence: Synthetic oligonucleotide
cucgcuuaaaucuaugggc

SEQ ID NO: 2857062 - RNA, 19 nt, Artificial Sequence
  Description of Artificial Sequence: Synthetic oligonucleotide
aauaugaguucucauuagu

SEQ ID NO: 2857063 - RNA, 19 nt, Artificial Sequence
  Description of Artificial Sequence: Synthetic oligonucleotide
aggaaauagaacaaguuuc

SEQ ID NO: 2857064 - RNA, 19 nt, Artificial Sequence
  Description of Artificial Sequence: Synthetic oligonucleotide
aaggguuuagguuuuacaa

SEQ ID NO: 2857065 - RNA, 19 nt, Artificial Sequence
  Description of Artificial Sequence: Synthetic oligonucleotide
ugccuaucaaaguagaaug

SEQ ID NO: 2857066 - RNA, 19 nt, Artificial Sequence
  Description of Artificial Sequence: Synthetic oligonucleotide
uaggucauaucuuuccugg

SEQ ID NO: 2857067 - RNA, 19 nt, Artificial Sequence
  Description of Artificial Sequence: Synthetic oligonucleotide
ugcauuuguagugaggagg

SEQ ID NO: 2857068 - RNA, 19 nt, Artificial Sequence
  Description of Artificial Sequence: Synthetic oligonucleotide
auuggaucauaccaagcac

SEQ ID NO: 2857069 - RNA, 19 nt, Artificial Sequence
  Description of Artificial Sequence: Synthetic oligonucleotide
ugaauaugaguucucauua

SEQ ID NO: 2857070 - RNA, 19 nt, Artificial Sequence
  Description of Artificial Sequence: Synthetic oligonucleotide
aagaguaauggcuggguug

SEQ ID NO: 2857071 - RNA, 19 nt, Artificial Sequence
  Description of Artificial Sequence: Synthetic oligonucleotide
uagugugggauucugagga

SEQ ID NO: 2857072 - RNA, 19 nt, Artificial Sequence
  Description of Artificial Sequence: Synthetic oligonucleotide
ucagcauaaauaaggcugc

SEQ ID NO: 2857073 - RNA, 19 nt, Artificial Sequence
  Description of Artificial Sequence: Synthetic oligonucleotide
accaucagcauaaauaagg

SEQ ID NO: 2857074 - RNA, 19 nt, Artificial Sequence
  Description of Artificial Sequence: Synthetic oligonucleotide
agucuguccacacuucacc

SEQ ID NO: 2857075 - RNA, 19 nt, Artificial Sequence
  Description of Artificial Sequence: Synthetic oligonucleotide
uuuucugugcauuuguagu

SEQ ID NO: 2857076 - RNA, 19 nt, Artificial Sequence
  Description of Artificial Sequence: Synthetic oligonucleotide
guugauucaaaguaguguc

SEQ ID NO: 2857077 - RNA, 19 nt, Artificial Sequence
  Description of Artificial Sequence: Synthetic oligonucleotide
aucagcauaaauaaggcug

SEQ ID NO: 2857078 - RNA, 19 nt, Artificial Sequence
  Description of Artificial Sequence: Synthetic oligonucleotide
aguagcuacucauauaagu

SEQ ID NO: 2857079 - RNA, 19 nt, Artificial Sequence
  Description of Artificial Sequence: Synthetic oligonucleotide
uuggaucauaccaagcacc

SEQ ID NO: 2857080 - RNA, 19 nt, Artificial Sequence
  Description of Artificial Sequence: Synthetic oligonucleotide
uauguugauucaaaguagu

SEQ ID NO: 2857081 - RNA, 19 nt, Artificial Sequence
  Description of Artificial Sequence: Synthetic oligonucleotide
caaaguaguguccaaacug

SEQ ID NO: 2857082 - RNA, 19 nt, Artificial Sequence
  Description of Artificial Sequence: Synthetic oligonucleotide
ucauuaguggugcaucucc

SEQ ID NO: 2857083 - RNA, 19 nt, Artificial Sequence
  Description of Artificial Sequence: Synthetic oligonucleotide
aaggcaaggguuuagguuu

SEQ ID NO: 2857084 - RNA, 19 nt, Artificial Sequence
  Description of Artificial Sequence: Synthetic oligonucleotide
uacacacacacacacacac

SEQ ID NO: 2857085 - RNA, 19 nt, Artificial Sequence
  Description of Artificial Sequence: Synthetic oligonucleotide
ucauauguugauucaaagu

SEQ ID NO: 2857086 - RNA, 19 nt, Artificial Sequence
  Description of Artificial Sequence: Synthetic oligonucleotide
ugaccaucagcauaaauaa

SEQ ID NO: 2857087 - RNA, 19 nt, Artificial Sequence
  Description of Artificial Sequence: Synthetic oligonucleotide
uaucaaaguagaaugugaa

SEQ ID NO: 2857088 - RNA, 19 nt, Artificial Sequence
  Description of Artificial Sequence: Synthetic oligonucleotide
auauaaguugacuuuucug

SEQ ID NO: 2857089 - RNA, 19 nt, Artificial Sequence
  Description of Artificial Sequence: Synthetic oligonucleotide
agaaugugaauaugaguuc

SEQ ID NO: 2857090 - RNA, 19 nt, Artificial Sequence
  Description of Artificial Sequence: Synthetic oligonucleotide
aaggcugccauaguguggg

SEQ ID NO: 2857091 - RNA, 19 nt, Artificial Sequence
  Description of Artificial Sequence: Synthetic oligonucleotide
ugugcauuuguagugagga

SEQ ID NO: 2857092 - RNA, 19 nt, Artificial Sequence
  Description of Artificial Sequence: Synthetic oligonucleotide
aucauauguugauucaaag

SEQ ID NO: 2857093 - RNA, 19 nt, Artificial Sequence
  Description of Artificial Sequence: Synthetic oligonucleotide
gacauguuauuccagucug

SEQ ID NO: 2857094 - RNA, 19 nt, Artificial Sequence
  Description of Artificial Sequence: Synthetic oligonucleotide
auguuauuccagucugucc

SEQ ID NO: 2857095 - RNA, 19 nt, Artificial Sequence
  Description of Artificial Sequence: Synthetic oligonucleotide
cauagugugggauucugag

SEQ ID NO: 2857096 - RNA, 19 nt, Artificial Sequence
  Description of Artificial Sequence: Synthetic oligonucleotide
uguugauucaaaguagugu

SEQ ID NO: 2857097 - RNA, 19 nt, Artificial Sequence
  Description of Artificial Sequence: Synthetic oligonucleotide
uuugaguagcuacucauau

SEQ ID NO: 2857098 - RNA, 19 nt, Artificial Sequence
  Description of Artificial Sequence: Synthetic oligonucleotide
gaauaugaguucucauuag

SEQ ID NO: 2857099 - RNA, 19 nt, Artificial Sequence
  Description of Artificial Sequence: Synthetic oligonucleotide
uguaucauauguugauuca

SEQ ID NO: 2857100 - RNA, 19 nt, Artificial Sequence
  Description of Artificial Sequence: Synthetic oligonucleotide
uuguaucauauguugauuc

SEQ ID NO: 2857101 - RNA, 19 nt, Artificial Sequence
  Description of Artificial Sequence: Synthetic oligonucleotide
cauauguugauucaaagua

SEQ ID NO: 2857102 - RNA, 19 nt, Artificial Sequence
  Description of Artificial Sequence: Synthetic oligonucleotide
cacacguacacacacacac

SEQ ID NO: 2857103 - RNA, 19 nt, Artificial Sequence
  Description of Artificial Sequence: Synthetic oligonucleotide
uaaguugacuuuucugugc

SEQ ID NO: 2857104 - RNA, 19 nt, Artificial Sequence
  Description of Artificial Sequence: Synthetic oligonucleotide
auaaguugacuuuucugug

SEQ ID NO: 2857105 - RNA, 19 nt, Artificial Sequence
  Description of Artificial Sequence: Synthetic oligonucleotide
uuucugugcauuuguagug

SEQ ID NO: 2857106 - RNA, 19 nt, Artificial Sequence
  Description of Artificial Sequence: Synthetic oligonucleotide
aaaacuuggacauguuauu

SEQ ID NO: 2857107 - RNA, 19 nt, Artificial Sequence
  Description of Artificial Sequence: Synthetic oligonucleotide
gaaccaaugagcaucucgc

SEQ ID NO: 2857108 - RNA, 19 nt, Artificial Sequence
  Description of Artificial Sequence: Synthetic oligonucleotide
uugauucaaaguagugucc

SEQ ID NO: 2857109 - RNA, 19 nt, Artificial Sequence
  Description of Artificial Sequence: Synthetic oligonucleotide
uagcuuguaucauauguug

SEQ ID NO: 2857110 - RNA, 19 nt, Artificial Sequence
  Description of Artificial Sequence: Synthetic oligonucleotide
uucaaaguaguguccaaac

SEQ ID NO: 2857111 - RNA, 19 nt, Artificial Sequence
  Description of Artificial Sequence: Synthetic oligonucleotide
aaguagaaugugaauauga

SEQ ID NO: 2857112 - RNA, 19 nt, Artificial Sequence
  Description of Artificial Sequence: Synthetic oligonucleotide
acacacauuggaucauacc

SEQ ID NO: 2857113 - RNA, 19 nt, Artificial Sequence
  Description of Artificial Sequence: Synthetic oligonucleotide
ucgcuuaaaucuaugggcu

SEQ ID NO: 2857114 - RNA, 19 nt, Artificial Sequence
  Description of Artificial Sequence: Synthetic oligonucleotide
aaguugacuuuucugugca

SEQ ID NO: 2857115 - RNA, 19 nt, Artificial Sequence
  Description of Artificial Sequence: Synthetic oligonucleotide
uagcuacucauauaaguug

SEQ ID NO: 2857116 - RNA, 19 nt, Artificial Sequence
  Description of Artificial Sequence: Synthetic oligonucleotide
aucucgcuuaaaucuaugg

SEQ ID NO: 2857117 - RNA, 19 nt, Artificial Sequence
  Description of Artificial Sequence: Synthetic oligonucleotide
uuuaggucauaucuuuccu

SEQ ID NO: 2857118 - RNA, 19 nt, Artificial Sequence
  Description of Artificial Sequence: Synthetic oligonucleotide
aagcaccaagaguaauggc

SEQ ID NO: 2857119 - RNA, 19 nt, Artificial Sequence
  Description of Artificial Sequence: Synthetic oligonucleotide
ucaaaguaguguccaaacu

SEQ ID NO: 2857120 - RNA, 19 nt, Artificial Sequence
  Description of Artificial Sequence: Synthetic oligonucleotide
uacucauauaaguugacuu

SEQ ID NO: 2857121 - RNA, 19 nt, Artificial Sequence
  Description of Artificial Sequence: Synthetic oligonucleotide
cacacacacacacacauug

SEQ ID NO: 2857122 - RNA, 19 nt, Artificial Sequence
  Description of Artificial Sequence: Synthetic oligonucleotide
aauaaggcugccauagugu

SEQ ID NO: 2857123 - RNA, 19 nt, Artificial Sequence
  Description of Artificial Sequence: Synthetic oligonucleotide
auauucuuuaggucauauc

SEQ ID NO: 2857124 - RNA, 19 nt, Artificial Sequence
  Description of Artificial Sequence: Synthetic oligonucleotide
guaauggcuggguuguugg

SEQ ID NO: 2857125 - RNA, 19 nt, Artificial Sequence
  Description of Artificial Sequence: Synthetic oligonucleotide
auccagcucaggcugaugg

SEQ ID NO: 2857126 - RNA, 19 nt, Artificial Sequence
  Description of Artificial Sequence: Synthetic oligonucleotide
ugaguucucauuaguggug

SEQ ID NO: 2857127 - RNA, 19 nt, Artificial Sequence
  Description of Artificial Sequence: Synthetic oligonucleotide
uaucauauguugauucaaa

SEQ ID NO: 2857128 - RNA, 19 nt, Artificial Sequence
  Description of Artificial Sequence: Synthetic oligonucleotide
uagaacaaguuucugucuc

SEQ ID NO: 2857129 - RNA, 19 nt, Artificial Sequence
  Description of Artificial Sequence: Synthetic oligonucleotide
auuaguggugcaucuccac

SEQ ID NO: 2857130 - RNA, 19 nt, Artificial Sequence
  Description of Artificial Sequence: Synthetic oligonucleotide
ugcaucuccacccguacug

SEQ ID NO: 2857131 - RNA, 19 nt, Artificial Sequence
  Description of Artificial Sequence: Synthetic oligonucleotide
auuuguagugaggaggauc

SEQ ID NO: 2857132 - RNA, 19 nt, Artificial Sequence
  Description of Artificial Sequence: Synthetic oligonucleotide
uuaguggugcaucuccacc

SEQ ID NO: 2857133 - RNA, 19 nt, Artificial Sequence
  Description of Artificial Sequence: Synthetic oligonucleotide
aaaguagaaugugaauaug

SEQ ID NO: 2857134 - RNA, 19 nt, Artificial Sequence
  Description of Artificial Sequence: Synthetic oligonucleotide
cacacauuggaucauacca

SEQ ID NO: 2857135 - RNA, 19 nt, Artificial Sequence
  Description of Artificial Sequence: Synthetic oligonucleotide
auagugugggauucugagg

SEQ ID NO: 2857136 - RNA, 19 nt, Artificial Sequence
  Description of Artificial Sequence: Synthetic oligonucleotide
augaguucucauuaguggu

SEQ ID NO: 2857137 - RNA, 19 nt, Artificial Sequence
  Description of Artificial Sequence: Synthetic oligonucleotide
uuaggucauaucuuuccug

SEQ ID NO: 2857138 - RNA, 19 nt, Artificial Sequence
  Description of Artificial Sequence: Synthetic oligonucleotide
aaucuaugggcugauugug

SEQ ID NO: 2857139 - RNA, 19 nt, Artificial Sequence
  Description of Artificial Sequence: Synthetic oligonucleotide
aguagaaugugaauaugag

SEQ ID NO: 2857140 - RNA, 19 nt, Artificial Sequence
  Description of Artificial Sequence: Synthetic oligonucleotide
uuuccugguuccaauugcc

SEQ ID NO: 2857141 - RNA, 19 nt, Artificial Sequence
  Description of Artificial Sequence: Synthetic oligonucleotide
ucuuuccugguuccaauug

SEQ ID NO: 2857142 - RNA, 19 nt, Artificial Sequence
  Description of Artificial Sequence: Synthetic oligonucleotide
uggaucauaccaagcacca

SEQ ID NO: 2857143 - RNA, 19 nt, Artificial Sequence
  Description of Artificial Sequence: Synthetic oligonucleotide
ugggauucugaggaaauag

SEQ ID NO: 2857144 - RNA, 19 nt, Artificial Sequence
  Description of Artificial Sequence: Synthetic oligonucleotide
ucuaugggcugauuguggc

SEQ ID NO: 2857145 - RNA, 19 nt, Artificial Sequence
  Description of Artificial Sequence: Synthetic oligonucleotide
auauguugauucaaaguag

SEQ ID NO: 2857146 - RNA, 19 nt, Artificial Sequence
  Description of Artificial Sequence: Synthetic oligonucleotide
caauugccuaucaaaguag

SEQ ID NO: 2857147 - RNA, 19 nt, Artificial Sequence
  Description of Artificial Sequence: Synthetic oligonucleotide
auaccaagcaccaagagua

SEQ ID NO: 2857148 - RNA, 19 nt, Artificial Sequence
  Description of Artificial Sequence: Synthetic oligonucleotide
cacacacacacguacacac

SEQ ID NO: 2857149 - RNA, 19 nt, Artificial Sequence
  Description of Artificial Sequence: Synthetic oligonucleotide
ugauucaaaguagugucca

SEQ ID NO: 2857150 - RNA, 19 nt, Artificial Sequence
  Description of Artificial Sequence: Synthetic oligonucleotide
aaugugaauaugaguucuc

SEQ ID NO: 2857151 - RNA, 19 nt, Artificial Sequence
  Description of Artificial Sequence: Synthetic oligonucleotide
cacacacacacacacacac

SEQ ID NO: 2857152 - RNA, 19 nt, Artificial Sequence
  Description of Artificial Sequence: Synthetic oligonucleotide
auaaggcugccauagugug

SEQ ID NO: 2857153 - RNA, 19 nt, Artificial Sequence
  Description of Artificial Sequence: Synthetic oligonucleotide
gauucugaggaaauagaac

SEQ ID NO: 2857154 - RNA, 19 nt, Artificial Sequence
  Description of Artificial Sequence: Synthetic oligonucleotide
ucauaccaagcaccaagag

SEQ ID NO: 2857155 - RNA, 19 nt, Artificial Sequence
  Description of Artificial Sequence: Synthetic oligonucleotide
acacacacacauuggauca

SEQ ID NO: 2857156 - RNA, 19 nt, Artificial Sequence
  Description of Artificial Sequence: Synthetic oligonucleotide
uuggcuuugaguagcuacu

SEQ ID NO: 2857157 - RNA, 19 nt, Artificial Sequence
  Description of Artificial Sequence: Synthetic oligonucleotide
aaacugggaaggcaagggu

SEQ ID NO: 2857158 - RNA, 19 nt, Artificial Sequence
  Description of Artificial Sequence: Synthetic oligonucleotide
guuggcuuugaguagcuac

SEQ ID NO: 2857159 - RNA, 19 nt, Artificial Sequence
  Description of Artificial Sequence: Synthetic oligonucleotide
caagcaccaagaguaaugg

SEQ ID NO: 2857160 - RNA, 19 nt, Artificial Sequence
  Description of Artificial Sequence: Synthetic oligonucleotide
ggaaccaaugagcaucucg

SEQ ID NO: 2857161 - RNA, 19 nt, Artificial Sequence
  Description of Artificial Sequence: Synthetic oligonucleotide
aauauucuuuaggucauau

SEQ ID NO: 2857162 - RNA, 19 nt, Artificial Sequence
  Description of Artificial Sequence: Synthetic oligonucleotide
ucauaucuuuccugguucc

SEQ ID NO: 2857163 - RNA, 19 nt, Artificial Sequence
  Description of Artificial Sequence: Synthetic oligonucleotide
cauuggaucauaccaagca

SEQ ID NO: 2857164 - RNA, 19 nt, Artificial Sequence
  Description of Artificial Sequence: Synthetic oligonucleotide
gaggauccagcucaggcug

SEQ ID NO: 2857165 - RNA, 19 nt, Artificial Sequence
  Description of Artificial Sequence: Synthetic oligonucleotide
acucauauaaguugacuuu

SEQ ID NO: 2857166 - RNA, 19 nt, Artificial Sequence
  Description of Artificial Sequence: Synthetic oligonucleotide
cuaucaaaguagaauguga

SEQ ID NO: 2857167 - RNA, 19 nt, Artificial Sequence
  Description of Artificial Sequence: Synthetic oligonucleotide
uaguggugcaucuccaccc

SEQ ID NO: 2857168 - RNA, 19 nt, Artificial Sequence
  Description of Artificial Sequence: Synthetic oligonucleotide
ugagcaucucgcuuaaauc

SEQ ID NO: 2857169 - RNA, 19 nt, Artificial Sequence
  Description of Artificial Sequence: Synthetic oligonucleotide
uuggacauguuauuccagu

SEQ ID NO: 2857170 - RNA, 19 nt, Artificial Sequence
  Description of Artificial Sequence: Synthetic oligonucleotide
acuuggacauguuauucca

SEQ ID NO: 2857171 - RNA, 19 nt, Artificial Sequence
  Description of Artificial Sequence: Synthetic oligonucleotide
cacauuggaucauaccaag

SEQ ID NO: 2857172 - RNA, 19 nt, Artificial Sequence
  Description of Artificial Sequence: Synthetic oligonucleotide
uaaggcugccauagugugg

SEQ ID NO: 2857173 - RNA, 19 nt, Artificial Sequence
  Description of Artificial Sequence: Synthetic oligonucleotide
uccaauugccuaucaaagu

SEQ ID NO: 2857174 - RNA, 19 nt, Artificial Sequence
  Description of Artificial Sequence: Synthetic oligonucleotide
uucuuuaggucauaucuuu

SEQ ID NO: 2857175 - RNA, 19 nt, Artificial Sequence
  Description of Artificial Sequence: Synthetic oligonucleotide
ucauauaaguugacuuuuc

SEQ ID NO: 2857176 - RNA, 19 nt, Artificial Sequence
  Description of Artificial Sequence: Synthetic oligonucleotide
cacacacacacauuggauc

SEQ ID NO: 2857177 - RNA, 19 nt, Artificial Sequence
  Description of Artificial Sequence: Synthetic oligonucleotide
uguagugaggaggauccag

SEQ ID NO: 2857178 - RNA, 19 nt, Artificial Sequence
  Description of Artificial Sequence: Synthetic oligonucleotide
cuuuccugguuccaauugc

SEQ ID NO: 2857179 - RNA, 19 nt, Artificial Sequence
  Description of Artificial Sequence: Synthetic oligonucleotide
uucugaggaaauagaacaa

SEQ ID NO: 2857180 - RNA, 19 nt, Artificial Sequence
  Description of Artificial Sequence: Synthetic oligonucleotide
auagaacaaguuucugucu

SEQ ID NO: 2857181 - RNA, 19 nt, Artificial Sequence
  Description of Artificial Sequence: Synthetic oligonucleotide
agcaccaagaguaauggcu

SEQ ID NO: 2857182 - RNA, 19 nt, Artificial Sequence
  Description of Artificial Sequence: Synthetic oligonucleotide
gugaggaggauccagcuca

SEQ ID NO: 2857183 - RNA, 19 nt, Artificial Sequence
  Description of Artificial Sequence: Synthetic oligonucleotide
auaugaguucucauuagug

SEQ ID NO: 2857184 - RNA, 19 nt, Artificial Sequence
  Description of Artificial Sequence: Synthetic oligonucleotide
cacguacacacacacacac

SEQ ID NO: 2857185 - RNA, 19 nt, Artificial Sequence
  Description of Artificial Sequence: Synthetic oligonucleotide
uccacacuucaccaugacc

SEQ ID NO: 2857186 - RNA, 19 nt, Artificial Sequence
  Description of Artificial Sequence: Synthetic oligonucleotide
augaccaucagcauaaaua

SEQ ID NO: 2857187 - RNA, 19 nt, Artificial Sequence
  Description of Artificial Sequence: Synthetic oligonucleotide
aguguccaaacugggaagg

SEQ ID NO: 2857188 - RNA, 19 nt, Artificial Sequence
  Description of Artificial Sequence: Synthetic oligonucleotide
uggccagggaaccaaugag

SEQ ID NO: 2857189 - RNA, 19 nt, Artificial Sequence
  Description of Artificial Sequence: Synthetic oligonucleotide
uaguguccaaacugggaag

SEQ ID NO: 2857190 - RNA, 19 nt, Artificial Sequence
  Description of Artificial Sequence: Synthetic oligonucleotide
ugcuguuguagcuuguauc

SEQ ID NO: 2857191 - RNA, 19 nt, Artificial Sequence
  Description of Artificial Sequence: Synthetic oligonucleotide
aaguaguguccaaacuggg

SEQ ID NO: 2857192 - RNA, 19 nt, Artificial Sequence
  Description of Artificial Sequence: Synthetic oligonucleotide
augagcaucucgcuuaaau

SEQ ID NO: 2857193 - RNA, 19 nt, Artificial Sequence
  Description of Artificial Sequence: Synthetic oligonucleotide
guuccaauugccuaucaaa

SEQ ID NO: 2857194 - RNA, 19 nt, Artificial Sequence
  Description of Artificial Sequence: Synthetic oligonucleotide
aauugccuaucaaaguaga

SEQ ID NO: 2857195 - RNA, 19 nt, Artificial Sequence
  Description of Artificial Sequence: Synthetic oligonucleotide
agugaggaggauccagcuc

SEQ ID NO: 2857196 - RNA, 19 nt, Artificial Sequence
  Description of Artificial Sequence: Synthetic oligonucleotide
guaguguccaaacugggaa

SEQ ID NO: 2857197 - RNA, 19 nt, Artificial Sequence
  Description of Artificial Sequence: Synthetic oligonucleotide
ucuccacccguacugaaaa

SEQ ID NO: 2857198 - RNA, 19 nt, Artificial Sequence
  Description of Artificial Sequence: Synthetic oligonucleotide
ugugaauaugaguucucau

SEQ ID NO: 2857199 - RNA, 19 nt, Artificial Sequence
  Description of Artificial Sequence: Synthetic oligonucleotide
uggguuguuggcuuugagu

SEQ ID NO: 2857200 - RNA, 19 nt, Artificial Sequence
  Description of Artificial Sequence: Synthetic oligonucleotide
gguuuuacaauauucuuua

SEQ ID NO: 2857201 - RNA, 19 nt, Artificial Sequence
  Description of Artificial Sequence: Synthetic oligonucleotide
uugccuaucaaaguagaau

SEQ ID NO: 2857202 - RNA, 19 nt, Artificial Sequence
  Description of Artificial Sequence: Synthetic oligonucleotide
ucucauuaguggugcaucu

SEQ ID NO: 2857203 - RNA, 19 nt, Artificial Sequence
  Description of Artificial Sequence: Synthetic oligonucleotide
ucuuuaggucauaucuuuc

SEQ ID NO: 2857204 - RNA, 19 nt, Artificial Sequence
  Description of Artificial Sequence: Synthetic oligonucleotide
uccaaacugggaaggcaag

SEQ ID NO: 2857205 - RNA, 19 nt, Artificial Sequence
  Description of Artificial Sequence: Synthetic oligonucleotide
aaccaaugagcaucucgcu

SEQ ID NO: 2857206 - RNA, 19 nt, Artificial Sequence
  Description of Artificial Sequence: Synthetic oligonucleotide
aucaaaguagaaugugaau

SEQ ID NO: 2857207 - RNA, 19 nt, Artificial Sequence
  Description of Artificial Sequence: Synthetic oligonucleotide
gucauaucuuuccugguuc

SEQ ID NO: 2857208 - RNA, 19 nt, Artificial Sequence
  Description of Artificial Sequence: Synthetic oligonucleotide
uaaauaaggcugccauagu

SEQ ID NO: 2857209 - RNA, 19 nt, Artificial Sequence
  Description of Artificial Sequence: Synthetic oligonucleotide
aguggugcaucuccacccg

SEQ ID NO: 2857210 - RNA, 19 nt, Artificial Sequence
  Description of Artificial Sequence: Synthetic oligonucleotide
uguuguagcuuguaucaua

SEQ ID NO: 2857211 - RNA, 19 nt, Artificial Sequence
  Description of Artificial Sequence: Synthetic oligonucleotide
guuguuggcuuugaguagc

SEQ ID NO: 2857212 - RNA, 19 nt, Artificial Sequence
  Description of Artificial Sequence: Synthetic oligonucleotide
ucugugcauuuguagugag

SEQ ID NO: 2857213 - RNA, 19 nt, Artificial Sequence
  Description of Artificial Sequence: Synthetic oligonucleotide
cacacacacguacacacac

SEQ ID NO: 2857214 - RNA, 19 nt, Artificial Sequence
  Description of Artificial Sequence: Synthetic oligonucleotide
cacacacguacacacacac

SEQ ID NO: 2857215 - RNA, 19 nt, Artificial Sequence
  Description of Artificial Sequence: Synthetic oligonucleotide
agaacaaguuucugucucu

SEQ ID NO: 2857216 - RNA, 19 nt, Artificial Sequence
  Description of Artificial Sequence: Synthetic oligonucleotide
aauggcuggguuguuggcu

SEQ ID NO: 2857217 - RNA, 19 nt, Artificial Sequence
  Description of Artificial Sequence: Synthetic oligonucleotide
acauuggaucauaccaagc

SEQ ID NO: 2857218 - RNA, 19 nt, Artificial Sequence
  Description of Artificial Sequence: Synthetic oligonucleotide
agaguaauggcuggguugu

SEQ ID NO: 2857219 - RNA, 19 nt, Artificial Sequence
  Description of Artificial Sequence: Synthetic oligonucleotide
gaggaaauagaacaaguuu

SEQ ID NO: 2857220 - RNA, 19 nt, Artificial Sequence
  Description of Artificial Sequence: Synthetic oligonucleotide
aggguuuagguuuuacaau

SEQ ID NO: 2857221 - RNA, 19 nt, Artificial Sequence
  Description of Artificial Sequence: Synthetic oligonucleotide
gaguucucauuaguggugc

SEQ ID NO: 2857222 - RNA, 19 nt, Artificial Sequence
  Description of Artificial Sequence: Synthetic oligonucleotide
ugugggauucugaggaaau

SEQ ID NO: 2857223 - RNA, 19 nt, Artificial Sequence
  Description of Artificial Sequence: Synthetic oligonucleotide
cuuggacauguuauuccag

SEQ ID NO: 2857224 - RNA, 19 nt, Artificial Sequence
  Description of Artificial Sequence: Synthetic oligonucleotide
cagggaaccaaugagcauc

SEQ ID NO: 2857225 - RNA, 19 nt, Artificial Sequence
  Description of Artificial Sequence: Synthetic oligonucleotide
uauuccagucuguccacac

SEQ ID NO: 2857226 - RNA, 19 nt, Artificial Sequence
  Description of Artificial Sequence: Synthetic oligonucleotide
gcuguuguagcuuguauca

SEQ ID NO: 2857227 - RNA, 19 nt, Artificial Sequence
  Description of Artificial Sequence: Synthetic oligonucleotide
uggacauguuauuccaguc

SEQ ID NO: 2857228 - RNA, 19 nt, Artificial Sequence
  Description of Artificial Sequence: Synthetic oligonucleotide
uguccacacuucaccauga

SEQ ID NO: 2857229 - RNA, 19 nt, Artificial Sequence
  Description of Artificial Sequence: Synthetic oligonucleotide
uuccagucuguccacacuu

SEQ ID NO: 2857230 - RNA, 19 nt, Artificial Sequence
  Description of Artificial Sequence: Synthetic oligonucleotide
uugacuuuucugugcauuu

SEQ ID NO: 2857231 - RNA, 19 nt, Artificial Sequence
  Description of Artificial Sequence: Synthetic oligonucleotide
cacuucaccaugaccauca

SEQ ID NO: 2857232 - RNA, 19 nt, Artificial Sequence
  Description of Artificial Sequence: Synthetic oligonucleotide
uucugugcauuuguaguga

SEQ ID NO: 2857233 - RNA, 19 nt, Artificial Sequence
  Description of Artificial Sequence: Synthetic oligonucleotide
auggccagggaaccaauga

SEQ ID NO: 2857234 - RNA, 19 nt, Artificial Sequence
  Description of Artificial Sequence: Synthetic oligonucleotide
cauguuauuccagucuguc

SEQ ID NO: 2857235 - RNA, 19 nt, Artificial Sequence
  Description of Artificial Sequence: Synthetic oligonucleotide
cugugcauuuguagugagg

SEQ ID NO: 2857236 - RNA, 19 nt, Artificial Sequence
  Description of Artificial Sequence: Synthetic oligonucleotide
guagaaugugaauaugagu

SEQ ID NO: 2857237 - RNA, 19 nt, Artificial Sequence
  Description of Artificial Sequence: Synthetic oligonucleotide
ccacacuucaccaugacca

SEQ ID NO: 2857238 - RNA, 19 nt, Artificial Sequence
  Description of Artificial Sequence: Synthetic oligonucleotide
agcuacucauauaaguuga

SEQ ID NO: 2857239 - RNA, 19 nt, Artificial Sequence
  Description of Artificial Sequence: Synthetic oligonucleotide
uucucauuaguggugcauc

SEQ ID NO: 2857240 - RNA, 19 nt, Artificial Sequence
  Description of Artificial Sequence: Synthetic oligonucleotide
gaacaaguuucugucucug

SEQ ID NO: 2857241 - RNA, 19 nt, Artificial Sequence
  Description of Artificial Sequence: Synthetic oligonucleotide
gaaugugaauaugaguucu

SEQ ID NO: 2857242 - RNA, 19 nt, Artificial Sequence
  Description of Artificial Sequence: Synthetic oligonucleotide
uguccaaacugggaaggca

SEQ ID NO: 2857243 - RNA, 19 nt, Artificial Sequence
  Description of Artificial Sequence: Synthetic oligonucleotide
uagugaggaggauccagcu

SEQ ID NO: 2857244 - RNA, 19 nt, Artificial Sequence
  Description of Artificial Sequence: Synthetic oligonucleotide
aguaauggcuggguuguug

SEQ ID NO: 2857245 - RNA, 19 nt, Artificial Sequence
  Description of Artificial Sequence: Synthetic oligonucleotide
ugacuuuucugugcauuug

SEQ ID NO: 2857246 - RNA, 19 nt, Artificial Sequence
  Description of Artificial Sequence: Synthetic oligonucleotide
aucuaugggcugauugugg

SEQ ID NO: 2857247 - RNA, 19 nt, Artificial Sequence
  Description of Artificial Sequence: Synthetic oligonucleotide
guagugaggaggauccagc

SEQ ID NO: 2857248 - RNA, 19 nt, Artificial Sequence
  Description of Artificial Sequence: Synthetic oligonucleotide
uaucuuuccugguuccaau

SEQ ID NO: 2857249 - RNA, 19 nt, Artificial Sequence
  Description of Artificial Sequence: Synthetic oligonucleotide
augugaauaugaguucuca

SEQ ID NO: 2857250 - RNA, 19 nt, Artificial Sequence
  Description of Artificial Sequence: Synthetic oligonucleotide
caaggguuuagguuuuaca

SEQ ID NO: 2857251 - RNA, 19 nt, Artificial Sequence
  Description of Artificial Sequence: Synthetic oligonucleotide
accaagaguaauggcuggg

SEQ ID NO: 2857252 - RNA, 19 nt, Artificial Sequence
  Description of Artificial Sequence: Synthetic oligonucleotide
auucaaaguaguguccaaa

SEQ ID NO: 2857253 - RNA, 19 nt, Artificial Sequence
  Description of Artificial Sequence: Synthetic oligonucleotide
uugaguagcuacucauaua

SEQ ID NO: 2857254 - RNA, 19 nt, Artificial Sequence
  Description of Artificial Sequence: Synthetic oligonucleotide
caaaguagaaugugaauau

SEQ ID NO: 2857255 - RNA, 19 nt, Artificial Sequence
  Description of Artificial Sequence: Synthetic oligonucleotide
cuguccacacuucaccaug

SEQ ID NO: 2857256 - RNA, 19 nt, Artificial Sequence
  Description of Artificial Sequence: Synthetic oligonucleotide
uuccugguuccaauugccu

SEQ ID NO: 2857257 - RNA, 19 nt, Artificial Sequence
  Description of Artificial Sequence: Synthetic oligonucleotide
ugaggaggauccagcucag

SEQ ID NO: 2857258 - RNA, 19 nt, Artificial Sequence
  Description of Artificial Sequence: Synthetic oligonucleotide
accaugaccaucagcauaa

SEQ ID NO: 2857259 - RNA, 19 nt, Artificial Sequence
  Description of Artificial Sequence: Synthetic oligonucleotide
cacacacauuggaucauac

SEQ ID NO: 2857260 - RNA, 19 nt, Artificial Sequence
  Description of Artificial Sequence: Synthetic oligonucleotide
guuauuccagucuguccac

SEQ ID NO: 2857261 - RNA, 19 nt, Artificial Sequence
  Description of Artificial Sequence: Synthetic oligonucleotide
gaccaucagcauaaauaag

SEQ ID NO: 2857262 - RNA, 19 nt, Artificial Sequence
  Description of Artificial Sequence: Synthetic oligonucleotide
uaauggcuggguuguuggc

SEQ ID NO: 2857263 - RNA, 19 nt, Artificial Sequence
  Description of Artificial Sequence: Synthetic oligonucleotide
acaauauucuuuaggucau

SEQ ID NO: 2857264 - RNA, 19 nt, Artificial Sequence
  Description of Artificial Sequence: Synthetic oligonucleotide
gugaauaugaguucucauu

SEQ ID NO: 2857265 - RNA, 19 nt, Artificial Sequence
  Description of Artificial Sequence: Synthetic oligonucleotide
aacugggaaggcaaggguu

SEQ ID NO: 2857266 - RNA, 19 nt, Artificial Sequence
  Description of Artificial Sequence: Synthetic oligonucleotide
accaaugagcaucucgcuu

SEQ ID NO: 2857267 - RNA, 19 nt, Artificial Sequence
  Description of Artificial Sequence: Synthetic oligonucleotide
ggguuguuggcuuugagua

SEQ ID NO: 2857268 - RNA, 19 nt, Artificial Sequence
  Description of Artificial Sequence: Synthetic oligonucleotide
uccugguuccaauugccua

SEQ ID NO: 2857269 - RNA, 19 nt, Artificial Sequence
  Description of Artificial Sequence: Synthetic oligonucleotide
agcauaaauaaggcugcca

SEQ ID NO: 2857270 - RNA, 19 nt, Artificial Sequence
  Description of Artificial Sequence: Synthetic oligonucleotide
gauucaaaguaguguccaa

SEQ ID NO: 2857271 - RNA, 19 nt, Artificial Sequence
  Description of Artificial Sequence: Synthetic oligonucleotide
aggcugauggccagggaac

SEQ ID NO: 2857272 - RNA, 19 nt, Artificial Sequence
  Description of Artificial Sequence: Synthetic oligonucleotide
uaugggcugauuguggcuu

SEQ ID NO: 2857273 - RNA, 19 nt, Artificial Sequence
  Description of Artificial Sequence: Synthetic oligonucleotide
cacacacacacacauugga

SEQ ID NO: 2857274 - RNA, 19 nt, Artificial Sequence
  Description of Artificial Sequence: Synthetic oligonucleotide
auguugauucaaaguagug

SEQ ID NO: 2857275 - RNA, 19 nt, Artificial Sequence
  Description of Artificial Sequence: Synthetic oligonucleotide
uccagcucaggcugauggc

SEQ ID NO: 2857276 - RNA, 19 nt, Artificial Sequence
  Description of Artificial Sequence: Synthetic oligonucleotide
gugcauuuguagugaggag

SEQ ID NO: 2857277 - RNA, 19 nt, Artificial Sequence
  Description of Artificial Sequence: Synthetic oligonucleotide
acacacacacacacauugg

SEQ ID NO: 2857278 - RNA, 19 nt, Artificial Sequence
  Description of Artificial Sequence: Synthetic oligonucleotide
gguuguuggcuuugaguag

SEQ ID NO: 2857279 - RNA, 19 nt, Artificial Sequence
  Description of Artificial Sequence: Synthetic oligonucleotide
aguaguguccaaacuggga

SEQ ID NO: 2857280 - RNA, 19 nt, Artificial Sequence
  Description of Artificial Sequence: Synthetic oligonucleotide
aucauaccaagcaccaaga

SEQ ID NO: 2857281 - RNA, 19 nt, Artificial Sequence
  Description of Artificial Sequence: Synthetic oligonucleotide
uuguagcuuguaucauaug

SEQ ID NO: 2857282 - RNA, 19 nt, Artificial Sequence
  Description of Artificial Sequence: Synthetic oligonucleotide
gaguagcuacucauauaag

SEQ ID NO: 2857283 - RNA, 19 nt, Artificial Sequence
  Description of Artificial Sequence: Synthetic oligonucleotide
cguacacacacacacacac

SEQ ID NO: 2857284 - RNA, 19 nt, Artificial Sequence
  Description of Artificial Sequence: Synthetic oligonucleotide
ucuguccacacuucaccau

SEQ ID NO: 2857285 - RNA, 19 nt, Artificial Sequence
  Description of Artificial Sequence: Synthetic oligonucleotide
ggguuuagguuuuacaaua

SEQ ID NO: 2857286 - RNA, 19 nt, Artificial Sequence
  Description of Artificial Sequence: Synthetic oligonucleotide
ccaagcaccaagaguaaug

SEQ ID NO: 2857287 - RNA, 19 nt, Artificial Sequence
  Description of Artificial Sequence: Synthetic oligonucleotide
acacauuggaucauaccaa

SEQ ID NO: 2857288 - RNA, 19 nt, Artificial Sequence
  Description of Artificial Sequence: Synthetic oligonucleotide
cauaccaagcaccaagagu

SEQ ID NO: 2857289 - RNA, 19 nt, Artificial Sequence
  Description of Artificial Sequence: Synthetic oligonucleotide
guaucauauguugauucaa

SEQ ID NO: 2857290 - RNA, 19 nt, Artificial Sequence
  Description of Artificial Sequence: Synthetic oligonucleotide
cugaggaaauagaacaagu

SEQ ID NO: 2857291 - RNA, 19 nt, Artificial Sequence
  Description of Artificial Sequence: Synthetic oligonucleotide
auucuuuaggucauaucuu

SEQ ID NO: 2857292 - RNA, 19 nt, Artificial Sequence
  Description of Artificial Sequence: Synthetic oligonucleotide
caucucgcuuaaaucuaug

SEQ ID NO: 2857293 - RNA, 19 nt, Artificial Sequence
  Description of Artificial Sequence: Synthetic oligonucleotide
uuauuccagucuguccaca

SEQ ID NO: 2857294 - RNA, 19 nt, Artificial Sequence
  Description of Artificial Sequence: Synthetic oligonucleotide
uuguuggcuuugaguagcu

SEQ ID NO: 2857295 - RNA, 19 nt, Artificial Sequence
  Description of Artificial Sequence: Synthetic oligonucleotide
cauuaguggugcaucucca

SEQ ID NO: 2857296 - RNA, 19 nt, Artificial Sequence
  Description of Artificial Sequence: Synthetic oligonucleotide
cauauaaguugacuuuucu

SEQ ID NO: 2857297 - RNA, 19 nt, Artificial Sequence
  Description of Artificial Sequence: Synthetic oligonucleotide
gucuguccacacuucacca

SEQ ID NO: 2857298 - RNA, 19 nt, Artificial Sequence
  Description of Artificial Sequence: Synthetic oligonucleotide
ccuaucaaaguagaaugug

SEQ ID NO: 2857299 - RNA, 19 nt, Artificial Sequence
  Description of Artificial Sequence: Synthetic oligonucleotide
uuugcuguuguagcuugua

SEQ ID NO: 2857300 - RNA, 19 nt, Artificial Sequence
  Description of Artificial Sequence: Synthetic oligonucleotide
auaucuuuccugguuccaa

SEQ ID NO: 2857301 - RNA, 19 nt, Artificial Sequence
  Description of Artificial Sequence: Synthetic oligonucleotide
uccagucuguccacacuuc

SEQ ID NO: 2857302 - RNA, 19 nt, Artificial Sequence
  Description of Artificial Sequence: Synthetic oligonucleotide
uaccaagcaccaagaguaa

SEQ ID NO: 2857303 - RNA, 19 nt, Artificial Sequence
  Description of Artificial Sequence: Synthetic oligonucleotide
ugguuccaauugccuauca

SEQ ID NO: 2857304 - RNA, 19 nt, Artificial Sequence
  Description of Artificial Sequence: Synthetic oligonucleotide
cuuugaguagcuacucaua

SEQ ID NO: 2857305 - RNA, 19 nt, Artificial Sequence
  Description of Artificial Sequence: Synthetic oligonucleotide
aggucauaucuuuccuggu

SEQ ID NO: 2857306 - RNA, 19 nt, Artificial Sequence
  Description of Artificial Sequence: Synthetic oligonucleotide
acacuucaccaugaccauc

SEQ ID NO: 2857307 - RNA, 19 nt, Artificial Sequence
  Description of Artificial Sequence: Synthetic oligonucleotide
cucaggcugauggccaggg

SEQ ID NO: 2857308 - RNA, 19 nt, Artificial Sequence
  Description of Artificial Sequence: Synthetic oligonucleotide
aguucucauuaguggugca

SEQ ID NO: 2857309 - RNA, 19 nt, Artificial Sequence
  Description of Artificial Sequence: Synthetic oligonucleotide
ugggaaggcaaggguuuag

SEQ ID NO: 2857310 - RNA, 19 nt, Artificial Sequence
  Description of Artificial Sequence: Synthetic oligonucleotide
agcucaggcugauggccag

SEQ ID NO: 2857311 - RNA, 19 nt, Artificial Sequence
  Description of Artificial Sequence: Synthetic oligonucleotide
ggaaauagaacaaguuucu

SEQ ID NO: 2857312 - RNA, 19 nt, Artificial Sequence
  Description of Artificial Sequence: Synthetic oligonucleotide
aucuuuccugguuccaauu

SEQ ID NO: 2857313 - RNA, 19 nt, Artificial Sequence
  Description of Artificial Sequence: Synthetic oligonucleotide
gcaccaagaguaauggcug

SEQ ID NO: 2857314 - RNA, 19 nt, Artificial Sequence
  Description of Artificial Sequence: Synthetic oligonucleotide
ucaccaugaccaucagcau

SEQ ID NO: 2857315 - RNA, 19 nt, Artificial Sequence
  Description of Artificial Sequence: Synthetic oligonucleotide
uggugcaucuccacccgua

SEQ ID NO: 2857316 - RNA, 19 nt, Artificial Sequence
  Description of Artificial Sequence: Synthetic oligonucleotide
guagcuacucauauaaguu

SEQ ID NO: 2857317 - RNA, 19 nt, Artificial Sequence
  Description of Artificial Sequence: Synthetic oligonucleotide
ggauucugaggaaauagaa

SEQ ID NO: 2857318 - RNA, 19 nt, Artificial Sequence
  Description of Artificial Sequence: Synthetic oligonucleotide
auggcuggguuguuggcuu

SEQ ID NO: 2857319 - RNA, 19 nt, Artificial Sequence
  Description of Artificial Sequence: Synthetic oligonucleotide
cacacacacacacacacau

SEQ ID NO: 2857320 - RNA, 19 nt, Artificial Sequence
  Description of Artificial Sequence: Synthetic oligonucleotide
acacacacacacauuggau

SEQ ID NO: 2857321 - RNA, 19 nt, Artificial Sequence
  Description of Artificial Sequence: Synthetic oligonucleotide
caucagcauaaauaaggcu

SEQ ID NO: 2857322 - RNA, 19 nt, Artificial Sequence
  Description of Artificial Sequence: Synthetic oligonucleotide
cagcauaaauaaggcugcc

SEQ ID NO: 2857323 - RNA, 19 nt, Artificial Sequence
  Description of Artificial Sequence: Synthetic oligonucleotide
ugauggccagggaaccaau

SEQ ID NO: 2857324 - RNA, 19 nt, Artificial Sequence
  Description of Artificial Sequence: Synthetic oligonucleotide
gggaaggcaaggguuuagg

SEQ ID NO: 2857325 - RNA, 19 nt, Artificial Sequence
  Description of Artificial Sequence: Synthetic oligonucleotide
cucauuaguggugcaucuc

SEQ ID NO: 2857326 - RNA, 19 nt, Artificial Sequence
  Description of Artificial Sequence: Synthetic oligonucleotide
guuguagcuuguaucauau

SEQ ID NO: 2857327 - RNA, 19 nt, Artificial Sequence
  Description of Artificial Sequence: Synthetic oligonucleotide
ccaauugccuaucaaagua

SEQ ID NO: 2857328 - RNA, 19 nt, Artificial Sequence
  Description of Artificial Sequence: Synthetic oligonucleotide
auugccuaucaaaguagaa

SEQ ID NO: 2857329 - RNA, 19 nt, Artificial Sequence
  Description of Artificial Sequence: Synthetic oligonucleotide
caggcugauggccagggaa

SEQ ID NO: 2857330 - RNA, 19 nt, Artificial Sequence
  Description of Artificial Sequence: Synthetic oligonucleotide
gcuuaaaucuaugggcuga

SEQ ID NO: 2857331 - RNA, 19 nt, Artificial Sequence
  Description of Artificial Sequence: Synthetic oligonucleotide
agugugggauucugaggaa

SEQ ID NO: 2857332 - RNA, 19 nt, Artificial Sequence
  Description of Artificial Sequence: Synthetic oligonucleotide
ucaggcugauggccaggga

SEQ ID NO: 2857333 - RNA, 19 nt, Artificial Sequence
  Description of Artificial Sequence: Synthetic oligonucleotide
gcauuuguagugaggagga

SEQ ID NO: 2857334 - RNA, 19 nt, Artificial Sequence
  Description of Artificial Sequence: Synthetic oligonucleotide
aguugacuuuucugugcau

SEQ ID NO: 2857335 - RNA, 19 nt, Artificial Sequence
  Description of Artificial Sequence: Synthetic oligonucleotide
acauguuauuccagucugu

SEQ ID NO: 2857336 - RNA, 19 nt, Artificial Sequence
  Description of Artificial Sequence: Synthetic oligonucleotide
uggcuuugaguagcuacuc

SEQ ID NO: 2857337 - RNA, 19 nt, Artificial Sequence
  Description of Artificial Sequence: Synthetic oligonucleotide
uuaaaucuaugggcugauu

SEQ ID NO: 2857338 - RNA, 19 nt, Artificial Sequence
  Description of Artificial Sequence: Synthetic oligonucleotide
ggacauguuauuccagucu

SEQ ID NO: 2857339 - RNA, 19 nt, Artificial Sequence
  Description of Artificial Sequence: Synthetic oligonucleotide
guccaaacugggaaggcaa

SEQ ID NO: 2857340 - RNA, 19 nt, Artificial Sequence
  Description of Artificial Sequence: Synthetic oligonucleotide
ggccagggaaccaaugagc

SEQ ID NO: 2857341 - RNA, 19 nt, Artificial Sequence
  Description of Artificial Sequence: Synthetic oligonucleotide
cugccauagugugggauuc

SEQ ID NO: 2857342 - RNA, 19 nt, Artificial Sequence
  Description of Artificial Sequence: Synthetic oligonucleotide
guuuagguuuuacaauauu

SEQ ID NO: 2857343 - RNA, 19 nt, Artificial Sequence
  Description of Artificial Sequence: Synthetic oligonucleotide
gaggaggauccagcucagg

SEQ ID NO: 2857344 - RNA, 19 nt, Artificial Sequence
  Description of Artificial Sequence: Synthetic oligonucleotide
gcuuguaucauauguugau

SEQ ID NO: 2857345 - RNA, 19 nt, Artificial Sequence
  Description of Artificial Sequence: Synthetic oligonucleotide
agcaucucgcuuaaaucua

SEQ ID NO: 2857346 - RNA, 19 nt, Artificial Sequence
  Description of Artificial Sequence: Synthetic oligonucleotide
guguccaaacugggaaggc

SEQ ID NO: 2857347 - RNA, 19 nt, Artificial Sequence
  Description of Artificial Sequence: Synthetic oligonucleotide
uuguagugaggaggaucca

SEQ ID NO: 2857348 - RNA, 19 nt, Artificial Sequence
  Description of Artificial Sequence: Synthetic oligonucleotide
acacguacacacacacaca

SEQ ID NO: 2857349 - RNA, 19 nt, Artificial Sequence
  Description of Artificial Sequence: Synthetic oligonucleotide
ggugcaucuccacccguac

SEQ ID NO: 2857350 - RNA, 19 nt, Artificial Sequence
  Description of Artificial Sequence: Synthetic oligonucleotide
caccaugaccaucagcaua

SEQ ID NO: 2857351 - RNA, 19 nt, Artificial Sequence
  Description of Artificial Sequence: Synthetic oligonucleotide
gggauucugaggaaauaga

SEQ ID NO: 2857352 - RNA, 19 nt, Artificial Sequence
  Description of Artificial Sequence: Synthetic oligonucleotide
ccaaugagcaucucgcuua

SEQ ID NO: 2857353 - RNA, 19 nt, Artificial Sequence
  Description of Artificial Sequence: Synthetic oligonucleotide
guagcuuguaucauauguu

SEQ ID NO: 2857354 - RNA, 19 nt, Artificial Sequence
  Description of Artificial Sequence: Synthetic oligonucleotide
cauaucuuuccugguucca

SEQ ID NO: 2857355 - RNA, 19 nt, Artificial Sequence
  Description of Artificial Sequence: Synthetic oligonucleotide
guacacacacacacacaca

SEQ ID NO: 2857356 - RNA, 19 nt, Artificial Sequence
  Description of Artificial Sequence: Synthetic oligonucleotide
acacacacacacacacaca

SEQ ID NO: 2857357 - RNA, 19 nt, Artificial Sequence
  Description of Artificial Sequence: Synthetic oligonucleotide
acacacacguacacacaca

SEQ ID NO: 2857358 - RNA, 19 nt, Artificial Sequence
  Description of Artificial Sequence: Synthetic oligonucleotide
cucauauaaguugacuuuu

SEQ ID NO: 2857359 - RNA, 19 nt, Artificial Sequence
  Description of Artificial Sequence: Synthetic oligonucleotide
cuacucauauaaguugacu

SEQ ID NO: 2857360 - RNA, 19 nt, Artificial Sequence
  Description of Artificial Sequence: Synthetic oligonucleotide
gguuccaauugccuaucaa

SEQ ID NO: 2857361 - RNA, 19 nt, Artificial Sequence
  Description of Artificial Sequence: Synthetic oligonucleotide
acacacacacguacacaca

SEQ ID NO: 2857362 - RNA, 19 nt, Artificial Sequence
  Description of Artificial Sequence: Synthetic oligonucleotide
ggcuuugaguagcuacuca

SEQ ID NO: 2857363 - RNA, 19 nt, Artificial Sequence
  Description of Artificial Sequence: Synthetic oligonucleotide
ccagcucaggcugauggcc

SEQ ID NO: 2857364 - RNA, 19 nt, Artificial Sequence
  Description of Artificial Sequence: Synthetic oligonucleotide
accaagcaccaagaguaau

SEQ ID NO: 2857365 - RNA, 19 nt, Artificial Sequence
  Description of Artificial Sequence: Synthetic oligonucleotide
aaugagcaucucgcuuaaa

SEQ ID NO: 2857366 - RNA, 19 nt, Artificial Sequence
  Description of Artificial Sequence: Synthetic oligonucleotide
gcuuugaguagcuacucau

SEQ ID NO: 2857367 - RNA, 19 nt, Artificial Sequence
  Description of Artificial Sequence: Synthetic oligonucleotide
acguacacacacacacaca

SEQ ID NO: 2857368 - RNA, 19 nt, Artificial Sequence
  Description of Artificial Sequence: Synthetic oligonucleotide
ugccauagugugggauucu

SEQ ID NO: 2857369 - RNA, 19 nt, Artificial Sequence
  Description of Artificial Sequence: Synthetic oligonucleotide
cagcucaggcugauggcca

SEQ ID NO: 2857370 - RNA, 19 nt, Artificial Sequence
  Description of Artificial Sequence: Synthetic oligonucleotide
caaugagcaucucgcuuaa

SEQ ID NO: 2857371 - RNA, 19 nt, Artificial Sequence
  Description of Artificial Sequence: Synthetic oligonucleotide
cugguuccaauugccuauc

SEQ ID NO: 2857372 - RNA, 19 nt, Artificial Sequence
  Description of Artificial Sequence: Synthetic oligonucleotide
acacacguacacacacaca

SEQ ID NO: 2857373 - RNA, 19 nt, Artificial Sequence
  Description of Artificial Sequence: Synthetic oligonucleotide
acacacacauuggaucaua

SEQ ID NO: 2857374 - RNA, 19 nt, Artificial Sequence
  Description of Artificial Sequence: Synthetic oligonucleotide
gcuacucauauaaguugac

SEQ ID NO: 2857375 - RNA, 19 nt, Artificial Sequence
  Description of Artificial Sequence: Synthetic oligonucleotide
gauccagcucaggcugaug

SEQ ID NO: 2857376 - RNA, 19 nt, Artificial Sequence
  Description of Artificial Sequence: Synthetic oligonucleotide
gugugggauucugaggaaa

SEQ ID NO: 2857377 - RNA, 19 nt, Artificial Sequence
  Description of Artificial Sequence: Synthetic oligonucleotide
aucuccacccguacugaaa

SEQ ID NO: 2857378 - RNA, 19 nt, Artificial Sequence
  Description of Artificial Sequence: Synthetic oligonucleotide
uguuggcuuugaguagcua

SEQ ID NO: 2857379 - RNA, 19 nt, Artificial Sequence
  Description of Artificial Sequence: Synthetic oligonucleotide
cuuguaucauauguugauu

SEQ ID NO: 2857380 - RNA, 19 nt, Artificial Sequence
  Description of Artificial Sequence: Synthetic oligonucleotide
ggaaggcaaggguuuaggu

SEQ ID NO: 2857381 - RNA, 19 nt, Artificial Sequence
  Description of Artificial Sequence: Synthetic oligonucleotide
ggcugauggccagggaacc

SEQ ID NO: 2857382 - RNA, 19 nt, Artificial Sequence
  Description of Artificial Sequence: Synthetic oligonucleotide
gccauagugugggauucug

SEQ ID NO: 2857383 - RNA, 19 nt, Artificial Sequence
  Description of Artificial Sequence: Synthetic oligonucleotide
ggucauaucuuuccugguu

SEQ ID NO: 2857384 - RNA, 19 nt, Artificial Sequence
  Description of Artificial Sequence: Synthetic oligonucleotide
cugauggccagggaaccaa

SEQ ID NO: 2857385 - RNA, 19 nt, Artificial Sequence
  Description of Artificial Sequence: Synthetic oligonucleotide
cuaugggcugauuguggcu

SEQ ID NO: 2857386 - RNA, 19 nt, Artificial Sequence
  Description of Artificial Sequence: Synthetic oligonucleotide
augggcugauuguggcuuu

SEQ ID NO: 2857387 - RNA, 19 nt, Artificial Sequence
  Description of Artificial Sequence: Synthetic oligonucleotide
caagaguaauggcuggguu

SEQ ID NO: 2857388 - RNA, 19 nt, Artificial Sequence
  Description of Artificial Sequence: Synthetic oligonucleotide
cgcuuaaaucuaugggcug

SEQ ID NO: 2857389 - RNA, 19 nt, Artificial Sequence
  Description of Artificial Sequence: Synthetic oligonucleotide
guucucauuaguggugcau

SEQ ID NO: 2857390 - RNA, 19 nt, Artificial Sequence
  Description of Artificial Sequence: Synthetic oligonucleotide
cuuaaaucuaugggcugau

SEQ ID NO: 2857391 - RNA, 19 nt, Artificial Sequence
  Description of Artificial Sequence: Synthetic oligonucleotide
gcaaggguuuagguuuuac

SEQ ID NO: 2857392 - RNA, 19 nt, Artificial Sequence
  Description of Artificial Sequence: Synthetic oligonucleotide
caucuccacccguacugaa

SEQ ID NO: 2857393 - RNA, 19 nt, Artificial Sequence
  Description of Artificial Sequence: Synthetic oligonucleotide
acacacacacacacacauu

SEQ ID NO: 2857394 - RNA, 19 nt, Artificial Sequence
  Description of Artificial Sequence: Synthetic oligonucleotide
caugaccaucagcauaaau

SEQ ID NO: 2857395 - RNA, 19 nt, Artificial Sequence
  Description of Artificial Sequence: Synthetic oligonucleotide
ccauagugugggauucuga

SEQ ID NO: 2857396 - RNA, 19 nt, Artificial Sequence
  Description of Artificial Sequence: Synthetic oligonucleotide
aggauccagcucaggcuga

SEQ ID NO: 2857397 - RNA, 19 nt, Artificial Sequence
  Description of Artificial Sequence: Synthetic oligonucleotide
cacacuucaccaugaccau

SEQ ID NO: 2857398 - RNA, 19 nt, Artificial Sequence
  Description of Artificial Sequence: Synthetic oligonucleotide
caauauucuuuaggucaua

SEQ ID NO: 2857399 - RNA, 19 nt, Artificial Sequence
  Description of Artificial Sequence: Synthetic oligonucleotide
ccagucuguccacacuuca

SEQ ID NO: 2857400 - RNA, 19 nt, Artificial Sequence
  Description of Artificial Sequence: Synthetic oligonucleotide
gccuaucaaaguagaaugu

SEQ ID NO: 2857401 - RNA, 19 nt, Artificial Sequence
  Description of Artificial Sequence: Synthetic oligonucleotide
uggcuggguuguuggcuuu

SEQ ID NO: 2857402 - RNA, 19 nt, Artificial Sequence
  Description of Artificial Sequence: Synthetic oligonucleotide
gugcaucuccacccguacu

SEQ ID NO: 2857403 - RNA, 19 nt, Artificial Sequence
  Description of Artificial Sequence: Synthetic oligonucleotide
ccugguuccaauugccuau

SEQ ID NO: 2857404 - RNA, 19 nt, Artificial Sequence
  Description of Artificial Sequence: Synthetic oligonucleotide
aggcaaggguuuagguuuu

SEQ ID NO: 2857405 - RNA, 19 nt, Artificial Sequence
  Description of Artificial Sequence: Synthetic oligonucleotide
gcucaggcugauggccagg

SEQ ID NO: 2857406 - RNA, 19 nt, Artificial Sequence
  Description of Artificial Sequence: Synthetic oligonucleotide
ggaucauaccaagcaccaa

SEQ ID NO: 2857407 - RNA, 19 nt, Artificial Sequence
  Description of Artificial Sequence: Synthetic oligonucleotide
ggcuggguuguuggcuuug

SEQ ID NO: 2857408 - RNA, 19 nt, Artificial Sequence
  Description of Artificial Sequence: Synthetic oligonucleotide
gcaucuccacccguacuga

SEQ ID NO: 2857409 - RNA, 19 nt, Artificial Sequence
  Description of Artificial Sequence: Synthetic oligonucleotide
gcugauggccagggaacca

SEQ ID NO: 2857410 - RNA, 19 nt, Artificial Sequence
  Description of Artificial Sequence: Synthetic oligonucleotide
cugggaaggcaaggguuua

SEQ ID NO: 2857411 - RNA, 19 nt, Artificial Sequence
  Description of Artificial Sequence: Synthetic oligonucleotide
guggugcaucuccacccgu

SEQ ID NO: 2857412 - RNA, 19 nt, Artificial Sequence
  Description of Artificial Sequence: Synthetic oligonucleotide
cuguuguagcuuguaucau

SEQ ID NO: 2857413 - RNA, 19 nt, Artificial Sequence
  Description of Artificial Sequence: Synthetic oligonucleotide
cauuuguagugaggaggau

SEQ ID NO: 2857414 - RNA, 19 nt, Artificial Sequence
  Description of Artificial Sequence: Synthetic oligonucleotide
ccaagaguaauggcugggu

SEQ ID NO: 2857415 - RNA, 19 nt, Artificial Sequence
  Description of Artificial Sequence: Synthetic oligonucleotide
cacacacacauuggaucau

SEQ ID NO: 2857416 - RNA, 19 nt, Artificial Sequence
  Description of Artificial Sequence: Synthetic oligonucleotide
gcaucucgcuuaaaucuau

SEQ ID NO: 2857417 - RNA, 19 nt, Artificial Sequence
  Description of Artificial Sequence: Synthetic oligonucleotide
gggaaccaaugagcaucuc

SEQ ID NO: 2857418 - RNA, 19 nt, Artificial Sequence
  Description of Artificial Sequence: Synthetic oligonucleotide
gaguaauggcuggguuguu

SEQ ID NO: 2857419 - RNA, 19 nt, Artificial Sequence
  Description of Artificial Sequence: Synthetic oligonucleotide
ggcugccauagugugggau

SEQ ID NO: 2857420 - RNA, 19 nt, Artificial Sequence
  Description of Artificial Sequence: Synthetic oligonucleotide
ccagggaaccaaugagcau

SEQ ID NO: 2857421 - RNA, 19 nt, Artificial Sequence
  Description of Artificial Sequence: Synthetic oligonucleotide
ggcaaggguuuagguuuua

SEQ ID NO: 2857422 - RNA, 19 nt, Artificial Sequence
  Description of Artificial Sequence: Synthetic oligonucleotide
ggauccagcucaggcugau

SEQ ID NO: 2857423 - RNA, 19 nt, Artificial Sequence
  Description of Artificial Sequence: Synthetic oligonucleotide
ccaugaccaucagcauaaa

SEQ ID NO: 2857424 - RNA, 19 nt, Artificial Sequence
  Description of Artificial Sequence: Synthetic oligonucleotide
augaaguucaucuucaaac

SEQ ID NO: 2857425 - RNA, 19 nt, Artificial Sequence
  Description of Artificial Sequence: Synthetic oligonucleotide
aaugguauguuugccaucc

SEQ ID NO: 2857426 - RNA, 19 nt, Artificial Sequence
  Description of Artificial Sequence: Synthetic oligonucleotide
uuugccauagauagaagcg

SEQ ID NO: 2857427 - RNA, 19 nt, Artificial Sequence
  Description of Artificial Sequence: Synthetic oligonucleotide
aacucugcaaaguucuugc

SEQ ID NO: 2857428 - RNA, 19 nt, Artificial Sequence
  Description of Artificial Sequence: Synthetic oligonucleotide
cuucacaucgucuacaggg

SEQ ID NO: 2857429 - RNA, 19 nt, Artificial Sequence
  Description of Artificial Sequence: Synthetic oligonucleotide
ucuuugaugauccugugga

SEQ ID NO: 2857430 - RNA, 19 nt, Artificial Sequence
  Description of Artificial Sequence: Synthetic oligonucleotide
ucugcaaaguucuugcagg

SEQ ID NO: 2857431 - RNA, 19 nt, Artificial Sequence
  Description of Artificial Sequence: Synthetic oligonucleotide
ugaacuucaggucuggaug

SEQ ID NO: 2857432 - RNA, 19 nt, Artificial Sequence
  Description of Artificial Sequence: Synthetic oligonucleotide
aucacaccuacccagaagg

SEQ ID NO: 2857433 - RNA, 19 nt, Artificial Sequence
  Description of Artificial Sequence: Synthetic oligonucleotide
cuuaaggaucuucacaucg

SEQ ID NO: 2857434 - RNA, 19 nt, Artificial Sequence
  Description of Artificial Sequence: Synthetic oligonucleotide
auccuguggaauuuggugc

SEQ ID NO: 2857435 - RNA, 19 nt, Artificial Sequence
  Description of Artificial Sequence: Synthetic oligonucleotide
uucguuuccaccaugccca

SEQ ID NO: 2857436 - RNA, 19 nt, Artificial Sequence
  Description of Artificial Sequence: Synthetic oligonucleotide
gacagcaucacaccuaccc

SEQ ID NO: 2857437 - RNA, 19 nt, Artificial Sequence
  Description of Artificial Sequence: Synthetic oligonucleotide
uccagguagacguugggcg

SEQ ID NO: 2857438 - RNA, 19 nt, Artificial Sequence
  Description of Artificial Sequence: Synthetic oligonucleotide
aaaaugguauguuugccau

SEQ ID NO: 2857439 - RNA, 19 nt, Artificial Sequence
  Description of Artificial Sequence: Synthetic oligonucleotide
auguuuccaguacagcucc

SEQ ID NO: 2857440 - RNA, 19 nt, Artificial Sequence
  Description of Artificial Sequence: Synthetic oligonucleotide
aagaaucccagcuccagug

SEQ ID NO: 2857441 - RNA, 19 nt, Artificial Sequence
  Description of Artificial Sequence: Synthetic oligonucleotide
auagauagaagcgccaccg

SEQ ID NO: 2857442 - RNA, 19 nt, Artificial Sequence
  Description of Artificial Sequence: Synthetic oligonucleotide
agcuccagcacgaugaucc

SEQ ID NO: 2857443 - RNA, 19 nt, Artificial Sequence
  Description of Artificial Sequence: Synthetic oligonucleotide
uauacccuggcacacucgg

SEQ ID NO: 2857444 - RNA, 19 nt, Artificial Sequence
  Description of Artificial Sequence: Synthetic oligonucleotide
auugcaagaaucccagcuc

SEQ ID NO: 2857445 - RNA, 19 nt, Artificial Sequence
  Description of Artificial Sequence: Synthetic oligonucleotide
auucaccaucccuauaccc

SEQ ID NO: 2857446 - RNA, 19 nt, Artificial Sequence
  Description of Artificial Sequence: Synthetic oligonucleotide
agaaggguacgccuuaagg

SEQ ID NO: 2857447 - RNA, 19 nt, Artificial Sequence
  Description of Artificial Sequence: Synthetic oligonucleotide
uacagcuccagcacgauga

SEQ ID NO: 2857448 - RNA, 19 nt, Artificial Sequence
  Description of Artificial Sequence: Synthetic oligonucleotide
ugaaguucaucuucaaacu

SEQ ID NO: 2857449 - RNA, 19 nt, Artificial Sequence
  Description of Artificial Sequence: Synthetic oligonucleotide
augaagucuuugaugaucc

SEQ ID NO: 2857450 - RNA, 19 nt, Artificial Sequence
  Description of Artificial Sequence: Synthetic oligonucleotide
guuugccauagauagaagc

SEQ ID NO: 2857451 - RNA, 19 nt, Artificial Sequence
  Description of Artificial Sequence: Synthetic oligonucleotide
uugccauccagccacuggg

SEQ ID NO: 2857452 - RNA, 19 nt, Artificial Sequence
  Description of Artificial Sequence: Synthetic oligonucleotide
gauccuguggaauuuggug

SEQ ID NO: 2857453 - RNA, 19 nt, Artificial Sequence
  Description of Artificial Sequence: Synthetic oligonucleotide
aauuuggugccguuguagu

SEQ ID NO: 2857454 - RNA, 19 nt, Artificial Sequence
  Description of Artificial Sequence: Synthetic oligonucleotide
uccagugaacuucaggucu

SEQ ID NO: 2857455 - RNA, 19 nt, Artificial Sequence
  Description of Artificial Sequence: Synthetic oligonucleotide
uuggccauugcaagaaucc

SEQ ID NO: 2857456 - RNA, 19 nt, Artificial Sequence
  Description of Artificial Sequence: Synthetic oligonucleotide
ucuugcaggucuuuggagc

SEQ ID NO: 2857457 - RNA, 19 nt, Artificial Sequence
  Description of Artificial Sequence: Synthetic oligonucleotide
agauagaagcgccaccgcg

SEQ ID NO: 2857458 - RNA, 19 nt, Artificial Sequence
  Description of Artificial Sequence: Synthetic oligonucleotide
aguucuugcaggucuuugg

SEQ ID NO: 2857459 - RNA, 19 nt, Artificial Sequence
  Description of Artificial Sequence: Synthetic oligonucleotide
uugcaagaaucccagcucc

SEQ ID NO: 2857460 - RNA, 19 nt, Artificial Sequence
  Description of Artificial Sequence: Synthetic oligonucleotide
aaaugguauguuugccauc

SEQ ID NO: 2857461 - RNA, 19 nt, Artificial Sequence
  Description of Artificial Sequence: Synthetic oligonucleotide
aaggguacgccuuaaggau

SEQ ID NO: 2857462 - RNA, 19 nt, Artificial Sequence
  Description of Artificial Sequence: Synthetic oligonucleotide
guauguuugccauccagcc

SEQ ID NO: 2857463 - RNA, 19 nt, Artificial Sequence
  Description of Artificial Sequence: Synthetic oligonucleotide
uucaccaucccuauacccu

SEQ ID NO: 2857464 - RNA, 19 nt, Artificial Sequence
  Description of Artificial Sequence: Synthetic oligonucleotide
gaaggguacgccuuaagga

SEQ ID NO: 2857465 - RNA, 19 nt, Artificial Sequence
  Description of Artificial Sequence: Synthetic oligonucleotide
gaaguucaucuucaaacug

SEQ ID NO: 2857466 - RNA, 19 nt, Artificial Sequence
  Description of Artificial Sequence: Synthetic oligonucleotide
ucuucaaacuguuugccau

SEQ ID NO: 2857467 - RNA, 19 nt, Artificial Sequence
  Description of Artificial Sequence: Synthetic oligonucleotide
uuuggugccguuguaguag

SEQ ID NO: 2857468 - RNA, 19 nt, Artificial Sequence
  Description of Artificial Sequence: Synthetic oligonucleotide
uacgccuuaaggaucuuca

SEQ ID NO: 2857469 - RNA, 19 nt, Artificial Sequence
  Description of Artificial Sequence: Synthetic oligonucleotide
uuaaggaucuucacaucgu

SEQ ID NO: 2857470 - RNA, 19 nt, Artificial Sequence
  Description of Artificial Sequence: Synthetic oligonucleotide
ugccauagauagaagcgcc

SEQ ID NO: 2857471 - RNA, 19 nt, Artificial Sequence
  Description of Artificial Sequence: Synthetic oligonucleotide
gucacgaagaacuggcugc

SEQ ID NO: 2857472 - RNA, 19 nt, Artificial Sequence
  Description of Artificial Sequence: Synthetic oligonucleotide
ugguauguuugccauccag

SEQ ID NO: 2857473 - RNA, 19 nt, Artificial Sequence
  Description of Artificial Sequence: Synthetic oligonucleotide
cuuuggagcauguuuccag

SEQ ID NO: 2857474 - RNA, 19 nt, Artificial Sequence
  Description of Artificial Sequence: Synthetic oligonucleotide
uucacaucgucuacagggc

SEQ ID NO: 2857475 - RNA, 19 nt, Artificial Sequence
  Description of Artificial Sequence: Synthetic oligonucleotide
aaguucaucuucaaacugu

SEQ ID NO: 2857476 - RNA, 19 nt, Artificial Sequence
  Description of Artificial Sequence: Synthetic oligonucleotide
aguucguuuccaccaugcc

SEQ ID NO: 2857477 - RNA, 19 nt, Artificial Sequence
  Description of Artificial Sequence: Synthetic oligonucleotide
uggaauuuggugccguugu

SEQ ID NO: 2857478 - RNA, 19 nt, Artificial Sequence
  Description of Artificial Sequence: Synthetic oligonucleotide
ucacaucgucuacagggcg

SEQ ID NO: 2857479 - RNA, 19 nt, Artificial Sequence
  Description of Artificial Sequence: Synthetic oligonucleotide
guucguuuccaccaugccc

SEQ ID NO: 2857480 - RNA, 19 nt, Artificial Sequence
  Description of Artificial Sequence: Synthetic oligonucleotide
acgaugauccccaugcugg

SEQ ID NO: 2857481 - RNA, 19 nt, Artificial Sequence
  Description of Artificial Sequence: Synthetic oligonucleotide
auagaagcgccaccgcgac

SEQ ID NO: 2857482 - RNA, 19 nt, Artificial Sequence
  Description of Artificial Sequence: Synthetic oligonucleotide
uuccaguacagcuccagca

SEQ ID NO: 2857483 - RNA, 19 nt, Artificial Sequence
  Description of Artificial Sequence: Synthetic oligonucleotide
ugggaguucguuuccacca

SEQ ID NO: 2857484 - RNA, 19 nt, Artificial Sequence
  Description of Artificial Sequence: Synthetic oligonucleotide
cauguuuccaguacagcuc

SEQ ID NO: 2857485 - RNA, 19 nt, Artificial Sequence
  Description of Artificial Sequence: Synthetic oligonucleotide
gaauuuggugccguuguag

SEQ ID NO: 2857486 - RNA, 19 nt, Artificial Sequence
  Description of Artificial Sequence: Synthetic oligonucleotide
caugcuggucuccagguag

SEQ ID NO: 2857487 - RNA, 19 nt, Artificial Sequence
  Description of Artificial Sequence: Synthetic oligonucleotide
uacccuggcacacucggcc

SEQ ID NO: 2857488 - RNA, 19 nt, Artificial Sequence
  Description of Artificial Sequence: Synthetic oligonucleotide
uccaguacagcuccagcac

SEQ ID NO: 2857489 - RNA, 19 nt, Artificial Sequence
  Description of Artificial Sequence: Synthetic oligonucleotide
agggucacgaagaacuggc

SEQ ID NO: 2857490 - RNA, 19 nt, Artificial Sequence
  Description of Artificial Sequence: Synthetic oligonucleotide
gaagucuuugaugauccug

SEQ ID NO: 2857491 - RNA, 19 nt, Artificial Sequence
  Description of Artificial Sequence: Synthetic oligonucleotide
aucuucacaucgucuacag

SEQ ID NO: 2857492 - RNA, 19 nt, Artificial Sequence
  Description of Artificial Sequence: Synthetic oligonucleotide
uccagcacgaugaucccca

SEQ ID NO: 2857493 - RNA, 19 nt, Artificial Sequence
  Description of Artificial Sequence: Synthetic oligonucleotide
uucaaacuguuugccauag

SEQ ID NO: 2857494 - RNA, 19 nt, Artificial Sequence
  Description of Artificial Sequence: Synthetic oligonucleotide
uccuguggaauuuggugcc

SEQ ID NO: 2857495 - RNA, 19 nt, Artificial Sequence
  Description of Artificial Sequence: Synthetic oligonucleotide
ucuucacaucgucuacagg

SEQ ID NO: 2857496 - RNA, 19 nt, Artificial Sequence
  Description of Artificial Sequence: Synthetic oligonucleotide
uugccauagauagaagcgc

SEQ ID NO: 2857497 - RNA, 19 nt, Artificial Sequence
  Description of Artificial Sequence: Synthetic oligonucleotide
gucuuugaugauccugugg

SEQ ID NO: 2857498 - RNA, 19 nt, Artificial Sequence
  Description of Artificial Sequence: Synthetic oligonucleotide
aacuggcugccauuggugu

SEQ ID NO: 2857499 - RNA, 19 nt, Artificial Sequence
  Description of Artificial Sequence: Synthetic oligonucleotide
uuuggagcauguuuccagu

SEQ ID NO: 2857500 - RNA, 19 nt, Artificial Sequence
  Description of Artificial Sequence: Synthetic oligonucleotide
uuuccaguacagcuccagc

SEQ ID NO: 2857501 - RNA, 19 nt, Artificial Sequence
  Description of Artificial Sequence: Synthetic oligonucleotide
caucccuauacccuggcac

SEQ ID NO: 2857502 - RNA, 19 nt, Artificial Sequence
  Description of Artificial Sequence: Synthetic oligonucleotide
gauucaccaucccuauacc

SEQ ID NO: 2857503 - RNA, 19 nt, Artificial Sequence
  Description of Artificial Sequence: Synthetic oligonucleotide
cauagauagaagcgccacc

SEQ ID NO: 2857504 - RNA, 19 nt, Artificial Sequence
  Description of Artificial Sequence: Synthetic oligonucleotide
cuggaugaaguucaucuuc

SEQ ID NO: 2857505 - RNA, 19 nt, Artificial Sequence
  Description of Artificial Sequence: Synthetic oligonucleotide
ucacaccuacccagaaggg

SEQ ID NO: 2857506 - RNA, 19 nt, Artificial Sequence
  Description of Artificial Sequence: Synthetic oligonucleotide
aucgucuacagggcggucc

SEQ ID NO: 2857507 - RNA, 19 nt, Artificial Sequence
  Description of Artificial Sequence: Synthetic oligonucleotide
uucuugcaggucuuuggag

SEQ ID NO: 2857508 - RNA, 19 nt, Artificial Sequence
  Description of Artificial Sequence: Synthetic oligonucleotide
uggagcauguuuccaguac

SEQ ID NO: 2857509 - RNA, 19 nt, Artificial Sequence
  Description of Artificial Sequence: Synthetic oligonucleotide
uuugaugauccuguggaau

SEQ ID NO: 2857510 - RNA, 19 nt, Artificial Sequence
  Description of Artificial Sequence: Synthetic oligonucleotide
agaacuggcugccauuggu

SEQ ID NO: 2857511 - RNA, 19 nt, Artificial Sequence
  Description of Artificial Sequence: Synthetic oligonucleotide
gaacuucaggucuggauga

SEQ ID NO: 2857512 - RNA, 19 nt, Artificial Sequence
  Description of Artificial Sequence: Synthetic oligonucleotide
agcuccagugaacuucagg

SEQ ID NO: 2857513 - RNA, 19 nt, Artificial Sequence
  Description of Artificial Sequence: Synthetic oligonucleotide
agcauguuuccaguacagc

SEQ ID NO: 2857514 - RNA, 19 nt, Artificial Sequence
  Description of Artificial Sequence: Synthetic oligonucleotide
ugcauuggccauugcaaga

SEQ ID NO: 2857515 - RNA, 19 nt, Artificial Sequence
  Description of Artificial Sequence: Synthetic oligonucleotide
gucuggaugaaguucaucu

SEQ ID NO: 2857516 - RNA, 19 nt, Artificial Sequence
  Description of Artificial Sequence: Synthetic oligonucleotide
uugaugauccuguggaauu

SEQ ID NO: 2857517 - RNA, 19 nt, Artificial Sequence
  Description of Artificial Sequence: Synthetic oligonucleotide
cacaucgucuacagggcgg

SEQ ID NO: 2857518 - RNA, 19 nt, Artificial Sequence
  Description of Artificial Sequence: Synthetic oligonucleotide
gaugaaguucaucuucaaa

SEQ ID NO: 2857519 - RNA, 19 nt, Artificial Sequence
  Description of Artificial Sequence: Synthetic oligonucleotide
caugaagucuuugaugauc

SEQ ID NO: 2857520 - RNA, 19 nt, Artificial Sequence
  Description of Artificial Sequence: Synthetic oligonucleotide
uguuugccauagauagaag

SEQ ID NO: 2857521 - RNA, 19 nt, Artificial Sequence
  Description of Artificial Sequence: Synthetic oligonucleotide
aucuucaaacuguuugcca

SEQ ID NO: 2857522 - RNA, 19 nt, Artificial Sequence
  Description of Artificial Sequence: Synthetic oligonucleotide
aaucccagcuccagugaac

SEQ ID NO: 2857523 - RNA, 19 nt, Artificial Sequence
  Description of Artificial Sequence: Synthetic oligonucleotide
aggaucuucacaucgucua

SEQ ID NO: 2857524 - RNA, 19 nt, Artificial Sequence
  Description of Artificial Sequence: Synthetic oligonucleotide
augauccccaugcuggucu

SEQ ID NO: 2857525 - RNA, 19 nt, Artificial Sequence
  Description of Artificial Sequence: Synthetic oligonucleotide
auuggccauugcaagaauc

SEQ ID NO: 2857526 - RNA, 19 nt, Artificial Sequence
  Description of Artificial Sequence: Synthetic oligonucleotide
cagcaucacaccuacccag

SEQ ID NO: 2857527 - RNA, 19 nt, Artificial Sequence
  Description of Artificial Sequence: Synthetic oligonucleotide
guuuccaccaugcccacuc

SEQ ID NO: 2857528 - RNA, 19 nt, Artificial Sequence
  Description of Artificial Sequence: Synthetic oligonucleotide
uccccguugggucaccacc

SEQ ID NO: 2857529 - RNA, 19 nt, Artificial Sequence
  Description of Artificial Sequence: Synthetic oligonucleotide
caucuucaaacuguuugcc

SEQ ID NO: 2857530 - RNA, 19 nt, Artificial Sequence
  Description of Artificial Sequence: Synthetic oligonucleotide
ugauccuguggaauuuggu

SEQ ID NO: 2857531 - RNA, 19 nt, Artificial Sequence
  Description of Artificial Sequence: Synthetic oligonucleotide
cugcauuggccauugcaag

SEQ ID NO: 2857532 - RNA, 19 nt, Artificial Sequence
  Description of Artificial Sequence: Synthetic oligonucleotide
uagauagaagcgccaccgc

SEQ ID NO: 2857533 - RNA, 19 nt, Artificial Sequence
  Description of Artificial Sequence: Synthetic oligonucleotide
guaguagccccgccgagcc

SEQ ID NO: 2857534 - RNA, 19 nt, Artificial Sequence
  Description of Artificial Sequence: Synthetic oligonucleotide
aucccuauacccuggcaca

SEQ ID NO: 2857535 - RNA, 19 nt, Artificial Sequence
  Description of Artificial Sequence: Synthetic oligonucleotide
aggucuuuggagcauguuu

SEQ ID NO: 2857536 - RNA, 19 nt, Artificial Sequence
  Description of Artificial Sequence: Synthetic oligonucleotide
uuuccaccaugcccacucg

SEQ ID NO: 2857537 - RNA, 19 nt, Artificial Sequence
  Description of Artificial Sequence: Synthetic oligonucleotide
acagcaucacaccuaccca

SEQ ID NO: 2857538 - RNA, 19 nt, Artificial Sequence
  Description of Artificial Sequence: Synthetic oligonucleotide
agaagcgccaccgcgaccu

SEQ ID NO: 2857539 - RNA, 19 nt, Artificial Sequence
  Description of Artificial Sequence: Synthetic oligonucleotide
acgccuuaaggaucuucac

SEQ ID NO: 2857540 - RNA, 19 nt, Artificial Sequence
  Description of Artificial Sequence: Synthetic oligonucleotide
gauagaagcgccaccgcga

SEQ ID NO: 2857541 - RNA, 19 nt, Artificial Sequence
  Description of Artificial Sequence: Synthetic oligonucleotide
uguaguagccccgccgagc

SEQ ID NO: 2857542 - RNA, 19 nt, Artificial Sequence
  Description of Artificial Sequence: Synthetic oligonucleotide
ugccguuguaguagccccg

SEQ ID NO: 2857543 - RNA, 19 nt, Artificial Sequence
  Description of Artificial Sequence: Synthetic oligonucleotide
aaacuguuugccauagaua

SEQ ID NO: 2857544 - RNA, 19 nt, Artificial Sequence
  Description of Artificial Sequence: Synthetic oligonucleotide
ucaggucuggaugaaguuc

SEQ ID NO: 2857545 - RNA, 19 nt, Artificial Sequence
  Description of Artificial Sequence: Synthetic oligonucleotide
accaucccuauacccuggc

SEQ ID NO: 2857546 - RNA, 19 nt, Artificial Sequence
  Description of Artificial Sequence: Synthetic oligonucleotide
aaggaucuucacaucgucu

SEQ ID NO: 2857547 - RNA, 19 nt, Artificial Sequence
  Description of Artificial Sequence: Synthetic oligonucleotide
gagggucacgaagaacugg

SEQ ID NO: 2857548 - RNA, 19 nt, Artificial Sequence
  Description of Artificial Sequence: Synthetic oligonucleotide
guuguaguagccccgccga

SEQ ID NO: 2857549 - RNA, 19 nt, Artificial Sequence
  Description of Artificial Sequence: Synthetic oligonucleotide
ugcaagaaucccagcucca

SEQ ID NO: 2857550 - RNA, 19 nt, Artificial Sequence
  Description of Artificial Sequence: Synthetic oligonucleotide
gucuuuggagcauguuucc

SEQ ID NO: 2857551 - RNA, 19 nt, Artificial Sequence
  Description of Artificial Sequence: Synthetic oligonucleotide
acuggcugccauugguguc

SEQ ID NO: 2857552 - RNA, 19 nt, Artificial Sequence
  Description of Artificial Sequence: Synthetic oligonucleotide
cugggaguucguuuccacc

SEQ ID NO: 2857553 - RNA, 19 nt, Artificial Sequence
  Description of Artificial Sequence: Synthetic oligonucleotide
ucuggcccugcauuggcca

SEQ ID NO: 2857554 - RNA, 19 nt, Artificial Sequence
  Description of Artificial Sequence: Synthetic oligonucleotide
gaugauccuguggaauuug

SEQ ID NO: 2857555 - RNA, 19 nt, Artificial Sequence
  Description of Artificial Sequence: Synthetic oligonucleotide
ucuggaugaaguucaucuu

SEQ ID NO: 2857556 - RNA, 19 nt, Artificial Sequence
  Description of Artificial Sequence: Synthetic oligonucleotide
gagcauguuuccaguacag

SEQ ID NO: 2857557 - RNA, 19 nt, Artificial Sequence
  Description of Artificial Sequence: Synthetic oligonucleotide
gguauguuugccauccagc

SEQ ID NO: 2857558 - RNA, 19 nt, Artificial Sequence
  Description of Artificial Sequence: Synthetic oligonucleotide
caccaugcccacucgauuc

SEQ ID NO: 2857559 - RNA, 19 nt, Artificial Sequence
  Description of Artificial Sequence: Synthetic oligonucleotide
caggucuggaugaaguuca

SEQ ID NO: 2857560 - RNA, 19 nt, Artificial Sequence
  Description of Artificial Sequence: Synthetic oligonucleotide
ucacgaagaacuggcugcc

SEQ ID NO: 2857561 - RNA, 19 nt, Artificial Sequence
  Description of Artificial Sequence: Synthetic oligonucleotide
cuguuugccauagauagaa

SEQ ID NO: 2857562 - RNA, 19 nt, Artificial Sequence
  Description of Artificial Sequence: Synthetic oligonucleotide
uugggcggcugccaggugu

SEQ ID NO: 2857563 - RNA, 19 nt, Artificial Sequence
  Description of Artificial Sequence: Synthetic oligonucleotide
uacccagaaggguacgccu

SEQ ID NO: 2857564 - RNA, 19 nt, Artificial Sequence
  Description of Artificial Sequence: Synthetic oligonucleotide
ugucuggcccugcauuggc

SEQ ID NO: 2857565 - RNA, 19 nt, Artificial Sequence
  Description of Artificial Sequence: Synthetic oligonucleotide
uuguaguagccccgccgag

SEQ ID NO: 2857566 - RNA, 19 nt, Artificial Sequence
  Description of Artificial Sequence: Synthetic oligonucleotide
caucacaccuacccagaag

SEQ ID NO: 2857567 - RNA, 19 nt, Artificial Sequence
  Description of Artificial Sequence: Synthetic oligonucleotide
agucuuugaugauccugug

SEQ ID NO: 2857568 - RNA, 19 nt, Artificial Sequence
  Description of Artificial Sequence: Synthetic oligonucleotide
cuauacccuggcacacucg

SEQ ID NO: 2857569 - RNA, 19 nt, Artificial Sequence
  Description of Artificial Sequence: Synthetic oligonucleotide
guucuugcaggucuuugga

SEQ ID NO: 2857570 - RNA, 19 nt, Artificial Sequence
  Description of Artificial Sequence: Synthetic oligonucleotide
cauccagccacuggguggg

SEQ ID NO: 2857571 - RNA, 19 nt, Artificial Sequence
  Description of Artificial Sequence: Synthetic oligonucleotide
augcccacucgauucacca

SEQ ID NO: 2857572 - RNA, 19 nt, Artificial Sequence
  Description of Artificial Sequence: Synthetic oligonucleotide
agaaucccagcuccaguga

SEQ ID NO: 2857573 - RNA, 19 nt, Artificial Sequence
  Description of Artificial Sequence: Synthetic oligonucleotide
gugccguuguaguagcccc

SEQ ID NO: 2857574 - RNA, 19 nt, Artificial Sequence
  Description of Artificial Sequence: Synthetic oligonucleotide
cauugcaagaaucccagcu

SEQ ID NO: 2857575 - RNA, 19 nt, Artificial Sequence
  Description of Artificial Sequence: Synthetic oligonucleotide
cuugcaggucuuuggagca

SEQ ID NO: 2857576 - RNA, 19 nt, Artificial Sequence
  Description of Artificial Sequence: Synthetic oligonucleotide
ucuuuggagcauguuucca

SEQ ID NO: 2857577 - RNA, 19 nt, Artificial Sequence
  Description of Artificial Sequence: Synthetic oligonucleotide
ucaccaccuuggaucauga

SEQ ID NO: 2857578 - RNA, 19 nt, Artificial Sequence
  Description of Artificial Sequence: Synthetic oligonucleotide
ucaaacuguuugccauaga

SEQ ID NO: 2857579 - RNA, 19 nt, Artificial Sequence
  Description of Artificial Sequence: Synthetic oligonucleotide
gaacuggcugccauuggug

SEQ ID NO: 2857580 - RNA, 19 nt, Artificial Sequence
  Description of Artificial Sequence: Synthetic oligonucleotide
cugccauuggugucuggcc

SEQ ID NO: 2857581 - RNA, 19 nt, Artificial Sequence
  Description of Artificial Sequence: Synthetic oligonucleotide
uuggugccguuguaguagc

SEQ ID NO: 2857582 - RNA, 19 nt, Artificial Sequence
  Description of Artificial Sequence: Synthetic oligonucleotide
ucgucuacagggcgguccu

SEQ ID NO: 2857583 - RNA, 19 nt, Artificial Sequence
  Description of Artificial Sequence: Synthetic oligonucleotide
uccaccaugcccacucgau

SEQ ID NO: 2857584 - RNA, 19 nt, Artificial Sequence
  Description of Artificial Sequence: Synthetic oligonucleotide
gaucuucacaucgucuaca

SEQ ID NO: 2857585 - RNA, 19 nt, Artificial Sequence
  Description of Artificial Sequence: Synthetic oligonucleotide
caaacuguuugccauagau

SEQ ID NO: 2857586 - RNA, 19 nt, Artificial Sequence
  Description of Artificial Sequence: Synthetic oligonucleotide
guuuccaguacagcuccag

SEQ ID NO: 2857587 - RNA, 19 nt, Artificial Sequence
  Description of Artificial Sequence: Synthetic oligonucleotide
ggucacgaagaacuggcug

SEQ ID NO: 2857588 - RNA, 19 nt, Artificial Sequence
  Description of Artificial Sequence: Synthetic oligonucleotide
cuccagugaacuucagguc

SEQ ID NO: 2857589 - RNA, 19 nt, Artificial Sequence
  Description of Artificial Sequence: Synthetic oligonucleotide
caacucugcaaaguucuug

SEQ ID NO: 2857590 - RNA, 19 nt, Artificial Sequence
  Description of Artificial Sequence: Synthetic oligonucleotide
augauccuguggaauuugg

SEQ ID NO: 2857591 - RNA, 19 nt, Artificial Sequence
  Description of Artificial Sequence: Synthetic oligonucleotide
gacguugggcggcugccag

SEQ ID NO: 2857592 - RNA, 19 nt, Artificial Sequence
  Description of Artificial Sequence: Synthetic oligonucleotide
acgaagaacuggcugccau

SEQ ID NO: 2857593 - RNA, 19 nt, Artificial Sequence
  Description of Artificial Sequence: Synthetic oligonucleotide
gucuacagggcgguccugg

SEQ ID NO: 2857594 - RNA, 19 nt, Artificial Sequence
  Description of Artificial Sequence: Synthetic oligonucleotide
cuacccagaaggguacgcc

SEQ ID NO: 2857595 - RNA, 19 nt, Artificial Sequence
  Description of Artificial Sequence: Synthetic oligonucleotide
agccaacucugcaaaguuc

SEQ ID NO: 2857596 - RNA, 19 nt, Artificial Sequence
  Description of Artificial Sequence: Synthetic oligonucleotide
ggucuuuggagcauguuuc

SEQ ID NO: 2857597 - RNA, 19 nt, Artificial Sequence
  Description of Artificial Sequence: Synthetic oligonucleotide
guagacguugggcggcugc

SEQ ID NO: 2857598 - RNA, 19 nt, Artificial Sequence
  Description of Artificial Sequence: Synthetic oligonucleotide
caugcccacucgauucacc

SEQ ID NO: 2857599 - RNA, 19 nt, Artificial Sequence
  Description of Artificial Sequence: Synthetic oligonucleotide
auuuggugccguuguagua

SEQ ID NO: 2857600 - RNA, 19 nt, Artificial Sequence
  Description of Artificial Sequence: Synthetic oligonucleotide
uggugucuggcccugcauu

SEQ ID NO: 2857601 - RNA, 19 nt, Artificial Sequence
  Description of Artificial Sequence: Synthetic oligonucleotide
acucugcaaaguucuugca

SEQ ID NO: 2857602 - RNA, 19 nt, Artificial Sequence
  Description of Artificial Sequence: Synthetic oligonucleotide
cuccagguagacguugggc

SEQ ID NO: 2857603 - RNA, 19 nt, Artificial Sequence
  Description of Artificial Sequence: Synthetic oligonucleotide
uuccaccaugcccacucga

SEQ ID NO: 2857604 - RNA, 19 nt, Artificial Sequence
  Description of Artificial Sequence: Synthetic oligonucleotide
cgauucaccaucccuauac

SEQ ID NO: 2857605 - RNA, 19 nt, Artificial Sequence
  Description of Artificial Sequence: Synthetic oligonucleotide
gaaucccagcuccagugaa

SEQ ID NO: 2857606 - RNA, 19 nt, Artificial Sequence
  Description of Artificial Sequence: Synthetic oligonucleotide
aggguacgccuuaaggauc

SEQ ID NO: 2857607 - RNA, 19 nt, Artificial Sequence
  Description of Artificial Sequence: Synthetic oligonucleotide
acucgauucaccaucccua

SEQ ID NO: 2857608 - RNA, 19 nt, Artificial Sequence
  Description of Artificial Sequence: Synthetic oligonucleotide
gccauugcaagaaucccag

SEQ ID NO: 2857609 - RNA, 19 nt, Artificial Sequence
  Description of Artificial Sequence: Synthetic oligonucleotide
gcuccagugaacuucaggu

SEQ ID NO: 2857610 - RNA, 19 nt, Artificial Sequence
  Description of Artificial Sequence: Synthetic oligonucleotide
guggaauuuggugccguug

SEQ ID NO: 2857611 - RNA, 19 nt, Artificial Sequence
  Description of Artificial Sequence: Synthetic oligonucleotide
ggagcauguuuccaguaca

SEQ ID NO: 2857612 - RNA, 19 nt, Artificial Sequence
  Description of Artificial Sequence: Synthetic oligonucleotide
gaccuguccccguuggguc

SEQ ID NO: 2857613 - RNA, 19 nt, Artificial Sequence
  Description of Artificial Sequence: Synthetic oligonucleotide
uguuuccaguacagcucca

SEQ ID NO: 2857614 - RNA, 19 nt, Artificial Sequence
  Description of Artificial Sequence: Synthetic oligonucleotide
cuucaggucuggaugaagu

SEQ ID NO: 2857615 - RNA, 19 nt, Artificial Sequence
  Description of Artificial Sequence: Synthetic oligonucleotide
uagacguugggcggcugcc

SEQ ID NO: 2857616 - RNA, 19 nt, Artificial Sequence
  Description of Artificial Sequence: Synthetic oligonucleotide
ugaugauccuguggaauuu

SEQ ID NO: 2857617 - RNA, 19 nt, Artificial Sequence
  Description of Artificial Sequence: Synthetic oligonucleotide
ggugucuggcccugcauug

SEQ ID NO: 2857618 - RNA, 19 nt, Artificial Sequence
  Description of Artificial Sequence: Synthetic oligonucleotide
accaugcccacucgauuca

SEQ ID NO: 2857619 - RNA, 19 nt, Artificial Sequence
  Description of Artificial Sequence: Synthetic oligonucleotide
gcaaaguucuugcaggucu

SEQ ID NO: 2857620 - RNA, 19 nt, Artificial Sequence
  Description of Artificial Sequence: Synthetic oligonucleotide
uugggucaccaccuuggau

SEQ ID NO: 2857621 - RNA, 19 nt, Artificial Sequence
  Description of Artificial Sequence: Synthetic oligonucleotide
gcauguuuccaguacagcu

SEQ ID NO: 2857622 - RNA, 19 nt, Artificial Sequence
  Description of Artificial Sequence: Synthetic oligonucleotide
gucuccagguagacguugg

SEQ ID NO: 2857623 - RNA, 19 nt, Artificial Sequence
  Description of Artificial Sequence: Synthetic oligonucleotide
uuggagcauguuuccagua

SEQ ID NO: 2857624 - RNA, 19 nt, Artificial Sequence
  Description of Artificial Sequence: Synthetic oligonucleotide
aguucaucuucaaacuguu

SEQ ID NO: 2857625 - RNA, 19 nt, Artificial Sequence
  Description of Artificial Sequence: Synthetic oligonucleotide
caccaucccuauacccugg

SEQ ID NO: 2857626 - RNA, 19 nt, Artificial Sequence
  Description of Artificial Sequence: Synthetic oligonucleotide
aucccagcuccagugaacu

SEQ ID NO: 2857627 - RNA, 19 nt, Artificial Sequence
  Description of Artificial Sequence: Synthetic oligonucleotide
caccuacccagaaggguac

SEQ ID NO: 2857628 - RNA, 19 nt, Artificial Sequence
  Description of Artificial Sequence: Synthetic oligonucleotide
gucaccaccuuggaucaug

SEQ ID NO: 2857629 - RNA, 19 nt, Artificial Sequence
  Description of Artificial Sequence: Synthetic oligonucleotide
ugcaaaguucuugcagguc

SEQ ID NO: 2857630 - RNA, 19 nt, Artificial Sequence
  Description of Artificial Sequence: Synthetic oligonucleotide
ccagguagacguugggcgg

SEQ ID NO: 2857631 - RNA, 19 nt, Artificial Sequence
  Description of Artificial Sequence: Synthetic oligonucleotide
gguccugggaguucguuuc

SEQ ID NO: 2857632 - RNA, 19 nt, Artificial Sequence
  Description of Artificial Sequence: Synthetic oligonucleotide
cagaaggguacgccuuaag

SEQ ID NO: 2857633 - RNA, 19 nt, Artificial Sequence
  Description of Artificial Sequence: Synthetic oligonucleotide
auacccuggcacacucggc

SEQ ID NO: 2857634 - RNA, 19 nt, Artificial Sequence
  Description of Artificial Sequence: Synthetic oligonucleotide
ccauccagccacugggugg

SEQ ID NO: 2857635 - RNA, 19 nt, Artificial Sequence
  Description of Artificial Sequence: Synthetic oligonucleotide
ugccauccagccacugggu

SEQ ID NO: 2857636 - RNA, 19 nt, Artificial Sequence
  Description of Artificial Sequence: Synthetic oligonucleotide
acaccuacccagaagggua

SEQ ID NO: 2857637 - RNA, 19 nt, Artificial Sequence
  Description of Artificial Sequence: Synthetic oligonucleotide
uguggaauuuggugccguu

SEQ ID NO: 2857638 - RNA, 19 nt, Artificial Sequence
  Description of Artificial Sequence: Synthetic oligonucleotide
cguugggucaccaccuugg

SEQ ID NO: 2857639 - RNA, 19 nt, Artificial Sequence
  Description of Artificial Sequence: Synthetic oligonucleotide
ggaucuucacaucgucuac

SEQ ID NO: 2857640 - RNA, 19 nt, Artificial Sequence
  Description of Artificial Sequence: Synthetic oligonucleotide
cuuugaugauccuguggaa

SEQ ID NO: 2857641 - RNA, 19 nt, Artificial Sequence
  Description of Artificial Sequence: Synthetic oligonucleotide
caguacagcuccagcacga

SEQ ID NO: 2857642 - RNA, 19 nt, Artificial Sequence
  Description of Artificial Sequence: Synthetic oligonucleotide
acaucgucuacagggcggu

SEQ ID NO: 2857643 - RNA, 19 nt, Artificial Sequence
  Description of Artificial Sequence: Synthetic oligonucleotide
uagaagcgccaccgcgacc

SEQ ID NO: 2857644 - RNA, 19 nt, Artificial Sequence
  Description of Artificial Sequence: Synthetic oligonucleotide
cuucaaacuguuugccaua

SEQ ID NO: 2857645 - RNA, 19 nt, Artificial Sequence
  Description of Artificial Sequence: Synthetic oligonucleotide
gccuuaaggaucuucacau

SEQ ID NO: 2857646 - RNA, 19 nt, Artificial Sequence
  Description of Artificial Sequence: Synthetic oligonucleotide
acguugggcggcugccagg

SEQ ID NO: 2857647 - RNA, 19 nt, Artificial Sequence
  Description of Artificial Sequence: Synthetic oligonucleotide
agccccgccgagccaacuc

SEQ ID NO: 2857648 - RNA, 19 nt, Artificial Sequence
  Description of Artificial Sequence: Synthetic oligonucleotide
cagugaacuucaggucugg

SEQ ID NO: 2857649 - RNA, 19 nt, Artificial Sequence
  Description of Artificial Sequence: Synthetic oligonucleotide
acuguuugccauagauaga

SEQ ID NO: 2857650 - RNA, 19 nt, Artificial Sequence
  Description of Artificial Sequence: Synthetic oligonucleotide
ggugccguuguaguagccc

SEQ ID NO: 2857651 - RNA, 19 nt, Artificial Sequence
  Description of Artificial Sequence: Synthetic oligonucleotide
gugucuggcccugcauugg

SEQ ID NO: 2857652 - RNA, 19 nt, Artificial Sequence
  Description of Artificial Sequence: Synthetic oligonucleotide
aacuucaggucuggaugaa

SEQ ID NO: 2857653 - RNA, 19 nt, Artificial Sequence
  Description of Artificial Sequence: Synthetic oligonucleotide
gcaagaaucccagcuccag

SEQ ID NO: 2857654 - RNA, 19 nt, Artificial Sequence
  Description of Artificial Sequence: Synthetic oligonucleotide
ucgauucaccaucccuaua

SEQ ID NO: 2857655 - RNA, 19 nt, Artificial Sequence
  Description of Artificial Sequence: Synthetic oligonucleotide
gaugauccccaugcugguc

SEQ ID NO: 2857656 - RNA, 19 nt, Artificial Sequence
  Description of Artificial Sequence: Synthetic oligonucleotide
cguuguaguagccccgccg

SEQ ID NO: 2857657 - RNA, 19 nt, Artificial Sequence
  Description of Artificial Sequence: Synthetic oligonucleotide
agcaucacaccuacccaga

SEQ ID NO: 2857658 - RNA, 19 nt, Artificial Sequence
  Description of Artificial Sequence: Synthetic oligonucleotide
accuguccccguuggguca

SEQ ID NO: 2857659 - RNA, 19 nt, Artificial Sequence
  Description of Artificial Sequence: Synthetic oligonucleotide
uggugccguuguaguagcc

SEQ ID NO: 2857660 - RNA, 19 nt, Artificial Sequence
  Description of Artificial Sequence: Synthetic oligonucleotide
ccugcauuggccauugcaa

SEQ ID NO: 2857661 - RNA, 19 nt, Artificial Sequence
  Description of Artificial Sequence: Synthetic oligonucleotide
aguagccccgccgagccaa

SEQ ID NO: 2857662 - RNA, 19 nt, Artificial Sequence
  Description of Artificial Sequence: Synthetic oligonucleotide
guugggucaccaccuugga

SEQ ID NO: 2857663 - RNA, 19 nt, Artificial Sequence
  Description of Artificial Sequence: Synthetic oligonucleotide
augguauguuugccaucca

SEQ ID NO: 2857664 - RNA, 19 nt, Artificial Sequence
  Description of Artificial Sequence: Synthetic oligonucleotide
ggaguucguuuccaccaug

SEQ ID NO: 2857665 - RNA, 19 nt, Artificial Sequence
  Description of Artificial Sequence: Synthetic oligonucleotide
uccccaugcuggucuccag

SEQ ID NO: 2857666 - RNA, 19 nt, Artificial Sequence
  Description of Artificial Sequence: Synthetic oligonucleotide
ccagugaacuucaggucug

SEQ ID NO: 2857667 - RNA, 19 nt, Artificial Sequence
  Description of Artificial Sequence: Synthetic oligonucleotide
guccugggaguucguuucc

SEQ ID NO: 2857668 - RNA, 19 nt, Artificial Sequence
  Description of Artificial Sequence: Synthetic oligonucleotide
ccauagauagaagcgccac

SEQ ID NO: 2857669 - RNA, 19 nt, Artificial Sequence
  Description of Artificial Sequence: Synthetic oligonucleotide
ugauccccaugcuggucuc

SEQ ID NO: 2857670 - RNA, 19 nt, Artificial Sequence
  Description of Artificial Sequence: Synthetic oligonucleotide
cccacucgauucaccaucc

SEQ ID NO: 2857671 - RNA, 19 nt, Artificial Sequence
  Description of Artificial Sequence: Synthetic oligonucleotide
accuacccagaaggguacg

SEQ ID NO: 2857672 - RNA, 19 nt, Artificial Sequence
  Description of Artificial Sequence: Synthetic oligonucleotide
agugaacuucaggucugga

SEQ ID NO: 2857673 - RNA, 19 nt, Artificial Sequence
  Description of Artificial Sequence: Synthetic oligonucleotide
gcgagggucacgaagaacu

SEQ ID NO: 2857674 - RNA, 19 nt, Artificial Sequence
  Description of Artificial Sequence: Synthetic oligonucleotide
ucguuuccaccaugcccac

SEQ ID NO: 2857675 - RNA, 19 nt, Artificial Sequence
  Description of Artificial Sequence: Synthetic oligonucleotide
gagccaacucugcaaaguu

SEQ ID NO: 2857676 - RNA, 19 nt, Artificial Sequence
  Description of Artificial Sequence: Synthetic oligonucleotide
ugcccacucgauucaccau

SEQ ID NO: 2857677 - RNA, 19 nt, Artificial Sequence
  Description of Artificial Sequence: Synthetic oligonucleotide
gcccacucgauucaccauc

SEQ ID NO: 2857678 - RNA, 19 nt, Artificial Sequence
  Description of Artificial Sequence: Synthetic oligonucleotide
ccuauacccuggcacacuc

SEQ ID NO: 2857679 - RNA, 19 nt, Artificial Sequence
  Description of Artificial Sequence: Synthetic oligonucleotide
gggucaccaccuuggauca

SEQ ID NO: 2857680 - RNA, 19 nt, Artificial Sequence
  Description of Artificial Sequence: Synthetic oligonucleotide
ggccauugcaagaauccca

SEQ ID NO: 2857681 - RNA, 19 nt, Artificial Sequence
  Description of Artificial Sequence: Synthetic oligonucleotide
ugcuggucuccagguagac

SEQ ID NO: 2857682 - RNA, 19 nt, Artificial Sequence
  Description of Artificial Sequence: Synthetic oligonucleotide
ccuuaaggaucuucacauc

SEQ ID NO: 2857683 - RNA, 19 nt, Artificial Sequence
  Description of Artificial Sequence: Synthetic oligonucleotide
gauccccaugcuggucucc

SEQ ID NO: 2857684 - RNA, 19 nt, Artificial Sequence
  Description of Artificial Sequence: Synthetic oligonucleotide
cacucgauucaccaucccu

SEQ ID NO: 2857685 - RNA, 19 nt, Artificial Sequence
  Description of Artificial Sequence: Synthetic oligonucleotide
uaguagccccgccgagcca

SEQ ID NO: 2857686 - RNA, 19 nt, Artificial Sequence
  Description of Artificial Sequence: Synthetic oligonucleotide
gcggcugccaggugucagg

SEQ ID NO: 2857687 - RNA, 19 nt, Artificial Sequence
  Description of Artificial Sequence: Synthetic oligonucleotide
gccaccgcgaccugucccc

SEQ ID NO: 2857688 - RNA, 19 nt, Artificial Sequence
  Description of Artificial Sequence: Synthetic oligonucleotide
guacgccuuaaggaucuuc

SEQ ID NO: 2857689 - RNA, 19 nt, Artificial Sequence
  Description of Artificial Sequence: Synthetic oligonucleotide
cugcaaaguucuugcaggu

SEQ ID NO: 2857690 - RNA, 19 nt, Artificial Sequence
  Description of Artificial Sequence: Synthetic oligonucleotide
aguacagcuccagcacgau

SEQ ID NO: 2857691 - RNA, 19 nt, Artificial Sequence
  Description of Artificial Sequence: Synthetic oligonucleotide
gcuggucuccagguagacg

SEQ ID NO: 2857692 - RNA, 19 nt, Artificial Sequence
  Description of Artificial Sequence: Synthetic oligonucleotide
auccccaugcuggucucca

SEQ ID NO: 2857693 - RNA, 19 nt, Artificial Sequence
  Description of Artificial Sequence: Synthetic oligonucleotide
caagaaucccagcuccagu

SEQ ID NO: 2857694 - RNA, 19 nt, Artificial Sequence
  Description of Artificial Sequence: Synthetic oligonucleotide
acagggcgguccugggagu

SEQ ID NO: 2857695 - RNA, 19 nt, Artificial Sequence
  Description of Artificial Sequence: Synthetic oligonucleotide
uggucuccagguagacguu

SEQ ID NO: 2857696 - RNA, 19 nt, Artificial Sequence
  Description of Artificial Sequence: Synthetic oligonucleotide
ggaugaaguucaucuucaa

SEQ ID NO: 2857697 - RNA, 19 nt, Artificial Sequence
  Description of Artificial Sequence: Synthetic oligonucleotide
gccauccagccacugggug

SEQ ID NO: 2857698 - RNA, 19 nt, Artificial Sequence
  Description of Artificial Sequence: Synthetic oligonucleotide
cagcacgaugauccccaug

SEQ ID NO: 2857699 - RNA, 19 nt, Artificial Sequence
  Description of Artificial Sequence: Synthetic oligonucleotide
gccaacucugcaaaguucu

SEQ ID NO: 2857700 - RNA, 19 nt, Artificial Sequence
  Description of Artificial Sequence: Synthetic oligonucleotide
ggucuccagguagacguug

SEQ ID NO: 2857701 - RNA, 19 nt, Artificial Sequence
  Description of Artificial Sequence: Synthetic oligonucleotide
cccagcuccagugaacuuc

SEQ ID NO: 2857702 - RNA, 19 nt, Artificial Sequence
  Description of Artificial Sequence: Synthetic oligonucleotide
ccccaugcuggucuccagg

SEQ ID NO: 2857703 - RNA, 19 nt, Artificial Sequence
  Description of Artificial Sequence: Synthetic oligonucleotide
ccauugcaagaaucccagc

SEQ ID NO: 2857704 - RNA, 19 nt, Artificial Sequence
  Description of Artificial Sequence: Synthetic oligonucleotide
gcauuggccauugcaagaa

SEQ ID NO: 2857705 - RNA, 19 nt, Artificial Sequence
  Description of Artificial Sequence: Synthetic oligonucleotide
cucgauucaccaucccuau

SEQ ID NO: 2857706 - RNA, 19 nt, Artificial Sequence
  Description of Artificial Sequence: Synthetic oligonucleotide
augcuggucuccagguaga

SEQ ID NO: 2857707 - RNA, 19 nt, Artificial Sequence
  Description of Artificial Sequence: Synthetic oligonucleotide
ggggcgagggucacgaaga

SEQ ID NO: 2857708 - RNA, 19 nt, Artificial Sequence
  Description of Artificial Sequence: Synthetic oligonucleotide
uugcaggucuuuggagcau

SEQ ID NO: 2857709 - RNA, 19 nt, Artificial Sequence
  Description of Artificial Sequence: Synthetic oligonucleotide
agacguugggcggcugcca

SEQ ID NO: 2857710 - RNA, 19 nt, Artificial Sequence
  Description of Artificial Sequence: Synthetic oligonucleotide
gaagcgccaccgcgaccug

SEQ ID NO: 2857711 - RNA, 19 nt, Artificial Sequence
  Description of Artificial Sequence: Synthetic oligonucleotide
agggcgguccugggaguuc

SEQ ID NO: 2857712 - RNA, 19 nt, Artificial Sequence
  Description of Artificial Sequence: Synthetic oligonucleotide
ccagcuccagugaacuuca

SEQ ID NO: 2857713 - RNA, 19 nt, Artificial Sequence
  Description of Artificial Sequence: Synthetic oligonucleotide
uguccccguugggucacca

SEQ ID NO: 2857714 - RNA, 19 nt, Artificial Sequence
  Description of Artificial Sequence: Synthetic oligonucleotide
ggaauuuggugccguugua

SEQ ID NO: 2857715 - RNA, 19 nt, Artificial Sequence
  Description of Artificial Sequence: Synthetic oligonucleotide
gggcgguccugggaguucg

SEQ ID NO: 2857716 - RNA, 19 nt, Artificial Sequence
  Description of Artificial Sequence: Synthetic oligonucleotide
gcuccagcacgaugauccc

SEQ ID NO: 2857717 - RNA, 19 nt, Artificial Sequence
  Description of Artificial Sequence: Synthetic oligonucleotide
accgcgaccuguccccguu

SEQ ID NO: 2857718 - RNA, 19 nt, Artificial Sequence
  Description of Artificial Sequence: Synthetic oligonucleotide
cacaccuacccagaagggu

SEQ ID NO: 2857719 - RNA, 19 nt, Artificial Sequence
  Description of Artificial Sequence: Synthetic oligonucleotide
gccgagccaacucugcaaa

SEQ ID NO: 2857720 - RNA, 19 nt, Artificial Sequence
  Description of Artificial Sequence: Synthetic oligonucleotide
agguagacguugggcggcu

SEQ ID NO: 2857721 - RNA, 19 nt, Artificial Sequence
  Description of Artificial Sequence: Synthetic oligonucleotide
ccuacccagaaggguacgc

SEQ ID NO: 2857722 - RNA, 19 nt, Artificial Sequence
  Description of Artificial Sequence: Synthetic oligonucleotide
cccugcauuggccauugca

SEQ ID NO: 2857723 - RNA, 19 nt, Artificial Sequence
  Description of Artificial Sequence: Synthetic oligonucleotide
ccuguggaauuuggugccg

SEQ ID NO: 2857724 - RNA, 19 nt, Artificial Sequence
  Description of Artificial Sequence: Synthetic oligonucleotide
ggcugccaggugucagggg

SEQ ID NO: 2857725 - RNA, 19 nt, Artificial Sequence
  Description of Artificial Sequence: Synthetic oligonucleotide
gccauagauagaagcgcca

SEQ ID NO: 2857726 - RNA, 19 nt, Artificial Sequence
  Description of Artificial Sequence: Synthetic oligonucleotide
acccagaaggguacgccuu

SEQ ID NO: 2857727 - RNA, 19 nt, Artificial Sequence
  Description of Artificial Sequence: Synthetic oligonucleotide
cagcuccagugaacuucag

SEQ ID NO: 2857728 - RNA, 19 nt, Artificial Sequence
  Description of Artificial Sequence: Synthetic oligonucleotide
ucccagcuccagugaacuu

SEQ ID NO: 2857729 - RNA, 19 nt, Artificial Sequence
  Description of Artificial Sequence: Synthetic oligonucleotide
cuggcugccauuggugucu

SEQ ID NO: 2857730 - RNA, 19 nt, Artificial Sequence
  Description of Artificial Sequence: Synthetic oligonucleotide
guccccguugggucaccac

SEQ ID NO: 2857731 - RNA, 19 nt, Artificial Sequence
  Description of Artificial Sequence: Synthetic oligonucleotide
gccguuguaguagccccgc

SEQ ID NO: 2857732 - RNA, 19 nt, Artificial Sequence
  Description of Artificial Sequence: Synthetic oligonucleotide
gcgaccuguccccguuggg

SEQ ID NO: 2857733 - RNA, 19 nt, Artificial Sequence
  Description of Artificial Sequence: Synthetic oligonucleotide
ggucuggaugaaguucauc

SEQ ID NO: 2857734 - RNA, 19 nt, Artificial Sequence
  Description of Artificial Sequence: Synthetic oligonucleotide
ccgagccaacucugcaaag

SEQ ID NO: 2857735 - RNA, 19 nt, Artificial Sequence
  Description of Artificial Sequence: Synthetic oligonucleotide
cgccuuaaggaucuucaca

SEQ ID NO: 2857736 - RNA, 19 nt, Artificial Sequence
  Description of Artificial Sequence: Synthetic oligonucleotide
gcaucacaccuacccagaa

SEQ ID NO: 2857737 - RNA, 19 nt, Artificial Sequence
  Description of Artificial Sequence: Synthetic oligonucleotide
guugggcggcugccaggug

SEQ ID NO: 2857738 - RNA, 19 nt, Artificial Sequence
  Description of Artificial Sequence: Synthetic oligonucleotide
cgagggucacgaagaacug

SEQ ID NO: 2857739 - RNA, 19 nt, Artificial Sequence
  Description of Artificial Sequence: Synthetic oligonucleotide
ggcgagggucacgaagaac

SEQ ID NO: 2857740 - RNA, 19 nt, Artificial Sequence
  Description of Artificial Sequence: Synthetic oligonucleotide
ggcccugcauuggccauug

SEQ ID NO: 2857741 - RNA, 19 nt, Artificial Sequence
  Description of Artificial Sequence: Synthetic oligonucleotide
cagcuccagcacgaugauc

SEQ ID NO: 2857742 - RNA, 19 nt, Artificial Sequence
  Description of Artificial Sequence: Synthetic oligonucleotide
cacgaagaacuggcugcca

SEQ ID NO: 2857743 - RNA, 19 nt, Artificial Sequence
  Description of Artificial Sequence: Synthetic oligonucleotide
ccacucgauucaccauccc

SEQ ID NO: 2857744 - RNA, 19 nt, Artificial Sequence
  Description of Artificial Sequence: Synthetic oligonucleotide
ggguacgccuuaaggaucu

SEQ ID NO: 2857745 - RNA, 19 nt, Artificial Sequence
  Description of Artificial Sequence: Synthetic oligonucleotide
cccgccgagccaacucugc

SEQ ID NO: 2857746 - RNA, 19 nt, Artificial Sequence
  Description of Artificial Sequence: Synthetic oligonucleotide
uggcccugcauuggccauu

SEQ ID NO: 2857747 - RNA, 19 nt, Artificial Sequence
  Description of Artificial Sequence: Synthetic oligonucleotide
aggucuggaugaaguucau

SEQ ID NO: 2857748 - RNA, 19 nt, Artificial Sequence
  Description of Artificial Sequence: Synthetic oligonucleotide
ccguugggucaccaccuug

SEQ ID NO: 2857749 - RNA, 19 nt, Artificial Sequence
  Description of Artificial Sequence: Synthetic oligonucleotide
gccauuggugucuggcccu

SEQ ID NO: 2857750 - RNA, 19 nt, Artificial Sequence
  Description of Artificial Sequence: Synthetic oligonucleotide
caucgucuacagggcgguc

SEQ ID NO: 2857751 - RNA, 19 nt, Artificial Sequence
  Description of Artificial Sequence: Synthetic oligonucleotide
cgcgaccuguccccguugg

SEQ ID NO: 2857752 - RNA, 19 nt, Artificial Sequence
  Description of Artificial Sequence: Synthetic oligonucleotide
ggcugccauuggugucugg

SEQ ID NO: 2857753 - RNA, 19 nt, Artificial Sequence
  Description of Artificial Sequence: Synthetic oligonucleotide
caccaccuuggaucaugaa

SEQ ID NO: 2857754 - RNA, 19 nt, Artificial Sequence
  Description of Artificial Sequence: Synthetic oligonucleotide
cauuggccauugcaagaau

SEQ ID NO: 2857755 - RNA, 19 nt, Artificial Sequence
  Description of Artificial Sequence: Synthetic oligonucleotide
guucaucuucaaacuguuu

SEQ ID NO: 2857756 - RNA, 19 nt, Artificial Sequence
  Description of Artificial Sequence: Synthetic oligonucleotide
ccguuguaguagccccgcc

SEQ ID NO: 2857757 - RNA, 19 nt, Artificial Sequence
  Description of Artificial Sequence: Synthetic oligonucleotide
cuguggaauuuggugccgu

SEQ ID NO: 2857758 - RNA, 19 nt, Artificial Sequence
  Description of Artificial Sequence: Synthetic oligonucleotide
uagccccgccgagccaacu

SEQ ID NO: 2857759 - RNA, 19 nt, Artificial Sequence
  Description of Artificial Sequence: Synthetic oligonucleotide
gguagacguugggcggcug

SEQ ID NO: 2857760 - RNA, 19 nt, Artificial Sequence
  Description of Artificial Sequence: Synthetic oligonucleotide
gggaguucguuuccaccau

SEQ ID NO: 2857761 - RNA, 19 nt, Artificial Sequence
  Description of Artificial Sequence: Synthetic oligonucleotide
ccaucccuauacccuggca

SEQ ID NO: 2857762 - RNA, 19 nt, Artificial Sequence
  Description of Artificial Sequence: Synthetic oligonucleotide
ccaugcccacucgauucac

SEQ ID NO: 2857763 - RNA, 19 nt, Artificial Sequence
  Description of Artificial Sequence: Synthetic oligonucleotide
cuggcacacucggccaaaa

SEQ ID NO: 2857764 - RNA, 19 nt, Artificial Sequence
  Description of Artificial Sequence: Synthetic oligonucleotide
cuguccccguugggucacc

SEQ ID NO: 2857765 - RNA, 19 nt, Artificial Sequence
  Description of Artificial Sequence: Synthetic oligonucleotide
guagccccgccgagccaac

SEQ ID NO: 2857766 - RNA, 19 nt, Artificial Sequence
  Description of Artificial Sequence: Synthetic oligonucleotide
cccaugcuggucuccaggu

SEQ ID NO: 2857767 - RNA, 19 nt, Artificial Sequence
  Description of Artificial Sequence: Synthetic oligonucleotide
gggcgagggucacgaagaa

SEQ ID NO: 2857768 - RNA, 19 nt, Artificial Sequence
  Description of Artificial Sequence: Synthetic oligonucleotide
ccuguccccguugggucac

SEQ ID NO: 2857769 - RNA, 19 nt, Artificial Sequence
  Description of Artificial Sequence: Synthetic oligonucleotide
gcacgaugauccccaugcu

SEQ ID NO: 2857770 - RNA, 19 nt, Artificial Sequence
  Description of Artificial Sequence: Synthetic oligonucleotide
ccccgccgagccaacucug

SEQ ID NO: 2857771 - RNA, 19 nt, Artificial Sequence
  Description of Artificial Sequence: Synthetic oligonucleotide
cccagaaggguacgccuua

SEQ ID NO: 2857772 - RNA, 19 nt, Artificial Sequence
  Description of Artificial Sequence: Synthetic oligonucleotide
cuggcccugcauuggccau

SEQ ID NO: 2857773 - RNA, 19 nt, Artificial Sequence
  Description of Artificial Sequence: Synthetic oligonucleotide
ccaccgcgaccuguccccg

SEQ ID NO: 2857774 - RNA, 19 nt, Artificial Sequence
  Description of Artificial Sequence: Synthetic oligonucleotide
gggucacgaagaacuggcu

SEQ ID NO: 2857775 - RNA, 19 nt, Artificial Sequence
  Description of Artificial Sequence: Synthetic oligonucleotide
gccccgccgagccaacucu

SEQ ID NO: 2857776 - RNA, 19 nt, Artificial Sequence
  Description of Artificial Sequence: Synthetic oligonucleotide
ccccguugggucaccaccu

SEQ ID NO: 2857777 - RNA, 19 nt, Artificial Sequence
  Description of Artificial Sequence: Synthetic oligonucleotide
ccgccgagccaacucugca

SEQ ID NO: 2857778 - RNA, 19 nt, Artificial Sequence
  Description of Artificial Sequence: Synthetic oligonucleotide
ccaugcuggucuccaggua

SEQ ID NO: 2857779 - RNA, 19 nt, Artificial Sequence
  Description of Artificial Sequence: Synthetic oligonucleotide
cgagccaacucugcaaagu

SEQ ID NO: 2857780 - RNA, 19 nt, Artificial Sequence
  Description of Artificial Sequence: Synthetic oligonucleotide
cgccgagccaacucugcaa

SEQ ID NO: 2857781 - RNA, 19 nt, Artificial Sequence
  Description of Artificial Sequence: Synthetic oligonucleotide
ccagaaggguacgccuuaa

SEQ ID NO: 2857782 - RNA, 19 nt, Artificial Sequence
  Description of Artificial Sequence: Synthetic oligonucleotide
caggucuuuggagcauguu

SEQ ID NO: 2857783 - RNA, 19 nt, Artificial Sequence
  Description of Artificial Sequence: Synthetic oligonucleotide
ccgcgaccuguccccguug

SEQ ID NO: 2857784 - RNA, 19 nt, Artificial Sequence
  Description of Artificial Sequence: Synthetic oligonucleotide
gcccugcauuggccauugc

SEQ ID NO: 2857785 - RNA, 19 nt, Artificial Sequence
  Description of Artificial Sequence: Synthetic oligonucleotide
cgaugauccccaugcuggu

SEQ ID NO: 2857786 - RNA, 19 nt, Artificial Sequence
  Description of Artificial Sequence: Synthetic oligonucleotide
ccaacucugcaaaguucuu

SEQ ID NO: 2857787 - RNA, 19 nt, Artificial Sequence
  Description of Artificial Sequence: Synthetic oligonucleotide
ccaccaugcccacucgauu

SEQ ID NO: 2857788 - RNA, 19 nt, Artificial Sequence
  Description of Artificial Sequence: Synthetic oligonucleotide
caccgcgaccuguccccgu

SEQ ID NO: 2857789 - RNA, 19 nt, Artificial Sequence
  Description of Artificial Sequence: Synthetic oligonucleotide
ccuggcacacucggccaaa

SEQ ID NO: 2857790 - RNA, 19 nt, Artificial Sequence
  Description of Artificial Sequence: Synthetic oligonucleotide
cgaccuguccccguugggu

SEQ ID NO: 2857791 - RNA, 19 nt, Artificial Sequence
  Description of Artificial Sequence: Synthetic oligonucleotide
cagggcgguccugggaguu

SEQ ID NO: 2857792 - RNA, 19 nt, Artificial Sequence
  Description of Artificial Sequence: Synthetic oligonucleotide
cccuauacccuggcacacu

SEQ ID NO: 2857793 - RNA, 19 nt, Artificial Sequence
  Description of Artificial Sequence: Synthetic oligonucleotide
cgucuacagggcgguccug

SEQ ID NO: 2857794 - RNA, 19 nt, Artificial Sequence
  Description of Artificial Sequence: Synthetic oligonucleotide
gggcggcugccagguguca

SEQ ID NO: 2857795 - RNA, 19 nt, Artificial Sequence
  Description of Artificial Sequence: Synthetic oligonucleotide
cgguccugggaguucguuu

SEQ ID NO: 2857796 - RNA, 19 nt, Artificial Sequence
  Description of Artificial Sequence: Synthetic oligonucleotide
ccagcacgaugauccccau

SEQ ID NO: 2857797 - RNA, 19 nt, Artificial Sequence
  Description of Artificial Sequence: Synthetic oligonucleotide
ggucaccaccuuggaucau

SEQ ID NO: 2857798 - RNA, 19 nt, Artificial Sequence
  Description of Artificial Sequence: Synthetic oligonucleotide
gguacgccuuaaggaucuu

SEQ ID NO: 2857799 - RNA, 19 nt, Artificial Sequence
  Description of Artificial Sequence: Synthetic oligonucleotide
gcgguccugggaguucguu

SEQ ID NO: 2857800 - RNA, 19 nt, Artificial Sequence
  Description of Artificial Sequence: Synthetic oligonucleotide
ggcgguccugggaguucgu

SEQ ID NO: 2857801 - RNA, 19 nt, Artificial Sequence
  Description of Artificial Sequence: Synthetic oligonucleotide
cccguugggucaccaccuu

SEQ ID NO: 2857802 - RNA, 19 nt, Artificial Sequence
  Description of Artificial Sequence: Synthetic oligonucleotide
cguuuccaccaugcccacu

SEQ ID NO: 2857803 - RNA, 19 nt, Artificial Sequence
  Description of Artificial Sequence: Synthetic oligonucleotide
aaaaguaaaacauggauuc

SEQ ID NO: 2857804 - RNA, 19 nt, Artificial Sequence
  Description of Artificial Sequence: Synthetic oligonucleotide
aauuuaacaacucauaaug

SEQ ID NO: 2857805 - RNA, 19 nt, Artificial Sequence
  Description of Artificial Sequence: Synthetic oligonucleotide
aauuuguucauccuuaaac

SEQ ID NO: 2857806 - RNA, 19 nt, Artificial Sequence
  Description of Artificial Sequence: Synthetic oligonucleotide
aaugaugacacacaguuag

SEQ ID NO: 2857807 - RNA, 19 nt, Artificial Sequence
  Description of Artificial Sequence: Synthetic oligonucleotide
uuuaacaacucauaaugcg

SEQ ID NO: 2857808 - RNA, 19 nt, Artificial Sequence
  Description of Artificial Sequence: Synthetic oligonucleotide
uugaaauucaguuauauaa

SEQ ID NO: 2857809 - RNA, 19 nt, Artificial Sequence
  Description of Artificial Sequence: Synthetic oligonucleotide
aaagaaagauaguauuuac

SEQ ID NO: 2857810 - RNA, 19 nt, Artificial Sequence
  Description of Artificial Sequence: Synthetic oligonucleotide
aaagauaguauuuacaguu

SEQ ID NO: 2857811 - RNA, 19 nt, Artificial Sequence
  Description of Artificial Sequence: Synthetic oligonucleotide
agaaagauaguauuuacag

SEQ ID NO: 2857812 - RNA, 19 nt, Artificial Sequence
  Description of Artificial Sequence: Synthetic oligonucleotide
aauaucgugacucgcaaag

SEQ ID NO: 2857813 - RNA, 19 nt, Artificial Sequence
  Description of Artificial Sequence: Synthetic oligonucleotide
aagagaauccaacaaaugu

SEQ ID NO: 2857814 - RNA, 19 nt, Artificial Sequence
  Description of Artificial Sequence: Synthetic oligonucleotide
ugaaaaguaauuuaacaac

SEQ ID NO: 2857815 - RNA, 19 nt, Artificial Sequence
  Description of Artificial Sequence: Synthetic oligonucleotide
acaaauguuuacaaaaugc

SEQ ID NO: 2857816 - RNA, 19 nt, Artificial Sequence
  Description of Artificial Sequence: Synthetic oligonucleotide
aaaguaauuuaacaacuca

SEQ ID NO: 2857817 - RNA, 19 nt, Artificial Sequence
  Description of Artificial Sequence: Synthetic oligonucleotide
uaaaacauggauucaaaga

SEQ ID NO: 2857818 - RNA, 19 nt, Artificial Sequence
  Description of Artificial Sequence: Synthetic oligonucleotide
aaauguuuacaaaaugccg

SEQ ID NO: 2857819 - RNA, 19 nt, Artificial Sequence
  Description of Artificial Sequence: Synthetic oligonucleotide
caaauguuuacaaaaugcc

SEQ ID NO: 2857820 - RNA, 19 nt, Artificial Sequence
  Description of Artificial Sequence: Synthetic oligonucleotide
uuuacaguucuucaguccc

SEQ ID NO: 2857821 - RNA, 19 nt, Artificial Sequence
  Description of Artificial Sequence: Synthetic oligonucleotide
ugcaauuccaaauauggca

SEQ ID NO: 2857822 - RNA, 19 nt, Artificial Sequence
  Description of Artificial Sequence: Synthetic oligonucleotide
aaugaauucugacaccuca

SEQ ID NO: 2857823 - RNA, 19 nt, Artificial Sequence
  Description of Artificial Sequence: Synthetic oligonucleotide
aacaaauguuuacaaaaug

SEQ ID NO: 2857824 - RNA, 19 nt, Artificial Sequence
  Description of Artificial Sequence: Synthetic oligonucleotide
auuuggaaacucuacuggc

SEQ ID NO: 2857825 - RNA, 19 nt, Artificial Sequence
  Description of Artificial Sequence: Synthetic oligonucleotide
aagaaaguguacaugaaag

SEQ ID NO: 2857826 - RNA, 19 nt, Artificial Sequence
  Description of Artificial Sequence: Synthetic oligonucleotide
uuccaaauauggcacaggg

SEQ ID NO: 2857827 - RNA, 19 nt, Artificial Sequence
  Description of Artificial Sequence: Synthetic oligonucleotide
aauaacaguaaagaugcug

SEQ ID NO: 2857828 - RNA, 19 nt, Artificial Sequence
  Description of Artificial Sequence: Synthetic oligonucleotide
aacaacucauaaugcgugc

SEQ ID NO: 2857829 - RNA, 19 nt, Artificial Sequence
  Description of Artificial Sequence: Synthetic oligonucleotide
uguacaugaaagagaaucc

SEQ ID NO: 2857830 - RNA, 19 nt, Artificial Sequence
  Description of Artificial Sequence: Synthetic oligonucleotide
acugacacuagucccaggc

SEQ ID NO: 2857831 - RNA, 19 nt, Artificial Sequence
  Description of Artificial Sequence: Synthetic oligonucleotide
uacaaaaugccgaaguucu

SEQ ID NO: 2857832 - RNA, 19 nt, Artificial Sequence
  Description of Artificial Sequence: Synthetic oligonucleotide
aguuacacuuggcuaaugc

SEQ ID NO: 2857833 - RNA, 19 nt, Artificial Sequence
  Description of Artificial Sequence: Synthetic oligonucleotide
uuuagguugaaauucaguu

SEQ ID NO: 2857834 - RNA, 19 nt, Artificial Sequence
  Description of Artificial Sequence: Synthetic oligonucleotide
auaacaguaaagaugcugg

SEQ ID NO: 2857835 - RNA, 19 nt, Artificial Sequence
  Description of Artificial Sequence: Synthetic oligonucleotide
aauucugacaccucaucug

SEQ ID NO: 2857836 - RNA, 19 nt, Artificial Sequence
  Description of Artificial Sequence: Synthetic oligonucleotide
aauguuuacaaaaugccga

SEQ ID NO: 2857837 - RNA, 19 nt, Artificial Sequence
  Description of Artificial Sequence: Synthetic oligonucleotide
aguauuuacaguucuucag

SEQ ID NO: 2857838 - RNA, 19 nt, Artificial Sequence
  Description of Artificial Sequence: Synthetic oligonucleotide
gaaaguguacaugaaagag

SEQ ID NO: 2857839 - RNA, 19 nt, Artificial Sequence
  Description of Artificial Sequence: Synthetic oligonucleotide
auuuacaguucuucagucc

SEQ ID NO: 2857840 - RNA, 19 nt, Artificial Sequence
  Description of Artificial Sequence: Synthetic oligonucleotide
uuaacaacucauaaugcgu

SEQ ID NO: 2857841 - RNA, 19 nt, Artificial Sequence
  Description of Artificial Sequence: Synthetic oligonucleotide
uuucugaaaguauugaaaa

SEQ ID NO: 2857842 - RNA, 19 nt, Artificial Sequence
  Description of Artificial Sequence: Synthetic oligonucleotide
uuacacuuggcuaaugcug

SEQ ID NO: 2857843 - RNA, 19 nt, Artificial Sequence
  Description of Artificial Sequence: Synthetic oligonucleotide
uguucauccuuaaacaccu

SEQ ID NO: 2857844 - RNA, 19 nt, Artificial Sequence
  Description of Artificial Sequence: Synthetic oligonucleotide
ucuacaaugucugucuggg

SEQ ID NO: 2857845 - RNA, 19 nt, Artificial Sequence
  Description of Artificial Sequence: Synthetic oligonucleotide
auuuguucauccuuaaaca

SEQ ID NO: 2857846 - RNA, 19 nt, Artificial Sequence
  Description of Artificial Sequence: Synthetic oligonucleotide
aaagaaaguguacaugaaa

SEQ ID NO: 2857847 - RNA, 19 nt, Artificial Sequence
  Description of Artificial Sequence: Synthetic oligonucleotide
ccaaauauggcacagggcg

SEQ ID NO: 2857848 - RNA, 19 nt, Artificial Sequence
  Description of Artificial Sequence: Synthetic oligonucleotide
aguuaggcaauaucgugac

SEQ ID NO: 2857849 - RNA, 19 nt, Artificial Sequence
  Description of Artificial Sequence: Synthetic oligonucleotide
uuuugguuuagguugaaau

SEQ ID NO: 2857850 - RNA, 19 nt, Artificial Sequence
  Description of Artificial Sequence: Synthetic oligonucleotide
aacauggauucaaagaaag

SEQ ID NO: 2857851 - RNA, 19 nt, Artificial Sequence
  Description of Artificial Sequence: Synthetic oligonucleotide
acaguaaagaugcugguga

SEQ ID NO: 2857852 - RNA, 19 nt, Artificial Sequence
  Description of Artificial Sequence: Synthetic oligonucleotide
auuuaacaacucauaaugc

SEQ ID NO: 2857853 - RNA, 19 nt, Artificial Sequence
  Description of Artificial Sequence: Synthetic oligonucleotide
uagguugaaauucaguuau

SEQ ID NO: 2857854 - RNA, 19 nt, Artificial Sequence
  Description of Artificial Sequence: Synthetic oligonucleotide
uaacaacucauaaugcgug

SEQ ID NO: 2857855 - RNA, 19 nt, Artificial Sequence
  Description of Artificial Sequence: Synthetic oligonucleotide
uuguucauccuuaaacacc

SEQ ID NO: 2857856 - RNA, 19 nt, Artificial Sequence
  Description of Artificial Sequence: Synthetic oligonucleotide
cauuuggaaacucuacugg

SEQ ID NO: 2857857 - RNA, 19 nt, Artificial Sequence
  Description of Artificial Sequence: Synthetic oligonucleotide
aaugcugcaauuccaaaua

SEQ ID NO: 2857858 - RNA, 19 nt, Artificial Sequence
  Description of Artificial Sequence: Synthetic oligonucleotide
ucauaaugcgugcaaaagu

SEQ ID NO: 2857859 - RNA, 19 nt, Artificial Sequence
  Description of Artificial Sequence: Synthetic oligonucleotide
auaguauuuacaguucuuc

SEQ ID NO: 2857860 - RNA, 19 nt, Artificial Sequence
  Description of Artificial Sequence: Synthetic oligonucleotide
uucaaagaaagauaguauu

SEQ ID NO: 2857861 - RNA, 19 nt, Artificial Sequence
  Description of Artificial Sequence: Synthetic oligonucleotide
aaagaugcuggugaaaagu

SEQ ID NO: 2857862 - RNA, 19 nt, Artificial Sequence
  Description of Artificial Sequence: Synthetic oligonucleotide
acacaguuaggcaauaucg

SEQ ID NO: 2857863 - RNA, 19 nt, Artificial Sequence
  Description of Artificial Sequence: Synthetic oligonucleotide
uaauuuaacaacucauaau

SEQ ID NO: 2857864 - RNA, 19 nt, Artificial Sequence
  Description of Artificial Sequence: Synthetic oligonucleotide
acacgacugacacuagucc

SEQ ID NO: 2857865 - RNA, 19 nt, Artificial Sequence
  Description of Artificial Sequence: Synthetic oligonucleotide
aauccaacaaauguuuaca

SEQ ID NO: 2857866 - RNA, 19 nt, Artificial Sequence
  Description of Artificial Sequence: Synthetic oligonucleotide
uccaucaauuuguucaucc

SEQ ID NO: 2857867 - RNA, 19 nt, Artificial Sequence
  Description of Artificial Sequence: Synthetic oligonucleotide
guaaaacauggauucaaag

SEQ ID NO: 2857868 - RNA, 19 nt, Artificial Sequence
  Description of Artificial Sequence: Synthetic oligonucleotide
ucaaagaaagauaguauuu

SEQ ID NO: 2857869 - RNA, 19 nt, Artificial Sequence
  Description of Artificial Sequence: Synthetic oligonucleotide
uuuguucauccuuaaacac

SEQ ID NO: 2857870 - RNA, 19 nt, Artificial Sequence
  Description of Artificial Sequence: Synthetic oligonucleotide
uccuuaaacaccuuuccgu

SEQ ID NO: 2857871 - RNA, 19 nt, Artificial Sequence
  Description of Artificial Sequence: Synthetic oligonucleotide
uacacuuggcuaaugcugc

SEQ ID NO: 2857872 - RNA, 19 nt, Artificial Sequence
  Description of Artificial Sequence: Synthetic oligonucleotide
uacaaugucugucuggguc

SEQ ID NO: 2857873 - RNA, 19 nt, Artificial Sequence
  Description of Artificial Sequence: Synthetic oligonucleotide
aguucuacaaugucugucu

SEQ ID NO: 2857874 - RNA, 19 nt, Artificial Sequence
  Description of Artificial Sequence: Synthetic oligonucleotide
gauucaaagaaagauagua

SEQ ID NO: 2857875 - RNA, 19 nt, Artificial Sequence
  Description of Artificial Sequence: Synthetic oligonucleotide
aaguucuacaaugucuguc

SEQ ID NO: 2857876 - RNA, 19 nt, Artificial Sequence
  Description of Artificial Sequence: Synthetic oligonucleotide
ucuucagucccaacaaaug

SEQ ID NO: 2857877 - RNA, 19 nt, Artificial Sequence
  Description of Artificial Sequence: Synthetic oligonucleotide
gugcaaaaguaaaacaugg

SEQ ID NO: 2857878 - RNA, 19 nt, Artificial Sequence
  Description of Artificial Sequence: Synthetic oligonucleotide
gaauccaacaaauguuuac

SEQ ID NO: 2857879 - RNA, 19 nt, Artificial Sequence
  Description of Artificial Sequence: Synthetic oligonucleotide
ugaaugaauucugacaccu

SEQ ID NO: 2857880 - RNA, 19 nt, Artificial Sequence
  Description of Artificial Sequence: Synthetic oligonucleotide
uuaggcaauaucgugacuc

SEQ ID NO: 2857881 - RNA, 19 nt, Artificial Sequence
  Description of Artificial Sequence: Synthetic oligonucleotide
uccauuuggaaacucuacu

SEQ ID NO: 2857882 - RNA, 19 nt, Artificial Sequence
  Description of Artificial Sequence: Synthetic oligonucleotide
aauuccaaauauggcacag

SEQ ID NO: 2857883 - RNA, 19 nt, Artificial Sequence
  Description of Artificial Sequence: Synthetic oligonucleotide
aaaguguacaugaaagaga

SEQ ID NO: 2857884 - RNA, 19 nt, Artificial Sequence
  Description of Artificial Sequence: Synthetic oligonucleotide
aacggauuuugguuuaggu

SEQ ID NO: 2857885 - RNA, 19 nt, Artificial Sequence
  Description of Artificial Sequence: Synthetic oligonucleotide
aagauaguauuuacaguuc

SEQ ID NO: 2857886 - RNA, 19 nt, Artificial Sequence
  Description of Artificial Sequence: Synthetic oligonucleotide
uuuggaaacucuacuggcu

SEQ ID NO: 2857887 - RNA, 19 nt, Artificial Sequence
  Description of Artificial Sequence: Synthetic oligonucleotide
aaaaugccgaaguucuaca

SEQ ID NO: 2857888 - RNA, 19 nt, Artificial Sequence
  Description of Artificial Sequence: Synthetic oligonucleotide
acaugaaagagaauccaac

SEQ ID NO: 2857889 - RNA, 19 nt, Artificial Sequence
  Description of Artificial Sequence: Synthetic oligonucleotide
aaguguacaugaaagagaa

SEQ ID NO: 2857890 - RNA, 19 nt, Artificial Sequence
  Description of Artificial Sequence: Synthetic oligonucleotide
guguacaugaaagagaauc

SEQ ID NO: 2857891 - RNA, 19 nt, Artificial Sequence
  Description of Artificial Sequence: Synthetic oligonucleotide
uuggaaacucuacuggcug

SEQ ID NO: 2857892 - RNA, 19 nt, Artificial Sequence
  Description of Artificial Sequence: Synthetic oligonucleotide
gaaauucaguuauauaaaa

SEQ ID NO: 2857893 - RNA, 19 nt, Artificial Sequence
  Description of Artificial Sequence: Synthetic oligonucleotide
agucccaacaaaugaugac

SEQ ID NO: 2857894 - RNA, 19 nt, Artificial Sequence
  Description of Artificial Sequence: Synthetic oligonucleotide
agaaaguguacaugaaaga

SEQ ID NO: 2857895 - RNA, 19 nt, Artificial Sequence
  Description of Artificial Sequence: Synthetic oligonucleotide
ucagucccaacaaaugaug

SEQ ID NO: 2857896 - RNA, 19 nt, Artificial Sequence
  Description of Artificial Sequence: Synthetic oligonucleotide
aacacgacugacacuaguc

SEQ ID NO: 2857897 - RNA, 19 nt, Artificial Sequence
  Description of Artificial Sequence: Synthetic oligonucleotide
uucuacaaugucugucugg

SEQ ID NO: 2857898 - RNA, 19 nt, Artificial Sequence
  Description of Artificial Sequence: Synthetic oligonucleotide
aagaaagauaguauuuaca

SEQ ID NO: 2857899 - RNA, 19 nt, Artificial Sequence
  Description of Artificial Sequence: Synthetic oligonucleotide
ugcaaaaguaaaacaugga

SEQ ID NO: 2857900 - RNA, 19 nt, Artificial Sequence
  Description of Artificial Sequence: Synthetic oligonucleotide
uuccguguucuucacaccc

SEQ ID NO: 2857901 - RNA, 19 nt, Artificial Sequence
  Description of Artificial Sequence: Synthetic oligonucleotide
uaguauuuacaguucuuca

SEQ ID NO: 2857902 - RNA, 19 nt, Artificial Sequence
  Description of Artificial Sequence: Synthetic oligonucleotide
uugguuuagguugaaauuc

SEQ ID NO: 2857903 - RNA, 19 nt, Artificial Sequence
  Description of Artificial Sequence: Synthetic oligonucleotide
uuuacaaaaugccgaaguu

SEQ ID NO: 2857904 - RNA, 19 nt, Artificial Sequence
  Description of Artificial Sequence: Synthetic oligonucleotide
auccuuaaacaccuuuccg

SEQ ID NO: 2857905 - RNA, 19 nt, Artificial Sequence
  Description of Artificial Sequence: Synthetic oligonucleotide
aaguaauuuaacaacucau

SEQ ID NO: 2857906 - RNA, 19 nt, Artificial Sequence
  Description of Artificial Sequence: Synthetic oligonucleotide
acaguuaggcaauaucgug

SEQ ID NO: 2857907 - RNA, 19 nt, Artificial Sequence
  Description of Artificial Sequence: Synthetic oligonucleotide
cuuuccguguucuucacac

SEQ ID NO: 2857908 - RNA, 19 nt, Artificial Sequence
  Description of Artificial Sequence: Synthetic oligonucleotide
agauaguauuuacaguucu

SEQ ID NO: 2857909 - RNA, 19 nt, Artificial Sequence
  Description of Artificial Sequence: Synthetic oligonucleotide
gcugcaauuccaaauaugg

SEQ ID NO: 2857910 - RNA, 19 nt, Artificial Sequence
  Description of Artificial Sequence: Synthetic oligonucleotide
cucgcaaaguuacacuugg

SEQ ID NO: 2857911 - RNA, 19 nt, Artificial Sequence
  Description of Artificial Sequence: Synthetic oligonucleotide
uuugguuuagguugaaauu

SEQ ID NO: 2857912 - RNA, 19 nt, Artificial Sequence
  Description of Artificial Sequence: Synthetic oligonucleotide
aacaguaaagaugcuggug

SEQ ID NO: 2857913 - RNA, 19 nt, Artificial Sequence
  Description of Artificial Sequence: Synthetic oligonucleotide
ucugacaccucaucugugc

SEQ ID NO: 2857914 - RNA, 19 nt, Artificial Sequence
  Description of Artificial Sequence: Synthetic oligonucleotide
uuagguugaaauucaguua

SEQ ID NO: 2857915 - RNA, 19 nt, Artificial Sequence
  Description of Artificial Sequence: Synthetic oligonucleotide
aaagagaauccaacaaaug

SEQ ID NO: 2857916 - RNA, 19 nt, Artificial Sequence
  Description of Artificial Sequence: Synthetic oligonucleotide
augaaagagaauccaacaa

SEQ ID NO: 2857917 - RNA, 19 nt, Artificial Sequence
  Description of Artificial Sequence: Synthetic oligonucleotide
cauccuuaaacaccuuucc

SEQ ID NO: 2857918 - RNA, 19 nt, Artificial Sequence
  Description of Artificial Sequence: Synthetic oligonucleotide
uaggcaauaucgugacucg

SEQ ID NO: 2857919 - RNA, 19 nt, Artificial Sequence
  Description of Artificial Sequence: Synthetic oligonucleotide
uggugaaaaguaauuuaac

SEQ ID NO: 2857920 - RNA, 19 nt, Artificial Sequence
  Description of Artificial Sequence: Synthetic oligonucleotide
uacaugaaagagaauccaa

SEQ ID NO: 2857921 - RNA, 19 nt, Artificial Sequence
  Description of Artificial Sequence: Synthetic oligonucleotide
acucagccagguuucaacg

SEQ ID NO: 2857922 - RNA, 19 nt, Artificial Sequence
  Description of Artificial Sequence: Synthetic oligonucleotide
uaaugcgugcaaaaguaaa

SEQ ID NO: 2857923 - RNA, 19 nt, Artificial Sequence
  Description of Artificial Sequence: Synthetic oligonucleotide
ggugaaaaguaauuuaaca

SEQ ID NO: 2857924 - RNA, 19 nt, Artificial Sequence
  Description of Artificial Sequence: Synthetic oligonucleotide
ugaugacacacaguuaggc

SEQ ID NO: 2857925 - RNA, 19 nt, Artificial Sequence
  Description of Artificial Sequence: Synthetic oligonucleotide
aaugccgaaguucuacaau

SEQ ID NO: 2857926 - RNA, 19 nt, Artificial Sequence
  Description of Artificial Sequence: Synthetic oligonucleotide
uuacaaaaugccgaaguuc

SEQ ID NO: 2857927 - RNA, 19 nt, Artificial Sequence
  Description of Artificial Sequence: Synthetic oligonucleotide
ugguuuagguugaaauuca

SEQ ID NO: 2857928 - RNA, 19 nt, Artificial Sequence
  Description of Artificial Sequence: Synthetic oligonucleotide
uaaugcugcaauuccaaau

SEQ ID NO: 2857929 - RNA, 19 nt, Artificial Sequence
  Description of Artificial Sequence: Synthetic oligonucleotide
augccgaaguucuacaaug

SEQ ID NO: 2857930 - RNA, 19 nt, Artificial Sequence
  Description of Artificial Sequence: Synthetic oligonucleotide
uccaaauauggcacagggc

SEQ ID NO: 2857931 - RNA, 19 nt, Artificial Sequence
  Description of Artificial Sequence: Synthetic oligonucleotide
guguucuucacacccaggc

SEQ ID NO: 2857932 - RNA, 19 nt, Artificial Sequence
  Description of Artificial Sequence: Synthetic oligonucleotide
uggaaacucuacuggcugg

SEQ ID NO: 2857933 - RNA, 19 nt, Artificial Sequence
  Description of Artificial Sequence: Synthetic oligonucleotide
augcgugcaaaaguaaaac

SEQ ID NO: 2857934 - RNA, 19 nt, Artificial Sequence
  Description of Artificial Sequence: Synthetic oligonucleotide
ucugucugggucauaagua

SEQ ID NO: 2857935 - RNA, 19 nt, Artificial Sequence
  Description of Artificial Sequence: Synthetic oligonucleotide
aaagguuucugaaaguauu

SEQ ID NO: 2857936 - RNA, 19 nt, Artificial Sequence
  Description of Artificial Sequence: Synthetic oligonucleotide
caugaaagagaauccaaca

SEQ ID NO: 2857937 - RNA, 19 nt, Artificial Sequence
  Description of Artificial Sequence: Synthetic oligonucleotide
uggcuaaugcugcaauucc

SEQ ID NO: 2857938 - RNA, 19 nt, Artificial Sequence
  Description of Artificial Sequence: Synthetic oligonucleotide
ugcgugcaaaaguaaaaca

SEQ ID NO: 2857939 - RNA, 19 nt, Artificial Sequence
  Description of Artificial Sequence: Synthetic oligonucleotide
ucccaacaaaugaugacac

SEQ ID NO: 2857940 - RNA, 19 nt, Artificial Sequence
  Description of Artificial Sequence: Synthetic oligonucleotide
uucuucagucccaacaaau

SEQ ID NO: 2857941 - RNA, 19 nt, Artificial Sequence
  Description of Artificial Sequence: Synthetic oligonucleotide
uuaaacaccuuuccguguu

SEQ ID NO: 2857942 - RNA, 19 nt, Artificial Sequence
  Description of Artificial Sequence: Synthetic oligonucleotide
uucagucccaacaaaugau

SEQ ID NO: 2857943 - RNA, 19 nt, Artificial Sequence
  Description of Artificial Sequence: Synthetic oligonucleotide
uuucaacggauuuugguuu

SEQ ID NO: 2857944 - RNA, 19 nt, Artificial Sequence
  Description of Artificial Sequence: Synthetic oligonucleotide
auucugacaccucaucugu

SEQ ID NO: 2857945 - RNA, 19 nt, Artificial Sequence
  Description of Artificial Sequence: Synthetic oligonucleotide
cugugcuccauuuggaaac

SEQ ID NO: 2857946 - RNA, 19 nt, Artificial Sequence
  Description of Artificial Sequence: Synthetic oligonucleotide
ugaauucugacaccucauc

SEQ ID NO: 2857947 - RNA, 19 nt, Artificial Sequence
  Description of Artificial Sequence: Synthetic oligonucleotide
caaaguuacacuuggcuaa

SEQ ID NO: 2857948 - RNA, 19 nt, Artificial Sequence
  Description of Artificial Sequence: Synthetic oligonucleotide
aaaguaaaacauggauuca

SEQ ID NO: 2857949 - RNA, 19 nt, Artificial Sequence
  Description of Artificial Sequence: Synthetic oligonucleotide
ucgugacucgcaaaguuac

SEQ ID NO: 2857950 - RNA, 19 nt, Artificial Sequence
  Description of Artificial Sequence: Synthetic oligonucleotide
aagguuucugaaaguauug

SEQ ID NO: 2857951 - RNA, 19 nt, Artificial Sequence
  Description of Artificial Sequence: Synthetic oligonucleotide
acuagucccaggcucaacu

SEQ ID NO: 2857952 - RNA, 19 nt, Artificial Sequence
  Description of Artificial Sequence: Synthetic oligonucleotide
ucagccagguuucaacgga

SEQ ID NO: 2857953 - RNA, 19 nt, Artificial Sequence
  Description of Artificial Sequence: Synthetic oligonucleotide
ugcugcaauuccaaauaug

SEQ ID NO: 2857954 - RNA, 19 nt, Artificial Sequence
  Description of Artificial Sequence: Synthetic oligonucleotide
uguucuucacacccaggca

SEQ ID NO: 2857955 - RNA, 19 nt, Artificial Sequence
  Description of Artificial Sequence: Synthetic oligonucleotide
uccaacaaauguuuacaaa

SEQ ID NO: 2857956 - RNA, 19 nt, Artificial Sequence
  Description of Artificial Sequence: Synthetic oligonucleotide
uucuucacacccaggcaag

SEQ ID NO: 2857957 - RNA, 19 nt, Artificial Sequence
  Description of Artificial Sequence: Synthetic oligonucleotide
cauaaugcgugcaaaagua

SEQ ID NO: 2857958 - RNA, 19 nt, Artificial Sequence
  Description of Artificial Sequence: Synthetic oligonucleotide
ugacacuagucccaggcuc

SEQ ID NO: 2857959 - RNA, 19 nt, Artificial Sequence
  Description of Artificial Sequence: Synthetic oligonucleotide
acaaugucugucuggguca

SEQ ID NO: 2857960 - RNA, 19 nt, Artificial Sequence
  Description of Artificial Sequence: Synthetic oligonucleotide
cucugaaugaauucugaca

SEQ ID NO: 2857961 - RNA, 19 nt, Artificial Sequence
  Description of Artificial Sequence: Synthetic oligonucleotide
aaaugccgaaguucuacaa

SEQ ID NO: 2857962 - RNA, 19 nt, Artificial Sequence
  Description of Artificial Sequence: Synthetic oligonucleotide
caaaugaugacacacaguu

SEQ ID NO: 2857963 - RNA, 19 nt, Artificial Sequence
  Description of Artificial Sequence: Synthetic oligonucleotide
cugcaauuccaaauauggc

SEQ ID NO: 2857964 - RNA, 19 nt, Artificial Sequence
  Description of Artificial Sequence: Synthetic oligonucleotide
aacgcuucuccaucaauuu

SEQ ID NO: 2857965 - RNA, 19 nt, Artificial Sequence
  Description of Artificial Sequence: Synthetic oligonucleotide
cucauaaugcgugcaaaag

SEQ ID NO: 2857966 - RNA, 19 nt, Artificial Sequence
  Description of Artificial Sequence: Synthetic oligonucleotide
caaaaugccgaaguucuac

SEQ ID NO: 2857967 - RNA, 19 nt, Artificial Sequence
  Description of Artificial Sequence: Synthetic oligonucleotide
cacgacugacacuaguccc

SEQ ID NO: 2857968 - RNA, 19 nt, Artificial Sequence
  Description of Artificial Sequence: Synthetic oligonucleotide
guuuacaaaaugccgaagu

SEQ ID NO: 2857969 - RNA, 19 nt, Artificial Sequence
  Description of Artificial Sequence: Synthetic oligonucleotide
aaaacgcuucuccaucaau

SEQ ID NO: 2857970 - RNA, 19 nt, Artificial Sequence
  Description of Artificial Sequence: Synthetic oligonucleotide
aguaauuuaacaacucaua

SEQ ID NO: 2857971 - RNA, 19 nt, Artificial Sequence
  Description of Artificial Sequence: Synthetic oligonucleotide
aaugcgugcaaaaguaaaa

SEQ ID NO: 2857972 - RNA, 19 nt, Artificial Sequence
  Description of Artificial Sequence: Synthetic oligonucleotide
uguuuacaaaaugccgaag

SEQ ID NO: 2857973 - RNA, 19 nt, Artificial Sequence
  Description of Artificial Sequence: Synthetic oligonucleotide
cacagggcgaacacgacug

SEQ ID NO: 2857974 - RNA, 19 nt, Artificial Sequence
  Description of Artificial Sequence: Synthetic oligonucleotide
gacaccucaucugugcucc

SEQ ID NO: 2857975 - RNA, 19 nt, Artificial Sequence
  Description of Artificial Sequence: Synthetic oligonucleotide
auguuuacaaaaugccgaa

SEQ ID NO: 2857976 - RNA, 19 nt, Artificial Sequence
  Description of Artificial Sequence: Synthetic oligonucleotide
cugaaugaauucugacacc

SEQ ID NO: 2857977 - RNA, 19 nt, Artificial Sequence
  Description of Artificial Sequence: Synthetic oligonucleotide
cuggugaaaaguaauuuaa

SEQ ID NO: 2857978 - RNA, 19 nt, Artificial Sequence
  Description of Artificial Sequence: Synthetic oligonucleotide
uaucgugacucgcaaaguu

SEQ ID NO: 2857979 - RNA, 19 nt, Artificial Sequence
  Description of Artificial Sequence: Synthetic oligonucleotide
aaauauggcacagggcgaa

SEQ ID NO: 2857980 - RNA, 19 nt, Artificial Sequence
  Description of Artificial Sequence: Synthetic oligonucleotide
aaacucuacuggcugggau

SEQ ID NO: 2857981 - RNA, 19 nt, Artificial Sequence
  Description of Artificial Sequence: Synthetic oligonucleotide
ucaauuuguucauccuuaa

SEQ ID NO: 2857982 - RNA, 19 nt, Artificial Sequence
  Description of Artificial Sequence: Synthetic oligonucleotide
ugcuccauuuggaaacucu

SEQ ID NO: 2857983 - RNA, 19 nt, Artificial Sequence
  Description of Artificial Sequence: Synthetic oligonucleotide
aaaagaaaguguacaugaa

SEQ ID NO: 2857984 - RNA, 19 nt, Artificial Sequence
  Description of Artificial Sequence: Synthetic oligonucleotide
uaacaguaaagaugcuggu

SEQ ID NO: 2857985 - RNA, 19 nt, Artificial Sequence
  Description of Artificial Sequence: Synthetic oligonucleotide
ucugugcuccauuuggaaa

SEQ ID NO: 2857986 - RNA, 19 nt, Artificial Sequence
  Description of Artificial Sequence: Synthetic oligonucleotide
uauggcacagggcgaacac

SEQ ID NO: 2857987 - RNA, 19 nt, Artificial Sequence
  Description of Artificial Sequence: Synthetic oligonucleotide
uuggcuaaugcugcaauuc

SEQ ID NO: 2857988 - RNA, 19 nt, Artificial Sequence
  Description of Artificial Sequence: Synthetic oligonucleotide
cggauuuugguuuagguug

SEQ ID NO: 2857989 - RNA, 19 nt, Artificial Sequence
  Description of Artificial Sequence: Synthetic oligonucleotide
guaaagaugcuggugaaaa

SEQ ID NO: 2857990 - RNA, 19 nt, Artificial Sequence
  Description of Artificial Sequence: Synthetic oligonucleotide
agagaauccaacaaauguu

SEQ ID NO: 2857991 - RNA, 19 nt, Artificial Sequence
  Description of Artificial Sequence: Synthetic oligonucleotide
uuacaguucuucaguccca

SEQ ID NO: 2857992 - RNA, 19 nt, Artificial Sequence
  Description of Artificial Sequence: Synthetic oligonucleotide
cuucagucccaacaaauga

SEQ ID NO: 2857993 - RNA, 19 nt, Artificial Sequence
  Description of Artificial Sequence: Synthetic oligonucleotide
aauauggcacagggcgaac

SEQ ID NO: 2857994 - RNA, 19 nt, Artificial Sequence
  Description of Artificial Sequence: Synthetic oligonucleotide
ugacucgcaaaguuacacu

SEQ ID NO: 2857995 - RNA, 19 nt, Artificial Sequence
  Description of Artificial Sequence: Synthetic oligonucleotide
cuccauuuggaaacucuac

SEQ ID NO: 2857996 - RNA, 19 nt, Artificial Sequence
  Description of Artificial Sequence: Synthetic oligonucleotide
acucauaaugcgugcaaaa

SEQ ID NO: 2857997 - RNA, 19 nt, Artificial Sequence
  Description of Artificial Sequence: Synthetic oligonucleotide
guauuuacaguucuucagu

SEQ ID NO: 2857998 - RNA, 19 nt, Artificial Sequence
  Description of Artificial Sequence: Synthetic oligonucleotide
ucacacccaggcaagcucu

SEQ ID NO: 2857999 - RNA, 19 nt, Artificial Sequence
  Description of Artificial Sequence: Synthetic oligonucleotide
gaauucugacaccucaucu

SEQ ID NO: 2858000 - RNA, 19 nt, Artificial Sequence
  Description of Artificial Sequence: Synthetic oligonucleotide
auuccaaauauggcacagg

SEQ ID NO: 2858001 - RNA, 19 nt, Artificial Sequence
  Description of Artificial Sequence: Synthetic oligonucleotide
acggauuuugguuuagguu

SEQ ID NO: 2858002 - RNA, 19 nt, Artificial Sequence
  Description of Artificial Sequence: Synthetic oligonucleotide
uucacacccaggcaagcuc

SEQ ID NO: 2858003 - RNA, 19 nt, Artificial Sequence
  Description of Artificial Sequence: Synthetic oligonucleotide
cacacaguuaggcaauauc

SEQ ID NO: 2858004 - RNA, 19 nt, Artificial Sequence
  Description of Artificial Sequence: Synthetic oligonucleotide
guucuucacacccaggcaa

SEQ ID NO: 2858005 - RNA, 19 nt, Artificial Sequence
  Description of Artificial Sequence: Synthetic oligonucleotide
aaacgcuucuccaucaauu

SEQ ID NO: 2858006 - RNA, 19 nt, Artificial Sequence
  Description of Artificial Sequence: Synthetic oligonucleotide
caguuaggcaauaucguga

SEQ ID NO: 2858007 - RNA, 19 nt, Artificial Sequence
  Description of Artificial Sequence: Synthetic oligonucleotide
cucaacucagccagguuuc

SEQ ID NO: 2858008 - RNA, 19 nt, Artificial Sequence
  Description of Artificial Sequence: Synthetic oligonucleotide
uagucccaggcucaacuca

SEQ ID NO: 2858009 - RNA, 19 nt, Artificial Sequence
  Description of Artificial Sequence: Synthetic oligonucleotide
auccaacaaauguuuacaa

SEQ ID NO: 2858010 - RNA, 19 nt, Artificial Sequence
  Description of Artificial Sequence: Synthetic oligonucleotide
ccaacaaauguuuacaaaa

SEQ ID NO: 2858011 - RNA, 19 nt, Artificial Sequence
  Description of Artificial Sequence: Synthetic oligonucleotide
cagguuucaacggauuuug

SEQ ID NO: 2858012 - RNA, 19 nt, Artificial Sequence
  Description of Artificial Sequence: Synthetic oligonucleotide
ccaacaaaugaugacacac

SEQ ID NO: 2858013 - RNA, 19 nt, Artificial Sequence
  Description of Artificial Sequence: Synthetic oligonucleotide
ugccgaaguucuacaaugu

SEQ ID NO: 2858014 - RNA, 19 nt, Artificial Sequence
  Description of Artificial Sequence: Synthetic oligonucleotide
aacucauaaugcgugcaaa

SEQ ID NO: 2858015 - RNA, 19 nt, Artificial Sequence
  Description of Artificial Sequence: Synthetic oligonucleotide
aagcucugaaugaauucug

SEQ ID NO: 2858016 - RNA, 19 nt, Artificial Sequence
  Description of Artificial Sequence: Synthetic oligonucleotide
uaauaacaguaaagaugcu

SEQ ID NO: 2858017 - RNA, 19 nt, Artificial Sequence
  Description of Artificial Sequence: Synthetic oligonucleotide
ugucugggucauaaguaaa

SEQ ID NO: 2858018 - RNA, 19 nt, Artificial Sequence
  Description of Artificial Sequence: Synthetic oligonucleotide
guugaaauucaguuauaua

SEQ ID NO: 2858019 - RNA, 19 nt, Artificial Sequence
  Description of Artificial Sequence: Synthetic oligonucleotide
guacaugaaagagaaucca

SEQ ID NO: 2858020 - RNA, 19 nt, Artificial Sequence
  Description of Artificial Sequence: Synthetic oligonucleotide
ucccaggcucaacucagcc

SEQ ID NO: 2858021 - RNA, 19 nt, Artificial Sequence
  Description of Artificial Sequence: Synthetic oligonucleotide
aaacaccuuuccguguucu

SEQ ID NO: 2858022 - RNA, 19 nt, Artificial Sequence
  Description of Artificial Sequence: Synthetic oligonucleotide
gucccaacaaaugaugaca

SEQ ID NO: 2858023 - RNA, 19 nt, Artificial Sequence
  Description of Artificial Sequence: Synthetic oligonucleotide
aucaauuuguucauccuua

SEQ ID NO: 2858024 - RNA, 19 nt, Artificial Sequence
  Description of Artificial Sequence: Synthetic oligonucleotide
ccauuuggaaacucuacug

SEQ ID NO: 2858025 - RNA, 19 nt, Artificial Sequence
  Description of Artificial Sequence: Synthetic oligonucleotide
uucugacaccucaucugug

SEQ ID NO: 2858026 - RNA, 19 nt, Artificial Sequence
  Description of Artificial Sequence: Synthetic oligonucleotide
ccuuaaacaccuuuccgug

SEQ ID NO: 2858027 - RNA, 19 nt, Artificial Sequence
  Description of Artificial Sequence: Synthetic oligonucleotide
aggcaauaucgugacucgc

SEQ ID NO: 2858028 - RNA, 19 nt, Artificial Sequence
  Description of Artificial Sequence: Synthetic oligonucleotide
uuuccguguucuucacacc

SEQ ID NO: 2858029 - RNA, 19 nt, Artificial Sequence
  Description of Artificial Sequence: Synthetic oligonucleotide
aagaugcuggugaaaagua

SEQ ID NO: 2858030 - RNA, 19 nt, Artificial Sequence
  Description of Artificial Sequence: Synthetic oligonucleotide
gcaauuccaaauauggcac

SEQ ID NO: 2858031 - RNA, 19 nt, Artificial Sequence
  Description of Artificial Sequence: Synthetic oligonucleotide
auggauucaaagaaagaua

SEQ ID NO: 2858032 - RNA, 19 nt, Artificial Sequence
  Description of Artificial Sequence: Synthetic oligonucleotide
aguaaaacauggauucaaa

SEQ ID NO: 2858033 - RNA, 19 nt, Artificial Sequence
  Description of Artificial Sequence: Synthetic oligonucleotide
cauggauucaaagaaagau

SEQ ID NO: 2858034 - RNA, 19 nt, Artificial Sequence
  Description of Artificial Sequence: Synthetic oligonucleotide
guuucaacggauuuugguu

SEQ ID NO: 2858035 - RNA, 19 nt, Artificial Sequence
  Description of Artificial Sequence: Synthetic oligonucleotide
cgaaguucuacaaugucug

SEQ ID NO: 2858036 - RNA, 19 nt, Artificial Sequence
  Description of Artificial Sequence: Synthetic oligonucleotide
acaguucuucagucccaac

SEQ ID NO: 2858037 - RNA, 19 nt, Artificial Sequence
  Description of Artificial Sequence: Synthetic oligonucleotide
uccguguucuucacaccca

SEQ ID NO: 2858038 - RNA, 19 nt, Artificial Sequence
  Description of Artificial Sequence: Synthetic oligonucleotide
ugcuggugaaaaguaauuu

SEQ ID NO: 2858039 - RNA, 19 nt, Artificial Sequence
  Description of Artificial Sequence: Synthetic oligonucleotide
ucgcaaaguuacacuuggc

SEQ ID NO: 2858040 - RNA, 19 nt, Artificial Sequence
  Description of Artificial Sequence: Synthetic oligonucleotide
guuacacuuggcuaaugcu

SEQ ID NO: 2858041 - RNA, 19 nt, Artificial Sequence
  Description of Artificial Sequence: Synthetic oligonucleotide
acuuggcuaaugcugcaau

SEQ ID NO: 2858042 - RNA, 19 nt, Artificial Sequence
  Description of Artificial Sequence: Synthetic oligonucleotide
uucaacggauuuugguuua

SEQ ID NO: 2858043 - RNA, 19 nt, Artificial Sequence
  Description of Artificial Sequence: Synthetic oligonucleotide
gugacucgcaaaguuacac

SEQ ID NO: 2858044 - RNA, 19 nt, Artificial Sequence
  Description of Artificial Sequence: Synthetic oligonucleotide
augaugacacacaguuagg

SEQ ID NO: 2858045 - RNA, 19 nt, Artificial Sequence
  Description of Artificial Sequence: Synthetic oligonucleotide
acgcuucuccaucaauuug

SEQ ID NO: 2858046 - RNA, 19 nt, Artificial Sequence
  Description of Artificial Sequence: Synthetic oligonucleotide
acaacucauaaugcgugca

SEQ ID NO: 2858047 - RNA, 19 nt, Artificial Sequence
  Description of Artificial Sequence: Synthetic oligonucleotide
agguuucugaaaguauuga

SEQ ID NO: 2858048 - RNA, 19 nt, Artificial Sequence
  Description of Artificial Sequence: Synthetic oligonucleotide
caaauauggcacagggcga

SEQ ID NO: 2858049 - RNA, 19 nt, Artificial Sequence
  Description of Artificial Sequence: Synthetic oligonucleotide
uaaacaccuuuccguguuc

SEQ ID NO: 2858050 - RNA, 19 nt, Artificial Sequence
  Description of Artificial Sequence: Synthetic oligonucleotide
aucugugcuccauuuggaa

SEQ ID NO: 2858051 - RNA, 19 nt, Artificial Sequence
  Description of Artificial Sequence: Synthetic oligonucleotide
ucaacggauuuugguuuag

SEQ ID NO: 2858052 - RNA, 19 nt, Artificial Sequence
  Description of Artificial Sequence: Synthetic oligonucleotide
ggaaacucuacuggcuggg

SEQ ID NO: 2858053 - RNA, 19 nt, Artificial Sequence
  Description of Artificial Sequence: Synthetic oligonucleotide
accuuuccguguucuucac

SEQ ID NO: 2858054 - RNA, 19 nt, Artificial Sequence
  Description of Artificial Sequence: Synthetic oligonucleotide
aaaugaugacacacaguua

SEQ ID NO: 2858055 - RNA, 19 nt, Artificial Sequence
  Description of Artificial Sequence: Synthetic oligonucleotide
cucaucugugcuccauuug

SEQ ID NO: 2858056 - RNA, 19 nt, Artificial Sequence
  Description of Artificial Sequence: Synthetic oligonucleotide
ugacaccucaucugugcuc

SEQ ID NO: 2858057 - RNA, 19 nt, Artificial Sequence
  Description of Artificial Sequence: Synthetic oligonucleotide
gacacuagucccaggcuca

SEQ ID NO: 2858058 - RNA, 19 nt, Artificial Sequence
  Description of Artificial Sequence: Synthetic oligonucleotide
gcaaaguuacacuuggcua

SEQ ID NO: 2858059 - RNA, 19 nt, Artificial Sequence
  Description of Artificial Sequence: Synthetic oligonucleotide
caacaaauguuuacaaaau

SEQ ID NO: 2858060 - RNA, 19 nt, Artificial Sequence
  Description of Artificial Sequence: Synthetic oligonucleotide
gagaauccaacaaauguuu

SEQ ID NO: 2858061 - RNA, 19 nt, Artificial Sequence
  Description of Artificial Sequence: Synthetic oligonucleotide
augcugcaauuccaaauau

SEQ ID NO: 2858062 - RNA, 19 nt, Artificial Sequence
  Description of Artificial Sequence: Synthetic oligonucleotide
cuagucccaggcucaacuc

SEQ ID NO: 2858063 - RNA, 19 nt, Artificial Sequence
  Description of Artificial Sequence: Synthetic oligonucleotide
caauuccaaauauggcaca

SEQ ID NO: 2858064 - RNA, 19 nt, Artificial Sequence
  Description of Artificial Sequence: Synthetic oligonucleotide
acauggauucaaagaaaga

SEQ ID NO: 2858065 - RNA, 19 nt, Artificial Sequence
  Description of Artificial Sequence: Synthetic oligonucleotide
aguaaagaugcuggugaaa

SEQ ID NO: 2858066 - RNA, 19 nt, Artificial Sequence
  Description of Artificial Sequence: Synthetic oligonucleotide
cugucugggucauaaguaa

SEQ ID NO: 2858067 - RNA, 19 nt, Artificial Sequence
  Description of Artificial Sequence: Synthetic oligonucleotide
aaguuacacuuggcuaaug

SEQ ID NO: 2858068 - RNA, 19 nt, Artificial Sequence
  Description of Artificial Sequence: Synthetic oligonucleotide
cagucccaacaaaugauga

SEQ ID NO: 2858069 - RNA, 19 nt, Artificial Sequence
  Description of Artificial Sequence: Synthetic oligonucleotide
agucccaggcucaacucag

SEQ ID NO: 2858070 - RNA, 19 nt, Artificial Sequence
  Description of Artificial Sequence: Synthetic oligonucleotide
caacggauuuugguuuagg

SEQ ID NO: 2858071 - RNA, 19 nt, Artificial Sequence
  Description of Artificial Sequence: Synthetic oligonucleotide
augucugucugggucauaa

SEQ ID NO: 2858072 - RNA, 19 nt, Artificial Sequence
  Description of Artificial Sequence: Synthetic oligonucleotide
ucuucacacccaggcaagc

SEQ ID NO: 2858073 - RNA, 19 nt, Artificial Sequence
  Description of Artificial Sequence: Synthetic oligonucleotide
aacaccuuuccguguucuu

SEQ ID NO: 2858074 - RNA, 19 nt, Artificial Sequence
  Description of Artificial Sequence: Synthetic oligonucleotide
ugugcuccauuuggaaacu

SEQ ID NO: 2858075 - RNA, 19 nt, Artificial Sequence
  Description of Artificial Sequence: Synthetic oligonucleotide
uacaguucuucagucccaa

SEQ ID NO: 2858076 - RNA, 19 nt, Artificial Sequence
  Description of Artificial Sequence: Synthetic oligonucleotide
gacucgcaaaguuacacuu

SEQ ID NO: 2858077 - RNA, 19 nt, Artificial Sequence
  Description of Artificial Sequence: Synthetic oligonucleotide
auaaugcgugcaaaaguaa

SEQ ID NO: 2858078 - RNA, 19 nt, Artificial Sequence
  Description of Artificial Sequence: Synthetic oligonucleotide
gaugcuggugaaaaguaau

SEQ ID NO: 2858079 - RNA, 19 nt, Artificial Sequence
  Description of Artificial Sequence: Synthetic oligonucleotide
gaaugaauucugacaccuc

SEQ ID NO: 2858080 - RNA, 19 nt, Artificial Sequence
  Description of Artificial Sequence: Synthetic oligonucleotide
gacugacacuagucccagg

SEQ ID NO: 2858081 - RNA, 19 nt, Artificial Sequence
  Description of Artificial Sequence: Synthetic oligonucleotide
gucugucugggucauaagu

SEQ ID NO: 2858082 - RNA, 19 nt, Artificial Sequence
  Description of Artificial Sequence: Synthetic oligonucleotide
acucgcaaaguuacacuug

SEQ ID NO: 2858083 - RNA, 19 nt, Artificial Sequence
  Description of Artificial Sequence: Synthetic oligonucleotide
acgacugacacuaguccca

SEQ ID NO: 2858084 - RNA, 19 nt, Artificial Sequence
  Description of Artificial Sequence: Synthetic oligonucleotide
caccuuuccguguucuuca

SEQ ID NO: 2858085 - RNA, 19 nt, Artificial Sequence
  Description of Artificial Sequence: Synthetic oligonucleotide
gcuggugaaaaguaauuua

SEQ ID NO: 2858086 - RNA, 19 nt, Artificial Sequence
  Description of Artificial Sequence: Synthetic oligonucleotide
auaucgugacucgcaaagu

SEQ ID NO: 2858087 - RNA, 19 nt, Artificial Sequence
  Description of Artificial Sequence: Synthetic oligonucleotide
gcucugaaugaauucugac

SEQ ID NO: 2858088 - RNA, 19 nt, Artificial Sequence
  Description of Artificial Sequence: Synthetic oligonucleotide
gguuuagguugaaauucag

SEQ ID NO: 2858089 - RNA, 19 nt, Artificial Sequence
  Description of Artificial Sequence: Synthetic oligonucleotide
auauggcacagggcgaaca

SEQ ID NO: 2858090 - RNA, 19 nt, Artificial Sequence
  Description of Artificial Sequence: Synthetic oligonucleotide
cacaguuaggcaauaucgu

SEQ ID NO: 2858091 - RNA, 19 nt, Artificial Sequence
  Description of Artificial Sequence: Synthetic oligonucleotide
cuaaugcugcaauuccaaa

SEQ ID NO: 2858092 - RNA, 19 nt, Artificial Sequence
  Description of Artificial Sequence: Synthetic oligonucleotide
gcaagcucugaaugaauuc

SEQ ID NO: 2858093 - RNA, 19 nt, Artificial Sequence
  Description of Artificial Sequence: Synthetic oligonucleotide
gggcgaacacgacugacac

SEQ ID NO: 2858094 - RNA, 19 nt, Artificial Sequence
  Description of Artificial Sequence: Synthetic oligonucleotide
caagcucugaaugaauucu

SEQ ID NO: 2858095 - RNA, 19 nt, Artificial Sequence
  Description of Artificial Sequence: Synthetic oligonucleotide
caucugugcuccauuugga

SEQ ID NO: 2858096 - RNA, 19 nt, Artificial Sequence
  Description of Artificial Sequence: Synthetic oligonucleotide
gguuucaacggauuuuggu

SEQ ID NO: 2858097 - RNA, 19 nt, Artificial Sequence
  Description of Artificial Sequence: Synthetic oligonucleotide
ucaacucagccagguuuca

SEQ ID NO: 2858098 - RNA, 19 nt, Artificial Sequence
  Description of Artificial Sequence: Synthetic oligonucleotide
agguuucaacggauuuugg

SEQ ID NO: 2858099 - RNA, 19 nt, Artificial Sequence
  Description of Artificial Sequence: Synthetic oligonucleotide
acacuuggcuaaugcugca

SEQ ID NO: 2858100 - RNA, 19 nt, Artificial Sequence
  Description of Artificial Sequence: Synthetic oligonucleotide
gaaguucuacaaugucugu

SEQ ID NO: 2858101 - RNA, 19 nt, Artificial Sequence
  Description of Artificial Sequence: Synthetic oligonucleotide
agaugcuggugaaaaguaa

SEQ ID NO: 2858102 - RNA, 19 nt, Artificial Sequence
  Description of Artificial Sequence: Synthetic oligonucleotide
augaauucugacaccucau

SEQ ID NO: 2858103 - RNA, 19 nt, Artificial Sequence
  Description of Artificial Sequence: Synthetic oligonucleotide
cuuaaacaccuuuccgugu

SEQ ID NO: 2858104 - RNA, 19 nt, Artificial Sequence
  Description of Artificial Sequence: Synthetic oligonucleotide
guuuagguugaaauucagu

SEQ ID NO: 2858105 - RNA, 19 nt, Artificial Sequence
  Description of Artificial Sequence: Synthetic oligonucleotide
gaacacgacugacacuagu

SEQ ID NO: 2858106 - RNA, 19 nt, Artificial Sequence
  Description of Artificial Sequence: Synthetic oligonucleotide
gcgaacacgacugacacua

SEQ ID NO: 2858107 - RNA, 19 nt, Artificial Sequence
  Description of Artificial Sequence: Synthetic oligonucleotide
agaauccaacaaauguuua

SEQ ID NO: 2858108 - RNA, 19 nt, Artificial Sequence
  Description of Artificial Sequence: Synthetic oligonucleotide
gucugggucauaaguaaaa

SEQ ID NO: 2858109 - RNA, 19 nt, Artificial Sequence
  Description of Artificial Sequence: Synthetic oligonucleotide
caauuuguucauccuuaaa

SEQ ID NO: 2858110 - RNA, 19 nt, Artificial Sequence
  Description of Artificial Sequence: Synthetic oligonucleotide
caacucauaaugcgugcaa

SEQ ID NO: 2858111 - RNA, 19 nt, Artificial Sequence
  Description of Artificial Sequence: Synthetic oligonucleotide
agggcgaacacgacugaca

SEQ ID NO: 2858112 - RNA, 19 nt, Artificial Sequence
  Description of Artificial Sequence: Synthetic oligonucleotide
gauaguauuuacaguucuu

SEQ ID NO: 2858113 - RNA, 19 nt, Artificial Sequence
  Description of Artificial Sequence: Synthetic oligonucleotide
ggcaauaucgugacucgca

SEQ ID NO: 2858114 - RNA, 19 nt, Artificial Sequence
  Description of Artificial Sequence: Synthetic oligonucleotide
caguaaagaugcuggugaa

SEQ ID NO: 2858115 - RNA, 19 nt, Artificial Sequence
  Description of Artificial Sequence: Synthetic oligonucleotide
acccaggcaagcucugaau

SEQ ID NO: 2858116 - RNA, 19 nt, Artificial Sequence
  Description of Artificial Sequence: Synthetic oligonucleotide
aucgugacucgcaaaguua

SEQ ID NO: 2858117 - RNA, 19 nt, Artificial Sequence
  Description of Artificial Sequence: Synthetic oligonucleotide
gaaacucuacuggcuggga

SEQ ID NO: 2858118 - RNA, 19 nt, Artificial Sequence
  Description of Artificial Sequence: Synthetic oligonucleotide
caggcucaacucagccagg

SEQ ID NO: 2858119 - RNA, 19 nt, Artificial Sequence
  Description of Artificial Sequence: Synthetic oligonucleotide
caauaucgugacucgcaaa

SEQ ID NO: 2858120 - RNA, 19 nt, Artificial Sequence
  Description of Artificial Sequence: Synthetic oligonucleotide
gcaauaucgugacucgcaa

SEQ ID NO: 2858121 - RNA, 19 nt, Artificial Sequence
  Description of Artificial Sequence: Synthetic oligonucleotide
cccaggcaagcucugaaug

SEQ ID NO: 2858122 - RNA, 19 nt, Artificial Sequence
  Description of Artificial Sequence: Synthetic oligonucleotide
ggauuuugguuuagguuga

SEQ ID NO: 2858123 - RNA, 19 nt, Artificial Sequence
  Description of Artificial Sequence: Synthetic oligonucleotide
acagggcgaacacgacuga

SEQ ID NO: 2858124 - RNA, 19 nt, Artificial Sequence
  Description of Artificial Sequence: Synthetic oligonucleotide
augcuggugaaaaguaauu

SEQ ID NO: 2858125 - RNA, 19 nt, Artificial Sequence
  Description of Artificial Sequence: Synthetic oligonucleotide
gcuaaugcugcaauuccaa

SEQ ID NO: 2858126 - RNA, 19 nt, Artificial Sequence
  Description of Artificial Sequence: Synthetic oligonucleotide
aggcucaacucagccaggu

SEQ ID NO: 2858127 - RNA, 19 nt, Artificial Sequence
  Description of Artificial Sequence: Synthetic oligonucleotide
gguugaaauucaguuauau

SEQ ID NO: 2858128 - RNA, 19 nt, Artificial Sequence
  Description of Artificial Sequence: Synthetic oligonucleotide
gccgaaguucuacaauguc

SEQ ID NO: 2858129 - RNA, 19 nt, Artificial Sequence
  Description of Artificial Sequence: Synthetic oligonucleotide
cacacccaggcaagcucug

SEQ ID NO: 2858130 - RNA, 19 nt, Artificial Sequence
  Description of Artificial Sequence: Synthetic oligonucleotide
ggcuaaugcugcaauucca

SEQ ID NO: 2858131 - RNA, 19 nt, Artificial Sequence
  Description of Artificial Sequence: Synthetic oligonucleotide
caggcaagcucugaaugaa

SEQ ID NO: 2858132 - RNA, 19 nt, Artificial Sequence
  Description of Artificial Sequence: Synthetic oligonucleotide
gauuuugguuuagguugaa

SEQ ID NO: 2858133 - RNA, 19 nt, Artificial Sequence
  Description of Artificial Sequence: Synthetic oligonucleotide
ccgaaguucuacaaugucu

SEQ ID NO: 2858134 - RNA, 19 nt, Artificial Sequence
  Description of Artificial Sequence: Synthetic oligonucleotide
acacacaguuaggcaauau

SEQ ID NO: 2858135 - RNA, 19 nt, Artificial Sequence
  Description of Artificial Sequence: Synthetic oligonucleotide
gcgugcaaaaguaaaacau

SEQ ID NO: 2858136 - RNA, 19 nt, Artificial Sequence
  Description of Artificial Sequence: Synthetic oligonucleotide
cuccaucaauuuguucauc

SEQ ID NO: 2858137 - RNA, 19 nt, Artificial Sequence
  Description of Artificial Sequence: Synthetic oligonucleotide
cagggcgaacacgacugac

SEQ ID NO: 2858138 - RNA, 19 nt, Artificial Sequence
  Description of Artificial Sequence: Synthetic oligonucleotide
gcucaacucagccagguuu

SEQ ID NO: 2858139 - RNA, 19 nt, Artificial Sequence
  Description of Artificial Sequence: Synthetic oligonucleotide
ccguguucuucacacccag

SEQ ID NO: 2858140 - RNA, 19 nt, Artificial Sequence
  Description of Artificial Sequence: Synthetic oligonucleotide
acaaaaugccgaaguucua

SEQ ID NO: 2858141 - RNA, 19 nt, Artificial Sequence
  Description of Artificial Sequence: Synthetic oligonucleotide
ccaggcaagcucugaauga

SEQ ID NO: 2858142 - RNA, 19 nt, Artificial Sequence
  Description of Artificial Sequence: Synthetic oligonucleotide
cuuggcuaaugcugcaauu

SEQ ID NO: 2858143 - RNA, 19 nt, Artificial Sequence
  Description of Artificial Sequence: Synthetic oligonucleotide
guuaggcaauaucgugacu

SEQ ID NO: 2858144 - RNA, 19 nt, Artificial Sequence
  Description of Artificial Sequence: Synthetic oligonucleotide
aaugucugucugggucaua

SEQ ID NO: 2858145 - RNA, 19 nt, Artificial Sequence
  Description of Artificial Sequence: Synthetic oligonucleotide
gacacacaguuaggcaaua

SEQ ID NO: 2858146 - RNA, 19 nt, Artificial Sequence
  Description of Artificial Sequence: Synthetic oligonucleotide
cugacacuagucccaggcu

SEQ ID NO: 2858147 - RNA, 19 nt, Artificial Sequence
  Description of Artificial Sequence: Synthetic oligonucleotide
cugacaccucaucugugcu

SEQ ID NO: 2858148 - RNA, 19 nt, Artificial Sequence
  Description of Artificial Sequence: Synthetic oligonucleotide
cguguucuucacacccagg

SEQ ID NO: 2858149 - RNA, 19 nt, Artificial Sequence
  Description of Artificial Sequence: Synthetic oligonucleotide
agguugaaauucaguuaua

SEQ ID NO: 2858150 - RNA, 19 nt, Artificial Sequence
  Description of Artificial Sequence: Synthetic oligonucleotide
cacccaggcaagcucugaa

SEQ ID NO: 2858151 - RNA, 19 nt, Artificial Sequence
  Description of Artificial Sequence: Synthetic oligonucleotide
aggcaagcucugaaugaau

SEQ ID NO: 2858152 - RNA, 19 nt, Artificial Sequence
  Description of Artificial Sequence: Synthetic oligonucleotide
gucccaggcucaacucagc

SEQ ID NO: 2858153 - RNA, 19 nt, Artificial Sequence
  Description of Artificial Sequence: Synthetic oligonucleotide
acaccucaucugugcucca

SEQ ID NO: 2858154 - RNA, 19 nt, Artificial Sequence
  Description of Artificial Sequence: Synthetic oligonucleotide
gcuccauuuggaaacucua

SEQ ID NO: 2858155 - RNA, 19 nt, Artificial Sequence
  Description of Artificial Sequence: Synthetic oligonucleotide
acacuagucccaggcucaa

SEQ ID NO: 2858156 - RNA, 19 nt, Artificial Sequence
  Description of Artificial Sequence: Synthetic oligonucleotide
cccaacaaaugaugacaca

SEQ ID NO: 2858157 - RNA, 19 nt, Artificial Sequence
  Description of Artificial Sequence: Synthetic oligonucleotide
cgcaaaguuacacuuggcu

SEQ ID NO: 2858158 - RNA, 19 nt, Artificial Sequence
  Description of Artificial Sequence: Synthetic oligonucleotide
cacuagucccaggcucaac

SEQ ID NO: 2858159 - RNA, 19 nt, Artificial Sequence
  Description of Artificial Sequence: Synthetic oligonucleotide
cuacaaugucugucugggu

SEQ ID NO: 2858160 - RNA, 19 nt, Artificial Sequence
  Description of Artificial Sequence: Synthetic oligonucleotide
cacuuggcuaaugcugcaa

SEQ ID NO: 2858161 - RNA, 19 nt, Artificial Sequence
  Description of Artificial Sequence: Synthetic oligonucleotide
cuucacacccaggcaagcu

SEQ ID NO: 2858162 - RNA, 19 nt, Artificial Sequence
  Description of Artificial Sequence: Synthetic oligonucleotide
ccaucaauuuguucauccu

SEQ ID NO: 2858163 - RNA, 19 nt, Artificial Sequence
  Description of Artificial Sequence: Synthetic oligonucleotide
agccagguuucaacggauu

SEQ ID NO: 2858164 - RNA, 19 nt, Artificial Sequence
  Description of Artificial Sequence: Synthetic oligonucleotide
cgcuucuccaucaauuugu

SEQ ID NO: 2858165 - RNA, 19 nt, Artificial Sequence
  Description of Artificial Sequence: Synthetic oligonucleotide
gugcuccauuuggaaacuc

SEQ ID NO: 2858166 - RNA, 19 nt, Artificial Sequence
  Description of Artificial Sequence: Synthetic oligonucleotide
gcacagggcgaacacgacu

SEQ ID NO: 2858167 - RNA, 19 nt, Artificial Sequence
  Description of Artificial Sequence: Synthetic oligonucleotide
caacucagccagguuucaa

SEQ ID NO: 2858168 - RNA, 19 nt, Artificial Sequence
  Description of Artificial Sequence: Synthetic oligonucleotide
cagccagguuucaacggau

SEQ ID NO: 2858169 - RNA, 19 nt, Artificial Sequence
  Description of Artificial Sequence: Synthetic oligonucleotide
cgaacacgacugacacuag

SEQ ID NO: 2858170 - RNA, 19 nt, Artificial Sequence
  Description of Artificial Sequence: Synthetic oligonucleotide
gccagguuucaacggauuu

SEQ ID NO: 2858171 - RNA, 19 nt, Artificial Sequence
  Description of Artificial Sequence: Synthetic oligonucleotide
ggcacagggcgaacacgac

SEQ ID NO: 2858172 - RNA, 19 nt, Artificial Sequence
  Description of Artificial Sequence: Synthetic oligonucleotide
cgacugacacuagucccag

SEQ ID NO: 2858173 - RNA, 19 nt, Artificial Sequence
  Description of Artificial Sequence: Synthetic oligonucleotide
ccuuuccguguucuucaca

SEQ ID NO: 2858174 - RNA, 19 nt, Artificial Sequence
  Description of Artificial Sequence: Synthetic oligonucleotide
ggcgaacacgacugacacu

SEQ ID NO: 2858175 - RNA, 19 nt, Artificial Sequence
  Description of Artificial Sequence: Synthetic oligonucleotide
cgugacucgcaaaguuaca

SEQ ID NO: 2858176 - RNA, 19 nt, Artificial Sequence
  Description of Artificial Sequence: Synthetic oligonucleotide
caaugucugucugggucau

SEQ ID NO: 2858177 - RNA, 19 nt, Artificial Sequence
  Description of Artificial Sequence: Synthetic oligonucleotide
gcuucuccaucaauuuguu

SEQ ID NO: 2858178 - RNA, 19 nt, Artificial Sequence
  Description of Artificial Sequence: Synthetic oligonucleotide
ccagguuucaacggauuuu

SEQ ID NO: 2858179 - RNA, 19 nt, Artificial Sequence
  Description of Artificial Sequence: Synthetic oligonucleotide
guucauccuuaaacaccuu

SEQ ID NO: 2858180 - RNA, 19 nt, Artificial Sequence
  Description of Artificial Sequence: Synthetic oligonucleotide
caccucaucugugcuccau

SEQ ID NO: 2858181 - RNA, 19 nt, Artificial Sequence
  Description of Artificial Sequence: Synthetic oligonucleotide
ggcucaacucagccagguu

SEQ ID NO: 2858182 - RNA, 19 nt, Artificial Sequence
  Description of Artificial Sequence: Synthetic oligonucleotide
aaauucagagagcugagcc

SEQ ID NO: 2858183 - RNA, 19 nt, Artificial Sequence
  Description of Artificial Sequence: Synthetic oligonucleotide
aaaguaaguggcuuucucc

SEQ ID NO: 2858184 - RNA, 19 nt, Artificial Sequence
  Description of Artificial Sequence: Synthetic oligonucleotide
uuuucagaaaaguaagugg

SEQ ID NO: 2858185 - RNA, 19 nt, Artificial Sequence
  Description of Artificial Sequence: Synthetic oligonucleotide
aaauaugcuucccacuuuc

SEQ ID NO: 2858186 - RNA, 19 nt, Artificial Sequence
  Description of Artificial Sequence: Synthetic oligonucleotide
uuucaugaugcuuuugagg

SEQ ID NO: 2858187 - RNA, 19 nt, Artificial Sequence
  Description of Artificial Sequence: Synthetic oligonucleotide
aaaaguaaguggcuuucuc

SEQ ID NO: 2858188 - RNA, 19 nt, Artificial Sequence
  Description of Artificial Sequence: Synthetic oligonucleotide
uuucuccucacuaagaccu

SEQ ID NO: 2858189 - RNA, 19 nt, Artificial Sequence
  Description of Artificial Sequence: Synthetic oligonucleotide
aagaccuagagucaggaga

SEQ ID NO: 2858190 - RNA, 19 nt, Artificial Sequence
  Description of Artificial Sequence: Synthetic oligonucleotide
aaaagcacuucugucaggg

SEQ ID NO: 2858191 - RNA, 19 nt, Artificial Sequence
  Description of Artificial Sequence: Synthetic oligonucleotide
agagagcugagccagaaag

SEQ ID NO: 2858192 - RNA, 19 nt, Artificial Sequence
  Description of Artificial Sequence: Synthetic oligonucleotide
agacugaucugauuggugg

SEQ ID NO: 2858193 - RNA, 19 nt, Artificial Sequence
  Description of Artificial Sequence: Synthetic oligonucleotide
acuuucucuaauucacugc

SEQ ID NO: 2858194 - RNA, 19 nt, Artificial Sequence
  Description of Artificial Sequence: Synthetic oligonucleotide
ucuguuaggaaauggaaaa

SEQ ID NO: 2858195 - RNA, 19 nt, Artificial Sequence
  Description of Artificial Sequence: Synthetic oligonucleotide
ucugcuuccacuuuucaga

SEQ ID NO: 2858196 - RNA, 19 nt, Artificial Sequence
  Description of Artificial Sequence: Synthetic oligonucleotide
ucuucagugcaccauucgg

SEQ ID NO: 2858197 - RNA, 19 nt, Artificial Sequence
  Description of Artificial Sequence: Synthetic oligonucleotide
ugguuaaucaucagggucu

SEQ ID NO: 2858198 - RNA, 19 nt, Artificial Sequence
  Description of Artificial Sequence: Synthetic oligonucleotide
aaguaaguggcuuucuccu

SEQ ID NO: 2858199 - RNA, 19 nt, Artificial Sequence
  Description of Artificial Sequence: Synthetic oligonucleotide
uggaaaagcacuucuguca

SEQ ID NO: 2858200 - RNA, 19 nt, Artificial Sequence
  Description of Artificial Sequence: Synthetic oligonucleotide
uuaggaaauggaaaagcac

SEQ ID NO: 2858201 - RNA, 19 nt, Artificial Sequence
  Description of Artificial Sequence: Synthetic oligonucleotide
aagugcuccaccucuuugg

SEQ ID NO: 2858202 - RNA, 19 nt, Artificial Sequence
  Description of Artificial Sequence: Synthetic oligonucleotide
ugaccuauggcccacugug

SEQ ID NO: 2858203 - RNA, 19 nt, Artificial Sequence
  Description of Artificial Sequence: Synthetic oligonucleotide
agagucaggagaucagccc

SEQ ID NO: 2858204 - RNA, 19 nt, Artificial Sequence
  Description of Artificial Sequence: Synthetic oligonucleotide
aacccauggcgccaggagc

SEQ ID NO: 2858205 - RNA, 19 nt, Artificial Sequence
  Description of Artificial Sequence: Synthetic oligonucleotide
ugguggcaaauucagagag

SEQ ID NO: 2858206 - RNA, 19 nt, Artificial Sequence
  Description of Artificial Sequence: Synthetic oligonucleotide
ucuaauucacugcuuccag

SEQ ID NO: 2858207 - RNA, 19 nt, Artificial Sequence
  Description of Artificial Sequence: Synthetic oligonucleotide
aauucagagagcugagcca

SEQ ID NO: 2858208 - RNA, 19 nt, Artificial Sequence
  Description of Artificial Sequence: Synthetic oligonucleotide
uguuaggaaauggaaaagc

SEQ ID NO: 2858209 - RNA, 19 nt, Artificial Sequence
  Description of Artificial Sequence: Synthetic oligonucleotide
cacuuuucagaaaaguaag

SEQ ID NO: 2858210 - RNA, 19 nt, Artificial Sequence
  Description of Artificial Sequence: Synthetic oligonucleotide
uuuucaugaugcuuuugag

SEQ ID NO: 2858211 - RNA, 19 nt, Artificial Sequence
  Description of Artificial Sequence: Synthetic oligonucleotide
cagaugucacuccaaaucg

SEQ ID NO: 2858212 - RNA, 19 nt, Artificial Sequence
  Description of Artificial Sequence: Synthetic oligonucleotide
accauucggaaccaggagg

SEQ ID NO: 2858213 - RNA, 19 nt, Artificial Sequence
  Description of Artificial Sequence: Synthetic oligonucleotide
ucaaccagcugguuaauca

SEQ ID NO: 2858214 - RNA, 19 nt, Artificial Sequence
  Description of Artificial Sequence: Synthetic oligonucleotide
auucacugcuuccagaugu

SEQ ID NO: 2858215 - RNA, 19 nt, Artificial Sequence
  Description of Artificial Sequence: Synthetic oligonucleotide
aaaucgccacuccauauca

SEQ ID NO: 2858216 - RNA, 19 nt, Artificial Sequence
  Description of Artificial Sequence: Synthetic oligonucleotide
uucggaaccaggaggaggc

SEQ ID NO: 2858217 - RNA, 19 nt, Artificial Sequence
  Description of Artificial Sequence: Synthetic oligonucleotide
ucugucagggcugagaacu

SEQ ID NO: 2858218 - RNA, 19 nt, Artificial Sequence
  Description of Artificial Sequence: Synthetic oligonucleotide
auggaaaagcacuucuguc

SEQ ID NO: 2858219 - RNA, 19 nt, Artificial Sequence
  Description of Artificial Sequence: Synthetic oligonucleotide
cuuuucagaaaaguaagug

SEQ ID NO: 2858220 - RNA, 19 nt, Artificial Sequence
  Description of Artificial Sequence: Synthetic oligonucleotide
aagcacuucugucagggcu

SEQ ID NO: 2858221 - RNA, 19 nt, Artificial Sequence
  Description of Artificial Sequence: Synthetic oligonucleotide
agcugguuaaucaucaggg

SEQ ID NO: 2858222 - RNA, 19 nt, Artificial Sequence
  Description of Artificial Sequence: Synthetic oligonucleotide
uaugcuucccacuuucucu

SEQ ID NO: 2858223 - RNA, 19 nt, Artificial Sequence
  Description of Artificial Sequence: Synthetic oligonucleotide
uuggugguggcaaauucag

SEQ ID NO: 2858224 - RNA, 19 nt, Artificial Sequence
  Description of Artificial Sequence: Synthetic oligonucleotide
aaagcacuucugucagggc

SEQ ID NO: 2858225 - RNA, 19 nt, Artificial Sequence
  Description of Artificial Sequence: Synthetic oligonucleotide
uucaguugcugcaugucgc

SEQ ID NO: 2858226 - RNA, 19 nt, Artificial Sequence
  Description of Artificial Sequence: Synthetic oligonucleotide
auaucaaccagcugguuaa

SEQ ID NO: 2858227 - RNA, 19 nt, Artificial Sequence
  Description of Artificial Sequence: Synthetic oligonucleotide
uuaaucaucagggucugac

SEQ ID NO: 2858228 - RNA, 19 nt, Artificial Sequence
  Description of Artificial Sequence: Synthetic oligonucleotide
uucucuaauucacugcuuc

SEQ ID NO: 2858229 - RNA, 19 nt, Artificial Sequence
  Description of Artificial Sequence: Synthetic oligonucleotide
agugcaggcgaacccaugg

SEQ ID NO: 2858230 - RNA, 19 nt, Artificial Sequence
  Description of Artificial Sequence: Synthetic oligonucleotide
aguugcugcaugucgccgc

SEQ ID NO: 2858231 - RNA, 19 nt, Artificial Sequence
  Description of Artificial Sequence: Synthetic oligonucleotide
agaaaaguaaguggcuuuc

SEQ ID NO: 2858232 - RNA, 19 nt, Artificial Sequence
  Description of Artificial Sequence: Synthetic oligonucleotide
ugcaccauucggaaccagg

SEQ ID NO: 2858233 - RNA, 19 nt, Artificial Sequence
  Description of Artificial Sequence: Synthetic oligonucleotide
auaugcuucccacuuucuc

SEQ ID NO: 2858234 - RNA, 19 nt, Artificial Sequence
  Description of Artificial Sequence: Synthetic oligonucleotide
uucagaaaaguaaguggcu

SEQ ID NO: 2858235 - RNA, 19 nt, Artificial Sequence
  Description of Artificial Sequence: Synthetic oligonucleotide
guucaguugcugcaugucg

SEQ ID NO: 2858236 - RNA, 19 nt, Artificial Sequence
  Description of Artificial Sequence: Synthetic oligonucleotide
uccacuuuucagaaaagua

SEQ ID NO: 2858237 - RNA, 19 nt, Artificial Sequence
  Description of Artificial Sequence: Synthetic oligonucleotide
uaauucacugcuuccagau

SEQ ID NO: 2858238 - RNA, 19 nt, Artificial Sequence
  Description of Artificial Sequence: Synthetic oligonucleotide
uagagucaggagaucagcc

SEQ ID NO: 2858239 - RNA, 19 nt, Artificial Sequence
  Description of Artificial Sequence: Synthetic oligonucleotide
uucuucagugcaccauucg

SEQ ID NO: 2858240 - RNA, 19 nt, Artificial Sequence
  Description of Artificial Sequence: Synthetic oligonucleotide
uccucacuaagaccuagag

SEQ ID NO: 2858241 - RNA, 19 nt, Artificial Sequence
  Description of Artificial Sequence: Synthetic oligonucleotide
ugcaggcgaacccauggcg

SEQ ID NO: 2858242 - RNA, 19 nt, Artificial Sequence
  Description of Artificial Sequence: Synthetic oligonucleotide
aucgccacuccauaucaac

SEQ ID NO: 2858243 - RNA, 19 nt, Artificial Sequence
  Description of Artificial Sequence: Synthetic oligonucleotide
aagguuggggcauucugcu

SEQ ID NO: 2858244 - RNA, 19 nt, Artificial Sequence
  Description of Artificial Sequence: Synthetic oligonucleotide
cagggucugaccuauggcc

SEQ ID NO: 2858245 - RNA, 19 nt, Artificial Sequence
  Description of Artificial Sequence: Synthetic oligonucleotide
aaagugcuccaccucuuug

SEQ ID NO: 2858246 - RNA, 19 nt, Artificial Sequence
  Description of Artificial Sequence: Synthetic oligonucleotide
cagugcaccauucggaacc

SEQ ID NO: 2858247 - RNA, 19 nt, Artificial Sequence
  Description of Artificial Sequence: Synthetic oligonucleotide
ucaugaugcuuuugagggg

SEQ ID NO: 2858248 - RNA, 19 nt, Artificial Sequence
  Description of Artificial Sequence: Synthetic oligonucleotide
uucugcuuccacuuuucag

SEQ ID NO: 2858249 - RNA, 19 nt, Artificial Sequence
  Description of Artificial Sequence: Synthetic oligonucleotide
aauucacugcuuccagaug

SEQ ID NO: 2858250 - RNA, 19 nt, Artificial Sequence
  Description of Artificial Sequence: Synthetic oligonucleotide
uaaucaucagggucugacc

SEQ ID NO: 2858251 - RNA, 19 nt, Artificial Sequence
  Description of Artificial Sequence: Synthetic oligonucleotide
cacugugcaagguuggggc

SEQ ID NO: 2858252 - RNA, 19 nt, Artificial Sequence
  Description of Artificial Sequence: Synthetic oligonucleotide
ugcuccaccucuuugggcu

SEQ ID NO: 2858253 - RNA, 19 nt, Artificial Sequence
  Description of Artificial Sequence: Synthetic oligonucleotide
ucucuaauucacugcuucc

SEQ ID NO: 2858254 - RNA, 19 nt, Artificial Sequence
  Description of Artificial Sequence: Synthetic oligonucleotide
gaugucacuccaaaucgcc

SEQ ID NO: 2858255 - RNA, 19 nt, Artificial Sequence
  Description of Artificial Sequence: Synthetic oligonucleotide
caagguuggggcauucugc

SEQ ID NO: 2858256 - RNA, 19 nt, Artificial Sequence
  Description of Artificial Sequence: Synthetic oligonucleotide
auucagagagcugagccag

SEQ ID NO: 2858257 - RNA, 19 nt, Artificial Sequence
  Description of Artificial Sequence: Synthetic oligonucleotide
cuuucuccucacuaagacc

SEQ ID NO: 2858258 - RNA, 19 nt, Artificial Sequence
  Description of Artificial Sequence: Synthetic oligonucleotide
agccagaaagugcuccacc

SEQ ID NO: 2858259 - RNA, 19 nt, Artificial Sequence
  Description of Artificial Sequence: Synthetic oligonucleotide
cugguuaaucaucaggguc

SEQ ID NO: 2858260 - RNA, 19 nt, Artificial Sequence
  Description of Artificial Sequence: Synthetic oligonucleotide
aggaggaggcuuuucauga

SEQ ID NO: 2858261 - RNA, 19 nt, Artificial Sequence
  Description of Artificial Sequence: Synthetic oligonucleotide
aaaauaugcuucccacuuu

SEQ ID NO: 2858262 - RNA, 19 nt, Artificial Sequence
  Description of Artificial Sequence: Synthetic oligonucleotide
gccaagacugaucugauug

SEQ ID NO: 2858263 - RNA, 19 nt, Artificial Sequence
  Description of Artificial Sequence: Synthetic oligonucleotide
aggaggcuuuucaugaugc

SEQ ID NO: 2858264 - RNA, 19 nt, Artificial Sequence
  Description of Artificial Sequence: Synthetic oligonucleotide
aguaaguggcuuucuccuc

SEQ ID NO: 2858265 - RNA, 19 nt, Artificial Sequence
  Description of Artificial Sequence: Synthetic oligonucleotide
ugucacuccaaaucgccac

SEQ ID NO: 2858266 - RNA, 19 nt, Artificial Sequence
  Description of Artificial Sequence: Synthetic oligonucleotide
gaaauggaaaagcacuucu

SEQ ID NO: 2858267 - RNA, 19 nt, Artificial Sequence
  Description of Artificial Sequence: Synthetic oligonucleotide
ggaaaagcacuucugucag

SEQ ID NO: 2858268 - RNA, 19 nt, Artificial Sequence
  Description of Artificial Sequence: Synthetic oligonucleotide
uuugggcucuguuaggaaa

SEQ ID NO: 2858269 - RNA, 19 nt, Artificial Sequence
  Description of Artificial Sequence: Synthetic oligonucleotide
caggagaucagcccgcacc

SEQ ID NO: 2858270 - RNA, 19 nt, Artificial Sequence
  Description of Artificial Sequence: Synthetic oligonucleotide
cacuuucucuaauucacug

SEQ ID NO: 2858271 - RNA, 19 nt, Artificial Sequence
  Description of Artificial Sequence: Synthetic oligonucleotide
agugcuccaccucuuuggg

SEQ ID NO: 2858272 - RNA, 19 nt, Artificial Sequence
  Description of Artificial Sequence: Synthetic oligonucleotide
guuaggaaauggaaaagca

SEQ ID NO: 2858273 - RNA, 19 nt, Artificial Sequence
  Description of Artificial Sequence: Synthetic oligonucleotide
ucacuaagaccuagaguca

SEQ ID NO: 2858274 - RNA, 19 nt, Artificial Sequence
  Description of Artificial Sequence: Synthetic oligonucleotide
gaaaagcacuucugucagg

SEQ ID NO: 2858275 - RNA, 19 nt, Artificial Sequence
  Description of Artificial Sequence: Synthetic oligonucleotide
ucagggucugaccuauggc

SEQ ID NO: 2858276 - RNA, 19 nt, Artificial Sequence
  Description of Artificial Sequence: Synthetic oligonucleotide
uggcuuucuccucacuaag

SEQ ID NO: 2858277 - RNA, 19 nt, Artificial Sequence
  Description of Artificial Sequence: Synthetic oligonucleotide
cagcugguuaaucaucagg

SEQ ID NO: 2858278 - RNA, 19 nt, Artificial Sequence
  Description of Artificial Sequence: Synthetic oligonucleotide
agaugucacuccaaaucgc

SEQ ID NO: 2858279 - RNA, 19 nt, Artificial Sequence
  Description of Artificial Sequence: Synthetic oligonucleotide
acugcuuccagaugucacu

SEQ ID NO: 2858280 - RNA, 19 nt, Artificial Sequence
  Description of Artificial Sequence: Synthetic oligonucleotide
gauuggugguggcaaauuc

SEQ ID NO: 2858281 - RNA, 19 nt, Artificial Sequence
  Description of Artificial Sequence: Synthetic oligonucleotide
uucagugcaccauucggaa

SEQ ID NO: 2858282 - RNA, 19 nt, Artificial Sequence
  Description of Artificial Sequence: Synthetic oligonucleotide
ucccacuuucucuaauuca

SEQ ID NO: 2858283 - RNA, 19 nt, Artificial Sequence
  Description of Artificial Sequence: Synthetic oligonucleotide
uaagaccuagagucaggag

SEQ ID NO: 2858284 - RNA, 19 nt, Artificial Sequence
  Description of Artificial Sequence: Synthetic oligonucleotide
ucgccacuccauaucaacc

SEQ ID NO: 2858285 - RNA, 19 nt, Artificial Sequence
  Description of Artificial Sequence: Synthetic oligonucleotide
gagaucagcccgcaccugc

SEQ ID NO: 2858286 - RNA, 19 nt, Artificial Sequence
  Description of Artificial Sequence: Synthetic oligonucleotide
auucggaaccaggaggagg

SEQ ID NO: 2858287 - RNA, 19 nt, Artificial Sequence
  Description of Artificial Sequence: Synthetic oligonucleotide
ucaguugcugcaugucgcc

SEQ ID NO: 2858288 - RNA, 19 nt, Artificial Sequence
  Description of Artificial Sequence: Synthetic oligonucleotide
ucagaaaaguaaguggcuu

SEQ ID NO: 2858289 - RNA, 19 nt, Artificial Sequence
  Description of Artificial Sequence: Synthetic oligonucleotide
gaacccauggcgccaggag

SEQ ID NO: 2858290 - RNA, 19 nt, Artificial Sequence
  Description of Artificial Sequence: Synthetic oligonucleotide
ucuuugggcucuguuagga

SEQ ID NO: 2858291 - RNA, 19 nt, Artificial Sequence
  Description of Artificial Sequence: Synthetic oligonucleotide
agggucugaccuauggccc

SEQ ID NO: 2858292 - RNA, 19 nt, Artificial Sequence
  Description of Artificial Sequence: Synthetic oligonucleotide
cuagagucaggagaucagc

SEQ ID NO: 2858293 - RNA, 19 nt, Artificial Sequence
  Description of Artificial Sequence: Synthetic oligonucleotide
uucccacuuucucuaauuc

SEQ ID NO: 2858294 - RNA, 19 nt, Artificial Sequence
  Description of Artificial Sequence: Synthetic oligonucleotide
uuccagaugucacuccaaa

SEQ ID NO: 2858295 - RNA, 19 nt, Artificial Sequence
  Description of Artificial Sequence: Synthetic oligonucleotide
ugcaugucgccgcgcacgg

SEQ ID NO: 2858296 - RNA, 19 nt, Artificial Sequence
  Description of Artificial Sequence: Synthetic oligonucleotide
gaggaggcuuuucaugaug

SEQ ID NO: 2858297 - RNA, 19 nt, Artificial Sequence
  Description of Artificial Sequence: Synthetic oligonucleotide
ggcaaauucagagagcuga

SEQ ID NO: 2858298 - RNA, 19 nt, Artificial Sequence
  Description of Artificial Sequence: Synthetic oligonucleotide
aagacugaucugauuggug

SEQ ID NO: 2858299 - RNA, 19 nt, Artificial Sequence
  Description of Artificial Sequence: Synthetic oligonucleotide
ugagccagaaagugcucca

SEQ ID NO: 2858300 - RNA, 19 nt, Artificial Sequence
  Description of Artificial Sequence: Synthetic oligonucleotide
caugucgccgcgcacggcc

SEQ ID NO: 2858301 - RNA, 19 nt, Artificial Sequence
  Description of Artificial Sequence: Synthetic oligonucleotide
caaaucgccacuccauauc

SEQ ID NO: 2858302 - RNA, 19 nt, Artificial Sequence
  Description of Artificial Sequence: Synthetic oligonucleotide
guaaguggcuuucuccuca

SEQ ID NO: 2858303 - RNA, 19 nt, Artificial Sequence
  Description of Artificial Sequence: Synthetic oligonucleotide
aucagcccgcaccugcucg

SEQ ID NO: 2858304 - RNA, 19 nt, Artificial Sequence
  Description of Artificial Sequence: Synthetic oligonucleotide
acccauggcgccaggagcc

SEQ ID NO: 2858305 - RNA, 19 nt, Artificial Sequence
  Description of Artificial Sequence: Synthetic oligonucleotide
aggagaucagcccgcaccu

SEQ ID NO: 2858306 - RNA, 19 nt, Artificial Sequence
  Description of Artificial Sequence: Synthetic oligonucleotide
acuccaaaucgccacucca

SEQ ID NO: 2858307 - RNA, 19 nt, Artificial Sequence
  Description of Artificial Sequence: Synthetic oligonucleotide
cucuguuaggaaauggaaa

SEQ ID NO: 2858308 - RNA, 19 nt, Artificial Sequence
  Description of Artificial Sequence: Synthetic oligonucleotide
uccaaaucgccacuccaua

SEQ ID NO: 2858309 - RNA, 19 nt, Artificial Sequence
  Description of Artificial Sequence: Synthetic oligonucleotide
cuucagugcaccauucgga

SEQ ID NO: 2858310 - RNA, 19 nt, Artificial Sequence
  Description of Artificial Sequence: Synthetic oligonucleotide
accaggaggaggcuuuuca

SEQ ID NO: 2858311 - RNA, 19 nt, Artificial Sequence
  Description of Artificial Sequence: Synthetic oligonucleotide
uugggcucuguuaggaaau

SEQ ID NO: 2858312 - RNA, 19 nt, Artificial Sequence
  Description of Artificial Sequence: Synthetic oligonucleotide
ugaucugauuggugguggc

SEQ ID NO: 2858313 - RNA, 19 nt, Artificial Sequence
  Description of Artificial Sequence: Synthetic oligonucleotide
guugcugcaugucgccgcg

SEQ ID NO: 2858314 - RNA, 19 nt, Artificial Sequence
  Description of Artificial Sequence: Synthetic oligonucleotide
ccagaugucacuccaaauc

SEQ ID NO: 2858315 - RNA, 19 nt, Artificial Sequence
  Description of Artificial Sequence: Synthetic oligonucleotide
cugaucugauugguggugg

SEQ ID NO: 2858316 - RNA, 19 nt, Artificial Sequence
  Description of Artificial Sequence: Synthetic oligonucleotide
cuuucucuaauucacugcu

SEQ ID NO: 2858317 - RNA, 19 nt, Artificial Sequence
  Description of Artificial Sequence: Synthetic oligonucleotide
aguggcuuucuccucacua

SEQ ID NO: 2858318 - RNA, 19 nt, Artificial Sequence
  Description of Artificial Sequence: Synthetic oligonucleotide
cuuccacuuuucagaaaag

SEQ ID NO: 2858319 - RNA, 19 nt, Artificial Sequence
  Description of Artificial Sequence: Synthetic oligonucleotide
acuuuucagaaaaguaagu

SEQ ID NO: 2858320 - RNA, 19 nt, Artificial Sequence
  Description of Artificial Sequence: Synthetic oligonucleotide
agcugagccagaaagugcu

SEQ ID NO: 2858321 - RNA, 19 nt, Artificial Sequence
  Description of Artificial Sequence: Synthetic oligonucleotide
cacuaagaccuagagucag

SEQ ID NO: 2858322 - RNA, 19 nt, Artificial Sequence
  Description of Artificial Sequence: Synthetic oligonucleotide
agugaggcccuucuucagu

SEQ ID NO: 2858323 - RNA, 19 nt, Artificial Sequence
  Description of Artificial Sequence: Synthetic oligonucleotide
auuggugguggcaaauuca

SEQ ID NO: 2858324 - RNA, 19 nt, Artificial Sequence
  Description of Artificial Sequence: Synthetic oligonucleotide
agcugguucaguugcugca

SEQ ID NO: 2858325 - RNA, 19 nt, Artificial Sequence
  Description of Artificial Sequence: Synthetic oligonucleotide
agucaggagaucagcccgc

SEQ ID NO: 2858326 - RNA, 19 nt, Artificial Sequence
  Description of Artificial Sequence: Synthetic oligonucleotide
cccacuuucucuaauucac

SEQ ID NO: 2858327 - RNA, 19 nt, Artificial Sequence
  Description of Artificial Sequence: Synthetic oligonucleotide
aauaugcuucccacuuucu

SEQ ID NO: 2858328 - RNA, 19 nt, Artificial Sequence
  Description of Artificial Sequence: Synthetic oligonucleotide
acuaagaccuagagucagg

SEQ ID NO: 2858329 - RNA, 19 nt, Artificial Sequence
  Description of Artificial Sequence: Synthetic oligonucleotide
cauaucaaccagcugguua

SEQ ID NO: 2858330 - RNA, 19 nt, Artificial Sequence
  Description of Artificial Sequence: Synthetic oligonucleotide
acugaucugauugguggug

SEQ ID NO: 2858331 - RNA, 19 nt, Artificial Sequence
  Description of Artificial Sequence: Synthetic oligonucleotide
ucuccucacuaagaccuag

SEQ ID NO: 2858332 - RNA, 19 nt, Artificial Sequence
  Description of Artificial Sequence: Synthetic oligonucleotide
cugagaacugcugcgcgcc

SEQ ID NO: 2858333 - RNA, 19 nt, Artificial Sequence
  Description of Artificial Sequence: Synthetic oligonucleotide
cuaauucacugcuuccaga

SEQ ID NO: 2858334 - RNA, 19 nt, Artificial Sequence
  Description of Artificial Sequence: Synthetic oligonucleotide
accuagagucaggagauca

SEQ ID NO: 2858335 - RNA, 19 nt, Artificial Sequence
  Description of Artificial Sequence: Synthetic oligonucleotide
cugagccagaaagugcucc

SEQ ID NO: 2858336 - RNA, 19 nt, Artificial Sequence
  Description of Artificial Sequence: Synthetic oligonucleotide
ugcagugcaggcgaaccca

SEQ ID NO: 2858337 - RNA, 19 nt, Artificial Sequence
  Description of Artificial Sequence: Synthetic oligonucleotide
cauucugcuuccacuuuuc

SEQ ID NO: 2858338 - RNA, 19 nt, Artificial Sequence
  Description of Artificial Sequence: Synthetic oligonucleotide
cuauggcccacugugcaag

SEQ ID NO: 2858339 - RNA, 19 nt, Artificial Sequence
  Description of Artificial Sequence: Synthetic oligonucleotide
ugguucaguugcugcaugu

SEQ ID NO: 2858340 - RNA, 19 nt, Artificial Sequence
  Description of Artificial Sequence: Synthetic oligonucleotide
gcuuucuccucacuaagac

SEQ ID NO: 2858341 - RNA, 19 nt, Artificial Sequence
  Description of Artificial Sequence: Synthetic oligonucleotide
gcuuccacuuuucagaaaa

SEQ ID NO: 2858342 - RNA, 19 nt, Artificial Sequence
  Description of Artificial Sequence: Synthetic oligonucleotide
cacugcuuccagaugucac

SEQ ID NO: 2858343 - RNA, 19 nt, Artificial Sequence
  Description of Artificial Sequence: Synthetic oligonucleotide
ucggcagugaggcccuucu

SEQ ID NO: 2858344 - RNA, 19 nt, Artificial Sequence
  Description of Artificial Sequence: Synthetic oligonucleotide
cucuuugggcucuguuagg

SEQ ID NO: 2858345 - RNA, 19 nt, Artificial Sequence
  Description of Artificial Sequence: Synthetic oligonucleotide
agaacugcugcgcgcccag

SEQ ID NO: 2858346 - RNA, 19 nt, Artificial Sequence
  Description of Artificial Sequence: Synthetic oligonucleotide
uggcaaauucagagagcug

SEQ ID NO: 2858347 - RNA, 19 nt, Artificial Sequence
  Description of Artificial Sequence: Synthetic oligonucleotide
accucuuugggcucuguua

SEQ ID NO: 2858348 - RNA, 19 nt, Artificial Sequence
  Description of Artificial Sequence: Synthetic oligonucleotide
ccaagacugaucugauugg

SEQ ID NO: 2858349 - RNA, 19 nt, Artificial Sequence
  Description of Artificial Sequence: Synthetic oligonucleotide
ugcugcaugucgccgcgca

SEQ ID NO: 2858350 - RNA, 19 nt, Artificial Sequence
  Description of Artificial Sequence: Synthetic oligonucleotide
uucacugcuuccagauguc

SEQ ID NO: 2858351 - RNA, 19 nt, Artificial Sequence
  Description of Artificial Sequence: Synthetic oligonucleotide
uuucucuaauucacugcuu

SEQ ID NO: 2858352 - RNA, 19 nt, Artificial Sequence
  Description of Artificial Sequence: Synthetic oligonucleotide
uccagaugucacuccaaau

SEQ ID NO: 2858353 - RNA, 19 nt, Artificial Sequence
  Description of Artificial Sequence: Synthetic oligonucleotide
ucugauuggugguggcaaa

SEQ ID NO: 2858354 - RNA, 19 nt, Artificial Sequence
  Description of Artificial Sequence: Synthetic oligonucleotide
gugaggcccuucuucagug

SEQ ID NO: 2858355 - RNA, 19 nt, Artificial Sequence
  Description of Artificial Sequence: Synthetic oligonucleotide
ucagugcaccauucggaac

SEQ ID NO: 2858356 - RNA, 19 nt, Artificial Sequence
  Description of Artificial Sequence: Synthetic oligonucleotide
agaccuagagucaggagau

SEQ ID NO: 2858357 - RNA, 19 nt, Artificial Sequence
  Description of Artificial Sequence: Synthetic oligonucleotide
caggcgaacccauggcgcc

SEQ ID NO: 2858358 - RNA, 19 nt, Artificial Sequence
  Description of Artificial Sequence: Synthetic oligonucleotide
aucaaccagcugguuaauc

SEQ ID NO: 2858359 - RNA, 19 nt, Artificial Sequence
  Description of Artificial Sequence: Synthetic oligonucleotide
caccauucggaaccaggag

SEQ ID NO: 2858360 - RNA, 19 nt, Artificial Sequence
  Description of Artificial Sequence: Synthetic oligonucleotide
ugcuuccagaugucacucc

SEQ ID NO: 2858361 - RNA, 19 nt, Artificial Sequence
  Description of Artificial Sequence: Synthetic oligonucleotide
auucugcuuccacuuuuca

SEQ ID NO: 2858362 - RNA, 19 nt, Artificial Sequence
  Description of Artificial Sequence: Synthetic oligonucleotide
ccacuuuucagaaaaguaa

SEQ ID NO: 2858363 - RNA, 19 nt, Artificial Sequence
  Description of Artificial Sequence: Synthetic oligonucleotide
acugugcaagguuggggca

SEQ ID NO: 2858364 - RNA, 19 nt, Artificial Sequence
  Description of Artificial Sequence: Synthetic oligonucleotide
gguuggggcauucugcuuc

SEQ ID NO: 2858365 - RNA, 19 nt, Artificial Sequence
  Description of Artificial Sequence: Synthetic oligonucleotide
cugcaugucgccgcgcacg

SEQ ID NO: 2858366 - RNA, 19 nt, Artificial Sequence
  Description of Artificial Sequence: Synthetic oligonucleotide
gagcugagccagaaagugc

SEQ ID NO: 2858367 - RNA, 19 nt, Artificial Sequence
  Description of Artificial Sequence: Synthetic oligonucleotide
uaaguggcuuucuccucac

SEQ ID NO: 2858368 - RNA, 19 nt, Artificial Sequence
  Description of Artificial Sequence: Synthetic oligonucleotide
ucaucagggucugaccuau

SEQ ID NO: 2858369 - RNA, 19 nt, Artificial Sequence
  Description of Artificial Sequence: Synthetic oligonucleotide
guuggggcauucugcuucc

SEQ ID NO: 2858370 - RNA, 19 nt, Artificial Sequence
  Description of Artificial Sequence: Synthetic oligonucleotide
cugcucggcagugaggccc

SEQ ID NO: 2858371 - RNA, 19 nt, Artificial Sequence
  Description of Artificial Sequence: Synthetic oligonucleotide
acuccauaucaaccagcug

SEQ ID NO: 2858372 - RNA, 19 nt, Artificial Sequence
  Description of Artificial Sequence: Synthetic oligonucleotide
cuaagaccuagagucagga

SEQ ID NO: 2858373 - RNA, 19 nt, Artificial Sequence
  Description of Artificial Sequence: Synthetic oligonucleotide
cuucugucagggcugagaa

SEQ ID NO: 2858374 - RNA, 19 nt, Artificial Sequence
  Description of Artificial Sequence: Synthetic oligonucleotide
ugagaacugcugcgcgccc

SEQ ID NO: 2858375 - RNA, 19 nt, Artificial Sequence
  Description of Artificial Sequence: Synthetic oligonucleotide
ucgggcacgggguccugcg

SEQ ID NO: 2858376 - RNA, 19 nt, Artificial Sequence
  Description of Artificial Sequence: Synthetic oligonucleotide
ugucagggcugagaacugc

SEQ ID NO: 2858377 - RNA, 19 nt, Artificial Sequence
  Description of Artificial Sequence: Synthetic oligonucleotide
agcacuucugucagggcug

SEQ ID NO: 2858378 - RNA, 19 nt, Artificial Sequence
  Description of Artificial Sequence: Synthetic oligonucleotide
cacuccaaaucgccacucc

SEQ ID NO: 2858379 - RNA, 19 nt, Artificial Sequence
  Description of Artificial Sequence: Synthetic oligonucleotide
ucagagagcugagccagaa

SEQ ID NO: 2858380 - RNA, 19 nt, Artificial Sequence
  Description of Artificial Sequence: Synthetic oligonucleotide
aucugauuggugguggcaa

SEQ ID NO: 2858381 - RNA, 19 nt, Artificial Sequence
  Description of Artificial Sequence: Synthetic oligonucleotide
aggaaauggaaaagcacuu

SEQ ID NO: 2858382 - RNA, 19 nt, Artificial Sequence
  Description of Artificial Sequence: Synthetic oligonucleotide
uggggcauucugcuuccac

SEQ ID NO: 2858383 - RNA, 19 nt, Artificial Sequence
  Description of Artificial Sequence: Synthetic oligonucleotide
uccugcgugcagugcaggc

SEQ ID NO: 2858384 - RNA, 19 nt, Artificial Sequence
  Description of Artificial Sequence: Synthetic oligonucleotide
ugaggcccuucuucagugc

SEQ ID NO: 2858385 - RNA, 19 nt, Artificial Sequence
  Description of Artificial Sequence: Synthetic oligonucleotide
augcuucccacuuucucua

SEQ ID NO: 2858386 - RNA, 19 nt, Artificial Sequence
  Description of Artificial Sequence: Synthetic oligonucleotide
uucagagagcugagccaga

SEQ ID NO: 2858387 - RNA, 19 nt, Artificial Sequence
  Description of Artificial Sequence: Synthetic oligonucleotide
cauggcgccaggagcccgg

SEQ ID NO: 2858388 - RNA, 19 nt, Artificial Sequence
  Description of Artificial Sequence: Synthetic oligonucleotide
aaccaggaggaggcuuuuc

SEQ ID NO: 2858389 - RNA, 19 nt, Artificial Sequence
  Description of Artificial Sequence: Synthetic oligonucleotide
gcaagguuggggcauucug

SEQ ID NO: 2858390 - RNA, 19 nt, Artificial Sequence
  Description of Artificial Sequence: Synthetic oligonucleotide
acugcugcgcgcccagcug

SEQ ID NO: 2858391 - RNA, 19 nt, Artificial Sequence
  Description of Artificial Sequence: Synthetic oligonucleotide
gaggcccuucuucagugca

SEQ ID NO: 2858392 - RNA, 19 nt, Artificial Sequence
  Description of Artificial Sequence: Synthetic oligonucleotide
uucugucagggcugagaac

SEQ ID NO: 2858393 - RNA, 19 nt, Artificial Sequence
  Description of Artificial Sequence: Synthetic oligonucleotide
guggcuuucuccucacuaa

SEQ ID NO: 2858394 - RNA, 19 nt, Artificial Sequence
  Description of Artificial Sequence: Synthetic oligonucleotide
cugcugcgcgcccagcugg

SEQ ID NO: 2858395 - RNA, 19 nt, Artificial Sequence
  Description of Artificial Sequence: Synthetic oligonucleotide
ugcgcgcccagcugguuca

SEQ ID NO: 2858396 - RNA, 19 nt, Artificial Sequence
  Description of Artificial Sequence: Synthetic oligonucleotide
aaguggcuuucuccucacu

SEQ ID NO: 2858397 - RNA, 19 nt, Artificial Sequence
  Description of Artificial Sequence: Synthetic oligonucleotide
aucaucagggucugaccua

SEQ ID NO: 2858398 - RNA, 19 nt, Artificial Sequence
  Description of Artificial Sequence: Synthetic oligonucleotide
ccuagagucaggagaucag

SEQ ID NO: 2858399 - RNA, 19 nt, Artificial Sequence
  Description of Artificial Sequence: Synthetic oligonucleotide
gugcagugcaggcgaaccc

SEQ ID NO: 2858400 - RNA, 19 nt, Artificial Sequence
  Description of Artificial Sequence: Synthetic oligonucleotide
ggaaauggaaaagcacuuc

SEQ ID NO: 2858401 - RNA, 19 nt, Artificial Sequence
  Description of Artificial Sequence: Synthetic oligonucleotide
gaccuauggcccacugugc

SEQ ID NO: 2858402 - RNA, 19 nt, Artificial Sequence
  Description of Artificial Sequence: Synthetic oligonucleotide
cagaaagugcuccaccucu

SEQ ID NO: 2858403 - RNA, 19 nt, Artificial Sequence
  Description of Artificial Sequence: Synthetic oligonucleotide
cacuccauaucaaccagcu

SEQ ID NO: 2858404 - RNA, 19 nt, Artificial Sequence
  Description of Artificial Sequence: Synthetic oligonucleotide
ggcagugaggcccuucuuc

SEQ ID NO: 2858405 - RNA, 19 nt, Artificial Sequence
  Description of Artificial Sequence: Synthetic oligonucleotide
ugauuggugguggcaaauu

SEQ ID NO: 2858406 - RNA, 19 nt, Artificial Sequence
  Description of Artificial Sequence: Synthetic oligonucleotide
ucaggagaucagcccgcac

SEQ ID NO: 2858407 - RNA, 19 nt, Artificial Sequence
  Description of Artificial Sequence: Synthetic oligonucleotide
gcaaauucagagagcugag

SEQ ID NO: 2858408 - RNA, 19 nt, Artificial Sequence
  Description of Artificial Sequence: Synthetic oligonucleotide
cugguucaguugcugcaug

SEQ ID NO: 2858409 - RNA, 19 nt, Artificial Sequence
  Description of Artificial Sequence: Synthetic oligonucleotide
cagugaggcccuucuucag

SEQ ID NO: 2858410 - RNA, 19 nt, Artificial Sequence
  Description of Artificial Sequence: Synthetic oligonucleotide
gaaaaguaaguggcuuucu

SEQ ID NO: 2858411 - RNA, 19 nt, Artificial Sequence
  Description of Artificial Sequence: Synthetic oligonucleotide
gcugagaacugcugcgcgc

SEQ ID NO: 2858412 - RNA, 19 nt, Artificial Sequence
  Description of Artificial Sequence: Synthetic oligonucleotide
ugggcucuguuaggaaaug

SEQ ID NO: 2858413 - RNA, 19 nt, Artificial Sequence
  Description of Artificial Sequence: Synthetic oligonucleotide
gccacuccauaucaaccag

SEQ ID NO: 2858414 - RNA, 19 nt, Artificial Sequence
  Description of Artificial Sequence: Synthetic oligonucleotide
ucacuccaaaucgccacuc

SEQ ID NO: 2858415 - RNA, 19 nt, Artificial Sequence
  Description of Artificial Sequence: Synthetic oligonucleotide
uggcccacugugcaagguu

SEQ ID NO: 2858416 - RNA, 19 nt, Artificial Sequence
  Description of Artificial Sequence: Synthetic oligonucleotide
ggggccaagacugaucuga

SEQ ID NO: 2858417 - RNA, 19 nt, Artificial Sequence
  Description of Artificial Sequence: Synthetic oligonucleotide
gguuaaucaucagggucug

SEQ ID NO: 2858418 - RNA, 19 nt, Artificial Sequence
  Description of Artificial Sequence: Synthetic oligonucleotide
caguugcugcaugucgccg

SEQ ID NO: 2858419 - RNA, 19 nt, Artificial Sequence
  Description of Artificial Sequence: Synthetic oligonucleotide
ugcucggcagugaggcccu

SEQ ID NO: 2858420 - RNA, 19 nt, Artificial Sequence
  Description of Artificial Sequence: Synthetic oligonucleotide
cugucagggcugagaacug

SEQ ID NO: 2858421 - RNA, 19 nt, Artificial Sequence
  Description of Artificial Sequence: Synthetic oligonucleotide
gcagugaggcccuucuuca

SEQ ID NO: 2858422 - RNA, 19 nt, Artificial Sequence
  Description of Artificial Sequence: Synthetic oligonucleotide
augucacuccaaaucgcca

SEQ ID NO: 2858423 - RNA, 19 nt, Artificial Sequence
  Description of Artificial Sequence: Synthetic oligonucleotide
gcuuccagaugucacucca

SEQ ID NO: 2858424 - RNA, 19 nt, Artificial Sequence
  Description of Artificial Sequence: Synthetic oligonucleotide
uucuccucacuaagaccua

SEQ ID NO: 2858425 - RNA, 19 nt, Artificial Sequence
  Description of Artificial Sequence: Synthetic oligonucleotide
cugcuuccagaugucacuc

SEQ ID NO: 2858426 - RNA, 19 nt, Artificial Sequence
  Description of Artificial Sequence: Synthetic oligonucleotide
cugcuuccacuuuucagaa

SEQ ID NO: 2858427 - RNA, 19 nt, Artificial Sequence
  Description of Artificial Sequence: Synthetic oligonucleotide
ugcuuccacuuuucagaaa

SEQ ID NO: 2858428 - RNA, 19 nt, Artificial Sequence
  Description of Artificial Sequence: Synthetic oligonucleotide
ugcaagguuggggcauucu

SEQ ID NO: 2858429 - RNA, 19 nt, Artificial Sequence
  Description of Artificial Sequence: Synthetic oligonucleotide
ccauucggaaccaggagga

SEQ ID NO: 2858430 - RNA, 19 nt, Artificial Sequence
  Description of Artificial Sequence: Synthetic oligonucleotide
cauucggaaccaggaggag

SEQ ID NO: 2858431 - RNA, 19 nt, Artificial Sequence
  Description of Artificial Sequence: Synthetic oligonucleotide
gagccagaaagugcuccac

SEQ ID NO: 2858432 - RNA, 19 nt, Artificial Sequence
  Description of Artificial Sequence: Synthetic oligonucleotide
gugcuccaccucuuugggc

SEQ ID NO: 2858433 - RNA, 19 nt, Artificial Sequence
  Description of Artificial Sequence: Synthetic oligonucleotide
gguggcaaauucagagagc

SEQ ID NO: 2858434 - RNA, 19 nt, Artificial Sequence
  Description of Artificial Sequence: Synthetic oligonucleotide
ggcucuguuaggaaaugga

SEQ ID NO: 2858435 - RNA, 19 nt, Artificial Sequence
  Description of Artificial Sequence: Synthetic oligonucleotide
ccacuccauaucaaccagc

SEQ ID NO: 2858436 - RNA, 19 nt, Artificial Sequence
  Description of Artificial Sequence: Synthetic oligonucleotide
aaucgccacuccauaucaa

SEQ ID NO: 2858437 - RNA, 19 nt, Artificial Sequence
  Description of Artificial Sequence: Synthetic oligonucleotide
cugcgugcagugcaggcga

SEQ ID NO: 2858438 - RNA, 19 nt, Artificial Sequence
  Description of Artificial Sequence: Synthetic oligonucleotide
aggcccuucuucagugcac

SEQ ID NO: 2858439 - RNA, 19 nt, Artificial Sequence
  Description of Artificial Sequence: Synthetic oligonucleotide
agugcaccauucggaacca

SEQ ID NO: 2858440 - RNA, 19 nt, Artificial Sequence
  Description of Artificial Sequence: Synthetic oligonucleotide
gggcucuguuaggaaaugg

SEQ ID NO: 2858441 - RNA, 19 nt, Artificial Sequence
  Description of Artificial Sequence: Synthetic oligonucleotide
cuccucacuaagaccuaga

SEQ ID NO: 2858442 - RNA, 19 nt, Artificial Sequence
  Description of Artificial Sequence: Synthetic oligonucleotide
ugcuucccacuuucucuaa

SEQ ID NO: 2858443 - RNA, 19 nt, Artificial Sequence
  Description of Artificial Sequence: Synthetic oligonucleotide
cuuugggcucuguuaggaa

SEQ ID NO: 2858444 - RNA, 19 nt, Artificial Sequence
  Description of Artificial Sequence: Synthetic oligonucleotide
cagaaaaguaaguggcuuu

SEQ ID NO: 2858445 - RNA, 19 nt, Artificial Sequence
  Description of Artificial Sequence: Synthetic oligonucleotide
gagagcugagccagaaagu

SEQ ID NO: 2858446 - RNA, 19 nt, Artificial Sequence
  Description of Artificial Sequence: Synthetic oligonucleotide
gagaacugcugcgcgccca

SEQ ID NO: 2858447 - RNA, 19 nt, Artificial Sequence
  Description of Artificial Sequence: Synthetic oligonucleotide
gcaggcgaacccauggcgc

SEQ ID NO: 2858448 - RNA, 19 nt, Artificial Sequence
  Description of Artificial Sequence: Synthetic oligonucleotide
agaucagcccgcaccugcu

SEQ ID NO: 2858449 - RNA, 19 nt, Artificial Sequence
  Description of Artificial Sequence: Synthetic oligonucleotide
gaaagugcuccaccucuuu

SEQ ID NO: 2858450 - RNA, 19 nt, Artificial Sequence
  Description of Artificial Sequence: Synthetic oligonucleotide
gcucuguuaggaaauggaa

SEQ ID NO: 2858451 - RNA, 19 nt, Artificial Sequence
  Description of Artificial Sequence: Synthetic oligonucleotide
cagugcaggcgaacccaug

SEQ ID NO: 2858452 - RNA, 19 nt, Artificial Sequence
  Description of Artificial Sequence: Synthetic oligonucleotide
ugugcaagguuggggcauu

SEQ ID NO: 2858453 - RNA, 19 nt, Artificial Sequence
  Description of Artificial Sequence: Synthetic oligonucleotide
agaaagugcuccaccucuu

SEQ ID NO: 2858454 - RNA, 19 nt, Artificial Sequence
  Description of Artificial Sequence: Synthetic oligonucleotide
gcaccauucggaaccagga

SEQ ID NO: 2858455 - RNA, 19 nt, Artificial Sequence
  Description of Artificial Sequence: Synthetic oligonucleotide
gucacuccaaaucgccacu

SEQ ID NO: 2858456 - RNA, 19 nt, Artificial Sequence
  Description of Artificial Sequence: Synthetic oligonucleotide
ggcccacugugcaagguug

SEQ ID NO: 2858457 - RNA, 19 nt, Artificial Sequence
  Description of Artificial Sequence: Synthetic oligonucleotide
cuccaaaucgccacuccau

SEQ ID NO: 2858458 - RNA, 19 nt, Artificial Sequence
  Description of Artificial Sequence: Synthetic oligonucleotide
ugcugcgcgcccagcuggu

SEQ ID NO: 2858459 - RNA, 19 nt, Artificial Sequence
  Description of Artificial Sequence: Synthetic oligonucleotide
ccugcgugcagugcaggcg

SEQ ID NO: 2858460 - RNA, 19 nt, Artificial Sequence
  Description of Artificial Sequence: Synthetic oligonucleotide
ccacugugcaagguugggg

SEQ ID NO: 2858461 - RNA, 19 nt, Artificial Sequence
  Description of Artificial Sequence: Synthetic oligonucleotide
ggguccugcgugcagugca

SEQ ID NO: 2858462 - RNA, 19 nt, Artificial Sequence
  Description of Artificial Sequence: Synthetic oligonucleotide
gguucaguugcugcauguc

SEQ ID NO: 2858463 - RNA, 19 nt, Artificial Sequence
  Description of Artificial Sequence: Synthetic oligonucleotide
ccagaaagugcuccaccuc

SEQ ID NO: 2858464 - RNA, 19 nt, Artificial Sequence
  Description of Artificial Sequence: Synthetic oligonucleotide
caagacugaucugauuggu

SEQ ID NO: 2858465 - RNA, 19 nt, Artificial Sequence
  Description of Artificial Sequence: Synthetic oligonucleotide
caucagggucugaccuaug

SEQ ID NO: 2858466 - RNA, 19 nt, Artificial Sequence
  Description of Artificial Sequence: Synthetic oligonucleotide
ugcgugcagugcaggcgaa

SEQ ID NO: 2858467 - RNA, 19 nt, Artificial Sequence
  Description of Artificial Sequence: Synthetic oligonucleotide
gccagaaagugcuccaccu

SEQ ID NO: 2858468 - RNA, 19 nt, Artificial Sequence
  Description of Artificial Sequence: Synthetic oligonucleotide
guccugcgugcagugcagg

SEQ ID NO: 2858469 - RNA, 19 nt, Artificial Sequence
  Description of Artificial Sequence: Synthetic oligonucleotide
auggcgccaggagcccggc

SEQ ID NO: 2858470 - RNA, 19 nt, Artificial Sequence
  Description of Artificial Sequence: Synthetic oligonucleotide
cugcgcgcccagcugguuc

SEQ ID NO: 2858471 - RNA, 19 nt, Artificial Sequence
  Description of Artificial Sequence: Synthetic oligonucleotide
ggcacgggguccugcgugc

SEQ ID NO: 2858472 - RNA, 19 nt, Artificial Sequence
  Description of Artificial Sequence: Synthetic oligonucleotide
cuucccacuuucucuaauu

SEQ ID NO: 2858473 - RNA, 19 nt, Artificial Sequence
  Description of Artificial Sequence: Synthetic oligonucleotide
gcugguuaaucaucagggu

SEQ ID NO: 2858474 - RNA, 19 nt, Artificial Sequence
  Description of Artificial Sequence: Synthetic oligonucleotide
gcuuuucaugaugcuuuug

SEQ ID NO: 2858475 - RNA, 19 nt, Artificial Sequence
  Description of Artificial Sequence: Synthetic oligonucleotide
agguuggggcauucugcuu

SEQ ID NO: 2858476 - RNA, 19 nt, Artificial Sequence
  Description of Artificial Sequence: Synthetic oligonucleotide
guuaaucaucagggucuga

SEQ ID NO: 2858477 - RNA, 19 nt, Artificial Sequence
  Description of Artificial Sequence: Synthetic oligonucleotide
acgggguccugcgugcagu

SEQ ID NO: 2858478 - RNA, 19 nt, Artificial Sequence
  Description of Artificial Sequence: Synthetic oligonucleotide
ggggcauucugcuuccacu

SEQ ID NO: 2858479 - RNA, 19 nt, Artificial Sequence
  Description of Artificial Sequence: Synthetic oligonucleotide
gggcugagaacugcugcgc

SEQ ID NO: 2858480 - RNA, 19 nt, Artificial Sequence
  Description of Artificial Sequence: Synthetic oligonucleotide
gggcacgggguccugcgug

SEQ ID NO: 2858481 - RNA, 19 nt, Artificial Sequence
  Description of Artificial Sequence: Synthetic oligonucleotide
gaccuagagucaggagauc

SEQ ID NO: 2858482 - RNA, 19 nt, Artificial Sequence
  Description of Artificial Sequence: Synthetic oligonucleotide
gggucugaccuauggccca

SEQ ID NO: 2858483 - RNA, 19 nt, Artificial Sequence
  Description of Artificial Sequence: Synthetic oligonucleotide
ucggaaccaggaggaggcu

SEQ ID NO: 2858484 - RNA, 19 nt, Artificial Sequence
  Description of Artificial Sequence: Synthetic oligonucleotide
cacgggguccugcgugcag

SEQ ID NO: 2858485 - RNA, 19 nt, Artificial Sequence
  Description of Artificial Sequence: Synthetic oligonucleotide
ggcuuucuccucacuaaga

SEQ ID NO: 2858486 - RNA, 19 nt, Artificial Sequence
  Description of Artificial Sequence: Synthetic oligonucleotide
acggccucgggcacggggu

SEQ ID NO: 2858487 - RNA, 19 nt, Artificial Sequence
  Description of Artificial Sequence: Synthetic oligonucleotide
cgugcagugcaggcgaacc

SEQ ID NO: 2858488 - RNA, 19 nt, Artificial Sequence
  Description of Artificial Sequence: Synthetic oligonucleotide
gucaggagaucagcccgca

SEQ ID NO: 2858489 - RNA, 19 nt, Artificial Sequence
  Description of Artificial Sequence: Synthetic oligonucleotide
ugucgccgcgcacggccuc

SEQ ID NO: 2858490 - RNA, 19 nt, Artificial Sequence
  Description of Artificial Sequence: Synthetic oligonucleotide
gguccugcgugcagugcag

SEQ ID NO: 2858491 - RNA, 19 nt, Artificial Sequence
  Description of Artificial Sequence: Synthetic oligonucleotide
gaacugcugcgcgcccagc

SEQ ID NO: 2858492 - RNA, 19 nt, Artificial Sequence
  Description of Artificial Sequence: Synthetic oligonucleotide
gcccacugugcaagguugg

SEQ ID NO: 2858493 - RNA, 19 nt, Artificial Sequence
  Description of Artificial Sequence: Synthetic oligonucleotide
uugcugcaugucgccgcgc

SEQ ID NO: 2858494 - RNA, 19 nt, Artificial Sequence
  Description of Artificial Sequence: Synthetic oligonucleotide
aggcgaacccauggcgcca

SEQ ID NO: 2858495 - RNA, 19 nt, Artificial Sequence
  Description of Artificial Sequence: Synthetic oligonucleotide
cccacugugcaagguuggg

SEQ ID NO: 2858496 - RNA, 19 nt, Artificial Sequence
  Description of Artificial Sequence: Synthetic oligonucleotide
cagagagcugagccagaaa

SEQ ID NO: 2858497 - RNA, 19 nt, Artificial Sequence
  Description of Artificial Sequence: Synthetic oligonucleotide
cucgggcacgggguccugc

SEQ ID NO: 2858498 - RNA, 19 nt, Artificial Sequence
  Description of Artificial Sequence: Synthetic oligonucleotide
uuggggcauucugcuucca

SEQ ID NO: 2858499 - RNA, 19 nt, Artificial Sequence
  Description of Artificial Sequence: Synthetic oligonucleotide
ggcgaacccauggcgccag

SEQ ID NO: 2858500 - RNA, 19 nt, Artificial Sequence
  Description of Artificial Sequence: Synthetic oligonucleotide
agcccgcaccugcucggca

SEQ ID NO: 2858501 - RNA, 19 nt, Artificial Sequence
  Description of Artificial Sequence: Synthetic oligonucleotide
cgccacuccauaucaacca

SEQ ID NO: 2858502 - RNA, 19 nt, Artificial Sequence
  Description of Artificial Sequence: Synthetic oligonucleotide
ggaggcuuuucaugaugcu

SEQ ID NO: 2858503 - RNA, 19 nt, Artificial Sequence
  Description of Artificial Sequence: Synthetic oligonucleotide
gugcaccauucggaaccag

SEQ ID NO: 2858504 - RNA, 19 nt, Artificial Sequence
  Description of Artificial Sequence: Synthetic oligonucleotide
uggcgccaggagcccggca

SEQ ID NO: 2858505 - RNA, 19 nt, Artificial Sequence
  Description of Artificial Sequence: Synthetic oligonucleotide
ggagaucagcccgcaccug

SEQ ID NO: 2858506 - RNA, 19 nt, Artificial Sequence
  Description of Artificial Sequence: Synthetic oligonucleotide
gggcauucugcuuccacuu

SEQ ID NO: 2858507 - RNA, 19 nt, Artificial Sequence
  Description of Artificial Sequence: Synthetic oligonucleotide
gcugcaugucgccgcgcac

SEQ ID NO: 2858508 - RNA, 19 nt, Artificial Sequence
  Description of Artificial Sequence: Synthetic oligonucleotide
ggucugaccuauggcccac

SEQ ID NO: 2858509 - RNA, 19 nt, Artificial Sequence
  Description of Artificial Sequence: Synthetic oligonucleotide
ccucacuaagaccuagagu

SEQ ID NO: 2858510 - RNA, 19 nt, Artificial Sequence
  Description of Artificial Sequence: Synthetic oligonucleotide
gcauucugcuuccacuuuu

SEQ ID NO: 2858511 - RNA, 19 nt, Artificial Sequence
  Description of Artificial Sequence: Synthetic oligonucleotide
cucggcagugaggcccuuc

SEQ ID NO: 2858512 - RNA, 19 nt, Artificial Sequence
  Description of Artificial Sequence: Synthetic oligonucleotide
ucgccgcgcacggccucgg

SEQ ID NO: 2858513 - RNA, 19 nt, Artificial Sequence
  Description of Artificial Sequence: Synthetic oligonucleotide
gccgcgcacggccucgggc

SEQ ID NO: 2858514 - RNA, 19 nt, Artificial Sequence
  Description of Artificial Sequence: Synthetic oligonucleotide
cacuucugucagggcugag

SEQ ID NO: 2858515 - RNA, 19 nt, Artificial Sequence
  Description of Artificial Sequence: Synthetic oligonucleotide
ccugcucggcagugaggcc

SEQ ID NO: 2858516 - RNA, 19 nt, Artificial Sequence
  Description of Artificial Sequence: Synthetic oligonucleotide
cugauuggugguggcaaau

SEQ ID NO: 2858517 - RNA, 19 nt, Artificial Sequence
  Description of Artificial Sequence: Synthetic oligonucleotide
cagcccgcaccugcucggc

SEQ ID NO: 2858518 - RNA, 19 nt, Artificial Sequence
  Description of Artificial Sequence: Synthetic oligonucleotide
augucgccgcgcacggccu

SEQ ID NO: 2858519 - RNA, 19 nt, Artificial Sequence
  Description of Artificial Sequence: Synthetic oligonucleotide
ccuauggcccacugugcaa

SEQ ID NO: 2858520 - RNA, 19 nt, Artificial Sequence
  Description of Artificial Sequence: Synthetic oligonucleotide
ccacuuucucuaauucacu

SEQ ID NO: 2858521 - RNA, 19 nt, Artificial Sequence
  Description of Artificial Sequence: Synthetic oligonucleotide
gugcaagguuggggcauuc

SEQ ID NO: 2858522 - RNA, 19 nt, Artificial Sequence
  Description of Artificial Sequence: Synthetic oligonucleotide
ccaaaucgccacuccauau

SEQ ID NO: 2858523 - RNA, 19 nt, Artificial Sequence
  Description of Artificial Sequence: Synthetic oligonucleotide
ggaaccaggaggaggcuuu

SEQ ID NO: 2858524 - RNA, 19 nt, Artificial Sequence
  Description of Artificial Sequence: Synthetic oligonucleotide
ggaggaggcuuuucaugau

SEQ ID NO: 2858525 - RNA, 19 nt, Artificial Sequence
  Description of Artificial Sequence: Synthetic oligonucleotide
cugugcaagguuggggcau

SEQ ID NO: 2858526 - RNA, 19 nt, Artificial Sequence
  Description of Artificial Sequence: Synthetic oligonucleotide
ggcuuuucaugaugcuuuu

SEQ ID NO: 2858527 - RNA, 19 nt, Artificial Sequence
  Description of Artificial Sequence: Synthetic oligonucleotide
gcgaacccauggcgccagg

SEQ ID NO: 2858528 - RNA, 19 nt, Artificial Sequence
  Description of Artificial Sequence: Synthetic oligonucleotide
cgcccagcugguucaguug

SEQ ID NO: 2858529 - RNA, 19 nt, Artificial Sequence
  Description of Artificial Sequence: Synthetic oligonucleotide
ccauggcgccaggagcccg

SEQ ID NO: 2858530 - RNA, 19 nt, Artificial Sequence
  Description of Artificial Sequence: Synthetic oligonucleotide
gcccuucuucagugcacca

SEQ ID NO: 2858531 - RNA, 19 nt, Artificial Sequence
  Description of Artificial Sequence: Synthetic oligonucleotide
gcacuucugucagggcuga

SEQ ID NO: 2858532 - RNA, 19 nt, Artificial Sequence
  Description of Artificial Sequence: Synthetic oligonucleotide
ccgcgcacggccucgggca

SEQ ID NO: 2858533 - RNA, 19 nt, Artificial Sequence
  Description of Artificial Sequence: Synthetic oligonucleotide
gaaccaggaggaggcuuuu

SEQ ID NO: 2858534 - RNA, 19 nt, Artificial Sequence
  Description of Artificial Sequence: Synthetic oligonucleotide
gcugguucaguugcugcau

SEQ ID NO: 2858535 - RNA, 19 nt, Artificial Sequence
  Description of Artificial Sequence: Synthetic oligonucleotide
ggcauucugcuuccacuuu

SEQ ID NO: 2858536 - RNA, 19 nt, Artificial Sequence
  Description of Artificial Sequence: Synthetic oligonucleotide
ggccucgggcacggggucc

SEQ ID NO: 2858537 - RNA, 19 nt, Artificial Sequence
  Description of Artificial Sequence: Synthetic oligonucleotide
cccauggcgccaggagccc

SEQ ID NO: 2858538 - RNA, 19 nt, Artificial Sequence
  Description of Artificial Sequence: Synthetic oligonucleotide
caccucuuugggcucuguu

SEQ ID NO: 2858539 - RNA, 19 nt, Artificial Sequence
  Description of Artificial Sequence: Synthetic oligonucleotide
gcgugcagugcaggcgaac

SEQ ID NO: 2858540 - RNA, 19 nt, Artificial Sequence
  Description of Artificial Sequence: Synthetic oligonucleotide
ggccaagacugaucugauu

SEQ ID NO: 2858541 - RNA, 19 nt, Artificial Sequence
  Description of Artificial Sequence: Synthetic oligonucleotide
gcgcacggccucgggcacg

SEQ ID NO: 2858542 - RNA, 19 nt, Artificial Sequence
  Description of Artificial Sequence: Synthetic oligonucleotide
gcaugucgccgcgcacggc

SEQ ID NO: 2858543 - RNA, 19 nt, Artificial Sequence
  Description of Artificial Sequence: Synthetic oligonucleotide
cgggguccugcgugcagug

SEQ ID NO: 2858544 - RNA, 19 nt, Artificial Sequence
  Description of Artificial Sequence: Synthetic oligonucleotide
cgcacggccucgggcacgg

SEQ ID NO: 2858545 - RNA, 19 nt, Artificial Sequence
  Description of Artificial Sequence: Synthetic oligonucleotide
gucugaccuauggcccacu

SEQ ID NO: 2858546 - RNA, 19 nt, Artificial Sequence
  Description of Artificial Sequence: Synthetic oligonucleotide
gcgcccagcugguucaguu

SEQ ID NO: 2858547 - RNA, 19 nt, Artificial Sequence
  Description of Artificial Sequence: Synthetic oligonucleotide
gggccaagacugaucugau

SEQ ID NO: 2858548 - RNA, 19 nt, Artificial Sequence
  Description of Artificial Sequence: Synthetic oligonucleotide
gcagugcaggcgaacccau

SEQ ID NO: 2858549 - RNA, 19 nt, Artificial Sequence
  Description of Artificial Sequence: Synthetic oligonucleotide
cgaacccauggcgccagga

SEQ ID NO: 2858550 - RNA, 19 nt, Artificial Sequence
  Description of Artificial Sequence: Synthetic oligonucleotide
gcacgggguccugcgugca

SEQ ID NO: 2858551 - RNA, 19 nt, Artificial Sequence
  Description of Artificial Sequence: Synthetic oligonucleotide
ccgcaccugcucggcagug

SEQ ID NO: 2858552 - RNA, 19 nt, Artificial Sequence
  Description of Artificial Sequence: Synthetic oligonucleotide
cccuucuucagugcaccau

SEQ ID NO: 2858553 - RNA, 19 nt, Artificial Sequence
  Description of Artificial Sequence: Synthetic oligonucleotide
cgcgcacggccucgggcac

SEQ ID NO: 2858554 - RNA, 19 nt, Artificial Sequence
  Description of Artificial Sequence: Synthetic oligonucleotide
gcgcgcccagcugguucag

SEQ ID NO: 2858555 - RNA, 19 nt, Artificial Sequence
  Description of Artificial Sequence: Synthetic oligonucleotide
gccucgggcacgggguccu

SEQ ID NO: 2858556 - RNA, 19 nt, Artificial Sequence
  Description of Artificial Sequence: Synthetic oligonucleotide
cggccucgggcacgggguc

SEQ ID NO: 2858557 - RNA, 19 nt, Artificial Sequence
  Description of Artificial Sequence: Synthetic oligonucleotide
ccauaucaaccagcugguu

SEQ ID NO: 2858558 - RNA, 19 nt, Artificial Sequence
  Description of Artificial Sequence: Synthetic oligonucleotide
cgccgcgcacggccucggg

SEQ ID NO: 2858559 - RNA, 19 nt, Artificial Sequence
  Description of Artificial Sequence: Synthetic oligonucleotide
cccgcaccugcucggcagu

SEQ ID NO: 2858560 - RNA, 19 nt, Artificial Sequence
  Description of Artificial Sequence: Synthetic oligonucleotide
ccucgggcacgggguccug

SEQ ID NO: 2858561 - RNA, 19 nt, Artificial Sequence
  Description of Artificial Sequence: Synthetic oligonucleotide
cggaaccaggaggaggcuu

SEQ ID NO: 2858562 - RNA, 19 nt, Artificial Sequence
  Description of Artificial Sequence: Synthetic oligonucleotide
gcugcgcgcccagcugguu

SEQ ID NO: 2858563 - RNA, 19 nt, Artificial Sequence
  Description of Artificial Sequence: Synthetic oligonucleotide
cgggcacgggguccugcgu

SEQ ID NO: 2858564 - RNA, 19 nt, Artificial Sequence
  Description of Artificial Sequence: Synthetic oligonucleotide
gcucggcagugaggcccuu

SEQ ID NO: 2858565 - RNA, 19 nt, Artificial Sequence
  Description of Artificial Sequence: Synthetic oligonucleotide
cgcgcccagcugguucagu

SEQ ID NO: 2858566 - RNA, 19 nt, Artificial Sequence
  Description of Artificial Sequence: Synthetic oligonucleotide
aacaacaucaggguuaucc

SEQ ID NO: 2858567 - RNA, 19 nt, Artificial Sequence
  Description of Artificial Sequence: Synthetic oligonucleotide
uccucuaacaacaucaggg

SEQ ID NO: 2858568 - RNA, 19 nt, Artificial Sequence
  Description of Artificial Sequence: Synthetic oligonucleotide
aaaggauuguuccccaagc

SEQ ID NO: 2858569 - RNA, 19 nt, Artificial Sequence
  Description of Artificial Sequence: Synthetic oligonucleotide
aagauaccuagacaggggc

SEQ ID NO: 2858570 - RNA, 19 nt, Artificial Sequence
  Description of Artificial Sequence: Synthetic oligonucleotide
uuauccaaaagauaccuag

SEQ ID NO: 2858571 - RNA, 19 nt, Artificial Sequence
  Description of Artificial Sequence: Synthetic oligonucleotide
auuaaaaggauuguucccc

SEQ ID NO: 2858572 - RNA, 19 nt, Artificial Sequence
  Description of Artificial Sequence: Synthetic oligonucleotide
aaaagauaccuagacaggg

SEQ ID NO: 2858573 - RNA, 19 nt, Artificial Sequence
  Description of Artificial Sequence: Synthetic oligonucleotide
caagcagauacaaugaggg

SEQ ID NO: 2858574 - RNA, 19 nt, Artificial Sequence
  Description of Artificial Sequence: Synthetic oligonucleotide
acuucuccaaaucucaggc

SEQ ID NO: 2858575 - RNA, 19 nt, Artificial Sequence
  Description of Artificial Sequence: Synthetic oligonucleotide
aagccauuaguacuucucc

SEQ ID NO: 2858576 - RNA, 19 nt, Artificial Sequence
  Description of Artificial Sequence: Synthetic oligonucleotide
aggguuauccaaaagauac

SEQ ID NO: 2858577 - RNA, 19 nt, Artificial Sequence
  Description of Artificial Sequence: Synthetic oligonucleotide
auuaguacuucuccaaauc

SEQ ID NO: 2858578 - RNA, 19 nt, Artificial Sequence
  Description of Artificial Sequence: Synthetic oligonucleotide
uuugaugcaccacucaucu

SEQ ID NO: 2858579 - RNA, 19 nt, Artificial Sequence
  Description of Artificial Sequence: Synthetic oligonucleotide
auccaaaagauaccuagac

SEQ ID NO: 2858580 - RNA, 19 nt, Artificial Sequence
  Description of Artificial Sequence: Synthetic oligonucleotide
ucaguguugccauuaaaag

SEQ ID NO: 2858581 - RNA, 19 nt, Artificial Sequence
  Description of Artificial Sequence: Synthetic oligonucleotide
uucaguauucuccuccagg

SEQ ID NO: 2858582 - RNA, 19 nt, Artificial Sequence
  Description of Artificial Sequence: Synthetic oligonucleotide
aguauucuccuccagguag

SEQ ID NO: 2858583 - RNA, 19 nt, Artificial Sequence
  Description of Artificial Sequence: Synthetic oligonucleotide
aaaaggauuguuccccaag

SEQ ID NO: 2858584 - RNA, 19 nt, Artificial Sequence
  Description of Artificial Sequence: Synthetic oligonucleotide
ucugaaagccauuaguacu

SEQ ID NO: 2858585 - RNA, 19 nt, Artificial Sequence
  Description of Artificial Sequence: Synthetic oligonucleotide
ccaaaagauaccuagacag

SEQ ID NO: 2858586 - RNA, 19 nt, Artificial Sequence
  Description of Artificial Sequence: Synthetic oligonucleotide
ucuaacaacaucaggguua

SEQ ID NO: 2858587 - RNA, 19 nt, Artificial Sequence
  Description of Artificial Sequence: Synthetic oligonucleotide
uucuccaaaucucaggcug

SEQ ID NO: 2858588 - RNA, 19 nt, Artificial Sequence
  Description of Artificial Sequence: Synthetic oligonucleotide
aaguuuuccaacccagucu

SEQ ID NO: 2858589 - RNA, 19 nt, Artificial Sequence
  Description of Artificial Sequence: Synthetic oligonucleotide
uuccaacccagucugaaag

SEQ ID NO: 2858590 - RNA, 19 nt, Artificial Sequence
  Description of Artificial Sequence: Synthetic oligonucleotide
gauacaaugagggucugcc

SEQ ID NO: 2858591 - RNA, 19 nt, Artificial Sequence
  Description of Artificial Sequence: Synthetic oligonucleotide
uugaaguuuuccaacccag

SEQ ID NO: 2858592 - RNA, 19 nt, Artificial Sequence
  Description of Artificial Sequence: Synthetic oligonucleotide
agcagauacaaugaggguc

SEQ ID NO: 2858593 - RNA, 19 nt, Artificial Sequence
  Description of Artificial Sequence: Synthetic oligonucleotide
gaacccacugcucacagcc

SEQ ID NO: 2858594 - RNA, 19 nt, Artificial Sequence
  Description of Artificial Sequence: Synthetic oligonucleotide
uuaguacuucuccaaaucu

SEQ ID NO: 2858595 - RNA, 19 nt, Artificial Sequence
  Description of Artificial Sequence: Synthetic oligonucleotide
cuuuccucuaacaacauca

SEQ ID NO: 2858596 - RNA, 19 nt, Artificial Sequence
  Description of Artificial Sequence: Synthetic oligonucleotide
uccccaagcagauacaaug

SEQ ID NO: 2858597 - RNA, 19 nt, Artificial Sequence
  Description of Artificial Sequence: Synthetic oligonucleotide
aguguugccauuaaaagga

SEQ ID NO: 2858598 - RNA, 19 nt, Artificial Sequence
  Description of Artificial Sequence: Synthetic oligonucleotide
aguuuuccaacccagucug

SEQ ID NO: 2858599 - RNA, 19 nt, Artificial Sequence
  Description of Artificial Sequence: Synthetic oligonucleotide
uccaauggcuccuugaagu

SEQ ID NO: 2858600 - RNA, 19 nt, Artificial Sequence
  Description of Artificial Sequence: Synthetic oligonucleotide
caguguugccauuaaaagg

SEQ ID NO: 2858601 - RNA, 19 nt, Artificial Sequence
  Description of Artificial Sequence: Synthetic oligonucleotide
cauuaaaaggauuguuccc

SEQ ID NO: 2858602 - RNA, 19 nt, Artificial Sequence
  Description of Artificial Sequence: Synthetic oligonucleotide
agaucuuugaugcaccacu

SEQ ID NO: 2858603 - RNA, 19 nt, Artificial Sequence
  Description of Artificial Sequence: Synthetic oligonucleotide
caguagauugcccaguagg

SEQ ID NO: 2858604 - RNA, 19 nt, Artificial Sequence
  Description of Artificial Sequence: Synthetic oligonucleotide
caaaagauaccuagacagg

SEQ ID NO: 2858605 - RNA, 19 nt, Artificial Sequence
  Description of Artificial Sequence: Synthetic oligonucleotide
guugccauuaaaaggauug

SEQ ID NO: 2858606 - RNA, 19 nt, Artificial Sequence
  Description of Artificial Sequence: Synthetic oligonucleotide
uccagguaggcuuucaucu

SEQ ID NO: 2858607 - RNA, 19 nt, Artificial Sequence
  Description of Artificial Sequence: Synthetic oligonucleotide
aaucagagggaacccacug

SEQ ID NO: 2858608 - RNA, 19 nt, Artificial Sequence
  Description of Artificial Sequence: Synthetic oligonucleotide
ugaugcaccacucaucuua

SEQ ID NO: 2858609 - RNA, 19 nt, Artificial Sequence
  Description of Artificial Sequence: Synthetic oligonucleotide
uccaaaagauaccuagaca

SEQ ID NO: 2858610 - RNA, 19 nt, Artificial Sequence
  Description of Artificial Sequence: Synthetic oligonucleotide
ucaucuuagcagcaauugc

SEQ ID NO: 2858611 - RNA, 19 nt, Artificial Sequence
  Description of Artificial Sequence: Synthetic oligonucleotide
aaagauaccuagacagggg

SEQ ID NO: 2858612 - RNA, 19 nt, Artificial Sequence
  Description of Artificial Sequence: Synthetic oligonucleotide
cucccaagauccaagacag

SEQ ID NO: 2858613 - RNA, 19 nt, Artificial Sequence
  Description of Artificial Sequence: Synthetic oligonucleotide
guaggcuuucaucucaggg

SEQ ID NO: 2858614 - RNA, 19 nt, Artificial Sequence
  Description of Artificial Sequence: Synthetic oligonucleotide
ucaguauucuccuccaggu

SEQ ID NO: 2858615 - RNA, 19 nt, Artificial Sequence
  Description of Artificial Sequence: Synthetic oligonucleotide
acugcucacagccugcagg

SEQ ID NO: 2858616 - RNA, 19 nt, Artificial Sequence
  Description of Artificial Sequence: Synthetic oligonucleotide
gacuucaguauucuccucc

SEQ ID NO: 2858617 - RNA, 19 nt, Artificial Sequence
  Description of Artificial Sequence: Synthetic oligonucleotide
aaagccguaacuggauuuc

SEQ ID NO: 2858618 - RNA, 19 nt, Artificial Sequence
  Description of Artificial Sequence: Synthetic oligonucleotide
uuguuccccaagcagauac

SEQ ID NO: 2858619 - RNA, 19 nt, Artificial Sequence
  Description of Artificial Sequence: Synthetic oligonucleotide
ugcaccacucaucuuagca

SEQ ID NO: 2858620 - RNA, 19 nt, Artificial Sequence
  Description of Artificial Sequence: Synthetic oligonucleotide
uuuccucuaacaacaucag

SEQ ID NO: 2858621 - RNA, 19 nt, Artificial Sequence
  Description of Artificial Sequence: Synthetic oligonucleotide
aggcuuucaucucaggguc

SEQ ID NO: 2858622 - RNA, 19 nt, Artificial Sequence
  Description of Artificial Sequence: Synthetic oligonucleotide
uauccaaaagauaccuaga

SEQ ID NO: 2858623 - RNA, 19 nt, Artificial Sequence
  Description of Artificial Sequence: Synthetic oligonucleotide
uacaaugagggucugccuc

SEQ ID NO: 2858624 - RNA, 19 nt, Artificial Sequence
  Description of Artificial Sequence: Synthetic oligonucleotide
uaggcuuucaucucagggu

SEQ ID NO: 2858625 - RNA, 19 nt, Artificial Sequence
  Description of Artificial Sequence: Synthetic oligonucleotide
ucacuguagggccacagcu

SEQ ID NO: 2858626 - RNA, 19 nt, Artificial Sequence
  Description of Artificial Sequence: Synthetic oligonucleotide
aggaaacuccaauggcucc

SEQ ID NO: 2858627 - RNA, 19 nt, Artificial Sequence
  Description of Artificial Sequence: Synthetic oligonucleotide
ucagagggaacccacugcu

SEQ ID NO: 2858628 - RNA, 19 nt, Artificial Sequence
  Description of Artificial Sequence: Synthetic oligonucleotide
aggauuguuccccaagcag

SEQ ID NO: 2858629 - RNA, 19 nt, Artificial Sequence
  Description of Artificial Sequence: Synthetic oligonucleotide
caucccgcucccaagaucc

SEQ ID NO: 2858630 - RNA, 19 nt, Artificial Sequence
  Description of Artificial Sequence: Synthetic oligonucleotide
caucucaggguccaaacag

SEQ ID NO: 2858631 - RNA, 19 nt, Artificial Sequence
  Description of Artificial Sequence: Synthetic oligonucleotide
uccuccaggaaaucagagg

SEQ ID NO: 2858632 - RNA, 19 nt, Artificial Sequence
  Description of Artificial Sequence: Synthetic oligonucleotide
cagacuuuccucuaacaac

SEQ ID NO: 2858633 - RNA, 19 nt, Artificial Sequence
  Description of Artificial Sequence: Synthetic oligonucleotide
ugcaggaaacuccaauggc

SEQ ID NO: 2858634 - RNA, 19 nt, Artificial Sequence
  Description of Artificial Sequence: Synthetic oligonucleotide
uccuugaaguuuuccaacc

SEQ ID NO: 2858635 - RNA, 19 nt, Artificial Sequence
  Description of Artificial Sequence: Synthetic oligonucleotide
aguagauugcccaguaggg

SEQ ID NO: 2858636 - RNA, 19 nt, Artificial Sequence
  Description of Artificial Sequence: Synthetic oligonucleotide
uuaaaaggauuguucccca

SEQ ID NO: 2858637 - RNA, 19 nt, Artificial Sequence
  Description of Artificial Sequence: Synthetic oligonucleotide
uuccucuaacaacaucagg

SEQ ID NO: 2858638 - RNA, 19 nt, Artificial Sequence
  Description of Artificial Sequence: Synthetic oligonucleotide
ccauuaaaaggauuguucc

SEQ ID NO: 2858639 - RNA, 19 nt, Artificial Sequence
  Description of Artificial Sequence: Synthetic oligonucleotide
guagggaucacuguagggc

SEQ ID NO: 2858640 - RNA, 19 nt, Artificial Sequence
  Description of Artificial Sequence: Synthetic oligonucleotide
aaggauuguuccccaagca

SEQ ID NO: 2858641 - RNA, 19 nt, Artificial Sequence
  Description of Artificial Sequence: Synthetic oligonucleotide
aucacuguagggccacagc

SEQ ID NO: 2858642 - RNA, 19 nt, Artificial Sequence
  Description of Artificial Sequence: Synthetic oligonucleotide
ucuuugaugcaccacucau

SEQ ID NO: 2858643 - RNA, 19 nt, Artificial Sequence
  Description of Artificial Sequence: Synthetic oligonucleotide
aguagggaucacuguaggg

SEQ ID NO: 2858644 - RNA, 19 nt, Artificial Sequence
  Description of Artificial Sequence: Synthetic oligonucleotide
aaggcuaccacugcuggug

SEQ ID NO: 2858645 - RNA, 19 nt, Artificial Sequence
  Description of Artificial Sequence: Synthetic oligonucleotide
aaaagccguaacuggauuu

SEQ ID NO: 2858646 - RNA, 19 nt, Artificial Sequence
  Description of Artificial Sequence: Synthetic oligonucleotide
aagaucuuugaugcaccac

SEQ ID NO: 2858647 - RNA, 19 nt, Artificial Sequence
  Description of Artificial Sequence: Synthetic oligonucleotide
uagggaucacuguagggcc

SEQ ID NO: 2858648 - RNA, 19 nt, Artificial Sequence
  Description of Artificial Sequence: Synthetic oligonucleotide
cugcaggaaacuccaaugg

SEQ ID NO: 2858649 - RNA, 19 nt, Artificial Sequence
  Description of Artificial Sequence: Synthetic oligonucleotide
uaguacuucuccaaaucuc

SEQ ID NO: 2858650 - RNA, 19 nt, Artificial Sequence
  Description of Artificial Sequence: Synthetic oligonucleotide
guaaggcuaccacugcugg

SEQ ID NO: 2858651 - RNA, 19 nt, Artificial Sequence
  Description of Artificial Sequence: Synthetic oligonucleotide
agacagacuuuccucuaac

SEQ ID NO: 2858652 - RNA, 19 nt, Artificial Sequence
  Description of Artificial Sequence: Synthetic oligonucleotide
acagccugcaggaaacucc

SEQ ID NO: 2858653 - RNA, 19 nt, Artificial Sequence
  Description of Artificial Sequence: Synthetic oligonucleotide
ggucaaaagccguaacugg

SEQ ID NO: 2858654 - RNA, 19 nt, Artificial Sequence
  Description of Artificial Sequence: Synthetic oligonucleotide
uggauuucagggguaaggc

SEQ ID NO: 2858655 - RNA, 19 nt, Artificial Sequence
  Description of Artificial Sequence: Synthetic oligonucleotide
uccaagacagacuuuccuc

SEQ ID NO: 2858656 - RNA, 19 nt, Artificial Sequence
  Description of Artificial Sequence: Synthetic oligonucleotide
ccuccaggaaaucagaggg

SEQ ID NO: 2858657 - RNA, 19 nt, Artificial Sequence
  Description of Artificial Sequence: Synthetic oligonucleotide
acaacaucaggguuaucca

SEQ ID NO: 2858658 - RNA, 19 nt, Artificial Sequence
  Description of Artificial Sequence: Synthetic oligonucleotide
acagacuuuccucuaacaa

SEQ ID NO: 2858659 - RNA, 19 nt, Artificial Sequence
  Description of Artificial Sequence: Synthetic oligonucleotide
aggaaaucagagggaaccc

SEQ ID NO: 2858660 - RNA, 19 nt, Artificial Sequence
  Description of Artificial Sequence: Synthetic oligonucleotide
ucaaaagccguaacuggau

SEQ ID NO: 2858661 - RNA, 19 nt, Artificial Sequence
  Description of Artificial Sequence: Synthetic oligonucleotide
agacuuuccucuaacaaca

SEQ ID NO: 2858662 - RNA, 19 nt, Artificial Sequence
  Description of Artificial Sequence: Synthetic oligonucleotide
ugaaguuuuccaacccagu

SEQ ID NO: 2858663 - RNA, 19 nt, Artificial Sequence
  Description of Artificial Sequence: Synthetic oligonucleotide
ucaucucaggguccaaaca

SEQ ID NO: 2858664 - RNA, 19 nt, Artificial Sequence
  Description of Artificial Sequence: Synthetic oligonucleotide
ggugacuucaguauucucc

SEQ ID NO: 2858665 - RNA, 19 nt, Artificial Sequence
  Description of Artificial Sequence: Synthetic oligonucleotide
uagauugcccaguagggau

SEQ ID NO: 2858666 - RNA, 19 nt, Artificial Sequence
  Description of Artificial Sequence: Synthetic oligonucleotide
acuuuccucuaacaacauc

SEQ ID NO: 2858667 - RNA, 19 nt, Artificial Sequence
  Description of Artificial Sequence: Synthetic oligonucleotide
aacuccaauggcuccuuga

SEQ ID NO: 2858668 - RNA, 19 nt, Artificial Sequence
  Description of Artificial Sequence: Synthetic oligonucleotide
agagggaacccacugcuca

SEQ ID NO: 2858669 - RNA, 19 nt, Artificial Sequence
  Description of Artificial Sequence: Synthetic oligonucleotide
gucugaaagccauuaguac

SEQ ID NO: 2858670 - RNA, 19 nt, Artificial Sequence
  Description of Artificial Sequence: Synthetic oligonucleotide
caccacucaucuuagcagc

SEQ ID NO: 2858671 - RNA, 19 nt, Artificial Sequence
  Description of Artificial Sequence: Synthetic oligonucleotide
cuggauuucagggguaagg

SEQ ID NO: 2858672 - RNA, 19 nt, Artificial Sequence
  Description of Artificial Sequence: Synthetic oligonucleotide
acuguagggccacagcuca

SEQ ID NO: 2858673 - RNA, 19 nt, Artificial Sequence
  Description of Artificial Sequence: Synthetic oligonucleotide
ucucaggguccaaacagcu

SEQ ID NO: 2858674 - RNA, 19 nt, Artificial Sequence
  Description of Artificial Sequence: Synthetic oligonucleotide
cagcaauugcuguugcucc

SEQ ID NO: 2858675 - RNA, 19 nt, Artificial Sequence
  Description of Artificial Sequence: Synthetic oligonucleotide
ugcccaguagggaucacug

SEQ ID NO: 2858676 - RNA, 19 nt, Artificial Sequence
  Description of Artificial Sequence: Synthetic oligonucleotide
aguacuucuccaaaucuca

SEQ ID NO: 2858677 - RNA, 19 nt, Artificial Sequence
  Description of Artificial Sequence: Synthetic oligonucleotide
aagcagauacaaugagggu

SEQ ID NO: 2858678 - RNA, 19 nt, Artificial Sequence
  Description of Artificial Sequence: Synthetic oligonucleotide
uguugcuccacaucccgcu

SEQ ID NO: 2858679 - RNA, 19 nt, Artificial Sequence
  Description of Artificial Sequence: Synthetic oligonucleotide
agauaccuagacaggggcc

SEQ ID NO: 2858680 - RNA, 19 nt, Artificial Sequence
  Description of Artificial Sequence: Synthetic oligonucleotide
gaaaucagagggaacccac

SEQ ID NO: 2858681 - RNA, 19 nt, Artificial Sequence
  Description of Artificial Sequence: Synthetic oligonucleotide
cuuugaugcaccacucauc

SEQ ID NO: 2858682 - RNA, 19 nt, Artificial Sequence
  Description of Artificial Sequence: Synthetic oligonucleotide
agggccacagcucagcccu

SEQ ID NO: 2858683 - RNA, 19 nt, Artificial Sequence
  Description of Artificial Sequence: Synthetic oligonucleotide
aauugcuguugcuccacau

SEQ ID NO: 2858684 - RNA, 19 nt, Artificial Sequence
  Description of Artificial Sequence: Synthetic oligonucleotide
ucuuagcagcaauugcugu

SEQ ID NO: 2858685 - RNA, 19 nt, Artificial Sequence
  Description of Artificial Sequence: Synthetic oligonucleotide
cuguccuccaggaaaucag

SEQ ID NO: 2858686 - RNA, 19 nt, Artificial Sequence
  Description of Artificial Sequence: Synthetic oligonucleotide
uucuccuccagguaggcuu

SEQ ID NO: 2858687 - RNA, 19 nt, Artificial Sequence
  Description of Artificial Sequence: Synthetic oligonucleotide
aagacagacuuuccucuaa

SEQ ID NO: 2858688 - RNA, 19 nt, Artificial Sequence
  Description of Artificial Sequence: Synthetic oligonucleotide
cucaucuuagcagcaauug

SEQ ID NO: 2858689 - RNA, 19 nt, Artificial Sequence
  Description of Artificial Sequence: Synthetic oligonucleotide
agcucagcccuuucccacc

SEQ ID NO: 2858690 - RNA, 19 nt, Artificial Sequence
  Description of Artificial Sequence: Synthetic oligonucleotide
ucagggguaaggcuaccac

SEQ ID NO: 2858691 - RNA, 19 nt, Artificial Sequence
  Description of Artificial Sequence: Synthetic oligonucleotide
auccaagacagacuuuccu

SEQ ID NO: 2858692 - RNA, 19 nt, Artificial Sequence
  Description of Artificial Sequence: Synthetic oligonucleotide
auuucagggguaaggcuac

SEQ ID NO: 2858693 - RNA, 19 nt, Artificial Sequence
  Description of Artificial Sequence: Synthetic oligonucleotide
aaucucaggcugucagugu

SEQ ID NO: 2858694 - RNA, 19 nt, Artificial Sequence
  Description of Artificial Sequence: Synthetic oligonucleotide
aucucaggguccaaacagc

SEQ ID NO: 2858695 - RNA, 19 nt, Artificial Sequence
  Description of Artificial Sequence: Synthetic oligonucleotide
caggaaacuccaauggcuc

SEQ ID NO: 2858696 - RNA, 19 nt, Artificial Sequence
  Description of Artificial Sequence: Synthetic oligonucleotide
ucuccaaaucucaggcugu

SEQ ID NO: 2858697 - RNA, 19 nt, Artificial Sequence
  Description of Artificial Sequence: Synthetic oligonucleotide
gauuucagggguaaggcua

SEQ ID NO: 2858698 - RNA, 19 nt, Artificial Sequence
  Description of Artificial Sequence: Synthetic oligonucleotide
acaaugagggucugccucu

SEQ ID NO: 2858699 - RNA, 19 nt, Artificial Sequence
  Description of Artificial Sequence: Synthetic oligonucleotide
agauacaaugagggucugc

SEQ ID NO: 2858700 - RNA, 19 nt, Artificial Sequence
  Description of Artificial Sequence: Synthetic oligonucleotide
cuccuugaaguuuuccaac

SEQ ID NO: 2858701 - RNA, 19 nt, Artificial Sequence
  Description of Artificial Sequence: Synthetic oligonucleotide
uguccuccaggaaaucaga

SEQ ID NO: 2858702 - RNA, 19 nt, Artificial Sequence
  Description of Artificial Sequence: Synthetic oligonucleotide
aacaucaggguuauccaaa

SEQ ID NO: 2858703 - RNA, 19 nt, Artificial Sequence
  Description of Artificial Sequence: Synthetic oligonucleotide
ccaagcagauacaaugagg

SEQ ID NO: 2858704 - RNA, 19 nt, Artificial Sequence
  Description of Artificial Sequence: Synthetic oligonucleotide
acuucaguauucuccucca

SEQ ID NO: 2858705 - RNA, 19 nt, Artificial Sequence
  Description of Artificial Sequence: Synthetic oligonucleotide
uccaggaaaucagagggaa

SEQ ID NO: 2858706 - RNA, 19 nt, Artificial Sequence
  Description of Artificial Sequence: Synthetic oligonucleotide
agcccuuucccaccagaac

SEQ ID NO: 2858707 - RNA, 19 nt, Artificial Sequence
  Description of Artificial Sequence: Synthetic oligonucleotide
cuugaaguuuuccaaccca

SEQ ID NO: 2858708 - RNA, 19 nt, Artificial Sequence
  Description of Artificial Sequence: Synthetic oligonucleotide
uccaacccagucugaaagc

SEQ ID NO: 2858709 - RNA, 19 nt, Artificial Sequence
  Description of Artificial Sequence: Synthetic oligonucleotide
cacagcucagcccuuuccc

SEQ ID NO: 2858710 - RNA, 19 nt, Artificial Sequence
  Description of Artificial Sequence: Synthetic oligonucleotide
agccauuaguacuucucca

SEQ ID NO: 2858711 - RNA, 19 nt, Artificial Sequence
  Description of Artificial Sequence: Synthetic oligonucleotide
gaugcaccacucaucuuag

SEQ ID NO: 2858712 - RNA, 19 nt, Artificial Sequence
  Description of Artificial Sequence: Synthetic oligonucleotide
gguccaaacagcucccugc

SEQ ID NO: 2858713 - RNA, 19 nt, Artificial Sequence
  Description of Artificial Sequence: Synthetic oligonucleotide
caucuuagcagcaauugcu

SEQ ID NO: 2858714 - RNA, 19 nt, Artificial Sequence
  Description of Artificial Sequence: Synthetic oligonucleotide
uuuuccaacccagucugaa

SEQ ID NO: 2858715 - RNA, 19 nt, Artificial Sequence
  Description of Artificial Sequence: Synthetic oligonucleotide
caguagggaucacuguagg

SEQ ID NO: 2858716 - RNA, 19 nt, Artificial Sequence
  Description of Artificial Sequence: Synthetic oligonucleotide
guauucuccuccagguagg

SEQ ID NO: 2858717 - RNA, 19 nt, Artificial Sequence
  Description of Artificial Sequence: Synthetic oligonucleotide
caccagaacuugcaccugg

SEQ ID NO: 2858718 - RNA, 19 nt, Artificial Sequence
  Description of Artificial Sequence: Synthetic oligonucleotide
aauggcuccuugaaguuuu

SEQ ID NO: 2858719 - RNA, 19 nt, Artificial Sequence
  Description of Artificial Sequence: Synthetic oligonucleotide
acuccaauggcuccuugaa

SEQ ID NO: 2858720 - RNA, 19 nt, Artificial Sequence
  Description of Artificial Sequence: Synthetic oligonucleotide
gacagacuuuccucuaaca

SEQ ID NO: 2858721 - RNA, 19 nt, Artificial Sequence
  Description of Artificial Sequence: Synthetic oligonucleotide
ccguaacuggauuucaggg

SEQ ID NO: 2858722 - RNA, 19 nt, Artificial Sequence
  Description of Artificial Sequence: Synthetic oligonucleotide
aaaucagagggaacccacu

SEQ ID NO: 2858723 - RNA, 19 nt, Artificial Sequence
  Description of Artificial Sequence: Synthetic oligonucleotide
cuagacaggggccuggcca

SEQ ID NO: 2858724 - RNA, 19 nt, Artificial Sequence
  Description of Artificial Sequence: Synthetic oligonucleotide
gucaguguugccauuaaaa

SEQ ID NO: 2858725 - RNA, 19 nt, Artificial Sequence
  Description of Artificial Sequence: Synthetic oligonucleotide
agucugaaagccauuagua

SEQ ID NO: 2858726 - RNA, 19 nt, Artificial Sequence
  Description of Artificial Sequence: Synthetic oligonucleotide
aucuuagcagcaauugcug

SEQ ID NO: 2858727 - RNA, 19 nt, Artificial Sequence
  Description of Artificial Sequence: Synthetic oligonucleotide
uaaaaggauuguuccccaa

SEQ ID NO: 2858728 - RNA, 19 nt, Artificial Sequence
  Description of Artificial Sequence: Synthetic oligonucleotide
acaucccgcucccaagauc

SEQ ID NO: 2858729 - RNA, 19 nt, Artificial Sequence
  Description of Artificial Sequence: Synthetic oligonucleotide
uguagggccacagcucagc

SEQ ID NO: 2858730 - RNA, 19 nt, Artificial Sequence
  Description of Artificial Sequence: Synthetic oligonucleotide
uuuccaacccagucugaaa

SEQ ID NO: 2858731 - RNA, 19 nt, Artificial Sequence
  Description of Artificial Sequence: Synthetic oligonucleotide
agggguaaggcuaccacug

SEQ ID NO: 2858732 - RNA, 19 nt, Artificial Sequence
  Description of Artificial Sequence: Synthetic oligonucleotide
aaacuccaauggcuccuug

SEQ ID NO: 2858733 - RNA, 19 nt, Artificial Sequence
  Description of Artificial Sequence: Synthetic oligonucleotide
uguuccccaagcagauaca

SEQ ID NO: 2858734 - RNA, 19 nt, Artificial Sequence
  Description of Artificial Sequence: Synthetic oligonucleotide
ucagcccuuucccaccaga

SEQ ID NO: 2858735 - RNA, 19 nt, Artificial Sequence
  Description of Artificial Sequence: Synthetic oligonucleotide
auacaaugagggucugccu

SEQ ID NO: 2858736 - RNA, 19 nt, Artificial Sequence
  Description of Artificial Sequence: Synthetic oligonucleotide
gccguaacuggauuucagg

SEQ ID NO: 2858737 - RNA, 19 nt, Artificial Sequence
  Description of Artificial Sequence: Synthetic oligonucleotide
gucaaaagccguaacugga

SEQ ID NO: 2858738 - RNA, 19 nt, Artificial Sequence
  Description of Artificial Sequence: Synthetic oligonucleotide
ugucaguguugccauuaaa

SEQ ID NO: 2858739 - RNA, 19 nt, Artificial Sequence
  Description of Artificial Sequence: Synthetic oligonucleotide
ccaaaucucaggcugucag

SEQ ID NO: 2858740 - RNA, 19 nt, Artificial Sequence
  Description of Artificial Sequence: Synthetic oligonucleotide
cguaacuggauuucagggg

SEQ ID NO: 2858741 - RNA, 19 nt, Artificial Sequence
  Description of Artificial Sequence: Synthetic oligonucleotide
uguugccauuaaaaggauu

SEQ ID NO: 2858742 - RNA, 19 nt, Artificial Sequence
  Description of Artificial Sequence: Synthetic oligonucleotide
uggccaguagauugcccag

SEQ ID NO: 2858743 - RNA, 19 nt, Artificial Sequence
  Description of Artificial Sequence: Synthetic oligonucleotide
uagacaggggccuggccac

SEQ ID NO: 2858744 - RNA, 19 nt, Artificial Sequence
  Description of Artificial Sequence: Synthetic oligonucleotide
acaucaggguuauccaaaa

SEQ ID NO: 2858745 - RNA, 19 nt, Artificial Sequence
  Description of Artificial Sequence: Synthetic oligonucleotide
gcuguugcuccacaucccg

SEQ ID NO: 2858746 - RNA, 19 nt, Artificial Sequence
  Description of Artificial Sequence: Synthetic oligonucleotide
gggucaaaagccguaacug

SEQ ID NO: 2858747 - RNA, 19 nt, Artificial Sequence
  Description of Artificial Sequence: Synthetic oligonucleotide
uugccauuaaaaggauugu

SEQ ID NO: 2858748 - RNA, 19 nt, Artificial Sequence
  Description of Artificial Sequence: Synthetic oligonucleotide
gcaccacucaucuuagcag

SEQ ID NO: 2858749 - RNA, 19 nt, Artificial Sequence
  Description of Artificial Sequence: Synthetic oligonucleotide
gauccaagacagacuuucc

SEQ ID NO: 2858750 - RNA, 19 nt, Artificial Sequence
  Description of Artificial Sequence: Synthetic oligonucleotide
aacccagucugaaagccau

SEQ ID NO: 2858751 - RNA, 19 nt, Artificial Sequence
  Description of Artificial Sequence: Synthetic oligonucleotide
cuggccaguagauugccca

SEQ ID NO: 2858752 - RNA, 19 nt, Artificial Sequence
  Description of Artificial Sequence: Synthetic oligonucleotide
gaucuuugaugcaccacuc

SEQ ID NO: 2858753 - RNA, 19 nt, Artificial Sequence
  Description of Artificial Sequence: Synthetic oligonucleotide
cuccaauggcuccuugaag

SEQ ID NO: 2858754 - RNA, 19 nt, Artificial Sequence
  Description of Artificial Sequence: Synthetic oligonucleotide
augagggucugccucucca

SEQ ID NO: 2858755 - RNA, 19 nt, Artificial Sequence
  Description of Artificial Sequence: Synthetic oligonucleotide
gugacuucaguauucuccu

SEQ ID NO: 2858756 - RNA, 19 nt, Artificial Sequence
  Description of Artificial Sequence: Synthetic oligonucleotide
uuucaucucaggguccaaa

SEQ ID NO: 2858757 - RNA, 19 nt, Artificial Sequence
  Description of Artificial Sequence: Synthetic oligonucleotide
caucaggguuauccaaaag

SEQ ID NO: 2858758 - RNA, 19 nt, Artificial Sequence
  Description of Artificial Sequence: Synthetic oligonucleotide
augcaccacucaucuuagc

SEQ ID NO: 2858759 - RNA, 19 nt, Artificial Sequence
  Description of Artificial Sequence: Synthetic oligonucleotide
ugcuccacaucccgcuccc

SEQ ID NO: 2858760 - RNA, 19 nt, Artificial Sequence
  Description of Artificial Sequence: Synthetic oligonucleotide
aacuggauuucagggguaa

SEQ ID NO: 2858761 - RNA, 19 nt, Artificial Sequence
  Description of Artificial Sequence: Synthetic oligonucleotide
agauugcccaguagggauc

SEQ ID NO: 2858762 - RNA, 19 nt, Artificial Sequence
  Description of Artificial Sequence: Synthetic oligonucleotide
gcucccaagauccaagaca

SEQ ID NO: 2858763 - RNA, 19 nt, Artificial Sequence
  Description of Artificial Sequence: Synthetic oligonucleotide
uccaaacagcucccugcug

SEQ ID NO: 2858764 - RNA, 19 nt, Artificial Sequence
  Description of Artificial Sequence: Synthetic oligonucleotide
uagcagcaauugcuguugc

SEQ ID NO: 2858765 - RNA, 19 nt, Artificial Sequence
  Description of Artificial Sequence: Synthetic oligonucleotide
uaaggcuaccacugcuggu

SEQ ID NO: 2858766 - RNA, 19 nt, Artificial Sequence
  Description of Artificial Sequence: Synthetic oligonucleotide
uucccaccagaacuugcac

SEQ ID NO: 2858767 - RNA, 19 nt, Artificial Sequence
  Description of Artificial Sequence: Synthetic oligonucleotide
ccugcaggaaacuccaaug

SEQ ID NO: 2858768 - RNA, 19 nt, Artificial Sequence
  Description of Artificial Sequence: Synthetic oligonucleotide
cuucaguauucuccuccag

SEQ ID NO: 2858769 - RNA, 19 nt, Artificial Sequence
  Description of Artificial Sequence: Synthetic oligonucleotide
gauaccuagacaggggccu

SEQ ID NO: 2858770 - RNA, 19 nt, Artificial Sequence
  Description of Artificial Sequence: Synthetic oligonucleotide
aucucaggcugucaguguu

SEQ ID NO: 2858771 - RNA, 19 nt, Artificial Sequence
  Description of Artificial Sequence: Synthetic oligonucleotide
ugccauuaaaaggauuguu

SEQ ID NO: 2858772 - RNA, 19 nt, Artificial Sequence
  Description of Artificial Sequence: Synthetic oligonucleotide
cuccagguaggcuuucauc

SEQ ID NO: 2858773 - RNA, 19 nt, Artificial Sequence
  Description of Artificial Sequence: Synthetic oligonucleotide
uauucuccuccagguaggc

SEQ ID NO: 2858774 - RNA, 19 nt, Artificial Sequence
  Description of Artificial Sequence: Synthetic oligonucleotide
accacugcuggugacuuca

SEQ ID NO: 2858775 - RNA, 19 nt, Artificial Sequence
  Description of Artificial Sequence: Synthetic oligonucleotide
ccaagaucuuugaugcacc

SEQ ID NO: 2858776 - RNA, 19 nt, Artificial Sequence
  Description of Artificial Sequence: Synthetic oligonucleotide
cacuguagggccacagcuc

SEQ ID NO: 2858777 - RNA, 19 nt, Artificial Sequence
  Description of Artificial Sequence: Synthetic oligonucleotide
guacuucuccaaaucucag

SEQ ID NO: 2858778 - RNA, 19 nt, Artificial Sequence
  Description of Artificial Sequence: Synthetic oligonucleotide
ugagggucugccucuccac

SEQ ID NO: 2858779 - RNA, 19 nt, Artificial Sequence
  Description of Artificial Sequence: Synthetic oligonucleotide
guagauugcccaguaggga

SEQ ID NO: 2858780 - RNA, 19 nt, Artificial Sequence
  Description of Artificial Sequence: Synthetic oligonucleotide
ccaguagggaucacuguag

SEQ ID NO: 2858781 - RNA, 19 nt, Artificial Sequence
  Description of Artificial Sequence: Synthetic oligonucleotide
gagggaacccacugcucac

SEQ ID NO: 2858782 - RNA, 19 nt, Artificial Sequence
  Description of Artificial Sequence: Synthetic oligonucleotide
caagaucuuugaugcacca

SEQ ID NO: 2858783 - RNA, 19 nt, Artificial Sequence
  Description of Artificial Sequence: Synthetic oligonucleotide
cuguugcuccacaucccgc

SEQ ID NO: 2858784 - RNA, 19 nt, Artificial Sequence
  Description of Artificial Sequence: Synthetic oligonucleotide
accuggccaguagauugcc

SEQ ID NO: 2858785 - RNA, 19 nt, Artificial Sequence
  Description of Artificial Sequence: Synthetic oligonucleotide
uucagggguaaggcuacca

SEQ ID NO: 2858786 - RNA, 19 nt, Artificial Sequence
  Description of Artificial Sequence: Synthetic oligonucleotide
ggauuguuccccaagcaga

SEQ ID NO: 2858787 - RNA, 19 nt, Artificial Sequence
  Description of Artificial Sequence: Synthetic oligonucleotide
cccaagauccaagacagac

SEQ ID NO: 2858788 - RNA, 19 nt, Artificial Sequence
  Description of Artificial Sequence: Synthetic oligonucleotide
uaccuagacaggggccugg

SEQ ID NO: 2858789 - RNA, 19 nt, Artificial Sequence
  Description of Artificial Sequence: Synthetic oligonucleotide
aagccguaacuggauuuca

SEQ ID NO: 2858790 - RNA, 19 nt, Artificial Sequence
  Description of Artificial Sequence: Synthetic oligonucleotide
ccuugaaguuuuccaaccc

SEQ ID NO: 2858791 - RNA, 19 nt, Artificial Sequence
  Description of Artificial Sequence: Synthetic oligonucleotide
cucaggcugucaguguugc

SEQ ID NO: 2858792 - RNA, 19 nt, Artificial Sequence
  Description of Artificial Sequence: Synthetic oligonucleotide
agcagcaauugcuguugcu

SEQ ID NO: 2858793 - RNA, 19 nt, Artificial Sequence
  Description of Artificial Sequence: Synthetic oligonucleotide
gguaaggcuaccacugcug

SEQ ID NO: 2858794 - RNA, 19 nt, Artificial Sequence
  Description of Artificial Sequence: Synthetic oligonucleotide
guagggccacagcucagcc

SEQ ID NO: 2858795 - RNA, 19 nt, Artificial Sequence
  Description of Artificial Sequence: Synthetic oligonucleotide
ugaaagccauuaguacuuc

SEQ ID NO: 2858796 - RNA, 19 nt, Artificial Sequence
  Description of Artificial Sequence: Synthetic oligonucleotide
uaacuggauuucaggggua

SEQ ID NO: 2858797 - RNA, 19 nt, Artificial Sequence
  Description of Artificial Sequence: Synthetic oligonucleotide
caggcugucaguguugcca

SEQ ID NO: 2858798 - RNA, 19 nt, Artificial Sequence
  Description of Artificial Sequence: Synthetic oligonucleotide
uuccccaagcagauacaau

SEQ ID NO: 2858799 - RNA, 19 nt, Artificial Sequence
  Description of Artificial Sequence: Synthetic oligonucleotide
accuagacaggggccuggc

SEQ ID NO: 2858800 - RNA, 19 nt, Artificial Sequence
  Description of Artificial Sequence: Synthetic oligonucleotide
gauugcccaguagggauca

SEQ ID NO: 2858801 - RNA, 19 nt, Artificial Sequence
  Description of Artificial Sequence: Synthetic oligonucleotide
caggguccaaacagcuccc

SEQ ID NO: 2858802 - RNA, 19 nt, Artificial Sequence
  Description of Artificial Sequence: Synthetic oligonucleotide
uggccaccuggccaguaga

SEQ ID NO: 2858803 - RNA, 19 nt, Artificial Sequence
  Description of Artificial Sequence: Synthetic oligonucleotide
ggcuccuugaaguuuucca

SEQ ID NO: 2858804 - RNA, 19 nt, Artificial Sequence
  Description of Artificial Sequence: Synthetic oligonucleotide
uccaaaucucaggcuguca

SEQ ID NO: 2858805 - RNA, 19 nt, Artificial Sequence
  Description of Artificial Sequence: Synthetic oligonucleotide
gccaagaucuuugaugcac

SEQ ID NO: 2858806 - RNA, 19 nt, Artificial Sequence
  Description of Artificial Sequence: Synthetic oligonucleotide
gguuauccaaaagauaccu

SEQ ID NO: 2858807 - RNA, 19 nt, Artificial Sequence
  Description of Artificial Sequence: Synthetic oligonucleotide
caacaucaggguuauccaa

SEQ ID NO: 2858808 - RNA, 19 nt, Artificial Sequence
  Description of Artificial Sequence: Synthetic oligonucleotide
cagcucagcccuuucccac

SEQ ID NO: 2858809 - RNA, 19 nt, Artificial Sequence
  Description of Artificial Sequence: Synthetic oligonucleotide
gguaggcuuucaucucagg

SEQ ID NO: 2858810 - RNA, 19 nt, Artificial Sequence
  Description of Artificial Sequence: Synthetic oligonucleotide
cagguaggcuuucaucuca

SEQ ID NO: 2858811 - RNA, 19 nt, Artificial Sequence
  Description of Artificial Sequence: Synthetic oligonucleotide
cugcucacagccugcagga

SEQ ID NO: 2858812 - RNA, 19 nt, Artificial Sequence
  Description of Artificial Sequence: Synthetic oligonucleotide
acuggauuucagggguaag

SEQ ID NO: 2858813 - RNA, 19 nt, Artificial Sequence
  Description of Artificial Sequence: Synthetic oligonucleotide
cugaaagccauuaguacuu

SEQ ID NO: 2858814 - RNA, 19 nt, Artificial Sequence
  Description of Artificial Sequence: Synthetic oligonucleotide
gaaagccauuaguacuucu

SEQ ID NO: 2858815 - RNA, 19 nt, Artificial Sequence
  Description of Artificial Sequence: Synthetic oligonucleotide
cagucugaaagccauuagu

SEQ ID NO: 2858816 - RNA, 19 nt, Artificial Sequence
  Description of Artificial Sequence: Synthetic oligonucleotide
cauuaguacuucuccaaau

SEQ ID NO: 2858817 - RNA, 19 nt, Artificial Sequence
  Description of Artificial Sequence: Synthetic oligonucleotide
ugacuucaguauucuccuc

SEQ ID NO: 2858818 - RNA, 19 nt, Artificial Sequence
  Description of Artificial Sequence: Synthetic oligonucleotide
ggguuauccaaaagauacc

SEQ ID NO: 2858819 - RNA, 19 nt, Artificial Sequence
  Description of Artificial Sequence: Synthetic oligonucleotide
uugcccaguagggaucacu

SEQ ID NO: 2858820 - RNA, 19 nt, Artificial Sequence
  Description of Artificial Sequence: Synthetic oligonucleotide
ucccugcuguccuccagga

SEQ ID NO: 2858821 - RNA, 19 nt, Artificial Sequence
  Description of Artificial Sequence: Synthetic oligonucleotide
aggcugucaguguugccau

SEQ ID NO: 2858822 - RNA, 19 nt, Artificial Sequence
  Description of Artificial Sequence: Synthetic oligonucleotide
agccguaacuggauuucag

SEQ ID NO: 2858823 - RNA, 19 nt, Artificial Sequence
  Description of Artificial Sequence: Synthetic oligonucleotide
ucccaagauccaagacaga

SEQ ID NO: 2858824 - RNA, 19 nt, Artificial Sequence
  Description of Artificial Sequence: Synthetic oligonucleotide
cccaagcagauacaaugag

SEQ ID NO: 2858825 - RNA, 19 nt, Artificial Sequence
  Description of Artificial Sequence: Synthetic oligonucleotide
ucaggcugucaguguugcc

SEQ ID NO: 2858826 - RNA, 19 nt, Artificial Sequence
  Description of Artificial Sequence: Synthetic oligonucleotide
uggugacuucaguauucuc

SEQ ID NO: 2858827 - RNA, 19 nt, Artificial Sequence
  Description of Artificial Sequence: Synthetic oligonucleotide
cagccugcaggaaacucca

SEQ ID NO: 2858828 - RNA, 19 nt, Artificial Sequence
  Description of Artificial Sequence: Synthetic oligonucleotide
caggguuauccaaaagaua

SEQ ID NO: 2858829 - RNA, 19 nt, Artificial Sequence
  Description of Artificial Sequence: Synthetic oligonucleotide
gccauuaguacuucuccaa

SEQ ID NO: 2858830 - RNA, 19 nt, Artificial Sequence
  Description of Artificial Sequence: Synthetic oligonucleotide
gauuguuccccaagcagau

SEQ ID NO: 2858831 - RNA, 19 nt, Artificial Sequence
  Description of Artificial Sequence: Synthetic oligonucleotide
cuccaggaaaucagaggga

SEQ ID NO: 2858832 - RNA, 19 nt, Artificial Sequence
  Description of Artificial Sequence: Synthetic oligonucleotide
ccaacccagucugaaagcc

SEQ ID NO: 2858833 - RNA, 19 nt, Artificial Sequence
  Description of Artificial Sequence: Synthetic oligonucleotide
caacccagucugaaagcca

SEQ ID NO: 2858834 - RNA, 19 nt, Artificial Sequence
  Description of Artificial Sequence: Synthetic oligonucleotide
cuggccaccuggccaguag

SEQ ID NO: 2858835 - RNA, 19 nt, Artificial Sequence
  Description of Artificial Sequence: Synthetic oligonucleotide
agguaggcuuucaucucag

SEQ ID NO: 2858836 - RNA, 19 nt, Artificial Sequence
  Description of Artificial Sequence: Synthetic oligonucleotide
guuauccaaaagauaccua

SEQ ID NO: 2858837 - RNA, 19 nt, Artificial Sequence
  Description of Artificial Sequence: Synthetic oligonucleotide
uggcuccuugaaguuuucc

SEQ ID NO: 2858838 - RNA, 19 nt, Artificial Sequence
  Description of Artificial Sequence: Synthetic oligonucleotide
ggaaaucagagggaaccca

SEQ ID NO: 2858839 - RNA, 19 nt, Artificial Sequence
  Description of Artificial Sequence: Synthetic oligonucleotide
cuuagcagcaauugcuguu

SEQ ID NO: 2858840 - RNA, 19 nt, Artificial Sequence
  Description of Artificial Sequence: Synthetic oligonucleotide
acucaucuuagcagcaauu

SEQ ID NO: 2858841 - RNA, 19 nt, Artificial Sequence
  Description of Artificial Sequence: Synthetic oligonucleotide
uuucagggguaaggcuacc

SEQ ID NO: 2858842 - RNA, 19 nt, Artificial Sequence
  Description of Artificial Sequence: Synthetic oligonucleotide
cagagggaacccacugcuc

SEQ ID NO: 2858843 - RNA, 19 nt, Artificial Sequence
  Description of Artificial Sequence: Synthetic oligonucleotide
auaccuagacaggggccug

SEQ ID NO: 2858844 - RNA, 19 nt, Artificial Sequence
  Description of Artificial Sequence: Synthetic oligonucleotide
aggcuaccacugcugguga

SEQ ID NO: 2858845 - RNA, 19 nt, Artificial Sequence
  Description of Artificial Sequence: Synthetic oligonucleotide
cuguagggccacagcucag

SEQ ID NO: 2858846 - RNA, 19 nt, Artificial Sequence
  Description of Artificial Sequence: Synthetic oligonucleotide
guugcuccacaucccgcuc

SEQ ID NO: 2858847 - RNA, 19 nt, Artificial Sequence
  Description of Artificial Sequence: Synthetic oligonucleotide
caggggccuggccaccugg

SEQ ID NO: 2858848 - RNA, 19 nt, Artificial Sequence
  Description of Artificial Sequence: Synthetic oligonucleotide
ccagaacuugcaccugggg

SEQ ID NO: 2858849 - RNA, 19 nt, Artificial Sequence
  Description of Artificial Sequence: Synthetic oligonucleotide
agacaggggccuggccacc

SEQ ID NO: 2858850 - RNA, 19 nt, Artificial Sequence
  Description of Artificial Sequence: Synthetic oligonucleotide
gcagauacaaugagggucu

SEQ ID NO: 2858851 - RNA, 19 nt, Artificial Sequence
  Description of Artificial Sequence: Synthetic oligonucleotide
guuccccaagcagauacaa

SEQ ID NO: 2858852 - RNA, 19 nt, Artificial Sequence
  Description of Artificial Sequence: Synthetic oligonucleotide
agggucugccucuccacuu

SEQ ID NO: 2858853 - RNA, 19 nt, Artificial Sequence
  Description of Artificial Sequence: Synthetic oligonucleotide
caagacagacuuuccucua

SEQ ID NO: 2858854 - RNA, 19 nt, Artificial Sequence
  Description of Artificial Sequence: Synthetic oligonucleotide
cuccaaaucucaggcuguc

SEQ ID NO: 2858855 - RNA, 19 nt, Artificial Sequence
  Description of Artificial Sequence: Synthetic oligonucleotide
ccagucugaaagccauuag

SEQ ID NO: 2858856 - RNA, 19 nt, Artificial Sequence
  Description of Artificial Sequence: Synthetic oligonucleotide
gggguaaggcuaccacugc

SEQ ID NO: 2858857 - RNA, 19 nt, Artificial Sequence
  Description of Artificial Sequence: Synthetic oligonucleotide
accacucaucuuagcagca

SEQ ID NO: 2858858 - RNA, 19 nt, Artificial Sequence
  Description of Artificial Sequence: Synthetic oligonucleotide
ggggucaaaagccguaacu

SEQ ID NO: 2858859 - RNA, 19 nt, Artificial Sequence
  Description of Artificial Sequence: Synthetic oligonucleotide
aacccacugcucacagccu

SEQ ID NO: 2858860 - RNA, 19 nt, Artificial Sequence
  Description of Artificial Sequence: Synthetic oligonucleotide
ggccuggccaccuggccag

SEQ ID NO: 2858861 - RNA, 19 nt, Artificial Sequence
  Description of Artificial Sequence: Synthetic oligonucleotide
gcccuuucccaccagaacu

SEQ ID NO: 2858862 - RNA, 19 nt, Artificial Sequence
  Description of Artificial Sequence: Synthetic oligonucleotide
cacagccugcaggaaacuc

SEQ ID NO: 2858863 - RNA, 19 nt, Artificial Sequence
  Description of Artificial Sequence: Synthetic oligonucleotide
agggaacccacugcucaca

SEQ ID NO: 2858864 - RNA, 19 nt, Artificial Sequence
  Description of Artificial Sequence: Synthetic oligonucleotide
uugaugcaccacucaucuu

SEQ ID NO: 2858865 - RNA, 19 nt, Artificial Sequence
  Description of Artificial Sequence: Synthetic oligonucleotide
cuaacaacaucaggguuau

SEQ ID NO: 2858866 - RNA, 19 nt, Artificial Sequence
  Description of Artificial Sequence: Synthetic oligonucleotide
aggggccuggccaccuggc

SEQ ID NO: 2858867 - RNA, 19 nt, Artificial Sequence
  Description of Artificial Sequence: Synthetic oligonucleotide
cacugcucacagccugcag

SEQ ID NO: 2858868 - RNA, 19 nt, Artificial Sequence
  Description of Artificial Sequence: Synthetic oligonucleotide
caauugcuguugcuccaca

SEQ ID NO: 2858869 - RNA, 19 nt, Artificial Sequence
  Description of Artificial Sequence: Synthetic oligonucleotide
gcaggaaacuccaauggcu

SEQ ID NO: 2858870 - RNA, 19 nt, Artificial Sequence
  Description of Artificial Sequence: Synthetic oligonucleotide
ggauuucagggguaaggcu

SEQ ID NO: 2858871 - RNA, 19 nt, Artificial Sequence
  Description of Artificial Sequence: Synthetic oligonucleotide
ccaggaaaucagagggaac

SEQ ID NO: 2858872 - RNA, 19 nt, Artificial Sequence
  Description of Artificial Sequence: Synthetic oligonucleotide
ggguccaaacagcucccug

SEQ ID NO: 2858873 - RNA, 19 nt, Artificial Sequence
  Description of Artificial Sequence: Synthetic oligonucleotide
ggaacccacugcucacagc

SEQ ID NO: 2858874 - RNA, 19 nt, Artificial Sequence
  Description of Artificial Sequence: Synthetic oligonucleotide
cuucuccaaaucucaggcu

SEQ ID NO: 2858875 - RNA, 19 nt, Artificial Sequence
  Description of Artificial Sequence: Synthetic oligonucleotide
ccaguagauugcccaguag

SEQ ID NO: 2858876 - RNA, 19 nt, Artificial Sequence
  Description of Artificial Sequence: Synthetic oligonucleotide
cagggguaaggcuaccacu

SEQ ID NO: 2858877 - RNA, 19 nt, Artificial Sequence
  Description of Artificial Sequence: Synthetic oligonucleotide
gagggucugccucuccacu

SEQ ID NO: 2858878 - RNA, 19 nt, Artificial Sequence
  Description of Artificial Sequence: Synthetic oligonucleotide
auugcccaguagggaucac

SEQ ID NO: 2858879 - RNA, 19 nt, Artificial Sequence
  Description of Artificial Sequence: Synthetic oligonucleotide
ccaagacagacuuuccucu

SEQ ID NO: 2858880 - RNA, 19 nt, Artificial Sequence
  Description of Artificial Sequence: Synthetic oligonucleotide
agggaucacuguagggcca

SEQ ID NO: 2858881 - RNA, 19 nt, Artificial Sequence
  Description of Artificial Sequence: Synthetic oligonucleotide
ccagguaggcuuucaucuc

SEQ ID NO: 2858882 - RNA, 19 nt, Artificial Sequence
  Description of Artificial Sequence: Synthetic oligonucleotide
uaccacugcuggugacuuc

SEQ ID NO: 2858883 - RNA, 19 nt, Artificial Sequence
  Description of Artificial Sequence: Synthetic oligonucleotide
cucuaacaacaucaggguu

SEQ ID NO: 2858884 - RNA, 19 nt, Artificial Sequence
  Description of Artificial Sequence: Synthetic oligonucleotide
auggcuccuugaaguuuuc

SEQ ID NO: 2858885 - RNA, 19 nt, Artificial Sequence
  Description of Artificial Sequence: Synthetic oligonucleotide
caguauucuccuccaggua

SEQ ID NO: 2858886 - RNA, 19 nt, Artificial Sequence
  Description of Artificial Sequence: Synthetic oligonucleotide
cccgcucccaagauccaag

SEQ ID NO: 2858887 - RNA, 19 nt, Artificial Sequence
  Description of Artificial Sequence: Synthetic oligonucleotide
gcaauugcuguugcuccac

SEQ ID NO: 2858888 - RNA, 19 nt, Artificial Sequence
  Description of Artificial Sequence: Synthetic oligonucleotide
cagauacaaugagggucug

SEQ ID NO: 2858889 - RNA, 19 nt, Artificial Sequence
  Description of Artificial Sequence: Synthetic oligonucleotide
cagcccuuucccaccagaa

SEQ ID NO: 2858890 - RNA, 19 nt, Artificial Sequence
  Description of Artificial Sequence: Synthetic oligonucleotide
ccccaagcagauacaauga

SEQ ID NO: 2858891 - RNA, 19 nt, Artificial Sequence
  Description of Artificial Sequence: Synthetic oligonucleotide
cuccacaucccgcucccaa

SEQ ID NO: 2858892 - RNA, 19 nt, Artificial Sequence
  Description of Artificial Sequence: Synthetic oligonucleotide
gcuguccuccaggaaauca

SEQ ID NO: 2858893 - RNA, 19 nt, Artificial Sequence
  Description of Artificial Sequence: Synthetic oligonucleotide
ccauuaguacuucuccaaa

SEQ ID NO: 2858894 - RNA, 19 nt, Artificial Sequence
  Description of Artificial Sequence: Synthetic oligonucleotide
guuuuccaacccagucuga

SEQ ID NO: 2858895 - RNA, 19 nt, Artificial Sequence
  Description of Artificial Sequence: Synthetic oligonucleotide
auuguuccccaagcagaua

SEQ ID NO: 2858896 - RNA, 19 nt, Artificial Sequence
  Description of Artificial Sequence: Synthetic oligonucleotide
ucccgcucccaagauccaa

SEQ ID NO: 2858897 - RNA, 19 nt, Artificial Sequence
  Description of Artificial Sequence: Synthetic oligonucleotide
ggcuuucaucucagggucc

SEQ ID NO: 2858898 - RNA, 19 nt, Artificial Sequence
  Description of Artificial Sequence: Synthetic oligonucleotide
cugucaguguugccauuaa

SEQ ID NO: 2858899 - RNA, 19 nt, Artificial Sequence
  Description of Artificial Sequence: Synthetic oligonucleotide
cucagcccuuucccaccag

SEQ ID NO: 2858900 - RNA, 19 nt, Artificial Sequence
  Description of Artificial Sequence: Synthetic oligonucleotide
caaaagccguaacuggauu

SEQ ID NO: 2858901 - RNA, 19 nt, Artificial Sequence
  Description of Artificial Sequence: Synthetic oligonucleotide
cccacugcucacagccugc

SEQ ID NO: 2858902 - RNA, 19 nt, Artificial Sequence
  Description of Artificial Sequence: Synthetic oligonucleotide
cccaccagaacuugcaccu

SEQ ID NO: 2858903 - RNA, 19 nt, Artificial Sequence
  Description of Artificial Sequence: Synthetic oligonucleotide
aggguccaaacagcucccu

SEQ ID NO: 2858904 - RNA, 19 nt, Artificial Sequence
  Description of Artificial Sequence: Synthetic oligonucleotide
ggaaacuccaauggcuccu

SEQ ID NO: 2858905 - RNA, 19 nt, Artificial Sequence
  Description of Artificial Sequence: Synthetic oligonucleotide
ccuggccaguagauugccc

SEQ ID NO: 2858906 - RNA, 19 nt, Artificial Sequence
  Description of Artificial Sequence: Synthetic oligonucleotide
cccaguagggaucacugua

SEQ ID NO: 2858907 - RNA, 19 nt, Artificial Sequence
  Description of Artificial Sequence: Synthetic oligonucleotide
ugcucacagccugcaggaa

SEQ ID NO: 2858908 - RNA, 19 nt, Artificial Sequence
  Description of Artificial Sequence: Synthetic oligonucleotide
cacucaucuuagcagcaau

SEQ ID NO: 2858909 - RNA, 19 nt, Artificial Sequence
  Description of Artificial Sequence: Synthetic oligonucleotide
gggaucacuguagggccac

SEQ ID NO: 2858910 - RNA, 19 nt, Artificial Sequence
  Description of Artificial Sequence: Synthetic oligonucleotide
ggguaaggcuaccacugcu

SEQ ID NO: 2858911 - RNA, 19 nt, Artificial Sequence
  Description of Artificial Sequence: Synthetic oligonucleotide
ccuagacaggggccuggcc

SEQ ID NO: 2858912 - RNA, 19 nt, Artificial Sequence
  Description of Artificial Sequence: Synthetic oligonucleotide
cugcuguccuccaggaaau

SEQ ID NO: 2858913 - RNA, 19 nt, Artificial Sequence
  Description of Artificial Sequence: Synthetic oligonucleotide
cuggugacuucaguauucu

SEQ ID NO: 2858914 - RNA, 19 nt, Artificial Sequence
  Description of Artificial Sequence: Synthetic oligonucleotide
gccaguagauugcccagua

SEQ ID NO: 2858915 - RNA, 19 nt, Artificial Sequence
  Description of Artificial Sequence: Synthetic oligonucleotide
gcugucaguguugccauua

SEQ ID NO: 2858916 - RNA, 19 nt, Artificial Sequence
  Description of Artificial Sequence: Synthetic oligonucleotide
ggccaagaucuuugaugca

SEQ ID NO: 2858917 - RNA, 19 nt, Artificial Sequence
  Description of Artificial Sequence: Synthetic oligonucleotide
ggcuaccacugcuggugac

SEQ ID NO: 2858918 - RNA, 19 nt, Artificial Sequence
  Description of Artificial Sequence: Synthetic oligonucleotide
uaacaacaucaggguuauc

SEQ ID NO: 2858919 - RNA, 19 nt, Artificial Sequence
  Description of Artificial Sequence: Synthetic oligonucleotide
ggggccuggccaccuggcc

SEQ ID NO: 2858920 - RNA, 19 nt, Artificial Sequence
  Description of Artificial Sequence: Synthetic oligonucleotide
ccacaucccgcucccaaga

SEQ ID NO: 2858921 - RNA, 19 nt, Artificial Sequence
  Description of Artificial Sequence: Synthetic oligonucleotide
gcucagcccuuucccacca

SEQ ID NO: 2858922 - RNA, 19 nt, Artificial Sequence
  Description of Artificial Sequence: Synthetic oligonucleotide
gggucugccucuccacuua

SEQ ID NO: 2858923 - RNA, 19 nt, Artificial Sequence
  Description of Artificial Sequence: Synthetic oligonucleotide
gccugcaggaaacuccaau

SEQ ID NO: 2858924 - RNA, 19 nt, Artificial Sequence
  Description of Artificial Sequence: Synthetic oligonucleotide
guguugccauuaaaaggau

SEQ ID NO: 2858925 - RNA, 19 nt, Artificial Sequence
  Description of Artificial Sequence: Synthetic oligonucleotide
gcuaccacugcuggugacu

SEQ ID NO: 2858926 - RNA, 19 nt, Artificial Sequence
  Description of Artificial Sequence: Synthetic oligonucleotide
cacugcuggugacuucagu

SEQ ID NO: 2858927 - RNA, 19 nt, Artificial Sequence
  Description of Artificial Sequence: Synthetic oligonucleotide
caauggcuccuugaaguuu

SEQ ID NO: 2858928 - RNA, 19 nt, Artificial Sequence
  Description of Artificial Sequence: Synthetic oligonucleotide
cgcucccaagauccaagac

SEQ ID NO: 2858929 - RNA, 19 nt, Artificial Sequence
  Description of Artificial Sequence: Synthetic oligonucleotide
cccagucugaaagccauua

SEQ ID NO: 2858930 - RNA, 19 nt, Artificial Sequence
  Description of Artificial Sequence: Synthetic oligonucleotide
cuaccacugcuggugacuu

SEQ ID NO: 2858931 - RNA, 19 nt, Artificial Sequence
  Description of Artificial Sequence: Synthetic oligonucleotide
gccacagcucagcccuuuc

SEQ ID NO: 2858932 - RNA, 19 nt, Artificial Sequence
  Description of Artificial Sequence: Synthetic oligonucleotide
cacaucccgcucccaagau

SEQ ID NO: 2858933 - RNA, 19 nt, Artificial Sequence
  Description of Artificial Sequence: Synthetic oligonucleotide
acccagucugaaagccauu

SEQ ID NO: 2858934 - RNA, 19 nt, Artificial Sequence
  Description of Artificial Sequence: Synthetic oligonucleotide
ccgcucccaagauccaaga

SEQ ID NO: 2858935 - RNA, 19 nt, Artificial Sequence
  Description of Artificial Sequence: Synthetic oligonucleotide
ccaccagaacuugcaccug

SEQ ID NO: 2858936 - RNA, 19 nt, Artificial Sequence
  Description of Artificial Sequence: Synthetic oligonucleotide
gcccaguagggaucacugu

SEQ ID NO: 2858937 - RNA, 19 nt, Artificial Sequence
  Description of Artificial Sequence: Synthetic oligonucleotide
agccugcaggaaacuccaa

SEQ ID NO: 2858938 - RNA, 19 nt, Artificial Sequence
  Description of Artificial Sequence: Synthetic oligonucleotide
ggaucacuguagggccaca

SEQ ID NO: 2858939 - RNA, 19 nt, Artificial Sequence
  Description of Artificial Sequence: Synthetic oligonucleotide
ggccaguagauugcccagu

SEQ ID NO: 2858940 - RNA, 19 nt, Artificial Sequence
  Description of Artificial Sequence: Synthetic oligonucleotide
ccacucaucuuagcagcaa

SEQ ID NO: 2858941 - RNA, 19 nt, Artificial Sequence
  Description of Artificial Sequence: Synthetic oligonucleotide
cccuuucccaccagaacuu

SEQ ID NO: 2858942 - RNA, 19 nt, Artificial Sequence
  Description of Artificial Sequence: Synthetic oligonucleotide
ccacugcucacagccugca

SEQ ID NO: 2858943 - RNA, 19 nt, Artificial Sequence
  Description of Artificial Sequence: Synthetic oligonucleotide
ggccaccuggccaguagau

SEQ ID NO: 2858944 - RNA, 19 nt, Artificial Sequence
  Description of Artificial Sequence: Synthetic oligonucleotide
gcuccacaucccgcuccca

SEQ ID NO: 2858945 - RNA, 19 nt, Artificial Sequence
  Description of Artificial Sequence: Synthetic oligonucleotide
gccaccuggccaguagauu

SEQ ID NO: 2858946 - RNA, 19 nt, Artificial Sequence
  Description of Artificial Sequence: Synthetic oligonucleotide
cccugcuguccuccaggaa

SEQ ID NO: 2858947 - RNA, 19 nt, Artificial Sequence
  Description of Artificial Sequence: Synthetic oligonucleotide
ggcugucaguguugccauu

SEQ ID NO: 2858948 - RNA, 19 nt, Artificial Sequence
  Description of Artificial Sequence: Synthetic oligonucleotide
ggccacagcucagcccuuu

SEQ ID NO: 2858949 - RNA, 19 nt, Artificial Sequence
  Description of Artificial Sequence: Synthetic oligonucleotide
ccuggccaccuggccagua

SEQ ID NO: 2858950 - RNA, 19 nt, Artificial Sequence
  Description of Artificial Sequence: Synthetic oligonucleotide
gccuggccaccuggccagu

SEQ ID NO: 2858951 - RNA, 19 nt, Artificial Sequence
  Description of Artificial Sequence: Synthetic oligonucleotide
gggccacagcucagcccuu

SEQ ID NO: 2858952 - RNA, 19 nt, Artificial Sequence
  Description of Artificial Sequence: Synthetic oligonucleotide
aaaucaaucacagaauucg

SEQ ID NO: 2858953 - RNA, 19 nt, Artificial Sequence
  Description of Artificial Sequence: Synthetic oligonucleotide
uuuauaaggauguccaggg

SEQ ID NO: 2858954 - RNA, 19 nt, Artificial Sequence
  Description of Artificial Sequence: Synthetic oligonucleotide
aagggaguaagucugacag

SEQ ID NO: 2858955 - RNA, 19 nt, Artificial Sequence
  Description of Artificial Sequence: Synthetic oligonucleotide
aaaagaagggaguaagucu

SEQ ID NO: 2858956 - RNA, 19 nt, Artificial Sequence
  Description of Artificial Sequence: Synthetic oligonucleotide
uauaaggauguccagggag

SEQ ID NO: 2858957 - RNA, 19 nt, Artificial Sequence
  Description of Artificial Sequence: Synthetic oligonucleotide
ucacccauugaccacaggg

SEQ ID NO: 2858958 - RNA, 19 nt, Artificial Sequence
  Description of Artificial Sequence: Synthetic oligonucleotide
aaucacagaauucggccac

SEQ ID NO: 2858959 - RNA, 19 nt, Artificial Sequence
  Description of Artificial Sequence: Synthetic oligonucleotide
auacacucaagcucgagac

SEQ ID NO: 2858960 - RNA, 19 nt, Artificial Sequence
  Description of Artificial Sequence: Synthetic oligonucleotide
cuugcgaauaaauuugucc

SEQ ID NO: 2858961 - RNA, 19 nt, Artificial Sequence
  Description of Artificial Sequence: Synthetic oligonucleotide
ucaaucacagaauucggcc

SEQ ID NO: 2858962 - RNA, 19 nt, Artificial Sequence
  Description of Artificial Sequence: Synthetic oligonucleotide
auucccgccgcacagaaac

SEQ ID NO: 2858963 - RNA, 19 nt, Artificial Sequence
  Description of Artificial Sequence: Synthetic oligonucleotide
uugcgaauaaauuuguccu

SEQ ID NO: 2858964 - RNA, 19 nt, Artificial Sequence
  Description of Artificial Sequence: Synthetic oligonucleotide
aaagaagggaguaagucug

SEQ ID NO: 2858965 - RNA, 19 nt, Artificial Sequence
  Description of Artificial Sequence: Synthetic oligonucleotide
auuaucugggaucgguggc

SEQ ID NO: 2858966 - RNA, 19 nt, Artificial Sequence
  Description of Artificial Sequence: Synthetic oligonucleotide
agcaguaaaggccauagga

SEQ ID NO: 2858967 - RNA, 19 nt, Artificial Sequence
  Description of Artificial Sequence: Synthetic oligonucleotide
ugaaaggcgccucugaacu

SEQ ID NO: 2858968 - RNA, 19 nt, Artificial Sequence
  Description of Artificial Sequence: Synthetic oligonucleotide
acuccuggguuuuauaagg

SEQ ID NO: 2858969 - RNA, 19 nt, Artificial Sequence
  Description of Artificial Sequence: Synthetic oligonucleotide
aagcucgagacuucauagc

SEQ ID NO: 2858970 - RNA, 19 nt, Artificial Sequence
  Description of Artificial Sequence: Synthetic oligonucleotide
aaacagguaggacacaaau

SEQ ID NO: 2858971 - RNA, 19 nt, Artificial Sequence
  Description of Artificial Sequence: Synthetic oligonucleotide
ucugggacggauugaaagg

SEQ ID NO: 2858972 - RNA, 19 nt, Artificial Sequence
  Description of Artificial Sequence: Synthetic oligonucleotide
auagcagauaccgcuaacc

SEQ ID NO: 2858973 - RNA, 19 nt, Artificial Sequence
  Description of Artificial Sequence: Synthetic oligonucleotide
guacugucagaaaagaagg

SEQ ID NO: 2858974 - RNA, 19 nt, Artificial Sequence
  Description of Artificial Sequence: Synthetic oligonucleotide
gaccauuggguucucacgg

SEQ ID NO: 2858975 - RNA, 19 nt, Artificial Sequence
  Description of Artificial Sequence: Synthetic oligonucleotide
cugucagaaaagaagggag

SEQ ID NO: 2858976 - RNA, 19 nt, Artificial Sequence
  Description of Artificial Sequence: Synthetic oligonucleotide
ucccagacagccuaugggg

SEQ ID NO: 2858977 - RNA, 19 nt, Artificial Sequence
  Description of Artificial Sequence: Synthetic oligonucleotide
cauuaucugggaucggugg

SEQ ID NO: 2858978 - RNA, 19 nt, Artificial Sequence
  Description of Artificial Sequence: Synthetic oligonucleotide
auaaggauguccagggagc

SEQ ID NO: 2858979 - RNA, 19 nt, Artificial Sequence
  Description of Artificial Sequence: Synthetic oligonucleotide
aaggccgggccauacacuc

SEQ ID NO: 2858980 - RNA, 19 nt, Artificial Sequence
  Description of Artificial Sequence: Synthetic oligonucleotide
uucccagacagccuauggg

SEQ ID NO: 2858981 - RNA, 19 nt, Artificial Sequence
  Description of Artificial Sequence: Synthetic oligonucleotide
gguacugucagaaaagaag

SEQ ID NO: 2858982 - RNA, 19 nt, Artificial Sequence
  Description of Artificial Sequence: Synthetic oligonucleotide
gaagcaguaaaggccauag

SEQ ID NO: 2858983 - RNA, 19 nt, Artificial Sequence
  Description of Artificial Sequence: Synthetic oligonucleotide
aucaaucacagaauucggc

SEQ ID NO: 2858984 - RNA, 19 nt, Artificial Sequence
  Description of Artificial Sequence: Synthetic oligonucleotide
gaacucacgggacugggag

SEQ ID NO: 2858985 - RNA, 19 nt, Artificial Sequence
  Description of Artificial Sequence: Synthetic oligonucleotide
ugucagaaaagaagggagu

SEQ ID NO: 2858986 - RNA, 19 nt, Artificial Sequence
  Description of Artificial Sequence: Synthetic oligonucleotide
aacucacgggacugggagc

SEQ ID NO: 2858987 - RNA, 19 nt, Artificial Sequence
  Description of Artificial Sequence: Synthetic oligonucleotide
uagcagauaccgcuaaccc

SEQ ID NO: 2858988 - RNA, 19 nt, Artificial Sequence
  Description of Artificial Sequence: Synthetic oligonucleotide
cacagaaacagguaggaca

SEQ ID NO: 2858989 - RNA, 19 nt, Artificial Sequence
  Description of Artificial Sequence: Synthetic oligonucleotide
agggcagcgaucgugaaac

SEQ ID NO: 2858990 - RNA, 19 nt, Artificial Sequence
  Description of Artificial Sequence: Synthetic oligonucleotide
caagcucgagacuucauag

SEQ ID NO: 2858991 - RNA, 19 nt, Artificial Sequence
  Description of Artificial Sequence: Synthetic oligonucleotide
aacagguaggacacaaauc

SEQ ID NO: 2858992 - RNA, 19 nt, Artificial Sequence
  Description of Artificial Sequence: Synthetic oligonucleotide
uggaccguggggcugaagc

SEQ ID NO: 2858993 - RNA, 19 nt, Artificial Sequence
  Description of Artificial Sequence: Synthetic oligonucleotide
ucauuaucugggaucggug

SEQ ID NO: 2858994 - RNA, 19 nt, Artificial Sequence
  Description of Artificial Sequence: Synthetic oligonucleotide
agcaagagggcagcgaucg

SEQ ID NO: 2858995 - RNA, 19 nt, Artificial Sequence
  Description of Artificial Sequence: Synthetic oligonucleotide
uaaaggccauaggagaggg

SEQ ID NO: 2858996 - RNA, 19 nt, Artificial Sequence
  Description of Artificial Sequence: Synthetic oligonucleotide
gucugggacggauugaaag

SEQ ID NO: 2858997 - RNA, 19 nt, Artificial Sequence
  Description of Artificial Sequence: Synthetic oligonucleotide
gauaccgcuaaccccagca

SEQ ID NO: 2858998 - RNA, 19 nt, Artificial Sequence
  Description of Artificial Sequence: Synthetic oligonucleotide
aagcaguaaaggccauagg

SEQ ID NO: 2858999 - RNA, 19 nt, Artificial Sequence
  Description of Artificial Sequence: Synthetic oligonucleotide
ucuuuguuacuccuggguu

SEQ ID NO: 2859000 - RNA, 19 nt, Artificial Sequence
  Description of Artificial Sequence: Synthetic oligonucleotide
uacuccuggguuuuauaag

SEQ ID NO: 2859001 - RNA, 19 nt, Artificial Sequence
  Description of Artificial Sequence: Synthetic oligonucleotide
uuacuccuggguuuuauaa

SEQ ID NO: 2859002 - RNA, 19 nt, Artificial Sequence
  Description of Artificial Sequence: Synthetic oligonucleotide
acuuccucacccauugacc

SEQ ID NO: 2859003 - RNA, 19 nt, Artificial Sequence
  Description of Artificial Sequence: Synthetic oligonucleotide
acaggguacugucagaaaa

SEQ ID NO: 2859004 - RNA, 19 nt, Artificial Sequence
  Description of Artificial Sequence: Synthetic oligonucleotide
gcuaaccccagcaagaggg

SEQ ID NO: 2859005 - RNA, 19 nt, Artificial Sequence
  Description of Artificial Sequence: Synthetic oligonucleotide
guugcuguggaccgugggg

SEQ ID NO: 2859006 - RNA, 19 nt, Artificial Sequence
  Description of Artificial Sequence: Synthetic oligonucleotide
acucacgggacugggagcc

SEQ ID NO: 2859007 - RNA, 19 nt, Artificial Sequence
  Description of Artificial Sequence: Synthetic oligonucleotide
agcucgagacuucauagca

SEQ ID NO: 2859008 - RNA, 19 nt, Artificial Sequence
  Description of Artificial Sequence: Synthetic oligonucleotide
cauaggagagggcagccgc

SEQ ID NO: 2859009 - RNA, 19 nt, Artificial Sequence
  Description of Artificial Sequence: Synthetic oligonucleotide
gggaguaagucugacaggg

SEQ ID NO: 2859010 - RNA, 19 nt, Artificial Sequence
  Description of Artificial Sequence: Synthetic oligonucleotide
uuauaaggauguccaggga

SEQ ID NO: 2859011 - RNA, 19 nt, Artificial Sequence
  Description of Artificial Sequence: Synthetic oligonucleotide
ggaucgguggcucuggccg

SEQ ID NO: 2859012 - RNA, 19 nt, Artificial Sequence
  Description of Artificial Sequence: Synthetic oligonucleotide
ugggacggauugaaaggcg

SEQ ID NO: 2859013 - RNA, 19 nt, Artificial Sequence
  Description of Artificial Sequence: Synthetic oligonucleotide
acugucagaaaagaaggga

SEQ ID NO: 2859014 - RNA, 19 nt, Artificial Sequence
  Description of Artificial Sequence: Synthetic oligonucleotide
ucaagcucgagacuucaua

SEQ ID NO: 2859015 - RNA, 19 nt, Artificial Sequence
  Description of Artificial Sequence: Synthetic oligonucleotide
ucaaggccgggccauacac

SEQ ID NO: 2859016 - RNA, 19 nt, Artificial Sequence
  Description of Artificial Sequence: Synthetic oligonucleotide
gguggaagcaguaaaggcc

SEQ ID NO: 2859017 - RNA, 19 nt, Artificial Sequence
  Description of Artificial Sequence: Synthetic oligonucleotide
uaccgcuaaccccagcaag

SEQ ID NO: 2859018 - RNA, 19 nt, Artificial Sequence
  Description of Artificial Sequence: Synthetic oligonucleotide
cagggagcuuucaaggccg

SEQ ID NO: 2859019 - RNA, 19 nt, Artificial Sequence
  Description of Artificial Sequence: Synthetic oligonucleotide
gugcgcaucauuaucuggg

SEQ ID NO: 2859020 - RNA, 19 nt, Artificial Sequence
  Description of Artificial Sequence: Synthetic oligonucleotide
gaucgugaaacccugggcu

SEQ ID NO: 2859021 - RNA, 19 nt, Artificial Sequence
  Description of Artificial Sequence: Synthetic oligonucleotide
acuucauagcagauaccgc

SEQ ID NO: 2859022 - RNA, 19 nt, Artificial Sequence
  Description of Artificial Sequence: Synthetic oligonucleotide
uugaaaggcgccucugaac

SEQ ID NO: 2859023 - RNA, 19 nt, Artificial Sequence
  Description of Artificial Sequence: Synthetic oligonucleotide
auuggguucucacgggucu

SEQ ID NO: 2859024 - RNA, 19 nt, Artificial Sequence
  Description of Artificial Sequence: Synthetic oligonucleotide
ucugacagggcucuuuguu

SEQ ID NO: 2859025 - RNA, 19 nt, Artificial Sequence
  Description of Artificial Sequence: Synthetic oligonucleotide
ugacagggcucuuuguuac

SEQ ID NO: 2859026 - RNA, 19 nt, Artificial Sequence
  Description of Artificial Sequence: Synthetic oligonucleotide
guaaaggccauaggagagg

SEQ ID NO: 2859027 - RNA, 19 nt, Artificial Sequence
  Description of Artificial Sequence: Synthetic oligonucleotide
gcaucauuaucugggaucg

SEQ ID NO: 2859028 - RNA, 19 nt, Artificial Sequence
  Description of Artificial Sequence: Synthetic oligonucleotide
caguaaaggccauaggaga

SEQ ID NO: 2859029 - RNA, 19 nt, Artificial Sequence
  Description of Artificial Sequence: Synthetic oligonucleotide
agaauucggccacuuccuc

SEQ ID NO: 2859030 - RNA, 19 nt, Artificial Sequence
  Description of Artificial Sequence: Synthetic oligonucleotide
gagcuuucaaggccgggcc

SEQ ID NO: 2859031 - RNA, 19 nt, Artificial Sequence
  Description of Artificial Sequence: Synthetic oligonucleotide
aaaggcgccucugaacuca

SEQ ID NO: 2859032 - RNA, 19 nt, Artificial Sequence
  Description of Artificial Sequence: Synthetic oligonucleotide
auugaaaggcgccucugaa

SEQ ID NO: 2859033 - RNA, 19 nt, Artificial Sequence
  Description of Artificial Sequence: Synthetic oligonucleotide
uccagggagcuuucaaggc

SEQ ID NO: 2859034 - RNA, 19 nt, Artificial Sequence
  Description of Artificial Sequence: Synthetic oligonucleotide
ucuugcgaauaaauuuguc

SEQ ID NO: 2859035 - RNA, 19 nt, Artificial Sequence
  Description of Artificial Sequence: Synthetic oligonucleotide
ucugaacucacgggacugg

SEQ ID NO: 2859036 - RNA, 19 nt, Artificial Sequence
  Description of Artificial Sequence: Synthetic oligonucleotide
ucauagcagauaccgcuaa

SEQ ID NO: 2859037 - RNA, 19 nt, Artificial Sequence
  Description of Artificial Sequence: Synthetic oligonucleotide
agggaguaagucugacagg

SEQ ID NO: 2859038 - RNA, 19 nt, Artificial Sequence
  Description of Artificial Sequence: Synthetic oligonucleotide
uucauagcagauaccgcua

SEQ ID NO: 2859039 - RNA, 19 nt, Artificial Sequence
  Description of Artificial Sequence: Synthetic oligonucleotide
gauugaaaggcgccucuga

SEQ ID NO: 2859040 - RNA, 19 nt, Artificial Sequence
  Description of Artificial Sequence: Synthetic oligonucleotide
ucagaaaagaagggaguaa

SEQ ID NO: 2859041 - RNA, 19 nt, Artificial Sequence
  Description of Artificial Sequence: Synthetic oligonucleotide
cuucauagcagauaccgcu

SEQ ID NO: 2859042 - RNA, 19 nt, Artificial Sequence
  Description of Artificial Sequence: Synthetic oligonucleotide
aucauuaucugggaucggu

SEQ ID NO: 2859043 - RNA, 19 nt, Artificial Sequence
  Description of Artificial Sequence: Synthetic oligonucleotide
cugggagccgccauucccg

SEQ ID NO: 2859044 - RNA, 19 nt, Artificial Sequence
  Description of Artificial Sequence: Synthetic oligonucleotide
ggccauacacucaagcucg

SEQ ID NO: 2859045 - RNA, 19 nt, Artificial Sequence
  Description of Artificial Sequence: Synthetic oligonucleotide
guucccagacagccuaugg

SEQ ID NO: 2859046 - RNA, 19 nt, Artificial Sequence
  Description of Artificial Sequence: Synthetic oligonucleotide
aucgugaaacccugggcug

SEQ ID NO: 2859047 - RNA, 19 nt, Artificial Sequence
  Description of Artificial Sequence: Synthetic oligonucleotide
ggucuugcgaauaaauuug

SEQ ID NO: 2859048 - RNA, 19 nt, Artificial Sequence
  Description of Artificial Sequence: Synthetic oligonucleotide
accauuggguucucacggg

SEQ ID NO: 2859049 - RNA, 19 nt, Artificial Sequence
  Description of Artificial Sequence: Synthetic oligonucleotide
uggggucugggacggauug

SEQ ID NO: 2859050 - RNA, 19 nt, Artificial Sequence
  Description of Artificial Sequence: Synthetic oligonucleotide
gaagcccucggugacuggg

SEQ ID NO: 2859051 - RNA, 19 nt, Artificial Sequence
  Description of Artificial Sequence: Synthetic oligonucleotide
agucugacagggcucuuug

SEQ ID NO: 2859052 - RNA, 19 nt, Artificial Sequence
  Description of Artificial Sequence: Synthetic oligonucleotide
cuugaaggucucuggguug

SEQ ID NO: 2859053 - RNA, 19 nt, Artificial Sequence
  Description of Artificial Sequence: Synthetic oligonucleotide
gaguaagucugacagggcu

SEQ ID NO: 2859054 - RNA, 19 nt, Artificial Sequence
  Description of Artificial Sequence: Synthetic oligonucleotide
gaauucggccacuuccuca

SEQ ID NO: 2859055 - RNA, 19 nt, Artificial Sequence
  Description of Artificial Sequence: Synthetic oligonucleotide
uucggccacuuccucaccc

SEQ ID NO: 2859056 - RNA, 19 nt, Artificial Sequence
  Description of Artificial Sequence: Synthetic oligonucleotide
agaagggaguaagucugac

SEQ ID NO: 2859057 - RNA, 19 nt, Artificial Sequence
  Description of Artificial Sequence: Synthetic oligonucleotide
uacacucaagcucgagacu

SEQ ID NO: 2859058 - RNA, 19 nt, Artificial Sequence
  Description of Artificial Sequence: Synthetic oligonucleotide
cuuccucacccauugacca

SEQ ID NO: 2859059 - RNA, 19 nt, Artificial Sequence
  Description of Artificial Sequence: Synthetic oligonucleotide
uuguccuugaaggucucug

SEQ ID NO: 2859060 - RNA, 19 nt, Artificial Sequence
  Description of Artificial Sequence: Synthetic oligonucleotide
gaagggaguaagucugaca

SEQ ID NO: 2859061 - RNA, 19 nt, Artificial Sequence
  Description of Artificial Sequence: Synthetic oligonucleotide
cacuuccucacccauugac

SEQ ID NO: 2859062 - RNA, 19 nt, Artificial Sequence
  Description of Artificial Sequence: Synthetic oligonucleotide
cauacacucaagcucgaga

SEQ ID NO: 2859063 - RNA, 19 nt, Artificial Sequence
  Description of Artificial Sequence: Synthetic oligonucleotide
ugcgaauaaauuuguccuu

SEQ ID NO: 2859064 - RNA, 19 nt, Artificial Sequence
  Description of Artificial Sequence: Synthetic oligonucleotide
caaucacagaauucggcca

SEQ ID NO: 2859065 - RNA, 19 nt, Artificial Sequence
  Description of Artificial Sequence: Synthetic oligonucleotide
uauggggaccauuggguuc

SEQ ID NO: 2859066 - RNA, 19 nt, Artificial Sequence
  Description of Artificial Sequence: Synthetic oligonucleotide
agaaacagguaggacacaa

SEQ ID NO: 2859067 - RNA, 19 nt, Artificial Sequence
  Description of Artificial Sequence: Synthetic oligonucleotide
cucgagacuucauagcaga

SEQ ID NO: 2859068 - RNA, 19 nt, Artificial Sequence
  Description of Artificial Sequence: Synthetic oligonucleotide
ggaccauuggguucucacg

SEQ ID NO: 2859069 - RNA, 19 nt, Artificial Sequence
  Description of Artificial Sequence: Synthetic oligonucleotide
aaaggccauaggagagggc

SEQ ID NO: 2859070 - RNA, 19 nt, Artificial Sequence
  Description of Artificial Sequence: Synthetic oligonucleotide
ugaacucacgggacuggga

SEQ ID NO: 2859071 - RNA, 19 nt, Artificial Sequence
  Description of Artificial Sequence: Synthetic oligonucleotide
uuaucugggaucgguggcu

SEQ ID NO: 2859072 - RNA, 19 nt, Artificial Sequence
  Description of Artificial Sequence: Synthetic oligonucleotide
cugggacggauugaaaggc

SEQ ID NO: 2859073 - RNA, 19 nt, Artificial Sequence
  Description of Artificial Sequence: Synthetic oligonucleotide
ugcgcaucauuaucuggga

SEQ ID NO: 2859074 - RNA, 19 nt, Artificial Sequence
  Description of Artificial Sequence: Synthetic oligonucleotide
auaggagagggcagccgcc

SEQ ID NO: 2859075 - RNA, 19 nt, Artificial Sequence
  Description of Artificial Sequence: Synthetic oligonucleotide
guggaagcaguaaaggcca

SEQ ID NO: 2859076 - RNA, 19 nt, Artificial Sequence
  Description of Artificial Sequence: Synthetic oligonucleotide
cuaaccccagcaagagggc

SEQ ID NO: 2859077 - RNA, 19 nt, Artificial Sequence
  Description of Artificial Sequence: Synthetic oligonucleotide
gccgcacagaaacagguag

SEQ ID NO: 2859078 - RNA, 19 nt, Artificial Sequence
  Description of Artificial Sequence: Synthetic oligonucleotide
aaccccagcaagagggcag

SEQ ID NO: 2859079 - RNA, 19 nt, Artificial Sequence
  Description of Artificial Sequence: Synthetic oligonucleotide
agacuucauagcagauacc

SEQ ID NO: 2859080 - RNA, 19 nt, Artificial Sequence
  Description of Artificial Sequence: Synthetic oligonucleotide
agauaccgcuaaccccagc

SEQ ID NO: 2859081 - RNA, 19 nt, Artificial Sequence
  Description of Artificial Sequence: Synthetic oligonucleotide
ccuggguuuuauaaggaug

SEQ ID NO: 2859082 - RNA, 19 nt, Artificial Sequence
  Description of Artificial Sequence: Synthetic oligonucleotide
uaggagagggcagccgccg

SEQ ID NO: 2859083 - RNA, 19 nt, Artificial Sequence
  Description of Artificial Sequence: Synthetic oligonucleotide
uccuggguuuuauaaggau

SEQ ID NO: 2859084 - RNA, 19 nt, Artificial Sequence
  Description of Artificial Sequence: Synthetic oligonucleotide
ggcgccucugaacucacgg

SEQ ID NO: 2859085 - RNA, 19 nt, Artificial Sequence
  Description of Artificial Sequence: Synthetic oligonucleotide
gccuauggggaccauuggg

SEQ ID NO: 2859086 - RNA, 19 nt, Artificial Sequence
  Description of Artificial Sequence: Synthetic oligonucleotide
ggugcgcaucauuaucugg

SEQ ID NO: 2859087 - RNA, 19 nt, Artificial Sequence
  Description of Artificial Sequence: Synthetic oligonucleotide
uccucacccauugaccaca

SEQ ID NO: 2859088 - RNA, 19 nt, Artificial Sequence
  Description of Artificial Sequence: Synthetic oligonucleotide
uucaaggccgggccauaca

SEQ ID NO: 2859089 - RNA, 19 nt, Artificial Sequence
  Description of Artificial Sequence: Synthetic oligonucleotide
caagagggcagcgaucgug

SEQ ID NO: 2859090 - RNA, 19 nt, Artificial Sequence
  Description of Artificial Sequence: Synthetic oligonucleotide
ggugacuggggucugggac

SEQ ID NO: 2859091 - RNA, 19 nt, Artificial Sequence
  Description of Artificial Sequence: Synthetic oligonucleotide
acacucaagcucgagacuu

SEQ ID NO: 2859092 - RNA, 19 nt, Artificial Sequence
  Description of Artificial Sequence: Synthetic oligonucleotide
ucgugaaacccugggcugc

SEQ ID NO: 2859093 - RNA, 19 nt, Artificial Sequence
  Description of Artificial Sequence: Synthetic oligonucleotide
agagggcagccgccguucc

SEQ ID NO: 2859094 - RNA, 19 nt, Artificial Sequence
  Description of Artificial Sequence: Synthetic oligonucleotide
cauagcagauaccgcuaac

SEQ ID NO: 2859095 - RNA, 19 nt, Artificial Sequence
  Description of Artificial Sequence: Synthetic oligonucleotide
ggagccgccauucccgccg

SEQ ID NO: 2859096 - RNA, 19 nt, Artificial Sequence
  Description of Artificial Sequence: Synthetic oligonucleotide
cauuggguucucacggguc

SEQ ID NO: 2859097 - RNA, 19 nt, Artificial Sequence
  Description of Artificial Sequence: Synthetic oligonucleotide
acggauugaaaggcgccuc

SEQ ID NO: 2859098 - RNA, 19 nt, Artificial Sequence
  Description of Artificial Sequence: Synthetic oligonucleotide
auucggccacuuccucacc

SEQ ID NO: 2859099 - RNA, 19 nt, Artificial Sequence
  Description of Artificial Sequence: Synthetic oligonucleotide
gcagauaccgcuaacccca

SEQ ID NO: 2859100 - RNA, 19 nt, Artificial Sequence
  Description of Artificial Sequence: Synthetic oligonucleotide
gaaacccugggcugcgauc

SEQ ID NO: 2859101 - RNA, 19 nt, Artificial Sequence
  Description of Artificial Sequence: Synthetic oligonucleotide
ucugggaucgguggcucug

SEQ ID NO: 2859102 - RNA, 19 nt, Artificial Sequence
  Description of Artificial Sequence: Synthetic oligonucleotide
ugaaacccugggcugcgau

SEQ ID NO: 2859103 - RNA, 19 nt, Artificial Sequence
  Description of Artificial Sequence: Synthetic oligonucleotide
cugaacucacgggacuggg

SEQ ID NO: 2859104 - RNA, 19 nt, Artificial Sequence
  Description of Artificial Sequence: Synthetic oligonucleotide
gcgaauaaauuuguccuug

SEQ ID NO: 2859105 - RNA, 19 nt, Artificial Sequence
  Description of Artificial Sequence: Synthetic oligonucleotide
aggguacugucagaaaaga

SEQ ID NO: 2859106 - RNA, 19 nt, Artificial Sequence
  Description of Artificial Sequence: Synthetic oligonucleotide
auggggaccauuggguucu

SEQ ID NO: 2859107 - RNA, 19 nt, Artificial Sequence
  Description of Artificial Sequence: Synthetic oligonucleotide
gcgaucgugaaacccuggg

SEQ ID NO: 2859108 - RNA, 19 nt, Artificial Sequence
  Description of Artificial Sequence: Synthetic oligonucleotide
gggccauacacucaagcuc

SEQ ID NO: 2859109 - RNA, 19 nt, Artificial Sequence
  Description of Artificial Sequence: Synthetic oligonucleotide
gccacuuccucacccauug

SEQ ID NO: 2859110 - RNA, 19 nt, Artificial Sequence
  Description of Artificial Sequence: Synthetic oligonucleotide
aacccugggcugcgauccg

SEQ ID NO: 2859111 - RNA, 19 nt, Artificial Sequence
  Description of Artificial Sequence: Synthetic oligonucleotide
ucggugacuggggucuggg

SEQ ID NO: 2859112 - RNA, 19 nt, Artificial Sequence
  Description of Artificial Sequence: Synthetic oligonucleotide
ucgagacuucauagcagau

SEQ ID NO: 2859113 - RNA, 19 nt, Artificial Sequence
  Description of Artificial Sequence: Synthetic oligonucleotide
ucccgccgcacagaaacag

SEQ ID NO: 2859114 - RNA, 19 nt, Artificial Sequence
  Description of Artificial Sequence: Synthetic oligonucleotide
ucacgggucuugcgaauaa

SEQ ID NO: 2859115 - RNA, 19 nt, Artificial Sequence
  Description of Artificial Sequence: Synthetic oligonucleotide
accccagcaagagggcagc

SEQ ID NO: 2859116 - RNA, 19 nt, Artificial Sequence
  Description of Artificial Sequence: Synthetic oligonucleotide
auugaccacaggguacugu

SEQ ID NO: 2859117 - RNA, 19 nt, Artificial Sequence
  Description of Artificial Sequence: Synthetic oligonucleotide
aggauguccagggagcuuu

SEQ ID NO: 2859118 - RNA, 19 nt, Artificial Sequence
  Description of Artificial Sequence: Synthetic oligonucleotide
uaaccccagcaagagggca

SEQ ID NO: 2859119 - RNA, 19 nt, Artificial Sequence
  Description of Artificial Sequence: Synthetic oligonucleotide
cucugaacucacgggacug

SEQ ID NO: 2859120 - RNA, 19 nt, Artificial Sequence
  Description of Artificial Sequence: Synthetic oligonucleotide
gaaaggcgccucugaacuc

SEQ ID NO: 2859121 - RNA, 19 nt, Artificial Sequence
  Description of Artificial Sequence: Synthetic oligonucleotide
aagcccucggugacugggg

SEQ ID NO: 2859122 - RNA, 19 nt, Artificial Sequence
  Description of Artificial Sequence: Synthetic oligonucleotide
ggagcuuucaaggccgggc

SEQ ID NO: 2859123 - RNA, 19 nt, Artificial Sequence
  Description of Artificial Sequence: Synthetic oligonucleotide
auaccgcuaaccccagcaa

SEQ ID NO: 2859124 - RNA, 19 nt, Artificial Sequence
  Description of Artificial Sequence: Synthetic oligonucleotide
accgcuaaccccagcaaga

SEQ ID NO: 2859125 - RNA, 19 nt, Artificial Sequence
  Description of Artificial Sequence: Synthetic oligonucleotide
ccagggagcuuucaaggcc

SEQ ID NO: 2859126 - RNA, 19 nt, Artificial Sequence
  Description of Artificial Sequence: Synthetic oligonucleotide
gguucucacgggucuugcg

SEQ ID NO: 2859127 - RNA, 19 nt, Artificial Sequence
  Description of Artificial Sequence: Synthetic oligonucleotide
ucggccacuuccucaccca

SEQ ID NO: 2859128 - RNA, 19 nt, Artificial Sequence
  Description of Artificial Sequence: Synthetic oligonucleotide
agcuuucaaggccgggcca

SEQ ID NO: 2859129 - RNA, 19 nt, Artificial Sequence
  Description of Artificial Sequence: Synthetic oligonucleotide
uggguugcuguggaccgug

SEQ ID NO: 2859130 - RNA, 19 nt, Artificial Sequence
  Description of Artificial Sequence: Synthetic oligonucleotide
uuucaaggccgggccauac

SEQ ID NO: 2859131 - RNA, 19 nt, Artificial Sequence
  Description of Artificial Sequence: Synthetic oligonucleotide
uggggcugaagcccucggu

SEQ ID NO: 2859132 - RNA, 19 nt, Artificial Sequence
  Description of Artificial Sequence: Synthetic oligonucleotide
gggaccauuggguucucac

SEQ ID NO: 2859133 - RNA, 19 nt, Artificial Sequence
  Description of Artificial Sequence: Synthetic oligonucleotide
aagucugacagggcucuuu

SEQ ID NO: 2859134 - RNA, 19 nt, Artificial Sequence
  Description of Artificial Sequence: Synthetic oligonucleotide
gcgguggaagcaguaaagg

SEQ ID NO: 2859135 - RNA, 19 nt, Artificial Sequence
  Description of Artificial Sequence: Synthetic oligonucleotide
acucaagcucgagacuuca

SEQ ID NO: 2859136 - RNA, 19 nt, Artificial Sequence
  Description of Artificial Sequence: Synthetic oligonucleotide
gcucuuuguuacuccuggg

SEQ ID NO: 2859137 - RNA, 19 nt, Artificial Sequence
  Description of Artificial Sequence: Synthetic oligonucleotide
aaggcgccucugaacucac

SEQ ID NO: 2859138 - RNA, 19 nt, Artificial Sequence
  Description of Artificial Sequence: Synthetic oligonucleotide
cucuuuguuacuccugggu

SEQ ID NO: 2859139 - RNA, 19 nt, Artificial Sequence
  Description of Artificial Sequence: Synthetic oligonucleotide
cacagaauucggccacuuc

SEQ ID NO: 2859140 - RNA, 19 nt, Artificial Sequence
  Description of Artificial Sequence: Synthetic oligonucleotide
uggguuuuauaaggauguc

SEQ ID NO: 2859141 - RNA, 19 nt, Artificial Sequence
  Description of Artificial Sequence: Synthetic oligonucleotide
gaaacagguaggacacaaa

SEQ ID NO: 2859142 - RNA, 19 nt, Artificial Sequence
  Description of Artificial Sequence: Synthetic oligonucleotide
ugggaucgguggcucuggc

SEQ ID NO: 2859143 - RNA, 19 nt, Artificial Sequence
  Description of Artificial Sequence: Synthetic oligonucleotide
uggguucucacgggucuug

SEQ ID NO: 2859144 - RNA, 19 nt, Artificial Sequence
  Description of Artificial Sequence: Synthetic oligonucleotide
ugggagccgccauucccgc

SEQ ID NO: 2859145 - RNA, 19 nt, Artificial Sequence
  Description of Artificial Sequence: Synthetic oligonucleotide
cgcaucauuaucugggauc

SEQ ID NO: 2859146 - RNA, 19 nt, Artificial Sequence
  Description of Artificial Sequence: Synthetic oligonucleotide
ccgcacagaaacagguagg

SEQ ID NO: 2859147 - RNA, 19 nt, Artificial Sequence
  Description of Artificial Sequence: Synthetic oligonucleotide
cuuuguuacuccuggguuu

SEQ ID NO: 2859148 - RNA, 19 nt, Artificial Sequence
  Description of Artificial Sequence: Synthetic oligonucleotide
cacucaagcucgagacuuc

SEQ ID NO: 2859149 - RNA, 19 nt, Artificial Sequence
  Description of Artificial Sequence: Synthetic oligonucleotide
caucauuaucugggaucgg

SEQ ID NO: 2859150 - RNA, 19 nt, Artificial Sequence
  Description of Artificial Sequence: Synthetic oligonucleotide
gacugggagccgccauucc

SEQ ID NO: 2859151 - RNA, 19 nt, Artificial Sequence
  Description of Artificial Sequence: Synthetic oligonucleotide
gggucuugcgaauaaauuu

SEQ ID NO: 2859152 - RNA, 19 nt, Artificial Sequence
  Description of Artificial Sequence: Synthetic oligonucleotide
uccgggugcgcaucauuau

SEQ ID NO: 2859153 - RNA, 19 nt, Artificial Sequence
  Description of Artificial Sequence: Synthetic oligonucleotide
cagauaccgcuaaccccag

SEQ ID NO: 2859154 - RNA, 19 nt, Artificial Sequence
  Description of Artificial Sequence: Synthetic oligonucleotide
uaucugggaucgguggcuc

SEQ ID NO: 2859155 - RNA, 19 nt, Artificial Sequence
  Description of Artificial Sequence: Synthetic oligonucleotide
cccauugaccacaggguac

SEQ ID NO: 2859156 - RNA, 19 nt, Artificial Sequence
  Description of Artificial Sequence: Synthetic oligonucleotide
guaagucugacagggcucu

SEQ ID NO: 2859157 - RNA, 19 nt, Artificial Sequence
  Description of Artificial Sequence: Synthetic oligonucleotide
ucucacgggucuugcgaau

SEQ ID NO: 2859158 - RNA, 19 nt, Artificial Sequence
  Description of Artificial Sequence: Synthetic oligonucleotide
ucacgggacugggagccgc

SEQ ID NO: 2859159 - RNA, 19 nt, Artificial Sequence
  Description of Artificial Sequence: Synthetic oligonucleotide
gggacggauugaaaggcgc

SEQ ID NO: 2859160 - RNA, 19 nt, Artificial Sequence
  Description of Artificial Sequence: Synthetic oligonucleotide
uucccgccgcacagaaaca

SEQ ID NO: 2859161 - RNA, 19 nt, Artificial Sequence
  Description of Artificial Sequence: Synthetic oligonucleotide
cgguggaagcaguaaaggc

SEQ ID NO: 2859162 - RNA, 19 nt, Artificial Sequence
  Description of Artificial Sequence: Synthetic oligonucleotide
acgggucuugcgaauaaau

SEQ ID NO: 2859163 - RNA, 19 nt, Artificial Sequence
  Description of Artificial Sequence: Synthetic oligonucleotide
agcgaucgugaaacccugg

SEQ ID NO: 2859164 - RNA, 19 nt, Artificial Sequence
  Description of Artificial Sequence: Synthetic oligonucleotide
cugggaucgguggcucugg

SEQ ID NO: 2859165 - RNA, 19 nt, Artificial Sequence
  Description of Artificial Sequence: Synthetic oligonucleotide
aucacagaauucggccacu

SEQ ID NO: 2859166 - RNA, 19 nt, Artificial Sequence
  Description of Artificial Sequence: Synthetic oligonucleotide
ucucuggguugcuguggac

SEQ ID NO: 2859167 - RNA, 19 nt, Artificial Sequence
  Description of Artificial Sequence: Synthetic oligonucleotide
cacccauugaccacagggu

SEQ ID NO: 2859168 - RNA, 19 nt, Artificial Sequence
  Description of Artificial Sequence: Synthetic oligonucleotide
ggacggauugaaaggcgcc

SEQ ID NO: 2859169 - RNA, 19 nt, Artificial Sequence
  Description of Artificial Sequence: Synthetic oligonucleotide
gagggcagccgccguuccc

SEQ ID NO: 2859170 - RNA, 19 nt, Artificial Sequence
  Description of Artificial Sequence: Synthetic oligonucleotide
aucgguggcucuggccgcg

SEQ ID NO: 2859171 - RNA, 19 nt, Artificial Sequence
  Description of Artificial Sequence: Synthetic oligonucleotide
gcgccucugaacucacggg

SEQ ID NO: 2859172 - RNA, 19 nt, Artificial Sequence
  Description of Artificial Sequence: Synthetic oligonucleotide
gcucgagacuucauagcag

SEQ ID NO: 2859173 - RNA, 19 nt, Artificial Sequence
  Description of Artificial Sequence: Synthetic oligonucleotide
cucacccauugaccacagg

SEQ ID NO: 2859174 - RNA, 19 nt, Artificial Sequence
  Description of Artificial Sequence: Synthetic oligonucleotide
gacggauugaaaggcgccu

SEQ ID NO: 2859175 - RNA, 19 nt, Artificial Sequence
  Description of Artificial Sequence: Synthetic oligonucleotide
gggugcgcaucauuaucug

SEQ ID NO: 2859176 - RNA, 19 nt, Artificial Sequence
  Description of Artificial Sequence: Synthetic oligonucleotide
ucacagaauucggccacuu

SEQ ID NO: 2859177 - RNA, 19 nt, Artificial Sequence
  Description of Artificial Sequence: Synthetic oligonucleotide
ggauugaaaggcgccucug

SEQ ID NO: 2859178 - RNA, 19 nt, Artificial Sequence
  Description of Artificial Sequence: Synthetic oligonucleotide
aucugggaucgguggcucu

SEQ ID NO: 2859179 - RNA, 19 nt, Artificial Sequence
  Description of Artificial Sequence: Synthetic oligonucleotide
cucuggccgcgguggaagc

SEQ ID NO: 2859180 - RNA, 19 nt, Artificial Sequence
  Description of Artificial Sequence: Synthetic oligonucleotide
gcagccgccguucccagac

SEQ ID NO: 2859181 - RNA, 19 nt, Artificial Sequence
  Description of Artificial Sequence: Synthetic oligonucleotide
agcccucggugacuggggu

SEQ ID NO: 2859182 - RNA, 19 nt, Artificial Sequence
  Description of Artificial Sequence: Synthetic oligonucleotide
ucuggccgcgguggaagca

SEQ ID NO: 2859183 - RNA, 19 nt, Artificial Sequence
  Description of Artificial Sequence: Synthetic oligonucleotide
cacgggacugggagccgcc

SEQ ID NO: 2859184 - RNA, 19 nt, Artificial Sequence
  Description of Artificial Sequence: Synthetic oligonucleotide
gagagggcagccgccguuc

SEQ ID NO: 2859185 - RNA, 19 nt, Artificial Sequence
  Description of Artificial Sequence: Synthetic oligonucleotide
gauguccagggagcuuuca

SEQ ID NO: 2859186 - RNA, 19 nt, Artificial Sequence
  Description of Artificial Sequence: Synthetic oligonucleotide
ggaguaagucugacagggc

SEQ ID NO: 2859187 - RNA, 19 nt, Artificial Sequence
  Description of Artificial Sequence: Synthetic oligonucleotide
gggaucgguggcucuggcc

SEQ ID NO: 2859188 - RNA, 19 nt, Artificial Sequence
  Description of Artificial Sequence: Synthetic oligonucleotide
ggccauaggagagggcagc

SEQ ID NO: 2859189 - RNA, 19 nt, Artificial Sequence
  Description of Artificial Sequence: Synthetic oligonucleotide
cgaucgugaaacccugggc

SEQ ID NO: 2859190 - RNA, 19 nt, Artificial Sequence
  Description of Artificial Sequence: Synthetic oligonucleotide
agggagcuuucaaggccgg

SEQ ID NO: 2859191 - RNA, 19 nt, Artificial Sequence
  Description of Artificial Sequence: Synthetic oligonucleotide
ccgggccauacacucaagc

SEQ ID NO: 2859192 - RNA, 19 nt, Artificial Sequence
  Description of Artificial Sequence: Synthetic oligonucleotide
aggagagggcagccgccgu

SEQ ID NO: 2859193 - RNA, 19 nt, Artificial Sequence
  Description of Artificial Sequence: Synthetic oligonucleotide
gucuugcgaauaaauuugu

SEQ ID NO: 2859194 - RNA, 19 nt, Artificial Sequence
  Description of Artificial Sequence: Synthetic oligonucleotide
auccgggugcgcaucauua

SEQ ID NO: 2859195 - RNA, 19 nt, Artificial Sequence
  Description of Artificial Sequence: Synthetic oligonucleotide
cgcgguggaagcaguaaag

SEQ ID NO: 2859196 - RNA, 19 nt, Artificial Sequence
  Description of Artificial Sequence: Synthetic oligonucleotide
gggcugaagcccucgguga

SEQ ID NO: 2859197 - RNA, 19 nt, Artificial Sequence
  Description of Artificial Sequence: Synthetic oligonucleotide
cucggugacuggggucugg

SEQ ID NO: 2859198 - RNA, 19 nt, Artificial Sequence
  Description of Artificial Sequence: Synthetic oligonucleotide
cauugaccacaggguacug

SEQ ID NO: 2859199 - RNA, 19 nt, Artificial Sequence
  Description of Artificial Sequence: Synthetic oligonucleotide
ugcgauccgggugcgcauc

SEQ ID NO: 2859200 - RNA, 19 nt, Artificial Sequence
  Description of Artificial Sequence: Synthetic oligonucleotide
ccuauggggaccauugggu

SEQ ID NO: 2859201 - RNA, 19 nt, Artificial Sequence
  Description of Artificial Sequence: Synthetic oligonucleotide
cuauggggaccauuggguu

SEQ ID NO: 2859202 - RNA, 19 nt, Artificial Sequence
  Description of Artificial Sequence: Synthetic oligonucleotide
acagccuauggggaccauu

SEQ ID NO: 2859203 - RNA, 19 nt, Artificial Sequence
  Description of Artificial Sequence: Synthetic oligonucleotide
cacaggguacugucagaaa

SEQ ID NO: 2859204 - RNA, 19 nt, Artificial Sequence
  Description of Artificial Sequence: Synthetic oligonucleotide
ccauaggagagggcagccg

SEQ ID NO: 2859205 - RNA, 19 nt, Artificial Sequence
  Description of Artificial Sequence: Synthetic oligonucleotide
uggcucuggccgcggugga

SEQ ID NO: 2859206 - RNA, 19 nt, Artificial Sequence
  Description of Artificial Sequence: Synthetic oligonucleotide
gcucuggccgcgguggaag

SEQ ID NO: 2859207 - RNA, 19 nt, Artificial Sequence
  Description of Artificial Sequence: Synthetic oligonucleotide
gagccgccauucccgccgc

SEQ ID NO: 2859208 - RNA, 19 nt, Artificial Sequence
  Description of Artificial Sequence: Synthetic oligonucleotide
cccgccgcacagaaacagg

SEQ ID NO: 2859209 - RNA, 19 nt, Artificial Sequence
  Description of Artificial Sequence: Synthetic oligonucleotide
gguggcucuggccgcggug

SEQ ID NO: 2859210 - RNA, 19 nt, Artificial Sequence
  Description of Artificial Sequence: Synthetic oligonucleotide
uggccgcgguggaagcagu

SEQ ID NO: 2859211 - RNA, 19 nt, Artificial Sequence
  Description of Artificial Sequence: Synthetic oligonucleotide
cucacgggacugggagccg

SEQ ID NO: 2859212 - RNA, 19 nt, Artificial Sequence
  Description of Artificial Sequence: Synthetic oligonucleotide
uuggguucucacgggucuu

SEQ ID NO: 2859213 - RNA, 19 nt, Artificial Sequence
  Description of Artificial Sequence: Synthetic oligonucleotide
cgaauaaauuuguccuuga

SEQ ID NO: 2859214 - RNA, 19 nt, Artificial Sequence
  Description of Artificial Sequence: Synthetic oligonucleotide
gcagcgaucgugaaacccu

SEQ ID NO: 2859215 - RNA, 19 nt, Artificial Sequence
  Description of Artificial Sequence: Synthetic oligonucleotide
gccucugaacucacgggac

SEQ ID NO: 2859216 - RNA, 19 nt, Artificial Sequence
  Description of Artificial Sequence: Synthetic oligonucleotide
ggguacugucagaaaagaa

SEQ ID NO: 2859217 - RNA, 19 nt, Artificial Sequence
  Description of Artificial Sequence: Synthetic oligonucleotide
gcugcgauccgggugcgca

SEQ ID NO: 2859218 - RNA, 19 nt, Artificial Sequence
  Description of Artificial Sequence: Synthetic oligonucleotide
gggagcuuucaaggccggg

SEQ ID NO: 2859219 - RNA, 19 nt, Artificial Sequence
  Description of Artificial Sequence: Synthetic oligonucleotide
cccagacagccuaugggga

SEQ ID NO: 2859220 - RNA, 19 nt, Artificial Sequence
  Description of Artificial Sequence: Synthetic oligonucleotide
uuguuacuccuggguuuua

SEQ ID NO: 2859221 - RNA, 19 nt, Artificial Sequence
  Description of Artificial Sequence: Synthetic oligonucleotide
ccgggugcgcaucauuauc

SEQ ID NO: 2859222 - RNA, 19 nt, Artificial Sequence
  Description of Artificial Sequence: Synthetic oligonucleotide
ccauacacucaagcucgag

SEQ ID NO: 2859223 - RNA, 19 nt, Artificial Sequence
  Description of Artificial Sequence: Synthetic oligonucleotide
gucugacagggcucuuugu

SEQ ID NO: 2859224 - RNA, 19 nt, Artificial Sequence
  Description of Artificial Sequence: Synthetic oligonucleotide
ccgcuaaccccagcaagag

SEQ ID NO: 2859225 - RNA, 19 nt, Artificial Sequence
  Description of Artificial Sequence: Synthetic oligonucleotide
gauccgggugcgcaucauu

SEQ ID NO: 2859226 - RNA, 19 nt, Artificial Sequence
  Description of Artificial Sequence: Synthetic oligonucleotide
ggccgggccauacacucaa

SEQ ID NO: 2859227 - RNA, 19 nt, Artificial Sequence
  Description of Artificial Sequence: Synthetic oligonucleotide
cagaaacagguaggacaca

SEQ ID NO: 2859228 - RNA, 19 nt, Artificial Sequence
  Description of Artificial Sequence: Synthetic oligonucleotide
ggguucucacgggucuugc

SEQ ID NO: 2859229 - RNA, 19 nt, Artificial Sequence
  Description of Artificial Sequence: Synthetic oligonucleotide
gggucugggacggauugaa

SEQ ID NO: 2859230 - RNA, 19 nt, Artificial Sequence
  Description of Artificial Sequence: Synthetic oligonucleotide
ggacugggagccgccauuc

SEQ ID NO: 2859231 - RNA, 19 nt, Artificial Sequence
  Description of Artificial Sequence: Synthetic oligonucleotide
uaagucugacagggcucuu

SEQ ID NO: 2859232 - RNA, 19 nt, Artificial Sequence
  Description of Artificial Sequence: Synthetic oligonucleotide
ccucacccauugaccacag

SEQ ID NO: 2859233 - RNA, 19 nt, Artificial Sequence
  Description of Artificial Sequence: Synthetic oligonucleotide
caaggccgggccauacacu

SEQ ID NO: 2859234 - RNA, 19 nt, Artificial Sequence
  Description of Artificial Sequence: Synthetic oligonucleotide
cucacgggucuugcgaaua

SEQ ID NO: 2859235 - RNA, 19 nt, Artificial Sequence
  Description of Artificial Sequence: Synthetic oligonucleotide
aggcgccucugaacucacg

SEQ ID NO: 2859236 - RNA, 19 nt, Artificial Sequence
  Description of Artificial Sequence: Synthetic oligonucleotide
cauucccgccgcacagaaa

SEQ ID NO: 2859237 - RNA, 19 nt, Artificial Sequence
  Description of Artificial Sequence: Synthetic oligonucleotide
ggguugcuguggaccgugg

SEQ ID NO: 2859238 - RNA, 19 nt, Artificial Sequence
  Description of Artificial Sequence: Synthetic oligonucleotide
ggaagcaguaaaggccaua

SEQ ID NO: 2859239 - RNA, 19 nt, Artificial Sequence
  Description of Artificial Sequence: Synthetic oligonucleotide
ccacaggguacugucagaa

SEQ ID NO: 2859240 - RNA, 19 nt, Artificial Sequence
  Description of Artificial Sequence: Synthetic oligonucleotide
cgcacagaaacagguagga

SEQ ID NO: 2859241 - RNA, 19 nt, Artificial Sequence
  Description of Artificial Sequence: Synthetic oligonucleotide
cacgggucuugcgaauaaa

SEQ ID NO: 2859242 - RNA, 19 nt, Artificial Sequence
  Description of Artificial Sequence: Synthetic oligonucleotide
gggagccgccauucccgcc

SEQ ID NO: 2859243 - RNA, 19 nt, Artificial Sequence
  Description of Artificial Sequence: Synthetic oligonucleotide
cucaagcucgagacuucau

SEQ ID NO: 2859244 - RNA, 19 nt, Artificial Sequence
  Description of Artificial Sequence: Synthetic oligonucleotide
cuuucaaggccgggccaua

SEQ ID NO: 2859245 - RNA, 19 nt, Artificial Sequence
  Description of Artificial Sequence: Synthetic oligonucleotide
cgccauucccgccgcacag

SEQ ID NO: 2859246 - RNA, 19 nt, Artificial Sequence
  Description of Artificial Sequence: Synthetic oligonucleotide
gugaaacccugggcugcga

SEQ ID NO: 2859247 - RNA, 19 nt, Artificial Sequence
  Description of Artificial Sequence: Synthetic oligonucleotide
aggccgggccauacacuca

SEQ ID NO: 2859248 - RNA, 19 nt, Artificial Sequence
  Description of Artificial Sequence: Synthetic oligonucleotide
gggcagccgccguucccag

SEQ ID NO: 2859249 - RNA, 19 nt, Artificial Sequence
  Description of Artificial Sequence: Synthetic oligonucleotide
ggauguccagggagcuuuc

SEQ ID NO: 2859250 - RNA, 19 nt, Artificial Sequence
  Description of Artificial Sequence: Synthetic oligonucleotide
guggaccguggggcugaag

SEQ ID NO: 2859251 - RNA, 19 nt, Artificial Sequence
  Description of Artificial Sequence: Synthetic oligonucleotide
ccauucccgccgcacagaa

SEQ ID NO: 2859252 - RNA, 19 nt, Artificial Sequence
  Description of Artificial Sequence: Synthetic oligonucleotide
agccgccauucccgccgca

SEQ ID NO: 2859253 - RNA, 19 nt, Artificial Sequence
  Description of Artificial Sequence: Synthetic oligonucleotide
gcccucggugacugggguc

SEQ ID NO: 2859254 - RNA, 19 nt, Artificial Sequence
  Description of Artificial Sequence: Synthetic oligonucleotide
ccauuggguucucacgggu

SEQ ID NO: 2859255 - RNA, 19 nt, Artificial Sequence
  Description of Artificial Sequence: Synthetic oligonucleotide
gccgccauucccgccgcac

SEQ ID NO: 2859256 - RNA, 19 nt, Artificial Sequence
  Description of Artificial Sequence: Synthetic oligonucleotide
cgagacuucauagcagaua

SEQ ID NO: 2859257 - RNA, 19 nt, Artificial Sequence
  Description of Artificial Sequence: Synthetic oligonucleotide
cgggccauacacucaagcu

SEQ ID NO: 2859258 - RNA, 19 nt, Artificial Sequence
  Description of Artificial Sequence: Synthetic oligonucleotide
gcuuucaaggccgggccau

SEQ ID NO: 2859259 - RNA, 19 nt, Artificial Sequence
  Description of Artificial Sequence: Synthetic oligonucleotide
ggucugggacggauugaaa

SEQ ID NO: 2859260 - RNA, 19 nt, Artificial Sequence
  Description of Artificial Sequence: Synthetic oligonucleotide
cgggugcgcaucauuaucu

SEQ ID NO: 2859261 - RNA, 19 nt, Artificial Sequence
  Description of Artificial Sequence: Synthetic oligonucleotide
gccgccguucccagacagc

SEQ ID NO: 2859262 - RNA, 19 nt, Artificial Sequence
  Description of Artificial Sequence: Synthetic oligonucleotide
ccgccgcacagaaacaggu

SEQ ID NO: 2859263 - RNA, 19 nt, Artificial Sequence
  Description of Artificial Sequence: Synthetic oligonucleotide
ggggucugggacggauuga

SEQ ID NO: 2859264 - RNA, 19 nt, Artificial Sequence
  Description of Artificial Sequence: Synthetic oligonucleotide
ccgcgguggaagcaguaaa

SEQ ID NO: 2859265 - RNA, 19 nt, Artificial Sequence
  Description of Artificial Sequence: Synthetic oligonucleotide
uggggaccauuggguucuc

SEQ ID NO: 2859266 - RNA, 19 nt, Artificial Sequence
  Description of Artificial Sequence: Synthetic oligonucleotide
gcgcaucauuaucugggau

SEQ ID NO: 2859267 - RNA, 19 nt, Artificial Sequence
  Description of Artificial Sequence: Synthetic oligonucleotide
gccauacacucaagcucga

SEQ ID NO: 2859268 - RNA, 19 nt, Artificial Sequence
  Description of Artificial Sequence: Synthetic oligonucleotide
gccauucccgccgcacaga

SEQ ID NO: 2859269 - RNA, 19 nt, Artificial Sequence
  Description of Artificial Sequence: Synthetic oligonucleotide
cccagcaagagggcagcga

SEQ ID NO: 2859270 - RNA, 19 nt, Artificial Sequence
  Description of Artificial Sequence: Synthetic oligonucleotide
cguucccagacagccuaug

SEQ ID NO: 2859271 - RNA, 19 nt, Artificial Sequence
  Description of Artificial Sequence: Synthetic oligonucleotide
cuggggucugggacggauu

SEQ ID NO: 2859272 - RNA, 19 nt, Artificial Sequence
  Description of Artificial Sequence: Synthetic oligonucleotide
gccgcgguggaagcaguaa

SEQ ID NO: 2859273 - RNA, 19 nt, Artificial Sequence
  Description of Artificial Sequence: Synthetic oligonucleotide
gggacugggagccgccauu

SEQ ID NO: 2859274 - RNA, 19 nt, Artificial Sequence
  Description of Artificial Sequence: Synthetic oligonucleotide
gcugaagcccucggugacu

SEQ ID NO: 2859275 - RNA, 19 nt, Artificial Sequence
  Description of Artificial Sequence: Synthetic oligonucleotide
ggagagggcagccgccguu

SEQ ID NO: 2859276 - RNA, 19 nt, Artificial Sequence
  Description of Artificial Sequence: Synthetic oligonucleotide
gggcugcgauccgggugcg

SEQ ID NO: 2859277 - RNA, 19 nt, Artificial Sequence
  Description of Artificial Sequence: Synthetic oligonucleotide
ggcagccgccguucccaga

SEQ ID NO: 2859278 - RNA, 19 nt, Artificial Sequence
  Description of Artificial Sequence: Synthetic oligonucleotide
cugcgauccgggugcgcau

SEQ ID NO: 2859279 - RNA, 19 nt, Artificial Sequence
  Description of Artificial Sequence: Synthetic oligonucleotide
cccucggugacuggggucu

SEQ ID NO: 2859280 - RNA, 19 nt, Artificial Sequence
  Description of Artificial Sequence: Synthetic oligonucleotide
gccgggccauacacucaag

SEQ ID NO: 2859281 - RNA, 19 nt, Artificial Sequence
  Description of Artificial Sequence: Synthetic oligonucleotide
ccgccauucccgccgcaca

SEQ ID NO: 2859282 - RNA, 19 nt, Artificial Sequence
  Description of Artificial Sequence: Synthetic oligonucleotide
cgggucuugcgaauaaauu

SEQ ID NO: 2859283 - RNA, 19 nt, Artificial Sequence
  Description of Artificial Sequence: Synthetic oligonucleotide
ccacuuccucacccauuga

SEQ ID NO: 2859284 - RNA, 19 nt, Artificial Sequence
  Description of Artificial Sequence: Synthetic oligonucleotide
cuggguugcuguggaccgu

SEQ ID NO: 2859285 - RNA, 19 nt, Artificial Sequence
  Description of Artificial Sequence: Synthetic oligonucleotide
gcaagagggcagcgaucgu

SEQ ID NO: 2859286 - RNA, 19 nt, Artificial Sequence
  Description of Artificial Sequence: Synthetic oligonucleotide
ggggaccauuggguucuca

SEQ ID NO: 2859287 - RNA, 19 nt, Artificial Sequence
  Description of Artificial Sequence: Synthetic oligonucleotide
ggcugcgauccgggugcgc

SEQ ID NO: 2859288 - RNA, 19 nt, Artificial Sequence
  Description of Artificial Sequence: Synthetic oligonucleotide
cggauugaaaggcgccucu

SEQ ID NO: 2859289 - RNA, 19 nt, Artificial Sequence
  Description of Artificial Sequence: Synthetic oligonucleotide
ggcucuggccgcgguggaa

SEQ ID NO: 2859290 - RNA, 19 nt, Artificial Sequence
  Description of Artificial Sequence: Synthetic oligonucleotide
gacagccuauggggaccau

SEQ ID NO: 2859291 - RNA, 19 nt, Artificial Sequence
  Description of Artificial Sequence: Synthetic oligonucleotide
cgccgcacagaaacaggua

SEQ ID NO: 2859292 - RNA, 19 nt, Artificial Sequence
  Description of Artificial Sequence: Synthetic oligonucleotide
cggugacuggggucuggga

SEQ ID NO: 2859293 - RNA, 19 nt, Artificial Sequence
  Description of Artificial Sequence: Synthetic oligonucleotide
ggccacuuccucacccauu

SEQ ID NO: 2859294 - RNA, 19 nt, Artificial Sequence
  Description of Artificial Sequence: Synthetic oligonucleotide
ggccgcgguggaagcagua

SEQ ID NO: 2859295 - RNA, 19 nt, Artificial Sequence
  Description of Artificial Sequence: Synthetic oligonucleotide
ccugggcugcgauccgggu

SEQ ID NO: 2859296 - RNA, 19 nt, Artificial Sequence
  Description of Artificial Sequence: Synthetic oligonucleotide
ccguucccagacagccuau

SEQ ID NO: 2859297 - RNA, 19 nt, Artificial Sequence
  Description of Artificial Sequence: Synthetic oligonucleotide
cgggacugggagccgccau

SEQ ID NO: 2859298 - RNA, 19 nt, Artificial Sequence
  Description of Artificial Sequence: Synthetic oligonucleotide
cgauccgggugcgcaucau

SEQ ID NO: 2859299 - RNA, 19 nt, Artificial Sequence
  Description of Artificial Sequence: Synthetic oligonucleotide
aaguacuucaugucuaugc

SEQ ID NO: 2859300 - RNA, 19 nt, Artificial Sequence
  Description of Artificial Sequence: Synthetic oligonucleotide
aauuguaaggcucaucauc

SEQ ID NO: 2859301 - RNA, 19 nt, Artificial Sequence
  Description of Artificial Sequence: Synthetic oligonucleotide
aguacuuacaauuguaagg

SEQ ID NO: 2859302 - RNA, 19 nt, Artificial Sequence
  Description of Artificial Sequence: Synthetic oligonucleotide
aagaagugaagcuuuuccc

SEQ ID NO: 2859303 - RNA, 19 nt, Artificial Sequence
  Description of Artificial Sequence: Synthetic oligonucleotide
uguaauaagggaaagccug

SEQ ID NO: 2859304 - RNA, 19 nt, Artificial Sequence
  Description of Artificial Sequence: Synthetic oligonucleotide
acuguaauaagggaaagcc

SEQ ID NO: 2859305 - RNA, 19 nt, Artificial Sequence
  Description of Artificial Sequence: Synthetic oligonucleotide
uucaugucuaugcaaaugg

SEQ ID NO: 2859306 - RNA, 19 nt, Artificial Sequence
  Description of Artificial Sequence: Synthetic oligonucleotide
ucuucaaugaccuggaaga

SEQ ID NO: 2859307 - RNA, 19 nt, Artificial Sequence
  Description of Artificial Sequence: Synthetic oligonucleotide
aauaagggaaagccugccc

SEQ ID NO: 2859308 - RNA, 19 nt, Artificial Sequence
  Description of Artificial Sequence: Synthetic oligonucleotide
acuguuugcacacaugggg

SEQ ID NO: 2859309 - RNA, 19 nt, Artificial Sequence
  Description of Artificial Sequence: Synthetic oligonucleotide
acacacaucguauacguac

SEQ ID NO: 2859310 - RNA, 19 nt, Artificial Sequence
  Description of Artificial Sequence: Synthetic oligonucleotide
gaagaugacuguaauaagg

SEQ ID NO: 2859311 - RNA, 19 nt, Artificial Sequence
  Description of Artificial Sequence: Synthetic oligonucleotide
aagggaguaagaccaaagg

SEQ ID NO: 2859312 - RNA, 19 nt, Artificial Sequence
  Description of Artificial Sequence: Synthetic oligonucleotide
acaauuguaaggcucauca

SEQ ID NO: 2859313 - RNA, 19 nt, Artificial Sequence
  Description of Artificial Sequence: Synthetic oligonucleotide
uaugcaaauggucaaggug

SEQ ID NO: 2859314 - RNA, 19 nt, Artificial Sequence
  Description of Artificial Sequence: Synthetic oligonucleotide
gaagaagugaagcuuuucc

SEQ ID NO: 2859315 - RNA, 19 nt, Artificial Sequence
  Description of Artificial Sequence: Synthetic oligonucleotide
uugaagaugacuguaauaa

SEQ ID NO: 2859316 - RNA, 19 nt, Artificial Sequence
  Description of Artificial Sequence: Synthetic oligonucleotide
auaagggaaagccugcccg

SEQ ID NO: 2859317 - RNA, 19 nt, Artificial Sequence
  Description of Artificial Sequence: Synthetic oligonucleotide
acaucguauacguacguac

SEQ ID NO: 2859318 - RNA, 19 nt, Artificial Sequence
  Description of Artificial Sequence: Synthetic oligonucleotide
ucaaugaccuggaagaagu

SEQ ID NO: 2859319 - RNA, 19 nt, Artificial Sequence
  Description of Artificial Sequence: Synthetic oligonucleotide
aauccuuucaugcgucuuc

SEQ ID NO: 2859320 - RNA, 19 nt, Artificial Sequence
  Description of Artificial Sequence: Synthetic oligonucleotide
ugugaaguacuucaugucu

SEQ ID NO: 2859321 - RNA, 19 nt, Artificial Sequence
  Description of Artificial Sequence: Synthetic oligonucleotide
gagagagagagagagagag

SEQ ID NO: 2859322 - RNA, 19 nt, Artificial Sequence
  Description of Artificial Sequence: Synthetic oligonucleotide
accaaaggaagguuuugcc

SEQ ID NO: 2859323 - RNA, 19 nt, Artificial Sequence
  Description of Artificial Sequence: Synthetic oligonucleotide
agaggugggguacacacac

SEQ ID NO: 2859324 - RNA, 19 nt, Artificial Sequence
  Description of Artificial Sequence: Synthetic oligonucleotide
uacacacacacacacacac

SEQ ID NO: 2859325 - RNA, 19 nt, Artificial Sequence
  Description of Artificial Sequence: Synthetic oligonucleotide
guacuuacaauuguaaggc

SEQ ID NO: 2859326 - RNA, 19 nt, Artificial Sequence
  Description of Artificial Sequence: Synthetic oligonucleotide
agugugaaguacuucaugu

SEQ ID NO: 2859327 - RNA, 19 nt, Artificial Sequence
  Description of Artificial Sequence: Synthetic oligonucleotide
aaggguuucccacaguacu

SEQ ID NO: 2859328 - RNA, 19 nt, Artificial Sequence
  Description of Artificial Sequence: Synthetic oligonucleotide
cuuucaugcgucuucaaug

SEQ ID NO: 2859329 - RNA, 19 nt, Artificial Sequence
  Description of Artificial Sequence: Synthetic oligonucleotide
cuuugaagggaguaagacc

SEQ ID NO: 2859330 - RNA, 19 nt, Artificial Sequence
  Description of Artificial Sequence: Synthetic oligonucleotide
ugugaauccuuucaugcgu

SEQ ID NO: 2859331 - RNA, 19 nt, Artificial Sequence
  Description of Artificial Sequence: Synthetic oligonucleotide
cacacacacacacacauag

SEQ ID NO: 2859332 - RNA, 19 nt, Artificial Sequence
  Description of Artificial Sequence: Synthetic oligonucleotide
caaaggaagguuuugccac

SEQ ID NO: 2859333 - RNA, 19 nt, Artificial Sequence
  Description of Artificial Sequence: Synthetic oligonucleotide
uacguacacacacacacac

SEQ ID NO: 2859334 - RNA, 19 nt, Artificial Sequence
  Description of Artificial Sequence: Synthetic oligonucleotide
cacgcacacacacacaucg

SEQ ID NO: 2859335 - RNA, 19 nt, Artificial Sequence
  Description of Artificial Sequence: Synthetic oligonucleotide
ucaugcgucuucaaugacc

SEQ ID NO: 2859336 - RNA, 19 nt, Artificial Sequence
  Description of Artificial Sequence: Synthetic oligonucleotide
uuucaugcgucuucaauga

SEQ ID NO: 2859337 - RNA, 19 nt, Artificial Sequence
  Description of Artificial Sequence: Synthetic oligonucleotide
gagagagagagagagcacg

SEQ ID NO: 2859338 - RNA, 19 nt, Artificial Sequence
  Description of Artificial Sequence: Synthetic oligonucleotide
aucguauacguacguacac

SEQ ID NO: 2859339 - RNA, 19 nt, Artificial Sequence
  Description of Artificial Sequence: Synthetic oligonucleotide
ucuaugcaaauggucaagg

SEQ ID NO: 2859340 - RNA, 19 nt, Artificial Sequence
  Description of Artificial Sequence: Synthetic oligonucleotide
uucaugcacuugaagauga

SEQ ID NO: 2859341 - RNA, 19 nt, Artificial Sequence
  Description of Artificial Sequence: Synthetic oligonucleotide
cacacacacacacacacgc

SEQ ID NO: 2859342 - RNA, 19 nt, Artificial Sequence
  Description of Artificial Sequence: Synthetic oligonucleotide
agagagagcacgcuagcag

SEQ ID NO: 2859343 - RNA, 19 nt, Artificial Sequence
  Description of Artificial Sequence: Synthetic oligonucleotide
uacuucaugucuaugcaaa

SEQ ID NO: 2859344 - RNA, 19 nt, Artificial Sequence
  Description of Artificial Sequence: Synthetic oligonucleotide
aagcuuuucccacacugcu

SEQ ID NO: 2859345 - RNA, 19 nt, Artificial Sequence
  Description of Artificial Sequence: Synthetic oligonucleotide
acuuacaauuguaaggcuc

SEQ ID NO: 2859346 - RNA, 19 nt, Artificial Sequence
  Description of Artificial Sequence: Synthetic oligonucleotide
acacacacacaucguauac

SEQ ID NO: 2859347 - RNA, 19 nt, Artificial Sequence
  Description of Artificial Sequence: Synthetic oligonucleotide
aguacuucaugucuaugca

SEQ ID NO: 2859348 - RNA, 19 nt, Artificial Sequence
  Description of Artificial Sequence: Synthetic oligonucleotide
aauggucaaggugaagaag

SEQ ID NO: 2859349 - RNA, 19 nt, Artificial Sequence
  Description of Artificial Sequence: Synthetic oligonucleotide
cacacacacacauagugug

SEQ ID NO: 2859350 - RNA, 19 nt, Artificial Sequence
  Description of Artificial Sequence: Synthetic oligonucleotide
cacacacacacacauagug

SEQ ID NO: 2859351 - RNA, 19 nt, Artificial Sequence
  Description of Artificial Sequence: Synthetic oligonucleotide
aaauggucaaggugaagaa

SEQ ID NO: 2859352 - RNA, 19 nt, Artificial Sequence
  Description of Artificial Sequence: Synthetic oligonucleotide
gagagagagagagagagca

SEQ ID NO: 2859353 - RNA, 19 nt, Artificial Sequence
  Description of Artificial Sequence: Synthetic oligonucleotide
aggugggguacacacacac

SEQ ID NO: 2859354 - RNA, 19 nt, Artificial Sequence
  Description of Artificial Sequence: Synthetic oligonucleotide
cuuacaauuguaaggcuca

SEQ ID NO: 2859355 - RNA, 19 nt, Artificial Sequence
  Description of Artificial Sequence: Synthetic oligonucleotide
ugucuuugaagggaguaag

SEQ ID NO: 2859356 - RNA, 19 nt, Artificial Sequence
  Description of Artificial Sequence: Synthetic oligonucleotide
ucuuugaagggaguaagac

SEQ ID NO: 2859357 - RNA, 19 nt, Artificial Sequence
  Description of Artificial Sequence: Synthetic oligonucleotide
agggaguaagaccaaagga

SEQ ID NO: 2859358 - RNA, 19 nt, Artificial Sequence
  Description of Artificial Sequence: Synthetic oligonucleotide
agagagagagcacgcuagc

SEQ ID NO: 2859359 - RNA, 19 nt, Artificial Sequence
  Description of Artificial Sequence: Synthetic oligonucleotide
gucuucaaugaccuggaag

SEQ ID NO: 2859360 - RNA, 19 nt, Artificial Sequence
  Description of Artificial Sequence: Synthetic oligonucleotide
uggucaaggugaagaaggg

SEQ ID NO: 2859361 - RNA, 19 nt, Artificial Sequence
  Description of Artificial Sequence: Synthetic oligonucleotide
gaagaaggguuucccacag

SEQ ID NO: 2859362 - RNA, 19 nt, Artificial Sequence
  Description of Artificial Sequence: Synthetic oligonucleotide
auuguaaggcucaucauca

SEQ ID NO: 2859363 - RNA, 19 nt, Artificial Sequence
  Description of Artificial Sequence: Synthetic oligonucleotide
caguacuuacaauuguaag

SEQ ID NO: 2859364 - RNA, 19 nt, Artificial Sequence
  Description of Artificial Sequence: Synthetic oligonucleotide
cacacacacacacacacac

SEQ ID NO: 2859365 - RNA, 19 nt, Artificial Sequence
  Description of Artificial Sequence: Synthetic oligonucleotide
gaugacuguaauaagggaa

SEQ ID NO: 2859366 - RNA, 19 nt, Artificial Sequence
  Description of Artificial Sequence: Synthetic oligonucleotide
cacacaucguauacguacg

SEQ ID NO: 2859367 - RNA, 19 nt, Artificial Sequence
  Description of Artificial Sequence: Synthetic oligonucleotide
gaguaagaccaaaggaagg

SEQ ID NO: 2859368 - RNA, 19 nt, Artificial Sequence
  Description of Artificial Sequence: Synthetic oligonucleotide
uacguacguacacacacac

SEQ ID NO: 2859369 - RNA, 19 nt, Artificial Sequence
  Description of Artificial Sequence: Synthetic oligonucleotide
augcaaauggucaagguga

SEQ ID NO: 2859370 - RNA, 19 nt, Artificial Sequence
  Description of Artificial Sequence: Synthetic oligonucleotide
acacacacaucguauacgu

SEQ ID NO: 2859371 - RNA, 19 nt, Artificial Sequence
  Description of Artificial Sequence: Synthetic oligonucleotide
cuguuugcacacauggggc

SEQ ID NO: 2859372 - RNA, 19 nt, Artificial Sequence
  Description of Artificial Sequence: Synthetic oligonucleotide
aguaagaccaaaggaaggu

SEQ ID NO: 2859373 - RNA, 19 nt, Artificial Sequence
  Description of Artificial Sequence: Synthetic oligonucleotide
aaaggaagguuuugccaca

SEQ ID NO: 2859374 - RNA, 19 nt, Artificial Sequence
  Description of Artificial Sequence: Synthetic oligonucleotide
guaaggcucaucaucaaug

SEQ ID NO: 2859375 - RNA, 19 nt, Artificial Sequence
  Description of Artificial Sequence: Synthetic oligonucleotide
acacauggggcuuuccauc

SEQ ID NO: 2859376 - RNA, 19 nt, Artificial Sequence
  Description of Artificial Sequence: Synthetic oligonucleotide
aaugaccuggaagaaguga

SEQ ID NO: 2859377 - RNA, 19 nt, Artificial Sequence
  Description of Artificial Sequence: Synthetic oligonucleotide
uaaggcucaucaucaaugu

SEQ ID NO: 2859378 - RNA, 19 nt, Artificial Sequence
  Description of Artificial Sequence: Synthetic oligonucleotide
caugucuaugcaaaugguc

SEQ ID NO: 2859379 - RNA, 19 nt, Artificial Sequence
  Description of Artificial Sequence: Synthetic oligonucleotide
cacacacacacgcacacgc

SEQ ID NO: 2859380 - RNA, 19 nt, Artificial Sequence
  Description of Artificial Sequence: Synthetic oligonucleotide
uagugugaaguacuucaug

SEQ ID NO: 2859381 - RNA, 19 nt, Artificial Sequence
  Description of Artificial Sequence: Synthetic oligonucleotide
uaagaccaaaggaagguuu

SEQ ID NO: 2859382 - RNA, 19 nt, Artificial Sequence
  Description of Artificial Sequence: Synthetic oligonucleotide
gguacacacacacacacac

SEQ ID NO: 2859383 - RNA, 19 nt, Artificial Sequence
  Description of Artificial Sequence: Synthetic oligonucleotide
augucuaugcaaaugguca

SEQ ID NO: 2859384 - RNA, 19 nt, Artificial Sequence
  Description of Artificial Sequence: Synthetic oligonucleotide
uucaaugaccuggaagaag

SEQ ID NO: 2859385 - RNA, 19 nt, Artificial Sequence
  Description of Artificial Sequence: Synthetic oligonucleotide
cacgcacacacacacacgc

SEQ ID NO: 2859386 - RNA, 19 nt, Artificial Sequence
  Description of Artificial Sequence: Synthetic oligonucleotide
uuucaugcacuugaagaug

SEQ ID NO: 2859387 - RNA, 19 nt, Artificial Sequence
  Description of Artificial Sequence: Synthetic oligonucleotide
gcacuguuugcacacaugg

SEQ ID NO: 2859388 - RNA, 19 nt, Artificial Sequence
  Description of Artificial Sequence: Synthetic oligonucleotide
gugggguacacacacacac

SEQ ID NO: 2859389 - RNA, 19 nt, Artificial Sequence
  Description of Artificial Sequence: Synthetic oligonucleotide
ucaugucuaugcaaauggu

SEQ ID NO: 2859390 - RNA, 19 nt, Artificial Sequence
  Description of Artificial Sequence: Synthetic oligonucleotide
ugaccuggaagaagugaag

SEQ ID NO: 2859391 - RNA, 19 nt, Artificial Sequence
  Description of Artificial Sequence: Synthetic oligonucleotide
augcacuugaagaugacug

SEQ ID NO: 2859392 - RNA, 19 nt, Artificial Sequence
  Description of Artificial Sequence: Synthetic oligonucleotide
gagagagagagcacgcuag

SEQ ID NO: 2859393 - RNA, 19 nt, Artificial Sequence
  Description of Artificial Sequence: Synthetic oligonucleotide
caaauggucaaggugaaga

SEQ ID NO: 2859394 - RNA, 19 nt, Artificial Sequence
  Description of Artificial Sequence: Synthetic oligonucleotide
gaagggaguaagaccaaag

SEQ ID NO: 2859395 - RNA, 19 nt, Artificial Sequence
  Description of Artificial Sequence: Synthetic oligonucleotide
aagugaagcuuuucccaca

SEQ ID NO: 2859396 - RNA, 19 nt, Artificial Sequence
  Description of Artificial Sequence: Synthetic oligonucleotide
cacacacgcacacacacac

SEQ ID NO: 2859397 - RNA, 19 nt, Artificial Sequence
  Description of Artificial Sequence: Synthetic oligonucleotide
ugcuuacacucauagggcu

SEQ ID NO: 2859398 - RNA, 19 nt, Artificial Sequence
  Description of Artificial Sequence: Synthetic oligonucleotide
gugaagaaggguuucccac

SEQ ID NO: 2859399 - RNA, 19 nt, Artificial Sequence
  Description of Artificial Sequence: Synthetic oligonucleotide
uguaaggcucaucaucaau

SEQ ID NO: 2859400 - RNA, 19 nt, Artificial Sequence
  Description of Artificial Sequence: Synthetic oligonucleotide
agaugacuguaauaaggga

SEQ ID NO: 2859401 - RNA, 19 nt, Artificial Sequence
  Description of Artificial Sequence: Synthetic oligonucleotide
cacacacacacgcacacac

SEQ ID NO: 2859402 - RNA, 19 nt, Artificial Sequence
  Description of Artificial Sequence: Synthetic oligonucleotide
agagagagagagagcacgc

SEQ ID NO: 2859403 - RNA, 19 nt, Artificial Sequence
  Description of Artificial Sequence: Synthetic oligonucleotide
uaagggaaagccugcccgc

SEQ ID NO: 2859404 - RNA, 19 nt, Artificial Sequence
  Description of Artificial Sequence: Synthetic oligonucleotide
aaggaagguuuugccacac

SEQ ID NO: 2859405 - RNA, 19 nt, Artificial Sequence
  Description of Artificial Sequence: Synthetic oligonucleotide
cacacgcacacacacacac

SEQ ID NO: 2859406 - RNA, 19 nt, Artificial Sequence
  Description of Artificial Sequence: Synthetic oligonucleotide
uaauaagggaaagccugcc

SEQ ID NO: 2859407 - RNA, 19 nt, Artificial Sequence
  Description of Artificial Sequence: Synthetic oligonucleotide
gacuguaauaagggaaagc

SEQ ID NO: 2859408 - RNA, 19 nt, Artificial Sequence
  Description of Artificial Sequence: Synthetic oligonucleotide
agaaggguuucccacagua

SEQ ID NO: 2859409 - RNA, 19 nt, Artificial Sequence
  Description of Artificial Sequence: Synthetic oligonucleotide
agcacgcuagcagaggugg

SEQ ID NO: 2859410 - RNA, 19 nt, Artificial Sequence
  Description of Artificial Sequence: Synthetic oligonucleotide
uguuugcacacauggggcu

SEQ ID NO: 2859411 - RNA, 19 nt, Artificial Sequence
  Description of Artificial Sequence: Synthetic oligonucleotide
cuuuccaucacuauggguu

SEQ ID NO: 2859412 - RNA, 19 nt, Artificial Sequence
  Description of Artificial Sequence: Synthetic oligonucleotide
aggugaagaaggguuuccc

SEQ ID NO: 2859413 - RNA, 19 nt, Artificial Sequence
  Description of Artificial Sequence: Synthetic oligonucleotide
ggaguaagaccaaaggaag

SEQ ID NO: 2859414 - RNA, 19 nt, Artificial Sequence
  Description of Artificial Sequence: Synthetic oligonucleotide
ugucuaugcaaauggucaa

SEQ ID NO: 2859415 - RNA, 19 nt, Artificial Sequence
  Description of Artificial Sequence: Synthetic oligonucleotide
cacacacacgcacacacac

SEQ ID NO: 2859416 - RNA, 19 nt, Artificial Sequence
  Description of Artificial Sequence: Synthetic oligonucleotide
ugaaguacuucaugucuau

SEQ ID NO: 2859417 - RNA, 19 nt, Artificial Sequence
  Description of Artificial Sequence: Synthetic oligonucleotide
aggcucaucaucaaugugu

SEQ ID NO: 2859418 - RNA, 19 nt, Artificial Sequence
  Description of Artificial Sequence: Synthetic oligonucleotide
guaauaagggaaagccugc

SEQ ID NO: 2859419 - RNA, 19 nt, Artificial Sequence
  Description of Artificial Sequence: Synthetic oligonucleotide
cacacacacacacacgcac

SEQ ID NO: 2859420 - RNA, 19 nt, Artificial Sequence
  Description of Artificial Sequence: Synthetic oligonucleotide
acuugaagaugacuguaau

SEQ ID NO: 2859421 - RNA, 19 nt, Artificial Sequence
  Description of Artificial Sequence: Synthetic oligonucleotide
cacuguuugcacacauggg

SEQ ID NO: 2859422 - RNA, 19 nt, Artificial Sequence
  Description of Artificial Sequence: Synthetic oligonucleotide
gaccuggaagaagugaagc

SEQ ID NO: 2859423 - RNA, 19 nt, Artificial Sequence
  Description of Artificial Sequence: Synthetic oligonucleotide
gagagagcacgcuagcaga

SEQ ID NO: 2859424 - RNA, 19 nt, Artificial Sequence
  Description of Artificial Sequence: Synthetic oligonucleotide
gaccaaaggaagguuuugc

SEQ ID NO: 2859425 - RNA, 19 nt, Artificial Sequence
  Description of Artificial Sequence: Synthetic oligonucleotide
accuggaagaagugaagcu

SEQ ID NO: 2859426 - RNA, 19 nt, Artificial Sequence
  Description of Artificial Sequence: Synthetic oligonucleotide
ugacuguaauaagggaaag

SEQ ID NO: 2859427 - RNA, 19 nt, Artificial Sequence
  Description of Artificial Sequence: Synthetic oligonucleotide
cuucaugucuaugcaaaug

SEQ ID NO: 2859428 - RNA, 19 nt, Artificial Sequence
  Description of Artificial Sequence: Synthetic oligonucleotide
cacacacacaucguauacg

SEQ ID NO: 2859429 - RNA, 19 nt, Artificial Sequence
  Description of Artificial Sequence: Synthetic oligonucleotide
cacacauagugugaaguac

SEQ ID NO: 2859430 - RNA, 19 nt, Artificial Sequence
  Description of Artificial Sequence: Synthetic oligonucleotide
uacuuacaauuguaaggcu

SEQ ID NO: 2859431 - RNA, 19 nt, Artificial Sequence
  Description of Artificial Sequence: Synthetic oligonucleotide
agagagagagagagagagc

SEQ ID NO: 2859432 - RNA, 19 nt, Artificial Sequence
  Description of Artificial Sequence: Synthetic oligonucleotide
ucguauacguacguacaca

SEQ ID NO: 2859433 - RNA, 19 nt, Artificial Sequence
  Description of Artificial Sequence: Synthetic oligonucleotide
agagcacgcuagcagaggu

SEQ ID NO: 2859434 - RNA, 19 nt, Artificial Sequence
  Description of Artificial Sequence: Synthetic oligonucleotide
ugcaaauggucaaggugaa

SEQ ID NO: 2859435 - RNA, 19 nt, Artificial Sequence
  Description of Artificial Sequence: Synthetic oligonucleotide
cguacguacacacacacac

SEQ ID NO: 2859436 - RNA, 19 nt, Artificial Sequence
  Description of Artificial Sequence: Synthetic oligonucleotide
acauagugugaaguacuuc

SEQ ID NO: 2859437 - RNA, 19 nt, Artificial Sequence
  Description of Artificial Sequence: Synthetic oligonucleotide
augacuguaauaagggaaa

SEQ ID NO: 2859438 - RNA, 19 nt, Artificial Sequence
  Description of Artificial Sequence: Synthetic oligonucleotide
acacauagugugaaguacu

SEQ ID NO: 2859439 - RNA, 19 nt, Artificial Sequence
  Description of Artificial Sequence: Synthetic oligonucleotide
caucguauacguacguaca

SEQ ID NO: 2859440 - RNA, 19 nt, Artificial Sequence
  Description of Artificial Sequence: Synthetic oligonucleotide
ugggguacacacacacaca

SEQ ID NO: 2859441 - RNA, 19 nt, Artificial Sequence
  Description of Artificial Sequence: Synthetic oligonucleotide
uuuccaucacuauggguuu

SEQ ID NO: 2859442 - RNA, 19 nt, Artificial Sequence
  Description of Artificial Sequence: Synthetic oligonucleotide
acacacauagugugaagua

SEQ ID NO: 2859443 - RNA, 19 nt, Artificial Sequence
  Description of Artificial Sequence: Synthetic oligonucleotide
agagagagagagcacgcua

SEQ ID NO: 2859444 - RNA, 19 nt, Artificial Sequence
  Description of Artificial Sequence: Synthetic oligonucleotide
ugaauccuuucaugcgucu

SEQ ID NO: 2859445 - RNA, 19 nt, Artificial Sequence
  Description of Artificial Sequence: Synthetic oligonucleotide
acacacacauagugugaag

SEQ ID NO: 2859446 - RNA, 19 nt, Artificial Sequence
  Description of Artificial Sequence: Synthetic oligonucleotide
cacacacacacacgcacac

SEQ ID NO: 2859447 - RNA, 19 nt, Artificial Sequence
  Description of Artificial Sequence: Synthetic oligonucleotide
aaagccugcccgcacuguu

SEQ ID NO: 2859448 - RNA, 19 nt, Artificial Sequence
  Description of Artificial Sequence: Synthetic oligonucleotide
acaguacuuacaauuguaa

SEQ ID NO: 2859449 - RNA, 19 nt, Artificial Sequence
  Description of Artificial Sequence: Synthetic oligonucleotide
gugugaaguacuucauguc

SEQ ID NO: 2859450 - RNA, 19 nt, Artificial Sequence
  Description of Artificial Sequence: Synthetic oligonucleotide
ucaugucuuugaagggagu

SEQ ID NO: 2859451 - RNA, 19 nt, Artificial Sequence
  Description of Artificial Sequence: Synthetic oligonucleotide
gucuaugcaaauggucaag

SEQ ID NO: 2859452 - RNA, 19 nt, Artificial Sequence
  Description of Artificial Sequence: Synthetic oligonucleotide
aagaccaaaggaagguuuu

SEQ ID NO: 2859453 - RNA, 19 nt, Artificial Sequence
  Description of Artificial Sequence: Synthetic oligonucleotide
acuucaugucuaugcaaau

SEQ ID NO: 2859454 - RNA, 19 nt, Artificial Sequence
  Description of Artificial Sequence: Synthetic oligonucleotide
agggaaagccugcccgcac

SEQ ID NO: 2859455 - RNA, 19 nt, Artificial Sequence
  Description of Artificial Sequence: Synthetic oligonucleotide
agagagagagagagagcac

SEQ ID NO: 2859456 - RNA, 19 nt, Artificial Sequence
  Description of Artificial Sequence: Synthetic oligonucleotide
gggaguaagaccaaaggaa

SEQ ID NO: 2859457 - RNA, 19 nt, Artificial Sequence
  Description of Artificial Sequence: Synthetic oligonucleotide
cuugaagaugacuguaaua

SEQ ID NO: 2859458 - RNA, 19 nt, Artificial Sequence
  Description of Artificial Sequence: Synthetic oligonucleotide
gggguacacacacacacac

SEQ ID NO: 2859459 - RNA, 19 nt, Artificial Sequence
  Description of Artificial Sequence: Synthetic oligonucleotide
gaaguacuucaugucuaug

SEQ ID NO: 2859460 - RNA, 19 nt, Artificial Sequence
  Description of Artificial Sequence: Synthetic oligonucleotide
uucaugcgucuucaaugac

SEQ ID NO: 2859461 - RNA, 19 nt, Artificial Sequence
  Description of Artificial Sequence: Synthetic oligonucleotide
aagaaggguuucccacagu

SEQ ID NO: 2859462 - RNA, 19 nt, Artificial Sequence
  Description of Artificial Sequence: Synthetic oligonucleotide
ggggcuuuccaucacuaug

SEQ ID NO: 2859463 - RNA, 19 nt, Artificial Sequence
  Description of Artificial Sequence: Synthetic oligonucleotide
acauggggcuuuccaucac

SEQ ID NO: 2859464 - RNA, 19 nt, Artificial Sequence
  Description of Artificial Sequence: Synthetic oligonucleotide
ucaugcacuugaagaugac

SEQ ID NO: 2859465 - RNA, 19 nt, Artificial Sequence
  Description of Artificial Sequence: Synthetic oligonucleotide
cguacacacacacacacac

SEQ ID NO: 2859466 - RNA, 19 nt, Artificial Sequence
  Description of Artificial Sequence: Synthetic oligonucleotide
gaaggguuucccacaguac

SEQ ID NO: 2859467 - RNA, 19 nt, Artificial Sequence
  Description of Artificial Sequence: Synthetic oligonucleotide
augaccuggaagaagugaa

SEQ ID NO: 2859468 - RNA, 19 nt, Artificial Sequence
  Description of Artificial Sequence: Synthetic oligonucleotide
cacgcuagcagaggugggg

SEQ ID NO: 2859469 - RNA, 19 nt, Artificial Sequence
  Description of Artificial Sequence: Synthetic oligonucleotide
gagagcacgcuagcagagg

SEQ ID NO: 2859470 - RNA, 19 nt, Artificial Sequence
  Description of Artificial Sequence: Synthetic oligonucleotide
caugcgucuucaaugaccu

SEQ ID NO: 2859471 - RNA, 19 nt, Artificial Sequence
  Description of Artificial Sequence: Synthetic oligonucleotide
acacacacacacauagugu

SEQ ID NO: 2859472 - RNA, 19 nt, Artificial Sequence
  Description of Artificial Sequence: Synthetic oligonucleotide
acacaucguauacguacgu

SEQ ID NO: 2859473 - RNA, 19 nt, Artificial Sequence
  Description of Artificial Sequence: Synthetic oligonucleotide
ugaagggaguaagaccaaa

SEQ ID NO: 2859474 - RNA, 19 nt, Artificial Sequence
  Description of Artificial Sequence: Synthetic oligonucleotide
uugaagggaguaagaccaa

SEQ ID NO: 2859475 - RNA, 19 nt, Artificial Sequence
  Description of Artificial Sequence: Synthetic oligonucleotide
acacacacacacacacacg

SEQ ID NO: 2859476 - RNA, 19 nt, Artificial Sequence
  Description of Artificial Sequence: Synthetic oligonucleotide
caaugaccuggaagaagug

SEQ ID NO: 2859477 - RNA, 19 nt, Artificial Sequence
  Description of Artificial Sequence: Synthetic oligonucleotide
uacaauuguaaggcucauc

SEQ ID NO: 2859478 - RNA, 19 nt, Artificial Sequence
  Description of Artificial Sequence: Synthetic oligonucleotide
uuguaaggcucaucaucaa

SEQ ID NO: 2859479 - RNA, 19 nt, Artificial Sequence
  Description of Artificial Sequence: Synthetic oligonucleotide
agagagcacgcuagcagag

SEQ ID NO: 2859480 - RNA, 19 nt, Artificial Sequence
  Description of Artificial Sequence: Synthetic oligonucleotide
uggaagaagugaagcuuuu

SEQ ID NO: 2859481 - RNA, 19 nt, Artificial Sequence
  Description of Artificial Sequence: Synthetic oligonucleotide
guacuucaugucuaugcaa

SEQ ID NO: 2859482 - RNA, 19 nt, Artificial Sequence
  Description of Artificial Sequence: Synthetic oligonucleotide
agaccaaaggaagguuuug

SEQ ID NO: 2859483 - RNA, 19 nt, Artificial Sequence
  Description of Artificial Sequence: Synthetic oligonucleotide
aagggaaagccugcccgca

SEQ ID NO: 2859484 - RNA, 19 nt, Artificial Sequence
  Description of Artificial Sequence: Synthetic oligonucleotide
acacacacacacgcacacg

SEQ ID NO: 2859485 - RNA, 19 nt, Artificial Sequence
  Description of Artificial Sequence: Synthetic oligonucleotide
cacuugaagaugacuguaa

SEQ ID NO: 2859486 - RNA, 19 nt, Artificial Sequence
  Description of Artificial Sequence: Synthetic oligonucleotide
cuguaauaagggaaagccu

SEQ ID NO: 2859487 - RNA, 19 nt, Artificial Sequence
  Description of Artificial Sequence: Synthetic oligonucleotide
augucuuugaagggaguaa

SEQ ID NO: 2859488 - RNA, 19 nt, Artificial Sequence
  Description of Artificial Sequence: Synthetic oligonucleotide
ggugaagaaggguuuccca

SEQ ID NO: 2859489 - RNA, 19 nt, Artificial Sequence
  Description of Artificial Sequence: Synthetic oligonucleotide
cacauggggcuuuccauca

SEQ ID NO: 2859490 - RNA, 19 nt, Artificial Sequence
  Description of Artificial Sequence: Synthetic oligonucleotide
ggcuuuccaucacuauggg

SEQ ID NO: 2859491 - RNA, 19 nt, Artificial Sequence
  Description of Artificial Sequence: Synthetic oligonucleotide
auagugugaaguacuucau

SEQ ID NO: 2859492 - RNA, 19 nt, Artificial Sequence
  Description of Artificial Sequence: Synthetic oligonucleotide
gagagagagcacgcuagca

SEQ ID NO: 2859493 - RNA, 19 nt, Artificial Sequence
  Description of Artificial Sequence: Synthetic oligonucleotide
auccuuucaugcgucuuca

SEQ ID NO: 2859494 - RNA, 19 nt, Artificial Sequence
  Description of Artificial Sequence: Synthetic oligonucleotide
cucaucaucaauguguauu

SEQ ID NO: 2859495 - RNA, 19 nt, Artificial Sequence
  Description of Artificial Sequence: Synthetic oligonucleotide
agccugcccgcacuguuug

SEQ ID NO: 2859496 - RNA, 19 nt, Artificial Sequence
  Description of Artificial Sequence: Synthetic oligonucleotide
uuacaauuguaaggcucau

SEQ ID NO: 2859497 - RNA, 19 nt, Artificial Sequence
  Description of Artificial Sequence: Synthetic oligonucleotide
auacguacguacacacaca

SEQ ID NO: 2859498 - RNA, 19 nt, Artificial Sequence
  Description of Artificial Sequence: Synthetic oligonucleotide
cacacacacacacacacau

SEQ ID NO: 2859499 - RNA, 19 nt, Artificial Sequence
  Description of Artificial Sequence: Synthetic oligonucleotide
ccaaaggaagguuuugcca

SEQ ID NO: 2859500 - RNA, 19 nt, Artificial Sequence
  Description of Artificial Sequence: Synthetic oligonucleotide
gucaaggugaagaaggguu

SEQ ID NO: 2859501 - RNA, 19 nt, Artificial Sequence
  Description of Artificial Sequence: Synthetic oligonucleotide
acacgcacacacacacacg

SEQ ID NO: 2859502 - RNA, 19 nt, Artificial Sequence
  Description of Artificial Sequence: Synthetic oligonucleotide
ugcccgcacuguuugcaca

SEQ ID NO: 2859503 - RNA, 19 nt, Artificial Sequence
  Description of Artificial Sequence: Synthetic oligonucleotide
gugaaguacuucaugucua

SEQ ID NO: 2859504 - RNA, 19 nt, Artificial Sequence
  Description of Artificial Sequence: Synthetic oligonucleotide
gugaauccuuucaugcguc

SEQ ID NO: 2859505 - RNA, 19 nt, Artificial Sequence
  Description of Artificial Sequence: Synthetic oligonucleotide
acacacacacauaguguga

SEQ ID NO: 2859506 - RNA, 19 nt, Artificial Sequence
  Description of Artificial Sequence: Synthetic oligonucleotide
cacacacacacaucguaua

SEQ ID NO: 2859507 - RNA, 19 nt, Artificial Sequence
  Description of Artificial Sequence: Synthetic oligonucleotide
acacacacacacacgcaca

SEQ ID NO: 2859508 - RNA, 19 nt, Artificial Sequence
  Description of Artificial Sequence: Synthetic oligonucleotide
cuaugcaaauggucaaggu

SEQ ID NO: 2859509 - RNA, 19 nt, Artificial Sequence
  Description of Artificial Sequence: Synthetic oligonucleotide
gucuuugaagggaguaaga

SEQ ID NO: 2859510 - RNA, 19 nt, Artificial Sequence
  Description of Artificial Sequence: Synthetic oligonucleotide
agagagagagagagagaga

SEQ ID NO: 2859511 - RNA, 19 nt, Artificial Sequence
  Description of Artificial Sequence: Synthetic oligonucleotide
caugucuuugaagggagua

SEQ ID NO: 2859512 - RNA, 19 nt, Artificial Sequence
  Description of Artificial Sequence: Synthetic oligonucleotide
uggggcuuuccaucacuau

SEQ ID NO: 2859513 - RNA, 19 nt, Artificial Sequence
  Description of Artificial Sequence: Synthetic oligonucleotide
acacgcacacacacacauc

SEQ ID NO: 2859514 - RNA, 19 nt, Artificial Sequence
  Description of Artificial Sequence: Synthetic oligonucleotide
cacacacauagugugaagu

SEQ ID NO: 2859515 - RNA, 19 nt, Artificial Sequence
  Description of Artificial Sequence: Synthetic oligonucleotide
guacguacacacacacaca

SEQ ID NO: 2859516 - RNA, 19 nt, Artificial Sequence
  Description of Artificial Sequence: Synthetic oligonucleotide
gguuucccacaguacuuac

SEQ ID NO: 2859517 - RNA, 19 nt, Artificial Sequence
  Description of Artificial Sequence: Synthetic oligonucleotide
gagcacgcuagcagaggug

SEQ ID NO: 2859518 - RNA, 19 nt, Artificial Sequence
  Description of Artificial Sequence: Synthetic oligonucleotide
cuggaagaagugaagcuuu

SEQ ID NO: 2859519 - RNA, 19 nt, Artificial Sequence
  Description of Artificial Sequence: Synthetic oligonucleotide
guacacacacacacacaca

SEQ ID NO: 2859520 - RNA, 19 nt, Artificial Sequence
  Description of Artificial Sequence: Synthetic oligonucleotide
cacacgcacacacacacau

SEQ ID NO: 2859521 - RNA, 19 nt, Artificial Sequence
  Description of Artificial Sequence: Synthetic oligonucleotide
uccuuucaugcgucuucaa

SEQ ID NO: 2859522 - RNA, 19 nt, Artificial Sequence
  Description of Artificial Sequence: Synthetic oligonucleotide
acacacacacacacacaca

SEQ ID NO: 2859523 - RNA, 19 nt, Artificial Sequence
  Description of Artificial Sequence: Synthetic oligonucleotide
acacacacacacacauagu

SEQ ID NO: 2859524 - RNA, 19 nt, Artificial Sequence
  Description of Artificial Sequence: Synthetic oligonucleotide
acacacacacacacacgca

SEQ ID NO: 2859525 - RNA, 19 nt, Artificial Sequence
  Description of Artificial Sequence: Synthetic oligonucleotide
cugcccgcacuguuugcac

SEQ ID NO: 2859526 - RNA, 19 nt, Artificial Sequence
  Description of Artificial Sequence: Synthetic oligonucleotide
cgcacacgcacacacacac

SEQ ID NO: 2859527 - RNA, 19 nt, Artificial Sequence
  Description of Artificial Sequence: Synthetic oligonucleotide
acguacacacacacacaca

SEQ ID NO: 2859528 - RNA, 19 nt, Artificial Sequence
  Description of Artificial Sequence: Synthetic oligonucleotide
cuucaaugaccuggaagaa

SEQ ID NO: 2859529 - RNA, 19 nt, Artificial Sequence
  Description of Artificial Sequence: Synthetic oligonucleotide
ggaagaagugaagcuuuuc

SEQ ID NO: 2859530 - RNA, 19 nt, Artificial Sequence
  Description of Artificial Sequence: Synthetic oligonucleotide
acacacacacacgcacaca

SEQ ID NO: 2859531 - RNA, 19 nt, Artificial Sequence
  Description of Artificial Sequence: Synthetic oligonucleotide
acacacacgcacacacaca

SEQ ID NO: 2859532 - RNA, 19 nt, Artificial Sequence
  Description of Artificial Sequence: Synthetic oligonucleotide
gcacacauggggcuuucca

SEQ ID NO: 2859533 - RNA, 19 nt, Artificial Sequence
  Description of Artificial Sequence: Synthetic oligonucleotide
ugcacacauggggcuuucc

SEQ ID NO: 2859534 - RNA, 19 nt, Artificial Sequence
  Description of Artificial Sequence: Synthetic oligonucleotide
acgcuagcagagguggggu

SEQ ID NO: 2859535 - RNA, 19 nt, Artificial Sequence
  Description of Artificial Sequence: Synthetic oligonucleotide
gcuagcagaggugggguac

SEQ ID NO: 2859536 - RNA, 19 nt, Artificial Sequence
  Description of Artificial Sequence: Synthetic oligonucleotide
acacacacacgcacacaca

SEQ ID NO: 2859537 - RNA, 19 nt, Artificial Sequence
  Description of Artificial Sequence: Synthetic oligonucleotide
cagaggugggguacacaca

SEQ ID NO: 2859538 - RNA, 19 nt, Artificial Sequence
  Description of Artificial Sequence: Synthetic oligonucleotide
aggguuucccacaguacuu

SEQ ID NO: 2859539 - RNA, 19 nt, Artificial Sequence
  Description of Artificial Sequence: Synthetic oligonucleotide
augcgucuucaaugaccug

SEQ ID NO: 2859540 - RNA, 19 nt, Artificial Sequence
  Description of Artificial Sequence: Synthetic oligonucleotide
cgcacacacacacacgcac

SEQ ID NO: 2859541 - RNA, 19 nt, Artificial Sequence
  Description of Artificial Sequence: Synthetic oligonucleotide
acguacguacacacacaca

SEQ ID NO: 2859542 - RNA, 19 nt, Artificial Sequence
  Description of Artificial Sequence: Synthetic oligonucleotide
gagagagagagagcacgcu

SEQ ID NO: 2859543 - RNA, 19 nt, Artificial Sequence
  Description of Artificial Sequence: Synthetic oligonucleotide
cacacauggggcuuuccau

SEQ ID NO: 2859544 - RNA, 19 nt, Artificial Sequence
  Description of Artificial Sequence: Synthetic oligonucleotide
caugcacuugaagaugacu

SEQ ID NO: 2859545 - RNA, 19 nt, Artificial Sequence
  Description of Artificial Sequence: Synthetic oligonucleotide
caauuguaaggcucaucau

SEQ ID NO: 2859546 - RNA, 19 nt, Artificial Sequence
  Description of Artificial Sequence: Synthetic oligonucleotide
gcaaauggucaaggugaag

SEQ ID NO: 2859547 - RNA, 19 nt, Artificial Sequence
  Description of Artificial Sequence: Synthetic oligonucleotide
cuagcagaggugggguaca

SEQ ID NO: 2859548 - RNA, 19 nt, Artificial Sequence
  Description of Artificial Sequence: Synthetic oligonucleotide
cacauagugugaaguacuu

SEQ ID NO: 2859549 - RNA, 19 nt, Artificial Sequence
  Description of Artificial Sequence: Synthetic oligonucleotide
uagcagaggugggguacac

SEQ ID NO: 2859550 - RNA, 19 nt, Artificial Sequence
  Description of Artificial Sequence: Synthetic oligonucleotide
agcagaggugggguacaca

SEQ ID NO: 2859551 - RNA, 19 nt, Artificial Sequence
  Description of Artificial Sequence: Synthetic oligonucleotide
aagccugcccgcacuguuu

SEQ ID NO: 2859552 - RNA, 19 nt, Artificial Sequence
  Description of Artificial Sequence: Synthetic oligonucleotide
agcuuuucccacacugcuu

SEQ ID NO: 2859553 - RNA, 19 nt, Artificial Sequence
  Description of Artificial Sequence: Synthetic oligonucleotide
guaagaccaaaggaagguu

SEQ ID NO: 2859554 - RNA, 19 nt, Artificial Sequence
  Description of Artificial Sequence: Synthetic oligonucleotide
uuccaucacuauggguuuu

SEQ ID NO: 2859555 - RNA, 19 nt, Artificial Sequence
  Description of Artificial Sequence: Synthetic oligonucleotide
cacaucguauacguacgua

SEQ ID NO: 2859556 - RNA, 19 nt, Artificial Sequence
  Description of Artificial Sequence: Synthetic oligonucleotide
ggcucaucaucaaugugua

SEQ ID NO: 2859557 - RNA, 19 nt, Artificial Sequence
  Description of Artificial Sequence: Synthetic oligonucleotide
cacacacaucguauacgua

SEQ ID NO: 2859558 - RNA, 19 nt, Artificial Sequence
  Description of Artificial Sequence: Synthetic oligonucleotide
acacacgcacacacacaca

SEQ ID NO: 2859559 - RNA, 19 nt, Artificial Sequence
  Description of Artificial Sequence: Synthetic oligonucleotide
cauggggcuuuccaucacu

SEQ ID NO: 2859560 - RNA, 19 nt, Artificial Sequence
  Description of Artificial Sequence: Synthetic oligonucleotide
auggggcuuuccaucacua

SEQ ID NO: 2859561 - RNA, 19 nt, Artificial Sequence
  Description of Artificial Sequence: Synthetic oligonucleotide
acacacacacacacacaua

SEQ ID NO: 2859562 - RNA, 19 nt, Artificial Sequence
  Description of Artificial Sequence: Synthetic oligonucleotide
gaauccuuucaugcgucuu

SEQ ID NO: 2859563 - RNA, 19 nt, Artificial Sequence
  Description of Artificial Sequence: Synthetic oligonucleotide
acgcacacacacacacgca

SEQ ID NO: 2859564 - RNA, 19 nt, Artificial Sequence
  Description of Artificial Sequence: Synthetic oligonucleotide
gaggugggguacacacaca

SEQ ID NO: 2859565 - RNA, 19 nt, Artificial Sequence
  Description of Artificial Sequence: Synthetic oligonucleotide
acgcacacacacacaucgu

SEQ ID NO: 2859566 - RNA, 19 nt, Artificial Sequence
  Description of Artificial Sequence: Synthetic oligonucleotide
uugcacacauggggcuuuc

SEQ ID NO: 2859567 - RNA, 19 nt, Artificial Sequence
  Description of Artificial Sequence: Synthetic oligonucleotide
gcacacacacacacgcaca

SEQ ID NO: 2859568 - RNA, 19 nt, Artificial Sequence
  Description of Artificial Sequence: Synthetic oligonucleotide
ggguacacacacacacaca

SEQ ID NO: 2859569 - RNA, 19 nt, Artificial Sequence
  Description of Artificial Sequence: Synthetic oligonucleotide
ggugggguacacacacaca

SEQ ID NO: 2859570 - RNA, 19 nt, Artificial Sequence
  Description of Artificial Sequence: Synthetic oligonucleotide
gcuuuccaucacuaugggu

SEQ ID NO: 2859571 - RNA, 19 nt, Artificial Sequence
  Description of Artificial Sequence: Synthetic oligonucleotide
gcgucuucaaugaccugga

SEQ ID NO: 2859572 - RNA, 19 nt, Artificial Sequence
  Description of Artificial Sequence: Synthetic oligonucleotide
gaaagccugcccgcacugu

SEQ ID NO: 2859573 - RNA, 19 nt, Artificial Sequence
  Description of Artificial Sequence: Synthetic oligonucleotide
ggucaaggugaagaagggu

SEQ ID NO: 2859574 - RNA, 19 nt, Artificial Sequence
  Description of Artificial Sequence: Synthetic oligonucleotide
ggguuucccacaguacuua

SEQ ID NO: 2859575 - RNA, 19 nt, Artificial Sequence
  Description of Artificial Sequence: Synthetic oligonucleotide
gcacgcuagcagagguggg

SEQ ID NO: 2859576 - RNA, 19 nt, Artificial Sequence
  Description of Artificial Sequence: Synthetic oligonucleotide
gggaaagccugcccgcacu

SEQ ID NO: 2859577 - RNA, 19 nt, Artificial Sequence
  Description of Artificial Sequence: Synthetic oligonucleotide
guuugcacacauggggcuu

SEQ ID NO: 2859578 - RNA, 19 nt, Artificial Sequence
  Description of Artificial Sequence: Synthetic oligonucleotide
ccuuucaugcgucuucaau

SEQ ID NO: 2859579 - RNA, 19 nt, Artificial Sequence
  Description of Artificial Sequence: Synthetic oligonucleotide
gcacacacacacaucguau

SEQ ID NO: 2859580 - RNA, 19 nt, Artificial Sequence
  Description of Artificial Sequence: Synthetic oligonucleotide
caucaucaauguguauuuu

SEQ ID NO: 2859581 - RNA, 19 nt, Artificial Sequence
  Description of Artificial Sequence: Synthetic oligonucleotide
cgcacacacacacaucgua

SEQ ID NO: 2859582 - RNA, 19 nt, Artificial Sequence
  Description of Artificial Sequence: Synthetic oligonucleotide
ccugcccgcacuguuugca

SEQ ID NO: 2859583 - RNA, 19 nt, Artificial Sequence
  Description of Artificial Sequence: Synthetic oligonucleotide
gccugcccgcacuguuugc

SEQ ID NO: 2859584 - RNA, 19 nt, Artificial Sequence
  Description of Artificial Sequence: Synthetic oligonucleotide
gcacacgcacacacacaca

SEQ ID NO: 2859585 - RNA, 19 nt, Artificial Sequence
  Description of Artificial Sequence: Synthetic oligonucleotide
gcucaucaucaauguguau

SEQ ID NO: 2859586 - RNA, 19 nt, Artificial Sequence
  Description of Artificial Sequence: Synthetic oligonucleotide
cgucuucaaugaccuggaa

SEQ ID NO: 2859587 - RNA, 19 nt, Artificial Sequence
  Description of Artificial Sequence: Synthetic oligonucleotide
cccgcacuguuugcacaca

SEQ ID NO: 2859588 - RNA, 19 nt, Artificial Sequence
  Description of Artificial Sequence: Synthetic oligonucleotide
ccgcacuguuugcacacau

SEQ ID NO: 2859589 - RNA, 19 nt, Artificial Sequence
  Description of Artificial Sequence: Synthetic oligonucleotide
cgcuagcagagguggggua

SEQ ID NO: 2859590 - RNA, 19 nt, Artificial Sequence
  Description of Artificial Sequence: Synthetic oligonucleotide
aacuguagugaguugauuc

SEQ ID NO: 2859591 - RNA, 19 nt, Artificial Sequence
  Description of Artificial Sequence: Synthetic oligonucleotide
aauaugauugcugugacca

SEQ ID NO: 2859592 - RNA, 19 nt, Artificial Sequence
  Description of Artificial Sequence: Synthetic oligonucleotide
aaagcaauaugauugcugu

SEQ ID NO: 2859593 - RNA, 19 nt, Artificial Sequence
  Description of Artificial Sequence: Synthetic oligonucleotide
ucagaguaaguacagagca

SEQ ID NO: 2859594 - RNA, 19 nt, Artificial Sequence
  Description of Artificial Sequence: Synthetic oligonucleotide
agaggguagagauacuucc

SEQ ID NO: 2859595 - RNA, 19 nt, Artificial Sequence
  Description of Artificial Sequence: Synthetic oligonucleotide
ucaaaagucaccaccaggu

SEQ ID NO: 2859596 - RNA, 19 nt, Artificial Sequence
  Description of Artificial Sequence: Synthetic oligonucleotide
agugaguugauucucaugu

SEQ ID NO: 2859597 - RNA, 19 nt, Artificial Sequence
  Description of Artificial Sequence: Synthetic oligonucleotide
uugauucucauguaucugg

SEQ ID NO: 2859598 - RNA, 19 nt, Artificial Sequence
  Description of Artificial Sequence: Synthetic oligonucleotide
ucuguacaaagcaauauga

SEQ ID NO: 2859599 - RNA, 19 nt, Artificial Sequence
  Description of Artificial Sequence: Synthetic oligonucleotide
gaagaugacguagaggugg

SEQ ID NO: 2859600 - RNA, 19 nt, Artificial Sequence
  Description of Artificial Sequence: Synthetic oligonucleotide
agaguaaguacagagcacc

SEQ ID NO: 2859601 - RNA, 19 nt, Artificial Sequence
  Description of Artificial Sequence: Synthetic oligonucleotide
ucuucuuggcuucagagga

SEQ ID NO: 2859602 - RNA, 19 nt, Artificial Sequence
  Description of Artificial Sequence: Synthetic oligonucleotide
guacaaagcaauaugauug

SEQ ID NO: 2859603 - RNA, 19 nt, Artificial Sequence
  Description of Artificial Sequence: Synthetic oligonucleotide
ugcaucaaaagucaccacc

SEQ ID NO: 2859604 - RNA, 19 nt, Artificial Sequence
  Description of Artificial Sequence: Synthetic oligonucleotide
uuccguagcacauucacag

SEQ ID NO: 2859605 - RNA, 19 nt, Artificial Sequence
  Description of Artificial Sequence: Synthetic oligonucleotide
aaaagucaccaccagguca

SEQ ID NO: 2859606 - RNA, 19 nt, Artificial Sequence
  Description of Artificial Sequence: Synthetic oligonucleotide
auugacaucuauguguugg

SEQ ID NO: 2859607 - RNA, 19 nt, Artificial Sequence
  Description of Artificial Sequence: Synthetic oligonucleotide
uuuacuggugagcuggaag

SEQ ID NO: 2859608 - RNA, 19 nt, Artificial Sequence
  Description of Artificial Sequence: Synthetic oligonucleotide
uucuuuacuggugagcugg

SEQ ID NO: 2859609 - RNA, 19 nt, Artificial Sequence
  Description of Artificial Sequence: Synthetic oligonucleotide
cuucagaguaaguacagag

SEQ ID NO: 2859610 - RNA, 19 nt, Artificial Sequence
  Description of Artificial Sequence: Synthetic oligonucleotide
aagaucugaaaacucuucu

SEQ ID NO: 2859611 - RNA, 19 nt, Artificial Sequence
  Description of Artificial Sequence: Synthetic oligonucleotide
ugugccacuucuuuacugg

SEQ ID NO: 2859612 - RNA, 19 nt, Artificial Sequence
  Description of Artificial Sequence: Synthetic oligonucleotide
gacaucuauguguuggagg

SEQ ID NO: 2859613 - RNA, 19 nt, Artificial Sequence
  Description of Artificial Sequence: Synthetic oligonucleotide
uucagaguaaguacagagc

SEQ ID NO: 2859614 - RNA, 19 nt, Artificial Sequence
  Description of Artificial Sequence: Synthetic oligonucleotide
uaucuggagaagaugacgu

SEQ ID NO: 2859615 - RNA, 19 nt, Artificial Sequence
  Description of Artificial Sequence: Synthetic oligonucleotide
acuuccguagcacauucac

SEQ ID NO: 2859616 - RNA, 19 nt, Artificial Sequence
  Description of Artificial Sequence: Synthetic oligonucleotide
acaucuauguguuggagga

SEQ ID NO: 2859617 - RNA, 19 nt, Artificial Sequence
  Description of Artificial Sequence: Synthetic oligonucleotide
caggacauggcuuucuugg

SEQ ID NO: 2859618 - RNA, 19 nt, Artificial Sequence
  Description of Artificial Sequence: Synthetic oligonucleotide
aucaaaagucaccaccagg

SEQ ID NO: 2859619 - RNA, 19 nt, Artificial Sequence
  Description of Artificial Sequence: Synthetic oligonucleotide
ucugcaucaaaagucacca

SEQ ID NO: 2859620 - RNA, 19 nt, Artificial Sequence
  Description of Artificial Sequence: Synthetic oligonucleotide
uacagagcacccuuuaggc

SEQ ID NO: 2859621 - RNA, 19 nt, Artificial Sequence
  Description of Artificial Sequence: Synthetic oligonucleotide
uacaaagcaauaugauugc

SEQ ID NO: 2859622 - RNA, 19 nt, Artificial Sequence
  Description of Artificial Sequence: Synthetic oligonucleotide
uccuucugcaucaaaaguc

SEQ ID NO: 2859623 - RNA, 19 nt, Artificial Sequence
  Description of Artificial Sequence: Synthetic oligonucleotide
uguacaaagcaauaugauu

SEQ ID NO: 2859624 - RNA, 19 nt, Artificial Sequence
  Description of Artificial Sequence: Synthetic oligonucleotide
uuacuggugagcuggaaga

SEQ ID NO: 2859625 - RNA, 19 nt, Artificial Sequence
  Description of Artificial Sequence: Synthetic oligonucleotide
guacagagcacccuuuagg

SEQ ID NO: 2859626 - RNA, 19 nt, Artificial Sequence
  Description of Artificial Sequence: Synthetic oligonucleotide
aguugauucucauguaucu

SEQ ID NO: 2859627 - RNA, 19 nt, Artificial Sequence
  Description of Artificial Sequence: Synthetic oligonucleotide
auccagaggguagagauac

SEQ ID NO: 2859628 - RNA, 19 nt, Artificial Sequence
  Description of Artificial Sequence: Synthetic oligonucleotide
auucucauguaucuggaga

SEQ ID NO: 2859629 - RNA, 19 nt, Artificial Sequence
  Description of Artificial Sequence: Synthetic oligonucleotide
uuuccuucugagugcaggg

SEQ ID NO: 2859630 - RNA, 19 nt, Artificial Sequence
  Description of Artificial Sequence: Synthetic oligonucleotide
ucuauguguuggaggaggg

SEQ ID NO: 2859631 - RNA, 19 nt, Artificial Sequence
  Description of Artificial Sequence: Synthetic oligonucleotide
uucugcaucaaaagucacc

SEQ ID NO: 2859632 - RNA, 19 nt, Artificial Sequence
  Description of Artificial Sequence: Synthetic oligonucleotide
aggucaaugccauugacau

SEQ ID NO: 2859633 - RNA, 19 nt, Artificial Sequence
  Description of Artificial Sequence: Synthetic oligonucleotide
ugucccacugcacuccugg

SEQ ID NO: 2859634 - RNA, 19 nt, Artificial Sequence
  Description of Artificial Sequence: Synthetic oligonucleotide
caaagcaauaugauugcug

SEQ ID NO: 2859635 - RNA, 19 nt, Artificial Sequence
  Description of Artificial Sequence: Synthetic oligonucleotide
ucuggagaagaugacguag

SEQ ID NO: 2859636 - RNA, 19 nt, Artificial Sequence
  Description of Artificial Sequence: Synthetic oligonucleotide
uguagugaguugauucuca

SEQ ID NO: 2859637 - RNA, 19 nt, Artificial Sequence
  Description of Artificial Sequence: Synthetic oligonucleotide
uguuucugccuuuuguucu

SEQ ID NO: 2859638 - RNA, 19 nt, Artificial Sequence
  Description of Artificial Sequence: Synthetic oligonucleotide
cagacuucagaguaaguac

SEQ ID NO: 2859639 - RNA, 19 nt, Artificial Sequence
  Description of Artificial Sequence: Synthetic oligonucleotide
gaugacguagagguggcgg

SEQ ID NO: 2859640 - RNA, 19 nt, Artificial Sequence
  Description of Artificial Sequence: Synthetic oligonucleotide
uuuguucugaagaucugaa

SEQ ID NO: 2859641 - RNA, 19 nt, Artificial Sequence
  Description of Artificial Sequence: Synthetic oligonucleotide
agauccagaggguagagau

SEQ ID NO: 2859642 - RNA, 19 nt, Artificial Sequence
  Description of Artificial Sequence: Synthetic oligonucleotide
ugaguugauucucauguau

SEQ ID NO: 2859643 - RNA, 19 nt, Artificial Sequence
  Description of Artificial Sequence: Synthetic oligonucleotide
gaaccagaggagcugacug

SEQ ID NO: 2859644 - RNA, 19 nt, Artificial Sequence
  Description of Artificial Sequence: Synthetic oligonucleotide
ucugaagaucugaaaacuc

SEQ ID NO: 2859645 - RNA, 19 nt, Artificial Sequence
  Description of Artificial Sequence: Synthetic oligonucleotide
agagauacuuccguagcac

SEQ ID NO: 2859646 - RNA, 19 nt, Artificial Sequence
  Description of Artificial Sequence: Synthetic oligonucleotide
gagagaccagggcagaucc

SEQ ID NO: 2859647 - RNA, 19 nt, Artificial Sequence
  Description of Artificial Sequence: Synthetic oligonucleotide
acucuucuuggcuucagag

SEQ ID NO: 2859648 - RNA, 19 nt, Artificial Sequence
  Description of Artificial Sequence: Synthetic oligonucleotide
cagagcacccuuuaggcag

SEQ ID NO: 2859649 - RNA, 19 nt, Artificial Sequence
  Description of Artificial Sequence: Synthetic oligonucleotide
gagugcagggcucucacag

SEQ ID NO: 2859650 - RNA, 19 nt, Artificial Sequence
  Description of Artificial Sequence: Synthetic oligonucleotide
cuucagaggaacuguagug

SEQ ID NO: 2859651 - RNA, 19 nt, Artificial Sequence
  Description of Artificial Sequence: Synthetic oligonucleotide
auucacagacuucagagua

SEQ ID NO: 2859652 - RNA, 19 nt, Artificial Sequence
  Description of Artificial Sequence: Synthetic oligonucleotide
guucugaagaucugaaaac

SEQ ID NO: 2859653 - RNA, 19 nt, Artificial Sequence
  Description of Artificial Sequence: Synthetic oligonucleotide
gucaccaccaggucaaugc

SEQ ID NO: 2859654 - RNA, 19 nt, Artificial Sequence
  Description of Artificial Sequence: Synthetic oligonucleotide
agcacauucacagacuuca

SEQ ID NO: 2859655 - RNA, 19 nt, Artificial Sequence
  Description of Artificial Sequence: Synthetic oligonucleotide
acuguagugaguugauucu

SEQ ID NO: 2859656 - RNA, 19 nt, Artificial Sequence
  Description of Artificial Sequence: Synthetic oligonucleotide
uguuggaggagggugcugg

SEQ ID NO: 2859657 - RNA, 19 nt, Artificial Sequence
  Description of Artificial Sequence: Synthetic oligonucleotide
uucugaagaucugaaaacu

SEQ ID NO: 2859658 - RNA, 19 nt, Artificial Sequence
  Description of Artificial Sequence: Synthetic oligonucleotide
gaggagcugacuguggugg

SEQ ID NO: 2859659 - RNA, 19 nt, Artificial Sequence
  Description of Artificial Sequence: Synthetic oligonucleotide
auacuuccguagcacauuc

SEQ ID NO: 2859660 - RNA, 19 nt, Artificial Sequence
  Description of Artificial Sequence: Synthetic oligonucleotide
aucuauguguuggaggagg

SEQ ID NO: 2859661 - RNA, 19 nt, Artificial Sequence
  Description of Artificial Sequence: Synthetic oligonucleotide
uuuguuucugccuuuuguu

SEQ ID NO: 2859662 - RNA, 19 nt, Artificial Sequence
  Description of Artificial Sequence: Synthetic oligonucleotide
guaucuggagaagaugacg

SEQ ID NO: 2859663 - RNA, 19 nt, Artificial Sequence
  Description of Artificial Sequence: Synthetic oligonucleotide
guagagauacuuccguagc

SEQ ID NO: 2859664 - RNA, 19 nt, Artificial Sequence
  Description of Artificial Sequence: Synthetic oligonucleotide
uagagauacuuccguagca

SEQ ID NO: 2859665 - RNA, 19 nt, Artificial Sequence
  Description of Artificial Sequence: Synthetic oligonucleotide
ugauucucauguaucugga

SEQ ID NO: 2859666 - RNA, 19 nt, Artificial Sequence
  Description of Artificial Sequence: Synthetic oligonucleotide
uucagaggaacuguaguga

SEQ ID NO: 2859667 - RNA, 19 nt, Artificial Sequence
  Description of Artificial Sequence: Synthetic oligonucleotide
aagaugacguagagguggc

SEQ ID NO: 2859668 - RNA, 19 nt, Artificial Sequence
  Description of Artificial Sequence: Synthetic oligonucleotide
cuuuaggcagcuuuccuuc

SEQ ID NO: 2859669 - RNA, 19 nt, Artificial Sequence
  Description of Artificial Sequence: Synthetic oligonucleotide
cucacagcucuguacaaag

SEQ ID NO: 2859670 - RNA, 19 nt, Artificial Sequence
  Description of Artificial Sequence: Synthetic oligonucleotide
acuucuuuacuggugagcu

SEQ ID NO: 2859671 - RNA, 19 nt, Artificial Sequence
  Description of Artificial Sequence: Synthetic oligonucleotide
gguagagauacuuccguag

SEQ ID NO: 2859672 - RNA, 19 nt, Artificial Sequence
  Description of Artificial Sequence: Synthetic oligonucleotide
gagaggagagaccagggca

SEQ ID NO: 2859673 - RNA, 19 nt, Artificial Sequence
  Description of Artificial Sequence: Synthetic oligonucleotide
ugaagaucugaaaacucuu

SEQ ID NO: 2859674 - RNA, 19 nt, Artificial Sequence
  Description of Artificial Sequence: Synthetic oligonucleotide
gcagcuuuccuucugagug

SEQ ID NO: 2859675 - RNA, 19 nt, Artificial Sequence
  Description of Artificial Sequence: Synthetic oligonucleotide
uccugggucauacuggaaa

SEQ ID NO: 2859676 - RNA, 19 nt, Artificial Sequence
  Description of Artificial Sequence: Synthetic oligonucleotide
aagaggacaucguggggug

SEQ ID NO: 2859677 - RNA, 19 nt, Artificial Sequence
  Description of Artificial Sequence: Synthetic oligonucleotide
uguaucuggagaagaugac

SEQ ID NO: 2859678 - RNA, 19 nt, Artificial Sequence
  Description of Artificial Sequence: Synthetic oligonucleotide
gauucucauguaucuggag

SEQ ID NO: 2859679 - RNA, 19 nt, Artificial Sequence
  Description of Artificial Sequence: Synthetic oligonucleotide
auaugauugcugugaccac

SEQ ID NO: 2859680 - RNA, 19 nt, Artificial Sequence
  Description of Artificial Sequence: Synthetic oligonucleotide
ucugccuuuuguucugaag

SEQ ID NO: 2859681 - RNA, 19 nt, Artificial Sequence
  Description of Artificial Sequence: Synthetic oligonucleotide
aguacagagcacccuuuag

SEQ ID NO: 2859682 - RNA, 19 nt, Artificial Sequence
  Description of Artificial Sequence: Synthetic oligonucleotide
aagcaauaugauugcugug

SEQ ID NO: 2859683 - RNA, 19 nt, Artificial Sequence
  Description of Artificial Sequence: Synthetic oligonucleotide
uucuugguuuguuucugcc

SEQ ID NO: 2859684 - RNA, 19 nt, Artificial Sequence
  Description of Artificial Sequence: Synthetic oligonucleotide
auguaucuggagaagauga

SEQ ID NO: 2859685 - RNA, 19 nt, Artificial Sequence
  Description of Artificial Sequence: Synthetic oligonucleotide
ucacagacuucagaguaag

SEQ ID NO: 2859686 - RNA, 19 nt, Artificial Sequence
  Description of Artificial Sequence: Synthetic oligonucleotide
aaagucaccaccaggucaa

SEQ ID NO: 2859687 - RNA, 19 nt, Artificial Sequence
  Description of Artificial Sequence: Synthetic oligonucleotide
acugacuccuucugcauca

SEQ ID NO: 2859688 - RNA, 19 nt, Artificial Sequence
  Description of Artificial Sequence: Synthetic oligonucleotide
uaugauugcugugaccacu

SEQ ID NO: 2859689 - RNA, 19 nt, Artificial Sequence
  Description of Artificial Sequence: Synthetic oligonucleotide
acguagagguggcggaacc

SEQ ID NO: 2859690 - RNA, 19 nt, Artificial Sequence
  Description of Artificial Sequence: Synthetic oligonucleotide
ucuugguuuguuucugccu

SEQ ID NO: 2859691 - RNA, 19 nt, Artificial Sequence
  Description of Artificial Sequence: Synthetic oligonucleotide
caauaugauugcugugacc

SEQ ID NO: 2859692 - RNA, 19 nt, Artificial Sequence
  Description of Artificial Sequence: Synthetic oligonucleotide
auugcugugaccacugacu

SEQ ID NO: 2859693 - RNA, 19 nt, Artificial Sequence
  Description of Artificial Sequence: Synthetic oligonucleotide
uuguuucugccuuuuguuc

SEQ ID NO: 2859694 - RNA, 19 nt, Artificial Sequence
  Description of Artificial Sequence: Synthetic oligonucleotide
gauugcugugaccacugac

SEQ ID NO: 2859695 - RNA, 19 nt, Artificial Sequence
  Description of Artificial Sequence: Synthetic oligonucleotide
aaccagaggagcugacugu

SEQ ID NO: 2859696 - RNA, 19 nt, Artificial Sequence
  Description of Artificial Sequence: Synthetic oligonucleotide
gagcuggaagaggacaucg

SEQ ID NO: 2859697 - RNA, 19 nt, Artificial Sequence
  Description of Artificial Sequence: Synthetic oligonucleotide
gaggguagagauacuuccg

SEQ ID NO: 2859698 - RNA, 19 nt, Artificial Sequence
  Description of Artificial Sequence: Synthetic oligonucleotide
gacaucguggggugagagg

SEQ ID NO: 2859699 - RNA, 19 nt, Artificial Sequence
  Description of Artificial Sequence: Synthetic oligonucleotide
gacuucagaguaaguacag

SEQ ID NO: 2859700 - RNA, 19 nt, Artificial Sequence
  Description of Artificial Sequence: Synthetic oligonucleotide
uugacaucuauguguugga

SEQ ID NO: 2859701 - RNA, 19 nt, Artificial Sequence
  Description of Artificial Sequence: Synthetic oligonucleotide
gaccagggcagauccagag

SEQ ID NO: 2859702 - RNA, 19 nt, Artificial Sequence
  Description of Artificial Sequence: Synthetic oligonucleotide
acagacuucagaguaagua

SEQ ID NO: 2859703 - RNA, 19 nt, Artificial Sequence
  Description of Artificial Sequence: Synthetic oligonucleotide
cacuccugggucauacugg

SEQ ID NO: 2859704 - RNA, 19 nt, Artificial Sequence
  Description of Artificial Sequence: Synthetic oligonucleotide
cugccuuuuguucugaaga

SEQ ID NO: 2859705 - RNA, 19 nt, Artificial Sequence
  Description of Artificial Sequence: Synthetic oligonucleotide
accacugacuccuucugca

SEQ ID NO: 2859706 - RNA, 19 nt, Artificial Sequence
  Description of Artificial Sequence: Synthetic oligonucleotide
ugccauugacaucuaugug

SEQ ID NO: 2859707 - RNA, 19 nt, Artificial Sequence
  Description of Artificial Sequence: Synthetic oligonucleotide
gagggugcuggccacacac

SEQ ID NO: 2859708 - RNA, 19 nt, Artificial Sequence
  Description of Artificial Sequence: Synthetic oligonucleotide
auguguuggaggagggugc

SEQ ID NO: 2859709 - RNA, 19 nt, Artificial Sequence
  Description of Artificial Sequence: Synthetic oligonucleotide
ugugguggcaggacauggc

SEQ ID NO: 2859710 - RNA, 19 nt, Artificial Sequence
  Description of Artificial Sequence: Synthetic oligonucleotide
uuaggcagcuuuccuucug

SEQ ID NO: 2859711 - RNA, 19 nt, Artificial Sequence
  Description of Artificial Sequence: Synthetic oligonucleotide
aacucuucuuggcuucaga

SEQ ID NO: 2859712 - RNA, 19 nt, Artificial Sequence
  Description of Artificial Sequence: Synthetic oligonucleotide
aggaacuguagugaguuga

SEQ ID NO: 2859713 - RNA, 19 nt, Artificial Sequence
  Description of Artificial Sequence: Synthetic oligonucleotide
agaucugaaaacucuucuu

SEQ ID NO: 2859714 - RNA, 19 nt, Artificial Sequence
  Description of Artificial Sequence: Synthetic oligonucleotide
uagugaguugauucucaug

SEQ ID NO: 2859715 - RNA, 19 nt, Artificial Sequence
  Description of Artificial Sequence: Synthetic oligonucleotide
gaagaucugaaaacucuuc

SEQ ID NO: 2859716 - RNA, 19 nt, Artificial Sequence
  Description of Artificial Sequence: Synthetic oligonucleotide
acaucguggggugagagga

SEQ ID NO: 2859717 - RNA, 19 nt, Artificial Sequence
  Description of Artificial Sequence: Synthetic oligonucleotide
ucacagcucuguacaaagc

SEQ ID NO: 2859718 - RNA, 19 nt, Artificial Sequence
  Description of Artificial Sequence: Synthetic oligonucleotide
aggguagagauacuuccgu

SEQ ID NO: 2859719 - RNA, 19 nt, Artificial Sequence
  Description of Artificial Sequence: Synthetic oligonucleotide
uucacagacuucagaguaa

SEQ ID NO: 2859720 - RNA, 19 nt, Artificial Sequence
  Description of Artificial Sequence: Synthetic oligonucleotide
ugaccacugacuccuucug

SEQ ID NO: 2859721 - RNA, 19 nt, Artificial Sequence
  Description of Artificial Sequence: Synthetic oligonucleotide
ucucauguaucuggagaag

SEQ ID NO: 2859722 - RNA, 19 nt, Artificial Sequence
  Description of Artificial Sequence: Synthetic oligonucleotide
cuucuugguuuguuucugc

SEQ ID NO: 2859723 - RNA, 19 nt, Artificial Sequence
  Description of Artificial Sequence: Synthetic oligonucleotide
acacucugugucccacugc

SEQ ID NO: 2859724 - RNA, 19 nt, Artificial Sequence
  Description of Artificial Sequence: Synthetic oligonucleotide
ugacaucuauguguuggag

SEQ ID NO: 2859725 - RNA, 19 nt, Artificial Sequence
  Description of Artificial Sequence: Synthetic oligonucleotide
cauguaucuggagaagaug

SEQ ID NO: 2859726 - RNA, 19 nt, Artificial Sequence
  Description of Artificial Sequence: Synthetic oligonucleotide
agaggaacuguagugaguu

SEQ ID NO: 2859727 - RNA, 19 nt, Artificial Sequence
  Description of Artificial Sequence: Synthetic oligonucleotide
caucaaaagucaccaccag

SEQ ID NO: 2859728 - RNA, 19 nt, Artificial Sequence
  Description of Artificial Sequence: Synthetic oligonucleotide
agacuucagaguaaguaca

SEQ ID NO: 2859729 - RNA, 19 nt, Artificial Sequence
  Description of Artificial Sequence: Synthetic oligonucleotide
gagauacuuccguagcaca

SEQ ID NO: 2859730 - RNA, 19 nt, Artificial Sequence
  Description of Artificial Sequence: Synthetic oligonucleotide
ggugagaggagagaccagg

SEQ ID NO: 2859731 - RNA, 19 nt, Artificial Sequence
  Description of Artificial Sequence: Synthetic oligonucleotide
ugccacuucuuuacuggug

SEQ ID NO: 2859732 - RNA, 19 nt, Artificial Sequence
  Description of Artificial Sequence: Synthetic oligonucleotide
aaguacagagcacccuuua

SEQ ID NO: 2859733 - RNA, 19 nt, Artificial Sequence
  Description of Artificial Sequence: Synthetic oligonucleotide
agguggcggaaccagagga

SEQ ID NO: 2859734 - RNA, 19 nt, Artificial Sequence
  Description of Artificial Sequence: Synthetic oligonucleotide
cagaguaaguacagagcac

SEQ ID NO: 2859735 - RNA, 19 nt, Artificial Sequence
  Description of Artificial Sequence: Synthetic oligonucleotide
uaggcagcuuuccuucuga

SEQ ID NO: 2859736 - RNA, 19 nt, Artificial Sequence
  Description of Artificial Sequence: Synthetic oligonucleotide
cuuuuguucugaagaucug

SEQ ID NO: 2859737 - RNA, 19 nt, Artificial Sequence
  Description of Artificial Sequence: Synthetic oligonucleotide
guuucugccuuuuguucug

SEQ ID NO: 2859738 - RNA, 19 nt, Artificial Sequence
  Description of Artificial Sequence: Synthetic oligonucleotide
gaguugauucucauguauc

SEQ ID NO: 2859739 - RNA, 19 nt, Artificial Sequence
  Description of Artificial Sequence: Synthetic oligonucleotide
guugauucucauguaucug

SEQ ID NO: 2859740 - RNA, 19 nt, Artificial Sequence
  Description of Artificial Sequence: Synthetic oligonucleotide
aaagccagguccagggacu

SEQ ID NO: 2859741 - RNA, 19 nt, Artificial Sequence
  Description of Artificial Sequence: Synthetic oligonucleotide
accagggcagauccagagg

SEQ ID NO: 2859742 - RNA, 19 nt, Artificial Sequence
  Description of Artificial Sequence: Synthetic oligonucleotide
ugccuuuuguucugaagau

SEQ ID NO: 2859743 - RNA, 19 nt, Artificial Sequence
  Description of Artificial Sequence: Synthetic oligonucleotide
cuuucuuggccugugccac

SEQ ID NO: 2859744 - RNA, 19 nt, Artificial Sequence
  Description of Artificial Sequence: Synthetic oligonucleotide
gaguaaguacagagcaccc

SEQ ID NO: 2859745 - RNA, 19 nt, Artificial Sequence
  Description of Artificial Sequence: Synthetic oligonucleotide
cacagcucuguacaaagca

SEQ ID NO: 2859746 - RNA, 19 nt, Artificial Sequence
  Description of Artificial Sequence: Synthetic oligonucleotide
acccuuuaggcagcuuucc

SEQ ID NO: 2859747 - RNA, 19 nt, Artificial Sequence
  Description of Artificial Sequence: Synthetic oligonucleotide
ucugugucccacugcacuc

SEQ ID NO: 2859748 - RNA, 19 nt, Artificial Sequence
  Description of Artificial Sequence: Synthetic oligonucleotide
aguaaguacagagcacccu

SEQ ID NO: 2859749 - RNA, 19 nt, Artificial Sequence
  Description of Artificial Sequence: Synthetic oligonucleotide
acuccugggucauacugga

SEQ ID NO: 2859750 - RNA, 19 nt, Artificial Sequence
  Description of Artificial Sequence: Synthetic oligonucleotide
uggggugagaggagagacc

SEQ ID NO: 2859751 - RNA, 19 nt, Artificial Sequence
  Description of Artificial Sequence: Synthetic oligonucleotide
aaaacucuucuuggcuuca

SEQ ID NO: 2859752 - RNA, 19 nt, Artificial Sequence
  Description of Artificial Sequence: Synthetic oligonucleotide
augacguagagguggcgga

SEQ ID NO: 2859753 - RNA, 19 nt, Artificial Sequence
  Description of Artificial Sequence: Synthetic oligonucleotide
cugaagaucugaaaacucu

SEQ ID NO: 2859754 - RNA, 19 nt, Artificial Sequence
  Description of Artificial Sequence: Synthetic oligonucleotide
ccagggcagauccagaggg

SEQ ID NO: 2859755 - RNA, 19 nt, Artificial Sequence
  Description of Artificial Sequence: Synthetic oligonucleotide
acagagcacccuuuaggca

SEQ ID NO: 2859756 - RNA, 19 nt, Artificial Sequence
  Description of Artificial Sequence: Synthetic oligonucleotide
uggccacacacucuguguc

SEQ ID NO: 2859757 - RNA, 19 nt, Artificial Sequence
  Description of Artificial Sequence: Synthetic oligonucleotide
uuuaggcagcuuuccuucu

SEQ ID NO: 2859758 - RNA, 19 nt, Artificial Sequence
  Description of Artificial Sequence: Synthetic oligonucleotide
uaaguacagagcacccuuu

SEQ ID NO: 2859759 - RNA, 19 nt, Artificial Sequence
  Description of Artificial Sequence: Synthetic oligonucleotide
guuuguuucugccuuuugu

SEQ ID NO: 2859760 - RNA, 19 nt, Artificial Sequence
  Description of Artificial Sequence: Synthetic oligonucleotide
ugcugugaccacugacucc

SEQ ID NO: 2859761 - RNA, 19 nt, Artificial Sequence
  Description of Artificial Sequence: Synthetic oligonucleotide
gaagaggacaucguggggu

SEQ ID NO: 2859762 - RNA, 19 nt, Artificial Sequence
  Description of Artificial Sequence: Synthetic oligonucleotide
agaggagcugacuguggug

SEQ ID NO: 2859763 - RNA, 19 nt, Artificial Sequence
  Description of Artificial Sequence: Synthetic oligonucleotide
guagagguggcggaaccag

SEQ ID NO: 2859764 - RNA, 19 nt, Artificial Sequence
  Description of Artificial Sequence: Synthetic oligonucleotide
gaccacugacuccuucugc

SEQ ID NO: 2859765 - RNA, 19 nt, Artificial Sequence
  Description of Artificial Sequence: Synthetic oligonucleotide
ucuuuacuggugagcugga

SEQ ID NO: 2859766 - RNA, 19 nt, Artificial Sequence
  Description of Artificial Sequence: Synthetic oligonucleotide
caaaagucaccaccagguc

SEQ ID NO: 2859767 - RNA, 19 nt, Artificial Sequence
  Description of Artificial Sequence: Synthetic oligonucleotide
aaacucuucuuggcuucag

SEQ ID NO: 2859768 - RNA, 19 nt, Artificial Sequence
  Description of Artificial Sequence: Synthetic oligonucleotide
caggucaaugccauugaca

SEQ ID NO: 2859769 - RNA, 19 nt, Artificial Sequence
  Description of Artificial Sequence: Synthetic oligonucleotide
cagaggguagagauacuuc

SEQ ID NO: 2859770 - RNA, 19 nt, Artificial Sequence
  Description of Artificial Sequence: Synthetic oligonucleotide
cagcuuuccuucugagugc

SEQ ID NO: 2859771 - RNA, 19 nt, Artificial Sequence
  Description of Artificial Sequence: Synthetic oligonucleotide
gacuccuucugcaucaaaa

SEQ ID NO: 2859772 - RNA, 19 nt, Artificial Sequence
  Description of Artificial Sequence: Synthetic oligonucleotide
cacuucuuuacuggugagc

SEQ ID NO: 2859773 - RNA, 19 nt, Artificial Sequence
  Description of Artificial Sequence: Synthetic oligonucleotide
gugagaggagagaccaggg

SEQ ID NO: 2859774 - RNA, 19 nt, Artificial Sequence
  Description of Artificial Sequence: Synthetic oligonucleotide
gaggacaucguggggugag

SEQ ID NO: 2859775 - RNA, 19 nt, Artificial Sequence
  Description of Artificial Sequence: Synthetic oligonucleotide
cccaaagccagguccaggg

SEQ ID NO: 2859776 - RNA, 19 nt, Artificial Sequence
  Description of Artificial Sequence: Synthetic oligonucleotide
caccaggucaaugccauug

SEQ ID NO: 2859777 - RNA, 19 nt, Artificial Sequence
  Description of Artificial Sequence: Synthetic oligonucleotide
gccauugacaucuaugugu

SEQ ID NO: 2859778 - RNA, 19 nt, Artificial Sequence
  Description of Artificial Sequence: Synthetic oligonucleotide
agagguggcggaaccagag

SEQ ID NO: 2859779 - RNA, 19 nt, Artificial Sequence
  Description of Artificial Sequence: Synthetic oligonucleotide
cuucuuuacuggugagcug

SEQ ID NO: 2859780 - RNA, 19 nt, Artificial Sequence
  Description of Artificial Sequence: Synthetic oligonucleotide
cugugccacuucuuuacug

SEQ ID NO: 2859781 - RNA, 19 nt, Artificial Sequence
  Description of Artificial Sequence: Synthetic oligonucleotide
uagagguggcggaaccaga

SEQ ID NO: 2859782 - RNA, 19 nt, Artificial Sequence
  Description of Artificial Sequence: Synthetic oligonucleotide
acaaagcaauaugauugcu

SEQ ID NO: 2859783 - RNA, 19 nt, Artificial Sequence
  Description of Artificial Sequence: Synthetic oligonucleotide
uccguagcacauucacaga

SEQ ID NO: 2859784 - RNA, 19 nt, Artificial Sequence
  Description of Artificial Sequence: Synthetic oligonucleotide
agagcacccuuuaggcagc

SEQ ID NO: 2859785 - RNA, 19 nt, Artificial Sequence
  Description of Artificial Sequence: Synthetic oligonucleotide
cugugguggcaggacaugg

SEQ ID NO: 2859786 - RNA, 19 nt, Artificial Sequence
  Description of Artificial Sequence: Synthetic oligonucleotide
ugauugcugugaccacuga

SEQ ID NO: 2859787 - RNA, 19 nt, Artificial Sequence
  Description of Artificial Sequence: Synthetic oligonucleotide
gaggaacuguagugaguug

SEQ ID NO: 2859788 - RNA, 19 nt, Artificial Sequence
  Description of Artificial Sequence: Synthetic oligonucleotide
augauugcugugaccacug

SEQ ID NO: 2859789 - RNA, 19 nt, Artificial Sequence
  Description of Artificial Sequence: Synthetic oligonucleotide
cacauucacagacuucaga

SEQ ID NO: 2859790 - RNA, 19 nt, Artificial Sequence
  Description of Artificial Sequence: Synthetic oligonucleotide
uacuuccguagcacauuca

SEQ ID NO: 2859791 - RNA, 19 nt, Artificial Sequence
  Description of Artificial Sequence: Synthetic oligonucleotide
cacucugugucccacugca

SEQ ID NO: 2859792 - RNA, 19 nt, Artificial Sequence
  Description of Artificial Sequence: Synthetic oligonucleotide
accagaggagcugacugug

SEQ ID NO: 2859793 - RNA, 19 nt, Artificial Sequence
  Description of Artificial Sequence: Synthetic oligonucleotide
uagcacauucacagacuuc

SEQ ID NO: 2859794 - RNA, 19 nt, Artificial Sequence
  Description of Artificial Sequence: Synthetic oligonucleotide
ucugagugcagggcucuca

SEQ ID NO: 2859795 - RNA, 19 nt, Artificial Sequence
  Description of Artificial Sequence: Synthetic oligonucleotide
gagcugacugugguggcag

SEQ ID NO: 2859796 - RNA, 19 nt, Artificial Sequence
  Description of Artificial Sequence: Synthetic oligonucleotide
uggcggaaccagaggagcu

SEQ ID NO: 2859797 - RNA, 19 nt, Artificial Sequence
  Description of Artificial Sequence: Synthetic oligonucleotide
cucauguaucuggagaaga

SEQ ID NO: 2859798 - RNA, 19 nt, Artificial Sequence
  Description of Artificial Sequence: Synthetic oligonucleotide
ucucacagcucuguacaaa

SEQ ID NO: 2859799 - RNA, 19 nt, Artificial Sequence
  Description of Artificial Sequence: Synthetic oligonucleotide
acuucagaguaaguacaga

SEQ ID NO: 2859800 - RNA, 19 nt, Artificial Sequence
  Description of Artificial Sequence: Synthetic oligonucleotide
cugagugcagggcucucac

SEQ ID NO: 2859801 - RNA, 19 nt, Artificial Sequence
  Description of Artificial Sequence: Synthetic oligonucleotide
ugugucccacugcacuccu

SEQ ID NO: 2859802 - RNA, 19 nt, Artificial Sequence
  Description of Artificial Sequence: Synthetic oligonucleotide
cuuccguagcacauucaca

SEQ ID NO: 2859803 - RNA, 19 nt, Artificial Sequence
  Description of Artificial Sequence: Synthetic oligonucleotide
agauacuuccguagcacau

SEQ ID NO: 2859804 - RNA, 19 nt, Artificial Sequence
  Description of Artificial Sequence: Synthetic oligonucleotide
gcucucacagcucuguaca

SEQ ID NO: 2859805 - RNA, 19 nt, Artificial Sequence
  Description of Artificial Sequence: Synthetic oligonucleotide
cacccuuuaggcagcuuuc

SEQ ID NO: 2859806 - RNA, 19 nt, Artificial Sequence
  Description of Artificial Sequence: Synthetic oligonucleotide
guaaguacagagcacccuu

SEQ ID NO: 2859807 - RNA, 19 nt, Artificial Sequence
  Description of Artificial Sequence: Synthetic oligonucleotide
ugagugcagggcucucaca

SEQ ID NO: 2859808 - RNA, 19 nt, Artificial Sequence
  Description of Artificial Sequence: Synthetic oligonucleotide
cauugacaucuauguguug

SEQ ID NO: 2859809 - RNA, 19 nt, Artificial Sequence
  Description of Artificial Sequence: Synthetic oligonucleotide
agaagaugacguagaggug

SEQ ID NO: 2859810 - RNA, 19 nt, Artificial Sequence
  Description of Artificial Sequence: Synthetic oligonucleotide
cuguagugaguugauucuc

SEQ ID NO: 2859811 - RNA, 19 nt, Artificial Sequence
  Description of Artificial Sequence: Synthetic oligonucleotide
ccuucugcaucaaaaguca

SEQ ID NO: 2859812 - RNA, 19 nt, Artificial Sequence
  Description of Artificial Sequence: Synthetic oligonucleotide
uggcuuucuuggccugugc

SEQ ID NO: 2859813 - RNA, 19 nt, Artificial Sequence
  Description of Artificial Sequence: Synthetic oligonucleotide
guggggugagaggagagac

SEQ ID NO: 2859814 - RNA, 19 nt, Artificial Sequence
  Description of Artificial Sequence: Synthetic oligonucleotide
aggcagcuuuccuucugag

SEQ ID NO: 2859815 - RNA, 19 nt, Artificial Sequence
  Description of Artificial Sequence: Synthetic oligonucleotide
uggccugugccacuucuuu

SEQ ID NO: 2859816 - RNA, 19 nt, Artificial Sequence
  Description of Artificial Sequence: Synthetic oligonucleotide
uggcuucagaggaacugua

SEQ ID NO: 2859817 - RNA, 19 nt, Artificial Sequence
  Description of Artificial Sequence: Synthetic oligonucleotide
gccacuucuuuacugguga

SEQ ID NO: 2859818 - RNA, 19 nt, Artificial Sequence
  Description of Artificial Sequence: Synthetic oligonucleotide
acauggcuuucuuggccug

SEQ ID NO: 2859819 - RNA, 19 nt, Artificial Sequence
  Description of Artificial Sequence: Synthetic oligonucleotide
guggcggaaccagaggagc

SEQ ID NO: 2859820 - RNA, 19 nt, Artificial Sequence
  Description of Artificial Sequence: Synthetic oligonucleotide
acagcucuguacaaagcaa

SEQ ID NO: 2859821 - RNA, 19 nt, Artificial Sequence
  Description of Artificial Sequence: Synthetic oligonucleotide
agcugacugugguggcagg

SEQ ID NO: 2859822 - RNA, 19 nt, Artificial Sequence
  Description of Artificial Sequence: Synthetic oligonucleotide
uuucuuggccugugccacu

SEQ ID NO: 2859823 - RNA, 19 nt, Artificial Sequence
  Description of Artificial Sequence: Synthetic oligonucleotide
ccguagcacauucacagac

SEQ ID NO: 2859824 - RNA, 19 nt, Artificial Sequence
  Description of Artificial Sequence: Synthetic oligonucleotide
cacugacuccuucugcauc

SEQ ID NO: 2859825 - RNA, 19 nt, Artificial Sequence
  Description of Artificial Sequence: Synthetic oligonucleotide
cugcaucaaaagucaccac

SEQ ID NO: 2859826 - RNA, 19 nt, Artificial Sequence
  Description of Artificial Sequence: Synthetic oligonucleotide
gcacuccugggucauacug

SEQ ID NO: 2859827 - RNA, 19 nt, Artificial Sequence
  Description of Artificial Sequence: Synthetic oligonucleotide
agcuuuccuucugagugca

SEQ ID NO: 2859828 - RNA, 19 nt, Artificial Sequence
  Description of Artificial Sequence: Synthetic oligonucleotide
caucguggggugagaggag

SEQ ID NO: 2859829 - RNA, 19 nt, Artificial Sequence
  Description of Artificial Sequence: Synthetic oligonucleotide
agaugacguagagguggcg

SEQ ID NO: 2859830 - RNA, 19 nt, Artificial Sequence
  Description of Artificial Sequence: Synthetic oligonucleotide
cugugucccacugcacucc

SEQ ID NO: 2859831 - RNA, 19 nt, Artificial Sequence
  Description of Artificial Sequence: Synthetic oligonucleotide
caucuauguguuggaggag

SEQ ID NO: 2859832 - RNA, 19 nt, Artificial Sequence
  Description of Artificial Sequence: Synthetic oligonucleotide
cuguacaaagcaauaugau

SEQ ID NO: 2859833 - RNA, 19 nt, Artificial Sequence
  Description of Artificial Sequence: Synthetic oligonucleotide
gccugugccacuucuuuac

SEQ ID NO: 2859834 - RNA, 19 nt, Artificial Sequence
  Description of Artificial Sequence: Synthetic oligonucleotide
ugagcuggaagaggacauc

SEQ ID NO: 2859835 - RNA, 19 nt, Artificial Sequence
  Description of Artificial Sequence: Synthetic oligonucleotide
aggagggugcuggccacac

SEQ ID NO: 2859836 - RNA, 19 nt, Artificial Sequence
  Description of Artificial Sequence: Synthetic oligonucleotide
gacguagagguggcggaac

SEQ ID NO: 2859837 - RNA, 19 nt, Artificial Sequence
  Description of Artificial Sequence: Synthetic oligonucleotide
uugguuuguuucugccuuu

SEQ ID NO: 2859838 - RNA, 19 nt, Artificial Sequence
  Description of Artificial Sequence: Synthetic oligonucleotide
ugguggcaggacauggcuu

SEQ ID NO: 2859839 - RNA, 19 nt, Artificial Sequence
  Description of Artificial Sequence: Synthetic oligonucleotide
acacacucugugucccacu

SEQ ID NO: 2859840 - RNA, 19 nt, Artificial Sequence
  Description of Artificial Sequence: Synthetic oligonucleotide
uccagaggguagagauacu

SEQ ID NO: 2859841 - RNA, 19 nt, Artificial Sequence
  Description of Artificial Sequence: Synthetic oligonucleotide
gcuuucuuggccugugcca

SEQ ID NO: 2859842 - RNA, 19 nt, Artificial Sequence
  Description of Artificial Sequence: Synthetic oligonucleotide
guagcacauucacagacuu

SEQ ID NO: 2859843 - RNA, 19 nt, Artificial Sequence
  Description of Artificial Sequence: Synthetic oligonucleotide
ugacuccuucugcaucaaa

SEQ ID NO: 2859844 - RNA, 19 nt, Artificial Sequence
  Description of Artificial Sequence: Synthetic oligonucleotide
ggcucucacagcucuguac

SEQ ID NO: 2859845 - RNA, 19 nt, Artificial Sequence
  Description of Artificial Sequence: Synthetic oligonucleotide
gucccacugcacuccuggg

SEQ ID NO: 2859846 - RNA, 19 nt, Artificial Sequence
  Description of Artificial Sequence: Synthetic oligonucleotide
acugugguggcaggacaug

SEQ ID NO: 2859847 - RNA, 19 nt, Artificial Sequence
  Description of Artificial Sequence: Synthetic oligonucleotide
gguuuguuucugccuuuug

SEQ ID NO: 2859848 - RNA, 19 nt, Artificial Sequence
  Description of Artificial Sequence: Synthetic oligonucleotide
ugacguagagguggcggaa

SEQ ID NO: 2859849 - RNA, 19 nt, Artificial Sequence
  Description of Artificial Sequence: Synthetic oligonucleotide
acucugugucccacugcac

SEQ ID NO: 2859850 - RNA, 19 nt, Artificial Sequence
  Description of Artificial Sequence: Synthetic oligonucleotide
ugcacuccugggucauacu

SEQ ID NO: 2859851 - RNA, 19 nt, Artificial Sequence
  Description of Artificial Sequence: Synthetic oligonucleotide
ggugagcuggaagaggaca

SEQ ID NO: 2859852 - RNA, 19 nt, Artificial Sequence
  Description of Artificial Sequence: Synthetic oligonucleotide
cugcacuccugggucauac

SEQ ID NO: 2859853 - RNA, 19 nt, Artificial Sequence
  Description of Artificial Sequence: Synthetic oligonucleotide
gugaccacugacuccuucu

SEQ ID NO: 2859854 - RNA, 19 nt, Artificial Sequence
  Description of Artificial Sequence: Synthetic oligonucleotide
agucaccaccaggucaaug

SEQ ID NO: 2859855 - RNA, 19 nt, Artificial Sequence
  Description of Artificial Sequence: Synthetic oligonucleotide
ggcuucagaggaacuguag

SEQ ID NO: 2859856 - RNA, 19 nt, Artificial Sequence
  Description of Artificial Sequence: Synthetic oligonucleotide
ggccacacacucugugucc

SEQ ID NO: 2859857 - RNA, 19 nt, Artificial Sequence
  Description of Artificial Sequence: Synthetic oligonucleotide
agggcucucacagcucugu

SEQ ID NO: 2859858 - RNA, 19 nt, Artificial Sequence
  Description of Artificial Sequence: Synthetic oligonucleotide
gcaggacauggcuuucuug

SEQ ID NO: 2859859 - RNA, 19 nt, Artificial Sequence
  Description of Artificial Sequence: Synthetic oligonucleotide
cucugugucccacugcacu

SEQ ID NO: 2859860 - RNA, 19 nt, Artificial Sequence
  Description of Artificial Sequence: Synthetic oligonucleotide
gugaguugauucucaugua

SEQ ID NO: 2859861 - RNA, 19 nt, Artificial Sequence
  Description of Artificial Sequence: Synthetic oligonucleotide
cuccuucugcaucaaaagu

SEQ ID NO: 2859862 - RNA, 19 nt, Artificial Sequence
  Description of Artificial Sequence: Synthetic oligonucleotide
cagcccaaagccaggucca

SEQ ID NO: 2859863 - RNA, 19 nt, Artificial Sequence
  Description of Artificial Sequence: Synthetic oligonucleotide
uuggccugugccacuucuu

SEQ ID NO: 2859864 - RNA, 19 nt, Artificial Sequence
  Description of Artificial Sequence: Synthetic oligonucleotide
agcucuguacaaagcaaua

SEQ ID NO: 2859865 - RNA, 19 nt, Artificial Sequence
  Description of Artificial Sequence: Synthetic oligonucleotide
gguggcggaaccagaggag

SEQ ID NO: 2859866 - RNA, 19 nt, Artificial Sequence
  Description of Artificial Sequence: Synthetic oligonucleotide
ugguuuguuucugccuuuu

SEQ ID NO: 2859867 - RNA, 19 nt, Artificial Sequence
  Description of Artificial Sequence: Synthetic oligonucleotide
gcuucagaggaacuguagu

SEQ ID NO: 2859868 - RNA, 19 nt, Artificial Sequence
  Description of Artificial Sequence: Synthetic oligonucleotide
gauacuuccguagcacauu

SEQ ID NO: 2859869 - RNA, 19 nt, Artificial Sequence
  Description of Artificial Sequence: Synthetic oligonucleotide
ggacaucguggggugagag

SEQ ID NO: 2859870 - RNA, 19 nt, Artificial Sequence
  Description of Artificial Sequence: Synthetic oligonucleotide
guagugaguugauucucau

SEQ ID NO: 2859871 - RNA, 19 nt, Artificial Sequence
  Description of Artificial Sequence: Synthetic oligonucleotide
uggcaggacauggcuuucu

SEQ ID NO: 2859872 - RNA, 19 nt, Artificial Sequence
  Description of Artificial Sequence: Synthetic oligonucleotide
ccagaggagcugacugugg

SEQ ID NO: 2859873 - RNA, 19 nt, Artificial Sequence
  Description of Artificial Sequence: Synthetic oligonucleotide
gugguggcaggacauggcu

SEQ ID NO: 2859874 - RNA, 19 nt, Artificial Sequence
  Description of Artificial Sequence: Synthetic oligonucleotide
agggcagauccagagggua

SEQ ID NO: 2859875 - RNA, 19 nt, Artificial Sequence
  Description of Artificial Sequence: Synthetic oligonucleotide
agcuggaagaggacaucgu

SEQ ID NO: 2859876 - RNA, 19 nt, Artificial Sequence
  Description of Artificial Sequence: Synthetic oligonucleotide
gauccagaggguagagaua

SEQ ID NO: 2859877 - RNA, 19 nt, Artificial Sequence
  Description of Artificial Sequence: Synthetic oligonucleotide
gcugugaccacugacuccu

SEQ ID NO: 2859878 - RNA, 19 nt, Artificial Sequence
  Description of Artificial Sequence: Synthetic oligonucleotide
gggugcuggccacacacuc

SEQ ID NO: 2859879 - RNA, 19 nt, Artificial Sequence
  Description of Artificial Sequence: Synthetic oligonucleotide
ggucaaugccauugacauc

SEQ ID NO: 2859880 - RNA, 19 nt, Artificial Sequence
  Description of Artificial Sequence: Synthetic oligonucleotide
ucuuggccugugccacuuc

SEQ ID NO: 2859881 - RNA, 19 nt, Artificial Sequence
  Description of Artificial Sequence: Synthetic oligonucleotide
cagcucuguacaaagcaau

SEQ ID NO: 2859882 - RNA, 19 nt, Artificial Sequence
  Description of Artificial Sequence: Synthetic oligonucleotide
gaggagagaccagggcaga

SEQ ID NO: 2859883 - RNA, 19 nt, Artificial Sequence
  Description of Artificial Sequence: Synthetic oligonucleotide
agcccaaagccagguccag

SEQ ID NO: 2859884 - RNA, 19 nt, Artificial Sequence
  Description of Artificial Sequence: Synthetic oligonucleotide
gggcagauccagaggguag

SEQ ID NO: 2859885 - RNA, 19 nt, Artificial Sequence
  Description of Artificial Sequence: Synthetic oligonucleotide
cucucacagcucuguacaa

SEQ ID NO: 2859886 - RNA, 19 nt, Artificial Sequence
  Description of Artificial Sequence: Synthetic oligonucleotide
gccacacacucuguguccc

SEQ ID NO: 2859887 - RNA, 19 nt, Artificial Sequence
  Description of Artificial Sequence: Synthetic oligonucleotide
ccacuucuuuacuggugag

SEQ ID NO: 2859888 - RNA, 19 nt, Artificial Sequence
  Description of Artificial Sequence: Synthetic oligonucleotide
aagccagguccagggacuu

SEQ ID NO: 2859889 - RNA, 19 nt, Artificial Sequence
  Description of Artificial Sequence: Synthetic oligonucleotide
ggagagaccagggcagauc

SEQ ID NO: 2859890 - RNA, 19 nt, Artificial Sequence
  Description of Artificial Sequence: Synthetic oligonucleotide
ccaggucaaugccauugac

SEQ ID NO: 2859891 - RNA, 19 nt, Artificial Sequence
  Description of Artificial Sequence: Synthetic oligonucleotide
ggguagagauacuuccgua

SEQ ID NO: 2859892 - RNA, 19 nt, Artificial Sequence
  Description of Artificial Sequence: Synthetic oligonucleotide
ggcggaaccagaggagcug

SEQ ID NO: 2859893 - RNA, 19 nt, Artificial Sequence
  Description of Artificial Sequence: Synthetic oligonucleotide
cagaggagcugacuguggu

SEQ ID NO: 2859894 - RNA, 19 nt, Artificial Sequence
  Description of Artificial Sequence: Synthetic oligonucleotide
agggacuucuugguuuguu

SEQ ID NO: 2859895 - RNA, 19 nt, Artificial Sequence
  Description of Artificial Sequence: Synthetic oligonucleotide
agaggacaucgugggguga

SEQ ID NO: 2859896 - RNA, 19 nt, Artificial Sequence
  Description of Artificial Sequence: Synthetic oligonucleotide
cagaggaacuguagugagu

SEQ ID NO: 2859897 - RNA, 19 nt, Artificial Sequence
  Description of Artificial Sequence: Synthetic oligonucleotide
cagggcucucacagcucug

SEQ ID NO: 2859898 - RNA, 19 nt, Artificial Sequence
  Description of Artificial Sequence: Synthetic oligonucleotide
ggaggagggugcuggccac

SEQ ID NO: 2859899 - RNA, 19 nt, Artificial Sequence
  Description of Artificial Sequence: Synthetic oligonucleotide
agaccagggcagauccaga

SEQ ID NO: 2859900 - RNA, 19 nt, Artificial Sequence
  Description of Artificial Sequence: Synthetic oligonucleotide
gguccagggacuucuuggu

SEQ ID NO: 2859901 - RNA, 19 nt, Artificial Sequence
  Description of Artificial Sequence: Synthetic oligonucleotide
cagauccagaggguagaga

SEQ ID NO: 2859902 - RNA, 19 nt, Artificial Sequence
  Description of Artificial Sequence: Synthetic oligonucleotide
gacugugguggcaggacau

SEQ ID NO: 2859903 - RNA, 19 nt, Artificial Sequence
  Description of Artificial Sequence: Synthetic oligonucleotide
aggagagaccagggcagau

SEQ ID NO: 2859904 - RNA, 19 nt, Artificial Sequence
  Description of Artificial Sequence: Synthetic oligonucleotide
aggacaucguggggugaga

SEQ ID NO: 2859905 - RNA, 19 nt, Artificial Sequence
  Description of Artificial Sequence: Synthetic oligonucleotide
gguggcaggacauggcuuu

SEQ ID NO: 2859906 - RNA, 19 nt, Artificial Sequence
  Description of Artificial Sequence: Synthetic oligonucleotide
gugagcuggaagaggacau

SEQ ID NO: 2859907 - RNA, 19 nt, Artificial Sequence
  Description of Artificial Sequence: Synthetic oligonucleotide
agagaccagggcagaucca

SEQ ID NO: 2859908 - RNA, 19 nt, Artificial Sequence
  Description of Artificial Sequence: Synthetic oligonucleotide
gugccacuucuuuacuggu

SEQ ID NO: 2859909 - RNA, 19 nt, Artificial Sequence
  Description of Artificial Sequence: Synthetic oligonucleotide
aagucaccaccaggucaau

SEQ ID NO: 2859910 - RNA, 19 nt, Artificial Sequence
  Description of Artificial Sequence: Synthetic oligonucleotide
uucugagugcagggcucuc

SEQ ID NO: 2859911 - RNA, 19 nt, Artificial Sequence
  Description of Artificial Sequence: Synthetic oligonucleotide
cuuuacuggugagcuggaa

SEQ ID NO: 2859912 - RNA, 19 nt, Artificial Sequence
  Description of Artificial Sequence: Synthetic oligonucleotide
gaacuguagugaguugauu

SEQ ID NO: 2859913 - RNA, 19 nt, Artificial Sequence
  Description of Artificial Sequence: Synthetic oligonucleotide
gcccaaagccagguccagg

SEQ ID NO: 2859914 - RNA, 19 nt, Artificial Sequence
  Description of Artificial Sequence: Synthetic oligonucleotide
agggugcuggccacacacu

SEQ ID NO: 2859915 - RNA, 19 nt, Artificial Sequence
  Description of Artificial Sequence: Synthetic oligonucleotide
ccauugacaucuauguguu

SEQ ID NO: 2859916 - RNA, 19 nt, Artificial Sequence
  Description of Artificial Sequence: Synthetic oligonucleotide
ggcagcuuuccuucugagu

SEQ ID NO: 2859917 - RNA, 19 nt, Artificial Sequence
  Description of Artificial Sequence: Synthetic oligonucleotide
cuauguguuggaggagggu

SEQ ID NO: 2859918 - RNA, 19 nt, Artificial Sequence
  Description of Artificial Sequence: Synthetic oligonucleotide
ggagcugacugugguggca

SEQ ID NO: 2859919 - RNA, 19 nt, Artificial Sequence
  Description of Artificial Sequence: Synthetic oligonucleotide
gcacccuuuaggcagcuuu

SEQ ID NO: 2859920 - RNA, 19 nt, Artificial Sequence
  Description of Artificial Sequence: Synthetic oligonucleotide
gaggagggugcuggccaca

SEQ ID NO: 2859921 - RNA, 19 nt, Artificial Sequence
  Description of Artificial Sequence: Synthetic oligonucleotide
cacagacuucagaguaagu

SEQ ID NO: 2859922 - RNA, 19 nt, Artificial Sequence
  Description of Artificial Sequence: Synthetic oligonucleotide
gggugagaggagagaccag

SEQ ID NO: 2859923 - RNA, 19 nt, Artificial Sequence
  Description of Artificial Sequence: Synthetic oligonucleotide
ggaaccagaggagcugacu

SEQ ID NO: 2859924 - RNA, 19 nt, Artificial Sequence
  Description of Artificial Sequence: Synthetic oligonucleotide
ggaacuguagugaguugau

SEQ ID NO: 2859925 - RNA, 19 nt, Artificial Sequence
  Description of Artificial Sequence: Synthetic oligonucleotide
ccuuuaggcagcuuuccuu

SEQ ID NO: 2859926 - RNA, 19 nt, Artificial Sequence
  Description of Artificial Sequence: Synthetic oligonucleotide
gugucccacugcacuccug

SEQ ID NO: 2859927 - RNA, 19 nt, Artificial Sequence
  Description of Artificial Sequence: Synthetic oligonucleotide
ggccugugccacuucuuua

SEQ ID NO: 2859928 - RNA, 19 nt, Artificial Sequence
  Description of Artificial Sequence: Synthetic oligonucleotide
cagggcagauccagagggu

SEQ ID NO: 2859929 - RNA, 19 nt, Artificial Sequence
  Description of Artificial Sequence: Synthetic oligonucleotide
gcggaaccagaggagcuga

SEQ ID NO: 2859930 - RNA, 19 nt, Artificial Sequence
  Description of Artificial Sequence: Synthetic oligonucleotide
gcuuuccuucugagugcag

SEQ ID NO: 2859931 - RNA, 19 nt, Artificial Sequence
  Description of Artificial Sequence: Synthetic oligonucleotide
ccaaagccagguccaggga

SEQ ID NO: 2859932 - RNA, 19 nt, Artificial Sequence
  Description of Artificial Sequence: Synthetic oligonucleotide
ggugcuggccacacacucu

SEQ ID NO: 2859933 - RNA, 19 nt, Artificial Sequence
  Description of Artificial Sequence: Synthetic oligonucleotide
cguagcacauucacagacu

SEQ ID NO: 2859934 - RNA, 19 nt, Artificial Sequence
  Description of Artificial Sequence: Synthetic oligonucleotide
ggagggugcuggccacaca

SEQ ID NO: 2859935 - RNA, 19 nt, Artificial Sequence
  Description of Artificial Sequence: Synthetic oligonucleotide
acugcacuccugggucaua

SEQ ID NO: 2859936 - RNA, 19 nt, Artificial Sequence
  Description of Artificial Sequence: Synthetic oligonucleotide
ccacugcacuccuggguca

SEQ ID NO: 2859937 - RNA, 19 nt, Artificial Sequence
  Description of Artificial Sequence: Synthetic oligonucleotide
ggcaggacauggcuuucuu

SEQ ID NO: 2859938 - RNA, 19 nt, Artificial Sequence
  Description of Artificial Sequence: Synthetic oligonucleotide
agcacccuuuaggcagcuu

SEQ ID NO: 2859939 - RNA, 19 nt, Artificial Sequence
  Description of Artificial Sequence: Synthetic oligonucleotide
cggaaccagaggagcugac

SEQ ID NO: 2859940 - RNA, 19 nt, Artificial Sequence
  Description of Artificial Sequence: Synthetic oligonucleotide
ccagaggguagagauacuu

SEQ ID NO: 2859941 - RNA, 19 nt, Artificial Sequence
  Description of Artificial Sequence: Synthetic oligonucleotide
cccuuuaggcagcuuuccu

SEQ ID NO: 2859942 - RNA, 19 nt, Artificial Sequence
  Description of Artificial Sequence: Synthetic oligonucleotide
gggcucucacagcucugua

SEQ ID NO: 2859943 - RNA, 19 nt, Artificial Sequence
  Description of Artificial Sequence: Synthetic oligonucleotide
gagcacccuuuaggcagcu

SEQ ID NO: 2859944 - RNA, 19 nt, Artificial Sequence
  Description of Artificial Sequence: Synthetic oligonucleotide
cguagagguggcggaacca

SEQ ID NO: 2859945 - RNA, 19 nt, Artificial Sequence
  Description of Artificial Sequence: Synthetic oligonucleotide
ccugugccacuucuuuacu

SEQ ID NO: 2859946 - RNA, 19 nt, Artificial Sequence
  Description of Artificial Sequence: Synthetic oligonucleotide
cguggggugagaggagaga

SEQ ID NO: 2859947 - RNA, 19 nt, Artificial Sequence
  Description of Artificial Sequence: Synthetic oligonucleotide
cacugcacuccugggucau

SEQ ID NO: 2859948 - RNA, 19 nt, Artificial Sequence
  Description of Artificial Sequence: Synthetic oligonucleotide
ccacugacuccuucugcau

SEQ ID NO: 2859949 - RNA, 19 nt, Artificial Sequence
  Description of Artificial Sequence: Synthetic oligonucleotide
cagggacuucuugguuugu

SEQ ID NO: 2859950 - RNA, 19 nt, Artificial Sequence
  Description of Artificial Sequence: Synthetic oligonucleotide
cugugaccacugacuccuu

SEQ ID NO: 2859951 - RNA, 19 nt, Artificial Sequence
  Description of Artificial Sequence: Synthetic oligonucleotide
ccaccaggucaaugccauu

SEQ ID NO: 2859952 - RNA, 19 nt, Artificial Sequence
  Description of Artificial Sequence: Synthetic oligonucleotide
aacgucaccaggcagaucc

SEQ ID NO: 2859953 - RNA, 19 nt, Artificial Sequence
  Description of Artificial Sequence: Synthetic oligonucleotide
uuaauuucacauuuaacag

SEQ ID NO: 2859954 - RNA, 19 nt, Artificial Sequence
  Description of Artificial Sequence: Synthetic oligonucleotide
aauuucacauuuaacagcg

SEQ ID NO: 2859955 - RNA, 19 nt, Artificial Sequence
  Description of Artificial Sequence: Synthetic oligonucleotide
cuuaauuucacauuuaaca

SEQ ID NO: 2859956 - RNA, 19 nt, Artificial Sequence
  Description of Artificial Sequence: Synthetic oligonucleotide
ucagaacucaauuaggugc

SEQ ID NO: 2859957 - RNA, 19 nt, Artificial Sequence
  Description of Artificial Sequence: Synthetic oligonucleotide
ucuuucagaacucaauuag

SEQ ID NO: 2859958 - RNA, 19 nt, Artificial Sequence
  Description of Artificial Sequence: Synthetic oligonucleotide
uugagggaugauaagaacg

SEQ ID NO: 2859959 - RNA, 19 nt, Artificial Sequence
  Description of Artificial Sequence: Synthetic oligonucleotide
uuuaacagcguauuaacca

SEQ ID NO: 2859960 - RNA, 19 nt, Artificial Sequence
  Description of Artificial Sequence: Synthetic oligonucleotide
aagaagcacacguagauca

SEQ ID NO: 2859961 - RNA, 19 nt, Artificial Sequence
  Description of Artificial Sequence: Synthetic oligonucleotide
uguggaacaaaucuuucag

SEQ ID NO: 2859962 - RNA, 19 nt, Artificial Sequence
  Description of Artificial Sequence: Synthetic oligonucleotide
uuuaacacuugccuguucc

SEQ ID NO: 2859963 - RNA, 19 nt, Artificial Sequence
  Description of Artificial Sequence: Synthetic oligonucleotide
acacguagaucacuaaucc

SEQ ID NO: 2859964 - RNA, 19 nt, Artificial Sequence
  Description of Artificial Sequence: Synthetic oligonucleotide
uaauuucacauuuaacagc

SEQ ID NO: 2859965 - RNA, 19 nt, Artificial Sequence
  Description of Artificial Sequence: Synthetic oligonucleotide
uuuucacacagacacacga

SEQ ID NO: 2859966 - RNA, 19 nt, Artificial Sequence
  Description of Artificial Sequence: Synthetic oligonucleotide
gaugauaagaacgucacca

SEQ ID NO: 2859967 - RNA, 19 nt, Artificial Sequence
  Description of Artificial Sequence: Synthetic oligonucleotide
cuuccuuucacucugcccc

SEQ ID NO: 2859968 - RNA, 19 nt, Artificial Sequence
  Description of Artificial Sequence: Synthetic oligonucleotide
uuucagaacucaauuaggu

SEQ ID NO: 2859969 - RNA, 19 nt, Artificial Sequence
  Description of Artificial Sequence: Synthetic oligonucleotide
ugauaagaacgucaccagg

SEQ ID NO: 2859970 - RNA, 19 nt, Artificial Sequence
  Description of Artificial Sequence: Synthetic oligonucleotide
guuagagugauacugcaug

SEQ ID NO: 2859971 - RNA, 19 nt, Artificial Sequence
  Description of Artificial Sequence: Synthetic oligonucleotide
uuaggugcguguauggucc

SEQ ID NO: 2859972 - RNA, 19 nt, Artificial Sequence
  Description of Artificial Sequence: Synthetic oligonucleotide
gauacugcaugcuucuucc

SEQ ID NO: 2859973 - RNA, 19 nt, Artificial Sequence
  Description of Artificial Sequence: Synthetic oligonucleotide
uucacuuaauuucacauuu

SEQ ID NO: 2859974 - RNA, 19 nt, Artificial Sequence
  Description of Artificial Sequence: Synthetic oligonucleotide
gaacaaaucuuucagaacu

SEQ ID NO: 2859975 - RNA, 19 nt, Artificial Sequence
  Description of Artificial Sequence: Synthetic oligonucleotide
gauaagaacgucaccaggc

SEQ ID NO: 2859976 - RNA, 19 nt, Artificial Sequence
  Description of Artificial Sequence: Synthetic oligonucleotide
gauagagacgugcuugccg

SEQ ID NO: 2859977 - RNA, 19 nt, Artificial Sequence
  Description of Artificial Sequence: Synthetic oligonucleotide
aaguucuuugucugcuccc

SEQ ID NO: 2859978 - RNA, 19 nt, Artificial Sequence
  Description of Artificial Sequence: Synthetic oligonucleotide
cuugaagaagcacacguag

SEQ ID NO: 2859979 - RNA, 19 nt, Artificial Sequence
  Description of Artificial Sequence: Synthetic oligonucleotide
uggaucuccacccacugag

SEQ ID NO: 2859980 - RNA, 19 nt, Artificial Sequence
  Description of Artificial Sequence: Synthetic oligonucleotide
guauuaaccaucuugggaa

SEQ ID NO: 2859981 - RNA, 19 nt, Artificial Sequence
  Description of Artificial Sequence: Synthetic oligonucleotide
uugguguccagcuuuaaca

SEQ ID NO: 2859982 - RNA, 19 nt, Artificial Sequence
  Description of Artificial Sequence: Synthetic oligonucleotide
cuuucagaacucaauuagg

SEQ ID NO: 2859983 - RNA, 19 nt, Artificial Sequence
  Description of Artificial Sequence: Synthetic oligonucleotide
uggaacaaaucuuucagaa

SEQ ID NO: 2859984 - RNA, 19 nt, Artificial Sequence
  Description of Artificial Sequence: Synthetic oligonucleotide
auuaggugcguguaugguc

SEQ ID NO: 2859985 - RNA, 19 nt, Artificial Sequence
  Description of Artificial Sequence: Synthetic oligonucleotide
cauuuaacagcguauuaac

SEQ ID NO: 2859986 - RNA, 19 nt, Artificial Sequence
  Description of Artificial Sequence: Synthetic oligonucleotide
auuuaacagcguauuaacc

SEQ ID NO: 2859987 - RNA, 19 nt, Artificial Sequence
  Description of Artificial Sequence: Synthetic oligonucleotide
ugagggaugauaagaacgu

SEQ ID NO: 2859988 - RNA, 19 nt, Artificial Sequence
  Description of Artificial Sequence: Synthetic oligonucleotide
ugaagaagcacacguagau

SEQ ID NO: 2859989 - RNA, 19 nt, Artificial Sequence
  Description of Artificial Sequence: Synthetic oligonucleotide
agcguauuaaccaucuugg

SEQ ID NO: 2859990 - RNA, 19 nt, Artificial Sequence
  Description of Artificial Sequence: Synthetic oligonucleotide
ucugcucccuugaagaagc

SEQ ID NO: 2859991 - RNA, 19 nt, Artificial Sequence
  Description of Artificial Sequence: Synthetic oligonucleotide
aacucaauuaggugcgugu

SEQ ID NO: 2859992 - RNA, 19 nt, Artificial Sequence
  Description of Artificial Sequence: Synthetic oligonucleotide
cagaacucaauuaggugcg

SEQ ID NO: 2859993 - RNA, 19 nt, Artificial Sequence
  Description of Artificial Sequence: Synthetic oligonucleotide
uuugucugcucccuugaag

SEQ ID NO: 2859994 - RNA, 19 nt, Artificial Sequence
  Description of Artificial Sequence: Synthetic oligonucleotide
agaguuagagugauacugc

SEQ ID NO: 2859995 - RNA, 19 nt, Artificial Sequence
  Description of Artificial Sequence: Synthetic oligonucleotide
aggauagagacgugcuugc

SEQ ID NO: 2859996 - RNA, 19 nt, Artificial Sequence
  Description of Artificial Sequence: Synthetic oligonucleotide
uucagaacucaauuaggug

SEQ ID NO: 2859997 - RNA, 19 nt, Artificial Sequence
  Description of Artificial Sequence: Synthetic oligonucleotide
uuagagugauacugcaugc

SEQ ID NO: 2859998 - RNA, 19 nt, Artificial Sequence
  Description of Artificial Sequence: Synthetic oligonucleotide
acguagaucacuaauccuc

SEQ ID NO: 2859999 - RNA, 19 nt, Artificial Sequence
  Description of Artificial Sequence: Synthetic oligonucleotide
auugguguccagcuuuaac

SEQ ID NO: 2860000 - RNA, 19 nt, Artificial Sequence
  Description of Artificial Sequence: Synthetic oligonucleotide
uucacacagacacacgaac

SEQ ID NO: 2860001 - RNA, 19 nt, Artificial Sequence
  Description of Artificial Sequence: Synthetic oligonucleotide
uugucugcucccuugaaga

SEQ ID NO: 2860002 - RNA, 19 nt, Artificial Sequence
  Description of Artificial Sequence: Synthetic oligonucleotide
acaguucuaagccuuccuc

SEQ ID NO: 2860003 - RNA, 19 nt, Artificial Sequence
  Description of Artificial Sequence: Synthetic oligonucleotide
agauccaggauagagacgu

SEQ ID NO: 2860004 - RNA, 19 nt, Artificial Sequence
  Description of Artificial Sequence: Synthetic oligonucleotide
gaaguucuuugucugcucc

SEQ ID NO: 2860005 - RNA, 19 nt, Artificial Sequence
  Description of Artificial Sequence: Synthetic oligonucleotide
agugccgugcgccacuacc

SEQ ID NO: 2860006 - RNA, 19 nt, Artificial Sequence
  Description of Artificial Sequence: Synthetic oligonucleotide
uuucacauuuaacagcgua

SEQ ID NO: 2860007 - RNA, 19 nt, Artificial Sequence
  Description of Artificial Sequence: Synthetic oligonucleotide
gaucacuaauccucucugg

SEQ ID NO: 2860008 - RNA, 19 nt, Artificial Sequence
  Description of Artificial Sequence: Synthetic oligonucleotide
uucacauuuaacagcguau

SEQ ID NO: 2860009 - RNA, 19 nt, Artificial Sequence
  Description of Artificial Sequence: Synthetic oligonucleotide
augauaagaacgucaccag

SEQ ID NO: 2860010 - RNA, 19 nt, Artificial Sequence
  Description of Artificial Sequence: Synthetic oligonucleotide
uuaacagcguauuaaccau

SEQ ID NO: 2860011 - RNA, 19 nt, Artificial Sequence
  Description of Artificial Sequence: Synthetic oligonucleotide
agcgugcagacacugcugc

SEQ ID NO: 2860012 - RNA, 19 nt, Artificial Sequence
  Description of Artificial Sequence: Synthetic oligonucleotide
cagaguuagagugauacug

SEQ ID NO: 2860013 - RNA, 19 nt, Artificial Sequence
  Description of Artificial Sequence: Synthetic oligonucleotide
uagaucacuaauccucucu

SEQ ID NO: 2860014 - RNA, 19 nt, Artificial Sequence
  Description of Artificial Sequence: Synthetic oligonucleotide
uauuaaccaucuugggaag

SEQ ID NO: 2860015 - RNA, 19 nt, Artificial Sequence
  Description of Artificial Sequence: Synthetic oligonucleotide
agcuuuaacacuugccugu

SEQ ID NO: 2860016 - RNA, 19 nt, Artificial Sequence
  Description of Artificial Sequence: Synthetic oligonucleotide
uguuucacuuaauuucaca

SEQ ID NO: 2860017 - RNA, 19 nt, Artificial Sequence
  Description of Artificial Sequence: Synthetic oligonucleotide
uaagaacgucaccaggcag

SEQ ID NO: 2860018 - RNA, 19 nt, Artificial Sequence
  Description of Artificial Sequence: Synthetic oligonucleotide
uugccuguucccauaagug

SEQ ID NO: 2860019 - RNA, 19 nt, Artificial Sequence
  Description of Artificial Sequence: Synthetic oligonucleotide
ucaauuaggugcguguaug

SEQ ID NO: 2860020 - RNA, 19 nt, Artificial Sequence
  Description of Artificial Sequence: Synthetic oligonucleotide
aagccuuccuccuucccag

SEQ ID NO: 2860021 - RNA, 19 nt, Artificial Sequence
  Description of Artificial Sequence: Synthetic oligonucleotide
uccagcuuuaacacuugcc

SEQ ID NO: 2860022 - RNA, 19 nt, Artificial Sequence
  Description of Artificial Sequence: Synthetic oligonucleotide
aauacaguucuaagccuuc

SEQ ID NO: 2860023 - RNA, 19 nt, Artificial Sequence
  Description of Artificial Sequence: Synthetic oligonucleotide
gaagaaguucuuugucugc

SEQ ID NO: 2860024 - RNA, 19 nt, Artificial Sequence
  Description of Artificial Sequence: Synthetic oligonucleotide
auagagacgugcuugccgu

SEQ ID NO: 2860025 - RNA, 19 nt, Artificial Sequence
  Description of Artificial Sequence: Synthetic oligonucleotide
agaucacuaauccucucug

SEQ ID NO: 2860026 - RNA, 19 nt, Artificial Sequence
  Description of Artificial Sequence: Synthetic oligonucleotide
agugauacugcaugcuucu

SEQ ID NO: 2860027 - RNA, 19 nt, Artificial Sequence
  Description of Artificial Sequence: Synthetic oligonucleotide
aaaucuuucagaacucaau

SEQ ID NO: 2860028 - RNA, 19 nt, Artificial Sequence
  Description of Artificial Sequence: Synthetic oligonucleotide
ugagcgugcagacacugcu

SEQ ID NO: 2860029 - RNA, 19 nt, Artificial Sequence
  Description of Artificial Sequence: Synthetic oligonucleotide
cagcguauuaaccaucuug

SEQ ID NO: 2860030 - RNA, 19 nt, Artificial Sequence
  Description of Artificial Sequence: Synthetic oligonucleotide
ucacacagacacacgaacu

SEQ ID NO: 2860031 - RNA, 19 nt, Artificial Sequence
  Description of Artificial Sequence: Synthetic oligonucleotide
aucacuaauccucucugga

SEQ ID NO: 2860032 - RNA, 19 nt, Artificial Sequence
  Description of Artificial Sequence: Synthetic oligonucleotide
caauuaggugcguguaugg

SEQ ID NO: 2860033 - RNA, 19 nt, Artificial Sequence
  Description of Artificial Sequence: Synthetic oligonucleotide
caguucuaagccuuccucc

SEQ ID NO: 2860034 - RNA, 19 nt, Artificial Sequence
  Description of Artificial Sequence: Synthetic oligonucleotide
ugauacugcaugcuucuuc

SEQ ID NO: 2860035 - RNA, 19 nt, Artificial Sequence
  Description of Artificial Sequence: Synthetic oligonucleotide
ugccuguucccauaagugc

SEQ ID NO: 2860036 - RNA, 19 nt, Artificial Sequence
  Description of Artificial Sequence: Synthetic oligonucleotide
auaagaacgucaccaggca

SEQ ID NO: 2860037 - RNA, 19 nt, Artificial Sequence
  Description of Artificial Sequence: Synthetic oligonucleotide
acuaauccucucuggaucu

SEQ ID NO: 2860038 - RNA, 19 nt, Artificial Sequence
  Description of Artificial Sequence: Synthetic oligonucleotide
uugggaagaaguucuuugu

SEQ ID NO: 2860039 - RNA, 19 nt, Artificial Sequence
  Description of Artificial Sequence: Synthetic oligonucleotide
uuaacacuugccuguuccc

SEQ ID NO: 2860040 - RNA, 19 nt, Artificial Sequence
  Description of Artificial Sequence: Synthetic oligonucleotide
augcuucuuccuuucacuc

SEQ ID NO: 2860041 - RNA, 19 nt, Artificial Sequence
  Description of Artificial Sequence: Synthetic oligonucleotide
acauuuaacagcguauuaa

SEQ ID NO: 2860042 - RNA, 19 nt, Artificial Sequence
  Description of Artificial Sequence: Synthetic oligonucleotide
uucccauaagugccgugcg

SEQ ID NO: 2860043 - RNA, 19 nt, Artificial Sequence
  Description of Artificial Sequence: Synthetic oligonucleotide
gaucuccacccacugagcc

SEQ ID NO: 2860044 - RNA, 19 nt, Artificial Sequence
  Description of Artificial Sequence: Synthetic oligonucleotide
cacagacacacgaacuggg

SEQ ID NO: 2860045 - RNA, 19 nt, Artificial Sequence
  Description of Artificial Sequence: Synthetic oligonucleotide
cacacguagaucacuaauc

SEQ ID NO: 2860046 - RNA, 19 nt, Artificial Sequence
  Description of Artificial Sequence: Synthetic oligonucleotide
aguucuaagccuuccuccu

SEQ ID NO: 2860047 - RNA, 19 nt, Artificial Sequence
  Description of Artificial Sequence: Synthetic oligonucleotide
uuucacuuaauuucacauu

SEQ ID NO: 2860048 - RNA, 19 nt, Artificial Sequence
  Description of Artificial Sequence: Synthetic oligonucleotide
auccaggauagagacgugc

SEQ ID NO: 2860049 - RNA, 19 nt, Artificial Sequence
  Description of Artificial Sequence: Synthetic oligonucleotide
aagaacgucaccaggcaga

SEQ ID NO: 2860050 - RNA, 19 nt, Artificial Sequence
  Description of Artificial Sequence: Synthetic oligonucleotide
agaaguucuuugucugcuc

SEQ ID NO: 2860051 - RNA, 19 nt, Artificial Sequence
  Description of Artificial Sequence: Synthetic oligonucleotide
cuugagggaugauaagaac

SEQ ID NO: 2860052 - RNA, 19 nt, Artificial Sequence
  Description of Artificial Sequence: Synthetic oligonucleotide
ucuuccuuucacucugccc

SEQ ID NO: 2860053 - RNA, 19 nt, Artificial Sequence
  Description of Artificial Sequence: Synthetic oligonucleotide
uccuccuucccagaguuag

SEQ ID NO: 2860054 - RNA, 19 nt, Artificial Sequence
  Description of Artificial Sequence: Synthetic oligonucleotide
ggaagaaguucuuugucug

SEQ ID NO: 2860055 - RNA, 19 nt, Artificial Sequence
  Description of Artificial Sequence: Synthetic oligonucleotide
uucuuugucugcucccuug

SEQ ID NO: 2860056 - RNA, 19 nt, Artificial Sequence
  Description of Artificial Sequence: Synthetic oligonucleotide
aauuaggugcguguauggu

SEQ ID NO: 2860057 - RNA, 19 nt, Artificial Sequence
  Description of Artificial Sequence: Synthetic oligonucleotide
ucuggaucuccacccacug

SEQ ID NO: 2860058 - RNA, 19 nt, Artificial Sequence
  Description of Artificial Sequence: Synthetic oligonucleotide
cacacagacacacgaacug

SEQ ID NO: 2860059 - RNA, 19 nt, Artificial Sequence
  Description of Artificial Sequence: Synthetic oligonucleotide
uccaggauagagacgugcu

SEQ ID NO: 2860060 - RNA, 19 nt, Artificial Sequence
  Description of Artificial Sequence: Synthetic oligonucleotide
ugguguccagcuuuaacac

SEQ ID NO: 2860061 - RNA, 19 nt, Artificial Sequence
  Description of Artificial Sequence: Synthetic oligonucleotide
auacaguucuaagccuucc

SEQ ID NO: 2860062 - RNA, 19 nt, Artificial Sequence
  Description of Artificial Sequence: Synthetic oligonucleotide
uccucucuggaucuccacc

SEQ ID NO: 2860063 - RNA, 19 nt, Artificial Sequence
  Description of Artificial Sequence: Synthetic oligonucleotide
ugcguguaugguccauugg

SEQ ID NO: 2860064 - RNA, 19 nt, Artificial Sequence
  Description of Artificial Sequence: Synthetic oligonucleotide
aacagcguauuaaccaucu

SEQ ID NO: 2860065 - RNA, 19 nt, Artificial Sequence
  Description of Artificial Sequence: Synthetic oligonucleotide
acgaacugggaauacaguu

SEQ ID NO: 2860066 - RNA, 19 nt, Artificial Sequence
  Description of Artificial Sequence: Synthetic oligonucleotide
uguaugguccauugguguc

SEQ ID NO: 2860067 - RNA, 19 nt, Artificial Sequence
  Description of Artificial Sequence: Synthetic oligonucleotide
ucuuugucugcucccuuga

SEQ ID NO: 2860068 - RNA, 19 nt, Artificial Sequence
  Description of Artificial Sequence: Synthetic oligonucleotide
uuucacacagacacacgaa

SEQ ID NO: 2860069 - RNA, 19 nt, Artificial Sequence
  Description of Artificial Sequence: Synthetic oligonucleotide
uugguguuggcggcuaacg

SEQ ID NO: 2860070 - RNA, 19 nt, Artificial Sequence
  Description of Artificial Sequence: Synthetic oligonucleotide
ugggaagaaguucuuuguc

SEQ ID NO: 2860071 - RNA, 19 nt, Artificial Sequence
  Description of Artificial Sequence: Synthetic oligonucleotide
aaccaucuugggaagaagu

SEQ ID NO: 2860072 - RNA, 19 nt, Artificial Sequence
  Description of Artificial Sequence: Synthetic oligonucleotide
cacuaauccucucuggauc

SEQ ID NO: 2860073 - RNA, 19 nt, Artificial Sequence
  Description of Artificial Sequence: Synthetic oligonucleotide
agacacacgaacugggaau

SEQ ID NO: 2860074 - RNA, 19 nt, Artificial Sequence
  Description of Artificial Sequence: Synthetic oligonucleotide
aacacuugccuguucccau

SEQ ID NO: 2860075 - RNA, 19 nt, Artificial Sequence
  Description of Artificial Sequence: Synthetic oligonucleotide
caggugagcgugcagacac

SEQ ID NO: 2860076 - RNA, 19 nt, Artificial Sequence
  Description of Artificial Sequence: Synthetic oligonucleotide
uacaguucuaagccuuccu

SEQ ID NO: 2860077 - RNA, 19 nt, Artificial Sequence
  Description of Artificial Sequence: Synthetic oligonucleotide
uucuaagccuuccuccuuc

SEQ ID NO: 2860078 - RNA, 19 nt, Artificial Sequence
  Description of Artificial Sequence: Synthetic oligonucleotide
aucuuucagaacucaauua

SEQ ID NO: 2860079 - RNA, 19 nt, Artificial Sequence
  Description of Artificial Sequence: Synthetic oligonucleotide
acacagacacacgaacugg

SEQ ID NO: 2860080 - RNA, 19 nt, Artificial Sequence
  Description of Artificial Sequence: Synthetic oligonucleotide
aucuccacccacugagccg

SEQ ID NO: 2860081 - RNA, 19 nt, Artificial Sequence
  Description of Artificial Sequence: Synthetic oligonucleotide
gaguuagagugauacugca

SEQ ID NO: 2860082 - RNA, 19 nt, Artificial Sequence
  Description of Artificial Sequence: Synthetic oligonucleotide
ucacuaauccucucuggau

SEQ ID NO: 2860083 - RNA, 19 nt, Artificial Sequence
  Description of Artificial Sequence: Synthetic oligonucleotide
acacgaacugggaauacag

SEQ ID NO: 2860084 - RNA, 19 nt, Artificial Sequence
  Description of Artificial Sequence: Synthetic oligonucleotide
ucuccacccacugagccgc

SEQ ID NO: 2860085 - RNA, 19 nt, Artificial Sequence
  Description of Artificial Sequence: Synthetic oligonucleotide
caggauagagacgugcuug

SEQ ID NO: 2860086 - RNA, 19 nt, Artificial Sequence
  Description of Artificial Sequence: Synthetic oligonucleotide
guucccauaagugccgugc

SEQ ID NO: 2860087 - RNA, 19 nt, Artificial Sequence
  Description of Artificial Sequence: Synthetic oligonucleotide
gaacugggaauacaguucu

SEQ ID NO: 2860088 - RNA, 19 nt, Artificial Sequence
  Description of Artificial Sequence: Synthetic oligonucleotide
ugguguuggcggcuaacgc

SEQ ID NO: 2860089 - RNA, 19 nt, Artificial Sequence
  Description of Artificial Sequence: Synthetic oligonucleotide
guuucacuuaauuucacau

SEQ ID NO: 2860090 - RNA, 19 nt, Artificial Sequence
  Description of Artificial Sequence: Synthetic oligonucleotide
cagcuuuaacacuugccug

SEQ ID NO: 2860091 - RNA, 19 nt, Artificial Sequence
  Description of Artificial Sequence: Synthetic oligonucleotide
ucacauuuaacagcguauu

SEQ ID NO: 2860092 - RNA, 19 nt, Artificial Sequence
  Description of Artificial Sequence: Synthetic oligonucleotide
ccuucccagaguuagagug

SEQ ID NO: 2860093 - RNA, 19 nt, Artificial Sequence
  Description of Artificial Sequence: Synthetic oligonucleotide
acaaaucuuucagaacuca

SEQ ID NO: 2860094 - RNA, 19 nt, Artificial Sequence
  Description of Artificial Sequence: Synthetic oligonucleotide
gcacacuugguguuggcgg

SEQ ID NO: 2860095 - RNA, 19 nt, Artificial Sequence
  Description of Artificial Sequence: Synthetic oligonucleotide
uaacagcguauuaaccauc

SEQ ID NO: 2860096 - RNA, 19 nt, Artificial Sequence
  Description of Artificial Sequence: Synthetic oligonucleotide
ucacuuaauuucacauuua

SEQ ID NO: 2860097 - RNA, 19 nt, Artificial Sequence
  Description of Artificial Sequence: Synthetic oligonucleotide
ugccucggcacacuuggug

SEQ ID NO: 2860098 - RNA, 19 nt, Artificial Sequence
  Description of Artificial Sequence: Synthetic oligonucleotide
agagugauacugcaugcuu

SEQ ID NO: 2860099 - RNA, 19 nt, Artificial Sequence
  Description of Artificial Sequence: Synthetic oligonucleotide
uucuuccuuucacucugcc

SEQ ID NO: 2860100 - RNA, 19 nt, Artificial Sequence
  Description of Artificial Sequence: Synthetic oligonucleotide
agggaugauaagaacguca

SEQ ID NO: 2860101 - RNA, 19 nt, Artificial Sequence
  Description of Artificial Sequence: Synthetic oligonucleotide
ucuaagccuuccuccuucc

SEQ ID NO: 2860102 - RNA, 19 nt, Artificial Sequence
  Description of Artificial Sequence: Synthetic oligonucleotide
ugcgccacuaccaccccug

SEQ ID NO: 2860103 - RNA, 19 nt, Artificial Sequence
  Description of Artificial Sequence: Synthetic oligonucleotide
cacacuugguguuggcggc

SEQ ID NO: 2860104 - RNA, 19 nt, Artificial Sequence
  Description of Artificial Sequence: Synthetic oligonucleotide
uaacacuugccuguuccca

SEQ ID NO: 2860105 - RNA, 19 nt, Artificial Sequence
  Description of Artificial Sequence: Synthetic oligonucleotide
aggcagauccaggauagag

SEQ ID NO: 2860106 - RNA, 19 nt, Artificial Sequence
  Description of Artificial Sequence: Synthetic oligonucleotide
cagacacugcugcaggagc

SEQ ID NO: 2860107 - RNA, 19 nt, Artificial Sequence
  Description of Artificial Sequence: Synthetic oligonucleotide
uaaccaucuugggaagaag

SEQ ID NO: 2860108 - RNA, 19 nt, Artificial Sequence
  Description of Artificial Sequence: Synthetic oligonucleotide
cacuuaauuucacauuuaa

SEQ ID NO: 2860109 - RNA, 19 nt, Artificial Sequence
  Description of Artificial Sequence: Synthetic oligonucleotide
ucccauaagugccgugcgc

SEQ ID NO: 2860110 - RNA, 19 nt, Artificial Sequence
  Description of Artificial Sequence: Synthetic oligonucleotide
guaugguccauuggugucc

SEQ ID NO: 2860111 - RNA, 19 nt, Artificial Sequence
  Description of Artificial Sequence: Synthetic oligonucleotide
uagagugauacugcaugcu

SEQ ID NO: 2860112 - RNA, 19 nt, Artificial Sequence
  Description of Artificial Sequence: Synthetic oligonucleotide
uugcaggugagcgugcaga

SEQ ID NO: 2860113 - RNA, 19 nt, Artificial Sequence
  Description of Artificial Sequence: Synthetic oligonucleotide
guggaacaaaucuuucaga

SEQ ID NO: 2860114 - RNA, 19 nt, Artificial Sequence
  Description of Artificial Sequence: Synthetic oligonucleotide
uguccagcuuuaacacuug

SEQ ID NO: 2860115 - RNA, 19 nt, Artificial Sequence
  Description of Artificial Sequence: Synthetic oligonucleotide
gaagaagcacacguagauc

SEQ ID NO: 2860116 - RNA, 19 nt, Artificial Sequence
  Description of Artificial Sequence: Synthetic oligonucleotide
gagugauacugcaugcuuc

SEQ ID NO: 2860117 - RNA, 19 nt, Artificial Sequence
  Description of Artificial Sequence: Synthetic oligonucleotide
gugcagacacugcugcagg

SEQ ID NO: 2860118 - RNA, 19 nt, Artificial Sequence
  Description of Artificial Sequence: Synthetic oligonucleotide
acugcaugcuucuuccuuu

SEQ ID NO: 2860119 - RNA, 19 nt, Artificial Sequence
  Description of Artificial Sequence: Synthetic oligonucleotide
uacugcaugcuucuuccuu

SEQ ID NO: 2860120 - RNA, 19 nt, Artificial Sequence
  Description of Artificial Sequence: Synthetic oligonucleotide
ugguccauugguguccagc

SEQ ID NO: 2860121 - RNA, 19 nt, Artificial Sequence
  Description of Artificial Sequence: Synthetic oligonucleotide
agaagcacacguagaucac

SEQ ID NO: 2860122 - RNA, 19 nt, Artificial Sequence
  Description of Artificial Sequence: Synthetic oligonucleotide
agacacugcugcaggagcg

SEQ ID NO: 2860123 - RNA, 19 nt, Artificial Sequence
  Description of Artificial Sequence: Synthetic oligonucleotide
acugcugcaggagcgcgcg

SEQ ID NO: 2860124 - RNA, 19 nt, Artificial Sequence
  Description of Artificial Sequence: Synthetic oligonucleotide
acuaccaccccugccucgg

SEQ ID NO: 2860125 - RNA, 19 nt, Artificial Sequence
  Description of Artificial Sequence: Synthetic oligonucleotide
cagauccaggauagagacg

SEQ ID NO: 2860126 - RNA, 19 nt, Artificial Sequence
  Description of Artificial Sequence: Synthetic oligonucleotide
caucuugggaagaaguucu

SEQ ID NO: 2860127 - RNA, 19 nt, Artificial Sequence
  Description of Artificial Sequence: Synthetic oligonucleotide
gaacucaauuaggugcgug

SEQ ID NO: 2860128 - RNA, 19 nt, Artificial Sequence
  Description of Artificial Sequence: Synthetic oligonucleotide
cuguuucacuuaauuucac

SEQ ID NO: 2860129 - RNA, 19 nt, Artificial Sequence
  Description of Artificial Sequence: Synthetic oligonucleotide
ucucuggaucuccacccac

SEQ ID NO: 2860130 - RNA, 19 nt, Artificial Sequence
  Description of Artificial Sequence: Synthetic oligonucleotide
ugcugcaggagcgcgcggg

SEQ ID NO: 2860131 - RNA, 19 nt, Artificial Sequence
  Description of Artificial Sequence: Synthetic oligonucleotide
cuccuucccagaguuagag

SEQ ID NO: 2860132 - RNA, 19 nt, Artificial Sequence
  Description of Artificial Sequence: Synthetic oligonucleotide
auaagugccgugcgccacu

SEQ ID NO: 2860133 - RNA, 19 nt, Artificial Sequence
  Description of Artificial Sequence: Synthetic oligonucleotide
auccucucuggaucuccac

SEQ ID NO: 2860134 - RNA, 19 nt, Artificial Sequence
  Description of Artificial Sequence: Synthetic oligonucleotide
aguucuuugucugcucccu

SEQ ID NO: 2860135 - RNA, 19 nt, Artificial Sequence
  Description of Artificial Sequence: Synthetic oligonucleotide
accaccccugccucggcac

SEQ ID NO: 2860136 - RNA, 19 nt, Artificial Sequence
  Description of Artificial Sequence: Synthetic oligonucleotide
caaaucuuucagaacucaa

SEQ ID NO: 2860137 - RNA, 19 nt, Artificial Sequence
  Description of Artificial Sequence: Synthetic oligonucleotide
uggcuugagggaugauaag

SEQ ID NO: 2860138 - RNA, 19 nt, Artificial Sequence
  Description of Artificial Sequence: Synthetic oligonucleotide
accaggcagauccaggaua

SEQ ID NO: 2860139 - RNA, 19 nt, Artificial Sequence
  Description of Artificial Sequence: Synthetic oligonucleotide
cccagaguuagagugauac

SEQ ID NO: 2860140 - RNA, 19 nt, Artificial Sequence
  Description of Artificial Sequence: Synthetic oligonucleotide
ucccuugaagaagcacacg

SEQ ID NO: 2860141 - RNA, 19 nt, Artificial Sequence
  Description of Artificial Sequence: Synthetic oligonucleotide
gcguauuaaccaucuuggg

SEQ ID NO: 2860142 - RNA, 19 nt, Artificial Sequence
  Description of Artificial Sequence: Synthetic oligonucleotide
ugcagacacugcugcagga

SEQ ID NO: 2860143 - RNA, 19 nt, Artificial Sequence
  Description of Artificial Sequence: Synthetic oligonucleotide
ugccguuuucuguuucacu

SEQ ID NO: 2860144 - RNA, 19 nt, Artificial Sequence
  Description of Artificial Sequence: Synthetic oligonucleotide
gggaugauaagaacgucac

SEQ ID NO: 2860145 - RNA, 19 nt, Artificial Sequence
  Description of Artificial Sequence: Synthetic oligonucleotide
auuaaccaucuugggaaga

SEQ ID NO: 2860146 - RNA, 19 nt, Artificial Sequence
  Description of Artificial Sequence: Synthetic oligonucleotide
cuucuuccuuucacucugc

SEQ ID NO: 2860147 - RNA, 19 nt, Artificial Sequence
  Description of Artificial Sequence: Synthetic oligonucleotide
ccugccucggcacacuugg

SEQ ID NO: 2860148 - RNA, 19 nt, Artificial Sequence
  Description of Artificial Sequence: Synthetic oligonucleotide
ugcaugcuucuuccuuuca

SEQ ID NO: 2860149 - RNA, 19 nt, Artificial Sequence
  Description of Artificial Sequence: Synthetic oligonucleotide
ugggcgcacuugcagguga

SEQ ID NO: 2860150 - RNA, 19 nt, Artificial Sequence
  Description of Artificial Sequence: Synthetic oligonucleotide
gugcguguaugguccauug

SEQ ID NO: 2860151 - RNA, 19 nt, Artificial Sequence
  Description of Artificial Sequence: Synthetic oligonucleotide
ugucugcucccuugaagaa

SEQ ID NO: 2860152 - RNA, 19 nt, Artificial Sequence
  Description of Artificial Sequence: Synthetic oligonucleotide
ggaugauaagaacgucacc

SEQ ID NO: 2860153 - RNA, 19 nt, Artificial Sequence
  Description of Artificial Sequence: Synthetic oligonucleotide
acgugcuugccguuuucug

SEQ ID NO: 2860154 - RNA, 19 nt, Artificial Sequence
  Description of Artificial Sequence: Synthetic oligonucleotide
guggcuugagggaugauaa

SEQ ID NO: 2860155 - RNA, 19 nt, Artificial Sequence
  Description of Artificial Sequence: Synthetic oligonucleotide
uaugguccauuggugucca

SEQ ID NO: 2860156 - RNA, 19 nt, Artificial Sequence
  Description of Artificial Sequence: Synthetic oligonucleotide
ucggcacacuugguguugg

SEQ ID NO: 2860157 - RNA, 19 nt, Artificial Sequence
  Description of Artificial Sequence: Synthetic oligonucleotide
aauccucucuggaucucca

SEQ ID NO: 2860158 - RNA, 19 nt, Artificial Sequence
  Description of Artificial Sequence: Synthetic oligonucleotide
ugcaggagcgcgcgggccu

SEQ ID NO: 2860159 - RNA, 19 nt, Artificial Sequence
  Description of Artificial Sequence: Synthetic oligonucleotide
ccaggcagauccaggauag

SEQ ID NO: 2860160 - RNA, 19 nt, Artificial Sequence
  Description of Artificial Sequence: Synthetic oligonucleotide
uguucccauaagugccgug

SEQ ID NO: 2860161 - RNA, 19 nt, Artificial Sequence
  Description of Artificial Sequence: Synthetic oligonucleotide
cuucccagaguuagaguga

SEQ ID NO: 2860162 - RNA, 19 nt, Artificial Sequence
  Description of Artificial Sequence: Synthetic oligonucleotide
gucugcucccuugaagaag

SEQ ID NO: 2860163 - RNA, 19 nt, Artificial Sequence
  Description of Artificial Sequence: Synthetic oligonucleotide
ccucucuggaucuccaccc

SEQ ID NO: 2860164 - RNA, 19 nt, Artificial Sequence
  Description of Artificial Sequence: Synthetic oligonucleotide
aagcacacguagaucacua

SEQ ID NO: 2860165 - RNA, 19 nt, Artificial Sequence
  Description of Artificial Sequence: Synthetic oligonucleotide
agacgugcuugccguuuuc

SEQ ID NO: 2860166 - RNA, 19 nt, Artificial Sequence
  Description of Artificial Sequence: Synthetic oligonucleotide
acacacgaacugggaauac

SEQ ID NO: 2860167 - RNA, 19 nt, Artificial Sequence
  Description of Artificial Sequence: Synthetic oligonucleotide
aagugccgugcgccacuac

SEQ ID NO: 2860168 - RNA, 19 nt, Artificial Sequence
  Description of Artificial Sequence: Synthetic oligonucleotide
acuugccuguucccauaag

SEQ ID NO: 2860169 - RNA, 19 nt, Artificial Sequence
  Description of Artificial Sequence: Synthetic oligonucleotide
gacacugcugcaggagcgc

SEQ ID NO: 2860170 - RNA, 19 nt, Artificial Sequence
  Description of Artificial Sequence: Synthetic oligonucleotide
cccgaggguggcuugaggg

SEQ ID NO: 2860171 - RNA, 19 nt, Artificial Sequence
  Description of Artificial Sequence: Synthetic oligonucleotide
ccuguucccauaagugccg

SEQ ID NO: 2860172 - RNA, 19 nt, Artificial Sequence
  Description of Artificial Sequence: Synthetic oligonucleotide
gucggcugggcgcacuugc

SEQ ID NO: 2860173 - RNA, 19 nt, Artificial Sequence
  Description of Artificial Sequence: Synthetic oligonucleotide
uccuucccagaguuagagu

SEQ ID NO: 2860174 - RNA, 19 nt, Artificial Sequence
  Description of Artificial Sequence: Synthetic oligonucleotide
cuuuaacacuugccuguuc

SEQ ID NO: 2860175 - RNA, 19 nt, Artificial Sequence
  Description of Artificial Sequence: Synthetic oligonucleotide
gaauacaguucuaagccuu

SEQ ID NO: 2860176 - RNA, 19 nt, Artificial Sequence
  Description of Artificial Sequence: Synthetic oligonucleotide
caugcuucuuccuuucacu

SEQ ID NO: 2860177 - RNA, 19 nt, Artificial Sequence
  Description of Artificial Sequence: Synthetic oligonucleotide
guguaugguccauuggugu

SEQ ID NO: 2860178 - RNA, 19 nt, Artificial Sequence
  Description of Artificial Sequence: Synthetic oligonucleotide
guagaucacuaauccucuc

SEQ ID NO: 2860179 - RNA, 19 nt, Artificial Sequence
  Description of Artificial Sequence: Synthetic oligonucleotide
guccagcuuuaacacuugc

SEQ ID NO: 2860180 - RNA, 19 nt, Artificial Sequence
  Description of Artificial Sequence: Synthetic oligonucleotide
uucccagaguuagagugau

SEQ ID NO: 2860181 - RNA, 19 nt, Artificial Sequence
  Description of Artificial Sequence: Synthetic oligonucleotide
gccuguucccauaagugcc

SEQ ID NO: 2860182 - RNA, 19 nt, Artificial Sequence
  Description of Artificial Sequence: Synthetic oligonucleotide
cuugccguuuucuguuuca

SEQ ID NO: 2860183 - RNA, 19 nt, Artificial Sequence
  Description of Artificial Sequence: Synthetic oligonucleotide
aguuagagugauacugcau

SEQ ID NO: 2860184 - RNA, 19 nt, Artificial Sequence
  Description of Artificial Sequence: Synthetic oligonucleotide
cuugccuguucccauaagu

SEQ ID NO: 2860185 - RNA, 19 nt, Artificial Sequence
  Description of Artificial Sequence: Synthetic oligonucleotide
gggaagaaguucuuugucu

SEQ ID NO: 2860186 - RNA, 19 nt, Artificial Sequence
  Description of Artificial Sequence: Synthetic oligonucleotide
acucaauuaggugcgugua

SEQ ID NO: 2860187 - RNA, 19 nt, Artificial Sequence
  Description of Artificial Sequence: Synthetic oligonucleotide
cauaagugccgugcgccac

SEQ ID NO: 2860188 - RNA, 19 nt, Artificial Sequence
  Description of Artificial Sequence: Synthetic oligonucleotide
cuugcaggugagcgugcag

SEQ ID NO: 2860189 - RNA, 19 nt, Artificial Sequence
  Description of Artificial Sequence: Synthetic oligonucleotide
auacugcaugcuucuuccu

SEQ ID NO: 2860190 - RNA, 19 nt, Artificial Sequence
  Description of Artificial Sequence: Synthetic oligonucleotide
ggcugggcgcacuugcagg

SEQ ID NO: 2860191 - RNA, 19 nt, Artificial Sequence
  Description of Artificial Sequence: Synthetic oligonucleotide
gacacacgaacugggaaua

SEQ ID NO: 2860192 - RNA, 19 nt, Artificial Sequence
  Description of Artificial Sequence: Synthetic oligonucleotide
ggcuugagggaugauaaga

SEQ ID NO: 2860193 - RNA, 19 nt, Artificial Sequence
  Description of Artificial Sequence: Synthetic oligonucleotide
gagggaugauaagaacguc

SEQ ID NO: 2860194 - RNA, 19 nt, Artificial Sequence
  Description of Artificial Sequence: Synthetic oligonucleotide
ugccgugcgccacuaccac

SEQ ID NO: 2860195 - RNA, 19 nt, Artificial Sequence
  Description of Artificial Sequence: Synthetic oligonucleotide
ggcacacuugguguuggcg

SEQ ID NO: 2860196 - RNA, 19 nt, Artificial Sequence
  Description of Artificial Sequence: Synthetic oligonucleotide
cugcaugcuucuuccuuuc

SEQ ID NO: 2860197 - RNA, 19 nt, Artificial Sequence
  Description of Artificial Sequence: Synthetic oligonucleotide
cacuaccaccccugccucg

SEQ ID NO: 2860198 - RNA, 19 nt, Artificial Sequence
  Description of Artificial Sequence: Synthetic oligonucleotide
cguauuaaccaucuuggga

SEQ ID NO: 2860199 - RNA, 19 nt, Artificial Sequence
  Description of Artificial Sequence: Synthetic oligonucleotide
acacugcugcaggagcgcg

SEQ ID NO: 2860200 - RNA, 19 nt, Artificial Sequence
  Description of Artificial Sequence: Synthetic oligonucleotide
agcacacguagaucacuaa

SEQ ID NO: 2860201 - RNA, 19 nt, Artificial Sequence
  Description of Artificial Sequence: Synthetic oligonucleotide
agaacgucaccaggcagau

SEQ ID NO: 2860202 - RNA, 19 nt, Artificial Sequence
  Description of Artificial Sequence: Synthetic oligonucleotide
cacccacugagccgcggcg

SEQ ID NO: 2860203 - RNA, 19 nt, Artificial Sequence
  Description of Artificial Sequence: Synthetic oligonucleotide
cgaacugggaauacaguuc

SEQ ID NO: 2860204 - RNA, 19 nt, Artificial Sequence
  Description of Artificial Sequence: Synthetic oligonucleotide
gcaugcuucuuccuuucac

SEQ ID NO: 2860205 - RNA, 19 nt, Artificial Sequence
  Description of Artificial Sequence: Synthetic oligonucleotide
cagacacacgaacugggaa

SEQ ID NO: 2860206 - RNA, 19 nt, Artificial Sequence
  Description of Artificial Sequence: Synthetic oligonucleotide
acagacacacgaacuggga

SEQ ID NO: 2860207 - RNA, 19 nt, Artificial Sequence
  Description of Artificial Sequence: Synthetic oligonucleotide
ugcucccuugaagaagcac

SEQ ID NO: 2860208 - RNA, 19 nt, Artificial Sequence
  Description of Artificial Sequence: Synthetic oligonucleotide
uaccaccccugccucggca

SEQ ID NO: 2860209 - RNA, 19 nt, Artificial Sequence
  Description of Artificial Sequence: Synthetic oligonucleotide
gcucccuugaagaagcaca

SEQ ID NO: 2860210 - RNA, 19 nt, Artificial Sequence
  Description of Artificial Sequence: Synthetic oligonucleotide
cacugcugcaggagcgcgc

SEQ ID NO: 2860211 - RNA, 19 nt, Artificial Sequence
  Description of Artificial Sequence: Synthetic oligonucleotide
ucggcugggcgcacuugca

SEQ ID NO: 2860212 - RNA, 19 nt, Artificial Sequence
  Description of Artificial Sequence: Synthetic oligonucleotide
cuugguguuggcggcuaac

SEQ ID NO: 2860213 - RNA, 19 nt, Artificial Sequence
  Description of Artificial Sequence: Synthetic oligonucleotide
guccccgucggcugggcgc

SEQ ID NO: 2860214 - RNA, 19 nt, Artificial Sequence
  Description of Artificial Sequence: Synthetic oligonucleotide
gagcgugcagacacugcug

SEQ ID NO: 2860215 - RNA, 19 nt, Artificial Sequence
  Description of Artificial Sequence: Synthetic oligonucleotide
cccauaagugccgugcgcc

SEQ ID NO: 2860216 - RNA, 19 nt, Artificial Sequence
  Description of Artificial Sequence: Synthetic oligonucleotide
accaucuugggaagaaguu

SEQ ID NO: 2860217 - RNA, 19 nt, Artificial Sequence
  Description of Artificial Sequence: Synthetic oligonucleotide
agccgcggcguccccgucg

SEQ ID NO: 2860218 - RNA, 19 nt, Artificial Sequence
  Description of Artificial Sequence: Synthetic oligonucleotide
ccgugcgccacuaccaccc

SEQ ID NO: 2860219 - RNA, 19 nt, Artificial Sequence
  Description of Artificial Sequence: Synthetic oligonucleotide
gcacuugcaggugagcgug

SEQ ID NO: 2860220 - RNA, 19 nt, Artificial Sequence
  Description of Artificial Sequence: Synthetic oligonucleotide
gcgcacuugcaggugagcg

SEQ ID NO: 2860221 - RNA, 19 nt, Artificial Sequence
  Description of Artificial Sequence: Synthetic oligonucleotide
ccagcuuuaacacuugccu

SEQ ID NO: 2860222 - RNA, 19 nt, Artificial Sequence
  Description of Artificial Sequence: Synthetic oligonucleotide
ugagccgcggcguccccgu

SEQ ID NO: 2860223 - RNA, 19 nt, Artificial Sequence
  Description of Artificial Sequence: Synthetic oligonucleotide
gaagcacacguagaucacu

SEQ ID NO: 2860224 - RNA, 19 nt, Artificial Sequence
  Description of Artificial Sequence: Synthetic oligonucleotide
acugagccgcggcgucccc

SEQ ID NO: 2860225 - RNA, 19 nt, Artificial Sequence
  Description of Artificial Sequence: Synthetic oligonucleotide
ccaucuugggaagaaguuc

SEQ ID NO: 2860226 - RNA, 19 nt, Artificial Sequence
  Description of Artificial Sequence: Synthetic oligonucleotide
cguguaugguccauuggug

SEQ ID NO: 2860227 - RNA, 19 nt, Artificial Sequence
  Description of Artificial Sequence: Synthetic oligonucleotide
agaacucaauuaggugcgu

SEQ ID NO: 2860228 - RNA, 19 nt, Artificial Sequence
  Description of Artificial Sequence: Synthetic oligonucleotide
uaggugcguguauggucca

SEQ ID NO: 2860229 - RNA, 19 nt, Artificial Sequence
  Description of Artificial Sequence: Synthetic oligonucleotide
acacuugccuguucccaua

SEQ ID NO: 2860230 - RNA, 19 nt, Artificial Sequence
  Description of Artificial Sequence: Synthetic oligonucleotide
auuucacauuuaacagcgu

SEQ ID NO: 2860231 - RNA, 19 nt, Artificial Sequence
  Description of Artificial Sequence: Synthetic oligonucleotide
cacuugcaggugagcgugc

SEQ ID NO: 2860232 - RNA, 19 nt, Artificial Sequence
  Description of Artificial Sequence: Synthetic oligonucleotide
acuugcaggugagcgugca

SEQ ID NO: 2860233 - RNA, 19 nt, Artificial Sequence
  Description of Artificial Sequence: Synthetic oligonucleotide
gcuugagggaugauaagaa

SEQ ID NO: 2860234 - RNA, 19 nt, Artificial Sequence
  Description of Artificial Sequence: Synthetic oligonucleotide
cacacgaacugggaauaca

SEQ ID NO: 2860235 - RNA, 19 nt, Artificial Sequence
  Description of Artificial Sequence: Synthetic oligonucleotide
ggugagcgugcagacacug

SEQ ID NO: 2860236 - RNA, 19 nt, Artificial Sequence
  Description of Artificial Sequence: Synthetic oligonucleotide
cacguagaucacuaauccu

SEQ ID NO: 2860237 - RNA, 19 nt, Artificial Sequence
  Description of Artificial Sequence: Synthetic oligonucleotide
gauccaggauagagacgug

SEQ ID NO: 2860238 - RNA, 19 nt, Artificial Sequence
  Description of Artificial Sequence: Synthetic oligonucleotide
gaggguggcuugagggaug

SEQ ID NO: 2860239 - RNA, 19 nt, Artificial Sequence
  Description of Artificial Sequence: Synthetic oligonucleotide
gcguguaugguccauuggu

SEQ ID NO: 2860240 - RNA, 19 nt, Artificial Sequence
  Description of Artificial Sequence: Synthetic oligonucleotide
gguccauugguguccagcu

SEQ ID NO: 2860241 - RNA, 19 nt, Artificial Sequence
  Description of Artificial Sequence: Synthetic oligonucleotide
acagcguauuaaccaucuu

SEQ ID NO: 2860242 - RNA, 19 nt, Artificial Sequence
  Description of Artificial Sequence: Synthetic oligonucleotide
cucggcacacuugguguug

SEQ ID NO: 2860243 - RNA, 19 nt, Artificial Sequence
  Description of Artificial Sequence: Synthetic oligonucleotide
uccacccacugagccgcgg

SEQ ID NO: 2860244 - RNA, 19 nt, Artificial Sequence
  Description of Artificial Sequence: Synthetic oligonucleotide
ggauagagacgugcuugcc

SEQ ID NO: 2860245 - RNA, 19 nt, Artificial Sequence
  Description of Artificial Sequence: Synthetic oligonucleotide
agagacgugcuugccguuu

SEQ ID NO: 2860246 - RNA, 19 nt, Artificial Sequence
  Description of Artificial Sequence: Synthetic oligonucleotide
uguuggcggcuaacgcuuu

SEQ ID NO: 2860247 - RNA, 19 nt, Artificial Sequence
  Description of Artificial Sequence: Synthetic oligonucleotide
gccacuaccaccccugccu

SEQ ID NO: 2860248 - RNA, 19 nt, Artificial Sequence
  Description of Artificial Sequence: Synthetic oligonucleotide
gugagcgugcagacacugc

SEQ ID NO: 2860249 - RNA, 19 nt, Artificial Sequence
  Description of Artificial Sequence: Synthetic oligonucleotide
cacugagccgcggcguccc

SEQ ID NO: 2860250 - RNA, 19 nt, Artificial Sequence
  Description of Artificial Sequence: Synthetic oligonucleotide
cucucuggaucuccaccca

SEQ ID NO: 2860251 - RNA, 19 nt, Artificial Sequence
  Description of Artificial Sequence: Synthetic oligonucleotide
cucaauuaggugcguguau

SEQ ID NO: 2860252 - RNA, 19 nt, Artificial Sequence
  Description of Artificial Sequence: Synthetic oligonucleotide
cuggaucuccacccacuga

SEQ ID NO: 2860253 - RNA, 19 nt, Artificial Sequence
  Description of Artificial Sequence: Synthetic oligonucleotide
aggguggcuugagggauga

SEQ ID NO: 2860254 - RNA, 19 nt, Artificial Sequence
  Description of Artificial Sequence: Synthetic oligonucleotide
cuuugucugcucccuugaa

SEQ ID NO: 2860255 - RNA, 19 nt, Artificial Sequence
  Description of Artificial Sequence: Synthetic oligonucleotide
acuugguguuggcggcuaa

SEQ ID NO: 2860256 - RNA, 19 nt, Artificial Sequence
  Description of Artificial Sequence: Synthetic oligonucleotide
cacgaacugggaauacagu

SEQ ID NO: 2860257 - RNA, 19 nt, Artificial Sequence
  Description of Artificial Sequence: Synthetic oligonucleotide
uuccuccuucccagaguua

SEQ ID NO: 2860258 - RNA, 19 nt, Artificial Sequence
  Description of Artificial Sequence: Synthetic oligonucleotide
gguggcuugagggaugaua

SEQ ID NO: 2860259 - RNA, 19 nt, Artificial Sequence
  Description of Artificial Sequence: Synthetic oligonucleotide
uagagacgugcuugccguu

SEQ ID NO: 2860260 - RNA, 19 nt, Artificial Sequence
  Description of Artificial Sequence: Synthetic oligonucleotide
cucuggaucuccacccacu

SEQ ID NO: 2860261 - RNA, 19 nt, Artificial Sequence
  Description of Artificial Sequence: Synthetic oligonucleotide
aacugggaauacaguucua

SEQ ID NO: 2860262 - RNA, 19 nt, Artificial Sequence
  Description of Artificial Sequence: Synthetic oligonucleotide
ucccagaguuagagugaua

SEQ ID NO: 2860263 - RNA, 19 nt, Artificial Sequence
  Description of Artificial Sequence: Synthetic oligonucleotide
uccccgucggcugggcgca

SEQ ID NO: 2860264 - RNA, 19 nt, Artificial Sequence
  Description of Artificial Sequence: Synthetic oligonucleotide
ggaucuccacccacugagc

SEQ ID NO: 2860265 - RNA, 19 nt, Artificial Sequence
  Description of Artificial Sequence: Synthetic oligonucleotide
cugagccgcggcguccccg

SEQ ID NO: 2860266 - RNA, 19 nt, Artificial Sequence
  Description of Artificial Sequence: Synthetic oligonucleotide
cccuugaagaagcacacgu

SEQ ID NO: 2860267 - RNA, 19 nt, Artificial Sequence
  Description of Artificial Sequence: Synthetic oligonucleotide
uaagugccgugcgccacua

SEQ ID NO: 2860268 - RNA, 19 nt, Artificial Sequence
  Description of Artificial Sequence: Synthetic oligonucleotide
cgugcagacacugcugcag

SEQ ID NO: 2860269 - RNA, 19 nt, Artificial Sequence
  Description of Artificial Sequence: Synthetic oligonucleotide
gugccgugcgccacuacca

SEQ ID NO: 2860270 - RNA, 19 nt, Artificial Sequence
  Description of Artificial Sequence: Synthetic oligonucleotide
augguccauugguguccag

SEQ ID NO: 2860271 - RNA, 19 nt, Artificial Sequence
  Description of Artificial Sequence: Synthetic oligonucleotide
agccuuccuccuucccaga

SEQ ID NO: 2860272 - RNA, 19 nt, Artificial Sequence
  Description of Artificial Sequence: Synthetic oligonucleotide
cuaccaccccugccucggc

SEQ ID NO: 2860273 - RNA, 19 nt, Artificial Sequence
  Description of Artificial Sequence: Synthetic oligonucleotide
cacuugccuguucccauaa

SEQ ID NO: 2860274 - RNA, 19 nt, Artificial Sequence
  Description of Artificial Sequence: Synthetic oligonucleotide
gguguccagcuuuaacacu

SEQ ID NO: 2860275 - RNA, 19 nt, Artificial Sequence
  Description of Artificial Sequence: Synthetic oligonucleotide
cugcaggagcgcgcgggcc

SEQ ID NO: 2860276 - RNA, 19 nt, Artificial Sequence
  Description of Artificial Sequence: Synthetic oligonucleotide
gacgugcuugccguuuucu

SEQ ID NO: 2860277 - RNA, 19 nt, Artificial Sequence
  Description of Artificial Sequence: Synthetic oligonucleotide
acccacugagccgcggcgu

SEQ ID NO: 2860278 - RNA, 19 nt, Artificial Sequence
  Description of Artificial Sequence: Synthetic oligonucleotide
ccuugaagaagcacacgua

SEQ ID NO: 2860279 - RNA, 19 nt, Artificial Sequence
  Description of Artificial Sequence: Synthetic oligonucleotide
gcacacguagaucacuaau

SEQ ID NO: 2860280 - RNA, 19 nt, Artificial Sequence
  Description of Artificial Sequence: Synthetic oligonucleotide
gcugcaggagcgcgcgggc

SEQ ID NO: 2860281 - RNA, 19 nt, Artificial Sequence
  Description of Artificial Sequence: Synthetic oligonucleotide
aucuugggaagaaguucuu

SEQ ID NO: 2860282 - RNA, 19 nt, Artificial Sequence
  Description of Artificial Sequence: Synthetic oligonucleotide
gcuugccguuuucuguuuc

SEQ ID NO: 2860283 - RNA, 19 nt, Artificial Sequence
  Description of Artificial Sequence: Synthetic oligonucleotide
cuccacccacugagccgcg

SEQ ID NO: 2860284 - RNA, 19 nt, Artificial Sequence
  Description of Artificial Sequence: Synthetic oligonucleotide
guucuaagccuuccuccuu

SEQ ID NO: 2860285 - RNA, 19 nt, Artificial Sequence
  Description of Artificial Sequence: Synthetic oligonucleotide
cguuuucuguuucacuuaa

SEQ ID NO: 2860286 - RNA, 19 nt, Artificial Sequence
  Description of Artificial Sequence: Synthetic oligonucleotide
gccgcggcguccccgucgg

SEQ ID NO: 2860287 - RNA, 19 nt, Artificial Sequence
  Description of Artificial Sequence: Synthetic oligonucleotide
gagacgugcuugccguuuu

SEQ ID NO: 2860288 - RNA, 19 nt, Artificial Sequence
  Description of Artificial Sequence: Synthetic oligonucleotide
cugggcgcacuugcaggug

SEQ ID NO: 2860289 - RNA, 19 nt, Artificial Sequence
  Description of Artificial Sequence: Synthetic oligonucleotide
cugcugcaggagcgcgcgg

SEQ ID NO: 2860290 - RNA, 19 nt, Artificial Sequence
  Description of Artificial Sequence: Synthetic oligonucleotide
gccgugcgccacuaccacc

SEQ ID NO: 2860291 - RNA, 19 nt, Artificial Sequence
  Description of Artificial Sequence: Synthetic oligonucleotide
ccauaagugccgugcgcca

SEQ ID NO: 2860292 - RNA, 19 nt, Artificial Sequence
  Description of Artificial Sequence: Synthetic oligonucleotide
ccacccacugagccgcggc

SEQ ID NO: 2860293 - RNA, 19 nt, Artificial Sequence
  Description of Artificial Sequence: Synthetic oligonucleotide
guguuggcggcuaacgcuu

SEQ ID NO: 2860294 - RNA, 19 nt, Artificial Sequence
  Description of Artificial Sequence: Synthetic oligonucleotide
gccucggcacacuuggugu

SEQ ID NO: 2860295 - RNA, 19 nt, Artificial Sequence
  Description of Artificial Sequence: Synthetic oligonucleotide
gaacgucaccaggcagauc

SEQ ID NO: 2860296 - RNA, 19 nt, Artificial Sequence
  Description of Artificial Sequence: Synthetic oligonucleotide
aggugagcgugcagacacu

SEQ ID NO: 2860297 - RNA, 19 nt, Artificial Sequence
  Description of Artificial Sequence: Synthetic oligonucleotide
caccccugccucggcacac

SEQ ID NO: 2860298 - RNA, 19 nt, Artificial Sequence
  Description of Artificial Sequence: Synthetic oligonucleotide
cugcucccuugaagaagca

SEQ ID NO: 2860299 - RNA, 19 nt, Artificial Sequence
  Description of Artificial Sequence: Synthetic oligonucleotide
guuuucuguuucacuuaau

SEQ ID NO: 2860300 - RNA, 19 nt, Artificial Sequence
  Description of Artificial Sequence: Synthetic oligonucleotide
guucuuugucugcucccuu

SEQ ID NO: 2860301 - RNA, 19 nt, Artificial Sequence
  Description of Artificial Sequence: Synthetic oligonucleotide
acgucaccaggcagaucca

SEQ ID NO: 2860302 - RNA, 19 nt, Artificial Sequence
  Description of Artificial Sequence: Synthetic oligonucleotide
gcggcguccccgucggcug

SEQ ID NO: 2860303 - RNA, 19 nt, Artificial Sequence
  Description of Artificial Sequence: Synthetic oligonucleotide
ccacuaccaccccugccuc

SEQ ID NO: 2860304 - RNA, 19 nt, Artificial Sequence
  Description of Artificial Sequence: Synthetic oligonucleotide
cauugguguccagcuuuaa

SEQ ID NO: 2860305 - RNA, 19 nt, Artificial Sequence
  Description of Artificial Sequence: Synthetic oligonucleotide
ccguuuucuguuucacuua

SEQ ID NO: 2860306 - RNA, 19 nt, Artificial Sequence
  Description of Artificial Sequence: Synthetic oligonucleotide
aggugcguguaugguccau

SEQ ID NO: 2860307 - RNA, 19 nt, Artificial Sequence
  Description of Artificial Sequence: Synthetic oligonucleotide
gcugggcgcacuugcaggu

SEQ ID NO: 2860308 - RNA, 19 nt, Artificial Sequence
  Description of Artificial Sequence: Synthetic oligonucleotide
ggcgcacuugcaggugagc

SEQ ID NO: 2860309 - RNA, 19 nt, Artificial Sequence
  Description of Artificial Sequence: Synthetic oligonucleotide
gggcgcacuugcaggugag

SEQ ID NO: 2860310 - RNA, 19 nt, Artificial Sequence
  Description of Artificial Sequence: Synthetic oligonucleotide
ccagaguuagagugauacu

SEQ ID NO: 2860311 - RNA, 19 nt, Artificial Sequence
  Description of Artificial Sequence: Synthetic oligonucleotide
gcaggugagcgugcagaca

SEQ ID NO: 2860312 - RNA, 19 nt, Artificial Sequence
  Description of Artificial Sequence: Synthetic oligonucleotide
gcgugcagacacugcugca

SEQ ID NO: 2860313 - RNA, 19 nt, Artificial Sequence
  Description of Artificial Sequence: Synthetic oligonucleotide
guccauugguguccagcuu

SEQ ID NO: 2860314 - RNA, 19 nt, Artificial Sequence
  Description of Artificial Sequence: Synthetic oligonucleotide
cgugcuugccguuuucugu

SEQ ID NO: 2860315 - RNA, 19 nt, Artificial Sequence
  Description of Artificial Sequence: Synthetic oligonucleotide
ccccgaggguggcuugagg

SEQ ID NO: 2860316 - RNA, 19 nt, Artificial Sequence
  Description of Artificial Sequence: Synthetic oligonucleotide
gcgccacuaccaccccugc

SEQ ID NO: 2860317 - RNA, 19 nt, Artificial Sequence
  Description of Artificial Sequence: Synthetic oligonucleotide
caggcagauccaggauaga

SEQ ID NO: 2860318 - RNA, 19 nt, Artificial Sequence
  Description of Artificial Sequence: Synthetic oligonucleotide
cccacugagccgcggcguc

SEQ ID NO: 2860319 - RNA, 19 nt, Artificial Sequence
  Description of Artificial Sequence: Synthetic oligonucleotide
cgucaccaggcagauccag

SEQ ID NO: 2860320 - RNA, 19 nt, Artificial Sequence
  Description of Artificial Sequence: Synthetic oligonucleotide
cacuugguguuggcggcua

SEQ ID NO: 2860321 - RNA, 19 nt, Artificial Sequence
  Description of Artificial Sequence: Synthetic oligonucleotide
guuggcggcuaacgcuuuu

SEQ ID NO: 2860322 - RNA, 19 nt, Artificial Sequence
  Description of Artificial Sequence: Synthetic oligonucleotide
ccuccuucccagaguuaga

SEQ ID NO: 2860323 - RNA, 19 nt, Artificial Sequence
  Description of Artificial Sequence: Synthetic oligonucleotide
ccacugagccgcggcgucc

SEQ ID NO: 2860324 - RNA, 19 nt, Artificial Sequence
  Description of Artificial Sequence: Synthetic oligonucleotide
caccaggcagauccaggau

SEQ ID NO: 2860325 - RNA, 19 nt, Artificial Sequence
  Description of Artificial Sequence: Synthetic oligonucleotide
gugcgccacuaccaccccu

SEQ ID NO: 2860326 - RNA, 19 nt, Artificial Sequence
  Description of Artificial Sequence: Synthetic oligonucleotide
cggcugggcgcacuugcag

SEQ ID NO: 2860327 - RNA, 19 nt, Artificial Sequence
  Description of Artificial Sequence: Synthetic oligonucleotide
cuguucccauaagugccgu

SEQ ID NO: 2860328 - RNA, 19 nt, Artificial Sequence
  Description of Artificial Sequence: Synthetic oligonucleotide
ggcguccccgucggcuggg

SEQ ID NO: 2860329 - RNA, 19 nt, Artificial Sequence
  Description of Artificial Sequence: Synthetic oligonucleotide
cgccacuaccaccccugcc

SEQ ID NO: 2860330 - RNA, 19 nt, Artificial Sequence
  Description of Artificial Sequence: Synthetic oligonucleotide
gcuuuaacacuugccuguu

SEQ ID NO: 2860331 - RNA, 19 nt, Artificial Sequence
  Description of Artificial Sequence: Synthetic oligonucleotide
gugauacugcaugcuucuu

SEQ ID NO: 2860332 - RNA, 19 nt, Artificial Sequence
  Description of Artificial Sequence: Synthetic oligonucleotide
gagccgcggcguccccguc

SEQ ID NO: 2860333 - RNA, 19 nt, Artificial Sequence
  Description of Artificial Sequence: Synthetic oligonucleotide
ggugcguguaugguccauu

SEQ ID NO: 2860334 - RNA, 19 nt, Artificial Sequence
  Description of Artificial Sequence: Synthetic oligonucleotide
cggcacacuugguguuggc

SEQ ID NO: 2860335 - RNA, 19 nt, Artificial Sequence
  Description of Artificial Sequence: Synthetic oligonucleotide
cgugcgccacuaccacccc

SEQ ID NO: 2860336 - RNA, 19 nt, Artificial Sequence
  Description of Artificial Sequence: Synthetic oligonucleotide
ccaggauagagacgugcuu

SEQ ID NO: 2860337 - RNA, 19 nt, Artificial Sequence
  Description of Artificial Sequence: Synthetic oligonucleotide
cguccccgucggcugggcg

SEQ ID NO: 2860338 - RNA, 19 nt, Artificial Sequence
  Description of Artificial Sequence: Synthetic oligonucleotide
cugccucggcacacuuggu

SEQ ID NO: 2860339 - RNA, 19 nt, Artificial Sequence
  Description of Artificial Sequence: Synthetic oligonucleotide
cgcacuugcaggugagcgu

SEQ ID NO: 2860340 - RNA, 19 nt, Artificial Sequence
  Description of Artificial Sequence: Synthetic oligonucleotide
ccaccccugccucggcaca

SEQ ID NO: 2860341 - RNA, 19 nt, Artificial Sequence
  Description of Artificial Sequence: Synthetic oligonucleotide
cggcguccccgucggcugg

SEQ ID NO: 2860342 - RNA, 19 nt, Artificial Sequence
  Description of Artificial Sequence: Synthetic oligonucleotide
ccucggcacacuugguguu

SEQ ID NO: 2860343 - RNA, 19 nt, Artificial Sequence
  Description of Artificial Sequence: Synthetic oligonucleotide
gcguccccgucggcugggc

SEQ ID NO: 2860344 - RNA, 19 nt, Artificial Sequence
  Description of Artificial Sequence: Synthetic oligonucleotide
cgaggguggcuugagggau

SEQ ID NO: 2860345 - RNA, 19 nt, Artificial Sequence
  Description of Artificial Sequence: Synthetic oligonucleotide
cgucggcugggcgcacuug

SEQ ID NO: 2860346 - RNA, 19 nt, Artificial Sequence
  Description of Artificial Sequence: Synthetic oligonucleotide
ccgcggcguccccgucggc

SEQ ID NO: 2860347 - RNA, 19 nt, Artificial Sequence
  Description of Artificial Sequence: Synthetic oligonucleotide
ggguggcuugagggaugau

SEQ ID NO: 2860348 - RNA, 19 nt, Artificial Sequence
  Description of Artificial Sequence: Synthetic oligonucleotide
ccgucggcugggcgcacuu

SEQ ID NO: 2860349 - RNA, 19 nt, Artificial Sequence
  Description of Artificial Sequence: Synthetic oligonucleotide
ccccgucggcugggcgcac

SEQ ID NO: 2860350 - RNA, 19 nt, Artificial Sequence
  Description of Artificial Sequence: Synthetic oligonucleotide
ccccugccucggcacacuu

SEQ ID NO: 2860351 - RNA, 19 nt, Artificial Sequence
  Description of Artificial Sequence: Synthetic oligonucleotide
cccgucggcugggcgcacu

SEQ ID NO: 2860352 - RNA, 19 nt, Artificial Sequence
  Description of Artificial Sequence: Synthetic oligonucleotide
cuugcuaaguauuugaucg

SEQ ID NO: 2860353 - RNA, 19 nt, Artificial Sequence
  Description of Artificial Sequence: Synthetic oligonucleotide
aauucuuuuacucugcucu

SEQ ID NO: 2860354 - RNA, 19 nt, Artificial Sequence
  Description of Artificial Sequence: Synthetic oligonucleotide
uuuauuauauccacaggcg

SEQ ID NO: 2860355 - RNA, 19 nt, Artificial Sequence
  Description of Artificial Sequence: Synthetic oligonucleotide
ucauuuucuguucugaggg

SEQ ID NO: 2860356 - RNA, 19 nt, Artificial Sequence
  Description of Artificial Sequence: Synthetic oligonucleotide
augaauacaauucuuuuac

SEQ ID NO: 2860357 - RNA, 19 nt, Artificial Sequence
  Description of Artificial Sequence: Synthetic oligonucleotide
aaucugguacucuuaaggc

SEQ ID NO: 2860358 - RNA, 19 nt, Artificial Sequence
  Description of Artificial Sequence: Synthetic oligonucleotide
aaucugagacauuauuugc

SEQ ID NO: 2860359 - RNA, 19 nt, Artificial Sequence
  Description of Artificial Sequence: Synthetic oligonucleotide
uuaauuugguaucuguccg

SEQ ID NO: 2860360 - RNA, 19 nt, Artificial Sequence
  Description of Artificial Sequence: Synthetic oligonucleotide
uuuaauuugguaucugucc

SEQ ID NO: 2860361 - RNA, 19 nt, Artificial Sequence
  Description of Artificial Sequence: Synthetic oligonucleotide
uuauuauauccacaggcgg

SEQ ID NO: 2860362 - RNA, 19 nt, Artificial Sequence
  Description of Artificial Sequence: Synthetic oligonucleotide
agagacaccauuucugucc

SEQ ID NO: 2860363 - RNA, 19 nt, Artificial Sequence
  Description of Artificial Sequence: Synthetic oligonucleotide
uuaaauagacacuuuauua

SEQ ID NO: 2860364 - RNA, 19 nt, Artificial Sequence
  Description of Artificial Sequence: Synthetic oligonucleotide
cacauuagcaaucugagac

SEQ ID NO: 2860365 - RNA, 19 nt, Artificial Sequence
  Description of Artificial Sequence: Synthetic oligonucleotide
cauucaaugaauacaauuc

SEQ ID NO: 2860366 - RNA, 19 nt, Artificial Sequence
  Description of Artificial Sequence: Synthetic oligonucleotide
uccagcaucgucuugaggc

SEQ ID NO: 2860367 - RNA, 19 nt, Artificial Sequence
  Description of Artificial Sequence: Synthetic oligonucleotide
cauuauuugcugaagagug

SEQ ID NO: 2860368 - RNA, 19 nt, Artificial Sequence
  Description of Artificial Sequence: Synthetic oligonucleotide
uucacauuagcaaucugag

SEQ ID NO: 2860369 - RNA, 19 nt, Artificial Sequence
  Description of Artificial Sequence: Synthetic oligonucleotide
ucacucuucuccaagauga

SEQ ID NO: 2860370 - RNA, 19 nt, Artificial Sequence
  Description of Artificial Sequence: Synthetic oligonucleotide
uugaaguuuaauuugguau

SEQ ID NO: 2860371 - RNA, 19 nt, Artificial Sequence
  Description of Artificial Sequence: Synthetic oligonucleotide
uagauugaaguuuaauuug

SEQ ID NO: 2860372 - RNA, 19 nt, Artificial Sequence
  Description of Artificial Sequence: Synthetic oligonucleotide
uuuaaauagacacuuuauu

SEQ ID NO: 2860373 - RNA, 19 nt, Artificial Sequence
  Description of Artificial Sequence: Synthetic oligonucleotide
ucucauucaaugaauacaa

SEQ ID NO: 2860374 - RNA, 19 nt, Artificial Sequence
  Description of Artificial Sequence: Synthetic oligonucleotide
aaugaauacaauucuuuua

SEQ ID NO: 2860375 - RNA, 19 nt, Artificial Sequence
  Description of Artificial Sequence: Synthetic oligonucleotide
uuugguaucuguccggacc

SEQ ID NO: 2860376 - RNA, 19 nt, Artificial Sequence
  Description of Artificial Sequence: Synthetic oligonucleotide
caaucugguacucuuaagg

SEQ ID NO: 2860377 - RNA, 19 nt, Artificial Sequence
  Description of Artificial Sequence: Synthetic oligonucleotide
ugagaacucacucuucucc

SEQ ID NO: 2860378 - RNA, 19 nt, Artificial Sequence
  Description of Artificial Sequence: Synthetic oligonucleotide
uccacaggcgguaaaaucc

SEQ ID NO: 2860379 - RNA, 19 nt, Artificial Sequence
  Description of Artificial Sequence: Synthetic oligonucleotide
uuuuagcugauguaguuca

SEQ ID NO: 2860380 - RNA, 19 nt, Artificial Sequence
  Description of Artificial Sequence: Synthetic oligonucleotide
ucuagauugaaguuuaauu

SEQ ID NO: 2860381 - RNA, 19 nt, Artificial Sequence
  Description of Artificial Sequence: Synthetic oligonucleotide
cacuuuauuauauccacag

SEQ ID NO: 2860382 - RNA, 19 nt, Artificial Sequence
  Description of Artificial Sequence: Synthetic oligonucleotide
uagacacuuuauuauaucc

SEQ ID NO: 2860383 - RNA, 19 nt, Artificial Sequence
  Description of Artificial Sequence: Synthetic oligonucleotide
ucugcucuucucuagauug

SEQ ID NO: 2860384 - RNA, 19 nt, Artificial Sequence
  Description of Artificial Sequence: Synthetic oligonucleotide
gacauuauuugcugaagag

SEQ ID NO: 2860385 - RNA, 19 nt, Artificial Sequence
  Description of Artificial Sequence: Synthetic oligonucleotide
aaugggaauuucuuuaaau

SEQ ID NO: 2860386 - RNA, 19 nt, Artificial Sequence
  Description of Artificial Sequence: Synthetic oligonucleotide
ucuuuaaauagacacuuua

SEQ ID NO: 2860387 - RNA, 19 nt, Artificial Sequence
  Description of Artificial Sequence: Synthetic oligonucleotide
aacaaugggaauuucuuua

SEQ ID NO: 2860388 - RNA, 19 nt, Artificial Sequence
  Description of Artificial Sequence: Synthetic oligonucleotide
ucaaguuuuauuuucucau

SEQ ID NO: 2860389 - RNA, 19 nt, Artificial Sequence
  Description of Artificial Sequence: Synthetic oligonucleotide
uauuauauccacaggcggu

SEQ ID NO: 2860390 - RNA, 19 nt, Artificial Sequence
  Description of Artificial Sequence: Synthetic oligonucleotide
auucaaugaauacaauucu

SEQ ID NO: 2860391 - RNA, 19 nt, Artificial Sequence
  Description of Artificial Sequence: Synthetic oligonucleotide
uaaacacagaccuugcuaa

SEQ ID NO: 2860392 - RNA, 19 nt, Artificial Sequence
  Description of Artificial Sequence: Synthetic oligonucleotide
caaucugagacauuauuug

SEQ ID NO: 2860393 - RNA, 19 nt, Artificial Sequence
  Description of Artificial Sequence: Synthetic oligonucleotide
uauuugaucgugucaagcu

SEQ ID NO: 2860394 - RNA, 19 nt, Artificial Sequence
  Description of Artificial Sequence: Synthetic oligonucleotide
auacaauucuuuuacucug

SEQ ID NO: 2860395 - RNA, 19 nt, Artificial Sequence
  Description of Artificial Sequence: Synthetic oligonucleotide
gacacuuuauuauauccac

SEQ ID NO: 2860396 - RNA, 19 nt, Artificial Sequence
  Description of Artificial Sequence: Synthetic oligonucleotide
uuugaucgugucaagcuug

SEQ ID NO: 2860397 - RNA, 19 nt, Artificial Sequence
  Description of Artificial Sequence: Synthetic oligonucleotide
gaccuugaggacuucaucc

SEQ ID NO: 2860398 - RNA, 19 nt, Artificial Sequence
  Description of Artificial Sequence: Synthetic oligonucleotide
ucaaugaauacaauucuuu

SEQ ID NO: 2860399 - RNA, 19 nt, Artificial Sequence
  Description of Artificial Sequence: Synthetic oligonucleotide
uucaaguuuuauuuucuca

SEQ ID NO: 2860400 - RNA, 19 nt, Artificial Sequence
  Description of Artificial Sequence: Synthetic oligonucleotide
auagacacuuuauuauauc

SEQ ID NO: 2860401 - RNA, 19 nt, Artificial Sequence
  Description of Artificial Sequence: Synthetic oligonucleotide
uaaguauuugaucguguca

SEQ ID NO: 2860402 - RNA, 19 nt, Artificial Sequence
  Description of Artificial Sequence: Synthetic oligonucleotide
uucucauucaaugaauaca

SEQ ID NO: 2860403 - RNA, 19 nt, Artificial Sequence
  Description of Artificial Sequence: Synthetic oligonucleotide
ucugguacucuuaaggcaa

SEQ ID NO: 2860404 - RNA, 19 nt, Artificial Sequence
  Description of Artificial Sequence: Synthetic oligonucleotide
gacuucauccaucacuugc

SEQ ID NO: 2860405 - RNA, 19 nt, Artificial Sequence
  Description of Artificial Sequence: Synthetic oligonucleotide
aaguuuuauuuucucauuu

SEQ ID NO: 2860406 - RNA, 19 nt, Artificial Sequence
  Description of Artificial Sequence: Synthetic oligonucleotide
ucugagacauuauuugcug

SEQ ID NO: 2860407 - RNA, 19 nt, Artificial Sequence
  Description of Artificial Sequence: Synthetic oligonucleotide
cuugaggccagccaccucg

SEQ ID NO: 2860408 - RNA, 19 nt, Artificial Sequence
  Description of Artificial Sequence: Synthetic oligonucleotide
uaauuugguaucuguccgg

SEQ ID NO: 2860409 - RNA, 19 nt, Artificial Sequence
  Description of Artificial Sequence: Synthetic oligonucleotide
acuuuauuauauccacagg

SEQ ID NO: 2860410 - RNA, 19 nt, Artificial Sequence
  Description of Artificial Sequence: Synthetic oligonucleotide
aaguauuugaucgugucaa

SEQ ID NO: 2860411 - RNA, 19 nt, Artificial Sequence
  Description of Artificial Sequence: Synthetic oligonucleotide
ucauucaaugaauacaauu

SEQ ID NO: 2860412 - RNA, 19 nt, Artificial Sequence
  Description of Artificial Sequence: Synthetic oligonucleotide
acgagcuacuguuaggcac

SEQ ID NO: 2860413 - RNA, 19 nt, Artificial Sequence
  Description of Artificial Sequence: Synthetic oligonucleotide
aucacuugcuguuuuagcu

SEQ ID NO: 2860414 - RNA, 19 nt, Artificial Sequence
  Description of Artificial Sequence: Synthetic oligonucleotide
cucauuuucuguucugagg

SEQ ID NO: 2860415 - RNA, 19 nt, Artificial Sequence
  Description of Artificial Sequence: Synthetic oligonucleotide
ugugccuccagcaucgucu

SEQ ID NO: 2860416 - RNA, 19 nt, Artificial Sequence
  Description of Artificial Sequence: Synthetic oligonucleotide
agauugaaguuuaauuugg

SEQ ID NO: 2860417 - RNA, 19 nt, Artificial Sequence
  Description of Artificial Sequence: Synthetic oligonucleotide
aguuuaauuugguaucugu

SEQ ID NO: 2860418 - RNA, 19 nt, Artificial Sequence
  Description of Artificial Sequence: Synthetic oligonucleotide
aguugcagcaucuucuucu

SEQ ID NO: 2860419 - RNA, 19 nt, Artificial Sequence
  Description of Artificial Sequence: Synthetic oligonucleotide
uuagcaaucugagacauua

SEQ ID NO: 2860420 - RNA, 19 nt, Artificial Sequence
  Description of Artificial Sequence: Synthetic oligonucleotide
aaucccacgagcuacuguu

SEQ ID NO: 2860421 - RNA, 19 nt, Artificial Sequence
  Description of Artificial Sequence: Synthetic oligonucleotide
uugugugccuccagcaucg

SEQ ID NO: 2860422 - RNA, 19 nt, Artificial Sequence
  Description of Artificial Sequence: Synthetic oligonucleotide
uccaagaugaccauaucuu

SEQ ID NO: 2860423 - RNA, 19 nt, Artificial Sequence
  Description of Artificial Sequence: Synthetic oligonucleotide
ucuguccggaccuugagga

SEQ ID NO: 2860424 - RNA, 19 nt, Artificial Sequence
  Description of Artificial Sequence: Synthetic oligonucleotide
uacaauucuuuuacucugc

SEQ ID NO: 2860425 - RNA, 19 nt, Artificial Sequence
  Description of Artificial Sequence: Synthetic oligonucleotide
aucgugucaagcuugugug

SEQ ID NO: 2860426 - RNA, 19 nt, Artificial Sequence
  Description of Artificial Sequence: Synthetic oligonucleotide
cuguuaggcacguaaacac

SEQ ID NO: 2860427 - RNA, 19 nt, Artificial Sequence
  Description of Artificial Sequence: Synthetic oligonucleotide
guuuuauuuucucauuuuc

SEQ ID NO: 2860428 - RNA, 19 nt, Artificial Sequence
  Description of Artificial Sequence: Synthetic oligonucleotide
aaaacaaugggaauuucuu

SEQ ID NO: 2860429 - RNA, 19 nt, Artificial Sequence
  Description of Artificial Sequence: Synthetic oligonucleotide
aaacaaugggaauuucuuu

SEQ ID NO: 2860430 - RNA, 19 nt, Artificial Sequence
  Description of Artificial Sequence: Synthetic oligonucleotide
ucucauuuucuguucugag

SEQ ID NO: 2860431 - RNA, 19 nt, Artificial Sequence
  Description of Artificial Sequence: Synthetic oligonucleotide
aauagacacuuuauuauau

SEQ ID NO: 2860432 - RNA, 19 nt, Artificial Sequence
  Description of Artificial Sequence: Synthetic oligonucleotide
aaacacagaccuugcuaag

SEQ ID NO: 2860433 - RNA, 19 nt, Artificial Sequence
  Description of Artificial Sequence: Synthetic oligonucleotide
cuaaguauuugaucguguc

SEQ ID NO: 2860434 - RNA, 19 nt, Artificial Sequence
  Description of Artificial Sequence: Synthetic oligonucleotide
ucuuuuacucugcucuucu

SEQ ID NO: 2860435 - RNA, 19 nt, Artificial Sequence
  Description of Artificial Sequence: Synthetic oligonucleotide
agacauuauuugcugaaga

SEQ ID NO: 2860436 - RNA, 19 nt, Artificial Sequence
  Description of Artificial Sequence: Synthetic oligonucleotide
uguuaggcacguaaacaca

SEQ ID NO: 2860437 - RNA, 19 nt, Artificial Sequence
  Description of Artificial Sequence: Synthetic oligonucleotide
ucgguuucuaucuuccugu

SEQ ID NO: 2860438 - RNA, 19 nt, Artificial Sequence
  Description of Artificial Sequence: Synthetic oligonucleotide
uucaaugaauacaauucuu

SEQ ID NO: 2860439 - RNA, 19 nt, Artificial Sequence
  Description of Artificial Sequence: Synthetic oligonucleotide
uucuccaagaugaccauau

SEQ ID NO: 2860440 - RNA, 19 nt, Artificial Sequence
  Description of Artificial Sequence: Synthetic oligonucleotide
uucucuagauugaaguuua

SEQ ID NO: 2860441 - RNA, 19 nt, Artificial Sequence
  Description of Artificial Sequence: Synthetic oligonucleotide
ucacuugcuguuuuagcug

SEQ ID NO: 2860442 - RNA, 19 nt, Artificial Sequence
  Description of Artificial Sequence: Synthetic oligonucleotide
uugcugaagagugauuucc

SEQ ID NO: 2860443 - RNA, 19 nt, Artificial Sequence
  Description of Artificial Sequence: Synthetic oligonucleotide
uugaggacuucauccauca

SEQ ID NO: 2860444 - RNA, 19 nt, Artificial Sequence
  Description of Artificial Sequence: Synthetic oligonucleotide
ucuucucauucaaugaaua

SEQ ID NO: 2860445 - RNA, 19 nt, Artificial Sequence
  Description of Artificial Sequence: Synthetic oligonucleotide
accauuucuguccugaguu

SEQ ID NO: 2860446 - RNA, 19 nt, Artificial Sequence
  Description of Artificial Sequence: Synthetic oligonucleotide
guaaaaucccacgagcuac

SEQ ID NO: 2860447 - RNA, 19 nt, Artificial Sequence
  Description of Artificial Sequence: Synthetic oligonucleotide
uacuguuaggcacguaaac

SEQ ID NO: 2860448 - RNA, 19 nt, Artificial Sequence
  Description of Artificial Sequence: Synthetic oligonucleotide
auuucuuuaaauagacacu

SEQ ID NO: 2860449 - RNA, 19 nt, Artificial Sequence
  Description of Artificial Sequence: Synthetic oligonucleotide
ugaauacaauucuuuuacu

SEQ ID NO: 2860450 - RNA, 19 nt, Artificial Sequence
  Description of Artificial Sequence: Synthetic oligonucleotide
cuucucauucaaugaauac

SEQ ID NO: 2860451 - RNA, 19 nt, Artificial Sequence
  Description of Artificial Sequence: Synthetic oligonucleotide
uugcuguuuuagcugaugu

SEQ ID NO: 2860452 - RNA, 19 nt, Artificial Sequence
  Description of Artificial Sequence: Synthetic oligonucleotide
ucuguccugaguugcagca

SEQ ID NO: 2860453 - RNA, 19 nt, Artificial Sequence
  Description of Artificial Sequence: Synthetic oligonucleotide
auccacaggcgguaaaauc

SEQ ID NO: 2860454 - RNA, 19 nt, Artificial Sequence
  Description of Artificial Sequence: Synthetic oligonucleotide
acauuagcaaucugagaca

SEQ ID NO: 2860455 - RNA, 19 nt, Artificial Sequence
  Description of Artificial Sequence: Synthetic oligonucleotide
uugguaucuguccggaccu

SEQ ID NO: 2860456 - RNA, 19 nt, Artificial Sequence
  Description of Artificial Sequence: Synthetic oligonucleotide
aacucacucuucuccaaga

SEQ ID NO: 2860457 - RNA, 19 nt, Artificial Sequence
  Description of Artificial Sequence: Synthetic oligonucleotide
uaggcacguaaacacagac

SEQ ID NO: 2860458 - RNA, 19 nt, Artificial Sequence
  Description of Artificial Sequence: Synthetic oligonucleotide
auugaaguuuaauuuggua

SEQ ID NO: 2860459 - RNA, 19 nt, Artificial Sequence
  Description of Artificial Sequence: Synthetic oligonucleotide
acauuauuugcugaagagu

SEQ ID NO: 2860460 - RNA, 19 nt, Artificial Sequence
  Description of Artificial Sequence: Synthetic oligonucleotide
cucuucuccaagaugacca

SEQ ID NO: 2860461 - RNA, 19 nt, Artificial Sequence
  Description of Artificial Sequence: Synthetic oligonucleotide
uuagcugauguaguucaag

SEQ ID NO: 2860462 - RNA, 19 nt, Artificial Sequence
  Description of Artificial Sequence: Synthetic oligonucleotide
aauuugguaucuguccgga

SEQ ID NO: 2860463 - RNA, 19 nt, Artificial Sequence
  Description of Artificial Sequence: Synthetic oligonucleotide
cacguaaacacagaccuug

SEQ ID NO: 2860464 - RNA, 19 nt, Artificial Sequence
  Description of Artificial Sequence: Synthetic oligonucleotide
aucugguacucuuaaggca

SEQ ID NO: 2860465 - RNA, 19 nt, Artificial Sequence
  Description of Artificial Sequence: Synthetic oligonucleotide
gcuguuuuagcugauguag

SEQ ID NO: 2860466 - RNA, 19 nt, Artificial Sequence
  Description of Artificial Sequence: Synthetic oligonucleotide
uaaaaucccacgagcuacu

SEQ ID NO: 2860467 - RNA, 19 nt, Artificial Sequence
  Description of Artificial Sequence: Synthetic oligonucleotide
guuaggcacguaaacacag

SEQ ID NO: 2860468 - RNA, 19 nt, Artificial Sequence
  Description of Artificial Sequence: Synthetic oligonucleotide
aguauuugaucgugucaag

SEQ ID NO: 2860469 - RNA, 19 nt, Artificial Sequence
  Description of Artificial Sequence: Synthetic oligonucleotide
ucgucuugaggccagccac

SEQ ID NO: 2860470 - RNA, 19 nt, Artificial Sequence
  Description of Artificial Sequence: Synthetic oligonucleotide
uucuucucauucaaugaau

SEQ ID NO: 2860471 - RNA, 19 nt, Artificial Sequence
  Description of Artificial Sequence: Synthetic oligonucleotide
uuauuugcugaagagugau

SEQ ID NO: 2860472 - RNA, 19 nt, Artificial Sequence
  Description of Artificial Sequence: Synthetic oligonucleotide
ucauccaucacuugcuguu

SEQ ID NO: 2860473 - RNA, 19 nt, Artificial Sequence
  Description of Artificial Sequence: Synthetic oligonucleotide
cuagauugaaguuuaauuu

SEQ ID NO: 2860474 - RNA, 19 nt, Artificial Sequence
  Description of Artificial Sequence: Synthetic oligonucleotide
acucuucuccaagaugacc

SEQ ID NO: 2860475 - RNA, 19 nt, Artificial Sequence
  Description of Artificial Sequence: Synthetic oligonucleotide
gaacucacucuucuccaag

SEQ ID NO: 2860476 - RNA, 19 nt, Artificial Sequence
  Description of Artificial Sequence: Synthetic oligonucleotide
uguuuuagcugauguaguu

SEQ ID NO: 2860477 - RNA, 19 nt, Artificial Sequence
  Description of Artificial Sequence: Synthetic oligonucleotide
acuguuaggcacguaaaca

SEQ ID NO: 2860478 - RNA, 19 nt, Artificial Sequence
  Description of Artificial Sequence: Synthetic oligonucleotide
ugcuaaguauuugaucgug

SEQ ID NO: 2860479 - RNA, 19 nt, Artificial Sequence
  Description of Artificial Sequence: Synthetic oligonucleotide
auuugcugaagagugauuu

SEQ ID NO: 2860480 - RNA, 19 nt, Artificial Sequence
  Description of Artificial Sequence: Synthetic oligonucleotide
uuuucacauuagcaaucug

SEQ ID NO: 2860481 - RNA, 19 nt, Artificial Sequence
  Description of Artificial Sequence: Synthetic oligonucleotide
guuuaauuugguaucuguc

SEQ ID NO: 2860482 - RNA, 19 nt, Artificial Sequence
  Description of Artificial Sequence: Synthetic oligonucleotide
uuacucugcucuucucuag

SEQ ID NO: 2860483 - RNA, 19 nt, Artificial Sequence
  Description of Artificial Sequence: Synthetic oligonucleotide
guauuugaucgugucaagc

SEQ ID NO: 2860484 - RNA, 19 nt, Artificial Sequence
  Description of Artificial Sequence: Synthetic oligonucleotide
gagacauuauuugcugaag

SEQ ID NO: 2860485 - RNA, 19 nt, Artificial Sequence
  Description of Artificial Sequence: Synthetic oligonucleotide
aucuguccggaccuugagg

SEQ ID NO: 2860486 - RNA, 19 nt, Artificial Sequence
  Description of Artificial Sequence: Synthetic oligonucleotide
caucacuugcuguuuuagc

SEQ ID NO: 2860487 - RNA, 19 nt, Artificial Sequence
  Description of Artificial Sequence: Synthetic oligonucleotide
aaguuuaauuugguaucug

SEQ ID NO: 2860488 - RNA, 19 nt, Artificial Sequence
  Description of Artificial Sequence: Synthetic oligonucleotide
gaccuugcuaaguauuuga

SEQ ID NO: 2860489 - RNA, 19 nt, Artificial Sequence
  Description of Artificial Sequence: Synthetic oligonucleotide
aaaucccacgagcuacugu

SEQ ID NO: 2860490 - RNA, 19 nt, Artificial Sequence
  Description of Artificial Sequence: Synthetic oligonucleotide
acaaugggaauuucuuuaa

SEQ ID NO: 2860491 - RNA, 19 nt, Artificial Sequence
  Description of Artificial Sequence: Synthetic oligonucleotide
ucuucucuagauugaaguu

SEQ ID NO: 2860492 - RNA, 19 nt, Artificial Sequence
  Description of Artificial Sequence: Synthetic oligonucleotide
cuuccugucugucuggguc

SEQ ID NO: 2860493 - RNA, 19 nt, Artificial Sequence
  Description of Artificial Sequence: Synthetic oligonucleotide
auuugguaucuguccggac

SEQ ID NO: 2860494 - RNA, 19 nt, Artificial Sequence
  Description of Artificial Sequence: Synthetic oligonucleotide
aacacagaccuugcuaagu

SEQ ID NO: 2860495 - RNA, 19 nt, Artificial Sequence
  Description of Artificial Sequence: Synthetic oligonucleotide
caggcgguaaaaucccacg

SEQ ID NO: 2860496 - RNA, 19 nt, Artificial Sequence
  Description of Artificial Sequence: Synthetic oligonucleotide
uucucauuuucuguucuga

SEQ ID NO: 2860497 - RNA, 19 nt, Artificial Sequence
  Description of Artificial Sequence: Synthetic oligonucleotide
uaucuuccugucugucugg

SEQ ID NO: 2860498 - RNA, 19 nt, Artificial Sequence
  Description of Artificial Sequence: Synthetic oligonucleotide
uguucugagggcugagaac

SEQ ID NO: 2860499 - RNA, 19 nt, Artificial Sequence
  Description of Artificial Sequence: Synthetic oligonucleotide
guaaacacagaccuugcua

SEQ ID NO: 2860500 - RNA, 19 nt, Artificial Sequence
  Description of Artificial Sequence: Synthetic oligonucleotide
acaauucuuuuacucugcu

SEQ ID NO: 2860501 - RNA, 19 nt, Artificial Sequence
  Description of Artificial Sequence: Synthetic oligonucleotide
agcaaucugagacauuauu

SEQ ID NO: 2860502 - RNA, 19 nt, Artificial Sequence
  Description of Artificial Sequence: Synthetic oligonucleotide
uaucuguccggaccuugag

SEQ ID NO: 2860503 - RNA, 19 nt, Artificial Sequence
  Description of Artificial Sequence: Synthetic oligonucleotide
ucuugcugggcgugcagag

SEQ ID NO: 2860504 - RNA, 19 nt, Artificial Sequence
  Description of Artificial Sequence: Synthetic oligonucleotide
uuaggcacguaaacacaga

SEQ ID NO: 2860505 - RNA, 19 nt, Artificial Sequence
  Description of Artificial Sequence: Synthetic oligonucleotide
auuugaucgugucaagcuu

SEQ ID NO: 2860506 - RNA, 19 nt, Artificial Sequence
  Description of Artificial Sequence: Synthetic oligonucleotide
gaggacuucauccaucacu

SEQ ID NO: 2860507 - RNA, 19 nt, Artificial Sequence
  Description of Artificial Sequence: Synthetic oligonucleotide
ugcagcaucuucuucucau

SEQ ID NO: 2860508 - RNA, 19 nt, Artificial Sequence
  Description of Artificial Sequence: Synthetic oligonucleotide
auuuucuguucugagggcu

SEQ ID NO: 2860509 - RNA, 19 nt, Artificial Sequence
  Description of Artificial Sequence: Synthetic oligonucleotide
cauuuucuguucugagggc

SEQ ID NO: 2860510 - RNA, 19 nt, Artificial Sequence
  Description of Artificial Sequence: Synthetic oligonucleotide
ucccacgagcuacuguuag

SEQ ID NO: 2860511 - RNA, 19 nt, Artificial Sequence
  Description of Artificial Sequence: Synthetic oligonucleotide
uuugcugaagagugauuuc

SEQ ID NO: 2860512 - RNA, 19 nt, Artificial Sequence
  Description of Artificial Sequence: Synthetic oligonucleotide
uugcugggcgugcagagac

SEQ ID NO: 2860513 - RNA, 19 nt, Artificial Sequence
  Description of Artificial Sequence: Synthetic oligonucleotide
gagaacucacucuucucca

SEQ ID NO: 2860514 - RNA, 19 nt, Artificial Sequence
  Description of Artificial Sequence: Synthetic oligonucleotide
aggcacguaaacacagacc

SEQ ID NO: 2860515 - RNA, 19 nt, Artificial Sequence
  Description of Artificial Sequence: Synthetic oligonucleotide
agacacuuuauuauaucca

SEQ ID NO: 2860516 - RNA, 19 nt, Artificial Sequence
  Description of Artificial Sequence: Synthetic oligonucleotide
agggcugagaacucacucu

SEQ ID NO: 2860517 - RNA, 19 nt, Artificial Sequence
  Description of Artificial Sequence: Synthetic oligonucleotide
uacucugcucuucucuaga

SEQ ID NO: 2860518 - RNA, 19 nt, Artificial Sequence
  Description of Artificial Sequence: Synthetic oligonucleotide
uguccugaguugcagcauc

SEQ ID NO: 2860519 - RNA, 19 nt, Artificial Sequence
  Description of Artificial Sequence: Synthetic oligonucleotide
cucgguuucuaucuuccug

SEQ ID NO: 2860520 - RNA, 19 nt, Artificial Sequence
  Description of Artificial Sequence: Synthetic oligonucleotide
aguucaaguuuuauuuucu

SEQ ID NO: 2860521 - RNA, 19 nt, Artificial Sequence
  Description of Artificial Sequence: Synthetic oligonucleotide
gaucgugucaagcuugugu

SEQ ID NO: 2860522 - RNA, 19 nt, Artificial Sequence
  Description of Artificial Sequence: Synthetic oligonucleotide
cuugaggacuucauccauc

SEQ ID NO: 2860523 - RNA, 19 nt, Artificial Sequence
  Description of Artificial Sequence: Synthetic oligonucleotide
aucugagacauuauuugcu

SEQ ID NO: 2860524 - RNA, 19 nt, Artificial Sequence
  Description of Artificial Sequence: Synthetic oligonucleotide
uucauccaucacuugcugu

SEQ ID NO: 2860525 - RNA, 19 nt, Artificial Sequence
  Description of Artificial Sequence: Synthetic oligonucleotide
uugcuaaguauuugaucgu

SEQ ID NO: 2860526 - RNA, 19 nt, Artificial Sequence
  Description of Artificial Sequence: Synthetic oligonucleotide
ugggcgugcagagacacca

SEQ ID NO: 2860527 - RNA, 19 nt, Artificial Sequence
  Description of Artificial Sequence: Synthetic oligonucleotide
uugaucgugucaagcuugu

SEQ ID NO: 2860528 - RNA, 19 nt, Artificial Sequence
  Description of Artificial Sequence: Synthetic oligonucleotide
cuugugugccuccagcauc

SEQ ID NO: 2860529 - RNA, 19 nt, Artificial Sequence
  Description of Artificial Sequence: Synthetic oligonucleotide
uuucuguccugaguugcag

SEQ ID NO: 2860530 - RNA, 19 nt, Artificial Sequence
  Description of Artificial Sequence: Synthetic oligonucleotide
ggcacguaaacacagaccu

SEQ ID NO: 2860531 - RNA, 19 nt, Artificial Sequence
  Description of Artificial Sequence: Synthetic oligonucleotide
uucuuuaaauagacacuuu

SEQ ID NO: 2860532 - RNA, 19 nt, Artificial Sequence
  Description of Artificial Sequence: Synthetic oligonucleotide
uucuguccugaguugcagc

SEQ ID NO: 2860533 - RNA, 19 nt, Artificial Sequence
  Description of Artificial Sequence: Synthetic oligonucleotide
uauauccacaggcgguaaa

SEQ ID NO: 2860534 - RNA, 19 nt, Artificial Sequence
  Description of Artificial Sequence: Synthetic oligonucleotide
cucuucucuagauugaagu

SEQ ID NO: 2860535 - RNA, 19 nt, Artificial Sequence
  Description of Artificial Sequence: Synthetic oligonucleotide
ggcucugucuugcugggcg

SEQ ID NO: 2860536 - RNA, 19 nt, Artificial Sequence
  Description of Artificial Sequence: Synthetic oligonucleotide
cuucuucucauucaaugaa

SEQ ID NO: 2860537 - RNA, 19 nt, Artificial Sequence
  Description of Artificial Sequence: Synthetic oligonucleotide
caauucuuuuacucugcuc

SEQ ID NO: 2860538 - RNA, 19 nt, Artificial Sequence
  Description of Artificial Sequence: Synthetic oligonucleotide
uuuagcugauguaguucaa

SEQ ID NO: 2860539 - RNA, 19 nt, Artificial Sequence
  Description of Artificial Sequence: Synthetic oligonucleotide
acguaaacacagaccuugc

SEQ ID NO: 2860540 - RNA, 19 nt, Artificial Sequence
  Description of Artificial Sequence: Synthetic oligonucleotide
uuccugucugucuggguca

SEQ ID NO: 2860541 - RNA, 19 nt, Artificial Sequence
  Description of Artificial Sequence: Synthetic oligonucleotide
ucugucugggucagggcuc

SEQ ID NO: 2860542 - RNA, 19 nt, Artificial Sequence
  Description of Artificial Sequence: Synthetic oligonucleotide
gagggcugagaacucacuc

SEQ ID NO: 2860543 - RNA, 19 nt, Artificial Sequence
  Description of Artificial Sequence: Synthetic oligonucleotide
aaaaucccacgagcuacug

SEQ ID NO: 2860544 - RNA, 19 nt, Artificial Sequence
  Description of Artificial Sequence: Synthetic oligonucleotide
guuuuagcugauguaguuc

SEQ ID NO: 2860545 - RNA, 19 nt, Artificial Sequence
  Description of Artificial Sequence: Synthetic oligonucleotide
auuauuugcugaagaguga

SEQ ID NO: 2860546 - RNA, 19 nt, Artificial Sequence
  Description of Artificial Sequence: Synthetic oligonucleotide
gacaccauuucuguccuga

SEQ ID NO: 2860547 - RNA, 19 nt, Artificial Sequence
  Description of Artificial Sequence: Synthetic oligonucleotide
auuauauccacaggcggua

SEQ ID NO: 2860548 - RNA, 19 nt, Artificial Sequence
  Description of Artificial Sequence: Synthetic oligonucleotide
ugauguaguucaaguuuua

SEQ ID NO: 2860549 - RNA, 19 nt, Artificial Sequence
  Description of Artificial Sequence: Synthetic oligonucleotide
ucgugucaagcuugugugc

SEQ ID NO: 2860550 - RNA, 19 nt, Artificial Sequence
  Description of Artificial Sequence: Synthetic oligonucleotide
ugcuguuuuagcugaugua

SEQ ID NO: 2860551 - RNA, 19 nt, Artificial Sequence
  Description of Artificial Sequence: Synthetic oligonucleotide
agcugauguaguucaaguu

SEQ ID NO: 2860552 - RNA, 19 nt, Artificial Sequence
  Description of Artificial Sequence: Synthetic oligonucleotide
uugaggccagccaccucgg

SEQ ID NO: 2860553 - RNA, 19 nt, Artificial Sequence
  Description of Artificial Sequence: Synthetic oligonucleotide
gaaguuuaauuugguaucu

SEQ ID NO: 2860554 - RNA, 19 nt, Artificial Sequence
  Description of Artificial Sequence: Synthetic oligonucleotide
ggcgguaaaaucccacgag

SEQ ID NO: 2860555 - RNA, 19 nt, Artificial Sequence
  Description of Artificial Sequence: Synthetic oligonucleotide
agccaccucgguuucuauc

SEQ ID NO: 2860556 - RNA, 19 nt, Artificial Sequence
  Description of Artificial Sequence: Synthetic oligonucleotide
ugggucagggcucugucuu

SEQ ID NO: 2860557 - RNA, 19 nt, Artificial Sequence
  Description of Artificial Sequence: Synthetic oligonucleotide
aggcgguaaaaucccacga

SEQ ID NO: 2860558 - RNA, 19 nt, Artificial Sequence
  Description of Artificial Sequence: Synthetic oligonucleotide
ugaguugcagcaucuucuu

SEQ ID NO: 2860559 - RNA, 19 nt, Artificial Sequence
  Description of Artificial Sequence: Synthetic oligonucleotide
acaggcgguaaaaucccac

SEQ ID NO: 2860560 - RNA, 19 nt, Artificial Sequence
  Description of Artificial Sequence: Synthetic oligonucleotide
aucgucuugaggccagcca

SEQ ID NO: 2860561 - RNA, 19 nt, Artificial Sequence
  Description of Artificial Sequence: Synthetic oligonucleotide
acacagaccuugcuaagua

SEQ ID NO: 2860562 - RNA, 19 nt, Artificial Sequence
  Description of Artificial Sequence: Synthetic oligonucleotide
gggaauuucuuuaaauaga

SEQ ID NO: 2860563 - RNA, 19 nt, Artificial Sequence
  Description of Artificial Sequence: Synthetic oligonucleotide
gcgguaaaaucccacgagc

SEQ ID NO: 2860564 - RNA, 19 nt, Artificial Sequence
  Description of Artificial Sequence: Synthetic oligonucleotide
uguccggaccuugaggacu

SEQ ID NO: 2860565 - RNA, 19 nt, Artificial Sequence
  Description of Artificial Sequence: Synthetic oligonucleotide
ugagggcugagaacucacu

SEQ ID NO: 2860566 - RNA, 19 nt, Artificial Sequence
  Description of Artificial Sequence: Synthetic oligonucleotide
ucugagggcugagaacuca

SEQ ID NO: 2860567 - RNA, 19 nt, Artificial Sequence
  Description of Artificial Sequence: Synthetic oligonucleotide
gcuacuguuaggcacguaa

SEQ ID NO: 2860568 - RNA, 19 nt, Artificial Sequence
  Description of Artificial Sequence: Synthetic oligonucleotide
auucuuuuacucugcucuu

SEQ ID NO: 2860569 - RNA, 19 nt, Artificial Sequence
  Description of Artificial Sequence: Synthetic oligonucleotide
acaccauuucuguccugag

SEQ ID NO: 2860570 - RNA, 19 nt, Artificial Sequence
  Description of Artificial Sequence: Synthetic oligonucleotide
uauuugcugaagagugauu

SEQ ID NO: 2860571 - RNA, 19 nt, Artificial Sequence
  Description of Artificial Sequence: Synthetic oligonucleotide
uucuuuuacucugcucuuc

SEQ ID NO: 2860572 - RNA, 19 nt, Artificial Sequence
  Description of Artificial Sequence: Synthetic oligonucleotide
aggacuucauccaucacuu

SEQ ID NO: 2860573 - RNA, 19 nt, Artificial Sequence
  Description of Artificial Sequence: Synthetic oligonucleotide
ucugggucagggcucuguc

SEQ ID NO: 2860574 - RNA, 19 nt, Artificial Sequence
  Description of Artificial Sequence: Synthetic oligonucleotide
cugaguugcagcaucuucu

SEQ ID NO: 2860575 - RNA, 19 nt, Artificial Sequence
  Description of Artificial Sequence: Synthetic oligonucleotide
cuuuuacucugcucuucuc

SEQ ID NO: 2860576 - RNA, 19 nt, Artificial Sequence
  Description of Artificial Sequence: Synthetic oligonucleotide
agaacucacucuucuccaa

SEQ ID NO: 2860577 - RNA, 19 nt, Artificial Sequence
  Description of Artificial Sequence: Synthetic oligonucleotide
cacuugcuguuuuagcuga

SEQ ID NO: 2860578 - RNA, 19 nt, Artificial Sequence
  Description of Artificial Sequence: Synthetic oligonucleotide
acucacucuucuccaagau

SEQ ID NO: 2860579 - RNA, 19 nt, Artificial Sequence
  Description of Artificial Sequence: Synthetic oligonucleotide
agaccuugcuaaguauuug

SEQ ID NO: 2860580 - RNA, 19 nt, Artificial Sequence
  Description of Artificial Sequence: Synthetic oligonucleotide
ugucugucugggucagggc

SEQ ID NO: 2860581 - RNA, 19 nt, Artificial Sequence
  Description of Artificial Sequence: Synthetic oligonucleotide
acacuuuauuauauccaca

SEQ ID NO: 2860582 - RNA, 19 nt, Artificial Sequence
  Description of Artificial Sequence: Synthetic oligonucleotide
cugagaacucacucuucuc

SEQ ID NO: 2860583 - RNA, 19 nt, Artificial Sequence
  Description of Artificial Sequence: Synthetic oligonucleotide
auauccacaggcgguaaaa

SEQ ID NO: 2860584 - RNA, 19 nt, Artificial Sequence
  Description of Artificial Sequence: Synthetic oligonucleotide
ucuguucugagggcugaga

SEQ ID NO: 2860585 - RNA, 19 nt, Artificial Sequence
  Description of Artificial Sequence: Synthetic oligonucleotide
cugagggcugagaacucac

SEQ ID NO: 2860586 - RNA, 19 nt, Artificial Sequence
  Description of Artificial Sequence: Synthetic oligonucleotide
ucucuagauugaaguuuaa

SEQ ID NO: 2860587 - RNA, 19 nt, Artificial Sequence
  Description of Artificial Sequence: Synthetic oligonucleotide
cuugcuguuuuagcugaug

SEQ ID NO: 2860588 - RNA, 19 nt, Artificial Sequence
  Description of Artificial Sequence: Synthetic oligonucleotide
cuccaagaugaccauaucu

SEQ ID NO: 2860589 - RNA, 19 nt, Artificial Sequence
  Description of Artificial Sequence: Synthetic oligonucleotide
aggccagccaccucgguuu

SEQ ID NO: 2860590 - RNA, 19 nt, Artificial Sequence
  Description of Artificial Sequence: Synthetic oligonucleotide
gauugaaguuuaauuuggu

SEQ ID NO: 2860591 - RNA, 19 nt, Artificial Sequence
  Description of Artificial Sequence: Synthetic oligonucleotide
ugaggacuucauccaucac

SEQ ID NO: 2860592 - RNA, 19 nt, Artificial Sequence
  Description of Artificial Sequence: Synthetic oligonucleotide
ugcucuucucuagauugaa

SEQ ID NO: 2860593 - RNA, 19 nt, Artificial Sequence
  Description of Artificial Sequence: Synthetic oligonucleotide
uugcagcaucuucuucuca

SEQ ID NO: 2860594 - RNA, 19 nt, Artificial Sequence
  Description of Artificial Sequence: Synthetic oligonucleotide
cagagacaccauuucuguc

SEQ ID NO: 2860595 - RNA, 19 nt, Artificial Sequence
  Description of Artificial Sequence: Synthetic oligonucleotide
cgagcuacuguuaggcacg

SEQ ID NO: 2860596 - RNA, 19 nt, Artificial Sequence
  Description of Artificial Sequence: Synthetic oligonucleotide
cuacuguuaggcacguaaa

SEQ ID NO: 2860597 - RNA, 19 nt, Artificial Sequence
  Description of Artificial Sequence: Synthetic oligonucleotide
ucugucuugcugggcgugc

SEQ ID NO: 2860598 - RNA, 19 nt, Artificial Sequence
  Description of Artificial Sequence: Synthetic oligonucleotide
uagcaaucugagacauuau

SEQ ID NO: 2860599 - RNA, 19 nt, Artificial Sequence
  Description of Artificial Sequence: Synthetic oligonucleotide
ugucaagcuugugugccuc

SEQ ID NO: 2860600 - RNA, 19 nt, Artificial Sequence
  Description of Artificial Sequence: Synthetic oligonucleotide
uccaucacuugcuguuuua

SEQ ID NO: 2860601 - RNA, 19 nt, Artificial Sequence
  Description of Artificial Sequence: Synthetic oligonucleotide
uauccacaggcgguaaaau

SEQ ID NO: 2860602 - RNA, 19 nt, Artificial Sequence
  Description of Artificial Sequence: Synthetic oligonucleotide
uuauauccacaggcgguaa

SEQ ID NO: 2860603 - RNA, 19 nt, Artificial Sequence
  Description of Artificial Sequence: Synthetic oligonucleotide
ccuugcuaaguauuugauc

SEQ ID NO: 2860604 - RNA, 19 nt, Artificial Sequence
  Description of Artificial Sequence: Synthetic oligonucleotide
cacucuucuccaagaugac

SEQ ID NO: 2860605 - RNA, 19 nt, Artificial Sequence
  Description of Artificial Sequence: Synthetic oligonucleotide
gguaaaaucccacgagcua

SEQ ID NO: 2860606 - RNA, 19 nt, Artificial Sequence
  Description of Artificial Sequence: Synthetic oligonucleotide
ucuuccugucugucugggu

SEQ ID NO: 2860607 - RNA, 19 nt, Artificial Sequence
  Description of Artificial Sequence: Synthetic oligonucleotide
acagaccuugcuaaguauu

SEQ ID NO: 2860608 - RNA, 19 nt, Artificial Sequence
  Description of Artificial Sequence: Synthetic oligonucleotide
auuucuguccugaguugca

SEQ ID NO: 2860609 - RNA, 19 nt, Artificial Sequence
  Description of Artificial Sequence: Synthetic oligonucleotide
gagacaccauuucuguccu

SEQ ID NO: 2860610 - RNA, 19 nt, Artificial Sequence
  Description of Artificial Sequence: Synthetic oligonucleotide
uucugagggcugagaacuc

SEQ ID NO: 2860611 - RNA, 19 nt, Artificial Sequence
  Description of Artificial Sequence: Synthetic oligonucleotide
gucaagcuugugugccucc

SEQ ID NO: 2860612 - RNA, 19 nt, Artificial Sequence
  Description of Artificial Sequence: Synthetic oligonucleotide
gucugucugggucagggcu

SEQ ID NO: 2860613 - RNA, 19 nt, Artificial Sequence
  Description of Artificial Sequence: Synthetic oligonucleotide
gaguugcagcaucuucuuc

SEQ ID NO: 2860614 - RNA, 19 nt, Artificial Sequence
  Description of Artificial Sequence: Synthetic oligonucleotide
guaguucaaguuuuauuuu

SEQ ID NO: 2860615 - RNA, 19 nt, Artificial Sequence
  Description of Artificial Sequence: Synthetic oligonucleotide
uucuguucugagggcugag

SEQ ID NO: 2860616 - RNA, 19 nt, Artificial Sequence
  Description of Artificial Sequence: Synthetic oligonucleotide
gcugauguaguucaaguuu

SEQ ID NO: 2860617 - RNA, 19 nt, Artificial Sequence
  Description of Artificial Sequence: Synthetic oligonucleotide
ccacaggcgguaaaauccc

SEQ ID NO: 2860618 - RNA, 19 nt, Artificial Sequence
  Description of Artificial Sequence: Synthetic oligonucleotide
ccacgagcuacuguuaggc

SEQ ID NO: 2860619 - RNA, 19 nt, Artificial Sequence
  Description of Artificial Sequence: Synthetic oligonucleotide
cugauguaguucaaguuuu

SEQ ID NO: 2860620 - RNA, 19 nt, Artificial Sequence
  Description of Artificial Sequence: Synthetic oligonucleotide
ccagcaucgucuugaggcc

SEQ ID NO: 2860621 - RNA, 19 nt, Artificial Sequence
  Description of Artificial Sequence: Synthetic oligonucleotide
uccugucugucugggucag

SEQ ID NO: 2860622 - RNA, 19 nt, Artificial Sequence
  Description of Artificial Sequence: Synthetic oligonucleotide
caagaugaccauaucuuuu

SEQ ID NO: 2860623 - RNA, 19 nt, Artificial Sequence
  Description of Artificial Sequence: Synthetic oligonucleotide
gauguaguucaaguuuuau

SEQ ID NO: 2860624 - RNA, 19 nt, Artificial Sequence
  Description of Artificial Sequence: Synthetic oligonucleotide
cuguuuuagcugauguagu

SEQ ID NO: 2860625 - RNA, 19 nt, Artificial Sequence
  Description of Artificial Sequence: Synthetic oligonucleotide
caaugggaauuucuuuaaa

SEQ ID NO: 2860626 - RNA, 19 nt, Artificial Sequence
  Description of Artificial Sequence: Synthetic oligonucleotide
caccucgguuucuaucuuc

SEQ ID NO: 2860627 - RNA, 19 nt, Artificial Sequence
  Description of Artificial Sequence: Synthetic oligonucleotide
caucgucuugaggccagcc

SEQ ID NO: 2860628 - RNA, 19 nt, Artificial Sequence
  Description of Artificial Sequence: Synthetic oligonucleotide
gcaucuucuucucauucaa

SEQ ID NO: 2860629 - RNA, 19 nt, Artificial Sequence
  Description of Artificial Sequence: Synthetic oligonucleotide
auccaucacuugcuguuuu

SEQ ID NO: 2860630 - RNA, 19 nt, Artificial Sequence
  Description of Artificial Sequence: Synthetic oligonucleotide
agcaucgucuugaggccag

SEQ ID NO: 2860631 - RNA, 19 nt, Artificial Sequence
  Description of Artificial Sequence: Synthetic oligonucleotide
ugcugggcgugcagagaca

SEQ ID NO: 2860632 - RNA, 19 nt, Artificial Sequence
  Description of Artificial Sequence: Synthetic oligonucleotide
accuugcuaaguauuugau

SEQ ID NO: 2860633 - RNA, 19 nt, Artificial Sequence
  Description of Artificial Sequence: Synthetic oligonucleotide
ugaucgugucaagcuugug

SEQ ID NO: 2860634 - RNA, 19 nt, Artificial Sequence
  Description of Artificial Sequence: Synthetic oligonucleotide
caaguuuuauuuucucauu

SEQ ID NO: 2860635 - RNA, 19 nt, Artificial Sequence
  Description of Artificial Sequence: Synthetic oligonucleotide
ggaccuugaggacuucauc

SEQ ID NO: 2860636 - RNA, 19 nt, Artificial Sequence
  Description of Artificial Sequence: Synthetic oligonucleotide
cuguccggaccuugaggac

SEQ ID NO: 2860637 - RNA, 19 nt, Artificial Sequence
  Description of Artificial Sequence: Synthetic oligonucleotide
ugguacucuuaaggcaaaa

SEQ ID NO: 2860638 - RNA, 19 nt, Artificial Sequence
  Description of Artificial Sequence: Synthetic oligonucleotide
cugcucuucucuagauuga

SEQ ID NO: 2860639 - RNA, 19 nt, Artificial Sequence
  Description of Artificial Sequence: Synthetic oligonucleotide
cuucucuagauugaaguuu

SEQ ID NO: 2860640 - RNA, 19 nt, Artificial Sequence
  Description of Artificial Sequence: Synthetic oligonucleotide
gcugagaacucacucuucu

SEQ ID NO: 2860641 - RNA, 19 nt, Artificial Sequence
  Description of Artificial Sequence: Synthetic oligonucleotide
ccauuucuguccugaguug

SEQ ID NO: 2860642 - RNA, 19 nt, Artificial Sequence
  Description of Artificial Sequence: Synthetic oligonucleotide
gugcagagacaccauuucu

SEQ ID NO: 2860643 - RNA, 19 nt, Artificial Sequence
  Description of Artificial Sequence: Synthetic oligonucleotide
gcagagacaccauuucugu

SEQ ID NO: 2860644 - RNA, 19 nt, Artificial Sequence
  Description of Artificial Sequence: Synthetic oligonucleotide
cgugucaagcuugugugcc

SEQ ID NO: 2860645 - RNA, 19 nt, Artificial Sequence
  Description of Artificial Sequence: Synthetic oligonucleotide
cacgagcuacuguuaggca

SEQ ID NO: 2860646 - RNA, 19 nt, Artificial Sequence
  Description of Artificial Sequence: Synthetic oligonucleotide
agacaccauuucuguccug

SEQ ID NO: 2860647 - RNA, 19 nt, Artificial Sequence
  Description of Artificial Sequence: Synthetic oligonucleotide
cugggcgugcagagacacc

SEQ ID NO: 2860648 - RNA, 19 nt, Artificial Sequence
  Description of Artificial Sequence: Synthetic oligonucleotide
cccacgagcuacuguuagg

SEQ ID NO: 2860649 - RNA, 19 nt, Artificial Sequence
  Description of Artificial Sequence: Synthetic oligonucleotide
ccaucacuugcuguuuuag

SEQ ID NO: 2860650 - RNA, 19 nt, Artificial Sequence
  Description of Artificial Sequence: Synthetic oligonucleotide
gcucuucucuagauugaag

SEQ ID NO: 2860651 - RNA, 19 nt, Artificial Sequence
  Description of Artificial Sequence: Synthetic oligonucleotide
ugaggccagccaccucggu

SEQ ID NO: 2860652 - RNA, 19 nt, Artificial Sequence
  Description of Artificial Sequence: Synthetic oligonucleotide
gccaccucgguuucuaucu

SEQ ID NO: 2860653 - RNA, 19 nt, Artificial Sequence
  Description of Artificial Sequence: Synthetic oligonucleotide
cucugucuugcugggcgug

SEQ ID NO: 2860654 - RNA, 19 nt, Artificial Sequence
  Description of Artificial Sequence: Synthetic oligonucleotide
ugccuccagcaucgucuug

SEQ ID NO: 2860655 - RNA, 19 nt, Artificial Sequence
  Description of Artificial Sequence: Synthetic oligonucleotide
cacaggcgguaaaauccca

SEQ ID NO: 2860656 - RNA, 19 nt, Artificial Sequence
  Description of Artificial Sequence: Synthetic oligonucleotide
ggucagggcucugucuugc

SEQ ID NO: 2860657 - RNA, 19 nt, Artificial Sequence
  Description of Artificial Sequence: Synthetic oligonucleotide
gcaaucugagacauuauuu

SEQ ID NO: 2860658 - RNA, 19 nt, Artificial Sequence
  Description of Artificial Sequence: Synthetic oligonucleotide
cagaccuugcuaaguauuu

SEQ ID NO: 2860659 - RNA, 19 nt, Artificial Sequence
  Description of Artificial Sequence: Synthetic oligonucleotide
cgugcagagacaccauuuc

SEQ ID NO: 2860660 - RNA, 19 nt, Artificial Sequence
  Description of Artificial Sequence: Synthetic oligonucleotide
cugguacucuuaaggcaaa

SEQ ID NO: 2860661 - RNA, 19 nt, Artificial Sequence
  Description of Artificial Sequence: Synthetic oligonucleotide
cucauucaaugaauacaau

SEQ ID NO: 2860662 - RNA, 19 nt, Artificial Sequence
  Description of Artificial Sequence: Synthetic oligonucleotide
gucuugcugggcgugcaga

SEQ ID NO: 2860663 - RNA, 19 nt, Artificial Sequence
  Description of Artificial Sequence: Synthetic oligonucleotide
cucuagauugaaguuuaau

SEQ ID NO: 2860664 - RNA, 19 nt, Artificial Sequence
  Description of Artificial Sequence: Synthetic oligonucleotide
gguuucuaucuuccugucu

SEQ ID NO: 2860665 - RNA, 19 nt, Artificial Sequence
  Description of Artificial Sequence: Synthetic oligonucleotide
uccugaguugcagcaucuu

SEQ ID NO: 2860666 - RNA, 19 nt, Artificial Sequence
  Description of Artificial Sequence: Synthetic oligonucleotide
caccauuucuguccugagu

SEQ ID NO: 2860667 - RNA, 19 nt, Artificial Sequence
  Description of Artificial Sequence: Synthetic oligonucleotide
gugugccuccagcaucguc

SEQ ID NO: 2860668 - RNA, 19 nt, Artificial Sequence
  Description of Artificial Sequence: Synthetic oligonucleotide
gugucaagcuugugugccu

SEQ ID NO: 2860669 - RNA, 19 nt, Artificial Sequence
  Description of Artificial Sequence: Synthetic oligonucleotide
cgucuugaggccagccacc

SEQ ID NO: 2860670 - RNA, 19 nt, Artificial Sequence
  Description of Artificial Sequence: Synthetic oligonucleotide
cuugcugggcgugcagaga

SEQ ID NO: 2860671 - RNA, 19 nt, Artificial Sequence
  Description of Artificial Sequence: Synthetic oligonucleotide
gcugggcgugcagagacac

SEQ ID NO: 2860672 - RNA, 19 nt, Artificial Sequence
  Description of Artificial Sequence: Synthetic oligonucleotide
gggucagggcucugucuug

SEQ ID NO: 2860673 - RNA, 19 nt, Artificial Sequence
  Description of Artificial Sequence: Synthetic oligonucleotide
gaggccagccaccucgguu

SEQ ID NO: 2860674 - RNA, 19 nt, Artificial Sequence
  Description of Artificial Sequence: Synthetic oligonucleotide
cacagaccuugcuaaguau

SEQ ID NO: 2860675 - RNA, 19 nt, Artificial Sequence
  Description of Artificial Sequence: Synthetic oligonucleotide
gcuaaguauuugaucgugu

SEQ ID NO: 2860676 - RNA, 19 nt, Artificial Sequence
  Description of Artificial Sequence: Synthetic oligonucleotide
caucuucuucucauucaau

SEQ ID NO: 2860677 - RNA, 19 nt, Artificial Sequence
  Description of Artificial Sequence: Synthetic oligonucleotide
acuugcuguuuuagcugau

SEQ ID NO: 2860678 - RNA, 19 nt, Artificial Sequence
  Description of Artificial Sequence: Synthetic oligonucleotide
ugugugccuccagcaucgu

SEQ ID NO: 2860679 - RNA, 19 nt, Artificial Sequence
  Description of Artificial Sequence: Synthetic oligonucleotide
cagcaucgucuugaggcca

SEQ ID NO: 2860680 - RNA, 19 nt, Artificial Sequence
  Description of Artificial Sequence: Synthetic oligonucleotide
ugguaucuguccggaccuu

SEQ ID NO: 2860681 - RNA, 19 nt, Artificial Sequence
  Description of Artificial Sequence: Synthetic oligonucleotide
gucuugaggccagccaccu

SEQ ID NO: 2860682 - RNA, 19 nt, Artificial Sequence
  Description of Artificial Sequence: Synthetic oligonucleotide
cugggucagggcucugucu

SEQ ID NO: 2860683 - RNA, 19 nt, Artificial Sequence
  Description of Artificial Sequence: Synthetic oligonucleotide
gggcugagaacucacucuu

SEQ ID NO: 2860684 - RNA, 19 nt, Artificial Sequence
  Description of Artificial Sequence: Synthetic oligonucleotide
ccaagaugaccauaucuuu

SEQ ID NO: 2860685 - RNA, 19 nt, Artificial Sequence
  Description of Artificial Sequence: Synthetic oligonucleotide
cgguaaaaucccacgagcu

SEQ ID NO: 2860686 - RNA, 19 nt, Artificial Sequence
  Description of Artificial Sequence: Synthetic oligonucleotide
ggcugagaacucacucuuc

SEQ ID NO: 2860687 - RNA, 19 nt, Artificial Sequence
  Description of Artificial Sequence: Synthetic oligonucleotide
guccugaguugcagcaucu

SEQ ID NO: 2860688 - RNA, 19 nt, Artificial Sequence
  Description of Artificial Sequence: Synthetic oligonucleotide
aucccacgagcuacuguua

SEQ ID NO: 2860689 - RNA, 19 nt, Artificial Sequence
  Description of Artificial Sequence: Synthetic oligonucleotide
ugucugggucagggcucug

SEQ ID NO: 2860690 - RNA, 19 nt, Artificial Sequence
  Description of Artificial Sequence: Synthetic oligonucleotide
gcuugugugccuccagcau

SEQ ID NO: 2860691 - RNA, 19 nt, Artificial Sequence
  Description of Artificial Sequence: Synthetic oligonucleotide
gagcuacuguuaggcacgu

SEQ ID NO: 2860692 - RNA, 19 nt, Artificial Sequence
  Description of Artificial Sequence: Synthetic oligonucleotide
cgguuucuaucuuccuguc

SEQ ID NO: 2860693 - RNA, 19 nt, Artificial Sequence
  Description of Artificial Sequence: Synthetic oligonucleotide
gucagggcucugucuugcu

SEQ ID NO: 2860694 - RNA, 19 nt, Artificial Sequence
  Description of Artificial Sequence: Synthetic oligonucleotide
gucugggucagggcucugu

SEQ ID NO: 2860695 - RNA, 19 nt, Artificial Sequence
  Description of Artificial Sequence: Synthetic oligonucleotide
gcaucgucuugaggccagc

SEQ ID NO: 2860696 - RNA, 19 nt, Artificial Sequence
  Description of Artificial Sequence: Synthetic oligonucleotide
cauccaucacuugcuguuu

SEQ ID NO: 2860697 - RNA, 19 nt, Artificial Sequence
  Description of Artificial Sequence: Synthetic oligonucleotide
uccggaccuugaggacuuc

SEQ ID NO: 2860698 - RNA, 19 nt, Artificial Sequence
  Description of Artificial Sequence: Synthetic oligonucleotide
gugccuccagcaucgucuu

SEQ ID NO: 2860699 - RNA, 19 nt, Artificial Sequence
  Description of Artificial Sequence: Synthetic oligonucleotide
agcuacuguuaggcacgua

SEQ ID NO: 2860700 - RNA, 19 nt, Artificial Sequence
  Description of Artificial Sequence: Synthetic oligonucleotide
cguaaacacagaccuugcu

SEQ ID NO: 2860701 - RNA, 19 nt, Artificial Sequence
  Description of Artificial Sequence: Synthetic oligonucleotide
gcucugucuugcugggcgu

SEQ ID NO: 2860702 - RNA, 19 nt, Artificial Sequence
  Description of Artificial Sequence: Synthetic oligonucleotide
ggccagccaccucgguuuc

SEQ ID NO: 2860703 - RNA, 19 nt, Artificial Sequence
  Description of Artificial Sequence: Synthetic oligonucleotide
ggcgugcagagacaccauu

SEQ ID NO: 2860704 - RNA, 19 nt, Artificial Sequence
  Description of Artificial Sequence: Synthetic oligonucleotide
gggcucugucuugcugggc

SEQ ID NO: 2860705 - RNA, 19 nt, Artificial Sequence
  Description of Artificial Sequence: Synthetic oligonucleotide
ccugucugucugggucagg

SEQ ID NO: 2860706 - RNA, 19 nt, Artificial Sequence
  Description of Artificial Sequence: Synthetic oligonucleotide
ccuugaggacuucauccau

SEQ ID NO: 2860707 - RNA, 19 nt, Artificial Sequence
  Description of Artificial Sequence: Synthetic oligonucleotide
guccggaccuugaggacuu

SEQ ID NO: 2860708 - RNA, 19 nt, Artificial Sequence
  Description of Artificial Sequence: Synthetic oligonucleotide
cuguccugaguugcagcau

SEQ ID NO: 2860709 - RNA, 19 nt, Artificial Sequence
  Description of Artificial Sequence: Synthetic oligonucleotide
gcgugcagagacaccauuu

SEQ ID NO: 2860710 - RNA, 19 nt, Artificial Sequence
  Description of Artificial Sequence: Synthetic oligonucleotide
ccggaccuugaggacuuca

SEQ ID NO: 2860711 - RNA, 19 nt, Artificial Sequence
  Description of Artificial Sequence: Synthetic oligonucleotide
ccagccaccucgguuucua

SEQ ID NO: 2860712 - RNA, 19 nt, Artificial Sequence
  Description of Artificial Sequence: Synthetic oligonucleotide
cagccaccucgguuucuau

SEQ ID NO: 2860713 - RNA, 19 nt, Artificial Sequence
  Description of Artificial Sequence: Synthetic oligonucleotide
gcacguaaacacagaccuu

SEQ ID NO: 2860714 - RNA, 19 nt, Artificial Sequence
  Description of Artificial Sequence: Synthetic oligonucleotide
cggaccuugaggacuucau

SEQ ID NO: 2860715 - RNA, 19 nt, Artificial Sequence
  Description of Artificial Sequence: Synthetic oligonucleotide
gggcgugcagagacaccau

SEQ ID NO: 2860716 - RNA, 19 nt, Artificial Sequence
  Description of Artificial Sequence: Synthetic oligonucleotide
ccaccucgguuucuaucuu

SEQ ID NO: 2860717 - RNA, 19 nt, Artificial Sequence
  Description of Artificial Sequence: Synthetic oligonucleotide
acaagugucaccuuugggc

SEQ ID NO: 2860718 - RNA, 19 nt, Artificial Sequence
  Description of Artificial Sequence: Synthetic oligonucleotide
agugucagcauauccaggc

SEQ ID NO: 2860719 - RNA, 19 nt, Artificial Sequence
  Description of Artificial Sequence: Synthetic oligonucleotide
uccucauucaguaaguugu

SEQ ID NO: 2860720 - RNA, 19 nt, Artificial Sequence
  Description of Artificial Sequence: Synthetic oligonucleotide
uguaccagcaagaggagag

SEQ ID NO: 2860721 - RNA, 19 nt, Artificial Sequence
  Description of Artificial Sequence: Synthetic oligonucleotide
aauggcaccuggaacaggc

SEQ ID NO: 2860722 - RNA, 19 nt, Artificial Sequence
  Description of Artificial Sequence: Synthetic oligonucleotide
uucaguaaguuguucagug

SEQ ID NO: 2860723 - RNA, 19 nt, Artificial Sequence
  Description of Artificial Sequence: Synthetic oligonucleotide
uuguucagugguuacagag

SEQ ID NO: 2860724 - RNA, 19 nt, Artificial Sequence
  Description of Artificial Sequence: Synthetic oligonucleotide
caaggcuucagcaaccugg

SEQ ID NO: 2860725 - RNA, 19 nt, Artificial Sequence
  Description of Artificial Sequence: Synthetic oligonucleotide
uguagcucagacaauggca

SEQ ID NO: 2860726 - RNA, 19 nt, Artificial Sequence
  Description of Artificial Sequence: Synthetic oligonucleotide
uacagugucagcauaucca

SEQ ID NO: 2860727 - RNA, 19 nt, Artificial Sequence
  Description of Artificial Sequence: Synthetic oligonucleotide
uuugggcugagccagggag

SEQ ID NO: 2860728 - RNA, 19 nt, Artificial Sequence
  Description of Artificial Sequence: Synthetic oligonucleotide
gaaaaggcccuucagcugc

SEQ ID NO: 2860729 - RNA, 19 nt, Artificial Sequence
  Description of Artificial Sequence: Synthetic oligonucleotide
ucauucaguaaguuguuca

SEQ ID NO: 2860730 - RNA, 19 nt, Artificial Sequence
  Description of Artificial Sequence: Synthetic oligonucleotide
ggaauaggcaccuacagug

SEQ ID NO: 2860731 - RNA, 19 nt, Artificial Sequence
  Description of Artificial Sequence: Synthetic oligonucleotide
uagucagccuuccagaaca

SEQ ID NO: 2860732 - RNA, 19 nt, Artificial Sequence
  Description of Artificial Sequence: Synthetic oligonucleotide
aacaagugucaccuuuggg

SEQ ID NO: 2860733 - RNA, 19 nt, Artificial Sequence
  Description of Artificial Sequence: Synthetic oligonucleotide
ucuaccucacuucuccuag

SEQ ID NO: 2860734 - RNA, 19 nt, Artificial Sequence
  Description of Artificial Sequence: Synthetic oligonucleotide
uuggagucaggccacaucu

SEQ ID NO: 2860735 - RNA, 19 nt, Artificial Sequence
  Description of Artificial Sequence: Synthetic oligonucleotide
gaggacauggcggaaaagg

SEQ ID NO: 2860736 - RNA, 19 nt, Artificial Sequence
  Description of Artificial Sequence: Synthetic oligonucleotide
gagguugugguguucuugg

SEQ ID NO: 2860737 - RNA, 19 nt, Artificial Sequence
  Description of Artificial Sequence: Synthetic oligonucleotide
gguuacagagcucauagcc

SEQ ID NO: 2860738 - RNA, 19 nt, Artificial Sequence
  Description of Artificial Sequence: Synthetic oligonucleotide
ucaguaaguuguucagugg

SEQ ID NO: 2860739 - RNA, 19 nt, Artificial Sequence
  Description of Artificial Sequence: Synthetic oligonucleotide
gugguuacagagcucauag

SEQ ID NO: 2860740 - RNA, 19 nt, Artificial Sequence
  Description of Artificial Sequence: Synthetic oligonucleotide
uguucagugguuacagagc

SEQ ID NO: 2860741 - RNA, 19 nt, Artificial Sequence
  Description of Artificial Sequence: Synthetic oligonucleotide
uaguugggagcucagaccu

SEQ ID NO: 2860742 - RNA, 19 nt, Artificial Sequence
  Description of Artificial Sequence: Synthetic oligonucleotide
uggguagauguucacuggg

SEQ ID NO: 2860743 - RNA, 19 nt, Artificial Sequence
  Description of Artificial Sequence: Synthetic oligonucleotide
ucuguagcucagacaaugg

SEQ ID NO: 2860744 - RNA, 19 nt, Artificial Sequence
  Description of Artificial Sequence: Synthetic oligonucleotide
auagccuggacacgagagc

SEQ ID NO: 2860745 - RNA, 19 nt, Artificial Sequence
  Description of Artificial Sequence: Synthetic oligonucleotide
uccagaacaagugucaccu

SEQ ID NO: 2860746 - RNA, 19 nt, Artificial Sequence
  Description of Artificial Sequence: Synthetic oligonucleotide
agacaauggcaccuggaac

SEQ ID NO: 2860747 - RNA, 19 nt, Artificial Sequence
  Description of Artificial Sequence: Synthetic oligonucleotide
acagugucagcauauccag

SEQ ID NO: 2860748 - RNA, 19 nt, Artificial Sequence
  Description of Artificial Sequence: Synthetic oligonucleotide
ucagccuuccagaacaagu

SEQ ID NO: 2860749 - RNA, 19 nt, Artificial Sequence
  Description of Artificial Sequence: Synthetic oligonucleotide
agaccuuggagucaggcca

SEQ ID NO: 2860750 - RNA, 19 nt, Artificial Sequence
  Description of Artificial Sequence: Synthetic oligonucleotide
cauucaguaaguuguucag

SEQ ID NO: 2860751 - RNA, 19 nt, Artificial Sequence
  Description of Artificial Sequence: Synthetic oligonucleotide
uugcucuucacguugcuga

SEQ ID NO: 2860752 - RNA, 19 nt, Artificial Sequence
  Description of Artificial Sequence: Synthetic oligonucleotide
gaacaagugucaccuuugg

SEQ ID NO: 2860753 - RNA, 19 nt, Artificial Sequence
  Description of Artificial Sequence: Synthetic oligonucleotide
uucccagcaggccaggugc

SEQ ID NO: 2860754 - RNA, 19 nt, Artificial Sequence
  Description of Artificial Sequence: Synthetic oligonucleotide
agucaggccacaucugagg

SEQ ID NO: 2860755 - RNA, 19 nt, Artificial Sequence
  Description of Artificial Sequence: Synthetic oligonucleotide
gucaccuuugggcugagcc

SEQ ID NO: 2860756 - RNA, 19 nt, Artificial Sequence
  Description of Artificial Sequence: Synthetic oligonucleotide
cauagccuggacacgagag

SEQ ID NO: 2860757 - RNA, 19 nt, Artificial Sequence
  Description of Artificial Sequence: Synthetic oligonucleotide
ugcaggaauaggcaccuac

SEQ ID NO: 2860758 - RNA, 19 nt, Artificial Sequence
  Description of Artificial Sequence: Synthetic oligonucleotide
gacauggcggaaaaggccc

SEQ ID NO: 2860759 - RNA, 19 nt, Artificial Sequence
  Description of Artificial Sequence: Synthetic oligonucleotide
aguuguucagugguuacag

SEQ ID NO: 2860760 - RNA, 19 nt, Artificial Sequence
  Description of Artificial Sequence: Synthetic oligonucleotide
cucucuguagcucagacaa

SEQ ID NO: 2860761 - RNA, 19 nt, Artificial Sequence
  Description of Artificial Sequence: Synthetic oligonucleotide
agcagcucaacucucucug

SEQ ID NO: 2860762 - RNA, 19 nt, Artificial Sequence
  Description of Artificial Sequence: Synthetic oligonucleotide
aggacauggcggaaaaggc

SEQ ID NO: 2860763 - RNA, 19 nt, Artificial Sequence
  Description of Artificial Sequence: Synthetic oligonucleotide
agagcucauagccuggaca

SEQ ID NO: 2860764 - RNA, 19 nt, Artificial Sequence
  Description of Artificial Sequence: Synthetic oligonucleotide
uagauguucacugggugca

SEQ ID NO: 2860765 - RNA, 19 nt, Artificial Sequence
  Description of Artificial Sequence: Synthetic oligonucleotide
caagaggagagccgggucc

SEQ ID NO: 2860766 - RNA, 19 nt, Artificial Sequence
  Description of Artificial Sequence: Synthetic oligonucleotide
ucugaggucuccucauuca

SEQ ID NO: 2860767 - RNA, 19 nt, Artificial Sequence
  Description of Artificial Sequence: Synthetic oligonucleotide
cuacagugucagcauaucc

SEQ ID NO: 2860768 - RNA, 19 nt, Artificial Sequence
  Description of Artificial Sequence: Synthetic oligonucleotide
agcaaccuggggcucuugc

SEQ ID NO: 2860769 - RNA, 19 nt, Artificial Sequence
  Description of Artificial Sequence: Synthetic oligonucleotide
uaaguuguucagugguuac

SEQ ID NO: 2860770 - RNA, 19 nt, Artificial Sequence
  Description of Artificial Sequence: Synthetic oligonucleotide
gucaggccacaucugaggg

SEQ ID NO: 2860771 - RNA, 19 nt, Artificial Sequence
  Description of Artificial Sequence: Synthetic oligonucleotide
uacagagcucauagccugg

SEQ ID NO: 2860772 - RNA, 19 nt, Artificial Sequence
  Description of Artificial Sequence: Synthetic oligonucleotide
cuucacguugcugagguug

SEQ ID NO: 2860773 - RNA, 19 nt, Artificial Sequence
  Description of Artificial Sequence: Synthetic oligonucleotide
agcauauccaggcuuccca

SEQ ID NO: 2860774 - RNA, 19 nt, Artificial Sequence
  Description of Artificial Sequence: Synthetic oligonucleotide
caggaauaggcaccuacag

SEQ ID NO: 2860775 - RNA, 19 nt, Artificial Sequence
  Description of Artificial Sequence: Synthetic oligonucleotide
ucagacaauggcaccugga

SEQ ID NO: 2860776 - RNA, 19 nt, Artificial Sequence
  Description of Artificial Sequence: Synthetic oligonucleotide
uccuagucagccuuccaga

SEQ ID NO: 2860777 - RNA, 19 nt, Artificial Sequence
  Description of Artificial Sequence: Synthetic oligonucleotide
aggaauaggcaccuacagu

SEQ ID NO: 2860778 - RNA, 19 nt, Artificial Sequence
  Description of Artificial Sequence: Synthetic oligonucleotide
uuccagaacaagugucacc

SEQ ID NO: 2860779 - RNA, 19 nt, Artificial Sequence
  Description of Artificial Sequence: Synthetic oligonucleotide
agcucaacucucucuguag

SEQ ID NO: 2860780 - RNA, 19 nt, Artificial Sequence
  Description of Artificial Sequence: Synthetic oligonucleotide
cuguagcucagacaauggc

SEQ ID NO: 2860781 - RNA, 19 nt, Artificial Sequence
  Description of Artificial Sequence: Synthetic oligonucleotide
ucaggccacaucugagggg

SEQ ID NO: 2860782 - RNA, 19 nt, Artificial Sequence
  Description of Artificial Sequence: Synthetic oligonucleotide
guagcucagacaauggcac

SEQ ID NO: 2860783 - RNA, 19 nt, Artificial Sequence
  Description of Artificial Sequence: Synthetic oligonucleotide
ggcuguaccagcaagagga

SEQ ID NO: 2860784 - RNA, 19 nt, Artificial Sequence
  Description of Artificial Sequence: Synthetic oligonucleotide
agcugcagguggcucaacg

SEQ ID NO: 2860785 - RNA, 19 nt, Artificial Sequence
  Description of Artificial Sequence: Synthetic oligonucleotide
cuggguagauguucacugg

SEQ ID NO: 2860786 - RNA, 19 nt, Artificial Sequence
  Description of Artificial Sequence: Synthetic oligonucleotide
ucaccuuugggcugagcca

SEQ ID NO: 2860787 - RNA, 19 nt, Artificial Sequence
  Description of Artificial Sequence: Synthetic oligonucleotide
auccaggcuucccagcagg

SEQ ID NO: 2860788 - RNA, 19 nt, Artificial Sequence
  Description of Artificial Sequence: Synthetic oligonucleotide
cucuguagcucagacaaug

SEQ ID NO: 2860789 - RNA, 19 nt, Artificial Sequence
  Description of Artificial Sequence: Synthetic oligonucleotide
cuccuagucagccuuccag

SEQ ID NO: 2860790 - RNA, 19 nt, Artificial Sequence
  Description of Artificial Sequence: Synthetic oligonucleotide
aggccuggaggacauggcg

SEQ ID NO: 2860791 - RNA, 19 nt, Artificial Sequence
  Description of Artificial Sequence: Synthetic oligonucleotide
uucacugggugcagcagcu

SEQ ID NO: 2860792 - RNA, 19 nt, Artificial Sequence
  Description of Artificial Sequence: Synthetic oligonucleotide
aagugucaccuuugggcug

SEQ ID NO: 2860793 - RNA, 19 nt, Artificial Sequence
  Description of Artificial Sequence: Synthetic oligonucleotide
ggcuucagcaaccuggggc

SEQ ID NO: 2860794 - RNA, 19 nt, Artificial Sequence
  Description of Artificial Sequence: Synthetic oligonucleotide
aaccuggggcucuugcucu

SEQ ID NO: 2860795 - RNA, 19 nt, Artificial Sequence
  Description of Artificial Sequence: Synthetic oligonucleotide
ucacuucuccuagucagcc

SEQ ID NO: 2860796 - RNA, 19 nt, Artificial Sequence
  Description of Artificial Sequence: Synthetic oligonucleotide
cuccucauucaguaaguug

SEQ ID NO: 2860797 - RNA, 19 nt, Artificial Sequence
  Description of Artificial Sequence: Synthetic oligonucleotide
aaguuguucagugguuaca

SEQ ID NO: 2860798 - RNA, 19 nt, Artificial Sequence
  Description of Artificial Sequence: Synthetic oligonucleotide
ugaggucuccucauucagu

SEQ ID NO: 2860799 - RNA, 19 nt, Artificial Sequence
  Description of Artificial Sequence: Synthetic oligonucleotide
agguugugguguucuuggc

SEQ ID NO: 2860800 - RNA, 19 nt, Artificial Sequence
  Description of Artificial Sequence: Synthetic oligonucleotide
gguguucuuggccugcagg

SEQ ID NO: 2860801 - RNA, 19 nt, Artificial Sequence
  Description of Artificial Sequence: Synthetic oligonucleotide
ucauagccuggacacgaga

SEQ ID NO: 2860802 - RNA, 19 nt, Artificial Sequence
  Description of Artificial Sequence: Synthetic oligonucleotide
ugucagcauauccaggcuu

SEQ ID NO: 2860803 - RNA, 19 nt, Artificial Sequence
  Description of Artificial Sequence: Synthetic oligonucleotide
uucacguugcugagguugu

SEQ ID NO: 2860804 - RNA, 19 nt, Artificial Sequence
  Description of Artificial Sequence: Synthetic oligonucleotide
ucucucuguagcucagaca

SEQ ID NO: 2860805 - RNA, 19 nt, Artificial Sequence
  Description of Artificial Sequence: Synthetic oligonucleotide
agcacucugaggucuccuc

SEQ ID NO: 2860806 - RNA, 19 nt, Artificial Sequence
  Description of Artificial Sequence: Synthetic oligonucleotide
ugagguugugguguucuug

SEQ ID NO: 2860807 - RNA, 19 nt, Artificial Sequence
  Description of Artificial Sequence: Synthetic oligonucleotide
gcuggguagauguucacug

SEQ ID NO: 2860808 - RNA, 19 nt, Artificial Sequence
  Description of Artificial Sequence: Synthetic oligonucleotide
uggccugcaggaauaggca

SEQ ID NO: 2860809 - RNA, 19 nt, Artificial Sequence
  Description of Artificial Sequence: Synthetic oligonucleotide
uauccaggcuucccagcag

SEQ ID NO: 2860810 - RNA, 19 nt, Artificial Sequence
  Description of Artificial Sequence: Synthetic oligonucleotide
cuggcaagggcauggcagc

SEQ ID NO: 2860811 - RNA, 19 nt, Artificial Sequence
  Description of Artificial Sequence: Synthetic oligonucleotide
cauauccaggcuucccagc

SEQ ID NO: 2860812 - RNA, 19 nt, Artificial Sequence
  Description of Artificial Sequence: Synthetic oligonucleotide
ccuggaacaggccuggagg

SEQ ID NO: 2860813 - RNA, 19 nt, Artificial Sequence
  Description of Artificial Sequence: Synthetic oligonucleotide
acaggccuggaggacaugg

SEQ ID NO: 2860814 - RNA, 19 nt, Artificial Sequence
  Description of Artificial Sequence: Synthetic oligonucleotide
acuucuccuagucagccuu

SEQ ID NO: 2860815 - RNA, 19 nt, Artificial Sequence
  Description of Artificial Sequence: Synthetic oligonucleotide
cucacuucuccuagucagc

SEQ ID NO: 2860816 - RNA, 19 nt, Artificial Sequence
  Description of Artificial Sequence: Synthetic oligonucleotide
ugcucuucacguugcugag

SEQ ID NO: 2860817 - RNA, 19 nt, Artificial Sequence
  Description of Artificial Sequence: Synthetic oligonucleotide
cugcagguggcucaacggc

SEQ ID NO: 2860818 - RNA, 19 nt, Artificial Sequence
  Description of Artificial Sequence: Synthetic oligonucleotide
agaacaagugucaccuuug

SEQ ID NO: 2860819 - RNA, 19 nt, Artificial Sequence
  Description of Artificial Sequence: Synthetic oligonucleotide
uggcucaacggcuguacca

SEQ ID NO: 2860820 - RNA, 19 nt, Artificial Sequence
  Description of Artificial Sequence: Synthetic oligonucleotide
caggccacaucugaggggc

SEQ ID NO: 2860821 - RNA, 19 nt, Artificial Sequence
  Description of Artificial Sequence: Synthetic oligonucleotide
ugguuacagagcucauagc

SEQ ID NO: 2860822 - RNA, 19 nt, Artificial Sequence
  Description of Artificial Sequence: Synthetic oligonucleotide
ucaacucucucuguagcuc

SEQ ID NO: 2860823 - RNA, 19 nt, Artificial Sequence
  Description of Artificial Sequence: Synthetic oligonucleotide
uaggcaccuacagugucag

SEQ ID NO: 2860824 - RNA, 19 nt, Artificial Sequence
  Description of Artificial Sequence: Synthetic oligonucleotide
ccucacuucuccuagucag

SEQ ID NO: 2860825 - RNA, 19 nt, Artificial Sequence
  Description of Artificial Sequence: Synthetic oligonucleotide
ggcucuaccucacuucucc

SEQ ID NO: 2860826 - RNA, 19 nt, Artificial Sequence
  Description of Artificial Sequence: Synthetic oligonucleotide
cugaggucuccucauucag

SEQ ID NO: 2860827 - RNA, 19 nt, Artificial Sequence
  Description of Artificial Sequence: Synthetic oligonucleotide
uaccagcaagaggagagcc

SEQ ID NO: 2860828 - RNA, 19 nt, Artificial Sequence
  Description of Artificial Sequence: Synthetic oligonucleotide
uggcaccuggaacaggccu

SEQ ID NO: 2860829 - RNA, 19 nt, Artificial Sequence
  Description of Artificial Sequence: Synthetic oligonucleotide
auucaguaaguuguucagu

SEQ ID NO: 2860830 - RNA, 19 nt, Artificial Sequence
  Description of Artificial Sequence: Synthetic oligonucleotide
gaggucuccucauucagua

SEQ ID NO: 2860831 - RNA, 19 nt, Artificial Sequence
  Description of Artificial Sequence: Synthetic oligonucleotide
aggcccuucagcugcaggu

SEQ ID NO: 2860832 - RNA, 19 nt, Artificial Sequence
  Description of Artificial Sequence: Synthetic oligonucleotide
uaccucacuucuccuaguc

SEQ ID NO: 2860833 - RNA, 19 nt, Artificial Sequence
  Description of Artificial Sequence: Synthetic oligonucleotide
guucagugguuacagagcu

SEQ ID NO: 2860834 - RNA, 19 nt, Artificial Sequence
  Description of Artificial Sequence: Synthetic oligonucleotide
accuggaacaggccuggag

SEQ ID NO: 2860835 - RNA, 19 nt, Artificial Sequence
  Description of Artificial Sequence: Synthetic oligonucleotide
gguugugguguucuuggcc

SEQ ID NO: 2860836 - RNA, 19 nt, Artificial Sequence
  Description of Artificial Sequence: Synthetic oligonucleotide
gagcucagaccuuggaguc

SEQ ID NO: 2860837 - RNA, 19 nt, Artificial Sequence
  Description of Artificial Sequence: Synthetic oligonucleotide
guguucuuggccugcagga

SEQ ID NO: 2860838 - RNA, 19 nt, Artificial Sequence
  Description of Artificial Sequence: Synthetic oligonucleotide
guugugguguucuuggccu

SEQ ID NO: 2860839 - RNA, 19 nt, Artificial Sequence
  Description of Artificial Sequence: Synthetic oligonucleotide
auguucacugggugcagca

SEQ ID NO: 2860840 - RNA, 19 nt, Artificial Sequence
  Description of Artificial Sequence: Synthetic oligonucleotide
cucucucuguagcucagac

SEQ ID NO: 2860841 - RNA, 19 nt, Artificial Sequence
  Description of Artificial Sequence: Synthetic oligonucleotide
ucucccagguggcucuacc

SEQ ID NO: 2860842 - RNA, 19 nt, Artificial Sequence
  Description of Artificial Sequence: Synthetic oligonucleotide
uggaggacauggcggaaaa

SEQ ID NO: 2860843 - RNA, 19 nt, Artificial Sequence
  Description of Artificial Sequence: Synthetic oligonucleotide
cucagacaauggcaccugg

SEQ ID NO: 2860844 - RNA, 19 nt, Artificial Sequence
  Description of Artificial Sequence: Synthetic oligonucleotide
aacggcuguaccagcaaga

SEQ ID NO: 2860845 - RNA, 19 nt, Artificial Sequence
  Description of Artificial Sequence: Synthetic oligonucleotide
cagugucagcauauccagg

SEQ ID NO: 2860846 - RNA, 19 nt, Artificial Sequence
  Description of Artificial Sequence: Synthetic oligonucleotide
uugggagcucagaccuugg

SEQ ID NO: 2860847 - RNA, 19 nt, Artificial Sequence
  Description of Artificial Sequence: Synthetic oligonucleotide
cuagucagccuuccagaac

SEQ ID NO: 2860848 - RNA, 19 nt, Artificial Sequence
  Description of Artificial Sequence: Synthetic oligonucleotide
acaauggcaccuggaacag

SEQ ID NO: 2860849 - RNA, 19 nt, Artificial Sequence
  Description of Artificial Sequence: Synthetic oligonucleotide
cucuugcucuucacguugc

SEQ ID NO: 2860850 - RNA, 19 nt, Artificial Sequence
  Description of Artificial Sequence: Synthetic oligonucleotide
agccuuccagaacaagugu

SEQ ID NO: 2860851 - RNA, 19 nt, Artificial Sequence
  Description of Artificial Sequence: Synthetic oligonucleotide
uguucacugggugcagcag

SEQ ID NO: 2860852 - RNA, 19 nt, Artificial Sequence
  Description of Artificial Sequence: Synthetic oligonucleotide
ucaacggcuguaccagcaa

SEQ ID NO: 2860853 - RNA, 19 nt, Artificial Sequence
  Description of Artificial Sequence: Synthetic oligonucleotide
ugggcugagccagggagag

SEQ ID NO: 2860854 - RNA, 19 nt, Artificial Sequence
  Description of Artificial Sequence: Synthetic oligonucleotide
uagcucagacaauggcacc

SEQ ID NO: 2860855 - RNA, 19 nt, Artificial Sequence
  Description of Artificial Sequence: Synthetic oligonucleotide
uggagucaggccacaucug

SEQ ID NO: 2860856 - RNA, 19 nt, Artificial Sequence
  Description of Artificial Sequence: Synthetic oligonucleotide
aagaggagagccggguccu

SEQ ID NO: 2860857 - RNA, 19 nt, Artificial Sequence
  Description of Artificial Sequence: Synthetic oligonucleotide
caccuuugggcugagccag

SEQ ID NO: 2860858 - RNA, 19 nt, Artificial Sequence
  Description of Artificial Sequence: Synthetic oligonucleotide
acguugcugagguuguggu

SEQ ID NO: 2860859 - RNA, 19 nt, Artificial Sequence
  Description of Artificial Sequence: Synthetic oligonucleotide
guugggagcucagaccuug

SEQ ID NO: 2860860 - RNA, 19 nt, Artificial Sequence
  Description of Artificial Sequence: Synthetic oligonucleotide
ccuggcaagggcauggcag

SEQ ID NO: 2860861 - RNA, 19 nt, Artificial Sequence
  Description of Artificial Sequence: Synthetic oligonucleotide
cuuggagucaggccacauc

SEQ ID NO: 2860862 - RNA, 19 nt, Artificial Sequence
  Description of Artificial Sequence: Synthetic oligonucleotide
cacguugcugagguugugg

SEQ ID NO: 2860863 - RNA, 19 nt, Artificial Sequence
  Description of Artificial Sequence: Synthetic oligonucleotide
gagucaggccacaucugag

SEQ ID NO: 2860864 - RNA, 19 nt, Artificial Sequence
  Description of Artificial Sequence: Synthetic oligonucleotide
ggaaaaggcccuucagcug

SEQ ID NO: 2860865 - RNA, 19 nt, Artificial Sequence
  Description of Artificial Sequence: Synthetic oligonucleotide
ucccagguggcucuaccuc

SEQ ID NO: 2860866 - RNA, 19 nt, Artificial Sequence
  Description of Artificial Sequence: Synthetic oligonucleotide
accagcaagaggagagccg

SEQ ID NO: 2860867 - RNA, 19 nt, Artificial Sequence
  Description of Artificial Sequence: Synthetic oligonucleotide
gaggggcaaggcuucagca

SEQ ID NO: 2860868 - RNA, 19 nt, Artificial Sequence
  Description of Artificial Sequence: Synthetic oligonucleotide
cucugaggucuccucauuc

SEQ ID NO: 2860869 - RNA, 19 nt, Artificial Sequence
  Description of Artificial Sequence: Synthetic oligonucleotide
gcggaaaaggcccuucagc

SEQ ID NO: 2860870 - RNA, 19 nt, Artificial Sequence
  Description of Artificial Sequence: Synthetic oligonucleotide
caaccuggggcucuugcuc

SEQ ID NO: 2860871 - RNA, 19 nt, Artificial Sequence
  Description of Artificial Sequence: Synthetic oligonucleotide
gggagcucagaccuuggag

SEQ ID NO: 2860872 - RNA, 19 nt, Artificial Sequence
  Description of Artificial Sequence: Synthetic oligonucleotide
cuuccagaacaagugucac

SEQ ID NO: 2860873 - RNA, 19 nt, Artificial Sequence
  Description of Artificial Sequence: Synthetic oligonucleotide
gcugcagguggcucaacgg

SEQ ID NO: 2860874 - RNA, 19 nt, Artificial Sequence
  Description of Artificial Sequence: Synthetic oligonucleotide
caagugucaccuuugggcu

SEQ ID NO: 2860875 - RNA, 19 nt, Artificial Sequence
  Description of Artificial Sequence: Synthetic oligonucleotide
acggcuguaccagcaagag

SEQ ID NO: 2860876 - RNA, 19 nt, Artificial Sequence
  Description of Artificial Sequence: Synthetic oligonucleotide
ucagcauauccaggcuucc

SEQ ID NO: 2860877 - RNA, 19 nt, Artificial Sequence
  Description of Artificial Sequence: Synthetic oligonucleotide
caacggcuguaccagcaag

SEQ ID NO: 2860878 - RNA, 19 nt, Artificial Sequence
  Description of Artificial Sequence: Synthetic oligonucleotide
ucuugcucuucacguugcu

SEQ ID NO: 2860879 - RNA, 19 nt, Artificial Sequence
  Description of Artificial Sequence: Synthetic oligonucleotide
uccaggcuucccagcaggc

SEQ ID NO: 2860880 - RNA, 19 nt, Artificial Sequence
  Description of Artificial Sequence: Synthetic oligonucleotide
uggcggaaaaggcccuuca

SEQ ID NO: 2860881 - RNA, 19 nt, Artificial Sequence
  Description of Artificial Sequence: Synthetic oligonucleotide
ugggagcucagaccuugga

SEQ ID NO: 2860882 - RNA, 19 nt, Artificial Sequence
  Description of Artificial Sequence: Synthetic oligonucleotide
ugugguguucuuggccugc

SEQ ID NO: 2860883 - RNA, 19 nt, Artificial Sequence
  Description of Artificial Sequence: Synthetic oligonucleotide
ucuccuagucagccuucca

SEQ ID NO: 2860884 - RNA, 19 nt, Artificial Sequence
  Description of Artificial Sequence: Synthetic oligonucleotide
uucagugguuacagagcuc

SEQ ID NO: 2860885 - RNA, 19 nt, Artificial Sequence
  Description of Artificial Sequence: Synthetic oligonucleotide
accucacuucuccuaguca

SEQ ID NO: 2860886 - RNA, 19 nt, Artificial Sequence
  Description of Artificial Sequence: Synthetic oligonucleotide
uugugguguucuuggccug

SEQ ID NO: 2860887 - RNA, 19 nt, Artificial Sequence
  Description of Artificial Sequence: Synthetic oligonucleotide
aggagagccggguccucuc

SEQ ID NO: 2860888 - RNA, 19 nt, Artificial Sequence
  Description of Artificial Sequence: Synthetic oligonucleotide
cucauagccuggacacgag

SEQ ID NO: 2860889 - RNA, 19 nt, Artificial Sequence
  Description of Artificial Sequence: Synthetic oligonucleotide
agugucaccuuugggcuga

SEQ ID NO: 2860890 - RNA, 19 nt, Artificial Sequence
  Description of Artificial Sequence: Synthetic oligonucleotide
guaaguuguucagugguua

SEQ ID NO: 2860891 - RNA, 19 nt, Artificial Sequence
  Description of Artificial Sequence: Synthetic oligonucleotide
uucuccuagucagccuucc

SEQ ID NO: 2860892 - RNA, 19 nt, Artificial Sequence
  Description of Artificial Sequence: Synthetic oligonucleotide
gcauauccaggcuucccag

SEQ ID NO: 2860893 - RNA, 19 nt, Artificial Sequence
  Description of Artificial Sequence: Synthetic oligonucleotide
caguaaguuguucaguggu

SEQ ID NO: 2860894 - RNA, 19 nt, Artificial Sequence
  Description of Artificial Sequence: Synthetic oligonucleotide
ggacauggcggaaaaggcc

SEQ ID NO: 2860895 - RNA, 19 nt, Artificial Sequence
  Description of Artificial Sequence: Synthetic oligonucleotide
ggcaccuacagugucagca

SEQ ID NO: 2860896 - RNA, 19 nt, Artificial Sequence
  Description of Artificial Sequence: Synthetic oligonucleotide
ggggcucuugcucuucacg

SEQ ID NO: 2860897 - RNA, 19 nt, Artificial Sequence
  Description of Artificial Sequence: Synthetic oligonucleotide
ucuuggccugcaggaauag

SEQ ID NO: 2860898 - RNA, 19 nt, Artificial Sequence
  Description of Artificial Sequence: Synthetic oligonucleotide
gcucaacucucucuguagc

SEQ ID NO: 2860899 - RNA, 19 nt, Artificial Sequence
  Description of Artificial Sequence: Synthetic oligonucleotide
gucagcauauccaggcuuc

SEQ ID NO: 2860900 - RNA, 19 nt, Artificial Sequence
  Description of Artificial Sequence: Synthetic oligonucleotide
cuucccagcaggccaggug

SEQ ID NO: 2860901 - RNA, 19 nt, Artificial Sequence
  Description of Artificial Sequence: Synthetic oligonucleotide
cucaacggcuguaccagca

SEQ ID NO: 2860902 - RNA, 19 nt, Artificial Sequence
  Description of Artificial Sequence: Synthetic oligonucleotide
uguucuuggccugcaggaa

SEQ ID NO: 2860903 - RNA, 19 nt, Artificial Sequence
  Description of Artificial Sequence: Synthetic oligonucleotide
aggggcaaggcuucagcaa

SEQ ID NO: 2860904 - RNA, 19 nt, Artificial Sequence
  Description of Artificial Sequence: Synthetic oligonucleotide
ccagcaagaggagagccgg

SEQ ID NO: 2860905 - RNA, 19 nt, Artificial Sequence
  Description of Artificial Sequence: Synthetic oligonucleotide
gcucuugcucuucacguug

SEQ ID NO: 2860906 - RNA, 19 nt, Artificial Sequence
  Description of Artificial Sequence: Synthetic oligonucleotide
gagccagggagaggggagg

SEQ ID NO: 2860907 - RNA, 19 nt, Artificial Sequence
  Description of Artificial Sequence: Synthetic oligonucleotide
cucauucaguaaguuguuc

SEQ ID NO: 2860908 - RNA, 19 nt, Artificial Sequence
  Description of Artificial Sequence: Synthetic oligonucleotide
uggcaagggcauggcagcg

SEQ ID NO: 2860909 - RNA, 19 nt, Artificial Sequence
  Description of Artificial Sequence: Synthetic oligonucleotide
cuugcucuucacguugcug

SEQ ID NO: 2860910 - RNA, 19 nt, Artificial Sequence
  Description of Artificial Sequence: Synthetic oligonucleotide
agcucauagccuggacacg

SEQ ID NO: 2860911 - RNA, 19 nt, Artificial Sequence
  Description of Artificial Sequence: Synthetic oligonucleotide
guuguucagugguuacaga

SEQ ID NO: 2860912 - RNA, 19 nt, Artificial Sequence
  Description of Artificial Sequence: Synthetic oligonucleotide
agcaagaggagagccgggu

SEQ ID NO: 2860913 - RNA, 19 nt, Artificial Sequence
  Description of Artificial Sequence: Synthetic oligonucleotide
gagagccggguccucuccc

SEQ ID NO: 2860914 - RNA, 19 nt, Artificial Sequence
  Description of Artificial Sequence: Synthetic oligonucleotide
guuacagagcucauagccu

SEQ ID NO: 2860915 - RNA, 19 nt, Artificial Sequence
  Description of Artificial Sequence: Synthetic oligonucleotide
gugccuggcaagggcaugg

SEQ ID NO: 2860916 - RNA, 19 nt, Artificial Sequence
  Description of Artificial Sequence: Synthetic oligonucleotide
ggagcucagaccuuggagu

SEQ ID NO: 2860917 - RNA, 19 nt, Artificial Sequence
  Description of Artificial Sequence: Synthetic oligonucleotide
aguaaguuguucagugguu

SEQ ID NO: 2860918 - RNA, 19 nt, Artificial Sequence
  Description of Artificial Sequence: Synthetic oligonucleotide
ggagucaggccacaucuga

SEQ ID NO: 2860919 - RNA, 19 nt, Artificial Sequence
  Description of Artificial Sequence: Synthetic oligonucleotide
ggcucaacggcuguaccag

SEQ ID NO: 2860920 - RNA, 19 nt, Artificial Sequence
  Description of Artificial Sequence: Synthetic oligonucleotide
caggcuucccagcaggcca

SEQ ID NO: 2860921 - RNA, 19 nt, Artificial Sequence
  Description of Artificial Sequence: Synthetic oligonucleotide
guaccagcaagaggagagc

SEQ ID NO: 2860922 - RNA, 19 nt, Artificial Sequence
  Description of Artificial Sequence: Synthetic oligonucleotide
uucagcaaccuggggcucu

SEQ ID NO: 2860923 - RNA, 19 nt, Artificial Sequence
  Description of Artificial Sequence: Synthetic oligonucleotide
cuuggccugcaggaauagg

SEQ ID NO: 2860924 - RNA, 19 nt, Artificial Sequence
  Description of Artificial Sequence: Synthetic oligonucleotide
ucucuguagcucagacaau

SEQ ID NO: 2860925 - RNA, 19 nt, Artificial Sequence
  Description of Artificial Sequence: Synthetic oligonucleotide
ugcucagcacucugagguc

SEQ ID NO: 2860926 - RNA, 19 nt, Artificial Sequence
  Description of Artificial Sequence: Synthetic oligonucleotide
agugguuacagagcucaua

SEQ ID NO: 2860927 - RNA, 19 nt, Artificial Sequence
  Description of Artificial Sequence: Synthetic oligonucleotide
caggccuggaggacauggc

SEQ ID NO: 2860928 - RNA, 19 nt, Artificial Sequence
  Description of Artificial Sequence: Synthetic oligonucleotide
auggcggaaaaggcccuuc

SEQ ID NO: 2860929 - RNA, 19 nt, Artificial Sequence
  Description of Artificial Sequence: Synthetic oligonucleotide
guggcucaacggcuguacc

SEQ ID NO: 2860930 - RNA, 19 nt, Artificial Sequence
  Description of Artificial Sequence: Synthetic oligonucleotide
auggcaccuggaacaggcc

SEQ ID NO: 2860931 - RNA, 19 nt, Artificial Sequence
  Description of Artificial Sequence: Synthetic oligonucleotide
ggugcagcagcucaacucu

SEQ ID NO: 2860932 - RNA, 19 nt, Artificial Sequence
  Description of Artificial Sequence: Synthetic oligonucleotide
gguggcucuaccucacuuc

SEQ ID NO: 2860933 - RNA, 19 nt, Artificial Sequence
  Description of Artificial Sequence: Synthetic oligonucleotide
cagcaagaggagagccggg

SEQ ID NO: 2860934 - RNA, 19 nt, Artificial Sequence
  Description of Artificial Sequence: Synthetic oligonucleotide
cucuucacguugcugaggu

SEQ ID NO: 2860935 - RNA, 19 nt, Artificial Sequence
  Description of Artificial Sequence: Synthetic oligonucleotide
ucccagcaggccaggugcc

SEQ ID NO: 2860936 - RNA, 19 nt, Artificial Sequence
  Description of Artificial Sequence: Synthetic oligonucleotide
aggccaggugccuggcaag

SEQ ID NO: 2860937 - RNA, 19 nt, Artificial Sequence
  Description of Artificial Sequence: Synthetic oligonucleotide
ggcggaaaaggcccuucag

SEQ ID NO: 2860938 - RNA, 19 nt, Artificial Sequence
  Description of Artificial Sequence: Synthetic oligonucleotide
cuucuccuagucagccuuc

SEQ ID NO: 2860939 - RNA, 19 nt, Artificial Sequence
  Description of Artificial Sequence: Synthetic oligonucleotide
agccggguccucucccagg

SEQ ID NO: 2860940 - RNA, 19 nt, Artificial Sequence
  Description of Artificial Sequence: Synthetic oligonucleotide
gggugcagcagcucaacuc

SEQ ID NO: 2860941 - RNA, 19 nt, Artificial Sequence
  Description of Artificial Sequence: Synthetic oligonucleotide
ucagcacucugaggucucc

SEQ ID NO: 2860942 - RNA, 19 nt, Artificial Sequence
  Description of Artificial Sequence: Synthetic oligonucleotide
aggcaccuacagugucagc

SEQ ID NO: 2860943 - RNA, 19 nt, Artificial Sequence
  Description of Artificial Sequence: Synthetic oligonucleotide
aaaggcccuucagcugcag

SEQ ID NO: 2860944 - RNA, 19 nt, Artificial Sequence
  Description of Artificial Sequence: Synthetic oligonucleotide
aaaaggcccuucagcugca

SEQ ID NO: 2860945 - RNA, 19 nt, Artificial Sequence
  Description of Artificial Sequence: Synthetic oligonucleotide
cagcauauccaggcuuccc

SEQ ID NO: 2860946 - RNA, 19 nt, Artificial Sequence
  Description of Artificial Sequence: Synthetic oligonucleotide
agagccggguccucuccca

SEQ ID NO: 2860947 - RNA, 19 nt, Artificial Sequence
  Description of Artificial Sequence: Synthetic oligonucleotide
gaauaggcaccuacagugu

SEQ ID NO: 2860948 - RNA, 19 nt, Artificial Sequence
  Description of Artificial Sequence: Synthetic oligonucleotide
accuacagugucagcauau

SEQ ID NO: 2860949 - RNA, 19 nt, Artificial Sequence
  Description of Artificial Sequence: Synthetic oligonucleotide
ccuuccagaacaaguguca

SEQ ID NO: 2860950 - RNA, 19 nt, Artificial Sequence
  Description of Artificial Sequence: Synthetic oligonucleotide
acagagcucauagccugga

SEQ ID NO: 2860951 - RNA, 19 nt, Artificial Sequence
  Description of Artificial Sequence: Synthetic oligonucleotide
cacugggugcagcagcuca

SEQ ID NO: 2860952 - RNA, 19 nt, Artificial Sequence
  Description of Artificial Sequence: Synthetic oligonucleotide
cucagcacucugaggucuc

SEQ ID NO: 2860953 - RNA, 19 nt, Artificial Sequence
  Description of Artificial Sequence: Synthetic oligonucleotide
gaccuuggagucaggccac

SEQ ID NO: 2860954 - RNA, 19 nt, Artificial Sequence
  Description of Artificial Sequence: Synthetic oligonucleotide
gucagccuuccagaacaag

SEQ ID NO: 2860955 - RNA, 19 nt, Artificial Sequence
  Description of Artificial Sequence: Synthetic oligonucleotide
gcucagaccuuggagucag

SEQ ID NO: 2860956 - RNA, 19 nt, Artificial Sequence
  Description of Artificial Sequence: Synthetic oligonucleotide
guggcucuaccucacuucu

SEQ ID NO: 2860957 - RNA, 19 nt, Artificial Sequence
  Description of Artificial Sequence: Synthetic oligonucleotide
cucaacucucucuguagcu

SEQ ID NO: 2860958 - RNA, 19 nt, Artificial Sequence
  Description of Artificial Sequence: Synthetic oligonucleotide
caauggcaccuggaacagg

SEQ ID NO: 2860959 - RNA, 19 nt, Artificial Sequence
  Description of Artificial Sequence: Synthetic oligonucleotide
gagccggguccucucccag

SEQ ID NO: 2860960 - RNA, 19 nt, Artificial Sequence
  Description of Artificial Sequence: Synthetic oligonucleotide
cagagcucauagccuggac

SEQ ID NO: 2860961 - RNA, 19 nt, Artificial Sequence
  Description of Artificial Sequence: Synthetic oligonucleotide
uggcucuaccucacuucuc

SEQ ID NO: 2860962 - RNA, 19 nt, Artificial Sequence
  Description of Artificial Sequence: Synthetic oligonucleotide
caucugaggggcaaggcuu

SEQ ID NO: 2860963 - RNA, 19 nt, Artificial Sequence
  Description of Artificial Sequence: Synthetic oligonucleotide
agcaggccaggugccuggc

SEQ ID NO: 2860964 - RNA, 19 nt, Artificial Sequence
  Description of Artificial Sequence: Synthetic oligonucleotide
ggcagcgcuggguagaugu

SEQ ID NO: 2860965 - RNA, 19 nt, Artificial Sequence
  Description of Artificial Sequence: Synthetic oligonucleotide
ucacguugcugagguugug

SEQ ID NO: 2860966 - RNA, 19 nt, Artificial Sequence
  Description of Artificial Sequence: Synthetic oligonucleotide
cugucccugcucagcacuc

SEQ ID NO: 2860967 - RNA, 19 nt, Artificial Sequence
  Description of Artificial Sequence: Synthetic oligonucleotide
ggaacaggccuggaggaca

SEQ ID NO: 2860968 - RNA, 19 nt, Artificial Sequence
  Description of Artificial Sequence: Synthetic oligonucleotide
cucagaccuuggagucagg

SEQ ID NO: 2860969 - RNA, 19 nt, Artificial Sequence
  Description of Artificial Sequence: Synthetic oligonucleotide
agcucagaccuuggaguca

SEQ ID NO: 2860970 - RNA, 19 nt, Artificial Sequence
  Description of Artificial Sequence: Synthetic oligonucleotide
guucuuggccugcaggaau

SEQ ID NO: 2860971 - RNA, 19 nt, Artificial Sequence
  Description of Artificial Sequence: Synthetic oligonucleotide
ugucccugcucagcacucu

SEQ ID NO: 2860972 - RNA, 19 nt, Artificial Sequence
  Description of Artificial Sequence: Synthetic oligonucleotide
cagaacaagugucaccuuu

SEQ ID NO: 2860973 - RNA, 19 nt, Artificial Sequence
  Description of Artificial Sequence: Synthetic oligonucleotide
gcucauagccuggacacga

SEQ ID NO: 2860974 - RNA, 19 nt, Artificial Sequence
  Description of Artificial Sequence: Synthetic oligonucleotide
gcaggaauaggcaccuaca

SEQ ID NO: 2860975 - RNA, 19 nt, Artificial Sequence
  Description of Artificial Sequence: Synthetic oligonucleotide
cugggugcagcagcucaac

SEQ ID NO: 2860976 - RNA, 19 nt, Artificial Sequence
  Description of Artificial Sequence: Synthetic oligonucleotide
gguggcucaacggcuguac

SEQ ID NO: 2860977 - RNA, 19 nt, Artificial Sequence
  Description of Artificial Sequence: Synthetic oligonucleotide
aggcuucccagcaggccag

SEQ ID NO: 2860978 - RNA, 19 nt, Artificial Sequence
  Description of Artificial Sequence: Synthetic oligonucleotide
uugcugagguugugguguu

SEQ ID NO: 2860979 - RNA, 19 nt, Artificial Sequence
  Description of Artificial Sequence: Synthetic oligonucleotide
agaggagagccggguccuc

SEQ ID NO: 2860980 - RNA, 19 nt, Artificial Sequence
  Description of Artificial Sequence: Synthetic oligonucleotide
cagcgcuggguagauguuc

SEQ ID NO: 2860981 - RNA, 19 nt, Artificial Sequence
  Description of Artificial Sequence: Synthetic oligonucleotide
ggagagccggguccucucc

SEQ ID NO: 2860982 - RNA, 19 nt, Artificial Sequence
  Description of Artificial Sequence: Synthetic oligonucleotide
ucuucacguugcugagguu

SEQ ID NO: 2860983 - RNA, 19 nt, Artificial Sequence
  Description of Artificial Sequence: Synthetic oligonucleotide
caggccaggugccuggcaa

SEQ ID NO: 2860984 - RNA, 19 nt, Artificial Sequence
  Description of Artificial Sequence: Synthetic oligonucleotide
gcacucugaggucuccuca

SEQ ID NO: 2860985 - RNA, 19 nt, Artificial Sequence
  Description of Artificial Sequence: Synthetic oligonucleotide
gcaagaggagagccggguc

SEQ ID NO: 2860986 - RNA, 19 nt, Artificial Sequence
  Description of Artificial Sequence: Synthetic oligonucleotide
gccuuccagaacaaguguc

SEQ ID NO: 2860987 - RNA, 19 nt, Artificial Sequence
  Description of Artificial Sequence: Synthetic oligonucleotide
cuguaccagcaagaggaga

SEQ ID NO: 2860988 - RNA, 19 nt, Artificial Sequence
  Description of Artificial Sequence: Synthetic oligonucleotide
aacaggccuggaggacaug

SEQ ID NO: 2860989 - RNA, 19 nt, Artificial Sequence
  Description of Artificial Sequence: Synthetic oligonucleotide
cggguccucucccaggugg

SEQ ID NO: 2860990 - RNA, 19 nt, Artificial Sequence
  Description of Artificial Sequence: Synthetic oligonucleotide
acucucucuguagcucaga

SEQ ID NO: 2860991 - RNA, 19 nt, Artificial Sequence
  Description of Artificial Sequence: Synthetic oligonucleotide
ugccuggcaagggcauggc

SEQ ID NO: 2860992 - RNA, 19 nt, Artificial Sequence
  Description of Artificial Sequence: Synthetic oligonucleotide
cagcucaacucucucugua

SEQ ID NO: 2860993 - RNA, 19 nt, Artificial Sequence
  Description of Artificial Sequence: Synthetic oligonucleotide
cuuugggcugagccaggga

SEQ ID NO: 2860994 - RNA, 19 nt, Artificial Sequence
  Description of Artificial Sequence: Synthetic oligonucleotide
gugucagcauauccaggcu

SEQ ID NO: 2860995 - RNA, 19 nt, Artificial Sequence
  Description of Artificial Sequence: Synthetic oligonucleotide
gcuguaccagcaagaggag

SEQ ID NO: 2860996 - RNA, 19 nt, Artificial Sequence
  Description of Artificial Sequence: Synthetic oligonucleotide
ccacaucugaggggcaagg

SEQ ID NO: 2860997 - RNA, 19 nt, Artificial Sequence
  Description of Artificial Sequence: Synthetic oligonucleotide
accuuugggcugagccagg

SEQ ID NO: 2860998 - RNA, 19 nt, Artificial Sequence
  Description of Artificial Sequence: Synthetic oligonucleotide
gcaaggcuucagcaaccug

SEQ ID NO: 2860999 - RNA, 19 nt, Artificial Sequence
  Description of Artificial Sequence: Synthetic oligonucleotide
ugucaccuuugggcugagc

SEQ ID NO: 2861000 - RNA, 19 nt, Artificial Sequence
  Description of Artificial Sequence: Synthetic oligonucleotide
gggcucuugcucuucacgu

SEQ ID NO: 2861001 - RNA, 19 nt, Artificial Sequence
  Description of Artificial Sequence: Synthetic oligonucleotide
gcucaacggcuguaccagc

SEQ ID NO: 2861002 - RNA, 19 nt, Artificial Sequence
  Description of Artificial Sequence: Synthetic oligonucleotide
gcagguggcucaacggcug

SEQ ID NO: 2861003 - RNA, 19 nt, Artificial Sequence
  Description of Artificial Sequence: Synthetic oligonucleotide
gcucagacaauggcaccug

SEQ ID NO: 2861004 - RNA, 19 nt, Artificial Sequence
  Description of Artificial Sequence: Synthetic oligonucleotide
ucagcaaccuggggcucuu

SEQ ID NO: 2861005 - RNA, 19 nt, Artificial Sequence
  Description of Artificial Sequence: Synthetic oligonucleotide
ccuagucagccuuccagaa

SEQ ID NO: 2861006 - RNA, 19 nt, Artificial Sequence
  Description of Artificial Sequence: Synthetic oligonucleotide
cuucagcaaccuggggcuc

SEQ ID NO: 2861007 - RNA, 19 nt, Artificial Sequence
  Description of Artificial Sequence: Synthetic oligonucleotide
cuggaggacauggcggaaa

SEQ ID NO: 2861008 - RNA, 19 nt, Artificial Sequence
  Description of Artificial Sequence: Synthetic oligonucleotide
ucacugggugcagcagcuc

SEQ ID NO: 2861009 - RNA, 19 nt, Artificial Sequence
  Description of Artificial Sequence: Synthetic oligonucleotide
ccuuugggcugagccaggg

SEQ ID NO: 2861010 - RNA, 19 nt, Artificial Sequence
  Description of Artificial Sequence: Synthetic oligonucleotide
ggcccuucagcugcaggug

SEQ ID NO: 2861011 - RNA, 19 nt, Artificial Sequence
  Description of Artificial Sequence: Synthetic oligonucleotide
ggcaagggcauggcagcgc

SEQ ID NO: 2861012 - RNA, 19 nt, Artificial Sequence
  Description of Artificial Sequence: Synthetic oligonucleotide
ugcugagguugugguguuc

SEQ ID NO: 2861013 - RNA, 19 nt, Artificial Sequence
  Description of Artificial Sequence: Synthetic oligonucleotide
ccuacagugucagcauauc

SEQ ID NO: 2861014 - RNA, 19 nt, Artificial Sequence
  Description of Artificial Sequence: Synthetic oligonucleotide
cggaaaaggcccuucagcu

SEQ ID NO: 2861015 - RNA, 19 nt, Artificial Sequence
  Description of Artificial Sequence: Synthetic oligonucleotide
gggcugucccugcucagca

SEQ ID NO: 2861016 - RNA, 19 nt, Artificial Sequence
  Description of Artificial Sequence: Synthetic oligonucleotide
cagcagcucaacucucucu

SEQ ID NO: 2861017 - RNA, 19 nt, Artificial Sequence
  Description of Artificial Sequence: Synthetic oligonucleotide
caccuacagugucagcaua

SEQ ID NO: 2861018 - RNA, 19 nt, Artificial Sequence
  Description of Artificial Sequence: Synthetic oligonucleotide
guccucucccagguggcuc

SEQ ID NO: 2861019 - RNA, 19 nt, Artificial Sequence
  Description of Artificial Sequence: Synthetic oligonucleotide
ggggcugucccugcucagc

SEQ ID NO: 2861020 - RNA, 19 nt, Artificial Sequence
  Description of Artificial Sequence: Synthetic oligonucleotide
gccacaucugaggggcaag

SEQ ID NO: 2861021 - RNA, 19 nt, Artificial Sequence
  Description of Artificial Sequence: Synthetic oligonucleotide
cacucugaggucuccucau

SEQ ID NO: 2861022 - RNA, 19 nt, Artificial Sequence
  Description of Artificial Sequence: Synthetic oligonucleotide
cguugcugagguuguggug

SEQ ID NO: 2861023 - RNA, 19 nt, Artificial Sequence
  Description of Artificial Sequence: Synthetic oligonucleotide
cucccagguggcucuaccu

SEQ ID NO: 2861024 - RNA, 19 nt, Artificial Sequence
  Description of Artificial Sequence: Synthetic oligonucleotide
gaacaggccuggaggacau

SEQ ID NO: 2861025 - RNA, 19 nt, Artificial Sequence
  Description of Artificial Sequence: Synthetic oligonucleotide
agucagccuuccagaacaa

SEQ ID NO: 2861026 - RNA, 19 nt, Artificial Sequence
  Description of Artificial Sequence: Synthetic oligonucleotide
gcugucccugcucagcacu

SEQ ID NO: 2861027 - RNA, 19 nt, Artificial Sequence
  Description of Artificial Sequence: Synthetic oligonucleotide
ccaggcuucccagcaggcc

SEQ ID NO: 2861028 - RNA, 19 nt, Artificial Sequence
  Description of Artificial Sequence: Synthetic oligonucleotide
gugguguucuuggccugca

SEQ ID NO: 2861029 - RNA, 19 nt, Artificial Sequence
  Description of Artificial Sequence: Synthetic oligonucleotide
accuuggagucaggccaca

SEQ ID NO: 2861030 - RNA, 19 nt, Artificial Sequence
  Description of Artificial Sequence: Synthetic oligonucleotide
gaggagagccggguccucu

SEQ ID NO: 2861031 - RNA, 19 nt, Artificial Sequence
  Description of Artificial Sequence: Synthetic oligonucleotide
cacuucuccuagucagccu

SEQ ID NO: 2861032 - RNA, 19 nt, Artificial Sequence
  Description of Artificial Sequence: Synthetic oligonucleotide
cuaccucacuucuccuagu

SEQ ID NO: 2861033 - RNA, 19 nt, Artificial Sequence
  Description of Artificial Sequence: Synthetic oligonucleotide
gugcagcagcucaacucuc

SEQ ID NO: 2861034 - RNA, 19 nt, Artificial Sequence
  Description of Artificial Sequence: Synthetic oligonucleotide
cggcuguaccagcaagagg

SEQ ID NO: 2861035 - RNA, 19 nt, Artificial Sequence
  Description of Artificial Sequence: Synthetic oligonucleotide
ggugccuggcaagggcaug

SEQ ID NO: 2861036 - RNA, 19 nt, Artificial Sequence
  Description of Artificial Sequence: Synthetic oligonucleotide
ggcugucccugcucagcac

SEQ ID NO: 2861037 - RNA, 19 nt, Artificial Sequence
  Description of Artificial Sequence: Synthetic oligonucleotide
gcaaccuggggcucuugcu

SEQ ID NO: 2861038 - RNA, 19 nt, Artificial Sequence
  Description of Artificial Sequence: Synthetic oligonucleotide
ggguccucucccagguggc

SEQ ID NO: 2861039 - RNA, 19 nt, Artificial Sequence
  Description of Artificial Sequence: Synthetic oligonucleotide
aguugggagcucagaccuu

SEQ ID NO: 2861040 - RNA, 19 nt, Artificial Sequence
  Description of Artificial Sequence: Synthetic oligonucleotide
uggcagcgcuggguagaug

SEQ ID NO: 2861041 - RNA, 19 nt, Artificial Sequence
  Description of Artificial Sequence: Synthetic oligonucleotide
gccuggcaagggcauggca

SEQ ID NO: 2861042 - RNA, 19 nt, Artificial Sequence
  Description of Artificial Sequence: Synthetic oligonucleotide
gcagcucaacucucucugu

SEQ ID NO: 2861043 - RNA, 19 nt, Artificial Sequence
  Description of Artificial Sequence: Synthetic oligonucleotide
gcgcuggguagauguucac

SEQ ID NO: 2861044 - RNA, 19 nt, Artificial Sequence
  Description of Artificial Sequence: Synthetic oligonucleotide
ggccacaucugaggggcaa

SEQ ID NO: 2861045 - RNA, 19 nt, Artificial Sequence
  Description of Artificial Sequence: Synthetic oligonucleotide
gggcugagccagggagagg

SEQ ID NO: 2861046 - RNA, 19 nt, Artificial Sequence
  Description of Artificial Sequence: Synthetic oligonucleotide
ggcaaggcuucagcaaccu

SEQ ID NO: 2861047 - RNA, 19 nt, Artificial Sequence
  Description of Artificial Sequence: Synthetic oligonucleotide
ggcucuugcucuucacguu

SEQ ID NO: 2861048 - RNA, 19 nt, Artificial Sequence
  Description of Artificial Sequence: Synthetic oligonucleotide
cagcaaccuggggcucuug

SEQ ID NO: 2861049 - RNA, 19 nt, Artificial Sequence
  Description of Artificial Sequence: Synthetic oligonucleotide
cugagguugugguguucuu

SEQ ID NO: 2861050 - RNA, 19 nt, Artificial Sequence
  Description of Artificial Sequence: Synthetic oligonucleotide
ccugcaggaauaggcaccu

SEQ ID NO: 2861051 - RNA, 19 nt, Artificial Sequence
  Description of Artificial Sequence: Synthetic oligonucleotide
gccggguccucucccaggu

SEQ ID NO: 2861052 - RNA, 19 nt, Artificial Sequence
  Description of Artificial Sequence: Synthetic oligonucleotide
aggccacaucugaggggca

SEQ ID NO: 2861053 - RNA, 19 nt, Artificial Sequence
  Description of Artificial Sequence: Synthetic oligonucleotide
cagugguuacagagcucau

SEQ ID NO: 2861054 - RNA, 19 nt, Artificial Sequence
  Description of Artificial Sequence: Synthetic oligonucleotide
gcaggccaggugccuggca

SEQ ID NO: 2861055 - RNA, 19 nt, Artificial Sequence
  Description of Artificial Sequence: Synthetic oligonucleotide
ccucauucaguaaguuguu

SEQ ID NO: 2861056 - RNA, 19 nt, Artificial Sequence
  Description of Artificial Sequence: Synthetic oligonucleotide
cagcugcagguggcucaac

SEQ ID NO: 2861057 - RNA, 19 nt, Artificial Sequence
  Description of Artificial Sequence: Synthetic oligonucleotide
cagcacucugaggucuccu

SEQ ID NO: 2861058 - RNA, 19 nt, Artificial Sequence
  Description of Artificial Sequence: Synthetic oligonucleotide
gggcauggcagcgcugggu

SEQ ID NO: 2861059 - RNA, 19 nt, Artificial Sequence
  Description of Artificial Sequence: Synthetic oligonucleotide
caccuggaacaggccugga

SEQ ID NO: 2861060 - RNA, 19 nt, Artificial Sequence
  Description of Artificial Sequence: Synthetic oligonucleotide
cauggcggaaaaggcccuu

SEQ ID NO: 2861061 - RNA, 19 nt, Artificial Sequence
  Description of Artificial Sequence: Synthetic oligonucleotide
ccggguccucucccaggug

SEQ ID NO: 2861062 - RNA, 19 nt, Artificial Sequence
  Description of Artificial Sequence: Synthetic oligonucleotide
cugcaggaauaggcaccua

SEQ ID NO: 2861063 - RNA, 19 nt, Artificial Sequence
  Description of Artificial Sequence: Synthetic oligonucleotide
ccuggaggacauggcggaa

SEQ ID NO: 2861064 - RNA, 19 nt, Artificial Sequence
  Description of Artificial Sequence: Synthetic oligonucleotide
ccagaacaagugucaccuu

SEQ ID NO: 2861065 - RNA, 19 nt, Artificial Sequence
  Description of Artificial Sequence: Synthetic oligonucleotide
gcuucccagcaggccaggu

SEQ ID NO: 2861066 - RNA, 19 nt, Artificial Sequence
  Description of Artificial Sequence: Synthetic oligonucleotide
cgcuggguagauguucacu

SEQ ID NO: 2861067 - RNA, 19 nt, Artificial Sequence
  Description of Artificial Sequence: Synthetic oligonucleotide
gcagcgcuggguagauguu

SEQ ID NO: 2861068 - RNA, 19 nt, Artificial Sequence
  Description of Artificial Sequence: Synthetic oligonucleotide
ccuuggagucaggccacau

SEQ ID NO: 2861069 - RNA, 19 nt, Artificial Sequence
  Description of Artificial Sequence: Synthetic oligonucleotide
cccagcaggccaggugccu

SEQ ID NO: 2861070 - RNA, 19 nt, Artificial Sequence
  Description of Artificial Sequence: Synthetic oligonucleotide
ccucucccagguggcucua

SEQ ID NO: 2861071 - RNA, 19 nt, Artificial Sequence
  Description of Artificial Sequence: Synthetic oligonucleotide
uugaauauaauguauagga

SEQ ID NO: 2861072 - RNA, 19 nt, Artificial Sequence
  Description of Artificial Sequence: Synthetic oligonucleotide
uaggacaugacauugcagg

SEQ ID NO: 2861073 - RNA, 19 nt, Artificial Sequence
  Description of Artificial Sequence: Synthetic oligonucleotide
aauaagucuucuguaaacg

SEQ ID NO: 2861074 - RNA, 19 nt, Artificial Sequence
  Description of Artificial Sequence: Synthetic oligonucleotide
uuuugaauauaauguauag

SEQ ID NO: 2861075 - RNA, 19 nt, Artificial Sequence
  Description of Artificial Sequence: Synthetic oligonucleotide
gaauauaauguauaggaca

SEQ ID NO: 2861076 - RNA, 19 nt, Artificial Sequence
  Description of Artificial Sequence: Synthetic oligonucleotide
uauacaggcacccugguca

SEQ ID NO: 2861077 - RNA, 19 nt, Artificial Sequence
  Description of Artificial Sequence: Synthetic oligonucleotide
uaauguauaggacaugaca

SEQ ID NO: 2861078 - RNA, 19 nt, Artificial Sequence
  Description of Artificial Sequence: Synthetic oligonucleotide
aaugacagcccucacuagg

SEQ ID NO: 2861079 - RNA, 19 nt, Artificial Sequence
  Description of Artificial Sequence: Synthetic oligonucleotide
cacuauuccacacacaagg

SEQ ID NO: 2861080 - RNA, 19 nt, Artificial Sequence
  Description of Artificial Sequence: Synthetic oligonucleotide
aaggcaauaagucuucugu

SEQ ID NO: 2861081 - RNA, 19 nt, Artificial Sequence
  Description of Artificial Sequence: Synthetic oligonucleotide
caaguaaguguacacaugg

SEQ ID NO: 2861082 - RNA, 19 nt, Artificial Sequence
  Description of Artificial Sequence: Synthetic oligonucleotide
aucaccgggguauacaggc

SEQ ID NO: 2861083 - RNA, 19 nt, Artificial Sequence
  Description of Artificial Sequence: Synthetic oligonucleotide
uauuccacacacaaggcug

SEQ ID NO: 2861084 - RNA, 19 nt, Artificial Sequence
  Description of Artificial Sequence: Synthetic oligonucleotide
uauaauguauaggacauga

SEQ ID NO: 2861085 - RNA, 19 nt, Artificial Sequence
  Description of Artificial Sequence: Synthetic oligonucleotide
aaccagcccauguacauac

SEQ ID NO: 2861086 - RNA, 19 nt, Artificial Sequence
  Description of Artificial Sequence: Synthetic oligonucleotide
aauauaauguauaggacau

SEQ ID NO: 2861087 - RNA, 19 nt, Artificial Sequence
  Description of Artificial Sequence: Synthetic oligonucleotide
cuaguuuauuccuggaucc

SEQ ID NO: 2861088 - RNA, 19 nt, Artificial Sequence
  Description of Artificial Sequence: Synthetic oligonucleotide
auaagucuucuguaaacgg

SEQ ID NO: 2861089 - RNA, 19 nt, Artificial Sequence
  Description of Artificial Sequence: Synthetic oligonucleotide
aauguauaggacaugacau

SEQ ID NO: 2861090 - RNA, 19 nt, Artificial Sequence
  Description of Artificial Sequence: Synthetic oligonucleotide
ugaauauaauguauaggac

SEQ ID NO: 2861091 - RNA, 19 nt, Artificial Sequence
  Description of Artificial Sequence: Synthetic oligonucleotide
gacauugcaggcuggauag

SEQ ID NO: 2861092 - RNA, 19 nt, Artificial Sequence
  Description of Artificial Sequence: Synthetic oligonucleotide
acagaaaaggcaauaaguc

SEQ ID NO: 2861093 - RNA, 19 nt, Artificial Sequence
  Description of Artificial Sequence: Synthetic oligonucleotide
uaaacggcucccaugagug

SEQ ID NO: 2861094 - RNA, 19 nt, Artificial Sequence
  Description of Artificial Sequence: Synthetic oligonucleotide
uaagucuucuguaaacggc

SEQ ID NO: 2861095 - RNA, 19 nt, Artificial Sequence
  Description of Artificial Sequence: Synthetic oligonucleotide
agauaaccagcccauguac

SEQ ID NO: 2861096 - RNA, 19 nt, Artificial Sequence
  Description of Artificial Sequence: Synthetic oligonucleotide
aguaaguguacacauggcu

SEQ ID NO: 2861097 - RNA, 19 nt, Artificial Sequence
  Description of Artificial Sequence: Synthetic oligonucleotide
uauaggacaugacauugca

SEQ ID NO: 2861098 - RNA, 19 nt, Artificial Sequence
  Description of Artificial Sequence: Synthetic oligonucleotide
acugcuaguuuauuccugg

SEQ ID NO: 2861099 - RNA, 19 nt, Artificial Sequence
  Description of Artificial Sequence: Synthetic oligonucleotide
uguauaggacaugacauug

SEQ ID NO: 2861100 - RNA, 19 nt, Artificial Sequence
  Description of Artificial Sequence: Synthetic oligonucleotide
agagacugcuaguuuauuc

SEQ ID NO: 2861101 - RNA, 19 nt, Artificial Sequence
  Description of Artificial Sequence: Synthetic oligonucleotide
uaaguguacacauggcuga

SEQ ID NO: 2861102 - RNA, 19 nt, Artificial Sequence
  Description of Artificial Sequence: Synthetic oligonucleotide
uacacauggcugaugaaca

SEQ ID NO: 2861103 - RNA, 19 nt, Artificial Sequence
  Description of Artificial Sequence: Synthetic oligonucleotide
aggacaugacauugcaggc

SEQ ID NO: 2861104 - RNA, 19 nt, Artificial Sequence
  Description of Artificial Sequence: Synthetic oligonucleotide
aacugggccagauggauca

SEQ ID NO: 2861105 - RNA, 19 nt, Artificial Sequence
  Description of Artificial Sequence: Synthetic oligonucleotide
aacacaggcccaagaaucc

SEQ ID NO: 2861106 - RNA, 19 nt, Artificial Sequence
  Description of Artificial Sequence: Synthetic oligonucleotide
auaaugacagcccucacua

SEQ ID NO: 2861107 - RNA, 19 nt, Artificial Sequence
  Description of Artificial Sequence: Synthetic oligonucleotide
aaaggcaauaagucuucug

SEQ ID NO: 2861108 - RNA, 19 nt, Artificial Sequence
  Description of Artificial Sequence: Synthetic oligonucleotide
acccuggucauucucuugc

SEQ ID NO: 2861109 - RNA, 19 nt, Artificial Sequence
  Description of Artificial Sequence: Synthetic oligonucleotide
gaacuuuugaauauaaugu

SEQ ID NO: 2861110 - RNA, 19 nt, Artificial Sequence
  Description of Artificial Sequence: Synthetic oligonucleotide
gauuccaacuagcacagca

SEQ ID NO: 2861111 - RNA, 19 nt, Artificial Sequence
  Description of Artificial Sequence: Synthetic oligonucleotide
cauucucuugcagacaugg

SEQ ID NO: 2861112 - RNA, 19 nt, Artificial Sequence
  Description of Artificial Sequence: Synthetic oligonucleotide
aaguaaguguacacauggc

SEQ ID NO: 2861113 - RNA, 19 nt, Artificial Sequence
  Description of Artificial Sequence: Synthetic oligonucleotide
accacuauuccacacacaa

SEQ ID NO: 2861114 - RNA, 19 nt, Artificial Sequence
  Description of Artificial Sequence: Synthetic oligonucleotide
gacaugacauugcaggcug

SEQ ID NO: 2861115 - RNA, 19 nt, Artificial Sequence
  Description of Artificial Sequence: Synthetic oligonucleotide
caauaagucuucuguaaac

SEQ ID NO: 2861116 - RNA, 19 nt, Artificial Sequence
  Description of Artificial Sequence: Synthetic oligonucleotide
uauuccuggauccucccac

SEQ ID NO: 2861117 - RNA, 19 nt, Artificial Sequence
  Description of Artificial Sequence: Synthetic oligonucleotide
cuuccagaagcagauaacc

SEQ ID NO: 2861118 - RNA, 19 nt, Artificial Sequence
  Description of Artificial Sequence: Synthetic oligonucleotide
ucuguaaacggcucccaug

SEQ ID NO: 2861119 - RNA, 19 nt, Artificial Sequence
  Description of Artificial Sequence: Synthetic oligonucleotide
ugaaauggugagcaccacu

SEQ ID NO: 2861120 - RNA, 19 nt, Artificial Sequence
  Description of Artificial Sequence: Synthetic oligonucleotide
guaaguguacacauggcug

SEQ ID NO: 2861121 - RNA, 19 nt, Artificial Sequence
  Description of Artificial Sequence: Synthetic oligonucleotide
augagugaaauggugagca

SEQ ID NO: 2861122 - RNA, 19 nt, Artificial Sequence
  Description of Artificial Sequence: Synthetic oligonucleotide
acagcccucacuaggaggc

SEQ ID NO: 2861123 - RNA, 19 nt, Artificial Sequence
  Description of Artificial Sequence: Synthetic oligonucleotide
gcucccaugagugaaaugg

SEQ ID NO: 2861124 - RNA, 19 nt, Artificial Sequence
  Description of Artificial Sequence: Synthetic oligonucleotide
cacaucugacagaaaaggc

SEQ ID NO: 2861125 - RNA, 19 nt, Artificial Sequence
  Description of Artificial Sequence: Synthetic oligonucleotide
uggcugaugaacacaggcc

SEQ ID NO: 2861126 - RNA, 19 nt, Artificial Sequence
  Description of Artificial Sequence: Synthetic oligonucleotide
uggauagccgauuccaacu

SEQ ID NO: 2861127 - RNA, 19 nt, Artificial Sequence
  Description of Artificial Sequence: Synthetic oligonucleotide
ugggccagauggaucaccg

SEQ ID NO: 2861128 - RNA, 19 nt, Artificial Sequence
  Description of Artificial Sequence: Synthetic oligonucleotide
acuauuccacacacaaggc

SEQ ID NO: 2861129 - RNA, 19 nt, Artificial Sequence
  Description of Artificial Sequence: Synthetic oligonucleotide
gaacacaggcccaagaauc

SEQ ID NO: 2861130 - RNA, 19 nt, Artificial Sequence
  Description of Artificial Sequence: Synthetic oligonucleotide
auggugagcaccacuauuc

SEQ ID NO: 2861131 - RNA, 19 nt, Artificial Sequence
  Description of Artificial Sequence: Synthetic oligonucleotide
aagucuucuguaaacggcu

SEQ ID NO: 2861132 - RNA, 19 nt, Artificial Sequence
  Description of Artificial Sequence: Synthetic oligonucleotide
gagugaaauggugagcacc

SEQ ID NO: 2861133 - RNA, 19 nt, Artificial Sequence
  Description of Artificial Sequence: Synthetic oligonucleotide
gaauccgugcugcacuucc

SEQ ID NO: 2861134 - RNA, 19 nt, Artificial Sequence
  Description of Artificial Sequence: Synthetic oligonucleotide
acaucugacagaaaaggca

SEQ ID NO: 2861135 - RNA, 19 nt, Artificial Sequence
  Description of Artificial Sequence: Synthetic oligonucleotide
ugacauugcaggcuggaua

SEQ ID NO: 2861136 - RNA, 19 nt, Artificial Sequence
  Description of Artificial Sequence: Synthetic oligonucleotide
cuuuugaauauaauguaua

SEQ ID NO: 2861137 - RNA, 19 nt, Artificial Sequence
  Description of Artificial Sequence: Synthetic oligonucleotide
cucgccauaaugacagccc

SEQ ID NO: 2861138 - RNA, 19 nt, Artificial Sequence
  Description of Artificial Sequence: Synthetic oligonucleotide
acacauggcugaugaacac

SEQ ID NO: 2861139 - RNA, 19 nt, Artificial Sequence
  Description of Artificial Sequence: Synthetic oligonucleotide
ucugcuuccgggcgagccg

SEQ ID NO: 2861140 - RNA, 19 nt, Artificial Sequence
  Description of Artificial Sequence: Synthetic oligonucleotide
auagccgauuccaacuagc

SEQ ID NO: 2861141 - RNA, 19 nt, Artificial Sequence
  Description of Artificial Sequence: Synthetic oligonucleotide
gacagcccucacuaggagg

SEQ ID NO: 2861142 - RNA, 19 nt, Artificial Sequence
  Description of Artificial Sequence: Synthetic oligonucleotide
ucuucuguaaacggcuccc

SEQ ID NO: 2861143 - RNA, 19 nt, Artificial Sequence
  Description of Artificial Sequence: Synthetic oligonucleotide
uuuauuccuggauccuccc

SEQ ID NO: 2861144 - RNA, 19 nt, Artificial Sequence
  Description of Artificial Sequence: Synthetic oligonucleotide
gauagccgauuccaacuag

SEQ ID NO: 2861145 - RNA, 19 nt, Artificial Sequence
  Description of Artificial Sequence: Synthetic oligonucleotide
auaauguauaggacaugac

SEQ ID NO: 2861146 - RNA, 19 nt, Artificial Sequence
  Description of Artificial Sequence: Synthetic oligonucleotide
uacccgugggguuuggucc

SEQ ID NO: 2861147 - RNA, 19 nt, Artificial Sequence
  Description of Artificial Sequence: Synthetic oligonucleotide
auacccgugggguuugguc

SEQ ID NO: 2861148 - RNA, 19 nt, Artificial Sequence
  Description of Artificial Sequence: Synthetic oligonucleotide
agccgauuccaacuagcac

SEQ ID NO: 2861149 - RNA, 19 nt, Artificial Sequence
  Description of Artificial Sequence: Synthetic oligonucleotide
ugguccuagaacuuuugaa

SEQ ID NO: 2861150 - RNA, 19 nt, Artificial Sequence
  Description of Artificial Sequence: Synthetic oligonucleotide
uccuagaacuuuugaauau

SEQ ID NO: 2861151 - RNA, 19 nt, Artificial Sequence
  Description of Artificial Sequence: Synthetic oligonucleotide
cauucucugcuuccgggcg

SEQ ID NO: 2861152 - RNA, 19 nt, Artificial Sequence
  Description of Artificial Sequence: Synthetic oligonucleotide
uccaacuagcacagcagcu

SEQ ID NO: 2861153 - RNA, 19 nt, Artificial Sequence
  Description of Artificial Sequence: Synthetic oligonucleotide
guacacauggcugaugaac

SEQ ID NO: 2861154 - RNA, 19 nt, Artificial Sequence
  Description of Artificial Sequence: Synthetic oligonucleotide
auaaccagcccauguacau

SEQ ID NO: 2861155 - RNA, 19 nt, Artificial Sequence
  Description of Artificial Sequence: Synthetic oligonucleotide
guuuauuccuggauccucc

SEQ ID NO: 2861156 - RNA, 19 nt, Artificial Sequence
  Description of Artificial Sequence: Synthetic oligonucleotide
uggugagcaccacuauucc

SEQ ID NO: 2861157 - RNA, 19 nt, Artificial Sequence
  Description of Artificial Sequence: Synthetic oligonucleotide
agugaaauggugagcacca

SEQ ID NO: 2861158 - RNA, 19 nt, Artificial Sequence
  Description of Artificial Sequence: Synthetic oligonucleotide
cagcccauguacauacccg

SEQ ID NO: 2861159 - RNA, 19 nt, Artificial Sequence
  Description of Artificial Sequence: Synthetic oligonucleotide
caucugacagaaaaggcaa

SEQ ID NO: 2861160 - RNA, 19 nt, Artificial Sequence
  Description of Artificial Sequence: Synthetic oligonucleotide
cucacuaggaggcgcgccg

SEQ ID NO: 2861161 - RNA, 19 nt, Artificial Sequence
  Description of Artificial Sequence: Synthetic oligonucleotide
gcuaguuuauuccuggauc

SEQ ID NO: 2861162 - RNA, 19 nt, Artificial Sequence
  Description of Artificial Sequence: Synthetic oligonucleotide
cuguaaacggcucccauga

SEQ ID NO: 2861163 - RNA, 19 nt, Artificial Sequence
  Description of Artificial Sequence: Synthetic oligonucleotide
cauguacauacccgugggg

SEQ ID NO: 2861164 - RNA, 19 nt, Artificial Sequence
  Description of Artificial Sequence: Synthetic oligonucleotide
auuccaacuagcacagcag

SEQ ID NO: 2861165 - RNA, 19 nt, Artificial Sequence
  Description of Artificial Sequence: Synthetic oligonucleotide
agacugcuaguuuauuccu

SEQ ID NO: 2861166 - RNA, 19 nt, Artificial Sequence
  Description of Artificial Sequence: Synthetic oligonucleotide
aggcucgccauaaugacag

SEQ ID NO: 2861167 - RNA, 19 nt, Artificial Sequence
  Description of Artificial Sequence: Synthetic oligonucleotide
uuauuccuggauccuccca

SEQ ID NO: 2861168 - RNA, 19 nt, Artificial Sequence
  Description of Artificial Sequence: Synthetic oligonucleotide
cuggauagccgauuccaac

SEQ ID NO: 2861169 - RNA, 19 nt, Artificial Sequence
  Description of Artificial Sequence: Synthetic oligonucleotide
auguacauacccguggggu

SEQ ID NO: 2861170 - RNA, 19 nt, Artificial Sequence
  Description of Artificial Sequence: Synthetic oligonucleotide
uguaaacggcucccaugag

SEQ ID NO: 2861171 - RNA, 19 nt, Artificial Sequence
  Description of Artificial Sequence: Synthetic oligonucleotide
gccgauuccaacuagcaca

SEQ ID NO: 2861172 - RNA, 19 nt, Artificial Sequence
  Description of Artificial Sequence: Synthetic oligonucleotide
agcaccacuauuccacaca

SEQ ID NO: 2861173 - RNA, 19 nt, Artificial Sequence
  Description of Artificial Sequence: Synthetic oligonucleotide
uaaugacagcccucacuag

SEQ ID NO: 2861174 - RNA, 19 nt, Artificial Sequence
  Description of Artificial Sequence: Synthetic oligonucleotide
gaaauggugagcaccacua

SEQ ID NO: 2861175 - RNA, 19 nt, Artificial Sequence
  Description of Artificial Sequence: Synthetic oligonucleotide
ucgccauaaugacagcccu

SEQ ID NO: 2861176 - RNA, 19 nt, Artificial Sequence
  Description of Artificial Sequence: Synthetic oligonucleotide
cauugcaggcuggauagcc

SEQ ID NO: 2861177 - RNA, 19 nt, Artificial Sequence
  Description of Artificial Sequence: Synthetic oligonucleotide
gugagcaccacuauuccac

SEQ ID NO: 2861178 - RNA, 19 nt, Artificial Sequence
  Description of Artificial Sequence: Synthetic oligonucleotide
ucugacagaaaaggcaaua

SEQ ID NO: 2861179 - RNA, 19 nt, Artificial Sequence
  Description of Artificial Sequence: Synthetic oligonucleotide
auguauaggacaugacauu

SEQ ID NO: 2861180 - RNA, 19 nt, Artificial Sequence
  Description of Artificial Sequence: Synthetic oligonucleotide
acaggcacccuggucauuc

SEQ ID NO: 2861181 - RNA, 19 nt, Artificial Sequence
  Description of Artificial Sequence: Synthetic oligonucleotide
agcccauguacauacccgu

SEQ ID NO: 2861182 - RNA, 19 nt, Artificial Sequence
  Description of Artificial Sequence: Synthetic oligonucleotide
auccucccacaucugacag

SEQ ID NO: 2861183 - RNA, 19 nt, Artificial Sequence
  Description of Artificial Sequence: Synthetic oligonucleotide
caugagugaaauggugagc

SEQ ID NO: 2861184 - RNA, 19 nt, Artificial Sequence
  Description of Artificial Sequence: Synthetic oligonucleotide
agauggaucaccgggguau

SEQ ID NO: 2861185 - RNA, 19 nt, Artificial Sequence
  Description of Artificial Sequence: Synthetic oligonucleotide
ccagaagcagauaaccagc

SEQ ID NO: 2861186 - RNA, 19 nt, Artificial Sequence
  Description of Artificial Sequence: Synthetic oligonucleotide
ucccaggcucgccauaaug

SEQ ID NO: 2861187 - RNA, 19 nt, Artificial Sequence
  Description of Artificial Sequence: Synthetic oligonucleotide
uguacauacccgugggguu

SEQ ID NO: 2861188 - RNA, 19 nt, Artificial Sequence
  Description of Artificial Sequence: Synthetic oligonucleotide
aggcuggauagccgauucc

SEQ ID NO: 2861189 - RNA, 19 nt, Artificial Sequence
  Description of Artificial Sequence: Synthetic oligonucleotide
guauaggacaugacauugc

SEQ ID NO: 2861190 - RNA, 19 nt, Artificial Sequence
  Description of Artificial Sequence: Synthetic oligonucleotide
ugacagcccucacuaggag

SEQ ID NO: 2861191 - RNA, 19 nt, Artificial Sequence
  Description of Artificial Sequence: Synthetic oligonucleotide
gauaaccagcccauguaca

SEQ ID NO: 2861192 - RNA, 19 nt, Artificial Sequence
  Description of Artificial Sequence: Synthetic oligonucleotide
aggcugaaugcccaucgug

SEQ ID NO: 2861193 - RNA, 19 nt, Artificial Sequence
  Description of Artificial Sequence: Synthetic oligonucleotide
ggcugaaugcccaucgugg

SEQ ID NO: 2861194 - RNA, 19 nt, Artificial Sequence
  Description of Artificial Sequence: Synthetic oligonucleotide
gucuucuguaaacggcucc

SEQ ID NO: 2861195 - RNA, 19 nt, Artificial Sequence
  Description of Artificial Sequence: Synthetic oligonucleotide
cuugcagacauggccauuc

SEQ ID NO: 2861196 - RNA, 19 nt, Artificial Sequence
  Description of Artificial Sequence: Synthetic oligonucleotide
ccacaucugacagaaaagg

SEQ ID NO: 2861197 - RNA, 19 nt, Artificial Sequence
  Description of Artificial Sequence: Synthetic oligonucleotide
auauaauguauaggacaug

SEQ ID NO: 2861198 - RNA, 19 nt, Artificial Sequence
  Description of Artificial Sequence: Synthetic oligonucleotide
ugagcaccacuauuccaca

SEQ ID NO: 2861199 - RNA, 19 nt, Artificial Sequence
  Description of Artificial Sequence: Synthetic oligonucleotide
aagaauccgugcugcacuu

SEQ ID NO: 2861200 - RNA, 19 nt, Artificial Sequence
  Description of Artificial Sequence: Synthetic oligonucleotide
cugaaugcccaucgugggc

SEQ ID NO: 2861201 - RNA, 19 nt, Artificial Sequence
  Description of Artificial Sequence: Synthetic oligonucleotide
ggaucaccgggguauacag

SEQ ID NO: 2861202 - RNA, 19 nt, Artificial Sequence
  Description of Artificial Sequence: Synthetic oligonucleotide
aggcccaagaauccgugcu

SEQ ID NO: 2861203 - RNA, 19 nt, Artificial Sequence
  Description of Artificial Sequence: Synthetic oligonucleotide
cagaaaaggcaauaagucu

SEQ ID NO: 2861204 - RNA, 19 nt, Artificial Sequence
  Description of Artificial Sequence: Synthetic oligonucleotide
gacauggccauucucugcu

SEQ ID NO: 2861205 - RNA, 19 nt, Artificial Sequence
  Description of Artificial Sequence: Synthetic oligonucleotide
gcugaaugcccaucguggg

SEQ ID NO: 2861206 - RNA, 19 nt, Artificial Sequence
  Description of Artificial Sequence: Synthetic oligonucleotide
auucucuugcagacauggc

SEQ ID NO: 2861207 - RNA, 19 nt, Artificial Sequence
  Description of Artificial Sequence: Synthetic oligonucleotide
ugagugaaauggugagcac

SEQ ID NO: 2861208 - RNA, 19 nt, Artificial Sequence
  Description of Artificial Sequence: Synthetic oligonucleotide
ucauucucuugcagacaug

SEQ ID NO: 2861209 - RNA, 19 nt, Artificial Sequence
  Description of Artificial Sequence: Synthetic oligonucleotide
acuagcacagcagcuguca

SEQ ID NO: 2861210 - RNA, 19 nt, Artificial Sequence
  Description of Artificial Sequence: Synthetic oligonucleotide
guccuagaacuuuugaaua

SEQ ID NO: 2861211 - RNA, 19 nt, Artificial Sequence
  Description of Artificial Sequence: Synthetic oligonucleotide
ccaugagugaaauggugag

SEQ ID NO: 2861212 - RNA, 19 nt, Artificial Sequence
  Description of Artificial Sequence: Synthetic oligonucleotide
auccgugcugcacuuccag

SEQ ID NO: 2861213 - RNA, 19 nt, Artificial Sequence
  Description of Artificial Sequence: Synthetic oligonucleotide
auaggacaugacauugcag

SEQ ID NO: 2861214 - RNA, 19 nt, Artificial Sequence
  Description of Artificial Sequence: Synthetic oligonucleotide
aacuagcacagcagcuguc

SEQ ID NO: 2861215 - RNA, 19 nt, Artificial Sequence
  Description of Artificial Sequence: Synthetic oligonucleotide
gaucaccgggguauacagg

SEQ ID NO: 2861216 - RNA, 19 nt, Artificial Sequence
  Description of Artificial Sequence: Synthetic oligonucleotide
aagcagauaaccagcccau

SEQ ID NO: 2861217 - RNA, 19 nt, Artificial Sequence
  Description of Artificial Sequence: Synthetic oligonucleotide
aacggcucccaugagugaa

SEQ ID NO: 2861218 - RNA, 19 nt, Artificial Sequence
  Description of Artificial Sequence: Synthetic oligonucleotide
aaacggcucccaugaguga

SEQ ID NO: 2861219 - RNA, 19 nt, Artificial Sequence
  Description of Artificial Sequence: Synthetic oligonucleotide
caggagaggcucccgcucg

SEQ ID NO: 2861220 - RNA, 19 nt, Artificial Sequence
  Description of Artificial Sequence: Synthetic oligonucleotide
aggcaauaagucuucugua

SEQ ID NO: 2861221 - RNA, 19 nt, Artificial Sequence
  Description of Artificial Sequence: Synthetic oligonucleotide
ggcaauaagucuucuguaa

SEQ ID NO: 2861222 - RNA, 19 nt, Artificial Sequence
  Description of Artificial Sequence: Synthetic oligonucleotide
uaguuuauuccuggauccu

SEQ ID NO: 2861223 - RNA, 19 nt, Artificial Sequence
  Description of Artificial Sequence: Synthetic oligonucleotide
uggccauucucugcuuccg

SEQ ID NO: 2861224 - RNA, 19 nt, Artificial Sequence
  Description of Artificial Sequence: Synthetic oligonucleotide
uggaucaccgggguauaca

SEQ ID NO: 2861225 - RNA, 19 nt, Artificial Sequence
  Description of Artificial Sequence: Synthetic oligonucleotide
cuagcacagcagcugucag

SEQ ID NO: 2861226 - RNA, 19 nt, Artificial Sequence
  Description of Artificial Sequence: Synthetic oligonucleotide
acacaggcccaagaauccg

SEQ ID NO: 2861227 - RNA, 19 nt, Artificial Sequence
  Description of Artificial Sequence: Synthetic oligonucleotide
ccauguacauacccguggg

SEQ ID NO: 2861228 - RNA, 19 nt, Artificial Sequence
  Description of Artificial Sequence: Synthetic oligonucleotide
cauaaugacagcccucacu

SEQ ID NO: 2861229 - RNA, 19 nt, Artificial Sequence
  Description of Artificial Sequence: Synthetic oligonucleotide
ggguauacaggcacccugg

SEQ ID NO: 2861230 - RNA, 19 nt, Artificial Sequence
  Description of Artificial Sequence: Synthetic oligonucleotide
uuccgggcgagccggggcc

SEQ ID NO: 2861231 - RNA, 19 nt, Artificial Sequence
  Description of Artificial Sequence: Synthetic oligonucleotide
cccauguacauacccgugg

SEQ ID NO: 2861232 - RNA, 19 nt, Artificial Sequence
  Description of Artificial Sequence: Synthetic oligonucleotide
guaaacggcucccaugagu

SEQ ID NO: 2861233 - RNA, 19 nt, Artificial Sequence
  Description of Artificial Sequence: Synthetic oligonucleotide
gggguauacaggcacccug

SEQ ID NO: 2861234 - RNA, 19 nt, Artificial Sequence
  Description of Artificial Sequence: Synthetic oligonucleotide
guauacaggcacccugguc

SEQ ID NO: 2861235 - RNA, 19 nt, Artificial Sequence
  Description of Artificial Sequence: Synthetic oligonucleotide
gggguuugguccuagaacu

SEQ ID NO: 2861236 - RNA, 19 nt, Artificial Sequence
  Description of Artificial Sequence: Synthetic oligonucleotide
gguccuagaacuuuugaau

SEQ ID NO: 2861237 - RNA, 19 nt, Artificial Sequence
  Description of Artificial Sequence: Synthetic oligonucleotide
agcccucacuaggaggcgc

SEQ ID NO: 2861238 - RNA, 19 nt, Artificial Sequence
  Description of Artificial Sequence: Synthetic oligonucleotide
acauugcaggcuggauagc

SEQ ID NO: 2861239 - RNA, 19 nt, Artificial Sequence
  Description of Artificial Sequence: Synthetic oligonucleotide
caccgggguauacaggcac

SEQ ID NO: 2861240 - RNA, 19 nt, Artificial Sequence
  Description of Artificial Sequence: Synthetic oligonucleotide
gaaugcccaucgugggccc

SEQ ID NO: 2861241 - RNA, 19 nt, Artificial Sequence
  Description of Artificial Sequence: Synthetic oligonucleotide
augacagcccucacuagga

SEQ ID NO: 2861242 - RNA, 19 nt, Artificial Sequence
  Description of Artificial Sequence: Synthetic oligonucleotide
ucgugggcccaaguaagug

SEQ ID NO: 2861243 - RNA, 19 nt, Artificial Sequence
  Description of Artificial Sequence: Synthetic oligonucleotide
accgggguauacaggcacc

SEQ ID NO: 2861244 - RNA, 19 nt, Artificial Sequence
  Description of Artificial Sequence: Synthetic oligonucleotide
ucgcuucccaggcucgcca

SEQ ID NO: 2861245 - RNA, 19 nt, Artificial Sequence
  Description of Artificial Sequence: Synthetic oligonucleotide
uccuggauccucccacauc

SEQ ID NO: 2861246 - RNA, 19 nt, Artificial Sequence
  Description of Artificial Sequence: Synthetic oligonucleotide
gcaauaagucuucuguaaa

SEQ ID NO: 2861247 - RNA, 19 nt, Artificial Sequence
  Description of Artificial Sequence: Synthetic oligonucleotide
cuauuccacacacaaggcu

SEQ ID NO: 2861248 - RNA, 19 nt, Artificial Sequence
  Description of Artificial Sequence: Synthetic oligonucleotide
ccaaguaaguguacacaug

SEQ ID NO: 2861249 - RNA, 19 nt, Artificial Sequence
  Description of Artificial Sequence: Synthetic oligonucleotide
aaguguacacauggcugau

SEQ ID NO: 2861250 - RNA, 19 nt, Artificial Sequence
  Description of Artificial Sequence: Synthetic oligonucleotide
gagcaccacuauuccacac

SEQ ID NO: 2861251 - RNA, 19 nt, Artificial Sequence
  Description of Artificial Sequence: Synthetic oligonucleotide
cucggccucgcuucccagg

SEQ ID NO: 2861252 - RNA, 19 nt, Artificial Sequence
  Description of Artificial Sequence: Synthetic oligonucleotide
cauggccauucucugcuuc

SEQ ID NO: 2861253 - RNA, 19 nt, Artificial Sequence
  Description of Artificial Sequence: Synthetic oligonucleotide
caggcuggauagccgauuc

SEQ ID NO: 2861254 - RNA, 19 nt, Artificial Sequence
  Description of Artificial Sequence: Synthetic oligonucleotide
cagcugucaggaacugggc

SEQ ID NO: 2861255 - RNA, 19 nt, Artificial Sequence
  Description of Artificial Sequence: Synthetic oligonucleotide
caagaauccgugcugcacu

SEQ ID NO: 2861256 - RNA, 19 nt, Artificial Sequence
  Description of Artificial Sequence: Synthetic oligonucleotide
aguguacacauggcugaug

SEQ ID NO: 2861257 - RNA, 19 nt, Artificial Sequence
  Description of Artificial Sequence: Synthetic oligonucleotide
auggaucaccgggguauac

SEQ ID NO: 2861258 - RNA, 19 nt, Artificial Sequence
  Description of Artificial Sequence: Synthetic oligonucleotide
cagauaaccagcccaugua

SEQ ID NO: 2861259 - RNA, 19 nt, Artificial Sequence
  Description of Artificial Sequence: Synthetic oligonucleotide
aggcacccuggucauucuc

SEQ ID NO: 2861260 - RNA, 19 nt, Artificial Sequence
  Description of Artificial Sequence: Synthetic oligonucleotide
cucugcuuccgggcgagcc

SEQ ID NO: 2861261 - RNA, 19 nt, Artificial Sequence
  Description of Artificial Sequence: Synthetic oligonucleotide
caggcccaagaauccgugc

SEQ ID NO: 2861262 - RNA, 19 nt, Artificial Sequence
  Description of Artificial Sequence: Synthetic oligonucleotide
gcaccacuauuccacacac

SEQ ID NO: 2861263 - RNA, 19 nt, Artificial Sequence
  Description of Artificial Sequence: Synthetic oligonucleotide
uacauacccgugggguuug

SEQ ID NO: 2861264 - RNA, 19 nt, Artificial Sequence
  Description of Artificial Sequence: Synthetic oligonucleotide
gccagauggaucaccgggg

SEQ ID NO: 2861265 - RNA, 19 nt, Artificial Sequence
  Description of Artificial Sequence: Synthetic oligonucleotide
agaauccgugcugcacuuc

SEQ ID NO: 2861266 - RNA, 19 nt, Artificial Sequence
  Description of Artificial Sequence: Synthetic oligonucleotide
ccagcccauguacauaccc

SEQ ID NO: 2861267 - RNA, 19 nt, Artificial Sequence
  Description of Artificial Sequence: Synthetic oligonucleotide
ucacuaggaggcgcgccgc

SEQ ID NO: 2861268 - RNA, 19 nt, Artificial Sequence
  Description of Artificial Sequence: Synthetic oligonucleotide
ugggcccaaguaaguguac

SEQ ID NO: 2861269 - RNA, 19 nt, Artificial Sequence
  Description of Artificial Sequence: Synthetic oligonucleotide
aauccgugcugcacuucca

SEQ ID NO: 2861270 - RNA, 19 nt, Artificial Sequence
  Description of Artificial Sequence: Synthetic oligonucleotide
gccauaaugacagcccuca

SEQ ID NO: 2861271 - RNA, 19 nt, Artificial Sequence
  Description of Artificial Sequence: Synthetic oligonucleotide
acaugacauugcaggcugg

SEQ ID NO: 2861272 - RNA, 19 nt, Artificial Sequence
  Description of Artificial Sequence: Synthetic oligonucleotide
uaaccagcccauguacaua

SEQ ID NO: 2861273 - RNA, 19 nt, Artificial Sequence
  Description of Artificial Sequence: Synthetic oligonucleotide
cugcuuccgggcgagccgg

SEQ ID NO: 2861274 - RNA, 19 nt, Artificial Sequence
  Description of Artificial Sequence: Synthetic oligonucleotide
gaacugggccagauggauc

SEQ ID NO: 2861275 - RNA, 19 nt, Artificial Sequence
  Description of Artificial Sequence: Synthetic oligonucleotide
ggcccaaguaaguguacac

SEQ ID NO: 2861276 - RNA, 19 nt, Artificial Sequence
  Description of Artificial Sequence: Synthetic oligonucleotide
agcagauaaccagcccaug

SEQ ID NO: 2861277 - RNA, 19 nt, Artificial Sequence
  Description of Artificial Sequence: Synthetic oligonucleotide
ucccgcucggccucgcuuc

SEQ ID NO: 2861278 - RNA, 19 nt, Artificial Sequence
  Description of Artificial Sequence: Synthetic oligonucleotide
caggcucgccauaaugaca

SEQ ID NO: 2861279 - RNA, 19 nt, Artificial Sequence
  Description of Artificial Sequence: Synthetic oligonucleotide
caugacauugcaggcugga

SEQ ID NO: 2861280 - RNA, 19 nt, Artificial Sequence
  Description of Artificial Sequence: Synthetic oligonucleotide
ccacuauuccacacacaag

SEQ ID NO: 2861281 - RNA, 19 nt, Artificial Sequence
  Description of Artificial Sequence: Synthetic oligonucleotide
cacauggcugaugaacaca

SEQ ID NO: 2861282 - RNA, 19 nt, Artificial Sequence
  Description of Artificial Sequence: Synthetic oligonucleotide
accagcccauguacauacc

SEQ ID NO: 2861283 - RNA, 19 nt, Artificial Sequence
  Description of Artificial Sequence: Synthetic oligonucleotide
ugcaggcuggauagccgau

SEQ ID NO: 2861284 - RNA, 19 nt, Artificial Sequence
  Description of Artificial Sequence: Synthetic oligonucleotide
ccaggcucgccauaaugac

SEQ ID NO: 2861285 - RNA, 19 nt, Artificial Sequence
  Description of Artificial Sequence: Synthetic oligonucleotide
cugggccagauggaucacc

SEQ ID NO: 2861286 - RNA, 19 nt, Artificial Sequence
  Description of Artificial Sequence: Synthetic oligonucleotide
cacccuggucauucucuug

SEQ ID NO: 2861287 - RNA, 19 nt, Artificial Sequence
  Description of Artificial Sequence: Synthetic oligonucleotide
ggcuggauagccgauucca

SEQ ID NO: 2861288 - RNA, 19 nt, Artificial Sequence
  Description of Artificial Sequence: Synthetic oligonucleotide
augacauugcaggcuggau

SEQ ID NO: 2861289 - RNA, 19 nt, Artificial Sequence
  Description of Artificial Sequence: Synthetic oligonucleotide
aggcgcgccgccaacucuc

SEQ ID NO: 2861290 - RNA, 19 nt, Artificial Sequence
  Description of Artificial Sequence: Synthetic oligonucleotide
gaggcucccgcucggccuc

SEQ ID NO: 2861291 - RNA, 19 nt, Artificial Sequence
  Description of Artificial Sequence: Synthetic oligonucleotide
cacuaggaggcgcgccgcc

SEQ ID NO: 2861292 - RNA, 19 nt, Artificial Sequence
  Description of Artificial Sequence: Synthetic oligonucleotide
cuggauccucccacaucug

SEQ ID NO: 2861293 - RNA, 19 nt, Artificial Sequence
  Description of Artificial Sequence: Synthetic oligonucleotide
gcagauaaccagcccaugu

SEQ ID NO: 2861294 - RNA, 19 nt, Artificial Sequence
  Description of Artificial Sequence: Synthetic oligonucleotide
aaugcccaucgugggccca

SEQ ID NO: 2861295 - RNA, 19 nt, Artificial Sequence
  Description of Artificial Sequence: Synthetic oligonucleotide
caacuagcacagcagcugu

SEQ ID NO: 2861296 - RNA, 19 nt, Artificial Sequence
  Description of Artificial Sequence: Synthetic oligonucleotide
gcugcacuuccagaagcag

SEQ ID NO: 2861297 - RNA, 19 nt, Artificial Sequence
  Description of Artificial Sequence: Synthetic oligonucleotide
ggauagccgauuccaacua

SEQ ID NO: 2861298 - RNA, 19 nt, Artificial Sequence
  Description of Artificial Sequence: Synthetic oligonucleotide
aucugacagaaaaggcaau

SEQ ID NO: 2861299 - RNA, 19 nt, Artificial Sequence
  Description of Artificial Sequence: Synthetic oligonucleotide
ccaagaauccgugcugcac

SEQ ID NO: 2861300 - RNA, 19 nt, Artificial Sequence
  Description of Artificial Sequence: Synthetic oligonucleotide
gugaaauggugagcaccac

SEQ ID NO: 2861301 - RNA, 19 nt, Artificial Sequence
  Description of Artificial Sequence: Synthetic oligonucleotide
cuucuguaaacggcuccca

SEQ ID NO: 2861302 - RNA, 19 nt, Artificial Sequence
  Description of Artificial Sequence: Synthetic oligonucleotide
cccaggcucgccauaauga

SEQ ID NO: 2861303 - RNA, 19 nt, Artificial Sequence
  Description of Artificial Sequence: Synthetic oligonucleotide
ccuggauccucccacaucu

SEQ ID NO: 2861304 - RNA, 19 nt, Artificial Sequence
  Description of Artificial Sequence: Synthetic oligonucleotide
cucgcuucccaggcucgcc

SEQ ID NO: 2861305 - RNA, 19 nt, Artificial Sequence
  Description of Artificial Sequence: Synthetic oligonucleotide
aucgugggcccaaguaagu

SEQ ID NO: 2861306 - RNA, 19 nt, Artificial Sequence
  Description of Artificial Sequence: Synthetic oligonucleotide
gggccagauggaucaccgg

SEQ ID NO: 2861307 - RNA, 19 nt, Artificial Sequence
  Description of Artificial Sequence: Synthetic oligonucleotide
gcccaagaauccgugcugc

SEQ ID NO: 2861308 - RNA, 19 nt, Artificial Sequence
  Description of Artificial Sequence: Synthetic oligonucleotide
gcccaaguaaguguacaca

SEQ ID NO: 2861309 - RNA, 19 nt, Artificial Sequence
  Description of Artificial Sequence: Synthetic oligonucleotide
cucccaugagugaaauggu

SEQ ID NO: 2861310 - RNA, 19 nt, Artificial Sequence
  Description of Artificial Sequence: Synthetic oligonucleotide
caccacuauuccacacaca

SEQ ID NO: 2861311 - RNA, 19 nt, Artificial Sequence
  Description of Artificial Sequence: Synthetic oligonucleotide
gugggcccaaguaagugua

SEQ ID NO: 2861312 - RNA, 19 nt, Artificial Sequence
  Description of Artificial Sequence: Synthetic oligonucleotide
uucccaggcucgccauaau

SEQ ID NO: 2861313 - RNA, 19 nt, Artificial Sequence
  Description of Artificial Sequence: Synthetic oligonucleotide
gauggaucaccgggguaua

SEQ ID NO: 2861314 - RNA, 19 nt, Artificial Sequence
  Description of Artificial Sequence: Synthetic oligonucleotide
acauacccgugggguuugg

SEQ ID NO: 2861315 - RNA, 19 nt, Artificial Sequence
  Description of Artificial Sequence: Synthetic oligonucleotide
cuucccaggcucgccauaa

SEQ ID NO: 2861316 - RNA, 19 nt, Artificial Sequence
  Description of Artificial Sequence: Synthetic oligonucleotide
ccaucgugggcccaaguaa

SEQ ID NO: 2861317 - RNA, 19 nt, Artificial Sequence
  Description of Artificial Sequence: Synthetic oligonucleotide
cccaaguaaguguacacau

SEQ ID NO: 2861318 - RNA, 19 nt, Artificial Sequence
  Description of Artificial Sequence: Synthetic oligonucleotide
cagcccucacuaggaggcg

SEQ ID NO: 2861319 - RNA, 19 nt, Artificial Sequence
  Description of Artificial Sequence: Synthetic oligonucleotide
cgugcugcacuuccagaag

SEQ ID NO: 2861320 - RNA, 19 nt, Artificial Sequence
  Description of Artificial Sequence: Synthetic oligonucleotide
cacaggcccaagaauccgu

SEQ ID NO: 2861321 - RNA, 19 nt, Artificial Sequence
  Description of Artificial Sequence: Synthetic oligonucleotide
ggacaugacauugcaggcu

SEQ ID NO: 2861322 - RNA, 19 nt, Artificial Sequence
  Description of Artificial Sequence: Synthetic oligonucleotide
cuaggaggcgcgccgccaa

SEQ ID NO: 2861323 - RNA, 19 nt, Artificial Sequence
  Description of Artificial Sequence: Synthetic oligonucleotide
ggucauucucuugcagaca

SEQ ID NO: 2861324 - RNA, 19 nt, Artificial Sequence
  Description of Artificial Sequence: Synthetic oligonucleotide
ggcucccaugagugaaaug

SEQ ID NO: 2861325 - RNA, 19 nt, Artificial Sequence
  Description of Artificial Sequence: Synthetic oligonucleotide
guuugguccuagaacuuuu

SEQ ID NO: 2861326 - RNA, 19 nt, Artificial Sequence
  Description of Artificial Sequence: Synthetic oligonucleotide
ggccucgcuucccaggcuc

SEQ ID NO: 2861327 - RNA, 19 nt, Artificial Sequence
  Description of Artificial Sequence: Synthetic oligonucleotide
gcccucacuaggaggcgcg

SEQ ID NO: 2861328 - RNA, 19 nt, Artificial Sequence
  Description of Artificial Sequence: Synthetic oligonucleotide
cgcgccgccaacucucgcg

SEQ ID NO: 2861329 - RNA, 19 nt, Artificial Sequence
  Description of Artificial Sequence: Synthetic oligonucleotide
guacauacccgugggguuu

SEQ ID NO: 2861330 - RNA, 19 nt, Artificial Sequence
  Description of Artificial Sequence: Synthetic oligonucleotide
gcccaggagaggcucccgc

SEQ ID NO: 2861331 - RNA, 19 nt, Artificial Sequence
  Description of Artificial Sequence: Synthetic oligonucleotide
ccauaaugacagcccucac

SEQ ID NO: 2861332 - RNA, 19 nt, Artificial Sequence
  Description of Artificial Sequence: Synthetic oligonucleotide
ccucccacaucugacagaa

SEQ ID NO: 2861333 - RNA, 19 nt, Artificial Sequence
  Description of Artificial Sequence: Synthetic oligonucleotide
ccuagaacuuuugaauaua

SEQ ID NO: 2861334 - RNA, 19 nt, Artificial Sequence
  Description of Artificial Sequence: Synthetic oligonucleotide
gguauacaggcacccuggu

SEQ ID NO: 2861335 - RNA, 19 nt, Artificial Sequence
  Description of Artificial Sequence: Synthetic oligonucleotide
ccaggagaggcucccgcuc

SEQ ID NO: 2861336 - RNA, 19 nt, Artificial Sequence
  Description of Artificial Sequence: Synthetic oligonucleotide
ccgggguauacaggcaccc

SEQ ID NO: 2861337 - RNA, 19 nt, Artificial Sequence
  Description of Artificial Sequence: Synthetic oligonucleotide
gggcccaaguaaguguaca

SEQ ID NO: 2861338 - RNA, 19 nt, Artificial Sequence
  Description of Artificial Sequence: Synthetic oligonucleotide
gcccauguacauacccgug

SEQ ID NO: 2861339 - RNA, 19 nt, Artificial Sequence
  Description of Artificial Sequence: Synthetic oligonucleotide
cagauggaucaccggggua

SEQ ID NO: 2861340 - RNA, 19 nt, Artificial Sequence
  Description of Artificial Sequence: Synthetic oligonucleotide
uccgggcgagccggggccc

SEQ ID NO: 2861341 - RNA, 19 nt, Artificial Sequence
  Description of Artificial Sequence: Synthetic oligonucleotide
gccgccaacucucgcgaca

SEQ ID NO: 2861342 - RNA, 19 nt, Artificial Sequence
  Description of Artificial Sequence: Synthetic oligonucleotide
ccucacuaggaggcgcgcc

SEQ ID NO: 2861343 - RNA, 19 nt, Artificial Sequence
  Description of Artificial Sequence: Synthetic oligonucleotide
gaggcgcgccgccaacucu

SEQ ID NO: 2861344 - RNA, 19 nt, Artificial Sequence
  Description of Artificial Sequence: Synthetic oligonucleotide
acggcucccaugagugaaa

SEQ ID NO: 2861345 - RNA, 19 nt, Artificial Sequence
  Description of Artificial Sequence: Synthetic oligonucleotide
gcuggauagccgauuccaa

SEQ ID NO: 2861346 - RNA, 19 nt, Artificial Sequence
  Description of Artificial Sequence: Synthetic oligonucleotide
augcccaucgugggcccaa

SEQ ID NO: 2861347 - RNA, 19 nt, Artificial Sequence
  Description of Artificial Sequence: Synthetic oligonucleotide
gccucgcuucccaggcucg

SEQ ID NO: 2861348 - RNA, 19 nt, Artificial Sequence
  Description of Artificial Sequence: Synthetic oligonucleotide
gguuugguccuagaacuuu

SEQ ID NO: 2861349 - RNA, 19 nt, Artificial Sequence
  Description of Artificial Sequence: Synthetic oligonucleotide
agccggggcccaggagagg

SEQ ID NO: 2861350 - RNA, 19 nt, Artificial Sequence
  Description of Artificial Sequence: Synthetic oligonucleotide
gucaggaacugggccagau

SEQ ID NO: 2861351 - RNA, 19 nt, Artificial Sequence
  Description of Artificial Sequence: Synthetic oligonucleotide
ccgccaacucucgcgacac

SEQ ID NO: 2861352 - RNA, 19 nt, Artificial Sequence
  Description of Artificial Sequence: Synthetic oligonucleotide
cgccauaaugacagcccuc

SEQ ID NO: 2861353 - RNA, 19 nt, Artificial Sequence
  Description of Artificial Sequence: Synthetic oligonucleotide
gcuuccgggcgagccgggg

SEQ ID NO: 2861354 - RNA, 19 nt, Artificial Sequence
  Description of Artificial Sequence: Synthetic oligonucleotide
cccaucgugggcccaagua

SEQ ID NO: 2861355 - RNA, 19 nt, Artificial Sequence
  Description of Artificial Sequence: Synthetic oligonucleotide
gcgccgccaacucucgcga

SEQ ID NO: 2861356 - RNA, 19 nt, Artificial Sequence
  Description of Artificial Sequence: Synthetic oligonucleotide
ggcgcgccgccaacucucg

SEQ ID NO: 2861357 - RNA, 19 nt, Artificial Sequence
  Description of Artificial Sequence: Synthetic oligonucleotide
gcagagacugcuaguuuau

SEQ ID NO: 2861358 - RNA, 19 nt, Artificial Sequence
  Description of Artificial Sequence: Synthetic oligonucleotide
ggcccaggagaggcucccg

SEQ ID NO: 2861359 - RNA, 19 nt, Artificial Sequence
  Description of Artificial Sequence: Synthetic oligonucleotide
cccuggucauucucuugca

SEQ ID NO: 2861360 - RNA, 19 nt, Artificial Sequence
  Description of Artificial Sequence: Synthetic oligonucleotide
cagcagagacugcuaguuu

SEQ ID NO: 2861361 - RNA, 19 nt, Artificial Sequence
  Description of Artificial Sequence: Synthetic oligonucleotide
gcgagccggggcccaggag

SEQ ID NO: 2861362 - RNA, 19 nt, Artificial Sequence
  Description of Artificial Sequence: Synthetic oligonucleotide
ccucgcuucccaggcucgc

SEQ ID NO: 2861363 - RNA, 19 nt, Artificial Sequence
  Description of Artificial Sequence: Synthetic oligonucleotide
ggcgagccggggcccagga

SEQ ID NO: 2861364 - RNA, 19 nt, Artificial Sequence
  Description of Artificial Sequence: Synthetic oligonucleotide
cgugggcccaaguaagugu

SEQ ID NO: 2861365 - RNA, 19 nt, Artificial Sequence
  Description of Artificial Sequence: Synthetic oligonucleotide
cccgcucggccucgcuucc

SEQ ID NO: 2861366 - RNA, 19 nt, Artificial Sequence
  Description of Artificial Sequence: Synthetic oligonucleotide
cccucacuaggaggcgcgc

SEQ ID NO: 2861367 - RNA, 19 nt, Artificial Sequence
  Description of Artificial Sequence: Synthetic oligonucleotide
cauacccgugggguuuggu

SEQ ID NO: 2861368 - RNA, 19 nt, Artificial Sequence
  Description of Artificial Sequence: Synthetic oligonucleotide
cagagacugcuaguuuauu

SEQ ID NO: 2861369 - RNA, 19 nt, Artificial Sequence
  Description of Artificial Sequence: Synthetic oligonucleotide
gcuucccaggcucgccaua

SEQ ID NO: 2861370 - RNA, 19 nt, Artificial Sequence
  Description of Artificial Sequence: Synthetic oligonucleotide
gggcgagccggggcccagg

SEQ ID NO: 2861371 - RNA, 19 nt, Artificial Sequence
  Description of Artificial Sequence: Synthetic oligonucleotide
ccgugggguuugguccuag

SEQ ID NO: 2861372 - RNA, 19 nt, Artificial Sequence
  Description of Artificial Sequence: Synthetic oligonucleotide
cgccaacucucgcgacacc

SEQ ID NO: 2861373 - RNA, 19 nt, Artificial Sequence
  Description of Artificial Sequence: Synthetic oligonucleotide
cgugggguuugguccuaga

SEQ ID NO: 2861374 - RNA, 19 nt, Artificial Sequence
  Description of Artificial Sequence: Synthetic oligonucleotide
cgccgccaacucucgcgac

SEQ ID NO: 2861375 - RNA, 19 nt, Artificial Sequence
  Description of Artificial Sequence: Synthetic oligonucleotide
gcccaucgugggcccaagu

SEQ ID NO: 2861376 - RNA, 19 nt, Artificial Sequence
  Description of Artificial Sequence: Synthetic oligonucleotide
ccgcucggccucgcuuccc

SEQ ID NO: 2861377 - RNA, 19 nt, Artificial Sequence
  Description of Artificial Sequence: Synthetic oligonucleotide
cgggguauacaggcacccu

SEQ ID NO: 2861378 - RNA, 19 nt, Artificial Sequence
  Description of Artificial Sequence: Synthetic oligonucleotide
ccggggcccaggagaggcu

SEQ ID NO: 2861379 - RNA, 19 nt, Artificial Sequence
  Description of Artificial Sequence: Synthetic oligonucleotide
cgcuucccaggcucgccau

SEQ ID NO: 2861380 - RNA, 19 nt, Artificial Sequence
  Description of Artificial Sequence: Synthetic oligonucleotide
cccgugggguuugguccua

SEQ ID NO: 2861381 - RNA, 19 nt, Artificial Sequence
  Description of Artificial Sequence: Synthetic oligonucleotide
cggcucccaugagugaaau

SEQ ID NO: 2861382 - RNA, 19 nt, Artificial Sequence
  Description of Artificial Sequence: Synthetic oligonucleotide
cggccucgcuucccaggcu

SEQ ID NO: 2861383 - RNA, 19 nt, Artificial Sequence
  Description of Artificial Sequence: Synthetic oligonucleotide
uuuuguucgauggaagggg

SEQ ID NO: 2861384 - RNA, 19 nt, Artificial Sequence
  Description of Artificial Sequence: Synthetic oligonucleotide
uuuguucgauggaagggga

SEQ ID NO: 2861385 - RNA, 19 nt, Artificial Sequence
  Description of Artificial Sequence: Synthetic oligonucleotide
uguucgauggaaggggacu

SEQ ID NO: 2861386 - RNA, 19 nt, Artificial Sequence
  Description of Artificial Sequence: Synthetic oligonucleotide
uuguucgauggaaggggac

SEQ ID NO: 2861387 - RNA, 19 nt, Artificial Sequence
  Description of Artificial Sequence: Synthetic oligonucleotide
guucgauggaaggggacuu

SEQ ID NO: 2861388 - RNA, 19 nt, Artificial Sequence
  Description of Artificial Sequence: Synthetic oligonucleotide
aaauugacaaucuuugggc

SEQ ID NO: 2861389 - RNA, 19 nt, Artificial Sequence
  Description of Artificial Sequence: Synthetic oligonucleotide
gaaaaucaaaucuggaugg

SEQ ID NO: 2861390 - RNA, 19 nt, Artificial Sequence
  Description of Artificial Sequence: Synthetic oligonucleotide
aauaguaggcaucggagac

SEQ ID NO: 2861391 - RNA, 19 nt, Artificial Sequence
  Description of Artificial Sequence: Synthetic oligonucleotide
ucacaaaucacacauuugc

SEQ ID NO: 2861392 - RNA, 19 nt, Artificial Sequence
  Description of Artificial Sequence: Synthetic oligonucleotide
agaaaaucaaaucuggaug

SEQ ID NO: 2861393 - RNA, 19 nt, Artificial Sequence
  Description of Artificial Sequence: Synthetic oligonucleotide
uuuacaauaguaggcaucg

SEQ ID NO: 2861394 - RNA, 19 nt, Artificial Sequence
  Description of Artificial Sequence: Synthetic oligonucleotide
aagauccauaguuacacuc

SEQ ID NO: 2861395 - RNA, 19 nt, Artificial Sequence
  Description of Artificial Sequence: Synthetic oligonucleotide
uccauaguuacacucauca

SEQ ID NO: 2861396 - RNA, 19 nt, Artificial Sequence
  Description of Artificial Sequence: Synthetic oligonucleotide
aacaggucugucuuagagc

SEQ ID NO: 2861397 - RNA, 19 nt, Artificial Sequence
  Description of Artificial Sequence: Synthetic oligonucleotide
aagacaguagcucuagcag

SEQ ID NO: 2861398 - RNA, 19 nt, Artificial Sequence
  Description of Artificial Sequence: Synthetic oligonucleotide
caaauugacaaucuuuggg

SEQ ID NO: 2861399 - RNA, 19 nt, Artificial Sequence
  Description of Artificial Sequence: Synthetic oligonucleotide
uuacacucaucacauaugc

SEQ ID NO: 2861400 - RNA, 19 nt, Artificial Sequence
  Description of Artificial Sequence: Synthetic oligonucleotide
acauaugcgaaccagggug

SEQ ID NO: 2861401 - RNA, 19 nt, Artificial Sequence
  Description of Artificial Sequence: Synthetic oligonucleotide
auucuuuacaauaguaggc

SEQ ID NO: 2861402 - RNA, 19 nt, Artificial Sequence
  Description of Artificial Sequence: Synthetic oligonucleotide
ucacauaugcgaaccaggg

SEQ ID NO: 2861403 - RNA, 19 nt, Artificial Sequence
  Description of Artificial Sequence: Synthetic oligonucleotide
uuugcguucauagaacagg

SEQ ID NO: 2861404 - RNA, 19 nt, Artificial Sequence
  Description of Artificial Sequence: Synthetic oligonucleotide
ucuucuugaagccauauuu

SEQ ID NO: 2861405 - RNA, 19 nt, Artificial Sequence
  Description of Artificial Sequence: Synthetic oligonucleotide
uccgauagcaacaccagcc

SEQ ID NO: 2861406 - RNA, 19 nt, Artificial Sequence
  Description of Artificial Sequence: Synthetic oligonucleotide
ucuuccgauagcaacacca

SEQ ID NO: 2861407 - RNA, 19 nt, Artificial Sequence
  Description of Artificial Sequence: Synthetic oligonucleotide
aauggugcauucuuuacaa

SEQ ID NO: 2861408 - RNA, 19 nt, Artificial Sequence
  Description of Artificial Sequence: Synthetic oligonucleotide
acagucuuccgauagcaac

SEQ ID NO: 2861409 - RNA, 19 nt, Artificial Sequence
  Description of Artificial Sequence: Synthetic oligonucleotide
acagaucacacaccggccc

SEQ ID NO: 2861410 - RNA, 19 nt, Artificial Sequence
  Description of Artificial Sequence: Synthetic oligonucleotide
aaaucacacauuugccauc

SEQ ID NO: 2861411 - RNA, 19 nt, Artificial Sequence
  Description of Artificial Sequence: Synthetic oligonucleotide
uauucuggugacacgcugg

SEQ ID NO: 2861412 - RNA, 19 nt, Artificial Sequence
  Description of Artificial Sequence: Synthetic oligonucleotide
uuagccaucacucgucccc

SEQ ID NO: 2861413 - RNA, 19 nt, Artificial Sequence
  Description of Artificial Sequence: Synthetic oligonucleotide
acacucaucacauaugcga

SEQ ID NO: 2861414 - RNA, 19 nt, Artificial Sequence
  Description of Artificial Sequence: Synthetic oligonucleotide
uacaauaguaggcaucgga

SEQ ID NO: 2861415 - RNA, 19 nt, Artificial Sequence
  Description of Artificial Sequence: Synthetic oligonucleotide
cuauccuucuccugaaugg

SEQ ID NO: 2861416 - RNA, 19 nt, Artificial Sequence
  Description of Artificial Sequence: Synthetic oligonucleotide
acaaaucacacauuugcca

SEQ ID NO: 2861417 - RNA, 19 nt, Artificial Sequence
  Description of Artificial Sequence: Synthetic oligonucleotide
ugucuuuucuggcagcugc

SEQ ID NO: 2861418 - RNA, 19 nt, Artificial Sequence
  Description of Artificial Sequence: Synthetic oligonucleotide
agcaacaccagccugcuug

SEQ ID NO: 2861419 - RNA, 19 nt, Artificial Sequence
  Description of Artificial Sequence: Synthetic oligonucleotide
uaguaggugucuuuucugg

SEQ ID NO: 2861420 - RNA, 19 nt, Artificial Sequence
  Description of Artificial Sequence: Synthetic oligonucleotide
aucaccucuucuugaagcc

SEQ ID NO: 2861421 - RNA, 19 nt, Artificial Sequence
  Description of Artificial Sequence: Synthetic oligonucleotide
ucuauccuucuccugaaug

SEQ ID NO: 2861422 - RNA, 19 nt, Artificial Sequence
  Description of Artificial Sequence: Synthetic oligonucleotide
uucuuuacaauaguaggca

SEQ ID NO: 2861423 - RNA, 19 nt, Artificial Sequence
  Description of Artificial Sequence: Synthetic oligonucleotide
acaggucugucuuagagcu

SEQ ID NO: 2861424 - RNA, 19 nt, Artificial Sequence
  Description of Artificial Sequence: Synthetic oligonucleotide
aaucaaaucuggauggugu

SEQ ID NO: 2861425 - RNA, 19 nt, Artificial Sequence
  Description of Artificial Sequence: Synthetic oligonucleotide
gaacaggucugucuuagag

SEQ ID NO: 2861426 - RNA, 19 nt, Artificial Sequence
  Description of Artificial Sequence: Synthetic oligonucleotide
aguaggugucuuuucuggc

SEQ ID NO: 2861427 - RNA, 19 nt, Artificial Sequence
  Description of Artificial Sequence: Synthetic oligonucleotide
ugcagggucgcacauagga

SEQ ID NO: 2861428 - RNA, 19 nt, Artificial Sequence
  Description of Artificial Sequence: Synthetic oligonucleotide
cauaguuacacucaucaca

SEQ ID NO: 2861429 - RNA, 19 nt, Artificial Sequence
  Description of Artificial Sequence: Synthetic oligonucleotide
ucuggugacacgcugggcu

SEQ ID NO: 2861430 - RNA, 19 nt, Artificial Sequence
  Description of Artificial Sequence: Synthetic oligonucleotide
accgucucuauccuucucc

SEQ ID NO: 2861431 - RNA, 19 nt, Artificial Sequence
  Description of Artificial Sequence: Synthetic oligonucleotide
ugguguuuagccaucacuc

SEQ ID NO: 2861432 - RNA, 19 nt, Artificial Sequence
  Description of Artificial Sequence: Synthetic oligonucleotide
agacaguagcucuagcagg

SEQ ID NO: 2861433 - RNA, 19 nt, Artificial Sequence
  Description of Artificial Sequence: Synthetic oligonucleotide
aguuacacucaucacauau

SEQ ID NO: 2861434 - RNA, 19 nt, Artificial Sequence
  Description of Artificial Sequence: Synthetic oligonucleotide
ucacucguccccaagccgg

SEQ ID NO: 2861435 - RNA, 19 nt, Artificial Sequence
  Description of Artificial Sequence: Synthetic oligonucleotide
cuuagagcuccccaaauug

SEQ ID NO: 2861436 - RNA, 19 nt, Artificial Sequence
  Description of Artificial Sequence: Synthetic oligonucleotide
acauaggagucacaaauca

SEQ ID NO: 2861437 - RNA, 19 nt, Artificial Sequence
  Description of Artificial Sequence: Synthetic oligonucleotide
ugggcaaccgucucuaucc

SEQ ID NO: 2861438 - RNA, 19 nt, Artificial Sequence
  Description of Artificial Sequence: Synthetic oligonucleotide
aacaccagccugcuugcgg

SEQ ID NO: 2861439 - RNA, 19 nt, Artificial Sequence
  Description of Artificial Sequence: Synthetic oligonucleotide
guaagauccauaguuacac

SEQ ID NO: 2861440 - RNA, 19 nt, Artificial Sequence
  Description of Artificial Sequence: Synthetic oligonucleotide
ucacacagucuuccgauag

SEQ ID NO: 2861441 - RNA, 19 nt, Artificial Sequence
  Description of Artificial Sequence: Synthetic oligonucleotide
aggucugucuuagagcucc

SEQ ID NO: 2861442 - RNA, 19 nt, Artificial Sequence
  Description of Artificial Sequence: Synthetic oligonucleotide
uuuucacacagucuuccga

SEQ ID NO: 2861443 - RNA, 19 nt, Artificial Sequence
  Description of Artificial Sequence: Synthetic oligonucleotide
uuuugcguucauagaacag

SEQ ID NO: 2861444 - RNA, 19 nt, Artificial Sequence
  Description of Artificial Sequence: Synthetic oligonucleotide
ucauagaacaggucugucu

SEQ ID NO: 2861445 - RNA, 19 nt, Artificial Sequence
  Description of Artificial Sequence: Synthetic oligonucleotide
cacaaaucacacauuugcc

SEQ ID NO: 2861446 - RNA, 19 nt, Artificial Sequence
  Description of Artificial Sequence: Synthetic oligonucleotide
aaaucaaaucuggauggug

SEQ ID NO: 2861447 - RNA, 19 nt, Artificial Sequence
  Description of Artificial Sequence: Synthetic oligonucleotide
gauagcaacaccagccugc

SEQ ID NO: 2861448 - RNA, 19 nt, Artificial Sequence
  Description of Artificial Sequence: Synthetic oligonucleotide
caucaccucuucuugaagc

SEQ ID NO: 2861449 - RNA, 19 nt, Artificial Sequence
  Description of Artificial Sequence: Synthetic oligonucleotide
caaucuuugggcaaccguc

SEQ ID NO: 2861450 - RNA, 19 nt, Artificial Sequence
  Description of Artificial Sequence: Synthetic oligonucleotide
uacacucaucacauaugcg

SEQ ID NO: 2861451 - RNA, 19 nt, Artificial Sequence
  Description of Artificial Sequence: Synthetic oligonucleotide
uuagagcuccccaaauuga

SEQ ID NO: 2861452 - RNA, 19 nt, Artificial Sequence
  Description of Artificial Sequence: Synthetic oligonucleotide
acaccagccugcuugcggc

SEQ ID NO: 2861453 - RNA, 19 nt, Artificial Sequence
  Description of Artificial Sequence: Synthetic oligonucleotide
cuuuacaauaguaggcauc

SEQ ID NO: 2861454 - RNA, 19 nt, Artificial Sequence
  Description of Artificial Sequence: Synthetic oligonucleotide
agucacaaaucacacauuu

SEQ ID NO: 2861455 - RNA, 19 nt, Artificial Sequence
  Description of Artificial Sequence: Synthetic oligonucleotide
uccuucuccugaauggugc

SEQ ID NO: 2861456 - RNA, 19 nt, Artificial Sequence
  Description of Artificial Sequence: Synthetic oligonucleotide
acaauaguaggcaucggag

SEQ ID NO: 2861457 - RNA, 19 nt, Artificial Sequence
  Description of Artificial Sequence: Synthetic oligonucleotide
ugguaagauccauaguuac

SEQ ID NO: 2861458 - RNA, 19 nt, Artificial Sequence
  Description of Artificial Sequence: Synthetic oligonucleotide
uucggucccuuucugcugg

SEQ ID NO: 2861459 - RNA, 19 nt, Artificial Sequence
  Description of Artificial Sequence: Synthetic oligonucleotide
acacgcugggcuucggucc

SEQ ID NO: 2861460 - RNA, 19 nt, Artificial Sequence
  Description of Artificial Sequence: Synthetic oligonucleotide
ucacacauuugccaucaca

SEQ ID NO: 2861461 - RNA, 19 nt, Artificial Sequence
  Description of Artificial Sequence: Synthetic oligonucleotide
aaucacacauuugccauca

SEQ ID NO: 2861462 - RNA, 19 nt, Artificial Sequence
  Description of Artificial Sequence: Synthetic oligonucleotide
uagcaggcuauucugguga

SEQ ID NO: 2861463 - RNA, 19 nt, Artificial Sequence
  Description of Artificial Sequence: Synthetic oligonucleotide
auaggagucacaaaucaca

SEQ ID NO: 2861464 - RNA, 19 nt, Artificial Sequence
  Description of Artificial Sequence: Synthetic oligonucleotide
uaggugucuuuucuggcag

SEQ ID NO: 2861465 - RNA, 19 nt, Artificial Sequence
  Description of Artificial Sequence: Synthetic oligonucleotide
cuccacagaucacacaccg

SEQ ID NO: 2861466 - RNA, 19 nt, Artificial Sequence
  Description of Artificial Sequence: Synthetic oligonucleotide
uaggagucacaaaucacac

SEQ ID NO: 2861467 - RNA, 19 nt, Artificial Sequence
  Description of Artificial Sequence: Synthetic oligonucleotide
ugcauucuuuacaauagua

SEQ ID NO: 2861468 - RNA, 19 nt, Artificial Sequence
  Description of Artificial Sequence: Synthetic oligonucleotide
aaaucuggaugguguuuag

SEQ ID NO: 2861469 - RNA, 19 nt, Artificial Sequence
  Description of Artificial Sequence: Synthetic oligonucleotide
acucaucacauaugcgaac

SEQ ID NO: 2861470 - RNA, 19 nt, Artificial Sequence
  Description of Artificial Sequence: Synthetic oligonucleotide
gaauggugcauucuuuaca

SEQ ID NO: 2861471 - RNA, 19 nt, Artificial Sequence
  Description of Artificial Sequence: Synthetic oligonucleotide
auucuggugacacgcuggg

SEQ ID NO: 2861472 - RNA, 19 nt, Artificial Sequence
  Description of Artificial Sequence: Synthetic oligonucleotide
augguguuuagccaucacu

SEQ ID NO: 2861473 - RNA, 19 nt, Artificial Sequence
  Description of Artificial Sequence: Synthetic oligonucleotide
uuucacacagucuuccgau

SEQ ID NO: 2861474 - RNA, 19 nt, Artificial Sequence
  Description of Artificial Sequence: Synthetic oligonucleotide
uguuuagccaucacucguc

SEQ ID NO: 2861475 - RNA, 19 nt, Artificial Sequence
  Description of Artificial Sequence: Synthetic oligonucleotide
cauaugcgaaccagggugc

SEQ ID NO: 2861476 - RNA, 19 nt, Artificial Sequence
  Description of Artificial Sequence: Synthetic oligonucleotide
uucugcuggugguaguagg

SEQ ID NO: 2861477 - RNA, 19 nt, Artificial Sequence
  Description of Artificial Sequence: Synthetic oligonucleotide
uugcguucauagaacaggu

SEQ ID NO: 2861478 - RNA, 19 nt, Artificial Sequence
  Description of Artificial Sequence: Synthetic oligonucleotide
ucuggaugguguuuagcca

SEQ ID NO: 2861479 - RNA, 19 nt, Artificial Sequence
  Description of Artificial Sequence: Synthetic oligonucleotide
cucaucacauaugcgaacc

SEQ ID NO: 2861480 - RNA, 19 nt, Artificial Sequence
  Description of Artificial Sequence: Synthetic oligonucleotide
ugaauggugcauucuuuac

SEQ ID NO: 2861481 - RNA, 19 nt, Artificial Sequence
  Description of Artificial Sequence: Synthetic oligonucleotide
uggugcauucuuuacaaua

SEQ ID NO: 2861482 - RNA, 19 nt, Artificial Sequence
  Description of Artificial Sequence: Synthetic oligonucleotide
aaaaucaaaucuggauggu

SEQ ID NO: 2861483 - RNA, 19 nt, Artificial Sequence
  Description of Artificial Sequence: Synthetic oligonucleotide
guaggcaucggagacuccg

SEQ ID NO: 2861484 - RNA, 19 nt, Artificial Sequence
  Description of Artificial Sequence: Synthetic oligonucleotide
auaguuacacucaucacau

SEQ ID NO: 2861485 - RNA, 19 nt, Artificial Sequence
  Description of Artificial Sequence: Synthetic oligonucleotide
uagaacaggucugucuuag

SEQ ID NO: 2861486 - RNA, 19 nt, Artificial Sequence
  Description of Artificial Sequence: Synthetic oligonucleotide
cauaggagucacaaaucac

SEQ ID NO: 2861487 - RNA, 19 nt, Artificial Sequence
  Description of Artificial Sequence: Synthetic oligonucleotide
gacaguagcucuagcaggc

SEQ ID NO: 2861488 - RNA, 19 nt, Artificial Sequence
  Description of Artificial Sequence: Synthetic oligonucleotide
gagaaggagcugcucaccc

SEQ ID NO: 2861489 - RNA, 19 nt, Artificial Sequence
  Description of Artificial Sequence: Synthetic oligonucleotide
agcucuagcaggcuauucu

SEQ ID NO: 2861490 - RNA, 19 nt, Artificial Sequence
  Description of Artificial Sequence: Synthetic oligonucleotide
aucacauaugcgaaccagg

SEQ ID NO: 2861491 - RNA, 19 nt, Artificial Sequence
  Description of Artificial Sequence: Synthetic oligonucleotide
ucuagcaggcuauucuggu

SEQ ID NO: 2861492 - RNA, 19 nt, Artificial Sequence
  Description of Artificial Sequence: Synthetic oligonucleotide
uagagcuccccaaauugac

SEQ ID NO: 2861493 - RNA, 19 nt, Artificial Sequence
  Description of Artificial Sequence: Synthetic oligonucleotide
ggcagaaaaucaaaucugg

SEQ ID NO: 2861494 - RNA, 19 nt, Artificial Sequence
  Description of Artificial Sequence: Synthetic oligonucleotide
cccaaauugacaaucuuug

SEQ ID NO: 2861495 - RNA, 19 nt, Artificial Sequence
  Description of Artificial Sequence: Synthetic oligonucleotide
cuuccgauagcaacaccag

SEQ ID NO: 2861496 - RNA, 19 nt, Artificial Sequence
  Description of Artificial Sequence: Synthetic oligonucleotide
caagacaguagcucuagca

SEQ ID NO: 2861497 - RNA, 19 nt, Artificial Sequence
  Description of Artificial Sequence: Synthetic oligonucleotide
ugcggcagaaaaucaaauc

SEQ ID NO: 2861498 - RNA, 19 nt, Artificial Sequence
  Description of Artificial Sequence: Synthetic oligonucleotide
acaaucuuugggcaaccgu

SEQ ID NO: 2861499 - RNA, 19 nt, Artificial Sequence
  Description of Artificial Sequence: Synthetic oligonucleotide
cucuagcaggcuauucugg

SEQ ID NO: 2861500 - RNA, 19 nt, Artificial Sequence
  Description of Artificial Sequence: Synthetic oligonucleotide
gguguuuagccaucacucg

SEQ ID NO: 2861501 - RNA, 19 nt, Artificial Sequence
  Description of Artificial Sequence: Synthetic oligonucleotide
ucuuuacaauaguaggcau

SEQ ID NO: 2861502 - RNA, 19 nt, Artificial Sequence
  Description of Artificial Sequence: Synthetic oligonucleotide
aucacucguccccaagccg

SEQ ID NO: 2861503 - RNA, 19 nt, Artificial Sequence
  Description of Artificial Sequence: Synthetic oligonucleotide
ggugcauucuuuacaauag

SEQ ID NO: 2861504 - RNA, 19 nt, Artificial Sequence
  Description of Artificial Sequence: Synthetic oligonucleotide
guaguaggugucuuuucug

SEQ ID NO: 2861505 - RNA, 19 nt, Artificial Sequence
  Description of Artificial Sequence: Synthetic oligonucleotide
uuccgauagcaacaccagc

SEQ ID NO: 2861506 - RNA, 19 nt, Artificial Sequence
  Description of Artificial Sequence: Synthetic oligonucleotide
aaucuuugggcaaccgucu

SEQ ID NO: 2861507 - RNA, 19 nt, Artificial Sequence
  Description of Artificial Sequence: Synthetic oligonucleotide
ucuuagagcuccccaaauu

SEQ ID NO: 2861508 - RNA, 19 nt, Artificial Sequence
  Description of Artificial Sequence: Synthetic oligonucleotide
uccacagaucacacaccgg

SEQ ID NO: 2861509 - RNA, 19 nt, Artificial Sequence
  Description of Artificial Sequence: Synthetic oligonucleotide
gucucuauccuucuccuga

SEQ ID NO: 2861510 - RNA, 19 nt, Artificial Sequence
  Description of Artificial Sequence: Synthetic oligonucleotide
ucaucacauaugcgaacca

SEQ ID NO: 2861511 - RNA, 19 nt, Artificial Sequence
  Description of Artificial Sequence: Synthetic oligonucleotide
uugacaaucuuugggcaac

SEQ ID NO: 2861512 - RNA, 19 nt, Artificial Sequence
  Description of Artificial Sequence: Synthetic oligonucleotide
ucuuugggcaaccgucucu

SEQ ID NO: 2861513 - RNA, 19 nt, Artificial Sequence
  Description of Artificial Sequence: Synthetic oligonucleotide
ugucuuagagcuccccaaa

SEQ ID NO: 2861514 - RNA, 19 nt, Artificial Sequence
  Description of Artificial Sequence: Synthetic oligonucleotide
uaggcaucggagacuccgg

SEQ ID NO: 2861515 - RNA, 19 nt, Artificial Sequence
  Description of Artificial Sequence: Synthetic oligonucleotide
uaagauccauaguuacacu

SEQ ID NO: 2861516 - RNA, 19 nt, Artificial Sequence
  Description of Artificial Sequence: Synthetic oligonucleotide
accggcccugguaagaucc

SEQ ID NO: 2861517 - RNA, 19 nt, Artificial Sequence
  Description of Artificial Sequence: Synthetic oligonucleotide
cacauaggagucacaaauc

SEQ ID NO: 2861518 - RNA, 19 nt, Artificial Sequence
  Description of Artificial Sequence: Synthetic oligonucleotide
guuacacucaucacauaug

SEQ ID NO: 2861519 - RNA, 19 nt, Artificial Sequence
  Description of Artificial Sequence: Synthetic oligonucleotide
gagcugcucacccaucacc

SEQ ID NO: 2861520 - RNA, 19 nt, Artificial Sequence
  Description of Artificial Sequence: Synthetic oligonucleotide
agucuuccgauagcaacac

SEQ ID NO: 2861521 - RNA, 19 nt, Artificial Sequence
  Description of Artificial Sequence: Synthetic oligonucleotide
guuuagccaucacucgucc

SEQ ID NO: 2861522 - RNA, 19 nt, Artificial Sequence
  Description of Artificial Sequence: Synthetic oligonucleotide
caucacucguccccaagcc

SEQ ID NO: 2861523 - RNA, 19 nt, Artificial Sequence
  Description of Artificial Sequence: Synthetic oligonucleotide
uccugaauggugcauucuu

SEQ ID NO: 2861524 - RNA, 19 nt, Artificial Sequence
  Description of Artificial Sequence: Synthetic oligonucleotide
caucacauaugcgaaccag

SEQ ID NO: 2861525 - RNA, 19 nt, Artificial Sequence
  Description of Artificial Sequence: Synthetic oligonucleotide
caauaguaggcaucggaga

SEQ ID NO: 2861526 - RNA, 19 nt, Artificial Sequence
  Description of Artificial Sequence: Synthetic oligonucleotide
uuuagccaucacucguccc

SEQ ID NO: 2861527 - RNA, 19 nt, Artificial Sequence
  Description of Artificial Sequence: Synthetic oligonucleotide
cuuuucuggcagcugcagc

SEQ ID NO: 2861528 - RNA, 19 nt, Artificial Sequence
  Description of Artificial Sequence: Synthetic oligonucleotide
aggugucuuuucuggcagc

SEQ ID NO: 2861529 - RNA, 19 nt, Artificial Sequence
  Description of Artificial Sequence: Synthetic oligonucleotide
agauccauaguuacacuca

SEQ ID NO: 2861530 - RNA, 19 nt, Artificial Sequence
  Description of Artificial Sequence: Synthetic oligonucleotide
gacuccggggccuccacag

SEQ ID NO: 2861531 - RNA, 19 nt, Artificial Sequence
  Description of Artificial Sequence: Synthetic oligonucleotide
cacagaucacacaccggcc

SEQ ID NO: 2861532 - RNA, 19 nt, Artificial Sequence
  Description of Artificial Sequence: Synthetic oligonucleotide
ucacccaucaccucuucuu

SEQ ID NO: 2861533 - RNA, 19 nt, Artificial Sequence
  Description of Artificial Sequence: Synthetic oligonucleotide
ccacagaucacacaccggc

SEQ ID NO: 2861534 - RNA, 19 nt, Artificial Sequence
  Description of Artificial Sequence: Synthetic oligonucleotide
aaccgucucuauccuucuc

SEQ ID NO: 2861535 - RNA, 19 nt, Artificial Sequence
  Description of Artificial Sequence: Synthetic oligonucleotide
cuauucuggugacacgcug

SEQ ID NO: 2861536 - RNA, 19 nt, Artificial Sequence
  Description of Artificial Sequence: Synthetic oligonucleotide
ggugcagggucgcacauag

SEQ ID NO: 2861537 - RNA, 19 nt, Artificial Sequence
  Description of Artificial Sequence: Synthetic oligonucleotide
guaggugucuuuucuggca

SEQ ID NO: 2861538 - RNA, 19 nt, Artificial Sequence
  Description of Artificial Sequence: Synthetic oligonucleotide
ucuuuucuggcagcugcag

SEQ ID NO: 2861539 - RNA, 19 nt, Artificial Sequence
  Description of Artificial Sequence: Synthetic oligonucleotide
ugcuggugguaguaggugu

SEQ ID NO: 2861540 - RNA, 19 nt, Artificial Sequence
  Description of Artificial Sequence: Synthetic oligonucleotide
caggcuauucuggugacac

SEQ ID NO: 2861541 - RNA, 19 nt, Artificial Sequence
  Description of Artificial Sequence: Synthetic oligonucleotide
ccaaauugacaaucuuugg

SEQ ID NO: 2861542 - RNA, 19 nt, Artificial Sequence
  Description of Artificial Sequence: Synthetic oligonucleotide
uauccuucuccugaauggu

SEQ ID NO: 2861543 - RNA, 19 nt, Artificial Sequence
  Description of Artificial Sequence: Synthetic oligonucleotide
uuacaauaguaggcaucgg

SEQ ID NO: 2861544 - RNA, 19 nt, Artificial Sequence
  Description of Artificial Sequence: Synthetic oligonucleotide
gacaaucuuugggcaaccg

SEQ ID NO: 2861545 - RNA, 19 nt, Artificial Sequence
  Description of Artificial Sequence: Synthetic oligonucleotide
agcaggcuauucuggugac

SEQ ID NO: 2861546 - RNA, 19 nt, Artificial Sequence
  Description of Artificial Sequence: Synthetic oligonucleotide
ugggcuucggucccuuucu

SEQ ID NO: 2861547 - RNA, 19 nt, Artificial Sequence
  Description of Artificial Sequence: Synthetic oligonucleotide
ugcgaaccagggugcaggg

SEQ ID NO: 2861548 - RNA, 19 nt, Artificial Sequence
  Description of Artificial Sequence: Synthetic oligonucleotide
cuagcaggcuauucuggug

SEQ ID NO: 2861549 - RNA, 19 nt, Artificial Sequence
  Description of Artificial Sequence: Synthetic oligonucleotide
ugcuugcggcagaaaauca

SEQ ID NO: 2861550 - RNA, 19 nt, Artificial Sequence
  Description of Artificial Sequence: Synthetic oligonucleotide
gagcuccccaaauugacaa

SEQ ID NO: 2861551 - RNA, 19 nt, Artificial Sequence
  Description of Artificial Sequence: Synthetic oligonucleotide
cagaaaaucaaaucuggau

SEQ ID NO: 2861552 - RNA, 19 nt, Artificial Sequence
  Description of Artificial Sequence: Synthetic oligonucleotide
ggagucacaaaucacacau

SEQ ID NO: 2861553 - RNA, 19 nt, Artificial Sequence
  Description of Artificial Sequence: Synthetic oligonucleotide
aggagucacaaaucacaca

SEQ ID NO: 2861554 - RNA, 19 nt, Artificial Sequence
  Description of Artificial Sequence: Synthetic oligonucleotide
uugcggcagaaaaucaaau

SEQ ID NO: 2861555 - RNA, 19 nt, Artificial Sequence
  Description of Artificial Sequence: Synthetic oligonucleotide
ucgcacauaggagucacaa

SEQ ID NO: 2861556 - RNA, 19 nt, Artificial Sequence
  Description of Artificial Sequence: Synthetic oligonucleotide
gaaccagggugcagggucg

SEQ ID NO: 2861557 - RNA, 19 nt, Artificial Sequence
  Description of Artificial Sequence: Synthetic oligonucleotide
aucaaaucuggaugguguu

SEQ ID NO: 2861558 - RNA, 19 nt, Artificial Sequence
  Description of Artificial Sequence: Synthetic oligonucleotide
uuucugcuggugguaguag

SEQ ID NO: 2861559 - RNA, 19 nt, Artificial Sequence
  Description of Artificial Sequence: Synthetic oligonucleotide
cagucuuccgauagcaaca

SEQ ID NO: 2861560 - RNA, 19 nt, Artificial Sequence
  Description of Artificial Sequence: Synthetic oligonucleotide
uugggcaaccgucucuauc

SEQ ID NO: 2861561 - RNA, 19 nt, Artificial Sequence
  Description of Artificial Sequence: Synthetic oligonucleotide
uaguaggcaucggagacuc

SEQ ID NO: 2861562 - RNA, 19 nt, Artificial Sequence
  Description of Artificial Sequence: Synthetic oligonucleotide
ggcuauucuggugacacgc

SEQ ID NO: 2861563 - RNA, 19 nt, Artificial Sequence
  Description of Artificial Sequence: Synthetic oligonucleotide
acacagucuuccgauagca

SEQ ID NO: 2861564 - RNA, 19 nt, Artificial Sequence
  Description of Artificial Sequence: Synthetic oligonucleotide
ggucccuuucugcuggugg

SEQ ID NO: 2861565 - RNA, 19 nt, Artificial Sequence
  Description of Artificial Sequence: Synthetic oligonucleotide
aggcaucggagacuccggg

SEQ ID NO: 2861566 - RNA, 19 nt, Artificial Sequence
  Description of Artificial Sequence: Synthetic oligonucleotide
gccuccacagaucacacac

SEQ ID NO: 2861567 - RNA, 19 nt, Artificial Sequence
  Description of Artificial Sequence: Synthetic oligonucleotide
cacacagucuuccgauagc

SEQ ID NO: 2861568 - RNA, 19 nt, Artificial Sequence
  Description of Artificial Sequence: Synthetic oligonucleotide
agaaggagcugcucaccca

SEQ ID NO: 2861569 - RNA, 19 nt, Artificial Sequence
  Description of Artificial Sequence: Synthetic oligonucleotide
uuucuggcagcugcagcag

SEQ ID NO: 2861570 - RNA, 19 nt, Artificial Sequence
  Description of Artificial Sequence: Synthetic oligonucleotide
ucucuauccuucuccugaa

SEQ ID NO: 2861571 - RNA, 19 nt, Artificial Sequence
  Description of Artificial Sequence: Synthetic oligonucleotide
gaugguguuuagccaucac

SEQ ID NO: 2861572 - RNA, 19 nt, Artificial Sequence
  Description of Artificial Sequence: Synthetic oligonucleotide
gacacgcugggcuucgguc

SEQ ID NO: 2861573 - RNA, 19 nt, Artificial Sequence
  Description of Artificial Sequence: Synthetic oligonucleotide
cacacauuugccaucacau

SEQ ID NO: 2861574 - RNA, 19 nt, Artificial Sequence
  Description of Artificial Sequence: Synthetic oligonucleotide
aggagcugcucacccauca

SEQ ID NO: 2861575 - RNA, 19 nt, Artificial Sequence
  Description of Artificial Sequence: Synthetic oligonucleotide
aggcuauucuggugacacg

SEQ ID NO: 2861576 - RNA, 19 nt, Artificial Sequence
  Description of Artificial Sequence: Synthetic oligonucleotide
cuugcggcagaaaaucaaa

SEQ ID NO: 2861577 - RNA, 19 nt, Artificial Sequence
  Description of Artificial Sequence: Synthetic oligonucleotide
caaaucacacauuugccau

SEQ ID NO: 2861578 - RNA, 19 nt, Artificial Sequence
  Description of Artificial Sequence: Synthetic oligonucleotide
aaccagggugcagggucgc

SEQ ID NO: 2861579 - RNA, 19 nt, Artificial Sequence
  Description of Artificial Sequence: Synthetic oligonucleotide
auaguaggcaucggagacu

SEQ ID NO: 2861580 - RNA, 19 nt, Artificial Sequence
  Description of Artificial Sequence: Synthetic oligonucleotide
gaucacacaccggcccugg

SEQ ID NO: 2861581 - RNA, 19 nt, Artificial Sequence
  Description of Artificial Sequence: Synthetic oligonucleotide
cugcuugcggcagaaaauc

SEQ ID NO: 2861582 - RNA, 19 nt, Artificial Sequence
  Description of Artificial Sequence: Synthetic oligonucleotide
ugcguucauagaacagguc

SEQ ID NO: 2861583 - RNA, 19 nt, Artificial Sequence
  Description of Artificial Sequence: Synthetic oligonucleotide
gcccugguaagauccauag

SEQ ID NO: 2861584 - RNA, 19 nt, Artificial Sequence
  Description of Artificial Sequence: Synthetic oligonucleotide
uaugcgaaccagggugcag

SEQ ID NO: 2861585 - RNA, 19 nt, Artificial Sequence
  Description of Artificial Sequence: Synthetic oligonucleotide
ucaaaucuggaugguguuu

SEQ ID NO: 2861586 - RNA, 19 nt, Artificial Sequence
  Description of Artificial Sequence: Synthetic oligonucleotide
ugacaaucuuugggcaacc

SEQ ID NO: 2861587 - RNA, 19 nt, Artificial Sequence
  Description of Artificial Sequence: Synthetic oligonucleotide
acacauuugccaucacauu

SEQ ID NO: 2861588 - RNA, 19 nt, Artificial Sequence
  Description of Artificial Sequence: Synthetic oligonucleotide
cugguaagauccauaguua

SEQ ID NO: 2861589 - RNA, 19 nt, Artificial Sequence
  Description of Artificial Sequence: Synthetic oligonucleotide
ucacacaccggcccuggua

SEQ ID NO: 2861590 - RNA, 19 nt, Artificial Sequence
  Description of Artificial Sequence: Synthetic oligonucleotide
cacucaucacauaugcgaa

SEQ ID NO: 2861591 - RNA, 19 nt, Artificial Sequence
  Description of Artificial Sequence: Synthetic oligonucleotide
ucaccucuucuugaagcca

SEQ ID NO: 2861592 - RNA, 19 nt, Artificial Sequence
  Description of Artificial Sequence: Synthetic oligonucleotide
cacccaucaccucuucuug

SEQ ID NO: 2861593 - RNA, 19 nt, Artificial Sequence
  Description of Artificial Sequence: Synthetic oligonucleotide
gcaucggagacuccggggc

SEQ ID NO: 2861594 - RNA, 19 nt, Artificial Sequence
  Description of Artificial Sequence: Synthetic oligonucleotide
ugguaguaggugucuuuuc

SEQ ID NO: 2861595 - RNA, 19 nt, Artificial Sequence
  Description of Artificial Sequence: Synthetic oligonucleotide
gcggcagaaaaucaaaucu

SEQ ID NO: 2861596 - RNA, 19 nt, Artificial Sequence
  Description of Artificial Sequence: Synthetic oligonucleotide
cugaauggugcauucuuua

SEQ ID NO: 2861597 - RNA, 19 nt, Artificial Sequence
  Description of Artificial Sequence: Synthetic oligonucleotide
uggaugguguuuagccauc

SEQ ID NO: 2861598 - RNA, 19 nt, Artificial Sequence
  Description of Artificial Sequence: Synthetic oligonucleotide
uccccaaauugacaaucuu

SEQ ID NO: 2861599 - RNA, 19 nt, Artificial Sequence
  Description of Artificial Sequence: Synthetic oligonucleotide
gcucuagcaggcuauucug

SEQ ID NO: 2861600 - RNA, 19 nt, Artificial Sequence
  Description of Artificial Sequence: Synthetic oligonucleotide
agggucgcacauaggaguc

SEQ ID NO: 2861601 - RNA, 19 nt, Artificial Sequence
  Description of Artificial Sequence: Synthetic oligonucleotide
uucauagaacaggucuguc

SEQ ID NO: 2861602 - RNA, 19 nt, Artificial Sequence
  Description of Artificial Sequence: Synthetic oligonucleotide
auagaacaggucugucuua

SEQ ID NO: 2861603 - RNA, 19 nt, Artificial Sequence
  Description of Artificial Sequence: Synthetic oligonucleotide
cauagaacaggucugucuu

SEQ ID NO: 2861604 - RNA, 19 nt, Artificial Sequence
  Description of Artificial Sequence: Synthetic oligonucleotide
gcacauaggagucacaaau

SEQ ID NO: 2861605 - RNA, 19 nt, Artificial Sequence
  Description of Artificial Sequence: Synthetic oligonucleotide
aguagcucuagcaggcuau

SEQ ID NO: 2861606 - RNA, 19 nt, Artificial Sequence
  Description of Artificial Sequence: Synthetic oligonucleotide
caucggagacuccggggcc

SEQ ID NO: 2861607 - RNA, 19 nt, Artificial Sequence
  Description of Artificial Sequence: Synthetic oligonucleotide
cuucggucccuuucugcug

SEQ ID NO: 2861608 - RNA, 19 nt, Artificial Sequence
  Description of Artificial Sequence: Synthetic oligonucleotide
uucacacagucuuccgaua

SEQ ID NO: 2861609 - RNA, 19 nt, Artificial Sequence
  Description of Artificial Sequence: Synthetic oligonucleotide
agaacaggucugucuuaga

SEQ ID NO: 2861610 - RNA, 19 nt, Artificial Sequence
  Description of Artificial Sequence: Synthetic oligonucleotide
gauccauaguuacacucau

SEQ ID NO: 2861611 - RNA, 19 nt, Artificial Sequence
  Description of Artificial Sequence: Synthetic oligonucleotide
gcguucauagaacaggucu

SEQ ID NO: 2861612 - RNA, 19 nt, Artificial Sequence
  Description of Artificial Sequence: Synthetic oligonucleotide
ugacacgcugggcuucggu

SEQ ID NO: 2861613 - RNA, 19 nt, Artificial Sequence
  Description of Artificial Sequence: Synthetic oligonucleotide
ggcaucggagacuccgggg

SEQ ID NO: 2861614 - RNA, 19 nt, Artificial Sequence
  Description of Artificial Sequence: Synthetic oligonucleotide
agcugcucacccaucaccu

SEQ ID NO: 2861615 - RNA, 19 nt, Artificial Sequence
  Description of Artificial Sequence: Synthetic oligonucleotide
gguaguaggugucuuuucu

SEQ ID NO: 2861616 - RNA, 19 nt, Artificial Sequence
  Description of Artificial Sequence: Synthetic oligonucleotide
guguuuagccaucacucgu

SEQ ID NO: 2861617 - RNA, 19 nt, Artificial Sequence
  Description of Artificial Sequence: Synthetic oligonucleotide
gguaagauccauaguuaca

SEQ ID NO: 2861618 - RNA, 19 nt, Artificial Sequence
  Description of Artificial Sequence: Synthetic oligonucleotide
cugucuuagagcuccccaa

SEQ ID NO: 2861619 - RNA, 19 nt, Artificial Sequence
  Description of Artificial Sequence: Synthetic oligonucleotide
caaaucuggaugguguuua

SEQ ID NO: 2861620 - RNA, 19 nt, Artificial Sequence
  Description of Artificial Sequence: Synthetic oligonucleotide
cucguccccaagccggcgg

SEQ ID NO: 2861621 - RNA, 19 nt, Artificial Sequence
  Description of Artificial Sequence: Synthetic oligonucleotide
gaaggagcugcucacccau

SEQ ID NO: 2861622 - RNA, 19 nt, Artificial Sequence
  Description of Artificial Sequence: Synthetic oligonucleotide
cguucauagaacaggucug

SEQ ID NO: 2861623 - RNA, 19 nt, Artificial Sequence
  Description of Artificial Sequence: Synthetic oligonucleotide
ucguccccaagccggcggc

SEQ ID NO: 2861624 - RNA, 19 nt, Artificial Sequence
  Description of Artificial Sequence: Synthetic oligonucleotide
aaggagcugcucacccauc

SEQ ID NO: 2861625 - RNA, 19 nt, Artificial Sequence
  Description of Artificial Sequence: Synthetic oligonucleotide
uccccaagccggcggccgg

SEQ ID NO: 2861626 - RNA, 19 nt, Artificial Sequence
  Description of Artificial Sequence: Synthetic oligonucleotide
agagcuccccaaauugaca

SEQ ID NO: 2861627 - RNA, 19 nt, Artificial Sequence
  Description of Artificial Sequence: Synthetic oligonucleotide
cuucuugaagccauauuuu

SEQ ID NO: 2861628 - RNA, 19 nt, Artificial Sequence
  Description of Artificial Sequence: Synthetic oligonucleotide
cacacaccggcccugguaa

SEQ ID NO: 2861629 - RNA, 19 nt, Artificial Sequence
  Description of Artificial Sequence: Synthetic oligonucleotide
gggagaaggagcugcucac

SEQ ID NO: 2861630 - RNA, 19 nt, Artificial Sequence
  Description of Artificial Sequence: Synthetic oligonucleotide
uagccaucacucgucccca

SEQ ID NO: 2861631 - RNA, 19 nt, Artificial Sequence
  Description of Artificial Sequence: Synthetic oligonucleotide
ccaucacucguccccaagc

SEQ ID NO: 2861632 - RNA, 19 nt, Artificial Sequence
  Description of Artificial Sequence: Synthetic oligonucleotide
cacgcugggcuucgguccc

SEQ ID NO: 2861633 - RNA, 19 nt, Artificial Sequence
  Description of Artificial Sequence: Synthetic oligonucleotide
ccauaguuacacucaucac

SEQ ID NO: 2861634 - RNA, 19 nt, Artificial Sequence
  Description of Artificial Sequence: Synthetic oligonucleotide
cggcagaaaaucaaaucug

SEQ ID NO: 2861635 - RNA, 19 nt, Artificial Sequence
  Description of Artificial Sequence: Synthetic oligonucleotide
ccugguaagauccauaguu

SEQ ID NO: 2861636 - RNA, 19 nt, Artificial Sequence
  Description of Artificial Sequence: Synthetic oligonucleotide
guucauagaacaggucugu

SEQ ID NO: 2861637 - RNA, 19 nt, Artificial Sequence
  Description of Artificial Sequence: Synthetic oligonucleotide
auggugcauucuuuacaau

SEQ ID NO: 2861638 - RNA, 19 nt, Artificial Sequence
  Description of Artificial Sequence: Synthetic oligonucleotide
agaucacacaccggcccug

SEQ ID NO: 2861639 - RNA, 19 nt, Artificial Sequence
  Description of Artificial Sequence: Synthetic oligonucleotide
cagggucgcacauaggagu

SEQ ID NO: 2861640 - RNA, 19 nt, Artificial Sequence
  Description of Artificial Sequence: Synthetic oligonucleotide
cacucguccccaagccggc

SEQ ID NO: 2861641 - RNA, 19 nt, Artificial Sequence
  Description of Artificial Sequence: Synthetic oligonucleotide
cuggaugguguuuagccau

SEQ ID NO: 2861642 - RNA, 19 nt, Artificial Sequence
  Description of Artificial Sequence: Synthetic oligonucleotide
uaguuacacucaucacaua

SEQ ID NO: 2861643 - RNA, 19 nt, Artificial Sequence
  Description of Artificial Sequence: Synthetic oligonucleotide
gcagaaaaucaaaucugga

SEQ ID NO: 2861644 - RNA, 19 nt, Artificial Sequence
  Description of Artificial Sequence: Synthetic oligonucleotide
gucuuccgauagcaacacc

SEQ ID NO: 2861645 - RNA, 19 nt, Artificial Sequence
  Description of Artificial Sequence: Synthetic oligonucleotide
uucuggugacacgcugggc

SEQ ID NO: 2861646 - RNA, 19 nt, Artificial Sequence
  Description of Artificial Sequence: Synthetic oligonucleotide
auaugcgaaccagggugca

SEQ ID NO: 2861647 - RNA, 19 nt, Artificial Sequence
  Description of Artificial Sequence: Synthetic oligonucleotide
gcaaccgucucuauccuuc

SEQ ID NO: 2861648 - RNA, 19 nt, Artificial Sequence
  Description of Artificial Sequence: Synthetic oligonucleotide
acacaccggcccugguaag

SEQ ID NO: 2861649 - RNA, 19 nt, Artificial Sequence
  Description of Artificial Sequence: Synthetic oligonucleotide
aguaggcaucggagacucc

SEQ ID NO: 2861650 - RNA, 19 nt, Artificial Sequence
  Description of Artificial Sequence: Synthetic oligonucleotide
agcuccccaaauugacaau

SEQ ID NO: 2861651 - RNA, 19 nt, Artificial Sequence
  Description of Artificial Sequence: Synthetic oligonucleotide
gugcauucuuuacaauagu

SEQ ID NO: 2861652 - RNA, 19 nt, Artificial Sequence
  Description of Artificial Sequence: Synthetic oligonucleotide
uuugggcaaccgucucuau

SEQ ID NO: 2861653 - RNA, 19 nt, Artificial Sequence
  Description of Artificial Sequence: Synthetic oligonucleotide
gccaagacaguagcucuag

SEQ ID NO: 2861654 - RNA, 19 nt, Artificial Sequence
  Description of Artificial Sequence: Synthetic oligonucleotide
ggcuucggucccuuucugc

SEQ ID NO: 2861655 - RNA, 19 nt, Artificial Sequence
  Description of Artificial Sequence: Synthetic oligonucleotide
ggagaaggagcugcucacc

SEQ ID NO: 2861656 - RNA, 19 nt, Artificial Sequence
  Description of Artificial Sequence: Synthetic oligonucleotide
uccggggccuccacagauc

SEQ ID NO: 2861657 - RNA, 19 nt, Artificial Sequence
  Description of Artificial Sequence: Synthetic oligonucleotide
ggggccaagacaguagcuc

SEQ ID NO: 2861658 - RNA, 19 nt, Artificial Sequence
  Description of Artificial Sequence: Synthetic oligonucleotide
gcagggucgcacauaggag

SEQ ID NO: 2861659 - RNA, 19 nt, Artificial Sequence
  Description of Artificial Sequence: Synthetic oligonucleotide
cgaaccagggugcaggguc

SEQ ID NO: 2861660 - RNA, 19 nt, Artificial Sequence
  Description of Artificial Sequence: Synthetic oligonucleotide
cuuugggcaaccgucucua

SEQ ID NO: 2861661 - RNA, 19 nt, Artificial Sequence
  Description of Artificial Sequence: Synthetic oligonucleotide
gcuccccaaauugacaauc

SEQ ID NO: 2861662 - RNA, 19 nt, Artificial Sequence
  Description of Artificial Sequence: Synthetic oligonucleotide
ggugacacgcugggcuucg

SEQ ID NO: 2861663 - RNA, 19 nt, Artificial Sequence
  Description of Artificial Sequence: Synthetic oligonucleotide
gugucuuuucuggcagcug

SEQ ID NO: 2861664 - RNA, 19 nt, Artificial Sequence
  Description of Artificial Sequence: Synthetic oligonucleotide
uagcucuagcaggcuauuc

SEQ ID NO: 2861665 - RNA, 19 nt, Artificial Sequence
  Description of Artificial Sequence: Synthetic oligonucleotide
ccuccacagaucacacacc

SEQ ID NO: 2861666 - RNA, 19 nt, Artificial Sequence
  Description of Artificial Sequence: Synthetic oligonucleotide
gucuuuucuggcagcugca

SEQ ID NO: 2861667 - RNA, 19 nt, Artificial Sequence
  Description of Artificial Sequence: Synthetic oligonucleotide
gagacuccggggccuccac

SEQ ID NO: 2861668 - RNA, 19 nt, Artificial Sequence
  Description of Artificial Sequence: Synthetic oligonucleotide
agacuccggggccuccaca

SEQ ID NO: 2861669 - RNA, 19 nt, Artificial Sequence
  Description of Artificial Sequence: Synthetic oligonucleotide
aucggagacuccggggccu

SEQ ID NO: 2861670 - RNA, 19 nt, Artificial Sequence
  Description of Artificial Sequence: Synthetic oligonucleotide
cuuucugcuggugguagua

SEQ ID NO: 2861671 - RNA, 19 nt, Artificial Sequence
  Description of Artificial Sequence: Synthetic oligonucleotide
cacagucuuccgauagcaa

SEQ ID NO: 2861672 - RNA, 19 nt, Artificial Sequence
  Description of Artificial Sequence: Synthetic oligonucleotide
guccccaagccggcggccg

SEQ ID NO: 2861673 - RNA, 19 nt, Artificial Sequence
  Description of Artificial Sequence: Synthetic oligonucleotide
cuccccaaauugacaaucu

SEQ ID NO: 2861674 - RNA, 19 nt, Artificial Sequence
  Description of Artificial Sequence: Synthetic oligonucleotide
accagccugcuugcggcag

SEQ ID NO: 2861675 - RNA, 19 nt, Artificial Sequence
  Description of Artificial Sequence: Synthetic oligonucleotide
cacauaugcgaaccagggu

SEQ ID NO: 2861676 - RNA, 19 nt, Artificial Sequence
  Description of Artificial Sequence: Synthetic oligonucleotide
caacaccagccugcuugcg

SEQ ID NO: 2861677 - RNA, 19 nt, Artificial Sequence
  Description of Artificial Sequence: Synthetic oligonucleotide
cagggugcagggucgcaca

SEQ ID NO: 2861678 - RNA, 19 nt, Artificial Sequence
  Description of Artificial Sequence: Synthetic oligonucleotide
acucguccccaagccggcg

SEQ ID NO: 2861679 - RNA, 19 nt, Artificial Sequence
  Description of Artificial Sequence: Synthetic oligonucleotide
gccugcuugcggcagaaaa

SEQ ID NO: 2861680 - RNA, 19 nt, Artificial Sequence
  Description of Artificial Sequence: Synthetic oligonucleotide
ggucgcacauaggagucac

SEQ ID NO: 2861681 - RNA, 19 nt, Artificial Sequence
  Description of Artificial Sequence: Synthetic oligonucleotide
gucccuuucugcugguggu

SEQ ID NO: 2861682 - RNA, 19 nt, Artificial Sequence
  Description of Artificial Sequence: Synthetic oligonucleotide
aucacacaccggcccuggu

SEQ ID NO: 2861683 - RNA, 19 nt, Artificial Sequence
  Description of Artificial Sequence: Synthetic oligonucleotide
ggggccuccacagaucaca

SEQ ID NO: 2861684 - RNA, 19 nt, Artificial Sequence
  Description of Artificial Sequence: Synthetic oligonucleotide
ccaucaccucuucuugaag

SEQ ID NO: 2861685 - RNA, 19 nt, Artificial Sequence
  Description of Artificial Sequence: Synthetic oligonucleotide
gccaucacucguccccaag

SEQ ID NO: 2861686 - RNA, 19 nt, Artificial Sequence
  Description of Artificial Sequence: Synthetic oligonucleotide
cugcucacccaucaccucu

SEQ ID NO: 2861687 - RNA, 19 nt, Artificial Sequence
  Description of Artificial Sequence: Synthetic oligonucleotide
gucuuagagcuccccaaau

SEQ ID NO: 2861688 - RNA, 19 nt, Artificial Sequence
  Description of Artificial Sequence: Synthetic oligonucleotide
uggugacacgcugggcuuc

SEQ ID NO: 2861689 - RNA, 19 nt, Artificial Sequence
  Description of Artificial Sequence: Synthetic oligonucleotide
ccaagacaguagcucuagc

SEQ ID NO: 2861690 - RNA, 19 nt, Artificial Sequence
  Description of Artificial Sequence: Synthetic oligonucleotide
agggugcagggucgcacau

SEQ ID NO: 2861691 - RNA, 19 nt, Artificial Sequence
  Description of Artificial Sequence: Synthetic oligonucleotide
gcuucggucccuuucugcu

SEQ ID NO: 2861692 - RNA, 19 nt, Artificial Sequence
  Description of Artificial Sequence: Synthetic oligonucleotide
ggagcugcucacccaucac

SEQ ID NO: 2861693 - RNA, 19 nt, Artificial Sequence
  Description of Artificial Sequence: Synthetic oligonucleotide
acuccggggccuccacaga

SEQ ID NO: 2861694 - RNA, 19 nt, Artificial Sequence
  Description of Artificial Sequence: Synthetic oligonucleotide
uggugguaguaggugucuu

SEQ ID NO: 2861695 - RNA, 19 nt, Artificial Sequence
  Description of Artificial Sequence: Synthetic oligonucleotide
acaccggcccugguaagau

SEQ ID NO: 2861696 - RNA, 19 nt, Artificial Sequence
  Description of Artificial Sequence: Synthetic oligonucleotide
caguagcucuagcaggcua

SEQ ID NO: 2861697 - RNA, 19 nt, Artificial Sequence
  Description of Artificial Sequence: Synthetic oligonucleotide
gggccaagacaguagcucu

SEQ ID NO: 2861698 - RNA, 19 nt, Artificial Sequence
  Description of Artificial Sequence: Synthetic oligonucleotide
gcuggugguaguagguguc

SEQ ID NO: 2861699 - RNA, 19 nt, Artificial Sequence
  Description of Artificial Sequence: Synthetic oligonucleotide
gcuugcggcagaaaaucaa

SEQ ID NO: 2861700 - RNA, 19 nt, Artificial Sequence
  Description of Artificial Sequence: Synthetic oligonucleotide
cagaucacacaccggcccu

SEQ ID NO: 2861701 - RNA, 19 nt, Artificial Sequence
  Description of Artificial Sequence: Synthetic oligonucleotide
cgauagcaacaccagccug

SEQ ID NO: 2861702 - RNA, 19 nt, Artificial Sequence
  Description of Artificial Sequence: Synthetic oligonucleotide
ggaugguguuuagccauca

SEQ ID NO: 2861703 - RNA, 19 nt, Artificial Sequence
  Description of Artificial Sequence: Synthetic oligonucleotide
gugguaguaggugucuuuu

SEQ ID NO: 2861704 - RNA, 19 nt, Artificial Sequence
  Description of Artificial Sequence: Synthetic oligonucleotide
ucggucccuuucugcuggu

SEQ ID NO: 2861705 - RNA, 19 nt, Artificial Sequence
  Description of Artificial Sequence: Synthetic oligonucleotide
gugcagggucgcacauagg

SEQ ID NO: 2861706 - RNA, 19 nt, Artificial Sequence
  Description of Artificial Sequence: Synthetic oligonucleotide
cccuuucugcuggugguag

SEQ ID NO: 2861707 - RNA, 19 nt, Artificial Sequence
  Description of Artificial Sequence: Synthetic oligonucleotide
ggugucuuuucuggcagcu

SEQ ID NO: 2861708 - RNA, 19 nt, Artificial Sequence
  Description of Artificial Sequence: Synthetic oligonucleotide
agccaucacucguccccaa

SEQ ID NO: 2861709 - RNA, 19 nt, Artificial Sequence
  Description of Artificial Sequence: Synthetic oligonucleotide
caccggcccugguaagauc

SEQ ID NO: 2861710 - RNA, 19 nt, Artificial Sequence
  Description of Artificial Sequence: Synthetic oligonucleotide
cacaccggcccugguaaga

SEQ ID NO: 2861711 - RNA, 19 nt, Artificial Sequence
  Description of Artificial Sequence: Synthetic oligonucleotide
cucuucuugaagccauauu

SEQ ID NO: 2861712 - RNA, 19 nt, Artificial Sequence
  Description of Artificial Sequence: Synthetic oligonucleotide
gugacacgcugggcuucgg

SEQ ID NO: 2861713 - RNA, 19 nt, Artificial Sequence
  Description of Artificial Sequence: Synthetic oligonucleotide
ucggagacuccggggccuc

SEQ ID NO: 2861714 - RNA, 19 nt, Artificial Sequence
  Description of Artificial Sequence: Synthetic oligonucleotide
ccuucuccugaauggugca

SEQ ID NO: 2861715 - RNA, 19 nt, Artificial Sequence
  Description of Artificial Sequence: Synthetic oligonucleotide
caaccgucucuauccuucu

SEQ ID NO: 2861716 - RNA, 19 nt, Artificial Sequence
  Description of Artificial Sequence: Synthetic oligonucleotide
cccaucaccucuucuugaa

SEQ ID NO: 2861717 - RNA, 19 nt, Artificial Sequence
  Description of Artificial Sequence: Synthetic oligonucleotide
gagucacaaaucacacauu

SEQ ID NO: 2861718 - RNA, 19 nt, Artificial Sequence
  Description of Artificial Sequence: Synthetic oligonucleotide
gggcuucggucccuuucug

SEQ ID NO: 2861719 - RNA, 19 nt, Artificial Sequence
  Description of Artificial Sequence: Synthetic oligonucleotide
ggugguaguaggugucuuu

SEQ ID NO: 2861720 - RNA, 19 nt, Artificial Sequence
  Description of Artificial Sequence: Synthetic oligonucleotide
ccccaaauugacaaucuuu

SEQ ID NO: 2861721 - RNA, 19 nt, Artificial Sequence
  Description of Artificial Sequence: Synthetic oligonucleotide
gucgcacauaggagucaca

SEQ ID NO: 2861722 - RNA, 19 nt, Artificial Sequence
  Description of Artificial Sequence: Synthetic oligonucleotide
ccagggugcagggucgcac

SEQ ID NO: 2861723 - RNA, 19 nt, Artificial Sequence
  Description of Artificial Sequence: Synthetic oligonucleotide
caccagccugcuugcggca

SEQ ID NO: 2861724 - RNA, 19 nt, Artificial Sequence
  Description of Artificial Sequence: Synthetic oligonucleotide
accagggugcagggucgca

SEQ ID NO: 2861725 - RNA, 19 nt, Artificial Sequence
  Description of Artificial Sequence: Synthetic oligonucleotide
ggucugucuuagagcuccc

SEQ ID NO: 2861726 - RNA, 19 nt, Artificial Sequence
  Description of Artificial Sequence: Synthetic oligonucleotide
ggccuccacagaucacaca

SEQ ID NO: 2861727 - RNA, 19 nt, Artificial Sequence
  Description of Artificial Sequence: Synthetic oligonucleotide
cgucucuauccuucuccug

SEQ ID NO: 2861728 - RNA, 19 nt, Artificial Sequence
  Description of Artificial Sequence: Synthetic oligonucleotide
accucuucuugaagccaua

SEQ ID NO: 2861729 - RNA, 19 nt, Artificial Sequence
  Description of Artificial Sequence: Synthetic oligonucleotide
cuggugacacgcugggcuu

SEQ ID NO: 2861730 - RNA, 19 nt, Artificial Sequence
  Description of Artificial Sequence: Synthetic oligonucleotide
gggccuccacagaucacac

SEQ ID NO: 2861731 - RNA, 19 nt, Artificial Sequence
  Description of Artificial Sequence: Synthetic oligonucleotide
ccugcuugcggcagaaaau

SEQ ID NO: 2861732 - RNA, 19 nt, Artificial Sequence
  Description of Artificial Sequence: Synthetic oligonucleotide
ccgauagcaacaccagccu

SEQ ID NO: 2861733 - RNA, 19 nt, Artificial Sequence
  Description of Artificial Sequence: Synthetic oligonucleotide
cuccggggccuccacagau

SEQ ID NO: 2861734 - RNA, 19 nt, Artificial Sequence
  Description of Artificial Sequence: Synthetic oligonucleotide
ccggggccuccacagauca

SEQ ID NO: 2861735 - RNA, 19 nt, Artificial Sequence
  Description of Artificial Sequence: Synthetic oligonucleotide
cucuauccuucuccugaau

SEQ ID NO: 2861736 - RNA, 19 nt, Artificial Sequence
  Description of Artificial Sequence: Synthetic oligonucleotide
gcuauucuggugacacgcu

SEQ ID NO: 2861737 - RNA, 19 nt, Artificial Sequence
  Description of Artificial Sequence: Synthetic oligonucleotide
ccugaauggugcauucuuu

SEQ ID NO: 2861738 - RNA, 19 nt, Artificial Sequence
  Description of Artificial Sequence: Synthetic oligonucleotide
ggagacuccggggccucca

SEQ ID NO: 2861739 - RNA, 19 nt, Artificial Sequence
  Description of Artificial Sequence: Synthetic oligonucleotide
gcaggcuauucuggugaca

SEQ ID NO: 2861740 - RNA, 19 nt, Artificial Sequence
  Description of Artificial Sequence: Synthetic oligonucleotide
gggucgcacauaggaguca

SEQ ID NO: 2861741 - RNA, 19 nt, Artificial Sequence
  Description of Artificial Sequence: Synthetic oligonucleotide
ggccaagacaguagcucua

SEQ ID NO: 2861742 - RNA, 19 nt, Artificial Sequence
  Description of Artificial Sequence: Synthetic oligonucleotide
cuucuccugaauggugcau

SEQ ID NO: 2861743 - RNA, 19 nt, Artificial Sequence
  Description of Artificial Sequence: Synthetic oligonucleotide
guagcucuagcaggcuauu

SEQ ID NO: 2861744 - RNA, 19 nt, Artificial Sequence
  Description of Artificial Sequence: Synthetic oligonucleotide
ccgucucuauccuucuccu

SEQ ID NO: 2861745 - RNA, 19 nt, Artificial Sequence
  Description of Artificial Sequence: Synthetic oligonucleotide
ggcccugguaagauccaua

SEQ ID NO: 2861746 - RNA, 19 nt, Artificial Sequence
  Description of Artificial Sequence: Synthetic oligonucleotide
cgcacauaggagucacaaa

SEQ ID NO: 2861747 - RNA, 19 nt, Artificial Sequence
  Description of Artificial Sequence: Synthetic oligonucleotide
gggcaaccgucucuauccu

SEQ ID NO: 2861748 - RNA, 19 nt, Artificial Sequence
  Description of Artificial Sequence: Synthetic oligonucleotide
cagccugcuugcggcagaa

SEQ ID NO: 2861749 - RNA, 19 nt, Artificial Sequence
  Description of Artificial Sequence: Synthetic oligonucleotide
agccugcuugcggcagaaa

SEQ ID NO: 2861750 - RNA, 19 nt, Artificial Sequence
  Description of Artificial Sequence: Synthetic oligonucleotide
acgcugggcuucggucccu

SEQ ID NO: 2861751 - RNA, 19 nt, Artificial Sequence
  Description of Artificial Sequence: Synthetic oligonucleotide
ggcaaccgucucuauccuu

SEQ ID NO: 2861752 - RNA, 19 nt, Artificial Sequence
  Description of Artificial Sequence: Synthetic oligonucleotide
ccagccugcuugcggcaga

SEQ ID NO: 2861753 - RNA, 19 nt, Artificial Sequence
  Description of Artificial Sequence: Synthetic oligonucleotide
cccugguaagauccauagu

SEQ ID NO: 2861754 - RNA, 19 nt, Artificial Sequence
  Description of Artificial Sequence: Synthetic oligonucleotide
gggugcagggucgcacaua

SEQ ID NO: 2861755 - RNA, 19 nt, Artificial Sequence
  Description of Artificial Sequence: Synthetic oligonucleotide
ccggcccugguaagaucca

SEQ ID NO: 2861756 - RNA, 19 nt, Artificial Sequence
  Description of Artificial Sequence: Synthetic oligonucleotide
ccucuucuugaagccauau

SEQ ID NO: 2861757 - RNA, 19 nt, Artificial Sequence
  Description of Artificial Sequence: Synthetic oligonucleotide
cguccccaagccggcggcc

SEQ ID NO: 2861758 - RNA, 19 nt, Artificial Sequence
  Description of Artificial Sequence: Synthetic oligonucleotide
cggggccuccacagaucac

SEQ ID NO: 2861759 - RNA, 19 nt, Artificial Sequence
  Description of Artificial Sequence: Synthetic oligonucleotide
gcgaaccagggugcagggu

SEQ ID NO: 2861760 - RNA, 19 nt, Artificial Sequence
  Description of Artificial Sequence: Synthetic oligonucleotide
cggucccuuucugcuggug

SEQ ID NO: 2861761 - RNA, 19 nt, Artificial Sequence
  Description of Artificial Sequence: Synthetic oligonucleotide
ccccaagccggcggccgga

SEQ ID NO: 2861762 - RNA, 19 nt, Artificial Sequence
  Description of Artificial Sequence: Synthetic oligonucleotide
gcugggcuucggucccuuu

SEQ ID NO: 2861763 - RNA, 19 nt, Artificial Sequence
  Description of Artificial Sequence: Synthetic oligonucleotide
cccaagccggcggccggaa

SEQ ID NO: 2861764 - RNA, 19 nt, Artificial Sequence
  Description of Artificial Sequence: Synthetic oligonucleotide
cggcccugguaagauccau

SEQ ID NO: 2861765 - RNA, 19 nt, Artificial Sequence
  Description of Artificial Sequence: Synthetic oligonucleotide
uuuaaaauggcacacaagg

SEQ ID NO: 2861766 - RNA, 19 nt, Artificial Sequence
  Description of Artificial Sequence: Synthetic oligonucleotide
uuuauguuaaguuugaagg

SEQ ID NO: 2861767 - RNA, 19 nt, Artificial Sequence
  Description of Artificial Sequence: Synthetic oligonucleotide
aaauuugaacuacagaagg

SEQ ID NO: 2861768 - RNA, 19 nt, Artificial Sequence
  Description of Artificial Sequence: Synthetic oligonucleotide
aaggaaauaagacagaaga

SEQ ID NO: 2861769 - RNA, 19 nt, Artificial Sequence
  Description of Artificial Sequence: Synthetic oligonucleotide
uaaaauuugaacuacagaa

SEQ ID NO: 2861770 - RNA, 19 nt, Artificial Sequence
  Description of Artificial Sequence: Synthetic oligonucleotide
ucucuuaccauuauuaagg

SEQ ID NO: 2861771 - RNA, 19 nt, Artificial Sequence
  Description of Artificial Sequence: Synthetic oligonucleotide
aaagacuuaagcuuaauca

SEQ ID NO: 2861772 - RNA, 19 nt, Artificial Sequence
  Description of Artificial Sequence: Synthetic oligonucleotide
uaaaauggcacacaagggg

SEQ ID NO: 2861773 - RNA, 19 nt, Artificial Sequence
  Description of Artificial Sequence: Synthetic oligonucleotide
uuaauagccguuaugacag

SEQ ID NO: 2861774 - RNA, 19 nt, Artificial Sequence
  Description of Artificial Sequence: Synthetic oligonucleotide
uaaacuuaagaacagaccu

SEQ ID NO: 2861775 - RNA, 19 nt, Artificial Sequence
  Description of Artificial Sequence: Synthetic oligonucleotide
acaauguaaacuuaagaac

SEQ ID NO: 2861776 - RNA, 19 nt, Artificial Sequence
  Description of Artificial Sequence: Synthetic oligonucleotide
ucuauaauggaacugcugc

SEQ ID NO: 2861777 - RNA, 19 nt, Artificial Sequence
  Description of Artificial Sequence: Synthetic oligonucleotide
aguuugaaggauuaugagc

SEQ ID NO: 2861778 - RNA, 19 nt, Artificial Sequence
  Description of Artificial Sequence: Synthetic oligonucleotide
aacucguaaaauuugaacu

SEQ ID NO: 2861779 - RNA, 19 nt, Artificial Sequence
  Description of Artificial Sequence: Synthetic oligonucleotide
uuaagaacagaccugauuc

SEQ ID NO: 2861780 - RNA, 19 nt, Artificial Sequence
  Description of Artificial Sequence: Synthetic oligonucleotide
ucuaaugauuagaagagag

SEQ ID NO: 2861781 - RNA, 19 nt, Artificial Sequence
  Description of Artificial Sequence: Synthetic oligonucleotide
cauuauuaaggcaaaagcc

SEQ ID NO: 2861782 - RNA, 19 nt, Artificial Sequence
  Description of Artificial Sequence: Synthetic oligonucleotide
aaggcaaaagccuuugaac

SEQ ID NO: 2861783 - RNA, 19 nt, Artificial Sequence
  Description of Artificial Sequence: Synthetic oligonucleotide
aaaagacuuaagcuuaauc

SEQ ID NO: 2861784 - RNA, 19 nt, Artificial Sequence
  Description of Artificial Sequence: Synthetic oligonucleotide
aggauuaugagcuuuucac

SEQ ID NO: 2861785 - RNA, 19 nt, Artificial Sequence
  Description of Artificial Sequence: Synthetic oligonucleotide
gaaauaagacagaagaggg

SEQ ID NO: 2861786 - RNA, 19 nt, Artificial Sequence
  Description of Artificial Sequence: Synthetic oligonucleotide
uacaauguaaacuuaagaa

SEQ ID NO: 2861787 - RNA, 19 nt, Artificial Sequence
  Description of Artificial Sequence: Synthetic oligonucleotide
ucucuaaugauuagaagag

SEQ ID NO: 2861788 - RNA, 19 nt, Artificial Sequence
  Description of Artificial Sequence: Synthetic oligonucleotide
uuaagcuuaaucauuuucu

SEQ ID NO: 2861789 - RNA, 19 nt, Artificial Sequence
  Description of Artificial Sequence: Synthetic oligonucleotide
gauuaugagcuuuucacag

SEQ ID NO: 2861790 - RNA, 19 nt, Artificial Sequence
  Description of Artificial Sequence: Synthetic oligonucleotide
uaugacagugauuacaaug

SEQ ID NO: 2861791 - RNA, 19 nt, Artificial Sequence
  Description of Artificial Sequence: Synthetic oligonucleotide
uaaguuugaaggauuauga

SEQ ID NO: 2861792 - RNA, 19 nt, Artificial Sequence
  Description of Artificial Sequence: Synthetic oligonucleotide
auuuauguuaaguuugaag

SEQ ID NO: 2861793 - RNA, 19 nt, Artificial Sequence
  Description of Artificial Sequence: Synthetic oligonucleotide
aguggauacaccaagugcc

SEQ ID NO: 2861794 - RNA, 19 nt, Artificial Sequence
  Description of Artificial Sequence: Synthetic oligonucleotide
uguaaacuuaagaacagac

SEQ ID NO: 2861795 - RNA, 19 nt, Artificial Sequence
  Description of Artificial Sequence: Synthetic oligonucleotide
uuuagauuucaaaagacuu

SEQ ID NO: 2861796 - RNA, 19 nt, Artificial Sequence
  Description of Artificial Sequence: Synthetic oligonucleotide
uuuuagauuucaaaagacu

SEQ ID NO: 2861797 - RNA, 19 nt, Artificial Sequence
  Description of Artificial Sequence: Synthetic oligonucleotide
auuaauagccguuaugaca

SEQ ID NO: 2861798 - RNA, 19 nt, Artificial Sequence
  Description of Artificial Sequence: Synthetic oligonucleotide
aaaauuugaacuacagaag

SEQ ID NO: 2861799 - RNA, 19 nt, Artificial Sequence
  Description of Artificial Sequence: Synthetic oligonucleotide
gauuuuagauuucaaaaga

SEQ ID NO: 2861800 - RNA, 19 nt, Artificial Sequence
  Description of Artificial Sequence: Synthetic oligonucleotide
aaauguucuuuaaaauggc

SEQ ID NO: 2861801 - RNA, 19 nt, Artificial Sequence
  Description of Artificial Sequence: Synthetic oligonucleotide
uuacaauguaaacuuaaga

SEQ ID NO: 2861802 - RNA, 19 nt, Artificial Sequence
  Description of Artificial Sequence: Synthetic oligonucleotide
agcuaaagccauuaauagc

SEQ ID NO: 2861803 - RNA, 19 nt, Artificial Sequence
  Description of Artificial Sequence: Synthetic oligonucleotide
aaugucuucagaccaccuc

SEQ ID NO: 2861804 - RNA, 19 nt, Artificial Sequence
  Description of Artificial Sequence: Synthetic oligonucleotide
uaaugauuagaagagaggu

SEQ ID NO: 2861805 - RNA, 19 nt, Artificial Sequence
  Description of Artificial Sequence: Synthetic oligonucleotide
uuucaaaagacuuaagcuu

SEQ ID NO: 2861806 - RNA, 19 nt, Artificial Sequence
  Description of Artificial Sequence: Synthetic oligonucleotide
aagacuuaagcuuaaucau

SEQ ID NO: 2861807 - RNA, 19 nt, Artificial Sequence
  Description of Artificial Sequence: Synthetic oligonucleotide
aauuucuagucugugaaug

SEQ ID NO: 2861808 - RNA, 19 nt, Artificial Sequence
  Description of Artificial Sequence: Synthetic oligonucleotide
cuucagaccaccucuaagg

SEQ ID NO: 2861809 - RNA, 19 nt, Artificial Sequence
  Description of Artificial Sequence: Synthetic oligonucleotide
auuaacagaguggauacac

SEQ ID NO: 2861810 - RNA, 19 nt, Artificial Sequence
  Description of Artificial Sequence: Synthetic oligonucleotide
cuaaugauuagaagagagg

SEQ ID NO: 2861811 - RNA, 19 nt, Artificial Sequence
  Description of Artificial Sequence: Synthetic oligonucleotide
caauguaaacuuaagaaca

SEQ ID NO: 2861812 - RNA, 19 nt, Artificial Sequence
  Description of Artificial Sequence: Synthetic oligonucleotide
aauuugaacuacagaaggg

SEQ ID NO: 2861813 - RNA, 19 nt, Artificial Sequence
  Description of Artificial Sequence: Synthetic oligonucleotide
uuaaguuugaaggauuaug

SEQ ID NO: 2861814 - RNA, 19 nt, Artificial Sequence
  Description of Artificial Sequence: Synthetic oligonucleotide
uugaacuacagaagggucc

SEQ ID NO: 2861815 - RNA, 19 nt, Artificial Sequence
  Description of Artificial Sequence: Synthetic oligonucleotide
aaauuuggaacucguaaaa

SEQ ID NO: 2861816 - RNA, 19 nt, Artificial Sequence
  Description of Artificial Sequence: Synthetic oligonucleotide
cuuaccauuauuaaggcaa

SEQ ID NO: 2861817 - RNA, 19 nt, Artificial Sequence
  Description of Artificial Sequence: Synthetic oligonucleotide
agugauuacaauguaaacu

SEQ ID NO: 2861818 - RNA, 19 nt, Artificial Sequence
  Description of Artificial Sequence: Synthetic oligonucleotide
aggauuuuagauuucaaaa

SEQ ID NO: 2861819 - RNA, 19 nt, Artificial Sequence
  Description of Artificial Sequence: Synthetic oligonucleotide
cacauuuauguuaaguuug

SEQ ID NO: 2861820 - RNA, 19 nt, Artificial Sequence
  Description of Artificial Sequence: Synthetic oligonucleotide
uuauguuaaguuugaagga

SEQ ID NO: 2861821 - RNA, 19 nt, Artificial Sequence
  Description of Artificial Sequence: Synthetic oligonucleotide
auuuuagauuucaaaagac

SEQ ID NO: 2861822 - RNA, 19 nt, Artificial Sequence
  Description of Artificial Sequence: Synthetic oligonucleotide
aaggauuuuagauuucaaa

SEQ ID NO: 2861823 - RNA, 19 nt, Artificial Sequence
  Description of Artificial Sequence: Synthetic oligonucleotide
auuauuaaggcaaaagccu

SEQ ID NO: 2861824 - RNA, 19 nt, Artificial Sequence
  Description of Artificial Sequence: Synthetic oligonucleotide
uaagugauguucucuaaug

SEQ ID NO: 2861825 - RNA, 19 nt, Artificial Sequence
  Description of Artificial Sequence: Synthetic oligonucleotide
aauguaaacuuaagaacag

SEQ ID NO: 2861826 - RNA, 19 nt, Artificial Sequence
  Description of Artificial Sequence: Synthetic oligonucleotide
ucauuaacagaguggauac

SEQ ID NO: 2861827 - RNA, 19 nt, Artificial Sequence
  Description of Artificial Sequence: Synthetic oligonucleotide
uaaauuuggaacucguaaa

SEQ ID NO: 2861828 - RNA, 19 nt, Artificial Sequence
  Description of Artificial Sequence: Synthetic oligonucleotide
uucaaaagacuuaagcuua

SEQ ID NO: 2861829 - RNA, 19 nt, Artificial Sequence
  Description of Artificial Sequence: Synthetic oligonucleotide
agcacacuaauuucuaguc

SEQ ID NO: 2861830 - RNA, 19 nt, Artificial Sequence
  Description of Artificial Sequence: Synthetic oligonucleotide
auuagaagagagguuuugc

SEQ ID NO: 2861831 - RNA, 19 nt, Artificial Sequence
  Description of Artificial Sequence: Synthetic oligonucleotide
uguucucuaaugauuagaa

SEQ ID NO: 2861832 - RNA, 19 nt, Artificial Sequence
  Description of Artificial Sequence: Synthetic oligonucleotide
ucuuuaaaauggcacacaa

SEQ ID NO: 2861833 - RNA, 19 nt, Artificial Sequence
  Description of Artificial Sequence: Synthetic oligonucleotide
ggauuuuagauuucaaaag

SEQ ID NO: 2861834 - RNA, 19 nt, Artificial Sequence
  Description of Artificial Sequence: Synthetic oligonucleotide
acugcugcaagcuaaguga

SEQ ID NO: 2861835 - RNA, 19 nt, Artificial Sequence
  Description of Artificial Sequence: Synthetic oligonucleotide
aaagccaucucuuaccauu

SEQ ID NO: 2861836 - RNA, 19 nt, Artificial Sequence
  Description of Artificial Sequence: Synthetic oligonucleotide
uucaagcacacuaauuucu

SEQ ID NO: 2861837 - RNA, 19 nt, Artificial Sequence
  Description of Artificial Sequence: Synthetic oligonucleotide
uaagcuuaaucauuuucug

SEQ ID NO: 2861838 - RNA, 19 nt, Artificial Sequence
  Description of Artificial Sequence: Synthetic oligonucleotide
uuagauuucaaaagacuua

SEQ ID NO: 2861839 - RNA, 19 nt, Artificial Sequence
  Description of Artificial Sequence: Synthetic oligonucleotide
gcagacaauauucugaaag

SEQ ID NO: 2861840 - RNA, 19 nt, Artificial Sequence
  Description of Artificial Sequence: Synthetic oligonucleotide
auuaugagcuuuucacagg

SEQ ID NO: 2861841 - RNA, 19 nt, Artificial Sequence
  Description of Artificial Sequence: Synthetic oligonucleotide
ucccuuuaaggaaauaaga

SEQ ID NO: 2861842 - RNA, 19 nt, Artificial Sequence
  Description of Artificial Sequence: Synthetic oligonucleotide
aucucuuaccauuauuaag

SEQ ID NO: 2861843 - RNA, 19 nt, Artificial Sequence
  Description of Artificial Sequence: Synthetic oligonucleotide
aacuuaagaacagaccuga

SEQ ID NO: 2861844 - RNA, 19 nt, Artificial Sequence
  Description of Artificial Sequence: Synthetic oligonucleotide
uaacagaguggauacacca

SEQ ID NO: 2861845 - RNA, 19 nt, Artificial Sequence
  Description of Artificial Sequence: Synthetic oligonucleotide
gaacucguaaaauuugaac

SEQ ID NO: 2861846 - RNA, 19 nt, Artificial Sequence
  Description of Artificial Sequence: Synthetic oligonucleotide
gcuaaagccauuaauagcc

SEQ ID NO: 2861847 - RNA, 19 nt, Artificial Sequence
  Description of Artificial Sequence: Synthetic oligonucleotide
agacaauauucugaaagac

SEQ ID NO: 2861848 - RNA, 19 nt, Artificial Sequence
  Description of Artificial Sequence: Synthetic oligonucleotide
agacaaagccaucucuuac

SEQ ID NO: 2861849 - RNA, 19 nt, Artificial Sequence
  Description of Artificial Sequence: Synthetic oligonucleotide
aagugauguucucuaauga

SEQ ID NO: 2861850 - RNA, 19 nt, Artificial Sequence
  Description of Artificial Sequence: Synthetic oligonucleotide
aagcacacuaauuucuagu

SEQ ID NO: 2861851 - RNA, 19 nt, Artificial Sequence
  Description of Artificial Sequence: Synthetic oligonucleotide
uuagaagagagguuuugcu

SEQ ID NO: 2861852 - RNA, 19 nt, Artificial Sequence
  Description of Artificial Sequence: Synthetic oligonucleotide
gacaaagccaucucuuacc

SEQ ID NO: 2861853 - RNA, 19 nt, Artificial Sequence
  Description of Artificial Sequence: Synthetic oligonucleotide
cacacuaauuucuagucug

SEQ ID NO: 2861854 - RNA, 19 nt, Artificial Sequence
  Description of Artificial Sequence: Synthetic oligonucleotide
agagguuuugcuucaagca

SEQ ID NO: 2861855 - RNA, 19 nt, Artificial Sequence
  Description of Artificial Sequence: Synthetic oligonucleotide
aggcaaaagccuuugaaca

SEQ ID NO: 2861856 - RNA, 19 nt, Artificial Sequence
  Description of Artificial Sequence: Synthetic oligonucleotide
agaagggucccuuuaagga

SEQ ID NO: 2861857 - RNA, 19 nt, Artificial Sequence
  Description of Artificial Sequence: Synthetic oligonucleotide
aagcuuaaucauuuucugu

SEQ ID NO: 2861858 - RNA, 19 nt, Artificial Sequence
  Description of Artificial Sequence: Synthetic oligonucleotide
uucauuaacagaguggaua

SEQ ID NO: 2861859 - RNA, 19 nt, Artificial Sequence
  Description of Artificial Sequence: Synthetic oligonucleotide
uuugcuucaagcacacuaa

SEQ ID NO: 2861860 - RNA, 19 nt, Artificial Sequence
  Description of Artificial Sequence: Synthetic oligonucleotide
gagagguuuugcuucaagc

SEQ ID NO: 2861861 - RNA, 19 nt, Artificial Sequence
  Description of Artificial Sequence: Synthetic oligonucleotide
uuaacagaguggauacacc

SEQ ID NO: 2861862 - RNA, 19 nt, Artificial Sequence
  Description of Artificial Sequence: Synthetic oligonucleotide
acacgguucauuaacagag

SEQ ID NO: 2861863 - RNA, 19 nt, Artificial Sequence
  Description of Artificial Sequence: Synthetic oligonucleotide
acaauauucugaaagacaa

SEQ ID NO: 2861864 - RNA, 19 nt, Artificial Sequence
  Description of Artificial Sequence: Synthetic oligonucleotide
gaguggauacaccaagugc

SEQ ID NO: 2861865 - RNA, 19 nt, Artificial Sequence
  Description of Artificial Sequence: Synthetic oligonucleotide
acuaauuucuagucuguga

SEQ ID NO: 2861866 - RNA, 19 nt, Artificial Sequence
  Description of Artificial Sequence: Synthetic oligonucleotide
uucuauaauggaacugcug

SEQ ID NO: 2861867 - RNA, 19 nt, Artificial Sequence
  Description of Artificial Sequence: Synthetic oligonucleotide
uagauuucaaaagacuuaa

SEQ ID NO: 2861868 - RNA, 19 nt, Artificial Sequence
  Description of Artificial Sequence: Synthetic oligonucleotide
aauggaacugcugcaagcu

SEQ ID NO: 2861869 - RNA, 19 nt, Artificial Sequence
  Description of Artificial Sequence: Synthetic oligonucleotide
uuugaacuacagaaggguc

SEQ ID NO: 2861870 - RNA, 19 nt, Artificial Sequence
  Description of Artificial Sequence: Synthetic oligonucleotide
ucuucagaccaccucuaag

SEQ ID NO: 2861871 - RNA, 19 nt, Artificial Sequence
  Description of Artificial Sequence: Synthetic oligonucleotide
auuugaacuacagaagggu

SEQ ID NO: 2861872 - RNA, 19 nt, Artificial Sequence
  Description of Artificial Sequence: Synthetic oligonucleotide
ugaacacgguucauuaaca

SEQ ID NO: 2861873 - RNA, 19 nt, Artificial Sequence
  Description of Artificial Sequence: Synthetic oligonucleotide
uggaacucguaaaauuuga

SEQ ID NO: 2861874 - RNA, 19 nt, Artificial Sequence
  Description of Artificial Sequence: Synthetic oligonucleotide
cuaaauuuggaacucguaa

SEQ ID NO: 2861875 - RNA, 19 nt, Artificial Sequence
  Description of Artificial Sequence: Synthetic oligonucleotide
guaaaauuugaacuacaga

SEQ ID NO: 2861876 - RNA, 19 nt, Artificial Sequence
  Description of Artificial Sequence: Synthetic oligonucleotide
uaauggaacugcugcaagc

SEQ ID NO: 2861877 - RNA, 19 nt, Artificial Sequence
  Description of Artificial Sequence: Synthetic oligonucleotide
uguuaaguuugaaggauua

SEQ ID NO: 2861878 - RNA, 19 nt, Artificial Sequence
  Description of Artificial Sequence: Synthetic oligonucleotide
accauuauuaaggcaaaag

SEQ ID NO: 2861879 - RNA, 19 nt, Artificial Sequence
  Description of Artificial Sequence: Synthetic oligonucleotide
aaacuuaagaacagaccug

SEQ ID NO: 2861880 - RNA, 19 nt, Artificial Sequence
  Description of Artificial Sequence: Synthetic oligonucleotide
uauguuaaguuugaaggau

SEQ ID NO: 2861881 - RNA, 19 nt, Artificial Sequence
  Description of Artificial Sequence: Synthetic oligonucleotide
gagguuuugcuucaagcac

SEQ ID NO: 2861882 - RNA, 19 nt, Artificial Sequence
  Description of Artificial Sequence: Synthetic oligonucleotide
ccauuauuaaggcaaaagc

SEQ ID NO: 2861883 - RNA, 19 nt, Artificial Sequence
  Description of Artificial Sequence: Synthetic oligonucleotide
uuauaacagcacauuuaug

SEQ ID NO: 2861884 - RNA, 19 nt, Artificial Sequence
  Description of Artificial Sequence: Synthetic oligonucleotide
auuuggaacucguaaaauu

SEQ ID NO: 2861885 - RNA, 19 nt, Artificial Sequence
  Description of Artificial Sequence: Synthetic oligonucleotide
auaauggaacugcugcaag

SEQ ID NO: 2861886 - RNA, 19 nt, Artificial Sequence
  Description of Artificial Sequence: Synthetic oligonucleotide
auuacaauguaaacuuaag

SEQ ID NO: 2861887 - RNA, 19 nt, Artificial Sequence
  Description of Artificial Sequence: Synthetic oligonucleotide
gaacacgguucauuaacag

SEQ ID NO: 2861888 - RNA, 19 nt, Artificial Sequence
  Description of Artificial Sequence: Synthetic oligonucleotide
agaccugauucuauaaugg

SEQ ID NO: 2861889 - RNA, 19 nt, Artificial Sequence
  Description of Artificial Sequence: Synthetic oligonucleotide
ugaacuacagaaggguccc

SEQ ID NO: 2861890 - RNA, 19 nt, Artificial Sequence
  Description of Artificial Sequence: Synthetic oligonucleotide
aauguucuuuaaaauggca

SEQ ID NO: 2861891 - RNA, 19 nt, Artificial Sequence
  Description of Artificial Sequence: Synthetic oligonucleotide
cuaauuucuagucugugaa

SEQ ID NO: 2861892 - RNA, 19 nt, Artificial Sequence
  Description of Artificial Sequence: Synthetic oligonucleotide
ucguaaaauuugaacuaca

SEQ ID NO: 2861893 - RNA, 19 nt, Artificial Sequence
  Description of Artificial Sequence: Synthetic oligonucleotide
aaauaagacagaagaggga

SEQ ID NO: 2861894 - RNA, 19 nt, Artificial Sequence
  Description of Artificial Sequence: Synthetic oligonucleotide
augauuagaagagagguuu

SEQ ID NO: 2861895 - RNA, 19 nt, Artificial Sequence
  Description of Artificial Sequence: Synthetic oligonucleotide
cagaccugauucuauaaug

SEQ ID NO: 2861896 - RNA, 19 nt, Artificial Sequence
  Description of Artificial Sequence: Synthetic oligonucleotide
caaaagccuuugaacacgg

SEQ ID NO: 2861897 - RNA, 19 nt, Artificial Sequence
  Description of Artificial Sequence: Synthetic oligonucleotide
agaguggauacaccaagug

SEQ ID NO: 2861898 - RNA, 19 nt, Artificial Sequence
  Description of Artificial Sequence: Synthetic oligonucleotide
agugauguucucuaaugau

SEQ ID NO: 2861899 - RNA, 19 nt, Artificial Sequence
  Description of Artificial Sequence: Synthetic oligonucleotide
gacaauauucugaaagaca

SEQ ID NO: 2861900 - RNA, 19 nt, Artificial Sequence
  Description of Artificial Sequence: Synthetic oligonucleotide
acucguaaaauuugaacua

SEQ ID NO: 2861901 - RNA, 19 nt, Artificial Sequence
  Description of Artificial Sequence: Synthetic oligonucleotide
cagaagggucccuuuaagg

SEQ ID NO: 2861902 - RNA, 19 nt, Artificial Sequence
  Description of Artificial Sequence: Synthetic oligonucleotide
cuuaaucauuuucuguuuc

SEQ ID NO: 2861903 - RNA, 19 nt, Artificial Sequence
  Description of Artificial Sequence: Synthetic oligonucleotide
cauuaauagccguuaugac

SEQ ID NO: 2861904 - RNA, 19 nt, Artificial Sequence
  Description of Artificial Sequence: Synthetic oligonucleotide
caggcuaaagcaacauggg

SEQ ID NO: 2861905 - RNA, 19 nt, Artificial Sequence
  Description of Artificial Sequence: Synthetic oligonucleotide
uauaauggaacugcugcaa

SEQ ID NO: 2861906 - RNA, 19 nt, Artificial Sequence
  Description of Artificial Sequence: Synthetic oligonucleotide
ugauucuauaauggaacug

SEQ ID NO: 2861907 - RNA, 19 nt, Artificial Sequence
  Description of Artificial Sequence: Synthetic oligonucleotide
cucuuaccauuauuaaggc

SEQ ID NO: 2861908 - RNA, 19 nt, Artificial Sequence
  Description of Artificial Sequence: Synthetic oligonucleotide
ucuuaccauuauuaaggca

SEQ ID NO: 2861909 - RNA, 19 nt, Artificial Sequence
  Description of Artificial Sequence: Synthetic oligonucleotide
aaagcaacaugggagcuaa

SEQ ID NO: 2861910 - RNA, 19 nt, Artificial Sequence
  Description of Artificial Sequence: Synthetic oligonucleotide
auuucuagucugugaaugu

SEQ ID NO: 2861911 - RNA, 19 nt, Artificial Sequence
  Description of Artificial Sequence: Synthetic oligonucleotide
aauuuggaacucguaaaau

SEQ ID NO: 2861912 - RNA, 19 nt, Artificial Sequence
  Description of Artificial Sequence: Synthetic oligonucleotide
gauuagaagagagguuuug

SEQ ID NO: 2861913 - RNA, 19 nt, Artificial Sequence
  Description of Artificial Sequence: Synthetic oligonucleotide
aacagaccugauucuauaa

SEQ ID NO: 2861914 - RNA, 19 nt, Artificial Sequence
  Description of Artificial Sequence: Synthetic oligonucleotide
aacagcacauuuauguuaa

SEQ ID NO: 2861915 - RNA, 19 nt, Artificial Sequence
  Description of Artificial Sequence: Synthetic oligonucleotide
aagacaaagccaucucuua

SEQ ID NO: 2861916 - RNA, 19 nt, Artificial Sequence
  Description of Artificial Sequence: Synthetic oligonucleotide
aacaugggagcuaaagcca

SEQ ID NO: 2861917 - RNA, 19 nt, Artificial Sequence
  Description of Artificial Sequence: Synthetic oligonucleotide
ccugauucuauaauggaac

SEQ ID NO: 2861918 - RNA, 19 nt, Artificial Sequence
  Description of Artificial Sequence: Synthetic oligonucleotide
aggaaauaagacagaagag

SEQ ID NO: 2861919 - RNA, 19 nt, Artificial Sequence
  Description of Artificial Sequence: Synthetic oligonucleotide
ggcuaaagcaacaugggag

SEQ ID NO: 2861920 - RNA, 19 nt, Artificial Sequence
  Description of Artificial Sequence: Synthetic oligonucleotide
ugccaucaaagaaauguuc

SEQ ID NO: 2861921 - RNA, 19 nt, Artificial Sequence
  Description of Artificial Sequence: Synthetic oligonucleotide
aauagccguuaugacagug

SEQ ID NO: 2861922 - RNA, 19 nt, Artificial Sequence
  Description of Artificial Sequence: Synthetic oligonucleotide
aaagacaaagccaucucuu

SEQ ID NO: 2861923 - RNA, 19 nt, Artificial Sequence
  Description of Artificial Sequence: Synthetic oligonucleotide
gugauuacaauguaaacuu

SEQ ID NO: 2861924 - RNA, 19 nt, Artificial Sequence
  Description of Artificial Sequence: Synthetic oligonucleotide
ucaaaagacuuaagcuuaa

SEQ ID NO: 2861925 - RNA, 19 nt, Artificial Sequence
  Description of Artificial Sequence: Synthetic oligonucleotide
agcaacaugggagcuaaag

SEQ ID NO: 2861926 - RNA, 19 nt, Artificial Sequence
  Description of Artificial Sequence: Synthetic oligonucleotide
ugagcuuuucacaggcuaa

SEQ ID NO: 2861927 - RNA, 19 nt, Artificial Sequence
  Description of Artificial Sequence: Synthetic oligonucleotide
uaaggauuuuagauuucaa

SEQ ID NO: 2861928 - RNA, 19 nt, Artificial Sequence
  Description of Artificial Sequence: Synthetic oligonucleotide
acgguucauuaacagagug

SEQ ID NO: 2861929 - RNA, 19 nt, Artificial Sequence
  Description of Artificial Sequence: Synthetic oligonucleotide
acagugauuacaauguaaa

SEQ ID NO: 2861930 - RNA, 19 nt, Artificial Sequence
  Description of Artificial Sequence: Synthetic oligonucleotide
auucugaaagacaaagcca

SEQ ID NO: 2861931 - RNA, 19 nt, Artificial Sequence
  Description of Artificial Sequence: Synthetic oligonucleotide
uuaccauuauuaaggcaaa

SEQ ID NO: 2861932 - RNA, 19 nt, Artificial Sequence
  Description of Artificial Sequence: Synthetic oligonucleotide
uaaagccauuaauagccgu

SEQ ID NO: 2861933 - RNA, 19 nt, Artificial Sequence
  Description of Artificial Sequence: Synthetic oligonucleotide
acaccaagugccaucaaag

SEQ ID NO: 2861934 - RNA, 19 nt, Artificial Sequence
  Description of Artificial Sequence: Synthetic oligonucleotide
auuaaggcaaaagccuuug

SEQ ID NO: 2861935 - RNA, 19 nt, Artificial Sequence
  Description of Artificial Sequence: Synthetic oligonucleotide
accaagugccaucaaagaa

SEQ ID NO: 2861936 - RNA, 19 nt, Artificial Sequence
  Description of Artificial Sequence: Synthetic oligonucleotide
ucaagcacacuaauuucua

SEQ ID NO: 2861937 - RNA, 19 nt, Artificial Sequence
  Description of Artificial Sequence: Synthetic oligonucleotide
cagacaauauucugaaaga

SEQ ID NO: 2861938 - RNA, 19 nt, Artificial Sequence
  Description of Artificial Sequence: Synthetic oligonucleotide
gauacaccaagugccauca

SEQ ID NO: 2861939 - RNA, 19 nt, Artificial Sequence
  Description of Artificial Sequence: Synthetic oligonucleotide
gucccuuuaaggaaauaag

SEQ ID NO: 2861940 - RNA, 19 nt, Artificial Sequence
  Description of Artificial Sequence: Synthetic oligonucleotide
gguucauuaacagagugga

SEQ ID NO: 2861941 - RNA, 19 nt, Artificial Sequence
  Description of Artificial Sequence: Synthetic oligonucleotide
cucguaaaauuugaacuac

SEQ ID NO: 2861942 - RNA, 19 nt, Artificial Sequence
  Description of Artificial Sequence: Synthetic oligonucleotide
uuaaggcaaaagccuuuga

SEQ ID NO: 2861943 - RNA, 19 nt, Artificial Sequence
  Description of Artificial Sequence: Synthetic oligonucleotide
guuaugacagugauuacaa

SEQ ID NO: 2861944 - RNA, 19 nt, Artificial Sequence
  Description of Artificial Sequence: Synthetic oligonucleotide
cccuuuaaggaaauaagac

SEQ ID NO: 2861945 - RNA, 19 nt, Artificial Sequence
  Description of Artificial Sequence: Synthetic oligonucleotide
uacagaagggucccuuuaa

SEQ ID NO: 2861946 - RNA, 19 nt, Artificial Sequence
  Description of Artificial Sequence: Synthetic oligonucleotide
uuugaacacgguucauuaa

SEQ ID NO: 2861947 - RNA, 19 nt, Artificial Sequence
  Description of Artificial Sequence: Synthetic oligonucleotide
ucuagucugugaaugucuu

SEQ ID NO: 2861948 - RNA, 19 nt, Artificial Sequence
  Description of Artificial Sequence: Synthetic oligonucleotide
ugcaagcuaagugauguuc

SEQ ID NO: 2861949 - RNA, 19 nt, Artificial Sequence
  Description of Artificial Sequence: Synthetic oligonucleotide
uaauuucuagucugugaau

SEQ ID NO: 2861950 - RNA, 19 nt, Artificial Sequence
  Description of Artificial Sequence: Synthetic oligonucleotide
ucuaaggauuuuagauuuc

SEQ ID NO: 2861951 - RNA, 19 nt, Artificial Sequence
  Description of Artificial Sequence: Synthetic oligonucleotide
gaagggucccuuuaaggaa

SEQ ID NO: 2861952 - RNA, 19 nt, Artificial Sequence
  Description of Artificial Sequence: Synthetic oligonucleotide
aagcuaagugauguucucu

SEQ ID NO: 2861953 - RNA, 19 nt, Artificial Sequence
  Description of Artificial Sequence: Synthetic oligonucleotide
gaagagagguuuugcuuca

SEQ ID NO: 2861954 - RNA, 19 nt, Artificial Sequence
  Description of Artificial Sequence: Synthetic oligonucleotide
aggcuaaagcaacauggga

SEQ ID NO: 2861955 - RNA, 19 nt, Artificial Sequence
  Description of Artificial Sequence: Synthetic oligonucleotide
aaagccauuaauagccguu

SEQ ID NO: 2861956 - RNA, 19 nt, Artificial Sequence
  Description of Artificial Sequence: Synthetic oligonucleotide
gaccugauucuauaaugga

SEQ ID NO: 2861957 - RNA, 19 nt, Artificial Sequence
  Description of Artificial Sequence: Synthetic oligonucleotide
gcaacaugggagcuaaagc

SEQ ID NO: 2861958 - RNA, 19 nt, Artificial Sequence
  Description of Artificial Sequence: Synthetic oligonucleotide
acagaccugauucuauaau

SEQ ID NO: 2861959 - RNA, 19 nt, Artificial Sequence
  Description of Artificial Sequence: Synthetic oligonucleotide
uuucuagucugugaauguc

SEQ ID NO: 2861960 - RNA, 19 nt, Artificial Sequence
  Description of Artificial Sequence: Synthetic oligonucleotide
agucugugaaugucuucag

SEQ ID NO: 2861961 - RNA, 19 nt, Artificial Sequence
  Description of Artificial Sequence: Synthetic oligonucleotide
agcuaagugauguucucua

SEQ ID NO: 2861962 - RNA, 19 nt, Artificial Sequence
  Description of Artificial Sequence: Synthetic oligonucleotide
cuuugaacacgguucauua

SEQ ID NO: 2861963 - RNA, 19 nt, Artificial Sequence
  Description of Artificial Sequence: Synthetic oligonucleotide
cguaaaauuugaacuacag

SEQ ID NO: 2861964 - RNA, 19 nt, Artificial Sequence
  Description of Artificial Sequence: Synthetic oligonucleotide
agccuuugaacacgguuca

SEQ ID NO: 2861965 - RNA, 19 nt, Artificial Sequence
  Description of Artificial Sequence: Synthetic oligonucleotide
gcuuuucacaggcuaaagc

SEQ ID NO: 2861966 - RNA, 19 nt, Artificial Sequence
  Description of Artificial Sequence: Synthetic oligonucleotide
ugauuagaagagagguuuu

SEQ ID NO: 2861967 - RNA, 19 nt, Artificial Sequence
  Description of Artificial Sequence: Synthetic oligonucleotide
aagaacagaccugauucua

SEQ ID NO: 2861968 - RNA, 19 nt, Artificial Sequence
  Description of Artificial Sequence: Synthetic oligonucleotide
cuaaggauuuuagauuuca

SEQ ID NO: 2861969 - RNA, 19 nt, Artificial Sequence
  Description of Artificial Sequence: Synthetic oligonucleotide
uagccguuaugacagugau

SEQ ID NO: 2861970 - RNA, 19 nt, Artificial Sequence
  Description of Artificial Sequence: Synthetic oligonucleotide
auaagacagaagagggaag

SEQ ID NO: 2861971 - RNA, 19 nt, Artificial Sequence
  Description of Artificial Sequence: Synthetic oligonucleotide
ggauuaugagcuuuucaca

SEQ ID NO: 2861972 - RNA, 19 nt, Artificial Sequence
  Description of Artificial Sequence: Synthetic oligonucleotide
acauuuauguuaaguuuga

SEQ ID NO: 2861973 - RNA, 19 nt, Artificial Sequence
  Description of Artificial Sequence: Synthetic oligonucleotide
auucuuauaacagcacauu

SEQ ID NO: 2861974 - RNA, 19 nt, Artificial Sequence
  Description of Artificial Sequence: Synthetic oligonucleotide
auguucucuaaugauuaga

SEQ ID NO: 2861975 - RNA, 19 nt, Artificial Sequence
  Description of Artificial Sequence: Synthetic oligonucleotide
gacagugauuacaauguaa

SEQ ID NO: 2861976 - RNA, 19 nt, Artificial Sequence
  Description of Artificial Sequence: Synthetic oligonucleotide
agagggaaggcagacaaua

SEQ ID NO: 2861977 - RNA, 19 nt, Artificial Sequence
  Description of Artificial Sequence: Synthetic oligonucleotide
auguaaacuuaagaacaga

SEQ ID NO: 2861978 - RNA, 19 nt, Artificial Sequence
  Description of Artificial Sequence: Synthetic oligonucleotide
ugacagugauuacaaugua

SEQ ID NO: 2861979 - RNA, 19 nt, Artificial Sequence
  Description of Artificial Sequence: Synthetic oligonucleotide
gauucuuauaacagcacau

SEQ ID NO: 2861980 - RNA, 19 nt, Artificial Sequence
  Description of Artificial Sequence: Synthetic oligonucleotide
ucagaccaccucuaaggau

SEQ ID NO: 2861981 - RNA, 19 nt, Artificial Sequence
  Description of Artificial Sequence: Synthetic oligonucleotide
aagccauuaauagccguua

SEQ ID NO: 2861982 - RNA, 19 nt, Artificial Sequence
  Description of Artificial Sequence: Synthetic oligonucleotide
uugaaggauuaugagcuuu

SEQ ID NO: 2861983 - RNA, 19 nt, Artificial Sequence
  Description of Artificial Sequence: Synthetic oligonucleotide
ggagcuaaagccauuaaua

SEQ ID NO: 2861984 - RNA, 19 nt, Artificial Sequence
  Description of Artificial Sequence: Synthetic oligonucleotide
gccguuaugacagugauua

SEQ ID NO: 2861985 - RNA, 19 nt, Artificial Sequence
  Description of Artificial Sequence: Synthetic oligonucleotide
uuaugacagugauuacaau

SEQ ID NO: 2861986 - RNA, 19 nt, Artificial Sequence
  Description of Artificial Sequence: Synthetic oligonucleotide
agggaaggcagacaauauu

SEQ ID NO: 2861987 - RNA, 19 nt, Artificial Sequence
  Description of Artificial Sequence: Synthetic oligonucleotide
cacaggcuaaagcaacaug

SEQ ID NO: 2861988 - RNA, 19 nt, Artificial Sequence
  Description of Artificial Sequence: Synthetic oligonucleotide
uuugaaggauuaugagcuu

SEQ ID NO: 2861989 - RNA, 19 nt, Artificial Sequence
  Description of Artificial Sequence: Synthetic oligonucleotide
agauuucaaaagacuuaag

SEQ ID NO: 2861990 - RNA, 19 nt, Artificial Sequence
  Description of Artificial Sequence: Synthetic oligonucleotide
cucuaaggauuuuagauuu

SEQ ID NO: 2861991 - RNA, 19 nt, Artificial Sequence
  Description of Artificial Sequence: Synthetic oligonucleotide
auucuauaauggaacugcu

SEQ ID NO: 2861992 - RNA, 19 nt, Artificial Sequence
  Description of Artificial Sequence: Synthetic oligonucleotide
ccauuaauagccguuauga

SEQ ID NO: 2861993 - RNA, 19 nt, Artificial Sequence
  Description of Artificial Sequence: Synthetic oligonucleotide
gaacagaccugauucuaua

SEQ ID NO: 2861994 - RNA, 19 nt, Artificial Sequence
  Description of Artificial Sequence: Synthetic oligonucleotide
caucucuuaccauuauuaa

SEQ ID NO: 2861995 - RNA, 19 nt, Artificial Sequence
  Description of Artificial Sequence: Synthetic oligonucleotide
uaaagcaacaugggagcua

SEQ ID NO: 2861996 - RNA, 19 nt, Artificial Sequence
  Description of Artificial Sequence: Synthetic oligonucleotide
ggggcgauucuuauaacag

SEQ ID NO: 2861997 - RNA, 19 nt, Artificial Sequence
  Description of Artificial Sequence: Synthetic oligonucleotide
accugauucuauaauggaa

SEQ ID NO: 2861998 - RNA, 19 nt, Artificial Sequence
  Description of Artificial Sequence: Synthetic oligonucleotide
agacuuaagcuuaaucauu

SEQ ID NO: 2861999 - RNA, 19 nt, Artificial Sequence
  Description of Artificial Sequence: Synthetic oligonucleotide
ggcgauucuuauaacagca

SEQ ID NO: 2862000 - RNA, 19 nt, Artificial Sequence
  Description of Artificial Sequence: Synthetic oligonucleotide
aacuacagaagggucccuu

SEQ ID NO: 2862001 - RNA, 19 nt, Artificial Sequence
  Description of Artificial Sequence: Synthetic oligonucleotide
cuagucugugaaugucuuc

SEQ ID NO: 2862002 - RNA, 19 nt, Artificial Sequence
  Description of Artificial Sequence: Synthetic oligonucleotide
cacuaauuucuagucugug

SEQ ID NO: 2862003 - RNA, 19 nt, Artificial Sequence
  Description of Artificial Sequence: Synthetic oligonucleotide
gccauuaauagccguuaug

SEQ ID NO: 2862004 - RNA, 19 nt, Artificial Sequence
  Description of Artificial Sequence: Synthetic oligonucleotide
auagccguuaugacaguga

SEQ ID NO: 2862005 - RNA, 19 nt, Artificial Sequence
  Description of Artificial Sequence: Synthetic oligonucleotide
gggcgauucuuauaacagc

SEQ ID NO: 2862006 - RNA, 19 nt, Artificial Sequence
  Description of Artificial Sequence: Synthetic oligonucleotide
ccaagugccaucaaagaaa

SEQ ID NO: 2862007 - RNA, 19 nt, Artificial Sequence
  Description of Artificial Sequence: Synthetic oligonucleotide
acagcacauuuauguuaag

SEQ ID NO: 2862008 - RNA, 19 nt, Artificial Sequence
  Description of Artificial Sequence: Synthetic oligonucleotide
gacuuaagcuuaaucauuu

SEQ ID NO: 2862009 - RNA, 19 nt, Artificial Sequence
  Description of Artificial Sequence: Synthetic oligonucleotide
caauauucugaaagacaaa

SEQ ID NO: 2862010 - RNA, 19 nt, Artificial Sequence
  Description of Artificial Sequence: Synthetic oligonucleotide
acacuaauuucuagucugu

SEQ ID NO: 2862011 - RNA, 19 nt, Artificial Sequence
  Description of Artificial Sequence: Synthetic oligonucleotide
cugauucuauaauggaacu

SEQ ID NO: 2862012 - RNA, 19 nt, Artificial Sequence
  Description of Artificial Sequence: Synthetic oligonucleotide
caccaagugccaucaaaga

SEQ ID NO: 2862013 - RNA, 19 nt, Artificial Sequence
  Description of Artificial Sequence: Synthetic oligonucleotide
ucacaggcuaaagcaacau

SEQ ID NO: 2862014 - RNA, 19 nt, Artificial Sequence
  Description of Artificial Sequence: Synthetic oligonucleotide
agccauuaauagccguuau

SEQ ID NO: 2862015 - RNA, 19 nt, Artificial Sequence
  Description of Artificial Sequence: Synthetic oligonucleotide
uaauagccguuaugacagu

SEQ ID NO: 2862016 - RNA, 19 nt, Artificial Sequence
  Description of Artificial Sequence: Synthetic oligonucleotide
cucuaaugauuagaagaga

SEQ ID NO: 2862017 - RNA, 19 nt, Artificial Sequence
  Description of Artificial Sequence: Synthetic oligonucleotide
uaccauuauuaaggcaaaa

SEQ ID NO: 2862018 - RNA, 19 nt, Artificial Sequence
  Description of Artificial Sequence: Synthetic oligonucleotide
auguuaaguuugaaggauu

SEQ ID NO: 2862019 - RNA, 19 nt, Artificial Sequence
  Description of Artificial Sequence: Synthetic oligonucleotide
ggauacaccaagugccauc

SEQ ID NO: 2862020 - RNA, 19 nt, Artificial Sequence
  Description of Artificial Sequence: Synthetic oligonucleotide
ggucccuuuaaggaaauaa

SEQ ID NO: 2862021 - RNA, 19 nt, Artificial Sequence
  Description of Artificial Sequence: Synthetic oligonucleotide
ccaucucuuaccauuauua

SEQ ID NO: 2862022 - RNA, 19 nt, Artificial Sequence
  Description of Artificial Sequence: Synthetic oligonucleotide
ccaccucuaaggauuuuag

SEQ ID NO: 2862023 - RNA, 19 nt, Artificial Sequence
  Description of Artificial Sequence: Synthetic oligonucleotide
aagccaucucuuaccauua

SEQ ID NO: 2862024 - RNA, 19 nt, Artificial Sequence
  Description of Artificial Sequence: Synthetic oligonucleotide
caccucuaaggauuuuaga

SEQ ID NO: 2862025 - RNA, 19 nt, Artificial Sequence
  Description of Artificial Sequence: Synthetic oligonucleotide
cagaccaccucuaaggauu

SEQ ID NO: 2862026 - RNA, 19 nt, Artificial Sequence
  Description of Artificial Sequence: Synthetic oligonucleotide
cuaagugauguucucuaau

SEQ ID NO: 2862027 - RNA, 19 nt, Artificial Sequence
  Description of Artificial Sequence: Synthetic oligonucleotide
accaccucuaaggauuuua

SEQ ID NO: 2862028 - RNA, 19 nt, Artificial Sequence
  Description of Artificial Sequence: Synthetic oligonucleotide
gagcuuuucacaggcuaaa

SEQ ID NO: 2862029 - RNA, 19 nt, Artificial Sequence
  Description of Artificial Sequence: Synthetic oligonucleotide
guggauacaccaagugcca

SEQ ID NO: 2862030 - RNA, 19 nt, Artificial Sequence
  Description of Artificial Sequence: Synthetic oligonucleotide
uggauacaccaagugccau

SEQ ID NO: 2862031 - RNA, 19 nt, Artificial Sequence
  Description of Artificial Sequence: Synthetic oligonucleotide
aagagggaaggcagacaau

SEQ ID NO: 2862032 - RNA, 19 nt, Artificial Sequence
  Description of Artificial Sequence: Synthetic oligonucleotide
gcugcaagcuaagugaugu

SEQ ID NO: 2862033 - RNA, 19 nt, Artificial Sequence
  Description of Artificial Sequence: Synthetic oligonucleotide
cauuaacagaguggauaca

SEQ ID NO: 2862034 - RNA, 19 nt, Artificial Sequence
  Description of Artificial Sequence: Synthetic oligonucleotide
cuacagaagggucccuuua

SEQ ID NO: 2862035 - RNA, 19 nt, Artificial Sequence
  Description of Artificial Sequence: Synthetic oligonucleotide
agccaucucuuaccauuau

SEQ ID NO: 2862036 - RNA, 19 nt, Artificial Sequence
  Description of Artificial Sequence: Synthetic oligonucleotide
cgauucuuauaacagcaca

SEQ ID NO: 2862037 - RNA, 19 nt, Artificial Sequence
  Description of Artificial Sequence: Synthetic oligonucleotide
ggaacucguaaaauuugaa

SEQ ID NO: 2862038 - RNA, 19 nt, Artificial Sequence
  Description of Artificial Sequence: Synthetic oligonucleotide
cguuaugacagugauuaca

SEQ ID NO: 2862039 - RNA, 19 nt, Artificial Sequence
  Description of Artificial Sequence: Synthetic oligonucleotide
gcuaagugauguucucuaa

SEQ ID NO: 2862040 - RNA, 19 nt, Artificial Sequence
  Description of Artificial Sequence: Synthetic oligonucleotide
cagaguggauacaccaagu

SEQ ID NO: 2862041 - RNA, 19 nt, Artificial Sequence
  Description of Artificial Sequence: Synthetic oligonucleotide
gucuucagaccaccucuaa

SEQ ID NO: 2862042 - RNA, 19 nt, Artificial Sequence
  Description of Artificial Sequence: Synthetic oligonucleotide
guuaaguuugaaggauuau

SEQ ID NO: 2862043 - RNA, 19 nt, Artificial Sequence
  Description of Artificial Sequence: Synthetic oligonucleotide
gggagcuaaagccauuaau

SEQ ID NO: 2862044 - RNA, 19 nt, Artificial Sequence
  Description of Artificial Sequence: Synthetic oligonucleotide
gcgauucuuauaacagcac

SEQ ID NO: 2862045 - RNA, 19 nt, Artificial Sequence
  Description of Artificial Sequence: Synthetic oligonucleotide
gaaugucuucagaccaccu

SEQ ID NO: 2862046 - RNA, 19 nt, Artificial Sequence
  Description of Artificial Sequence: Synthetic oligonucleotide
gcacacuaauuucuagucu

SEQ ID NO: 2862047 - RNA, 19 nt, Artificial Sequence
  Description of Artificial Sequence: Synthetic oligonucleotide
auacaccaagugccaucaa

SEQ ID NO: 2862048 - RNA, 19 nt, Artificial Sequence
  Description of Artificial Sequence: Synthetic oligonucleotide
cuaaagcaacaugggagcu

SEQ ID NO: 2862049 - RNA, 19 nt, Artificial Sequence
  Description of Artificial Sequence: Synthetic oligonucleotide
gcaagcuaagugauguucu

SEQ ID NO: 2862050 - RNA, 19 nt, Artificial Sequence
  Description of Artificial Sequence: Synthetic oligonucleotide
gcuuaaucauuuucuguuu

SEQ ID NO: 2862051 - RNA, 19 nt, Artificial Sequence
  Description of Artificial Sequence: Synthetic oligonucleotide
cacgguucauuaacagagu

SEQ ID NO: 2862052 - RNA, 19 nt, Artificial Sequence
  Description of Artificial Sequence: Synthetic oligonucleotide
ccucuaaggauuuuagauu

SEQ ID NO: 2862053 - RNA, 19 nt, Artificial Sequence
  Description of Artificial Sequence: Synthetic oligonucleotide
agaccaccucuaaggauuu

SEQ ID NO: 2862054 - RNA, 19 nt, Artificial Sequence
  Description of Artificial Sequence: Synthetic oligonucleotide
ggcagacaauauucugaaa

SEQ ID NO: 2862055 - RNA, 19 nt, Artificial Sequence
  Description of Artificial Sequence: Synthetic oligonucleotide
guucauuaacagaguggau

SEQ ID NO: 2862056 - RNA, 19 nt, Artificial Sequence
  Description of Artificial Sequence: Synthetic oligonucleotide
agccguuaugacagugauu

SEQ ID NO: 2862057 - RNA, 19 nt, Artificial Sequence
  Description of Artificial Sequence: Synthetic oligonucleotide
caaaagacuuaagcuuaau

SEQ ID NO: 2862058 - RNA, 19 nt, Artificial Sequence
  Description of Artificial Sequence: Synthetic oligonucleotide
ccguuaugacagugauuac

SEQ ID NO: 2862059 - RNA, 19 nt, Artificial Sequence
  Description of Artificial Sequence: Synthetic oligonucleotide
caaagccaucucuuaccau

SEQ ID NO: 2862060 - RNA, 19 nt, Artificial Sequence
  Description of Artificial Sequence: Synthetic oligonucleotide
agggucccuuuaaggaaau

SEQ ID NO: 2862061 - RNA, 19 nt, Artificial Sequence
  Description of Artificial Sequence: Synthetic oligonucleotide
aagcaacaugggagcuaaa

SEQ ID NO: 2862062 - RNA, 19 nt, Artificial Sequence
  Description of Artificial Sequence: Synthetic oligonucleotide
gaacuacagaagggucccu

SEQ ID NO: 2862063 - RNA, 19 nt, Artificial Sequence
  Description of Artificial Sequence: Synthetic oligonucleotide
caugggagcuaaagccauu

SEQ ID NO: 2862064 - RNA, 19 nt, Artificial Sequence
  Description of Artificial Sequence: Synthetic oligonucleotide
gccaucucuuaccauuauu

SEQ ID NO: 2862065 - RNA, 19 nt, Artificial Sequence
  Description of Artificial Sequence: Synthetic oligonucleotide
cugcaagcuaagugauguu

SEQ ID NO: 2862066 - RNA, 19 nt, Artificial Sequence
  Description of Artificial Sequence: Synthetic oligonucleotide
gaccaccucuaaggauuuu

SEQ ID NO: 2862067 - RNA, 19 nt, Artificial Sequence
  Description of Artificial Sequence: Synthetic oligonucleotide
gggucccuuuaaggaaaua

SEQ ID NO: 2862068 - RNA, 19 nt, Artificial Sequence
  Description of Artificial Sequence: Synthetic oligonucleotide
gccuuugaacacgguucau

SEQ ID NO: 2862069 - RNA, 19 nt, Artificial Sequence
  Description of Artificial Sequence: Synthetic oligonucleotide
gauucaaucaaggcgaugg

SEQ ID NO: 2862070 - RNA, 19 nt, Artificial Sequence
  Description of Artificial Sequence: Synthetic oligonucleotide
uauggaguucucuucaugg

SEQ ID NO: 2862071 - RNA, 19 nt, Artificial Sequence
  Description of Artificial Sequence: Synthetic oligonucleotide
guucuuauucuccaggugg

SEQ ID NO: 2862072 - RNA, 19 nt, Artificial Sequence
  Description of Artificial Sequence: Synthetic oligonucleotide
cuucauuuccguuagguag

SEQ ID NO: 2862073 - RNA, 19 nt, Artificial Sequence
  Description of Artificial Sequence: Synthetic oligonucleotide
ucagcaaacuucauuuccg

SEQ ID NO: 2862074 - RNA, 19 nt, Artificial Sequence
  Description of Artificial Sequence: Synthetic oligonucleotide
ugggauucaaucaaggcga

SEQ ID NO: 2862075 - RNA, 19 nt, Artificial Sequence
  Description of Artificial Sequence: Synthetic oligonucleotide
auaaagcuggauuugcccg

SEQ ID NO: 2862076 - RNA, 19 nt, Artificial Sequence
  Description of Artificial Sequence: Synthetic oligonucleotide
uuuugaagugggaaggaag

SEQ ID NO: 2862077 - RNA, 19 nt, Artificial Sequence
  Description of Artificial Sequence: Synthetic oligonucleotide
ucagagaggauuuugcucu

SEQ ID NO: 2862078 - RNA, 19 nt, Artificial Sequence
  Description of Artificial Sequence: Synthetic oligonucleotide
gugggauucaaucaaggcg

SEQ ID NO: 2862079 - RNA, 19 nt, Artificial Sequence
  Description of Artificial Sequence: Synthetic oligonucleotide
aagguucuuauucuccagg

SEQ ID NO: 2862080 - RNA, 19 nt, Artificial Sequence
  Description of Artificial Sequence: Synthetic oligonucleotide
gauaaagcuggauuugccc

SEQ ID NO: 2862081 - RNA, 19 nt, Artificial Sequence
  Description of Artificial Sequence: Synthetic oligonucleotide
uuugaagugggaaggaagu

SEQ ID NO: 2862082 - RNA, 19 nt, Artificial Sequence
  Description of Artificial Sequence: Synthetic oligonucleotide
uuagguaguuuugaagugg

SEQ ID NO: 2862083 - RNA, 19 nt, Artificial Sequence
  Description of Artificial Sequence: Synthetic oligonucleotide
uuuaguggggcucugucga

SEQ ID NO: 2862084 - RNA, 19 nt, Artificial Sequence
  Description of Artificial Sequence: Synthetic oligonucleotide
uucuuauucuccagguggg

SEQ ID NO: 2862085 - RNA, 19 nt, Artificial Sequence
  Description of Artificial Sequence: Synthetic oligonucleotide
guaguuuugaagugggaag

SEQ ID NO: 2862086 - RNA, 19 nt, Artificial Sequence
  Description of Artificial Sequence: Synthetic oligonucleotide
aaaagucguacucagcaaa

SEQ ID NO: 2862087 - RNA, 19 nt, Artificial Sequence
  Description of Artificial Sequence: Synthetic oligonucleotide
agggcauugauaaagcugg

SEQ ID NO: 2862088 - RNA, 19 nt, Artificial Sequence
  Description of Artificial Sequence: Synthetic oligonucleotide
ugaagugggaaggaagugg

SEQ ID NO: 2862089 - RNA, 19 nt, Artificial Sequence
  Description of Artificial Sequence: Synthetic oligonucleotide
uagguaguuuugaaguggg

SEQ ID NO: 2862090 - RNA, 19 nt, Artificial Sequence
  Description of Artificial Sequence: Synthetic oligonucleotide
uucuuuucaucccacacuc

SEQ ID NO: 2862091 - RNA, 19 nt, Artificial Sequence
  Description of Artificial Sequence: Synthetic oligonucleotide
uaguuuugaagugggaagg

SEQ ID NO: 2862092 - RNA, 19 nt, Artificial Sequence
  Description of Artificial Sequence: Synthetic oligonucleotide
uguuucucccgucaccgcg

SEQ ID NO: 2862093 - RNA, 19 nt, Artificial Sequence
  Description of Artificial Sequence: Synthetic oligonucleotide
ucagugucuuugaagcggg

SEQ ID NO: 2862094 - RNA, 19 nt, Artificial Sequence
  Description of Artificial Sequence: Synthetic oligonucleotide
ucaaucaaggcgaugguuu

SEQ ID NO: 2862095 - RNA, 19 nt, Artificial Sequence
  Description of Artificial Sequence: Synthetic oligonucleotide
gguagcugaaaugauaacg

SEQ ID NO: 2862096 - RNA, 19 nt, Artificial Sequence
  Description of Artificial Sequence: Synthetic oligonucleotide
aaggcgaugguuuccucag

SEQ ID NO: 2862097 - RNA, 19 nt, Artificial Sequence
  Description of Artificial Sequence: Synthetic oligonucleotide
ugauaaagcuggauuugcc

SEQ ID NO: 2862098 - RNA, 19 nt, Artificial Sequence
  Description of Artificial Sequence: Synthetic oligonucleotide
uacucagcaaacuucauuu

SEQ ID NO: 2862099 - RNA, 19 nt, Artificial Sequence
  Description of Artificial Sequence: Synthetic oligonucleotide
gucucugucaccccagucg

SEQ ID NO: 2862100 - RNA, 19 nt, Artificial Sequence
  Description of Artificial Sequence: Synthetic oligonucleotide
aaagucguacucagcaaac

SEQ ID NO: 2862101 - RNA, 19 nt, Artificial Sequence
  Description of Artificial Sequence: Synthetic oligonucleotide
ucccacacuccuuucaggg

SEQ ID NO: 2862102 - RNA, 19 nt, Artificial Sequence
  Description of Artificial Sequence: Synthetic oligonucleotide
uucauuuccguuagguagu

SEQ ID NO: 2862103 - RNA, 19 nt, Artificial Sequence
  Description of Artificial Sequence: Synthetic oligonucleotide
aaucaaggcgaugguuucc

SEQ ID NO: 2862104 - RNA, 19 nt, Artificial Sequence
  Description of Artificial Sequence: Synthetic oligonucleotide
caaacuucauuuccguuag

SEQ ID NO: 2862105 - RNA, 19 nt, Artificial Sequence
  Description of Artificial Sequence: Synthetic oligonucleotide
cucagcaaacuucauuucc

SEQ ID NO: 2862106 - RNA, 19 nt, Artificial Sequence
  Description of Artificial Sequence: Synthetic oligonucleotide
ucguacucagcaaacuuca

SEQ ID NO: 2862107 - RNA, 19 nt, Artificial Sequence
  Description of Artificial Sequence: Synthetic oligonucleotide
aacuucauuuccguuaggu

SEQ ID NO: 2862108 - RNA, 19 nt, Artificial Sequence
  Description of Artificial Sequence: Synthetic oligonucleotide
ucgcugauugcagaaacgg

SEQ ID NO: 2862109 - RNA, 19 nt, Artificial Sequence
  Description of Artificial Sequence: Synthetic oligonucleotide
uuuggguguguguauggag

SEQ ID NO: 2862110 - RNA, 19 nt, Artificial Sequence
  Description of Artificial Sequence: Synthetic oligonucleotide
gcaucagugucuuugaagc

SEQ ID NO: 2862111 - RNA, 19 nt, Artificial Sequence
  Description of Artificial Sequence: Synthetic oligonucleotide
aucagugucuuugaagcgg

SEQ ID NO: 2862112 - RNA, 19 nt, Artificial Sequence
  Description of Artificial Sequence: Synthetic oligonucleotide
uccgggaagguucuuauuc

SEQ ID NO: 2862113 - RNA, 19 nt, Artificial Sequence
  Description of Artificial Sequence: Synthetic oligonucleotide
guuuaguggggcucugucg

SEQ ID NO: 2862114 - RNA, 19 nt, Artificial Sequence
  Description of Artificial Sequence: Synthetic oligonucleotide
gauuuugcucuccuucuug

SEQ ID NO: 2862115 - RNA, 19 nt, Artificial Sequence
  Description of Artificial Sequence: Synthetic oligonucleotide
auuuccguuagguaguuuu

SEQ ID NO: 2862116 - RNA, 19 nt, Artificial Sequence
  Description of Artificial Sequence: Synthetic oligonucleotide
uuggguguguguauggagu

SEQ ID NO: 2862117 - RNA, 19 nt, Artificial Sequence
  Description of Artificial Sequence: Synthetic oligonucleotide
aaagcuggauuugcccgcc

SEQ ID NO: 2862118 - RNA, 19 nt, Artificial Sequence
  Description of Artificial Sequence: Synthetic oligonucleotide
gaggauuuugcucuccuuc

SEQ ID NO: 2862119 - RNA, 19 nt, Artificial Sequence
  Description of Artificial Sequence: Synthetic oligonucleotide
guuagguaguuuugaagug

SEQ ID NO: 2862120 - RNA, 19 nt, Artificial Sequence
  Description of Artificial Sequence: Synthetic oligonucleotide
uuucucagagcaucgcuga

SEQ ID NO: 2862121 - RNA, 19 nt, Artificial Sequence
  Description of Artificial Sequence: Synthetic oligonucleotide
uaaagcuggauuugcccgc

SEQ ID NO: 2862122 - RNA, 19 nt, Artificial Sequence
  Description of Artificial Sequence: Synthetic oligonucleotide
uugauaaagcuggauuugc

SEQ ID NO: 2862123 - RNA, 19 nt, Artificial Sequence
  Description of Artificial Sequence: Synthetic oligonucleotide
gucaccgcgauguuuagug

SEQ ID NO: 2862124 - RNA, 19 nt, Artificial Sequence
  Description of Artificial Sequence: Synthetic oligonucleotide
gacugugggaagcuuuggg

SEQ ID NO: 2862125 - RNA, 19 nt, Artificial Sequence
  Description of Artificial Sequence: Synthetic oligonucleotide
gugucuuugaagcggguag

SEQ ID NO: 2862126 - RNA, 19 nt, Artificial Sequence
  Description of Artificial Sequence: Synthetic oligonucleotide
auugauaaagcuggauuug

SEQ ID NO: 2862127 - RNA, 19 nt, Artificial Sequence
  Description of Artificial Sequence: Synthetic oligonucleotide
cauauugugacugugggaa

SEQ ID NO: 2862128 - RNA, 19 nt, Artificial Sequence
  Description of Artificial Sequence: Synthetic oligonucleotide
uuuccguuagguaguuuug

SEQ ID NO: 2862129 - RNA, 19 nt, Artificial Sequence
  Description of Artificial Sequence: Synthetic oligonucleotide
uucaugguugucucuguca

SEQ ID NO: 2862130 - RNA, 19 nt, Artificial Sequence
  Description of Artificial Sequence: Synthetic oligonucleotide
uguguauggaguucucuuc

SEQ ID NO: 2862131 - RNA, 19 nt, Artificial Sequence
  Description of Artificial Sequence: Synthetic oligonucleotide
gaagguucuuauucuccag

SEQ ID NO: 2862132 - RNA, 19 nt, Artificial Sequence
  Description of Artificial Sequence: Synthetic oligonucleotide
uauugugacugugggaagc

SEQ ID NO: 2862133 - RNA, 19 nt, Artificial Sequence
  Description of Artificial Sequence: Synthetic oligonucleotide
aacggcuccgggaagguuc

SEQ ID NO: 2862134 - RNA, 19 nt, Artificial Sequence
  Description of Artificial Sequence: Synthetic oligonucleotide
uccaggugggauucaauca

SEQ ID NO: 2862135 - RNA, 19 nt, Artificial Sequence
  Description of Artificial Sequence: Synthetic oligonucleotide
ucugucaccccagucgggg

SEQ ID NO: 2862136 - RNA, 19 nt, Artificial Sequence
  Description of Artificial Sequence: Synthetic oligonucleotide
cucagagcaucgcugauug

SEQ ID NO: 2862137 - RNA, 19 nt, Artificial Sequence
  Description of Artificial Sequence: Synthetic oligonucleotide
aagcggguagcugaaauga

SEQ ID NO: 2862138 - RNA, 19 nt, Artificial Sequence
  Description of Artificial Sequence: Synthetic oligonucleotide
ugauugcagaaacggcucc

SEQ ID NO: 2862139 - RNA, 19 nt, Artificial Sequence
  Description of Artificial Sequence: Synthetic oligonucleotide
cugucgacguuucucagag

SEQ ID NO: 2862140 - RNA, 19 nt, Artificial Sequence
  Description of Artificial Sequence: Synthetic oligonucleotide
gucgacguuucucagagca

SEQ ID NO: 2862141 - RNA, 19 nt, Artificial Sequence
  Description of Artificial Sequence: Synthetic oligonucleotide
cagggcauugauaaagcug

SEQ ID NO: 2862142 - RNA, 19 nt, Artificial Sequence
  Description of Artificial Sequence: Synthetic oligonucleotide
cuuugaagcggguagcuga

SEQ ID NO: 2862143 - RNA, 19 nt, Artificial Sequence
  Description of Artificial Sequence: Synthetic oligonucleotide
guagcugaaaugauaacga

SEQ ID NO: 2862144 - RNA, 19 nt, Artificial Sequence
  Description of Artificial Sequence: Synthetic oligonucleotide
gaagcggguagcugaaaug

SEQ ID NO: 2862145 - RNA, 19 nt, Artificial Sequence
  Description of Artificial Sequence: Synthetic oligonucleotide
acucagcaaacuucauuuc

SEQ ID NO: 2862146 - RNA, 19 nt, Artificial Sequence
  Description of Artificial Sequence: Synthetic oligonucleotide
gauugcagaaacggcuccg

SEQ ID NO: 2862147 - RNA, 19 nt, Artificial Sequence
  Description of Artificial Sequence: Synthetic oligonucleotide
ugugggaagcuuugggugu

SEQ ID NO: 2862148 - RNA, 19 nt, Artificial Sequence
  Description of Artificial Sequence: Synthetic oligonucleotide
ugcagaaacggcuccggga

SEQ ID NO: 2862149 - RNA, 19 nt, Artificial Sequence
  Description of Artificial Sequence: Synthetic oligonucleotide
uguuuaguggggcucuguc

SEQ ID NO: 2862150 - RNA, 19 nt, Artificial Sequence
  Description of Artificial Sequence: Synthetic oligonucleotide
ugugcaucagugucuuuga

SEQ ID NO: 2862151 - RNA, 19 nt, Artificial Sequence
  Description of Artificial Sequence: Synthetic oligonucleotide
aaacuucauuuccguuagg

SEQ ID NO: 2862152 - RNA, 19 nt, Artificial Sequence
  Description of Artificial Sequence: Synthetic oligonucleotide
agcuggauuugcccgcccc

SEQ ID NO: 2862153 - RNA, 19 nt, Artificial Sequence
  Description of Artificial Sequence: Synthetic oligonucleotide
uuucaucccacacuccuuu

SEQ ID NO: 2862154 - RNA, 19 nt, Artificial Sequence
  Description of Artificial Sequence: Synthetic oligonucleotide
ucucccgucaccgcgaugu

SEQ ID NO: 2862155 - RNA, 19 nt, Artificial Sequence
  Description of Artificial Sequence: Synthetic oligonucleotide
caucagugucuuugaagcg

SEQ ID NO: 2862156 - RNA, 19 nt, Artificial Sequence
  Description of Artificial Sequence: Synthetic oligonucleotide
cugugggaagcuuugggug

SEQ ID NO: 2862157 - RNA, 19 nt, Artificial Sequence
  Description of Artificial Sequence: Synthetic oligonucleotide
uggacccaaugccaggcag

SEQ ID NO: 2862158 - RNA, 19 nt, Artificial Sequence
  Description of Artificial Sequence: Synthetic oligonucleotide
ugaagcggguagcugaaau

SEQ ID NO: 2862159 - RNA, 19 nt, Artificial Sequence
  Description of Artificial Sequence: Synthetic oligonucleotide
auuugcccgccccuguuuc

SEQ ID NO: 2862160 - RNA, 19 nt, Artificial Sequence
  Description of Artificial Sequence: Synthetic oligonucleotide
agaaacggcuccgggaagg

SEQ ID NO: 2862161 - RNA, 19 nt, Artificial Sequence
  Description of Artificial Sequence: Synthetic oligonucleotide
agguucuuauucuccaggu

SEQ ID NO: 2862162 - RNA, 19 nt, Artificial Sequence
  Description of Artificial Sequence: Synthetic oligonucleotide
ucuuuucaucccacacucc

SEQ ID NO: 2862163 - RNA, 19 nt, Artificial Sequence
  Description of Artificial Sequence: Synthetic oligonucleotide
uuugaagcggguagcugaa

SEQ ID NO: 2862164 - RNA, 19 nt, Artificial Sequence
  Description of Artificial Sequence: Synthetic oligonucleotide
cugauugcagaaacggcuc

SEQ ID NO: 2862165 - RNA, 19 nt, Artificial Sequence
  Description of Artificial Sequence: Synthetic oligonucleotide
gacguuucucagagcaucg

SEQ ID NO: 2862166 - RNA, 19 nt, Artificial Sequence
  Description of Artificial Sequence: Synthetic oligonucleotide
auauugugacugugggaag

SEQ ID NO: 2862167 - RNA, 19 nt, Artificial Sequence
  Description of Artificial Sequence: Synthetic oligonucleotide
caccgcgauguuuaguggg

SEQ ID NO: 2862168 - RNA, 19 nt, Artificial Sequence
  Description of Artificial Sequence: Synthetic oligonucleotide
ucugucgacguuucucaga

SEQ ID NO: 2862169 - RNA, 19 nt, Artificial Sequence
  Description of Artificial Sequence: Synthetic oligonucleotide
gcugaaaugauaacgaaaa

SEQ ID NO: 2862170 - RNA, 19 nt, Artificial Sequence
  Description of Artificial Sequence: Synthetic oligonucleotide
ucagggcauugauaaagcu

SEQ ID NO: 2862171 - RNA, 19 nt, Artificial Sequence
  Description of Artificial Sequence: Synthetic oligonucleotide
uuauucuccaggugggauu

SEQ ID NO: 2862172 - RNA, 19 nt, Artificial Sequence
  Description of Artificial Sequence: Synthetic oligonucleotide
guuucucagagcaucgcug

SEQ ID NO: 2862173 - RNA, 19 nt, Artificial Sequence
  Description of Artificial Sequence: Synthetic oligonucleotide
caucgcugauugcagaaac

SEQ ID NO: 2862174 - RNA, 19 nt, Artificial Sequence
  Description of Artificial Sequence: Synthetic oligonucleotide
ugucuuugaagcggguagc

SEQ ID NO: 2862175 - RNA, 19 nt, Artificial Sequence
  Description of Artificial Sequence: Synthetic oligonucleotide
uggaguucucuucaugguu

SEQ ID NO: 2862176 - RNA, 19 nt, Artificial Sequence
  Description of Artificial Sequence: Synthetic oligonucleotide
cccaaugccaggcaggucc

SEQ ID NO: 2862177 - RNA, 19 nt, Artificial Sequence
  Description of Artificial Sequence: Synthetic oligonucleotide
ucaccgcgauguuuagugg

SEQ ID NO: 2862178 - RNA, 19 nt, Artificial Sequence
  Description of Artificial Sequence: Synthetic oligonucleotide
gaagugggaaggaagugga

SEQ ID NO: 2862179 - RNA, 19 nt, Artificial Sequence
  Description of Artificial Sequence: Synthetic oligonucleotide
ugcgccuucuuuucauccc

SEQ ID NO: 2862180 - RNA, 19 nt, Artificial Sequence
  Description of Artificial Sequence: Synthetic oligonucleotide
uagcugaaaugauaacgaa

SEQ ID NO: 2862181 - RNA, 19 nt, Artificial Sequence
  Description of Artificial Sequence: Synthetic oligonucleotide
guauggaguucucuucaug

SEQ ID NO: 2862182 - RNA, 19 nt, Artificial Sequence
  Description of Artificial Sequence: Synthetic oligonucleotide
acuucauuuccguuaggua

SEQ ID NO: 2862183 - RNA, 19 nt, Artificial Sequence
  Description of Artificial Sequence: Synthetic oligonucleotide
uugaagugggaaggaagug

SEQ ID NO: 2862184 - RNA, 19 nt, Artificial Sequence
  Description of Artificial Sequence: Synthetic oligonucleotide
aagcuggauuugcccgccc

SEQ ID NO: 2862185 - RNA, 19 nt, Artificial Sequence
  Description of Artificial Sequence: Synthetic oligonucleotide
auggaguucucuucauggu

SEQ ID NO: 2862186 - RNA, 19 nt, Artificial Sequence
  Description of Artificial Sequence: Synthetic oligonucleotide
uauucuccaggugggauuc

SEQ ID NO: 2862187 - RNA, 19 nt, Artificial Sequence
  Description of Artificial Sequence: Synthetic oligonucleotide
guguauggaguucucuuca

SEQ ID NO: 2862188 - RNA, 19 nt, Artificial Sequence
  Description of Artificial Sequence: Synthetic oligonucleotide
agucguacucagcaaacuu

SEQ ID NO: 2862189 - RNA, 19 nt, Artificial Sequence
  Description of Artificial Sequence: Synthetic oligonucleotide
aucccacacuccuuucagg

SEQ ID NO: 2862190 - RNA, 19 nt, Artificial Sequence
  Description of Artificial Sequence: Synthetic oligonucleotide
uguguguauggaguucucu

SEQ ID NO: 2862191 - RNA, 19 nt, Artificial Sequence
  Description of Artificial Sequence: Synthetic oligonucleotide
uccguuagguaguuuugaa

SEQ ID NO: 2862192 - RNA, 19 nt, Artificial Sequence
  Description of Artificial Sequence: Synthetic oligonucleotide
caucccacacuccuuucag

SEQ ID NO: 2862193 - RNA, 19 nt, Artificial Sequence
  Description of Artificial Sequence: Synthetic oligonucleotide
uuuucaucccacacuccuu

SEQ ID NO: 2862194 - RNA, 19 nt, Artificial Sequence
  Description of Artificial Sequence: Synthetic oligonucleotide
cucuucaugguugucucug

SEQ ID NO: 2862195 - RNA, 19 nt, Artificial Sequence
  Description of Artificial Sequence: Synthetic oligonucleotide
uuccguuagguaguuuuga

SEQ ID NO: 2862196 - RNA, 19 nt, Artificial Sequence
  Description of Artificial Sequence: Synthetic oligonucleotide
cauugauaaagcuggauuu

SEQ ID NO: 2862197 - RNA, 19 nt, Artificial Sequence
  Description of Artificial Sequence: Synthetic oligonucleotide
ucuuugaagcggguagcug

SEQ ID NO: 2862198 - RNA, 19 nt, Artificial Sequence
  Description of Artificial Sequence: Synthetic oligonucleotide
cccauauugugacuguggg

SEQ ID NO: 2862199 - RNA, 19 nt, Artificial Sequence
  Description of Artificial Sequence: Synthetic oligonucleotide
uguauggaguucucuucau

SEQ ID NO: 2862200 - RNA, 19 nt, Artificial Sequence
  Description of Artificial Sequence: Synthetic oligonucleotide
acguuucucagagcaucgc

SEQ ID NO: 2862201 - RNA, 19 nt, Artificial Sequence
  Description of Artificial Sequence: Synthetic oligonucleotide
aucgcugauugcagaaacg

SEQ ID NO: 2862202 - RNA, 19 nt, Artificial Sequence
  Description of Artificial Sequence: Synthetic oligonucleotide
cugcgccuucuuuucaucc

SEQ ID NO: 2862203 - RNA, 19 nt, Artificial Sequence
  Description of Artificial Sequence: Synthetic oligonucleotide
aggugggauucaaucaagg

SEQ ID NO: 2862204 - RNA, 19 nt, Artificial Sequence
  Description of Artificial Sequence: Synthetic oligonucleotide
agcugaaaugauaacgaaa

SEQ ID NO: 2862205 - RNA, 19 nt, Artificial Sequence
  Description of Artificial Sequence: Synthetic oligonucleotide
aggucccauauugugacug

SEQ ID NO: 2862206 - RNA, 19 nt, Artificial Sequence
  Description of Artificial Sequence: Synthetic oligonucleotide
aguuuugaagugggaagga

SEQ ID NO: 2862207 - RNA, 19 nt, Artificial Sequence
  Description of Artificial Sequence: Synthetic oligonucleotide
caggugggauucaaucaag

SEQ ID NO: 2862208 - RNA, 19 nt, Artificial Sequence
  Description of Artificial Sequence: Synthetic oligonucleotide
gcaaacuucauuuccguua

SEQ ID NO: 2862209 - RNA, 19 nt, Artificial Sequence
  Description of Artificial Sequence: Synthetic oligonucleotide
ugucaccccagucggggcu

SEQ ID NO: 2862210 - RNA, 19 nt, Artificial Sequence
  Description of Artificial Sequence: Synthetic oligonucleotide
ggaguucucuucaugguug

SEQ ID NO: 2862211 - RNA, 19 nt, Artificial Sequence
  Description of Artificial Sequence: Synthetic oligonucleotide
ucuuauucuccagguggga

SEQ ID NO: 2862212 - RNA, 19 nt, Artificial Sequence
  Description of Artificial Sequence: Synthetic oligonucleotide
uucaaucaaggcgaugguu

SEQ ID NO: 2862213 - RNA, 19 nt, Artificial Sequence
  Description of Artificial Sequence: Synthetic oligonucleotide
agcaucgcugauugcagaa

SEQ ID NO: 2862214 - RNA, 19 nt, Artificial Sequence
  Description of Artificial Sequence: Synthetic oligonucleotide
gucguacucagcaaacuuc

SEQ ID NO: 2862215 - RNA, 19 nt, Artificial Sequence
  Description of Artificial Sequence: Synthetic oligonucleotide
ggaagguucuuauucucca

SEQ ID NO: 2862216 - RNA, 19 nt, Artificial Sequence
  Description of Artificial Sequence: Synthetic oligonucleotide
agagcaucgcugauugcag

SEQ ID NO: 2862217 - RNA, 19 nt, Artificial Sequence
  Description of Artificial Sequence: Synthetic oligonucleotide
uccuuucagggcauugaua

SEQ ID NO: 2862218 - RNA, 19 nt, Artificial Sequence
  Description of Artificial Sequence: Synthetic oligonucleotide
cuuuucaucccacacuccu

SEQ ID NO: 2862219 - RNA, 19 nt, Artificial Sequence
  Description of Artificial Sequence: Synthetic oligonucleotide
uaguggggcucugucgacg

SEQ ID NO: 2862220 - RNA, 19 nt, Artificial Sequence
  Description of Artificial Sequence: Synthetic oligonucleotide
ggcgaugguuuccucagag

SEQ ID NO: 2862221 - RNA, 19 nt, Artificial Sequence
  Description of Artificial Sequence: Synthetic oligonucleotide
gguucuuauucuccaggug

SEQ ID NO: 2862222 - RNA, 19 nt, Artificial Sequence
  Description of Artificial Sequence: Synthetic oligonucleotide
cagagcaucgcugauugca

SEQ ID NO: 2862223 - RNA, 19 nt, Artificial Sequence
  Description of Artificial Sequence: Synthetic oligonucleotide
ccagaugugcaucaguguc

SEQ ID NO: 2862224 - RNA, 19 nt, Artificial Sequence
  Description of Artificial Sequence: Synthetic oligonucleotide
auugugacugugggaagcu

SEQ ID NO: 2862225 - RNA, 19 nt, Artificial Sequence
  Description of Artificial Sequence: Synthetic oligonucleotide
gguaguuuugaagugggaa

SEQ ID NO: 2862226 - RNA, 19 nt, Artificial Sequence
  Description of Artificial Sequence: Synthetic oligonucleotide
aucaaggcgaugguuuccu

SEQ ID NO: 2862227 - RNA, 19 nt, Artificial Sequence
  Description of Artificial Sequence: Synthetic oligonucleotide
accgcgauguuuagugggg

SEQ ID NO: 2862228 - RNA, 19 nt, Artificial Sequence
  Description of Artificial Sequence: Synthetic oligonucleotide
uggauuugcccgccccugu

SEQ ID NO: 2862229 - RNA, 19 nt, Artificial Sequence
  Description of Artificial Sequence: Synthetic oligonucleotide
cuucaugguugucucuguc

SEQ ID NO: 2862230 - RNA, 19 nt, Artificial Sequence
  Description of Artificial Sequence: Synthetic oligonucleotide
agcaaacuucauuuccguu

SEQ ID NO: 2862231 - RNA, 19 nt, Artificial Sequence
  Description of Artificial Sequence: Synthetic oligonucleotide
caaggcgaugguuuccuca

SEQ ID NO: 2862232 - RNA, 19 nt, Artificial Sequence
  Description of Artificial Sequence: Synthetic oligonucleotide
gugacugugggaagcuuug

SEQ ID NO: 2862233 - RNA, 19 nt, Artificial Sequence
  Description of Artificial Sequence: Synthetic oligonucleotide
ccuguuucucccgucaccg

SEQ ID NO: 2862234 - RNA, 19 nt, Artificial Sequence
  Description of Artificial Sequence: Synthetic oligonucleotide
cuucuuuucaucccacacu

SEQ ID NO: 2862235 - RNA, 19 nt, Artificial Sequence
  Description of Artificial Sequence: Synthetic oligonucleotide
aguggggcucugucgacgu

SEQ ID NO: 2862236 - RNA, 19 nt, Artificial Sequence
  Description of Artificial Sequence: Synthetic oligonucleotide
acuccuuucagggcauuga

SEQ ID NO: 2862237 - RNA, 19 nt, Artificial Sequence
  Description of Artificial Sequence: Synthetic oligonucleotide
uggccagaugugcaucagu

SEQ ID NO: 2862238 - RNA, 19 nt, Artificial Sequence
  Description of Artificial Sequence: Synthetic oligonucleotide
uuaguggggcucugucgac

SEQ ID NO: 2862239 - RNA, 19 nt, Artificial Sequence
  Description of Artificial Sequence: Synthetic oligonucleotide
ccguuagguaguuuugaag

SEQ ID NO: 2862240 - RNA, 19 nt, Artificial Sequence
  Description of Artificial Sequence: Synthetic oligonucleotide
cucugucgacguuucucag

SEQ ID NO: 2862241 - RNA, 19 nt, Artificial Sequence
  Description of Artificial Sequence: Synthetic oligonucleotide
ucgacguuucucagagcau

SEQ ID NO: 2862242 - RNA, 19 nt, Artificial Sequence
  Description of Artificial Sequence: Synthetic oligonucleotide
aaugccaggcaggucccau

SEQ ID NO: 2862243 - RNA, 19 nt, Artificial Sequence
  Description of Artificial Sequence: Synthetic oligonucleotide
ucagagcaucgcugauugc

SEQ ID NO: 2862244 - RNA, 19 nt, Artificial Sequence
  Description of Artificial Sequence: Synthetic oligonucleotide
gggaagguucuuauucucc

SEQ ID NO: 2862245 - RNA, 19 nt, Artificial Sequence
  Description of Artificial Sequence: Synthetic oligonucleotide
agaggauuuugcucuccuu

SEQ ID NO: 2862246 - RNA, 19 nt, Artificial Sequence
  Description of Artificial Sequence: Synthetic oligonucleotide
uucucagagcaucgcugau

SEQ ID NO: 2862247 - RNA, 19 nt, Artificial Sequence
  Description of Artificial Sequence: Synthetic oligonucleotide
gauguuuaguggggcucug

SEQ ID NO: 2862248 - RNA, 19 nt, Artificial Sequence
  Description of Artificial Sequence: Synthetic oligonucleotide
ggccagaugugcaucagug

SEQ ID NO: 2862249 - RNA, 19 nt, Artificial Sequence
  Description of Artificial Sequence: Synthetic oligonucleotide
ucucagagcaucgcugauu

SEQ ID NO: 2862250 - RNA, 19 nt, Artificial Sequence
  Description of Artificial Sequence: Synthetic oligonucleotide
ucuccaggugggauucaau

SEQ ID NO: 2862251 - RNA, 19 nt, Artificial Sequence
  Description of Artificial Sequence: Synthetic oligonucleotide
aguucucuucaugguuguc

SEQ ID NO: 2862252 - RNA, 19 nt, Artificial Sequence
  Description of Artificial Sequence: Synthetic oligonucleotide
guuuugaagugggaaggaa

SEQ ID NO: 2862253 - RNA, 19 nt, Artificial Sequence
  Description of Artificial Sequence: Synthetic oligonucleotide
guucucuucaugguugucu

SEQ ID NO: 2862254 - RNA, 19 nt, Artificial Sequence
  Description of Artificial Sequence: Synthetic oligonucleotide
uuggccagaugugcaucag

SEQ ID NO: 2862255 - RNA, 19 nt, Artificial Sequence
  Description of Artificial Sequence: Synthetic oligonucleotide
cuguuucucccgucaccgc

SEQ ID NO: 2862256 - RNA, 19 nt, Artificial Sequence
  Description of Artificial Sequence: Synthetic oligonucleotide
gcagaaacggcuccgggaa

SEQ ID NO: 2862257 - RNA, 19 nt, Artificial Sequence
  Description of Artificial Sequence: Synthetic oligonucleotide
uucaucccacacuccuuuc

SEQ ID NO: 2862258 - RNA, 19 nt, Artificial Sequence
  Description of Artificial Sequence: Synthetic oligonucleotide
gagcaucgcugauugcaga

SEQ ID NO: 2862259 - RNA, 19 nt, Artificial Sequence
  Description of Artificial Sequence: Synthetic oligonucleotide
agugucuuugaagcgggua

SEQ ID NO: 2862260 - RNA, 19 nt, Artificial Sequence
  Description of Artificial Sequence: Synthetic oligonucleotide
gagaggauuuugcucuccu

SEQ ID NO: 2862261 - RNA, 19 nt, Artificial Sequence
  Description of Artificial Sequence: Synthetic oligonucleotide
gcucugucgacguuucuca

SEQ ID NO: 2862262 - RNA, 19 nt, Artificial Sequence
  Description of Artificial Sequence: Synthetic oligonucleotide
ugucgacguuucucagagc

SEQ ID NO: 2862263 - RNA, 19 nt, Artificial Sequence
  Description of Artificial Sequence: Synthetic oligonucleotide
gcugauugcagaaacggcu

SEQ ID NO: 2862264 - RNA, 19 nt, Artificial Sequence
  Description of Artificial Sequence: Synthetic oligonucleotide
gcauugauaaagcuggauu

SEQ ID NO: 2862265 - RNA, 19 nt, Artificial Sequence
  Description of Artificial Sequence: Synthetic oligonucleotide
cagaaacggcuccgggaag

SEQ ID NO: 2862266 - RNA, 19 nt, Artificial Sequence
  Description of Artificial Sequence: Synthetic oligonucleotide
ggacccaaugccaggcagg

SEQ ID NO: 2862267 - RNA, 19 nt, Artificial Sequence
  Description of Artificial Sequence: Synthetic oligonucleotide
gucccauauugugacugug

SEQ ID NO: 2862268 - RNA, 19 nt, Artificial Sequence
  Description of Artificial Sequence: Synthetic oligonucleotide
cugucaccccagucggggc

SEQ ID NO: 2862269 - RNA, 19 nt, Artificial Sequence
  Description of Artificial Sequence: Synthetic oligonucleotide
cagaugugcaucagugucu

SEQ ID NO: 2862270 - RNA, 19 nt, Artificial Sequence
  Description of Artificial Sequence: Synthetic oligonucleotide
gaguucucuucaugguugu

SEQ ID NO: 2862271 - RNA, 19 nt, Artificial Sequence
  Description of Artificial Sequence: Synthetic oligonucleotide
cuggauuugcccgccccug

SEQ ID NO: 2862272 - RNA, 19 nt, Artificial Sequence
  Description of Artificial Sequence: Synthetic oligonucleotide
uuucucccgucaccgcgau

SEQ ID NO: 2862273 - RNA, 19 nt, Artificial Sequence
  Description of Artificial Sequence: Synthetic oligonucleotide
guacucagcaaacuucauu

SEQ ID NO: 2862274 - RNA, 19 nt, Artificial Sequence
  Description of Artificial Sequence: Synthetic oligonucleotide
guguguauggaguucucuu

SEQ ID NO: 2862275 - RNA, 19 nt, Artificial Sequence
  Description of Artificial Sequence: Synthetic oligonucleotide
ucaaggcgaugguuuccuc

SEQ ID NO: 2862276 - RNA, 19 nt, Artificial Sequence
  Description of Artificial Sequence: Synthetic oligonucleotide
cuuucagggcauugauaaa

SEQ ID NO: 2862277 - RNA, 19 nt, Artificial Sequence
  Description of Artificial Sequence: Synthetic oligonucleotide
accccagucggggcugcgc

SEQ ID NO: 2862278 - RNA, 19 nt, Artificial Sequence
  Description of Artificial Sequence: Synthetic oligonucleotide
ucauuuccguuagguaguu

SEQ ID NO: 2862279 - RNA, 19 nt, Artificial Sequence
  Description of Artificial Sequence: Synthetic oligonucleotide
gugggaagcuuugggugug

SEQ ID NO: 2862280 - RNA, 19 nt, Artificial Sequence
  Description of Artificial Sequence: Synthetic oligonucleotide
auguuuaguggggcucugu

SEQ ID NO: 2862281 - RNA, 19 nt, Artificial Sequence
  Description of Artificial Sequence: Synthetic oligonucleotide
uggggcucugucgacguuu

SEQ ID NO: 2862282 - RNA, 19 nt, Artificial Sequence
  Description of Artificial Sequence: Synthetic oligonucleotide
guuucucccgucaccgcga

SEQ ID NO: 2862283 - RNA, 19 nt, Artificial Sequence
  Description of Artificial Sequence: Synthetic oligonucleotide
ggguagcugaaaugauaac

SEQ ID NO: 2862284 - RNA, 19 nt, Artificial Sequence
  Description of Artificial Sequence: Synthetic oligonucleotide
cacuccuuucagggcauug

SEQ ID NO: 2862285 - RNA, 19 nt, Artificial Sequence
  Description of Artificial Sequence: Synthetic oligonucleotide
ugcccgccccuguuucucc

SEQ ID NO: 2862286 - RNA, 19 nt, Artificial Sequence
  Description of Artificial Sequence: Synthetic oligonucleotide
ccacacuccuuucagggca

SEQ ID NO: 2862287 - RNA, 19 nt, Artificial Sequence
  Description of Artificial Sequence: Synthetic oligonucleotide
agguaguuuugaaguggga

SEQ ID NO: 2862288 - RNA, 19 nt, Artificial Sequence
  Description of Artificial Sequence: Synthetic oligonucleotide
cagcaaacuucauuuccgu

SEQ ID NO: 2862289 - RNA, 19 nt, Artificial Sequence
  Description of Artificial Sequence: Synthetic oligonucleotide
cgcugauugcagaaacggc

SEQ ID NO: 2862290 - RNA, 19 nt, Artificial Sequence
  Description of Artificial Sequence: Synthetic oligonucleotide
cccacacuccuuucagggc

SEQ ID NO: 2862291 - RNA, 19 nt, Artificial Sequence
  Description of Artificial Sequence: Synthetic oligonucleotide
ggcucugucgacguuucuc

SEQ ID NO: 2862292 - RNA, 19 nt, Artificial Sequence
  Description of Artificial Sequence: Synthetic oligonucleotide
aggcgaugguuuccucaga

SEQ ID NO: 2862293 - RNA, 19 nt, Artificial Sequence
  Description of Artificial Sequence: Synthetic oligonucleotide
ccaaugccaggcagguccc

SEQ ID NO: 2862294 - RNA, 19 nt, Artificial Sequence
  Description of Artificial Sequence: Synthetic oligonucleotide
gguguguguauggaguucu

SEQ ID NO: 2862295 - RNA, 19 nt, Artificial Sequence
  Description of Artificial Sequence: Synthetic oligonucleotide
uucucccgucaccgcgaug

SEQ ID NO: 2862296 - RNA, 19 nt, Artificial Sequence
  Description of Artificial Sequence: Synthetic oligonucleotide
ccauauugugacuguggga

SEQ ID NO: 2862297 - RNA, 19 nt, Artificial Sequence
  Description of Artificial Sequence: Synthetic oligonucleotide
gacccaaugccaggcaggu

SEQ ID NO: 2862298 - RNA, 19 nt, Artificial Sequence
  Description of Artificial Sequence: Synthetic oligonucleotide
uugaagcggguagcugaaa

SEQ ID NO: 2862299 - RNA, 19 nt, Artificial Sequence
  Description of Artificial Sequence: Synthetic oligonucleotide
ccaggugggauucaaucaa

SEQ ID NO: 2862300 - RNA, 19 nt, Artificial Sequence
  Description of Artificial Sequence: Synthetic oligonucleotide
ggauucaaucaaggcgaug

SEQ ID NO: 2862301 - RNA, 19 nt, Artificial Sequence
  Description of Artificial Sequence: Synthetic oligonucleotide
cuuauucuccaggugggau

SEQ ID NO: 2862302 - RNA, 19 nt, Artificial Sequence
  Description of Artificial Sequence: Synthetic oligonucleotide
cccuguuucucccgucacc

SEQ ID NO: 2862303 - RNA, 19 nt, Artificial Sequence
  Description of Artificial Sequence: Synthetic oligonucleotide
aaacggcuccgggaagguu

SEQ ID NO: 2862304 - RNA, 19 nt, Artificial Sequence
  Description of Artificial Sequence: Synthetic oligonucleotide
gugcaucagugucuuugaa

SEQ ID NO: 2862305 - RNA, 19 nt, Artificial Sequence
  Description of Artificial Sequence: Synthetic oligonucleotide
ugggaagcuuugggugugu

SEQ ID NO: 2862306 - RNA, 19 nt, Artificial Sequence
  Description of Artificial Sequence: Synthetic oligonucleotide
uugugacugugggaagcuu

SEQ ID NO: 2862307 - RNA, 19 nt, Artificial Sequence
  Description of Artificial Sequence: Synthetic oligonucleotide
acccaaugccaggcagguc

SEQ ID NO: 2862308 - RNA, 19 nt, Artificial Sequence
  Description of Artificial Sequence: Synthetic oligonucleotide
cggguagcugaaaugauaa

SEQ ID NO: 2862309 - RNA, 19 nt, Artificial Sequence
  Description of Artificial Sequence: Synthetic oligonucleotide
ucggggcugcgccuucuuu

SEQ ID NO: 2862310 - RNA, 19 nt, Artificial Sequence
  Description of Artificial Sequence: Synthetic oligonucleotide
gucuuugaagcggguagcu

SEQ ID NO: 2862311 - RNA, 19 nt, Artificial Sequence
  Description of Artificial Sequence: Synthetic oligonucleotide
gauuugcccgccccuguuu

SEQ ID NO: 2862312 - RNA, 19 nt, Artificial Sequence
  Description of Artificial Sequence: Synthetic oligonucleotide
gcgauguuuaguggggcuc

SEQ ID NO: 2862313 - RNA, 19 nt, Artificial Sequence
  Description of Artificial Sequence: Synthetic oligonucleotide
ggggcugcgccuucuuuuc

SEQ ID NO: 2862314 - RNA, 19 nt, Artificial Sequence
  Description of Artificial Sequence: Synthetic oligonucleotide
uugcccgccccuguuucuc

SEQ ID NO: 2862315 - RNA, 19 nt, Artificial Sequence
  Description of Artificial Sequence: Synthetic oligonucleotide
gcgaugguuuccucagaga

SEQ ID NO: 2862316 - RNA, 19 nt, Artificial Sequence
  Description of Artificial Sequence: Synthetic oligonucleotide
agcggguagcugaaaugau

SEQ ID NO: 2862317 - RNA, 19 nt, Artificial Sequence
  Description of Artificial Sequence: Synthetic oligonucleotide
ggcuuuggccagaugugca

SEQ ID NO: 2862318 - RNA, 19 nt, Artificial Sequence
  Description of Artificial Sequence: Synthetic oligonucleotide
gccuucuuuucaucccaca

SEQ ID NO: 2862319 - RNA, 19 nt, Artificial Sequence
  Description of Artificial Sequence: Synthetic oligonucleotide
cgacguuucucagagcauc

SEQ ID NO: 2862320 - RNA, 19 nt, Artificial Sequence
  Description of Artificial Sequence: Synthetic oligonucleotide
gaaacggcuccgggaaggu

SEQ ID NO: 2862321 - RNA, 19 nt, Artificial Sequence
  Description of Artificial Sequence: Synthetic oligonucleotide
cuccuuucagggcauugau

SEQ ID NO: 2862322 - RNA, 19 nt, Artificial Sequence
  Description of Artificial Sequence: Synthetic oligonucleotide
acggcuccgggaagguucu

SEQ ID NO: 2862323 - RNA, 19 nt, Artificial Sequence
  Description of Artificial Sequence: Synthetic oligonucleotide
guguguguauggaguucuc

SEQ ID NO: 2862324 - RNA, 19 nt, Artificial Sequence
  Description of Artificial Sequence: Synthetic oligonucleotide
gcugcgccuucuuuucauc

SEQ ID NO: 2862325 - RNA, 19 nt, Artificial Sequence
  Description of Artificial Sequence: Synthetic oligonucleotide
ucccgucaccgcgauguuu

SEQ ID NO: 2862326 - RNA, 19 nt, Artificial Sequence
  Description of Artificial Sequence: Synthetic oligonucleotide
ucaccccagucggggcugc

SEQ ID NO: 2862327 - RNA, 19 nt, Artificial Sequence
  Description of Artificial Sequence: Synthetic oligonucleotide
cgggaagguucuuauucuc

SEQ ID NO: 2862328 - RNA, 19 nt, Artificial Sequence
  Description of Artificial Sequence: Synthetic oligonucleotide
ggucccauauugugacugu

SEQ ID NO: 2862329 - RNA, 19 nt, Artificial Sequence
  Description of Artificial Sequence: Synthetic oligonucleotide
ggguguguguauggaguuc

SEQ ID NO: 2862330 - RNA, 19 nt, Artificial Sequence
  Description of Artificial Sequence: Synthetic oligonucleotide
ccccagucggggcugcgcc

SEQ ID NO: 2862331 - RNA, 19 nt, Artificial Sequence
  Description of Artificial Sequence: Synthetic oligonucleotide
gccagaugugcaucagugu

SEQ ID NO: 2862332 - RNA, 19 nt, Artificial Sequence
  Description of Artificial Sequence: Synthetic oligonucleotide
cccgucaccgcgauguuua

SEQ ID NO: 2862333 - RNA, 19 nt, Artificial Sequence
  Description of Artificial Sequence: Synthetic oligonucleotide
gcuuuggccagaugugcau

SEQ ID NO: 2862334 - RNA, 19 nt, Artificial Sequence
  Description of Artificial Sequence: Synthetic oligonucleotide
gcggguagcugaaaugaua

SEQ ID NO: 2862335 - RNA, 19 nt, Artificial Sequence
  Description of Artificial Sequence: Synthetic oligonucleotide
gcuggauuugcccgccccu

SEQ ID NO: 2862336 - RNA, 19 nt, Artificial Sequence
  Description of Artificial Sequence: Synthetic oligonucleotide
ccgcgauguuuaguggggc

SEQ ID NO: 2862337 - RNA, 19 nt, Artificial Sequence
  Description of Artificial Sequence: Synthetic oligonucleotide
cccgccccuguuucucccg

SEQ ID NO: 2862338 - RNA, 19 nt, Artificial Sequence
  Description of Artificial Sequence: Synthetic oligonucleotide
ccgggaagguucuuauucu

SEQ ID NO: 2862339 - RNA, 19 nt, Artificial Sequence
  Description of Artificial Sequence: Synthetic oligonucleotide
gaugugcaucagugucuuu

SEQ ID NO: 2862340 - RNA, 19 nt, Artificial Sequence
  Description of Artificial Sequence: Synthetic oligonucleotide
ccccuguuucucccgucac

SEQ ID NO: 2862341 - RNA, 19 nt, Artificial Sequence
  Description of Artificial Sequence: Synthetic oligonucleotide
ggggcucugucgacguuuc

SEQ ID NO: 2862342 - RNA, 19 nt, Artificial Sequence
  Description of Artificial Sequence: Synthetic oligonucleotide
gcuccgggaagguucuuau

SEQ ID NO: 2862343 - RNA, 19 nt, Artificial Sequence
  Description of Artificial Sequence: Synthetic oligonucleotide
caaugccaggcagguccca

SEQ ID NO: 2862344 - RNA, 19 nt, Artificial Sequence
  Description of Artificial Sequence: Synthetic oligonucleotide
ccgucaccgcgauguuuag

SEQ ID NO: 2862345 - RNA, 19 nt, Artificial Sequence
  Description of Artificial Sequence: Synthetic oligonucleotide
cgccuucuuuucaucccac

SEQ ID NO: 2862346 - RNA, 19 nt, Artificial Sequence
  Description of Artificial Sequence: Synthetic oligonucleotide
cagucggggcugcgccuuc

SEQ ID NO: 2862347 - RNA, 19 nt, Artificial Sequence
  Description of Artificial Sequence: Synthetic oligonucleotide
caccccagucggggcugcg

SEQ ID NO: 2862348 - RNA, 19 nt, Artificial Sequence
  Description of Artificial Sequence: Synthetic oligonucleotide
gcccgccccuguuucuccc

SEQ ID NO: 2862349 - RNA, 19 nt, Artificial Sequence
  Description of Artificial Sequence: Synthetic oligonucleotide
cagugucuuugaagcgggu

SEQ ID NO: 2862350 - RNA, 19 nt, Artificial Sequence
  Description of Artificial Sequence: Synthetic oligonucleotide
cguuucucagagcaucgcu

SEQ ID NO: 2862351 - RNA, 19 nt, Artificial Sequence
  Description of Artificial Sequence: Synthetic oligonucleotide
ggcugcgccuucuuuucau

SEQ ID NO: 2862352 - RNA, 19 nt, Artificial Sequence
  Description of Artificial Sequence: Synthetic oligonucleotide
ggcgauggcuuuggccaga

SEQ ID NO: 2862353 - RNA, 19 nt, Artificial Sequence
  Description of Artificial Sequence: Synthetic oligonucleotide
ggcuccgggaagguucuua

SEQ ID NO: 2862354 - RNA, 19 nt, Artificial Sequence
  Description of Artificial Sequence: Synthetic oligonucleotide
ggauuugcccgccccuguu

SEQ ID NO: 2862355 - RNA, 19 nt, Artificial Sequence
  Description of Artificial Sequence: Synthetic oligonucleotide
cuccgggaagguucuuauu

SEQ ID NO: 2862356 - RNA, 19 nt, Artificial Sequence
  Description of Artificial Sequence: Synthetic oligonucleotide
gggauucaaucaaggcgau

SEQ ID NO: 2862357 - RNA, 19 nt, Artificial Sequence
  Description of Artificial Sequence: Synthetic oligonucleotide
cgauguuuaguggggcucu

SEQ ID NO: 2862358 - RNA, 19 nt, Artificial Sequence
  Description of Artificial Sequence: Synthetic oligonucleotide
cgcgauguuuaguggggcu

SEQ ID NO: 2862359 - RNA, 19 nt, Artificial Sequence
  Description of Artificial Sequence: Synthetic oligonucleotide
cauuuccguuagguaguuu

SEQ ID NO: 2862360 - RNA, 19 nt, Artificial Sequence
  Description of Artificial Sequence: Synthetic oligonucleotide
gucggggcugcgccuucuu

SEQ ID NO: 2862361 - RNA, 19 nt, Artificial Sequence
  Description of Artificial Sequence: Synthetic oligonucleotide
guggggcucugucgacguu

SEQ ID NO: 2862362 - RNA, 19 nt, Artificial Sequence
  Description of Artificial Sequence: Synthetic oligonucleotide
cguacucagcaaacuucau

SEQ ID NO: 2862363 - RNA, 19 nt, Artificial Sequence
  Description of Artificial Sequence: Synthetic oligonucleotide
gggcucugucgacguuucu

SEQ ID NO: 2862364 - RNA, 19 nt, Artificial Sequence
  Description of Artificial Sequence: Synthetic oligonucleotide
cgccccuguuucucccguc

SEQ ID NO: 2862365 - RNA, 19 nt, Artificial Sequence
  Description of Artificial Sequence: Synthetic oligonucleotide
gcgauggcuuuggccagau

SEQ ID NO: 2862366 - RNA, 19 nt, Artificial Sequence
  Description of Artificial Sequence: Synthetic oligonucleotide
cucccgucaccgcgauguu

SEQ ID NO: 2862367 - RNA, 19 nt, Artificial Sequence
  Description of Artificial Sequence: Synthetic oligonucleotide
cccagucggggcugcgccu

SEQ ID NO: 2862368 - RNA, 19 nt, Artificial Sequence
  Description of Artificial Sequence: Synthetic oligonucleotide
cggggcugcgccuucuuuu

SEQ ID NO: 2862369 - RNA, 19 nt, Artificial Sequence
  Description of Artificial Sequence: Synthetic oligonucleotide
ccgccccuguuucucccgu

SEQ ID NO: 2862370 - RNA, 19 nt, Artificial Sequence
  Description of Artificial Sequence: Synthetic oligonucleotide
cgucaccgcgauguuuagu

SEQ ID NO: 2862371 - RNA, 19 nt, Artificial Sequence
  Description of Artificial Sequence: Synthetic oligonucleotide
ccagucggggcugcgccuu

SEQ ID NO: 2862372 - RNA, 19 nt, Artificial Sequence
  Description of Artificial Sequence: Synthetic oligonucleotide
cggcuccgggaagguucuu

SEQ ID NO: 2862373 - RNA, 19 nt, Artificial Sequence
  Description of Artificial Sequence: Synthetic oligonucleotide
aggaugaugacccagauga

SEQ ID NO: 2862374 - RNA, 19 nt, Artificial Sequence
  Description of Artificial Sequence: Synthetic oligonucleotide
acgacgaugcuccagcgcc

SEQ ID NO: 2862375 - RNA, 19 nt, Artificial Sequence
  Description of Artificial Sequence: Synthetic oligonucleotide
augacgacgaugcuccagc

SEQ ID NO: 2862376 - RNA, 19 nt, Artificial Sequence
  Description of Artificial Sequence: Synthetic oligonucleotide
aguagugcuggccagccgg

SEQ ID NO: 2862377 - RNA, 19 nt, Artificial Sequence
  Description of Artificial Sequence: Synthetic oligonucleotide
aaaggaguacugguucucc

SEQ ID NO: 2862378 - RNA, 19 nt, Artificial Sequence
  Description of Artificial Sequence: Synthetic oligonucleotide
uagaaggugaggugggugg

SEQ ID NO: 2862379 - RNA, 19 nt, Artificial Sequence
  Description of Artificial Sequence: Synthetic oligonucleotide
gaugaugacccagaugacg

SEQ ID NO: 2862380 - RNA, 19 nt, Artificial Sequence
  Description of Artificial Sequence: Synthetic oligonucleotide
cagaugacgacgaugcucc

SEQ ID NO: 2862381 - RNA, 19 nt, Artificial Sequence
  Description of Artificial Sequence: Synthetic oligonucleotide
uguugggcgggacagacca

SEQ ID NO: 2862382 - RNA, 19 nt, Artificial Sequence
  Description of Artificial Sequence: Synthetic oligonucleotide
ucuucgguggcuccagacg

SEQ ID NO: 2862383 - RNA, 19 nt, Artificial Sequence
  Description of Artificial Sequence: Synthetic oligonucleotide
accacagguguucuuggcc

SEQ ID NO: 2862384 - RNA, 19 nt, Artificial Sequence
  Description of Artificial Sequence: Synthetic oligonucleotide
aguacugguucuccacugc

SEQ ID NO: 2862385 - RNA, 19 nt, Artificial Sequence
  Description of Artificial Sequence: Synthetic oligonucleotide
cuaguaaaaggaguacugg

SEQ ID NO: 2862386 - RNA, 19 nt, Artificial Sequence
  Description of Artificial Sequence: Synthetic oligonucleotide
uaguaaaaggaguacuggu

SEQ ID NO: 2862387 - RNA, 19 nt, Artificial Sequence
  Description of Artificial Sequence: Synthetic oligonucleotide
acugguucuccacugcacg

SEQ ID NO: 2862388 - RNA, 19 nt, Artificial Sequence
  Description of Artificial Sequence: Synthetic oligonucleotide
guaaaaggaguacugguuc

SEQ ID NO: 2862389 - RNA, 19 nt, Artificial Sequence
  Description of Artificial Sequence: Synthetic oligonucleotide
uggccgaggaugaugaccc

SEQ ID NO: 2862390 - RNA, 19 nt, Artificial Sequence
  Description of Artificial Sequence: Synthetic oligonucleotide
aaaaggaguacugguucuc

SEQ ID NO: 2862391 - RNA, 19 nt, Artificial Sequence
  Description of Artificial Sequence: Synthetic oligonucleotide
cacauagcuucuuagggug

SEQ ID NO: 2862392 - RNA, 19 nt, Artificial Sequence
  Description of Artificial Sequence: Synthetic oligonucleotide
cauuagaaggugagguggg

SEQ ID NO: 2862393 - RNA, 19 nt, Artificial Sequence
  Description of Artificial Sequence: Synthetic oligonucleotide
cuucuuagggugaugccag

SEQ ID NO: 2862394 - RNA, 19 nt, Artificial Sequence
  Description of Artificial Sequence: Synthetic oligonucleotide
cacagcugcuaguaaaagg

SEQ ID NO: 2862395 - RNA, 19 nt, Artificial Sequence
  Description of Artificial Sequence: Synthetic oligonucleotide
uaaaaggaguacugguucu

SEQ ID NO: 2862396 - RNA, 19 nt, Artificial Sequence
  Description of Artificial Sequence: Synthetic oligonucleotide
ugugaugagcauggcaccg

SEQ ID NO: 2862397 - RNA, 19 nt, Artificial Sequence
  Description of Artificial Sequence: Synthetic oligonucleotide
aggaguacugguucuccac

SEQ ID NO: 2862398 - RNA, 19 nt, Artificial Sequence
  Description of Artificial Sequence: Synthetic oligonucleotide
acagcugcuaguaaaagga

SEQ ID NO: 2862399 - RNA, 19 nt, Artificial Sequence
  Description of Artificial Sequence: Synthetic oligonucleotide
ugcuccagcgccauuagaa

SEQ ID NO: 2862400 - RNA, 19 nt, Artificial Sequence
  Description of Artificial Sequence: Synthetic oligonucleotide
uaaugggcacagcugcuag

SEQ ID NO: 2862401 - RNA, 19 nt, Artificial Sequence
  Description of Artificial Sequence: Synthetic oligonucleotide
uuagggugaugccagcaga

SEQ ID NO: 2862402 - RNA, 19 nt, Artificial Sequence
  Description of Artificial Sequence: Synthetic oligonucleotide
uggguaaugggcacagcug

SEQ ID NO: 2862403 - RNA, 19 nt, Artificial Sequence
  Description of Artificial Sequence: Synthetic oligonucleotide
gaugacccagaugacgacg

SEQ ID NO: 2862404 - RNA, 19 nt, Artificial Sequence
  Description of Artificial Sequence: Synthetic oligonucleotide
acgcacauagcuucuuagg

SEQ ID NO: 2862405 - RNA, 19 nt, Artificial Sequence
  Description of Artificial Sequence: Synthetic oligonucleotide
auggauguggccgaggaug

SEQ ID NO: 2862406 - RNA, 19 nt, Artificial Sequence
  Description of Artificial Sequence: Synthetic oligonucleotide
aggugcucugcgcuguugc

SEQ ID NO: 2862407 - RNA, 19 nt, Artificial Sequence
  Description of Artificial Sequence: Synthetic oligonucleotide
ugagcauggcaccgguggg

SEQ ID NO: 2862408 - RNA, 19 nt, Artificial Sequence
  Description of Artificial Sequence: Synthetic oligonucleotide
agacgcagccuccagcagg

SEQ ID NO: 2862409 - RNA, 19 nt, Artificial Sequence
  Description of Artificial Sequence: Synthetic oligonucleotide
agcuucuuagggugaugcc

SEQ ID NO: 2862410 - RNA, 19 nt, Artificial Sequence
  Description of Artificial Sequence: Synthetic oligonucleotide
uccagcgccauuagaaggu

SEQ ID NO: 2862411 - RNA, 19 nt, Artificial Sequence
  Description of Artificial Sequence: Synthetic oligonucleotide
ugcuaguaaaaggaguacu

SEQ ID NO: 2862412 - RNA, 19 nt, Artificial Sequence
  Description of Artificial Sequence: Synthetic oligonucleotide
uccugggucagggaggccg

SEQ ID NO: 2862413 - RNA, 19 nt, Artificial Sequence
  Description of Artificial Sequence: Synthetic oligonucleotide
uggccugcugugaugagca

SEQ ID NO: 2862414 - RNA, 19 nt, Artificial Sequence
  Description of Artificial Sequence: Synthetic oligonucleotide
cuccagcgccauuagaagg

SEQ ID NO: 2862415 - RNA, 19 nt, Artificial Sequence
  Description of Artificial Sequence: Synthetic oligonucleotide
uagcuucuuagggugaugc

SEQ ID NO: 2862416 - RNA, 19 nt, Artificial Sequence
  Description of Artificial Sequence: Synthetic oligonucleotide
aaggaguacugguucucca

SEQ ID NO: 2862417 - RNA, 19 nt, Artificial Sequence
  Description of Artificial Sequence: Synthetic oligonucleotide
cuuagggugaugccagcag

SEQ ID NO: 2862418 - RNA, 19 nt, Artificial Sequence
  Description of Artificial Sequence: Synthetic oligonucleotide
uuagaaggugaggugggug

SEQ ID NO: 2862419 - RNA, 19 nt, Artificial Sequence
  Description of Artificial Sequence: Synthetic oligonucleotide
gaggugggugggcaggugg

SEQ ID NO: 2862420 - RNA, 19 nt, Artificial Sequence
  Description of Artificial Sequence: Synthetic oligonucleotide
uccgugggcucuucggugg

SEQ ID NO: 2862421 - RNA, 19 nt, Artificial Sequence
  Description of Artificial Sequence: Synthetic oligonucleotide
ggugccaccgugcugggcg

SEQ ID NO: 2862422 - RNA, 19 nt, Artificial Sequence
  Description of Artificial Sequence: Synthetic oligonucleotide
ugguccugggucagggagg

SEQ ID NO: 2862423 - RNA, 19 nt, Artificial Sequence
  Description of Artificial Sequence: Synthetic oligonucleotide
ugcucugcgcuguugcugc

SEQ ID NO: 2862424 - RNA, 19 nt, Artificial Sequence
  Description of Artificial Sequence: Synthetic oligonucleotide
ccugcugugaugagcaugg

SEQ ID NO: 2862425 - RNA, 19 nt, Artificial Sequence
  Description of Artificial Sequence: Synthetic oligonucleotide
aaguagugcuggccagccg

SEQ ID NO: 2862426 - RNA, 19 nt, Artificial Sequence
  Description of Artificial Sequence: Synthetic oligonucleotide
ugcggcugcgcacacugag

SEQ ID NO: 2862427 - RNA, 19 nt, Artificial Sequence
  Description of Artificial Sequence: Synthetic oligonucleotide
accuccgagggguaugggg

SEQ ID NO: 2862428 - RNA, 19 nt, Artificial Sequence
  Description of Artificial Sequence: Synthetic oligonucleotide
agaccacagguguucuugg

SEQ ID NO: 2862429 - RNA, 19 nt, Artificial Sequence
  Description of Artificial Sequence: Synthetic oligonucleotide
gaguacugguucuccacug

SEQ ID NO: 2862430 - RNA, 19 nt, Artificial Sequence
  Description of Artificial Sequence: Synthetic oligonucleotide
ugggcacgcacauagcuuc

SEQ ID NO: 2862431 - RNA, 19 nt, Artificial Sequence
  Description of Artificial Sequence: Synthetic oligonucleotide
uagggugaugccagcagac

SEQ ID NO: 2862432 - RNA, 19 nt, Artificial Sequence
  Description of Artificial Sequence: Synthetic oligonucleotide
augaugacccagaugacga

SEQ ID NO: 2862433 - RNA, 19 nt, Artificial Sequence
  Description of Artificial Sequence: Synthetic oligonucleotide
aaugggcacagcugcuagu

SEQ ID NO: 2862434 - RNA, 19 nt, Artificial Sequence
  Description of Artificial Sequence: Synthetic oligonucleotide
ucuuggccugcugugauga

SEQ ID NO: 2862435 - RNA, 19 nt, Artificial Sequence
  Description of Artificial Sequence: Synthetic oligonucleotide
uggauguggccgaggauga

SEQ ID NO: 2862436 - RNA, 19 nt, Artificial Sequence
  Description of Artificial Sequence: Synthetic oligonucleotide
aguaaaaggaguacugguu

SEQ ID NO: 2862437 - RNA, 19 nt, Artificial Sequence
  Description of Artificial Sequence: Synthetic oligonucleotide
gaggaugaugacccagaug

SEQ ID NO: 2862438 - RNA, 19 nt, Artificial Sequence
  Description of Artificial Sequence: Synthetic oligonucleotide
cacgcacauagcuucuuag

SEQ ID NO: 2862439 - RNA, 19 nt, Artificial Sequence
  Description of Artificial Sequence: Synthetic oligonucleotide
ggguaaugggcacagcugc

SEQ ID NO: 2862440 - RNA, 19 nt, Artificial Sequence
  Description of Artificial Sequence: Synthetic oligonucleotide
aggcuggagaaguagugcu

SEQ ID NO: 2862441 - RNA, 19 nt, Artificial Sequence
  Description of Artificial Sequence: Synthetic oligonucleotide
uucuccacugcacgagcgc

SEQ ID NO: 2862442 - RNA, 19 nt, Artificial Sequence
  Description of Artificial Sequence: Synthetic oligonucleotide
uggagaaguagugcuggcc

SEQ ID NO: 2862443 - RNA, 19 nt, Artificial Sequence
  Description of Artificial Sequence: Synthetic oligonucleotide
cugugaugagcauggcacc

SEQ ID NO: 2862444 - RNA, 19 nt, Artificial Sequence
  Description of Artificial Sequence: Synthetic oligonucleotide
ggcucuguccagcaggagg

SEQ ID NO: 2862445 - RNA, 19 nt, Artificial Sequence
  Description of Artificial Sequence: Synthetic oligonucleotide
gaaguagugcuggccagcc

SEQ ID NO: 2862446 - RNA, 19 nt, Artificial Sequence
  Description of Artificial Sequence: Synthetic oligonucleotide
gcugugaugagcauggcac

SEQ ID NO: 2862447 - RNA, 19 nt, Artificial Sequence
  Description of Artificial Sequence: Synthetic oligonucleotide
ccauuagaaggugaggugg

SEQ ID NO: 2862448 - RNA, 19 nt, Artificial Sequence
  Description of Artificial Sequence: Synthetic oligonucleotide
uccagacgcagccuccagc

SEQ ID NO: 2862449 - RNA, 19 nt, Artificial Sequence
  Description of Artificial Sequence: Synthetic oligonucleotide
gaugcuccagcgccauuag

SEQ ID NO: 2862450 - RNA, 19 nt, Artificial Sequence
  Description of Artificial Sequence: Synthetic oligonucleotide
gguguggaagugucgaagc

SEQ ID NO: 2862451 - RNA, 19 nt, Artificial Sequence
  Description of Artificial Sequence: Synthetic oligonucleotide
ugaugagcauggcaccggu

SEQ ID NO: 2862452 - RNA, 19 nt, Artificial Sequence
  Description of Artificial Sequence: Synthetic oligonucleotide
gcuaguaaaaggaguacug

SEQ ID NO: 2862453 - RNA, 19 nt, Artificial Sequence
  Description of Artificial Sequence: Synthetic oligonucleotide
gauguggccgaggaugaug

SEQ ID NO: 2862454 - RNA, 19 nt, Artificial Sequence
  Description of Artificial Sequence: Synthetic oligonucleotide
cugguccugggucagggag

SEQ ID NO: 2862455 - RNA, 19 nt, Artificial Sequence
  Description of Artificial Sequence: Synthetic oligonucleotide
ugacgacgaugcuccagcg

SEQ ID NO: 2862456 - RNA, 19 nt, Artificial Sequence
  Description of Artificial Sequence: Synthetic oligonucleotide
uguggaagugucgaagcau

SEQ ID NO: 2862457 - RNA, 19 nt, Artificial Sequence
  Description of Artificial Sequence: Synthetic oligonucleotide
gcuggugccaccgugcugg

SEQ ID NO: 2862458 - RNA, 19 nt, Artificial Sequence
  Description of Artificial Sequence: Synthetic oligonucleotide
ucugcgcuguugcugcggc

SEQ ID NO: 2862459 - RNA, 19 nt, Artificial Sequence
  Description of Artificial Sequence: Synthetic oligonucleotide
gaugacgacgaugcuccag

SEQ ID NO: 2862460 - RNA, 19 nt, Artificial Sequence
  Description of Artificial Sequence: Synthetic oligonucleotide
acgagcgcggcccagcgug

SEQ ID NO: 2862461 - RNA, 19 nt, Artificial Sequence
  Description of Artificial Sequence: Synthetic oligonucleotide
ucuuagggugaugccagca

SEQ ID NO: 2862462 - RNA, 19 nt, Artificial Sequence
  Description of Artificial Sequence: Synthetic oligonucleotide
accgguggguaaugggcac

SEQ ID NO: 2862463 - RNA, 19 nt, Artificial Sequence
  Description of Artificial Sequence: Synthetic oligonucleotide
acagguguucuuggccugc

SEQ ID NO: 2862464 - RNA, 19 nt, Artificial Sequence
  Description of Artificial Sequence: Synthetic oligonucleotide
cagcugcuaguaaaaggag

SEQ ID NO: 2862465 - RNA, 19 nt, Artificial Sequence
  Description of Artificial Sequence: Synthetic oligonucleotide
gacgacgaugcuccagcgc

SEQ ID NO: 2862466 - RNA, 19 nt, Artificial Sequence
  Description of Artificial Sequence: Synthetic oligonucleotide
agcgccauuagaaggugag

SEQ ID NO: 2862467 - RNA, 19 nt, Artificial Sequence
  Description of Artificial Sequence: Synthetic oligonucleotide
ugaccuccgagggguaugg

SEQ ID NO: 2862468 - RNA, 19 nt, Artificial Sequence
  Description of Artificial Sequence: Synthetic oligonucleotide
gccuugggcacgcacauag

SEQ ID NO: 2862469 - RNA, 19 nt, Artificial Sequence
  Description of Artificial Sequence: Synthetic oligonucleotide
ugcgcacacugagugggcg

SEQ ID NO: 2862470 - RNA, 19 nt, Artificial Sequence
  Description of Artificial Sequence: Synthetic oligonucleotide
cuguuguugggcgggacag

SEQ ID NO: 2862471 - RNA, 19 nt, Artificial Sequence
  Description of Artificial Sequence: Synthetic oligonucleotide
cagaccacagguguucuug

SEQ ID NO: 2862472 - RNA, 19 nt, Artificial Sequence
  Description of Artificial Sequence: Synthetic oligonucleotide
gcuggagaaguagugcugg

SEQ ID NO: 2862473 - RNA, 19 nt, Artificial Sequence
  Description of Artificial Sequence: Synthetic oligonucleotide
uccagcaggugcucugcgc

SEQ ID NO: 2862474 - RNA, 19 nt, Artificial Sequence
  Description of Artificial Sequence: Synthetic oligonucleotide
ugaugacccagaugacgac

SEQ ID NO: 2862475 - RNA, 19 nt, Artificial Sequence
  Description of Artificial Sequence: Synthetic oligonucleotide
guguucuuggccugcugug

SEQ ID NO: 2862476 - RNA, 19 nt, Artificial Sequence
  Description of Artificial Sequence: Synthetic oligonucleotide
ugcgcuguugcugcggcug

SEQ ID NO: 2862477 - RNA, 19 nt, Artificial Sequence
  Description of Artificial Sequence: Synthetic oligonucleotide
uuggccugcugugaugagc

SEQ ID NO: 2862478 - RNA, 19 nt, Artificial Sequence
  Description of Artificial Sequence: Synthetic oligonucleotide
gaccacagguguucuuggc

SEQ ID NO: 2862479 - RNA, 19 nt, Artificial Sequence
  Description of Artificial Sequence: Synthetic oligonucleotide
guucuccacugcacgagcg

SEQ ID NO: 2862480 - RNA, 19 nt, Artificial Sequence
  Description of Artificial Sequence: Synthetic oligonucleotide
gguggcuccagacgcagcc

SEQ ID NO: 2862481 - RNA, 19 nt, Artificial Sequence
  Description of Artificial Sequence: Synthetic oligonucleotide
aaggugaggugggugggca

SEQ ID NO: 2862482 - RNA, 19 nt, Artificial Sequence
  Description of Artificial Sequence: Synthetic oligonucleotide
gcucuguccagcaggaggg

SEQ ID NO: 2862483 - RNA, 19 nt, Artificial Sequence
  Description of Artificial Sequence: Synthetic oligonucleotide
caggcuggagaaguagugc

SEQ ID NO: 2862484 - RNA, 19 nt, Artificial Sequence
  Description of Artificial Sequence: Synthetic oligonucleotide
uugggcacgcacauagcuu

SEQ ID NO: 2862485 - RNA, 19 nt, Artificial Sequence
  Description of Artificial Sequence: Synthetic oligonucleotide
cgcacauagcuucuuaggg

SEQ ID NO: 2862486 - RNA, 19 nt, Artificial Sequence
  Description of Artificial Sequence: Synthetic oligonucleotide
agcugcuaguaaaaggagu

SEQ ID NO: 2862487 - RNA, 19 nt, Artificial Sequence
  Description of Artificial Sequence: Synthetic oligonucleotide
uucuuagggugaugccagc

SEQ ID NO: 2862488 - RNA, 19 nt, Artificial Sequence
  Description of Artificial Sequence: Synthetic oligonucleotide
uggccagccggcucugucc

SEQ ID NO: 2862489 - RNA, 19 nt, Artificial Sequence
  Description of Artificial Sequence: Synthetic oligonucleotide
guuguugggcgggacagac

SEQ ID NO: 2862490 - RNA, 19 nt, Artificial Sequence
  Description of Artificial Sequence: Synthetic oligonucleotide
uuguugggcgggacagacc

SEQ ID NO: 2862491 - RNA, 19 nt, Artificial Sequence
  Description of Artificial Sequence: Synthetic oligonucleotide
ggugaugccagcagacucc

SEQ ID NO: 2862492 - RNA, 19 nt, Artificial Sequence
  Description of Artificial Sequence: Synthetic oligonucleotide
gacccagaugacgacgaug

SEQ ID NO: 2862493 - RNA, 19 nt, Artificial Sequence
  Description of Artificial Sequence: Synthetic oligonucleotide
gugaugagcauggcaccgg

SEQ ID NO: 2862494 - RNA, 19 nt, Artificial Sequence
  Description of Artificial Sequence: Synthetic oligonucleotide
cuggagaaguagugcuggc

SEQ ID NO: 2862495 - RNA, 19 nt, Artificial Sequence
  Description of Artificial Sequence: Synthetic oligonucleotide
uguugcugcggcugcgcac

SEQ ID NO: 2862496 - RNA, 19 nt, Artificial Sequence
  Description of Artificial Sequence: Synthetic oligonucleotide
gcugcgcacacugaguggg

SEQ ID NO: 2862497 - RNA, 19 nt, Artificial Sequence
  Description of Artificial Sequence: Synthetic oligonucleotide
guggguaaugggcacagcu

SEQ ID NO: 2862498 - RNA, 19 nt, Artificial Sequence
  Description of Artificial Sequence: Synthetic oligonucleotide
cucuucgguggcuccagac

SEQ ID NO: 2862499 - RNA, 19 nt, Artificial Sequence
  Description of Artificial Sequence: Synthetic oligonucleotide
guggccgaggaugaugacc

SEQ ID NO: 2862500 - RNA, 19 nt, Artificial Sequence
  Description of Artificial Sequence: Synthetic oligonucleotide
gccauuagaaggugaggug

SEQ ID NO: 2862501 - RNA, 19 nt, Artificial Sequence
  Description of Artificial Sequence: Synthetic oligonucleotide
auuagaaggugaggugggu

SEQ ID NO: 2862502 - RNA, 19 nt, Artificial Sequence
  Description of Artificial Sequence: Synthetic oligonucleotide
ugggcgcugguccuggguc

SEQ ID NO: 2862503 - RNA, 19 nt, Artificial Sequence
  Description of Artificial Sequence: Synthetic oligonucleotide
cugcuaguaaaaggaguac

SEQ ID NO: 2862504 - RNA, 19 nt, Artificial Sequence
  Description of Artificial Sequence: Synthetic oligonucleotide
uucgguggcuccagacgca

SEQ ID NO: 2862505 - RNA, 19 nt, Artificial Sequence
  Description of Artificial Sequence: Synthetic oligonucleotide
cacugcacgagcgcggccc

SEQ ID NO: 2862506 - RNA, 19 nt, Artificial Sequence
  Description of Artificial Sequence: Synthetic oligonucleotide
guacugguucuccacugca

SEQ ID NO: 2862507 - RNA, 19 nt, Artificial Sequence
  Description of Artificial Sequence: Synthetic oligonucleotide
ugggcgggacagaccacag

SEQ ID NO: 2862508 - RNA, 19 nt, Artificial Sequence
  Description of Artificial Sequence: Synthetic oligonucleotide
auguggccgaggaugauga

SEQ ID NO: 2862509 - RNA, 19 nt, Artificial Sequence
  Description of Artificial Sequence: Synthetic oligonucleotide
guguggaagugucgaagca

SEQ ID NO: 2862510 - RNA, 19 nt, Artificial Sequence
  Description of Artificial Sequence: Synthetic oligonucleotide
gcuccagcgccauuagaag

SEQ ID NO: 2862511 - RNA, 19 nt, Artificial Sequence
  Description of Artificial Sequence: Synthetic oligonucleotide
augacccagaugacgacga

SEQ ID NO: 2862512 - RNA, 19 nt, Artificial Sequence
  Description of Artificial Sequence: Synthetic oligonucleotide
uccacugcacgagcgcggc

SEQ ID NO: 2862513 - RNA, 19 nt, Artificial Sequence
  Description of Artificial Sequence: Synthetic oligonucleotide
ggcaccgguggguaauggg

SEQ ID NO: 2862514 - RNA, 19 nt, Artificial Sequence
  Description of Artificial Sequence: Synthetic oligonucleotide
gccggcucuguccagcagg

SEQ ID NO: 2862515 - RNA, 19 nt, Artificial Sequence
  Description of Artificial Sequence: Synthetic oligonucleotide
gcuucuuagggugaugcca

SEQ ID NO: 2862516 - RNA, 19 nt, Artificial Sequence
  Description of Artificial Sequence: Synthetic oligonucleotide
cacagguguucuuggccug

SEQ ID NO: 2862517 - RNA, 19 nt, Artificial Sequence
  Description of Artificial Sequence: Synthetic oligonucleotide
gaugagcauggcaccggug

SEQ ID NO: 2862518 - RNA, 19 nt, Artificial Sequence
  Description of Artificial Sequence: Synthetic oligonucleotide
cuccgugggcucuucggug

SEQ ID NO: 2862519 - RNA, 19 nt, Artificial Sequence
  Description of Artificial Sequence: Synthetic oligonucleotide
ucagggaggccggccuugg

SEQ ID NO: 2862520 - RNA, 19 nt, Artificial Sequence
  Description of Artificial Sequence: Synthetic oligonucleotide
guggguguggaagugucga

SEQ ID NO: 2862521 - RNA, 19 nt, Artificial Sequence
  Description of Artificial Sequence: Synthetic oligonucleotide
ugggugggcagguggcugu

SEQ ID NO: 2862522 - RNA, 19 nt, Artificial Sequence
  Description of Artificial Sequence: Synthetic oligonucleotide
ucgguggcuccagacgcag

SEQ ID NO: 2862523 - RNA, 19 nt, Artificial Sequence
  Description of Artificial Sequence: Synthetic oligonucleotide
guugcugcggcugcgcaca

SEQ ID NO: 2862524 - RNA, 19 nt, Artificial Sequence
  Description of Artificial Sequence: Synthetic oligonucleotide
auagcuucuuagggugaug

SEQ ID NO: 2862525 - RNA, 19 nt, Artificial Sequence
  Description of Artificial Sequence: Synthetic oligonucleotide
gugaugccagcagacuccc

SEQ ID NO: 2862526 - RNA, 19 nt, Artificial Sequence
  Description of Artificial Sequence: Synthetic oligonucleotide
ggugaggugggugggcagg

SEQ ID NO: 2862527 - RNA, 19 nt, Artificial Sequence
  Description of Artificial Sequence: Synthetic oligonucleotide
gcugcggcugcgcacacug

SEQ ID NO: 2862528 - RNA, 19 nt, Artificial Sequence
  Description of Artificial Sequence: Synthetic oligonucleotide
cuugggcacgcacauagcu

SEQ ID NO: 2862529 - RNA, 19 nt, Artificial Sequence
  Description of Artificial Sequence: Synthetic oligonucleotide
agcgcggcccagcguggcc

SEQ ID NO: 2862530 - RNA, 19 nt, Artificial Sequence
  Description of Artificial Sequence: Synthetic oligonucleotide
ggguguggaagugucgaag

SEQ ID NO: 2862531 - RNA, 19 nt, Artificial Sequence
  Description of Artificial Sequence: Synthetic oligonucleotide
gggugaugccagcagacuc

SEQ ID NO: 2862532 - RNA, 19 nt, Artificial Sequence
  Description of Artificial Sequence: Synthetic oligonucleotide
uguuguugggcgggacaga

SEQ ID NO: 2862533 - RNA, 19 nt, Artificial Sequence
  Description of Artificial Sequence: Synthetic oligonucleotide
uggguguggaagugucgaa

SEQ ID NO: 2862534 - RNA, 19 nt, Artificial Sequence
  Description of Artificial Sequence: Synthetic oligonucleotide
gcugcuaguaaaaggagua

SEQ ID NO: 2862535 - RNA, 19 nt, Artificial Sequence
  Description of Artificial Sequence: Synthetic oligonucleotide
cacacugagugggcgcggg

SEQ ID NO: 2862536 - RNA, 19 nt, Artificial Sequence
  Description of Artificial Sequence: Synthetic oligonucleotide
cugguucuccacugcacga

SEQ ID NO: 2862537 - RNA, 19 nt, Artificial Sequence
  Description of Artificial Sequence: Synthetic oligonucleotide
uguggccaggcuggagaag

SEQ ID NO: 2862538 - RNA, 19 nt, Artificial Sequence
  Description of Artificial Sequence: Synthetic oligonucleotide
ugaugccagcagacucccc

SEQ ID NO: 2862539 - RNA, 19 nt, Artificial Sequence
  Description of Artificial Sequence: Synthetic oligonucleotide
cuccagcaggugcucugcg

SEQ ID NO: 2862540 - RNA, 19 nt, Artificial Sequence
  Description of Artificial Sequence: Synthetic oligonucleotide
caccgguggguaaugggca

SEQ ID NO: 2862541 - RNA, 19 nt, Artificial Sequence
  Description of Artificial Sequence: Synthetic oligonucleotide
cccagcguggccuccgugg

SEQ ID NO: 2862542 - RNA, 19 nt, Artificial Sequence
  Description of Artificial Sequence: Synthetic oligonucleotide
ccaggcuggagaaguagug

SEQ ID NO: 2862543 - RNA, 19 nt, Artificial Sequence
  Description of Artificial Sequence: Synthetic oligonucleotide
acauagcuucuuaggguga

SEQ ID NO: 2862544 - RNA, 19 nt, Artificial Sequence
  Description of Artificial Sequence: Synthetic oligonucleotide
ugcugggcgcugguccugg

SEQ ID NO: 2862545 - RNA, 19 nt, Artificial Sequence
  Description of Artificial Sequence: Synthetic oligonucleotide
agcguggccuccgugggcu

SEQ ID NO: 2862546 - RNA, 19 nt, Artificial Sequence
  Description of Artificial Sequence: Synthetic oligonucleotide
gcaccgguggguaaugggc

SEQ ID NO: 2862547 - RNA, 19 nt, Artificial Sequence
  Description of Artificial Sequence: Synthetic oligonucleotide
uggcaccgguggguaaugg

SEQ ID NO: 2862548 - RNA, 19 nt, Artificial Sequence
  Description of Artificial Sequence: Synthetic oligonucleotide
gcauggauguggccgagga

SEQ ID NO: 2862549 - RNA, 19 nt, Artificial Sequence
  Description of Artificial Sequence: Synthetic oligonucleotide
cuuggccugcugugaugag

SEQ ID NO: 2862550 - RNA, 19 nt, Artificial Sequence
  Description of Artificial Sequence: Synthetic oligonucleotide
ccagaugacgacgaugcuc

SEQ ID NO: 2862551 - RNA, 19 nt, Artificial Sequence
  Description of Artificial Sequence: Synthetic oligonucleotide
agggugaugccagcagacu

SEQ ID NO: 2862552 - RNA, 19 nt, Artificial Sequence
  Description of Artificial Sequence: Synthetic oligonucleotide
ugacccagaugacgacgau

SEQ ID NO: 2862553 - RNA, 19 nt, Artificial Sequence
  Description of Artificial Sequence: Synthetic oligonucleotide
ugcacgagcgcggcccagc

SEQ ID NO: 2862554 - RNA, 19 nt, Artificial Sequence
  Description of Artificial Sequence: Synthetic oligonucleotide
uguggccgaggaugaugac

SEQ ID NO: 2862555 - RNA, 19 nt, Artificial Sequence
  Description of Artificial Sequence: Synthetic oligonucleotide
ggcugcgcacacugagugg

SEQ ID NO: 2862556 - RNA, 19 nt, Artificial Sequence
  Description of Artificial Sequence: Synthetic oligonucleotide
ggcgggacagaccacaggu

SEQ ID NO: 2862557 - RNA, 19 nt, Artificial Sequence
  Description of Artificial Sequence: Synthetic oligonucleotide
gcacauagcuucuuagggu

SEQ ID NO: 2862558 - RNA, 19 nt, Artificial Sequence
  Description of Artificial Sequence: Synthetic oligonucleotide
gaggccggccuugggcacg

SEQ ID NO: 2862559 - RNA, 19 nt, Artificial Sequence
  Description of Artificial Sequence: Synthetic oligonucleotide
cucuguccagcaggagggg

SEQ ID NO: 2862560 - RNA, 19 nt, Artificial Sequence
  Description of Artificial Sequence: Synthetic oligonucleotide
cucugcgcuguugcugcgg

SEQ ID NO: 2862561 - RNA, 19 nt, Artificial Sequence
  Description of Artificial Sequence: Synthetic oligonucleotide
cugcgcacacugagugggc

SEQ ID NO: 2862562 - RNA, 19 nt, Artificial Sequence
  Description of Artificial Sequence: Synthetic oligonucleotide
ugggucagggaggccggcc

SEQ ID NO: 2862563 - RNA, 19 nt, Artificial Sequence
  Description of Artificial Sequence: Synthetic oligonucleotide
guagugcuggccagccggc

SEQ ID NO: 2862564 - RNA, 19 nt, Artificial Sequence
  Description of Artificial Sequence: Synthetic oligonucleotide
gguguucuuggccugcugu

SEQ ID NO: 2862565 - RNA, 19 nt, Artificial Sequence
  Description of Artificial Sequence: Synthetic oligonucleotide
gccuccgugggcucuucgg

SEQ ID NO: 2862566 - RNA, 19 nt, Artificial Sequence
  Description of Artificial Sequence: Synthetic oligonucleotide
agcaggugcucugcgcugu

SEQ ID NO: 2862567 - RNA, 19 nt, Artificial Sequence
  Description of Artificial Sequence: Synthetic oligonucleotide
augcuccagcgccauuaga

SEQ ID NO: 2862568 - RNA, 19 nt, Artificial Sequence
  Description of Artificial Sequence: Synthetic oligonucleotide
acugcacgagcgcggccca

SEQ ID NO: 2862569 - RNA, 19 nt, Artificial Sequence
  Description of Artificial Sequence: Synthetic oligonucleotide
ggacagaccacagguguuc

SEQ ID NO: 2862570 - RNA, 19 nt, Artificial Sequence
  Description of Artificial Sequence: Synthetic oligonucleotide
agaugacgacgaugcucca

SEQ ID NO: 2862571 - RNA, 19 nt, Artificial Sequence
  Description of Artificial Sequence: Synthetic oligonucleotide
cagacgcagccuccagcag

SEQ ID NO: 2862572 - RNA, 19 nt, Artificial Sequence
  Description of Artificial Sequence: Synthetic oligonucleotide
cagcaggugcucugcgcug

SEQ ID NO: 2862573 - RNA, 19 nt, Artificial Sequence
  Description of Artificial Sequence: Synthetic oligonucleotide
cugaccuccgagggguaug

SEQ ID NO: 2862574 - RNA, 19 nt, Artificial Sequence
  Description of Artificial Sequence: Synthetic oligonucleotide
acagaccacagguguucuu

SEQ ID NO: 2862575 - RNA, 19 nt, Artificial Sequence
  Description of Artificial Sequence: Synthetic oligonucleotide
gggcacagcugcuaguaaa

SEQ ID NO: 2862576 - RNA, 19 nt, Artificial Sequence
  Description of Artificial Sequence: Synthetic oligonucleotide
ccagacgcagccuccagca

SEQ ID NO: 2862577 - RNA, 19 nt, Artificial Sequence
  Description of Artificial Sequence: Synthetic oligonucleotide
gguccugggucagggaggc

SEQ ID NO: 2862578 - RNA, 19 nt, Artificial Sequence
  Description of Artificial Sequence: Synthetic oligonucleotide
gcacagcugcuaguaaaag

SEQ ID NO: 2862579 - RNA, 19 nt, Artificial Sequence
  Description of Artificial Sequence: Synthetic oligonucleotide
ggcuggagaaguagugcug

SEQ ID NO: 2862580 - RNA, 19 nt, Artificial Sequence
  Description of Artificial Sequence: Synthetic oligonucleotide
ggaguacugguucuccacu

SEQ ID NO: 2862581 - RNA, 19 nt, Artificial Sequence
  Description of Artificial Sequence: Synthetic oligonucleotide
gugggugggcagguggcug

SEQ ID NO: 2862582 - RNA, 19 nt, Artificial Sequence
  Description of Artificial Sequence: Synthetic oligonucleotide
cuggccagccggcucuguc

SEQ ID NO: 2862583 - RNA, 19 nt, Artificial Sequence
  Description of Artificial Sequence: Synthetic oligonucleotide
gucagggaggccggccuug

SEQ ID NO: 2862584 - RNA, 19 nt, Artificial Sequence
  Description of Artificial Sequence: Synthetic oligonucleotide
gggcgggacagaccacagg

SEQ ID NO: 2862585 - RNA, 19 nt, Artificial Sequence
  Description of Artificial Sequence: Synthetic oligonucleotide
ggccaggcuggagaaguag

SEQ ID NO: 2862586 - RNA, 19 nt, Artificial Sequence
  Description of Artificial Sequence: Synthetic oligonucleotide
agccggcucuguccagcag

SEQ ID NO: 2862587 - RNA, 19 nt, Artificial Sequence
  Description of Artificial Sequence: Synthetic oligonucleotide
ccagcguggccuccguggg

SEQ ID NO: 2862588 - RNA, 19 nt, Artificial Sequence
  Description of Artificial Sequence: Synthetic oligonucleotide
ccgugcugggcgcuggucc

SEQ ID NO: 2862589 - RNA, 19 nt, Artificial Sequence
  Description of Artificial Sequence: Synthetic oligonucleotide
gaccuccgagggguauggg

SEQ ID NO: 2862590 - RNA, 19 nt, Artificial Sequence
  Description of Artificial Sequence: Synthetic oligonucleotide
uggccaggcuggagaagua

SEQ ID NO: 2862591 - RNA, 19 nt, Artificial Sequence
  Description of Artificial Sequence: Synthetic oligonucleotide
gccgaggaugaugacccag

SEQ ID NO: 2862592 - RNA, 19 nt, Artificial Sequence
  Description of Artificial Sequence: Synthetic oligonucleotide
gacgcagccuccagcaggu

SEQ ID NO: 2862593 - RNA, 19 nt, Artificial Sequence
  Description of Artificial Sequence: Synthetic oligonucleotide
gcgccauuagaaggugagg

SEQ ID NO: 2862594 - RNA, 19 nt, Artificial Sequence
  Description of Artificial Sequence: Synthetic oligonucleotide
aggccggccuugggcacgc

SEQ ID NO: 2862595 - RNA, 19 nt, Artificial Sequence
  Description of Artificial Sequence: Synthetic oligonucleotide
auggcaccgguggguaaug

SEQ ID NO: 2862596 - RNA, 19 nt, Artificial Sequence
  Description of Artificial Sequence: Synthetic oligonucleotide
ccugggucagggaggccgg

SEQ ID NO: 2862597 - RNA, 19 nt, Artificial Sequence
  Description of Artificial Sequence: Synthetic oligonucleotide
cuggugccaccgugcuggg

SEQ ID NO: 2862598 - RNA, 19 nt, Artificial Sequence
  Description of Artificial Sequence: Synthetic oligonucleotide
guucuuggccugcugugau

SEQ ID NO: 2862599 - RNA, 19 nt, Artificial Sequence
  Description of Artificial Sequence: Synthetic oligonucleotide
accgugcugggcgcugguc

SEQ ID NO: 2862600 - RNA, 19 nt, Artificial Sequence
  Description of Artificial Sequence: Synthetic oligonucleotide
ggcacagcugcuaguaaaa

SEQ ID NO: 2862601 - RNA, 19 nt, Artificial Sequence
  Description of Artificial Sequence: Synthetic oligonucleotide
ggggcauggauguggccga

SEQ ID NO: 2862602 - RNA, 19 nt, Artificial Sequence
  Description of Artificial Sequence: Synthetic oligonucleotide
cuguggccaggcuggagaa

SEQ ID NO: 2862603 - RNA, 19 nt, Artificial Sequence
  Description of Artificial Sequence: Synthetic oligonucleotide
gcacgagcgcggcccagcg

SEQ ID NO: 2862604 - RNA, 19 nt, Artificial Sequence
  Description of Artificial Sequence: Synthetic oligonucleotide
gugccaccgugcugggcgc

SEQ ID NO: 2862605 - RNA, 19 nt, Artificial Sequence
  Description of Artificial Sequence: Synthetic oligonucleotide
gccugcugugaugagcaug

SEQ ID NO: 2862606 - RNA, 19 nt, Artificial Sequence
  Description of Artificial Sequence: Synthetic oligonucleotide
cagcguggccuccgugggc

SEQ ID NO: 2862607 - RNA, 19 nt, Artificial Sequence
  Description of Artificial Sequence: Synthetic oligonucleotide
cagggaggccggccuuggg

SEQ ID NO: 2862608 - RNA, 19 nt, Artificial Sequence
  Description of Artificial Sequence: Synthetic oligonucleotide
gacagaccacagguguucu

SEQ ID NO: 2862609 - RNA, 19 nt, Artificial Sequence
  Description of Artificial Sequence: Synthetic oligonucleotide
ggcauggauguggccgagg

SEQ ID NO: 2862610 - RNA, 19 nt, Artificial Sequence
  Description of Artificial Sequence: Synthetic oligonucleotide
cagcgccauuagaagguga

SEQ ID NO: 2862611 - RNA, 19 nt, Artificial Sequence
  Description of Artificial Sequence: Synthetic oligonucleotide
gggcagguggcuguggcca

SEQ ID NO: 2862612 - RNA, 19 nt, Artificial Sequence
  Description of Artificial Sequence: Synthetic oligonucleotide
gcgcacacugagugggcgc

SEQ ID NO: 2862613 - RNA, 19 nt, Artificial Sequence
  Description of Artificial Sequence: Synthetic oligonucleotide
ccuugggcacgcacauagc

SEQ ID NO: 2862614 - RNA, 19 nt, Artificial Sequence
  Description of Artificial Sequence: Synthetic oligonucleotide
ccgaggaugaugacccaga

SEQ ID NO: 2862615 - RNA, 19 nt, Artificial Sequence
  Description of Artificial Sequence: Synthetic oligonucleotide
ggggcuggugccaccgugc

SEQ ID NO: 2862616 - RNA, 19 nt, Artificial Sequence
  Description of Artificial Sequence: Synthetic oligonucleotide
gagcauggcaccggugggu

SEQ ID NO: 2862617 - RNA, 19 nt, Artificial Sequence
  Description of Artificial Sequence: Synthetic oligonucleotide
gugggcucuucgguggcuc

SEQ ID NO: 2862618 - RNA, 19 nt, Artificial Sequence
  Description of Artificial Sequence: Synthetic oligonucleotide
uugcugcggcugcgcacac

SEQ ID NO: 2862619 - RNA, 19 nt, Artificial Sequence
  Description of Artificial Sequence: Synthetic oligonucleotide
ggcucuucgguggcuccag

SEQ ID NO: 2862620 - RNA, 19 nt, Artificial Sequence
  Description of Artificial Sequence: Synthetic oligonucleotide
cauagcuucuuagggugau

SEQ ID NO: 2862621 - RNA, 19 nt, Artificial Sequence
  Description of Artificial Sequence: Synthetic oligonucleotide
caggugcucugcgcuguug

SEQ ID NO: 2862622 - RNA, 19 nt, Artificial Sequence
  Description of Artificial Sequence: Synthetic oligonucleotide
gugcuggccagccggcucu

SEQ ID NO: 2862623 - RNA, 19 nt, Artificial Sequence
  Description of Artificial Sequence: Synthetic oligonucleotide
uggugccaccgugcugggc

SEQ ID NO: 2862624 - RNA, 19 nt, Artificial Sequence
  Description of Artificial Sequence: Synthetic oligonucleotide
ccacagguguucuuggccu

SEQ ID NO: 2862625 - RNA, 19 nt, Artificial Sequence
  Description of Artificial Sequence: Synthetic oligonucleotide
ggccagccggcucugucca

SEQ ID NO: 2862626 - RNA, 19 nt, Artificial Sequence
  Description of Artificial Sequence: Synthetic oligonucleotide
gcucugcgcuguugcugcg

SEQ ID NO: 2862627 - RNA, 19 nt, Artificial Sequence
  Description of Artificial Sequence: Synthetic oligonucleotide
cugggucagggaggccggc

SEQ ID NO: 2862628 - RNA, 19 nt, Artificial Sequence
  Description of Artificial Sequence: Synthetic oligonucleotide
gagcgcggcccagcguggc

SEQ ID NO: 2862629 - RNA, 19 nt, Artificial Sequence
  Description of Artificial Sequence: Synthetic oligonucleotide
gcagguggcuguggccagg

SEQ ID NO: 2862630 - RNA, 19 nt, Artificial Sequence
  Description of Artificial Sequence: Synthetic oligonucleotide
gcgggacagaccacaggug

SEQ ID NO: 2862631 - RNA, 19 nt, Artificial Sequence
  Description of Artificial Sequence: Synthetic oligonucleotide
ugcuggccagccggcucug

SEQ ID NO: 2862632 - RNA, 19 nt, Artificial Sequence
  Description of Artificial Sequence: Synthetic oligonucleotide
ugcugcggcugcgcacacu

SEQ ID NO: 2862633 - RNA, 19 nt, Artificial Sequence
  Description of Artificial Sequence: Synthetic oligonucleotide
agccuccagcaggugcucu

SEQ ID NO: 2862634 - RNA, 19 nt, Artificial Sequence
  Description of Artificial Sequence: Synthetic oligonucleotide
gguaaugggcacagcugcu

SEQ ID NO: 2862635 - RNA, 19 nt, Artificial Sequence
  Description of Artificial Sequence: Synthetic oligonucleotide
ggccuccgugggcucuucg

SEQ ID NO: 2862636 - RNA, 19 nt, Artificial Sequence
  Description of Artificial Sequence: Synthetic oligonucleotide
ggcuggugccaccgugcug

SEQ ID NO: 2862637 - RNA, 19 nt, Artificial Sequence
  Description of Artificial Sequence: Synthetic oligonucleotide
gcacacugagugggcgcgg

SEQ ID NO: 2862638 - RNA, 19 nt, Artificial Sequence
  Description of Artificial Sequence: Synthetic oligonucleotide
cauggauguggccgaggau

SEQ ID NO: 2862639 - RNA, 19 nt, Artificial Sequence
  Description of Artificial Sequence: Synthetic oligonucleotide
gcacgcacauagcuucuua

SEQ ID NO: 2862640 - RNA, 19 nt, Artificial Sequence
  Description of Artificial Sequence: Synthetic oligonucleotide
gacgaugcuccagcgccau

SEQ ID NO: 2862641 - RNA, 19 nt, Artificial Sequence
  Description of Artificial Sequence: Synthetic oligonucleotide
gggcgcugguccuggguca

SEQ ID NO: 2862642 - RNA, 19 nt, Artificial Sequence
  Description of Artificial Sequence: Synthetic oligonucleotide
ccggccuugggcacgcaca

SEQ ID NO: 2862643 - RNA, 19 nt, Artificial Sequence
  Description of Artificial Sequence: Synthetic oligonucleotide
cauggcaccgguggguaau

SEQ ID NO: 2862644 - RNA, 19 nt, Artificial Sequence
  Description of Artificial Sequence: Synthetic oligonucleotide
ccagcgccauuagaaggug

SEQ ID NO: 2862645 - RNA, 19 nt, Artificial Sequence
  Description of Artificial Sequence: Synthetic oligonucleotide
ggugcucugcgcuguugcu

SEQ ID NO: 2862646 - RNA, 19 nt, Artificial Sequence
  Description of Artificial Sequence: Synthetic oligonucleotide
ugccaccgugcugggcgcu

SEQ ID NO: 2862647 - RNA, 19 nt, Artificial Sequence
  Description of Artificial Sequence: Synthetic oligonucleotide
acgaugcuccagcgccauu

SEQ ID NO: 2862648 - RNA, 19 nt, Artificial Sequence
  Description of Artificial Sequence: Synthetic oligonucleotide
gugcugggcgcugguccug

SEQ ID NO: 2862649 - RNA, 19 nt, Artificial Sequence
  Description of Artificial Sequence: Synthetic oligonucleotide
ccagcaggugcucugcgcu

SEQ ID NO: 2862650 - RNA, 19 nt, Artificial Sequence
  Description of Artificial Sequence: Synthetic oligonucleotide
gcugguccugggucaggga

SEQ ID NO: 2862651 - RNA, 19 nt, Artificial Sequence
  Description of Artificial Sequence: Synthetic oligonucleotide
gcugggcgcugguccuggg

SEQ ID NO: 2862652 - RNA, 19 nt, Artificial Sequence
  Description of Artificial Sequence: Synthetic oligonucleotide
cugcacgagcgcggcccag

SEQ ID NO: 2862653 - RNA, 19 nt, Artificial Sequence
  Description of Artificial Sequence: Synthetic oligonucleotide
ggcuguggccaggcuggag

SEQ ID NO: 2862654 - RNA, 19 nt, Artificial Sequence
  Description of Artificial Sequence: Synthetic oligonucleotide
cgccauuagaaggugaggu

SEQ ID NO: 2862655 - RNA, 19 nt, Artificial Sequence
  Description of Artificial Sequence: Synthetic oligonucleotide
cgguggguaaugggcacag

SEQ ID NO: 2862656 - RNA, 19 nt, Artificial Sequence
  Description of Artificial Sequence: Synthetic oligonucleotide
cagccuccagcaggugcuc

SEQ ID NO: 2862657 - RNA, 19 nt, Artificial Sequence
  Description of Artificial Sequence: Synthetic oligonucleotide
gcuccagacgcagccucca

SEQ ID NO: 2862658 - RNA, 19 nt, Artificial Sequence
  Description of Artificial Sequence: Synthetic oligonucleotide
gggcauggauguggccgag

SEQ ID NO: 2862659 - RNA, 19 nt, Artificial Sequence
  Description of Artificial Sequence: Synthetic oligonucleotide
gugaggugggugggcaggu

SEQ ID NO: 2862660 - RNA, 19 nt, Artificial Sequence
  Description of Artificial Sequence: Synthetic oligonucleotide
gccggccuugggcacgcac

SEQ ID NO: 2862661 - RNA, 19 nt, Artificial Sequence
  Description of Artificial Sequence: Synthetic oligonucleotide
cugcggcugcgcacacuga

SEQ ID NO: 2862662 - RNA, 19 nt, Artificial Sequence
  Description of Artificial Sequence: Synthetic oligonucleotide
ccgugggcucuucgguggc

SEQ ID NO: 2862663 - RNA, 19 nt, Artificial Sequence
  Description of Artificial Sequence: Synthetic oligonucleotide
cgggacagaccacaggugu

SEQ ID NO: 2862664 - RNA, 19 nt, Artificial Sequence
  Description of Artificial Sequence: Synthetic oligonucleotide
gcucuucgguggcuccaga

SEQ ID NO: 2862665 - RNA, 19 nt, Artificial Sequence
  Description of Artificial Sequence: Synthetic oligonucleotide
gccaggcuggagaaguagu

SEQ ID NO: 2862666 - RNA, 19 nt, Artificial Sequence
  Description of Artificial Sequence: Synthetic oligonucleotide
gccagccggcucuguccag

SEQ ID NO: 2862667 - RNA, 19 nt, Artificial Sequence
  Description of Artificial Sequence: Synthetic oligonucleotide
ggccgaggaugaugaccca

SEQ ID NO: 2862668 - RNA, 19 nt, Artificial Sequence
  Description of Artificial Sequence: Synthetic oligonucleotide
gggugggcagguggcugug

SEQ ID NO: 2862669 - RNA, 19 nt, Artificial Sequence
  Description of Artificial Sequence: Synthetic oligonucleotide
cugggcgcugguccugggu

SEQ ID NO: 2862670 - RNA, 19 nt, Artificial Sequence
  Description of Artificial Sequence: Synthetic oligonucleotide
ccacugcacgagcgcggcc

SEQ ID NO: 2862671 - RNA, 19 nt, Artificial Sequence
  Description of Artificial Sequence: Synthetic oligonucleotide
guccugggucagggaggcc

SEQ ID NO: 2862672 - RNA, 19 nt, Artificial Sequence
  Description of Artificial Sequence: Synthetic oligonucleotide
cgagcgcggcccagcgugg

SEQ ID NO: 2862673 - RNA, 19 nt, Artificial Sequence
  Description of Artificial Sequence: Synthetic oligonucleotide
gcauggcaccgguggguaa

SEQ ID NO: 2862674 - RNA, 19 nt, Artificial Sequence
  Description of Artificial Sequence: Synthetic oligonucleotide
cgaugcuccagcgccauua

SEQ ID NO: 2862675 - RNA, 19 nt, Artificial Sequence
  Description of Artificial Sequence: Synthetic oligonucleotide
gcccagcguggccuccgug

SEQ ID NO: 2862676 - RNA, 19 nt, Artificial Sequence
  Description of Artificial Sequence: Synthetic oligonucleotide
gggcuggugccaccgugcu

SEQ ID NO: 2862677 - RNA, 19 nt, Artificial Sequence
  Description of Artificial Sequence: Synthetic oligonucleotide
cagguguucuuggccugcu

SEQ ID NO: 2862678 - RNA, 19 nt, Artificial Sequence
  Description of Artificial Sequence: Synthetic oligonucleotide
gccaccgugcugggcgcug

SEQ ID NO: 2862679 - RNA, 19 nt, Artificial Sequence
  Description of Artificial Sequence: Synthetic oligonucleotide
ccuccgugggcucuucggu

SEQ ID NO: 2862680 - RNA, 19 nt, Artificial Sequence
  Description of Artificial Sequence: Synthetic oligonucleotide
ggugggugggcagguggcu

SEQ ID NO: 2862681 - RNA, 19 nt, Artificial Sequence
  Description of Artificial Sequence: Synthetic oligonucleotide
gggguggguguggaagugu

SEQ ID NO: 2862682 - RNA, 19 nt, Artificial Sequence
  Description of Artificial Sequence: Synthetic oligonucleotide
gggacagaccacagguguu

SEQ ID NO: 2862683 - RNA, 19 nt, Artificial Sequence
  Description of Artificial Sequence: Synthetic oligonucleotide
gcgcugguccugggucagg

SEQ ID NO: 2862684 - RNA, 19 nt, Artificial Sequence
  Description of Artificial Sequence: Synthetic oligonucleotide
cgacgaugcuccagcgcca

SEQ ID NO: 2862685 - RNA, 19 nt, Artificial Sequence
  Description of Artificial Sequence: Synthetic oligonucleotide
cugcgcuguugcugcggcu

SEQ ID NO: 2862686 - RNA, 19 nt, Artificial Sequence
  Description of Artificial Sequence: Synthetic oligonucleotide
ccccugaccuccgaggggu

SEQ ID NO: 2862687 - RNA, 19 nt, Artificial Sequence
  Description of Artificial Sequence: Synthetic oligonucleotide
ccgguggguaaugggcaca

SEQ ID NO: 2862688 - RNA, 19 nt, Artificial Sequence
  Description of Artificial Sequence: Synthetic oligonucleotide
cacgagcgcggcccagcgu

SEQ ID NO: 2862689 - RNA, 19 nt, Artificial Sequence
  Description of Artificial Sequence: Synthetic oligonucleotide
ggucagggaggccggccuu

SEQ ID NO: 2862690 - RNA, 19 nt, Artificial Sequence
  Description of Artificial Sequence: Synthetic oligonucleotide
gcggcugcgcacacugagu

SEQ ID NO: 2862691 - RNA, 19 nt, Artificial Sequence
  Description of Artificial Sequence: Synthetic oligonucleotide
gggcacgcacauagcuucu

SEQ ID NO: 2862692 - RNA, 19 nt, Artificial Sequence
  Description of Artificial Sequence: Synthetic oligonucleotide
cgugcugggcgcugguccu

SEQ ID NO: 2862693 - RNA, 19 nt, Artificial Sequence
  Description of Artificial Sequence: Synthetic oligonucleotide
cccagaugacgacgaugcu

SEQ ID NO: 2862694 - RNA, 19 nt, Artificial Sequence
  Description of Artificial Sequence: Synthetic oligonucleotide
gcguggccuccgugggcuc

SEQ ID NO: 2862695 - RNA, 19 nt, Artificial Sequence
  Description of Artificial Sequence: Synthetic oligonucleotide
ggauguggccgaggaugau

SEQ ID NO: 2862696 - RNA, 19 nt, Artificial Sequence
  Description of Artificial Sequence: Synthetic oligonucleotide
ggcacgcacauagcuucuu

SEQ ID NO: 2862697 - RNA, 19 nt, Artificial Sequence
  Description of Artificial Sequence: Synthetic oligonucleotide
cggcccagcguggccuccg

SEQ ID NO: 2862698 - RNA, 19 nt, Artificial Sequence
  Description of Artificial Sequence: Synthetic oligonucleotide
ggccuugggcacgcacaua

SEQ ID NO: 2862699 - RNA, 19 nt, Artificial Sequence
  Description of Artificial Sequence: Synthetic oligonucleotide
ggccugcugugaugagcau

SEQ ID NO: 2862700 - RNA, 19 nt, Artificial Sequence
  Description of Artificial Sequence: Synthetic oligonucleotide
guggccuccgugggcucuu

SEQ ID NO: 2862701 - RNA, 19 nt, Artificial Sequence
  Description of Artificial Sequence: Synthetic oligonucleotide
cggcucuguccagcaggag

SEQ ID NO: 2862702 - RNA, 19 nt, Artificial Sequence
  Description of Artificial Sequence: Synthetic oligonucleotide
gcgcggcccagcguggccu

SEQ ID NO: 2862703 - RNA, 19 nt, Artificial Sequence
  Description of Artificial Sequence: Synthetic oligonucleotide
gcaggugcucugcgcuguu

SEQ ID NO: 2862704 - RNA, 19 nt, Artificial Sequence
  Description of Artificial Sequence: Synthetic oligonucleotide
ggcccagcguggccuccgu

SEQ ID NO: 2862705 - RNA, 19 nt, Artificial Sequence
  Description of Artificial Sequence: Synthetic oligonucleotide
cgcggcccagcguggccuc

SEQ ID NO: 2862706 - RNA, 19 nt, Artificial Sequence
  Description of Artificial Sequence: Synthetic oligonucleotide
ccugaccuccgagggguau

SEQ ID NO: 2862707 - RNA, 19 nt, Artificial Sequence
  Description of Artificial Sequence: Synthetic oligonucleotide
cccugaccuccgaggggua

SEQ ID NO: 2862708 - RNA, 19 nt, Artificial Sequence
  Description of Artificial Sequence: Synthetic oligonucleotide
cggccuugggcacgcacau

SEQ ID NO: 2862709 - RNA, 19 nt, Artificial Sequence
  Description of Artificial Sequence: Synthetic oligonucleotide
gcuggccagccggcucugu

SEQ ID NO: 2862710 - RNA, 19 nt, Artificial Sequence
  Description of Artificial Sequence: Synthetic oligonucleotide
cguggccuccgugggcucu

SEQ ID NO: 2862711 - RNA, 19 nt, Artificial Sequence
  Description of Artificial Sequence: Synthetic oligonucleotide
cgugggcucuucgguggcu

SEQ ID NO: 2862712 - RNA, 19 nt, Artificial Sequence
  Description of Artificial Sequence: Synthetic oligonucleotide
aaucuuucccuguugagcc

SEQ ID NO: 2862713 - RNA, 19 nt, Artificial Sequence
  Description of Artificial Sequence: Synthetic oligonucleotide
ugaaagacaaaguuucucg

SEQ ID NO: 2862714 - RNA, 19 nt, Artificial Sequence
  Description of Artificial Sequence: Synthetic oligonucleotide
aacuguaugaaagacaaag

SEQ ID NO: 2862715 - RNA, 19 nt, Artificial Sequence
  Description of Artificial Sequence: Synthetic oligonucleotide
gauggugacaucauuaacg

SEQ ID NO: 2862716 - RNA, 19 nt, Artificial Sequence
  Description of Artificial Sequence: Synthetic oligonucleotide
ucuuuagucguuuagguga

SEQ ID NO: 2862717 - RNA, 19 nt, Artificial Sequence
  Description of Artificial Sequence: Synthetic oligonucleotide
uuggcuguaacuuucuugg

SEQ ID NO: 2862718 - RNA, 19 nt, Artificial Sequence
  Description of Artificial Sequence: Synthetic oligonucleotide
uauuaucugucuuuagucg

SEQ ID NO: 2862719 - RNA, 19 nt, Artificial Sequence
  Description of Artificial Sequence: Synthetic oligonucleotide
aaagacaaaguuucucgag

SEQ ID NO: 2862720 - RNA, 19 nt, Artificial Sequence
  Description of Artificial Sequence: Synthetic oligonucleotide
ucaccugaggcuuagauga

SEQ ID NO: 2862721 - RNA, 19 nt, Artificial Sequence
  Description of Artificial Sequence: Synthetic oligonucleotide
cauaaauugacugucuucc

SEQ ID NO: 2862722 - RNA, 19 nt, Artificial Sequence
  Description of Artificial Sequence: Synthetic oligonucleotide
acaucauuaacgauggccc

SEQ ID NO: 2862723 - RNA, 19 nt, Artificial Sequence
  Description of Artificial Sequence: Synthetic oligonucleotide
uggacugcuauuauuaucu

SEQ ID NO: 2862724 - RNA, 19 nt, Artificial Sequence
  Description of Artificial Sequence: Synthetic oligonucleotide
cagacuucgauacacaacc

SEQ ID NO: 2862725 - RNA, 19 nt, Artificial Sequence
  Description of Artificial Sequence: Synthetic oligonucleotide
cuucaaaaggguuacuggg

SEQ ID NO: 2862726 - RNA, 19 nt, Artificial Sequence
  Description of Artificial Sequence: Synthetic oligonucleotide
auuauuaucugucuuuagu

SEQ ID NO: 2862727 - RNA, 19 nt, Artificial Sequence
  Description of Artificial Sequence: Synthetic oligonucleotide
aacuuucuuggcuagcauc

SEQ ID NO: 2862728 - RNA, 19 nt, Artificial Sequence
  Description of Artificial Sequence: Synthetic oligonucleotide
acaaaguuucucgaguucc

SEQ ID NO: 2862729 - RNA, 19 nt, Artificial Sequence
  Description of Artificial Sequence: Synthetic oligonucleotide
uguaugaaagacaaaguuu

SEQ ID NO: 2862730 - RNA, 19 nt, Artificial Sequence
  Description of Artificial Sequence: Synthetic oligonucleotide
uuauuaucugucuuuaguc

SEQ ID NO: 2862731 - RNA, 19 nt, Artificial Sequence
  Description of Artificial Sequence: Synthetic oligonucleotide
gauacacaaccacagcacg

SEQ ID NO: 2862732 - RNA, 19 nt, Artificial Sequence
  Description of Artificial Sequence: Synthetic oligonucleotide
uaaauugacugucuucccc

SEQ ID NO: 2862733 - RNA, 19 nt, Artificial Sequence
  Description of Artificial Sequence: Synthetic oligonucleotide
aagacaaaguuucucgagu

SEQ ID NO: 2862734 - RNA, 19 nt, Artificial Sequence
  Description of Artificial Sequence: Synthetic oligonucleotide
auaaauugacugucuuccc

SEQ ID NO: 2862735 - RNA, 19 nt, Artificial Sequence
  Description of Artificial Sequence: Synthetic oligonucleotide
aaauugacugucuucccca

SEQ ID NO: 2862736 - RNA, 19 nt, Artificial Sequence
  Description of Artificial Sequence: Synthetic oligonucleotide
cuuucuucucaccugaggc

SEQ ID NO: 2862737 - RNA, 19 nt, Artificial Sequence
  Description of Artificial Sequence: Synthetic oligonucleotide
gacaucauuaacgauggcc

SEQ ID NO: 2862738 - RNA, 19 nt, Artificial Sequence
  Description of Artificial Sequence: Synthetic oligonucleotide
uucuguagcgcuuuggcug

SEQ ID NO: 2862739 - RNA, 19 nt, Artificial Sequence
  Description of Artificial Sequence: Synthetic oligonucleotide
acugcuauuauuaucuguc

SEQ ID NO: 2862740 - RNA, 19 nt, Artificial Sequence
  Description of Artificial Sequence: Synthetic oligonucleotide
aacgauggccccuuucuuc

SEQ ID NO: 2862741 - RNA, 19 nt, Artificial Sequence
  Description of Artificial Sequence: Synthetic oligonucleotide
auuggcagucuucuguagc

SEQ ID NO: 2862742 - RNA, 19 nt, Artificial Sequence
  Description of Artificial Sequence: Synthetic oligonucleotide
uucaaaaggguuacugggc

SEQ ID NO: 2862743 - RNA, 19 nt, Artificial Sequence
  Description of Artificial Sequence: Synthetic oligonucleotide
uucgcuuugguccuggacu

SEQ ID NO: 2862744 - RNA, 19 nt, Artificial Sequence
  Description of Artificial Sequence: Synthetic oligonucleotide
acugucuuccccaaugucc

SEQ ID NO: 2862745 - RNA, 19 nt, Artificial Sequence
  Description of Artificial Sequence: Synthetic oligonucleotide
uuagucguuuaggugaugg

SEQ ID NO: 2862746 - RNA, 19 nt, Artificial Sequence
  Description of Artificial Sequence: Synthetic oligonucleotide
uuaacgauggccccuuucu

SEQ ID NO: 2862747 - RNA, 19 nt, Artificial Sequence
  Description of Artificial Sequence: Synthetic oligonucleotide
uuggcuagcaucauaaauu

SEQ ID NO: 2862748 - RNA, 19 nt, Artificial Sequence
  Description of Artificial Sequence: Synthetic oligonucleotide
aggguuacugggcacagac

SEQ ID NO: 2862749 - RNA, 19 nt, Artificial Sequence
  Description of Artificial Sequence: Synthetic oligonucleotide
guaugaaagacaaaguuuc

SEQ ID NO: 2862750 - RNA, 19 nt, Artificial Sequence
  Description of Artificial Sequence: Synthetic oligonucleotide
ucaaaaggguuacugggca

SEQ ID NO: 2862751 - RNA, 19 nt, Artificial Sequence
  Description of Artificial Sequence: Synthetic oligonucleotide
gaaacuguaugaaagacaa

SEQ ID NO: 2862752 - RNA, 19 nt, Artificial Sequence
  Description of Artificial Sequence: Synthetic oligonucleotide
aaguuucucgaguuccggg

SEQ ID NO: 2862753 - RNA, 19 nt, Artificial Sequence
  Description of Artificial Sequence: Synthetic oligonucleotide
uuagcaaggagccagucuu

SEQ ID NO: 2862754 - RNA, 19 nt, Artificial Sequence
  Description of Artificial Sequence: Synthetic oligonucleotide
uagcaucauaaauugacug

SEQ ID NO: 2862755 - RNA, 19 nt, Artificial Sequence
  Description of Artificial Sequence: Synthetic oligonucleotide
aguuucucgaguuccgggg

SEQ ID NO: 2862756 - RNA, 19 nt, Artificial Sequence
  Description of Artificial Sequence: Synthetic oligonucleotide
auucguuccuuccuccacc

SEQ ID NO: 2862757 - RNA, 19 nt, Artificial Sequence
  Description of Artificial Sequence: Synthetic oligonucleotide
uuuggcuguaacuuucuug

SEQ ID NO: 2862758 - RNA, 19 nt, Artificial Sequence
  Description of Artificial Sequence: Synthetic oligonucleotide
uucagcugcaaucuuuccc

SEQ ID NO: 2862759 - RNA, 19 nt, Artificial Sequence
  Description of Artificial Sequence: Synthetic oligonucleotide
ucugucuuuagucguuuag

SEQ ID NO: 2862760 - RNA, 19 nt, Artificial Sequence
  Description of Artificial Sequence: Synthetic oligonucleotide
cuucgauacacaaccacag

SEQ ID NO: 2862761 - RNA, 19 nt, Artificial Sequence
  Description of Artificial Sequence: Synthetic oligonucleotide
uuggcagucuucuguagcg

SEQ ID NO: 2862762 - RNA, 19 nt, Artificial Sequence
  Description of Artificial Sequence: Synthetic oligonucleotide
uuaggugauggugacauca

SEQ ID NO: 2862763 - RNA, 19 nt, Artificial Sequence
  Description of Artificial Sequence: Synthetic oligonucleotide
agaugauuccuuugcucgc

SEQ ID NO: 2862764 - RNA, 19 nt, Artificial Sequence
  Description of Artificial Sequence: Synthetic oligonucleotide
uugacugucuuccccaaug

SEQ ID NO: 2862765 - RNA, 19 nt, Artificial Sequence
  Description of Artificial Sequence: Synthetic oligonucleotide
auuaucugucuuuagucgu

SEQ ID NO: 2862766 - RNA, 19 nt, Artificial Sequence
  Description of Artificial Sequence: Synthetic oligonucleotide
ucccuguugagccuguucc

SEQ ID NO: 2862767 - RNA, 19 nt, Artificial Sequence
  Description of Artificial Sequence: Synthetic oligonucleotide
agcaucauaaauugacugu

SEQ ID NO: 2862768 - RNA, 19 nt, Artificial Sequence
  Description of Artificial Sequence: Synthetic oligonucleotide
uauuauuaucugucuuuag

SEQ ID NO: 2862769 - RNA, 19 nt, Artificial Sequence
  Description of Artificial Sequence: Synthetic oligonucleotide
ugucuuuagucguuuaggu

SEQ ID NO: 2862770 - RNA, 19 nt, Artificial Sequence
  Description of Artificial Sequence: Synthetic oligonucleotide
uucuuggcuagcaucauaa

SEQ ID NO: 2862771 - RNA, 19 nt, Artificial Sequence
  Description of Artificial Sequence: Synthetic oligonucleotide
uggcuagcaucauaaauug

SEQ ID NO: 2862772 - RNA, 19 nt, Artificial Sequence
  Description of Artificial Sequence: Synthetic oligonucleotide
acaaccacagcacgauugg

SEQ ID NO: 2862773 - RNA, 19 nt, Artificial Sequence
  Description of Artificial Sequence: Synthetic oligonucleotide
gugacaucauuaacgaugg

SEQ ID NO: 2862774 - RNA, 19 nt, Artificial Sequence
  Description of Artificial Sequence: Synthetic oligonucleotide
ggugacaucauuaacgaug

SEQ ID NO: 2862775 - RNA, 19 nt, Artificial Sequence
  Description of Artificial Sequence: Synthetic oligonucleotide
uuacugggcacagacuucg

SEQ ID NO: 2862776 - RNA, 19 nt, Artificial Sequence
  Description of Artificial Sequence: Synthetic oligonucleotide
aaaguuucucgaguuccgg

SEQ ID NO: 2862777 - RNA, 19 nt, Artificial Sequence
  Description of Artificial Sequence: Synthetic oligonucleotide
ucauaaauugacugucuuc

SEQ ID NO: 2862778 - RNA, 19 nt, Artificial Sequence
  Description of Artificial Sequence: Synthetic oligonucleotide
augaaagacaaaguuucuc

SEQ ID NO: 2862779 - RNA, 19 nt, Artificial Sequence
  Description of Artificial Sequence: Synthetic oligonucleotide
uuagaugauuccuuugcuc

SEQ ID NO: 2862780 - RNA, 19 nt, Artificial Sequence
  Description of Artificial Sequence: Synthetic oligonucleotide
uuuagcaaggagccagucu

SEQ ID NO: 2862781 - RNA, 19 nt, Artificial Sequence
  Description of Artificial Sequence: Synthetic oligonucleotide
ugguuuagcaaggagccag

SEQ ID NO: 2862782 - RNA, 19 nt, Artificial Sequence
  Description of Artificial Sequence: Synthetic oligonucleotide
uaugaaagacaaaguuucu

SEQ ID NO: 2862783 - RNA, 19 nt, Artificial Sequence
  Description of Artificial Sequence: Synthetic oligonucleotide
ugcaaucuuucccuguuga

SEQ ID NO: 2862784 - RNA, 19 nt, Artificial Sequence
  Description of Artificial Sequence: Synthetic oligonucleotide
auggugacaucauuaacga

SEQ ID NO: 2862785 - RNA, 19 nt, Artificial Sequence
  Description of Artificial Sequence: Synthetic oligonucleotide
cucucguucgauucguucc

SEQ ID NO: 2862786 - RNA, 19 nt, Artificial Sequence
  Description of Artificial Sequence: Synthetic oligonucleotide
gaaagacaaaguuucucga

SEQ ID NO: 2862787 - RNA, 19 nt, Artificial Sequence
  Description of Artificial Sequence: Synthetic oligonucleotide
ucgccucuggccuuggugg

SEQ ID NO: 2862788 - RNA, 19 nt, Artificial Sequence
  Description of Artificial Sequence: Synthetic oligonucleotide
ucagcuggugagcauuucc

SEQ ID NO: 2862789 - RNA, 19 nt, Artificial Sequence
  Description of Artificial Sequence: Synthetic oligonucleotide
auuaacgauggccccuuuc

SEQ ID NO: 2862790 - RNA, 19 nt, Artificial Sequence
  Description of Artificial Sequence: Synthetic oligonucleotide
ugggguugagguccgacag

SEQ ID NO: 2862791 - RNA, 19 nt, Artificial Sequence
  Description of Artificial Sequence: Synthetic oligonucleotide
cuugggcugguuuagcaag

SEQ ID NO: 2862792 - RNA, 19 nt, Artificial Sequence
  Description of Artificial Sequence: Synthetic oligonucleotide
caaaguuucucgaguuccg

SEQ ID NO: 2862793 - RNA, 19 nt, Artificial Sequence
  Description of Artificial Sequence: Synthetic oligonucleotide
ugggcacagacuucgauac

SEQ ID NO: 2862794 - RNA, 19 nt, Artificial Sequence
  Description of Artificial Sequence: Synthetic oligonucleotide
uucgauacacaaccacagc

SEQ ID NO: 2862795 - RNA, 19 nt, Artificial Sequence
  Description of Artificial Sequence: Synthetic oligonucleotide
aaaaggguuacugggcaca

SEQ ID NO: 2862796 - RNA, 19 nt, Artificial Sequence
  Description of Artificial Sequence: Synthetic oligonucleotide
uggugggagaaacuguaug

SEQ ID NO: 2862797 - RNA, 19 nt, Artificial Sequence
  Description of Artificial Sequence: Synthetic oligonucleotide
caaucuuucccuguugagc

SEQ ID NO: 2862798 - RNA, 19 nt, Artificial Sequence
  Description of Artificial Sequence: Synthetic oligonucleotide
uccuggacugcuauuauua

SEQ ID NO: 2862799 - RNA, 19 nt, Artificial Sequence
  Description of Artificial Sequence: Synthetic oligonucleotide
gaagccacugcucucguuc

SEQ ID NO: 2862800 - RNA, 19 nt, Artificial Sequence
  Description of Artificial Sequence: Synthetic oligonucleotide
uuucuucucaccugaggcu

SEQ ID NO: 2862801 - RNA, 19 nt, Artificial Sequence
  Description of Artificial Sequence: Synthetic oligonucleotide
caaggagccagucuucagc

SEQ ID NO: 2862802 - RNA, 19 nt, Artificial Sequence
  Description of Artificial Sequence: Synthetic oligonucleotide
gagaaacuguaugaaagac

SEQ ID NO: 2862803 - RNA, 19 nt, Artificial Sequence
  Description of Artificial Sequence: Synthetic oligonucleotide
cacaaccacagcacgauug

SEQ ID NO: 2862804 - RNA, 19 nt, Artificial Sequence
  Description of Artificial Sequence: Synthetic oligonucleotide
ggucugauggcuucaaaag

SEQ ID NO: 2862805 - RNA, 19 nt, Artificial Sequence
  Description of Artificial Sequence: Synthetic oligonucleotide
auggcuucaaaaggguuac

SEQ ID NO: 2862806 - RNA, 19 nt, Artificial Sequence
  Description of Artificial Sequence: Synthetic oligonucleotide
gcuucaaaaggguuacugg

SEQ ID NO: 2862807 - RNA, 19 nt, Artificial Sequence
  Description of Artificial Sequence: Synthetic oligonucleotide
aagccacugcucucguucg

SEQ ID NO: 2862808 - RNA, 19 nt, Artificial Sequence
  Description of Artificial Sequence: Synthetic oligonucleotide
accacagcacgauuggcag

SEQ ID NO: 2862809 - RNA, 19 nt, Artificial Sequence
  Description of Artificial Sequence: Synthetic oligonucleotide
acugcucucguucgauucg

SEQ ID NO: 2862810 - RNA, 19 nt, Artificial Sequence
  Description of Artificial Sequence: Synthetic oligonucleotide
cugucuuuagucguuuagg

SEQ ID NO: 2862811 - RNA, 19 nt, Artificial Sequence
  Description of Artificial Sequence: Synthetic oligonucleotide
acgauuggcagucuucugu

SEQ ID NO: 2862812 - RNA, 19 nt, Artificial Sequence
  Description of Artificial Sequence: Synthetic oligonucleotide
gggagaaacuguaugaaag

SEQ ID NO: 2862813 - RNA, 19 nt, Artificial Sequence
  Description of Artificial Sequence: Synthetic oligonucleotide
gacuucgauacacaaccac

SEQ ID NO: 2862814 - RNA, 19 nt, Artificial Sequence
  Description of Artificial Sequence: Synthetic oligonucleotide
gcauuuccuggucugaugg

SEQ ID NO: 2862815 - RNA, 19 nt, Artificial Sequence
  Description of Artificial Sequence: Synthetic oligonucleotide
gcuuagaugauuccuuugc

SEQ ID NO: 2862816 - RNA, 19 nt, Artificial Sequence
  Description of Artificial Sequence: Synthetic oligonucleotide
ugauggugacaucauuaac

SEQ ID NO: 2862817 - RNA, 19 nt, Artificial Sequence
  Description of Artificial Sequence: Synthetic oligonucleotide
uugggcugguuuagcaagg

SEQ ID NO: 2862818 - RNA, 19 nt, Artificial Sequence
  Description of Artificial Sequence: Synthetic oligonucleotide
agucguuuaggugauggug

SEQ ID NO: 2862819 - RNA, 19 nt, Artificial Sequence
  Description of Artificial Sequence: Synthetic oligonucleotide
gucuuuagucguuuaggug

SEQ ID NO: 2862820 - RNA, 19 nt, Artificial Sequence
  Description of Artificial Sequence: Synthetic oligonucleotide
caucauuaacgauggcccc

SEQ ID NO: 2862821 - RNA, 19 nt, Artificial Sequence
  Description of Artificial Sequence: Synthetic oligonucleotide
ugaggcuuagaugauuccu

SEQ ID NO: 2862822 - RNA, 19 nt, Artificial Sequence
  Description of Artificial Sequence: Synthetic oligonucleotide
acagacuucgauacacaac

SEQ ID NO: 2862823 - RNA, 19 nt, Artificial Sequence
  Description of Artificial Sequence: Synthetic oligonucleotide
uugagccuguucccgaagc

SEQ ID NO: 2862824 - RNA, 19 nt, Artificial Sequence
  Description of Artificial Sequence: Synthetic oligonucleotide
ugcuauuauuaucugucuu

SEQ ID NO: 2862825 - RNA, 19 nt, Artificial Sequence
  Description of Artificial Sequence: Synthetic oligonucleotide
uucgauucguuccuuccuc

SEQ ID NO: 2862826 - RNA, 19 nt, Artificial Sequence
  Description of Artificial Sequence: Synthetic oligonucleotide
uuucucgaguuccggggag

SEQ ID NO: 2862827 - RNA, 19 nt, Artificial Sequence
  Description of Artificial Sequence: Synthetic oligonucleotide
gcuagcaucauaaauugac

SEQ ID NO: 2862828 - RNA, 19 nt, Artificial Sequence
  Description of Artificial Sequence: Synthetic oligonucleotide
aguuccggggagcacuggg

SEQ ID NO: 2862829 - RNA, 19 nt, Artificial Sequence
  Description of Artificial Sequence: Synthetic oligonucleotide
ucucguucgauucguuccu

SEQ ID NO: 2862830 - RNA, 19 nt, Artificial Sequence
  Description of Artificial Sequence: Synthetic oligonucleotide
aucauaaauugacugucuu

SEQ ID NO: 2862831 - RNA, 19 nt, Artificial Sequence
  Description of Artificial Sequence: Synthetic oligonucleotide
uucccgaagccacugcucu

SEQ ID NO: 2862832 - RNA, 19 nt, Artificial Sequence
  Description of Artificial Sequence: Synthetic oligonucleotide
gaugauuccuuugcucgcc

SEQ ID NO: 2862833 - RNA, 19 nt, Artificial Sequence
  Description of Artificial Sequence: Synthetic oligonucleotide
cucaccugaggcuuagaug

SEQ ID NO: 2862834 - RNA, 19 nt, Artificial Sequence
  Description of Artificial Sequence: Synthetic oligonucleotide
uguucccgaagccacugcu

SEQ ID NO: 2862835 - RNA, 19 nt, Artificial Sequence
  Description of Artificial Sequence: Synthetic oligonucleotide
gauuggcagucuucuguag

SEQ ID NO: 2862836 - RNA, 19 nt, Artificial Sequence
  Description of Artificial Sequence: Synthetic oligonucleotide
gacaaaguuucucgaguuc

SEQ ID NO: 2862837 - RNA, 19 nt, Artificial Sequence
  Description of Artificial Sequence: Synthetic oligonucleotide
ucucaccugaggcuuagau

SEQ ID NO: 2862838 - RNA, 19 nt, Artificial Sequence
  Description of Artificial Sequence: Synthetic oligonucleotide
aaccacagcacgauuggca

SEQ ID NO: 2862839 - RNA, 19 nt, Artificial Sequence
  Description of Artificial Sequence: Synthetic oligonucleotide
ugagccuguucccgaagcc

SEQ ID NO: 2862840 - RNA, 19 nt, Artificial Sequence
  Description of Artificial Sequence: Synthetic oligonucleotide
ucuguagcgcuuuggcugu

SEQ ID NO: 2862841 - RNA, 19 nt, Artificial Sequence
  Description of Artificial Sequence: Synthetic oligonucleotide
aaaggguuacugggcacag

SEQ ID NO: 2862842 - RNA, 19 nt, Artificial Sequence
  Description of Artificial Sequence: Synthetic oligonucleotide
ugggagaaacuguaugaaa

SEQ ID NO: 2862843 - RNA, 19 nt, Artificial Sequence
  Description of Artificial Sequence: Synthetic oligonucleotide
agacaaaguuucucgaguu

SEQ ID NO: 2862844 - RNA, 19 nt, Artificial Sequence
  Description of Artificial Sequence: Synthetic oligonucleotide
acuucgauacacaaccaca

SEQ ID NO: 2862845 - RNA, 19 nt, Artificial Sequence
  Description of Artificial Sequence: Synthetic oligonucleotide
uuugguccuggacugcuau

SEQ ID NO: 2862846 - RNA, 19 nt, Artificial Sequence
  Description of Artificial Sequence: Synthetic oligonucleotide
uuaucugucuuuagucguu

SEQ ID NO: 2862847 - RNA, 19 nt, Artificial Sequence
  Description of Artificial Sequence: Synthetic oligonucleotide
gauucguuccuuccuccac

SEQ ID NO: 2862848 - RNA, 19 nt, Artificial Sequence
  Description of Artificial Sequence: Synthetic oligonucleotide
ugacugucuuccccaaugu

SEQ ID NO: 2862849 - RNA, 19 nt, Artificial Sequence
  Description of Artificial Sequence: Synthetic oligonucleotide
acuguaugaaagacaaagu

SEQ ID NO: 2862850 - RNA, 19 nt, Artificial Sequence
  Description of Artificial Sequence: Synthetic oligonucleotide
ucgcuuugguccuggacug

SEQ ID NO: 2862851 - RNA, 19 nt, Artificial Sequence
  Description of Artificial Sequence: Synthetic oligonucleotide
ucgauucguuccuuccucc

SEQ ID NO: 2862852 - RNA, 19 nt, Artificial Sequence
  Description of Artificial Sequence: Synthetic oligonucleotide
gcugguuuagcaaggagcc

SEQ ID NO: 2862853 - RNA, 19 nt, Artificial Sequence
  Description of Artificial Sequence: Synthetic oligonucleotide
gcuggugagcauuuccugg

SEQ ID NO: 2862854 - RNA, 19 nt, Artificial Sequence
  Description of Artificial Sequence: Synthetic oligonucleotide
uguaacuuucuuggcuagc

SEQ ID NO: 2862855 - RNA, 19 nt, Artificial Sequence
  Description of Artificial Sequence: Synthetic oligonucleotide
gauggcuucaaaaggguua

SEQ ID NO: 2862856 - RNA, 19 nt, Artificial Sequence
  Description of Artificial Sequence: Synthetic oligonucleotide
cuggacugcuauuauuauc

SEQ ID NO: 2862857 - RNA, 19 nt, Artificial Sequence
  Description of Artificial Sequence: Synthetic oligonucleotide
gaagcacagccuugggcug

SEQ ID NO: 2862858 - RNA, 19 nt, Artificial Sequence
  Description of Artificial Sequence: Synthetic oligonucleotide
guaacuuucuuggcuagca

SEQ ID NO: 2862859 - RNA, 19 nt, Artificial Sequence
  Description of Artificial Sequence: Synthetic oligonucleotide
ggugggagaaacuguauga

SEQ ID NO: 2862860 - RNA, 19 nt, Artificial Sequence
  Description of Artificial Sequence: Synthetic oligonucleotide
uacacaaccacagcacgau

SEQ ID NO: 2862861 - RNA, 19 nt, Artificial Sequence
  Description of Artificial Sequence: Synthetic oligonucleotide
ggcagcgaguuucugaagc

SEQ ID NO: 2862862 - RNA, 19 nt, Artificial Sequence
  Description of Artificial Sequence: Synthetic oligonucleotide
cuguaacuuucuuggcuag

SEQ ID NO: 2862863 - RNA, 19 nt, Artificial Sequence
  Description of Artificial Sequence: Synthetic oligonucleotide
ggagaaacuguaugaaaga

SEQ ID NO: 2862864 - RNA, 19 nt, Artificial Sequence
  Description of Artificial Sequence: Synthetic oligonucleotide
auuuccuggucugauggcu

SEQ ID NO: 2862865 - RNA, 19 nt, Artificial Sequence
  Description of Artificial Sequence: Synthetic oligonucleotide
acgauggccccuuucuucu

SEQ ID NO: 2862866 - RNA, 19 nt, Artificial Sequence
  Description of Artificial Sequence: Synthetic oligonucleotide
ucguuuaggugauggugac

SEQ ID NO: 2862867 - RNA, 19 nt, Artificial Sequence
  Description of Artificial Sequence: Synthetic oligonucleotide
gugagcauuuccuggucug

SEQ ID NO: 2862868 - RNA, 19 nt, Artificial Sequence
  Description of Artificial Sequence: Synthetic oligonucleotide
aagcacagccuugggcugg

SEQ ID NO: 2862869 - RNA, 19 nt, Artificial Sequence
  Description of Artificial Sequence: Synthetic oligonucleotide
uuucuuggcuagcaucaua

SEQ ID NO: 2862870 - RNA, 19 nt, Artificial Sequence
  Description of Artificial Sequence: Synthetic oligonucleotide
agggcagcgaguuucugaa

SEQ ID NO: 2862871 - RNA, 19 nt, Artificial Sequence
  Description of Artificial Sequence: Synthetic oligonucleotide
agcuggugagcauuuccug

SEQ ID NO: 2862872 - RNA, 19 nt, Artificial Sequence
  Description of Artificial Sequence: Synthetic oligonucleotide
uaacuuucuuggcuagcau

SEQ ID NO: 2862873 - RNA, 19 nt, Artificial Sequence
  Description of Artificial Sequence: Synthetic oligonucleotide
gucguuuaggugaugguga

SEQ ID NO: 2862874 - RNA, 19 nt, Artificial Sequence
  Description of Artificial Sequence: Synthetic oligonucleotide
cauuuccuggucugauggc

SEQ ID NO: 2862875 - RNA, 19 nt, Artificial Sequence
  Description of Artificial Sequence: Synthetic oligonucleotide
aucauuaacgauggccccu

SEQ ID NO: 2862876 - RNA, 19 nt, Artificial Sequence
  Description of Artificial Sequence: Synthetic oligonucleotide
ggcugguuuagcaaggagc

SEQ ID NO: 2862877 - RNA, 19 nt, Artificial Sequence
  Description of Artificial Sequence: Synthetic oligonucleotide
gugauggugacaucauuaa

SEQ ID NO: 2862878 - RNA, 19 nt, Artificial Sequence
  Description of Artificial Sequence: Synthetic oligonucleotide
agcgcuuuggcuguaacuu

SEQ ID NO: 2862879 - RNA, 19 nt, Artificial Sequence
  Description of Artificial Sequence: Synthetic oligonucleotide
ugauggcuucaaaaggguu

SEQ ID NO: 2862880 - RNA, 19 nt, Artificial Sequence
  Description of Artificial Sequence: Synthetic oligonucleotide
ucuuucccuguugagccug

SEQ ID NO: 2862881 - RNA, 19 nt, Artificial Sequence
  Description of Artificial Sequence: Synthetic oligonucleotide
ucgaguuccggggagcacu

SEQ ID NO: 2862882 - RNA, 19 nt, Artificial Sequence
  Description of Artificial Sequence: Synthetic oligonucleotide
cugaggcuuagaugauucc

SEQ ID NO: 2862883 - RNA, 19 nt, Artificial Sequence
  Description of Artificial Sequence: Synthetic oligonucleotide
uucguuccuuccuccaccu

SEQ ID NO: 2862884 - RNA, 19 nt, Artificial Sequence
  Description of Artificial Sequence: Synthetic oligonucleotide
cuuggugggagaaacugua

SEQ ID NO: 2862885 - RNA, 19 nt, Artificial Sequence
  Description of Artificial Sequence: Synthetic oligonucleotide
uagcgcuuuggcuguaacu

SEQ ID NO: 2862886 - RNA, 19 nt, Artificial Sequence
  Description of Artificial Sequence: Synthetic oligonucleotide
uagucguuuaggugauggu

SEQ ID NO: 2862887 - RNA, 19 nt, Artificial Sequence
  Description of Artificial Sequence: Synthetic oligonucleotide
ucuucagcuggugagcauu

SEQ ID NO: 2862888 - RNA, 19 nt, Artificial Sequence
  Description of Artificial Sequence: Synthetic oligonucleotide
agcacgauuggcagucuuc

SEQ ID NO: 2862889 - RNA, 19 nt, Artificial Sequence
  Description of Artificial Sequence: Synthetic oligonucleotide
cuguaugaaagacaaaguu

SEQ ID NO: 2862890 - RNA, 19 nt, Artificial Sequence
  Description of Artificial Sequence: Synthetic oligonucleotide
uuccggggagcacuggggu

SEQ ID NO: 2862891 - RNA, 19 nt, Artificial Sequence
  Description of Artificial Sequence: Synthetic oligonucleotide
ccagucuucagcuggugag

SEQ ID NO: 2862892 - RNA, 19 nt, Artificial Sequence
  Description of Artificial Sequence: Synthetic oligonucleotide
cacugcucucguucgauuc

SEQ ID NO: 2862893 - RNA, 19 nt, Artificial Sequence
  Description of Artificial Sequence: Synthetic oligonucleotide
agccuguucccgaagccac

SEQ ID NO: 2862894 - RNA, 19 nt, Artificial Sequence
  Description of Artificial Sequence: Synthetic oligonucleotide
ugagcauuuccuggucuga

SEQ ID NO: 2862895 - RNA, 19 nt, Artificial Sequence
  Description of Artificial Sequence: Synthetic oligonucleotide
uucuucucaccugaggcuu

SEQ ID NO: 2862896 - RNA, 19 nt, Artificial Sequence
  Description of Artificial Sequence: Synthetic oligonucleotide
cuagcaucauaaauugacu

SEQ ID NO: 2862897 - RNA, 19 nt, Artificial Sequence
  Description of Artificial Sequence: Synthetic oligonucleotide
guuuaggugauggugacau

SEQ ID NO: 2862898 - RNA, 19 nt, Artificial Sequence
  Description of Artificial Sequence: Synthetic oligonucleotide
cacagcacgauuggcaguc

SEQ ID NO: 2862899 - RNA, 19 nt, Artificial Sequence
  Description of Artificial Sequence: Synthetic oligonucleotide
uuuccuggucugauggcuu

SEQ ID NO: 2862900 - RNA, 19 nt, Artificial Sequence
  Description of Artificial Sequence: Synthetic oligonucleotide
ggcuucaaaaggguuacug

SEQ ID NO: 2862901 - RNA, 19 nt, Artificial Sequence
  Description of Artificial Sequence: Synthetic oligonucleotide
gacugcuauuauuaucugu

SEQ ID NO: 2862902 - RNA, 19 nt, Artificial Sequence
  Description of Artificial Sequence: Synthetic oligonucleotide
ggguugagguccgacaggg

SEQ ID NO: 2862903 - RNA, 19 nt, Artificial Sequence
  Description of Artificial Sequence: Synthetic oligonucleotide
uguugagccuguucccgaa

SEQ ID NO: 2862904 - RNA, 19 nt, Artificial Sequence
  Description of Artificial Sequence: Synthetic oligonucleotide
gcaucauaaauugacuguc

SEQ ID NO: 2862905 - RNA, 19 nt, Artificial Sequence
  Description of Artificial Sequence: Synthetic oligonucleotide
auggccccuuucuucucac

SEQ ID NO: 2862906 - RNA, 19 nt, Artificial Sequence
  Description of Artificial Sequence: Synthetic oligonucleotide
gguccgacagggcagcgag

SEQ ID NO: 2862907 - RNA, 19 nt, Artificial Sequence
  Description of Artificial Sequence: Synthetic oligonucleotide
gacugucuuccccaauguc

SEQ ID NO: 2862908 - RNA, 19 nt, Artificial Sequence
  Description of Artificial Sequence: Synthetic oligonucleotide
cuauuauuaucugucuuua

SEQ ID NO: 2862909 - RNA, 19 nt, Artificial Sequence
  Description of Artificial Sequence: Synthetic oligonucleotide
auacacaaccacagcacga

SEQ ID NO: 2862910 - RNA, 19 nt, Artificial Sequence
  Description of Artificial Sequence: Synthetic oligonucleotide
ugacaucauuaacgauggc

SEQ ID NO: 2862911 - RNA, 19 nt, Artificial Sequence
  Description of Artificial Sequence: Synthetic oligonucleotide
uuggugggagaaacuguau

SEQ ID NO: 2862912 - RNA, 19 nt, Artificial Sequence
  Description of Artificial Sequence: Synthetic oligonucleotide
ucuuggcuagcaucauaaa

SEQ ID NO: 2862913 - RNA, 19 nt, Artificial Sequence
  Description of Artificial Sequence: Synthetic oligonucleotide
uggcuguaacuuucuuggc

SEQ ID NO: 2862914 - RNA, 19 nt, Artificial Sequence
  Description of Artificial Sequence: Synthetic oligonucleotide
acugggguugagguccgac

SEQ ID NO: 2862915 - RNA, 19 nt, Artificial Sequence
  Description of Artificial Sequence: Synthetic oligonucleotide
uucccuguugagccuguuc

SEQ ID NO: 2862916 - RNA, 19 nt, Artificial Sequence
  Description of Artificial Sequence: Synthetic oligonucleotide
cuucgcuuugguccuggac

SEQ ID NO: 2862917 - RNA, 19 nt, Artificial Sequence
  Description of Artificial Sequence: Synthetic oligonucleotide
gauuccuuugcucgccucu

SEQ ID NO: 2862918 - RNA, 19 nt, Artificial Sequence
  Description of Artificial Sequence: Synthetic oligonucleotide
gauggccccuuucuucuca

SEQ ID NO: 2862919 - RNA, 19 nt, Artificial Sequence
  Description of Artificial Sequence: Synthetic oligonucleotide
uggccuuggugggagaaac

SEQ ID NO: 2862920 - RNA, 19 nt, Artificial Sequence
  Description of Artificial Sequence: Synthetic oligonucleotide
guuucucgaguuccgggga

SEQ ID NO: 2862921 - RNA, 19 nt, Artificial Sequence
  Description of Artificial Sequence: Synthetic oligonucleotide
uccuccaccuggcuucggu

SEQ ID NO: 2862922 - RNA, 19 nt, Artificial Sequence
  Description of Artificial Sequence: Synthetic oligonucleotide
ugagguccgacagggcagc

SEQ ID NO: 2862923 - RNA, 19 nt, Artificial Sequence
  Description of Artificial Sequence: Synthetic oligonucleotide
guugagccuguucccgaag

SEQ ID NO: 2862924 - RNA, 19 nt, Artificial Sequence
  Description of Artificial Sequence: Synthetic oligonucleotide
ugguccuggacugcuauua

SEQ ID NO: 2862925 - RNA, 19 nt, Artificial Sequence
  Description of Artificial Sequence: Synthetic oligonucleotide
uaacgauggccccuuucuu

SEQ ID NO: 2862926 - RNA, 19 nt, Artificial Sequence
  Description of Artificial Sequence: Synthetic oligonucleotide
gcaaucuuucccuguugag

SEQ ID NO: 2862927 - RNA, 19 nt, Artificial Sequence
  Description of Artificial Sequence: Synthetic oligonucleotide
agcugcaaucuuucccugu

SEQ ID NO: 2862928 - RNA, 19 nt, Artificial Sequence
  Description of Artificial Sequence: Synthetic oligonucleotide
aggcuuagaugauuccuuu

SEQ ID NO: 2862929 - RNA, 19 nt, Artificial Sequence
  Description of Artificial Sequence: Synthetic oligonucleotide
uuuaggugauggugacauc

SEQ ID NO: 2862930 - RNA, 19 nt, Artificial Sequence
  Description of Artificial Sequence: Synthetic oligonucleotide
augauuccuuugcucgccu

SEQ ID NO: 2862931 - RNA, 19 nt, Artificial Sequence
  Description of Artificial Sequence: Synthetic oligonucleotide
cagucuucagcuggugagc

SEQ ID NO: 2862932 - RNA, 19 nt, Artificial Sequence
  Description of Artificial Sequence: Synthetic oligonucleotide
ggcacagacuucgauacac

SEQ ID NO: 2862933 - RNA, 19 nt, Artificial Sequence
  Description of Artificial Sequence: Synthetic oligonucleotide
guuccggggagcacugggg

SEQ ID NO: 2862934 - RNA, 19 nt, Artificial Sequence
  Description of Artificial Sequence: Synthetic oligonucleotide
agucuucagcuggugagca

SEQ ID NO: 2862935 - RNA, 19 nt, Artificial Sequence
  Description of Artificial Sequence: Synthetic oligonucleotide
cucgccucuggccuuggug

SEQ ID NO: 2862936 - RNA, 19 nt, Artificial Sequence
  Description of Artificial Sequence: Synthetic oligonucleotide
ccuuucuucucaccugagg

SEQ ID NO: 2862937 - RNA, 19 nt, Artificial Sequence
  Description of Artificial Sequence: Synthetic oligonucleotide
cuuagaugauuccuuugcu

SEQ ID NO: 2862938 - RNA, 19 nt, Artificial Sequence
  Description of Artificial Sequence: Synthetic oligonucleotide
cacagacuucgauacacaa

SEQ ID NO: 2862939 - RNA, 19 nt, Artificial Sequence
  Description of Artificial Sequence: Synthetic oligonucleotide
uagcaaggagccagucuuc

SEQ ID NO: 2862940 - RNA, 19 nt, Artificial Sequence
  Description of Artificial Sequence: Synthetic oligonucleotide
ucauuaacgauggccccuu

SEQ ID NO: 2862941 - RNA, 19 nt, Artificial Sequence
  Description of Artificial Sequence: Synthetic oligonucleotide
uggugagcauuuccugguc

SEQ ID NO: 2862942 - RNA, 19 nt, Artificial Sequence
  Description of Artificial Sequence: Synthetic oligonucleotide
auuccuuugcucgccucug

SEQ ID NO: 2862943 - RNA, 19 nt, Artificial Sequence
  Description of Artificial Sequence: Synthetic oligonucleotide
guuccuuccuccaccuggc

SEQ ID NO: 2862944 - RNA, 19 nt, Artificial Sequence
  Description of Artificial Sequence: Synthetic oligonucleotide
agcgaguuucugaagcaca

SEQ ID NO: 2862945 - RNA, 19 nt, Artificial Sequence
  Description of Artificial Sequence: Synthetic oligonucleotide
acugggcacagacuucgau

SEQ ID NO: 2862946 - RNA, 19 nt, Artificial Sequence
  Description of Artificial Sequence: Synthetic oligonucleotide
cuuggcuagcaucauaaau

SEQ ID NO: 2862947 - RNA, 19 nt, Artificial Sequence
  Description of Artificial Sequence: Synthetic oligonucleotide
ggcuuagaugauuccuuug

SEQ ID NO: 2862948 - RNA, 19 nt, Artificial Sequence
  Description of Artificial Sequence: Synthetic oligonucleotide
gcuguaacuuucuuggcua

SEQ ID NO: 2862949 - RNA, 19 nt, Artificial Sequence
  Description of Artificial Sequence: Synthetic oligonucleotide
uucucgaguuccggggagc

SEQ ID NO: 2862950 - RNA, 19 nt, Artificial Sequence
  Description of Artificial Sequence: Synthetic oligonucleotide
ugcuucgcuuugguccugg

SEQ ID NO: 2862951 - RNA, 19 nt, Artificial Sequence
  Description of Artificial Sequence: Synthetic oligonucleotide
ucucgaguuccggggagca

SEQ ID NO: 2862952 - RNA, 19 nt, Artificial Sequence
  Description of Artificial Sequence: Synthetic oligonucleotide
uuccuggucugauggcuuc

SEQ ID NO: 2862953 - RNA, 19 nt, Artificial Sequence
  Description of Artificial Sequence: Synthetic oligonucleotide
cguuccuuccuccaccugg

SEQ ID NO: 2862954 - RNA, 19 nt, Artificial Sequence
  Description of Artificial Sequence: Synthetic oligonucleotide
caucauaaauugacugucu

SEQ ID NO: 2862955 - RNA, 19 nt, Artificial Sequence
  Description of Artificial Sequence: Synthetic oligonucleotide
aucuuucccuguugagccu

SEQ ID NO: 2862956 - RNA, 19 nt, Artificial Sequence
  Description of Artificial Sequence: Synthetic oligonucleotide
ugauuccuuugcucgccuc

SEQ ID NO: 2862957 - RNA, 19 nt, Artificial Sequence
  Description of Artificial Sequence: Synthetic oligonucleotide
ucguucgauucguuccuuc

SEQ ID NO: 2862958 - RNA, 19 nt, Artificial Sequence
  Description of Artificial Sequence: Synthetic oligonucleotide
uggugacaucauuaacgau

SEQ ID NO: 2862959 - RNA, 19 nt, Artificial Sequence
  Description of Artificial Sequence: Synthetic oligonucleotide
gcuauuauuaucugucuuu

SEQ ID NO: 2862960 - RNA, 19 nt, Artificial Sequence
  Description of Artificial Sequence: Synthetic oligonucleotide
auugacugucuuccccaau

SEQ ID NO: 2862961 - RNA, 19 nt, Artificial Sequence
  Description of Artificial Sequence: Synthetic oligonucleotide
uccuuccuccaccuggcuu

SEQ ID NO: 2862962 - RNA, 19 nt, Artificial Sequence
  Description of Artificial Sequence: Synthetic oligonucleotide
ucuucucaccugaggcuua

SEQ ID NO: 2862963 - RNA, 19 nt, Artificial Sequence
  Description of Artificial Sequence: Synthetic oligonucleotide
uuuagucguuuaggugaug

SEQ ID NO: 2862964 - RNA, 19 nt, Artificial Sequence
  Description of Artificial Sequence: Synthetic oligonucleotide
uccgacagggcagcgaguu

SEQ ID NO: 2862965 - RNA, 19 nt, Artificial Sequence
  Description of Artificial Sequence: Synthetic oligonucleotide
uggcagucuucuguagcgc

SEQ ID NO: 2862966 - RNA, 19 nt, Artificial Sequence
  Description of Artificial Sequence: Synthetic oligonucleotide
ccuuccuccaccuggcuuc

SEQ ID NO: 2862967 - RNA, 19 nt, Artificial Sequence
  Description of Artificial Sequence: Synthetic oligonucleotide
gguuacugggcacagacuu

SEQ ID NO: 2862968 - RNA, 19 nt, Artificial Sequence
  Description of Artificial Sequence: Synthetic oligonucleotide
agucuucuguagcgcuuug

SEQ ID NO: 2862969 - RNA, 19 nt, Artificial Sequence
  Description of Artificial Sequence: Synthetic oligonucleotide
cugucuuccccaauguccu

SEQ ID NO: 2862970 - RNA, 19 nt, Artificial Sequence
  Description of Artificial Sequence: Synthetic oligonucleotide
cacgauuggcagucuucug

SEQ ID NO: 2862971 - RNA, 19 nt, Artificial Sequence
  Description of Artificial Sequence: Synthetic oligonucleotide
uaucugucuuuagucguuu

SEQ ID NO: 2862972 - RNA, 19 nt, Artificial Sequence
  Description of Artificial Sequence: Synthetic oligonucleotide
agccuugggcugguuuagc

SEQ ID NO: 2862973 - RNA, 19 nt, Artificial Sequence
  Description of Artificial Sequence: Synthetic oligonucleotide
cugggcacagacuucgaua

SEQ ID NO: 2862974 - RNA, 19 nt, Artificial Sequence
  Description of Artificial Sequence: Synthetic oligonucleotide
cccaauguccucuucuuca

SEQ ID NO: 2862975 - RNA, 19 nt, Artificial Sequence
  Description of Artificial Sequence: Synthetic oligonucleotide
gugggagaaacuguaugaa

SEQ ID NO: 2862976 - RNA, 19 nt, Artificial Sequence
  Description of Artificial Sequence: Synthetic oligonucleotide
gagccuguucccgaagcca

SEQ ID NO: 2862977 - RNA, 19 nt, Artificial Sequence
  Description of Artificial Sequence: Synthetic oligonucleotide
gcgaguuucugaagcacag

SEQ ID NO: 2862978 - RNA, 19 nt, Artificial Sequence
  Description of Artificial Sequence: Synthetic oligonucleotide
guagcgcuuuggcuguaac

SEQ ID NO: 2862979 - RNA, 19 nt, Artificial Sequence
  Description of Artificial Sequence: Synthetic oligonucleotide
cuuugcucgccucuggccu

SEQ ID NO: 2862980 - RNA, 19 nt, Artificial Sequence
  Description of Artificial Sequence: Synthetic oligonucleotide
caaccacagcacgauuggc

SEQ ID NO: 2862981 - RNA, 19 nt, Artificial Sequence
  Description of Artificial Sequence: Synthetic oligonucleotide
guucgauucguuccuuccu

SEQ ID NO: 2862982 - RNA, 19 nt, Artificial Sequence
  Description of Artificial Sequence: Synthetic oligonucleotide
aggugauggugacaucauu

SEQ ID NO: 2862983 - RNA, 19 nt, Artificial Sequence
  Description of Artificial Sequence: Synthetic oligonucleotide
gggguugagguccgacagg

SEQ ID NO: 2862984 - RNA, 19 nt, Artificial Sequence
  Description of Artificial Sequence: Synthetic oligonucleotide
cuucucaccugaggcuuag

SEQ ID NO: 2862985 - RNA, 19 nt, Artificial Sequence
  Description of Artificial Sequence: Synthetic oligonucleotide
cugggguugagguccgaca

SEQ ID NO: 2862986 - RNA, 19 nt, Artificial Sequence
  Description of Artificial Sequence: Synthetic oligonucleotide
ugggcugguuuagcaagga

SEQ ID NO: 2862987 - RNA, 19 nt, Artificial Sequence
  Description of Artificial Sequence: Synthetic oligonucleotide
cagcgaguuucugaagcac

SEQ ID NO: 2862988 - RNA, 19 nt, Artificial Sequence
  Description of Artificial Sequence: Synthetic oligonucleotide
cagggcagcgaguuucuga

SEQ ID NO: 2862989 - RNA, 19 nt, Artificial Sequence
  Description of Artificial Sequence: Synthetic oligonucleotide
ccuguugagccuguucccg

SEQ ID NO: 2862990 - RNA, 19 nt, Artificial Sequence
  Description of Artificial Sequence: Synthetic oligonucleotide
ggacugcuauuauuaucug

SEQ ID NO: 2862991 - RNA, 19 nt, Artificial Sequence
  Description of Artificial Sequence: Synthetic oligonucleotide
gagcacugggguugagguc

SEQ ID NO: 2862992 - RNA, 19 nt, Artificial Sequence
  Description of Artificial Sequence: Synthetic oligonucleotide
cuguucccgaagccacugc

SEQ ID NO: 2862993 - RNA, 19 nt, Artificial Sequence
  Description of Artificial Sequence: Synthetic oligonucleotide
gccuuggugggagaaacug

SEQ ID NO: 2862994 - RNA, 19 nt, Artificial Sequence
  Description of Artificial Sequence: Synthetic oligonucleotide
aaggguuacugggcacaga

SEQ ID NO: 2862995 - RNA, 19 nt, Artificial Sequence
  Description of Artificial Sequence: Synthetic oligonucleotide
uuugcucgccucuggccuu

SEQ ID NO: 2862996 - RNA, 19 nt, Artificial Sequence
  Description of Artificial Sequence: Synthetic oligonucleotide
uacugggcacagacuucga

SEQ ID NO: 2862997 - RNA, 19 nt, Artificial Sequence
  Description of Artificial Sequence: Synthetic oligonucleotide
ucguuccuuccuccaccug

SEQ ID NO: 2862998 - RNA, 19 nt, Artificial Sequence
  Description of Artificial Sequence: Synthetic oligonucleotide
guuuagcaaggagccaguc

SEQ ID NO: 2862999 - RNA, 19 nt, Artificial Sequence
  Description of Artificial Sequence: Synthetic oligonucleotide
cguucgauucguuccuucc

SEQ ID NO: 2863000 - RNA, 19 nt, Artificial Sequence
  Description of Artificial Sequence: Synthetic oligonucleotide
ccuuugcucgccucuggcc

SEQ ID NO: 2863001 - RNA, 19 nt, Artificial Sequence
  Description of Artificial Sequence: Synthetic oligonucleotide
cuucuguagcgcuuuggcu

SEQ ID NO: 2863002 - RNA, 19 nt, Artificial Sequence
  Description of Artificial Sequence: Synthetic oligonucleotide
ggagcacugggguugaggu

SEQ ID NO: 2863003 - RNA, 19 nt, Artificial Sequence
  Description of Artificial Sequence: Synthetic oligonucleotide
ggcuguaacuuucuuggcu

SEQ ID NO: 2863004 - RNA, 19 nt, Artificial Sequence
  Description of Artificial Sequence: Synthetic oligonucleotide
uuccuuccuccaccuggcu

SEQ ID NO: 2863005 - RNA, 19 nt, Artificial Sequence
  Description of Artificial Sequence: Synthetic oligonucleotide
aucugucuuuagucguuua

SEQ ID NO: 2863006 - RNA, 19 nt, Artificial Sequence
  Description of Artificial Sequence: Synthetic oligonucleotide
cugcuauuauuaucugucu

SEQ ID NO: 2863007 - RNA, 19 nt, Artificial Sequence
  Description of Artificial Sequence: Synthetic oligonucleotide
agacuucgauacacaacca

SEQ ID NO: 2863008 - RNA, 19 nt, Artificial Sequence
  Description of Artificial Sequence: Synthetic oligonucleotide
cuguugagccuguucccga

SEQ ID NO: 2863009 - RNA, 19 nt, Artificial Sequence
  Description of Artificial Sequence: Synthetic oligonucleotide
cuggugagcauuuccuggu

SEQ ID NO: 2863010 - RNA, 19 nt, Artificial Sequence
  Description of Artificial Sequence: Synthetic oligonucleotide
cagcugcaaucuuucccug

SEQ ID NO: 2863011 - RNA, 19 nt, Artificial Sequence
  Description of Artificial Sequence: Synthetic oligonucleotide
ugucuuccccaauguccuc

SEQ ID NO: 2863012 - RNA, 19 nt, Artificial Sequence
  Description of Artificial Sequence: Synthetic oligonucleotide
cuuuagucguuuaggugau

SEQ ID NO: 2863013 - RNA, 19 nt, Artificial Sequence
  Description of Artificial Sequence: Synthetic oligonucleotide
acacaaccacagcacgauu

SEQ ID NO: 2863014 - RNA, 19 nt, Artificial Sequence
  Description of Artificial Sequence: Synthetic oligonucleotide
gggagcacugggguugagg

SEQ ID NO: 2863015 - RNA, 19 nt, Artificial Sequence
  Description of Artificial Sequence: Synthetic oligonucleotide
uccuggucugauggcuuca

SEQ ID NO: 2863016 - RNA, 19 nt, Artificial Sequence
  Description of Artificial Sequence: Synthetic oligonucleotide
uggccccuuucuucucacc

SEQ ID NO: 2863017 - RNA, 19 nt, Artificial Sequence
  Description of Artificial Sequence: Synthetic oligonucleotide
gcagcgaguuucugaagca

SEQ ID NO: 2863018 - RNA, 19 nt, Artificial Sequence
  Description of Artificial Sequence: Synthetic oligonucleotide
uguagcgcuuuggcuguaa

SEQ ID NO: 2863019 - RNA, 19 nt, Artificial Sequence
  Description of Artificial Sequence: Synthetic oligonucleotide
gaggcuuagaugauuccuu

SEQ ID NO: 2863020 - RNA, 19 nt, Artificial Sequence
  Description of Artificial Sequence: Synthetic oligonucleotide
gggcugguuuagcaaggag

SEQ ID NO: 2863021 - RNA, 19 nt, Artificial Sequence
  Description of Artificial Sequence: Synthetic oligonucleotide
cccgaagccacugcucucg

SEQ ID NO: 2863022 - RNA, 19 nt, Artificial Sequence
  Description of Artificial Sequence: Synthetic oligonucleotide
cagccuugggcugguuuag

SEQ ID NO: 2863023 - RNA, 19 nt, Artificial Sequence
  Description of Artificial Sequence: Synthetic oligonucleotide
guucccgaagccacugcuc

SEQ ID NO: 2863024 - RNA, 19 nt, Artificial Sequence
  Description of Artificial Sequence: Synthetic oligonucleotide
uucagcuggugagcauuuc

SEQ ID NO: 2863025 - RNA, 19 nt, Artificial Sequence
  Description of Artificial Sequence: Synthetic oligonucleotide
gcucucguucgauucguuc

SEQ ID NO: 2863026 - RNA, 19 nt, Artificial Sequence
  Description of Artificial Sequence: Synthetic oligonucleotide
uugguccuggacugcuauu

SEQ ID NO: 2863027 - RNA, 19 nt, Artificial Sequence
  Description of Artificial Sequence: Synthetic oligonucleotide
ucccgaagccacugcucuc

SEQ ID NO: 2863028 - RNA, 19 nt, Artificial Sequence
  Description of Artificial Sequence: Synthetic oligonucleotide
gaguuccggggagcacugg

SEQ ID NO: 2863029 - RNA, 19 nt, Artificial Sequence
  Description of Artificial Sequence: Synthetic oligonucleotide
cccuguugagccuguuccc

SEQ ID NO: 2863030 - RNA, 19 nt, Artificial Sequence
  Description of Artificial Sequence: Synthetic oligonucleotide
agccacugcucucguucga

SEQ ID NO: 2863031 - RNA, 19 nt, Artificial Sequence
  Description of Artificial Sequence: Synthetic oligonucleotide
gccccuuucuucucaccug

SEQ ID NO: 2863032 - RNA, 19 nt, Artificial Sequence
  Description of Artificial Sequence: Synthetic oligonucleotide
ugcucucguucgauucguu

SEQ ID NO: 2863033 - RNA, 19 nt, Artificial Sequence
  Description of Artificial Sequence: Synthetic oligonucleotide
uccggggagcacugggguu

SEQ ID NO: 2863034 - RNA, 19 nt, Artificial Sequence
  Description of Artificial Sequence: Synthetic oligonucleotide
cuuccccaauguccucuuc

SEQ ID NO: 2863035 - RNA, 19 nt, Artificial Sequence
  Description of Artificial Sequence: Synthetic oligonucleotide
gagguccgacagggcagcg

SEQ ID NO: 2863036 - RNA, 19 nt, Artificial Sequence
  Description of Artificial Sequence: Synthetic oligonucleotide
uugcucgccucuggccuug

SEQ ID NO: 2863037 - RNA, 19 nt, Artificial Sequence
  Description of Artificial Sequence: Synthetic oligonucleotide
ggugagcauuuccuggucu

SEQ ID NO: 2863038 - RNA, 19 nt, Artificial Sequence
  Description of Artificial Sequence: Synthetic oligonucleotide
uggcuucaaaaggguuacu

SEQ ID NO: 2863039 - RNA, 19 nt, Artificial Sequence
  Description of Artificial Sequence: Synthetic oligonucleotide
gccagucuucagcugguga

SEQ ID NO: 2863040 - RNA, 19 nt, Artificial Sequence
  Description of Artificial Sequence: Synthetic oligonucleotide
uucucaccugaggcuuaga

SEQ ID NO: 2863041 - RNA, 19 nt, Artificial Sequence
  Description of Artificial Sequence: Synthetic oligonucleotide
cgcuuuggcuguaacuuuc

SEQ ID NO: 2863042 - RNA, 19 nt, Artificial Sequence
  Description of Artificial Sequence: Synthetic oligonucleotide
cugguuuagcaaggagcca

SEQ ID NO: 2863043 - RNA, 19 nt, Artificial Sequence
  Description of Artificial Sequence: Synthetic oligonucleotide
gccuugggcugguuuagca

SEQ ID NO: 2863044 - RNA, 19 nt, Artificial Sequence
  Description of Artificial Sequence: Synthetic oligonucleotide
agccagucuucagcuggug

SEQ ID NO: 2863045 - RNA, 19 nt, Artificial Sequence
  Description of Artificial Sequence: Synthetic oligonucleotide
cuuugguccuggacugcua

SEQ ID NO: 2863046 - RNA, 19 nt, Artificial Sequence
  Description of Artificial Sequence: Synthetic oligonucleotide
agguccgacagggcagcga

SEQ ID NO: 2863047 - RNA, 19 nt, Artificial Sequence
  Description of Artificial Sequence: Synthetic oligonucleotide
acagggcagcgaguuucug

SEQ ID NO: 2863048 - RNA, 19 nt, Artificial Sequence
  Description of Artificial Sequence: Synthetic oligonucleotide
cucgaguuccggggagcac

SEQ ID NO: 2863049 - RNA, 19 nt, Artificial Sequence
  Description of Artificial Sequence: Synthetic oligonucleotide
ggcagucuucuguagcgcu

SEQ ID NO: 2863050 - RNA, 19 nt, Artificial Sequence
  Description of Artificial Sequence: Synthetic oligonucleotide
gggcagcgaguuucugaag

SEQ ID NO: 2863051 - RNA, 19 nt, Artificial Sequence
  Description of Artificial Sequence: Synthetic oligonucleotide
gagcauuuccuggucugau

SEQ ID NO: 2863052 - RNA, 19 nt, Artificial Sequence
  Description of Artificial Sequence: Synthetic oligonucleotide
acagcacgauuggcagucu

SEQ ID NO: 2863053 - RNA, 19 nt, Artificial Sequence
  Description of Artificial Sequence: Synthetic oligonucleotide
agcacagccuugggcuggu

SEQ ID NO: 2863054 - RNA, 19 nt, Artificial Sequence
  Description of Artificial Sequence: Synthetic oligonucleotide
cccuuucuucucaccugag

SEQ ID NO: 2863055 - RNA, 19 nt, Artificial Sequence
  Description of Artificial Sequence: Synthetic oligonucleotide
cuggucugauggcuucaaa

SEQ ID NO: 2863056 - RNA, 19 nt, Artificial Sequence
  Description of Artificial Sequence: Synthetic oligonucleotide
gacagggcagcgaguuucu

SEQ ID NO: 2863057 - RNA, 19 nt, Artificial Sequence
  Description of Artificial Sequence: Synthetic oligonucleotide
ugcucgccucuggccuugg

SEQ ID NO: 2863058 - RNA, 19 nt, Artificial Sequence
  Description of Artificial Sequence: Synthetic oligonucleotide
ccccuuucuucucaccuga

SEQ ID NO: 2863059 - RNA, 19 nt, Artificial Sequence
  Description of Artificial Sequence: Synthetic oligonucleotide
gcacagacuucgauacaca

SEQ ID NO: 2863060 - RNA, 19 nt, Artificial Sequence
  Description of Artificial Sequence: Synthetic oligonucleotide
ccuugggcugguuuagcaa

SEQ ID NO: 2863061 - RNA, 19 nt, Artificial Sequence
  Description of Artificial Sequence: Synthetic oligonucleotide
guccuggacugcuauuauu

SEQ ID NO: 2863062 - RNA, 19 nt, Artificial Sequence
  Description of Artificial Sequence: Synthetic oligonucleotide
ccccaauguccucuucuuc

SEQ ID NO: 2863063 - RNA, 19 nt, Artificial Sequence
  Description of Artificial Sequence: Synthetic oligonucleotide
cgacagggcagcgaguuuc

SEQ ID NO: 2863064 - RNA, 19 nt, Artificial Sequence
  Description of Artificial Sequence: Synthetic oligonucleotide
ccggggagcacugggguug

SEQ ID NO: 2863065 - RNA, 19 nt, Artificial Sequence
  Description of Artificial Sequence: Synthetic oligonucleotide
ccuccaccuggcuucgguc

SEQ ID NO: 2863066 - RNA, 19 nt, Artificial Sequence
  Description of Artificial Sequence: Synthetic oligonucleotide
gcacgauuggcagucuucu

SEQ ID NO: 2863067 - RNA, 19 nt, Artificial Sequence
  Description of Artificial Sequence: Synthetic oligonucleotide
ccucuggccuuggugggag

SEQ ID NO: 2863068 - RNA, 19 nt, Artificial Sequence
  Description of Artificial Sequence: Synthetic oligonucleotide
gggcacagacuucgauaca

SEQ ID NO: 2863069 - RNA, 19 nt, Artificial Sequence
  Description of Artificial Sequence: Synthetic oligonucleotide
gguuuagcaaggagccagu

SEQ ID NO: 2863070 - RNA, 19 nt, Artificial Sequence
  Description of Artificial Sequence: Synthetic oligonucleotide
cuuucccuguugagccugu

SEQ ID NO: 2863071 - RNA, 19 nt, Artificial Sequence
  Description of Artificial Sequence: Synthetic oligonucleotide
ccuuggugggagaaacugu

SEQ ID NO: 2863072 - RNA, 19 nt, Artificial Sequence
  Description of Artificial Sequence: Synthetic oligonucleotide
cgaguuccggggagcacug

SEQ ID NO: 2863073 - RNA, 19 nt, Artificial Sequence
  Description of Artificial Sequence: Synthetic oligonucleotide
cgauuggcagucuucugua

SEQ ID NO: 2863074 - RNA, 19 nt, Artificial Sequence
  Description of Artificial Sequence: Synthetic oligonucleotide
cuggccuuggugggagaaa

SEQ ID NO: 2863075 - RNA, 19 nt, Artificial Sequence
  Description of Artificial Sequence: Synthetic oligonucleotide
cgauucguuccuuccucca

SEQ ID NO: 2863076 - RNA, 19 nt, Artificial Sequence
  Description of Artificial Sequence: Synthetic oligonucleotide
gguccuggacugcuauuau

SEQ ID NO: 2863077 - RNA, 19 nt, Artificial Sequence
  Description of Artificial Sequence: Synthetic oligonucleotide
cacagccuugggcugguuu

SEQ ID NO: 2863078 - RNA, 19 nt, Artificial Sequence
  Description of Artificial Sequence: Synthetic oligonucleotide
cucuggccuuggugggaga

SEQ ID NO: 2863079 - RNA, 19 nt, Artificial Sequence
  Description of Artificial Sequence: Synthetic oligonucleotide
cugcucucguucgauucgu

SEQ ID NO: 2863080 - RNA, 19 nt, Artificial Sequence
  Description of Artificial Sequence: Synthetic oligonucleotide
gcuuuggcuguaacuuucu

SEQ ID NO: 2863081 - RNA, 19 nt, Artificial Sequence
  Description of Artificial Sequence: Synthetic oligonucleotide
cagucuucuguagcgcuuu

SEQ ID NO: 2863082 - RNA, 19 nt, Artificial Sequence
  Description of Artificial Sequence: Synthetic oligonucleotide
gcuucgcuuugguccugga

SEQ ID NO: 2863083 - RNA, 19 nt, Artificial Sequence
  Description of Artificial Sequence: Synthetic oligonucleotide
ccuggacugcuauuauuau

SEQ ID NO: 2863084 - RNA, 19 nt, Artificial Sequence
  Description of Artificial Sequence: Synthetic oligonucleotide
caccugaggcuuagaugau

SEQ ID NO: 2863085 - RNA, 19 nt, Artificial Sequence
  Description of Artificial Sequence: Synthetic oligonucleotide
ggguuacugggcacagacu

SEQ ID NO: 2863086 - RNA, 19 nt, Artificial Sequence
  Description of Artificial Sequence: Synthetic oligonucleotide
cagcacgauuggcagucuu

SEQ ID NO: 2863087 - RNA, 19 nt, Artificial Sequence
  Description of Artificial Sequence: Synthetic oligonucleotide
gcgcuuuggcuguaacuuu

SEQ ID NO: 2863088 - RNA, 19 nt, Artificial Sequence
  Description of Artificial Sequence: Synthetic oligonucleotide
cauuaacgauggccccuuu

SEQ ID NO: 2863089 - RNA, 19 nt, Artificial Sequence
  Description of Artificial Sequence: Synthetic oligonucleotide
cguuuaggugauggugaca

SEQ ID NO: 2863090 - RNA, 19 nt, Artificial Sequence
  Description of Artificial Sequence: Synthetic oligonucleotide
gccucuggccuugguggga

SEQ ID NO: 2863091 - RNA, 19 nt, Artificial Sequence
  Description of Artificial Sequence: Synthetic oligonucleotide
cgcuuugguccuggacugc

SEQ ID NO: 2863092 - RNA, 19 nt, Artificial Sequence
  Description of Artificial Sequence: Synthetic oligonucleotide
cgauggccccuuucuucuc

SEQ ID NO: 2863093 - RNA, 19 nt, Artificial Sequence
  Description of Artificial Sequence: Synthetic oligonucleotide
gcagucuucuguagcgcuu

SEQ ID NO: 2863094 - RNA, 19 nt, Artificial Sequence
  Description of Artificial Sequence: Synthetic oligonucleotide
ccuggucugauggcuucaa

SEQ ID NO: 2863095 - RNA, 19 nt, Artificial Sequence
  Description of Artificial Sequence: Synthetic oligonucleotide
ggccuuggugggagaaacu

SEQ ID NO: 2863096 - RNA, 19 nt, Artificial Sequence
  Description of Artificial Sequence: Synthetic oligonucleotide
gccacugcucucguucgau

SEQ ID NO: 2863097 - RNA, 19 nt, Artificial Sequence
  Description of Artificial Sequence: Synthetic oligonucleotide
ccacagcacgauuggcagu

SEQ ID NO: 2863098 - RNA, 19 nt, Artificial Sequence
  Description of Artificial Sequence: Synthetic oligonucleotide
cucguucgauucguuccuu

SEQ ID NO: 2863099 - RNA, 19 nt, Artificial Sequence
  Description of Artificial Sequence: Synthetic oligonucleotide
ggggagcacugggguugag

SEQ ID NO: 2863100 - RNA, 19 nt, Artificial Sequence
  Description of Artificial Sequence: Synthetic oligonucleotide
guccgacagggcagcgagu

SEQ ID NO: 2863101 - RNA, 19 nt, Artificial Sequence
  Description of Artificial Sequence: Synthetic oligonucleotide
cacugggguugagguccga

SEQ ID NO: 2863102 - RNA, 19 nt, Artificial Sequence
  Description of Artificial Sequence: Synthetic oligonucleotide
cuguagcgcuuuggcugua

SEQ ID NO: 2863103 - RNA, 19 nt, Artificial Sequence
  Description of Artificial Sequence: Synthetic oligonucleotide
ccacugcucucguucgauu

SEQ ID NO: 2863104 - RNA, 19 nt, Artificial Sequence
  Description of Artificial Sequence: Synthetic oligonucleotide
ccgaagccacugcucucgu

SEQ ID NO: 2863105 - RNA, 19 nt, Artificial Sequence
  Description of Artificial Sequence: Synthetic oligonucleotide
gcucgccucuggccuuggu

SEQ ID NO: 2863106 - RNA, 19 nt, Artificial Sequence
  Description of Artificial Sequence: Synthetic oligonucleotide
cggggagcacugggguuga

SEQ ID NO: 2863107 - RNA, 19 nt, Artificial Sequence
  Description of Artificial Sequence: Synthetic oligonucleotide
ccgacagggcagcgaguuu

SEQ ID NO: 2863108 - RNA, 19 nt, Artificial Sequence
  Description of Artificial Sequence: Synthetic oligonucleotide
gcacagccuugggcugguu

SEQ ID NO: 2863109 - RNA, 19 nt, Artificial Sequence
  Description of Artificial Sequence: Synthetic oligonucleotide
aauaaaggcuccuaaaaug

SEQ ID NO: 2863110 - RNA, 19 nt, Artificial Sequence
  Description of Artificial Sequence: Synthetic oligonucleotide
uuugacuugguucacauac

SEQ ID NO: 2863111 - RNA, 19 nt, Artificial Sequence
  Description of Artificial Sequence: Synthetic oligonucleotide
aauagagauggagaagacc

SEQ ID NO: 2863112 - RNA, 19 nt, Artificial Sequence
  Description of Artificial Sequence: Synthetic oligonucleotide
guuucaaaauccgagagcg

SEQ ID NO: 2863113 - RNA, 19 nt, Artificial Sequence
  Description of Artificial Sequence: Synthetic oligonucleotide
aaggcuccuaaaaugaucc

SEQ ID NO: 2863114 - RNA, 19 nt, Artificial Sequence
  Description of Artificial Sequence: Synthetic oligonucleotide
acuugguucacauacacug

SEQ ID NO: 2863115 - RNA, 19 nt, Artificial Sequence
  Description of Artificial Sequence: Synthetic oligonucleotide
accagcacacaauaaaggc

SEQ ID NO: 2863116 - RNA, 19 nt, Artificial Sequence
  Description of Artificial Sequence: Synthetic oligonucleotide
uccguguucaccaaacagg

SEQ ID NO: 2863117 - RNA, 19 nt, Artificial Sequence
  Description of Artificial Sequence: Synthetic oligonucleotide
uggguaaauagaaagcgcc

SEQ ID NO: 2863118 - RNA, 19 nt, Artificial Sequence
  Description of Artificial Sequence: Synthetic oligonucleotide
gauacggccauagagggcg

SEQ ID NO: 2863119 - RNA, 19 nt, Artificial Sequence
  Description of Artificial Sequence: Synthetic oligonucleotide
uucaaaauccgagagcggg

SEQ ID NO: 2863120 - RNA, 19 nt, Artificial Sequence
  Description of Artificial Sequence: Synthetic oligonucleotide
gaguuaauggaggugaccg

SEQ ID NO: 2863121 - RNA, 19 nt, Artificial Sequence
  Description of Artificial Sequence: Synthetic oligonucleotide
uaaaaugaucccuaggguc

SEQ ID NO: 2863122 - RNA, 19 nt, Artificial Sequence
  Description of Artificial Sequence: Synthetic oligonucleotide
uuuggcuugacgccaaaag

SEQ ID NO: 2863123 - RNA, 19 nt, Artificial Sequence
  Description of Artificial Sequence: Synthetic oligonucleotide
aagaagggcaaccagcaca

SEQ ID NO: 2863124 - RNA, 19 nt, Artificial Sequence
  Description of Artificial Sequence: Synthetic oligonucleotide
uagauacggccauagaggg

SEQ ID NO: 2863125 - RNA, 19 nt, Artificial Sequence
  Description of Artificial Sequence: Synthetic oligonucleotide
ucuuacuuugacuugguuc

SEQ ID NO: 2863126 - RNA, 19 nt, Artificial Sequence
  Description of Artificial Sequence: Synthetic oligonucleotide
uggaguagacuguauagag

SEQ ID NO: 2863127 - RNA, 19 nt, Artificial Sequence
  Description of Artificial Sequence: Synthetic oligonucleotide
gaaauagagauggagaaga

SEQ ID NO: 2863128 - RNA, 19 nt, Artificial Sequence
  Description of Artificial Sequence: Synthetic oligonucleotide
aucccuagggucuuggugg

SEQ ID NO: 2863129 - RNA, 19 nt, Artificial Sequence
  Description of Artificial Sequence: Synthetic oligonucleotide
ucuguuaucagcugggcuc

SEQ ID NO: 2863130 - RNA, 19 nt, Artificial Sequence
  Description of Artificial Sequence: Synthetic oligonucleotide
uguauagaggacguggucc

SEQ ID NO: 2863131 - RNA, 19 nt, Artificial Sequence
  Description of Artificial Sequence: Synthetic oligonucleotide
gaguagacuguauagagga

SEQ ID NO: 2863132 - RNA, 19 nt, Artificial Sequence
  Description of Artificial Sequence: Synthetic oligonucleotide
uguuucaaaauccgagagc

SEQ ID NO: 2863133 - RNA, 19 nt, Artificial Sequence
  Description of Artificial Sequence: Synthetic oligonucleotide
guagauacggccauagagg

SEQ ID NO: 2863134 - RNA, 19 nt, Artificial Sequence
  Description of Artificial Sequence: Synthetic oligonucleotide
ugaagaagggcaaccagca

SEQ ID NO: 2863135 - RNA, 19 nt, Artificial Sequence
  Description of Artificial Sequence: Synthetic oligonucleotide
ccuaaaaugaucccuaggg

SEQ ID NO: 2863136 - RNA, 19 nt, Artificial Sequence
  Description of Artificial Sequence: Synthetic oligonucleotide
cuugacgccaaaagaaggg

SEQ ID NO: 2863137 - RNA, 19 nt, Artificial Sequence
  Description of Artificial Sequence: Synthetic oligonucleotide
aaggguggcagcgaaauag

SEQ ID NO: 2863138 - RNA, 19 nt, Artificial Sequence
  Description of Artificial Sequence: Synthetic oligonucleotide
cucagcuuuggcuugacgc

SEQ ID NO: 2863139 - RNA, 19 nt, Artificial Sequence
  Description of Artificial Sequence: Synthetic oligonucleotide
auagagauggagaagacca

SEQ ID NO: 2863140 - RNA, 19 nt, Artificial Sequence
  Description of Artificial Sequence: Synthetic oligonucleotide
aaaaugaucccuagggucu

SEQ ID NO: 2863141 - RNA, 19 nt, Artificial Sequence
  Description of Artificial Sequence: Synthetic oligonucleotide
auggaggugaccgaggucg

SEQ ID NO: 2863142 - RNA, 19 nt, Artificial Sequence
  Description of Artificial Sequence: Synthetic oligonucleotide
gacuguauagaggacgugg

SEQ ID NO: 2863143 - RNA, 19 nt, Artificial Sequence
  Description of Artificial Sequence: Synthetic oligonucleotide
gauggagaagaccacacca

SEQ ID NO: 2863144 - RNA, 19 nt, Artificial Sequence
  Description of Artificial Sequence: Synthetic oligonucleotide
auagagggcgaugaggagc

SEQ ID NO: 2863145 - RNA, 19 nt, Artificial Sequence
  Description of Artificial Sequence: Synthetic oligonucleotide
acaauaaaggcuccuaaaa

SEQ ID NO: 2863146 - RNA, 19 nt, Artificial Sequence
  Description of Artificial Sequence: Synthetic oligonucleotide
gagaugaugaagaagggca

SEQ ID NO: 2863147 - RNA, 19 nt, Artificial Sequence
  Description of Artificial Sequence: Synthetic oligonucleotide
augaagaagggcaaccagc

SEQ ID NO: 2863148 - RNA, 19 nt, Artificial Sequence
  Description of Artificial Sequence: Synthetic oligonucleotide
guagacuguauagaggacg

SEQ ID NO: 2863149 - RNA, 19 nt, Artificial Sequence
  Description of Artificial Sequence: Synthetic oligonucleotide
uuaauggaggugaccgagg

SEQ ID NO: 2863150 - RNA, 19 nt, Artificial Sequence
  Description of Artificial Sequence: Synthetic oligonucleotide
gaugaagaagggcaaccag

SEQ ID NO: 2863151 - RNA, 19 nt, Artificial Sequence
  Description of Artificial Sequence: Synthetic oligonucleotide
aaaggcuccuaaaaugauc

SEQ ID NO: 2863152 - RNA, 19 nt, Artificial Sequence
  Description of Artificial Sequence: Synthetic oligonucleotide
guauagaggacgugguccg

SEQ ID NO: 2863153 - RNA, 19 nt, Artificial Sequence
  Description of Artificial Sequence: Synthetic oligonucleotide
guguucaccaaacagguca

SEQ ID NO: 2863154 - RNA, 19 nt, Artificial Sequence
  Description of Artificial Sequence: Synthetic oligonucleotide
aaauagagauggagaagac

SEQ ID NO: 2863155 - RNA, 19 nt, Artificial Sequence
  Description of Artificial Sequence: Synthetic oligonucleotide
ucagcuuuggcuugacgcc

SEQ ID NO: 2863156 - RNA, 19 nt, Artificial Sequence
  Description of Artificial Sequence: Synthetic oligonucleotide
uuggcuugacgccaaaaga

SEQ ID NO: 2863157 - RNA, 19 nt, Artificial Sequence
  Description of Artificial Sequence: Synthetic oligonucleotide
uuucaaaauccgagagcgg

SEQ ID NO: 2863158 - RNA, 19 nt, Artificial Sequence
  Description of Artificial Sequence: Synthetic oligonucleotide
gacgccaaaagaagggugg

SEQ ID NO: 2863159 - RNA, 19 nt, Artificial Sequence
  Description of Artificial Sequence: Synthetic oligonucleotide
gguggguaaauagaaagcg

SEQ ID NO: 2863160 - RNA, 19 nt, Artificial Sequence
  Description of Artificial Sequence: Synthetic oligonucleotide
ucaaaauccgagagcgggc

SEQ ID NO: 2863161 - RNA, 19 nt, Artificial Sequence
  Description of Artificial Sequence: Synthetic oligonucleotide
cuguuucaaaauccgagag

SEQ ID NO: 2863162 - RNA, 19 nt, Artificial Sequence
  Description of Artificial Sequence: Synthetic oligonucleotide
uguucaccaaacaggucag

SEQ ID NO: 2863163 - RNA, 19 nt, Artificial Sequence
  Description of Artificial Sequence: Synthetic oligonucleotide
cuugguucacauacacugg

SEQ ID NO: 2863164 - RNA, 19 nt, Artificial Sequence
  Description of Artificial Sequence: Synthetic oligonucleotide
caugaguuucuucuucucc

SEQ ID NO: 2863165 - RNA, 19 nt, Artificial Sequence
  Description of Artificial Sequence: Synthetic oligonucleotide
guucacauacacuggagac

SEQ ID NO: 2863166 - RNA, 19 nt, Artificial Sequence
  Description of Artificial Sequence: Synthetic oligonucleotide
uugguucacauacacugga

SEQ ID NO: 2863167 - RNA, 19 nt, Artificial Sequence
  Description of Artificial Sequence: Synthetic oligonucleotide
caaaagaaggguggcagcg

SEQ ID NO: 2863168 - RNA, 19 nt, Artificial Sequence
  Description of Artificial Sequence: Synthetic oligonucleotide
caccaaacaggucagcacc

SEQ ID NO: 2863169 - RNA, 19 nt, Artificial Sequence
  Description of Artificial Sequence: Synthetic oligonucleotide
uggcuugacgccaaaagaa

SEQ ID NO: 2863170 - RNA, 19 nt, Artificial Sequence
  Description of Artificial Sequence: Synthetic oligonucleotide
uagacuguauagaggacgu

SEQ ID NO: 2863171 - RNA, 19 nt, Artificial Sequence
  Description of Artificial Sequence: Synthetic oligonucleotide
aggcgagucuguuaucagc

SEQ ID NO: 2863172 - RNA, 19 nt, Artificial Sequence
  Description of Artificial Sequence: Synthetic oligonucleotide
auaaaggcuccuaaaauga

SEQ ID NO: 2863173 - RNA, 19 nt, Artificial Sequence
  Description of Artificial Sequence: Synthetic oligonucleotide
ggcagcgaaauagagaugg

SEQ ID NO: 2863174 - RNA, 19 nt, Artificial Sequence
  Description of Artificial Sequence: Synthetic oligonucleotide
uugggugucuguuucaaaa

SEQ ID NO: 2863175 - RNA, 19 nt, Artificial Sequence
  Description of Artificial Sequence: Synthetic oligonucleotide
ugacuugguucacauacac

SEQ ID NO: 2863176 - RNA, 19 nt, Artificial Sequence
  Description of Artificial Sequence: Synthetic oligonucleotide
uggagaagaccacaccagc

SEQ ID NO: 2863177 - RNA, 19 nt, Artificial Sequence
  Description of Artificial Sequence: Synthetic oligonucleotide
aauggaggugaccgagguc

SEQ ID NO: 2863178 - RNA, 19 nt, Artificial Sequence
  Description of Artificial Sequence: Synthetic oligonucleotide
uucacauacacuggagacc

SEQ ID NO: 2863179 - RNA, 19 nt, Artificial Sequence
  Description of Artificial Sequence: Synthetic oligonucleotide
aacaggucagcaccuccuc

SEQ ID NO: 2863180 - RNA, 19 nt, Artificial Sequence
  Description of Artificial Sequence: Synthetic oligonucleotide
cagcacacaauaaaggcuc

SEQ ID NO: 2863181 - RNA, 19 nt, Artificial Sequence
  Description of Artificial Sequence: Synthetic oligonucleotide
aaauccgagagcgggcuuc

SEQ ID NO: 2863182 - RNA, 19 nt, Artificial Sequence
  Description of Artificial Sequence: Synthetic oligonucleotide
acacuggagacccggacuc

SEQ ID NO: 2863183 - RNA, 19 nt, Artificial Sequence
  Description of Artificial Sequence: Synthetic oligonucleotide
guuaauggaggugaccgag

SEQ ID NO: 2863184 - RNA, 19 nt, Artificial Sequence
  Description of Artificial Sequence: Synthetic oligonucleotide
aaccaggcgagucuguuau

SEQ ID NO: 2863185 - RNA, 19 nt, Artificial Sequence
  Description of Artificial Sequence: Synthetic oligonucleotide
uaauggaggugaccgaggu

SEQ ID NO: 2863186 - RNA, 19 nt, Artificial Sequence
  Description of Artificial Sequence: Synthetic oligonucleotide
ugagacucuuacuuugacu

SEQ ID NO: 2863187 - RNA, 19 nt, Artificial Sequence
  Description of Artificial Sequence: Synthetic oligonucleotide
auacacuggagacccggac

SEQ ID NO: 2863188 - RNA, 19 nt, Artificial Sequence
  Description of Artificial Sequence: Synthetic oligonucleotide
aaagaaggguggcagcgaa

SEQ ID NO: 2863189 - RNA, 19 nt, Artificial Sequence
  Description of Artificial Sequence: Synthetic oligonucleotide
agaagggcaaccagcacac

SEQ ID NO: 2863190 - RNA, 19 nt, Artificial Sequence
  Description of Artificial Sequence: Synthetic oligonucleotide
ugucuguuucaaaauccga

SEQ ID NO: 2863191 - RNA, 19 nt, Artificial Sequence
  Description of Artificial Sequence: Synthetic oligonucleotide
uagagggcgaugaggagca

SEQ ID NO: 2863192 - RNA, 19 nt, Artificial Sequence
  Description of Artificial Sequence: Synthetic oligonucleotide
acaggucagcaccuccucc

SEQ ID NO: 2863193 - RNA, 19 nt, Artificial Sequence
  Description of Artificial Sequence: Synthetic oligonucleotide
aagggcaaccagcacacaa

SEQ ID NO: 2863194 - RNA, 19 nt, Artificial Sequence
  Description of Artificial Sequence: Synthetic oligonucleotide
ucugagacucuuacuuuga

SEQ ID NO: 2863195 - RNA, 19 nt, Artificial Sequence
  Description of Artificial Sequence: Synthetic oligonucleotide
ugacgccaaaagaagggug

SEQ ID NO: 2863196 - RNA, 19 nt, Artificial Sequence
  Description of Artificial Sequence: Synthetic oligonucleotide
gaucccuagggucuuggug

SEQ ID NO: 2863197 - RNA, 19 nt, Artificial Sequence
  Description of Artificial Sequence: Synthetic oligonucleotide
uacacuggagacccggacu

SEQ ID NO: 2863198 - RNA, 19 nt, Artificial Sequence
  Description of Artificial Sequence: Synthetic oligonucleotide
uuccacguagauacggcca

SEQ ID NO: 2863199 - RNA, 19 nt, Artificial Sequence
  Description of Artificial Sequence: Synthetic oligonucleotide
ugguucacauacacuggag

SEQ ID NO: 2863200 - RNA, 19 nt, Artificial Sequence
  Description of Artificial Sequence: Synthetic oligonucleotide
gagucuguuaucagcuggg

SEQ ID NO: 2863201 - RNA, 19 nt, Artificial Sequence
  Description of Artificial Sequence: Synthetic oligonucleotide
uucaccaaacaggucagca

SEQ ID NO: 2863202 - RNA, 19 nt, Artificial Sequence
  Description of Artificial Sequence: Synthetic oligonucleotide
gugucuguuucaaaauccg

SEQ ID NO: 2863203 - RNA, 19 nt, Artificial Sequence
  Description of Artificial Sequence: Synthetic oligonucleotide
cuuccacguagauacggcc

SEQ ID NO: 2863204 - RNA, 19 nt, Artificial Sequence
  Description of Artificial Sequence: Synthetic oligonucleotide
gagacucuuacuuugacuu

SEQ ID NO: 2863205 - RNA, 19 nt, Artificial Sequence
  Description of Artificial Sequence: Synthetic oligonucleotide
gagcaggguggguaaauag

SEQ ID NO: 2863206 - RNA, 19 nt, Artificial Sequence
  Description of Artificial Sequence: Synthetic oligonucleotide
ucaccaaacaggucagcac

SEQ ID NO: 2863207 - RNA, 19 nt, Artificial Sequence
  Description of Artificial Sequence: Synthetic oligonucleotide
aggucguggaaccaggcga

SEQ ID NO: 2863208 - RNA, 19 nt, Artificial Sequence
  Description of Artificial Sequence: Synthetic oligonucleotide
aauccgagagcgggcuucc

SEQ ID NO: 2863209 - RNA, 19 nt, Artificial Sequence
  Description of Artificial Sequence: Synthetic oligonucleotide
agcgaaauagagauggaga

SEQ ID NO: 2863210 - RNA, 19 nt, Artificial Sequence
  Description of Artificial Sequence: Synthetic oligonucleotide
acauacacuggagacccgg

SEQ ID NO: 2863211 - RNA, 19 nt, Artificial Sequence
  Description of Artificial Sequence: Synthetic oligonucleotide
ugaugaagaagggcaacca

SEQ ID NO: 2863212 - RNA, 19 nt, Artificial Sequence
  Description of Artificial Sequence: Synthetic oligonucleotide
uugacuugguucacauaca

SEQ ID NO: 2863213 - RNA, 19 nt, Artificial Sequence
  Description of Artificial Sequence: Synthetic oligonucleotide
guccguguucaccaaacag

SEQ ID NO: 2863214 - RNA, 19 nt, Artificial Sequence
  Description of Artificial Sequence: Synthetic oligonucleotide
gaggucguggaaccaggcg

SEQ ID NO: 2863215 - RNA, 19 nt, Artificial Sequence
  Description of Artificial Sequence: Synthetic oligonucleotide
agagcgggcuuccacguag

SEQ ID NO: 2863216 - RNA, 19 nt, Artificial Sequence
  Description of Artificial Sequence: Synthetic oligonucleotide
cuuguugggugucuguuuc

SEQ ID NO: 2863217 - RNA, 19 nt, Artificial Sequence
  Description of Artificial Sequence: Synthetic oligonucleotide
agcagggcgucugagacuc

SEQ ID NO: 2863218 - RNA, 19 nt, Artificial Sequence
  Description of Artificial Sequence: Synthetic oligonucleotide
uuaucagcugggcucgggu

SEQ ID NO: 2863219 - RNA, 19 nt, Artificial Sequence
  Description of Artificial Sequence: Synthetic oligonucleotide
gguaaauagaaagcgcccc

SEQ ID NO: 2863220 - RNA, 19 nt, Artificial Sequence
  Description of Artificial Sequence: Synthetic oligonucleotide
uaaaggcuccuaaaaugau

SEQ ID NO: 2863221 - RNA, 19 nt, Artificial Sequence
  Description of Artificial Sequence: Synthetic oligonucleotide
acacaauaaaggcuccuaa

SEQ ID NO: 2863222 - RNA, 19 nt, Artificial Sequence
  Description of Artificial Sequence: Synthetic oligonucleotide
agaagaccacaccagcgcu

SEQ ID NO: 2863223 - RNA, 19 nt, Artificial Sequence
  Description of Artificial Sequence: Synthetic oligonucleotide
acuuugacuugguucacau

SEQ ID NO: 2863224 - RNA, 19 nt, Artificial Sequence
  Description of Artificial Sequence: Synthetic oligonucleotide
ucccuagcggccaugaguu

SEQ ID NO: 2863225 - RNA, 19 nt, Artificial Sequence
  Description of Artificial Sequence: Synthetic oligonucleotide
ugaccgaggucguggaacc

SEQ ID NO: 2863226 - RNA, 19 nt, Artificial Sequence
  Description of Artificial Sequence: Synthetic oligonucleotide
gaggugaccgaggucgugg

SEQ ID NO: 2863227 - RNA, 19 nt, Artificial Sequence
  Description of Artificial Sequence: Synthetic oligonucleotide
agucuguuaucagcugggc

SEQ ID NO: 2863228 - RNA, 19 nt, Artificial Sequence
  Description of Artificial Sequence: Synthetic oligonucleotide
uagagauggagaagaccac

SEQ ID NO: 2863229 - RNA, 19 nt, Artificial Sequence
  Description of Artificial Sequence: Synthetic oligonucleotide
aaaagaaggguggcagcga

SEQ ID NO: 2863230 - RNA, 19 nt, Artificial Sequence
  Description of Artificial Sequence: Synthetic oligonucleotide
gaugaugaagaagggcaac

SEQ ID NO: 2863231 - RNA, 19 nt, Artificial Sequence
  Description of Artificial Sequence: Synthetic oligonucleotide
ucgggucaagcgcuugccg

SEQ ID NO: 2863232 - RNA, 19 nt, Artificial Sequence
  Description of Artificial Sequence: Synthetic oligonucleotide
aggcuccuaaaaugauccc

SEQ ID NO: 2863233 - RNA, 19 nt, Artificial Sequence
  Description of Artificial Sequence: Synthetic oligonucleotide
guggcagcgaaauagagau

SEQ ID NO: 2863234 - RNA, 19 nt, Artificial Sequence
  Description of Artificial Sequence: Synthetic oligonucleotide
aguuaauggaggugaccga

SEQ ID NO: 2863235 - RNA, 19 nt, Artificial Sequence
  Description of Artificial Sequence: Synthetic oligonucleotide
cuguuaucagcugggcucg

SEQ ID NO: 2863236 - RNA, 19 nt, Artificial Sequence
  Description of Artificial Sequence: Synthetic oligonucleotide
ggugucuguuucaaaaucc

SEQ ID NO: 2863237 - RNA, 19 nt, Artificial Sequence
  Description of Artificial Sequence: Synthetic oligonucleotide
cguagauacggccauagag

SEQ ID NO: 2863238 - RNA, 19 nt, Artificial Sequence
  Description of Artificial Sequence: Synthetic oligonucleotide
uccuccucagcuuuggcuu

SEQ ID NO: 2863239 - RNA, 19 nt, Artificial Sequence
  Description of Artificial Sequence: Synthetic oligonucleotide
agacucuuacuuugacuug

SEQ ID NO: 2863240 - RNA, 19 nt, Artificial Sequence
  Description of Artificial Sequence: Synthetic oligonucleotide
guggguaaauagaaagcgc

SEQ ID NO: 2863241 - RNA, 19 nt, Artificial Sequence
  Description of Artificial Sequence: Synthetic oligonucleotide
cuccuaaaaugaucccuag

SEQ ID NO: 2863242 - RNA, 19 nt, Artificial Sequence
  Description of Artificial Sequence: Synthetic oligonucleotide
ugguccguguucaccaaac

SEQ ID NO: 2863243 - RNA, 19 nt, Artificial Sequence
  Description of Artificial Sequence: Synthetic oligonucleotide
uuugcgcucccuagcggcc

SEQ ID NO: 2863244 - RNA, 19 nt, Artificial Sequence
  Description of Artificial Sequence: Synthetic oligonucleotide
uugccggucuuguugggug

SEQ ID NO: 2863245 - RNA, 19 nt, Artificial Sequence
  Description of Artificial Sequence: Synthetic oligonucleotide
gagauggagaagaccacac

SEQ ID NO: 2863246 - RNA, 19 nt, Artificial Sequence
  Description of Artificial Sequence: Synthetic oligonucleotide
auggagaagaccacaccag

SEQ ID NO: 2863247 - RNA, 19 nt, Artificial Sequence
  Description of Artificial Sequence: Synthetic oligonucleotide
uccacguagauacggccau

SEQ ID NO: 2863248 - RNA, 19 nt, Artificial Sequence
  Description of Artificial Sequence: Synthetic oligonucleotide
acuggagacccggacucgc

SEQ ID NO: 2863249 - RNA, 19 nt, Artificial Sequence
  Description of Artificial Sequence: Synthetic oligonucleotide
ggaguagacuguauagagg

SEQ ID NO: 2863250 - RNA, 19 nt, Artificial Sequence
  Description of Artificial Sequence: Synthetic oligonucleotide
aguagacuguauagaggac

SEQ ID NO: 2863251 - RNA, 19 nt, Artificial Sequence
  Description of Artificial Sequence: Synthetic oligonucleotide
agagauggagaagaccaca

SEQ ID NO: 2863252 - RNA, 19 nt, Artificial Sequence
  Description of Artificial Sequence: Synthetic oligonucleotide
cagcgaaauagagauggag

SEQ ID NO: 2863253 - RNA, 19 nt, Artificial Sequence
  Description of Artificial Sequence: Synthetic oligonucleotide
agggcgaugaggagcaggg

SEQ ID NO: 2863254 - RNA, 19 nt, Artificial Sequence
  Description of Artificial Sequence: Synthetic oligonucleotide
cgggcuuccacguagauac

SEQ ID NO: 2863255 - RNA, 19 nt, Artificial Sequence
  Description of Artificial Sequence: Synthetic oligonucleotide
ggagaagaccacaccagcg

SEQ ID NO: 2863256 - RNA, 19 nt, Artificial Sequence
  Description of Artificial Sequence: Synthetic oligonucleotide
uugacgccaaaagaagggu

SEQ ID NO: 2863257 - RNA, 19 nt, Artificial Sequence
  Description of Artificial Sequence: Synthetic oligonucleotide
acgugguccguguucacca

SEQ ID NO: 2863258 - RNA, 19 nt, Artificial Sequence
  Description of Artificial Sequence: Synthetic oligonucleotide
ugggcucgggucaagcgcu

SEQ ID NO: 2863259 - RNA, 19 nt, Artificial Sequence
  Description of Artificial Sequence: Synthetic oligonucleotide
guggcuuugcgcucccuag

SEQ ID NO: 2863260 - RNA, 19 nt, Artificial Sequence
  Description of Artificial Sequence: Synthetic oligonucleotide
acgccaaaagaaggguggc

SEQ ID NO: 2863261 - RNA, 19 nt, Artificial Sequence
  Description of Artificial Sequence: Synthetic oligonucleotide
cacaauaaaggcuccuaaa

SEQ ID NO: 2863262 - RNA, 19 nt, Artificial Sequence
  Description of Artificial Sequence: Synthetic oligonucleotide
ugggugucuguuucaaaau

SEQ ID NO: 2863263 - RNA, 19 nt, Artificial Sequence
  Description of Artificial Sequence: Synthetic oligonucleotide
cugggcucgggucaagcgc

SEQ ID NO: 2863264 - RNA, 19 nt, Artificial Sequence
  Description of Artificial Sequence: Synthetic oligonucleotide
gucagcaccuccuccucag

SEQ ID NO: 2863265 - RNA, 19 nt, Artificial Sequence
  Description of Artificial Sequence: Synthetic oligonucleotide
gaagaagggcaaccagcac

SEQ ID NO: 2863266 - RNA, 19 nt, Artificial Sequence
  Description of Artificial Sequence: Synthetic oligonucleotide
ggagaugaugaagaagggc

SEQ ID NO: 2863267 - RNA, 19 nt, Artificial Sequence
  Description of Artificial Sequence: Synthetic oligonucleotide
cauagagggcgaugaggag

SEQ ID NO: 2863268 - RNA, 19 nt, Artificial Sequence
  Description of Artificial Sequence: Synthetic oligonucleotide
agauacggccauagagggc

SEQ ID NO: 2863269 - RNA, 19 nt, Artificial Sequence
  Description of Artificial Sequence: Synthetic oligonucleotide
uggcuuugcgcucccuagc

SEQ ID NO: 2863270 - RNA, 19 nt, Artificial Sequence
  Description of Artificial Sequence: Synthetic oligonucleotide
agaaggguggcagcgaaau

SEQ ID NO: 2863271 - RNA, 19 nt, Artificial Sequence
  Description of Artificial Sequence: Synthetic oligonucleotide
acuguauagaggacguggu

SEQ ID NO: 2863272 - RNA, 19 nt, Artificial Sequence
  Description of Artificial Sequence: Synthetic oligonucleotide
uggagacccggacucgcug

SEQ ID NO: 2863273 - RNA, 19 nt, Artificial Sequence
  Description of Artificial Sequence: Synthetic oligonucleotide
ggcgaugaggagcagggug

SEQ ID NO: 2863274 - RNA, 19 nt, Artificial Sequence
  Description of Artificial Sequence: Synthetic oligonucleotide
ugaggagcaggguggguaa

SEQ ID NO: 2863275 - RNA, 19 nt, Artificial Sequence
  Description of Artificial Sequence: Synthetic oligonucleotide
cacguagauacggccauag

SEQ ID NO: 2863276 - RNA, 19 nt, Artificial Sequence
  Description of Artificial Sequence: Synthetic oligonucleotide
cuaaaaugaucccuagggu

SEQ ID NO: 2863277 - RNA, 19 nt, Artificial Sequence
  Description of Artificial Sequence: Synthetic oligonucleotide
ucuuguugggugucuguuu

SEQ ID NO: 2863278 - RNA, 19 nt, Artificial Sequence
  Description of Artificial Sequence: Synthetic oligonucleotide
ggagcccgggaguuaaugg

SEQ ID NO: 2863279 - RNA, 19 nt, Artificial Sequence
  Description of Artificial Sequence: Synthetic oligonucleotide
aagaccacaccagcgcuau

SEQ ID NO: 2863280 - RNA, 19 nt, Artificial Sequence
  Description of Artificial Sequence: Synthetic oligonucleotide
gcuugacgccaaaagaagg

SEQ ID NO: 2863281 - RNA, 19 nt, Artificial Sequence
  Description of Artificial Sequence: Synthetic oligonucleotide
gguucacauacacuggaga

SEQ ID NO: 2863282 - RNA, 19 nt, Artificial Sequence
  Description of Artificial Sequence: Synthetic oligonucleotide
gagacccggacucgcuggg

SEQ ID NO: 2863283 - RNA, 19 nt, Artificial Sequence
  Description of Artificial Sequence: Synthetic oligonucleotide
gagcccgggaguuaaugga

SEQ ID NO: 2863284 - RNA, 19 nt, Artificial Sequence
  Description of Artificial Sequence: Synthetic oligonucleotide
ggcuuugcgcucccuagcg

SEQ ID NO: 2863285 - RNA, 19 nt, Artificial Sequence
  Description of Artificial Sequence: Synthetic oligonucleotide
cugagacucuuacuuugac

SEQ ID NO: 2863286 - RNA, 19 nt, Artificial Sequence
  Description of Artificial Sequence: Synthetic oligonucleotide
agggucuugguggcuuugc

SEQ ID NO: 2863287 - RNA, 19 nt, Artificial Sequence
  Description of Artificial Sequence: Synthetic oligonucleotide
cuguauagaggacgugguc

SEQ ID NO: 2863288 - RNA, 19 nt, Artificial Sequence
  Description of Artificial Sequence: Synthetic oligonucleotide
uacuuugacuugguucaca

SEQ ID NO: 2863289 - RNA, 19 nt, Artificial Sequence
  Description of Artificial Sequence: Synthetic oligonucleotide
gagggcgaugaggagcagg

SEQ ID NO: 2863290 - RNA, 19 nt, Artificial Sequence
  Description of Artificial Sequence: Synthetic oligonucleotide
uccagcagggcgucugaga

SEQ ID NO: 2863291 - RNA, 19 nt, Artificial Sequence
  Description of Artificial Sequence: Synthetic oligonucleotide
caggucuggagcccgggag

SEQ ID NO: 2863292 - RNA, 19 nt, Artificial Sequence
  Description of Artificial Sequence: Synthetic oligonucleotide
uccgagagcgggcuuccac

SEQ ID NO: 2863293 - RNA, 19 nt, Artificial Sequence
  Description of Artificial Sequence: Synthetic oligonucleotide
uagaggacgugguccgugu

SEQ ID NO: 2863294 - RNA, 19 nt, Artificial Sequence
  Description of Artificial Sequence: Synthetic oligonucleotide
uuguugggugucuguuuca

SEQ ID NO: 2863295 - RNA, 19 nt, Artificial Sequence
  Description of Artificial Sequence: Synthetic oligonucleotide
uguugggugucuguuucaa

SEQ ID NO: 2863296 - RNA, 19 nt, Artificial Sequence
  Description of Artificial Sequence: Synthetic oligonucleotide
caauaaaggcuccuaaaau

SEQ ID NO: 2863297 - RNA, 19 nt, Artificial Sequence
  Description of Artificial Sequence: Synthetic oligonucleotide
agcaggguggguaaauaga

SEQ ID NO: 2863298 - RNA, 19 nt, Artificial Sequence
  Description of Artificial Sequence: Synthetic oligonucleotide
guggaguagacuguauaga

SEQ ID NO: 2863299 - RNA, 19 nt, Artificial Sequence
  Description of Artificial Sequence: Synthetic oligonucleotide
ggguaaauagaaagcgccc

SEQ ID NO: 2863300 - RNA, 19 nt, Artificial Sequence
  Description of Artificial Sequence: Synthetic oligonucleotide
cguggaguagacuguauag

SEQ ID NO: 2863301 - RNA, 19 nt, Artificial Sequence
  Description of Artificial Sequence: Synthetic oligonucleotide
aaaauccgagagcgggcuu

SEQ ID NO: 2863302 - RNA, 19 nt, Artificial Sequence
  Description of Artificial Sequence: Synthetic oligonucleotide
gaggacgugguccguguuc

SEQ ID NO: 2863303 - RNA, 19 nt, Artificial Sequence
  Description of Artificial Sequence: Synthetic oligonucleotide
aaugaucccuagggucuug

SEQ ID NO: 2863304 - RNA, 19 nt, Artificial Sequence
  Description of Artificial Sequence: Synthetic oligonucleotide
ggucuugguggcuuugcgc

SEQ ID NO: 2863305 - RNA, 19 nt, Artificial Sequence
  Description of Artificial Sequence: Synthetic oligonucleotide
gacgugguccguguucacc

SEQ ID NO: 2863306 - RNA, 19 nt, Artificial Sequence
  Description of Artificial Sequence: Synthetic oligonucleotide
auagaggacgugguccgug

SEQ ID NO: 2863307 - RNA, 19 nt, Artificial Sequence
  Description of Artificial Sequence: Synthetic oligonucleotide
augaucccuagggucuugg

SEQ ID NO: 2863308 - RNA, 19 nt, Artificial Sequence
  Description of Artificial Sequence: Synthetic oligonucleotide
guuaucagcugggcucggg

SEQ ID NO: 2863309 - RNA, 19 nt, Artificial Sequence
  Description of Artificial Sequence: Synthetic oligonucleotide
gccauagagggcgaugagg

SEQ ID NO: 2863310 - RNA, 19 nt, Artificial Sequence
  Description of Artificial Sequence: Synthetic oligonucleotide
gcgaugaggagcagggugg

SEQ ID NO: 2863311 - RNA, 19 nt, Artificial Sequence
  Description of Artificial Sequence: Synthetic oligonucleotide
ucccuagggucuugguggc

SEQ ID NO: 2863312 - RNA, 19 nt, Artificial Sequence
  Description of Artificial Sequence: Synthetic oligonucleotide
ggagacccggacucgcugg

SEQ ID NO: 2863313 - RNA, 19 nt, Artificial Sequence
  Description of Artificial Sequence: Synthetic oligonucleotide
ggcuugacgccaaaagaag

SEQ ID NO: 2863314 - RNA, 19 nt, Artificial Sequence
  Description of Artificial Sequence: Synthetic oligonucleotide
ucuggagcccgggaguuaa

SEQ ID NO: 2863315 - RNA, 19 nt, Artificial Sequence
  Description of Artificial Sequence: Synthetic oligonucleotide
gugaccgaggucguggaac

SEQ ID NO: 2863316 - RNA, 19 nt, Artificial Sequence
  Description of Artificial Sequence: Synthetic oligonucleotide
ccauagagggcgaugagga

SEQ ID NO: 2863317 - RNA, 19 nt, Artificial Sequence
  Description of Artificial Sequence: Synthetic oligonucleotide
ucagcaccuccuccucagc

SEQ ID NO: 2863318 - RNA, 19 nt, Artificial Sequence
  Description of Artificial Sequence: Synthetic oligonucleotide
aaaugaucccuagggucuu

SEQ ID NO: 2863319 - RNA, 19 nt, Artificial Sequence
  Description of Artificial Sequence: Synthetic oligonucleotide
ccaaaagaaggguggcagc

SEQ ID NO: 2863320 - RNA, 19 nt, Artificial Sequence
  Description of Artificial Sequence: Synthetic oligonucleotide
agcggccaugaguuucuuc

SEQ ID NO: 2863321 - RNA, 19 nt, Artificial Sequence
  Description of Artificial Sequence: Synthetic oligonucleotide
ugggcaggucuggagcccg

SEQ ID NO: 2863322 - RNA, 19 nt, Artificial Sequence
  Description of Artificial Sequence: Synthetic oligonucleotide
uggcagcgaaauagagaug

SEQ ID NO: 2863323 - RNA, 19 nt, Artificial Sequence
  Description of Artificial Sequence: Synthetic oligonucleotide
gggugucuguuucaaaauc

SEQ ID NO: 2863324 - RNA, 19 nt, Artificial Sequence
  Description of Artificial Sequence: Synthetic oligonucleotide
uggagcccgggaguuaaug

SEQ ID NO: 2863325 - RNA, 19 nt, Artificial Sequence
  Description of Artificial Sequence: Synthetic oligonucleotide
accgaggucguggaaccag

SEQ ID NO: 2863326 - RNA, 19 nt, Artificial Sequence
  Description of Artificial Sequence: Synthetic oligonucleotide
aggacgugguccguguuca

SEQ ID NO: 2863327 - RNA, 19 nt, Artificial Sequence
  Description of Artificial Sequence: Synthetic oligonucleotide
caggcgagucuguuaucag

SEQ ID NO: 2863328 - RNA, 19 nt, Artificial Sequence
  Description of Artificial Sequence: Synthetic oligonucleotide
ggcuuccacguagauacgg

SEQ ID NO: 2863329 - RNA, 19 nt, Artificial Sequence
  Description of Artificial Sequence: Synthetic oligonucleotide
uuacuuugacuugguucac

SEQ ID NO: 2863330 - RNA, 19 nt, Artificial Sequence
  Description of Artificial Sequence: Synthetic oligonucleotide
ugaucccuagggucuuggu

SEQ ID NO: 2863331 - RNA, 19 nt, Artificial Sequence
  Description of Artificial Sequence: Synthetic oligonucleotide
ucuugguggcuuugcgcuc

SEQ ID NO: 2863332 - RNA, 19 nt, Artificial Sequence
  Description of Artificial Sequence: Synthetic oligonucleotide
uguuaucagcugggcucgg

SEQ ID NO: 2863333 - RNA, 19 nt, Artificial Sequence
  Description of Artificial Sequence: Synthetic oligonucleotide
ggaguuaauggaggugacc

SEQ ID NO: 2863334 - RNA, 19 nt, Artificial Sequence
  Description of Artificial Sequence: Synthetic oligonucleotide
augaggagcagggugggua

SEQ ID NO: 2863335 - RNA, 19 nt, Artificial Sequence
  Description of Artificial Sequence: Synthetic oligonucleotide
ucgcugggcaggucuggag

SEQ ID NO: 2863336 - RNA, 19 nt, Artificial Sequence
  Description of Artificial Sequence: Synthetic oligonucleotide
agcccgggaguuaauggag

SEQ ID NO: 2863337 - RNA, 19 nt, Artificial Sequence
  Description of Artificial Sequence: Synthetic oligonucleotide
acguagauacggccauaga

SEQ ID NO: 2863338 - RNA, 19 nt, Artificial Sequence
  Description of Artificial Sequence: Synthetic oligonucleotide
guggaaccaggcgagucug

SEQ ID NO: 2863339 - RNA, 19 nt, Artificial Sequence
  Description of Artificial Sequence: Synthetic oligonucleotide
gggucuugguggcuuugcg

SEQ ID NO: 2863340 - RNA, 19 nt, Artificial Sequence
  Description of Artificial Sequence: Synthetic oligonucleotide
cauacacuggagacccgga

SEQ ID NO: 2863341 - RNA, 19 nt, Artificial Sequence
  Description of Artificial Sequence: Synthetic oligonucleotide
ccagcagggcgucugagac

SEQ ID NO: 2863342 - RNA, 19 nt, Artificial Sequence
  Description of Artificial Sequence: Synthetic oligonucleotide
uauagaggacgugguccgu

SEQ ID NO: 2863343 - RNA, 19 nt, Artificial Sequence
  Description of Artificial Sequence: Synthetic oligonucleotide
cucgggucaagcgcuugcc

SEQ ID NO: 2863344 - RNA, 19 nt, Artificial Sequence
  Description of Artificial Sequence: Synthetic oligonucleotide
accaggcgagucuguuauc

SEQ ID NO: 2863345 - RNA, 19 nt, Artificial Sequence
  Description of Artificial Sequence: Synthetic oligonucleotide
uggaaccaggcgagucugu

SEQ ID NO: 2863346 - RNA, 19 nt, Artificial Sequence
  Description of Artificial Sequence: Synthetic oligonucleotide
ccgagagcgggcuuccacg

SEQ ID NO: 2863347 - RNA, 19 nt, Artificial Sequence
  Description of Artificial Sequence: Synthetic oligonucleotide
gcugggcucgggucaagcg

SEQ ID NO: 2863348 - RNA, 19 nt, Artificial Sequence
  Description of Artificial Sequence: Synthetic oligonucleotide
gacccggacucgcugggca

SEQ ID NO: 2863349 - RNA, 19 nt, Artificial Sequence
  Description of Artificial Sequence: Synthetic oligonucleotide
ggucguggaaccaggcgag

SEQ ID NO: 2863350 - RNA, 19 nt, Artificial Sequence
  Description of Artificial Sequence: Synthetic oligonucleotide
ugccggucuuguugggugu

SEQ ID NO: 2863351 - RNA, 19 nt, Artificial Sequence
  Description of Artificial Sequence: Synthetic oligonucleotide
ucguggaaccaggcgaguc

SEQ ID NO: 2863352 - RNA, 19 nt, Artificial Sequence
  Description of Artificial Sequence: Synthetic oligonucleotide
agacuguauagaggacgug

SEQ ID NO: 2863353 - RNA, 19 nt, Artificial Sequence
  Description of Artificial Sequence: Synthetic oligonucleotide
aggugaccgaggucgugga

SEQ ID NO: 2863354 - RNA, 19 nt, Artificial Sequence
  Description of Artificial Sequence: Synthetic oligonucleotide
agggcaaccagcacacaau

SEQ ID NO: 2863355 - RNA, 19 nt, Artificial Sequence
  Description of Artificial Sequence: Synthetic oligonucleotide
gaaccaggcgagucuguua

SEQ ID NO: 2863356 - RNA, 19 nt, Artificial Sequence
  Description of Artificial Sequence: Synthetic oligonucleotide
gcggccaugaguuucuucu

SEQ ID NO: 2863357 - RNA, 19 nt, Artificial Sequence
  Description of Artificial Sequence: Synthetic oligonucleotide
gguggcagcgaaauagaga

SEQ ID NO: 2863358 - RNA, 19 nt, Artificial Sequence
  Description of Artificial Sequence: Synthetic oligonucleotide
agacccggacucgcugggc

SEQ ID NO: 2863359 - RNA, 19 nt, Artificial Sequence
  Description of Artificial Sequence: Synthetic oligonucleotide
accacaccagcgcuaucau

SEQ ID NO: 2863360 - RNA, 19 nt, Artificial Sequence
  Description of Artificial Sequence: Synthetic oligonucleotide
gucuguuaucagcugggcu

SEQ ID NO: 2863361 - RNA, 19 nt, Artificial Sequence
  Description of Artificial Sequence: Synthetic oligonucleotide
acccggacucgcugggcag

SEQ ID NO: 2863362 - RNA, 19 nt, Artificial Sequence
  Description of Artificial Sequence: Synthetic oligonucleotide
gcuuugcgcucccuagcgg

SEQ ID NO: 2863363 - RNA, 19 nt, Artificial Sequence
  Description of Artificial Sequence: Synthetic oligonucleotide
cgaaauagagauggagaag

SEQ ID NO: 2863364 - RNA, 19 nt, Artificial Sequence
  Description of Artificial Sequence: Synthetic oligonucleotide
guucaccaaacaggucagc

SEQ ID NO: 2863365 - RNA, 19 nt, Artificial Sequence
  Description of Artificial Sequence: Synthetic oligonucleotide
aagaaggguggcagcgaaa

SEQ ID NO: 2863366 - RNA, 19 nt, Artificial Sequence
  Description of Artificial Sequence: Synthetic oligonucleotide
ggccaugaguuucuucuuc

SEQ ID NO: 2863367 - RNA, 19 nt, Artificial Sequence
  Description of Artificial Sequence: Synthetic oligonucleotide
acucuuacuuugacuuggu

SEQ ID NO: 2863368 - RNA, 19 nt, Artificial Sequence
  Description of Artificial Sequence: Synthetic oligonucleotide
acucgcugggcaggucugg

SEQ ID NO: 2863369 - RNA, 19 nt, Artificial Sequence
  Description of Artificial Sequence: Synthetic oligonucleotide
aggguggcagcgaaauaga

SEQ ID NO: 2863370 - RNA, 19 nt, Artificial Sequence
  Description of Artificial Sequence: Synthetic oligonucleotide
gcuuccacguagauacggc

SEQ ID NO: 2863371 - RNA, 19 nt, Artificial Sequence
  Description of Artificial Sequence: Synthetic oligonucleotide
cacacaauaaaggcuccua

SEQ ID NO: 2863372 - RNA, 19 nt, Artificial Sequence
  Description of Artificial Sequence: Synthetic oligonucleotide
uagggucuugguggcuuug

SEQ ID NO: 2863373 - RNA, 19 nt, Artificial Sequence
  Description of Artificial Sequence: Synthetic oligonucleotide
cacuggagacccggacucg

SEQ ID NO: 2863374 - RNA, 19 nt, Artificial Sequence
  Description of Artificial Sequence: Synthetic oligonucleotide
caggguggguaaauagaaa

SEQ ID NO: 2863375 - RNA, 19 nt, Artificial Sequence
  Description of Artificial Sequence: Synthetic oligonucleotide
gacucgcugggcaggucug

SEQ ID NO: 2863376 - RNA, 19 nt, Artificial Sequence
  Description of Artificial Sequence: Synthetic oligonucleotide
gaagaccacaccagcgcua

SEQ ID NO: 2863377 - RNA, 19 nt, Artificial Sequence
  Description of Artificial Sequence: Synthetic oligonucleotide
agaccacaccagcgcuauc

SEQ ID NO: 2863378 - RNA, 19 nt, Artificial Sequence
  Description of Artificial Sequence: Synthetic oligonucleotide
guugggugucuguuucaaa

SEQ ID NO: 2863379 - RNA, 19 nt, Artificial Sequence
  Description of Artificial Sequence: Synthetic oligonucleotide
cucccuagcggccaugagu

SEQ ID NO: 2863380 - RNA, 19 nt, Artificial Sequence
  Description of Artificial Sequence: Synthetic oligonucleotide
gggcgucugagacucuuac

SEQ ID NO: 2863381 - RNA, 19 nt, Artificial Sequence
  Description of Artificial Sequence: Synthetic oligonucleotide
caaaauccgagagcgggcu

SEQ ID NO: 2863382 - RNA, 19 nt, Artificial Sequence
  Description of Artificial Sequence: Synthetic oligonucleotide
gacuugguucacauacacu

SEQ ID NO: 2863383 - RNA, 19 nt, Artificial Sequence
  Description of Artificial Sequence: Synthetic oligonucleotide
cuuugacuugguucacaua

SEQ ID NO: 2863384 - RNA, 19 nt, Artificial Sequence
  Description of Artificial Sequence: Synthetic oligonucleotide
cgggucaagcgcuugccgg

SEQ ID NO: 2863385 - RNA, 19 nt, Artificial Sequence
  Description of Artificial Sequence: Synthetic oligonucleotide
gcaggguggguaaauagaa

SEQ ID NO: 2863386 - RNA, 19 nt, Artificial Sequence
  Description of Artificial Sequence: Synthetic oligonucleotide
gaaggguggcagcgaaaua

SEQ ID NO: 2863387 - RNA, 19 nt, Artificial Sequence
  Description of Artificial Sequence: Synthetic oligonucleotide
ucagcugggcucgggucaa

SEQ ID NO: 2863388 - RNA, 19 nt, Artificial Sequence
  Description of Artificial Sequence: Synthetic oligonucleotide
acggccauagagggcgaug

SEQ ID NO: 2863389 - RNA, 19 nt, Artificial Sequence
  Description of Artificial Sequence: Synthetic oligonucleotide
ccgaggucguggaaccagg

SEQ ID NO: 2863390 - RNA, 19 nt, Artificial Sequence
  Description of Artificial Sequence: Synthetic oligonucleotide
gcgucugagacucuuacuu

SEQ ID NO: 2863391 - RNA, 19 nt, Artificial Sequence
  Description of Artificial Sequence: Synthetic oligonucleotide
cuagcggccaugaguuucu

SEQ ID NO: 2863392 - RNA, 19 nt, Artificial Sequence
  Description of Artificial Sequence: Synthetic oligonucleotide
ccagcacacaauaaaggcu

SEQ ID NO: 2863393 - RNA, 19 nt, Artificial Sequence
  Description of Artificial Sequence: Synthetic oligonucleotide
ggguggcagcgaaauagag

SEQ ID NO: 2863394 - RNA, 19 nt, Artificial Sequence
  Description of Artificial Sequence: Synthetic oligonucleotide
ggccauagagggcgaugag

SEQ ID NO: 2863395 - RNA, 19 nt, Artificial Sequence
  Description of Artificial Sequence: Synthetic oligonucleotide
uugcgcucccuagcggcca

SEQ ID NO: 2863396 - RNA, 19 nt, Artificial Sequence
  Description of Artificial Sequence: Synthetic oligonucleotide
gcuccuaaaaugaucccua

SEQ ID NO: 2863397 - RNA, 19 nt, Artificial Sequence
  Description of Artificial Sequence: Synthetic oligonucleotide
cgcuugccggucuuguugg

SEQ ID NO: 2863398 - RNA, 19 nt, Artificial Sequence
  Description of Artificial Sequence: Synthetic oligonucleotide
gcgagucuguuaucagcug

SEQ ID NO: 2863399 - RNA, 19 nt, Artificial Sequence
  Description of Artificial Sequence: Synthetic oligonucleotide
aggagcaggguggguaaau

SEQ ID NO: 2863400 - RNA, 19 nt, Artificial Sequence
  Description of Artificial Sequence: Synthetic oligonucleotide
cagcuuuggcuugacgcca

SEQ ID NO: 2863401 - RNA, 19 nt, Artificial Sequence
  Description of Artificial Sequence: Synthetic oligonucleotide
agaggacgugguccguguu

SEQ ID NO: 2863402 - RNA, 19 nt, Artificial Sequence
  Description of Artificial Sequence: Synthetic oligonucleotide
gguccguguucaccaaaca

SEQ ID NO: 2863403 - RNA, 19 nt, Artificial Sequence
  Description of Artificial Sequence: Synthetic oligonucleotide
ggcgagucuguuaucagcu

SEQ ID NO: 2863404 - RNA, 19 nt, Artificial Sequence
  Description of Artificial Sequence: Synthetic oligonucleotide
ccuagcggccaugaguuuc

SEQ ID NO: 2863405 - RNA, 19 nt, Artificial Sequence
  Description of Artificial Sequence: Synthetic oligonucleotide
ggcuccuaaaaugaucccu

SEQ ID NO: 2863406 - RNA, 19 nt, Artificial Sequence
  Description of Artificial Sequence: Synthetic oligonucleotide
gggcaaccagcacacaaua

SEQ ID NO: 2863407 - RNA, 19 nt, Artificial Sequence
  Description of Artificial Sequence: Synthetic oligonucleotide
gccaugaguuucuucuucu

SEQ ID NO: 2863408 - RNA, 19 nt, Artificial Sequence
  Description of Artificial Sequence: Synthetic oligonucleotide
cuuuggcuugacgccaaaa

SEQ ID NO: 2863409 - RNA, 19 nt, Artificial Sequence
  Description of Artificial Sequence: Synthetic oligonucleotide
gggaguuaauggaggugac

SEQ ID NO: 2863410 - RNA, 19 nt, Artificial Sequence
  Description of Artificial Sequence: Synthetic oligonucleotide
agcgggcuuccacguagau

SEQ ID NO: 2863411 - RNA, 19 nt, Artificial Sequence
  Description of Artificial Sequence: Synthetic oligonucleotide
gcuugccggucuuguuggg

SEQ ID NO: 2863412 - RNA, 19 nt, Artificial Sequence
  Description of Artificial Sequence: Synthetic oligonucleotide
cuccagcagggcgucugag

SEQ ID NO: 2863413 - RNA, 19 nt, Artificial Sequence
  Description of Artificial Sequence: Synthetic oligonucleotide
ccguguucaccaaacaggu

SEQ ID NO: 2863414 - RNA, 19 nt, Artificial Sequence
  Description of Artificial Sequence: Synthetic oligonucleotide
uccucagcuuuggcuugac

SEQ ID NO: 2863415 - RNA, 19 nt, Artificial Sequence
  Description of Artificial Sequence: Synthetic oligonucleotide
ugcgcucccuagcggccau

SEQ ID NO: 2863416 - RNA, 19 nt, Artificial Sequence
  Description of Artificial Sequence: Synthetic oligonucleotide
ccucagcuuuggcuugacg

SEQ ID NO: 2863417 - RNA, 19 nt, Artificial Sequence
  Description of Artificial Sequence: Synthetic oligonucleotide
gugguccguguucaccaaa

SEQ ID NO: 2863418 - RNA, 19 nt, Artificial Sequence
  Description of Artificial Sequence: Synthetic oligonucleotide
cgggaguuaauggagguga

SEQ ID NO: 2863419 - RNA, 19 nt, Artificial Sequence
  Description of Artificial Sequence: Synthetic oligonucleotide
ggucagcaccuccuccuca

SEQ ID NO: 2863420 - RNA, 19 nt, Artificial Sequence
  Description of Artificial Sequence: Synthetic oligonucleotide
ccaggcgagucuguuauca

SEQ ID NO: 2863421 - RNA, 19 nt, Artificial Sequence
  Description of Artificial Sequence: Synthetic oligonucleotide
gguggcuuugcgcucccua

SEQ ID NO: 2863422 - RNA, 19 nt, Artificial Sequence
  Description of Artificial Sequence: Synthetic oligonucleotide
gaagggcaaccagcacaca

SEQ ID NO: 2863423 - RNA, 19 nt, Artificial Sequence
  Description of Artificial Sequence: Synthetic oligonucleotide
ggacucgcugggcaggucu

SEQ ID NO: 2863424 - RNA, 19 nt, Artificial Sequence
  Description of Artificial Sequence: Synthetic oligonucleotide
gagagcgggcuuccacgua

SEQ ID NO: 2863425 - RNA, 19 nt, Artificial Sequence
  Description of Artificial Sequence: Synthetic oligonucleotide
uacggccauagagggcgau

SEQ ID NO: 2863426 - RNA, 19 nt, Artificial Sequence
  Description of Artificial Sequence: Synthetic oligonucleotide
cgaggucguggaaccaggc

SEQ ID NO: 2863427 - RNA, 19 nt, Artificial Sequence
  Description of Artificial Sequence: Synthetic oligonucleotide
gucuuguugggugucuguu

SEQ ID NO: 2863428 - RNA, 19 nt, Artificial Sequence
  Description of Artificial Sequence: Synthetic oligonucleotide
gaccgaggucguggaacca

SEQ ID NO: 2863429 - RNA, 19 nt, Artificial Sequence
  Description of Artificial Sequence: Synthetic oligonucleotide
cagcaccuccuccucagcu

SEQ ID NO: 2863430 - RNA, 19 nt, Artificial Sequence
  Description of Artificial Sequence: Synthetic oligonucleotide
gagcgggcuuccacguaga

SEQ ID NO: 2863431 - RNA, 19 nt, Artificial Sequence
  Description of Artificial Sequence: Synthetic oligonucleotide
ggucuuguugggugucugu

SEQ ID NO: 2863432 - RNA, 19 nt, Artificial Sequence
  Description of Artificial Sequence: Synthetic oligonucleotide
gggucaagcgcuugccggu

SEQ ID NO: 2863433 - RNA, 19 nt, Artificial Sequence
  Description of Artificial Sequence: Synthetic oligonucleotide
agagggcgaugaggagcag

SEQ ID NO: 2863434 - RNA, 19 nt, Artificial Sequence
  Description of Artificial Sequence: Synthetic oligonucleotide
gcucccuagcggccaugag

SEQ ID NO: 2863435 - RNA, 19 nt, Artificial Sequence
  Description of Artificial Sequence: Synthetic oligonucleotide
gaggagcaggguggguaaa

SEQ ID NO: 2863436 - RNA, 19 nt, Artificial Sequence
  Description of Artificial Sequence: Synthetic oligonucleotide
ccgggaguuaauggaggug

SEQ ID NO: 2863437 - RNA, 19 nt, Artificial Sequence
  Description of Artificial Sequence: Synthetic oligonucleotide
ggaggugaccgaggucgug

SEQ ID NO: 2863438 - RNA, 19 nt, Artificial Sequence
  Description of Artificial Sequence: Synthetic oligonucleotide
cguguucaccaaacagguc

SEQ ID NO: 2863439 - RNA, 19 nt, Artificial Sequence
  Description of Artificial Sequence: Synthetic oligonucleotide
ggcgucugagacucuuacu

SEQ ID NO: 2863440 - RNA, 19 nt, Artificial Sequence
  Description of Artificial Sequence: Synthetic oligonucleotide
ggucaagcgcuugccgguc

SEQ ID NO: 2863441 - RNA, 19 nt, Artificial Sequence
  Description of Artificial Sequence: Synthetic oligonucleotide
ggagcaggguggguaaaua

SEQ ID NO: 2863442 - RNA, 19 nt, Artificial Sequence
  Description of Artificial Sequence: Synthetic oligonucleotide
cuugccggucuuguugggu

SEQ ID NO: 2863443 - RNA, 19 nt, Artificial Sequence
  Description of Artificial Sequence: Synthetic oligonucleotide
cucgcugggcaggucugga

SEQ ID NO: 2863444 - RNA, 19 nt, Artificial Sequence
  Description of Artificial Sequence: Synthetic oligonucleotide
gggcuuccacguagauacg

SEQ ID NO: 2863445 - RNA, 19 nt, Artificial Sequence
  Description of Artificial Sequence: Synthetic oligonucleotide
gcagcgaaauagagaugga

SEQ ID NO: 2863446 - RNA, 19 nt, Artificial Sequence
  Description of Artificial Sequence: Synthetic oligonucleotide
cucuuacuuugacuugguu

SEQ ID NO: 2863447 - RNA, 19 nt, Artificial Sequence
  Description of Artificial Sequence: Synthetic oligonucleotide
cuggagacccggacucgcu

SEQ ID NO: 2863448 - RNA, 19 nt, Artificial Sequence
  Description of Artificial Sequence: Synthetic oligonucleotide
auacggccauagagggcga

SEQ ID NO: 2863449 - RNA, 19 nt, Artificial Sequence
  Description of Artificial Sequence: Synthetic oligonucleotide
ccguggaguagacuguaua

SEQ ID NO: 2863450 - RNA, 19 nt, Artificial Sequence
  Description of Artificial Sequence: Synthetic oligonucleotide
ggacgugguccguguucac

SEQ ID NO: 2863451 - RNA, 19 nt, Artificial Sequence
  Description of Artificial Sequence: Synthetic oligonucleotide
ggugaccgaggucguggaa

SEQ ID NO: 2863452 - RNA, 19 nt, Artificial Sequence
  Description of Artificial Sequence: Synthetic oligonucleotide
agggcgucugagacucuua

SEQ ID NO: 2863453 - RNA, 19 nt, Artificial Sequence
  Description of Artificial Sequence: Synthetic oligonucleotide
cccggacucgcugggcagg

SEQ ID NO: 2863454 - RNA, 19 nt, Artificial Sequence
  Description of Artificial Sequence: Synthetic oligonucleotide
auccgagagcgggcuucca

SEQ ID NO: 2863455 - RNA, 19 nt, Artificial Sequence
  Description of Artificial Sequence: Synthetic oligonucleotide
cagcagggcgucugagacu

SEQ ID NO: 2863456 - RNA, 19 nt, Artificial Sequence
  Description of Artificial Sequence: Synthetic oligonucleotide
cuagggucuugguggcuuu

SEQ ID NO: 2863457 - RNA, 19 nt, Artificial Sequence
  Description of Artificial Sequence: Synthetic oligonucleotide
gcacacaauaaaggcuccu

SEQ ID NO: 2863458 - RNA, 19 nt, Artificial Sequence
  Description of Artificial Sequence: Synthetic oligonucleotide
gggcaggucuggagcccgg

SEQ ID NO: 2863459 - RNA, 19 nt, Artificial Sequence
  Description of Artificial Sequence: Synthetic oligonucleotide
ggcucgggucaagcgcuug

SEQ ID NO: 2863460 - RNA, 19 nt, Artificial Sequence
  Description of Artificial Sequence: Synthetic oligonucleotide
uagcggccaugaguuucuu

SEQ ID NO: 2863461 - RNA, 19 nt, Artificial Sequence
  Description of Artificial Sequence: Synthetic oligonucleotide
gcuuuggcuugacgccaaa

SEQ ID NO: 2863462 - RNA, 19 nt, Artificial Sequence
  Description of Artificial Sequence: Synthetic oligonucleotide
cguggaaccaggcgagucu

SEQ ID NO: 2863463 - RNA, 19 nt, Artificial Sequence
  Description of Artificial Sequence: Synthetic oligonucleotide
cagcugggcucgggucaag

SEQ ID NO: 2863464 - RNA, 19 nt, Artificial Sequence
  Description of Artificial Sequence: Synthetic oligonucleotide
ggaaccaggcgagucuguu

SEQ ID NO: 2863465 - RNA, 19 nt, Artificial Sequence
  Description of Artificial Sequence: Synthetic oligonucleotide
gucuggagcccgggaguua

SEQ ID NO: 2863466 - RNA, 19 nt, Artificial Sequence
  Description of Artificial Sequence: Synthetic oligonucleotide
cccgggaguuaauggaggu

SEQ ID NO: 2863467 - RNA, 19 nt, Artificial Sequence
  Description of Artificial Sequence: Synthetic oligonucleotide
gucguggaaccaggcgagu

SEQ ID NO: 2863468 - RNA, 19 nt, Artificial Sequence
  Description of Artificial Sequence: Synthetic oligonucleotide
gcgggcuuccacguagaua

SEQ ID NO: 2863469 - RNA, 19 nt, Artificial Sequence
  Description of Artificial Sequence: Synthetic oligonucleotide
gccggucuuguuggguguc

SEQ ID NO: 2863470 - RNA, 19 nt, Artificial Sequence
  Description of Artificial Sequence: Synthetic oligonucleotide
cggucuuguugggugucug

SEQ ID NO: 2863471 - RNA, 19 nt, Artificial Sequence
  Description of Artificial Sequence: Synthetic oligonucleotide
cgccaaaagaaggguggca

SEQ ID NO: 2863472 - RNA, 19 nt, Artificial Sequence
  Description of Artificial Sequence: Synthetic oligonucleotide
cagggcgucugagacucuu

SEQ ID NO: 2863473 - RNA, 19 nt, Artificial Sequence
  Description of Artificial Sequence: Synthetic oligonucleotide
ggucuggagcccgggaguu

SEQ ID NO: 2863474 - RNA, 19 nt, Artificial Sequence
  Description of Artificial Sequence: Synthetic oligonucleotide
cgucugagacucuuacuuu

SEQ ID NO: 2863475 - RNA, 19 nt, Artificial Sequence
  Description of Artificial Sequence: Synthetic oligonucleotide
cgagagcgggcuuccacgu

SEQ ID NO: 2863476 - RNA, 19 nt, Artificial Sequence
  Description of Artificial Sequence: Synthetic oligonucleotide
cuggagcccgggaguuaau

SEQ ID NO: 2863477 - RNA, 19 nt, Artificial Sequence
  Description of Artificial Sequence: Synthetic oligonucleotide
cgugguccguguucaccaa

SEQ ID NO: 2863478 - RNA, 19 nt, Artificial Sequence
  Description of Artificial Sequence: Synthetic oligonucleotide
cuucuccagcagggcgucu

SEQ ID NO: 2863479 - RNA, 19 nt, Artificial Sequence
  Description of Artificial Sequence: Synthetic oligonucleotide
ccccguggaguagacugua

SEQ ID NO: 2863480 - RNA, 19 nt, Artificial Sequence
  Description of Artificial Sequence: Synthetic oligonucleotide
gggcgaugaggagcagggu

SEQ ID NO: 2863481 - RNA, 19 nt, Artificial Sequence
  Description of Artificial Sequence: Synthetic oligonucleotide
ccacguagauacggccaua

SEQ ID NO: 2863482 - RNA, 19 nt, Artificial Sequence
  Description of Artificial Sequence: Synthetic oligonucleotide
gcgcucccuagcggccaug

SEQ ID NO: 2863483 - RNA, 19 nt, Artificial Sequence
  Description of Artificial Sequence: Synthetic oligonucleotide
cgcucccuagcggccauga

SEQ ID NO: 2863484 - RNA, 19 nt, Artificial Sequence
  Description of Artificial Sequence: Synthetic oligonucleotide
cccguggaguagacuguau

SEQ ID NO: 2863485 - RNA, 19 nt, Artificial Sequence
  Description of Artificial Sequence: Synthetic oligonucleotide
ccggucuuguugggugucu

SEQ ID NO: 2863486 - RNA, 19 nt, Artificial Sequence
  Description of Artificial Sequence: Synthetic oligonucleotide
cggccaugaguuucuucuu

SEQ ID NO: 2863487 - RNA, 19 nt, Artificial Sequence
  Description of Artificial Sequence: Synthetic oligonucleotide
ccggacucgcugggcaggu

SEQ ID NO: 2863488 - RNA, 19 nt, Artificial Sequence
  Description of Artificial Sequence: Synthetic oligonucleotide
cccuagcggccaugaguuu

SEQ ID NO: 2863489 - RNA, 19 nt, Artificial Sequence
  Description of Artificial Sequence: Synthetic oligonucleotide
gcagggcgucugagacucu

SEQ ID NO: 2863490 - RNA, 19 nt, Artificial Sequence
  Description of Artificial Sequence: Synthetic oligonucleotide
aauaaugaccgcuaaacac

SEQ ID NO: 2863491 - RNA, 19 nt, Artificial Sequence
  Description of Artificial Sequence: Synthetic oligonucleotide
aacaucacgaaacacaaac

SEQ ID NO: 2863492 - RNA, 19 nt, Artificial Sequence
  Description of Artificial Sequence: Synthetic oligonucleotide
uuuauuuauauacuauugg

SEQ ID NO: 2863493 - RNA, 19 nt, Artificial Sequence
  Description of Artificial Sequence: Synthetic oligonucleotide
aauggcaacacucuuacag

SEQ ID NO: 2863494 - RNA, 19 nt, Artificial Sequence
  Description of Artificial Sequence: Synthetic oligonucleotide
auuuauauacuauugguuc

SEQ ID NO: 2863495 - RNA, 19 nt, Artificial Sequence
  Description of Artificial Sequence: Synthetic oligonucleotide
aacauaacaaaacaacauc

SEQ ID NO: 2863496 - RNA, 19 nt, Artificial Sequence
  Description of Artificial Sequence: Synthetic oligonucleotide
aaaaugggcauuucgggcc

SEQ ID NO: 2863497 - RNA, 19 nt, Artificial Sequence
  Description of Artificial Sequence: Synthetic oligonucleotide
acaacagcaauuuacaagg

SEQ ID NO: 2863498 - RNA, 19 nt, Artificial Sequence
  Description of Artificial Sequence: Synthetic oligonucleotide
uacauauucaauaagugca

SEQ ID NO: 2863499 - RNA, 19 nt, Artificial Sequence
  Description of Artificial Sequence: Synthetic oligonucleotide
auugguucaaaguacacac

SEQ ID NO: 2863500 - RNA, 19 nt, Artificial Sequence
  Description of Artificial Sequence: Synthetic oligonucleotide
uuauaugaaaaccagacau

SEQ ID NO: 2863501 - RNA, 19 nt, Artificial Sequence
  Description of Artificial Sequence: Synthetic oligonucleotide
aacaacauaacaaaacaac

SEQ ID NO: 2863502 - RNA, 19 nt, Artificial Sequence
  Description of Artificial Sequence: Synthetic oligonucleotide
augaaaaccagacauuuac

SEQ ID NO: 2863503 - RNA, 19 nt, Artificial Sequence
  Description of Artificial Sequence: Synthetic oligonucleotide
aauaagugcaucuacggga

SEQ ID NO: 2863504 - RNA, 19 nt, Artificial Sequence
  Description of Artificial Sequence: Synthetic oligonucleotide
uuugauuucuuucucaaca

SEQ ID NO: 2863505 - RNA, 19 nt, Artificial Sequence
  Description of Artificial Sequence: Synthetic oligonucleotide
uaacaaaacaacaucacga

SEQ ID NO: 2863506 - RNA, 19 nt, Artificial Sequence
  Description of Artificial Sequence: Synthetic oligonucleotide
ucugaaucagaucugaaug

SEQ ID NO: 2863507 - RNA, 19 nt, Artificial Sequence
  Description of Artificial Sequence: Synthetic oligonucleotide
acaaacugaauacagaucu

SEQ ID NO: 2863508 - RNA, 19 nt, Artificial Sequence
  Description of Artificial Sequence: Synthetic oligonucleotide
cauuauaugaaaaccagac

SEQ ID NO: 2863509 - RNA, 19 nt, Artificial Sequence
  Description of Artificial Sequence: Synthetic oligonucleotide
auaacaaaacaacaucacg

SEQ ID NO: 2863510 - RNA, 19 nt, Artificial Sequence
  Description of Artificial Sequence: Synthetic oligonucleotide
ucaaaguacacacacagaa

SEQ ID NO: 2863511 - RNA, 19 nt, Artificial Sequence
  Description of Artificial Sequence: Synthetic oligonucleotide
aaacagacacaauaaugac

SEQ ID NO: 2863512 - RNA, 19 nt, Artificial Sequence
  Description of Artificial Sequence: Synthetic oligonucleotide
uaaacauuauaugaaaacc

SEQ ID NO: 2863513 - RNA, 19 nt, Artificial Sequence
  Description of Artificial Sequence: Synthetic oligonucleotide
uucaauaagugcaucuacg

SEQ ID NO: 2863514 - RNA, 19 nt, Artificial Sequence
  Description of Artificial Sequence: Synthetic oligonucleotide
uauauauauauauuuauuu

SEQ ID NO: 2863515 - RNA, 19 nt, Artificial Sequence
  Description of Artificial Sequence: Synthetic oligonucleotide
acagaucugaaucagaucu

SEQ ID NO: 2863516 - RNA, 19 nt, Artificial Sequence
  Description of Artificial Sequence: Synthetic oligonucleotide
cuggccuugacuuagaccc

SEQ ID NO: 2863517 - RNA, 19 nt, Artificial Sequence
  Description of Artificial Sequence: Synthetic oligonucleotide
caaaacaacaucacgaaac

SEQ ID NO: 2863518 - RNA, 19 nt, Artificial Sequence
  Description of Artificial Sequence: Synthetic oligonucleotide
uuacauauucaauaagugc

SEQ ID NO: 2863519 - RNA, 19 nt, Artificial Sequence
  Description of Artificial Sequence: Synthetic oligonucleotide
uuauuuauauacuauuggu

SEQ ID NO: 2863520 - RNA, 19 nt, Artificial Sequence
  Description of Artificial Sequence: Synthetic oligonucleotide
aauuacauauucaauaagu

SEQ ID NO: 2863521 - RNA, 19 nt, Artificial Sequence
  Description of Artificial Sequence: Synthetic oligonucleotide
aauguaacaauggcaacac

SEQ ID NO: 2863522 - RNA, 19 nt, Artificial Sequence
  Description of Artificial Sequence: Synthetic oligonucleotide
aaaccagacauuuacauuu

SEQ ID NO: 2863523 - RNA, 19 nt, Artificial Sequence
  Description of Artificial Sequence: Synthetic oligonucleotide
uauacuauugguucaaagu

SEQ ID NO: 2863524 - RNA, 19 nt, Artificial Sequence
  Description of Artificial Sequence: Synthetic oligonucleotide
ucaauaagugcaucuacgg

SEQ ID NO: 2863525 - RNA, 19 nt, Artificial Sequence
  Description of Artificial Sequence: Synthetic oligonucleotide
acaauaaugaccgcuaaac

SEQ ID NO: 2863526 - RNA, 19 nt, Artificial Sequence
  Description of Artificial Sequence: Synthetic oligonucleotide
acagacacaauaaugaccg

SEQ ID NO: 2863527 - RNA, 19 nt, Artificial Sequence
  Description of Artificial Sequence: Synthetic oligonucleotide
aacagacacaauaaugacc

SEQ ID NO: 2863528 - RNA, 19 nt, Artificial Sequence
  Description of Artificial Sequence: Synthetic oligonucleotide
agcuuaucaacacaacagc

SEQ ID NO: 2863529 - RNA, 19 nt, Artificial Sequence
  Description of Artificial Sequence: Synthetic oligonucleotide
cacuauauaguucuaaaag

SEQ ID NO: 2863530 - RNA, 19 nt, Artificial Sequence
  Description of Artificial Sequence: Synthetic oligonucleotide
uacagguucaagauucucg

SEQ ID NO: 2863531 - RNA, 19 nt, Artificial Sequence
  Description of Artificial Sequence: Synthetic oligonucleotide
acagacaccagccuccucc

SEQ ID NO: 2863532 - RNA, 19 nt, Artificial Sequence
  Description of Artificial Sequence: Synthetic oligonucleotide
acuauauaguucuaaaaga

SEQ ID NO: 2863533 - RNA, 19 nt, Artificial Sequence
  Description of Artificial Sequence: Synthetic oligonucleotide
acagguucaagauucucgc

SEQ ID NO: 2863534 - RNA, 19 nt, Artificial Sequence
  Description of Artificial Sequence: Synthetic oligonucleotide
aaaacaacaucacgaaaca

SEQ ID NO: 2863535 - RNA, 19 nt, Artificial Sequence
  Description of Artificial Sequence: Synthetic oligonucleotide
uugacuuagacccuaauua

SEQ ID NO: 2863536 - RNA, 19 nt, Artificial Sequence
  Description of Artificial Sequence: Synthetic oligonucleotide
ucugaauguaacaauggca

SEQ ID NO: 2863537 - RNA, 19 nt, Artificial Sequence
  Description of Artificial Sequence: Synthetic oligonucleotide
ucuuacagguucaagauuc

SEQ ID NO: 2863538 - RNA, 19 nt, Artificial Sequence
  Description of Artificial Sequence: Synthetic oligonucleotide
uguaacaauggcaacacuc

SEQ ID NO: 2863539 - RNA, 19 nt, Artificial Sequence
  Description of Artificial Sequence: Synthetic oligonucleotide
aucugaauguaacaauggc

SEQ ID NO: 2863540 - RNA, 19 nt, Artificial Sequence
  Description of Artificial Sequence: Synthetic oligonucleotide
guucaaaguacacacacag

SEQ ID NO: 2863541 - RNA, 19 nt, Artificial Sequence
  Description of Artificial Sequence: Synthetic oligonucleotide
uuuacauuugauuucuuuc

SEQ ID NO: 2863542 - RNA, 19 nt, Artificial Sequence
  Description of Artificial Sequence: Synthetic oligonucleotide
cugaauacagaucugaauc

SEQ ID NO: 2863543 - RNA, 19 nt, Artificial Sequence
  Description of Artificial Sequence: Synthetic oligonucleotide
aacauuauaugaaaaccag

SEQ ID NO: 2863544 - RNA, 19 nt, Artificial Sequence
  Description of Artificial Sequence: Synthetic oligonucleotide
acaauggcaacacucuuac

SEQ ID NO: 2863545 - RNA, 19 nt, Artificial Sequence
  Description of Artificial Sequence: Synthetic oligonucleotide
aaucagaucugaauguaac

SEQ ID NO: 2863546 - RNA, 19 nt, Artificial Sequence
  Description of Artificial Sequence: Synthetic oligonucleotide
uuuaaacauuauaugaaaa

SEQ ID NO: 2863547 - RNA, 19 nt, Artificial Sequence
  Description of Artificial Sequence: Synthetic oligonucleotide
aaacauuauaugaaaacca

SEQ ID NO: 2863548 - RNA, 19 nt, Artificial Sequence
  Description of Artificial Sequence: Synthetic oligonucleotide
uaauuacauauucaauaag

SEQ ID NO: 2863549 - RNA, 19 nt, Artificial Sequence
  Description of Artificial Sequence: Synthetic oligonucleotide
uuuauauacuauugguuca

SEQ ID NO: 2863550 - RNA, 19 nt, Artificial Sequence
  Description of Artificial Sequence: Synthetic oligonucleotide
auucaauaagugcaucuac

SEQ ID NO: 2863551 - RNA, 19 nt, Artificial Sequence
  Description of Artificial Sequence: Synthetic oligonucleotide
aguacacacacagaagugc

SEQ ID NO: 2863552 - RNA, 19 nt, Artificial Sequence
  Description of Artificial Sequence: Synthetic oligonucleotide
uuucucaacacuauauagu

SEQ ID NO: 2863553 - RNA, 19 nt, Artificial Sequence
  Description of Artificial Sequence: Synthetic oligonucleotide
aacaaaacaacaucacgaa

SEQ ID NO: 2863554 - RNA, 19 nt, Artificial Sequence
  Description of Artificial Sequence: Synthetic oligonucleotide
uuacauuugauuucuuucu

SEQ ID NO: 2863555 - RNA, 19 nt, Artificial Sequence
  Description of Artificial Sequence: Synthetic oligonucleotide
ucaagauucucgcaggugu

SEQ ID NO: 2863556 - RNA, 19 nt, Artificial Sequence
  Description of Artificial Sequence: Synthetic oligonucleotide
auaaugaccgcuaaacacg

SEQ ID NO: 2863557 - RNA, 19 nt, Artificial Sequence
  Description of Artificial Sequence: Synthetic oligonucleotide
caaacagacacaauaauga

SEQ ID NO: 2863558 - RNA, 19 nt, Artificial Sequence
  Description of Artificial Sequence: Synthetic oligonucleotide
caauuuacaagggaggagg

SEQ ID NO: 2863559 - RNA, 19 nt, Artificial Sequence
  Description of Artificial Sequence: Synthetic oligonucleotide
uauuuauauacuauugguu

SEQ ID NO: 2863560 - RNA, 19 nt, Artificial Sequence
  Description of Artificial Sequence: Synthetic oligonucleotide
augaccgcuaaacacgagc

SEQ ID NO: 2863561 - RNA, 19 nt, Artificial Sequence
  Description of Artificial Sequence: Synthetic oligonucleotide
cuuucucaacacuauauag

SEQ ID NO: 2863562 - RNA, 19 nt, Artificial Sequence
  Description of Artificial Sequence: Synthetic oligonucleotide
auauauauauauuuauuua

SEQ ID NO: 2863563 - RNA, 19 nt, Artificial Sequence
  Description of Artificial Sequence: Synthetic oligonucleotide
cuaaacacgagccaugcac

SEQ ID NO: 2863564 - RNA, 19 nt, Artificial Sequence
  Description of Artificial Sequence: Synthetic oligonucleotide
aacaacaucacgaaacaca

SEQ ID NO: 2863565 - RNA, 19 nt, Artificial Sequence
  Description of Artificial Sequence: Synthetic oligonucleotide
agacauuuacauuugauuu

SEQ ID NO: 2863566 - RNA, 19 nt, Artificial Sequence
  Description of Artificial Sequence: Synthetic oligonucleotide
ugaauacagaucugaauca

SEQ ID NO: 2863567 - RNA, 19 nt, Artificial Sequence
  Description of Artificial Sequence: Synthetic oligonucleotide
aacacuauauaguucuaaa

SEQ ID NO: 2863568 - RNA, 19 nt, Artificial Sequence
  Description of Artificial Sequence: Synthetic oligonucleotide
auuuauuuauauacuauug

SEQ ID NO: 2863569 - RNA, 19 nt, Artificial Sequence
  Description of Artificial Sequence: Synthetic oligonucleotide
cauaacaaaacaacaucac

SEQ ID NO: 2863570 - RNA, 19 nt, Artificial Sequence
  Description of Artificial Sequence: Synthetic oligonucleotide
agacccuaauuacauauuc

SEQ ID NO: 2863571 - RNA, 19 nt, Artificial Sequence
  Description of Artificial Sequence: Synthetic oligonucleotide
aaacacaaacugaauacag

SEQ ID NO: 2863572 - RNA, 19 nt, Artificial Sequence
  Description of Artificial Sequence: Synthetic oligonucleotide
cacaacagcaauuuacaag

SEQ ID NO: 2863573 - RNA, 19 nt, Artificial Sequence
  Description of Artificial Sequence: Synthetic oligonucleotide
aucuacgggauuuuccucg

SEQ ID NO: 2863574 - RNA, 19 nt, Artificial Sequence
  Description of Artificial Sequence: Synthetic oligonucleotide
uuaucaacacaacagcaau

SEQ ID NO: 2863575 - RNA, 19 nt, Artificial Sequence
  Description of Artificial Sequence: Synthetic oligonucleotide
ugguucaaaguacacacac

SEQ ID NO: 2863576 - RNA, 19 nt, Artificial Sequence
  Description of Artificial Sequence: Synthetic oligonucleotide
caacacaacagcaauuuac

SEQ ID NO: 2863577 - RNA, 19 nt, Artificial Sequence
  Description of Artificial Sequence: Synthetic oligonucleotide
aauuuacaagggaggaggc

SEQ ID NO: 2863578 - RNA, 19 nt, Artificial Sequence
  Description of Artificial Sequence: Synthetic oligonucleotide
auuauaugaaaaccagaca

SEQ ID NO: 2863579 - RNA, 19 nt, Artificial Sequence
  Description of Artificial Sequence: Synthetic oligonucleotide
cagcuuaucaacacaacag

SEQ ID NO: 2863580 - RNA, 19 nt, Artificial Sequence
  Description of Artificial Sequence: Synthetic oligonucleotide
uuagacccuaauuacauau

SEQ ID NO: 2863581 - RNA, 19 nt, Artificial Sequence
  Description of Artificial Sequence: Synthetic oligonucleotide
ucacgaaacacaaacugaa

SEQ ID NO: 2863582 - RNA, 19 nt, Artificial Sequence
  Description of Artificial Sequence: Synthetic oligonucleotide
auauucaauaagugcaucu

SEQ ID NO: 2863583 - RNA, 19 nt, Artificial Sequence
  Description of Artificial Sequence: Synthetic oligonucleotide
auauacuauugguucaaag

SEQ ID NO: 2863584 - RNA, 19 nt, Artificial Sequence
  Description of Artificial Sequence: Synthetic oligonucleotide
uacuauugguucaaaguac

SEQ ID NO: 2863585 - RNA, 19 nt, Artificial Sequence
  Description of Artificial Sequence: Synthetic oligonucleotide
auuugauuucuuucucaac

SEQ ID NO: 2863586 - RNA, 19 nt, Artificial Sequence
  Description of Artificial Sequence: Synthetic oligonucleotide
gauauauauauauauuuau

SEQ ID NO: 2863587 - RNA, 19 nt, Artificial Sequence
  Description of Artificial Sequence: Synthetic oligonucleotide
ucaggggauauauauauau

SEQ ID NO: 2863588 - RNA, 19 nt, Artificial Sequence
  Description of Artificial Sequence: Synthetic oligonucleotide
auacuauugguucaaagua

SEQ ID NO: 2863589 - RNA, 19 nt, Artificial Sequence
  Description of Artificial Sequence: Synthetic oligonucleotide
aacagcaauuuacaaggga

SEQ ID NO: 2863590 - RNA, 19 nt, Artificial Sequence
  Description of Artificial Sequence: Synthetic oligonucleotide
gaucugaauguaacaaugg

SEQ ID NO: 2863591 - RNA, 19 nt, Artificial Sequence
  Description of Artificial Sequence: Synthetic oligonucleotide
caucacgaaacacaaacug

SEQ ID NO: 2863592 - RNA, 19 nt, Artificial Sequence
  Description of Artificial Sequence: Synthetic oligonucleotide
auuacauauucaauaagug

SEQ ID NO: 2863593 - RNA, 19 nt, Artificial Sequence
  Description of Artificial Sequence: Synthetic oligonucleotide
aggggauauauauauauau

SEQ ID NO: 2863594 - RNA, 19 nt, Artificial Sequence
  Description of Artificial Sequence: Synthetic oligonucleotide
agguucaagauucucgcag

SEQ ID NO: 2863595 - RNA, 19 nt, Artificial Sequence
  Description of Artificial Sequence: Synthetic oligonucleotide
uuuacaagggaggaggcga

SEQ ID NO: 2863596 - RNA, 19 nt, Artificial Sequence
  Description of Artificial Sequence: Synthetic oligonucleotide
ugucaggggauauauauau

SEQ ID NO: 2863597 - RNA, 19 nt, Artificial Sequence
  Description of Artificial Sequence: Synthetic oligonucleotide
acacaaacugaauacagau

SEQ ID NO: 2863598 - RNA, 19 nt, Artificial Sequence
  Description of Artificial Sequence: Synthetic oligonucleotide
aaacugaauacagaucuga

SEQ ID NO: 2863599 - RNA, 19 nt, Artificial Sequence
  Description of Artificial Sequence: Synthetic oligonucleotide
acagcaauuuacaagggag

SEQ ID NO: 2863600 - RNA, 19 nt, Artificial Sequence
  Description of Artificial Sequence: Synthetic oligonucleotide
aaacaacaucacgaaacac

SEQ ID NO: 2863601 - RNA, 19 nt, Artificial Sequence
  Description of Artificial Sequence: Synthetic oligonucleotide
cuauauaguucuaaaagaa

SEQ ID NO: 2863602 - RNA, 19 nt, Artificial Sequence
  Description of Artificial Sequence: Synthetic oligonucleotide
ugaaaaccagacauuuaca

SEQ ID NO: 2863603 - RNA, 19 nt, Artificial Sequence
  Description of Artificial Sequence: Synthetic oligonucleotide
ugacuuagacccuaauuac

SEQ ID NO: 2863604 - RNA, 19 nt, Artificial Sequence
  Description of Artificial Sequence: Synthetic oligonucleotide
caauaagugcaucuacggg

SEQ ID NO: 2863605 - RNA, 19 nt, Artificial Sequence
  Description of Artificial Sequence: Synthetic oligonucleotide
aaaaccagacauuuacauu

SEQ ID NO: 2863606 - RNA, 19 nt, Artificial Sequence
  Description of Artificial Sequence: Synthetic oligonucleotide
acagcuuaucaacacaaca

SEQ ID NO: 2863607 - RNA, 19 nt, Artificial Sequence
  Description of Artificial Sequence: Synthetic oligonucleotide
uaaacacgagccaugcaca

SEQ ID NO: 2863608 - RNA, 19 nt, Artificial Sequence
  Description of Artificial Sequence: Synthetic oligonucleotide
acauaacaaaacaacauca

SEQ ID NO: 2863609 - RNA, 19 nt, Artificial Sequence
  Description of Artificial Sequence: Synthetic oligonucleotide
cugaauguaacaauggcaa

SEQ ID NO: 2863610 - RNA, 19 nt, Artificial Sequence
  Description of Artificial Sequence: Synthetic oligonucleotide
auggcaacacucuuacagg

SEQ ID NO: 2863611 - RNA, 19 nt, Artificial Sequence
  Description of Artificial Sequence: Synthetic oligonucleotide
auauaguucuaaaagaaaa

SEQ ID NO: 2863612 - RNA, 19 nt, Artificial Sequence
  Description of Artificial Sequence: Synthetic oligonucleotide
uucucaacacuauauaguu

SEQ ID NO: 2863613 - RNA, 19 nt, Artificial Sequence
  Description of Artificial Sequence: Synthetic oligonucleotide
uucuuucucaacacuauau

SEQ ID NO: 2863614 - RNA, 19 nt, Artificial Sequence
  Description of Artificial Sequence: Synthetic oligonucleotide
ugaccgcuaaacacgagcc

SEQ ID NO: 2863615 - RNA, 19 nt, Artificial Sequence
  Description of Artificial Sequence: Synthetic oligonucleotide
acacagaagugcaucagcc

SEQ ID NO: 2863616 - RNA, 19 nt, Artificial Sequence
  Description of Artificial Sequence: Synthetic oligonucleotide
uauaugaaaaccagacauu

SEQ ID NO: 2863617 - RNA, 19 nt, Artificial Sequence
  Description of Artificial Sequence: Synthetic oligonucleotide
acaaacagacacaauaaug

SEQ ID NO: 2863618 - RNA, 19 nt, Artificial Sequence
  Description of Artificial Sequence: Synthetic oligonucleotide
gaauguaacaauggcaaca

SEQ ID NO: 2863619 - RNA, 19 nt, Artificial Sequence
  Description of Artificial Sequence: Synthetic oligonucleotide
aaacacgagccaugcacag

SEQ ID NO: 2863620 - RNA, 19 nt, Artificial Sequence
  Description of Artificial Sequence: Synthetic oligonucleotide
acaacauaacaaaacaaca

SEQ ID NO: 2863621 - RNA, 19 nt, Artificial Sequence
  Description of Artificial Sequence: Synthetic oligonucleotide
uauugguucaaaguacaca

SEQ ID NO: 2863622 - RNA, 19 nt, Artificial Sequence
  Description of Artificial Sequence: Synthetic oligonucleotide
ucagaucugaauguaacaa

SEQ ID NO: 2863623 - RNA, 19 nt, Artificial Sequence
  Description of Artificial Sequence: Synthetic oligonucleotide
cagcaauuuacaagggagg

SEQ ID NO: 2863624 - RNA, 19 nt, Artificial Sequence
  Description of Artificial Sequence: Synthetic oligonucleotide
uugauuucuuucucaacac

SEQ ID NO: 2863625 - RNA, 19 nt, Artificial Sequence
  Description of Artificial Sequence: Synthetic oligonucleotide
gaauacagaucugaaucag

SEQ ID NO: 2863626 - RNA, 19 nt, Artificial Sequence
  Description of Artificial Sequence: Synthetic oligonucleotide
ucuuucucaacacuauaua

SEQ ID NO: 2863627 - RNA, 19 nt, Artificial Sequence
  Description of Artificial Sequence: Synthetic oligonucleotide
aaaauuucacaaacagaca

SEQ ID NO: 2863628 - RNA, 19 nt, Artificial Sequence
  Description of Artificial Sequence: Synthetic oligonucleotide
aaacaacauaacaaaacaa

SEQ ID NO: 2863629 - RNA, 19 nt, Artificial Sequence
  Description of Artificial Sequence: Synthetic oligonucleotide
ugcaucuacgggauuuucc

SEQ ID NO: 2863630 - RNA, 19 nt, Artificial Sequence
  Description of Artificial Sequence: Synthetic oligonucleotide
uaaugaccgcuaaacacga

SEQ ID NO: 2863631 - RNA, 19 nt, Artificial Sequence
  Description of Artificial Sequence: Synthetic oligonucleotide
agaucugaauguaacaaug

SEQ ID NO: 2863632 - RNA, 19 nt, Artificial Sequence
  Description of Artificial Sequence: Synthetic oligonucleotide
ugauuucuuucucaacacu

SEQ ID NO: 2863633 - RNA, 19 nt, Artificial Sequence
  Description of Artificial Sequence: Synthetic oligonucleotide
uucaaaguacacacacaga

SEQ ID NO: 2863634 - RNA, 19 nt, Artificial Sequence
  Description of Artificial Sequence: Synthetic oligonucleotide
acauuugauuucuuucuca

SEQ ID NO: 2863635 - RNA, 19 nt, Artificial Sequence
  Description of Artificial Sequence: Synthetic oligonucleotide
uacauuugauuucuuucuc

SEQ ID NO: 2863636 - RNA, 19 nt, Artificial Sequence
  Description of Artificial Sequence: Synthetic oligonucleotide
auuuacauuugauuucuuu

SEQ ID NO: 2863637 - RNA, 19 nt, Artificial Sequence
  Description of Artificial Sequence: Synthetic oligonucleotide
acugaauacagaucugaau

SEQ ID NO: 2863638 - RNA, 19 nt, Artificial Sequence
  Description of Artificial Sequence: Synthetic oligonucleotide
acucuuacagguucaagau

SEQ ID NO: 2863639 - RNA, 19 nt, Artificial Sequence
  Description of Artificial Sequence: Synthetic oligonucleotide
acgaaacacaaacugaaua

SEQ ID NO: 2863640 - RNA, 19 nt, Artificial Sequence
  Description of Artificial Sequence: Synthetic oligonucleotide
aacacaaacugaauacaga

SEQ ID NO: 2863641 - RNA, 19 nt, Artificial Sequence
  Description of Artificial Sequence: Synthetic oligonucleotide
aucugaaucagaucugaau

SEQ ID NO: 2863642 - RNA, 19 nt, Artificial Sequence
  Description of Artificial Sequence: Synthetic oligonucleotide
cucaacacuauauaguucu

SEQ ID NO: 2863643 - RNA, 19 nt, Artificial Sequence
  Description of Artificial Sequence: Synthetic oligonucleotide
aggaggcgaggacagacac

SEQ ID NO: 2863644 - RNA, 19 nt, Artificial Sequence
  Description of Artificial Sequence: Synthetic oligonucleotide
acacuauauaguucuaaaa

SEQ ID NO: 2863645 - RNA, 19 nt, Artificial Sequence
  Description of Artificial Sequence: Synthetic oligonucleotide
aucagaucugaauguaaca

SEQ ID NO: 2863646 - RNA, 19 nt, Artificial Sequence
  Description of Artificial Sequence: Synthetic oligonucleotide
ugcacagcuuaucaacaca

SEQ ID NO: 2863647 - RNA, 19 nt, Artificial Sequence
  Description of Artificial Sequence: Synthetic oligonucleotide
acacgagccaugcacagcu

SEQ ID NO: 2863648 - RNA, 19 nt, Artificial Sequence
  Description of Artificial Sequence: Synthetic oligonucleotide
cuuaucaacacaacagcaa

SEQ ID NO: 2863649 - RNA, 19 nt, Artificial Sequence
  Description of Artificial Sequence: Synthetic oligonucleotide
aacacgagccaugcacagc

SEQ ID NO: 2863650 - RNA, 19 nt, Artificial Sequence
  Description of Artificial Sequence: Synthetic oligonucleotide
auauauauauauauuuauu

SEQ ID NO: 2863651 - RNA, 19 nt, Artificial Sequence
  Description of Artificial Sequence: Synthetic oligonucleotide
uuacaagggaggaggcgag

SEQ ID NO: 2863652 - RNA, 19 nt, Artificial Sequence
  Description of Artificial Sequence: Synthetic oligonucleotide
uuauauacuauugguucaa

SEQ ID NO: 2863653 - RNA, 19 nt, Artificial Sequence
  Description of Artificial Sequence: Synthetic oligonucleotide
ugaauguaacaauggcaac

SEQ ID NO: 2863654 - RNA, 19 nt, Artificial Sequence
  Description of Artificial Sequence: Synthetic oligonucleotide
cacucuuacagguucaaga

SEQ ID NO: 2863655 - RNA, 19 nt, Artificial Sequence
  Description of Artificial Sequence: Synthetic oligonucleotide
aauacagaucugaaucaga

SEQ ID NO: 2863656 - RNA, 19 nt, Artificial Sequence
  Description of Artificial Sequence: Synthetic oligonucleotide
auucucgcaggugucaggg

SEQ ID NO: 2863657 - RNA, 19 nt, Artificial Sequence
  Description of Artificial Sequence: Synthetic oligonucleotide
ucucgcaggugucagggga

SEQ ID NO: 2863658 - RNA, 19 nt, Artificial Sequence
  Description of Artificial Sequence: Synthetic oligonucleotide
auuuacaagggaggaggcg

SEQ ID NO: 2863659 - RNA, 19 nt, Artificial Sequence
  Description of Artificial Sequence: Synthetic oligonucleotide
aggacagacaccagccucc

SEQ ID NO: 2863660 - RNA, 19 nt, Artificial Sequence
  Description of Artificial Sequence: Synthetic oligonucleotide
uaugaaaaccagacauuua

SEQ ID NO: 2863661 - RNA, 19 nt, Artificial Sequence
  Description of Artificial Sequence: Synthetic oligonucleotide
aaaugggcauuucgggccu

SEQ ID NO: 2863662 - RNA, 19 nt, Artificial Sequence
  Description of Artificial Sequence: Synthetic oligonucleotide
gguucaagauucucgcagg

SEQ ID NO: 2863663 - RNA, 19 nt, Artificial Sequence
  Description of Artificial Sequence: Synthetic oligonucleotide
aaguacacacacagaagug

SEQ ID NO: 2863664 - RNA, 19 nt, Artificial Sequence
  Description of Artificial Sequence: Synthetic oligonucleotide
uuucuuucucaacacuaua

SEQ ID NO: 2863665 - RNA, 19 nt, Artificial Sequence
  Description of Artificial Sequence: Synthetic oligonucleotide
acacacacagaagugcauc

SEQ ID NO: 2863666 - RNA, 19 nt, Artificial Sequence
  Description of Artificial Sequence: Synthetic oligonucleotide
ucucaacacuauauaguuc

SEQ ID NO: 2863667 - RNA, 19 nt, Artificial Sequence
  Description of Artificial Sequence: Synthetic oligonucleotide
uacgggauuuuccucguaa

SEQ ID NO: 2863668 - RNA, 19 nt, Artificial Sequence
  Description of Artificial Sequence: Synthetic oligonucleotide
cacacagaagugcaucagc

SEQ ID NO: 2863669 - RNA, 19 nt, Artificial Sequence
  Description of Artificial Sequence: Synthetic oligonucleotide
acaaaacaacaucacgaaa

SEQ ID NO: 2863670 - RNA, 19 nt, Artificial Sequence
  Description of Artificial Sequence: Synthetic oligonucleotide
agcaauuuacaagggagga

SEQ ID NO: 2863671 - RNA, 19 nt, Artificial Sequence
  Description of Artificial Sequence: Synthetic oligonucleotide
cacaaacugaauacagauc

SEQ ID NO: 2863672 - RNA, 19 nt, Artificial Sequence
  Description of Artificial Sequence: Synthetic oligonucleotide
gauucucgcaggugucagg

SEQ ID NO: 2863673 - RNA, 19 nt, Artificial Sequence
  Description of Artificial Sequence: Synthetic oligonucleotide
agacacaauaaugaccgcu

SEQ ID NO: 2863674 - RNA, 19 nt, Artificial Sequence
  Description of Artificial Sequence: Synthetic oligonucleotide
acuauugguucaaaguaca

SEQ ID NO: 2863675 - RNA, 19 nt, Artificial Sequence
  Description of Artificial Sequence: Synthetic oligonucleotide
gauuucuuucucaacacua

SEQ ID NO: 2863676 - RNA, 19 nt, Artificial Sequence
  Description of Artificial Sequence: Synthetic oligonucleotide
uaucaacacaacagcaauu

SEQ ID NO: 2863677 - RNA, 19 nt, Artificial Sequence
  Description of Artificial Sequence: Synthetic oligonucleotide
uggcaacacucuuacaggu

SEQ ID NO: 2863678 - RNA, 19 nt, Artificial Sequence
  Description of Artificial Sequence: Synthetic oligonucleotide
aucaacacaacagcaauuu

SEQ ID NO: 2863679 - RNA, 19 nt, Artificial Sequence
  Description of Artificial Sequence: Synthetic oligonucleotide
cuauugguucaaaguacac

SEQ ID NO: 2863680 - RNA, 19 nt, Artificial Sequence
  Description of Artificial Sequence: Synthetic oligonucleotide
ggcauuucgggccuccugg

SEQ ID NO: 2863681 - RNA, 19 nt, Artificial Sequence
  Description of Artificial Sequence: Synthetic oligonucleotide
cgaaacacaaacugaauac

SEQ ID NO: 2863682 - RNA, 19 nt, Artificial Sequence
  Description of Artificial Sequence: Synthetic oligonucleotide
acaacaucacgaaacacaa

SEQ ID NO: 2863683 - RNA, 19 nt, Artificial Sequence
  Description of Artificial Sequence: Synthetic oligonucleotide
caaacugaauacagaucug

SEQ ID NO: 2863684 - RNA, 19 nt, Artificial Sequence
  Description of Artificial Sequence: Synthetic oligonucleotide
gaggcgaggacagacacca

SEQ ID NO: 2863685 - RNA, 19 nt, Artificial Sequence
  Description of Artificial Sequence: Synthetic oligonucleotide
caacagcaauuuacaaggg

SEQ ID NO: 2863686 - RNA, 19 nt, Artificial Sequence
  Description of Artificial Sequence: Synthetic oligonucleotide
auacagaucugaaucagau

SEQ ID NO: 2863687 - RNA, 19 nt, Artificial Sequence
  Description of Artificial Sequence: Synthetic oligonucleotide
ugaaucagaucugaaugua

SEQ ID NO: 2863688 - RNA, 19 nt, Artificial Sequence
  Description of Artificial Sequence: Synthetic oligonucleotide
acauuauaugaaaaccaga

SEQ ID NO: 2863689 - RNA, 19 nt, Artificial Sequence
  Description of Artificial Sequence: Synthetic oligonucleotide
caauaaugaccgcuaaaca

SEQ ID NO: 2863690 - RNA, 19 nt, Artificial Sequence
  Description of Artificial Sequence: Synthetic oligonucleotide
aucacgaaacacaaacuga

SEQ ID NO: 2863691 - RNA, 19 nt, Artificial Sequence
  Description of Artificial Sequence: Synthetic oligonucleotide
aacaauggcaacacucuua

SEQ ID NO: 2863692 - RNA, 19 nt, Artificial Sequence
  Description of Artificial Sequence: Synthetic oligonucleotide
auuucgggccuccuggccu

SEQ ID NO: 2863693 - RNA, 19 nt, Artificial Sequence
  Description of Artificial Sequence: Synthetic oligonucleotide
cauuugauuucuuucucaa

SEQ ID NO: 2863694 - RNA, 19 nt, Artificial Sequence
  Description of Artificial Sequence: Synthetic oligonucleotide
agaucugaaucagaucuga

SEQ ID NO: 2863695 - RNA, 19 nt, Artificial Sequence
  Description of Artificial Sequence: Synthetic oligonucleotide
aagggaggaggcgaggaca

SEQ ID NO: 2863696 - RNA, 19 nt, Artificial Sequence
  Description of Artificial Sequence: Synthetic oligonucleotide
gaggacagacaccagccuc

SEQ ID NO: 2863697 - RNA, 19 nt, Artificial Sequence
  Description of Artificial Sequence: Synthetic oligonucleotide
uucaagauucucgcaggug

SEQ ID NO: 2863698 - RNA, 19 nt, Artificial Sequence
  Description of Artificial Sequence: Synthetic oligonucleotide
agccaugcacagcuuauca

SEQ ID NO: 2863699 - RNA, 19 nt, Artificial Sequence
  Description of Artificial Sequence: Synthetic oligonucleotide
aagauucucgcagguguca

SEQ ID NO: 2863700 - RNA, 19 nt, Artificial Sequence
  Description of Artificial Sequence: Synthetic oligonucleotide
aagugcaucuacgggauuu

SEQ ID NO: 2863701 - RNA, 19 nt, Artificial Sequence
  Description of Artificial Sequence: Synthetic oligonucleotide
gacuuagacccuaauuaca

SEQ ID NO: 2863702 - RNA, 19 nt, Artificial Sequence
  Description of Artificial Sequence: Synthetic oligonucleotide
caacauaacaaaacaacau

SEQ ID NO: 2863703 - RNA, 19 nt, Artificial Sequence
  Description of Artificial Sequence: Synthetic oligonucleotide
ucaacacaacagcaauuua

SEQ ID NO: 2863704 - RNA, 19 nt, Artificial Sequence
  Description of Artificial Sequence: Synthetic oligonucleotide
aacugaauacagaucugaa

SEQ ID NO: 2863705 - RNA, 19 nt, Artificial Sequence
  Description of Artificial Sequence: Synthetic oligonucleotide
uaacaauggcaacacucuu

SEQ ID NO: 2863706 - RNA, 19 nt, Artificial Sequence
  Description of Artificial Sequence: Synthetic oligonucleotide
gauuuuccucguaauaaaa

SEQ ID NO: 2863707 - RNA, 19 nt, Artificial Sequence
  Description of Artificial Sequence: Synthetic oligonucleotide
caugcacagcuuaucaaca

SEQ ID NO: 2863708 - RNA, 19 nt, Artificial Sequence
  Description of Artificial Sequence: Synthetic oligonucleotide
aaccagacauuuacauuug

SEQ ID NO: 2863709 - RNA, 19 nt, Artificial Sequence
  Description of Artificial Sequence: Synthetic oligonucleotide
cagaucugaaucagaucug

SEQ ID NO: 2863710 - RNA, 19 nt, Artificial Sequence
  Description of Artificial Sequence: Synthetic oligonucleotide
gggauauauauauauauuu

SEQ ID NO: 2863711 - RNA, 19 nt, Artificial Sequence
  Description of Artificial Sequence: Synthetic oligonucleotide
acacaacagcaauuuacaa

SEQ ID NO: 2863712 - RNA, 19 nt, Artificial Sequence
  Description of Artificial Sequence: Synthetic oligonucleotide
acauauucaauaagugcau

SEQ ID NO: 2863713 - RNA, 19 nt, Artificial Sequence
  Description of Artificial Sequence: Synthetic oligonucleotide
cauauucaauaagugcauc

SEQ ID NO: 2863714 - RNA, 19 nt, Artificial Sequence
  Description of Artificial Sequence: Synthetic oligonucleotide
gacacaauaaugaccgcua

SEQ ID NO: 2863715 - RNA, 19 nt, Artificial Sequence
  Description of Artificial Sequence: Synthetic oligonucleotide
gacccuaauuacauauuca

SEQ ID NO: 2863716 - RNA, 19 nt, Artificial Sequence
  Description of Artificial Sequence: Synthetic oligonucleotide
ucuacgggauuuuccucgu

SEQ ID NO: 2863717 - RNA, 19 nt, Artificial Sequence
  Description of Artificial Sequence: Synthetic oligonucleotide
auaagugcaucuacgggau

SEQ ID NO: 2863718 - RNA, 19 nt, Artificial Sequence
  Description of Artificial Sequence: Synthetic oligonucleotide
guaacaauggcaacacucu

SEQ ID NO: 2863719 - RNA, 19 nt, Artificial Sequence
  Description of Artificial Sequence: Synthetic oligonucleotide
caagauucucgcagguguc

SEQ ID NO: 2863720 - RNA, 19 nt, Artificial Sequence
  Description of Artificial Sequence: Synthetic oligonucleotide
cacagcuuaucaacacaac

SEQ ID NO: 2863721 - RNA, 19 nt, Artificial Sequence
  Description of Artificial Sequence: Synthetic oligonucleotide
ggauauauauauauauuua

SEQ ID NO: 2863722 - RNA, 19 nt, Artificial Sequence
  Description of Artificial Sequence: Synthetic oligonucleotide
ccaugcacagcuuaucaac

SEQ ID NO: 2863723 - RNA, 19 nt, Artificial Sequence
  Description of Artificial Sequence: Synthetic oligonucleotide
uauauacuauugguucaaa

SEQ ID NO: 2863724 - RNA, 19 nt, Artificial Sequence
  Description of Artificial Sequence: Synthetic oligonucleotide
ucaacacuauauaguucua

SEQ ID NO: 2863725 - RNA, 19 nt, Artificial Sequence
  Description of Artificial Sequence: Synthetic oligonucleotide
uagacccuaauuacauauu

SEQ ID NO: 2863726 - RNA, 19 nt, Artificial Sequence
  Description of Artificial Sequence: Synthetic oligonucleotide
acacaauaaugaccgcuaa

SEQ ID NO: 2863727 - RNA, 19 nt, Artificial Sequence
  Description of Artificial Sequence: Synthetic oligonucleotide
gcaacacucuuacagguuc

SEQ ID NO: 2863728 - RNA, 19 nt, Artificial Sequence
  Description of Artificial Sequence: Synthetic oligonucleotide
uucucgcaggugucagggg

SEQ ID NO: 2863729 - RNA, 19 nt, Artificial Sequence
  Description of Artificial Sequence: Synthetic oligonucleotide
agauucucgcaggugucag

SEQ ID NO: 2863730 - RNA, 19 nt, Artificial Sequence
  Description of Artificial Sequence: Synthetic oligonucleotide
acacacagaagugcaucag

SEQ ID NO: 2863731 - RNA, 19 nt, Artificial Sequence
  Description of Artificial Sequence: Synthetic oligonucleotide
cugaaucagaucugaaugu

SEQ ID NO: 2863732 - RNA, 19 nt, Artificial Sequence
  Description of Artificial Sequence: Synthetic oligonucleotide
accagacauuuacauuuga

SEQ ID NO: 2863733 - RNA, 19 nt, Artificial Sequence
  Description of Artificial Sequence: Synthetic oligonucleotide
guacacacacagaagugca

SEQ ID NO: 2863734 - RNA, 19 nt, Artificial Sequence
  Description of Artificial Sequence: Synthetic oligonucleotide
uacaagggaggaggcgagg

SEQ ID NO: 2863735 - RNA, 19 nt, Artificial Sequence
  Description of Artificial Sequence: Synthetic oligonucleotide
cacacacagaagugcauca

SEQ ID NO: 2863736 - RNA, 19 nt, Artificial Sequence
  Description of Artificial Sequence: Synthetic oligonucleotide
cauuucgggccuccuggcc

SEQ ID NO: 2863737 - RNA, 19 nt, Artificial Sequence
  Description of Artificial Sequence: Synthetic oligonucleotide
cagacauuuacauuugauu

SEQ ID NO: 2863738 - RNA, 19 nt, Artificial Sequence
  Description of Artificial Sequence: Synthetic oligonucleotide
aacacucuuacagguucaa

SEQ ID NO: 2863739 - RNA, 19 nt, Artificial Sequence
  Description of Artificial Sequence: Synthetic oligonucleotide
auguaacaauggcaacacu

SEQ ID NO: 2863740 - RNA, 19 nt, Artificial Sequence
  Description of Artificial Sequence: Synthetic oligonucleotide
uuacagguucaagauucuc

SEQ ID NO: 2863741 - RNA, 19 nt, Artificial Sequence
  Description of Artificial Sequence: Synthetic oligonucleotide
ggcgaggacagacaccagc

SEQ ID NO: 2863742 - RNA, 19 nt, Artificial Sequence
  Description of Artificial Sequence: Synthetic oligonucleotide
ggugucaggggauauauau

SEQ ID NO: 2863743 - RNA, 19 nt, Artificial Sequence
  Description of Artificial Sequence: Synthetic oligonucleotide
gcaauuuacaagggaggag

SEQ ID NO: 2863744 - RNA, 19 nt, Artificial Sequence
  Description of Artificial Sequence: Synthetic oligonucleotide
aaugaccgcuaaacacgag

SEQ ID NO: 2863745 - RNA, 19 nt, Artificial Sequence
  Description of Artificial Sequence: Synthetic oligonucleotide
accgcuaaacacgagccau

SEQ ID NO: 2863746 - RNA, 19 nt, Artificial Sequence
  Description of Artificial Sequence: Synthetic oligonucleotide
uccuccucaaugguuuuaa

SEQ ID NO: 2863747 - RNA, 19 nt, Artificial Sequence
  Description of Artificial Sequence: Synthetic oligonucleotide
ggauuuuccucguaauaaa

SEQ ID NO: 2863748 - RNA, 19 nt, Artificial Sequence
  Description of Artificial Sequence: Synthetic oligonucleotide
cacagaagugcaucagcca

SEQ ID NO: 2863749 - RNA, 19 nt, Artificial Sequence
  Description of Artificial Sequence: Synthetic oligonucleotide
caucuacgggauuuuccuc

SEQ ID NO: 2863750 - RNA, 19 nt, Artificial Sequence
  Description of Artificial Sequence: Synthetic oligonucleotide
gggauuuuccucguaauaa

SEQ ID NO: 2863751 - RNA, 19 nt, Artificial Sequence
  Description of Artificial Sequence: Synthetic oligonucleotide
acgggauuuuccucguaau

SEQ ID NO: 2863752 - RNA, 19 nt, Artificial Sequence
  Description of Artificial Sequence: Synthetic oligonucleotide
acaagggaggaggcgagga

SEQ ID NO: 2863753 - RNA, 19 nt, Artificial Sequence
  Description of Artificial Sequence: Synthetic oligonucleotide
gcuuaucaacacaacagca

SEQ ID NO: 2863754 - RNA, 19 nt, Artificial Sequence
  Description of Artificial Sequence: Synthetic oligonucleotide
augggcauuucgggccucc

SEQ ID NO: 2863755 - RNA, 19 nt, Artificial Sequence
  Description of Artificial Sequence: Synthetic oligonucleotide
cagacacaauaaugaccgc

SEQ ID NO: 2863756 - RNA, 19 nt, Artificial Sequence
  Description of Artificial Sequence: Synthetic oligonucleotide
acacucuuacagguucaag

SEQ ID NO: 2863757 - RNA, 19 nt, Artificial Sequence
  Description of Artificial Sequence: Synthetic oligonucleotide
gaccgcuaaacacgagcca

SEQ ID NO: 2863758 - RNA, 19 nt, Artificial Sequence
  Description of Artificial Sequence: Synthetic oligonucleotide
uccuggccuugacuuagac

SEQ ID NO: 2863759 - RNA, 19 nt, Artificial Sequence
  Description of Artificial Sequence: Synthetic oligonucleotide
cacaauaaugaccgcuaaa

SEQ ID NO: 2863760 - RNA, 19 nt, Artificial Sequence
  Description of Artificial Sequence: Synthetic oligonucleotide
caagggaggaggcgaggac

SEQ ID NO: 2863761 - RNA, 19 nt, Artificial Sequence
  Description of Artificial Sequence: Synthetic oligonucleotide
cuugacuuagacccuaauu

SEQ ID NO: 2863762 - RNA, 19 nt, Artificial Sequence
  Description of Artificial Sequence: Synthetic oligonucleotide
caggggauauauauauaua

SEQ ID NO: 2863763 - RNA, 19 nt, Artificial Sequence
  Description of Artificial Sequence: Synthetic oligonucleotide
caacacucuuacagguuca

SEQ ID NO: 2863764 - RNA, 19 nt, Artificial Sequence
  Description of Artificial Sequence: Synthetic oligonucleotide
cuuagacccuaauuacaua

SEQ ID NO: 2863765 - RNA, 19 nt, Artificial Sequence
  Description of Artificial Sequence: Synthetic oligonucleotide
caacacuauauaguucuaa

SEQ ID NO: 2863766 - RNA, 19 nt, Artificial Sequence
  Description of Artificial Sequence: Synthetic oligonucleotide
uggccuugacuuagacccu

SEQ ID NO: 2863767 - RNA, 19 nt, Artificial Sequence
  Description of Artificial Sequence: Synthetic oligonucleotide
acgagccaugcacagcuua

SEQ ID NO: 2863768 - RNA, 19 nt, Artificial Sequence
  Description of Artificial Sequence: Synthetic oligonucleotide
agacaccagccuccuccuc

SEQ ID NO: 2863769 - RNA, 19 nt, Artificial Sequence
  Description of Artificial Sequence: Synthetic oligonucleotide
gaucugaaucagaucugaa

SEQ ID NO: 2863770 - RNA, 19 nt, Artificial Sequence
  Description of Artificial Sequence: Synthetic oligonucleotide
gcaucuacgggauuuuccu

SEQ ID NO: 2863771 - RNA, 19 nt, Artificial Sequence
  Description of Artificial Sequence: Synthetic oligonucleotide
ccuggccuugacuuagacc

SEQ ID NO: 2863772 - RNA, 19 nt, Artificial Sequence
  Description of Artificial Sequence: Synthetic oligonucleotide
guucaagauucucgcaggu

SEQ ID NO: 2863773 - RNA, 19 nt, Artificial Sequence
  Description of Artificial Sequence: Synthetic oligonucleotide
cacaaacagacacaauaau

SEQ ID NO: 2863774 - RNA, 19 nt, Artificial Sequence
  Description of Artificial Sequence: Synthetic oligonucleotide
cucaaugguuuuaaauuuu

SEQ ID NO: 2863775 - RNA, 19 nt, Artificial Sequence
  Description of Artificial Sequence: Synthetic oligonucleotide
cagaucugaauguaacaau

SEQ ID NO: 2863776 - RNA, 19 nt, Artificial Sequence
  Description of Artificial Sequence: Synthetic oligonucleotide
gguucaaaguacacacaca

SEQ ID NO: 2863777 - RNA, 19 nt, Artificial Sequence
  Description of Artificial Sequence: Synthetic oligonucleotide
cagguucaagauucucgca

SEQ ID NO: 2863778 - RNA, 19 nt, Artificial Sequence
  Description of Artificial Sequence: Synthetic oligonucleotide
uaagugcaucuacgggauu

SEQ ID NO: 2863779 - RNA, 19 nt, Artificial Sequence
  Description of Artificial Sequence: Synthetic oligonucleotide
ggaggaggcgaggacagac

SEQ ID NO: 2863780 - RNA, 19 nt, Artificial Sequence
  Description of Artificial Sequence: Synthetic oligonucleotide
gagccaugcacagcuuauc

SEQ ID NO: 2863781 - RNA, 19 nt, Artificial Sequence
  Description of Artificial Sequence: Synthetic oligonucleotide
cuuacagguucaagauucu

SEQ ID NO: 2863782 - RNA, 19 nt, Artificial Sequence
  Description of Artificial Sequence: Synthetic oligonucleotide
agugcaucuacgggauuuu

SEQ ID NO: 2863783 - RNA, 19 nt, Artificial Sequence
  Description of Artificial Sequence: Synthetic oligonucleotide
uuucgggccuccuggccuu

SEQ ID NO: 2863784 - RNA, 19 nt, Artificial Sequence
  Description of Artificial Sequence: Synthetic oligonucleotide
caacaucacgaaacacaaa

SEQ ID NO: 2863785 - RNA, 19 nt, Artificial Sequence
  Description of Artificial Sequence: Synthetic oligonucleotide
gcacagcuuaucaacacaa

SEQ ID NO: 2863786 - RNA, 19 nt, Artificial Sequence
  Description of Artificial Sequence: Synthetic oligonucleotide
gcauuucgggccuccuggc

SEQ ID NO: 2863787 - RNA, 19 nt, Artificial Sequence
  Description of Artificial Sequence: Synthetic oligonucleotide
gugucaggggauauauaua

SEQ ID NO: 2863788 - RNA, 19 nt, Artificial Sequence
  Description of Artificial Sequence: Synthetic oligonucleotide
cacgaaacacaaacugaau

SEQ ID NO: 2863789 - RNA, 19 nt, Artificial Sequence
  Description of Artificial Sequence: Synthetic oligonucleotide
caauggcaacacucuuaca

SEQ ID NO: 2863790 - RNA, 19 nt, Artificial Sequence
  Description of Artificial Sequence: Synthetic oligonucleotide
gcuaaacacgagccaugca

SEQ ID NO: 2863791 - RNA, 19 nt, Artificial Sequence
  Description of Artificial Sequence: Synthetic oligonucleotide
gacagacaccagccuccuc

SEQ ID NO: 2863792 - RNA, 19 nt, Artificial Sequence
  Description of Artificial Sequence: Synthetic oligonucleotide
gggcauuucgggccuccug

SEQ ID NO: 2863793 - RNA, 19 nt, Artificial Sequence
  Description of Artificial Sequence: Synthetic oligonucleotide
gccaugcacagcuuaucaa

SEQ ID NO: 2863794 - RNA, 19 nt, Artificial Sequence
  Description of Artificial Sequence: Synthetic oligonucleotide
ggggauauauauauauauu

SEQ ID NO: 2863795 - RNA, 19 nt, Artificial Sequence
  Description of Artificial Sequence: Synthetic oligonucleotide
ccuccuggccuugacuuag

SEQ ID NO: 2863796 - RNA, 19 nt, Artificial Sequence
  Description of Artificial Sequence: Synthetic oligonucleotide
ccgcuaaacacgagccaug

SEQ ID NO: 2863797 - RNA, 19 nt, Artificial Sequence
  Description of Artificial Sequence: Synthetic oligonucleotide
cgcuaaacacgagccaugc

SEQ ID NO: 2863798 - RNA, 19 nt, Artificial Sequence
  Description of Artificial Sequence: Synthetic oligonucleotide
gucaggggauauauauaua

SEQ ID NO: 2863799 - RNA, 19 nt, Artificial Sequence
  Description of Artificial Sequence: Synthetic oligonucleotide
gugcaucuacgggauuuuc

SEQ ID NO: 2863800 - RNA, 19 nt, Artificial Sequence
  Description of Artificial Sequence: Synthetic oligonucleotide
cucuuacagguucaagauu

SEQ ID NO: 2863801 - RNA, 19 nt, Artificial Sequence
  Description of Artificial Sequence: Synthetic oligonucleotide
ggaggcgaggacagacacc

SEQ ID NO: 2863802 - RNA, 19 nt, Artificial Sequence
  Description of Artificial Sequence: Synthetic oligonucleotide
ugggcauuucgggccuccu

SEQ ID NO: 2863803 - RNA, 19 nt, Artificial Sequence
  Description of Artificial Sequence: Synthetic oligonucleotide
ucgcaggugucaggggaua

SEQ ID NO: 2863804 - RNA, 19 nt, Artificial Sequence
  Description of Artificial Sequence: Synthetic oligonucleotide
caggugucaggggauauau

SEQ ID NO: 2863805 - RNA, 19 nt, Artificial Sequence
  Description of Artificial Sequence: Synthetic oligonucleotide
agccuccuccucaaugguu

SEQ ID NO: 2863806 - RNA, 19 nt, Artificial Sequence
  Description of Artificial Sequence: Synthetic oligonucleotide
cauuuacauuugauuucuu

SEQ ID NO: 2863807 - RNA, 19 nt, Artificial Sequence
  Description of Artificial Sequence: Synthetic oligonucleotide
cuccuggccuugacuuaga

SEQ ID NO: 2863808 - RNA, 19 nt, Artificial Sequence
  Description of Artificial Sequence: Synthetic oligonucleotide
aggugucaggggauauaua

SEQ ID NO: 2863809 - RNA, 19 nt, Artificial Sequence
  Description of Artificial Sequence: Synthetic oligonucleotide
uucgggccuccuggccuug

SEQ ID NO: 2863810 - RNA, 19 nt, Artificial Sequence
  Description of Artificial Sequence: Synthetic oligonucleotide
ggccuccuggccuugacuu

SEQ ID NO: 2863811 - RNA, 19 nt, Artificial Sequence
  Description of Artificial Sequence: Synthetic oligonucleotide
cuacgggauuuuccucgua

SEQ ID NO: 2863812 - RNA, 19 nt, Artificial Sequence
  Description of Artificial Sequence: Synthetic oligonucleotide
aggcgaggacagacaccag

SEQ ID NO: 2863813 - RNA, 19 nt, Artificial Sequence
  Description of Artificial Sequence: Synthetic oligonucleotide
ucgggccuccuggccuuga

SEQ ID NO: 2863814 - RNA, 19 nt, Artificial Sequence
  Description of Artificial Sequence: Synthetic oligonucleotide
cuccuccucaaugguuuua

SEQ ID NO: 2863815 - RNA, 19 nt, Artificial Sequence
  Description of Artificial Sequence: Synthetic oligonucleotide
cagccuccuccucaauggu

SEQ ID NO: 2863816 - RNA, 19 nt, Artificial Sequence
  Description of Artificial Sequence: Synthetic oligonucleotide
ggccuugacuuagacccua

SEQ ID NO: 2863817 - RNA, 19 nt, Artificial Sequence
  Description of Artificial Sequence: Synthetic oligonucleotide
cgggauuuuccucguaaua

SEQ ID NO: 2863818 - RNA, 19 nt, Artificial Sequence
  Description of Artificial Sequence: Synthetic oligonucleotide
gcaggugucaggggauaua

SEQ ID NO: 2863819 - RNA, 19 nt, Artificial Sequence
  Description of Artificial Sequence: Synthetic oligonucleotide
ggcaacacucuuacagguu

SEQ ID NO: 2863820 - RNA, 19 nt, Artificial Sequence
  Description of Artificial Sequence: Synthetic oligonucleotide
gccuccuggccuugacuua

SEQ ID NO: 2863821 - RNA, 19 nt, Artificial Sequence
  Description of Artificial Sequence: Synthetic oligonucleotide
ggacagacaccagccuccu

SEQ ID NO: 2863822 - RNA, 19 nt, Artificial Sequence
  Description of Artificial Sequence: Synthetic oligonucleotide
gggccuccuggccuugacu

SEQ ID NO: 2863823 - RNA, 19 nt, Artificial Sequence
  Description of Artificial Sequence: Synthetic oligonucleotide
gccuugacuuagacccuaa

SEQ ID NO: 2863824 - RNA, 19 nt, Artificial Sequence
  Description of Artificial Sequence: Synthetic oligonucleotide
gggaggaggcgaggacaga

SEQ ID NO: 2863825 - RNA, 19 nt, Artificial Sequence
  Description of Artificial Sequence: Synthetic oligonucleotide
ccuugacuuagacccuaau

SEQ ID NO: 2863826 - RNA, 19 nt, Artificial Sequence
  Description of Artificial Sequence: Synthetic oligonucleotide
cgagccaugcacagcuuau

SEQ ID NO: 2863827 - RNA, 19 nt, Artificial Sequence
  Description of Artificial Sequence: Synthetic oligonucleotide
cacgagccaugcacagcuu

SEQ ID NO: 2863828 - RNA, 19 nt, Artificial Sequence
  Description of Artificial Sequence: Synthetic oligonucleotide
cgaggacagacaccagccu

SEQ ID NO: 2863829 - RNA, 19 nt, Artificial Sequence
  Description of Artificial Sequence: Synthetic oligonucleotide
cgggccuccuggccuugac

SEQ ID NO: 2863830 - RNA, 19 nt, Artificial Sequence
  Description of Artificial Sequence: Synthetic oligonucleotide
ccuccuccucaaugguuuu

SEQ ID NO: 2863831 - RNA, 19 nt, Artificial Sequence
  Description of Artificial Sequence: Synthetic oligonucleotide
cgcaggugucaggggauau

SEQ ID NO: 2863832 - RNA, 19 nt, Artificial Sequence
  Description of Artificial Sequence: Synthetic oligonucleotide
aaaauguucaucuuugaag

SEQ ID NO: 2863833 - RNA, 19 nt, Artificial Sequence
  Description of Artificial Sequence: Synthetic oligonucleotide
agugcaauagccgugaucc

SEQ ID NO: 2863834 - RNA, 19 nt, Artificial Sequence
  Description of Artificial Sequence: Synthetic oligonucleotide
aaauguucaucuuugaagu

SEQ ID NO: 2863835 - RNA, 19 nt, Artificial Sequence
  Description of Artificial Sequence: Synthetic oligonucleotide
aauacuuccagaauggcuc

SEQ ID NO: 2863836 - RNA, 19 nt, Artificial Sequence
  Description of Artificial Sequence: Synthetic oligonucleotide
cagaggaaaaccaagaacc

SEQ ID NO: 2863837 - RNA, 19 nt, Artificial Sequence
  Description of Artificial Sequence: Synthetic oligonucleotide
agaaaauacuuccagaaug

SEQ ID NO: 2863838 - RNA, 19 nt, Artificial Sequence
  Description of Artificial Sequence: Synthetic oligonucleotide
aacuuuacaagucccauug

SEQ ID NO: 2863839 - RNA, 19 nt, Artificial Sequence
  Description of Artificial Sequence: Synthetic oligonucleotide
caaaguaagugcaauagcc

SEQ ID NO: 2863840 - RNA, 19 nt, Artificial Sequence
  Description of Artificial Sequence: Synthetic oligonucleotide
auagccgugauccaugccc

SEQ ID NO: 2863841 - RNA, 19 nt, Artificial Sequence
  Description of Artificial Sequence: Synthetic oligonucleotide
uuuacaagucccauugccg

SEQ ID NO: 2863842 - RNA, 19 nt, Artificial Sequence
  Description of Artificial Sequence: Synthetic oligonucleotide
uuugaagucagaaaauacu

SEQ ID NO: 2863843 - RNA, 19 nt, Artificial Sequence
  Description of Artificial Sequence: Synthetic oligonucleotide
gaagucagaaaauacuucc

SEQ ID NO: 2863844 - RNA, 19 nt, Artificial Sequence
  Description of Artificial Sequence: Synthetic oligonucleotide
acaaauucgaaacugccag

SEQ ID NO: 2863845 - RNA, 19 nt, Artificial Sequence
  Description of Artificial Sequence: Synthetic oligonucleotide
gauaaaagccaccagagga

SEQ ID NO: 2863846 - RNA, 19 nt, Artificial Sequence
  Description of Artificial Sequence: Synthetic oligonucleotide
auucaggcaaaguaagugc

SEQ ID NO: 2863847 - RNA, 19 nt, Artificial Sequence
  Description of Artificial Sequence: Synthetic oligonucleotide
aaaccaagaaccaaaaugu

SEQ ID NO: 2863848 - RNA, 19 nt, Artificial Sequence
  Description of Artificial Sequence: Synthetic oligonucleotide
acaacuugcacccuugcac

SEQ ID NO: 2863849 - RNA, 19 nt, Artificial Sequence
  Description of Artificial Sequence: Synthetic oligonucleotide
ugggaaaacaacuugcacc

SEQ ID NO: 2863850 - RNA, 19 nt, Artificial Sequence
  Description of Artificial Sequence: Synthetic oligonucleotide
gaaaauacuuccagaaugg

SEQ ID NO: 2863851 - RNA, 19 nt, Artificial Sequence
  Description of Artificial Sequence: Synthetic oligonucleotide
agugagguuugccaaaggc

SEQ ID NO: 2863852 - RNA, 19 nt, Artificial Sequence
  Description of Artificial Sequence: Synthetic oligonucleotide
aaaacacagauucaggcaa

SEQ ID NO: 2863853 - RNA, 19 nt, Artificial Sequence
  Description of Artificial Sequence: Synthetic oligonucleotide
agaaggauguuuaaaagcg

SEQ ID NO: 2863854 - RNA, 19 nt, Artificial Sequence
  Description of Artificial Sequence: Synthetic oligonucleotide
uguaacaauaccacugggc

SEQ ID NO: 2863855 - RNA, 19 nt, Artificial Sequence
  Description of Artificial Sequence: Synthetic oligonucleotide
acagcagaagauaaaagcc

SEQ ID NO: 2863856 - RNA, 19 nt, Artificial Sequence
  Description of Artificial Sequence: Synthetic oligonucleotide
aauaccacugggcacuguc

SEQ ID NO: 2863857 - RNA, 19 nt, Artificial Sequence
  Description of Artificial Sequence: Synthetic oligonucleotide
guaaaacacagauucaggc

SEQ ID NO: 2863858 - RNA, 19 nt, Artificial Sequence
  Description of Artificial Sequence: Synthetic oligonucleotide
uccaacaagaacuuuacaa

SEQ ID NO: 2863859 - RNA, 19 nt, Artificial Sequence
  Description of Artificial Sequence: Synthetic oligonucleotide
gauacuuguaacaauacca

SEQ ID NO: 2863860 - RNA, 19 nt, Artificial Sequence
  Description of Artificial Sequence: Synthetic oligonucleotide
gaagauaaaagccaccaga

SEQ ID NO: 2863861 - RNA, 19 nt, Artificial Sequence
  Description of Artificial Sequence: Synthetic oligonucleotide
aaaguaagugcaauagccg

SEQ ID NO: 2863862 - RNA, 19 nt, Artificial Sequence
  Description of Artificial Sequence: Synthetic oligonucleotide
cacagcagaagauaaaagc

SEQ ID NO: 2863863 - RNA, 19 nt, Artificial Sequence
  Description of Artificial Sequence: Synthetic oligonucleotide
ucagaaaauacuuccagaa

SEQ ID NO: 2863864 - RNA, 19 nt, Artificial Sequence
  Description of Artificial Sequence: Synthetic oligonucleotide
uuacaagucccauugccgg

SEQ ID NO: 2863865 - RNA, 19 nt, Artificial Sequence
  Description of Artificial Sequence: Synthetic oligonucleotide
aaaauacuuccagaauggc

SEQ ID NO: 2863866 - RNA, 19 nt, Artificial Sequence
  Description of Artificial Sequence: Synthetic oligonucleotide
aagauaaaagccaccagag

SEQ ID NO: 2863867 - RNA, 19 nt, Artificial Sequence
  Description of Artificial Sequence: Synthetic oligonucleotide
ugaagcugguaaaacacag

SEQ ID NO: 2863868 - RNA, 19 nt, Artificial Sequence
  Description of Artificial Sequence: Synthetic oligonucleotide
ucugaagcugguaaaacac

SEQ ID NO: 2863869 - RNA, 19 nt, Artificial Sequence
  Description of Artificial Sequence: Synthetic oligonucleotide
aaaagcgucucacuguaca

SEQ ID NO: 2863870 - RNA, 19 nt, Artificial Sequence
  Description of Artificial Sequence: Synthetic oligonucleotide
uaaaacacagauucaggca

SEQ ID NO: 2863871 - RNA, 19 nt, Artificial Sequence
  Description of Artificial Sequence: Synthetic oligonucleotide
cuuguaacaauaccacugg

SEQ ID NO: 2863872 - RNA, 19 nt, Artificial Sequence
  Description of Artificial Sequence: Synthetic oligonucleotide
aaguaagugcaauagccgu

SEQ ID NO: 2863873 - RNA, 19 nt, Artificial Sequence
  Description of Artificial Sequence: Synthetic oligonucleotide
ugagguuugccaaaggcac

SEQ ID NO: 2863874 - RNA, 19 nt, Artificial Sequence
  Description of Artificial Sequence: Synthetic oligonucleotide
guuuaaaagcgucucacug

SEQ ID NO: 2863875 - RNA, 19 nt, Artificial Sequence
  Description of Artificial Sequence: Synthetic oligonucleotide
aauguucaucuuugaaguc

SEQ ID NO: 2863876 - RNA, 19 nt, Artificial Sequence
  Description of Artificial Sequence: Synthetic oligonucleotide
uuuaaaagcgucucacugu

SEQ ID NO: 2863877 - RNA, 19 nt, Artificial Sequence
  Description of Artificial Sequence: Synthetic oligonucleotide
aguggaguccaacaagaac

SEQ ID NO: 2863878 - RNA, 19 nt, Artificial Sequence
  Description of Artificial Sequence: Synthetic oligonucleotide
aaacaacuugcacccuugc

SEQ ID NO: 2863879 - RNA, 19 nt, Artificial Sequence
  Description of Artificial Sequence: Synthetic oligonucleotide
gcugguaaaacacagauuc

SEQ ID NO: 2863880 - RNA, 19 nt, Artificial Sequence
  Description of Artificial Sequence: Synthetic oligonucleotide
aaguagauguuccucacau

SEQ ID NO: 2863881 - RNA, 19 nt, Artificial Sequence
  Description of Artificial Sequence: Synthetic oligonucleotide
ugguaaaacacagauucag

SEQ ID NO: 2863882 - RNA, 19 nt, Artificial Sequence
  Description of Artificial Sequence: Synthetic oligonucleotide
aagcugguaaaacacagau

SEQ ID NO: 2863883 - RNA, 19 nt, Artificial Sequence
  Description of Artificial Sequence: Synthetic oligonucleotide
agucagaaaauacuuccag

SEQ ID NO: 2863884 - RNA, 19 nt, Artificial Sequence
  Description of Artificial Sequence: Synthetic oligonucleotide
uguucaucuuugaagucag

SEQ ID NO: 2863885 - RNA, 19 nt, Artificial Sequence
  Description of Artificial Sequence: Synthetic oligonucleotide
aaggauguuuaaaagcguc

SEQ ID NO: 2863886 - RNA, 19 nt, Artificial Sequence
  Description of Artificial Sequence: Synthetic oligonucleotide
guaacaauaccacugggca

SEQ ID NO: 2863887 - RNA, 19 nt, Artificial Sequence
  Description of Artificial Sequence: Synthetic oligonucleotide
cuuuacaagucccauugcc

SEQ ID NO: 2863888 - RNA, 19 nt, Artificial Sequence
  Description of Artificial Sequence: Synthetic oligonucleotide
aaaggcacacuuguguuuc

SEQ ID NO: 2863889 - RNA, 19 nt, Artificial Sequence
  Description of Artificial Sequence: Synthetic oligonucleotide
gaaacugccagguuuagaa

SEQ ID NO: 2863890 - RNA, 19 nt, Artificial Sequence
  Description of Artificial Sequence: Synthetic oligonucleotide
ugauccaugcccaggauac

SEQ ID NO: 2863891 - RNA, 19 nt, Artificial Sequence
  Description of Artificial Sequence: Synthetic oligonucleotide
aacaauaccacugggcacu

SEQ ID NO: 2863892 - RNA, 19 nt, Artificial Sequence
  Description of Artificial Sequence: Synthetic oligonucleotide
aacugccagguuuagaagu

SEQ ID NO: 2863893 - RNA, 19 nt, Artificial Sequence
  Description of Artificial Sequence: Synthetic oligonucleotide
agcgucucacuguacaagc

SEQ ID NO: 2863894 - RNA, 19 nt, Artificial Sequence
  Description of Artificial Sequence: Synthetic oligonucleotide
aagccuguggaguggaguc

SEQ ID NO: 2863895 - RNA, 19 nt, Artificial Sequence
  Description of Artificial Sequence: Synthetic oligonucleotide
ugucuuuccaucugaagcu

SEQ ID NO: 2863896 - RNA, 19 nt, Artificial Sequence
  Description of Artificial Sequence: Synthetic oligonucleotide
agauaaaagccaccagagg

SEQ ID NO: 2863897 - RNA, 19 nt, Artificial Sequence
  Description of Artificial Sequence: Synthetic oligonucleotide
uugaagucagaaaauacuu

SEQ ID NO: 2863898 - RNA, 19 nt, Artificial Sequence
  Description of Artificial Sequence: Synthetic oligonucleotide
uccagaauggcucuucaac

SEQ ID NO: 2863899 - RNA, 19 nt, Artificial Sequence
  Description of Artificial Sequence: Synthetic oligonucleotide
cuuugaagucagaaaauac

SEQ ID NO: 2863900 - RNA, 19 nt, Artificial Sequence
  Description of Artificial Sequence: Synthetic oligonucleotide
gauucaggcaaaguaagug

SEQ ID NO: 2863901 - RNA, 19 nt, Artificial Sequence
  Description of Artificial Sequence: Synthetic oligonucleotide
auguuuaaaagcgucucac

SEQ ID NO: 2863902 - RNA, 19 nt, Artificial Sequence
  Description of Artificial Sequence: Synthetic oligonucleotide
uagaaguagauguuccuca

SEQ ID NO: 2863903 - RNA, 19 nt, Artificial Sequence
  Description of Artificial Sequence: Synthetic oligonucleotide
gaucaggaagcacaaauuc

SEQ ID NO: 2863904 - RNA, 19 nt, Artificial Sequence
  Description of Artificial Sequence: Synthetic oligonucleotide
agaaguagauguuccucac

SEQ ID NO: 2863905 - RNA, 19 nt, Artificial Sequence
  Description of Artificial Sequence: Synthetic oligonucleotide
uguacaagccuguggagug

SEQ ID NO: 2863906 - RNA, 19 nt, Artificial Sequence
  Description of Artificial Sequence: Synthetic oligonucleotide
uucaggcaaaguaagugca

SEQ ID NO: 2863907 - RNA, 19 nt, Artificial Sequence
  Description of Artificial Sequence: Synthetic oligonucleotide
agaauggcucuucaacugg

SEQ ID NO: 2863908 - RNA, 19 nt, Artificial Sequence
  Description of Artificial Sequence: Synthetic oligonucleotide
ugcguuuuccucauuugcc

SEQ ID NO: 2863909 - RNA, 19 nt, Artificial Sequence
  Description of Artificial Sequence: Synthetic oligonucleotide
acuuguaacaauaccacug

SEQ ID NO: 2863910 - RNA, 19 nt, Artificial Sequence
  Description of Artificial Sequence: Synthetic oligonucleotide
ugcacgaggagaaggaugu

SEQ ID NO: 2863911 - RNA, 19 nt, Artificial Sequence
  Description of Artificial Sequence: Synthetic oligonucleotide
ggaagcacaaauucgaaac

SEQ ID NO: 2863912 - RNA, 19 nt, Artificial Sequence
  Description of Artificial Sequence: Synthetic oligonucleotide
uuaaaagcgucucacugua

SEQ ID NO: 2863913 - RNA, 19 nt, Artificial Sequence
  Description of Artificial Sequence: Synthetic oligonucleotide
aaauucgaaacugccaggu

SEQ ID NO: 2863914 - RNA, 19 nt, Artificial Sequence
  Description of Artificial Sequence: Synthetic oligonucleotide
ugugugcccagaauggcag

SEQ ID NO: 2863915 - RNA, 19 nt, Artificial Sequence
  Description of Artificial Sequence: Synthetic oligonucleotide
aauagccgugauccaugcc

SEQ ID NO: 2863916 - RNA, 19 nt, Artificial Sequence
  Description of Artificial Sequence: Synthetic oligonucleotide
uuguaacaauaccacuggg

SEQ ID NO: 2863917 - RNA, 19 nt, Artificial Sequence
  Description of Artificial Sequence: Synthetic oligonucleotide
ugaagucagaaaauacuuc

SEQ ID NO: 2863918 - RNA, 19 nt, Artificial Sequence
  Description of Artificial Sequence: Synthetic oligonucleotide
uuugccaaaggcacacuug

SEQ ID NO: 2863919 - RNA, 19 nt, Artificial Sequence
  Description of Artificial Sequence: Synthetic oligonucleotide
gggaaaacaacuugcaccc

SEQ ID NO: 2863920 - RNA, 19 nt, Artificial Sequence
  Description of Artificial Sequence: Synthetic oligonucleotide
uuuagaaguagauguuccu

SEQ ID NO: 2863921 - RNA, 19 nt, Artificial Sequence
  Description of Artificial Sequence: Synthetic oligonucleotide
aagugcaauagccgugauc

SEQ ID NO: 2863922 - RNA, 19 nt, Artificial Sequence
  Description of Artificial Sequence: Synthetic oligonucleotide
caagaacuuuacaaguccc

SEQ ID NO: 2863923 - RNA, 19 nt, Artificial Sequence
  Description of Artificial Sequence: Synthetic oligonucleotide
ucacuguacaagccugugg

SEQ ID NO: 2863924 - RNA, 19 nt, Artificial Sequence
  Description of Artificial Sequence: Synthetic oligonucleotide
aaccaaaauguucaucuuu

SEQ ID NO: 2863925 - RNA, 19 nt, Artificial Sequence
  Description of Artificial Sequence: Synthetic oligonucleotide
cugaccauggaggacagcg

SEQ ID NO: 2863926 - RNA, 19 nt, Artificial Sequence
  Description of Artificial Sequence: Synthetic oligonucleotide
aaauacuuccagaauggcu

SEQ ID NO: 2863927 - RNA, 19 nt, Artificial Sequence
  Description of Artificial Sequence: Synthetic oligonucleotide
agcacaaauucgaaacugc

SEQ ID NO: 2863928 - RNA, 19 nt, Artificial Sequence
  Description of Artificial Sequence: Synthetic oligonucleotide
aaacugccagguuuagaag

SEQ ID NO: 2863929 - RNA, 19 nt, Artificial Sequence
  Description of Artificial Sequence: Synthetic oligonucleotide
aggagaaggauguuuaaaa

SEQ ID NO: 2863930 - RNA, 19 nt, Artificial Sequence
  Description of Artificial Sequence: Synthetic oligonucleotide
caacuugcacccuugcacg

SEQ ID NO: 2863931 - RNA, 19 nt, Artificial Sequence
  Description of Artificial Sequence: Synthetic oligonucleotide
aagcacaaauucgaaacug

SEQ ID NO: 2863932 - RNA, 19 nt, Artificial Sequence
  Description of Artificial Sequence: Synthetic oligonucleotide
aaggucugcguuuuccuca

SEQ ID NO: 2863933 - RNA, 19 nt, Artificial Sequence
  Description of Artificial Sequence: Synthetic oligonucleotide
ucaucuuugaagucagaaa

SEQ ID NO: 2863934 - RNA, 19 nt, Artificial Sequence
  Description of Artificial Sequence: Synthetic oligonucleotide
caucuuugaagucagaaaa

SEQ ID NO: 2863935 - RNA, 19 nt, Artificial Sequence
  Description of Artificial Sequence: Synthetic oligonucleotide
agaagauaaaagccaccag

SEQ ID NO: 2863936 - RNA, 19 nt, Artificial Sequence
  Description of Artificial Sequence: Synthetic oligonucleotide
acuuuacaagucccauugc

SEQ ID NO: 2863937 - RNA, 19 nt, Artificial Sequence
  Description of Artificial Sequence: Synthetic oligonucleotide
uggaguggaguccaacaag

SEQ ID NO: 2863938 - RNA, 19 nt, Artificial Sequence
  Description of Artificial Sequence: Synthetic oligonucleotide
aaaagugagguuugccaaa

SEQ ID NO: 2863939 - RNA, 19 nt, Artificial Sequence
  Description of Artificial Sequence: Synthetic oligonucleotide
aaagugagguuugccaaag

SEQ ID NO: 2863940 - RNA, 19 nt, Artificial Sequence
  Description of Artificial Sequence: Synthetic oligonucleotide
cagauucaggcaaaguaag

SEQ ID NO: 2863941 - RNA, 19 nt, Artificial Sequence
  Description of Artificial Sequence: Synthetic oligonucleotide
uugccaaaggcacacuugu

SEQ ID NO: 2863942 - RNA, 19 nt, Artificial Sequence
  Description of Artificial Sequence: Synthetic oligonucleotide
auggcaggggaucaggaag

SEQ ID NO: 2863943 - RNA, 19 nt, Artificial Sequence
  Description of Artificial Sequence: Synthetic oligonucleotide
uguuuaaaagcgucucacu

SEQ ID NO: 2863944 - RNA, 19 nt, Artificial Sequence
  Description of Artificial Sequence: Synthetic oligonucleotide
guuuagaaguagauguucc

SEQ ID NO: 2863945 - RNA, 19 nt, Artificial Sequence
  Description of Artificial Sequence: Synthetic oligonucleotide
ccaacaagaacuuuacaag

SEQ ID NO: 2863946 - RNA, 19 nt, Artificial Sequence
  Description of Artificial Sequence: Synthetic oligonucleotide
aucaggaagcacaaauucg

SEQ ID NO: 2863947 - RNA, 19 nt, Artificial Sequence
  Description of Artificial Sequence: Synthetic oligonucleotide
accaagaaccaaaauguuc

SEQ ID NO: 2863948 - RNA, 19 nt, Artificial Sequence
  Description of Artificial Sequence: Synthetic oligonucleotide
aucugaagcugguaaaaca

SEQ ID NO: 2863949 - RNA, 19 nt, Artificial Sequence
  Description of Artificial Sequence: Synthetic oligonucleotide
aagccaccagaggaaaacc

SEQ ID NO: 2863950 - RNA, 19 nt, Artificial Sequence
  Description of Artificial Sequence: Synthetic oligonucleotide
aacaacuugcacccuugca

SEQ ID NO: 2863951 - RNA, 19 nt, Artificial Sequence
  Description of Artificial Sequence: Synthetic oligonucleotide
gauguuuaaaagcgucuca

SEQ ID NO: 2863952 - RNA, 19 nt, Artificial Sequence
  Description of Artificial Sequence: Synthetic oligonucleotide
uugggaaaacaacuugcac

SEQ ID NO: 2863953 - RNA, 19 nt, Artificial Sequence
  Description of Artificial Sequence: Synthetic oligonucleotide
uuucugucuuuccaucuga

SEQ ID NO: 2863954 - RNA, 19 nt, Artificial Sequence
  Description of Artificial Sequence: Synthetic oligonucleotide
caaauucgaaacugccagg

SEQ ID NO: 2863955 - RNA, 19 nt, Artificial Sequence
  Description of Artificial Sequence: Synthetic oligonucleotide
aguccaacaagaacuuuac

SEQ ID NO: 2863956 - RNA, 19 nt, Artificial Sequence
  Description of Artificial Sequence: Synthetic oligonucleotide
aaaacaacuugcacccuug

SEQ ID NO: 2863957 - RNA, 19 nt, Artificial Sequence
  Description of Artificial Sequence: Synthetic oligonucleotide
auucgaaacugccagguuu

SEQ ID NO: 2863958 - RNA, 19 nt, Artificial Sequence
  Description of Artificial Sequence: Synthetic oligonucleotide
ggagaaggauguuuaaaag

SEQ ID NO: 2863959 - RNA, 19 nt, Artificial Sequence
  Description of Artificial Sequence: Synthetic oligonucleotide
cagguuuagaaguagaugu

SEQ ID NO: 2863960 - RNA, 19 nt, Artificial Sequence
  Description of Artificial Sequence: Synthetic oligonucleotide
uguguuucugucuuuccau

SEQ ID NO: 2863961 - RNA, 19 nt, Artificial Sequence
  Description of Artificial Sequence: Synthetic oligonucleotide
accaaaauguucaucuuug

SEQ ID NO: 2863962 - RNA, 19 nt, Artificial Sequence
  Description of Artificial Sequence: Synthetic oligonucleotide
uuagaaguagauguuccuc

SEQ ID NO: 2863963 - RNA, 19 nt, Artificial Sequence
  Description of Artificial Sequence: Synthetic oligonucleotide
uguuucugucuuuccaucu

SEQ ID NO: 2863964 - RNA, 19 nt, Artificial Sequence
  Description of Artificial Sequence: Synthetic oligonucleotide
uacaagucccauugccggg

SEQ ID NO: 2863965 - RNA, 19 nt, Artificial Sequence
  Description of Artificial Sequence: Synthetic oligonucleotide
cagugugugcccagaaugg

SEQ ID NO: 2863966 - RNA, 19 nt, Artificial Sequence
  Description of Artificial Sequence: Synthetic oligonucleotide
uugcacgaggagaaggaug

SEQ ID NO: 2863967 - RNA, 19 nt, Artificial Sequence
  Description of Artificial Sequence: Synthetic oligonucleotide
uacuuguaacaauaccacu

SEQ ID NO: 2863968 - RNA, 19 nt, Artificial Sequence
  Description of Artificial Sequence: Synthetic oligonucleotide
aagugagguuugccaaagg

SEQ ID NO: 2863969 - RNA, 19 nt, Artificial Sequence
  Description of Artificial Sequence: Synthetic oligonucleotide
uaacaauaccacugggcac

SEQ ID NO: 2863970 - RNA, 19 nt, Artificial Sequence
  Description of Artificial Sequence: Synthetic oligonucleotide
uagauguuccucacauucu

SEQ ID NO: 2863971 - RNA, 19 nt, Artificial Sequence
  Description of Artificial Sequence: Synthetic oligonucleotide
ucugcguuuuccucauuug

SEQ ID NO: 2863972 - RNA, 19 nt, Artificial Sequence
  Description of Artificial Sequence: Synthetic oligonucleotide
agugugugcccagaauggc

SEQ ID NO: 2863973 - RNA, 19 nt, Artificial Sequence
  Description of Artificial Sequence: Synthetic oligonucleotide
auguuccucacauucuuga

SEQ ID NO: 2863974 - RNA, 19 nt, Artificial Sequence
  Description of Artificial Sequence: Synthetic oligonucleotide
cagaauggcucuucaacug

SEQ ID NO: 2863975 - RNA, 19 nt, Artificial Sequence
  Description of Artificial Sequence: Synthetic oligonucleotide
aacacagauucaggcaaag

SEQ ID NO: 2863976 - RNA, 19 nt, Artificial Sequence
  Description of Artificial Sequence: Synthetic oligonucleotide
gguaaaacacagauucagg

SEQ ID NO: 2863977 - RNA, 19 nt, Artificial Sequence
  Description of Artificial Sequence: Synthetic oligonucleotide
acuuguguuucugucuuuc

SEQ ID NO: 2863978 - RNA, 19 nt, Artificial Sequence
  Description of Artificial Sequence: Synthetic oligonucleotide
ggauacuuguaacaauacc

SEQ ID NO: 2863979 - RNA, 19 nt, Artificial Sequence
  Description of Artificial Sequence: Synthetic oligonucleotide
ggcaaaguaagugcaauag

SEQ ID NO: 2863980 - RNA, 19 nt, Artificial Sequence
  Description of Artificial Sequence: Synthetic oligonucleotide
aaagcgucucacuguacaa

SEQ ID NO: 2863981 - RNA, 19 nt, Artificial Sequence
  Description of Artificial Sequence: Synthetic oligonucleotide
aauggcaggggaucaggaa

SEQ ID NO: 2863982 - RNA, 19 nt, Artificial Sequence
  Description of Artificial Sequence: Synthetic oligonucleotide
uucgaaacugccagguuua

SEQ ID NO: 2863983 - RNA, 19 nt, Artificial Sequence
  Description of Artificial Sequence: Synthetic oligonucleotide
augugcggcagugugugcc

SEQ ID NO: 2863984 - RNA, 19 nt, Artificial Sequence
  Description of Artificial Sequence: Synthetic oligonucleotide
ccaagaaccaaaauguuca

SEQ ID NO: 2863985 - RNA, 19 nt, Artificial Sequence
  Description of Artificial Sequence: Synthetic oligonucleotide
agguuugccaaaggcacac

SEQ ID NO: 2863986 - RNA, 19 nt, Artificial Sequence
  Description of Artificial Sequence: Synthetic oligonucleotide
aggauacuuguaacaauac

SEQ ID NO: 2863987 - RNA, 19 nt, Artificial Sequence
  Description of Artificial Sequence: Synthetic oligonucleotide
aagucagaaaauacuucca

SEQ ID NO: 2863988 - RNA, 19 nt, Artificial Sequence
  Description of Artificial Sequence: Synthetic oligonucleotide
gucagaaaauacuuccaga

SEQ ID NO: 2863989 - RNA, 19 nt, Artificial Sequence
  Description of Artificial Sequence: Synthetic oligonucleotide
aagcgucucacuguacaag

SEQ ID NO: 2863990 - RNA, 19 nt, Artificial Sequence
  Description of Artificial Sequence: Synthetic oligonucleotide
uggcaggggaucaggaagc

SEQ ID NO: 2863991 - RNA, 19 nt, Artificial Sequence
  Description of Artificial Sequence: Synthetic oligonucleotide
cugcguuuuccucauuugc

SEQ ID NO: 2863992 - RNA, 19 nt, Artificial Sequence
  Description of Artificial Sequence: Synthetic oligonucleotide
acagauucaggcaaaguaa

SEQ ID NO: 2863993 - RNA, 19 nt, Artificial Sequence
  Description of Artificial Sequence: Synthetic oligonucleotide
cuuguguuucugucuuucc

SEQ ID NO: 2863994 - RNA, 19 nt, Artificial Sequence
  Description of Artificial Sequence: Synthetic oligonucleotide
cuugggaaaacaacuugca

SEQ ID NO: 2863995 - RNA, 19 nt, Artificial Sequence
  Description of Artificial Sequence: Synthetic oligonucleotide
gaggacagcgucccuuggg

SEQ ID NO: 2863996 - RNA, 19 nt, Artificial Sequence
  Description of Artificial Sequence: Synthetic oligonucleotide
guuucugucuuuccaucug

SEQ ID NO: 2863997 - RNA, 19 nt, Artificial Sequence
  Description of Artificial Sequence: Synthetic oligonucleotide
cacuguacaagccugugga

SEQ ID NO: 2863998 - RNA, 19 nt, Artificial Sequence
  Description of Artificial Sequence: Synthetic oligonucleotide
cacaaauucgaaacugcca

SEQ ID NO: 2863999 - RNA, 19 nt, Artificial Sequence
  Description of Artificial Sequence: Synthetic oligonucleotide
auuugcccacagcagaaga

SEQ ID NO: 2864000 - RNA, 19 nt, Artificial Sequence
  Description of Artificial Sequence: Synthetic oligonucleotide
cacagauucaggcaaagua

SEQ ID NO: 2864001 - RNA, 19 nt, Artificial Sequence
  Description of Artificial Sequence: Synthetic oligonucleotide
acuguacaagccuguggag

SEQ ID NO: 2864002 - RNA, 19 nt, Artificial Sequence
  Description of Artificial Sequence: Synthetic oligonucleotide
auugccggggcuuucccca

SEQ ID NO: 2864003 - RNA, 19 nt, Artificial Sequence
  Description of Artificial Sequence: Synthetic oligonucleotide
cagaagauaaaagccacca

SEQ ID NO: 2864004 - RNA, 19 nt, Artificial Sequence
  Description of Artificial Sequence: Synthetic oligonucleotide
ucaggcaaaguaagugcaa

SEQ ID NO: 2864005 - RNA, 19 nt, Artificial Sequence
  Description of Artificial Sequence: Synthetic oligonucleotide
aauucgaaacugccagguu

SEQ ID NO: 2864006 - RNA, 19 nt, Artificial Sequence
  Description of Artificial Sequence: Synthetic oligonucleotide
guggaguccaacaagaacu

SEQ ID NO: 2864007 - RNA, 19 nt, Artificial Sequence
  Description of Artificial Sequence: Synthetic oligonucleotide
uccaucugaagcugguaaa

SEQ ID NO: 2864008 - RNA, 19 nt, Artificial Sequence
  Description of Artificial Sequence: Synthetic oligonucleotide
auaaaagccaccagaggaa

SEQ ID NO: 2864009 - RNA, 19 nt, Artificial Sequence
  Description of Artificial Sequence: Synthetic oligonucleotide
caggggaucaggaagcaca

SEQ ID NO: 2864010 - RNA, 19 nt, Artificial Sequence
  Description of Artificial Sequence: Synthetic oligonucleotide
agauguuccucacauucuu

SEQ ID NO: 2864011 - RNA, 19 nt, Artificial Sequence
  Description of Artificial Sequence: Synthetic oligonucleotide
uaccacugggcacuguccu

SEQ ID NO: 2864012 - RNA, 19 nt, Artificial Sequence
  Description of Artificial Sequence: Synthetic oligonucleotide
aggaagcacaaauucgaaa

SEQ ID NO: 2864013 - RNA, 19 nt, Artificial Sequence
  Description of Artificial Sequence: Synthetic oligonucleotide
accagaggaaaaccaagaa

SEQ ID NO: 2864014 - RNA, 19 nt, Artificial Sequence
  Description of Artificial Sequence: Synthetic oligonucleotide
gcaaaguaagugcaauagc

SEQ ID NO: 2864015 - RNA, 19 nt, Artificial Sequence
  Description of Artificial Sequence: Synthetic oligonucleotide
caauagccgugauccaugc

SEQ ID NO: 2864016 - RNA, 19 nt, Artificial Sequence
  Description of Artificial Sequence: Synthetic oligonucleotide
aguaagugcaauagccgug

SEQ ID NO: 2864017 - RNA, 19 nt, Artificial Sequence
  Description of Artificial Sequence: Synthetic oligonucleotide
caggauacuuguaacaaua

SEQ ID NO: 2864018 - RNA, 19 nt, Artificial Sequence
  Description of Artificial Sequence: Synthetic oligonucleotide
gaaguagauguuccucaca

SEQ ID NO: 2864019 - RNA, 19 nt, Artificial Sequence
  Description of Artificial Sequence: Synthetic oligonucleotide
acaagucccauugccgggg

SEQ ID NO: 2864020 - RNA, 19 nt, Artificial Sequence
  Description of Artificial Sequence: Synthetic oligonucleotide
ucucacuguacaagccugu

SEQ ID NO: 2864021 - RNA, 19 nt, Artificial Sequence
  Description of Artificial Sequence: Synthetic oligonucleotide
ugccagguuuagaaguaga

SEQ ID NO: 2864022 - RNA, 19 nt, Artificial Sequence
  Description of Artificial Sequence: Synthetic oligonucleotide
cuugcacccuugcacgagg

SEQ ID NO: 2864023 - RNA, 19 nt, Artificial Sequence
  Description of Artificial Sequence: Synthetic oligonucleotide
aacuugcacccuugcacga

SEQ ID NO: 2864024 - RNA, 19 nt, Artificial Sequence
  Description of Artificial Sequence: Synthetic oligonucleotide
gaauggcucuucaacuggc

SEQ ID NO: 2864025 - RNA, 19 nt, Artificial Sequence
  Description of Artificial Sequence: Synthetic oligonucleotide
gaccauggaggacagcguc

SEQ ID NO: 2864026 - RNA, 19 nt, Artificial Sequence
  Description of Artificial Sequence: Synthetic oligonucleotide
acacuuguguuucugucuu

SEQ ID NO: 2864027 - RNA, 19 nt, Artificial Sequence
  Description of Artificial Sequence: Synthetic oligonucleotide
augcccaggauacuuguaa

SEQ ID NO: 2864028 - RNA, 19 nt, Artificial Sequence
  Description of Artificial Sequence: Synthetic oligonucleotide
auacuuccagaauggcucu

SEQ ID NO: 2864029 - RNA, 19 nt, Artificial Sequence
  Description of Artificial Sequence: Synthetic oligonucleotide
gauguuccucacauucuug

SEQ ID NO: 2864030 - RNA, 19 nt, Artificial Sequence
  Description of Artificial Sequence: Synthetic oligonucleotide
accauggaggacagcgucc

SEQ ID NO: 2864031 - RNA, 19 nt, Artificial Sequence
  Description of Artificial Sequence: Synthetic oligonucleotide
gaagcacaaauucgaaacu

SEQ ID NO: 2864032 - RNA, 19 nt, Artificial Sequence
  Description of Artificial Sequence: Synthetic oligonucleotide
guuuuccucauuugcccac

SEQ ID NO: 2864033 - RNA, 19 nt, Artificial Sequence
  Description of Artificial Sequence: Synthetic oligonucleotide
ugcccacagcagaagauaa

SEQ ID NO: 2864034 - RNA, 19 nt, Artificial Sequence
  Description of Artificial Sequence: Synthetic oligonucleotide
uggaggacagcgucccuug

SEQ ID NO: 2864035 - RNA, 19 nt, Artificial Sequence
  Description of Artificial Sequence: Synthetic oligonucleotide
agaggaaaaccaagaacca

SEQ ID NO: 2864036 - RNA, 19 nt, Artificial Sequence
  Description of Artificial Sequence: Synthetic oligonucleotide
aggacagcgucccuuggga

SEQ ID NO: 2864037 - RNA, 19 nt, Artificial Sequence
  Description of Artificial Sequence: Synthetic oligonucleotide
ggggcuuuccccaugugcg

SEQ ID NO: 2864038 - RNA, 19 nt, Artificial Sequence
  Description of Artificial Sequence: Synthetic oligonucleotide
ugcaauagccgugauccau

SEQ ID NO: 2864039 - RNA, 19 nt, Artificial Sequence
  Description of Artificial Sequence: Synthetic oligonucleotide
uagccgugauccaugccca

SEQ ID NO: 2864040 - RNA, 19 nt, Artificial Sequence
  Description of Artificial Sequence: Synthetic oligonucleotide
uggaguccaacaagaacuu

SEQ ID NO: 2864041 - RNA, 19 nt, Artificial Sequence
  Description of Artificial Sequence: Synthetic oligonucleotide
uucugucuuuccaucugaa

SEQ ID NO: 2864042 - RNA, 19 nt, Artificial Sequence
  Description of Artificial Sequence: Synthetic oligonucleotide
uaaaagcgucucacuguac

SEQ ID NO: 2864043 - RNA, 19 nt, Artificial Sequence
  Description of Artificial Sequence: Synthetic oligonucleotide
acugggcacuguccugacc

SEQ ID NO: 2864044 - RNA, 19 nt, Artificial Sequence
  Description of Artificial Sequence: Synthetic oligonucleotide
uuccucauuugcccacagc

SEQ ID NO: 2864045 - RNA, 19 nt, Artificial Sequence
  Description of Artificial Sequence: Synthetic oligonucleotide
guaagugcaauagccguga

SEQ ID NO: 2864046 - RNA, 19 nt, Artificial Sequence
  Description of Artificial Sequence: Synthetic oligonucleotide
ugaccauggaggacagcgu

SEQ ID NO: 2864047 - RNA, 19 nt, Artificial Sequence
  Description of Artificial Sequence: Synthetic oligonucleotide
cugggcacuguccugacca

SEQ ID NO: 2864048 - RNA, 19 nt, Artificial Sequence
  Description of Artificial Sequence: Synthetic oligonucleotide
ugcccaggauacuuguaac

SEQ ID NO: 2864049 - RNA, 19 nt, Artificial Sequence
  Description of Artificial Sequence: Synthetic oligonucleotide
ucccuugggaaaacaacuu

SEQ ID NO: 2864050 - RNA, 19 nt, Artificial Sequence
  Description of Artificial Sequence: Synthetic oligonucleotide
ugccaaaggcacacuugug

SEQ ID NO: 2864051 - RNA, 19 nt, Artificial Sequence
  Description of Artificial Sequence: Synthetic oligonucleotide
ccagaggaaaaccaagaac

SEQ ID NO: 2864052 - RNA, 19 nt, Artificial Sequence
  Description of Artificial Sequence: Synthetic oligonucleotide
gaguccaacaagaacuuua

SEQ ID NO: 2864053 - RNA, 19 nt, Artificial Sequence
  Description of Artificial Sequence: Synthetic oligonucleotide
aggauguuuaaaagcgucu

SEQ ID NO: 2864054 - RNA, 19 nt, Artificial Sequence
  Description of Artificial Sequence: Synthetic oligonucleotide
cugaagcugguaaaacaca

SEQ ID NO: 2864055 - RNA, 19 nt, Artificial Sequence
  Description of Artificial Sequence: Synthetic oligonucleotide
aauggcucuucaacuggca

SEQ ID NO: 2864056 - RNA, 19 nt, Artificial Sequence
  Description of Artificial Sequence: Synthetic oligonucleotide
ugugcggcagugugugccc

SEQ ID NO: 2864057 - RNA, 19 nt, Artificial Sequence
  Description of Artificial Sequence: Synthetic oligonucleotide
uuuuccucauuugcccaca

SEQ ID NO: 2864058 - RNA, 19 nt, Artificial Sequence
  Description of Artificial Sequence: Synthetic oligonucleotide
gcguuuuccucauuugccc

SEQ ID NO: 2864059 - RNA, 19 nt, Artificial Sequence
  Description of Artificial Sequence: Synthetic oligonucleotide
caccagaggaaaaccaaga

SEQ ID NO: 2864060 - RNA, 19 nt, Artificial Sequence
  Description of Artificial Sequence: Synthetic oligonucleotide
gguuuagaaguagauguuc

SEQ ID NO: 2864061 - RNA, 19 nt, Artificial Sequence
  Description of Artificial Sequence: Synthetic oligonucleotide
cacuguccugaccauggag

SEQ ID NO: 2864062 - RNA, 19 nt, Artificial Sequence
  Description of Artificial Sequence: Synthetic oligonucleotide
ugcacccuugcacgaggag

SEQ ID NO: 2864063 - RNA, 19 nt, Artificial Sequence
  Description of Artificial Sequence: Synthetic oligonucleotide
gaagcugguaaaacacaga

SEQ ID NO: 2864064 - RNA, 19 nt, Artificial Sequence
  Description of Artificial Sequence: Synthetic oligonucleotide
uccugaccauggaggacag

SEQ ID NO: 2864065 - RNA, 19 nt, Artificial Sequence
  Description of Artificial Sequence: Synthetic oligonucleotide
gaaaacaacuugcacccuu

SEQ ID NO: 2864066 - RNA, 19 nt, Artificial Sequence
  Description of Artificial Sequence: Synthetic oligonucleotide
guguuucugucuuuccauc

SEQ ID NO: 2864067 - RNA, 19 nt, Artificial Sequence
  Description of Artificial Sequence: Synthetic oligonucleotide
agccuguggaguggagucc

SEQ ID NO: 2864068 - RNA, 19 nt, Artificial Sequence
  Description of Artificial Sequence: Synthetic oligonucleotide
cugguaaaacacagauuca

SEQ ID NO: 2864069 - RNA, 19 nt, Artificial Sequence
  Description of Artificial Sequence: Synthetic oligonucleotide
aaacacagauucaggcaaa

SEQ ID NO: 2864070 - RNA, 19 nt, Artificial Sequence
  Description of Artificial Sequence: Synthetic oligonucleotide
aucuuugaagucagaaaau

SEQ ID NO: 2864071 - RNA, 19 nt, Artificial Sequence
  Description of Artificial Sequence: Synthetic oligonucleotide
gacagcgucccuugggaaa

SEQ ID NO: 2864072 - RNA, 19 nt, Artificial Sequence
  Description of Artificial Sequence: Synthetic oligonucleotide
uuccagaauggcucuucaa

SEQ ID NO: 2864073 - RNA, 19 nt, Artificial Sequence
  Description of Artificial Sequence: Synthetic oligonucleotide
ggauguuuaaaagcgucuc

SEQ ID NO: 2864074 - RNA, 19 nt, Artificial Sequence
  Description of Artificial Sequence: Synthetic oligonucleotide
gcacaaauucgaaacugcc

SEQ ID NO: 2864075 - RNA, 19 nt, Artificial Sequence
  Description of Artificial Sequence: Synthetic oligonucleotide
cauugccggggcuuucccc

SEQ ID NO: 2864076 - RNA, 19 nt, Artificial Sequence
  Description of Artificial Sequence: Synthetic oligonucleotide
gaggagaaggauguuuaaa

SEQ ID NO: 2864077 - RNA, 19 nt, Artificial Sequence
  Description of Artificial Sequence: Synthetic oligonucleotide
aggcaaaguaagugcaaua

SEQ ID NO: 2864078 - RNA, 19 nt, Artificial Sequence
  Description of Artificial Sequence: Synthetic oligonucleotide
aguagauguuccucacauu

SEQ ID NO: 2864079 - RNA, 19 nt, Artificial Sequence
  Description of Artificial Sequence: Synthetic oligonucleotide
aaggcacacuuguguuucu

SEQ ID NO: 2864080 - RNA, 19 nt, Artificial Sequence
  Description of Artificial Sequence: Synthetic oligonucleotide
agauucaggcaaaguaagu

SEQ ID NO: 2864081 - RNA, 19 nt, Artificial Sequence
  Description of Artificial Sequence: Synthetic oligonucleotide
guacaagccuguggagugg

SEQ ID NO: 2864082 - RNA, 19 nt, Artificial Sequence
  Description of Artificial Sequence: Synthetic oligonucleotide
auggcucuucaacuggcaa

SEQ ID NO: 2864083 - RNA, 19 nt, Artificial Sequence
  Description of Artificial Sequence: Synthetic oligonucleotide
uacaagccuguggagugga

SEQ ID NO: 2864084 - RNA, 19 nt, Artificial Sequence
  Description of Artificial Sequence: Synthetic oligonucleotide
uuccccaugugcggcagug

SEQ ID NO: 2864085 - RNA, 19 nt, Artificial Sequence
  Description of Artificial Sequence: Synthetic oligonucleotide
uugcccacagcagaagaua

SEQ ID NO: 2864086 - RNA, 19 nt, Artificial Sequence
  Description of Artificial Sequence: Synthetic oligonucleotide
ucgaaacugccagguuuag

SEQ ID NO: 2864087 - RNA, 19 nt, Artificial Sequence
  Description of Artificial Sequence: Synthetic oligonucleotide
gucuuuccaucugaagcug

SEQ ID NO: 2864088 - RNA, 19 nt, Artificial Sequence
  Description of Artificial Sequence: Synthetic oligonucleotide
guggaguggaguccaacaa

SEQ ID NO: 2864089 - RNA, 19 nt, Artificial Sequence
  Description of Artificial Sequence: Synthetic oligonucleotide
uugcacccuugcacgagga

SEQ ID NO: 2864090 - RNA, 19 nt, Artificial Sequence
  Description of Artificial Sequence: Synthetic oligonucleotide
acuugcacccuugcacgag

SEQ ID NO: 2864091 - RNA, 19 nt, Artificial Sequence
  Description of Artificial Sequence: Synthetic oligonucleotide
gaaggauguuuaaaagcgu

SEQ ID NO: 2864092 - RNA, 19 nt, Artificial Sequence
  Description of Artificial Sequence: Synthetic oligonucleotide
ggaguggaguccaacaaga

SEQ ID NO: 2864093 - RNA, 19 nt, Artificial Sequence
  Description of Artificial Sequence: Synthetic oligonucleotide
ccaccagaggaaaaccaag

SEQ ID NO: 2864094 - RNA, 19 nt, Artificial Sequence
  Description of Artificial Sequence: Synthetic oligonucleotide
gaauggcaggggaucagga

SEQ ID NO: 2864095 - RNA, 19 nt, Artificial Sequence
  Description of Artificial Sequence: Synthetic oligonucleotide
cuguccugaccauggagga

SEQ ID NO: 2864096 - RNA, 19 nt, Artificial Sequence
  Description of Artificial Sequence: Synthetic oligonucleotide
gugugcccagaauggcagg

SEQ ID NO: 2864097 - RNA, 19 nt, Artificial Sequence
  Description of Artificial Sequence: Synthetic oligonucleotide
accacugggcacuguccug

SEQ ID NO: 2864098 - RNA, 19 nt, Artificial Sequence
  Description of Artificial Sequence: Synthetic oligonucleotide
cacccuugcacgaggagaa

SEQ ID NO: 2864099 - RNA, 19 nt, Artificial Sequence
  Description of Artificial Sequence: Synthetic oligonucleotide
aagucccauugccggggcu

SEQ ID NO: 2864100 - RNA, 19 nt, Artificial Sequence
  Description of Artificial Sequence: Synthetic oligonucleotide
acgaggagaaggauguuua

SEQ ID NO: 2864101 - RNA, 19 nt, Artificial Sequence
  Description of Artificial Sequence: Synthetic oligonucleotide
ccagguuuagaaguagaug

SEQ ID NO: 2864102 - RNA, 19 nt, Artificial Sequence
  Description of Artificial Sequence: Synthetic oligonucleotide
uaagugcaauagccgugau

SEQ ID NO: 2864103 - RNA, 19 nt, Artificial Sequence
  Description of Artificial Sequence: Synthetic oligonucleotide
acacagauucaggcaaagu

SEQ ID NO: 2864104 - RNA, 19 nt, Artificial Sequence
  Description of Artificial Sequence: Synthetic oligonucleotide
guccaacaagaacuuuaca

SEQ ID NO: 2864105 - RNA, 19 nt, Artificial Sequence
  Description of Artificial Sequence: Synthetic oligonucleotide
cacacuuguguuucugucu

SEQ ID NO: 2864106 - RNA, 19 nt, Artificial Sequence
  Description of Artificial Sequence: Synthetic oligonucleotide
gucccuugggaaaacaacu

SEQ ID NO: 2864107 - RNA, 19 nt, Artificial Sequence
  Description of Artificial Sequence: Synthetic oligonucleotide
uguccugaccauggaggac

SEQ ID NO: 2864108 - RNA, 19 nt, Artificial Sequence
  Description of Artificial Sequence: Synthetic oligonucleotide
gcagaagauaaaagccacc

SEQ ID NO: 2864109 - RNA, 19 nt, Artificial Sequence
  Description of Artificial Sequence: Synthetic oligonucleotide
gugauccaugcccaggaua

SEQ ID NO: 2864110 - RNA, 19 nt, Artificial Sequence
  Description of Artificial Sequence: Synthetic oligonucleotide
agccaccagaggaaaacca

SEQ ID NO: 2864111 - RNA, 19 nt, Artificial Sequence
  Description of Artificial Sequence: Synthetic oligonucleotide
gagguuugccaaaggcaca

SEQ ID NO: 2864112 - RNA, 19 nt, Artificial Sequence
  Description of Artificial Sequence: Synthetic oligonucleotide
agguuuagaaguagauguu

SEQ ID NO: 2864113 - RNA, 19 nt, Artificial Sequence
  Description of Artificial Sequence: Synthetic oligonucleotide
cugccagguuuagaaguag

SEQ ID NO: 2864114 - RNA, 19 nt, Artificial Sequence
  Description of Artificial Sequence: Synthetic oligonucleotide
aggucugcguuuuccucau

SEQ ID NO: 2864115 - RNA, 19 nt, Artificial Sequence
  Description of Artificial Sequence: Synthetic oligonucleotide
gggaucaggaagcacaaau

SEQ ID NO: 2864116 - RNA, 19 nt, Artificial Sequence
  Description of Artificial Sequence: Synthetic oligonucleotide
acagcgucccuugggaaaa

SEQ ID NO: 2864117 - RNA, 19 nt, Artificial Sequence
  Description of Artificial Sequence: Synthetic oligonucleotide
ugcggcagugugugcccag

SEQ ID NO: 2864118 - RNA, 19 nt, Artificial Sequence
  Description of Artificial Sequence: Synthetic oligonucleotide
caggaagcacaaauucgaa

SEQ ID NO: 2864119 - RNA, 19 nt, Artificial Sequence
  Description of Artificial Sequence: Synthetic oligonucleotide
caagucccauugccggggc

SEQ ID NO: 2864120 - RNA, 19 nt, Artificial Sequence
  Description of Artificial Sequence: Synthetic oligonucleotide
cagaaaauacuuccagaau

SEQ ID NO: 2864121 - RNA, 19 nt, Artificial Sequence
  Description of Artificial Sequence: Synthetic oligonucleotide
gcacacuuguguuucuguc

SEQ ID NO: 2864122 - RNA, 19 nt, Artificial Sequence
  Description of Artificial Sequence: Synthetic oligonucleotide
gaaccaaaauguucaucuu

SEQ ID NO: 2864123 - RNA, 19 nt, Artificial Sequence
  Description of Artificial Sequence: Synthetic oligonucleotide
gggcuuuccccaugugcgg

SEQ ID NO: 2864124 - RNA, 19 nt, Artificial Sequence
  Description of Artificial Sequence: Synthetic oligonucleotide
gccaaaggcacacuugugu

SEQ ID NO: 2864125 - RNA, 19 nt, Artificial Sequence
  Description of Artificial Sequence: Synthetic oligonucleotide
acugccagguuuagaagua

SEQ ID NO: 2864126 - RNA, 19 nt, Artificial Sequence
  Description of Artificial Sequence: Synthetic oligonucleotide
auccaugcccaggauacuu

SEQ ID NO: 2864127 - RNA, 19 nt, Artificial Sequence
  Description of Artificial Sequence: Synthetic oligonucleotide
acaauaccacugggcacug

SEQ ID NO: 2864128 - RNA, 19 nt, Artificial Sequence
  Description of Artificial Sequence: Synthetic oligonucleotide
gugugugcccagaauggca

SEQ ID NO: 2864129 - RNA, 19 nt, Artificial Sequence
  Description of Artificial Sequence: Synthetic oligonucleotide
caugugcggcagugugugc

SEQ ID NO: 2864130 - RNA, 19 nt, Artificial Sequence
  Description of Artificial Sequence: Synthetic oligonucleotide
agccgugauccaugcccag

SEQ ID NO: 2864131 - RNA, 19 nt, Artificial Sequence
  Description of Artificial Sequence: Synthetic oligonucleotide
cuuuccccaugugcggcag

SEQ ID NO: 2864132 - RNA, 19 nt, Artificial Sequence
  Description of Artificial Sequence: Synthetic oligonucleotide
uuuccccaugugcggcagu

SEQ ID NO: 2864133 - RNA, 19 nt, Artificial Sequence
  Description of Artificial Sequence: Synthetic oligonucleotide
guuugccaaaggcacacuu

SEQ ID NO: 2864134 - RNA, 19 nt, Artificial Sequence
  Description of Artificial Sequence: Synthetic oligonucleotide
aggcacacuuguguuucug

SEQ ID NO: 2864135 - RNA, 19 nt, Artificial Sequence
  Description of Artificial Sequence: Synthetic oligonucleotide
gaguggaguccaacaagaa

SEQ ID NO: 2864136 - RNA, 19 nt, Artificial Sequence
  Description of Artificial Sequence: Synthetic oligonucleotide
auggaggacagcgucccuu

SEQ ID NO: 2864137 - RNA, 19 nt, Artificial Sequence
  Description of Artificial Sequence: Synthetic oligonucleotide
ggaggacagcgucccuugg

SEQ ID NO: 2864138 - RNA, 19 nt, Artificial Sequence
  Description of Artificial Sequence: Synthetic oligonucleotide
gcccaggauacuuguaaca

SEQ ID NO: 2864139 - RNA, 19 nt, Artificial Sequence
  Description of Artificial Sequence: Synthetic oligonucleotide
cgucccuugggaaaacaac

SEQ ID NO: 2864140 - RNA, 19 nt, Artificial Sequence
  Description of Artificial Sequence: Synthetic oligonucleotide
cuguggaguggaguccaac

SEQ ID NO: 2864141 - RNA, 19 nt, Artificial Sequence
  Description of Artificial Sequence: Synthetic oligonucleotide
cuguacaagccuguggagu

SEQ ID NO: 2864142 - RNA, 19 nt, Artificial Sequence
  Description of Artificial Sequence: Synthetic oligonucleotide
agucccauugccggggcuu

SEQ ID NO: 2864143 - RNA, 19 nt, Artificial Sequence
  Description of Artificial Sequence: Synthetic oligonucleotide
aggggaucaggaagcacaa

SEQ ID NO: 2864144 - RNA, 19 nt, Artificial Sequence
  Description of Artificial Sequence: Synthetic oligonucleotide
ccuugcacgaggagaagga

SEQ ID NO: 2864145 - RNA, 19 nt, Artificial Sequence
  Description of Artificial Sequence: Synthetic oligonucleotide
ccaugugcggcagugugug

SEQ ID NO: 2864146 - RNA, 19 nt, Artificial Sequence
  Description of Artificial Sequence: Synthetic oligonucleotide
cccuugcacgaggagaagg

SEQ ID NO: 2864147 - RNA, 19 nt, Artificial Sequence
  Description of Artificial Sequence: Synthetic oligonucleotide
gucugcguuuuccucauuu

SEQ ID NO: 2864148 - RNA, 19 nt, Artificial Sequence
  Description of Artificial Sequence: Synthetic oligonucleotide
ccagaauggcucuucaacu

SEQ ID NO: 2864149 - RNA, 19 nt, Artificial Sequence
  Description of Artificial Sequence: Synthetic oligonucleotide
gugcaauagccgugaucca

SEQ ID NO: 2864150 - RNA, 19 nt, Artificial Sequence
  Description of Artificial Sequence: Synthetic oligonucleotide
ugccggggcuuuccccaug

SEQ ID NO: 2864151 - RNA, 19 nt, Artificial Sequence
  Description of Artificial Sequence: Synthetic oligonucleotide
caaaggcacacuuguguuu

SEQ ID NO: 2864152 - RNA, 19 nt, Artificial Sequence
  Description of Artificial Sequence: Synthetic oligonucleotide
acaagccuguggaguggag

SEQ ID NO: 2864153 - RNA, 19 nt, Artificial Sequence
  Description of Artificial Sequence: Synthetic oligonucleotide
gccgugauccaugcccagg

SEQ ID NO: 2864154 - RNA, 19 nt, Artificial Sequence
  Description of Artificial Sequence: Synthetic oligonucleotide
cacugggcacuguccugac

SEQ ID NO: 2864155 - RNA, 19 nt, Artificial Sequence
  Description of Artificial Sequence: Synthetic oligonucleotide
ggcuuuccccaugugcggc

SEQ ID NO: 2864156 - RNA, 19 nt, Artificial Sequence
  Description of Artificial Sequence: Synthetic oligonucleotide
agcgucccuugggaaaaca

SEQ ID NO: 2864157 - RNA, 19 nt, Artificial Sequence
  Description of Artificial Sequence: Synthetic oligonucleotide
gcacccuugcacgaggaga

SEQ ID NO: 2864158 - RNA, 19 nt, Artificial Sequence
  Description of Artificial Sequence: Synthetic oligonucleotide
acccuugcacgaggagaag

SEQ ID NO: 2864159 - RNA, 19 nt, Artificial Sequence
  Description of Artificial Sequence: Synthetic oligonucleotide
cccacagcagaagauaaaa

SEQ ID NO: 2864160 - RNA, 19 nt, Artificial Sequence
  Description of Artificial Sequence: Synthetic oligonucleotide
guucaucuuugaagucaga

SEQ ID NO: 2864161 - RNA, 19 nt, Artificial Sequence
  Description of Artificial Sequence: Synthetic oligonucleotide
gcgucucacuguacaagcc

SEQ ID NO: 2864162 - RNA, 19 nt, Artificial Sequence
  Description of Artificial Sequence: Synthetic oligonucleotide
caugcccaggauacuugua

SEQ ID NO: 2864163 - RNA, 19 nt, Artificial Sequence
  Description of Artificial Sequence: Synthetic oligonucleotide
uccccaugugcggcagugu

SEQ ID NO: 2864164 - RNA, 19 nt, Artificial Sequence
  Description of Artificial Sequence: Synthetic oligonucleotide
uacuuccagaauggcucuu

SEQ ID NO: 2864165 - RNA, 19 nt, Artificial Sequence
  Description of Artificial Sequence: Synthetic oligonucleotide
ggcacacuuguguuucugu

SEQ ID NO: 2864166 - RNA, 19 nt, Artificial Sequence
  Description of Artificial Sequence: Synthetic oligonucleotide
gccaccagaggaaaaccaa

SEQ ID NO: 2864167 - RNA, 19 nt, Artificial Sequence
  Description of Artificial Sequence: Synthetic oligonucleotide
caggcaaaguaagugcaau

SEQ ID NO: 2864168 - RNA, 19 nt, Artificial Sequence
  Description of Artificial Sequence: Synthetic oligonucleotide
caagccuguggaguggagu

SEQ ID NO: 2864169 - RNA, 19 nt, Artificial Sequence
  Description of Artificial Sequence: Synthetic oligonucleotide
uugccggggcuuuccccau

SEQ ID NO: 2864170 - RNA, 19 nt, Artificial Sequence
  Description of Artificial Sequence: Synthetic oligonucleotide
gcuuuccccaugugcggca

SEQ ID NO: 2864171 - RNA, 19 nt, Artificial Sequence
  Description of Artificial Sequence: Synthetic oligonucleotide
ggaucaggaagcacaaauu

SEQ ID NO: 2864172 - RNA, 19 nt, Artificial Sequence
  Description of Artificial Sequence: Synthetic oligonucleotide
ccgugauccaugcccagga

SEQ ID NO: 2864173 - RNA, 19 nt, Artificial Sequence
  Description of Artificial Sequence: Synthetic oligonucleotide
gauccaugcccaggauacu

SEQ ID NO: 2864174 - RNA, 19 nt, Artificial Sequence
  Description of Artificial Sequence: Synthetic oligonucleotide
ccaucugaagcugguaaaa

SEQ ID NO: 2864175 - RNA, 19 nt, Artificial Sequence
  Description of Artificial Sequence: Synthetic oligonucleotide
ccauugccggggcuuuccc

SEQ ID NO: 2864176 - RNA, 19 nt, Artificial Sequence
  Description of Artificial Sequence: Synthetic oligonucleotide
cacgaggagaaggauguuu

SEQ ID NO: 2864177 - RNA, 19 nt, Artificial Sequence
  Description of Artificial Sequence: Synthetic oligonucleotide
ggacagcgucccuugggaa

SEQ ID NO: 2864178 - RNA, 19 nt, Artificial Sequence
  Description of Artificial Sequence: Synthetic oligonucleotide
cccauugccggggcuuucc

SEQ ID NO: 2864179 - RNA, 19 nt, Artificial Sequence
  Description of Artificial Sequence: Synthetic oligonucleotide
gccuguggaguggagucca

SEQ ID NO: 2864180 - RNA, 19 nt, Artificial Sequence
  Description of Artificial Sequence: Synthetic oligonucleotide
cuugcacgaggagaaggau

SEQ ID NO: 2864181 - RNA, 19 nt, Artificial Sequence
  Description of Artificial Sequence: Synthetic oligonucleotide
ccagaauggcaggggauca

SEQ ID NO: 2864182 - RNA, 19 nt, Artificial Sequence
  Description of Artificial Sequence: Synthetic oligonucleotide
ucccauugccggggcuuuc

SEQ ID NO: 2864183 - RNA, 19 nt, Artificial Sequence
  Description of Artificial Sequence: Synthetic oligonucleotide
ccaaaggcacacuuguguu

SEQ ID NO: 2864184 - RNA, 19 nt, Artificial Sequence
  Description of Artificial Sequence: Synthetic oligonucleotide
gccagguuuagaaguagau

SEQ ID NO: 2864185 - RNA, 19 nt, Artificial Sequence
  Description of Artificial Sequence: Synthetic oligonucleotide
gcacuguccugaccaugga

SEQ ID NO: 2864186 - RNA, 19 nt, Artificial Sequence
  Description of Artificial Sequence: Synthetic oligonucleotide
ggcagugugugcccagaau

SEQ ID NO: 2864187 - RNA, 19 nt, Artificial Sequence
  Description of Artificial Sequence: Synthetic oligonucleotide
ggcaggggaucaggaagca

SEQ ID NO: 2864188 - RNA, 19 nt, Artificial Sequence
  Description of Artificial Sequence: Synthetic oligonucleotide
ccaggauacuuguaacaau

SEQ ID NO: 2864189 - RNA, 19 nt, Artificial Sequence
  Description of Artificial Sequence: Synthetic oligonucleotide
ccacugggcacuguccuga

SEQ ID NO: 2864190 - RNA, 19 nt, Artificial Sequence
  Description of Artificial Sequence: Synthetic oligonucleotide
cagcgucccuugggaaaac

SEQ ID NO: 2864191 - RNA, 19 nt, Artificial Sequence
  Description of Artificial Sequence: Synthetic oligonucleotide
ggaaaacaacuugcacccu

SEQ ID NO: 2864192 - RNA, 19 nt, Artificial Sequence
  Description of Artificial Sequence: Synthetic oligonucleotide
gcgucccuugggaaaacaa

SEQ ID NO: 2864193 - RNA, 19 nt, Artificial Sequence
  Description of Artificial Sequence: Synthetic oligonucleotide
cgaggagaaggauguuuaa

SEQ ID NO: 2864194 - RNA, 19 nt, Artificial Sequence
  Description of Artificial Sequence: Synthetic oligonucleotide
gugcggcagugugugccca

SEQ ID NO: 2864195 - RNA, 19 nt, Artificial Sequence
  Description of Artificial Sequence: Synthetic oligonucleotide
gcccacagcagaagauaaa

SEQ ID NO: 2864196 - RNA, 19 nt, Artificial Sequence
  Description of Artificial Sequence: Synthetic oligonucleotide
cacuuguguuucugucuuu

SEQ ID NO: 2864197 - RNA, 19 nt, Artificial Sequence
  Description of Artificial Sequence: Synthetic oligonucleotide
cgaaacugccagguuuaga

SEQ ID NO: 2864198 - RNA, 19 nt, Artificial Sequence
  Description of Artificial Sequence: Synthetic oligonucleotide
ggggaucaggaagcacaaa

SEQ ID NO: 2864199 - RNA, 19 nt, Artificial Sequence
  Description of Artificial Sequence: Synthetic oligonucleotide
cccaugugcggcagugugu

SEQ ID NO: 2864200 - RNA, 19 nt, Artificial Sequence
  Description of Artificial Sequence: Synthetic oligonucleotide
gguuugccaaaggcacacu

SEQ ID NO: 2864201 - RNA, 19 nt, Artificial Sequence
  Description of Artificial Sequence: Synthetic oligonucleotide
gcggcagugugugcccaga

SEQ ID NO: 2864202 - RNA, 19 nt, Artificial Sequence
  Description of Artificial Sequence: Synthetic oligonucleotide
ggaguccaacaagaacuuu

SEQ ID NO: 2864203 - RNA, 19 nt, Artificial Sequence
  Description of Artificial Sequence: Synthetic oligonucleotide
gccggggcuuuccccaugu

SEQ ID NO: 2864204 - RNA, 19 nt, Artificial Sequence
  Description of Artificial Sequence: Synthetic oligonucleotide
caauaccacugggcacugu

SEQ ID NO: 2864205 - RNA, 19 nt, Artificial Sequence
  Description of Artificial Sequence: Synthetic oligonucleotide
gucccauugccggggcuuu

SEQ ID NO: 2864206 - RNA, 19 nt, Artificial Sequence
  Description of Artificial Sequence: Synthetic oligonucleotide
ccuguggaguggaguccaa

SEQ ID NO: 2864207 - RNA, 19 nt, Artificial Sequence
  Description of Artificial Sequence: Synthetic oligonucleotide
ccggggcuuuccccaugug

SEQ ID NO: 2864208 - RNA, 19 nt, Artificial Sequence
  Description of Artificial Sequence: Synthetic oligonucleotide
cggcagugugugcccagaa

SEQ ID NO: 2864209 - RNA, 19 nt, Artificial Sequence
  Description of Artificial Sequence: Synthetic oligonucleotide
cgugauccaugcccaggau

SEQ ID NO: 2864210 - RNA, 19 nt, Artificial Sequence
  Description of Artificial Sequence: Synthetic oligonucleotide
ggucugcguuuuccucauu

SEQ ID NO: 2864211 - RNA, 19 nt, Artificial Sequence
  Description of Artificial Sequence: Synthetic oligonucleotide
gcacgaggagaaggauguu

SEQ ID NO: 2864212 - RNA, 19 nt, Artificial Sequence
  Description of Artificial Sequence: Synthetic oligonucleotide
aauccugucgauccuaccc

SEQ ID NO: 2864213 - RNA, 19 nt, Artificial Sequence
  Description of Artificial Sequence: Synthetic oligonucleotide
uuuucaagagagcagaucu

SEQ ID NO: 2864214 - RNA, 19 nt, Artificial Sequence
  Description of Artificial Sequence: Synthetic oligonucleotide
gauagaugaagacaggaag

SEQ ID NO: 2864215 - RNA, 19 nt, Artificial Sequence
  Description of Artificial Sequence: Synthetic oligonucleotide
ugcaugacacaccauaggg

SEQ ID NO: 2864216 - RNA, 19 nt, Artificial Sequence
  Description of Artificial Sequence: Synthetic oligonucleotide
ucgugauagaugaagacag

SEQ ID NO: 2864217 - RNA, 19 nt, Artificial Sequence
  Description of Artificial Sequence: Synthetic oligonucleotide
aaaucuggcuugcuuuucc

SEQ ID NO: 2864218 - RNA, 19 nt, Artificial Sequence
  Description of Artificial Sequence: Synthetic oligonucleotide
caagagagcagaucuaucg

SEQ ID NO: 2864219 - RNA, 19 nt, Artificial Sequence
  Description of Artificial Sequence: Synthetic oligonucleotide
aagagagcagaucuaucgg

SEQ ID NO: 2864220 - RNA, 19 nt, Artificial Sequence
  Description of Artificial Sequence: Synthetic oligonucleotide
uuugcuuuucaagagagca

SEQ ID NO: 2864221 - RNA, 19 nt, Artificial Sequence
  Description of Artificial Sequence: Synthetic oligonucleotide
auagaugaagacaggaagc

SEQ ID NO: 2864222 - RNA, 19 nt, Artificial Sequence
  Description of Artificial Sequence: Synthetic oligonucleotide
caugacacaccauaggggc

SEQ ID NO: 2864223 - RNA, 19 nt, Artificial Sequence
  Description of Artificial Sequence: Synthetic oligonucleotide
aaggguacugccuucucuc

SEQ ID NO: 2864224 - RNA, 19 nt, Artificial Sequence
  Description of Artificial Sequence: Synthetic oligonucleotide
ucuaauggcaucuucuccu

SEQ ID NO: 2864225 - RNA, 19 nt, Artificial Sequence
  Description of Artificial Sequence: Synthetic oligonucleotide
uuaucuucgguaccggaag

SEQ ID NO: 2864226 - RNA, 19 nt, Artificial Sequence
  Description of Artificial Sequence: Synthetic oligonucleotide
gaagacaggaagcagcagc

SEQ ID NO: 2864227 - RNA, 19 nt, Artificial Sequence
  Description of Artificial Sequence: Synthetic oligonucleotide
gaugagaccaagcugcaug

SEQ ID NO: 2864228 - RNA, 19 nt, Artificial Sequence
  Description of Artificial Sequence: Synthetic oligonucleotide
gacgaugagaccaagcugc

SEQ ID NO: 2864229 - RNA, 19 nt, Artificial Sequence
  Description of Artificial Sequence: Synthetic oligonucleotide
accauaggggcuuaggguc

SEQ ID NO: 2864230 - RNA, 19 nt, Artificial Sequence
  Description of Artificial Sequence: Synthetic oligonucleotide
ucaguuugcuuuucaagag

SEQ ID NO: 2864231 - RNA, 19 nt, Artificial Sequence
  Description of Artificial Sequence: Synthetic oligonucleotide
gaugaagacaggaagcagc

SEQ ID NO: 2864232 - RNA, 19 nt, Artificial Sequence
  Description of Artificial Sequence: Synthetic oligonucleotide
agaucuaucggagggcucc

SEQ ID NO: 2864233 - RNA, 19 nt, Artificial Sequence
  Description of Artificial Sequence: Synthetic oligonucleotide
ucugcaaucugccccagca

SEQ ID NO: 2864234 - RNA, 19 nt, Artificial Sequence
  Description of Artificial Sequence: Synthetic oligonucleotide
accucagugacgaugagac

SEQ ID NO: 2864235 - RNA, 19 nt, Artificial Sequence
  Description of Artificial Sequence: Synthetic oligonucleotide
gagcagaucuaucggaggg

SEQ ID NO: 2864236 - RNA, 19 nt, Artificial Sequence
  Description of Artificial Sequence: Synthetic oligonucleotide
aagacaggaagcagcagcg

SEQ ID NO: 2864237 - RNA, 19 nt, Artificial Sequence
  Description of Artificial Sequence: Synthetic oligonucleotide
ucagggagggaguugagca

SEQ ID NO: 2864238 - RNA, 19 nt, Artificial Sequence
  Description of Artificial Sequence: Synthetic oligonucleotide
uucuaauggcaucuucucc

SEQ ID NO: 2864239 - RNA, 19 nt, Artificial Sequence
  Description of Artificial Sequence: Synthetic oligonucleotide
ugauagaugaagacaggaa

SEQ ID NO: 2864240 - RNA, 19 nt, Artificial Sequence
  Description of Artificial Sequence: Synthetic oligonucleotide
ucguucugcucacucaggg

SEQ ID NO: 2864241 - RNA, 19 nt, Artificial Sequence
  Description of Artificial Sequence: Synthetic oligonucleotide
aggggcagccagcagagcc

SEQ ID NO: 2864242 - RNA, 19 nt, Artificial Sequence
  Description of Artificial Sequence: Synthetic oligonucleotide
ucugccccagcaaaucugg

SEQ ID NO: 2864243 - RNA, 19 nt, Artificial Sequence
  Description of Artificial Sequence: Synthetic oligonucleotide
ugcuuuuccucccuggcug

SEQ ID NO: 2864244 - RNA, 19 nt, Artificial Sequence
  Description of Artificial Sequence: Synthetic oligonucleotide
ugccucaucguucugcuca

SEQ ID NO: 2864245 - RNA, 19 nt, Artificial Sequence
  Description of Artificial Sequence: Synthetic oligonucleotide
ucuggcuugcuuuuccucc

SEQ ID NO: 2864246 - RNA, 19 nt, Artificial Sequence
  Description of Artificial Sequence: Synthetic oligonucleotide
acaccauaggggcuuaggg

SEQ ID NO: 2864247 - RNA, 19 nt, Artificial Sequence
  Description of Artificial Sequence: Synthetic oligonucleotide
cucacucagggccugaggg

SEQ ID NO: 2864248 - RNA, 19 nt, Artificial Sequence
  Description of Artificial Sequence: Synthetic oligonucleotide
gaccucaucuucuaauggc

SEQ ID NO: 2864249 - RNA, 19 nt, Artificial Sequence
  Description of Artificial Sequence: Synthetic oligonucleotide
aagcuguugcacccuaguc

SEQ ID NO: 2864250 - RNA, 19 nt, Artificial Sequence
  Description of Artificial Sequence: Synthetic oligonucleotide
uugcuuuucaagagagcag

SEQ ID NO: 2864251 - RNA, 19 nt, Artificial Sequence
  Description of Artificial Sequence: Synthetic oligonucleotide
agaccaagcugcaugacac

SEQ ID NO: 2864252 - RNA, 19 nt, Artificial Sequence
  Description of Artificial Sequence: Synthetic oligonucleotide
uucgccacaccucagugac

SEQ ID NO: 2864253 - RNA, 19 nt, Artificial Sequence
  Description of Artificial Sequence: Synthetic oligonucleotide
ugcuuuucaagagagcaga

SEQ ID NO: 2864254 - RNA, 19 nt, Artificial Sequence
  Description of Artificial Sequence: Synthetic oligonucleotide
cucaguuugcuuuucaaga

SEQ ID NO: 2864255 - RNA, 19 nt, Artificial Sequence
  Description of Artificial Sequence: Synthetic oligonucleotide
ucaucuucuaauggcaucu

SEQ ID NO: 2864256 - RNA, 19 nt, Artificial Sequence
  Description of Artificial Sequence: Synthetic oligonucleotide
uagaugaagacaggaagca

SEQ ID NO: 2864257 - RNA, 19 nt, Artificial Sequence
  Description of Artificial Sequence: Synthetic oligonucleotide
ugacgaugagaccaagcug

SEQ ID NO: 2864258 - RNA, 19 nt, Artificial Sequence
  Description of Artificial Sequence: Synthetic oligonucleotide
agagcagaucuaucggagg

SEQ ID NO: 2864259 - RNA, 19 nt, Artificial Sequence
  Description of Artificial Sequence: Synthetic oligonucleotide
ucuucugcaaucugcccca

SEQ ID NO: 2864260 - RNA, 19 nt, Artificial Sequence
  Description of Artificial Sequence: Synthetic oligonucleotide
gucuucugcaaucugcccc

SEQ ID NO: 2864261 - RNA, 19 nt, Artificial Sequence
  Description of Artificial Sequence: Synthetic oligonucleotide
aguuugcuuuucaagagag

SEQ ID NO: 2864262 - RNA, 19 nt, Artificial Sequence
  Description of Artificial Sequence: Synthetic oligonucleotide
aaucugccccagcaaaucu

SEQ ID NO: 2864263 - RNA, 19 nt, Artificial Sequence
  Description of Artificial Sequence: Synthetic oligonucleotide
acugccuucucucugcggu

SEQ ID NO: 2864264 - RNA, 19 nt, Artificial Sequence
  Description of Artificial Sequence: Synthetic oligonucleotide
agagagcagaucuaucgga

SEQ ID NO: 2864265 - RNA, 19 nt, Artificial Sequence
  Description of Artificial Sequence: Synthetic oligonucleotide
ugcaaucugccccagcaaa

SEQ ID NO: 2864266 - RNA, 19 nt, Artificial Sequence
  Description of Artificial Sequence: Synthetic oligonucleotide
agggucuucugcaaucugc

SEQ ID NO: 2864267 - RNA, 19 nt, Artificial Sequence
  Description of Artificial Sequence: Synthetic oligonucleotide
cuucuaauggcaucuucuc

SEQ ID NO: 2864268 - RNA, 19 nt, Artificial Sequence
  Description of Artificial Sequence: Synthetic oligonucleotide
uaucggagggcucccagga

SEQ ID NO: 2864269 - RNA, 19 nt, Artificial Sequence
  Description of Artificial Sequence: Synthetic oligonucleotide
ucccuggcuguuaucuucg

SEQ ID NO: 2864270 - RNA, 19 nt, Artificial Sequence
  Description of Artificial Sequence: Synthetic oligonucleotide
agcagcuggaccuccguag

SEQ ID NO: 2864271 - RNA, 19 nt, Artificial Sequence
  Description of Artificial Sequence: Synthetic oligonucleotide
ucacucagggccugagggg

SEQ ID NO: 2864272 - RNA, 19 nt, Artificial Sequence
  Description of Artificial Sequence: Synthetic oligonucleotide
agcaaaucuggcuugcuuu

SEQ ID NO: 2864273 - RNA, 19 nt, Artificial Sequence
  Description of Artificial Sequence: Synthetic oligonucleotide
ucuaucggagggcucccag

SEQ ID NO: 2864274 - RNA, 19 nt, Artificial Sequence
  Description of Artificial Sequence: Synthetic oligonucleotide
caucguucugcucacucag

SEQ ID NO: 2864275 - RNA, 19 nt, Artificial Sequence
  Description of Artificial Sequence: Synthetic oligonucleotide
uguucgccacaccucagug

SEQ ID NO: 2864276 - RNA, 19 nt, Artificial Sequence
  Description of Artificial Sequence: Synthetic oligonucleotide
aaucuggcuugcuuuuccu

SEQ ID NO: 2864277 - RNA, 19 nt, Artificial Sequence
  Description of Artificial Sequence: Synthetic oligonucleotide
agggaggcaccucagggag

SEQ ID NO: 2864278 - RNA, 19 nt, Artificial Sequence
  Description of Artificial Sequence: Synthetic oligonucleotide
gagagcagaucuaucggag

SEQ ID NO: 2864279 - RNA, 19 nt, Artificial Sequence
  Description of Artificial Sequence: Synthetic oligonucleotide
acgaccucaucuucuaaug

SEQ ID NO: 2864280 - RNA, 19 nt, Artificial Sequence
  Description of Artificial Sequence: Synthetic oligonucleotide
cuuagggucuucugcaauc

SEQ ID NO: 2864281 - RNA, 19 nt, Artificial Sequence
  Description of Artificial Sequence: Synthetic oligonucleotide
cucagugacgaugagacca

SEQ ID NO: 2864282 - RNA, 19 nt, Artificial Sequence
  Description of Artificial Sequence: Synthetic oligonucleotide
agugacgaugagaccaagc

SEQ ID NO: 2864283 - RNA, 19 nt, Artificial Sequence
  Description of Artificial Sequence: Synthetic oligonucleotide
ucaucguucugcucacuca

SEQ ID NO: 2864284 - RNA, 19 nt, Artificial Sequence
  Description of Artificial Sequence: Synthetic oligonucleotide
uucaagagagcagaucuau

SEQ ID NO: 2864285 - RNA, 19 nt, Artificial Sequence
  Description of Artificial Sequence: Synthetic oligonucleotide
uaucuucgguaccggaagc

SEQ ID NO: 2864286 - RNA, 19 nt, Artificial Sequence
  Description of Artificial Sequence: Synthetic oligonucleotide
accaagcugcaugacacac

SEQ ID NO: 2864287 - RNA, 19 nt, Artificial Sequence
  Description of Artificial Sequence: Synthetic oligonucleotide
agcagaucuaucggagggc

SEQ ID NO: 2864288 - RNA, 19 nt, Artificial Sequence
  Description of Artificial Sequence: Synthetic oligonucleotide
gaagcagcagcguccagca

SEQ ID NO: 2864289 - RNA, 19 nt, Artificial Sequence
  Description of Artificial Sequence: Synthetic oligonucleotide
ucggagggcucccaggagc

SEQ ID NO: 2864290 - RNA, 19 nt, Artificial Sequence
  Description of Artificial Sequence: Synthetic oligonucleotide
uguuaucuucgguaccgga

SEQ ID NO: 2864291 - RNA, 19 nt, Artificial Sequence
  Description of Artificial Sequence: Synthetic oligonucleotide
cugcaugacacaccauagg

SEQ ID NO: 2864292 - RNA, 19 nt, Artificial Sequence
  Description of Artificial Sequence: Synthetic oligonucleotide
agcugcaugacacaccaua

SEQ ID NO: 2864293 - RNA, 19 nt, Artificial Sequence
  Description of Artificial Sequence: Synthetic oligonucleotide
gagggaguugagcacugcc

SEQ ID NO: 2864294 - RNA, 19 nt, Artificial Sequence
  Description of Artificial Sequence: Synthetic oligonucleotide
agagcccucaguuugcuuu

SEQ ID NO: 2864295 - RNA, 19 nt, Artificial Sequence
  Description of Artificial Sequence: Synthetic oligonucleotide
ucaagagagcagaucuauc

SEQ ID NO: 2864296 - RNA, 19 nt, Artificial Sequence
  Description of Artificial Sequence: Synthetic oligonucleotide
uuucaagagagcagaucua

SEQ ID NO: 2864297 - RNA, 19 nt, Artificial Sequence
  Description of Artificial Sequence: Synthetic oligonucleotide
uggcuguuaucuucgguac

SEQ ID NO: 2864298 - RNA, 19 nt, Artificial Sequence
  Description of Artificial Sequence: Synthetic oligonucleotide
gagaccaagcugcaugaca

SEQ ID NO: 2864299 - RNA, 19 nt, Artificial Sequence
  Description of Artificial Sequence: Synthetic oligonucleotide
uaauggcaucuucuccucc

SEQ ID NO: 2864300 - RNA, 19 nt, Artificial Sequence
  Description of Artificial Sequence: Synthetic oligonucleotide
caagcugcaugacacacca

SEQ ID NO: 2864301 - RNA, 19 nt, Artificial Sequence
  Description of Artificial Sequence: Synthetic oligonucleotide
acccuaguccgcucugggc

SEQ ID NO: 2864302 - RNA, 19 nt, Artificial Sequence
  Description of Artificial Sequence: Synthetic oligonucleotide
cagauggucuagcagguuc

SEQ ID NO: 2864303 - RNA, 19 nt, Artificial Sequence
  Description of Artificial Sequence: Synthetic oligonucleotide
gcuguuaucuucgguaccg

SEQ ID NO: 2864304 - RNA, 19 nt, Artificial Sequence
  Description of Artificial Sequence: Synthetic oligonucleotide
agcagcguccagcaggugu

SEQ ID NO: 2864305 - RNA, 19 nt, Artificial Sequence
  Description of Artificial Sequence: Synthetic oligonucleotide
uugcuuuuccucccuggcu

SEQ ID NO: 2864306 - RNA, 19 nt, Artificial Sequence
  Description of Artificial Sequence: Synthetic oligonucleotide
agaugaagacaggaagcag

SEQ ID NO: 2864307 - RNA, 19 nt, Artificial Sequence
  Description of Artificial Sequence: Synthetic oligonucleotide
cuaucggagggcucccagg

SEQ ID NO: 2864308 - RNA, 19 nt, Artificial Sequence
  Description of Artificial Sequence: Synthetic oligonucleotide
accuccguaggcuccgagg

SEQ ID NO: 2864309 - RNA, 19 nt, Artificial Sequence
  Description of Artificial Sequence: Synthetic oligonucleotide
ucagugacgaugagaccaa

SEQ ID NO: 2864310 - RNA, 19 nt, Artificial Sequence
  Description of Artificial Sequence: Synthetic oligonucleotide
cucaucuucuaauggcauc

SEQ ID NO: 2864311 - RNA, 19 nt, Artificial Sequence
  Description of Artificial Sequence: Synthetic oligonucleotide
uaccggaagcuguugcacc

SEQ ID NO: 2864312 - RNA, 19 nt, Artificial Sequence
  Description of Artificial Sequence: Synthetic oligonucleotide
agguguucgccacaccuca

SEQ ID NO: 2864313 - RNA, 19 nt, Artificial Sequence
  Description of Artificial Sequence: Synthetic oligonucleotide
gugauagaugaagacagga

SEQ ID NO: 2864314 - RNA, 19 nt, Artificial Sequence
  Description of Artificial Sequence: Synthetic oligonucleotide
aguccagggaggcaccuca

SEQ ID NO: 2864315 - RNA, 19 nt, Artificial Sequence
  Description of Artificial Sequence: Synthetic oligonucleotide
cuuuucaagagagcagauc

SEQ ID NO: 2864316 - RNA, 19 nt, Artificial Sequence
  Description of Artificial Sequence: Synthetic oligonucleotide
uuagggucuucugcaaucu

SEQ ID NO: 2864317 - RNA, 19 nt, Artificial Sequence
  Description of Artificial Sequence: Synthetic oligonucleotide
aggagcugcgcccaagggu

SEQ ID NO: 2864318 - RNA, 19 nt, Artificial Sequence
  Description of Artificial Sequence: Synthetic oligonucleotide
gugacgaugagaccaagcu

SEQ ID NO: 2864319 - RNA, 19 nt, Artificial Sequence
  Description of Artificial Sequence: Synthetic oligonucleotide
accuccccaguccagggag

SEQ ID NO: 2864320 - RNA, 19 nt, Artificial Sequence
  Description of Artificial Sequence: Synthetic oligonucleotide
augaagacaggaagcagca

SEQ ID NO: 2864321 - RNA, 19 nt, Artificial Sequence
  Description of Artificial Sequence: Synthetic oligonucleotide
ugaccuccccaguccaggg

SEQ ID NO: 2864322 - RNA, 19 nt, Artificial Sequence
  Description of Artificial Sequence: Synthetic oligonucleotide
ucuucgguaccggaagcug

SEQ ID NO: 2864323 - RNA, 19 nt, Artificial Sequence
  Description of Artificial Sequence: Synthetic oligonucleotide
cagcagagcccucaguuug

SEQ ID NO: 2864324 - RNA, 19 nt, Artificial Sequence
  Description of Artificial Sequence: Synthetic oligonucleotide
cuaauggcaucuucuccuc

SEQ ID NO: 2864325 - RNA, 19 nt, Artificial Sequence
  Description of Artificial Sequence: Synthetic oligonucleotide
gguacugccuucucucugc

SEQ ID NO: 2864326 - RNA, 19 nt, Artificial Sequence
  Description of Artificial Sequence: Synthetic oligonucleotide
ugggccccaauccugucga

SEQ ID NO: 2864327 - RNA, 19 nt, Artificial Sequence
  Description of Artificial Sequence: Synthetic oligonucleotide
gguggguugaccuccccag

SEQ ID NO: 2864328 - RNA, 19 nt, Artificial Sequence
  Description of Artificial Sequence: Synthetic oligonucleotide
uccguaggcuccgaggggc

SEQ ID NO: 2864329 - RNA, 19 nt, Artificial Sequence
  Description of Artificial Sequence: Synthetic oligonucleotide
cacaccucagugacgauga

SEQ ID NO: 2864330 - RNA, 19 nt, Artificial Sequence
  Description of Artificial Sequence: Synthetic oligonucleotide
cuggcuugcuuuuccuccc

SEQ ID NO: 2864331 - RNA, 19 nt, Artificial Sequence
  Description of Artificial Sequence: Synthetic oligonucleotide
ugccccagcaaaucuggcu

SEQ ID NO: 2864332 - RNA, 19 nt, Artificial Sequence
  Description of Artificial Sequence: Synthetic oligonucleotide
uccucccuggcuguuaucu

SEQ ID NO: 2864333 - RNA, 19 nt, Artificial Sequence
  Description of Artificial Sequence: Synthetic oligonucleotide
uggguugaccuccccaguc

SEQ ID NO: 2864334 - RNA, 19 nt, Artificial Sequence
  Description of Artificial Sequence: Synthetic oligonucleotide
uccuccagauggucuagca

SEQ ID NO: 2864335 - RNA, 19 nt, Artificial Sequence
  Description of Artificial Sequence: Synthetic oligonucleotide
uucuccuccagauggucua

SEQ ID NO: 2864336 - RNA, 19 nt, Artificial Sequence
  Description of Artificial Sequence: Synthetic oligonucleotide
cuggcuguuaucuucggua

SEQ ID NO: 2864337 - RNA, 19 nt, Artificial Sequence
  Description of Artificial Sequence: Synthetic oligonucleotide
cucaucguucugcucacuc

SEQ ID NO: 2864338 - RNA, 19 nt, Artificial Sequence
  Description of Artificial Sequence: Synthetic oligonucleotide
gcaugacacaccauagggg

SEQ ID NO: 2864339 - RNA, 19 nt, Artificial Sequence
  Description of Artificial Sequence: Synthetic oligonucleotide
uucucucugcgguggguug

SEQ ID NO: 2864340 - RNA, 19 nt, Artificial Sequence
  Description of Artificial Sequence: Synthetic oligonucleotide
uagggucuucugcaaucug

SEQ ID NO: 2864341 - RNA, 19 nt, Artificial Sequence
  Description of Artificial Sequence: Synthetic oligonucleotide
uguugcacccuaguccgcu

SEQ ID NO: 2864342 - RNA, 19 nt, Artificial Sequence
  Description of Artificial Sequence: Synthetic oligonucleotide
ggggcuuagggucuucugc

SEQ ID NO: 2864343 - RNA, 19 nt, Artificial Sequence
  Description of Artificial Sequence: Synthetic oligonucleotide
agcagagcccucaguuugc

SEQ ID NO: 2864344 - RNA, 19 nt, Artificial Sequence
  Description of Artificial Sequence: Synthetic oligonucleotide
accucaucuucuaauggca

SEQ ID NO: 2864345 - RNA, 19 nt, Artificial Sequence
  Description of Artificial Sequence: Synthetic oligonucleotide
uuuccucccuggcuguuau

SEQ ID NO: 2864346 - RNA, 19 nt, Artificial Sequence
  Description of Artificial Sequence: Synthetic oligonucleotide
guuaucuucgguaccggaa

SEQ ID NO: 2864347 - RNA, 19 nt, Artificial Sequence
  Description of Artificial Sequence: Synthetic oligonucleotide
agcagguguucgccacacc

SEQ ID NO: 2864348 - RNA, 19 nt, Artificial Sequence
  Description of Artificial Sequence: Synthetic oligonucleotide
guuugcuuuucaagagagc

SEQ ID NO: 2864349 - RNA, 19 nt, Artificial Sequence
  Description of Artificial Sequence: Synthetic oligonucleotide
gccccaauccugucgaucc

SEQ ID NO: 2864350 - RNA, 19 nt, Artificial Sequence
  Description of Artificial Sequence: Synthetic oligonucleotide
gcuugcuuuuccucccugg

SEQ ID NO: 2864351 - RNA, 19 nt, Artificial Sequence
  Description of Artificial Sequence: Synthetic oligonucleotide
cugggccccaauccugucg

SEQ ID NO: 2864352 - RNA, 19 nt, Artificial Sequence
  Description of Artificial Sequence: Synthetic oligonucleotide
guacugccuucucucugcg

SEQ ID NO: 2864353 - RNA, 19 nt, Artificial Sequence
  Description of Artificial Sequence: Synthetic oligonucleotide
cacaccauaggggcuuagg

SEQ ID NO: 2864354 - RNA, 19 nt, Artificial Sequence
  Description of Artificial Sequence: Synthetic oligonucleotide
uucgguaccggaagcuguu

SEQ ID NO: 2864355 - RNA, 19 nt, Artificial Sequence
  Description of Artificial Sequence: Synthetic oligonucleotide
ucugcgguggguugaccuc

SEQ ID NO: 2864356 - RNA, 19 nt, Artificial Sequence
  Description of Artificial Sequence: Synthetic oligonucleotide
caauccugucgauccuacc

SEQ ID NO: 2864357 - RNA, 19 nt, Artificial Sequence
  Description of Artificial Sequence: Synthetic oligonucleotide
uccgcucugggccccaauc

SEQ ID NO: 2864358 - RNA, 19 nt, Artificial Sequence
  Description of Artificial Sequence: Synthetic oligonucleotide
agauggucuagcagguucu

SEQ ID NO: 2864359 - RNA, 19 nt, Artificial Sequence
  Description of Artificial Sequence: Synthetic oligonucleotide
caguuugcuuuucaagaga

SEQ ID NO: 2864360 - RNA, 19 nt, Artificial Sequence
  Description of Artificial Sequence: Synthetic oligonucleotide
uggaccuccguaggcuccg

SEQ ID NO: 2864361 - RNA, 19 nt, Artificial Sequence
  Description of Artificial Sequence: Synthetic oligonucleotide
uucugcaaucugccccagc

SEQ ID NO: 2864362 - RNA, 19 nt, Artificial Sequence
  Description of Artificial Sequence: Synthetic oligonucleotide
ugcgcccaaggguacugcc

SEQ ID NO: 2864363 - RNA, 19 nt, Artificial Sequence
  Description of Artificial Sequence: Synthetic oligonucleotide
ggaagcagcagcguccagc

SEQ ID NO: 2864364 - RNA, 19 nt, Artificial Sequence
  Description of Artificial Sequence: Synthetic oligonucleotide
cucagggagggaguugagc

SEQ ID NO: 2864365 - RNA, 19 nt, Artificial Sequence
  Description of Artificial Sequence: Synthetic oligonucleotide
ccuccguaggcuccgaggg

SEQ ID NO: 2864366 - RNA, 19 nt, Artificial Sequence
  Description of Artificial Sequence: Synthetic oligonucleotide
ugacacaccauaggggcuu

SEQ ID NO: 2864367 - RNA, 19 nt, Artificial Sequence
  Description of Artificial Sequence: Synthetic oligonucleotide
cuguuaucuucgguaccgg

SEQ ID NO: 2864368 - RNA, 19 nt, Artificial Sequence
  Description of Artificial Sequence: Synthetic oligonucleotide
gaagcuguugcacccuagu

SEQ ID NO: 2864369 - RNA, 19 nt, Artificial Sequence
  Description of Artificial Sequence: Synthetic oligonucleotide
uggcaucuucuccuccaga

SEQ ID NO: 2864370 - RNA, 19 nt, Artificial Sequence
  Description of Artificial Sequence: Synthetic oligonucleotide
caaucugccccagcaaauc

SEQ ID NO: 2864371 - RNA, 19 nt, Artificial Sequence
  Description of Artificial Sequence: Synthetic oligonucleotide
cccuaguccgcucugggcc

SEQ ID NO: 2864372 - RNA, 19 nt, Artificial Sequence
  Description of Artificial Sequence: Synthetic oligonucleotide
ugcacccuaguccgcucug

SEQ ID NO: 2864373 - RNA, 19 nt, Artificial Sequence
  Description of Artificial Sequence: Synthetic oligonucleotide
cuggaccuccguaggcucc

SEQ ID NO: 2864374 - RNA, 19 nt, Artificial Sequence
  Description of Artificial Sequence: Synthetic oligonucleotide
cagguguucgccacaccuc

SEQ ID NO: 2864375 - RNA, 19 nt, Artificial Sequence
  Description of Artificial Sequence: Synthetic oligonucleotide
cagggagggaguugagcac

SEQ ID NO: 2864376 - RNA, 19 nt, Artificial Sequence
  Description of Artificial Sequence: Synthetic oligonucleotide
cacccuaguccgcucuggg

SEQ ID NO: 2864377 - RNA, 19 nt, Artificial Sequence
  Description of Artificial Sequence: Synthetic oligonucleotide
gcugcaugacacaccauag

SEQ ID NO: 2864378 - RNA, 19 nt, Artificial Sequence
  Description of Artificial Sequence: Synthetic oligonucleotide
agggagggaguugagcacu

SEQ ID NO: 2864379 - RNA, 19 nt, Artificial Sequence
  Description of Artificial Sequence: Synthetic oligonucleotide
aggguacugccuucucucu

SEQ ID NO: 2864380 - RNA, 19 nt, Artificial Sequence
  Description of Artificial Sequence: Synthetic oligonucleotide
ucgccacaccucagugacg

SEQ ID NO: 2864381 - RNA, 19 nt, Artificial Sequence
  Description of Artificial Sequence: Synthetic oligonucleotide
aagcagcagcguccagcag

SEQ ID NO: 2864382 - RNA, 19 nt, Artificial Sequence
  Description of Artificial Sequence: Synthetic oligonucleotide
aagcagcuggaccuccgua

SEQ ID NO: 2864383 - RNA, 19 nt, Artificial Sequence
  Description of Artificial Sequence: Synthetic oligonucleotide
aggcaccucagggagggag

SEQ ID NO: 2864384 - RNA, 19 nt, Artificial Sequence
  Description of Artificial Sequence: Synthetic oligonucleotide
aucggagggcucccaggag

SEQ ID NO: 2864385 - RNA, 19 nt, Artificial Sequence
  Description of Artificial Sequence: Synthetic oligonucleotide
caggagcugcgcccaaggg

SEQ ID NO: 2864386 - RNA, 19 nt, Artificial Sequence
  Description of Artificial Sequence: Synthetic oligonucleotide
aucuucgguaccggaagcu

SEQ ID NO: 2864387 - RNA, 19 nt, Artificial Sequence
  Description of Artificial Sequence: Synthetic oligonucleotide
aggggcuuagggucuucug

SEQ ID NO: 2864388 - RNA, 19 nt, Artificial Sequence
  Description of Artificial Sequence: Synthetic oligonucleotide
gaucuaucggagggcuccc

SEQ ID NO: 2864389 - RNA, 19 nt, Artificial Sequence
  Description of Artificial Sequence: Synthetic oligonucleotide
guucgccacaccucaguga

SEQ ID NO: 2864390 - RNA, 19 nt, Artificial Sequence
  Description of Artificial Sequence: Synthetic oligonucleotide
aucguucugcucacucagg

SEQ ID NO: 2864391 - RNA, 19 nt, Artificial Sequence
  Description of Artificial Sequence: Synthetic oligonucleotide
guaccggaagcuguugcac

SEQ ID NO: 2864392 - RNA, 19 nt, Artificial Sequence
  Description of Artificial Sequence: Synthetic oligonucleotide
ucucucugcgguggguuga

SEQ ID NO: 2864393 - RNA, 19 nt, Artificial Sequence
  Description of Artificial Sequence: Synthetic oligonucleotide
cuccguaggcuccgagggg

SEQ ID NO: 2864394 - RNA, 19 nt, Artificial Sequence
  Description of Artificial Sequence: Synthetic oligonucleotide
gggucuucugcaaucugcc

SEQ ID NO: 2864395 - RNA, 19 nt, Artificial Sequence
  Description of Artificial Sequence: Synthetic oligonucleotide
gaccaagcugcaugacaca

SEQ ID NO: 2864396 - RNA, 19 nt, Artificial Sequence
  Description of Artificial Sequence: Synthetic oligonucleotide
aucugccccagcaaaucug

SEQ ID NO: 2864397 - RNA, 19 nt, Artificial Sequence
  Description of Artificial Sequence: Synthetic oligonucleotide
agcuggaccuccguaggcu

SEQ ID NO: 2864398 - RNA, 19 nt, Artificial Sequence
  Description of Artificial Sequence: Synthetic oligonucleotide
ggguugaccuccccagucc

SEQ ID NO: 2864399 - RNA, 19 nt, Artificial Sequence
  Description of Artificial Sequence: Synthetic oligonucleotide
uaggcuccgaggggcagcc

SEQ ID NO: 2864400 - RNA, 19 nt, Artificial Sequence
  Description of Artificial Sequence: Synthetic oligonucleotide
gguaccggaagcuguugca

SEQ ID NO: 2864401 - RNA, 19 nt, Artificial Sequence
  Description of Artificial Sequence: Synthetic oligonucleotide
ugcgguggguugaccuccc

SEQ ID NO: 2864402 - RNA, 19 nt, Artificial Sequence
  Description of Artificial Sequence: Synthetic oligonucleotide
ugagaccaagcugcaugac

SEQ ID NO: 2864403 - RNA, 19 nt, Artificial Sequence
  Description of Artificial Sequence: Synthetic oligonucleotide
ugcucacucagggccugag

SEQ ID NO: 2864404 - RNA, 19 nt, Artificial Sequence
  Description of Artificial Sequence: Synthetic oligonucleotide
ccaagcugcaugacacacc

SEQ ID NO: 2864405 - RNA, 19 nt, Artificial Sequence
  Description of Artificial Sequence: Synthetic oligonucleotide
cugcgguggguugaccucc

SEQ ID NO: 2864406 - RNA, 19 nt, Artificial Sequence
  Description of Artificial Sequence: Synthetic oligonucleotide
gggcuuagggucuucugca

SEQ ID NO: 2864407 - RNA, 19 nt, Artificial Sequence
  Description of Artificial Sequence: Synthetic oligonucleotide
cgugauagaugaagacagg

SEQ ID NO: 2864408 - RNA, 19 nt, Artificial Sequence
  Description of Artificial Sequence: Synthetic oligonucleotide
ggcuguuaucuucgguacc

SEQ ID NO: 2864409 - RNA, 19 nt, Artificial Sequence
  Description of Artificial Sequence: Synthetic oligonucleotide
cagggaggcaccucaggga

SEQ ID NO: 2864410 - RNA, 19 nt, Artificial Sequence
  Description of Artificial Sequence: Synthetic oligonucleotide
caccauaggggcuuagggu

SEQ ID NO: 2864411 - RNA, 19 nt, Artificial Sequence
  Description of Artificial Sequence: Synthetic oligonucleotide
cagcuggaccuccguaggc

SEQ ID NO: 2864412 - RNA, 19 nt, Artificial Sequence
  Description of Artificial Sequence: Synthetic oligonucleotide
agcguccagcagguguucg

SEQ ID NO: 2864413 - RNA, 19 nt, Artificial Sequence
  Description of Artificial Sequence: Synthetic oligonucleotide
uccgaggggcagccagcag

SEQ ID NO: 2864414 - RNA, 19 nt, Artificial Sequence
  Description of Artificial Sequence: Synthetic oligonucleotide
cugccuucucucugcggug

SEQ ID NO: 2864415 - RNA, 19 nt, Artificial Sequence
  Description of Artificial Sequence: Synthetic oligonucleotide
cagaucuaucggagggcuc

SEQ ID NO: 2864416 - RNA, 19 nt, Artificial Sequence
  Description of Artificial Sequence: Synthetic oligonucleotide
augacacaccauaggggcu

SEQ ID NO: 2864417 - RNA, 19 nt, Artificial Sequence
  Description of Artificial Sequence: Synthetic oligonucleotide
guugaccuccccaguccag

SEQ ID NO: 2864418 - RNA, 19 nt, Artificial Sequence
  Description of Artificial Sequence: Synthetic oligonucleotide
uuuuccucccuggcuguua

SEQ ID NO: 2864419 - RNA, 19 nt, Artificial Sequence
  Description of Artificial Sequence: Synthetic oligonucleotide
ggcuccgaggggcagccag

SEQ ID NO: 2864420 - RNA, 19 nt, Artificial Sequence
  Description of Artificial Sequence: Synthetic oligonucleotide
gaccuccguaggcuccgag

SEQ ID NO: 2864421 - RNA, 19 nt, Artificial Sequence
  Description of Artificial Sequence: Synthetic oligonucleotide
ccuccagauggucuagcag

SEQ ID NO: 2864422 - RNA, 19 nt, Artificial Sequence
  Description of Artificial Sequence: Synthetic oligonucleotide
gcucccaggagcugcgccc

SEQ ID NO: 2864423 - RNA, 19 nt, Artificial Sequence
  Description of Artificial Sequence: Synthetic oligonucleotide
ucgguaccggaagcuguug

SEQ ID NO: 2864424 - RNA, 19 nt, Artificial Sequence
  Description of Artificial Sequence: Synthetic oligonucleotide
cgaccucaucuucuaaugg

SEQ ID NO: 2864425 - RNA, 19 nt, Artificial Sequence
  Description of Artificial Sequence: Synthetic oligonucleotide
uaggggcuuagggucuucu

SEQ ID NO: 2864426 - RNA, 19 nt, Artificial Sequence
  Description of Artificial Sequence: Synthetic oligonucleotide
ggguacugccuucucucug

SEQ ID NO: 2864427 - RNA, 19 nt, Artificial Sequence
  Description of Artificial Sequence: Synthetic oligonucleotide
cuguugcacccuaguccgc

SEQ ID NO: 2864428 - RNA, 19 nt, Artificial Sequence
  Description of Artificial Sequence: Synthetic oligonucleotide
gcucacucagggccugagg

SEQ ID NO: 2864429 - RNA, 19 nt, Artificial Sequence
  Description of Artificial Sequence: Synthetic oligonucleotide
cugccccagcaaaucuggc

SEQ ID NO: 2864430 - RNA, 19 nt, Artificial Sequence
  Description of Artificial Sequence: Synthetic oligonucleotide
agacaggaagcagcagcgu

SEQ ID NO: 2864431 - RNA, 19 nt, Artificial Sequence
  Description of Artificial Sequence: Synthetic oligonucleotide
cuccccaguccagggaggc

SEQ ID NO: 2864432 - RNA, 19 nt, Artificial Sequence
  Description of Artificial Sequence: Synthetic oligonucleotide
gguugaccuccccagucca

SEQ ID NO: 2864433 - RNA, 19 nt, Artificial Sequence
  Description of Artificial Sequence: Synthetic oligonucleotide
cuucgguaccggaagcugu

SEQ ID NO: 2864434 - RNA, 19 nt, Artificial Sequence
  Description of Artificial Sequence: Synthetic oligonucleotide
ccuaguccgcucugggccc

SEQ ID NO: 2864435 - RNA, 19 nt, Artificial Sequence
  Description of Artificial Sequence: Synthetic oligonucleotide
guaggcuccgaggggcagc

SEQ ID NO: 2864436 - RNA, 19 nt, Artificial Sequence
  Description of Artificial Sequence: Synthetic oligonucleotide
ccaggagcugcgcccaagg

SEQ ID NO: 2864437 - RNA, 19 nt, Artificial Sequence
  Description of Artificial Sequence: Synthetic oligonucleotide
gcagguguucgccacaccu

SEQ ID NO: 2864438 - RNA, 19 nt, Artificial Sequence
  Description of Artificial Sequence: Synthetic oligonucleotide
gaagcagcuggaccuccgu

SEQ ID NO: 2864439 - RNA, 19 nt, Artificial Sequence
  Description of Artificial Sequence: Synthetic oligonucleotide
guugcacccuaguccgcuc

SEQ ID NO: 2864440 - RNA, 19 nt, Artificial Sequence
  Description of Artificial Sequence: Synthetic oligonucleotide
gaccuccccaguccaggga

SEQ ID NO: 2864441 - RNA, 19 nt, Artificial Sequence
  Description of Artificial Sequence: Synthetic oligonucleotide
caaggguacugccuucucu

SEQ ID NO: 2864442 - RNA, 19 nt, Artificial Sequence
  Description of Artificial Sequence: Synthetic oligonucleotide
ggagcugcgcccaagggua

SEQ ID NO: 2864443 - RNA, 19 nt, Artificial Sequence
  Description of Artificial Sequence: Synthetic oligonucleotide
auaggggcuuagggucuuc

SEQ ID NO: 2864444 - RNA, 19 nt, Artificial Sequence
  Description of Artificial Sequence: Synthetic oligonucleotide
acgaugagaccaagcugca

SEQ ID NO: 2864445 - RNA, 19 nt, Artificial Sequence
  Description of Artificial Sequence: Synthetic oligonucleotide
cagcagguguucgccacac

SEQ ID NO: 2864446 - RNA, 19 nt, Artificial Sequence
  Description of Artificial Sequence: Synthetic oligonucleotide
cuccuccagauggucuagc

SEQ ID NO: 2864447 - RNA, 19 nt, Artificial Sequence
  Description of Artificial Sequence: Synthetic oligonucleotide
cacgaccucaucuucuaau

SEQ ID NO: 2864448 - RNA, 19 nt, Artificial Sequence
  Description of Artificial Sequence: Synthetic oligonucleotide
ucugggccccaauccuguc

SEQ ID NO: 2864449 - RNA, 19 nt, Artificial Sequence
  Description of Artificial Sequence: Synthetic oligonucleotide
agggcucccaggagcugcg

SEQ ID NO: 2864450 - RNA, 19 nt, Artificial Sequence
  Description of Artificial Sequence: Synthetic oligonucleotide
caccucagugacgaugaga

SEQ ID NO: 2864451 - RNA, 19 nt, Artificial Sequence
  Description of Artificial Sequence: Synthetic oligonucleotide
agccagcagagcccucagu

SEQ ID NO: 2864452 - RNA, 19 nt, Artificial Sequence
  Description of Artificial Sequence: Synthetic oligonucleotide
agcccucaguuugcuuuuc

SEQ ID NO: 2864453 - RNA, 19 nt, Artificial Sequence
  Description of Artificial Sequence: Synthetic oligonucleotide
cucugcgguggguugaccu

SEQ ID NO: 2864454 - RNA, 19 nt, Artificial Sequence
  Description of Artificial Sequence: Synthetic oligonucleotide
cguucugcucacucagggc

SEQ ID NO: 2864455 - RNA, 19 nt, Artificial Sequence
  Description of Artificial Sequence: Synthetic oligonucleotide
cuaguccgcucugggcccc

SEQ ID NO: 2864456 - RNA, 19 nt, Artificial Sequence
  Description of Artificial Sequence: Synthetic oligonucleotide
caggaagcagcagcgucca

SEQ ID NO: 2864457 - RNA, 19 nt, Artificial Sequence
  Description of Artificial Sequence: Synthetic oligonucleotide
cagugacgaugagaccaag

SEQ ID NO: 2864458 - RNA, 19 nt, Artificial Sequence
  Description of Artificial Sequence: Synthetic oligonucleotide
ccacaccucagugacgaug

SEQ ID NO: 2864459 - RNA, 19 nt, Artificial Sequence
  Description of Artificial Sequence: Synthetic oligonucleotide
guguucgccacaccucagu

SEQ ID NO: 2864460 - RNA, 19 nt, Artificial Sequence
  Description of Artificial Sequence: Synthetic oligonucleotide
ucucugcgguggguugacc

SEQ ID NO: 2864461 - RNA, 19 nt, Artificial Sequence
  Description of Artificial Sequence: Synthetic oligonucleotide
cuucugcaaucugccccag

SEQ ID NO: 2864462 - RNA, 19 nt, Artificial Sequence
  Description of Artificial Sequence: Synthetic oligonucleotide
ccucagugacgaugagacc

SEQ ID NO: 2864463 - RNA, 19 nt, Artificial Sequence
  Description of Artificial Sequence: Synthetic oligonucleotide
ggcucccaggagcugcgcc

SEQ ID NO: 2864464 - RNA, 19 nt, Artificial Sequence
  Description of Artificial Sequence: Synthetic oligonucleotide
cugcaaucugccccagcaa

SEQ ID NO: 2864465 - RNA, 19 nt, Artificial Sequence
  Description of Artificial Sequence: Synthetic oligonucleotide
aucuaucggagggcuccca

SEQ ID NO: 2864466 - RNA, 19 nt, Artificial Sequence
  Description of Artificial Sequence: Synthetic oligonucleotide
gcguccagcagguguucgc

SEQ ID NO: 2864467 - RNA, 19 nt, Artificial Sequence
  Description of Artificial Sequence: Synthetic oligonucleotide
cucucugcgguggguugac

SEQ ID NO: 2864468 - RNA, 19 nt, Artificial Sequence
  Description of Artificial Sequence: Synthetic oligonucleotide
gcuggaccuccguaggcuc

SEQ ID NO: 2864469 - RNA, 19 nt, Artificial Sequence
  Description of Artificial Sequence: Synthetic oligonucleotide
acacaccauaggggcuuag

SEQ ID NO: 2864470 - RNA, 19 nt, Artificial Sequence
  Description of Artificial Sequence: Synthetic oligonucleotide
ggugccucaucguucugcu

SEQ ID NO: 2864471 - RNA, 19 nt, Artificial Sequence
  Description of Artificial Sequence: Synthetic oligonucleotide
ccgcucugggccccaaucc

SEQ ID NO: 2864472 - RNA, 19 nt, Artificial Sequence
  Description of Artificial Sequence: Synthetic oligonucleotide
ggcuugcuuuuccucccug

SEQ ID NO: 2864473 - RNA, 19 nt, Artificial Sequence
  Description of Artificial Sequence: Synthetic oligonucleotide
guccagggaggcaccucag

SEQ ID NO: 2864474 - RNA, 19 nt, Artificial Sequence
  Description of Artificial Sequence: Synthetic oligonucleotide
cugcgcccaaggguacugc

SEQ ID NO: 2864475 - RNA, 19 nt, Artificial Sequence
  Description of Artificial Sequence: Synthetic oligonucleotide
gccucaucguucugcucac

SEQ ID NO: 2864476 - RNA, 19 nt, Artificial Sequence
  Description of Artificial Sequence: Synthetic oligonucleotide
gguguucgccacaccucag

SEQ ID NO: 2864477 - RNA, 19 nt, Artificial Sequence
  Description of Artificial Sequence: Synthetic oligonucleotide
cgaagcagcuggaccuccg

SEQ ID NO: 2864478 - RNA, 19 nt, Artificial Sequence
  Description of Artificial Sequence: Synthetic oligonucleotide
ggcacgaccucaucuucua

SEQ ID NO: 2864479 - RNA, 19 nt, Artificial Sequence
  Description of Artificial Sequence: Synthetic oligonucleotide
gcacccuaguccgcucugg

SEQ ID NO: 2864480 - RNA, 19 nt, Artificial Sequence
  Description of Artificial Sequence: Synthetic oligonucleotide
ggggcacgaccucaucuuc

SEQ ID NO: 2864481 - RNA, 19 nt, Artificial Sequence
  Description of Artificial Sequence: Synthetic oligonucleotide
uuccucccuggcuguuauc

SEQ ID NO: 2864482 - RNA, 19 nt, Artificial Sequence
  Description of Artificial Sequence: Synthetic oligonucleotide
ggcuuagggucuucugcaa

SEQ ID NO: 2864483 - RNA, 19 nt, Artificial Sequence
  Description of Artificial Sequence: Synthetic oligonucleotide
cucugggccccaauccugu

SEQ ID NO: 2864484 - RNA, 19 nt, Artificial Sequence
  Description of Artificial Sequence: Synthetic oligonucleotide
cccagcaaaucuggcuugc

SEQ ID NO: 2864485 - RNA, 19 nt, Artificial Sequence
  Description of Artificial Sequence: Synthetic oligonucleotide
gcaaaucuggcuugcuuuu

SEQ ID NO: 2864486 - RNA, 19 nt, Artificial Sequence
  Description of Artificial Sequence: Synthetic oligonucleotide
caccucagggagggaguug

SEQ ID NO: 2864487 - RNA, 19 nt, Artificial Sequence
  Description of Artificial Sequence: Synthetic oligonucleotide
ccccagcaaaucuggcuug

SEQ ID NO: 2864488 - RNA, 19 nt, Artificial Sequence
  Description of Artificial Sequence: Synthetic oligonucleotide
ccuccccaguccagggagg

SEQ ID NO: 2864489 - RNA, 19 nt, Artificial Sequence
  Description of Artificial Sequence: Synthetic oligonucleotide
gcucugggccccaauccug

SEQ ID NO: 2864490 - RNA, 19 nt, Artificial Sequence
  Description of Artificial Sequence: Synthetic oligonucleotide
gggaggcaccucagggagg

SEQ ID NO: 2864491 - RNA, 19 nt, Artificial Sequence
  Description of Artificial Sequence: Synthetic oligonucleotide
ccgaggggcagccagcaga

SEQ ID NO: 2864492 - RNA, 19 nt, Artificial Sequence
  Description of Artificial Sequence: Synthetic oligonucleotide
gcagaucuaucggagggcu

SEQ ID NO: 2864493 - RNA, 19 nt, Artificial Sequence
  Description of Artificial Sequence: Synthetic oligonucleotide
ccccaguccagggaggcac

SEQ ID NO: 2864494 - RNA, 19 nt, Artificial Sequence
  Description of Artificial Sequence: Synthetic oligonucleotide
gagcccucaguuugcuuuu

SEQ ID NO: 2864495 - RNA, 19 nt, Artificial Sequence
  Description of Artificial Sequence: Synthetic oligonucleotide
ggagggaguugagcacugc

SEQ ID NO: 2864496 - RNA, 19 nt, Artificial Sequence
  Description of Artificial Sequence: Synthetic oligonucleotide
aagcugcaugacacaccau

SEQ ID NO: 2864497 - RNA, 19 nt, Artificial Sequence
  Description of Artificial Sequence: Synthetic oligonucleotide
agcugcgcccaaggguacu

SEQ ID NO: 2864498 - RNA, 19 nt, Artificial Sequence
  Description of Artificial Sequence: Synthetic oligonucleotide
cgguaccggaagcuguugc

SEQ ID NO: 2864499 - RNA, 19 nt, Artificial Sequence
  Description of Artificial Sequence: Synthetic oligonucleotide
gagcugcgcccaaggguac

SEQ ID NO: 2864500 - RNA, 19 nt, Artificial Sequence
  Description of Artificial Sequence: Synthetic oligonucleotide
cagcaaaucuggcuugcuu

SEQ ID NO: 2864501 - RNA, 19 nt, Artificial Sequence
  Description of Artificial Sequence: Synthetic oligonucleotide
guggguugaccuccccagu

SEQ ID NO: 2864502 - RNA, 19 nt, Artificial Sequence
  Description of Artificial Sequence: Synthetic oligonucleotide
gggagggaguugagcacug

SEQ ID NO: 2864503 - RNA, 19 nt, Artificial Sequence
  Description of Artificial Sequence: Synthetic oligonucleotide
cuccgaggggcagccagca

SEQ ID NO: 2864504 - RNA, 19 nt, Artificial Sequence
  Description of Artificial Sequence: Synthetic oligonucleotide
ucccaggagcugcgcccaa

SEQ ID NO: 2864505 - RNA, 19 nt, Artificial Sequence
  Description of Artificial Sequence: Synthetic oligonucleotide
cccuggcuguuaucuucgg

SEQ ID NO: 2864506 - RNA, 19 nt, Artificial Sequence
  Description of Artificial Sequence: Synthetic oligonucleotide
cucccaggagcugcgccca

SEQ ID NO: 2864507 - RNA, 19 nt, Artificial Sequence
  Description of Artificial Sequence: Synthetic oligonucleotide
caguccagggaggcaccuc

SEQ ID NO: 2864508 - RNA, 19 nt, Artificial Sequence
  Description of Artificial Sequence: Synthetic oligonucleotide
gacacaccauaggggcuua

SEQ ID NO: 2864509 - RNA, 19 nt, Artificial Sequence
  Description of Artificial Sequence: Synthetic oligonucleotide
gcugcgcccaaggguacug

SEQ ID NO: 2864510 - RNA, 19 nt, Artificial Sequence
  Description of Artificial Sequence: Synthetic oligonucleotide
gccccagcaaaucuggcuu

SEQ ID NO: 2864511 - RNA, 19 nt, Artificial Sequence
  Description of Artificial Sequence: Synthetic oligonucleotide
cccucaguuugcuuuucaa

SEQ ID NO: 2864512 - RNA, 19 nt, Artificial Sequence
  Description of Artificial Sequence: Synthetic oligonucleotide
ggccccaauccugucgauc

SEQ ID NO: 2864513 - RNA, 19 nt, Artificial Sequence
  Description of Artificial Sequence: Synthetic oligonucleotide
gcuuagggucuucugcaau

SEQ ID NO: 2864514 - RNA, 19 nt, Artificial Sequence
  Description of Artificial Sequence: Synthetic oligonucleotide
ccucagggagggaguugag

SEQ ID NO: 2864515 - RNA, 19 nt, Artificial Sequence
  Description of Artificial Sequence: Synthetic oligonucleotide
uaguccgcucugggcccca

SEQ ID NO: 2864516 - RNA, 19 nt, Artificial Sequence
  Description of Artificial Sequence: Synthetic oligonucleotide
gcuuuuccucccuggcugu

SEQ ID NO: 2864517 - RNA, 19 nt, Artificial Sequence
  Description of Artificial Sequence: Synthetic oligonucleotide
cggugccucaucguucugc

SEQ ID NO: 2864518 - RNA, 19 nt, Artificial Sequence
  Description of Artificial Sequence: Synthetic oligonucleotide
gcuccgaggggcagccagc

SEQ ID NO: 2864519 - RNA, 19 nt, Artificial Sequence
  Description of Artificial Sequence: Synthetic oligonucleotide
cagcguccagcagguguuc

SEQ ID NO: 2864520 - RNA, 19 nt, Artificial Sequence
  Description of Artificial Sequence: Synthetic oligonucleotide
cuucucucugcgguggguu

SEQ ID NO: 2864521 - RNA, 19 nt, Artificial Sequence
  Description of Artificial Sequence: Synthetic oligonucleotide
ccccggugccucaucguuc

SEQ ID NO: 2864522 - RNA, 19 nt, Artificial Sequence
  Description of Artificial Sequence: Synthetic oligonucleotide
ccgaagcagcuggaccucc

SEQ ID NO: 2864523 - RNA, 19 nt, Artificial Sequence
  Description of Artificial Sequence: Synthetic oligonucleotide
ccucaucuucuaauggcau

SEQ ID NO: 2864524 - RNA, 19 nt, Artificial Sequence
  Description of Artificial Sequence: Synthetic oligonucleotide
cgccacaccucagugacga

SEQ ID NO: 2864525 - RNA, 19 nt, Artificial Sequence
  Description of Artificial Sequence: Synthetic oligonucleotide
gcaaucugccccagcaaau

SEQ ID NO: 2864526 - RNA, 19 nt, Artificial Sequence
  Description of Artificial Sequence: Synthetic oligonucleotide
gcacgaccucaucuucuaa

SEQ ID NO: 2864527 - RNA, 19 nt, Artificial Sequence
  Description of Artificial Sequence: Synthetic oligonucleotide
ccauaggggcuuagggucu

SEQ ID NO: 2864528 - RNA, 19 nt, Artificial Sequence
  Description of Artificial Sequence: Synthetic oligonucleotide
gcuuuucaagagagcagau

SEQ ID NO: 2864529 - RNA, 19 nt, Artificial Sequence
  Description of Artificial Sequence: Synthetic oligonucleotide
ccagcagguguucgccaca

SEQ ID NO: 2864530 - RNA, 19 nt, Artificial Sequence
  Description of Artificial Sequence: Synthetic oligonucleotide
gcgguggguugaccucccc

SEQ ID NO: 2864531 - RNA, 19 nt, Artificial Sequence
  Description of Artificial Sequence: Synthetic oligonucleotide
caucuucuaauggcaucuu

SEQ ID NO: 2864532 - RNA, 19 nt, Artificial Sequence
  Description of Artificial Sequence: Synthetic oligonucleotide
gaggcaccucagggaggga

SEQ ID NO: 2864533 - RNA, 19 nt, Artificial Sequence
  Description of Artificial Sequence: Synthetic oligonucleotide
ggcaccucagggagggagu

SEQ ID NO: 2864534 - RNA, 19 nt, Artificial Sequence
  Description of Artificial Sequence: Synthetic oligonucleotide
cccaggagcugcgcccaag

SEQ ID NO: 2864535 - RNA, 19 nt, Artificial Sequence
  Description of Artificial Sequence: Synthetic oligonucleotide
gggcacgaccucaucuucu

SEQ ID NO: 2864536 - RNA, 19 nt, Artificial Sequence
  Description of Artificial Sequence: Synthetic oligonucleotide
cccggugccucaucguucu

SEQ ID NO: 2864537 - RNA, 19 nt, Artificial Sequence
  Description of Artificial Sequence: Synthetic oligonucleotide
cccgaagcagcuggaccuc

SEQ ID NO: 2864538 - RNA, 19 nt, Artificial Sequence
  Description of Artificial Sequence: Synthetic oligonucleotide
gcagcguccagcagguguu

SEQ ID NO: 2864539 - RNA, 19 nt, Artificial Sequence
  Description of Artificial Sequence: Synthetic oligonucleotide
cugcucacucagggccuga

SEQ ID NO: 2864540 - RNA, 19 nt, Artificial Sequence
  Description of Artificial Sequence: Synthetic oligonucleotide
ccuggcuguuaucuucggu

SEQ ID NO: 2864541 - RNA, 19 nt, Artificial Sequence
  Description of Artificial Sequence: Synthetic oligonucleotide
cguaggcuccgaggggcag

SEQ ID NO: 2864542 - RNA, 19 nt, Artificial Sequence
  Description of Artificial Sequence: Synthetic oligonucleotide
cagcagcguccagcaggug

SEQ ID NO: 2864543 - RNA, 19 nt, Artificial Sequence
  Description of Artificial Sequence: Synthetic oligonucleotide
aguccgcucugggccccaa

SEQ ID NO: 2864544 - RNA, 19 nt, Artificial Sequence
  Description of Artificial Sequence: Synthetic oligonucleotide
ccagcagagcccucaguuu

SEQ ID NO: 2864545 - RNA, 19 nt, Artificial Sequence
  Description of Artificial Sequence: Synthetic oligonucleotide
cgguggguugaccucccca

SEQ ID NO: 2864546 - RNA, 19 nt, Artificial Sequence
  Description of Artificial Sequence: Synthetic oligonucleotide
cauaggggcuuagggucuu

SEQ ID NO: 2864547 - RNA, 19 nt, Artificial Sequence
  Description of Artificial Sequence: Synthetic oligonucleotide
cccaauccugucgauccua

SEQ ID NO: 2864548 - RNA, 19 nt, Artificial Sequence
  Description of Artificial Sequence: Synthetic oligonucleotide
ccguaggcuccgaggggca

SEQ ID NO: 2864549 - RNA, 19 nt, Artificial Sequence
  Description of Artificial Sequence: Synthetic oligonucleotide
gcagagcccucaguuugcu

SEQ ID NO: 2864550 - RNA, 19 nt, Artificial Sequence
  Description of Artificial Sequence: Synthetic oligonucleotide
cagagcccucaguuugcuu

SEQ ID NO: 2864551 - RNA, 19 nt, Artificial Sequence
  Description of Artificial Sequence: Synthetic oligonucleotide
cuuuuccucccuggcuguu

SEQ ID NO: 2864552 - RNA, 19 nt, Artificial Sequence
  Description of Artificial Sequence: Synthetic oligonucleotide
aggcuccgaggggcagcca

SEQ ID NO: 2864553 - RNA, 19 nt, Artificial Sequence
  Description of Artificial Sequence: Synthetic oligonucleotide
gggcucccaggagcugcgc

SEQ ID NO: 2864554 - RNA, 19 nt, Artificial Sequence
  Description of Artificial Sequence: Synthetic oligonucleotide
gcgcccaaggguacugccu

SEQ ID NO: 2864555 - RNA, 19 nt, Artificial Sequence
  Description of Artificial Sequence: Synthetic oligonucleotide
cccaaggguacugccuucu

SEQ ID NO: 2864556 - RNA, 19 nt, Artificial Sequence
  Description of Artificial Sequence: Synthetic oligonucleotide
guccgcucugggccccaau

SEQ ID NO: 2864557 - RNA, 19 nt, Artificial Sequence
  Description of Artificial Sequence: Synthetic oligonucleotide
ggaccuccguaggcuccga

SEQ ID NO: 2864558 - RNA, 19 nt, Artificial Sequence
  Description of Artificial Sequence: Synthetic oligonucleotide
ccggugccucaucguucug

SEQ ID NO: 2864559 - RNA, 19 nt, Artificial Sequence
  Description of Artificial Sequence: Synthetic oligonucleotide
ccagcaaaucuggcuugcu

SEQ ID NO: 2864560 - RNA, 19 nt, Artificial Sequence
  Description of Artificial Sequence: Synthetic oligonucleotide
gcaccucagggagggaguu

SEQ ID NO: 2864561 - RNA, 19 nt, Artificial Sequence
  Description of Artificial Sequence: Synthetic oligonucleotide
cggaagcuguugcacccua

SEQ ID NO: 2864562 - RNA, 19 nt, Artificial Sequence
  Description of Artificial Sequence: Synthetic oligonucleotide
ccuucucucugcggugggu

SEQ ID NO: 2864563 - RNA, 19 nt, Artificial Sequence
  Description of Artificial Sequence: Synthetic oligonucleotide
cgcccaaggguacugccuu

SEQ ID NO: 2864564 - RNA, 19 nt, Artificial Sequence
  Description of Artificial Sequence: Synthetic oligonucleotide
ccaguccagggaggcaccu

SEQ ID NO: 2864565 - RNA, 19 nt, Artificial Sequence
  Description of Artificial Sequence: Synthetic oligonucleotide
gggccccaauccugucgau

SEQ ID NO: 2864566 - RNA, 19 nt, Artificial Sequence
  Description of Artificial Sequence: Synthetic oligonucleotide
ccagauggucuagcagguu

SEQ ID NO: 2864567 - RNA, 19 nt, Artificial Sequence
  Description of Artificial Sequence: Synthetic oligonucleotide
ccucaucguucugcucacu

SEQ ID NO: 2864568 - RNA, 19 nt, Artificial Sequence
  Description of Artificial Sequence: Synthetic oligonucleotide
cgaugagaccaagcugcau

SEQ ID NO: 2864569 - RNA, 19 nt, Artificial Sequence
  Description of Artificial Sequence: Synthetic oligonucleotide
uuucccauaauaaagaacc

SEQ ID NO: 2864570 - RNA, 19 nt, Artificial Sequence
  Description of Artificial Sequence: Synthetic oligonucleotide
aauuuagacaaguuuuccc

SEQ ID NO: 2864571 - RNA, 19 nt, Artificial Sequence
  Description of Artificial Sequence: Synthetic oligonucleotide
cuuauauucauacacauug

SEQ ID NO: 2864572 - RNA, 19 nt, Artificial Sequence
  Description of Artificial Sequence: Synthetic oligonucleotide
uuuaauuuagacaaguuuu

SEQ ID NO: 2864573 - RNA, 19 nt, Artificial Sequence
  Description of Artificial Sequence: Synthetic oligonucleotide
aauaaagaaccauuccuag

SEQ ID NO: 2864574 - RNA, 19 nt, Artificial Sequence
  Description of Artificial Sequence: Synthetic oligonucleotide
aacuuccuuauauucauac

SEQ ID NO: 2864575 - RNA, 19 nt, Artificial Sequence
  Description of Artificial Sequence: Synthetic oligonucleotide
auuccuagaacuuucgggg

SEQ ID NO: 2864576 - RNA, 19 nt, Artificial Sequence
  Description of Artificial Sequence: Synthetic oligonucleotide
agugucagagcucugagcg

SEQ ID NO: 2864577 - RNA, 19 nt, Artificial Sequence
  Description of Artificial Sequence: Synthetic oligonucleotide
auaauaaagaaccauuccu

SEQ ID NO: 2864578 - RNA, 19 nt, Artificial Sequence
  Description of Artificial Sequence: Synthetic oligonucleotide
auuuugguuuaucugaaac

SEQ ID NO: 2864579 - RNA, 19 nt, Artificial Sequence
  Description of Artificial Sequence: Synthetic oligonucleotide
uauucauacacauugcagu

SEQ ID NO: 2864580 - RNA, 19 nt, Artificial Sequence
  Description of Artificial Sequence: Synthetic oligonucleotide
guuuaucugaaacuggagg

SEQ ID NO: 2864581 - RNA, 19 nt, Artificial Sequence
  Description of Artificial Sequence: Synthetic oligonucleotide
uuuaucugaaacuggagga

SEQ ID NO: 2864582 - RNA, 19 nt, Artificial Sequence
  Description of Artificial Sequence: Synthetic oligonucleotide
ugaccuauacaaauagccg

SEQ ID NO: 2864583 - RNA, 19 nt, Artificial Sequence
  Description of Artificial Sequence: Synthetic oligonucleotide
uaaagaaccauuccuagaa

SEQ ID NO: 2864584 - RNA, 19 nt, Artificial Sequence
  Description of Artificial Sequence: Synthetic oligonucleotide
aaagcacugugcuuuuagc

SEQ ID NO: 2864585 - RNA, 19 nt, Artificial Sequence
  Description of Artificial Sequence: Synthetic oligonucleotide
gaggcuuacacucagcugc

SEQ ID NO: 2864586 - RNA, 19 nt, Artificial Sequence
  Description of Artificial Sequence: Synthetic oligonucleotide
ugugcuuuuagcucucugg

SEQ ID NO: 2864587 - RNA, 19 nt, Artificial Sequence
  Description of Artificial Sequence: Synthetic oligonucleotide
uuuuauuacuuguuuauaa

SEQ ID NO: 2864588 - RNA, 19 nt, Artificial Sequence
  Description of Artificial Sequence: Synthetic oligonucleotide
aagugaccuauacaaauag

SEQ ID NO: 2864589 - RNA, 19 nt, Artificial Sequence
  Description of Artificial Sequence: Synthetic oligonucleotide
auacaaauagccgaccgcc

SEQ ID NO: 2864590 - RNA, 19 nt, Artificial Sequence
  Description of Artificial Sequence: Synthetic oligonucleotide
aucgcugaggcuuacacuc

SEQ ID NO: 2864591 - RNA, 19 nt, Artificial Sequence
  Description of Artificial Sequence: Synthetic oligonucleotide
cauaauaaagaaccauucc

SEQ ID NO: 2864592 - RNA, 19 nt, Artificial Sequence
  Description of Artificial Sequence: Synthetic oligonucleotide
auuuagacaaguuuuccca

SEQ ID NO: 2864593 - RNA, 19 nt, Artificial Sequence
  Description of Artificial Sequence: Synthetic oligonucleotide
aaagaaccauuccuagaac

SEQ ID NO: 2864594 - RNA, 19 nt, Artificial Sequence
  Description of Artificial Sequence: Synthetic oligonucleotide
aaguuuucccauaauaaag

SEQ ID NO: 2864595 - RNA, 19 nt, Artificial Sequence
  Description of Artificial Sequence: Synthetic oligonucleotide
cuuccuuauauucauacac

SEQ ID NO: 2864596 - RNA, 19 nt, Artificial Sequence
  Description of Artificial Sequence: Synthetic oligonucleotide
uuaauuuagacaaguuuuc

SEQ ID NO: 2864597 - RNA, 19 nt, Artificial Sequence
  Description of Artificial Sequence: Synthetic oligonucleotide
cauauuuugguuuaucuga

SEQ ID NO: 2864598 - RNA, 19 nt, Artificial Sequence
  Description of Artificial Sequence: Synthetic oligonucleotide
cauuccuagaacuuucggg

SEQ ID NO: 2864599 - RNA, 19 nt, Artificial Sequence
  Description of Artificial Sequence: Synthetic oligonucleotide
uaauaaagaaccauuccua

SEQ ID NO: 2864600 - RNA, 19 nt, Artificial Sequence
  Description of Artificial Sequence: Synthetic oligonucleotide
aagaaccauuccuagaacu

SEQ ID NO: 2864601 - RNA, 19 nt, Artificial Sequence
  Description of Artificial Sequence: Synthetic oligonucleotide
aaaucaagugaccuauaca

SEQ ID NO: 2864602 - RNA, 19 nt, Artificial Sequence
  Description of Artificial Sequence: Synthetic oligonucleotide
uuauauucauacacauugc

SEQ ID NO: 2864603 - RNA, 19 nt, Artificial Sequence
  Description of Artificial Sequence: Synthetic oligonucleotide
uauacaaauagccgaccgc

SEQ ID NO: 2864604 - RNA, 19 nt, Artificial Sequence
  Description of Artificial Sequence: Synthetic oligonucleotide
guaaguugcccuuaaauca

SEQ ID NO: 2864605 - RNA, 19 nt, Artificial Sequence
  Description of Artificial Sequence: Synthetic oligonucleotide
ugcaguauucccuggauug

SEQ ID NO: 2864606 - RNA, 19 nt, Artificial Sequence
  Description of Artificial Sequence: Synthetic oligonucleotide
uaaaucaagugaccuauac

SEQ ID NO: 2864607 - RNA, 19 nt, Artificial Sequence
  Description of Artificial Sequence: Synthetic oligonucleotide
agaacuuucgggguguagc

SEQ ID NO: 2864608 - RNA, 19 nt, Artificial Sequence
  Description of Artificial Sequence: Synthetic oligonucleotide
uuuugguuuaucugaaacu

SEQ ID NO: 2864609 - RNA, 19 nt, Artificial Sequence
  Description of Artificial Sequence: Synthetic oligonucleotide
uugcccuuaaaucaaguga

SEQ ID NO: 2864610 - RNA, 19 nt, Artificial Sequence
  Description of Artificial Sequence: Synthetic oligonucleotide
acaacaguuggccugcuag

SEQ ID NO: 2864611 - RNA, 19 nt, Artificial Sequence
  Description of Artificial Sequence: Synthetic oligonucleotide
ugcccuuaaaucaagugac

SEQ ID NO: 2864612 - RNA, 19 nt, Artificial Sequence
  Description of Artificial Sequence: Synthetic oligonucleotide
uuuauuacuuguuuauaau

SEQ ID NO: 2864613 - RNA, 19 nt, Artificial Sequence
  Description of Artificial Sequence: Synthetic oligonucleotide
ucugaauucuccuuuguau

SEQ ID NO: 2864614 - RNA, 19 nt, Artificial Sequence
  Description of Artificial Sequence: Synthetic oligonucleotide
uuuacacaagguaucgcug

SEQ ID NO: 2864615 - RNA, 19 nt, Artificial Sequence
  Description of Artificial Sequence: Synthetic oligonucleotide
ucuggauuucccuuagaag

SEQ ID NO: 2864616 - RNA, 19 nt, Artificial Sequence
  Description of Artificial Sequence: Synthetic oligonucleotide
cuauacaaauagccgaccg

SEQ ID NO: 2864617 - RNA, 19 nt, Artificial Sequence
  Description of Artificial Sequence: Synthetic oligonucleotide
ucaagugaccuauacaaau

SEQ ID NO: 2864618 - RNA, 19 nt, Artificial Sequence
  Description of Artificial Sequence: Synthetic oligonucleotide
ggcaguuuaauuuagacaa

SEQ ID NO: 2864619 - RNA, 19 nt, Artificial Sequence
  Description of Artificial Sequence: Synthetic oligonucleotide
auucauacacauugcagug

SEQ ID NO: 2864620 - RNA, 19 nt, Artificial Sequence
  Description of Artificial Sequence: Synthetic oligonucleotide
aagaccccagguaaguugc

SEQ ID NO: 2864621 - RNA, 19 nt, Artificial Sequence
  Description of Artificial Sequence: Synthetic oligonucleotide
uguucacagugucagagcu

SEQ ID NO: 2864622 - RNA, 19 nt, Artificial Sequence
  Description of Artificial Sequence: Synthetic oligonucleotide
uuuucccauaauaaagaac

SEQ ID NO: 2864623 - RNA, 19 nt, Artificial Sequence
  Description of Artificial Sequence: Synthetic oligonucleotide
uuccuuauauucauacaca

SEQ ID NO: 2864624 - RNA, 19 nt, Artificial Sequence
  Description of Artificial Sequence: Synthetic oligonucleotide
gugaccuauacaaauagcc

SEQ ID NO: 2864625 - RNA, 19 nt, Artificial Sequence
  Description of Artificial Sequence: Synthetic oligonucleotide
uggaacuuccuuauauuca

SEQ ID NO: 2864626 - RNA, 19 nt, Artificial Sequence
  Description of Artificial Sequence: Synthetic oligonucleotide
augccuugagaccugcacc

SEQ ID NO: 2864627 - RNA, 19 nt, Artificial Sequence
  Description of Artificial Sequence: Synthetic oligonucleotide
cugacaagcuugcaggugg

SEQ ID NO: 2864628 - RNA, 19 nt, Artificial Sequence
  Description of Artificial Sequence: Synthetic oligonucleotide
agcauauuuugguuuaucu

SEQ ID NO: 2864629 - RNA, 19 nt, Artificial Sequence
  Description of Artificial Sequence: Synthetic oligonucleotide
aagcacugugcuuuuagcu

SEQ ID NO: 2864630 - RNA, 19 nt, Artificial Sequence
  Description of Artificial Sequence: Synthetic oligonucleotide
gaaagcacugugcuuuuag

SEQ ID NO: 2864631 - RNA, 19 nt, Artificial Sequence
  Description of Artificial Sequence: Synthetic oligonucleotide
uaauuuagacaaguuuucc

SEQ ID NO: 2864632 - RNA, 19 nt, Artificial Sequence
  Description of Artificial Sequence: Synthetic oligonucleotide
acuuucgggguguagcugg

SEQ ID NO: 2864633 - RNA, 19 nt, Artificial Sequence
  Description of Artificial Sequence: Synthetic oligonucleotide
uugaagcaugggaagaccc

SEQ ID NO: 2864634 - RNA, 19 nt, Artificial Sequence
  Description of Artificial Sequence: Synthetic oligonucleotide
gaccuauacaaauagccga

SEQ ID NO: 2864635 - RNA, 19 nt, Artificial Sequence
  Description of Artificial Sequence: Synthetic oligonucleotide
cacauugcaguguucacag

SEQ ID NO: 2864636 - RNA, 19 nt, Artificial Sequence
  Description of Artificial Sequence: Synthetic oligonucleotide
uaguuuacacaagguaucg

SEQ ID NO: 2864637 - RNA, 19 nt, Artificial Sequence
  Description of Artificial Sequence: Synthetic oligonucleotide
cuugcagguggucagagug

SEQ ID NO: 2864638 - RNA, 19 nt, Artificial Sequence
  Description of Artificial Sequence: Synthetic oligonucleotide
uuaucugaaacuggaggag

SEQ ID NO: 2864639 - RNA, 19 nt, Artificial Sequence
  Description of Artificial Sequence: Synthetic oligonucleotide
caucauggcaugauggcag

SEQ ID NO: 2864640 - RNA, 19 nt, Artificial Sequence
  Description of Artificial Sequence: Synthetic oligonucleotide
cuuacacucagcugcuucc

SEQ ID NO: 2864641 - RNA, 19 nt, Artificial Sequence
  Description of Artificial Sequence: Synthetic oligonucleotide
uuacacaagguaucgcuga

SEQ ID NO: 2864642 - RNA, 19 nt, Artificial Sequence
  Description of Artificial Sequence: Synthetic oligonucleotide
uaucugaaacuggaggagg

SEQ ID NO: 2864643 - RNA, 19 nt, Artificial Sequence
  Description of Artificial Sequence: Synthetic oligonucleotide
uuagcucucuggaacuucc

SEQ ID NO: 2864644 - RNA, 19 nt, Artificial Sequence
  Description of Artificial Sequence: Synthetic oligonucleotide
auugaagcaugggaagacc

SEQ ID NO: 2864645 - RNA, 19 nt, Artificial Sequence
  Description of Artificial Sequence: Synthetic oligonucleotide
cuccaucauggcaugaugg

SEQ ID NO: 2864646 - RNA, 19 nt, Artificial Sequence
  Description of Artificial Sequence: Synthetic oligonucleotide
cacaagguaucgcugaggc

SEQ ID NO: 2864647 - RNA, 19 nt, Artificial Sequence
  Description of Artificial Sequence: Synthetic oligonucleotide
uaaguugcccuuaaaucaa

SEQ ID NO: 2864648 - RNA, 19 nt, Artificial Sequence
  Description of Artificial Sequence: Synthetic oligonucleotide
cauugcaguguucacagug

SEQ ID NO: 2864649 - RNA, 19 nt, Artificial Sequence
  Description of Artificial Sequence: Synthetic oligonucleotide
ugcuaguuuacacaaggua

SEQ ID NO: 2864650 - RNA, 19 nt, Artificial Sequence
  Description of Artificial Sequence: Synthetic oligonucleotide
acaaauagccgaccgccuc

SEQ ID NO: 2864651 - RNA, 19 nt, Artificial Sequence
  Description of Artificial Sequence: Synthetic oligonucleotide
auauucauacacauugcag

SEQ ID NO: 2864652 - RNA, 19 nt, Artificial Sequence
  Description of Artificial Sequence: Synthetic oligonucleotide
uuugccaggagcauauuuu

SEQ ID NO: 2864653 - RNA, 19 nt, Artificial Sequence
  Description of Artificial Sequence: Synthetic oligonucleotide
aguguucacagugucagag

SEQ ID NO: 2864654 - RNA, 19 nt, Artificial Sequence
  Description of Artificial Sequence: Synthetic oligonucleotide
gaaggugcaguauucccug

SEQ ID NO: 2864655 - RNA, 19 nt, Artificial Sequence
  Description of Artificial Sequence: Synthetic oligonucleotide
auaaagaaccauuccuaga

SEQ ID NO: 2864656 - RNA, 19 nt, Artificial Sequence
  Description of Artificial Sequence: Synthetic oligonucleotide
gaagaccccagguaaguug

SEQ ID NO: 2864657 - RNA, 19 nt, Artificial Sequence
  Description of Artificial Sequence: Synthetic oligonucleotide
ugaagcaugggaagacccc

SEQ ID NO: 2864658 - RNA, 19 nt, Artificial Sequence
  Description of Artificial Sequence: Synthetic oligonucleotide
uccuuauauucauacacau

SEQ ID NO: 2864659 - RNA, 19 nt, Artificial Sequence
  Description of Artificial Sequence: Synthetic oligonucleotide
gauggcaguagucaccuga

SEQ ID NO: 2864660 - RNA, 19 nt, Artificial Sequence
  Description of Artificial Sequence: Synthetic oligonucleotide
uagaaggugcaguauuccc

SEQ ID NO: 2864661 - RNA, 19 nt, Artificial Sequence
  Description of Artificial Sequence: Synthetic oligonucleotide
cuuagaaggugcaguauuc

SEQ ID NO: 2864662 - RNA, 19 nt, Artificial Sequence
  Description of Artificial Sequence: Synthetic oligonucleotide
uggauuucccuuagaaggu

SEQ ID NO: 2864663 - RNA, 19 nt, Artificial Sequence
  Description of Artificial Sequence: Synthetic oligonucleotide
caugauggcaguagucacc

SEQ ID NO: 2864664 - RNA, 19 nt, Artificial Sequence
  Description of Artificial Sequence: Synthetic oligonucleotide
ucggcaguuuaauuuagac

SEQ ID NO: 2864665 - RNA, 19 nt, Artificial Sequence
  Description of Artificial Sequence: Synthetic oligonucleotide
uccaucauggcaugauggc

SEQ ID NO: 2864666 - RNA, 19 nt, Artificial Sequence
  Description of Artificial Sequence: Synthetic oligonucleotide
aaccauuccuagaacuuuc

SEQ ID NO: 2864667 - RNA, 19 nt, Artificial Sequence
  Description of Artificial Sequence: Synthetic oligonucleotide
gguaaguugcccuuaaauc

SEQ ID NO: 2864668 - RNA, 19 nt, Artificial Sequence
  Description of Artificial Sequence: Synthetic oligonucleotide
uagacaaguuuucccauaa

SEQ ID NO: 2864669 - RNA, 19 nt, Artificial Sequence
  Description of Artificial Sequence: Synthetic oligonucleotide
uauucccuggauugaagca

SEQ ID NO: 2864670 - RNA, 19 nt, Artificial Sequence
  Description of Artificial Sequence: Synthetic oligonucleotide
gacaaguuuucccauaaua

SEQ ID NO: 2864671 - RNA, 19 nt, Artificial Sequence
  Description of Artificial Sequence: Synthetic oligonucleotide
guauucccuggauugaagc

SEQ ID NO: 2864672 - RNA, 19 nt, Artificial Sequence
  Description of Artificial Sequence: Synthetic oligonucleotide
agugaccuauacaaauagc

SEQ ID NO: 2864673 - RNA, 19 nt, Artificial Sequence
  Description of Artificial Sequence: Synthetic oligonucleotide
accuauacaaauagccgac

SEQ ID NO: 2864674 - RNA, 19 nt, Artificial Sequence
  Description of Artificial Sequence: Synthetic oligonucleotide
aguuuacacaagguaucgc

SEQ ID NO: 2864675 - RNA, 19 nt, Artificial Sequence
  Description of Artificial Sequence: Synthetic oligonucleotide
cuuccugacaagcuugcag

SEQ ID NO: 2864676 - RNA, 19 nt, Artificial Sequence
  Description of Artificial Sequence: Synthetic oligonucleotide
uuagaaggugcaguauucc

SEQ ID NO: 2864677 - RNA, 19 nt, Artificial Sequence
  Description of Artificial Sequence: Synthetic oligonucleotide
aguuuucccauaauaaaga

SEQ ID NO: 2864678 - RNA, 19 nt, Artificial Sequence
  Description of Artificial Sequence: Synthetic oligonucleotide
cuggaacuuccuuauauuc

SEQ ID NO: 2864679 - RNA, 19 nt, Artificial Sequence
  Description of Artificial Sequence: Synthetic oligonucleotide
uacacaagguaucgcugag

SEQ ID NO: 2864680 - RNA, 19 nt, Artificial Sequence
  Description of Artificial Sequence: Synthetic oligonucleotide
agguaaguugcccuuaaau

SEQ ID NO: 2864681 - RNA, 19 nt, Artificial Sequence
  Description of Artificial Sequence: Synthetic oligonucleotide
ugccaggagcauauuuugg

SEQ ID NO: 2864682 - RNA, 19 nt, Artificial Sequence
  Description of Artificial Sequence: Synthetic oligonucleotide
uuuagacaaguuuucccau

SEQ ID NO: 2864683 - RNA, 19 nt, Artificial Sequence
  Description of Artificial Sequence: Synthetic oligonucleotide
ucauacacauugcaguguu

SEQ ID NO: 2864684 - RNA, 19 nt, Artificial Sequence
  Description of Artificial Sequence: Synthetic oligonucleotide
auacacauugcaguguuca

SEQ ID NO: 2864685 - RNA, 19 nt, Artificial Sequence
  Description of Artificial Sequence: Synthetic oligonucleotide
guugcccuuaaaucaagug

SEQ ID NO: 2864686 - RNA, 19 nt, Artificial Sequence
  Description of Artificial Sequence: Synthetic oligonucleotide
uugccaggagcauauuuug

SEQ ID NO: 2864687 - RNA, 19 nt, Artificial Sequence
  Description of Artificial Sequence: Synthetic oligonucleotide
uccuagaacuuucggggug

SEQ ID NO: 2864688 - RNA, 19 nt, Artificial Sequence
  Description of Artificial Sequence: Synthetic oligonucleotide
ugaauucuccuuuguauuu

SEQ ID NO: 2864689 - RNA, 19 nt, Artificial Sequence
  Description of Artificial Sequence: Synthetic oligonucleotide
uggaggaggugaaagcacu

SEQ ID NO: 2864690 - RNA, 19 nt, Artificial Sequence
  Description of Artificial Sequence: Synthetic oligonucleotide
uucccauaauaaagaacca

SEQ ID NO: 2864691 - RNA, 19 nt, Artificial Sequence
  Description of Artificial Sequence: Synthetic oligonucleotide
gauugaagcaugggaagac

SEQ ID NO: 2864692 - RNA, 19 nt, Artificial Sequence
  Description of Artificial Sequence: Synthetic oligonucleotide
acuuccuuauauucauaca

SEQ ID NO: 2864693 - RNA, 19 nt, Artificial Sequence
  Description of Artificial Sequence: Synthetic oligonucleotide
ugccuugagaccugcaccu

SEQ ID NO: 2864694 - RNA, 19 nt, Artificial Sequence
  Description of Artificial Sequence: Synthetic oligonucleotide
guuuacacaagguaucgcu

SEQ ID NO: 2864695 - RNA, 19 nt, Artificial Sequence
  Description of Artificial Sequence: Synthetic oligonucleotide
caagcuugcagguggucag

SEQ ID NO: 2864696 - RNA, 19 nt, Artificial Sequence
  Description of Artificial Sequence: Synthetic oligonucleotide
agugucugaauucuccuuu

SEQ ID NO: 2864697 - RNA, 19 nt, Artificial Sequence
  Description of Artificial Sequence: Synthetic oligonucleotide
aaggugcaguauucccugg

SEQ ID NO: 2864698 - RNA, 19 nt, Artificial Sequence
  Description of Artificial Sequence: Synthetic oligonucleotide
uagccgaccgccuccauca

SEQ ID NO: 2864699 - RNA, 19 nt, Artificial Sequence
  Description of Artificial Sequence: Synthetic oligonucleotide
caaauagccgaccgccucc

SEQ ID NO: 2864700 - RNA, 19 nt, Artificial Sequence
  Description of Artificial Sequence: Synthetic oligonucleotide
ccugcuaguuuacacaagg

SEQ ID NO: 2864701 - RNA, 19 nt, Artificial Sequence
  Description of Artificial Sequence: Synthetic oligonucleotide
uggucagagugucugaauu

SEQ ID NO: 2864702 - RNA, 19 nt, Artificial Sequence
  Description of Artificial Sequence: Synthetic oligonucleotide
acagugucagagcucugag

SEQ ID NO: 2864703 - RNA, 19 nt, Artificial Sequence
  Description of Artificial Sequence: Synthetic oligonucleotide
cuggauugaagcaugggaa

SEQ ID NO: 2864704 - RNA, 19 nt, Artificial Sequence
  Description of Artificial Sequence: Synthetic oligonucleotide
ugaggcuuacacucagcug

SEQ ID NO: 2864705 - RNA, 19 nt, Artificial Sequence
  Description of Artificial Sequence: Synthetic oligonucleotide
ccauaauaaagaaccauuc

SEQ ID NO: 2864706 - RNA, 19 nt, Artificial Sequence
  Description of Artificial Sequence: Synthetic oligonucleotide
uucccuggauugaagcaug

SEQ ID NO: 2864707 - RNA, 19 nt, Artificial Sequence
  Description of Artificial Sequence: Synthetic oligonucleotide
gcuuuuagcucucuggaac

SEQ ID NO: 2864708 - RNA, 19 nt, Artificial Sequence
  Description of Artificial Sequence: Synthetic oligonucleotide
uacaaauagccgaccgccu

SEQ ID NO: 2864709 - RNA, 19 nt, Artificial Sequence
  Description of Artificial Sequence: Synthetic oligonucleotide
aggaggugaaagcacugug

SEQ ID NO: 2864710 - RNA, 19 nt, Artificial Sequence
  Description of Artificial Sequence: Synthetic oligonucleotide
uuagacaaguuuucccaua

SEQ ID NO: 2864711 - RNA, 19 nt, Artificial Sequence
  Description of Artificial Sequence: Synthetic oligonucleotide
ucuggaacuuccuuauauu

SEQ ID NO: 2864712 - RNA, 19 nt, Artificial Sequence
  Description of Artificial Sequence: Synthetic oligonucleotide
caugccuugagaccugcac

SEQ ID NO: 2864713 - RNA, 19 nt, Artificial Sequence
  Description of Artificial Sequence: Synthetic oligonucleotide
uggccugcuaguuuacaca

SEQ ID NO: 2864714 - RNA, 19 nt, Artificial Sequence
  Description of Artificial Sequence: Synthetic oligonucleotide
guaucgcugaggcuuacac

SEQ ID NO: 2864715 - RNA, 19 nt, Artificial Sequence
  Description of Artificial Sequence: Synthetic oligonucleotide
uucgggguguagcuggcgc

SEQ ID NO: 2864716 - RNA, 19 nt, Artificial Sequence
  Description of Artificial Sequence: Synthetic oligonucleotide
auagccgaccgccuccauc

SEQ ID NO: 2864717 - RNA, 19 nt, Artificial Sequence
  Description of Artificial Sequence: Synthetic oligonucleotide
ugucugaauucuccuuugu

SEQ ID NO: 2864718 - RNA, 19 nt, Artificial Sequence
  Description of Artificial Sequence: Synthetic oligonucleotide
acuggaggaggugaaagca

SEQ ID NO: 2864719 - RNA, 19 nt, Artificial Sequence
  Description of Artificial Sequence: Synthetic oligonucleotide
uuggccugcuaguuuacac

SEQ ID NO: 2864720 - RNA, 19 nt, Artificial Sequence
  Description of Artificial Sequence: Synthetic oligonucleotide
uucggcaguuuaauuuaga

SEQ ID NO: 2864721 - RNA, 19 nt, Artificial Sequence
  Description of Artificial Sequence: Synthetic oligonucleotide
agcaugggaagaccccagg

SEQ ID NO: 2864722 - RNA, 19 nt, Artificial Sequence
  Description of Artificial Sequence: Synthetic oligonucleotide
ucccauaauaaagaaccau

SEQ ID NO: 2864723 - RNA, 19 nt, Artificial Sequence
  Description of Artificial Sequence: Synthetic oligonucleotide
cauggcaugauggcaguag

SEQ ID NO: 2864724 - RNA, 19 nt, Artificial Sequence
  Description of Artificial Sequence: Synthetic oligonucleotide
uaucgcugaggcuuacacu

SEQ ID NO: 2864725 - RNA, 19 nt, Artificial Sequence
  Description of Artificial Sequence: Synthetic oligonucleotide
ugcuuccugacaagcuugc

SEQ ID NO: 2864726 - RNA, 19 nt, Artificial Sequence
  Description of Artificial Sequence: Synthetic oligonucleotide
uuaaaucaagugaccuaua

SEQ ID NO: 2864727 - RNA, 19 nt, Artificial Sequence
  Description of Artificial Sequence: Synthetic oligonucleotide
guuuucccauaauaaagaa

SEQ ID NO: 2864728 - RNA, 19 nt, Artificial Sequence
  Description of Artificial Sequence: Synthetic oligonucleotide
uucauacacauugcagugu

SEQ ID NO: 2864729 - RNA, 19 nt, Artificial Sequence
  Description of Artificial Sequence: Synthetic oligonucleotide
uagucaccugacaacaguu

SEQ ID NO: 2864730 - RNA, 19 nt, Artificial Sequence
  Description of Artificial Sequence: Synthetic oligonucleotide
caccugacaacaguuggcc

SEQ ID NO: 2864731 - RNA, 19 nt, Artificial Sequence
  Description of Artificial Sequence: Synthetic oligonucleotide
uuucccuuagaaggugcag

SEQ ID NO: 2864732 - RNA, 19 nt, Artificial Sequence
  Description of Artificial Sequence: Synthetic oligonucleotide
uucccuuagaaggugcagu

SEQ ID NO: 2864733 - RNA, 19 nt, Artificial Sequence
  Description of Artificial Sequence: Synthetic oligonucleotide
ucccuggauugaagcaugg

SEQ ID NO: 2864734 - RNA, 19 nt, Artificial Sequence
  Description of Artificial Sequence: Synthetic oligonucleotide
ucugaaacuggaggaggug

SEQ ID NO: 2864735 - RNA, 19 nt, Artificial Sequence
  Description of Artificial Sequence: Synthetic oligonucleotide
cuggcgcaugccuugagac

SEQ ID NO: 2864736 - RNA, 19 nt, Artificial Sequence
  Description of Artificial Sequence: Synthetic oligonucleotide
uuccuagaacuuucggggu

SEQ ID NO: 2864737 - RNA, 19 nt, Artificial Sequence
  Description of Artificial Sequence: Synthetic oligonucleotide
agaaggugcaguauucccu

SEQ ID NO: 2864738 - RNA, 19 nt, Artificial Sequence
  Description of Artificial Sequence: Synthetic oligonucleotide
cuucggcaguuuaauuuag

SEQ ID NO: 2864739 - RNA, 19 nt, Artificial Sequence
  Description of Artificial Sequence: Synthetic oligonucleotide
acacauugcaguguucaca

SEQ ID NO: 2864740 - RNA, 19 nt, Artificial Sequence
  Description of Artificial Sequence: Synthetic oligonucleotide
gugcuuuuagcucucugga

SEQ ID NO: 2864741 - RNA, 19 nt, Artificial Sequence
  Description of Artificial Sequence: Synthetic oligonucleotide
augauggcaguagucaccu

SEQ ID NO: 2864742 - RNA, 19 nt, Artificial Sequence
  Description of Artificial Sequence: Synthetic oligonucleotide
uacacauugcaguguucac

SEQ ID NO: 2864743 - RNA, 19 nt, Artificial Sequence
  Description of Artificial Sequence: Synthetic oligonucleotide
gaggugaaagcacugugcu

SEQ ID NO: 2864744 - RNA, 19 nt, Artificial Sequence
  Description of Artificial Sequence: Synthetic oligonucleotide
ugcuuuuagcucucuggaa

SEQ ID NO: 2864745 - RNA, 19 nt, Artificial Sequence
  Description of Artificial Sequence: Synthetic oligonucleotide
aggagcauauuuugguuua

SEQ ID NO: 2864746 - RNA, 19 nt, Artificial Sequence
  Description of Artificial Sequence: Synthetic oligonucleotide
aaccucuggauuucccuua

SEQ ID NO: 2864747 - RNA, 19 nt, Artificial Sequence
  Description of Artificial Sequence: Synthetic oligonucleotide
acaagcuugcaggugguca

SEQ ID NO: 2864748 - RNA, 19 nt, Artificial Sequence
  Description of Artificial Sequence: Synthetic oligonucleotide
cuggaggaggugaaagcac

SEQ ID NO: 2864749 - RNA, 19 nt, Artificial Sequence
  Description of Artificial Sequence: Synthetic oligonucleotide
agcucugagcgcuucggca

SEQ ID NO: 2864750 - RNA, 19 nt, Artificial Sequence
  Description of Artificial Sequence: Synthetic oligonucleotide
auggcaguagucaccugac

SEQ ID NO: 2864751 - RNA, 19 nt, Artificial Sequence
  Description of Artificial Sequence: Synthetic oligonucleotide
uugcaguguucacaguguc

SEQ ID NO: 2864752 - RNA, 19 nt, Artificial Sequence
  Description of Artificial Sequence: Synthetic oligonucleotide
acacucagcugcuuccuga

SEQ ID NO: 2864753 - RNA, 19 nt, Artificial Sequence
  Description of Artificial Sequence: Synthetic oligonucleotide
cugcuuccugacaagcuug

SEQ ID NO: 2864754 - RNA, 19 nt, Artificial Sequence
  Description of Artificial Sequence: Synthetic oligonucleotide
ucagagugucugaauucuc

SEQ ID NO: 2864755 - RNA, 19 nt, Artificial Sequence
  Description of Artificial Sequence: Synthetic oligonucleotide
uguagcuggcgcaugccuu

SEQ ID NO: 2864756 - RNA, 19 nt, Artificial Sequence
  Description of Artificial Sequence: Synthetic oligonucleotide
guguucacagugucagagc

SEQ ID NO: 2864757 - RNA, 19 nt, Artificial Sequence
  Description of Artificial Sequence: Synthetic oligonucleotide
gaagcaugggaagacccca

SEQ ID NO: 2864758 - RNA, 19 nt, Artificial Sequence
  Description of Artificial Sequence: Synthetic oligonucleotide
guagcuggcgcaugccuug

SEQ ID NO: 2864759 - RNA, 19 nt, Artificial Sequence
  Description of Artificial Sequence: Synthetic oligonucleotide
auauuuugguuuaucugaa

SEQ ID NO: 2864760 - RNA, 19 nt, Artificial Sequence
  Description of Artificial Sequence: Synthetic oligonucleotide
gugucugaauucuccuuug

SEQ ID NO: 2864761 - RNA, 19 nt, Artificial Sequence
  Description of Artificial Sequence: Synthetic oligonucleotide
aaguugcccuuaaaucaag

SEQ ID NO: 2864762 - RNA, 19 nt, Artificial Sequence
  Description of Artificial Sequence: Synthetic oligonucleotide
ucccuuagaaggugcagua

SEQ ID NO: 2864763 - RNA, 19 nt, Artificial Sequence
  Description of Artificial Sequence: Synthetic oligonucleotide
aacuuucgggguguagcug

SEQ ID NO: 2864764 - RNA, 19 nt, Artificial Sequence
  Description of Artificial Sequence: Synthetic oligonucleotide
uugcagguggucagagugu

SEQ ID NO: 2864765 - RNA, 19 nt, Artificial Sequence
  Description of Artificial Sequence: Synthetic oligonucleotide
agagcucugagcgcuucgg

SEQ ID NO: 2864766 - RNA, 19 nt, Artificial Sequence
  Description of Artificial Sequence: Synthetic oligonucleotide
auugcaguguucacagugu

SEQ ID NO: 2864767 - RNA, 19 nt, Artificial Sequence
  Description of Artificial Sequence: Synthetic oligonucleotide
cagugucagagcucugagc

SEQ ID NO: 2864768 - RNA, 19 nt, Artificial Sequence
  Description of Artificial Sequence: Synthetic oligonucleotide
aguauucccuggauugaag

SEQ ID NO: 2864769 - RNA, 19 nt, Artificial Sequence
  Description of Artificial Sequence: Synthetic oligonucleotide
acacaagguaucgcugagg

SEQ ID NO: 2864770 - RNA, 19 nt, Artificial Sequence
  Description of Artificial Sequence: Synthetic oligonucleotide
uccugacaagcuugcaggu

SEQ ID NO: 2864771 - RNA, 19 nt, Artificial Sequence
  Description of Artificial Sequence: Synthetic oligonucleotide
accugcaccuccugcuccg

SEQ ID NO: 2864772 - RNA, 19 nt, Artificial Sequence
  Description of Artificial Sequence: Synthetic oligonucleotide
aacaguuggccugcuaguu

SEQ ID NO: 2864773 - RNA, 19 nt, Artificial Sequence
  Description of Artificial Sequence: Synthetic oligonucleotide
auucccuggauugaagcau

SEQ ID NO: 2864774 - RNA, 19 nt, Artificial Sequence
  Description of Artificial Sequence: Synthetic oligonucleotide
uuuagcucucuggaacuuc

SEQ ID NO: 2864775 - RNA, 19 nt, Artificial Sequence
  Description of Artificial Sequence: Synthetic oligonucleotide
accucuggauuucccuuag

SEQ ID NO: 2864776 - RNA, 19 nt, Artificial Sequence
  Description of Artificial Sequence: Synthetic oligonucleotide
uggcaugauggcaguaguc

SEQ ID NO: 2864777 - RNA, 19 nt, Artificial Sequence
  Description of Artificial Sequence: Synthetic oligonucleotide
aaauagccgaccgccucca

SEQ ID NO: 2864778 - RNA, 19 nt, Artificial Sequence
  Description of Artificial Sequence: Synthetic oligonucleotide
caagugaccuauacaaaua

SEQ ID NO: 2864779 - RNA, 19 nt, Artificial Sequence
  Description of Artificial Sequence: Synthetic oligonucleotide
uggcgcaugccuugagacc

SEQ ID NO: 2864780 - RNA, 19 nt, Artificial Sequence
  Description of Artificial Sequence: Synthetic oligonucleotide
ugacaagcuugcagguggu

SEQ ID NO: 2864781 - RNA, 19 nt, Artificial Sequence
  Description of Artificial Sequence: Synthetic oligonucleotide
cagguggucagagugucug

SEQ ID NO: 2864782 - RNA, 19 nt, Artificial Sequence
  Description of Artificial Sequence: Synthetic oligonucleotide
ggaggugaaagcacugugc

SEQ ID NO: 2864783 - RNA, 19 nt, Artificial Sequence
  Description of Artificial Sequence: Synthetic oligonucleotide
aucauggcaugauggcagu

SEQ ID NO: 2864784 - RNA, 19 nt, Artificial Sequence
  Description of Artificial Sequence: Synthetic oligonucleotide
ccgaccgccuccaucaugg

SEQ ID NO: 2864785 - RNA, 19 nt, Artificial Sequence
  Description of Artificial Sequence: Synthetic oligonucleotide
gguuuaucugaaacuggag

SEQ ID NO: 2864786 - RNA, 19 nt, Artificial Sequence
  Description of Artificial Sequence: Synthetic oligonucleotide
acaagguaucgcugaggcu

SEQ ID NO: 2864787 - RNA, 19 nt, Artificial Sequence
  Description of Artificial Sequence: Synthetic oligonucleotide
aagcaugggaagaccccag

SEQ ID NO: 2864788 - RNA, 19 nt, Artificial Sequence
  Description of Artificial Sequence: Synthetic oligonucleotide
gcaguagucaccugacaac

SEQ ID NO: 2864789 - RNA, 19 nt, Artificial Sequence
  Description of Artificial Sequence: Synthetic oligonucleotide
agaaccauuccuagaacuu

SEQ ID NO: 2864790 - RNA, 19 nt, Artificial Sequence
  Description of Artificial Sequence: Synthetic oligonucleotide
uuacacucagcugcuuccu

SEQ ID NO: 2864791 - RNA, 19 nt, Artificial Sequence
  Description of Artificial Sequence: Synthetic oligonucleotide
aguagucaccugacaacag

SEQ ID NO: 2864792 - RNA, 19 nt, Artificial Sequence
  Description of Artificial Sequence: Synthetic oligonucleotide
gaacuuucgggguguagcu

SEQ ID NO: 2864793 - RNA, 19 nt, Artificial Sequence
  Description of Artificial Sequence: Synthetic oligonucleotide
accccagguaaguugcccu

SEQ ID NO: 2864794 - RNA, 19 nt, Artificial Sequence
  Description of Artificial Sequence: Synthetic oligonucleotide
uagaacuuucgggguguag

SEQ ID NO: 2864795 - RNA, 19 nt, Artificial Sequence
  Description of Artificial Sequence: Synthetic oligonucleotide
aucugaaacuggaggaggu

SEQ ID NO: 2864796 - RNA, 19 nt, Artificial Sequence
  Description of Artificial Sequence: Synthetic oligonucleotide
agucaccugacaacaguug

SEQ ID NO: 2864797 - RNA, 19 nt, Artificial Sequence
  Description of Artificial Sequence: Synthetic oligonucleotide
uggcaguagucaccugaca

SEQ ID NO: 2864798 - RNA, 19 nt, Artificial Sequence
  Description of Artificial Sequence: Synthetic oligonucleotide
ugcuccggaaccucuggau

SEQ ID NO: 2864799 - RNA, 19 nt, Artificial Sequence
  Description of Artificial Sequence: Synthetic oligonucleotide
gcucugagcgcuucggcag

SEQ ID NO: 2864800 - RNA, 19 nt, Artificial Sequence
  Description of Artificial Sequence: Synthetic oligonucleotide
ggcaguagucaccugacaa

SEQ ID NO: 2864801 - RNA, 19 nt, Artificial Sequence
  Description of Artificial Sequence: Synthetic oligonucleotide
cuuuuagcucucuggaacu

SEQ ID NO: 2864802 - RNA, 19 nt, Artificial Sequence
  Description of Artificial Sequence: Synthetic oligonucleotide
cacucagcugcuuccugac

SEQ ID NO: 2864803 - RNA, 19 nt, Artificial Sequence
  Description of Artificial Sequence: Synthetic oligonucleotide
cauacacauugcaguguuc

SEQ ID NO: 2864804 - RNA, 19 nt, Artificial Sequence
  Description of Artificial Sequence: Synthetic oligonucleotide
cugaaacuggaggagguga

SEQ ID NO: 2864805 - RNA, 19 nt, Artificial Sequence
  Description of Artificial Sequence: Synthetic oligonucleotide
aggugcaguauucccugga

SEQ ID NO: 2864806 - RNA, 19 nt, Artificial Sequence
  Description of Artificial Sequence: Synthetic oligonucleotide
uugagaccugcaccuccug

SEQ ID NO: 2864807 - RNA, 19 nt, Artificial Sequence
  Description of Artificial Sequence: Synthetic oligonucleotide
caguagucaccugacaaca

SEQ ID NO: 2864808 - RNA, 19 nt, Artificial Sequence
  Description of Artificial Sequence: Synthetic oligonucleotide
uccugcuccggaaccucug

SEQ ID NO: 2864809 - RNA, 19 nt, Artificial Sequence
  Description of Artificial Sequence: Synthetic oligonucleotide
gagcucugagcgcuucggc

SEQ ID NO: 2864810 - RNA, 19 nt, Artificial Sequence
  Description of Artificial Sequence: Synthetic oligonucleotide
cuuucgggguguagcuggc

SEQ ID NO: 2864811 - RNA, 19 nt, Artificial Sequence
  Description of Artificial Sequence: Synthetic oligonucleotide
uuucgggguguagcuggcg

SEQ ID NO: 2864812 - RNA, 19 nt, Artificial Sequence
  Description of Artificial Sequence: Synthetic oligonucleotide
ucgcugaggcuuacacuca

SEQ ID NO: 2864813 - RNA, 19 nt, Artificial Sequence
  Description of Artificial Sequence: Synthetic oligonucleotide
ggucagagugucugaauuc

SEQ ID NO: 2864814 - RNA, 19 nt, Artificial Sequence
  Description of Artificial Sequence: Synthetic oligonucleotide
ucgggguguagcuggcgca

SEQ ID NO: 2864815 - RNA, 19 nt, Artificial Sequence
  Description of Artificial Sequence: Synthetic oligonucleotide
acaguuggccugcuaguuu

SEQ ID NO: 2864816 - RNA, 19 nt, Artificial Sequence
  Description of Artificial Sequence: Synthetic oligonucleotide
accgccuccaucauggcau

SEQ ID NO: 2864817 - RNA, 19 nt, Artificial Sequence
  Description of Artificial Sequence: Synthetic oligonucleotide
guagucaccugacaacagu

SEQ ID NO: 2864818 - RNA, 19 nt, Artificial Sequence
  Description of Artificial Sequence: Synthetic oligonucleotide
ugcagguggucagaguguc

SEQ ID NO: 2864819 - RNA, 19 nt, Artificial Sequence
  Description of Artificial Sequence: Synthetic oligonucleotide
accugacaacaguuggccu

SEQ ID NO: 2864820 - RNA, 19 nt, Artificial Sequence
  Description of Artificial Sequence: Synthetic oligonucleotide
ugagcgcuucggcaguuua

SEQ ID NO: 2864821 - RNA, 19 nt, Artificial Sequence
  Description of Artificial Sequence: Synthetic oligonucleotide
agacaaguuuucccauaau

SEQ ID NO: 2864822 - RNA, 19 nt, Artificial Sequence
  Description of Artificial Sequence: Synthetic oligonucleotide
auuucccuuagaaggugca

SEQ ID NO: 2864823 - RNA, 19 nt, Artificial Sequence
  Description of Artificial Sequence: Synthetic oligonucleotide
gagaccugcaccuccugcu

SEQ ID NO: 2864824 - RNA, 19 nt, Artificial Sequence
  Description of Artificial Sequence: Synthetic oligonucleotide
ugcaccuccugcuccggaa

SEQ ID NO: 2864825 - RNA, 19 nt, Artificial Sequence
  Description of Artificial Sequence: Synthetic oligonucleotide
gugucagagcucugagcgc

SEQ ID NO: 2864826 - RNA, 19 nt, Artificial Sequence
  Description of Artificial Sequence: Synthetic oligonucleotide
caagguaucgcugaggcuu

SEQ ID NO: 2864827 - RNA, 19 nt, Artificial Sequence
  Description of Artificial Sequence: Synthetic oligonucleotide
uuuuagcucucuggaacuu

SEQ ID NO: 2864828 - RNA, 19 nt, Artificial Sequence
  Description of Artificial Sequence: Synthetic oligonucleotide
aucaagugaccuauacaaa

SEQ ID NO: 2864829 - RNA, 19 nt, Artificial Sequence
  Description of Artificial Sequence: Synthetic oligonucleotide
gucugaauucuccuuugua

SEQ ID NO: 2864830 - RNA, 19 nt, Artificial Sequence
  Description of Artificial Sequence: Synthetic oligonucleotide
ccuggauugaagcauggga

SEQ ID NO: 2864831 - RNA, 19 nt, Artificial Sequence
  Description of Artificial Sequence: Synthetic oligonucleotide
gcuaguuuacacaagguau

SEQ ID NO: 2864832 - RNA, 19 nt, Artificial Sequence
  Description of Artificial Sequence: Synthetic oligonucleotide
gaccccagguaaguugccc

SEQ ID NO: 2864833 - RNA, 19 nt, Artificial Sequence
  Description of Artificial Sequence: Synthetic oligonucleotide
caugggaagaccccaggua

SEQ ID NO: 2864834 - RNA, 19 nt, Artificial Sequence
  Description of Artificial Sequence: Synthetic oligonucleotide
ggaacuuccuuauauucau

SEQ ID NO: 2864835 - RNA, 19 nt, Artificial Sequence
  Description of Artificial Sequence: Synthetic oligonucleotide
cagagcucugagcgcuucg

SEQ ID NO: 2864836 - RNA, 19 nt, Artificial Sequence
  Description of Artificial Sequence: Synthetic oligonucleotide
gcaugauggcaguagucac

SEQ ID NO: 2864837 - RNA, 19 nt, Artificial Sequence
  Description of Artificial Sequence: Synthetic oligonucleotide
cugaauucuccuuuguauu

SEQ ID NO: 2864838 - RNA, 19 nt, Artificial Sequence
  Description of Artificial Sequence: Synthetic oligonucleotide
uagcucucuggaacuuccu

SEQ ID NO: 2864839 - RNA, 19 nt, Artificial Sequence
  Description of Artificial Sequence: Synthetic oligonucleotide
ccauuccuagaacuuucgg

SEQ ID NO: 2864840 - RNA, 19 nt, Artificial Sequence
  Description of Artificial Sequence: Synthetic oligonucleotide
cugugcuuuuagcucucug

SEQ ID NO: 2864841 - RNA, 19 nt, Artificial Sequence
  Description of Artificial Sequence: Synthetic oligonucleotide
ucucuggaacuuccuuaua

SEQ ID NO: 2864842 - RNA, 19 nt, Artificial Sequence
  Description of Artificial Sequence: Synthetic oligonucleotide
aguuggccugcuaguuuac

SEQ ID NO: 2864843 - RNA, 19 nt, Artificial Sequence
  Description of Artificial Sequence: Synthetic oligonucleotide
agcuugcagguggucagag

SEQ ID NO: 2864844 - RNA, 19 nt, Artificial Sequence
  Description of Artificial Sequence: Synthetic oligonucleotide
gcaguuuaauuuagacaag

SEQ ID NO: 2864845 - RNA, 19 nt, Artificial Sequence
  Description of Artificial Sequence: Synthetic oligonucleotide
gucagagugucugaauucu

SEQ ID NO: 2864846 - RNA, 19 nt, Artificial Sequence
  Description of Artificial Sequence: Synthetic oligonucleotide
gcuuacacucagcugcuuc

SEQ ID NO: 2864847 - RNA, 19 nt, Artificial Sequence
  Description of Artificial Sequence: Synthetic oligonucleotide
aguugcccuuaaaucaagu

SEQ ID NO: 2864848 - RNA, 19 nt, Artificial Sequence
  Description of Artificial Sequence: Synthetic oligonucleotide
aggugaaagcacugugcuu

SEQ ID NO: 2864849 - RNA, 19 nt, Artificial Sequence
  Description of Artificial Sequence: Synthetic oligonucleotide
cugaggcuuacacucagcu

SEQ ID NO: 2864850 - RNA, 19 nt, Artificial Sequence
  Description of Artificial Sequence: Synthetic oligonucleotide
agcgcuucggcaguuuaau

SEQ ID NO: 2864851 - RNA, 19 nt, Artificial Sequence
  Description of Artificial Sequence: Synthetic oligonucleotide
cucuggaacuuccuuauau

SEQ ID NO: 2864852 - RNA, 19 nt, Artificial Sequence
  Description of Artificial Sequence: Synthetic oligonucleotide
ggauugaagcaugggaaga

SEQ ID NO: 2864853 - RNA, 19 nt, Artificial Sequence
  Description of Artificial Sequence: Synthetic oligonucleotide
acauugcaguguucacagu

SEQ ID NO: 2864854 - RNA, 19 nt, Artificial Sequence
  Description of Artificial Sequence: Synthetic oligonucleotide
aagcuugcagguggucaga

SEQ ID NO: 2864855 - RNA, 19 nt, Artificial Sequence
  Description of Artificial Sequence: Synthetic oligonucleotide
cagcugcuuccugacaagc

SEQ ID NO: 2864856 - RNA, 19 nt, Artificial Sequence
  Description of Artificial Sequence: Synthetic oligonucleotide
gaccgccuccaucauggca

SEQ ID NO: 2864857 - RNA, 19 nt, Artificial Sequence
  Description of Artificial Sequence: Synthetic oligonucleotide
ccuugagaccugcaccucc

SEQ ID NO: 2864858 - RNA, 19 nt, Artificial Sequence
  Description of Artificial Sequence: Synthetic oligonucleotide
caguuggccugcuaguuua

SEQ ID NO: 2864859 - RNA, 19 nt, Artificial Sequence
  Description of Artificial Sequence: Synthetic oligonucleotide
gcuucggcaguuuaauuua

SEQ ID NO: 2864860 - RNA, 19 nt, Artificial Sequence
  Description of Artificial Sequence: Synthetic oligonucleotide
ggauuucccuuagaaggug

SEQ ID NO: 2864861 - RNA, 19 nt, Artificial Sequence
  Description of Artificial Sequence: Synthetic oligonucleotide
ggugaaagcacugugcuuu

SEQ ID NO: 2864862 - RNA, 19 nt, Artificial Sequence
  Description of Artificial Sequence: Synthetic oligonucleotide
ccuauacaaauagccgacc

SEQ ID NO: 2864863 - RNA, 19 nt, Artificial Sequence
  Description of Artificial Sequence: Synthetic oligonucleotide
agaccccagguaaguugcc

SEQ ID NO: 2864864 - RNA, 19 nt, Artificial Sequence
  Description of Artificial Sequence: Synthetic oligonucleotide
ucacagugucagagcucug

SEQ ID NO: 2864865 - RNA, 19 nt, Artificial Sequence
  Description of Artificial Sequence: Synthetic oligonucleotide
aauagccgaccgccuccau

SEQ ID NO: 2864866 - RNA, 19 nt, Artificial Sequence
  Description of Artificial Sequence: Synthetic oligonucleotide
gaaccucuggauuucccuu

SEQ ID NO: 2864867 - RNA, 19 nt, Artificial Sequence
  Description of Artificial Sequence: Synthetic oligonucleotide
uccggaaccucuggauuuc

SEQ ID NO: 2864868 - RNA, 19 nt, Artificial Sequence
  Description of Artificial Sequence: Synthetic oligonucleotide
ugauggcaguagucaccug

SEQ ID NO: 2864869 - RNA, 19 nt, Artificial Sequence
  Description of Artificial Sequence: Synthetic oligonucleotide
agcugcuuccugacaagcu

SEQ ID NO: 2864870 - RNA, 19 nt, Artificial Sequence
  Description of Artificial Sequence: Synthetic oligonucleotide
ggguguagcuggcgcaugc

SEQ ID NO: 2864871 - RNA, 19 nt, Artificial Sequence
  Description of Artificial Sequence: Synthetic oligonucleotide
aagguaucgcugaggcuua

SEQ ID NO: 2864872 - RNA, 19 nt, Artificial Sequence
  Description of Artificial Sequence: Synthetic oligonucleotide
ggccugcuaguuuacacaa

SEQ ID NO: 2864873 - RNA, 19 nt, Artificial Sequence
  Description of Artificial Sequence: Synthetic oligonucleotide
gaauucuccuuuguauuuu

SEQ ID NO: 2864874 - RNA, 19 nt, Artificial Sequence
  Description of Artificial Sequence: Synthetic oligonucleotide
guucacagugucagagcuc

SEQ ID NO: 2864875 - RNA, 19 nt, Artificial Sequence
  Description of Artificial Sequence: Synthetic oligonucleotide
cuugagaccugcaccuccu

SEQ ID NO: 2864876 - RNA, 19 nt, Artificial Sequence
  Description of Artificial Sequence: Synthetic oligonucleotide
ugaaagcacugugcuuuua

SEQ ID NO: 2864877 - RNA, 19 nt, Artificial Sequence
  Description of Artificial Sequence: Synthetic oligonucleotide
ggaaccucuggauuucccu

SEQ ID NO: 2864878 - RNA, 19 nt, Artificial Sequence
  Description of Artificial Sequence: Synthetic oligonucleotide
gaggaggugaaagcacugu

SEQ ID NO: 2864879 - RNA, 19 nt, Artificial Sequence
  Description of Artificial Sequence: Synthetic oligonucleotide
gagugucugaauucuccuu

SEQ ID NO: 2864880 - RNA, 19 nt, Artificial Sequence
  Description of Artificial Sequence: Synthetic oligonucleotide
gcucucuggaacuuccuua

SEQ ID NO: 2864881 - RNA, 19 nt, Artificial Sequence
  Description of Artificial Sequence: Synthetic oligonucleotide
agcuggcgcaugccuugag

SEQ ID NO: 2864882 - RNA, 19 nt, Artificial Sequence
  Description of Artificial Sequence: Synthetic oligonucleotide
ggaggaggugaaagcacug

SEQ ID NO: 2864883 - RNA, 19 nt, Artificial Sequence
  Description of Artificial Sequence: Synthetic oligonucleotide
gacaagcuugcaggugguc

SEQ ID NO: 2864884 - RNA, 19 nt, Artificial Sequence
  Description of Artificial Sequence: Synthetic oligonucleotide
caggagcauauuuugguuu

SEQ ID NO: 2864885 - RNA, 19 nt, Artificial Sequence
  Description of Artificial Sequence: Synthetic oligonucleotide
agguaucgcugaggcuuac

SEQ ID NO: 2864886 - RNA, 19 nt, Artificial Sequence
  Description of Artificial Sequence: Synthetic oligonucleotide
cugcuaguuuacacaaggu

SEQ ID NO: 2864887 - RNA, 19 nt, Artificial Sequence
  Description of Artificial Sequence: Synthetic oligonucleotide
gacaacaguuggccugcua

SEQ ID NO: 2864888 - RNA, 19 nt, Artificial Sequence
  Description of Artificial Sequence: Synthetic oligonucleotide
gcacugugcuuuuagcucu

SEQ ID NO: 2864889 - RNA, 19 nt, Artificial Sequence
  Description of Artificial Sequence: Synthetic oligonucleotide
ccuccaucauggcaugaug

SEQ ID NO: 2864890 - RNA, 19 nt, Artificial Sequence
  Description of Artificial Sequence: Synthetic oligonucleotide
cccauaauaaagaaccauu

SEQ ID NO: 2864891 - RNA, 19 nt, Artificial Sequence
  Description of Artificial Sequence: Synthetic oligonucleotide
caacaguuggccugcuagu

SEQ ID NO: 2864892 - RNA, 19 nt, Artificial Sequence
  Description of Artificial Sequence: Synthetic oligonucleotide
gcccuuaaaucaagugacc

SEQ ID NO: 2864893 - RNA, 19 nt, Artificial Sequence
  Description of Artificial Sequence: Synthetic oligonucleotide
aggcuuacacucagcugcu

SEQ ID NO: 2864894 - RNA, 19 nt, Artificial Sequence
  Description of Artificial Sequence: Synthetic oligonucleotide
ucauggcaugauggcagua

SEQ ID NO: 2864895 - RNA, 19 nt, Artificial Sequence
  Description of Artificial Sequence: Synthetic oligonucleotide
ccugcuccggaaccucugg

SEQ ID NO: 2864896 - RNA, 19 nt, Artificial Sequence
  Description of Artificial Sequence: Synthetic oligonucleotide
caguauucccuggauugaa

SEQ ID NO: 2864897 - RNA, 19 nt, Artificial Sequence
  Description of Artificial Sequence: Synthetic oligonucleotide
cuuugccaggagcauauuu

SEQ ID NO: 2864898 - RNA, 19 nt, Artificial Sequence
  Description of Artificial Sequence: Synthetic oligonucleotide
guguagcuggcgcaugccu

SEQ ID NO: 2864899 - RNA, 19 nt, Artificial Sequence
  Description of Artificial Sequence: Synthetic oligonucleotide
guuggccugcuaguuuaca

SEQ ID NO: 2864900 - RNA, 19 nt, Artificial Sequence
  Description of Artificial Sequence: Synthetic oligonucleotide
cggcaguuuaauuuagaca

SEQ ID NO: 2864901 - RNA, 19 nt, Artificial Sequence
  Description of Artificial Sequence: Synthetic oligonucleotide
acugugcuuuuagcucucu

SEQ ID NO: 2864902 - RNA, 19 nt, Artificial Sequence
  Description of Artificial Sequence: Synthetic oligonucleotide
caguguucacagugucaga

SEQ ID NO: 2864903 - RNA, 19 nt, Artificial Sequence
  Description of Artificial Sequence: Synthetic oligonucleotide
ggcgcaugccuugagaccu

SEQ ID NO: 2864904 - RNA, 19 nt, Artificial Sequence
  Description of Artificial Sequence: Synthetic oligonucleotide
gcaguauucccuggauuga

SEQ ID NO: 2864905 - RNA, 19 nt, Artificial Sequence
  Description of Artificial Sequence: Synthetic oligonucleotide
uagcuggcgcaugccuuga

SEQ ID NO: 2864906 - RNA, 19 nt, Artificial Sequence
  Description of Artificial Sequence: Synthetic oligonucleotide
gagcgcuucggcaguuuaa

SEQ ID NO: 2864907 - RNA, 19 nt, Artificial Sequence
  Description of Artificial Sequence: Synthetic oligonucleotide
gguggucagagugucugaa

SEQ ID NO: 2864908 - RNA, 19 nt, Artificial Sequence
  Description of Artificial Sequence: Synthetic oligonucleotide
gcuggcgcaugccuugaga

SEQ ID NO: 2864909 - RNA, 19 nt, Artificial Sequence
  Description of Artificial Sequence: Synthetic oligonucleotide
ugacaacaguuggccugcu

SEQ ID NO: 2864910 - RNA, 19 nt, Artificial Sequence
  Description of Artificial Sequence: Synthetic oligonucleotide
ucugagcgcuucggcaguu

SEQ ID NO: 2864911 - RNA, 19 nt, Artificial Sequence
  Description of Artificial Sequence: Synthetic oligonucleotide
cagguaaguugcccuuaaa

SEQ ID NO: 2864912 - RNA, 19 nt, Artificial Sequence
  Description of Artificial Sequence: Synthetic oligonucleotide
cuccggaaccucuggauuu

SEQ ID NO: 2864913 - RNA, 19 nt, Artificial Sequence
  Description of Artificial Sequence: Synthetic oligonucleotide
cugcuccggaaccucugga

SEQ ID NO: 2864914 - RNA, 19 nt, Artificial Sequence
  Description of Artificial Sequence: Synthetic oligonucleotide
cccuggauugaagcauggg

SEQ ID NO: 2864915 - RNA, 19 nt, Artificial Sequence
  Description of Artificial Sequence: Synthetic oligonucleotide
gcaccuccugcuccggaac

SEQ ID NO: 2864916 - RNA, 19 nt, Artificial Sequence
  Description of Artificial Sequence: Synthetic oligonucleotide
ggugcaguauucccuggau

SEQ ID NO: 2864917 - RNA, 19 nt, Artificial Sequence
  Description of Artificial Sequence: Synthetic oligonucleotide
gcugcuuccugacaagcuu

SEQ ID NO: 2864918 - RNA, 19 nt, Artificial Sequence
  Description of Artificial Sequence: Synthetic oligonucleotide
gccugcuaguuuacacaag

SEQ ID NO: 2864919 - RNA, 19 nt, Artificial Sequence
  Description of Artificial Sequence: Synthetic oligonucleotide
gcaugggaagaccccaggu

SEQ ID NO: 2864920 - RNA, 19 nt, Artificial Sequence
  Description of Artificial Sequence: Synthetic oligonucleotide
ccuuagaaggugcaguauu

SEQ ID NO: 2864921 - RNA, 19 nt, Artificial Sequence
  Description of Artificial Sequence: Synthetic oligonucleotide
cccuuaaaucaagugaccu

SEQ ID NO: 2864922 - RNA, 19 nt, Artificial Sequence
  Description of Artificial Sequence: Synthetic oligonucleotide
cggaaccucuggauuuccc

SEQ ID NO: 2864923 - RNA, 19 nt, Artificial Sequence
  Description of Artificial Sequence: Synthetic oligonucleotide
gugaaagcacugugcuuuu

SEQ ID NO: 2864924 - RNA, 19 nt, Artificial Sequence
  Description of Artificial Sequence: Synthetic oligonucleotide
gguaucgcugaggcuuaca

SEQ ID NO: 2864925 - RNA, 19 nt, Artificial Sequence
  Description of Artificial Sequence: Synthetic oligonucleotide
cgcugaggcuuacacucag

SEQ ID NO: 2864926 - RNA, 19 nt, Artificial Sequence
  Description of Artificial Sequence: Synthetic oligonucleotide
gccgaccgccuccaucaug

SEQ ID NO: 2864927 - RNA, 19 nt, Artificial Sequence
  Description of Artificial Sequence: Synthetic oligonucleotide
gggaagaccccagguaagu

SEQ ID NO: 2864928 - RNA, 19 nt, Artificial Sequence
  Description of Artificial Sequence: Synthetic oligonucleotide
cucugagcgcuucggcagu

SEQ ID NO: 2864929 - RNA, 19 nt, Artificial Sequence
  Description of Artificial Sequence: Synthetic oligonucleotide
ccagguaaguugcccuuaa

SEQ ID NO: 2864930 - RNA, 19 nt, Artificial Sequence
  Description of Artificial Sequence: Synthetic oligonucleotide
cugcaccuccugcuccgga

SEQ ID NO: 2864931 - RNA, 19 nt, Artificial Sequence
  Description of Artificial Sequence: Synthetic oligonucleotide
cuagaacuuucggggugua

SEQ ID NO: 2864932 - RNA, 19 nt, Artificial Sequence
  Description of Artificial Sequence: Synthetic oligonucleotide
agccgaccgccuccaucau

SEQ ID NO: 2864933 - RNA, 19 nt, Artificial Sequence
  Description of Artificial Sequence: Synthetic oligonucleotide
cuccugcuccggaaccucu

SEQ ID NO: 2864934 - RNA, 19 nt, Artificial Sequence
  Description of Artificial Sequence: Synthetic oligonucleotide
gcuuccugacaagcuugca

SEQ ID NO: 2864935 - RNA, 19 nt, Artificial Sequence
  Description of Artificial Sequence: Synthetic oligonucleotide
gggguguagcuggcgcaug

SEQ ID NO: 2864936 - RNA, 19 nt, Artificial Sequence
  Description of Artificial Sequence: Synthetic oligonucleotide
ccggaaccucuggauuucc

SEQ ID NO: 2864937 - RNA, 19 nt, Artificial Sequence
  Description of Artificial Sequence: Synthetic oligonucleotide
ccaggagcauauuuugguu

SEQ ID NO: 2864938 - RNA, 19 nt, Artificial Sequence
  Description of Artificial Sequence: Synthetic oligonucleotide
gcuccggaaccucuggauu

SEQ ID NO: 2864939 - RNA, 19 nt, Artificial Sequence
  Description of Artificial Sequence: Synthetic oligonucleotide
ccuagaacuuucggggugu

SEQ ID NO: 2864940 - RNA, 19 nt, Artificial Sequence
  Description of Artificial Sequence: Synthetic oligonucleotide
cgcuucggcaguuuaauuu

SEQ ID NO: 2864941 - RNA, 19 nt, Artificial Sequence
  Description of Artificial Sequence: Synthetic oligonucleotide
gcuugcagguggucagagu

SEQ ID NO: 2864942 - RNA, 19 nt, Artificial Sequence
  Description of Artificial Sequence: Synthetic oligonucleotide
ggagcauauuuugguuuau

SEQ ID NO: 2864943 - RNA, 19 nt, Artificial Sequence
  Description of Artificial Sequence: Synthetic oligonucleotide
ccgccuccaucauggcaug

SEQ ID NO: 2864944 - RNA, 19 nt, Artificial Sequence
  Description of Artificial Sequence: Synthetic oligonucleotide
gccuugagaccugcaccuc

SEQ ID NO: 2864945 - RNA, 19 nt, Artificial Sequence
  Description of Artificial Sequence: Synthetic oligonucleotide
ggaagaccccagguaaguu

SEQ ID NO: 2864946 - RNA, 19 nt, Artificial Sequence
  Description of Artificial Sequence: Synthetic oligonucleotide
cgcaugccuugagaccugc

SEQ ID NO: 2864947 - RNA, 19 nt, Artificial Sequence
  Description of Artificial Sequence: Synthetic oligonucleotide
ccucuggauuucccuuaga

SEQ ID NO: 2864948 - RNA, 19 nt, Artificial Sequence
  Description of Artificial Sequence: Synthetic oligonucleotide
gcgcaugccuugagaccug

SEQ ID NO: 2864949 - RNA, 19 nt, Artificial Sequence
  Description of Artificial Sequence: Synthetic oligonucleotide
gcaugccuugagaccugca

SEQ ID NO: 2864950 - RNA, 19 nt, Artificial Sequence
  Description of Artificial Sequence: Synthetic oligonucleotide
gccuccaucauggcaugau

SEQ ID NO: 2864951 - RNA, 19 nt, Artificial Sequence
  Description of Artificial Sequence: Synthetic oligonucleotide
cgaccgccuccaucauggc

SEQ ID NO: 2864952 - RNA, 19 nt, Artificial Sequence
  Description of Artificial Sequence: Synthetic oligonucleotide
cccagguaaguugcccuua

SEQ ID NO: 2864953 - RNA, 19 nt, Artificial Sequence
  Description of Artificial Sequence: Synthetic oligonucleotide
gcagguggucagagugucu

SEQ ID NO: 2864954 - RNA, 19 nt, Artificial Sequence
  Description of Artificial Sequence: Synthetic oligonucleotide
gcgcuucggcaguuuaauu

SEQ ID NO: 2864955 - RNA, 19 nt, Artificial Sequence
  Description of Artificial Sequence: Synthetic oligonucleotide
cccuuagaaggugcaguau

SEQ ID NO: 2864956 - RNA, 19 nt, Artificial Sequence
  Description of Artificial Sequence: Synthetic oligonucleotide
cugagcgcuucggcaguuu

SEQ ID NO: 2864957 - RNA, 19 nt, Artificial Sequence
  Description of Artificial Sequence: Synthetic oligonucleotide
ggcuuacacucagcugcuu

SEQ ID NO: 2864958 - RNA, 19 nt, Artificial Sequence
  Description of Artificial Sequence: Synthetic oligonucleotide
cgccuccaucauggcauga

SEQ ID NO: 2864959 - RNA, 19 nt, Artificial Sequence
  Description of Artificial Sequence: Synthetic oligonucleotide
cgggguguagcuggcgcau

SEQ ID NO: 2864960 - RNA, 19 nt, Artificial Sequence
  Description of Artificial Sequence: Synthetic oligonucleotide
ccuuugccaggagcauauu

SEQ ID NO: 2864961 - RNA, 19 nt, Artificial Sequence
  Description of Artificial Sequence: Synthetic oligonucleotide
aacuguaauaucuuugugg

SEQ ID NO: 2864962 - RNA, 19 nt, Artificial Sequence
  Description of Artificial Sequence: Synthetic oligonucleotide
acuguaauaucuuuguggc

SEQ ID NO: 2864963 - RNA, 19 nt, Artificial Sequence
  Description of Artificial Sequence: Synthetic oligonucleotide
aaauuguccagacuugggc

SEQ ID NO: 2864964 - RNA, 19 nt, Artificial Sequence
  Description of Artificial Sequence: Synthetic oligonucleotide
aauuguccagacuugggcc

SEQ ID NO: 2864965 - RNA, 19 nt, Artificial Sequence
  Description of Artificial Sequence: Synthetic oligonucleotide
aagggaauacauuaacaac

SEQ ID NO: 2864966 - RNA, 19 nt, Artificial Sequence
  Description of Artificial Sequence: Synthetic oligonucleotide
uauaccaucagauucaaaa

SEQ ID NO: 2864967 - RNA, 19 nt, Artificial Sequence
  Description of Artificial Sequence: Synthetic oligonucleotide
aauacauuaacaaccguuc

SEQ ID NO: 2864968 - RNA, 19 nt, Artificial Sequence
  Description of Artificial Sequence: Synthetic oligonucleotide
aauuuuauuccucggcagg

SEQ ID NO: 2864969 - RNA, 19 nt, Artificial Sequence
  Description of Artificial Sequence: Synthetic oligonucleotide
aaaacuguaauaucuuugu

SEQ ID NO: 2864970 - RNA, 19 nt, Artificial Sequence
  Description of Artificial Sequence: Synthetic oligonucleotide
agauucaaaagccagcuuc

SEQ ID NO: 2864971 - RNA, 19 nt, Artificial Sequence
  Description of Artificial Sequence: Synthetic oligonucleotide
ugauaagagcaucuggucg

SEQ ID NO: 2864972 - RNA, 19 nt, Artificial Sequence
  Description of Artificial Sequence: Synthetic oligonucleotide
agggaauacauuaacaacc

SEQ ID NO: 2864973 - RNA, 19 nt, Artificial Sequence
  Description of Artificial Sequence: Synthetic oligonucleotide
gauaagagcaucuggucgg

SEQ ID NO: 2864974 - RNA, 19 nt, Artificial Sequence
  Description of Artificial Sequence: Synthetic oligonucleotide
ucaaaagccagcuucacga

SEQ ID NO: 2864975 - RNA, 19 nt, Artificial Sequence
  Description of Artificial Sequence: Synthetic oligonucleotide
ucagaaauuguccagacuu

SEQ ID NO: 2864976 - RNA, 19 nt, Artificial Sequence
  Description of Artificial Sequence: Synthetic oligonucleotide
ucauuggacacaauuauac

SEQ ID NO: 2864977 - RNA, 19 nt, Artificial Sequence
  Description of Artificial Sequence: Synthetic oligonucleotide
uuuccguagaauuuccugg

SEQ ID NO: 2864978 - RNA, 19 nt, Artificial Sequence
  Description of Artificial Sequence: Synthetic oligonucleotide
aggaacaaugguuucuucc

SEQ ID NO: 2864979 - RNA, 19 nt, Artificial Sequence
  Description of Artificial Sequence: Synthetic oligonucleotide
ugugauaagagcaucuggu

SEQ ID NO: 2864980 - RNA, 19 nt, Artificial Sequence
  Description of Artificial Sequence: Synthetic oligonucleotide
aaugguuucuuccucagaa

SEQ ID NO: 2864981 - RNA, 19 nt, Artificial Sequence
  Description of Artificial Sequence: Synthetic oligonucleotide
auugcuaccaucaauaacu

SEQ ID NO: 2864982 - RNA, 19 nt, Artificial Sequence
  Description of Artificial Sequence: Synthetic oligonucleotide
uuaacaaccguucaucuau

SEQ ID NO: 2864983 - RNA, 19 nt, Artificial Sequence
  Description of Artificial Sequence: Synthetic oligonucleotide
uguaauaucuuuguggccu

SEQ ID NO: 2864984 - RNA, 19 nt, Artificial Sequence
  Description of Artificial Sequence: Synthetic oligonucleotide
uuucucauuugccaaaucu

SEQ ID NO: 2864985 - RNA, 19 nt, Artificial Sequence
  Description of Artificial Sequence: Synthetic oligonucleotide
uccacugccaauuuuauuc

SEQ ID NO: 2864986 - RNA, 19 nt, Artificial Sequence
  Description of Artificial Sequence: Synthetic oligonucleotide
uguaacuucuuccauucug

SEQ ID NO: 2864987 - RNA, 19 nt, Artificial Sequence
  Description of Artificial Sequence: Synthetic oligonucleotide
auuggacacaauuauacca

SEQ ID NO: 2864988 - RNA, 19 nt, Artificial Sequence
  Description of Artificial Sequence: Synthetic oligonucleotide
uacuucuuuguuuccaugg

SEQ ID NO: 2864989 - RNA, 19 nt, Artificial Sequence
  Description of Artificial Sequence: Synthetic oligonucleotide
ucuguaguuaucauuggac

SEQ ID NO: 2864990 - RNA, 19 nt, Artificial Sequence
  Description of Artificial Sequence: Synthetic oligonucleotide
caauuauaccaucagauuc

SEQ ID NO: 2864991 - RNA, 19 nt, Artificial Sequence
  Description of Artificial Sequence: Synthetic oligonucleotide
aucuuuguggccucuuucc

SEQ ID NO: 2864992 - RNA, 19 nt, Artificial Sequence
  Description of Artificial Sequence: Synthetic oligonucleotide
uaccaucagauucaaaagc

SEQ ID NO: 2864993 - RNA, 19 nt, Artificial Sequence
  Description of Artificial Sequence: Synthetic oligonucleotide
cucauugccacauugcuac

SEQ ID NO: 2864994 - RNA, 19 nt, Artificial Sequence
  Description of Artificial Sequence: Synthetic oligonucleotide
aauuauaccaucagauuca

SEQ ID NO: 2864995 - RNA, 19 nt, Artificial Sequence
  Description of Artificial Sequence: Synthetic oligonucleotide
ucuuccucagaaauugucc

SEQ ID NO: 2864996 - RNA, 19 nt, Artificial Sequence
  Description of Artificial Sequence: Synthetic oligonucleotide
uugacaagggaauacauua

SEQ ID NO: 2864997 - RNA, 19 nt, Artificial Sequence
  Description of Artificial Sequence: Synthetic oligonucleotide
gagaauacuucuuuguuuc

SEQ ID NO: 2864998 - RNA, 19 nt, Artificial Sequence
  Description of Artificial Sequence: Synthetic oligonucleotide
guuuccauggcucauugcc

SEQ ID NO: 2864999 - RNA, 19 nt, Artificial Sequence
  Description of Artificial Sequence: Synthetic oligonucleotide
uuaucauuggacacaauua

SEQ ID NO: 2865000 - RNA, 19 nt, Artificial Sequence
  Description of Artificial Sequence: Synthetic oligonucleotide
auugcucuuuucuccaagc

SEQ ID NO: 2865001 - RNA, 19 nt, Artificial Sequence
  Description of Artificial Sequence: Synthetic oligonucleotide
uuuucuccaagcaggaaca

SEQ ID NO: 2865002 - RNA, 19 nt, Artificial Sequence
  Description of Artificial Sequence: Synthetic oligonucleotide
uucaaaagccagcuucacg

SEQ ID NO: 2865003 - RNA, 19 nt, Artificial Sequence
  Description of Artificial Sequence: Synthetic oligonucleotide
uuugccaaaucucuguagu

SEQ ID NO: 2865004 - RNA, 19 nt, Artificial Sequence
  Description of Artificial Sequence: Synthetic oligonucleotide
ucucauuugccaaaucucu

SEQ ID NO: 2865005 - RNA, 19 nt, Artificial Sequence
  Description of Artificial Sequence: Synthetic oligonucleotide
gacacaauuauaccaucag

SEQ ID NO: 2865006 - RNA, 19 nt, Artificial Sequence
  Description of Artificial Sequence: Synthetic oligonucleotide
accaucagauucaaaagcc

SEQ ID NO: 2865007 - RNA, 19 nt, Artificial Sequence
  Description of Artificial Sequence: Synthetic oligonucleotide
auaccaucagauucaaaag

SEQ ID NO: 2865008 - RNA, 19 nt, Artificial Sequence
  Description of Artificial Sequence: Synthetic oligonucleotide
ucugguuucucauuugcca

SEQ ID NO: 2865009 - RNA, 19 nt, Artificial Sequence
  Description of Artificial Sequence: Synthetic oligonucleotide
ucaucuauguaacuucuuc

SEQ ID NO: 2865010 - RNA, 19 nt, Artificial Sequence
  Description of Artificial Sequence: Synthetic oligonucleotide
uguaguuaucauuggacac

SEQ ID NO: 2865011 - RNA, 19 nt, Artificial Sequence
  Description of Artificial Sequence: Synthetic oligonucleotide
uauguaacuucuuccauuc

SEQ ID NO: 2865012 - RNA, 19 nt, Artificial Sequence
  Description of Artificial Sequence: Synthetic oligonucleotide
ucuccaagcaggaacaaaa

SEQ ID NO: 2865013 - RNA, 19 nt, Artificial Sequence
  Description of Artificial Sequence: Synthetic oligonucleotide
acuucuuccauucugguuu

SEQ ID NO: 2865014 - RNA, 19 nt, Artificial Sequence
  Description of Artificial Sequence: Synthetic oligonucleotide
aaaaccaauccacugccaa

SEQ ID NO: 2865015 - RNA, 19 nt, Artificial Sequence
  Description of Artificial Sequence: Synthetic oligonucleotide
caucuauguaacuucuucc

SEQ ID NO: 2865016 - RNA, 19 nt, Artificial Sequence
  Description of Artificial Sequence: Synthetic oligonucleotide
acauuaacaaccguucauc

SEQ ID NO: 2865017 - RNA, 19 nt, Artificial Sequence
  Description of Artificial Sequence: Synthetic oligonucleotide
cuuuucuccaagcaggaac

SEQ ID NO: 2865018 - RNA, 19 nt, Artificial Sequence
  Description of Artificial Sequence: Synthetic oligonucleotide
aacaaugguuucuuccuca

SEQ ID NO: 2865019 - RNA, 19 nt, Artificial Sequence
  Description of Artificial Sequence: Synthetic oligonucleotide
uuuuccuucucuaguuucc

SEQ ID NO: 2865020 - RNA, 19 nt, Artificial Sequence
  Description of Artificial Sequence: Synthetic oligonucleotide
aaacuguaauaucuuugug

SEQ ID NO: 2865021 - RNA, 19 nt, Artificial Sequence
  Description of Artificial Sequence: Synthetic oligonucleotide
ugcucuuuucuccaagcag

SEQ ID NO: 2865022 - RNA, 19 nt, Artificial Sequence
  Description of Artificial Sequence: Synthetic oligonucleotide
accaucaauaacuacuggu

SEQ ID NO: 2865023 - RNA, 19 nt, Artificial Sequence
  Description of Artificial Sequence: Synthetic oligonucleotide
agaauacuucuuuguuucc

SEQ ID NO: 2865024 - RNA, 19 nt, Artificial Sequence
  Description of Artificial Sequence: Synthetic oligonucleotide
aauacuucuuuguuuccau

SEQ ID NO: 2865025 - RNA, 19 nt, Artificial Sequence
  Description of Artificial Sequence: Synthetic oligonucleotide
aucuauguaacuucuucca

SEQ ID NO: 2865026 - RNA, 19 nt, Artificial Sequence
  Description of Artificial Sequence: Synthetic oligonucleotide
caucagauucaaaagccag

SEQ ID NO: 2865027 - RNA, 19 nt, Artificial Sequence
  Description of Artificial Sequence: Synthetic oligonucleotide
uucacgaugaaccggucgu

SEQ ID NO: 2865028 - RNA, 19 nt, Artificial Sequence
  Description of Artificial Sequence: Synthetic oligonucleotide
ugauggugugaauaccagg

SEQ ID NO: 2865029 - RNA, 19 nt, Artificial Sequence
  Description of Artificial Sequence: Synthetic oligonucleotide
guaacuucuuccauucugg

SEQ ID NO: 2865030 - RNA, 19 nt, Artificial Sequence
  Description of Artificial Sequence: Synthetic oligonucleotide
aucucuguaguuaucauug

SEQ ID NO: 2865031 - RNA, 19 nt, Artificial Sequence
  Description of Artificial Sequence: Synthetic oligonucleotide
aaccguucaucuauguaac

SEQ ID NO: 2865032 - RNA, 19 nt, Artificial Sequence
  Description of Artificial Sequence: Synthetic oligonucleotide
ucagauucaaaagccagcu

SEQ ID NO: 2865033 - RNA, 19 nt, Artificial Sequence
  Description of Artificial Sequence: Synthetic oligonucleotide
uuggacacaauuauaccau

SEQ ID NO: 2865034 - RNA, 19 nt, Artificial Sequence
  Description of Artificial Sequence: Synthetic oligonucleotide
agaaauuguccagacuugg

SEQ ID NO: 2865035 - RNA, 19 nt, Artificial Sequence
  Description of Artificial Sequence: Synthetic oligonucleotide
cuaccaucaauaacuacug

SEQ ID NO: 2865036 - RNA, 19 nt, Artificial Sequence
  Description of Artificial Sequence: Synthetic oligonucleotide
ucauuugccaaaucucugu

SEQ ID NO: 2865037 - RNA, 19 nt, Artificial Sequence
  Description of Artificial Sequence: Synthetic oligonucleotide
aucagauucaaaagccagc

SEQ ID NO: 2865038 - RNA, 19 nt, Artificial Sequence
  Description of Artificial Sequence: Synthetic oligonucleotide
uucuuuguuuccauggcuc

SEQ ID NO: 2865039 - RNA, 19 nt, Artificial Sequence
  Description of Artificial Sequence: Synthetic oligonucleotide
ucuaguuuccguagaauuu

SEQ ID NO: 2865040 - RNA, 19 nt, Artificial Sequence
  Description of Artificial Sequence: Synthetic oligonucleotide
uacauuaacaaccguucau

SEQ ID NO: 2865041 - RNA, 19 nt, Artificial Sequence
  Description of Artificial Sequence: Synthetic oligonucleotide
caauuuuauuccucggcag

SEQ ID NO: 2865042 - RNA, 19 nt, Artificial Sequence
  Description of Artificial Sequence: Synthetic oligonucleotide
ugccacauugcuaccauca

SEQ ID NO: 2865043 - RNA, 19 nt, Artificial Sequence
  Description of Artificial Sequence: Synthetic oligonucleotide
ugaaccggucgucauagca

SEQ ID NO: 2865044 - RNA, 19 nt, Artificial Sequence
  Description of Artificial Sequence: Synthetic oligonucleotide
gacaagggaauacauuaac

SEQ ID NO: 2865045 - RNA, 19 nt, Artificial Sequence
  Description of Artificial Sequence: Synthetic oligonucleotide
gauggugugaauaccagga

SEQ ID NO: 2865046 - RNA, 19 nt, Artificial Sequence
  Description of Artificial Sequence: Synthetic oligonucleotide
uugucauugacaagggaau

SEQ ID NO: 2865047 - RNA, 19 nt, Artificial Sequence
  Description of Artificial Sequence: Synthetic oligonucleotide
cauuggacacaauuauacc

SEQ ID NO: 2865048 - RNA, 19 nt, Artificial Sequence
  Description of Artificial Sequence: Synthetic oligonucleotide
cuugucauugacaagggaa

SEQ ID NO: 2865049 - RNA, 19 nt, Artificial Sequence
  Description of Artificial Sequence: Synthetic oligonucleotide
aaucucuguaguuaucauu

SEQ ID NO: 2865050 - RNA, 19 nt, Artificial Sequence
  Description of Artificial Sequence: Synthetic oligonucleotide
cugccaauuuuauuccucg

SEQ ID NO: 2865051 - RNA, 19 nt, Artificial Sequence
  Description of Artificial Sequence: Synthetic oligonucleotide
gaugaaccggucgucauag

SEQ ID NO: 2865052 - RNA, 19 nt, Artificial Sequence
  Description of Artificial Sequence: Synthetic oligonucleotide
aaagccagcuucacgauga

SEQ ID NO: 2865053 - RNA, 19 nt, Artificial Sequence
  Description of Artificial Sequence: Synthetic oligonucleotide
uuuauuccucggcaggaga

SEQ ID NO: 2865054 - RNA, 19 nt, Artificial Sequence
  Description of Artificial Sequence: Synthetic oligonucleotide
gaaauuguccagacuuggg

SEQ ID NO: 2865055 - RNA, 19 nt, Artificial Sequence
  Description of Artificial Sequence: Synthetic oligonucleotide
acacaauuauaccaucaga

SEQ ID NO: 2865056 - RNA, 19 nt, Artificial Sequence
  Description of Artificial Sequence: Synthetic oligonucleotide
acaauuauaccaucagauu

SEQ ID NO: 2865057 - RNA, 19 nt, Artificial Sequence
  Description of Artificial Sequence: Synthetic oligonucleotide
cugugauaagagcaucugg

SEQ ID NO: 2865058 - RNA, 19 nt, Artificial Sequence
  Description of Artificial Sequence: Synthetic oligonucleotide
ugguuucuuccucagaaau

SEQ ID NO: 2865059 - RNA, 19 nt, Artificial Sequence
  Description of Artificial Sequence: Synthetic oligonucleotide
uaccaucaauaacuacugg

SEQ ID NO: 2865060 - RNA, 19 nt, Artificial Sequence
  Description of Artificial Sequence: Synthetic oligonucleotide
uccuggucugugauaagag

SEQ ID NO: 2865061 - RNA, 19 nt, Artificial Sequence
  Description of Artificial Sequence: Synthetic oligonucleotide
uuuccauggcucauugcca

SEQ ID NO: 2865062 - RNA, 19 nt, Artificial Sequence
  Description of Artificial Sequence: Synthetic oligonucleotide
ucucuguaguuaucauugg

SEQ ID NO: 2865063 - RNA, 19 nt, Artificial Sequence
  Description of Artificial Sequence: Synthetic oligonucleotide
ucauugacaagggaauaca

SEQ ID NO: 2865064 - RNA, 19 nt, Artificial Sequence
  Description of Artificial Sequence: Synthetic oligonucleotide
uucugguuucucauuugcc

SEQ ID NO: 2865065 - RNA, 19 nt, Artificial Sequence
  Description of Artificial Sequence: Synthetic oligonucleotide
ucuauguaacuucuuccau

SEQ ID NO: 2865066 - RNA, 19 nt, Artificial Sequence
  Description of Artificial Sequence: Synthetic oligonucleotide
auacauuaacaaccguuca

SEQ ID NO: 2865067 - RNA, 19 nt, Artificial Sequence
  Description of Artificial Sequence: Synthetic oligonucleotide
gauugcucuuuucuccaag

SEQ ID NO: 2865068 - RNA, 19 nt, Artificial Sequence
  Description of Artificial Sequence: Synthetic oligonucleotide
ucuuuguuuccauggcuca

SEQ ID NO: 2865069 - RNA, 19 nt, Artificial Sequence
  Description of Artificial Sequence: Synthetic oligonucleotide
aaccggucgucauagcaca

SEQ ID NO: 2865070 - RNA, 19 nt, Artificial Sequence
  Description of Artificial Sequence: Synthetic oligonucleotide
uuauuccucggcaggagaa

SEQ ID NO: 2865071 - RNA, 19 nt, Artificial Sequence
  Description of Artificial Sequence: Synthetic oligonucleotide
aaaucucuguaguuaucau

SEQ ID NO: 2865072 - RNA, 19 nt, Artificial Sequence
  Description of Artificial Sequence: Synthetic oligonucleotide
uucuuccucagaaauuguc

SEQ ID NO: 2865073 - RNA, 19 nt, Artificial Sequence
  Description of Artificial Sequence: Synthetic oligonucleotide
uagcacaccacucgucugc

SEQ ID NO: 2865074 - RNA, 19 nt, Artificial Sequence
  Description of Artificial Sequence: Synthetic oligonucleotide
aaaccaauccacugccaau

SEQ ID NO: 2865075 - RNA, 19 nt, Artificial Sequence
  Description of Artificial Sequence: Synthetic oligonucleotide
aacuugucauugacaaggg

SEQ ID NO: 2865076 - RNA, 19 nt, Artificial Sequence
  Description of Artificial Sequence: Synthetic oligonucleotide
ucugugauaagagcaucug

SEQ ID NO: 2865077 - RNA, 19 nt, Artificial Sequence
  Description of Artificial Sequence: Synthetic oligonucleotide
ugccaauuuuauuccucgg

SEQ ID NO: 2865078 - RNA, 19 nt, Artificial Sequence
  Description of Artificial Sequence: Synthetic oligonucleotide
ucuuuguggccucuuucca

SEQ ID NO: 2865079 - RNA, 19 nt, Artificial Sequence
  Description of Artificial Sequence: Synthetic oligonucleotide
caaccguucaucuauguaa

SEQ ID NO: 2865080 - RNA, 19 nt, Artificial Sequence
  Description of Artificial Sequence: Synthetic oligonucleotide
uuccucagaaauuguccag

SEQ ID NO: 2865081 - RNA, 19 nt, Artificial Sequence
  Description of Artificial Sequence: Synthetic oligonucleotide
acaaugguuucuuccucag

SEQ ID NO: 2865082 - RNA, 19 nt, Artificial Sequence
  Description of Artificial Sequence: Synthetic oligonucleotide
acucgucugcccuggacac

SEQ ID NO: 2865083 - RNA, 19 nt, Artificial Sequence
  Description of Artificial Sequence: Synthetic oligonucleotide
cuucacgaugaaccggucg

SEQ ID NO: 2865084 - RNA, 19 nt, Artificial Sequence
  Description of Artificial Sequence: Synthetic oligonucleotide
uaucuuuguggccucuuuc

SEQ ID NO: 2865085 - RNA, 19 nt, Artificial Sequence
  Description of Artificial Sequence: Synthetic oligonucleotide
agaauuuccuggucuguga

SEQ ID NO: 2865086 - RNA, 19 nt, Artificial Sequence
  Description of Artificial Sequence: Synthetic oligonucleotide
gggaauacauuaacaaccg

SEQ ID NO: 2865087 - RNA, 19 nt, Artificial Sequence
  Description of Artificial Sequence: Synthetic oligonucleotide
uuuuauuccucggcaggag

SEQ ID NO: 2865088 - RNA, 19 nt, Artificial Sequence
  Description of Artificial Sequence: Synthetic oligonucleotide
uaguuuccguagaauuucc

SEQ ID NO: 2865089 - RNA, 19 nt, Artificial Sequence
  Description of Artificial Sequence: Synthetic oligonucleotide
cuggucugugauaagagca

SEQ ID NO: 2865090 - RNA, 19 nt, Artificial Sequence
  Description of Artificial Sequence: Synthetic oligonucleotide
cuguaguuaucauuggaca

SEQ ID NO: 2865091 - RNA, 19 nt, Artificial Sequence
  Description of Artificial Sequence: Synthetic oligonucleotide
ugacaagggaauacauuaa

SEQ ID NO: 2865092 - RNA, 19 nt, Artificial Sequence
  Description of Artificial Sequence: Synthetic oligonucleotide
aacaaccguucaucuaugu

SEQ ID NO: 2865093 - RNA, 19 nt, Artificial Sequence
  Description of Artificial Sequence: Synthetic oligonucleotide
cuaguuuccguagaauuuc

SEQ ID NO: 2865094 - RNA, 19 nt, Artificial Sequence
  Description of Artificial Sequence: Synthetic oligonucleotide
auuguccagacuugggcca

SEQ ID NO: 2865095 - RNA, 19 nt, Artificial Sequence
  Description of Artificial Sequence: Synthetic oligonucleotide
uuuguggccucuuuccaaa

SEQ ID NO: 2865096 - RNA, 19 nt, Artificial Sequence
  Description of Artificial Sequence: Synthetic oligonucleotide
cacaauuauaccaucagau

SEQ ID NO: 2865097 - RNA, 19 nt, Artificial Sequence
  Description of Artificial Sequence: Synthetic oligonucleotide
uuccguagaauuuccuggu

SEQ ID NO: 2865098 - RNA, 19 nt, Artificial Sequence
  Description of Artificial Sequence: Synthetic oligonucleotide
uagaauuuccuggucugug

SEQ ID NO: 2865099 - RNA, 19 nt, Artificial Sequence
  Description of Artificial Sequence: Synthetic oligonucleotide
cauugcuaccaucaauaac

SEQ ID NO: 2865100 - RNA, 19 nt, Artificial Sequence
  Description of Artificial Sequence: Synthetic oligonucleotide
uugcucuuuucuccaagca

SEQ ID NO: 2865101 - RNA, 19 nt, Artificial Sequence
  Description of Artificial Sequence: Synthetic oligonucleotide
cacauugcuaccaucaaua

SEQ ID NO: 2865102 - RNA, 19 nt, Artificial Sequence
  Description of Artificial Sequence: Synthetic oligonucleotide
ucggcaggagaauacuucu

SEQ ID NO: 2865103 - RNA, 19 nt, Artificial Sequence
  Description of Artificial Sequence: Synthetic oligonucleotide
cagaaauuguccagacuug

SEQ ID NO: 2865104 - RNA, 19 nt, Artificial Sequence
  Description of Artificial Sequence: Synthetic oligonucleotide
auuuccuggucugugauaa

SEQ ID NO: 2865105 - RNA, 19 nt, Artificial Sequence
  Description of Artificial Sequence: Synthetic oligonucleotide
guuaucauuggacacaauu

SEQ ID NO: 2865106 - RNA, 19 nt, Artificial Sequence
  Description of Artificial Sequence: Synthetic oligonucleotide
gcucuuuucuccaagcagg

SEQ ID NO: 2865107 - RNA, 19 nt, Artificial Sequence
  Description of Artificial Sequence: Synthetic oligonucleotide
aucuggucgggauugcucu

SEQ ID NO: 2865108 - RNA, 19 nt, Artificial Sequence
  Description of Artificial Sequence: Synthetic oligonucleotide
aacuucuuccauucugguu

SEQ ID NO: 2865109 - RNA, 19 nt, Artificial Sequence
  Description of Artificial Sequence: Synthetic oligonucleotide
cuguaauaucuuuguggcc

SEQ ID NO: 2865110 - RNA, 19 nt, Artificial Sequence
  Description of Artificial Sequence: Synthetic oligonucleotide
guaguuaucauuggacaca

SEQ ID NO: 2865111 - RNA, 19 nt, Artificial Sequence
  Description of Artificial Sequence: Synthetic oligonucleotide
auuaacaaccguucaucua

SEQ ID NO: 2865112 - RNA, 19 nt, Artificial Sequence
  Description of Artificial Sequence: Synthetic oligonucleotide
auucaaaagccagcuucac

SEQ ID NO: 2865113 - RNA, 19 nt, Artificial Sequence
  Description of Artificial Sequence: Synthetic oligonucleotide
gaauacuucuuuguuucca

SEQ ID NO: 2865114 - RNA, 19 nt, Artificial Sequence
  Description of Artificial Sequence: Synthetic oligonucleotide
uaacaaccguucaucuaug

SEQ ID NO: 2865115 - RNA, 19 nt, Artificial Sequence
  Description of Artificial Sequence: Synthetic oligonucleotide
uggcucauugccacauugc

SEQ ID NO: 2865116 - RNA, 19 nt, Artificial Sequence
  Description of Artificial Sequence: Synthetic oligonucleotide
auuuuauuccucggcagga

SEQ ID NO: 2865117 - RNA, 19 nt, Artificial Sequence
  Description of Artificial Sequence: Synthetic oligonucleotide
uggugugaauaccaggauu

SEQ ID NO: 2865118 - RNA, 19 nt, Artificial Sequence
  Description of Artificial Sequence: Synthetic oligonucleotide
uuccauggcucauugccac

SEQ ID NO: 2865119 - RNA, 19 nt, Artificial Sequence
  Description of Artificial Sequence: Synthetic oligonucleotide
cuuccucagaaauugucca

SEQ ID NO: 2865120 - RNA, 19 nt, Artificial Sequence
  Description of Artificial Sequence: Synthetic oligonucleotide
aggagaauacuucuuuguu

SEQ ID NO: 2865121 - RNA, 19 nt, Artificial Sequence
  Description of Artificial Sequence: Synthetic oligonucleotide
auacuucuuuguuuccaug

SEQ ID NO: 2865122 - RNA, 19 nt, Artificial Sequence
  Description of Artificial Sequence: Synthetic oligonucleotide
acaagggaauacauuaaca

SEQ ID NO: 2865123 - RNA, 19 nt, Artificial Sequence
  Description of Artificial Sequence: Synthetic oligonucleotide
ccaucaauaacuacugguc

SEQ ID NO: 2865124 - RNA, 19 nt, Artificial Sequence
  Description of Artificial Sequence: Synthetic oligonucleotide
uccucagaaauuguccaga

SEQ ID NO: 2865125 - RNA, 19 nt, Artificial Sequence
  Description of Artificial Sequence: Synthetic oligonucleotide
caugucuuccaagaggguc

SEQ ID NO: 2865126 - RNA, 19 nt, Artificial Sequence
  Description of Artificial Sequence: Synthetic oligonucleotide
gugauaagagcaucugguc

SEQ ID NO: 2865127 - RNA, 19 nt, Artificial Sequence
  Description of Artificial Sequence: Synthetic oligonucleotide
acugccaauuuuauuccuc

SEQ ID NO: 2865128 - RNA, 19 nt, Artificial Sequence
  Description of Artificial Sequence: Synthetic oligonucleotide
aaccaauccacugccaauu

SEQ ID NO: 2865129 - RNA, 19 nt, Artificial Sequence
  Description of Artificial Sequence: Synthetic oligonucleotide
gccaugucuuccaagaggg

SEQ ID NO: 2865130 - RNA, 19 nt, Artificial Sequence
  Description of Artificial Sequence: Synthetic oligonucleotide
gaauacauuaacaaccguu

SEQ ID NO: 2865131 - RNA, 19 nt, Artificial Sequence
  Description of Artificial Sequence: Synthetic oligonucleotide
gaacaaugguuucuuccuc

SEQ ID NO: 2865132 - RNA, 19 nt, Artificial Sequence
  Description of Artificial Sequence: Synthetic oligonucleotide
aauuuccuggucugugaua

SEQ ID NO: 2865133 - RNA, 19 nt, Artificial Sequence
  Description of Artificial Sequence: Synthetic oligonucleotide
uuccuggucugugauaaga

SEQ ID NO: 2865134 - RNA, 19 nt, Artificial Sequence
  Description of Artificial Sequence: Synthetic oligonucleotide
gccaauuuuauuccucggc

SEQ ID NO: 2865135 - RNA, 19 nt, Artificial Sequence
  Description of Artificial Sequence: Synthetic oligonucleotide
uaacuucuuccauucuggu

SEQ ID NO: 2865136 - RNA, 19 nt, Artificial Sequence
  Description of Artificial Sequence: Synthetic oligonucleotide
cucggcaggagaauacuuc

SEQ ID NO: 2865137 - RNA, 19 nt, Artificial Sequence
  Description of Artificial Sequence: Synthetic oligonucleotide
uaguuaucauuggacacaa

SEQ ID NO: 2865138 - RNA, 19 nt, Artificial Sequence
  Description of Artificial Sequence: Synthetic oligonucleotide
gucauugacaagggaauac

SEQ ID NO: 2865139 - RNA, 19 nt, Artificial Sequence
  Description of Artificial Sequence: Synthetic oligonucleotide
ucgucauagcacaccacuc

SEQ ID NO: 2865140 - RNA, 19 nt, Artificial Sequence
  Description of Artificial Sequence: Synthetic oligonucleotide
uccuucucuaguuuccgua

SEQ ID NO: 2865141 - RNA, 19 nt, Artificial Sequence
  Description of Artificial Sequence: Synthetic oligonucleotide
ucauagcacaccacucguc

SEQ ID NO: 2865142 - RNA, 19 nt, Artificial Sequence
  Description of Artificial Sequence: Synthetic oligonucleotide
ugccaaaucucuguaguua

SEQ ID NO: 2865143 - RNA, 19 nt, Artificial Sequence
  Description of Artificial Sequence: Synthetic oligonucleotide
gaaccggucgucauagcac

SEQ ID NO: 2865144 - RNA, 19 nt, Artificial Sequence
  Description of Artificial Sequence: Synthetic oligonucleotide
cauucugguuucucauuug

SEQ ID NO: 2865145 - RNA, 19 nt, Artificial Sequence
  Description of Artificial Sequence: Synthetic oligonucleotide
ucgggauugcucuuuucuc

SEQ ID NO: 2865146 - RNA, 19 nt, Artificial Sequence
  Description of Artificial Sequence: Synthetic oligonucleotide
auagcacaccacucgucug

SEQ ID NO: 2865147 - RNA, 19 nt, Artificial Sequence
  Description of Artificial Sequence: Synthetic oligonucleotide
uguuuccauggcucauugc

SEQ ID NO: 2865148 - RNA, 19 nt, Artificial Sequence
  Description of Artificial Sequence: Synthetic oligonucleotide
caauccacugccaauuuua

SEQ ID NO: 2865149 - RNA, 19 nt, Artificial Sequence
  Description of Artificial Sequence: Synthetic oligonucleotide
acauugcuaccaucaauaa

SEQ ID NO: 2865150 - RNA, 19 nt, Artificial Sequence
  Description of Artificial Sequence: Synthetic oligonucleotide
ugguuucucauuugccaaa

SEQ ID NO: 2865151 - RNA, 19 nt, Artificial Sequence
  Description of Artificial Sequence: Synthetic oligonucleotide
auugccacauugcuaccau

SEQ ID NO: 2865152 - RNA, 19 nt, Artificial Sequence
  Description of Artificial Sequence: Synthetic oligonucleotide
augucuuccaagaggguca

SEQ ID NO: 2865153 - RNA, 19 nt, Artificial Sequence
  Description of Artificial Sequence: Synthetic oligonucleotide
uuccucggcaggagaauac

SEQ ID NO: 2865154 - RNA, 19 nt, Artificial Sequence
  Description of Artificial Sequence: Synthetic oligonucleotide
ucaggaacaaugguuucuu

SEQ ID NO: 2865155 - RNA, 19 nt, Artificial Sequence
  Description of Artificial Sequence: Synthetic oligonucleotide
uucaucuauguaacuucuu

SEQ ID NO: 2865156 - RNA, 19 nt, Artificial Sequence
  Description of Artificial Sequence: Synthetic oligonucleotide
guaauaucuuuguggccuc

SEQ ID NO: 2865157 - RNA, 19 nt, Artificial Sequence
  Description of Artificial Sequence: Synthetic oligonucleotide
ucgucugcccuggacacgc

SEQ ID NO: 2865158 - RNA, 19 nt, Artificial Sequence
  Description of Artificial Sequence: Synthetic oligonucleotide
ugcuaccaucaauaacuac

SEQ ID NO: 2865159 - RNA, 19 nt, Artificial Sequence
  Description of Artificial Sequence: Synthetic oligonucleotide
uugcuaccaucaauaacua

SEQ ID NO: 2865160 - RNA, 19 nt, Artificial Sequence
  Description of Artificial Sequence: Synthetic oligonucleotide
augaaccggucgucauagc

SEQ ID NO: 2865161 - RNA, 19 nt, Artificial Sequence
  Description of Artificial Sequence: Synthetic oligonucleotide
auugacaagggaauacauu

SEQ ID NO: 2865162 - RNA, 19 nt, Artificial Sequence
  Description of Artificial Sequence: Synthetic oligonucleotide
gcuaccaucaauaacuacu

SEQ ID NO: 2865163 - RNA, 19 nt, Artificial Sequence
  Description of Artificial Sequence: Synthetic oligonucleotide
gagcaucuggucgggauug

SEQ ID NO: 2865164 - RNA, 19 nt, Artificial Sequence
  Description of Artificial Sequence: Synthetic oligonucleotide
uccguagaauuuccugguc

SEQ ID NO: 2865165 - RNA, 19 nt, Artificial Sequence
  Description of Artificial Sequence: Synthetic oligonucleotide
agcacaccacucgucugcc

SEQ ID NO: 2865166 - RNA, 19 nt, Artificial Sequence
  Description of Artificial Sequence: Synthetic oligonucleotide
ucugcccuggacacgccgu

SEQ ID NO: 2865167 - RNA, 19 nt, Artificial Sequence
  Description of Artificial Sequence: Synthetic oligonucleotide
uugggccaugucuuccaag

SEQ ID NO: 2865168 - RNA, 19 nt, Artificial Sequence
  Description of Artificial Sequence: Synthetic oligonucleotide
gugauggugugaauaccag

SEQ ID NO: 2865169 - RNA, 19 nt, Artificial Sequence
  Description of Artificial Sequence: Synthetic oligonucleotide
agcuucacgaugaaccggu

SEQ ID NO: 2865170 - RNA, 19 nt, Artificial Sequence
  Description of Artificial Sequence: Synthetic oligonucleotide
uuuguuuccauggcucauu

SEQ ID NO: 2865171 - RNA, 19 nt, Artificial Sequence
  Description of Artificial Sequence: Synthetic oligonucleotide
acuugggccaugucuucca

SEQ ID NO: 2865172 - RNA, 19 nt, Artificial Sequence
  Description of Artificial Sequence: Synthetic oligonucleotide
cucuguaguuaucauugga

SEQ ID NO: 2865173 - RNA, 19 nt, Artificial Sequence
  Description of Artificial Sequence: Synthetic oligonucleotide
caucaauaacuacuggucu

SEQ ID NO: 2865174 - RNA, 19 nt, Artificial Sequence
  Description of Artificial Sequence: Synthetic oligonucleotide
auaucuuuguggccucuuu

SEQ ID NO: 2865175 - RNA, 19 nt, Artificial Sequence
  Description of Artificial Sequence: Synthetic oligonucleotide
caucuggucgggauugcuc

SEQ ID NO: 2865176 - RNA, 19 nt, Artificial Sequence
  Description of Artificial Sequence: Synthetic oligonucleotide
uuauaccaucagauucaaa

SEQ ID NO: 2865177 - RNA, 19 nt, Artificial Sequence
  Description of Artificial Sequence: Synthetic oligonucleotide
augguuucuuccucagaaa

SEQ ID NO: 2865178 - RNA, 19 nt, Artificial Sequence
  Description of Artificial Sequence: Synthetic oligonucleotide
auuauaccaucagauucaa

SEQ ID NO: 2865179 - RNA, 19 nt, Artificial Sequence
  Description of Artificial Sequence: Synthetic oligonucleotide
gcaggagaauacuucuuug

SEQ ID NO: 2865180 - RNA, 19 nt, Artificial Sequence
  Description of Artificial Sequence: Synthetic oligonucleotide
ugucauugacaagggaaua

SEQ ID NO: 2865181 - RNA, 19 nt, Artificial Sequence
  Description of Artificial Sequence: Synthetic oligonucleotide
ggaacaaugguuucuuccu

SEQ ID NO: 2865182 - RNA, 19 nt, Artificial Sequence
  Description of Artificial Sequence: Synthetic oligonucleotide
auggugugaauaccaggau

SEQ ID NO: 2865183 - RNA, 19 nt, Artificial Sequence
  Description of Artificial Sequence: Synthetic oligonucleotide
uuuccuggucugugauaag

SEQ ID NO: 2865184 - RNA, 19 nt, Artificial Sequence
  Description of Artificial Sequence: Synthetic oligonucleotide
uugccaaaucucuguaguu

SEQ ID NO: 2865185 - RNA, 19 nt, Artificial Sequence
  Description of Artificial Sequence: Synthetic oligonucleotide
cauuaacaaccguucaucu

SEQ ID NO: 2865186 - RNA, 19 nt, Artificial Sequence
  Description of Artificial Sequence: Synthetic oligonucleotide
ccaauuuuauuccucggca

SEQ ID NO: 2865187 - RNA, 19 nt, Artificial Sequence
  Description of Artificial Sequence: Synthetic oligonucleotide
ucauugccacauugcuacc

SEQ ID NO: 2865188 - RNA, 19 nt, Artificial Sequence
  Description of Artificial Sequence: Synthetic oligonucleotide
cugguuucucauuugccaa

SEQ ID NO: 2865189 - RNA, 19 nt, Artificial Sequence
  Description of Artificial Sequence: Synthetic oligonucleotide
uuccuucucuaguuuccgu

SEQ ID NO: 2865190 - RNA, 19 nt, Artificial Sequence
  Description of Artificial Sequence: Synthetic oligonucleotide
agagcaucuggucgggauu

SEQ ID NO: 2865191 - RNA, 19 nt, Artificial Sequence
  Description of Artificial Sequence: Synthetic oligonucleotide
auguaacuucuuccauucu

SEQ ID NO: 2865192 - RNA, 19 nt, Artificial Sequence
  Description of Artificial Sequence: Synthetic oligonucleotide
ccuucucuaguuuccguag

SEQ ID NO: 2865193 - RNA, 19 nt, Artificial Sequence
  Description of Artificial Sequence: Synthetic oligonucleotide
ucuuccauucugguuucuc

SEQ ID NO: 2865194 - RNA, 19 nt, Artificial Sequence
  Description of Artificial Sequence: Synthetic oligonucleotide
cgucauagcacaccacucg

SEQ ID NO: 2865195 - RNA, 19 nt, Artificial Sequence
  Description of Artificial Sequence: Synthetic oligonucleotide
gacuugggccaugucuucc

SEQ ID NO: 2865196 - RNA, 19 nt, Artificial Sequence
  Description of Artificial Sequence: Synthetic oligonucleotide
cauagcacaccacucgucu

SEQ ID NO: 2865197 - RNA, 19 nt, Artificial Sequence
  Description of Artificial Sequence: Synthetic oligonucleotide
ccuggacacgccgugaugg

SEQ ID NO: 2865198 - RNA, 19 nt, Artificial Sequence
  Description of Artificial Sequence: Synthetic oligonucleotide
ccuggucugugauaagagc

SEQ ID NO: 2865199 - RNA, 19 nt, Artificial Sequence
  Description of Artificial Sequence: Synthetic oligonucleotide
gucgggauugcucuuuucu

SEQ ID NO: 2865200 - RNA, 19 nt, Artificial Sequence
  Description of Artificial Sequence: Synthetic oligonucleotide
gaauuuccuggucugugau

SEQ ID NO: 2865201 - RNA, 19 nt, Artificial Sequence
  Description of Artificial Sequence: Synthetic oligonucleotide
uucuccaagcaggaacaaa

SEQ ID NO: 2865202 - RNA, 19 nt, Artificial Sequence
  Description of Artificial Sequence: Synthetic oligonucleotide
cuuuguggccucuuuccaa

SEQ ID NO: 2865203 - RNA, 19 nt, Artificial Sequence
  Description of Artificial Sequence: Synthetic oligonucleotide
cguucaucuauguaacuuc

SEQ ID NO: 2865204 - RNA, 19 nt, Artificial Sequence
  Description of Artificial Sequence: Synthetic oligonucleotide
gucugcccuggacacgccg

SEQ ID NO: 2865205 - RNA, 19 nt, Artificial Sequence
  Description of Artificial Sequence: Synthetic oligonucleotide
accguucaucuauguaacu

SEQ ID NO: 2865206 - RNA, 19 nt, Artificial Sequence
  Description of Artificial Sequence: Synthetic oligonucleotide
cacucgucugcccuggaca

SEQ ID NO: 2865207 - RNA, 19 nt, Artificial Sequence
  Description of Artificial Sequence: Synthetic oligonucleotide
aucauuggacacaauuaua

SEQ ID NO: 2865208 - RNA, 19 nt, Artificial Sequence
  Description of Artificial Sequence: Synthetic oligonucleotide
uccauggcucauugccaca

SEQ ID NO: 2865209 - RNA, 19 nt, Artificial Sequence
  Description of Artificial Sequence: Synthetic oligonucleotide
guuucucauuugccaaauc

SEQ ID NO: 2865210 - RNA, 19 nt, Artificial Sequence
  Description of Artificial Sequence: Synthetic oligonucleotide
cuauguaacuucuuccauu

SEQ ID NO: 2865211 - RNA, 19 nt, Artificial Sequence
  Description of Artificial Sequence: Synthetic oligonucleotide
caggagaauacuucuuugu

SEQ ID NO: 2865212 - RNA, 19 nt, Artificial Sequence
  Description of Artificial Sequence: Synthetic oligonucleotide
agcaucuggucgggauugc

SEQ ID NO: 2865213 - RNA, 19 nt, Artificial Sequence
  Description of Artificial Sequence: Synthetic oligonucleotide
cucuaguuuccguagaauu

SEQ ID NO: 2865214 - RNA, 19 nt, Artificial Sequence
  Description of Artificial Sequence: Synthetic oligonucleotide
uccucggcaggagaauacu

SEQ ID NO: 2865215 - RNA, 19 nt, Artificial Sequence
  Description of Artificial Sequence: Synthetic oligonucleotide
uauuccucggcaggagaau

SEQ ID NO: 2865216 - RNA, 19 nt, Artificial Sequence
  Description of Artificial Sequence: Synthetic oligonucleotide
ucuuuucuccaagcaggaa

SEQ ID NO: 2865217 - RNA, 19 nt, Artificial Sequence
  Description of Artificial Sequence: Synthetic oligonucleotide
gccgugauggugugaauac

SEQ ID NO: 2865218 - RNA, 19 nt, Artificial Sequence
  Description of Artificial Sequence: Synthetic oligonucleotide
acgaugaaccggucgucau

SEQ ID NO: 2865219 - RNA, 19 nt, Artificial Sequence
  Description of Artificial Sequence: Synthetic oligonucleotide
cguagaauuuccuggucug

SEQ ID NO: 2865220 - RNA, 19 nt, Artificial Sequence
  Description of Artificial Sequence: Synthetic oligonucleotide
uggacacgccgugauggug

SEQ ID NO: 2865221 - RNA, 19 nt, Artificial Sequence
  Description of Artificial Sequence: Synthetic oligonucleotide
acaccacucgucugcccug

SEQ ID NO: 2865222 - RNA, 19 nt, Artificial Sequence
  Description of Artificial Sequence: Synthetic oligonucleotide
ccaagagggucaucagggg

SEQ ID NO: 2865223 - RNA, 19 nt, Artificial Sequence
  Description of Artificial Sequence: Synthetic oligonucleotide
gacacgccgugauggugug

SEQ ID NO: 2865224 - RNA, 19 nt, Artificial Sequence
  Description of Artificial Sequence: Synthetic oligonucleotide
cuucuuuguuuccauggcu

SEQ ID NO: 2865225 - RNA, 19 nt, Artificial Sequence
  Description of Artificial Sequence: Synthetic oligonucleotide
caggaacaaugguuucuuc

SEQ ID NO: 2865226 - RNA, 19 nt, Artificial Sequence
  Description of Artificial Sequence: Synthetic oligonucleotide
aguuuccguagaauuuccu

SEQ ID NO: 2865227 - RNA, 19 nt, Artificial Sequence
  Description of Artificial Sequence: Synthetic oligonucleotide
guucaucuauguaacuucu

SEQ ID NO: 2865228 - RNA, 19 nt, Artificial Sequence
  Description of Artificial Sequence: Synthetic oligonucleotide
ggacacaauuauaccauca

SEQ ID NO: 2865229 - RNA, 19 nt, Artificial Sequence
  Description of Artificial Sequence: Synthetic oligonucleotide
cauuugccaaaucucugua

SEQ ID NO: 2865230 - RNA, 19 nt, Artificial Sequence
  Description of Artificial Sequence: Synthetic oligonucleotide
cgggauugcucuuuucucc

SEQ ID NO: 2865231 - RNA, 19 nt, Artificial Sequence
  Description of Artificial Sequence: Synthetic oligonucleotide
ccucagaaauuguccagac

SEQ ID NO: 2865232 - RNA, 19 nt, Artificial Sequence
  Description of Artificial Sequence: Synthetic oligonucleotide
auccacugccaauuuuauu

SEQ ID NO: 2865233 - RNA, 19 nt, Artificial Sequence
  Description of Artificial Sequence: Synthetic oligonucleotide
accaauccacugccaauuu

SEQ ID NO: 2865234 - RNA, 19 nt, Artificial Sequence
  Description of Artificial Sequence: Synthetic oligonucleotide
uuucuccaagcaggaacaa

SEQ ID NO: 2865235 - RNA, 19 nt, Artificial Sequence
  Description of Artificial Sequence: Synthetic oligonucleotide
uugccacauugcuaccauc

SEQ ID NO: 2865236 - RNA, 19 nt, Artificial Sequence
  Description of Artificial Sequence: Synthetic oligonucleotide
ggagaauacuucuuuguuu

SEQ ID NO: 2865237 - RNA, 19 nt, Artificial Sequence
  Description of Artificial Sequence: Synthetic oligonucleotide
cauugccacauugcuacca

SEQ ID NO: 2865238 - RNA, 19 nt, Artificial Sequence
  Description of Artificial Sequence: Synthetic oligonucleotide
cauugacaagggaauacau

SEQ ID NO: 2865239 - RNA, 19 nt, Artificial Sequence
  Description of Artificial Sequence: Synthetic oligonucleotide
uuguggccucuuuccaaaa

SEQ ID NO: 2865240 - RNA, 19 nt, Artificial Sequence
  Description of Artificial Sequence: Synthetic oligonucleotide
uaagagcaucuggucggga

SEQ ID NO: 2865241 - RNA, 19 nt, Artificial Sequence
  Description of Artificial Sequence: Synthetic oligonucleotide
ccaucagauucaaaagcca

SEQ ID NO: 2865242 - RNA, 19 nt, Artificial Sequence
  Description of Artificial Sequence: Synthetic oligonucleotide
caaugguuucuuccucaga

SEQ ID NO: 2865243 - RNA, 19 nt, Artificial Sequence
  Description of Artificial Sequence: Synthetic oligonucleotide
ggugugaauaccaggauuu

SEQ ID NO: 2865244 - RNA, 19 nt, Artificial Sequence
  Description of Artificial Sequence: Synthetic oligonucleotide
auuccucggcaggagaaua

SEQ ID NO: 2865245 - RNA, 19 nt, Artificial Sequence
  Description of Artificial Sequence: Synthetic oligonucleotide
cgugauggugugaauacca

SEQ ID NO: 2865246 - RNA, 19 nt, Artificial Sequence
  Description of Artificial Sequence: Synthetic oligonucleotide
uccagacuugggccauguc

SEQ ID NO: 2865247 - RNA, 19 nt, Artificial Sequence
  Description of Artificial Sequence: Synthetic oligonucleotide
ucuggucgggauugcucuu

SEQ ID NO: 2865248 - RNA, 19 nt, Artificial Sequence
  Description of Artificial Sequence: Synthetic oligonucleotide
cacgaugaaccggucguca

SEQ ID NO: 2865249 - RNA, 19 nt, Artificial Sequence
  Description of Artificial Sequence: Synthetic oligonucleotide
caccacucgucugcccugg

SEQ ID NO: 2865250 - RNA, 19 nt, Artificial Sequence
  Description of Artificial Sequence: Synthetic oligonucleotide
cucagaaauuguccagacu

SEQ ID NO: 2865251 - RNA, 19 nt, Artificial Sequence
  Description of Artificial Sequence: Synthetic oligonucleotide
ggcucauugccacauugcu

SEQ ID NO: 2865252 - RNA, 19 nt, Artificial Sequence
  Description of Artificial Sequence: Synthetic oligonucleotide
uggucgggauugcucuuuu

SEQ ID NO: 2865253 - RNA, 19 nt, Artificial Sequence
  Description of Artificial Sequence: Synthetic oligonucleotide
ccaaaucucuguaguuauc

SEQ ID NO: 2865254 - RNA, 19 nt, Artificial Sequence
  Description of Artificial Sequence: Synthetic oligonucleotide
cucgucugcccuggacacg

SEQ ID NO: 2865255 - RNA, 19 nt, Artificial Sequence
  Description of Artificial Sequence: Synthetic oligonucleotide
cucaggaacaaugguuucu

SEQ ID NO: 2865256 - RNA, 19 nt, Artificial Sequence
  Description of Artificial Sequence: Synthetic oligonucleotide
uuguccagacuugggccau

SEQ ID NO: 2865257 - RNA, 19 nt, Artificial Sequence
  Description of Artificial Sequence: Synthetic oligonucleotide
accggucgucauagcacac

SEQ ID NO: 2865258 - RNA, 19 nt, Artificial Sequence
  Description of Artificial Sequence: Synthetic oligonucleotide
guagaauuuccuggucugu

SEQ ID NO: 2865259 - RNA, 19 nt, Artificial Sequence
  Description of Artificial Sequence: Synthetic oligonucleotide
uguccagacuugggccaug

SEQ ID NO: 2865260 - RNA, 19 nt, Artificial Sequence
  Description of Artificial Sequence: Synthetic oligonucleotide
cacaccacucgucugcccu

SEQ ID NO: 2865261 - RNA, 19 nt, Artificial Sequence
  Description of Artificial Sequence: Synthetic oligonucleotide
cugcccuggacacgccgug

SEQ ID NO: 2865262 - RNA, 19 nt, Artificial Sequence
  Description of Artificial Sequence: Synthetic oligonucleotide
cacgccgugauggugugaa

SEQ ID NO: 2865263 - RNA, 19 nt, Artificial Sequence
  Description of Artificial Sequence: Synthetic oligonucleotide
ggaauacauuaacaaccgu

SEQ ID NO: 2865264 - RNA, 19 nt, Artificial Sequence
  Description of Artificial Sequence: Synthetic oligonucleotide
ccagacuugggccaugucu

SEQ ID NO: 2865265 - RNA, 19 nt, Artificial Sequence
  Description of Artificial Sequence: Synthetic oligonucleotide
ggcaggagaauacuucuuu

SEQ ID NO: 2865266 - RNA, 19 nt, Artificial Sequence
  Description of Artificial Sequence: Synthetic oligonucleotide
ugcccuggacacgccguga

SEQ ID NO: 2865267 - RNA, 19 nt, Artificial Sequence
  Description of Artificial Sequence: Synthetic oligonucleotide
caaaagccagcuucacgau

SEQ ID NO: 2865268 - RNA, 19 nt, Artificial Sequence
  Description of Artificial Sequence: Synthetic oligonucleotide
cacugccaauuuuauuccu

SEQ ID NO: 2865269 - RNA, 19 nt, Artificial Sequence
  Description of Artificial Sequence: Synthetic oligonucleotide
cuugggccaugucuuccaa

SEQ ID NO: 2865270 - RNA, 19 nt, Artificial Sequence
  Description of Artificial Sequence: Synthetic oligonucleotide
ccgugauggugugaauacc

SEQ ID NO: 2865271 - RNA, 19 nt, Artificial Sequence
  Description of Artificial Sequence: Synthetic oligonucleotide
ggauugcucuuuucuccaa

SEQ ID NO: 2865272 - RNA, 19 nt, Artificial Sequence
  Description of Artificial Sequence: Synthetic oligonucleotide
aguuaucauuggacacaau

SEQ ID NO: 2865273 - RNA, 19 nt, Artificial Sequence
  Description of Artificial Sequence: Synthetic oligonucleotide
ccggucgucauagcacacc

SEQ ID NO: 2865274 - RNA, 19 nt, Artificial Sequence
  Description of Artificial Sequence: Synthetic oligonucleotide
accacucgucugcccugga

SEQ ID NO: 2865275 - RNA, 19 nt, Artificial Sequence
  Description of Artificial Sequence: Synthetic oligonucleotide
gcucauugccacauugcua

SEQ ID NO: 2865276 - RNA, 19 nt, Artificial Sequence
  Description of Artificial Sequence: Synthetic oligonucleotide
ggucgggauugcucuuuuc

SEQ ID NO: 2865277 - RNA, 19 nt, Artificial Sequence
  Description of Artificial Sequence: Synthetic oligonucleotide
ccguagaauuuccuggucu

SEQ ID NO: 2865278 - RNA, 19 nt, Artificial Sequence
  Description of Artificial Sequence: Synthetic oligonucleotide
ggucgucauagcacaccac

SEQ ID NO: 2865279 - RNA, 19 nt, Artificial Sequence
  Description of Artificial Sequence: Synthetic oligonucleotide
ggacacgccgugauggugu

SEQ ID NO: 2865280 - RNA, 19 nt, Artificial Sequence
  Description of Artificial Sequence: Synthetic oligonucleotide
gguuucuuccucagaaauu

SEQ ID NO: 2865281 - RNA, 19 nt, Artificial Sequence
  Description of Artificial Sequence: Synthetic oligonucleotide
gcacaccacucgucugccc

SEQ ID NO: 2865282 - RNA, 19 nt, Artificial Sequence
  Description of Artificial Sequence: Synthetic oligonucleotide
ccacucgucugcccuggac

SEQ ID NO: 2865283 - RNA, 19 nt, Artificial Sequence
  Description of Artificial Sequence: Synthetic oligonucleotide
cagauucaaaagccagcuu

SEQ ID NO: 2865284 - RNA, 19 nt, Artificial Sequence
  Description of Artificial Sequence: Synthetic oligonucleotide
cuggacacgccgugauggu

SEQ ID NO: 2865285 - RNA, 19 nt, Artificial Sequence
  Description of Artificial Sequence: Synthetic oligonucleotide
acgccgugauggugugaau

SEQ ID NO: 2865286 - RNA, 19 nt, Artificial Sequence
  Description of Artificial Sequence: Synthetic oligonucleotide
gugugaauaccaggauuuu

SEQ ID NO: 2865287 - RNA, 19 nt, Artificial Sequence
  Description of Artificial Sequence: Synthetic oligonucleotide
ccauucugguuucucauuu

SEQ ID NO: 2865288 - RNA, 19 nt, Artificial Sequence
  Description of Artificial Sequence: Synthetic oligonucleotide
cggucgucauagcacacca

SEQ ID NO: 2865289 - RNA, 19 nt, Artificial Sequence
  Description of Artificial Sequence: Synthetic oligonucleotide
acacgccgugaugguguga

SEQ ID NO: 2865290 - RNA, 19 nt, Artificial Sequence
  Description of Artificial Sequence: Synthetic oligonucleotide
guccagacuugggccaugu

SEQ ID NO: 2865291 - RNA, 19 nt, Artificial Sequence
  Description of Artificial Sequence: Synthetic oligonucleotide
cccuggacacgccgugaug

SEQ ID NO: 2865292 - RNA, 19 nt, Artificial Sequence
  Description of Artificial Sequence: Synthetic oligonucleotide
gucuuccaagagggucauc

SEQ ID NO: 2865293 - RNA, 19 nt, Artificial Sequence
  Description of Artificial Sequence: Synthetic oligonucleotide
gcuucacgaugaaccgguc

SEQ ID NO: 2865294 - RNA, 19 nt, Artificial Sequence
  Description of Artificial Sequence: Synthetic oligonucleotide
ccguucaucuauguaacuu

SEQ ID NO: 2865295 - RNA, 19 nt, Artificial Sequence
  Description of Artificial Sequence: Synthetic oligonucleotide
cauggcucauugccacauu

SEQ ID NO: 2865296 - RNA, 19 nt, Artificial Sequence
  Description of Artificial Sequence: Synthetic oligonucleotide
cgaugaaccggucgucaua

SEQ ID NO: 2865297 - RNA, 19 nt, Artificial Sequence
  Description of Artificial Sequence: Synthetic oligonucleotide
cuggucgggauugcucuuu

SEQ ID NO: 2865298 - RNA, 19 nt, Artificial Sequence
  Description of Artificial Sequence: Synthetic oligonucleotide
gcaucuggucgggauugcu

SEQ ID NO: 2865299 - RNA, 19 nt, Artificial Sequence
  Description of Artificial Sequence: Synthetic oligonucleotide
ccaauccacugccaauuuu

SEQ ID NO: 2865300 - RNA, 19 nt, Artificial Sequence
  Description of Artificial Sequence: Synthetic oligonucleotide
ccaugucuuccaagagggu

SEQ ID NO: 2865301 - RNA, 19 nt, Artificial Sequence
  Description of Artificial Sequence: Synthetic oligonucleotide
cgccgugauggugugaaua

SEQ ID NO: 2865302 - RNA, 19 nt, Artificial Sequence
  Description of Artificial Sequence: Synthetic oligonucleotide
gcccuggacacgccgugau

SEQ ID NO: 2865303 - RNA, 19 nt, Artificial Sequence
  Description of Artificial Sequence: Synthetic oligonucleotide
ccauggcucauugccacau

SEQ ID NO: 2865304 - RNA, 19 nt, Artificial Sequence
  Description of Artificial Sequence: Synthetic oligonucleotide
cgucugcccuggacacgcc

SEQ ID NO: 2865305 - RNA, 19 nt, Artificial Sequence
  Description of Artificial Sequence: Synthetic oligonucleotide
ccucggcaggagaauacuu

SEQ ID NO: 2865306 - RNA, 19 nt, Artificial Sequence
  Description of Artificial Sequence: Synthetic oligonucleotide
cggcaggagaauacuucuu

SEQ ID NO: 2865307 - RNA, 19 nt, Artificial Sequence
  Description of Artificial Sequence: Synthetic oligonucleotide
aaaacauagacuuauauuc

SEQ ID NO: 2865308 - RNA, 19 nt, Artificial Sequence
  Description of Artificial Sequence: Synthetic oligonucleotide
aauuuaaagacuuuguuac

SEQ ID NO: 2865309 - RNA, 19 nt, Artificial Sequence
  Description of Artificial Sequence: Synthetic oligonucleotide
aaacuugaaauuuauaacc

SEQ ID NO: 2865310 - RNA, 19 nt, Artificial Sequence
  Description of Artificial Sequence: Synthetic oligonucleotide
aaaacuugaaauuuauaac

SEQ ID NO: 2865311 - RNA, 19 nt, Artificial Sequence
  Description of Artificial Sequence: Synthetic oligonucleotide
cuugaaauaauaaagaaug

SEQ ID NO: 2865312 - RNA, 19 nt, Artificial Sequence
  Description of Artificial Sequence: Synthetic oligonucleotide
uuuucuugaaauaauaaag

SEQ ID NO: 2865313 - RNA, 19 nt, Artificial Sequence
  Description of Artificial Sequence: Synthetic oligonucleotide
ucaacuaaaauuuaaagac

SEQ ID NO: 2865314 - RNA, 19 nt, Artificial Sequence
  Description of Artificial Sequence: Synthetic oligonucleotide
uauauaacgcuacaaaggg

SEQ ID NO: 2865315 - RNA, 19 nt, Artificial Sequence
  Description of Artificial Sequence: Synthetic oligonucleotide
auguuuuaaagccagauac

SEQ ID NO: 2865316 - RNA, 19 nt, Artificial Sequence
  Description of Artificial Sequence: Synthetic oligonucleotide
uuauauaacgcuacaaagg

SEQ ID NO: 2865317 - RNA, 19 nt, Artificial Sequence
  Description of Artificial Sequence: Synthetic oligonucleotide
uaaacagugaucauuacag

SEQ ID NO: 2865318 - RNA, 19 nt, Artificial Sequence
  Description of Artificial Sequence: Synthetic oligonucleotide
uuuaaagccagauacauca

SEQ ID NO: 2865319 - RNA, 19 nt, Artificial Sequence
  Description of Artificial Sequence: Synthetic oligonucleotide
agaaacaugauuuuggaag

SEQ ID NO: 2865320 - RNA, 19 nt, Artificial Sequence
  Description of Artificial Sequence: Synthetic oligonucleotide
auucugauguuuuaaagcc

SEQ ID NO: 2865321 - RNA, 19 nt, Artificial Sequence
  Description of Artificial Sequence: Synthetic oligonucleotide
aaacgaaguaagcagaaac

SEQ ID NO: 2865322 - RNA, 19 nt, Artificial Sequence
  Description of Artificial Sequence: Synthetic oligonucleotide
gaaauuuauaaccacagug

SEQ ID NO: 2865323 - RNA, 19 nt, Artificial Sequence
  Description of Artificial Sequence: Synthetic oligonucleotide
aaaccgaaagcacaaaagg

SEQ ID NO: 2865324 - RNA, 19 nt, Artificial Sequence
  Description of Artificial Sequence: Synthetic oligonucleotide
uuuauauaacgcuacaaag

SEQ ID NO: 2865325 - RNA, 19 nt, Artificial Sequence
  Description of Artificial Sequence: Synthetic oligonucleotide
aucauuacaguauuucucc

SEQ ID NO: 2865326 - RNA, 19 nt, Artificial Sequence
  Description of Artificial Sequence: Synthetic oligonucleotide
aacaaacugauucugaugu

SEQ ID NO: 2865327 - RNA, 19 nt, Artificial Sequence
  Description of Artificial Sequence: Synthetic oligonucleotide
uuuuauacaaaccgaaagc

SEQ ID NO: 2865328 - RNA, 19 nt, Artificial Sequence
  Description of Artificial Sequence: Synthetic oligonucleotide
uaauaaagaaugcacaaga

SEQ ID NO: 2865329 - RNA, 19 nt, Artificial Sequence
  Description of Artificial Sequence: Synthetic oligonucleotide
aauaauaaagaaugcacaa

SEQ ID NO: 2865330 - RNA, 19 nt, Artificial Sequence
  Description of Artificial Sequence: Synthetic oligonucleotide
uucaacuaaaauuuaaaga

SEQ ID NO: 2865331 - RNA, 19 nt, Artificial Sequence
  Description of Artificial Sequence: Synthetic oligonucleotide
auagacuuauauuccaacc

SEQ ID NO: 2865332 - RNA, 19 nt, Artificial Sequence
  Description of Artificial Sequence: Synthetic oligonucleotide
aauacaagaaacaugauuu

SEQ ID NO: 2865333 - RNA, 19 nt, Artificial Sequence
  Description of Artificial Sequence: Synthetic oligonucleotide
ucuacaaaagcuuuaagaa

SEQ ID NO: 2865334 - RNA, 19 nt, Artificial Sequence
  Description of Artificial Sequence: Synthetic oligonucleotide
gaaaacuugaaauuuauaa

SEQ ID NO: 2865335 - RNA, 19 nt, Artificial Sequence
  Description of Artificial Sequence: Synthetic oligonucleotide
uugaaauuuauaaccacag

SEQ ID NO: 2865336 - RNA, 19 nt, Artificial Sequence
  Description of Artificial Sequence: Synthetic oligonucleotide
auucuguguaaauaagucc

SEQ ID NO: 2865337 - RNA, 19 nt, Artificial Sequence
  Description of Artificial Sequence: Synthetic oligonucleotide
aacuucaguuuccaaaugg

SEQ ID NO: 2865338 - RNA, 19 nt, Artificial Sequence
  Description of Artificial Sequence: Synthetic oligonucleotide
aaauuuaaagacuuuguua

SEQ ID NO: 2865339 - RNA, 19 nt, Artificial Sequence
  Description of Artificial Sequence: Synthetic oligonucleotide
uuuccuuuaaucucaaagc

SEQ ID NO: 2865340 - RNA, 19 nt, Artificial Sequence
  Description of Artificial Sequence: Synthetic oligonucleotide
uauaacgcuacaaagggcu

SEQ ID NO: 2865341 - RNA, 19 nt, Artificial Sequence
  Description of Artificial Sequence: Synthetic oligonucleotide
ugcacaagaaaacauagac

SEQ ID NO: 2865342 - RNA, 19 nt, Artificial Sequence
  Description of Artificial Sequence: Synthetic oligonucleotide
uacaaaagcuuuaagaaaa

SEQ ID NO: 2865343 - RNA, 19 nt, Artificial Sequence
  Description of Artificial Sequence: Synthetic oligonucleotide
uuuuauauaacgcuacaaa

SEQ ID NO: 2865344 - RNA, 19 nt, Artificial Sequence
  Description of Artificial Sequence: Synthetic oligonucleotide
uauacaaaccgaaagcaca

SEQ ID NO: 2865345 - RNA, 19 nt, Artificial Sequence
  Description of Artificial Sequence: Synthetic oligonucleotide
aaagcuuuaagaaaacuug

SEQ ID NO: 2865346 - RNA, 19 nt, Artificial Sequence
  Description of Artificial Sequence: Synthetic oligonucleotide
aaauggucaguuucaauag

SEQ ID NO: 2865347 - RNA, 19 nt, Artificial Sequence
  Description of Artificial Sequence: Synthetic oligonucleotide
gauucugauguuuuaaagc

SEQ ID NO: 2865348 - RNA, 19 nt, Artificial Sequence
  Description of Artificial Sequence: Synthetic oligonucleotide
aaacauagacuuauauucc

SEQ ID NO: 2865349 - RNA, 19 nt, Artificial Sequence
  Description of Artificial Sequence: Synthetic oligonucleotide
auucaacuaaaauuuaaag

SEQ ID NO: 2865350 - RNA, 19 nt, Artificial Sequence
  Description of Artificial Sequence: Synthetic oligonucleotide
uaacaaacgaaguaagcag

SEQ ID NO: 2865351 - RNA, 19 nt, Artificial Sequence
  Description of Artificial Sequence: Synthetic oligonucleotide
uggaagagaauucucauga

SEQ ID NO: 2865352 - RNA, 19 nt, Artificial Sequence
  Description of Artificial Sequence: Synthetic oligonucleotide
aaauacaagaaacaugauu

SEQ ID NO: 2865353 - RNA, 19 nt, Artificial Sequence
  Description of Artificial Sequence: Synthetic oligonucleotide
aagacuuuguuacaagucu

SEQ ID NO: 2865354 - RNA, 19 nt, Artificial Sequence
  Description of Artificial Sequence: Synthetic oligonucleotide
uaaaauuuaaagacuuugu

SEQ ID NO: 2865355 - RNA, 19 nt, Artificial Sequence
  Description of Artificial Sequence: Synthetic oligonucleotide
aauaguuaugauucugugu

SEQ ID NO: 2865356 - RNA, 19 nt, Artificial Sequence
  Description of Artificial Sequence: Synthetic oligonucleotide
aaggccuucaguuuuauau

SEQ ID NO: 2865357 - RNA, 19 nt, Artificial Sequence
  Description of Artificial Sequence: Synthetic oligonucleotide
ucugauguuuuaaagccag

SEQ ID NO: 2865358 - RNA, 19 nt, Artificial Sequence
  Description of Artificial Sequence: Synthetic oligonucleotide
ugaaauaauaaagaaugca

SEQ ID NO: 2865359 - RNA, 19 nt, Artificial Sequence
  Description of Artificial Sequence: Synthetic oligonucleotide
uuauauuccaaccaaugau

SEQ ID NO: 2865360 - RNA, 19 nt, Artificial Sequence
  Description of Artificial Sequence: Synthetic oligonucleotide
uuacaagucuacaaaagcu

SEQ ID NO: 2865361 - RNA, 19 nt, Artificial Sequence
  Description of Artificial Sequence: Synthetic oligonucleotide
aaauaauaaagaaugcaca

SEQ ID NO: 2865362 - RNA, 19 nt, Artificial Sequence
  Description of Artificial Sequence: Synthetic oligonucleotide
uucaguuuccaaaugguca

SEQ ID NO: 2865363 - RNA, 19 nt, Artificial Sequence
  Description of Artificial Sequence: Synthetic oligonucleotide
uuuguuacaagucuacaaa

SEQ ID NO: 2865364 - RNA, 19 nt, Artificial Sequence
  Description of Artificial Sequence: Synthetic oligonucleotide
aagcagaaacuucaguuuc

SEQ ID NO: 2865365 - RNA, 19 nt, Artificial Sequence
  Description of Artificial Sequence: Synthetic oligonucleotide
auuacaguauuucuccuuc

SEQ ID NO: 2865366 - RNA, 19 nt, Artificial Sequence
  Description of Artificial Sequence: Synthetic oligonucleotide
uuuaagaaaacuugaaauu

SEQ ID NO: 2865367 - RNA, 19 nt, Artificial Sequence
  Description of Artificial Sequence: Synthetic oligonucleotide
uguuacaagucuacaaaag

SEQ ID NO: 2865368 - RNA, 19 nt, Artificial Sequence
  Description of Artificial Sequence: Synthetic oligonucleotide
uucaguuuuauauaacgcu

SEQ ID NO: 2865369 - RNA, 19 nt, Artificial Sequence
  Description of Artificial Sequence: Synthetic oligonucleotide
uuuauacaaaccgaaagca

SEQ ID NO: 2865370 - RNA, 19 nt, Artificial Sequence
  Description of Artificial Sequence: Synthetic oligonucleotide
guuucaauaguuaugauuc

SEQ ID NO: 2865371 - RNA, 19 nt, Artificial Sequence
  Description of Artificial Sequence: Synthetic oligonucleotide
uuuuggaagagaauucuca

SEQ ID NO: 2865372 - RNA, 19 nt, Artificial Sequence
  Description of Artificial Sequence: Synthetic oligonucleotide
ucuugaaauaauaaagaau

SEQ ID NO: 2865373 - RNA, 19 nt, Artificial Sequence
  Description of Artificial Sequence: Synthetic oligonucleotide
uaugauucuguguaaauaa

SEQ ID NO: 2865374 - RNA, 19 nt, Artificial Sequence
  Description of Artificial Sequence: Synthetic oligonucleotide
uuaggaguacauuaaauaa

SEQ ID NO: 2865375 - RNA, 19 nt, Artificial Sequence
  Description of Artificial Sequence: Synthetic oligonucleotide
auaguuaugauucugugua

SEQ ID NO: 2865376 - RNA, 19 nt, Artificial Sequence
  Description of Artificial Sequence: Synthetic oligonucleotide
agauacaucaguuguuagg

SEQ ID NO: 2865377 - RNA, 19 nt, Artificial Sequence
  Description of Artificial Sequence: Synthetic oligonucleotide
aaccgaaagcacaaaaggc

SEQ ID NO: 2865378 - RNA, 19 nt, Artificial Sequence
  Description of Artificial Sequence: Synthetic oligonucleotide
uuuauaaccacaguguaaa

SEQ ID NO: 2865379 - RNA, 19 nt, Artificial Sequence
  Description of Artificial Sequence: Synthetic oligonucleotide
aaagggcuggccuaaagug

SEQ ID NO: 2865380 - RNA, 19 nt, Artificial Sequence
  Description of Artificial Sequence: Synthetic oligonucleotide
aaugcacaagaaaacauag

SEQ ID NO: 2865381 - RNA, 19 nt, Artificial Sequence
  Description of Artificial Sequence: Synthetic oligonucleotide
aaguguacauaguguaaac

SEQ ID NO: 2865382 - RNA, 19 nt, Artificial Sequence
  Description of Artificial Sequence: Synthetic oligonucleotide
uugaaauaauaaagaaugc

SEQ ID NO: 2865383 - RNA, 19 nt, Artificial Sequence
  Description of Artificial Sequence: Synthetic oligonucleotide
uagacuuauauuccaacca

SEQ ID NO: 2865384 - RNA, 19 nt, Artificial Sequence
  Description of Artificial Sequence: Synthetic oligonucleotide
acuugaaauuuauaaccac

SEQ ID NO: 2865385 - RNA, 19 nt, Artificial Sequence
  Description of Artificial Sequence: Synthetic oligonucleotide
aaagacuuuguuacaaguc

SEQ ID NO: 2865386 - RNA, 19 nt, Artificial Sequence
  Description of Artificial Sequence: Synthetic oligonucleotide
guuacaagucuacaaaagc

SEQ ID NO: 2865387 - RNA, 19 nt, Artificial Sequence
  Description of Artificial Sequence: Synthetic oligonucleotide
aauuuauaaccacagugua

SEQ ID NO: 2865388 - RNA, 19 nt, Artificial Sequence
  Description of Artificial Sequence: Synthetic oligonucleotide
augaguaguacuuuucuug

SEQ ID NO: 2865389 - RNA, 19 nt, Artificial Sequence
  Description of Artificial Sequence: Synthetic oligonucleotide
uggccuaaaguguacauag

SEQ ID NO: 2865390 - RNA, 19 nt, Artificial Sequence
  Description of Artificial Sequence: Synthetic oligonucleotide
ucaauaguuaugauucugu

SEQ ID NO: 2865391 - RNA, 19 nt, Artificial Sequence
  Description of Artificial Sequence: Synthetic oligonucleotide
cuaaaauuuaaagacuuug

SEQ ID NO: 2865392 - RNA, 19 nt, Artificial Sequence
  Description of Artificial Sequence: Synthetic oligonucleotide
aacauagacuuauauucca

SEQ ID NO: 2865393 - RNA, 19 nt, Artificial Sequence
  Description of Artificial Sequence: Synthetic oligonucleotide
accgaaagcacaaaaggcc

SEQ ID NO: 2865394 - RNA, 19 nt, Artificial Sequence
  Description of Artificial Sequence: Synthetic oligonucleotide
auaguguaaacagugauca

SEQ ID NO: 2865395 - RNA, 19 nt, Artificial Sequence
  Description of Artificial Sequence: Synthetic oligonucleotide
ugauucugauguuuuaaag

SEQ ID NO: 2865396 - RNA, 19 nt, Artificial Sequence
  Description of Artificial Sequence: Synthetic oligonucleotide
uuccuuuaaucucaaagcu

SEQ ID NO: 2865397 - RNA, 19 nt, Artificial Sequence
  Description of Artificial Sequence: Synthetic oligonucleotide
uuuccaaauggucaguuuc

SEQ ID NO: 2865398 - RNA, 19 nt, Artificial Sequence
  Description of Artificial Sequence: Synthetic oligonucleotide
acaagaaacaugauuuugg

SEQ ID NO: 2865399 - RNA, 19 nt, Artificial Sequence
  Description of Artificial Sequence: Synthetic oligonucleotide
gaguacauuaaauaaaaua

SEQ ID NO: 2865400 - RNA, 19 nt, Artificial Sequence
  Description of Artificial Sequence: Synthetic oligonucleotide
uguacauaguguaaacagu

SEQ ID NO: 2865401 - RNA, 19 nt, Artificial Sequence
  Description of Artificial Sequence: Synthetic oligonucleotide
cuucaguuuuauauaacgc

SEQ ID NO: 2865402 - RNA, 19 nt, Artificial Sequence
  Description of Artificial Sequence: Synthetic oligonucleotide
aauucucaugaguaguacu

SEQ ID NO: 2865403 - RNA, 19 nt, Artificial Sequence
  Description of Artificial Sequence: Synthetic oligonucleotide
uuaaagacuuuguuacaag

SEQ ID NO: 2865404 - RNA, 19 nt, Artificial Sequence
  Description of Artificial Sequence: Synthetic oligonucleotide
uuauacaaaccgaaagcac

SEQ ID NO: 2865405 - RNA, 19 nt, Artificial Sequence
  Description of Artificial Sequence: Synthetic oligonucleotide
agaaacuucaguuuccaaa

SEQ ID NO: 2865406 - RNA, 19 nt, Artificial Sequence
  Description of Artificial Sequence: Synthetic oligonucleotide
uguuuuaaagccagauaca

SEQ ID NO: 2865407 - RNA, 19 nt, Artificial Sequence
  Description of Artificial Sequence: Synthetic oligonucleotide
ugauucuguguaaauaagu

SEQ ID NO: 2865408 - RNA, 19 nt, Artificial Sequence
  Description of Artificial Sequence: Synthetic oligonucleotide
ucaguuuuauauaacgcua

SEQ ID NO: 2865409 - RNA, 19 nt, Artificial Sequence
  Description of Artificial Sequence: Synthetic oligonucleotide
aacagugaucauuacagua

SEQ ID NO: 2865410 - RNA, 19 nt, Artificial Sequence
  Description of Artificial Sequence: Synthetic oligonucleotide
auaaagaaugcacaagaaa

SEQ ID NO: 2865411 - RNA, 19 nt, Artificial Sequence
  Description of Artificial Sequence: Synthetic oligonucleotide
accaaugaugguaacaaac

SEQ ID NO: 2865412 - RNA, 19 nt, Artificial Sequence
  Description of Artificial Sequence: Synthetic oligonucleotide
uaaagacuuuguuacaagu

SEQ ID NO: 2865413 - RNA, 19 nt, Artificial Sequence
  Description of Artificial Sequence: Synthetic oligonucleotide
auaauaaagaaugcacaag

SEQ ID NO: 2865414 - RNA, 19 nt, Artificial Sequence
  Description of Artificial Sequence: Synthetic oligonucleotide
ugguaacaaacgaaguaag

SEQ ID NO: 2865415 - RNA, 19 nt, Artificial Sequence
  Description of Artificial Sequence: Synthetic oligonucleotide
uauuucuccuucaucaaaa

SEQ ID NO: 2865416 - RNA, 19 nt, Artificial Sequence
  Description of Artificial Sequence: Synthetic oligonucleotide
caaaccgaaagcacaaaag

SEQ ID NO: 2865417 - RNA, 19 nt, Artificial Sequence
  Description of Artificial Sequence: Synthetic oligonucleotide
aaaagcuuuaagaaaacuu

SEQ ID NO: 2865418 - RNA, 19 nt, Artificial Sequence
  Description of Artificial Sequence: Synthetic oligonucleotide
gucuacaaaagcuuuaaga

SEQ ID NO: 2865419 - RNA, 19 nt, Artificial Sequence
  Description of Artificial Sequence: Synthetic oligonucleotide
agagaauucucaugaguag

SEQ ID NO: 2865420 - RNA, 19 nt, Artificial Sequence
  Description of Artificial Sequence: Synthetic oligonucleotide
aauucaacuaaaauuuaaa

SEQ ID NO: 2865421 - RNA, 19 nt, Artificial Sequence
  Description of Artificial Sequence: Synthetic oligonucleotide
uuuaaagacuuuguuacaa

SEQ ID NO: 2865422 - RNA, 19 nt, Artificial Sequence
  Description of Artificial Sequence: Synthetic oligonucleotide
gaaacaugauuuuggaaga

SEQ ID NO: 2865423 - RNA, 19 nt, Artificial Sequence
  Description of Artificial Sequence: Synthetic oligonucleotide
gauacaucaguuguuagga

SEQ ID NO: 2865424 - RNA, 19 nt, Artificial Sequence
  Description of Artificial Sequence: Synthetic oligonucleotide
uaggaguacauuaaauaaa

SEQ ID NO: 2865425 - RNA, 19 nt, Artificial Sequence
  Description of Artificial Sequence: Synthetic oligonucleotide
ugaaauuuauaaccacagu

SEQ ID NO: 2865426 - RNA, 19 nt, Artificial Sequence
  Description of Artificial Sequence: Synthetic oligonucleotide
ucaugaguaguacuuuucu

SEQ ID NO: 2865427 - RNA, 19 nt, Artificial Sequence
  Description of Artificial Sequence: Synthetic oligonucleotide
aacuaaaauuuaaagacuu

SEQ ID NO: 2865428 - RNA, 19 nt, Artificial Sequence
  Description of Artificial Sequence: Synthetic oligonucleotide
aguuucaauaguuaugauu

SEQ ID NO: 2865429 - RNA, 19 nt, Artificial Sequence
  Description of Artificial Sequence: Synthetic oligonucleotide
gaaguaagcagaaacuuca

SEQ ID NO: 2865430 - RNA, 19 nt, Artificial Sequence
  Description of Artificial Sequence: Synthetic oligonucleotide
aacuugaaauuuauaacca

SEQ ID NO: 2865431 - RNA, 19 nt, Artificial Sequence
  Description of Artificial Sequence: Synthetic oligonucleotide
agaaaacauagacuuauau

SEQ ID NO: 2865432 - RNA, 19 nt, Artificial Sequence
  Description of Artificial Sequence: Synthetic oligonucleotide
ugauuuuggaagagaauuc

SEQ ID NO: 2865433 - RNA, 19 nt, Artificial Sequence
  Description of Artificial Sequence: Synthetic oligonucleotide
cuugaaauuuauaaccaca

SEQ ID NO: 2865434 - RNA, 19 nt, Artificial Sequence
  Description of Artificial Sequence: Synthetic oligonucleotide
aguuguuaggaguacauua

SEQ ID NO: 2865435 - RNA, 19 nt, Artificial Sequence
  Description of Artificial Sequence: Synthetic oligonucleotide
gauucuguguaaauaaguc

SEQ ID NO: 2865436 - RNA, 19 nt, Artificial Sequence
  Description of Artificial Sequence: Synthetic oligonucleotide
aguacuuuucuugaaauaa

SEQ ID NO: 2865437 - RNA, 19 nt, Artificial Sequence
  Description of Artificial Sequence: Synthetic oligonucleotide
augaugguaacaaacgaag

SEQ ID NO: 2865438 - RNA, 19 nt, Artificial Sequence
  Description of Artificial Sequence: Synthetic oligonucleotide
uacaucaguuguuaggagu

SEQ ID NO: 2865439 - RNA, 19 nt, Artificial Sequence
  Description of Artificial Sequence: Synthetic oligonucleotide
caguauuucuccuucauca

SEQ ID NO: 2865440 - RNA, 19 nt, Artificial Sequence
  Description of Artificial Sequence: Synthetic oligonucleotide
guaacaaacgaaguaagca

SEQ ID NO: 2865441 - RNA, 19 nt, Artificial Sequence
  Description of Artificial Sequence: Synthetic oligonucleotide
auaaaauauacaaaacaau

SEQ ID NO: 2865442 - RNA, 19 nt, Artificial Sequence
  Description of Artificial Sequence: Synthetic oligonucleotide
aacgcuacaaagggcuggc

SEQ ID NO: 2865443 - RNA, 19 nt, Artificial Sequence
  Description of Artificial Sequence: Synthetic oligonucleotide
aagagaauucucaugagua

SEQ ID NO: 2865444 - RNA, 19 nt, Artificial Sequence
  Description of Artificial Sequence: Synthetic oligonucleotide
cuuuaagaaaacuugaaau

SEQ ID NO: 2865445 - RNA, 19 nt, Artificial Sequence
  Description of Artificial Sequence: Synthetic oligonucleotide
aaugaugguaacaaacgaa

SEQ ID NO: 2865446 - RNA, 19 nt, Artificial Sequence
  Description of Artificial Sequence: Synthetic oligonucleotide
uguuaggaguacauuaaau

SEQ ID NO: 2865447 - RNA, 19 nt, Artificial Sequence
  Description of Artificial Sequence: Synthetic oligonucleotide
guacauaguguaaacagug

SEQ ID NO: 2865448 - RNA, 19 nt, Artificial Sequence
  Description of Artificial Sequence: Synthetic oligonucleotide
uacaagucuacaaaagcuu

SEQ ID NO: 2865449 - RNA, 19 nt, Artificial Sequence
  Description of Artificial Sequence: Synthetic oligonucleotide
aacgaaguaagcagaaacu

SEQ ID NO: 2865450 - RNA, 19 nt, Artificial Sequence
  Description of Artificial Sequence: Synthetic oligonucleotide
aaauucaacuaaaauuuaa

SEQ ID NO: 2865451 - RNA, 19 nt, Artificial Sequence
  Description of Artificial Sequence: Synthetic oligonucleotide
acaguauuucuccuucauc

SEQ ID NO: 2865452 - RNA, 19 nt, Artificial Sequence
  Description of Artificial Sequence: Synthetic oligonucleotide
augauuuuggaagagaauu

SEQ ID NO: 2865453 - RNA, 19 nt, Artificial Sequence
  Description of Artificial Sequence: Synthetic oligonucleotide
aauggucaguuucaauagu

SEQ ID NO: 2865454 - RNA, 19 nt, Artificial Sequence
  Description of Artificial Sequence: Synthetic oligonucleotide
auauuccaaccaaugaugg

SEQ ID NO: 2865455 - RNA, 19 nt, Artificial Sequence
  Description of Artificial Sequence: Synthetic oligonucleotide
uaaaguguacauaguguaa

SEQ ID NO: 2865456 - RNA, 19 nt, Artificial Sequence
  Description of Artificial Sequence: Synthetic oligonucleotide
aacaaacgaaguaagcaga

SEQ ID NO: 2865457 - RNA, 19 nt, Artificial Sequence
  Description of Artificial Sequence: Synthetic oligonucleotide
uacuuuucuugaaauaaua

SEQ ID NO: 2865458 - RNA, 19 nt, Artificial Sequence
  Description of Artificial Sequence: Synthetic oligonucleotide
gaugguaacaaacgaagua

SEQ ID NO: 2865459 - RNA, 19 nt, Artificial Sequence
  Description of Artificial Sequence: Synthetic oligonucleotide
uacauaguguaaacaguga

SEQ ID NO: 2865460 - RNA, 19 nt, Artificial Sequence
  Description of Artificial Sequence: Synthetic oligonucleotide
aagccagauacaucaguug

SEQ ID NO: 2865461 - RNA, 19 nt, Artificial Sequence
  Description of Artificial Sequence: Synthetic oligonucleotide
cauagacuuauauuccaac

SEQ ID NO: 2865462 - RNA, 19 nt, Artificial Sequence
  Description of Artificial Sequence: Synthetic oligonucleotide
aauaaagaaugcacaagaa

SEQ ID NO: 2865463 - RNA, 19 nt, Artificial Sequence
  Description of Artificial Sequence: Synthetic oligonucleotide
uuuuaaagccagauacauc

SEQ ID NO: 2865464 - RNA, 19 nt, Artificial Sequence
  Description of Artificial Sequence: Synthetic oligonucleotide
uuggaagagaauucucaug

SEQ ID NO: 2865465 - RNA, 19 nt, Artificial Sequence
  Description of Artificial Sequence: Synthetic oligonucleotide
guuaggaguacauuaaaua

SEQ ID NO: 2865466 - RNA, 19 nt, Artificial Sequence
  Description of Artificial Sequence: Synthetic oligonucleotide
uucaauaguuaugauucug

SEQ ID NO: 2865467 - RNA, 19 nt, Artificial Sequence
  Description of Artificial Sequence: Synthetic oligonucleotide
gaucauuacaguauuucuc

SEQ ID NO: 2865468 - RNA, 19 nt, Artificial Sequence
  Description of Artificial Sequence: Synthetic oligonucleotide
uaaagccagauacaucagu

SEQ ID NO: 2865469 - RNA, 19 nt, Artificial Sequence
  Description of Artificial Sequence: Synthetic oligonucleotide
caaauggucaguuucaaua

SEQ ID NO: 2865470 - RNA, 19 nt, Artificial Sequence
  Description of Artificial Sequence: Synthetic oligonucleotide
uuguuacaagucuacaaaa

SEQ ID NO: 2865471 - RNA, 19 nt, Artificial Sequence
  Description of Artificial Sequence: Synthetic oligonucleotide
uuuggaagagaauucucau

SEQ ID NO: 2865472 - RNA, 19 nt, Artificial Sequence
  Description of Artificial Sequence: Synthetic oligonucleotide
ccuucaguuuuauauaacg

SEQ ID NO: 2865473 - RNA, 19 nt, Artificial Sequence
  Description of Artificial Sequence: Synthetic oligonucleotide
cuuauauuccaaccaauga

SEQ ID NO: 2865474 - RNA, 19 nt, Artificial Sequence
  Description of Artificial Sequence: Synthetic oligonucleotide
ugaugguaacaaacgaagu

SEQ ID NO: 2865475 - RNA, 19 nt, Artificial Sequence
  Description of Artificial Sequence: Synthetic oligonucleotide
aguaguacuuuucuugaaa

SEQ ID NO: 2865476 - RNA, 19 nt, Artificial Sequence
  Description of Artificial Sequence: Synthetic oligonucleotide
ccaaugaugguaacaaacg

SEQ ID NO: 2865477 - RNA, 19 nt, Artificial Sequence
  Description of Artificial Sequence: Synthetic oligonucleotide
uuaaagccagauacaucag

SEQ ID NO: 2865478 - RNA, 19 nt, Artificial Sequence
  Description of Artificial Sequence: Synthetic oligonucleotide
uaagcagaaacuucaguuu

SEQ ID NO: 2865479 - RNA, 19 nt, Artificial Sequence
  Description of Artificial Sequence: Synthetic oligonucleotide
auauaacgcuacaaagggc

SEQ ID NO: 2865480 - RNA, 19 nt, Artificial Sequence
  Description of Artificial Sequence: Synthetic oligonucleotide
guaaacagugaucauuaca

SEQ ID NO: 2865481 - RNA, 19 nt, Artificial Sequence
  Description of Artificial Sequence: Synthetic oligonucleotide
guguaaauaaguccuaaaa

SEQ ID NO: 2865482 - RNA, 19 nt, Artificial Sequence
  Description of Artificial Sequence: Synthetic oligonucleotide
acauuaaauaaaauauaca

SEQ ID NO: 2865483 - RNA, 19 nt, Artificial Sequence
  Description of Artificial Sequence: Synthetic oligonucleotide
caguuuuauauaacgcuac

SEQ ID NO: 2865484 - RNA, 19 nt, Artificial Sequence
  Description of Artificial Sequence: Synthetic oligonucleotide
uucugauguuuuaaagcca

SEQ ID NO: 2865485 - RNA, 19 nt, Artificial Sequence
  Description of Artificial Sequence: Synthetic oligonucleotide
caauaguuaugauucugug

SEQ ID NO: 2865486 - RNA, 19 nt, Artificial Sequence
  Description of Artificial Sequence: Synthetic oligonucleotide
aguuuuauauaacgcuaca

SEQ ID NO: 2865487 - RNA, 19 nt, Artificial Sequence
  Description of Artificial Sequence: Synthetic oligonucleotide
acuuauauuccaaccaaug

SEQ ID NO: 2865488 - RNA, 19 nt, Artificial Sequence
  Description of Artificial Sequence: Synthetic oligonucleotide
auuuaaagacuuuguuaca

SEQ ID NO: 2865489 - RNA, 19 nt, Artificial Sequence
  Description of Artificial Sequence: Synthetic oligonucleotide
aaacaugauuuuggaagag

SEQ ID NO: 2865490 - RNA, 19 nt, Artificial Sequence
  Description of Artificial Sequence: Synthetic oligonucleotide
aagaaaacuugaaauuuau

SEQ ID NO: 2865491 - RNA, 19 nt, Artificial Sequence
  Description of Artificial Sequence: Synthetic oligonucleotide
agacuuauauuccaaccaa

SEQ ID NO: 2865492 - RNA, 19 nt, Artificial Sequence
  Description of Artificial Sequence: Synthetic oligonucleotide
agccagauacaucaguugu

SEQ ID NO: 2865493 - RNA, 19 nt, Artificial Sequence
  Description of Artificial Sequence: Synthetic oligonucleotide
aagcuuuaagaaaacuuga

SEQ ID NO: 2865494 - RNA, 19 nt, Artificial Sequence
  Description of Artificial Sequence: Synthetic oligonucleotide
uguguaaauaaguccuaaa

SEQ ID NO: 2865495 - RNA, 19 nt, Artificial Sequence
  Description of Artificial Sequence: Synthetic oligonucleotide
cacaagaaaacauagacuu

SEQ ID NO: 2865496 - RNA, 19 nt, Artificial Sequence
  Description of Artificial Sequence: Synthetic oligonucleotide
cuaaaguguacauagugua

SEQ ID NO: 2865497 - RNA, 19 nt, Artificial Sequence
  Description of Artificial Sequence: Synthetic oligonucleotide
aagcacaaaaggccuucag

SEQ ID NO: 2865498 - RNA, 19 nt, Artificial Sequence
  Description of Artificial Sequence: Synthetic oligonucleotide
uuaugauucuguguaaaua

SEQ ID NO: 2865499 - RNA, 19 nt, Artificial Sequence
  Description of Artificial Sequence: Synthetic oligonucleotide
ucaguuguuaggaguacau

SEQ ID NO: 2865500 - RNA, 19 nt, Artificial Sequence
  Description of Artificial Sequence: Synthetic oligonucleotide
agcacaaaaggccuucagu

SEQ ID NO: 2865501 - RNA, 19 nt, Artificial Sequence
  Description of Artificial Sequence: Synthetic oligonucleotide
gaaaacauagacuuauauu

SEQ ID NO: 2865502 - RNA, 19 nt, Artificial Sequence
  Description of Artificial Sequence: Synthetic oligonucleotide
aguaagcagaaacuucagu

SEQ ID NO: 2865503 - RNA, 19 nt, Artificial Sequence
  Description of Artificial Sequence: Synthetic oligonucleotide
augguaacaaacgaaguaa

SEQ ID NO: 2865504 - RNA, 19 nt, Artificial Sequence
  Description of Artificial Sequence: Synthetic oligonucleotide
acaaaaggccuucaguuuu

SEQ ID NO: 2865505 - RNA, 19 nt, Artificial Sequence
  Description of Artificial Sequence: Synthetic oligonucleotide
ugauguuuuaaagccagau

SEQ ID NO: 2865506 - RNA, 19 nt, Artificial Sequence
  Description of Artificial Sequence: Synthetic oligonucleotide
agcagaaacuucaguuucc

SEQ ID NO: 2865507 - RNA, 19 nt, Artificial Sequence
  Description of Artificial Sequence: Synthetic oligonucleotide
gauguuuuaaagccagaua

SEQ ID NO: 2865508 - RNA, 19 nt, Artificial Sequence
  Description of Artificial Sequence: Synthetic oligonucleotide
caacaaacugauucugaug

SEQ ID NO: 2865509 - RNA, 19 nt, Artificial Sequence
  Description of Artificial Sequence: Synthetic oligonucleotide
uaacgcuacaaagggcugg

SEQ ID NO: 2865510 - RNA, 19 nt, Artificial Sequence
  Description of Artificial Sequence: Synthetic oligonucleotide
cuucaguuuccaaaugguc

SEQ ID NO: 2865511 - RNA, 19 nt, Artificial Sequence
  Description of Artificial Sequence: Synthetic oligonucleotide
uccuuuaaucucaaagcuu

SEQ ID NO: 2865512 - RNA, 19 nt, Artificial Sequence
  Description of Artificial Sequence: Synthetic oligonucleotide
aagucuacaaaagcuuuaa

SEQ ID NO: 2865513 - RNA, 19 nt, Artificial Sequence
  Description of Artificial Sequence: Synthetic oligonucleotide
cuuuguuacaagucuacaa

SEQ ID NO: 2865514 - RNA, 19 nt, Artificial Sequence
  Description of Artificial Sequence: Synthetic oligonucleotide
uuguuaggaguacauuaaa

SEQ ID NO: 2865515 - RNA, 19 nt, Artificial Sequence
  Description of Artificial Sequence: Synthetic oligonucleotide
acaaaccgaaagcacaaaa

SEQ ID NO: 2865516 - RNA, 19 nt, Artificial Sequence
  Description of Artificial Sequence: Synthetic oligonucleotide
auuuuggaagagaauucuc

SEQ ID NO: 2865517 - RNA, 19 nt, Artificial Sequence
  Description of Artificial Sequence: Synthetic oligonucleotide
aguguaaacagugaucauu

SEQ ID NO: 2865518 - RNA, 19 nt, Artificial Sequence
  Description of Artificial Sequence: Synthetic oligonucleotide
agucuacaaaagcuuuaag

SEQ ID NO: 2865519 - RNA, 19 nt, Artificial Sequence
  Description of Artificial Sequence: Synthetic oligonucleotide
cuacaaaagcuuuaagaaa

SEQ ID NO: 2865520 - RNA, 19 nt, Artificial Sequence
  Description of Artificial Sequence: Synthetic oligonucleotide
uuccaaccaaugaugguaa

SEQ ID NO: 2865521 - RNA, 19 nt, Artificial Sequence
  Description of Artificial Sequence: Synthetic oligonucleotide
caagaaacaugauuuugga

SEQ ID NO: 2865522 - RNA, 19 nt, Artificial Sequence
  Description of Artificial Sequence: Synthetic oligonucleotide
aaaauucaacuaaaauuua

SEQ ID NO: 2865523 - RNA, 19 nt, Artificial Sequence
  Description of Artificial Sequence: Synthetic oligonucleotide
auuccaaccaaugauggua

SEQ ID NO: 2865524 - RNA, 19 nt, Artificial Sequence
  Description of Artificial Sequence: Synthetic oligonucleotide
uacaguauuucuccuucau

SEQ ID NO: 2865525 - RNA, 19 nt, Artificial Sequence
  Description of Artificial Sequence: Synthetic oligonucleotide
gucaguuucaauaguuaug

SEQ ID NO: 2865526 - RNA, 19 nt, Artificial Sequence
  Description of Artificial Sequence: Synthetic oligonucleotide
aggaguacauuaaauaaaa

SEQ ID NO: 2865527 - RNA, 19 nt, Artificial Sequence
  Description of Artificial Sequence: Synthetic oligonucleotide
auacaucaguuguuaggag

SEQ ID NO: 2865528 - RNA, 19 nt, Artificial Sequence
  Description of Artificial Sequence: Synthetic oligonucleotide
aguguacauaguguaaaca

SEQ ID NO: 2865529 - RNA, 19 nt, Artificial Sequence
  Description of Artificial Sequence: Synthetic oligonucleotide
uauuccaaccaaugauggu

SEQ ID NO: 2865530 - RNA, 19 nt, Artificial Sequence
  Description of Artificial Sequence: Synthetic oligonucleotide
guaagcagaaacuucaguu

SEQ ID NO: 2865531 - RNA, 19 nt, Artificial Sequence
  Description of Artificial Sequence: Synthetic oligonucleotide
ucauuacaguauuucuccu

SEQ ID NO: 2865532 - RNA, 19 nt, Artificial Sequence
  Description of Artificial Sequence: Synthetic oligonucleotide
aaguaagcagaaacuucag

SEQ ID NO: 2865533 - RNA, 19 nt, Artificial Sequence
  Description of Artificial Sequence: Synthetic oligonucleotide
uguaaacagugaucauuac

SEQ ID NO: 2865534 - RNA, 19 nt, Artificial Sequence
  Description of Artificial Sequence: Synthetic oligonucleotide
gugaucauuacaguauuuc

SEQ ID NO: 2865535 - RNA, 19 nt, Artificial Sequence
  Description of Artificial Sequence: Synthetic oligonucleotide
aguauuucuccuucaucaa

SEQ ID NO: 2865536 - RNA, 19 nt, Artificial Sequence
  Description of Artificial Sequence: Synthetic oligonucleotide
cucaugaguaguacuuuuc

SEQ ID NO: 2865537 - RNA, 19 nt, Artificial Sequence
  Description of Artificial Sequence: Synthetic oligonucleotide
gacuuuguuacaagucuac

SEQ ID NO: 2865538 - RNA, 19 nt, Artificial Sequence
  Description of Artificial Sequence: Synthetic oligonucleotide
ucuguguaaauaaguccua

SEQ ID NO: 2865539 - RNA, 19 nt, Artificial Sequence
  Description of Artificial Sequence: Synthetic oligonucleotide
auacaagaaacaugauuuu

SEQ ID NO: 2865540 - RNA, 19 nt, Artificial Sequence
  Description of Artificial Sequence: Synthetic oligonucleotide
caaugaugguaacaaacga

SEQ ID NO: 2865541 - RNA, 19 nt, Artificial Sequence
  Description of Artificial Sequence: Synthetic oligonucleotide
acagugaucauuacaguau

SEQ ID NO: 2865542 - RNA, 19 nt, Artificial Sequence
  Description of Artificial Sequence: Synthetic oligonucleotide
gccuaaaguguacauagug

SEQ ID NO: 2865543 - RNA, 19 nt, Artificial Sequence
  Description of Artificial Sequence: Synthetic oligonucleotide
augauucuguguaaauaag

SEQ ID NO: 2865544 - RNA, 19 nt, Artificial Sequence
  Description of Artificial Sequence: Synthetic oligonucleotide
acuuuucuugaaauaauaa

SEQ ID NO: 2865545 - RNA, 19 nt, Artificial Sequence
  Description of Artificial Sequence: Synthetic oligonucleotide
gaaugcacaagaaaacaua

SEQ ID NO: 2865546 - RNA, 19 nt, Artificial Sequence
  Description of Artificial Sequence: Synthetic oligonucleotide
gaauucucaugaguaguac

SEQ ID NO: 2865547 - RNA, 19 nt, Artificial Sequence
  Description of Artificial Sequence: Synthetic oligonucleotide
aaccaaugaugguaacaaa

SEQ ID NO: 2865548 - RNA, 19 nt, Artificial Sequence
  Description of Artificial Sequence: Synthetic oligonucleotide
gauuuuggaagagaauucu

SEQ ID NO: 2865549 - RNA, 19 nt, Artificial Sequence
  Description of Artificial Sequence: Synthetic oligonucleotide
uggucaguuucaauaguua

SEQ ID NO: 2865550 - RNA, 19 nt, Artificial Sequence
  Description of Artificial Sequence: Synthetic oligonucleotide
uaguacuuuucuugaaaua

SEQ ID NO: 2865551 - RNA, 19 nt, Artificial Sequence
  Description of Artificial Sequence: Synthetic oligonucleotide
acaugauuuuggaagagaa

SEQ ID NO: 2865552 - RNA, 19 nt, Artificial Sequence
  Description of Artificial Sequence: Synthetic oligonucleotide
aacugauucugauguuuua

SEQ ID NO: 2865553 - RNA, 19 nt, Artificial Sequence
  Description of Artificial Sequence: Synthetic oligonucleotide
acaaagggcuggccuaaag

SEQ ID NO: 2865554 - RNA, 19 nt, Artificial Sequence
  Description of Artificial Sequence: Synthetic oligonucleotide
auuuauaaccacaguguaa

SEQ ID NO: 2865555 - RNA, 19 nt, Artificial Sequence
  Description of Artificial Sequence: Synthetic oligonucleotide
ucucaugaguaguacuuuu

SEQ ID NO: 2865556 - RNA, 19 nt, Artificial Sequence
  Description of Artificial Sequence: Synthetic oligonucleotide
agaaugcacaagaaaacau

SEQ ID NO: 2865557 - RNA, 19 nt, Artificial Sequence
  Description of Artificial Sequence: Synthetic oligonucleotide
gaaagcacaaaaggccuuc

SEQ ID NO: 2865558 - RNA, 19 nt, Artificial Sequence
  Description of Artificial Sequence: Synthetic oligonucleotide
guuuuauauaacgcuacaa

SEQ ID NO: 2865559 - RNA, 19 nt, Artificial Sequence
  Description of Artificial Sequence: Synthetic oligonucleotide
cagauacaucaguuguuag

SEQ ID NO: 2865560 - RNA, 19 nt, Artificial Sequence
  Description of Artificial Sequence: Synthetic oligonucleotide
aguuaugauucuguguaaa

SEQ ID NO: 2865561 - RNA, 19 nt, Artificial Sequence
  Description of Artificial Sequence: Synthetic oligonucleotide
acuucaguuuccaaauggu

SEQ ID NO: 2865562 - RNA, 19 nt, Artificial Sequence
  Description of Artificial Sequence: Synthetic oligonucleotide
gguaacaaacgaaguaagc

SEQ ID NO: 2865563 - RNA, 19 nt, Artificial Sequence
  Description of Artificial Sequence: Synthetic oligonucleotide
aaacugauucugauguuuu

SEQ ID NO: 2865564 - RNA, 19 nt, Artificial Sequence
  Description of Artificial Sequence: Synthetic oligonucleotide
uuauaaccacaguguaaaa

SEQ ID NO: 2865565 - RNA, 19 nt, Artificial Sequence
  Description of Artificial Sequence: Synthetic oligonucleotide
guuguuaggaguacauuaa

SEQ ID NO: 2865566 - RNA, 19 nt, Artificial Sequence
  Description of Artificial Sequence: Synthetic oligonucleotide
auucucaugaguaguacuu

SEQ ID NO: 2865567 - RNA, 19 nt, Artificial Sequence
  Description of Artificial Sequence: Synthetic oligonucleotide
gcuuuaagaaaacuugaaa

SEQ ID NO: 2865568 - RNA, 19 nt, Artificial Sequence
  Description of Artificial Sequence: Synthetic oligonucleotide
aaagcacaaaaggccuuca

SEQ ID NO: 2865569 - RNA, 19 nt, Artificial Sequence
  Description of Artificial Sequence: Synthetic oligonucleotide
uaguuaugauucuguguaa

SEQ ID NO: 2865570 - RNA, 19 nt, Artificial Sequence
  Description of Artificial Sequence: Synthetic oligonucleotide
acgaaguaagcagaaacuu

SEQ ID NO: 2865571 - RNA, 19 nt, Artificial Sequence
  Description of Artificial Sequence: Synthetic oligonucleotide
caaccaaugaugguaacaa

SEQ ID NO: 2865572 - RNA, 19 nt, Artificial Sequence
  Description of Artificial Sequence: Synthetic oligonucleotide
aagggcuggccuaaagugu

SEQ ID NO: 2865573 - RNA, 19 nt, Artificial Sequence
  Description of Artificial Sequence: Synthetic oligonucleotide
ggaagagaauucucaugag

SEQ ID NO: 2865574 - RNA, 19 nt, Artificial Sequence
  Description of Artificial Sequence: Synthetic oligonucleotide
auacaaaccgaaagcacaa

SEQ ID NO: 2865575 - RNA, 19 nt, Artificial Sequence
  Description of Artificial Sequence: Synthetic oligonucleotide
guguaaacagugaucauua

SEQ ID NO: 2865576 - RNA, 19 nt, Artificial Sequence
  Description of Artificial Sequence: Synthetic oligonucleotide
guuuuaaagccagauacau

SEQ ID NO: 2865577 - RNA, 19 nt, Artificial Sequence
  Description of Artificial Sequence: Synthetic oligonucleotide
agcuuuaagaaaacuugaa

SEQ ID NO: 2865578 - RNA, 19 nt, Artificial Sequence
  Description of Artificial Sequence: Synthetic oligonucleotide
gagaauucucaugaguagu

SEQ ID NO: 2865579 - RNA, 19 nt, Artificial Sequence
  Description of Artificial Sequence: Synthetic oligonucleotide
acuaaaauuuaaagacuuu

SEQ ID NO: 2865580 - RNA, 19 nt, Artificial Sequence
  Description of Artificial Sequence: Synthetic oligonucleotide
acaagucuacaaaagcuuu

SEQ ID NO: 2865581 - RNA, 19 nt, Artificial Sequence
  Description of Artificial Sequence: Synthetic oligonucleotide
acaucaguuguuaggagua

SEQ ID NO: 2865582 - RNA, 19 nt, Artificial Sequence
  Description of Artificial Sequence: Synthetic oligonucleotide
agaauucucaugaguagua

SEQ ID NO: 2865583 - RNA, 19 nt, Artificial Sequence
  Description of Artificial Sequence: Synthetic oligonucleotide
aagaaaacauagacuuaua

SEQ ID NO: 2865584 - RNA, 19 nt, Artificial Sequence
  Description of Artificial Sequence: Synthetic oligonucleotide
aggccuucaguuuuauaua

SEQ ID NO: 2865585 - RNA, 19 nt, Artificial Sequence
  Description of Artificial Sequence: Synthetic oligonucleotide
acaaacgaaguaagcagaa

SEQ ID NO: 2865586 - RNA, 19 nt, Artificial Sequence
  Description of Artificial Sequence: Synthetic oligonucleotide
uccaaauggucaguuucaa

SEQ ID NO: 2865587 - RNA, 19 nt, Artificial Sequence
  Description of Artificial Sequence: Synthetic oligonucleotide
gaguaguacuuuucuugaa

SEQ ID NO: 2865588 - RNA, 19 nt, Artificial Sequence
  Description of Artificial Sequence: Synthetic oligonucleotide
aaaggccuucaguuuuaua

SEQ ID NO: 2865589 - RNA, 19 nt, Artificial Sequence
  Description of Artificial Sequence: Synthetic oligonucleotide
agaaaacuugaaauuuaua

SEQ ID NO: 2865590 - RNA, 19 nt, Artificial Sequence
  Description of Artificial Sequence: Synthetic oligonucleotide
guuaugauucuguguaaau

SEQ ID NO: 2865591 - RNA, 19 nt, Artificial Sequence
  Description of Artificial Sequence: Synthetic oligonucleotide
acauagacuuauauuccaa

SEQ ID NO: 2865592 - RNA, 19 nt, Artificial Sequence
  Description of Artificial Sequence: Synthetic oligonucleotide
uucucaugaguaguacuuu

SEQ ID NO: 2865593 - RNA, 19 nt, Artificial Sequence
  Description of Artificial Sequence: Synthetic oligonucleotide
acaaacugauucugauguu

SEQ ID NO: 2865594 - RNA, 19 nt, Artificial Sequence
  Description of Artificial Sequence: Synthetic oligonucleotide
uaguguaaacagugaucau

SEQ ID NO: 2865595 - RNA, 19 nt, Artificial Sequence
  Description of Artificial Sequence: Synthetic oligonucleotide
caagucuacaaaagcuuua

SEQ ID NO: 2865596 - RNA, 19 nt, Artificial Sequence
  Description of Artificial Sequence: Synthetic oligonucleotide
aaaaggccuucaguuuuau

SEQ ID NO: 2865597 - RNA, 19 nt, Artificial Sequence
  Description of Artificial Sequence: Synthetic oligonucleotide
auggucaguuucaauaguu

SEQ ID NO: 2865598 - RNA, 19 nt, Artificial Sequence
  Description of Artificial Sequence: Synthetic oligonucleotide
augcacaagaaaacauaga

SEQ ID NO: 2865599 - RNA, 19 nt, Artificial Sequence
  Description of Artificial Sequence: Synthetic oligonucleotide
uccaaccaaugaugguaac

SEQ ID NO: 2865600 - RNA, 19 nt, Artificial Sequence
  Description of Artificial Sequence: Synthetic oligonucleotide
auaacgcuacaaagggcug

SEQ ID NO: 2865601 - RNA, 19 nt, Artificial Sequence
  Description of Artificial Sequence: Synthetic oligonucleotide
uacaaaccgaaagcacaaa

SEQ ID NO: 2865602 - RNA, 19 nt, Artificial Sequence
  Description of Artificial Sequence: Synthetic oligonucleotide
acaagaaaacauagacuua

SEQ ID NO: 2865603 - RNA, 19 nt, Artificial Sequence
  Description of Artificial Sequence: Synthetic oligonucleotide
cgaaguaagcagaaacuuc

SEQ ID NO: 2865604 - RNA, 19 nt, Artificial Sequence
  Description of Artificial Sequence: Synthetic oligonucleotide
caucaguuguuaggaguac

SEQ ID NO: 2865605 - RNA, 19 nt, Artificial Sequence
  Description of Artificial Sequence: Synthetic oligonucleotide
agacuuuguuacaagucua

SEQ ID NO: 2865606 - RNA, 19 nt, Artificial Sequence
  Description of Artificial Sequence: Synthetic oligonucleotide
caugauuuuggaagagaau

SEQ ID NO: 2865607 - RNA, 19 nt, Artificial Sequence
  Description of Artificial Sequence: Synthetic oligonucleotide
ggccuucaguuuuauauaa

SEQ ID NO: 2865608 - RNA, 19 nt, Artificial Sequence
  Description of Artificial Sequence: Synthetic oligonucleotide
cugauguuuuaaagccaga

SEQ ID NO: 2865609 - RNA, 19 nt, Artificial Sequence
  Description of Artificial Sequence: Synthetic oligonucleotide
caaagggcuggccuaaagu

SEQ ID NO: 2865610 - RNA, 19 nt, Artificial Sequence
  Description of Artificial Sequence: Synthetic oligonucleotide
caaaagcuuuaagaaaacu

SEQ ID NO: 2865611 - RNA, 19 nt, Artificial Sequence
  Description of Artificial Sequence: Synthetic oligonucleotide
ccuaaaguguacauagugu

SEQ ID NO: 2865612 - RNA, 19 nt, Artificial Sequence
  Description of Artificial Sequence: Synthetic oligonucleotide
ccuuuaaucucaaagcuuu

SEQ ID NO: 2865613 - RNA, 19 nt, Artificial Sequence
  Description of Artificial Sequence: Synthetic oligonucleotide
acgcuacaaagggcuggcc

SEQ ID NO: 2865614 - RNA, 19 nt, Artificial Sequence
  Description of Artificial Sequence: Synthetic oligonucleotide
cuguguaaauaaguccuaa

SEQ ID NO: 2865615 - RNA, 19 nt, Artificial Sequence
  Description of Artificial Sequence: Synthetic oligonucleotide
gacuuauauuccaaccaau

SEQ ID NO: 2865616 - RNA, 19 nt, Artificial Sequence
  Description of Artificial Sequence: Synthetic oligonucleotide
ggucaguuucaauaguuau

SEQ ID NO: 2865617 - RNA, 19 nt, Artificial Sequence
  Description of Artificial Sequence: Synthetic oligonucleotide
agugaucauuacaguauuu

SEQ ID NO: 2865618 - RNA, 19 nt, Artificial Sequence
  Description of Artificial Sequence: Synthetic oligonucleotide
gcuacaaagggcuggccua

SEQ ID NO: 2865619 - RNA, 19 nt, Artificial Sequence
  Description of Artificial Sequence: Synthetic oligonucleotide
caaaaggccuucaguuuua

SEQ ID NO: 2865620 - RNA, 19 nt, Artificial Sequence
  Description of Artificial Sequence: Synthetic oligonucleotide
cauuacaguauuucuccuu

SEQ ID NO: 2865621 - RNA, 19 nt, Artificial Sequence
  Description of Artificial Sequence: Synthetic oligonucleotide
guacuuuucuugaaauaau

SEQ ID NO: 2865622 - RNA, 19 nt, Artificial Sequence
  Description of Artificial Sequence: Synthetic oligonucleotide
caaacgaaguaagcagaaa

SEQ ID NO: 2865623 - RNA, 19 nt, Artificial Sequence
  Description of Artificial Sequence: Synthetic oligonucleotide
caugaguaguacuuuucuu

SEQ ID NO: 2865624 - RNA, 19 nt, Artificial Sequence
  Description of Artificial Sequence: Synthetic oligonucleotide
caaacugauucugauguuu

SEQ ID NO: 2865625 - RNA, 19 nt, Artificial Sequence
  Description of Artificial Sequence: Synthetic oligonucleotide
cacaaaaggccuucaguuu

SEQ ID NO: 2865626 - RNA, 19 nt, Artificial Sequence
  Description of Artificial Sequence: Synthetic oligonucleotide
gcacaagaaaacauagacu

SEQ ID NO: 2865627 - RNA, 19 nt, Artificial Sequence
  Description of Artificial Sequence: Synthetic oligonucleotide
cagaaacuucaguuuccaa

SEQ ID NO: 2865628 - RNA, 19 nt, Artificial Sequence
  Description of Artificial Sequence: Synthetic oligonucleotide
agggcuggccuaaagugua

SEQ ID NO: 2865629 - RNA, 19 nt, Artificial Sequence
  Description of Artificial Sequence: Synthetic oligonucleotide
cuacaaagggcuggccuaa

SEQ ID NO: 2865630 - RNA, 19 nt, Artificial Sequence
  Description of Artificial Sequence: Synthetic oligonucleotide
uacaaagggcuggccuaaa

SEQ ID NO: 2865631 - RNA, 19 nt, Artificial Sequence
  Description of Artificial Sequence: Synthetic oligonucleotide
cuuuaaucucaaagcuuuu

SEQ ID NO: 2865632 - RNA, 19 nt, Artificial Sequence
  Description of Artificial Sequence: Synthetic oligonucleotide
ccaaccaaugaugguaaca

SEQ ID NO: 2865633 - RNA, 19 nt, Artificial Sequence
  Description of Artificial Sequence: Synthetic oligonucleotide
cagugaucauuacaguauu

SEQ ID NO: 2865634 - RNA, 19 nt, Artificial Sequence
  Description of Artificial Sequence: Synthetic oligonucleotide
ccgaaagcacaaaaggccu

SEQ ID NO: 2865635 - RNA, 19 nt, Artificial Sequence
  Description of Artificial Sequence: Synthetic oligonucleotide
gccuucaguuuuauauaac

SEQ ID NO: 2865636 - RNA, 19 nt, Artificial Sequence
  Description of Artificial Sequence: Synthetic oligonucleotide
ccagauacaucaguuguua

SEQ ID NO: 2865637 - RNA, 19 nt, Artificial Sequence
  Description of Artificial Sequence: Synthetic oligonucleotide
ggaguacauuaaauaaaau

SEQ ID NO: 2865638 - RNA, 19 nt, Artificial Sequence
  Description of Artificial Sequence: Synthetic oligonucleotide
caguuucaauaguuaugau

SEQ ID NO: 2865639 - RNA, 19 nt, Artificial Sequence
  Description of Artificial Sequence: Synthetic oligonucleotide
ggcuggccuaaaguguaca

SEQ ID NO: 2865640 - RNA, 19 nt, Artificial Sequence
  Description of Artificial Sequence: Synthetic oligonucleotide
caguuguuaggaguacauu

SEQ ID NO: 2865641 - RNA, 19 nt, Artificial Sequence
  Description of Artificial Sequence: Synthetic oligonucleotide
caguuuccaaauggucagu

SEQ ID NO: 2865642 - RNA, 19 nt, Artificial Sequence
  Description of Artificial Sequence: Synthetic oligonucleotide
ccaaauggucaguuucaau

SEQ ID NO: 2865643 - RNA, 19 nt, Artificial Sequence
  Description of Artificial Sequence: Synthetic oligonucleotide
gggcuggccuaaaguguac

SEQ ID NO: 2865644 - RNA, 19 nt, Artificial Sequence
  Description of Artificial Sequence: Synthetic oligonucleotide
ggccuaaaguguacauagu

SEQ ID NO: 2865645 - RNA, 19 nt, Artificial Sequence
  Description of Artificial Sequence: Synthetic oligonucleotide
gccagauacaucaguuguu

SEQ ID NO: 2865646 - RNA, 19 nt, Artificial Sequence
  Description of Artificial Sequence: Synthetic oligonucleotide
cgcuacaaagggcuggccu

SEQ ID NO: 2865647 - RNA, 19 nt, Artificial Sequence
  Description of Artificial Sequence: Synthetic oligonucleotide
cgaaagcacaaaaggccuu

SEQ ID NO: 2865648 - RNA, 19 nt, Artificial Sequence
  Description of Artificial Sequence: Synthetic oligonucleotide
uucaauaaauucuugaugg

SEQ ID NO: 2865649 - RNA, 19 nt, Artificial Sequence
  Description of Artificial Sequence: Synthetic oligonucleotide
uucauugugacaaugaucu

SEQ ID NO: 2865650 - RNA, 19 nt, Artificial Sequence
  Description of Artificial Sequence: Synthetic oligonucleotide
ucaauuuugaugcaggagc

SEQ ID NO: 2865651 - RNA, 19 nt, Artificial Sequence
  Description of Artificial Sequence: Synthetic oligonucleotide
aaugaucucaacccguggg

SEQ ID NO: 2865652 - RNA, 19 nt, Artificial Sequence
  Description of Artificial Sequence: Synthetic oligonucleotide
aacugcuuucaauaaauuc

SEQ ID NO: 2865653 - RNA, 19 nt, Artificial Sequence
  Description of Artificial Sequence: Synthetic oligonucleotide
aaagggauuccuugagucc

SEQ ID NO: 2865654 - RNA, 19 nt, Artificial Sequence
  Description of Artificial Sequence: Synthetic oligonucleotide
uuucaauaaauucuugaug

SEQ ID NO: 2865655 - RNA, 19 nt, Artificial Sequence
  Description of Artificial Sequence: Synthetic oligonucleotide
ugugacaaugaucucaacc

SEQ ID NO: 2865656 - RNA, 19 nt, Artificial Sequence
  Description of Artificial Sequence: Synthetic oligonucleotide
auuagggcuggccauaggc

SEQ ID NO: 2865657 - RNA, 19 nt, Artificial Sequence
  Description of Artificial Sequence: Synthetic oligonucleotide
aauagcagcugaugugacc

SEQ ID NO: 2865658 - RNA, 19 nt, Artificial Sequence
  Description of Artificial Sequence: Synthetic oligonucleotide
ugguugaucaccuuucagg

SEQ ID NO: 2865659 - RNA, 19 nt, Artificial Sequence
  Description of Artificial Sequence: Synthetic oligonucleotide
auaauuuccaguuuuccca

SEQ ID NO: 2865660 - RNA, 19 nt, Artificial Sequence
  Description of Artificial Sequence: Synthetic oligonucleotide
ucuucaguccuuuucauug

SEQ ID NO: 2865661 - RNA, 19 nt, Artificial Sequence
  Description of Artificial Sequence: Synthetic oligonucleotide
aaagaagugauggagagau

SEQ ID NO: 2865662 - RNA, 19 nt, Artificial Sequence
  Description of Artificial Sequence: Synthetic oligonucleotide
cugaguaaagaagugaugg

SEQ ID NO: 2865663 - RNA, 19 nt, Artificial Sequence
  Description of Artificial Sequence: Synthetic oligonucleotide
gugacaaugaucucaaccc

SEQ ID NO: 2865664 - RNA, 19 nt, Artificial Sequence
  Description of Artificial Sequence: Synthetic oligonucleotide
ucuggauucagacaucucu

SEQ ID NO: 2865665 - RNA, 19 nt, Artificial Sequence
  Description of Artificial Sequence: Synthetic oligonucleotide
uuuugaugcaggagcagcg

SEQ ID NO: 2865666 - RNA, 19 nt, Artificial Sequence
  Description of Artificial Sequence: Synthetic oligonucleotide
gacuguucuugauaaaggg

SEQ ID NO: 2865667 - RNA, 19 nt, Artificial Sequence
  Description of Artificial Sequence: Synthetic oligonucleotide
aagggauuccuugaguccc

SEQ ID NO: 2865668 - RNA, 19 nt, Artificial Sequence
  Description of Artificial Sequence: Synthetic oligonucleotide
acuugcaggaauaauuucc

SEQ ID NO: 2865669 - RNA, 19 nt, Artificial Sequence
  Description of Artificial Sequence: Synthetic oligonucleotide
cuuacugucagccacagca

SEQ ID NO: 2865670 - RNA, 19 nt, Artificial Sequence
  Description of Artificial Sequence: Synthetic oligonucleotide
ucuuuuagaccuucuuugg

SEQ ID NO: 2865671 - RNA, 19 nt, Artificial Sequence
  Description of Artificial Sequence: Synthetic oligonucleotide
ucggucaucaauuuugaug

SEQ ID NO: 2865672 - RNA, 19 nt, Artificial Sequence
  Description of Artificial Sequence: Synthetic oligonucleotide
uccaguuuucccaaggccc

SEQ ID NO: 2865673 - RNA, 19 nt, Artificial Sequence
  Description of Artificial Sequence: Synthetic oligonucleotide
aaaaggaggacagcgcugg

SEQ ID NO: 2865674 - RNA, 19 nt, Artificial Sequence
  Description of Artificial Sequence: Synthetic oligonucleotide
uugauaaagggauuccuug

SEQ ID NO: 2865675 - RNA, 19 nt, Artificial Sequence
  Description of Artificial Sequence: Synthetic oligonucleotide
aagaggcucuuuuagaccu

SEQ ID NO: 2865676 - RNA, 19 nt, Artificial Sequence
  Description of Artificial Sequence: Synthetic oligonucleotide
gaugaggcagaaaaggagg

SEQ ID NO: 2865677 - RNA, 19 nt, Artificial Sequence
  Description of Artificial Sequence: Synthetic oligonucleotide
uuaagaggcucuuuuagac

SEQ ID NO: 2865678 - RNA, 19 nt, Artificial Sequence
  Description of Artificial Sequence: Synthetic oligonucleotide
guaaagaagugauggagag

SEQ ID NO: 2865679 - RNA, 19 nt, Artificial Sequence
  Description of Artificial Sequence: Synthetic oligonucleotide
uugagucccacucagacuc

SEQ ID NO: 2865680 - RNA, 19 nt, Artificial Sequence
  Description of Artificial Sequence: Synthetic oligonucleotide
uucccucugguuaagaggc

SEQ ID NO: 2865681 - RNA, 19 nt, Artificial Sequence
  Description of Artificial Sequence: Synthetic oligonucleotide
accuucuuuggcuaacugc

SEQ ID NO: 2865682 - RNA, 19 nt, Artificial Sequence
  Description of Artificial Sequence: Synthetic oligonucleotide
gauaaagggauuccuugag

SEQ ID NO: 2865683 - RNA, 19 nt, Artificial Sequence
  Description of Artificial Sequence: Synthetic oligonucleotide
ugacaaugaucucaacccg

SEQ ID NO: 2865684 - RNA, 19 nt, Artificial Sequence
  Description of Artificial Sequence: Synthetic oligonucleotide
uuuuagaccuucuuuggcu

SEQ ID NO: 2865685 - RNA, 19 nt, Artificial Sequence
  Description of Artificial Sequence: Synthetic oligonucleotide
auuuugaugcaggagcagc

SEQ ID NO: 2865686 - RNA, 19 nt, Artificial Sequence
  Description of Artificial Sequence: Synthetic oligonucleotide
cucuuuuagaccuucuuug

SEQ ID NO: 2865687 - RNA, 19 nt, Artificial Sequence
  Description of Artificial Sequence: Synthetic oligonucleotide
acugcuuucaauaaauucu

SEQ ID NO: 2865688 - RNA, 19 nt, Artificial Sequence
  Description of Artificial Sequence: Synthetic oligonucleotide
gaguaaagaagugauggag

SEQ ID NO: 2865689 - RNA, 19 nt, Artificial Sequence
  Description of Artificial Sequence: Synthetic oligonucleotide
agugcaggcuucuuguugg

SEQ ID NO: 2865690 - RNA, 19 nt, Artificial Sequence
  Description of Artificial Sequence: Synthetic oligonucleotide
augaucucaacccgugggc

SEQ ID NO: 2865691 - RNA, 19 nt, Artificial Sequence
  Description of Artificial Sequence: Synthetic oligonucleotide
ucuugauggccucagacuc

SEQ ID NO: 2865692 - RNA, 19 nt, Artificial Sequence
  Description of Artificial Sequence: Synthetic oligonucleotide
aaggcccucgguuuuacag

SEQ ID NO: 2865693 - RNA, 19 nt, Artificial Sequence
  Description of Artificial Sequence: Synthetic oligonucleotide
acagcgcuggcauucaugg

SEQ ID NO: 2865694 - RNA, 19 nt, Artificial Sequence
  Description of Artificial Sequence: Synthetic oligonucleotide
auaaauucuugauggccuc

SEQ ID NO: 2865695 - RNA, 19 nt, Artificial Sequence
  Description of Artificial Sequence: Synthetic oligonucleotide
uugacuugcaggaauaauu

SEQ ID NO: 2865696 - RNA, 19 nt, Artificial Sequence
  Description of Artificial Sequence: Synthetic oligonucleotide
agaagugauggagagauug

SEQ ID NO: 2865697 - RNA, 19 nt, Artificial Sequence
  Description of Artificial Sequence: Synthetic oligonucleotide
agcaggaugaggcagaaaa

SEQ ID NO: 2865698 - RNA, 19 nt, Artificial Sequence
  Description of Artificial Sequence: Synthetic oligonucleotide
uucucuucaguccuuuuca

SEQ ID NO: 2865699 - RNA, 19 nt, Artificial Sequence
  Description of Artificial Sequence: Synthetic oligonucleotide
caauaaauucuugauggcc

SEQ ID NO: 2865700 - RNA, 19 nt, Artificial Sequence
  Description of Artificial Sequence: Synthetic oligonucleotide
uaaagggauuccuugaguc

SEQ ID NO: 2865701 - RNA, 19 nt, Artificial Sequence
  Description of Artificial Sequence: Synthetic oligonucleotide
ucaauaaauucuugauggc

SEQ ID NO: 2865702 - RNA, 19 nt, Artificial Sequence
  Description of Artificial Sequence: Synthetic oligonucleotide
uuucauugugacaaugauc

SEQ ID NO: 2865703 - RNA, 19 nt, Artificial Sequence
  Description of Artificial Sequence: Synthetic oligonucleotide
auuuccaguuuucccaagg

SEQ ID NO: 2865704 - RNA, 19 nt, Artificial Sequence
  Description of Artificial Sequence: Synthetic oligonucleotide
uuuucauugugacaaugau

SEQ ID NO: 2865705 - RNA, 19 nt, Artificial Sequence
  Description of Artificial Sequence: Synthetic oligonucleotide
aagugauggagagauuggg

SEQ ID NO: 2865706 - RNA, 19 nt, Artificial Sequence
  Description of Artificial Sequence: Synthetic oligonucleotide
gguugaucaccuuucaggg

SEQ ID NO: 2865707 - RNA, 19 nt, Artificial Sequence
  Description of Artificial Sequence: Synthetic oligonucleotide
acaucucuucucuucaguc

SEQ ID NO: 2865708 - RNA, 19 nt, Artificial Sequence
  Description of Artificial Sequence: Synthetic oligonucleotide
agaaaaggaggacagcgcu

SEQ ID NO: 2865709 - RNA, 19 nt, Artificial Sequence
  Description of Artificial Sequence: Synthetic oligonucleotide
ugauaaagggauuccuuga

SEQ ID NO: 2865710 - RNA, 19 nt, Artificial Sequence
  Description of Artificial Sequence: Synthetic oligonucleotide
ucagacucuggauucagac

SEQ ID NO: 2865711 - RNA, 19 nt, Artificial Sequence
  Description of Artificial Sequence: Synthetic oligonucleotide
agacucuggauucagacau

SEQ ID NO: 2865712 - RNA, 19 nt, Artificial Sequence
  Description of Artificial Sequence: Synthetic oligonucleotide
uccacugccuuacugucag

SEQ ID NO: 2865713 - RNA, 19 nt, Artificial Sequence
  Description of Artificial Sequence: Synthetic oligonucleotide
ugcaggaauaauuuccagu

SEQ ID NO: 2865714 - RNA, 19 nt, Artificial Sequence
  Description of Artificial Sequence: Synthetic oligonucleotide
uuuccaguuuucccaaggc

SEQ ID NO: 2865715 - RNA, 19 nt, Artificial Sequence
  Description of Artificial Sequence: Synthetic oligonucleotide
ugaguaaagaagugaugga

SEQ ID NO: 2865716 - RNA, 19 nt, Artificial Sequence
  Description of Artificial Sequence: Synthetic oligonucleotide
cuucccucugguuaagagg

SEQ ID NO: 2865717 - RNA, 19 nt, Artificial Sequence
  Description of Artificial Sequence: Synthetic oligonucleotide
uaagaggcucuuuuagacc

SEQ ID NO: 2865718 - RNA, 19 nt, Artificial Sequence
  Description of Artificial Sequence: Synthetic oligonucleotide
cuucuuguuggcuggcucg

SEQ ID NO: 2865719 - RNA, 19 nt, Artificial Sequence
  Description of Artificial Sequence: Synthetic oligonucleotide
uuccaguuuucccaaggcc

SEQ ID NO: 2865720 - RNA, 19 nt, Artificial Sequence
  Description of Artificial Sequence: Synthetic oligonucleotide
aacccggggacaauuaggg

SEQ ID NO: 2865721 - RNA, 19 nt, Artificial Sequence
  Description of Artificial Sequence: Synthetic oligonucleotide
uuuuacaggucggucauca

SEQ ID NO: 2865722 - RNA, 19 nt, Artificial Sequence
  Description of Artificial Sequence: Synthetic oligonucleotide
agugauggagagauugggc

SEQ ID NO: 2865723 - RNA, 19 nt, Artificial Sequence
  Description of Artificial Sequence: Synthetic oligonucleotide
cuuuuagaccuucuuuggc

SEQ ID NO: 2865724 - RNA, 19 nt, Artificial Sequence
  Description of Artificial Sequence: Synthetic oligonucleotide
caggaugaggcagaaaagg

SEQ ID NO: 2865725 - RNA, 19 nt, Artificial Sequence
  Description of Artificial Sequence: Synthetic oligonucleotide
aggaauagcagcugaugug

SEQ ID NO: 2865726 - RNA, 19 nt, Artificial Sequence
  Description of Artificial Sequence: Synthetic oligonucleotide
auucagacaucucuucucu

SEQ ID NO: 2865727 - RNA, 19 nt, Artificial Sequence
  Description of Artificial Sequence: Synthetic oligonucleotide
ugacuugcaggaauaauuu

SEQ ID NO: 2865728 - RNA, 19 nt, Artificial Sequence
  Description of Artificial Sequence: Synthetic oligonucleotide
agcgcuggcauucauggug

SEQ ID NO: 2865729 - RNA, 19 nt, Artificial Sequence
  Description of Artificial Sequence: Synthetic oligonucleotide
agagauugggcucuccacu

SEQ ID NO: 2865730 - RNA, 19 nt, Artificial Sequence
  Description of Artificial Sequence: Synthetic oligonucleotide
gaagugauggagagauugg

SEQ ID NO: 2865731 - RNA, 19 nt, Artificial Sequence
  Description of Artificial Sequence: Synthetic oligonucleotide
aauuuugaugcaggagcag

SEQ ID NO: 2865732 - RNA, 19 nt, Artificial Sequence
  Description of Artificial Sequence: Synthetic oligonucleotide
gcauucauggugcugacag

SEQ ID NO: 2865733 - RNA, 19 nt, Artificial Sequence
  Description of Artificial Sequence: Synthetic oligonucleotide
gcugaugugaccaugguug

SEQ ID NO: 2865734 - RNA, 19 nt, Artificial Sequence
  Description of Artificial Sequence: Synthetic oligonucleotide
ggcaggauugacuugcagg

SEQ ID NO: 2865735 - RNA, 19 nt, Artificial Sequence
  Description of Artificial Sequence: Synthetic oligonucleotide
gguuaagaggcucuuuuag

SEQ ID NO: 2865736 - RNA, 19 nt, Artificial Sequence
  Description of Artificial Sequence: Synthetic oligonucleotide
uuccuugagucccacucag

SEQ ID NO: 2865737 - RNA, 19 nt, Artificial Sequence
  Description of Artificial Sequence: Synthetic oligonucleotide
caucucuucucuucagucc

SEQ ID NO: 2865738 - RNA, 19 nt, Artificial Sequence
  Description of Artificial Sequence: Synthetic oligonucleotide
uuugaugcaggagcagcgg

SEQ ID NO: 2865739 - RNA, 19 nt, Artificial Sequence
  Description of Artificial Sequence: Synthetic oligonucleotide
ucagacaucucuucucuuc

SEQ ID NO: 2865740 - RNA, 19 nt, Artificial Sequence
  Description of Artificial Sequence: Synthetic oligonucleotide
aauuuccaguuuucccaag

SEQ ID NO: 2865741 - RNA, 19 nt, Artificial Sequence
  Description of Artificial Sequence: Synthetic oligonucleotide
auaggcugaguaaagaagu

SEQ ID NO: 2865742 - RNA, 19 nt, Artificial Sequence
  Description of Artificial Sequence: Synthetic oligonucleotide
aguaaagaagugauggaga

SEQ ID NO: 2865743 - RNA, 19 nt, Artificial Sequence
  Description of Artificial Sequence: Synthetic oligonucleotide
auagcagcugaugugacca

SEQ ID NO: 2865744 - RNA, 19 nt, Artificial Sequence
  Description of Artificial Sequence: Synthetic oligonucleotide
aucucuucucuucaguccu

SEQ ID NO: 2865745 - RNA, 19 nt, Artificial Sequence
  Description of Artificial Sequence: Synthetic oligonucleotide
cuuuucauugugacaauga

SEQ ID NO: 2865746 - RNA, 19 nt, Artificial Sequence
  Description of Artificial Sequence: Synthetic oligonucleotide
ucauggugcugacagugca

SEQ ID NO: 2865747 - RNA, 19 nt, Artificial Sequence
  Description of Artificial Sequence: Synthetic oligonucleotide
auaaagggauuccuugagu

SEQ ID NO: 2865748 - RNA, 19 nt, Artificial Sequence
  Description of Artificial Sequence: Synthetic oligonucleotide
uuacaggucggucaucaau

SEQ ID NO: 2865749 - RNA, 19 nt, Artificial Sequence
  Description of Artificial Sequence: Synthetic oligonucleotide
aauuagggcuggccauagg

SEQ ID NO: 2865750 - RNA, 19 nt, Artificial Sequence
  Description of Artificial Sequence: Synthetic oligonucleotide
cggucaucaauuuugaugc

SEQ ID NO: 2865751 - RNA, 19 nt, Artificial Sequence
  Description of Artificial Sequence: Synthetic oligonucleotide
gcagaaaaggaggacagcg

SEQ ID NO: 2865752 - RNA, 19 nt, Artificial Sequence
  Description of Artificial Sequence: Synthetic oligonucleotide
cagaaaaggaggacagcgc

SEQ ID NO: 2865753 - RNA, 19 nt, Artificial Sequence
  Description of Artificial Sequence: Synthetic oligonucleotide
guugaucaccuuucagggg

SEQ ID NO: 2865754 - RNA, 19 nt, Artificial Sequence
  Description of Artificial Sequence: Synthetic oligonucleotide
ucuugauaaagggauuccu

SEQ ID NO: 2865755 - RNA, 19 nt, Artificial Sequence
  Description of Artificial Sequence: Synthetic oligonucleotide
agauugggcucuccacugc

SEQ ID NO: 2865756 - RNA, 19 nt, Artificial Sequence
  Description of Artificial Sequence: Synthetic oligonucleotide
uacaggucggucaucaauu

SEQ ID NO: 2865757 - RNA, 19 nt, Artificial Sequence
  Description of Artificial Sequence: Synthetic oligonucleotide
uaggcugaguaaagaagug

SEQ ID NO: 2865758 - RNA, 19 nt, Artificial Sequence
  Description of Artificial Sequence: Synthetic oligonucleotide
uaauuuccaguuuucccaa

SEQ ID NO: 2865759 - RNA, 19 nt, Artificial Sequence
  Description of Artificial Sequence: Synthetic oligonucleotide
ugacagugcaggcuucuug

SEQ ID NO: 2865760 - RNA, 19 nt, Artificial Sequence
  Description of Artificial Sequence: Synthetic oligonucleotide
uggcuaacugcuuucaaua

SEQ ID NO: 2865761 - RNA, 19 nt, Artificial Sequence
  Description of Artificial Sequence: Synthetic oligonucleotide
guuaagaggcucuuuuaga

SEQ ID NO: 2865762 - RNA, 19 nt, Artificial Sequence
  Description of Artificial Sequence: Synthetic oligonucleotide
uucaguccuuuucauugug

SEQ ID NO: 2865763 - RNA, 19 nt, Artificial Sequence
  Description of Artificial Sequence: Synthetic oligonucleotide
ugcuuucaauaaauucuug

SEQ ID NO: 2865764 - RNA, 19 nt, Artificial Sequence
  Description of Artificial Sequence: Synthetic oligonucleotide
gagauugggcucuccacug

SEQ ID NO: 2865765 - RNA, 19 nt, Artificial Sequence
  Description of Artificial Sequence: Synthetic oligonucleotide
gugaccaugguugaucacc

SEQ ID NO: 2865766 - RNA, 19 nt, Artificial Sequence
  Description of Artificial Sequence: Synthetic oligonucleotide
uuuagaccuucuuuggcua

SEQ ID NO: 2865767 - RNA, 19 nt, Artificial Sequence
  Description of Artificial Sequence: Synthetic oligonucleotide
uuagggcuggccauaggcu

SEQ ID NO: 2865768 - RNA, 19 nt, Artificial Sequence
  Description of Artificial Sequence: Synthetic oligonucleotide
uucuugauaaagggauucc

SEQ ID NO: 2865769 - RNA, 19 nt, Artificial Sequence
  Description of Artificial Sequence: Synthetic oligonucleotide
cuugcaggaauaauuucca

SEQ ID NO: 2865770 - RNA, 19 nt, Artificial Sequence
  Description of Artificial Sequence: Synthetic oligonucleotide
ugaccaugguugaucaccu

SEQ ID NO: 2865771 - RNA, 19 nt, Artificial Sequence
  Description of Artificial Sequence: Synthetic oligonucleotide
uuggcuaacugcuuucaau

SEQ ID NO: 2865772 - RNA, 19 nt, Artificial Sequence
  Description of Artificial Sequence: Synthetic oligonucleotide
ucaguccuuuucauuguga

SEQ ID NO: 2865773 - RNA, 19 nt, Artificial Sequence
  Description of Artificial Sequence: Synthetic oligonucleotide
gaucucaacccgugggcag

SEQ ID NO: 2865774 - RNA, 19 nt, Artificial Sequence
  Description of Artificial Sequence: Synthetic oligonucleotide
aauucuugauggccucaga

SEQ ID NO: 2865775 - RNA, 19 nt, Artificial Sequence
  Description of Artificial Sequence: Synthetic oligonucleotide
uucauggugcugacagugc

SEQ ID NO: 2865776 - RNA, 19 nt, Artificial Sequence
  Description of Artificial Sequence: Synthetic oligonucleotide
acucagacucagcaggaug

SEQ ID NO: 2865777 - RNA, 19 nt, Artificial Sequence
  Description of Artificial Sequence: Synthetic oligonucleotide
gaugugaccaugguugauc

SEQ ID NO: 2865778 - RNA, 19 nt, Artificial Sequence
  Description of Artificial Sequence: Synthetic oligonucleotide
gucaucaauuuugaugcag

SEQ ID NO: 2865779 - RNA, 19 nt, Artificial Sequence
  Description of Artificial Sequence: Synthetic oligonucleotide
uuucccaaggcccucgguu

SEQ ID NO: 2865780 - RNA, 19 nt, Artificial Sequence
  Description of Artificial Sequence: Synthetic oligonucleotide
caauuuugaugcaggagca

SEQ ID NO: 2865781 - RNA, 19 nt, Artificial Sequence
  Description of Artificial Sequence: Synthetic oligonucleotide
gauugggcucuccacugcc

SEQ ID NO: 2865782 - RNA, 19 nt, Artificial Sequence
  Description of Artificial Sequence: Synthetic oligonucleotide
ugaugcaggagcagcggac

SEQ ID NO: 2865783 - RNA, 19 nt, Artificial Sequence
  Description of Artificial Sequence: Synthetic oligonucleotide
aggagcagcggacuguucu

SEQ ID NO: 2865784 - RNA, 19 nt, Artificial Sequence
  Description of Artificial Sequence: Synthetic oligonucleotide
uugcaggaauaauuuccag

SEQ ID NO: 2865785 - RNA, 19 nt, Artificial Sequence
  Description of Artificial Sequence: Synthetic oligonucleotide
caguccuuuucauugugac

SEQ ID NO: 2865786 - RNA, 19 nt, Artificial Sequence
  Description of Artificial Sequence: Synthetic oligonucleotide
gagagauugggcucuccac

SEQ ID NO: 2865787 - RNA, 19 nt, Artificial Sequence
  Description of Artificial Sequence: Synthetic oligonucleotide
aggauugacuugcaggaau

SEQ ID NO: 2865788 - RNA, 19 nt, Artificial Sequence
  Description of Artificial Sequence: Synthetic oligonucleotide
augguugaucaccuuucag

SEQ ID NO: 2865789 - RNA, 19 nt, Artificial Sequence
  Description of Artificial Sequence: Synthetic oligonucleotide
uagggcuggccauaggcug

SEQ ID NO: 2865790 - RNA, 19 nt, Artificial Sequence
  Description of Artificial Sequence: Synthetic oligonucleotide
gaacccggggacaauuagg

SEQ ID NO: 2865791 - RNA, 19 nt, Artificial Sequence
  Description of Artificial Sequence: Synthetic oligonucleotide
ugauggagagauugggcuc

SEQ ID NO: 2865792 - RNA, 19 nt, Artificial Sequence
  Description of Artificial Sequence: Synthetic oligonucleotide
agcggacuguucuugauaa

SEQ ID NO: 2865793 - RNA, 19 nt, Artificial Sequence
  Description of Artificial Sequence: Synthetic oligonucleotide
aggucggucaucaauuuug

SEQ ID NO: 2865794 - RNA, 19 nt, Artificial Sequence
  Description of Artificial Sequence: Synthetic oligonucleotide
cucagacucagcaggauga

SEQ ID NO: 2865795 - RNA, 19 nt, Artificial Sequence
  Description of Artificial Sequence: Synthetic oligonucleotide
cuucucuucaguccuuuuc

SEQ ID NO: 2865796 - RNA, 19 nt, Artificial Sequence
  Description of Artificial Sequence: Synthetic oligonucleotide
uaaagaagugauggagaga

SEQ ID NO: 2865797 - RNA, 19 nt, Artificial Sequence
  Description of Artificial Sequence: Synthetic oligonucleotide
uucuuuggcuaacugcuuu

SEQ ID NO: 2865798 - RNA, 19 nt, Artificial Sequence
  Description of Artificial Sequence: Synthetic oligonucleotide
cuuucaauaaauucuugau

SEQ ID NO: 2865799 - RNA, 19 nt, Artificial Sequence
  Description of Artificial Sequence: Synthetic oligonucleotide
aggcccucgguuuuacagg

SEQ ID NO: 2865800 - RNA, 19 nt, Artificial Sequence
  Description of Artificial Sequence: Synthetic oligonucleotide
caacccgugggcaggauug

SEQ ID NO: 2865801 - RNA, 19 nt, Artificial Sequence
  Description of Artificial Sequence: Synthetic oligonucleotide
caaugaucucaacccgugg

SEQ ID NO: 2865802 - RNA, 19 nt, Artificial Sequence
  Description of Artificial Sequence: Synthetic oligonucleotide
uguucuugauaaagggauu

SEQ ID NO: 2865803 - RNA, 19 nt, Artificial Sequence
  Description of Artificial Sequence: Synthetic oligonucleotide
augugaccaugguugauca

SEQ ID NO: 2865804 - RNA, 19 nt, Artificial Sequence
  Description of Artificial Sequence: Synthetic oligonucleotide
aguccuuuucauugugaca

SEQ ID NO: 2865805 - RNA, 19 nt, Artificial Sequence
  Description of Artificial Sequence: Synthetic oligonucleotide
uggauucagacaucucuuc

SEQ ID NO: 2865806 - RNA, 19 nt, Artificial Sequence
  Description of Artificial Sequence: Synthetic oligonucleotide
auggugcugacagugcagg

SEQ ID NO: 2865807 - RNA, 19 nt, Artificial Sequence
  Description of Artificial Sequence: Synthetic oligonucleotide
guucuugauaaagggauuc

SEQ ID NO: 2865808 - RNA, 19 nt, Artificial Sequence
  Description of Artificial Sequence: Synthetic oligonucleotide
gaaaaggaggacagcgcug

SEQ ID NO: 2865809 - RNA, 19 nt, Artificial Sequence
  Description of Artificial Sequence: Synthetic oligonucleotide
uucuuguuggcuggcucgg

SEQ ID NO: 2865810 - RNA, 19 nt, Artificial Sequence
  Description of Artificial Sequence: Synthetic oligonucleotide
acuguucuugauaaaggga

SEQ ID NO: 2865811 - RNA, 19 nt, Artificial Sequence
  Description of Artificial Sequence: Synthetic oligonucleotide
uuuggcuaacugcuuucaa

SEQ ID NO: 2865812 - RNA, 19 nt, Artificial Sequence
  Description of Artificial Sequence: Synthetic oligonucleotide
gacuugcaggaauaauuuc

SEQ ID NO: 2865813 - RNA, 19 nt, Artificial Sequence
  Description of Artificial Sequence: Synthetic oligonucleotide
agacaucucuucucuucag

SEQ ID NO: 2865814 - RNA, 19 nt, Artificial Sequence
  Description of Artificial Sequence: Synthetic oligonucleotide
ugaucucaacccgugggca

SEQ ID NO: 2865815 - RNA, 19 nt, Artificial Sequence
  Description of Artificial Sequence: Synthetic oligonucleotide
auugugacaaugaucucaa

SEQ ID NO: 2865816 - RNA, 19 nt, Artificial Sequence
  Description of Artificial Sequence: Synthetic oligonucleotide
cuaacugcuuucaauaaau

SEQ ID NO: 2865817 - RNA, 19 nt, Artificial Sequence
  Description of Artificial Sequence: Synthetic oligonucleotide
gcaggauugacuugcagga

SEQ ID NO: 2865818 - RNA, 19 nt, Artificial Sequence
  Description of Artificial Sequence: Synthetic oligonucleotide
cugccuuacugucagccac

SEQ ID NO: 2865819 - RNA, 19 nt, Artificial Sequence
  Description of Artificial Sequence: Synthetic oligonucleotide
gauggccucagacucugga

SEQ ID NO: 2865820 - RNA, 19 nt, Artificial Sequence
  Description of Artificial Sequence: Synthetic oligonucleotide
aucggcuucccucugguua

SEQ ID NO: 2865821 - RNA, 19 nt, Artificial Sequence
  Description of Artificial Sequence: Synthetic oligonucleotide
acaaugaucucaacccgug

SEQ ID NO: 2865822 - RNA, 19 nt, Artificial Sequence
  Description of Artificial Sequence: Synthetic oligonucleotide
cuguucuugauaaagggau

SEQ ID NO: 2865823 - RNA, 19 nt, Artificial Sequence
  Description of Artificial Sequence: Synthetic oligonucleotide
ggacuguucuugauaaagg

SEQ ID NO: 2865824 - RNA, 19 nt, Artificial Sequence
  Description of Artificial Sequence: Synthetic oligonucleotide
gugggcaggauugacuugc

SEQ ID NO: 2865825 - RNA, 19 nt, Artificial Sequence
  Description of Artificial Sequence: Synthetic oligonucleotide
uaacugcuuucaauaaauu

SEQ ID NO: 2865826 - RNA, 19 nt, Artificial Sequence
  Description of Artificial Sequence: Synthetic oligonucleotide
gugauggagagauugggcu

SEQ ID NO: 2865827 - RNA, 19 nt, Artificial Sequence
  Description of Artificial Sequence: Synthetic oligonucleotide
accaugguugaucaccuuu

SEQ ID NO: 2865828 - RNA, 19 nt, Artificial Sequence
  Description of Artificial Sequence: Synthetic oligonucleotide
cacugccuuacugucagcc

SEQ ID NO: 2865829 - RNA, 19 nt, Artificial Sequence
  Description of Artificial Sequence: Synthetic oligonucleotide
ugaucggcuucccucuggu

SEQ ID NO: 2865830 - RNA, 19 nt, Artificial Sequence
  Description of Artificial Sequence: Synthetic oligonucleotide
aguuuucccaaggcccucg

SEQ ID NO: 2865831 - RNA, 19 nt, Artificial Sequence
  Description of Artificial Sequence: Synthetic oligonucleotide
aggcagaaaaggaggacag

SEQ ID NO: 2865832 - RNA, 19 nt, Artificial Sequence
  Description of Artificial Sequence: Synthetic oligonucleotide
uugauggccucagacucug

SEQ ID NO: 2865833 - RNA, 19 nt, Artificial Sequence
  Description of Artificial Sequence: Synthetic oligonucleotide
acccggggacaauuagggc

SEQ ID NO: 2865834 - RNA, 19 nt, Artificial Sequence
  Description of Artificial Sequence: Synthetic oligonucleotide
ugccuuacugucagccaca

SEQ ID NO: 2865835 - RNA, 19 nt, Artificial Sequence
  Description of Artificial Sequence: Synthetic oligonucleotide
gacagugcaggcuucuugu

SEQ ID NO: 2865836 - RNA, 19 nt, Artificial Sequence
  Description of Artificial Sequence: Synthetic oligonucleotide
uuagaccuucuuuggcuaa

SEQ ID NO: 2865837 - RNA, 19 nt, Artificial Sequence
  Description of Artificial Sequence: Synthetic oligonucleotide
ugguuaagaggcucuuuua

SEQ ID NO: 2865838 - RNA, 19 nt, Artificial Sequence
  Description of Artificial Sequence: Synthetic oligonucleotide
ggaauagcagcugauguga

SEQ ID NO: 2865839 - RNA, 19 nt, Artificial Sequence
  Description of Artificial Sequence: Synthetic oligonucleotide
acucuggauucagacaucu

SEQ ID NO: 2865840 - RNA, 19 nt, Artificial Sequence
  Description of Artificial Sequence: Synthetic oligonucleotide
uggccucagacucuggauu

SEQ ID NO: 2865841 - RNA, 19 nt, Artificial Sequence
  Description of Artificial Sequence: Synthetic oligonucleotide
aaggaggacagcgcuggca

SEQ ID NO: 2865842 - RNA, 19 nt, Artificial Sequence
  Description of Artificial Sequence: Synthetic oligonucleotide
acucagcaggaugaggcag

SEQ ID NO: 2865843 - RNA, 19 nt, Artificial Sequence
  Description of Artificial Sequence: Synthetic oligonucleotide
gaccuucuuuggcuaacug

SEQ ID NO: 2865844 - RNA, 19 nt, Artificial Sequence
  Description of Artificial Sequence: Synthetic oligonucleotide
uggccauaggcugaguaaa

SEQ ID NO: 2865845 - RNA, 19 nt, Artificial Sequence
  Description of Artificial Sequence: Synthetic oligonucleotide
acugccuuacugucagcca

SEQ ID NO: 2865846 - RNA, 19 nt, Artificial Sequence
  Description of Artificial Sequence: Synthetic oligonucleotide
aucucaacccgugggcagg

SEQ ID NO: 2865847 - RNA, 19 nt, Artificial Sequence
  Description of Artificial Sequence: Synthetic oligonucleotide
ucucuucaguccuuuucau

SEQ ID NO: 2865848 - RNA, 19 nt, Artificial Sequence
  Description of Artificial Sequence: Synthetic oligonucleotide
ucggcuucccucugguuaa

SEQ ID NO: 2865849 - RNA, 19 nt, Artificial Sequence
  Description of Artificial Sequence: Synthetic oligonucleotide
cuggcauucauggugcuga

SEQ ID NO: 2865850 - RNA, 19 nt, Artificial Sequence
  Description of Artificial Sequence: Synthetic oligonucleotide
ugugaucggcuucccucug

SEQ ID NO: 2865851 - RNA, 19 nt, Artificial Sequence
  Description of Artificial Sequence: Synthetic oligonucleotide
ggacaauuagggcuggcca

SEQ ID NO: 2865852 - RNA, 19 nt, Artificial Sequence
  Description of Artificial Sequence: Synthetic oligonucleotide
cagugcaggcuucuuguug

SEQ ID NO: 2865853 - RNA, 19 nt, Artificial Sequence
  Description of Artificial Sequence: Synthetic oligonucleotide
auugacuugcaggaauaau

SEQ ID NO: 2865854 - RNA, 19 nt, Artificial Sequence
  Description of Artificial Sequence: Synthetic oligonucleotide
guuuucccaaggcccucgg

SEQ ID NO: 2865855 - RNA, 19 nt, Artificial Sequence
  Description of Artificial Sequence: Synthetic oligonucleotide
aggcugaguaaagaaguga

SEQ ID NO: 2865856 - RNA, 19 nt, Artificial Sequence
  Description of Artificial Sequence: Synthetic oligonucleotide
gugaucggcuucccucugg

SEQ ID NO: 2865857 - RNA, 19 nt, Artificial Sequence
  Description of Artificial Sequence: Synthetic oligonucleotide
gacucagcaggaugaggca

SEQ ID NO: 2865858 - RNA, 19 nt, Artificial Sequence
  Description of Artificial Sequence: Synthetic oligonucleotide
uuuucccaaggcccucggu

SEQ ID NO: 2865859 - RNA, 19 nt, Artificial Sequence
  Description of Artificial Sequence: Synthetic oligonucleotide
ccuugagucccacucagac

SEQ ID NO: 2865860 - RNA, 19 nt, Artificial Sequence
  Description of Artificial Sequence: Synthetic oligonucleotide
agcugaugugaccaugguu

SEQ ID NO: 2865861 - RNA, 19 nt, Artificial Sequence
  Description of Artificial Sequence: Synthetic oligonucleotide
gacaauuagggcuggccau

SEQ ID NO: 2865862 - RNA, 19 nt, Artificial Sequence
  Description of Artificial Sequence: Synthetic oligonucleotide
ucuuguuggcuggcucggg

SEQ ID NO: 2865863 - RNA, 19 nt, Artificial Sequence
  Description of Artificial Sequence: Synthetic oligonucleotide
cagacaucucuucucuuca

SEQ ID NO: 2865864 - RNA, 19 nt, Artificial Sequence
  Description of Artificial Sequence: Synthetic oligonucleotide
uucccaaggcccucgguuu

SEQ ID NO: 2865865 - RNA, 19 nt, Artificial Sequence
  Description of Artificial Sequence: Synthetic oligonucleotide
gcugugaucggcuucccuc

SEQ ID NO: 2865866 - RNA, 19 nt, Artificial Sequence
  Description of Artificial Sequence: Synthetic oligonucleotide
uuuacaggucggucaucaa

SEQ ID NO: 2865867 - RNA, 19 nt, Artificial Sequence
  Description of Artificial Sequence: Synthetic oligonucleotide
uccuugagucccacucaga

SEQ ID NO: 2865868 - RNA, 19 nt, Artificial Sequence
  Description of Artificial Sequence: Synthetic oligonucleotide
gacagcgcuggcauucaug

SEQ ID NO: 2865869 - RNA, 19 nt, Artificial Sequence
  Description of Artificial Sequence: Synthetic oligonucleotide
cccucgguuuuacaggucg

SEQ ID NO: 2865870 - RNA, 19 nt, Artificial Sequence
  Description of Artificial Sequence: Synthetic oligonucleotide
cagacucuggauucagaca

SEQ ID NO: 2865871 - RNA, 19 nt, Artificial Sequence
  Description of Artificial Sequence: Synthetic oligonucleotide
ucauugugacaaugaucuc

SEQ ID NO: 2865872 - RNA, 19 nt, Artificial Sequence
  Description of Artificial Sequence: Synthetic oligonucleotide
gauggagagauugggcucu

SEQ ID NO: 2865873 - RNA, 19 nt, Artificial Sequence
  Description of Artificial Sequence: Synthetic oligonucleotide
gcuucccucugguuaagag

SEQ ID NO: 2865874 - RNA, 19 nt, Artificial Sequence
  Description of Artificial Sequence: Synthetic oligonucleotide
auggccucagacucuggau

SEQ ID NO: 2865875 - RNA, 19 nt, Artificial Sequence
  Description of Artificial Sequence: Synthetic oligonucleotide
ucgguuuuacaggucgguc

SEQ ID NO: 2865876 - RNA, 19 nt, Artificial Sequence
  Description of Artificial Sequence: Synthetic oligonucleotide
caauuagggcuggccauag

SEQ ID NO: 2865877 - RNA, 19 nt, Artificial Sequence
  Description of Artificial Sequence: Synthetic oligonucleotide
ggaacccggggacaauuag

SEQ ID NO: 2865878 - RNA, 19 nt, Artificial Sequence
  Description of Artificial Sequence: Synthetic oligonucleotide
ugauggccucagacucugg

SEQ ID NO: 2865879 - RNA, 19 nt, Artificial Sequence
  Description of Artificial Sequence: Synthetic oligonucleotide
ugugaccaugguugaucac

SEQ ID NO: 2865880 - RNA, 19 nt, Artificial Sequence
  Description of Artificial Sequence: Synthetic oligonucleotide
gcaggaauaauuuccaguu

SEQ ID NO: 2865881 - RNA, 19 nt, Artificial Sequence
  Description of Artificial Sequence: Synthetic oligonucleotide
cuugauaaagggauuccuu

SEQ ID NO: 2865882 - RNA, 19 nt, Artificial Sequence
  Description of Artificial Sequence: Synthetic oligonucleotide
ugagucccacucagacuca

SEQ ID NO: 2865883 - RNA, 19 nt, Artificial Sequence
  Description of Artificial Sequence: Synthetic oligonucleotide
uagaccuucuuuggcuaac

SEQ ID NO: 2865884 - RNA, 19 nt, Artificial Sequence
  Description of Artificial Sequence: Synthetic oligonucleotide
caugguugaucaccuuuca

SEQ ID NO: 2865885 - RNA, 19 nt, Artificial Sequence
  Description of Artificial Sequence: Synthetic oligonucleotide
gauugacuugcaggaauaa

SEQ ID NO: 2865886 - RNA, 19 nt, Artificial Sequence
  Description of Artificial Sequence: Synthetic oligonucleotide
ucaacccgugggcaggauu

SEQ ID NO: 2865887 - RNA, 19 nt, Artificial Sequence
  Description of Artificial Sequence: Synthetic oligonucleotide
ugucagccacagcacugcu

SEQ ID NO: 2865888 - RNA, 19 nt, Artificial Sequence
  Description of Artificial Sequence: Synthetic oligonucleotide
gacaaugaucucaacccgu

SEQ ID NO: 2865889 - RNA, 19 nt, Artificial Sequence
  Description of Artificial Sequence: Synthetic oligonucleotide
ugcugugaucggcuucccu

SEQ ID NO: 2865890 - RNA, 19 nt, Artificial Sequence
  Description of Artificial Sequence: Synthetic oligonucleotide
agcagcggacuguucuuga

SEQ ID NO: 2865891 - RNA, 19 nt, Artificial Sequence
  Description of Artificial Sequence: Synthetic oligonucleotide
cugaugugaccaugguuga

SEQ ID NO: 2865892 - RNA, 19 nt, Artificial Sequence
  Description of Artificial Sequence: Synthetic oligonucleotide
acaggucggucaucaauuu

SEQ ID NO: 2865893 - RNA, 19 nt, Artificial Sequence
  Description of Artificial Sequence: Synthetic oligonucleotide
uccuuuucauugugacaau

SEQ ID NO: 2865894 - RNA, 19 nt, Artificial Sequence
  Description of Artificial Sequence: Synthetic oligonucleotide
ggagagauugggcucucca

SEQ ID NO: 2865895 - RNA, 19 nt, Artificial Sequence
  Description of Artificial Sequence: Synthetic oligonucleotide
gggacaauuagggcuggcc

SEQ ID NO: 2865896 - RNA, 19 nt, Artificial Sequence
  Description of Artificial Sequence: Synthetic oligonucleotide
gcuaacugcuuucaauaaa

SEQ ID NO: 2865897 - RNA, 19 nt, Artificial Sequence
  Description of Artificial Sequence: Synthetic oligonucleotide
uucagacaucucuucucuu

SEQ ID NO: 2865898 - RNA, 19 nt, Artificial Sequence
  Description of Artificial Sequence: Synthetic oligonucleotide
augcaggagcagcggacug

SEQ ID NO: 2865899 - RNA, 19 nt, Artificial Sequence
  Description of Artificial Sequence: Synthetic oligonucleotide
acaauuagggcuggccaua

SEQ ID NO: 2865900 - RNA, 19 nt, Artificial Sequence
  Description of Artificial Sequence: Synthetic oligonucleotide
gcugaguaaagaagugaug

SEQ ID NO: 2865901 - RNA, 19 nt, Artificial Sequence
  Description of Artificial Sequence: Synthetic oligonucleotide
ccaugguugaucaccuuuc

SEQ ID NO: 2865902 - RNA, 19 nt, Artificial Sequence
  Description of Artificial Sequence: Synthetic oligonucleotide
uugugacaaugaucucaac

SEQ ID NO: 2865903 - RNA, 19 nt, Artificial Sequence
  Description of Artificial Sequence: Synthetic oligonucleotide
cuuguuggcuggcucggga

SEQ ID NO: 2865904 - RNA, 19 nt, Artificial Sequence
  Description of Artificial Sequence: Synthetic oligonucleotide
ugggcaggauugacuugca

SEQ ID NO: 2865905 - RNA, 19 nt, Artificial Sequence
  Description of Artificial Sequence: Synthetic oligonucleotide
ccuucuuuggcuaacugcu

SEQ ID NO: 2865906 - RNA, 19 nt, Artificial Sequence
  Description of Artificial Sequence: Synthetic oligonucleotide
gagucccacucagacucag

SEQ ID NO: 2865907 - RNA, 19 nt, Artificial Sequence
  Description of Artificial Sequence: Synthetic oligonucleotide
ucugguuaagaggcucuuu

SEQ ID NO: 2865908 - RNA, 19 nt, Artificial Sequence
  Description of Artificial Sequence: Synthetic oligonucleotide
gaggcucuuuuagaccuuc

SEQ ID NO: 2865909 - RNA, 19 nt, Artificial Sequence
  Description of Artificial Sequence: Synthetic oligonucleotide
cuuuggcuaacugcuuuca

SEQ ID NO: 2865910 - RNA, 19 nt, Artificial Sequence
  Description of Artificial Sequence: Synthetic oligonucleotide
gcaggaugaggcagaaaag

SEQ ID NO: 2865911 - RNA, 19 nt, Artificial Sequence
  Description of Artificial Sequence: Synthetic oligonucleotide
ucagcaggaugaggcagaa

SEQ ID NO: 2865912 - RNA, 19 nt, Artificial Sequence
  Description of Artificial Sequence: Synthetic oligonucleotide
agaccuucuuuggcuaacu

SEQ ID NO: 2865913 - RNA, 19 nt, Artificial Sequence
  Description of Artificial Sequence: Synthetic oligonucleotide
uggcauucauggugcugac

SEQ ID NO: 2865914 - RNA, 19 nt, Artificial Sequence
  Description of Artificial Sequence: Synthetic oligonucleotide
cucuggauucagacaucuc

SEQ ID NO: 2865915 - RNA, 19 nt, Artificial Sequence
  Description of Artificial Sequence: Synthetic oligonucleotide
ucucuucucuucaguccuu

SEQ ID NO: 2865916 - RNA, 19 nt, Artificial Sequence
  Description of Artificial Sequence: Synthetic oligonucleotide
ugaugugaccaugguugau

SEQ ID NO: 2865917 - RNA, 19 nt, Artificial Sequence
  Description of Artificial Sequence: Synthetic oligonucleotide
ucccucugguuaagaggcu

SEQ ID NO: 2865918 - RNA, 19 nt, Artificial Sequence
  Description of Artificial Sequence: Synthetic oligonucleotide
cggacuguucuugauaaag

SEQ ID NO: 2865919 - RNA, 19 nt, Artificial Sequence
  Description of Artificial Sequence: Synthetic oligonucleotide
ugcaggcuucuuguuggcu

SEQ ID NO: 2865920 - RNA, 19 nt, Artificial Sequence
  Description of Artificial Sequence: Synthetic oligonucleotide
cuugagucccacucagacu

SEQ ID NO: 2865921 - RNA, 19 nt, Artificial Sequence
  Description of Artificial Sequence: Synthetic oligonucleotide
gaugcaggagcagcggacu

SEQ ID NO: 2865922 - RNA, 19 nt, Artificial Sequence
  Description of Artificial Sequence: Synthetic oligonucleotide
ugcugacagugcaggcuuc

SEQ ID NO: 2865923 - RNA, 19 nt, Artificial Sequence
  Description of Artificial Sequence: Synthetic oligonucleotide
cucagacucuggauucaga

SEQ ID NO: 2865924 - RNA, 19 nt, Artificial Sequence
  Description of Artificial Sequence: Synthetic oligonucleotide
ggcuaacugcuuucaauaa

SEQ ID NO: 2865925 - RNA, 19 nt, Artificial Sequence
  Description of Artificial Sequence: Synthetic oligonucleotide
ggauucagacaucucuucu

SEQ ID NO: 2865926 - RNA, 19 nt, Artificial Sequence
  Description of Artificial Sequence: Synthetic oligonucleotide
ucucaacccgugggcagga

SEQ ID NO: 2865927 - RNA, 19 nt, Artificial Sequence
  Description of Artificial Sequence: Synthetic oligonucleotide
ccggggacaauuagggcug

SEQ ID NO: 2865928 - RNA, 19 nt, Artificial Sequence
  Description of Artificial Sequence: Synthetic oligonucleotide
acagugcaggcuucuuguu

SEQ ID NO: 2865929 - RNA, 19 nt, Artificial Sequence
  Description of Artificial Sequence: Synthetic oligonucleotide
ccuuuucauugugacaaug

SEQ ID NO: 2865930 - RNA, 19 nt, Artificial Sequence
  Description of Artificial Sequence: Synthetic oligonucleotide
ggccucagacucuggauuc

SEQ ID NO: 2865931 - RNA, 19 nt, Artificial Sequence
  Description of Artificial Sequence: Synthetic oligonucleotide
cugguuaagaggcucuuuu

SEQ ID NO: 2865932 - RNA, 19 nt, Artificial Sequence
  Description of Artificial Sequence: Synthetic oligonucleotide
uggagagauugggcucucc

SEQ ID NO: 2865933 - RNA, 19 nt, Artificial Sequence
  Description of Artificial Sequence: Synthetic oligonucleotide
cuggauucagacaucucuu

SEQ ID NO: 2865934 - RNA, 19 nt, Artificial Sequence
  Description of Artificial Sequence: Synthetic oligonucleotide
ucccaaggcccucgguuuu

SEQ ID NO: 2865935 - RNA, 19 nt, Artificial Sequence
  Description of Artificial Sequence: Synthetic oligonucleotide
cuucaguccuuuucauugu

SEQ ID NO: 2865936 - RNA, 19 nt, Artificial Sequence
  Description of Artificial Sequence: Synthetic oligonucleotide
gcuucuuguuggcuggcuc

SEQ ID NO: 2865937 - RNA, 19 nt, Artificial Sequence
  Description of Artificial Sequence: Synthetic oligonucleotide
ccauaggcugaguaaagaa

SEQ ID NO: 2865938 - RNA, 19 nt, Artificial Sequence
  Description of Artificial Sequence: Synthetic oligonucleotide
gguuuuacaggucggucau

SEQ ID NO: 2865939 - RNA, 19 nt, Artificial Sequence
  Description of Artificial Sequence: Synthetic oligonucleotide
gugcaggcuucuuguuggc

SEQ ID NO: 2865940 - RNA, 19 nt, Artificial Sequence
  Description of Artificial Sequence: Synthetic oligonucleotide
cuccacugccuuacuguca

SEQ ID NO: 2865941 - RNA, 19 nt, Artificial Sequence
  Description of Artificial Sequence: Synthetic oligonucleotide
aacccgugggcaggauuga

SEQ ID NO: 2865942 - RNA, 19 nt, Artificial Sequence
  Description of Artificial Sequence: Synthetic oligonucleotide
cuugauggccucagacucu

SEQ ID NO: 2865943 - RNA, 19 nt, Artificial Sequence
  Description of Artificial Sequence: Synthetic oligonucleotide
ccucgguuuuacaggucgg

SEQ ID NO: 2865944 - RNA, 19 nt, Artificial Sequence
  Description of Artificial Sequence: Synthetic oligonucleotide
acccgugggcaggauugac

SEQ ID NO: 2865945 - RNA, 19 nt, Artificial Sequence
  Description of Artificial Sequence: Synthetic oligonucleotide
gacucuggauucagacauc

SEQ ID NO: 2865946 - RNA, 19 nt, Artificial Sequence
  Description of Artificial Sequence: Synthetic oligonucleotide
auggagagauugggcucuc

SEQ ID NO: 2865947 - RNA, 19 nt, Artificial Sequence
  Description of Artificial Sequence: Synthetic oligonucleotide
aagaagugauggagagauu

SEQ ID NO: 2865948 - RNA, 19 nt, Artificial Sequence
  Description of Artificial Sequence: Synthetic oligonucleotide
cugugaucggcuucccucu

SEQ ID NO: 2865949 - RNA, 19 nt, Artificial Sequence
  Description of Artificial Sequence: Synthetic oligonucleotide
ggccauaggcugaguaaag

SEQ ID NO: 2865950 - RNA, 19 nt, Artificial Sequence
  Description of Artificial Sequence: Synthetic oligonucleotide
uagcagcugaugugaccau

SEQ ID NO: 2865951 - RNA, 19 nt, Artificial Sequence
  Description of Artificial Sequence: Synthetic oligonucleotide
ggucaucaauuuugaugca

SEQ ID NO: 2865952 - RNA, 19 nt, Artificial Sequence
  Description of Artificial Sequence: Synthetic oligonucleotide
gggcaggauugacuugcag

SEQ ID NO: 2865953 - RNA, 19 nt, Artificial Sequence
  Description of Artificial Sequence: Synthetic oligonucleotide
guuuuacaggucggucauc

SEQ ID NO: 2865954 - RNA, 19 nt, Artificial Sequence
  Description of Artificial Sequence: Synthetic oligonucleotide
ggcugaguaaagaagugau

SEQ ID NO: 2865955 - RNA, 19 nt, Artificial Sequence
  Description of Artificial Sequence: Synthetic oligonucleotide
ggucggucaucaauuuuga

SEQ ID NO: 2865956 - RNA, 19 nt, Artificial Sequence
  Description of Artificial Sequence: Synthetic oligonucleotide
ggauugacuugcaggaaua

SEQ ID NO: 2865957 - RNA, 19 nt, Artificial Sequence
  Description of Artificial Sequence: Synthetic oligonucleotide
cgguuuuacaggucgguca

SEQ ID NO: 2865958 - RNA, 19 nt, Artificial Sequence
  Description of Artificial Sequence: Synthetic oligonucleotide
agggauuccuugaguccca

SEQ ID NO: 2865959 - RNA, 19 nt, Artificial Sequence
  Description of Artificial Sequence: Synthetic oligonucleotide
gccauaggcugaguaaaga

SEQ ID NO: 2865960 - RNA, 19 nt, Artificial Sequence
  Description of Artificial Sequence: Synthetic oligonucleotide
cauucauggugcugacagu

SEQ ID NO: 2865961 - RNA, 19 nt, Artificial Sequence
  Description of Artificial Sequence: Synthetic oligonucleotide
cccggggacaauuagggcu

SEQ ID NO: 2865962 - RNA, 19 nt, Artificial Sequence
  Description of Artificial Sequence: Synthetic oligonucleotide
cagcggacuguucuugaua

SEQ ID NO: 2865963 - RNA, 19 nt, Artificial Sequence
  Description of Artificial Sequence: Synthetic oligonucleotide
gccuuacugucagccacag

SEQ ID NO: 2865964 - RNA, 19 nt, Artificial Sequence
  Description of Artificial Sequence: Synthetic oligonucleotide
gcuggcauucauggugcug

SEQ ID NO: 2865965 - RNA, 19 nt, Artificial Sequence
  Description of Artificial Sequence: Synthetic oligonucleotide
caggaauaauuuccaguuu

SEQ ID NO: 2865966 - RNA, 19 nt, Artificial Sequence
  Description of Artificial Sequence: Synthetic oligonucleotide
aggcucuuuuagaccuucu

SEQ ID NO: 2865967 - RNA, 19 nt, Artificial Sequence
  Description of Artificial Sequence: Synthetic oligonucleotide
cucgguuuuacaggucggu

SEQ ID NO: 2865968 - RNA, 19 nt, Artificial Sequence
  Description of Artificial Sequence: Synthetic oligonucleotide
caggauugacuugcaggaa

SEQ ID NO: 2865969 - RNA, 19 nt, Artificial Sequence
  Description of Artificial Sequence: Synthetic oligonucleotide
ccucagacucuggauucag

SEQ ID NO: 2865970 - RNA, 19 nt, Artificial Sequence
  Description of Artificial Sequence: Synthetic oligonucleotide
caggagcagcggacuguuc

SEQ ID NO: 2865971 - RNA, 19 nt, Artificial Sequence
  Description of Artificial Sequence: Synthetic oligonucleotide
ggcccucgguuuuacaggu

SEQ ID NO: 2865972 - RNA, 19 nt, Artificial Sequence
  Description of Artificial Sequence: Synthetic oligonucleotide
ccuuacugucagccacagc

SEQ ID NO: 2865973 - RNA, 19 nt, Artificial Sequence
  Description of Artificial Sequence: Synthetic oligonucleotide
ccacucagacucagcagga

SEQ ID NO: 2865974 - RNA, 19 nt, Artificial Sequence
  Description of Artificial Sequence: Synthetic oligonucleotide
ccaguuuucccaaggcccu

SEQ ID NO: 2865975 - RNA, 19 nt, Artificial Sequence
  Description of Artificial Sequence: Synthetic oligonucleotide
cugcugugaucggcuuccc

SEQ ID NO: 2865976 - RNA, 19 nt, Artificial Sequence
  Description of Artificial Sequence: Synthetic oligonucleotide
gucggucaucaauuuugau

SEQ ID NO: 2865977 - RNA, 19 nt, Artificial Sequence
  Description of Artificial Sequence: Synthetic oligonucleotide
ggcucuuuuagaccuucuu

SEQ ID NO: 2865978 - RNA, 19 nt, Artificial Sequence
  Description of Artificial Sequence: Synthetic oligonucleotide
agaggcucuuuuagaccuu

SEQ ID NO: 2865979 - RNA, 19 nt, Artificial Sequence
  Description of Artificial Sequence: Synthetic oligonucleotide
cccucugguuaagaggcuc

SEQ ID NO: 2865980 - RNA, 19 nt, Artificial Sequence
  Description of Artificial Sequence: Synthetic oligonucleotide
ggcauucauggugcugaca

SEQ ID NO: 2865981 - RNA, 19 nt, Artificial Sequence
  Description of Artificial Sequence: Synthetic oligonucleotide
gggauuccuugagucccac

SEQ ID NO: 2865982 - RNA, 19 nt, Artificial Sequence
  Description of Artificial Sequence: Synthetic oligonucleotide
gggcuggccauaggcugag

SEQ ID NO: 2865983 - RNA, 19 nt, Artificial Sequence
  Description of Artificial Sequence: Synthetic oligonucleotide
gaucggcuucccucugguu

SEQ ID NO: 2865984 - RNA, 19 nt, Artificial Sequence
  Description of Artificial Sequence: Synthetic oligonucleotide
ggggacaauuagggcuggc

SEQ ID NO: 2865985 - RNA, 19 nt, Artificial Sequence
  Description of Artificial Sequence: Synthetic oligonucleotide
gaccaugguugaucaccuu

SEQ ID NO: 2865986 - RNA, 19 nt, Artificial Sequence
  Description of Artificial Sequence: Synthetic oligonucleotide
cgugggcaggauugacuug

SEQ ID NO: 2865987 - RNA, 19 nt, Artificial Sequence
  Description of Artificial Sequence: Synthetic oligonucleotide
caggucggucaucaauuuu

SEQ ID NO: 2865988 - RNA, 19 nt, Artificial Sequence
  Description of Artificial Sequence: Synthetic oligonucleotide
gccucagacucuggauuca

SEQ ID NO: 2865989 - RNA, 19 nt, Artificial Sequence
  Description of Artificial Sequence: Synthetic oligonucleotide
ccucugguuaagaggcucu

SEQ ID NO: 2865990 - RNA, 19 nt, Artificial Sequence
  Description of Artificial Sequence: Synthetic oligonucleotide
ggauuccuugagucccacu

SEQ ID NO: 2865991 - RNA, 19 nt, Artificial Sequence
  Description of Artificial Sequence: Synthetic oligonucleotide
gccacagcacugcugugau

SEQ ID NO: 2865992 - RNA, 19 nt, Artificial Sequence
  Description of Artificial Sequence: Synthetic oligonucleotide
ccaaggcccucgguuuuac

SEQ ID NO: 2865993 - RNA, 19 nt, Artificial Sequence
  Description of Artificial Sequence: Synthetic oligonucleotide
gcggacuguucuugauaaa

SEQ ID NO: 2865994 - RNA, 19 nt, Artificial Sequence
  Description of Artificial Sequence: Synthetic oligonucleotide
ccacugccuuacugucagc

SEQ ID NO: 2865995 - RNA, 19 nt, Artificial Sequence
  Description of Artificial Sequence: Synthetic oligonucleotide
cucuucucuucaguccuuu

SEQ ID NO: 2865996 - RNA, 19 nt, Artificial Sequence
  Description of Artificial Sequence: Synthetic oligonucleotide
ggcuucccucugguuaaga

SEQ ID NO: 2865997 - RNA, 19 nt, Artificial Sequence
  Description of Artificial Sequence: Synthetic oligonucleotide
gggaacccggggacaauua

SEQ ID NO: 2865998 - RNA, 19 nt, Artificial Sequence
  Description of Artificial Sequence: Synthetic oligonucleotide
cucugguuaagaggcucuu

SEQ ID NO: 2865999 - RNA, 19 nt, Artificial Sequence
  Description of Artificial Sequence: Synthetic oligonucleotide
ccgugggcaggauugacuu

SEQ ID NO: 2866000 - RNA, 19 nt, Artificial Sequence
  Description of Artificial Sequence: Synthetic oligonucleotide
gcagcggacuguucuugau

SEQ ID NO: 2866001 - RNA, 19 nt, Artificial Sequence
  Description of Artificial Sequence: Synthetic oligonucleotide
cacucagacucagcaggau

SEQ ID NO: 2866002 - RNA, 19 nt, Artificial Sequence
  Description of Artificial Sequence: Synthetic oligonucleotide
cagcgcuggcauucauggu

SEQ ID NO: 2866003 - RNA, 19 nt, Artificial Sequence
  Description of Artificial Sequence: Synthetic oligonucleotide
cccgugggcaggauugacu

SEQ ID NO: 2866004 - RNA, 19 nt, Artificial Sequence
  Description of Artificial Sequence: Synthetic oligonucleotide
cagcaggaugaggcagaaa

SEQ ID NO: 2866005 - RNA, 19 nt, Artificial Sequence
  Description of Artificial Sequence: Synthetic oligonucleotide
cggggacaauuagggcugg

SEQ ID NO: 2866006 - RNA, 19 nt, Artificial Sequence
  Description of Artificial Sequence: Synthetic oligonucleotide
gcaggagcagcggacuguu

SEQ ID NO: 2866007 - RNA, 19 nt, Artificial Sequence
  Description of Artificial Sequence: Synthetic oligonucleotide
cugacagugcaggcuucuu

SEQ ID NO: 2866008 - RNA, 19 nt, Artificial Sequence
  Description of Artificial Sequence: Synthetic oligonucleotide
ggggaacccggggacaauu

SEQ ID NO: 2866009 - RNA, 19 nt, Artificial Sequence
  Description of Artificial Sequence: Synthetic oligonucleotide
ggaggacagcgcuggcauu

SEQ ID NO: 2866010 - RNA, 19 nt, Artificial Sequence
  Description of Artificial Sequence: Synthetic oligonucleotide
gcccucgguuuuacagguc

SEQ ID NO: 2866011 - RNA, 19 nt, Artificial Sequence
  Description of Artificial Sequence: Synthetic oligonucleotide
ggcucuccacugccuuacu

SEQ ID NO: 2866012 - RNA, 19 nt, Artificial Sequence
  Description of Artificial Sequence: Synthetic oligonucleotide
ggacagcgcuggcauucau

SEQ ID NO: 2866013 - RNA, 19 nt, Artificial Sequence
  Description of Artificial Sequence: Synthetic oligonucleotide
cucaacccgugggcaggau

SEQ ID NO: 2866014 - RNA, 19 nt, Artificial Sequence
  Description of Artificial Sequence: Synthetic oligonucleotide
cggcuucccucugguuaag

SEQ ID NO: 2866015 - RNA, 19 nt, Artificial Sequence
  Description of Artificial Sequence: Synthetic oligonucleotide
cccaaggcccucgguuuua

SEQ ID NO: 2866016 - RNA, 19 nt, Artificial Sequence
  Description of Artificial Sequence: Synthetic oligonucleotide
aaaggaaucacucaauugc

SEQ ID NO: 2866017 - RNA, 19 nt, Artificial Sequence
  Description of Artificial Sequence: Synthetic oligonucleotide
auuuaagaaaaccauaugc

SEQ ID NO: 2866018 - RNA, 19 nt, Artificial Sequence
  Description of Artificial Sequence: Synthetic oligonucleotide
aaaauuuaaauccuacagg

SEQ ID NO: 2866019 - RNA, 19 nt, Artificial Sequence
  Description of Artificial Sequence: Synthetic oligonucleotide
aguuugaucuaucaaaugc

SEQ ID NO: 2866020 - RNA, 19 nt, Artificial Sequence
  Description of Artificial Sequence: Synthetic oligonucleotide
aaauuuaaauccuacaggu

SEQ ID NO: 2866021 - RNA, 19 nt, Artificial Sequence
  Description of Artificial Sequence: Synthetic oligonucleotide
uaccauauaagucagcugg

SEQ ID NO: 2866022 - RNA, 19 nt, Artificial Sequence
  Description of Artificial Sequence: Synthetic oligonucleotide
aauuaugacuauuugcauc

SEQ ID NO: 2866023 - RNA, 19 nt, Artificial Sequence
  Description of Artificial Sequence: Synthetic oligonucleotide
aaugcaucugaacugugcc

SEQ ID NO: 2866024 - RNA, 19 nt, Artificial Sequence
  Description of Artificial Sequence: Synthetic oligonucleotide
agaaauaccauauaaguca

SEQ ID NO: 2866025 - RNA, 19 nt, Artificial Sequence
  Description of Artificial Sequence: Synthetic oligonucleotide
aagaaaaccauaugcaaag

SEQ ID NO: 2866026 - RNA, 19 nt, Artificial Sequence
  Description of Artificial Sequence: Synthetic oligonucleotide
auuugcaucauuuguaugg

SEQ ID NO: 2866027 - RNA, 19 nt, Artificial Sequence
  Description of Artificial Sequence: Synthetic oligonucleotide
uuuaagaaaaccauaugca

SEQ ID NO: 2866028 - RNA, 19 nt, Artificial Sequence
  Description of Artificial Sequence: Synthetic oligonucleotide
auuuguaugguccaggcuc

SEQ ID NO: 2866029 - RNA, 19 nt, Artificial Sequence
  Description of Artificial Sequence: Synthetic oligonucleotide
aauauugacugcucggaac

SEQ ID NO: 2866030 - RNA, 19 nt, Artificial Sequence
  Description of Artificial Sequence: Synthetic oligonucleotide
uuuucuacacaauugaagu

SEQ ID NO: 2866031 - RNA, 19 nt, Artificial Sequence
  Description of Artificial Sequence: Synthetic oligonucleotide
ucagaaauaccauauaagu

SEQ ID NO: 2866032 - RNA, 19 nt, Artificial Sequence
  Description of Artificial Sequence: Synthetic oligonucleotide
ugaggcauuuucaagauug

SEQ ID NO: 2866033 - RNA, 19 nt, Artificial Sequence
  Description of Artificial Sequence: Synthetic oligonucleotide
ugaucuaucaaaugcaucu

SEQ ID NO: 2866034 - RNA, 19 nt, Artificial Sequence
  Description of Artificial Sequence: Synthetic oligonucleotide
aauccuacagguuacauuu

SEQ ID NO: 2866035 - RNA, 19 nt, Artificial Sequence
  Description of Artificial Sequence: Synthetic oligonucleotide
aagauugaugcucauaagu

SEQ ID NO: 2866036 - RNA, 19 nt, Artificial Sequence
  Description of Artificial Sequence: Synthetic oligonucleotide
aguuacaugaggcauuuuc

SEQ ID NO: 2866037 - RNA, 19 nt, Artificial Sequence
  Description of Artificial Sequence: Synthetic oligonucleotide
auauaagucagcuggugac

SEQ ID NO: 2866038 - RNA, 19 nt, Artificial Sequence
  Description of Artificial Sequence: Synthetic oligonucleotide
ucaagauugaugcucauaa

SEQ ID NO: 2866039 - RNA, 19 nt, Artificial Sequence
  Description of Artificial Sequence: Synthetic oligonucleotide
auggauaacgcuuccauuc

SEQ ID NO: 2866040 - RNA, 19 nt, Artificial Sequence
  Description of Artificial Sequence: Synthetic oligonucleotide
ugaaguuugaucuaucaaa

SEQ ID NO: 2866041 - RNA, 19 nt, Artificial Sequence
  Description of Artificial Sequence: Synthetic oligonucleotide
cuaaccuugaguuacauga

SEQ ID NO: 2866042 - RNA, 19 nt, Artificial Sequence
  Description of Artificial Sequence: Synthetic oligonucleotide
auuaugacuauuugcauca

SEQ ID NO: 2866043 - RNA, 19 nt, Artificial Sequence
  Description of Artificial Sequence: Synthetic oligonucleotide
aauaccauauaagucagcu

SEQ ID NO: 2866044 - RNA, 19 nt, Artificial Sequence
  Description of Artificial Sequence: Synthetic oligonucleotide
cagaauuuagaacuggugc

SEQ ID NO: 2866045 - RNA, 19 nt, Artificial Sequence
  Description of Artificial Sequence: Synthetic oligonucleotide
ugcaucauuuguauggucc

SEQ ID NO: 2866046 - RNA, 19 nt, Artificial Sequence
  Description of Artificial Sequence: Synthetic oligonucleotide
ugaacugugcccaacaaaa

SEQ ID NO: 2866047 - RNA, 19 nt, Artificial Sequence
  Description of Artificial Sequence: Synthetic oligonucleotide
ugucaauacuugaauauug

SEQ ID NO: 2866048 - RNA, 19 nt, Artificial Sequence
  Description of Artificial Sequence: Synthetic oligonucleotide
uugaauauugacugcucgg

SEQ ID NO: 2866049 - RNA, 19 nt, Artificial Sequence
  Description of Artificial Sequence: Synthetic oligonucleotide
auuuucaagauugaugcuc

SEQ ID NO: 2866050 - RNA, 19 nt, Artificial Sequence
  Description of Artificial Sequence: Synthetic oligonucleotide
uuacauuuaagaaaaccau

SEQ ID NO: 2866051 - RNA, 19 nt, Artificial Sequence
  Description of Artificial Sequence: Synthetic oligonucleotide
auuuaaauccuacagguua

SEQ ID NO: 2866052 - RNA, 19 nt, Artificial Sequence
  Description of Artificial Sequence: Synthetic oligonucleotide
gcauuuucaagauugaugc

SEQ ID NO: 2866053 - RNA, 19 nt, Artificial Sequence
  Description of Artificial Sequence: Synthetic oligonucleotide
acacaauugaaguuugauc

SEQ ID NO: 2866054 - RNA, 19 nt, Artificial Sequence
  Description of Artificial Sequence: Synthetic oligonucleotide
uuuggucuaaccuugaguu

SEQ ID NO: 2866055 - RNA, 19 nt, Artificial Sequence
  Description of Artificial Sequence: Synthetic oligonucleotide
uuuucaagauugaugcuca

SEQ ID NO: 2866056 - RNA, 19 nt, Artificial Sequence
  Description of Artificial Sequence: Synthetic oligonucleotide
aagucuuggauuaucagug

SEQ ID NO: 2866057 - RNA, 19 nt, Artificial Sequence
  Description of Artificial Sequence: Synthetic oligonucleotide
aaaugcaucugaacugugc

SEQ ID NO: 2866058 - RNA, 19 nt, Artificial Sequence
  Description of Artificial Sequence: Synthetic oligonucleotide
aauugcucacuuugcagag

SEQ ID NO: 2866059 - RNA, 19 nt, Artificial Sequence
  Description of Artificial Sequence: Synthetic oligonucleotide
uuuaaauccuacagguuac

SEQ ID NO: 2866060 - RNA, 19 nt, Artificial Sequence
  Description of Artificial Sequence: Synthetic oligonucleotide
ucuuggauuaucagugucc

SEQ ID NO: 2866061 - RNA, 19 nt, Artificial Sequence
  Description of Artificial Sequence: Synthetic oligonucleotide
aaccuugaguuacaugagg

SEQ ID NO: 2866062 - RNA, 19 nt, Artificial Sequence
  Description of Artificial Sequence: Synthetic oligonucleotide
guugacaucagaaauacca

SEQ ID NO: 2866063 - RNA, 19 nt, Artificial Sequence
  Description of Artificial Sequence: Synthetic oligonucleotide
ggcucauuuaucuaggccg

SEQ ID NO: 2866064 - RNA, 19 nt, Artificial Sequence
  Description of Artificial Sequence: Synthetic oligonucleotide
cuugaauauugacugcucg

SEQ ID NO: 2866065 - RNA, 19 nt, Artificial Sequence
  Description of Artificial Sequence: Synthetic oligonucleotide
uaagucuuggauuaucagu

SEQ ID NO: 2866066 - RNA, 19 nt, Artificial Sequence
  Description of Artificial Sequence: Synthetic oligonucleotide
guuacauuuaagaaaacca

SEQ ID NO: 2866067 - RNA, 19 nt, Artificial Sequence
  Description of Artificial Sequence: Synthetic oligonucleotide
aagucagcuggugacaugg

SEQ ID NO: 2866068 - RNA, 19 nt, Artificial Sequence
  Description of Artificial Sequence: Synthetic oligonucleotide
acagguuacauuuaagaaa

SEQ ID NO: 2866069 - RNA, 19 nt, Artificial Sequence
  Description of Artificial Sequence: Synthetic oligonucleotide
aaacagaauuuagaacugg

SEQ ID NO: 2866070 - RNA, 19 nt, Artificial Sequence
  Description of Artificial Sequence: Synthetic oligonucleotide
cacaggggcgauuagauag

SEQ ID NO: 2866071 - RNA, 19 nt, Artificial Sequence
  Description of Artificial Sequence: Synthetic oligonucleotide
aaccauaugcaaaggaauc

SEQ ID NO: 2866072 - RNA, 19 nt, Artificial Sequence
  Description of Artificial Sequence: Synthetic oligonucleotide
ucaauugcucacuuugcag

SEQ ID NO: 2866073 - RNA, 19 nt, Artificial Sequence
  Description of Artificial Sequence: Synthetic oligonucleotide
acaugaggcauuuucaaga

SEQ ID NO: 2866074 - RNA, 19 nt, Artificial Sequence
  Description of Artificial Sequence: Synthetic oligonucleotide
auguugacaucagaaauac

SEQ ID NO: 2866075 - RNA, 19 nt, Artificial Sequence
  Description of Artificial Sequence: Synthetic oligonucleotide
uaugcaaaggaaucacuca

SEQ ID NO: 2866076 - RNA, 19 nt, Artificial Sequence
  Description of Artificial Sequence: Synthetic oligonucleotide
auacuugaauauugacugc

SEQ ID NO: 2866077 - RNA, 19 nt, Artificial Sequence
  Description of Artificial Sequence: Synthetic oligonucleotide
ugacauauuggcagaagac

SEQ ID NO: 2866078 - RNA, 19 nt, Artificial Sequence
  Description of Artificial Sequence: Synthetic oligonucleotide
auguaguugucucaggucu

SEQ ID NO: 2866079 - RNA, 19 nt, Artificial Sequence
  Description of Artificial Sequence: Synthetic oligonucleotide
aaaaccauaugcaaaggaa

SEQ ID NO: 2866080 - RNA, 19 nt, Artificial Sequence
  Description of Artificial Sequence: Synthetic oligonucleotide
uccaggcucauuuaucuag

SEQ ID NO: 2866081 - RNA, 19 nt, Artificial Sequence
  Description of Artificial Sequence: Synthetic oligonucleotide
agauugaugcucauaaguc

SEQ ID NO: 2866082 - RNA, 19 nt, Artificial Sequence
  Description of Artificial Sequence: Synthetic oligonucleotide
agugucaauacuugaauau

SEQ ID NO: 2866083 - RNA, 19 nt, Artificial Sequence
  Description of Artificial Sequence: Synthetic oligonucleotide
ucuacacaauugaaguuug

SEQ ID NO: 2866084 - RNA, 19 nt, Artificial Sequence
  Description of Artificial Sequence: Synthetic oligonucleotide
guuuucuacacaauugaag

SEQ ID NO: 2866085 - RNA, 19 nt, Artificial Sequence
  Description of Artificial Sequence: Synthetic oligonucleotide
gauuagauagcauguugac

SEQ ID NO: 2866086 - RNA, 19 nt, Artificial Sequence
  Description of Artificial Sequence: Synthetic oligonucleotide
auuuagaacuggugccugc

SEQ ID NO: 2866087 - RNA, 19 nt, Artificial Sequence
  Description of Artificial Sequence: Synthetic oligonucleotide
auugaaguuugaucuauca

SEQ ID NO: 2866088 - RNA, 19 nt, Artificial Sequence
  Description of Artificial Sequence: Synthetic oligonucleotide
ugauguaguugucucaggu

SEQ ID NO: 2866089 - RNA, 19 nt, Artificial Sequence
  Description of Artificial Sequence: Synthetic oligonucleotide
uacagguuacauuuaagaa

SEQ ID NO: 2866090 - RNA, 19 nt, Artificial Sequence
  Description of Artificial Sequence: Synthetic oligonucleotide
aaguuugaucuaucaaaug

SEQ ID NO: 2866091 - RNA, 19 nt, Artificial Sequence
  Description of Artificial Sequence: Synthetic oligonucleotide
cagaaauaccauauaaguc

SEQ ID NO: 2866092 - RNA, 19 nt, Artificial Sequence
  Description of Artificial Sequence: Synthetic oligonucleotide
ucucuuuggucuaaccuug

SEQ ID NO: 2866093 - RNA, 19 nt, Artificial Sequence
  Description of Artificial Sequence: Synthetic oligonucleotide
cacaauugaaguuugaucu

SEQ ID NO: 2866094 - RNA, 19 nt, Artificial Sequence
  Description of Artificial Sequence: Synthetic oligonucleotide
auaugcaaaggaaucacuc

SEQ ID NO: 2866095 - RNA, 19 nt, Artificial Sequence
  Description of Artificial Sequence: Synthetic oligonucleotide
gaaauaccauauaagucag

SEQ ID NO: 2866096 - RNA, 19 nt, Artificial Sequence
  Description of Artificial Sequence: Synthetic oligonucleotide
aaaacagaauuuagaacug

SEQ ID NO: 2866097 - RNA, 19 nt, Artificial Sequence
  Description of Artificial Sequence: Synthetic oligonucleotide
ucaauacuugaauauugac

SEQ ID NO: 2866098 - RNA, 19 nt, Artificial Sequence
  Description of Artificial Sequence: Synthetic oligonucleotide
auuggcagaagacaucuga

SEQ ID NO: 2866099 - RNA, 19 nt, Artificial Sequence
  Description of Artificial Sequence: Synthetic oligonucleotide
auauugacugcucggaaca

SEQ ID NO: 2866100 - RNA, 19 nt, Artificial Sequence
  Description of Artificial Sequence: Synthetic oligonucleotide
uuugaucuaucaaaugcau

SEQ ID NO: 2866101 - RNA, 19 nt, Artificial Sequence
  Description of Artificial Sequence: Synthetic oligonucleotide
ucucaggucucuuuggucu

SEQ ID NO: 2866102 - RNA, 19 nt, Artificial Sequence
  Description of Artificial Sequence: Synthetic oligonucleotide
cucggaacaaaauuaugac

SEQ ID NO: 2866103 - RNA, 19 nt, Artificial Sequence
  Description of Artificial Sequence: Synthetic oligonucleotide
aggcucauuuaucuaggcc

SEQ ID NO: 2866104 - RNA, 19 nt, Artificial Sequence
  Description of Artificial Sequence: Synthetic oligonucleotide
agacaucugauguaguugu

SEQ ID NO: 2866105 - RNA, 19 nt, Artificial Sequence
  Description of Artificial Sequence: Synthetic oligonucleotide
uuugcagagugucaauacu

SEQ ID NO: 2866106 - RNA, 19 nt, Artificial Sequence
  Description of Artificial Sequence: Synthetic oligonucleotide
uacaugaggcauuuucaag

SEQ ID NO: 2866107 - RNA, 19 nt, Artificial Sequence
  Description of Artificial Sequence: Synthetic oligonucleotide
aucagaaauaccauauaag

SEQ ID NO: 2866108 - RNA, 19 nt, Artificial Sequence
  Description of Artificial Sequence: Synthetic oligonucleotide
gaaaaccauaugcaaagga

SEQ ID NO: 2866109 - RNA, 19 nt, Artificial Sequence
  Description of Artificial Sequence: Synthetic oligonucleotide
aagacaucugauguaguug

SEQ ID NO: 2866110 - RNA, 19 nt, Artificial Sequence
  Description of Artificial Sequence: Synthetic oligonucleotide
ucauuuguaugguccaggc

SEQ ID NO: 2866111 - RNA, 19 nt, Artificial Sequence
  Description of Artificial Sequence: Synthetic oligonucleotide
ucggaacaaaauuaugacu

SEQ ID NO: 2866112 - RNA, 19 nt, Artificial Sequence
  Description of Artificial Sequence: Synthetic oligonucleotide
ugcagagugucaauacuug

SEQ ID NO: 2866113 - RNA, 19 nt, Artificial Sequence
  Description of Artificial Sequence: Synthetic oligonucleotide
uuuaucuaggccguuuucu

SEQ ID NO: 2866114 - RNA, 19 nt, Artificial Sequence
  Description of Artificial Sequence: Synthetic oligonucleotide
uagcauguugacaucagaa

SEQ ID NO: 2866115 - RNA, 19 nt, Artificial Sequence
  Description of Artificial Sequence: Synthetic oligonucleotide
cacucaauugcucacuuug

SEQ ID NO: 2866116 - RNA, 19 nt, Artificial Sequence
  Description of Artificial Sequence: Synthetic oligonucleotide
aaauccuacagguuacauu

SEQ ID NO: 2866117 - RNA, 19 nt, Artificial Sequence
  Description of Artificial Sequence: Synthetic oligonucleotide
augcaucugaacugugccc

SEQ ID NO: 2866118 - RNA, 19 nt, Artificial Sequence
  Description of Artificial Sequence: Synthetic oligonucleotide
accuugaguuacaugaggc

SEQ ID NO: 2866119 - RNA, 19 nt, Artificial Sequence
  Description of Artificial Sequence: Synthetic oligonucleotide
uugaaguuugaucuaucaa

SEQ ID NO: 2866120 - RNA, 19 nt, Artificial Sequence
  Description of Artificial Sequence: Synthetic oligonucleotide
uuuguaugguccaggcuca

SEQ ID NO: 2866121 - RNA, 19 nt, Artificial Sequence
  Description of Artificial Sequence: Synthetic oligonucleotide
caaaggaaucacucaauug

SEQ ID NO: 2866122 - RNA, 19 nt, Artificial Sequence
  Description of Artificial Sequence: Synthetic oligonucleotide
uaaccuugaguuacaugag

SEQ ID NO: 2866123 - RNA, 19 nt, Artificial Sequence
  Description of Artificial Sequence: Synthetic oligonucleotide
cuaucaaaugcaucugaac

SEQ ID NO: 2866124 - RNA, 19 nt, Artificial Sequence
  Description of Artificial Sequence: Synthetic oligonucleotide
uugcucacuuugcagagug

SEQ ID NO: 2866125 - RNA, 19 nt, Artificial Sequence
  Description of Artificial Sequence: Synthetic oligonucleotide
cuacagguuacauuuaaga

SEQ ID NO: 2866126 - RNA, 19 nt, Artificial Sequence
  Description of Artificial Sequence: Synthetic oligonucleotide
cagguuacauuuaagaaaa

SEQ ID NO: 2866127 - RNA, 19 nt, Artificial Sequence
  Description of Artificial Sequence: Synthetic oligonucleotide
acauuuaagaaaaccauau

SEQ ID NO: 2866128 - RNA, 19 nt, Artificial Sequence
  Description of Artificial Sequence: Synthetic oligonucleotide
aaauaccauauaagucagc

SEQ ID NO: 2866129 - RNA, 19 nt, Artificial Sequence
  Description of Artificial Sequence: Synthetic oligonucleotide
gauaacgcuuccauucuag

SEQ ID NO: 2866130 - RNA, 19 nt, Artificial Sequence
  Description of Artificial Sequence: Synthetic oligonucleotide
aaaccauaugcaaaggaau

SEQ ID NO: 2866131 - RNA, 19 nt, Artificial Sequence
  Description of Artificial Sequence: Synthetic oligonucleotide
aauugaaguuugaucuauc

SEQ ID NO: 2866132 - RNA, 19 nt, Artificial Sequence
  Description of Artificial Sequence: Synthetic oligonucleotide
uuacaugaggcauuuucaa

SEQ ID NO: 2866133 - RNA, 19 nt, Artificial Sequence
  Description of Artificial Sequence: Synthetic oligonucleotide
ugacuauuugcaucauuug

SEQ ID NO: 2866134 - RNA, 19 nt, Artificial Sequence
  Description of Artificial Sequence: Synthetic oligonucleotide
cuuggauuaucaguguccc

SEQ ID NO: 2866135 - RNA, 19 nt, Artificial Sequence
  Description of Artificial Sequence: Synthetic oligonucleotide
caucacauucacaggggcg

SEQ ID NO: 2866136 - RNA, 19 nt, Artificial Sequence
  Description of Artificial Sequence: Synthetic oligonucleotide
auauuggcagaagacaucu

SEQ ID NO: 2866137 - RNA, 19 nt, Artificial Sequence
  Description of Artificial Sequence: Synthetic oligonucleotide
gacauauuggcagaagaca

SEQ ID NO: 2866138 - RNA, 19 nt, Artificial Sequence
  Description of Artificial Sequence: Synthetic oligonucleotide
auguuaucauugcugguug

SEQ ID NO: 2866139 - RNA, 19 nt, Artificial Sequence
  Description of Artificial Sequence: Synthetic oligonucleotide
uugacaucagaaauaccau

SEQ ID NO: 2866140 - RNA, 19 nt, Artificial Sequence
  Description of Artificial Sequence: Synthetic oligonucleotide
uucuacacaauugaaguuu

SEQ ID NO: 2866141 - RNA, 19 nt, Artificial Sequence
  Description of Artificial Sequence: Synthetic oligonucleotide
uacuugaauauugacugcu

SEQ ID NO: 2866142 - RNA, 19 nt, Artificial Sequence
  Description of Artificial Sequence: Synthetic oligonucleotide
aauuuagaacuggugccug

SEQ ID NO: 2866143 - RNA, 19 nt, Artificial Sequence
  Description of Artificial Sequence: Synthetic oligonucleotide
aacagaauuuagaacuggu

SEQ ID NO: 2866144 - RNA, 19 nt, Artificial Sequence
  Description of Artificial Sequence: Synthetic oligonucleotide
gguuacauuuaagaaaacc

SEQ ID NO: 2866145 - RNA, 19 nt, Artificial Sequence
  Description of Artificial Sequence: Synthetic oligonucleotide
uggucuaaccuugaguuac

SEQ ID NO: 2866146 - RNA, 19 nt, Artificial Sequence
  Description of Artificial Sequence: Synthetic oligonucleotide
agagugucaauacuugaau

SEQ ID NO: 2866147 - RNA, 19 nt, Artificial Sequence
  Description of Artificial Sequence: Synthetic oligonucleotide
ucuuuggucuaaccuugag

SEQ ID NO: 2866148 - RNA, 19 nt, Artificial Sequence
  Description of Artificial Sequence: Synthetic oligonucleotide
uucacaggggcgauuagau

SEQ ID NO: 2866149 - RNA, 19 nt, Artificial Sequence
  Description of Artificial Sequence: Synthetic oligonucleotide
uuaucauugcugguuguca

SEQ ID NO: 2866150 - RNA, 19 nt, Artificial Sequence
  Description of Artificial Sequence: Synthetic oligonucleotide
cagaagacaucugauguag

SEQ ID NO: 2866151 - RNA, 19 nt, Artificial Sequence
  Description of Artificial Sequence: Synthetic oligonucleotide
aucuaucaaaugcaucuga

SEQ ID NO: 2866152 - RNA, 19 nt, Artificial Sequence
  Description of Artificial Sequence: Synthetic oligonucleotide
guugucucaggucucuuug

SEQ ID NO: 2866153 - RNA, 19 nt, Artificial Sequence
  Description of Artificial Sequence: Synthetic oligonucleotide
gaaucacucaauugcucac

SEQ ID NO: 2866154 - RNA, 19 nt, Artificial Sequence
  Description of Artificial Sequence: Synthetic oligonucleotide
uugaucuaucaaaugcauc

SEQ ID NO: 2866155 - RNA, 19 nt, Artificial Sequence
  Description of Artificial Sequence: Synthetic oligonucleotide
ugcucauaagucuuggauu

SEQ ID NO: 2866156 - RNA, 19 nt, Artificial Sequence
  Description of Artificial Sequence: Synthetic oligonucleotide
uugacugcucggaacaaaa

SEQ ID NO: 2866157 - RNA, 19 nt, Artificial Sequence
  Description of Artificial Sequence: Synthetic oligonucleotide
ucuaaccuugaguuacaug

SEQ ID NO: 2866158 - RNA, 19 nt, Artificial Sequence
  Description of Artificial Sequence: Synthetic oligonucleotide
aaggaaucacucaauugcu

SEQ ID NO: 2866159 - RNA, 19 nt, Artificial Sequence
  Description of Artificial Sequence: Synthetic oligonucleotide
aucauuuguaugguccagg

SEQ ID NO: 2866160 - RNA, 19 nt, Artificial Sequence
  Description of Artificial Sequence: Synthetic oligonucleotide
ccugcugacauauuggcag

SEQ ID NO: 2866161 - RNA, 19 nt, Artificial Sequence
  Description of Artificial Sequence: Synthetic oligonucleotide
ugcaucugaacugugccca

SEQ ID NO: 2866162 - RNA, 19 nt, Artificial Sequence
  Description of Artificial Sequence: Synthetic oligonucleotide
augcucauaagucuuggau

SEQ ID NO: 2866163 - RNA, 19 nt, Artificial Sequence
  Description of Artificial Sequence: Synthetic oligonucleotide
uugaugcucauaagucuug

SEQ ID NO: 2866164 - RNA, 19 nt, Artificial Sequence
  Description of Artificial Sequence: Synthetic oligonucleotide
gauugaugcucauaagucu

SEQ ID NO: 2866165 - RNA, 19 nt, Artificial Sequence
  Description of Artificial Sequence: Synthetic oligonucleotide
ucauugcugguugucauca

SEQ ID NO: 2866166 - RNA, 19 nt, Artificial Sequence
  Description of Artificial Sequence: Synthetic oligonucleotide
uugucucaggucucuuugg

SEQ ID NO: 2866167 - RNA, 19 nt, Artificial Sequence
  Description of Artificial Sequence: Synthetic oligonucleotide
caauacuugaauauugacu

SEQ ID NO: 2866168 - RNA, 19 nt, Artificial Sequence
  Description of Artificial Sequence: Synthetic oligonucleotide
cauaagucuuggauuauca

SEQ ID NO: 2866169 - RNA, 19 nt, Artificial Sequence
  Description of Artificial Sequence: Synthetic oligonucleotide
augcaaaggaaucacucaa

SEQ ID NO: 2866170 - RNA, 19 nt, Artificial Sequence
  Description of Artificial Sequence: Synthetic oligonucleotide
ugaugcucauaagucuugg

SEQ ID NO: 2866171 - RNA, 19 nt, Artificial Sequence
  Description of Artificial Sequence: Synthetic oligonucleotide
cuggugacauggauaacgc

SEQ ID NO: 2866172 - RNA, 19 nt, Artificial Sequence
  Description of Artificial Sequence: Synthetic oligonucleotide
acucaauugcucacuuugc

SEQ ID NO: 2866173 - RNA, 19 nt, Artificial Sequence
  Description of Artificial Sequence: Synthetic oligonucleotide
uggauaacgcuuccauucu

SEQ ID NO: 2866174 - RNA, 19 nt, Artificial Sequence
  Description of Artificial Sequence: Synthetic oligonucleotide
uggcagaagacaucugaug

SEQ ID NO: 2866175 - RNA, 19 nt, Artificial Sequence
  Description of Artificial Sequence: Synthetic oligonucleotide
agaaaaccauaugcaaagg

SEQ ID NO: 2866176 - RNA, 19 nt, Artificial Sequence
  Description of Artificial Sequence: Synthetic oligonucleotide
auuagauagcauguugaca

SEQ ID NO: 2866177 - RNA, 19 nt, Artificial Sequence
  Description of Artificial Sequence: Synthetic oligonucleotide
aucauugcugguugucauc

SEQ ID NO: 2866178 - RNA, 19 nt, Artificial Sequence
  Description of Artificial Sequence: Synthetic oligonucleotide
auaccauauaagucagcug

SEQ ID NO: 2866179 - RNA, 19 nt, Artificial Sequence
  Description of Artificial Sequence: Synthetic oligonucleotide
agcauguugacaucagaaa

SEQ ID NO: 2866180 - RNA, 19 nt, Artificial Sequence
  Description of Artificial Sequence: Synthetic oligonucleotide
uauaagucagcuggugaca

SEQ ID NO: 2866181 - RNA, 19 nt, Artificial Sequence
  Description of Artificial Sequence: Synthetic oligonucleotide
acauggauaacgcuuccau

SEQ ID NO: 2866182 - RNA, 19 nt, Artificial Sequence
  Description of Artificial Sequence: Synthetic oligonucleotide
caucagaaauaccauauaa

SEQ ID NO: 2866183 - RNA, 19 nt, Artificial Sequence
  Description of Artificial Sequence: Synthetic oligonucleotide
caauugcucacuuugcaga

SEQ ID NO: 2866184 - RNA, 19 nt, Artificial Sequence
  Description of Artificial Sequence: Synthetic oligonucleotide
gacuauuugcaucauuugu

SEQ ID NO: 2866185 - RNA, 19 nt, Artificial Sequence
  Description of Artificial Sequence: Synthetic oligonucleotide
uaggccguuuucuacacaa

SEQ ID NO: 2866186 - RNA, 19 nt, Artificial Sequence
  Description of Artificial Sequence: Synthetic oligonucleotide
aaucacucaauugcucacu

SEQ ID NO: 2866187 - RNA, 19 nt, Artificial Sequence
  Description of Artificial Sequence: Synthetic oligonucleotide
gcuggugacauggauaacg

SEQ ID NO: 2866188 - RNA, 19 nt, Artificial Sequence
  Description of Artificial Sequence: Synthetic oligonucleotide
uuugcaucauuuguauggu

SEQ ID NO: 2866189 - RNA, 19 nt, Artificial Sequence
  Description of Artificial Sequence: Synthetic oligonucleotide
ugacaucagaaauaccaua

SEQ ID NO: 2866190 - RNA, 19 nt, Artificial Sequence
  Description of Artificial Sequence: Synthetic oligonucleotide
uccuacagguuacauuuaa

SEQ ID NO: 2866191 - RNA, 19 nt, Artificial Sequence
  Description of Artificial Sequence: Synthetic oligonucleotide
uugcagagugucaauacuu

SEQ ID NO: 2866192 - RNA, 19 nt, Artificial Sequence
  Description of Artificial Sequence: Synthetic oligonucleotide
caagauugaugcucauaag

SEQ ID NO: 2866193 - RNA, 19 nt, Artificial Sequence
  Description of Artificial Sequence: Synthetic oligonucleotide
uuucuacacaauugaaguu

SEQ ID NO: 2866194 - RNA, 19 nt, Artificial Sequence
  Description of Artificial Sequence: Synthetic oligonucleotide
acagaauuuagaacuggug

SEQ ID NO: 2866195 - RNA, 19 nt, Artificial Sequence
  Description of Artificial Sequence: Synthetic oligonucleotide
uacacaauugaaguuugau

SEQ ID NO: 2866196 - RNA, 19 nt, Artificial Sequence
  Description of Artificial Sequence: Synthetic oligonucleotide
gauagcauguugacaucag

SEQ ID NO: 2866197 - RNA, 19 nt, Artificial Sequence
  Description of Artificial Sequence: Synthetic oligonucleotide
ggggcgauuagauagcaug

SEQ ID NO: 2866198 - RNA, 19 nt, Artificial Sequence
  Description of Artificial Sequence: Synthetic oligonucleotide
auugcugguugucaucaca

SEQ ID NO: 2866199 - RNA, 19 nt, Artificial Sequence
  Description of Artificial Sequence: Synthetic oligonucleotide
ugcucggaacaaaauuaug

SEQ ID NO: 2866200 - RNA, 19 nt, Artificial Sequence
  Description of Artificial Sequence: Synthetic oligonucleotide
uaucuaggccguuuucuac

SEQ ID NO: 2866201 - RNA, 19 nt, Artificial Sequence
  Description of Artificial Sequence: Synthetic oligonucleotide
ugccugcugacauauuggc

SEQ ID NO: 2866202 - RNA, 19 nt, Artificial Sequence
  Description of Artificial Sequence: Synthetic oligonucleotide
augacuauuugcaucauuu

SEQ ID NO: 2866203 - RNA, 19 nt, Artificial Sequence
  Description of Artificial Sequence: Synthetic oligonucleotide
cauauuggcagaagacauc

SEQ ID NO: 2866204 - RNA, 19 nt, Artificial Sequence
  Description of Artificial Sequence: Synthetic oligonucleotide
aucuaggccguuuucuaca

SEQ ID NO: 2866205 - RNA, 19 nt, Artificial Sequence
  Description of Artificial Sequence: Synthetic oligonucleotide
gaucuaucaaaugcaucug

SEQ ID NO: 2866206 - RNA, 19 nt, Artificial Sequence
  Description of Artificial Sequence: Synthetic oligonucleotide
uuaucuaggccguuuucua

SEQ ID NO: 2866207 - RNA, 19 nt, Artificial Sequence
  Description of Artificial Sequence: Synthetic oligonucleotide
caucugauguaguugucuc

SEQ ID NO: 2866208 - RNA, 19 nt, Artificial Sequence
  Description of Artificial Sequence: Synthetic oligonucleotide
cauauaagucagcugguga

SEQ ID NO: 2866209 - RNA, 19 nt, Artificial Sequence
  Description of Artificial Sequence: Synthetic oligonucleotide
ugucucaggucucuuuggu

SEQ ID NO: 2866210 - RNA, 19 nt, Artificial Sequence
  Description of Artificial Sequence: Synthetic oligonucleotide
aucacauucacaggggcga

SEQ ID NO: 2866211 - RNA, 19 nt, Artificial Sequence
  Description of Artificial Sequence: Synthetic oligonucleotide
ggcauuuucaagauugaug

SEQ ID NO: 2866212 - RNA, 19 nt, Artificial Sequence
  Description of Artificial Sequence: Synthetic oligonucleotide
uguugacaucagaaauacc

SEQ ID NO: 2866213 - RNA, 19 nt, Artificial Sequence
  Description of Artificial Sequence: Synthetic oligonucleotide
guuacaugaggcauuuuca

SEQ ID NO: 2866214 - RNA, 19 nt, Artificial Sequence
  Description of Artificial Sequence: Synthetic oligonucleotide
uuagaacuggugccugcug

SEQ ID NO: 2866215 - RNA, 19 nt, Artificial Sequence
  Description of Artificial Sequence: Synthetic oligonucleotide
cccauguuaucauugcugg

SEQ ID NO: 2866216 - RNA, 19 nt, Artificial Sequence
  Description of Artificial Sequence: Synthetic oligonucleotide
ugcaaaggaaucacucaau

SEQ ID NO: 2866217 - RNA, 19 nt, Artificial Sequence
  Description of Artificial Sequence: Synthetic oligonucleotide
uugaguuacaugaggcauu

SEQ ID NO: 2866218 - RNA, 19 nt, Artificial Sequence
  Description of Artificial Sequence: Synthetic oligonucleotide
aauuuaaauccuacagguu

SEQ ID NO: 2866219 - RNA, 19 nt, Artificial Sequence
  Description of Artificial Sequence: Synthetic oligonucleotide
acuauuugcaucauuugua

SEQ ID NO: 2866220 - RNA, 19 nt, Artificial Sequence
  Description of Artificial Sequence: Synthetic oligonucleotide
uuggcagaagacaucugau

SEQ ID NO: 2866221 - RNA, 19 nt, Artificial Sequence
  Description of Artificial Sequence: Synthetic oligonucleotide
uaucauugcugguugucau

SEQ ID NO: 2866222 - RNA, 19 nt, Artificial Sequence
  Description of Artificial Sequence: Synthetic oligonucleotide
uuuagaacuggugccugcu

SEQ ID NO: 2866223 - RNA, 19 nt, Artificial Sequence
  Description of Artificial Sequence: Synthetic oligonucleotide
uugcugguugucaucacau

SEQ ID NO: 2866224 - RNA, 19 nt, Artificial Sequence
  Description of Artificial Sequence: Synthetic oligonucleotide
acauauuggcagaagacau

SEQ ID NO: 2866225 - RNA, 19 nt, Artificial Sequence
  Description of Artificial Sequence: Synthetic oligonucleotide
accauaugcaaaggaauca

SEQ ID NO: 2866226 - RNA, 19 nt, Artificial Sequence
  Description of Artificial Sequence: Synthetic oligonucleotide
cauguugacaucagaaaua

SEQ ID NO: 2866227 - RNA, 19 nt, Artificial Sequence
  Description of Artificial Sequence: Synthetic oligonucleotide
cugacauauuggcagaaga

SEQ ID NO: 2866228 - RNA, 19 nt, Artificial Sequence
  Description of Artificial Sequence: Synthetic oligonucleotide
uuaaauccuacagguuaca

SEQ ID NO: 2866229 - RNA, 19 nt, Artificial Sequence
  Description of Artificial Sequence: Synthetic oligonucleotide
agauagcauguugacauca

SEQ ID NO: 2866230 - RNA, 19 nt, Artificial Sequence
  Description of Artificial Sequence: Synthetic oligonucleotide
ucugaacugugcccaacaa

SEQ ID NO: 2866231 - RNA, 19 nt, Artificial Sequence
  Description of Artificial Sequence: Synthetic oligonucleotide
gucaucacauucacagggg

SEQ ID NO: 2866232 - RNA, 19 nt, Artificial Sequence
  Description of Artificial Sequence: Synthetic oligonucleotide
ugacauggauaacgcuucc

SEQ ID NO: 2866233 - RNA, 19 nt, Artificial Sequence
  Description of Artificial Sequence: Synthetic oligonucleotide
acuugaauauugacugcuc

SEQ ID NO: 2866234 - RNA, 19 nt, Artificial Sequence
  Description of Artificial Sequence: Synthetic oligonucleotide
uaugacuauuugcaucauu

SEQ ID NO: 2866235 - RNA, 19 nt, Artificial Sequence
  Description of Artificial Sequence: Synthetic oligonucleotide
gaauauugacugcucggaa

SEQ ID NO: 2866236 - RNA, 19 nt, Artificial Sequence
  Description of Artificial Sequence: Synthetic oligonucleotide
acaauugaaguuugaucua

SEQ ID NO: 2866237 - RNA, 19 nt, Artificial Sequence
  Description of Artificial Sequence: Synthetic oligonucleotide
aucugaacugugcccaaca

SEQ ID NO: 2866238 - RNA, 19 nt, Artificial Sequence
  Description of Artificial Sequence: Synthetic oligonucleotide
aucugauguaguugucuca

SEQ ID NO: 2866239 - RNA, 19 nt, Artificial Sequence
  Description of Artificial Sequence: Synthetic oligonucleotide
uguuaucauugcugguugu

SEQ ID NO: 2866240 - RNA, 19 nt, Artificial Sequence
  Description of Artificial Sequence: Synthetic oligonucleotide
ucauaagucuuggauuauc

SEQ ID NO: 2866241 - RNA, 19 nt, Artificial Sequence
  Description of Artificial Sequence: Synthetic oligonucleotide
acaucugauguaguugucu

SEQ ID NO: 2866242 - RNA, 19 nt, Artificial Sequence
  Description of Artificial Sequence: Synthetic oligonucleotide
ucuaggccguuuucuacac

SEQ ID NO: 2866243 - RNA, 19 nt, Artificial Sequence
  Description of Artificial Sequence: Synthetic oligonucleotide
gucaauacuugaauauuga

SEQ ID NO: 2866244 - RNA, 19 nt, Artificial Sequence
  Description of Artificial Sequence: Synthetic oligonucleotide
uauuggcagaagacaucug

SEQ ID NO: 2866245 - RNA, 19 nt, Artificial Sequence
  Description of Artificial Sequence: Synthetic oligonucleotide
acugcucggaacaaaauua

SEQ ID NO: 2866246 - RNA, 19 nt, Artificial Sequence
  Description of Artificial Sequence: Synthetic oligonucleotide
gaaguuugaucuaucaaau

SEQ ID NO: 2866247 - RNA, 19 nt, Artificial Sequence
  Description of Artificial Sequence: Synthetic oligonucleotide
acaggggcgauuagauagc

SEQ ID NO: 2866248 - RNA, 19 nt, Artificial Sequence
  Description of Artificial Sequence: Synthetic oligonucleotide
cugauguaguugucucagg

SEQ ID NO: 2866249 - RNA, 19 nt, Artificial Sequence
  Description of Artificial Sequence: Synthetic oligonucleotide
aggaaucacucaauugcuc

SEQ ID NO: 2866250 - RNA, 19 nt, Artificial Sequence
  Description of Artificial Sequence: Synthetic oligonucleotide
agucuuggauuaucagugu

SEQ ID NO: 2866251 - RNA, 19 nt, Artificial Sequence
  Description of Artificial Sequence: Synthetic oligonucleotide
gacaucagaaauaccauau

SEQ ID NO: 2866252 - RNA, 19 nt, Artificial Sequence
  Description of Artificial Sequence: Synthetic oligonucleotide
uuggauuaucagugucccc

SEQ ID NO: 2866253 - RNA, 19 nt, Artificial Sequence
  Description of Artificial Sequence: Synthetic oligonucleotide
acaucagaaauaccauaua

SEQ ID NO: 2866254 - RNA, 19 nt, Artificial Sequence
  Description of Artificial Sequence: Synthetic oligonucleotide
gaugcucauaagucuugga

SEQ ID NO: 2866255 - RNA, 19 nt, Artificial Sequence
  Description of Artificial Sequence: Synthetic oligonucleotide
ugaguuacaugaggcauuu

SEQ ID NO: 2866256 - RNA, 19 nt, Artificial Sequence
  Description of Artificial Sequence: Synthetic oligonucleotide
gcgauuagauagcauguug

SEQ ID NO: 2866257 - RNA, 19 nt, Artificial Sequence
  Description of Artificial Sequence: Synthetic oligonucleotide
cagagugucaauacuugaa

SEQ ID NO: 2866258 - RNA, 19 nt, Artificial Sequence
  Description of Artificial Sequence: Synthetic oligonucleotide
uaagucagcuggugacaug

SEQ ID NO: 2866259 - RNA, 19 nt, Artificial Sequence
  Description of Artificial Sequence: Synthetic oligonucleotide
gaagacaucugauguaguu

SEQ ID NO: 2866260 - RNA, 19 nt, Artificial Sequence
  Description of Artificial Sequence: Synthetic oligonucleotide
uaaauccuacagguuacau

SEQ ID NO: 2866261 - RNA, 19 nt, Artificial Sequence
  Description of Artificial Sequence: Synthetic oligonucleotide
auucacaggggcgauuaga

SEQ ID NO: 2866262 - RNA, 19 nt, Artificial Sequence
  Description of Artificial Sequence: Synthetic oligonucleotide
gugacauggauaacgcuuc

SEQ ID NO: 2866263 - RNA, 19 nt, Artificial Sequence
  Description of Artificial Sequence: Synthetic oligonucleotide
gucuuggauuaucaguguc

SEQ ID NO: 2866264 - RNA, 19 nt, Artificial Sequence
  Description of Artificial Sequence: Synthetic oligonucleotide
guuaucauugcugguuguc

SEQ ID NO: 2866265 - RNA, 19 nt, Artificial Sequence
  Description of Artificial Sequence: Synthetic oligonucleotide
uucaagauugaugcucaua

SEQ ID NO: 2866266 - RNA, 19 nt, Artificial Sequence
  Description of Artificial Sequence: Synthetic oligonucleotide
gcucggaacaaaauuauga

SEQ ID NO: 2866267 - RNA, 19 nt, Artificial Sequence
  Description of Artificial Sequence: Synthetic oligonucleotide
caggcucauuuaucuaggc

SEQ ID NO: 2866268 - RNA, 19 nt, Artificial Sequence
  Description of Artificial Sequence: Synthetic oligonucleotide
ugguccaggcucauuuauc

SEQ ID NO: 2866269 - RNA, 19 nt, Artificial Sequence
  Description of Artificial Sequence: Synthetic oligonucleotide
uagauagcauguugacauc

SEQ ID NO: 2866270 - RNA, 19 nt, Artificial Sequence
  Description of Artificial Sequence: Synthetic oligonucleotide
ucauuuaucuaggccguuu

SEQ ID NO: 2866271 - RNA, 19 nt, Artificial Sequence
  Description of Artificial Sequence: Synthetic oligonucleotide
caucauuuguaugguccag

SEQ ID NO: 2866272 - RNA, 19 nt, Artificial Sequence
  Description of Artificial Sequence: Synthetic oligonucleotide
uggugacauggauaacgcu

SEQ ID NO: 2866273 - RNA, 19 nt, Artificial Sequence
  Description of Artificial Sequence: Synthetic oligonucleotide
ugacugcucggaacaaaau

SEQ ID NO: 2866274 - RNA, 19 nt, Artificial Sequence
  Description of Artificial Sequence: Synthetic oligonucleotide
auaagucagcuggugacau

SEQ ID NO: 2866275 - RNA, 19 nt, Artificial Sequence
  Description of Artificial Sequence: Synthetic oligonucleotide
aucacucaauugcucacuu

SEQ ID NO: 2866276 - RNA, 19 nt, Artificial Sequence
  Description of Artificial Sequence: Synthetic oligonucleotide
cagcuggugacauggauaa

SEQ ID NO: 2866277 - RNA, 19 nt, Artificial Sequence
  Description of Artificial Sequence: Synthetic oligonucleotide
gcucauaagucuuggauua

SEQ ID NO: 2866278 - RNA, 19 nt, Artificial Sequence
  Description of Artificial Sequence: Synthetic oligonucleotide
uuggucuaaccuugaguua

SEQ ID NO: 2866279 - RNA, 19 nt, Artificial Sequence
  Description of Artificial Sequence: Synthetic oligonucleotide
cucacuuugcagaguguca

SEQ ID NO: 2866280 - RNA, 19 nt, Artificial Sequence
  Description of Artificial Sequence: Synthetic oligonucleotide
ggcagaagacaucugaugu

SEQ ID NO: 2866281 - RNA, 19 nt, Artificial Sequence
  Description of Artificial Sequence: Synthetic oligonucleotide
aguugucucaggucucuuu

SEQ ID NO: 2866282 - RNA, 19 nt, Artificial Sequence
  Description of Artificial Sequence: Synthetic oligonucleotide
uaugguccaggcucauuua

SEQ ID NO: 2866283 - RNA, 19 nt, Artificial Sequence
  Description of Artificial Sequence: Synthetic oligonucleotide
augguccaggcucauuuau

SEQ ID NO: 2866284 - RNA, 19 nt, Artificial Sequence
  Description of Artificial Sequence: Synthetic oligonucleotide
uugcaucauuuguaugguc

SEQ ID NO: 2866285 - RNA, 19 nt, Artificial Sequence
  Description of Artificial Sequence: Synthetic oligonucleotide
cggaacaaaauuaugacua

SEQ ID NO: 2866286 - RNA, 19 nt, Artificial Sequence
  Description of Artificial Sequence: Synthetic oligonucleotide
acuuugcagagugucaaua

SEQ ID NO: 2866287 - RNA, 19 nt, Artificial Sequence
  Description of Artificial Sequence: Synthetic oligonucleotide
ccaggcucauuuaucuagg

SEQ ID NO: 2866288 - RNA, 19 nt, Artificial Sequence
  Description of Artificial Sequence: Synthetic oligonucleotide
uuucaagauugaugcucau

SEQ ID NO: 2866289 - RNA, 19 nt, Artificial Sequence
  Description of Artificial Sequence: Synthetic oligonucleotide
ccuacagguuacauuuaag

SEQ ID NO: 2866290 - RNA, 19 nt, Artificial Sequence
  Description of Artificial Sequence: Synthetic oligonucleotide
gccguuuucuacacaauug

SEQ ID NO: 2866291 - RNA, 19 nt, Artificial Sequence
  Description of Artificial Sequence: Synthetic oligonucleotide
acauucacaggggcgauua

SEQ ID NO: 2866292 - RNA, 19 nt, Artificial Sequence
  Description of Artificial Sequence: Synthetic oligonucleotide
cuuuggucuaaccuugagu

SEQ ID NO: 2866293 - RNA, 19 nt, Artificial Sequence
  Description of Artificial Sequence: Synthetic oligonucleotide
ccccauguuaucauugcug

SEQ ID NO: 2866294 - RNA, 19 nt, Artificial Sequence
  Description of Artificial Sequence: Synthetic oligonucleotide
gacugcucggaacaaaauu

SEQ ID NO: 2866295 - RNA, 19 nt, Artificial Sequence
  Description of Artificial Sequence: Synthetic oligonucleotide
gucucuuuggucuaaccuu

SEQ ID NO: 2866296 - RNA, 19 nt, Artificial Sequence
  Description of Artificial Sequence: Synthetic oligonucleotide
agguuacauuuaagaaaac

SEQ ID NO: 2866297 - RNA, 19 nt, Artificial Sequence
  Description of Artificial Sequence: Synthetic oligonucleotide
guaugguccaggcucauuu

SEQ ID NO: 2866298 - RNA, 19 nt, Artificial Sequence
  Description of Artificial Sequence: Synthetic oligonucleotide
uauugacugcucggaacaa

SEQ ID NO: 2866299 - RNA, 19 nt, Artificial Sequence
  Description of Artificial Sequence: Synthetic oligonucleotide
gacauggauaacgcuucca

SEQ ID NO: 2866300 - RNA, 19 nt, Artificial Sequence
  Description of Artificial Sequence: Synthetic oligonucleotide
accauauaagucagcuggu

SEQ ID NO: 2866301 - RNA, 19 nt, Artificial Sequence
  Description of Artificial Sequence: Synthetic oligonucleotide
gucucaggucucuuugguc

SEQ ID NO: 2866302 - RNA, 19 nt, Artificial Sequence
  Description of Artificial Sequence: Synthetic oligonucleotide
ugcucacuuugcagagugu

SEQ ID NO: 2866303 - RNA, 19 nt, Artificial Sequence
  Description of Artificial Sequence: Synthetic oligonucleotide
ucacucaauugcucacuuu

SEQ ID NO: 2866304 - RNA, 19 nt, Artificial Sequence
  Description of Artificial Sequence: Synthetic oligonucleotide
cugaacugugcccaacaaa

SEQ ID NO: 2866305 - RNA, 19 nt, Artificial Sequence
  Description of Artificial Sequence: Synthetic oligonucleotide
gaggcauuuucaagauuga

SEQ ID NO: 2866306 - RNA, 19 nt, Artificial Sequence
  Description of Artificial Sequence: Synthetic oligonucleotide
ccauaugcaaaggaaucac

SEQ ID NO: 2866307 - RNA, 19 nt, Artificial Sequence
  Description of Artificial Sequence: Synthetic oligonucleotide
ucacaggggcgauuagaua

SEQ ID NO: 2866308 - RNA, 19 nt, Artificial Sequence
  Description of Artificial Sequence: Synthetic oligonucleotide
cuacacaauugaaguuuga

SEQ ID NO: 2866309 - RNA, 19 nt, Artificial Sequence
  Description of Artificial Sequence: Synthetic oligonucleotide
auugacugcucggaacaaa

SEQ ID NO: 2866310 - RNA, 19 nt, Artificial Sequence
  Description of Artificial Sequence: Synthetic oligonucleotide
cuugaguuacaugaggcau

SEQ ID NO: 2866311 - RNA, 19 nt, Artificial Sequence
  Description of Artificial Sequence: Synthetic oligonucleotide
gcauguugacaucagaaau

SEQ ID NO: 2866312 - RNA, 19 nt, Artificial Sequence
  Description of Artificial Sequence: Synthetic oligonucleotide
cauugcugguugucaucac

SEQ ID NO: 2866313 - RNA, 19 nt, Artificial Sequence
  Description of Artificial Sequence: Synthetic oligonucleotide
cauucacaggggcgauuag

SEQ ID NO: 2866314 - RNA, 19 nt, Artificial Sequence
  Description of Artificial Sequence: Synthetic oligonucleotide
cauguuaucauugcugguu

SEQ ID NO: 2866315 - RNA, 19 nt, Artificial Sequence
  Description of Artificial Sequence: Synthetic oligonucleotide
cgauuagauagcauguuga

SEQ ID NO: 2866316 - RNA, 19 nt, Artificial Sequence
  Description of Artificial Sequence: Synthetic oligonucleotide
aggcauuuucaagauugau

SEQ ID NO: 2866317 - RNA, 19 nt, Artificial Sequence
  Description of Artificial Sequence: Synthetic oligonucleotide
ggucucuuuggucuaaccu

SEQ ID NO: 2866318 - RNA, 19 nt, Artificial Sequence
  Description of Artificial Sequence: Synthetic oligonucleotide
augaggcauuuucaagauu

SEQ ID NO: 2866319 - RNA, 19 nt, Artificial Sequence
  Description of Artificial Sequence: Synthetic oligonucleotide
ccguuuucuacacaauuga

SEQ ID NO: 2866320 - RNA, 19 nt, Artificial Sequence
  Description of Artificial Sequence: Synthetic oligonucleotide
agaagacaucugauguagu

SEQ ID NO: 2866321 - RNA, 19 nt, Artificial Sequence
  Description of Artificial Sequence: Synthetic oligonucleotide
uuaugacuauuugcaucau

SEQ ID NO: 2866322 - RNA, 19 nt, Artificial Sequence
  Description of Artificial Sequence: Synthetic oligonucleotide
gguccaggcucauuuaucu

SEQ ID NO: 2866323 - RNA, 19 nt, Artificial Sequence
  Description of Artificial Sequence: Synthetic oligonucleotide
ugcugguugucaucacauu

SEQ ID NO: 2866324 - RNA, 19 nt, Artificial Sequence
  Description of Artificial Sequence: Synthetic oligonucleotide
gcagagugucaauacuuga

SEQ ID NO: 2866325 - RNA, 19 nt, Artificial Sequence
  Description of Artificial Sequence: Synthetic oligonucleotide
caugaggcauuuucaagau

SEQ ID NO: 2866326 - RNA, 19 nt, Artificial Sequence
  Description of Artificial Sequence: Synthetic oligonucleotide
gacaucugauguaguuguc

SEQ ID NO: 2866327 - RNA, 19 nt, Artificial Sequence
  Description of Artificial Sequence: Synthetic oligonucleotide
cugcugacauauuggcaga

SEQ ID NO: 2866328 - RNA, 19 nt, Artificial Sequence
  Description of Artificial Sequence: Synthetic oligonucleotide
cauuuucaagauugaugcu

SEQ ID NO: 2866329 - RNA, 19 nt, Artificial Sequence
  Description of Artificial Sequence: Synthetic oligonucleotide
ccuugaguuacaugaggca

SEQ ID NO: 2866330 - RNA, 19 nt, Artificial Sequence
  Description of Artificial Sequence: Synthetic oligonucleotide
caucugaacugugcccaac

SEQ ID NO: 2866331 - RNA, 19 nt, Artificial Sequence
  Description of Artificial Sequence: Synthetic oligonucleotide
gcucacuuugcagaguguc

SEQ ID NO: 2866332 - RNA, 19 nt, Artificial Sequence
  Description of Artificial Sequence: Synthetic oligonucleotide
ucaggucucuuuggucuaa

SEQ ID NO: 2866333 - RNA, 19 nt, Artificial Sequence
  Description of Artificial Sequence: Synthetic oligonucleotide
ccauauaagucagcuggug

SEQ ID NO: 2866334 - RNA, 19 nt, Artificial Sequence
  Description of Artificial Sequence: Synthetic oligonucleotide
caauugaaguuugaucuau

SEQ ID NO: 2866335 - RNA, 19 nt, Artificial Sequence
  Description of Artificial Sequence: Synthetic oligonucleotide
agcuggugacauggauaac

SEQ ID NO: 2866336 - RNA, 19 nt, Artificial Sequence
  Description of Artificial Sequence: Synthetic oligonucleotide
gcagaagacaucugaugua

SEQ ID NO: 2866337 - RNA, 19 nt, Artificial Sequence
  Description of Artificial Sequence: Synthetic oligonucleotide
ucacauucacaggggcgau

SEQ ID NO: 2866338 - RNA, 19 nt, Artificial Sequence
  Description of Artificial Sequence: Synthetic oligonucleotide
cauuuguaugguccaggcu

SEQ ID NO: 2866339 - RNA, 19 nt, Artificial Sequence
  Description of Artificial Sequence: Synthetic oligonucleotide
uguaugguccaggcucauu

SEQ ID NO: 2866340 - RNA, 19 nt, Artificial Sequence
  Description of Artificial Sequence: Synthetic oligonucleotide
cauuuaucuaggccguuuu

SEQ ID NO: 2866341 - RNA, 19 nt, Artificial Sequence
  Description of Artificial Sequence: Synthetic oligonucleotide
cugcucggaacaaaauuau

SEQ ID NO: 2866342 - RNA, 19 nt, Artificial Sequence
  Description of Artificial Sequence: Synthetic oligonucleotide
gugucaauacuugaauauu

SEQ ID NO: 2866343 - RNA, 19 nt, Artificial Sequence
  Description of Artificial Sequence: Synthetic oligonucleotide
gcaaaggaaucacucaauu

SEQ ID NO: 2866344 - RNA, 19 nt, Artificial Sequence
  Description of Artificial Sequence: Synthetic oligonucleotide
cauggauaacgcuuccauu

SEQ ID NO: 2866345 - RNA, 19 nt, Artificial Sequence
  Description of Artificial Sequence: Synthetic oligonucleotide
guaguugucucaggucucu

SEQ ID NO: 2866346 - RNA, 19 nt, Artificial Sequence
  Description of Artificial Sequence: Synthetic oligonucleotide
gucagcuggugacauggau

SEQ ID NO: 2866347 - RNA, 19 nt, Artificial Sequence
  Description of Artificial Sequence: Synthetic oligonucleotide
caggucucuuuggucuaac

SEQ ID NO: 2866348 - RNA, 19 nt, Artificial Sequence
  Description of Artificial Sequence: Synthetic oligonucleotide
cucaggucucuuuggucua

SEQ ID NO: 2866349 - RNA, 19 nt, Artificial Sequence
  Description of Artificial Sequence: Synthetic oligonucleotide
cuaggccguuuucuacaca

SEQ ID NO: 2866350 - RNA, 19 nt, Artificial Sequence
  Description of Artificial Sequence: Synthetic oligonucleotide
ggauaacgcuuccauucua

SEQ ID NO: 2866351 - RNA, 19 nt, Artificial Sequence
  Description of Artificial Sequence: Synthetic oligonucleotide
guccaggcucauuuaucua

SEQ ID NO: 2866352 - RNA, 19 nt, Artificial Sequence
  Description of Artificial Sequence: Synthetic oligonucleotide
uuguaugguccaggcucau

SEQ ID NO: 2866353 - RNA, 19 nt, Artificial Sequence
  Description of Artificial Sequence: Synthetic oligonucleotide
uaguugucucaggucucuu

SEQ ID NO: 2866354 - RNA, 19 nt, Artificial Sequence
  Description of Artificial Sequence: Synthetic oligonucleotide
cguuuucuacacaauugaa

SEQ ID NO: 2866355 - RNA, 19 nt, Artificial Sequence
  Description of Artificial Sequence: Synthetic oligonucleotide
agucagcuggugacaugga

SEQ ID NO: 2866356 - RNA, 19 nt, Artificial Sequence
  Description of Artificial Sequence: Synthetic oligonucleotide
ggucuaaccuugaguuaca

SEQ ID NO: 2866357 - RNA, 19 nt, Artificial Sequence
  Description of Artificial Sequence: Synthetic oligonucleotide
ggccguuuucuacacaauu

SEQ ID NO: 2866358 - RNA, 19 nt, Artificial Sequence
  Description of Artificial Sequence: Synthetic oligonucleotide
caggggcgauuagauagca

SEQ ID NO: 2866359 - RNA, 19 nt, Artificial Sequence
  Description of Artificial Sequence: Synthetic oligonucleotide
gcucauuuaucuaggccgu

SEQ ID NO: 2866360 - RNA, 19 nt, Artificial Sequence
  Description of Artificial Sequence: Synthetic oligonucleotide
gggcgauuagauagcaugu

SEQ ID NO: 2866361 - RNA, 19 nt, Artificial Sequence
  Description of Artificial Sequence: Synthetic oligonucleotide
auccuacagguuacauuua

SEQ ID NO: 2866362 - RNA, 19 nt, Artificial Sequence
  Description of Artificial Sequence: Synthetic oligonucleotide
aggccguuuucuacacaau

SEQ ID NO: 2866363 - RNA, 19 nt, Artificial Sequence
  Description of Artificial Sequence: Synthetic oligonucleotide
aggggcgauuagauagcau

SEQ ID NO: 2866364 - RNA, 19 nt, Artificial Sequence
  Description of Artificial Sequence: Synthetic oligonucleotide
gccugcugacauauuggca

SEQ ID NO: 2866365 - RNA, 19 nt, Artificial Sequence
  Description of Artificial Sequence: Synthetic oligonucleotide
cacuuugcagagugucaau

SEQ ID NO: 2866366 - RNA, 19 nt, Artificial Sequence
  Description of Artificial Sequence: Synthetic oligonucleotide
gucuaaccuugaguuacau

SEQ ID NO: 2866367 - RNA, 19 nt, Artificial Sequence
  Description of Artificial Sequence: Synthetic oligonucleotide
cuggugccugcugacauau

SEQ ID NO: 2866368 - RNA, 19 nt, Artificial Sequence
  Description of Artificial Sequence: Synthetic oligonucleotide
gcaucugaacugugcccaa

SEQ ID NO: 2866369 - RNA, 19 nt, Artificial Sequence
  Description of Artificial Sequence: Synthetic oligonucleotide
cucauaagucuuggauuau

SEQ ID NO: 2866370 - RNA, 19 nt, Artificial Sequence
  Description of Artificial Sequence: Synthetic oligonucleotide
ggcgauuagauagcauguu

SEQ ID NO: 2866371 - RNA, 19 nt, Artificial Sequence
  Description of Artificial Sequence: Synthetic oligonucleotide
ccauguuaucauugcuggu

SEQ ID NO: 2866372 - RNA, 19 nt, Artificial Sequence
  Description of Artificial Sequence: Synthetic oligonucleotide
cucauuuaucuaggccguu

SEQ ID NO: 2866373 - RNA, 19 nt, Artificial Sequence
  Description of Artificial Sequence: Synthetic oligonucleotide
gaguuacaugaggcauuuu

SEQ ID NO: 2866374 - RNA, 19 nt, Artificial Sequence
  Description of Artificial Sequence: Synthetic oligonucleotide
cacauucacaggggcgauu

SEQ ID NO: 2866375 - RNA, 19 nt, Artificial Sequence
  Description of Artificial Sequence: Synthetic oligonucleotide
aaauauauuaaucuguccu

SEQ ID NO: 2866376 - RNA, 19 nt, Artificial Sequence
  Description of Artificial Sequence: Synthetic oligonucleotide
aaauaggaaaagcuuaucg

SEQ ID NO: 2866377 - RNA, 19 nt, Artificial Sequence
  Description of Artificial Sequence: Synthetic oligonucleotide
agauauaccccuuauuucc

SEQ ID NO: 2866378 - RNA, 19 nt, Artificial Sequence
  Description of Artificial Sequence: Synthetic oligonucleotide
aaucuguccuuauacaccc

SEQ ID NO: 2866379 - RNA, 19 nt, Artificial Sequence
  Description of Artificial Sequence: Synthetic oligonucleotide
cuuugugucaaacacaugg

SEQ ID NO: 2866380 - RNA, 19 nt, Artificial Sequence
  Description of Artificial Sequence: Synthetic oligonucleotide
aaagauauaccccuuauuu

SEQ ID NO: 2866381 - RNA, 19 nt, Artificial Sequence
  Description of Artificial Sequence: Synthetic oligonucleotide
aauaggaaaagcuuaucgu

SEQ ID NO: 2866382 - RNA, 19 nt, Artificial Sequence
  Description of Artificial Sequence: Synthetic oligonucleotide
uccuuauacacccagcagg

SEQ ID NO: 2866383 - RNA, 19 nt, Artificial Sequence
  Description of Artificial Sequence: Synthetic oligonucleotide
aacagaaauccuuccagac

SEQ ID NO: 2866384 - RNA, 19 nt, Artificial Sequence
  Description of Artificial Sequence: Synthetic oligonucleotide
aucaaaacagucuugaagu

SEQ ID NO: 2866385 - RNA, 19 nt, Artificial Sequence
  Description of Artificial Sequence: Synthetic oligonucleotide
uuaacagaaauccuuccag

SEQ ID NO: 2866386 - RNA, 19 nt, Artificial Sequence
  Description of Artificial Sequence: Synthetic oligonucleotide
aagauauaccccuuauuuc

SEQ ID NO: 2866387 - RNA, 19 nt, Artificial Sequence
  Description of Artificial Sequence: Synthetic oligonucleotide
gguaucuaaguuuagauag

SEQ ID NO: 2866388 - RNA, 19 nt, Artificial Sequence
  Description of Artificial Sequence: Synthetic oligonucleotide
auaggaaaagcuuaucguc

SEQ ID NO: 2866389 - RNA, 19 nt, Artificial Sequence
  Description of Artificial Sequence: Synthetic oligonucleotide
aauccuuccagaccaaguc

SEQ ID NO: 2866390 - RNA, 19 nt, Artificial Sequence
  Description of Artificial Sequence: Synthetic oligonucleotide
ucuccauuaacagaaaucc

SEQ ID NO: 2866391 - RNA, 19 nt, Artificial Sequence
  Description of Artificial Sequence: Synthetic oligonucleotide
aaguccuugucuuuguguc

SEQ ID NO: 2866392 - RNA, 19 nt, Artificial Sequence
  Description of Artificial Sequence: Synthetic oligonucleotide
uaguguaagucauucaucc

SEQ ID NO: 2866393 - RNA, 19 nt, Artificial Sequence
  Description of Artificial Sequence: Synthetic oligonucleotide
aagcuuaucgucuagcuau

SEQ ID NO: 2866394 - RNA, 19 nt, Artificial Sequence
  Description of Artificial Sequence: Synthetic oligonucleotide
cuuuaauucugguugagac

SEQ ID NO: 2866395 - RNA, 19 nt, Artificial Sequence
  Description of Artificial Sequence: Synthetic oligonucleotide
aaacacauggacaucauug

SEQ ID NO: 2866396 - RNA, 19 nt, Artificial Sequence
  Description of Artificial Sequence: Synthetic oligonucleotide
uuaauucugguugagacca

SEQ ID NO: 2866397 - RNA, 19 nt, Artificial Sequence
  Description of Artificial Sequence: Synthetic oligonucleotide
acauggacaucauugugcc

SEQ ID NO: 2866398 - RNA, 19 nt, Artificial Sequence
  Description of Artificial Sequence: Synthetic oligonucleotide
ucagcgugugccaugaccg

SEQ ID NO: 2866399 - RNA, 19 nt, Artificial Sequence
  Description of Artificial Sequence: Synthetic oligonucleotide
ucugcucuucccaagaugc

SEQ ID NO: 2866400 - RNA, 19 nt, Artificial Sequence
  Description of Artificial Sequence: Synthetic oligonucleotide
uaaguuuagauaguguaag

SEQ ID NO: 2866401 - RNA, 19 nt, Artificial Sequence
  Description of Artificial Sequence: Synthetic oligonucleotide
cuagcuauugcugucagcg

SEQ ID NO: 2866402 - RNA, 19 nt, Artificial Sequence
  Description of Artificial Sequence: Synthetic oligonucleotide
ucuaaguuuagauagugua

SEQ ID NO: 2866403 - RNA, 19 nt, Artificial Sequence
  Description of Artificial Sequence: Synthetic oligonucleotide
aauauauuaaucuguccuu

SEQ ID NO: 2866404 - RNA, 19 nt, Artificial Sequence
  Description of Artificial Sequence: Synthetic oligonucleotide
uguaagucauucauccuag

SEQ ID NO: 2866405 - RNA, 19 nt, Artificial Sequence
  Description of Artificial Sequence: Synthetic oligonucleotide
ucugguugagaccaagucc

SEQ ID NO: 2866406 - RNA, 19 nt, Artificial Sequence
  Description of Artificial Sequence: Synthetic oligonucleotide
uuaaucuguccuuauacac

SEQ ID NO: 2866407 - RNA, 19 nt, Artificial Sequence
  Description of Artificial Sequence: Synthetic oligonucleotide
uccuaguuugcaaaacgcg

SEQ ID NO: 2866408 - RNA, 19 nt, Artificial Sequence
  Description of Artificial Sequence: Synthetic oligonucleotide
uucccaagaugcaucaugg

SEQ ID NO: 2866409 - RNA, 19 nt, Artificial Sequence
  Description of Artificial Sequence: Synthetic oligonucleotide
caaaauauauuaaucuguc

SEQ ID NO: 2866410 - RNA, 19 nt, Artificial Sequence
  Description of Artificial Sequence: Synthetic oligonucleotide
uuuaauucugguugagacc

SEQ ID NO: 2866411 - RNA, 19 nt, Artificial Sequence
  Description of Artificial Sequence: Synthetic oligonucleotide
uaaucuguccuuauacacc

SEQ ID NO: 2866412 - RNA, 19 nt, Artificial Sequence
  Description of Artificial Sequence: Synthetic oligonucleotide
aaaagcuuaucgucuagcu

SEQ ID NO: 2866413 - RNA, 19 nt, Artificial Sequence
  Description of Artificial Sequence: Synthetic oligonucleotide
agucauucauccuaguuug

SEQ ID NO: 2866414 - RNA, 19 nt, Artificial Sequence
  Description of Artificial Sequence: Synthetic oligonucleotide
ugcaucauggacaucaaaa

SEQ ID NO: 2866415 - RNA, 19 nt, Artificial Sequence
  Description of Artificial Sequence: Synthetic oligonucleotide
ugugucaaacacauggaca

SEQ ID NO: 2866416 - RNA, 19 nt, Artificial Sequence
  Description of Artificial Sequence: Synthetic oligonucleotide
acagucuugaaguucacug

SEQ ID NO: 2866417 - RNA, 19 nt, Artificial Sequence
  Description of Artificial Sequence: Synthetic oligonucleotide
uuuagauaguguaagucau

SEQ ID NO: 2866418 - RNA, 19 nt, Artificial Sequence
  Description of Artificial Sequence: Synthetic oligonucleotide
uucccaguauauaaguucc

SEQ ID NO: 2866419 - RNA, 19 nt, Artificial Sequence
  Description of Artificial Sequence: Synthetic oligonucleotide
aagucauucauccuaguuu

SEQ ID NO: 2866420 - RNA, 19 nt, Artificial Sequence
  Description of Artificial Sequence: Synthetic oligonucleotide
gauguuuggggcuuucucc

SEQ ID NO: 2866421 - RNA, 19 nt, Artificial Sequence
  Description of Artificial Sequence: Synthetic oligonucleotide
aaaacagucuugaaguuca

SEQ ID NO: 2866422 - RNA, 19 nt, Artificial Sequence
  Description of Artificial Sequence: Synthetic oligonucleotide
aauaucugcucuucccaag

SEQ ID NO: 2866423 - RNA, 19 nt, Artificial Sequence
  Description of Artificial Sequence: Synthetic oligonucleotide
uuauacacccagcaggaga

SEQ ID NO: 2866424 - RNA, 19 nt, Artificial Sequence
  Description of Artificial Sequence: Synthetic oligonucleotide
aguuuagauaguguaaguc

SEQ ID NO: 2866425 - RNA, 19 nt, Artificial Sequence
  Description of Artificial Sequence: Synthetic oligonucleotide
auggacaucauugugccac

SEQ ID NO: 2866426 - RNA, 19 nt, Artificial Sequence
  Description of Artificial Sequence: Synthetic oligonucleotide
guuuagauaguguaaguca

SEQ ID NO: 2866427 - RNA, 19 nt, Artificial Sequence
  Description of Artificial Sequence: Synthetic oligonucleotide
aacacauggacaucauugu

SEQ ID NO: 2866428 - RNA, 19 nt, Artificial Sequence
  Description of Artificial Sequence: Synthetic oligonucleotide
uuaucgucuagcuauugcu

SEQ ID NO: 2866429 - RNA, 19 nt, Artificial Sequence
  Description of Artificial Sequence: Synthetic oligonucleotide
aucauggacaucaaaacag

SEQ ID NO: 2866430 - RNA, 19 nt, Artificial Sequence
  Description of Artificial Sequence: Synthetic oligonucleotide
ucuugaaguucacugugcc

SEQ ID NO: 2866431 - RNA, 19 nt, Artificial Sequence
  Description of Artificial Sequence: Synthetic oligonucleotide
auuaacagaaauccuucca

SEQ ID NO: 2866432 - RNA, 19 nt, Artificial Sequence
  Description of Artificial Sequence: Synthetic oligonucleotide
uguccuuauacacccagca

SEQ ID NO: 2866433 - RNA, 19 nt, Artificial Sequence
  Description of Artificial Sequence: Synthetic oligonucleotide
uaggaaaagcuuaucgucu

SEQ ID NO: 2866434 - RNA, 19 nt, Artificial Sequence
  Description of Artificial Sequence: Synthetic oligonucleotide
cacauggacaucauugugc

SEQ ID NO: 2866435 - RNA, 19 nt, Artificial Sequence
  Description of Artificial Sequence: Synthetic oligonucleotide
uuucccaguauauaaguuc

SEQ ID NO: 2866436 - RNA, 19 nt, Artificial Sequence
  Description of Artificial Sequence: Synthetic oligonucleotide
auuaaucuguccuuauaca

SEQ ID NO: 2866437 - RNA, 19 nt, Artificial Sequence
  Description of Artificial Sequence: Synthetic oligonucleotide
uuugugucaaacacaugga

SEQ ID NO: 2866438 - RNA, 19 nt, Artificial Sequence
  Description of Artificial Sequence: Synthetic oligonucleotide
cagaacugcacaugaaugc

SEQ ID NO: 2866439 - RNA, 19 nt, Artificial Sequence
  Description of Artificial Sequence: Synthetic oligonucleotide
agaugcaucauggacauca

SEQ ID NO: 2866440 - RNA, 19 nt, Artificial Sequence
  Description of Artificial Sequence: Synthetic oligonucleotide
uucuccauuaacagaaauc

SEQ ID NO: 2866441 - RNA, 19 nt, Artificial Sequence
  Description of Artificial Sequence: Synthetic oligonucleotide
auccuuccagaccaagucc

SEQ ID NO: 2866442 - RNA, 19 nt, Artificial Sequence
  Description of Artificial Sequence: Synthetic oligonucleotide
uccuguacccauaaccacc

SEQ ID NO: 2866443 - RNA, 19 nt, Artificial Sequence
  Description of Artificial Sequence: Synthetic oligonucleotide
cauccuaguuugcaaaacg

SEQ ID NO: 2866444 - RNA, 19 nt, Artificial Sequence
  Description of Artificial Sequence: Synthetic oligonucleotide
uaaccaccaaaauauauua

SEQ ID NO: 2866445 - RNA, 19 nt, Artificial Sequence
  Description of Artificial Sequence: Synthetic oligonucleotide
uggacaucaaaacagucuu

SEQ ID NO: 2866446 - RNA, 19 nt, Artificial Sequence
  Description of Artificial Sequence: Synthetic oligonucleotide
ucuguccuuauacacccag

SEQ ID NO: 2866447 - RNA, 19 nt, Artificial Sequence
  Description of Artificial Sequence: Synthetic oligonucleotide
uaguuugcaaaacgcgucc

SEQ ID NO: 2866448 - RNA, 19 nt, Artificial Sequence
  Description of Artificial Sequence: Synthetic oligonucleotide
aaguuuagauaguguaagu

SEQ ID NO: 2866449 - RNA, 19 nt, Artificial Sequence
  Description of Artificial Sequence: Synthetic oligonucleotide
accaccaaaauauauuaau

SEQ ID NO: 2866450 - RNA, 19 nt, Artificial Sequence
  Description of Artificial Sequence: Synthetic oligonucleotide
agaauaucugcucuuccca

SEQ ID NO: 2866451 - RNA, 19 nt, Artificial Sequence
  Description of Artificial Sequence: Synthetic oligonucleotide
uaucgucuagcuauugcug

SEQ ID NO: 2866452 - RNA, 19 nt, Artificial Sequence
  Description of Artificial Sequence: Synthetic oligonucleotide
ugucuuugugucaaacaca

SEQ ID NO: 2866453 - RNA, 19 nt, Artificial Sequence
  Description of Artificial Sequence: Synthetic oligonucleotide
uaucuaaguuuagauagug

SEQ ID NO: 2866454 - RNA, 19 nt, Artificial Sequence
  Description of Artificial Sequence: Synthetic oligonucleotide
cagaauaucugcucuuccc

SEQ ID NO: 2866455 - RNA, 19 nt, Artificial Sequence
  Description of Artificial Sequence: Synthetic oligonucleotide
agaacugcacaugaaugcg

SEQ ID NO: 2866456 - RNA, 19 nt, Artificial Sequence
  Description of Artificial Sequence: Synthetic oligonucleotide
cauuaacagaaauccuucc

SEQ ID NO: 2866457 - RNA, 19 nt, Artificial Sequence
  Description of Artificial Sequence: Synthetic oligonucleotide
uugugucaaacacauggac

SEQ ID NO: 2866458 - RNA, 19 nt, Artificial Sequence
  Description of Artificial Sequence: Synthetic oligonucleotide
agucuugaaguucacugug

SEQ ID NO: 2866459 - RNA, 19 nt, Artificial Sequence
  Description of Artificial Sequence: Synthetic oligonucleotide
uccgccaaagauauacccc

SEQ ID NO: 2866460 - RNA, 19 nt, Artificial Sequence
  Description of Artificial Sequence: Synthetic oligonucleotide
aacugcacaugaaugcgcg

SEQ ID NO: 2866461 - RNA, 19 nt, Artificial Sequence
  Description of Artificial Sequence: Synthetic oligonucleotide
uaacagaaauccuuccaga

SEQ ID NO: 2866462 - RNA, 19 nt, Artificial Sequence
  Description of Artificial Sequence: Synthetic oligonucleotide
ucauggacaucaaaacagu

SEQ ID NO: 2866463 - RNA, 19 nt, Artificial Sequence
  Description of Artificial Sequence: Synthetic oligonucleotide
auccuaguuugcaaaacgc

SEQ ID NO: 2866464 - RNA, 19 nt, Artificial Sequence
  Description of Artificial Sequence: Synthetic oligonucleotide
uauauaaguuccaucucuu

SEQ ID NO: 2866465 - RNA, 19 nt, Artificial Sequence
  Description of Artificial Sequence: Synthetic oligonucleotide
uggcuguccaucaaacuug

SEQ ID NO: 2866466 - RNA, 19 nt, Artificial Sequence
  Description of Artificial Sequence: Synthetic oligonucleotide
cuuaucgucuagcuauugc

SEQ ID NO: 2866467 - RNA, 19 nt, Artificial Sequence
  Description of Artificial Sequence: Synthetic oligonucleotide
cuaguuugcaaaacgcguc

SEQ ID NO: 2866468 - RNA, 19 nt, Artificial Sequence
  Description of Artificial Sequence: Synthetic oligonucleotide
ugugccaugaccgauguuu

SEQ ID NO: 2866469 - RNA, 19 nt, Artificial Sequence
  Description of Artificial Sequence: Synthetic oligonucleotide
aaacgcguccgccaaagau

SEQ ID NO: 2866470 - RNA, 19 nt, Artificial Sequence
  Description of Artificial Sequence: Synthetic oligonucleotide
aaagcuuaucgucuagcua

SEQ ID NO: 2866471 - RNA, 19 nt, Artificial Sequence
  Description of Artificial Sequence: Synthetic oligonucleotide
uucacugugccuccuguac

SEQ ID NO: 2866472 - RNA, 19 nt, Artificial Sequence
  Description of Artificial Sequence: Synthetic oligonucleotide
uauuucccagaacugcaca

SEQ ID NO: 2866473 - RNA, 19 nt, Artificial Sequence
  Description of Artificial Sequence: Synthetic oligonucleotide
uccaccaaauaggaaaagc

SEQ ID NO: 2866474 - RNA, 19 nt, Artificial Sequence
  Description of Artificial Sequence: Synthetic oligonucleotide
caguauauaaguuccaucu

SEQ ID NO: 2866475 - RNA, 19 nt, Artificial Sequence
  Description of Artificial Sequence: Synthetic oligonucleotide
agcuauugcugucagcgug

SEQ ID NO: 2866476 - RNA, 19 nt, Artificial Sequence
  Description of Artificial Sequence: Synthetic oligonucleotide
augaaugcgcggcucgugg

SEQ ID NO: 2866477 - RNA, 19 nt, Artificial Sequence
  Description of Artificial Sequence: Synthetic oligonucleotide
uucugguugagaccaaguc

SEQ ID NO: 2866478 - RNA, 19 nt, Artificial Sequence
  Description of Artificial Sequence: Synthetic oligonucleotide
uuauuucccagaacugcac

SEQ ID NO: 2866479 - RNA, 19 nt, Artificial Sequence
  Description of Artificial Sequence: Synthetic oligonucleotide
aaguccagguaucuaaguu

SEQ ID NO: 2866480 - RNA, 19 nt, Artificial Sequence
  Description of Artificial Sequence: Synthetic oligonucleotide
uuugcaaaacgcguccgcc

SEQ ID NO: 2866481 - RNA, 19 nt, Artificial Sequence
  Description of Artificial Sequence: Synthetic oligonucleotide
gacaucaaaacagucuuga

SEQ ID NO: 2866482 - RNA, 19 nt, Artificial Sequence
  Description of Artificial Sequence: Synthetic oligonucleotide
uagauaguguaagucauuc

SEQ ID NO: 2866483 - RNA, 19 nt, Artificial Sequence
  Description of Artificial Sequence: Synthetic oligonucleotide
uauauuaaucuguccuuau

SEQ ID NO: 2866484 - RNA, 19 nt, Artificial Sequence
  Description of Artificial Sequence: Synthetic oligonucleotide
aauucugguugagaccaag

SEQ ID NO: 2866485 - RNA, 19 nt, Artificial Sequence
  Description of Artificial Sequence: Synthetic oligonucleotide
auaguguaagucauucauc

SEQ ID NO: 2866486 - RNA, 19 nt, Artificial Sequence
  Description of Artificial Sequence: Synthetic oligonucleotide
aacuccaccuuuaauucug

SEQ ID NO: 2866487 - RNA, 19 nt, Artificial Sequence
  Description of Artificial Sequence: Synthetic oligonucleotide
gaaaagcuuaucgucuagc

SEQ ID NO: 2866488 - RNA, 19 nt, Artificial Sequence
  Description of Artificial Sequence: Synthetic oligonucleotide
uucccagaacugcacauga

SEQ ID NO: 2866489 - RNA, 19 nt, Artificial Sequence
  Description of Artificial Sequence: Synthetic oligonucleotide
cuuauuucccagaacugca

SEQ ID NO: 2866490 - RNA, 19 nt, Artificial Sequence
  Description of Artificial Sequence: Synthetic oligonucleotide
uguacccauaaccaccaaa

SEQ ID NO: 2866491 - RNA, 19 nt, Artificial Sequence
  Description of Artificial Sequence: Synthetic oligonucleotide
guauauaaguuccaucucu

SEQ ID NO: 2866492 - RNA, 19 nt, Artificial Sequence
  Description of Artificial Sequence: Synthetic oligonucleotide
uuccagaccaaguccaggu

SEQ ID NO: 2866493 - RNA, 19 nt, Artificial Sequence
  Description of Artificial Sequence: Synthetic oligonucleotide
ugagaccaaguccuugucu

SEQ ID NO: 2866494 - RNA, 19 nt, Artificial Sequence
  Description of Artificial Sequence: Synthetic oligonucleotide
cuucccaagaugcaucaug

SEQ ID NO: 2866495 - RNA, 19 nt, Artificial Sequence
  Description of Artificial Sequence: Synthetic oligonucleotide
cagcaggagaguuuguccc

SEQ ID NO: 2866496 - RNA, 19 nt, Artificial Sequence
  Description of Artificial Sequence: Synthetic oligonucleotide
cuaaguuuagauaguguaa

SEQ ID NO: 2866497 - RNA, 19 nt, Artificial Sequence
  Description of Artificial Sequence: Synthetic oligonucleotide
gauauaccccuuauuuccc

SEQ ID NO: 2866498 - RNA, 19 nt, Artificial Sequence
  Description of Artificial Sequence: Synthetic oligonucleotide
auucauccuaguuugcaaa

SEQ ID NO: 2866499 - RNA, 19 nt, Artificial Sequence
  Description of Artificial Sequence: Synthetic oligonucleotide
ugucccguggugugggugg

SEQ ID NO: 2866500 - RNA, 19 nt, Artificial Sequence
  Description of Artificial Sequence: Synthetic oligonucleotide
uuucuccauuaacagaaau

SEQ ID NO: 2866501 - RNA, 19 nt, Artificial Sequence
  Description of Artificial Sequence: Synthetic oligonucleotide
ucauucauccuaguuugca

SEQ ID NO: 2866502 - RNA, 19 nt, Artificial Sequence
  Description of Artificial Sequence: Synthetic oligonucleotide
accaaguccagguaucuaa

SEQ ID NO: 2866503 - RNA, 19 nt, Artificial Sequence
  Description of Artificial Sequence: Synthetic oligonucleotide
caccaaaauauauuaaucu

SEQ ID NO: 2866504 - RNA, 19 nt, Artificial Sequence
  Description of Artificial Sequence: Synthetic oligonucleotide
uuuucccaguauauaaguu

SEQ ID NO: 2866505 - RNA, 19 nt, Artificial Sequence
  Description of Artificial Sequence: Synthetic oligonucleotide
aucgucuagcuauugcugu

SEQ ID NO: 2866506 - RNA, 19 nt, Artificial Sequence
  Description of Artificial Sequence: Synthetic oligonucleotide
agcaggagaguuugucccg

SEQ ID NO: 2866507 - RNA, 19 nt, Artificial Sequence
  Description of Artificial Sequence: Synthetic oligonucleotide
acccauaaccaccaaaaua

SEQ ID NO: 2866508 - RNA, 19 nt, Artificial Sequence
  Description of Artificial Sequence: Synthetic oligonucleotide
auaucugcucuucccaaga

SEQ ID NO: 2866509 - RNA, 19 nt, Artificial Sequence
  Description of Artificial Sequence: Synthetic oligonucleotide
acacauggacaucauugug

SEQ ID NO: 2866510 - RNA, 19 nt, Artificial Sequence
  Description of Artificial Sequence: Synthetic oligonucleotide
auguuuggggcuuucucca

SEQ ID NO: 2866511 - RNA, 19 nt, Artificial Sequence
  Description of Artificial Sequence: Synthetic oligonucleotide
gagaguuugucccguggug

SEQ ID NO: 2866512 - RNA, 19 nt, Artificial Sequence
  Description of Artificial Sequence: Synthetic oligonucleotide
auggacaucaaaacagucu

SEQ ID NO: 2866513 - RNA, 19 nt, Artificial Sequence
  Description of Artificial Sequence: Synthetic oligonucleotide
aguccagguaucuaaguuu

SEQ ID NO: 2866514 - RNA, 19 nt, Artificial Sequence
  Description of Artificial Sequence: Synthetic oligonucleotide
auaaccaccaaaauauauu

SEQ ID NO: 2866515 - RNA, 19 nt, Artificial Sequence
  Description of Artificial Sequence: Synthetic oligonucleotide
agguaucuaaguuuagaua

SEQ ID NO: 2866516 - RNA, 19 nt, Artificial Sequence
  Description of Artificial Sequence: Synthetic oligonucleotide
aggagaguuugucccgugg

SEQ ID NO: 2866517 - RNA, 19 nt, Artificial Sequence
  Description of Artificial Sequence: Synthetic oligonucleotide
caucauggacaucaaaaca

SEQ ID NO: 2866518 - RNA, 19 nt, Artificial Sequence
  Description of Artificial Sequence: Synthetic oligonucleotide
aaauccuuccagaccaagu

SEQ ID NO: 2866519 - RNA, 19 nt, Artificial Sequence
  Description of Artificial Sequence: Synthetic oligonucleotide
gacaucauugugccacccc

SEQ ID NO: 2866520 - RNA, 19 nt, Artificial Sequence
  Description of Artificial Sequence: Synthetic oligonucleotide
auauuaaucuguccuuaua

SEQ ID NO: 2866521 - RNA, 19 nt, Artificial Sequence
  Description of Artificial Sequence: Synthetic oligonucleotide
caugaccgauguuuggggc

SEQ ID NO: 2866522 - RNA, 19 nt, Artificial Sequence
  Description of Artificial Sequence: Synthetic oligonucleotide
uucauccuaguuugcaaaa

SEQ ID NO: 2866523 - RNA, 19 nt, Artificial Sequence
  Description of Artificial Sequence: Synthetic oligonucleotide
uuagauaguguaagucauu

SEQ ID NO: 2866524 - RNA, 19 nt, Artificial Sequence
  Description of Artificial Sequence: Synthetic oligonucleotide
uccaccuuuaauucugguu

SEQ ID NO: 2866525 - RNA, 19 nt, Artificial Sequence
  Description of Artificial Sequence: Synthetic oligonucleotide
caaaacagucuugaaguuc

SEQ ID NO: 2866526 - RNA, 19 nt, Artificial Sequence
  Description of Artificial Sequence: Synthetic oligonucleotide
guccgccaaagauauaccc

SEQ ID NO: 2866527 - RNA, 19 nt, Artificial Sequence
  Description of Artificial Sequence: Synthetic oligonucleotide
ugcaaaacgcguccgccaa

SEQ ID NO: 2866528 - RNA, 19 nt, Artificial Sequence
  Description of Artificial Sequence: Synthetic oligonucleotide
aguguaagucauucauccu

SEQ ID NO: 2866529 - RNA, 19 nt, Artificial Sequence
  Description of Artificial Sequence: Synthetic oligonucleotide
cacaugaaugcgcggcucg

SEQ ID NO: 2866530 - RNA, 19 nt, Artificial Sequence
  Description of Artificial Sequence: Synthetic oligonucleotide
cauggacaucaaaacaguc

SEQ ID NO: 2866531 - RNA, 19 nt, Artificial Sequence
  Description of Artificial Sequence: Synthetic oligonucleotide
guguaagucauucauccua

SEQ ID NO: 2866532 - RNA, 19 nt, Artificial Sequence
  Description of Artificial Sequence: Synthetic oligonucleotide
cuugucuuugugucaaaca

SEQ ID NO: 2866533 - RNA, 19 nt, Artificial Sequence
  Description of Artificial Sequence: Synthetic oligonucleotide
ucaaaacagucuugaaguu

SEQ ID NO: 2866534 - RNA, 19 nt, Artificial Sequence
  Description of Artificial Sequence: Synthetic oligonucleotide
gucagcgugugccaugacc

SEQ ID NO: 2866535 - RNA, 19 nt, Artificial Sequence
  Description of Artificial Sequence: Synthetic oligonucleotide
guuugcaaaacgcguccgc

SEQ ID NO: 2866536 - RNA, 19 nt, Artificial Sequence
  Description of Artificial Sequence: Synthetic oligonucleotide
uugcaaaacgcguccgcca

SEQ ID NO: 2866537 - RNA, 19 nt, Artificial Sequence
  Description of Artificial Sequence: Synthetic oligonucleotide
ggaacuccaccuuuaauuc

SEQ ID NO: 2866538 - RNA, 19 nt, Artificial Sequence
  Description of Artificial Sequence: Synthetic oligonucleotide
accaaauaggaaaagcuua

SEQ ID NO: 2866539 - RNA, 19 nt, Artificial Sequence
  Description of Artificial Sequence: Synthetic oligonucleotide
auauauuaaucuguccuua

SEQ ID NO: 2866540 - RNA, 19 nt, Artificial Sequence
  Description of Artificial Sequence: Synthetic oligonucleotide
aguuugcaaaacgcguccg

SEQ ID NO: 2866541 - RNA, 19 nt, Artificial Sequence
  Description of Artificial Sequence: Synthetic oligonucleotide
guccuuauacacccagcag

SEQ ID NO: 2866542 - RNA, 19 nt, Artificial Sequence
  Description of Artificial Sequence: Synthetic oligonucleotide
uuucccagaacugcacaug

SEQ ID NO: 2866543 - RNA, 19 nt, Artificial Sequence
  Description of Artificial Sequence: Synthetic oligonucleotide
gcaucauggacaucaaaac

SEQ ID NO: 2866544 - RNA, 19 nt, Artificial Sequence
  Description of Artificial Sequence: Synthetic oligonucleotide
ugcacaugaaugcgcggcu

SEQ ID NO: 2866545 - RNA, 19 nt, Artificial Sequence
  Description of Artificial Sequence: Synthetic oligonucleotide
ucuagcuauugcugucagc

SEQ ID NO: 2866546 - RNA, 19 nt, Artificial Sequence
  Description of Artificial Sequence: Synthetic oligonucleotide
gaauaucugcucuucccaa

SEQ ID NO: 2866547 - RNA, 19 nt, Artificial Sequence
  Description of Artificial Sequence: Synthetic oligonucleotide
aacagucuugaaguucacu

SEQ ID NO: 2866548 - RNA, 19 nt, Artificial Sequence
  Description of Artificial Sequence: Synthetic oligonucleotide
gaguuugucccguggugug

SEQ ID NO: 2866549 - RNA, 19 nt, Artificial Sequence
  Description of Artificial Sequence: Synthetic oligonucleotide
aaguucacugugccuccug

SEQ ID NO: 2866550 - RNA, 19 nt, Artificial Sequence
  Description of Artificial Sequence: Synthetic oligonucleotide
ugccaugaccgauguuugg

SEQ ID NO: 2866551 - RNA, 19 nt, Artificial Sequence
  Description of Artificial Sequence: Synthetic oligonucleotide
augaccgauguuuggggcu

SEQ ID NO: 2866552 - RNA, 19 nt, Artificial Sequence
  Description of Artificial Sequence: Synthetic oligonucleotide
uccagguaucuaaguuuag

SEQ ID NO: 2866553 - RNA, 19 nt, Artificial Sequence
  Description of Artificial Sequence: Synthetic oligonucleotide
gugucaaacacauggacau

SEQ ID NO: 2866554 - RNA, 19 nt, Artificial Sequence
  Description of Artificial Sequence: Synthetic oligonucleotide
gaacugcacaugaaugcgc

SEQ ID NO: 2866555 - RNA, 19 nt, Artificial Sequence
  Description of Artificial Sequence: Synthetic oligonucleotide
cugcacaugaaugcgcggc

SEQ ID NO: 2866556 - RNA, 19 nt, Artificial Sequence
  Description of Artificial Sequence: Synthetic oligonucleotide
uaccccuuauuucccagaa

SEQ ID NO: 2866557 - RNA, 19 nt, Artificial Sequence
  Description of Artificial Sequence: Synthetic oligonucleotide
acugcacaugaaugcgcgg

SEQ ID NO: 2866558 - RNA, 19 nt, Artificial Sequence
  Description of Artificial Sequence: Synthetic oligonucleotide
auauaccccuuauuuccca

SEQ ID NO: 2866559 - RNA, 19 nt, Artificial Sequence
  Description of Artificial Sequence: Synthetic oligonucleotide
cugguugagaccaaguccu

SEQ ID NO: 2866560 - RNA, 19 nt, Artificial Sequence
  Description of Artificial Sequence: Synthetic oligonucleotide
guacccauaaccaccaaaa

SEQ ID NO: 2866561 - RNA, 19 nt, Artificial Sequence
  Description of Artificial Sequence: Synthetic oligonucleotide
ucauccuaguuugcaaaac

SEQ ID NO: 2866562 - RNA, 19 nt, Artificial Sequence
  Description of Artificial Sequence: Synthetic oligonucleotide
ucuuugugucaaacacaug

SEQ ID NO: 2866563 - RNA, 19 nt, Artificial Sequence
  Description of Artificial Sequence: Synthetic oligonucleotide
agaguuugucccguggugu

SEQ ID NO: 2866564 - RNA, 19 nt, Artificial Sequence
  Description of Artificial Sequence: Synthetic oligonucleotide
uggggcuuucuccauuaac

SEQ ID NO: 2866565 - RNA, 19 nt, Artificial Sequence
  Description of Artificial Sequence: Synthetic oligonucleotide
gccuccuguacccauaacc

SEQ ID NO: 2866566 - RNA, 19 nt, Artificial Sequence
  Description of Artificial Sequence: Synthetic oligonucleotide
uguggguggcuguccauca

SEQ ID NO: 2866567 - RNA, 19 nt, Artificial Sequence
  Description of Artificial Sequence: Synthetic oligonucleotide
aaacagucuugaaguucac

SEQ ID NO: 2866568 - RNA, 19 nt, Artificial Sequence
  Description of Artificial Sequence: Synthetic oligonucleotide
aguucacugugccuccugu

SEQ ID NO: 2866569 - RNA, 19 nt, Artificial Sequence
  Description of Artificial Sequence: Synthetic oligonucleotide
ugaaugcgcggcucguggc

SEQ ID NO: 2866570 - RNA, 19 nt, Artificial Sequence
  Description of Artificial Sequence: Synthetic oligonucleotide
ccaccaaaauauauuaauc

SEQ ID NO: 2866571 - RNA, 19 nt, Artificial Sequence
  Description of Artificial Sequence: Synthetic oligonucleotide
ccauuaacagaaauccuuc

SEQ ID NO: 2866572 - RNA, 19 nt, Artificial Sequence
  Description of Artificial Sequence: Synthetic oligonucleotide
uacccauaaccaccaaaau

SEQ ID NO: 2866573 - RNA, 19 nt, Artificial Sequence
  Description of Artificial Sequence: Synthetic oligonucleotide
cuguccuuauacacccagc

SEQ ID NO: 2866574 - RNA, 19 nt, Artificial Sequence
  Description of Artificial Sequence: Synthetic oligonucleotide
accccuuauuucccagaac

SEQ ID NO: 2866575 - RNA, 19 nt, Artificial Sequence
  Description of Artificial Sequence: Synthetic oligonucleotide
ccaagaugcaucauggaca

SEQ ID NO: 2866576 - RNA, 19 nt, Artificial Sequence
  Description of Artificial Sequence: Synthetic oligonucleotide
aggaaaagcuuaucgucua

SEQ ID NO: 2866577 - RNA, 19 nt, Artificial Sequence
  Description of Artificial Sequence: Synthetic oligonucleotide
caaaacgcguccgccaaag

SEQ ID NO: 2866578 - RNA, 19 nt, Artificial Sequence
  Description of Artificial Sequence: Synthetic oligonucleotide
ucccaguauauaaguucca

SEQ ID NO: 2866579 - RNA, 19 nt, Artificial Sequence
  Description of Artificial Sequence: Synthetic oligonucleotide
ccuuauuucccagaacugc

SEQ ID NO: 2866580 - RNA, 19 nt, Artificial Sequence
  Description of Artificial Sequence: Synthetic oligonucleotide
ccagaacugcacaugaaug

SEQ ID NO: 2866581 - RNA, 19 nt, Artificial Sequence
  Description of Artificial Sequence: Synthetic oligonucleotide
gggcuuucuccauuaacag

SEQ ID NO: 2866582 - RNA, 19 nt, Artificial Sequence
  Description of Artificial Sequence: Synthetic oligonucleotide
uggacaucauugugccacc

SEQ ID NO: 2866583 - RNA, 19 nt, Artificial Sequence
  Description of Artificial Sequence: Synthetic oligonucleotide
aaaacgcguccgccaaaga

SEQ ID NO: 2866584 - RNA, 19 nt, Artificial Sequence
  Description of Artificial Sequence: Synthetic oligonucleotide
acaucaaaacagucuugaa

SEQ ID NO: 2866585 - RNA, 19 nt, Artificial Sequence
  Description of Artificial Sequence: Synthetic oligonucleotide
uugagaccaaguccuuguc

SEQ ID NO: 2866586 - RNA, 19 nt, Artificial Sequence
  Description of Artificial Sequence: Synthetic oligonucleotide
guuugucccgugguguggg

SEQ ID NO: 2866587 - RNA, 19 nt, Artificial Sequence
  Description of Artificial Sequence: Synthetic oligonucleotide
cuccuguacccauaaccac

SEQ ID NO: 2866588 - RNA, 19 nt, Artificial Sequence
  Description of Artificial Sequence: Synthetic oligonucleotide
aguccuugucuuuguguca

SEQ ID NO: 2866589 - RNA, 19 nt, Artificial Sequence
  Description of Artificial Sequence: Synthetic oligonucleotide
aacgcguccgccaaagaua

SEQ ID NO: 2866590 - RNA, 19 nt, Artificial Sequence
  Description of Artificial Sequence: Synthetic oligonucleotide
caaauaggaaaagcuuauc

SEQ ID NO: 2866591 - RNA, 19 nt, Artificial Sequence
  Description of Artificial Sequence: Synthetic oligonucleotide
aaccaccaaaauauauuaa

SEQ ID NO: 2866592 - RNA, 19 nt, Artificial Sequence
  Description of Artificial Sequence: Synthetic oligonucleotide
uauugcugucagcgugugc

SEQ ID NO: 2866593 - RNA, 19 nt, Artificial Sequence
  Description of Artificial Sequence: Synthetic oligonucleotide
aguuugucccguggugugg

SEQ ID NO: 2866594 - RNA, 19 nt, Artificial Sequence
  Description of Artificial Sequence: Synthetic oligonucleotide
ggaaaagcuuaucgucuag

SEQ ID NO: 2866595 - RNA, 19 nt, Artificial Sequence
  Description of Artificial Sequence: Synthetic oligonucleotide
aucuaaguuuagauagugu

SEQ ID NO: 2866596 - RNA, 19 nt, Artificial Sequence
  Description of Artificial Sequence: Synthetic oligonucleotide
cagaccaaguccagguauc

SEQ ID NO: 2866597 - RNA, 19 nt, Artificial Sequence
  Description of Artificial Sequence: Synthetic oligonucleotide
cuuccagaccaaguccagg

SEQ ID NO: 2866598 - RNA, 19 nt, Artificial Sequence
  Description of Artificial Sequence: Synthetic oligonucleotide
gucuugaaguucacugugc

SEQ ID NO: 2866599 - RNA, 19 nt, Artificial Sequence
  Description of Artificial Sequence: Synthetic oligonucleotide
guugagaccaaguccuugu

SEQ ID NO: 2866600 - RNA, 19 nt, Artificial Sequence
  Description of Artificial Sequence: Synthetic oligonucleotide
guggcuguggcggaacucc

SEQ ID NO: 2866601 - RNA, 19 nt, Artificial Sequence
  Description of Artificial Sequence: Synthetic oligonucleotide
cauucauccuaguuugcaa

SEQ ID NO: 2866602 - RNA, 19 nt, Artificial Sequence
  Description of Artificial Sequence: Synthetic oligonucleotide
cccaagaugcaucauggac

SEQ ID NO: 2866603 - RNA, 19 nt, Artificial Sequence
  Description of Artificial Sequence: Synthetic oligonucleotide
gucuagcuauugcugucag

SEQ ID NO: 2866604 - RNA, 19 nt, Artificial Sequence
  Description of Artificial Sequence: Synthetic oligonucleotide
cccauaaccaccaaaauau

SEQ ID NO: 2866605 - RNA, 19 nt, Artificial Sequence
  Description of Artificial Sequence: Synthetic oligonucleotide
cauaaccaccaaaauauau

SEQ ID NO: 2866606 - RNA, 19 nt, Artificial Sequence
  Description of Artificial Sequence: Synthetic oligonucleotide
uggguggcuguccaucaaa

SEQ ID NO: 2866607 - RNA, 19 nt, Artificial Sequence
  Description of Artificial Sequence: Synthetic oligonucleotide
auaccccuuauuucccaga

SEQ ID NO: 2866608 - RNA, 19 nt, Artificial Sequence
  Description of Artificial Sequence: Synthetic oligonucleotide
ucgucuagcuauugcuguc

SEQ ID NO: 2866609 - RNA, 19 nt, Artificial Sequence
  Description of Artificial Sequence: Synthetic oligonucleotide
ucccaagaugcaucaugga

SEQ ID NO: 2866610 - RNA, 19 nt, Artificial Sequence
  Description of Artificial Sequence: Synthetic oligonucleotide
aaugcgcggcucguggcug

SEQ ID NO: 2866611 - RNA, 19 nt, Artificial Sequence
  Description of Artificial Sequence: Synthetic oligonucleotide
ugguguggguggcugucca

SEQ ID NO: 2866612 - RNA, 19 nt, Artificial Sequence
  Description of Artificial Sequence: Synthetic oligonucleotide
ugcucuucccaagaugcau

SEQ ID NO: 2866613 - RNA, 19 nt, Artificial Sequence
  Description of Artificial Sequence: Synthetic oligonucleotide
accuuuaauucugguugag

SEQ ID NO: 2866614 - RNA, 19 nt, Artificial Sequence
  Description of Artificial Sequence: Synthetic oligonucleotide
gagaccaaguccuugucuu

SEQ ID NO: 2866615 - RNA, 19 nt, Artificial Sequence
  Description of Artificial Sequence: Synthetic oligonucleotide
gccaugaccgauguuuggg

SEQ ID NO: 2866616 - RNA, 19 nt, Artificial Sequence
  Description of Artificial Sequence: Synthetic oligonucleotide
cuuauacacccagcaggag

SEQ ID NO: 2866617 - RNA, 19 nt, Artificial Sequence
  Description of Artificial Sequence: Synthetic oligonucleotide
uagcuauugcugucagcgu

SEQ ID NO: 2866618 - RNA, 19 nt, Artificial Sequence
  Description of Artificial Sequence: Synthetic oligonucleotide
ccagcaggagaguuugucc

SEQ ID NO: 2866619 - RNA, 19 nt, Artificial Sequence
  Description of Artificial Sequence: Synthetic oligonucleotide
uccagaccaaguccaggua

SEQ ID NO: 2866620 - RNA, 19 nt, Artificial Sequence
  Description of Artificial Sequence: Synthetic oligonucleotide
ccaguauauaaguuccauc

SEQ ID NO: 2866621 - RNA, 19 nt, Artificial Sequence
  Description of Artificial Sequence: Synthetic oligonucleotide
aguccaccaaauaggaaaa

SEQ ID NO: 2866622 - RNA, 19 nt, Artificial Sequence
  Description of Artificial Sequence: Synthetic oligonucleotide
uguggcggaacuccaccuu

SEQ ID NO: 2866623 - RNA, 19 nt, Artificial Sequence
  Description of Artificial Sequence: Synthetic oligonucleotide
ccaugaccgauguuugggg

SEQ ID NO: 2866624 - RNA, 19 nt, Artificial Sequence
  Description of Artificial Sequence: Synthetic oligonucleotide
ugugccuccuguacccaua

SEQ ID NO: 2866625 - RNA, 19 nt, Artificial Sequence
  Description of Artificial Sequence: Synthetic oligonucleotide
uaauucugguugagaccaa

SEQ ID NO: 2866626 - RNA, 19 nt, Artificial Sequence
  Description of Artificial Sequence: Synthetic oligonucleotide
gucuuugugucaaacacau

SEQ ID NO: 2866627 - RNA, 19 nt, Artificial Sequence
  Description of Artificial Sequence: Synthetic oligonucleotide
caccuuuaauucugguuga

SEQ ID NO: 2866628 - RNA, 19 nt, Artificial Sequence
  Description of Artificial Sequence: Synthetic oligonucleotide
ugucaaacacauggacauc

SEQ ID NO: 2866629 - RNA, 19 nt, Artificial Sequence
  Description of Artificial Sequence: Synthetic oligonucleotide
gaacuccaccuuuaauucu

SEQ ID NO: 2866630 - RNA, 19 nt, Artificial Sequence
  Description of Artificial Sequence: Synthetic oligonucleotide
ucccagaacugcacaugaa

SEQ ID NO: 2866631 - RNA, 19 nt, Artificial Sequence
  Description of Artificial Sequence: Synthetic oligonucleotide
acuccaccuuuaauucugg

SEQ ID NO: 2866632 - RNA, 19 nt, Artificial Sequence
  Description of Artificial Sequence: Synthetic oligonucleotide
cacccagcaggagaguuug

SEQ ID NO: 2866633 - RNA, 19 nt, Artificial Sequence
  Description of Artificial Sequence: Synthetic oligonucleotide
ccaaguccagguaucuaag

SEQ ID NO: 2866634 - RNA, 19 nt, Artificial Sequence
  Description of Artificial Sequence: Synthetic oligonucleotide
uugcugucagcgugugcca

SEQ ID NO: 2866635 - RNA, 19 nt, Artificial Sequence
  Description of Artificial Sequence: Synthetic oligonucleotide
ccuuauacacccagcagga

SEQ ID NO: 2866636 - RNA, 19 nt, Artificial Sequence
  Description of Artificial Sequence: Synthetic oligonucleotide
auucugguugagaccaagu

SEQ ID NO: 2866637 - RNA, 19 nt, Artificial Sequence
  Description of Artificial Sequence: Synthetic oligonucleotide
agaccaaguccagguaucu

SEQ ID NO: 2866638 - RNA, 19 nt, Artificial Sequence
  Description of Artificial Sequence: Synthetic oligonucleotide
ccagaauaucugcucuucc

SEQ ID NO: 2866639 - RNA, 19 nt, Artificial Sequence
  Description of Artificial Sequence: Synthetic oligonucleotide
uguuuggggcuuucuccau

SEQ ID NO: 2866640 - RNA, 19 nt, Artificial Sequence
  Description of Artificial Sequence: Synthetic oligonucleotide
aucaaacuugguguauuuu

SEQ ID NO: 2866641 - RNA, 19 nt, Artificial Sequence
  Description of Artificial Sequence: Synthetic oligonucleotide
gcguccgccaaagauauac

SEQ ID NO: 2866642 - RNA, 19 nt, Artificial Sequence
  Description of Artificial Sequence: Synthetic oligonucleotide
ccuccuguacccauaacca

SEQ ID NO: 2866643 - RNA, 19 nt, Artificial Sequence
  Description of Artificial Sequence: Synthetic oligonucleotide
ggcuuucuccauuaacaga

SEQ ID NO: 2866644 - RNA, 19 nt, Artificial Sequence
  Description of Artificial Sequence: Synthetic oligonucleotide
caccaaauaggaaaagcuu

SEQ ID NO: 2866645 - RNA, 19 nt, Artificial Sequence
  Description of Artificial Sequence: Synthetic oligonucleotide
ggcuguccaucaaacuugg

SEQ ID NO: 2866646 - RNA, 19 nt, Artificial Sequence
  Description of Artificial Sequence: Synthetic oligonucleotide
guccagguaucuaaguuua

SEQ ID NO: 2866647 - RNA, 19 nt, Artificial Sequence
  Description of Artificial Sequence: Synthetic oligonucleotide
agaccaaguccuugucuuu

SEQ ID NO: 2866648 - RNA, 19 nt, Artificial Sequence
  Description of Artificial Sequence: Synthetic oligonucleotide
guccaccaaauaggaaaag

SEQ ID NO: 2866649 - RNA, 19 nt, Artificial Sequence
  Description of Artificial Sequence: Synthetic oligonucleotide
uacacccagcaggagaguu

SEQ ID NO: 2866650 - RNA, 19 nt, Artificial Sequence
  Description of Artificial Sequence: Synthetic oligonucleotide
gucauucauccuaguuugc

SEQ ID NO: 2866651 - RNA, 19 nt, Artificial Sequence
  Description of Artificial Sequence: Synthetic oligonucleotide
gugccaugaccgauguuug

SEQ ID NO: 2866652 - RNA, 19 nt, Artificial Sequence
  Description of Artificial Sequence: Synthetic oligonucleotide
caugaaugcgcggcucgug

SEQ ID NO: 2866653 - RNA, 19 nt, Artificial Sequence
  Description of Artificial Sequence: Synthetic oligonucleotide
uggcuguggcggaacucca

SEQ ID NO: 2866654 - RNA, 19 nt, Artificial Sequence
  Description of Artificial Sequence: Synthetic oligonucleotide
cagucuugaaguucacugu

SEQ ID NO: 2866655 - RNA, 19 nt, Artificial Sequence
  Description of Artificial Sequence: Synthetic oligonucleotide
caaguccuugucuuugugu

SEQ ID NO: 2866656 - RNA, 19 nt, Artificial Sequence
  Description of Artificial Sequence: Synthetic oligonucleotide
uugucccguggugugggug

SEQ ID NO: 2866657 - RNA, 19 nt, Artificial Sequence
  Description of Artificial Sequence: Synthetic oligonucleotide
guaucuaaguuuagauagu

SEQ ID NO: 2866658 - RNA, 19 nt, Artificial Sequence
  Description of Artificial Sequence: Synthetic oligonucleotide
gguugagaccaaguccuug

SEQ ID NO: 2866659 - RNA, 19 nt, Artificial Sequence
  Description of Artificial Sequence: Synthetic oligonucleotide
cuuucuccauuaacagaaa

SEQ ID NO: 2866660 - RNA, 19 nt, Artificial Sequence
  Description of Artificial Sequence: Synthetic oligonucleotide
cccuuauuucccagaacug

SEQ ID NO: 2866661 - RNA, 19 nt, Artificial Sequence
  Description of Artificial Sequence: Synthetic oligonucleotide
cuauugcugucagcgugug

SEQ ID NO: 2866662 - RNA, 19 nt, Artificial Sequence
  Description of Artificial Sequence: Synthetic oligonucleotide
ugaccgauguuuggggcuu

SEQ ID NO: 2866663 - RNA, 19 nt, Artificial Sequence
  Description of Artificial Sequence: Synthetic oligonucleotide
ccaccaaauaggaaaagcu

SEQ ID NO: 2866664 - RNA, 19 nt, Artificial Sequence
  Description of Artificial Sequence: Synthetic oligonucleotide
acaugaaugcgcggcucgu

SEQ ID NO: 2866665 - RNA, 19 nt, Artificial Sequence
  Description of Artificial Sequence: Synthetic oligonucleotide
uggcggaacuccaccuuua

SEQ ID NO: 2866666 - RNA, 19 nt, Artificial Sequence
  Description of Artificial Sequence: Synthetic oligonucleotide
ucguggcuguggcggaacu

SEQ ID NO: 2866667 - RNA, 19 nt, Artificial Sequence
  Description of Artificial Sequence: Synthetic oligonucleotide
ggacaucaaaacagucuug

SEQ ID NO: 2866668 - RNA, 19 nt, Artificial Sequence
  Description of Artificial Sequence: Synthetic oligonucleotide
uuugucccguggugugggu

SEQ ID NO: 2866669 - RNA, 19 nt, Artificial Sequence
  Description of Artificial Sequence: Synthetic oligonucleotide
uuggggcuuucuccauuaa

SEQ ID NO: 2866670 - RNA, 19 nt, Artificial Sequence
  Description of Artificial Sequence: Synthetic oligonucleotide
guccuugucuuugugucaa

SEQ ID NO: 2866671 - RNA, 19 nt, Artificial Sequence
  Description of Artificial Sequence: Synthetic oligonucleotide
ccuaguuugcaaaacgcgu

SEQ ID NO: 2866672 - RNA, 19 nt, Artificial Sequence
  Description of Artificial Sequence: Synthetic oligonucleotide
gaugcaucauggacaucaa

SEQ ID NO: 2866673 - RNA, 19 nt, Artificial Sequence
  Description of Artificial Sequence: Synthetic oligonucleotide
ugguugagaccaaguccuu

SEQ ID NO: 2866674 - RNA, 19 nt, Artificial Sequence
  Description of Artificial Sequence: Synthetic oligonucleotide
gaaugcgcggcucguggcu

SEQ ID NO: 2866675 - RNA, 19 nt, Artificial Sequence
  Description of Artificial Sequence: Synthetic oligonucleotide
caggagaguuugucccgug

SEQ ID NO: 2866676 - RNA, 19 nt, Artificial Sequence
  Description of Artificial Sequence: Synthetic oligonucleotide
accgauguuuggggcuuuc

SEQ ID NO: 2866677 - RNA, 19 nt, Artificial Sequence
  Description of Artificial Sequence: Synthetic oligonucleotide
acgcguccgccaaagauau

SEQ ID NO: 2866678 - RNA, 19 nt, Artificial Sequence
  Description of Artificial Sequence: Synthetic oligonucleotide
ccuguacccauaaccacca

SEQ ID NO: 2866679 - RNA, 19 nt, Artificial Sequence
  Description of Artificial Sequence: Synthetic oligonucleotide
ccccuuauuucccagaacu

SEQ ID NO: 2866680 - RNA, 19 nt, Artificial Sequence
  Description of Artificial Sequence: Synthetic oligonucleotide
caaguccagguaucuaagu

SEQ ID NO: 2866681 - RNA, 19 nt, Artificial Sequence
  Description of Artificial Sequence: Synthetic oligonucleotide
uccuugucuuugugucaaa

SEQ ID NO: 2866682 - RNA, 19 nt, Artificial Sequence
  Description of Artificial Sequence: Synthetic oligonucleotide
cauggacaucauugugcca

SEQ ID NO: 2866683 - RNA, 19 nt, Artificial Sequence
  Description of Artificial Sequence: Synthetic oligonucleotide
guguggguggcuguccauc

SEQ ID NO: 2866684 - RNA, 19 nt, Artificial Sequence
  Description of Artificial Sequence: Synthetic oligonucleotide
ugccuccuguacccauaac

SEQ ID NO: 2866685 - RNA, 19 nt, Artificial Sequence
  Description of Artificial Sequence: Synthetic oligonucleotide
guaagucauucauccuagu

SEQ ID NO: 2866686 - RNA, 19 nt, Artificial Sequence
  Description of Artificial Sequence: Synthetic oligonucleotide
guucacugugccuccugua

SEQ ID NO: 2866687 - RNA, 19 nt, Artificial Sequence
  Description of Artificial Sequence: Synthetic oligonucleotide
ccuugucuuugugucaaac

SEQ ID NO: 2866688 - RNA, 19 nt, Artificial Sequence
  Description of Artificial Sequence: Synthetic oligonucleotide
gcugucagcgugugccaug

SEQ ID NO: 2866689 - RNA, 19 nt, Artificial Sequence
  Description of Artificial Sequence: Synthetic oligonucleotide
ccaaauaggaaaagcuuau

SEQ ID NO: 2866690 - RNA, 19 nt, Artificial Sequence
  Description of Artificial Sequence: Synthetic oligonucleotide
ggagaguuugucccguggu

SEQ ID NO: 2866691 - RNA, 19 nt, Artificial Sequence
  Description of Artificial Sequence: Synthetic oligonucleotide
cugcucuucccaagaugca

SEQ ID NO: 2866692 - RNA, 19 nt, Artificial Sequence
  Description of Artificial Sequence: Synthetic oligonucleotide
ccuuccagaccaaguccag

SEQ ID NO: 2866693 - RNA, 19 nt, Artificial Sequence
  Description of Artificial Sequence: Synthetic oligonucleotide
cugucagcgugugccauga

SEQ ID NO: 2866694 - RNA, 19 nt, Artificial Sequence
  Description of Artificial Sequence: Synthetic oligonucleotide
ugucagcgugugccaugac

SEQ ID NO: 2866695 - RNA, 19 nt, Artificial Sequence
  Description of Artificial Sequence: Synthetic oligonucleotide
ugcugucagcgugugccau

SEQ ID NO: 2866696 - RNA, 19 nt, Artificial Sequence
  Description of Artificial Sequence: Synthetic oligonucleotide
agcgugugccaugaccgau

SEQ ID NO: 2866697 - RNA, 19 nt, Artificial Sequence
  Description of Artificial Sequence: Synthetic oligonucleotide
caucaaacuugguguauuu

SEQ ID NO: 2866698 - RNA, 19 nt, Artificial Sequence
  Description of Artificial Sequence: Synthetic oligonucleotide
ccagguaucuaaguuuaga

SEQ ID NO: 2866699 - RNA, 19 nt, Artificial Sequence
  Description of Artificial Sequence: Synthetic oligonucleotide
gccaaagauauaccccuua

SEQ ID NO: 2866700 - RNA, 19 nt, Artificial Sequence
  Description of Artificial Sequence: Synthetic oligonucleotide
ccaaguccuugucuuugug

SEQ ID NO: 2866701 - RNA, 19 nt, Artificial Sequence
  Description of Artificial Sequence: Synthetic oligonucleotide
gcucuucccaagaugcauc

SEQ ID NO: 2866702 - RNA, 19 nt, Artificial Sequence
  Description of Artificial Sequence: Synthetic oligonucleotide
acugugccuccuguaccca

SEQ ID NO: 2866703 - RNA, 19 nt, Artificial Sequence
  Description of Artificial Sequence: Synthetic oligonucleotide
gcuuaucgucuagcuauug

SEQ ID NO: 2866704 - RNA, 19 nt, Artificial Sequence
  Description of Artificial Sequence: Synthetic oligonucleotide
ggacaucauugugccaccc

SEQ ID NO: 2866705 - RNA, 19 nt, Artificial Sequence
  Description of Artificial Sequence: Synthetic oligonucleotide
cgauguuuggggcuuucuc

SEQ ID NO: 2866706 - RNA, 19 nt, Artificial Sequence
  Description of Artificial Sequence: Synthetic oligonucleotide
cccagaauaucugcucuuc

SEQ ID NO: 2866707 - RNA, 19 nt, Artificial Sequence
  Description of Artificial Sequence: Synthetic oligonucleotide
ggguggcuguccaucaaac

SEQ ID NO: 2866708 - RNA, 19 nt, Artificial Sequence
  Description of Artificial Sequence: Synthetic oligonucleotide
gugccuccuguacccauaa

SEQ ID NO: 2866709 - RNA, 19 nt, Artificial Sequence
  Description of Artificial Sequence: Synthetic oligonucleotide
ccuuuaauucugguugaga

SEQ ID NO: 2866710 - RNA, 19 nt, Artificial Sequence
  Description of Artificial Sequence: Synthetic oligonucleotide
auacacccagcaggagagu

SEQ ID NO: 2866711 - RNA, 19 nt, Artificial Sequence
  Description of Artificial Sequence: Synthetic oligonucleotide
agcuuaucgucuagcuauu

SEQ ID NO: 2866712 - RNA, 19 nt, Artificial Sequence
  Description of Artificial Sequence: Synthetic oligonucleotide
cucguggcuguggcggaac

SEQ ID NO: 2866713 - RNA, 19 nt, Artificial Sequence
  Description of Artificial Sequence: Synthetic oligonucleotide
caaacacauggacaucauu

SEQ ID NO: 2866714 - RNA, 19 nt, Artificial Sequence
  Description of Artificial Sequence: Synthetic oligonucleotide
gaccaaguccagguaucua

SEQ ID NO: 2866715 - RNA, 19 nt, Artificial Sequence
  Description of Artificial Sequence: Synthetic oligonucleotide
acacccagcaggagaguuu

SEQ ID NO: 2866716 - RNA, 19 nt, Artificial Sequence
  Description of Artificial Sequence: Synthetic oligonucleotide
augcgcggcucguggcugu

SEQ ID NO: 2866717 - RNA, 19 nt, Artificial Sequence
  Description of Artificial Sequence: Synthetic oligonucleotide
gguggcuguccaucaaacu

SEQ ID NO: 2866718 - RNA, 19 nt, Artificial Sequence
  Description of Artificial Sequence: Synthetic oligonucleotide
ccgccaaagauauaccccu

SEQ ID NO: 2866719 - RNA, 19 nt, Artificial Sequence
  Description of Artificial Sequence: Synthetic oligonucleotide
cguccgccaaagauauacc

SEQ ID NO: 2866720 - RNA, 19 nt, Artificial Sequence
  Description of Artificial Sequence: Synthetic oligonucleotide
aucuguccuuauacaccca

SEQ ID NO: 2866721 - RNA, 19 nt, Artificial Sequence
  Description of Artificial Sequence: Synthetic oligonucleotide
cagcgugugccaugaccga

SEQ ID NO: 2866722 - RNA, 19 nt, Artificial Sequence
  Description of Artificial Sequence: Synthetic oligonucleotide
cccagcaggagaguuuguc

SEQ ID NO: 2866723 - RNA, 19 nt, Artificial Sequence
  Description of Artificial Sequence: Synthetic oligonucleotide
cuguggcggaacuccaccu

SEQ ID NO: 2866724 - RNA, 19 nt, Artificial Sequence
  Description of Artificial Sequence: Synthetic oligonucleotide
gcgugugccaugaccgaug

SEQ ID NO: 2866725 - RNA, 19 nt, Artificial Sequence
  Description of Artificial Sequence: Synthetic oligonucleotide
guuuggggcuuucuccauu

SEQ ID NO: 2866726 - RNA, 19 nt, Artificial Sequence
  Description of Artificial Sequence: Synthetic oligonucleotide
guggguggcuguccaucaa

SEQ ID NO: 2866727 - RNA, 19 nt, Artificial Sequence
  Description of Artificial Sequence: Synthetic oligonucleotide
gcuauugcugucagcgugu

SEQ ID NO: 2866728 - RNA, 19 nt, Artificial Sequence
  Description of Artificial Sequence: Synthetic oligonucleotide
ccauaaccaccaaaauaua

SEQ ID NO: 2866729 - RNA, 19 nt, Artificial Sequence
  Description of Artificial Sequence: Synthetic oligonucleotide
gcggcucguggcuguggcg

SEQ ID NO: 2866730 - RNA, 19 nt, Artificial Sequence
  Description of Artificial Sequence: Synthetic oligonucleotide
ggcggaacuccaccuuuaa

SEQ ID NO: 2866731 - RNA, 19 nt, Artificial Sequence
  Description of Artificial Sequence: Synthetic oligonucleotide
ccaaagauauaccccuuau

SEQ ID NO: 2866732 - RNA, 19 nt, Artificial Sequence
  Description of Artificial Sequence: Synthetic oligonucleotide
guggcggaacuccaccuuu

SEQ ID NO: 2866733 - RNA, 19 nt, Artificial Sequence
  Description of Artificial Sequence: Synthetic oligonucleotide
gcacaugaaugcgcggcuc

SEQ ID NO: 2866734 - RNA, 19 nt, Artificial Sequence
  Description of Artificial Sequence: Synthetic oligonucleotide
cuccaccuuuaauucuggu

SEQ ID NO: 2866735 - RNA, 19 nt, Artificial Sequence
  Description of Artificial Sequence: Synthetic oligonucleotide
gucccgugguguggguggc

SEQ ID NO: 2866736 - RNA, 19 nt, Artificial Sequence
  Description of Artificial Sequence: Synthetic oligonucleotide
cggcucguggcuguggcgg

SEQ ID NO: 2866737 - RNA, 19 nt, Artificial Sequence
  Description of Artificial Sequence: Synthetic oligonucleotide
cccagaacugcacaugaau

SEQ ID NO: 2866738 - RNA, 19 nt, Artificial Sequence
  Description of Artificial Sequence: Synthetic oligonucleotide
ugcgcggcucguggcugug

SEQ ID NO: 2866739 - RNA, 19 nt, Artificial Sequence
  Description of Artificial Sequence: Synthetic oligonucleotide
gcaaaacgcguccgccaaa

SEQ ID NO: 2866740 - RNA, 19 nt, Artificial Sequence
  Description of Artificial Sequence: Synthetic oligonucleotide
ucccgugguguggguggcu

SEQ ID NO: 2866741 - RNA, 19 nt, Artificial Sequence
  Description of Artificial Sequence: Synthetic oligonucleotide
ccagaccaaguccagguau

SEQ ID NO: 2866742 - RNA, 19 nt, Artificial Sequence
  Description of Artificial Sequence: Synthetic oligonucleotide
ggcuguggcggaacuccac

SEQ ID NO: 2866743 - RNA, 19 nt, Artificial Sequence
  Description of Artificial Sequence: Synthetic oligonucleotide
cuguacccauaaccaccaa

SEQ ID NO: 2866744 - RNA, 19 nt, Artificial Sequence
  Description of Artificial Sequence: Synthetic oligonucleotide
ggcucguggcuguggcgga

SEQ ID NO: 2866745 - RNA, 19 nt, Artificial Sequence
  Description of Artificial Sequence: Synthetic oligonucleotide
cgucuagcuauugcuguca

SEQ ID NO: 2866746 - RNA, 19 nt, Artificial Sequence
  Description of Artificial Sequence: Synthetic oligonucleotide
cccgugguguggguggcug

SEQ ID NO: 2866747 - RNA, 19 nt, Artificial Sequence
  Description of Artificial Sequence: Synthetic oligonucleotide
cgcggcucguggcuguggc

SEQ ID NO: 2866748 - RNA, 19 nt, Artificial Sequence
  Description of Artificial Sequence: Synthetic oligonucleotide
cugugccuccuguacccau

SEQ ID NO: 2866749 - RNA, 19 nt, Artificial Sequence
  Description of Artificial Sequence: Synthetic oligonucleotide
acccagcaggagaguuugu

SEQ ID NO: 2866750 - RNA, 19 nt, Artificial Sequence
  Description of Artificial Sequence: Synthetic oligonucleotide
cccaguauauaaguuccau

SEQ ID NO: 2866751 - RNA, 19 nt, Artificial Sequence
  Description of Artificial Sequence: Synthetic oligonucleotide
gcaggagaguuugucccgu

SEQ ID NO: 2866752 - RNA, 19 nt, Artificial Sequence
  Description of Artificial Sequence: Synthetic oligonucleotide
gcggaacuccaccuuuaau

SEQ ID NO: 2866753 - RNA, 19 nt, Artificial Sequence
  Description of Artificial Sequence: Synthetic oligonucleotide
cgugguguggguggcuguc

SEQ ID NO: 2866754 - RNA, 19 nt, Artificial Sequence
  Description of Artificial Sequence: Synthetic oligonucleotide
ccaucaaacuugguguauu

SEQ ID NO: 2866755 - RNA, 19 nt, Artificial Sequence
  Description of Artificial Sequence: Synthetic oligonucleotide
gguguggguggcuguccau

SEQ ID NO: 2866756 - RNA, 19 nt, Artificial Sequence
  Description of Artificial Sequence: Synthetic oligonucleotide
gcgcggcucguggcugugg

SEQ ID NO: 2866757 - RNA, 19 nt, Artificial Sequence
  Description of Artificial Sequence: Synthetic oligonucleotide
cguggcuguggcggaacuc

SEQ ID NO: 2866758 - RNA, 19 nt, Artificial Sequence
  Description of Artificial Sequence: Synthetic oligonucleotide
cgugugccaugaccgaugu

SEQ ID NO: 2866759 - RNA, 19 nt, Artificial Sequence
  Description of Artificial Sequence: Synthetic oligonucleotide
gaccgauguuuggggcuuu

SEQ ID NO: 2866760 - RNA, 19 nt, Artificial Sequence
  Description of Artificial Sequence: Synthetic oligonucleotide
gugugccaugaccgauguu

SEQ ID NO: 2866761 - RNA, 19 nt, Artificial Sequence
  Description of Artificial Sequence: Synthetic oligonucleotide
gcucguggcuguggcggaa

SEQ ID NO: 2866762 - RNA, 19 nt, Artificial Sequence
  Description of Artificial Sequence: Synthetic oligonucleotide
gcuguccaucaaacuuggu

SEQ ID NO: 2866763 - RNA, 19 nt, Artificial Sequence
  Description of Artificial Sequence: Synthetic oligonucleotide
ccgauguuuggggcuuucu

SEQ ID NO: 2866764 - RNA, 19 nt, Artificial Sequence
  Description of Artificial Sequence: Synthetic oligonucleotide
ccgugguguggguggcugu

SEQ ID NO: 2866765 - RNA, 19 nt, Artificial Sequence
  Description of Artificial Sequence: Synthetic oligonucleotide
cgccaaagauauaccccuu

SEQ ID NO: 2866766 - RNA, 19 nt, Artificial Sequence
  Description of Artificial Sequence: Synthetic oligonucleotide
cgcguccgccaaagauaua

SEQ ID NO: 2866767 - RNA, 19 nt, Artificial Sequence
  Description of Artificial Sequence: Synthetic oligonucleotide
aaaauuggagaucacagcc

SEQ ID NO: 2866768 - RNA, 19 nt, Artificial Sequence
  Description of Artificial Sequence: Synthetic oligonucleotide
aacaaaaucaaaauguucc

SEQ ID NO: 2866769 - RNA, 19 nt, Artificial Sequence
  Description of Artificial Sequence: Synthetic oligonucleotide
agacuuaugacacaggggc

SEQ ID NO: 2866770 - RNA, 19 nt, Artificial Sequence
  Description of Artificial Sequence: Synthetic oligonucleotide
ucagcaaugggaauaaugg

SEQ ID NO: 2866771 - RNA, 19 nt, Artificial Sequence
  Description of Artificial Sequence: Synthetic oligonucleotide
agucuaaaggcucugagcc

SEQ ID NO: 2866772 - RNA, 19 nt, Artificial Sequence
  Description of Artificial Sequence: Synthetic oligonucleotide
ucaaaauuggagaucacag

SEQ ID NO: 2866773 - RNA, 19 nt, Artificial Sequence
  Description of Artificial Sequence: Synthetic oligonucleotide
aaggccuacuaguauaucc

SEQ ID NO: 2866774 - RNA, 19 nt, Artificial Sequence
  Description of Artificial Sequence: Synthetic oligonucleotide
uucuacacaagcaaguugc

SEQ ID NO: 2866775 - RNA, 19 nt, Artificial Sequence
  Description of Artificial Sequence: Synthetic oligonucleotide
ucugguuuaggacagcccg

SEQ ID NO: 2866776 - RNA, 19 nt, Artificial Sequence
  Description of Artificial Sequence: Synthetic oligonucleotide
ucagacuuaugacacaggg

SEQ ID NO: 2866777 - RNA, 19 nt, Artificial Sequence
  Description of Artificial Sequence: Synthetic oligonucleotide
aucaaaauguucccgaagg

SEQ ID NO: 2866778 - RNA, 19 nt, Artificial Sequence
  Description of Artificial Sequence: Synthetic oligonucleotide
acuaguauauccucuaguc

SEQ ID NO: 2866779 - RNA, 19 nt, Artificial Sequence
  Description of Artificial Sequence: Synthetic oligonucleotide
acaaaaucaaaauguuccc

SEQ ID NO: 2866780 - RNA, 19 nt, Artificial Sequence
  Description of Artificial Sequence: Synthetic oligonucleotide
aaaaucaaaauguucccga

SEQ ID NO: 2866781 - RNA, 19 nt, Artificial Sequence
  Description of Artificial Sequence: Synthetic oligonucleotide
ugacugaggagucuaaagg

SEQ ID NO: 2866782 - RNA, 19 nt, Artificial Sequence
  Description of Artificial Sequence: Synthetic oligonucleotide
uccaacaccugccaggugg

SEQ ID NO: 2866783 - RNA, 19 nt, Artificial Sequence
  Description of Artificial Sequence: Synthetic oligonucleotide
aauuggagaucacagccag

SEQ ID NO: 2866784 - RNA, 19 nt, Artificial Sequence
  Description of Artificial Sequence: Synthetic oligonucleotide
aacuauccccaacaugagc

SEQ ID NO: 2866785 - RNA, 19 nt, Artificial Sequence
  Description of Artificial Sequence: Synthetic oligonucleotide
agcaaugggaauaauggcc

SEQ ID NO: 2866786 - RNA, 19 nt, Artificial Sequence
  Description of Artificial Sequence: Synthetic oligonucleotide
aaucaaaauguucccgaag

SEQ ID NO: 2866787 - RNA, 19 nt, Artificial Sequence
  Description of Artificial Sequence: Synthetic oligonucleotide
uaguauauccucuagucgu

SEQ ID NO: 2866788 - RNA, 19 nt, Artificial Sequence
  Description of Artificial Sequence: Synthetic oligonucleotide
guaacuauccccaacauga

SEQ ID NO: 2866789 - RNA, 19 nt, Artificial Sequence
  Description of Artificial Sequence: Synthetic oligonucleotide
acaagcaaguugcaaugcc

SEQ ID NO: 2866790 - RNA, 19 nt, Artificial Sequence
  Description of Artificial Sequence: Synthetic oligonucleotide
ugugcaugcccacagcccg

SEQ ID NO: 2866791 - RNA, 19 nt, Artificial Sequence
  Description of Artificial Sequence: Synthetic oligonucleotide
uagucgucggucaaaauug

SEQ ID NO: 2866792 - RNA, 19 nt, Artificial Sequence
  Description of Artificial Sequence: Synthetic oligonucleotide
ucagaagucaaaacaaaau

SEQ ID NO: 2866793 - RNA, 19 nt, Artificial Sequence
  Description of Artificial Sequence: Synthetic oligonucleotide
ugacacaggggcuugaggc

SEQ ID NO: 2866794 - RNA, 19 nt, Artificial Sequence
  Description of Artificial Sequence: Synthetic oligonucleotide
aaggcucugagccuaccac

SEQ ID NO: 2866795 - RNA, 19 nt, Artificial Sequence
  Description of Artificial Sequence: Synthetic oligonucleotide
cuaguauauccucuagucg

SEQ ID NO: 2866796 - RNA, 19 nt, Artificial Sequence
  Description of Artificial Sequence: Synthetic oligonucleotide
ugagccuaccaccaggaag

SEQ ID NO: 2866797 - RNA, 19 nt, Artificial Sequence
  Description of Artificial Sequence: Synthetic oligonucleotide
aaauucgugggucugguuu

SEQ ID NO: 2866798 - RNA, 19 nt, Artificial Sequence
  Description of Artificial Sequence: Synthetic oligonucleotide
aaaggucaagggcaggcag

SEQ ID NO: 2866799 - RNA, 19 nt, Artificial Sequence
  Description of Artificial Sequence: Synthetic oligonucleotide
cauuguauagcugaucagc

SEQ ID NO: 2866800 - RNA, 19 nt, Artificial Sequence
  Description of Artificial Sequence: Synthetic oligonucleotide
gacugaggagucuaaaggc

SEQ ID NO: 2866801 - RNA, 19 nt, Artificial Sequence
  Description of Artificial Sequence: Synthetic oligonucleotide
aaaauguucccgaaggcca

SEQ ID NO: 2866802 - RNA, 19 nt, Artificial Sequence
  Description of Artificial Sequence: Synthetic oligonucleotide
uguauagcugaucagcaau

SEQ ID NO: 2866803 - RNA, 19 nt, Artificial Sequence
  Description of Artificial Sequence: Synthetic oligonucleotide
caaaauuggagaucacagc

SEQ ID NO: 2866804 - RNA, 19 nt, Artificial Sequence
  Description of Artificial Sequence: Synthetic oligonucleotide
aacaugagcugcuacugca

SEQ ID NO: 2866805 - RNA, 19 nt, Artificial Sequence
  Description of Artificial Sequence: Synthetic oligonucleotide
ucgucggucaaaauuggag

SEQ ID NO: 2866806 - RNA, 19 nt, Artificial Sequence
  Description of Artificial Sequence: Synthetic oligonucleotide
agaagucaaaacaaaauca

SEQ ID NO: 2866807 - RNA, 19 nt, Artificial Sequence
  Description of Artificial Sequence: Synthetic oligonucleotide
guagucauuguauagcuga

SEQ ID NO: 2866808 - RNA, 19 nt, Artificial Sequence
  Description of Artificial Sequence: Synthetic oligonucleotide
auguucuuuggguacagag

SEQ ID NO: 2866809 - RNA, 19 nt, Artificial Sequence
  Description of Artificial Sequence: Synthetic oligonucleotide
aaggccaaggccuacuagu

SEQ ID NO: 2866810 - RNA, 19 nt, Artificial Sequence
  Description of Artificial Sequence: Synthetic oligonucleotide
gaauauguucuuuggguac

SEQ ID NO: 2866811 - RNA, 19 nt, Artificial Sequence
  Description of Artificial Sequence: Synthetic oligonucleotide
aaugggaauaauggccugg

SEQ ID NO: 2866812 - RNA, 19 nt, Artificial Sequence
  Description of Artificial Sequence: Synthetic oligonucleotide
ucaaaauguucccgaaggc

SEQ ID NO: 2866813 - RNA, 19 nt, Artificial Sequence
  Description of Artificial Sequence: Synthetic oligonucleotide
aaucacagggguaacuauc

SEQ ID NO: 2866814 - RNA, 19 nt, Artificial Sequence
  Description of Artificial Sequence: Synthetic oligonucleotide
caaaaucaaaauguucccg

SEQ ID NO: 2866815 - RNA, 19 nt, Artificial Sequence
  Description of Artificial Sequence: Synthetic oligonucleotide
uguucuuuggguacagagu

SEQ ID NO: 2866816 - RNA, 19 nt, Artificial Sequence
  Description of Artificial Sequence: Synthetic oligonucleotide
uuggagaucacagccagcc

SEQ ID NO: 2866817 - RNA, 19 nt, Artificial Sequence
  Description of Artificial Sequence: Synthetic oligonucleotide
uacacaagcaaguugcaau

SEQ ID NO: 2866818 - RNA, 19 nt, Artificial Sequence
  Description of Artificial Sequence: Synthetic oligonucleotide
cuuacgacaccccuucagg

SEQ ID NO: 2866819 - RNA, 19 nt, Artificial Sequence
  Description of Artificial Sequence: Synthetic oligonucleotide
aaaucaaaauguucccgaa

SEQ ID NO: 2866820 - RNA, 19 nt, Artificial Sequence
  Description of Artificial Sequence: Synthetic oligonucleotide
uuacgacaccccuucaggg

SEQ ID NO: 2866821 - RNA, 19 nt, Artificial Sequence
  Description of Artificial Sequence: Synthetic oligonucleotide
uauagcugaucagcaaugg

SEQ ID NO: 2866822 - RNA, 19 nt, Artificial Sequence
  Description of Artificial Sequence: Synthetic oligonucleotide
caaaauguucccgaaggcc

SEQ ID NO: 2866823 - RNA, 19 nt, Artificial Sequence
  Description of Artificial Sequence: Synthetic oligonucleotide
guugcaaugccuuaugaaa

SEQ ID NO: 2866824 - RNA, 19 nt, Artificial Sequence
  Description of Artificial Sequence: Synthetic oligonucleotide
agccucagaagucaaaaca

SEQ ID NO: 2866825 - RNA, 19 nt, Artificial Sequence
  Description of Artificial Sequence: Synthetic oligonucleotide
gagucuaaaggcucugagc

SEQ ID NO: 2866826 - RNA, 19 nt, Artificial Sequence
  Description of Artificial Sequence: Synthetic oligonucleotide
aucacagggguaacuaucc

SEQ ID NO: 2866827 - RNA, 19 nt, Artificial Sequence
  Description of Artificial Sequence: Synthetic oligonucleotide
acaccugccagguggaggg

SEQ ID NO: 2866828 - RNA, 19 nt, Artificial Sequence
  Description of Artificial Sequence: Synthetic oligonucleotide
uugcaaugccuuaugaaaa

SEQ ID NO: 2866829 - RNA, 19 nt, Artificial Sequence
  Description of Artificial Sequence: Synthetic oligonucleotide
auagcugaucagcaauggg

SEQ ID NO: 2866830 - RNA, 19 nt, Artificial Sequence
  Description of Artificial Sequence: Synthetic oligonucleotide
uucccgaaggccaaggccu

SEQ ID NO: 2866831 - RNA, 19 nt, Artificial Sequence
  Description of Artificial Sequence: Synthetic oligonucleotide
gguacagagucucugacug

SEQ ID NO: 2866832 - RNA, 19 nt, Artificial Sequence
  Description of Artificial Sequence: Synthetic oligonucleotide
uacuaguauauccucuagu

SEQ ID NO: 2866833 - RNA, 19 nt, Artificial Sequence
  Description of Artificial Sequence: Synthetic oligonucleotide
aauauguucuuuggguaca

SEQ ID NO: 2866834 - RNA, 19 nt, Artificial Sequence
  Description of Artificial Sequence: Synthetic oligonucleotide
acacaagcaaguugcaaug

SEQ ID NO: 2866835 - RNA, 19 nt, Artificial Sequence
  Description of Artificial Sequence: Synthetic oligonucleotide
cuucaggguagucucagcc

SEQ ID NO: 2866836 - RNA, 19 nt, Artificial Sequence
  Description of Artificial Sequence: Synthetic oligonucleotide
gaagucaaaacaaaaucaa

SEQ ID NO: 2866837 - RNA, 19 nt, Artificial Sequence
  Description of Artificial Sequence: Synthetic oligonucleotide
ugcuguagucauuguauag

SEQ ID NO: 2866838 - RNA, 19 nt, Artificial Sequence
  Description of Artificial Sequence: Synthetic oligonucleotide
accaggaagcugugcaugc

SEQ ID NO: 2866839 - RNA, 19 nt, Artificial Sequence
  Description of Artificial Sequence: Synthetic oligonucleotide
uugaggcuccaaaagguca

SEQ ID NO: 2866840 - RNA, 19 nt, Artificial Sequence
  Description of Artificial Sequence: Synthetic oligonucleotide
gagccuaccaccaggaagc

SEQ ID NO: 2866841 - RNA, 19 nt, Artificial Sequence
  Description of Artificial Sequence: Synthetic oligonucleotide
uauauccucuagucgucgg

SEQ ID NO: 2866842 - RNA, 19 nt, Artificial Sequence
  Description of Artificial Sequence: Synthetic oligonucleotide
agaauauguucuuugggua

SEQ ID NO: 2866843 - RNA, 19 nt, Artificial Sequence
  Description of Artificial Sequence: Synthetic oligonucleotide
uguagucauuguauagcug

SEQ ID NO: 2866844 - RNA, 19 nt, Artificial Sequence
  Description of Artificial Sequence: Synthetic oligonucleotide
cagacuuaugacacagggg

SEQ ID NO: 2866845 - RNA, 19 nt, Artificial Sequence
  Description of Artificial Sequence: Synthetic oligonucleotide
aggcucugagccuaccacc

SEQ ID NO: 2866846 - RNA, 19 nt, Artificial Sequence
  Description of Artificial Sequence: Synthetic oligonucleotide
uacagagucucugacugag

SEQ ID NO: 2866847 - RNA, 19 nt, Artificial Sequence
  Description of Artificial Sequence: Synthetic oligonucleotide
acuauccccaacaugagcu

SEQ ID NO: 2866848 - RNA, 19 nt, Artificial Sequence
  Description of Artificial Sequence: Synthetic oligonucleotide
aaguugcaaugccuuauga

SEQ ID NO: 2866849 - RNA, 19 nt, Artificial Sequence
  Description of Artificial Sequence: Synthetic oligonucleotide
cugacugaggagucuaaag

SEQ ID NO: 2866850 - RNA, 19 nt, Artificial Sequence
  Description of Artificial Sequence: Synthetic oligonucleotide
uaacuauccccaacaugag

SEQ ID NO: 2866851 - RNA, 19 nt, Artificial Sequence
  Description of Artificial Sequence: Synthetic oligonucleotide
uacugcagguucuacacaa

SEQ ID NO: 2866852 - RNA, 19 nt, Artificial Sequence
  Description of Artificial Sequence: Synthetic oligonucleotide
uucaggguagucucagccc

SEQ ID NO: 2866853 - RNA, 19 nt, Artificial Sequence
  Description of Artificial Sequence: Synthetic oligonucleotide
aagcugugcaugcccacag

SEQ ID NO: 2866854 - RNA, 19 nt, Artificial Sequence
  Description of Artificial Sequence: Synthetic oligonucleotide
aaauuggagaucacagcca

SEQ ID NO: 2866855 - RNA, 19 nt, Artificial Sequence
  Description of Artificial Sequence: Synthetic oligonucleotide
ucagaccccgcuuacgaca

SEQ ID NO: 2866856 - RNA, 19 nt, Artificial Sequence
  Description of Artificial Sequence: Synthetic oligonucleotide
aaaggcucugagccuacca

SEQ ID NO: 2866857 - RNA, 19 nt, Artificial Sequence
  Description of Artificial Sequence: Synthetic oligonucleotide
guuuaggacagcccgcagc

SEQ ID NO: 2866858 - RNA, 19 nt, Artificial Sequence
  Description of Artificial Sequence: Synthetic oligonucleotide
ugaggagucuaaaggcucu

SEQ ID NO: 2866859 - RNA, 19 nt, Artificial Sequence
  Description of Artificial Sequence: Synthetic oligonucleotide
uuuggguacagagucucug

SEQ ID NO: 2866860 - RNA, 19 nt, Artificial Sequence
  Description of Artificial Sequence: Synthetic oligonucleotide
ggcagaauauguucuuugg

SEQ ID NO: 2866861 - RNA, 19 nt, Artificial Sequence
  Description of Artificial Sequence: Synthetic oligonucleotide
guucuacacaagcaaguug

SEQ ID NO: 2866862 - RNA, 19 nt, Artificial Sequence
  Description of Artificial Sequence: Synthetic oligonucleotide
cacagggguaacuaucccc

SEQ ID NO: 2866863 - RNA, 19 nt, Artificial Sequence
  Description of Artificial Sequence: Synthetic oligonucleotide
aauucgugggucugguuua

SEQ ID NO: 2866864 - RNA, 19 nt, Artificial Sequence
  Description of Artificial Sequence: Synthetic oligonucleotide
aacaccugccagguggagg

SEQ ID NO: 2866865 - RNA, 19 nt, Artificial Sequence
  Description of Artificial Sequence: Synthetic oligonucleotide
caucagacuuaugacacag

SEQ ID NO: 2866866 - RNA, 19 nt, Artificial Sequence
  Description of Artificial Sequence: Synthetic oligonucleotide
caaaaggucaagggcaggc

SEQ ID NO: 2866867 - RNA, 19 nt, Artificial Sequence
  Description of Artificial Sequence: Synthetic oligonucleotide
aguugcaaugccuuaugaa

SEQ ID NO: 2866868 - RNA, 19 nt, Artificial Sequence
  Description of Artificial Sequence: Synthetic oligonucleotide
ugggucugguuuaggacag

SEQ ID NO: 2866869 - RNA, 19 nt, Artificial Sequence
  Description of Artificial Sequence: Synthetic oligonucleotide
accccuucaggguagucuc

SEQ ID NO: 2866870 - RNA, 19 nt, Artificial Sequence
  Description of Artificial Sequence: Synthetic oligonucleotide
cagcaaugggaauaauggc

SEQ ID NO: 2866871 - RNA, 19 nt, Artificial Sequence
  Description of Artificial Sequence: Synthetic oligonucleotide
cagguucuacacaagcaag

SEQ ID NO: 2866872 - RNA, 19 nt, Artificial Sequence
  Description of Artificial Sequence: Synthetic oligonucleotide
auuguauagcugaucagca

SEQ ID NO: 2866873 - RNA, 19 nt, Artificial Sequence
  Description of Artificial Sequence: Synthetic oligonucleotide
agggguaacuauccccaac

SEQ ID NO: 2866874 - RNA, 19 nt, Artificial Sequence
  Description of Artificial Sequence: Synthetic oligonucleotide
aaggucaagggcaggcagg

SEQ ID NO: 2866875 - RNA, 19 nt, Artificial Sequence
  Description of Artificial Sequence: Synthetic oligonucleotide
ucuacacaagcaaguugca

SEQ ID NO: 2866876 - RNA, 19 nt, Artificial Sequence
  Description of Artificial Sequence: Synthetic oligonucleotide
aucagcaaugggaauaaug

SEQ ID NO: 2866877 - RNA, 19 nt, Artificial Sequence
  Description of Artificial Sequence: Synthetic oligonucleotide
ggcuccaaaaggucaaggg

SEQ ID NO: 2866878 - RNA, 19 nt, Artificial Sequence
  Description of Artificial Sequence: Synthetic oligonucleotide
caugcccacagcccgagcc

SEQ ID NO: 2866879 - RNA, 19 nt, Artificial Sequence
  Description of Artificial Sequence: Synthetic oligonucleotide
ggcuugaggcuccaaaagg

SEQ ID NO: 2866880 - RNA, 19 nt, Artificial Sequence
  Description of Artificial Sequence: Synthetic oligonucleotide
ugcuacugcagguucuaca

SEQ ID NO: 2866881 - RNA, 19 nt, Artificial Sequence
  Description of Artificial Sequence: Synthetic oligonucleotide
ugaggcuccaaaaggucaa

SEQ ID NO: 2866882 - RNA, 19 nt, Artificial Sequence
  Description of Artificial Sequence: Synthetic oligonucleotide
cacagccagccucagaccc

SEQ ID NO: 2866883 - RNA, 19 nt, Artificial Sequence
  Description of Artificial Sequence: Synthetic oligonucleotide
aguauauccucuagucguc

SEQ ID NO: 2866884 - RNA, 19 nt, Artificial Sequence
  Description of Artificial Sequence: Synthetic oligonucleotide
agagucucugacugaggag

SEQ ID NO: 2866885 - RNA, 19 nt, Artificial Sequence
  Description of Artificial Sequence: Synthetic oligonucleotide
aaaaggucaagggcaggca

SEQ ID NO: 2866886 - RNA, 19 nt, Artificial Sequence
  Description of Artificial Sequence: Synthetic oligonucleotide
uuggguacagagucucuga

SEQ ID NO: 2866887 - RNA, 19 nt, Artificial Sequence
  Description of Artificial Sequence: Synthetic oligonucleotide
ucuaaaggcucugagccua

SEQ ID NO: 2866888 - RNA, 19 nt, Artificial Sequence
  Description of Artificial Sequence: Synthetic oligonucleotide
cuacuaguauauccucuag

SEQ ID NO: 2866889 - RNA, 19 nt, Artificial Sequence
  Description of Artificial Sequence: Synthetic oligonucleotide
gucaaaauuggagaucaca

SEQ ID NO: 2866890 - RNA, 19 nt, Artificial Sequence
  Description of Artificial Sequence: Synthetic oligonucleotide
augacacaggggcuugagg

SEQ ID NO: 2866891 - RNA, 19 nt, Artificial Sequence
  Description of Artificial Sequence: Synthetic oligonucleotide
cuugaggcuccaaaagguc

SEQ ID NO: 2866892 - RNA, 19 nt, Artificial Sequence
  Description of Artificial Sequence: Synthetic oligonucleotide
augggaauaauggccuggg

SEQ ID NO: 2866893 - RNA, 19 nt, Artificial Sequence
  Description of Artificial Sequence: Synthetic oligonucleotide
guucccgaaggccaaggcc

SEQ ID NO: 2866894 - RNA, 19 nt, Artificial Sequence
  Description of Artificial Sequence: Synthetic oligonucleotide
cugcagguucuacacaagc

SEQ ID NO: 2866895 - RNA, 19 nt, Artificial Sequence
  Description of Artificial Sequence: Synthetic oligonucleotide
augcccacagcccgagccc

SEQ ID NO: 2866896 - RNA, 19 nt, Artificial Sequence
  Description of Artificial Sequence: Synthetic oligonucleotide
cucagaagucaaaacaaaa

SEQ ID NO: 2866897 - RNA, 19 nt, Artificial Sequence
  Description of Artificial Sequence: Synthetic oligonucleotide
gaaggccaaggccuacuag

SEQ ID NO: 2866898 - RNA, 19 nt, Artificial Sequence
  Description of Artificial Sequence: Synthetic oligonucleotide
uuguauagcugaucagcaa

SEQ ID NO: 2866899 - RNA, 19 nt, Artificial Sequence
  Description of Artificial Sequence: Synthetic oligonucleotide
gugggucugguuuaggaca

SEQ ID NO: 2866900 - RNA, 19 nt, Artificial Sequence
  Description of Artificial Sequence: Synthetic oligonucleotide
ucuuuggguacagagucuc

SEQ ID NO: 2866901 - RNA, 19 nt, Artificial Sequence
  Description of Artificial Sequence: Synthetic oligonucleotide
cucugagccuaccaccagg

SEQ ID NO: 2866902 - RNA, 19 nt, Artificial Sequence
  Description of Artificial Sequence: Synthetic oligonucleotide
cugaggagucuaaaggcuc

SEQ ID NO: 2866903 - RNA, 19 nt, Artificial Sequence
  Description of Artificial Sequence: Synthetic oligonucleotide
guauagcugaucagcaaug

SEQ ID NO: 2866904 - RNA, 19 nt, Artificial Sequence
  Description of Artificial Sequence: Synthetic oligonucleotide
ucaucagacuuaugacaca

SEQ ID NO: 2866905 - RNA, 19 nt, Artificial Sequence
  Description of Artificial Sequence: Synthetic oligonucleotide
uggguacagagucucugac

SEQ ID NO: 2866906 - RNA, 19 nt, Artificial Sequence
  Description of Artificial Sequence: Synthetic oligonucleotide
gguaacuauccccaacaug

SEQ ID NO: 2866907 - RNA, 19 nt, Artificial Sequence
  Description of Artificial Sequence: Synthetic oligonucleotide
uaaucacagggguaacuau

SEQ ID NO: 2866908 - RNA, 19 nt, Artificial Sequence
  Description of Artificial Sequence: Synthetic oligonucleotide
uucuuuggguacagagucu

SEQ ID NO: 2866909 - RNA, 19 nt, Artificial Sequence
  Description of Artificial Sequence: Synthetic oligonucleotide
uguucccgaaggccaaggc

SEQ ID NO: 2866910 - RNA, 19 nt, Artificial Sequence
  Description of Artificial Sequence: Synthetic oligonucleotide
uacgacaccccuucagggu

SEQ ID NO: 2866911 - RNA, 19 nt, Artificial Sequence
  Description of Artificial Sequence: Synthetic oligonucleotide
guauauccucuagucgucg

SEQ ID NO: 2866912 - RNA, 19 nt, Artificial Sequence
  Description of Artificial Sequence: Synthetic oligonucleotide
ugaucagcaaugggaauaa

SEQ ID NO: 2866913 - RNA, 19 nt, Artificial Sequence
  Description of Artificial Sequence: Synthetic oligonucleotide
ucgugggucugguuuagga

SEQ ID NO: 2866914 - RNA, 19 nt, Artificial Sequence
  Description of Artificial Sequence: Synthetic oligonucleotide
caaguugcaaugccuuaug

SEQ ID NO: 2866915 - RNA, 19 nt, Artificial Sequence
  Description of Artificial Sequence: Synthetic oligonucleotide
ucacagggguaacuauccc

SEQ ID NO: 2866916 - RNA, 19 nt, Artificial Sequence
  Description of Artificial Sequence: Synthetic oligonucleotide
uaugacacaggggcuugag

SEQ ID NO: 2866917 - RNA, 19 nt, Artificial Sequence
  Description of Artificial Sequence: Synthetic oligonucleotide
caacaugagcugcuacugc

SEQ ID NO: 2866918 - RNA, 19 nt, Artificial Sequence
  Description of Artificial Sequence: Synthetic oligonucleotide
gcuacugcagguucuacac

SEQ ID NO: 2866919 - RNA, 19 nt, Artificial Sequence
  Description of Artificial Sequence: Synthetic oligonucleotide
auauccucuagucgucggu

SEQ ID NO: 2866920 - RNA, 19 nt, Artificial Sequence
  Description of Artificial Sequence: Synthetic oligonucleotide
ggagucuaaaggcucugag

SEQ ID NO: 2866921 - RNA, 19 nt, Artificial Sequence
  Description of Artificial Sequence: Synthetic oligonucleotide
cugguuuaggacagcccgc

SEQ ID NO: 2866922 - RNA, 19 nt, Artificial Sequence
  Description of Artificial Sequence: Synthetic oligonucleotide
cugugcaugcccacagccc

SEQ ID NO: 2866923 - RNA, 19 nt, Artificial Sequence
  Description of Artificial Sequence: Synthetic oligonucleotide
acugaggagucuaaaggcu

SEQ ID NO: 2866924 - RNA, 19 nt, Artificial Sequence
  Description of Artificial Sequence: Synthetic oligonucleotide
gcuguagucauuguauagc

SEQ ID NO: 2866925 - RNA, 19 nt, Artificial Sequence
  Description of Artificial Sequence: Synthetic oligonucleotide
caggaagcugugcaugccc

SEQ ID NO: 2866926 - RNA, 19 nt, Artificial Sequence
  Description of Artificial Sequence: Synthetic oligonucleotide
acagggguaacuaucccca

SEQ ID NO: 2866927 - RNA, 19 nt, Artificial Sequence
  Description of Artificial Sequence: Synthetic oligonucleotide
aauguucccgaaggccaag

SEQ ID NO: 2866928 - RNA, 19 nt, Artificial Sequence
  Description of Artificial Sequence: Synthetic oligonucleotide
uagucauuguauagcugau

SEQ ID NO: 2866929 - RNA, 19 nt, Artificial Sequence
  Description of Artificial Sequence: Synthetic oligonucleotide
uaggacagcccgcagccuc

SEQ ID NO: 2866930 - RNA, 19 nt, Artificial Sequence
  Description of Artificial Sequence: Synthetic oligonucleotide
agaugggacagggagggca

SEQ ID NO: 2866931 - RNA, 19 nt, Artificial Sequence
  Description of Artificial Sequence: Synthetic oligonucleotide
ugguuuaggacagcccgca

SEQ ID NO: 2866932 - RNA, 19 nt, Artificial Sequence
  Description of Artificial Sequence: Synthetic oligonucleotide
uauccccaacaugagcugc

SEQ ID NO: 2866933 - RNA, 19 nt, Artificial Sequence
  Description of Artificial Sequence: Synthetic oligonucleotide
aaaauucgugggucugguu

SEQ ID NO: 2866934 - RNA, 19 nt, Artificial Sequence
  Description of Artificial Sequence: Synthetic oligonucleotide
ggagaucacagccagccuc

SEQ ID NO: 2866935 - RNA, 19 nt, Artificial Sequence
  Description of Artificial Sequence: Synthetic oligonucleotide
auuggagaucacagccagc

SEQ ID NO: 2866936 - RNA, 19 nt, Artificial Sequence
  Description of Artificial Sequence: Synthetic oligonucleotide
cuauccccaacaugagcug

SEQ ID NO: 2866937 - RNA, 19 nt, Artificial Sequence
  Description of Artificial Sequence: Synthetic oligonucleotide
auauguucuuuggguacag

SEQ ID NO: 2866938 - RNA, 19 nt, Artificial Sequence
  Description of Artificial Sequence: Synthetic oligonucleotide
cacaagcaaguugcaaugc

SEQ ID NO: 2866939 - RNA, 19 nt, Artificial Sequence
  Description of Artificial Sequence: Synthetic oligonucleotide
cagagucucugacugagga

SEQ ID NO: 2866940 - RNA, 19 nt, Artificial Sequence
  Description of Artificial Sequence: Synthetic oligonucleotide
aagcaaguugcaaugccuu

SEQ ID NO: 2866941 - RNA, 19 nt, Artificial Sequence
  Description of Artificial Sequence: Synthetic oligonucleotide
acagggagggcagaauaug

SEQ ID NO: 2866942 - RNA, 19 nt, Artificial Sequence
  Description of Artificial Sequence: Synthetic oligonucleotide
agguucuacacaagcaagu

SEQ ID NO: 2866943 - RNA, 19 nt, Artificial Sequence
  Description of Artificial Sequence: Synthetic oligonucleotide
acuuaugacacaggggcuu

SEQ ID NO: 2866944 - RNA, 19 nt, Artificial Sequence
  Description of Artificial Sequence: Synthetic oligonucleotide
gagucucugacugaggagu

SEQ ID NO: 2866945 - RNA, 19 nt, Artificial Sequence
  Description of Artificial Sequence: Synthetic oligonucleotide
ucacagccagccucagacc

SEQ ID NO: 2866946 - RNA, 19 nt, Artificial Sequence
  Description of Artificial Sequence: Synthetic oligonucleotide
uauccucuagucgucgguc

SEQ ID NO: 2866947 - RNA, 19 nt, Artificial Sequence
  Description of Artificial Sequence: Synthetic oligonucleotide
aaauguucccgaaggccaa

SEQ ID NO: 2866948 - RNA, 19 nt, Artificial Sequence
  Description of Artificial Sequence: Synthetic oligonucleotide
aggccuacuaguauauccu

SEQ ID NO: 2866949 - RNA, 19 nt, Artificial Sequence
  Description of Artificial Sequence: Synthetic oligonucleotide
caaugggaauaauggccug

SEQ ID NO: 2866950 - RNA, 19 nt, Artificial Sequence
  Description of Artificial Sequence: Synthetic oligonucleotide
acacaggggcuugaggcuc

SEQ ID NO: 2866951 - RNA, 19 nt, Artificial Sequence
  Description of Artificial Sequence: Synthetic oligonucleotide
acagcccgcagccucagaa

SEQ ID NO: 2866952 - RNA, 19 nt, Artificial Sequence
  Description of Artificial Sequence: Synthetic oligonucleotide
cugguaaucacagggguaa

SEQ ID NO: 2866953 - RNA, 19 nt, Artificial Sequence
  Description of Artificial Sequence: Synthetic oligonucleotide
agucgucggucaaaauugg

SEQ ID NO: 2866954 - RNA, 19 nt, Artificial Sequence
  Description of Artificial Sequence: Synthetic oligonucleotide
gggguaacuauccccaaca

SEQ ID NO: 2866955 - RNA, 19 nt, Artificial Sequence
  Description of Artificial Sequence: Synthetic oligonucleotide
cuuaugacacaggggcuug

SEQ ID NO: 2866956 - RNA, 19 nt, Artificial Sequence
  Description of Artificial Sequence: Synthetic oligonucleotide
agcugaucagcaaugggaa

SEQ ID NO: 2866957 - RNA, 19 nt, Artificial Sequence
  Description of Artificial Sequence: Synthetic oligonucleotide
guaaucacagggguaacua

SEQ ID NO: 2866958 - RNA, 19 nt, Artificial Sequence
  Description of Artificial Sequence: Synthetic oligonucleotide
aucagacuuaugacacagg

SEQ ID NO: 2866959 - RNA, 19 nt, Artificial Sequence
  Description of Artificial Sequence: Synthetic oligonucleotide
gcuuacgacaccccuucag

SEQ ID NO: 2866960 - RNA, 19 nt, Artificial Sequence
  Description of Artificial Sequence: Synthetic oligonucleotide
gggcagaauauguucuuug

SEQ ID NO: 2866961 - RNA, 19 nt, Artificial Sequence
  Description of Artificial Sequence: Synthetic oligonucleotide
auccucuagucgucgguca

SEQ ID NO: 2866962 - RNA, 19 nt, Artificial Sequence
  Description of Artificial Sequence: Synthetic oligonucleotide
uggagaucacagccagccu

SEQ ID NO: 2866963 - RNA, 19 nt, Artificial Sequence
  Description of Artificial Sequence: Synthetic oligonucleotide
cagccucagaagucaaaac

SEQ ID NO: 2866964 - RNA, 19 nt, Artificial Sequence
  Description of Artificial Sequence: Synthetic oligonucleotide
aggcuccaaaaggucaagg

SEQ ID NO: 2866965 - RNA, 19 nt, Artificial Sequence
  Description of Artificial Sequence: Synthetic oligonucleotide
acaugagcugcuacugcag

SEQ ID NO: 2866966 - RNA, 19 nt, Artificial Sequence
  Description of Artificial Sequence: Synthetic oligonucleotide
agcccgcagccucagaagu

SEQ ID NO: 2866967 - RNA, 19 nt, Artificial Sequence
  Description of Artificial Sequence: Synthetic oligonucleotide
cuguagucauuguauagcu

SEQ ID NO: 2866968 - RNA, 19 nt, Artificial Sequence
  Description of Artificial Sequence: Synthetic oligonucleotide
acagccagccucagacccc

SEQ ID NO: 2866969 - RNA, 19 nt, Artificial Sequence
  Description of Artificial Sequence: Synthetic oligonucleotide
agccucagaccccgcuuac

SEQ ID NO: 2866970 - RNA, 19 nt, Artificial Sequence
  Description of Artificial Sequence: Synthetic oligonucleotide
uauguucuuuggguacaga

SEQ ID NO: 2866971 - RNA, 19 nt, Artificial Sequence
  Description of Artificial Sequence: Synthetic oligonucleotide
gggcuugaggcuccaaaag

SEQ ID NO: 2866972 - RNA, 19 nt, Artificial Sequence
  Description of Artificial Sequence: Synthetic oligonucleotide
uccucuagucgucggucaa

SEQ ID NO: 2866973 - RNA, 19 nt, Artificial Sequence
  Description of Artificial Sequence: Synthetic oligonucleotide
gcagguucuacacaagcaa

SEQ ID NO: 2866974 - RNA, 19 nt, Artificial Sequence
  Description of Artificial Sequence: Synthetic oligonucleotide
cuaaaggcucugagccuac

SEQ ID NO: 2866975 - RNA, 19 nt, Artificial Sequence
  Description of Artificial Sequence: Synthetic oligonucleotide
agucucugacugaggaguc

SEQ ID NO: 2866976 - RNA, 19 nt, Artificial Sequence
  Description of Artificial Sequence: Synthetic oligonucleotide
gggagggcagaauauguuc

SEQ ID NO: 2866977 - RNA, 19 nt, Artificial Sequence
  Description of Artificial Sequence: Synthetic oligonucleotide
cuagucgucggucaaaauu

SEQ ID NO: 2866978 - RNA, 19 nt, Artificial Sequence
  Description of Artificial Sequence: Synthetic oligonucleotide
gaccccgcuuacgacaccc

SEQ ID NO: 2866979 - RNA, 19 nt, Artificial Sequence
  Description of Artificial Sequence: Synthetic oligonucleotide
cagaccccgcuuacgacac

SEQ ID NO: 2866980 - RNA, 19 nt, Artificial Sequence
  Description of Artificial Sequence: Synthetic oligonucleotide
ucucugacugaggagucua

SEQ ID NO: 2866981 - RNA, 19 nt, Artificial Sequence
  Description of Artificial Sequence: Synthetic oligonucleotide
agcaaguugcaaugccuua

SEQ ID NO: 2866982 - RNA, 19 nt, Artificial Sequence
  Description of Artificial Sequence: Synthetic oligonucleotide
accugccagguggaggggc

SEQ ID NO: 2866983 - RNA, 19 nt, Artificial Sequence
  Description of Artificial Sequence: Synthetic oligonucleotide
caagcaaguugcaaugccu

SEQ ID NO: 2866984 - RNA, 19 nt, Artificial Sequence
  Description of Artificial Sequence: Synthetic oligonucleotide
caggcaggagaugggacag

SEQ ID NO: 2866985 - RNA, 19 nt, Artificial Sequence
  Description of Artificial Sequence: Synthetic oligonucleotide
auguucccgaaggccaagg

SEQ ID NO: 2866986 - RNA, 19 nt, Artificial Sequence
  Description of Artificial Sequence: Synthetic oligonucleotide
acgacaccccuucagggua

SEQ ID NO: 2866987 - RNA, 19 nt, Artificial Sequence
  Description of Artificial Sequence: Synthetic oligonucleotide
cucagaccccgcuuacgac

SEQ ID NO: 2866988 - RNA, 19 nt, Artificial Sequence
  Description of Artificial Sequence: Synthetic oligonucleotide
ggcaggagaugggacaggg

SEQ ID NO: 2866989 - RNA, 19 nt, Artificial Sequence
  Description of Artificial Sequence: Synthetic oligonucleotide
gaagcugugcaugcccaca

SEQ ID NO: 2866990 - RNA, 19 nt, Artificial Sequence
  Description of Artificial Sequence: Synthetic oligonucleotide
aggggcuugaggcuccaaa

SEQ ID NO: 2866991 - RNA, 19 nt, Artificial Sequence
  Description of Artificial Sequence: Synthetic oligonucleotide
ucuagucgucggucaaaau

SEQ ID NO: 2866992 - RNA, 19 nt, Artificial Sequence
  Description of Artificial Sequence: Synthetic oligonucleotide
gagcugcuacugcagguuc

SEQ ID NO: 2866993 - RNA, 19 nt, Artificial Sequence
  Description of Artificial Sequence: Synthetic oligonucleotide
uaaaggcucugagccuacc

SEQ ID NO: 2866994 - RNA, 19 nt, Artificial Sequence
  Description of Artificial Sequence: Synthetic oligonucleotide
gucugguuuaggacagccc

SEQ ID NO: 2866995 - RNA, 19 nt, Artificial Sequence
  Description of Artificial Sequence: Synthetic oligonucleotide
uuaugacacaggggcuuga

SEQ ID NO: 2866996 - RNA, 19 nt, Artificial Sequence
  Description of Artificial Sequence: Synthetic oligonucleotide
cccuccaacaccugccagg

SEQ ID NO: 2866997 - RNA, 19 nt, Artificial Sequence
  Description of Artificial Sequence: Synthetic oligonucleotide
gaggcuccaaaaggucaag

SEQ ID NO: 2866998 - RNA, 19 nt, Artificial Sequence
  Description of Artificial Sequence: Synthetic oligonucleotide
gucggucaaaauuggagau

SEQ ID NO: 2866999 - RNA, 19 nt, Artificial Sequence
  Description of Artificial Sequence: Synthetic oligonucleotide
aggucaagggcaggcagga

SEQ ID NO: 2867000 - RNA, 19 nt, Artificial Sequence
  Description of Artificial Sequence: Synthetic oligonucleotide
gacacaggggcuugaggcu

SEQ ID NO: 2867001 - RNA, 19 nt, Artificial Sequence
  Description of Artificial Sequence: Synthetic oligonucleotide
uucgugggucugguuuagg

SEQ ID NO: 2867002 - RNA, 19 nt, Artificial Sequence
  Description of Artificial Sequence: Synthetic oligonucleotide
ugcaugcccacagcccgag

SEQ ID NO: 2867003 - RNA, 19 nt, Artificial Sequence
  Description of Artificial Sequence: Synthetic oligonucleotide
caccaggaagcugugcaug

SEQ ID NO: 2867004 - RNA, 19 nt, Artificial Sequence
  Description of Artificial Sequence: Synthetic oligonucleotide
auucgugggucugguuuag

SEQ ID NO: 2867005 - RNA, 19 nt, Artificial Sequence
  Description of Artificial Sequence: Synthetic oligonucleotide
uggaggggcugcuguaguc

SEQ ID NO: 2867006 - RNA, 19 nt, Artificial Sequence
  Description of Artificial Sequence: Synthetic oligonucleotide
ggucugguuuaggacagcc

SEQ ID NO: 2867007 - RNA, 19 nt, Artificial Sequence
  Description of Artificial Sequence: Synthetic oligonucleotide
cacaggggcuugaggcucc

SEQ ID NO: 2867008 - RNA, 19 nt, Artificial Sequence
  Description of Artificial Sequence: Synthetic oligonucleotide
acugcagguucuacacaag

SEQ ID NO: 2867009 - RNA, 19 nt, Artificial Sequence
  Description of Artificial Sequence: Synthetic oligonucleotide
agaccccgcuuacgacacc

SEQ ID NO: 2867010 - RNA, 19 nt, Artificial Sequence
  Description of Artificial Sequence: Synthetic oligonucleotide
gaucacagccagccucaga

SEQ ID NO: 2867011 - RNA, 19 nt, Artificial Sequence
  Description of Artificial Sequence: Synthetic oligonucleotide
ccuaccaccaggaagcugu

SEQ ID NO: 2867012 - RNA, 19 nt, Artificial Sequence
  Description of Artificial Sequence: Synthetic oligonucleotide
cagcccgcagccucagaag

SEQ ID NO: 2867013 - RNA, 19 nt, Artificial Sequence
  Description of Artificial Sequence: Synthetic oligonucleotide
ccaacaugagcugcuacug

SEQ ID NO: 2867014 - RNA, 19 nt, Artificial Sequence
  Description of Artificial Sequence: Synthetic oligonucleotide
guacagagucucugacuga

SEQ ID NO: 2867015 - RNA, 19 nt, Artificial Sequence
  Description of Artificial Sequence: Synthetic oligonucleotide
cagccagccucagaccccg

SEQ ID NO: 2867016 - RNA, 19 nt, Artificial Sequence
  Description of Artificial Sequence: Synthetic oligonucleotide
ccccugguaaucacagggg

SEQ ID NO: 2867017 - RNA, 19 nt, Artificial Sequence
  Description of Artificial Sequence: Synthetic oligonucleotide
ugguaaucacagggguaac

SEQ ID NO: 2867018 - RNA, 19 nt, Artificial Sequence
  Description of Artificial Sequence: Synthetic oligonucleotide
aggagucuaaaggcucuga

SEQ ID NO: 2867019 - RNA, 19 nt, Artificial Sequence
  Description of Artificial Sequence: Synthetic oligonucleotide
gcaggcaggagaugggaca

SEQ ID NO: 2867020 - RNA, 19 nt, Artificial Sequence
  Description of Artificial Sequence: Synthetic oligonucleotide
gccucagaagucaaaacaa

SEQ ID NO: 2867021 - RNA, 19 nt, Artificial Sequence
  Description of Artificial Sequence: Synthetic oligonucleotide
cuaccaccaggaagcugug

SEQ ID NO: 2867022 - RNA, 19 nt, Artificial Sequence
  Description of Artificial Sequence: Synthetic oligonucleotide
ugcccacagcccgagcccc

SEQ ID NO: 2867023 - RNA, 19 nt, Artificial Sequence
  Description of Artificial Sequence: Synthetic oligonucleotide
gguuuaggacagcccgcag

SEQ ID NO: 2867024 - RNA, 19 nt, Artificial Sequence
  Description of Artificial Sequence: Synthetic oligonucleotide
cugcuguagucauuguaua

SEQ ID NO: 2867025 - RNA, 19 nt, Artificial Sequence
  Description of Artificial Sequence: Synthetic oligonucleotide
cuacacaagcaaguugcaa

SEQ ID NO: 2867026 - RNA, 19 nt, Artificial Sequence
  Description of Artificial Sequence: Synthetic oligonucleotide
gcaaugggaauaauggccu

SEQ ID NO: 2867027 - RNA, 19 nt, Artificial Sequence
  Description of Artificial Sequence: Synthetic oligonucleotide
uuaggacagcccgcagccu

SEQ ID NO: 2867028 - RNA, 19 nt, Artificial Sequence
  Description of Artificial Sequence: Synthetic oligonucleotide
ggccuacuaguauauccuc

SEQ ID NO: 2867029 - RNA, 19 nt, Artificial Sequence
  Description of Artificial Sequence: Synthetic oligonucleotide
gucuaaaggcucugagccu

SEQ ID NO: 2867030 - RNA, 19 nt, Artificial Sequence
  Description of Artificial Sequence: Synthetic oligonucleotide
gguggaggggcugcuguag

SEQ ID NO: 2867031 - RNA, 19 nt, Artificial Sequence
  Description of Artificial Sequence: Synthetic oligonucleotide
ugggacagggagggcagaa

SEQ ID NO: 2867032 - RNA, 19 nt, Artificial Sequence
  Description of Artificial Sequence: Synthetic oligonucleotide
uaccaccaggaagcugugc

SEQ ID NO: 2867033 - RNA, 19 nt, Artificial Sequence
  Description of Artificial Sequence: Synthetic oligonucleotide
gacuuaugacacaggggcu

SEQ ID NO: 2867034 - RNA, 19 nt, Artificial Sequence
  Description of Artificial Sequence: Synthetic oligonucleotide
agggcagaauauguucuuu

SEQ ID NO: 2867035 - RNA, 19 nt, Artificial Sequence
  Description of Artificial Sequence: Synthetic oligonucleotide
auccccaacaugagcugcu

SEQ ID NO: 2867036 - RNA, 19 nt, Artificial Sequence
  Description of Artificial Sequence: Synthetic oligonucleotide
ucccgaaggccaaggccua

SEQ ID NO: 2867037 - RNA, 19 nt, Artificial Sequence
  Description of Artificial Sequence: Synthetic oligonucleotide
agaucacagccagccucag

SEQ ID NO: 2867038 - RNA, 19 nt, Artificial Sequence
  Description of Artificial Sequence: Synthetic oligonucleotide
ccuacuaguauauccucua

SEQ ID NO: 2867039 - RNA, 19 nt, Artificial Sequence
  Description of Artificial Sequence: Synthetic oligonucleotide
gccaaggccuacuaguaua

SEQ ID NO: 2867040 - RNA, 19 nt, Artificial Sequence
  Description of Artificial Sequence: Synthetic oligonucleotide
ggacagggagggcagaaua

SEQ ID NO: 2867041 - RNA, 19 nt, Artificial Sequence
  Description of Artificial Sequence: Synthetic oligonucleotide
ggggcuugaggcuccaaaa

SEQ ID NO: 2867042 - RNA, 19 nt, Artificial Sequence
  Description of Artificial Sequence: Synthetic oligonucleotide
ggaagcugugcaugcccac

SEQ ID NO: 2867043 - RNA, 19 nt, Artificial Sequence
  Description of Artificial Sequence: Synthetic oligonucleotide
cgucggucaaaauuggaga

SEQ ID NO: 2867044 - RNA, 19 nt, Artificial Sequence
  Description of Artificial Sequence: Synthetic oligonucleotide
agcugcuacugcagguucu

SEQ ID NO: 2867045 - RNA, 19 nt, Artificial Sequence
  Description of Artificial Sequence: Synthetic oligonucleotide
aggcaggagaugggacagg

SEQ ID NO: 2867046 - RNA, 19 nt, Artificial Sequence
  Description of Artificial Sequence: Synthetic oligonucleotide
cucuagucgucggucaaaa

SEQ ID NO: 2867047 - RNA, 19 nt, Artificial Sequence
  Description of Artificial Sequence: Synthetic oligonucleotide
agggagggcagaauauguu

SEQ ID NO: 2867048 - RNA, 19 nt, Artificial Sequence
  Description of Artificial Sequence: Synthetic oligonucleotide
accccgcuuacgacacccc

SEQ ID NO: 2867049 - RNA, 19 nt, Artificial Sequence
  Description of Artificial Sequence: Synthetic oligonucleotide
caaggccuacuaguauauc

SEQ ID NO: 2867050 - RNA, 19 nt, Artificial Sequence
  Description of Artificial Sequence: Synthetic oligonucleotide
ccucagaagucaaaacaaa

SEQ ID NO: 2867051 - RNA, 19 nt, Artificial Sequence
  Description of Artificial Sequence: Synthetic oligonucleotide
gcugcuguagucauuguau

SEQ ID NO: 2867052 - RNA, 19 nt, Artificial Sequence
  Description of Artificial Sequence: Synthetic oligonucleotide
gacagggagggcagaauau

SEQ ID NO: 2867053 - RNA, 19 nt, Artificial Sequence
  Description of Artificial Sequence: Synthetic oligonucleotide
gucgucggucaaaauugga

SEQ ID NO: 2867054 - RNA, 19 nt, Artificial Sequence
  Description of Artificial Sequence: Synthetic oligonucleotide
gcuugaggcuccaaaaggu

SEQ ID NO: 2867055 - RNA, 19 nt, Artificial Sequence
  Description of Artificial Sequence: Synthetic oligonucleotide
ggcucugagccuaccacca

SEQ ID NO: 2867056 - RNA, 19 nt, Artificial Sequence
  Description of Artificial Sequence: Synthetic oligonucleotide
ggagggcagaauauguucu

SEQ ID NO: 2867057 - RNA, 19 nt, Artificial Sequence
  Description of Artificial Sequence: Synthetic oligonucleotide
aggccaaggccuacuagua

SEQ ID NO: 2867058 - RNA, 19 nt, Artificial Sequence
  Description of Artificial Sequence: Synthetic oligonucleotide
ccaaaaggucaagggcagg

SEQ ID NO: 2867059 - RNA, 19 nt, Artificial Sequence
  Description of Artificial Sequence: Synthetic oligonucleotide
cucugacugaggagucuaa

SEQ ID NO: 2867060 - RNA, 19 nt, Artificial Sequence
  Description of Artificial Sequence: Synthetic oligonucleotide
ccuucaggguagucucagc

SEQ ID NO: 2867061 - RNA, 19 nt, Artificial Sequence
  Description of Artificial Sequence: Synthetic oligonucleotide
gcucugagccuaccaccag

SEQ ID NO: 2867062 - RNA, 19 nt, Artificial Sequence
  Description of Artificial Sequence: Synthetic oligonucleotide
ggaggggcugcuguaguca

SEQ ID NO: 2867063 - RNA, 19 nt, Artificial Sequence
  Description of Artificial Sequence: Synthetic oligonucleotide
agguggaggggcugcugua

SEQ ID NO: 2867064 - RNA, 19 nt, Artificial Sequence
  Description of Artificial Sequence: Synthetic oligonucleotide
ccgcuuacgacaccccuuc

SEQ ID NO: 2867065 - RNA, 19 nt, Artificial Sequence
  Description of Artificial Sequence: Synthetic oligonucleotide
gguaaucacagggguaacu

SEQ ID NO: 2867066 - RNA, 19 nt, Artificial Sequence
  Description of Artificial Sequence: Synthetic oligonucleotide
aggacagcccgcagccuca

SEQ ID NO: 2867067 - RNA, 19 nt, Artificial Sequence
  Description of Artificial Sequence: Synthetic oligonucleotide
uccccaacaugagcugcua

SEQ ID NO: 2867068 - RNA, 19 nt, Artificial Sequence
  Description of Artificial Sequence: Synthetic oligonucleotide
cuuuggguacagagucucu

SEQ ID NO: 2867069 - RNA, 19 nt, Artificial Sequence
  Description of Artificial Sequence: Synthetic oligonucleotide
ccucagaccccgcuuacga

SEQ ID NO: 2867070 - RNA, 19 nt, Artificial Sequence
  Description of Artificial Sequence: Synthetic oligonucleotide
ggguacagagucucugacu

SEQ ID NO: 2867071 - RNA, 19 nt, Artificial Sequence
  Description of Artificial Sequence: Synthetic oligonucleotide
caacaccugccagguggag

SEQ ID NO: 2867072 - RNA, 19 nt, Artificial Sequence
  Description of Artificial Sequence: Synthetic oligonucleotide
acaccccuucaggguaguc

SEQ ID NO: 2867073 - RNA, 19 nt, Artificial Sequence
  Description of Artificial Sequence: Synthetic oligonucleotide
cugcuacugcagguucuac

SEQ ID NO: 2867074 - RNA, 19 nt, Artificial Sequence
  Description of Artificial Sequence: Synthetic oligonucleotide
ggucaaaauuggagaucac

SEQ ID NO: 2867075 - RNA, 19 nt, Artificial Sequence
  Description of Artificial Sequence: Synthetic oligonucleotide
cuccaacaccugccaggug

SEQ ID NO: 2867076 - RNA, 19 nt, Artificial Sequence
  Description of Artificial Sequence: Synthetic oligonucleotide
gaggggcugcuguagucau

SEQ ID NO: 2867077 - RNA, 19 nt, Artificial Sequence
  Description of Artificial Sequence: Synthetic oligonucleotide
cccaacaugagcugcuacu

SEQ ID NO: 2867078 - RNA, 19 nt, Artificial Sequence
  Description of Artificial Sequence: Synthetic oligonucleotide
ccaggaagcugugcaugcc

SEQ ID NO: 2867079 - RNA, 19 nt, Artificial Sequence
  Description of Artificial Sequence: Synthetic oligonucleotide
cccuucaggguagucucag

SEQ ID NO: 2867080 - RNA, 19 nt, Artificial Sequence
  Description of Artificial Sequence: Synthetic oligonucleotide
gccucagaccccgcuuacg

SEQ ID NO: 2867081 - RNA, 19 nt, Artificial Sequence
  Description of Artificial Sequence: Synthetic oligonucleotide
gguucuacacaagcaaguu

SEQ ID NO: 2867082 - RNA, 19 nt, Artificial Sequence
  Description of Artificial Sequence: Synthetic oligonucleotide
agccuaccaccaggaagcu

SEQ ID NO: 2867083 - RNA, 19 nt, Artificial Sequence
  Description of Artificial Sequence: Synthetic oligonucleotide
ccugguaaucacaggggua

SEQ ID NO: 2867084 - RNA, 19 nt, Artificial Sequence
  Description of Artificial Sequence: Synthetic oligonucleotide
cagccucagaccccgcuua

SEQ ID NO: 2867085 - RNA, 19 nt, Artificial Sequence
  Description of Artificial Sequence: Synthetic oligonucleotide
caccccuucaggguagucu

SEQ ID NO: 2867086 - RNA, 19 nt, Artificial Sequence
  Description of Artificial Sequence: Synthetic oligonucleotide
cagggguaacuauccccaa

SEQ ID NO: 2867087 - RNA, 19 nt, Artificial Sequence
  Description of Artificial Sequence: Synthetic oligonucleotide
gcaaguugcaaugccuuau

SEQ ID NO: 2867088 - RNA, 19 nt, Artificial Sequence
  Description of Artificial Sequence: Synthetic oligonucleotide
cagguggaggggcugcugu

SEQ ID NO: 2867089 - RNA, 19 nt, Artificial Sequence
  Description of Artificial Sequence: Synthetic oligonucleotide
cugagccuaccaccaggaa

SEQ ID NO: 2867090 - RNA, 19 nt, Artificial Sequence
  Description of Artificial Sequence: Synthetic oligonucleotide
guggaggggcugcuguagu

SEQ ID NO: 2867091 - RNA, 19 nt, Artificial Sequence
  Description of Artificial Sequence: Synthetic oligonucleotide
gacagcccgcagccucaga

SEQ ID NO: 2867092 - RNA, 19 nt, Artificial Sequence
  Description of Artificial Sequence: Synthetic oligonucleotide
ccaacaccugccaggugga

SEQ ID NO: 2867093 - RNA, 19 nt, Artificial Sequence
  Description of Artificial Sequence: Synthetic oligonucleotide
gccuacuaguauauccucu

SEQ ID NO: 2867094 - RNA, 19 nt, Artificial Sequence
  Description of Artificial Sequence: Synthetic oligonucleotide
ccccaacaugagcugcuac

SEQ ID NO: 2867095 - RNA, 19 nt, Artificial Sequence
  Description of Artificial Sequence: Synthetic oligonucleotide
gucucugacugaggagucu

SEQ ID NO: 2867096 - RNA, 19 nt, Artificial Sequence
  Description of Artificial Sequence: Synthetic oligonucleotide
ggguaacuauccccaacau

SEQ ID NO: 2867097 - RNA, 19 nt, Artificial Sequence
  Description of Artificial Sequence: Synthetic oligonucleotide
gugcaugcccacagcccga

SEQ ID NO: 2867098 - RNA, 19 nt, Artificial Sequence
  Description of Artificial Sequence: Synthetic oligonucleotide
gaucagcaaugggaauaau

SEQ ID NO: 2867099 - RNA, 19 nt, Artificial Sequence
  Description of Artificial Sequence: Synthetic oligonucleotide
gcugaucagcaaugggaau

SEQ ID NO: 2867100 - RNA, 19 nt, Artificial Sequence
  Description of Artificial Sequence: Synthetic oligonucleotide
cgacaccccuucaggguag

SEQ ID NO: 2867101 - RNA, 19 nt, Artificial Sequence
  Description of Artificial Sequence: Synthetic oligonucleotide
agccagccucagaccccgc

SEQ ID NO: 2867102 - RNA, 19 nt, Artificial Sequence
  Description of Artificial Sequence: Synthetic oligonucleotide
cccgcagccucagaaguca

SEQ ID NO: 2867103 - RNA, 19 nt, Artificial Sequence
  Description of Artificial Sequence: Synthetic oligonucleotide
cccugguaaucacaggggu

SEQ ID NO: 2867104 - RNA, 19 nt, Artificial Sequence
  Description of Artificial Sequence: Synthetic oligonucleotide
ccaaggccuacuaguauau

SEQ ID NO: 2867105 - RNA, 19 nt, Artificial Sequence
  Description of Artificial Sequence: Synthetic oligonucleotide
ccccuccaacaccugccag

SEQ ID NO: 2867106 - RNA, 19 nt, Artificial Sequence
  Description of Artificial Sequence: Synthetic oligonucleotide
ggacagcccgcagccucag

SEQ ID NO: 2867107 - RNA, 19 nt, Artificial Sequence
  Description of Artificial Sequence: Synthetic oligonucleotide
gggucugguuuaggacagc

SEQ ID NO: 2867108 - RNA, 19 nt, Artificial Sequence
  Description of Artificial Sequence: Synthetic oligonucleotide
gcaggagaugggacaggga

SEQ ID NO: 2867109 - RNA, 19 nt, Artificial Sequence
  Description of Artificial Sequence: Synthetic oligonucleotide
ggccaaggccuacuaguau

SEQ ID NO: 2867110 - RNA, 19 nt, Artificial Sequence
  Description of Artificial Sequence: Synthetic oligonucleotide
gccuaccaccaggaagcug

SEQ ID NO: 2867111 - RNA, 19 nt, Artificial Sequence
  Description of Artificial Sequence: Synthetic oligonucleotide
gcaugcccacagcccgagc

SEQ ID NO: 2867112 - RNA, 19 nt, Artificial Sequence
  Description of Artificial Sequence: Synthetic oligonucleotide
gacaccccuucaggguagu

SEQ ID NO: 2867113 - RNA, 19 nt, Artificial Sequence
  Description of Artificial Sequence: Synthetic oligonucleotide
aggggcugcuguagucauu

SEQ ID NO: 2867114 - RNA, 19 nt, Artificial Sequence
  Description of Artificial Sequence: Synthetic oligonucleotide
ccagguggaggggcugcug

SEQ ID NO: 2867115 - RNA, 19 nt, Artificial Sequence
  Description of Artificial Sequence: Synthetic oligonucleotide
ccuccaacaccugccaggu

SEQ ID NO: 2867116 - RNA, 19 nt, Artificial Sequence
  Description of Artificial Sequence: Synthetic oligonucleotide
gcccgcagccucagaaguc

SEQ ID NO: 2867117 - RNA, 19 nt, Artificial Sequence
  Description of Artificial Sequence: Synthetic oligonucleotide
gccagccucagaccccgcu

SEQ ID NO: 2867118 - RNA, 19 nt, Artificial Sequence
  Description of Artificial Sequence: Synthetic oligonucleotide
ccucuagucgucggucaaa

SEQ ID NO: 2867119 - RNA, 19 nt, Artificial Sequence
  Description of Artificial Sequence: Synthetic oligonucleotide
cccgaaggccaaggccuac

SEQ ID NO: 2867120 - RNA, 19 nt, Artificial Sequence
  Description of Artificial Sequence: Synthetic oligonucleotide
cgaaggccaaggccuacua

SEQ ID NO: 2867121 - RNA, 19 nt, Artificial Sequence
  Description of Artificial Sequence: Synthetic oligonucleotide
gggacagggagggcagaau

SEQ ID NO: 2867122 - RNA, 19 nt, Artificial Sequence
  Description of Artificial Sequence: Synthetic oligonucleotide
cgcagccucagaagucaaa

SEQ ID NO: 2867123 - RNA, 19 nt, Artificial Sequence
  Description of Artificial Sequence: Synthetic oligonucleotide
cccgcuuacgacaccccuu

SEQ ID NO: 2867124 - RNA, 19 nt, Artificial Sequence
  Description of Artificial Sequence: Synthetic oligonucleotide
ccccgcuuacgacaccccu

SEQ ID NO: 2867125 - RNA, 19 nt, Artificial Sequence
  Description of Artificial Sequence: Synthetic oligonucleotide
ccgcagccucagaagucaa

SEQ ID NO: 2867126 - RNA, 19 nt, Artificial Sequence
  Description of Artificial Sequence: Synthetic oligonucleotide
cgcuuacgacaccccuuca

SEQ ID NO: 2867127 - RNA, 19 nt, Artificial Sequence
  Description of Artificial Sequence: Synthetic oligonucleotide
ccgaaggccaaggccuacu

SEQ ID NO: 2867128 - RNA, 19 nt, Artificial Sequence
  Description of Artificial Sequence: Synthetic oligonucleotide
aaauuuuggaaggaaaacc

SEQ ID NO: 2867129 - RNA, 19 nt, Artificial Sequence
  Description of Artificial Sequence: Synthetic oligonucleotide
auaaagucuggucuggucc

SEQ ID NO: 2867130 - RNA, 19 nt, Artificial Sequence
  Description of Artificial Sequence: Synthetic oligonucleotide
aacuucucaaaagugagac

SEQ ID NO: 2867131 - RNA, 19 nt, Artificial Sequence
  Description of Artificial Sequence: Synthetic oligonucleotide
uuaacuucucaaaagugag

SEQ ID NO: 2867132 - RNA, 19 nt, Artificial Sequence
  Description of Artificial Sequence: Synthetic oligonucleotide
ucuucauaaagucuggucu

SEQ ID NO: 2867133 - RNA, 19 nt, Artificial Sequence
  Description of Artificial Sequence: Synthetic oligonucleotide
acuucauucacauaggcga

SEQ ID NO: 2867134 - RNA, 19 nt, Artificial Sequence
  Description of Artificial Sequence: Synthetic oligonucleotide
cuguacuucauucacauag

SEQ ID NO: 2867135 - RNA, 19 nt, Artificial Sequence
  Description of Artificial Sequence: Synthetic oligonucleotide
uuaaauuuuggaaggaaaa

SEQ ID NO: 2867136 - RNA, 19 nt, Artificial Sequence
  Description of Artificial Sequence: Synthetic oligonucleotide
agugagacuguuuuccagc

SEQ ID NO: 2867137 - RNA, 19 nt, Artificial Sequence
  Description of Artificial Sequence: Synthetic oligonucleotide
uuuaaauuuuggaaggaaa

SEQ ID NO: 2867138 - RNA, 19 nt, Artificial Sequence
  Description of Artificial Sequence: Synthetic oligonucleotide
caugucauaauccucuugc

SEQ ID NO: 2867139 - RNA, 19 nt, Artificial Sequence
  Description of Artificial Sequence: Synthetic oligonucleotide
ucacuauucauuacugaag

SEQ ID NO: 2867140 - RNA, 19 nt, Artificial Sequence
  Description of Artificial Sequence: Synthetic oligonucleotide
uacuucauucacauaggcg

SEQ ID NO: 2867141 - RNA, 19 nt, Artificial Sequence
  Description of Artificial Sequence: Synthetic oligonucleotide
ucaaaagugagacuguuuu

SEQ ID NO: 2867142 - RNA, 19 nt, Artificial Sequence
  Description of Artificial Sequence: Synthetic oligonucleotide
aauuuuggaaggaaaaccu

SEQ ID NO: 2867143 - RNA, 19 nt, Artificial Sequence
  Description of Artificial Sequence: Synthetic oligonucleotide
uggaaggaaaaccucaaca

SEQ ID NO: 2867144 - RNA, 19 nt, Artificial Sequence
  Description of Artificial Sequence: Synthetic oligonucleotide
cacuauucauuacugaagg

SEQ ID NO: 2867145 - RNA, 19 nt, Artificial Sequence
  Description of Artificial Sequence: Synthetic oligonucleotide
uguacuucauucacauagg

SEQ ID NO: 2867146 - RNA, 19 nt, Artificial Sequence
  Description of Artificial Sequence: Synthetic oligonucleotide
aucaucugggagcaggacc

SEQ ID NO: 2867147 - RNA, 19 nt, Artificial Sequence
  Description of Artificial Sequence: Synthetic oligonucleotide
aaggaaaaccucaacauca

SEQ ID NO: 2867148 - RNA, 19 nt, Artificial Sequence
  Description of Artificial Sequence: Synthetic oligonucleotide
gaaaaccucaacaucagug

SEQ ID NO: 2867149 - RNA, 19 nt, Artificial Sequence
  Description of Artificial Sequence: Synthetic oligonucleotide
acucgagcagggcagaacc

SEQ ID NO: 2867150 - RNA, 19 nt, Artificial Sequence
  Description of Artificial Sequence: Synthetic oligonucleotide
aacuuggacacgcacaggu

SEQ ID NO: 2867151 - RNA, 19 nt, Artificial Sequence
  Description of Artificial Sequence: Synthetic oligonucleotide
ugaaacacggacuccaugu

SEQ ID NO: 2867152 - RNA, 19 nt, Artificial Sequence
  Description of Artificial Sequence: Synthetic oligonucleotide
aggaagucagaacuggaac

SEQ ID NO: 2867153 - RNA, 19 nt, Artificial Sequence
  Description of Artificial Sequence: Synthetic oligonucleotide
gaagacauccaccaucccc

SEQ ID NO: 2867154 - RNA, 19 nt, Artificial Sequence
  Description of Artificial Sequence: Synthetic oligonucleotide
gacaagucagccuuguccc

SEQ ID NO: 2867155 - RNA, 19 nt, Artificial Sequence
  Description of Artificial Sequence: Synthetic oligonucleotide
gcaguuuaaauuuuggaag

SEQ ID NO: 2867156 - RNA, 19 nt, Artificial Sequence
  Description of Artificial Sequence: Synthetic oligonucleotide
accaugcucagcuccaugc

SEQ ID NO: 2867157 - RNA, 19 nt, Artificial Sequence
  Description of Artificial Sequence: Synthetic oligonucleotide
cuucucaaaagugagacug

SEQ ID NO: 2867158 - RNA, 19 nt, Artificial Sequence
  Description of Artificial Sequence: Synthetic oligonucleotide
aacacucuuguggacaaac

SEQ ID NO: 2867159 - RNA, 19 nt, Artificial Sequence
  Description of Artificial Sequence: Synthetic oligonucleotide
cuugcaguuuaaauuuugg

SEQ ID NO: 2867160 - RNA, 19 nt, Artificial Sequence
  Description of Artificial Sequence: Synthetic oligonucleotide
uggaagacauccaccaucc

SEQ ID NO: 2867161 - RNA, 19 nt, Artificial Sequence
  Description of Artificial Sequence: Synthetic oligonucleotide
cuccacaacacucuugugg

SEQ ID NO: 2867162 - RNA, 19 nt, Artificial Sequence
  Description of Artificial Sequence: Synthetic oligonucleotide
cauuacugaaggaagucag

SEQ ID NO: 2867163 - RNA, 19 nt, Artificial Sequence
  Description of Artificial Sequence: Synthetic oligonucleotide
aucagugcucuucauaaag

SEQ ID NO: 2867164 - RNA, 19 nt, Artificial Sequence
  Description of Artificial Sequence: Synthetic oligonucleotide
cacaccaucaucugggagc

SEQ ID NO: 2867165 - RNA, 19 nt, Artificial Sequence
  Description of Artificial Sequence: Synthetic oligonucleotide
agugucuuccgacacauca

SEQ ID NO: 2867166 - RNA, 19 nt, Artificial Sequence
  Description of Artificial Sequence: Synthetic oligonucleotide
gagacuguuuuccagcuug

SEQ ID NO: 2867167 - RNA, 19 nt, Artificial Sequence
  Description of Artificial Sequence: Synthetic oligonucleotide
ugaaggaagucagaacugg

SEQ ID NO: 2867168 - RNA, 19 nt, Artificial Sequence
  Description of Artificial Sequence: Synthetic oligonucleotide
uaaauuuuggaaggaaaac

SEQ ID NO: 2867169 - RNA, 19 nt, Artificial Sequence
  Description of Artificial Sequence: Synthetic oligonucleotide
ucaacaucagugcucuuca

SEQ ID NO: 2867170 - RNA, 19 nt, Artificial Sequence
  Description of Artificial Sequence: Synthetic oligonucleotide
agaggaaugcugcacacug

SEQ ID NO: 2867171 - RNA, 19 nt, Artificial Sequence
  Description of Artificial Sequence: Synthetic oligonucleotide
ugaaaagugucuuccgaca

SEQ ID NO: 2867172 - RNA, 19 nt, Artificial Sequence
  Description of Artificial Sequence: Synthetic oligonucleotide
caaacuuggacacgcacag

SEQ ID NO: 2867173 - RNA, 19 nt, Artificial Sequence
  Description of Artificial Sequence: Synthetic oligonucleotide
ucuggucugguccaggcug

SEQ ID NO: 2867174 - RNA, 19 nt, Artificial Sequence
  Description of Artificial Sequence: Synthetic oligonucleotide
ucauagggcaucaccaaca

SEQ ID NO: 2867175 - RNA, 19 nt, Artificial Sequence
  Description of Artificial Sequence: Synthetic oligonucleotide
aucacuauucauuacugaa

SEQ ID NO: 2867176 - RNA, 19 nt, Artificial Sequence
  Description of Artificial Sequence: Synthetic oligonucleotide
aagugagacuguuuuccag

SEQ ID NO: 2867177 - RNA, 19 nt, Artificial Sequence
  Description of Artificial Sequence: Synthetic oligonucleotide
ucuugcaguuuaaauuuug

SEQ ID NO: 2867178 - RNA, 19 nt, Artificial Sequence
  Description of Artificial Sequence: Synthetic oligonucleotide
aaaagugucuuccgacaca

SEQ ID NO: 2867179 - RNA, 19 nt, Artificial Sequence
  Description of Artificial Sequence: Synthetic oligonucleotide
uguggacaaacuuggacac

SEQ ID NO: 2867180 - RNA, 19 nt, Artificial Sequence
  Description of Artificial Sequence: Synthetic oligonucleotide
aaaccucaacaucagugcu

SEQ ID NO: 2867181 - RNA, 19 nt, Artificial Sequence
  Description of Artificial Sequence: Synthetic oligonucleotide
ucagaacuggaacucgagc

SEQ ID NO: 2867182 - RNA, 19 nt, Artificial Sequence
  Description of Artificial Sequence: Synthetic oligonucleotide
gaaggaaaaccucaacauc

SEQ ID NO: 2867183 - RNA, 19 nt, Artificial Sequence
  Description of Artificial Sequence: Synthetic oligonucleotide
aaagugagacuguuuucca

SEQ ID NO: 2867184 - RNA, 19 nt, Artificial Sequence
  Description of Artificial Sequence: Synthetic oligonucleotide
uggaacucgagcagggcag

SEQ ID NO: 2867185 - RNA, 19 nt, Artificial Sequence
  Description of Artificial Sequence: Synthetic oligonucleotide
uccaccauccccaacugcu

SEQ ID NO: 2867186 - RNA, 19 nt, Artificial Sequence
  Description of Artificial Sequence: Synthetic oligonucleotide
cuucauaaagucuggucug

SEQ ID NO: 2867187 - RNA, 19 nt, Artificial Sequence
  Description of Artificial Sequence: Synthetic oligonucleotide
aagacauccaccaucccca

SEQ ID NO: 2867188 - RNA, 19 nt, Artificial Sequence
  Description of Artificial Sequence: Synthetic oligonucleotide
acaucagugcucuucauaa

SEQ ID NO: 2867189 - RNA, 19 nt, Artificial Sequence
  Description of Artificial Sequence: Synthetic oligonucleotide
auucacauaggcgagguga

SEQ ID NO: 2867190 - RNA, 19 nt, Artificial Sequence
  Description of Artificial Sequence: Synthetic oligonucleotide
uccuccacaacacucuugu

SEQ ID NO: 2867191 - RNA, 19 nt, Artificial Sequence
  Description of Artificial Sequence: Synthetic oligonucleotide
acauccaccauccccaacu

SEQ ID NO: 2867192 - RNA, 19 nt, Artificial Sequence
  Description of Artificial Sequence: Synthetic oligonucleotide
aggaccaccaugcucagcu

SEQ ID NO: 2867193 - RNA, 19 nt, Artificial Sequence
  Description of Artificial Sequence: Synthetic oligonucleotide
uccucuugcaguuuaaauu

SEQ ID NO: 2867194 - RNA, 19 nt, Artificial Sequence
  Description of Artificial Sequence: Synthetic oligonucleotide
uugcaguuuaaauuuugga

SEQ ID NO: 2867195 - RNA, 19 nt, Artificial Sequence
  Description of Artificial Sequence: Synthetic oligonucleotide
ucagccuugucccugugga

SEQ ID NO: 2867196 - RNA, 19 nt, Artificial Sequence
  Description of Artificial Sequence: Synthetic oligonucleotide
aaacacggacuccauguca

SEQ ID NO: 2867197 - RNA, 19 nt, Artificial Sequence
  Description of Artificial Sequence: Synthetic oligonucleotide
gaaaagugucuuccgacac

SEQ ID NO: 2867198 - RNA, 19 nt, Artificial Sequence
  Description of Artificial Sequence: Synthetic oligonucleotide
ucuggagacauucccgaca

SEQ ID NO: 2867199 - RNA, 19 nt, Artificial Sequence
  Description of Artificial Sequence: Synthetic oligonucleotide
cuuguggacaaacuuggac

SEQ ID NO: 2867200 - RNA, 19 nt, Artificial Sequence
  Description of Artificial Sequence: Synthetic oligonucleotide
uucauaaagucuggucugg

SEQ ID NO: 2867201 - RNA, 19 nt, Artificial Sequence
  Description of Artificial Sequence: Synthetic oligonucleotide
uuuggaaggaaaaccucaa

SEQ ID NO: 2867202 - RNA, 19 nt, Artificial Sequence
  Description of Artificial Sequence: Synthetic oligonucleotide
gaggugaaaagugucuucc

SEQ ID NO: 2867203 - RNA, 19 nt, Artificial Sequence
  Description of Artificial Sequence: Synthetic oligonucleotide
ugcucuucauaaagucugg

SEQ ID NO: 2867204 - RNA, 19 nt, Artificial Sequence
  Description of Artificial Sequence: Synthetic oligonucleotide
aucaccaacaccugugccu

SEQ ID NO: 2867205 - RNA, 19 nt, Artificial Sequence
  Description of Artificial Sequence: Synthetic oligonucleotide
acuguuuuccagcuugcug

SEQ ID NO: 2867206 - RNA, 19 nt, Artificial Sequence
  Description of Artificial Sequence: Synthetic oligonucleotide
cuguuuuccagcuugcuga

SEQ ID NO: 2867207 - RNA, 19 nt, Artificial Sequence
  Description of Artificial Sequence: Synthetic oligonucleotide
gacauucccgacaagucag

SEQ ID NO: 2867208 - RNA, 19 nt, Artificial Sequence
  Description of Artificial Sequence: Synthetic oligonucleotide
ucagugcucuucauaaagu

SEQ ID NO: 2867209 - RNA, 19 nt, Artificial Sequence
  Description of Artificial Sequence: Synthetic oligonucleotide
ucauuacugaaggaaguca

SEQ ID NO: 2867210 - RNA, 19 nt, Artificial Sequence
  Description of Artificial Sequence: Synthetic oligonucleotide
cagggcagaaccuggaggc

SEQ ID NO: 2867211 - RNA, 19 nt, Artificial Sequence
  Description of Artificial Sequence: Synthetic oligonucleotide
caggaccugaugcagaggc

SEQ ID NO: 2867212 - RNA, 19 nt, Artificial Sequence
  Description of Artificial Sequence: Synthetic oligonucleotide
uaaagucuggucuggucca

SEQ ID NO: 2867213 - RNA, 19 nt, Artificial Sequence
  Description of Artificial Sequence: Synthetic oligonucleotide
aagucagaacuggaacucg

SEQ ID NO: 2867214 - RNA, 19 nt, Artificial Sequence
  Description of Artificial Sequence: Synthetic oligonucleotide
cuugcugagguccacacca

SEQ ID NO: 2867215 - RNA, 19 nt, Artificial Sequence
  Description of Artificial Sequence: Synthetic oligonucleotide
ugugccuguacuucauuca

SEQ ID NO: 2867216 - RNA, 19 nt, Artificial Sequence
  Description of Artificial Sequence: Synthetic oligonucleotide
acauaggcgaggugaaaag

SEQ ID NO: 2867217 - RNA, 19 nt, Artificial Sequence
  Description of Artificial Sequence: Synthetic oligonucleotide
uaacuucucaaaagugaga

SEQ ID NO: 2867218 - RNA, 19 nt, Artificial Sequence
  Description of Artificial Sequence: Synthetic oligonucleotide
agacauucccgacaaguca

SEQ ID NO: 2867219 - RNA, 19 nt, Artificial Sequence
  Description of Artificial Sequence: Synthetic oligonucleotide
ucuuccgacacaucaucug

SEQ ID NO: 2867220 - RNA, 19 nt, Artificial Sequence
  Description of Artificial Sequence: Synthetic oligonucleotide
gcuguuaacuucucaaaag

SEQ ID NO: 2867221 - RNA, 19 nt, Artificial Sequence
  Description of Artificial Sequence: Synthetic oligonucleotide
cuuccgacacaucaucugc

SEQ ID NO: 2867222 - RNA, 19 nt, Artificial Sequence
  Description of Artificial Sequence: Synthetic oligonucleotide
cucucuggagacauucccg

SEQ ID NO: 2867223 - RNA, 19 nt, Artificial Sequence
  Description of Artificial Sequence: Synthetic oligonucleotide
ucugggagcaggaccacca

SEQ ID NO: 2867224 - RNA, 19 nt, Artificial Sequence
  Description of Artificial Sequence: Synthetic oligonucleotide
auuuuggaaggaaaaccuc

SEQ ID NO: 2867225 - RNA, 19 nt, Artificial Sequence
  Description of Artificial Sequence: Synthetic oligonucleotide
cuucauucacauaggcgag

SEQ ID NO: 2867226 - RNA, 19 nt, Artificial Sequence
  Description of Artificial Sequence: Synthetic oligonucleotide
gugaaaagugucuuccgac

SEQ ID NO: 2867227 - RNA, 19 nt, Artificial Sequence
  Description of Artificial Sequence: Synthetic oligonucleotide
ucucuggagacauucccga

SEQ ID NO: 2867228 - RNA, 19 nt, Artificial Sequence
  Description of Artificial Sequence: Synthetic oligonucleotide
aaagugucuuccgacacau

SEQ ID NO: 2867229 - RNA, 19 nt, Artificial Sequence
  Description of Artificial Sequence: Synthetic oligonucleotide
uuacugaaggaagucagaa

SEQ ID NO: 2867230 - RNA, 19 nt, Artificial Sequence
  Description of Artificial Sequence: Synthetic oligonucleotide
auagggcaucaccaacacc

SEQ ID NO: 2867231 - RNA, 19 nt, Artificial Sequence
  Description of Artificial Sequence: Synthetic oligonucleotide
cagaacuggaacucgagca

SEQ ID NO: 2867232 - RNA, 19 nt, Artificial Sequence
  Description of Artificial Sequence: Synthetic oligonucleotide
aggugaaaagugucuuccg

SEQ ID NO: 2867233 - RNA, 19 nt, Artificial Sequence
  Description of Artificial Sequence: Synthetic oligonucleotide
aaccucaacaucagugcuc

SEQ ID NO: 2867234 - RNA, 19 nt, Artificial Sequence
  Description of Artificial Sequence: Synthetic oligonucleotide
guacuucauucacauaggc

SEQ ID NO: 2867235 - RNA, 19 nt, Artificial Sequence
  Description of Artificial Sequence: Synthetic oligonucleotide
cugcacacuggcuugcucc

SEQ ID NO: 2867236 - RNA, 19 nt, Artificial Sequence
  Description of Artificial Sequence: Synthetic oligonucleotide
gacaaacuuggacacgcac

SEQ ID NO: 2867237 - RNA, 19 nt, Artificial Sequence
  Description of Artificial Sequence: Synthetic oligonucleotide
cucuucauaaagucugguc

SEQ ID NO: 2867238 - RNA, 19 nt, Artificial Sequence
  Description of Artificial Sequence: Synthetic oligonucleotide
ugucuuccgacacaucauc

SEQ ID NO: 2867239 - RNA, 19 nt, Artificial Sequence
  Description of Artificial Sequence: Synthetic oligonucleotide
uucauucacauaggcgagg

SEQ ID NO: 2867240 - RNA, 19 nt, Artificial Sequence
  Description of Artificial Sequence: Synthetic oligonucleotide
uaggcgaggugaaaagugu

SEQ ID NO: 2867241 - RNA, 19 nt, Artificial Sequence
  Description of Artificial Sequence: Synthetic oligonucleotide
agcaggaccaccaugcuca

SEQ ID NO: 2867242 - RNA, 19 nt, Artificial Sequence
  Description of Artificial Sequence: Synthetic oligonucleotide
uucccgacaagucagccuu

SEQ ID NO: 2867243 - RNA, 19 nt, Artificial Sequence
  Description of Artificial Sequence: Synthetic oligonucleotide
accaucaucugggagcagg

SEQ ID NO: 2867244 - RNA, 19 nt, Artificial Sequence
  Description of Artificial Sequence: Synthetic oligonucleotide
acucuuguggacaaacuug

SEQ ID NO: 2867245 - RNA, 19 nt, Artificial Sequence
  Description of Artificial Sequence: Synthetic oligonucleotide
cuauucauuacugaaggaa

SEQ ID NO: 2867246 - RNA, 19 nt, Artificial Sequence
  Description of Artificial Sequence: Synthetic oligonucleotide
gucccuguggaagacaucc

SEQ ID NO: 2867247 - RNA, 19 nt, Artificial Sequence
  Description of Artificial Sequence: Synthetic oligonucleotide
uacugaaggaagucagaac

SEQ ID NO: 2867248 - RNA, 19 nt, Artificial Sequence
  Description of Artificial Sequence: Synthetic oligonucleotide
uucucaaaagugagacugu

SEQ ID NO: 2867249 - RNA, 19 nt, Artificial Sequence
  Description of Artificial Sequence: Synthetic oligonucleotide
gaagucagaacuggaacuc

SEQ ID NO: 2867250 - RNA, 19 nt, Artificial Sequence
  Description of Artificial Sequence: Synthetic oligonucleotide
ugcugaaacacggacucca

SEQ ID NO: 2867251 - RNA, 19 nt, Artificial Sequence
  Description of Artificial Sequence: Synthetic oligonucleotide
uucauuacugaaggaaguc

SEQ ID NO: 2867252 - RNA, 19 nt, Artificial Sequence
  Description of Artificial Sequence: Synthetic oligonucleotide
acuauucauuacugaagga

SEQ ID NO: 2867253 - RNA, 19 nt, Artificial Sequence
  Description of Artificial Sequence: Synthetic oligonucleotide
aacucgagcagggcagaac

SEQ ID NO: 2867254 - RNA, 19 nt, Artificial Sequence
  Description of Artificial Sequence: Synthetic oligonucleotide
uccaugcccucauagggca

SEQ ID NO: 2867255 - RNA, 19 nt, Artificial Sequence
  Description of Artificial Sequence: Synthetic oligonucleotide
acaggucucucucuggaga

SEQ ID NO: 2867256 - RNA, 19 nt, Artificial Sequence
  Description of Artificial Sequence: Synthetic oligonucleotide
acacgcacaggucucucuc

SEQ ID NO: 2867257 - RNA, 19 nt, Artificial Sequence
  Description of Artificial Sequence: Synthetic oligonucleotide
uucacauaggcgaggugaa

SEQ ID NO: 2867258 - RNA, 19 nt, Artificial Sequence
  Description of Artificial Sequence: Synthetic oligonucleotide
guggaagacauccaccauc

SEQ ID NO: 2867259 - RNA, 19 nt, Artificial Sequence
  Description of Artificial Sequence: Synthetic oligonucleotide
uccccaacugcugaaacac

SEQ ID NO: 2867260 - RNA, 19 nt, Artificial Sequence
  Description of Artificial Sequence: Synthetic oligonucleotide
cauaaagucuggucugguc

SEQ ID NO: 2867261 - RNA, 19 nt, Artificial Sequence
  Description of Artificial Sequence: Synthetic oligonucleotide
gcuccaugcccucauaggg

SEQ ID NO: 2867262 - RNA, 19 nt, Artificial Sequence
  Description of Artificial Sequence: Synthetic oligonucleotide
caaaagugagacuguuuuc

SEQ ID NO: 2867263 - RNA, 19 nt, Artificial Sequence
  Description of Artificial Sequence: Synthetic oligonucleotide
ucaccaacaccugugccug

SEQ ID NO: 2867264 - RNA, 19 nt, Artificial Sequence
  Description of Artificial Sequence: Synthetic oligonucleotide
aacugcugaaacacggacu

SEQ ID NO: 2867265 - RNA, 19 nt, Artificial Sequence
  Description of Artificial Sequence: Synthetic oligonucleotide
aacaccugugccuguacuu

SEQ ID NO: 2867266 - RNA, 19 nt, Artificial Sequence
  Description of Artificial Sequence: Synthetic oligonucleotide
aguuuaaauuuuggaagga

SEQ ID NO: 2867267 - RNA, 19 nt, Artificial Sequence
  Description of Artificial Sequence: Synthetic oligonucleotide
caugcucagcuccaugccc

SEQ ID NO: 2867268 - RNA, 19 nt, Artificial Sequence
  Description of Artificial Sequence: Synthetic oligonucleotide
auucauuacugaaggaagu

SEQ ID NO: 2867269 - RNA, 19 nt, Artificial Sequence
  Description of Artificial Sequence: Synthetic oligonucleotide
auaggcgaggugaaaagug

SEQ ID NO: 2867270 - RNA, 19 nt, Artificial Sequence
  Description of Artificial Sequence: Synthetic oligonucleotide
uuccgacacaucaucugca

SEQ ID NO: 2867271 - RNA, 19 nt, Artificial Sequence
  Description of Artificial Sequence: Synthetic oligonucleotide
aaggaagucagaacuggaa

SEQ ID NO: 2867272 - RNA, 19 nt, Artificial Sequence
  Description of Artificial Sequence: Synthetic oligonucleotide
cuguggaagacauccacca

SEQ ID NO: 2867273 - RNA, 19 nt, Artificial Sequence
  Description of Artificial Sequence: Synthetic oligonucleotide
gaccaccaugcucagcucc

SEQ ID NO: 2867274 - RNA, 19 nt, Artificial Sequence
  Description of Artificial Sequence: Synthetic oligonucleotide
acaaacuuggacacgcaca

SEQ ID NO: 2867275 - RNA, 19 nt, Artificial Sequence
  Description of Artificial Sequence: Synthetic oligonucleotide
agaggccacagaggaaugc

SEQ ID NO: 2867276 - RNA, 19 nt, Artificial Sequence
  Description of Artificial Sequence: Synthetic oligonucleotide
caacugcugaaacacggac

SEQ ID NO: 2867277 - RNA, 19 nt, Artificial Sequence
  Description of Artificial Sequence: Synthetic oligonucleotide
cucaacaucagugcucuuc

SEQ ID NO: 2867278 - RNA, 19 nt, Artificial Sequence
  Description of Artificial Sequence: Synthetic oligonucleotide
cuccaugcccucauagggc

SEQ ID NO: 2867279 - RNA, 19 nt, Artificial Sequence
  Description of Artificial Sequence: Synthetic oligonucleotide
uuccagcuugcugaggucc

SEQ ID NO: 2867280 - RNA, 19 nt, Artificial Sequence
  Description of Artificial Sequence: Synthetic oligonucleotide
auaauccucuugcaguuua

SEQ ID NO: 2867281 - RNA, 19 nt, Artificial Sequence
  Description of Artificial Sequence: Synthetic oligonucleotide
auccaccauccccaacugc

SEQ ID NO: 2867282 - RNA, 19 nt, Artificial Sequence
  Description of Artificial Sequence: Synthetic oligonucleotide
ucauucacauaggcgaggu

SEQ ID NO: 2867283 - RNA, 19 nt, Artificial Sequence
  Description of Artificial Sequence: Synthetic oligonucleotide
gacuccaugucauaauccu

SEQ ID NO: 2867284 - RNA, 19 nt, Artificial Sequence
  Description of Artificial Sequence: Synthetic oligonucleotide
aaacuuggacacgcacagg

SEQ ID NO: 2867285 - RNA, 19 nt, Artificial Sequence
  Description of Artificial Sequence: Synthetic oligonucleotide
ucuuguggacaaacuugga

SEQ ID NO: 2867286 - RNA, 19 nt, Artificial Sequence
  Description of Artificial Sequence: Synthetic oligonucleotide
gaaacacggacuccauguc

SEQ ID NO: 2867287 - RNA, 19 nt, Artificial Sequence
  Description of Artificial Sequence: Synthetic oligonucleotide
acuucucaaaagugagacu

SEQ ID NO: 2867288 - RNA, 19 nt, Artificial Sequence
  Description of Artificial Sequence: Synthetic oligonucleotide
cauagggcaucaccaacac

SEQ ID NO: 2867289 - RNA, 19 nt, Artificial Sequence
  Description of Artificial Sequence: Synthetic oligonucleotide
cucauagggcaucaccaac

SEQ ID NO: 2867290 - RNA, 19 nt, Artificial Sequence
  Description of Artificial Sequence: Synthetic oligonucleotide
acaccugugccuguacuuc

SEQ ID NO: 2867291 - RNA, 19 nt, Artificial Sequence
  Description of Artificial Sequence: Synthetic oligonucleotide
ugccuguacuucauucaca

SEQ ID NO: 2867292 - RNA, 19 nt, Artificial Sequence
  Description of Artificial Sequence: Synthetic oligonucleotide
guuuaaauuuuggaaggaa

SEQ ID NO: 2867293 - RNA, 19 nt, Artificial Sequence
  Description of Artificial Sequence: Synthetic oligonucleotide
acaacacucuuguggacaa

SEQ ID NO: 2867294 - RNA, 19 nt, Artificial Sequence
  Description of Artificial Sequence: Synthetic oligonucleotide
uccgacacaucaucugcac

SEQ ID NO: 2867295 - RNA, 19 nt, Artificial Sequence
  Description of Artificial Sequence: Synthetic oligonucleotide
aacacggacuccaugucau

SEQ ID NO: 2867296 - RNA, 19 nt, Artificial Sequence
  Description of Artificial Sequence: Synthetic oligonucleotide
acuggcuugcuccuccaca

SEQ ID NO: 2867297 - RNA, 19 nt, Artificial Sequence
  Description of Artificial Sequence: Synthetic oligonucleotide
auccucuugcaguuuaaau

SEQ ID NO: 2867298 - RNA, 19 nt, Artificial Sequence
  Description of Artificial Sequence: Synthetic oligonucleotide
auucccgacaagucagccu

SEQ ID NO: 2867299 - RNA, 19 nt, Artificial Sequence
  Description of Artificial Sequence: Synthetic oligonucleotide
gaggaaugcugcacacugg

SEQ ID NO: 2867300 - RNA, 19 nt, Artificial Sequence
  Description of Artificial Sequence: Synthetic oligonucleotide
aggaaaaccucaacaucag

SEQ ID NO: 2867301 - RNA, 19 nt, Artificial Sequence
  Description of Artificial Sequence: Synthetic oligonucleotide
agccuugucccuguggaag

SEQ ID NO: 2867302 - RNA, 19 nt, Artificial Sequence
  Description of Artificial Sequence: Synthetic oligonucleotide
accucaacaucagugcucu

SEQ ID NO: 2867303 - RNA, 19 nt, Artificial Sequence
  Description of Artificial Sequence: Synthetic oligonucleotide
aaagucuggucugguccag

SEQ ID NO: 2867304 - RNA, 19 nt, Artificial Sequence
  Description of Artificial Sequence: Synthetic oligonucleotide
cugugccuguacuucauuc

SEQ ID NO: 2867305 - RNA, 19 nt, Artificial Sequence
  Description of Artificial Sequence: Synthetic oligonucleotide
uguggaagacauccaccau

SEQ ID NO: 2867306 - RNA, 19 nt, Artificial Sequence
  Description of Artificial Sequence: Synthetic oligonucleotide
cuguuaacuucucaaaagu

SEQ ID NO: 2867307 - RNA, 19 nt, Artificial Sequence
  Description of Artificial Sequence: Synthetic oligonucleotide
ugagguccacaccaucauc

SEQ ID NO: 2867308 - RNA, 19 nt, Artificial Sequence
  Description of Artificial Sequence: Synthetic oligonucleotide
auccccaacugcugaaaca

SEQ ID NO: 2867309 - RNA, 19 nt, Artificial Sequence
  Description of Artificial Sequence: Synthetic oligonucleotide
cacacuggcuugcuccucc

SEQ ID NO: 2867310 - RNA, 19 nt, Artificial Sequence
  Description of Artificial Sequence: Synthetic oligonucleotide
ugggagcaggaccaccaug

SEQ ID NO: 2867311 - RNA, 19 nt, Artificial Sequence
  Description of Artificial Sequence: Synthetic oligonucleotide
auuacugaaggaagucaga

SEQ ID NO: 2867312 - RNA, 19 nt, Artificial Sequence
  Description of Artificial Sequence: Synthetic oligonucleotide
ggugaaaagugucuuccga

SEQ ID NO: 2867313 - RNA, 19 nt, Artificial Sequence
  Description of Artificial Sequence: Synthetic oligonucleotide
uuggacacgcacaggucuc

SEQ ID NO: 2867314 - RNA, 19 nt, Artificial Sequence
  Description of Artificial Sequence: Synthetic oligonucleotide
caucacuauucauuacuga

SEQ ID NO: 2867315 - RNA, 19 nt, Artificial Sequence
  Description of Artificial Sequence: Synthetic oligonucleotide
gugccuguacuucauucac

SEQ ID NO: 2867316 - RNA, 19 nt, Artificial Sequence
  Description of Artificial Sequence: Synthetic oligonucleotide
acuccaugucauaauccuc

SEQ ID NO: 2867317 - RNA, 19 nt, Artificial Sequence
  Description of Artificial Sequence: Synthetic oligonucleotide
uaauccucuugcaguuuaa

SEQ ID NO: 2867318 - RNA, 19 nt, Artificial Sequence
  Description of Artificial Sequence: Synthetic oligonucleotide
aggcuguuaacuucucaaa

SEQ ID NO: 2867319 - RNA, 19 nt, Artificial Sequence
  Description of Artificial Sequence: Synthetic oligonucleotide
aauccucuugcaguuuaaa

SEQ ID NO: 2867320 - RNA, 19 nt, Artificial Sequence
  Description of Artificial Sequence: Synthetic oligonucleotide
agcagggcagaaccuggag

SEQ ID NO: 2867321 - RNA, 19 nt, Artificial Sequence
  Description of Artificial Sequence: Synthetic oligonucleotide
caggcuguuaacuucucaa

SEQ ID NO: 2867322 - RNA, 19 nt, Artificial Sequence
  Description of Artificial Sequence: Synthetic oligonucleotide
cuccaugucauaauccucu

SEQ ID NO: 2867323 - RNA, 19 nt, Artificial Sequence
  Description of Artificial Sequence: Synthetic oligonucleotide
cugaaacacggacuccaug

SEQ ID NO: 2867324 - RNA, 19 nt, Artificial Sequence
  Description of Artificial Sequence: Synthetic oligonucleotide
ucucaaaagugagacuguu

SEQ ID NO: 2867325 - RNA, 19 nt, Artificial Sequence
  Description of Artificial Sequence: Synthetic oligonucleotide
acauucccgacaagucagc

SEQ ID NO: 2867326 - RNA, 19 nt, Artificial Sequence
  Description of Artificial Sequence: Synthetic oligonucleotide
gcagggcagaaccuggagg

SEQ ID NO: 2867327 - RNA, 19 nt, Artificial Sequence
  Description of Artificial Sequence: Synthetic oligonucleotide
caggucucucucuggagac

SEQ ID NO: 2867328 - RNA, 19 nt, Artificial Sequence
  Description of Artificial Sequence: Synthetic oligonucleotide
uccagcuugcugaggucca

SEQ ID NO: 2867329 - RNA, 19 nt, Artificial Sequence
  Description of Artificial Sequence: Synthetic oligonucleotide
ucauaaagucuggucuggu

SEQ ID NO: 2867330 - RNA, 19 nt, Artificial Sequence
  Description of Artificial Sequence: Synthetic oligonucleotide
gaaugcugcacacuggcuu

SEQ ID NO: 2867331 - RNA, 19 nt, Artificial Sequence
  Description of Artificial Sequence: Synthetic oligonucleotide
ugcacacuggcuugcuccu

SEQ ID NO: 2867332 - RNA, 19 nt, Artificial Sequence
  Description of Artificial Sequence: Synthetic oligonucleotide
gucagccuugucccugugg

SEQ ID NO: 2867333 - RNA, 19 nt, Artificial Sequence
  Description of Artificial Sequence: Synthetic oligonucleotide
gguccacaccaucaucugg

SEQ ID NO: 2867334 - RNA, 19 nt, Artificial Sequence
  Description of Artificial Sequence: Synthetic oligonucleotide
gaaggaagucagaacugga

SEQ ID NO: 2867335 - RNA, 19 nt, Artificial Sequence
  Description of Artificial Sequence: Synthetic oligonucleotide
gucagaacuggaacucgag

SEQ ID NO: 2867336 - RNA, 19 nt, Artificial Sequence
  Description of Artificial Sequence: Synthetic oligonucleotide
cgacaagucagccuugucc

SEQ ID NO: 2867337 - RNA, 19 nt, Artificial Sequence
  Description of Artificial Sequence: Synthetic oligonucleotide
gggagcaggaccaccaugc

SEQ ID NO: 2867338 - RNA, 19 nt, Artificial Sequence
  Description of Artificial Sequence: Synthetic oligonucleotide
aucugggagcaggaccacc

SEQ ID NO: 2867339 - RNA, 19 nt, Artificial Sequence
  Description of Artificial Sequence: Synthetic oligonucleotide
ugguccaggcuguuaacuu

SEQ ID NO: 2867340 - RNA, 19 nt, Artificial Sequence
  Description of Artificial Sequence: Synthetic oligonucleotide
ggaagucagaacuggaacu

SEQ ID NO: 2867341 - RNA, 19 nt, Artificial Sequence
  Description of Artificial Sequence: Synthetic oligonucleotide
ccuguggaagacauccacc

SEQ ID NO: 2867342 - RNA, 19 nt, Artificial Sequence
  Description of Artificial Sequence: Synthetic oligonucleotide
cauccccaacugcugaaac

SEQ ID NO: 2867343 - RNA, 19 nt, Artificial Sequence
  Description of Artificial Sequence: Synthetic oligonucleotide
aggaccugaugcagaggcc

SEQ ID NO: 2867344 - RNA, 19 nt, Artificial Sequence
  Description of Artificial Sequence: Synthetic oligonucleotide
acaagucagccuugucccu

SEQ ID NO: 2867345 - RNA, 19 nt, Artificial Sequence
  Description of Artificial Sequence: Synthetic oligonucleotide
cauucccgacaagucagcc

SEQ ID NO: 2867346 - RNA, 19 nt, Artificial Sequence
  Description of Artificial Sequence: Synthetic oligonucleotide
gagguccacaccaucaucu

SEQ ID NO: 2867347 - RNA, 19 nt, Artificial Sequence
  Description of Artificial Sequence: Synthetic oligonucleotide
cacaacacucuuguggaca

SEQ ID NO: 2867348 - RNA, 19 nt, Artificial Sequence
  Description of Artificial Sequence: Synthetic oligonucleotide
ucugguccaggcuguuaac

SEQ ID NO: 2867349 - RNA, 19 nt, Artificial Sequence
  Description of Artificial Sequence: Synthetic oligonucleotide
acgcacaggucucucucug

SEQ ID NO: 2867350 - RNA, 19 nt, Artificial Sequence
  Description of Artificial Sequence: Synthetic oligonucleotide
cgacacaucaucugcacug

SEQ ID NO: 2867351 - RNA, 19 nt, Artificial Sequence
  Description of Artificial Sequence: Synthetic oligonucleotide
gagcaggaccaccaugcuc

SEQ ID NO: 2867352 - RNA, 19 nt, Artificial Sequence
  Description of Artificial Sequence: Synthetic oligonucleotide
guggacaaacuuggacacg

SEQ ID NO: 2867353 - RNA, 19 nt, Artificial Sequence
  Description of Artificial Sequence: Synthetic oligonucleotide
aggcgaggugaaaaguguc

SEQ ID NO: 2867354 - RNA, 19 nt, Artificial Sequence
  Description of Artificial Sequence: Synthetic oligonucleotide
uuuccagcuugcugagguc

SEQ ID NO: 2867355 - RNA, 19 nt, Artificial Sequence
  Description of Artificial Sequence: Synthetic oligonucleotide
ugcugagguccacaccauc

SEQ ID NO: 2867356 - RNA, 19 nt, Artificial Sequence
  Description of Artificial Sequence: Synthetic oligonucleotide
cuggagacauucccgacaa

SEQ ID NO: 2867357 - RNA, 19 nt, Artificial Sequence
  Description of Artificial Sequence: Synthetic oligonucleotide
ucccuguggaagacaucca

SEQ ID NO: 2867358 - RNA, 19 nt, Artificial Sequence
  Description of Artificial Sequence: Synthetic oligonucleotide
agucagaacuggaacucga

SEQ ID NO: 2867359 - RNA, 19 nt, Artificial Sequence
  Description of Artificial Sequence: Synthetic oligonucleotide
ggcuguuaacuucucaaaa

SEQ ID NO: 2867360 - RNA, 19 nt, Artificial Sequence
  Description of Artificial Sequence: Synthetic oligonucleotide
ugagacuguuuuccagcuu

SEQ ID NO: 2867361 - RNA, 19 nt, Artificial Sequence
  Description of Artificial Sequence: Synthetic oligonucleotide
uggagacauucccgacaag

SEQ ID NO: 2867362 - RNA, 19 nt, Artificial Sequence
  Description of Artificial Sequence: Synthetic oligonucleotide
cucuggagacauucccgac

SEQ ID NO: 2867363 - RNA, 19 nt, Artificial Sequence
  Description of Artificial Sequence: Synthetic oligonucleotide
augcugcacacuggcuugc

SEQ ID NO: 2867364 - RNA, 19 nt, Artificial Sequence
  Description of Artificial Sequence: Synthetic oligonucleotide
ggcaucaccaacaccugug

SEQ ID NO: 2867365 - RNA, 19 nt, Artificial Sequence
  Description of Artificial Sequence: Synthetic oligonucleotide
acggacuccaugucauaau

SEQ ID NO: 2867366 - RNA, 19 nt, Artificial Sequence
  Description of Artificial Sequence: Synthetic oligonucleotide
ugcagaggccacagaggaa

SEQ ID NO: 2867367 - RNA, 19 nt, Artificial Sequence
  Description of Artificial Sequence: Synthetic oligonucleotide
cauccaccauccccaacug

SEQ ID NO: 2867368 - RNA, 19 nt, Artificial Sequence
  Description of Artificial Sequence: Synthetic oligonucleotide
uccaugucauaauccucuu

SEQ ID NO: 2867369 - RNA, 19 nt, Artificial Sequence
  Description of Artificial Sequence: Synthetic oligonucleotide
cauucacauaggcgaggug

SEQ ID NO: 2867370 - RNA, 19 nt, Artificial Sequence
  Description of Artificial Sequence: Synthetic oligonucleotide
ggacuccaugucauaaucc

SEQ ID NO: 2867371 - RNA, 19 nt, Artificial Sequence
  Description of Artificial Sequence: Synthetic oligonucleotide
guuuuccagcuugcugagg

SEQ ID NO: 2867372 - RNA, 19 nt, Artificial Sequence
  Description of Artificial Sequence: Synthetic oligonucleotide
cacauaggcgaggugaaaa

SEQ ID NO: 2867373 - RNA, 19 nt, Artificial Sequence
  Description of Artificial Sequence: Synthetic oligonucleotide
cuccuccacaacacucuug

SEQ ID NO: 2867374 - RNA, 19 nt, Artificial Sequence
  Description of Artificial Sequence: Synthetic oligonucleotide
aagugucuuccgacacauc

SEQ ID NO: 2867375 - RNA, 19 nt, Artificial Sequence
  Description of Artificial Sequence: Synthetic oligonucleotide
gguccaggcuguuaacuuc

SEQ ID NO: 2867376 - RNA, 19 nt, Artificial Sequence
  Description of Artificial Sequence: Synthetic oligonucleotide
cuggcuugcuccuccacaa

SEQ ID NO: 2867377 - RNA, 19 nt, Artificial Sequence
  Description of Artificial Sequence: Synthetic oligonucleotide
augcucagcuccaugcccu

SEQ ID NO: 2867378 - RNA, 19 nt, Artificial Sequence
  Description of Artificial Sequence: Synthetic oligonucleotide
gacauccaccauccccaac

SEQ ID NO: 2867379 - RNA, 19 nt, Artificial Sequence
  Description of Artificial Sequence: Synthetic oligonucleotide
ggccacagaggaaugcugc

SEQ ID NO: 2867380 - RNA, 19 nt, Artificial Sequence
  Description of Artificial Sequence: Synthetic oligonucleotide
acacucuuguggacaaacu

SEQ ID NO: 2867381 - RNA, 19 nt, Artificial Sequence
  Description of Artificial Sequence: Synthetic oligonucleotide
gugagacuguuuuccagcu

SEQ ID NO: 2867382 - RNA, 19 nt, Artificial Sequence
  Description of Artificial Sequence: Synthetic oligonucleotide
uggcuugcuccuccacaac

SEQ ID NO: 2867383 - RNA, 19 nt, Artificial Sequence
  Description of Artificial Sequence: Synthetic oligonucleotide
ggagacauucccgacaagu

SEQ ID NO: 2867384 - RNA, 19 nt, Artificial Sequence
  Description of Artificial Sequence: Synthetic oligonucleotide
ucccgacaagucagccuug

SEQ ID NO: 2867385 - RNA, 19 nt, Artificial Sequence
  Description of Artificial Sequence: Synthetic oligonucleotide
accauccccaacugcugaa

SEQ ID NO: 2867386 - RNA, 19 nt, Artificial Sequence
  Description of Artificial Sequence: Synthetic oligonucleotide
ucacauaggcgaggugaaa

SEQ ID NO: 2867387 - RNA, 19 nt, Artificial Sequence
  Description of Artificial Sequence: Synthetic oligonucleotide
cccucauagggcaucacca

SEQ ID NO: 2867388 - RNA, 19 nt, Artificial Sequence
  Description of Artificial Sequence: Synthetic oligonucleotide
caucaucugggagcaggac

SEQ ID NO: 2867389 - RNA, 19 nt, Artificial Sequence
  Description of Artificial Sequence: Synthetic oligonucleotide
uccaggcuguuaacuucuc

SEQ ID NO: 2867390 - RNA, 19 nt, Artificial Sequence
  Description of Artificial Sequence: Synthetic oligonucleotide
ggcuugcuccuccacaaca

SEQ ID NO: 2867391 - RNA, 19 nt, Artificial Sequence
  Description of Artificial Sequence: Synthetic oligonucleotide
cagaggccacagaggaaug

SEQ ID NO: 2867392 - RNA, 19 nt, Artificial Sequence
  Description of Artificial Sequence: Synthetic oligonucleotide
uggacacgcacaggucucu

SEQ ID NO: 2867393 - RNA, 19 nt, Artificial Sequence
  Description of Artificial Sequence: Synthetic oligonucleotide
ggaccugaugcagaggcca

SEQ ID NO: 2867394 - RNA, 19 nt, Artificial Sequence
  Description of Artificial Sequence: Synthetic oligonucleotide
caugcccucauagggcauc

SEQ ID NO: 2867395 - RNA, 19 nt, Artificial Sequence
  Description of Artificial Sequence: Synthetic oligonucleotide
ggcagaaccuggaggcagg

SEQ ID NO: 2867396 - RNA, 19 nt, Artificial Sequence
  Description of Artificial Sequence: Synthetic oligonucleotide
accaccaugcucagcucca

SEQ ID NO: 2867397 - RNA, 19 nt, Artificial Sequence
  Description of Artificial Sequence: Synthetic oligonucleotide
cugcugaaacacggacucc

SEQ ID NO: 2867398 - RNA, 19 nt, Artificial Sequence
  Description of Artificial Sequence: Synthetic oligonucleotide
gaccugaugcagaggccac

SEQ ID NO: 2867399 - RNA, 19 nt, Artificial Sequence
  Description of Artificial Sequence: Synthetic oligonucleotide
gcugagguccacaccauca

SEQ ID NO: 2867400 - RNA, 19 nt, Artificial Sequence
  Description of Artificial Sequence: Synthetic oligonucleotide
caucagugcucuucauaaa

SEQ ID NO: 2867401 - RNA, 19 nt, Artificial Sequence
  Description of Artificial Sequence: Synthetic oligonucleotide
cccuguggaagacauccac

SEQ ID NO: 2867402 - RNA, 19 nt, Artificial Sequence
  Description of Artificial Sequence: Synthetic oligonucleotide
agacauccaccauccccaa

SEQ ID NO: 2867403 - RNA, 19 nt, Artificial Sequence
  Description of Artificial Sequence: Synthetic oligonucleotide
ccaugcucagcuccaugcc

SEQ ID NO: 2867404 - RNA, 19 nt, Artificial Sequence
  Description of Artificial Sequence: Synthetic oligonucleotide
aggccacagaggaaugcug

SEQ ID NO: 2867405 - RNA, 19 nt, Artificial Sequence
  Description of Artificial Sequence: Synthetic oligonucleotide
caccaugcucagcuccaug

SEQ ID NO: 2867406 - RNA, 19 nt, Artificial Sequence
  Description of Artificial Sequence: Synthetic oligonucleotide
caccugugccuguacuuca

SEQ ID NO: 2867407 - RNA, 19 nt, Artificial Sequence
  Description of Artificial Sequence: Synthetic oligonucleotide
gaggccacagaggaaugcu

SEQ ID NO: 2867408 - RNA, 19 nt, Artificial Sequence
  Description of Artificial Sequence: Synthetic oligonucleotide
gggcagaaccuggaggcag

SEQ ID NO: 2867409 - RNA, 19 nt, Artificial Sequence
  Description of Artificial Sequence: Synthetic oligonucleotide
ugcucagcuccaugcccuc

SEQ ID NO: 2867410 - RNA, 19 nt, Artificial Sequence
  Description of Artificial Sequence: Synthetic oligonucleotide
gacacgcacaggucucucu

SEQ ID NO: 2867411 - RNA, 19 nt, Artificial Sequence
  Description of Artificial Sequence: Synthetic oligonucleotide
ggaagacauccaccauccc

SEQ ID NO: 2867412 - RNA, 19 nt, Artificial Sequence
  Description of Artificial Sequence: Synthetic oligonucleotide
ccaugucauaauccucuug

SEQ ID NO: 2867413 - RNA, 19 nt, Artificial Sequence
  Description of Artificial Sequence: Synthetic oligonucleotide
cacucuuguggacaaacuu

SEQ ID NO: 2867414 - RNA, 19 nt, Artificial Sequence
  Description of Artificial Sequence: Synthetic oligonucleotide
ccugaugcagaggccacag

SEQ ID NO: 2867415 - RNA, 19 nt, Artificial Sequence
  Description of Artificial Sequence: Synthetic oligonucleotide
caccauccccaacugcuga

SEQ ID NO: 2867416 - RNA, 19 nt, Artificial Sequence
  Description of Artificial Sequence: Synthetic oligonucleotide
ccucuugcaguuuaaauuu

SEQ ID NO: 2867417 - RNA, 19 nt, Artificial Sequence
  Description of Artificial Sequence: Synthetic oligonucleotide
gcuugcuccuccacaacac

SEQ ID NO: 2867418 - RNA, 19 nt, Artificial Sequence
  Description of Artificial Sequence: Synthetic oligonucleotide
cucaaaagugagacuguuu

SEQ ID NO: 2867419 - RNA, 19 nt, Artificial Sequence
  Description of Artificial Sequence: Synthetic oligonucleotide
accugaugcagaggccaca

SEQ ID NO: 2867420 - RNA, 19 nt, Artificial Sequence
  Description of Artificial Sequence: Synthetic oligonucleotide
cauaggcgaggugaaaagu

SEQ ID NO: 2867421 - RNA, 19 nt, Artificial Sequence
  Description of Artificial Sequence: Synthetic oligonucleotide
cacggacuccaugucauaa

SEQ ID NO: 2867422 - RNA, 19 nt, Artificial Sequence
  Description of Artificial Sequence: Synthetic oligonucleotide
gccuguacuucauucacau

SEQ ID NO: 2867423 - RNA, 19 nt, Artificial Sequence
  Description of Artificial Sequence: Synthetic oligonucleotide
ccccaacugcugaaacacg

SEQ ID NO: 2867424 - RNA, 19 nt, Artificial Sequence
  Description of Artificial Sequence: Synthetic oligonucleotide
aggucucucucuggagaca

SEQ ID NO: 2867425 - RNA, 19 nt, Artificial Sequence
  Description of Artificial Sequence: Synthetic oligonucleotide
cuugucccuguggaagaca

SEQ ID NO: 2867426 - RNA, 19 nt, Artificial Sequence
  Description of Artificial Sequence: Synthetic oligonucleotide
cacuggcuugcuccuccac

SEQ ID NO: 2867427 - RNA, 19 nt, Artificial Sequence
  Description of Artificial Sequence: Synthetic oligonucleotide
acacggacuccaugucaua

SEQ ID NO: 2867428 - RNA, 19 nt, Artificial Sequence
  Description of Artificial Sequence: Synthetic oligonucleotide
ugcugcacacuggcuugcu

SEQ ID NO: 2867429 - RNA, 19 nt, Artificial Sequence
  Description of Artificial Sequence: Synthetic oligonucleotide
gacuguuuuccagcuugcu

SEQ ID NO: 2867430 - RNA, 19 nt, Artificial Sequence
  Description of Artificial Sequence: Synthetic oligonucleotide
augcccucauagggcauca

SEQ ID NO: 2867431 - RNA, 19 nt, Artificial Sequence
  Description of Artificial Sequence: Synthetic oligonucleotide
accaacaccugugccugua

SEQ ID NO: 2867432 - RNA, 19 nt, Artificial Sequence
  Description of Artificial Sequence: Synthetic oligonucleotide
cagaaccuggaggcaggac

SEQ ID NO: 2867433 - RNA, 19 nt, Artificial Sequence
  Description of Artificial Sequence: Synthetic oligonucleotide
cgaggugaaaagugucuuc

SEQ ID NO: 2867434 - RNA, 19 nt, Artificial Sequence
  Description of Artificial Sequence: Synthetic oligonucleotide
cggacuccaugucauaauc

SEQ ID NO: 2867435 - RNA, 19 nt, Artificial Sequence
  Description of Artificial Sequence: Synthetic oligonucleotide
guccaggcuguuaacuucu

SEQ ID NO: 2867436 - RNA, 19 nt, Artificial Sequence
  Description of Artificial Sequence: Synthetic oligonucleotide
aggcaggaccugaugcaga

SEQ ID NO: 2867437 - RNA, 19 nt, Artificial Sequence
  Description of Artificial Sequence: Synthetic oligonucleotide
gccuugucccuguggaaga

SEQ ID NO: 2867438 - RNA, 19 nt, Artificial Sequence
  Description of Artificial Sequence: Synthetic oligonucleotide
ccaccauccccaacugcug

SEQ ID NO: 2867439 - RNA, 19 nt, Artificial Sequence
  Description of Artificial Sequence: Synthetic oligonucleotide
ccacagaggaaugcugcac

SEQ ID NO: 2867440 - RNA, 19 nt, Artificial Sequence
  Description of Artificial Sequence: Synthetic oligonucleotide
gcagaggccacagaggaau

SEQ ID NO: 2867441 - RNA, 19 nt, Artificial Sequence
  Description of Artificial Sequence: Synthetic oligonucleotide
caacaccugugccuguacu

SEQ ID NO: 2867442 - RNA, 19 nt, Artificial Sequence
  Description of Artificial Sequence: Synthetic oligonucleotide
cugaugcagaggccacaga

SEQ ID NO: 2867443 - RNA, 19 nt, Artificial Sequence
  Description of Artificial Sequence: Synthetic oligonucleotide
ccacaacacucuuguggac

SEQ ID NO: 2867444 - RNA, 19 nt, Artificial Sequence
  Description of Artificial Sequence: Synthetic oligonucleotide
gaacucgagcagggcagaa

SEQ ID NO: 2867445 - RNA, 19 nt, Artificial Sequence
  Description of Artificial Sequence: Synthetic oligonucleotide
cugagguccacaccaucau

SEQ ID NO: 2867446 - RNA, 19 nt, Artificial Sequence
  Description of Artificial Sequence: Synthetic oligonucleotide
gcaggaccugaugcagagg

SEQ ID NO: 2867447 - RNA, 19 nt, Artificial Sequence
  Description of Artificial Sequence: Synthetic oligonucleotide
ccucauagggcaucaccaa

SEQ ID NO: 2867448 - RNA, 19 nt, Artificial Sequence
  Description of Artificial Sequence: Synthetic oligonucleotide
cucuugcaguuuaaauuuu

SEQ ID NO: 2867449 - RNA, 19 nt, Artificial Sequence
  Description of Artificial Sequence: Synthetic oligonucleotide
cugguccaggcuguuaacu

SEQ ID NO: 2867450 - RNA, 19 nt, Artificial Sequence
  Description of Artificial Sequence: Synthetic oligonucleotide
caggaccaccaugcucagc

SEQ ID NO: 2867451 - RNA, 19 nt, Artificial Sequence
  Description of Artificial Sequence: Synthetic oligonucleotide
gucuggucugguccaggcu

SEQ ID NO: 2867452 - RNA, 19 nt, Artificial Sequence
  Description of Artificial Sequence: Synthetic oligonucleotide
accugugccuguacuucau

SEQ ID NO: 2867453 - RNA, 19 nt, Artificial Sequence
  Description of Artificial Sequence: Synthetic oligonucleotide
ccaacaccugugccuguac

SEQ ID NO: 2867454 - RNA, 19 nt, Artificial Sequence
  Description of Artificial Sequence: Synthetic oligonucleotide
ggcgaggugaaaagugucu

SEQ ID NO: 2867455 - RNA, 19 nt, Artificial Sequence
  Description of Artificial Sequence: Synthetic oligonucleotide
gugucuuccgacacaucau

SEQ ID NO: 2867456 - RNA, 19 nt, Artificial Sequence
  Description of Artificial Sequence: Synthetic oligonucleotide
cucgagcagggcagaaccu

SEQ ID NO: 2867457 - RNA, 19 nt, Artificial Sequence
  Description of Artificial Sequence: Synthetic oligonucleotide
ugcccucauagggcaucac

SEQ ID NO: 2867458 - RNA, 19 nt, Artificial Sequence
  Description of Artificial Sequence: Synthetic oligonucleotide
ggaacucgagcagggcaga

SEQ ID NO: 2867459 - RNA, 19 nt, Artificial Sequence
  Description of Artificial Sequence: Synthetic oligonucleotide
cacgcacaggucucucucu

SEQ ID NO: 2867460 - RNA, 19 nt, Artificial Sequence
  Description of Artificial Sequence: Synthetic oligonucleotide
ggacaaacuuggacacgca

SEQ ID NO: 2867461 - RNA, 19 nt, Artificial Sequence
  Description of Artificial Sequence: Synthetic oligonucleotide
cagccuugucccuguggaa

SEQ ID NO: 2867462 - RNA, 19 nt, Artificial Sequence
  Description of Artificial Sequence: Synthetic oligonucleotide
ccuccacaacacucuugug

SEQ ID NO: 2867463 - RNA, 19 nt, Artificial Sequence
  Description of Artificial Sequence: Synthetic oligonucleotide
ccaggcuguuaacuucuca

SEQ ID NO: 2867464 - RNA, 19 nt, Artificial Sequence
  Description of Artificial Sequence: Synthetic oligonucleotide
cagaggaaugcugcacacu

SEQ ID NO: 2867465 - RNA, 19 nt, Artificial Sequence
  Description of Artificial Sequence: Synthetic oligonucleotide
cucagcuccaugcccucau

SEQ ID NO: 2867466 - RNA, 19 nt, Artificial Sequence
  Description of Artificial Sequence: Synthetic oligonucleotide
ccuugucccuguggaagac

SEQ ID NO: 2867467 - RNA, 19 nt, Artificial Sequence
  Description of Artificial Sequence: Synthetic oligonucleotide
caacaucagugcucuucau

SEQ ID NO: 2867468 - RNA, 19 nt, Artificial Sequence
  Description of Artificial Sequence: Synthetic oligonucleotide
cauaauccucuugcaguuu

SEQ ID NO: 2867469 - RNA, 19 nt, Artificial Sequence
  Description of Artificial Sequence: Synthetic oligonucleotide
caccaucaucugggagcag

SEQ ID NO: 2867470 - RNA, 19 nt, Artificial Sequence
  Description of Artificial Sequence: Synthetic oligonucleotide
ggaaugcugcacacuggcu

SEQ ID NO: 2867471 - RNA, 19 nt, Artificial Sequence
  Description of Artificial Sequence: Synthetic oligonucleotide
gcagaaccuggaggcagga

SEQ ID NO: 2867472 - RNA, 19 nt, Artificial Sequence
  Description of Artificial Sequence: Synthetic oligonucleotide
gcucuucauaaagucuggu

SEQ ID NO: 2867473 - RNA, 19 nt, Artificial Sequence
  Description of Artificial Sequence: Synthetic oligonucleotide
ccgacaagucagccuuguc

SEQ ID NO: 2867474 - RNA, 19 nt, Artificial Sequence
  Description of Artificial Sequence: Synthetic oligonucleotide
caacacucuuguggacaaa

SEQ ID NO: 2867475 - RNA, 19 nt, Artificial Sequence
  Description of Artificial Sequence: Synthetic oligonucleotide
ggacacgcacaggucucuc

SEQ ID NO: 2867476 - RNA, 19 nt, Artificial Sequence
  Description of Artificial Sequence: Synthetic oligonucleotide
ccagcuugcugagguccac

SEQ ID NO: 2867477 - RNA, 19 nt, Artificial Sequence
  Description of Artificial Sequence: Synthetic oligonucleotide
ccuguacuucauucacaua

SEQ ID NO: 2867478 - RNA, 19 nt, Artificial Sequence
  Description of Artificial Sequence: Synthetic oligonucleotide
gcgaggugaaaagugucuu

SEQ ID NO: 2867479 - RNA, 19 nt, Artificial Sequence
  Description of Artificial Sequence: Synthetic oligonucleotide
cugggagcaggaccaccau

SEQ ID NO: 2867480 - RNA, 19 nt, Artificial Sequence
  Description of Artificial Sequence: Synthetic oligonucleotide
gcugaaacacggacuccau

SEQ ID NO: 2867481 - RNA, 19 nt, Artificial Sequence
  Description of Artificial Sequence: Synthetic oligonucleotide
gcucagcuccaugcccuca

SEQ ID NO: 2867482 - RNA, 19 nt, Artificial Sequence
  Description of Artificial Sequence: Synthetic oligonucleotide
ccgacacaucaucugcacu

SEQ ID NO: 2867483 - RNA, 19 nt, Artificial Sequence
  Description of Artificial Sequence: Synthetic oligonucleotide
ggucugguccaggcuguua

SEQ ID NO: 2867484 - RNA, 19 nt, Artificial Sequence
  Description of Artificial Sequence: Synthetic oligonucleotide
gcacacuggcuugcuccuc

SEQ ID NO: 2867485 - RNA, 19 nt, Artificial Sequence
  Description of Artificial Sequence: Synthetic oligonucleotide
ccauccccaacugcugaaa

SEQ ID NO: 2867486 - RNA, 19 nt, Artificial Sequence
  Description of Artificial Sequence: Synthetic oligonucleotide
caccaacaccugugccugu

SEQ ID NO: 2867487 - RNA, 19 nt, Artificial Sequence
  Description of Artificial Sequence: Synthetic oligonucleotide
cccgacaagucagccuugu

SEQ ID NO: 2867488 - RNA, 19 nt, Artificial Sequence
  Description of Artificial Sequence: Synthetic oligonucleotide
ccugugccuguacuucauu

SEQ ID NO: 2867489 - RNA, 19 nt, Artificial Sequence
  Description of Artificial Sequence: Synthetic oligonucleotide
ccaugcccucauagggcau

SEQ ID NO: 2867490 - RNA, 19 nt, Artificial Sequence
  Description of Artificial Sequence: Synthetic oligonucleotide
ccucaacaucagugcucuu

SEQ ID NO: 2867491 - RNA, 19 nt, Artificial Sequence
  Description of Artificial Sequence: Synthetic oligonucleotide
aguacuucuguauaggucc

SEQ ID NO: 2867492 - RNA, 19 nt, Artificial Sequence
  Description of Artificial Sequence: Synthetic oligonucleotide
uuaacagucuguaauaugc

SEQ ID NO: 2867493 - RNA, 19 nt, Artificial Sequence
  Description of Artificial Sequence: Synthetic oligonucleotide
aacacaaugccccagaaca

SEQ ID NO: 2867494 - RNA, 19 nt, Artificial Sequence
  Description of Artificial Sequence: Synthetic oligonucleotide
uaauaugcaagccugaaca

SEQ ID NO: 2867495 - RNA, 19 nt, Artificial Sequence
  Description of Artificial Sequence: Synthetic oligonucleotide
aguucuuggauacagacag

SEQ ID NO: 2867496 - RNA, 19 nt, Artificial Sequence
  Description of Artificial Sequence: Synthetic oligonucleotide
aaugccccagaacacaugc

SEQ ID NO: 2867497 - RNA, 19 nt, Artificial Sequence
  Description of Artificial Sequence: Synthetic oligonucleotide
cuuggauacagacagagag

SEQ ID NO: 2867498 - RNA, 19 nt, Artificial Sequence
  Description of Artificial Sequence: Synthetic oligonucleotide
agucaggagaacuauaagg

SEQ ID NO: 2867499 - RNA, 19 nt, Artificial Sequence
  Description of Artificial Sequence: Synthetic oligonucleotide
aacauaggccaacagucgc

SEQ ID NO: 2867500 - RNA, 19 nt, Artificial Sequence
  Description of Artificial Sequence: Synthetic oligonucleotide
ucaguaaugauucucacua

SEQ ID NO: 2867501 - RNA, 19 nt, Artificial Sequence
  Description of Artificial Sequence: Synthetic oligonucleotide
uggagaauccccaugaaug

SEQ ID NO: 2867502 - RNA, 19 nt, Artificial Sequence
  Description of Artificial Sequence: Synthetic oligonucleotide
ucuguaauaugcaagccug

SEQ ID NO: 2867503 - RNA, 19 nt, Artificial Sequence
  Description of Artificial Sequence: Synthetic oligonucleotide
uauagguccaucuuuguug

SEQ ID NO: 2867504 - RNA, 19 nt, Artificial Sequence
  Description of Artificial Sequence: Synthetic oligonucleotide
aacuauaaggaggauguac

SEQ ID NO: 2867505 - RNA, 19 nt, Artificial Sequence
  Description of Artificial Sequence: Synthetic oligonucleotide
uucacaaaggaaaacacuc

SEQ ID NO: 2867506 - RNA, 19 nt, Artificial Sequence
  Description of Artificial Sequence: Synthetic oligonucleotide
uuuucaaacccucacuggc

SEQ ID NO: 2867507 - RNA, 19 nt, Artificial Sequence
  Description of Artificial Sequence: Synthetic oligonucleotide
caugaaagcugaauuaagg

SEQ ID NO: 2867508 - RNA, 19 nt, Artificial Sequence
  Description of Artificial Sequence: Synthetic oligonucleotide
aguaaugauucucacuagg

SEQ ID NO: 2867509 - RNA, 19 nt, Artificial Sequence
  Description of Artificial Sequence: Synthetic oligonucleotide
aagaugagcaaguacuucu

SEQ ID NO: 2867510 - RNA, 19 nt, Artificial Sequence
  Description of Artificial Sequence: Synthetic oligonucleotide
uuuguugucaguaaugauu

SEQ ID NO: 2867511 - RNA, 19 nt, Artificial Sequence
  Description of Artificial Sequence: Synthetic oligonucleotide
acuauaaggaggauguacc

SEQ ID NO: 2867512 - RNA, 19 nt, Artificial Sequence
  Description of Artificial Sequence: Synthetic oligonucleotide
acaguucuuggauacagac

SEQ ID NO: 2867513 - RNA, 19 nt, Artificial Sequence
  Description of Artificial Sequence: Synthetic oligonucleotide
aagccagaaacauaggcca

SEQ ID NO: 2867514 - RNA, 19 nt, Artificial Sequence
  Description of Artificial Sequence: Synthetic oligonucleotide
aaaggaaaacacuccgcuc

SEQ ID NO: 2867515 - RNA, 19 nt, Artificial Sequence
  Description of Artificial Sequence: Synthetic oligonucleotide
aauuaaggaagaacugugg

SEQ ID NO: 2867516 - RNA, 19 nt, Artificial Sequence
  Description of Artificial Sequence: Synthetic oligonucleotide
aauaugcaagccugaacag

SEQ ID NO: 2867517 - RNA, 19 nt, Artificial Sequence
  Description of Artificial Sequence: Synthetic oligonucleotide
aaacacaaugccccagaac

SEQ ID NO: 2867518 - RNA, 19 nt, Artificial Sequence
  Description of Artificial Sequence: Synthetic oligonucleotide
uagguaccaaaacacagag

SEQ ID NO: 2867519 - RNA, 19 nt, Artificial Sequence
  Description of Artificial Sequence: Synthetic oligonucleotide
guuuaugcuuuucaaaccc

SEQ ID NO: 2867520 - RNA, 19 nt, Artificial Sequence
  Description of Artificial Sequence: Synthetic oligonucleotide
aggaaagcaggagagauac

SEQ ID NO: 2867521 - RNA, 19 nt, Artificial Sequence
  Description of Artificial Sequence: Synthetic oligonucleotide
gaaacauaggccaacaguc

SEQ ID NO: 2867522 - RNA, 19 nt, Artificial Sequence
  Description of Artificial Sequence: Synthetic oligonucleotide
gguaccaaaacacagagga

SEQ ID NO: 2867523 - RNA, 19 nt, Artificial Sequence
  Description of Artificial Sequence: Synthetic oligonucleotide
aaacacagaggaaagcagg

SEQ ID NO: 2867524 - RNA, 19 nt, Artificial Sequence
  Description of Artificial Sequence: Synthetic oligonucleotide
caggagaacuauaaggagg

SEQ ID NO: 2867525 - RNA, 19 nt, Artificial Sequence
  Description of Artificial Sequence: Synthetic oligonucleotide
agaaacauaggccaacagu

SEQ ID NO: 2867526 - RNA, 19 nt, Artificial Sequence
  Description of Artificial Sequence: Synthetic oligonucleotide
uuguugucaguaaugauuc

SEQ ID NO: 2867527 - RNA, 19 nt, Artificial Sequence
  Description of Artificial Sequence: Synthetic oligonucleotide
ugaaagcugaauuaaggaa

SEQ ID NO: 2867528 - RNA, 19 nt, Artificial Sequence
  Description of Artificial Sequence: Synthetic oligonucleotide
caagccagaaacauaggcc

SEQ ID NO: 2867529 - RNA, 19 nt, Artificial Sequence
  Description of Artificial Sequence: Synthetic oligonucleotide
ugaauuaaggaagaacugu

SEQ ID NO: 2867530 - RNA, 19 nt, Artificial Sequence
  Description of Artificial Sequence: Synthetic oligonucleotide
ucacuagguaccaaaacac

SEQ ID NO: 2867531 - RNA, 19 nt, Artificial Sequence
  Description of Artificial Sequence: Synthetic oligonucleotide
uaaggaagaacuguggaga

SEQ ID NO: 2867532 - RNA, 19 nt, Artificial Sequence
  Description of Artificial Sequence: Synthetic oligonucleotide
uguucacaaaggaaaacac

SEQ ID NO: 2867533 - RNA, 19 nt, Artificial Sequence
  Description of Artificial Sequence: Synthetic oligonucleotide
agaacuauaaggaggaugu

SEQ ID NO: 2867534 - RNA, 19 nt, Artificial Sequence
  Description of Artificial Sequence: Synthetic oligonucleotide
agaacuguggagaaucccc

SEQ ID NO: 2867535 - RNA, 19 nt, Artificial Sequence
  Description of Artificial Sequence: Synthetic oligonucleotide
ucaugaaagcugaauuaag

SEQ ID NO: 2867536 - RNA, 19 nt, Artificial Sequence
  Description of Artificial Sequence: Synthetic oligonucleotide
augauaaccagugucauga

SEQ ID NO: 2867537 - RNA, 19 nt, Artificial Sequence
  Description of Artificial Sequence: Synthetic oligonucleotide
ccaacagucgcauugaggg

SEQ ID NO: 2867538 - RNA, 19 nt, Artificial Sequence
  Description of Artificial Sequence: Synthetic oligonucleotide
uugucaguaaugauucuca

SEQ ID NO: 2867539 - RNA, 19 nt, Artificial Sequence
  Description of Artificial Sequence: Synthetic oligonucleotide
auuaaggaagaacugugga

SEQ ID NO: 2867540 - RNA, 19 nt, Artificial Sequence
  Description of Artificial Sequence: Synthetic oligonucleotide
ucacaaaggaaaacacucc

SEQ ID NO: 2867541 - RNA, 19 nt, Artificial Sequence
  Description of Artificial Sequence: Synthetic oligonucleotide
cacaaaggaaaacacuccg

SEQ ID NO: 2867542 - RNA, 19 nt, Artificial Sequence
  Description of Artificial Sequence: Synthetic oligonucleotide
augauuccaaagcccaagc

SEQ ID NO: 2867543 - RNA, 19 nt, Artificial Sequence
  Description of Artificial Sequence: Synthetic oligonucleotide
gauacagacagagagcaac

SEQ ID NO: 2867544 - RNA, 19 nt, Artificial Sequence
  Description of Artificial Sequence: Synthetic oligonucleotide
gaauuaaggaagaacugug

SEQ ID NO: 2867545 - RNA, 19 nt, Artificial Sequence
  Description of Artificial Sequence: Synthetic oligonucleotide
aacacuccgcucaugauuc

SEQ ID NO: 2867546 - RNA, 19 nt, Artificial Sequence
  Description of Artificial Sequence: Synthetic oligonucleotide
uuuaacagucuguaauaug

SEQ ID NO: 2867547 - RNA, 19 nt, Artificial Sequence
  Description of Artificial Sequence: Synthetic oligonucleotide
aagaacuguggagaauccc

SEQ ID NO: 2867548 - RNA, 19 nt, Artificial Sequence
  Description of Artificial Sequence: Synthetic oligonucleotide
augaaagcugaauuaagga

SEQ ID NO: 2867549 - RNA, 19 nt, Artificial Sequence
  Description of Artificial Sequence: Synthetic oligonucleotide
caaggagucagacagggug

SEQ ID NO: 2867550 - RNA, 19 nt, Artificial Sequence
  Description of Artificial Sequence: Synthetic oligonucleotide
aaaacacagaggaaagcag

SEQ ID NO: 2867551 - RNA, 19 nt, Artificial Sequence
  Description of Artificial Sequence: Synthetic oligonucleotide
ucaggagaacuauaaggag

SEQ ID NO: 2867552 - RNA, 19 nt, Artificial Sequence
  Description of Artificial Sequence: Synthetic oligonucleotide
gagagcaacacuccgaaga

SEQ ID NO: 2867553 - RNA, 19 nt, Artificial Sequence
  Description of Artificial Sequence: Synthetic oligonucleotide
auaaggaggauguaccacu

SEQ ID NO: 2867554 - RNA, 19 nt, Artificial Sequence
  Description of Artificial Sequence: Synthetic oligonucleotide
uucuuggauacagacagag

SEQ ID NO: 2867555 - RNA, 19 nt, Artificial Sequence
  Description of Artificial Sequence: Synthetic oligonucleotide
ugcagcaguaugauaacca

SEQ ID NO: 2867556 - RNA, 19 nt, Artificial Sequence
  Description of Artificial Sequence: Synthetic oligonucleotide
ugagucaggagaacuauaa

SEQ ID NO: 2867557 - RNA, 19 nt, Artificial Sequence
  Description of Artificial Sequence: Synthetic oligonucleotide
uaggccaacagucgcauug

SEQ ID NO: 2867558 - RNA, 19 nt, Artificial Sequence
  Description of Artificial Sequence: Synthetic oligonucleotide
aaacauaggccaacagucg

SEQ ID NO: 2867559 - RNA, 19 nt, Artificial Sequence
  Description of Artificial Sequence: Synthetic oligonucleotide
ucuggguugauaccagcag

SEQ ID NO: 2867560 - RNA, 19 nt, Artificial Sequence
  Description of Artificial Sequence: Synthetic oligonucleotide
uggauacagacagagagca

SEQ ID NO: 2867561 - RNA, 19 nt, Artificial Sequence
  Description of Artificial Sequence: Synthetic oligonucleotide
uuggauacagacagagagc

SEQ ID NO: 2867562 - RNA, 19 nt, Artificial Sequence
  Description of Artificial Sequence: Synthetic oligonucleotide
cagacagagagcaacacuc

SEQ ID NO: 2867563 - RNA, 19 nt, Artificial Sequence
  Description of Artificial Sequence: Synthetic oligonucleotide
cuuuucaaacccucacugg

SEQ ID NO: 2867564 - RNA, 19 nt, Artificial Sequence
  Description of Artificial Sequence: Synthetic oligonucleotide
augauucucacuagguacc

SEQ ID NO: 2867565 - RNA, 19 nt, Artificial Sequence
  Description of Artificial Sequence: Synthetic oligonucleotide
aaguacuucuguauagguc

SEQ ID NO: 2867566 - RNA, 19 nt, Artificial Sequence
  Description of Artificial Sequence: Synthetic oligonucleotide
ucuuuguugucaguaauga

SEQ ID NO: 2867567 - RNA, 19 nt, Artificial Sequence
  Description of Artificial Sequence: Synthetic oligonucleotide
cuuaggaaggucuggguug

SEQ ID NO: 2867568 - RNA, 19 nt, Artificial Sequence
  Description of Artificial Sequence: Synthetic oligonucleotide
gaaaacacuccgcucauga

SEQ ID NO: 2867569 - RNA, 19 nt, Artificial Sequence
  Description of Artificial Sequence: Synthetic oligonucleotide
aacacuccgaagaugagca

SEQ ID NO: 2867570 - RNA, 19 nt, Artificial Sequence
  Description of Artificial Sequence: Synthetic oligonucleotide
agcugaauuaaggaagaac

SEQ ID NO: 2867571 - RNA, 19 nt, Artificial Sequence
  Description of Artificial Sequence: Synthetic oligonucleotide
guugauaccagcaggugag

SEQ ID NO: 2867572 - RNA, 19 nt, Artificial Sequence
  Description of Artificial Sequence: Synthetic oligonucleotide
augcuuuucaaacccucac

SEQ ID NO: 2867573 - RNA, 19 nt, Artificial Sequence
  Description of Artificial Sequence: Synthetic oligonucleotide
caaagcccaagccagaaac

SEQ ID NO: 2867574 - RNA, 19 nt, Artificial Sequence
  Description of Artificial Sequence: Synthetic oligonucleotide
aagccugaacaguucuugg

SEQ ID NO: 2867575 - RNA, 19 nt, Artificial Sequence
  Description of Artificial Sequence: Synthetic oligonucleotide
agcaaguacuucuguauag

SEQ ID NO: 2867576 - RNA, 19 nt, Artificial Sequence
  Description of Artificial Sequence: Synthetic oligonucleotide
aacagucgcauugagggug

SEQ ID NO: 2867577 - RNA, 19 nt, Artificial Sequence
  Description of Artificial Sequence: Synthetic oligonucleotide
ucaggguuuaugcuuuuca

SEQ ID NO: 2867578 - RNA, 19 nt, Artificial Sequence
  Description of Artificial Sequence: Synthetic oligonucleotide
agcaguaugauaaccagug

SEQ ID NO: 2867579 - RNA, 19 nt, Artificial Sequence
  Description of Artificial Sequence: Synthetic oligonucleotide
gaacacaugcagcaguaug

SEQ ID NO: 2867580 - RNA, 19 nt, Artificial Sequence
  Description of Artificial Sequence: Synthetic oligonucleotide
uaccaaaacacagaggaaa

SEQ ID NO: 2867581 - RNA, 19 nt, Artificial Sequence
  Description of Artificial Sequence: Synthetic oligonucleotide
gacagagagcaacacuccg

SEQ ID NO: 2867582 - RNA, 19 nt, Artificial Sequence
  Description of Artificial Sequence: Synthetic oligonucleotide
uaugcuuuucaaacccuca

SEQ ID NO: 2867583 - RNA, 19 nt, Artificial Sequence
  Description of Artificial Sequence: Synthetic oligonucleotide
aaacacuccgcucaugauu

SEQ ID NO: 2867584 - RNA, 19 nt, Artificial Sequence
  Description of Artificial Sequence: Synthetic oligonucleotide
cugaauuaaggaagaacug

SEQ ID NO: 2867585 - RNA, 19 nt, Artificial Sequence
  Description of Artificial Sequence: Synthetic oligonucleotide
uaaugauucucacuaggua

SEQ ID NO: 2867586 - RNA, 19 nt, Artificial Sequence
  Description of Artificial Sequence: Synthetic oligonucleotide
ucuguauagguccaucuuu

SEQ ID NO: 2867587 - RNA, 19 nt, Artificial Sequence
  Description of Artificial Sequence: Synthetic oligonucleotide
ugauuccaaagcccaagcc

SEQ ID NO: 2867588 - RNA, 19 nt, Artificial Sequence
  Description of Artificial Sequence: Synthetic oligonucleotide
uaugcaagccugaacaguu

SEQ ID NO: 2867589 - RNA, 19 nt, Artificial Sequence
  Description of Artificial Sequence: Synthetic oligonucleotide
aacagucuguaauaugcaa

SEQ ID NO: 2867590 - RNA, 19 nt, Artificial Sequence
  Description of Artificial Sequence: Synthetic oligonucleotide
acaaaggaaaacacuccgc

SEQ ID NO: 2867591 - RNA, 19 nt, Artificial Sequence
  Description of Artificial Sequence: Synthetic oligonucleotide
aacacaugcagcaguauga

SEQ ID NO: 2867592 - RNA, 19 nt, Artificial Sequence
  Description of Artificial Sequence: Synthetic oligonucleotide
ugucaugaaagcugaauua

SEQ ID NO: 2867593 - RNA, 19 nt, Artificial Sequence
  Description of Artificial Sequence: Synthetic oligonucleotide
uuuaugcuuuucaaacccu

SEQ ID NO: 2867594 - RNA, 19 nt, Artificial Sequence
  Description of Artificial Sequence: Synthetic oligonucleotide
caugaaugcccacugugcc

SEQ ID NO: 2867595 - RNA, 19 nt, Artificial Sequence
  Description of Artificial Sequence: Synthetic oligonucleotide
ugagcaaguacuucuguau

SEQ ID NO: 2867596 - RNA, 19 nt, Artificial Sequence
  Description of Artificial Sequence: Synthetic oligonucleotide
gagaacuauaaggaggaug

SEQ ID NO: 2867597 - RNA, 19 nt, Artificial Sequence
  Description of Artificial Sequence: Synthetic oligonucleotide
uaaccagugucaugaaagc

SEQ ID NO: 2867598 - RNA, 19 nt, Artificial Sequence
  Description of Artificial Sequence: Synthetic oligonucleotide
aaagcugaauuaaggaaga

SEQ ID NO: 2867599 - RNA, 19 nt, Artificial Sequence
  Description of Artificial Sequence: Synthetic oligonucleotide
agaauccccaugaaugccc

SEQ ID NO: 2867600 - RNA, 19 nt, Artificial Sequence
  Description of Artificial Sequence: Synthetic oligonucleotide
cugaacaguucuuggauac

SEQ ID NO: 2867601 - RNA, 19 nt, Artificial Sequence
  Description of Artificial Sequence: Synthetic oligonucleotide
agacaggguguucacaaag

SEQ ID NO: 2867602 - RNA, 19 nt, Artificial Sequence
  Description of Artificial Sequence: Synthetic oligonucleotide
acuagguaccaaaacacag

SEQ ID NO: 2867603 - RNA, 19 nt, Artificial Sequence
  Description of Artificial Sequence: Synthetic oligonucleotide
uaugauaaccagugucaug

SEQ ID NO: 2867604 - RNA, 19 nt, Artificial Sequence
  Description of Artificial Sequence: Synthetic oligonucleotide
uuucaaacccucacuggcu

SEQ ID NO: 2867605 - RNA, 19 nt, Artificial Sequence
  Description of Artificial Sequence: Synthetic oligonucleotide
gaacaguucuuggauacag

SEQ ID NO: 2867606 - RNA, 19 nt, Artificial Sequence
  Description of Artificial Sequence: Synthetic oligonucleotide
ucuucucacagccaucaaa

SEQ ID NO: 2867607 - RNA, 19 nt, Artificial Sequence
  Description of Artificial Sequence: Synthetic oligonucleotide
ucagacaggguguucacaa

SEQ ID NO: 2867608 - RNA, 19 nt, Artificial Sequence
  Description of Artificial Sequence: Synthetic oligonucleotide
ugugccuggccccaaggag

SEQ ID NO: 2867609 - RNA, 19 nt, Artificial Sequence
  Description of Artificial Sequence: Synthetic oligonucleotide
uuaugcuuuucaaacccuc

SEQ ID NO: 2867610 - RNA, 19 nt, Artificial Sequence
  Description of Artificial Sequence: Synthetic oligonucleotide
uaacagucuguaauaugca

SEQ ID NO: 2867611 - RNA, 19 nt, Artificial Sequence
  Description of Artificial Sequence: Synthetic oligonucleotide
acaugcagcaguaugauaa

SEQ ID NO: 2867612 - RNA, 19 nt, Artificial Sequence
  Description of Artificial Sequence: Synthetic oligonucleotide
cucacuagguaccaaaaca

SEQ ID NO: 2867613 - RNA, 19 nt, Artificial Sequence
  Description of Artificial Sequence: Synthetic oligonucleotide
cuguauagguccaucuuug

SEQ ID NO: 2867614 - RNA, 19 nt, Artificial Sequence
  Description of Artificial Sequence: Synthetic oligonucleotide
ggguuuaugcuuuucaaac

SEQ ID NO: 2867615 - RNA, 19 nt, Artificial Sequence
  Description of Artificial Sequence: Synthetic oligonucleotide
ugcuuuucaaacccucacu

SEQ ID NO: 2867616 - RNA, 19 nt, Artificial Sequence
  Description of Artificial Sequence: Synthetic oligonucleotide
ucucacuagguaccaaaac

SEQ ID NO: 2867617 - RNA, 19 nt, Artificial Sequence
  Description of Artificial Sequence: Synthetic oligonucleotide
aaggucuggguugauacca

SEQ ID NO: 2867618 - RNA, 19 nt, Artificial Sequence
  Description of Artificial Sequence: Synthetic oligonucleotide
gauaccagcaggugaguca

SEQ ID NO: 2867619 - RNA, 19 nt, Artificial Sequence
  Description of Artificial Sequence: Synthetic oligonucleotide
uggguugauaccagcaggu

SEQ ID NO: 2867620 - RNA, 19 nt, Artificial Sequence
  Description of Artificial Sequence: Synthetic oligonucleotide
auagguccaucuuuguugu

SEQ ID NO: 2867621 - RNA, 19 nt, Artificial Sequence
  Description of Artificial Sequence: Synthetic oligonucleotide
gucaggagaacuauaagga

SEQ ID NO: 2867622 - RNA, 19 nt, Artificial Sequence
  Description of Artificial Sequence: Synthetic oligonucleotide
gucuccucaggguuuaugc

SEQ ID NO: 2867623 - RNA, 19 nt, Artificial Sequence
  Description of Artificial Sequence: Synthetic oligonucleotide
uauaaggaggauguaccac

SEQ ID NO: 2867624 - RNA, 19 nt, Artificial Sequence
  Description of Artificial Sequence: Synthetic oligonucleotide
aaggaagaacuguggagaa

SEQ ID NO: 2867625 - RNA, 19 nt, Artificial Sequence
  Description of Artificial Sequence: Synthetic oligonucleotide
uuuuaacagucuguaauau

SEQ ID NO: 2867626 - RNA, 19 nt, Artificial Sequence
  Description of Artificial Sequence: Synthetic oligonucleotide
uccgaagaugagcaaguac

SEQ ID NO: 2867627 - RNA, 19 nt, Artificial Sequence
  Description of Artificial Sequence: Synthetic oligonucleotide
acagucuguaauaugcaag

SEQ ID NO: 2867628 - RNA, 19 nt, Artificial Sequence
  Description of Artificial Sequence: Synthetic oligonucleotide
gacaggguguucacaaagg

SEQ ID NO: 2867629 - RNA, 19 nt, Artificial Sequence
  Description of Artificial Sequence: Synthetic oligonucleotide
cucaugauuccaaagccca

SEQ ID NO: 2867630 - RNA, 19 nt, Artificial Sequence
  Description of Artificial Sequence: Synthetic oligonucleotide
guaauaugcaagccugaac

SEQ ID NO: 2867631 - RNA, 19 nt, Artificial Sequence
  Description of Artificial Sequence: Synthetic oligonucleotide
caaaacacagaggaaagca

SEQ ID NO: 2867632 - RNA, 19 nt, Artificial Sequence
  Description of Artificial Sequence: Synthetic oligonucleotide
gguuuaugcuuuucaaacc

SEQ ID NO: 2867633 - RNA, 19 nt, Artificial Sequence
  Description of Artificial Sequence: Synthetic oligonucleotide
gagucaggagaacuauaag

SEQ ID NO: 2867634 - RNA, 19 nt, Artificial Sequence
  Description of Artificial Sequence: Synthetic oligonucleotide
ugcaagccugaacaguucu

SEQ ID NO: 2867635 - RNA, 19 nt, Artificial Sequence
  Description of Artificial Sequence: Synthetic oligonucleotide
uguaauaugcaagccugaa

SEQ ID NO: 2867636 - RNA, 19 nt, Artificial Sequence
  Description of Artificial Sequence: Synthetic oligonucleotide
agcaacacuccgaagauga

SEQ ID NO: 2867637 - RNA, 19 nt, Artificial Sequence
  Description of Artificial Sequence: Synthetic oligonucleotide
ucuuggauacagacagaga

SEQ ID NO: 2867638 - RNA, 19 nt, Artificial Sequence
  Description of Artificial Sequence: Synthetic oligonucleotide
acagacagagagcaacacu

SEQ ID NO: 2867639 - RNA, 19 nt, Artificial Sequence
  Description of Artificial Sequence: Synthetic oligonucleotide
aacacagaggaaagcagga

SEQ ID NO: 2867640 - RNA, 19 nt, Artificial Sequence
  Description of Artificial Sequence: Synthetic oligonucleotide
gcuuuucaaacccucacug

SEQ ID NO: 2867641 - RNA, 19 nt, Artificial Sequence
  Description of Artificial Sequence: Synthetic oligonucleotide
accagugucaugaaagcug

SEQ ID NO: 2867642 - RNA, 19 nt, Artificial Sequence
  Description of Artificial Sequence: Synthetic oligonucleotide
auucucacuagguaccaaa

SEQ ID NO: 2867643 - RNA, 19 nt, Artificial Sequence
  Description of Artificial Sequence: Synthetic oligonucleotide
cuucucacagccaucaaaa

SEQ ID NO: 2867644 - RNA, 19 nt, Artificial Sequence
  Description of Artificial Sequence: Synthetic oligonucleotide
cuagguaccaaaacacaga

SEQ ID NO: 2867645 - RNA, 19 nt, Artificial Sequence
  Description of Artificial Sequence: Synthetic oligonucleotide
gccccaaggagucagacag

SEQ ID NO: 2867646 - RNA, 19 nt, Artificial Sequence
  Description of Artificial Sequence: Synthetic oligonucleotide
aaaacacuccgcucaugau

SEQ ID NO: 2867647 - RNA, 19 nt, Artificial Sequence
  Description of Artificial Sequence: Synthetic oligonucleotide
agacagagagcaacacucc

SEQ ID NO: 2867648 - RNA, 19 nt, Artificial Sequence
  Description of Artificial Sequence: Synthetic oligonucleotide
caugauuccaaagcccaag

SEQ ID NO: 2867649 - RNA, 19 nt, Artificial Sequence
  Description of Artificial Sequence: Synthetic oligonucleotide
uccgcucaugauuccaaag

SEQ ID NO: 2867650 - RNA, 19 nt, Artificial Sequence
  Description of Artificial Sequence: Synthetic oligonucleotide
ugucaguaaugauucucac

SEQ ID NO: 2867651 - RNA, 19 nt, Artificial Sequence
  Description of Artificial Sequence: Synthetic oligonucleotide
uucucacuagguaccaaaa

SEQ ID NO: 2867652 - RNA, 19 nt, Artificial Sequence
  Description of Artificial Sequence: Synthetic oligonucleotide
auaccagcaggugagucag

SEQ ID NO: 2867653 - RNA, 19 nt, Artificial Sequence
  Description of Artificial Sequence: Synthetic oligonucleotide
accaaaacacagaggaaag

SEQ ID NO: 2867654 - RNA, 19 nt, Artificial Sequence
  Description of Artificial Sequence: Synthetic oligonucleotide
acaggguguucacaaagga

SEQ ID NO: 2867655 - RNA, 19 nt, Artificial Sequence
  Description of Artificial Sequence: Synthetic oligonucleotide
acuuaggaaggucuggguu

SEQ ID NO: 2867656 - RNA, 19 nt, Artificial Sequence
  Description of Artificial Sequence: Synthetic oligonucleotide
gaaggucuggguugauacc

SEQ ID NO: 2867657 - RNA, 19 nt, Artificial Sequence
  Description of Artificial Sequence: Synthetic oligonucleotide
ggaaggucuggguugauac

SEQ ID NO: 2867658 - RNA, 19 nt, Artificial Sequence
  Description of Artificial Sequence: Synthetic oligonucleotide
augcagcaguaugauaacc

SEQ ID NO: 2867659 - RNA, 19 nt, Artificial Sequence
  Description of Artificial Sequence: Synthetic oligonucleotide
aggguguucacaaaggaaa

SEQ ID NO: 2867660 - RNA, 19 nt, Artificial Sequence
  Description of Artificial Sequence: Synthetic oligonucleotide
uguauagguccaucuuugu

SEQ ID NO: 2867661 - RNA, 19 nt, Artificial Sequence
  Description of Artificial Sequence: Synthetic oligonucleotide
agucagacaggguguucac

SEQ ID NO: 2867662 - RNA, 19 nt, Artificial Sequence
  Description of Artificial Sequence: Synthetic oligonucleotide
guguucacaaaggaaaaca

SEQ ID NO: 2867663 - RNA, 19 nt, Artificial Sequence
  Description of Artificial Sequence: Synthetic oligonucleotide
acuguggagaauccccaug

SEQ ID NO: 2867664 - RNA, 19 nt, Artificial Sequence
  Description of Artificial Sequence: Synthetic oligonucleotide
uucuguauagguccaucuu

SEQ ID NO: 2867665 - RNA, 19 nt, Artificial Sequence
  Description of Artificial Sequence: Synthetic oligonucleotide
agaggaaagcaggagagau

SEQ ID NO: 2867666 - RNA, 19 nt, Artificial Sequence
  Description of Artificial Sequence: Synthetic oligonucleotide
aauccccaugaaugcccac

SEQ ID NO: 2867667 - RNA, 19 nt, Artificial Sequence
  Description of Artificial Sequence: Synthetic oligonucleotide
uccaucuuuguugucagua

SEQ ID NO: 2867668 - RNA, 19 nt, Artificial Sequence
  Description of Artificial Sequence: Synthetic oligonucleotide
gaggguguugucuccucag

SEQ ID NO: 2867669 - RNA, 19 nt, Artificial Sequence
  Description of Artificial Sequence: Synthetic oligonucleotide
aaccagugucaugaaagcu

SEQ ID NO: 2867670 - RNA, 19 nt, Artificial Sequence
  Description of Artificial Sequence: Synthetic oligonucleotide
agagcaacacuccgaagau

SEQ ID NO: 2867671 - RNA, 19 nt, Artificial Sequence
  Description of Artificial Sequence: Synthetic oligonucleotide
aaggacuuaggaaggucug

SEQ ID NO: 2867672 - RNA, 19 nt, Artificial Sequence
  Description of Artificial Sequence: Synthetic oligonucleotide
guugucaguaaugauucuc

SEQ ID NO: 2867673 - RNA, 19 nt, Artificial Sequence
  Description of Artificial Sequence: Synthetic oligonucleotide
acuucuguauagguccauc

SEQ ID NO: 2867674 - RNA, 19 nt, Artificial Sequence
  Description of Artificial Sequence: Synthetic oligonucleotide
uccccaugaaugcccacug

SEQ ID NO: 2867675 - RNA, 19 nt, Artificial Sequence
  Description of Artificial Sequence: Synthetic oligonucleotide
gaagaacuguggagaaucc

SEQ ID NO: 2867676 - RNA, 19 nt, Artificial Sequence
  Description of Artificial Sequence: Synthetic oligonucleotide
cuauaaggaggauguacca

SEQ ID NO: 2867677 - RNA, 19 nt, Artificial Sequence
  Description of Artificial Sequence: Synthetic oligonucleotide
caacacuccgaagaugagc

SEQ ID NO: 2867678 - RNA, 19 nt, Artificial Sequence
  Description of Artificial Sequence: Synthetic oligonucleotide
uucaaacccucacuggcuu

SEQ ID NO: 2867679 - RNA, 19 nt, Artificial Sequence
  Description of Artificial Sequence: Synthetic oligonucleotide
caguaaugauucucacuag

SEQ ID NO: 2867680 - RNA, 19 nt, Artificial Sequence
  Description of Artificial Sequence: Synthetic oligonucleotide
uuaggaaggucuggguuga

SEQ ID NO: 2867681 - RNA, 19 nt, Artificial Sequence
  Description of Artificial Sequence: Synthetic oligonucleotide
aucuuuguugucaguaaug

SEQ ID NO: 2867682 - RNA, 19 nt, Artificial Sequence
  Description of Artificial Sequence: Synthetic oligonucleotide
aggguguugucuccucagg

SEQ ID NO: 2867683 - RNA, 19 nt, Artificial Sequence
  Description of Artificial Sequence: Synthetic oligonucleotide
ucuccucaggguuuaugcu

SEQ ID NO: 2867684 - RNA, 19 nt, Artificial Sequence
  Description of Artificial Sequence: Synthetic oligonucleotide
gagaauccccaugaaugcc

SEQ ID NO: 2867685 - RNA, 19 nt, Artificial Sequence
  Description of Artificial Sequence: Synthetic oligonucleotide
aaggagucagacagggugu

SEQ ID NO: 2867686 - RNA, 19 nt, Artificial Sequence
  Description of Artificial Sequence: Synthetic oligonucleotide
gcugaauuaaggaagaacu

SEQ ID NO: 2867687 - RNA, 19 nt, Artificial Sequence
  Description of Artificial Sequence: Synthetic oligonucleotide
gaagaugagcaaguacuuc

SEQ ID NO: 2867688 - RNA, 19 nt, Artificial Sequence
  Description of Artificial Sequence: Synthetic oligonucleotide
ugaggguguugucuccuca

SEQ ID NO: 2867689 - RNA, 19 nt, Artificial Sequence
  Description of Artificial Sequence: Synthetic oligonucleotide
ggaagaacuguggagaauc

SEQ ID NO: 2867690 - RNA, 19 nt, Artificial Sequence
  Description of Artificial Sequence: Synthetic oligonucleotide
auaugcaagccugaacagu

SEQ ID NO: 2867691 - RNA, 19 nt, Artificial Sequence
  Description of Artificial Sequence: Synthetic oligonucleotide
caugcagcaguaugauaac

SEQ ID NO: 2867692 - RNA, 19 nt, Artificial Sequence
  Description of Artificial Sequence: Synthetic oligonucleotide
agugucaugaaagcugaau

SEQ ID NO: 2867693 - RNA, 19 nt, Artificial Sequence
  Description of Artificial Sequence: Synthetic oligonucleotide
aggacuuaggaaggucugg

SEQ ID NO: 2867694 - RNA, 19 nt, Artificial Sequence
  Description of Artificial Sequence: Synthetic oligonucleotide
gcagcaguaugauaaccag

SEQ ID NO: 2867695 - RNA, 19 nt, Artificial Sequence
  Description of Artificial Sequence: Synthetic oligonucleotide
ccaagccagaaacauaggc

SEQ ID NO: 2867696 - RNA, 19 nt, Artificial Sequence
  Description of Artificial Sequence: Synthetic oligonucleotide
aagcccaagccagaaacau

SEQ ID NO: 2867697 - RNA, 19 nt, Artificial Sequence
  Description of Artificial Sequence: Synthetic oligonucleotide
cacagaggaaagcaggaga

SEQ ID NO: 2867698 - RNA, 19 nt, Artificial Sequence
  Description of Artificial Sequence: Synthetic oligonucleotide
agccugaacaguucuugga

SEQ ID NO: 2867699 - RNA, 19 nt, Artificial Sequence
  Description of Artificial Sequence: Synthetic oligonucleotide
cauugaggguguugucucc

SEQ ID NO: 2867700 - RNA, 19 nt, Artificial Sequence
  Description of Artificial Sequence: Synthetic oligonucleotide
gcaaguacuucuguauagg

SEQ ID NO: 2867701 - RNA, 19 nt, Artificial Sequence
  Description of Artificial Sequence: Synthetic oligonucleotide
augagcaaguacuucugua

SEQ ID NO: 2867702 - RNA, 19 nt, Artificial Sequence
  Description of Artificial Sequence: Synthetic oligonucleotide
gucaugaaagcugaauuaa

SEQ ID NO: 2867703 - RNA, 19 nt, Artificial Sequence
  Description of Artificial Sequence: Synthetic oligonucleotide
aaagcccaagccagaaaca

SEQ ID NO: 2867704 - RNA, 19 nt, Artificial Sequence
  Description of Artificial Sequence: Synthetic oligonucleotide
caaaggaaaacacuccgcu

SEQ ID NO: 2867705 - RNA, 19 nt, Artificial Sequence
  Description of Artificial Sequence: Synthetic oligonucleotide
acacaaugccccagaacac

SEQ ID NO: 2867706 - RNA, 19 nt, Artificial Sequence
  Description of Artificial Sequence: Synthetic oligonucleotide
aacuguggagaauccccau

SEQ ID NO: 2867707 - RNA, 19 nt, Artificial Sequence
  Description of Artificial Sequence: Synthetic oligonucleotide
agguccaucuuuguuguca

SEQ ID NO: 2867708 - RNA, 19 nt, Artificial Sequence
  Description of Artificial Sequence: Synthetic oligonucleotide
uaaggaggauguaccacuu

SEQ ID NO: 2867709 - RNA, 19 nt, Artificial Sequence
  Description of Artificial Sequence: Synthetic oligonucleotide
cacuccgaagaugagcaag

SEQ ID NO: 2867710 - RNA, 19 nt, Artificial Sequence
  Description of Artificial Sequence: Synthetic oligonucleotide
acugugccuggccccaagg

SEQ ID NO: 2867711 - RNA, 19 nt, Artificial Sequence
  Description of Artificial Sequence: Synthetic oligonucleotide
uguggagaauccccaugaa

SEQ ID NO: 2867712 - RNA, 19 nt, Artificial Sequence
  Description of Artificial Sequence: Synthetic oligonucleotide
gcccaagccagaaacauag

SEQ ID NO: 2867713 - RNA, 19 nt, Artificial Sequence
  Description of Artificial Sequence: Synthetic oligonucleotide
gagucagacaggguguuca

SEQ ID NO: 2867714 - RNA, 19 nt, Artificial Sequence
  Description of Artificial Sequence: Synthetic oligonucleotide
uccucaggguuuaugcuuu

SEQ ID NO: 2867715 - RNA, 19 nt, Artificial Sequence
  Description of Artificial Sequence: Synthetic oligonucleotide
gucuguaauaugcaagccu

SEQ ID NO: 2867716 - RNA, 19 nt, Artificial Sequence
  Description of Artificial Sequence: Synthetic oligonucleotide
aacaguucuuggauacaga

SEQ ID NO: 2867717 - RNA, 19 nt, Artificial Sequence
  Description of Artificial Sequence: Synthetic oligonucleotide
ugauucucacuagguacca

SEQ ID NO: 2867718 - RNA, 19 nt, Artificial Sequence
  Description of Artificial Sequence: Synthetic oligonucleotide
gguugauaccagcagguga

SEQ ID NO: 2867719 - RNA, 19 nt, Artificial Sequence
  Description of Artificial Sequence: Synthetic oligonucleotide
uguugucaguaaugauucu

SEQ ID NO: 2867720 - RNA, 19 nt, Artificial Sequence
  Description of Artificial Sequence: Synthetic oligonucleotide
ggguguugucuccucaggg

SEQ ID NO: 2867721 - RNA, 19 nt, Artificial Sequence
  Description of Artificial Sequence: Synthetic oligonucleotide
acacagaggaaagcaggag

SEQ ID NO: 2867722 - RNA, 19 nt, Artificial Sequence
  Description of Artificial Sequence: Synthetic oligonucleotide
uguugucuccucaggguuu

SEQ ID NO: 2867723 - RNA, 19 nt, Artificial Sequence
  Description of Artificial Sequence: Synthetic oligonucleotide
agagagcaacacuccgaag

SEQ ID NO: 2867724 - RNA, 19 nt, Artificial Sequence
  Description of Artificial Sequence: Synthetic oligonucleotide
cuguggagaauccccauga

SEQ ID NO: 2867725 - RNA, 19 nt, Artificial Sequence
  Description of Artificial Sequence: Synthetic oligonucleotide
ugaacaguucuuggauaca

SEQ ID NO: 2867726 - RNA, 19 nt, Artificial Sequence
  Description of Artificial Sequence: Synthetic oligonucleotide
cacuagguaccaaaacaca

SEQ ID NO: 2867727 - RNA, 19 nt, Artificial Sequence
  Description of Artificial Sequence: Synthetic oligonucleotide
ggacuuaggaaggucuggg

SEQ ID NO: 2867728 - RNA, 19 nt, Artificial Sequence
  Description of Artificial Sequence: Synthetic oligonucleotide
agaugagcaaguacuucug

SEQ ID NO: 2867729 - RNA, 19 nt, Artificial Sequence
  Description of Artificial Sequence: Synthetic oligonucleotide
ccaugaaugcccacugugc

SEQ ID NO: 2867730 - RNA, 19 nt, Artificial Sequence
  Description of Artificial Sequence: Synthetic oligonucleotide
uuccaaagcccaagccaga

SEQ ID NO: 2867731 - RNA, 19 nt, Artificial Sequence
  Description of Artificial Sequence: Synthetic oligonucleotide
gagcaaguacuucuguaua

SEQ ID NO: 2867732 - RNA, 19 nt, Artificial Sequence
  Description of Artificial Sequence: Synthetic oligonucleotide
gaacuguggagaaucccca

SEQ ID NO: 2867733 - RNA, 19 nt, Artificial Sequence
  Description of Artificial Sequence: Synthetic oligonucleotide
acacuccgcucaugauucc

SEQ ID NO: 2867734 - RNA, 19 nt, Artificial Sequence
  Description of Artificial Sequence: Synthetic oligonucleotide
gguccaucuuuguugucag

SEQ ID NO: 2867735 - RNA, 19 nt, Artificial Sequence
  Description of Artificial Sequence: Synthetic oligonucleotide
auacagacagagagcaaca

SEQ ID NO: 2867736 - RNA, 19 nt, Artificial Sequence
  Description of Artificial Sequence: Synthetic oligonucleotide
guaaugauucucacuaggu

SEQ ID NO: 2867737 - RNA, 19 nt, Artificial Sequence
  Description of Artificial Sequence: Synthetic oligonucleotide
agguaccaaaacacagagg

SEQ ID NO: 2867738 - RNA, 19 nt, Artificial Sequence
  Description of Artificial Sequence: Synthetic oligonucleotide
caguucuuggauacagaca

SEQ ID NO: 2867739 - RNA, 19 nt, Artificial Sequence
  Description of Artificial Sequence: Synthetic oligonucleotide
acagagagcaacacuccga

SEQ ID NO: 2867740 - RNA, 19 nt, Artificial Sequence
  Description of Artificial Sequence: Synthetic oligonucleotide
aaggaggauguaccacuuu

SEQ ID NO: 2867741 - RNA, 19 nt, Artificial Sequence
  Description of Artificial Sequence: Synthetic oligonucleotide
ugauaaccagugucaugaa

SEQ ID NO: 2867742 - RNA, 19 nt, Artificial Sequence
  Description of Artificial Sequence: Synthetic oligonucleotide
gucaguaaugauucucacu

SEQ ID NO: 2867743 - RNA, 19 nt, Artificial Sequence
  Description of Artificial Sequence: Synthetic oligonucleotide
ugauaccagcaggugaguc

SEQ ID NO: 2867744 - RNA, 19 nt, Artificial Sequence
  Description of Artificial Sequence: Synthetic oligonucleotide
ccgcucaugauuccaaagc

SEQ ID NO: 2867745 - RNA, 19 nt, Artificial Sequence
  Description of Artificial Sequence: Synthetic oligonucleotide
acuccgaagaugagcaagu

SEQ ID NO: 2867746 - RNA, 19 nt, Artificial Sequence
  Description of Artificial Sequence: Synthetic oligonucleotide
gaugagcaaguacuucugu

SEQ ID NO: 2867747 - RNA, 19 nt, Artificial Sequence
  Description of Artificial Sequence: Synthetic oligonucleotide
auugaggguguugucuccu

SEQ ID NO: 2867748 - RNA, 19 nt, Artificial Sequence
  Description of Artificial Sequence: Synthetic oligonucleotide
gugucaugaaagcugaauu

SEQ ID NO: 2867749 - RNA, 19 nt, Artificial Sequence
  Description of Artificial Sequence: Synthetic oligonucleotide
cuguaauaugcaagccuga

SEQ ID NO: 2867750 - RNA, 19 nt, Artificial Sequence
  Description of Artificial Sequence: Synthetic oligonucleotide
ugucuccucaggguuuaug

SEQ ID NO: 2867751 - RNA, 19 nt, Artificial Sequence
  Description of Artificial Sequence: Synthetic oligonucleotide
gaaugcccacugugccugg

SEQ ID NO: 2867752 - RNA, 19 nt, Artificial Sequence
  Description of Artificial Sequence: Synthetic oligonucleotide
guucacaaaggaaaacacu

SEQ ID NO: 2867753 - RNA, 19 nt, Artificial Sequence
  Description of Artificial Sequence: Synthetic oligonucleotide
cagagagcaacacuccgaa

SEQ ID NO: 2867754 - RNA, 19 nt, Artificial Sequence
  Description of Artificial Sequence: Synthetic oligonucleotide
gcucaugauuccaaagccc

SEQ ID NO: 2867755 - RNA, 19 nt, Artificial Sequence
  Description of Artificial Sequence: Synthetic oligonucleotide
auccccaugaaugcccacu

SEQ ID NO: 2867756 - RNA, 19 nt, Artificial Sequence
  Description of Artificial Sequence: Synthetic oligonucleotide
acauaggccaacagucgca

SEQ ID NO: 2867757 - RNA, 19 nt, Artificial Sequence
  Description of Artificial Sequence: Synthetic oligonucleotide
cuucuguauagguccaucu

SEQ ID NO: 2867758 - RNA, 19 nt, Artificial Sequence
  Description of Artificial Sequence: Synthetic oligonucleotide
gagcaacacuccgaagaug

SEQ ID NO: 2867759 - RNA, 19 nt, Artificial Sequence
  Description of Artificial Sequence: Synthetic oligonucleotide
caaugccccagaacacaug

SEQ ID NO: 2867760 - RNA, 19 nt, Artificial Sequence
  Description of Artificial Sequence: Synthetic oligonucleotide
ccgaagaugagcaaguacu

SEQ ID NO: 2867761 - RNA, 19 nt, Artificial Sequence
  Description of Artificial Sequence: Synthetic oligonucleotide
caggguguucacaaaggaa

SEQ ID NO: 2867762 - RNA, 19 nt, Artificial Sequence
  Description of Artificial Sequence: Synthetic oligonucleotide
caaguacuucuguauaggu

SEQ ID NO: 2867763 - RNA, 19 nt, Artificial Sequence
  Description of Artificial Sequence: Synthetic oligonucleotide
acacaugcagcaguaugau

SEQ ID NO: 2867764 - RNA, 19 nt, Artificial Sequence
  Description of Artificial Sequence: Synthetic oligonucleotide
cccaaggagucagacaggg

SEQ ID NO: 2867765 - RNA, 19 nt, Artificial Sequence
  Description of Artificial Sequence: Synthetic oligonucleotide
ugccuggccccaaggaguc

SEQ ID NO: 2867766 - RNA, 19 nt, Artificial Sequence
  Description of Artificial Sequence: Synthetic oligonucleotide
gcauugaggguguugucuc

SEQ ID NO: 2867767 - RNA, 19 nt, Artificial Sequence
  Description of Artificial Sequence: Synthetic oligonucleotide
cacaaugccccagaacaca

SEQ ID NO: 2867768 - RNA, 19 nt, Artificial Sequence
  Description of Artificial Sequence: Synthetic oligonucleotide
cgcucaugauuccaaagcc

SEQ ID NO: 2867769 - RNA, 19 nt, Artificial Sequence
  Description of Artificial Sequence: Synthetic oligonucleotide
gguguucacaaaggaaaac

SEQ ID NO: 2867770 - RNA, 19 nt, Artificial Sequence
  Description of Artificial Sequence: Synthetic oligonucleotide
cccaugaaugcccacugug

SEQ ID NO: 2867771 - RNA, 19 nt, Artificial Sequence
  Description of Artificial Sequence: Synthetic oligonucleotide
augcaagccugaacaguuc

SEQ ID NO: 2867772 - RNA, 19 nt, Artificial Sequence
  Description of Artificial Sequence: Synthetic oligonucleotide
gaauccccaugaaugccca

SEQ ID NO: 2867773 - RNA, 19 nt, Artificial Sequence
  Description of Artificial Sequence: Synthetic oligonucleotide
uucuucucacagccaucaa

SEQ ID NO: 2867774 - RNA, 19 nt, Artificial Sequence
  Description of Artificial Sequence: Synthetic oligonucleotide
cagaacacaugcagcagua

SEQ ID NO: 2867775 - RNA, 19 nt, Artificial Sequence
  Description of Artificial Sequence: Synthetic oligonucleotide
gccaacagucgcauugagg

SEQ ID NO: 2867776 - RNA, 19 nt, Artificial Sequence
  Description of Artificial Sequence: Synthetic oligonucleotide
gacuuaggaaggucugggu

SEQ ID NO: 2867777 - RNA, 19 nt, Artificial Sequence
  Description of Artificial Sequence: Synthetic oligonucleotide
ucaaacccucacuggcuuu

SEQ ID NO: 2867778 - RNA, 19 nt, Artificial Sequence
  Description of Artificial Sequence: Synthetic oligonucleotide
gucuggguugauaccagca

SEQ ID NO: 2867779 - RNA, 19 nt, Artificial Sequence
  Description of Artificial Sequence: Synthetic oligonucleotide
agcaggugagucaggagaa

SEQ ID NO: 2867780 - RNA, 19 nt, Artificial Sequence
  Description of Artificial Sequence: Synthetic oligonucleotide
gucgcauugaggguguugu

SEQ ID NO: 2867781 - RNA, 19 nt, Artificial Sequence
  Description of Artificial Sequence: Synthetic oligonucleotide
acaaugccccagaacacau

SEQ ID NO: 2867782 - RNA, 19 nt, Artificial Sequence
  Description of Artificial Sequence: Synthetic oligonucleotide
agucgcauugaggguguug

SEQ ID NO: 2867783 - RNA, 19 nt, Artificial Sequence
  Description of Artificial Sequence: Synthetic oligonucleotide
ccagugucaugaaagcuga

SEQ ID NO: 2867784 - RNA, 19 nt, Artificial Sequence
  Description of Artificial Sequence: Synthetic oligonucleotide
guauagguccaucuuuguu

SEQ ID NO: 2867785 - RNA, 19 nt, Artificial Sequence
  Description of Artificial Sequence: Synthetic oligonucleotide
agaacacaugcagcaguau

SEQ ID NO: 2867786 - RNA, 19 nt, Artificial Sequence
  Description of Artificial Sequence: Synthetic oligonucleotide
gaggaaagcaggagagaua

SEQ ID NO: 2867787 - RNA, 19 nt, Artificial Sequence
  Description of Artificial Sequence: Synthetic oligonucleotide
ggucuggguugauaccagc

SEQ ID NO: 2867788 - RNA, 19 nt, Artificial Sequence
  Description of Artificial Sequence: Synthetic oligonucleotide
aggucuggguugauaccag

SEQ ID NO: 2867789 - RNA, 19 nt, Artificial Sequence
  Description of Artificial Sequence: Synthetic oligonucleotide
guggagaauccccaugaau

SEQ ID NO: 2867790 - RNA, 19 nt, Artificial Sequence
  Description of Artificial Sequence: Synthetic oligonucleotide
ucgcauugaggguguuguc

SEQ ID NO: 2867791 - RNA, 19 nt, Artificial Sequence
  Description of Artificial Sequence: Synthetic oligonucleotide
aggaagaacuguggagaau

SEQ ID NO: 2867792 - RNA, 19 nt, Artificial Sequence
  Description of Artificial Sequence: Synthetic oligonucleotide
guaccaaaacacagaggaa

SEQ ID NO: 2867793 - RNA, 19 nt, Artificial Sequence
  Description of Artificial Sequence: Synthetic oligonucleotide
gguguugucuccucagggu

SEQ ID NO: 2867794 - RNA, 19 nt, Artificial Sequence
  Description of Artificial Sequence: Synthetic oligonucleotide
guacuucuguauaggucca

SEQ ID NO: 2867795 - RNA, 19 nt, Artificial Sequence
  Description of Artificial Sequence: Synthetic oligonucleotide
cuuuguugucaguaaugau

SEQ ID NO: 2867796 - RNA, 19 nt, Artificial Sequence
  Description of Artificial Sequence: Synthetic oligonucleotide
caucuuuguugucaguaau

SEQ ID NO: 2867797 - RNA, 19 nt, Artificial Sequence
  Description of Artificial Sequence: Synthetic oligonucleotide
guaugauaaccagugucau

SEQ ID NO: 2867798 - RNA, 19 nt, Artificial Sequence
  Description of Artificial Sequence: Synthetic oligonucleotide
gauucucacuagguaccaa

SEQ ID NO: 2867799 - RNA, 19 nt, Artificial Sequence
  Description of Artificial Sequence: Synthetic oligonucleotide
aggugagucaggagaacua

SEQ ID NO: 2867800 - RNA, 19 nt, Artificial Sequence
  Description of Artificial Sequence: Synthetic oligonucleotide
uacuucuguauagguccau

SEQ ID NO: 2867801 - RNA, 19 nt, Artificial Sequence
  Description of Artificial Sequence: Synthetic oligonucleotide
acagucgcauugagggugu

SEQ ID NO: 2867802 - RNA, 19 nt, Artificial Sequence
  Description of Artificial Sequence: Synthetic oligonucleotide
cucaggguuuaugcuuuuc

SEQ ID NO: 2867803 - RNA, 19 nt, Artificial Sequence
  Description of Artificial Sequence: Synthetic oligonucleotide
ccccagaacacaugcagca

SEQ ID NO: 2867804 - RNA, 19 nt, Artificial Sequence
  Description of Artificial Sequence: Synthetic oligonucleotide
uggccccaaggagucagac

SEQ ID NO: 2867805 - RNA, 19 nt, Artificial Sequence
  Description of Artificial Sequence: Synthetic oligonucleotide
cagcaguaugauaaccagu

SEQ ID NO: 2867806 - RNA, 19 nt, Artificial Sequence
  Description of Artificial Sequence: Synthetic oligonucleotide
gaacuauaaggaggaugua

SEQ ID NO: 2867807 - RNA, 19 nt, Artificial Sequence
  Description of Artificial Sequence: Synthetic oligonucleotide
acacuccgaagaugagcaa

SEQ ID NO: 2867808 - RNA, 19 nt, Artificial Sequence
  Description of Artificial Sequence: Synthetic oligonucleotide
gucagacaggguguucaca

SEQ ID NO: 2867809 - RNA, 19 nt, Artificial Sequence
  Description of Artificial Sequence: Synthetic oligonucleotide
gccagaaacauaggccaac

SEQ ID NO: 2867810 - RNA, 19 nt, Artificial Sequence
  Description of Artificial Sequence: Synthetic oligonucleotide
cacugugccuggccccaag

SEQ ID NO: 2867811 - RNA, 19 nt, Artificial Sequence
  Description of Artificial Sequence: Synthetic oligonucleotide
cagaggaaagcaggagaga

SEQ ID NO: 2867812 - RNA, 19 nt, Artificial Sequence
  Description of Artificial Sequence: Synthetic oligonucleotide
cugugccuggccccaagga

SEQ ID NO: 2867813 - RNA, 19 nt, Artificial Sequence
  Description of Artificial Sequence: Synthetic oligonucleotide
guucuuggauacagacaga

SEQ ID NO: 2867814 - RNA, 19 nt, Artificial Sequence
  Description of Artificial Sequence: Synthetic oligonucleotide
aggaaggucuggguugaua

SEQ ID NO: 2867815 - RNA, 19 nt, Artificial Sequence
  Description of Artificial Sequence: Synthetic oligonucleotide
ggccaacagucgcauugag

SEQ ID NO: 2867816 - RNA, 19 nt, Artificial Sequence
  Description of Artificial Sequence: Synthetic oligonucleotide
cccaagccagaaacauagg

SEQ ID NO: 2867817 - RNA, 19 nt, Artificial Sequence
  Description of Artificial Sequence: Synthetic oligonucleotide
ggguugauaccagcaggug

SEQ ID NO: 2867818 - RNA, 19 nt, Artificial Sequence
  Description of Artificial Sequence: Synthetic oligonucleotide
ggaaaacacuccgcucaug

SEQ ID NO: 2867819 - RNA, 19 nt, Artificial Sequence
  Description of Artificial Sequence: Synthetic oligonucleotide
uagguccaucuuuguuguc

SEQ ID NO: 2867820 - RNA, 19 nt, Artificial Sequence
  Description of Artificial Sequence: Synthetic oligonucleotide
acuccgcucaugauuccaa

SEQ ID NO: 2867821 - RNA, 19 nt, Artificial Sequence
  Description of Artificial Sequence: Synthetic oligonucleotide
auaggccaacagucgcauu

SEQ ID NO: 2867822 - RNA, 19 nt, Artificial Sequence
  Description of Artificial Sequence: Synthetic oligonucleotide
cuccucaggguuuaugcuu

SEQ ID NO: 2867823 - RNA, 19 nt, Artificial Sequence
  Description of Artificial Sequence: Synthetic oligonucleotide
aggagucagacaggguguu

SEQ ID NO: 2867824 - RNA, 19 nt, Artificial Sequence
  Description of Artificial Sequence: Synthetic oligonucleotide
cagacaggguguucacaaa

SEQ ID NO: 2867825 - RNA, 19 nt, Artificial Sequence
  Description of Artificial Sequence: Synthetic oligonucleotide
agccagaaacauaggccaa

SEQ ID NO: 2867826 - RNA, 19 nt, Artificial Sequence
  Description of Artificial Sequence: Synthetic oligonucleotide
cacaugcagcaguaugaua

SEQ ID NO: 2867827 - RNA, 19 nt, Artificial Sequence
  Description of Artificial Sequence: Synthetic oligonucleotide
ccaucuuuguugucaguaa

SEQ ID NO: 2867828 - RNA, 19 nt, Artificial Sequence
  Description of Artificial Sequence: Synthetic oligonucleotide
ggguguucacaaaggaaaa

SEQ ID NO: 2867829 - RNA, 19 nt, Artificial Sequence
  Description of Artificial Sequence: Synthetic oligonucleotide
ggaaagcaggagagauacc

SEQ ID NO: 2867830 - RNA, 19 nt, Artificial Sequence
  Description of Artificial Sequence: Synthetic oligonucleotide
gugagucaggagaacuaua

SEQ ID NO: 2867831 - RNA, 19 nt, Artificial Sequence
  Description of Artificial Sequence: Synthetic oligonucleotide
gccccagaacacaugcagc

SEQ ID NO: 2867832 - RNA, 19 nt, Artificial Sequence
  Description of Artificial Sequence: Synthetic oligonucleotide
gcaacacuccgaagaugag

SEQ ID NO: 2867833 - RNA, 19 nt, Artificial Sequence
  Description of Artificial Sequence: Synthetic oligonucleotide
cuccgcucaugauuccaaa

SEQ ID NO: 2867834 - RNA, 19 nt, Artificial Sequence
  Description of Artificial Sequence: Synthetic oligonucleotide
caggugagucaggagaacu

SEQ ID NO: 2867835 - RNA, 19 nt, Artificial Sequence
  Description of Artificial Sequence: Synthetic oligonucleotide
gccugaacaguucuuggau

SEQ ID NO: 2867836 - RNA, 19 nt, Artificial Sequence
  Description of Artificial Sequence: Synthetic oligonucleotide
ccugaacaguucuuggaua

SEQ ID NO: 2867837 - RNA, 19 nt, Artificial Sequence
  Description of Artificial Sequence: Synthetic oligonucleotide
caacagucgcauugagggu

SEQ ID NO: 2867838 - RNA, 19 nt, Artificial Sequence
  Description of Artificial Sequence: Synthetic oligonucleotide
ccccaaggagucagacagg

SEQ ID NO: 2867839 - RNA, 19 nt, Artificial Sequence
  Description of Artificial Sequence: Synthetic oligonucleotide
cacuccgcucaugauucca

SEQ ID NO: 2867840 - RNA, 19 nt, Artificial Sequence
  Description of Artificial Sequence: Synthetic oligonucleotide
agcccaagccagaaacaua

SEQ ID NO: 2867841 - RNA, 19 nt, Artificial Sequence
  Description of Artificial Sequence: Synthetic oligonucleotide
gugccuggccccaaggagu

SEQ ID NO: 2867842 - RNA, 19 nt, Artificial Sequence
  Description of Artificial Sequence: Synthetic oligonucleotide
augccccagaacacaugca

SEQ ID NO: 2867843 - RNA, 19 nt, Artificial Sequence
  Description of Artificial Sequence: Synthetic oligonucleotide
ccagaaacauaggccaaca

SEQ ID NO: 2867844 - RNA, 19 nt, Artificial Sequence
  Description of Artificial Sequence: Synthetic oligonucleotide
ccuggccccaaggagucag

SEQ ID NO: 2867845 - RNA, 19 nt, Artificial Sequence
  Description of Artificial Sequence: Synthetic oligonucleotide
gcaguaugauaaccagugu

SEQ ID NO: 2867846 - RNA, 19 nt, Artificial Sequence
  Description of Artificial Sequence: Synthetic oligonucleotide
ggugagucaggagaacuau

SEQ ID NO: 2867847 - RNA, 19 nt, Artificial Sequence
  Description of Artificial Sequence: Synthetic oligonucleotide
ggccccaaggagucagaca

SEQ ID NO: 2867848 - RNA, 19 nt, Artificial Sequence
  Description of Artificial Sequence: Synthetic oligonucleotide
cauaggccaacagucgcau

SEQ ID NO: 2867849 - RNA, 19 nt, Artificial Sequence
  Description of Artificial Sequence: Synthetic oligonucleotide
gcccacugugccuggcccc

SEQ ID NO: 2867850 - RNA, 19 nt, Artificial Sequence
  Description of Artificial Sequence: Synthetic oligonucleotide
ccagaacacaugcagcagu

SEQ ID NO: 2867851 - RNA, 19 nt, Artificial Sequence
  Description of Artificial Sequence: Synthetic oligonucleotide
cagugucaugaaagcugaa

SEQ ID NO: 2867852 - RNA, 19 nt, Artificial Sequence
  Description of Artificial Sequence: Synthetic oligonucleotide
gcaggugagucaggagaac

SEQ ID NO: 2867853 - RNA, 19 nt, Artificial Sequence
  Description of Artificial Sequence: Synthetic oligonucleotide
cuccgaagaugagcaagua

SEQ ID NO: 2867854 - RNA, 19 nt, Artificial Sequence
  Description of Artificial Sequence: Synthetic oligonucleotide
uaggaaggucuggguugau

SEQ ID NO: 2867855 - RNA, 19 nt, Artificial Sequence
  Description of Artificial Sequence: Synthetic oligonucleotide
cuggccccaaggagucaga

SEQ ID NO: 2867856 - RNA, 19 nt, Artificial Sequence
  Description of Artificial Sequence: Synthetic oligonucleotide
ggauacagacagagagcaa

SEQ ID NO: 2867857 - RNA, 19 nt, Artificial Sequence
  Description of Artificial Sequence: Synthetic oligonucleotide
ggagucagacaggguguuc

SEQ ID NO: 2867858 - RNA, 19 nt, Artificial Sequence
  Description of Artificial Sequence: Synthetic oligonucleotide
cgaagaugagcaaguacuu

SEQ ID NO: 2867859 - RNA, 19 nt, Artificial Sequence
  Description of Artificial Sequence: Synthetic oligonucleotide
cgcauugaggguguugucu

SEQ ID NO: 2867860 - RNA, 19 nt, Artificial Sequence
  Description of Artificial Sequence: Synthetic oligonucleotide
ggagaacuauaaggaggau

SEQ ID NO: 2867861 - RNA, 19 nt, Artificial Sequence
  Description of Artificial Sequence: Synthetic oligonucleotide
ccaaggagucagacagggu

SEQ ID NO: 2867862 - RNA, 19 nt, Artificial Sequence
  Description of Artificial Sequence: Synthetic oligonucleotide
cccacugugccuggcccca

SEQ ID NO: 2867863 - RNA, 19 nt, Artificial Sequence
  Description of Artificial Sequence: Synthetic oligonucleotide
gcaagccugaacaguucuu

SEQ ID NO: 2867864 - RNA, 19 nt, Artificial Sequence
  Description of Artificial Sequence: Synthetic oligonucleotide
ccccaugaaugcccacugu

SEQ ID NO: 2867865 - RNA, 19 nt, Artificial Sequence
  Description of Artificial Sequence: Synthetic oligonucleotide
gccuggccccaaggaguca

SEQ ID NO: 2867866 - RNA, 19 nt, Artificial Sequence
  Description of Artificial Sequence: Synthetic oligonucleotide
ccucaggguuuaugcuuuu

SEQ ID NO: 2867867 - RNA, 19 nt, Artificial Sequence
  Description of Artificial Sequence: Synthetic oligonucleotide
cagucgcauugaggguguu

SEQ ID NO: 2867868 - RNA, 19 nt, Artificial Sequence
  Description of Artificial Sequence: Synthetic oligonucleotide
ccacugugccuggccccaa

SEQ ID NO: 2867869 - RNA, 19 nt, Artificial Sequence
  Description of Artificial Sequence: Synthetic oligonucleotide
aauacaaucauucauauau

SEQ ID NO: 2867870 - RNA, 19 nt, Artificial Sequence
  Description of Artificial Sequence: Synthetic oligonucleotide
aaaugauacaaucaauucc

SEQ ID NO: 2867871 - RNA, 19 nt, Artificial Sequence
  Description of Artificial Sequence: Synthetic oligonucleotide
aaugauacaaucaauuccc

SEQ ID NO: 2867872 - RNA, 19 nt, Artificial Sequence
  Description of Artificial Sequence: Synthetic oligonucleotide
uaucuuaucacauaagggg

SEQ ID NO: 2867873 - RNA, 19 nt, Artificial Sequence
  Description of Artificial Sequence: Synthetic oligonucleotide
aauuauuucuuucauucac

SEQ ID NO: 2867874 - RNA, 19 nt, Artificial Sequence
  Description of Artificial Sequence: Synthetic oligonucleotide
uuaauuauggcaaauguga

SEQ ID NO: 2867875 - RNA, 19 nt, Artificial Sequence
  Description of Artificial Sequence: Synthetic oligonucleotide
uguauauugaaacugcucc

SEQ ID NO: 2867876 - RNA, 19 nt, Artificial Sequence
  Description of Artificial Sequence: Synthetic oligonucleotide
guuagaagaaauuugauug

SEQ ID NO: 2867877 - RNA, 19 nt, Artificial Sequence
  Description of Artificial Sequence: Synthetic oligonucleotide
ucauauauaacaauauacc

SEQ ID NO: 2867878 - RNA, 19 nt, Artificial Sequence
  Description of Artificial Sequence: Synthetic oligonucleotide
aaagguagaaaaugaauuc

SEQ ID NO: 2867879 - RNA, 19 nt, Artificial Sequence
  Description of Artificial Sequence: Synthetic oligonucleotide
uaaaugucaauuaucauca

SEQ ID NO: 2867880 - RNA, 19 nt, Artificial Sequence
  Description of Artificial Sequence: Synthetic oligonucleotide
uuuaauucauaucaaaagu

SEQ ID NO: 2867881 - RNA, 19 nt, Artificial Sequence
  Description of Artificial Sequence: Synthetic oligonucleotide
auuucuuucauucacaagu

SEQ ID NO: 2867882 - RNA, 19 nt, Artificial Sequence
  Description of Artificial Sequence: Synthetic oligonucleotide
auuuaauucauaucaaaag

SEQ ID NO: 2867883 - RNA, 19 nt, Artificial Sequence
  Description of Artificial Sequence: Synthetic oligonucleotide
gaaaaugaauuccagauac

SEQ ID NO: 2867884 - RNA, 19 nt, Artificial Sequence
  Description of Artificial Sequence: Synthetic oligonucleotide
uccaagaagacacaaagcc

SEQ ID NO: 2867885 - RNA, 19 nt, Artificial Sequence
  Description of Artificial Sequence: Synthetic oligonucleotide
uuaauucauaucaaaagug

SEQ ID NO: 2867886 - RNA, 19 nt, Artificial Sequence
  Description of Artificial Sequence: Synthetic oligonucleotide
guuauuugaaaguacauug

SEQ ID NO: 2867887 - RNA, 19 nt, Artificial Sequence
  Description of Artificial Sequence: Synthetic oligonucleotide
ucaauuaucaucaagcguu

SEQ ID NO: 2867888 - RNA, 19 nt, Artificial Sequence
  Description of Artificial Sequence: Synthetic oligonucleotide
uauauaacaauauaccuaa

SEQ ID NO: 2867889 - RNA, 19 nt, Artificial Sequence
  Description of Artificial Sequence: Synthetic oligonucleotide
auaacaauauaccuaaaug

SEQ ID NO: 2867890 - RNA, 19 nt, Artificial Sequence
  Description of Artificial Sequence: Synthetic oligonucleotide
aauuauggcaaaugugagg

SEQ ID NO: 2867891 - RNA, 19 nt, Artificial Sequence
  Description of Artificial Sequence: Synthetic oligonucleotide
uaacaauauaccuaaaugu

SEQ ID NO: 2867892 - RNA, 19 nt, Artificial Sequence
  Description of Artificial Sequence: Synthetic oligonucleotide
uacauaaauacaaucauuc

SEQ ID NO: 2867893 - RNA, 19 nt, Artificial Sequence
  Description of Artificial Sequence: Synthetic oligonucleotide
aauacauaaauacaaucau

SEQ ID NO: 2867894 - RNA, 19 nt, Artificial Sequence
  Description of Artificial Sequence: Synthetic oligonucleotide
aagguagaaaaugaauucc

SEQ ID NO: 2867895 - RNA, 19 nt, Artificial Sequence
  Description of Artificial Sequence: Synthetic oligonucleotide
uuugaaaguacauuguuac

SEQ ID NO: 2867896 - RNA, 19 nt, Artificial Sequence
  Description of Artificial Sequence: Synthetic oligonucleotide
aacaauauaccuaaauguc

SEQ ID NO: 2867897 - RNA, 19 nt, Artificial Sequence
  Description of Artificial Sequence: Synthetic oligonucleotide
aaauacauaaauacaauca

SEQ ID NO: 2867898 - RNA, 19 nt, Artificial Sequence
  Description of Artificial Sequence: Synthetic oligonucleotide
uauaaaacauuucuucacc

SEQ ID NO: 2867899 - RNA, 19 nt, Artificial Sequence
  Description of Artificial Sequence: Synthetic oligonucleotide
cauaucuuaucacauaagg

SEQ ID NO: 2867900 - RNA, 19 nt, Artificial Sequence
  Description of Artificial Sequence: Synthetic oligonucleotide
cuaaaugucaauuaucauc

SEQ ID NO: 2867901 - RNA, 19 nt, Artificial Sequence
  Description of Artificial Sequence: Synthetic oligonucleotide
augucaauuaucaucaagc

SEQ ID NO: 2867902 - RNA, 19 nt, Artificial Sequence
  Description of Artificial Sequence: Synthetic oligonucleotide
uuucuaguaaauuauuucu

SEQ ID NO: 2867903 - RNA, 19 nt, Artificial Sequence
  Description of Artificial Sequence: Synthetic oligonucleotide
ugaaacugcuccaagaaga

SEQ ID NO: 2867904 - RNA, 19 nt, Artificial Sequence
  Description of Artificial Sequence: Synthetic oligonucleotide
aaugucaauuaucaucaag

SEQ ID NO: 2867905 - RNA, 19 nt, Artificial Sequence
  Description of Artificial Sequence: Synthetic oligonucleotide
guuacauuguuguauauug

SEQ ID NO: 2867906 - RNA, 19 nt, Artificial Sequence
  Description of Artificial Sequence: Synthetic oligonucleotide
acauaaauauuccauuguc

SEQ ID NO: 2867907 - RNA, 19 nt, Artificial Sequence
  Description of Artificial Sequence: Synthetic oligonucleotide
cacauauuaggaaagguag

SEQ ID NO: 2867908 - RNA, 19 nt, Artificial Sequence
  Description of Artificial Sequence: Synthetic oligonucleotide
uacauuguuacauuguugu

SEQ ID NO: 2867909 - RNA, 19 nt, Artificial Sequence
  Description of Artificial Sequence: Synthetic oligonucleotide
ugucaauuaucaucaagcg

SEQ ID NO: 2867910 - RNA, 19 nt, Artificial Sequence
  Description of Artificial Sequence: Synthetic oligonucleotide
uucauaucaaaagugaucu

SEQ ID NO: 2867911 - RNA, 19 nt, Artificial Sequence
  Description of Artificial Sequence: Synthetic oligonucleotide
uugcuuauaaaacauuucu

SEQ ID NO: 2867912 - RNA, 19 nt, Artificial Sequence
  Description of Artificial Sequence: Synthetic oligonucleotide
uagaaaaugaauuccagau

SEQ ID NO: 2867913 - RNA, 19 nt, Artificial Sequence
  Description of Artificial Sequence: Synthetic oligonucleotide
gaaucugguuauuugaaag

SEQ ID NO: 2867914 - RNA, 19 nt, Artificial Sequence
  Description of Artificial Sequence: Synthetic oligonucleotide
uauuaggaaagguagaaaa

SEQ ID NO: 2867915 - RNA, 19 nt, Artificial Sequence
  Description of Artificial Sequence: Synthetic oligonucleotide
caaucauucauauauaaca

SEQ ID NO: 2867916 - RNA, 19 nt, Artificial Sequence
  Description of Artificial Sequence: Synthetic oligonucleotide
cauuguuguauauugaaac

SEQ ID NO: 2867917 - RNA, 19 nt, Artificial Sequence
  Description of Artificial Sequence: Synthetic oligonucleotide
ucaauucccguacugaacc

SEQ ID NO: 2867918 - RNA, 19 nt, Artificial Sequence
  Description of Artificial Sequence: Synthetic oligonucleotide
uguuguauauugaaacugc

SEQ ID NO: 2867919 - RNA, 19 nt, Artificial Sequence
  Description of Artificial Sequence: Synthetic oligonucleotide
uuauaaaacauuucuucac

SEQ ID NO: 2867920 - RNA, 19 nt, Artificial Sequence
  Description of Artificial Sequence: Synthetic oligonucleotide
auugucuuuuguuagaaga

SEQ ID NO: 2867921 - RNA, 19 nt, Artificial Sequence
  Description of Artificial Sequence: Synthetic oligonucleotide
accuuuacagaaaugauac

SEQ ID NO: 2867922 - RNA, 19 nt, Artificial Sequence
  Description of Artificial Sequence: Synthetic oligonucleotide
aaaugaauuccagauacug

SEQ ID NO: 2867923 - RNA, 19 nt, Artificial Sequence
  Description of Artificial Sequence: Synthetic oligonucleotide
uaaauacauaaauacaauc

SEQ ID NO: 2867924 - RNA, 19 nt, Artificial Sequence
  Description of Artificial Sequence: Synthetic oligonucleotide
ucuuucauucacaaguuac

SEQ ID NO: 2867925 - RNA, 19 nt, Artificial Sequence
  Description of Artificial Sequence: Synthetic oligonucleotide
gaagaaauuugauugaaaa

SEQ ID NO: 2867926 - RNA, 19 nt, Artificial Sequence
  Description of Artificial Sequence: Synthetic oligonucleotide
ucauucauauauaacaaua

SEQ ID NO: 2867927 - RNA, 19 nt, Artificial Sequence
  Description of Artificial Sequence: Synthetic oligonucleotide
auacaaucaauucccguac

SEQ ID NO: 2867928 - RNA, 19 nt, Artificial Sequence
  Description of Artificial Sequence: Synthetic oligonucleotide
uguaaagaauguauuuccc

SEQ ID NO: 2867929 - RNA, 19 nt, Artificial Sequence
  Description of Artificial Sequence: Synthetic oligonucleotide
ucauucacaaguuaccugu

SEQ ID NO: 2867930 - RNA, 19 nt, Artificial Sequence
  Description of Artificial Sequence: Synthetic oligonucleotide
uacagaaaugauacaauca

SEQ ID NO: 2867931 - RNA, 19 nt, Artificial Sequence
  Description of Artificial Sequence: Synthetic oligonucleotide
cuguaaagaauguauuucc

SEQ ID NO: 2867932 - RNA, 19 nt, Artificial Sequence
  Description of Artificial Sequence: Synthetic oligonucleotide
auacuguacauaaauauuc

SEQ ID NO: 2867933 - RNA, 19 nt, Artificial Sequence
  Description of Artificial Sequence: Synthetic oligonucleotide
aguuaauuauggcaaaugu

SEQ ID NO: 2867934 - RNA, 19 nt, Artificial Sequence
  Description of Artificial Sequence: Synthetic oligonucleotide
uuaggaaagguagaaaaug

SEQ ID NO: 2867935 - RNA, 19 nt, Artificial Sequence
  Description of Artificial Sequence: Synthetic oligonucleotide
caagaagacacaaagccac

SEQ ID NO: 2867936 - RNA, 19 nt, Artificial Sequence
  Description of Artificial Sequence: Synthetic oligonucleotide
aacauuucuucaccuuuac

SEQ ID NO: 2867937 - RNA, 19 nt, Artificial Sequence
  Description of Artificial Sequence: Synthetic oligonucleotide
uaguaaauuauuucuuuca

SEQ ID NO: 2867938 - RNA, 19 nt, Artificial Sequence
  Description of Artificial Sequence: Synthetic oligonucleotide
uaauuauggcaaaugugag

SEQ ID NO: 2867939 - RNA, 19 nt, Artificial Sequence
  Description of Artificial Sequence: Synthetic oligonucleotide
uucaccuuuacagaaauga

SEQ ID NO: 2867940 - RNA, 19 nt, Artificial Sequence
  Description of Artificial Sequence: Synthetic oligonucleotide
agauacuguacauaaauau

SEQ ID NO: 2867941 - RNA, 19 nt, Artificial Sequence
  Description of Artificial Sequence: Synthetic oligonucleotide
aaucugguuauuugaaagu

SEQ ID NO: 2867942 - RNA, 19 nt, Artificial Sequence
  Description of Artificial Sequence: Synthetic oligonucleotide
aaaacauuucuucaccuuu

SEQ ID NO: 2867943 - RNA, 19 nt, Artificial Sequence
  Description of Artificial Sequence: Synthetic oligonucleotide
uuuugaaucugguuauuug

SEQ ID NO: 2867944 - RNA, 19 nt, Artificial Sequence
  Description of Artificial Sequence: Synthetic oligonucleotide
acagaaaugauacaaucaa

SEQ ID NO: 2867945 - RNA, 19 nt, Artificial Sequence
  Description of Artificial Sequence: Synthetic oligonucleotide
auaaauauuccauugucuu

SEQ ID NO: 2867946 - RNA, 19 nt, Artificial Sequence
  Description of Artificial Sequence: Synthetic oligonucleotide
uuauuugaaaguacauugu

SEQ ID NO: 2867947 - RNA, 19 nt, Artificial Sequence
  Description of Artificial Sequence: Synthetic oligonucleotide
cuuucauucacaaguuacc

SEQ ID NO: 2867948 - RNA, 19 nt, Artificial Sequence
  Description of Artificial Sequence: Synthetic oligonucleotide
uuuguccacauuuaauuca

SEQ ID NO: 2867949 - RNA, 19 nt, Artificial Sequence
  Description of Artificial Sequence: Synthetic oligonucleotide
uucacaaguuaccuguugc

SEQ ID NO: 2867950 - RNA, 19 nt, Artificial Sequence
  Description of Artificial Sequence: Synthetic oligonucleotide
auuauggcaaaugugaggu

SEQ ID NO: 2867951 - RNA, 19 nt, Artificial Sequence
  Description of Artificial Sequence: Synthetic oligonucleotide
uaggaaagguagaaaauga

SEQ ID NO: 2867952 - RNA, 19 nt, Artificial Sequence
  Description of Artificial Sequence: Synthetic oligonucleotide
uacuguacauaaauauucc

SEQ ID NO: 2867953 - RNA, 19 nt, Artificial Sequence
  Description of Artificial Sequence: Synthetic oligonucleotide
uuagaagaaauuugauuga

SEQ ID NO: 2867954 - RNA, 19 nt, Artificial Sequence
  Description of Artificial Sequence: Synthetic oligonucleotide
guaaagaauguauuucccc

SEQ ID NO: 2867955 - RNA, 19 nt, Artificial Sequence
  Description of Artificial Sequence: Synthetic oligonucleotide
uucucuguaaagaauguau

SEQ ID NO: 2867956 - RNA, 19 nt, Artificial Sequence
  Description of Artificial Sequence: Synthetic oligonucleotide
guacauaaauauuccauug

SEQ ID NO: 2867957 - RNA, 19 nt, Artificial Sequence
  Description of Artificial Sequence: Synthetic oligonucleotide
auaucuuaucacauaaggg

SEQ ID NO: 2867958 - RNA, 19 nt, Artificial Sequence
  Description of Artificial Sequence: Synthetic oligonucleotide
uuacagaaaugauacaauc

SEQ ID NO: 2867959 - RNA, 19 nt, Artificial Sequence
  Description of Artificial Sequence: Synthetic oligonucleotide
uguuuguccacauuuaauu

SEQ ID NO: 2867960 - RNA, 19 nt, Artificial Sequence
  Description of Artificial Sequence: Synthetic oligonucleotide
uuuacagaaaugauacaau

SEQ ID NO: 2867961 - RNA, 19 nt, Artificial Sequence
  Description of Artificial Sequence: Synthetic oligonucleotide
cuuauaaaacauuucuuca

SEQ ID NO: 2867962 - RNA, 19 nt, Artificial Sequence
  Description of Artificial Sequence: Synthetic oligonucleotide
aaaagugaucuucauguuu

SEQ ID NO: 2867963 - RNA, 19 nt, Artificial Sequence
  Description of Artificial Sequence: Synthetic oligonucleotide
uguacauaaauauuccauu

SEQ ID NO: 2867964 - RNA, 19 nt, Artificial Sequence
  Description of Artificial Sequence: Synthetic oligonucleotide
uauugaaacugcuccaaga

SEQ ID NO: 2867965 - RNA, 19 nt, Artificial Sequence
  Description of Artificial Sequence: Synthetic oligonucleotide
acauaagggguuuuguuug

SEQ ID NO: 2867966 - RNA, 19 nt, Artificial Sequence
  Description of Artificial Sequence: Synthetic oligonucleotide
ugaaaguacauuguuacau

SEQ ID NO: 2867967 - RNA, 19 nt, Artificial Sequence
  Description of Artificial Sequence: Synthetic oligonucleotide
uguugcuuauaaaacauuu

SEQ ID NO: 2867968 - RNA, 19 nt, Artificial Sequence
  Description of Artificial Sequence: Synthetic oligonucleotide
uauaccuaaaugucaauua

SEQ ID NO: 2867969 - RNA, 19 nt, Artificial Sequence
  Description of Artificial Sequence: Synthetic oligonucleotide
gauacaaucaauucccgua

SEQ ID NO: 2867970 - RNA, 19 nt, Artificial Sequence
  Description of Artificial Sequence: Synthetic oligonucleotide
auucauaucaaaagugauc

SEQ ID NO: 2867971 - RNA, 19 nt, Artificial Sequence
  Description of Artificial Sequence: Synthetic oligonucleotide
uacugaacccacauauuag

SEQ ID NO: 2867972 - RNA, 19 nt, Artificial Sequence
  Description of Artificial Sequence: Synthetic oligonucleotide
auuaucaucaagcguuucu

SEQ ID NO: 2867973 - RNA, 19 nt, Artificial Sequence
  Description of Artificial Sequence: Synthetic oligonucleotide
aaaaguuaauuauggcaaa

SEQ ID NO: 2867974 - RNA, 19 nt, Artificial Sequence
  Description of Artificial Sequence: Synthetic oligonucleotide
aaucaauucccguacugaa

SEQ ID NO: 2867975 - RNA, 19 nt, Artificial Sequence
  Description of Artificial Sequence: Synthetic oligonucleotide
aaguuaauuauggcaaaug

SEQ ID NO: 2867976 - RNA, 19 nt, Artificial Sequence
  Description of Artificial Sequence: Synthetic oligonucleotide
ucuguaaagaauguauuuc

SEQ ID NO: 2867977 - RNA, 19 nt, Artificial Sequence
  Description of Artificial Sequence: Synthetic oligonucleotide
uacauuguuguauauugaa

SEQ ID NO: 2867978 - RNA, 19 nt, Artificial Sequence
  Description of Artificial Sequence: Synthetic oligonucleotide
cuucauguuuugaaucugg

SEQ ID NO: 2867979 - RNA, 19 nt, Artificial Sequence
  Description of Artificial Sequence: Synthetic oligonucleotide
aguaaauuauuucuuucau

SEQ ID NO: 2867980 - RNA, 19 nt, Artificial Sequence
  Description of Artificial Sequence: Synthetic oligonucleotide
uacaaucauucauauauaa

SEQ ID NO: 2867981 - RNA, 19 nt, Artificial Sequence
  Description of Artificial Sequence: Synthetic oligonucleotide
guuaauuauggcaaaugug

SEQ ID NO: 2867982 - RNA, 19 nt, Artificial Sequence
  Description of Artificial Sequence: Synthetic oligonucleotide
uauuugaaaguacauuguu

SEQ ID NO: 2867983 - RNA, 19 nt, Artificial Sequence
  Description of Artificial Sequence: Synthetic oligonucleotide
aaucauucauauauaacaa

SEQ ID NO: 2867984 - RNA, 19 nt, Artificial Sequence
  Description of Artificial Sequence: Synthetic oligonucleotide
ucuaguaaauuauuucuuu

SEQ ID NO: 2867985 - RNA, 19 nt, Artificial Sequence
  Description of Artificial Sequence: Synthetic oligonucleotide
aucaaaagugaucuucaug

SEQ ID NO: 2867986 - RNA, 19 nt, Artificial Sequence
  Description of Artificial Sequence: Synthetic oligonucleotide
cauaucaaaagugaucuuc

SEQ ID NO: 2867987 - RNA, 19 nt, Artificial Sequence
  Description of Artificial Sequence: Synthetic oligonucleotide
auuucuucaccuuuacaga

SEQ ID NO: 2867988 - RNA, 19 nt, Artificial Sequence
  Description of Artificial Sequence: Synthetic oligonucleotide
acauaaauacaaucauuca

SEQ ID NO: 2867989 - RNA, 19 nt, Artificial Sequence
  Description of Artificial Sequence: Synthetic oligonucleotide
gaucuucauguuuugaauc

SEQ ID NO: 2867990 - RNA, 19 nt, Artificial Sequence
  Description of Artificial Sequence: Synthetic oligonucleotide
cuaguaaauuauuucuuuc

SEQ ID NO: 2867991 - RNA, 19 nt, Artificial Sequence
  Description of Artificial Sequence: Synthetic oligonucleotide
augaauuccagauacugua

SEQ ID NO: 2867992 - RNA, 19 nt, Artificial Sequence
  Description of Artificial Sequence: Synthetic oligonucleotide
acaaucauucauauauaac

SEQ ID NO: 2867993 - RNA, 19 nt, Artificial Sequence
  Description of Artificial Sequence: Synthetic oligonucleotide
cauguuuugaaucugguua

SEQ ID NO: 2867994 - RNA, 19 nt, Artificial Sequence
  Description of Artificial Sequence: Synthetic oligonucleotide
aagcguuucuaguaaauua

SEQ ID NO: 2867995 - RNA, 19 nt, Artificial Sequence
  Description of Artificial Sequence: Synthetic oligonucleotide
ucugguuauuugaaaguac

SEQ ID NO: 2867996 - RNA, 19 nt, Artificial Sequence
  Description of Artificial Sequence: Synthetic oligonucleotide
aauuccagauacuguacau

SEQ ID NO: 2867997 - RNA, 19 nt, Artificial Sequence
  Description of Artificial Sequence: Synthetic oligonucleotide
uuuguuuguccacauuuaa

SEQ ID NO: 2867998 - RNA, 19 nt, Artificial Sequence
  Description of Artificial Sequence: Synthetic oligonucleotide
uauggcaaaugugagguga

SEQ ID NO: 2867999 - RNA, 19 nt, Artificial Sequence
  Description of Artificial Sequence: Synthetic oligonucleotide
gcuuauaaaacauuucuuc

SEQ ID NO: 2868000 - RNA, 19 nt, Artificial Sequence
  Description of Artificial Sequence: Synthetic oligonucleotide
aagccacauaaauucuuag

SEQ ID NO: 2868001 - RNA, 19 nt, Artificial Sequence
  Description of Artificial Sequence: Synthetic oligonucleotide
aauauuccauugucuuuug

SEQ ID NO: 2868002 - RNA, 19 nt, Artificial Sequence
  Description of Artificial Sequence: Synthetic oligonucleotide
ucuuuuguuagaagaaauu

SEQ ID NO: 2868003 - RNA, 19 nt, Artificial Sequence
  Description of Artificial Sequence: Synthetic oligonucleotide
uuccagauacuguacauaa

SEQ ID NO: 2868004 - RNA, 19 nt, Artificial Sequence
  Description of Artificial Sequence: Synthetic oligonucleotide
aaugaauuccagauacugu

SEQ ID NO: 2868005 - RNA, 19 nt, Artificial Sequence
  Description of Artificial Sequence: Synthetic oligonucleotide
auucauauauaacaauaua

SEQ ID NO: 2868006 - RNA, 19 nt, Artificial Sequence
  Description of Artificial Sequence: Synthetic oligonucleotide
cauuuaauucauaucaaaa

SEQ ID NO: 2868007 - RNA, 19 nt, Artificial Sequence
  Description of Artificial Sequence: Synthetic oligonucleotide
uauuucuuucauucacaag

SEQ ID NO: 2868008 - RNA, 19 nt, Artificial Sequence
  Description of Artificial Sequence: Synthetic oligonucleotide
uuacauuguuguauauuga

SEQ ID NO: 2868009 - RNA, 19 nt, Artificial Sequence
  Description of Artificial Sequence: Synthetic oligonucleotide
uuguauauugaaacugcuc

SEQ ID NO: 2868010 - RNA, 19 nt, Artificial Sequence
  Description of Artificial Sequence: Synthetic oligonucleotide
acauuuaauucauaucaaa

SEQ ID NO: 2868011 - RNA, 19 nt, Artificial Sequence
  Description of Artificial Sequence: Synthetic oligonucleotide
uugucuuuuguuagaagaa

SEQ ID NO: 2868012 - RNA, 19 nt, Artificial Sequence
  Description of Artificial Sequence: Synthetic oligonucleotide
uucauucacaaguuaccug

SEQ ID NO: 2868013 - RNA, 19 nt, Artificial Sequence
  Description of Artificial Sequence: Synthetic oligonucleotide
uaucaucaagcguuucuag

SEQ ID NO: 2868014 - RNA, 19 nt, Artificial Sequence
  Description of Artificial Sequence: Synthetic oligonucleotide
accuaaaugucaauuauca

SEQ ID NO: 2868015 - RNA, 19 nt, Artificial Sequence
  Description of Artificial Sequence: Synthetic oligonucleotide
aaagugaucuucauguuuu

SEQ ID NO: 2868016 - RNA, 19 nt, Artificial Sequence
  Description of Artificial Sequence: Synthetic oligonucleotide
auauauaacaauauaccua

SEQ ID NO: 2868017 - RNA, 19 nt, Artificial Sequence
  Description of Artificial Sequence: Synthetic oligonucleotide
aauucauaucaaaagugau

SEQ ID NO: 2868018 - RNA, 19 nt, Artificial Sequence
  Description of Artificial Sequence: Synthetic oligonucleotide
uaccuguugcuuauaaaac

SEQ ID NO: 2868019 - RNA, 19 nt, Artificial Sequence
  Description of Artificial Sequence: Synthetic oligonucleotide
aagggguuuuguuugucca

SEQ ID NO: 2868020 - RNA, 19 nt, Artificial Sequence
  Description of Artificial Sequence: Synthetic oligonucleotide
ugaauuccagauacuguac

SEQ ID NO: 2868021 - RNA, 19 nt, Artificial Sequence
  Description of Artificial Sequence: Synthetic oligonucleotide
uucuaguaaauuauuucuu

SEQ ID NO: 2868022 - RNA, 19 nt, Artificial Sequence
  Description of Artificial Sequence: Synthetic oligonucleotide
agaaaugauacaaucaauu

SEQ ID NO: 2868023 - RNA, 19 nt, Artificial Sequence
  Description of Artificial Sequence: Synthetic oligonucleotide
ucaucaagcguuucuagua

SEQ ID NO: 2868024 - RNA, 19 nt, Artificial Sequence
  Description of Artificial Sequence: Synthetic oligonucleotide
cauauauaacaauauaccu

SEQ ID NO: 2868025 - RNA, 19 nt, Artificial Sequence
  Description of Artificial Sequence: Synthetic oligonucleotide
uauuccauugucuuuuguu

SEQ ID NO: 2868026 - RNA, 19 nt, Artificial Sequence
  Description of Artificial Sequence: Synthetic oligonucleotide
auaccuaaaugucaauuau

SEQ ID NO: 2868027 - RNA, 19 nt, Artificial Sequence
  Description of Artificial Sequence: Synthetic oligonucleotide
guagaaaaugaauuccaga

SEQ ID NO: 2868028 - RNA, 19 nt, Artificial Sequence
  Description of Artificial Sequence: Synthetic oligonucleotide
auuguuacauuguuguaua

SEQ ID NO: 2868029 - RNA, 19 nt, Artificial Sequence
  Description of Artificial Sequence: Synthetic oligonucleotide
acuguacauaaauauucca

SEQ ID NO: 2868030 - RNA, 19 nt, Artificial Sequence
  Description of Artificial Sequence: Synthetic oligonucleotide
uccacauuuaauucauauc

SEQ ID NO: 2868031 - RNA, 19 nt, Artificial Sequence
  Description of Artificial Sequence: Synthetic oligonucleotide
aguacauuguuacauuguu

SEQ ID NO: 2868032 - RNA, 19 nt, Artificial Sequence
  Description of Artificial Sequence: Synthetic oligonucleotide
auauugaaacugcuccaag

SEQ ID NO: 2868033 - RNA, 19 nt, Artificial Sequence
  Description of Artificial Sequence: Synthetic oligonucleotide
aauauaccuaaaugucaau

SEQ ID NO: 2868034 - RNA, 19 nt, Artificial Sequence
  Description of Artificial Sequence: Synthetic oligonucleotide
ugcuuauaaaacauuucuu

SEQ ID NO: 2868035 - RNA, 19 nt, Artificial Sequence
  Description of Artificial Sequence: Synthetic oligonucleotide
acaauauaccuaaauguca

SEQ ID NO: 2868036 - RNA, 19 nt, Artificial Sequence
  Description of Artificial Sequence: Synthetic oligonucleotide
gcuccaagaagacacaaag

SEQ ID NO: 2868037 - RNA, 19 nt, Artificial Sequence
  Description of Artificial Sequence: Synthetic oligonucleotide
uuuuguuuguccacauuua

SEQ ID NO: 2868038 - RNA, 19 nt, Artificial Sequence
  Description of Artificial Sequence: Synthetic oligonucleotide
acaaucaauucccguacug

SEQ ID NO: 2868039 - RNA, 19 nt, Artificial Sequence
  Description of Artificial Sequence: Synthetic oligonucleotide
gaacccacauauuaggaaa

SEQ ID NO: 2868040 - RNA, 19 nt, Artificial Sequence
  Description of Artificial Sequence: Synthetic oligonucleotide
uaccuaaaugucaauuauc

SEQ ID NO: 2868041 - RNA, 19 nt, Artificial Sequence
  Description of Artificial Sequence: Synthetic oligonucleotide
uaagggguuuuguuugucc

SEQ ID NO: 2868042 - RNA, 19 nt, Artificial Sequence
  Description of Artificial Sequence: Synthetic oligonucleotide
auuccauugucuuuuguua

SEQ ID NO: 2868043 - RNA, 19 nt, Artificial Sequence
  Description of Artificial Sequence: Synthetic oligonucleotide
uugaaaguacauuguuaca

SEQ ID NO: 2868044 - RNA, 19 nt, Artificial Sequence
  Description of Artificial Sequence: Synthetic oligonucleotide
ugaacccacauauuaggaa

SEQ ID NO: 2868045 - RNA, 19 nt, Artificial Sequence
  Description of Artificial Sequence: Synthetic oligonucleotide
cuuuacagaaaugauacaa

SEQ ID NO: 2868046 - RNA, 19 nt, Artificial Sequence
  Description of Artificial Sequence: Synthetic oligonucleotide
uauauugaaacugcuccaa

SEQ ID NO: 2868047 - RNA, 19 nt, Artificial Sequence
  Description of Artificial Sequence: Synthetic oligonucleotide
aaaguuaauuauggcaaau

SEQ ID NO: 2868048 - RNA, 19 nt, Artificial Sequence
  Description of Artificial Sequence: Synthetic oligonucleotide
ucucuguaaagaauguauu

SEQ ID NO: 2868049 - RNA, 19 nt, Artificial Sequence
  Description of Artificial Sequence: Synthetic oligonucleotide
agaaaaugaauuccagaua

SEQ ID NO: 2868050 - RNA, 19 nt, Artificial Sequence
  Description of Artificial Sequence: Synthetic oligonucleotide
ugauacaaucaauucccgu

SEQ ID NO: 2868051 - RNA, 19 nt, Artificial Sequence
  Description of Artificial Sequence: Synthetic oligonucleotide
uucauguuuugaaucuggu

SEQ ID NO: 2868052 - RNA, 19 nt, Artificial Sequence
  Description of Artificial Sequence: Synthetic oligonucleotide
uaaauauuccauugucuuu

SEQ ID NO: 2868053 - RNA, 19 nt, Artificial Sequence
  Description of Artificial Sequence: Synthetic oligonucleotide
aauuaucaucaagcguuuc

SEQ ID NO: 2868054 - RNA, 19 nt, Artificial Sequence
  Description of Artificial Sequence: Synthetic oligonucleotide
aaauacaaucauucauaua

SEQ ID NO: 2868055 - RNA, 19 nt, Artificial Sequence
  Description of Artificial Sequence: Synthetic oligonucleotide
aucauucauauauaacaau

SEQ ID NO: 2868056 - RNA, 19 nt, Artificial Sequence
  Description of Artificial Sequence: Synthetic oligonucleotide
cugguuauuugaaaguaca

SEQ ID NO: 2868057 - RNA, 19 nt, Artificial Sequence
  Description of Artificial Sequence: Synthetic oligonucleotide
uuucuuucauucacaaguu

SEQ ID NO: 2868058 - RNA, 19 nt, Artificial Sequence
  Description of Artificial Sequence: Synthetic oligonucleotide
caauauaccuaaaugucaa

SEQ ID NO: 2868059 - RNA, 19 nt, Artificial Sequence
  Description of Artificial Sequence: Synthetic oligonucleotide
gaauuccagauacuguaca

SEQ ID NO: 2868060 - RNA, 19 nt, Artificial Sequence
  Description of Artificial Sequence: Synthetic oligonucleotide
cacauaaauucuuaguaaa

SEQ ID NO: 2868061 - RNA, 19 nt, Artificial Sequence
  Description of Artificial Sequence: Synthetic oligonucleotide
cuccaagaagacacaaagc

SEQ ID NO: 2868062 - RNA, 19 nt, Artificial Sequence
  Description of Artificial Sequence: Synthetic oligonucleotide
uuggcuucucuguaaagaa

SEQ ID NO: 2868063 - RNA, 19 nt, Artificial Sequence
  Description of Artificial Sequence: Synthetic oligonucleotide
gaacaaauaaauacauaaa

SEQ ID NO: 2868064 - RNA, 19 nt, Artificial Sequence
  Description of Artificial Sequence: Synthetic oligonucleotide
uaaaacauuucuucaccuu

SEQ ID NO: 2868065 - RNA, 19 nt, Artificial Sequence
  Description of Artificial Sequence: Synthetic oligonucleotide
guuuguccacauuuaauuc

SEQ ID NO: 2868066 - RNA, 19 nt, Artificial Sequence
  Description of Artificial Sequence: Synthetic oligonucleotide
auguuuugaaucugguuau

SEQ ID NO: 2868067 - RNA, 19 nt, Artificial Sequence
  Description of Artificial Sequence: Synthetic oligonucleotide
auaucaaaagugaucuuca

SEQ ID NO: 2868068 - RNA, 19 nt, Artificial Sequence
  Description of Artificial Sequence: Synthetic oligonucleotide
ucacaaguuaccuguugcu

SEQ ID NO: 2868069 - RNA, 19 nt, Artificial Sequence
  Description of Artificial Sequence: Synthetic oligonucleotide
uuguuuguccacauuuaau

SEQ ID NO: 2868070 - RNA, 19 nt, Artificial Sequence
  Description of Artificial Sequence: Synthetic oligonucleotide
agccacauaaauucuuagu

SEQ ID NO: 2868071 - RNA, 19 nt, Artificial Sequence
  Description of Artificial Sequence: Synthetic oligonucleotide
guauauugaaacugcucca

SEQ ID NO: 2868072 - RNA, 19 nt, Artificial Sequence
  Description of Artificial Sequence: Synthetic oligonucleotide
auucacaaguuaccuguug

SEQ ID NO: 2868073 - RNA, 19 nt, Artificial Sequence
  Description of Artificial Sequence: Synthetic oligonucleotide
agggguuuuguuuguccac

SEQ ID NO: 2868074 - RNA, 19 nt, Artificial Sequence
  Description of Artificial Sequence: Synthetic oligonucleotide
ucuuaucacauaagggguu

SEQ ID NO: 2868075 - RNA, 19 nt, Artificial Sequence
  Description of Artificial Sequence: Synthetic oligonucleotide
aagugaucuucauguuuug

SEQ ID NO: 2868076 - RNA, 19 nt, Artificial Sequence
  Description of Artificial Sequence: Synthetic oligonucleotide
gaaagguagaaaaugaauu

SEQ ID NO: 2868077 - RNA, 19 nt, Artificial Sequence
  Description of Artificial Sequence: Synthetic oligonucleotide
ugguuauuugaaaguacau

SEQ ID NO: 2868078 - RNA, 19 nt, Artificial Sequence
  Description of Artificial Sequence: Synthetic oligonucleotide
ucaccuuuacagaaaugau

SEQ ID NO: 2868079 - RNA, 19 nt, Artificial Sequence
  Description of Artificial Sequence: Synthetic oligonucleotide
uccauugucuuuuguuaga

SEQ ID NO: 2868080 - RNA, 19 nt, Artificial Sequence
  Description of Artificial Sequence: Synthetic oligonucleotide
aaaaugaauuccagauacu

SEQ ID NO: 2868081 - RNA, 19 nt, Artificial Sequence
  Description of Artificial Sequence: Synthetic oligonucleotide
cauaaauacaaucauucau

SEQ ID NO: 2868082 - RNA, 19 nt, Artificial Sequence
  Description of Artificial Sequence: Synthetic oligonucleotide
aucaauucccguacugaac

SEQ ID NO: 2868083 - RNA, 19 nt, Artificial Sequence
  Description of Artificial Sequence: Synthetic oligonucleotide
uagaagaaauuugauugaa

SEQ ID NO: 2868084 - RNA, 19 nt, Artificial Sequence
  Description of Artificial Sequence: Synthetic oligonucleotide
acaaguuaccuguugcuua

SEQ ID NO: 2868085 - RNA, 19 nt, Artificial Sequence
  Description of Artificial Sequence: Synthetic oligonucleotide
aacccacauauuaggaaag

SEQ ID NO: 2868086 - RNA, 19 nt, Artificial Sequence
  Description of Artificial Sequence: Synthetic oligonucleotide
aucuuaucacauaaggggu

SEQ ID NO: 2868087 - RNA, 19 nt, Artificial Sequence
  Description of Artificial Sequence: Synthetic oligonucleotide
ucaagcguuucuaguaaau

SEQ ID NO: 2868088 - RNA, 19 nt, Artificial Sequence
  Description of Artificial Sequence: Synthetic oligonucleotide
uuaucaucaagcguuucua

SEQ ID NO: 2868089 - RNA, 19 nt, Artificial Sequence
  Description of Artificial Sequence: Synthetic oligonucleotide
cauaaauauuccauugucu

SEQ ID NO: 2868090 - RNA, 19 nt, Artificial Sequence
  Description of Artificial Sequence: Synthetic oligonucleotide
uacaaucaauucccguacu

SEQ ID NO: 2868091 - RNA, 19 nt, Artificial Sequence
  Description of Artificial Sequence: Synthetic oligonucleotide
auauaccuaaaugucaauu

SEQ ID NO: 2868092 - RNA, 19 nt, Artificial Sequence
  Description of Artificial Sequence: Synthetic oligonucleotide
ucauguuuugaaucugguu

SEQ ID NO: 2868093 - RNA, 19 nt, Artificial Sequence
  Description of Artificial Sequence: Synthetic oligonucleotide
gaaacugcuccaagaagac

SEQ ID NO: 2868094 - RNA, 19 nt, Artificial Sequence
  Description of Artificial Sequence: Synthetic oligonucleotide
cauugucuuuuguuagaag

SEQ ID NO: 2868095 - RNA, 19 nt, Artificial Sequence
  Description of Artificial Sequence: Synthetic oligonucleotide
ucacauaagggguuuuguu

SEQ ID NO: 2868096 - RNA, 19 nt, Artificial Sequence
  Description of Artificial Sequence: Synthetic oligonucleotide
uguuacauuguuguauauu

SEQ ID NO: 2868097 - RNA, 19 nt, Artificial Sequence
  Description of Artificial Sequence: Synthetic oligonucleotide
uucuucaccuuuacagaaa

SEQ ID NO: 2868098 - RNA, 19 nt, Artificial Sequence
  Description of Artificial Sequence: Synthetic oligonucleotide
aauucccguacugaaccca

SEQ ID NO: 2868099 - RNA, 19 nt, Artificial Sequence
  Description of Artificial Sequence: Synthetic oligonucleotide
aaagccacauaaauucuua

SEQ ID NO: 2868100 - RNA, 19 nt, Artificial Sequence
  Description of Artificial Sequence: Synthetic oligonucleotide
guacugaacccacauauua

SEQ ID NO: 2868101 - RNA, 19 nt, Artificial Sequence
  Description of Artificial Sequence: Synthetic oligonucleotide
auuaggaaagguagaaaau

SEQ ID NO: 2868102 - RNA, 19 nt, Artificial Sequence
  Description of Artificial Sequence: Synthetic oligonucleotide
gguagaaaaugaauuccag

SEQ ID NO: 2868103 - RNA, 19 nt, Artificial Sequence
  Description of Artificial Sequence: Synthetic oligonucleotide
agguagaaaaugaauucca

SEQ ID NO: 2868104 - RNA, 19 nt, Artificial Sequence
  Description of Artificial Sequence: Synthetic oligonucleotide
cauauuaggaaagguagaa

SEQ ID NO: 2868105 - RNA, 19 nt, Artificial Sequence
  Description of Artificial Sequence: Synthetic oligonucleotide
guugcuuauaaaacauuuc

SEQ ID NO: 2868106 - RNA, 19 nt, Artificial Sequence
  Description of Artificial Sequence: Synthetic oligonucleotide
auuugaaaguacauuguua

SEQ ID NO: 2868107 - RNA, 19 nt, Artificial Sequence
  Description of Artificial Sequence: Synthetic oligonucleotide
aguuaccuguugcuuauaa

SEQ ID NO: 2868108 - RNA, 19 nt, Artificial Sequence
  Description of Artificial Sequence: Synthetic oligonucleotide
uucuuucauucacaaguua

SEQ ID NO: 2868109 - RNA, 19 nt, Artificial Sequence
  Description of Artificial Sequence: Synthetic oligonucleotide
aaaugucaauuaucaucaa

SEQ ID NO: 2868110 - RNA, 19 nt, Artificial Sequence
  Description of Artificial Sequence: Synthetic oligonucleotide
guacauuguuacauuguug

SEQ ID NO: 2868111 - RNA, 19 nt, Artificial Sequence
  Description of Artificial Sequence: Synthetic oligonucleotide
guuuuguuuguccacauuu

SEQ ID NO: 2868112 - RNA, 19 nt, Artificial Sequence
  Description of Artificial Sequence: Synthetic oligonucleotide
augauacaaucaauucccg

SEQ ID NO: 2868113 - RNA, 19 nt, Artificial Sequence
  Description of Artificial Sequence: Synthetic oligonucleotide
ggcaaaugugaggugacgg

SEQ ID NO: 2868114 - RNA, 19 nt, Artificial Sequence
  Description of Artificial Sequence: Synthetic oligonucleotide
acauuucuucaccuuuaca

SEQ ID NO: 2868115 - RNA, 19 nt, Artificial Sequence
  Description of Artificial Sequence: Synthetic oligonucleotide
uuauggcaaaugugaggug

SEQ ID NO: 2868116 - RNA, 19 nt, Artificial Sequence
  Description of Artificial Sequence: Synthetic oligonucleotide
aaacauuucuucaccuuua

SEQ ID NO: 2868117 - RNA, 19 nt, Artificial Sequence
  Description of Artificial Sequence: Synthetic oligonucleotide
agcguuucuaguaaauuau

SEQ ID NO: 2868118 - RNA, 19 nt, Artificial Sequence
  Description of Artificial Sequence: Synthetic oligonucleotide
acauauuaggaaagguaga

SEQ ID NO: 2868119 - RNA, 19 nt, Artificial Sequence
  Description of Artificial Sequence: Synthetic oligonucleotide
cauucauauauaacaauau

SEQ ID NO: 2868120 - RNA, 19 nt, Artificial Sequence
  Description of Artificial Sequence: Synthetic oligonucleotide
ugcuccaagaagacacaaa

SEQ ID NO: 2868121 - RNA, 19 nt, Artificial Sequence
  Description of Artificial Sequence: Synthetic oligonucleotide
uccagauacuguacauaaa

SEQ ID NO: 2868122 - RNA, 19 nt, Artificial Sequence
  Description of Artificial Sequence: Synthetic oligonucleotide
cuuggcuucucuguaaaga

SEQ ID NO: 2868123 - RNA, 19 nt, Artificial Sequence
  Description of Artificial Sequence: Synthetic oligonucleotide
cacauuuaauucauaucaa

SEQ ID NO: 2868124 - RNA, 19 nt, Artificial Sequence
  Description of Artificial Sequence: Synthetic oligonucleotide
uggcaaaugugaggugacg

SEQ ID NO: 2868125 - RNA, 19 nt, Artificial Sequence
  Description of Artificial Sequence: Synthetic oligonucleotide
caauucccguacugaaccc

SEQ ID NO: 2868126 - RNA, 19 nt, Artificial Sequence
  Description of Artificial Sequence: Synthetic oligonucleotide
acccacauauuaggaaagg

SEQ ID NO: 2868127 - RNA, 19 nt, Artificial Sequence
  Description of Artificial Sequence: Synthetic oligonucleotide
gauacuguacauaaauauu

SEQ ID NO: 2868128 - RNA, 19 nt, Artificial Sequence
  Description of Artificial Sequence: Synthetic oligonucleotide
gccacauaaauucuuagua

SEQ ID NO: 2868129 - RNA, 19 nt, Artificial Sequence
  Description of Artificial Sequence: Synthetic oligonucleotide
auauuaggaaagguagaaa

SEQ ID NO: 2868130 - RNA, 19 nt, Artificial Sequence
  Description of Artificial Sequence: Synthetic oligonucleotide
aaacugcuccaagaagaca

SEQ ID NO: 2868131 - RNA, 19 nt, Artificial Sequence
  Description of Artificial Sequence: Synthetic oligonucleotide
gucaauuaucaucaagcgu

SEQ ID NO: 2868132 - RNA, 19 nt, Artificial Sequence
  Description of Artificial Sequence: Synthetic oligonucleotide
auaagggguuuuguuuguc

SEQ ID NO: 2868133 - RNA, 19 nt, Artificial Sequence
  Description of Artificial Sequence: Synthetic oligonucleotide
auggcaaaugugaggugac

SEQ ID NO: 2868134 - RNA, 19 nt, Artificial Sequence
  Description of Artificial Sequence: Synthetic oligonucleotide
auucccguacugaacccac

SEQ ID NO: 2868135 - RNA, 19 nt, Artificial Sequence
  Description of Artificial Sequence: Synthetic oligonucleotide
aagaagacacaaagccaca

SEQ ID NO: 2868136 - RNA, 19 nt, Artificial Sequence
  Description of Artificial Sequence: Synthetic oligonucleotide
uccuuggcuucucuguaaa

SEQ ID NO: 2868137 - RNA, 19 nt, Artificial Sequence
  Description of Artificial Sequence: Synthetic oligonucleotide
gaagacacaaagccacaua

SEQ ID NO: 2868138 - RNA, 19 nt, Artificial Sequence
  Description of Artificial Sequence: Synthetic oligonucleotide
auauuccauugucuuuugu

SEQ ID NO: 2868139 - RNA, 19 nt, Artificial Sequence
  Description of Artificial Sequence: Synthetic oligonucleotide
caccuuuacagaaaugaua

SEQ ID NO: 2868140 - RNA, 19 nt, Artificial Sequence
  Description of Artificial Sequence: Synthetic oligonucleotide
gaaaguacauuguuacauu

SEQ ID NO: 2868141 - RNA, 19 nt, Artificial Sequence
  Description of Artificial Sequence: Synthetic oligonucleotide
aucugguuauuugaaagua

SEQ ID NO: 2868142 - RNA, 19 nt, Artificial Sequence
  Description of Artificial Sequence: Synthetic oligonucleotide
acauuguuguauauugaaa

SEQ ID NO: 2868143 - RNA, 19 nt, Artificial Sequence
  Description of Artificial Sequence: Synthetic oligonucleotide
agaagaaauuugauugaaa

SEQ ID NO: 2868144 - RNA, 19 nt, Artificial Sequence
  Description of Artificial Sequence: Synthetic oligonucleotide
uggcuucucuguaaagaau

SEQ ID NO: 2868145 - RNA, 19 nt, Artificial Sequence
  Description of Artificial Sequence: Synthetic oligonucleotide
cugaacccacauauuagga

SEQ ID NO: 2868146 - RNA, 19 nt, Artificial Sequence
  Description of Artificial Sequence: Synthetic oligonucleotide
ucccguacugaacccacau

SEQ ID NO: 2868147 - RNA, 19 nt, Artificial Sequence
  Description of Artificial Sequence: Synthetic oligonucleotide
acaaagccacauaaauucu

SEQ ID NO: 2868148 - RNA, 19 nt, Artificial Sequence
  Description of Artificial Sequence: Synthetic oligonucleotide
caaucaauucccguacuga

SEQ ID NO: 2868149 - RNA, 19 nt, Artificial Sequence
  Description of Artificial Sequence: Synthetic oligonucleotide
agugaucuucauguuuuga

SEQ ID NO: 2868150 - RNA, 19 nt, Artificial Sequence
  Description of Artificial Sequence: Synthetic oligonucleotide
aucaagcguuucuaguaaa

SEQ ID NO: 2868151 - RNA, 19 nt, Artificial Sequence
  Description of Artificial Sequence: Synthetic oligonucleotide
cuucaccuuuacagaaaug

SEQ ID NO: 2868152 - RNA, 19 nt, Artificial Sequence
  Description of Artificial Sequence: Synthetic oligonucleotide
uccuuccuuggcuucucug

SEQ ID NO: 2868153 - RNA, 19 nt, Artificial Sequence
  Description of Artificial Sequence: Synthetic oligonucleotide
ucauaucaaaagugaucuu

SEQ ID NO: 2868154 - RNA, 19 nt, Artificial Sequence
  Description of Artificial Sequence: Synthetic oligonucleotide
uuguuacauuguuguauau

SEQ ID NO: 2868155 - RNA, 19 nt, Artificial Sequence
  Description of Artificial Sequence: Synthetic oligonucleotide
acacaaagccacauaaauu

SEQ ID NO: 2868156 - RNA, 19 nt, Artificial Sequence
  Description of Artificial Sequence: Synthetic oligonucleotide
acauuguuacauuguugua

SEQ ID NO: 2868157 - RNA, 19 nt, Artificial Sequence
  Description of Artificial Sequence: Synthetic oligonucleotide
guuaccuguugcuuauaaa

SEQ ID NO: 2868158 - RNA, 19 nt, Artificial Sequence
  Description of Artificial Sequence: Synthetic oligonucleotide
cagauacuguacauaaaua

SEQ ID NO: 2868159 - RNA, 19 nt, Artificial Sequence
  Description of Artificial Sequence: Synthetic oligonucleotide
guccacauuuaauucauau

SEQ ID NO: 2868160 - RNA, 19 nt, Artificial Sequence
  Description of Artificial Sequence: Synthetic oligonucleotide
ccauaucuuaucacauaag

SEQ ID NO: 2868161 - RNA, 19 nt, Artificial Sequence
  Description of Artificial Sequence: Synthetic oligonucleotide
uuccuuggcuucucuguaa

SEQ ID NO: 2868162 - RNA, 19 nt, Artificial Sequence
  Description of Artificial Sequence: Synthetic oligonucleotide
auuccagauacuguacaua

SEQ ID NO: 2868163 - RNA, 19 nt, Artificial Sequence
  Description of Artificial Sequence: Synthetic oligonucleotide
cauuguuacauuguuguau

SEQ ID NO: 2868164 - RNA, 19 nt, Artificial Sequence
  Description of Artificial Sequence: Synthetic oligonucleotide
caucaagcguuucuaguaa

SEQ ID NO: 2868165 - RNA, 19 nt, Artificial Sequence
  Description of Artificial Sequence: Synthetic oligonucleotide
gcaaaugugaggugacgga

SEQ ID NO: 2868166 - RNA, 19 nt, Artificial Sequence
  Description of Artificial Sequence: Synthetic oligonucleotide
auacaaucauucauauaua

SEQ ID NO: 2868167 - RNA, 19 nt, Artificial Sequence
  Description of Artificial Sequence: Synthetic oligonucleotide
caaaugugaggugacggaa

SEQ ID NO: 2868168 - RNA, 19 nt, Artificial Sequence
  Description of Artificial Sequence: Synthetic oligonucleotide
uucccguacugaacccaca

SEQ ID NO: 2868169 - RNA, 19 nt, Artificial Sequence
  Description of Artificial Sequence: Synthetic oligonucleotide
cacauaagggguuuuguuu

SEQ ID NO: 2868170 - RNA, 19 nt, Artificial Sequence
  Description of Artificial Sequence: Synthetic oligonucleotide
guuguauauugaaacugcu

SEQ ID NO: 2868171 - RNA, 19 nt, Artificial Sequence
  Description of Artificial Sequence: Synthetic oligonucleotide
uguccacauuuaauucaua

SEQ ID NO: 2868172 - RNA, 19 nt, Artificial Sequence
  Description of Artificial Sequence: Synthetic oligonucleotide
ccacauaaauucuuaguaa

SEQ ID NO: 2868173 - RNA, 19 nt, Artificial Sequence
  Description of Artificial Sequence: Synthetic oligonucleotide
uguuuugaaucugguuauu

SEQ ID NO: 2868174 - RNA, 19 nt, Artificial Sequence
  Description of Artificial Sequence: Synthetic oligonucleotide
ccacauauuaggaaaggua

SEQ ID NO: 2868175 - RNA, 19 nt, Artificial Sequence
  Description of Artificial Sequence: Synthetic oligonucleotide
agacacaaagccacauaaa

SEQ ID NO: 2868176 - RNA, 19 nt, Artificial Sequence
  Description of Artificial Sequence: Synthetic oligonucleotide
cagaaaugauacaaucaau

SEQ ID NO: 2868177 - RNA, 19 nt, Artificial Sequence
  Description of Artificial Sequence: Synthetic oligonucleotide
cccauaucuuaucacauaa

SEQ ID NO: 2868178 - RNA, 19 nt, Artificial Sequence
  Description of Artificial Sequence: Synthetic oligonucleotide
gucuuuuguuagaagaaau

SEQ ID NO: 2868179 - RNA, 19 nt, Artificial Sequence
  Description of Artificial Sequence: Synthetic oligonucleotide
auauaacaauauaccuaaa

SEQ ID NO: 2868180 - RNA, 19 nt, Artificial Sequence
  Description of Artificial Sequence: Synthetic oligonucleotide
gguuauuugaaaguacauu

SEQ ID NO: 2868181 - RNA, 19 nt, Artificial Sequence
  Description of Artificial Sequence: Synthetic oligonucleotide
caaguuaccuguugcuuau

SEQ ID NO: 2868182 - RNA, 19 nt, Artificial Sequence
  Description of Artificial Sequence: Synthetic oligonucleotide
ccagauacuguacauaaau

SEQ ID NO: 2868183 - RNA, 19 nt, Artificial Sequence
  Description of Artificial Sequence: Synthetic oligonucleotide
caaagccacauaaauucuu

SEQ ID NO: 2868184 - RNA, 19 nt, Artificial Sequence
  Description of Artificial Sequence: Synthetic oligonucleotide
cuuccuuggcuucucugua

SEQ ID NO: 2868185 - RNA, 19 nt, Artificial Sequence
  Description of Artificial Sequence: Synthetic oligonucleotide
cauaagggguuuuguuugu

SEQ ID NO: 2868186 - RNA, 19 nt, Artificial Sequence
  Description of Artificial Sequence: Synthetic oligonucleotide
guuuugaaucugguuauuu

SEQ ID NO: 2868187 - RNA, 19 nt, Artificial Sequence
  Description of Artificial Sequence: Synthetic oligonucleotide
gggguuuuguuuguccaca

SEQ ID NO: 2868188 - RNA, 19 nt, Artificial Sequence
  Description of Artificial Sequence: Synthetic oligonucleotide
caauuaucaucaagcguuu

SEQ ID NO: 2868189 - RNA, 19 nt, Artificial Sequence
  Description of Artificial Sequence: Synthetic oligonucleotide
aaguuaccuguugcuuaua

SEQ ID NO: 2868190 - RNA, 19 nt, Artificial Sequence
  Description of Artificial Sequence: Synthetic oligonucleotide
caaaagugaucuucauguu

SEQ ID NO: 2868191 - RNA, 19 nt, Artificial Sequence
  Description of Artificial Sequence: Synthetic oligonucleotide
ccuguugcuuauaaaacau

SEQ ID NO: 2868192 - RNA, 19 nt, Artificial Sequence
  Description of Artificial Sequence: Synthetic oligonucleotide
ccuuggcuucucuguaaag

SEQ ID NO: 2868193 - RNA, 19 nt, Artificial Sequence
  Description of Artificial Sequence: Synthetic oligonucleotide
ccuuuacagaaaugauaca

SEQ ID NO: 2868194 - RNA, 19 nt, Artificial Sequence
  Description of Artificial Sequence: Synthetic oligonucleotide
cuguugcuuauaaaacauu

SEQ ID NO: 2868195 - RNA, 19 nt, Artificial Sequence
  Description of Artificial Sequence: Synthetic oligonucleotide
ccguacugaacccacauau

SEQ ID NO: 2868196 - RNA, 19 nt, Artificial Sequence
  Description of Artificial Sequence: Synthetic oligonucleotide
caagcguuucuaguaaauu

SEQ ID NO: 2868197 - RNA, 19 nt, Artificial Sequence
  Description of Artificial Sequence: Synthetic oligonucleotide
cugcuccaagaagacacaa

SEQ ID NO: 2868198 - RNA, 19 nt, Artificial Sequence
  Description of Artificial Sequence: Synthetic oligonucleotide
cacaaguuaccuguugcuu

SEQ ID NO: 2868199 - RNA, 19 nt, Artificial Sequence
  Description of Artificial Sequence: Synthetic oligonucleotide
cauucacaaguuaccuguu

SEQ ID NO: 2868200 - RNA, 19 nt, Artificial Sequence
  Description of Artificial Sequence: Synthetic oligonucleotide
ccauugucuuuuguuagaa

SEQ ID NO: 2868201 - RNA, 19 nt, Artificial Sequence
  Description of Artificial Sequence: Synthetic oligonucleotide
ccuaaaugucaauuaucau

SEQ ID NO: 2868202 - RNA, 19 nt, Artificial Sequence
  Description of Artificial Sequence: Synthetic oligonucleotide
cguuucuaguaaauuauuu

SEQ ID NO: 2868203 - RNA, 19 nt, Artificial Sequence
  Description of Artificial Sequence: Synthetic oligonucleotide
ccccauaucuuaucacaua

SEQ ID NO: 2868204 - RNA, 19 nt, Artificial Sequence
  Description of Artificial Sequence: Synthetic oligonucleotide
cccacauauuaggaaaggu

SEQ ID NO: 2868205 - RNA, 19 nt, Artificial Sequence
  Description of Artificial Sequence: Synthetic oligonucleotide
gcguuucuaguaaauuauu

SEQ ID NO: 2868206 - RNA, 19 nt, Artificial Sequence
  Description of Artificial Sequence: Synthetic oligonucleotide
cuccuuccuuggcuucucu

SEQ ID NO: 2868207 - RNA, 19 nt, Artificial Sequence
  Description of Artificial Sequence: Synthetic oligonucleotide
cccguacugaacccacaua

SEQ ID NO: 2868208 - RNA, 19 nt, Artificial Sequence
  Description of Artificial Sequence: Synthetic oligonucleotide
cguacugaacccacauauu

SEQ ID NO: 2868209 - RNA, 19 nt, Artificial Sequence
  Description of Artificial Sequence: Synthetic oligonucleotide
uuuucuauaauucuuuucg

SEQ ID NO: 2868210 - RNA, 19 nt, Artificial Sequence
  Description of Artificial Sequence: Synthetic oligonucleotide
aauaaauauauucaccauc

SEQ ID NO: 2868211 - RNA, 19 nt, Artificial Sequence
  Description of Artificial Sequence: Synthetic oligonucleotide
aaucauagaaaguucgggc

SEQ ID NO: 2868212 - RNA, 19 nt, Artificial Sequence
  Description of Artificial Sequence: Synthetic oligonucleotide
uucagauucaaucuggagg

SEQ ID NO: 2868213 - RNA, 19 nt, Artificial Sequence
  Description of Artificial Sequence: Synthetic oligonucleotide
aauguagaaucucaguaac

SEQ ID NO: 2868214 - RNA, 19 nt, Artificial Sequence
  Description of Artificial Sequence: Synthetic oligonucleotide
augacaaacagucucuugc

SEQ ID NO: 2868215 - RNA, 19 nt, Artificial Sequence
  Description of Artificial Sequence: Synthetic oligonucleotide
ucuauaauucuuuucgggg

SEQ ID NO: 2868216 - RNA, 19 nt, Artificial Sequence
  Description of Artificial Sequence: Synthetic oligonucleotide
uaugaagaagacuugauga

SEQ ID NO: 2868217 - RNA, 19 nt, Artificial Sequence
  Description of Artificial Sequence: Synthetic oligonucleotide
auauucaccaucguuaugc

SEQ ID NO: 2868218 - RNA, 19 nt, Artificial Sequence
  Description of Artificial Sequence: Synthetic oligonucleotide
auaaauauauucaccaucg

SEQ ID NO: 2868219 - RNA, 19 nt, Artificial Sequence
  Description of Artificial Sequence: Synthetic oligonucleotide
aaaauguagaaucucagua

SEQ ID NO: 2868220 - RNA, 19 nt, Artificial Sequence
  Description of Artificial Sequence: Synthetic oligonucleotide
uucaccaauaaauauauuc

SEQ ID NO: 2868221 - RNA, 19 nt, Artificial Sequence
  Description of Artificial Sequence: Synthetic oligonucleotide
ucaccaauaaauauauuca

SEQ ID NO: 2868222 - RNA, 19 nt, Artificial Sequence
  Description of Artificial Sequence: Synthetic oligonucleotide
aagacuugaugacaaacag

SEQ ID NO: 2868223 - RNA, 19 nt, Artificial Sequence
  Description of Artificial Sequence: Synthetic oligonucleotide
aauucuagccuuuucagau

SEQ ID NO: 2868224 - RNA, 19 nt, Artificial Sequence
  Description of Artificial Sequence: Synthetic oligonucleotide
uucuauaauucuuuucggg

SEQ ID NO: 2868225 - RNA, 19 nt, Artificial Sequence
  Description of Artificial Sequence: Synthetic oligonucleotide
ucagauucaaucuggagga

SEQ ID NO: 2868226 - RNA, 19 nt, Artificial Sequence
  Description of Artificial Sequence: Synthetic oligonucleotide
uucagcuucaccaauaaau

SEQ ID NO: 2868227 - RNA, 19 nt, Artificial Sequence
  Description of Artificial Sequence: Synthetic oligonucleotide
aaacuuccgacuccgaguc

SEQ ID NO: 2868228 - RNA, 19 nt, Artificial Sequence
  Description of Artificial Sequence: Synthetic oligonucleotide
ucuucgaacuucaagcucc

SEQ ID NO: 2868229 - RNA, 19 nt, Artificial Sequence
  Description of Artificial Sequence: Synthetic oligonucleotide
ugcaaguucagcuucacca

SEQ ID NO: 2868230 - RNA, 19 nt, Artificial Sequence
  Description of Artificial Sequence: Synthetic oligonucleotide
aauauauucaccaucguua

SEQ ID NO: 2868231 - RNA, 19 nt, Artificial Sequence
  Description of Artificial Sequence: Synthetic oligonucleotide
uccaucuugauauuggaug

SEQ ID NO: 2868232 - RNA, 19 nt, Artificial Sequence
  Description of Artificial Sequence: Synthetic oligonucleotide
gucaacaaaauguagaauc

SEQ ID NO: 2868233 - RNA, 19 nt, Artificial Sequence
  Description of Artificial Sequence: Synthetic oligonucleotide
aaucucaguaacuuuaaaa

SEQ ID NO: 2868234 - RNA, 19 nt, Artificial Sequence
  Description of Artificial Sequence: Synthetic oligonucleotide
ucuagugccagcacggcgg

SEQ ID NO: 2868235 - RNA, 19 nt, Artificial Sequence
  Description of Artificial Sequence: Synthetic oligonucleotide
aaauguagaaucucaguaa

SEQ ID NO: 2868236 - RNA, 19 nt, Artificial Sequence
  Description of Artificial Sequence: Synthetic oligonucleotide
uuucuauaauucuuuucgg

SEQ ID NO: 2868237 - RNA, 19 nt, Artificial Sequence
  Description of Artificial Sequence: Synthetic oligonucleotide
augaagaagacuugaugac

SEQ ID NO: 2868238 - RNA, 19 nt, Artificial Sequence
  Description of Artificial Sequence: Synthetic oligonucleotide
aaauauauucaccaucguu

SEQ ID NO: 2868239 - RNA, 19 nt, Artificial Sequence
  Description of Artificial Sequence: Synthetic oligonucleotide
ucaacaaaauguagaaucu

SEQ ID NO: 2868240 - RNA, 19 nt, Artificial Sequence
  Description of Artificial Sequence: Synthetic oligonucleotide
aaaacuuccgacuccgagu

SEQ ID NO: 2868241 - RNA, 19 nt, Artificial Sequence
  Description of Artificial Sequence: Synthetic oligonucleotide
cagucuucgaacuucaagc

SEQ ID NO: 2868242 - RNA, 19 nt, Artificial Sequence
  Description of Artificial Sequence: Synthetic oligonucleotide
cuauaauucuuuucggggc

SEQ ID NO: 2868243 - RNA, 19 nt, Artificial Sequence
  Description of Artificial Sequence: Synthetic oligonucleotide
ugggauuucugcaaguuca

SEQ ID NO: 2868244 - RNA, 19 nt, Artificial Sequence
  Description of Artificial Sequence: Synthetic oligonucleotide
accaauaaauauauucacc

SEQ ID NO: 2868245 - RNA, 19 nt, Artificial Sequence
  Description of Artificial Sequence: Synthetic oligonucleotide
aacuucaagcuccuucuuc

SEQ ID NO: 2868246 - RNA, 19 nt, Artificial Sequence
  Description of Artificial Sequence: Synthetic oligonucleotide
cuugaugacaaacagucuc

SEQ ID NO: 2868247 - RNA, 19 nt, Artificial Sequence
  Description of Artificial Sequence: Synthetic oligonucleotide
uauaauucuuuucggggca

SEQ ID NO: 2868248 - RNA, 19 nt, Artificial Sequence
  Description of Artificial Sequence: Synthetic oligonucleotide
ugggauguagccuucuggg

SEQ ID NO: 2868249 - RNA, 19 nt, Artificial Sequence
  Description of Artificial Sequence: Synthetic oligonucleotide
ucuuccguaauucuagccu

SEQ ID NO: 2868250 - RNA, 19 nt, Artificial Sequence
  Description of Artificial Sequence: Synthetic oligonucleotide
gacuugaugacaaacaguc

SEQ ID NO: 2868251 - RNA, 19 nt, Artificial Sequence
  Description of Artificial Sequence: Synthetic oligonucleotide
ugugagaaaacuuccgacu

SEQ ID NO: 2868252 - RNA, 19 nt, Artificial Sequence
  Description of Artificial Sequence: Synthetic oligonucleotide
aacgcggagaccgaagccc

SEQ ID NO: 2868253 - RNA, 19 nt, Artificial Sequence
  Description of Artificial Sequence: Synthetic oligonucleotide
uucaccaucguuaugccaa

SEQ ID NO: 2868254 - RNA, 19 nt, Artificial Sequence
  Description of Artificial Sequence: Synthetic oligonucleotide
gauucaaucuggaggauag

SEQ ID NO: 2868255 - RNA, 19 nt, Artificial Sequence
  Description of Artificial Sequence: Synthetic oligonucleotide
ucagucuucgaacuucaag

SEQ ID NO: 2868256 - RNA, 19 nt, Artificial Sequence
  Description of Artificial Sequence: Synthetic oligonucleotide
guaauucuagccuuuucag

SEQ ID NO: 2868257 - RNA, 19 nt, Artificial Sequence
  Description of Artificial Sequence: Synthetic oligonucleotide
ugauauuggaugcuuguaa

SEQ ID NO: 2868258 - RNA, 19 nt, Artificial Sequence
  Description of Artificial Sequence: Synthetic oligonucleotide
cuuuucggggcaaucauag

SEQ ID NO: 2868259 - RNA, 19 nt, Artificial Sequence
  Description of Artificial Sequence: Synthetic oligonucleotide
aucauagaaaguucgggca

SEQ ID NO: 2868260 - RNA, 19 nt, Artificial Sequence
  Description of Artificial Sequence: Synthetic oligonucleotide
uagaaucucaguaacuuua

SEQ ID NO: 2868261 - RNA, 19 nt, Artificial Sequence
  Description of Artificial Sequence: Synthetic oligonucleotide
caauccaucuugauauugg

SEQ ID NO: 2868262 - RNA, 19 nt, Artificial Sequence
  Description of Artificial Sequence: Synthetic oligonucleotide
agaagacuugaugacaaac

SEQ ID NO: 2868263 - RNA, 19 nt, Artificial Sequence
  Description of Artificial Sequence: Synthetic oligonucleotide
uaugccaauuacaacugga

SEQ ID NO: 2868264 - RNA, 19 nt, Artificial Sequence
  Description of Artificial Sequence: Synthetic oligonucleotide
uauuggaugcuuguaauac

SEQ ID NO: 2868265 - RNA, 19 nt, Artificial Sequence
  Description of Artificial Sequence: Synthetic oligonucleotide
guaugaagaagacuugaug

SEQ ID NO: 2868266 - RNA, 19 nt, Artificial Sequence
  Description of Artificial Sequence: Synthetic oligonucleotide
uuucggggcaaucauagaa

SEQ ID NO: 2868267 - RNA, 19 nt, Artificial Sequence
  Description of Artificial Sequence: Synthetic oligonucleotide
aauccaucuugauauugga

SEQ ID NO: 2868268 - RNA, 19 nt, Artificial Sequence
  Description of Artificial Sequence: Synthetic oligonucleotide
aagcgaucgucauaguaug

SEQ ID NO: 2868269 - RNA, 19 nt, Artificial Sequence
  Description of Artificial Sequence: Synthetic oligonucleotide
ugagaaaacuuccgacucc

SEQ ID NO: 2868270 - RNA, 19 nt, Artificial Sequence
  Description of Artificial Sequence: Synthetic oligonucleotide
uuaugccaauuacaacugg

SEQ ID NO: 2868271 - RNA, 19 nt, Artificial Sequence
  Description of Artificial Sequence: Synthetic oligonucleotide
uugaugacaaacagucucu

SEQ ID NO: 2868272 - RNA, 19 nt, Artificial Sequence
  Description of Artificial Sequence: Synthetic oligonucleotide
cauaguaugaagaagacuu

SEQ ID NO: 2868273 - RNA, 19 nt, Artificial Sequence
  Description of Artificial Sequence: Synthetic oligonucleotide
gagaaaacuuccgacuccg

SEQ ID NO: 2868274 - RNA, 19 nt, Artificial Sequence
  Description of Artificial Sequence: Synthetic oligonucleotide
uucaaucuggaggauagcc

SEQ ID NO: 2868275 - RNA, 19 nt, Artificial Sequence
  Description of Artificial Sequence: Synthetic oligonucleotide
aaaagcgaucgucauagua

SEQ ID NO: 2868276 - RNA, 19 nt, Artificial Sequence
  Description of Artificial Sequence: Synthetic oligonucleotide
aaagcgaucgucauaguau

SEQ ID NO: 2868277 - RNA, 19 nt, Artificial Sequence
  Description of Artificial Sequence: Synthetic oligonucleotide
ucagcuucaccaauaaaua

SEQ ID NO: 2868278 - RNA, 19 nt, Artificial Sequence
  Description of Artificial Sequence: Synthetic oligonucleotide
uguaauacucccaguguuc

SEQ ID NO: 2868279 - RNA, 19 nt, Artificial Sequence
  Description of Artificial Sequence: Synthetic oligonucleotide
uuuucagauucaaucugga

SEQ ID NO: 2868280 - RNA, 19 nt, Artificial Sequence
  Description of Artificial Sequence: Synthetic oligonucleotide
uuucagauucaaucuggag

SEQ ID NO: 2868281 - RNA, 19 nt, Artificial Sequence
  Description of Artificial Sequence: Synthetic oligonucleotide
caaucauagaaaguucggg

SEQ ID NO: 2868282 - RNA, 19 nt, Artificial Sequence
  Description of Artificial Sequence: Synthetic oligonucleotide
caccaauaaauauauucac

SEQ ID NO: 2868283 - RNA, 19 nt, Artificial Sequence
  Description of Artificial Sequence: Synthetic oligonucleotide
caaucuucggaaagguccg

SEQ ID NO: 2868284 - RNA, 19 nt, Artificial Sequence
  Description of Artificial Sequence: Synthetic oligonucleotide
uacaacuggaaucccaguc

SEQ ID NO: 2868285 - RNA, 19 nt, Artificial Sequence
  Description of Artificial Sequence: Synthetic oligonucleotide
ucaaucuggaggauagccu

SEQ ID NO: 2868286 - RNA, 19 nt, Artificial Sequence
  Description of Artificial Sequence: Synthetic oligonucleotide
uuggaugcuuguaauacuc

SEQ ID NO: 2868287 - RNA, 19 nt, Artificial Sequence
  Description of Artificial Sequence: Synthetic oligonucleotide
uaauucuagccuuuucaga

SEQ ID NO: 2868288 - RNA, 19 nt, Artificial Sequence
  Description of Artificial Sequence: Synthetic oligonucleotide
ucuugauauuggaugcuug

SEQ ID NO: 2868289 - RNA, 19 nt, Artificial Sequence
  Description of Artificial Sequence: Synthetic oligonucleotide
agucucuugccaugguccc

SEQ ID NO: 2868290 - RNA, 19 nt, Artificial Sequence
  Description of Artificial Sequence: Synthetic oligonucleotide
uguagaaucucaguaacuu

SEQ ID NO: 2868291 - RNA, 19 nt, Artificial Sequence
  Description of Artificial Sequence: Synthetic oligonucleotide
agaaaguucgggcaaucca

SEQ ID NO: 2868292 - RNA, 19 nt, Artificial Sequence
  Description of Artificial Sequence: Synthetic oligonucleotide
ugaagaagacuugaugaca

SEQ ID NO: 2868293 - RNA, 19 nt, Artificial Sequence
  Description of Artificial Sequence: Synthetic oligonucleotide
ucuggaggauagccuaugg

SEQ ID NO: 2868294 - RNA, 19 nt, Artificial Sequence
  Description of Artificial Sequence: Synthetic oligonucleotide
uccgugugagaaaacuucc

SEQ ID NO: 2868295 - RNA, 19 nt, Artificial Sequence
  Description of Artificial Sequence: Synthetic oligonucleotide
ucgaacuucaagcuccuuc

SEQ ID NO: 2868296 - RNA, 19 nt, Artificial Sequence
  Description of Artificial Sequence: Synthetic oligonucleotide
aauucuuuucggggcaauc

SEQ ID NO: 2868297 - RNA, 19 nt, Artificial Sequence
  Description of Artificial Sequence: Synthetic oligonucleotide
auauauucaccaucguuau

SEQ ID NO: 2868298 - RNA, 19 nt, Artificial Sequence
  Description of Artificial Sequence: Synthetic oligonucleotide
auuacaacuggaaucccag

SEQ ID NO: 2868299 - RNA, 19 nt, Artificial Sequence
  Description of Artificial Sequence: Synthetic oligonucleotide
acaacuggaaucccaguca

SEQ ID NO: 2868300 - RNA, 19 nt, Artificial Sequence
  Description of Artificial Sequence: Synthetic oligonucleotide
uuguaauacucccaguguu

SEQ ID NO: 2868301 - RNA, 19 nt, Artificial Sequence
  Description of Artificial Sequence: Synthetic oligonucleotide
aaacagucucuugccaugg

SEQ ID NO: 2868302 - RNA, 19 nt, Artificial Sequence
  Description of Artificial Sequence: Synthetic oligonucleotide
aauuacaacuggaauccca

SEQ ID NO: 2868303 - RNA, 19 nt, Artificial Sequence
  Description of Artificial Sequence: Synthetic oligonucleotide
acaaaauguagaaucucag

SEQ ID NO: 2868304 - RNA, 19 nt, Artificial Sequence
  Description of Artificial Sequence: Synthetic oligonucleotide
uaaauauauucaccaucgu

SEQ ID NO: 2868305 - RNA, 19 nt, Artificial Sequence
  Description of Artificial Sequence: Synthetic oligonucleotide
gauuucugcaaguucagcu

SEQ ID NO: 2868306 - RNA, 19 nt, Artificial Sequence
  Description of Artificial Sequence: Synthetic oligonucleotide
acaggagcgacaaucuucg

SEQ ID NO: 2868307 - RNA, 19 nt, Artificial Sequence
  Description of Artificial Sequence: Synthetic oligonucleotide
ucaacgcggagaccgaagc

SEQ ID NO: 2868308 - RNA, 19 nt, Artificial Sequence
  Description of Artificial Sequence: Synthetic oligonucleotide
agccuucugggauuucugc

SEQ ID NO: 2868309 - RNA, 19 nt, Artificial Sequence
  Description of Artificial Sequence: Synthetic oligonucleotide
uggaggauagccuaugguu

SEQ ID NO: 2868310 - RNA, 19 nt, Artificial Sequence
  Description of Artificial Sequence: Synthetic oligonucleotide
cagucucuugccauggucc

SEQ ID NO: 2868311 - RNA, 19 nt, Artificial Sequence
  Description of Artificial Sequence: Synthetic oligonucleotide
gaagacuugaugacaaaca

SEQ ID NO: 2868312 - RNA, 19 nt, Artificial Sequence
  Description of Artificial Sequence: Synthetic oligonucleotide
uucuagccuuuucagauuc

SEQ ID NO: 2868313 - RNA, 19 nt, Artificial Sequence
  Description of Artificial Sequence: Synthetic oligonucleotide
ccaauaaauauauucacca

SEQ ID NO: 2868314 - RNA, 19 nt, Artificial Sequence
  Description of Artificial Sequence: Synthetic oligonucleotide
gaugacaaacagucucuug

SEQ ID NO: 2868315 - RNA, 19 nt, Artificial Sequence
  Description of Artificial Sequence: Synthetic oligonucleotide
uggaaucccagucaacaaa

SEQ ID NO: 2868316 - RNA, 19 nt, Artificial Sequence
  Description of Artificial Sequence: Synthetic oligonucleotide
ucggggcaaucauagaaag

SEQ ID NO: 2868317 - RNA, 19 nt, Artificial Sequence
  Description of Artificial Sequence: Synthetic oligonucleotide
cuugccaugguccccacug

SEQ ID NO: 2868318 - RNA, 19 nt, Artificial Sequence
  Description of Artificial Sequence: Synthetic oligonucleotide
uguucugggauguagccuu

SEQ ID NO: 2868319 - RNA, 19 nt, Artificial Sequence
  Description of Artificial Sequence: Synthetic oligonucleotide
uaguaugaagaagacuuga

SEQ ID NO: 2868320 - RNA, 19 nt, Artificial Sequence
  Description of Artificial Sequence: Synthetic oligonucleotide
acagucucuugccaugguc

SEQ ID NO: 2868321 - RNA, 19 nt, Artificial Sequence
  Description of Artificial Sequence: Synthetic oligonucleotide
ccaauuacaacuggaaucc

SEQ ID NO: 2868322 - RNA, 19 nt, Artificial Sequence
  Description of Artificial Sequence: Synthetic oligonucleotide
agcgacaaucuucggaaag

SEQ ID NO: 2868323 - RNA, 19 nt, Artificial Sequence
  Description of Artificial Sequence: Synthetic oligonucleotide
acuggaaucccagucaaca

SEQ ID NO: 2868324 - RNA, 19 nt, Artificial Sequence
  Description of Artificial Sequence: Synthetic oligonucleotide
agucuucgaacuucaagcu

SEQ ID NO: 2868325 - RNA, 19 nt, Artificial Sequence
  Description of Artificial Sequence: Synthetic oligonucleotide
ggcaaucauagaaaguucg

SEQ ID NO: 2868326 - RNA, 19 nt, Artificial Sequence
  Description of Artificial Sequence: Synthetic oligonucleotide
cacugugccgcacaggagc

SEQ ID NO: 2868327 - RNA, 19 nt, Artificial Sequence
  Description of Artificial Sequence: Synthetic oligonucleotide
gcuuguaauacucccagug

SEQ ID NO: 2868328 - RNA, 19 nt, Artificial Sequence
  Description of Artificial Sequence: Synthetic oligonucleotide
aucgucauaguaugaagaa

SEQ ID NO: 2868329 - RNA, 19 nt, Artificial Sequence
  Description of Artificial Sequence: Synthetic oligonucleotide
aaaguucgggcaauccauc

SEQ ID NO: 2868330 - RNA, 19 nt, Artificial Sequence
  Description of Artificial Sequence: Synthetic oligonucleotide
gagucuagugccagcacgg

SEQ ID NO: 2868331 - RNA, 19 nt, Artificial Sequence
  Description of Artificial Sequence: Synthetic oligonucleotide
auuggaugcuuguaauacu

SEQ ID NO: 2868332 - RNA, 19 nt, Artificial Sequence
  Description of Artificial Sequence: Synthetic oligonucleotide
uggaugcuuguaauacucc

SEQ ID NO: 2868333 - RNA, 19 nt, Artificial Sequence
  Description of Artificial Sequence: Synthetic oligonucleotide
uauauucaccaucguuaug

SEQ ID NO: 2868334 - RNA, 19 nt, Artificial Sequence
  Description of Artificial Sequence: Synthetic oligonucleotide
uucuuccguaauucuagcc

SEQ ID NO: 2868335 - RNA, 19 nt, Artificial Sequence
  Description of Artificial Sequence: Synthetic oligonucleotide
uucggaaagguccguguga

SEQ ID NO: 2868336 - RNA, 19 nt, Artificial Sequence
  Description of Artificial Sequence: Synthetic oligonucleotide
ucauaguaugaagaagacu

SEQ ID NO: 2868337 - RNA, 19 nt, Artificial Sequence
  Description of Artificial Sequence: Synthetic oligonucleotide
gaucgucauaguaugaaga

SEQ ID NO: 2868338 - RNA, 19 nt, Artificial Sequence
  Description of Artificial Sequence: Synthetic oligonucleotide
ucgucauaguaugaagaag

SEQ ID NO: 2868339 - RNA, 19 nt, Artificial Sequence
  Description of Artificial Sequence: Synthetic oligonucleotide
uauucaccaucguuaugcc

SEQ ID NO: 2868340 - RNA, 19 nt, Artificial Sequence
  Description of Artificial Sequence: Synthetic oligonucleotide
aaagguccgugugagaaaa

SEQ ID NO: 2868341 - RNA, 19 nt, Artificial Sequence
  Description of Artificial Sequence: Synthetic oligonucleotide
ugccaauuacaacuggaau

SEQ ID NO: 2868342 - RNA, 19 nt, Artificial Sequence
  Description of Artificial Sequence: Synthetic oligonucleotide
aaguucgggcaauccaucu

SEQ ID NO: 2868343 - RNA, 19 nt, Artificial Sequence
  Description of Artificial Sequence: Synthetic oligonucleotide
gccaauuacaacuggaauc

SEQ ID NO: 2868344 - RNA, 19 nt, Artificial Sequence
  Description of Artificial Sequence: Synthetic oligonucleotide
uucggggcaaucauagaaa

SEQ ID NO: 2868345 - RNA, 19 nt, Artificial Sequence
  Description of Artificial Sequence: Synthetic oligonucleotide
gugagaaaacuuccgacuc

SEQ ID NO: 2868346 - RNA, 19 nt, Artificial Sequence
  Description of Artificial Sequence: Synthetic oligonucleotide
acaaacagucucuugccau

SEQ ID NO: 2868347 - RNA, 19 nt, Artificial Sequence
  Description of Artificial Sequence: Synthetic oligonucleotide
gcugucaacgcggagaccg

SEQ ID NO: 2868348 - RNA, 19 nt, Artificial Sequence
  Description of Artificial Sequence: Synthetic oligonucleotide
aucguuaugccaauuacaa

SEQ ID NO: 2868349 - RNA, 19 nt, Artificial Sequence
  Description of Artificial Sequence: Synthetic oligonucleotide
cugggauguagccuucugg

SEQ ID NO: 2868350 - RNA, 19 nt, Artificial Sequence
  Description of Artificial Sequence: Synthetic oligonucleotide
guucgggcaauccaucuug

SEQ ID NO: 2868351 - RNA, 19 nt, Artificial Sequence
  Description of Artificial Sequence: Synthetic oligonucleotide
gaagaagacuugaugacaa

SEQ ID NO: 2868352 - RNA, 19 nt, Artificial Sequence
  Description of Artificial Sequence: Synthetic oligonucleotide
gugugagaaaacuuccgac

SEQ ID NO: 2868353 - RNA, 19 nt, Artificial Sequence
  Description of Artificial Sequence: Synthetic oligonucleotide
guuaugccaauuacaacug

SEQ ID NO: 2868354 - RNA, 19 nt, Artificial Sequence
  Description of Artificial Sequence: Synthetic oligonucleotide
caaacagucucuugccaug

SEQ ID NO: 2868355 - RNA, 19 nt, Artificial Sequence
  Description of Artificial Sequence: Synthetic oligonucleotide
cacaggagcgacaaucuuc

SEQ ID NO: 2868356 - RNA, 19 nt, Artificial Sequence
  Description of Artificial Sequence: Synthetic oligonucleotide
gacagcgcugucaacgcgg

SEQ ID NO: 2868357 - RNA, 19 nt, Artificial Sequence
  Description of Artificial Sequence: Synthetic oligonucleotide
ucggaaagguccgugugag

SEQ ID NO: 2868358 - RNA, 19 nt, Artificial Sequence
  Description of Artificial Sequence: Synthetic oligonucleotide
uucuuuucggggcaaucau

SEQ ID NO: 2868359 - RNA, 19 nt, Artificial Sequence
  Description of Artificial Sequence: Synthetic oligonucleotide
cuucaagcuccuucuuccg

SEQ ID NO: 2868360 - RNA, 19 nt, Artificial Sequence
  Description of Artificial Sequence: Synthetic oligonucleotide
aggagcgacaaucuucgga

SEQ ID NO: 2868361 - RNA, 19 nt, Artificial Sequence
  Description of Artificial Sequence: Synthetic oligonucleotide
ucuucggaaagguccgugu

SEQ ID NO: 2868362 - RNA, 19 nt, Artificial Sequence
  Description of Artificial Sequence: Synthetic oligonucleotide
ccaucuugauauuggaugc

SEQ ID NO: 2868363 - RNA, 19 nt, Artificial Sequence
  Description of Artificial Sequence: Synthetic oligonucleotide
uccgacuccgagucuagug

SEQ ID NO: 2868364 - RNA, 19 nt, Artificial Sequence
  Description of Artificial Sequence: Synthetic oligonucleotide
ggaugcuuguaauacuccc

SEQ ID NO: 2868365 - RNA, 19 nt, Artificial Sequence
  Description of Artificial Sequence: Synthetic oligonucleotide
gauauuggaugcuuguaau

SEQ ID NO: 2868366 - RNA, 19 nt, Artificial Sequence
  Description of Artificial Sequence: Synthetic oligonucleotide
caucguuaugccaauuaca

SEQ ID NO: 2868367 - RNA, 19 nt, Artificial Sequence
  Description of Artificial Sequence: Synthetic oligonucleotide
auucuuuucggggcaauca

SEQ ID NO: 2868368 - RNA, 19 nt, Artificial Sequence
  Description of Artificial Sequence: Synthetic oligonucleotide
cagucaacaaaauguagaa

SEQ ID NO: 2868369 - RNA, 19 nt, Artificial Sequence
  Description of Artificial Sequence: Synthetic oligonucleotide
uagaaaguucgggcaaucc

SEQ ID NO: 2868370 - RNA, 19 nt, Artificial Sequence
  Description of Artificial Sequence: Synthetic oligonucleotide
augguccccacugugccgc

SEQ ID NO: 2868371 - RNA, 19 nt, Artificial Sequence
  Description of Artificial Sequence: Synthetic oligonucleotide
cuucuuccguaauucuagc

SEQ ID NO: 2868372 - RNA, 19 nt, Artificial Sequence
  Description of Artificial Sequence: Synthetic oligonucleotide
auauuggaugcuuguaaua

SEQ ID NO: 2868373 - RNA, 19 nt, Artificial Sequence
  Description of Artificial Sequence: Synthetic oligonucleotide
uucaagcuccuucuuccgu

SEQ ID NO: 2868374 - RNA, 19 nt, Artificial Sequence
  Description of Artificial Sequence: Synthetic oligonucleotide
gaugcuuguaauacuccca

SEQ ID NO: 2868375 - RNA, 19 nt, Artificial Sequence
  Description of Artificial Sequence: Synthetic oligonucleotide
auagaaaguucgggcaauc

SEQ ID NO: 2868376 - RNA, 19 nt, Artificial Sequence
  Description of Artificial Sequence: Synthetic oligonucleotide
aagaagacuugaugacaaa

SEQ ID NO: 2868377 - RNA, 19 nt, Artificial Sequence
  Description of Artificial Sequence: Synthetic oligonucleotide
auucaaucuggaggauagc

SEQ ID NO: 2868378 - RNA, 19 nt, Artificial Sequence
  Description of Artificial Sequence: Synthetic oligonucleotide
uccuucuuccguaauucua

SEQ ID NO: 2868379 - RNA, 19 nt, Artificial Sequence
  Description of Artificial Sequence: Synthetic oligonucleotide
ccuucuuccguaauucuag

SEQ ID NO: 2868380 - RNA, 19 nt, Artificial Sequence
  Description of Artificial Sequence: Synthetic oligonucleotide
ucguuaugccaauuacaac

SEQ ID NO: 2868381 - RNA, 19 nt, Artificial Sequence
  Description of Artificial Sequence: Synthetic oligonucleotide
auaguaugaagaagacuug

SEQ ID NO: 2868382 - RNA, 19 nt, Artificial Sequence
  Description of Artificial Sequence: Synthetic oligonucleotide
ucugggauguagccuucug

SEQ ID NO: 2868383 - RNA, 19 nt, Artificial Sequence
  Description of Artificial Sequence: Synthetic oligonucleotide
gucuagugccagcacggcg

SEQ ID NO: 2868384 - RNA, 19 nt, Artificial Sequence
  Description of Artificial Sequence: Synthetic oligonucleotide
ucaagcuccuucuuccgua

SEQ ID NO: 2868385 - RNA, 19 nt, Artificial Sequence
  Description of Artificial Sequence: Synthetic oligonucleotide
auacucccaguguucuggg

SEQ ID NO: 2868386 - RNA, 19 nt, Artificial Sequence
  Description of Artificial Sequence: Synthetic oligonucleotide
cuucugggauuucugcaag

SEQ ID NO: 2868387 - RNA, 19 nt, Artificial Sequence
  Description of Artificial Sequence: Synthetic oligonucleotide
ucuuuucggggcaaucaua

SEQ ID NO: 2868388 - RNA, 19 nt, Artificial Sequence
  Description of Artificial Sequence: Synthetic oligonucleotide
caacaaaauguagaaucuc

SEQ ID NO: 2868389 - RNA, 19 nt, Artificial Sequence
  Description of Artificial Sequence: Synthetic oligonucleotide
aacuggaaucccagucaac

SEQ ID NO: 2868390 - RNA, 19 nt, Artificial Sequence
  Description of Artificial Sequence: Synthetic oligonucleotide
uuacaacuggaaucccagu

SEQ ID NO: 2868391 - RNA, 19 nt, Artificial Sequence
  Description of Artificial Sequence: Synthetic oligonucleotide
acucccaguguucugggau

SEQ ID NO: 2868392 - RNA, 19 nt, Artificial Sequence
  Description of Artificial Sequence: Synthetic oligonucleotide
gcaaucauagaaaguucgg

SEQ ID NO: 2868393 - RNA, 19 nt, Artificial Sequence
  Description of Artificial Sequence: Synthetic oligonucleotide
cuucggaaagguccgugug

SEQ ID NO: 2868394 - RNA, 19 nt, Artificial Sequence
  Description of Artificial Sequence: Synthetic oligonucleotide
gucauaguaugaagaagac

SEQ ID NO: 2868395 - RNA, 19 nt, Artificial Sequence
  Description of Artificial Sequence: Synthetic oligonucleotide
cagacagcgcugucaacgc

SEQ ID NO: 2868396 - RNA, 19 nt, Artificial Sequence
  Description of Artificial Sequence: Synthetic oligonucleotide
accaucguuaugccaauua

SEQ ID NO: 2868397 - RNA, 19 nt, Artificial Sequence
  Description of Artificial Sequence: Synthetic oligonucleotide
acggcggccagacagcgcu

SEQ ID NO: 2868398 - RNA, 19 nt, Artificial Sequence
  Description of Artificial Sequence: Synthetic oligonucleotide
auucaccaucguuaugcca

SEQ ID NO: 2868399 - RNA, 19 nt, Artificial Sequence
  Description of Artificial Sequence: Synthetic oligonucleotide
ucuagccuuuucagauuca

SEQ ID NO: 2868400 - RNA, 19 nt, Artificial Sequence
  Description of Artificial Sequence: Synthetic oligonucleotide
uccgagucuagugccagca

SEQ ID NO: 2868401 - RNA, 19 nt, Artificial Sequence
  Description of Artificial Sequence: Synthetic oligonucleotide
ucucuugccauggucccca

SEQ ID NO: 2868402 - RNA, 19 nt, Artificial Sequence
  Description of Artificial Sequence: Synthetic oligonucleotide
agcuucaccaauaaauaua

SEQ ID NO: 2868403 - RNA, 19 nt, Artificial Sequence
  Description of Artificial Sequence: Synthetic oligonucleotide
ggagcgacaaucuucggaa

SEQ ID NO: 2868404 - RNA, 19 nt, Artificial Sequence
  Description of Artificial Sequence: Synthetic oligonucleotide
agucuagugccagcacggc

SEQ ID NO: 2868405 - RNA, 19 nt, Artificial Sequence
  Description of Artificial Sequence: Synthetic oligonucleotide
caaaauguagaaucucagu

SEQ ID NO: 2868406 - RNA, 19 nt, Artificial Sequence
  Description of Artificial Sequence: Synthetic oligonucleotide
uugauauuggaugcuugua

SEQ ID NO: 2868407 - RNA, 19 nt, Artificial Sequence
  Description of Artificial Sequence: Synthetic oligonucleotide
ugccaugguccccacugug

SEQ ID NO: 2868408 - RNA, 19 nt, Artificial Sequence
  Description of Artificial Sequence: Synthetic oligonucleotide
aguaugaagaagacuugau

SEQ ID NO: 2868409 - RNA, 19 nt, Artificial Sequence
  Description of Artificial Sequence: Synthetic oligonucleotide
uuuucggggcaaucauaga

SEQ ID NO: 2868410 - RNA, 19 nt, Artificial Sequence
  Description of Artificial Sequence: Synthetic oligonucleotide
ccagacagcgcugucaacg

SEQ ID NO: 2868411 - RNA, 19 nt, Artificial Sequence
  Description of Artificial Sequence: Synthetic oligonucleotide
ccagucaacaaaauguaga

SEQ ID NO: 2868412 - RNA, 19 nt, Artificial Sequence
  Description of Artificial Sequence: Synthetic oligonucleotide
acgcaucagucuucgaacu

SEQ ID NO: 2868413 - RNA, 19 nt, Artificial Sequence
  Description of Artificial Sequence: Synthetic oligonucleotide
cuugauauuggaugcuugu

SEQ ID NO: 2868414 - RNA, 19 nt, Artificial Sequence
  Description of Artificial Sequence: Synthetic oligonucleotide
caaucuggaggauagccua

SEQ ID NO: 2868415 - RNA, 19 nt, Artificial Sequence
  Description of Artificial Sequence: Synthetic oligonucleotide
agacuugaugacaaacagu

SEQ ID NO: 2868416 - RNA, 19 nt, Artificial Sequence
  Description of Artificial Sequence: Synthetic oligonucleotide
uucgggcaauccaucuuga

SEQ ID NO: 2868417 - RNA, 19 nt, Artificial Sequence
  Description of Artificial Sequence: Synthetic oligonucleotide
agcgcugucaacgcggaga

SEQ ID NO: 2868418 - RNA, 19 nt, Artificial Sequence
  Description of Artificial Sequence: Synthetic oligonucleotide
cugggauuucugcaaguuc

SEQ ID NO: 2868419 - RNA, 19 nt, Artificial Sequence
  Description of Artificial Sequence: Synthetic oligonucleotide
gaccgaagcccgcugcagc

SEQ ID NO: 2868420 - RNA, 19 nt, Artificial Sequence
  Description of Artificial Sequence: Synthetic oligonucleotide
gaaucucaguaacuuuaaa

SEQ ID NO: 2868421 - RNA, 19 nt, Artificial Sequence
  Description of Artificial Sequence: Synthetic oligonucleotide
guccgugugagaaaacuuc

SEQ ID NO: 2868422 - RNA, 19 nt, Artificial Sequence
  Description of Artificial Sequence: Synthetic oligonucleotide
cgucauaguaugaagaaga

SEQ ID NO: 2868423 - RNA, 19 nt, Artificial Sequence
  Description of Artificial Sequence: Synthetic oligonucleotide
caugguccccacugugccg

SEQ ID NO: 2868424 - RNA, 19 nt, Artificial Sequence
  Description of Artificial Sequence: Synthetic oligonucleotide
agucaacaaaauguagaau

SEQ ID NO: 2868425 - RNA, 19 nt, Artificial Sequence
  Description of Artificial Sequence: Synthetic oligonucleotide
ugcuuguaauacucccagu

SEQ ID NO: 2868426 - RNA, 19 nt, Artificial Sequence
  Description of Artificial Sequence: Synthetic oligonucleotide
gucuucgaacuucaagcuc

SEQ ID NO: 2868427 - RNA, 19 nt, Artificial Sequence
  Description of Artificial Sequence: Synthetic oligonucleotide
gcgacaaucuucggaaagg

SEQ ID NO: 2868428 - RNA, 19 nt, Artificial Sequence
  Description of Artificial Sequence: Synthetic oligonucleotide
uagccuuuucagauucaau

SEQ ID NO: 2868429 - RNA, 19 nt, Artificial Sequence
  Description of Artificial Sequence: Synthetic oligonucleotide
gggcaauccaucuugauau

SEQ ID NO: 2868430 - RNA, 19 nt, Artificial Sequence
  Description of Artificial Sequence: Synthetic oligonucleotide
agguccgugugagaaaacu

SEQ ID NO: 2868431 - RNA, 19 nt, Artificial Sequence
  Description of Artificial Sequence: Synthetic oligonucleotide
cuuguaauacucccagugu

SEQ ID NO: 2868432 - RNA, 19 nt, Artificial Sequence
  Description of Artificial Sequence: Synthetic oligonucleotide
gaaagguccgugugagaaa

SEQ ID NO: 2868433 - RNA, 19 nt, Artificial Sequence
  Description of Artificial Sequence: Synthetic oligonucleotide
auucuagccuuuucagauu

SEQ ID NO: 2868434 - RNA, 19 nt, Artificial Sequence
  Description of Artificial Sequence: Synthetic oligonucleotide
gacaaucuucggaaagguc

SEQ ID NO: 2868435 - RNA, 19 nt, Artificial Sequence
  Description of Artificial Sequence: Synthetic oligonucleotide
cucccaguguucugggaug

SEQ ID NO: 2868436 - RNA, 19 nt, Artificial Sequence
  Description of Artificial Sequence: Synthetic oligonucleotide
aaguucagcuucaccaaua

SEQ ID NO: 2868437 - RNA, 19 nt, Artificial Sequence
  Description of Artificial Sequence: Synthetic oligonucleotide
accgaagcccgcugcagca

SEQ ID NO: 2868438 - RNA, 19 nt, Artificial Sequence
  Description of Artificial Sequence: Synthetic oligonucleotide
agaaucucaguaacuuuaa

SEQ ID NO: 2868439 - RNA, 19 nt, Artificial Sequence
  Description of Artificial Sequence: Synthetic oligonucleotide
auguagaaucucaguaacu

SEQ ID NO: 2868440 - RNA, 19 nt, Artificial Sequence
  Description of Artificial Sequence: Synthetic oligonucleotide
cugcaaguucagcuucacc

SEQ ID NO: 2868441 - RNA, 19 nt, Artificial Sequence
  Description of Artificial Sequence: Synthetic oligonucleotide
cguuaugccaauuacaacu

SEQ ID NO: 2868442 - RNA, 19 nt, Artificial Sequence
  Description of Artificial Sequence: Synthetic oligonucleotide
caauuacaacuggaauccc

SEQ ID NO: 2868443 - RNA, 19 nt, Artificial Sequence
  Description of Artificial Sequence: Synthetic oligonucleotide
acugugccgcacaggagcg

SEQ ID NO: 2868444 - RNA, 19 nt, Artificial Sequence
  Description of Artificial Sequence: Synthetic oligonucleotide
caacgcggagaccgaagcc

SEQ ID NO: 2868445 - RNA, 19 nt, Artificial Sequence
  Description of Artificial Sequence: Synthetic oligonucleotide
augccaauuacaacuggaa

SEQ ID NO: 2868446 - RNA, 19 nt, Artificial Sequence
  Description of Artificial Sequence: Synthetic oligonucleotide
ggaaagguccgugugagaa

SEQ ID NO: 2868447 - RNA, 19 nt, Artificial Sequence
  Description of Artificial Sequence: Synthetic oligonucleotide
agauucaaucuggaggaua

SEQ ID NO: 2868448 - RNA, 19 nt, Artificial Sequence
  Description of Artificial Sequence: Synthetic oligonucleotide
uuccguaauucuagccuuu

SEQ ID NO: 2868449 - RNA, 19 nt, Artificial Sequence
  Description of Artificial Sequence: Synthetic oligonucleotide
ccaucguuaugccaauuac

SEQ ID NO: 2868450 - RNA, 19 nt, Artificial Sequence
  Description of Artificial Sequence: Synthetic oligonucleotide
ugugccgcacaggagcgac

SEQ ID NO: 2868451 - RNA, 19 nt, Artificial Sequence
  Description of Artificial Sequence: Synthetic oligonucleotide
aguucgggcaauccaucuu

SEQ ID NO: 2868452 - RNA, 19 nt, Artificial Sequence
  Description of Artificial Sequence: Synthetic oligonucleotide
aaucuggaggauagccuau

SEQ ID NO: 2868453 - RNA, 19 nt, Artificial Sequence
  Description of Artificial Sequence: Synthetic oligonucleotide
ugaugacaaacagucucuu

SEQ ID NO: 2868454 - RNA, 19 nt, Artificial Sequence
  Description of Artificial Sequence: Synthetic oligonucleotide
ucugcaaguucagcuucac

SEQ ID NO: 2868455 - RNA, 19 nt, Artificial Sequence
  Description of Artificial Sequence: Synthetic oligonucleotide
aaucuucggaaagguccgu

SEQ ID NO: 2868456 - RNA, 19 nt, Artificial Sequence
  Description of Artificial Sequence: Synthetic oligonucleotide
aagguccgugugagaaaac

SEQ ID NO: 2868457 - RNA, 19 nt, Artificial Sequence
  Description of Artificial Sequence: Synthetic oligonucleotide
cguaauucuagccuuuuca

SEQ ID NO: 2868458 - RNA, 19 nt, Artificial Sequence
  Description of Artificial Sequence: Synthetic oligonucleotide
acuugaugacaaacagucu

SEQ ID NO: 2868459 - RNA, 19 nt, Artificial Sequence
  Description of Artificial Sequence: Synthetic oligonucleotide
agcuccuucuuccguaauu

SEQ ID NO: 2868460 - RNA, 19 nt, Artificial Sequence
  Description of Artificial Sequence: Synthetic oligonucleotide
uccccacugugccgcacag

SEQ ID NO: 2868461 - RNA, 19 nt, Artificial Sequence
  Description of Artificial Sequence: Synthetic oligonucleotide
aucuugauauuggaugcuu

SEQ ID NO: 2868462 - RNA, 19 nt, Artificial Sequence
  Description of Artificial Sequence: Synthetic oligonucleotide
cuuccgacuccgagucuag

SEQ ID NO: 2868463 - RNA, 19 nt, Artificial Sequence
  Description of Artificial Sequence: Synthetic oligonucleotide
aacuuccgacuccgagucu

SEQ ID NO: 2868464 - RNA, 19 nt, Artificial Sequence
  Description of Artificial Sequence: Synthetic oligonucleotide
uugccaugguccccacugu

SEQ ID NO: 2868465 - RNA, 19 nt, Artificial Sequence
  Description of Artificial Sequence: Synthetic oligonucleotide
cuagugccagcacggcggc

SEQ ID NO: 2868466 - RNA, 19 nt, Artificial Sequence
  Description of Artificial Sequence: Synthetic oligonucleotide
ccgugugagaaaacuuccg

SEQ ID NO: 2868467 - RNA, 19 nt, Artificial Sequence
  Description of Artificial Sequence: Synthetic oligonucleotide
acuccgagucuagugccag

SEQ ID NO: 2868468 - RNA, 19 nt, Artificial Sequence
  Description of Artificial Sequence: Synthetic oligonucleotide
auaauucuuuucggggcaa

SEQ ID NO: 2868469 - RNA, 19 nt, Artificial Sequence
  Description of Artificial Sequence: Synthetic oligonucleotide
guaauacucccaguguucu

SEQ ID NO: 2868470 - RNA, 19 nt, Artificial Sequence
  Description of Artificial Sequence: Synthetic oligonucleotide
aucuucggaaagguccgug

SEQ ID NO: 2868471 - RNA, 19 nt, Artificial Sequence
  Description of Artificial Sequence: Synthetic oligonucleotide
aucuggaggauagccuaug

SEQ ID NO: 2868472 - RNA, 19 nt, Artificial Sequence
  Description of Artificial Sequence: Synthetic oligonucleotide
gagaccgaagcccgcugca

SEQ ID NO: 2868473 - RNA, 19 nt, Artificial Sequence
  Description of Artificial Sequence: Synthetic oligonucleotide
ccgacuccgagucuagugc

SEQ ID NO: 2868474 - RNA, 19 nt, Artificial Sequence
  Description of Artificial Sequence: Synthetic oligonucleotide
gcaauccaucuugauauug

SEQ ID NO: 2868475 - RNA, 19 nt, Artificial Sequence
  Description of Artificial Sequence: Synthetic oligonucleotide
cgagucuagugccagcacg

SEQ ID NO: 2868476 - RNA, 19 nt, Artificial Sequence
  Description of Artificial Sequence: Synthetic oligonucleotide
ucaccaucguuaugccaau

SEQ ID NO: 2868477 - RNA, 19 nt, Artificial Sequence
  Description of Artificial Sequence: Synthetic oligonucleotide
caacuggaaucccagucaa

SEQ ID NO: 2868478 - RNA, 19 nt, Artificial Sequence
  Description of Artificial Sequence: Synthetic oligonucleotide
gauguagccuucugggauu

SEQ ID NO: 2868479 - RNA, 19 nt, Artificial Sequence
  Description of Artificial Sequence: Synthetic oligonucleotide
gucaacgcggagaccgaag

SEQ ID NO: 2868480 - RNA, 19 nt, Artificial Sequence
  Description of Artificial Sequence: Synthetic oligonucleotide
acuuccgacuccgagucua

SEQ ID NO: 2868481 - RNA, 19 nt, Artificial Sequence
  Description of Artificial Sequence: Synthetic oligonucleotide
uacucccaguguucuggga

SEQ ID NO: 2868482 - RNA, 19 nt, Artificial Sequence
  Description of Artificial Sequence: Synthetic oligonucleotide
uaauucuuuucggggcaau

SEQ ID NO: 2868483 - RNA, 19 nt, Artificial Sequence
  Description of Artificial Sequence: Synthetic oligonucleotide
ggaaucccagucaacaaaa

SEQ ID NO: 2868484 - RNA, 19 nt, Artificial Sequence
  Description of Artificial Sequence: Synthetic oligonucleotide
cuggaaucccagucaacaa

SEQ ID NO: 2868485 - RNA, 19 nt, Artificial Sequence
  Description of Artificial Sequence: Synthetic oligonucleotide
guagaaucucaguaacuuu

SEQ ID NO: 2868486 - RNA, 19 nt, Artificial Sequence
  Description of Artificial Sequence: Synthetic oligonucleotide
ucauggccgccauggcuac

SEQ ID NO: 2868487 - RNA, 19 nt, Artificial Sequence
  Description of Artificial Sequence: Synthetic oligonucleotide
auccaucuugauauuggau

SEQ ID NO: 2868488 - RNA, 19 nt, Artificial Sequence
  Description of Artificial Sequence: Synthetic oligonucleotide
ucccaguguucugggaugu

SEQ ID NO: 2868489 - RNA, 19 nt, Artificial Sequence
  Description of Artificial Sequence: Synthetic oligonucleotide
gcaaguucagcuucaccaa

SEQ ID NO: 2868490 - RNA, 19 nt, Artificial Sequence
  Description of Artificial Sequence: Synthetic oligonucleotide
ccaugguccccacugugcc

SEQ ID NO: 2868491 - RNA, 19 nt, Artificial Sequence
  Description of Artificial Sequence: Synthetic oligonucleotide
gaggauagccuaugguuuu

SEQ ID NO: 2868492 - RNA, 19 nt, Artificial Sequence
  Description of Artificial Sequence: Synthetic oligonucleotide
ggagaccgaagcccgcugc

SEQ ID NO: 2868493 - RNA, 19 nt, Artificial Sequence
  Description of Artificial Sequence: Synthetic oligonucleotide
gggauuucugcaaguucag

SEQ ID NO: 2868494 - RNA, 19 nt, Artificial Sequence
  Description of Artificial Sequence: Synthetic oligonucleotide
ugccgcacaggagcgacaa

SEQ ID NO: 2868495 - RNA, 19 nt, Artificial Sequence
  Description of Artificial Sequence: Synthetic oligonucleotide
ggggcaaucauagaaaguu

SEQ ID NO: 2868496 - RNA, 19 nt, Artificial Sequence
  Description of Artificial Sequence: Synthetic oligonucleotide
acgcggagaccgaagcccg

SEQ ID NO: 2868497 - RNA, 19 nt, Artificial Sequence
  Description of Artificial Sequence: Synthetic oligonucleotide
cgaucgucauaguaugaag

SEQ ID NO: 2868498 - RNA, 19 nt, Artificial Sequence
  Description of Artificial Sequence: Synthetic oligonucleotide
ggauuucugcaaguucagc

SEQ ID NO: 2868499 - RNA, 19 nt, Artificial Sequence
  Description of Artificial Sequence: Synthetic oligonucleotide
ucgggcaauccaucuugau

SEQ ID NO: 2868500 - RNA, 19 nt, Artificial Sequence
  Description of Artificial Sequence: Synthetic oligonucleotide
cuccgagucuagugccagc

SEQ ID NO: 2868501 - RNA, 19 nt, Artificial Sequence
  Description of Artificial Sequence: Synthetic oligonucleotide
uccguaauucuagccuuuu

SEQ ID NO: 2868502 - RNA, 19 nt, Artificial Sequence
  Description of Artificial Sequence: Synthetic oligonucleotide
ugucaacgcggagaccgaa

SEQ ID NO: 2868503 - RNA, 19 nt, Artificial Sequence
  Description of Artificial Sequence: Synthetic oligonucleotide
gcaucagucuucgaacuuc

SEQ ID NO: 2868504 - RNA, 19 nt, Artificial Sequence
  Description of Artificial Sequence: Synthetic oligonucleotide
gaagcccgcugcagcaggc

SEQ ID NO: 2868505 - RNA, 19 nt, Artificial Sequence
  Description of Artificial Sequence: Synthetic oligonucleotide
ggauguagccuucugggau

SEQ ID NO: 2868506 - RNA, 19 nt, Artificial Sequence
  Description of Artificial Sequence: Synthetic oligonucleotide
uucugggauguagccuucu

SEQ ID NO: 2868507 - RNA, 19 nt, Artificial Sequence
  Description of Artificial Sequence: Synthetic oligonucleotide
gcuucaccaauaaauauau

SEQ ID NO: 2868508 - RNA, 19 nt, Artificial Sequence
  Description of Artificial Sequence: Synthetic oligonucleotide
cuuccguaauucuagccuu

SEQ ID NO: 2868509 - RNA, 19 nt, Artificial Sequence
  Description of Artificial Sequence: Synthetic oligonucleotide
caggagcgacaaucuucgg

SEQ ID NO: 2868510 - RNA, 19 nt, Artificial Sequence
  Description of Artificial Sequence: Synthetic oligonucleotide
ccaguguucugggauguag

SEQ ID NO: 2868511 - RNA, 19 nt, Artificial Sequence
  Description of Artificial Sequence: Synthetic oligonucleotide
gagcgacaaucuucggaaa

SEQ ID NO: 2868512 - RNA, 19 nt, Artificial Sequence
  Description of Artificial Sequence: Synthetic oligonucleotide
gggauguagccuucuggga

SEQ ID NO: 2868513 - RNA, 19 nt, Artificial Sequence
  Description of Artificial Sequence: Synthetic oligonucleotide
caagcuccuucuuccguaa

SEQ ID NO: 2868514 - RNA, 19 nt, Artificial Sequence
  Description of Artificial Sequence: Synthetic oligonucleotide
agaaaacuuccgacuccga

SEQ ID NO: 2868515 - RNA, 19 nt, Artificial Sequence
  Description of Artificial Sequence: Synthetic oligonucleotide
gacuccgagucuagugcca

SEQ ID NO: 2868516 - RNA, 19 nt, Artificial Sequence
  Description of Artificial Sequence: Synthetic oligonucleotide
gucucuugccauggucccc

SEQ ID NO: 2868517 - RNA, 19 nt, Artificial Sequence
  Description of Artificial Sequence: Synthetic oligonucleotide
cagcuucaccaauaaauau

SEQ ID NO: 2868518 - RNA, 19 nt, Artificial Sequence
  Description of Artificial Sequence: Synthetic oligonucleotide
gcagcaggcucauggccgc

SEQ ID NO: 2868519 - RNA, 19 nt, Artificial Sequence
  Description of Artificial Sequence: Synthetic oligonucleotide
cccacugugccgcacagga

SEQ ID NO: 2868520 - RNA, 19 nt, Artificial Sequence
  Description of Artificial Sequence: Synthetic oligonucleotide
agcgaucgucauaguauga

SEQ ID NO: 2868521 - RNA, 19 nt, Artificial Sequence
  Description of Artificial Sequence: Synthetic oligonucleotide
gggcaaucauagaaaguuc

SEQ ID NO: 2868522 - RNA, 19 nt, Artificial Sequence
  Description of Artificial Sequence: Synthetic oligonucleotide
cuggaggauagccuauggu

SEQ ID NO: 2868523 - RNA, 19 nt, Artificial Sequence
  Description of Artificial Sequence: Synthetic oligonucleotide
gcgcugucaacgcggagac

SEQ ID NO: 2868524 - RNA, 19 nt, Artificial Sequence
  Description of Artificial Sequence: Synthetic oligonucleotide
ccuucugggauuucugcaa

SEQ ID NO: 2868525 - RNA, 19 nt, Artificial Sequence
  Description of Artificial Sequence: Synthetic oligonucleotide
gccaugguccccacugugc

SEQ ID NO: 2868526 - RNA, 19 nt, Artificial Sequence
  Description of Artificial Sequence: Synthetic oligonucleotide
cgugugagaaaacuuccga

SEQ ID NO: 2868527 - RNA, 19 nt, Artificial Sequence
  Description of Artificial Sequence: Synthetic oligonucleotide
uuccgacuccgagucuagu

SEQ ID NO: 2868528 - RNA, 19 nt, Artificial Sequence
  Description of Artificial Sequence: Synthetic oligonucleotide
cgacuccgagucuagugcc

SEQ ID NO: 2868529 - RNA, 19 nt, Artificial Sequence
  Description of Artificial Sequence: Synthetic oligonucleotide
acagcgcugucaacgcgga

SEQ ID NO: 2868530 - RNA, 19 nt, Artificial Sequence
  Description of Artificial Sequence: Synthetic oligonucleotide
ccgcacaggagcgacaauc

SEQ ID NO: 2868531 - RNA, 19 nt, Artificial Sequence
  Description of Artificial Sequence: Synthetic oligonucleotide
gcgaucgucauaguaugaa

SEQ ID NO: 2868532 - RNA, 19 nt, Artificial Sequence
  Description of Artificial Sequence: Synthetic oligonucleotide
cuucgaacuucaagcuccu

SEQ ID NO: 2868533 - RNA, 19 nt, Artificial Sequence
  Description of Artificial Sequence: Synthetic oligonucleotide
guccccacugugccgcaca

SEQ ID NO: 2868534 - RNA, 19 nt, Artificial Sequence
  Description of Artificial Sequence: Synthetic oligonucleotide
caaguucagcuucaccaau

SEQ ID NO: 2868535 - RNA, 19 nt, Artificial Sequence
  Description of Artificial Sequence: Synthetic oligonucleotide
gaaucccagucaacaaaau

SEQ ID NO: 2868536 - RNA, 19 nt, Artificial Sequence
  Description of Artificial Sequence: Synthetic oligonucleotide
cugucaacgcggagaccga

SEQ ID NO: 2868537 - RNA, 19 nt, Artificial Sequence
  Description of Artificial Sequence: Synthetic oligonucleotide
cauagaaaguucgggcaau

SEQ ID NO: 2868538 - RNA, 19 nt, Artificial Sequence
  Description of Artificial Sequence: Synthetic oligonucleotide
ggccagacagcgcugucaa

SEQ ID NO: 2868539 - RNA, 19 nt, Artificial Sequence
  Description of Artificial Sequence: Synthetic oligonucleotide
gaacuucaagcuccuucuu

SEQ ID NO: 2868540 - RNA, 19 nt, Artificial Sequence
  Description of Artificial Sequence: Synthetic oligonucleotide
ggaggauagccuaugguuu

SEQ ID NO: 2868541 - RNA, 19 nt, Artificial Sequence
  Description of Artificial Sequence: Synthetic oligonucleotide
guguucugggauguagccu

SEQ ID NO: 2868542 - RNA, 19 nt, Artificial Sequence
  Description of Artificial Sequence: Synthetic oligonucleotide
cgaacuucaagcuccuucu

SEQ ID NO: 2868543 - RNA, 19 nt, Artificial Sequence
  Description of Artificial Sequence: Synthetic oligonucleotide
caucuugauauuggaugcu

SEQ ID NO: 2868544 - RNA, 19 nt, Artificial Sequence
  Description of Artificial Sequence: Synthetic oligonucleotide
ccguaauucuagccuuuuc

SEQ ID NO: 2868545 - RNA, 19 nt, Artificial Sequence
  Description of Artificial Sequence: Synthetic oligonucleotide
uguagccuucugggauuuc

SEQ ID NO: 2868546 - RNA, 19 nt, Artificial Sequence
  Description of Artificial Sequence: Synthetic oligonucleotide
gugccagcacggcggccag

SEQ ID NO: 2868547 - RNA, 19 nt, Artificial Sequence
  Description of Artificial Sequence: Synthetic oligonucleotide
guucugggauguagccuuc

SEQ ID NO: 2868548 - RNA, 19 nt, Artificial Sequence
  Description of Artificial Sequence: Synthetic oligonucleotide
aucagucuucgaacuucaa

SEQ ID NO: 2868549 - RNA, 19 nt, Artificial Sequence
  Description of Artificial Sequence: Synthetic oligonucleotide
caggcucauggccgccaug

SEQ ID NO: 2868550 - RNA, 19 nt, Artificial Sequence
  Description of Artificial Sequence: Synthetic oligonucleotide
uucgaacuucaagcuccuu

SEQ ID NO: 2868551 - RNA, 19 nt, Artificial Sequence
  Description of Artificial Sequence: Synthetic oligonucleotide
uagugccagcacggcggcc

SEQ ID NO: 2868552 - RNA, 19 nt, Artificial Sequence
  Description of Artificial Sequence: Synthetic oligonucleotide
cagcgcugucaacgcggag

SEQ ID NO: 2868553 - RNA, 19 nt, Artificial Sequence
  Description of Artificial Sequence: Synthetic oligonucleotide
cuucaccaauaaauauauu

SEQ ID NO: 2868554 - RNA, 19 nt, Artificial Sequence
  Description of Artificial Sequence: Synthetic oligonucleotide
ccgagucuagugccagcac

SEQ ID NO: 2868555 - RNA, 19 nt, Artificial Sequence
  Description of Artificial Sequence: Synthetic oligonucleotide
cagcaggcucauggccgcc

SEQ ID NO: 2868556 - RNA, 19 nt, Artificial Sequence
  Description of Artificial Sequence: Synthetic oligonucleotide
cgggcaauccaucuugaua

SEQ ID NO: 2868557 - RNA, 19 nt, Artificial Sequence
  Description of Artificial Sequence: Synthetic oligonucleotide
ugccagcacggcggccaga

SEQ ID NO: 2868558 - RNA, 19 nt, Artificial Sequence
  Description of Artificial Sequence: Synthetic oligonucleotide
gccagacagcgcugucaac

SEQ ID NO: 2868559 - RNA, 19 nt, Artificial Sequence
  Description of Artificial Sequence: Synthetic oligonucleotide
gguccgugugagaaaacuu

SEQ ID NO: 2868560 - RNA, 19 nt, Artificial Sequence
  Description of Artificial Sequence: Synthetic oligonucleotide
ggcaauccaucuugauauu

SEQ ID NO: 2868561 - RNA, 19 nt, Artificial Sequence
  Description of Artificial Sequence: Synthetic oligonucleotide
ccgaagcccgcugcagcag

SEQ ID NO: 2868562 - RNA, 19 nt, Artificial Sequence
  Description of Artificial Sequence: Synthetic oligonucleotide
cugugccgcacaggagcga

SEQ ID NO: 2868563 - RNA, 19 nt, Artificial Sequence
  Description of Artificial Sequence: Synthetic oligonucleotide
gugccgcacaggagcgaca

SEQ ID NO: 2868564 - RNA, 19 nt, Artificial Sequence
  Description of Artificial Sequence: Synthetic oligonucleotide
cagauucaaucuggaggau

SEQ ID NO: 2868565 - RNA, 19 nt, Artificial Sequence
  Description of Artificial Sequence: Synthetic oligonucleotide
cgcacaggagcgacaaucu

SEQ ID NO: 2868566 - RNA, 19 nt, Artificial Sequence
  Description of Artificial Sequence: Synthetic oligonucleotide
ccccacugugccgcacagg

SEQ ID NO: 2868567 - RNA, 19 nt, Artificial Sequence
  Description of Artificial Sequence: Synthetic oligonucleotide
gcacaggagcgacaaucuu

SEQ ID NO: 2868568 - RNA, 19 nt, Artificial Sequence
  Description of Artificial Sequence: Synthetic oligonucleotide
cgcggagaccgaagcccgc

SEQ ID NO: 2868569 - RNA, 19 nt, Artificial Sequence
  Description of Artificial Sequence: Synthetic oligonucleotide
cggagaccgaagcccgcug

SEQ ID NO: 2868570 - RNA, 19 nt, Artificial Sequence
  Description of Artificial Sequence: Synthetic oligonucleotide
cgacaaucuucggaaaggu

SEQ ID NO: 2868571 - RNA, 19 nt, Artificial Sequence
  Description of Artificial Sequence: Synthetic oligonucleotide
gguccccacugugccgcac

SEQ ID NO: 2868572 - RNA, 19 nt, Artificial Sequence
  Description of Artificial Sequence: Synthetic oligonucleotide
gcggccagacagcgcuguc

SEQ ID NO: 2868573 - RNA, 19 nt, Artificial Sequence
  Description of Artificial Sequence: Synthetic oligonucleotide
cggaaagguccgugugaga

SEQ ID NO: 2868574 - RNA, 19 nt, Artificial Sequence
  Description of Artificial Sequence: Synthetic oligonucleotide
gcggagaccgaagcccgcu

SEQ ID NO: 2868575 - RNA, 19 nt, Artificial Sequence
  Description of Artificial Sequence: Synthetic oligonucleotide
cggggcaaucauagaaagu

SEQ ID NO: 2868576 - RNA, 19 nt, Artificial Sequence
  Description of Artificial Sequence: Synthetic oligonucleotide
ggcggccagacagcgcugu

SEQ ID NO: 2868577 - RNA, 19 nt, Artificial Sequence
  Description of Artificial Sequence: Synthetic oligonucleotide
gcaggcucauggccgccau

SEQ ID NO: 2868578 - RNA, 19 nt, Artificial Sequence
  Description of Artificial Sequence: Synthetic oligonucleotide
cggccagacagcgcuguca

SEQ ID NO: 2868579 - RNA, 19 nt, Artificial Sequence
  Description of Artificial Sequence: Synthetic oligonucleotide
cgcugucaacgcggagacc

SEQ ID NO: 2868580 - RNA, 19 nt, Artificial Sequence
  Description of Artificial Sequence: Synthetic oligonucleotide
caccaucguuaugccaauu

SEQ ID NO: 2868581 - RNA, 19 nt, Artificial Sequence
  Description of Artificial Sequence: Synthetic oligonucleotide
cgcaucagucuucgaacuu

SEQ ID NO: 2868582 - RNA, 19 nt, Artificial Sequence
  Description of Artificial Sequence: Synthetic oligonucleotide
cggcggccagacagcgcug

SEQ ID NO: 2868583 - RNA, 19 nt, Artificial Sequence
  Description of Artificial Sequence: Synthetic oligonucleotide
cccaguguucugggaugua

SEQ ID NO: 2868584 - RNA, 19 nt, Artificial Sequence
  Description of Artificial Sequence: Synthetic oligonucleotide
gccgcacaggagcgacaau

SEQ ID NO: 2868585 - RNA, 19 nt, Artificial Sequence
  Description of Artificial Sequence: Synthetic oligonucleotide
cccgcugcagcaggcucau

SEQ ID NO: 2868586 - RNA, 19 nt, Artificial Sequence
  Description of Artificial Sequence: Synthetic oligonucleotide
ccgcugcagcaggcucaug

SEQ ID NO: 2868587 - RNA, 19 nt, Artificial Sequence
  Description of Artificial Sequence: Synthetic oligonucleotide
uauuuuauguauaacaaag

SEQ ID NO: 2868588 - RNA, 19 nt, Artificial Sequence
  Description of Artificial Sequence: Synthetic oligonucleotide
uuauguauaacaaaguggc

SEQ ID NO: 2868589 - RNA, 19 nt, Artificial Sequence
  Description of Artificial Sequence: Synthetic oligonucleotide
uuuauguauaacaaagugg

SEQ ID NO: 2868590 - RNA, 19 nt, Artificial Sequence
  Description of Artificial Sequence: Synthetic oligonucleotide
aucaaauugcuucacaggc

SEQ ID NO: 2868591 - RNA, 19 nt, Artificial Sequence
  Description of Artificial Sequence: Synthetic oligonucleotide
uuuuauguauaacaaagug

SEQ ID NO: 2868592 - RNA, 19 nt, Artificial Sequence
  Description of Artificial Sequence: Synthetic oligonucleotide
uacaaaauuguuuugggga

SEQ ID NO: 2868593 - RNA, 19 nt, Artificial Sequence
  Description of Artificial Sequence: Synthetic oligonucleotide
gaaacauuguuucauauca

SEQ ID NO: 2868594 - RNA, 19 nt, Artificial Sequence
  Description of Artificial Sequence: Synthetic oligonucleotide
aauugucaaauucacccuc

SEQ ID NO: 2868595 - RNA, 19 nt, Artificial Sequence
  Description of Artificial Sequence: Synthetic oligonucleotide
gauuacaaaauuguuuugg

SEQ ID NO: 2868596 - RNA, 19 nt, Artificial Sequence
  Description of Artificial Sequence: Synthetic oligonucleotide
auuacaaaauuguuuuggg

SEQ ID NO: 2868597 - RNA, 19 nt, Artificial Sequence
  Description of Artificial Sequence: Synthetic oligonucleotide
aaaguagcaagguugauua

SEQ ID NO: 2868598 - RNA, 19 nt, Artificial Sequence
  Description of Artificial Sequence: Synthetic oligonucleotide
gaaaugacaaguuuuacaa

SEQ ID NO: 2868599 - RNA, 19 nt, Artificial Sequence
  Description of Artificial Sequence: Synthetic oligonucleotide
uuacaaaauuguuuugggg

SEQ ID NO: 2868600 - RNA, 19 nt, Artificial Sequence
  Description of Artificial Sequence: Synthetic oligonucleotide
aaaaguuaagcugaugcug

SEQ ID NO: 2868601 - RNA, 19 nt, Artificial Sequence
  Description of Artificial Sequence: Synthetic oligonucleotide
aaauucacccucucuccgc

SEQ ID NO: 2868602 - RNA, 19 nt, Artificial Sequence
  Description of Artificial Sequence: Synthetic oligonucleotide
uugauuacaaaauuguuuu

SEQ ID NO: 2868603 - RNA, 19 nt, Artificial Sequence
  Description of Artificial Sequence: Synthetic oligonucleotide
guugagauauuguugaaug

SEQ ID NO: 2868604 - RNA, 19 nt, Artificial Sequence
  Description of Artificial Sequence: Synthetic oligonucleotide
aauuguuuuggggagcagg

SEQ ID NO: 2868605 - RNA, 19 nt, Artificial Sequence
  Description of Artificial Sequence: Synthetic oligonucleotide
ucaaauugcuucacaggcg

SEQ ID NO: 2868606 - RNA, 19 nt, Artificial Sequence
  Description of Artificial Sequence: Synthetic oligonucleotide
gcaauugucaaauucaccc

SEQ ID NO: 2868607 - RNA, 19 nt, Artificial Sequence
  Description of Artificial Sequence: Synthetic oligonucleotide
uuucauaucaauugcacuu

SEQ ID NO: 2868608 - RNA, 19 nt, Artificial Sequence
  Description of Artificial Sequence: Synthetic oligonucleotide
acaaaauuguuuuggggag

SEQ ID NO: 2868609 - RNA, 19 nt, Artificial Sequence
  Description of Artificial Sequence: Synthetic oligonucleotide
ugagauauuguugaauggc

SEQ ID NO: 2868610 - RNA, 19 nt, Artificial Sequence
  Description of Artificial Sequence: Synthetic oligonucleotide
guaucaaauugcuucacag

SEQ ID NO: 2868611 - RNA, 19 nt, Artificial Sequence
  Description of Artificial Sequence: Synthetic oligonucleotide
agaaaugacaaguuuuaca

SEQ ID NO: 2868612 - RNA, 19 nt, Artificial Sequence
  Description of Artificial Sequence: Synthetic oligonucleotide
auguauaacaaaguggcag

SEQ ID NO: 2868613 - RNA, 19 nt, Artificial Sequence
  Description of Artificial Sequence: Synthetic oligonucleotide
uguuucauaucaauugcac

SEQ ID NO: 2868614 - RNA, 19 nt, Artificial Sequence
  Description of Artificial Sequence: Synthetic oligonucleotide
uugagauauuguugaaugg

SEQ ID NO: 2868615 - RNA, 19 nt, Artificial Sequence
  Description of Artificial Sequence: Synthetic oligonucleotide
auaacaaaguggcaguuga

SEQ ID NO: 2868616 - RNA, 19 nt, Artificial Sequence
  Description of Artificial Sequence: Synthetic oligonucleotide
uguauaacaaaguggcagu

SEQ ID NO: 2868617 - RNA, 19 nt, Artificial Sequence
  Description of Artificial Sequence: Synthetic oligonucleotide
aaaguggcaguugagauau

SEQ ID NO: 2868618 - RNA, 19 nt, Artificial Sequence
  Description of Artificial Sequence: Synthetic oligonucleotide
aagaaaugacaaguuuuac

SEQ ID NO: 2868619 - RNA, 19 nt, Artificial Sequence
  Description of Artificial Sequence: Synthetic oligonucleotide
ucaauugcacuucaguauc

SEQ ID NO: 2868620 - RNA, 19 nt, Artificial Sequence
  Description of Artificial Sequence: Synthetic oligonucleotide
ucaaauucacccucucucc

SEQ ID NO: 2868621 - RNA, 19 nt, Artificial Sequence
  Description of Artificial Sequence: Synthetic oligonucleotide
uguugaauggccacucccc

SEQ ID NO: 2868622 - RNA, 19 nt, Artificial Sequence
  Description of Artificial Sequence: Synthetic oligonucleotide
uuccagaaggucaagaaua

SEQ ID NO: 2868623 - RNA, 19 nt, Artificial Sequence
  Description of Artificial Sequence: Synthetic oligonucleotide
auaucaauugcacuucagu

SEQ ID NO: 2868624 - RNA, 19 nt, Artificial Sequence
  Description of Artificial Sequence: Synthetic oligonucleotide
uuggacauauuuuauguau

SEQ ID NO: 2868625 - RNA, 19 nt, Artificial Sequence
  Description of Artificial Sequence: Synthetic oligonucleotide
aagguugauuacaaaauug

SEQ ID NO: 2868626 - RNA, 19 nt, Artificial Sequence
  Description of Artificial Sequence: Synthetic oligonucleotide
cauauuuuauguauaacaa

SEQ ID NO: 2868627 - RNA, 19 nt, Artificial Sequence
  Description of Artificial Sequence: Synthetic oligonucleotide
ucuggcaauugucaaauuc

SEQ ID NO: 2868628 - RNA, 19 nt, Artificial Sequence
  Description of Artificial Sequence: Synthetic oligonucleotide
uugcacuucaguaucaaau

SEQ ID NO: 2868629 - RNA, 19 nt, Artificial Sequence
  Description of Artificial Sequence: Synthetic oligonucleotide
uaucaauugcacuucagua

SEQ ID NO: 2868630 - RNA, 19 nt, Artificial Sequence
  Description of Artificial Sequence: Synthetic oligonucleotide
auauucaccagaccacuag

SEQ ID NO: 2868631 - RNA, 19 nt, Artificial Sequence
  Description of Artificial Sequence: Synthetic oligonucleotide
cacuucaguaucaaauugc

SEQ ID NO: 2868632 - RNA, 19 nt, Artificial Sequence
  Description of Artificial Sequence: Synthetic oligonucleotide
auauuuuauguauaacaaa

SEQ ID NO: 2868633 - RNA, 19 nt, Artificial Sequence
  Description of Artificial Sequence: Synthetic oligonucleotide
aaaguuaagcugaugcugu

SEQ ID NO: 2868634 - RNA, 19 nt, Artificial Sequence
  Description of Artificial Sequence: Synthetic oligonucleotide
ugacaaguuuuacaaaguc

SEQ ID NO: 2868635 - RNA, 19 nt, Artificial Sequence
  Description of Artificial Sequence: Synthetic oligonucleotide
uggggagcaggaaacauug

SEQ ID NO: 2868636 - RNA, 19 nt, Artificial Sequence
  Description of Artificial Sequence: Synthetic oligonucleotide
agcaagguugauuacaaaa

SEQ ID NO: 2868637 - RNA, 19 nt, Artificial Sequence
  Description of Artificial Sequence: Synthetic oligonucleotide
uuguuucauaucaauugca

SEQ ID NO: 2868638 - RNA, 19 nt, Artificial Sequence
  Description of Artificial Sequence: Synthetic oligonucleotide
aucaauugcacuucaguau

SEQ ID NO: 2868639 - RNA, 19 nt, Artificial Sequence
  Description of Artificial Sequence: Synthetic oligonucleotide
auuguugaauggccacucc

SEQ ID NO: 2868640 - RNA, 19 nt, Artificial Sequence
  Description of Artificial Sequence: Synthetic oligonucleotide
aaugaucugggcagcgagc

SEQ ID NO: 2868641 - RNA, 19 nt, Artificial Sequence
  Description of Artificial Sequence: Synthetic oligonucleotide
aacaaaguggcaguugaga

SEQ ID NO: 2868642 - RNA, 19 nt, Artificial Sequence
  Description of Artificial Sequence: Synthetic oligonucleotide
aaagaaaugacaaguuuua

SEQ ID NO: 2868643 - RNA, 19 nt, Artificial Sequence
  Description of Artificial Sequence: Synthetic oligonucleotide
gaaugaucugggcagcgag

SEQ ID NO: 2868644 - RNA, 19 nt, Artificial Sequence
  Description of Artificial Sequence: Synthetic oligonucleotide
aaaauuguuuuggggagca

SEQ ID NO: 2868645 - RNA, 19 nt, Artificial Sequence
  Description of Artificial Sequence: Synthetic oligonucleotide
uuguugaauggccacuccc

SEQ ID NO: 2868646 - RNA, 19 nt, Artificial Sequence
  Description of Artificial Sequence: Synthetic oligonucleotide
gucaaauucacccucucuc

SEQ ID NO: 2868647 - RNA, 19 nt, Artificial Sequence
  Description of Artificial Sequence: Synthetic oligonucleotide
uccguugauggccaguacc

SEQ ID NO: 2868648 - RNA, 19 nt, Artificial Sequence
  Description of Artificial Sequence: Synthetic oligonucleotide
gagauauuguugaauggcc

SEQ ID NO: 2868649 - RNA, 19 nt, Artificial Sequence
  Description of Artificial Sequence: Synthetic oligonucleotide
uauguauaacaaaguggca

SEQ ID NO: 2868650 - RNA, 19 nt, Artificial Sequence
  Description of Artificial Sequence: Synthetic oligonucleotide
ggucccaugcuucaggucg

SEQ ID NO: 2868651 - RNA, 19 nt, Artificial Sequence
  Description of Artificial Sequence: Synthetic oligonucleotide
ugauuacaaaauuguuuug

SEQ ID NO: 2868652 - RNA, 19 nt, Artificial Sequence
  Description of Artificial Sequence: Synthetic oligonucleotide
aaaugacaaguuuuacaaa

SEQ ID NO: 2868653 - RNA, 19 nt, Artificial Sequence
  Description of Artificial Sequence: Synthetic oligonucleotide
ucacgggugccauugcugg

SEQ ID NO: 2868654 - RNA, 19 nt, Artificial Sequence
  Description of Artificial Sequence: Synthetic oligonucleotide
guuaagcugaugcugugug

SEQ ID NO: 2868655 - RNA, 19 nt, Artificial Sequence
  Description of Artificial Sequence: Synthetic oligonucleotide
auugcuguugagccugccg

SEQ ID NO: 2868656 - RNA, 19 nt, Artificial Sequence
  Description of Artificial Sequence: Synthetic oligonucleotide
aaguagcaagguugauuac

SEQ ID NO: 2868657 - RNA, 19 nt, Artificial Sequence
  Description of Artificial Sequence: Synthetic oligonucleotide
caccagaccacuagguugg

SEQ ID NO: 2868658 - RNA, 19 nt, Artificial Sequence
  Description of Artificial Sequence: Synthetic oligonucleotide
uauaacaaaguggcaguug

SEQ ID NO: 2868659 - RNA, 19 nt, Artificial Sequence
  Description of Artificial Sequence: Synthetic oligonucleotide
acaaguuuuacaaagucuu

SEQ ID NO: 2868660 - RNA, 19 nt, Artificial Sequence
  Description of Artificial Sequence: Synthetic oligonucleotide
aguaucaaauugcuucaca

SEQ ID NO: 2868661 - RNA, 19 nt, Artificial Sequence
  Description of Artificial Sequence: Synthetic oligonucleotide
aggucguguccguugaugg

SEQ ID NO: 2868662 - RNA, 19 nt, Artificial Sequence
  Description of Artificial Sequence: Synthetic oligonucleotide
aauucacccucucuccgcu

SEQ ID NO: 2868663 - RNA, 19 nt, Artificial Sequence
  Description of Artificial Sequence: Synthetic oligonucleotide
caaauucacccucucuccg

SEQ ID NO: 2868664 - RNA, 19 nt, Artificial Sequence
  Description of Artificial Sequence: Synthetic oligonucleotide
gagcaggaaacauuguuuc

SEQ ID NO: 2868665 - RNA, 19 nt, Artificial Sequence
  Description of Artificial Sequence: Synthetic oligonucleotide
acaaaguggcaguugagau

SEQ ID NO: 2868666 - RNA, 19 nt, Artificial Sequence
  Description of Artificial Sequence: Synthetic oligonucleotide
uucacccucucuccgcugg

SEQ ID NO: 2868667 - RNA, 19 nt, Artificial Sequence
  Description of Artificial Sequence: Synthetic oligonucleotide
uaacaaaguggcaguugag

SEQ ID NO: 2868668 - RNA, 19 nt, Artificial Sequence
  Description of Artificial Sequence: Synthetic oligonucleotide
uggcaauugucaaauucac

SEQ ID NO: 2868669 - RNA, 19 nt, Artificial Sequence
  Description of Artificial Sequence: Synthetic oligonucleotide
uuguuuguacacaguaaaa

SEQ ID NO: 2868670 - RNA, 19 nt, Artificial Sequence
  Description of Artificial Sequence: Synthetic oligonucleotide
ucaucuguccuucggacua

SEQ ID NO: 2868671 - RNA, 19 nt, Artificial Sequence
  Description of Artificial Sequence: Synthetic oligonucleotide
uugcuguugagccugccgu

SEQ ID NO: 2868672 - RNA, 19 nt, Artificial Sequence
  Description of Artificial Sequence: Synthetic oligonucleotide
agguuggacauauuuuaug

SEQ ID NO: 2868673 - RNA, 19 nt, Artificial Sequence
  Description of Artificial Sequence: Synthetic oligonucleotide
ugucaaauucacccucucu

SEQ ID NO: 2868674 - RNA, 19 nt, Artificial Sequence
  Description of Artificial Sequence: Synthetic oligonucleotide
cagaaggucaagaauaaaa

SEQ ID NO: 2868675 - RNA, 19 nt, Artificial Sequence
  Description of Artificial Sequence: Synthetic oligonucleotide
cuggcaauugucaaauuca

SEQ ID NO: 2868676 - RNA, 19 nt, Artificial Sequence
  Description of Artificial Sequence: Synthetic oligonucleotide
auuuuauguauaacaaagu

SEQ ID NO: 2868677 - RNA, 19 nt, Artificial Sequence
  Description of Artificial Sequence: Synthetic oligonucleotide
aaacgccuggcucaucugu

SEQ ID NO: 2868678 - RNA, 19 nt, Artificial Sequence
  Description of Artificial Sequence: Synthetic oligonucleotide
uaagcugaugcugugugcu

SEQ ID NO: 2868679 - RNA, 19 nt, Artificial Sequence
  Description of Artificial Sequence: Synthetic oligonucleotide
uccccaaagaaaugacaag

SEQ ID NO: 2868680 - RNA, 19 nt, Artificial Sequence
  Description of Artificial Sequence: Synthetic oligonucleotide
caugcuucaggucgugucc

SEQ ID NO: 2868681 - RNA, 19 nt, Artificial Sequence
  Description of Artificial Sequence: Synthetic oligonucleotide
aguagcaagguugauuaca

SEQ ID NO: 2868682 - RNA, 19 nt, Artificial Sequence
  Description of Artificial Sequence: Synthetic oligonucleotide
aaguuaagcugaugcugug

SEQ ID NO: 2868683 - RNA, 19 nt, Artificial Sequence
  Description of Artificial Sequence: Synthetic oligonucleotide
uuaagcugaugcugugugc

SEQ ID NO: 2868684 - RNA, 19 nt, Artificial Sequence
  Description of Artificial Sequence: Synthetic oligonucleotide
uggacauauuuuauguaua

SEQ ID NO: 2868685 - RNA, 19 nt, Artificial Sequence
  Description of Artificial Sequence: Synthetic oligonucleotide
agguugauuacaaaauugu

SEQ ID NO: 2868686 - RNA, 19 nt, Artificial Sequence
  Description of Artificial Sequence: Synthetic oligonucleotide
cuucacaggcgauuguuug

SEQ ID NO: 2868687 - RNA, 19 nt, Artificial Sequence
  Description of Artificial Sequence: Synthetic oligonucleotide
cauaucaauugcacuucag

SEQ ID NO: 2868688 - RNA, 19 nt, Artificial Sequence
  Description of Artificial Sequence: Synthetic oligonucleotide
gugugcuccugcuucacgg

SEQ ID NO: 2868689 - RNA, 19 nt, Artificial Sequence
  Description of Artificial Sequence: Synthetic oligonucleotide
ugcacuucaguaucaaauu

SEQ ID NO: 2868690 - RNA, 19 nt, Artificial Sequence
  Description of Artificial Sequence: Synthetic oligonucleotide
ugggcagcgagcucugggg

SEQ ID NO: 2868691 - RNA, 19 nt, Artificial Sequence
  Description of Artificial Sequence: Synthetic oligonucleotide
ugaauggccacuccccaaa

SEQ ID NO: 2868692 - RNA, 19 nt, Artificial Sequence
  Description of Artificial Sequence: Synthetic oligonucleotide
uucacgggugccauugcug

SEQ ID NO: 2868693 - RNA, 19 nt, Artificial Sequence
  Description of Artificial Sequence: Synthetic oligonucleotide
cuagguuggacauauuuua

SEQ ID NO: 2868694 - RNA, 19 nt, Artificial Sequence
  Description of Artificial Sequence: Synthetic oligonucleotide
caaauugcuucacaggcga

SEQ ID NO: 2868695 - RNA, 19 nt, Artificial Sequence
  Description of Artificial Sequence: Synthetic oligonucleotide
gacauauuuuauguauaac

SEQ ID NO: 2868696 - RNA, 19 nt, Artificial Sequence
  Description of Artificial Sequence: Synthetic oligonucleotide
uucauaucaauugcacuuc

SEQ ID NO: 2868697 - RNA, 19 nt, Artificial Sequence
  Description of Artificial Sequence: Synthetic oligonucleotide
agcugaugcugugugcucc

SEQ ID NO: 2868698 - RNA, 19 nt, Artificial Sequence
  Description of Artificial Sequence: Synthetic oligonucleotide
ugugcuccugcuucacggg

SEQ ID NO: 2868699 - RNA, 19 nt, Artificial Sequence
  Description of Artificial Sequence: Synthetic oligonucleotide
ugugugcuccugcuucacg

SEQ ID NO: 2868700 - RNA, 19 nt, Artificial Sequence
  Description of Artificial Sequence: Synthetic oligonucleotide
aagcugaugcugugugcuc

SEQ ID NO: 2868701 - RNA, 19 nt, Artificial Sequence
  Description of Artificial Sequence: Synthetic oligonucleotide
gcaguugagauauuguuga

SEQ ID NO: 2868702 - RNA, 19 nt, Artificial Sequence
  Description of Artificial Sequence: Synthetic oligonucleotide
auugcuucacaggcgauug

SEQ ID NO: 2868703 - RNA, 19 nt, Artificial Sequence
  Description of Artificial Sequence: Synthetic oligonucleotide
cuggccugaaugaucuggg

SEQ ID NO: 2868704 - RNA, 19 nt, Artificial Sequence
  Description of Artificial Sequence: Synthetic oligonucleotide
ugcugugugcuccugcuuc

SEQ ID NO: 2868705 - RNA, 19 nt, Artificial Sequence
  Description of Artificial Sequence: Synthetic oligonucleotide
aauggccacuccccaaaga

SEQ ID NO: 2868706 - RNA, 19 nt, Artificial Sequence
  Description of Artificial Sequence: Synthetic oligonucleotide
acuucaguaucaaauugcu

SEQ ID NO: 2868707 - RNA, 19 nt, Artificial Sequence
  Description of Artificial Sequence: Synthetic oligonucleotide
aggaaacauuguuucauau

SEQ ID NO: 2868708 - RNA, 19 nt, Artificial Sequence
  Description of Artificial Sequence: Synthetic oligonucleotide
uggggucccaugcuucagg

SEQ ID NO: 2868709 - RNA, 19 nt, Artificial Sequence
  Description of Artificial Sequence: Synthetic oligonucleotide
uauuguugaauggccacuc

SEQ ID NO: 2868710 - RNA, 19 nt, Artificial Sequence
  Description of Artificial Sequence: Synthetic oligonucleotide
caaaauuguuuuggggagc

SEQ ID NO: 2868711 - RNA, 19 nt, Artificial Sequence
  Description of Artificial Sequence: Synthetic oligonucleotide
aguggcaguugagauauug

SEQ ID NO: 2868712 - RNA, 19 nt, Artificial Sequence
  Description of Artificial Sequence: Synthetic oligonucleotide
aaaacgccuggcucaucug

SEQ ID NO: 2868713 - RNA, 19 nt, Artificial Sequence
  Description of Artificial Sequence: Synthetic oligonucleotide
uucacaggcgauuguuugu

SEQ ID NO: 2868714 - RNA, 19 nt, Artificial Sequence
  Description of Artificial Sequence: Synthetic oligonucleotide
uucaggucguguccguuga

SEQ ID NO: 2868715 - RNA, 19 nt, Artificial Sequence
  Description of Artificial Sequence: Synthetic oligonucleotide
uagguuggacauauuuuau

SEQ ID NO: 2868716 - RNA, 19 nt, Artificial Sequence
  Description of Artificial Sequence: Synthetic oligonucleotide
ugaugcugugugcuccugc

SEQ ID NO: 2868717 - RNA, 19 nt, Artificial Sequence
  Description of Artificial Sequence: Synthetic oligonucleotide
auggccacuccccaaagaa

SEQ ID NO: 2868718 - RNA, 19 nt, Artificial Sequence
  Description of Artificial Sequence: Synthetic oligonucleotide
gccugaaugaucugggcag

SEQ ID NO: 2868719 - RNA, 19 nt, Artificial Sequence
  Description of Artificial Sequence: Synthetic oligonucleotide
agauauuguugaauggcca

SEQ ID NO: 2868720 - RNA, 19 nt, Artificial Sequence
  Description of Artificial Sequence: Synthetic oligonucleotide
auuguuuuggggagcagga

SEQ ID NO: 2868721 - RNA, 19 nt, Artificial Sequence
  Description of Artificial Sequence: Synthetic oligonucleotide
acgccuggcucaucugucc

SEQ ID NO: 2868722 - RNA, 19 nt, Artificial Sequence
  Description of Artificial Sequence: Synthetic oligonucleotide
uucaccagaccacuagguu

SEQ ID NO: 2868723 - RNA, 19 nt, Artificial Sequence
  Description of Artificial Sequence: Synthetic oligonucleotide
ggcgauuguuuguacacag

SEQ ID NO: 2868724 - RNA, 19 nt, Artificial Sequence
  Description of Artificial Sequence: Synthetic oligonucleotide
ggaaacauuguuucauauc

SEQ ID NO: 2868725 - RNA, 19 nt, Artificial Sequence
  Description of Artificial Sequence: Synthetic oligonucleotide
cuccccaaagaaaugacaa

SEQ ID NO: 2868726 - RNA, 19 nt, Artificial Sequence
  Description of Artificial Sequence: Synthetic oligonucleotide
gauuguuuguacacaguaa

SEQ ID NO: 2868727 - RNA, 19 nt, Artificial Sequence
  Description of Artificial Sequence: Synthetic oligonucleotide
guuuuggggagcaggaaac

SEQ ID NO: 2868728 - RNA, 19 nt, Artificial Sequence
  Description of Artificial Sequence: Synthetic oligonucleotide
auauuguugaauggccacu

SEQ ID NO: 2868729 - RNA, 19 nt, Artificial Sequence
  Description of Artificial Sequence: Synthetic oligonucleotide
ugcuucacgggugccauug

SEQ ID NO: 2868730 - RNA, 19 nt, Artificial Sequence
  Description of Artificial Sequence: Synthetic oligonucleotide
acaggcgauuguuuguaca

SEQ ID NO: 2868731 - RNA, 19 nt, Artificial Sequence
  Description of Artificial Sequence: Synthetic oligonucleotide
agcaggaaacauuguuuca

SEQ ID NO: 2868732 - RNA, 19 nt, Artificial Sequence
  Description of Artificial Sequence: Synthetic oligonucleotide
cucuccgcuggccugaaug

SEQ ID NO: 2868733 - RNA, 19 nt, Artificial Sequence
  Description of Artificial Sequence: Synthetic oligonucleotide
gacaaguuuuacaaagucu

SEQ ID NO: 2868734 - RNA, 19 nt, Artificial Sequence
  Description of Artificial Sequence: Synthetic oligonucleotide
aauugcacuucaguaucaa

SEQ ID NO: 2868735 - RNA, 19 nt, Artificial Sequence
  Description of Artificial Sequence: Synthetic oligonucleotide
aguugagauauuguugaau

SEQ ID NO: 2868736 - RNA, 19 nt, Artificial Sequence
  Description of Artificial Sequence: Synthetic oligonucleotide
guugauuacaaaauuguuu

SEQ ID NO: 2868737 - RNA, 19 nt, Artificial Sequence
  Description of Artificial Sequence: Synthetic oligonucleotide
acgggugccauugcugggc

SEQ ID NO: 2868738 - RNA, 19 nt, Artificial Sequence
  Description of Artificial Sequence: Synthetic oligonucleotide
guuucauaucaauugcacu

SEQ ID NO: 2868739 - RNA, 19 nt, Artificial Sequence
  Description of Artificial Sequence: Synthetic oligonucleotide
aaacauuguuucauaucaa

SEQ ID NO: 2868740 - RNA, 19 nt, Artificial Sequence
  Description of Artificial Sequence: Synthetic oligonucleotide
ucuccgcuggccugaauga

SEQ ID NO: 2868741 - RNA, 19 nt, Artificial Sequence
  Description of Artificial Sequence: Synthetic oligonucleotide
aaauuguuuuggggagcag

SEQ ID NO: 2868742 - RNA, 19 nt, Artificial Sequence
  Description of Artificial Sequence: Synthetic oligonucleotide
cuucaggucguguccguug

SEQ ID NO: 2868743 - RNA, 19 nt, Artificial Sequence
  Description of Artificial Sequence: Synthetic oligonucleotide
aacgccuggcucaucuguc

SEQ ID NO: 2868744 - RNA, 19 nt, Artificial Sequence
  Description of Artificial Sequence: Synthetic oligonucleotide
augacaaguuuuacaaagu

SEQ ID NO: 2868745 - RNA, 19 nt, Artificial Sequence
  Description of Artificial Sequence: Synthetic oligonucleotide
uugucaaauucacccucuc

SEQ ID NO: 2868746 - RNA, 19 nt, Artificial Sequence
  Description of Artificial Sequence: Synthetic oligonucleotide
agaccacuagguuggacau

SEQ ID NO: 2868747 - RNA, 19 nt, Artificial Sequence
  Description of Artificial Sequence: Synthetic oligonucleotide
ugcuccugcuucacgggug

SEQ ID NO: 2868748 - RNA, 19 nt, Artificial Sequence
  Description of Artificial Sequence: Synthetic oligonucleotide
uuggggagcaggaaacauu

SEQ ID NO: 2868749 - RNA, 19 nt, Artificial Sequence
  Description of Artificial Sequence: Synthetic oligonucleotide
gaauggccacuccccaaag

SEQ ID NO: 2868750 - RNA, 19 nt, Artificial Sequence
  Description of Artificial Sequence: Synthetic oligonucleotide
accacuagguuggacauau

SEQ ID NO: 2868751 - RNA, 19 nt, Artificial Sequence
  Description of Artificial Sequence: Synthetic oligonucleotide
uuuuggggagcaggaaaca

SEQ ID NO: 2868752 - RNA, 19 nt, Artificial Sequence
  Description of Artificial Sequence: Synthetic oligonucleotide
gucguguccguugauggcc

SEQ ID NO: 2868753 - RNA, 19 nt, Artificial Sequence
  Description of Artificial Sequence: Synthetic oligonucleotide
auugucaaauucacccucu

SEQ ID NO: 2868754 - RNA, 19 nt, Artificial Sequence
  Description of Artificial Sequence: Synthetic oligonucleotide
ucuggggucccaugcuuca

SEQ ID NO: 2868755 - RNA, 19 nt, Artificial Sequence
  Description of Artificial Sequence: Synthetic oligonucleotide
gguuggacauauuuuaugu

SEQ ID NO: 2868756 - RNA, 19 nt, Artificial Sequence
  Description of Artificial Sequence: Synthetic oligonucleotide
guugaauggccacucccca

SEQ ID NO: 2868757 - RNA, 19 nt, Artificial Sequence
  Description of Artificial Sequence: Synthetic oligonucleotide
ugaaugaucugggcagcga

SEQ ID NO: 2868758 - RNA, 19 nt, Artificial Sequence
  Description of Artificial Sequence: Synthetic oligonucleotide
ggcaguugagauauuguug

SEQ ID NO: 2868759 - RNA, 19 nt, Artificial Sequence
  Description of Artificial Sequence: Synthetic oligonucleotide
acuagguuggacauauuuu

SEQ ID NO: 2868760 - RNA, 19 nt, Artificial Sequence
  Description of Artificial Sequence: Synthetic oligonucleotide
cugggcugggccuucccgg

SEQ ID NO: 2868761 - RNA, 19 nt, Artificial Sequence
  Description of Artificial Sequence: Synthetic oligonucleotide
gcacuucaguaucaaauug

SEQ ID NO: 2868762 - RNA, 19 nt, Artificial Sequence
  Description of Artificial Sequence: Synthetic oligonucleotide
ggacauauuuuauguauaa

SEQ ID NO: 2868763 - RNA, 19 nt, Artificial Sequence
  Description of Artificial Sequence: Synthetic oligonucleotide
auugcacuucaguaucaaa

SEQ ID NO: 2868764 - RNA, 19 nt, Artificial Sequence
  Description of Artificial Sequence: Synthetic oligonucleotide
acauuguuucauaucaauu

SEQ ID NO: 2868765 - RNA, 19 nt, Artificial Sequence
  Description of Artificial Sequence: Synthetic oligonucleotide
aguuaagcugaugcugugu

SEQ ID NO: 2868766 - RNA, 19 nt, Artificial Sequence
  Description of Artificial Sequence: Synthetic oligonucleotide
aauauucaccagaccacua

SEQ ID NO: 2868767 - RNA, 19 nt, Artificial Sequence
  Description of Artificial Sequence: Synthetic oligonucleotide
uacccggucauugcuguug

SEQ ID NO: 2868768 - RNA, 19 nt, Artificial Sequence
  Description of Artificial Sequence: Synthetic oligonucleotide
uugaauggccacuccccaa

SEQ ID NO: 2868769 - RNA, 19 nt, Artificial Sequence
  Description of Artificial Sequence: Synthetic oligonucleotide
ugagccugccguccugcgc

SEQ ID NO: 2868770 - RNA, 19 nt, Artificial Sequence
  Description of Artificial Sequence: Synthetic oligonucleotide
ugggcugggccuucccggg

SEQ ID NO: 2868771 - RNA, 19 nt, Artificial Sequence
  Description of Artificial Sequence: Synthetic oligonucleotide
uguugagccugccguccug

SEQ ID NO: 2868772 - RNA, 19 nt, Artificial Sequence
  Description of Artificial Sequence: Synthetic oligonucleotide
ggugccauugcugggcugg

SEQ ID NO: 2868773 - RNA, 19 nt, Artificial Sequence
  Description of Artificial Sequence: Synthetic oligonucleotide
cacuccccaaagaaaugac

SEQ ID NO: 2868774 - RNA, 19 nt, Artificial Sequence
  Description of Artificial Sequence: Synthetic oligonucleotide
uuuggggagcaggaaacau

SEQ ID NO: 2868775 - RNA, 19 nt, Artificial Sequence
  Description of Artificial Sequence: Synthetic oligonucleotide
augcuucaggucguguccg

SEQ ID NO: 2868776 - RNA, 19 nt, Artificial Sequence
  Description of Artificial Sequence: Synthetic oligonucleotide
guuggacauauuuuaugua

SEQ ID NO: 2868777 - RNA, 19 nt, Artificial Sequence
  Description of Artificial Sequence: Synthetic oligonucleotide
guagcaagguugauuacaa

SEQ ID NO: 2868778 - RNA, 19 nt, Artificial Sequence
  Description of Artificial Sequence: Synthetic oligonucleotide
ucguguccguugauggcca

SEQ ID NO: 2868779 - RNA, 19 nt, Artificial Sequence
  Description of Artificial Sequence: Synthetic oligonucleotide
auucaccagaccacuaggu

SEQ ID NO: 2868780 - RNA, 19 nt, Artificial Sequence
  Description of Artificial Sequence: Synthetic oligonucleotide
uccgcuggccugaaugauc

SEQ ID NO: 2868781 - RNA, 19 nt, Artificial Sequence
  Description of Artificial Sequence: Synthetic oligonucleotide
cugggcagcgagcucuggg

SEQ ID NO: 2868782 - RNA, 19 nt, Artificial Sequence
  Description of Artificial Sequence: Synthetic oligonucleotide
uggccugaaugaucugggc

SEQ ID NO: 2868783 - RNA, 19 nt, Artificial Sequence
  Description of Artificial Sequence: Synthetic oligonucleotide
uugagccugccguccugcg

SEQ ID NO: 2868784 - RNA, 19 nt, Artificial Sequence
  Description of Artificial Sequence: Synthetic oligonucleotide
uggccacuccccaaagaaa

SEQ ID NO: 2868785 - RNA, 19 nt, Artificial Sequence
  Description of Artificial Sequence: Synthetic oligonucleotide
ucauugcuguugagccugc

SEQ ID NO: 2868786 - RNA, 19 nt, Artificial Sequence
  Description of Artificial Sequence: Synthetic oligonucleotide
gcuggccugaaugaucugg

SEQ ID NO: 2868787 - RNA, 19 nt, Artificial Sequence
  Description of Artificial Sequence: Synthetic oligonucleotide
gaugcugugugcuccugcu

SEQ ID NO: 2868788 - RNA, 19 nt, Artificial Sequence
  Description of Artificial Sequence: Synthetic oligonucleotide
caaaguggcaguugagaua

SEQ ID NO: 2868789 - RNA, 19 nt, Artificial Sequence
  Description of Artificial Sequence: Synthetic oligonucleotide
cggucauugcuguugagcc

SEQ ID NO: 2868790 - RNA, 19 nt, Artificial Sequence
  Description of Artificial Sequence: Synthetic oligonucleotide
ucacaggcgauuguuugua

SEQ ID NO: 2868791 - RNA, 19 nt, Artificial Sequence
  Description of Artificial Sequence: Synthetic oligonucleotide
uguccguugauggccagua

SEQ ID NO: 2868792 - RNA, 19 nt, Artificial Sequence
  Description of Artificial Sequence: Synthetic oligonucleotide
caauugucaaauucacccu

SEQ ID NO: 2868793 - RNA, 19 nt, Artificial Sequence
  Description of Artificial Sequence: Synthetic oligonucleotide
auggccaguacccggucau

SEQ ID NO: 2868794 - RNA, 19 nt, Artificial Sequence
  Description of Artificial Sequence: Synthetic oligonucleotide
caauugcacuucaguauca

SEQ ID NO: 2868795 - RNA, 19 nt, Artificial Sequence
  Description of Artificial Sequence: Synthetic oligonucleotide
acuccccaaagaaaugaca

SEQ ID NO: 2868796 - RNA, 19 nt, Artificial Sequence
  Description of Artificial Sequence: Synthetic oligonucleotide
gauggccaguacccgguca

SEQ ID NO: 2868797 - RNA, 19 nt, Artificial Sequence
  Description of Artificial Sequence: Synthetic oligonucleotide
ggcaauugucaaauucacc

SEQ ID NO: 2868798 - RNA, 19 nt, Artificial Sequence
  Description of Artificial Sequence: Synthetic oligonucleotide
ugcuguugagccugccguc

SEQ ID NO: 2868799 - RNA, 19 nt, Artificial Sequence
  Description of Artificial Sequence: Synthetic oligonucleotide
uagcaagguugauuacaaa

SEQ ID NO: 2868800 - RNA, 19 nt, Artificial Sequence
  Description of Artificial Sequence: Synthetic oligonucleotide
gccauugcugggcugggcc

SEQ ID NO: 2868801 - RNA, 19 nt, Artificial Sequence
  Description of Artificial Sequence: Synthetic oligonucleotide
uugcuucacaggcgauugu

SEQ ID NO: 2868802 - RNA, 19 nt, Artificial Sequence
  Description of Artificial Sequence: Synthetic oligonucleotide
ucccgggucuggcaauugu

SEQ ID NO: 2868803 - RNA, 19 nt, Artificial Sequence
  Description of Artificial Sequence: Synthetic oligonucleotide
ugccguccugcgcugccag

SEQ ID NO: 2868804 - RNA, 19 nt, Artificial Sequence
  Description of Artificial Sequence: Synthetic oligonucleotide
caguaucaaauugcuucac

SEQ ID NO: 2868805 - RNA, 19 nt, Artificial Sequence
  Description of Artificial Sequence: Synthetic oligonucleotide
uuguuuuggggagcaggaa

SEQ ID NO: 2868806 - RNA, 19 nt, Artificial Sequence
  Description of Artificial Sequence: Synthetic oligonucleotide
cucuggggucccaugcuuc

SEQ ID NO: 2868807 - RNA, 19 nt, Artificial Sequence
  Description of Artificial Sequence: Synthetic oligonucleotide
uccugcuucacgggugcca

SEQ ID NO: 2868808 - RNA, 19 nt, Artificial Sequence
  Description of Artificial Sequence: Synthetic oligonucleotide
ggccugaaugaucugggca

SEQ ID NO: 2868809 - RNA, 19 nt, Artificial Sequence
  Description of Artificial Sequence: Synthetic oligonucleotide
caagguugauuacaaaauu

SEQ ID NO: 2868810 - RNA, 19 nt, Artificial Sequence
  Description of Artificial Sequence: Synthetic oligonucleotide
ucacccucucuccgcuggc

SEQ ID NO: 2868811 - RNA, 19 nt, Artificial Sequence
  Description of Artificial Sequence: Synthetic oligonucleotide
cacgggugccauugcuggg

SEQ ID NO: 2868812 - RNA, 19 nt, Artificial Sequence
  Description of Artificial Sequence: Synthetic oligonucleotide
guugagccugccguccugc

SEQ ID NO: 2868813 - RNA, 19 nt, Artificial Sequence
  Description of Artificial Sequence: Synthetic oligonucleotide
cacaggcgauuguuuguac

SEQ ID NO: 2868814 - RNA, 19 nt, Artificial Sequence
  Description of Artificial Sequence: Synthetic oligonucleotide
caggaaacauuguuucaua

SEQ ID NO: 2868815 - RNA, 19 nt, Artificial Sequence
  Description of Artificial Sequence: Synthetic oligonucleotide
ugauggccaguacccgguc

SEQ ID NO: 2868816 - RNA, 19 nt, Artificial Sequence
  Description of Artificial Sequence: Synthetic oligonucleotide
caggucguguccguugaug

SEQ ID NO: 2868817 - RNA, 19 nt, Artificial Sequence
  Description of Artificial Sequence: Synthetic oligonucleotide
aggcgauuguuuguacaca

SEQ ID NO: 2868818 - RNA, 19 nt, Artificial Sequence
  Description of Artificial Sequence: Synthetic oligonucleotide
auucacccucucuccgcug

SEQ ID NO: 2868819 - RNA, 19 nt, Artificial Sequence
  Description of Artificial Sequence: Synthetic oligonucleotide
ggucguguccguugauggc

SEQ ID NO: 2868820 - RNA, 19 nt, Artificial Sequence
  Description of Artificial Sequence: Synthetic oligonucleotide
cuuccagaaggucaagaau

SEQ ID NO: 2868821 - RNA, 19 nt, Artificial Sequence
  Description of Artificial Sequence: Synthetic oligonucleotide
ugcuucaggucguguccgu

SEQ ID NO: 2868822 - RNA, 19 nt, Artificial Sequence
  Description of Artificial Sequence: Synthetic oligonucleotide
ugggccuucccgggucugg

SEQ ID NO: 2868823 - RNA, 19 nt, Artificial Sequence
  Description of Artificial Sequence: Synthetic oligonucleotide
auugcugggcugggccuuc

SEQ ID NO: 2868824 - RNA, 19 nt, Artificial Sequence
  Description of Artificial Sequence: Synthetic oligonucleotide
cacuagguuggacauauuu

SEQ ID NO: 2868825 - RNA, 19 nt, Artificial Sequence
  Description of Artificial Sequence: Synthetic oligonucleotide
ccaugcuucaggucguguc

SEQ ID NO: 2868826 - RNA, 19 nt, Artificial Sequence
  Description of Artificial Sequence: Synthetic oligonucleotide
gcugggcugggccuucccg

SEQ ID NO: 2868827 - RNA, 19 nt, Artificial Sequence
  Description of Artificial Sequence: Synthetic oligonucleotide
ccggucauugcuguugagc

SEQ ID NO: 2868828 - RNA, 19 nt, Artificial Sequence
  Description of Artificial Sequence: Synthetic oligonucleotide
ggcucaucuguccuucgga

SEQ ID NO: 2868829 - RNA, 19 nt, Artificial Sequence
  Description of Artificial Sequence: Synthetic oligonucleotide
gcaagguugauuacaaaau

SEQ ID NO: 2868830 - RNA, 19 nt, Artificial Sequence
  Description of Artificial Sequence: Synthetic oligonucleotide
ucaggucguguccguugau

SEQ ID NO: 2868831 - RNA, 19 nt, Artificial Sequence
  Description of Artificial Sequence: Synthetic oligonucleotide
caaguuuuacaaagucuuu

SEQ ID NO: 2868832 - RNA, 19 nt, Artificial Sequence
  Description of Artificial Sequence: Synthetic oligonucleotide
gcuguugagccugccgucc

SEQ ID NO: 2868833 - RNA, 19 nt, Artificial Sequence
  Description of Artificial Sequence: Synthetic oligonucleotide
gcuccugcuucacgggugc

SEQ ID NO: 2868834 - RNA, 19 nt, Artificial Sequence
  Description of Artificial Sequence: Synthetic oligonucleotide
cucaucuguccuucggacu

SEQ ID NO: 2868835 - RNA, 19 nt, Artificial Sequence
  Description of Artificial Sequence: Synthetic oligonucleotide
cauugcuguugagccugcc

SEQ ID NO: 2868836 - RNA, 19 nt, Artificial Sequence
  Description of Artificial Sequence: Synthetic oligonucleotide
ccuuccagaaggucaagaa

SEQ ID NO: 2868837 - RNA, 19 nt, Artificial Sequence
  Description of Artificial Sequence: Synthetic oligonucleotide
caguugagauauuguugaa

SEQ ID NO: 2868838 - RNA, 19 nt, Artificial Sequence
  Description of Artificial Sequence: Synthetic oligonucleotide
ugccauugcugggcugggc

SEQ ID NO: 2868839 - RNA, 19 nt, Artificial Sequence
  Description of Artificial Sequence: Synthetic oligonucleotide
ccugaaugaucugggcagc

SEQ ID NO: 2868840 - RNA, 19 nt, Artificial Sequence
  Description of Artificial Sequence: Synthetic oligonucleotide
gcagcgagcucuggggucc

SEQ ID NO: 2868841 - RNA, 19 nt, Artificial Sequence
  Description of Artificial Sequence: Synthetic oligonucleotide
guccguugauggccaguac

SEQ ID NO: 2868842 - RNA, 19 nt, Artificial Sequence
  Description of Artificial Sequence: Synthetic oligonucleotide
cgauuguuuguacacagua

SEQ ID NO: 2868843 - RNA, 19 nt, Artificial Sequence
  Description of Artificial Sequence: Synthetic oligonucleotide
ggccaguacccggucauug

SEQ ID NO: 2868844 - RNA, 19 nt, Artificial Sequence
  Description of Artificial Sequence: Synthetic oligonucleotide
guauaacaaaguggcaguu

SEQ ID NO: 2868845 - RNA, 19 nt, Artificial Sequence
  Description of Artificial Sequence: Synthetic oligonucleotide
ucccaugcuucaggucgug

SEQ ID NO: 2868846 - RNA, 19 nt, Artificial Sequence
  Description of Artificial Sequence: Synthetic oligonucleotide
guggcaguugagauauugu

SEQ ID NO: 2868847 - RNA, 19 nt, Artificial Sequence
  Description of Artificial Sequence: Synthetic oligonucleotide
augcugugugcuccugcuu

SEQ ID NO: 2868848 - RNA, 19 nt, Artificial Sequence
  Description of Artificial Sequence: Synthetic oligonucleotide
gguugauuacaaaauuguu

SEQ ID NO: 2868849 - RNA, 19 nt, Artificial Sequence
  Description of Artificial Sequence: Synthetic oligonucleotide
gcaggaaacauuguuucau

SEQ ID NO: 2868850 - RNA, 19 nt, Artificial Sequence
  Description of Artificial Sequence: Synthetic oligonucleotide
gugccauugcugggcuggg

SEQ ID NO: 2868851 - RNA, 19 nt, Artificial Sequence
  Description of Artificial Sequence: Synthetic oligonucleotide
uucccgggucuggcaauug

SEQ ID NO: 2868852 - RNA, 19 nt, Artificial Sequence
  Description of Artificial Sequence: Synthetic oligonucleotide
gggagcaggaaacauuguu

SEQ ID NO: 2868853 - RNA, 19 nt, Artificial Sequence
  Description of Artificial Sequence: Synthetic oligonucleotide
ggagcaggaaacauuguuu

SEQ ID NO: 2868854 - RNA, 19 nt, Artificial Sequence
  Description of Artificial Sequence: Synthetic oligonucleotide
cuggggucccaugcuucag

SEQ ID NO: 2868855 - RNA, 19 nt, Artificial Sequence
  Description of Artificial Sequence: Synthetic oligonucleotide
cugugugcuccugcuucac

SEQ ID NO: 2868856 - RNA, 19 nt, Artificial Sequence
  Description of Artificial Sequence: Synthetic oligonucleotide
cuucacgggugccauugcu

SEQ ID NO: 2868857 - RNA, 19 nt, Artificial Sequence
  Description of Artificial Sequence: Synthetic oligonucleotide
ccccaaagaaaugacaagu

SEQ ID NO: 2868858 - RNA, 19 nt, Artificial Sequence
  Description of Artificial Sequence: Synthetic oligonucleotide
ggcagcgagcucugggguc

SEQ ID NO: 2868859 - RNA, 19 nt, Artificial Sequence
  Description of Artificial Sequence: Synthetic oligonucleotide
cugaugcugugugcuccug

SEQ ID NO: 2868860 - RNA, 19 nt, Artificial Sequence
  Description of Artificial Sequence: Synthetic oligonucleotide
ccgggucuggcaauuguca

SEQ ID NO: 2868861 - RNA, 19 nt, Artificial Sequence
  Description of Artificial Sequence: Synthetic oligonucleotide
ggucauugcuguugagccu

SEQ ID NO: 2868862 - RNA, 19 nt, Artificial Sequence
  Description of Artificial Sequence: Synthetic oligonucleotide
ccacuccccaaagaaauga

SEQ ID NO: 2868863 - RNA, 19 nt, Artificial Sequence
  Description of Artificial Sequence: Synthetic oligonucleotide
cguugauggccaguacccg

SEQ ID NO: 2868864 - RNA, 19 nt, Artificial Sequence
  Description of Artificial Sequence: Synthetic oligonucleotide
gcuucacgggugccauugc

SEQ ID NO: 2868865 - RNA, 19 nt, Artificial Sequence
  Description of Artificial Sequence: Synthetic oligonucleotide
gccacuccccaaagaaaug

SEQ ID NO: 2868866 - RNA, 19 nt, Artificial Sequence
  Description of Artificial Sequence: Synthetic oligonucleotide
cccgggucuggcaauuguc

SEQ ID NO: 2868867 - RNA, 19 nt, Artificial Sequence
  Description of Artificial Sequence: Synthetic oligonucleotide
aucugggcagcgagcucug

SEQ ID NO: 2868868 - RNA, 19 nt, Artificial Sequence
  Description of Artificial Sequence: Synthetic oligonucleotide
agccugccguccugcgcug

SEQ ID NO: 2868869 - RNA, 19 nt, Artificial Sequence
  Description of Artificial Sequence: Synthetic oligonucleotide
ggccacuccccaaagaaau

SEQ ID NO: 2868870 - RNA, 19 nt, Artificial Sequence
  Description of Artificial Sequence: Synthetic oligonucleotide
uugcugggcugggccuucc

SEQ ID NO: 2868871 - RNA, 19 nt, Artificial Sequence
  Description of Artificial Sequence: Synthetic oligonucleotide
ucucuccgcuggccugaau

SEQ ID NO: 2868872 - RNA, 19 nt, Artificial Sequence
  Description of Artificial Sequence: Synthetic oligonucleotide
gaccacuagguuggacaua

SEQ ID NO: 2868873 - RNA, 19 nt, Artificial Sequence
  Description of Artificial Sequence: Synthetic oligonucleotide
gugcuccugcuucacgggu

SEQ ID NO: 2868874 - RNA, 19 nt, Artificial Sequence
  Description of Artificial Sequence: Synthetic oligonucleotide
ccguccugcgcugccagcc

SEQ ID NO: 2868875 - RNA, 19 nt, Artificial Sequence
  Description of Artificial Sequence: Synthetic oligonucleotide
cccaaagaaaugacaaguu

SEQ ID NO: 2868876 - RNA, 19 nt, Artificial Sequence
  Description of Artificial Sequence: Synthetic oligonucleotide
ggcugggccuucccggguc

SEQ ID NO: 2868877 - RNA, 19 nt, Artificial Sequence
  Description of Artificial Sequence: Synthetic oligonucleotide
accagaccacuagguugga

SEQ ID NO: 2868878 - RNA, 19 nt, Artificial Sequence
  Description of Artificial Sequence: Synthetic oligonucleotide
uggccaguacccggucauu

SEQ ID NO: 2868879 - RNA, 19 nt, Artificial Sequence
  Description of Artificial Sequence: Synthetic oligonucleotide
cuguugagccugccguccu

SEQ ID NO: 2868880 - RNA, 19 nt, Artificial Sequence
  Description of Artificial Sequence: Synthetic oligonucleotide
gcugaugcugugugcuccu

SEQ ID NO: 2868881 - RNA, 19 nt, Artificial Sequence
  Description of Artificial Sequence: Synthetic oligonucleotide
gggugccauugcugggcug

SEQ ID NO: 2868882 - RNA, 19 nt, Artificial Sequence
  Description of Artificial Sequence: Synthetic oligonucleotide
gccuucccgggucuggcaa

SEQ ID NO: 2868883 - RNA, 19 nt, Artificial Sequence
  Description of Artificial Sequence: Synthetic oligonucleotide
cagcgagcucugggguccc

SEQ ID NO: 2868884 - RNA, 19 nt, Artificial Sequence
  Description of Artificial Sequence: Synthetic oligonucleotide
gggccuucccgggucuggc

SEQ ID NO: 2868885 - RNA, 19 nt, Artificial Sequence
  Description of Artificial Sequence: Synthetic oligonucleotide
ccgcuggccugaaugaucu

SEQ ID NO: 2868886 - RNA, 19 nt, Artificial Sequence
  Description of Artificial Sequence: Synthetic oligonucleotide
cgagcucuggggucccaug

SEQ ID NO: 2868887 - RNA, 19 nt, Artificial Sequence
  Description of Artificial Sequence: Synthetic oligonucleotide
cugggccuucccgggucug

SEQ ID NO: 2868888 - RNA, 19 nt, Artificial Sequence
  Description of Artificial Sequence: Synthetic oligonucleotide
gucccaugcuucaggucgu

SEQ ID NO: 2868889 - RNA, 19 nt, Artificial Sequence
  Description of Artificial Sequence: Synthetic oligonucleotide
cccggucauugcuguugag

SEQ ID NO: 2868890 - RNA, 19 nt, Artificial Sequence
  Description of Artificial Sequence: Synthetic oligonucleotide
gucuggcaauugucaaauu

SEQ ID NO: 2868891 - RNA, 19 nt, Artificial Sequence
  Description of Artificial Sequence: Synthetic oligonucleotide
ccagaaggucaagaauaaa

SEQ ID NO: 2868892 - RNA, 19 nt, Artificial Sequence
  Description of Artificial Sequence: Synthetic oligonucleotide
gcgauuguuuguacacagu

SEQ ID NO: 2868893 - RNA, 19 nt, Artificial Sequence
  Description of Artificial Sequence: Synthetic oligonucleotide
guguccguugauggccagu

SEQ ID NO: 2868894 - RNA, 19 nt, Artificial Sequence
  Description of Artificial Sequence: Synthetic oligonucleotide
gccguccugcgcugccagc

SEQ ID NO: 2868895 - RNA, 19 nt, Artificial Sequence
  Description of Artificial Sequence: Synthetic oligonucleotide
gggcagcgagcucuggggu

SEQ ID NO: 2868896 - RNA, 19 nt, Artificial Sequence
  Description of Artificial Sequence: Synthetic oligonucleotide
agcgagcucugggguccca

SEQ ID NO: 2868897 - RNA, 19 nt, Artificial Sequence
  Description of Artificial Sequence: Synthetic oligonucleotide
gcuucacaggcgauuguuu

SEQ ID NO: 2868898 - RNA, 19 nt, Artificial Sequence
  Description of Artificial Sequence: Synthetic oligonucleotide
cguguccguugauggccag

SEQ ID NO: 2868899 - RNA, 19 nt, Artificial Sequence
  Description of Artificial Sequence: Synthetic oligonucleotide
cgggucuggcaauugucaa

SEQ ID NO: 2868900 - RNA, 19 nt, Artificial Sequence
  Description of Artificial Sequence: Synthetic oligonucleotide
cauugcugggcugggccuu

SEQ ID NO: 2868901 - RNA, 19 nt, Artificial Sequence
  Description of Artificial Sequence: Synthetic oligonucleotide
guacccggucauugcuguu

SEQ ID NO: 2868902 - RNA, 19 nt, Artificial Sequence
  Description of Artificial Sequence: Synthetic oligonucleotide
cuccgcuggccugaaugau

SEQ ID NO: 2868903 - RNA, 19 nt, Artificial Sequence
  Description of Artificial Sequence: Synthetic oligonucleotide
cuucccgggucuggcaauu

SEQ ID NO: 2868904 - RNA, 19 nt, Artificial Sequence
  Description of Artificial Sequence: Synthetic oligonucleotide
ccccuuccagaaggucaag

SEQ ID NO: 2868905 - RNA, 19 nt, Artificial Sequence
  Description of Artificial Sequence: Synthetic oligonucleotide
gcugggccuucccgggucu

SEQ ID NO: 2868906 - RNA, 19 nt, Artificial Sequence
  Description of Artificial Sequence: Synthetic oligonucleotide
ggggagcaggaaacauugu

SEQ ID NO: 2868907 - RNA, 19 nt, Artificial Sequence
  Description of Artificial Sequence: Synthetic oligonucleotide
cucucuccgcuggccugaa

SEQ ID NO: 2868908 - RNA, 19 nt, Artificial Sequence
  Description of Artificial Sequence: Synthetic oligonucleotide
gccugccguccugcgcugc

SEQ ID NO: 2868909 - RNA, 19 nt, Artificial Sequence
  Description of Artificial Sequence: Synthetic oligonucleotide
gccuggcucaucuguccuu

SEQ ID NO: 2868910 - RNA, 19 nt, Artificial Sequence
  Description of Artificial Sequence: Synthetic oligonucleotide
cgcuggccugaaugaucug

SEQ ID NO: 2868911 - RNA, 19 nt, Artificial Sequence
  Description of Artificial Sequence: Synthetic oligonucleotide
gggcugggccuucccgggu

SEQ ID NO: 2868912 - RNA, 19 nt, Artificial Sequence
  Description of Artificial Sequence: Synthetic oligonucleotide
ccuucccgggucuggcaau

SEQ ID NO: 2868913 - RNA, 19 nt, Artificial Sequence
  Description of Artificial Sequence: Synthetic oligonucleotide
gcgagcucuggggucccau

SEQ ID NO: 2868914 - RNA, 19 nt, Artificial Sequence
  Description of Artificial Sequence: Synthetic oligonucleotide
cccaugcuucaggucgugu

SEQ ID NO: 2868915 - RNA, 19 nt, Artificial Sequence
  Description of Artificial Sequence: Synthetic oligonucleotide
cgccuggcucaucuguccu

SEQ ID NO: 2868916 - RNA, 19 nt, Artificial Sequence
  Description of Artificial Sequence: Synthetic oligonucleotide
aaguagaugagacucgugc

SEQ ID NO: 2868917 - RNA, 19 nt, Artificial Sequence
  Description of Artificial Sequence: Synthetic oligonucleotide
gaagacauaggacagagug

SEQ ID NO: 2868918 - RNA, 19 nt, Artificial Sequence
  Description of Artificial Sequence: Synthetic oligonucleotide
auguguaaaccacagaaac

SEQ ID NO: 2868919 - RNA, 19 nt, Artificial Sequence
  Description of Artificial Sequence: Synthetic oligonucleotide
caugcuauagaucaagggg

SEQ ID NO: 2868920 - RNA, 19 nt, Artificial Sequence
  Description of Artificial Sequence: Synthetic oligonucleotide
uuuucaagcaggaggaacc

SEQ ID NO: 2868921 - RNA, 19 nt, Artificial Sequence
  Description of Artificial Sequence: Synthetic oligonucleotide
cacagaaacuacuugaccc

SEQ ID NO: 2868922 - RNA, 19 nt, Artificial Sequence
  Description of Artificial Sequence: Synthetic oligonucleotide
acagaaacuacuugacccc

SEQ ID NO: 2868923 - RNA, 19 nt, Artificial Sequence
  Description of Artificial Sequence: Synthetic oligonucleotide
aggacgaugacacugacca

SEQ ID NO: 2868924 - RNA, 19 nt, Artificial Sequence
  Description of Artificial Sequence: Synthetic oligonucleotide
aauaacuggagcugggaca

SEQ ID NO: 2868925 - RNA, 19 nt, Artificial Sequence
  Description of Artificial Sequence: Synthetic oligonucleotide
aggaugaagacauaggaca

SEQ ID NO: 2868926 - RNA, 19 nt, Artificial Sequence
  Description of Artificial Sequence: Synthetic oligonucleotide
uacugcuacagaaaggcag

SEQ ID NO: 2868927 - RNA, 19 nt, Artificial Sequence
  Description of Artificial Sequence: Synthetic oligonucleotide
gaugacacugaccacaaac

SEQ ID NO: 2868928 - RNA, 19 nt, Artificial Sequence
  Description of Artificial Sequence: Synthetic oligonucleotide
aaacagaguggccucgugg

SEQ ID NO: 2868929 - RNA, 19 nt, Artificial Sequence
  Description of Artificial Sequence: Synthetic oligonucleotide
aaccacagaaacuacuuga

SEQ ID NO: 2868930 - RNA, 19 nt, Artificial Sequence
  Description of Artificial Sequence: Synthetic oligonucleotide
aacuacuugaccccgcuca

SEQ ID NO: 2868931 - RNA, 19 nt, Artificial Sequence
  Description of Artificial Sequence: Synthetic oligonucleotide
aacaggcugauuuccuuac

SEQ ID NO: 2868932 - RNA, 19 nt, Artificial Sequence
  Description of Artificial Sequence: Synthetic oligonucleotide
uuccgcaugcuauagauca

SEQ ID NO: 2868933 - RNA, 19 nt, Artificial Sequence
  Description of Artificial Sequence: Synthetic oligonucleotide
acacaaguagaugagacuc

SEQ ID NO: 2868934 - RNA, 19 nt, Artificial Sequence
  Description of Artificial Sequence: Synthetic oligonucleotide
aggaggaaccuccugaccg

SEQ ID NO: 2868935 - RNA, 19 nt, Artificial Sequence
  Description of Artificial Sequence: Synthetic oligonucleotide
ucaagcaggaggaaccucc

SEQ ID NO: 2868936 - RNA, 19 nt, Artificial Sequence
  Description of Artificial Sequence: Synthetic oligonucleotide
aagaugagcacagucaacu

SEQ ID NO: 2868937 - RNA, 19 nt, Artificial Sequence
  Description of Artificial Sequence: Synthetic oligonucleotide
ugaugaauguguaaaccac

SEQ ID NO: 2868938 - RNA, 19 nt, Artificial Sequence
  Description of Artificial Sequence: Synthetic oligonucleotide
gcuacagaaaggcagacgg

SEQ ID NO: 2868939 - RNA, 19 nt, Artificial Sequence
  Description of Artificial Sequence: Synthetic oligonucleotide
uuuccuuacugcuacagaa

SEQ ID NO: 2868940 - RNA, 19 nt, Artificial Sequence
  Description of Artificial Sequence: Synthetic oligonucleotide
uccuuacugcuacagaaag

SEQ ID NO: 2868941 - RNA, 19 nt, Artificial Sequence
  Description of Artificial Sequence: Synthetic oligonucleotide
aguagaacaggcugauuuc

SEQ ID NO: 2868942 - RNA, 19 nt, Artificial Sequence
  Description of Artificial Sequence: Synthetic oligonucleotide
uguguaaaccacagaaacu

SEQ ID NO: 2868943 - RNA, 19 nt, Artificial Sequence
  Description of Artificial Sequence: Synthetic oligonucleotide
uaggacagagugaugagga

SEQ ID NO: 2868944 - RNA, 19 nt, Artificial Sequence
  Description of Artificial Sequence: Synthetic oligonucleotide
uagaucaagggguucagca

SEQ ID NO: 2868945 - RNA, 19 nt, Artificial Sequence
  Description of Artificial Sequence: Synthetic oligonucleotide
aguucucuguuccgcaugc

SEQ ID NO: 2868946 - RNA, 19 nt, Artificial Sequence
  Description of Artificial Sequence: Synthetic oligonucleotide
aaggggaauggugaggacg

SEQ ID NO: 2868947 - RNA, 19 nt, Artificial Sequence
  Description of Artificial Sequence: Synthetic oligonucleotide
ugacacugaccacaaacag

SEQ ID NO: 2868948 - RNA, 19 nt, Artificial Sequence
  Description of Artificial Sequence: Synthetic oligonucleotide
aaaccacagaaacuacuug

SEQ ID NO: 2868949 - RNA, 19 nt, Artificial Sequence
  Description of Artificial Sequence: Synthetic oligonucleotide
uucaggauggcauccagga

SEQ ID NO: 2868950 - RNA, 19 nt, Artificial Sequence
  Description of Artificial Sequence: Synthetic oligonucleotide
aagggguucagcauagggg

SEQ ID NO: 2868951 - RNA, 19 nt, Artificial Sequence
  Description of Artificial Sequence: Synthetic oligonucleotide
gaugagcacagucaacugc

SEQ ID NO: 2868952 - RNA, 19 nt, Artificial Sequence
  Description of Artificial Sequence: Synthetic oligonucleotide
ucaggagaauaacuggagc

SEQ ID NO: 2868953 - RNA, 19 nt, Artificial Sequence
  Description of Artificial Sequence: Synthetic oligonucleotide
auaacuggagcugggacac

SEQ ID NO: 2868954 - RNA, 19 nt, Artificial Sequence
  Description of Artificial Sequence: Synthetic oligonucleotide
cugaccacaaacagagugg

SEQ ID NO: 2868955 - RNA, 19 nt, Artificial Sequence
  Description of Artificial Sequence: Synthetic oligonucleotide
ugaugaggaggaaagggga

SEQ ID NO: 2868956 - RNA, 19 nt, Artificial Sequence
  Description of Artificial Sequence: Synthetic oligonucleotide
aacagaguggccucgugga

SEQ ID NO: 2868957 - RNA, 19 nt, Artificial Sequence
  Description of Artificial Sequence: Synthetic oligonucleotide
aucgcaguagaacaggcug

SEQ ID NO: 2868958 - RNA, 19 nt, Artificial Sequence
  Description of Artificial Sequence: Synthetic oligonucleotide
uucagcauaggggugauga

SEQ ID NO: 2868959 - RNA, 19 nt, Artificial Sequence
  Description of Artificial Sequence: Synthetic oligonucleotide
accacagucacgugggagg

SEQ ID NO: 2868960 - RNA, 19 nt, Artificial Sequence
  Description of Artificial Sequence: Synthetic oligonucleotide
agaugagacucgugcagcc

SEQ ID NO: 2868961 - RNA, 19 nt, Artificial Sequence
  Description of Artificial Sequence: Synthetic oligonucleotide
aggcugauuuccuuacugc

SEQ ID NO: 2868962 - RNA, 19 nt, Artificial Sequence
  Description of Artificial Sequence: Synthetic oligonucleotide
guggagaaggcuuugugcc

SEQ ID NO: 2868963 - RNA, 19 nt, Artificial Sequence
  Description of Artificial Sequence: Synthetic oligonucleotide
aauggugaggacgaugaca

SEQ ID NO: 2868964 - RNA, 19 nt, Artificial Sequence
  Description of Artificial Sequence: Synthetic oligonucleotide
gaggaccacagucacgugg

SEQ ID NO: 2868965 - RNA, 19 nt, Artificial Sequence
  Description of Artificial Sequence: Synthetic oligonucleotide
uaaaccacagaaacuacuu

SEQ ID NO: 2868966 - RNA, 19 nt, Artificial Sequence
  Description of Artificial Sequence: Synthetic oligonucleotide
augacagggagggacaucg

SEQ ID NO: 2868967 - RNA, 19 nt, Artificial Sequence
  Description of Artificial Sequence: Synthetic oligonucleotide
aaaggcagacggaagauga

SEQ ID NO: 2868968 - RNA, 19 nt, Artificial Sequence
  Description of Artificial Sequence: Synthetic oligonucleotide
guagaugagacucgugcag

SEQ ID NO: 2868969 - RNA, 19 nt, Artificial Sequence
  Description of Artificial Sequence: Synthetic oligonucleotide
acauaggacagagugauga

SEQ ID NO: 2868970 - RNA, 19 nt, Artificial Sequence
  Description of Artificial Sequence: Synthetic oligonucleotide
uccuugaguucucuguucc

SEQ ID NO: 2868971 - RNA, 19 nt, Artificial Sequence
  Description of Artificial Sequence: Synthetic oligonucleotide
acggaagaugagcacaguc

SEQ ID NO: 2868972 - RNA, 19 nt, Artificial Sequence
  Description of Artificial Sequence: Synthetic oligonucleotide
agagugaugaggaggaaag

SEQ ID NO: 2868973 - RNA, 19 nt, Artificial Sequence
  Description of Artificial Sequence: Synthetic oligonucleotide
gaauaacuggagcugggac

SEQ ID NO: 2868974 - RNA, 19 nt, Artificial Sequence
  Description of Artificial Sequence: Synthetic oligonucleotide
aguagaugagacucgugca

SEQ ID NO: 2868975 - RNA, 19 nt, Artificial Sequence
  Description of Artificial Sequence: Synthetic oligonucleotide
ugggacacaaguagaugag

SEQ ID NO: 2868976 - RNA, 19 nt, Artificial Sequence
  Description of Artificial Sequence: Synthetic oligonucleotide
cugauuuccuuacugcuac

SEQ ID NO: 2868977 - RNA, 19 nt, Artificial Sequence
  Description of Artificial Sequence: Synthetic oligonucleotide
caggauggcauccaggaug

SEQ ID NO: 2868978 - RNA, 19 nt, Artificial Sequence
  Description of Artificial Sequence: Synthetic oligonucleotide
gugaugaauguguaaacca

SEQ ID NO: 2868979 - RNA, 19 nt, Artificial Sequence
  Description of Artificial Sequence: Synthetic oligonucleotide
uguaaaccacagaaacuac

SEQ ID NO: 2868980 - RNA, 19 nt, Artificial Sequence
  Description of Artificial Sequence: Synthetic oligonucleotide
ugcaggaggaccacaguca

SEQ ID NO: 2868981 - RNA, 19 nt, Artificial Sequence
  Description of Artificial Sequence: Synthetic oligonucleotide
augaagacauaggacagag

SEQ ID NO: 2868982 - RNA, 19 nt, Artificial Sequence
  Description of Artificial Sequence: Synthetic oligonucleotide
aaggcuuugugccuccccu

SEQ ID NO: 2868983 - RNA, 19 nt, Artificial Sequence
  Description of Artificial Sequence: Synthetic oligonucleotide
uguuccgcaugcuauagau

SEQ ID NO: 2868984 - RNA, 19 nt, Artificial Sequence
  Description of Artificial Sequence: Synthetic oligonucleotide
auaggacagagugaugagg

SEQ ID NO: 2868985 - RNA, 19 nt, Artificial Sequence
  Description of Artificial Sequence: Synthetic oligonucleotide
cacaaguagaugagacucg

SEQ ID NO: 2868986 - RNA, 19 nt, Artificial Sequence
  Description of Artificial Sequence: Synthetic oligonucleotide
aaacuacuugaccccgcuc

SEQ ID NO: 2868987 - RNA, 19 nt, Artificial Sequence
  Description of Artificial Sequence: Synthetic oligonucleotide
gugaugaggaggaaagggg

SEQ ID NO: 2868988 - RNA, 19 nt, Artificial Sequence
  Description of Artificial Sequence: Synthetic oligonucleotide
ggagcugggacacaaguag

SEQ ID NO: 2868989 - RNA, 19 nt, Artificial Sequence
  Description of Artificial Sequence: Synthetic oligonucleotide
ugaauguguaaaccacaga

SEQ ID NO: 2868990 - RNA, 19 nt, Artificial Sequence
  Description of Artificial Sequence: Synthetic oligonucleotide
aaaggggaauggugaggac

SEQ ID NO: 2868991 - RNA, 19 nt, Artificial Sequence
  Description of Artificial Sequence: Synthetic oligonucleotide
uacugcaggaggaccacag

SEQ ID NO: 2868992 - RNA, 19 nt, Artificial Sequence
  Description of Artificial Sequence: Synthetic oligonucleotide
agggacaucgcaguagaac

SEQ ID NO: 2868993 - RNA, 19 nt, Artificial Sequence
  Description of Artificial Sequence: Synthetic oligonucleotide
uacuugaccccgcucagga

SEQ ID NO: 2868994 - RNA, 19 nt, Artificial Sequence
  Description of Artificial Sequence: Synthetic oligonucleotide
cucaggagaauaacuggag

SEQ ID NO: 2868995 - RNA, 19 nt, Artificial Sequence
  Description of Artificial Sequence: Synthetic oligonucleotide
gauuuccuuacugcuacag

SEQ ID NO: 2868996 - RNA, 19 nt, Artificial Sequence
  Description of Artificial Sequence: Synthetic oligonucleotide
accacaaacagaguggccu

SEQ ID NO: 2868997 - RNA, 19 nt, Artificial Sequence
  Description of Artificial Sequence: Synthetic oligonucleotide
aauguguaaaccacagaaa

SEQ ID NO: 2868998 - RNA, 19 nt, Artificial Sequence
  Description of Artificial Sequence: Synthetic oligonucleotide
caggaugaagacauaggac

SEQ ID NO: 2868999 - RNA, 19 nt, Artificial Sequence
  Description of Artificial Sequence: Synthetic oligonucleotide
ugggugucugcacaggcca

SEQ ID NO: 2869000 - RNA, 19 nt, Artificial Sequence
  Description of Artificial Sequence: Synthetic oligonucleotide
augaauguguaaaccacag

SEQ ID NO: 2869001 - RNA, 19 nt, Artificial Sequence
  Description of Artificial Sequence: Synthetic oligonucleotide
caagggguucagcauaggg

SEQ ID NO: 2869002 - RNA, 19 nt, Artificial Sequence
  Description of Artificial Sequence: Synthetic oligonucleotide
gacaucgcaguagaacagg

SEQ ID NO: 2869003 - RNA, 19 nt, Artificial Sequence
  Description of Artificial Sequence: Synthetic oligonucleotide
gagcggaucuucaggaugg

SEQ ID NO: 2869004 - RNA, 19 nt, Artificial Sequence
  Description of Artificial Sequence: Synthetic oligonucleotide
caggccagccucaugacag

SEQ ID NO: 2869005 - RNA, 19 nt, Artificial Sequence
  Description of Artificial Sequence: Synthetic oligonucleotide
uacagaaaggcagacggaa

SEQ ID NO: 2869006 - RNA, 19 nt, Artificial Sequence
  Description of Artificial Sequence: Synthetic oligonucleotide
uccucaaagcauccuugag

SEQ ID NO: 2869007 - RNA, 19 nt, Artificial Sequence
  Description of Artificial Sequence: Synthetic oligonucleotide
acucgugcagccauacugc

SEQ ID NO: 2869008 - RNA, 19 nt, Artificial Sequence
  Description of Artificial Sequence: Synthetic oligonucleotide
agacauaggacagagugau

SEQ ID NO: 2869009 - RNA, 19 nt, Artificial Sequence
  Description of Artificial Sequence: Synthetic oligonucleotide
accacagaaacuacuugac

SEQ ID NO: 2869010 - RNA, 19 nt, Artificial Sequence
  Description of Artificial Sequence: Synthetic oligonucleotide
augcuauagaucaaggggu

SEQ ID NO: 2869011 - RNA, 19 nt, Artificial Sequence
  Description of Artificial Sequence: Synthetic oligonucleotide
gaaaggggaauggugagga

SEQ ID NO: 2869012 - RNA, 19 nt, Artificial Sequence
  Description of Artificial Sequence: Synthetic oligonucleotide
gaugaauguguaaaccaca

SEQ ID NO: 2869013 - RNA, 19 nt, Artificial Sequence
  Description of Artificial Sequence: Synthetic oligonucleotide
ugaccacaaacagaguggc

SEQ ID NO: 2869014 - RNA, 19 nt, Artificial Sequence
  Description of Artificial Sequence: Synthetic oligonucleotide
agcaggaggaaccuccuga

SEQ ID NO: 2869015 - RNA, 19 nt, Artificial Sequence
  Description of Artificial Sequence: Synthetic oligonucleotide
gacgaugacacugaccaca

SEQ ID NO: 2869016 - RNA, 19 nt, Artificial Sequence
  Description of Artificial Sequence: Synthetic oligonucleotide
ucucuguuccgcaugcuau

SEQ ID NO: 2869017 - RNA, 19 nt, Artificial Sequence
  Description of Artificial Sequence: Synthetic oligonucleotide
uauagaucaagggguucag

SEQ ID NO: 2869018 - RNA, 19 nt, Artificial Sequence
  Description of Artificial Sequence: Synthetic oligonucleotide
aggcagacggaagaugagc

SEQ ID NO: 2869019 - RNA, 19 nt, Artificial Sequence
  Description of Artificial Sequence: Synthetic oligonucleotide
cuucaggauggcauccagg

SEQ ID NO: 2869020 - RNA, 19 nt, Artificial Sequence
  Description of Artificial Sequence: Synthetic oligonucleotide
cugggacacaaguagauga

SEQ ID NO: 2869021 - RNA, 19 nt, Artificial Sequence
  Description of Artificial Sequence: Synthetic oligonucleotide
auagaucaagggguucagc

SEQ ID NO: 2869022 - RNA, 19 nt, Artificial Sequence
  Description of Artificial Sequence: Synthetic oligonucleotide
aagacauaggacagaguga

SEQ ID NO: 2869023 - RNA, 19 nt, Artificial Sequence
  Description of Artificial Sequence: Synthetic oligonucleotide
gcaugcuauagaucaaggg

SEQ ID NO: 2869024 - RNA, 19 nt, Artificial Sequence
  Description of Artificial Sequence: Synthetic oligonucleotide
gacaugggugucugcacag

SEQ ID NO: 2869025 - RNA, 19 nt, Artificial Sequence
  Description of Artificial Sequence: Synthetic oligonucleotide
gagaauaacuggagcuggg

SEQ ID NO: 2869026 - RNA, 19 nt, Artificial Sequence
  Description of Artificial Sequence: Synthetic oligonucleotide
gacagagugaugaggagga

SEQ ID NO: 2869027 - RNA, 19 nt, Artificial Sequence
  Description of Artificial Sequence: Synthetic oligonucleotide
aggagaauaacuggagcug

SEQ ID NO: 2869028 - RNA, 19 nt, Artificial Sequence
  Description of Artificial Sequence: Synthetic oligonucleotide
cauaggacagagugaugag

SEQ ID NO: 2869029 - RNA, 19 nt, Artificial Sequence
  Description of Artificial Sequence: Synthetic oligonucleotide
auaggggugaugaaugugu

SEQ ID NO: 2869030 - RNA, 19 nt, Artificial Sequence
  Description of Artificial Sequence: Synthetic oligonucleotide
guguaaaccacagaaacua

SEQ ID NO: 2869031 - RNA, 19 nt, Artificial Sequence
  Description of Artificial Sequence: Synthetic oligonucleotide
auuuccuuacugcuacaga

SEQ ID NO: 2869032 - RNA, 19 nt, Artificial Sequence
  Description of Artificial Sequence: Synthetic oligonucleotide
uuccuuacugcuacagaaa

SEQ ID NO: 2869033 - RNA, 19 nt, Artificial Sequence
  Description of Artificial Sequence: Synthetic oligonucleotide
ugcuacagaaaggcagacg

SEQ ID NO: 2869034 - RNA, 19 nt, Artificial Sequence
  Description of Artificial Sequence: Synthetic oligonucleotide
aggaggaccacagucacgu

SEQ ID NO: 2869035 - RNA, 19 nt, Artificial Sequence
  Description of Artificial Sequence: Synthetic oligonucleotide
uagaacaggcugauuuccu

SEQ ID NO: 2869036 - RNA, 19 nt, Artificial Sequence
  Description of Artificial Sequence: Synthetic oligonucleotide
guagaacaggcugauuucc

SEQ ID NO: 2869037 - RNA, 19 nt, Artificial Sequence
  Description of Artificial Sequence: Synthetic oligonucleotide
cugaccgccuuccucaaag

SEQ ID NO: 2869038 - RNA, 19 nt, Artificial Sequence
  Description of Artificial Sequence: Synthetic oligonucleotide
gguggagaaggcuuugugc

SEQ ID NO: 2869039 - RNA, 19 nt, Artificial Sequence
  Description of Artificial Sequence: Synthetic oligonucleotide
aguggccucguggacaugg

SEQ ID NO: 2869040 - RNA, 19 nt, Artificial Sequence
  Description of Artificial Sequence: Synthetic oligonucleotide
uagaugagacucgugcagc

SEQ ID NO: 2869041 - RNA, 19 nt, Artificial Sequence
  Description of Artificial Sequence: Synthetic oligonucleotide
uuccucaaagcauccuuga

SEQ ID NO: 2869042 - RNA, 19 nt, Artificial Sequence
  Description of Artificial Sequence: Synthetic oligonucleotide
ucgcaguagaacaggcuga

SEQ ID NO: 2869043 - RNA, 19 nt, Artificial Sequence
  Description of Artificial Sequence: Synthetic oligonucleotide
uuacugcuacagaaaggca

SEQ ID NO: 2869044 - RNA, 19 nt, Artificial Sequence
  Description of Artificial Sequence: Synthetic oligonucleotide
uugaguucucuguuccgca

SEQ ID NO: 2869045 - RNA, 19 nt, Artificial Sequence
  Description of Artificial Sequence: Synthetic oligonucleotide
ggugaugaauguguaaacc

SEQ ID NO: 2869046 - RNA, 19 nt, Artificial Sequence
  Description of Artificial Sequence: Synthetic oligonucleotide
acaucgcaguagaacaggc

SEQ ID NO: 2869047 - RNA, 19 nt, Artificial Sequence
  Description of Artificial Sequence: Synthetic oligonucleotide
agcauaggggugaugaaug

SEQ ID NO: 2869048 - RNA, 19 nt, Artificial Sequence
  Description of Artificial Sequence: Synthetic oligonucleotide
auccaggaugaagacauag

SEQ ID NO: 2869049 - RNA, 19 nt, Artificial Sequence
  Description of Artificial Sequence: Synthetic oligonucleotide
acuacuugaccccgcucag

SEQ ID NO: 2869050 - RNA, 19 nt, Artificial Sequence
  Description of Artificial Sequence: Synthetic oligonucleotide
ucaacugcauggccaagau

SEQ ID NO: 2869051 - RNA, 19 nt, Artificial Sequence
  Description of Artificial Sequence: Synthetic oligonucleotide
ggagaauaacuggagcugg

SEQ ID NO: 2869052 - RNA, 19 nt, Artificial Sequence
  Description of Artificial Sequence: Synthetic oligonucleotide
agaugagcacagucaacug

SEQ ID NO: 2869053 - RNA, 19 nt, Artificial Sequence
  Description of Artificial Sequence: Synthetic oligonucleotide
ugaggaggaaaggggaaug

SEQ ID NO: 2869054 - RNA, 19 nt, Artificial Sequence
  Description of Artificial Sequence: Synthetic oligonucleotide
agaaacuacuugaccccgc

SEQ ID NO: 2869055 - RNA, 19 nt, Artificial Sequence
  Description of Artificial Sequence: Synthetic oligonucleotide
ucuguuccgcaugcuauag

SEQ ID NO: 2869056 - RNA, 19 nt, Artificial Sequence
  Description of Artificial Sequence: Synthetic oligonucleotide
gaaaggcagacggaagaug

SEQ ID NO: 2869057 - RNA, 19 nt, Artificial Sequence
  Description of Artificial Sequence: Synthetic oligonucleotide
gaucaagggguucagcaua

SEQ ID NO: 2869058 - RNA, 19 nt, Artificial Sequence
  Description of Artificial Sequence: Synthetic oligonucleotide
aaagcauccuugaguucuc

SEQ ID NO: 2869059 - RNA, 19 nt, Artificial Sequence
  Description of Artificial Sequence: Synthetic oligonucleotide
agaucaagggguucagcau

SEQ ID NO: 2869060 - RNA, 19 nt, Artificial Sequence
  Description of Artificial Sequence: Synthetic oligonucleotide
acagaguggccucguggac

SEQ ID NO: 2869061 - RNA, 19 nt, Artificial Sequence
  Description of Artificial Sequence: Synthetic oligonucleotide
augacacugaccacaaaca

SEQ ID NO: 2869062 - RNA, 19 nt, Artificial Sequence
  Description of Artificial Sequence: Synthetic oligonucleotide
ugcuauagaucaagggguu

SEQ ID NO: 2869063 - RNA, 19 nt, Artificial Sequence
  Description of Artificial Sequence: Synthetic oligonucleotide
aggaccacagucacguggg

SEQ ID NO: 2869064 - RNA, 19 nt, Artificial Sequence
  Description of Artificial Sequence: Synthetic oligonucleotide
caugggugucugcacaggc

SEQ ID NO: 2869065 - RNA, 19 nt, Artificial Sequence
  Description of Artificial Sequence: Synthetic oligonucleotide
ugugccuccccuccagcug

SEQ ID NO: 2869066 - RNA, 19 nt, Artificial Sequence
  Description of Artificial Sequence: Synthetic oligonucleotide
caggcugauuuccuuacug

SEQ ID NO: 2869067 - RNA, 19 nt, Artificial Sequence
  Description of Artificial Sequence: Synthetic oligonucleotide
gagugaugaggaggaaagg

SEQ ID NO: 2869068 - RNA, 19 nt, Artificial Sequence
  Description of Artificial Sequence: Synthetic oligonucleotide
cagaaacuacuugaccccg

SEQ ID NO: 2869069 - RNA, 19 nt, Artificial Sequence
  Description of Artificial Sequence: Synthetic oligonucleotide
acagucaacugcauggcca

SEQ ID NO: 2869070 - RNA, 19 nt, Artificial Sequence
  Description of Artificial Sequence: Synthetic oligonucleotide
ugaagacauaggacagagu

SEQ ID NO: 2869071 - RNA, 19 nt, Artificial Sequence
  Description of Artificial Sequence: Synthetic oligonucleotide
gacacugaccacaaacaga

SEQ ID NO: 2869072 - RNA, 19 nt, Artificial Sequence
  Description of Artificial Sequence: Synthetic oligonucleotide
uucucuguuccgcaugcua

SEQ ID NO: 2869073 - RNA, 19 nt, Artificial Sequence
  Description of Artificial Sequence: Synthetic oligonucleotide
gggacaucgcaguagaaca

SEQ ID NO: 2869074 - RNA, 19 nt, Artificial Sequence
  Description of Artificial Sequence: Synthetic oligonucleotide
acaaguagaugagacucgu

SEQ ID NO: 2869075 - RNA, 19 nt, Artificial Sequence
  Description of Artificial Sequence: Synthetic oligonucleotide
ggacagagugaugaggagg

SEQ ID NO: 2869076 - RNA, 19 nt, Artificial Sequence
  Description of Artificial Sequence: Synthetic oligonucleotide
gaguucucuguuccgcaug

SEQ ID NO: 2869077 - RNA, 19 nt, Artificial Sequence
  Description of Artificial Sequence: Synthetic oligonucleotide
cuauagaucaagggguuca

SEQ ID NO: 2869078 - RNA, 19 nt, Artificial Sequence
  Description of Artificial Sequence: Synthetic oligonucleotide
cagaaaggcagacggaaga

SEQ ID NO: 2869079 - RNA, 19 nt, Artificial Sequence
  Description of Artificial Sequence: Synthetic oligonucleotide
uuucaagcaggaggaaccu

SEQ ID NO: 2869080 - RNA, 19 nt, Artificial Sequence
  Description of Artificial Sequence: Synthetic oligonucleotide
ggaugaagacauaggacag

SEQ ID NO: 2869081 - RNA, 19 nt, Artificial Sequence
  Description of Artificial Sequence: Synthetic oligonucleotide
ucgugcagccauacugcag

SEQ ID NO: 2869082 - RNA, 19 nt, Artificial Sequence
  Description of Artificial Sequence: Synthetic oligonucleotide
uuugugccuccccuccagc

SEQ ID NO: 2869083 - RNA, 19 nt, Artificial Sequence
  Description of Artificial Sequence: Synthetic oligonucleotide
gaaggcuuugugccucccc

SEQ ID NO: 2869084 - RNA, 19 nt, Artificial Sequence
  Description of Artificial Sequence: Synthetic oligonucleotide
gaugaagacauaggacaga

SEQ ID NO: 2869085 - RNA, 19 nt, Artificial Sequence
  Description of Artificial Sequence: Synthetic oligonucleotide
agaauaacuggagcuggga

SEQ ID NO: 2869086 - RNA, 19 nt, Artificial Sequence
  Description of Artificial Sequence: Synthetic oligonucleotide
uggagaaggcuuugugccu

SEQ ID NO: 2869087 - RNA, 19 nt, Artificial Sequence
  Description of Artificial Sequence: Synthetic oligonucleotide
gagcacagucaacugcaug

SEQ ID NO: 2869088 - RNA, 19 nt, Artificial Sequence
  Description of Artificial Sequence: Synthetic oligonucleotide
acugcuacagaaaggcaga

SEQ ID NO: 2869089 - RNA, 19 nt, Artificial Sequence
  Description of Artificial Sequence: Synthetic oligonucleotide
gacagggagggacaucgca

SEQ ID NO: 2869090 - RNA, 19 nt, Artificial Sequence
  Description of Artificial Sequence: Synthetic oligonucleotide
gacacaaguagaugagacu

SEQ ID NO: 2869091 - RNA, 19 nt, Artificial Sequence
  Description of Artificial Sequence: Synthetic oligonucleotide
ucugcacaggccagccuca

SEQ ID NO: 2869092 - RNA, 19 nt, Artificial Sequence
  Description of Artificial Sequence: Synthetic oligonucleotide
cuugaccccgcucaggaga

SEQ ID NO: 2869093 - RNA, 19 nt, Artificial Sequence
  Description of Artificial Sequence: Synthetic oligonucleotide
cacagucaacugcauggcc

SEQ ID NO: 2869094 - RNA, 19 nt, Artificial Sequence
  Description of Artificial Sequence: Synthetic oligonucleotide
aagcaggaggaaccuccug

SEQ ID NO: 2869095 - RNA, 19 nt, Artificial Sequence
  Description of Artificial Sequence: Synthetic oligonucleotide
acagggagggacaucgcag

SEQ ID NO: 2869096 - RNA, 19 nt, Artificial Sequence
  Description of Artificial Sequence: Synthetic oligonucleotide
cuuugugccuccccuccag

SEQ ID NO: 2869097 - RNA, 19 nt, Artificial Sequence
  Description of Artificial Sequence: Synthetic oligonucleotide
ggaagaugagcacagucaa

SEQ ID NO: 2869098 - RNA, 19 nt, Artificial Sequence
  Description of Artificial Sequence: Synthetic oligonucleotide
acagaaaggcagacggaag

SEQ ID NO: 2869099 - RNA, 19 nt, Artificial Sequence
  Description of Artificial Sequence: Synthetic oligonucleotide
agacggaagaugagcacag

SEQ ID NO: 2869100 - RNA, 19 nt, Artificial Sequence
  Description of Artificial Sequence: Synthetic oligonucleotide
uggagcugggacacaagua

SEQ ID NO: 2869101 - RNA, 19 nt, Artificial Sequence
  Description of Artificial Sequence: Synthetic oligonucleotide
gcuggagcggaucuucagg

SEQ ID NO: 2869102 - RNA, 19 nt, Artificial Sequence
  Description of Artificial Sequence: Synthetic oligonucleotide
augagacucgugcagccau

SEQ ID NO: 2869103 - RNA, 19 nt, Artificial Sequence
  Description of Artificial Sequence: Synthetic oligonucleotide
caggagaauaacuggagcu

SEQ ID NO: 2869104 - RNA, 19 nt, Artificial Sequence
  Description of Artificial Sequence: Synthetic oligonucleotide
ggaauggugaggacgauga

SEQ ID NO: 2869105 - RNA, 19 nt, Artificial Sequence
  Description of Artificial Sequence: Synthetic oligonucleotide
gucugcacaggccagccuc

SEQ ID NO: 2869106 - RNA, 19 nt, Artificial Sequence
  Description of Artificial Sequence: Synthetic oligonucleotide
agaacaggcugauuuccuu

SEQ ID NO: 2869107 - RNA, 19 nt, Artificial Sequence
  Description of Artificial Sequence: Synthetic oligonucleotide
aaggcagacggaagaugag

SEQ ID NO: 2869108 - RNA, 19 nt, Artificial Sequence
  Description of Artificial Sequence: Synthetic oligonucleotide
cucaaagcauccuugaguu

SEQ ID NO: 2869109 - RNA, 19 nt, Artificial Sequence
  Description of Artificial Sequence: Synthetic oligonucleotide
gaagaugagcacagucaac

SEQ ID NO: 2869110 - RNA, 19 nt, Artificial Sequence
  Description of Artificial Sequence: Synthetic oligonucleotide
aucaagggguucagcauag

SEQ ID NO: 2869111 - RNA, 19 nt, Artificial Sequence
  Description of Artificial Sequence: Synthetic oligonucleotide
uggacaugggugucugcac

SEQ ID NO: 2869112 - RNA, 19 nt, Artificial Sequence
  Description of Artificial Sequence: Synthetic oligonucleotide
gugccuccccuccagcugg

SEQ ID NO: 2869113 - RNA, 19 nt, Artificial Sequence
  Description of Artificial Sequence: Synthetic oligonucleotide
caaguagaugagacucgug

SEQ ID NO: 2869114 - RNA, 19 nt, Artificial Sequence
  Description of Artificial Sequence: Synthetic oligonucleotide
gaccacagucacgugggag

SEQ ID NO: 2869115 - RNA, 19 nt, Artificial Sequence
  Description of Artificial Sequence: Synthetic oligonucleotide
cacaaacagaguggccucg

SEQ ID NO: 2869116 - RNA, 19 nt, Artificial Sequence
  Description of Artificial Sequence: Synthetic oligonucleotide
ggacacaaguagaugagac

SEQ ID NO: 2869117 - RNA, 19 nt, Artificial Sequence
  Description of Artificial Sequence: Synthetic oligonucleotide
gaacaggcugauuuccuua

SEQ ID NO: 2869118 - RNA, 19 nt, Artificial Sequence
  Description of Artificial Sequence: Synthetic oligonucleotide
ugaguucucuguuccgcau

SEQ ID NO: 2869119 - RNA, 19 nt, Artificial Sequence
  Description of Artificial Sequence: Synthetic oligonucleotide
cauaggggugaugaaugug

SEQ ID NO: 2869120 - RNA, 19 nt, Artificial Sequence
  Description of Artificial Sequence: Synthetic oligonucleotide
aacuggagcugggacacaa

SEQ ID NO: 2869121 - RNA, 19 nt, Artificial Sequence
  Description of Artificial Sequence: Synthetic oligonucleotide
agcuggagcggaucuucag

SEQ ID NO: 2869122 - RNA, 19 nt, Artificial Sequence
  Description of Artificial Sequence: Synthetic oligonucleotide
agccauacugcaggaggac

SEQ ID NO: 2869123 - RNA, 19 nt, Artificial Sequence
  Description of Artificial Sequence: Synthetic oligonucleotide
ggagcggaucuucaggaug

SEQ ID NO: 2869124 - RNA, 19 nt, Artificial Sequence
  Description of Artificial Sequence: Synthetic oligonucleotide
ggaggaaaggggaauggug

SEQ ID NO: 2869125 - RNA, 19 nt, Artificial Sequence
  Description of Artificial Sequence: Synthetic oligonucleotide
ucagcauaggggugaugaa

SEQ ID NO: 2869126 - RNA, 19 nt, Artificial Sequence
  Description of Artificial Sequence: Synthetic oligonucleotide
ugauuuccuuacugcuaca

SEQ ID NO: 2869127 - RNA, 19 nt, Artificial Sequence
  Description of Artificial Sequence: Synthetic oligonucleotide
gaaacuacuugaccccgcu

SEQ ID NO: 2869128 - RNA, 19 nt, Artificial Sequence
  Description of Artificial Sequence: Synthetic oligonucleotide
cuggagcggaucuucagga

SEQ ID NO: 2869129 - RNA, 19 nt, Artificial Sequence
  Description of Artificial Sequence: Synthetic oligonucleotide
aggcuuugugccuccccuc

SEQ ID NO: 2869130 - RNA, 19 nt, Artificial Sequence
  Description of Artificial Sequence: Synthetic oligonucleotide
ggaaaggggaauggugagg

SEQ ID NO: 2869131 - RNA, 19 nt, Artificial Sequence
  Description of Artificial Sequence: Synthetic oligonucleotide
gagaaggcuuugugccucc

SEQ ID NO: 2869132 - RNA, 19 nt, Artificial Sequence
  Description of Artificial Sequence: Synthetic oligonucleotide
gaauggugaggacgaugac

SEQ ID NO: 2869133 - RNA, 19 nt, Artificial Sequence
  Description of Artificial Sequence: Synthetic oligonucleotide
cuccugaccgccuuccuca

SEQ ID NO: 2869134 - RNA, 19 nt, Artificial Sequence
  Description of Artificial Sequence: Synthetic oligonucleotide
agaguggccucguggacau

SEQ ID NO: 2869135 - RNA, 19 nt, Artificial Sequence
  Description of Artificial Sequence: Synthetic oligonucleotide
uugaccccgcucaggagaa

SEQ ID NO: 2869136 - RNA, 19 nt, Artificial Sequence
  Description of Artificial Sequence: Synthetic oligonucleotide
uaggggugaugaaugugua

SEQ ID NO: 2869137 - RNA, 19 nt, Artificial Sequence
  Description of Artificial Sequence: Synthetic oligonucleotide
agaaaggcagacggaagau

SEQ ID NO: 2869138 - RNA, 19 nt, Artificial Sequence
  Description of Artificial Sequence: Synthetic oligonucleotide
aggggaauggugaggacga

SEQ ID NO: 2869139 - RNA, 19 nt, Artificial Sequence
  Description of Artificial Sequence: Synthetic oligonucleotide
gaggacgaugacacugacc

SEQ ID NO: 2869140 - RNA, 19 nt, Artificial Sequence
  Description of Artificial Sequence: Synthetic oligonucleotide
uugugccuccccuccagcu

SEQ ID NO: 2869141 - RNA, 19 nt, Artificial Sequence
  Description of Artificial Sequence: Synthetic oligonucleotide
acaggccagccucaugaca

SEQ ID NO: 2869142 - RNA, 19 nt, Artificial Sequence
  Description of Artificial Sequence: Synthetic oligonucleotide
acuugaccccgcucaggag

SEQ ID NO: 2869143 - RNA, 19 nt, Artificial Sequence
  Description of Artificial Sequence: Synthetic oligonucleotide
cucaugacagggagggaca

SEQ ID NO: 2869144 - RNA, 19 nt, Artificial Sequence
  Description of Artificial Sequence: Synthetic oligonucleotide
gaugaggaggaaaggggaa

SEQ ID NO: 2869145 - RNA, 19 nt, Artificial Sequence
  Description of Artificial Sequence: Synthetic oligonucleotide
ugaccgccuuccucaaagc

SEQ ID NO: 2869146 - RNA, 19 nt, Artificial Sequence
  Description of Artificial Sequence: Synthetic oligonucleotide
uggcauccaggaugaagac

SEQ ID NO: 2869147 - RNA, 19 nt, Artificial Sequence
  Description of Artificial Sequence: Synthetic oligonucleotide
caguagaacaggcugauuu

SEQ ID NO: 2869148 - RNA, 19 nt, Artificial Sequence
  Description of Artificial Sequence: Synthetic oligonucleotide
ucaagggguucagcauagg

SEQ ID NO: 2869149 - RNA, 19 nt, Artificial Sequence
  Description of Artificial Sequence: Synthetic oligonucleotide
acaugggugucugcacagg

SEQ ID NO: 2869150 - RNA, 19 nt, Artificial Sequence
  Description of Artificial Sequence: Synthetic oligonucleotide
gaccgccuuccucaaagca

SEQ ID NO: 2869151 - RNA, 19 nt, Artificial Sequence
  Description of Artificial Sequence: Synthetic oligonucleotide
caggaggaaccuccugacc

SEQ ID NO: 2869152 - RNA, 19 nt, Artificial Sequence
  Description of Artificial Sequence: Synthetic oligonucleotide
guaaaccacagaaacuacu

SEQ ID NO: 2869153 - RNA, 19 nt, Artificial Sequence
  Description of Artificial Sequence: Synthetic oligonucleotide
ggaucuucaggauggcauc

SEQ ID NO: 2869154 - RNA, 19 nt, Artificial Sequence
  Description of Artificial Sequence: Synthetic oligonucleotide
agaaggcuuugugccuccc

SEQ ID NO: 2869155 - RNA, 19 nt, Artificial Sequence
  Description of Artificial Sequence: Synthetic oligonucleotide
ccacagaaacuacuugacc

SEQ ID NO: 2869156 - RNA, 19 nt, Artificial Sequence
  Description of Artificial Sequence: Synthetic oligonucleotide
gcacaggccagccucauga

SEQ ID NO: 2869157 - RNA, 19 nt, Artificial Sequence
  Description of Artificial Sequence: Synthetic oligonucleotide
ugcagccauacugcaggag

SEQ ID NO: 2869158 - RNA, 19 nt, Artificial Sequence
  Description of Artificial Sequence: Synthetic oligonucleotide
gggugaugaauguguaaac

SEQ ID NO: 2869159 - RNA, 19 nt, Artificial Sequence
  Description of Artificial Sequence: Synthetic oligonucleotide
cuacagaaaggcagacgga

SEQ ID NO: 2869160 - RNA, 19 nt, Artificial Sequence
  Description of Artificial Sequence: Synthetic oligonucleotide
cuacuugaccccgcucagg

SEQ ID NO: 2869161 - RNA, 19 nt, Artificial Sequence
  Description of Artificial Sequence: Synthetic oligonucleotide
ugacagggagggacaucgc

SEQ ID NO: 2869162 - RNA, 19 nt, Artificial Sequence
  Description of Artificial Sequence: Synthetic oligonucleotide
aggaggaaaggggaauggu

SEQ ID NO: 2869163 - RNA, 19 nt, Artificial Sequence
  Description of Artificial Sequence: Synthetic oligonucleotide
acaggcugauuuccuuacu

SEQ ID NO: 2869164 - RNA, 19 nt, Artificial Sequence
  Description of Artificial Sequence: Synthetic oligonucleotide
cagacggaagaugagcaca

SEQ ID NO: 2869165 - RNA, 19 nt, Artificial Sequence
  Description of Artificial Sequence: Synthetic oligonucleotide
caaacagaguggccucgug

SEQ ID NO: 2869166 - RNA, 19 nt, Artificial Sequence
  Description of Artificial Sequence: Synthetic oligonucleotide
ggaggaaccuccugaccgc

SEQ ID NO: 2869167 - RNA, 19 nt, Artificial Sequence
  Description of Artificial Sequence: Synthetic oligonucleotide
uccgcaugcuauagaucaa

SEQ ID NO: 2869168 - RNA, 19 nt, Artificial Sequence
  Description of Artificial Sequence: Synthetic oligonucleotide
ccagccucaugacagggag

SEQ ID NO: 2869169 - RNA, 19 nt, Artificial Sequence
  Description of Artificial Sequence: Synthetic oligonucleotide
cauacugcaggaggaccac

SEQ ID NO: 2869170 - RNA, 19 nt, Artificial Sequence
  Description of Artificial Sequence: Synthetic oligonucleotide
aggggugaugaauguguaa

SEQ ID NO: 2869171 - RNA, 19 nt, Artificial Sequence
  Description of Artificial Sequence: Synthetic oligonucleotide
augaggaggaaaggggaau

SEQ ID NO: 2869172 - RNA, 19 nt, Artificial Sequence
  Description of Artificial Sequence: Synthetic oligonucleotide
gagacucgugcagccauac

SEQ ID NO: 2869173 - RNA, 19 nt, Artificial Sequence
  Description of Artificial Sequence: Synthetic oligonucleotide
ugcacaggccagccucaug

SEQ ID NO: 2869174 - RNA, 19 nt, Artificial Sequence
  Description of Artificial Sequence: Synthetic oligonucleotide
gaugagacucgugcagcca

SEQ ID NO: 2869175 - RNA, 19 nt, Artificial Sequence
  Description of Artificial Sequence: Synthetic oligonucleotide
gucaacugcauggccaaga

SEQ ID NO: 2869176 - RNA, 19 nt, Artificial Sequence
  Description of Artificial Sequence: Synthetic oligonucleotide
ugagacucgugcagccaua

SEQ ID NO: 2869177 - RNA, 19 nt, Artificial Sequence
  Description of Artificial Sequence: Synthetic oligonucleotide
ggagggacaucgcaguaga

SEQ ID NO: 2869178 - RNA, 19 nt, Artificial Sequence
  Description of Artificial Sequence: Synthetic oligonucleotide
agcggaucuucaggauggc

SEQ ID NO: 2869179 - RNA, 19 nt, Artificial Sequence
  Description of Artificial Sequence: Synthetic oligonucleotide
gaggaaccuccugaccgcc

SEQ ID NO: 2869180 - RNA, 19 nt, Artificial Sequence
  Description of Artificial Sequence: Synthetic oligonucleotide
ugucugcacaggccagccu

SEQ ID NO: 2869181 - RNA, 19 nt, Artificial Sequence
  Description of Artificial Sequence: Synthetic oligonucleotide
ucguggacaugggugucug

SEQ ID NO: 2869182 - RNA, 19 nt, Artificial Sequence
  Description of Artificial Sequence: Synthetic oligonucleotide
gacauaggacagagugaug

SEQ ID NO: 2869183 - RNA, 19 nt, Artificial Sequence
  Description of Artificial Sequence: Synthetic oligonucleotide
ccgcucaggagaauaacug

SEQ ID NO: 2869184 - RNA, 19 nt, Artificial Sequence
  Description of Artificial Sequence: Synthetic oligonucleotide
ggcuuugugccuccccucc

SEQ ID NO: 2869185 - RNA, 19 nt, Artificial Sequence
  Description of Artificial Sequence: Synthetic oligonucleotide
gaccacaaacagaguggcc

SEQ ID NO: 2869186 - RNA, 19 nt, Artificial Sequence
  Description of Artificial Sequence: Synthetic oligonucleotide
cgcucaggagaauaacugg

SEQ ID NO: 2869187 - RNA, 19 nt, Artificial Sequence
  Description of Artificial Sequence: Synthetic oligonucleotide
ggggugaugaauguguaaa

SEQ ID NO: 2869188 - RNA, 19 nt, Artificial Sequence
  Description of Artificial Sequence: Synthetic oligonucleotide
cagccauacugcaggagga

SEQ ID NO: 2869189 - RNA, 19 nt, Artificial Sequence
  Description of Artificial Sequence: Synthetic oligonucleotide
ggacaucgcaguagaacag

SEQ ID NO: 2869190 - RNA, 19 nt, Artificial Sequence
  Description of Artificial Sequence: Synthetic oligonucleotide
acaaacagaguggccucgu

SEQ ID NO: 2869191 - RNA, 19 nt, Artificial Sequence
  Description of Artificial Sequence: Synthetic oligonucleotide
ccucaugacagggagggac

SEQ ID NO: 2869192 - RNA, 19 nt, Artificial Sequence
  Description of Artificial Sequence: Synthetic oligonucleotide
aagcauccuugaguucucu

SEQ ID NO: 2869193 - RNA, 19 nt, Artificial Sequence
  Description of Artificial Sequence: Synthetic oligonucleotide
uggagcggaucuucaggau

SEQ ID NO: 2869194 - RNA, 19 nt, Artificial Sequence
  Description of Artificial Sequence: Synthetic oligonucleotide
uggccucguggacaugggu

SEQ ID NO: 2869195 - RNA, 19 nt, Artificial Sequence
  Description of Artificial Sequence: Synthetic oligonucleotide
ucaugacagggagggacau

SEQ ID NO: 2869196 - RNA, 19 nt, Artificial Sequence
  Description of Artificial Sequence: Synthetic oligonucleotide
uucaagcaggaggaaccuc

SEQ ID NO: 2869197 - RNA, 19 nt, Artificial Sequence
  Description of Artificial Sequence: Synthetic oligonucleotide
gugaggacgaugacacuga

SEQ ID NO: 2869198 - RNA, 19 nt, Artificial Sequence
  Description of Artificial Sequence: Synthetic oligonucleotide
ccuugaguucucuguuccg

SEQ ID NO: 2869199 - RNA, 19 nt, Artificial Sequence
  Description of Artificial Sequence: Synthetic oligonucleotide
cagucaacugcauggccaa

SEQ ID NO: 2869200 - RNA, 19 nt, Artificial Sequence
  Description of Artificial Sequence: Synthetic oligonucleotide
gcucaggagaauaacugga

SEQ ID NO: 2869201 - RNA, 19 nt, Artificial Sequence
  Description of Artificial Sequence: Synthetic oligonucleotide
ggacaugggugucugcaca

SEQ ID NO: 2869202 - RNA, 19 nt, Artificial Sequence
  Description of Artificial Sequence: Synthetic oligonucleotide
accgccuuccucaaagcau

SEQ ID NO: 2869203 - RNA, 19 nt, Artificial Sequence
  Description of Artificial Sequence: Synthetic oligonucleotide
gcaggaggaaccuccugac

SEQ ID NO: 2869204 - RNA, 19 nt, Artificial Sequence
  Description of Artificial Sequence: Synthetic oligonucleotide
gagcugggacacaaguaga

SEQ ID NO: 2869205 - RNA, 19 nt, Artificial Sequence
  Description of Artificial Sequence: Synthetic oligonucleotide
ggcagacggaagaugagca

SEQ ID NO: 2869206 - RNA, 19 nt, Artificial Sequence
  Description of Artificial Sequence: Synthetic oligonucleotide
cacaggccagccucaugac

SEQ ID NO: 2869207 - RNA, 19 nt, Artificial Sequence
  Description of Artificial Sequence: Synthetic oligonucleotide
cgcaugcuauagaucaagg

SEQ ID NO: 2869208 - RNA, 19 nt, Artificial Sequence
  Description of Artificial Sequence: Synthetic oligonucleotide
cugcuacagaaaggcagac

SEQ ID NO: 2869209 - RNA, 19 nt, Artificial Sequence
  Description of Artificial Sequence: Synthetic oligonucleotide
cagagugaugaggaggaaa

SEQ ID NO: 2869210 - RNA, 19 nt, Artificial Sequence
  Description of Artificial Sequence: Synthetic oligonucleotide
gggagggacaucgcaguag

SEQ ID NO: 2869211 - RNA, 19 nt, Artificial Sequence
  Description of Artificial Sequence: Synthetic oligonucleotide
ggccucguggacaugggug

SEQ ID NO: 2869212 - RNA, 19 nt, Artificial Sequence
  Description of Artificial Sequence: Synthetic oligonucleotide
gcagacggaagaugagcac

SEQ ID NO: 2869213 - RNA, 19 nt, Artificial Sequence
  Description of Artificial Sequence: Synthetic oligonucleotide
ccauacugcaggaggacca

SEQ ID NO: 2869214 - RNA, 19 nt, Artificial Sequence
  Description of Artificial Sequence: Synthetic oligonucleotide
cucgugcagccauacugca

SEQ ID NO: 2869215 - RNA, 19 nt, Artificial Sequence
  Description of Artificial Sequence: Synthetic oligonucleotide
ggcugauuuccuuacugcu

SEQ ID NO: 2869216 - RNA, 19 nt, Artificial Sequence
  Description of Artificial Sequence: Synthetic oligonucleotide
gggaauggugaggacgaug

SEQ ID NO: 2869217 - RNA, 19 nt, Artificial Sequence
  Description of Artificial Sequence: Synthetic oligonucleotide
cggaagaugagcacaguca

SEQ ID NO: 2869218 - RNA, 19 nt, Artificial Sequence
  Description of Artificial Sequence: Synthetic oligonucleotide
gcauccuugaguucucugu

SEQ ID NO: 2869219 - RNA, 19 nt, Artificial Sequence
  Description of Artificial Sequence: Synthetic oligonucleotide
agucaacugcauggccaag

SEQ ID NO: 2869220 - RNA, 19 nt, Artificial Sequence
  Description of Artificial Sequence: Synthetic oligonucleotide
cagaguggccucguggaca

SEQ ID NO: 2869221 - RNA, 19 nt, Artificial Sequence
  Description of Artificial Sequence: Synthetic oligonucleotide
acgaugacacugaccacaa

SEQ ID NO: 2869222 - RNA, 19 nt, Artificial Sequence
  Description of Artificial Sequence: Synthetic oligonucleotide
guuccgcaugcuauagauc

SEQ ID NO: 2869223 - RNA, 19 nt, Artificial Sequence
  Description of Artificial Sequence: Synthetic oligonucleotide
ggagaaggcuuugugccuc

SEQ ID NO: 2869224 - RNA, 19 nt, Artificial Sequence
  Description of Artificial Sequence: Synthetic oligonucleotide
acuggagcugggacacaag

SEQ ID NO: 2869225 - RNA, 19 nt, Artificial Sequence
  Description of Artificial Sequence: Synthetic oligonucleotide
cuggagcugggacacaagu

SEQ ID NO: 2869226 - RNA, 19 nt, Artificial Sequence
  Description of Artificial Sequence: Synthetic oligonucleotide
cucuguuccgcaugcuaua

SEQ ID NO: 2869227 - RNA, 19 nt, Artificial Sequence
  Description of Artificial Sequence: Synthetic oligonucleotide
cacagucacgugggagggg

SEQ ID NO: 2869228 - RNA, 19 nt, Artificial Sequence
  Description of Artificial Sequence: Synthetic oligonucleotide
ccgccuuccucaaagcauc

SEQ ID NO: 2869229 - RNA, 19 nt, Artificial Sequence
  Description of Artificial Sequence: Synthetic oligonucleotide
gccauacugcaggaggacc

SEQ ID NO: 2869230 - RNA, 19 nt, Artificial Sequence
  Description of Artificial Sequence: Synthetic oligonucleotide
auacugcaggaggaccaca

SEQ ID NO: 2869231 - RNA, 19 nt, Artificial Sequence
  Description of Artificial Sequence: Synthetic oligonucleotide
ccacaaacagaguggccuc

SEQ ID NO: 2869232 - RNA, 19 nt, Artificial Sequence
  Description of Artificial Sequence: Synthetic oligonucleotide
agggagggacaucgcagua

SEQ ID NO: 2869233 - RNA, 19 nt, Artificial Sequence
  Description of Artificial Sequence: Synthetic oligonucleotide
caugacagggagggacauc

SEQ ID NO: 2869234 - RNA, 19 nt, Artificial Sequence
  Description of Artificial Sequence: Synthetic oligonucleotide
caucgcaguagaacaggcu

SEQ ID NO: 2869235 - RNA, 19 nt, Artificial Sequence
  Description of Artificial Sequence: Synthetic oligonucleotide
ggguucagcauagggguga

SEQ ID NO: 2869236 - RNA, 19 nt, Artificial Sequence
  Description of Artificial Sequence: Synthetic oligonucleotide
uccugaccgccuuccucaa

SEQ ID NO: 2869237 - RNA, 19 nt, Artificial Sequence
  Description of Artificial Sequence: Synthetic oligonucleotide
ccucaaagcauccuugagu

SEQ ID NO: 2869238 - RNA, 19 nt, Artificial Sequence
  Description of Artificial Sequence: Synthetic oligonucleotide
ccgcaugcuauagaucaag

SEQ ID NO: 2869239 - RNA, 19 nt, Artificial Sequence
  Description of Artificial Sequence: Synthetic oligonucleotide
guggccucguggacauggg

SEQ ID NO: 2869240 - RNA, 19 nt, Artificial Sequence
  Description of Artificial Sequence: Synthetic oligonucleotide
gcuauagaucaagggguuc

SEQ ID NO: 2869241 - RNA, 19 nt, Artificial Sequence
  Description of Artificial Sequence: Synthetic oligonucleotide
ccacagucacgugggaggg

SEQ ID NO: 2869242 - RNA, 19 nt, Artificial Sequence
  Description of Artificial Sequence: Synthetic oligonucleotide
cuguuccgcaugcuauaga

SEQ ID NO: 2869243 - RNA, 19 nt, Artificial Sequence
  Description of Artificial Sequence: Synthetic oligonucleotide
gggacacaaguagaugaga

SEQ ID NO: 2869244 - RNA, 19 nt, Artificial Sequence
  Description of Artificial Sequence: Synthetic oligonucleotide
gcugauuuccuuacugcua

SEQ ID NO: 2869245 - RNA, 19 nt, Artificial Sequence
  Description of Artificial Sequence: Synthetic oligonucleotide
cauccuugaguucucuguu

SEQ ID NO: 2869246 - RNA, 19 nt, Artificial Sequence
  Description of Artificial Sequence: Synthetic oligonucleotide
cagggagggacaucgcagu

SEQ ID NO: 2869247 - RNA, 19 nt, Artificial Sequence
  Description of Artificial Sequence: Synthetic oligonucleotide
uaacuggagcugggacaca

SEQ ID NO: 2869248 - RNA, 19 nt, Artificial Sequence
  Description of Artificial Sequence: Synthetic oligonucleotide
acagagugaugaggaggaa

SEQ ID NO: 2869249 - RNA, 19 nt, Artificial Sequence
  Description of Artificial Sequence: Synthetic oligonucleotide
caagcaggaggaaccuccu

SEQ ID NO: 2869250 - RNA, 19 nt, Artificial Sequence
  Description of Artificial Sequence: Synthetic oligonucleotide
ggacgaugacacugaccac

SEQ ID NO: 2869251 - RNA, 19 nt, Artificial Sequence
  Description of Artificial Sequence: Synthetic oligonucleotide
gaccccgcucaggagaaua

SEQ ID NO: 2869252 - RNA, 19 nt, Artificial Sequence
  Description of Artificial Sequence: Synthetic oligonucleotide
uccagcuggagcggaucuu

SEQ ID NO: 2869253 - RNA, 19 nt, Artificial Sequence
  Description of Artificial Sequence: Synthetic oligonucleotide
guucagcauaggggugaug

SEQ ID NO: 2869254 - RNA, 19 nt, Artificial Sequence
  Description of Artificial Sequence: Synthetic oligonucleotide
ugccuccccuccagcugga

SEQ ID NO: 2869255 - RNA, 19 nt, Artificial Sequence
  Description of Artificial Sequence: Synthetic oligonucleotide
cagcuggagcggaucuuca

SEQ ID NO: 2869256 - RNA, 19 nt, Artificial Sequence
  Description of Artificial Sequence: Synthetic oligonucleotide
cagcauaggggugaugaau

SEQ ID NO: 2869257 - RNA, 19 nt, Artificial Sequence
  Description of Artificial Sequence: Synthetic oligonucleotide
ccagcuggagcggaucuuc

SEQ ID NO: 2869258 - RNA, 19 nt, Artificial Sequence
  Description of Artificial Sequence: Synthetic oligonucleotide
ggaggaccacagucacgug

SEQ ID NO: 2869259 - RNA, 19 nt, Artificial Sequence
  Description of Artificial Sequence: Synthetic oligonucleotide
ccuccccuccagcuggagc

SEQ ID NO: 2869260 - RNA, 19 nt, Artificial Sequence
  Description of Artificial Sequence: Synthetic oligonucleotide
gccucguggacaugggugu

SEQ ID NO: 2869261 - RNA, 19 nt, Artificial Sequence
  Description of Artificial Sequence: Synthetic oligonucleotide
gggguucagcauaggggug

SEQ ID NO: 2869262 - RNA, 19 nt, Artificial Sequence
  Description of Artificial Sequence: Synthetic oligonucleotide
aggaaccuccugaccgccu

SEQ ID NO: 2869263 - RNA, 19 nt, Artificial Sequence
  Description of Artificial Sequence: Synthetic oligonucleotide
gcauaggggugaugaaugu

SEQ ID NO: 2869264 - RNA, 19 nt, Artificial Sequence
  Description of Artificial Sequence: Synthetic oligonucleotide
gagggacaucgcaguagaa

SEQ ID NO: 2869265 - RNA, 19 nt, Artificial Sequence
  Description of Artificial Sequence: Synthetic oligonucleotide
ccuccugaccgccuuccuc

SEQ ID NO: 2869266 - RNA, 19 nt, Artificial Sequence
  Description of Artificial Sequence: Synthetic oligonucleotide
gcuuugugccuccccucca

SEQ ID NO: 2869267 - RNA, 19 nt, Artificial Sequence
  Description of Artificial Sequence: Synthetic oligonucleotide
accccgcucaggagaauaa

SEQ ID NO: 2869268 - RNA, 19 nt, Artificial Sequence
  Description of Artificial Sequence: Synthetic oligonucleotide
cauccaggaugaagacaua

SEQ ID NO: 2869269 - RNA, 19 nt, Artificial Sequence
  Description of Artificial Sequence: Synthetic oligonucleotide
gacggaagaugagcacagu

SEQ ID NO: 2869270 - RNA, 19 nt, Artificial Sequence
  Description of Artificial Sequence: Synthetic oligonucleotide
cccgcucaggagaauaacu

SEQ ID NO: 2869271 - RNA, 19 nt, Artificial Sequence
  Description of Artificial Sequence: Synthetic oligonucleotide
ggaccacagucacguggga

SEQ ID NO: 2869272 - RNA, 19 nt, Artificial Sequence
  Description of Artificial Sequence: Synthetic oligonucleotide
cucguggacaugggugucu

SEQ ID NO: 2869273 - RNA, 19 nt, Artificial Sequence
  Description of Artificial Sequence: Synthetic oligonucleotide
gcggaucuucaggauggca

SEQ ID NO: 2869274 - RNA, 19 nt, Artificial Sequence
  Description of Artificial Sequence: Synthetic oligonucleotide
ggaaccuccugaccgccuu

SEQ ID NO: 2869275 - RNA, 19 nt, Artificial Sequence
  Description of Artificial Sequence: Synthetic oligonucleotide
cguggacaugggugucugc

SEQ ID NO: 2869276 - RNA, 19 nt, Artificial Sequence
  Description of Artificial Sequence: Synthetic oligonucleotide
gccagccucaugacaggga

SEQ ID NO: 2869277 - RNA, 19 nt, Artificial Sequence
  Description of Artificial Sequence: Synthetic oligonucleotide
guucucuguuccgcaugcu

SEQ ID NO: 2869278 - RNA, 19 nt, Artificial Sequence
  Description of Artificial Sequence: Synthetic oligonucleotide
gaguggccucguggacaug

SEQ ID NO: 2869279 - RNA, 19 nt, Artificial Sequence
  Description of Artificial Sequence: Synthetic oligonucleotide
ccccgcucaggagaauaac

SEQ ID NO: 2869280 - RNA, 19 nt, Artificial Sequence
  Description of Artificial Sequence: Synthetic oligonucleotide
ugaccccgcucaggagaau

SEQ ID NO: 2869281 - RNA, 19 nt, Artificial Sequence
  Description of Artificial Sequence: Synthetic oligonucleotide
cagguggagaaggcuuugu

SEQ ID NO: 2869282 - RNA, 19 nt, Artificial Sequence
  Description of Artificial Sequence: Synthetic oligonucleotide
ccucguggacauggguguc

SEQ ID NO: 2869283 - RNA, 19 nt, Artificial Sequence
  Description of Artificial Sequence: Synthetic oligonucleotide
ggcagguggagaaggcuuu

SEQ ID NO: 2869284 - RNA, 19 nt, Artificial Sequence
  Description of Artificial Sequence: Synthetic oligonucleotide
gguucagcauaggggugau

SEQ ID NO: 2869285 - RNA, 19 nt, Artificial Sequence
  Description of Artificial Sequence: Synthetic oligonucleotide
gccucaugacagggaggga

SEQ ID NO: 2869286 - RNA, 19 nt, Artificial Sequence
  Description of Artificial Sequence: Synthetic oligonucleotide
gccuccccuccagcuggag

SEQ ID NO: 2869287 - RNA, 19 nt, Artificial Sequence
  Description of Artificial Sequence: Synthetic oligonucleotide
ccugaccgccuuccucaaa

SEQ ID NO: 2869288 - RNA, 19 nt, Artificial Sequence
  Description of Artificial Sequence: Synthetic oligonucleotide
cugcacaggccagccucau

SEQ ID NO: 2869289 - RNA, 19 nt, Artificial Sequence
  Description of Artificial Sequence: Synthetic oligonucleotide
gcaguagaacaggcugauu

SEQ ID NO: 2869290 - RNA, 19 nt, Artificial Sequence
  Description of Artificial Sequence: Synthetic oligonucleotide
cgcaguagaacaggcugau

SEQ ID NO: 2869291 - RNA, 19 nt, Artificial Sequence
  Description of Artificial Sequence: Synthetic oligonucleotide
cgaugacacugaccacaaa

SEQ ID NO: 2869292 - RNA, 19 nt, Artificial Sequence
  Description of Artificial Sequence: Synthetic oligonucleotide
ggggaauggugaggacgau

SEQ ID NO: 2869293 - RNA, 19 nt, Artificial Sequence
  Description of Artificial Sequence: Synthetic oligonucleotide
ucuaauuuggcccauucug

SEQ ID NO: 2869294 - RNA, 19 nt, Artificial Sequence
  Description of Artificial Sequence: Synthetic oligonucleotide
guuuauucuaauuuggccc

SEQ ID NO: 2869295 - RNA, 19 nt, Artificial Sequence
  Description of Artificial Sequence: Synthetic oligonucleotide
uagguuuauucuaauuugg

SEQ ID NO: 2869296 - RNA, 19 nt, Artificial Sequence
  Description of Artificial Sequence: Synthetic oligonucleotide
agucccucgaguuucuugc

SEQ ID NO: 2869297 - RNA, 19 nt, Artificial Sequence
  Description of Artificial Sequence: Synthetic oligonucleotide
cuggguaucaggaaguccc

SEQ ID NO: 2869298 - RNA, 19 nt, Artificial Sequence
  Description of Artificial Sequence: Synthetic oligonucleotide
cuugcuuccaccuagggca

SEQ ID NO: 2869299 - RNA, 19 nt, Artificial Sequence
  Description of Artificial Sequence: Synthetic oligonucleotide
aguagguuuauucuaauuu

SEQ ID NO: 2869300 - RNA, 19 nt, Artificial Sequence
  Description of Artificial Sequence: Synthetic oligonucleotide
guagguuuauucuaauuug

SEQ ID NO: 2869301 - RNA, 19 nt, Artificial Sequence
  Description of Artificial Sequence: Synthetic oligonucleotide
uccaacuuggcgcggauag

SEQ ID NO: 2869302 - RNA, 19 nt, Artificial Sequence
  Description of Artificial Sequence: Synthetic oligonucleotide
aauuuggcccauucugauc

SEQ ID NO: 2869303 - RNA, 19 nt, Artificial Sequence
  Description of Artificial Sequence: Synthetic oligonucleotide
auucugaucgcuguuuccc

SEQ ID NO: 2869304 - RNA, 19 nt, Artificial Sequence
  Description of Artificial Sequence: Synthetic oligonucleotide
aguaccucggggcucaggg

SEQ ID NO: 2869305 - RNA, 19 nt, Artificial Sequence
  Description of Artificial Sequence: Synthetic oligonucleotide
ucagcauccgcucugugcu

SEQ ID NO: 2869306 - RNA, 19 nt, Artificial Sequence
  Description of Artificial Sequence: Synthetic oligonucleotide
agcuccaguaccucggggc

SEQ ID NO: 2869307 - RNA, 19 nt, Artificial Sequence
  Description of Artificial Sequence: Synthetic oligonucleotide
auucuaauuuggcccauuc

SEQ ID NO: 2869308 - RNA, 19 nt, Artificial Sequence
  Description of Artificial Sequence: Synthetic oligonucleotide
aaugcgucucgcugccugc

SEQ ID NO: 2869309 - RNA, 19 nt, Artificial Sequence
  Description of Artificial Sequence: Synthetic oligonucleotide
guuucuugcuuccaccuag

SEQ ID NO: 2869310 - RNA, 19 nt, Artificial Sequence
  Description of Artificial Sequence: Synthetic oligonucleotide
ucuugcuuccaccuagggc

SEQ ID NO: 2869311 - RNA, 19 nt, Artificial Sequence
  Description of Artificial Sequence: Synthetic oligonucleotide
cuugcuccaacuuggcgcg

SEQ ID NO: 2869312 - RNA, 19 nt, Artificial Sequence
  Description of Artificial Sequence: Synthetic oligonucleotide
gguuuauucuaauuuggcc

SEQ ID NO: 2869313 - RNA, 19 nt, Artificial Sequence
  Description of Artificial Sequence: Synthetic oligonucleotide
ugucccgcgacgcacaggc

SEQ ID NO: 2869314 - RNA, 19 nt, Artificial Sequence
  Description of Artificial Sequence: Synthetic oligonucleotide
aaaugcgucucgcugccug

SEQ ID NO: 2869315 - RNA, 19 nt, Artificial Sequence
  Description of Artificial Sequence: Synthetic oligonucleotide
agguuuauucuaauuuggc

SEQ ID NO: 2869316 - RNA, 19 nt, Artificial Sequence
  Description of Artificial Sequence: Synthetic oligonucleotide
uuucuugcuuccaccuagg

SEQ ID NO: 2869317 - RNA, 19 nt, Artificial Sequence
  Description of Artificial Sequence: Synthetic oligonucleotide
aucgcuguuucccagucug

SEQ ID NO: 2869318 - RNA, 19 nt, Artificial Sequence
  Description of Artificial Sequence: Synthetic oligonucleotide
acuuggcgcggauagcggc

SEQ ID NO: 2869319 - RNA, 19 nt, Artificial Sequence
  Description of Artificial Sequence: Synthetic oligonucleotide
uucuaauuuggcccauucu

SEQ ID NO: 2869320 - RNA, 19 nt, Artificial Sequence
  Description of Artificial Sequence: Synthetic oligonucleotide
uugcagagggcucaucccc

SEQ ID NO: 2869321 - RNA, 19 nt, Artificial Sequence
  Description of Artificial Sequence: Synthetic oligonucleotide
uccacuggcccuccggccg

SEQ ID NO: 2869322 - RNA, 19 nt, Artificial Sequence
  Description of Artificial Sequence: Synthetic oligonucleotide
gguaucaggaagucccucg

SEQ ID NO: 2869323 - RNA, 19 nt, Artificial Sequence
  Description of Artificial Sequence: Synthetic oligonucleotide
acggaaaugcgucucgcug

SEQ ID NO: 2869324 - RNA, 19 nt, Artificial Sequence
  Description of Artificial Sequence: Synthetic oligonucleotide
uguggguucucccuccacu

SEQ ID NO: 2869325 - RNA, 19 nt, Artificial Sequence
  Description of Artificial Sequence: Synthetic oligonucleotide
cuaauuuggcccauucuga

SEQ ID NO: 2869326 - RNA, 19 nt, Artificial Sequence
  Description of Artificial Sequence: Synthetic oligonucleotide
aacugcgcccucagcaucc

SEQ ID NO: 2869327 - RNA, 19 nt, Artificial Sequence
  Description of Artificial Sequence: Synthetic oligonucleotide
ggggucuucgccuggaugg

SEQ ID NO: 2869328 - RNA, 19 nt, Artificial Sequence
  Description of Artificial Sequence: Synthetic oligonucleotide
aagucccucgaguuucuug

SEQ ID NO: 2869329 - RNA, 19 nt, Artificial Sequence
  Description of Artificial Sequence: Synthetic oligonucleotide
uaucaggaagucccucgag

SEQ ID NO: 2869330 - RNA, 19 nt, Artificial Sequence
  Description of Artificial Sequence: Synthetic oligonucleotide
gauagcggccuccacuggc

SEQ ID NO: 2869331 - RNA, 19 nt, Artificial Sequence
  Description of Artificial Sequence: Synthetic oligonucleotide
cucagcauccgcucugugc

SEQ ID NO: 2869332 - RNA, 19 nt, Artificial Sequence
  Description of Artificial Sequence: Synthetic oligonucleotide
ucugaucgcuguuucccag

SEQ ID NO: 2869333 - RNA, 19 nt, Artificial Sequence
  Description of Artificial Sequence: Synthetic oligonucleotide
auccccucgaaccgagagc

SEQ ID NO: 2869334 - RNA, 19 nt, Artificial Sequence
  Description of Artificial Sequence: Synthetic oligonucleotide
uaauuuggcccauucugau

SEQ ID NO: 2869335 - RNA, 19 nt, Artificial Sequence
  Description of Artificial Sequence: Synthetic oligonucleotide
gcuugcuccaacuuggcgc

SEQ ID NO: 2869336 - RNA, 19 nt, Artificial Sequence
  Description of Artificial Sequence: Synthetic oligonucleotide
auggccagcgcguguaccg

SEQ ID NO: 2869337 - RNA, 19 nt, Artificial Sequence
  Description of Artificial Sequence: Synthetic oligonucleotide
ucgaguuucuugcuuccac

SEQ ID NO: 2869338 - RNA, 19 nt, Artificial Sequence
  Description of Artificial Sequence: Synthetic oligonucleotide
cagucuggguaucaggaag

SEQ ID NO: 2869339 - RNA, 19 nt, Artificial Sequence
  Description of Artificial Sequence: Synthetic oligonucleotide
aucaggaagucccucgagu

SEQ ID NO: 2869340 - RNA, 19 nt, Artificial Sequence
  Description of Artificial Sequence: Synthetic oligonucleotide
agcuguggguucucccucc

SEQ ID NO: 2869341 - RNA, 19 nt, Artificial Sequence
  Description of Artificial Sequence: Synthetic oligonucleotide
cauucugaucgcuguuucc

SEQ ID NO: 2869342 - RNA, 19 nt, Artificial Sequence
  Description of Artificial Sequence: Synthetic oligonucleotide
uggguucucccuccacugg

SEQ ID NO: 2869343 - RNA, 19 nt, Artificial Sequence
  Description of Artificial Sequence: Synthetic oligonucleotide
aaccagccggugccguugc

SEQ ID NO: 2869344 - RNA, 19 nt, Artificial Sequence
  Description of Artificial Sequence: Synthetic oligonucleotide
uaccucggggcucagggcu

SEQ ID NO: 2869345 - RNA, 19 nt, Artificial Sequence
  Description of Artificial Sequence: Synthetic oligonucleotide
ucaggaagucccucgaguu

SEQ ID NO: 2869346 - RNA, 19 nt, Artificial Sequence
  Description of Artificial Sequence: Synthetic oligonucleotide
ucccagucuggguaucagg

SEQ ID NO: 2869347 - RNA, 19 nt, Artificial Sequence
  Description of Artificial Sequence: Synthetic oligonucleotide
ucucccuccacugggcggg

SEQ ID NO: 2869348 - RNA, 19 nt, Artificial Sequence
  Description of Artificial Sequence: Synthetic oligonucleotide
guugcagagggcucauccc

SEQ ID NO: 2869349 - RNA, 19 nt, Artificial Sequence
  Description of Artificial Sequence: Synthetic oligonucleotide
agggcuugcuccaacuugg

SEQ ID NO: 2869350 - RNA, 19 nt, Artificial Sequence
  Description of Artificial Sequence: Synthetic oligonucleotide
uucgccuggauggccagcg

SEQ ID NO: 2869351 - RNA, 19 nt, Artificial Sequence
  Description of Artificial Sequence: Synthetic oligonucleotide
uaccggcccagccagcucc

SEQ ID NO: 2869352 - RNA, 19 nt, Artificial Sequence
  Description of Artificial Sequence: Synthetic oligonucleotide
ucccgcgacgcacaggcgc

SEQ ID NO: 2869353 - RNA, 19 nt, Artificial Sequence
  Description of Artificial Sequence: Synthetic oligonucleotide
accgagagcucaccaccgc

SEQ ID NO: 2869354 - RNA, 19 nt, Artificial Sequence
  Description of Artificial Sequence: Synthetic oligonucleotide
uucugaucgcuguuuccca

SEQ ID NO: 2869355 - RNA, 19 nt, Artificial Sequence
  Description of Artificial Sequence: Synthetic oligonucleotide
cucgcugccugcugggacg

SEQ ID NO: 2869356 - RNA, 19 nt, Artificial Sequence
  Description of Artificial Sequence: Synthetic oligonucleotide
accaccgccacacggaaau

SEQ ID NO: 2869357 - RNA, 19 nt, Artificial Sequence
  Description of Artificial Sequence: Synthetic oligonucleotide
uccccucgaaccgagagcu

SEQ ID NO: 2869358 - RNA, 19 nt, Artificial Sequence
  Description of Artificial Sequence: Synthetic oligonucleotide
uucucccuccacugggcgg

SEQ ID NO: 2869359 - RNA, 19 nt, Artificial Sequence
  Description of Artificial Sequence: Synthetic oligonucleotide
ucgaaccgagagcucacca

SEQ ID NO: 2869360 - RNA, 19 nt, Artificial Sequence
  Description of Artificial Sequence: Synthetic oligonucleotide
ucuggguaucaggaagucc

SEQ ID NO: 2869361 - RNA, 19 nt, Artificial Sequence
  Description of Artificial Sequence: Synthetic oligonucleotide
auagcggccuccacuggcc

SEQ ID NO: 2869362 - RNA, 19 nt, Artificial Sequence
  Description of Artificial Sequence: Synthetic oligonucleotide
guugcgcagcuccaguacc

SEQ ID NO: 2869363 - RNA, 19 nt, Artificial Sequence
  Description of Artificial Sequence: Synthetic oligonucleotide
uaguagguuuauucuaauu

SEQ ID NO: 2869364 - RNA, 19 nt, Artificial Sequence
  Description of Artificial Sequence: Synthetic oligonucleotide
acacggaaaugcgucucgc

SEQ ID NO: 2869365 - RNA, 19 nt, Artificial Sequence
  Description of Artificial Sequence: Synthetic oligonucleotide
ugcugggacggcguggccg

SEQ ID NO: 2869366 - RNA, 19 nt, Artificial Sequence
  Description of Artificial Sequence: Synthetic oligonucleotide
cauccccucgaaccgagag

SEQ ID NO: 2869367 - RNA, 19 nt, Artificial Sequence
  Description of Artificial Sequence: Synthetic oligonucleotide
ucgcuguuucccagucugg

SEQ ID NO: 2869368 - RNA, 19 nt, Artificial Sequence
  Description of Artificial Sequence: Synthetic oligonucleotide
cuuggcgcggauagcggcc

SEQ ID NO: 2869369 - RNA, 19 nt, Artificial Sequence
  Description of Artificial Sequence: Synthetic oligonucleotide
ugaucgcuguuucccaguc

SEQ ID NO: 2869370 - RNA, 19 nt, Artificial Sequence
  Description of Artificial Sequence: Synthetic oligonucleotide
aacuuggcgcggauagcgg

SEQ ID NO: 2869371 - RNA, 19 nt, Artificial Sequence
  Description of Artificial Sequence: Synthetic oligonucleotide
ugcgcccucagcauccgcu

SEQ ID NO: 2869372 - RNA, 19 nt, Artificial Sequence
  Description of Artificial Sequence: Synthetic oligonucleotide
agggcucauccccucgaac

SEQ ID NO: 2869373 - RNA, 19 nt, Artificial Sequence
  Description of Artificial Sequence: Synthetic oligonucleotide
guucucccuccacugggcg

SEQ ID NO: 2869374 - RNA, 19 nt, Artificial Sequence
  Description of Artificial Sequence: Synthetic oligonucleotide
ugcagagggcucauccccu

SEQ ID NO: 2869375 - RNA, 19 nt, Artificial Sequence
  Description of Artificial Sequence: Synthetic oligonucleotide
gggcucauccccucgaacc

SEQ ID NO: 2869376 - RNA, 19 nt, Artificial Sequence
  Description of Artificial Sequence: Synthetic oligonucleotide
uguuucccagucuggguau

SEQ ID NO: 2869377 - RNA, 19 nt, Artificial Sequence
  Description of Artificial Sequence: Synthetic oligonucleotide
uggcccauucugaucgcug

SEQ ID NO: 2869378 - RNA, 19 nt, Artificial Sequence
  Description of Artificial Sequence: Synthetic oligonucleotide
guggguucucccuccacug

SEQ ID NO: 2869379 - RNA, 19 nt, Artificial Sequence
  Description of Artificial Sequence: Synthetic oligonucleotide
uggguaucaggaagucccu

SEQ ID NO: 2869380 - RNA, 19 nt, Artificial Sequence
  Description of Artificial Sequence: Synthetic oligonucleotide
cagggcuugcuccaacuug

SEQ ID NO: 2869381 - RNA, 19 nt, Artificial Sequence
  Description of Artificial Sequence: Synthetic oligonucleotide
ggcucauccccucgaaccg

SEQ ID NO: 2869382 - RNA, 19 nt, Artificial Sequence
  Description of Artificial Sequence: Synthetic oligonucleotide
gagcucaccaccgccacac

SEQ ID NO: 2869383 - RNA, 19 nt, Artificial Sequence
  Description of Artificial Sequence: Synthetic oligonucleotide
auccgcucugugcucgccg

SEQ ID NO: 2869384 - RNA, 19 nt, Artificial Sequence
  Description of Artificial Sequence: Synthetic oligonucleotide
uugcgcagcuccaguaccu

SEQ ID NO: 2869385 - RNA, 19 nt, Artificial Sequence
  Description of Artificial Sequence: Synthetic oligonucleotide
guggccgccgcucucguug

SEQ ID NO: 2869386 - RNA, 19 nt, Artificial Sequence
  Description of Artificial Sequence: Synthetic oligonucleotide
ggaaaugcgucucgcugcc

SEQ ID NO: 2869387 - RNA, 19 nt, Artificial Sequence
  Description of Artificial Sequence: Synthetic oligonucleotide
guaucaggaagucccucga

SEQ ID NO: 2869388 - RNA, 19 nt, Artificial Sequence
  Description of Artificial Sequence: Synthetic oligonucleotide
ucucgcugccugcugggac

SEQ ID NO: 2869389 - RNA, 19 nt, Artificial Sequence
  Description of Artificial Sequence: Synthetic oligonucleotide
agcauccgcucugugcucg

SEQ ID NO: 2869390 - RNA, 19 nt, Artificial Sequence
  Description of Artificial Sequence: Synthetic oligonucleotide
gacagcgccgcgugaacca

SEQ ID NO: 2869391 - RNA, 19 nt, Artificial Sequence
  Description of Artificial Sequence: Synthetic oligonucleotide
ucuucgccuggauggccag

SEQ ID NO: 2869392 - RNA, 19 nt, Artificial Sequence
  Description of Artificial Sequence: Synthetic oligonucleotide
cucauccccucgaaccgag

SEQ ID NO: 2869393 - RNA, 19 nt, Artificial Sequence
  Description of Artificial Sequence: Synthetic oligonucleotide
gagagcucaccaccgccac

SEQ ID NO: 2869394 - RNA, 19 nt, Artificial Sequence
  Description of Artificial Sequence: Synthetic oligonucleotide
ggguucucccuccacuggg

SEQ ID NO: 2869395 - RNA, 19 nt, Artificial Sequence
  Description of Artificial Sequence: Synthetic oligonucleotide
agucuggguaucaggaagu

SEQ ID NO: 2869396 - RNA, 19 nt, Artificial Sequence
  Description of Artificial Sequence: Synthetic oligonucleotide
gcucguguccagcuguggg

SEQ ID NO: 2869397 - RNA, 19 nt, Artificial Sequence
  Description of Artificial Sequence: Synthetic oligonucleotide
accgccacacggaaaugcg

SEQ ID NO: 2869398 - RNA, 19 nt, Artificial Sequence
  Description of Artificial Sequence: Synthetic oligonucleotide
uguaccggcccagccagcu

SEQ ID NO: 2869399 - RNA, 19 nt, Artificial Sequence
  Description of Artificial Sequence: Synthetic oligonucleotide
uccgcucugugcucgccgc

SEQ ID NO: 2869400 - RNA, 19 nt, Artificial Sequence
  Description of Artificial Sequence: Synthetic oligonucleotide
ugcaccgggccaacugcgc

SEQ ID NO: 2869401 - RNA, 19 nt, Artificial Sequence
  Description of Artificial Sequence: Synthetic oligonucleotide
uuuggcccauucugaucgc

SEQ ID NO: 2869402 - RNA, 19 nt, Artificial Sequence
  Description of Artificial Sequence: Synthetic oligonucleotide
ucaccaccgccacacggaa

SEQ ID NO: 2869403 - RNA, 19 nt, Artificial Sequence
  Description of Artificial Sequence: Synthetic oligonucleotide
ucucguugcgcagcuccag

SEQ ID NO: 2869404 - RNA, 19 nt, Artificial Sequence
  Description of Artificial Sequence: Synthetic oligonucleotide
agcgccgcgugaaccagcc

SEQ ID NO: 2869405 - RNA, 19 nt, Artificial Sequence
  Description of Artificial Sequence: Synthetic oligonucleotide
gccagcuccuccgacagcg

SEQ ID NO: 2869406 - RNA, 19 nt, Artificial Sequence
  Description of Artificial Sequence: Synthetic oligonucleotide
gacgcacaggcgcgcgugg

SEQ ID NO: 2869407 - RNA, 19 nt, Artificial Sequence
  Description of Artificial Sequence: Synthetic oligonucleotide
uggccauggggaccgugca

SEQ ID NO: 2869408 - RNA, 19 nt, Artificial Sequence
  Description of Artificial Sequence: Synthetic oligonucleotide
gaaccagccggugccguug

SEQ ID NO: 2869409 - RNA, 19 nt, Artificial Sequence
  Description of Artificial Sequence: Synthetic oligonucleotide
agagggcucauccccucga

SEQ ID NO: 2869410 - RNA, 19 nt, Artificial Sequence
  Description of Artificial Sequence: Synthetic oligonucleotide
uucccagucuggguaucag

SEQ ID NO: 2869411 - RNA, 19 nt, Artificial Sequence
  Description of Artificial Sequence: Synthetic oligonucleotide
cagccagcuccuccgacag

SEQ ID NO: 2869412 - RNA, 19 nt, Artificial Sequence
  Description of Artificial Sequence: Synthetic oligonucleotide
caccgccacacggaaaugc

SEQ ID NO: 2869413 - RNA, 19 nt, Artificial Sequence
  Description of Artificial Sequence: Synthetic oligonucleotide
gauggccagcgcguguacc

SEQ ID NO: 2869414 - RNA, 19 nt, Artificial Sequence
  Description of Artificial Sequence: Synthetic oligonucleotide
cuguuucccagucugggua

SEQ ID NO: 2869415 - RNA, 19 nt, Artificial Sequence
  Description of Artificial Sequence: Synthetic oligonucleotide
ggcuugcuccaacuuggcg

SEQ ID NO: 2869416 - RNA, 19 nt, Artificial Sequence
  Description of Artificial Sequence: Synthetic oligonucleotide
uuauucuaauuuggcccau

SEQ ID NO: 2869417 - RNA, 19 nt, Artificial Sequence
  Description of Artificial Sequence: Synthetic oligonucleotide
gcucaccaccgccacacgg

SEQ ID NO: 2869418 - RNA, 19 nt, Artificial Sequence
  Description of Artificial Sequence: Synthetic oligonucleotide
ugccguugcagagggcuca

SEQ ID NO: 2869419 - RNA, 19 nt, Artificial Sequence
  Description of Artificial Sequence: Synthetic oligonucleotide
cagagggcucauccccucg

SEQ ID NO: 2869420 - RNA, 19 nt, Artificial Sequence
  Description of Artificial Sequence: Synthetic oligonucleotide
gcgugaaccagccggugcc

SEQ ID NO: 2869421 - RNA, 19 nt, Artificial Sequence
  Description of Artificial Sequence: Synthetic oligonucleotide
agcuccuccgacagcgccg

SEQ ID NO: 2869422 - RNA, 19 nt, Artificial Sequence
  Description of Artificial Sequence: Synthetic oligonucleotide
uauucuaauuuggcccauu

SEQ ID NO: 2869423 - RNA, 19 nt, Artificial Sequence
  Description of Artificial Sequence: Synthetic oligonucleotide
cguugcagagggcucaucc

SEQ ID NO: 2869424 - RNA, 19 nt, Artificial Sequence
  Description of Artificial Sequence: Synthetic oligonucleotide
agccggugccguugcagag

SEQ ID NO: 2869425 - RNA, 19 nt, Artificial Sequence
  Description of Artificial Sequence: Synthetic oligonucleotide
caccgggccaacugcgccc

SEQ ID NO: 2869426 - RNA, 19 nt, Artificial Sequence
  Description of Artificial Sequence: Synthetic oligonucleotide
cuccacuggcccuccggcc

SEQ ID NO: 2869427 - RNA, 19 nt, Artificial Sequence
  Description of Artificial Sequence: Synthetic oligonucleotide
ucguugcgcagcuccagua

SEQ ID NO: 2869428 - RNA, 19 nt, Artificial Sequence
  Description of Artificial Sequence: Synthetic oligonucleotide
ugcgucucgcugccugcug

SEQ ID NO: 2869429 - RNA, 19 nt, Artificial Sequence
  Description of Artificial Sequence: Synthetic oligonucleotide
cagcuccuccgacagcgcc

SEQ ID NO: 2869430 - RNA, 19 nt, Artificial Sequence
  Description of Artificial Sequence: Synthetic oligonucleotide
guggccauggggaccgugc

SEQ ID NO: 2869431 - RNA, 19 nt, Artificial Sequence
  Description of Artificial Sequence: Synthetic oligonucleotide
cgaguuucuugcuuccacc

SEQ ID NO: 2869432 - RNA, 19 nt, Artificial Sequence
  Description of Artificial Sequence: Synthetic oligonucleotide
guaccucggggcucagggc

SEQ ID NO: 2869433 - RNA, 19 nt, Artificial Sequence
  Description of Artificial Sequence: Synthetic oligonucleotide
uggccagcgcguguaccgg

SEQ ID NO: 2869434 - RNA, 19 nt, Artificial Sequence
  Description of Artificial Sequence: Synthetic oligonucleotide
ggcccagccagcuccuccg

SEQ ID NO: 2869435 - RNA, 19 nt, Artificial Sequence
  Description of Artificial Sequence: Synthetic oligonucleotide
uagcggccuccacuggccc

SEQ ID NO: 2869436 - RNA, 19 nt, Artificial Sequence
  Description of Artificial Sequence: Synthetic oligonucleotide
cggaaaugcgucucgcugc

SEQ ID NO: 2869437 - RNA, 19 nt, Artificial Sequence
  Description of Artificial Sequence: Synthetic oligonucleotide
ucccucgaguuucuugcuu

SEQ ID NO: 2869438 - RNA, 19 nt, Artificial Sequence
  Description of Artificial Sequence: Synthetic oligonucleotide
uccgacagcgccgcgugaa

SEQ ID NO: 2869439 - RNA, 19 nt, Artificial Sequence
  Description of Artificial Sequence: Synthetic oligonucleotide
uggauggccagcgcgugua

SEQ ID NO: 2869440 - RNA, 19 nt, Artificial Sequence
  Description of Artificial Sequence: Synthetic oligonucleotide
cucgaaccgagagcucacc

SEQ ID NO: 2869441 - RNA, 19 nt, Artificial Sequence
  Description of Artificial Sequence: Synthetic oligonucleotide
ucauccccucgaaccgaga

SEQ ID NO: 2869442 - RNA, 19 nt, Artificial Sequence
  Description of Artificial Sequence: Synthetic oligonucleotide
agcucaccaccgccacacg

SEQ ID NO: 2869443 - RNA, 19 nt, Artificial Sequence
  Description of Artificial Sequence: Synthetic oligonucleotide
agagcucaccaccgccaca

SEQ ID NO: 2869444 - RNA, 19 nt, Artificial Sequence
  Description of Artificial Sequence: Synthetic oligonucleotide
ugcuccaacuuggcgcgga

SEQ ID NO: 2869445 - RNA, 19 nt, Artificial Sequence
  Description of Artificial Sequence: Synthetic oligonucleotide
cagcuccaguaccucgggg

SEQ ID NO: 2869446 - RNA, 19 nt, Artificial Sequence
  Description of Artificial Sequence: Synthetic oligonucleotide
gugcaccgggccaacugcg

SEQ ID NO: 2869447 - RNA, 19 nt, Artificial Sequence
  Description of Artificial Sequence: Synthetic oligonucleotide
ucgcugccugcugggacgg

SEQ ID NO: 2869448 - RNA, 19 nt, Artificial Sequence
  Description of Artificial Sequence: Synthetic oligonucleotide
caacugcgcccucagcauc

SEQ ID NO: 2869449 - RNA, 19 nt, Artificial Sequence
  Description of Artificial Sequence: Synthetic oligonucleotide
acgcacaggcgcgcguggc

SEQ ID NO: 2869450 - RNA, 19 nt, Artificial Sequence
  Description of Artificial Sequence: Synthetic oligonucleotide
ucguguccagcuguggguu

SEQ ID NO: 2869451 - RNA, 19 nt, Artificial Sequence
  Description of Artificial Sequence: Synthetic oligonucleotide
gccauggggaccgugcacc

SEQ ID NO: 2869452 - RNA, 19 nt, Artificial Sequence
  Description of Artificial Sequence: Synthetic oligonucleotide
uuggcccauucugaucgcu

SEQ ID NO: 2869453 - RNA, 19 nt, Artificial Sequence
  Description of Artificial Sequence: Synthetic oligonucleotide
gcuuccaccuagggcaggg

SEQ ID NO: 2869454 - RNA, 19 nt, Artificial Sequence
  Description of Artificial Sequence: Synthetic oligonucleotide
gcagcuccaguaccucggg

SEQ ID NO: 2869455 - RNA, 19 nt, Artificial Sequence
  Description of Artificial Sequence: Synthetic oligonucleotide
uccuccgacagcgccgcgu

SEQ ID NO: 2869456 - RNA, 19 nt, Artificial Sequence
  Description of Artificial Sequence: Synthetic oligonucleotide
ccucgaguuucuugcuucc

SEQ ID NO: 2869457 - RNA, 19 nt, Artificial Sequence
  Description of Artificial Sequence: Synthetic oligonucleotide
uggggaccgugcaccgggc

SEQ ID NO: 2869458 - RNA, 19 nt, Artificial Sequence
  Description of Artificial Sequence: Synthetic oligonucleotide
ugccugcugggacggcgug

SEQ ID NO: 2869459 - RNA, 19 nt, Artificial Sequence
  Description of Artificial Sequence: Synthetic oligonucleotide
cuuccaccuagggcagggg

SEQ ID NO: 2869460 - RNA, 19 nt, Artificial Sequence
  Description of Artificial Sequence: Synthetic oligonucleotide
cccagucuggguaucagga

SEQ ID NO: 2869461 - RNA, 19 nt, Artificial Sequence
  Description of Artificial Sequence: Synthetic oligonucleotide
ggauagcggccuccacugg

SEQ ID NO: 2869462 - RNA, 19 nt, Artificial Sequence
  Description of Artificial Sequence: Synthetic oligonucleotide
gcgucucgcugccugcugg

SEQ ID NO: 2869463 - RNA, 19 nt, Artificial Sequence
  Description of Artificial Sequence: Synthetic oligonucleotide
ugggacggcguggccgccg

SEQ ID NO: 2869464 - RNA, 19 nt, Artificial Sequence
  Description of Artificial Sequence: Synthetic oligonucleotide
ucgccuggauggccagcgc

SEQ ID NO: 2869465 - RNA, 19 nt, Artificial Sequence
  Description of Artificial Sequence: Synthetic oligonucleotide
cucugugcucgccgcgcag

SEQ ID NO: 2869466 - RNA, 19 nt, Artificial Sequence
  Description of Artificial Sequence: Synthetic oligonucleotide
ccauucugaucgcuguuuc

SEQ ID NO: 2869467 - RNA, 19 nt, Artificial Sequence
  Description of Artificial Sequence: Synthetic oligonucleotide
acagcgccgcgugaaccag

SEQ ID NO: 2869468 - RNA, 19 nt, Artificial Sequence
  Description of Artificial Sequence: Synthetic oligonucleotide
gcugggacggcguggccgc

SEQ ID NO: 2869469 - RNA, 19 nt, Artificial Sequence
  Description of Artificial Sequence: Synthetic oligonucleotide
cccucgaguuucuugcuuc

SEQ ID NO: 2869470 - RNA, 19 nt, Artificial Sequence
  Description of Artificial Sequence: Synthetic oligonucleotide
uuggcgcggauagcggccu

SEQ ID NO: 2869471 - RNA, 19 nt, Artificial Sequence
  Description of Artificial Sequence: Synthetic oligonucleotide
gucuucgccuggauggcca

SEQ ID NO: 2869472 - RNA, 19 nt, Artificial Sequence
  Description of Artificial Sequence: Synthetic oligonucleotide
gucuggguaucaggaaguc

SEQ ID NO: 2869473 - RNA, 19 nt, Artificial Sequence
  Description of Artificial Sequence: Synthetic oligonucleotide
ucccgcgcugucccgcgac

SEQ ID NO: 2869474 - RNA, 19 nt, Artificial Sequence
  Description of Artificial Sequence: Synthetic oligonucleotide
cguguaccggcccagccag

SEQ ID NO: 2869475 - RNA, 19 nt, Artificial Sequence
  Description of Artificial Sequence: Synthetic oligonucleotide
acugcgcccucagcauccg

SEQ ID NO: 2869476 - RNA, 19 nt, Artificial Sequence
  Description of Artificial Sequence: Synthetic oligonucleotide
cgccgcgugaaccagccgg

SEQ ID NO: 2869477 - RNA, 19 nt, Artificial Sequence
  Description of Artificial Sequence: Synthetic oligonucleotide
uggccgccgcucucguugc

SEQ ID NO: 2869478 - RNA, 19 nt, Artificial Sequence
  Description of Artificial Sequence: Synthetic oligonucleotide
cggauagcggccuccacug

SEQ ID NO: 2869479 - RNA, 19 nt, Artificial Sequence
  Description of Artificial Sequence: Synthetic oligonucleotide
gccgaucccgcgcuguccc

SEQ ID NO: 2869480 - RNA, 19 nt, Artificial Sequence
  Description of Artificial Sequence: Synthetic oligonucleotide
cucguguccagcugugggu

SEQ ID NO: 2869481 - RNA, 19 nt, Artificial Sequence
  Description of Artificial Sequence: Synthetic oligonucleotide
cuguggguucucccuccac

SEQ ID NO: 2869482 - RNA, 19 nt, Artificial Sequence
  Description of Artificial Sequence: Synthetic oligonucleotide
gguucucccuccacugggc

SEQ ID NO: 2869483 - RNA, 19 nt, Artificial Sequence
  Description of Artificial Sequence: Synthetic oligonucleotide
gcugccugcugggacggcg

SEQ ID NO: 2869484 - RNA, 19 nt, Artificial Sequence
  Description of Artificial Sequence: Synthetic oligonucleotide
cgaaccgagagcucaccac

SEQ ID NO: 2869485 - RNA, 19 nt, Artificial Sequence
  Description of Artificial Sequence: Synthetic oligonucleotide
gaucgcuguuucccagucu

SEQ ID NO: 2869486 - RNA, 19 nt, Artificial Sequence
  Description of Artificial Sequence: Synthetic oligonucleotide
uugcuccaacuuggcgcgg

SEQ ID NO: 2869487 - RNA, 19 nt, Artificial Sequence
  Description of Artificial Sequence: Synthetic oligonucleotide
agcgcguguaccggcccag

SEQ ID NO: 2869488 - RNA, 19 nt, Artificial Sequence
  Description of Artificial Sequence: Synthetic oligonucleotide
gagggcucauccccucgaa

SEQ ID NO: 2869489 - RNA, 19 nt, Artificial Sequence
  Description of Artificial Sequence: Synthetic oligonucleotide
ccggugccguugcagaggg

SEQ ID NO: 2869490 - RNA, 19 nt, Artificial Sequence
  Description of Artificial Sequence: Synthetic oligonucleotide
agcggccuccacuggcccu

SEQ ID NO: 2869491 - RNA, 19 nt, Artificial Sequence
  Description of Artificial Sequence: Synthetic oligonucleotide
gccuccacuggcccuccgg

SEQ ID NO: 2869492 - RNA, 19 nt, Artificial Sequence
  Description of Artificial Sequence: Synthetic oligonucleotide
ggugccguugcagagggcu

SEQ ID NO: 2869493 - RNA, 19 nt, Artificial Sequence
  Description of Artificial Sequence: Synthetic oligonucleotide
cagccggugccguugcaga

SEQ ID NO: 2869494 - RNA, 19 nt, Artificial Sequence
  Description of Artificial Sequence: Synthetic oligonucleotide
ggcgcgcguggccaugggg

SEQ ID NO: 2869495 - RNA, 19 nt, Artificial Sequence
  Description of Artificial Sequence: Synthetic oligonucleotide
acggcguggccgccgcucu

SEQ ID NO: 2869496 - RNA, 19 nt, Artificial Sequence
  Description of Artificial Sequence: Synthetic oligonucleotide
gcaccgggccaacugcgcc

SEQ ID NO: 2869497 - RNA, 19 nt, Artificial Sequence
  Description of Artificial Sequence: Synthetic oligonucleotide
cccgcgacgcacaggcgcg

SEQ ID NO: 2869498 - RNA, 19 nt, Artificial Sequence
  Description of Artificial Sequence: Synthetic oligonucleotide
cagcgccgcgugaaccagc

SEQ ID NO: 2869499 - RNA, 19 nt, Artificial Sequence
  Description of Artificial Sequence: Synthetic oligonucleotide
cuucgccuggauggccagc

SEQ ID NO: 2869500 - RNA, 19 nt, Artificial Sequence
  Description of Artificial Sequence: Synthetic oligonucleotide
cgugcaccgggccaacugc

SEQ ID NO: 2869501 - RNA, 19 nt, Artificial Sequence
  Description of Artificial Sequence: Synthetic oligonucleotide
gacggcguggccgccgcuc

SEQ ID NO: 2869502 - RNA, 19 nt, Artificial Sequence
  Description of Artificial Sequence: Synthetic oligonucleotide
cauccgcucugugcucgcc

SEQ ID NO: 2869503 - RNA, 19 nt, Artificial Sequence
  Description of Artificial Sequence: Synthetic oligonucleotide
cucgaguuucuugcuucca

SEQ ID NO: 2869504 - RNA, 19 nt, Artificial Sequence
  Description of Artificial Sequence: Synthetic oligonucleotide
gccggugccguugcagagg

SEQ ID NO: 2869505 - RNA, 19 nt, Artificial Sequence
  Description of Artificial Sequence: Synthetic oligonucleotide
guuucccagucuggguauc

SEQ ID NO: 2869506 - RNA, 19 nt, Artificial Sequence
  Description of Artificial Sequence: Synthetic oligonucleotide
cacggaaaugcgucucgcu

SEQ ID NO: 2869507 - RNA, 19 nt, Artificial Sequence
  Description of Artificial Sequence: Synthetic oligonucleotide
cugaucgcuguuucccagu

SEQ ID NO: 2869508 - RNA, 19 nt, Artificial Sequence
  Description of Artificial Sequence: Synthetic oligonucleotide
gcguguaccggcccagcca

SEQ ID NO: 2869509 - RNA, 19 nt, Artificial Sequence
  Description of Artificial Sequence: Synthetic oligonucleotide
cgcuguuucccagucuggg

SEQ ID NO: 2869510 - RNA, 19 nt, Artificial Sequence
  Description of Artificial Sequence: Synthetic oligonucleotide
augcgucucgcugccugcu

SEQ ID NO: 2869511 - RNA, 19 nt, Artificial Sequence
  Description of Artificial Sequence: Synthetic oligonucleotide
cgccacacggaaaugcguc

SEQ ID NO: 2869512 - RNA, 19 nt, Artificial Sequence
  Description of Artificial Sequence: Synthetic oligonucleotide
ggcguggccgccgcucucg

SEQ ID NO: 2869513 - RNA, 19 nt, Artificial Sequence
  Description of Artificial Sequence: Synthetic oligonucleotide
cagcauccgcucugugcuc

SEQ ID NO: 2869514 - RNA, 19 nt, Artificial Sequence
  Description of Artificial Sequence: Synthetic oligonucleotide
caggcgcgcguggccaugg

SEQ ID NO: 2869515 - RNA, 19 nt, Artificial Sequence
  Description of Artificial Sequence: Synthetic oligonucleotide
gggaccgugcaccgggcca

SEQ ID NO: 2869516 - RNA, 19 nt, Artificial Sequence
  Description of Artificial Sequence: Synthetic oligonucleotide
ccucgaaccgagagcucac

SEQ ID NO: 2869517 - RNA, 19 nt, Artificial Sequence
  Description of Artificial Sequence: Synthetic oligonucleotide
aggcgcgcguggccauggg

SEQ ID NO: 2869518 - RNA, 19 nt, Artificial Sequence
  Description of Artificial Sequence: Synthetic oligonucleotide
uguccagcuguggguucuc

SEQ ID NO: 2869519 - RNA, 19 nt, Artificial Sequence
  Description of Artificial Sequence: Synthetic oligonucleotide
ggucuucgccuggauggcc

SEQ ID NO: 2869520 - RNA, 19 nt, Artificial Sequence
  Description of Artificial Sequence: Synthetic oligonucleotide
accgggccaacugcgcccu

SEQ ID NO: 2869521 - RNA, 19 nt, Artificial Sequence
  Description of Artificial Sequence: Synthetic oligonucleotide
uggcccuccggccgccgau

SEQ ID NO: 2869522 - RNA, 19 nt, Artificial Sequence
  Description of Artificial Sequence: Synthetic oligonucleotide
cguugcgcagcuccaguac

SEQ ID NO: 2869523 - RNA, 19 nt, Artificial Sequence
  Description of Artificial Sequence: Synthetic oligonucleotide
gcggauagcggccuccacu

SEQ ID NO: 2869524 - RNA, 19 nt, Artificial Sequence
  Description of Artificial Sequence: Synthetic oligonucleotide
cgccuggauggccagcgcg

SEQ ID NO: 2869525 - RNA, 19 nt, Artificial Sequence
  Description of Artificial Sequence: Synthetic oligonucleotide
gggucuucgccuggauggc

SEQ ID NO: 2869526 - RNA, 19 nt, Artificial Sequence
  Description of Artificial Sequence: Synthetic oligonucleotide
ggcccauucugaucgcugu

SEQ ID NO: 2869527 - RNA, 19 nt, Artificial Sequence
  Description of Artificial Sequence: Synthetic oligonucleotide
gcuguuucccagucugggu

SEQ ID NO: 2869528 - RNA, 19 nt, Artificial Sequence
  Description of Artificial Sequence: Synthetic oligonucleotide
ucggggcucagggcuugcu

SEQ ID NO: 2869529 - RNA, 19 nt, Artificial Sequence
  Description of Artificial Sequence: Synthetic oligonucleotide
ggccauggggaccgugcac

SEQ ID NO: 2869530 - RNA, 19 nt, Artificial Sequence
  Description of Artificial Sequence: Synthetic oligonucleotide
ccuccgacagcgccgcgug

SEQ ID NO: 2869531 - RNA, 19 nt, Artificial Sequence
  Description of Artificial Sequence: Synthetic oligonucleotide
guaccggcccagccagcuc

SEQ ID NO: 2869532 - RNA, 19 nt, Artificial Sequence
  Description of Artificial Sequence: Synthetic oligonucleotide
gcuccuccgacagcgccgc

SEQ ID NO: 2869533 - RNA, 19 nt, Artificial Sequence
  Description of Artificial Sequence: Synthetic oligonucleotide
ccagccagcuccuccgaca

SEQ ID NO: 2869534 - RNA, 19 nt, Artificial Sequence
  Description of Artificial Sequence: Synthetic oligonucleotide
ggccagcgcguguaccggc

SEQ ID NO: 2869535 - RNA, 19 nt, Artificial Sequence
  Description of Artificial Sequence: Synthetic oligonucleotide
ggggaccgugcaccgggcc

SEQ ID NO: 2869536 - RNA, 19 nt, Artificial Sequence
  Description of Artificial Sequence: Synthetic oligonucleotide
cgcgugaaccagccggugc

SEQ ID NO: 2869537 - RNA, 19 nt, Artificial Sequence
  Description of Artificial Sequence: Synthetic oligonucleotide
ggguaucaggaagucccuc

SEQ ID NO: 2869538 - RNA, 19 nt, Artificial Sequence
  Description of Artificial Sequence: Synthetic oligonucleotide
gccgcucucguugcgcagc

SEQ ID NO: 2869539 - RNA, 19 nt, Artificial Sequence
  Description of Artificial Sequence: Synthetic oligonucleotide
gcucagggcuugcuccaac

SEQ ID NO: 2869540 - RNA, 19 nt, Artificial Sequence
  Description of Artificial Sequence: Synthetic oligonucleotide
gcagagggcucauccccuc

SEQ ID NO: 2869541 - RNA, 19 nt, Artificial Sequence
  Description of Artificial Sequence: Synthetic oligonucleotide
cugcgcccucagcauccgc

SEQ ID NO: 2869542 - RNA, 19 nt, Artificial Sequence
  Description of Artificial Sequence: Synthetic oligonucleotide
gcuccaguaccucggggcu

SEQ ID NO: 2869543 - RNA, 19 nt, Artificial Sequence
  Description of Artificial Sequence: Synthetic oligonucleotide
cucguugcgcagcuccagu

SEQ ID NO: 2869544 - RNA, 19 nt, Artificial Sequence
  Description of Artificial Sequence: Synthetic oligonucleotide
cugcugggacggcguggcc

SEQ ID NO: 2869545 - RNA, 19 nt, Artificial Sequence
  Description of Artificial Sequence: Synthetic oligonucleotide
ccgugcaccgggccaacug

SEQ ID NO: 2869546 - RNA, 19 nt, Artificial Sequence
  Description of Artificial Sequence: Synthetic oligonucleotide
ggauggccagcgcguguac

SEQ ID NO: 2869547 - RNA, 19 nt, Artificial Sequence
  Description of Artificial Sequence: Synthetic oligonucleotide
ccagccggugccguugcag

SEQ ID NO: 2869548 - RNA, 19 nt, Artificial Sequence
  Description of Artificial Sequence: Synthetic oligonucleotide
acaggcgcgcguggccaug

SEQ ID NO: 2869549 - RNA, 19 nt, Artificial Sequence
  Description of Artificial Sequence: Synthetic oligonucleotide
cccucgaaccgagagcuca

SEQ ID NO: 2869550 - RNA, 19 nt, Artificial Sequence
  Description of Artificial Sequence: Synthetic oligonucleotide
gugccguugcagagggcuc

SEQ ID NO: 2869551 - RNA, 19 nt, Artificial Sequence
  Description of Artificial Sequence: Synthetic oligonucleotide
accagccggugccguugca

SEQ ID NO: 2869552 - RNA, 19 nt, Artificial Sequence
  Description of Artificial Sequence: Synthetic oligonucleotide
gucccucgaguuucuugcu

SEQ ID NO: 2869553 - RNA, 19 nt, Artificial Sequence
  Description of Artificial Sequence: Synthetic oligonucleotide
cgucucgcugccugcuggg

SEQ ID NO: 2869554 - RNA, 19 nt, Artificial Sequence
  Description of Artificial Sequence: Synthetic oligonucleotide
caggaagucccucgaguuu

SEQ ID NO: 2869555 - RNA, 19 nt, Artificial Sequence
  Description of Artificial Sequence: Synthetic oligonucleotide
cgcguggccauggggaccg

SEQ ID NO: 2869556 - RNA, 19 nt, Artificial Sequence
  Description of Artificial Sequence: Synthetic oligonucleotide
acuggcccuccggccgccg

SEQ ID NO: 2869557 - RNA, 19 nt, Artificial Sequence
  Description of Artificial Sequence: Synthetic oligonucleotide
cgagagcucaccaccgcca

SEQ ID NO: 2869558 - RNA, 19 nt, Artificial Sequence
  Description of Artificial Sequence: Synthetic oligonucleotide
ccagucuggguaucaggaa

SEQ ID NO: 2869559 - RNA, 19 nt, Artificial Sequence
  Description of Artificial Sequence: Synthetic oligonucleotide
gccugcugggacggcgugg

SEQ ID NO: 2869560 - RNA, 19 nt, Artificial Sequence
  Description of Artificial Sequence: Synthetic oligonucleotide
ggcgcggauagcggccucc

SEQ ID NO: 2869561 - RNA, 19 nt, Artificial Sequence
  Description of Artificial Sequence: Synthetic oligonucleotide
ggccaacugcgcccucagc

SEQ ID NO: 2869562 - RNA, 19 nt, Artificial Sequence
  Description of Artificial Sequence: Synthetic oligonucleotide
gcauccgcucugugcucgc

SEQ ID NO: 2869563 - RNA, 19 nt, Artificial Sequence
  Description of Artificial Sequence: Synthetic oligonucleotide
gggacggcguggccgccgc

SEQ ID NO: 2869564 - RNA, 19 nt, Artificial Sequence
  Description of Artificial Sequence: Synthetic oligonucleotide
guguccagcuguggguucu

SEQ ID NO: 2869565 - RNA, 19 nt, Artificial Sequence
  Description of Artificial Sequence: Synthetic oligonucleotide
gucccgcgacgcacaggcg

SEQ ID NO: 2869566 - RNA, 19 nt, Artificial Sequence
  Description of Artificial Sequence: Synthetic oligonucleotide
gggcuugcuccaacuuggc

SEQ ID NO: 2869567 - RNA, 19 nt, Artificial Sequence
  Description of Artificial Sequence: Synthetic oligonucleotide
ccagcuccuccgacagcgc

SEQ ID NO: 2869568 - RNA, 19 nt, Artificial Sequence
  Description of Artificial Sequence: Synthetic oligonucleotide
uggcgcggauagcggccuc

SEQ ID NO: 2869569 - RNA, 19 nt, Artificial Sequence
  Description of Artificial Sequence: Synthetic oligonucleotide
cagcgcguguaccggccca

SEQ ID NO: 2869570 - RNA, 19 nt, Artificial Sequence
  Description of Artificial Sequence: Synthetic oligonucleotide
aucccgcgcugucccgcga

SEQ ID NO: 2869571 - RNA, 19 nt, Artificial Sequence
  Description of Artificial Sequence: Synthetic oligonucleotide
gcgcgcguggccaugggga

SEQ ID NO: 2869572 - RNA, 19 nt, Artificial Sequence
  Description of Artificial Sequence: Synthetic oligonucleotide
ccagcgcguguaccggccc

SEQ ID NO: 2869573 - RNA, 19 nt, Artificial Sequence
  Description of Artificial Sequence: Synthetic oligonucleotide
gaaaugcgucucgcugccu

SEQ ID NO: 2869574 - RNA, 19 nt, Artificial Sequence
  Description of Artificial Sequence: Synthetic oligonucleotide
gccagcgcguguaccggcc

SEQ ID NO: 2869575 - RNA, 19 nt, Artificial Sequence
  Description of Artificial Sequence: Synthetic oligonucleotide
cgugaaccagccggugccg

SEQ ID NO: 2869576 - RNA, 19 nt, Artificial Sequence
  Description of Artificial Sequence: Synthetic oligonucleotide
gaccgugcaccgggccaac

SEQ ID NO: 2869577 - RNA, 19 nt, Artificial Sequence
  Description of Artificial Sequence: Synthetic oligonucleotide
guguaccggcccagccagc

SEQ ID NO: 2869578 - RNA, 19 nt, Artificial Sequence
  Description of Artificial Sequence: Synthetic oligonucleotide
ccuggauggccagcgcgug

SEQ ID NO: 2869579 - RNA, 19 nt, Artificial Sequence
  Description of Artificial Sequence: Synthetic oligonucleotide
gcucauccccucgaaccga

SEQ ID NO: 2869580 - RNA, 19 nt, Artificial Sequence
  Description of Artificial Sequence: Synthetic oligonucleotide
cuccuccgacagcgccgcg

SEQ ID NO: 2869581 - RNA, 19 nt, Artificial Sequence
  Description of Artificial Sequence: Synthetic oligonucleotide
gcgcccucagcauccgcuc

SEQ ID NO: 2869582 - RNA, 19 nt, Artificial Sequence
  Description of Artificial Sequence: Synthetic oligonucleotide
gcucugugcucgccgcgca

SEQ ID NO: 2869583 - RNA, 19 nt, Artificial Sequence
  Description of Artificial Sequence: Synthetic oligonucleotide
accgugcaccgggccaacu

SEQ ID NO: 2869584 - RNA, 19 nt, Artificial Sequence
  Description of Artificial Sequence: Synthetic oligonucleotide
ccggccgccgaucccgcgc

SEQ ID NO: 2869585 - RNA, 19 nt, Artificial Sequence
  Description of Artificial Sequence: Synthetic oligonucleotide
cgcguguaccggcccagcc

SEQ ID NO: 2869586 - RNA, 19 nt, Artificial Sequence
  Description of Artificial Sequence: Synthetic oligonucleotide
ccacuggcccuccggccgc

SEQ ID NO: 2869587 - RNA, 19 nt, Artificial Sequence
  Description of Artificial Sequence: Synthetic oligonucleotide
gcacaggcgcgcguggcca

SEQ ID NO: 2869588 - RNA, 19 nt, Artificial Sequence
  Description of Artificial Sequence: Synthetic oligonucleotide
cugccugcugggacggcgu

SEQ ID NO: 2869589 - RNA, 19 nt, Artificial Sequence
  Description of Artificial Sequence: Synthetic oligonucleotide
caccaccgccacacggaaa

SEQ ID NO: 2869590 - RNA, 19 nt, Artificial Sequence
  Description of Artificial Sequence: Synthetic oligonucleotide
cgacagcgccgcgugaacc

SEQ ID NO: 2869591 - RNA, 19 nt, Artificial Sequence
  Description of Artificial Sequence: Synthetic oligonucleotide
gggcucguguccagcugug

SEQ ID NO: 2869592 - RNA, 19 nt, Artificial Sequence
  Description of Artificial Sequence: Synthetic oligonucleotide
ccgaucccgcgcugucccg

SEQ ID NO: 2869593 - RNA, 19 nt, Artificial Sequence
  Description of Artificial Sequence: Synthetic oligonucleotide
cuggauggccagcgcgugu

SEQ ID NO: 2869594 - RNA, 19 nt, Artificial Sequence
  Description of Artificial Sequence: Synthetic oligonucleotide
ggaccgugcaccgggccaa

SEQ ID NO: 2869595 - RNA, 19 nt, Artificial Sequence
  Description of Artificial Sequence: Synthetic oligonucleotide
cgcacaggcgcgcguggcc

SEQ ID NO: 2869596 - RNA, 19 nt, Artificial Sequence
  Description of Artificial Sequence: Synthetic oligonucleotide
cuccaacuuggcgcggaua

SEQ ID NO: 2869597 - RNA, 19 nt, Artificial Sequence
  Description of Artificial Sequence: Synthetic oligonucleotide
cacuggcccuccggccgcc

SEQ ID NO: 2869598 - RNA, 19 nt, Artificial Sequence
  Description of Artificial Sequence: Synthetic oligonucleotide
gccgccgcucucguugcgc

SEQ ID NO: 2869599 - RNA, 19 nt, Artificial Sequence
  Description of Artificial Sequence: Synthetic oligonucleotide
ccgacagcgccgcgugaac

SEQ ID NO: 2869600 - RNA, 19 nt, Artificial Sequence
  Description of Artificial Sequence: Synthetic oligonucleotide
gcccuccggccgccgaucc

SEQ ID NO: 2869601 - RNA, 19 nt, Artificial Sequence
  Description of Artificial Sequence: Synthetic oligonucleotide
cccgcgcugucccgcgacg

SEQ ID NO: 2869602 - RNA, 19 nt, Artificial Sequence
  Description of Artificial Sequence: Synthetic oligonucleotide
cccagccagcuccuccgac

SEQ ID NO: 2869603 - RNA, 19 nt, Artificial Sequence
  Description of Artificial Sequence: Synthetic oligonucleotide
cugggacggcguggccgcc

SEQ ID NO: 2869604 - RNA, 19 nt, Artificial Sequence
  Description of Artificial Sequence: Synthetic oligonucleotide
ccaacugcgcccucagcau

SEQ ID NO: 2869605 - RNA, 19 nt, Artificial Sequence
  Description of Artificial Sequence: Synthetic oligonucleotide
ggccgccgcucucguugcg

SEQ ID NO: 2869606 - RNA, 19 nt, Artificial Sequence
  Description of Artificial Sequence: Synthetic oligonucleotide
ccucagcauccgcucugug

SEQ ID NO: 2869607 - RNA, 19 nt, Artificial Sequence
  Description of Artificial Sequence: Synthetic oligonucleotide
cuccgacagcgccgcguga

SEQ ID NO: 2869608 - RNA, 19 nt, Artificial Sequence
  Description of Artificial Sequence: Synthetic oligonucleotide
ggccuccacuggcccuccg

SEQ ID NO: 2869609 - RNA, 19 nt, Artificial Sequence
  Description of Artificial Sequence: Synthetic oligonucleotide
gcgcugucccgcgacgcac

SEQ ID NO: 2869610 - RNA, 19 nt, Artificial Sequence
  Description of Artificial Sequence: Synthetic oligonucleotide
cgcgcguggccauggggac

SEQ ID NO: 2869611 - RNA, 19 nt, Artificial Sequence
  Description of Artificial Sequence: Synthetic oligonucleotide
cguguccagcuguggguuc

SEQ ID NO: 2869612 - RNA, 19 nt, Artificial Sequence
  Description of Artificial Sequence: Synthetic oligonucleotide
gaagucccucgaguuucuu

SEQ ID NO: 2869613 - RNA, 19 nt, Artificial Sequence
  Description of Artificial Sequence: Synthetic oligonucleotide
gcgccgcgugaaccagccg

SEQ ID NO: 2869614 - RNA, 19 nt, Artificial Sequence
  Description of Artificial Sequence: Synthetic oligonucleotide
cgcucugugcucgccgcgc

SEQ ID NO: 2869615 - RNA, 19 nt, Artificial Sequence
  Description of Artificial Sequence: Synthetic oligonucleotide
cuggcccuccggccgccga

SEQ ID NO: 2869616 - RNA, 19 nt, Artificial Sequence
  Description of Artificial Sequence: Synthetic oligonucleotide
gcgcguggccauggggacc

SEQ ID NO: 2869617 - RNA, 19 nt, Artificial Sequence
  Description of Artificial Sequence: Synthetic oligonucleotide
ggaagucccucgaguuucu

SEQ ID NO: 2869618 - RNA, 19 nt, Artificial Sequence
  Description of Artificial Sequence: Synthetic oligonucleotide
gcggccuccacuggcccuc

SEQ ID NO: 2869619 - RNA, 19 nt, Artificial Sequence
  Description of Artificial Sequence: Synthetic oligonucleotide
cgaucccgcgcugucccgc

SEQ ID NO: 2869620 - RNA, 19 nt, Artificial Sequence
  Description of Artificial Sequence: Synthetic oligonucleotide
gccuggauggccagcgcgu

SEQ ID NO: 2869621 - RNA, 19 nt, Artificial Sequence
  Description of Artificial Sequence: Synthetic oligonucleotide
cgacgcacaggcgcgcgug

SEQ ID NO: 2869622 - RNA, 19 nt, Artificial Sequence
  Description of Artificial Sequence: Synthetic oligonucleotide
cggggcucagggcuugcuc

SEQ ID NO: 2869623 - RNA, 19 nt, Artificial Sequence
  Description of Artificial Sequence: Synthetic oligonucleotide
ccgcgcugucccgcgacgc

SEQ ID NO: 2869624 - RNA, 19 nt, Artificial Sequence
  Description of Artificial Sequence: Synthetic oligonucleotide
ccgccgcucucguugcgca

SEQ ID NO: 2869625 - RNA, 19 nt, Artificial Sequence
  Description of Artificial Sequence: Synthetic oligonucleotide
gcgcguguaccggcccagc

SEQ ID NO: 2869626 - RNA, 19 nt, Artificial Sequence
  Description of Artificial Sequence: Synthetic oligonucleotide
gcccagccagcuccuccga

SEQ ID NO: 2869627 - RNA, 19 nt, Artificial Sequence
  Description of Artificial Sequence: Synthetic oligonucleotide
ccaccgccacacggaaaug

SEQ ID NO: 2869628 - RNA, 19 nt, Artificial Sequence
  Description of Artificial Sequence: Synthetic oligonucleotide
ccccucgaaccgagagcuc

SEQ ID NO: 2869629 - RNA, 19 nt, Artificial Sequence
  Description of Artificial Sequence: Synthetic oligonucleotide
ggcucagggcuugcuccaa

SEQ ID NO: 2869630 - RNA, 19 nt, Artificial Sequence
  Description of Artificial Sequence: Synthetic oligonucleotide
gcgcggauagcggccucca

SEQ ID NO: 2869631 - RNA, 19 nt, Artificial Sequence
  Description of Artificial Sequence: Synthetic oligonucleotide
cgcgacgcacaggcgcgcg

SEQ ID NO: 2869632 - RNA, 19 nt, Artificial Sequence
  Description of Artificial Sequence: Synthetic oligonucleotide
ccgcgugaaccagccggug

SEQ ID NO: 2869633 - RNA, 19 nt, Artificial Sequence
  Description of Artificial Sequence: Synthetic oligonucleotide
ccgccacacggaaaugcgu

SEQ ID NO: 2869634 - RNA, 19 nt, Artificial Sequence
  Description of Artificial Sequence: Synthetic oligonucleotide
gcccauucugaucgcuguu

SEQ ID NO: 2869635 - RNA, 19 nt, Artificial Sequence
  Description of Artificial Sequence: Synthetic oligonucleotide
gccgcgugaaccagccggu

SEQ ID NO: 2869636 - RNA, 19 nt, Artificial Sequence
  Description of Artificial Sequence: Synthetic oligonucleotide
ccgccgaucccgcgcuguc

SEQ ID NO: 2869637 - RNA, 19 nt, Artificial Sequence
  Description of Artificial Sequence: Synthetic oligonucleotide
cgccgaucccgcgcugucc

SEQ ID NO: 2869638 - RNA, 19 nt, Artificial Sequence
  Description of Artificial Sequence: Synthetic oligonucleotide
cacaggcgcgcguggccau

SEQ ID NO: 2869639 - RNA, 19 nt, Artificial Sequence
  Description of Artificial Sequence: Synthetic oligonucleotide
gcuccaacuuggcgcggau

SEQ ID NO: 2869640 - RNA, 19 nt, Artificial Sequence
  Description of Artificial Sequence: Synthetic oligonucleotide
cccauucugaucgcuguuu

SEQ ID NO: 2869641 - RNA, 19 nt, Artificial Sequence
  Description of Artificial Sequence: Synthetic oligonucleotide
cgccgcucucguugcgcag

SEQ ID NO: 2869642 - RNA, 19 nt, Artificial Sequence
  Description of Artificial Sequence: Synthetic oligonucleotide
cgcggauagcggccuccac

SEQ ID NO: 2869643 - RNA, 19 nt, Artificial Sequence
  Description of Artificial Sequence: Synthetic oligonucleotide
ggcccuccggccgccgauc

SEQ ID NO: 2869644 - RNA, 19 nt, Artificial Sequence
  Description of Artificial Sequence: Synthetic oligonucleotide
ggccgccgaucccgcgcug

SEQ ID NO: 2869645 - RNA, 19 nt, Artificial Sequence
  Description of Artificial Sequence: Synthetic oligonucleotide
cgcugucccgcgacgcaca

SEQ ID NO: 2869646 - RNA, 19 nt, Artificial Sequence
  Description of Artificial Sequence: Synthetic oligonucleotide
cguggccauggggaccgug

SEQ ID NO: 2869647 - RNA, 19 nt, Artificial Sequence
  Description of Artificial Sequence: Synthetic oligonucleotide
ccgcgacgcacaggcgcgc

SEQ ID NO: 2869648 - RNA, 19 nt, Artificial Sequence
  Description of Artificial Sequence: Synthetic oligonucleotide
gcgacgcacaggcgcgcgu

SEQ ID NO: 2869649 - RNA, 19 nt, Artificial Sequence
  Description of Artificial Sequence: Synthetic oligonucleotide
ccguugcagagggcucauc

SEQ ID NO: 2869650 - RNA, 19 nt, Artificial Sequence
  Description of Artificial Sequence: Synthetic oligonucleotide
cgcgcugucccgcgacgca

SEQ ID NO: 2869651 - RNA, 19 nt, Artificial Sequence
  Description of Artificial Sequence: Synthetic oligonucleotide
cggugccguugcagagggc

SEQ ID NO: 2869652 - RNA, 19 nt, Artificial Sequence
  Description of Artificial Sequence: Synthetic oligonucleotide
cgggccaacugcgcccuca

SEQ ID NO: 2869653 - RNA, 19 nt, Artificial Sequence
  Description of Artificial Sequence: Synthetic oligonucleotide
gccgccgaucccgcgcugu

SEQ ID NO: 2869654 - RNA, 19 nt, Artificial Sequence
  Description of Artificial Sequence: Synthetic oligonucleotide
ccgcucucguugcgcagcu

SEQ ID NO: 2869655 - RNA, 19 nt, Artificial Sequence
  Description of Artificial Sequence: Synthetic oligonucleotide
gccguugcagagggcucau

SEQ ID NO: 2869656 - RNA, 19 nt, Artificial Sequence
  Description of Artificial Sequence: Synthetic oligonucleotide
gcguggccgccgcucucgu

SEQ ID NO: 2869657 - RNA, 19 nt, Artificial Sequence
  Description of Artificial Sequence: Synthetic oligonucleotide
ggacggcguggccgccgcu

SEQ ID NO: 2869658 - RNA, 19 nt, Artificial Sequence
  Description of Artificial Sequence: Synthetic oligonucleotide
cgcucucguugcgcagcuc

SEQ ID NO: 2869659 - RNA, 19 nt, Artificial Sequence
  Description of Artificial Sequence: Synthetic oligonucleotide
ccggcccagccagcuccuc

SEQ ID NO: 2869660 - RNA, 19 nt, Artificial Sequence
  Description of Artificial Sequence: Synthetic oligonucleotide
ccgggccaacugcgcccuc

SEQ ID NO: 2869661 - RNA, 19 nt, Artificial Sequence
  Description of Artificial Sequence: Synthetic oligonucleotide
cggcguggccgccgcucuc

SEQ ID NO: 2869662 - RNA, 19 nt, Artificial Sequence
  Description of Artificial Sequence: Synthetic oligonucleotide
cgcugccugcugggacggc

SEQ ID NO: 2869663 - RNA, 19 nt, Artificial Sequence
  Description of Artificial Sequence: Synthetic oligonucleotide
cggccgccgaucccgcgcu

SEQ ID NO: 2869664 - RNA, 19 nt, Artificial Sequence
  Description of Artificial Sequence: Synthetic oligonucleotide
cguggccgccgcucucguu

SEQ ID NO: 2869665 - RNA, 19 nt, Artificial Sequence
  Description of Artificial Sequence: Synthetic oligonucleotide
gcguggccauggggaccgu

SEQ ID NO: 2869666 - RNA, 19 nt, Artificial Sequence
  Description of Artificial Sequence: Synthetic oligonucleotide
uccugaagcaacaaguugg

SEQ ID NO: 2869667 - RNA, 19 nt, Artificial Sequence
  Description of Artificial Sequence: Synthetic oligonucleotide
aagaaguuagaacucacca

SEQ ID NO: 2869668 - RNA, 19 nt, Artificial Sequence
  Description of Artificial Sequence: Synthetic oligonucleotide
aacaaguuggguaccaugg

SEQ ID NO: 2869669 - RNA, 19 nt, Artificial Sequence
  Description of Artificial Sequence: Synthetic oligonucleotide
aguuagaacucaccagucc

SEQ ID NO: 2869670 - RNA, 19 nt, Artificial Sequence
  Description of Artificial Sequence: Synthetic oligonucleotide
gaagcaacaaguuggguac

SEQ ID NO: 2869671 - RNA, 19 nt, Artificial Sequence
  Description of Artificial Sequence: Synthetic oligonucleotide
agagucuccccucaaacac

SEQ ID NO: 2869672 - RNA, 19 nt, Artificial Sequence
  Description of Artificial Sequence: Synthetic oligonucleotide
guuugaagaaguuagaacu

SEQ ID NO: 2869673 - RNA, 19 nt, Artificial Sequence
  Description of Artificial Sequence: Synthetic oligonucleotide
agaaguuagaacucaccag

SEQ ID NO: 2869674 - RNA, 19 nt, Artificial Sequence
  Description of Artificial Sequence: Synthetic oligonucleotide
guuagaacucaccaguccc

SEQ ID NO: 2869675 - RNA, 19 nt, Artificial Sequence
  Description of Artificial Sequence: Synthetic oligonucleotide
gaacucaccagucccagag

SEQ ID NO: 2869676 - RNA, 19 nt, Artificial Sequence
  Description of Artificial Sequence: Synthetic oligonucleotide
ugaagcaacaaguugggua

SEQ ID NO: 2869677 - RNA, 19 nt, Artificial Sequence
  Description of Artificial Sequence: Synthetic oligonucleotide
uuugaagaaguuagaacuc

SEQ ID NO: 2869678 - RNA, 19 nt, Artificial Sequence
  Description of Artificial Sequence: Synthetic oligonucleotide
auggguuugaagaaguuag

SEQ ID NO: 2869679 - RNA, 19 nt, Artificial Sequence
  Description of Artificial Sequence: Synthetic oligonucleotide
gaaguuagaacucaccagu

SEQ ID NO: 2869680 - RNA, 19 nt, Artificial Sequence
  Description of Artificial Sequence: Synthetic oligonucleotide
ucuccccucaaacacaccu

SEQ ID NO: 2869681 - RNA, 19 nt, Artificial Sequence
  Description of Artificial Sequence: Synthetic oligonucleotide
uuagaacucaccaguccca

SEQ ID NO: 2869682 - RNA, 19 nt, Artificial Sequence
  Description of Artificial Sequence: Synthetic oligonucleotide
ugaagaaguuagaacucac

SEQ ID NO: 2869683 - RNA, 19 nt, Artificial Sequence
  Description of Artificial Sequence: Synthetic oligonucleotide
acucaccagucccagaguc

SEQ ID NO: 2869684 - RNA, 19 nt, Artificial Sequence
  Description of Artificial Sequence: Synthetic oligonucleotide
gaagaaguuagaacucacc

SEQ ID NO: 2869685 - RNA, 19 nt, Artificial Sequence
  Description of Artificial Sequence: Synthetic oligonucleotide
acaaguuggguaccauggg

SEQ ID NO: 2869686 - RNA, 19 nt, Artificial Sequence
  Description of Artificial Sequence: Synthetic oligonucleotide
uugaagaaguuagaacuca

SEQ ID NO: 2869687 - RNA, 19 nt, Artificial Sequence
  Description of Artificial Sequence: Synthetic oligonucleotide
aaguuagaacucaccaguc

SEQ ID NO: 2869688 - RNA, 19 nt, Artificial Sequence
  Description of Artificial Sequence: Synthetic oligonucleotide
gguuugaagaaguuagaac

SEQ ID NO: 2869689 - RNA, 19 nt, Artificial Sequence
  Description of Artificial Sequence: Synthetic oligonucleotide
auccugaagcaacaaguug

SEQ ID NO: 2869690 - RNA, 19 nt, Artificial Sequence
  Description of Artificial Sequence: Synthetic oligonucleotide
aggauccugaagcaacaag

SEQ ID NO: 2869691 - RNA, 19 nt, Artificial Sequence
  Description of Artificial Sequence: Synthetic oligonucleotide
uccccucaaacacaccuca

SEQ ID NO: 2869692 - RNA, 19 nt, Artificial Sequence
  Description of Artificial Sequence: Synthetic oligonucleotide
aagcaacaaguuggguacc

SEQ ID NO: 2869693 - RNA, 19 nt, Artificial Sequence
  Description of Artificial Sequence: Synthetic oligonucleotide
uggguuugaagaaguuaga

SEQ ID NO: 2869694 - RNA, 19 nt, Artificial Sequence
  Description of Artificial Sequence: Synthetic oligonucleotide
caacaaguuggguaccaug

SEQ ID NO: 2869695 - RNA, 19 nt, Artificial Sequence
  Description of Artificial Sequence: Synthetic oligonucleotide
uaccauggguuugaagaag

SEQ ID NO: 2869696 - RNA, 19 nt, Artificial Sequence
  Description of Artificial Sequence: Synthetic oligonucleotide
uagaacucaccagucccag

SEQ ID NO: 2869697 - RNA, 19 nt, Artificial Sequence
  Description of Artificial Sequence: Synthetic oligonucleotide
agucccagagucuccccuc

SEQ ID NO: 2869698 - RNA, 19 nt, Artificial Sequence
  Description of Artificial Sequence: Synthetic oligonucleotide
agucuccccucaaacacac

SEQ ID NO: 2869699 - RNA, 19 nt, Artificial Sequence
  Description of Artificial Sequence: Synthetic oligonucleotide
aacucaccagucccagagu

SEQ ID NO: 2869700 - RNA, 19 nt, Artificial Sequence
  Description of Artificial Sequence: Synthetic oligonucleotide
ccucaaacacaccucauac

SEQ ID NO: 2869701 - RNA, 19 nt, Artificial Sequence
  Description of Artificial Sequence: Synthetic oligonucleotide
aaguuggguaccauggguu

SEQ ID NO: 2869702 - RNA, 19 nt, Artificial Sequence
  Description of Artificial Sequence: Synthetic oligonucleotide
ccugaagcaacaaguuggg

SEQ ID NO: 2869703 - RNA, 19 nt, Artificial Sequence
  Description of Artificial Sequence: Synthetic oligonucleotide
uuggguaccauggguuuga

SEQ ID NO: 2869704 - RNA, 19 nt, Artificial Sequence
  Description of Artificial Sequence: Synthetic oligonucleotide
aguuggguaccauggguuu

SEQ ID NO: 2869705 - RNA, 19 nt, Artificial Sequence
  Description of Artificial Sequence: Synthetic oligonucleotide
guaccauggguuugaagaa

SEQ ID NO: 2869706 - RNA, 19 nt, Artificial Sequence
  Description of Artificial Sequence: Synthetic oligonucleotide
accauggguuugaagaagu

SEQ ID NO: 2869707 - RNA, 19 nt, Artificial Sequence
  Description of Artificial Sequence: Synthetic oligonucleotide
cagagucuccccucaaaca

SEQ ID NO: 2869708 - RNA, 19 nt, Artificial Sequence
  Description of Artificial Sequence: Synthetic oligonucleotide
agaacucaccagucccaga

SEQ ID NO: 2869709 - RNA, 19 nt, Artificial Sequence
  Description of Artificial Sequence: Synthetic oligonucleotide
agcaacaaguuggguacca

SEQ ID NO: 2869710 - RNA, 19 nt, Artificial Sequence
  Description of Artificial Sequence: Synthetic oligonucleotide
guuggguaccauggguuug

SEQ ID NO: 2869711 - RNA, 19 nt, Artificial Sequence
  Description of Artificial Sequence: Synthetic oligonucleotide
cuccccucaaacacaccuc

SEQ ID NO: 2869712 - RNA, 19 nt, Artificial Sequence
  Description of Artificial Sequence: Synthetic oligonucleotide
cccaggauccugaagcaac

SEQ ID NO: 2869713 - RNA, 19 nt, Artificial Sequence
  Description of Artificial Sequence: Synthetic oligonucleotide
ggauccugaagcaacaagu

SEQ ID NO: 2869714 - RNA, 19 nt, Artificial Sequence
  Description of Artificial Sequence: Synthetic oligonucleotide
cauggguuugaagaaguua

SEQ ID NO: 2869715 - RNA, 19 nt, Artificial Sequence
  Description of Artificial Sequence: Synthetic oligonucleotide
ccagagucuccccucaaac

SEQ ID NO: 2869716 - RNA, 19 nt, Artificial Sequence
  Description of Artificial Sequence: Synthetic oligonucleotide
gagucuccccucaaacaca

SEQ ID NO: 2869717 - RNA, 19 nt, Artificial Sequence
  Description of Artificial Sequence: Synthetic oligonucleotide
caaguuggguaccaugggu

SEQ ID NO: 2869718 - RNA, 19 nt, Artificial Sequence
  Description of Artificial Sequence: Synthetic oligonucleotide
cucucccaggauccugaag

SEQ ID NO: 2869719 - RNA, 19 nt, Artificial Sequence
  Description of Artificial Sequence: Synthetic oligonucleotide
gauccugaagcaacaaguu

SEQ ID NO: 2869720 - RNA, 19 nt, Artificial Sequence
  Description of Artificial Sequence: Synthetic oligonucleotide
ggguuugaagaaguuagaa

SEQ ID NO: 2869721 - RNA, 19 nt, Artificial Sequence
  Description of Artificial Sequence: Synthetic oligonucleotide
caccagucccagagucucc

SEQ ID NO: 2869722 - RNA, 19 nt, Artificial Sequence
  Description of Artificial Sequence: Synthetic oligonucleotide
ucucucccaggauccugaa

SEQ ID NO: 2869723 - RNA, 19 nt, Artificial Sequence
  Description of Artificial Sequence: Synthetic oligonucleotide
ggguaccauggguuugaag

SEQ ID NO: 2869724 - RNA, 19 nt, Artificial Sequence
  Description of Artificial Sequence: Synthetic oligonucleotide
ucccagagucuccccucaa

SEQ ID NO: 2869725 - RNA, 19 nt, Artificial Sequence
  Description of Artificial Sequence: Synthetic oligonucleotide
gucccagagucuccccuca

SEQ ID NO: 2869726 - RNA, 19 nt, Artificial Sequence
  Description of Artificial Sequence: Synthetic oligonucleotide
gaucgccauuguccuugac

SEQ ID NO: 2869727 - RNA, 19 nt, Artificial Sequence
  Description of Artificial Sequence: Synthetic oligonucleotide
cucaccagucccagagucu

SEQ ID NO: 2869728 - RNA, 19 nt, Artificial Sequence
  Description of Artificial Sequence: Synthetic oligonucleotide
ccaggauccugaagcaaca

SEQ ID NO: 2869729 - RNA, 19 nt, Artificial Sequence
  Description of Artificial Sequence: Synthetic oligonucleotide
uggguaccauggguuugaa

SEQ ID NO: 2869730 - RNA, 19 nt, Artificial Sequence
  Description of Artificial Sequence: Synthetic oligonucleotide
caggauccugaagcaacaa

SEQ ID NO: 2869731 - RNA, 19 nt, Artificial Sequence
  Description of Artificial Sequence: Synthetic oligonucleotide
cccucaaacacaccucaua

SEQ ID NO: 2869732 - RNA, 19 nt, Artificial Sequence
  Description of Artificial Sequence: Synthetic oligonucleotide
gucuccccucaaacacacc

SEQ ID NO: 2869733 - RNA, 19 nt, Artificial Sequence
  Description of Artificial Sequence: Synthetic oligonucleotide
cugaagcaacaaguugggu

SEQ ID NO: 2869734 - RNA, 19 nt, Artificial Sequence
  Description of Artificial Sequence: Synthetic oligonucleotide
cccagagucuccccucaaa

SEQ ID NO: 2869735 - RNA, 19 nt, Artificial Sequence
  Description of Artificial Sequence: Synthetic oligonucleotide
gcaacaaguuggguaccau

SEQ ID NO: 2869736 - RNA, 19 nt, Artificial Sequence
  Description of Artificial Sequence: Synthetic oligonucleotide
ccccucaaacacaccucau

SEQ ID NO: 2869737 - RNA, 19 nt, Artificial Sequence
  Description of Artificial Sequence: Synthetic oligonucleotide
accaucaucauguuggugc

SEQ ID NO: 2869738 - RNA, 19 nt, Artificial Sequence
  Description of Artificial Sequence: Synthetic oligonucleotide
aucugagggacacugaucc

SEQ ID NO: 2869739 - RNA, 19 nt, Artificial Sequence
  Description of Artificial Sequence: Synthetic oligonucleotide
agauaaaaggcccuccacc

SEQ ID NO: 2869740 - RNA, 19 nt, Artificial Sequence
  Description of Artificial Sequence: Synthetic oligonucleotide
ggcacauugaccuugaagg

SEQ ID NO: 2869741 - RNA, 19 nt, Artificial Sequence
  Description of Artificial Sequence: Synthetic oligonucleotide
ugucuaaccccuuauauca

SEQ ID NO: 2869742 - RNA, 19 nt, Artificial Sequence
  Description of Artificial Sequence: Synthetic oligonucleotide
uuuuccuugacaguguagg

SEQ ID NO: 2869743 - RNA, 19 nt, Artificial Sequence
  Description of Artificial Sequence: Synthetic oligonucleotide
acaaugaggauguagucuc

SEQ ID NO: 2869744 - RNA, 19 nt, Artificial Sequence
  Description of Artificial Sequence: Synthetic oligonucleotide
augugcuucacauagaccu

SEQ ID NO: 2869745 - RNA, 19 nt, Artificial Sequence
  Description of Artificial Sequence: Synthetic oligonucleotide
aaccccuuauaucacaguc

SEQ ID NO: 2869746 - RNA, 19 nt, Artificial Sequence
  Description of Artificial Sequence: Synthetic oligonucleotide
aucccagacagauaaaagg

SEQ ID NO: 2869747 - RNA, 19 nt, Artificial Sequence
  Description of Artificial Sequence: Synthetic oligonucleotide
gauaaaaggcccuccaccc

SEQ ID NO: 2869748 - RNA, 19 nt, Artificial Sequence
  Description of Artificial Sequence: Synthetic oligonucleotide
uuauaucacagucucugcc

SEQ ID NO: 2869749 - RNA, 19 nt, Artificial Sequence
  Description of Artificial Sequence: Synthetic oligonucleotide
acucacuucacaccuaagg

SEQ ID NO: 2869750 - RNA, 19 nt, Artificial Sequence
  Description of Artificial Sequence: Synthetic oligonucleotide
acauagaccuucuucacag

SEQ ID NO: 2869751 - RNA, 19 nt, Artificial Sequence
  Description of Artificial Sequence: Synthetic oligonucleotide
ucccagacagauaaaaggc

SEQ ID NO: 2869752 - RNA, 19 nt, Artificial Sequence
  Description of Artificial Sequence: Synthetic oligonucleotide
ucccaugugcuucacauag

SEQ ID NO: 2869753 - RNA, 19 nt, Artificial Sequence
  Description of Artificial Sequence: Synthetic oligonucleotide
uauaucacagucucugccc

SEQ ID NO: 2869754 - RNA, 19 nt, Artificial Sequence
  Description of Artificial Sequence: Synthetic oligonucleotide
agucucuuuuccuugacag

SEQ ID NO: 2869755 - RNA, 19 nt, Artificial Sequence
  Description of Artificial Sequence: Synthetic oligonucleotide
aggauguagucucuuuucc

SEQ ID NO: 2869756 - RNA, 19 nt, Artificial Sequence
  Description of Artificial Sequence: Synthetic oligonucleotide
auucagggcacauugaccu

SEQ ID NO: 2869757 - RNA, 19 nt, Artificial Sequence
  Description of Artificial Sequence: Synthetic oligonucleotide
acagucucugcccugaguc

SEQ ID NO: 2869758 - RNA, 19 nt, Artificial Sequence
  Description of Artificial Sequence: Synthetic oligonucleotide
acuucugggauucagggca

SEQ ID NO: 2869759 - RNA, 19 nt, Artificial Sequence
  Description of Artificial Sequence: Synthetic oligonucleotide
ugugcauagggauauggca

SEQ ID NO: 2869760 - RNA, 19 nt, Artificial Sequence
  Description of Artificial Sequence: Synthetic oligonucleotide
gauauggcacauuugugug

SEQ ID NO: 2869761 - RNA, 19 nt, Artificial Sequence
  Description of Artificial Sequence: Synthetic oligonucleotide
acugaucccagacagauaa

SEQ ID NO: 2869762 - RNA, 19 nt, Artificial Sequence
  Description of Artificial Sequence: Synthetic oligonucleotide
auagaccuucuucacaggg

SEQ ID NO: 2869763 - RNA, 19 nt, Artificial Sequence
  Description of Artificial Sequence: Synthetic oligonucleotide
ugggauucagggcacauug

SEQ ID NO: 2869764 - RNA, 19 nt, Artificial Sequence
  Description of Artificial Sequence: Synthetic oligonucleotide
ucugacuccagucugcccu

SEQ ID NO: 2869765 - RNA, 19 nt, Artificial Sequence
  Description of Artificial Sequence: Synthetic oligonucleotide
agggauauggcacauuugu

SEQ ID NO: 2869766 - RNA, 19 nt, Artificial Sequence
  Description of Artificial Sequence: Synthetic oligonucleotide
gugggugugaguuuggcag

SEQ ID NO: 2869767 - RNA, 19 nt, Artificial Sequence
  Description of Artificial Sequence: Synthetic oligonucleotide
auaaaaggcccuccacccc

SEQ ID NO: 2869768 - RNA, 19 nt, Artificial Sequence
  Description of Artificial Sequence: Synthetic oligonucleotide
ucucuuuuccuugacagug

SEQ ID NO: 2869769 - RNA, 19 nt, Artificial Sequence
  Description of Artificial Sequence: Synthetic oligonucleotide
cucacuucacaccuaaggc

SEQ ID NO: 2869770 - RNA, 19 nt, Artificial Sequence
  Description of Artificial Sequence: Synthetic oligonucleotide
ucgugucugauucugugag

SEQ ID NO: 2869771 - RNA, 19 nt, Artificial Sequence
  Description of Artificial Sequence: Synthetic oligonucleotide
cucaggucacaucugaggg

SEQ ID NO: 2869772 - RNA, 19 nt, Artificial Sequence
  Description of Artificial Sequence: Synthetic oligonucleotide
uauggcacauuuguguggg

SEQ ID NO: 2869773 - RNA, 19 nt, Artificial Sequence
  Description of Artificial Sequence: Synthetic oligonucleotide
ugugaguuuggcaggaagu

SEQ ID NO: 2869774 - RNA, 19 nt, Artificial Sequence
  Description of Artificial Sequence: Synthetic oligonucleotide
uaggugacguuguauaccc

SEQ ID NO: 2869775 - RNA, 19 nt, Artificial Sequence
  Description of Artificial Sequence: Synthetic oligonucleotide
uccuugacaguguagguga

SEQ ID NO: 2869776 - RNA, 19 nt, Artificial Sequence
  Description of Artificial Sequence: Synthetic oligonucleotide
acauugaccuugaaggggc

SEQ ID NO: 2869777 - RNA, 19 nt, Artificial Sequence
  Description of Artificial Sequence: Synthetic oligonucleotide
cacuucacaccuaaggcag

SEQ ID NO: 2869778 - RNA, 19 nt, Artificial Sequence
  Description of Artificial Sequence: Synthetic oligonucleotide
cccaccaucaucauguugg

SEQ ID NO: 2869779 - RNA, 19 nt, Artificial Sequence
  Description of Artificial Sequence: Synthetic oligonucleotide
ugugccacucacuucacac

SEQ ID NO: 2869780 - RNA, 19 nt, Artificial Sequence
  Description of Artificial Sequence: Synthetic oligonucleotide
uuucccaugugcuucacau

SEQ ID NO: 2869781 - RNA, 19 nt, Artificial Sequence
  Description of Artificial Sequence: Synthetic oligonucleotide
auauggcacauuugugugg

SEQ ID NO: 2869782 - RNA, 19 nt, Artificial Sequence
  Description of Artificial Sequence: Synthetic oligonucleotide
ugugagugugcauagggau

SEQ ID NO: 2869783 - RNA, 19 nt, Artificial Sequence
  Description of Artificial Sequence: Synthetic oligonucleotide
ugagucugacuccagucug

SEQ ID NO: 2869784 - RNA, 19 nt, Artificial Sequence
  Description of Artificial Sequence: Synthetic oligonucleotide
aaggcagguguuuucgugu

SEQ ID NO: 2869785 - RNA, 19 nt, Artificial Sequence
  Description of Artificial Sequence: Synthetic oligonucleotide
gacaguguaggugacguug

SEQ ID NO: 2869786 - RNA, 19 nt, Artificial Sequence
  Description of Artificial Sequence: Synthetic oligonucleotide
ucugauucugugagugugc

SEQ ID NO: 2869787 - RNA, 19 nt, Artificial Sequence
  Description of Artificial Sequence: Synthetic oligonucleotide
cuuauaucacagucucugc

SEQ ID NO: 2869788 - RNA, 19 nt, Artificial Sequence
  Description of Artificial Sequence: Synthetic oligonucleotide
uuucgugucugauucugug

SEQ ID NO: 2869789 - RNA, 19 nt, Artificial Sequence
  Description of Artificial Sequence: Synthetic oligonucleotide
acuuucgucaccccauuug

SEQ ID NO: 2869790 - RNA, 19 nt, Artificial Sequence
  Description of Artificial Sequence: Synthetic oligonucleotide
uaaaaggcccuccaccccu

SEQ ID NO: 2869791 - RNA, 19 nt, Artificial Sequence
  Description of Artificial Sequence: Synthetic oligonucleotide
agaccuucuucacagggug

SEQ ID NO: 2869792 - RNA, 19 nt, Artificial Sequence
  Description of Artificial Sequence: Synthetic oligonucleotide
guguuuucgugucugauuc

SEQ ID NO: 2869793 - RNA, 19 nt, Artificial Sequence
  Description of Artificial Sequence: Synthetic oligonucleotide
cuucacauagaccuucuuc

SEQ ID NO: 2869794 - RNA, 19 nt, Artificial Sequence
  Description of Artificial Sequence: Synthetic oligonucleotide
ucacaccuaaggcaggugu

SEQ ID NO: 2869795 - RNA, 19 nt, Artificial Sequence
  Description of Artificial Sequence: Synthetic oligonucleotide
uucgucaccccauuugaca

SEQ ID NO: 2869796 - RNA, 19 nt, Artificial Sequence
  Description of Artificial Sequence: Synthetic oligonucleotide
uccggggacacuuucguca

SEQ ID NO: 2869797 - RNA, 19 nt, Artificial Sequence
  Description of Artificial Sequence: Synthetic oligonucleotide
uucacagggugucuugggc

SEQ ID NO: 2869798 - RNA, 19 nt, Artificial Sequence
  Description of Artificial Sequence: Synthetic oligonucleotide
auagggauauggcacauuu

SEQ ID NO: 2869799 - RNA, 19 nt, Artificial Sequence
  Description of Artificial Sequence: Synthetic oligonucleotide
cuaaccccuuauaucacag

SEQ ID NO: 2869800 - RNA, 19 nt, Artificial Sequence
  Description of Artificial Sequence: Synthetic oligonucleotide
uaaggcagguguuuucgug

SEQ ID NO: 2869801 - RNA, 19 nt, Artificial Sequence
  Description of Artificial Sequence: Synthetic oligonucleotide
uuguauacccgguuuccca

SEQ ID NO: 2869802 - RNA, 19 nt, Artificial Sequence
  Description of Artificial Sequence: Synthetic oligonucleotide
agugugcauagggauaugg

SEQ ID NO: 2869803 - RNA, 19 nt, Artificial Sequence
  Description of Artificial Sequence: Synthetic oligonucleotide
ugcauagggauauggcaca

SEQ ID NO: 2869804 - RNA, 19 nt, Artificial Sequence
  Description of Artificial Sequence: Synthetic oligonucleotide
ggugacguuguauacccgg

SEQ ID NO: 2869805 - RNA, 19 nt, Artificial Sequence
  Description of Artificial Sequence: Synthetic oligonucleotide
ucacagggugucuugggcc

SEQ ID NO: 2869806 - RNA, 19 nt, Artificial Sequence
  Description of Artificial Sequence: Synthetic oligonucleotide
cacauugaccuugaagggg

SEQ ID NO: 2869807 - RNA, 19 nt, Artificial Sequence
  Description of Artificial Sequence: Synthetic oligonucleotide
auucugugagugugcauag

SEQ ID NO: 2869808 - RNA, 19 nt, Artificial Sequence
  Description of Artificial Sequence: Synthetic oligonucleotide
ucacaucugagggacacug

SEQ ID NO: 2869809 - RNA, 19 nt, Artificial Sequence
  Description of Artificial Sequence: Synthetic oligonucleotide
acguuguauacccgguuuc

SEQ ID NO: 2869810 - RNA, 19 nt, Artificial Sequence
  Description of Artificial Sequence: Synthetic oligonucleotide
uugacaguguaggugacgu

SEQ ID NO: 2869811 - RNA, 19 nt, Artificial Sequence
  Description of Artificial Sequence: Synthetic oligonucleotide
ugccacucacuucacaccu

SEQ ID NO: 2869812 - RNA, 19 nt, Artificial Sequence
  Description of Artificial Sequence: Synthetic oligonucleotide
gaucccagacagauaaaag

SEQ ID NO: 2869813 - RNA, 19 nt, Artificial Sequence
  Description of Artificial Sequence: Synthetic oligonucleotide
gaggauguagucucuuuuc

SEQ ID NO: 2869814 - RNA, 19 nt, Artificial Sequence
  Description of Artificial Sequence: Synthetic oligonucleotide
cugucuaaccccuuauauc

SEQ ID NO: 2869815 - RNA, 19 nt, Artificial Sequence
  Description of Artificial Sequence: Synthetic oligonucleotide
gauucagggcacauugacc

SEQ ID NO: 2869816 - RNA, 19 nt, Artificial Sequence
  Description of Artificial Sequence: Synthetic oligonucleotide
uuccuugacaguguaggug

SEQ ID NO: 2869817 - RNA, 19 nt, Artificial Sequence
  Description of Artificial Sequence: Synthetic oligonucleotide
gauucugugagugugcaua

SEQ ID NO: 2869818 - RNA, 19 nt, Artificial Sequence
  Description of Artificial Sequence: Synthetic oligonucleotide
ugaggauguagucucuuuu

SEQ ID NO: 2869819 - RNA, 19 nt, Artificial Sequence
  Description of Artificial Sequence: Synthetic oligonucleotide
uacccgguuucccaugugc

SEQ ID NO: 2869820 - RNA, 19 nt, Artificial Sequence
  Description of Artificial Sequence: Synthetic oligonucleotide
ggacacugaucccagacag

SEQ ID NO: 2869821 - RNA, 19 nt, Artificial Sequence
  Description of Artificial Sequence: Synthetic oligonucleotide
ugggugugaguuuggcagg

SEQ ID NO: 2869822 - RNA, 19 nt, Artificial Sequence
  Description of Artificial Sequence: Synthetic oligonucleotide
uagaccuucuucacagggu

SEQ ID NO: 2869823 - RNA, 19 nt, Artificial Sequence
  Description of Artificial Sequence: Synthetic oligonucleotide
guuggugccugcuuugcug

SEQ ID NO: 2869824 - RNA, 19 nt, Artificial Sequence
  Description of Artificial Sequence: Synthetic oligonucleotide
auaucacagucucugcccu

SEQ ID NO: 2869825 - RNA, 19 nt, Artificial Sequence
  Description of Artificial Sequence: Synthetic oligonucleotide
ugaucccagacagauaaaa

SEQ ID NO: 2869826 - RNA, 19 nt, Artificial Sequence
  Description of Artificial Sequence: Synthetic oligonucleotide
ucacauagaccuucuucac

SEQ ID NO: 2869827 - RNA, 19 nt, Artificial Sequence
  Description of Artificial Sequence: Synthetic oligonucleotide
gguugugccacucacuuca

SEQ ID NO: 2869828 - RNA, 19 nt, Artificial Sequence
  Description of Artificial Sequence: Synthetic oligonucleotide
ugacaaugaggauguaguc

SEQ ID NO: 2869829 - RNA, 19 nt, Artificial Sequence
  Description of Artificial Sequence: Synthetic oligonucleotide
uucgugucugauucuguga

SEQ ID NO: 2869830 - RNA, 19 nt, Artificial Sequence
  Description of Artificial Sequence: Synthetic oligonucleotide
cugcaguccacagugaaug

SEQ ID NO: 2869831 - RNA, 19 nt, Artificial Sequence
  Description of Artificial Sequence: Synthetic oligonucleotide
ugcacgguggggugggagg

SEQ ID NO: 2869832 - RNA, 19 nt, Artificial Sequence
  Description of Artificial Sequence: Synthetic oligonucleotide
ugcaccacccaccaucauc

SEQ ID NO: 2869833 - RNA, 19 nt, Artificial Sequence
  Description of Artificial Sequence: Synthetic oligonucleotide
accccauuugacaaugagg

SEQ ID NO: 2869834 - RNA, 19 nt, Artificial Sequence
  Description of Artificial Sequence: Synthetic oligonucleotide
uagucucuuuuccuugaca

SEQ ID NO: 2869835 - RNA, 19 nt, Artificial Sequence
  Description of Artificial Sequence: Synthetic oligonucleotide
uuggugccugcuuugcugc

SEQ ID NO: 2869836 - RNA, 19 nt, Artificial Sequence
  Description of Artificial Sequence: Synthetic oligonucleotide
caugugcuucacauagacc

SEQ ID NO: 2869837 - RNA, 19 nt, Artificial Sequence
  Description of Artificial Sequence: Synthetic oligonucleotide
accuugaaggggcuuccgg

SEQ ID NO: 2869838 - RNA, 19 nt, Artificial Sequence
  Description of Artificial Sequence: Synthetic oligonucleotide
uguauacccgguuucccau

SEQ ID NO: 2869839 - RNA, 19 nt, Artificial Sequence
  Description of Artificial Sequence: Synthetic oligonucleotide
ugagugugcauagggauau

SEQ ID NO: 2869840 - RNA, 19 nt, Artificial Sequence
  Description of Artificial Sequence: Synthetic oligonucleotide
uuuucgugucugauucugu

SEQ ID NO: 2869841 - RNA, 19 nt, Artificial Sequence
  Description of Artificial Sequence: Synthetic oligonucleotide
uagggauauggcacauuug

SEQ ID NO: 2869842 - RNA, 19 nt, Artificial Sequence
  Description of Artificial Sequence: Synthetic oligonucleotide
acaucugagggacacugau

SEQ ID NO: 2869843 - RNA, 19 nt, Artificial Sequence
  Description of Artificial Sequence: Synthetic oligonucleotide
ucaggucacaucugaggga

SEQ ID NO: 2869844 - RNA, 19 nt, Artificial Sequence
  Description of Artificial Sequence: Synthetic oligonucleotide
ucauguuggugccugcuuu

SEQ ID NO: 2869845 - RNA, 19 nt, Artificial Sequence
  Description of Artificial Sequence: Synthetic oligonucleotide
gacagauaaaaggcccucc

SEQ ID NO: 2869846 - RNA, 19 nt, Artificial Sequence
  Description of Artificial Sequence: Synthetic oligonucleotide
uuuccuugacaguguaggu

SEQ ID NO: 2869847 - RNA, 19 nt, Artificial Sequence
  Description of Artificial Sequence: Synthetic oligonucleotide
cauuugacaaugaggaugu

SEQ ID NO: 2869848 - RNA, 19 nt, Artificial Sequence
  Description of Artificial Sequence: Synthetic oligonucleotide
agucugacuccagucugcc

SEQ ID NO: 2869849 - RNA, 19 nt, Artificial Sequence
  Description of Artificial Sequence: Synthetic oligonucleotide
gugucugauucugugagug

SEQ ID NO: 2869850 - RNA, 19 nt, Artificial Sequence
  Description of Artificial Sequence: Synthetic oligonucleotide
agacagauaaaaggcccuc

SEQ ID NO: 2869851 - RNA, 19 nt, Artificial Sequence
  Description of Artificial Sequence: Synthetic oligonucleotide
guaggugacguuguauacc

SEQ ID NO: 2869852 - RNA, 19 nt, Artificial Sequence
  Description of Artificial Sequence: Synthetic oligonucleotide
gcacuucugggauucaggg

SEQ ID NO: 2869853 - RNA, 19 nt, Artificial Sequence
  Description of Artificial Sequence: Synthetic oligonucleotide
ugugggugugaguuuggca

SEQ ID NO: 2869854 - RNA, 19 nt, Artificial Sequence
  Description of Artificial Sequence: Synthetic oligonucleotide
acauuugugugggugugag

SEQ ID NO: 2869855 - RNA, 19 nt, Artificial Sequence
  Description of Artificial Sequence: Synthetic oligonucleotide
ugugugggugugaguuugg

SEQ ID NO: 2869856 - RNA, 19 nt, Artificial Sequence
  Description of Artificial Sequence: Synthetic oligonucleotide
ucaagugcacgguggggug

SEQ ID NO: 2869857 - RNA, 19 nt, Artificial Sequence
  Description of Artificial Sequence: Synthetic oligonucleotide
cuuuuccuugacaguguag

SEQ ID NO: 2869858 - RNA, 19 nt, Artificial Sequence
  Description of Artificial Sequence: Synthetic oligonucleotide
gugugaguuuggcaggaag

SEQ ID NO: 2869859 - RNA, 19 nt, Artificial Sequence
  Description of Artificial Sequence: Synthetic oligonucleotide
ucgucaccccauuugacaa

SEQ ID NO: 2869860 - RNA, 19 nt, Artificial Sequence
  Description of Artificial Sequence: Synthetic oligonucleotide
ccuuauaucacagucucug

SEQ ID NO: 2869861 - RNA, 19 nt, Artificial Sequence
  Description of Artificial Sequence: Synthetic oligonucleotide
guuuucgugucugauucug

SEQ ID NO: 2869862 - RNA, 19 nt, Artificial Sequence
  Description of Artificial Sequence: Synthetic oligonucleotide
accuaaggcagguguuuuc

SEQ ID NO: 2869863 - RNA, 19 nt, Artificial Sequence
  Description of Artificial Sequence: Synthetic oligonucleotide
uuucgucaccccauuugac

SEQ ID NO: 2869864 - RNA, 19 nt, Artificial Sequence
  Description of Artificial Sequence: Synthetic oligonucleotide
uugugugggugugaguuug

SEQ ID NO: 2869865 - RNA, 19 nt, Artificial Sequence
  Description of Artificial Sequence: Synthetic oligonucleotide
ucuuuuccuugacagugua

SEQ ID NO: 2869866 - RNA, 19 nt, Artificial Sequence
  Description of Artificial Sequence: Synthetic oligonucleotide
gucugauucugugagugug

SEQ ID NO: 2869867 - RNA, 19 nt, Artificial Sequence
  Description of Artificial Sequence: Synthetic oligonucleotide
cauagaccuucuucacagg

SEQ ID NO: 2869868 - RNA, 19 nt, Artificial Sequence
  Description of Artificial Sequence: Synthetic oligonucleotide
aucaucauguuggugccug

SEQ ID NO: 2869869 - RNA, 19 nt, Artificial Sequence
  Description of Artificial Sequence: Synthetic oligonucleotide
cacagggugucuugggccc

SEQ ID NO: 2869870 - RNA, 19 nt, Artificial Sequence
  Description of Artificial Sequence: Synthetic oligonucleotide
uucuucacagggugucuug

SEQ ID NO: 2869871 - RNA, 19 nt, Artificial Sequence
  Description of Artificial Sequence: Synthetic oligonucleotide
ccauuugacaaugaggaug

SEQ ID NO: 2869872 - RNA, 19 nt, Artificial Sequence
  Description of Artificial Sequence: Synthetic oligonucleotide
gugcauagggauauggcac

SEQ ID NO: 2869873 - RNA, 19 nt, Artificial Sequence
  Description of Artificial Sequence: Synthetic oligonucleotide
ucagggcacauugaccuug

SEQ ID NO: 2869874 - RNA, 19 nt, Artificial Sequence
  Description of Artificial Sequence: Synthetic oligonucleotide
accuucuucacaggguguc

SEQ ID NO: 2869875 - RNA, 19 nt, Artificial Sequence
  Description of Artificial Sequence: Synthetic oligonucleotide
gugaguuuggcaggaagug

SEQ ID NO: 2869876 - RNA, 19 nt, Artificial Sequence
  Description of Artificial Sequence: Synthetic oligonucleotide
uugaaggggcuuccgggga

SEQ ID NO: 2869877 - RNA, 19 nt, Artificial Sequence
  Description of Artificial Sequence: Synthetic oligonucleotide
ccccauuugacaaugagga

SEQ ID NO: 2869878 - RNA, 19 nt, Artificial Sequence
  Description of Artificial Sequence: Synthetic oligonucleotide
cuuucgucaccccauuuga

SEQ ID NO: 2869879 - RNA, 19 nt, Artificial Sequence
  Description of Artificial Sequence: Synthetic oligonucleotide
caggucacaucugagggac

SEQ ID NO: 2869880 - RNA, 19 nt, Artificial Sequence
  Description of Artificial Sequence: Synthetic oligonucleotide
cauguuggugccugcuuug

SEQ ID NO: 2869881 - RNA, 19 nt, Artificial Sequence
  Description of Artificial Sequence: Synthetic oligonucleotide
acacugaucccagacagau

SEQ ID NO: 2869882 - RNA, 19 nt, Artificial Sequence
  Description of Artificial Sequence: Synthetic oligonucleotide
cacuucugggauucagggc

SEQ ID NO: 2869883 - RNA, 19 nt, Artificial Sequence
  Description of Artificial Sequence: Synthetic oligonucleotide
uggcacauuugugugggug

SEQ ID NO: 2869884 - RNA, 19 nt, Artificial Sequence
  Description of Artificial Sequence: Synthetic oligonucleotide
auguuggugccugcuuugc

SEQ ID NO: 2869885 - RNA, 19 nt, Artificial Sequence
  Description of Artificial Sequence: Synthetic oligonucleotide
ggauucagggcacauugac

SEQ ID NO: 2869886 - RNA, 19 nt, Artificial Sequence
  Description of Artificial Sequence: Synthetic oligonucleotide
ggauauggcacauuugugu

SEQ ID NO: 2869887 - RNA, 19 nt, Artificial Sequence
  Description of Artificial Sequence: Synthetic oligonucleotide
aagugcacggugggguggg

SEQ ID NO: 2869888 - RNA, 19 nt, Artificial Sequence
  Description of Artificial Sequence: Synthetic oligonucleotide
guuguauacccgguuuccc

SEQ ID NO: 2869889 - RNA, 19 nt, Artificial Sequence
  Description of Artificial Sequence: Synthetic oligonucleotide
gauguagucucuuuuccuu

SEQ ID NO: 2869890 - RNA, 19 nt, Artificial Sequence
  Description of Artificial Sequence: Synthetic oligonucleotide
ugucuugggcccgugcacc

SEQ ID NO: 2869891 - RNA, 19 nt, Artificial Sequence
  Description of Artificial Sequence: Synthetic oligonucleotide
ugucugauucugugagugu

SEQ ID NO: 2869892 - RNA, 19 nt, Artificial Sequence
  Description of Artificial Sequence: Synthetic oligonucleotide
uguuuucgugucugauucu

SEQ ID NO: 2869893 - RNA, 19 nt, Artificial Sequence
  Description of Artificial Sequence: Synthetic oligonucleotide
ugcuucacauagaccuucu

SEQ ID NO: 2869894 - RNA, 19 nt, Artificial Sequence
  Description of Artificial Sequence: Synthetic oligonucleotide
ucugagggacacugauccc

SEQ ID NO: 2869895 - RNA, 19 nt, Artificial Sequence
  Description of Artificial Sequence: Synthetic oligonucleotide
guguaggugacguuguaua

SEQ ID NO: 2869896 - RNA, 19 nt, Artificial Sequence
  Description of Artificial Sequence: Synthetic oligonucleotide
aaugaggauguagucucuu

SEQ ID NO: 2869897 - RNA, 19 nt, Artificial Sequence
  Description of Artificial Sequence: Synthetic oligonucleotide
ugaaggggcuuccggggac

SEQ ID NO: 2869898 - RNA, 19 nt, Artificial Sequence
  Description of Artificial Sequence: Synthetic oligonucleotide
agguugugccacucacuuc

SEQ ID NO: 2869899 - RNA, 19 nt, Artificial Sequence
  Description of Artificial Sequence: Synthetic oligonucleotide
uugaccuugaaggggcuuc

SEQ ID NO: 2869900 - RNA, 19 nt, Artificial Sequence
  Description of Artificial Sequence: Synthetic oligonucleotide
ugugcuucacauagaccuu

SEQ ID NO: 2869901 - RNA, 19 nt, Artificial Sequence
  Description of Artificial Sequence: Synthetic oligonucleotide
cccagacagauaaaaggcc

SEQ ID NO: 2869902 - RNA, 19 nt, Artificial Sequence
  Description of Artificial Sequence: Synthetic oligonucleotide
uaucacagucucugcccug

SEQ ID NO: 2869903 - RNA, 19 nt, Artificial Sequence
  Description of Artificial Sequence: Synthetic oligonucleotide
gggcacauugaccuugaag

SEQ ID NO: 2869904 - RNA, 19 nt, Artificial Sequence
  Description of Artificial Sequence: Synthetic oligonucleotide
uaaccccuuauaucacagu

SEQ ID NO: 2869905 - RNA, 19 nt, Artificial Sequence
  Description of Artificial Sequence: Synthetic oligonucleotide
aguuuggcaggaagugggg

SEQ ID NO: 2869906 - RNA, 19 nt, Artificial Sequence
  Description of Artificial Sequence: Synthetic oligonucleotide
ugcaguccacagugaauga

SEQ ID NO: 2869907 - RNA, 19 nt, Artificial Sequence
  Description of Artificial Sequence: Synthetic oligonucleotide
gugccacucacuucacacc

SEQ ID NO: 2869908 - RNA, 19 nt, Artificial Sequence
  Description of Artificial Sequence: Synthetic oligonucleotide
gugugcauagggauauggc

SEQ ID NO: 2869909 - RNA, 19 nt, Artificial Sequence
  Description of Artificial Sequence: Synthetic oligonucleotide
caucugagggacacugauc

SEQ ID NO: 2869910 - RNA, 19 nt, Artificial Sequence
  Description of Artificial Sequence: Synthetic oligonucleotide
ugacguuguauacccgguu

SEQ ID NO: 2869911 - RNA, 19 nt, Artificial Sequence
  Description of Artificial Sequence: Synthetic oligonucleotide
cacauagaccuucuucaca

SEQ ID NO: 2869912 - RNA, 19 nt, Artificial Sequence
  Description of Artificial Sequence: Synthetic oligonucleotide
gagucugacuccagucugc

SEQ ID NO: 2869913 - RNA, 19 nt, Artificial Sequence
  Description of Artificial Sequence: Synthetic oligonucleotide
aaaaggcccuccaccccuc

SEQ ID NO: 2869914 - RNA, 19 nt, Artificial Sequence
  Description of Artificial Sequence: Synthetic oligonucleotide
accacccaccaucaucaug

SEQ ID NO: 2869915 - RNA, 19 nt, Artificial Sequence
  Description of Artificial Sequence: Synthetic oligonucleotide
uuugugugggugugaguuu

SEQ ID NO: 2869916 - RNA, 19 nt, Artificial Sequence
  Description of Artificial Sequence: Synthetic oligonucleotide
ccaugugcuucacauagac

SEQ ID NO: 2869917 - RNA, 19 nt, Artificial Sequence
  Description of Artificial Sequence: Synthetic oligonucleotide
uugugccacucacuucaca

SEQ ID NO: 2869918 - RNA, 19 nt, Artificial Sequence
  Description of Artificial Sequence: Synthetic oligonucleotide
ugaccuugaaggggcuucc

SEQ ID NO: 2869919 - RNA, 19 nt, Artificial Sequence
  Description of Artificial Sequence: Synthetic oligonucleotide
gucaccccauuugacaaug

SEQ ID NO: 2869920 - RNA, 19 nt, Artificial Sequence
  Description of Artificial Sequence: Synthetic oligonucleotide
guauacccgguuucccaug

SEQ ID NO: 2869921 - RNA, 19 nt, Artificial Sequence
  Description of Artificial Sequence: Synthetic oligonucleotide
ccuaaggcagguguuuucg

SEQ ID NO: 2869922 - RNA, 19 nt, Artificial Sequence
  Description of Artificial Sequence: Synthetic oligonucleotide
cugugagugugcauaggga

SEQ ID NO: 2869923 - RNA, 19 nt, Artificial Sequence
  Description of Artificial Sequence: Synthetic oligonucleotide
ugggagguugugccacuca

SEQ ID NO: 2869924 - RNA, 19 nt, Artificial Sequence
  Description of Artificial Sequence: Synthetic oligonucleotide
aguguaggugacguuguau

SEQ ID NO: 2869925 - RNA, 19 nt, Artificial Sequence
  Description of Artificial Sequence: Synthetic oligonucleotide
aggcccuccaccccucaag

SEQ ID NO: 2869926 - RNA, 19 nt, Artificial Sequence
  Description of Artificial Sequence: Synthetic oligonucleotide
guagucucuuuuccuugac

SEQ ID NO: 2869927 - RNA, 19 nt, Artificial Sequence
  Description of Artificial Sequence: Synthetic oligonucleotide
augaggauguagucucuuu

SEQ ID NO: 2869928 - RNA, 19 nt, Artificial Sequence
  Description of Artificial Sequence: Synthetic oligonucleotide
aucacagucucugcccuga

SEQ ID NO: 2869929 - RNA, 19 nt, Artificial Sequence
  Description of Artificial Sequence: Synthetic oligonucleotide
ucacagucucugcccugag

SEQ ID NO: 2869930 - RNA, 19 nt, Artificial Sequence
  Description of Artificial Sequence: Synthetic oligonucleotide
cuucugggauucagggcac

SEQ ID NO: 2869931 - RNA, 19 nt, Artificial Sequence
  Description of Artificial Sequence: Synthetic oligonucleotide
uccaccccucaagugcacg

SEQ ID NO: 2869932 - RNA, 19 nt, Artificial Sequence
  Description of Artificial Sequence: Synthetic oligonucleotide
ccaucaucauguuggugcc

SEQ ID NO: 2869933 - RNA, 19 nt, Artificial Sequence
  Description of Artificial Sequence: Synthetic oligonucleotide
aucauguuggugccugcuu

SEQ ID NO: 2869934 - RNA, 19 nt, Artificial Sequence
  Description of Artificial Sequence: Synthetic oligonucleotide
cuugggcccgugcaccacc

SEQ ID NO: 2869935 - RNA, 19 nt, Artificial Sequence
  Description of Artificial Sequence: Synthetic oligonucleotide
ggcacuucugggauucagg

SEQ ID NO: 2869936 - RNA, 19 nt, Artificial Sequence
  Description of Artificial Sequence: Synthetic oligonucleotide
accccuuauaucacagucu

SEQ ID NO: 2869937 - RNA, 19 nt, Artificial Sequence
  Description of Artificial Sequence: Synthetic oligonucleotide
gagguugugccacucacuu

SEQ ID NO: 2869938 - RNA, 19 nt, Artificial Sequence
  Description of Artificial Sequence: Synthetic oligonucleotide
uccagucugcccucagguc

SEQ ID NO: 2869939 - RNA, 19 nt, Artificial Sequence
  Description of Artificial Sequence: Synthetic oligonucleotide
acuucacaccuaaggcagg

SEQ ID NO: 2869940 - RNA, 19 nt, Artificial Sequence
  Description of Artificial Sequence: Synthetic oligonucleotide
ucugcccucaggucacauc

SEQ ID NO: 2869941 - RNA, 19 nt, Artificial Sequence
  Description of Artificial Sequence: Synthetic oligonucleotide
aaggggcuuccggggacac

SEQ ID NO: 2869942 - RNA, 19 nt, Artificial Sequence
  Description of Artificial Sequence: Synthetic oligonucleotide
caagugcacgguggggugg

SEQ ID NO: 2869943 - RNA, 19 nt, Artificial Sequence
  Description of Artificial Sequence: Synthetic oligonucleotide
acccaccaucaucauguug

SEQ ID NO: 2869944 - RNA, 19 nt, Artificial Sequence
  Description of Artificial Sequence: Synthetic oligonucleotide
uucacaccuaaggcaggug

SEQ ID NO: 2869945 - RNA, 19 nt, Artificial Sequence
  Description of Artificial Sequence: Synthetic oligonucleotide
aaaggcccuccaccccuca

SEQ ID NO: 2869946 - RNA, 19 nt, Artificial Sequence
  Description of Artificial Sequence: Synthetic oligonucleotide
cagucugcccucaggucac

SEQ ID NO: 2869947 - RNA, 19 nt, Artificial Sequence
  Description of Artificial Sequence: Synthetic oligonucleotide
ugauucugugagugugcau

SEQ ID NO: 2869948 - RNA, 19 nt, Artificial Sequence
  Description of Artificial Sequence: Synthetic oligonucleotide
ccccuuauaucacagucuc

SEQ ID NO: 2869949 - RNA, 19 nt, Artificial Sequence
  Description of Artificial Sequence: Synthetic oligonucleotide
accccucaagugcacggug

SEQ ID NO: 2869950 - RNA, 19 nt, Artificial Sequence
  Description of Artificial Sequence: Synthetic oligonucleotide
acaguguaggugacguugu

SEQ ID NO: 2869951 - RNA, 19 nt, Artificial Sequence
  Description of Artificial Sequence: Synthetic oligonucleotide
uugggcccgugcaccaccc

SEQ ID NO: 2869952 - RNA, 19 nt, Artificial Sequence
  Description of Artificial Sequence: Synthetic oligonucleotide
gaccuugaaggggcuuccg

SEQ ID NO: 2869953 - RNA, 19 nt, Artificial Sequence
  Description of Artificial Sequence: Synthetic oligonucleotide
ugcccucaggucacaucug

SEQ ID NO: 2869954 - RNA, 19 nt, Artificial Sequence
  Description of Artificial Sequence: Synthetic oligonucleotide
gacguuguauacccgguuu

SEQ ID NO: 2869955 - RNA, 19 nt, Artificial Sequence
  Description of Artificial Sequence: Synthetic oligonucleotide
gugucuugggcccgugcac

SEQ ID NO: 2869956 - RNA, 19 nt, Artificial Sequence
  Description of Artificial Sequence: Synthetic oligonucleotide
ggugucuugggcccgugca

SEQ ID NO: 2869957 - RNA, 19 nt, Artificial Sequence
  Description of Artificial Sequence: Synthetic oligonucleotide
uucccaugugcuucacaua

SEQ ID NO: 2869958 - RNA, 19 nt, Artificial Sequence
  Description of Artificial Sequence: Synthetic oligonucleotide
cacucacuucacaccuaag

SEQ ID NO: 2869959 - RNA, 19 nt, Artificial Sequence
  Description of Artificial Sequence: Synthetic oligonucleotide
ggggacacuuucgucaccc

SEQ ID NO: 2869960 - RNA, 19 nt, Artificial Sequence
  Description of Artificial Sequence: Synthetic oligonucleotide
ccugagucugacuccaguc

SEQ ID NO: 2869961 - RNA, 19 nt, Artificial Sequence
  Description of Artificial Sequence: Synthetic oligonucleotide
gacuccagucugcccucag

SEQ ID NO: 2869962 - RNA, 19 nt, Artificial Sequence
  Description of Artificial Sequence: Synthetic oligonucleotide
guccacagugaaugaguuc

SEQ ID NO: 2869963 - RNA, 19 nt, Artificial Sequence
  Description of Artificial Sequence: Synthetic oligonucleotide
ggucacaucugagggacac

SEQ ID NO: 2869964 - RNA, 19 nt, Artificial Sequence
  Description of Artificial Sequence: Synthetic oligonucleotide
aggcacuucugggauucag

SEQ ID NO: 2869965 - RNA, 19 nt, Artificial Sequence
  Description of Artificial Sequence: Synthetic oligonucleotide
gggagguugugccacucac

SEQ ID NO: 2869966 - RNA, 19 nt, Artificial Sequence
  Description of Artificial Sequence: Synthetic oligonucleotide
gggauauggcacauuugug

SEQ ID NO: 2869967 - RNA, 19 nt, Artificial Sequence
  Description of Artificial Sequence: Synthetic oligonucleotide
cugauucugugagugugca

SEQ ID NO: 2869968 - RNA, 19 nt, Artificial Sequence
  Description of Artificial Sequence: Synthetic oligonucleotide
gugcuucacauagaccuuc

SEQ ID NO: 2869969 - RNA, 19 nt, Artificial Sequence
  Description of Artificial Sequence: Synthetic oligonucleotide
ucugggauucagggcacau

SEQ ID NO: 2869970 - RNA, 19 nt, Artificial Sequence
  Description of Artificial Sequence: Synthetic oligonucleotide
aguccacagugaaugaguu

SEQ ID NO: 2869971 - RNA, 19 nt, Artificial Sequence
  Description of Artificial Sequence: Synthetic oligonucleotide
cugagucugacuccagucu

SEQ ID NO: 2869972 - RNA, 19 nt, Artificial Sequence
  Description of Artificial Sequence: Synthetic oligonucleotide
gcaguccacagugaaugag

SEQ ID NO: 2869973 - RNA, 19 nt, Artificial Sequence
  Description of Artificial Sequence: Synthetic oligonucleotide
cugcccucaggucacaucu

SEQ ID NO: 2869974 - RNA, 19 nt, Artificial Sequence
  Description of Artificial Sequence: Synthetic oligonucleotide
gucugacuccagucugccc

SEQ ID NO: 2869975 - RNA, 19 nt, Artificial Sequence
  Description of Artificial Sequence: Synthetic oligonucleotide
gacacugaucccagacaga

SEQ ID NO: 2869976 - RNA, 19 nt, Artificial Sequence
  Description of Artificial Sequence: Synthetic oligonucleotide
auacccgguuucccaugug

SEQ ID NO: 2869977 - RNA, 19 nt, Artificial Sequence
  Description of Artificial Sequence: Synthetic oligonucleotide
acacuuucgucaccccauu

SEQ ID NO: 2869978 - RNA, 19 nt, Artificial Sequence
  Description of Artificial Sequence: Synthetic oligonucleotide
ggacacuuucgucacccca

SEQ ID NO: 2869979 - RNA, 19 nt, Artificial Sequence
  Description of Artificial Sequence: Synthetic oligonucleotide
acaccuaaggcagguguuu

SEQ ID NO: 2869980 - RNA, 19 nt, Artificial Sequence
  Description of Artificial Sequence: Synthetic oligonucleotide
gcaccacccaccaucauca

SEQ ID NO: 2869981 - RNA, 19 nt, Artificial Sequence
  Description of Artificial Sequence: Synthetic oligonucleotide
guuucccaugugcuucaca

SEQ ID NO: 2869982 - RNA, 19 nt, Artificial Sequence
  Description of Artificial Sequence: Synthetic oligonucleotide
uuccggggacacuuucguc

SEQ ID NO: 2869983 - RNA, 19 nt, Artificial Sequence
  Description of Artificial Sequence: Synthetic oligonucleotide
acagggugucuugggcccg

SEQ ID NO: 2869984 - RNA, 19 nt, Artificial Sequence
  Description of Artificial Sequence: Synthetic oligonucleotide
agguguuuucgugucugau

SEQ ID NO: 2869985 - RNA, 19 nt, Artificial Sequence
  Description of Artificial Sequence: Synthetic oligonucleotide
uucagggcacauugaccuu

SEQ ID NO: 2869986 - RNA, 19 nt, Artificial Sequence
  Description of Artificial Sequence: Synthetic oligonucleotide
gggacacugaucccagaca

SEQ ID NO: 2869987 - RNA, 19 nt, Artificial Sequence
  Description of Artificial Sequence: Synthetic oligonucleotide
gugugggugugaguuuggc

SEQ ID NO: 2869988 - RNA, 19 nt, Artificial Sequence
  Description of Artificial Sequence: Synthetic oligonucleotide
ggauguagucucuuuuccu

SEQ ID NO: 2869989 - RNA, 19 nt, Artificial Sequence
  Description of Artificial Sequence: Synthetic oligonucleotide
ccccucaagugcacggugg

SEQ ID NO: 2869990 - RNA, 19 nt, Artificial Sequence
  Description of Artificial Sequence: Synthetic oligonucleotide
ugacaguguaggugacguu

SEQ ID NO: 2869991 - RNA, 19 nt, Artificial Sequence
  Description of Artificial Sequence: Synthetic oligonucleotide
gcuuccggggacacuuucg

SEQ ID NO: 2869992 - RNA, 19 nt, Artificial Sequence
  Description of Artificial Sequence: Synthetic oligonucleotide
ccagucugcccucagguca

SEQ ID NO: 2869993 - RNA, 19 nt, Artificial Sequence
  Description of Artificial Sequence: Synthetic oligonucleotide
aaggcccuccaccccucaa

SEQ ID NO: 2869994 - RNA, 19 nt, Artificial Sequence
  Description of Artificial Sequence: Synthetic oligonucleotide
gucucuuuuccuugacagu

SEQ ID NO: 2869995 - RNA, 19 nt, Artificial Sequence
  Description of Artificial Sequence: Synthetic oligonucleotide
cacaucugagggacacuga

SEQ ID NO: 2869996 - RNA, 19 nt, Artificial Sequence
  Description of Artificial Sequence: Synthetic oligonucleotide
ggaggcacuucugggauuc

SEQ ID NO: 2869997 - RNA, 19 nt, Artificial Sequence
  Description of Artificial Sequence: Synthetic oligonucleotide
cucaagugcacgguggggu

SEQ ID NO: 2869998 - RNA, 19 nt, Artificial Sequence
  Description of Artificial Sequence: Synthetic oligonucleotide
uucugggauucagggcaca

SEQ ID NO: 2869999 - RNA, 19 nt, Artificial Sequence
  Description of Artificial Sequence: Synthetic oligonucleotide
ccaccccucaagugcacgg

SEQ ID NO: 2870000 - RNA, 19 nt, Artificial Sequence
  Description of Artificial Sequence: Synthetic oligonucleotide
aggugacguuguauacccg

SEQ ID NO: 2870001 - RNA, 19 nt, Artificial Sequence
  Description of Artificial Sequence: Synthetic oligonucleotide
ccgugcaccacccaccauc

SEQ ID NO: 2870002 - RNA, 19 nt, Artificial Sequence
  Description of Artificial Sequence: Synthetic oligonucleotide
uggugccugcuuugcugca

SEQ ID NO: 2870003 - RNA, 19 nt, Artificial Sequence
  Description of Artificial Sequence: Synthetic oligonucleotide
gugagugugcauagggaua

SEQ ID NO: 2870004 - RNA, 19 nt, Artificial Sequence
  Description of Artificial Sequence: Synthetic oligonucleotide
cccucaagugcacgguggg

SEQ ID NO: 2870005 - RNA, 19 nt, Artificial Sequence
  Description of Artificial Sequence: Synthetic oligonucleotide
acccgguuucccaugugcu

SEQ ID NO: 2870006 - RNA, 19 nt, Artificial Sequence
  Description of Artificial Sequence: Synthetic oligonucleotide
ggcacauuugugugggugu

SEQ ID NO: 2870007 - RNA, 19 nt, Artificial Sequence
  Description of Artificial Sequence: Synthetic oligonucleotide
acgguggggugggagguug

SEQ ID NO: 2870008 - RNA, 19 nt, Artificial Sequence
  Description of Artificial Sequence: Synthetic oligonucleotide
cucuuuuccuugacagugu

SEQ ID NO: 2870009 - RNA, 19 nt, Artificial Sequence
  Description of Artificial Sequence: Synthetic oligonucleotide
cuccagucugcccucaggu

SEQ ID NO: 2870010 - RNA, 19 nt, Artificial Sequence
  Description of Artificial Sequence: Synthetic oligonucleotide
gcacauuugugugggugug

SEQ ID NO: 2870011 - RNA, 19 nt, Artificial Sequence
  Description of Artificial Sequence: Synthetic oligonucleotide
caccaucaucauguuggug

SEQ ID NO: 2870012 - RNA, 19 nt, Artificial Sequence
  Description of Artificial Sequence: Synthetic oligonucleotide
cguuguauacccgguuucc

SEQ ID NO: 2870013 - RNA, 19 nt, Artificial Sequence
  Description of Artificial Sequence: Synthetic oligonucleotide
gagugugcauagggauaug

SEQ ID NO: 2870014 - RNA, 19 nt, Artificial Sequence
  Description of Artificial Sequence: Synthetic oligonucleotide
gaaggggcuuccggggaca

SEQ ID NO: 2870015 - RNA, 19 nt, Artificial Sequence
  Description of Artificial Sequence: Synthetic oligonucleotide
auugaccuugaaggggcuu

SEQ ID NO: 2870016 - RNA, 19 nt, Artificial Sequence
  Description of Artificial Sequence: Synthetic oligonucleotide
ugccugcuuugcugcaguc

SEQ ID NO: 2870017 - RNA, 19 nt, Artificial Sequence
  Description of Artificial Sequence: Synthetic oligonucleotide
auggcacauuugugugggu

SEQ ID NO: 2870018 - RNA, 19 nt, Artificial Sequence
  Description of Artificial Sequence: Synthetic oligonucleotide
cagguguuuucgugucuga

SEQ ID NO: 2870019 - RNA, 19 nt, Artificial Sequence
  Description of Artificial Sequence: Synthetic oligonucleotide
gucuugggcccgugcacca

SEQ ID NO: 2870020 - RNA, 19 nt, Artificial Sequence
  Description of Artificial Sequence: Synthetic oligonucleotide
cuuccggggacacuuucgu

SEQ ID NO: 2870021 - RNA, 19 nt, Artificial Sequence
  Description of Artificial Sequence: Synthetic oligonucleotide
gguguuuucgugucugauu

SEQ ID NO: 2870022 - RNA, 19 nt, Artificial Sequence
  Description of Artificial Sequence: Synthetic oligonucleotide
ucuugggcccgugcaccac

SEQ ID NO: 2870023 - RNA, 19 nt, Artificial Sequence
  Description of Artificial Sequence: Synthetic oligonucleotide
ugacuccagucugcccuca

SEQ ID NO: 2870024 - RNA, 19 nt, Artificial Sequence
  Description of Artificial Sequence: Synthetic oligonucleotide
cuaaggcagguguuuucgu

SEQ ID NO: 2870025 - RNA, 19 nt, Artificial Sequence
  Description of Artificial Sequence: Synthetic oligonucleotide
cagggcacauugaccuuga

SEQ ID NO: 2870026 - RNA, 19 nt, Artificial Sequence
  Description of Artificial Sequence: Synthetic oligonucleotide
ucucugcccugagucugac

SEQ ID NO: 2870027 - RNA, 19 nt, Artificial Sequence
  Description of Artificial Sequence: Synthetic oligonucleotide
ggugccugcuuugcugcag

SEQ ID NO: 2870028 - RNA, 19 nt, Artificial Sequence
  Description of Artificial Sequence: Synthetic oligonucleotide
gugcacgguggggugggag

SEQ ID NO: 2870029 - RNA, 19 nt, Artificial Sequence
  Description of Artificial Sequence: Synthetic oligonucleotide
cacauuuguguggguguga

SEQ ID NO: 2870030 - RNA, 19 nt, Artificial Sequence
  Description of Artificial Sequence: Synthetic oligonucleotide
caaugaggauguagucucu

SEQ ID NO: 2870031 - RNA, 19 nt, Artificial Sequence
  Description of Artificial Sequence: Synthetic oligonucleotide
gggacacuuucgucacccc

SEQ ID NO: 2870032 - RNA, 19 nt, Artificial Sequence
  Description of Artificial Sequence: Synthetic oligonucleotide
cuccaccccucaagugcac

SEQ ID NO: 2870033 - RNA, 19 nt, Artificial Sequence
  Description of Artificial Sequence: Synthetic oligonucleotide
cuucacaccuaaggcaggu

SEQ ID NO: 2870034 - RNA, 19 nt, Artificial Sequence
  Description of Artificial Sequence: Synthetic oligonucleotide
ccgguuucccaugugcuuc

SEQ ID NO: 2870035 - RNA, 19 nt, Artificial Sequence
  Description of Artificial Sequence: Synthetic oligonucleotide
ugggcccgugcaccaccca

SEQ ID NO: 2870036 - RNA, 19 nt, Artificial Sequence
  Description of Artificial Sequence: Synthetic oligonucleotide
cugaucccagacagauaaa

SEQ ID NO: 2870037 - RNA, 19 nt, Artificial Sequence
  Description of Artificial Sequence: Synthetic oligonucleotide
ccuugacaguguaggugac

SEQ ID NO: 2870038 - RNA, 19 nt, Artificial Sequence
  Description of Artificial Sequence: Synthetic oligonucleotide
gugacguuguauacccggu

SEQ ID NO: 2870039 - RNA, 19 nt, Artificial Sequence
  Description of Artificial Sequence: Synthetic oligonucleotide
ccucaagugcacggugggg

SEQ ID NO: 2870040 - RNA, 19 nt, Artificial Sequence
  Description of Artificial Sequence: Synthetic oligonucleotide
ccugucuaaccccuuauau

SEQ ID NO: 2870041 - RNA, 19 nt, Artificial Sequence
  Description of Artificial Sequence: Synthetic oligonucleotide
cacugaucccagacagaua

SEQ ID NO: 2870042 - RNA, 19 nt, Artificial Sequence
  Description of Artificial Sequence: Synthetic oligonucleotide
cacaccuaaggcagguguu

SEQ ID NO: 2870043 - RNA, 19 nt, Artificial Sequence
  Description of Artificial Sequence: Synthetic oligonucleotide
caucauguuggugccugcu

SEQ ID NO: 2870044 - RNA, 19 nt, Artificial Sequence
  Description of Artificial Sequence: Synthetic oligonucleotide
gggugucuugggcccgugc

SEQ ID NO: 2870045 - RNA, 19 nt, Artificial Sequence
  Description of Artificial Sequence: Synthetic oligonucleotide
gggcccgugcaccacccac

SEQ ID NO: 2870046 - RNA, 19 nt, Artificial Sequence
  Description of Artificial Sequence: Synthetic oligonucleotide
cagucucugcccugagucu

SEQ ID NO: 2870047 - RNA, 19 nt, Artificial Sequence
  Description of Artificial Sequence: Synthetic oligonucleotide
gucucugcccugagucuga

SEQ ID NO: 2870048 - RNA, 19 nt, Artificial Sequence
  Description of Artificial Sequence: Synthetic oligonucleotide
agggcacauugaccuugaa

SEQ ID NO: 2870049 - RNA, 19 nt, Artificial Sequence
  Description of Artificial Sequence: Synthetic oligonucleotide
ccuccaccccucaagugca

SEQ ID NO: 2870050 - RNA, 19 nt, Artificial Sequence
  Description of Artificial Sequence: Synthetic oligonucleotide
ggcuuccggggacacuuuc

SEQ ID NO: 2870051 - RNA, 19 nt, Artificial Sequence
  Description of Artificial Sequence: Synthetic oligonucleotide
cauugaccuugaaggggcu

SEQ ID NO: 2870052 - RNA, 19 nt, Artificial Sequence
  Description of Artificial Sequence: Synthetic oligonucleotide
auuugacaaugaggaugua

SEQ ID NO: 2870053 - RNA, 19 nt, Artificial Sequence
  Description of Artificial Sequence: Synthetic oligonucleotide
gggauucagggcacauuga

SEQ ID NO: 2870054 - RNA, 19 nt, Artificial Sequence
  Description of Artificial Sequence: Synthetic oligonucleotide
gguggggugggagguugug

SEQ ID NO: 2870055 - RNA, 19 nt, Artificial Sequence
  Description of Artificial Sequence: Synthetic oligonucleotide
gugggagguugugccacuc

SEQ ID NO: 2870056 - RNA, 19 nt, Artificial Sequence
  Description of Artificial Sequence: Synthetic oligonucleotide
ggcccgugcaccacccacc

SEQ ID NO: 2870057 - RNA, 19 nt, Artificial Sequence
  Description of Artificial Sequence: Synthetic oligonucleotide
gugccugcuuugcugcagu

SEQ ID NO: 2870058 - RNA, 19 nt, Artificial Sequence
  Description of Artificial Sequence: Synthetic oligonucleotide
gggugugaguuuggcagga

SEQ ID NO: 2870059 - RNA, 19 nt, Artificial Sequence
  Description of Artificial Sequence: Synthetic oligonucleotide
ccacucacuucacaccuaa

SEQ ID NO: 2870060 - RNA, 19 nt, Artificial Sequence
  Description of Artificial Sequence: Synthetic oligonucleotide
caguguaggugacguugua

SEQ ID NO: 2870061 - RNA, 19 nt, Artificial Sequence
  Description of Artificial Sequence: Synthetic oligonucleotide
aggucacaucugagggaca

SEQ ID NO: 2870062 - RNA, 19 nt, Artificial Sequence
  Description of Artificial Sequence: Synthetic oligonucleotide
cacagucucugcccugagu

SEQ ID NO: 2870063 - RNA, 19 nt, Artificial Sequence
  Description of Artificial Sequence: Synthetic oligonucleotide
ggggaggcacuucugggau

SEQ ID NO: 2870064 - RNA, 19 nt, Artificial Sequence
  Description of Artificial Sequence: Synthetic oligonucleotide
gaggcacuucugggauuca

SEQ ID NO: 2870065 - RNA, 19 nt, Artificial Sequence
  Description of Artificial Sequence: Synthetic oligonucleotide
cuucuucacagggugucuu

SEQ ID NO: 2870066 - RNA, 19 nt, Artificial Sequence
  Description of Artificial Sequence: Synthetic oligonucleotide
cgugcaccacccaccauca

SEQ ID NO: 2870067 - RNA, 19 nt, Artificial Sequence
  Description of Artificial Sequence: Synthetic oligonucleotide
agucugcccucaggucaca

SEQ ID NO: 2870068 - RNA, 19 nt, Artificial Sequence
  Description of Artificial Sequence: Synthetic oligonucleotide
gcccgugcaccacccacca

SEQ ID NO: 2870069 - RNA, 19 nt, Artificial Sequence
  Description of Artificial Sequence: Synthetic oligonucleotide
gucacaucugagggacacu

SEQ ID NO: 2870070 - RNA, 19 nt, Artificial Sequence
  Description of Artificial Sequence: Synthetic oligonucleotide
agggugucuugggcccgug

SEQ ID NO: 2870071 - RNA, 19 nt, Artificial Sequence
  Description of Artificial Sequence: Synthetic oligonucleotide
cccaugugcuucacauaga

SEQ ID NO: 2870072 - RNA, 19 nt, Artificial Sequence
  Description of Artificial Sequence: Synthetic oligonucleotide
ggagguugugccacucacu

SEQ ID NO: 2870073 - RNA, 19 nt, Artificial Sequence
  Description of Artificial Sequence: Synthetic oligonucleotide
agugcacggugggguggga

SEQ ID NO: 2870074 - RNA, 19 nt, Artificial Sequence
  Description of Artificial Sequence: Synthetic oligonucleotide
gguuucccaugugcuucac

SEQ ID NO: 2870075 - RNA, 19 nt, Artificial Sequence
  Description of Artificial Sequence: Synthetic oligonucleotide
ggcccuccaccccucaagu

SEQ ID NO: 2870076 - RNA, 19 nt, Artificial Sequence
  Description of Artificial Sequence: Synthetic oligonucleotide
caucaucauguuggugccu

SEQ ID NO: 2870077 - RNA, 19 nt, Artificial Sequence
  Description of Artificial Sequence: Synthetic oligonucleotide
ggugggagguugugccacu

SEQ ID NO: 2870078 - RNA, 19 nt, Artificial Sequence
  Description of Artificial Sequence: Synthetic oligonucleotide
ggggcuuccggggacacuu

SEQ ID NO: 2870079 - RNA, 19 nt, Artificial Sequence
  Description of Artificial Sequence: Synthetic oligonucleotide
cacuuucgucaccccauuu

SEQ ID NO: 2870080 - RNA, 19 nt, Artificial Sequence
  Description of Artificial Sequence: Synthetic oligonucleotide
cccugucuaaccccuuaua

SEQ ID NO: 2870081 - RNA, 19 nt, Artificial Sequence
  Description of Artificial Sequence: Synthetic oligonucleotide
caccuaaggcagguguuuu

SEQ ID NO: 2870082 - RNA, 19 nt, Artificial Sequence
  Description of Artificial Sequence: Synthetic oligonucleotide
cugggauucagggcacauu

SEQ ID NO: 2870083 - RNA, 19 nt, Artificial Sequence
  Description of Artificial Sequence: Synthetic oligonucleotide
gcugcaguccacagugaau

SEQ ID NO: 2870084 - RNA, 19 nt, Artificial Sequence
  Description of Artificial Sequence: Synthetic oligonucleotide
caccccucaagugcacggu

SEQ ID NO: 2870085 - RNA, 19 nt, Artificial Sequence
  Description of Artificial Sequence: Synthetic oligonucleotide
cucugcccugagucugacu

SEQ ID NO: 2870086 - RNA, 19 nt, Artificial Sequence
  Description of Artificial Sequence: Synthetic oligonucleotide
cccauuugacaaugaggau

SEQ ID NO: 2870087 - RNA, 19 nt, Artificial Sequence
  Description of Artificial Sequence: Synthetic oligonucleotide
cccuuauaucacagucucu

SEQ ID NO: 2870088 - RNA, 19 nt, Artificial Sequence
  Description of Artificial Sequence: Synthetic oligonucleotide
gcuucacauagaccuucuu

SEQ ID NO: 2870089 - RNA, 19 nt, Artificial Sequence
  Description of Artificial Sequence: Synthetic oligonucleotide
cgguuucccaugugcuuca

SEQ ID NO: 2870090 - RNA, 19 nt, Artificial Sequence
  Description of Artificial Sequence: Synthetic oligonucleotide
ccaccaucaucauguuggu

SEQ ID NO: 2870091 - RNA, 19 nt, Artificial Sequence
  Description of Artificial Sequence: Synthetic oligonucleotide
cccugagucugacuccagu

SEQ ID NO: 2870092 - RNA, 19 nt, Artificial Sequence
  Description of Artificial Sequence: Synthetic oligonucleotide
gcacgguggggugggaggu

SEQ ID NO: 2870093 - RNA, 19 nt, Artificial Sequence
  Description of Artificial Sequence: Synthetic oligonucleotide
gccacucacuucacaccua

SEQ ID NO: 2870094 - RNA, 19 nt, Artificial Sequence
  Description of Artificial Sequence: Synthetic oligonucleotide
cgugucugauucugugagu

SEQ ID NO: 2870095 - RNA, 19 nt, Artificial Sequence
  Description of Artificial Sequence: Synthetic oligonucleotide
ccuucuucacagggugucu

SEQ ID NO: 2870096 - RNA, 19 nt, Artificial Sequence
  Description of Artificial Sequence: Synthetic oligonucleotide
gggaggcacuucugggauu

SEQ ID NO: 2870097 - RNA, 19 nt, Artificial Sequence
  Description of Artificial Sequence: Synthetic oligonucleotide
gucugcccucaggucacau

SEQ ID NO: 2870098 - RNA, 19 nt, Artificial Sequence
  Description of Artificial Sequence: Synthetic oligonucleotide
gugcaccacccaccaucau

SEQ ID NO: 2870099 - RNA, 19 nt, Artificial Sequence
  Description of Artificial Sequence: Synthetic oligonucleotide
caccacccaccaucaucau

SEQ ID NO: 2870100 - RNA, 19 nt, Artificial Sequence
  Description of Artificial Sequence: Synthetic oligonucleotide
cagggugucuugggcccgu

SEQ ID NO: 2870101 - RNA, 19 nt, Artificial Sequence
  Description of Artificial Sequence: Synthetic oligonucleotide
cccgguuucccaugugcuu

SEQ ID NO: 2870102 - RNA, 19 nt, Artificial Sequence
  Description of Artificial Sequence: Synthetic oligonucleotide
cgucaccccauuugacaau

SEQ ID NO: 2870103 - RNA, 19 nt, Artificial Sequence
  Description of Artificial Sequence: Synthetic oligonucleotide
cacgguggggugggagguu

SEQ ID NO: 2870104 - RNA, 19 nt, Artificial Sequence
  Description of Artificial Sequence: Synthetic oligonucleotide
gggcuuccggggacacuuu

SEQ ID NO: 2870105 - RNA, 19 nt, Artificial Sequence
  Description of Artificial Sequence: Synthetic oligonucleotide
cgguggggugggagguugu

SEQ ID NO: 2870106 - RNA, 19 nt, Artificial Sequence
  Description of Artificial Sequence: Synthetic oligonucleotide
cccgugcaccacccaccau

SEQ ID NO: 2870107 - RNA, 19 nt, Artificial Sequence
  Description of Artificial Sequence: Synthetic oligonucleotide
uucaguaucuggaagacgg

SEQ ID NO: 2870108 - RNA, 19 nt, Artificial Sequence
  Description of Artificial Sequence: Synthetic oligonucleotide
aguuacuuuucccaggucc

SEQ ID NO: 2870109 - RNA, 19 nt, Artificial Sequence
  Description of Artificial Sequence: Synthetic oligonucleotide
aacacaucagggucgaugg

SEQ ID NO: 2870110 - RNA, 19 nt, Artificial Sequence
  Description of Artificial Sequence: Synthetic oligonucleotide
uucagauucagcaagucca

SEQ ID NO: 2870111 - RNA, 19 nt, Artificial Sequence
  Description of Artificial Sequence: Synthetic oligonucleotide
guuguggacagagauaugg

SEQ ID NO: 2870112 - RNA, 19 nt, Artificial Sequence
  Description of Artificial Sequence: Synthetic oligonucleotide
ucuugaacacaucaggguc

SEQ ID NO: 2870113 - RNA, 19 nt, Artificial Sequence
  Description of Artificial Sequence: Synthetic oligonucleotide
cuugaacacaucagggucg

SEQ ID NO: 2870114 - RNA, 19 nt, Artificial Sequence
  Description of Artificial Sequence: Synthetic oligonucleotide
gaucuugaacacaucaggg

SEQ ID NO: 2870115 - RNA, 19 nt, Artificial Sequence
  Description of Artificial Sequence: Synthetic oligonucleotide
uggacagagauauggauac

SEQ ID NO: 2870116 - RNA, 19 nt, Artificial Sequence
  Description of Artificial Sequence: Synthetic oligonucleotide
acggcuuccacguucugcc

SEQ ID NO: 2870117 - RNA, 19 nt, Artificial Sequence
  Description of Artificial Sequence: Synthetic oligonucleotide
ucuguucuggccuauguac

SEQ ID NO: 2870118 - RNA, 19 nt, Artificial Sequence
  Description of Artificial Sequence: Synthetic oligonucleotide
gacagagauauggauacgg

SEQ ID NO: 2870119 - RNA, 19 nt, Artificial Sequence
  Description of Artificial Sequence: Synthetic oligonucleotide
ucuggauggguccuucacg

SEQ ID NO: 2870120 - RNA, 19 nt, Artificial Sequence
  Description of Artificial Sequence: Synthetic oligonucleotide
aagagugcagugucuguuc

SEQ ID NO: 2870121 - RNA, 19 nt, Artificial Sequence
  Description of Artificial Sequence: Synthetic oligonucleotide
agugcaagcucguacagcu

SEQ ID NO: 2870122 - RNA, 19 nt, Artificial Sequence
  Description of Artificial Sequence: Synthetic oligonucleotide
aagcgcuagcuucugcagc

SEQ ID NO: 2870123 - RNA, 19 nt, Artificial Sequence
  Description of Artificial Sequence: Synthetic oligonucleotide
guucccagcacuuucuucc

SEQ ID NO: 2870124 - RNA, 19 nt, Artificial Sequence
  Description of Artificial Sequence: Synthetic oligonucleotide
ggaucuugaacacaucagg

SEQ ID NO: 2870125 - RNA, 19 nt, Artificial Sequence
  Description of Artificial Sequence: Synthetic oligonucleotide
uauggauacggaguccugg

SEQ ID NO: 2870126 - RNA, 19 nt, Artificial Sequence
  Description of Artificial Sequence: Synthetic oligonucleotide
acuuucuuccgccgaagcg

SEQ ID NO: 2870127 - RNA, 19 nt, Artificial Sequence
  Description of Artificial Sequence: Synthetic oligonucleotide
uacagcuccaucuccucgg

SEQ ID NO: 2870128 - RNA, 19 nt, Artificial Sequence
  Description of Artificial Sequence: Synthetic oligonucleotide
gauucagcaaguccaccag

SEQ ID NO: 2870129 - RNA, 19 nt, Artificial Sequence
  Description of Artificial Sequence: Synthetic oligonucleotide
acacauggacuucaguauc

SEQ ID NO: 2870130 - RNA, 19 nt, Artificial Sequence
  Description of Artificial Sequence: Synthetic oligonucleotide
cuggauggguccuucacgg

SEQ ID NO: 2870131 - RNA, 19 nt, Artificial Sequence
  Description of Artificial Sequence: Synthetic oligonucleotide
acguucugccacuaugggc

SEQ ID NO: 2870132 - RNA, 19 nt, Artificial Sequence
  Description of Artificial Sequence: Synthetic oligonucleotide
cuauguacugcuccgggag

SEQ ID NO: 2870133 - RNA, 19 nt, Artificial Sequence
  Description of Artificial Sequence: Synthetic oligonucleotide
agauucagcaaguccacca

SEQ ID NO: 2870134 - RNA, 19 nt, Artificial Sequence
  Description of Artificial Sequence: Synthetic oligonucleotide
cagagauauggauacggag

SEQ ID NO: 2870135 - RNA, 19 nt, Artificial Sequence
  Description of Artificial Sequence: Synthetic oligonucleotide
cuuucuuccgccgaagcgc

SEQ ID NO: 2870136 - RNA, 19 nt, Artificial Sequence
  Description of Artificial Sequence: Synthetic oligonucleotide
agagauauggauacggagu

SEQ ID NO: 2870137 - RNA, 19 nt, Artificial Sequence
  Description of Artificial Sequence: Synthetic oligonucleotide
acuuuucccagguccugcc

SEQ ID NO: 2870138 - RNA, 19 nt, Artificial Sequence
  Description of Artificial Sequence: Synthetic oligonucleotide
gacuucaguaucuggaaga

SEQ ID NO: 2870139 - RNA, 19 nt, Artificial Sequence
  Description of Artificial Sequence: Synthetic oligonucleotide
aucuugaacacaucagggu

SEQ ID NO: 2870140 - RNA, 19 nt, Artificial Sequence
  Description of Artificial Sequence: Synthetic oligonucleotide
aaaagagugcagugucugu

SEQ ID NO: 2870141 - RNA, 19 nt, Artificial Sequence
  Description of Artificial Sequence: Synthetic oligonucleotide
guucagauucagcaagucc

SEQ ID NO: 2870142 - RNA, 19 nt, Artificial Sequence
  Description of Artificial Sequence: Synthetic oligonucleotide
agcgucgccgccuccagcc

SEQ ID NO: 2870143 - RNA, 19 nt, Artificial Sequence
  Description of Artificial Sequence: Synthetic oligonucleotide
auggauacggaguccuggg

SEQ ID NO: 2870144 - RNA, 19 nt, Artificial Sequence
  Description of Artificial Sequence: Synthetic oligonucleotide
ugcagccagugcaagcucg

SEQ ID NO: 2870145 - RNA, 19 nt, Artificial Sequence
  Description of Artificial Sequence: Synthetic oligonucleotide
uccacguucugccacuaug

SEQ ID NO: 2870146 - RNA, 19 nt, Artificial Sequence
  Description of Artificial Sequence: Synthetic oligonucleotide
cacguucagauucagcaag

SEQ ID NO: 2870147 - RNA, 19 nt, Artificial Sequence
  Description of Artificial Sequence: Synthetic oligonucleotide
agugcagugucuguucugg

SEQ ID NO: 2870148 - RNA, 19 nt, Artificial Sequence
  Description of Artificial Sequence: Synthetic oligonucleotide
agcucguacagcuccaucu

SEQ ID NO: 2870149 - RNA, 19 nt, Artificial Sequence
  Description of Artificial Sequence: Synthetic oligonucleotide
ucagauucagcaaguccac

SEQ ID NO: 2870150 - RNA, 19 nt, Artificial Sequence
  Description of Artificial Sequence: Synthetic oligonucleotide
auucagcaaguccaccagg

SEQ ID NO: 2870151 - RNA, 19 nt, Artificial Sequence
  Description of Artificial Sequence: Synthetic oligonucleotide
ugcagugucuguucuggcc

SEQ ID NO: 2870152 - RNA, 19 nt, Artificial Sequence
  Description of Artificial Sequence: Synthetic oligonucleotide
gaacacaucagggucgaug

SEQ ID NO: 2870153 - RNA, 19 nt, Artificial Sequence
  Description of Artificial Sequence: Synthetic oligonucleotide
uguucuggccuauguacug

SEQ ID NO: 2870154 - RNA, 19 nt, Artificial Sequence
  Description of Artificial Sequence: Synthetic oligonucleotide
acuaugggcacacugccaa

SEQ ID NO: 2870155 - RNA, 19 nt, Artificial Sequence
  Description of Artificial Sequence: Synthetic oligonucleotide
uguggacagagauauggau

SEQ ID NO: 2870156 - RNA, 19 nt, Artificial Sequence
  Description of Artificial Sequence: Synthetic oligonucleotide
agcaaguccaccaggaucu

SEQ ID NO: 2870157 - RNA, 19 nt, Artificial Sequence
  Description of Artificial Sequence: Synthetic oligonucleotide
agccagugcaagcucguac

SEQ ID NO: 2870158 - RNA, 19 nt, Artificial Sequence
  Description of Artificial Sequence: Synthetic oligonucleotide
uggauacggaguccugggg

SEQ ID NO: 2870159 - RNA, 19 nt, Artificial Sequence
  Description of Artificial Sequence: Synthetic oligonucleotide
uguagaugucccgagugca

SEQ ID NO: 2870160 - RNA, 19 nt, Artificial Sequence
  Description of Artificial Sequence: Synthetic oligonucleotide
uuccucuagucucuguugu

SEQ ID NO: 2870161 - RNA, 19 nt, Artificial Sequence
  Description of Artificial Sequence: Synthetic oligonucleotide
uccuucacggcuuccacgu

SEQ ID NO: 2870162 - RNA, 19 nt, Artificial Sequence
  Description of Artificial Sequence: Synthetic oligonucleotide
cacaucagggucgauggcg

SEQ ID NO: 2870163 - RNA, 19 nt, Artificial Sequence
  Description of Artificial Sequence: Synthetic oligonucleotide
uggccuauguacugcuccg

SEQ ID NO: 2870164 - RNA, 19 nt, Artificial Sequence
  Description of Artificial Sequence: Synthetic oligonucleotide
uuguggacagagauaugga

SEQ ID NO: 2870165 - RNA, 19 nt, Artificial Sequence
  Description of Artificial Sequence: Synthetic oligonucleotide
gaguccuggggaucgcucg

SEQ ID NO: 2870166 - RNA, 19 nt, Artificial Sequence
  Description of Artificial Sequence: Synthetic oligonucleotide
gaagcgcuagcuucugcag

SEQ ID NO: 2870167 - RNA, 19 nt, Artificial Sequence
  Description of Artificial Sequence: Synthetic oligonucleotide
cauggacuucaguaucugg

SEQ ID NO: 2870168 - RNA, 19 nt, Artificial Sequence
  Description of Artificial Sequence: Synthetic oligonucleotide
agccuaguagcacugggcu

SEQ ID NO: 2870169 - RNA, 19 nt, Artificial Sequence
  Description of Artificial Sequence: Synthetic oligonucleotide
aguagcacugggcuggcgu

SEQ ID NO: 2870170 - RNA, 19 nt, Artificial Sequence
  Description of Artificial Sequence: Synthetic oligonucleotide
guaucuggaagacggccag

SEQ ID NO: 2870171 - RNA, 19 nt, Artificial Sequence
  Description of Artificial Sequence: Synthetic oligonucleotide
ucuguuguggacagagaua

SEQ ID NO: 2870172 - RNA, 19 nt, Artificial Sequence
  Description of Artificial Sequence: Synthetic oligonucleotide
ucaguaucuggaagacggc

SEQ ID NO: 2870173 - RNA, 19 nt, Artificial Sequence
  Description of Artificial Sequence: Synthetic oligonucleotide
acugccaagagugggacca

SEQ ID NO: 2870174 - RNA, 19 nt, Artificial Sequence
  Description of Artificial Sequence: Synthetic oligonucleotide
cuggccuauguacugcucc

SEQ ID NO: 2870175 - RNA, 19 nt, Artificial Sequence
  Description of Artificial Sequence: Synthetic oligonucleotide
uggacuucaguaucuggaa

SEQ ID NO: 2870176 - RNA, 19 nt, Artificial Sequence
  Description of Artificial Sequence: Synthetic oligonucleotide
ugccacuaugggcacacug

SEQ ID NO: 2870177 - RNA, 19 nt, Artificial Sequence
  Description of Artificial Sequence: Synthetic oligonucleotide
gucucuguuguggacagag

SEQ ID NO: 2870178 - RNA, 19 nt, Artificial Sequence
  Description of Artificial Sequence: Synthetic oligonucleotide
aucuggaagacggccaggg

SEQ ID NO: 2870179 - RNA, 19 nt, Artificial Sequence
  Description of Artificial Sequence: Synthetic oligonucleotide
augucccgagugcagcacc

SEQ ID NO: 2870180 - RNA, 19 nt, Artificial Sequence
  Description of Artificial Sequence: Synthetic oligonucleotide
aaagagugcagugucuguu

SEQ ID NO: 2870181 - RNA, 19 nt, Artificial Sequence
  Description of Artificial Sequence: Synthetic oligonucleotide
uacggaguccuggggaucg

SEQ ID NO: 2870182 - RNA, 19 nt, Artificial Sequence
  Description of Artificial Sequence: Synthetic oligonucleotide
ugucuguucuggccuaugu

SEQ ID NO: 2870183 - RNA, 19 nt, Artificial Sequence
  Description of Artificial Sequence: Synthetic oligonucleotide
uuucuuccgccgaagcgcu

SEQ ID NO: 2870184 - RNA, 19 nt, Artificial Sequence
  Description of Artificial Sequence: Synthetic oligonucleotide
cuguagaugucccgagugc

SEQ ID NO: 2870185 - RNA, 19 nt, Artificial Sequence
  Description of Artificial Sequence: Synthetic oligonucleotide
aguccuggggaucgcucgc

SEQ ID NO: 2870186 - RNA, 19 nt, Artificial Sequence
  Description of Artificial Sequence: Synthetic oligonucleotide
ucuagucucuguuguggac

SEQ ID NO: 2870187 - RNA, 19 nt, Artificial Sequence
  Description of Artificial Sequence: Synthetic oligonucleotide
gccacguucagauucagca

SEQ ID NO: 2870188 - RNA, 19 nt, Artificial Sequence
  Description of Artificial Sequence: Synthetic oligonucleotide
aggggagccacguucagau

SEQ ID NO: 2870189 - RNA, 19 nt, Artificial Sequence
  Description of Artificial Sequence: Synthetic oligonucleotide
uauguacugcuccgggagu

SEQ ID NO: 2870190 - RNA, 19 nt, Artificial Sequence
  Description of Artificial Sequence: Synthetic oligonucleotide
cuuccucuagucucuguug

SEQ ID NO: 2870191 - RNA, 19 nt, Artificial Sequence
  Description of Artificial Sequence: Synthetic oligonucleotide
aggaucuugaacacaucag

SEQ ID NO: 2870192 - RNA, 19 nt, Artificial Sequence
  Description of Artificial Sequence: Synthetic oligonucleotide
uucccagcacuuucuuccg

SEQ ID NO: 2870193 - RNA, 19 nt, Artificial Sequence
  Description of Artificial Sequence: Synthetic oligonucleotide
aagagugggaccaccccug

SEQ ID NO: 2870194 - RNA, 19 nt, Artificial Sequence
  Description of Artificial Sequence: Synthetic oligonucleotide
agugggaccaccccuguuu

SEQ ID NO: 2870195 - RNA, 19 nt, Artificial Sequence
  Description of Artificial Sequence: Synthetic oligonucleotide
agcuucugcagcgucgccg

SEQ ID NO: 2870196 - RNA, 19 nt, Artificial Sequence
  Description of Artificial Sequence: Synthetic oligonucleotide
uccgggaguuacuuuuccc

SEQ ID NO: 2870197 - RNA, 19 nt, Artificial Sequence
  Description of Artificial Sequence: Synthetic oligonucleotide
caguaucuggaagacggcc

SEQ ID NO: 2870198 - RNA, 19 nt, Artificial Sequence
  Description of Artificial Sequence: Synthetic oligonucleotide
cagccuaguagcacugggc

SEQ ID NO: 2870199 - RNA, 19 nt, Artificial Sequence
  Description of Artificial Sequence: Synthetic oligonucleotide
aucgcucgccaaccgcugc

SEQ ID NO: 2870200 - RNA, 19 nt, Artificial Sequence
  Description of Artificial Sequence: Synthetic oligonucleotide
uaugggcacacugccaaga

SEQ ID NO: 2870201 - RNA, 19 nt, Artificial Sequence
  Description of Artificial Sequence: Synthetic oligonucleotide
uagaugucccgagugcagc

SEQ ID NO: 2870202 - RNA, 19 nt, Artificial Sequence
  Description of Artificial Sequence: Synthetic oligonucleotide
acaucagggucgauggcgg

SEQ ID NO: 2870203 - RNA, 19 nt, Artificial Sequence
  Description of Artificial Sequence: Synthetic oligonucleotide
gauauggauacggaguccu

SEQ ID NO: 2870204 - RNA, 19 nt, Artificial Sequence
  Description of Artificial Sequence: Synthetic oligonucleotide
cagcaaguccaccaggauc

SEQ ID NO: 2870205 - RNA, 19 nt, Artificial Sequence
  Description of Artificial Sequence: Synthetic oligonucleotide
agagugcagugucuguucu

SEQ ID NO: 2870206 - RNA, 19 nt, Artificial Sequence
  Description of Artificial Sequence: Synthetic oligonucleotide
cuucaguaucuggaagacg

SEQ ID NO: 2870207 - RNA, 19 nt, Artificial Sequence
  Description of Artificial Sequence: Synthetic oligonucleotide
aguaucuggaagacggcca

SEQ ID NO: 2870208 - RNA, 19 nt, Artificial Sequence
  Description of Artificial Sequence: Synthetic oligonucleotide
uggcguggcauccucugga

SEQ ID NO: 2870209 - RNA, 19 nt, Artificial Sequence
  Description of Artificial Sequence: Synthetic oligonucleotide
uacuuuucccagguccugc

SEQ ID NO: 2870210 - RNA, 19 nt, Artificial Sequence
  Description of Artificial Sequence: Synthetic oligonucleotide
cacguucugccacuauggg

SEQ ID NO: 2870211 - RNA, 19 nt, Artificial Sequence
  Description of Artificial Sequence: Synthetic oligonucleotide
acacugccaagagugggac

SEQ ID NO: 2870212 - RNA, 19 nt, Artificial Sequence
  Description of Artificial Sequence: Synthetic oligonucleotide
guccuucacggcuuccacg

SEQ ID NO: 2870213 - RNA, 19 nt, Artificial Sequence
  Description of Artificial Sequence: Synthetic oligonucleotide
augggcacacugccaagag

SEQ ID NO: 2870214 - RNA, 19 nt, Artificial Sequence
  Description of Artificial Sequence: Synthetic oligonucleotide
ccuaguagcacugggcugg

SEQ ID NO: 2870215 - RNA, 19 nt, Artificial Sequence
  Description of Artificial Sequence: Synthetic oligonucleotide
cucguacagcuccaucucc

SEQ ID NO: 2870216 - RNA, 19 nt, Artificial Sequence
  Description of Artificial Sequence: Synthetic oligonucleotide
cuagcuucugcagcgucgc

SEQ ID NO: 2870217 - RNA, 19 nt, Artificial Sequence
  Description of Artificial Sequence: Synthetic oligonucleotide
cuggaagacggccagggga

SEQ ID NO: 2870218 - RNA, 19 nt, Artificial Sequence
  Description of Artificial Sequence: Synthetic oligonucleotide
uuuucccagguccugccuu

SEQ ID NO: 2870219 - RNA, 19 nt, Artificial Sequence
  Description of Artificial Sequence: Synthetic oligonucleotide
gggaguuacuuuucccagg

SEQ ID NO: 2870220 - RNA, 19 nt, Artificial Sequence
  Description of Artificial Sequence: Synthetic oligonucleotide
uugaacacaucagggucga

SEQ ID NO: 2870221 - RNA, 19 nt, Artificial Sequence
  Description of Artificial Sequence: Synthetic oligonucleotide
ucgguucccagcacuuucu

SEQ ID NO: 2870222 - RNA, 19 nt, Artificial Sequence
  Description of Artificial Sequence: Synthetic oligonucleotide
ucugccacuaugggcacac

SEQ ID NO: 2870223 - RNA, 19 nt, Artificial Sequence
  Description of Artificial Sequence: Synthetic oligonucleotide
ucucuguuguggacagaga

SEQ ID NO: 2870224 - RNA, 19 nt, Artificial Sequence
  Description of Artificial Sequence: Synthetic oligonucleotide
uuacuuuucccagguccug

SEQ ID NO: 2870225 - RNA, 19 nt, Artificial Sequence
  Description of Artificial Sequence: Synthetic oligonucleotide
uccucuagucucuguugug

SEQ ID NO: 2870226 - RNA, 19 nt, Artificial Sequence
  Description of Artificial Sequence: Synthetic oligonucleotide
ccuugggcagccuaguagc

SEQ ID NO: 2870227 - RNA, 19 nt, Artificial Sequence
  Description of Artificial Sequence: Synthetic oligonucleotide
uguuguggacagagauaug

SEQ ID NO: 2870228 - RNA, 19 nt, Artificial Sequence
  Description of Artificial Sequence: Synthetic oligonucleotide
accaggaucuugaacacau

SEQ ID NO: 2870229 - RNA, 19 nt, Artificial Sequence
  Description of Artificial Sequence: Synthetic oligonucleotide
aucagggucgauggcggcg

SEQ ID NO: 2870230 - RNA, 19 nt, Artificial Sequence
  Description of Artificial Sequence: Synthetic oligonucleotide
uucuggccuauguacugcu

SEQ ID NO: 2870231 - RNA, 19 nt, Artificial Sequence
  Description of Artificial Sequence: Synthetic oligonucleotide
gggcacacugccaagagug

SEQ ID NO: 2870232 - RNA, 19 nt, Artificial Sequence
  Description of Artificial Sequence: Synthetic oligonucleotide
ccacguucugccacuaugg

SEQ ID NO: 2870233 - RNA, 19 nt, Artificial Sequence
  Description of Artificial Sequence: Synthetic oligonucleotide
uaucuggaagacggccagg

SEQ ID NO: 2870234 - RNA, 19 nt, Artificial Sequence
  Description of Artificial Sequence: Synthetic oligonucleotide
cacuuucuuccgccgaagc

SEQ ID NO: 2870235 - RNA, 19 nt, Artificial Sequence
  Description of Artificial Sequence: Synthetic oligonucleotide
agaugucccgagugcagca

SEQ ID NO: 2870236 - RNA, 19 nt, Artificial Sequence
  Description of Artificial Sequence: Synthetic oligonucleotide
guagaugucccgagugcag

SEQ ID NO: 2870237 - RNA, 19 nt, Artificial Sequence
  Description of Artificial Sequence: Synthetic oligonucleotide
ugcccggcacacauggacu

SEQ ID NO: 2870238 - RNA, 19 nt, Artificial Sequence
  Description of Artificial Sequence: Synthetic oligonucleotide
guagcacugggcuggcgug

SEQ ID NO: 2870239 - RNA, 19 nt, Artificial Sequence
  Description of Artificial Sequence: Synthetic oligonucleotide
acagagauauggauacgga

SEQ ID NO: 2870240 - RNA, 19 nt, Artificial Sequence
  Description of Artificial Sequence: Synthetic oligonucleotide
ucgauggcggcgccugcag

SEQ ID NO: 2870241 - RNA, 19 nt, Artificial Sequence
  Description of Artificial Sequence: Synthetic oligonucleotide
cuagucucuguuguggaca

SEQ ID NO: 2870242 - RNA, 19 nt, Artificial Sequence
  Description of Artificial Sequence: Synthetic oligonucleotide
ucagggucgauggcggcgc

SEQ ID NO: 2870243 - RNA, 19 nt, Artificial Sequence
  Description of Artificial Sequence: Synthetic oligonucleotide
gaccaccccuguuucuucc

SEQ ID NO: 2870244 - RNA, 19 nt, Artificial Sequence
  Description of Artificial Sequence: Synthetic oligonucleotide
ugggcacacugccaagagu

SEQ ID NO: 2870245 - RNA, 19 nt, Artificial Sequence
  Description of Artificial Sequence: Synthetic oligonucleotide
cucuggauggguccuucac

SEQ ID NO: 2870246 - RNA, 19 nt, Artificial Sequence
  Description of Artificial Sequence: Synthetic oligonucleotide
cugcccggcacacauggac

SEQ ID NO: 2870247 - RNA, 19 nt, Artificial Sequence
  Description of Artificial Sequence: Synthetic oligonucleotide
gggagccacguucagauuc

SEQ ID NO: 2870248 - RNA, 19 nt, Artificial Sequence
  Description of Artificial Sequence: Synthetic oligonucleotide
agcacuuucuuccgccgaa

SEQ ID NO: 2870249 - RNA, 19 nt, Artificial Sequence
  Description of Artificial Sequence: Synthetic oligonucleotide
gcacacauggacuucagua

SEQ ID NO: 2870250 - RNA, 19 nt, Artificial Sequence
  Description of Artificial Sequence: Synthetic oligonucleotide
gagugcagugucuguucug

SEQ ID NO: 2870251 - RNA, 19 nt, Artificial Sequence
  Description of Artificial Sequence: Synthetic oligonucleotide
cucgguucccagcacuuuc

SEQ ID NO: 2870252 - RNA, 19 nt, Artificial Sequence
  Description of Artificial Sequence: Synthetic oligonucleotide
uccagcccuguagaugucc

SEQ ID NO: 2870253 - RNA, 19 nt, Artificial Sequence
  Description of Artificial Sequence: Synthetic oligonucleotide
cguucugccacuaugggca

SEQ ID NO: 2870254 - RNA, 19 nt, Artificial Sequence
  Description of Artificial Sequence: Synthetic oligonucleotide
acauggacuucaguaucug

SEQ ID NO: 2870255 - RNA, 19 nt, Artificial Sequence
  Description of Artificial Sequence: Synthetic oligonucleotide
cuaugggcacacugccaag

SEQ ID NO: 2870256 - RNA, 19 nt, Artificial Sequence
  Description of Artificial Sequence: Synthetic oligonucleotide
caucuccucgguucccagc

SEQ ID NO: 2870257 - RNA, 19 nt, Artificial Sequence
  Description of Artificial Sequence: Synthetic oligonucleotide
ucccagguccugccuuggg

SEQ ID NO: 2870258 - RNA, 19 nt, Artificial Sequence
  Description of Artificial Sequence: Synthetic oligonucleotide
gcagccuaguagcacuggg

SEQ ID NO: 2870259 - RNA, 19 nt, Artificial Sequence
  Description of Artificial Sequence: Synthetic oligonucleotide
uggauggguccuucacggc

SEQ ID NO: 2870260 - RNA, 19 nt, Artificial Sequence
  Description of Artificial Sequence: Synthetic oligonucleotide
cucgccaaccgcugcccgg

SEQ ID NO: 2870261 - RNA, 19 nt, Artificial Sequence
  Description of Artificial Sequence: Synthetic oligonucleotide
ggauacggaguccugggga

SEQ ID NO: 2870262 - RNA, 19 nt, Artificial Sequence
  Description of Artificial Sequence: Synthetic oligonucleotide
cacacugccaagaguggga

SEQ ID NO: 2870263 - RNA, 19 nt, Artificial Sequence
  Description of Artificial Sequence: Synthetic oligonucleotide
guucuggccuauguacugc

SEQ ID NO: 2870264 - RNA, 19 nt, Artificial Sequence
  Description of Artificial Sequence: Synthetic oligonucleotide
gccuauguacugcuccggg

SEQ ID NO: 2870265 - RNA, 19 nt, Artificial Sequence
  Description of Artificial Sequence: Synthetic oligonucleotide
ucgcucgccaaccgcugcc

SEQ ID NO: 2870266 - RNA, 19 nt, Artificial Sequence
  Description of Artificial Sequence: Synthetic oligonucleotide
ccuguagaugucccgagug

SEQ ID NO: 2870267 - RNA, 19 nt, Artificial Sequence
  Description of Artificial Sequence: Synthetic oligonucleotide
cuccgggaguuacuuuucc

SEQ ID NO: 2870268 - RNA, 19 nt, Artificial Sequence
  Description of Artificial Sequence: Synthetic oligonucleotide
uggggaucgcucgccaacc

SEQ ID NO: 2870269 - RNA, 19 nt, Artificial Sequence
  Description of Artificial Sequence: Synthetic oligonucleotide
ccuguuucuuccucuaguc

SEQ ID NO: 2870270 - RNA, 19 nt, Artificial Sequence
  Description of Artificial Sequence: Synthetic oligonucleotide
guggacagagauauggaua

SEQ ID NO: 2870271 - RNA, 19 nt, Artificial Sequence
  Description of Artificial Sequence: Synthetic oligonucleotide
cuggggaucgcucgccaac

SEQ ID NO: 2870272 - RNA, 19 nt, Artificial Sequence
  Description of Artificial Sequence: Synthetic oligonucleotide
agcacugggcuggcguggc

SEQ ID NO: 2870273 - RNA, 19 nt, Artificial Sequence
  Description of Artificial Sequence: Synthetic oligonucleotide
gauacggaguccuggggau

SEQ ID NO: 2870274 - RNA, 19 nt, Artificial Sequence
  Description of Artificial Sequence: Synthetic oligonucleotide
ucugcagcgucgccgccuc

SEQ ID NO: 2870275 - RNA, 19 nt, Artificial Sequence
  Description of Artificial Sequence: Synthetic oligonucleotide
gcuagcuucugcagcgucg

SEQ ID NO: 2870276 - RNA, 19 nt, Artificial Sequence
  Description of Artificial Sequence: Synthetic oligonucleotide
cacggcuuccacguucugc

SEQ ID NO: 2870277 - RNA, 19 nt, Artificial Sequence
  Description of Artificial Sequence: Synthetic oligonucleotide
ccucuagucucuguugugg

SEQ ID NO: 2870278 - RNA, 19 nt, Artificial Sequence
  Description of Artificial Sequence: Synthetic oligonucleotide
agccacguucagauucagc

SEQ ID NO: 2870279 - RNA, 19 nt, Artificial Sequence
  Description of Artificial Sequence: Synthetic oligonucleotide
auggguccuucacggcuuc

SEQ ID NO: 2870280 - RNA, 19 nt, Artificial Sequence
  Description of Artificial Sequence: Synthetic oligonucleotide
ucuggccuauguacugcuc

SEQ ID NO: 2870281 - RNA, 19 nt, Artificial Sequence
  Description of Artificial Sequence: Synthetic oligonucleotide
accgcugcccggcacacau

SEQ ID NO: 2870282 - RNA, 19 nt, Artificial Sequence
  Description of Artificial Sequence: Synthetic oligonucleotide
gccacuaugggcacacugc

SEQ ID NO: 2870283 - RNA, 19 nt, Artificial Sequence
  Description of Artificial Sequence: Synthetic oligonucleotide
cucuagucucuguugugga

SEQ ID NO: 2870284 - RNA, 19 nt, Artificial Sequence
  Description of Artificial Sequence: Synthetic oligonucleotide
cuguuguggacagagauau

SEQ ID NO: 2870285 - RNA, 19 nt, Artificial Sequence
  Description of Artificial Sequence: Synthetic oligonucleotide
guuacuuuucccagguccu

SEQ ID NO: 2870286 - RNA, 19 nt, Artificial Sequence
  Description of Artificial Sequence: Synthetic oligonucleotide
cagauucagcaaguccacc

SEQ ID NO: 2870287 - RNA, 19 nt, Artificial Sequence
  Description of Artificial Sequence: Synthetic oligonucleotide
ccacuaugggcacacugcc

SEQ ID NO: 2870288 - RNA, 19 nt, Artificial Sequence
  Description of Artificial Sequence: Synthetic oligonucleotide
cacacauggacuucaguau

SEQ ID NO: 2870289 - RNA, 19 nt, Artificial Sequence
  Description of Artificial Sequence: Synthetic oligonucleotide
cagugcaagcucguacagc

SEQ ID NO: 2870290 - RNA, 19 nt, Artificial Sequence
  Description of Artificial Sequence: Synthetic oligonucleotide
cucuguuguggacagagau

SEQ ID NO: 2870291 - RNA, 19 nt, Artificial Sequence
  Description of Artificial Sequence: Synthetic oligonucleotide
cagcccuguagaugucccg

SEQ ID NO: 2870292 - RNA, 19 nt, Artificial Sequence
  Description of Artificial Sequence: Synthetic oligonucleotide
cuggcguggcauccucugg

SEQ ID NO: 2870293 - RNA, 19 nt, Artificial Sequence
  Description of Artificial Sequence: Synthetic oligonucleotide
uucuuccucuagucucugu

SEQ ID NO: 2870294 - RNA, 19 nt, Artificial Sequence
  Description of Artificial Sequence: Synthetic oligonucleotide
auacggaguccuggggauc

SEQ ID NO: 2870295 - RNA, 19 nt, Artificial Sequence
  Description of Artificial Sequence: Synthetic oligonucleotide
aagacggccaggggagcca

SEQ ID NO: 2870296 - RNA, 19 nt, Artificial Sequence
  Description of Artificial Sequence: Synthetic oligonucleotide
gcuucugcagcgucgccgc

SEQ ID NO: 2870297 - RNA, 19 nt, Artificial Sequence
  Description of Artificial Sequence: Synthetic oligonucleotide
uacugcuccgggaguuacu

SEQ ID NO: 2870298 - RNA, 19 nt, Artificial Sequence
  Description of Artificial Sequence: Synthetic oligonucleotide
gaugucccgagugcagcac

SEQ ID NO: 2870299 - RNA, 19 nt, Artificial Sequence
  Description of Artificial Sequence: Synthetic oligonucleotide
uccuggggaucgcucgcca

SEQ ID NO: 2870300 - RNA, 19 nt, Artificial Sequence
  Description of Artificial Sequence: Synthetic oligonucleotide
acagcuccaucuccucggu

SEQ ID NO: 2870301 - RNA, 19 nt, Artificial Sequence
  Description of Artificial Sequence: Synthetic oligonucleotide
gaguuacuuuucccagguc

SEQ ID NO: 2870302 - RNA, 19 nt, Artificial Sequence
  Description of Artificial Sequence: Synthetic oligonucleotide
agguccugccuugggcagc

SEQ ID NO: 2870303 - RNA, 19 nt, Artificial Sequence
  Description of Artificial Sequence: Synthetic oligonucleotide
agcccuguagaugucccga

SEQ ID NO: 2870304 - RNA, 19 nt, Artificial Sequence
  Description of Artificial Sequence: Synthetic oligonucleotide
gccagugcaagcucguaca

SEQ ID NO: 2870305 - RNA, 19 nt, Artificial Sequence
  Description of Artificial Sequence: Synthetic oligonucleotide
cagguccugccuugggcag

SEQ ID NO: 2870306 - RNA, 19 nt, Artificial Sequence
  Description of Artificial Sequence: Synthetic oligonucleotide
ugccaagagugggaccacc

SEQ ID NO: 2870307 - RNA, 19 nt, Artificial Sequence
  Description of Artificial Sequence: Synthetic oligonucleotide
agagugggaccaccccugu

SEQ ID NO: 2870308 - RNA, 19 nt, Artificial Sequence
  Description of Artificial Sequence: Synthetic oligonucleotide
caucagggucgauggcggc

SEQ ID NO: 2870309 - RNA, 19 nt, Artificial Sequence
  Description of Artificial Sequence: Synthetic oligonucleotide
ggaguuacuuuucccaggu

SEQ ID NO: 2870310 - RNA, 19 nt, Artificial Sequence
  Description of Artificial Sequence: Synthetic oligonucleotide
guccaccaggaucuugaac

SEQ ID NO: 2870311 - RNA, 19 nt, Artificial Sequence
  Description of Artificial Sequence: Synthetic oligonucleotide
cacugccaagagugggacc

SEQ ID NO: 2870312 - RNA, 19 nt, Artificial Sequence
  Description of Artificial Sequence: Synthetic oligonucleotide
auauggauacggaguccug

SEQ ID NO: 2870313 - RNA, 19 nt, Artificial Sequence
  Description of Artificial Sequence: Synthetic oligonucleotide
uccucgguucccagcacuu

SEQ ID NO: 2870314 - RNA, 19 nt, Artificial Sequence
  Description of Artificial Sequence: Synthetic oligonucleotide
uccgccgaagcgcuagcuu

SEQ ID NO: 2870315 - RNA, 19 nt, Artificial Sequence
  Description of Artificial Sequence: Synthetic oligonucleotide
ucgccaaccgcugcccggc

SEQ ID NO: 2870316 - RNA, 19 nt, Artificial Sequence
  Description of Artificial Sequence: Synthetic oligonucleotide
cccagcacuuucuuccgcc

SEQ ID NO: 2870317 - RNA, 19 nt, Artificial Sequence
  Description of Artificial Sequence: Synthetic oligonucleotide
uucugcagcgucgccgccu

SEQ ID NO: 2870318 - RNA, 19 nt, Artificial Sequence
  Description of Artificial Sequence: Synthetic oligonucleotide
gaucgcucgccaaccgcug

SEQ ID NO: 2870319 - RNA, 19 nt, Artificial Sequence
  Description of Artificial Sequence: Synthetic oligonucleotide
ugcagcgucgccgccucca

SEQ ID NO: 2870320 - RNA, 19 nt, Artificial Sequence
  Description of Artificial Sequence: Synthetic oligonucleotide
cuugggcagccuaguagca

SEQ ID NO: 2870321 - RNA, 19 nt, Artificial Sequence
  Description of Artificial Sequence: Synthetic oligonucleotide
acguucagauucagcaagu

SEQ ID NO: 2870322 - RNA, 19 nt, Artificial Sequence
  Description of Artificial Sequence: Synthetic oligonucleotide
cacauggacuucaguaucu

SEQ ID NO: 2870323 - RNA, 19 nt, Artificial Sequence
  Description of Artificial Sequence: Synthetic oligonucleotide
acugcuccgggaguuacuu

SEQ ID NO: 2870324 - RNA, 19 nt, Artificial Sequence
  Description of Artificial Sequence: Synthetic oligonucleotide
gucuguucuggccuaugua

SEQ ID NO: 2870325 - RNA, 19 nt, Artificial Sequence
  Description of Artificial Sequence: Synthetic oligonucleotide
ccaagagugggaccacccc

SEQ ID NO: 2870326 - RNA, 19 nt, Artificial Sequence
  Description of Artificial Sequence: Synthetic oligonucleotide
gugggaccaccccuguuuc

SEQ ID NO: 2870327 - RNA, 19 nt, Artificial Sequence
  Description of Artificial Sequence: Synthetic oligonucleotide
cacuaugggcacacugcca

SEQ ID NO: 2870328 - RNA, 19 nt, Artificial Sequence
  Description of Artificial Sequence: Synthetic oligonucleotide
gugcagugucuguucuggc

SEQ ID NO: 2870329 - RNA, 19 nt, Artificial Sequence
  Description of Artificial Sequence: Synthetic oligonucleotide
caagagugggaccaccccu

SEQ ID NO: 2870330 - RNA, 19 nt, Artificial Sequence
  Description of Artificial Sequence: Synthetic oligonucleotide
ccagcacuuucuuccgccg

SEQ ID NO: 2870331 - RNA, 19 nt, Artificial Sequence
  Description of Artificial Sequence: Synthetic oligonucleotide
cuguucuggccuauguacu

SEQ ID NO: 2870332 - RNA, 19 nt, Artificial Sequence
  Description of Artificial Sequence: Synthetic oligonucleotide
agacggccaggggagccac

SEQ ID NO: 2870333 - RNA, 19 nt, Artificial Sequence
  Description of Artificial Sequence: Synthetic oligonucleotide
uguacugcuccgggaguua

SEQ ID NO: 2870334 - RNA, 19 nt, Artificial Sequence
  Description of Artificial Sequence: Synthetic oligonucleotide
ggacagagauauggauacg

SEQ ID NO: 2870335 - RNA, 19 nt, Artificial Sequence
  Description of Artificial Sequence: Synthetic oligonucleotide
ugggaccaccccuguuucu

SEQ ID NO: 2870336 - RNA, 19 nt, Artificial Sequence
  Description of Artificial Sequence: Synthetic oligonucleotide
ccugccuugggcagccuag

SEQ ID NO: 2870337 - RNA, 19 nt, Artificial Sequence
  Description of Artificial Sequence: Synthetic oligonucleotide
uccugccuugggcagccua

SEQ ID NO: 2870338 - RNA, 19 nt, Artificial Sequence
  Description of Artificial Sequence: Synthetic oligonucleotide
guucugccacuaugggcac

SEQ ID NO: 2870339 - RNA, 19 nt, Artificial Sequence
  Description of Artificial Sequence: Synthetic oligonucleotide
uaguagcacugggcuggcg

SEQ ID NO: 2870340 - RNA, 19 nt, Artificial Sequence
  Description of Artificial Sequence: Synthetic oligonucleotide
cuaguagcacugggcuggc

SEQ ID NO: 2870341 - RNA, 19 nt, Artificial Sequence
  Description of Artificial Sequence: Synthetic oligonucleotide
ggcacacugccaagagugg

SEQ ID NO: 2870342 - RNA, 19 nt, Artificial Sequence
  Description of Artificial Sequence: Synthetic oligonucleotide
caaguccaccaggaucuug

SEQ ID NO: 2870343 - RNA, 19 nt, Artificial Sequence
  Description of Artificial Sequence: Synthetic oligonucleotide
gcuggcguggcauccucug

SEQ ID NO: 2870344 - RNA, 19 nt, Artificial Sequence
  Description of Artificial Sequence: Synthetic oligonucleotide
gguucccagcacuuucuuc

SEQ ID NO: 2870345 - RNA, 19 nt, Artificial Sequence
  Description of Artificial Sequence: Synthetic oligonucleotide
uuccacguucugccacuau

SEQ ID NO: 2870346 - RNA, 19 nt, Artificial Sequence
  Description of Artificial Sequence: Synthetic oligonucleotide
gccuaguagcacugggcug

SEQ ID NO: 2870347 - RNA, 19 nt, Artificial Sequence
  Description of Artificial Sequence: Synthetic oligonucleotide
ccgggaguuacuuuuccca

SEQ ID NO: 2870348 - RNA, 19 nt, Artificial Sequence
  Description of Artificial Sequence: Synthetic oligonucleotide
gggaucgcucgccaaccgc

SEQ ID NO: 2870349 - RNA, 19 nt, Artificial Sequence
  Description of Artificial Sequence: Synthetic oligonucleotide
ggggaucgcucgccaaccg

SEQ ID NO: 2870350 - RNA, 19 nt, Artificial Sequence
  Description of Artificial Sequence: Synthetic oligonucleotide
ggcuuccacguucugccac

SEQ ID NO: 2870351 - RNA, 19 nt, Artificial Sequence
  Description of Artificial Sequence: Synthetic oligonucleotide
guacugcuccgggaguuac

SEQ ID NO: 2870352 - RNA, 19 nt, Artificial Sequence
  Description of Artificial Sequence: Synthetic oligonucleotide
cugggcuggcguggcaucc

SEQ ID NO: 2870353 - RNA, 19 nt, Artificial Sequence
  Description of Artificial Sequence: Synthetic oligonucleotide
cgggaguuacuuuucccag

SEQ ID NO: 2870354 - RNA, 19 nt, Artificial Sequence
  Description of Artificial Sequence: Synthetic oligonucleotide
ccagcccuguagauguccc

SEQ ID NO: 2870355 - RNA, 19 nt, Artificial Sequence
  Description of Artificial Sequence: Synthetic oligonucleotide
gagccacguucagauucag

SEQ ID NO: 2870356 - RNA, 19 nt, Artificial Sequence
  Description of Artificial Sequence: Synthetic oligonucleotide
ggccaggggagccacguuc

SEQ ID NO: 2870357 - RNA, 19 nt, Artificial Sequence
  Description of Artificial Sequence: Synthetic oligonucleotide
ggauggguccuucacggcu

SEQ ID NO: 2870358 - RNA, 19 nt, Artificial Sequence
  Description of Artificial Sequence: Synthetic oligonucleotide
accccuguuucuuccucua

SEQ ID NO: 2870359 - RNA, 19 nt, Artificial Sequence
  Description of Artificial Sequence: Synthetic oligonucleotide
ggccuauguacugcuccgg

SEQ ID NO: 2870360 - RNA, 19 nt, Artificial Sequence
  Description of Artificial Sequence: Synthetic oligonucleotide
acggaguccuggggaucgc

SEQ ID NO: 2870361 - RNA, 19 nt, Artificial Sequence
  Description of Artificial Sequence: Synthetic oligonucleotide
uccucuggauggguccuuc

SEQ ID NO: 2870362 - RNA, 19 nt, Artificial Sequence
  Description of Artificial Sequence: Synthetic oligonucleotide
ccagugcaagcucguacag

SEQ ID NO: 2870363 - RNA, 19 nt, Artificial Sequence
  Description of Artificial Sequence: Synthetic oligonucleotide
uuccgccgaagcgcuagcu

SEQ ID NO: 2870364 - RNA, 19 nt, Artificial Sequence
  Description of Artificial Sequence: Synthetic oligonucleotide
uucugccacuaugggcaca

SEQ ID NO: 2870365 - RNA, 19 nt, Artificial Sequence
  Description of Artificial Sequence: Synthetic oligonucleotide
cccagguccugccuugggc

SEQ ID NO: 2870366 - RNA, 19 nt, Artificial Sequence
  Description of Artificial Sequence: Synthetic oligonucleotide
cugcagccagugcaagcuc

SEQ ID NO: 2870367 - RNA, 19 nt, Artificial Sequence
  Description of Artificial Sequence: Synthetic oligonucleotide
gcccuguagaugucccgag

SEQ ID NO: 2870368 - RNA, 19 nt, Artificial Sequence
  Description of Artificial Sequence: Synthetic oligonucleotide
cuucugcagcgucgccgcc

SEQ ID NO: 2870369 - RNA, 19 nt, Artificial Sequence
  Description of Artificial Sequence: Synthetic oligonucleotide
ccgccgaagcgcuagcuuc

SEQ ID NO: 2870370 - RNA, 19 nt, Artificial Sequence
  Description of Artificial Sequence: Synthetic oligonucleotide
cagcacuuucuuccgccga

SEQ ID NO: 2870371 - RNA, 19 nt, Artificial Sequence
  Description of Artificial Sequence: Synthetic oligonucleotide
ccagguccugccuugggca

SEQ ID NO: 2870372 - RNA, 19 nt, Artificial Sequence
  Description of Artificial Sequence: Synthetic oligonucleotide
cgcugcccggcacacaugg

SEQ ID NO: 2870373 - RNA, 19 nt, Artificial Sequence
  Description of Artificial Sequence: Synthetic oligonucleotide
ggcagccuaguagcacugg

SEQ ID NO: 2870374 - RNA, 19 nt, Artificial Sequence
  Description of Artificial Sequence: Synthetic oligonucleotide
agugucuguucuggccuau

SEQ ID NO: 2870375 - RNA, 19 nt, Artificial Sequence
  Description of Artificial Sequence: Synthetic oligonucleotide
cuccaucuccucgguuccc

SEQ ID NO: 2870376 - RNA, 19 nt, Artificial Sequence
  Description of Artificial Sequence: Synthetic oligonucleotide
gccugcagccagugcaagc

SEQ ID NO: 2870377 - RNA, 19 nt, Artificial Sequence
  Description of Artificial Sequence: Synthetic oligonucleotide
gugucuguucuggccuaug

SEQ ID NO: 2870378 - RNA, 19 nt, Artificial Sequence
  Description of Artificial Sequence: Synthetic oligonucleotide
ggagccacguucagauuca

SEQ ID NO: 2870379 - RNA, 19 nt, Artificial Sequence
  Description of Artificial Sequence: Synthetic oligonucleotide
guccuggggaucgcucgcc

SEQ ID NO: 2870380 - RNA, 19 nt, Artificial Sequence
  Description of Artificial Sequence: Synthetic oligonucleotide
gcacuuucuuccgccgaag

SEQ ID NO: 2870381 - RNA, 19 nt, Artificial Sequence
  Description of Artificial Sequence: Synthetic oligonucleotide
cgaagcgcuagcuucugca

SEQ ID NO: 2870382 - RNA, 19 nt, Artificial Sequence
  Description of Artificial Sequence: Synthetic oligonucleotide
gauggguccuucacggcuu

SEQ ID NO: 2870383 - RNA, 19 nt, Artificial Sequence
  Description of Artificial Sequence: Synthetic oligonucleotide
ugggcuggcguggcauccu

SEQ ID NO: 2870384 - RNA, 19 nt, Artificial Sequence
  Description of Artificial Sequence: Synthetic oligonucleotide
uggguccuucacggcuucc

SEQ ID NO: 2870385 - RNA, 19 nt, Artificial Sequence
  Description of Artificial Sequence: Synthetic oligonucleotide
gguccugccuugggcagcc

SEQ ID NO: 2870386 - RNA, 19 nt, Artificial Sequence
  Description of Artificial Sequence: Synthetic oligonucleotide
gcucgccaaccgcugcccg

SEQ ID NO: 2870387 - RNA, 19 nt, Artificial Sequence
  Description of Artificial Sequence: Synthetic oligonucleotide
gacggccaggggagccacg

SEQ ID NO: 2870388 - RNA, 19 nt, Artificial Sequence
  Description of Artificial Sequence: Synthetic oligonucleotide
gucgauggcggcgccugca

SEQ ID NO: 2870389 - RNA, 19 nt, Artificial Sequence
  Description of Artificial Sequence: Synthetic oligonucleotide
uucuuccgccgaagcgcua

SEQ ID NO: 2870390 - RNA, 19 nt, Artificial Sequence
  Description of Artificial Sequence: Synthetic oligonucleotide
cagcgucgccgccuccagc

SEQ ID NO: 2870391 - RNA, 19 nt, Artificial Sequence
  Description of Artificial Sequence: Synthetic oligonucleotide
gggucgauggcggcgccug

SEQ ID NO: 2870392 - RNA, 19 nt, Artificial Sequence
  Description of Artificial Sequence: Synthetic oligonucleotide
ggaccaccccuguuucuuc

SEQ ID NO: 2870393 - RNA, 19 nt, Artificial Sequence
  Description of Artificial Sequence: Synthetic oligonucleotide
ugaacacaucagggucgau

SEQ ID NO: 2870394 - RNA, 19 nt, Artificial Sequence
  Description of Artificial Sequence: Synthetic oligonucleotide
cuuuucccagguccugccu

SEQ ID NO: 2870395 - RNA, 19 nt, Artificial Sequence
  Description of Artificial Sequence: Synthetic oligonucleotide
cugccaagagugggaccac

SEQ ID NO: 2870396 - RNA, 19 nt, Artificial Sequence
  Description of Artificial Sequence: Synthetic oligonucleotide
auggcggcgccugcagcca

SEQ ID NO: 2870397 - RNA, 19 nt, Artificial Sequence
  Description of Artificial Sequence: Synthetic oligonucleotide
gcguggcauccucuggaug

SEQ ID NO: 2870398 - RNA, 19 nt, Artificial Sequence
  Description of Artificial Sequence: Synthetic oligonucleotide
ccacguucagauucagcaa

SEQ ID NO: 2870399 - RNA, 19 nt, Artificial Sequence
  Description of Artificial Sequence: Synthetic oligonucleotide
cagggucgauggcggcgcc

SEQ ID NO: 2870400 - RNA, 19 nt, Artificial Sequence
  Description of Artificial Sequence: Synthetic oligonucleotide
cagugucuguucuggccua

SEQ ID NO: 2870401 - RNA, 19 nt, Artificial Sequence
  Description of Artificial Sequence: Synthetic oligonucleotide
aaccgcugcccggcacaca

SEQ ID NO: 2870402 - RNA, 19 nt, Artificial Sequence
  Description of Artificial Sequence: Synthetic oligonucleotide
gugcaagcucguacagcuc

SEQ ID NO: 2870403 - RNA, 19 nt, Artificial Sequence
  Description of Artificial Sequence: Synthetic oligonucleotide
cuccagcccuguagauguc

SEQ ID NO: 2870404 - RNA, 19 nt, Artificial Sequence
  Description of Artificial Sequence: Synthetic oligonucleotide
caggggagccacguucaga

SEQ ID NO: 2870405 - RNA, 19 nt, Artificial Sequence
  Description of Artificial Sequence: Synthetic oligonucleotide
gcagcgucgccgccuccag

SEQ ID NO: 2870406 - RNA, 19 nt, Artificial Sequence
  Description of Artificial Sequence: Synthetic oligonucleotide
ggaucgcucgccaaccgcu

SEQ ID NO: 2870407 - RNA, 19 nt, Artificial Sequence
  Description of Artificial Sequence: Synthetic oligonucleotide
ggaguccuggggaucgcuc

SEQ ID NO: 2870408 - RNA, 19 nt, Artificial Sequence
  Description of Artificial Sequence: Synthetic oligonucleotide
gucgccgccuccagcccug

SEQ ID NO: 2870409 - RNA, 19 nt, Artificial Sequence
  Description of Artificial Sequence: Synthetic oligonucleotide
ggguccuucacggcuucca

SEQ ID NO: 2870410 - RNA, 19 nt, Artificial Sequence
  Description of Artificial Sequence: Synthetic oligonucleotide
caccccuguuucuuccucu

SEQ ID NO: 2870411 - RNA, 19 nt, Artificial Sequence
  Description of Artificial Sequence: Synthetic oligonucleotide
cuccucgguucccagcacu

SEQ ID NO: 2870412 - RNA, 19 nt, Artificial Sequence
  Description of Artificial Sequence: Synthetic oligonucleotide
agggucgauggcggcgccu

SEQ ID NO: 2870413 - RNA, 19 nt, Artificial Sequence
  Description of Artificial Sequence: Synthetic oligonucleotide
gcuuccacguucugccacu

SEQ ID NO: 2870414 - RNA, 19 nt, Artificial Sequence
  Description of Artificial Sequence: Synthetic oligonucleotide
ccgaagcgcuagcuucugc

SEQ ID NO: 2870415 - RNA, 19 nt, Artificial Sequence
  Description of Artificial Sequence: Synthetic oligonucleotide
cguucagauucagcaaguc

SEQ ID NO: 2870416 - RNA, 19 nt, Artificial Sequence
  Description of Artificial Sequence: Synthetic oligonucleotide
ggucgauggcggcgccugc

SEQ ID NO: 2870417 - RNA, 19 nt, Artificial Sequence
  Description of Artificial Sequence: Synthetic oligonucleotide
gggcagccuaguagcacug

SEQ ID NO: 2870418 - RNA, 19 nt, Artificial Sequence
  Description of Artificial Sequence: Synthetic oligonucleotide
gccaggggagccacguuca

SEQ ID NO: 2870419 - RNA, 19 nt, Artificial Sequence
  Description of Artificial Sequence: Synthetic oligonucleotide
cauccucuggauggguccu

SEQ ID NO: 2870420 - RNA, 19 nt, Artificial Sequence
  Description of Artificial Sequence: Synthetic oligonucleotide
ccaaccgcugcccggcaca

SEQ ID NO: 2870421 - RNA, 19 nt, Artificial Sequence
  Description of Artificial Sequence: Synthetic oligonucleotide
ccugcagccagugcaagcu

SEQ ID NO: 2870422 - RNA, 19 nt, Artificial Sequence
  Description of Artificial Sequence: Synthetic oligonucleotide
ccaggggagccacguucag

SEQ ID NO: 2870423 - RNA, 19 nt, Artificial Sequence
  Description of Artificial Sequence: Synthetic oligonucleotide
ccaccccuguuucuuccuc

SEQ ID NO: 2870424 - RNA, 19 nt, Artificial Sequence
  Description of Artificial Sequence: Synthetic oligonucleotide
cugcagcgucgccgccucc

SEQ ID NO: 2870425 - RNA, 19 nt, Artificial Sequence
  Description of Artificial Sequence: Synthetic oligonucleotide
gccaaccgcugcccggcac

SEQ ID NO: 2870426 - RNA, 19 nt, Artificial Sequence
  Description of Artificial Sequence: Synthetic oligonucleotide
auccucuggauggguccuu

SEQ ID NO: 2870427 - RNA, 19 nt, Artificial Sequence
  Description of Artificial Sequence: Synthetic oligonucleotide
gccgaagcgcuagcuucug

SEQ ID NO: 2870428 - RNA, 19 nt, Artificial Sequence
  Description of Artificial Sequence: Synthetic oligonucleotide
gagugggaccaccccuguu

SEQ ID NO: 2870429 - RNA, 19 nt, Artificial Sequence
  Description of Artificial Sequence: Synthetic oligonucleotide
cuuccacguucugccacua

SEQ ID NO: 2870430 - RNA, 19 nt, Artificial Sequence
  Description of Artificial Sequence: Synthetic oligonucleotide
gggcuggcguggcauccuc

SEQ ID NO: 2870431 - RNA, 19 nt, Artificial Sequence
  Description of Artificial Sequence: Synthetic oligonucleotide
ccggcacacauggacuuca

SEQ ID NO: 2870432 - RNA, 19 nt, Artificial Sequence
  Description of Artificial Sequence: Synthetic oligonucleotide
ccgccuccagcccuguaga

SEQ ID NO: 2870433 - RNA, 19 nt, Artificial Sequence
  Description of Artificial Sequence: Synthetic oligonucleotide
ggcguggcauccucuggau

SEQ ID NO: 2870434 - RNA, 19 nt, Artificial Sequence
  Description of Artificial Sequence: Synthetic oligonucleotide
cgcuagcuucugcagcguc

SEQ ID NO: 2870435 - RNA, 19 nt, Artificial Sequence
  Description of Artificial Sequence: Synthetic oligonucleotide
cugccuugggcagccuagu

SEQ ID NO: 2870436 - RNA, 19 nt, Artificial Sequence
  Description of Artificial Sequence: Synthetic oligonucleotide
ccuggggaucgcucgccaa

SEQ ID NO: 2870437 - RNA, 19 nt, Artificial Sequence
  Description of Artificial Sequence: Synthetic oligonucleotide
cagccagugcaagcucgua

SEQ ID NO: 2870438 - RNA, 19 nt, Artificial Sequence
  Description of Artificial Sequence: Synthetic oligonucleotide
ucgccgccuccagcccugu

SEQ ID NO: 2870439 - RNA, 19 nt, Artificial Sequence
  Description of Artificial Sequence: Synthetic oligonucleotide
gcggcgccugcagccagug

SEQ ID NO: 2870440 - RNA, 19 nt, Artificial Sequence
  Description of Artificial Sequence: Synthetic oligonucleotide
cccggcacacauggacuuc

SEQ ID NO: 2870441 - RNA, 19 nt, Artificial Sequence
  Description of Artificial Sequence: Synthetic oligonucleotide
gcagccagugcaagcucgu

SEQ ID NO: 2870442 - RNA, 19 nt, Artificial Sequence
  Description of Artificial Sequence: Synthetic oligonucleotide
cccuguagaugucccgagu

SEQ ID NO: 2870443 - RNA, 19 nt, Artificial Sequence
  Description of Artificial Sequence: Synthetic oligonucleotide
cgcucgccaaccgcugccc

SEQ ID NO: 2870444 - RNA, 19 nt, Artificial Sequence
  Description of Artificial Sequence: Synthetic oligonucleotide
gcgccugcagccagugcaa

SEQ ID NO: 2870445 - RNA, 19 nt, Artificial Sequence
  Description of Artificial Sequence: Synthetic oligonucleotide
gcccggcacacauggacuu

SEQ ID NO: 2870446 - RNA, 19 nt, Artificial Sequence
  Description of Artificial Sequence: Synthetic oligonucleotide
cugcuccgggaguuacuuu

SEQ ID NO: 2870447 - RNA, 19 nt, Artificial Sequence
  Description of Artificial Sequence: Synthetic oligonucleotide
ccgcugcccggcacacaug

SEQ ID NO: 2870448 - RNA, 19 nt, Artificial Sequence
  Description of Artificial Sequence: Synthetic oligonucleotide
gcugcccggcacacaugga

SEQ ID NO: 2870449 - RNA, 19 nt, Artificial Sequence
  Description of Artificial Sequence: Synthetic oligonucleotide
cgccugcagccagugcaag

SEQ ID NO: 2870450 - RNA, 19 nt, Artificial Sequence
  Description of Artificial Sequence: Synthetic oligonucleotide
cagcuccaucuccucgguu

SEQ ID NO: 2870451 - RNA, 19 nt, Artificial Sequence
  Description of Artificial Sequence: Synthetic oligonucleotide
cgccgaagcgcuagcuucu

SEQ ID NO: 2870452 - RNA, 19 nt, Artificial Sequence
  Description of Artificial Sequence: Synthetic oligonucleotide
ggcuggcguggcauccucu

SEQ ID NO: 2870453 - RNA, 19 nt, Artificial Sequence
  Description of Artificial Sequence: Synthetic oligonucleotide
ggggagccacguucagauu

SEQ ID NO: 2870454 - RNA, 19 nt, Artificial Sequence
  Description of Artificial Sequence: Synthetic oligonucleotide
cggcuuccacguucugcca

SEQ ID NO: 2870455 - RNA, 19 nt, Artificial Sequence
  Description of Artificial Sequence: Synthetic oligonucleotide
cugccacuaugggcacacu

SEQ ID NO: 2870456 - RNA, 19 nt, Artificial Sequence
  Description of Artificial Sequence: Synthetic oligonucleotide
gcaaguccaccaggaucuu

SEQ ID NO: 2870457 - RNA, 19 nt, Artificial Sequence
  Description of Artificial Sequence: Synthetic oligonucleotide
ccuucacggcuuccacguu

SEQ ID NO: 2870458 - RNA, 19 nt, Artificial Sequence
  Description of Artificial Sequence: Synthetic oligonucleotide
guccugccuugggcagccu

SEQ ID NO: 2870459 - RNA, 19 nt, Artificial Sequence
  Description of Artificial Sequence: Synthetic oligonucleotide
cgucgccgccuccagcccu

SEQ ID NO: 2870460 - RNA, 19 nt, Artificial Sequence
  Description of Artificial Sequence: Synthetic oligonucleotide
ccucgguucccagcacuuu

SEQ ID NO: 2870461 - RNA, 19 nt, Artificial Sequence
  Description of Artificial Sequence: Synthetic oligonucleotide
cgccaaccgcugcccggca

SEQ ID NO: 2870462 - RNA, 19 nt, Artificial Sequence
  Description of Artificial Sequence: Synthetic oligonucleotide
cggaguccuggggaucgcu

SEQ ID NO: 2870463 - RNA, 19 nt, Artificial Sequence
  Description of Artificial Sequence: Synthetic oligonucleotide
cgccuccagcccuguagau

SEQ ID NO: 2870464 - RNA, 19 nt, Artificial Sequence
  Description of Artificial Sequence: Synthetic oligonucleotide
cgccgccuccagcccugua

SEQ ID NO: 2870465 - RNA, 19 nt, Artificial Sequence
  Description of Artificial Sequence: Synthetic oligonucleotide
uuacugaaaagccauggug

SEQ ID NO: 2870466 - RNA, 19 nt, Artificial Sequence
  Description of Artificial Sequence: Synthetic oligonucleotide
aggaagacccgucaggggc

SEQ ID NO: 2870467 - RNA, 19 nt, Artificial Sequence
  Description of Artificial Sequence: Synthetic oligonucleotide
uacugaaaagccauggugu

SEQ ID NO: 2870468 - RNA, 19 nt, Artificial Sequence
  Description of Artificial Sequence: Synthetic oligonucleotide
uucauacacgucauuacug

SEQ ID NO: 2870469 - RNA, 19 nt, Artificial Sequence
  Description of Artificial Sequence: Synthetic oligonucleotide
cacgucauuacugaaaagc

SEQ ID NO: 2870470 - RNA, 19 nt, Artificial Sequence
  Description of Artificial Sequence: Synthetic oligonucleotide
ugugugcccauucauacac

SEQ ID NO: 2870471 - RNA, 19 nt, Artificial Sequence
  Description of Artificial Sequence: Synthetic oligonucleotide
acgucauuacugaaaagcc

SEQ ID NO: 2870472 - RNA, 19 nt, Artificial Sequence
  Description of Artificial Sequence: Synthetic oligonucleotide
uacacgucauuacugaaaa

SEQ ID NO: 2870473 - RNA, 19 nt, Artificial Sequence
  Description of Artificial Sequence: Synthetic oligonucleotide
auucauacacgucauuacu

SEQ ID NO: 2870474 - RNA, 19 nt, Artificial Sequence
  Description of Artificial Sequence: Synthetic oligonucleotide
ugaggaagacccgucaggg

SEQ ID NO: 2870475 - RNA, 19 nt, Artificial Sequence
  Description of Artificial Sequence: Synthetic oligonucleotide
ugugugugcccauucauac

SEQ ID NO: 2870476 - RNA, 19 nt, Artificial Sequence
  Description of Artificial Sequence: Synthetic oligonucleotide
cauuacugaaaagccaugg

SEQ ID NO: 2870477 - RNA, 19 nt, Artificial Sequence
  Description of Artificial Sequence: Synthetic oligonucleotide
auuacugaaaagccauggu

SEQ ID NO: 2870478 - RNA, 19 nt, Artificial Sequence
  Description of Artificial Sequence: Synthetic oligonucleotide
augaggaagacccgucagg

SEQ ID NO: 2870479 - RNA, 19 nt, Artificial Sequence
  Description of Artificial Sequence: Synthetic oligonucleotide
gaugaggaagacccgucag

SEQ ID NO: 2870480 - RNA, 19 nt, Artificial Sequence
  Description of Artificial Sequence: Synthetic oligonucleotide
ucuucugcuucucccgucc

SEQ ID NO: 2870481 - RNA, 19 nt, Artificial Sequence
  Description of Artificial Sequence: Synthetic oligonucleotide
ucauuacugaaaagccaug

SEQ ID NO: 2870482 - RNA, 19 nt, Artificial Sequence
  Description of Artificial Sequence: Synthetic oligonucleotide
ugaugaggaagacccguca

SEQ ID NO: 2870483 - RNA, 19 nt, Artificial Sequence
  Description of Artificial Sequence: Synthetic oligonucleotide
cucccguccauucugcagg

SEQ ID NO: 2870484 - RNA, 19 nt, Artificial Sequence
  Description of Artificial Sequence: Synthetic oligonucleotide
gagaucucuucuuggagca

SEQ ID NO: 2870485 - RNA, 19 nt, Artificial Sequence
  Description of Artificial Sequence: Synthetic oligonucleotide
ggagaucucuucuuggagc

SEQ ID NO: 2870486 - RNA, 19 nt, Artificial Sequence
  Description of Artificial Sequence: Synthetic oligonucleotide
ugugcccauucauacacgu

SEQ ID NO: 2870487 - RNA, 19 nt, Artificial Sequence
  Description of Artificial Sequence: Synthetic oligonucleotide
ugugugugugcccauucau

SEQ ID NO: 2870488 - RNA, 19 nt, Artificial Sequence
  Description of Artificial Sequence: Synthetic oligonucleotide
gaggaagacccgucagggg

SEQ ID NO: 2870489 - RNA, 19 nt, Artificial Sequence
  Description of Artificial Sequence: Synthetic oligonucleotide
gaucucuucuuggagcaug

SEQ ID NO: 2870490 - RNA, 19 nt, Artificial Sequence
  Description of Artificial Sequence: Synthetic oligonucleotide
ucucccguccauucugcag

SEQ ID NO: 2870491 - RNA, 19 nt, Artificial Sequence
  Description of Artificial Sequence: Synthetic oligonucleotide
uccagguagaggggcaccg

SEQ ID NO: 2870492 - RNA, 19 nt, Artificial Sequence
  Description of Artificial Sequence: Synthetic oligonucleotide
ugugugugugugugugugc

SEQ ID NO: 2870493 - RNA, 19 nt, Artificial Sequence
  Description of Artificial Sequence: Synthetic oligonucleotide
ugugugugugugcccauuc

SEQ ID NO: 2870494 - RNA, 19 nt, Artificial Sequence
  Description of Artificial Sequence: Synthetic oligonucleotide
aggggcaccgucuucugcu

SEQ ID NO: 2870495 - RNA, 19 nt, Artificial Sequence
  Description of Artificial Sequence: Synthetic oligonucleotide
ugugugugugugugugccc

SEQ ID NO: 2870496 - RNA, 19 nt, Artificial Sequence
  Description of Artificial Sequence: Synthetic oligonucleotide
uagaggggcaccgucuucu

SEQ ID NO: 2870497 - RNA, 19 nt, Artificial Sequence
  Description of Artificial Sequence: Synthetic oligonucleotide
acacgucauuacugaaaag

SEQ ID NO: 2870498 - RNA, 19 nt, Artificial Sequence
  Description of Artificial Sequence: Synthetic oligonucleotide
gugugugugugugugugcc

SEQ ID NO: 2870499 - RNA, 19 nt, Artificial Sequence
  Description of Artificial Sequence: Synthetic oligonucleotide
cuucucccguccauucugc

SEQ ID NO: 2870500 - RNA, 19 nt, Artificial Sequence
  Description of Artificial Sequence: Synthetic oligonucleotide
ugugugugugugugugugu

SEQ ID NO: 2870501 - RNA, 19 nt, Artificial Sequence
  Description of Artificial Sequence: Synthetic oligonucleotide
ugucuucuuccagguagag

SEQ ID NO: 2870502 - RNA, 19 nt, Artificial Sequence
  Description of Artificial Sequence: Synthetic oligonucleotide
gggagaucucuucuuggag

SEQ ID NO: 2870503 - RNA, 19 nt, Artificial Sequence
  Description of Artificial Sequence: Synthetic oligonucleotide
ucaggggcgagccgagccu

SEQ ID NO: 2870504 - RNA, 19 nt, Artificial Sequence
  Description of Artificial Sequence: Synthetic oligonucleotide
gugugugugugugugugug

SEQ ID NO: 2870505 - RNA, 19 nt, Artificial Sequence
  Description of Artificial Sequence: Synthetic oligonucleotide
ugcuucucccguccauucu

SEQ ID NO: 2870506 - RNA, 19 nt, Artificial Sequence
  Description of Artificial Sequence: Synthetic oligonucleotide
agugugugugugugugugu

SEQ ID NO: 2870507 - RNA, 19 nt, Artificial Sequence
  Description of Artificial Sequence: Synthetic oligonucleotide
gucauuacugaaaagccau

SEQ ID NO: 2870508 - RNA, 19 nt, Artificial Sequence
  Description of Artificial Sequence: Synthetic oligonucleotide
agacccgucaggggcgagc

SEQ ID NO: 2870509 - RNA, 19 nt, Artificial Sequence
  Description of Artificial Sequence: Synthetic oligonucleotide
uccauucugcaggcuuccg

SEQ ID NO: 2870510 - RNA, 19 nt, Artificial Sequence
  Description of Artificial Sequence: Synthetic oligonucleotide
cauacacgucauuacugaa

SEQ ID NO: 2870511 - RNA, 19 nt, Artificial Sequence
  Description of Artificial Sequence: Synthetic oligonucleotide
uucugcuucucccguccau

SEQ ID NO: 2870512 - RNA, 19 nt, Artificial Sequence
  Description of Artificial Sequence: Synthetic oligonucleotide
gcuucucccguccauucug

SEQ ID NO: 2870513 - RNA, 19 nt, Artificial Sequence
  Description of Artificial Sequence: Synthetic oligonucleotide
ucccguccauucugcaggc

SEQ ID NO: 2870514 - RNA, 19 nt, Artificial Sequence
  Description of Artificial Sequence: Synthetic oligonucleotide
ggaagacccgucaggggcg

SEQ ID NO: 2870515 - RNA, 19 nt, Artificial Sequence
  Description of Artificial Sequence: Synthetic oligonucleotide
gaggggcaccgucuucugc

SEQ ID NO: 2870516 - RNA, 19 nt, Artificial Sequence
  Description of Artificial Sequence: Synthetic oligonucleotide
ucugcuucucccguccauu

SEQ ID NO: 2870517 - RNA, 19 nt, Artificial Sequence
  Description of Artificial Sequence: Synthetic oligonucleotide
uucucccguccauucugca

SEQ ID NO: 2870518 - RNA, 19 nt, Artificial Sequence
  Description of Artificial Sequence: Synthetic oligonucleotide
cagguagaggggcaccguc

SEQ ID NO: 2870519 - RNA, 19 nt, Artificial Sequence
  Description of Artificial Sequence: Synthetic oligonucleotide
gacccgucaggggcgagcc

SEQ ID NO: 2870520 - RNA, 19 nt, Artificial Sequence
  Description of Artificial Sequence: Synthetic oligonucleotide
uuccagguagaggggcacc

SEQ ID NO: 2870521 - RNA, 19 nt, Artificial Sequence
  Description of Artificial Sequence: Synthetic oligonucleotide
gugugugugugugugccca

SEQ ID NO: 2870522 - RNA, 19 nt, Artificial Sequence
  Description of Artificial Sequence: Synthetic oligonucleotide
ucucuucuuggagcaugug

SEQ ID NO: 2870523 - RNA, 19 nt, Artificial Sequence
  Description of Artificial Sequence: Synthetic oligonucleotide
gugugugcccauucauaca

SEQ ID NO: 2870524 - RNA, 19 nt, Artificial Sequence
  Description of Artificial Sequence: Synthetic oligonucleotide
aucucuucuuggagcaugu

SEQ ID NO: 2870525 - RNA, 19 nt, Artificial Sequence
  Description of Artificial Sequence: Synthetic oligonucleotide
augucuucuuccagguaga

SEQ ID NO: 2870526 - RNA, 19 nt, Artificial Sequence
  Description of Artificial Sequence: Synthetic oligonucleotide
cuuccagguagaggggcac

SEQ ID NO: 2870527 - RNA, 19 nt, Artificial Sequence
  Description of Artificial Sequence: Synthetic oligonucleotide
agaggggcaccgucuucug

SEQ ID NO: 2870528 - RNA, 19 nt, Artificial Sequence
  Description of Artificial Sequence: Synthetic oligonucleotide
ggggagaucucuucuugga

SEQ ID NO: 2870529 - RNA, 19 nt, Artificial Sequence
  Description of Artificial Sequence: Synthetic oligonucleotide
gugugcccauucauacacg

SEQ ID NO: 2870530 - RNA, 19 nt, Artificial Sequence
  Description of Artificial Sequence: Synthetic oligonucleotide
guccauucugcaggcuucc

SEQ ID NO: 2870531 - RNA, 19 nt, Artificial Sequence
  Description of Artificial Sequence: Synthetic oligonucleotide
agguagaggggcaccgucu

SEQ ID NO: 2870532 - RNA, 19 nt, Artificial Sequence
  Description of Artificial Sequence: Synthetic oligonucleotide
ugugugugugugugcccau

SEQ ID NO: 2870533 - RNA, 19 nt, Artificial Sequence
  Description of Artificial Sequence: Synthetic oligonucleotide
gcgagccgagccuuguaag

SEQ ID NO: 2870534 - RNA, 19 nt, Artificial Sequence
  Description of Artificial Sequence: Synthetic oligonucleotide
cgucauuacugaaaagcca

SEQ ID NO: 2870535 - RNA, 19 nt, Artificial Sequence
  Description of Artificial Sequence: Synthetic oligonucleotide
guagaggggcaccgucuuc

SEQ ID NO: 2870536 - RNA, 19 nt, Artificial Sequence
  Description of Artificial Sequence: Synthetic oligonucleotide
gugugugugcccauucaua

SEQ ID NO: 2870537 - RNA, 19 nt, Artificial Sequence
  Description of Artificial Sequence: Synthetic oligonucleotide
acccgucaggggcgagccg

SEQ ID NO: 2870538 - RNA, 19 nt, Artificial Sequence
  Description of Artificial Sequence: Synthetic oligonucleotide
gaagacccgucaggggcga

SEQ ID NO: 2870539 - RNA, 19 nt, Artificial Sequence
  Description of Artificial Sequence: Synthetic oligonucleotide
agaucucuucuuggagcau

SEQ ID NO: 2870540 - RNA, 19 nt, Artificial Sequence
  Description of Artificial Sequence: Synthetic oligonucleotide
aagacccgucaggggcgag

SEQ ID NO: 2870541 - RNA, 19 nt, Artificial Sequence
  Description of Artificial Sequence: Synthetic oligonucleotide
gugcccauucauacacguc

SEQ ID NO: 2870542 - RNA, 19 nt, Artificial Sequence
  Description of Artificial Sequence: Synthetic oligonucleotide
cuucugcuucucccgucca

SEQ ID NO: 2870543 - RNA, 19 nt, Artificial Sequence
  Description of Artificial Sequence: Synthetic oligonucleotide
ggcgagccgagccuuguaa

SEQ ID NO: 2870544 - RNA, 19 nt, Artificial Sequence
  Description of Artificial Sequence: Synthetic oligonucleotide
cguccauucugcaggcuuc

SEQ ID NO: 2870545 - RNA, 19 nt, Artificial Sequence
  Description of Artificial Sequence: Synthetic oligonucleotide
ggcaccgucuucugcuucu

SEQ ID NO: 2870546 - RNA, 19 nt, Artificial Sequence
  Description of Artificial Sequence: Synthetic oligonucleotide
gguagaggggcaccgucuu

SEQ ID NO: 2870547 - RNA, 19 nt, Artificial Sequence
  Description of Artificial Sequence: Synthetic oligonucleotide
aggggcgagccgagccuug

SEQ ID NO: 2870548 - RNA, 19 nt, Artificial Sequence
  Description of Artificial Sequence: Synthetic oligonucleotide
gggcaccgucuucugcuuc

SEQ ID NO: 2870549 - RNA, 19 nt, Artificial Sequence
  Description of Artificial Sequence: Synthetic oligonucleotide
ccgucaggggcgagccgag

SEQ ID NO: 2870550 - RNA, 19 nt, Artificial Sequence
  Description of Artificial Sequence: Synthetic oligonucleotide
cccgucaggggcgagccga

SEQ ID NO: 2870551 - RNA, 19 nt, Artificial Sequence
  Description of Artificial Sequence: Synthetic oligonucleotide
gugugugugugugcccauu

SEQ ID NO: 2870552 - RNA, 19 nt, Artificial Sequence
  Description of Artificial Sequence: Synthetic oligonucleotide
gcaccgucuucugcuucuc

SEQ ID NO: 2870553 - RNA, 19 nt, Artificial Sequence
  Description of Artificial Sequence: Synthetic oligonucleotide
cgagccgagccuuguaagu

SEQ ID NO: 2870554 - RNA, 19 nt, Artificial Sequence
  Description of Artificial Sequence: Synthetic oligonucleotide
ccguccauucugcaggcuu

SEQ ID NO: 2870555 - RNA, 19 nt, Artificial Sequence
  Description of Artificial Sequence: Synthetic oligonucleotide
gggcgagccgagccuugua

SEQ ID NO: 2870556 - RNA, 19 nt, Artificial Sequence
  Description of Artificial Sequence: Synthetic oligonucleotide
cgucuucugcuucucccgu

SEQ ID NO: 2870557 - RNA, 19 nt, Artificial Sequence
  Description of Artificial Sequence: Synthetic oligonucleotide
cgucaggggcgagccgagc

SEQ ID NO: 2870558 - RNA, 19 nt, Artificial Sequence
  Description of Artificial Sequence: Synthetic oligonucleotide
caggggcgagccgagccuu

SEQ ID NO: 2870559 - RNA, 19 nt, Artificial Sequence
  Description of Artificial Sequence: Synthetic oligonucleotide
ggggcgagccgagccuugu

SEQ ID NO: 2870560 - RNA, 19 nt, Artificial Sequence
  Description of Artificial Sequence: Synthetic oligonucleotide
ccagguagaggggcaccgu

SEQ ID NO: 2870561 - RNA, 19 nt, Artificial Sequence
  Description of Artificial Sequence: Synthetic oligonucleotide
cccguccauucugcaggcu

SEQ ID NO: 2870562 - RNA, 19 nt, Artificial Sequence
  Description of Artificial Sequence: Synthetic oligonucleotide
uaaaauauggucaucacag

SEQ ID NO: 2870563 - RNA, 19 nt, Artificial Sequence
  Description of Artificial Sequence: Synthetic oligonucleotide
uucaguauuuauuaaaugg

SEQ ID NO: 2870564 - RNA, 19 nt, Artificial Sequence
  Description of Artificial Sequence: Synthetic oligonucleotide
ucauguaauaaaauggugg

SEQ ID NO: 2870565 - RNA, 19 nt, Artificial Sequence
  Description of Artificial Sequence: Synthetic oligonucleotide
uguaguaacacucagucgc

SEQ ID NO: 2870566 - RNA, 19 nt, Artificial Sequence
  Description of Artificial Sequence: Synthetic oligonucleotide
uauaaugaaaugcaaacca

SEQ ID NO: 2870567 - RNA, 19 nt, Artificial Sequence
  Description of Artificial Sequence: Synthetic oligonucleotide
ugaaaugcaaaccauaugu

SEQ ID NO: 2870568 - RNA, 19 nt, Artificial Sequence
  Description of Artificial Sequence: Synthetic oligonucleotide
aauggaggaacuuacugac

SEQ ID NO: 2870569 - RNA, 19 nt, Artificial Sequence
  Description of Artificial Sequence: Synthetic oligonucleotide
aaaccaucaccuuauauuc

SEQ ID NO: 2870570 - RNA, 19 nt, Artificial Sequence
  Description of Artificial Sequence: Synthetic oligonucleotide
aauaaaaugguggaaauga

SEQ ID NO: 2870571 - RNA, 19 nt, Artificial Sequence
  Description of Artificial Sequence: Synthetic oligonucleotide
uauuacauacauauaauga

SEQ ID NO: 2870572 - RNA, 19 nt, Artificial Sequence
  Description of Artificial Sequence: Synthetic oligonucleotide
augaaaauuagcuuuugac

SEQ ID NO: 2870573 - RNA, 19 nt, Artificial Sequence
  Description of Artificial Sequence: Synthetic oligonucleotide
aaaugcaaaccauauguuc

SEQ ID NO: 2870574 - RNA, 19 nt, Artificial Sequence
  Description of Artificial Sequence: Synthetic oligonucleotide
aaaugaaugaaaauuagcu

SEQ ID NO: 2870575 - RNA, 19 nt, Artificial Sequence
  Description of Artificial Sequence: Synthetic oligonucleotide
uuaguaaauauaauguugu

SEQ ID NO: 2870576 - RNA, 19 nt, Artificial Sequence
  Description of Artificial Sequence: Synthetic oligonucleotide
uuugacuuaguaaauauaa

SEQ ID NO: 2870577 - RNA, 19 nt, Artificial Sequence
  Description of Artificial Sequence: Synthetic oligonucleotide
auuuauuaaauggaggaac

SEQ ID NO: 2870578 - RNA, 19 nt, Artificial Sequence
  Description of Artificial Sequence: Synthetic oligonucleotide
auauucauguaauaaaaug

SEQ ID NO: 2870579 - RNA, 19 nt, Artificial Sequence
  Description of Artificial Sequence: Synthetic oligonucleotide
ugaaaauuagcuuuugacu

SEQ ID NO: 2870580 - RNA, 19 nt, Artificial Sequence
  Description of Artificial Sequence: Synthetic oligonucleotide
ugacuuaguaaauauaaug

SEQ ID NO: 2870581 - RNA, 19 nt, Artificial Sequence
  Description of Artificial Sequence: Synthetic oligonucleotide
cauacauauaaugaaaugc

SEQ ID NO: 2870582 - RNA, 19 nt, Artificial Sequence
  Description of Artificial Sequence: Synthetic oligonucleotide
cuuaguaaauauaauguug

SEQ ID NO: 2870583 - RNA, 19 nt, Artificial Sequence
  Description of Artificial Sequence: Synthetic oligonucleotide
acauauuacauacauauaa

SEQ ID NO: 2870584 - RNA, 19 nt, Artificial Sequence
  Description of Artificial Sequence: Synthetic oligonucleotide
ucauuguuaaaccaucacc

SEQ ID NO: 2870585 - RNA, 19 nt, Artificial Sequence
  Description of Artificial Sequence: Synthetic oligonucleotide
ucaguauuuauuaaaugga

SEQ ID NO: 2870586 - RNA, 19 nt, Artificial Sequence
  Description of Artificial Sequence: Synthetic oligonucleotide
aaaaugguggaaaugaaug

SEQ ID NO: 2870587 - RNA, 19 nt, Artificial Sequence
  Description of Artificial Sequence: Synthetic oligonucleotide
aaaccauauguucucauug

SEQ ID NO: 2870588 - RNA, 19 nt, Artificial Sequence
  Description of Artificial Sequence: Synthetic oligonucleotide
auauaaugaaaugcaaacc

SEQ ID NO: 2870589 - RNA, 19 nt, Artificial Sequence
  Description of Artificial Sequence: Synthetic oligonucleotide
acuauugucaugugaaguc

SEQ ID NO: 2870590 - RNA, 19 nt, Artificial Sequence
  Description of Artificial Sequence: Synthetic oligonucleotide
uuaaaauauggucaucaca

SEQ ID NO: 2870591 - RNA, 19 nt, Artificial Sequence
  Description of Artificial Sequence: Synthetic oligonucleotide
uuuuaaaauauggucauca

SEQ ID NO: 2870592 - RNA, 19 nt, Artificial Sequence
  Description of Artificial Sequence: Synthetic oligonucleotide
acaaaaggcaauacaaucc

SEQ ID NO: 2870593 - RNA, 19 nt, Artificial Sequence
  Description of Artificial Sequence: Synthetic oligonucleotide
ucuccuacauauuacauac

SEQ ID NO: 2870594 - RNA, 19 nt, Artificial Sequence
  Description of Artificial Sequence: Synthetic oligonucleotide
auuacauacauauaaugaa

SEQ ID NO: 2870595 - RNA, 19 nt, Artificial Sequence
  Description of Artificial Sequence: Synthetic oligonucleotide
aaauggaggaacuuacuga

SEQ ID NO: 2870596 - RNA, 19 nt, Artificial Sequence
  Description of Artificial Sequence: Synthetic oligonucleotide
aaugaaugaaaauuagcuu

SEQ ID NO: 2870597 - RNA, 19 nt, Artificial Sequence
  Description of Artificial Sequence: Synthetic oligonucleotide
guauuuauuaaauggagga

SEQ ID NO: 2870598 - RNA, 19 nt, Artificial Sequence
  Description of Artificial Sequence: Synthetic oligonucleotide
uaaauggaggaacuuacug

SEQ ID NO: 2870599 - RNA, 19 nt, Artificial Sequence
  Description of Artificial Sequence: Synthetic oligonucleotide
aaccuuauuacaugaguug

SEQ ID NO: 2870600 - RNA, 19 nt, Artificial Sequence
  Description of Artificial Sequence: Synthetic oligonucleotide
aauauggucaucacaguag

SEQ ID NO: 2870601 - RNA, 19 nt, Artificial Sequence
  Description of Artificial Sequence: Synthetic oligonucleotide
uguucauguaguaacacuc

SEQ ID NO: 2870602 - RNA, 19 nt, Artificial Sequence
  Description of Artificial Sequence: Synthetic oligonucleotide
auuaaauggaggaacuuac

SEQ ID NO: 2870603 - RNA, 19 nt, Artificial Sequence
  Description of Artificial Sequence: Synthetic oligonucleotide
cauuggaguacuuggaucc

SEQ ID NO: 2870604 - RNA, 19 nt, Artificial Sequence
  Description of Artificial Sequence: Synthetic oligonucleotide
uguaauaaaaugguggaaa

SEQ ID NO: 2870605 - RNA, 19 nt, Artificial Sequence
  Description of Artificial Sequence: Synthetic oligonucleotide
gaacuuacugacaaaaggc

SEQ ID NO: 2870606 - RNA, 19 nt, Artificial Sequence
  Description of Artificial Sequence: Synthetic oligonucleotide
uuacauacauauaaugaaa

SEQ ID NO: 2870607 - RNA, 19 nt, Artificial Sequence
  Description of Artificial Sequence: Synthetic oligonucleotide
uaaaccaucaccuuauauu

SEQ ID NO: 2870608 - RNA, 19 nt, Artificial Sequence
  Description of Artificial Sequence: Synthetic oligonucleotide
uuuuauuuguguucuucag

SEQ ID NO: 2870609 - RNA, 19 nt, Artificial Sequence
  Description of Artificial Sequence: Synthetic oligonucleotide
uauuacaugaguuggcagu

SEQ ID NO: 2870610 - RNA, 19 nt, Artificial Sequence
  Description of Artificial Sequence: Synthetic oligonucleotide
aaaugguggaaaugaauga

SEQ ID NO: 2870611 - RNA, 19 nt, Artificial Sequence
  Description of Artificial Sequence: Synthetic oligonucleotide
aaugcaaaccauauguucu

SEQ ID NO: 2870612 - RNA, 19 nt, Artificial Sequence
  Description of Artificial Sequence: Synthetic oligonucleotide
uggaaaugaaugaaaauua

SEQ ID NO: 2870613 - RNA, 19 nt, Artificial Sequence
  Description of Artificial Sequence: Synthetic oligonucleotide
aucacaguaggauucuaac

SEQ ID NO: 2870614 - RNA, 19 nt, Artificial Sequence
  Description of Artificial Sequence: Synthetic oligonucleotide
auguucucauuguuaaacc

SEQ ID NO: 2870615 - RNA, 19 nt, Artificial Sequence
  Description of Artificial Sequence: Synthetic oligonucleotide
uguucuucaguauuuauua

SEQ ID NO: 2870616 - RNA, 19 nt, Artificial Sequence
  Description of Artificial Sequence: Synthetic oligonucleotide
aguguguugaguccuuggc

SEQ ID NO: 2870617 - RNA, 19 nt, Artificial Sequence
  Description of Artificial Sequence: Synthetic oligonucleotide
uagcuuuugacuuaguaaa

SEQ ID NO: 2870618 - RNA, 19 nt, Artificial Sequence
  Description of Artificial Sequence: Synthetic oligonucleotide
uuagcuuuugacuuaguaa

SEQ ID NO: 2870619 - RNA, 19 nt, Artificial Sequence
  Description of Artificial Sequence: Synthetic oligonucleotide
ugugaagucagaagaaccu

SEQ ID NO: 2870620 - RNA, 19 nt, Artificial Sequence
  Description of Artificial Sequence: Synthetic oligonucleotide
ucuaacuauugucauguga

SEQ ID NO: 2870621 - RNA, 19 nt, Artificial Sequence
  Description of Artificial Sequence: Synthetic oligonucleotide
aguauuuauuaaauggagg

SEQ ID NO: 2870622 - RNA, 19 nt, Artificial Sequence
  Description of Artificial Sequence: Synthetic oligonucleotide
gacaaaaggcaauacaauc

SEQ ID NO: 2870623 - RNA, 19 nt, Artificial Sequence
  Description of Artificial Sequence: Synthetic oligonucleotide
uguguugaguccuuggccc

SEQ ID NO: 2870624 - RNA, 19 nt, Artificial Sequence
  Description of Artificial Sequence: Synthetic oligonucleotide
uuuauuuguguucuucagu

SEQ ID NO: 2870625 - RNA, 19 nt, Artificial Sequence
  Description of Artificial Sequence: Synthetic oligonucleotide
ggaacuuacugacaaaagg

SEQ ID NO: 2870626 - RNA, 19 nt, Artificial Sequence
  Description of Artificial Sequence: Synthetic oligonucleotide
uucauguaauaaaauggug

SEQ ID NO: 2870627 - RNA, 19 nt, Artificial Sequence
  Description of Artificial Sequence: Synthetic oligonucleotide
auauggucaucacaguagg

SEQ ID NO: 2870628 - RNA, 19 nt, Artificial Sequence
  Description of Artificial Sequence: Synthetic oligonucleotide
gaaaugaaugaaaauuagc

SEQ ID NO: 2870629 - RNA, 19 nt, Artificial Sequence
  Description of Artificial Sequence: Synthetic oligonucleotide
ucuucaguauuuauuaaau

SEQ ID NO: 2870630 - RNA, 19 nt, Artificial Sequence
  Description of Artificial Sequence: Synthetic oligonucleotide
uuauuuguguucuucagua

SEQ ID NO: 2870631 - RNA, 19 nt, Artificial Sequence
  Description of Artificial Sequence: Synthetic oligonucleotide
ucaccuuauauucauguaa

SEQ ID NO: 2870632 - RNA, 19 nt, Artificial Sequence
  Description of Artificial Sequence: Synthetic oligonucleotide
uugaguuugguucuccuac

SEQ ID NO: 2870633 - RNA, 19 nt, Artificial Sequence
  Description of Artificial Sequence: Synthetic oligonucleotide
caguauuuauuaaauggag

SEQ ID NO: 2870634 - RNA, 19 nt, Artificial Sequence
  Description of Artificial Sequence: Synthetic oligonucleotide
uauguucucauuguuaaac

SEQ ID NO: 2870635 - RNA, 19 nt, Artificial Sequence
  Description of Artificial Sequence: Synthetic oligonucleotide
aaauauggucaucacagua

SEQ ID NO: 2870636 - RNA, 19 nt, Artificial Sequence
  Description of Artificial Sequence: Synthetic oligonucleotide
uguuaaaccaucaccuuau

SEQ ID NO: 2870637 - RNA, 19 nt, Artificial Sequence
  Description of Artificial Sequence: Synthetic oligonucleotide
ucagaagaaccuuauuaca

SEQ ID NO: 2870638 - RNA, 19 nt, Artificial Sequence
  Description of Artificial Sequence: Synthetic oligonucleotide
uuuaaaauauggucaucac

SEQ ID NO: 2870639 - RNA, 19 nt, Artificial Sequence
  Description of Artificial Sequence: Synthetic oligonucleotide
acauacauauaaugaaaug

SEQ ID NO: 2870640 - RNA, 19 nt, Artificial Sequence
  Description of Artificial Sequence: Synthetic oligonucleotide
aaugaaaugcaaaccauau

SEQ ID NO: 2870641 - RNA, 19 nt, Artificial Sequence
  Description of Artificial Sequence: Synthetic oligonucleotide
uccuacauauuacauacau

SEQ ID NO: 2870642 - RNA, 19 nt, Artificial Sequence
  Description of Artificial Sequence: Synthetic oligonucleotide
uucauguaguaacacucag

SEQ ID NO: 2870643 - RNA, 19 nt, Artificial Sequence
  Description of Artificial Sequence: Synthetic oligonucleotide
agaagaaccuuauuacaug

SEQ ID NO: 2870644 - RNA, 19 nt, Artificial Sequence
  Description of Artificial Sequence: Synthetic oligonucleotide
gucagaagaaccuuauuac

SEQ ID NO: 2870645 - RNA, 19 nt, Artificial Sequence
  Description of Artificial Sequence: Synthetic oligonucleotide
uaaaaugguggaaaugaau

SEQ ID NO: 2870646 - RNA, 19 nt, Artificial Sequence
  Description of Artificial Sequence: Synthetic oligonucleotide
ugaguuggcagucagugau

SEQ ID NO: 2870647 - RNA, 19 nt, Artificial Sequence
  Description of Artificial Sequence: Synthetic oligonucleotide
aaauuagcuuuugacuuag

SEQ ID NO: 2870648 - RNA, 19 nt, Artificial Sequence
  Description of Artificial Sequence: Synthetic oligonucleotide
uaggauucuaacuauuguc

SEQ ID NO: 2870649 - RNA, 19 nt, Artificial Sequence
  Description of Artificial Sequence: Synthetic oligonucleotide
ugucaugugaagucagaag

SEQ ID NO: 2870650 - RNA, 19 nt, Artificial Sequence
  Description of Artificial Sequence: Synthetic oligonucleotide
agucagaagaaccuuauua

SEQ ID NO: 2870651 - RNA, 19 nt, Artificial Sequence
  Description of Artificial Sequence: Synthetic oligonucleotide
gucaugugaagucagaaga

SEQ ID NO: 2870652 - RNA, 19 nt, Artificial Sequence
  Description of Artificial Sequence: Synthetic oligonucleotide
aaaauauggucaucacagu

SEQ ID NO: 2870653 - RNA, 19 nt, Artificial Sequence
  Description of Artificial Sequence: Synthetic oligonucleotide
auacauauaaugaaaugca

SEQ ID NO: 2870654 - RNA, 19 nt, Artificial Sequence
  Description of Artificial Sequence: Synthetic oligonucleotide
aaaauuagcuuuugacuua

SEQ ID NO: 2870655 - RNA, 19 nt, Artificial Sequence
  Description of Artificial Sequence: Synthetic oligonucleotide
gauucuaacuauugucaug

SEQ ID NO: 2870656 - RNA, 19 nt, Artificial Sequence
  Description of Artificial Sequence: Synthetic oligonucleotide
cuaacuauugucaugugaa

SEQ ID NO: 2870657 - RNA, 19 nt, Artificial Sequence
  Description of Artificial Sequence: Synthetic oligonucleotide
guaaauauaauguuguuuu

SEQ ID NO: 2870658 - RNA, 19 nt, Artificial Sequence
  Description of Artificial Sequence: Synthetic oligonucleotide
uauugucaugugaagucag

SEQ ID NO: 2870659 - RNA, 19 nt, Artificial Sequence
  Description of Artificial Sequence: Synthetic oligonucleotide
uguucucauuguuaaacca

SEQ ID NO: 2870660 - RNA, 19 nt, Artificial Sequence
  Description of Artificial Sequence: Synthetic oligonucleotide
aaccauauguucucauugu

SEQ ID NO: 2870661 - RNA, 19 nt, Artificial Sequence
  Description of Artificial Sequence: Synthetic oligonucleotide
uacauauaaugaaaugcaa

SEQ ID NO: 2870662 - RNA, 19 nt, Artificial Sequence
  Description of Artificial Sequence: Synthetic oligonucleotide
augugaagucagaagaacc

SEQ ID NO: 2870663 - RNA, 19 nt, Artificial Sequence
  Description of Artificial Sequence: Synthetic oligonucleotide
acuuggaucccacagugug

SEQ ID NO: 2870664 - RNA, 19 nt, Artificial Sequence
  Description of Artificial Sequence: Synthetic oligonucleotide
uuauuacaugaguuggcag

SEQ ID NO: 2870665 - RNA, 19 nt, Artificial Sequence
  Description of Artificial Sequence: Synthetic oligonucleotide
gaaaauuagcuuuugacuu

SEQ ID NO: 2870666 - RNA, 19 nt, Artificial Sequence
  Description of Artificial Sequence: Synthetic oligonucleotide
agaaccuuauuacaugagu

SEQ ID NO: 2870667 - RNA, 19 nt, Artificial Sequence
  Description of Artificial Sequence: Synthetic oligonucleotide
acugacaaaaggcaauaca

SEQ ID NO: 2870668 - RNA, 19 nt, Artificial Sequence
  Description of Artificial Sequence: Synthetic oligonucleotide
uaaugaaaugcaaaccaua

SEQ ID NO: 2870669 - RNA, 19 nt, Artificial Sequence
  Description of Artificial Sequence: Synthetic oligonucleotide
cauguaauaaaauggugga

SEQ ID NO: 2870670 - RNA, 19 nt, Artificial Sequence
  Description of Artificial Sequence: Synthetic oligonucleotide
accuuauuacaugaguugg

SEQ ID NO: 2870671 - RNA, 19 nt, Artificial Sequence
  Description of Artificial Sequence: Synthetic oligonucleotide
aauacaauccaguguucau

SEQ ID NO: 2870672 - RNA, 19 nt, Artificial Sequence
  Description of Artificial Sequence: Synthetic oligonucleotide
gaagaaccuuauuacauga

SEQ ID NO: 2870673 - RNA, 19 nt, Artificial Sequence
  Description of Artificial Sequence: Synthetic oligonucleotide
gaguacuuggaucccacag

SEQ ID NO: 2870674 - RNA, 19 nt, Artificial Sequence
  Description of Artificial Sequence: Synthetic oligonucleotide
aacuauugucaugugaagu

SEQ ID NO: 2870675 - RNA, 19 nt, Artificial Sequence
  Description of Artificial Sequence: Synthetic oligonucleotide
acuuaguaaauauaauguu

SEQ ID NO: 2870676 - RNA, 19 nt, Artificial Sequence
  Description of Artificial Sequence: Synthetic oligonucleotide
uaauaaaaugguggaaaug

SEQ ID NO: 2870677 - RNA, 19 nt, Artificial Sequence
  Description of Artificial Sequence: Synthetic oligonucleotide
uggaggaacuuacugacaa

SEQ ID NO: 2870678 - RNA, 19 nt, Artificial Sequence
  Description of Artificial Sequence: Synthetic oligonucleotide
ugaaugaaaauuagcuuuu

SEQ ID NO: 2870679 - RNA, 19 nt, Artificial Sequence
  Description of Artificial Sequence: Synthetic oligonucleotide
auucauguaauaaaauggu

SEQ ID NO: 2870680 - RNA, 19 nt, Artificial Sequence
  Description of Artificial Sequence: Synthetic oligonucleotide
uuaaauggaggaacuuacu

SEQ ID NO: 2870681 - RNA, 19 nt, Artificial Sequence
  Description of Artificial Sequence: Synthetic oligonucleotide
aacuuacugacaaaaggca

SEQ ID NO: 2870682 - RNA, 19 nt, Artificial Sequence
  Description of Artificial Sequence: Synthetic oligonucleotide
caauccaguguucauguag

SEQ ID NO: 2870683 - RNA, 19 nt, Artificial Sequence
  Description of Artificial Sequence: Synthetic oligonucleotide
uuuugacuuaguaaauaua

SEQ ID NO: 2870684 - RNA, 19 nt, Artificial Sequence
  Description of Artificial Sequence: Synthetic oligonucleotide
uaacuauugucaugugaag

SEQ ID NO: 2870685 - RNA, 19 nt, Artificial Sequence
  Description of Artificial Sequence: Synthetic oligonucleotide
aaaggcaauacaauccagu

SEQ ID NO: 2870686 - RNA, 19 nt, Artificial Sequence
  Description of Artificial Sequence: Synthetic oligonucleotide
agucagugaugccaacagc

SEQ ID NO: 2870687 - RNA, 19 nt, Artificial Sequence
  Description of Artificial Sequence: Synthetic oligonucleotide
aaugguggaaaugaaugaa

SEQ ID NO: 2870688 - RNA, 19 nt, Artificial Sequence
  Description of Artificial Sequence: Synthetic oligonucleotide
cacucagucgccuauugag

SEQ ID NO: 2870689 - RNA, 19 nt, Artificial Sequence
  Description of Artificial Sequence: Synthetic oligonucleotide
auuacaugaguuggcaguc

SEQ ID NO: 2870690 - RNA, 19 nt, Artificial Sequence
  Description of Artificial Sequence: Synthetic oligonucleotide
uauuaaauggaggaacuua

SEQ ID NO: 2870691 - RNA, 19 nt, Artificial Sequence
  Description of Artificial Sequence: Synthetic oligonucleotide
ucucauuguuaaaccauca

SEQ ID NO: 2870692 - RNA, 19 nt, Artificial Sequence
  Description of Artificial Sequence: Synthetic oligonucleotide
cuucaguauuuauuaaaug

SEQ ID NO: 2870693 - RNA, 19 nt, Artificial Sequence
  Description of Artificial Sequence: Synthetic oligonucleotide
auguaguaacacucagucg

SEQ ID NO: 2870694 - RNA, 19 nt, Artificial Sequence
  Description of Artificial Sequence: Synthetic oligonucleotide
uuguuaaaccaucaccuua

SEQ ID NO: 2870695 - RNA, 19 nt, Artificial Sequence
  Description of Artificial Sequence: Synthetic oligonucleotide
cugacaaaaggcaauacaa

SEQ ID NO: 2870696 - RNA, 19 nt, Artificial Sequence
  Description of Artificial Sequence: Synthetic oligonucleotide
gacuuaguaaauauaaugu

SEQ ID NO: 2870697 - RNA, 19 nt, Artificial Sequence
  Description of Artificial Sequence: Synthetic oligonucleotide
ugguggaaaugaaugaaaa

SEQ ID NO: 2870698 - RNA, 19 nt, Artificial Sequence
  Description of Artificial Sequence: Synthetic oligonucleotide
uauuuauuaaauggaggaa

SEQ ID NO: 2870699 - RNA, 19 nt, Artificial Sequence
  Description of Artificial Sequence: Synthetic oligonucleotide
uucucauuguuaaaccauc

SEQ ID NO: 2870700 - RNA, 19 nt, Artificial Sequence
  Description of Artificial Sequence: Synthetic oligonucleotide
uacaugaguuggcagucag

SEQ ID NO: 2870701 - RNA, 19 nt, Artificial Sequence
  Description of Artificial Sequence: Synthetic oligonucleotide
ucauguaguaacacucagu

SEQ ID NO: 2870702 - RNA, 19 nt, Artificial Sequence
  Description of Artificial Sequence: Synthetic oligonucleotide
cauuguuaaaccaucaccu

SEQ ID NO: 2870703 - RNA, 19 nt, Artificial Sequence
  Description of Artificial Sequence: Synthetic oligonucleotide
augcaaaccauauguucuc

SEQ ID NO: 2870704 - RNA, 19 nt, Artificial Sequence
  Description of Artificial Sequence: Synthetic oligonucleotide
aguaaauauaauguuguuu

SEQ ID NO: 2870705 - RNA, 19 nt, Artificial Sequence
  Description of Artificial Sequence: Synthetic oligonucleotide
uuaaaccaucaccuuauau

SEQ ID NO: 2870706 - RNA, 19 nt, Artificial Sequence
  Description of Artificial Sequence: Synthetic oligonucleotide
augaaaugcaaaccauaug

SEQ ID NO: 2870707 - RNA, 19 nt, Artificial Sequence
  Description of Artificial Sequence: Synthetic oligonucleotide
uuuguguucuucaguauuu

SEQ ID NO: 2870708 - RNA, 19 nt, Artificial Sequence
  Description of Artificial Sequence: Synthetic oligonucleotide
ucacaguaggauucuaacu

SEQ ID NO: 2870709 - RNA, 19 nt, Artificial Sequence
  Description of Artificial Sequence: Synthetic oligonucleotide
agugaugccaacagcauug

SEQ ID NO: 2870710 - RNA, 19 nt, Artificial Sequence
  Description of Artificial Sequence: Synthetic oligonucleotide
aacagcauuggaguacuug

SEQ ID NO: 2870711 - RNA, 19 nt, Artificial Sequence
  Description of Artificial Sequence: Synthetic oligonucleotide
uugacuuaguaaauauaau

SEQ ID NO: 2870712 - RNA, 19 nt, Artificial Sequence
  Description of Artificial Sequence: Synthetic oligonucleotide
ucaugugaagucagaagaa

SEQ ID NO: 2870713 - RNA, 19 nt, Artificial Sequence
  Description of Artificial Sequence: Synthetic oligonucleotide
cauauguucucauuguuaa

SEQ ID NO: 2870714 - RNA, 19 nt, Artificial Sequence
  Description of Artificial Sequence: Synthetic oligonucleotide
aguguucauguaguaacac

SEQ ID NO: 2870715 - RNA, 19 nt, Artificial Sequence
  Description of Artificial Sequence: Synthetic oligonucleotide
aguacuuggaucccacagu

SEQ ID NO: 2870716 - RNA, 19 nt, Artificial Sequence
  Description of Artificial Sequence: Synthetic oligonucleotide
guacuuggaucccacagug

SEQ ID NO: 2870717 - RNA, 19 nt, Artificial Sequence
  Description of Artificial Sequence: Synthetic oligonucleotide
aacacucagucgccuauug

SEQ ID NO: 2870718 - RNA, 19 nt, Artificial Sequence
  Description of Artificial Sequence: Synthetic oligonucleotide
auuagcuuuugacuuagua

SEQ ID NO: 2870719 - RNA, 19 nt, Artificial Sequence
  Description of Artificial Sequence: Synthetic oligonucleotide
ugaagucagaagaaccuua

SEQ ID NO: 2870720 - RNA, 19 nt, Artificial Sequence
  Description of Artificial Sequence: Synthetic oligonucleotide
caugaguuggcagucagug

SEQ ID NO: 2870721 - RNA, 19 nt, Artificial Sequence
  Description of Artificial Sequence: Synthetic oligonucleotide
uugguucuccuacauauua

SEQ ID NO: 2870722 - RNA, 19 nt, Artificial Sequence
  Description of Artificial Sequence: Synthetic oligonucleotide
aauccaguguucauguagu

SEQ ID NO: 2870723 - RNA, 19 nt, Artificial Sequence
  Description of Artificial Sequence: Synthetic oligonucleotide
auuuguguucuucaguauu

SEQ ID NO: 2870724 - RNA, 19 nt, Artificial Sequence
  Description of Artificial Sequence: Synthetic oligonucleotide
caaaaggcaauacaaucca

SEQ ID NO: 2870725 - RNA, 19 nt, Artificial Sequence
  Description of Artificial Sequence: Synthetic oligonucleotide
aggauucuaacuauuguca

SEQ ID NO: 2870726 - RNA, 19 nt, Artificial Sequence
  Description of Artificial Sequence: Synthetic oligonucleotide
aaaaggcaauacaauccag

SEQ ID NO: 2870727 - RNA, 19 nt, Artificial Sequence
  Description of Artificial Sequence: Synthetic oligonucleotide
uucuccuacauauuacaua

SEQ ID NO: 2870728 - RNA, 19 nt, Artificial Sequence
  Description of Artificial Sequence: Synthetic oligonucleotide
aguaggauucuaacuauug

SEQ ID NO: 2870729 - RNA, 19 nt, Artificial Sequence
  Description of Artificial Sequence: Synthetic oligonucleotide
auacaauccaguguucaug

SEQ ID NO: 2870730 - RNA, 19 nt, Artificial Sequence
  Description of Artificial Sequence: Synthetic oligonucleotide
cucauuguuaaaccaucac

SEQ ID NO: 2870731 - RNA, 19 nt, Artificial Sequence
  Description of Artificial Sequence: Synthetic oligonucleotide
acauauaaugaaaugcaaa

SEQ ID NO: 2870732 - RNA, 19 nt, Artificial Sequence
  Description of Artificial Sequence: Synthetic oligonucleotide
aagaaccuuauuacaugag

SEQ ID NO: 2870733 - RNA, 19 nt, Artificial Sequence
  Description of Artificial Sequence: Synthetic oligonucleotide
uauugaguuugguucuccu

SEQ ID NO: 2870734 - RNA, 19 nt, Artificial Sequence
  Description of Artificial Sequence: Synthetic oligonucleotide
ugguucuccuacauauuac

SEQ ID NO: 2870735 - RNA, 19 nt, Artificial Sequence
  Description of Artificial Sequence: Synthetic oligonucleotide
auuggaguacuuggauccc

SEQ ID NO: 2870736 - RNA, 19 nt, Artificial Sequence
  Description of Artificial Sequence: Synthetic oligonucleotide
cacaguaggauucuaacua

SEQ ID NO: 2870737 - RNA, 19 nt, Artificial Sequence
  Description of Artificial Sequence: Synthetic oligonucleotide
aggcaauacaauccagugu

SEQ ID NO: 2870738 - RNA, 19 nt, Artificial Sequence
  Description of Artificial Sequence: Synthetic oligonucleotide
gaaugaaaauuagcuuuug

SEQ ID NO: 2870739 - RNA, 19 nt, Artificial Sequence
  Description of Artificial Sequence: Synthetic oligonucleotide
guuugguucuccuacauau

SEQ ID NO: 2870740 - RNA, 19 nt, Artificial Sequence
  Description of Artificial Sequence: Synthetic oligonucleotide
cuuauuacaugaguuggca

SEQ ID NO: 2870741 - RNA, 19 nt, Artificial Sequence
  Description of Artificial Sequence: Synthetic oligonucleotide
ugaguuugguucuccuaca

SEQ ID NO: 2870742 - RNA, 19 nt, Artificial Sequence
  Description of Artificial Sequence: Synthetic oligonucleotide
guguguugaguccuuggcc

SEQ ID NO: 2870743 - RNA, 19 nt, Artificial Sequence
  Description of Artificial Sequence: Synthetic oligonucleotide
auuguuaaaccaucaccuu

SEQ ID NO: 2870744 - RNA, 19 nt, Artificial Sequence
  Description of Artificial Sequence: Synthetic oligonucleotide
acaguaggauucuaacuau

SEQ ID NO: 2870745 - RNA, 19 nt, Artificial Sequence
  Description of Artificial Sequence: Synthetic oligonucleotide
caugugaagucagaagaac

SEQ ID NO: 2870746 - RNA, 19 nt, Artificial Sequence
  Description of Artificial Sequence: Synthetic oligonucleotide
accaucaccuuauauucau

SEQ ID NO: 2870747 - RNA, 19 nt, Artificial Sequence
  Description of Artificial Sequence: Synthetic oligonucleotide
ccaguguucauguaguaac

SEQ ID NO: 2870748 - RNA, 19 nt, Artificial Sequence
  Description of Artificial Sequence: Synthetic oligonucleotide
auaaugaaaugcaaaccau

SEQ ID NO: 2870749 - RNA, 19 nt, Artificial Sequence
  Description of Artificial Sequence: Synthetic oligonucleotide
uauggucaucacaguagga

SEQ ID NO: 2870750 - RNA, 19 nt, Artificial Sequence
  Description of Artificial Sequence: Synthetic oligonucleotide
ucagugaugccaacagcau

SEQ ID NO: 2870751 - RNA, 19 nt, Artificial Sequence
  Description of Artificial Sequence: Synthetic oligonucleotide
ucccacaguguguugaguc

SEQ ID NO: 2870752 - RNA, 19 nt, Artificial Sequence
  Description of Artificial Sequence: Synthetic oligonucleotide
gaucccacaguguguugag

SEQ ID NO: 2870753 - RNA, 19 nt, Artificial Sequence
  Description of Artificial Sequence: Synthetic oligonucleotide
gaggaacuuacugacaaaa

SEQ ID NO: 2870754 - RNA, 19 nt, Artificial Sequence
  Description of Artificial Sequence: Synthetic oligonucleotide
agcauuggaguacuuggau

SEQ ID NO: 2870755 - RNA, 19 nt, Artificial Sequence
  Description of Artificial Sequence: Synthetic oligonucleotide
uguguucuucaguauuuau

SEQ ID NO: 2870756 - RNA, 19 nt, Artificial Sequence
  Description of Artificial Sequence: Synthetic oligonucleotide
auggucaucacaguaggau

SEQ ID NO: 2870757 - RNA, 19 nt, Artificial Sequence
  Description of Artificial Sequence: Synthetic oligonucleotide
uaguaaauauaauguuguu

SEQ ID NO: 2870758 - RNA, 19 nt, Artificial Sequence
  Description of Artificial Sequence: Synthetic oligonucleotide
uauuuguguucuucaguau

SEQ ID NO: 2870759 - RNA, 19 nt, Artificial Sequence
  Description of Artificial Sequence: Synthetic oligonucleotide
uggaguacuuggaucccac

SEQ ID NO: 2870760 - RNA, 19 nt, Artificial Sequence
  Description of Artificial Sequence: Synthetic oligonucleotide
uuauuaaauggaggaacuu

SEQ ID NO: 2870761 - RNA, 19 nt, Artificial Sequence
  Description of Artificial Sequence: Synthetic oligonucleotide
uuacugacaaaaggcaaua

SEQ ID NO: 2870762 - RNA, 19 nt, Artificial Sequence
  Description of Artificial Sequence: Synthetic oligonucleotide
guggaaaugaaugaaaauu

SEQ ID NO: 2870763 - RNA, 19 nt, Artificial Sequence
  Description of Artificial Sequence: Synthetic oligonucleotide
caguguguugaguccuugg

SEQ ID NO: 2870764 - RNA, 19 nt, Artificial Sequence
  Description of Artificial Sequence: Synthetic oligonucleotide
uugucaugugaagucagaa

SEQ ID NO: 2870765 - RNA, 19 nt, Artificial Sequence
  Description of Artificial Sequence: Synthetic oligonucleotide
guaauaaaaugguggaaau

SEQ ID NO: 2870766 - RNA, 19 nt, Artificial Sequence
  Description of Artificial Sequence: Synthetic oligonucleotide
cauauuacauacauauaau

SEQ ID NO: 2870767 - RNA, 19 nt, Artificial Sequence
  Description of Artificial Sequence: Synthetic oligonucleotide
uggucaucacaguaggauu

SEQ ID NO: 2870768 - RNA, 19 nt, Artificial Sequence
  Description of Artificial Sequence: Synthetic oligonucleotide
aggaacuuacugacaaaag

SEQ ID NO: 2870769 - RNA, 19 nt, Artificial Sequence
  Description of Artificial Sequence: Synthetic oligonucleotide
auugaguuugguucuccua

SEQ ID NO: 2870770 - RNA, 19 nt, Artificial Sequence
  Description of Artificial Sequence: Synthetic oligonucleotide
uuugguucuccuacauauu

SEQ ID NO: 2870771 - RNA, 19 nt, Artificial Sequence
  Description of Artificial Sequence: Synthetic oligonucleotide
aagucagaagaaccuuauu

SEQ ID NO: 2870772 - RNA, 19 nt, Artificial Sequence
  Description of Artificial Sequence: Synthetic oligonucleotide
cuuuugacuuaguaaauau

SEQ ID NO: 2870773 - RNA, 19 nt, Artificial Sequence
  Description of Artificial Sequence: Synthetic oligonucleotide
ccuuauuacaugaguuggc

SEQ ID NO: 2870774 - RNA, 19 nt, Artificial Sequence
  Description of Artificial Sequence: Synthetic oligonucleotide
uccaguguucauguaguaa

SEQ ID NO: 2870775 - RNA, 19 nt, Artificial Sequence
  Description of Artificial Sequence: Synthetic oligonucleotide
gguucuccuacauauuaca

SEQ ID NO: 2870776 - RNA, 19 nt, Artificial Sequence
  Description of Artificial Sequence: Synthetic oligonucleotide
guaguaacacucagucgcc

SEQ ID NO: 2870777 - RNA, 19 nt, Artificial Sequence
  Description of Artificial Sequence: Synthetic oligonucleotide
uucuaacuauugucaugug

SEQ ID NO: 2870778 - RNA, 19 nt, Artificial Sequence
  Description of Artificial Sequence: Synthetic oligonucleotide
auaaaaugguggaaaugaa

SEQ ID NO: 2870779 - RNA, 19 nt, Artificial Sequence
  Description of Artificial Sequence: Synthetic oligonucleotide
ucgccuauugaguuugguu

SEQ ID NO: 2870780 - RNA, 19 nt, Artificial Sequence
  Description of Artificial Sequence: Synthetic oligonucleotide
aucaccuuauauucaugua

SEQ ID NO: 2870781 - RNA, 19 nt, Artificial Sequence
  Description of Artificial Sequence: Synthetic oligonucleotide
ugcaaaccauauguucuca

SEQ ID NO: 2870782 - RNA, 19 nt, Artificial Sequence
  Description of Artificial Sequence: Synthetic oligonucleotide
acuuacugacaaaaggcaa

SEQ ID NO: 2870783 - RNA, 19 nt, Artificial Sequence
  Description of Artificial Sequence: Synthetic oligonucleotide
cuauugaguuugguucucc

SEQ ID NO: 2870784 - RNA, 19 nt, Artificial Sequence
  Description of Artificial Sequence: Synthetic oligonucleotide
accauauguucucauuguu

SEQ ID NO: 2870785 - RNA, 19 nt, Artificial Sequence
  Description of Artificial Sequence: Synthetic oligonucleotide
auauguucucauuguuaaa

SEQ ID NO: 2870786 - RNA, 19 nt, Artificial Sequence
  Description of Artificial Sequence: Synthetic oligonucleotide
caauacaauccaguguuca

SEQ ID NO: 2870787 - RNA, 19 nt, Artificial Sequence
  Description of Artificial Sequence: Synthetic oligonucleotide
aaccaucaccuuauauuca

SEQ ID NO: 2870788 - RNA, 19 nt, Artificial Sequence
  Description of Artificial Sequence: Synthetic oligonucleotide
ggcaauacaauccaguguu

SEQ ID NO: 2870789 - RNA, 19 nt, Artificial Sequence
  Description of Artificial Sequence: Synthetic oligonucleotide
guaggauucuaacuauugu

SEQ ID NO: 2870790 - RNA, 19 nt, Artificial Sequence
  Description of Artificial Sequence: Synthetic oligonucleotide
auguaauaaaaugguggaa

SEQ ID NO: 2870791 - RNA, 19 nt, Artificial Sequence
  Description of Artificial Sequence: Synthetic oligonucleotide
guucauguaguaacacuca

SEQ ID NO: 2870792 - RNA, 19 nt, Artificial Sequence
  Description of Artificial Sequence: Synthetic oligonucleotide
cuauugucaugugaaguca

SEQ ID NO: 2870793 - RNA, 19 nt, Artificial Sequence
  Description of Artificial Sequence: Synthetic oligonucleotide
uacuuggaucccacagugu

SEQ ID NO: 2870794 - RNA, 19 nt, Artificial Sequence
  Description of Artificial Sequence: Synthetic oligonucleotide
caucaccuuauauucaugu

SEQ ID NO: 2870795 - RNA, 19 nt, Artificial Sequence
  Description of Artificial Sequence: Synthetic oligonucleotide
cuuacugacaaaaggcaau

SEQ ID NO: 2870796 - RNA, 19 nt, Artificial Sequence
  Description of Artificial Sequence: Synthetic oligonucleotide
augaguuggcagucaguga

SEQ ID NO: 2870797 - RNA, 19 nt, Artificial Sequence
  Description of Artificial Sequence: Synthetic oligonucleotide
aguaacacucagucgccua

SEQ ID NO: 2870798 - RNA, 19 nt, Artificial Sequence
  Description of Artificial Sequence: Synthetic oligonucleotide
uacugacaaaaggcaauac

SEQ ID NO: 2870799 - RNA, 19 nt, Artificial Sequence
  Description of Artificial Sequence: Synthetic oligonucleotide
ugaugccaacagcauugga

SEQ ID NO: 2870800 - RNA, 19 nt, Artificial Sequence
  Description of Artificial Sequence: Synthetic oligonucleotide
cagaagaaccuuauuacau

SEQ ID NO: 2870801 - RNA, 19 nt, Artificial Sequence
  Description of Artificial Sequence: Synthetic oligonucleotide
uuacaugaguuggcaguca

SEQ ID NO: 2870802 - RNA, 19 nt, Artificial Sequence
  Description of Artificial Sequence: Synthetic oligonucleotide
accuuauauucauguaaua

SEQ ID NO: 2870803 - RNA, 19 nt, Artificial Sequence
  Description of Artificial Sequence: Synthetic oligonucleotide
uuggaucccacaguguguu

SEQ ID NO: 2870804 - RNA, 19 nt, Artificial Sequence
  Description of Artificial Sequence: Synthetic oligonucleotide
uuggaguacuuggauccca

SEQ ID NO: 2870805 - RNA, 19 nt, Artificial Sequence
  Description of Artificial Sequence: Synthetic oligonucleotide
gaaccuuauuacaugaguu

SEQ ID NO: 2870806 - RNA, 19 nt, Artificial Sequence
  Description of Artificial Sequence: Synthetic oligonucleotide
aguuugguucuccuacaua

SEQ ID NO: 2870807 - RNA, 19 nt, Artificial Sequence
  Description of Artificial Sequence: Synthetic oligonucleotide
acacucagucgccuauuga

SEQ ID NO: 2870808 - RNA, 19 nt, Artificial Sequence
  Description of Artificial Sequence: Synthetic oligonucleotide
caguguucauguaguaaca

SEQ ID NO: 2870809 - RNA, 19 nt, Artificial Sequence
  Description of Artificial Sequence: Synthetic oligonucleotide
auugucaugugaagucaga

SEQ ID NO: 2870810 - RNA, 19 nt, Artificial Sequence
  Description of Artificial Sequence: Synthetic oligonucleotide
augguggaaaugaaugaaa

SEQ ID NO: 2870811 - RNA, 19 nt, Artificial Sequence
  Description of Artificial Sequence: Synthetic oligonucleotide
ucagucgccuauugaguuu

SEQ ID NO: 2870812 - RNA, 19 nt, Artificial Sequence
  Description of Artificial Sequence: Synthetic oligonucleotide
guguucauguaguaacacu

SEQ ID NO: 2870813 - RNA, 19 nt, Artificial Sequence
  Description of Artificial Sequence: Synthetic oligonucleotide
cgccuauugaguuugguuc

SEQ ID NO: 2870814 - RNA, 19 nt, Artificial Sequence
  Description of Artificial Sequence: Synthetic oligonucleotide
ggucaucacaguaggauuc

SEQ ID NO: 2870815 - RNA, 19 nt, Artificial Sequence
  Description of Artificial Sequence: Synthetic oligonucleotide
gcauuggaguacuuggauc

SEQ ID NO: 2870816 - RNA, 19 nt, Artificial Sequence
  Description of Artificial Sequence: Synthetic oligonucleotide
cagucgccuauugaguuug

SEQ ID NO: 2870817 - RNA, 19 nt, Artificial Sequence
  Description of Artificial Sequence: Synthetic oligonucleotide
uaguaacacucagucgccu

SEQ ID NO: 2870818 - RNA, 19 nt, Artificial Sequence
  Description of Artificial Sequence: Synthetic oligonucleotide
ccuuauauucauguaauaa

SEQ ID NO: 2870819 - RNA, 19 nt, Artificial Sequence
  Description of Artificial Sequence: Synthetic oligonucleotide
uuguguucuucaguauuua

SEQ ID NO: 2870820 - RNA, 19 nt, Artificial Sequence
  Description of Artificial Sequence: Synthetic oligonucleotide
acucagucgccuauugagu

SEQ ID NO: 2870821 - RNA, 19 nt, Artificial Sequence
  Description of Artificial Sequence: Synthetic oligonucleotide
caccuuauauucauguaau

SEQ ID NO: 2870822 - RNA, 19 nt, Artificial Sequence
  Description of Artificial Sequence: Synthetic oligonucleotide
aauuagcuuuugacuuagu

SEQ ID NO: 2870823 - RNA, 19 nt, Artificial Sequence
  Description of Artificial Sequence: Synthetic oligonucleotide
gaguuggcagucagugaug

SEQ ID NO: 2870824 - RNA, 19 nt, Artificial Sequence
  Description of Artificial Sequence: Synthetic oligonucleotide
guuggcagucagugaugcc

SEQ ID NO: 2870825 - RNA, 19 nt, Artificial Sequence
  Description of Artificial Sequence: Synthetic oligonucleotide
gaaaugcaaaccauauguu

SEQ ID NO: 2870826 - RNA, 19 nt, Artificial Sequence
  Description of Artificial Sequence: Synthetic oligonucleotide
gaagucagaagaaccuuau

SEQ ID NO: 2870827 - RNA, 19 nt, Artificial Sequence
  Description of Artificial Sequence: Synthetic oligonucleotide
cccacaguguguugagucc

SEQ ID NO: 2870828 - RNA, 19 nt, Artificial Sequence
  Description of Artificial Sequence: Synthetic oligonucleotide
agcuuuugacuuaguaaau

SEQ ID NO: 2870829 - RNA, 19 nt, Artificial Sequence
  Description of Artificial Sequence: Synthetic oligonucleotide
guucucauuguuaaaccau

SEQ ID NO: 2870830 - RNA, 19 nt, Artificial Sequence
  Description of Artificial Sequence: Synthetic oligonucleotide
acaguguguugaguccuug

SEQ ID NO: 2870831 - RNA, 19 nt, Artificial Sequence
  Description of Artificial Sequence: Synthetic oligonucleotide
uggaucccacaguguguug

SEQ ID NO: 2870832 - RNA, 19 nt, Artificial Sequence
  Description of Artificial Sequence: Synthetic oligonucleotide
guaacacucagucgccuau

SEQ ID NO: 2870833 - RNA, 19 nt, Artificial Sequence
  Description of Artificial Sequence: Synthetic oligonucleotide
guuaaaccaucaccuuaua

SEQ ID NO: 2870834 - RNA, 19 nt, Artificial Sequence
  Description of Artificial Sequence: Synthetic oligonucleotide
gguggaaaugaaugaaaau

SEQ ID NO: 2870835 - RNA, 19 nt, Artificial Sequence
  Description of Artificial Sequence: Synthetic oligonucleotide
auccaguguucauguagua

SEQ ID NO: 2870836 - RNA, 19 nt, Artificial Sequence
  Description of Artificial Sequence: Synthetic oligonucleotide
acaauccaguguucaugua

SEQ ID NO: 2870837 - RNA, 19 nt, Artificial Sequence
  Description of Artificial Sequence: Synthetic oligonucleotide
cuccuacauauuacauaca

SEQ ID NO: 2870838 - RNA, 19 nt, Artificial Sequence
  Description of Artificial Sequence: Synthetic oligonucleotide
auggaggaacuuacugaca

SEQ ID NO: 2870839 - RNA, 19 nt, Artificial Sequence
  Description of Artificial Sequence: Synthetic oligonucleotide
caaaccauauguucucauu

SEQ ID NO: 2870840 - RNA, 19 nt, Artificial Sequence
  Description of Artificial Sequence: Synthetic oligonucleotide
acaugaguuggcagucagu

SEQ ID NO: 2870841 - RNA, 19 nt, Artificial Sequence
  Description of Artificial Sequence: Synthetic oligonucleotide
gaguuugguucuccuacau

SEQ ID NO: 2870842 - RNA, 19 nt, Artificial Sequence
  Description of Artificial Sequence: Synthetic oligonucleotide
cuuggaucccacagugugu

SEQ ID NO: 2870843 - RNA, 19 nt, Artificial Sequence
  Description of Artificial Sequence: Synthetic oligonucleotide
gccaacagcauuggaguac

SEQ ID NO: 2870844 - RNA, 19 nt, Artificial Sequence
  Description of Artificial Sequence: Synthetic oligonucleotide
ggaucccacaguguguuga

SEQ ID NO: 2870845 - RNA, 19 nt, Artificial Sequence
  Description of Artificial Sequence: Synthetic oligonucleotide
ggauucuaacuauugucau

SEQ ID NO: 2870846 - RNA, 19 nt, Artificial Sequence
  Description of Artificial Sequence: Synthetic oligonucleotide
uaacacucagucgccuauu

SEQ ID NO: 2870847 - RNA, 19 nt, Artificial Sequence
  Description of Artificial Sequence: Synthetic oligonucleotide
guguucuucaguauuuauu

SEQ ID NO: 2870848 - RNA, 19 nt, Artificial Sequence
  Description of Artificial Sequence: Synthetic oligonucleotide
ccauauguucucauuguua

SEQ ID NO: 2870849 - RNA, 19 nt, Artificial Sequence
  Description of Artificial Sequence: Synthetic oligonucleotide
gcuuuugacuuaguaaaua

SEQ ID NO: 2870850 - RNA, 19 nt, Artificial Sequence
  Description of Artificial Sequence: Synthetic oligonucleotide
cucagucgccuauugaguu

SEQ ID NO: 2870851 - RNA, 19 nt, Artificial Sequence
  Description of Artificial Sequence: Synthetic oligonucleotide
ccuacauauuacauacaua

SEQ ID NO: 2870852 - RNA, 19 nt, Artificial Sequence
  Description of Artificial Sequence: Synthetic oligonucleotide
ccaucaccuuauauucaug

SEQ ID NO: 2870853 - RNA, 19 nt, Artificial Sequence
  Description of Artificial Sequence: Synthetic oligonucleotide
gccuauugaguuugguucu

SEQ ID NO: 2870854 - RNA, 19 nt, Artificial Sequence
  Description of Artificial Sequence: Synthetic oligonucleotide
ggaguacuuggaucccaca

SEQ ID NO: 2870855 - RNA, 19 nt, Artificial Sequence
  Description of Artificial Sequence: Synthetic oligonucleotide
agucgccuauugaguuugg

SEQ ID NO: 2870856 - RNA, 19 nt, Artificial Sequence
  Description of Artificial Sequence: Synthetic oligonucleotide
ggaggaacuuacugacaaa

SEQ ID NO: 2870857 - RNA, 19 nt, Artificial Sequence
  Description of Artificial Sequence: Synthetic oligonucleotide
guucuccuacauauuacau

SEQ ID NO: 2870858 - RNA, 19 nt, Artificial Sequence
  Description of Artificial Sequence: Synthetic oligonucleotide
gucaucacaguaggauucu

SEQ ID NO: 2870859 - RNA, 19 nt, Artificial Sequence
  Description of Artificial Sequence: Synthetic oligonucleotide
aucccacaguguguugagu

SEQ ID NO: 2870860 - RNA, 19 nt, Artificial Sequence
  Description of Artificial Sequence: Synthetic oligonucleotide
gugaagucagaagaaccuu

SEQ ID NO: 2870861 - RNA, 19 nt, Artificial Sequence
  Description of Artificial Sequence: Synthetic oligonucleotide
gcaauacaauccaguguuc

SEQ ID NO: 2870862 - RNA, 19 nt, Artificial Sequence
  Description of Artificial Sequence: Synthetic oligonucleotide
caguaggauucuaacuauu

SEQ ID NO: 2870863 - RNA, 19 nt, Artificial Sequence
  Description of Artificial Sequence: Synthetic oligonucleotide
ccuauugaguuugguucuc

SEQ ID NO: 2870864 - RNA, 19 nt, Artificial Sequence
  Description of Artificial Sequence: Synthetic oligonucleotide
cagugaugccaacagcauu

SEQ ID NO: 2870865 - RNA, 19 nt, Artificial Sequence
  Description of Artificial Sequence: Synthetic oligonucleotide
ggcagucagugaugccaac

SEQ ID NO: 2870866 - RNA, 19 nt, Artificial Sequence
  Description of Artificial Sequence: Synthetic oligonucleotide
gcaaaccauauguucucau

SEQ ID NO: 2870867 - RNA, 19 nt, Artificial Sequence
  Description of Artificial Sequence: Synthetic oligonucleotide
gucgccuauugaguuuggu

SEQ ID NO: 2870868 - RNA, 19 nt, Artificial Sequence
  Description of Artificial Sequence: Synthetic oligonucleotide
cacaguguguugaguccuu

SEQ ID NO: 2870869 - RNA, 19 nt, Artificial Sequence
  Description of Artificial Sequence: Synthetic oligonucleotide
caacagcauuggaguacuu

SEQ ID NO: 2870870 - RNA, 19 nt, Artificial Sequence
  Description of Artificial Sequence: Synthetic oligonucleotide
aaaucuaauacucacauag

SEQ ID NO: 2870871 - RNA, 19 nt, Artificial Sequence
  Description of Artificial Sequence: Synthetic oligonucleotide
uuuaauauguuuauccugg

SEQ ID NO: 2870872 - RNA, 19 nt, Artificial Sequence
  Description of Artificial Sequence: Synthetic oligonucleotide
uuugaaagcagcaagaaac

SEQ ID NO: 2870873 - RNA, 19 nt, Artificial Sequence
  Description of Artificial Sequence: Synthetic oligonucleotide
uguaaucuaauauacaaug

SEQ ID NO: 2870874 - RNA, 19 nt, Artificial Sequence
  Description of Artificial Sequence: Synthetic oligonucleotide
aaaccaaauaguuuaauga

SEQ ID NO: 2870875 - RNA, 19 nt, Artificial Sequence
  Description of Artificial Sequence: Synthetic oligonucleotide
uguuuauuaguaaugacca

SEQ ID NO: 2870876 - RNA, 19 nt, Artificial Sequence
  Description of Artificial Sequence: Synthetic oligonucleotide
uguaaaaggaaaauggaga

SEQ ID NO: 2870877 - RNA, 19 nt, Artificial Sequence
  Description of Artificial Sequence: Synthetic oligonucleotide
aaugagacuucauuaguac

SEQ ID NO: 2870878 - RNA, 19 nt, Artificial Sequence
  Description of Artificial Sequence: Synthetic oligonucleotide
uuguuuauuaguaaugacc

SEQ ID NO: 2870879 - RNA, 19 nt, Artificial Sequence
  Description of Artificial Sequence: Synthetic oligonucleotide
uaaucuaauauacaaugag

SEQ ID NO: 2870880 - RNA, 19 nt, Artificial Sequence
  Description of Artificial Sequence: Synthetic oligonucleotide
aaaacuucugcuuuuauau

SEQ ID NO: 2870881 - RNA, 19 nt, Artificial Sequence
  Description of Artificial Sequence: Synthetic oligonucleotide
uacauuacuagcuaaaugu

SEQ ID NO: 2870882 - RNA, 19 nt, Artificial Sequence
  Description of Artificial Sequence: Synthetic oligonucleotide
ucugcuuuuauauucauca

SEQ ID NO: 2870883 - RNA, 19 nt, Artificial Sequence
  Description of Artificial Sequence: Synthetic oligonucleotide
guugugaucauuuguaucg

SEQ ID NO: 2870884 - RNA, 19 nt, Artificial Sequence
  Description of Artificial Sequence: Synthetic oligonucleotide
agaaacucaaaacuucugc

SEQ ID NO: 2870885 - RNA, 19 nt, Artificial Sequence
  Description of Artificial Sequence: Synthetic oligonucleotide
ugagugauuacacacagug

SEQ ID NO: 2870886 - RNA, 19 nt, Artificial Sequence
  Description of Artificial Sequence: Synthetic oligonucleotide
uuuagaaaaguugugauca

SEQ ID NO: 2870887 - RNA, 19 nt, Artificial Sequence
  Description of Artificial Sequence: Synthetic oligonucleotide
auuuguaucgcucaacuag

SEQ ID NO: 2870888 - RNA, 19 nt, Artificial Sequence
  Description of Artificial Sequence: Synthetic oligonucleotide
aucaaaaucuaauacucac

SEQ ID NO: 2870889 - RNA, 19 nt, Artificial Sequence
  Description of Artificial Sequence: Synthetic oligonucleotide
uauucaucagucuuuaaag

SEQ ID NO: 2870890 - RNA, 19 nt, Artificial Sequence
  Description of Artificial Sequence: Synthetic oligonucleotide
acuaggacaguuuugaaag

SEQ ID NO: 2870891 - RNA, 19 nt, Artificial Sequence
  Description of Artificial Sequence: Synthetic oligonucleotide
ucacauaggacauucagag

SEQ ID NO: 2870892 - RNA, 19 nt, Artificial Sequence
  Description of Artificial Sequence: Synthetic oligonucleotide
aacuucugcuuuuauauuc

SEQ ID NO: 2870893 - RNA, 19 nt, Artificial Sequence
  Description of Artificial Sequence: Synthetic oligonucleotide
uaguacaugauuuucaaca

SEQ ID NO: 2870894 - RNA, 19 nt, Artificial Sequence
  Description of Artificial Sequence: Synthetic oligonucleotide
uuaguaaugaccagcuuag

SEQ ID NO: 2870895 - RNA, 19 nt, Artificial Sequence
  Description of Artificial Sequence: Synthetic oligonucleotide
uuguaaaaggaaaauggag

SEQ ID NO: 2870896 - RNA, 19 nt, Artificial Sequence
  Description of Artificial Sequence: Synthetic oligonucleotide
auucagaguuuccagauac

SEQ ID NO: 2870897 - RNA, 19 nt, Artificial Sequence
  Description of Artificial Sequence: Synthetic oligonucleotide
aucuaauauacaaugagac

SEQ ID NO: 2870898 - RNA, 19 nt, Artificial Sequence
  Description of Artificial Sequence: Synthetic oligonucleotide
uuuguaaaaggaaaaugga

SEQ ID NO: 2870899 - RNA, 19 nt, Artificial Sequence
  Description of Artificial Sequence: Synthetic oligonucleotide
auuguaaucuaauauacaa

SEQ ID NO: 2870900 - RNA, 19 nt, Artificial Sequence
  Description of Artificial Sequence: Synthetic oligonucleotide
uuuauuaguaaugaccagc

SEQ ID NO: 2870901 - RNA, 19 nt, Artificial Sequence
  Description of Artificial Sequence: Synthetic oligonucleotide
aaaaguugugaucauuugu

SEQ ID NO: 2870902 - RNA, 19 nt, Artificial Sequence
  Description of Artificial Sequence: Synthetic oligonucleotide
uuuguaucgcucaacuagg

SEQ ID NO: 2870903 - RNA, 19 nt, Artificial Sequence
  Description of Artificial Sequence: Synthetic oligonucleotide
aaggaaaauggagauuugc

SEQ ID NO: 2870904 - RNA, 19 nt, Artificial Sequence
  Description of Artificial Sequence: Synthetic oligonucleotide
gauggcaucugcuggaugg

SEQ ID NO: 2870905 - RNA, 19 nt, Artificial Sequence
  Description of Artificial Sequence: Synthetic oligonucleotide
ucuauuguaaucuaauaua

SEQ ID NO: 2870906 - RNA, 19 nt, Artificial Sequence
  Description of Artificial Sequence: Synthetic oligonucleotide
auuuagaaaaguugugauc

SEQ ID NO: 2870907 - RNA, 19 nt, Artificial Sequence
  Description of Artificial Sequence: Synthetic oligonucleotide
aaaaggaaaauggagauuu

SEQ ID NO: 2870908 - RNA, 19 nt, Artificial Sequence
  Description of Artificial Sequence: Synthetic oligonucleotide
uaaugaccagcuuagauga

SEQ ID NO: 2870909 - RNA, 19 nt, Artificial Sequence
  Description of Artificial Sequence: Synthetic oligonucleotide
cuaucaaaaucuaauacuc

SEQ ID NO: 2870910 - RNA, 19 nt, Artificial Sequence
  Description of Artificial Sequence: Synthetic oligonucleotide
cuauuguaaucuaauauac

SEQ ID NO: 2870911 - RNA, 19 nt, Artificial Sequence
  Description of Artificial Sequence: Synthetic oligonucleotide
uacaaugagacuucauuag

SEQ ID NO: 2870912 - RNA, 19 nt, Artificial Sequence
  Description of Artificial Sequence: Synthetic oligonucleotide
uuuuauauucaucagucuu

SEQ ID NO: 2870913 - RNA, 19 nt, Artificial Sequence
  Description of Artificial Sequence: Synthetic oligonucleotide
uguaggucuuugcagaucc

SEQ ID NO: 2870914 - RNA, 19 nt, Artificial Sequence
  Description of Artificial Sequence: Synthetic oligonucleotide
uuauuaguaaugaccagcu

SEQ ID NO: 2870915 - RNA, 19 nt, Artificial Sequence
  Description of Artificial Sequence: Synthetic oligonucleotide
uucuauuguaaucuaauau

SEQ ID NO: 2870916 - RNA, 19 nt, Artificial Sequence
  Description of Artificial Sequence: Synthetic oligonucleotide
aaccaaauaguuuaaugau

SEQ ID NO: 2870917 - RNA, 19 nt, Artificial Sequence
  Description of Artificial Sequence: Synthetic oligonucleotide
ucuaauacucacauaggac

SEQ ID NO: 2870918 - RNA, 19 nt, Artificial Sequence
  Description of Artificial Sequence: Synthetic oligonucleotide
aauaguuuaaugauuuaga

SEQ ID NO: 2870919 - RNA, 19 nt, Artificial Sequence
  Description of Artificial Sequence: Synthetic oligonucleotide
uauacaaugagacuucauu

SEQ ID NO: 2870920 - RNA, 19 nt, Artificial Sequence
  Description of Artificial Sequence: Synthetic oligonucleotide
agaguuuccagauacauua

SEQ ID NO: 2870921 - RNA, 19 nt, Artificial Sequence
  Description of Artificial Sequence: Synthetic oligonucleotide
guaaugaccagcuuagaug

SEQ ID NO: 2870922 - RNA, 19 nt, Artificial Sequence
  Description of Artificial Sequence: Synthetic oligonucleotide
uuuccagauacauuacuag

SEQ ID NO: 2870923 - RNA, 19 nt, Artificial Sequence
  Description of Artificial Sequence: Synthetic oligonucleotide
ugcuaucaaaaucuaauac

SEQ ID NO: 2870924 - RNA, 19 nt, Artificial Sequence
  Description of Artificial Sequence: Synthetic oligonucleotide
uaucgcucaacuaggacag

SEQ ID NO: 2870925 - RNA, 19 nt, Artificial Sequence
  Description of Artificial Sequence: Synthetic oligonucleotide
auuacuagcuaaauguuuc

SEQ ID NO: 2870926 - RNA, 19 nt, Artificial Sequence
  Description of Artificial Sequence: Synthetic oligonucleotide
uuaaugauuuagaaaaguu

SEQ ID NO: 2870927 - RNA, 19 nt, Artificial Sequence
  Description of Artificial Sequence: Synthetic oligonucleotide
aaaucagaggaugccagac

SEQ ID NO: 2870928 - RNA, 19 nt, Artificial Sequence
  Description of Artificial Sequence: Synthetic oligonucleotide
auuaguaaugaccagcuua

SEQ ID NO: 2870929 - RNA, 19 nt, Artificial Sequence
  Description of Artificial Sequence: Synthetic oligonucleotide
uccagauacauuacuagcu

SEQ ID NO: 2870930 - RNA, 19 nt, Artificial Sequence
  Description of Artificial Sequence: Synthetic oligonucleotide
aaucuaauauacaaugaga

SEQ ID NO: 2870931 - RNA, 19 nt, Artificial Sequence
  Description of Artificial Sequence: Synthetic oligonucleotide
uuuaaugauuuagaaaagu

SEQ ID NO: 2870932 - RNA, 19 nt, Artificial Sequence
  Description of Artificial Sequence: Synthetic oligonucleotide
ggagauuugcguuugauug

SEQ ID NO: 2870933 - RNA, 19 nt, Artificial Sequence
  Description of Artificial Sequence: Synthetic oligonucleotide
aaauguuucuuuccauucu

SEQ ID NO: 2870934 - RNA, 19 nt, Artificial Sequence
  Description of Artificial Sequence: Synthetic oligonucleotide
auauguuuauccuggaggu

SEQ ID NO: 2870935 - RNA, 19 nt, Artificial Sequence
  Description of Artificial Sequence: Synthetic oligonucleotide
uuuauauucaucagucuuu

SEQ ID NO: 2870936 - RNA, 19 nt, Artificial Sequence
  Description of Artificial Sequence: Synthetic oligonucleotide
uugauuguaggucuuugca

SEQ ID NO: 2870937 - RNA, 19 nt, Artificial Sequence
  Description of Artificial Sequence: Synthetic oligonucleotide
ugauuuagaaaaguuguga

SEQ ID NO: 2870938 - RNA, 19 nt, Artificial Sequence
  Description of Artificial Sequence: Synthetic oligonucleotide
uagacuuuuguaaaaggaa

SEQ ID NO: 2870939 - RNA, 19 nt, Artificial Sequence
  Description of Artificial Sequence: Synthetic oligonucleotide
uacaugauuuucaacauuu

SEQ ID NO: 2870940 - RNA, 19 nt, Artificial Sequence
  Description of Artificial Sequence: Synthetic oligonucleotide
uuuauccuggaggugaggg

SEQ ID NO: 2870941 - RNA, 19 nt, Artificial Sequence
  Description of Artificial Sequence: Synthetic oligonucleotide
uauuguaaucuaauauaca

SEQ ID NO: 2870942 - RNA, 19 nt, Artificial Sequence
  Description of Artificial Sequence: Synthetic oligonucleotide
acauaggacauucagaguu

SEQ ID NO: 2870943 - RNA, 19 nt, Artificial Sequence
  Description of Artificial Sequence: Synthetic oligonucleotide
ucauuuguaucgcucaacu

SEQ ID NO: 2870944 - RNA, 19 nt, Artificial Sequence
  Description of Artificial Sequence: Synthetic oligonucleotide
ugauuguaggucuuugcag

SEQ ID NO: 2870945 - RNA, 19 nt, Artificial Sequence
  Description of Artificial Sequence: Synthetic oligonucleotide
aucuaauacucacauagga

SEQ ID NO: 2870946 - RNA, 19 nt, Artificial Sequence
  Description of Artificial Sequence: Synthetic oligonucleotide
ugcuuuuauauucaucagu

SEQ ID NO: 2870947 - RNA, 19 nt, Artificial Sequence
  Description of Artificial Sequence: Synthetic oligonucleotide
acuccaccaaaccaaauag

SEQ ID NO: 2870948 - RNA, 19 nt, Artificial Sequence
  Description of Artificial Sequence: Synthetic oligonucleotide
auaguuuaaugauuuagaa

SEQ ID NO: 2870949 - RNA, 19 nt, Artificial Sequence
  Description of Artificial Sequence: Synthetic oligonucleotide
caaaccaaauaguuuaaug

SEQ ID NO: 2870950 - RNA, 19 nt, Artificial Sequence
  Description of Artificial Sequence: Synthetic oligonucleotide
uaucaaaaucuaauacuca

SEQ ID NO: 2870951 - RNA, 19 nt, Artificial Sequence
  Description of Artificial Sequence: Synthetic oligonucleotide
ucaacuaggacaguuuuga

SEQ ID NO: 2870952 - RNA, 19 nt, Artificial Sequence
  Description of Artificial Sequence: Synthetic oligonucleotide
auauucaucagucuuuaaa

SEQ ID NO: 2870953 - RNA, 19 nt, Artificial Sequence
  Description of Artificial Sequence: Synthetic oligonucleotide
aguugugaucauuuguauc

SEQ ID NO: 2870954 - RNA, 19 nt, Artificial Sequence
  Description of Artificial Sequence: Synthetic oligonucleotide
cagcuuagaugacagaugg

SEQ ID NO: 2870955 - RNA, 19 nt, Artificial Sequence
  Description of Artificial Sequence: Synthetic oligonucleotide
ugagacuucauuaguacau

SEQ ID NO: 2870956 - RNA, 19 nt, Artificial Sequence
  Description of Artificial Sequence: Synthetic oligonucleotide
ugauuacacacagugcugg

SEQ ID NO: 2870957 - RNA, 19 nt, Artificial Sequence
  Description of Artificial Sequence: Synthetic oligonucleotide
uuuaaagcaugcuaucaaa

SEQ ID NO: 2870958 - RNA, 19 nt, Artificial Sequence
  Description of Artificial Sequence: Synthetic oligonucleotide
uguuccaugccucacucca

SEQ ID NO: 2870959 - RNA, 19 nt, Artificial Sequence
  Description of Artificial Sequence: Synthetic oligonucleotide
auuugcguuugauuguagg

SEQ ID NO: 2870960 - RNA, 19 nt, Artificial Sequence
  Description of Artificial Sequence: Synthetic oligonucleotide
uaauauacaaugagacuuc

SEQ ID NO: 2870961 - RNA, 19 nt, Artificial Sequence
  Description of Artificial Sequence: Synthetic oligonucleotide
uccuuguuuauuaguaaug

SEQ ID NO: 2870962 - RNA, 19 nt, Artificial Sequence
  Description of Artificial Sequence: Synthetic oligonucleotide
aaucuaauacucacauagg

SEQ ID NO: 2870963 - RNA, 19 nt, Artificial Sequence
  Description of Artificial Sequence: Synthetic oligonucleotide
uuaaagcaugcuaucaaaa

SEQ ID NO: 2870964 - RNA, 19 nt, Artificial Sequence
  Description of Artificial Sequence: Synthetic oligonucleotide
uaaauguuucuuuccauuc

SEQ ID NO: 2870965 - RNA, 19 nt, Artificial Sequence
  Description of Artificial Sequence: Synthetic oligonucleotide
aaaauggagauuugcguuu

SEQ ID NO: 2870966 - RNA, 19 nt, Artificial Sequence
  Description of Artificial Sequence: Synthetic oligonucleotide
ugaucauuuguaucgcuca

SEQ ID NO: 2870967 - RNA, 19 nt, Artificial Sequence
  Description of Artificial Sequence: Synthetic oligonucleotide
auacauuacuagcuaaaug

SEQ ID NO: 2870968 - RNA, 19 nt, Artificial Sequence
  Description of Artificial Sequence: Synthetic oligonucleotide
gauuguaggucuuugcaga

SEQ ID NO: 2870969 - RNA, 19 nt, Artificial Sequence
  Description of Artificial Sequence: Synthetic oligonucleotide
ugaggguagacuuuuguaa

SEQ ID NO: 2870970 - RNA, 19 nt, Artificial Sequence
  Description of Artificial Sequence: Synthetic oligonucleotide
acucacauaggacauucag

SEQ ID NO: 2870971 - RNA, 19 nt, Artificial Sequence
  Description of Artificial Sequence: Synthetic oligonucleotide
uuugauuguaggucuuugc

SEQ ID NO: 2870972 - RNA, 19 nt, Artificial Sequence
  Description of Artificial Sequence: Synthetic oligonucleotide
uuccagauacauuacuagc

SEQ ID NO: 2870973 - RNA, 19 nt, Artificial Sequence
  Description of Artificial Sequence: Synthetic oligonucleotide
uuacacacagugcuggcug

SEQ ID NO: 2870974 - RNA, 19 nt, Artificial Sequence
  Description of Artificial Sequence: Synthetic oligonucleotide
aacucaaaacuucugcuuu

SEQ ID NO: 2870975 - RNA, 19 nt, Artificial Sequence
  Description of Artificial Sequence: Synthetic oligonucleotide
gaaaaguugugaucauuug

SEQ ID NO: 2870976 - RNA, 19 nt, Artificial Sequence
  Description of Artificial Sequence: Synthetic oligonucleotide
cuuuuguaaaaggaaaaug

SEQ ID NO: 2870977 - RNA, 19 nt, Artificial Sequence
  Description of Artificial Sequence: Synthetic oligonucleotide
cuagcuaaauguuucuuuc

SEQ ID NO: 2870978 - RNA, 19 nt, Artificial Sequence
  Description of Artificial Sequence: Synthetic oligonucleotide
uugaaagcagcaagaaacu

SEQ ID NO: 2870979 - RNA, 19 nt, Artificial Sequence
  Description of Artificial Sequence: Synthetic oligonucleotide
uuugcguuugauuguaggu

SEQ ID NO: 2870980 - RNA, 19 nt, Artificial Sequence
  Description of Artificial Sequence: Synthetic oligonucleotide
uuccauucuauuguaaucu

SEQ ID NO: 2870981 - RNA, 19 nt, Artificial Sequence
  Description of Artificial Sequence: Synthetic oligonucleotide
uuuugaaagcagcaagaaa

SEQ ID NO: 2870982 - RNA, 19 nt, Artificial Sequence
  Description of Artificial Sequence: Synthetic oligonucleotide
uuguaaucuaauauacaau

SEQ ID NO: 2870983 - RNA, 19 nt, Artificial Sequence
  Description of Artificial Sequence: Synthetic oligonucleotide
auuaguacaugauuuucaa

SEQ ID NO: 2870984 - RNA, 19 nt, Artificial Sequence
  Description of Artificial Sequence: Synthetic oligonucleotide
aggaaaauggagauuugcg

SEQ ID NO: 2870985 - RNA, 19 nt, Artificial Sequence
  Description of Artificial Sequence: Synthetic oligonucleotide
aauguuucuuuccauucua

SEQ ID NO: 2870986 - RNA, 19 nt, Artificial Sequence
  Description of Artificial Sequence: Synthetic oligonucleotide
uaaagcaugcuaucaaaau

SEQ ID NO: 2870987 - RNA, 19 nt, Artificial Sequence
  Description of Artificial Sequence: Synthetic oligonucleotide
aucagaggaugccagacug

SEQ ID NO: 2870988 - RNA, 19 nt, Artificial Sequence
  Description of Artificial Sequence: Synthetic oligonucleotide
agcagcaagaaacucaaaa

SEQ ID NO: 2870989 - RNA, 19 nt, Artificial Sequence
  Description of Artificial Sequence: Synthetic oligonucleotide
uuagaugacagauggcauc

SEQ ID NO: 2870990 - RNA, 19 nt, Artificial Sequence
  Description of Artificial Sequence: Synthetic oligonucleotide
aaaguugugaucauuugua

SEQ ID NO: 2870991 - RNA, 19 nt, Artificial Sequence
  Description of Artificial Sequence: Synthetic oligonucleotide
ucuuuaaagcaugcuauca

SEQ ID NO: 2870992 - RNA, 19 nt, Artificial Sequence
  Description of Artificial Sequence: Synthetic oligonucleotide
auacaaugagacuucauua

SEQ ID NO: 2870993 - RNA, 19 nt, Artificial Sequence
  Description of Artificial Sequence: Synthetic oligonucleotide
ugaccagcuuagaugacag

SEQ ID NO: 2870994 - RNA, 19 nt, Artificial Sequence
  Description of Artificial Sequence: Synthetic oligonucleotide
uccaccaaaccaaauaguu

SEQ ID NO: 2870995 - RNA, 19 nt, Artificial Sequence
  Description of Artificial Sequence: Synthetic oligonucleotide
augccagacuguuccaugc

SEQ ID NO: 2870996 - RNA, 19 nt, Artificial Sequence
  Description of Artificial Sequence: Synthetic oligonucleotide
aguaaugaccagcuuagau

SEQ ID NO: 2870997 - RNA, 19 nt, Artificial Sequence
  Description of Artificial Sequence: Synthetic oligonucleotide
cuuguuuauuaguaaugac

SEQ ID NO: 2870998 - RNA, 19 nt, Artificial Sequence
  Description of Artificial Sequence: Synthetic oligonucleotide
uuccugagugauuacacac

SEQ ID NO: 2870999 - RNA, 19 nt, Artificial Sequence
  Description of Artificial Sequence: Synthetic oligonucleotide
uuuccauucuauuguaauc

SEQ ID NO: 2871000 - RNA, 19 nt, Artificial Sequence
  Description of Artificial Sequence: Synthetic oligonucleotide
caguuuugaaagcagcaag

SEQ ID NO: 2871001 - RNA, 19 nt, Artificial Sequence
  Description of Artificial Sequence: Synthetic oligonucleotide
guaucgcucaacuaggaca

SEQ ID NO: 2871002 - RNA, 19 nt, Artificial Sequence
  Description of Artificial Sequence: Synthetic oligonucleotide
agcuaaauguuucuuucca

SEQ ID NO: 2871003 - RNA, 19 nt, Artificial Sequence
  Description of Artificial Sequence: Synthetic oligonucleotide
acuucauuaguacaugauu

SEQ ID NO: 2871004 - RNA, 19 nt, Artificial Sequence
  Description of Artificial Sequence: Synthetic oligonucleotide
aaucagaggaugccagacu

SEQ ID NO: 2871005 - RNA, 19 nt, Artificial Sequence
  Description of Artificial Sequence: Synthetic oligonucleotide
ugcguuugauuguaggucu

SEQ ID NO: 2871006 - RNA, 19 nt, Artificial Sequence
  Description of Artificial Sequence: Synthetic oligonucleotide
aauauacaaugagacuuca

SEQ ID NO: 2871007 - RNA, 19 nt, Artificial Sequence
  Description of Artificial Sequence: Synthetic oligonucleotide
acaaugagacuucauuagu

SEQ ID NO: 2871008 - RNA, 19 nt, Artificial Sequence
  Description of Artificial Sequence: Synthetic oligonucleotide
auacucacauaggacauuc

SEQ ID NO: 2871009 - RNA, 19 nt, Artificial Sequence
  Description of Artificial Sequence: Synthetic oligonucleotide
gguagacuuuuguaaaagg

SEQ ID NO: 2871010 - RNA, 19 nt, Artificial Sequence
  Description of Artificial Sequence: Synthetic oligonucleotide
ugacagauggcaucugcug

SEQ ID NO: 2871011 - RNA, 19 nt, Artificial Sequence
  Description of Artificial Sequence: Synthetic oligonucleotide
guuuauuaguaaugaccag

SEQ ID NO: 2871012 - RNA, 19 nt, Artificial Sequence
  Description of Artificial Sequence: Synthetic oligonucleotide
aguacaugauuuucaacau

SEQ ID NO: 2871013 - RNA, 19 nt, Artificial Sequence
  Description of Artificial Sequence: Synthetic oligonucleotide
acuguuccaugccucacuc

SEQ ID NO: 2871014 - RNA, 19 nt, Artificial Sequence
  Description of Artificial Sequence: Synthetic oligonucleotide
aaaaucuaauacucacaua

SEQ ID NO: 2871015 - RNA, 19 nt, Artificial Sequence
  Description of Artificial Sequence: Synthetic oligonucleotide
uagcuaaauguuucuuucc

SEQ ID NO: 2871016 - RNA, 19 nt, Artificial Sequence
  Description of Artificial Sequence: Synthetic oligonucleotide
aaguugugaucauuuguau

SEQ ID NO: 2871017 - RNA, 19 nt, Artificial Sequence
  Description of Artificial Sequence: Synthetic oligonucleotide
cauuaguacaugauuuuca

SEQ ID NO: 2871018 - RNA, 19 nt, Artificial Sequence
  Description of Artificial Sequence: Synthetic oligonucleotide
gucuuugcagauccgcugg

SEQ ID NO: 2871019 - RNA, 19 nt, Artificial Sequence
  Description of Artificial Sequence: Synthetic oligonucleotide
uuaauauguuuauccugga

SEQ ID NO: 2871020 - RNA, 19 nt, Artificial Sequence
  Description of Artificial Sequence: Synthetic oligonucleotide
uguuuauccuggaggugag

SEQ ID NO: 2871021 - RNA, 19 nt, Artificial Sequence
  Description of Artificial Sequence: Synthetic oligonucleotide
uuaguacaugauuuucaac

SEQ ID NO: 2871022 - RNA, 19 nt, Artificial Sequence
  Description of Artificial Sequence: Synthetic oligonucleotide
uuugcagauccgcugguuc

SEQ ID NO: 2871023 - RNA, 19 nt, Artificial Sequence
  Description of Artificial Sequence: Synthetic oligonucleotide
uccugagugauuacacaca

SEQ ID NO: 2871024 - RNA, 19 nt, Artificial Sequence
  Description of Artificial Sequence: Synthetic oligonucleotide
gaaacucaaaacuucugcu

SEQ ID NO: 2871025 - RNA, 19 nt, Artificial Sequence
  Description of Artificial Sequence: Synthetic oligonucleotide
agugcuggcugucaggaga

SEQ ID NO: 2871026 - RNA, 19 nt, Artificial Sequence
  Description of Artificial Sequence: Synthetic oligonucleotide
gauuuagaaaaguugugau

SEQ ID NO: 2871027 - RNA, 19 nt, Artificial Sequence
  Description of Artificial Sequence: Synthetic oligonucleotide
aguuuccagauacauuacu

SEQ ID NO: 2871028 - RNA, 19 nt, Artificial Sequence
  Description of Artificial Sequence: Synthetic oligonucleotide
uguaucgcucaacuaggac

SEQ ID NO: 2871029 - RNA, 19 nt, Artificial Sequence
  Description of Artificial Sequence: Synthetic oligonucleotide
aagaaacucaaaacuucug

SEQ ID NO: 2871030 - RNA, 19 nt, Artificial Sequence
  Description of Artificial Sequence: Synthetic oligonucleotide
acuagcuaaauguuucuuu

SEQ ID NO: 2871031 - RNA, 19 nt, Artificial Sequence
  Description of Artificial Sequence: Synthetic oligonucleotide
auguuuauccuggagguga

SEQ ID NO: 2871032 - RNA, 19 nt, Artificial Sequence
  Description of Artificial Sequence: Synthetic oligonucleotide
uuacuagcuaaauguuucu

SEQ ID NO: 2871033 - RNA, 19 nt, Artificial Sequence
  Description of Artificial Sequence: Synthetic oligonucleotide
guagacuuuuguaaaagga

SEQ ID NO: 2871034 - RNA, 19 nt, Artificial Sequence
  Description of Artificial Sequence: Synthetic oligonucleotide
aaauggagauuugcguuug

SEQ ID NO: 2871035 - RNA, 19 nt, Artificial Sequence
  Description of Artificial Sequence: Synthetic oligonucleotide
ucauuaguacaugauuuuc

SEQ ID NO: 2871036 - RNA, 19 nt, Artificial Sequence
  Description of Artificial Sequence: Synthetic oligonucleotide
augagacuucauuaguaca

SEQ ID NO: 2871037 - RNA, 19 nt, Artificial Sequence
  Description of Artificial Sequence: Synthetic oligonucleotide
uaggacaguuuugaaagca

SEQ ID NO: 2871038 - RNA, 19 nt, Artificial Sequence
  Description of Artificial Sequence: Synthetic oligonucleotide
auucuauuguaaucuaaua

SEQ ID NO: 2871039 - RNA, 19 nt, Artificial Sequence
  Description of Artificial Sequence: Synthetic oligonucleotide
gagacagucuccuuguuua

SEQ ID NO: 2871040 - RNA, 19 nt, Artificial Sequence
  Description of Artificial Sequence: Synthetic oligonucleotide
aucauuuguaucgcucaac

SEQ ID NO: 2871041 - RNA, 19 nt, Artificial Sequence
  Description of Artificial Sequence: Synthetic oligonucleotide
agucuuuaaagcaugcuau

SEQ ID NO: 2871042 - RNA, 19 nt, Artificial Sequence
  Description of Artificial Sequence: Synthetic oligonucleotide
cuaauauacaaugagacuu

SEQ ID NO: 2871043 - RNA, 19 nt, Artificial Sequence
  Description of Artificial Sequence: Synthetic oligonucleotide
caccaaaccaaauaguuua

SEQ ID NO: 2871044 - RNA, 19 nt, Artificial Sequence
  Description of Artificial Sequence: Synthetic oligonucleotide
aguuuugaaagcagcaaga

SEQ ID NO: 2871045 - RNA, 19 nt, Artificial Sequence
  Description of Artificial Sequence: Synthetic oligonucleotide
uagaugacagauggcaucu

SEQ ID NO: 2871046 - RNA, 19 nt, Artificial Sequence
  Description of Artificial Sequence: Synthetic oligonucleotide
caucagucuuuaaagcaug

SEQ ID NO: 2871047 - RNA, 19 nt, Artificial Sequence
  Description of Artificial Sequence: Synthetic oligonucleotide
gaaaauggagauuugcguu

SEQ ID NO: 2871048 - RNA, 19 nt, Artificial Sequence
  Description of Artificial Sequence: Synthetic oligonucleotide
guaaaaggaaaauggagau

SEQ ID NO: 2871049 - RNA, 19 nt, Artificial Sequence
  Description of Artificial Sequence: Synthetic oligonucleotide
gauuacacacagugcuggc

SEQ ID NO: 2871050 - RNA, 19 nt, Artificial Sequence
  Description of Artificial Sequence: Synthetic oligonucleotide
aucagucuuuaaagcaugc

SEQ ID NO: 2871051 - RNA, 19 nt, Artificial Sequence
  Description of Artificial Sequence: Synthetic oligonucleotide
aaacuucugcuuuuauauu

SEQ ID NO: 2871052 - RNA, 19 nt, Artificial Sequence
  Description of Artificial Sequence: Synthetic oligonucleotide
acuuuuguaaaaggaaaau

SEQ ID NO: 2871053 - RNA, 19 nt, Artificial Sequence
  Description of Artificial Sequence: Synthetic oligonucleotide
uugcagauccgcugguucc

SEQ ID NO: 2871054 - RNA, 19 nt, Artificial Sequence
  Description of Artificial Sequence: Synthetic oligonucleotide
guaaucuaauauacaauga

SEQ ID NO: 2871055 - RNA, 19 nt, Artificial Sequence
  Description of Artificial Sequence: Synthetic oligonucleotide
gaugccagacuguuccaug

SEQ ID NO: 2871056 - RNA, 19 nt, Artificial Sequence
  Description of Artificial Sequence: Synthetic oligonucleotide
gcagcaagaaacucaaaac

SEQ ID NO: 2871057 - RNA, 19 nt, Artificial Sequence
  Description of Artificial Sequence: Synthetic oligonucleotide
caugcuaucaaaaucuaau

SEQ ID NO: 2871058 - RNA, 19 nt, Artificial Sequence
  Description of Artificial Sequence: Synthetic oligonucleotide
agacuucauuaguacauga

SEQ ID NO: 2871059 - RNA, 19 nt, Artificial Sequence
  Description of Artificial Sequence: Synthetic oligonucleotide
ucuccuuguuuauuaguaa

SEQ ID NO: 2871060 - RNA, 19 nt, Artificial Sequence
  Description of Artificial Sequence: Synthetic oligonucleotide
gcuuuuauauucaucaguc

SEQ ID NO: 2871061 - RNA, 19 nt, Artificial Sequence
  Description of Artificial Sequence: Synthetic oligonucleotide
augauuuagaaaaguugug

SEQ ID NO: 2871062 - RNA, 19 nt, Artificial Sequence
  Description of Artificial Sequence: Synthetic oligonucleotide
aggacauucagaguuucca

SEQ ID NO: 2871063 - RNA, 19 nt, Artificial Sequence
  Description of Artificial Sequence: Synthetic oligonucleotide
uucugcuuuuauauucauc

SEQ ID NO: 2871064 - RNA, 19 nt, Artificial Sequence
  Description of Artificial Sequence: Synthetic oligonucleotide
agacuuuuguaaaaggaaa

SEQ ID NO: 2871065 - RNA, 19 nt, Artificial Sequence
  Description of Artificial Sequence: Synthetic oligonucleotide
augcuaucaaaaucuaaua

SEQ ID NO: 2871066 - RNA, 19 nt, Artificial Sequence
  Description of Artificial Sequence: Synthetic oligonucleotide
ugugaucauuuguaucgcu

SEQ ID NO: 2871067 - RNA, 19 nt, Artificial Sequence
  Description of Artificial Sequence: Synthetic oligonucleotide
cuaggacaguuuugaaagc

SEQ ID NO: 2871068 - RNA, 19 nt, Artificial Sequence
  Description of Artificial Sequence: Synthetic oligonucleotide
acagauggcaucugcugga

SEQ ID NO: 2871069 - RNA, 19 nt, Artificial Sequence
  Description of Artificial Sequence: Synthetic oligonucleotide
uugcguuugauuguagguc

SEQ ID NO: 2871070 - RNA, 19 nt, Artificial Sequence
  Description of Artificial Sequence: Synthetic oligonucleotide
cuuuaaagcaugcuaucaa

SEQ ID NO: 2871071 - RNA, 19 nt, Artificial Sequence
  Description of Artificial Sequence: Synthetic oligonucleotide
gaggguagacuuuuguaaa

SEQ ID NO: 2871072 - RNA, 19 nt, Artificial Sequence
  Description of Artificial Sequence: Synthetic oligonucleotide
uaggacauucagaguuucc

SEQ ID NO: 2871073 - RNA, 19 nt, Artificial Sequence
  Description of Artificial Sequence: Synthetic oligonucleotide
cucaacuaggacaguuuug

SEQ ID NO: 2871074 - RNA, 19 nt, Artificial Sequence
  Description of Artificial Sequence: Synthetic oligonucleotide
uuguaucgcucaacuagga

SEQ ID NO: 2871075 - RNA, 19 nt, Artificial Sequence
  Description of Artificial Sequence: Synthetic oligonucleotide
gcuaucaaaaucuaauacu

SEQ ID NO: 2871076 - RNA, 19 nt, Artificial Sequence
  Description of Artificial Sequence: Synthetic oligonucleotide
cucacauaggacauucaga

SEQ ID NO: 2871077 - RNA, 19 nt, Artificial Sequence
  Description of Artificial Sequence: Synthetic oligonucleotide
auaggacauucagaguuuc

SEQ ID NO: 2871078 - RNA, 19 nt, Artificial Sequence
  Description of Artificial Sequence: Synthetic oligonucleotide
aaaggaaaauggagauuug

SEQ ID NO: 2871079 - RNA, 19 nt, Artificial Sequence
  Description of Artificial Sequence: Synthetic oligonucleotide
acagucuccuuguuuauua

SEQ ID NO: 2871080 - RNA, 19 nt, Artificial Sequence
  Description of Artificial Sequence: Synthetic oligonucleotide
caaaaucuaauacucacau

SEQ ID NO: 2871081 - RNA, 19 nt, Artificial Sequence
  Description of Artificial Sequence: Synthetic oligonucleotide
gacuuuuguaaaaggaaaa

SEQ ID NO: 2871082 - RNA, 19 nt, Artificial Sequence
  Description of Artificial Sequence: Synthetic oligonucleotide
uuagaaaaguugugaucau

SEQ ID NO: 2871083 - RNA, 19 nt, Artificial Sequence
  Description of Artificial Sequence: Synthetic oligonucleotide
gagacuucauuaguacaug

SEQ ID NO: 2871084 - RNA, 19 nt, Artificial Sequence
  Description of Artificial Sequence: Synthetic oligonucleotide
accagcuuagaugacagau

SEQ ID NO: 2871085 - RNA, 19 nt, Artificial Sequence
  Description of Artificial Sequence: Synthetic oligonucleotide
uaggucuuugcagauccgc

SEQ ID NO: 2871086 - RNA, 19 nt, Artificial Sequence
  Description of Artificial Sequence: Synthetic oligonucleotide
uggaggugaggguagacuu

SEQ ID NO: 2871087 - RNA, 19 nt, Artificial Sequence
  Description of Artificial Sequence: Synthetic oligonucleotide
ucaaaacuucugcuuuuau

SEQ ID NO: 2871088 - RNA, 19 nt, Artificial Sequence
  Description of Artificial Sequence: Synthetic oligonucleotide
uauguuuauccuggaggug

SEQ ID NO: 2871089 - RNA, 19 nt, Artificial Sequence
  Description of Artificial Sequence: Synthetic oligonucleotide
uggagauuugcguuugauu

SEQ ID NO: 2871090 - RNA, 19 nt, Artificial Sequence
  Description of Artificial Sequence: Synthetic oligonucleotide
agcaagaaacucaaaacuu

SEQ ID NO: 2871091 - RNA, 19 nt, Artificial Sequence
  Description of Artificial Sequence: Synthetic oligonucleotide
aauggagauuugcguuuga

SEQ ID NO: 2871092 - RNA, 19 nt, Artificial Sequence
  Description of Artificial Sequence: Synthetic oligonucleotide
agucuccuuguuuauuagu

SEQ ID NO: 2871093 - RNA, 19 nt, Artificial Sequence
  Description of Artificial Sequence: Synthetic oligonucleotide
uugugaucauuuguaucgc

SEQ ID NO: 2871094 - RNA, 19 nt, Artificial Sequence
  Description of Artificial Sequence: Synthetic oligonucleotide
ucagucuuuaaagcaugcu

SEQ ID NO: 2871095 - RNA, 19 nt, Artificial Sequence
  Description of Artificial Sequence: Synthetic oligonucleotide
gucuuuaaagcaugcuauc

SEQ ID NO: 2871096 - RNA, 19 nt, Artificial Sequence
  Description of Artificial Sequence: Synthetic oligonucleotide
uuauccuggaggugagggu

SEQ ID NO: 2871097 - RNA, 19 nt, Artificial Sequence
  Description of Artificial Sequence: Synthetic oligonucleotide
auccgcugguuccugagug

SEQ ID NO: 2871098 - RNA, 19 nt, Artificial Sequence
  Description of Artificial Sequence: Synthetic oligonucleotide
gcuuagaugacagauggca

SEQ ID NO: 2871099 - RNA, 19 nt, Artificial Sequence
  Description of Artificial Sequence: Synthetic oligonucleotide
ugccucacuccaccaaacc

SEQ ID NO: 2871100 - RNA, 19 nt, Artificial Sequence
  Description of Artificial Sequence: Synthetic oligonucleotide
ugaaagcagcaagaaacuc

SEQ ID NO: 2871101 - RNA, 19 nt, Artificial Sequence
  Description of Artificial Sequence: Synthetic oligonucleotide
uaaaaggaaaauggagauu

SEQ ID NO: 2871102 - RNA, 19 nt, Artificial Sequence
  Description of Artificial Sequence: Synthetic oligonucleotide
auuguaggucuuugcagau

SEQ ID NO: 2871103 - RNA, 19 nt, Artificial Sequence
  Description of Artificial Sequence: Synthetic oligonucleotide
uauuaguaaugaccagcuu

SEQ ID NO: 2871104 - RNA, 19 nt, Artificial Sequence
  Description of Artificial Sequence: Synthetic oligonucleotide
guuugauuguaggucuuug

SEQ ID NO: 2871105 - RNA, 19 nt, Artificial Sequence
  Description of Artificial Sequence: Synthetic oligonucleotide
caaaacuucugcuuuuaua

SEQ ID NO: 2871106 - RNA, 19 nt, Artificial Sequence
  Description of Artificial Sequence: Synthetic oligonucleotide
acaguuuugaaagcagcaa

SEQ ID NO: 2871107 - RNA, 19 nt, Artificial Sequence
  Description of Artificial Sequence: Synthetic oligonucleotide
uucuuuccauucuauugua

SEQ ID NO: 2871108 - RNA, 19 nt, Artificial Sequence
  Description of Artificial Sequence: Synthetic oligonucleotide
ugucaggagacagucuccu

SEQ ID NO: 2871109 - RNA, 19 nt, Artificial Sequence
  Description of Artificial Sequence: Synthetic oligonucleotide
uauccuggaggugagggua

SEQ ID NO: 2871110 - RNA, 19 nt, Artificial Sequence
  Description of Artificial Sequence: Synthetic oligonucleotide
caagaaacucaaaacuucu

SEQ ID NO: 2871111 - RNA, 19 nt, Artificial Sequence
  Description of Artificial Sequence: Synthetic oligonucleotide
caaugagacuucauuagua

SEQ ID NO: 2871112 - RNA, 19 nt, Artificial Sequence
  Description of Artificial Sequence: Synthetic oligonucleotide
agauacauuacuagcuaaa

SEQ ID NO: 2871113 - RNA, 19 nt, Artificial Sequence
  Description of Artificial Sequence: Synthetic oligonucleotide
auuacacacagugcuggcu

SEQ ID NO: 2871114 - RNA, 19 nt, Artificial Sequence
  Description of Artificial Sequence: Synthetic oligonucleotide
cagcaagaaacucaaaacu

SEQ ID NO: 2871115 - RNA, 19 nt, Artificial Sequence
  Description of Artificial Sequence: Synthetic oligonucleotide
aggacaguuuugaaagcag

SEQ ID NO: 2871116 - RNA, 19 nt, Artificial Sequence
  Description of Artificial Sequence: Synthetic oligonucleotide
uccauucuauuguaaucua

SEQ ID NO: 2871117 - RNA, 19 nt, Artificial Sequence
  Description of Artificial Sequence: Synthetic oligonucleotide
agauccgcugguuccugag

SEQ ID NO: 2871118 - RNA, 19 nt, Artificial Sequence
  Description of Artificial Sequence: Synthetic oligonucleotide
acuucugcuuuuauauuca

SEQ ID NO: 2871119 - RNA, 19 nt, Artificial Sequence
  Description of Artificial Sequence: Synthetic oligonucleotide
uauauucaucagucuuuaa

SEQ ID NO: 2871120 - RNA, 19 nt, Artificial Sequence
  Description of Artificial Sequence: Synthetic oligonucleotide
ggaaaauggagauuugcgu

SEQ ID NO: 2871121 - RNA, 19 nt, Artificial Sequence
  Description of Artificial Sequence: Synthetic oligonucleotide
aauacucacauaggacauu

SEQ ID NO: 2871122 - RNA, 19 nt, Artificial Sequence
  Description of Artificial Sequence: Synthetic oligonucleotide
cauucuauuguaaucuaau

SEQ ID NO: 2871123 - RNA, 19 nt, Artificial Sequence
  Description of Artificial Sequence: Synthetic oligonucleotide
gaucauuuguaucgcucaa

SEQ ID NO: 2871124 - RNA, 19 nt, Artificial Sequence
  Description of Artificial Sequence: Synthetic oligonucleotide
agcuuagaugacagauggc

SEQ ID NO: 2871125 - RNA, 19 nt, Artificial Sequence
  Description of Artificial Sequence: Synthetic oligonucleotide
cagucuuuaaagcaugcua

SEQ ID NO: 2871126 - RNA, 19 nt, Artificial Sequence
  Description of Artificial Sequence: Synthetic oligonucleotide
ugguuccugagugauuaca

SEQ ID NO: 2871127 - RNA, 19 nt, Artificial Sequence
  Description of Artificial Sequence: Synthetic oligonucleotide
augaccagcuuagaugaca

SEQ ID NO: 2871128 - RNA, 19 nt, Artificial Sequence
  Description of Artificial Sequence: Synthetic oligonucleotide
cugucaggagacagucucc

SEQ ID NO: 2871129 - RNA, 19 nt, Artificial Sequence
  Description of Artificial Sequence: Synthetic oligonucleotide
cacagugcuggcugucagg

SEQ ID NO: 2871130 - RNA, 19 nt, Artificial Sequence
  Description of Artificial Sequence: Synthetic oligonucleotide
uacucacauaggacauuca

SEQ ID NO: 2871131 - RNA, 19 nt, Artificial Sequence
  Description of Artificial Sequence: Synthetic oligonucleotide
guuuugaaagcagcaagaa

SEQ ID NO: 2871132 - RNA, 19 nt, Artificial Sequence
  Description of Artificial Sequence: Synthetic oligonucleotide
accaaauaguuuaaugauu

SEQ ID NO: 2871133 - RNA, 19 nt, Artificial Sequence
  Description of Artificial Sequence: Synthetic oligonucleotide
aggguagacuuuuguaaaa

SEQ ID NO: 2871134 - RNA, 19 nt, Artificial Sequence
  Description of Artificial Sequence: Synthetic oligonucleotide
guuccugagugauuacaca

SEQ ID NO: 2871135 - RNA, 19 nt, Artificial Sequence
  Description of Artificial Sequence: Synthetic oligonucleotide
ucuuugcagauccgcuggu

SEQ ID NO: 2871136 - RNA, 19 nt, Artificial Sequence
  Description of Artificial Sequence: Synthetic oligonucleotide
ccugagugauuacacacag

SEQ ID NO: 2871137 - RNA, 19 nt, Artificial Sequence
  Description of Artificial Sequence: Synthetic oligonucleotide
gugauuacacacagugcug

SEQ ID NO: 2871138 - RNA, 19 nt, Artificial Sequence
  Description of Artificial Sequence: Synthetic oligonucleotide
gcugucaggagacagucuc

SEQ ID NO: 2871139 - RNA, 19 nt, Artificial Sequence
  Description of Artificial Sequence: Synthetic oligonucleotide
acucaaaacuucugcuuuu

SEQ ID NO: 2871140 - RNA, 19 nt, Artificial Sequence
  Description of Artificial Sequence: Synthetic oligonucleotide
gagauuugcguuugauugu

SEQ ID NO: 2871141 - RNA, 19 nt, Artificial Sequence
  Description of Artificial Sequence: Synthetic oligonucleotide
gugaucauuuguaucgcuc

SEQ ID NO: 2871142 - RNA, 19 nt, Artificial Sequence
  Description of Artificial Sequence: Synthetic oligonucleotide
cagucuccuuguuuauuag

SEQ ID NO: 2871143 - RNA, 19 nt, Artificial Sequence
  Description of Artificial Sequence: Synthetic oligonucleotide
gcaagaaacucaaaacuuc

SEQ ID NO: 2871144 - RNA, 19 nt, Artificial Sequence
  Description of Artificial Sequence: Synthetic oligonucleotide
gauacauuacuagcuaaau

SEQ ID NO: 2871145 - RNA, 19 nt, Artificial Sequence
  Description of Artificial Sequence: Synthetic oligonucleotide
guuuccagauacauuacua

SEQ ID NO: 2871146 - RNA, 19 nt, Artificial Sequence
  Description of Artificial Sequence: Synthetic oligonucleotide
acagugcuggcugucagga

SEQ ID NO: 2871147 - RNA, 19 nt, Artificial Sequence
  Description of Artificial Sequence: Synthetic oligonucleotide
gauuugcguuugauuguag

SEQ ID NO: 2871148 - RNA, 19 nt, Artificial Sequence
  Description of Artificial Sequence: Synthetic oligonucleotide
uacacacagugcuggcugu

SEQ ID NO: 2871149 - RNA, 19 nt, Artificial Sequence
  Description of Artificial Sequence: Synthetic oligonucleotide
cuaaauguuucuuuccauu

SEQ ID NO: 2871150 - RNA, 19 nt, Artificial Sequence
  Description of Artificial Sequence: Synthetic oligonucleotide
ggguagacuuuuguaaaag

SEQ ID NO: 2871151 - RNA, 19 nt, Artificial Sequence
  Description of Artificial Sequence: Synthetic oligonucleotide
cuuuuauauucaucagucu

SEQ ID NO: 2871152 - RNA, 19 nt, Artificial Sequence
  Description of Artificial Sequence: Synthetic oligonucleotide
cuuuccauucuauuguaau

SEQ ID NO: 2871153 - RNA, 19 nt, Artificial Sequence
  Description of Artificial Sequence: Synthetic oligonucleotide
acauuacuagcuaaauguu

SEQ ID NO: 2871154 - RNA, 19 nt, Artificial Sequence
  Description of Artificial Sequence: Synthetic oligonucleotide
caaaucagaggaugccaga

SEQ ID NO: 2871155 - RNA, 19 nt, Artificial Sequence
  Description of Artificial Sequence: Synthetic oligonucleotide
agacuguuccaugccucac

SEQ ID NO: 2871156 - RNA, 19 nt, Artificial Sequence
  Description of Artificial Sequence: Synthetic oligonucleotide
augacagauggcaucugcu

SEQ ID NO: 2871157 - RNA, 19 nt, Artificial Sequence
  Description of Artificial Sequence: Synthetic oligonucleotide
cagauacauuacuagcuaa

SEQ ID NO: 2871158 - RNA, 19 nt, Artificial Sequence
  Description of Artificial Sequence: Synthetic oligonucleotide
ggacaguuuugaaagcagc

SEQ ID NO: 2871159 - RNA, 19 nt, Artificial Sequence
  Description of Artificial Sequence: Synthetic oligonucleotide
agauuugcguuugauugua

SEQ ID NO: 2871160 - RNA, 19 nt, Artificial Sequence
  Description of Artificial Sequence: Synthetic oligonucleotide
uacuagcuaaauguuucuu

SEQ ID NO: 2871161 - RNA, 19 nt, Artificial Sequence
  Description of Artificial Sequence: Synthetic oligonucleotide
uggcugucaggagacaguc

SEQ ID NO: 2871162 - RNA, 19 nt, Artificial Sequence
  Description of Artificial Sequence: Synthetic oligonucleotide
gaguuuccagauacauuac

SEQ ID NO: 2871163 - RNA, 19 nt, Artificial Sequence
  Description of Artificial Sequence: Synthetic oligonucleotide
gugaggguagacuuuugua

SEQ ID NO: 2871164 - RNA, 19 nt, Artificial Sequence
  Description of Artificial Sequence: Synthetic oligonucleotide
guuuauccuggaggugagg

SEQ ID NO: 2871165 - RNA, 19 nt, Artificial Sequence
  Description of Artificial Sequence: Synthetic oligonucleotide
uccaugccucacuccacca

SEQ ID NO: 2871166 - RNA, 19 nt, Artificial Sequence
  Description of Artificial Sequence: Synthetic oligonucleotide
gucuccuuguuuauuagua

SEQ ID NO: 2871167 - RNA, 19 nt, Artificial Sequence
  Description of Artificial Sequence: Synthetic oligonucleotide
uccgcugguuccugaguga

SEQ ID NO: 2871168 - RNA, 19 nt, Artificial Sequence
  Description of Artificial Sequence: Synthetic oligonucleotide
cuguuccaugccucacucc

SEQ ID NO: 2871169 - RNA, 19 nt, Artificial Sequence
  Description of Artificial Sequence: Synthetic oligonucleotide
cacuccaccaaaccaaaua

SEQ ID NO: 2871170 - RNA, 19 nt, Artificial Sequence
  Description of Artificial Sequence: Synthetic oligonucleotide
agauggcaucugcuggaug

SEQ ID NO: 2871171 - RNA, 19 nt, Artificial Sequence
  Description of Artificial Sequence: Synthetic oligonucleotide
ccagcuuagaugacagaug

SEQ ID NO: 2871172 - RNA, 19 nt, Artificial Sequence
  Description of Artificial Sequence: Synthetic oligonucleotide
agaggaugccagacuguuc

SEQ ID NO: 2871173 - RNA, 19 nt, Artificial Sequence
  Description of Artificial Sequence: Synthetic oligonucleotide
cauuacuagcuaaauguuu

SEQ ID NO: 2871174 - RNA, 19 nt, Artificial Sequence
  Description of Artificial Sequence: Synthetic oligonucleotide
uaguaaugaccagcuuaga

SEQ ID NO: 2871175 - RNA, 19 nt, Artificial Sequence
  Description of Artificial Sequence: Synthetic oligonucleotide
ugcagauccgcugguuccu

SEQ ID NO: 2871176 - RNA, 19 nt, Artificial Sequence
  Description of Artificial Sequence: Synthetic oligonucleotide
cuuagaugacagauggcau

SEQ ID NO: 2871177 - RNA, 19 nt, Artificial Sequence
  Description of Artificial Sequence: Synthetic oligonucleotide
ccuuguuuauuaguaauga

SEQ ID NO: 2871178 - RNA, 19 nt, Artificial Sequence
  Description of Artificial Sequence: Synthetic oligonucleotide
uuguaggucuuugcagauc

SEQ ID NO: 2871179 - RNA, 19 nt, Artificial Sequence
  Description of Artificial Sequence: Synthetic oligonucleotide
ucacuccaccaaaccaaau

SEQ ID NO: 2871180 - RNA, 19 nt, Artificial Sequence
  Description of Artificial Sequence: Synthetic oligonucleotide
guaggucuuugcagauccg

SEQ ID NO: 2871181 - RNA, 19 nt, Artificial Sequence
  Description of Artificial Sequence: Synthetic oligonucleotide
cauuuguaucgcucaacua

SEQ ID NO: 2871182 - RNA, 19 nt, Artificial Sequence
  Description of Artificial Sequence: Synthetic oligonucleotide
auauacaaugagacuucau

SEQ ID NO: 2871183 - RNA, 19 nt, Artificial Sequence
  Description of Artificial Sequence: Synthetic oligonucleotide
cagacuguuccaugccuca

SEQ ID NO: 2871184 - RNA, 19 nt, Artificial Sequence
  Description of Artificial Sequence: Synthetic oligonucleotide
aggucuuugcagauccgcu

SEQ ID NO: 2871185 - RNA, 19 nt, Artificial Sequence
  Description of Artificial Sequence: Synthetic oligonucleotide
ccaaauaguuuaaugauuu

SEQ ID NO: 2871186 - RNA, 19 nt, Artificial Sequence
  Description of Artificial Sequence: Synthetic oligonucleotide
auggagauuugcguuugau

SEQ ID NO: 2871187 - RNA, 19 nt, Artificial Sequence
  Description of Artificial Sequence: Synthetic oligonucleotide
acacacagugcuggcuguc

SEQ ID NO: 2871188 - RNA, 19 nt, Artificial Sequence
  Description of Artificial Sequence: Synthetic oligonucleotide
caugccucacuccaccaaa

SEQ ID NO: 2871189 - RNA, 19 nt, Artificial Sequence
  Description of Artificial Sequence: Synthetic oligonucleotide
cuccuuguuuauuaguaau

SEQ ID NO: 2871190 - RNA, 19 nt, Artificial Sequence
  Description of Artificial Sequence: Synthetic oligonucleotide
cucacuccaccaaaccaaa

SEQ ID NO: 2871191 - RNA, 19 nt, Artificial Sequence
  Description of Artificial Sequence: Synthetic oligonucleotide
ucgcucaacuaggacaguu

SEQ ID NO: 2871192 - RNA, 19 nt, Artificial Sequence
  Description of Artificial Sequence: Synthetic oligonucleotide
gacuucauuaguacaugau

SEQ ID NO: 2871193 - RNA, 19 nt, Artificial Sequence
  Description of Artificial Sequence: Synthetic oligonucleotide
accaaaccaaauaguuuaa

SEQ ID NO: 2871194 - RNA, 19 nt, Artificial Sequence
  Description of Artificial Sequence: Synthetic oligonucleotide
acaugauuuucaacauuuu

SEQ ID NO: 2871195 - RNA, 19 nt, Artificial Sequence
  Description of Artificial Sequence: Synthetic oligonucleotide
gaccagcuuagaugacaga

SEQ ID NO: 2871196 - RNA, 19 nt, Artificial Sequence
  Description of Artificial Sequence: Synthetic oligonucleotide
cugguuccugagugauuac

SEQ ID NO: 2871197 - RNA, 19 nt, Artificial Sequence
  Description of Artificial Sequence: Synthetic oligonucleotide
gccucacuccaccaaacca

SEQ ID NO: 2871198 - RNA, 19 nt, Artificial Sequence
  Description of Artificial Sequence: Synthetic oligonucleotide
agaugacagauggcaucug

SEQ ID NO: 2871199 - RNA, 19 nt, Artificial Sequence
  Description of Artificial Sequence: Synthetic oligonucleotide
cauucagaguuuccagaua

SEQ ID NO: 2871200 - RNA, 19 nt, Artificial Sequence
  Description of Artificial Sequence: Synthetic oligonucleotide
gcuggcugucaggagacag

SEQ ID NO: 2871201 - RNA, 19 nt, Artificial Sequence
  Description of Artificial Sequence: Synthetic oligonucleotide
guacaugauuuucaacauu

SEQ ID NO: 2871202 - RNA, 19 nt, Artificial Sequence
  Description of Artificial Sequence: Synthetic oligonucleotide
auccuggaggugaggguag

SEQ ID NO: 2871203 - RNA, 19 nt, Artificial Sequence
  Description of Artificial Sequence: Synthetic oligonucleotide
gcugguuccugagugauua

SEQ ID NO: 2871204 - RNA, 19 nt, Artificial Sequence
  Description of Artificial Sequence: Synthetic oligonucleotide
ccucacuccaccaaaccaa

SEQ ID NO: 2871205 - RNA, 19 nt, Artificial Sequence
  Description of Artificial Sequence: Synthetic oligonucleotide
cagugcuggcugucaggag

SEQ ID NO: 2871206 - RNA, 19 nt, Artificial Sequence
  Description of Artificial Sequence: Synthetic oligonucleotide
caacuaggacaguuuugaa

SEQ ID NO: 2871207 - RNA, 19 nt, Artificial Sequence
  Description of Artificial Sequence: Synthetic oligonucleotide
ccagacuguuccaugccuc

SEQ ID NO: 2871208 - RNA, 19 nt, Artificial Sequence
  Description of Artificial Sequence: Synthetic oligonucleotide
cuccaccaaaccaaauagu

SEQ ID NO: 2871209 - RNA, 19 nt, Artificial Sequence
  Description of Artificial Sequence: Synthetic oligonucleotide
cucaaaacuucugcuuuua

SEQ ID NO: 2871210 - RNA, 19 nt, Artificial Sequence
  Description of Artificial Sequence: Synthetic oligonucleotide
agcaugcuaucaaaaucua

SEQ ID NO: 2871211 - RNA, 19 nt, Artificial Sequence
  Description of Artificial Sequence: Synthetic oligonucleotide
caggagacagucuccuugu

SEQ ID NO: 2871212 - RNA, 19 nt, Artificial Sequence
  Description of Artificial Sequence: Synthetic oligonucleotide
guuccaugccucacuccac

SEQ ID NO: 2871213 - RNA, 19 nt, Artificial Sequence
  Description of Artificial Sequence: Synthetic oligonucleotide
ggugaggguagacuuuugu

SEQ ID NO: 2871214 - RNA, 19 nt, Artificial Sequence
  Description of Artificial Sequence: Synthetic oligonucleotide
cauaggacauucagaguuu

SEQ ID NO: 2871215 - RNA, 19 nt, Artificial Sequence
  Description of Artificial Sequence: Synthetic oligonucleotide
ccagauacauuacuagcua

SEQ ID NO: 2871216 - RNA, 19 nt, Artificial Sequence
  Description of Artificial Sequence: Synthetic oligonucleotide
ccauucuauuguaaucuaa

SEQ ID NO: 2871217 - RNA, 19 nt, Artificial Sequence
  Description of Artificial Sequence: Synthetic oligonucleotide
cacauaggacauucagagu

SEQ ID NO: 2871218 - RNA, 19 nt, Artificial Sequence
  Description of Artificial Sequence: Synthetic oligonucleotide
gcuaaauguuucuuuccau

SEQ ID NO: 2871219 - RNA, 19 nt, Artificial Sequence
  Description of Artificial Sequence: Synthetic oligonucleotide
cagaguuuccagauacauu

SEQ ID NO: 2871220 - RNA, 19 nt, Artificial Sequence
  Description of Artificial Sequence: Synthetic oligonucleotide
gaggugaggguagacuuuu

SEQ ID NO: 2871221 - RNA, 19 nt, Artificial Sequence
  Description of Artificial Sequence: Synthetic oligonucleotide
cacacagugcuggcuguca

SEQ ID NO: 2871222 - RNA, 19 nt, Artificial Sequence
  Description of Artificial Sequence: Synthetic oligonucleotide
cuggcugucaggagacagu

SEQ ID NO: 2871223 - RNA, 19 nt, Artificial Sequence
  Description of Artificial Sequence: Synthetic oligonucleotide
cugagugauuacacacagu

SEQ ID NO: 2871224 - RNA, 19 nt, Artificial Sequence
  Description of Artificial Sequence: Synthetic oligonucleotide
gcaugcuaucaaaaucuaa

SEQ ID NO: 2871225 - RNA, 19 nt, Artificial Sequence
  Description of Artificial Sequence: Synthetic oligonucleotide
aggugaggguagacuuuug

SEQ ID NO: 2871226 - RNA, 19 nt, Artificial Sequence
  Description of Artificial Sequence: Synthetic oligonucleotide
cagauccgcugguuccuga

SEQ ID NO: 2871227 - RNA, 19 nt, Artificial Sequence
  Description of Artificial Sequence: Synthetic oligonucleotide
ugcuggcugucaggagaca

SEQ ID NO: 2871228 - RNA, 19 nt, Artificial Sequence
  Description of Artificial Sequence: Synthetic oligonucleotide
cuggaggugaggguagacu

SEQ ID NO: 2871229 - RNA, 19 nt, Artificial Sequence
  Description of Artificial Sequence: Synthetic oligonucleotide
gcucaacuaggacaguuuu

SEQ ID NO: 2871230 - RNA, 19 nt, Artificial Sequence
  Description of Artificial Sequence: Synthetic oligonucleotide
ggagacagucuccuuguuu

SEQ ID NO: 2871231 - RNA, 19 nt, Artificial Sequence
  Description of Artificial Sequence: Synthetic oligonucleotide
aucgcucaacuaggacagu

SEQ ID NO: 2871232 - RNA, 19 nt, Artificial Sequence
  Description of Artificial Sequence: Synthetic oligonucleotide
gccagacuguuccaugccu

SEQ ID NO: 2871233 - RNA, 19 nt, Artificial Sequence
  Description of Artificial Sequence: Synthetic oligonucleotide
cagaggaugccagacuguu

SEQ ID NO: 2871234 - RNA, 19 nt, Artificial Sequence
  Description of Artificial Sequence: Synthetic oligonucleotide
ccaccaaaccaaauaguuu

SEQ ID NO: 2871235 - RNA, 19 nt, Artificial Sequence
  Description of Artificial Sequence: Synthetic oligonucleotide
gcagauccgcugguuccug

SEQ ID NO: 2871236 - RNA, 19 nt, Artificial Sequence
  Description of Artificial Sequence: Synthetic oligonucleotide
ccuggaggugaggguagac

SEQ ID NO: 2871237 - RNA, 19 nt, Artificial Sequence
  Description of Artificial Sequence: Synthetic oligonucleotide
gucaggagacagucuccuu

SEQ ID NO: 2871238 - RNA, 19 nt, Artificial Sequence
  Description of Artificial Sequence: Synthetic oligonucleotide
ggaugccagacuguuccau

SEQ ID NO: 2871239 - RNA, 19 nt, Artificial Sequence
  Description of Artificial Sequence: Synthetic oligonucleotide
ccaaaccaaauaguuuaau

SEQ ID NO: 2871240 - RNA, 19 nt, Artificial Sequence
  Description of Artificial Sequence: Synthetic oligonucleotide
cagauggcaucugcuggau

SEQ ID NO: 2871241 - RNA, 19 nt, Artificial Sequence
  Description of Artificial Sequence: Synthetic oligonucleotide
ggaggugaggguagacuuu

SEQ ID NO: 2871242 - RNA, 19 nt, Artificial Sequence
  Description of Artificial Sequence: Synthetic oligonucleotide
ggcugucaggagacagucu

SEQ ID NO: 2871243 - RNA, 19 nt, Artificial Sequence
  Description of Artificial Sequence: Synthetic oligonucleotide
gcguuugauuguaggucuu

SEQ ID NO: 2871244 - RNA, 19 nt, Artificial Sequence
  Description of Artificial Sequence: Synthetic oligonucleotide
cguuugauuguaggucuuu

SEQ ID NO: 2871245 - RNA, 19 nt, Artificial Sequence
  Description of Artificial Sequence: Synthetic oligonucleotide
ccgcugguuccugagugau

SEQ ID NO: 2871246 - RNA, 19 nt, Artificial Sequence
  Description of Artificial Sequence: Synthetic oligonucleotide
cgcugguuccugagugauu

SEQ ID NO: 2871247 - RNA, 19 nt, Artificial Sequence
  Description of Artificial Sequence: Synthetic oligonucleotide
uugauauucucuuagaacu

SEQ ID NO: 2871248 - RNA, 19 nt, Artificial Sequence
  Description of Artificial Sequence: Synthetic oligonucleotide
auagcaacaaagcuaacac

SEQ ID NO: 2871249 - RNA, 19 nt, Artificial Sequence
  Description of Artificial Sequence: Synthetic oligonucleotide
aacaccaguacuucaauuc

SEQ ID NO: 2871250 - RNA, 19 nt, Artificial Sequence
  Description of Artificial Sequence: Synthetic oligonucleotide
uguuacaauagccagggcc

SEQ ID NO: 2871251 - RNA, 19 nt, Artificial Sequence
  Description of Artificial Sequence: Synthetic oligonucleotide
agaacugcauaccauaugg

SEQ ID NO: 2871252 - RNA, 19 nt, Artificial Sequence
  Description of Artificial Sequence: Synthetic oligonucleotide
gaaaagucaacagugaugc

SEQ ID NO: 2871253 - RNA, 19 nt, Artificial Sequence
  Description of Artificial Sequence: Synthetic oligonucleotide
auaaagacaaguaaguggg

SEQ ID NO: 2871254 - RNA, 19 nt, Artificial Sequence
  Description of Artificial Sequence: Synthetic oligonucleotide
aaagacaaguaagugggcc

SEQ ID NO: 2871255 - RNA, 19 nt, Artificial Sequence
  Description of Artificial Sequence: Synthetic oligonucleotide
agaaacuuaacaccaguac

SEQ ID NO: 2871256 - RNA, 19 nt, Artificial Sequence
  Description of Artificial Sequence: Synthetic oligonucleotide
aagcaauacacguaguaag

SEQ ID NO: 2871257 - RNA, 19 nt, Artificial Sequence
  Description of Artificial Sequence: Synthetic oligonucleotide
aaagcuaacacagcaagag

SEQ ID NO: 2871258 - RNA, 19 nt, Artificial Sequence
  Description of Artificial Sequence: Synthetic oligonucleotide
cuuucuacccacaacaggc

SEQ ID NO: 2871259 - RNA, 19 nt, Artificial Sequence
  Description of Artificial Sequence: Synthetic oligonucleotide
ugagaaauggccaacccgc

SEQ ID NO: 2871260 - RNA, 19 nt, Artificial Sequence
  Description of Artificial Sequence: Synthetic oligonucleotide
aauaacuugauauucucuu

SEQ ID NO: 2871261 - RNA, 19 nt, Artificial Sequence
  Description of Artificial Sequence: Synthetic oligonucleotide
ugcaccuauuacuagaggg

SEQ ID NO: 2871262 - RNA, 19 nt, Artificial Sequence
  Description of Artificial Sequence: Synthetic oligonucleotide
aacacaaucaguccagcug

SEQ ID NO: 2871263 - RNA, 19 nt, Artificial Sequence
  Description of Artificial Sequence: Synthetic oligonucleotide
guagaagaaacuuaacacc

SEQ ID NO: 2871264 - RNA, 19 nt, Artificial Sequence
  Description of Artificial Sequence: Synthetic oligonucleotide
ucaacagugaugcaaccag

SEQ ID NO: 2871265 - RNA, 19 nt, Artificial Sequence
  Description of Artificial Sequence: Synthetic oligonucleotide
uaacuugauauucucuuag

SEQ ID NO: 2871266 - RNA, 19 nt, Artificial Sequence
  Description of Artificial Sequence: Synthetic oligonucleotide
uauuacuagagggagaucu

SEQ ID NO: 2871267 - RNA, 19 nt, Artificial Sequence
  Description of Artificial Sequence: Synthetic oligonucleotide
aacacagcaagagauagug

SEQ ID NO: 2871268 - RNA, 19 nt, Artificial Sequence
  Description of Artificial Sequence: Synthetic oligonucleotide
aguacuucaauucccaaga

SEQ ID NO: 2871269 - RNA, 19 nt, Artificial Sequence
  Description of Artificial Sequence: Synthetic oligonucleotide
acaaagcuaacacagcaag

SEQ ID NO: 2871270 - RNA, 19 nt, Artificial Sequence
  Description of Artificial Sequence: Synthetic oligonucleotide
ucaauucccaagauaaaga

SEQ ID NO: 2871271 - RNA, 19 nt, Artificial Sequence
  Description of Artificial Sequence: Synthetic oligonucleotide
uucaauucccaagauaaag

SEQ ID NO: 2871272 - RNA, 19 nt, Artificial Sequence
  Description of Artificial Sequence: Synthetic oligonucleotide
acaccaguacuucaauucc

SEQ ID NO: 2871273 - RNA, 19 nt, Artificial Sequence
  Description of Artificial Sequence: Synthetic oligonucleotide
aacaccgauagcaacaaag

SEQ ID NO: 2871274 - RNA, 19 nt, Artificial Sequence
  Description of Artificial Sequence: Synthetic oligonucleotide
acuaaacaccgauagcaac

SEQ ID NO: 2871275 - RNA, 19 nt, Artificial Sequence
  Description of Artificial Sequence: Synthetic oligonucleotide
aacugcauaccauaugggu

SEQ ID NO: 2871276 - RNA, 19 nt, Artificial Sequence
  Description of Artificial Sequence: Synthetic oligonucleotide
acuguuacaauagccaggg

SEQ ID NO: 2871277 - RNA, 19 nt, Artificial Sequence
  Description of Artificial Sequence: Synthetic oligonucleotide
aagauaaagacaaguaagu

SEQ ID NO: 2871278 - RNA, 19 nt, Artificial Sequence
  Description of Artificial Sequence: Synthetic oligonucleotide
uucucuuagaacugcauac

SEQ ID NO: 2871279 - RNA, 19 nt, Artificial Sequence
  Description of Artificial Sequence: Synthetic oligonucleotide
gguagaagaaacuuaacac

SEQ ID NO: 2871280 - RNA, 19 nt, Artificial Sequence
  Description of Artificial Sequence: Synthetic oligonucleotide
aaauggccaacccgcaaac

SEQ ID NO: 2871281 - RNA, 19 nt, Artificial Sequence
  Description of Artificial Sequence: Synthetic oligonucleotide
acguaguaaguccagggac

SEQ ID NO: 2871282 - RNA, 19 nt, Artificial Sequence
  Description of Artificial Sequence: Synthetic oligonucleotide
gaacuguuacaauagccag

SEQ ID NO: 2871283 - RNA, 19 nt, Artificial Sequence
  Description of Artificial Sequence: Synthetic oligonucleotide
agagaagagagcccaacuc

SEQ ID NO: 2871284 - RNA, 19 nt, Artificial Sequence
  Description of Artificial Sequence: Synthetic oligonucleotide
uggcuuucuacccacaaca

SEQ ID NO: 2871285 - RNA, 19 nt, Artificial Sequence
  Description of Artificial Sequence: Synthetic oligonucleotide
agugagaaauggccaaccc

SEQ ID NO: 2871286 - RNA, 19 nt, Artificial Sequence
  Description of Artificial Sequence: Synthetic oligonucleotide
ugugagaacuguuacaaua

SEQ ID NO: 2871287 - RNA, 19 nt, Artificial Sequence
  Description of Artificial Sequence: Synthetic oligonucleotide
auaccauauggguacuggc

SEQ ID NO: 2871288 - RNA, 19 nt, Artificial Sequence
  Description of Artificial Sequence: Synthetic oligonucleotide
caauacacguaguaagucc

SEQ ID NO: 2871289 - RNA, 19 nt, Artificial Sequence
  Description of Artificial Sequence: Synthetic oligonucleotide
aaagagaagagagcccaac

SEQ ID NO: 2871290 - RNA, 19 nt, Artificial Sequence
  Description of Artificial Sequence: Synthetic oligonucleotide
aagucaacagugaugcaac

SEQ ID NO: 2871291 - RNA, 19 nt, Artificial Sequence
  Description of Artificial Sequence: Synthetic oligonucleotide
uuugcuuggguccacggcu

SEQ ID NO: 2871292 - RNA, 19 nt, Artificial Sequence
  Description of Artificial Sequence: Synthetic oligonucleotide
uuugugagaacuguuacaa

SEQ ID NO: 2871293 - RNA, 19 nt, Artificial Sequence
  Description of Artificial Sequence: Synthetic oligonucleotide
aaagucaacagugaugcaa

SEQ ID NO: 2871294 - RNA, 19 nt, Artificial Sequence
  Description of Artificial Sequence: Synthetic oligonucleotide
agaagaaccagcaagccug

SEQ ID NO: 2871295 - RNA, 19 nt, Artificial Sequence
  Description of Artificial Sequence: Synthetic oligonucleotide
aagacaaguaagugggcca

SEQ ID NO: 2871296 - RNA, 19 nt, Artificial Sequence
  Description of Artificial Sequence: Synthetic oligonucleotide
gagagcccaacucagguag

SEQ ID NO: 2871297 - RNA, 19 nt, Artificial Sequence
  Description of Artificial Sequence: Synthetic oligonucleotide
ugauauucucuuagaacug

SEQ ID NO: 2871298 - RNA, 19 nt, Artificial Sequence
  Description of Artificial Sequence: Synthetic oligonucleotide
aacuuaacaccaguacuuc

SEQ ID NO: 2871299 - RNA, 19 nt, Artificial Sequence
  Description of Artificial Sequence: Synthetic oligonucleotide
caauucccaagauaaagac

SEQ ID NO: 2871300 - RNA, 19 nt, Artificial Sequence
  Description of Artificial Sequence: Synthetic oligonucleotide
uuuugugagaacuguuaca

SEQ ID NO: 2871301 - RNA, 19 nt, Artificial Sequence
  Description of Artificial Sequence: Synthetic oligonucleotide
auggccaacccgcaaacac

SEQ ID NO: 2871302 - RNA, 19 nt, Artificial Sequence
  Description of Artificial Sequence: Synthetic oligonucleotide
aaguaagugggccacgaaa

SEQ ID NO: 2871303 - RNA, 19 nt, Artificial Sequence
  Description of Artificial Sequence: Synthetic oligonucleotide
aagagagcccaacucaggu

SEQ ID NO: 2871304 - RNA, 19 nt, Artificial Sequence
  Description of Artificial Sequence: Synthetic oligonucleotide
acacguaguaaguccaggg

SEQ ID NO: 2871305 - RNA, 19 nt, Artificial Sequence
  Description of Artificial Sequence: Synthetic oligonucleotide
ugggccacgaaauggcucg

SEQ ID NO: 2871306 - RNA, 19 nt, Artificial Sequence
  Description of Artificial Sequence: Synthetic oligonucleotide
aacuguuacaauagccagg

SEQ ID NO: 2871307 - RNA, 19 nt, Artificial Sequence
  Description of Artificial Sequence: Synthetic oligonucleotide
agaaccagcaagccugcac

SEQ ID NO: 2871308 - RNA, 19 nt, Artificial Sequence
  Description of Artificial Sequence: Synthetic oligonucleotide
auucccaagauaaagacaa

SEQ ID NO: 2871309 - RNA, 19 nt, Artificial Sequence
  Description of Artificial Sequence: Synthetic oligonucleotide
cacaacaggcaucaguggg

SEQ ID NO: 2871310 - RNA, 19 nt, Artificial Sequence
  Description of Artificial Sequence: Synthetic oligonucleotide
aagugggccacgaaauggc

SEQ ID NO: 2871311 - RNA, 19 nt, Artificial Sequence
  Description of Artificial Sequence: Synthetic oligonucleotide
ugagaacuguuacaauagc

SEQ ID NO: 2871312 - RNA, 19 nt, Artificial Sequence
  Description of Artificial Sequence: Synthetic oligonucleotide
accacuaaacaccgauagc

SEQ ID NO: 2871313 - RNA, 19 nt, Artificial Sequence
  Description of Artificial Sequence: Synthetic oligonucleotide
accauauggguacuggcag

SEQ ID NO: 2871314 - RNA, 19 nt, Artificial Sequence
  Description of Artificial Sequence: Synthetic oligonucleotide
acacaaucaguccagcugu

SEQ ID NO: 2871315 - RNA, 19 nt, Artificial Sequence
  Description of Artificial Sequence: Synthetic oligonucleotide
uauggguacuggcagcaag

SEQ ID NO: 2871316 - RNA, 19 nt, Artificial Sequence
  Description of Artificial Sequence: Synthetic oligonucleotide
aacuugauauucucuuaga

SEQ ID NO: 2871317 - RNA, 19 nt, Artificial Sequence
  Description of Artificial Sequence: Synthetic oligonucleotide
uggaucagcaggaaacaca

SEQ ID NO: 2871318 - RNA, 19 nt, Artificial Sequence
  Description of Artificial Sequence: Synthetic oligonucleotide
gagaacuguuacaauagcc

SEQ ID NO: 2871319 - RNA, 19 nt, Artificial Sequence
  Description of Artificial Sequence: Synthetic oligonucleotide
uaccauauggguacuggca

SEQ ID NO: 2871320 - RNA, 19 nt, Artificial Sequence
  Description of Artificial Sequence: Synthetic oligonucleotide
acaccgauagcaacaaagc

SEQ ID NO: 2871321 - RNA, 19 nt, Artificial Sequence
  Description of Artificial Sequence: Synthetic oligonucleotide
ucuugaauaacuugauauu

SEQ ID NO: 2871322 - RNA, 19 nt, Artificial Sequence
  Description of Artificial Sequence: Synthetic oligonucleotide
agaacuguuacaauagcca

SEQ ID NO: 2871323 - RNA, 19 nt, Artificial Sequence
  Description of Artificial Sequence: Synthetic oligonucleotide
uuacuagagggagaucugg

SEQ ID NO: 2871324 - RNA, 19 nt, Artificial Sequence
  Description of Artificial Sequence: Synthetic oligonucleotide
ugggaacacugccagaagc

SEQ ID NO: 2871325 - RNA, 19 nt, Artificial Sequence
  Description of Artificial Sequence: Synthetic oligonucleotide
gaaacuuaacaccaguacu

SEQ ID NO: 2871326 - RNA, 19 nt, Artificial Sequence
  Description of Artificial Sequence: Synthetic oligonucleotide
aaacacaaucaguccagcu

SEQ ID NO: 2871327 - RNA, 19 nt, Artificial Sequence
  Description of Artificial Sequence: Synthetic oligonucleotide
aaacuuaacaccaguacuu

SEQ ID NO: 2871328 - RNA, 19 nt, Artificial Sequence
  Description of Artificial Sequence: Synthetic oligonucleotide
cugcauaccauauggguac

SEQ ID NO: 2871329 - RNA, 19 nt, Artificial Sequence
  Description of Artificial Sequence: Synthetic oligonucleotide
agauaaagacaaguaagug

SEQ ID NO: 2871330 - RNA, 19 nt, Artificial Sequence
  Description of Artificial Sequence: Synthetic oligonucleotide
cuaaacaccgauagcaaca

SEQ ID NO: 2871331 - RNA, 19 nt, Artificial Sequence
  Description of Artificial Sequence: Synthetic oligonucleotide
caccacuaaacaccgauag

SEQ ID NO: 2871332 - RNA, 19 nt, Artificial Sequence
  Description of Artificial Sequence: Synthetic oligonucleotide
gagaagagagcccaacuca

SEQ ID NO: 2871333 - RNA, 19 nt, Artificial Sequence
  Description of Artificial Sequence: Synthetic oligonucleotide
gugaucuuugcuugggucc

SEQ ID NO: 2871334 - RNA, 19 nt, Artificial Sequence
  Description of Artificial Sequence: Synthetic oligonucleotide
acagaagaaccagcaagcc

SEQ ID NO: 2871335 - RNA, 19 nt, Artificial Sequence
  Description of Artificial Sequence: Synthetic oligonucleotide
agcauguagcgguagaaga

SEQ ID NO: 2871336 - RNA, 19 nt, Artificial Sequence
  Description of Artificial Sequence: Synthetic oligonucleotide
aauggcucggaggaaaagu

SEQ ID NO: 2871337 - RNA, 19 nt, Artificial Sequence
  Description of Artificial Sequence: Synthetic oligonucleotide
acuugauauucucuuagaa

SEQ ID NO: 2871338 - RNA, 19 nt, Artificial Sequence
  Description of Artificial Sequence: Synthetic oligonucleotide
aauagccagggccaacaga

SEQ ID NO: 2871339 - RNA, 19 nt, Artificial Sequence
  Description of Artificial Sequence: Synthetic oligonucleotide
uagaacugcauaccauaug

SEQ ID NO: 2871340 - RNA, 19 nt, Artificial Sequence
  Description of Artificial Sequence: Synthetic oligonucleotide
ucggaggaaaagucaacag

SEQ ID NO: 2871341 - RNA, 19 nt, Artificial Sequence
  Description of Artificial Sequence: Synthetic oligonucleotide
aacccgcaaacacaaucag

SEQ ID NO: 2871342 - RNA, 19 nt, Artificial Sequence
  Description of Artificial Sequence: Synthetic oligonucleotide
uuagaacugcauaccauau

SEQ ID NO: 2871343 - RNA, 19 nt, Artificial Sequence
  Description of Artificial Sequence: Synthetic oligonucleotide
caguacuucaauucccaag

SEQ ID NO: 2871344 - RNA, 19 nt, Artificial Sequence
  Description of Artificial Sequence: Synthetic oligonucleotide
aggaaacacaccacuaaac

SEQ ID NO: 2871345 - RNA, 19 nt, Artificial Sequence
  Description of Artificial Sequence: Synthetic oligonucleotide
gugagaacuguuacaauag

SEQ ID NO: 2871346 - RNA, 19 nt, Artificial Sequence
  Description of Artificial Sequence: Synthetic oligonucleotide
cagcaagcaauacacguag

SEQ ID NO: 2871347 - RNA, 19 nt, Artificial Sequence
  Description of Artificial Sequence: Synthetic oligonucleotide
uguagcgguagaagaaacu

SEQ ID NO: 2871348 - RNA, 19 nt, Artificial Sequence
  Description of Artificial Sequence: Synthetic oligonucleotide
ggaggaaaagucaacagug

SEQ ID NO: 2871349 - RNA, 19 nt, Artificial Sequence
  Description of Artificial Sequence: Synthetic oligonucleotide
aauucccaagauaaagaca

SEQ ID NO: 2871350 - RNA, 19 nt, Artificial Sequence
  Description of Artificial Sequence: Synthetic oligonucleotide
uaaagacaaguaagugggc

SEQ ID NO: 2871351 - RNA, 19 nt, Artificial Sequence
  Description of Artificial Sequence: Synthetic oligonucleotide
ucuuagaacugcauaccau

SEQ ID NO: 2871352 - RNA, 19 nt, Artificial Sequence
  Description of Artificial Sequence: Synthetic oligonucleotide
gagaucuggcuuucuaccc

SEQ ID NO: 2871353 - RNA, 19 nt, Artificial Sequence
  Description of Artificial Sequence: Synthetic oligonucleotide
ucucuuagaacugcauacc

SEQ ID NO: 2871354 - RNA, 19 nt, Artificial Sequence
  Description of Artificial Sequence: Synthetic oligonucleotide
uacuagagggagaucuggc

SEQ ID NO: 2871355 - RNA, 19 nt, Artificial Sequence
  Description of Artificial Sequence: Synthetic oligonucleotide
gucuugaauaacuugauau

SEQ ID NO: 2871356 - RNA, 19 nt, Artificial Sequence
  Description of Artificial Sequence: Synthetic oligonucleotide
acagugaugcaaccagguc

SEQ ID NO: 2871357 - RNA, 19 nt, Artificial Sequence
  Description of Artificial Sequence: Synthetic oligonucleotide
cauaccauauggguacugg

SEQ ID NO: 2871358 - RNA, 19 nt, Artificial Sequence
  Description of Artificial Sequence: Synthetic oligonucleotide
caggucuugaauaacuuga

SEQ ID NO: 2871359 - RNA, 19 nt, Artificial Sequence
  Description of Artificial Sequence: Synthetic oligonucleotide
uuucuacccacaacaggca

SEQ ID NO: 2871360 - RNA, 19 nt, Artificial Sequence
  Description of Artificial Sequence: Synthetic oligonucleotide
uagcaacaaagcuaacaca

SEQ ID NO: 2871361 - RNA, 19 nt, Artificial Sequence
  Description of Artificial Sequence: Synthetic oligonucleotide
agcaaagagaagagagccc

SEQ ID NO: 2871362 - RNA, 19 nt, Artificial Sequence
  Description of Artificial Sequence: Synthetic oligonucleotide
agacaaguaagugggccac

SEQ ID NO: 2871363 - RNA, 19 nt, Artificial Sequence
  Description of Artificial Sequence: Synthetic oligonucleotide
uaaguccagggacagacuu

SEQ ID NO: 2871364 - RNA, 19 nt, Artificial Sequence
  Description of Artificial Sequence: Synthetic oligonucleotide
caacaaagcuaacacagca

SEQ ID NO: 2871365 - RNA, 19 nt, Artificial Sequence
  Description of Artificial Sequence: Synthetic oligonucleotide
acaggcaucagugggaaca

SEQ ID NO: 2871366 - RNA, 19 nt, Artificial Sequence
  Description of Artificial Sequence: Synthetic oligonucleotide
ugcaaccaggucuugaaua

SEQ ID NO: 2871367 - RNA, 19 nt, Artificial Sequence
  Description of Artificial Sequence: Synthetic oligonucleotide
aggaaaagucaacagugau

SEQ ID NO: 2871368 - RNA, 19 nt, Artificial Sequence
  Description of Artificial Sequence: Synthetic oligonucleotide
acuagagggagaucuggcu

SEQ ID NO: 2871369 - RNA, 19 nt, Artificial Sequence
  Description of Artificial Sequence: Synthetic oligonucleotide
ccagcugucagcauguagc

SEQ ID NO: 2871370 - RNA, 19 nt, Artificial Sequence
  Description of Artificial Sequence: Synthetic oligonucleotide
uuaacaccaguacuucaau

SEQ ID NO: 2871371 - RNA, 19 nt, Artificial Sequence
  Description of Artificial Sequence: Synthetic oligonucleotide
ggaaacacaccacuaaaca

SEQ ID NO: 2871372 - RNA, 19 nt, Artificial Sequence
  Description of Artificial Sequence: Synthetic oligonucleotide
ucuuugcuuggguccacgg

SEQ ID NO: 2871373 - RNA, 19 nt, Artificial Sequence
  Description of Artificial Sequence: Synthetic oligonucleotide
uacuucaauucccaagaua

SEQ ID NO: 2871374 - RNA, 19 nt, Artificial Sequence
  Description of Artificial Sequence: Synthetic oligonucleotide
ucccaagauaaagacaagu

SEQ ID NO: 2871375 - RNA, 19 nt, Artificial Sequence
  Description of Artificial Sequence: Synthetic oligonucleotide
aacagugaugcaaccaggu

SEQ ID NO: 2871376 - RNA, 19 nt, Artificial Sequence
  Description of Artificial Sequence: Synthetic oligonucleotide
caacagugaugcaaccagg

SEQ ID NO: 2871377 - RNA, 19 nt, Artificial Sequence
  Description of Artificial Sequence: Synthetic oligonucleotide
caaucaguccagcugucag

SEQ ID NO: 2871378 - RNA, 19 nt, Artificial Sequence
  Description of Artificial Sequence: Synthetic oligonucleotide
auggguacuggcagcaagc

SEQ ID NO: 2871379 - RNA, 19 nt, Artificial Sequence
  Description of Artificial Sequence: Synthetic oligonucleotide
cacgaaauggcucggagga

SEQ ID NO: 2871380 - RNA, 19 nt, Artificial Sequence
  Description of Artificial Sequence: Synthetic oligonucleotide
auucucuuagaacugcaua

SEQ ID NO: 2871381 - RNA, 19 nt, Artificial Sequence
  Description of Artificial Sequence: Synthetic oligonucleotide
cuuaacaccaguacuucaa

SEQ ID NO: 2871382 - RNA, 19 nt, Artificial Sequence
  Description of Artificial Sequence: Synthetic oligonucleotide
uacacguaguaaguccagg

SEQ ID NO: 2871383 - RNA, 19 nt, Artificial Sequence
  Description of Artificial Sequence: Synthetic oligonucleotide
auaacuugauauucucuua

SEQ ID NO: 2871384 - RNA, 19 nt, Artificial Sequence
  Description of Artificial Sequence: Synthetic oligonucleotide
gaacugcauaccauauggg

SEQ ID NO: 2871385 - RNA, 19 nt, Artificial Sequence
  Description of Artificial Sequence: Synthetic oligonucleotide
caucagugggaacacugcc

SEQ ID NO: 2871386 - RNA, 19 nt, Artificial Sequence
  Description of Artificial Sequence: Synthetic oligonucleotide
gguaggugaucuuugcuug

SEQ ID NO: 2871387 - RNA, 19 nt, Artificial Sequence
  Description of Artificial Sequence: Synthetic oligonucleotide
aaccaggucuugaauaacu

SEQ ID NO: 2871388 - RNA, 19 nt, Artificial Sequence
  Description of Artificial Sequence: Synthetic oligonucleotide
guaggugaucuuugcuugg

SEQ ID NO: 2871389 - RNA, 19 nt, Artificial Sequence
  Description of Artificial Sequence: Synthetic oligonucleotide
gaaauggccaacccgcaaa

SEQ ID NO: 2871390 - RNA, 19 nt, Artificial Sequence
  Description of Artificial Sequence: Synthetic oligonucleotide
gaugcaaccaggucuugaa

SEQ ID NO: 2871391 - RNA, 19 nt, Artificial Sequence
  Description of Artificial Sequence: Synthetic oligonucleotide
gaagagagcccaacucagg

SEQ ID NO: 2871392 - RNA, 19 nt, Artificial Sequence
  Description of Artificial Sequence: Synthetic oligonucleotide
acuuaacaccaguacuuca

SEQ ID NO: 2871393 - RNA, 19 nt, Artificial Sequence
  Description of Artificial Sequence: Synthetic oligonucleotide
aagaaacuuaacaccagua

SEQ ID NO: 2871394 - RNA, 19 nt, Artificial Sequence
  Description of Artificial Sequence: Synthetic oligonucleotide
uccagcugucagcauguag

SEQ ID NO: 2871395 - RNA, 19 nt, Artificial Sequence
  Description of Artificial Sequence: Synthetic oligonucleotide
uaggugaucuuugcuuggg

SEQ ID NO: 2871396 - RNA, 19 nt, Artificial Sequence
  Description of Artificial Sequence: Synthetic oligonucleotide
uaacacagcaagagauagu

SEQ ID NO: 2871397 - RNA, 19 nt, Artificial Sequence
  Description of Artificial Sequence: Synthetic oligonucleotide
agguaggugaucuuugcuu

SEQ ID NO: 2871398 - RNA, 19 nt, Artificial Sequence
  Description of Artificial Sequence: Synthetic oligonucleotide
ucuacccacaacaggcauc

SEQ ID NO: 2871399 - RNA, 19 nt, Artificial Sequence
  Description of Artificial Sequence: Synthetic oligonucleotide
agaagaaacuuaacaccag

SEQ ID NO: 2871400 - RNA, 19 nt, Artificial Sequence
  Description of Artificial Sequence: Synthetic oligonucleotide
uggccaacccgcaaacaca

SEQ ID NO: 2871401 - RNA, 19 nt, Artificial Sequence
  Description of Artificial Sequence: Synthetic oligonucleotide
aaauggcucggaggaaaag

SEQ ID NO: 2871402 - RNA, 19 nt, Artificial Sequence
  Description of Artificial Sequence: Synthetic oligonucleotide
uaaacaccgauagcaacaa

SEQ ID NO: 2871403 - RNA, 19 nt, Artificial Sequence
  Description of Artificial Sequence: Synthetic oligonucleotide
cuuugcuuggguccacggc

SEQ ID NO: 2871404 - RNA, 19 nt, Artificial Sequence
  Description of Artificial Sequence: Synthetic oligonucleotide
ugaucuuugcuugggucca

SEQ ID NO: 2871405 - RNA, 19 nt, Artificial Sequence
  Description of Artificial Sequence: Synthetic oligonucleotide
cagacuuggaucagcagga

SEQ ID NO: 2871406 - RNA, 19 nt, Artificial Sequence
  Description of Artificial Sequence: Synthetic oligonucleotide
uucccaagauaaagacaag

SEQ ID NO: 2871407 - RNA, 19 nt, Artificial Sequence
  Description of Artificial Sequence: Synthetic oligonucleotide
cccgcaaacacaaucaguc

SEQ ID NO: 2871408 - RNA, 19 nt, Artificial Sequence
  Description of Artificial Sequence: Synthetic oligonucleotide
aguaagugggccacgaaau

SEQ ID NO: 2871409 - RNA, 19 nt, Artificial Sequence
  Description of Artificial Sequence: Synthetic oligonucleotide
ucuggcuuucuacccacaa

SEQ ID NO: 2871410 - RNA, 19 nt, Artificial Sequence
  Description of Artificial Sequence: Synthetic oligonucleotide
gcuuucuacccacaacagg

SEQ ID NO: 2871411 - RNA, 19 nt, Artificial Sequence
  Description of Artificial Sequence: Synthetic oligonucleotide
gagugagaaauggccaacc

SEQ ID NO: 2871412 - RNA, 19 nt, Artificial Sequence
  Description of Artificial Sequence: Synthetic oligonucleotide
cacugccagaagcaaagag

SEQ ID NO: 2871413 - RNA, 19 nt, Artificial Sequence
  Description of Artificial Sequence: Synthetic oligonucleotide
agcaauacacguaguaagu

SEQ ID NO: 2871414 - RNA, 19 nt, Artificial Sequence
  Description of Artificial Sequence: Synthetic oligonucleotide
agugggaacacugccagaa

SEQ ID NO: 2871415 - RNA, 19 nt, Artificial Sequence
  Description of Artificial Sequence: Synthetic oligonucleotide
auggcucggaggaaaaguc

SEQ ID NO: 2871416 - RNA, 19 nt, Artificial Sequence
  Description of Artificial Sequence: Synthetic oligonucleotide
uggcucggaggaaaaguca

SEQ ID NO: 2871417 - RNA, 19 nt, Artificial Sequence
  Description of Artificial Sequence: Synthetic oligonucleotide
caacccgcaaacacaauca

SEQ ID NO: 2871418 - RNA, 19 nt, Artificial Sequence
  Description of Artificial Sequence: Synthetic oligonucleotide
ugccagaagcaaagagaag

SEQ ID NO: 2871419 - RNA, 19 nt, Artificial Sequence
  Description of Artificial Sequence: Synthetic oligonucleotide
auguagcgguagaagaaac

SEQ ID NO: 2871420 - RNA, 19 nt, Artificial Sequence
  Description of Artificial Sequence: Synthetic oligonucleotide
accgauagcaacaaagcua

SEQ ID NO: 2871421 - RNA, 19 nt, Artificial Sequence
  Description of Artificial Sequence: Synthetic oligonucleotide
aaccagcaagccugcaccu

SEQ ID NO: 2871422 - RNA, 19 nt, Artificial Sequence
  Description of Artificial Sequence: Synthetic oligonucleotide
acccacaacaggcaucagu

SEQ ID NO: 2871423 - RNA, 19 nt, Artificial Sequence
  Description of Artificial Sequence: Synthetic oligonucleotide
uagcgguagaagaaacuua

SEQ ID NO: 2871424 - RNA, 19 nt, Artificial Sequence
  Description of Artificial Sequence: Synthetic oligonucleotide
gccagaagcaaagagaaga

SEQ ID NO: 2871425 - RNA, 19 nt, Artificial Sequence
  Description of Artificial Sequence: Synthetic oligonucleotide
agcgguagaagaaacuuaa

SEQ ID NO: 2871426 - RNA, 19 nt, Artificial Sequence
  Description of Artificial Sequence: Synthetic oligonucleotide
ggcugagugagaaauggcc

SEQ ID NO: 2871427 - RNA, 19 nt, Artificial Sequence
  Description of Artificial Sequence: Synthetic oligonucleotide
gaggaaaagucaacaguga

SEQ ID NO: 2871428 - RNA, 19 nt, Artificial Sequence
  Description of Artificial Sequence: Synthetic oligonucleotide
uucuacccacaacaggcau

SEQ ID NO: 2871429 - RNA, 19 nt, Artificial Sequence
  Description of Artificial Sequence: Synthetic oligonucleotide
uugcuuggguccacggcug

SEQ ID NO: 2871430 - RNA, 19 nt, Artificial Sequence
  Description of Artificial Sequence: Synthetic oligonucleotide
ggaucagcaggaaacacac

SEQ ID NO: 2871431 - RNA, 19 nt, Artificial Sequence
  Description of Artificial Sequence: Synthetic oligonucleotide
caguccagcugucagcaug

SEQ ID NO: 2871432 - RNA, 19 nt, Artificial Sequence
  Description of Artificial Sequence: Synthetic oligonucleotide
cucuuagaacugcauacca

SEQ ID NO: 2871433 - RNA, 19 nt, Artificial Sequence
  Description of Artificial Sequence: Synthetic oligonucleotide
auuacuagagggagaucug

SEQ ID NO: 2871434 - RNA, 19 nt, Artificial Sequence
  Description of Artificial Sequence: Synthetic oligonucleotide
ugagugagaaauggccaac

SEQ ID NO: 2871435 - RNA, 19 nt, Artificial Sequence
  Description of Artificial Sequence: Synthetic oligonucleotide
caaagcuaacacagcaaga

SEQ ID NO: 2871436 - RNA, 19 nt, Artificial Sequence
  Description of Artificial Sequence: Synthetic oligonucleotide
gacaaguaagugggccacg

SEQ ID NO: 2871437 - RNA, 19 nt, Artificial Sequence
  Description of Artificial Sequence: Synthetic oligonucleotide
ugaugcaaccaggucuuga

SEQ ID NO: 2871438 - RNA, 19 nt, Artificial Sequence
  Description of Artificial Sequence: Synthetic oligonucleotide
gaagaaccagcaagccugc

SEQ ID NO: 2871439 - RNA, 19 nt, Artificial Sequence
  Description of Artificial Sequence: Synthetic oligonucleotide
caagccugcaccuauuacu

SEQ ID NO: 2871440 - RNA, 19 nt, Artificial Sequence
  Description of Artificial Sequence: Synthetic oligonucleotide
agaaauggccaacccgcaa

SEQ ID NO: 2871441 - RNA, 19 nt, Artificial Sequence
  Description of Artificial Sequence: Synthetic oligonucleotide
caagcaauacacguaguaa

SEQ ID NO: 2871442 - RNA, 19 nt, Artificial Sequence
  Description of Artificial Sequence: Synthetic oligonucleotide
uuggaucagcaggaaacac

SEQ ID NO: 2871443 - RNA, 19 nt, Artificial Sequence
  Description of Artificial Sequence: Synthetic oligonucleotide
aaguccagggacagacuug

SEQ ID NO: 2871444 - RNA, 19 nt, Artificial Sequence
  Description of Artificial Sequence: Synthetic oligonucleotide
cagugaugcaaccaggucu

SEQ ID NO: 2871445 - RNA, 19 nt, Artificial Sequence
  Description of Artificial Sequence: Synthetic oligonucleotide
cuggcuuucuacccacaac

SEQ ID NO: 2871446 - RNA, 19 nt, Artificial Sequence
  Description of Artificial Sequence: Synthetic oligonucleotide
ggugaucuuugcuuggguc

SEQ ID NO: 2871447 - RNA, 19 nt, Artificial Sequence
  Description of Artificial Sequence: Synthetic oligonucleotide
acaacaggcaucaguggga

SEQ ID NO: 2871448 - RNA, 19 nt, Artificial Sequence
  Description of Artificial Sequence: Synthetic oligonucleotide
cugcaccuauuacuagagg

SEQ ID NO: 2871449 - RNA, 19 nt, Artificial Sequence
  Description of Artificial Sequence: Synthetic oligonucleotide
aauggccaacccgcaaaca

SEQ ID NO: 2871450 - RNA, 19 nt, Artificial Sequence
  Description of Artificial Sequence: Synthetic oligonucleotide
agggccaacagaagaacca

SEQ ID NO: 2871451 - RNA, 19 nt, Artificial Sequence
  Description of Artificial Sequence: Synthetic oligonucleotide
cacguaguaaguccaggga

SEQ ID NO: 2871452 - RNA, 19 nt, Artificial Sequence
  Description of Artificial Sequence: Synthetic oligonucleotide
agugaugcaaccaggucuu

SEQ ID NO: 2871453 - RNA, 19 nt, Artificial Sequence
  Description of Artificial Sequence: Synthetic oligonucleotide
ccacuaaacaccgauagca

SEQ ID NO: 2871454 - RNA, 19 nt, Artificial Sequence
  Description of Artificial Sequence: Synthetic oligonucleotide
cuacccacaacaggcauca

SEQ ID NO: 2871455 - RNA, 19 nt, Artificial Sequence
  Description of Artificial Sequence: Synthetic oligonucleotide
aucagugggaacacugcca

SEQ ID NO: 2871456 - RNA, 19 nt, Artificial Sequence
  Description of Artificial Sequence: Synthetic oligonucleotide
uugugagaacuguuacaau

SEQ ID NO: 2871457 - RNA, 19 nt, Artificial Sequence
  Description of Artificial Sequence: Synthetic oligonucleotide
aaacaccgauagcaacaaa

SEQ ID NO: 2871458 - RNA, 19 nt, Artificial Sequence
  Description of Artificial Sequence: Synthetic oligonucleotide
cucggaggaaaagucaaca

SEQ ID NO: 2871459 - RNA, 19 nt, Artificial Sequence
  Description of Artificial Sequence: Synthetic oligonucleotide
ccagggacagacuuggauc

SEQ ID NO: 2871460 - RNA, 19 nt, Artificial Sequence
  Description of Artificial Sequence: Synthetic oligonucleotide
auacacguaguaaguccag

SEQ ID NO: 2871461 - RNA, 19 nt, Artificial Sequence
  Description of Artificial Sequence: Synthetic oligonucleotide
gggagaucuggcuuucuac

SEQ ID NO: 2871462 - RNA, 19 nt, Artificial Sequence
  Description of Artificial Sequence: Synthetic oligonucleotide
cacuaaacaccgauagcaa

SEQ ID NO: 2871463 - RNA, 19 nt, Artificial Sequence
  Description of Artificial Sequence: Synthetic oligonucleotide
ccugcaccuauuacuagag

SEQ ID NO: 2871464 - RNA, 19 nt, Artificial Sequence
  Description of Artificial Sequence: Synthetic oligonucleotide
aucuuugcuuggguccacg

SEQ ID NO: 2871465 - RNA, 19 nt, Artificial Sequence
  Description of Artificial Sequence: Synthetic oligonucleotide
cuuggaucagcaggaaaca

SEQ ID NO: 2871466 - RNA, 19 nt, Artificial Sequence
  Description of Artificial Sequence: Synthetic oligonucleotide
uggguacuggcagcaagca

SEQ ID NO: 2871467 - RNA, 19 nt, Artificial Sequence
  Description of Artificial Sequence: Synthetic oligonucleotide
ccacgaaauggcucggagg

SEQ ID NO: 2871468 - RNA, 19 nt, Artificial Sequence
  Description of Artificial Sequence: Synthetic oligonucleotide
cauauggguacuggcagca

SEQ ID NO: 2871469 - RNA, 19 nt, Artificial Sequence
  Description of Artificial Sequence: Synthetic oligonucleotide
ccgauagcaacaaagcuaa

SEQ ID NO: 2871470 - RNA, 19 nt, Artificial Sequence
  Description of Artificial Sequence: Synthetic oligonucleotide
gacuuggaucagcaggaaa

SEQ ID NO: 2871471 - RNA, 19 nt, Artificial Sequence
  Description of Artificial Sequence: Synthetic oligonucleotide
ggguccacggcugagugag

SEQ ID NO: 2871472 - RNA, 19 nt, Artificial Sequence
  Description of Artificial Sequence: Synthetic oligonucleotide
aggugaucuuugcuugggu

SEQ ID NO: 2871473 - RNA, 19 nt, Artificial Sequence
  Description of Artificial Sequence: Synthetic oligonucleotide
agagagcccaacucaggua

SEQ ID NO: 2871474 - RNA, 19 nt, Artificial Sequence
  Description of Artificial Sequence: Synthetic oligonucleotide
aacucagguaggugaucuu

SEQ ID NO: 2871475 - RNA, 19 nt, Artificial Sequence
  Description of Artificial Sequence: Synthetic oligonucleotide
agagggagaucuggcuuuc

SEQ ID NO: 2871476 - RNA, 19 nt, Artificial Sequence
  Description of Artificial Sequence: Synthetic oligonucleotide
gugggaacacugccagaag

SEQ ID NO: 2871477 - RNA, 19 nt, Artificial Sequence
  Description of Artificial Sequence: Synthetic oligonucleotide
ggcaucagugggaacacug

SEQ ID NO: 2871478 - RNA, 19 nt, Artificial Sequence
  Description of Artificial Sequence: Synthetic oligonucleotide
cuucaauucccaagauaaa

SEQ ID NO: 2871479 - RNA, 19 nt, Artificial Sequence
  Description of Artificial Sequence: Synthetic oligonucleotide
agccugcaccuauuacuag

SEQ ID NO: 2871480 - RNA, 19 nt, Artificial Sequence
  Description of Artificial Sequence: Synthetic oligonucleotide
cauguagcgguagaagaaa

SEQ ID NO: 2871481 - RNA, 19 nt, Artificial Sequence
  Description of Artificial Sequence: Synthetic oligonucleotide
ccaacccgcaaacacaauc

SEQ ID NO: 2871482 - RNA, 19 nt, Artificial Sequence
  Description of Artificial Sequence: Synthetic oligonucleotide
aguccagcugucagcaugu

SEQ ID NO: 2871483 - RNA, 19 nt, Artificial Sequence
  Description of Artificial Sequence: Synthetic oligonucleotide
ggcagcaagcaauacacgu

SEQ ID NO: 2871484 - RNA, 19 nt, Artificial Sequence
  Description of Artificial Sequence: Synthetic oligonucleotide
gcaaccaggucuugaauaa

SEQ ID NO: 2871485 - RNA, 19 nt, Artificial Sequence
  Description of Artificial Sequence: Synthetic oligonucleotide
cacggcugagugagaaaug

SEQ ID NO: 2871486 - RNA, 19 nt, Artificial Sequence
  Description of Artificial Sequence: Synthetic oligonucleotide
gcaacaaagcuaacacagc

SEQ ID NO: 2871487 - RNA, 19 nt, Artificial Sequence
  Description of Artificial Sequence: Synthetic oligonucleotide
augcaaccaggucuugaau

SEQ ID NO: 2871488 - RNA, 19 nt, Artificial Sequence
  Description of Artificial Sequence: Synthetic oligonucleotide
gagaaauggccaacccgca

SEQ ID NO: 2871489 - RNA, 19 nt, Artificial Sequence
  Description of Artificial Sequence: Synthetic oligonucleotide
agggagaucuggcuuucua

SEQ ID NO: 2871490 - RNA, 19 nt, Artificial Sequence
  Description of Artificial Sequence: Synthetic oligonucleotide
gcugucagcauguagcggu

SEQ ID NO: 2871491 - RNA, 19 nt, Artificial Sequence
  Description of Artificial Sequence: Synthetic oligonucleotide
gcaagcaauacacguagua

SEQ ID NO: 2871492 - RNA, 19 nt, Artificial Sequence
  Description of Artificial Sequence: Synthetic oligonucleotide
gucagcauguagcgguaga

SEQ ID NO: 2871493 - RNA, 19 nt, Artificial Sequence
  Description of Artificial Sequence: Synthetic oligonucleotide
gcaggaaacacaccacuaa

SEQ ID NO: 2871494 - RNA, 19 nt, Artificial Sequence
  Description of Artificial Sequence: Synthetic oligonucleotide
gaaauggcucggaggaaaa

SEQ ID NO: 2871495 - RNA, 19 nt, Artificial Sequence
  Description of Artificial Sequence: Synthetic oligonucleotide
agcaagccugcaccuauua

SEQ ID NO: 2871496 - RNA, 19 nt, Artificial Sequence
  Description of Artificial Sequence: Synthetic oligonucleotide
cacaaucaguccagcuguc

SEQ ID NO: 2871497 - RNA, 19 nt, Artificial Sequence
  Description of Artificial Sequence: Synthetic oligonucleotide
accuauuacuagagggaga

SEQ ID NO: 2871498 - RNA, 19 nt, Artificial Sequence
  Description of Artificial Sequence: Synthetic oligonucleotide
gccacgaaauggcucggag

SEQ ID NO: 2871499 - RNA, 19 nt, Artificial Sequence
  Description of Artificial Sequence: Synthetic oligonucleotide
ccauauggguacuggcagc

SEQ ID NO: 2871500 - RNA, 19 nt, Artificial Sequence
  Description of Artificial Sequence: Synthetic oligonucleotide
gcaauacacguaguaaguc

SEQ ID NO: 2871501 - RNA, 19 nt, Artificial Sequence
  Description of Artificial Sequence: Synthetic oligonucleotide
cgguagaagaaacuuaaca

SEQ ID NO: 2871502 - RNA, 19 nt, Artificial Sequence
  Description of Artificial Sequence: Synthetic oligonucleotide
gcaccuauuacuagaggga

SEQ ID NO: 2871503 - RNA, 19 nt, Artificial Sequence
  Description of Artificial Sequence: Synthetic oligonucleotide
gguacuggcagcaagcaau

SEQ ID NO: 2871504 - RNA, 19 nt, Artificial Sequence
  Description of Artificial Sequence: Synthetic oligonucleotide
cuguuacaauagccagggc

SEQ ID NO: 2871505 - RNA, 19 nt, Artificial Sequence
  Description of Artificial Sequence: Synthetic oligonucleotide
caaccaggucuugaauaac

SEQ ID NO: 2871506 - RNA, 19 nt, Artificial Sequence
  Description of Artificial Sequence: Synthetic oligonucleotide
ggcuuucuacccacaacag

SEQ ID NO: 2871507 - RNA, 19 nt, Artificial Sequence
  Description of Artificial Sequence: Synthetic oligonucleotide
cccaagauaaagacaagua

SEQ ID NO: 2871508 - RNA, 19 nt, Artificial Sequence
  Description of Artificial Sequence: Synthetic oligonucleotide
uggguccacggcugaguga

SEQ ID NO: 2871509 - RNA, 19 nt, Artificial Sequence
  Description of Artificial Sequence: Synthetic oligonucleotide
guagcgguagaagaaacuu

SEQ ID NO: 2871510 - RNA, 19 nt, Artificial Sequence
  Description of Artificial Sequence: Synthetic oligonucleotide
agagcccaacucagguagg

SEQ ID NO: 2871511 - RNA, 19 nt, Artificial Sequence
  Description of Artificial Sequence: Synthetic oligonucleotide
cagaagaaccagcaagccu

SEQ ID NO: 2871512 - RNA, 19 nt, Artificial Sequence
  Description of Artificial Sequence: Synthetic oligonucleotide
uccacggcugagugagaaa

SEQ ID NO: 2871513 - RNA, 19 nt, Artificial Sequence
  Description of Artificial Sequence: Synthetic oligonucleotide
gcaucagugggaacacugc

SEQ ID NO: 2871514 - RNA, 19 nt, Artificial Sequence
  Description of Artificial Sequence: Synthetic oligonucleotide
gggaacacugccagaagca

SEQ ID NO: 2871515 - RNA, 19 nt, Artificial Sequence
  Description of Artificial Sequence: Synthetic oligonucleotide
agcaggaaacacaccacua

SEQ ID NO: 2871516 - RNA, 19 nt, Artificial Sequence
  Description of Artificial Sequence: Synthetic oligonucleotide
gccugcaccuauuacuaga

SEQ ID NO: 2871517 - RNA, 19 nt, Artificial Sequence
  Description of Artificial Sequence: Synthetic oligonucleotide
caaagagaagagagcccaa

SEQ ID NO: 2871518 - RNA, 19 nt, Artificial Sequence
  Description of Artificial Sequence: Synthetic oligonucleotide
caccgauagcaacaaagcu

SEQ ID NO: 2871519 - RNA, 19 nt, Artificial Sequence
  Description of Artificial Sequence: Synthetic oligonucleotide
acccgcaaacacaaucagu

SEQ ID NO: 2871520 - RNA, 19 nt, Artificial Sequence
  Description of Artificial Sequence: Synthetic oligonucleotide
cuauuacuagagggagauc

SEQ ID NO: 2871521 - RNA, 19 nt, Artificial Sequence
  Description of Artificial Sequence: Synthetic oligonucleotide
ggucuugaauaacuugaua

SEQ ID NO: 2871522 - RNA, 19 nt, Artificial Sequence
  Description of Artificial Sequence: Synthetic oligonucleotide
cguaguaaguccagggaca

SEQ ID NO: 2871523 - RNA, 19 nt, Artificial Sequence
  Description of Artificial Sequence: Synthetic oligonucleotide
acacagcaagagauagugu

SEQ ID NO: 2871524 - RNA, 19 nt, Artificial Sequence
  Description of Artificial Sequence: Synthetic oligonucleotide
agggacagacuuggaucag

SEQ ID NO: 2871525 - RNA, 19 nt, Artificial Sequence
  Description of Artificial Sequence: Synthetic oligonucleotide
accaggucuugaauaacuu

SEQ ID NO: 2871526 - RNA, 19 nt, Artificial Sequence
  Description of Artificial Sequence: Synthetic oligonucleotide
uacuggcagcaagcaauac

SEQ ID NO: 2871527 - RNA, 19 nt, Artificial Sequence
  Description of Artificial Sequence: Synthetic oligonucleotide
gcaagccugcaccuauuac

SEQ ID NO: 2871528 - RNA, 19 nt, Artificial Sequence
  Description of Artificial Sequence: Synthetic oligonucleotide
agugggccacgaaauggcu

SEQ ID NO: 2871529 - RNA, 19 nt, Artificial Sequence
  Description of Artificial Sequence: Synthetic oligonucleotide
cgcaaacacaaucagucca

SEQ ID NO: 2871530 - RNA, 19 nt, Artificial Sequence
  Description of Artificial Sequence: Synthetic oligonucleotide
gaucuuugcuuggguccac

SEQ ID NO: 2871531 - RNA, 19 nt, Artificial Sequence
  Description of Artificial Sequence: Synthetic oligonucleotide
cuagagggagaucuggcuu

SEQ ID NO: 2871532 - RNA, 19 nt, Artificial Sequence
  Description of Artificial Sequence: Synthetic oligonucleotide
ggacagacuuggaucagca

SEQ ID NO: 2871533 - RNA, 19 nt, Artificial Sequence
  Description of Artificial Sequence: Synthetic oligonucleotide
gggacagacuuggaucagc

SEQ ID NO: 2871534 - RNA, 19 nt, Artificial Sequence
  Description of Artificial Sequence: Synthetic oligonucleotide
agcaagcaauacacguagu

SEQ ID NO: 2871535 - RNA, 19 nt, Artificial Sequence
  Description of Artificial Sequence: Synthetic oligonucleotide
caacucagguaggugaucu

SEQ ID NO: 2871536 - RNA, 19 nt, Artificial Sequence
  Description of Artificial Sequence: Synthetic oligonucleotide
gcauguagcgguagaagaa

SEQ ID NO: 2871537 - RNA, 19 nt, Artificial Sequence
  Description of Artificial Sequence: Synthetic oligonucleotide
acaccacuaaacaccgaua

SEQ ID NO: 2871538 - RNA, 19 nt, Artificial Sequence
  Description of Artificial Sequence: Synthetic oligonucleotide
caacaggcaucagugggaa

SEQ ID NO: 2871539 - RNA, 19 nt, Artificial Sequence
  Description of Artificial Sequence: Synthetic oligonucleotide
caaguaagugggccacgaa

SEQ ID NO: 2871540 - RNA, 19 nt, Artificial Sequence
  Description of Artificial Sequence: Synthetic oligonucleotide
agacuuggaucagcaggaa

SEQ ID NO: 2871541 - RNA, 19 nt, Artificial Sequence
  Description of Artificial Sequence: Synthetic oligonucleotide
gcuaacacagcaagagaua

SEQ ID NO: 2871542 - RNA, 19 nt, Artificial Sequence
  Description of Artificial Sequence: Synthetic oligonucleotide
guacuggcagcaagcaaua

SEQ ID NO: 2871543 - RNA, 19 nt, Artificial Sequence
  Description of Artificial Sequence: Synthetic oligonucleotide
auauggguacuggcagcaa

SEQ ID NO: 2871544 - RNA, 19 nt, Artificial Sequence
  Description of Artificial Sequence: Synthetic oligonucleotide
acgaaauggcucggaggaa

SEQ ID NO: 2871545 - RNA, 19 nt, Artificial Sequence
  Description of Artificial Sequence: Synthetic oligonucleotide
gcagcaagcaauacacgua

SEQ ID NO: 2871546 - RNA, 19 nt, Artificial Sequence
  Description of Artificial Sequence: Synthetic oligonucleotide
ggcucggaggaaaagucaa

SEQ ID NO: 2871547 - RNA, 19 nt, Artificial Sequence
  Description of Artificial Sequence: Synthetic oligonucleotide
ccuauuacuagagggagau

SEQ ID NO: 2871548 - RNA, 19 nt, Artificial Sequence
  Description of Artificial Sequence: Synthetic oligonucleotide
cagguaggugaucuuugcu

SEQ ID NO: 2871549 - RNA, 19 nt, Artificial Sequence
  Description of Artificial Sequence: Synthetic oligonucleotide
cugucagcauguagcggua

SEQ ID NO: 2871550 - RNA, 19 nt, Artificial Sequence
  Description of Artificial Sequence: Synthetic oligonucleotide
gcauaccauauggguacug

SEQ ID NO: 2871551 - RNA, 19 nt, Artificial Sequence
  Description of Artificial Sequence: Synthetic oligonucleotide
ggccaacccgcaaacacaa

SEQ ID NO: 2871552 - RNA, 19 nt, Artificial Sequence
  Description of Artificial Sequence: Synthetic oligonucleotide
gagcccaacucagguaggu

SEQ ID NO: 2871553 - RNA, 19 nt, Artificial Sequence
  Description of Artificial Sequence: Synthetic oligonucleotide
gugaugcaaccaggucuug

SEQ ID NO: 2871554 - RNA, 19 nt, Artificial Sequence
  Description of Artificial Sequence: Synthetic oligonucleotide
uacccacaacaggcaucag

SEQ ID NO: 2871555 - RNA, 19 nt, Artificial Sequence
  Description of Artificial Sequence: Synthetic oligonucleotide
aggcaucagugggaacacu

SEQ ID NO: 2871556 - RNA, 19 nt, Artificial Sequence
  Description of Artificial Sequence: Synthetic oligonucleotide
gcgguagaagaaacuuaac

SEQ ID NO: 2871557 - RNA, 19 nt, Artificial Sequence
  Description of Artificial Sequence: Synthetic oligonucleotide
gcucggaggaaaagucaac

SEQ ID NO: 2871558 - RNA, 19 nt, Artificial Sequence
  Description of Artificial Sequence: Synthetic oligonucleotide
accagcaagccugcaccua

SEQ ID NO: 2871559 - RNA, 19 nt, Artificial Sequence
  Description of Artificial Sequence: Synthetic oligonucleotide
cagugggaacacugccaga

SEQ ID NO: 2871560 - RNA, 19 nt, Artificial Sequence
  Description of Artificial Sequence: Synthetic oligonucleotide
aucuggcuuucuacccaca

SEQ ID NO: 2871561 - RNA, 19 nt, Artificial Sequence
  Description of Artificial Sequence: Synthetic oligonucleotide
cuuggguccacggcugagu

SEQ ID NO: 2871562 - RNA, 19 nt, Artificial Sequence
  Description of Artificial Sequence: Synthetic oligonucleotide
acacaccacuaaacaccga

SEQ ID NO: 2871563 - RNA, 19 nt, Artificial Sequence
  Description of Artificial Sequence: Synthetic oligonucleotide
gcuuggguccacggcugag

SEQ ID NO: 2871564 - RNA, 19 nt, Artificial Sequence
  Description of Artificial Sequence: Synthetic oligonucleotide
cggaggaaaagucaacagu

SEQ ID NO: 2871565 - RNA, 19 nt, Artificial Sequence
  Description of Artificial Sequence: Synthetic oligonucleotide
ccaguacuucaauucccaa

SEQ ID NO: 2871566 - RNA, 19 nt, Artificial Sequence
  Description of Artificial Sequence: Synthetic oligonucleotide
gggccacgaaauggcucgg

SEQ ID NO: 2871567 - RNA, 19 nt, Artificial Sequence
  Description of Artificial Sequence: Synthetic oligonucleotide
ccaacucagguaggugauc

SEQ ID NO: 2871568 - RNA, 19 nt, Artificial Sequence
  Description of Artificial Sequence: Synthetic oligonucleotide
cgauagcaacaaagcuaac

SEQ ID NO: 2871569 - RNA, 19 nt, Artificial Sequence
  Description of Artificial Sequence: Synthetic oligonucleotide
gagggagaucuggcuuucu

SEQ ID NO: 2871570 - RNA, 19 nt, Artificial Sequence
  Description of Artificial Sequence: Synthetic oligonucleotide
ccagcaagccugcaccuau

SEQ ID NO: 2871571 - RNA, 19 nt, Artificial Sequence
  Description of Artificial Sequence: Synthetic oligonucleotide
cccaacucagguaggugau

SEQ ID NO: 2871572 - RNA, 19 nt, Artificial Sequence
  Description of Artificial Sequence: Synthetic oligonucleotide
ccacggcugagugagaaau

SEQ ID NO: 2871573 - RNA, 19 nt, Artificial Sequence
  Description of Artificial Sequence: Synthetic oligonucleotide
ggccacgaaauggcucgga

SEQ ID NO: 2871574 - RNA, 19 nt, Artificial Sequence
  Description of Artificial Sequence: Synthetic oligonucleotide
cagcaagccugcaccuauu

SEQ ID NO: 2871575 - RNA, 19 nt, Artificial Sequence
  Description of Artificial Sequence: Synthetic oligonucleotide
guccagcugucagcaugua

SEQ ID NO: 2871576 - RNA, 19 nt, Artificial Sequence
  Description of Artificial Sequence: Synthetic oligonucleotide
gccaacccgcaaacacaau

SEQ ID NO: 2871577 - RNA, 19 nt, Artificial Sequence
  Description of Artificial Sequence: Synthetic oligonucleotide
ugggcuaacagauugagcc

SEQ ID NO: 2871578 - RNA, 19 nt, Artificial Sequence
  Description of Artificial Sequence: Synthetic oligonucleotide
aaggacaucaucuuagcug

SEQ ID NO: 2871579 - RNA, 19 nt, Artificial Sequence
  Description of Artificial Sequence: Synthetic oligonucleotide
aggacaucaucuuagcugc

SEQ ID NO: 2871580 - RNA, 19 nt, Artificial Sequence
  Description of Artificial Sequence: Synthetic oligonucleotide
uucgcaauagcugacaagg

SEQ ID NO: 2871581 - RNA, 19 nt, Artificial Sequence
  Description of Artificial Sequence: Synthetic oligonucleotide
ugaagcuguaaucuuagag

SEQ ID NO: 2871582 - RNA, 19 nt, Artificial Sequence
  Description of Artificial Sequence: Synthetic oligonucleotide
aauggugccagagacugcc

SEQ ID NO: 2871583 - RNA, 19 nt, Artificial Sequence
  Description of Artificial Sequence: Synthetic oligonucleotide
cuguguaccagcuagaaug

SEQ ID NO: 2871584 - RNA, 19 nt, Artificial Sequence
  Description of Artificial Sequence: Synthetic oligonucleotide
caucacacuagcaacaagg

SEQ ID NO: 2871585 - RNA, 19 nt, Artificial Sequence
  Description of Artificial Sequence: Synthetic oligonucleotide
caucuuagcugcuagagag

SEQ ID NO: 2871586 - RNA, 19 nt, Artificial Sequence
  Description of Artificial Sequence: Synthetic oligonucleotide
cuugagauugcauggaaag

SEQ ID NO: 2871587 - RNA, 19 nt, Artificial Sequence
  Description of Artificial Sequence: Synthetic oligonucleotide
gaagcuguaaucuuagaga

SEQ ID NO: 2871588 - RNA, 19 nt, Artificial Sequence
  Description of Artificial Sequence: Synthetic oligonucleotide
uuggaacucccacagaugc

SEQ ID NO: 2871589 - RNA, 19 nt, Artificial Sequence
  Description of Artificial Sequence: Synthetic oligonucleotide
guaaucuuagagaagagug

SEQ ID NO: 2871590 - RNA, 19 nt, Artificial Sequence
  Description of Artificial Sequence: Synthetic oligonucleotide
agugaaaccaccagugugc

SEQ ID NO: 2871591 - RNA, 19 nt, Artificial Sequence
  Description of Artificial Sequence: Synthetic oligonucleotide
ucuuagagaagagugaaac

SEQ ID NO: 2871592 - RNA, 19 nt, Artificial Sequence
  Description of Artificial Sequence: Synthetic oligonucleotide
uaaucuuagagaagaguga

SEQ ID NO: 2871593 - RNA, 19 nt, Artificial Sequence
  Description of Artificial Sequence: Synthetic oligonucleotide
aagcuguaaucuuagagaa

SEQ ID NO: 2871594 - RNA, 19 nt, Artificial Sequence
  Description of Artificial Sequence: Synthetic oligonucleotide
aggacuugagauugcaugg

SEQ ID NO: 2871595 - RNA, 19 nt, Artificial Sequence
  Description of Artificial Sequence: Synthetic oligonucleotide
uguguaccagcuagaaugg

SEQ ID NO: 2871596 - RNA, 19 nt, Artificial Sequence
  Description of Artificial Sequence: Synthetic oligonucleotide
gaggacuugagauugcaug

SEQ ID NO: 2871597 - RNA, 19 nt, Artificial Sequence
  Description of Artificial Sequence: Synthetic oligonucleotide
aacagauugagccccugug

SEQ ID NO: 2871598 - RNA, 19 nt, Artificial Sequence
  Description of Artificial Sequence: Synthetic oligonucleotide
uggaaaguccagcagcucc

SEQ ID NO: 2871599 - RNA, 19 nt, Artificial Sequence
  Description of Artificial Sequence: Synthetic oligonucleotide
cacacuagcaacaagggca

SEQ ID NO: 2871600 - RNA, 19 nt, Artificial Sequence
  Description of Artificial Sequence: Synthetic oligonucleotide
auugcauggaaaguccagc

SEQ ID NO: 2871601 - RNA, 19 nt, Artificial Sequence
  Description of Artificial Sequence: Synthetic oligonucleotide
acaaggacaucaucuuagc

SEQ ID NO: 2871602 - RNA, 19 nt, Artificial Sequence
  Description of Artificial Sequence: Synthetic oligonucleotide
uguaccagcuagaauggug

SEQ ID NO: 2871603 - RNA, 19 nt, Artificial Sequence
  Description of Artificial Sequence: Synthetic oligonucleotide
aagagugaaaccaccagug

SEQ ID NO: 2871604 - RNA, 19 nt, Artificial Sequence
  Description of Artificial Sequence: Synthetic oligonucleotide
gaaaccaccagugugccug

SEQ ID NO: 2871605 - RNA, 19 nt, Artificial Sequence
  Description of Artificial Sequence: Synthetic oligonucleotide
aacaauuccuggcccagug

SEQ ID NO: 2871606 - RNA, 19 nt, Artificial Sequence
  Description of Artificial Sequence: Synthetic oligonucleotide
cuuagagaagagugaaacc

SEQ ID NO: 2871607 - RNA, 19 nt, Artificial Sequence
  Description of Artificial Sequence: Synthetic oligonucleotide
acagcagcuacagucaugg

SEQ ID NO: 2871608 - RNA, 19 nt, Artificial Sequence
  Description of Artificial Sequence: Synthetic oligonucleotide
aagcccacagcacuuagca

SEQ ID NO: 2871609 - RNA, 19 nt, Artificial Sequence
  Description of Artificial Sequence: Synthetic oligonucleotide
uccugcagagcccaagagg

SEQ ID NO: 2871610 - RNA, 19 nt, Artificial Sequence
  Description of Artificial Sequence: Synthetic oligonucleotide
gacaaggacaucaucuuag

SEQ ID NO: 2871611 - RNA, 19 nt, Artificial Sequence
  Description of Artificial Sequence: Synthetic oligonucleotide
agaagagugaaaccaccag

SEQ ID NO: 2871612 - RNA, 19 nt, Artificial Sequence
  Description of Artificial Sequence: Synthetic oligonucleotide
aaucuuagagaagagugaa

SEQ ID NO: 2871613 - RNA, 19 nt, Artificial Sequence
  Description of Artificial Sequence: Synthetic oligonucleotide
gaggcaacaauuccuggcc

SEQ ID NO: 2871614 - RNA, 19 nt, Artificial Sequence
  Description of Artificial Sequence: Synthetic oligonucleotide
auuccuggcccagugaagc

SEQ ID NO: 2871615 - RNA, 19 nt, Artificial Sequence
  Description of Artificial Sequence: Synthetic oligonucleotide
ugcagaguggccaccaagc

SEQ ID NO: 2871616 - RNA, 19 nt, Artificial Sequence
  Description of Artificial Sequence: Synthetic oligonucleotide
caguagagauuccaaauag

SEQ ID NO: 2871617 - RNA, 19 nt, Artificial Sequence
  Description of Artificial Sequence: Synthetic oligonucleotide
ugagauugcauggaaaguc

SEQ ID NO: 2871618 - RNA, 19 nt, Artificial Sequence
  Description of Artificial Sequence: Synthetic oligonucleotide
aacaguagccuuggcuucc

SEQ ID NO: 2871619 - RNA, 19 nt, Artificial Sequence
  Description of Artificial Sequence: Synthetic oligonucleotide
gagugaaaccaccagugug

SEQ ID NO: 2871620 - RNA, 19 nt, Artificial Sequence
  Description of Artificial Sequence: Synthetic oligonucleotide
aagugcagaugcuccagag

SEQ ID NO: 2871621 - RNA, 19 nt, Artificial Sequence
  Description of Artificial Sequence: Synthetic oligonucleotide
agaguggccaccaagccac

SEQ ID NO: 2871622 - RNA, 19 nt, Artificial Sequence
  Description of Artificial Sequence: Synthetic oligonucleotide
agaauggugccagagacug

SEQ ID NO: 2871623 - RNA, 19 nt, Artificial Sequence
  Description of Artificial Sequence: Synthetic oligonucleotide
agucugggcuaacagauug

SEQ ID NO: 2871624 - RNA, 19 nt, Artificial Sequence
  Description of Artificial Sequence: Synthetic oligonucleotide
agcagcuacagucauggcu

SEQ ID NO: 2871625 - RNA, 19 nt, Artificial Sequence
  Description of Artificial Sequence: Synthetic oligonucleotide
agccuuggcuuccaagugc

SEQ ID NO: 2871626 - RNA, 19 nt, Artificial Sequence
  Description of Artificial Sequence: Synthetic oligonucleotide
aacaagggcaguuccugca

SEQ ID NO: 2871627 - RNA, 19 nt, Artificial Sequence
  Description of Artificial Sequence: Synthetic oligonucleotide
cugaccacgccauggaugc

SEQ ID NO: 2871628 - RNA, 19 nt, Artificial Sequence
  Description of Artificial Sequence: Synthetic oligonucleotide
uagagaagagugaaaccac

SEQ ID NO: 2871629 - RNA, 19 nt, Artificial Sequence
  Description of Artificial Sequence: Synthetic oligonucleotide
agauugagccccuguguac

SEQ ID NO: 2871630 - RNA, 19 nt, Artificial Sequence
  Description of Artificial Sequence: Synthetic oligonucleotide
ucacacuagcaacaagggc

SEQ ID NO: 2871631 - RNA, 19 nt, Artificial Sequence
  Description of Artificial Sequence: Synthetic oligonucleotide
ugcauggaaaguccagcag

SEQ ID NO: 2871632 - RNA, 19 nt, Artificial Sequence
  Description of Artificial Sequence: Synthetic oligonucleotide
uuccaagugcagaugcucc

SEQ ID NO: 2871633 - RNA, 19 nt, Artificial Sequence
  Description of Artificial Sequence: Synthetic oligonucleotide
aguagagauuccaaauagg

SEQ ID NO: 2871634 - RNA, 19 nt, Artificial Sequence
  Description of Artificial Sequence: Synthetic oligonucleotide
aggguuggaacucccacag

SEQ ID NO: 2871635 - RNA, 19 nt, Artificial Sequence
  Description of Artificial Sequence: Synthetic oligonucleotide
aucaucuuagcugcuagag

SEQ ID NO: 2871636 - RNA, 19 nt, Artificial Sequence
  Description of Artificial Sequence: Synthetic oligonucleotide
guagagauuccaaauagga

SEQ ID NO: 2871637 - RNA, 19 nt, Artificial Sequence
  Description of Artificial Sequence: Synthetic oligonucleotide
ucaucuuagcugcuagaga

SEQ ID NO: 2871638 - RNA, 19 nt, Artificial Sequence
  Description of Artificial Sequence: Synthetic oligonucleotide
acaucaucuuagcugcuag

SEQ ID NO: 2871639 - RNA, 19 nt, Artificial Sequence
  Description of Artificial Sequence: Synthetic oligonucleotide
gagaggaggcaacaauucc

SEQ ID NO: 2871640 - RNA, 19 nt, Artificial Sequence
  Description of Artificial Sequence: Synthetic oligonucleotide
aaaccaccagugugccugc

SEQ ID NO: 2871641 - RNA, 19 nt, Artificial Sequence
  Description of Artificial Sequence: Synthetic oligonucleotide
cacagcacuuagcacaggg

SEQ ID NO: 2871642 - RNA, 19 nt, Artificial Sequence
  Description of Artificial Sequence: Synthetic oligonucleotide
cauggcuccaccaagcaca

SEQ ID NO: 2871643 - RNA, 19 nt, Artificial Sequence
  Description of Artificial Sequence: Synthetic oligonucleotide
gaugcuccagagcccaggg

SEQ ID NO: 2871644 - RNA, 19 nt, Artificial Sequence
  Description of Artificial Sequence: Synthetic oligonucleotide
gagauugcauggaaagucc

SEQ ID NO: 2871645 - RNA, 19 nt, Artificial Sequence
  Description of Artificial Sequence: Synthetic oligonucleotide
uagagaggaggcaacaauu

SEQ ID NO: 2871646 - RNA, 19 nt, Artificial Sequence
  Description of Artificial Sequence: Synthetic oligonucleotide
ucuuagcugcuagagagga

SEQ ID NO: 2871647 - RNA, 19 nt, Artificial Sequence
  Description of Artificial Sequence: Synthetic oligonucleotide
uugaccauggcugcugaag

SEQ ID NO: 2871648 - RNA, 19 nt, Artificial Sequence
  Description of Artificial Sequence: Synthetic oligonucleotide
uccaccaagcacagcaaca

SEQ ID NO: 2871649 - RNA, 19 nt, Artificial Sequence
  Description of Artificial Sequence: Synthetic oligonucleotide
uugcauggaaaguccagca

SEQ ID NO: 2871650 - RNA, 19 nt, Artificial Sequence
  Description of Artificial Sequence: Synthetic oligonucleotide
acagaugcccaucacacua

SEQ ID NO: 2871651 - RNA, 19 nt, Artificial Sequence
  Description of Artificial Sequence: Synthetic oligonucleotide
agaugcccaucacacuagc

SEQ ID NO: 2871652 - RNA, 19 nt, Artificial Sequence
  Description of Artificial Sequence: Synthetic oligonucleotide
ucugggcuaacagauugag

SEQ ID NO: 2871653 - RNA, 19 nt, Artificial Sequence
  Description of Artificial Sequence: Synthetic oligonucleotide
auucgcaauagcugacaag

SEQ ID NO: 2871654 - RNA, 19 nt, Artificial Sequence
  Description of Artificial Sequence: Synthetic oligonucleotide
aucacacuagcaacaaggg

SEQ ID NO: 2871655 - RNA, 19 nt, Artificial Sequence
  Description of Artificial Sequence: Synthetic oligonucleotide
gauugagccccuguguacc

SEQ ID NO: 2871656 - RNA, 19 nt, Artificial Sequence
  Description of Artificial Sequence: Synthetic oligonucleotide
guaccagcuagaauggugc

SEQ ID NO: 2871657 - RNA, 19 nt, Artificial Sequence
  Description of Artificial Sequence: Synthetic oligonucleotide
agagaggaggcaacaauuc

SEQ ID NO: 2871658 - RNA, 19 nt, Artificial Sequence
  Description of Artificial Sequence: Synthetic oligonucleotide
agucauggcuccaccaagc

SEQ ID NO: 2871659 - RNA, 19 nt, Artificial Sequence
  Description of Artificial Sequence: Synthetic oligonucleotide
gauugcauggaaaguccag

SEQ ID NO: 2871660 - RNA, 19 nt, Artificial Sequence
  Description of Artificial Sequence: Synthetic oligonucleotide
ugccccuccagcuuugacc

SEQ ID NO: 2871661 - RNA, 19 nt, Artificial Sequence
  Description of Artificial Sequence: Synthetic oligonucleotide
acagauugagccccugugu

SEQ ID NO: 2871662 - RNA, 19 nt, Artificial Sequence
  Description of Artificial Sequence: Synthetic oligonucleotide
ucccacugacugcagagug

SEQ ID NO: 2871663 - RNA, 19 nt, Artificial Sequence
  Description of Artificial Sequence: Synthetic oligonucleotide
uagcaacaagggcaguucc

SEQ ID NO: 2871664 - RNA, 19 nt, Artificial Sequence
  Description of Artificial Sequence: Synthetic oligonucleotide
aguagccuuggcuuccaag

SEQ ID NO: 2871665 - RNA, 19 nt, Artificial Sequence
  Description of Artificial Sequence: Synthetic oligonucleotide
agcagcucccacugacugc

SEQ ID NO: 2871666 - RNA, 19 nt, Artificial Sequence
  Description of Artificial Sequence: Synthetic oligonucleotide
augcccaucacacuagcaa

SEQ ID NO: 2871667 - RNA, 19 nt, Artificial Sequence
  Description of Artificial Sequence: Synthetic oligonucleotide
gaagagugaaaccaccagu

SEQ ID NO: 2871668 - RNA, 19 nt, Artificial Sequence
  Description of Artificial Sequence: Synthetic oligonucleotide
agugugccugcuccugacc

SEQ ID NO: 2871669 - RNA, 19 nt, Artificial Sequence
  Description of Artificial Sequence: Synthetic oligonucleotide
aguccagcagcucccacug

SEQ ID NO: 2871670 - RNA, 19 nt, Artificial Sequence
  Description of Artificial Sequence: Synthetic oligonucleotide
uagaauggugccagagacu

SEQ ID NO: 2871671 - RNA, 19 nt, Artificial Sequence
  Description of Artificial Sequence: Synthetic oligonucleotide
ugcccaucacacuagcaac

SEQ ID NO: 2871672 - RNA, 19 nt, Artificial Sequence
  Description of Artificial Sequence: Synthetic oligonucleotide
cacagcaacaguagccuug

SEQ ID NO: 2871673 - RNA, 19 nt, Artificial Sequence
  Description of Artificial Sequence: Synthetic oligonucleotide
ugcugaagcuguaaucuua

SEQ ID NO: 2871674 - RNA, 19 nt, Artificial Sequence
  Description of Artificial Sequence: Synthetic oligonucleotide
ugaagcccacagcacuuag

SEQ ID NO: 2871675 - RNA, 19 nt, Artificial Sequence
  Description of Artificial Sequence: Synthetic oligonucleotide
caagcacagcaacaguagc

SEQ ID NO: 2871676 - RNA, 19 nt, Artificial Sequence
  Description of Artificial Sequence: Synthetic oligonucleotide
agagugaaaccaccagugu

SEQ ID NO: 2871677 - RNA, 19 nt, Artificial Sequence
  Description of Artificial Sequence: Synthetic oligonucleotide
uaacagauugagccccugu

SEQ ID NO: 2871678 - RNA, 19 nt, Artificial Sequence
  Description of Artificial Sequence: Synthetic oligonucleotide
acaagggcaguuccugcag

SEQ ID NO: 2871679 - RNA, 19 nt, Artificial Sequence
  Description of Artificial Sequence: Synthetic oligonucleotide
agagacugccccuccagcu

SEQ ID NO: 2871680 - RNA, 19 nt, Artificial Sequence
  Description of Artificial Sequence: Synthetic oligonucleotide
gcauggaaaguccagcagc

SEQ ID NO: 2871681 - RNA, 19 nt, Artificial Sequence
  Description of Artificial Sequence: Synthetic oligonucleotide
ugacaaggacaucaucuua

SEQ ID NO: 2871682 - RNA, 19 nt, Artificial Sequence
  Description of Artificial Sequence: Synthetic oligonucleotide
gaugccaguagagauucca

SEQ ID NO: 2871683 - RNA, 19 nt, Artificial Sequence
  Description of Artificial Sequence: Synthetic oligonucleotide
gaggaggcaacaauuccug

SEQ ID NO: 2871684 - RNA, 19 nt, Artificial Sequence
  Description of Artificial Sequence: Synthetic oligonucleotide
acugacugcagaguggcca

SEQ ID NO: 2871685 - RNA, 19 nt, Artificial Sequence
  Description of Artificial Sequence: Synthetic oligonucleotide
uugagauugcauggaaagu

SEQ ID NO: 2871686 - RNA, 19 nt, Artificial Sequence
  Description of Artificial Sequence: Synthetic oligonucleotide
aagaggacuugagauugca

SEQ ID NO: 2871687 - RNA, 19 nt, Artificial Sequence
  Description of Artificial Sequence: Synthetic oligonucleotide
uagccuuggcuuccaagug

SEQ ID NO: 2871688 - RNA, 19 nt, Artificial Sequence
  Description of Artificial Sequence: Synthetic oligonucleotide
ggaggcaacaauuccuggc

SEQ ID NO: 2871689 - RNA, 19 nt, Artificial Sequence
  Description of Artificial Sequence: Synthetic oligonucleotide
uccaagugcagaugcucca

SEQ ID NO: 2871690 - RNA, 19 nt, Artificial Sequence
  Description of Artificial Sequence: Synthetic oligonucleotide
uggaugccaguagagauuc

SEQ ID NO: 2871691 - RNA, 19 nt, Artificial Sequence
  Description of Artificial Sequence: Synthetic oligonucleotide
accagccgcaacuccgccc

SEQ ID NO: 2871692 - RNA, 19 nt, Artificial Sequence
  Description of Artificial Sequence: Synthetic oligonucleotide
agcacagcaacaguagccu

SEQ ID NO: 2871693 - RNA, 19 nt, Artificial Sequence
  Description of Artificial Sequence: Synthetic oligonucleotide
aggaggcaacaauuccugg

SEQ ID NO: 2871694 - RNA, 19 nt, Artificial Sequence
  Description of Artificial Sequence: Synthetic oligonucleotide
ugccaguagagauuccaaa

SEQ ID NO: 2871695 - RNA, 19 nt, Artificial Sequence
  Description of Artificial Sequence: Synthetic oligonucleotide
aauuccuggcccagugaag

SEQ ID NO: 2871696 - RNA, 19 nt, Artificial Sequence
  Description of Artificial Sequence: Synthetic oligonucleotide
uggugccagagacugcccc

SEQ ID NO: 2871697 - RNA, 19 nt, Artificial Sequence
  Description of Artificial Sequence: Synthetic oligonucleotide
ugcagagcccaagaggacu

SEQ ID NO: 2871698 - RNA, 19 nt, Artificial Sequence
  Description of Artificial Sequence: Synthetic oligonucleotide
gagaagagugaaaccacca

SEQ ID NO: 2871699 - RNA, 19 nt, Artificial Sequence
  Description of Artificial Sequence: Synthetic oligonucleotide
agcuagaauggugccagag

SEQ ID NO: 2871700 - RNA, 19 nt, Artificial Sequence
  Description of Artificial Sequence: Synthetic oligonucleotide
acacuagcaacaagggcag

SEQ ID NO: 2871701 - RNA, 19 nt, Artificial Sequence
  Description of Artificial Sequence: Synthetic oligonucleotide
ucgcaauagcugacaagga

SEQ ID NO: 2871702 - RNA, 19 nt, Artificial Sequence
  Description of Artificial Sequence: Synthetic oligonucleotide
caacaagggcaguuccugc

SEQ ID NO: 2871703 - RNA, 19 nt, Artificial Sequence
  Description of Artificial Sequence: Synthetic oligonucleotide
uagcugcuagagaggaggc

SEQ ID NO: 2871704 - RNA, 19 nt, Artificial Sequence
  Description of Artificial Sequence: Synthetic oligonucleotide
uggccaccaagccaccagc

SEQ ID NO: 2871705 - RNA, 19 nt, Artificial Sequence
  Description of Artificial Sequence: Synthetic oligonucleotide
guagccuuggcuuccaagu

SEQ ID NO: 2871706 - RNA, 19 nt, Artificial Sequence
  Description of Artificial Sequence: Synthetic oligonucleotide
acagcacuuagcacagggg

SEQ ID NO: 2871707 - RNA, 19 nt, Artificial Sequence
  Description of Artificial Sequence: Synthetic oligonucleotide
cuuagcugcuagagaggag

SEQ ID NO: 2871708 - RNA, 19 nt, Artificial Sequence
  Description of Artificial Sequence: Synthetic oligonucleotide
cugggcuaacagauugagc

SEQ ID NO: 2871709 - RNA, 19 nt, Artificial Sequence
  Description of Artificial Sequence: Synthetic oligonucleotide
agcccaagaggacuugaga

SEQ ID NO: 2871710 - RNA, 19 nt, Artificial Sequence
  Description of Artificial Sequence: Synthetic oligonucleotide
gggcacagcagcuacaguc

SEQ ID NO: 2871711 - RNA, 19 nt, Artificial Sequence
  Description of Artificial Sequence: Synthetic oligonucleotide
cuagcaacaagggcaguuc

SEQ ID NO: 2871712 - RNA, 19 nt, Artificial Sequence
  Description of Artificial Sequence: Synthetic oligonucleotide
cagaugcccaucacacuag

SEQ ID NO: 2871713 - RNA, 19 nt, Artificial Sequence
  Description of Artificial Sequence: Synthetic oligonucleotide
aucuuagcugcuagagagg

SEQ ID NO: 2871714 - RNA, 19 nt, Artificial Sequence
  Description of Artificial Sequence: Synthetic oligonucleotide
uaccagcuagaauggugcc

SEQ ID NO: 2871715 - RNA, 19 nt, Artificial Sequence
  Description of Artificial Sequence: Synthetic oligonucleotide
acaauuccuggcccaguga

SEQ ID NO: 2871716 - RNA, 19 nt, Artificial Sequence
  Description of Artificial Sequence: Synthetic oligonucleotide
caagaggacuugagauugc

SEQ ID NO: 2871717 - RNA, 19 nt, Artificial Sequence
  Description of Artificial Sequence: Synthetic oligonucleotide
cuuccaagugcagaugcuc

SEQ ID NO: 2871718 - RNA, 19 nt, Artificial Sequence
  Description of Artificial Sequence: Synthetic oligonucleotide
cagucauggcuccaccaag

SEQ ID NO: 2871719 - RNA, 19 nt, Artificial Sequence
  Description of Artificial Sequence: Synthetic oligonucleotide
ggcuuccaagugcagaugc

SEQ ID NO: 2871720 - RNA, 19 nt, Artificial Sequence
  Description of Artificial Sequence: Synthetic oligonucleotide
ccacagaugcccaucacac

SEQ ID NO: 2871721 - RNA, 19 nt, Artificial Sequence
  Description of Artificial Sequence: Synthetic oligonucleotide
ccaagcacagcaacaguag

SEQ ID NO: 2871722 - RNA, 19 nt, Artificial Sequence
  Description of Artificial Sequence: Synthetic oligonucleotide
caacaguagccuuggcuuc

SEQ ID NO: 2871723 - RNA, 19 nt, Artificial Sequence
  Description of Artificial Sequence: Synthetic oligonucleotide
cuacagucauggcuccacc

SEQ ID NO: 2871724 - RNA, 19 nt, Artificial Sequence
  Description of Artificial Sequence: Synthetic oligonucleotide
gacuugagauugcauggaa

SEQ ID NO: 2871725 - RNA, 19 nt, Artificial Sequence
  Description of Artificial Sequence: Synthetic oligonucleotide
cagcuuugaccauggcugc

SEQ ID NO: 2871726 - RNA, 19 nt, Artificial Sequence
  Description of Artificial Sequence: Synthetic oligonucleotide
ugagccccuguguaccagc

SEQ ID NO: 2871727 - RNA, 19 nt, Artificial Sequence
  Description of Artificial Sequence: Synthetic oligonucleotide
gcaauagcugacaaggaca

SEQ ID NO: 2871728 - RNA, 19 nt, Artificial Sequence
  Description of Artificial Sequence: Synthetic oligonucleotide
ugcuagagaggaggcaaca

SEQ ID NO: 2871729 - RNA, 19 nt, Artificial Sequence
  Description of Artificial Sequence: Synthetic oligonucleotide
guuggaacucccacagaug

SEQ ID NO: 2871730 - RNA, 19 nt, Artificial Sequence
  Description of Artificial Sequence: Synthetic oligonucleotide
aagccaccagccgcaacuc

SEQ ID NO: 2871731 - RNA, 19 nt, Artificial Sequence
  Description of Artificial Sequence: Synthetic oligonucleotide
ccaagaggacuugagauug

SEQ ID NO: 2871732 - RNA, 19 nt, Artificial Sequence
  Description of Artificial Sequence: Synthetic oligonucleotide
accaccagugugccugcuc

SEQ ID NO: 2871733 - RNA, 19 nt, Artificial Sequence
  Description of Artificial Sequence: Synthetic oligonucleotide
acgccauggaugccaguag

SEQ ID NO: 2871734 - RNA, 19 nt, Artificial Sequence
  Description of Artificial Sequence: Synthetic oligonucleotide
gcagcuacagucauggcuc

SEQ ID NO: 2871735 - RNA, 19 nt, Artificial Sequence
  Description of Artificial Sequence: Synthetic oligonucleotide
gcccacagcacuuagcaca

SEQ ID NO: 2871736 - RNA, 19 nt, Artificial Sequence
  Description of Artificial Sequence: Synthetic oligonucleotide
gaagcccacagcacuuagc

SEQ ID NO: 2871737 - RNA, 19 nt, Artificial Sequence
  Description of Artificial Sequence: Synthetic oligonucleotide
acuagcaacaagggcaguu

SEQ ID NO: 2871738 - RNA, 19 nt, Artificial Sequence
  Description of Artificial Sequence: Synthetic oligonucleotide
gcugaagcuguaaucuuag

SEQ ID NO: 2871739 - RNA, 19 nt, Artificial Sequence
  Description of Artificial Sequence: Synthetic oligonucleotide
ggcuaacagauugagcccc

SEQ ID NO: 2871740 - RNA, 19 nt, Artificial Sequence
  Description of Artificial Sequence: Synthetic oligonucleotide
gagcccagggcagucuggg

SEQ ID NO: 2871741 - RNA, 19 nt, Artificial Sequence
  Description of Artificial Sequence: Synthetic oligonucleotide
ccugcagagcccaagagga

SEQ ID NO: 2871742 - RNA, 19 nt, Artificial Sequence
  Description of Artificial Sequence: Synthetic oligonucleotide
agcuguaaucuuagagaag

SEQ ID NO: 2871743 - RNA, 19 nt, Artificial Sequence
  Description of Artificial Sequence: Synthetic oligonucleotide
cauggaugccaguagagau

SEQ ID NO: 2871744 - RNA, 19 nt, Artificial Sequence
  Description of Artificial Sequence: Synthetic oligonucleotide
caauuccuggcccagugaa

SEQ ID NO: 2871745 - RNA, 19 nt, Artificial Sequence
  Description of Artificial Sequence: Synthetic oligonucleotide
cauggaaaguccagcagcu

SEQ ID NO: 2871746 - RNA, 19 nt, Artificial Sequence
  Description of Artificial Sequence: Synthetic oligonucleotide
cuccaccaagcacagcaac

SEQ ID NO: 2871747 - RNA, 19 nt, Artificial Sequence
  Description of Artificial Sequence: Synthetic oligonucleotide
cagagacugccccuccagc

SEQ ID NO: 2871748 - RNA, 19 nt, Artificial Sequence
  Description of Artificial Sequence: Synthetic oligonucleotide
auugagccccuguguacca

SEQ ID NO: 2871749 - RNA, 19 nt, Artificial Sequence
  Description of Artificial Sequence: Synthetic oligonucleotide
ugugccugcuccugaccac

SEQ ID NO: 2871750 - RNA, 19 nt, Artificial Sequence
  Description of Artificial Sequence: Synthetic oligonucleotide
auggaaaguccagcagcuc

SEQ ID NO: 2871751 - RNA, 19 nt, Artificial Sequence
  Description of Artificial Sequence: Synthetic oligonucleotide
acucccacagaugcccauc

SEQ ID NO: 2871752 - RNA, 19 nt, Artificial Sequence
  Description of Artificial Sequence: Synthetic oligonucleotide
aacucccacagaugcccau

SEQ ID NO: 2871753 - RNA, 19 nt, Artificial Sequence
  Description of Artificial Sequence: Synthetic oligonucleotide
gagcccaagaggacuugag

SEQ ID NO: 2871754 - RNA, 19 nt, Artificial Sequence
  Description of Artificial Sequence: Synthetic oligonucleotide
agauugcauggaaagucca

SEQ ID NO: 2871755 - RNA, 19 nt, Artificial Sequence
  Description of Artificial Sequence: Synthetic oligonucleotide
acuugagauugcauggaaa

SEQ ID NO: 2871756 - RNA, 19 nt, Artificial Sequence
  Description of Artificial Sequence: Synthetic oligonucleotide
ugaaaccaccagugugccu

SEQ ID NO: 2871757 - RNA, 19 nt, Artificial Sequence
  Description of Artificial Sequence: Synthetic oligonucleotide
gggcuaacagauugagccc

SEQ ID NO: 2871758 - RNA, 19 nt, Artificial Sequence
  Description of Artificial Sequence: Synthetic oligonucleotide
cugcuagagaggaggcaac

SEQ ID NO: 2871759 - RNA, 19 nt, Artificial Sequence
  Description of Artificial Sequence: Synthetic oligonucleotide
uggcugcugaagcuguaau

SEQ ID NO: 2871760 - RNA, 19 nt, Artificial Sequence
  Description of Artificial Sequence: Synthetic oligonucleotide
agcccagggcagucugggc

SEQ ID NO: 2871761 - RNA, 19 nt, Artificial Sequence
  Description of Artificial Sequence: Synthetic oligonucleotide
ccagcuagaauggugccag

SEQ ID NO: 2871762 - RNA, 19 nt, Artificial Sequence
  Description of Artificial Sequence: Synthetic oligonucleotide
caauagcugacaaggacau

SEQ ID NO: 2871763 - RNA, 19 nt, Artificial Sequence
  Description of Artificial Sequence: Synthetic oligonucleotide
uuugaccauggcugcugaa

SEQ ID NO: 2871764 - RNA, 19 nt, Artificial Sequence
  Description of Artificial Sequence: Synthetic oligonucleotide
gcuagaauggugccagaga

SEQ ID NO: 2871765 - RNA, 19 nt, Artificial Sequence
  Description of Artificial Sequence: Synthetic oligonucleotide
gugugccugcuccugacca

SEQ ID NO: 2871766 - RNA, 19 nt, Artificial Sequence
  Description of Artificial Sequence: Synthetic oligonucleotide
ggcccagugaagcccacag

SEQ ID NO: 2871767 - RNA, 19 nt, Artificial Sequence
  Description of Artificial Sequence: Synthetic oligonucleotide
caucaucuuagcugcuaga

SEQ ID NO: 2871768 - RNA, 19 nt, Artificial Sequence
  Description of Artificial Sequence: Synthetic oligonucleotide
accagcuagaauggugcca

SEQ ID NO: 2871769 - RNA, 19 nt, Artificial Sequence
  Description of Artificial Sequence: Synthetic oligonucleotide
ugccagagacugccccucc

SEQ ID NO: 2871770 - RNA, 19 nt, Artificial Sequence
  Description of Artificial Sequence: Synthetic oligonucleotide
gguuggaacucccacagau

SEQ ID NO: 2871771 - RNA, 19 nt, Artificial Sequence
  Description of Artificial Sequence: Synthetic oligonucleotide
gugccugcuccugaccacg

SEQ ID NO: 2871772 - RNA, 19 nt, Artificial Sequence
  Description of Artificial Sequence: Synthetic oligonucleotide
cagcuacagucauggcucc

SEQ ID NO: 2871773 - RNA, 19 nt, Artificial Sequence
  Description of Artificial Sequence: Synthetic oligonucleotide
caagccaccagccgcaacu

SEQ ID NO: 2871774 - RNA, 19 nt, Artificial Sequence
  Description of Artificial Sequence: Synthetic oligonucleotide
uccugaccacgccauggau

SEQ ID NO: 2871775 - RNA, 19 nt, Artificial Sequence
  Description of Artificial Sequence: Synthetic oligonucleotide
cagauugagccccugugua

SEQ ID NO: 2871776 - RNA, 19 nt, Artificial Sequence
  Description of Artificial Sequence: Synthetic oligonucleotide
gaccacgccauggaugcca

SEQ ID NO: 2871777 - RNA, 19 nt, Artificial Sequence
  Description of Artificial Sequence: Synthetic oligonucleotide
ccugaccacgccauggaug

SEQ ID NO: 2871778 - RNA, 19 nt, Artificial Sequence
  Description of Artificial Sequence: Synthetic oligonucleotide
cauucgcaauagcugacaa

SEQ ID NO: 2871779 - RNA, 19 nt, Artificial Sequence
  Description of Artificial Sequence: Synthetic oligonucleotide
gccaccaagccaccagccg

SEQ ID NO: 2871780 - RNA, 19 nt, Artificial Sequence
  Description of Artificial Sequence: Synthetic oligonucleotide
ccaccaagccaccagccgc

SEQ ID NO: 2871781 - RNA, 19 nt, Artificial Sequence
  Description of Artificial Sequence: Synthetic oligonucleotide
gcaacaguagccuuggcuu

SEQ ID NO: 2871782 - RNA, 19 nt, Artificial Sequence
  Description of Artificial Sequence: Synthetic oligonucleotide
ggcagucugggcuaacaga

SEQ ID NO: 2871783 - RNA, 19 nt, Artificial Sequence
  Description of Artificial Sequence: Synthetic oligonucleotide
ucccacagaugcccaucac

SEQ ID NO: 2871784 - RNA, 19 nt, Artificial Sequence
  Description of Artificial Sequence: Synthetic oligonucleotide
ugcuccugaccacgccaug

SEQ ID NO: 2871785 - RNA, 19 nt, Artificial Sequence
  Description of Artificial Sequence: Synthetic oligonucleotide
gaauggugccagagacugc

SEQ ID NO: 2871786 - RNA, 19 nt, Artificial Sequence
  Description of Artificial Sequence: Synthetic oligonucleotide
gaugcccaucacacuagca

SEQ ID NO: 2871787 - RNA, 19 nt, Artificial Sequence
  Description of Artificial Sequence: Synthetic oligonucleotide
uugagccccuguguaccag

SEQ ID NO: 2871788 - RNA, 19 nt, Artificial Sequence
  Description of Artificial Sequence: Synthetic oligonucleotide
cgcaauagcugacaaggac

SEQ ID NO: 2871789 - RNA, 19 nt, Artificial Sequence
  Description of Artificial Sequence: Synthetic oligonucleotide
cagugugccugcuccugac

SEQ ID NO: 2871790 - RNA, 19 nt, Artificial Sequence
  Description of Artificial Sequence: Synthetic oligonucleotide
cccacugacugcagagugg

SEQ ID NO: 2871791 - RNA, 19 nt, Artificial Sequence
  Description of Artificial Sequence: Synthetic oligonucleotide
cuaacagauugagccccug

SEQ ID NO: 2871792 - RNA, 19 nt, Artificial Sequence
  Description of Artificial Sequence: Synthetic oligonucleotide
ccaccaagcacagcaacag

SEQ ID NO: 2871793 - RNA, 19 nt, Artificial Sequence
  Description of Artificial Sequence: Synthetic oligonucleotide
cuagagaggaggcaacaau

SEQ ID NO: 2871794 - RNA, 19 nt, Artificial Sequence
  Description of Artificial Sequence: Synthetic oligonucleotide
cuuugaccauggcugcuga

SEQ ID NO: 2871795 - RNA, 19 nt, Artificial Sequence
  Description of Artificial Sequence: Synthetic oligonucleotide
cugcagagcccaagaggac

SEQ ID NO: 2871796 - RNA, 19 nt, Artificial Sequence
  Description of Artificial Sequence: Synthetic oligonucleotide
aucuuagagaagagugaaa

SEQ ID NO: 2871797 - RNA, 19 nt, Artificial Sequence
  Description of Artificial Sequence: Synthetic oligonucleotide
gcugcugaagcuguaaucu

SEQ ID NO: 2871798 - RNA, 19 nt, Artificial Sequence
  Description of Artificial Sequence: Synthetic oligonucleotide
auggaugccaguagagauu

SEQ ID NO: 2871799 - RNA, 19 nt, Artificial Sequence
  Description of Artificial Sequence: Synthetic oligonucleotide
agcucccacugacugcaga

SEQ ID NO: 2871800 - RNA, 19 nt, Artificial Sequence
  Description of Artificial Sequence: Synthetic oligonucleotide
gcuccugaccacgccaugg

SEQ ID NO: 2871801 - RNA, 19 nt, Artificial Sequence
  Description of Artificial Sequence: Synthetic oligonucleotide
ggcugcugaagcuguaauc

SEQ ID NO: 2871802 - RNA, 19 nt, Artificial Sequence
  Description of Artificial Sequence: Synthetic oligonucleotide
gcaacaauuccuggcccag

SEQ ID NO: 2871803 - RNA, 19 nt, Artificial Sequence
  Description of Artificial Sequence: Synthetic oligonucleotide
auggugccagagacugccc

SEQ ID NO: 2871804 - RNA, 19 nt, Artificial Sequence
  Description of Artificial Sequence: Synthetic oligonucleotide
gggcagucugggcuaacag

SEQ ID NO: 2871805 - RNA, 19 nt, Artificial Sequence
  Description of Artificial Sequence: Synthetic oligonucleotide
ccagccgcaacuccgcccc

SEQ ID NO: 2871806 - RNA, 19 nt, Artificial Sequence
  Description of Artificial Sequence: Synthetic oligonucleotide
agugaagcccacagcacuu

SEQ ID NO: 2871807 - RNA, 19 nt, Artificial Sequence
  Description of Artificial Sequence: Synthetic oligonucleotide
cccacagcacuuagcacag

SEQ ID NO: 2871808 - RNA, 19 nt, Artificial Sequence
  Description of Artificial Sequence: Synthetic oligonucleotide
accagugugccugcuccug

SEQ ID NO: 2871809 - RNA, 19 nt, Artificial Sequence
  Description of Artificial Sequence: Synthetic oligonucleotide
agacugccccuccagcuuu

SEQ ID NO: 2871810 - RNA, 19 nt, Artificial Sequence
  Description of Artificial Sequence: Synthetic oligonucleotide
gccccuccagcuuugacca

SEQ ID NO: 2871811 - RNA, 19 nt, Artificial Sequence
  Description of Artificial Sequence: Synthetic oligonucleotide
caagugcagaugcuccaga

SEQ ID NO: 2871812 - RNA, 19 nt, Artificial Sequence
  Description of Artificial Sequence: Synthetic oligonucleotide
agagcccaagaggacuuga

SEQ ID NO: 2871813 - RNA, 19 nt, Artificial Sequence
  Description of Artificial Sequence: Synthetic oligonucleotide
ccacugacugcagaguggc

SEQ ID NO: 2871814 - RNA, 19 nt, Artificial Sequence
  Description of Artificial Sequence: Synthetic oligonucleotide
gaccauggcugcugaagcu

SEQ ID NO: 2871815 - RNA, 19 nt, Artificial Sequence
  Description of Artificial Sequence: Synthetic oligonucleotide
cacugacugcagaguggcc

SEQ ID NO: 2871816 - RNA, 19 nt, Artificial Sequence
  Description of Artificial Sequence: Synthetic oligonucleotide
caccaagccaccagccgca

SEQ ID NO: 2871817 - RNA, 19 nt, Artificial Sequence
  Description of Artificial Sequence: Synthetic oligonucleotide
gacugcagaguggccacca

SEQ ID NO: 2871818 - RNA, 19 nt, Artificial Sequence
  Description of Artificial Sequence: Synthetic oligonucleotide
cagugaagcccacagcacu

SEQ ID NO: 2871819 - RNA, 19 nt, Artificial Sequence
  Description of Artificial Sequence: Synthetic oligonucleotide
cugacaaggacaucaucuu

SEQ ID NO: 2871820 - RNA, 19 nt, Artificial Sequence
  Description of Artificial Sequence: Synthetic oligonucleotide
ugacugcagaguggccacc

SEQ ID NO: 2871821 - RNA, 19 nt, Artificial Sequence
  Description of Artificial Sequence: Synthetic oligonucleotide
agcugcuagagaggaggca

SEQ ID NO: 2871822 - RNA, 19 nt, Artificial Sequence
  Description of Artificial Sequence: Synthetic oligonucleotide
gccauggaugccaguagag

SEQ ID NO: 2871823 - RNA, 19 nt, Artificial Sequence
  Description of Artificial Sequence: Synthetic oligonucleotide
caaggacaucaucuuagcu

SEQ ID NO: 2871824 - RNA, 19 nt, Artificial Sequence
  Description of Artificial Sequence: Synthetic oligonucleotide
gcugcuagagaggaggcaa

SEQ ID NO: 2871825 - RNA, 19 nt, Artificial Sequence
  Description of Artificial Sequence: Synthetic oligonucleotide
gcuuugaccauggcugcug

SEQ ID NO: 2871826 - RNA, 19 nt, Artificial Sequence
  Description of Artificial Sequence: Synthetic oligonucleotide
ccagugaagcccacagcac

SEQ ID NO: 2871827 - RNA, 19 nt, Artificial Sequence
  Description of Artificial Sequence: Synthetic oligonucleotide
gcuacagucauggcuccac

SEQ ID NO: 2871828 - RNA, 19 nt, Artificial Sequence
  Description of Artificial Sequence: Synthetic oligonucleotide
agggcagucugggcuaaca

SEQ ID NO: 2871829 - RNA, 19 nt, Artificial Sequence
  Description of Artificial Sequence: Synthetic oligonucleotide
cucccacagaugcccauca

SEQ ID NO: 2871830 - RNA, 19 nt, Artificial Sequence
  Description of Artificial Sequence: Synthetic oligonucleotide
ggcacagcagcuacaguca

SEQ ID NO: 2871831 - RNA, 19 nt, Artificial Sequence
  Description of Artificial Sequence: Synthetic oligonucleotide
agaggacuugagauugcau

SEQ ID NO: 2871832 - RNA, 19 nt, Artificial Sequence
  Description of Artificial Sequence: Synthetic oligonucleotide
ccccauucgcaauagcuga

SEQ ID NO: 2871833 - RNA, 19 nt, Artificial Sequence
  Description of Artificial Sequence: Synthetic oligonucleotide
acugcagaguggccaccaa

SEQ ID NO: 2871834 - RNA, 19 nt, Artificial Sequence
  Description of Artificial Sequence: Synthetic oligonucleotide
gccaguagagauuccaaau

SEQ ID NO: 2871835 - RNA, 19 nt, Artificial Sequence
  Description of Artificial Sequence: Synthetic oligonucleotide
ccaguagagauuccaaaua

SEQ ID NO: 2871836 - RNA, 19 nt, Artificial Sequence
  Description of Artificial Sequence: Synthetic oligonucleotide
caagggcaguuccugcaga

SEQ ID NO: 2871837 - RNA, 19 nt, Artificial Sequence
  Description of Artificial Sequence: Synthetic oligonucleotide
auggcugcugaagcuguaa

SEQ ID NO: 2871838 - RNA, 19 nt, Artificial Sequence
  Description of Artificial Sequence: Synthetic oligonucleotide
cuccugaccacgccaugga

SEQ ID NO: 2871839 - RNA, 19 nt, Artificial Sequence
  Description of Artificial Sequence: Synthetic oligonucleotide
gcccaagaggacuugagau

SEQ ID NO: 2871840 - RNA, 19 nt, Artificial Sequence
  Description of Artificial Sequence: Synthetic oligonucleotide
gaacucccacagaugccca

SEQ ID NO: 2871841 - RNA, 19 nt, Artificial Sequence
  Description of Artificial Sequence: Synthetic oligonucleotide
ggacuugagauugcaugga

SEQ ID NO: 2871842 - RNA, 19 nt, Artificial Sequence
  Description of Artificial Sequence: Synthetic oligonucleotide
cacgccauggaugccagua

SEQ ID NO: 2871843 - RNA, 19 nt, Artificial Sequence
  Description of Artificial Sequence: Synthetic oligonucleotide
ggcaguuccugcagagccc

SEQ ID NO: 2871844 - RNA, 19 nt, Artificial Sequence
  Description of Artificial Sequence: Synthetic oligonucleotide
ccaucacacuagcaacaag

SEQ ID NO: 2871845 - RNA, 19 nt, Artificial Sequence
  Description of Artificial Sequence: Synthetic oligonucleotide
cagcagcuacagucauggc

SEQ ID NO: 2871846 - RNA, 19 nt, Artificial Sequence
  Description of Artificial Sequence: Synthetic oligonucleotide
acaguagccuuggcuucca

SEQ ID NO: 2871847 - RNA, 19 nt, Artificial Sequence
  Description of Artificial Sequence: Synthetic oligonucleotide
gucugggcuaacagauuga

SEQ ID NO: 2871848 - RNA, 19 nt, Artificial Sequence
  Description of Artificial Sequence: Synthetic oligonucleotide
accacgccauggaugccag

SEQ ID NO: 2871849 - RNA, 19 nt, Artificial Sequence
  Description of Artificial Sequence: Synthetic oligonucleotide
cccauucgcaauagcugac

SEQ ID NO: 2871850 - RNA, 19 nt, Artificial Sequence
  Description of Artificial Sequence: Synthetic oligonucleotide
cccacagaugcccaucaca

SEQ ID NO: 2871851 - RNA, 19 nt, Artificial Sequence
  Description of Artificial Sequence: Synthetic oligonucleotide
gcagucugggcuaacagau

SEQ ID NO: 2871852 - RNA, 19 nt, Artificial Sequence
  Description of Artificial Sequence: Synthetic oligonucleotide
ugaccacgccauggaugcc

SEQ ID NO: 2871853 - RNA, 19 nt, Artificial Sequence
  Description of Artificial Sequence: Synthetic oligonucleotide
agcuacagucauggcucca

SEQ ID NO: 2871854 - RNA, 19 nt, Artificial Sequence
  Description of Artificial Sequence: Synthetic oligonucleotide
aaccaccagugugccugcu

SEQ ID NO: 2871855 - RNA, 19 nt, Artificial Sequence
  Description of Artificial Sequence: Synthetic oligonucleotide
cacagaugcccaucacacu

SEQ ID NO: 2871856 - RNA, 19 nt, Artificial Sequence
  Description of Artificial Sequence: Synthetic oligonucleotide
gacugccccuccagcuuug

SEQ ID NO: 2871857 - RNA, 19 nt, Artificial Sequence
  Description of Artificial Sequence: Synthetic oligonucleotide
uggcccagugaagcccaca

SEQ ID NO: 2871858 - RNA, 19 nt, Artificial Sequence
  Description of Artificial Sequence: Synthetic oligonucleotide
gugccagagacugccccuc

SEQ ID NO: 2871859 - RNA, 19 nt, Artificial Sequence
  Description of Artificial Sequence: Synthetic oligonucleotide
gcccagugaagcccacagc

SEQ ID NO: 2871860 - RNA, 19 nt, Artificial Sequence
  Description of Artificial Sequence: Synthetic oligonucleotide
cagagcccaagaggacuug

SEQ ID NO: 2871861 - RNA, 19 nt, Artificial Sequence
  Description of Artificial Sequence: Synthetic oligonucleotide
gcccaucacacuagcaaca

SEQ ID NO: 2871862 - RNA, 19 nt, Artificial Sequence
  Description of Artificial Sequence: Synthetic oligonucleotide
cugccccuccagcuuugac

SEQ ID NO: 2871863 - RNA, 19 nt, Artificial Sequence
  Description of Artificial Sequence: Synthetic oligonucleotide
gccuuggcuuccaagugca

SEQ ID NO: 2871864 - RNA, 19 nt, Artificial Sequence
  Description of Artificial Sequence: Synthetic oligonucleotide
ggccaccaagccaccagcc

SEQ ID NO: 2871865 - RNA, 19 nt, Artificial Sequence
  Description of Artificial Sequence: Synthetic oligonucleotide
gcuagagaggaggcaacaa

SEQ ID NO: 2871866 - RNA, 19 nt, Artificial Sequence
  Description of Artificial Sequence: Synthetic oligonucleotide
ccauggaugccaguagaga

SEQ ID NO: 2871867 - RNA, 19 nt, Artificial Sequence
  Description of Artificial Sequence: Synthetic oligonucleotide
ccugcuccugaccacgcca

SEQ ID NO: 2871868 - RNA, 19 nt, Artificial Sequence
  Description of Artificial Sequence: Synthetic oligonucleotide
ggugccagagacugccccu

SEQ ID NO: 2871869 - RNA, 19 nt, Artificial Sequence
  Description of Artificial Sequence: Synthetic oligonucleotide
gugaagcccacagcacuua

SEQ ID NO: 2871870 - RNA, 19 nt, Artificial Sequence
  Description of Artificial Sequence: Synthetic oligonucleotide
agccccuguguaccagcua

SEQ ID NO: 2871871 - RNA, 19 nt, Artificial Sequence
  Description of Artificial Sequence: Synthetic oligonucleotide
cauggcugcugaagcugua

SEQ ID NO: 2871872 - RNA, 19 nt, Artificial Sequence
  Description of Artificial Sequence: Synthetic oligonucleotide
cuggcccagugaagcccac

SEQ ID NO: 2871873 - RNA, 19 nt, Artificial Sequence
  Description of Artificial Sequence: Synthetic oligonucleotide
ccuuggcuuccaagugcag

SEQ ID NO: 2871874 - RNA, 19 nt, Artificial Sequence
  Description of Artificial Sequence: Synthetic oligonucleotide
caccaagcacagcaacagu

SEQ ID NO: 2871875 - RNA, 19 nt, Artificial Sequence
  Description of Artificial Sequence: Synthetic oligonucleotide
cugcugaagcuguaaucuu

SEQ ID NO: 2871876 - RNA, 19 nt, Artificial Sequence
  Description of Artificial Sequence: Synthetic oligonucleotide
ccauucgcaauagcugaca

SEQ ID NO: 2871877 - RNA, 19 nt, Artificial Sequence
  Description of Artificial Sequence: Synthetic oligonucleotide
gcccagggcagucugggcu

SEQ ID NO: 2871878 - RNA, 19 nt, Artificial Sequence
  Description of Artificial Sequence: Synthetic oligonucleotide
gccugcuccugaccacgcc

SEQ ID NO: 2871879 - RNA, 19 nt, Artificial Sequence
  Description of Artificial Sequence: Synthetic oligonucleotide
ccuggcccagugaagccca

SEQ ID NO: 2871880 - RNA, 19 nt, Artificial Sequence
  Description of Artificial Sequence: Synthetic oligonucleotide
ggguuggaacucccacaga

SEQ ID NO: 2871881 - RNA, 19 nt, Artificial Sequence
  Description of Artificial Sequence: Synthetic oligonucleotide
uggcuccaccaagcacagc

SEQ ID NO: 2871882 - RNA, 19 nt, Artificial Sequence
  Description of Artificial Sequence: Synthetic oligonucleotide
gccagagacugccccucca

SEQ ID NO: 2871883 - RNA, 19 nt, Artificial Sequence
  Description of Artificial Sequence: Synthetic oligonucleotide
ggaugccaguagagauucc

SEQ ID NO: 2871884 - RNA, 19 nt, Artificial Sequence
  Description of Artificial Sequence: Synthetic oligonucleotide
gagccccuguguaccagcu

SEQ ID NO: 2871885 - RNA, 19 nt, Artificial Sequence
  Description of Artificial Sequence: Synthetic oligonucleotide
cugcuccugaccacgccau

SEQ ID NO: 2871886 - RNA, 19 nt, Artificial Sequence
  Description of Artificial Sequence: Synthetic oligonucleotide
guguaccagcuagaauggu

SEQ ID NO: 2871887 - RNA, 19 nt, Artificial Sequence
  Description of Artificial Sequence: Synthetic oligonucleotide
caacaauuccuggcccagu

SEQ ID NO: 2871888 - RNA, 19 nt, Artificial Sequence
  Description of Artificial Sequence: Synthetic oligonucleotide
cccaagaggacuugagauu

SEQ ID NO: 2871889 - RNA, 19 nt, Artificial Sequence
  Description of Artificial Sequence: Synthetic oligonucleotide
cucccacugacugcagagu

SEQ ID NO: 2871890 - RNA, 19 nt, Artificial Sequence
  Description of Artificial Sequence: Synthetic oligonucleotide
cccaucacacuagcaacaa

SEQ ID NO: 2871891 - RNA, 19 nt, Artificial Sequence
  Description of Artificial Sequence: Synthetic oligonucleotide
ccaagccaccagccgcaac

SEQ ID NO: 2871892 - RNA, 19 nt, Artificial Sequence
  Description of Artificial Sequence: Synthetic oligonucleotide
cagucugggcuaacagauu

SEQ ID NO: 2871893 - RNA, 19 nt, Artificial Sequence
  Description of Artificial Sequence: Synthetic oligonucleotide
cgccauggaugccaguaga

SEQ ID NO: 2871894 - RNA, 19 nt, Artificial Sequence
  Description of Artificial Sequence: Synthetic oligonucleotide
cagggcagucugggcuaac

SEQ ID NO: 2871895 - RNA, 19 nt, Artificial Sequence
  Description of Artificial Sequence: Synthetic oligonucleotide
gcuaacagauugagccccu

SEQ ID NO: 2871896 - RNA, 19 nt, Artificial Sequence
  Description of Artificial Sequence: Synthetic oligonucleotide
cccuguguaccagcuagaa

SEQ ID NO: 2871897 - RNA, 19 nt, Artificial Sequence
  Description of Artificial Sequence: Synthetic oligonucleotide
caguagccuuggcuuccaa

SEQ ID NO: 2871898 - RNA, 19 nt, Artificial Sequence
  Description of Artificial Sequence: Synthetic oligonucleotide
ccacagcacuuagcacagg

SEQ ID NO: 2871899 - RNA, 19 nt, Artificial Sequence
  Description of Artificial Sequence: Synthetic oligonucleotide
ccccuguguaccagcuaga

SEQ ID NO: 2871900 - RNA, 19 nt, Artificial Sequence
  Description of Artificial Sequence: Synthetic oligonucleotide
ccuguguaccagcuagaau

SEQ ID NO: 2871901 - RNA, 19 nt, Artificial Sequence
  Description of Artificial Sequence: Synthetic oligonucleotide
ccagcagcucccacugacu

SEQ ID NO: 2871902 - RNA, 19 nt, Artificial Sequence
  Description of Artificial Sequence: Synthetic oligonucleotide
gcacagcaacaguagccuu

SEQ ID NO: 2871903 - RNA, 19 nt, Artificial Sequence
  Description of Artificial Sequence: Synthetic oligonucleotide
ggggcacagcagcuacagu

SEQ ID NO: 2871904 - RNA, 19 nt, Artificial Sequence
  Description of Artificial Sequence: Synthetic oligonucleotide
cacuagcaacaagggcagu

SEQ ID NO: 2871905 - RNA, 19 nt, Artificial Sequence
  Description of Artificial Sequence: Synthetic oligonucleotide
ccagggcagucugggcuaa

SEQ ID NO: 2871906 - RNA, 19 nt, Artificial Sequence
  Description of Artificial Sequence: Synthetic oligonucleotide
ccacgccauggaugccagu

SEQ ID NO: 2871907 - RNA, 19 nt, Artificial Sequence
  Description of Artificial Sequence: Synthetic oligonucleotide
ccccuccagcuuugaccau

SEQ ID NO: 2871908 - RNA, 19 nt, Artificial Sequence
  Description of Artificial Sequence: Synthetic oligonucleotide
aaaauuuacagauacaaac

SEQ ID NO: 2871909 - RNA, 19 nt, Artificial Sequence
  Description of Artificial Sequence: Synthetic oligonucleotide
aaaacauaagacuuacccc

SEQ ID NO: 2871910 - RNA, 19 nt, Artificial Sequence
  Description of Artificial Sequence: Synthetic oligonucleotide
ucaauuauaaaacauguca

SEQ ID NO: 2871911 - RNA, 19 nt, Artificial Sequence
  Description of Artificial Sequence: Synthetic oligonucleotide
aacaucuuaaaauuuacag

SEQ ID NO: 2871912 - RNA, 19 nt, Artificial Sequence
  Description of Artificial Sequence: Synthetic oligonucleotide
aaagaaaacaucuuaaaau

SEQ ID NO: 2871913 - RNA, 19 nt, Artificial Sequence
  Description of Artificial Sequence: Synthetic oligonucleotide
ucuucuaacacuuucacug

SEQ ID NO: 2871914 - RNA, 19 nt, Artificial Sequence
  Description of Artificial Sequence: Synthetic oligonucleotide
aagaauucucuauaaaauc

SEQ ID NO: 2871915 - RNA, 19 nt, Artificial Sequence
  Description of Artificial Sequence: Synthetic oligonucleotide
uuauucacaaaacauaaga

SEQ ID NO: 2871916 - RNA, 19 nt, Artificial Sequence
  Description of Artificial Sequence: Synthetic oligonucleotide
aaacauaagacuuaccccu

SEQ ID NO: 2871917 - RNA, 19 nt, Artificial Sequence
  Description of Artificial Sequence: Synthetic oligonucleotide
uuuacagauacaaacaggu

SEQ ID NO: 2871918 - RNA, 19 nt, Artificial Sequence
  Description of Artificial Sequence: Synthetic oligonucleotide
ucuuaaaauuuacagauac

SEQ ID NO: 2871919 - RNA, 19 nt, Artificial Sequence
  Description of Artificial Sequence: Synthetic oligonucleotide
uucucuauaaaauccaucc

SEQ ID NO: 2871920 - RNA, 19 nt, Artificial Sequence
  Description of Artificial Sequence: Synthetic oligonucleotide
gucaucaucgcuuuuaugg

SEQ ID NO: 2871921 - RNA, 19 nt, Artificial Sequence
  Description of Artificial Sequence: Synthetic oligonucleotide
acaaacagguacuuuauac

SEQ ID NO: 2871922 - RNA, 19 nt, Artificial Sequence
  Description of Artificial Sequence: Synthetic oligonucleotide
uuucccuugacuuggagcg

SEQ ID NO: 2871923 - RNA, 19 nt, Artificial Sequence
  Description of Artificial Sequence: Synthetic oligonucleotide
ucuuugauucucuagaaug

SEQ ID NO: 2871924 - RNA, 19 nt, Artificial Sequence
  Description of Artificial Sequence: Synthetic oligonucleotide
aagaaaacaucuuaaaauu

SEQ ID NO: 2871925 - RNA, 19 nt, Artificial Sequence
  Description of Artificial Sequence: Synthetic oligonucleotide
agaauucucuauaaaaucc

SEQ ID NO: 2871926 - RNA, 19 nt, Artificial Sequence
  Description of Artificial Sequence: Synthetic oligonucleotide
uacagauacaaacagguac

SEQ ID NO: 2871927 - RNA, 19 nt, Artificial Sequence
  Description of Artificial Sequence: Synthetic oligonucleotide
uuaaaauuuacagauacaa

SEQ ID NO: 2871928 - RNA, 19 nt, Artificial Sequence
  Description of Artificial Sequence: Synthetic oligonucleotide
aaaagaaucucuucuuucu

SEQ ID NO: 2871929 - RNA, 19 nt, Artificial Sequence
  Description of Artificial Sequence: Synthetic oligonucleotide
uucucuagaauguucagag

SEQ ID NO: 2871930 - RNA, 19 nt, Artificial Sequence
  Description of Artificial Sequence: Synthetic oligonucleotide
gaauguaaggcauacucag

SEQ ID NO: 2871931 - RNA, 19 nt, Artificial Sequence
  Description of Artificial Sequence: Synthetic oligonucleotide
ugucaauuauaaaacaugu

SEQ ID NO: 2871932 - RNA, 19 nt, Artificial Sequence
  Description of Artificial Sequence: Synthetic oligonucleotide
aauuauaaaacaugucaaa

SEQ ID NO: 2871933 - RNA, 19 nt, Artificial Sequence
  Description of Artificial Sequence: Synthetic oligonucleotide
agaugugucaauuauaaaa

SEQ ID NO: 2871934 - RNA, 19 nt, Artificial Sequence
  Description of Artificial Sequence: Synthetic oligonucleotide
uugaugauuuuacagaccu

SEQ ID NO: 2871935 - RNA, 19 nt, Artificial Sequence
  Description of Artificial Sequence: Synthetic oligonucleotide
auaaaauccauccauguaa

SEQ ID NO: 2871936 - RNA, 19 nt, Artificial Sequence
  Description of Artificial Sequence: Synthetic oligonucleotide
gaauguucagaguaucugg

SEQ ID NO: 2871937 - RNA, 19 nt, Artificial Sequence
  Description of Artificial Sequence: Synthetic oligonucleotide
ucuauaaaauccauccaug

SEQ ID NO: 2871938 - RNA, 19 nt, Artificial Sequence
  Description of Artificial Sequence: Synthetic oligonucleotide
auucacaaaacauaagacu

SEQ ID NO: 2871939 - RNA, 19 nt, Artificial Sequence
  Description of Artificial Sequence: Synthetic oligonucleotide
uauucacaaaacauaagac

SEQ ID NO: 2871940 - RNA, 19 nt, Artificial Sequence
  Description of Artificial Sequence: Synthetic oligonucleotide
uucacaaaacauaagacuu

SEQ ID NO: 2871941 - RNA, 19 nt, Artificial Sequence
  Description of Artificial Sequence: Synthetic oligonucleotide
aaagaaucucuucuuucuc

SEQ ID NO: 2871942 - RNA, 19 nt, Artificial Sequence
  Description of Artificial Sequence: Synthetic oligonucleotide
uguucagaguaucugguag

SEQ ID NO: 2871943 - RNA, 19 nt, Artificial Sequence
  Description of Artificial Sequence: Synthetic oligonucleotide
ugagaugugucaauuauaa

SEQ ID NO: 2871944 - RNA, 19 nt, Artificial Sequence
  Description of Artificial Sequence: Synthetic oligonucleotide
gaugauuuuacagaccuug

SEQ ID NO: 2871945 - RNA, 19 nt, Artificial Sequence
  Description of Artificial Sequence: Synthetic oligonucleotide
uuuacagaccuugagaugu

SEQ ID NO: 2871946 - RNA, 19 nt, Artificial Sequence
  Description of Artificial Sequence: Synthetic oligonucleotide
aaauuuacagauacaaaca

SEQ ID NO: 2871947 - RNA, 19 nt, Artificial Sequence
  Description of Artificial Sequence: Synthetic oligonucleotide
uauacaagaauucucuaua

SEQ ID NO: 2871948 - RNA, 19 nt, Artificial Sequence
  Description of Artificial Sequence: Synthetic oligonucleotide
uuuauucacaaaacauaag

SEQ ID NO: 2871949 - RNA, 19 nt, Artificial Sequence
  Description of Artificial Sequence: Synthetic oligonucleotide
uucuugaugauuuuacaga

SEQ ID NO: 2871950 - RNA, 19 nt, Artificial Sequence
  Description of Artificial Sequence: Synthetic oligonucleotide
auuuuacagaccuugagau

SEQ ID NO: 2871951 - RNA, 19 nt, Artificial Sequence
  Description of Artificial Sequence: Synthetic oligonucleotide
ucuguugagacccuuuucu

SEQ ID NO: 2871952 - RNA, 19 nt, Artificial Sequence
  Description of Artificial Sequence: Synthetic oligonucleotide
ugauucucuagaauguuca

SEQ ID NO: 2871953 - RNA, 19 nt, Artificial Sequence
  Description of Artificial Sequence: Synthetic oligonucleotide
gaugugucaauuauaaaac

SEQ ID NO: 2871954 - RNA, 19 nt, Artificial Sequence
  Description of Artificial Sequence: Synthetic oligonucleotide
acaucuuaaaauuuacaga

SEQ ID NO: 2871955 - RNA, 19 nt, Artificial Sequence
  Description of Artificial Sequence: Synthetic oligonucleotide
ugauuuuacagaccuugag

SEQ ID NO: 2871956 - RNA, 19 nt, Artificial Sequence
  Description of Artificial Sequence: Synthetic oligonucleotide
ucuugaugauuuuacagac

SEQ ID NO: 2871957 - RNA, 19 nt, Artificial Sequence
  Description of Artificial Sequence: Synthetic oligonucleotide
ucaguugucauuagaauua

SEQ ID NO: 2871958 - RNA, 19 nt, Artificial Sequence
  Description of Artificial Sequence: Synthetic oligonucleotide
gauuuuacagaccuugaga

SEQ ID NO: 2871959 - RNA, 19 nt, Artificial Sequence
  Description of Artificial Sequence: Synthetic oligonucleotide
ugaauguaaggcauacuca

SEQ ID NO: 2871960 - RNA, 19 nt, Artificial Sequence
  Description of Artificial Sequence: Synthetic oligonucleotide
gauacaaacagguacuuua

SEQ ID NO: 2871961 - RNA, 19 nt, Artificial Sequence
  Description of Artificial Sequence: Synthetic oligonucleotide
ugugucaauuauaaaacau

SEQ ID NO: 2871962 - RNA, 19 nt, Artificial Sequence
  Description of Artificial Sequence: Synthetic oligonucleotide
aagacuuaccccucuguug

SEQ ID NO: 2871963 - RNA, 19 nt, Artificial Sequence
  Description of Artificial Sequence: Synthetic oligonucleotide
cucggcaccauucugauac

SEQ ID NO: 2871964 - RNA, 19 nt, Artificial Sequence
  Description of Artificial Sequence: Synthetic oligonucleotide
aagacuucgcaagugaaug

SEQ ID NO: 2871965 - RNA, 19 nt, Artificial Sequence
  Description of Artificial Sequence: Synthetic oligonucleotide
aguguuuucuacuccuuuc

SEQ ID NO: 2871966 - RNA, 19 nt, Artificial Sequence
  Description of Artificial Sequence: Synthetic oligonucleotide
ucuaacacuuucacugucc

SEQ ID NO: 2871967 - RNA, 19 nt, Artificial Sequence
  Description of Artificial Sequence: Synthetic oligonucleotide
uucacuguccugauuucgg

SEQ ID NO: 2871968 - RNA, 19 nt, Artificial Sequence
  Description of Artificial Sequence: Synthetic oligonucleotide
aagugaauguaaggcauac

SEQ ID NO: 2871969 - RNA, 19 nt, Artificial Sequence
  Description of Artificial Sequence: Synthetic oligonucleotide
uuauacaagaauucucuau

SEQ ID NO: 2871970 - RNA, 19 nt, Artificial Sequence
  Description of Artificial Sequence: Synthetic oligonucleotide
acagguacuuuauacaaga

SEQ ID NO: 2871971 - RNA, 19 nt, Artificial Sequence
  Description of Artificial Sequence: Synthetic oligonucleotide
ucuuguuggagacuuuucu

SEQ ID NO: 2871972 - RNA, 19 nt, Artificial Sequence
  Description of Artificial Sequence: Synthetic oligonucleotide
uucgcaagugaauguaagg

SEQ ID NO: 2871973 - RNA, 19 nt, Artificial Sequence
  Description of Artificial Sequence: Synthetic oligonucleotide
gugaauguaaggcauacuc

SEQ ID NO: 2871974 - RNA, 19 nt, Artificial Sequence
  Description of Artificial Sequence: Synthetic oligonucleotide
ucugauaccugucaucauc

SEQ ID NO: 2871975 - RNA, 19 nt, Artificial Sequence
  Description of Artificial Sequence: Synthetic oligonucleotide
uauaaaauccauccaugua

SEQ ID NO: 2871976 - RNA, 19 nt, Artificial Sequence
  Description of Artificial Sequence: Synthetic oligonucleotide
cugauaccugucaucaucg

SEQ ID NO: 2871977 - RNA, 19 nt, Artificial Sequence
  Description of Artificial Sequence: Synthetic oligonucleotide
uuuucuugaugauuuuaca

SEQ ID NO: 2871978 - RNA, 19 nt, Artificial Sequence
  Description of Artificial Sequence: Synthetic oligonucleotide
uacucaguugucauuagaa

SEQ ID NO: 2871979 - RNA, 19 nt, Artificial Sequence
  Description of Artificial Sequence: Synthetic oligonucleotide
acuuuauacaagaauucuc

SEQ ID NO: 2871980 - RNA, 19 nt, Artificial Sequence
  Description of Artificial Sequence: Synthetic oligonucleotide
uaaaauccauccauguaaa

SEQ ID NO: 2871981 - RNA, 19 nt, Artificial Sequence
  Description of Artificial Sequence: Synthetic oligonucleotide
auuucggguucuuugcuuc

SEQ ID NO: 2871982 - RNA, 19 nt, Artificial Sequence
  Description of Artificial Sequence: Synthetic oligonucleotide
agcgauguuuucuucuaac

SEQ ID NO: 2871983 - RNA, 19 nt, Artificial Sequence
  Description of Artificial Sequence: Synthetic oligonucleotide
auuuacagauacaaacagg

SEQ ID NO: 2871984 - RNA, 19 nt, Artificial Sequence
  Description of Artificial Sequence: Synthetic oligonucleotide
uuugcuucucauuuucaga

SEQ ID NO: 2871985 - RNA, 19 nt, Artificial Sequence
  Description of Artificial Sequence: Synthetic oligonucleotide
ucaucaucgcuuuuauggc

SEQ ID NO: 2871986 - RNA, 19 nt, Artificial Sequence
  Description of Artificial Sequence: Synthetic oligonucleotide
uuucucuuugauucucuag

SEQ ID NO: 2871987 - RNA, 19 nt, Artificial Sequence
  Description of Artificial Sequence: Synthetic oligonucleotide
uuguuggagacuuuucucu

SEQ ID NO: 2871988 - RNA, 19 nt, Artificial Sequence
  Description of Artificial Sequence: Synthetic oligonucleotide
ccugauuucucuuugauuc

SEQ ID NO: 2871989 - RNA, 19 nt, Artificial Sequence
  Description of Artificial Sequence: Synthetic oligonucleotide
ucucuauaaaauccaucca

SEQ ID NO: 2871990 - RNA, 19 nt, Artificial Sequence
  Description of Artificial Sequence: Synthetic oligonucleotide
uguugagacccuuuucuug

SEQ ID NO: 2871991 - RNA, 19 nt, Artificial Sequence
  Description of Artificial Sequence: Synthetic oligonucleotide
gagacuuuucucuccuccg

SEQ ID NO: 2871992 - RNA, 19 nt, Artificial Sequence
  Description of Artificial Sequence: Synthetic oligonucleotide
uacuuuauacaagaauucu

SEQ ID NO: 2871993 - RNA, 19 nt, Artificial Sequence
  Description of Artificial Sequence: Synthetic oligonucleotide
uguuuucuacuccuuuccc

SEQ ID NO: 2871994 - RNA, 19 nt, Artificial Sequence
  Description of Artificial Sequence: Synthetic oligonucleotide
ucgcaagugaauguaaggc

SEQ ID NO: 2871995 - RNA, 19 nt, Artificial Sequence
  Description of Artificial Sequence: Synthetic oligonucleotide
ucuagaauguucagaguau

SEQ ID NO: 2871996 - RNA, 19 nt, Artificial Sequence
  Description of Artificial Sequence: Synthetic oligonucleotide
caauuauaaaacaugucaa

SEQ ID NO: 2871997 - RNA, 19 nt, Artificial Sequence
  Description of Artificial Sequence: Synthetic oligonucleotide
caucuuaaaauuuacagau

SEQ ID NO: 2871998 - RNA, 19 nt, Artificial Sequence
  Description of Artificial Sequence: Synthetic oligonucleotide
agacuuaccccucuguuga

SEQ ID NO: 2871999 - RNA, 19 nt, Artificial Sequence
  Description of Artificial Sequence: Synthetic oligonucleotide
gauguuuucuucuaacacu

SEQ ID NO: 2872000 - RNA, 19 nt, Artificial Sequence
  Description of Artificial Sequence: Synthetic oligonucleotide
uuuuacagaccuugagaug

SEQ ID NO: 2872001 - RNA, 19 nt, Artificial Sequence
  Description of Artificial Sequence: Synthetic oligonucleotide
cuuuauacaagaauucucu

SEQ ID NO: 2872002 - RNA, 19 nt, Artificial Sequence
  Description of Artificial Sequence: Synthetic oligonucleotide
cuugaugauuuuacagacc

SEQ ID NO: 2872003 - RNA, 19 nt, Artificial Sequence
  Description of Artificial Sequence: Synthetic oligonucleotide
gugucaauuauaaaacaug

SEQ ID NO: 2872004 - RNA, 19 nt, Artificial Sequence
  Description of Artificial Sequence: Synthetic oligonucleotide
uguaaggcauacucaguug

SEQ ID NO: 2872005 - RNA, 19 nt, Artificial Sequence
  Description of Artificial Sequence: Synthetic oligonucleotide
cuuucccuugacuuggagc

SEQ ID NO: 2872006 - RNA, 19 nt, Artificial Sequence
  Description of Artificial Sequence: Synthetic oligonucleotide
uagaauguucagaguaucu

SEQ ID NO: 2872007 - RNA, 19 nt, Artificial Sequence
  Description of Artificial Sequence: Synthetic oligonucleotide
auucugauaccugucauca

SEQ ID NO: 2872008 - RNA, 19 nt, Artificial Sequence
  Description of Artificial Sequence: Synthetic oligonucleotide
aauguucagaguaucuggu

SEQ ID NO: 2872009 - RNA, 19 nt, Artificial Sequence
  Description of Artificial Sequence: Synthetic oligonucleotide
cugauuucggguucuuugc

SEQ ID NO: 2872010 - RNA, 19 nt, Artificial Sequence
  Description of Artificial Sequence: Synthetic oligonucleotide
agaauguucagaguaucug

SEQ ID NO: 2872011 - RNA, 19 nt, Artificial Sequence
  Description of Artificial Sequence: Synthetic oligonucleotide
agacuuuucucuccuccgg

SEQ ID NO: 2872012 - RNA, 19 nt, Artificial Sequence
  Description of Artificial Sequence: Synthetic oligonucleotide
gauucucuagaauguucag

SEQ ID NO: 2872013 - RNA, 19 nt, Artificial Sequence
  Description of Artificial Sequence: Synthetic oligonucleotide
uugucauuagaauuauuuu

SEQ ID NO: 2872014 - RNA, 19 nt, Artificial Sequence
  Description of Artificial Sequence: Synthetic oligonucleotide
uuucacuguccugauuucg

SEQ ID NO: 2872015 - RNA, 19 nt, Artificial Sequence
  Description of Artificial Sequence: Synthetic oligonucleotide
uugauucucuagaauguuc

SEQ ID NO: 2872016 - RNA, 19 nt, Artificial Sequence
  Description of Artificial Sequence: Synthetic oligonucleotide
ucacaaaacauaagacuua

SEQ ID NO: 2872017 - RNA, 19 nt, Artificial Sequence
  Description of Artificial Sequence: Synthetic oligonucleotide
gaauucucuauaaaaucca

SEQ ID NO: 2872018 - RNA, 19 nt, Artificial Sequence
  Description of Artificial Sequence: Synthetic oligonucleotide
aacagguacuuuauacaag

SEQ ID NO: 2872019 - RNA, 19 nt, Artificial Sequence
  Description of Artificial Sequence: Synthetic oligonucleotide
ucucucggcaccauucuga

SEQ ID NO: 2872020 - RNA, 19 nt, Artificial Sequence
  Description of Artificial Sequence: Synthetic oligonucleotide
uuuauacaagaauucucua

SEQ ID NO: 2872021 - RNA, 19 nt, Artificial Sequence
  Description of Artificial Sequence: Synthetic oligonucleotide
agguacuuuauacaagaau

SEQ ID NO: 2872022 - RNA, 19 nt, Artificial Sequence
  Description of Artificial Sequence: Synthetic oligonucleotide
augugucaauuauaaaaca

SEQ ID NO: 2872023 - RNA, 19 nt, Artificial Sequence
  Description of Artificial Sequence: Synthetic oligonucleotide
aacauaagacuuaccccuc

SEQ ID NO: 2872024 - RNA, 19 nt, Artificial Sequence
  Description of Artificial Sequence: Synthetic oligonucleotide
ucacuguccugauuucggg

SEQ ID NO: 2872025 - RNA, 19 nt, Artificial Sequence
  Description of Artificial Sequence: Synthetic oligonucleotide
cuucgcaagugaauguaag

SEQ ID NO: 2872026 - RNA, 19 nt, Artificial Sequence
  Description of Artificial Sequence: Synthetic oligonucleotide
acagauacaaacagguacu

SEQ ID NO: 2872027 - RNA, 19 nt, Artificial Sequence
  Description of Artificial Sequence: Synthetic oligonucleotide
cuuguuggagacuuuucuc

SEQ ID NO: 2872028 - RNA, 19 nt, Artificial Sequence
  Description of Artificial Sequence: Synthetic oligonucleotide
gagacccuuuucuugauga

SEQ ID NO: 2872029 - RNA, 19 nt, Artificial Sequence
  Description of Artificial Sequence: Synthetic oligonucleotide
auguaaggcauacucaguu

SEQ ID NO: 2872030 - RNA, 19 nt, Artificial Sequence
  Description of Artificial Sequence: Synthetic oligonucleotide
caucaucgcuuuuauggcc

SEQ ID NO: 2872031 - RNA, 19 nt, Artificial Sequence
  Description of Artificial Sequence: Synthetic oligonucleotide
uuuucccaccgucucucgg

SEQ ID NO: 2872032 - RNA, 19 nt, Artificial Sequence
  Description of Artificial Sequence: Synthetic oligonucleotide
auacaagaauucucuauaa

SEQ ID NO: 2872033 - RNA, 19 nt, Artificial Sequence
  Description of Artificial Sequence: Synthetic oligonucleotide
guugagacccuuuucuuga

SEQ ID NO: 2872034 - RNA, 19 nt, Artificial Sequence
  Description of Artificial Sequence: Synthetic oligonucleotide
uacuccuuucccuugacuu

SEQ ID NO: 2872035 - RNA, 19 nt, Artificial Sequence
  Description of Artificial Sequence: Synthetic oligonucleotide
cacaaaacauaagacuuac

SEQ ID NO: 2872036 - RNA, 19 nt, Artificial Sequence
  Description of Artificial Sequence: Synthetic oligonucleotide
uuugucuuguuggagacuu

SEQ ID NO: 2872037 - RNA, 19 nt, Artificial Sequence
  Description of Artificial Sequence: Synthetic oligonucleotide
auaagacuuaccccucugu

SEQ ID NO: 2872038 - RNA, 19 nt, Artificial Sequence
  Description of Artificial Sequence: Synthetic oligonucleotide
uucuucuaacacuuucacu

SEQ ID NO: 2872039 - RNA, 19 nt, Artificial Sequence
  Description of Artificial Sequence: Synthetic oligonucleotide
aaggcauacucaguuguca

SEQ ID NO: 2872040 - RNA, 19 nt, Artificial Sequence
  Description of Artificial Sequence: Synthetic oligonucleotide
uaagacuuaccccucuguu

SEQ ID NO: 2872041 - RNA, 19 nt, Artificial Sequence
  Description of Artificial Sequence: Synthetic oligonucleotide
acaaaacauaagacuuacc

SEQ ID NO: 2872042 - RNA, 19 nt, Artificial Sequence
  Description of Artificial Sequence: Synthetic oligonucleotide
uaccccucuguugagaccc

SEQ ID NO: 2872043 - RNA, 19 nt, Artificial Sequence
  Description of Artificial Sequence: Synthetic oligonucleotide
ucucuuugauucucuagaa

SEQ ID NO: 2872044 - RNA, 19 nt, Artificial Sequence
  Description of Artificial Sequence: Synthetic oligonucleotide
uugagaugugucaauuaua

SEQ ID NO: 2872045 - RNA, 19 nt, Artificial Sequence
  Description of Artificial Sequence: Synthetic oligonucleotide
uuucccaccgucucucggc

SEQ ID NO: 2872046 - RNA, 19 nt, Artificial Sequence
  Description of Artificial Sequence: Synthetic oligonucleotide
ugauuucggguucuuugcu

SEQ ID NO: 2872047 - RNA, 19 nt, Artificial Sequence
  Description of Artificial Sequence: Synthetic oligonucleotide
aauucucuauaaaauccau

SEQ ID NO: 2872048 - RNA, 19 nt, Artificial Sequence
  Description of Artificial Sequence: Synthetic oligonucleotide
cucuagaauguucagagua

SEQ ID NO: 2872049 - RNA, 19 nt, Artificial Sequence
  Description of Artificial Sequence: Synthetic oligonucleotide
uuggagacuuuucucuccu

SEQ ID NO: 2872050 - RNA, 19 nt, Artificial Sequence
  Description of Artificial Sequence: Synthetic oligonucleotide
accauucugauaccuguca

SEQ ID NO: 2872051 - RNA, 19 nt, Artificial Sequence
  Description of Artificial Sequence: Synthetic oligonucleotide
guuggagacuuuucucucc

SEQ ID NO: 2872052 - RNA, 19 nt, Artificial Sequence
  Description of Artificial Sequence: Synthetic oligonucleotide
uugacuuggagcgauguuu

SEQ ID NO: 2872053 - RNA, 19 nt, Artificial Sequence
  Description of Artificial Sequence: Synthetic oligonucleotide
uuacagauacaaacaggua

SEQ ID NO: 2872054 - RNA, 19 nt, Artificial Sequence
  Description of Artificial Sequence: Synthetic oligonucleotide
ucuccuccgguccugauuu

SEQ ID NO: 2872055 - RNA, 19 nt, Artificial Sequence
  Description of Artificial Sequence: Synthetic oligonucleotide
guacuuuauacaagaauuc

SEQ ID NO: 2872056 - RNA, 19 nt, Artificial Sequence
  Description of Artificial Sequence: Synthetic oligonucleotide
cuuaccccucuguugagac

SEQ ID NO: 2872057 - RNA, 19 nt, Artificial Sequence
  Description of Artificial Sequence: Synthetic oligonucleotide
acuccuuucccuugacuug

SEQ ID NO: 2872058 - RNA, 19 nt, Artificial Sequence
  Description of Artificial Sequence: Synthetic oligonucleotide
aauguaaggcauacucagu

SEQ ID NO: 2872059 - RNA, 19 nt, Artificial Sequence
  Description of Artificial Sequence: Synthetic oligonucleotide
cauucugauaccugucauc

SEQ ID NO: 2872060 - RNA, 19 nt, Artificial Sequence
  Description of Artificial Sequence: Synthetic oligonucleotide
aaaagacuucgcaagugaa

SEQ ID NO: 2872061 - RNA, 19 nt, Artificial Sequence
  Description of Artificial Sequence: Synthetic oligonucleotide
uguuggagacuuuucucuc

SEQ ID NO: 2872062 - RNA, 19 nt, Artificial Sequence
  Description of Artificial Sequence: Synthetic oligonucleotide
acucaguugucauuagaau

SEQ ID NO: 2872063 - RNA, 19 nt, Artificial Sequence
  Description of Artificial Sequence: Synthetic oligonucleotide
aaagacuucgcaagugaau

SEQ ID NO: 2872064 - RNA, 19 nt, Artificial Sequence
  Description of Artificial Sequence: Synthetic oligonucleotide
uucuaacacuuucacuguc

SEQ ID NO: 2872065 - RNA, 19 nt, Artificial Sequence
  Description of Artificial Sequence: Synthetic oligonucleotide
uaaggcauacucaguuguc

SEQ ID NO: 2872066 - RNA, 19 nt, Artificial Sequence
  Description of Artificial Sequence: Synthetic oligonucleotide
ggagacuuuucucuccucc

SEQ ID NO: 2872067 - RNA, 19 nt, Artificial Sequence
  Description of Artificial Sequence: Synthetic oligonucleotide
auacucaguugucauuaga

SEQ ID NO: 2872068 - RNA, 19 nt, Artificial Sequence
  Description of Artificial Sequence: Synthetic oligonucleotide
ugagacccuuuucuugaug

SEQ ID NO: 2872069 - RNA, 19 nt, Artificial Sequence
  Description of Artificial Sequence: Synthetic oligonucleotide
ugacuuggagcgauguuuu

SEQ ID NO: 2872070 - RNA, 19 nt, Artificial Sequence
  Description of Artificial Sequence: Synthetic oligonucleotide
uauggccugaguguuuucu

SEQ ID NO: 2872071 - RNA, 19 nt, Artificial Sequence
  Description of Artificial Sequence: Synthetic oligonucleotide
uuacagaccuugagaugug

SEQ ID NO: 2872072 - RNA, 19 nt, Artificial Sequence
  Description of Artificial Sequence: Synthetic oligonucleotide
acauaagacuuaccccucu

SEQ ID NO: 2872073 - RNA, 19 nt, Artificial Sequence
  Description of Artificial Sequence: Synthetic oligonucleotide
guugucauuagaauuauuu

SEQ ID NO: 2872074 - RNA, 19 nt, Artificial Sequence
  Description of Artificial Sequence: Synthetic oligonucleotide
agaaaacaucuuaaaauuu

SEQ ID NO: 2872075 - RNA, 19 nt, Artificial Sequence
  Description of Artificial Sequence: Synthetic oligonucleotide
ucucuagaauguucagagu

SEQ ID NO: 2872076 - RNA, 19 nt, Artificial Sequence
  Description of Artificial Sequence: Synthetic oligonucleotide
uuugauucucuagaauguu

SEQ ID NO: 2872077 - RNA, 19 nt, Artificial Sequence
  Description of Artificial Sequence: Synthetic oligonucleotide
cuagaauguucagaguauc

SEQ ID NO: 2872078 - RNA, 19 nt, Artificial Sequence
  Description of Artificial Sequence: Synthetic oligonucleotide
gucaauuauaaaacauguc

SEQ ID NO: 2872079 - RNA, 19 nt, Artificial Sequence
  Description of Artificial Sequence: Synthetic oligonucleotide
cuccuuucccuugacuugg

SEQ ID NO: 2872080 - RNA, 19 nt, Artificial Sequence
  Description of Artificial Sequence: Synthetic oligonucleotide
cauacucaguugucauuag

SEQ ID NO: 2872081 - RNA, 19 nt, Artificial Sequence
  Description of Artificial Sequence: Synthetic oligonucleotide
ugucaucaucgcuuuuaug

SEQ ID NO: 2872082 - RNA, 19 nt, Artificial Sequence
  Description of Artificial Sequence: Synthetic oligonucleotide
cauaagacuuaccccucug

SEQ ID NO: 2872083 - RNA, 19 nt, Artificial Sequence
  Description of Artificial Sequence: Synthetic oligonucleotide
cuuugauucucuagaaugu

SEQ ID NO: 2872084 - RNA, 19 nt, Artificial Sequence
  Description of Artificial Sequence: Synthetic oligonucleotide
uaacacuuucacuguccug

SEQ ID NO: 2872085 - RNA, 19 nt, Artificial Sequence
  Description of Artificial Sequence: Synthetic oligonucleotide
ugauaccugucaucaucgc

SEQ ID NO: 2872086 - RNA, 19 nt, Artificial Sequence
  Description of Artificial Sequence: Synthetic oligonucleotide
guucagaguaucugguaga

SEQ ID NO: 2872087 - RNA, 19 nt, Artificial Sequence
  Description of Artificial Sequence: Synthetic oligonucleotide
cagaguaucugguagauuu

SEQ ID NO: 2872088 - RNA, 19 nt, Artificial Sequence
  Description of Artificial Sequence: Synthetic oligonucleotide
ugauuucucuuugauucuc

SEQ ID NO: 2872089 - RNA, 19 nt, Artificial Sequence
  Description of Artificial Sequence: Synthetic oligonucleotide
agacuucgcaagugaaugu

SEQ ID NO: 2872090 - RNA, 19 nt, Artificial Sequence
  Description of Artificial Sequence: Synthetic oligonucleotide
cucuauaaaauccauccau

SEQ ID NO: 2872091 - RNA, 19 nt, Artificial Sequence
  Description of Artificial Sequence: Synthetic oligonucleotide
acuguccugauuucggguu

SEQ ID NO: 2872092 - RNA, 19 nt, Artificial Sequence
  Description of Artificial Sequence: Synthetic oligonucleotide
cagaccuugagauguguca

SEQ ID NO: 2872093 - RNA, 19 nt, Artificial Sequence
  Description of Artificial Sequence: Synthetic oligonucleotide
ccugauuucggguucuuug

SEQ ID NO: 2872094 - RNA, 19 nt, Artificial Sequence
  Description of Artificial Sequence: Synthetic oligonucleotide
uuuauggccugaguguuuu

SEQ ID NO: 2872095 - RNA, 19 nt, Artificial Sequence
  Description of Artificial Sequence: Synthetic oligonucleotide
acuuggagcgauguuuucu

SEQ ID NO: 2872096 - RNA, 19 nt, Artificial Sequence
  Description of Artificial Sequence: Synthetic oligonucleotide
guaaggcauacucaguugu

SEQ ID NO: 2872097 - RNA, 19 nt, Artificial Sequence
  Description of Artificial Sequence: Synthetic oligonucleotide
auaccugucaucaucgcuu

SEQ ID NO: 2872098 - RNA, 19 nt, Artificial Sequence
  Description of Artificial Sequence: Synthetic oligonucleotide
auguuuucuucuaacacuu

SEQ ID NO: 2872099 - RNA, 19 nt, Artificial Sequence
  Description of Artificial Sequence: Synthetic oligonucleotide
gguacuuuauacaagaauu

SEQ ID NO: 2872100 - RNA, 19 nt, Artificial Sequence
  Description of Artificial Sequence: Synthetic oligonucleotide
uucagaguaucugguagau

SEQ ID NO: 2872101 - RNA, 19 nt, Artificial Sequence
  Description of Artificial Sequence: Synthetic oligonucleotide
uccugauuucucuuugauu

SEQ ID NO: 2872102 - RNA, 19 nt, Artificial Sequence
  Description of Artificial Sequence: Synthetic oligonucleotide
ucggguucuuugcuucuca

SEQ ID NO: 2872103 - RNA, 19 nt, Artificial Sequence
  Description of Artificial Sequence: Synthetic oligonucleotide
gauaccugucaucaucgcu

SEQ ID NO: 2872104 - RNA, 19 nt, Artificial Sequence
  Description of Artificial Sequence: Synthetic oligonucleotide
uuuuauggccugaguguuu

SEQ ID NO: 2872105 - RNA, 19 nt, Artificial Sequence
  Description of Artificial Sequence: Synthetic oligonucleotide
aucgcuuuuauggccugag

SEQ ID NO: 2872106 - RNA, 19 nt, Artificial Sequence
  Description of Artificial Sequence: Synthetic oligonucleotide
cuuucacuguccugauuuc

SEQ ID NO: 2872107 - RNA, 19 nt, Artificial Sequence
  Description of Artificial Sequence: Synthetic oligonucleotide
ugaguguuuucuacuccuu

SEQ ID NO: 2872108 - RNA, 19 nt, Artificial Sequence
  Description of Artificial Sequence: Synthetic oligonucleotide
aucaucgcuuuuauggccu

SEQ ID NO: 2872109 - RNA, 19 nt, Artificial Sequence
  Description of Artificial Sequence: Synthetic oligonucleotide
ugcuucucauuuucagaaa

SEQ ID NO: 2872110 - RNA, 19 nt, Artificial Sequence
  Description of Artificial Sequence: Synthetic oligonucleotide
ugucuuguuggagacuuuu

SEQ ID NO: 2872111 - RNA, 19 nt, Artificial Sequence
  Description of Artificial Sequence: Synthetic oligonucleotide
acagaccuugagauguguc

SEQ ID NO: 2872112 - RNA, 19 nt, Artificial Sequence
  Description of Artificial Sequence: Synthetic oligonucleotide
guuuucuacuccuuucccu

SEQ ID NO: 2872113 - RNA, 19 nt, Artificial Sequence
  Description of Artificial Sequence: Synthetic oligonucleotide
ugaugauuuuacagaccuu

SEQ ID NO: 2872114 - RNA, 19 nt, Artificial Sequence
  Description of Artificial Sequence: Synthetic oligonucleotide
cuugagaugugucaauuau

SEQ ID NO: 2872115 - RNA, 19 nt, Artificial Sequence
  Description of Artificial Sequence: Synthetic oligonucleotide
uuaccccucuguugagacc

SEQ ID NO: 2872116 - RNA, 19 nt, Artificial Sequence
  Description of Artificial Sequence: Synthetic oligonucleotide
uuucggguucuuugcuucu

SEQ ID NO: 2872117 - RNA, 19 nt, Artificial Sequence
  Description of Artificial Sequence: Synthetic oligonucleotide
uuuugucuuguuggagacu

SEQ ID NO: 2872118 - RNA, 19 nt, Artificial Sequence
  Description of Artificial Sequence: Synthetic oligonucleotide
aggcauacucaguugucau

SEQ ID NO: 2872119 - RNA, 19 nt, Artificial Sequence
  Description of Artificial Sequence: Synthetic oligonucleotide
uguuuucuucuaacacuuu

SEQ ID NO: 2872120 - RNA, 19 nt, Artificial Sequence
  Description of Artificial Sequence: Synthetic oligonucleotide
cucaguugucauuagaauu

SEQ ID NO: 2872121 - RNA, 19 nt, Artificial Sequence
  Description of Artificial Sequence: Synthetic oligonucleotide
gagaugugucaauuauaaa

SEQ ID NO: 2872122 - RNA, 19 nt, Artificial Sequence
  Description of Artificial Sequence: Synthetic oligonucleotide
augauuuuacagaccuuga

SEQ ID NO: 2872123 - RNA, 19 nt, Artificial Sequence
  Description of Artificial Sequence: Synthetic oligonucleotide
acccuuuucuugaugauuu

SEQ ID NO: 2872124 - RNA, 19 nt, Artificial Sequence
  Description of Artificial Sequence: Synthetic oligonucleotide
ucaucgcuuuuauggccug

SEQ ID NO: 2872125 - RNA, 19 nt, Artificial Sequence
  Description of Artificial Sequence: Synthetic oligonucleotide
uucccaccgucucucggca

SEQ ID NO: 2872126 - RNA, 19 nt, Artificial Sequence
  Description of Artificial Sequence: Synthetic oligonucleotide
agaccuugagaugugucaa

SEQ ID NO: 2872127 - RNA, 19 nt, Artificial Sequence
  Description of Artificial Sequence: Synthetic oligonucleotide
gacuuaccccucuguugag

SEQ ID NO: 2872128 - RNA, 19 nt, Artificial Sequence
  Description of Artificial Sequence: Synthetic oligonucleotide
agugaauguaaggcauacu

SEQ ID NO: 2872129 - RNA, 19 nt, Artificial Sequence
  Description of Artificial Sequence: Synthetic oligonucleotide
cucuguugagacccuuuuc

SEQ ID NO: 2872130 - RNA, 19 nt, Artificial Sequence
  Description of Artificial Sequence: Synthetic oligonucleotide
ucgcuuuuauggccugagu

SEQ ID NO: 2872131 - RNA, 19 nt, Artificial Sequence
  Description of Artificial Sequence: Synthetic oligonucleotide
gguucuuugcuucucauuu

SEQ ID NO: 2872132 - RNA, 19 nt, Artificial Sequence
  Description of Artificial Sequence: Synthetic oligonucleotide
cgauguuuucuucuaacac

SEQ ID NO: 2872133 - RNA, 19 nt, Artificial Sequence
  Description of Artificial Sequence: Synthetic oligonucleotide
caccauucugauaccuguc

SEQ ID NO: 2872134 - RNA, 19 nt, Artificial Sequence
  Description of Artificial Sequence: Synthetic oligonucleotide
gcuuuuauggccugagugu

SEQ ID NO: 2872135 - RNA, 19 nt, Artificial Sequence
  Description of Artificial Sequence: Synthetic oligonucleotide
cugaguguuuucuacuccu

SEQ ID NO: 2872136 - RNA, 19 nt, Artificial Sequence
  Description of Artificial Sequence: Synthetic oligonucleotide
uacagaccuugagaugugu

SEQ ID NO: 2872137 - RNA, 19 nt, Artificial Sequence
  Description of Artificial Sequence: Synthetic oligonucleotide
aucuuaaaauuuacagaua

SEQ ID NO: 2872138 - RNA, 19 nt, Artificial Sequence
  Description of Artificial Sequence: Synthetic oligonucleotide
gacuucgcaagugaaugua

SEQ ID NO: 2872139 - RNA, 19 nt, Artificial Sequence
  Description of Artificial Sequence: Synthetic oligonucleotide
gcgauguuuucuucuaaca

SEQ ID NO: 2872140 - RNA, 19 nt, Artificial Sequence
  Description of Artificial Sequence: Synthetic oligonucleotide
uguccugauuucggguucu

SEQ ID NO: 2872141 - RNA, 19 nt, Artificial Sequence
  Description of Artificial Sequence: Synthetic oligonucleotide
cgcuuuuauggccugagug

SEQ ID NO: 2872142 - RNA, 19 nt, Artificial Sequence
  Description of Artificial Sequence: Synthetic oligonucleotide
uucugauaccugucaucau

SEQ ID NO: 2872143 - RNA, 19 nt, Artificial Sequence
  Description of Artificial Sequence: Synthetic oligonucleotide
agauacaaacagguacuuu

SEQ ID NO: 2872144 - RNA, 19 nt, Artificial Sequence
  Description of Artificial Sequence: Synthetic oligonucleotide
agacccuuuucuugaugau

SEQ ID NO: 2872145 - RNA, 19 nt, Artificial Sequence
  Description of Artificial Sequence: Synthetic oligonucleotide
ccugaguguuuucuacucc

SEQ ID NO: 2872146 - RNA, 19 nt, Artificial Sequence
  Description of Artificial Sequence: Synthetic oligonucleotide
gacuuuucucuccuccggu

SEQ ID NO: 2872147 - RNA, 19 nt, Artificial Sequence
  Description of Artificial Sequence: Synthetic oligonucleotide
uugagacccuuuucuugau

SEQ ID NO: 2872148 - RNA, 19 nt, Artificial Sequence
  Description of Artificial Sequence: Synthetic oligonucleotide
cuucuaacacuuucacugu

SEQ ID NO: 2872149 - RNA, 19 nt, Artificial Sequence
  Description of Artificial Sequence: Synthetic oligonucleotide
cuaacacuuucacuguccu

SEQ ID NO: 2872150 - RNA, 19 nt, Artificial Sequence
  Description of Artificial Sequence: Synthetic oligonucleotide
gucucucggcaccauucug

SEQ ID NO: 2872151 - RNA, 19 nt, Artificial Sequence
  Description of Artificial Sequence: Synthetic oligonucleotide
caagugaauguaaggcaua

SEQ ID NO: 2872152 - RNA, 19 nt, Artificial Sequence
  Description of Artificial Sequence: Synthetic oligonucleotide
cuguccugauuucggguuc

SEQ ID NO: 2872153 - RNA, 19 nt, Artificial Sequence
  Description of Artificial Sequence: Synthetic oligonucleotide
gacuuggagcgauguuuuc

SEQ ID NO: 2872154 - RNA, 19 nt, Artificial Sequence
  Description of Artificial Sequence: Synthetic oligonucleotide
gauuucucuuugauucucu

SEQ ID NO: 2872155 - RNA, 19 nt, Artificial Sequence
  Description of Artificial Sequence: Synthetic oligonucleotide
ucggcaccauucugauacc

SEQ ID NO: 2872156 - RNA, 19 nt, Artificial Sequence
  Description of Artificial Sequence: Synthetic oligonucleotide
acacuuucacuguccugau

SEQ ID NO: 2872157 - RNA, 19 nt, Artificial Sequence
  Description of Artificial Sequence: Synthetic oligonucleotide
acuuaccccucuguugaga

SEQ ID NO: 2872158 - RNA, 19 nt, Artificial Sequence
  Description of Artificial Sequence: Synthetic oligonucleotide
uccuuucccuugacuugga

SEQ ID NO: 2872159 - RNA, 19 nt, Artificial Sequence
  Description of Artificial Sequence: Synthetic oligonucleotide
gauuucggguucuuugcuu

SEQ ID NO: 2872160 - RNA, 19 nt, Artificial Sequence
  Description of Artificial Sequence: Synthetic oligonucleotide
accuugagaugugucaauu

SEQ ID NO: 2872161 - RNA, 19 nt, Artificial Sequence
  Description of Artificial Sequence: Synthetic oligonucleotide
uccuccgguccugauuucu

SEQ ID NO: 2872162 - RNA, 19 nt, Artificial Sequence
  Description of Artificial Sequence: Synthetic oligonucleotide
gagcgauguuuucuucuaa

SEQ ID NO: 2872163 - RNA, 19 nt, Artificial Sequence
  Description of Artificial Sequence: Synthetic oligonucleotide
acuucgcaagugaauguaa

SEQ ID NO: 2872164 - RNA, 19 nt, Artificial Sequence
  Description of Artificial Sequence: Synthetic oligonucleotide
uggagacuuuucucuccuc

SEQ ID NO: 2872165 - RNA, 19 nt, Artificial Sequence
  Description of Artificial Sequence: Synthetic oligonucleotide
ucccuugacuuggagcgau

SEQ ID NO: 2872166 - RNA, 19 nt, Artificial Sequence
  Description of Artificial Sequence: Synthetic oligonucleotide
uccgguccugauuucucuu

SEQ ID NO: 2872167 - RNA, 19 nt, Artificial Sequence
  Description of Artificial Sequence: Synthetic oligonucleotide
ucagaguaucugguagauu

SEQ ID NO: 2872168 - RNA, 19 nt, Artificial Sequence
  Description of Artificial Sequence: Synthetic oligonucleotide
gaguguuuucuacuccuuu

SEQ ID NO: 2872169 - RNA, 19 nt, Artificial Sequence
  Description of Artificial Sequence: Synthetic oligonucleotide
gcauacucaguugucauua

SEQ ID NO: 2872170 - RNA, 19 nt, Artificial Sequence
  Description of Artificial Sequence: Synthetic oligonucleotide
cugauuucucuuugauucu

SEQ ID NO: 2872171 - RNA, 19 nt, Artificial Sequence
  Description of Artificial Sequence: Synthetic oligonucleotide
gccugaguguuuucuacuc

SEQ ID NO: 2872172 - RNA, 19 nt, Artificial Sequence
  Description of Artificial Sequence: Synthetic oligonucleotide
gucuuguuggagacuuuuc

SEQ ID NO: 2872173 - RNA, 19 nt, Artificial Sequence
  Description of Artificial Sequence: Synthetic oligonucleotide
cagguacuuuauacaagaa

SEQ ID NO: 2872174 - RNA, 19 nt, Artificial Sequence
  Description of Artificial Sequence: Synthetic oligonucleotide
uuauggccugaguguuuuc

SEQ ID NO: 2872175 - RNA, 19 nt, Artificial Sequence
  Description of Artificial Sequence: Synthetic oligonucleotide
uucggguucuuugcuucuc

SEQ ID NO: 2872176 - RNA, 19 nt, Artificial Sequence
  Description of Artificial Sequence: Synthetic oligonucleotide
agaguaucugguagauuuu

SEQ ID NO: 2872177 - RNA, 19 nt, Artificial Sequence
  Description of Artificial Sequence: Synthetic oligonucleotide
uugucuuguuggagacuuu

SEQ ID NO: 2872178 - RNA, 19 nt, Artificial Sequence
  Description of Artificial Sequence: Synthetic oligonucleotide
uucccuugacuuggagcga

SEQ ID NO: 2872179 - RNA, 19 nt, Artificial Sequence
  Description of Artificial Sequence: Synthetic oligonucleotide
cuuggagcgauguuuucuu

SEQ ID NO: 2872180 - RNA, 19 nt, Artificial Sequence
  Description of Artificial Sequence: Synthetic oligonucleotide
gguccugauuucucuuuga

SEQ ID NO: 2872181 - RNA, 19 nt, Artificial Sequence
  Description of Artificial Sequence: Synthetic oligonucleotide
gcaccauucugauaccugu

SEQ ID NO: 2872182 - RNA, 19 nt, Artificial Sequence
  Description of Artificial Sequence: Synthetic oligonucleotide
cgcaagugaauguaaggca

SEQ ID NO: 2872183 - RNA, 19 nt, Artificial Sequence
  Description of Artificial Sequence: Synthetic oligonucleotide
uucucuccuccgguccuga

SEQ ID NO: 2872184 - RNA, 19 nt, Artificial Sequence
  Description of Artificial Sequence: Synthetic oligonucleotide
cucuuugauucucuagaau

SEQ ID NO: 2872185 - RNA, 19 nt, Artificial Sequence
  Description of Artificial Sequence: Synthetic oligonucleotide
cuuuuauggccugaguguu

SEQ ID NO: 2872186 - RNA, 19 nt, Artificial Sequence
  Description of Artificial Sequence: Synthetic oligonucleotide
uccugauuucggguucuuu

SEQ ID NO: 2872187 - RNA, 19 nt, Artificial Sequence
  Description of Artificial Sequence: Synthetic oligonucleotide
gcaagugaauguaaggcau

SEQ ID NO: 2872188 - RNA, 19 nt, Artificial Sequence
  Description of Artificial Sequence: Synthetic oligonucleotide
gaccuugagaugugucaau

SEQ ID NO: 2872189 - RNA, 19 nt, Artificial Sequence
  Description of Artificial Sequence: Synthetic oligonucleotide
aguugucauuagaauuauu

SEQ ID NO: 2872190 - RNA, 19 nt, Artificial Sequence
  Description of Artificial Sequence: Synthetic oligonucleotide
ucucggcaccauucugaua

SEQ ID NO: 2872191 - RNA, 19 nt, Artificial Sequence
  Description of Artificial Sequence: Synthetic oligonucleotide
gacccuuuucuugaugauu

SEQ ID NO: 2872192 - RNA, 19 nt, Artificial Sequence
  Description of Artificial Sequence: Synthetic oligonucleotide
cccaccgucucucggcacc

SEQ ID NO: 2872193 - RNA, 19 nt, Artificial Sequence
  Description of Artificial Sequence: Synthetic oligonucleotide
ccgucucucggcaccauuc

SEQ ID NO: 2872194 - RNA, 19 nt, Artificial Sequence
  Description of Artificial Sequence: Synthetic oligonucleotide
cacuguccugauuucgggu

SEQ ID NO: 2872195 - RNA, 19 nt, Artificial Sequence
  Description of Artificial Sequence: Synthetic oligonucleotide
accgucucucggcaccauu

SEQ ID NO: 2872196 - RNA, 19 nt, Artificial Sequence
  Description of Artificial Sequence: Synthetic oligonucleotide
ucccaccgucucucggcac

SEQ ID NO: 2872197 - RNA, 19 nt, Artificial Sequence
  Description of Artificial Sequence: Synthetic oligonucleotide
cugucaucaucgcuuuuau

SEQ ID NO: 2872198 - RNA, 19 nt, Artificial Sequence
  Description of Artificial Sequence: Synthetic oligonucleotide
ucucuccuccgguccugau

SEQ ID NO: 2872199 - RNA, 19 nt, Artificial Sequence
  Description of Artificial Sequence: Synthetic oligonucleotide
cuguugagacccuuuucuu

SEQ ID NO: 2872200 - RNA, 19 nt, Artificial Sequence
  Description of Artificial Sequence: Synthetic oligonucleotide
ccuuucccuugacuuggag

SEQ ID NO: 2872201 - RNA, 19 nt, Artificial Sequence
  Description of Artificial Sequence: Synthetic oligonucleotide
cuacuccuuucccuugacu

SEQ ID NO: 2872202 - RNA, 19 nt, Artificial Sequence
  Description of Artificial Sequence: Synthetic oligonucleotide
ccuugagaugugucaauua

SEQ ID NO: 2872203 - RNA, 19 nt, Artificial Sequence
  Description of Artificial Sequence: Synthetic oligonucleotide
cuccgguccugauuucucu

SEQ ID NO: 2872204 - RNA, 19 nt, Artificial Sequence
  Description of Artificial Sequence: Synthetic oligonucleotide
caucgcuuuuauggccuga

SEQ ID NO: 2872205 - RNA, 19 nt, Artificial Sequence
  Description of Artificial Sequence: Synthetic oligonucleotide
accugucaucaucgcuuuu

SEQ ID NO: 2872206 - RNA, 19 nt, Artificial Sequence
  Description of Artificial Sequence: Synthetic oligonucleotide
cucucggcaccauucugau

SEQ ID NO: 2872207 - RNA, 19 nt, Artificial Sequence
  Description of Artificial Sequence: Synthetic oligonucleotide
cuugacuuggagcgauguu

SEQ ID NO: 2872208 - RNA, 19 nt, Artificial Sequence
  Description of Artificial Sequence: Synthetic oligonucleotide
ccuccgguccugauuucuc

SEQ ID NO: 2872209 - RNA, 19 nt, Artificial Sequence
  Description of Artificial Sequence: Synthetic oligonucleotide
caguugucauuagaauuau

SEQ ID NO: 2872210 - RNA, 19 nt, Artificial Sequence
  Description of Artificial Sequence: Synthetic oligonucleotide
cuccuccgguccugauuuc

SEQ ID NO: 2872211 - RNA, 19 nt, Artificial Sequence
  Description of Artificial Sequence: Synthetic oligonucleotide
ggcauacucaguugucauu

SEQ ID NO: 2872212 - RNA, 19 nt, Artificial Sequence
  Description of Artificial Sequence: Synthetic oligonucleotide
cgguccugauuucucuuug

SEQ ID NO: 2872213 - RNA, 19 nt, Artificial Sequence
  Description of Artificial Sequence: Synthetic oligonucleotide
cagauacaaacagguacuu

SEQ ID NO: 2872214 - RNA, 19 nt, Artificial Sequence
  Description of Artificial Sequence: Synthetic oligonucleotide
cccuugacuuggagcgaug

SEQ ID NO: 2872215 - RNA, 19 nt, Artificial Sequence
  Description of Artificial Sequence: Synthetic oligonucleotide
cucuccuccgguccugauu

SEQ ID NO: 2872216 - RNA, 19 nt, Artificial Sequence
  Description of Artificial Sequence: Synthetic oligonucleotide
ccauucugauaccugucau

SEQ ID NO: 2872217 - RNA, 19 nt, Artificial Sequence
  Description of Artificial Sequence: Synthetic oligonucleotide
cacuuucacuguccugauu

SEQ ID NO: 2872218 - RNA, 19 nt, Artificial Sequence
  Description of Artificial Sequence: Synthetic oligonucleotide
ccuugacuuggagcgaugu

SEQ ID NO: 2872219 - RNA, 19 nt, Artificial Sequence
  Description of Artificial Sequence: Synthetic oligonucleotide
ccucuguugagacccuuuu

SEQ ID NO: 2872220 - RNA, 19 nt, Artificial Sequence
  Description of Artificial Sequence: Synthetic oligonucleotide
ccaccgucucucggcacca

SEQ ID NO: 2872221 - RNA, 19 nt, Artificial Sequence
  Description of Artificial Sequence: Synthetic oligonucleotide
ccgguccugauuucucuuu

SEQ ID NO: 2872222 - RNA, 19 nt, Artificial Sequence
  Description of Artificial Sequence: Synthetic oligonucleotide
cgucucucggcaccauucu

SEQ ID NO: 2872223 - RNA, 19 nt, Artificial Sequence
  Description of Artificial Sequence: Synthetic oligonucleotide
cccuuuucuugaugauuuu

SEQ ID NO: 2872224 - RNA, 19 nt, Artificial Sequence
  Description of Artificial Sequence: Synthetic oligonucleotide
guccugauuucggguucuu

SEQ ID NO: 2872225 - RNA, 19 nt, Artificial Sequence
  Description of Artificial Sequence: Synthetic oligonucleotide
cccucuguugagacccuuu

SEQ ID NO: 2872226 - RNA, 19 nt, Artificial Sequence
  Description of Artificial Sequence: Synthetic oligonucleotide
cggguucuuugcuucucau

SEQ ID NO: 2872227 - RNA, 19 nt, Artificial Sequence
  Description of Artificial Sequence: Synthetic oligonucleotide
cggcaccauucugauaccu

SEQ ID NO: 2872228 - RNA, 19 nt, Artificial Sequence
  Description of Artificial Sequence: Synthetic oligonucleotide
caccgucucucggcaccau

SEQ ID NO: 2872229 - RNA, 19 nt, Artificial Sequence
  Description of Artificial Sequence: Synthetic oligonucleotide
  modified_base (5)..(5): a, c, u, g, unknown or other
uguunuaggaucaugauga

SEQ ID NO: 2872230 - RNA, 19 nt, Artificial Sequence
  Description of Artificial Sequence: Synthetic oligonucleotide
aacagugugaggcaggucc

SEQ ID NO: 2872231 - RNA, 19 nt, Artificial Sequence
  Description of Artificial Sequence: Synthetic oligonucleotide
  modified_base (2)..(2): a, c, u, g, unknown or other
unuaggaucaugaugauga

SEQ ID NO: 2872232 - RNA, 19 nt, Artificial Sequence
  Description of Artificial Sequence: Synthetic oligonucleotide
aauaagacagcacuugcac

SEQ ID NO: 2872233 - RNA, 19 nt, Artificial Sequence
  Description of Artificial Sequence: Synthetic oligonucleotide
aaaauaagacagcacuugc

SEQ ID NO: 2872234 - RNA, 19 nt, Artificial Sequence
  Description of Artificial Sequence: Synthetic oligonucleotide
acaaugaacaccgacagcc

SEQ ID NO: 2872235 - RNA, 19 nt, Artificial Sequence
  Description of Artificial Sequence: Synthetic oligonucleotide
aaaaccauggcccugagaa

SEQ ID NO: 2872236 - RNA, 19 nt, Artificial Sequence
  Description of Artificial Sequence: Synthetic oligonucleotide
uccaaaauaagacagcacu

SEQ ID NO: 2872237 - RNA, 19 nt, Artificial Sequence
  Description of Artificial Sequence: Synthetic oligonucleotide
agugaucucguuuauuacc

SEQ ID NO: 2872238 - RNA, 19 nt, Artificial Sequence
  Description of Artificial Sequence: Synthetic oligonucleotide
gagaacacaaugaacaccg

SEQ ID NO: 2872239 - RNA, 19 nt, Artificial Sequence
  Description of Artificial Sequence: Synthetic oligonucleotide
uuuauuaccacgugauugc

SEQ ID NO: 2872240 - RNA, 19 nt, Artificial Sequence
  Description of Artificial Sequence: Synthetic oligonucleotide
  modified_base (15)..(15): a, c, u, g, unknown or other
ucauagauaguguunuagg

SEQ ID NO: 2872241 - RNA, 19 nt, Artificial Sequence
  Description of Artificial Sequence: Synthetic oligonucleotide
uuucacaccaaucuaguca

SEQ ID NO: 2872242 - RNA, 19 nt, Artificial Sequence
  Description of Artificial Sequence: Synthetic oligonucleotide
ugggcauuuaaaaccaugg

SEQ ID NO: 2872243 - RNA, 19 nt, Artificial Sequence
  Description of Artificial Sequence: Synthetic oligonucleotide
auugcacugggcuucauac

SEQ ID NO: 2872244 - RNA, 19 nt, Artificial Sequence
  Description of Artificial Sequence: Synthetic oligonucleotide
gaugaugccgaucacagac

SEQ ID NO: 2872245 - RNA, 19 nt, Artificial Sequence
  Description of Artificial Sequence: Synthetic oligonucleotide
uagacgaugaugccgauca

SEQ ID NO: 2872246 - RNA, 19 nt, Artificial Sequence
  Description of Artificial Sequence: Synthetic oligonucleotide
ugaccucucucauagauag

SEQ ID NO: 2872247 - RNA, 19 nt, Artificial Sequence
  Description of Artificial Sequence: Synthetic oligonucleotide
ugaagcugaugauagaagc

SEQ ID NO: 2872248 - RNA, 19 nt, Artificial Sequence
  Description of Artificial Sequence: Synthetic oligonucleotide
gaagacagucucuaaaccc

SEQ ID NO: 2872249 - RNA, 19 nt, Artificial Sequence
  Description of Artificial Sequence: Synthetic oligonucleotide
gaagcugugauggaugugg

SEQ ID NO: 2872250 - RNA, 19 nt, Artificial Sequence
  Description of Artificial Sequence: Synthetic oligonucleotide
aagacagucucuaaacccg

SEQ ID NO: 2872251 - RNA, 19 nt, Artificial Sequence
  Description of Artificial Sequence: Synthetic oligonucleotide
uccacagguaguaaacggg

SEQ ID NO: 2872252 - RNA, 19 nt, Artificial Sequence
  Description of Artificial Sequence: Synthetic oligonucleotide
  modified_base (8)..(8): a, c, u, g, unknown or other
uaguguunuaggaucauga

SEQ ID NO: 2872253 - RNA, 19 nt, Artificial Sequence
  Description of Artificial Sequence: Synthetic oligonucleotide
guagagaacacaaugaaca

SEQ ID NO: 2872254 - RNA, 19 nt, Artificial Sequence
  Description of Artificial Sequence: Synthetic oligonucleotide
auacacuuuccacagguag

SEQ ID NO: 2872255 - RNA, 19 nt, Artificial Sequence
  Description of Artificial Sequence: Synthetic oligonucleotide
guuuauuaccacgugauug

SEQ ID NO: 2872256 - RNA, 19 nt, Artificial Sequence
  Description of Artificial Sequence: Synthetic oligonucleotide
  modified_base (12)..(12): a, c, u, g, unknown or other
uagauaguguunuaggauc

SEQ ID NO: 2872257 - RNA, 19 nt, Artificial Sequence
  Description of Artificial Sequence: Synthetic oligonucleotide
gaucucguuuauuaccacg

SEQ ID NO: 2872258 - RNA, 19 nt, Artificial Sequence
  Description of Artificial Sequence: Synthetic oligonucleotide
aacaccgacagccuguaga

SEQ ID NO: 2872259 - RNA, 19 nt, Artificial Sequence
  Description of Artificial Sequence: Synthetic oligonucleotide
guauuucuggauugggucg

SEQ ID NO: 2872260 - RNA, 19 nt, Artificial Sequence
  Description of Artificial Sequence: Synthetic oligonucleotide
agagaacacaaugaacacc

SEQ ID NO: 2872261 - RNA, 19 nt, Artificial Sequence
  Description of Artificial Sequence: Synthetic oligonucleotide
caaucuagucagcagaggc

SEQ ID NO: 2872262 - RNA, 19 nt, Artificial Sequence
  Description of Artificial Sequence: Synthetic oligonucleotide
acuuuccuuggauugacuc

SEQ ID NO: 2872263 - RNA, 19 nt, Artificial Sequence
  Description of Artificial Sequence: Synthetic oligonucleotide
aacacaaugaacaccgaca

SEQ ID NO: 2872264 - RNA, 19 nt, Artificial Sequence
  Description of Artificial Sequence: Synthetic oligonucleotide
ugagcaggauccaaaauaa

SEQ ID NO: 2872265 - RNA, 19 nt, Artificial Sequence
  Description of Artificial Sequence: Synthetic oligonucleotide
aucuagucagcagaggccc

SEQ ID NO: 2872266 - RNA, 19 nt, Artificial Sequence
  Description of Artificial Sequence: Synthetic oligonucleotide
  modified_base (16)..(16): a, c, u, g, unknown or other
cucauagauaguguunuag

SEQ ID NO: 2872267 - RNA, 19 nt, Artificial Sequence
  Description of Artificial Sequence: Synthetic oligonucleotide
aaugaacaccgacagccug

SEQ ID NO: 2872268 - RNA, 19 nt, Artificial Sequence
  Description of Artificial Sequence: Synthetic oligonucleotide
auuaccacgugauugcacu

SEQ ID NO: 2872269 - RNA, 19 nt, Artificial Sequence
  Description of Artificial Sequence: Synthetic oligonucleotide
ggcauuuaaaaccauggcc

SEQ ID NO: 2872270 - RNA, 19 nt, Artificial Sequence
  Description of Artificial Sequence: Synthetic oligonucleotide
cuuggauugacuccugggc

SEQ ID NO: 2872271 - RNA, 19 nt, Artificial Sequence
  Description of Artificial Sequence: Synthetic oligonucleotide
aaacgggaugcgcuccucc

SEQ ID NO: 2872272 - RNA, 19 nt, Artificial Sequence
  Description of Artificial Sequence: Synthetic oligonucleotide
agccuguagacgaugaugc

SEQ ID NO: 2872273 - RNA, 19 nt, Artificial Sequence
  Description of Artificial Sequence: Synthetic oligonucleotide
ugagaagacagucucuaaa

SEQ ID NO: 2872274 - RNA, 19 nt, Artificial Sequence
  Description of Artificial Sequence: Synthetic oligonucleotide
ugagugaucucguuuauua

SEQ ID NO: 2872275 - RNA, 19 nt, Artificial Sequence
  Description of Artificial Sequence: Synthetic oligonucleotide
aggcauuucacaccaaucu

SEQ ID NO: 2872276 - RNA, 19 nt, Artificial Sequence
  Description of Artificial Sequence: Synthetic oligonucleotide
ucguuuauuaccacgugau

SEQ ID NO: 2872277 - RNA, 19 nt, Artificial Sequence
  Description of Artificial Sequence: Synthetic oligonucleotide
aagcugaugauagaagcug

SEQ ID NO: 2872278 - RNA, 19 nt, Artificial Sequence
  Description of Artificial Sequence: Synthetic oligonucleotide
uuuaaaaccauggcccuga

SEQ ID NO: 2872279 - RNA, 19 nt, Artificial Sequence
  Description of Artificial Sequence: Synthetic oligonucleotide
gcauuuaaaaccauggccc

SEQ ID NO: 2872280 - RNA, 19 nt, Artificial Sequence
  Description of Artificial Sequence: Synthetic oligonucleotide
aggauccaaaauaagacag

SEQ ID NO: 2872281 - RNA, 19 nt, Artificial Sequence
  Description of Artificial Sequence: Synthetic oligonucleotide
ugaugauagaagcugugau

SEQ ID NO: 2872282 - RNA, 19 nt, Artificial Sequence
  Description of Artificial Sequence: Synthetic oligonucleotide
ucuaaacccguucacuuuc

SEQ ID NO: 2872283 - RNA, 19 nt, Artificial Sequence
  Description of Artificial Sequence: Synthetic oligonucleotide
gguuguagagaacacaaug

SEQ ID NO: 2872284 - RNA, 19 nt, Artificial Sequence
  Description of Artificial Sequence: Synthetic oligonucleotide
uuggauugacuccugggca

SEQ ID NO: 2872285 - RNA, 19 nt, Artificial Sequence
  Description of Artificial Sequence: Synthetic oligonucleotide
uccggauacacuuuccaca

SEQ ID NO: 2872286 - RNA, 19 nt, Artificial Sequence
  Description of Artificial Sequence: Synthetic oligonucleotide
caaaauaagacagcacuug

SEQ ID NO: 2872287 - RNA, 19 nt, Artificial Sequence
  Description of Artificial Sequence: Synthetic oligonucleotide
  modified_base (6)..(6): a, c, u, g, unknown or other
guguunuaggaucaugaug

SEQ ID NO: 2872288 - RNA, 19 nt, Artificial Sequence
  Description of Artificial Sequence: Synthetic oligonucleotide
gauugggucggucccauug

SEQ ID NO: 2872289 - RNA, 19 nt, Artificial Sequence
  Description of Artificial Sequence: Synthetic oligonucleotide
auuucacaccaaucuaguc

SEQ ID NO: 2872290 - RNA, 19 nt, Artificial Sequence
  Description of Artificial Sequence: Synthetic oligonucleotide
uuuccacagguaguaaacg

SEQ ID NO: 2872291 - RNA, 19 nt, Artificial Sequence
  Description of Artificial Sequence: Synthetic oligonucleotide
aaauaagacagcacuugca

SEQ ID NO: 2872292 - RNA, 19 nt, Artificial Sequence
  Description of Artificial Sequence: Synthetic oligonucleotide
ucuggauugggucgguccc

SEQ ID NO: 2872293 - RNA, 19 nt, Artificial Sequence
  Description of Artificial Sequence: Synthetic oligonucleotide
uauuucuggauugggucgg

SEQ ID NO: 2872294 - RNA, 19 nt, Artificial Sequence
  Description of Artificial Sequence: Synthetic oligonucleotide
  modified_base (7)..(7): a, c, u, g, unknown or other
aguguunuaggaucaugau

SEQ ID NO: 2872295 - RNA, 19 nt, Artificial Sequence
  Description of Artificial Sequence: Synthetic oligonucleotide
gaacacaaugaacaccgac

SEQ ID NO: 2872296 - RNA, 19 nt, Artificial Sequence
  Description of Artificial Sequence: Synthetic oligonucleotide
ugaugccgaucacagacgc

SEQ ID NO: 2872297 - RNA, 19 nt, Artificial Sequence
  Description of Artificial Sequence: Synthetic oligonucleotide
agucucuaaacccguucac

SEQ ID NO: 2872298 - RNA, 19 nt, Artificial Sequence
  Description of Artificial Sequence: Synthetic oligonucleotide
auccggauacacuuuccac

SEQ ID NO: 2872299 - RNA, 19 nt, Artificial Sequence
  Description of Artificial Sequence: Synthetic oligonucleotide
gauguggccaucuguggug

SEQ ID NO: 2872300 - RNA, 19 nt, Artificial Sequence
  Description of Artificial Sequence: Synthetic oligonucleotide
uuuccuuggauugacuccu

SEQ ID NO: 2872301 - RNA, 19 nt, Artificial Sequence
  Description of Artificial Sequence: Synthetic oligonucleotide
cagguaguaaacgggaugc

SEQ ID NO: 2872302 - RNA, 19 nt, Artificial Sequence
  Description of Artificial Sequence: Synthetic oligonucleotide
aaccauggcccugagaaga

SEQ ID NO: 2872303 - RNA, 19 nt, Artificial Sequence
  Description of Artificial Sequence: Synthetic oligonucleotide
aaaccauggcccugagaag

SEQ ID NO: 2872304 - RNA, 19 nt, Artificial Sequence
  Description of Artificial Sequence: Synthetic oligonucleotide
uggugucagguauuucugg

SEQ ID NO: 2872305 - RNA, 19 nt, Artificial Sequence
  Description of Artificial Sequence: Synthetic oligonucleotide
cacagcgugauccggauac

SEQ ID NO: 2872306 - RNA, 19 nt, Artificial Sequence
  Description of Artificial Sequence: Synthetic oligonucleotide
ucuucacccagcacugacc

SEQ ID NO: 2872307 - RNA, 19 nt, Artificial Sequence
  Description of Artificial Sequence: Synthetic oligonucleotide
auugggucggucccauugg

SEQ ID NO: 2872308 - RNA, 19 nt, Artificial Sequence
  Description of Artificial Sequence: Synthetic oligonucleotide
  modified_base (3)..(3): a, c, u, g, unknown or other
uunuaggaucaugaugaug

SEQ ID NO: 2872309 - RNA, 19 nt, Artificial Sequence
  Description of Artificial Sequence: Synthetic oligonucleotide
gaugaagcugaugauagaa

SEQ ID NO: 2872310 - RNA, 19 nt, Artificial Sequence
  Description of Artificial Sequence: Synthetic oligonucleotide
guuguagagaacacaauga

SEQ ID NO: 2872311 - RNA, 19 nt, Artificial Sequence
  Description of Artificial Sequence: Synthetic oligonucleotide
  modified_base (19)..(19): a, c, u, g, unknown or other
ucucucauagauaguguun

SEQ ID NO: 2872312 - RNA, 19 nt, Artificial Sequence
  Description of Artificial Sequence: Synthetic oligonucleotide
accucucucauagauagug

SEQ ID NO: 2872313 - RNA, 19 nt, Artificial Sequence
  Description of Artificial Sequence: Synthetic oligonucleotide
agcugugauggauguggcc

SEQ ID NO: 2872314 - RNA, 19 nt, Artificial Sequence
  Description of Artificial Sequence: Synthetic oligonucleotide
agcaggauccaaaauaaga

SEQ ID NO: 2872315 - RNA, 19 nt, Artificial Sequence
  Description of Artificial Sequence: Synthetic oligonucleotide
accgacagccuguagacga

SEQ ID NO: 2872316 - RNA, 19 nt, Artificial Sequence
  Description of Artificial Sequence: Synthetic oligonucleotide
ucucuaaacccguucacuu

SEQ ID NO: 2872317 - RNA, 19 nt, Artificial Sequence
  Description of Artificial Sequence: Synthetic oligonucleotide
  modified_base (13)..(13): a, c, u, g, unknown or other
auagauaguguunuaggau

SEQ ID NO: 2872318 - RNA, 19 nt, Artificial Sequence
  Description of Artificial Sequence: Synthetic oligonucleotide
acagacgcgaugaugagca

SEQ ID NO: 2872319 - RNA, 19 nt, Artificial Sequence
  Description of Artificial Sequence: Synthetic oligonucleotide
uauuaccacgugauugcac

SEQ ID NO: 2872320 - RNA, 19 nt, Artificial Sequence
  Description of Artificial Sequence: Synthetic oligonucleotide
gucagguauuucuggauug

SEQ ID NO: 2872321 - RNA, 19 nt, Artificial Sequence
  Description of Artificial Sequence: Synthetic oligonucleotide
gucccauugggguucuugg

SEQ ID NO: 2872322 - RNA, 19 nt, Artificial Sequence
  Description of Artificial Sequence: Synthetic oligonucleotide
cuuggggaggguuguagag

SEQ ID NO: 2872323 - RNA, 19 nt, Artificial Sequence
  Description of Artificial Sequence: Synthetic oligonucleotide
ugucagguauuucuggauu

SEQ ID NO: 2872324 - RNA, 19 nt, Artificial Sequence
  Description of Artificial Sequence: Synthetic oligonucleotide
ugaugagcaggauccaaaa

SEQ ID NO: 2872325 - RNA, 19 nt, Artificial Sequence
  Description of Artificial Sequence: Synthetic oligonucleotide
acaccaaucuagucagcag

SEQ ID NO: 2872326 - RNA, 19 nt, Artificial Sequence
  Description of Artificial Sequence: Synthetic oligonucleotide
uccuuggauugacuccugg

SEQ ID NO: 2872327 - RNA, 19 nt, Artificial Sequence
  Description of Artificial Sequence: Synthetic oligonucleotide
cauggcccugagaagacag

SEQ ID NO: 2872328 - RNA, 19 nt, Artificial Sequence
  Description of Artificial Sequence: Synthetic oligonucleotide
uccugagugaucucguuua

SEQ ID NO: 2872329 - RNA, 19 nt, Artificial Sequence
  Description of Artificial Sequence: Synthetic oligonucleotide
ucccauugggguucuuggg

SEQ ID NO: 2872330 - RNA, 19 nt, Artificial Sequence
  Description of Artificial Sequence: Synthetic oligonucleotide
uggauugacuccugggcac

SEQ ID NO: 2872331 - RNA, 19 nt, Artificial Sequence
  Description of Artificial Sequence: Synthetic oligonucleotide
uugggucggucccauuggg

SEQ ID NO: 2872332 - RNA, 19 nt, Artificial Sequence
  Description of Artificial Sequence: Synthetic oligonucleotide
acgaugaugccgaucacag

SEQ ID NO: 2872333 - RNA, 19 nt, Artificial Sequence
  Description of Artificial Sequence: Synthetic oligonucleotide
gagugaucucguuuauuac

SEQ ID NO: 2872334 - RNA, 19 nt, Artificial Sequence
  Description of Artificial Sequence: Synthetic oligonucleotide
uaccacgugauugcacugg

SEQ ID NO: 2872335 - RNA, 19 nt, Artificial Sequence
  Description of Artificial Sequence: Synthetic oligonucleotide
auagaagcugugauggaug

SEQ ID NO: 2872336 - RNA, 19 nt, Artificial Sequence
  Description of Artificial Sequence: Synthetic oligonucleotide
uuaaaaccauggcccugag

SEQ ID NO: 2872337 - RNA, 19 nt, Artificial Sequence
  Description of Artificial Sequence: Synthetic oligonucleotide
aagcugugauggauguggc

SEQ ID NO: 2872338 - RNA, 19 nt, Artificial Sequence
  Description of Artificial Sequence: Synthetic oligonucleotide
ugauccggauacacuuucc

SEQ ID NO: 2872339 - RNA, 19 nt, Artificial Sequence
  Description of Artificial Sequence: Synthetic oligonucleotide
gcgaugaugagcaggaucc

SEQ ID NO: 2872340 - RNA, 19 nt, Artificial Sequence
  Description of Artificial Sequence: Synthetic oligonucleotide
acuuuccacagguaguaaa

SEQ ID NO: 2872341 - RNA, 19 nt, Artificial Sequence
  Description of Artificial Sequence: Synthetic oligonucleotide
caggauccaaaauaagaca

SEQ ID NO: 2872342 - RNA, 19 nt, Artificial Sequence
  Description of Artificial Sequence: Synthetic oligonucleotide
accacgugauugcacuggg

SEQ ID NO: 2872343 - RNA, 19 nt, Artificial Sequence
  Description of Artificial Sequence: Synthetic oligonucleotide
  modified_base (9)..(9): a, c, u, g, unknown or other
auaguguunuaggaucaug

SEQ ID NO: 2872344 - RNA, 19 nt, Artificial Sequence
  Description of Artificial Sequence: Synthetic oligonucleotide
gauccggauacacuuucca

SEQ ID NO: 2872345 - RNA, 19 nt, Artificial Sequence
  Description of Artificial Sequence: Synthetic oligonucleotide
gcacugaccucucucauag

SEQ ID NO: 2872346 - RNA, 19 nt, Artificial Sequence
  Description of Artificial Sequence: Synthetic oligonucleotide
cuaaacccguucacuuucc

SEQ ID NO: 2872347 - RNA, 19 nt, Artificial Sequence
  Description of Artificial Sequence: Synthetic oligonucleotide
cuguagacgaugaugccga

SEQ ID NO: 2872348 - RNA, 19 nt, Artificial Sequence
  Description of Artificial Sequence: Synthetic oligonucleotide
auggauguggccaucugug

SEQ ID NO: 2872349 - RNA, 19 nt, Artificial Sequence
  Description of Artificial Sequence: Synthetic oligonucleotide
uggggaggguuguagagaa

SEQ ID NO: 2872350 - RNA, 19 nt, Artificial Sequence
  Description of Artificial Sequence: Synthetic oligonucleotide
aacgggaugcgcuccuccu

SEQ ID NO: 2872351 - RNA, 19 nt, Artificial Sequence
  Description of Artificial Sequence: Synthetic oligonucleotide
ucuuggggaggguuguaga

SEQ ID NO: 2872352 - RNA, 19 nt, Artificial Sequence
  Description of Artificial Sequence: Synthetic oligonucleotide
gaucacagacgcgaugaug

SEQ ID NO: 2872353 - RNA, 19 nt, Artificial Sequence
  Description of Artificial Sequence: Synthetic oligonucleotide
aucucguuuauuaccacgu

SEQ ID NO: 2872354 - RNA, 19 nt, Artificial Sequence
  Description of Artificial Sequence: Synthetic oligonucleotide
agacagcacuugcacacag

SEQ ID NO: 2872355 - RNA, 19 nt, Artificial Sequence
  Description of Artificial Sequence: Synthetic oligonucleotide
uaguaaacgggaugcgcuc

SEQ ID NO: 2872356 - RNA, 19 nt, Artificial Sequence
  Description of Artificial Sequence: Synthetic oligonucleotide
  modified_base (11)..(11): a, c, u, g, unknown or other
agauaguguunuaggauca

SEQ ID NO: 2872357 - RNA, 19 nt, Artificial Sequence
  Description of Artificial Sequence: Synthetic oligonucleotide
gcauuucacaccaaucuag

SEQ ID NO: 2872358 - RNA, 19 nt, Artificial Sequence
  Description of Artificial Sequence: Synthetic oligonucleotide
ugauagaagcugugaugga

SEQ ID NO: 2872359 - RNA, 19 nt, Artificial Sequence
  Description of Artificial Sequence: Synthetic oligonucleotide
accaaucuagucagcagag

SEQ ID NO: 2872360 - RNA, 19 nt, Artificial Sequence
  Description of Artificial Sequence: Synthetic oligonucleotide
uuauuaccacgugauugca

SEQ ID NO: 2872361 - RNA, 19 nt, Artificial Sequence
  Description of Artificial Sequence: Synthetic oligonucleotide
ugggcacccaggcauuuca

SEQ ID NO: 2872362 - RNA, 19 nt, Artificial Sequence
  Description of Artificial Sequence: Synthetic oligonucleotide
aaacccguucacuuuccuu

SEQ ID NO: 2872363 - RNA, 19 nt, Artificial Sequence
  Description of Artificial Sequence: Synthetic oligonucleotide
agacgcgaugaugagcagg

SEQ ID NO: 2872364 - RNA, 19 nt, Artificial Sequence
  Description of Artificial Sequence: Synthetic oligonucleotide
augccgaucacagacgcga

SEQ ID NO: 2872365 - RNA, 19 nt, Artificial Sequence
  Description of Artificial Sequence: Synthetic oligonucleotide
acccguucacuuuccuugg

SEQ ID NO: 2872366 - RNA, 19 nt, Artificial Sequence
  Description of Artificial Sequence: Synthetic oligonucleotide
cucguuuauuaccacguga

SEQ ID NO: 2872367 - RNA, 19 nt, Artificial Sequence
  Description of Artificial Sequence: Synthetic oligonucleotide
acccaggcauuucacacca

SEQ ID NO: 2872368 - RNA, 19 nt, Artificial Sequence
  Description of Artificial Sequence: Synthetic oligonucleotide
gugaucucguuuauuacca

SEQ ID NO: 2872369 - RNA, 19 nt, Artificial Sequence
  Description of Artificial Sequence: Synthetic oligonucleotide
ucacagacgcgaugaugag

SEQ ID NO: 2872370 - RNA, 19 nt, Artificial Sequence
  Description of Artificial Sequence: Synthetic oligonucleotide
caucccaaacagugugagg

SEQ ID NO: 2872371 - RNA, 19 nt, Artificial Sequence
  Description of Artificial Sequence: Synthetic oligonucleotide
caccaaucuagucagcaga

SEQ ID NO: 2872372 - RNA, 19 nt, Artificial Sequence
  Description of Artificial Sequence: Synthetic oligonucleotide
uuaccacgugauugcacug

SEQ ID NO: 2872373 - RNA, 19 nt, Artificial Sequence
  Description of Artificial Sequence: Synthetic oligonucleotide
ucuagucagcagaggcccc

SEQ ID NO: 2872374 - RNA, 19 nt, Artificial Sequence
  Description of Artificial Sequence: Synthetic oligonucleotide
ugugaggcagguccucccu

SEQ ID NO: 2872375 - RNA, 19 nt, Artificial Sequence
  Description of Artificial Sequence: Synthetic oligonucleotide
gacgcgaugaugagcagga

SEQ ID NO: 2872376 - RNA, 19 nt, Artificial Sequence
  Description of Artificial Sequence: Synthetic oligonucleotide
aggguuguagagaacacaa

SEQ ID NO: 2872377 - RNA, 19 nt, Artificial Sequence
  Description of Artificial Sequence: Synthetic oligonucleotide
cacaaugaacaccgacagc

SEQ ID NO: 2872378 - RNA, 19 nt, Artificial Sequence
  Description of Artificial Sequence: Synthetic oligonucleotide
ucccaaacagugugaggca

SEQ ID NO: 2872379 - RNA, 19 nt, Artificial Sequence
  Description of Artificial Sequence: Synthetic oligonucleotide
caggcauuucacaccaauc

SEQ ID NO: 2872380 - RNA, 19 nt, Artificial Sequence
  Description of Artificial Sequence: Synthetic oligonucleotide
acuugcacacagcgugauc

SEQ ID NO: 2872381 - RNA, 19 nt, Artificial Sequence
  Description of Artificial Sequence: Synthetic oligonucleotide
uaaacccguucacuuuccu

SEQ ID NO: 2872382 - RNA, 19 nt, Artificial Sequence
  Description of Artificial Sequence: Synthetic oligonucleotide
gacgaugaugccgaucaca

SEQ ID NO: 2872383 - RNA, 19 nt, Artificial Sequence
  Description of Artificial Sequence: Synthetic oligonucleotide
uccucccuucuucacccag

SEQ ID NO: 2872384 - RNA, 19 nt, Artificial Sequence
  Description of Artificial Sequence: Synthetic oligonucleotide
ugaucucguuuauuaccac

SEQ ID NO: 2872385 - RNA, 19 nt, Artificial Sequence
  Description of Artificial Sequence: Synthetic oligonucleotide
cacccaggcauuucacacc

SEQ ID NO: 2872386 - RNA, 19 nt, Artificial Sequence
  Description of Artificial Sequence: Synthetic oligonucleotide
gggcauuuaaaaccauggc

SEQ ID NO: 2872387 - RNA, 19 nt, Artificial Sequence
  Description of Artificial Sequence: Synthetic oligonucleotide
ugcacacagcgugauccgg

SEQ ID NO: 2872388 - RNA, 19 nt, Artificial Sequence
  Description of Artificial Sequence: Synthetic oligonucleotide
cuccuccugagugaucucg

SEQ ID NO: 2872389 - RNA, 19 nt, Artificial Sequence
  Description of Artificial Sequence: Synthetic oligonucleotide
gguaguaaacgggaugcgc

SEQ ID NO: 2872390 - RNA, 19 nt, Artificial Sequence
  Description of Artificial Sequence: Synthetic oligonucleotide
gauggauguggccaucugu

SEQ ID NO: 2872391 - RNA, 19 nt, Artificial Sequence
  Description of Artificial Sequence: Synthetic oligonucleotide
aaacagugugaggcagguc

SEQ ID NO: 2872392 - RNA, 19 nt, Artificial Sequence
  Description of Artificial Sequence: Synthetic oligonucleotide
cagguauuucuggauuggg

SEQ ID NO: 2872393 - RNA, 19 nt, Artificial Sequence
  Description of Artificial Sequence: Synthetic oligonucleotide
augaugccgaucacagacg

SEQ ID NO: 2872394 - RNA, 19 nt, Artificial Sequence
  Description of Artificial Sequence: Synthetic oligonucleotide
ccuguagacgaugaugccg

SEQ ID NO: 2872395 - RNA, 19 nt, Artificial Sequence
  Description of Artificial Sequence: Synthetic oligonucleotide
agguaguaaacgggaugcg

SEQ ID NO: 2872396 - RNA, 19 nt, Artificial Sequence
  Description of Artificial Sequence: Synthetic oligonucleotide
agacgaugaugccgaucac

SEQ ID NO: 2872397 - RNA, 19 nt, Artificial Sequence
  Description of Artificial Sequence: Synthetic oligonucleotide
gaugccgaucacagacgcg

SEQ ID NO: 2872398 - RNA, 19 nt, Artificial Sequence
  Description of Artificial Sequence: Synthetic oligonucleotide
gauagaagcugugauggau

SEQ ID NO: 2872399 - RNA, 19 nt, Artificial Sequence
  Description of Artificial Sequence: Synthetic oligonucleotide
gagcaggauccaaaauaag

SEQ ID NO: 2872400 - RNA, 19 nt, Artificial Sequence
  Description of Artificial Sequence: Synthetic oligonucleotide
gaagcugaugauagaagcu

SEQ ID NO: 2872401 - RNA, 19 nt, Artificial Sequence
  Description of Artificial Sequence: Synthetic oligonucleotide
uccuccugagugaucucgu

SEQ ID NO: 2872402 - RNA, 19 nt, Artificial Sequence
  Description of Artificial Sequence: Synthetic oligonucleotide
uugcacugggcuucauacu

SEQ ID NO: 2872403 - RNA, 19 nt, Artificial Sequence
  Description of Artificial Sequence: Synthetic oligonucleotide
ccuuggauugacuccuggg

SEQ ID NO: 2872404 - RNA, 19 nt, Artificial Sequence
  Description of Artificial Sequence: Synthetic oligonucleotide
cagucucuaaacccguuca

SEQ ID NO: 2872405 - RNA, 19 nt, Artificial Sequence
  Description of Artificial Sequence: Synthetic oligonucleotide
cauuuaaaaccauggcccu

SEQ ID NO: 2872406 - RNA, 19 nt, Artificial Sequence
  Description of Artificial Sequence: Synthetic oligonucleotide
ugaggcagguccucccuuc

SEQ ID NO: 2872407 - RNA, 19 nt, Artificial Sequence
  Description of Artificial Sequence: Synthetic oligonucleotide
acgggaugcgcuccuccuc

SEQ ID NO: 2872408 - RNA, 19 nt, Artificial Sequence
  Description of Artificial Sequence: Synthetic oligonucleotide
guaguaaacgggaugcgcu

SEQ ID NO: 2872409 - RNA, 19 nt, Artificial Sequence
  Description of Artificial Sequence: Synthetic oligonucleotide
cccauugggguucuugggg

SEQ ID NO: 2872410 - RNA, 19 nt, Artificial Sequence
  Description of Artificial Sequence: Synthetic oligonucleotide
acacuuuccacagguagua

SEQ ID NO: 2872411 - RNA, 19 nt, Artificial Sequence
  Description of Artificial Sequence: Synthetic oligonucleotide
cacagacgcgaugaugagc

SEQ ID NO: 2872412 - RNA, 19 nt, Artificial Sequence
  Description of Artificial Sequence: Synthetic oligonucleotide
ggauacacuuuccacaggu

SEQ ID NO: 2872413 - RNA, 19 nt, Artificial Sequence
  Description of Artificial Sequence: Synthetic oligonucleotide
ucacaccaaucuagucagc

SEQ ID NO: 2872414 - RNA, 19 nt, Artificial Sequence
  Description of Artificial Sequence: Synthetic oligonucleotide
cugaugauagaagcuguga

SEQ ID NO: 2872415 - RNA, 19 nt, Artificial Sequence
  Description of Artificial Sequence: Synthetic oligonucleotide
augaacaccgacagccugu

SEQ ID NO: 2872416 - RNA, 19 nt, Artificial Sequence
  Description of Artificial Sequence: Synthetic oligonucleotide
gcugugauggauguggcca

SEQ ID NO: 2872417 - RNA, 19 nt, Artificial Sequence
  Description of Artificial Sequence: Synthetic oligonucleotide
agcugaugauagaagcugu

SEQ ID NO: 2872418 - RNA, 19 nt, Artificial Sequence
  Description of Artificial Sequence: Synthetic oligonucleotide
cauuucacaccaaucuagu

SEQ ID NO: 2872419 - RNA, 19 nt, Artificial Sequence
  Description of Artificial Sequence: Synthetic oligonucleotide
cacaccaaucuagucagca

SEQ ID NO: 2872420 - RNA, 19 nt, Artificial Sequence
  Description of Artificial Sequence: Synthetic oligonucleotide
gauugcacugggcuucaua

SEQ ID NO: 2872421 - RNA, 19 nt, Artificial Sequence
  Description of Artificial Sequence: Synthetic oligonucleotide
gacagcacuugcacacagc

SEQ ID NO: 2872422 - RNA, 19 nt, Artificial Sequence
  Description of Artificial Sequence: Synthetic oligonucleotide
ucuguggugucagguauuu

SEQ ID NO: 2872423 - RNA, 19 nt, Artificial Sequence
  Description of Artificial Sequence: Synthetic oligonucleotide
gauugacuccugggcaccc

SEQ ID NO: 2872424 - RNA, 19 nt, Artificial Sequence
  Description of Artificial Sequence: Synthetic oligonucleotide
ccaaacagugugaggcagg

SEQ ID NO: 2872425 - RNA, 19 nt, Artificial Sequence
  Description of Artificial Sequence: Synthetic oligonucleotide
uuccuuggauugacuccug

SEQ ID NO: 2872426 - RNA, 19 nt, Artificial Sequence
  Description of Artificial Sequence: Synthetic oligonucleotide
gcacccaggcauuucacac

SEQ ID NO: 2872427 - RNA, 19 nt, Artificial Sequence
  Description of Artificial Sequence: Synthetic oligonucleotide
accauggcccugagaagac

SEQ ID NO: 2872428 - RNA, 19 nt, Artificial Sequence
  Description of Artificial Sequence: Synthetic oligonucleotide
  modified_base (10)..(10): a, c, u, g, unknown or other
gauaguguunuaggaucau

SEQ ID NO: 2872429 - RNA, 19 nt, Artificial Sequence
  Description of Artificial Sequence: Synthetic oligonucleotide
agcacugaccucucucaua

SEQ ID NO: 2872430 - RNA, 19 nt, Artificial Sequence
  Description of Artificial Sequence: Synthetic oligonucleotide
acgugauugcacugggcuu

SEQ ID NO: 2872431 - RNA, 19 nt, Artificial Sequence
  Description of Artificial Sequence: Synthetic oligonucleotide
ugaacaccgacagccugua

SEQ ID NO: 2872432 - RNA, 19 nt, Artificial Sequence
  Description of Artificial Sequence: Synthetic oligonucleotide
  modified_base (18)..(18): a, c, u, g, unknown or other
cucucauagauaguguunu

SEQ ID NO: 2872433 - RNA, 19 nt, Artificial Sequence
  Description of Artificial Sequence: Synthetic oligonucleotide
agaagcugugauggaugug

SEQ ID NO: 2872434 - RNA, 19 nt, Artificial Sequence
  Description of Artificial Sequence: Synthetic oligonucleotide
gauacacuuuccacaggua

SEQ ID NO: 2872435 - RNA, 19 nt, Artificial Sequence
  Description of Artificial Sequence: Synthetic oligonucleotide
gaacaccgacagccuguag

SEQ ID NO: 2872436 - RNA, 19 nt, Artificial Sequence
  Description of Artificial Sequence: Synthetic oligonucleotide
cuucacccagcacugaccu

SEQ ID NO: 2872437 - RNA, 19 nt, Artificial Sequence
  Description of Artificial Sequence: Synthetic oligonucleotide
agacagucucuaaacccgu

SEQ ID NO: 2872438 - RNA, 19 nt, Artificial Sequence
  Description of Artificial Sequence: Synthetic oligonucleotide
agcgugauccggauacacu

SEQ ID NO: 2872439 - RNA, 19 nt, Artificial Sequence
  Description of Artificial Sequence: Synthetic oligonucleotide
gcugaugauagaagcugug

SEQ ID NO: 2872440 - RNA, 19 nt, Artificial Sequence
  Description of Artificial Sequence: Synthetic oligonucleotide
  modified_base (4)..(4): a, c, u, g, unknown or other
guunuaggaucaugaugau

SEQ ID NO: 2872441 - RNA, 19 nt, Artificial Sequence
  Description of Artificial Sequence: Synthetic oligonucleotide
gcccugagaagacagucuc

SEQ ID NO: 2872442 - RNA, 19 nt, Artificial Sequence
  Description of Artificial Sequence: Synthetic oligonucleotide
uguagacgaugaugccgau

SEQ ID NO: 2872443 - RNA, 19 nt, Artificial Sequence
  Description of Artificial Sequence: Synthetic oligonucleotide
cugaccucucucauagaua

SEQ ID NO: 2872444 - RNA, 19 nt, Artificial Sequence
  Description of Artificial Sequence: Synthetic oligonucleotide
guagacgaugaugccgauc

SEQ ID NO: 2872445 - RNA, 19 nt, Artificial Sequence
  Description of Artificial Sequence: Synthetic oligonucleotide
cugagaagacagucucuaa

SEQ ID NO: 2872446 - RNA, 19 nt, Artificial Sequence
  Description of Artificial Sequence: Synthetic oligonucleotide
cagcgugauccggauacac

SEQ ID NO: 2872447 - RNA, 19 nt, Artificial Sequence
  Description of Artificial Sequence: Synthetic oligonucleotide
gucucuaaacccguucacu

SEQ ID NO: 2872448 - RNA, 19 nt, Artificial Sequence
  Description of Artificial Sequence: Synthetic oligonucleotide
ccaaucuagucagcagagg

SEQ ID NO: 2872449 - RNA, 19 nt, Artificial Sequence
  Description of Artificial Sequence: Synthetic oligonucleotide
cagguccucccuucuucac

SEQ ID NO: 2872450 - RNA, 19 nt, Artificial Sequence
  Description of Artificial Sequence: Synthetic oligonucleotide
ugccgaucacagacgcgau

SEQ ID NO: 2872451 - RNA, 19 nt, Artificial Sequence
  Description of Artificial Sequence: Synthetic oligonucleotide
agaacacaaugaacaccga

SEQ ID NO: 2872452 - RNA, 19 nt, Artificial Sequence
  Description of Artificial Sequence: Synthetic oligonucleotide
ggcagguccucccuucuuc

SEQ ID NO: 2872453 - RNA, 19 nt, Artificial Sequence
  Description of Artificial Sequence: Synthetic oligonucleotide
ggauugacuccugggcacc

SEQ ID NO: 2872454 - RNA, 19 nt, Artificial Sequence
  Description of Artificial Sequence: Synthetic oligonucleotide
caccgacagccuguagacg

SEQ ID NO: 2872455 - RNA, 19 nt, Artificial Sequence
  Description of Artificial Sequence: Synthetic oligonucleotide
uaaacgggaugcgcuccuc

SEQ ID NO: 2872456 - RNA, 19 nt, Artificial Sequence
  Description of Artificial Sequence: Synthetic oligonucleotide
caucuguggugucagguau

SEQ ID NO: 2872457 - RNA, 19 nt, Artificial Sequence
  Description of Artificial Sequence: Synthetic oligonucleotide
auugacuccugggcaccca

SEQ ID NO: 2872458 - RNA, 19 nt, Artificial Sequence
  Description of Artificial Sequence: Synthetic oligonucleotide
auuucuggauugggucggu

SEQ ID NO: 2872459 - RNA, 19 nt, Artificial Sequence
  Description of Artificial Sequence: Synthetic oligonucleotide
uggauugggucggucccau

SEQ ID NO: 2872460 - RNA, 19 nt, Artificial Sequence
  Description of Artificial Sequence: Synthetic oligonucleotide
gucggucccauugggguuc

SEQ ID NO: 2872461 - RNA, 19 nt, Artificial Sequence
  Description of Artificial Sequence: Synthetic oligonucleotide
guaaacgggaugcgcuccu

SEQ ID NO: 2872462 - RNA, 19 nt, Artificial Sequence
  Description of Artificial Sequence: Synthetic oligonucleotide
cagacgcgaugaugagcag

SEQ ID NO: 2872463 - RNA, 19 nt, Artificial Sequence
  Description of Artificial Sequence: Synthetic oligonucleotide
cccaaacagugugaggcag

SEQ ID NO: 2872464 - RNA, 19 nt, Artificial Sequence
  Description of Artificial Sequence: Synthetic oligonucleotide
ggaggguuguagagaacac

SEQ ID NO: 2872465 - RNA, 19 nt, Artificial Sequence
  Description of Artificial Sequence: Synthetic oligonucleotide
ggauguggccaucuguggu

SEQ ID NO: 2872466 - RNA, 19 nt, Artificial Sequence
  Description of Artificial Sequence: Synthetic oligonucleotide
caaacagugugaggcaggu

SEQ ID NO: 2872467 - RNA, 19 nt, Artificial Sequence
  Description of Artificial Sequence: Synthetic oligonucleotide
gcgcuccuccuccugagug

SEQ ID NO: 2872468 - RNA, 19 nt, Artificial Sequence
  Description of Artificial Sequence: Synthetic oligonucleotide
cucuaaacccguucacuuu

SEQ ID NO: 2872469 - RNA, 19 nt, Artificial Sequence
  Description of Artificial Sequence: Synthetic oligonucleotide
cgugauugcacugggcuuc

SEQ ID NO: 2872470 - RNA, 19 nt, Artificial Sequence
  Description of Artificial Sequence: Synthetic oligonucleotide
acagcgugauccggauaca

SEQ ID NO: 2872471 - RNA, 19 nt, Artificial Sequence
  Description of Artificial Sequence: Synthetic oligonucleotide
acacagcgugauccggaua

SEQ ID NO: 2872472 - RNA, 19 nt, Artificial Sequence
  Description of Artificial Sequence: Synthetic oligonucleotide
cgcgaugaugagcaggauc

SEQ ID NO: 2872473 - RNA, 19 nt, Artificial Sequence
  Description of Artificial Sequence: Synthetic oligonucleotide
gcagguccucccuucuuca

SEQ ID NO: 2872474 - RNA, 19 nt, Artificial Sequence
  Description of Artificial Sequence: Synthetic oligonucleotide
ccaaaauaagacagcacuu

SEQ ID NO: 2872475 - RNA, 19 nt, Artificial Sequence
  Description of Artificial Sequence: Synthetic oligonucleotide
ccacgugauugcacugggc

SEQ ID NO: 2872476 - RNA, 19 nt, Artificial Sequence
  Description of Artificial Sequence: Synthetic oligonucleotide
cccagcacugaccucucuc

SEQ ID NO: 2872477 - RNA, 19 nt, Artificial Sequence
  Description of Artificial Sequence: Synthetic oligonucleotide
aucuguggugucagguauu

SEQ ID NO: 2872478 - RNA, 19 nt, Artificial Sequence
  Description of Artificial Sequence: Synthetic oligonucleotide
gcgugauccggauacacuu

SEQ ID NO: 2872479 - RNA, 19 nt, Artificial Sequence
  Description of Artificial Sequence: Synthetic oligonucleotide
gaggcagguccucccuucu

SEQ ID NO: 2872480 - RNA, 19 nt, Artificial Sequence
  Description of Artificial Sequence: Synthetic oligonucleotide
cuggauugggucgguccca

SEQ ID NO: 2872481 - RNA, 19 nt, Artificial Sequence
  Description of Artificial Sequence: Synthetic oligonucleotide
cgggaugcgcuccuccucc

SEQ ID NO: 2872482 - RNA, 19 nt, Artificial Sequence
  Description of Artificial Sequence: Synthetic oligonucleotide
ccugagaagacagucucua

SEQ ID NO: 2872483 - RNA, 19 nt, Artificial Sequence
  Description of Artificial Sequence: Synthetic oligonucleotide
acccagcacugaccucucu

SEQ ID NO: 2872484 - RNA, 19 nt, Artificial Sequence
  Description of Artificial Sequence: Synthetic oligonucleotide
cuguggugucagguauuuc

SEQ ID NO: 2872485 - RNA, 19 nt, Artificial Sequence
  Description of Artificial Sequence: Synthetic oligonucleotide
cuucuucacccagcacuga

SEQ ID NO: 2872486 - RNA, 19 nt, Artificial Sequence
  Description of Artificial Sequence: Synthetic oligonucleotide
cuccugagugaucucguuu

SEQ ID NO: 2872487 - RNA, 19 nt, Artificial Sequence
  Description of Artificial Sequence: Synthetic oligonucleotide
cugggcacccaggcauuuc

SEQ ID NO: 2872488 - RNA, 19 nt, Artificial Sequence
  Description of Artificial Sequence: Synthetic oligonucleotide
gcacacagcgugauccgga

SEQ ID NO: 2872489 - RNA, 19 nt, Artificial Sequence
  Description of Artificial Sequence: Synthetic oligonucleotide
cacugaccucucucauaga

SEQ ID NO: 2872490 - RNA, 19 nt, Artificial Sequence
  Description of Artificial Sequence: Synthetic oligonucleotide
cagcacuugcacacagcgu

SEQ ID NO: 2872491 - RNA, 19 nt, Artificial Sequence
  Description of Artificial Sequence: Synthetic oligonucleotide
cacacagcgugauccggau

SEQ ID NO: 2872492 - RNA, 19 nt, Artificial Sequence
  Description of Artificial Sequence: Synthetic oligonucleotide
ccaucuguggugucaggua

SEQ ID NO: 2872493 - RNA, 19 nt, Artificial Sequence
  Description of Artificial Sequence: Synthetic oligonucleotide
cacuuuccacagguaguaa

SEQ ID NO: 2872494 - RNA, 19 nt, Artificial Sequence
  Description of Artificial Sequence: Synthetic oligonucleotide
gguucuuggggaggguugu

SEQ ID NO: 2872495 - RNA, 19 nt, Artificial Sequence
  Description of Artificial Sequence: Synthetic oligonucleotide
ugauugcacugggcuucau

SEQ ID NO: 2872496 - RNA, 19 nt, Artificial Sequence
  Description of Artificial Sequence: Synthetic oligonucleotide
guccucccuucuucaccca

SEQ ID NO: 2872497 - RNA, 19 nt, Artificial Sequence
  Description of Artificial Sequence: Synthetic oligonucleotide
gacagucucuaaacccguu

SEQ ID NO: 2872498 - RNA, 19 nt, Artificial Sequence
  Description of Artificial Sequence: Synthetic oligonucleotide
gcacuugcacacagcguga

SEQ ID NO: 2872499 - RNA, 19 nt, Artificial Sequence
  Description of Artificial Sequence: Synthetic oligonucleotide
aggccccaucccaaacagu

SEQ ID NO: 2872500 - RNA, 19 nt, Artificial Sequence
  Description of Artificial Sequence: Synthetic oligonucleotide
gccaucuguggugucaggu

SEQ ID NO: 2872501 - RNA, 19 nt, Artificial Sequence
  Description of Artificial Sequence: Synthetic oligonucleotide
gaccucucucauagauagu

SEQ ID NO: 2872502 - RNA, 19 nt, Artificial Sequence
  Description of Artificial Sequence: Synthetic oligonucleotide
acgcgaugaugagcaggau

SEQ ID NO: 2872503 - RNA, 19 nt, Artificial Sequence
  Description of Artificial Sequence: Synthetic oligonucleotide
ccaggcauuucacaccaau

SEQ ID NO: 2872504 - RNA, 19 nt, Artificial Sequence
  Description of Artificial Sequence: Synthetic oligonucleotide
cugagugaucucguuuauu

SEQ ID NO: 2872505 - RNA, 19 nt, Artificial Sequence
  Description of Artificial Sequence: Synthetic oligonucleotide
gugaggcagguccucccuu

SEQ ID NO: 2872506 - RNA, 19 nt, Artificial Sequence
  Description of Artificial Sequence: Synthetic oligonucleotide
ggguuguagagaacacaau

SEQ ID NO: 2872507 - RNA, 19 nt, Artificial Sequence
  Description of Artificial Sequence: Synthetic oligonucleotide
ggggaggguuguagagaac

SEQ ID NO: 2872508 - RNA, 19 nt, Artificial Sequence
  Description of Artificial Sequence: Synthetic oligonucleotide
cgaugaugccgaucacaga

SEQ ID NO: 2872509 - RNA, 19 nt, Artificial Sequence
  Description of Artificial Sequence: Synthetic oligonucleotide
ggucggucccauugggguu

SEQ ID NO: 2872510 - RNA, 19 nt, Artificial Sequence
  Description of Artificial Sequence: Synthetic oligonucleotide
cacuugcacacagcgugau

SEQ ID NO: 2872511 - RNA, 19 nt, Artificial Sequence
  Description of Artificial Sequence: Synthetic oligonucleotide
cccugagaagacagucucu

SEQ ID NO: 2872512 - RNA, 19 nt, Artificial Sequence
  Description of Artificial Sequence: Synthetic oligonucleotide
cguucacuuuccuuggauu

SEQ ID NO: 2872513 - RNA, 19 nt, Artificial Sequence
  Description of Artificial Sequence: Synthetic oligonucleotide
cgacagccuguagacgaug

SEQ ID NO: 2872514 - RNA, 19 nt, Artificial Sequence
  Description of Artificial Sequence: Synthetic oligonucleotide
cccguucacuuuccuugga

SEQ ID NO: 2872515 - RNA, 19 nt, Artificial Sequence
  Description of Artificial Sequence: Synthetic oligonucleotide
ccauggcccugagaagaca

SEQ ID NO: 2872516 - RNA, 19 nt, Artificial Sequence
  Description of Artificial Sequence: Synthetic oligonucleotide
ccugagugaucucguuuau

SEQ ID NO: 2872517 - RNA, 19 nt, Artificial Sequence
  Description of Artificial Sequence: Synthetic oligonucleotide
cguuuauuaccacgugauu

SEQ ID NO: 2872518 - RNA, 19 nt, Artificial Sequence
  Description of Artificial Sequence: Synthetic oligonucleotide
cgaugaugagcaggaucca

SEQ ID NO: 2872519 - RNA, 19 nt, Artificial Sequence
  Description of Artificial Sequence: Synthetic oligonucleotide
gccccaucccaaacagugu

SEQ ID NO: 2872520 - RNA, 19 nt, Artificial Sequence
  Description of Artificial Sequence: Synthetic oligonucleotide
cgugauccggauacacuuu

SEQ ID NO: 2872521 - RNA, 19 nt, Artificial Sequence
  Description of Artificial Sequence: Synthetic oligonucleotide
ccgacagccuguagacgau

SEQ ID NO: 2872522 - RNA, 19 nt, Artificial Sequence
  Description of Artificial Sequence: Synthetic oligonucleotide
ccuccugagugaucucguu

SEQ ID NO: 2872523 - RNA, 19 nt, Artificial Sequence
  Description of Artificial Sequence: Synthetic oligonucleotide
ggauugggucggucccauu

SEQ ID NO: 2872524 - RNA, 19 nt, Artificial Sequence
  Description of Artificial Sequence: Synthetic oligonucleotide
cccaggcauuucacaccaa

SEQ ID NO: 2872525 - RNA, 19 nt, Artificial Sequence
  Description of Artificial Sequence: Synthetic oligonucleotide
cgaucacagacgcgaugau

SEQ ID NO: 2872526 - RNA, 19 nt, Artificial Sequence
  Description of Artificial Sequence: Synthetic oligonucleotide
ccugggcacccaggcauuu

SEQ ID NO: 2872527 - RNA, 19 nt, Artificial Sequence
  Description of Artificial Sequence: Synthetic oligonucleotide
uuggcaaagaucaugaggg

SEQ ID NO: 2872528 - RNA, 19 nt, Artificial Sequence
  Description of Artificial Sequence: Synthetic oligonucleotide
ucauacauguccuucaugc

SEQ ID NO: 2872529 - RNA, 19 nt, Artificial Sequence
  Description of Artificial Sequence: Synthetic oligonucleotide
uguagauaagaauugguug

SEQ ID NO: 2872530 - RNA, 19 nt, Artificial Sequence
  Description of Artificial Sequence: Synthetic oligonucleotide
acuuaaucuccacagugcc

SEQ ID NO: 2872531 - RNA, 19 nt, Artificial Sequence
  Description of Artificial Sequence: Synthetic oligonucleotide
guagauaagaauugguugc

SEQ ID NO: 2872532 - RNA, 19 nt, Artificial Sequence
  Description of Artificial Sequence: Synthetic oligonucleotide
aagaauugguugcuuguac

SEQ ID NO: 2872533 - RNA, 19 nt, Artificial Sequence
  Description of Artificial Sequence: Synthetic oligonucleotide
aacuuaaucuccacagugc

SEQ ID NO: 2872534 - RNA, 19 nt, Artificial Sequence
  Description of Artificial Sequence: Synthetic oligonucleotide
aauugguugcuuguacugc

SEQ ID NO: 2872535 - RNA, 19 nt, Artificial Sequence
  Description of Artificial Sequence: Synthetic oligonucleotide
guuggcaaagaucaugagg

SEQ ID NO: 2872536 - RNA, 19 nt, Artificial Sequence
  Description of Artificial Sequence: Synthetic oligonucleotide
gaacuuaaucuccacagug

SEQ ID NO: 2872537 - RNA, 19 nt, Artificial Sequence
  Description of Artificial Sequence: Synthetic oligonucleotide
ugggauguagauaagaauu

SEQ ID NO: 2872538 - RNA, 19 nt, Artificial Sequence
  Description of Artificial Sequence: Synthetic oligonucleotide
gauaagaauugguugcuug

SEQ ID NO: 2872539 - RNA, 19 nt, Artificial Sequence
  Description of Artificial Sequence: Synthetic oligonucleotide
ugcacacugggucuaaccg

SEQ ID NO: 2872540 - RNA, 19 nt, Artificial Sequence
  Description of Artificial Sequence: Synthetic oligonucleotide
ucgaggacaacccacgagc

SEQ ID NO: 2872541 - RNA, 19 nt, Artificial Sequence
  Description of Artificial Sequence: Synthetic oligonucleotide
aaauugcacugccaccugg

SEQ ID NO: 2872542 - RNA, 19 nt, Artificial Sequence
  Description of Artificial Sequence: Synthetic oligonucleotide
ucagcaucugcucauacau

SEQ ID NO: 2872543 - RNA, 19 nt, Artificial Sequence
  Description of Artificial Sequence: Synthetic oligonucleotide
uagggugggauguagauaa

SEQ ID NO: 2872544 - RNA, 19 nt, Artificial Sequence
  Description of Artificial Sequence: Synthetic oligonucleotide
uuucuugcggaacuuaauc

SEQ ID NO: 2872545 - RNA, 19 nt, Artificial Sequence
  Description of Artificial Sequence: Synthetic oligonucleotide
uucaccagaucuuucuugc

SEQ ID NO: 2872546 - RNA, 19 nt, Artificial Sequence
  Description of Artificial Sequence: Synthetic oligonucleotide
uuaaucuccacagugcccu

SEQ ID NO: 2872547 - RNA, 19 nt, Artificial Sequence
  Description of Artificial Sequence: Synthetic oligonucleotide
ugucccacgagcuucuugc

SEQ ID NO: 2872548 - RNA, 19 nt, Artificial Sequence
  Description of Artificial Sequence: Synthetic oligonucleotide
gaauugguugcuuguacug

SEQ ID NO: 2872549 - RNA, 19 nt, Artificial Sequence
  Description of Artificial Sequence: Synthetic oligonucleotide
uaggcuccaaacuucagca

SEQ ID NO: 2872550 - RNA, 19 nt, Artificial Sequence
  Description of Artificial Sequence: Synthetic oligonucleotide
auaagaauugguugcuugu

SEQ ID NO: 2872551 - RNA, 19 nt, Artificial Sequence
  Description of Artificial Sequence: Synthetic oligonucleotide
ucaugaugaggacaaacau

SEQ ID NO: 2872552 - RNA, 19 nt, Artificial Sequence
  Description of Artificial Sequence: Synthetic oligonucleotide
auacauguccuucaugcca

SEQ ID NO: 2872553 - RNA, 19 nt, Artificial Sequence
  Description of Artificial Sequence: Synthetic oligonucleotide
agcaucugcucauacaugu

SEQ ID NO: 2872554 - RNA, 19 nt, Artificial Sequence
  Description of Artificial Sequence: Synthetic oligonucleotide
cuugcggaacuuaaucucc

SEQ ID NO: 2872555 - RNA, 19 nt, Artificial Sequence
  Description of Artificial Sequence: Synthetic oligonucleotide
aggacaacccacgagcccc

SEQ ID NO: 2872556 - RNA, 19 nt, Artificial Sequence
  Description of Artificial Sequence: Synthetic oligonucleotide
aacagcagguccucucggg

SEQ ID NO: 2872557 - RNA, 19 nt, Artificial Sequence
  Description of Artificial Sequence: Synthetic oligonucleotide
uccuugucagcguacaucu

SEQ ID NO: 2872558 - RNA, 19 nt, Artificial Sequence
  Description of Artificial Sequence: Synthetic oligonucleotide
aaacuucagcaucugcuca

SEQ ID NO: 2872559 - RNA, 19 nt, Artificial Sequence
  Description of Artificial Sequence: Synthetic oligonucleotide
cuccaguuggcaaagauca

SEQ ID NO: 2872560 - RNA, 19 nt, Artificial Sequence
  Description of Artificial Sequence: Synthetic oligonucleotide
uucuugcggaacuuaaucu

SEQ ID NO: 2872561 - RNA, 19 nt, Artificial Sequence
  Description of Artificial Sequence: Synthetic oligonucleotide
ugaggggcaguucaugaug

SEQ ID NO: 2872562 - RNA, 19 nt, Artificial Sequence
  Description of Artificial Sequence: Synthetic oligonucleotide
ucaugcagucggcaaauug

SEQ ID NO: 2872563 - RNA, 19 nt, Artificial Sequence
  Description of Artificial Sequence: Synthetic oligonucleotide
gauggggaacagcaggucc

SEQ ID NO: 2872564 - RNA, 19 nt, Artificial Sequence
  Description of Artificial Sequence: Synthetic oligonucleotide
caucugcucauacaugucc

SEQ ID NO: 2872565 - RNA, 19 nt, Artificial Sequence
  Description of Artificial Sequence: Synthetic oligonucleotide
agaucuuucuugcggaacu

SEQ ID NO: 2872566 - RNA, 19 nt, Artificial Sequence
  Description of Artificial Sequence: Synthetic oligonucleotide
agaauugguugcuuguacu

SEQ ID NO: 2872567 - RNA, 19 nt, Artificial Sequence
  Description of Artificial Sequence: Synthetic oligonucleotide
uacauguccuucaugccac

SEQ ID NO: 2872568 - RNA, 19 nt, Artificial Sequence
  Description of Artificial Sequence: Synthetic oligonucleotide
gggucuaaccgucucaugg

SEQ ID NO: 2872569 - RNA, 19 nt, Artificial Sequence
  Description of Artificial Sequence: Synthetic oligonucleotide
ucuugcggaacuuaaucuc

SEQ ID NO: 2872570 - RNA, 19 nt, Artificial Sequence
  Description of Artificial Sequence: Synthetic oligonucleotide
cuucaugccaccagagaag

SEQ ID NO: 2872571 - RNA, 19 nt, Artificial Sequence
  Description of Artificial Sequence: Synthetic oligonucleotide
gaucaugaggggcaguuca

SEQ ID NO: 2872572 - RNA, 19 nt, Artificial Sequence
  Description of Artificial Sequence: Synthetic oligonucleotide
cuuaaucuccacagugccc

SEQ ID NO: 2872573 - RNA, 19 nt, Artificial Sequence
  Description of Artificial Sequence: Synthetic oligonucleotide
caaacuucagcaucugcuc

SEQ ID NO: 2872574 - RNA, 19 nt, Artificial Sequence
  Description of Artificial Sequence: Synthetic oligonucleotide
gagaagccucuccaguugg

SEQ ID NO: 2872575 - RNA, 19 nt, Artificial Sequence
  Description of Artificial Sequence: Synthetic oligonucleotide
guaggcuccaaacuucagc

SEQ ID NO: 2872576 - RNA, 19 nt, Artificial Sequence
  Description of Artificial Sequence: Synthetic oligonucleotide
cacgauguaggcuccaaac

SEQ ID NO: 2872577 - RNA, 19 nt, Artificial Sequence
  Description of Artificial Sequence: Synthetic oligonucleotide
ucuccaguuggcaaagauc

SEQ ID NO: 2872578 - RNA, 19 nt, Artificial Sequence
  Description of Artificial Sequence: Synthetic oligonucleotide
uugguugcuuguacugccg

SEQ ID NO: 2872579 - RNA, 19 nt, Artificial Sequence
  Description of Artificial Sequence: Synthetic oligonucleotide
ucuuucuugcggaacuuaa

SEQ ID NO: 2872580 - RNA, 19 nt, Artificial Sequence
  Description of Artificial Sequence: Synthetic oligonucleotide
cuugcgguccuugucaggg

SEQ ID NO: 2872581 - RNA, 19 nt, Artificial Sequence
  Description of Artificial Sequence: Synthetic oligonucleotide
uguccuucaugccaccaga

SEQ ID NO: 2872582 - RNA, 19 nt, Artificial Sequence
  Description of Artificial Sequence: Synthetic oligonucleotide
cauacauguccuucaugcc

SEQ ID NO: 2872583 - RNA, 19 nt, Artificial Sequence
  Description of Artificial Sequence: Synthetic oligonucleotide
caccagaucuuucuugcgg

SEQ ID NO: 2872584 - RNA, 19 nt, Artificial Sequence
  Description of Artificial Sequence: Synthetic oligonucleotide
ucuaaccgucucauggucu

SEQ ID NO: 2872585 - RNA, 19 nt, Artificial Sequence
  Description of Artificial Sequence: Synthetic oligonucleotide
gaggccauccacgauguag

SEQ ID NO: 2872586 - RNA, 19 nt, Artificial Sequence
  Description of Artificial Sequence: Synthetic oligonucleotide
uugcuuguacugccggagg

SEQ ID NO: 2872587 - RNA, 19 nt, Artificial Sequence
  Description of Artificial Sequence: Synthetic oligonucleotide
acgagcuucuugcacacug

SEQ ID NO: 2872588 - RNA, 19 nt, Artificial Sequence
  Description of Artificial Sequence: Synthetic oligonucleotide
ugcucauacauguccuuca

SEQ ID NO: 2872589 - RNA, 19 nt, Artificial Sequence
  Description of Artificial Sequence: Synthetic oligonucleotide
gggugugucaugcagucgg

SEQ ID NO: 2872590 - RNA, 19 nt, Artificial Sequence
  Description of Artificial Sequence: Synthetic oligonucleotide
aacuucagcaucugcucau

SEQ ID NO: 2872591 - RNA, 19 nt, Artificial Sequence
  Description of Artificial Sequence: Synthetic oligonucleotide
ugguugcuuguacugccgg

SEQ ID NO: 2872592 - RNA, 19 nt, Artificial Sequence
  Description of Artificial Sequence: Synthetic oligonucleotide
guccuugucagggagcugg

SEQ ID NO: 2872593 - RNA, 19 nt, Artificial Sequence
  Description of Artificial Sequence: Synthetic oligonucleotide
ugcuuguacugccggaggc

SEQ ID NO: 2872594 - RNA, 19 nt, Artificial Sequence
  Description of Artificial Sequence: Synthetic oligonucleotide
uucaugccaccagagaagc

SEQ ID NO: 2872595 - RNA, 19 nt, Artificial Sequence
  Description of Artificial Sequence: Synthetic oligonucleotide
acugccggaggccauccac

SEQ ID NO: 2872596 - RNA, 19 nt, Artificial Sequence
  Description of Artificial Sequence: Synthetic oligonucleotide
uccaaacuucagcaucugc

SEQ ID NO: 2872597 - RNA, 19 nt, Artificial Sequence
  Description of Artificial Sequence: Synthetic oligonucleotide
agcguacaucucuaugcac

SEQ ID NO: 2872598 - RNA, 19 nt, Artificial Sequence
  Description of Artificial Sequence: Synthetic oligonucleotide
agagaagccucuccaguug

SEQ ID NO: 2872599 - RNA, 19 nt, Artificial Sequence
  Description of Artificial Sequence: Synthetic oligonucleotide
acgauguaggcuccaaacu

SEQ ID NO: 2872600 - RNA, 19 nt, Artificial Sequence
  Description of Artificial Sequence: Synthetic oligonucleotide
uggcaaagaucaugagggg

SEQ ID NO: 2872601 - RNA, 19 nt, Artificial Sequence
  Description of Artificial Sequence: Synthetic oligonucleotide
uagauaagaauugguugcu

SEQ ID NO: 2872602 - RNA, 19 nt, Artificial Sequence
  Description of Artificial Sequence: Synthetic oligonucleotide
ucucauggucuucaccaga

SEQ ID NO: 2872603 - RNA, 19 nt, Artificial Sequence
  Description of Artificial Sequence: Synthetic oligonucleotide
cacguagcucagcauaggg

SEQ ID NO: 2872604 - RNA, 19 nt, Artificial Sequence
  Description of Artificial Sequence: Synthetic oligonucleotide
ggauguagauaagaauugg

SEQ ID NO: 2872605 - RNA, 19 nt, Artificial Sequence
  Description of Artificial Sequence: Synthetic oligonucleotide
accagaucuuucuugcgga

SEQ ID NO: 2872606 - RNA, 19 nt, Artificial Sequence
  Description of Artificial Sequence: Synthetic oligonucleotide
ugugucaugcagucggcaa

SEQ ID NO: 2872607 - RNA, 19 nt, Artificial Sequence
  Description of Artificial Sequence: Synthetic oligonucleotide
gagucgaggacaacccacg

SEQ ID NO: 2872608 - RNA, 19 nt, Artificial Sequence
  Description of Artificial Sequence: Synthetic oligonucleotide
guugaugguggagucgagg

SEQ ID NO: 2872609 - RNA, 19 nt, Artificial Sequence
  Description of Artificial Sequence: Synthetic oligonucleotide
gaacagcagguccucucgg

SEQ ID NO: 2872610 - RNA, 19 nt, Artificial Sequence
  Description of Artificial Sequence: Synthetic oligonucleotide
uugcacacugggucuaacc

SEQ ID NO: 2872611 - RNA, 19 nt, Artificial Sequence
  Description of Artificial Sequence: Synthetic oligonucleotide
ugcgguccuugucagggag

SEQ ID NO: 2872612 - RNA, 19 nt, Artificial Sequence
  Description of Artificial Sequence: Synthetic oligonucleotide
acugccaccuggugguagg

SEQ ID NO: 2872613 - RNA, 19 nt, Artificial Sequence
  Description of Artificial Sequence: Synthetic oligonucleotide
cucucgggccuucagcugg

SEQ ID NO: 2872614 - RNA, 19 nt, Artificial Sequence
  Description of Artificial Sequence: Synthetic oligonucleotide
uccuucaugccaccagaga

SEQ ID NO: 2872615 - RNA, 19 nt, Artificial Sequence
  Description of Artificial Sequence: Synthetic oligonucleotide
cucagcauagggugggaug

SEQ ID NO: 2872616 - RNA, 19 nt, Artificial Sequence
  Description of Artificial Sequence: Synthetic oligonucleotide
aagaucaugaggggcaguu

SEQ ID NO: 2872617 - RNA, 19 nt, Artificial Sequence
  Description of Artificial Sequence: Synthetic oligonucleotide
uguaggcuccaaacuucag

SEQ ID NO: 2872618 - RNA, 19 nt, Artificial Sequence
  Description of Artificial Sequence: Synthetic oligonucleotide
aguuggcaaagaucaugag

SEQ ID NO: 2872619 - RNA, 19 nt, Artificial Sequence
  Description of Artificial Sequence: Synthetic oligonucleotide
auguagauaagaauugguu

SEQ ID NO: 2872620 - RNA, 19 nt, Artificial Sequence
  Description of Artificial Sequence: Synthetic oligonucleotide
guugcuuguacugccggag

SEQ ID NO: 2872621 - RNA, 19 nt, Artificial Sequence
  Description of Artificial Sequence: Synthetic oligonucleotide
caguuggcaaagaucauga

SEQ ID NO: 2872622 - RNA, 19 nt, Artificial Sequence
  Description of Artificial Sequence: Synthetic oligonucleotide
cagucggcaaauugcacug

SEQ ID NO: 2872623 - RNA, 19 nt, Artificial Sequence
  Description of Artificial Sequence: Synthetic oligonucleotide
uugcggaacuuaaucucca

SEQ ID NO: 2872624 - RNA, 19 nt, Artificial Sequence
  Description of Artificial Sequence: Synthetic oligonucleotide
cacagugcccucuggcucc

SEQ ID NO: 2872625 - RNA, 19 nt, Artificial Sequence
  Description of Artificial Sequence: Synthetic oligonucleotide
uaagaauugguugcuugua

SEQ ID NO: 2872626 - RNA, 19 nt, Artificial Sequence
  Description of Artificial Sequence: Synthetic oligonucleotide
aauugcacugccaccuggu

SEQ ID NO: 2872627 - RNA, 19 nt, Artificial Sequence
  Description of Artificial Sequence: Synthetic oligonucleotide
acauguccuucaugccacc

SEQ ID NO: 2872628 - RNA, 19 nt, Artificial Sequence
  Description of Artificial Sequence: Synthetic oligonucleotide
caguucaugaugaggacaa

SEQ ID NO: 2872629 - RNA, 19 nt, Artificial Sequence
  Description of Artificial Sequence: Synthetic oligonucleotide
ucggcaaauugcacugcca

SEQ ID NO: 2872630 - RNA, 19 nt, Artificial Sequence
  Description of Artificial Sequence: Synthetic oligonucleotide
gauguagauaagaauuggu

SEQ ID NO: 2872631 - RNA, 19 nt, Artificial Sequence
  Description of Artificial Sequence: Synthetic oligonucleotide
gaggacaacccacgagccc

SEQ ID NO: 2872632 - RNA, 19 nt, Artificial Sequence
  Description of Artificial Sequence: Synthetic oligonucleotide
uggagucgaggacaaccca

SEQ ID NO: 2872633 - RNA, 19 nt, Artificial Sequence
  Description of Artificial Sequence: Synthetic oligonucleotide
gguggagucgaggacaacc

SEQ ID NO: 2872634 - RNA, 19 nt, Artificial Sequence
  Description of Artificial Sequence: Synthetic oligonucleotide
guagcucagcauagggugg

SEQ ID NO: 2872635 - RNA, 19 nt, Artificial Sequence
  Description of Artificial Sequence: Synthetic oligonucleotide
gucgaggacaacccacgag

SEQ ID NO: 2872636 - RNA, 19 nt, Artificial Sequence
  Description of Artificial Sequence: Synthetic oligonucleotide
ccauccacgauguaggcuc

SEQ ID NO: 2872637 - RNA, 19 nt, Artificial Sequence
  Description of Artificial Sequence: Synthetic oligonucleotide
gucggcaaauugcacugcc

SEQ ID NO: 2872638 - RNA, 19 nt, Artificial Sequence
  Description of Artificial Sequence: Synthetic oligonucleotide
aagccucuccaguuggcaa

SEQ ID NO: 2872639 - RNA, 19 nt, Artificial Sequence
  Description of Artificial Sequence: Synthetic oligonucleotide
uccuugucagggagcuggg

SEQ ID NO: 2872640 - RNA, 19 nt, Artificial Sequence
  Description of Artificial Sequence: Synthetic oligonucleotide
auugcacugccaccuggug

SEQ ID NO: 2872641 - RNA, 19 nt, Artificial Sequence
  Description of Artificial Sequence: Synthetic oligonucleotide
acugggucuaaccgucuca

SEQ ID NO: 2872642 - RNA, 19 nt, Artificial Sequence
  Description of Artificial Sequence: Synthetic oligonucleotide
cggaacuuaaucuccacag

SEQ ID NO: 2872643 - RNA, 19 nt, Artificial Sequence
  Description of Artificial Sequence: Synthetic oligonucleotide
ucaugaggggcaguucaug

SEQ ID NO: 2872644 - RNA, 19 nt, Artificial Sequence
  Description of Artificial Sequence: Synthetic oligonucleotide
gggauguagauaagaauug

SEQ ID NO: 2872645 - RNA, 19 nt, Artificial Sequence
  Description of Artificial Sequence: Synthetic oligonucleotide
caugaggggcaguucauga

SEQ ID NO: 2872646 - RNA, 19 nt, Artificial Sequence
  Description of Artificial Sequence: Synthetic oligonucleotide
cucauacauguccuucaug

SEQ ID NO: 2872647 - RNA, 19 nt, Artificial Sequence
  Description of Artificial Sequence: Synthetic oligonucleotide
gucucauggucuucaccag

SEQ ID NO: 2872648 - RNA, 19 nt, Artificial Sequence
  Description of Artificial Sequence: Synthetic oligonucleotide
uccuugcgguccuugucag

SEQ ID NO: 2872649 - RNA, 19 nt, Artificial Sequence
  Description of Artificial Sequence: Synthetic oligonucleotide
caaagaucaugaggggcag

SEQ ID NO: 2872650 - RNA, 19 nt, Artificial Sequence
  Description of Artificial Sequence: Synthetic oligonucleotide
aaccgucucauggucuuca

SEQ ID NO: 2872651 - RNA, 19 nt, Artificial Sequence
  Description of Artificial Sequence: Synthetic oligonucleotide
cguagcucagcauagggug

SEQ ID NO: 2872652 - RNA, 19 nt, Artificial Sequence
  Description of Artificial Sequence: Synthetic oligonucleotide
agucggcaaauugcacugc

SEQ ID NO: 2872653 - RNA, 19 nt, Artificial Sequence
  Description of Artificial Sequence: Synthetic oligonucleotide
uggcccuccagcuccuugc

SEQ ID NO: 2872654 - RNA, 19 nt, Artificial Sequence
  Description of Artificial Sequence: Synthetic oligonucleotide
ugcagucggcaaauugcac

SEQ ID NO: 2872655 - RNA, 19 nt, Artificial Sequence
  Description of Artificial Sequence: Synthetic oligonucleotide
agggagcugggcugucccc

SEQ ID NO: 2872656 - RNA, 19 nt, Artificial Sequence
  Description of Artificial Sequence: Synthetic oligonucleotide
ggcaaagaucaugaggggc

SEQ ID NO: 2872657 - RNA, 19 nt, Artificial Sequence
  Description of Artificial Sequence: Synthetic oligonucleotide
acaucucuaugcacagggg

SEQ ID NO: 2872658 - RNA, 19 nt, Artificial Sequence
  Description of Artificial Sequence: Synthetic oligonucleotide
ucaugccaccagagaagcc

SEQ ID NO: 2872659 - RNA, 19 nt, Artificial Sequence
  Description of Artificial Sequence: Synthetic oligonucleotide
agaucaugaggggcaguuc

SEQ ID NO: 2872660 - RNA, 19 nt, Artificial Sequence
  Description of Artificial Sequence: Synthetic oligonucleotide
ggcaaauugcacugccacc

SEQ ID NO: 2872661 - RNA, 19 nt, Artificial Sequence
  Description of Artificial Sequence: Synthetic oligonucleotide
guggagucgaggacaaccc

SEQ ID NO: 2872662 - RNA, 19 nt, Artificial Sequence
  Description of Artificial Sequence: Synthetic oligonucleotide
agcauagggugggauguag

SEQ ID NO: 2872663 - RNA, 19 nt, Artificial Sequence
  Description of Artificial Sequence: Synthetic oligonucleotide
cuugucagcguacaucucu

SEQ ID NO: 2872664 - RNA, 19 nt, Artificial Sequence
  Description of Artificial Sequence: Synthetic oligonucleotide
ugcggaacuuaaucuccac

SEQ ID NO: 2872665 - RNA, 19 nt, Artificial Sequence
  Description of Artificial Sequence: Synthetic oligonucleotide
ucccacgagcuucuugcac

SEQ ID NO: 2872666 - RNA, 19 nt, Artificial Sequence
  Description of Artificial Sequence: Synthetic oligonucleotide
gcccucuggcuccagaacg

SEQ ID NO: 2872667 - RNA, 19 nt, Artificial Sequence
  Description of Artificial Sequence: Synthetic oligonucleotide
aaucuccacagugcccucu

SEQ ID NO: 2872668 - RNA, 19 nt, Artificial Sequence
  Description of Artificial Sequence: Synthetic oligonucleotide
ugucaugcagucggcaaau

SEQ ID NO: 2872669 - RNA, 19 nt, Artificial Sequence
  Description of Artificial Sequence: Synthetic oligonucleotide
gcaaagaucaugaggggca

SEQ ID NO: 2872670 - RNA, 19 nt, Artificial Sequence
  Description of Artificial Sequence: Synthetic oligonucleotide
caaauugcacugccaccug

SEQ ID NO: 2872671 - RNA, 19 nt, Artificial Sequence
  Description of Artificial Sequence: Synthetic oligonucleotide
agccugucccacgagcuuc

SEQ ID NO: 2872672 - RNA, 19 nt, Artificial Sequence
  Description of Artificial Sequence: Synthetic oligonucleotide
guaggauggggaacagcag

SEQ ID NO: 2872673 - RNA, 19 nt, Artificial Sequence
  Description of Artificial Sequence: Synthetic oligonucleotide
accgucucauggucuucac

SEQ ID NO: 2872674 - RNA, 19 nt, Artificial Sequence
  Description of Artificial Sequence: Synthetic oligonucleotide
gucuaaccgucucaugguc

SEQ ID NO: 2872675 - RNA, 19 nt, Artificial Sequence
  Description of Artificial Sequence: Synthetic oligonucleotide
aaagaucaugaggggcagu

SEQ ID NO: 2872676 - RNA, 19 nt, Artificial Sequence
  Description of Artificial Sequence: Synthetic oligonucleotide
cuccuugucagcguacauc

SEQ ID NO: 2872677 - RNA, 19 nt, Artificial Sequence
  Description of Artificial Sequence: Synthetic oligonucleotide
cuucagcaucugcucauac

SEQ ID NO: 2872678 - RNA, 19 nt, Artificial Sequence
  Description of Artificial Sequence: Synthetic oligonucleotide
augaggggcaguucaugau

SEQ ID NO: 2872679 - RNA, 19 nt, Artificial Sequence
  Description of Artificial Sequence: Synthetic oligonucleotide
guacaucucuaugcacagg

SEQ ID NO: 2872680 - RNA, 19 nt, Artificial Sequence
  Description of Artificial Sequence: Synthetic oligonucleotide
aucugcucauacauguccu

SEQ ID NO: 2872681 - RNA, 19 nt, Artificial Sequence
  Description of Artificial Sequence: Synthetic oligonucleotide
ugcucuccuugucagcgua

SEQ ID NO: 2872682 - RNA, 19 nt, Artificial Sequence
  Description of Artificial Sequence: Synthetic oligonucleotide
ggcuccaaacuucagcauc

SEQ ID NO: 2872683 - RNA, 19 nt, Artificial Sequence
  Description of Artificial Sequence: Synthetic oligonucleotide
uccccagccugucccacga

SEQ ID NO: 2872684 - RNA, 19 nt, Artificial Sequence
  Description of Artificial Sequence: Synthetic oligonucleotide
ucugcucauacauguccuu

SEQ ID NO: 2872685 - RNA, 19 nt, Artificial Sequence
  Description of Artificial Sequence: Synthetic oligonucleotide
ccaccuggugguaggaugg

SEQ ID NO: 2872686 - RNA, 19 nt, Artificial Sequence
  Description of Artificial Sequence: Synthetic oligonucleotide
gggcaguucaugaugagga

SEQ ID NO: 2872687 - RNA, 19 nt, Artificial Sequence
  Description of Artificial Sequence: Synthetic oligonucleotide
agucgaggacaacccacga

SEQ ID NO: 2872688 - RNA, 19 nt, Artificial Sequence
  Description of Artificial Sequence: Synthetic oligonucleotide
cauccacgauguaggcucc

SEQ ID NO: 2872689 - RNA, 19 nt, Artificial Sequence
  Description of Artificial Sequence: Synthetic oligonucleotide
gaggggcaguucaugauga

SEQ ID NO: 2872690 - RNA, 19 nt, Artificial Sequence
  Description of Artificial Sequence: Synthetic oligonucleotide
cuccuugcgguccuuguca

SEQ ID NO: 2872691 - RNA, 19 nt, Artificial Sequence
  Description of Artificial Sequence: Synthetic oligonucleotide
cagcaucugcucauacaug

SEQ ID NO: 2872692 - RNA, 19 nt, Artificial Sequence
  Description of Artificial Sequence: Synthetic oligonucleotide
ugcccucuggcuccagaac

SEQ ID NO: 2872693 - RNA, 19 nt, Artificial Sequence
  Description of Artificial Sequence: Synthetic oligonucleotide
gaagccucuccaguuggca

SEQ ID NO: 2872694 - RNA, 19 nt, Artificial Sequence
  Description of Artificial Sequence: Synthetic oligonucleotide
ugggucuaaccgucucaug

SEQ ID NO: 2872695 - RNA, 19 nt, Artificial Sequence
  Description of Artificial Sequence: Synthetic oligonucleotide
agccucuccaguuggcaaa

SEQ ID NO: 2872696 - RNA, 19 nt, Artificial Sequence
  Description of Artificial Sequence: Synthetic oligonucleotide
auggggaacagcagguccu

SEQ ID NO: 2872697 - RNA, 19 nt, Artificial Sequence
  Description of Artificial Sequence: Synthetic oligonucleotide
ggggcaguucaugaugagg

SEQ ID NO: 2872698 - RNA, 19 nt, Artificial Sequence
  Description of Artificial Sequence: Synthetic oligonucleotide
aggauggggaacagcaggu

SEQ ID NO: 2872699 - RNA, 19 nt, Artificial Sequence
  Description of Artificial Sequence: Synthetic oligonucleotide
guccucucgggccuucagc

SEQ ID NO: 2872700 - RNA, 19 nt, Artificial Sequence
  Description of Artificial Sequence: Synthetic oligonucleotide
uccaguuggcaaagaucau

SEQ ID NO: 2872701 - RNA, 19 nt, Artificial Sequence
  Description of Artificial Sequence: Synthetic oligonucleotide
auguaggcuccaaacuuca

SEQ ID NO: 2872702 - RNA, 19 nt, Artificial Sequence
  Description of Artificial Sequence: Synthetic oligonucleotide
cagggagcugggcuguccc

SEQ ID NO: 2872703 - RNA, 19 nt, Artificial Sequence
  Description of Artificial Sequence: Synthetic oligonucleotide
ggugguaggauggggaaca

SEQ ID NO: 2872704 - RNA, 19 nt, Artificial Sequence
  Description of Artificial Sequence: Synthetic oligonucleotide
ugguaggauggggaacagc

SEQ ID NO: 2872705 - RNA, 19 nt, Artificial Sequence
  Description of Artificial Sequence: Synthetic oligonucleotide
cagcguacaucucuaugca

SEQ ID NO: 2872706 - RNA, 19 nt, Artificial Sequence
  Description of Artificial Sequence: Synthetic oligonucleotide
aggggcaguucaugaugag

SEQ ID NO: 2872707 - RNA, 19 nt, Artificial Sequence
  Description of Artificial Sequence: Synthetic oligonucleotide
acguagcucagcauagggu

SEQ ID NO: 2872708 - RNA, 19 nt, Artificial Sequence
  Description of Artificial Sequence: Synthetic oligonucleotide
cuugucagggagcugggcu

SEQ ID NO: 2872709 - RNA, 19 nt, Artificial Sequence
  Description of Artificial Sequence: Synthetic oligonucleotide
ucucgggccuucagcuggc

SEQ ID NO: 2872710 - RNA, 19 nt, Artificial Sequence
  Description of Artificial Sequence: Synthetic oligonucleotide
gcuguccccagccuguccc

SEQ ID NO: 2872711 - RNA, 19 nt, Artificial Sequence
  Description of Artificial Sequence: Synthetic oligonucleotide
uguacugccggaggccauc

SEQ ID NO: 2872712 - RNA, 19 nt, Artificial Sequence
  Description of Artificial Sequence: Synthetic oligonucleotide
cugcucauacauguccuuc

SEQ ID NO: 2872713 - RNA, 19 nt, Artificial Sequence
  Description of Artificial Sequence: Synthetic oligonucleotide
ucgggccuucagcuggccc

SEQ ID NO: 2872714 - RNA, 19 nt, Artificial Sequence
  Description of Artificial Sequence: Synthetic oligonucleotide
caugccaccagagaagccu

SEQ ID NO: 2872715 - RNA, 19 nt, Artificial Sequence
  Description of Artificial Sequence: Synthetic oligonucleotide
gugucaugcagucggcaaa

SEQ ID NO: 2872716 - RNA, 19 nt, Artificial Sequence
  Description of Artificial Sequence: Synthetic oligonucleotide
gugggauguagauaagaau

SEQ ID NO: 2872717 - RNA, 19 nt, Artificial Sequence
  Description of Artificial Sequence: Synthetic oligonucleotide
agauaagaauugguugcuu

SEQ ID NO: 2872718 - RNA, 19 nt, Artificial Sequence
  Description of Artificial Sequence: Synthetic oligonucleotide
guccuucaugccaccagag

SEQ ID NO: 2872719 - RNA, 19 nt, Artificial Sequence
  Description of Artificial Sequence: Synthetic oligonucleotide
uggugguaggauggggaac

SEQ ID NO: 2872720 - RNA, 19 nt, Artificial Sequence
  Description of Artificial Sequence: Synthetic oligonucleotide
augccaccagagaagccuc

SEQ ID NO: 2872721 - RNA, 19 nt, Artificial Sequence
  Description of Artificial Sequence: Synthetic oligonucleotide
cguacaucucuaugcacag

SEQ ID NO: 2872722 - RNA, 19 nt, Artificial Sequence
  Description of Artificial Sequence: Synthetic oligonucleotide
ggugggauguagauaagaa

SEQ ID NO: 2872723 - RNA, 19 nt, Artificial Sequence
  Description of Artificial Sequence: Synthetic oligonucleotide
cugggcuguccccagccug

SEQ ID NO: 2872724 - RNA, 19 nt, Artificial Sequence
  Description of Artificial Sequence: Synthetic oligonucleotide
ugucagggagcugggcugu

SEQ ID NO: 2872725 - RNA, 19 nt, Artificial Sequence
  Description of Artificial Sequence: Synthetic oligonucleotide
ccuucaugccaccagagaa

SEQ ID NO: 2872726 - RNA, 19 nt, Artificial Sequence
  Description of Artificial Sequence: Synthetic oligonucleotide
cgucucauggucuucacca

SEQ ID NO: 2872727 - RNA, 19 nt, Artificial Sequence
  Description of Artificial Sequence: Synthetic oligonucleotide
gcguacaucucuaugcaca

SEQ ID NO: 2872728 - RNA, 19 nt, Artificial Sequence
  Description of Artificial Sequence: Synthetic oligonucleotide
ccaguuggcaaagaucaug

SEQ ID NO: 2872729 - RNA, 19 nt, Artificial Sequence
  Description of Artificial Sequence: Synthetic oligonucleotide
ucagggagcugggcugucc

SEQ ID NO: 2872730 - RNA, 19 nt, Artificial Sequence
  Description of Artificial Sequence: Synthetic oligonucleotide
gcaaauugcacugccaccu

SEQ ID NO: 2872731 - RNA, 19 nt, Artificial Sequence
  Description of Artificial Sequence: Synthetic oligonucleotide
cuucuugcacacugggucu

SEQ ID NO: 2872732 - RNA, 19 nt, Artificial Sequence
  Description of Artificial Sequence: Synthetic oligonucleotide
ugccaccagagaagccucu

SEQ ID NO: 2872733 - RNA, 19 nt, Artificial Sequence
  Description of Artificial Sequence: Synthetic oligonucleotide
gccaccuggugguaggaug

SEQ ID NO: 2872734 - RNA, 19 nt, Artificial Sequence
  Description of Artificial Sequence: Synthetic oligonucleotide
ggagucgaggacaacccac

SEQ ID NO: 2872735 - RNA, 19 nt, Artificial Sequence
  Description of Artificial Sequence: Synthetic oligonucleotide
cccacguagcucagcauag

SEQ ID NO: 2872736 - RNA, 19 nt, Artificial Sequence
  Description of Artificial Sequence: Synthetic oligonucleotide
agugcccucuggcuccaga

SEQ ID NO: 2872737 - RNA, 19 nt, Artificial Sequence
  Description of Artificial Sequence: Synthetic oligonucleotide
uaaucuccacagugcccuc

SEQ ID NO: 2872738 - RNA, 19 nt, Artificial Sequence
  Description of Artificial Sequence: Synthetic oligonucleotide
cuggugguaggauggggaa

SEQ ID NO: 2872739 - RNA, 19 nt, Artificial Sequence
  Description of Artificial Sequence: Synthetic oligonucleotide
uugcgguccuugucaggga

SEQ ID NO: 2872740 - RNA, 19 nt, Artificial Sequence
  Description of Artificial Sequence: Synthetic oligonucleotide
aggcuccaaacuucagcau

SEQ ID NO: 2872741 - RNA, 19 nt, Artificial Sequence
  Description of Artificial Sequence: Synthetic oligonucleotide
auggucuucaccagaucuu

SEQ ID NO: 2872742 - RNA, 19 nt, Artificial Sequence
  Description of Artificial Sequence: Synthetic oligonucleotide
agcuucuugcacacugggu

SEQ ID NO: 2872743 - RNA, 19 nt, Artificial Sequence
  Description of Artificial Sequence: Synthetic oligonucleotide
guccccagccugucccacg

SEQ ID NO: 2872744 - RNA, 19 nt, Artificial Sequence
  Description of Artificial Sequence: Synthetic oligonucleotide
cugucccacgagcuucuug

SEQ ID NO: 2872745 - RNA, 19 nt, Artificial Sequence
  Description of Artificial Sequence: Synthetic oligonucleotide
cacugggucuaaccgucuc

SEQ ID NO: 2872746 - RNA, 19 nt, Artificial Sequence
  Description of Artificial Sequence: Synthetic oligonucleotide
ggaacuuaaucuccacagu

SEQ ID NO: 2872747 - RNA, 19 nt, Artificial Sequence
  Description of Artificial Sequence: Synthetic oligonucleotide
gcagucggcaaauugcacu

SEQ ID NO: 2872748 - RNA, 19 nt, Artificial Sequence
  Description of Artificial Sequence: Synthetic oligonucleotide
uuguacugccggaggccau

SEQ ID NO: 2872749 - RNA, 19 nt, Artificial Sequence
  Description of Artificial Sequence: Synthetic oligonucleotide
aucuuucuugcggaacuua

SEQ ID NO: 2872750 - RNA, 19 nt, Artificial Sequence
  Description of Artificial Sequence: Synthetic oligonucleotide
ccggaggccauccacgaug

SEQ ID NO: 2872751 - RNA, 19 nt, Artificial Sequence
  Description of Artificial Sequence: Synthetic oligonucleotide
uucuugcacacugggucua

SEQ ID NO: 2872752 - RNA, 19 nt, Artificial Sequence
  Description of Artificial Sequence: Synthetic oligonucleotide
uccacgauguaggcuccaa

SEQ ID NO: 2872753 - RNA, 19 nt, Artificial Sequence
  Description of Artificial Sequence: Synthetic oligonucleotide
gcggaacuuaaucuccaca

SEQ ID NO: 2872754 - RNA, 19 nt, Artificial Sequence
  Description of Artificial Sequence: Synthetic oligonucleotide
gggguugaugguggagucg

SEQ ID NO: 2872755 - RNA, 19 nt, Artificial Sequence
  Description of Artificial Sequence: Synthetic oligonucleotide
gggaacagcagguccucuc

SEQ ID NO: 2872756 - RNA, 19 nt, Artificial Sequence
  Description of Artificial Sequence: Synthetic oligonucleotide
ggguugaugguggagucga

SEQ ID NO: 2872757 - RNA, 19 nt, Artificial Sequence
  Description of Artificial Sequence: Synthetic oligonucleotide
cuuucuugcggaacuuaau

SEQ ID NO: 2872758 - RNA, 19 nt, Artificial Sequence
  Description of Artificial Sequence: Synthetic oligonucleotide
ucuugcacacugggucuaa

SEQ ID NO: 2872759 - RNA, 19 nt, Artificial Sequence
  Description of Artificial Sequence: Synthetic oligonucleotide
cuccaaacuucagcaucug

SEQ ID NO: 2872760 - RNA, 19 nt, Artificial Sequence
  Description of Artificial Sequence: Synthetic oligonucleotide
cuugcacacugggucuaac

SEQ ID NO: 2872761 - RNA, 19 nt, Artificial Sequence
  Description of Artificial Sequence: Synthetic oligonucleotide
uggggaacagcagguccuc

SEQ ID NO: 2872762 - RNA, 19 nt, Artificial Sequence
  Description of Artificial Sequence: Synthetic oligonucleotide
gguugcuuguacugccgga

SEQ ID NO: 2872763 - RNA, 19 nt, Artificial Sequence
  Description of Artificial Sequence: Synthetic oligonucleotide
uacugccggaggccaucca

SEQ ID NO: 2872764 - RNA, 19 nt, Artificial Sequence
  Description of Artificial Sequence: Synthetic oligonucleotide
cgaggacaacccacgagcc

SEQ ID NO: 2872765 - RNA, 19 nt, Artificial Sequence
  Description of Artificial Sequence: Synthetic oligonucleotide
cggcaaauugcacugccac

SEQ ID NO: 2872766 - RNA, 19 nt, Artificial Sequence
  Description of Artificial Sequence: Synthetic oligonucleotide
aucaugaggggcaguucau

SEQ ID NO: 2872767 - RNA, 19 nt, Artificial Sequence
  Description of Artificial Sequence: Synthetic oligonucleotide
ccuggugguaggaugggga

SEQ ID NO: 2872768 - RNA, 19 nt, Artificial Sequence
  Description of Artificial Sequence: Synthetic oligonucleotide
ggucuaaccgucucauggu

SEQ ID NO: 2872769 - RNA, 19 nt, Artificial Sequence
  Description of Artificial Sequence: Synthetic oligonucleotide
cccucuggcuccagaacgc

SEQ ID NO: 2872770 - RNA, 19 nt, Artificial Sequence
  Description of Artificial Sequence: Synthetic oligonucleotide
caccuggugguaggauggg

SEQ ID NO: 2872771 - RNA, 19 nt, Artificial Sequence
  Description of Artificial Sequence: Synthetic oligonucleotide
gugguaggauggggaacag

SEQ ID NO: 2872772 - RNA, 19 nt, Artificial Sequence
  Description of Artificial Sequence: Synthetic oligonucleotide
cccacgagcuucuugcaca

SEQ ID NO: 2872773 - RNA, 19 nt, Artificial Sequence
  Description of Artificial Sequence: Synthetic oligonucleotide
guacugccggaggccaucc

SEQ ID NO: 2872774 - RNA, 19 nt, Artificial Sequence
  Description of Artificial Sequence: Synthetic oligonucleotide
cuaaccgucucauggucuu

SEQ ID NO: 2872775 - RNA, 19 nt, Artificial Sequence
  Description of Artificial Sequence: Synthetic oligonucleotide
aguucaugaugaggacaaa

SEQ ID NO: 2872776 - RNA, 19 nt, Artificial Sequence
  Description of Artificial Sequence: Synthetic oligonucleotide
cuggcccuccagcuccuug

SEQ ID NO: 2872777 - RNA, 19 nt, Artificial Sequence
  Description of Artificial Sequence: Synthetic oligonucleotide
uaaccgucucauggucuuc

SEQ ID NO: 2872778 - RNA, 19 nt, Artificial Sequence
  Description of Artificial Sequence: Synthetic oligonucleotide
cacugccaccuggugguag

SEQ ID NO: 2872779 - RNA, 19 nt, Artificial Sequence
  Description of Artificial Sequence: Synthetic oligonucleotide
ggccauccacgauguaggc

SEQ ID NO: 2872780 - RNA, 19 nt, Artificial Sequence
  Description of Artificial Sequence: Synthetic oligonucleotide
gggugggauguagauaaga

SEQ ID NO: 2872781 - RNA, 19 nt, Artificial Sequence
  Description of Artificial Sequence: Synthetic oligonucleotide
cagagaagccucuccaguu

SEQ ID NO: 2872782 - RNA, 19 nt, Artificial Sequence
  Description of Artificial Sequence: Synthetic oligonucleotide
ggugugucaugcagucggc

SEQ ID NO: 2872783 - RNA, 19 nt, Artificial Sequence
  Description of Artificial Sequence: Synthetic oligonucleotide
gugugucaugcagucggca

SEQ ID NO: 2872784 - RNA, 19 nt, Artificial Sequence
  Description of Artificial Sequence: Synthetic oligonucleotide
uguccccagccugucccac

SEQ ID NO: 2872785 - RNA, 19 nt, Artificial Sequence
  Description of Artificial Sequence: Synthetic oligonucleotide
ccgggugugucaugcaguc

SEQ ID NO: 2872786 - RNA, 19 nt, Artificial Sequence
  Description of Artificial Sequence: Synthetic oligonucleotide
gguccucucgggccuucag

SEQ ID NO: 2872787 - RNA, 19 nt, Artificial Sequence
  Description of Artificial Sequence: Synthetic oligonucleotide
cccagccugucccacgagc

SEQ ID NO: 2872788 - RNA, 19 nt, Artificial Sequence
  Description of Artificial Sequence: Synthetic oligonucleotide
ccacagugcccucuggcuc

SEQ ID NO: 2872789 - RNA, 19 nt, Artificial Sequence
  Description of Artificial Sequence: Synthetic oligonucleotide
ccacgagcuucuugcacac

SEQ ID NO: 2872790 - RNA, 19 nt, Artificial Sequence
  Description of Artificial Sequence: Synthetic oligonucleotide
gucccacgagcuucuugca

SEQ ID NO: 2872791 - RNA, 19 nt, Artificial Sequence
  Description of Artificial Sequence: Synthetic oligonucleotide
cucuccaguuggcaaagau

SEQ ID NO: 2872792 - RNA, 19 nt, Artificial Sequence
  Description of Artificial Sequence: Synthetic oligonucleotide
agggugggauguagauaag

SEQ ID NO: 2872793 - RNA, 19 nt, Artificial Sequence
  Description of Artificial Sequence: Synthetic oligonucleotide
ccgucucauggucuucacc

SEQ ID NO: 2872794 - RNA, 19 nt, Artificial Sequence
  Description of Artificial Sequence: Synthetic oligonucleotide
gcuccuugcgguccuuguc

SEQ ID NO: 2872795 - RNA, 19 nt, Artificial Sequence
  Description of Artificial Sequence: Synthetic oligonucleotide
gcuccaaacuucagcaucu

SEQ ID NO: 2872796 - RNA, 19 nt, Artificial Sequence
  Description of Artificial Sequence: Synthetic oligonucleotide
gguugaugguggagucgag

SEQ ID NO: 2872797 - RNA, 19 nt, Artificial Sequence
  Description of Artificial Sequence: Synthetic oligonucleotide
ccuugcgguccuugucagg

SEQ ID NO: 2872798 - RNA, 19 nt, Artificial Sequence
  Description of Artificial Sequence: Synthetic oligonucleotide
gaucuuucuugcggaacuu

SEQ ID NO: 2872799 - RNA, 19 nt, Artificial Sequence
  Description of Artificial Sequence: Synthetic oligonucleotide
gccucuccaguuggcaaag

SEQ ID NO: 2872800 - RNA, 19 nt, Artificial Sequence
  Description of Artificial Sequence: Synthetic oligonucleotide
gcacacugggucuaaccgu

SEQ ID NO: 2872801 - RNA, 19 nt, Artificial Sequence
  Description of Artificial Sequence: Synthetic oligonucleotide
ugccaccuggugguaggau

SEQ ID NO: 2872802 - RNA, 19 nt, Artificial Sequence
  Description of Artificial Sequence: Synthetic oligonucleotide
ccacguagcucagcauagg

SEQ ID NO: 2872803 - RNA, 19 nt, Artificial Sequence
  Description of Artificial Sequence: Synthetic oligonucleotide
ggauggggaacagcagguc

SEQ ID NO: 2872804 - RNA, 19 nt, Artificial Sequence
  Description of Artificial Sequence: Synthetic oligonucleotide
acacugggucuaaccgucu

SEQ ID NO: 2872805 - RNA, 19 nt, Artificial Sequence
  Description of Artificial Sequence: Synthetic oligonucleotide
auccacgauguaggcucca

SEQ ID NO: 2872806 - RNA, 19 nt, Artificial Sequence
  Description of Artificial Sequence: Synthetic oligonucleotide
gcauagggugggauguaga

SEQ ID NO: 2872807 - RNA, 19 nt, Artificial Sequence
  Description of Artificial Sequence: Synthetic oligonucleotide
cuguccccagccuguccca

SEQ ID NO: 2872808 - RNA, 19 nt, Artificial Sequence
  Description of Artificial Sequence: Synthetic oligonucleotide
gcaucugcucauacauguc

SEQ ID NO: 2872809 - RNA, 19 nt, Artificial Sequence
  Description of Artificial Sequence: Synthetic oligonucleotide
ugguggagucgaggacaac

SEQ ID NO: 2872810 - RNA, 19 nt, Artificial Sequence
  Description of Artificial Sequence: Synthetic oligonucleotide
acagugcccucuggcucca

SEQ ID NO: 2872811 - RNA, 19 nt, Artificial Sequence
  Description of Artificial Sequence: Synthetic oligonucleotide
cugggucuaaccgucucau

SEQ ID NO: 2872812 - RNA, 19 nt, Artificial Sequence
  Description of Artificial Sequence: Synthetic oligonucleotide
ccuugucagcguacaucuc

SEQ ID NO: 2872813 - RNA, 19 nt, Artificial Sequence
  Description of Artificial Sequence: Synthetic oligonucleotide
ccucucgggccuucagcug

SEQ ID NO: 2872814 - RNA, 19 nt, Artificial Sequence
  Description of Artificial Sequence: Synthetic oligonucleotide
ccccacguagcucagcaua

SEQ ID NO: 2872815 - RNA, 19 nt, Artificial Sequence
  Description of Artificial Sequence: Synthetic oligonucleotide
ccuugucagggagcugggc

SEQ ID NO: 2872816 - RNA, 19 nt, Artificial Sequence
  Description of Artificial Sequence: Synthetic oligonucleotide
ccagaucuuucuugcggaa

SEQ ID NO: 2872817 - RNA, 19 nt, Artificial Sequence
  Description of Artificial Sequence: Synthetic oligonucleotide
cucgggccuucagcuggcc

SEQ ID NO: 2872818 - RNA, 19 nt, Artificial Sequence
  Description of Artificial Sequence: Synthetic oligonucleotide
gcgguccuugucagggagc

SEQ ID NO: 2872819 - RNA, 19 nt, Artificial Sequence
  Description of Artificial Sequence: Synthetic oligonucleotide
agguccucucgggccuuca

SEQ ID NO: 2872820 - RNA, 19 nt, Artificial Sequence
  Description of Artificial Sequence: Synthetic oligonucleotide
gccaccagagaagccucuc

SEQ ID NO: 2872821 - RNA, 19 nt, Artificial Sequence
  Description of Artificial Sequence: Synthetic oligonucleotide
cgauguaggcuccaaacuu

SEQ ID NO: 2872822 - RNA, 19 nt, Artificial Sequence
  Description of Artificial Sequence: Synthetic oligonucleotide
ccagccugucccacgagcu

SEQ ID NO: 2872823 - RNA, 19 nt, Artificial Sequence
  Description of Artificial Sequence: Synthetic oligonucleotide
cugcucuccuugucagcgu

SEQ ID NO: 2872824 - RNA, 19 nt, Artificial Sequence
  Description of Artificial Sequence: Synthetic oligonucleotide
cugccaccuggugguagga

SEQ ID NO: 2872825 - RNA, 19 nt, Artificial Sequence
  Description of Artificial Sequence: Synthetic oligonucleotide
ccacgauguaggcuccaaa

SEQ ID NO: 2872826 - RNA, 19 nt, Artificial Sequence
  Description of Artificial Sequence: Synthetic oligonucleotide
gucagggagcugggcuguc

SEQ ID NO: 2872827 - RNA, 19 nt, Artificial Sequence
  Description of Artificial Sequence: Synthetic oligonucleotide
gccauccacgauguaggcu

SEQ ID NO: 2872828 - RNA, 19 nt, Artificial Sequence
  Description of Artificial Sequence: Synthetic oligonucleotide
cagcauagggugggaugua

SEQ ID NO: 2872829 - RNA, 19 nt, Artificial Sequence
  Description of Artificial Sequence: Synthetic oligonucleotide
cgggugugucaugcagucg

SEQ ID NO: 2872830 - RNA, 19 nt, Artificial Sequence
  Description of Artificial Sequence: Synthetic oligonucleotide
gucaugcagucggcaaauu

SEQ ID NO: 2872831 - RNA, 19 nt, Artificial Sequence
  Description of Artificial Sequence: Synthetic oligonucleotide
cagccugucccacgagcuu

SEQ ID NO: 2872832 - RNA, 19 nt, Artificial Sequence
  Description of Artificial Sequence: Synthetic oligonucleotide
cagugcccucuggcuccag

SEQ ID NO: 2872833 - RNA, 19 nt, Artificial Sequence
  Description of Artificial Sequence: Synthetic oligonucleotide
ccccagccugucccacgag

SEQ ID NO: 2872834 - RNA, 19 nt, Artificial Sequence
  Description of Artificial Sequence: Synthetic oligonucleotide
gggcuguccccagccuguc

SEQ ID NO: 2872835 - RNA, 19 nt, Artificial Sequence
  Description of Artificial Sequence: Synthetic oligonucleotide
cacgagcuucuugcacacu

SEQ ID NO: 2872836 - RNA, 19 nt, Artificial Sequence
  Description of Artificial Sequence: Synthetic oligonucleotide
ggaggccauccacgaugua

SEQ ID NO: 2872837 - RNA, 19 nt, Artificial Sequence
  Description of Artificial Sequence: Synthetic oligonucleotide
ggggaacagcagguccucu

SEQ ID NO: 2872838 - RNA, 19 nt, Artificial Sequence
  Description of Artificial Sequence: Synthetic oligonucleotide
cggaggccauccacgaugu

SEQ ID NO: 2872839 - RNA, 19 nt, Artificial Sequence
  Description of Artificial Sequence: Synthetic oligonucleotide
gccugucccacgagcuucu

SEQ ID NO: 2872840 - RNA, 19 nt, Artificial Sequence
  Description of Artificial Sequence: Synthetic oligonucleotide
ccucuccaguuggcaaaga

SEQ ID NO: 2872841 - RNA, 19 nt, Artificial Sequence
  Description of Artificial Sequence: Synthetic oligonucleotide
gccggaggccauccacgau

SEQ ID NO: 2872842 - RNA, 19 nt, Artificial Sequence
  Description of Artificial Sequence: Synthetic oligonucleotide
ccugucccacgagcuucuu

SEQ ID NO: 2872843 - RNA, 19 nt, Artificial Sequence
  Description of Artificial Sequence: Synthetic oligonucleotide
cuugguuugacuaugaugg

SEQ ID NO: 2872844 - RNA, 19 nt, Artificial Sequence
  Description of Artificial Sequence: Synthetic oligonucleotide
aaaauaguugccauaagcc

SEQ ID NO: 2872845 - RNA, 19 nt, Artificial Sequence
  Description of Artificial Sequence: Synthetic oligonucleotide
caaaguacaaaauaguugc

SEQ ID NO: 2872846 - RNA, 19 nt, Artificial Sequence
  Description of Artificial Sequence: Synthetic oligonucleotide
ugaaguaucaccaaaugug

SEQ ID NO: 2872847 - RNA, 19 nt, Artificial Sequence
  Description of Artificial Sequence: Synthetic oligonucleotide
uucaacuggaaucuuaugg

SEQ ID NO: 2872848 - RNA, 19 nt, Artificial Sequence
  Description of Artificial Sequence: Synthetic oligonucleotide
aaucuuaugguuuuccauc

SEQ ID NO: 2872849 - RNA, 19 nt, Artificial Sequence
  Description of Artificial Sequence: Synthetic oligonucleotide
cauuaaaacaaacaacagg

SEQ ID NO: 2872850 - RNA, 19 nt, Artificial Sequence
  Description of Artificial Sequence: Synthetic oligonucleotide
aaaccugcaacauguuucc

SEQ ID NO: 2872851 - RNA, 19 nt, Artificial Sequence
  Description of Artificial Sequence: Synthetic oligonucleotide
uaaaacaaacaacagggca

SEQ ID NO: 2872852 - RNA, 19 nt, Artificial Sequence
  Description of Artificial Sequence: Synthetic oligonucleotide
aaucuucaaaugaaggugc

SEQ ID NO: 2872853 - RNA, 19 nt, Artificial Sequence
  Description of Artificial Sequence: Synthetic oligonucleotide
guugccauaagccauaagc

SEQ ID NO: 2872854 - RNA, 19 nt, Artificial Sequence
  Description of Artificial Sequence: Synthetic oligonucleotide
cuaaaucuucaaaugaagg

SEQ ID NO: 2872855 - RNA, 19 nt, Artificial Sequence
  Description of Artificial Sequence: Synthetic oligonucleotide
aaaucuucaaaugaaggug

SEQ ID NO: 2872856 - RNA, 19 nt, Artificial Sequence
  Description of Artificial Sequence: Synthetic oligonucleotide
uacaaaaccugcaacaugu

SEQ ID NO: 2872857 - RNA, 19 nt, Artificial Sequence
  Description of Artificial Sequence: Synthetic oligonucleotide
ucaucuucaccaaagaacu

SEQ ID NO: 2872858 - RNA, 19 nt, Artificial Sequence
  Description of Artificial Sequence: Synthetic oligonucleotide
uucaacuuggaacagagau

SEQ ID NO: 2872859 - RNA, 19 nt, Artificial Sequence
  Description of Artificial Sequence: Synthetic oligonucleotide
uuggcauuaaaacaaacaa

SEQ ID NO: 2872860 - RNA, 19 nt, Artificial Sequence
  Description of Artificial Sequence: Synthetic oligonucleotide
ucuauuucuucuuuguuca

SEQ ID NO: 2872861 - RNA, 19 nt, Artificial Sequence
  Description of Artificial Sequence: Synthetic oligonucleotide
uaagccuucaacuuggaac

SEQ ID NO: 2872862 - RNA, 19 nt, Artificial Sequence
  Description of Artificial Sequence: Synthetic oligonucleotide
uaaaucuucaaaugaaggu

SEQ ID NO: 2872863 - RNA, 19 nt, Artificial Sequence
  Description of Artificial Sequence: Synthetic oligonucleotide
aaaggaagcuccaaaguac

SEQ ID NO: 2872864 - RNA, 19 nt, Artificial Sequence
  Description of Artificial Sequence: Synthetic oligonucleotide
uucuucuuuguucaacugg

SEQ ID NO: 2872865 - RNA, 19 nt, Artificial Sequence
  Description of Artificial Sequence: Synthetic oligonucleotide
aguauccucagguucaaac

SEQ ID NO: 2872866 - RNA, 19 nt, Artificial Sequence
  Description of Artificial Sequence: Synthetic oligonucleotide
ugcagugucacuaggaucu

SEQ ID NO: 2872867 - RNA, 19 nt, Artificial Sequence
  Description of Artificial Sequence: Synthetic oligonucleotide
caaaauaguugccauaagc

SEQ ID NO: 2872868 - RNA, 19 nt, Artificial Sequence
  Description of Artificial Sequence: Synthetic oligonucleotide
ucugauucacaauauuucc

SEQ ID NO: 2872869 - RNA, 19 nt, Artificial Sequence
  Description of Artificial Sequence: Synthetic oligonucleotide
uccaucacugccaaauugg

SEQ ID NO: 2872870 - RNA, 19 nt, Artificial Sequence
  Description of Artificial Sequence: Synthetic oligonucleotide
uuuccaacuaucaucuuca

SEQ ID NO: 2872871 - RNA, 19 nt, Artificial Sequence
  Description of Artificial Sequence: Synthetic oligonucleotide
aucaucuucaccaaagaac

SEQ ID NO: 2872872 - RNA, 19 nt, Artificial Sequence
  Description of Artificial Sequence: Synthetic oligonucleotide
aagccuucaacuuggaaca

SEQ ID NO: 2872873 - RNA, 19 nt, Artificial Sequence
  Description of Artificial Sequence: Synthetic oligonucleotide
uuugaggcgagccccaagg

SEQ ID NO: 2872874 - RNA, 19 nt, Artificial Sequence
  Description of Artificial Sequence: Synthetic oligonucleotide
gaucuaguccuacaaaacc

SEQ ID NO: 2872875 - RNA, 19 nt, Artificial Sequence
  Description of Artificial Sequence: Synthetic oligonucleotide
agaacuguaguacuguucu

SEQ ID NO: 2872876 - RNA, 19 nt, Artificial Sequence
  Description of Artificial Sequence: Synthetic oligonucleotide
ugauucacaauauuuccug

SEQ ID NO: 2872877 - RNA, 19 nt, Artificial Sequence
  Description of Artificial Sequence: Synthetic oligonucleotide
uaugauggacuuuucuagg

SEQ ID NO: 2872878 - RNA, 19 nt, Artificial Sequence
  Description of Artificial Sequence: Synthetic oligonucleotide
gucacuaggaucuauuagc

SEQ ID NO: 2872879 - RNA, 19 nt, Artificial Sequence
  Description of Artificial Sequence: Synthetic oligonucleotide
ucuuuguucaacuggaauc

SEQ ID NO: 2872880 - RNA, 19 nt, Artificial Sequence
  Description of Artificial Sequence: Synthetic oligonucleotide
uucacaauauuuccugaag

SEQ ID NO: 2872881 - RNA, 19 nt, Artificial Sequence
  Description of Artificial Sequence: Synthetic oligonucleotide
uaagccauaagccuucaac

SEQ ID NO: 2872882 - RNA, 19 nt, Artificial Sequence
  Description of Artificial Sequence: Synthetic oligonucleotide
uuaugguuuuccaucacug

SEQ ID NO: 2872883 - RNA, 19 nt, Artificial Sequence
  Description of Artificial Sequence: Synthetic oligonucleotide
aguucuuugaggcgagccc

SEQ ID NO: 2872884 - RNA, 19 nt, Artificial Sequence
  Description of Artificial Sequence: Synthetic oligonucleotide
uugccauaagccauaagcc

SEQ ID NO: 2872885 - RNA, 19 nt, Artificial Sequence
  Description of Artificial Sequence: Synthetic oligonucleotide
aauugguaucaaaggaagc

SEQ ID NO: 2872886 - RNA, 19 nt, Artificial Sequence
  Description of Artificial Sequence: Synthetic oligonucleotide
cauguuuccaacuaucauc

SEQ ID NO: 2872887 - RNA, 19 nt, Artificial Sequence
  Description of Artificial Sequence: Synthetic oligonucleotide
aucaaaggaagcuccaaag

SEQ ID NO: 2872888 - RNA, 19 nt, Artificial Sequence
  Description of Artificial Sequence: Synthetic oligonucleotide
uuggaacagagauccaucg

SEQ ID NO: 2872889 - RNA, 19 nt, Artificial Sequence
  Description of Artificial Sequence: Synthetic oligonucleotide
aaaguacaaaauaguugcc

SEQ ID NO: 2872890 - RNA, 19 nt, Artificial Sequence
  Description of Artificial Sequence: Synthetic oligonucleotide
uacuaaaucuucaaaugaa

SEQ ID NO: 2872891 - RNA, 19 nt, Artificial Sequence
  Description of Artificial Sequence: Synthetic oligonucleotide
aaaugugcugcuugguuug

SEQ ID NO: 2872892 - RNA, 19 nt, Artificial Sequence
  Description of Artificial Sequence: Synthetic oligonucleotide
aucacugccaaauugguau

SEQ ID NO: 2872893 - RNA, 19 nt, Artificial Sequence
  Description of Artificial Sequence: Synthetic oligonucleotide
ucaacuggaaucuuauggu

SEQ ID NO: 2872894 - RNA, 19 nt, Artificial Sequence
  Description of Artificial Sequence: Synthetic oligonucleotide
aaaacaaacaacagggcau

SEQ ID NO: 2872895 - RNA, 19 nt, Artificial Sequence
  Description of Artificial Sequence: Synthetic oligonucleotide
ucacaauauuuccugaagu

SEQ ID NO: 2872896 - RNA, 19 nt, Artificial Sequence
  Description of Artificial Sequence: Synthetic oligonucleotide
uucaccaaagaacuguagu

SEQ ID NO: 2872897 - RNA, 19 nt, Artificial Sequence
  Description of Artificial Sequence: Synthetic oligonucleotide
ggaucuauuagccaugcag

SEQ ID NO: 2872898 - RNA, 19 nt, Artificial Sequence
  Description of Artificial Sequence: Synthetic oligonucleotide
ugucacuaggaucuauuag

SEQ ID NO: 2872899 - RNA, 19 nt, Artificial Sequence
  Description of Artificial Sequence: Synthetic oligonucleotide
uaguacuguucucacaaag

SEQ ID NO: 2872900 - RNA, 19 nt, Artificial Sequence
  Description of Artificial Sequence: Synthetic oligonucleotide
caaacaacagggcauuugc

SEQ ID NO: 2872901 - RNA, 19 nt, Artificial Sequence
  Description of Artificial Sequence: Synthetic oligonucleotide
ucacuaggaucuauuagcc

SEQ ID NO: 2872902 - RNA, 19 nt, Artificial Sequence
  Description of Artificial Sequence: Synthetic oligonucleotide
gaucuauuagccaugcagc

SEQ ID NO: 2872903 - RNA, 19 nt, Artificial Sequence
  Description of Artificial Sequence: Synthetic oligonucleotide
uccuacaaaaccugcaaca

SEQ ID NO: 2872904 - RNA, 19 nt, Artificial Sequence
  Description of Artificial Sequence: Synthetic oligonucleotide
aguaucaccaaaugugcug

SEQ ID NO: 2872905 - RNA, 19 nt, Artificial Sequence
  Description of Artificial Sequence: Synthetic oligonucleotide
uauuuccugaaguaucacc

SEQ ID NO: 2872906 - RNA, 19 nt, Artificial Sequence
  Description of Artificial Sequence: Synthetic oligonucleotide
ucuaguccuacaaaaccug

SEQ ID NO: 2872907 - RNA, 19 nt, Artificial Sequence
  Description of Artificial Sequence: Synthetic oligonucleotide
uggcauuaaaacaaacaac

SEQ ID NO: 2872908 - RNA, 19 nt, Artificial Sequence
  Description of Artificial Sequence: Synthetic oligonucleotide
ugcuacuaaaucuucaaau

SEQ ID NO: 2872909 - RNA, 19 nt, Artificial Sequence
  Description of Artificial Sequence: Synthetic oligonucleotide
aacaacagggcauuugcau

SEQ ID NO: 2872910 - RNA, 19 nt, Artificial Sequence
  Description of Artificial Sequence: Synthetic oligonucleotide
acuaggaucuauuagccau

SEQ ID NO: 2872911 - RNA, 19 nt, Artificial Sequence
  Description of Artificial Sequence: Synthetic oligonucleotide
ugguaucaaaggaagcucc

SEQ ID NO: 2872912 - RNA, 19 nt, Artificial Sequence
  Description of Artificial Sequence: Synthetic oligonucleotide
gaaguaucaccaaaugugc

SEQ ID NO: 2872913 - RNA, 19 nt, Artificial Sequence
  Description of Artificial Sequence: Synthetic oligonucleotide
uacuguucucacaaagucc

SEQ ID NO: 2872914 - RNA, 19 nt, Artificial Sequence
  Description of Artificial Sequence: Synthetic oligonucleotide
uccaaaguacaaaauaguu

SEQ ID NO: 2872915 - RNA, 19 nt, Artificial Sequence
  Description of Artificial Sequence: Synthetic oligonucleotide
uucaaaugaaggugcagug

SEQ ID NO: 2872916 - RNA, 19 nt, Artificial Sequence
  Description of Artificial Sequence: Synthetic oligonucleotide
ucaaaggaagcuccaaagu

SEQ ID NO: 2872917 - RNA, 19 nt, Artificial Sequence
  Description of Artificial Sequence: Synthetic oligonucleotide
uacaaaauaguugccauaa

SEQ ID NO: 2872918 - RNA, 19 nt, Artificial Sequence
  Description of Artificial Sequence: Synthetic oligonucleotide
uagaguauccucagguuca

SEQ ID NO: 2872919 - RNA, 19 nt, Artificial Sequence
  Description of Artificial Sequence: Synthetic oligonucleotide
ucucacaaaguccuuggca

SEQ ID NO: 2872920 - RNA, 19 nt, Artificial Sequence
  Description of Artificial Sequence: Synthetic oligonucleotide
ucuaaguguccaaaacagc

SEQ ID NO: 2872921 - RNA, 19 nt, Artificial Sequence
  Description of Artificial Sequence: Synthetic oligonucleotide
ugcuccaguucuuugaggc

SEQ ID NO: 2872922 - RNA, 19 nt, Artificial Sequence
  Description of Artificial Sequence: Synthetic oligonucleotide
uguuuugcuacuaaaucuu

SEQ ID NO: 2872923 - RNA, 19 nt, Artificial Sequence
  Description of Artificial Sequence: Synthetic oligonucleotide
caauauuuccugaaguauc

SEQ ID NO: 2872924 - RNA, 19 nt, Artificial Sequence
  Description of Artificial Sequence: Synthetic oligonucleotide
acaacagggcauuugcauc

SEQ ID NO: 2872925 - RNA, 19 nt, Artificial Sequence
  Description of Artificial Sequence: Synthetic oligonucleotide
auugguaucaaaggaagcu

SEQ ID NO: 2872926 - RNA, 19 nt, Artificial Sequence
  Description of Artificial Sequence: Synthetic oligonucleotide
uauccucagguucaaacac

SEQ ID NO: 2872927 - RNA, 19 nt, Artificial Sequence
  Description of Artificial Sequence: Synthetic oligonucleotide
ucguagaguauccucaggu

SEQ ID NO: 2872928 - RNA, 19 nt, Artificial Sequence
  Description of Artificial Sequence: Synthetic oligonucleotide
uuugcuacuaaaucuucaa

SEQ ID NO: 2872929 - RNA, 19 nt, Artificial Sequence
  Description of Artificial Sequence: Synthetic oligonucleotide
gguucaaacacacauucug

SEQ ID NO: 2872930 - RNA, 19 nt, Artificial Sequence
  Description of Artificial Sequence: Synthetic oligonucleotide
acuguaguacuguucucac

SEQ ID NO: 2872931 - RNA, 19 nt, Artificial Sequence
  Description of Artificial Sequence: Synthetic oligonucleotide
aucuaaguguccaaaacag

SEQ ID NO: 2872932 - RNA, 19 nt, Artificial Sequence
  Description of Artificial Sequence: Synthetic oligonucleotide
uuagccaugcagcaacucu

SEQ ID NO: 2872933 - RNA, 19 nt, Artificial Sequence
  Description of Artificial Sequence: Synthetic oligonucleotide
cuauuagccaugcagcaac

SEQ ID NO: 2872934 - RNA, 19 nt, Artificial Sequence
  Description of Artificial Sequence: Synthetic oligonucleotide
aacagagauccaucgugag

SEQ ID NO: 2872935 - RNA, 19 nt, Artificial Sequence
  Description of Artificial Sequence: Synthetic oligonucleotide
acuuuucuagguguuuugc

SEQ ID NO: 2872936 - RNA, 19 nt, Artificial Sequence
  Description of Artificial Sequence: Synthetic oligonucleotide
aguacaaaauaguugccau

SEQ ID NO: 2872937 - RNA, 19 nt, Artificial Sequence
  Description of Artificial Sequence: Synthetic oligonucleotide
aauaguugccauaagccau

SEQ ID NO: 2872938 - RNA, 19 nt, Artificial Sequence
  Description of Artificial Sequence: Synthetic oligonucleotide
ggcauuaaaacaaacaaca

SEQ ID NO: 2872939 - RNA, 19 nt, Artificial Sequence
  Description of Artificial Sequence: Synthetic oligonucleotide
aacuguaguacuguucuca

SEQ ID NO: 2872940 - RNA, 19 nt, Artificial Sequence
  Description of Artificial Sequence: Synthetic oligonucleotide
ccaacuaucaucuucacca

SEQ ID NO: 2872941 - RNA, 19 nt, Artificial Sequence
  Description of Artificial Sequence: Synthetic oligonucleotide
acuaaaucuucaaaugaag

SEQ ID NO: 2872942 - RNA, 19 nt, Artificial Sequence
  Description of Artificial Sequence: Synthetic oligonucleotide
ucaccaaaugugcugcuug

SEQ ID NO: 2872943 - RNA, 19 nt, Artificial Sequence
  Description of Artificial Sequence: Synthetic oligonucleotide
uuucuagguguuuugcuac

SEQ ID NO: 2872944 - RNA, 19 nt, Artificial Sequence
  Description of Artificial Sequence: Synthetic oligonucleotide
uaugguuuuccaucacugc

SEQ ID NO: 2872945 - RNA, 19 nt, Artificial Sequence
  Description of Artificial Sequence: Synthetic oligonucleotide
ucaacuuggaacagagauc

SEQ ID NO: 2872946 - RNA, 19 nt, Artificial Sequence
  Description of Artificial Sequence: Synthetic oligonucleotide
uguucaacuggaaucuuau

SEQ ID NO: 2872947 - RNA, 19 nt, Artificial Sequence
  Description of Artificial Sequence: Synthetic oligonucleotide
cuuggcauuaaaacaaaca

SEQ ID NO: 2872948 - RNA, 19 nt, Artificial Sequence
  Description of Artificial Sequence: Synthetic oligonucleotide
acagagauccaucgugagg

SEQ ID NO: 2872949 - RNA, 19 nt, Artificial Sequence
  Description of Artificial Sequence: Synthetic oligonucleotide
acuaugauggacuuuucua

SEQ ID NO: 2872950 - RNA, 19 nt, Artificial Sequence
  Description of Artificial Sequence: Synthetic oligonucleotide
uuccaucacugccaaauug

SEQ ID NO: 2872951 - RNA, 19 nt, Artificial Sequence
  Description of Artificial Sequence: Synthetic oligonucleotide
ugguuuuccaucacugcca

SEQ ID NO: 2872952 - RNA, 19 nt, Artificial Sequence
  Description of Artificial Sequence: Synthetic oligonucleotide
guucucacaaaguccuugg

SEQ ID NO: 2872953 - RNA, 19 nt, Artificial Sequence
  Description of Artificial Sequence: Synthetic oligonucleotide
gcuacuaaaucuucaaaug

SEQ ID NO: 2872954 - RNA, 19 nt, Artificial Sequence
  Description of Artificial Sequence: Synthetic oligonucleotide
gaagcuccaaaguacaaaa

SEQ ID NO: 2872955 - RNA, 19 nt, Artificial Sequence
  Description of Artificial Sequence: Synthetic oligonucleotide
ugauggacuuuucuaggug

SEQ ID NO: 2872956 - RNA, 19 nt, Artificial Sequence
  Description of Artificial Sequence: Synthetic oligonucleotide
gccaaauugguaucaaagg

SEQ ID NO: 2872957 - RNA, 19 nt, Artificial Sequence
  Description of Artificial Sequence: Synthetic oligonucleotide
caaaugaaggugcaguguc

SEQ ID NO: 2872958 - RNA, 19 nt, Artificial Sequence
  Description of Artificial Sequence: Synthetic oligonucleotide
ucaccaaagaacuguagua

SEQ ID NO: 2872959 - RNA, 19 nt, Artificial Sequence
  Description of Artificial Sequence: Synthetic oligonucleotide
auuuccugaaguaucacca

SEQ ID NO: 2872960 - RNA, 19 nt, Artificial Sequence
  Description of Artificial Sequence: Synthetic oligonucleotide
ugccauaagccauaagccu

SEQ ID NO: 2872961 - RNA, 19 nt, Artificial Sequence
  Description of Artificial Sequence: Synthetic oligonucleotide
cuacuaaaucuucaaauga

SEQ ID NO: 2872962 - RNA, 19 nt, Artificial Sequence
  Description of Artificial Sequence: Synthetic oligonucleotide
uccaacuaucaucuucacc

SEQ ID NO: 2872963 - RNA, 19 nt, Artificial Sequence
  Description of Artificial Sequence: Synthetic oligonucleotide
uucaaacacacauucugau

SEQ ID NO: 2872964 - RNA, 19 nt, Artificial Sequence
  Description of Artificial Sequence: Synthetic oligonucleotide
uugacuaugauggacuuuu

SEQ ID NO: 2872965 - RNA, 19 nt, Artificial Sequence
  Description of Artificial Sequence: Synthetic oligonucleotide
aacacacauucugauucac

SEQ ID NO: 2872966 - RNA, 19 nt, Artificial Sequence
  Description of Artificial Sequence: Synthetic oligonucleotide
cagguucaaacacacauuc

SEQ ID NO: 2872967 - RNA, 19 nt, Artificial Sequence
  Description of Artificial Sequence: Synthetic oligonucleotide
aacauguuuccaacuauca

SEQ ID NO: 2872968 - RNA, 19 nt, Artificial Sequence
  Description of Artificial Sequence: Synthetic oligonucleotide
ugcaacauguuuccaacua

SEQ ID NO: 2872969 - RNA, 19 nt, Artificial Sequence
  Description of Artificial Sequence: Synthetic oligonucleotide
uagccaugcagcaacucug

SEQ ID NO: 2872970 - RNA, 19 nt, Artificial Sequence
  Description of Artificial Sequence: Synthetic oligonucleotide
acuguucucacaaaguccu

SEQ ID NO: 2872971 - RNA, 19 nt, Artificial Sequence
  Description of Artificial Sequence: Synthetic oligonucleotide
ggaacagagauccaucgug

SEQ ID NO: 2872972 - RNA, 19 nt, Artificial Sequence
  Description of Artificial Sequence: Synthetic oligonucleotide
aucuauuagccaugcagca

SEQ ID NO: 2872973 - RNA, 19 nt, Artificial Sequence
  Description of Artificial Sequence: Synthetic oligonucleotide
guagaguauccucagguuc

SEQ ID NO: 2872974 - RNA, 19 nt, Artificial Sequence
  Description of Artificial Sequence: Synthetic oligonucleotide
accaaagaacuguaguacu

SEQ ID NO: 2872975 - RNA, 19 nt, Artificial Sequence
  Description of Artificial Sequence: Synthetic oligonucleotide
ccaaaguacaaaauaguug

SEQ ID NO: 2872976 - RNA, 19 nt, Artificial Sequence
  Description of Artificial Sequence: Synthetic oligonucleotide
uaaguguccaaaacagcau

SEQ ID NO: 2872977 - RNA, 19 nt, Artificial Sequence
  Description of Artificial Sequence: Synthetic oligonucleotide
ugaggcgagccccaaggag

SEQ ID NO: 2872978 - RNA, 19 nt, Artificial Sequence
  Description of Artificial Sequence: Synthetic oligonucleotide
aaggugcagugucacuagg

SEQ ID NO: 2872979 - RNA, 19 nt, Artificial Sequence
  Description of Artificial Sequence: Synthetic oligonucleotide
auguuuccaacuaucaucu

SEQ ID NO: 2872980 - RNA, 19 nt, Artificial Sequence
  Description of Artificial Sequence: Synthetic oligonucleotide
agcuccaaaguacaaaaua

SEQ ID NO: 2872981 - RNA, 19 nt, Artificial Sequence
  Description of Artificial Sequence: Synthetic oligonucleotide
cuaguccuacaaaaccugc

SEQ ID NO: 2872982 - RNA, 19 nt, Artificial Sequence
  Description of Artificial Sequence: Synthetic oligonucleotide
caucuaaguguccaaaaca

SEQ ID NO: 2872983 - RNA, 19 nt, Artificial Sequence
  Description of Artificial Sequence: Synthetic oligonucleotide
acaaaauaguugccauaag

SEQ ID NO: 2872984 - RNA, 19 nt, Artificial Sequence
  Description of Artificial Sequence: Synthetic oligonucleotide
uccucagguucaaacacac

SEQ ID NO: 2872985 - RNA, 19 nt, Artificial Sequence
  Description of Artificial Sequence: Synthetic oligonucleotide
uguucucacaaaguccuug

SEQ ID NO: 2872986 - RNA, 19 nt, Artificial Sequence
  Description of Artificial Sequence: Synthetic oligonucleotide
gaaggugcagugucacuag

SEQ ID NO: 2872987 - RNA, 19 nt, Artificial Sequence
  Description of Artificial Sequence: Synthetic oligonucleotide
uccugaaguaucaccaaau

SEQ ID NO: 2872988 - RNA, 19 nt, Artificial Sequence
  Description of Artificial Sequence: Synthetic oligonucleotide
auucacaauauuuccugaa

SEQ ID NO: 2872989 - RNA, 19 nt, Artificial Sequence
  Description of Artificial Sequence: Synthetic oligonucleotide
acaauauuuccugaaguau

SEQ ID NO: 2872990 - RNA, 19 nt, Artificial Sequence
  Description of Artificial Sequence: Synthetic oligonucleotide
ucaaaugaaggugcagugu

SEQ ID NO: 2872991 - RNA, 19 nt, Artificial Sequence
  Description of Artificial Sequence: Synthetic oligonucleotide
agggcauuugcaucuaagu

SEQ ID NO: 2872992 - RNA, 19 nt, Artificial Sequence
  Description of Artificial Sequence: Synthetic oligonucleotide
gauucacaauauuuccuga

SEQ ID NO: 2872993 - RNA, 19 nt, Artificial Sequence
  Description of Artificial Sequence: Synthetic oligonucleotide
cuuggaacagagauccauc

SEQ ID NO: 2872994 - RNA, 19 nt, Artificial Sequence
  Description of Artificial Sequence: Synthetic oligonucleotide
guaucaccaaaugugcugc

SEQ ID NO: 2872995 - RNA, 19 nt, Artificial Sequence
  Description of Artificial Sequence: Synthetic oligonucleotide
aucuucaccaaagaacugu

SEQ ID NO: 2872996 - RNA, 19 nt, Artificial Sequence
  Description of Artificial Sequence: Synthetic oligonucleotide
caacauguuuccaacuauc

SEQ ID NO: 2872997 - RNA, 19 nt, Artificial Sequence
  Description of Artificial Sequence: Synthetic oligonucleotide
auuugcaucuaagugucca

SEQ ID NO: 2872998 - RNA, 19 nt, Artificial Sequence
  Description of Artificial Sequence: Synthetic oligonucleotide
gacuuuucuagguguuuug

SEQ ID NO: 2872999 - RNA, 19 nt, Artificial Sequence
  Description of Artificial Sequence: Synthetic oligonucleotide
gguguuuugcuacuaaauc

SEQ ID NO: 2873000 - RNA, 19 nt, Artificial Sequence
  Description of Artificial Sequence: Synthetic oligonucleotide
uggaaucuuaugguuuucc

SEQ ID NO: 2873001 - RNA, 19 nt, Artificial Sequence
  Description of Artificial Sequence: Synthetic oligonucleotide
gcuccaaaguacaaaauag

SEQ ID NO: 2873002 - RNA, 19 nt, Artificial Sequence
  Description of Artificial Sequence: Synthetic oligonucleotide
ucuucaaaugaaggugcag

SEQ ID NO: 2873003 - RNA, 19 nt, Artificial Sequence
  Description of Artificial Sequence: Synthetic oligonucleotide
cuugcuccaguucuuugag

SEQ ID NO: 2873004 - RNA, 19 nt, Artificial Sequence
  Description of Artificial Sequence: Synthetic oligonucleotide
cuacaaaaccugcaacaug

SEQ ID NO: 2873005 - RNA, 19 nt, Artificial Sequence
  Description of Artificial Sequence: Synthetic oligonucleotide
aaggaagcuccaaaguaca

SEQ ID NO: 2873006 - RNA, 19 nt, Artificial Sequence
  Description of Artificial Sequence: Synthetic oligonucleotide
ucaaacacacauucugauu

SEQ ID NO: 2873007 - RNA, 19 nt, Artificial Sequence
  Description of Artificial Sequence: Synthetic oligonucleotide
guauccucagguucaaaca

SEQ ID NO: 2873008 - RNA, 19 nt, Artificial Sequence
  Description of Artificial Sequence: Synthetic oligonucleotide
ucagguucaaacacacauu

SEQ ID NO: 2873009 - RNA, 19 nt, Artificial Sequence
  Description of Artificial Sequence: Synthetic oligonucleotide
uccaucgugaggucguaga

SEQ ID NO: 2873010 - RNA, 19 nt, Artificial Sequence
  Description of Artificial Sequence: Synthetic oligonucleotide
uugcuacuaaaucuucaaa

SEQ ID NO: 2873011 - RNA, 19 nt, Artificial Sequence
  Description of Artificial Sequence: Synthetic oligonucleotide
aucgugaggucguagagua

SEQ ID NO: 2873012 - RNA, 19 nt, Artificial Sequence
  Description of Artificial Sequence: Synthetic oligonucleotide
caccaaagaacuguaguac

SEQ ID NO: 2873013 - RNA, 19 nt, Artificial Sequence
  Description of Artificial Sequence: Synthetic oligonucleotide
ucuucaccaaagaacugua

SEQ ID NO: 2873014 - RNA, 19 nt, Artificial Sequence
  Description of Artificial Sequence: Synthetic oligonucleotide
ugaaggugcagugucacua

SEQ ID NO: 2873015 - RNA, 19 nt, Artificial Sequence
  Description of Artificial Sequence: Synthetic oligonucleotide
cuaggaucuauuagccaug

SEQ ID NO: 2873016 - RNA, 19 nt, Artificial Sequence
  Description of Artificial Sequence: Synthetic oligonucleotide
cacauucugauucacaaua

SEQ ID NO: 2873017 - RNA, 19 nt, Artificial Sequence
  Description of Artificial Sequence: Synthetic oligonucleotide
guguuuugcuacuaaaucu

SEQ ID NO: 2873018 - RNA, 19 nt, Artificial Sequence
  Description of Artificial Sequence: Synthetic oligonucleotide
caccaaaugugcugcuugg

SEQ ID NO: 2873019 - RNA, 19 nt, Artificial Sequence
  Description of Artificial Sequence: Synthetic oligonucleotide
aucuaguccuacaaaaccu

SEQ ID NO: 2873020 - RNA, 19 nt, Artificial Sequence
  Description of Artificial Sequence: Synthetic oligonucleotide
cacacauucugauucacaa

SEQ ID NO: 2873021 - RNA, 19 nt, Artificial Sequence
  Description of Artificial Sequence: Synthetic oligonucleotide
ugcaucuaaguguccaaaa

SEQ ID NO: 2873022 - RNA, 19 nt, Artificial Sequence
  Description of Artificial Sequence: Synthetic oligonucleotide
acauguuuccaacuaucau

SEQ ID NO: 2873023 - RNA, 19 nt, Artificial Sequence
  Description of Artificial Sequence: Synthetic oligonucleotide
aacuaucaucuucaccaaa

SEQ ID NO: 2873024 - RNA, 19 nt, Artificial Sequence
  Description of Artificial Sequence: Synthetic oligonucleotide
acuggaaucuuaugguuuu

SEQ ID NO: 2873025 - RNA, 19 nt, Artificial Sequence
  Description of Artificial Sequence: Synthetic oligonucleotide
uuccugaaguaucaccaaa

SEQ ID NO: 2873026 - RNA, 19 nt, Artificial Sequence
  Description of Artificial Sequence: Synthetic oligonucleotide
auauuuccugaaguaucac

SEQ ID NO: 2873027 - RNA, 19 nt, Artificial Sequence
  Description of Artificial Sequence: Synthetic oligonucleotide
gagauccaucgugaggucg

SEQ ID NO: 2873028 - RNA, 19 nt, Artificial Sequence
  Description of Artificial Sequence: Synthetic oligonucleotide
ugcagcaacucugggaucu

SEQ ID NO: 2873029 - RNA, 19 nt, Artificial Sequence
  Description of Artificial Sequence: Synthetic oligonucleotide
uuugcaucuaaguguccaa

SEQ ID NO: 2873030 - RNA, 19 nt, Artificial Sequence
  Description of Artificial Sequence: Synthetic oligonucleotide
uugguaucaaaggaagcuc

SEQ ID NO: 2873031 - RNA, 19 nt, Artificial Sequence
  Description of Artificial Sequence: Synthetic oligonucleotide
aaaguccuuggcauuaaaa

SEQ ID NO: 2873032 - RNA, 19 nt, Artificial Sequence
  Description of Artificial Sequence: Synthetic oligonucleotide
uggaacagagauccaucgu

SEQ ID NO: 2873033 - RNA, 19 nt, Artificial Sequence
  Description of Artificial Sequence: Synthetic oligonucleotide
uuguucaacuggaaucuua

SEQ ID NO: 2873034 - RNA, 19 nt, Artificial Sequence
  Description of Artificial Sequence: Synthetic oligonucleotide
cuucaccaaagaacuguag

SEQ ID NO: 2873035 - RNA, 19 nt, Artificial Sequence
  Description of Artificial Sequence: Synthetic oligonucleotide
ccauaagccuucaacuugg

SEQ ID NO: 2873036 - RNA, 19 nt, Artificial Sequence
  Description of Artificial Sequence: Synthetic oligonucleotide
acaaacaacagggcauuug

SEQ ID NO: 2873037 - RNA, 19 nt, Artificial Sequence
  Description of Artificial Sequence: Synthetic oligonucleotide
aaaugaaggugcaguguca

SEQ ID NO: 2873038 - RNA, 19 nt, Artificial Sequence
  Description of Artificial Sequence: Synthetic oligonucleotide
guucuuugaggcgagcccc

SEQ ID NO: 2873039 - RNA, 19 nt, Artificial Sequence
  Description of Artificial Sequence: Synthetic oligonucleotide
gauggacuuuucuaggugu

SEQ ID NO: 2873040 - RNA, 19 nt, Artificial Sequence
  Description of Artificial Sequence: Synthetic oligonucleotide
aguacuguucucacaaagu

SEQ ID NO: 2873041 - RNA, 19 nt, Artificial Sequence
  Description of Artificial Sequence: Synthetic oligonucleotide
ugugcugcuugguuugacu

SEQ ID NO: 2873042 - RNA, 19 nt, Artificial Sequence
  Description of Artificial Sequence: Synthetic oligonucleotide
aaguaucaccaaaugugcu

SEQ ID NO: 2873043 - RNA, 19 nt, Artificial Sequence
  Description of Artificial Sequence: Synthetic oligonucleotide
ucuuaugguuuuccaucac

SEQ ID NO: 2873044 - RNA, 19 nt, Artificial Sequence
  Description of Artificial Sequence: Synthetic oligonucleotide
ucugggaucuaguccuaca

SEQ ID NO: 2873045 - RNA, 19 nt, Artificial Sequence
  Description of Artificial Sequence: Synthetic oligonucleotide
gcuugguuugacuaugaug

SEQ ID NO: 2873046 - RNA, 19 nt, Artificial Sequence
  Description of Artificial Sequence: Synthetic oligonucleotide
ugguuugacuaugauggac

SEQ ID NO: 2873047 - RNA, 19 nt, Artificial Sequence
  Description of Artificial Sequence: Synthetic oligonucleotide
uauuagccaugcagcaacu

SEQ ID NO: 2873048 - RNA, 19 nt, Artificial Sequence
  Description of Artificial Sequence: Synthetic oligonucleotide
uuuccugaaguaucaccaa

SEQ ID NO: 2873049 - RNA, 19 nt, Artificial Sequence
  Description of Artificial Sequence: Synthetic oligonucleotide
uccaguucuuugaggcgag

SEQ ID NO: 2873050 - RNA, 19 nt, Artificial Sequence
  Description of Artificial Sequence: Synthetic oligonucleotide
caaaggaagcuccaaagua

SEQ ID NO: 2873051 - RNA, 19 nt, Artificial Sequence
  Description of Artificial Sequence: Synthetic oligonucleotide
gggcauuugcaucuaagug

SEQ ID NO: 2873052 - RNA, 19 nt, Artificial Sequence
  Description of Artificial Sequence: Synthetic oligonucleotide
ccuucaacuuggaacagag

SEQ ID NO: 2873053 - RNA, 19 nt, Artificial Sequence
  Description of Artificial Sequence: Synthetic oligonucleotide
ugggaucuaguccuacaaa

SEQ ID NO: 2873054 - RNA, 19 nt, Artificial Sequence
  Description of Artificial Sequence: Synthetic oligonucleotide
ucuauuagccaugcagcaa

SEQ ID NO: 2873055 - RNA, 19 nt, Artificial Sequence
  Description of Artificial Sequence: Synthetic oligonucleotide
uaggaucuauuagccaugc

SEQ ID NO: 2873056 - RNA, 19 nt, Artificial Sequence
  Description of Artificial Sequence: Synthetic oligonucleotide
uugcuccaguucuuugagg

SEQ ID NO: 2873057 - RNA, 19 nt, Artificial Sequence
  Description of Artificial Sequence: Synthetic oligonucleotide
aacuggaaucuuaugguuu

SEQ ID NO: 2873058 - RNA, 19 nt, Artificial Sequence
  Description of Artificial Sequence: Synthetic oligonucleotide
gaacagagauccaucguga

SEQ ID NO: 2873059 - RNA, 19 nt, Artificial Sequence
  Description of Artificial Sequence: Synthetic oligonucleotide
gaaucuuaugguuuuccau

SEQ ID NO: 2873060 - RNA, 19 nt, Artificial Sequence
  Description of Artificial Sequence: Synthetic oligonucleotide
aaacaacagggcauuugca

SEQ ID NO: 2873061 - RNA, 19 nt, Artificial Sequence
  Description of Artificial Sequence: Synthetic oligonucleotide
ggcauuugcaucuaagugu

SEQ ID NO: 2873062 - RNA, 19 nt, Artificial Sequence
  Description of Artificial Sequence: Synthetic oligonucleotide
cagggcauuugcaucuaag

SEQ ID NO: 2873063 - RNA, 19 nt, Artificial Sequence
  Description of Artificial Sequence: Synthetic oligonucleotide
uccuuggcauuaaaacaaa

SEQ ID NO: 2873064 - RNA, 19 nt, Artificial Sequence
  Description of Artificial Sequence: Synthetic oligonucleotide
acuuggaacagagauccau

SEQ ID NO: 2873065 - RNA, 19 nt, Artificial Sequence
  Description of Artificial Sequence: Synthetic oligonucleotide
agccauaagccuucaacuu

SEQ ID NO: 2873066 - RNA, 19 nt, Artificial Sequence
  Description of Artificial Sequence: Synthetic oligonucleotide
uucuagguguuuugcuacu

SEQ ID NO: 2873067 - RNA, 19 nt, Artificial Sequence
  Description of Artificial Sequence: Synthetic oligonucleotide
accugcaacauguuuccaa

SEQ ID NO: 2873068 - RNA, 19 nt, Artificial Sequence
  Description of Artificial Sequence: Synthetic oligonucleotide
gucguagaguauccucagg

SEQ ID NO: 2873069 - RNA, 19 nt, Artificial Sequence
  Description of Artificial Sequence: Synthetic oligonucleotide
agagauccaucgugagguc

SEQ ID NO: 2873070 - RNA, 19 nt, Artificial Sequence
  Description of Artificial Sequence: Synthetic oligonucleotide
cucagguucaaacacacau

SEQ ID NO: 2873071 - RNA, 19 nt, Artificial Sequence
  Description of Artificial Sequence: Synthetic oligonucleotide
guucaacuggaaucuuaug

SEQ ID NO: 2873072 - RNA, 19 nt, Artificial Sequence
  Description of Artificial Sequence: Synthetic oligonucleotide
ccaaauugguaucaaagga

SEQ ID NO: 2873073 - RNA, 19 nt, Artificial Sequence
  Description of Artificial Sequence: Synthetic oligonucleotide
uucuuugaggcgagcccca

SEQ ID NO: 2873074 - RNA, 19 nt, Artificial Sequence
  Description of Artificial Sequence: Synthetic oligonucleotide
uugguuugacuaugaugga

SEQ ID NO: 2873075 - RNA, 19 nt, Artificial Sequence
  Description of Artificial Sequence: Synthetic oligonucleotide
guccuuggcauuaaaacaa

SEQ ID NO: 2873076 - RNA, 19 nt, Artificial Sequence
  Description of Artificial Sequence: Synthetic oligonucleotide
auuagccaugcagcaacuc

SEQ ID NO: 2873077 - RNA, 19 nt, Artificial Sequence
  Description of Artificial Sequence: Synthetic oligonucleotide
gccauaagccuucaacuug

SEQ ID NO: 2873078 - RNA, 19 nt, Artificial Sequence
  Description of Artificial Sequence: Synthetic oligonucleotide
gcaucuaaguguccaaaac

SEQ ID NO: 2873079 - RNA, 19 nt, Artificial Sequence
  Description of Artificial Sequence: Synthetic oligonucleotide
guccuacaaaaccugcaac

SEQ ID NO: 2873080 - RNA, 19 nt, Artificial Sequence
  Description of Artificial Sequence: Synthetic oligonucleotide
aggagugccgaguccucuc

SEQ ID NO: 2873081 - RNA, 19 nt, Artificial Sequence
  Description of Artificial Sequence: Synthetic oligonucleotide
cuaucaucuucaccaaaga

SEQ ID NO: 2873082 - RNA, 19 nt, Artificial Sequence
  Description of Artificial Sequence: Synthetic oligonucleotide
acacauucugauucacaau

SEQ ID NO: 2873083 - RNA, 19 nt, Artificial Sequence
  Description of Artificial Sequence: Synthetic oligonucleotide
ccaaagaacuguaguacug

SEQ ID NO: 2873084 - RNA, 19 nt, Artificial Sequence
  Description of Artificial Sequence: Synthetic oligonucleotide
caguucuuugaggcgagcc

SEQ ID NO: 2873085 - RNA, 19 nt, Artificial Sequence
  Description of Artificial Sequence: Synthetic oligonucleotide
gacuaugauggacuuuucu

SEQ ID NO: 2873086 - RNA, 19 nt, Artificial Sequence
  Description of Artificial Sequence: Synthetic oligonucleotide
gggaucuaguccuacaaaa

SEQ ID NO: 2873087 - RNA, 19 nt, Artificial Sequence
  Description of Artificial Sequence: Synthetic oligonucleotide
uugaggcgagccccaagga

SEQ ID NO: 2873088 - RNA, 19 nt, Artificial Sequence
  Description of Artificial Sequence: Synthetic oligonucleotide
cuuuguucaacuggaaucu

SEQ ID NO: 2873089 - RNA, 19 nt, Artificial Sequence
  Description of Artificial Sequence: Synthetic oligonucleotide
uccucucuauuucuucuuu

SEQ ID NO: 2873090 - RNA, 19 nt, Artificial Sequence
  Description of Artificial Sequence: Synthetic oligonucleotide
auaagccuucaacuuggaa

SEQ ID NO: 2873091 - RNA, 19 nt, Artificial Sequence
  Description of Artificial Sequence: Synthetic oligonucleotide
cugaaguaucaccaaaugu

SEQ ID NO: 2873092 - RNA, 19 nt, Artificial Sequence
  Description of Artificial Sequence: Synthetic oligonucleotide
caucuucaccaaagaacug

SEQ ID NO: 2873093 - RNA, 19 nt, Artificial Sequence
  Description of Artificial Sequence: Synthetic oligonucleotide
caugcagcaacucugggau

SEQ ID NO: 2873094 - RNA, 19 nt, Artificial Sequence
  Description of Artificial Sequence: Synthetic oligonucleotide
guacaaaauaguugccaua

SEQ ID NO: 2873095 - RNA, 19 nt, Artificial Sequence
  Description of Artificial Sequence: Synthetic oligonucleotide
ggaaucuuaugguuuucca

SEQ ID NO: 2873096 - RNA, 19 nt, Artificial Sequence
  Description of Artificial Sequence: Synthetic oligonucleotide
cauuugcaucuaagugucc

SEQ ID NO: 2873097 - RNA, 19 nt, Artificial Sequence
  Description of Artificial Sequence: Synthetic oligonucleotide
cugauucacaauauuuccu

SEQ ID NO: 2873098 - RNA, 19 nt, Artificial Sequence
  Description of Artificial Sequence: Synthetic oligonucleotide
uugcaucuaaguguccaaa

SEQ ID NO: 2873099 - RNA, 19 nt, Artificial Sequence
  Description of Artificial Sequence: Synthetic oligonucleotide
cuccaaaguacaaaauagu

SEQ ID NO: 2873100 - RNA, 19 nt, Artificial Sequence
  Description of Artificial Sequence: Synthetic oligonucleotide
cuucaaaugaaggugcagu

SEQ ID NO: 2873101 - RNA, 19 nt, Artificial Sequence
  Description of Artificial Sequence: Synthetic oligonucleotide
ugcugcuugguuugacuau

SEQ ID NO: 2873102 - RNA, 19 nt, Artificial Sequence
  Description of Artificial Sequence: Synthetic oligonucleotide
agguguuuugcuacuaaau

SEQ ID NO: 2873103 - RNA, 19 nt, Artificial Sequence
  Description of Artificial Sequence: Synthetic oligonucleotide
cagagauccaucgugaggu

SEQ ID NO: 2873104 - RNA, 19 nt, Artificial Sequence
  Description of Artificial Sequence: Synthetic oligonucleotide
ucacugccaaauugguauc

SEQ ID NO: 2873105 - RNA, 19 nt, Artificial Sequence
  Description of Artificial Sequence: Synthetic oligonucleotide
uaucaccaaaugugcugcu

SEQ ID NO: 2873106 - RNA, 19 nt, Artificial Sequence
  Description of Artificial Sequence: Synthetic oligonucleotide
ccugcaacauguuuccaac

SEQ ID NO: 2873107 - RNA, 19 nt, Artificial Sequence
  Description of Artificial Sequence: Synthetic oligonucleotide
guuuugcuacuaaaucuuc

SEQ ID NO: 2873108 - RNA, 19 nt, Artificial Sequence
  Description of Artificial Sequence: Synthetic oligonucleotide
ugcuugguuugacuaugau

SEQ ID NO: 2873109 - RNA, 19 nt, Artificial Sequence
  Description of Artificial Sequence: Synthetic oligonucleotide
aguugccauaagccauaag

SEQ ID NO: 2873110 - RNA, 19 nt, Artificial Sequence
  Description of Artificial Sequence: Synthetic oligonucleotide
ccugaaguaucaccaaaug

SEQ ID NO: 2873111 - RNA, 19 nt, Artificial Sequence
  Description of Artificial Sequence: Synthetic oligonucleotide
uuccaacuaucaucuucac

SEQ ID NO: 2873112 - RNA, 19 nt, Artificial Sequence
  Description of Artificial Sequence: Synthetic oligonucleotide
gaacuguaguacuguucuc

SEQ ID NO: 2873113 - RNA, 19 nt, Artificial Sequence
  Description of Artificial Sequence: Synthetic oligonucleotide
cuuaugguuuuccaucacu

SEQ ID NO: 2873114 - RNA, 19 nt, Artificial Sequence
  Description of Artificial Sequence: Synthetic oligonucleotide
aaggagugccgaguccucu

SEQ ID NO: 2873115 - RNA, 19 nt, Artificial Sequence
  Description of Artificial Sequence: Synthetic oligonucleotide
ggaucuaguccuacaaaac

SEQ ID NO: 2873116 - RNA, 19 nt, Artificial Sequence
  Description of Artificial Sequence: Synthetic oligonucleotide
gcauuugcaucuaaguguc

SEQ ID NO: 2873117 - RNA, 19 nt, Artificial Sequence
  Description of Artificial Sequence: Synthetic oligonucleotide
ugacuaugauggacuuuuc

SEQ ID NO: 2873118 - RNA, 19 nt, Artificial Sequence
  Description of Artificial Sequence: Synthetic oligonucleotide
agauccaucgugaggucgu

SEQ ID NO: 2873119 - RNA, 19 nt, Artificial Sequence
  Description of Artificial Sequence: Synthetic oligonucleotide
cuuuucuagguguuuugcu

SEQ ID NO: 2873120 - RNA, 19 nt, Artificial Sequence
  Description of Artificial Sequence: Synthetic oligonucleotide
gugcagugucacuaggauc

SEQ ID NO: 2873121 - RNA, 19 nt, Artificial Sequence
  Description of Artificial Sequence: Synthetic oligonucleotide
ugccgaguccucucuauuu

SEQ ID NO: 2873122 - RNA, 19 nt, Artificial Sequence
  Description of Artificial Sequence: Synthetic oligonucleotide
aaugugcugcuugguuuga

SEQ ID NO: 2873123 - RNA, 19 nt, Artificial Sequence
  Description of Artificial Sequence: Synthetic oligonucleotide
agugccgaguccucucuau

SEQ ID NO: 2873124 - RNA, 19 nt, Artificial Sequence
  Description of Artificial Sequence: Synthetic oligonucleotide
cuuugaggcgagccccaag

SEQ ID NO: 2873125 - RNA, 19 nt, Artificial Sequence
  Description of Artificial Sequence: Synthetic oligonucleotide
uuugacuaugauggacuuu

SEQ ID NO: 2873126 - RNA, 19 nt, Artificial Sequence
  Description of Artificial Sequence: Synthetic oligonucleotide
acauucugauucacaauau

SEQ ID NO: 2873127 - RNA, 19 nt, Artificial Sequence
  Description of Artificial Sequence: Synthetic oligonucleotide
cucucuauuucuucuuugu

SEQ ID NO: 2873128 - RNA, 19 nt, Artificial Sequence
  Description of Artificial Sequence: Synthetic oligonucleotide
aagcuccaaaguacaaaau

SEQ ID NO: 2873129 - RNA, 19 nt, Artificial Sequence
  Description of Artificial Sequence: Synthetic oligonucleotide
gugaggucguagaguaucc

SEQ ID NO: 2873130 - RNA, 19 nt, Artificial Sequence
  Description of Artificial Sequence: Synthetic oligonucleotide
ugaggucguagaguauccu

SEQ ID NO: 2873131 - RNA, 19 nt, Artificial Sequence
  Description of Artificial Sequence: Synthetic oligonucleotide
ucuagguguuuugcuacua

SEQ ID NO: 2873132 - RNA, 19 nt, Artificial Sequence
  Description of Artificial Sequence: Synthetic oligonucleotide
agugucacuaggaucuauu

SEQ ID NO: 2873133 - RNA, 19 nt, Artificial Sequence
  Description of Artificial Sequence: Synthetic oligonucleotide
cacuaggaucuauuagcca

SEQ ID NO: 2873134 - RNA, 19 nt, Artificial Sequence
  Description of Artificial Sequence: Synthetic oligonucleotide
cugggaucuaguccuacaa

SEQ ID NO: 2873135 - RNA, 19 nt, Artificial Sequence
  Description of Artificial Sequence: Synthetic oligonucleotide
auaguugccauaagccaua

SEQ ID NO: 2873136 - RNA, 19 nt, Artificial Sequence
  Description of Artificial Sequence: Synthetic oligonucleotide
gugucacuaggaucuauua

SEQ ID NO: 2873137 - RNA, 19 nt, Artificial Sequence
  Description of Artificial Sequence: Synthetic oligonucleotide
augugcugcuugguuugac

SEQ ID NO: 2873138 - RNA, 19 nt, Artificial Sequence
  Description of Artificial Sequence: Synthetic oligonucleotide
caaaugugcugcuugguuu

SEQ ID NO: 2873139 - RNA, 19 nt, Artificial Sequence
  Description of Artificial Sequence: Synthetic oligonucleotide
aacaaacaacagggcauuu

SEQ ID NO: 2873140 - RNA, 19 nt, Artificial Sequence
  Description of Artificial Sequence: Synthetic oligonucleotide
aggaucuauuagccaugca

SEQ ID NO: 2873141 - RNA, 19 nt, Artificial Sequence
  Description of Artificial Sequence: Synthetic oligonucleotide
auaagccauaagccuucaa

SEQ ID NO: 2873142 - RNA, 19 nt, Artificial Sequence
  Description of Artificial Sequence: Synthetic oligonucleotide
ccauaagccauaagccuuc

SEQ ID NO: 2873143 - RNA, 19 nt, Artificial Sequence
  Description of Artificial Sequence: Synthetic oligonucleotide
cuguaguacuguucucaca

SEQ ID NO: 2873144 - RNA, 19 nt, Artificial Sequence
  Description of Artificial Sequence: Synthetic oligonucleotide
uuuguucaacuggaaucuu

SEQ ID NO: 2873145 - RNA, 19 nt, Artificial Sequence
  Description of Artificial Sequence: Synthetic oligonucleotide
agguucaaacacacauucu

SEQ ID NO: 2873146 - RNA, 19 nt, Artificial Sequence
  Description of Artificial Sequence: Synthetic oligonucleotide
cuucaacuuggaacagaga

SEQ ID NO: 2873147 - RNA, 19 nt, Artificial Sequence
  Description of Artificial Sequence: Synthetic oligonucleotide
gguuugacuaugauggacu

SEQ ID NO: 2873148 - RNA, 19 nt, Artificial Sequence
  Description of Artificial Sequence: Synthetic oligonucleotide
agccccaaggagugccgag

SEQ ID NO: 2873149 - RNA, 19 nt, Artificial Sequence
  Description of Artificial Sequence: Synthetic oligonucleotide
accaaaugugcugcuuggu

SEQ ID NO: 2873150 - RNA, 19 nt, Artificial Sequence
  Description of Artificial Sequence: Synthetic oligonucleotide
caaagaacuguaguacugu

SEQ ID NO: 2873151 - RNA, 19 nt, Artificial Sequence
  Description of Artificial Sequence: Synthetic oligonucleotide
guaucaaaggaagcuccaa

SEQ ID NO: 2873152 - RNA, 19 nt, Artificial Sequence
  Description of Artificial Sequence: Synthetic oligonucleotide
caacuaucaucuucaccaa

SEQ ID NO: 2873153 - RNA, 19 nt, Artificial Sequence
  Description of Artificial Sequence: Synthetic oligonucleotide
acugccaaauugguaucaa

SEQ ID NO: 2873154 - RNA, 19 nt, Artificial Sequence
  Description of Artificial Sequence: Synthetic oligonucleotide
uggacuuuucuagguguuu

SEQ ID NO: 2873155 - RNA, 19 nt, Artificial Sequence
  Description of Artificial Sequence: Synthetic oligonucleotide
agcaacucugggaucuagu

SEQ ID NO: 2873156 - RNA, 19 nt, Artificial Sequence
  Description of Artificial Sequence: Synthetic oligonucleotide
gaggcgagccccaaggagu

SEQ ID NO: 2873157 - RNA, 19 nt, Artificial Sequence
  Description of Artificial Sequence: Synthetic oligonucleotide
gugcugcuugguuugacua

SEQ ID NO: 2873158 - RNA, 19 nt, Artificial Sequence
  Description of Artificial Sequence: Synthetic oligonucleotide
aggugcagugucacuagga

SEQ ID NO: 2873159 - RNA, 19 nt, Artificial Sequence
  Description of Artificial Sequence: Synthetic oligonucleotide
gguaucaaaggaagcucca

SEQ ID NO: 2873160 - RNA, 19 nt, Artificial Sequence
  Description of Artificial Sequence: Synthetic oligonucleotide
aaccugcaacauguuucca

SEQ ID NO: 2873161 - RNA, 19 nt, Artificial Sequence
  Description of Artificial Sequence: Synthetic oligonucleotide
ccucucuauuucuucuuug

SEQ ID NO: 2873162 - RNA, 19 nt, Artificial Sequence
  Description of Artificial Sequence: Synthetic oligonucleotide
caucacugccaaauuggua

SEQ ID NO: 2873163 - RNA, 19 nt, Artificial Sequence
  Description of Artificial Sequence: Synthetic oligonucleotide
caaggagugccgaguccuc

SEQ ID NO: 2873164 - RNA, 19 nt, Artificial Sequence
  Description of Artificial Sequence: Synthetic oligonucleotide
cuauuucuucuuuguucaa

SEQ ID NO: 2873165 - RNA, 19 nt, Artificial Sequence
  Description of Artificial Sequence: Synthetic oligonucleotide
uguuuccaacuaucaucuu

SEQ ID NO: 2873166 - RNA, 19 nt, Artificial Sequence
  Description of Artificial Sequence: Synthetic oligonucleotide
ccaucgugaggucguagag

SEQ ID NO: 2873167 - RNA, 19 nt, Artificial Sequence
  Description of Artificial Sequence: Synthetic oligonucleotide
ggaagcuccaaaguacaaa

SEQ ID NO: 2873168 - RNA, 19 nt, Artificial Sequence
  Description of Artificial Sequence: Synthetic oligonucleotide
cauaagccuucaacuugga

SEQ ID NO: 2873169 - RNA, 19 nt, Artificial Sequence
  Description of Artificial Sequence: Synthetic oligonucleotide
gguuuuccaucacugccaa

SEQ ID NO: 2873170 - RNA, 19 nt, Artificial Sequence
  Description of Artificial Sequence: Synthetic oligonucleotide
aacuuggaacagagaucca

SEQ ID NO: 2873171 - RNA, 19 nt, Artificial Sequence
  Description of Artificial Sequence: Synthetic oligonucleotide
cacaaaguccuuggcauua

SEQ ID NO: 2873172 - RNA, 19 nt, Artificial Sequence
  Description of Artificial Sequence: Synthetic oligonucleotide
acaaaguccuuggcauuaa

SEQ ID NO: 2873173 - RNA, 19 nt, Artificial Sequence
  Description of Artificial Sequence: Synthetic oligonucleotide
auccaucgugaggucguag

SEQ ID NO: 2873174 - RNA, 19 nt, Artificial Sequence
  Description of Artificial Sequence: Synthetic oligonucleotide
aucaccaaaugugcugcuu

SEQ ID NO: 2873175 - RNA, 19 nt, Artificial Sequence
  Description of Artificial Sequence: Synthetic oligonucleotide
guuugacuaugauggacuu

SEQ ID NO: 2873176 - RNA, 19 nt, Artificial Sequence
  Description of Artificial Sequence: Synthetic oligonucleotide
ucgugaggucguagaguau

SEQ ID NO: 2873177 - RNA, 19 nt, Artificial Sequence
  Description of Artificial Sequence: Synthetic oligonucleotide
uaguugccauaagccauaa

SEQ ID NO: 2873178 - RNA, 19 nt, Artificial Sequence
  Description of Artificial Sequence: Synthetic oligonucleotide
agccuucaacuuggaacag

SEQ ID NO: 2873179 - RNA, 19 nt, Artificial Sequence
  Description of Artificial Sequence: Synthetic oligonucleotide
agaguauccucagguucaa

SEQ ID NO: 2873180 - RNA, 19 nt, Artificial Sequence
  Description of Artificial Sequence: Synthetic oligonucleotide
cugcuugguuugacuauga

SEQ ID NO: 2873181 - RNA, 19 nt, Artificial Sequence
  Description of Artificial Sequence: Synthetic oligonucleotide
acagggcauuugcaucuaa

SEQ ID NO: 2873182 - RNA, 19 nt, Artificial Sequence
  Description of Artificial Sequence: Synthetic oligonucleotide
cauucugauucacaauauu

SEQ ID NO: 2873183 - RNA, 19 nt, Artificial Sequence
  Description of Artificial Sequence: Synthetic oligonucleotide
ucuuugaggcgagccccaa

SEQ ID NO: 2873184 - RNA, 19 nt, Artificial Sequence
  Description of Artificial Sequence: Synthetic oligonucleotide
cagcaacucugggaucuag

SEQ ID NO: 2873185 - RNA, 19 nt, Artificial Sequence
  Description of Artificial Sequence: Synthetic oligonucleotide
ccaugcagcaacucuggga

SEQ ID NO: 2873186 - RNA, 19 nt, Artificial Sequence
  Description of Artificial Sequence: Synthetic oligonucleotide
auggacuuuucuagguguu

SEQ ID NO: 2873187 - RNA, 19 nt, Artificial Sequence
  Description of Artificial Sequence: Synthetic oligonucleotide
gccgaguccucucuauuuc

SEQ ID NO: 2873188 - RNA, 19 nt, Artificial Sequence
  Description of Artificial Sequence: Synthetic oligonucleotide
aggcgagccccaaggagug

SEQ ID NO: 2873189 - RNA, 19 nt, Artificial Sequence
  Description of Artificial Sequence: Synthetic oligonucleotide
cacugccaaauugguauca

SEQ ID NO: 2873190 - RNA, 19 nt, Artificial Sequence
  Description of Artificial Sequence: Synthetic oligonucleotide
cucugggaucuaguccuac

SEQ ID NO: 2873191 - RNA, 19 nt, Artificial Sequence
  Description of Artificial Sequence: Synthetic oligonucleotide
caaaguccuuggcauuaaa

SEQ ID NO: 2873192 - RNA, 19 nt, Artificial Sequence
  Description of Artificial Sequence: Synthetic oligonucleotide
ggugcagugucacuaggau

SEQ ID NO: 2873193 - RNA, 19 nt, Artificial Sequence
  Description of Artificial Sequence: Synthetic oligonucleotide
acaaaaccugcaacauguu

SEQ ID NO: 2873194 - RNA, 19 nt, Artificial Sequence
  Description of Artificial Sequence: Synthetic oligonucleotide
aggaagcuccaaaguacaa

SEQ ID NO: 2873195 - RNA, 19 nt, Artificial Sequence
  Description of Artificial Sequence: Synthetic oligonucleotide
cgugaggucguagaguauc

SEQ ID NO: 2873196 - RNA, 19 nt, Artificial Sequence
  Description of Artificial Sequence: Synthetic oligonucleotide
gcaacauguuuccaacuau

SEQ ID NO: 2873197 - RNA, 19 nt, Artificial Sequence
  Description of Artificial Sequence: Synthetic oligonucleotide
cauaagccauaagccuuca

SEQ ID NO: 2873198 - RNA, 19 nt, Artificial Sequence
  Description of Artificial Sequence: Synthetic oligonucleotide
cugcaacauguuuccaacu

SEQ ID NO: 2873199 - RNA, 19 nt, Artificial Sequence
  Description of Artificial Sequence: Synthetic oligonucleotide
cccaaggagugccgagucc

SEQ ID NO: 2873200 - RNA, 19 nt, Artificial Sequence
  Description of Artificial Sequence: Synthetic oligonucleotide
caucgugaggucguagagu

SEQ ID NO: 2873201 - RNA, 19 nt, Artificial Sequence
  Description of Artificial Sequence: Synthetic oligonucleotide
guuuuccaucacugccaaa

SEQ ID NO: 2873202 - RNA, 19 nt, Artificial Sequence
  Description of Artificial Sequence: Synthetic oligonucleotide
gcgagccccaaggagugcc

SEQ ID NO: 2873203 - RNA, 19 nt, Artificial Sequence
  Description of Artificial Sequence: Synthetic oligonucleotide
gagugccgaguccucucua

SEQ ID NO: 2873204 - RNA, 19 nt, Artificial Sequence
  Description of Artificial Sequence: Synthetic oligonucleotide
gagccccaaggagugccga

SEQ ID NO: 2873205 - RNA, 19 nt, Artificial Sequence
  Description of Artificial Sequence: Synthetic oligonucleotide
gauccaucgugaggucgua

SEQ ID NO: 2873206 - RNA, 19 nt, Artificial Sequence
  Description of Artificial Sequence: Synthetic oligonucleotide
gccauaagccauaagccuu

SEQ ID NO: 2873207 - RNA, 19 nt, Artificial Sequence
  Description of Artificial Sequence: Synthetic oligonucleotide
gccuucaacuuggaacaga

SEQ ID NO: 2873208 - RNA, 19 nt, Artificial Sequence
  Description of Artificial Sequence: Synthetic oligonucleotide
ccccaaggagugccgaguc

SEQ ID NO: 2873209 - RNA, 19 nt, Artificial Sequence
  Description of Artificial Sequence: Synthetic oligonucleotide
ggacuuuucuagguguuuu

SEQ ID NO: 2873210 - RNA, 19 nt, Artificial Sequence
  Description of Artificial Sequence: Synthetic oligonucleotide
ccuacaaaaccugcaacau

SEQ ID NO: 2873211 - RNA, 19 nt, Artificial Sequence
  Description of Artificial Sequence: Synthetic oligonucleotide
ccaucacugccaaauuggu

SEQ ID NO: 2873212 - RNA, 19 nt, Artificial Sequence
  Description of Artificial Sequence: Synthetic oligonucleotide
ggagugccgaguccucucu

SEQ ID NO: 2873213 - RNA, 19 nt, Artificial Sequence
  Description of Artificial Sequence: Synthetic oligonucleotide
cgagccccaaggagugccg

SEQ ID NO: 2873214 - RNA, 19 nt, Artificial Sequence
  Description of Artificial Sequence: Synthetic oligonucleotide
ccaaggagugccgaguccu

SEQ ID NO: 2873215 - RNA, 19 nt, Artificial Sequence
  Description of Artificial Sequence: Synthetic oligonucleotide
ccaaaugugcugcuugguu

SEQ ID NO: 2873216 - RNA, 19 nt, Artificial Sequence
  Description of Artificial Sequence: Synthetic oligonucleotide
ccaguucuuugaggcgagc

SEQ ID NO: 2873217 - RNA, 19 nt, Artificial Sequence
  Description of Artificial Sequence: Synthetic oligonucleotide
acucugggaucuaguccua

SEQ ID NO: 2873218 - RNA, 19 nt, Artificial Sequence
  Description of Artificial Sequence: Synthetic oligonucleotide
gugccgaguccucucuauu

SEQ ID NO: 2873219 - RNA, 19 nt, Artificial Sequence
  Description of Artificial Sequence: Synthetic oligonucleotide
cuguucucacaaaguccuu

SEQ ID NO: 2873220 - RNA, 19 nt, Artificial Sequence
  Description of Artificial Sequence: Synthetic oligonucleotide
ccgaguccucucuauuucu

SEQ ID NO: 2873221 - RNA, 19 nt, Artificial Sequence
  Description of Artificial Sequence: Synthetic oligonucleotide
ggcgagccccaaggagugc

SEQ ID NO: 2873222 - RNA, 19 nt, Artificial Sequence
  Description of Artificial Sequence: Synthetic oligonucleotide
cguagaguauccucagguu

SEQ ID NO: 2873223 - RNA, 19 nt, Artificial Sequence
  Description of Artificial Sequence: Synthetic oligonucleotide
cagugucacuaggaucuau

SEQ ID NO: 2873224 - RNA, 19 nt, Artificial Sequence
  Description of Artificial Sequence: Synthetic oligonucleotide
gccccaaggagugccgagu

SEQ ID NO: 2873225 - RNA, 19 nt, Artificial Sequence
  Description of Artificial Sequence: Synthetic oligonucleotide
gcagugucacuaggaucua

SEQ ID NO: 2873226 - RNA, 19 nt, Artificial Sequence
  Description of Artificial Sequence: Synthetic oligonucleotide
gcagcaacucugggaucua

SEQ ID NO: 2873227 - RNA, 19 nt, Artificial Sequence
  Description of Artificial Sequence: Synthetic oligonucleotide
cgaguccucucuauuucuu

SEQ ID NO: 2873228 - RNA, 19 nt, Artificial Sequence
  Description of Artificial Sequence: Synthetic oligonucleotide
aacucuaggauccucacac

SEQ ID NO: 2873229 - RNA, 19 nt, Artificial Sequence
  Description of Artificial Sequence: Synthetic oligonucleotide
uucgauuuccuuuaggugg

SEQ ID NO: 2873230 - RNA, 19 nt, Artificial Sequence
  Description of Artificial Sequence: Synthetic oligonucleotide
agagcucaaauucacagcc

SEQ ID NO: 2873231 - RNA, 19 nt, Artificial Sequence
  Description of Artificial Sequence: Synthetic oligonucleotide
aggacucaaacuuagaguc

SEQ ID NO: 2873232 - RNA, 19 nt, Artificial Sequence
  Description of Artificial Sequence: Synthetic oligonucleotide
ucagcauugaagacgauca

SEQ ID NO: 2873233 - RNA, 19 nt, Artificial Sequence
  Description of Artificial Sequence: Synthetic oligonucleotide
uacuugaugaauuccaccc

SEQ ID NO: 2873234 - RNA, 19 nt, Artificial Sequence
  Description of Artificial Sequence: Synthetic oligonucleotide
uuuguggugggccacaagc

SEQ ID NO: 2873235 - RNA, 19 nt, Artificial Sequence
  Description of Artificial Sequence: Synthetic oligonucleotide
caaacuuagagucaccacc

SEQ ID NO: 2873236 - RNA, 19 nt, Artificial Sequence
  Description of Artificial Sequence: Synthetic oligonucleotide
uuuaaauacuugaugaauu

SEQ ID NO: 2873237 - RNA, 19 nt, Artificial Sequence
  Description of Artificial Sequence: Synthetic oligonucleotide
gaugucagcauugaagacg

SEQ ID NO: 2873238 - RNA, 19 nt, Artificial Sequence
  Description of Artificial Sequence: Synthetic oligonucleotide
aauaccacauuucgauuuc

SEQ ID NO: 2873239 - RNA, 19 nt, Artificial Sequence
  Description of Artificial Sequence: Synthetic oligonucleotide
ugggaugucagcauugaag

SEQ ID NO: 2873240 - RNA, 19 nt, Artificial Sequence
  Description of Artificial Sequence: Synthetic oligonucleotide
auacuugaugaauuccacc

SEQ ID NO: 2873241 - RNA, 19 nt, Artificial Sequence
  Description of Artificial Sequence: Synthetic oligonucleotide
auuucgauuuccuuuaggu

SEQ ID NO: 2873242 - RNA, 19 nt, Artificial Sequence
  Description of Artificial Sequence: Synthetic oligonucleotide
aauacuugaugaauuccac

SEQ ID NO: 2873243 - RNA, 19 nt, Artificial Sequence
  Description of Artificial Sequence: Synthetic oligonucleotide
augaugagcaucuccuccc

SEQ ID NO: 2873244 - RNA, 19 nt, Artificial Sequence
  Description of Artificial Sequence: Synthetic oligonucleotide
uuaaauacuugaugaauuc

SEQ ID NO: 2873245 - RNA, 19 nt, Artificial Sequence
  Description of Artificial Sequence: Synthetic oligonucleotide
augaauuccacccggaccu

SEQ ID NO: 2873246 - RNA, 19 nt, Artificial Sequence
  Description of Artificial Sequence: Synthetic oligonucleotide
ugcugcuggacaaagcagg

SEQ ID NO: 2873247 - RNA, 19 nt, Artificial Sequence
  Description of Artificial Sequence: Synthetic oligonucleotide
aaauacuugaugaauucca

SEQ ID NO: 2873248 - RNA, 19 nt, Artificial Sequence
  Description of Artificial Sequence: Synthetic oligonucleotide
gaugaauuccacccggacc

SEQ ID NO: 2873249 - RNA, 19 nt, Artificial Sequence
  Description of Artificial Sequence: Synthetic oligonucleotide
uccgacaaggagcugauga

SEQ ID NO: 2873250 - RNA, 19 nt, Artificial Sequence
  Description of Artificial Sequence: Synthetic oligonucleotide
gaugaugagcaucuccucc

SEQ ID NO: 2873251 - RNA, 19 nt, Artificial Sequence
  Description of Artificial Sequence: Synthetic oligonucleotide
caaauucacagccugugcc

SEQ ID NO: 2873252 - RNA, 19 nt, Artificial Sequence
  Description of Artificial Sequence: Synthetic oligonucleotide
aaauucacagccugugccu

SEQ ID NO: 2873253 - RNA, 19 nt, Artificial Sequence
  Description of Artificial Sequence: Synthetic oligonucleotide
uugaagacgaucaccacuc

SEQ ID NO: 2873254 - RNA, 19 nt, Artificial Sequence
  Description of Artificial Sequence: Synthetic oligonucleotide
aggaauaccacauuucgau

SEQ ID NO: 2873255 - RNA, 19 nt, Artificial Sequence
  Description of Artificial Sequence: Synthetic oligonucleotide
uuuuaaauacuugaugaau

SEQ ID NO: 2873256 - RNA, 19 nt, Artificial Sequence
  Description of Artificial Sequence: Synthetic oligonucleotide
ucaaacucuaggauccuca

SEQ ID NO: 2873257 - RNA, 19 nt, Artificial Sequence
  Description of Artificial Sequence: Synthetic oligonucleotide
uggguucucaaacucuagg

SEQ ID NO: 2873258 - RNA, 19 nt, Artificial Sequence
  Description of Artificial Sequence: Synthetic oligonucleotide
uguugcuggugacaugugg

SEQ ID NO: 2873259 - RNA, 19 nt, Artificial Sequence
  Description of Artificial Sequence: Synthetic oligonucleotide
auugaagacgaucaccacu

SEQ ID NO: 2873260 - RNA, 19 nt, Artificial Sequence
  Description of Artificial Sequence: Synthetic oligonucleotide
cuugaugaauuccacccgg

SEQ ID NO: 2873261 - RNA, 19 nt, Artificial Sequence
  Description of Artificial Sequence: Synthetic oligonucleotide
agcauugaagacgaucacc

SEQ ID NO: 2873262 - RNA, 19 nt, Artificial Sequence
  Description of Artificial Sequence: Synthetic oligonucleotide
uaaauacuugaugaauucc

SEQ ID NO: 2873263 - RNA, 19 nt, Artificial Sequence
  Description of Artificial Sequence: Synthetic oligonucleotide
uuucgauuuccuuuaggug

SEQ ID NO: 2873264 - RNA, 19 nt, Artificial Sequence
  Description of Artificial Sequence: Synthetic oligonucleotide
caugcagugacugucuugg

SEQ ID NO: 2873265 - RNA, 19 nt, Artificial Sequence
  Description of Artificial Sequence: Synthetic oligonucleotide
uaggugaugaugagcaucu

SEQ ID NO: 2873266 - RNA, 19 nt, Artificial Sequence
  Description of Artificial Sequence: Synthetic oligonucleotide
acuugaugaauuccacccg

SEQ ID NO: 2873267 - RNA, 19 nt, Artificial Sequence
  Description of Artificial Sequence: Synthetic oligonucleotide
ucaaauucacagccugugc

SEQ ID NO: 2873268 - RNA, 19 nt, Artificial Sequence
  Description of Artificial Sequence: Synthetic oligonucleotide
gacauguggguucucaaac

SEQ ID NO: 2873269 - RNA, 19 nt, Artificial Sequence
  Description of Artificial Sequence: Synthetic oligonucleotide
ugcagugacugucuuggag

SEQ ID NO: 2873270 - RNA, 19 nt, Artificial Sequence
  Description of Artificial Sequence: Synthetic oligonucleotide
acugcugcuggacaaagca

SEQ ID NO: 2873271 - RNA, 19 nt, Artificial Sequence
  Description of Artificial Sequence: Synthetic oligonucleotide
ucugcucuccgacaaggag

SEQ ID NO: 2873272 - RNA, 19 nt, Artificial Sequence
  Description of Artificial Sequence: Synthetic oligonucleotide
cuuguguuggguuguauuc

SEQ ID NO: 2873273 - RNA, 19 nt, Artificial Sequence
  Description of Artificial Sequence: Synthetic oligonucleotide
aaacuuagagucaccacca

SEQ ID NO: 2873274 - RNA, 19 nt, Artificial Sequence
  Description of Artificial Sequence: Synthetic oligonucleotide
uguguuggguuguauucag

SEQ ID NO: 2873275 - RNA, 19 nt, Artificial Sequence
  Description of Artificial Sequence: Synthetic oligonucleotide
gcaggaauaccacauuucg

SEQ ID NO: 2873276 - RNA, 19 nt, Artificial Sequence
  Description of Artificial Sequence: Synthetic oligonucleotide
ucgauuuccuuuagguggc

SEQ ID NO: 2873277 - RNA, 19 nt, Artificial Sequence
  Description of Artificial Sequence: Synthetic oligonucleotide
cuuuagguggcuugggaug

SEQ ID NO: 2873278 - RNA, 19 nt, Artificial Sequence
  Description of Artificial Sequence: Synthetic oligonucleotide
uuggaggaacugcugcugg

SEQ ID NO: 2873279 - RNA, 19 nt, Artificial Sequence
  Description of Artificial Sequence: Synthetic oligonucleotide
gacaaggagcugaugaugc

SEQ ID NO: 2873280 - RNA, 19 nt, Artificial Sequence
  Description of Artificial Sequence: Synthetic oligonucleotide
ugggccacaagcaugcagu

SEQ ID NO: 2873281 - RNA, 19 nt, Artificial Sequence
  Description of Artificial Sequence: Synthetic oligonucleotide
agcucaaauucacagccug

SEQ ID NO: 2873282 - RNA, 19 nt, Artificial Sequence
  Description of Artificial Sequence: Synthetic oligonucleotide
acgaucaccacuccaugag

SEQ ID NO: 2873283 - RNA, 19 nt, Artificial Sequence
  Description of Artificial Sequence: Synthetic oligonucleotide
uccaugagcauccuucauc

SEQ ID NO: 2873284 - RNA, 19 nt, Artificial Sequence
  Description of Artificial Sequence: Synthetic oligonucleotide
ugcuggacaaagcaggaau

SEQ ID NO: 2873285 - RNA, 19 nt, Artificial Sequence
  Description of Artificial Sequence: Synthetic oligonucleotide
ugaugagcaucuccucccg

SEQ ID NO: 2873286 - RNA, 19 nt, Artificial Sequence
  Description of Artificial Sequence: Synthetic oligonucleotide
cacuaggugaugaugagca

SEQ ID NO: 2873287 - RNA, 19 nt, Artificial Sequence
  Description of Artificial Sequence: Synthetic oligonucleotide
ucuuccuccagguucgagu

SEQ ID NO: 2873288 - RNA, 19 nt, Artificial Sequence
  Description of Artificial Sequence: Synthetic oligonucleotide
aucagggcuggccagcagg

SEQ ID NO: 2873289 - RNA, 19 nt, Artificial Sequence
  Description of Artificial Sequence: Synthetic oligonucleotide
guugcuggugacauguggg

SEQ ID NO: 2873290 - RNA, 19 nt, Artificial Sequence
  Description of Artificial Sequence: Synthetic oligonucleotide
ugcacggggacacuaggug

SEQ ID NO: 2873291 - RNA, 19 nt, Artificial Sequence
  Description of Artificial Sequence: Synthetic oligonucleotide
cacuccaugagcauccuuc

SEQ ID NO: 2873292 - RNA, 19 nt, Artificial Sequence
  Description of Artificial Sequence: Synthetic oligonucleotide
aagcaggaauaccacauuu

SEQ ID NO: 2873293 - RNA, 19 nt, Artificial Sequence
  Description of Artificial Sequence: Synthetic oligonucleotide
aaacucuaggauccucaca

SEQ ID NO: 2873294 - RNA, 19 nt, Artificial Sequence
  Description of Artificial Sequence: Synthetic oligonucleotide
gcagugacugucuuggagg

SEQ ID NO: 2873295 - RNA, 19 nt, Artificial Sequence
  Description of Artificial Sequence: Synthetic oligonucleotide
uccagagcccgguuugugg

SEQ ID NO: 2873296 - RNA, 19 nt, Artificial Sequence
  Description of Artificial Sequence: Synthetic oligonucleotide
cugcucuccgacaaggagc

SEQ ID NO: 2873297 - RNA, 19 nt, Artificial Sequence
  Description of Artificial Sequence: Synthetic oligonucleotide
cuucagcuuguucaagggg

SEQ ID NO: 2873298 - RNA, 19 nt, Artificial Sequence
  Description of Artificial Sequence: Synthetic oligonucleotide
ugaugaauuccacccggac

SEQ ID NO: 2873299 - RNA, 19 nt, Artificial Sequence
  Description of Artificial Sequence: Synthetic oligonucleotide
accacaaucccagagcuca

SEQ ID NO: 2873300 - RNA, 19 nt, Artificial Sequence
  Description of Artificial Sequence: Synthetic oligonucleotide
acucuaggauccucacacc

SEQ ID NO: 2873301 - RNA, 19 nt, Artificial Sequence
  Description of Artificial Sequence: Synthetic oligonucleotide
ugcucuccgacaaggagcu

SEQ ID NO: 2873302 - RNA, 19 nt, Artificial Sequence
  Description of Artificial Sequence: Synthetic oligonucleotide
gucaccaccacaaucccag

SEQ ID NO: 2873303 - RNA, 19 nt, Artificial Sequence
  Description of Artificial Sequence: Synthetic oligonucleotide
gacacuaggugaugaugag

SEQ ID NO: 2873304 - RNA, 19 nt, Artificial Sequence
  Description of Artificial Sequence: Synthetic oligonucleotide
uggugggccacaagcaugc

SEQ ID NO: 2873305 - RNA, 19 nt, Artificial Sequence
  Description of Artificial Sequence: Synthetic oligonucleotide
acacuaggugaugaugagc

SEQ ID NO: 2873306 - RNA, 19 nt, Artificial Sequence
  Description of Artificial Sequence: Synthetic oligonucleotide
cuaggauccucacaccuug

SEQ ID NO: 2873307 - RNA, 19 nt, Artificial Sequence
  Description of Artificial Sequence: Synthetic oligonucleotide
gacucaaacuuagagucac

SEQ ID NO: 2873308 - RNA, 19 nt, Artificial Sequence
  Description of Artificial Sequence: Synthetic oligonucleotide
ucucugcucuccgacaagg

SEQ ID NO: 2873309 - RNA, 19 nt, Artificial Sequence
  Description of Artificial Sequence: Synthetic oligonucleotide
acaaagcaggaauaccaca

SEQ ID NO: 2873310 - RNA, 19 nt, Artificial Sequence
  Description of Artificial Sequence: Synthetic oligonucleotide
uucgagugcaccagcuuca

SEQ ID NO: 2873311 - RNA, 19 nt, Artificial Sequence
  Description of Artificial Sequence: Synthetic oligonucleotide
cagagcucaaauucacagc

SEQ ID NO: 2873312 - RNA, 19 nt, Artificial Sequence
  Description of Artificial Sequence: Synthetic oligonucleotide
cauuucgauuuccuuuagg

SEQ ID NO: 2873313 - RNA, 19 nt, Artificial Sequence
  Description of Artificial Sequence: Synthetic oligonucleotide
uguggguucucaaacucua

SEQ ID NO: 2873314 - RNA, 19 nt, Artificial Sequence
  Description of Artificial Sequence: Synthetic oligonucleotide
aaagcaggaauaccacauu

SEQ ID NO: 2873315 - RNA, 19 nt, Artificial Sequence
  Description of Artificial Sequence: Synthetic oligonucleotide
uuuguuguugcuggugaca

SEQ ID NO: 2873316 - RNA, 19 nt, Artificial Sequence
  Description of Artificial Sequence: Synthetic oligonucleotide
aagacgaucaccacuccau

SEQ ID NO: 2873317 - RNA, 19 nt, Artificial Sequence
  Description of Artificial Sequence: Synthetic oligonucleotide
gcaggacucaaacuuagag

SEQ ID NO: 2873318 - RNA, 19 nt, Artificial Sequence
  Description of Artificial Sequence: Synthetic oligonucleotide
ucuuggaggaacugcugcu

SEQ ID NO: 2873319 - RNA, 19 nt, Artificial Sequence
  Description of Artificial Sequence: Synthetic oligonucleotide
acuuagagucaccaccaca

SEQ ID NO: 2873320 - RNA, 19 nt, Artificial Sequence
  Description of Artificial Sequence: Synthetic oligonucleotide
uugaugaauuccacccgga

SEQ ID NO: 2873321 - RNA, 19 nt, Artificial Sequence
  Description of Artificial Sequence: Synthetic oligonucleotide
cucaaauucacagccugug

SEQ ID NO: 2873322 - RNA, 19 nt, Artificial Sequence
  Description of Artificial Sequence: Synthetic oligonucleotide
cuuccuccagguucgagug

SEQ ID NO: 2873323 - RNA, 19 nt, Artificial Sequence
  Description of Artificial Sequence: Synthetic oligonucleotide
gucuuggaggaacugcugc

SEQ ID NO: 2873324 - RNA, 19 nt, Artificial Sequence
  Description of Artificial Sequence: Synthetic oligonucleotide
uggacaaagcaggaauacc

SEQ ID NO: 2873325 - RNA, 19 nt, Artificial Sequence
  Description of Artificial Sequence: Synthetic oligonucleotide
uuuagguggcuugggaugu

SEQ ID NO: 2873326 - RNA, 19 nt, Artificial Sequence
  Description of Artificial Sequence: Synthetic oligonucleotide
auaccacauuucgauuucc

SEQ ID NO: 2873327 - RNA, 19 nt, Artificial Sequence
  Description of Artificial Sequence: Synthetic oligonucleotide
aacugcugcuggacaaagc

SEQ ID NO: 2873328 - RNA, 19 nt, Artificial Sequence
  Description of Artificial Sequence: Synthetic oligonucleotide
ggugaugaugagcaucucc

SEQ ID NO: 2873329 - RNA, 19 nt, Artificial Sequence
  Description of Artificial Sequence: Synthetic oligonucleotide
uccuuuagguggcuuggga

SEQ ID NO: 2873330 - RNA, 19 nt, Artificial Sequence
  Description of Artificial Sequence: Synthetic oligonucleotide
uccagguucgagugcacca

SEQ ID NO: 2873331 - RNA, 19 nt, Artificial Sequence
  Description of Artificial Sequence: Synthetic oligonucleotide
acauguggguucucaaacu

SEQ ID NO: 2873332 - RNA, 19 nt, Artificial Sequence
  Description of Artificial Sequence: Synthetic oligonucleotide
agcaggaauaccacauuuc

SEQ ID NO: 2873333 - RNA, 19 nt, Artificial Sequence
  Description of Artificial Sequence: Synthetic oligonucleotide
cacaccuuguguuggguug

SEQ ID NO: 2873334 - RNA, 19 nt, Artificial Sequence
  Description of Artificial Sequence: Synthetic oligonucleotide
gacaaagcaggaauaccac

SEQ ID NO: 2873335 - RNA, 19 nt, Artificial Sequence
  Description of Artificial Sequence: Synthetic oligonucleotide
ugucuuggaggaacugcug

SEQ ID NO: 2873336 - RNA, 19 nt, Artificial Sequence
  Description of Artificial Sequence: Synthetic oligonucleotide
cuugucuccuccagagccc

SEQ ID NO: 2873337 - RNA, 19 nt, Artificial Sequence
  Description of Artificial Sequence: Synthetic oligonucleotide
cauguggguucucaaacuc

SEQ ID NO: 2873338 - RNA, 19 nt, Artificial Sequence
  Description of Artificial Sequence: Synthetic oligonucleotide
gaugagcaucuccucccgg

SEQ ID NO: 2873339 - RNA, 19 nt, Artificial Sequence
  Description of Artificial Sequence: Synthetic oligonucleotide
uuguguuggguuguauuca

SEQ ID NO: 2873340 - RNA, 19 nt, Artificial Sequence
  Description of Artificial Sequence: Synthetic oligonucleotide
uaccacauuucgauuuccu

SEQ ID NO: 2873341 - RNA, 19 nt, Artificial Sequence
  Description of Artificial Sequence: Synthetic oligonucleotide
ccagagcucaaauucacag

SEQ ID NO: 2873342 - RNA, 19 nt, Artificial Sequence
  Description of Artificial Sequence: Synthetic oligonucleotide
ugacauguggguucucaaa

SEQ ID NO: 2873343 - RNA, 19 nt, Artificial Sequence
  Description of Artificial Sequence: Synthetic oligonucleotide
uccuccagagcccgguuug

SEQ ID NO: 2873344 - RNA, 19 nt, Artificial Sequence
  Description of Artificial Sequence: Synthetic oligonucleotide
uggccagcaggacucaaac

SEQ ID NO: 2873345 - RNA, 19 nt, Artificial Sequence
  Description of Artificial Sequence: Synthetic oligonucleotide
gaauaccacauuucgauuu

SEQ ID NO: 2873346 - RNA, 19 nt, Artificial Sequence
  Description of Artificial Sequence: Synthetic oligonucleotide
uuccacccggaccuccucg

SEQ ID NO: 2873347 - RNA, 19 nt, Artificial Sequence
  Description of Artificial Sequence: Synthetic oligonucleotide
caaacucuaggauccucac

SEQ ID NO: 2873348 - RNA, 19 nt, Artificial Sequence
  Description of Artificial Sequence: Synthetic oligonucleotide
agcauccuucaucagggcu

SEQ ID NO: 2873349 - RNA, 19 nt, Artificial Sequence
  Description of Artificial Sequence: Synthetic oligonucleotide
guucgagugcaccagcuuc

SEQ ID NO: 2873350 - RNA, 19 nt, Artificial Sequence
  Description of Artificial Sequence: Synthetic oligonucleotide
ucccagagcucaaauucac

SEQ ID NO: 2873351 - RNA, 19 nt, Artificial Sequence
  Description of Artificial Sequence: Synthetic oligonucleotide
gaagacgaucaccacucca

SEQ ID NO: 2873352 - RNA, 19 nt, Artificial Sequence
  Description of Artificial Sequence: Synthetic oligonucleotide
cuaggugaugaugagcauc

SEQ ID NO: 2873353 - RNA, 19 nt, Artificial Sequence
  Description of Artificial Sequence: Synthetic oligonucleotide
uccucacaccuuguguugg

SEQ ID NO: 2873354 - RNA, 19 nt, Artificial Sequence
  Description of Artificial Sequence: Synthetic oligonucleotide
caagcaugcagugacuguc

SEQ ID NO: 2873355 - RNA, 19 nt, Artificial Sequence
  Description of Artificial Sequence: Synthetic oligonucleotide
ugaagacgaucaccacucc

SEQ ID NO: 2873356 - RNA, 19 nt, Artificial Sequence
  Description of Artificial Sequence: Synthetic oligonucleotide
augagcaucuccucccggu

SEQ ID NO: 2873357 - RNA, 19 nt, Artificial Sequence
  Description of Artificial Sequence: Synthetic oligonucleotide
aucuccucccggucucugc

SEQ ID NO: 2873358 - RNA, 19 nt, Artificial Sequence
  Description of Artificial Sequence: Synthetic oligonucleotide
agcaucuccucccggucuc

SEQ ID NO: 2873359 - RNA, 19 nt, Artificial Sequence
  Description of Artificial Sequence: Synthetic oligonucleotide
gaucaccacuccaugagca

SEQ ID NO: 2873360 - RNA, 19 nt, Artificial Sequence
  Description of Artificial Sequence: Synthetic oligonucleotide
ccuugucuccuccagagcc

SEQ ID NO: 2873361 - RNA, 19 nt, Artificial Sequence
  Description of Artificial Sequence: Synthetic oligonucleotide
aaagccaggcugcccuugu

SEQ ID NO: 2873362 - RNA, 19 nt, Artificial Sequence
  Description of Artificial Sequence: Synthetic oligonucleotide
augucagcauugaagacga

SEQ ID NO: 2873363 - RNA, 19 nt, Artificial Sequence
  Description of Artificial Sequence: Synthetic oligonucleotide
cagcaggacucaaacuuag

SEQ ID NO: 2873364 - RNA, 19 nt, Artificial Sequence
  Description of Artificial Sequence: Synthetic oligonucleotide
ugugccuuuuguuguugcu

SEQ ID NO: 2873365 - RNA, 19 nt, Artificial Sequence
  Description of Artificial Sequence: Synthetic oligonucleotide
uugucuccuccagagcccg

SEQ ID NO: 2873366 - RNA, 19 nt, Artificial Sequence
  Description of Artificial Sequence: Synthetic oligonucleotide
uccuucaucagggcuggcc

SEQ ID NO: 2873367 - RNA, 19 nt, Artificial Sequence
  Description of Artificial Sequence: Synthetic oligonucleotide
acuccaugagcauccuuca

SEQ ID NO: 2873368 - RNA, 19 nt, Artificial Sequence
  Description of Artificial Sequence: Synthetic oligonucleotide
acauuucgauuuccuuuag

SEQ ID NO: 2873369 - RNA, 19 nt, Artificial Sequence
  Description of Artificial Sequence: Synthetic oligonucleotide
gacgaucaccacuccauga

SEQ ID NO: 2873370 - RNA, 19 nt, Artificial Sequence
  Description of Artificial Sequence: Synthetic oligonucleotide
acaagcaugcagugacugu

SEQ ID NO: 2873371 - RNA, 19 nt, Artificial Sequence
  Description of Artificial Sequence: Synthetic oligonucleotide
agacgaucaccacuccaug

SEQ ID NO: 2873372 - RNA, 19 nt, Artificial Sequence
  Description of Artificial Sequence: Synthetic oligonucleotide
gccacaagcaugcagugac

SEQ ID NO: 2873373 - RNA, 19 nt, Artificial Sequence
  Description of Artificial Sequence: Synthetic oligonucleotide
uugcuggugacaugugggu

SEQ ID NO: 2873374 - RNA, 19 nt, Artificial Sequence
  Description of Artificial Sequence: Synthetic oligonucleotide
ggacaaagcaggaauacca

SEQ ID NO: 2873375 - RNA, 19 nt, Artificial Sequence
  Description of Artificial Sequence: Synthetic oligonucleotide
cuggacaaagcaggaauac

SEQ ID NO: 2873376 - RNA, 19 nt, Artificial Sequence
  Description of Artificial Sequence: Synthetic oligonucleotide
cauugaagacgaucaccac

SEQ ID NO: 2873377 - RNA, 19 nt, Artificial Sequence
  Description of Artificial Sequence: Synthetic oligonucleotide
gagucaccaccacaauccc

SEQ ID NO: 2873378 - RNA, 19 nt, Artificial Sequence
  Description of Artificial Sequence: Synthetic oligonucleotide
gugacugucuuggaggaac

SEQ ID NO: 2873379 - RNA, 19 nt, Artificial Sequence
  Description of Artificial Sequence: Synthetic oligonucleotide
uuagagucaccaccacaau

SEQ ID NO: 2873380 - RNA, 19 nt, Artificial Sequence
  Description of Artificial Sequence: Synthetic oligonucleotide
ucagggcuggccagcagga

SEQ ID NO: 2873381 - RNA, 19 nt, Artificial Sequence
  Description of Artificial Sequence: Synthetic oligonucleotide
auccucacaccuuguguug

SEQ ID NO: 2873382 - RNA, 19 nt, Artificial Sequence
  Description of Artificial Sequence: Synthetic oligonucleotide
cacauuucgauuuccuuua

SEQ ID NO: 2873383 - RNA, 19 nt, Artificial Sequence
  Description of Artificial Sequence: Synthetic oligonucleotide
acaaucccagagcucaaau

SEQ ID NO: 2873384 - RNA, 19 nt, Artificial Sequence
  Description of Artificial Sequence: Synthetic oligonucleotide
uuguuguugcuggugacau

SEQ ID NO: 2873385 - RNA, 19 nt, Artificial Sequence
  Description of Artificial Sequence: Synthetic oligonucleotide
aggauccucacaccuugug

SEQ ID NO: 2873386 - RNA, 19 nt, Artificial Sequence
  Description of Artificial Sequence: Synthetic oligonucleotide
cucaaacuuagagucacca

SEQ ID NO: 2873387 - RNA, 19 nt, Artificial Sequence
  Description of Artificial Sequence: Synthetic oligonucleotide
acucaaacuuagagucacc

SEQ ID NO: 2873388 - RNA, 19 nt, Artificial Sequence
  Description of Artificial Sequence: Synthetic oligonucleotide
ugacugucuuggaggaacu

SEQ ID NO: 2873389 - RNA, 19 nt, Artificial Sequence
  Description of Artificial Sequence: Synthetic oligonucleotide
uccacccggaccuccucgg

SEQ ID NO: 2873390 - RNA, 19 nt, Artificial Sequence
  Description of Artificial Sequence: Synthetic oligonucleotide
gggagacaaagccaggcug

SEQ ID NO: 2873391 - RNA, 19 nt, Artificial Sequence
  Description of Artificial Sequence: Synthetic oligonucleotide
uccuccagguucgagugca

SEQ ID NO: 2873392 - RNA, 19 nt, Artificial Sequence
  Description of Artificial Sequence: Synthetic oligonucleotide
ucuccucccggucucugcu

SEQ ID NO: 2873393 - RNA, 19 nt, Artificial Sequence
  Description of Artificial Sequence: Synthetic oligonucleotide
cuucaucagggcuggccag

SEQ ID NO: 2873394 - RNA, 19 nt, Artificial Sequence
  Description of Artificial Sequence: Synthetic oligonucleotide
aggaacugcugcuggacaa

SEQ ID NO: 2873395 - RNA, 19 nt, Artificial Sequence
  Description of Artificial Sequence: Synthetic oligonucleotide
ugagcaucuccucccgguc

SEQ ID NO: 2873396 - RNA, 19 nt, Artificial Sequence
  Description of Artificial Sequence: Synthetic oligonucleotide
cauccuucaucagggcugg

SEQ ID NO: 2873397 - RNA, 19 nt, Artificial Sequence
  Description of Artificial Sequence: Synthetic oligonucleotide
gucagcauugaagacgauc

SEQ ID NO: 2873398 - RNA, 19 nt, Artificial Sequence
  Description of Artificial Sequence: Synthetic oligonucleotide
agccugugccuuuuguugu

SEQ ID NO: 2873399 - RNA, 19 nt, Artificial Sequence
  Description of Artificial Sequence: Synthetic oligonucleotide
cugcugcuggacaaagcag

SEQ ID NO: 2873400 - RNA, 19 nt, Artificial Sequence
  Description of Artificial Sequence: Synthetic oligonucleotide
gcauugaagacgaucacca

SEQ ID NO: 2873401 - RNA, 19 nt, Artificial Sequence
  Description of Artificial Sequence: Synthetic oligonucleotide
uuccuuuagguggcuuggg

SEQ ID NO: 2873402 - RNA, 19 nt, Artificial Sequence
  Description of Artificial Sequence: Synthetic oligonucleotide
guuguugcuggugacaugu

SEQ ID NO: 2873403 - RNA, 19 nt, Artificial Sequence
  Description of Artificial Sequence: Synthetic oligonucleotide
aagccaggcugcccuuguc

SEQ ID NO: 2873404 - RNA, 19 nt, Artificial Sequence
  Description of Artificial Sequence: Synthetic oligonucleotide
cacaagcaugcagugacug

SEQ ID NO: 2873405 - RNA, 19 nt, Artificial Sequence
  Description of Artificial Sequence: Synthetic oligonucleotide
aauucacagccugugccuu

SEQ ID NO: 2873406 - RNA, 19 nt, Artificial Sequence
  Description of Artificial Sequence: Synthetic oligonucleotide
accacauuucgauuuccuu

SEQ ID NO: 2873407 - RNA, 19 nt, Artificial Sequence
  Description of Artificial Sequence: Synthetic oligonucleotide
cuuggaggaacugcugcug

SEQ ID NO: 2873408 - RNA, 19 nt, Artificial Sequence
  Description of Artificial Sequence: Synthetic oligonucleotide
caaagcaggaauaccacau

SEQ ID NO: 2873409 - RNA, 19 nt, Artificial Sequence
  Description of Artificial Sequence: Synthetic oligonucleotide
gauccucacaccuuguguu

SEQ ID NO: 2873410 - RNA, 19 nt, Artificial Sequence
  Description of Artificial Sequence: Synthetic oligonucleotide
caggaauaccacauuucga

SEQ ID NO: 2873411 - RNA, 19 nt, Artificial Sequence
  Description of Artificial Sequence: Synthetic oligonucleotide
caccaccacaaucccagag

SEQ ID NO: 2873412 - RNA, 19 nt, Artificial Sequence
  Description of Artificial Sequence: Synthetic oligonucleotide
ggguucucaaacucuagga

SEQ ID NO: 2873413 - RNA, 19 nt, Artificial Sequence
  Description of Artificial Sequence: Synthetic oligonucleotide
cugugccuuuuguuguugc

SEQ ID NO: 2873414 - RNA, 19 nt, Artificial Sequence
  Description of Artificial Sequence: Synthetic oligonucleotide
uggaggaacugcugcugga

SEQ ID NO: 2873415 - RNA, 19 nt, Artificial Sequence
  Description of Artificial Sequence: Synthetic oligonucleotide
gugaugaugagcaucuccu

SEQ ID NO: 2873416 - RNA, 19 nt, Artificial Sequence
  Description of Artificial Sequence: Synthetic oligonucleotide
guggcuugggaugucagca

SEQ ID NO: 2873417 - RNA, 19 nt, Artificial Sequence
  Description of Artificial Sequence: Synthetic oligonucleotide
gugccuuuuguuguugcug

SEQ ID NO: 2873418 - RNA, 19 nt, Artificial Sequence
  Description of Artificial Sequence: Synthetic oligonucleotide
uugggaugucagcauugaa

SEQ ID NO: 2873419 - RNA, 19 nt, Artificial Sequence
  Description of Artificial Sequence: Synthetic oligonucleotide
gugggccacaagcaugcag

SEQ ID NO: 2873420 - RNA, 19 nt, Artificial Sequence
  Description of Artificial Sequence: Synthetic oligonucleotide
ucuccgacaaggagcugau

SEQ ID NO: 2873421 - RNA, 19 nt, Artificial Sequence
  Description of Artificial Sequence: Synthetic oligonucleotide
acagccugugccuuuuguu

SEQ ID NO: 2873422 - RNA, 19 nt, Artificial Sequence
  Description of Artificial Sequence: Synthetic oligonucleotide
caggacucaaacuuagagu

SEQ ID NO: 2873423 - RNA, 19 nt, Artificial Sequence
  Description of Artificial Sequence: Synthetic oligonucleotide
aauuccacccggaccuccu

SEQ ID NO: 2873424 - RNA, 19 nt, Artificial Sequence
  Description of Artificial Sequence: Synthetic oligonucleotide
ggacacuaggugaugauga

SEQ ID NO: 2873425 - RNA, 19 nt, Artificial Sequence
  Description of Artificial Sequence: Synthetic oligonucleotide
agccaggcugcccuugucu

SEQ ID NO: 2873426 - RNA, 19 nt, Artificial Sequence
  Description of Artificial Sequence: Synthetic oligonucleotide
uuguugcuggugacaugug

SEQ ID NO: 2873427 - RNA, 19 nt, Artificial Sequence
  Description of Artificial Sequence: Synthetic oligonucleotide
ggggucuuccuccagguuc

SEQ ID NO: 2873428 - RNA, 19 nt, Artificial Sequence
  Description of Artificial Sequence: Synthetic oligonucleotide
caugagcauccuucaucag

SEQ ID NO: 2873429 - RNA, 19 nt, Artificial Sequence
  Description of Artificial Sequence: Synthetic oligonucleotide
ugcccuugucuccuccaga

SEQ ID NO: 2873430 - RNA, 19 nt, Artificial Sequence
  Description of Artificial Sequence: Synthetic oligonucleotide
auuccacccggaccuccuc

SEQ ID NO: 2873431 - RNA, 19 nt, Artificial Sequence
  Description of Artificial Sequence: Synthetic oligonucleotide
ucggggucuuccuccaggu

SEQ ID NO: 2873432 - RNA, 19 nt, Artificial Sequence
  Description of Artificial Sequence: Synthetic oligonucleotide
aucaccacuccaugagcau

SEQ ID NO: 2873433 - RNA, 19 nt, Artificial Sequence
  Description of Artificial Sequence: Synthetic oligonucleotide
gcauccuucaucagggcug

SEQ ID NO: 2873434 - RNA, 19 nt, Artificial Sequence
  Description of Artificial Sequence: Synthetic oligonucleotide
uccucccggucucugcucu

SEQ ID NO: 2873435 - RNA, 19 nt, Artificial Sequence
  Description of Artificial Sequence: Synthetic oligonucleotide
uuccuccagguucgagugc

SEQ ID NO: 2873436 - RNA, 19 nt, Artificial Sequence
  Description of Artificial Sequence: Synthetic oligonucleotide
ucacaccuuguguuggguu

SEQ ID NO: 2873437 - RNA, 19 nt, Artificial Sequence
  Description of Artificial Sequence: Synthetic oligonucleotide
ccaugagcauccuucauca

SEQ ID NO: 2873438 - RNA, 19 nt, Artificial Sequence
  Description of Artificial Sequence: Synthetic oligonucleotide
cagcauugaagacgaucac

SEQ ID NO: 2873439 - RNA, 19 nt, Artificial Sequence
  Description of Artificial Sequence: Synthetic oligonucleotide
guuuguggugggccacaag

SEQ ID NO: 2873440 - RNA, 19 nt, Artificial Sequence
  Description of Artificial Sequence: Synthetic oligonucleotide
gcuggugacauguggguuc

SEQ ID NO: 2873441 - RNA, 19 nt, Artificial Sequence
  Description of Artificial Sequence: Synthetic oligonucleotide
gagcauccuucaucagggc

SEQ ID NO: 2873442 - RNA, 19 nt, Artificial Sequence
  Description of Artificial Sequence: Synthetic oligonucleotide
uaggauccucacaccuugu

SEQ ID NO: 2873443 - RNA, 19 nt, Artificial Sequence
  Description of Artificial Sequence: Synthetic oligonucleotide
acuaggugaugaugagcau

SEQ ID NO: 2873444 - RNA, 19 nt, Artificial Sequence
  Description of Artificial Sequence: Synthetic oligonucleotide
aucccagagcucaaauuca

SEQ ID NO: 2873445 - RNA, 19 nt, Artificial Sequence
  Description of Artificial Sequence: Synthetic oligonucleotide
cagugacugucuuggagga

SEQ ID NO: 2873446 - RNA, 19 nt, Artificial Sequence
  Description of Artificial Sequence: Synthetic oligonucleotide
ucgagugcaccagcuucag

SEQ ID NO: 2873447 - RNA, 19 nt, Artificial Sequence
  Description of Artificial Sequence: Synthetic oligonucleotide
auguggguucucaaacucu

SEQ ID NO: 2873448 - RNA, 19 nt, Artificial Sequence
  Description of Artificial Sequence: Synthetic oligonucleotide
ugucuccuccagagcccgg

SEQ ID NO: 2873449 - RNA, 19 nt, Artificial Sequence
  Description of Artificial Sequence: Synthetic oligonucleotide
cagguucgagugcaccagc

SEQ ID NO: 2873450 - RNA, 19 nt, Artificial Sequence
  Description of Artificial Sequence: Synthetic oligonucleotide
cucuccgacaaggagcuga

SEQ ID NO: 2873451 - RNA, 19 nt, Artificial Sequence
  Description of Artificial Sequence: Synthetic oligonucleotide
gguggcuugggaugucagc

SEQ ID NO: 2873452 - RNA, 19 nt, Artificial Sequence
  Description of Artificial Sequence: Synthetic oligonucleotide
ggaugucagcauugaagac

SEQ ID NO: 2873453 - RNA, 19 nt, Artificial Sequence
  Description of Artificial Sequence: Synthetic oligonucleotide
cugucuuggaggaacugcu

SEQ ID NO: 2873454 - RNA, 19 nt, Artificial Sequence
  Description of Artificial Sequence: Synthetic oligonucleotide
guggugggccacaagcaug

SEQ ID NO: 2873455 - RNA, 19 nt, Artificial Sequence
  Description of Artificial Sequence: Synthetic oligonucleotide
gcugcacggggacacuagg

SEQ ID NO: 2873456 - RNA, 19 nt, Artificial Sequence
  Description of Artificial Sequence: Synthetic oligonucleotide
acccggaccuccucggggu

SEQ ID NO: 2873457 - RNA, 19 nt, Artificial Sequence
  Description of Artificial Sequence: Synthetic oligonucleotide
guggguucucaaacucuag

SEQ ID NO: 2873458 - RNA, 19 nt, Artificial Sequence
  Description of Artificial Sequence: Synthetic oligonucleotide
cucuaggauccucacaccu

SEQ ID NO: 2873459 - RNA, 19 nt, Artificial Sequence
  Description of Artificial Sequence: Synthetic oligonucleotide
gggacacuaggugaugaug

SEQ ID NO: 2873460 - RNA, 19 nt, Artificial Sequence
  Description of Artificial Sequence: Synthetic oligonucleotide
gucucugcucuccgacaag

SEQ ID NO: 2873461 - RNA, 19 nt, Artificial Sequence
  Description of Artificial Sequence: Synthetic oligonucleotide
gaggcggcugcacggggac

SEQ ID NO: 2873462 - RNA, 19 nt, Artificial Sequence
  Description of Artificial Sequence: Synthetic oligonucleotide
cuccagguucgagugcacc

SEQ ID NO: 2873463 - RNA, 19 nt, Artificial Sequence
  Description of Artificial Sequence: Synthetic oligonucleotide
gugacauguggguucucaa

SEQ ID NO: 2873464 - RNA, 19 nt, Artificial Sequence
  Description of Artificial Sequence: Synthetic oligonucleotide
cuugggaugucagcauuga

SEQ ID NO: 2873465 - RNA, 19 nt, Artificial Sequence
  Description of Artificial Sequence: Synthetic oligonucleotide
acaccuuguguuggguugu

SEQ ID NO: 2873466 - RNA, 19 nt, Artificial Sequence
  Description of Artificial Sequence: Synthetic oligonucleotide
ucaccaccacaaucccaga

SEQ ID NO: 2873467 - RNA, 19 nt, Artificial Sequence
  Description of Artificial Sequence: Synthetic oligonucleotide
gguucucaaacucuaggau

SEQ ID NO: 2873468 - RNA, 19 nt, Artificial Sequence
  Description of Artificial Sequence: Synthetic oligonucleotide
gagcccgguuugugguggg

SEQ ID NO: 2873469 - RNA, 19 nt, Artificial Sequence
  Description of Artificial Sequence: Synthetic oligonucleotide
auucacagccugugccuuu

SEQ ID NO: 2873470 - RNA, 19 nt, Artificial Sequence
  Description of Artificial Sequence: Synthetic oligonucleotide
agcaugcagugacugucuu

SEQ ID NO: 2873471 - RNA, 19 nt, Artificial Sequence
  Description of Artificial Sequence: Synthetic oligonucleotide
gcaugcagugacugucuug

SEQ ID NO: 2873472 - RNA, 19 nt, Artificial Sequence
  Description of Artificial Sequence: Synthetic oligonucleotide
ggugacauguggguucuca

SEQ ID NO: 2873473 - RNA, 19 nt, Artificial Sequence
  Description of Artificial Sequence: Synthetic oligonucleotide
caccacaaucccagagcuc

SEQ ID NO: 2873474 - RNA, 19 nt, Artificial Sequence
  Description of Artificial Sequence: Synthetic oligonucleotide
ugcuggugacauguggguu

SEQ ID NO: 2873475 - RNA, 19 nt, Artificial Sequence
  Description of Artificial Sequence: Synthetic oligonucleotide
aggugaugaugagcaucuc

SEQ ID NO: 2873476 - RNA, 19 nt, Artificial Sequence
  Description of Artificial Sequence: Synthetic oligonucleotide
gccagcaggacucaaacuu

SEQ ID NO: 2873477 - RNA, 19 nt, Artificial Sequence
  Description of Artificial Sequence: Synthetic oligonucleotide
agguucgagugcaccagcu

SEQ ID NO: 2873478 - RNA, 19 nt, Artificial Sequence
  Description of Artificial Sequence: Synthetic oligonucleotide
agcccgguuuguggugggc

SEQ ID NO: 2873479 - RNA, 19 nt, Artificial Sequence
  Description of Artificial Sequence: Synthetic oligonucleotide
gcuugggaugucagcauug

SEQ ID NO: 2873480 - RNA, 19 nt, Artificial Sequence
  Description of Artificial Sequence: Synthetic oligonucleotide
caaagccaggcugcccuug

SEQ ID NO: 2873481 - RNA, 19 nt, Artificial Sequence
  Description of Artificial Sequence: Synthetic oligonucleotide
gagcaucuccucccggucu

SEQ ID NO: 2873482 - RNA, 19 nt, Artificial Sequence
  Description of Artificial Sequence: Synthetic oligonucleotide
ggucucugcucuccgacaa

SEQ ID NO: 2873483 - RNA, 19 nt, Artificial Sequence
  Description of Artificial Sequence: Synthetic oligonucleotide
augcagugacugucuugga

SEQ ID NO: 2873484 - RNA, 19 nt, Artificial Sequence
  Description of Artificial Sequence: Synthetic oligonucleotide
gaccuccucggggucuucc

SEQ ID NO: 2873485 - RNA, 19 nt, Artificial Sequence
  Description of Artificial Sequence: Synthetic oligonucleotide
cucugcucuccgacaagga

SEQ ID NO: 2873486 - RNA, 19 nt, Artificial Sequence
  Description of Artificial Sequence: Synthetic oligonucleotide
gcacggggacacuagguga

SEQ ID NO: 2873487 - RNA, 19 nt, Artificial Sequence
  Description of Artificial Sequence: Synthetic oligonucleotide
agcaggacucaaacuuaga

SEQ ID NO: 2873488 - RNA, 19 nt, Artificial Sequence
  Description of Artificial Sequence: Synthetic oligonucleotide
ggauccucacaccuugugu

SEQ ID NO: 2873489 - RNA, 19 nt, Artificial Sequence
  Description of Artificial Sequence: Synthetic oligonucleotide
caucagggcuggccagcag

SEQ ID NO: 2873490 - RNA, 19 nt, Artificial Sequence
  Description of Artificial Sequence: Synthetic oligonucleotide
aggagcugaugaugcuuuu

SEQ ID NO: 2873491 - RNA, 19 nt, Artificial Sequence
  Description of Artificial Sequence: Synthetic oligonucleotide
agguggcuugggaugucag

SEQ ID NO: 2873492 - RNA, 19 nt, Artificial Sequence
  Description of Artificial Sequence: Synthetic oligonucleotide
ggacucaaacuuagaguca

SEQ ID NO: 2873493 - RNA, 19 nt, Artificial Sequence
  Description of Artificial Sequence: Synthetic oligonucleotide
uuagguggcuugggauguc

SEQ ID NO: 2873494 - RNA, 19 nt, Artificial Sequence
  Description of Artificial Sequence: Synthetic oligonucleotide
gucuuccuccagguucgag

SEQ ID NO: 2873495 - RNA, 19 nt, Artificial Sequence
  Description of Artificial Sequence: Synthetic oligonucleotide
ccagguucgagugcaccag

SEQ ID NO: 2873496 - RNA, 19 nt, Artificial Sequence
  Description of Artificial Sequence: Synthetic oligonucleotide
cuggccagcaggacucaaa

SEQ ID NO: 2873497 - RNA, 19 nt, Artificial Sequence
  Description of Artificial Sequence: Synthetic oligonucleotide
ugucagcauugaagacgau

SEQ ID NO: 2873498 - RNA, 19 nt, Artificial Sequence
  Description of Artificial Sequence: Synthetic oligonucleotide
cgaucaccacuccaugagc

SEQ ID NO: 2873499 - RNA, 19 nt, Artificial Sequence
  Description of Artificial Sequence: Synthetic oligonucleotide
cuccagagcccgguuugug

SEQ ID NO: 2873500 - RNA, 19 nt, Artificial Sequence
  Description of Artificial Sequence: Synthetic oligonucleotide
caaucccagagcucaaauu

SEQ ID NO: 2873501 - RNA, 19 nt, Artificial Sequence
  Description of Artificial Sequence: Synthetic oligonucleotide
agugacugucuuggaggaa

SEQ ID NO: 2873502 - RNA, 19 nt, Artificial Sequence
  Description of Artificial Sequence: Synthetic oligonucleotide
ccaggcugcccuugucucc

SEQ ID NO: 2873503 - RNA, 19 nt, Artificial Sequence
  Description of Artificial Sequence: Synthetic oligonucleotide
gagcucaaauucacagccu

SEQ ID NO: 2873504 - RNA, 19 nt, Artificial Sequence
  Description of Artificial Sequence: Synthetic oligonucleotide
caccagcuucagcuuguuc

SEQ ID NO: 2873505 - RNA, 19 nt, Artificial Sequence
  Description of Artificial Sequence: Synthetic oligonucleotide
auccuucaucagggcuggc

SEQ ID NO: 2873506 - RNA, 19 nt, Artificial Sequence
  Description of Artificial Sequence: Synthetic oligonucleotide
acggggacacuaggugaug

SEQ ID NO: 2873507 - RNA, 19 nt, Artificial Sequence
  Description of Artificial Sequence: Synthetic oligonucleotide
ggaauaccacauuucgauu

SEQ ID NO: 2873508 - RNA, 19 nt, Artificial Sequence
  Description of Artificial Sequence: Synthetic oligonucleotide
ccacauuucgauuuccuuu

SEQ ID NO: 2873509 - RNA, 19 nt, Artificial Sequence
  Description of Artificial Sequence: Synthetic oligonucleotide
cgacaaggagcugaugaug

SEQ ID NO: 2873510 - RNA, 19 nt, Artificial Sequence
  Description of Artificial Sequence: Synthetic oligonucleotide
cacaaucccagagcucaaa

SEQ ID NO: 2873511 - RNA, 19 nt, Artificial Sequence
  Description of Artificial Sequence: Synthetic oligonucleotide
gcuggacaaagcaggaaua

SEQ ID NO: 2873512 - RNA, 19 nt, Artificial Sequence
  Description of Artificial Sequence: Synthetic oligonucleotide
aggcugcccuugucuccuc

SEQ ID NO: 2873513 - RNA, 19 nt, Artificial Sequence
  Description of Artificial Sequence: Synthetic oligonucleotide
cacggggacacuaggugau

SEQ ID NO: 2873514 - RNA, 19 nt, Artificial Sequence
  Description of Artificial Sequence: Synthetic oligonucleotide
ggggagacaaagccaggcu

SEQ ID NO: 2873515 - RNA, 19 nt, Artificial Sequence
  Description of Artificial Sequence: Synthetic oligonucleotide
ccggucucugcucuccgac

SEQ ID NO: 2873516 - RNA, 19 nt, Artificial Sequence
  Description of Artificial Sequence: Synthetic oligonucleotide
ggcugcacggggacacuag

SEQ ID NO: 2873517 - RNA, 19 nt, Artificial Sequence
  Description of Artificial Sequence: Synthetic oligonucleotide
accuuguguuggguuguau

SEQ ID NO: 2873518 - RNA, 19 nt, Artificial Sequence
  Description of Artificial Sequence: Synthetic oligonucleotide
accacuccaugagcauccu

SEQ ID NO: 2873519 - RNA, 19 nt, Artificial Sequence
  Description of Artificial Sequence: Synthetic oligonucleotide
cugcacggggacacuaggu

SEQ ID NO: 2873520 - RNA, 19 nt, Artificial Sequence
  Description of Artificial Sequence: Synthetic oligonucleotide
cccuugucuccuccagagc

SEQ ID NO: 2873521 - RNA, 19 nt, Artificial Sequence
  Description of Artificial Sequence: Synthetic oligonucleotide
gggcuggccagcaggacuc

SEQ ID NO: 2873522 - RNA, 19 nt, Artificial Sequence
  Description of Artificial Sequence: Synthetic oligonucleotide
ggcugcccuugucuccucc

SEQ ID NO: 2873523 - RNA, 19 nt, Artificial Sequence
  Description of Artificial Sequence: Synthetic oligonucleotide
ccagcaggacucaaacuua

SEQ ID NO: 2873524 - RNA, 19 nt, Artificial Sequence
  Description of Artificial Sequence: Synthetic oligonucleotide
ggaacugcugcuggacaaa

SEQ ID NO: 2873525 - RNA, 19 nt, Artificial Sequence
  Description of Artificial Sequence: Synthetic oligonucleotide
ggcggcugcacggggacac

SEQ ID NO: 2873526 - RNA, 19 nt, Artificial Sequence
  Description of Artificial Sequence: Synthetic oligonucleotide
cccagagcucaaauucaca

SEQ ID NO: 2873527 - RNA, 19 nt, Artificial Sequence
  Description of Artificial Sequence: Synthetic oligonucleotide
ccuuuagguggcuugggau

SEQ ID NO: 2873528 - RNA, 19 nt, Artificial Sequence
  Description of Artificial Sequence: Synthetic oligonucleotide
cugcuggacaaagcaggaa

SEQ ID NO: 2873529 - RNA, 19 nt, Artificial Sequence
  Description of Artificial Sequence: Synthetic oligonucleotide
cacagccugugccuuuugu

SEQ ID NO: 2873530 - RNA, 19 nt, Artificial Sequence
  Description of Artificial Sequence: Synthetic oligonucleotide
gcugcccuugucuccucca

SEQ ID NO: 2873531 - RNA, 19 nt, Artificial Sequence
  Description of Artificial Sequence: Synthetic oligonucleotide
cuccgacaaggagcugaug

SEQ ID NO: 2873532 - RNA, 19 nt, Artificial Sequence
  Description of Artificial Sequence: Synthetic oligonucleotide
cuggugacauguggguucu

SEQ ID NO: 2873533 - RNA, 19 nt, Artificial Sequence
  Description of Artificial Sequence: Synthetic oligonucleotide
cagggcuggccagcaggac

SEQ ID NO: 2873534 - RNA, 19 nt, Artificial Sequence
  Description of Artificial Sequence: Synthetic oligonucleotide
ccugugccuuuuguuguug

SEQ ID NO: 2873535 - RNA, 19 nt, Artificial Sequence
  Description of Artificial Sequence: Synthetic oligonucleotide
ggccacaagcaugcaguga

SEQ ID NO: 2873536 - RNA, 19 nt, Artificial Sequence
  Description of Artificial Sequence: Synthetic oligonucleotide
gcucaaauucacagccugu

SEQ ID NO: 2873537 - RNA, 19 nt, Artificial Sequence
  Description of Artificial Sequence: Synthetic oligonucleotide
gucuccuccagagcccggu

SEQ ID NO: 2873538 - RNA, 19 nt, Artificial Sequence
  Description of Artificial Sequence: Synthetic oligonucleotide
ccacccggaccuccucggg

SEQ ID NO: 2873539 - RNA, 19 nt, Artificial Sequence
  Description of Artificial Sequence: Synthetic oligonucleotide
cccgguuuguggugggcca

SEQ ID NO: 2873540 - RNA, 19 nt, Artificial Sequence
  Description of Artificial Sequence: Synthetic oligonucleotide
ccuuguguuggguuguauu

SEQ ID NO: 2873541 - RNA, 19 nt, Artificial Sequence
  Description of Artificial Sequence: Synthetic oligonucleotide
ggccagcaggacucaaacu

SEQ ID NO: 2873542 - RNA, 19 nt, Artificial Sequence
  Description of Artificial Sequence: Synthetic oligonucleotide
caggcugcccuugucuccu

SEQ ID NO: 2873543 - RNA, 19 nt, Artificial Sequence
  Description of Artificial Sequence: Synthetic oligonucleotide
gguucgagugcaccagcuu

SEQ ID NO: 2873544 - RNA, 19 nt, Artificial Sequence
  Description of Artificial Sequence: Synthetic oligonucleotide
cuccaugagcauccuucau

SEQ ID NO: 2873545 - RNA, 19 nt, Artificial Sequence
  Description of Artificial Sequence: Synthetic oligonucleotide
gguuuguggugggccacaa

SEQ ID NO: 2873546 - RNA, 19 nt, Artificial Sequence
  Description of Artificial Sequence: Synthetic oligonucleotide
ggcuugggaugucagcauu

SEQ ID NO: 2873547 - RNA, 19 nt, Artificial Sequence
  Description of Artificial Sequence: Synthetic oligonucleotide
uggugacauguggguucuc

SEQ ID NO: 2873548 - RNA, 19 nt, Artificial Sequence
  Description of Artificial Sequence: Synthetic oligonucleotide
ggggacacuaggugaugau

SEQ ID NO: 2873549 - RNA, 19 nt, Artificial Sequence
  Description of Artificial Sequence: Synthetic oligonucleotide
cgagugcaccagcuucagc

SEQ ID NO: 2873550 - RNA, 19 nt, Artificial Sequence
  Description of Artificial Sequence: Synthetic oligonucleotide
ccuccagguucgagugcac

SEQ ID NO: 2873551 - RNA, 19 nt, Artificial Sequence
  Description of Artificial Sequence: Synthetic oligonucleotide
ccgacaaggagcugaugau

SEQ ID NO: 2873552 - RNA, 19 nt, Artificial Sequence
  Description of Artificial Sequence: Synthetic oligonucleotide
gccuuuuguuguugcuggu

SEQ ID NO: 2873553 - RNA, 19 nt, Artificial Sequence
  Description of Artificial Sequence: Synthetic oligonucleotide
ccgguuuguggugggccac

SEQ ID NO: 2873554 - RNA, 19 nt, Artificial Sequence
  Description of Artificial Sequence: Synthetic oligonucleotide
aggcggcugcacggggaca

SEQ ID NO: 2873555 - RNA, 19 nt, Artificial Sequence
  Description of Artificial Sequence: Synthetic oligonucleotide
ccacaaucccagagcucaa

SEQ ID NO: 2873556 - RNA, 19 nt, Artificial Sequence
  Description of Artificial Sequence: Synthetic oligonucleotide
ccacaagcaugcagugacu

SEQ ID NO: 2873557 - RNA, 19 nt, Artificial Sequence
  Description of Artificial Sequence: Synthetic oligonucleotide
caccuuguguuggguugua

SEQ ID NO: 2873558 - RNA, 19 nt, Artificial Sequence
  Description of Artificial Sequence: Synthetic oligonucleotide
ggugggccacaagcaugca

SEQ ID NO: 2873559 - RNA, 19 nt, Artificial Sequence
  Description of Artificial Sequence: Synthetic oligonucleotide
cggucucugcucuccgaca

SEQ ID NO: 2873560 - RNA, 19 nt, Artificial Sequence
  Description of Artificial Sequence: Synthetic oligonucleotide
cccggucucugcucuccga

SEQ ID NO: 2873561 - RNA, 19 nt, Artificial Sequence
  Description of Artificial Sequence: Synthetic oligonucleotide
gccugugccuuuuguuguu

SEQ ID NO: 2873562 - RNA, 19 nt, Artificial Sequence
  Description of Artificial Sequence: Synthetic oligonucleotide
cggggacacuaggugauga

SEQ ID NO: 2873563 - RNA, 19 nt, Artificial Sequence
  Description of Artificial Sequence: Synthetic oligonucleotide
cccggaccuccucgggguc

SEQ ID NO: 2873564 - RNA, 19 nt, Artificial Sequence
  Description of Artificial Sequence: Synthetic oligonucleotide
ggcuggccagcaggacuca

SEQ ID NO: 2873565 - RNA, 19 nt, Artificial Sequence
  Description of Artificial Sequence: Synthetic oligonucleotide
gcuggccagcaggacucaa

SEQ ID NO: 2873566 - RNA, 19 nt, Artificial Sequence
  Description of Artificial Sequence: Synthetic oligonucleotide
cgguuuguggugggccaca

SEQ ID NO: 2873567 - RNA, 19 nt, Artificial Sequence
  Description of Artificial Sequence: Synthetic oligonucleotide
ggaccuccucggggucuuc

SEQ ID NO: 2873568 - RNA, 19 nt, Artificial Sequence
  Description of Artificial Sequence: Synthetic oligonucleotide
ccuccagagcccgguuugu

SEQ ID NO: 2873569 - RNA, 19 nt, Artificial Sequence
  Description of Artificial Sequence: Synthetic oligonucleotide
gcaccagcuucagcuuguu

SEQ ID NO: 2873570 - RNA, 19 nt, Artificial Sequence
  Description of Artificial Sequence: Synthetic oligonucleotide
ccacuccaugagcauccuu

SEQ ID NO: 2873571 - RNA, 19 nt, Artificial Sequence
  Description of Artificial Sequence: Synthetic oligonucleotide
ccggaccuccucggggucu

SEQ ID NO: 2873572 - RNA, 19 nt, Artificial Sequence
  Description of Artificial Sequence: Synthetic oligonucleotide
cgauuuccuuuagguggcu

SEQ ID NO: 2873573 - RNA, 19 nt, Artificial Sequence
  Description of Artificial Sequence: Synthetic oligonucleotide
gcggcugcacggggacacu

SEQ ID NO: 2873574 - RNA, 19 nt, Artificial Sequence
  Description of Artificial Sequence: Synthetic oligonucleotide
cggcugcacggggacacua

SEQ ID NO: 2873575 - RNA, 19 nt, Artificial Sequence
  Description of Artificial Sequence: Synthetic oligonucleotide
cggggucuuccuccagguu

SEQ ID NO: 2873576 - RNA, 19 nt, Artificial Sequence
  Description of Artificial Sequence: Synthetic oligonucleotide
cggaccuccucggggucuu

SEQ ID NO: 2873577 - RNA, 19 nt, Artificial Sequence
  Description of Artificial Sequence: Synthetic oligonucleotide
acuuguaagguguagaagg

SEQ ID NO: 2873578 - RNA, 19 nt, Artificial Sequence
  Description of Artificial Sequence: Synthetic oligonucleotide
uggaauaaggaacauauug

SEQ ID NO: 2873579 - RNA, 19 nt, Artificial Sequence
  Description of Artificial Sequence: Synthetic oligonucleotide
gaagaaaaccuuuaggaag

SEQ ID NO: 2873580 - RNA, 19 nt, Artificial Sequence
  Description of Artificial Sequence: Synthetic oligonucleotide
auuucugugguauagauga

SEQ ID NO: 2873581 - RNA, 19 nt, Artificial Sequence
  Description of Artificial Sequence: Synthetic oligonucleotide
aacggugccauucaggagg

SEQ ID NO: 2873582 - RNA, 19 nt, Artificial Sequence
  Description of Artificial Sequence: Synthetic oligonucleotide
uguaagguguagaaggugg

SEQ ID NO: 2873583 - RNA, 19 nt, Artificial Sequence
  Description of Artificial Sequence: Synthetic oligonucleotide
aagaaaaccuuuaggaagc

SEQ ID NO: 2873584 - RNA, 19 nt, Artificial Sequence
  Description of Artificial Sequence: Synthetic oligonucleotide
caugcuuccauccacaucc

SEQ ID NO: 2873585 - RNA, 19 nt, Artificial Sequence
  Description of Artificial Sequence: Synthetic oligonucleotide
acuguugucacuuguaagg

SEQ ID NO: 2873586 - RNA, 19 nt, Artificial Sequence
  Description of Artificial Sequence: Synthetic oligonucleotide
ugaaucuucuuucucgugg

SEQ ID NO: 2873587 - RNA, 19 nt, Artificial Sequence
  Description of Artificial Sequence: Synthetic oligonucleotide
ucaugaaucuucuuucucg

SEQ ID NO: 2873588 - RNA, 19 nt, Artificial Sequence
  Description of Artificial Sequence: Synthetic oligonucleotide
auaaggaacauauugcucu

SEQ ID NO: 2873589 - RNA, 19 nt, Artificial Sequence
  Description of Artificial Sequence: Synthetic oligonucleotide
ugaauuuaugagcaauagg

SEQ ID NO: 2873590 - RNA, 19 nt, Artificial Sequence
  Description of Artificial Sequence: Synthetic oligonucleotide
aacauauugcucuggagug

SEQ ID NO: 2873591 - RNA, 19 nt, Artificial Sequence
  Description of Artificial Sequence: Synthetic oligonucleotide
uuuaugagcaauagguggc

SEQ ID NO: 2873592 - RNA, 19 nt, Artificial Sequence
  Description of Artificial Sequence: Synthetic oligonucleotide
agcuuuacaucauuugccc

SEQ ID NO: 2873593 - RNA, 19 nt, Artificial Sequence
  Description of Artificial Sequence: Synthetic oligonucleotide
aagcuuuacaucauuugcc

SEQ ID NO: 2873594 - RNA, 19 nt, Artificial Sequence
  Description of Artificial Sequence: Synthetic oligonucleotide
uuuguuuccguauuugucu

SEQ ID NO: 2873595 - RNA, 19 nt, Artificial Sequence
  Description of Artificial Sequence: Synthetic oligonucleotide
uugugguuugcccagauga

SEQ ID NO: 2873596 - RNA, 19 nt, Artificial Sequence
  Description of Artificial Sequence: Synthetic oligonucleotide
ucuucucccaccaagguac

SEQ ID NO: 2873597 - RNA, 19 nt, Artificial Sequence
  Description of Artificial Sequence: Synthetic oligonucleotide
uuugucuucucccaccaag

SEQ ID NO: 2873598 - RNA, 19 nt, Artificial Sequence
  Description of Artificial Sequence: Synthetic oligonucleotide
gaauuuaugagcaauaggu

SEQ ID NO: 2873599 - RNA, 19 nt, Artificial Sequence
  Description of Artificial Sequence: Synthetic oligonucleotide
acaucauuugcccugaaga

SEQ ID NO: 2873600 - RNA, 19 nt, Artificial Sequence
  Description of Artificial Sequence: Synthetic oligonucleotide
uggagugccacucacguug

SEQ ID NO: 2873601 - RNA, 19 nt, Artificial Sequence
  Description of Artificial Sequence: Synthetic oligonucleotide
aauaaggaacauauugcuc

SEQ ID NO: 2873602 - RNA, 19 nt, Artificial Sequence
  Description of Artificial Sequence: Synthetic oligonucleotide
uugcuuguuguccucauag

SEQ ID NO: 2873603 - RNA, 19 nt, Artificial Sequence
  Description of Artificial Sequence: Synthetic oligonucleotide
ugguauagaugacccaucg

SEQ ID NO: 2873604 - RNA, 19 nt, Artificial Sequence
  Description of Artificial Sequence: Synthetic oligonucleotide
ugaauuugugguuugccca

SEQ ID NO: 2873605 - RNA, 19 nt, Artificial Sequence
  Description of Artificial Sequence: Synthetic oligonucleotide
caagcuuuacaucauuugc

SEQ ID NO: 2873606 - RNA, 19 nt, Artificial Sequence
  Description of Artificial Sequence: Synthetic oligonucleotide
aaaauugcuuguuguccuc

SEQ ID NO: 2873607 - RNA, 19 nt, Artificial Sequence
  Description of Artificial Sequence: Synthetic oligonucleotide
uugaauuugugguuugccc

SEQ ID NO: 2873608 - RNA, 19 nt, Artificial Sequence
  Description of Artificial Sequence: Synthetic oligonucleotide
uauagaugacccaucggug

SEQ ID NO: 2873609 - RNA, 19 nt, Artificial Sequence
  Description of Artificial Sequence: Synthetic oligonucleotide
ugaagaaaaccuuuaggaa

SEQ ID NO: 2873610 - RNA, 19 nt, Artificial Sequence
  Description of Artificial Sequence: Synthetic oligonucleotide
aauuuaugagcaauaggug

SEQ ID NO: 2873611 - RNA, 19 nt, Artificial Sequence
  Description of Artificial Sequence: Synthetic oligonucleotide
uuuucuuuuccaugucccg

SEQ ID NO: 2873612 - RNA, 19 nt, Artificial Sequence
  Description of Artificial Sequence: Synthetic oligonucleotide
uuugccauucauuucugug

SEQ ID NO: 2873613 - RNA, 19 nt, Artificial Sequence
  Description of Artificial Sequence: Synthetic oligonucleotide
ucauuugcccugaagaaaa

SEQ ID NO: 2873614 - RNA, 19 nt, Artificial Sequence
  Description of Artificial Sequence: Synthetic oligonucleotide
aagguguagaaggugggac

SEQ ID NO: 2873615 - RNA, 19 nt, Artificial Sequence
  Description of Artificial Sequence: Synthetic oligonucleotide
acucacguugaauuugugg

SEQ ID NO: 2873616 - RNA, 19 nt, Artificial Sequence
  Description of Artificial Sequence: Synthetic oligonucleotide
cuuuacaucauuugcccug

SEQ ID NO: 2873617 - RNA, 19 nt, Artificial Sequence
  Description of Artificial Sequence: Synthetic oligonucleotide
uuuaggaagccccgcaggc

SEQ ID NO: 2873618 - RNA, 19 nt, Artificial Sequence
  Description of Artificial Sequence: Synthetic oligonucleotide
agguguagaaggugggacc

SEQ ID NO: 2873619 - RNA, 19 nt, Artificial Sequence
  Description of Artificial Sequence: Synthetic oligonucleotide
cauucaugaaucuucuuuc

SEQ ID NO: 2873620 - RNA, 19 nt, Artificial Sequence
  Description of Artificial Sequence: Synthetic oligonucleotide
aacuccauuuucuuuucca

SEQ ID NO: 2873621 - RNA, 19 nt, Artificial Sequence
  Description of Artificial Sequence: Synthetic oligonucleotide
gaauuugugguuugcccag

SEQ ID NO: 2873622 - RNA, 19 nt, Artificial Sequence
  Description of Artificial Sequence: Synthetic oligonucleotide
caugcagugaagccaacgg

SEQ ID NO: 2873623 - RNA, 19 nt, Artificial Sequence
  Description of Artificial Sequence: Synthetic oligonucleotide
aagguaccaagcuuuacau

SEQ ID NO: 2873624 - RNA, 19 nt, Artificial Sequence
  Description of Artificial Sequence: Synthetic oligonucleotide
uaggaagccccgcaggccg

SEQ ID NO: 2873625 - RNA, 19 nt, Artificial Sequence
  Description of Artificial Sequence: Synthetic oligonucleotide
guggcuuuguuguuggagg

SEQ ID NO: 2873626 - RNA, 19 nt, Artificial Sequence
  Description of Artificial Sequence: Synthetic oligonucleotide
ucgugguggaauaaggaac

SEQ ID NO: 2873627 - RNA, 19 nt, Artificial Sequence
  Description of Artificial Sequence: Synthetic oligonucleotide
uauuuguuuccguauuugu

SEQ ID NO: 2873628 - RNA, 19 nt, Artificial Sequence
  Description of Artificial Sequence: Synthetic oligonucleotide
ucaggaggcaccaugcuuc

SEQ ID NO: 2873629 - RNA, 19 nt, Artificial Sequence
  Description of Artificial Sequence: Synthetic oligonucleotide
gguaccaagcuuuacauca

SEQ ID NO: 2873630 - RNA, 19 nt, Artificial Sequence
  Description of Artificial Sequence: Synthetic oligonucleotide
gaauaaggaacauauugcu

SEQ ID NO: 2873631 - RNA, 19 nt, Artificial Sequence
  Description of Artificial Sequence: Synthetic oligonucleotide
uccguauuugucuucuccc

SEQ ID NO: 2873632 - RNA, 19 nt, Artificial Sequence
  Description of Artificial Sequence: Synthetic oligonucleotide
augaauuuaugagcaauag

SEQ ID NO: 2873633 - RNA, 19 nt, Artificial Sequence
  Description of Artificial Sequence: Synthetic oligonucleotide
ucuggagugccacucacgu

SEQ ID NO: 2873634 - RNA, 19 nt, Artificial Sequence
  Description of Artificial Sequence: Synthetic oligonucleotide
gaacauauugcucuggagu

SEQ ID NO: 2873635 - RNA, 19 nt, Artificial Sequence
  Description of Artificial Sequence: Synthetic oligonucleotide
agggucgucagucaugcag

SEQ ID NO: 2873636 - RNA, 19 nt, Artificial Sequence
  Description of Artificial Sequence: Synthetic oligonucleotide
auagaugacccaucgguga

SEQ ID NO: 2873637 - RNA, 19 nt, Artificial Sequence
  Description of Artificial Sequence: Synthetic oligonucleotide
uauuugucuucucccacca

SEQ ID NO: 2873638 - RNA, 19 nt, Artificial Sequence
  Description of Artificial Sequence: Synthetic oligonucleotide
auuuguuuccguauuuguc

SEQ ID NO: 2873639 - RNA, 19 nt, Artificial Sequence
  Description of Artificial Sequence: Synthetic oligonucleotide
ucagucaugcagugaagcc

SEQ ID NO: 2873640 - RNA, 19 nt, Artificial Sequence
  Description of Artificial Sequence: Synthetic oligonucleotide
ggaauaaggaacauauugc

SEQ ID NO: 2873641 - RNA, 19 nt, Artificial Sequence
  Description of Artificial Sequence: Synthetic oligonucleotide
uacaucauuugcccugaag

SEQ ID NO: 2873642 - RNA, 19 nt, Artificial Sequence
  Description of Artificial Sequence: Synthetic oligonucleotide
auuugcccugaagaaaacc

SEQ ID NO: 2873643 - RNA, 19 nt, Artificial Sequence
  Description of Artificial Sequence: Synthetic oligonucleotide
ucgucagucaugcagugaa

SEQ ID NO: 2873644 - RNA, 19 nt, Artificial Sequence
  Description of Artificial Sequence: Synthetic oligonucleotide
ugcagcaacuccauuuucu

SEQ ID NO: 2873645 - RNA, 19 nt, Artificial Sequence
  Description of Artificial Sequence: Synthetic oligonucleotide
uucuuuuccaugucccgcc

SEQ ID NO: 2873646 - RNA, 19 nt, Artificial Sequence
  Description of Artificial Sequence: Synthetic oligonucleotide
cauucaggaggcaccaugc

SEQ ID NO: 2873647 - RNA, 19 nt, Artificial Sequence
  Description of Artificial Sequence: Synthetic oligonucleotide
auaguauuuguuuccguau

SEQ ID NO: 2873648 - RNA, 19 nt, Artificial Sequence
  Description of Artificial Sequence: Synthetic oligonucleotide
auucauuucugugguauag

SEQ ID NO: 2873649 - RNA, 19 nt, Artificial Sequence
  Description of Artificial Sequence: Synthetic oligonucleotide
aaaccuuuaggaagccccg

SEQ ID NO: 2873650 - RNA, 19 nt, Artificial Sequence
  Description of Artificial Sequence: Synthetic oligonucleotide
uccucauaguauuuguuuc

SEQ ID NO: 2873651 - RNA, 19 nt, Artificial Sequence
  Description of Artificial Sequence: Synthetic oligonucleotide
ugugguauagaugacccau

SEQ ID NO: 2873652 - RNA, 19 nt, Artificial Sequence
  Description of Artificial Sequence: Synthetic oligonucleotide
ugcccagaugaauuuauga

SEQ ID NO: 2873653 - RNA, 19 nt, Artificial Sequence
  Description of Artificial Sequence: Synthetic oligonucleotide
guauagaugacccaucggu

SEQ ID NO: 2873654 - RNA, 19 nt, Artificial Sequence
  Description of Artificial Sequence: Synthetic oligonucleotide
cuuuaggaagccccgcagg

SEQ ID NO: 2873655 - RNA, 19 nt, Artificial Sequence
  Description of Artificial Sequence: Synthetic oligonucleotide
agcaacuccauuuucuuuu

SEQ ID NO: 2873656 - RNA, 19 nt, Artificial Sequence
  Description of Artificial Sequence: Synthetic oligonucleotide
ucuucuuucucguggugga

SEQ ID NO: 2873657 - RNA, 19 nt, Artificial Sequence
  Description of Artificial Sequence: Synthetic oligonucleotide
uaaggaacauauugcucug

SEQ ID NO: 2873658 - RNA, 19 nt, Artificial Sequence
  Description of Artificial Sequence: Synthetic oligonucleotide
uuucuuuuccaugucccgc

SEQ ID NO: 2873659 - RNA, 19 nt, Artificial Sequence
  Description of Artificial Sequence: Synthetic oligonucleotide
ucacuuguaagguguagaa

SEQ ID NO: 2873660 - RNA, 19 nt, Artificial Sequence
  Description of Artificial Sequence: Synthetic oligonucleotide
ucauuucugugguauagau

SEQ ID NO: 2873661 - RNA, 19 nt, Artificial Sequence
  Description of Artificial Sequence: Synthetic oligonucleotide
acauauugcucuggagugc

SEQ ID NO: 2873662 - RNA, 19 nt, Artificial Sequence
  Description of Artificial Sequence: Synthetic oligonucleotide
cucauaguauuuguuuccg

SEQ ID NO: 2873663 - RNA, 19 nt, Artificial Sequence
  Description of Artificial Sequence: Synthetic oligonucleotide
guauuugucuucucccacc

SEQ ID NO: 2873664 - RNA, 19 nt, Artificial Sequence
  Description of Artificial Sequence: Synthetic oligonucleotide
aacugucuuccacuguugu

SEQ ID NO: 2873665 - RNA, 19 nt, Artificial Sequence
  Description of Artificial Sequence: Synthetic oligonucleotide
uggcuuuguuguuggaggg

SEQ ID NO: 2873666 - RNA, 19 nt, Artificial Sequence
  Description of Artificial Sequence: Synthetic oligonucleotide
augugcuagaacugucuuc

SEQ ID NO: 2873667 - RNA, 19 nt, Artificial Sequence
  Description of Artificial Sequence: Synthetic oligonucleotide
uagaaggugggacccauuc

SEQ ID NO: 2873668 - RNA, 19 nt, Artificial Sequence
  Description of Artificial Sequence: Synthetic oligonucleotide
ugccauucauuucuguggu

SEQ ID NO: 2873669 - RNA, 19 nt, Artificial Sequence
  Description of Artificial Sequence: Synthetic oligonucleotide
ugacccaucggugacggcc

SEQ ID NO: 2873670 - RNA, 19 nt, Artificial Sequence
  Description of Artificial Sequence: Synthetic oligonucleotide
cuagaacugucuuccacug

SEQ ID NO: 2873671 - RNA, 19 nt, Artificial Sequence
  Description of Artificial Sequence: Synthetic oligonucleotide
agaacugucuuccacuguu

SEQ ID NO: 2873672 - RNA, 19 nt, Artificial Sequence
  Description of Artificial Sequence: Synthetic oligonucleotide
uagguggcuuuguuguugg

SEQ ID NO: 2873673 - RNA, 19 nt, Artificial Sequence
  Description of Artificial Sequence: Synthetic oligonucleotide
aaccuuuaggaagccccgc

SEQ ID NO: 2873674 - RNA, 19 nt, Artificial Sequence
  Description of Artificial Sequence: Synthetic oligonucleotide
uguugucacuuguaaggug

SEQ ID NO: 2873675 - RNA, 19 nt, Artificial Sequence
  Description of Artificial Sequence: Synthetic oligonucleotide
ucaugcagugaagccaacg

SEQ ID NO: 2873676 - RNA, 19 nt, Artificial Sequence
  Description of Artificial Sequence: Synthetic oligonucleotide
uuugcccagaugaauuuau

SEQ ID NO: 2873677 - RNA, 19 nt, Artificial Sequence
  Description of Artificial Sequence: Synthetic oligonucleotide
cauuucugugguauagaug

SEQ ID NO: 2873678 - RNA, 19 nt, Artificial Sequence
  Description of Artificial Sequence: Synthetic oligonucleotide
aaggaacauauugcucugg

SEQ ID NO: 2873679 - RNA, 19 nt, Artificial Sequence
  Description of Artificial Sequence: Synthetic oligonucleotide
cuuuguuguuggagggucg

SEQ ID NO: 2873680 - RNA, 19 nt, Artificial Sequence
  Description of Artificial Sequence: Synthetic oligonucleotide
uuuacaucauuugcccuga

SEQ ID NO: 2873681 - RNA, 19 nt, Artificial Sequence
  Description of Artificial Sequence: Synthetic oligonucleotide
gaugacccaucggugacgg

SEQ ID NO: 2873682 - RNA, 19 nt, Artificial Sequence
  Description of Artificial Sequence: Synthetic oligonucleotide
ugcuagaacugucuuccac

SEQ ID NO: 2873683 - RNA, 19 nt, Artificial Sequence
  Description of Artificial Sequence: Synthetic oligonucleotide
agaaaaccuuuaggaagcc

SEQ ID NO: 2873684 - RNA, 19 nt, Artificial Sequence
  Description of Artificial Sequence: Synthetic oligonucleotide
uguuguuggagggucguca

SEQ ID NO: 2873685 - RNA, 19 nt, Artificial Sequence
  Description of Artificial Sequence: Synthetic oligonucleotide
ccugaagaaaaccuuuagg

SEQ ID NO: 2873686 - RNA, 19 nt, Artificial Sequence
  Description of Artificial Sequence: Synthetic oligonucleotide
aggcaccaugcuuccaucc

SEQ ID NO: 2873687 - RNA, 19 nt, Artificial Sequence
  Description of Artificial Sequence: Synthetic oligonucleotide
ugagcaauagguggcuuug

SEQ ID NO: 2873688 - RNA, 19 nt, Artificial Sequence
  Description of Artificial Sequence: Synthetic oligonucleotide
cccagaugaauuuaugagc

SEQ ID NO: 2873689 - RNA, 19 nt, Artificial Sequence
  Description of Artificial Sequence: Synthetic oligonucleotide
cauauugcucuggagugcc

SEQ ID NO: 2873690 - RNA, 19 nt, Artificial Sequence
  Description of Artificial Sequence: Synthetic oligonucleotide
uuugugguuugcccagaug

SEQ ID NO: 2873691 - RNA, 19 nt, Artificial Sequence
  Description of Artificial Sequence: Synthetic oligonucleotide
uaguauuuguuuccguauu

SEQ ID NO: 2873692 - RNA, 19 nt, Artificial Sequence
  Description of Artificial Sequence: Synthetic oligonucleotide
agaugaauuuaugagcaau

SEQ ID NO: 2873693 - RNA, 19 nt, Artificial Sequence
  Description of Artificial Sequence: Synthetic oligonucleotide
aggaacauauugcucugga

SEQ ID NO: 2873694 - RNA, 19 nt, Artificial Sequence
  Description of Artificial Sequence: Synthetic oligonucleotide
agguaccaagcuuuacauc

SEQ ID NO: 2873695 - RNA, 19 nt, Artificial Sequence
  Description of Artificial Sequence: Synthetic oligonucleotide
uuucucgugguggaauaag

SEQ ID NO: 2873696 - RNA, 19 nt, Artificial Sequence
  Description of Artificial Sequence: Synthetic oligonucleotide
caagguaccaagcuuuaca

SEQ ID NO: 2873697 - RNA, 19 nt, Artificial Sequence
  Description of Artificial Sequence: Synthetic oligonucleotide
aguauuuguuuccguauuu

SEQ ID NO: 2873698 - RNA, 19 nt, Artificial Sequence
  Description of Artificial Sequence: Synthetic oligonucleotide
uuguccucauaguauuugu

SEQ ID NO: 2873699 - RNA, 19 nt, Artificial Sequence
  Description of Artificial Sequence: Synthetic oligonucleotide
guauuuguuuccguauuug

SEQ ID NO: 2873700 - RNA, 19 nt, Artificial Sequence
  Description of Artificial Sequence: Synthetic oligonucleotide
cacuguugucacuuguaag

SEQ ID NO: 2873701 - RNA, 19 nt, Artificial Sequence
  Description of Artificial Sequence: Synthetic oligonucleotide
aaauugcuuguuguccuca

SEQ ID NO: 2873702 - RNA, 19 nt, Artificial Sequence
  Description of Artificial Sequence: Synthetic oligonucleotide
cucacguugaauuuguggu

SEQ ID NO: 2873703 - RNA, 19 nt, Artificial Sequence
  Description of Artificial Sequence: Synthetic oligonucleotide
uuguuguccucauaguauu

SEQ ID NO: 2873704 - RNA, 19 nt, Artificial Sequence
  Description of Artificial Sequence: Synthetic oligonucleotide
gacccauucaugaaucuuc

SEQ ID NO: 2873705 - RNA, 19 nt, Artificial Sequence
  Description of Artificial Sequence: Synthetic oligonucleotide
gcccagaugaauuuaugag

SEQ ID NO: 2873706 - RNA, 19 nt, Artificial Sequence
  Description of Artificial Sequence: Synthetic oligonucleotide
cauaguauuuguuuccgua

SEQ ID NO: 2873707 - RNA, 19 nt, Artificial Sequence
  Description of Artificial Sequence: Synthetic oligonucleotide
guaagguguagaagguggg

SEQ ID NO: 2873708 - RNA, 19 nt, Artificial Sequence
  Description of Artificial Sequence: Synthetic oligonucleotide
gaugaauuuaugagcaaua

SEQ ID NO: 2873709 - RNA, 19 nt, Artificial Sequence
  Description of Artificial Sequence: Synthetic oligonucleotide
ugguuugcccagaugaauu

SEQ ID NO: 2873710 - RNA, 19 nt, Artificial Sequence
  Description of Artificial Sequence: Synthetic oligonucleotide
ucauaguauuuguuuccgu

SEQ ID NO: 2873711 - RNA, 19 nt, Artificial Sequence
  Description of Artificial Sequence: Synthetic oligonucleotide
aauugcuuguuguccucau

SEQ ID NO: 2873712 - RNA, 19 nt, Artificial Sequence
  Description of Artificial Sequence: Synthetic oligonucleotide
uuguaagguguagaaggug

SEQ ID NO: 2873713 - RNA, 19 nt, Artificial Sequence
  Description of Artificial Sequence: Synthetic oligonucleotide
ugugguuugcccagaugaa

SEQ ID NO: 2873714 - RNA, 19 nt, Artificial Sequence
  Description of Artificial Sequence: Synthetic oligonucleotide
guuguuggagggucgucag

SEQ ID NO: 2873715 - RNA, 19 nt, Artificial Sequence
  Description of Artificial Sequence: Synthetic oligonucleotide
uguuggagggucgucaguc

SEQ ID NO: 2873716 - RNA, 19 nt, Artificial Sequence
  Description of Artificial Sequence: Synthetic oligonucleotide
ugucuucucccaccaaggu

SEQ ID NO: 2873717 - RNA, 19 nt, Artificial Sequence
  Description of Artificial Sequence: Synthetic oligonucleotide
gaagccaacggugccauuc

SEQ ID NO: 2873718 - RNA, 19 nt, Artificial Sequence
  Description of Artificial Sequence: Synthetic oligonucleotide
uucauuucugugguauaga

SEQ ID NO: 2873719 - RNA, 19 nt, Artificial Sequence
  Description of Artificial Sequence: Synthetic oligonucleotide
gguauagaugacccaucgg

SEQ ID NO: 2873720 - RNA, 19 nt, Artificial Sequence
  Description of Artificial Sequence: Synthetic oligonucleotide
ccauccacaucccagaaug

SEQ ID NO: 2873721 - RNA, 19 nt, Artificial Sequence
  Description of Artificial Sequence: Synthetic oligonucleotide
aggugggacccauucauga

SEQ ID NO: 2873722 - RNA, 19 nt, Artificial Sequence
  Description of Artificial Sequence: Synthetic oligonucleotide
uuaugagcaauagguggcu

SEQ ID NO: 2873723 - RNA, 19 nt, Artificial Sequence
  Description of Artificial Sequence: Synthetic oligonucleotide
caauagguggcuuuguugu

SEQ ID NO: 2873724 - RNA, 19 nt, Artificial Sequence
  Description of Artificial Sequence: Synthetic oligonucleotide
gucagucaugcagugaagc

SEQ ID NO: 2873725 - RNA, 19 nt, Artificial Sequence
  Description of Artificial Sequence: Synthetic oligonucleotide
ucuuccacuguugucacuu

SEQ ID NO: 2873726 - RNA, 19 nt, Artificial Sequence
  Description of Artificial Sequence: Synthetic oligonucleotide
ugggacccauucaugaauc

SEQ ID NO: 2873727 - RNA, 19 nt, Artificial Sequence
  Description of Artificial Sequence: Synthetic oligonucleotide
aagccaacggugccauuca

SEQ ID NO: 2873728 - RNA, 19 nt, Artificial Sequence
  Description of Artificial Sequence: Synthetic oligonucleotide
guuguccucauaguauuug

SEQ ID NO: 2873729 - RNA, 19 nt, Artificial Sequence
  Description of Artificial Sequence: Synthetic oligonucleotide
ccagaugaauuuaugagca

SEQ ID NO: 2873730 - RNA, 19 nt, Artificial Sequence
  Description of Artificial Sequence: Synthetic oligonucleotide
aauagguggcuuuguuguu

SEQ ID NO: 2873731 - RNA, 19 nt, Artificial Sequence
  Description of Artificial Sequence: Synthetic oligonucleotide
uuuugccauucauuucugu

SEQ ID NO: 2873732 - RNA, 19 nt, Artificial Sequence
  Description of Artificial Sequence: Synthetic oligonucleotide
uugcccagaugaauuuaug

SEQ ID NO: 2873733 - RNA, 19 nt, Artificial Sequence
  Description of Artificial Sequence: Synthetic oligonucleotide
augaaucuucuuucucgug

SEQ ID NO: 2873734 - RNA, 19 nt, Artificial Sequence
  Description of Artificial Sequence: Synthetic oligonucleotide
auagguggcuuuguuguug

SEQ ID NO: 2873735 - RNA, 19 nt, Artificial Sequence
  Description of Artificial Sequence: Synthetic oligonucleotide
uaagguguagaagguggga

SEQ ID NO: 2873736 - RNA, 19 nt, Artificial Sequence
  Description of Artificial Sequence: Synthetic oligonucleotide
ugcaguccgcgccucagga

SEQ ID NO: 2873737 - RNA, 19 nt, Artificial Sequence
  Description of Artificial Sequence: Synthetic oligonucleotide
uucaggaggcaccaugcuu

SEQ ID NO: 2873738 - RNA, 19 nt, Artificial Sequence
  Description of Artificial Sequence: Synthetic oligonucleotide
accugcagcaacuccauuu

SEQ ID NO: 2873739 - RNA, 19 nt, Artificial Sequence
  Description of Artificial Sequence: Synthetic oligonucleotide
ggaacauauugcucuggag

SEQ ID NO: 2873740 - RNA, 19 nt, Artificial Sequence
  Description of Artificial Sequence: Synthetic oligonucleotide
uuuguuguuggagggucgu

SEQ ID NO: 2873741 - RNA, 19 nt, Artificial Sequence
  Description of Artificial Sequence: Synthetic oligonucleotide
ggugaccuggugcaguccg

SEQ ID NO: 2873742 - RNA, 19 nt, Artificial Sequence
  Description of Artificial Sequence: Synthetic oligonucleotide
ccucauaguauuuguuucc

SEQ ID NO: 2873743 - RNA, 19 nt, Artificial Sequence
  Description of Artificial Sequence: Synthetic oligonucleotide
caguccgcgccucaggacc

SEQ ID NO: 2873744 - RNA, 19 nt, Artificial Sequence
  Description of Artificial Sequence: Synthetic oligonucleotide
ugucacuuguaagguguag

SEQ ID NO: 2873745 - RNA, 19 nt, Artificial Sequence
  Description of Artificial Sequence: Synthetic oligonucleotide
gcaauagguggcuuuguug

SEQ ID NO: 2873746 - RNA, 19 nt, Artificial Sequence
  Description of Artificial Sequence: Synthetic oligonucleotide
caucauuugcccugaagaa

SEQ ID NO: 2873747 - RNA, 19 nt, Artificial Sequence
  Description of Artificial Sequence: Synthetic oligonucleotide
uccacuguugucacuugua

SEQ ID NO: 2873748 - RNA, 19 nt, Artificial Sequence
  Description of Artificial Sequence: Synthetic oligonucleotide
uguccucauaguauuuguu

SEQ ID NO: 2873749 - RNA, 19 nt, Artificial Sequence
  Description of Artificial Sequence: Synthetic oligonucleotide
agaaggugggacccauuca

SEQ ID NO: 2873750 - RNA, 19 nt, Artificial Sequence
  Description of Artificial Sequence: Synthetic oligonucleotide
uuaggaagccccgcaggcc

SEQ ID NO: 2873751 - RNA, 19 nt, Artificial Sequence
  Description of Artificial Sequence: Synthetic oligonucleotide
ugcaugugcuagaacuguc

SEQ ID NO: 2873752 - RNA, 19 nt, Artificial Sequence
  Description of Artificial Sequence: Synthetic oligonucleotide
uuccacuguugucacuugu

SEQ ID NO: 2873753 - RNA, 19 nt, Artificial Sequence
  Description of Artificial Sequence: Synthetic oligonucleotide
ugaccuggugcaguccgcg

SEQ ID NO: 2873754 - RNA, 19 nt, Artificial Sequence
  Description of Artificial Sequence: Synthetic oligonucleotide
uauugcucuggagugccac

SEQ ID NO: 2873755 - RNA, 19 nt, Artificial Sequence
  Description of Artificial Sequence: Synthetic oligonucleotide
ucuuucucgugguggaaua

SEQ ID NO: 2873756 - RNA, 19 nt, Artificial Sequence
  Description of Artificial Sequence: Synthetic oligonucleotide
ucacguugaauuugugguu

SEQ ID NO: 2873757 - RNA, 19 nt, Artificial Sequence
  Description of Artificial Sequence: Synthetic oligonucleotide
uggagggucgucagucaug

SEQ ID NO: 2873758 - RNA, 19 nt, Artificial Sequence
  Description of Artificial Sequence: Synthetic oligonucleotide
ugcuuguuguccucauagu

SEQ ID NO: 2873759 - RNA, 19 nt, Artificial Sequence
  Description of Artificial Sequence: Synthetic oligonucleotide
cucuggagugccacucacg

SEQ ID NO: 2873760 - RNA, 19 nt, Artificial Sequence
  Description of Artificial Sequence: Synthetic oligonucleotide
uuucugugguauagaugac

SEQ ID NO: 2873761 - RNA, 19 nt, Artificial Sequence
  Description of Artificial Sequence: Synthetic oligonucleotide
auccacaucccagaaugug

SEQ ID NO: 2873762 - RNA, 19 nt, Artificial Sequence
  Description of Artificial Sequence: Synthetic oligonucleotide
accuuuaggaagccccgca

SEQ ID NO: 2873763 - RNA, 19 nt, Artificial Sequence
  Description of Artificial Sequence: Synthetic oligonucleotide
cacuuguaagguguagaag

SEQ ID NO: 2873764 - RNA, 19 nt, Artificial Sequence
  Description of Artificial Sequence: Synthetic oligonucleotide
cuuccauccacaucccaga

SEQ ID NO: 2873765 - RNA, 19 nt, Artificial Sequence
  Description of Artificial Sequence: Synthetic oligonucleotide
uagaacugucuuccacugu

SEQ ID NO: 2873766 - RNA, 19 nt, Artificial Sequence
  Description of Artificial Sequence: Synthetic oligonucleotide
gaaggugggacccauucau

SEQ ID NO: 2873767 - RNA, 19 nt, Artificial Sequence
  Description of Artificial Sequence: Synthetic oligonucleotide
uuguuuccguauuugucuu

SEQ ID NO: 2873768 - RNA, 19 nt, Artificial Sequence
  Description of Artificial Sequence: Synthetic oligonucleotide
uggccggugaccuggugca

SEQ ID NO: 2873769 - RNA, 19 nt, Artificial Sequence
  Description of Artificial Sequence: Synthetic oligonucleotide
gguggaauaaggaacauau

SEQ ID NO: 2873770 - RNA, 19 nt, Artificial Sequence
  Description of Artificial Sequence: Synthetic oligonucleotide
ccaagcuuuacaucauuug

SEQ ID NO: 2873771 - RNA, 19 nt, Artificial Sequence
  Description of Artificial Sequence: Synthetic oligonucleotide
auucaggaggcaccaugcu

SEQ ID NO: 2873772 - RNA, 19 nt, Artificial Sequence
  Description of Artificial Sequence: Synthetic oligonucleotide
guugucacuuguaaggugu

SEQ ID NO: 2873773 - RNA, 19 nt, Artificial Sequence
  Description of Artificial Sequence: Synthetic oligonucleotide
aauuugugguuugcccaga

SEQ ID NO: 2873774 - RNA, 19 nt, Artificial Sequence
  Description of Artificial Sequence: Synthetic oligonucleotide
ucccaccaagguaccaagc

SEQ ID NO: 2873775 - RNA, 19 nt, Artificial Sequence
  Description of Artificial Sequence: Synthetic oligonucleotide
augagcaauagguggcuuu

SEQ ID NO: 2873776 - RNA, 19 nt, Artificial Sequence
  Description of Artificial Sequence: Synthetic oligonucleotide
agaugacccaucggugacg

SEQ ID NO: 2873777 - RNA, 19 nt, Artificial Sequence
  Description of Artificial Sequence: Synthetic oligonucleotide
cuuguuguccucauaguau

SEQ ID NO: 2873778 - RNA, 19 nt, Artificial Sequence
  Description of Artificial Sequence: Synthetic oligonucleotide
acguugaauuugugguuug

SEQ ID NO: 2873779 - RNA, 19 nt, Artificial Sequence
  Description of Artificial Sequence: Synthetic oligonucleotide
uguuguccucauaguauuu

SEQ ID NO: 2873780 - RNA, 19 nt, Artificial Sequence
  Description of Artificial Sequence: Synthetic oligonucleotide
gguguagaaggugggaccc

SEQ ID NO: 2873781 - RNA, 19 nt, Artificial Sequence
  Description of Artificial Sequence: Synthetic oligonucleotide
guggccggugaccuggugc

SEQ ID NO: 2873782 - RNA, 19 nt, Artificial Sequence
  Description of Artificial Sequence: Synthetic oligonucleotide
auugcucuggagugccacu

SEQ ID NO: 2873783 - RNA, 19 nt, Artificial Sequence
  Description of Artificial Sequence: Synthetic oligonucleotide
aggaccugcagcaacucca

SEQ ID NO: 2873784 - RNA, 19 nt, Artificial Sequence
  Description of Artificial Sequence: Synthetic oligonucleotide
agcaauagguggcuuuguu

SEQ ID NO: 2873785 - RNA, 19 nt, Artificial Sequence
  Description of Artificial Sequence: Synthetic oligonucleotide
gucacuuguaagguguaga

SEQ ID NO: 2873786 - RNA, 19 nt, Artificial Sequence
  Description of Artificial Sequence: Synthetic oligonucleotide
uuggagggucgucagucau

SEQ ID NO: 2873787 - RNA, 19 nt, Artificial Sequence
  Description of Artificial Sequence: Synthetic oligonucleotide
cucccaccaagguaccaag

SEQ ID NO: 2873788 - RNA, 19 nt, Artificial Sequence
  Description of Artificial Sequence: Synthetic oligonucleotide
uguuuccguauuugucuuc

SEQ ID NO: 2873789 - RNA, 19 nt, Artificial Sequence
  Description of Artificial Sequence: Synthetic oligonucleotide
uccauccacaucccagaau

SEQ ID NO: 2873790 - RNA, 19 nt, Artificial Sequence
  Description of Artificial Sequence: Synthetic oligonucleotide
uucuuucucgugguggaau

SEQ ID NO: 2873791 - RNA, 19 nt, Artificial Sequence
  Description of Artificial Sequence: Synthetic oligonucleotide
uuccauccacaucccagaa

SEQ ID NO: 2873792 - RNA, 19 nt, Artificial Sequence
  Description of Artificial Sequence: Synthetic oligonucleotide
ugcucuggagugccacuca

SEQ ID NO: 2873793 - RNA, 19 nt, Artificial Sequence
  Description of Artificial Sequence: Synthetic oligonucleotide
gaacugucuuccacuguug

SEQ ID NO: 2873794 - RNA, 19 nt, Artificial Sequence
  Description of Artificial Sequence: Synthetic oligonucleotide
agucaugcagugaagccaa

SEQ ID NO: 2873795 - RNA, 19 nt, Artificial Sequence
  Description of Artificial Sequence: Synthetic oligonucleotide
cauuugcccugaagaaaac

SEQ ID NO: 2873796 - RNA, 19 nt, Artificial Sequence
  Description of Artificial Sequence: Synthetic oligonucleotide
auuugugguuugcccagau

SEQ ID NO: 2873797 - RNA, 19 nt, Artificial Sequence
  Description of Artificial Sequence: Synthetic oligonucleotide
uguagaaggugggacccau

SEQ ID NO: 2873798 - RNA, 19 nt, Artificial Sequence
  Description of Artificial Sequence: Synthetic oligonucleotide
gguggcuuuguuguuggag

SEQ ID NO: 2873799 - RNA, 19 nt, Artificial Sequence
  Description of Artificial Sequence: Synthetic oligonucleotide
cagugaagccaacggugcc

SEQ ID NO: 2873800 - RNA, 19 nt, Artificial Sequence
  Description of Artificial Sequence: Synthetic oligonucleotide
ucucccaccaagguaccaa

SEQ ID NO: 2873801 - RNA, 19 nt, Artificial Sequence
  Description of Artificial Sequence: Synthetic oligonucleotide
aaggugggacccauucaug

SEQ ID NO: 2873802 - RNA, 19 nt, Artificial Sequence
  Description of Artificial Sequence: Synthetic oligonucleotide
cuuguaagguguagaaggu

SEQ ID NO: 2873803 - RNA, 19 nt, Artificial Sequence
  Description of Artificial Sequence: Synthetic oligonucleotide
caugaaucuucuuucucgu

SEQ ID NO: 2873804 - RNA, 19 nt, Artificial Sequence
  Description of Artificial Sequence: Synthetic oligonucleotide
uaccaagcuuuacaucauu

SEQ ID NO: 2873805 - RNA, 19 nt, Artificial Sequence
  Description of Artificial Sequence: Synthetic oligonucleotide
ugccauucaggaggcacca

SEQ ID NO: 2873806 - RNA, 19 nt, Artificial Sequence
  Description of Artificial Sequence: Synthetic oligonucleotide
ugcuuccauccacauccca

SEQ ID NO: 2873807 - RNA, 19 nt, Artificial Sequence
  Description of Artificial Sequence: Synthetic oligonucleotide
uuguuggagggucgucagu

SEQ ID NO: 2873808 - RNA, 19 nt, Artificial Sequence
  Description of Artificial Sequence: Synthetic oligonucleotide
gcuuccauccacaucccag

SEQ ID NO: 2873809 - RNA, 19 nt, Artificial Sequence
  Description of Artificial Sequence: Synthetic oligonucleotide
cagucaugcagugaagcca

SEQ ID NO: 2873810 - RNA, 19 nt, Artificial Sequence
  Description of Artificial Sequence: Synthetic oligonucleotide
uugucacuuguaaggugua

SEQ ID NO: 2873811 - RNA, 19 nt, Artificial Sequence
  Description of Artificial Sequence: Synthetic oligonucleotide
caacggugccauucaggag

SEQ ID NO: 2873812 - RNA, 19 nt, Artificial Sequence
  Description of Artificial Sequence: Synthetic oligonucleotide
caggaggcaccaugcuucc

SEQ ID NO: 2873813 - RNA, 19 nt, Artificial Sequence
  Description of Artificial Sequence: Synthetic oligonucleotide
acggugccauucaggaggc

SEQ ID NO: 2873814 - RNA, 19 nt, Artificial Sequence
  Description of Artificial Sequence: Synthetic oligonucleotide
ggagggucgucagucaugc

SEQ ID NO: 2873815 - RNA, 19 nt, Artificial Sequence
  Description of Artificial Sequence: Synthetic oligonucleotide
ugguggaauaaggaacaua

SEQ ID NO: 2873816 - RNA, 19 nt, Artificial Sequence
  Description of Artificial Sequence: Synthetic oligonucleotide
caggaccugcagcaacucc

SEQ ID NO: 2873817 - RNA, 19 nt, Artificial Sequence
  Description of Artificial Sequence: Synthetic oligonucleotide
gugccauucaggaggcacc

SEQ ID NO: 2873818 - RNA, 19 nt, Artificial Sequence
  Description of Artificial Sequence: Synthetic oligonucleotide
acaucccagaauguguuuu

SEQ ID NO: 2873819 - RNA, 19 nt, Artificial Sequence
  Description of Artificial Sequence: Synthetic oligonucleotide
cuucucccaccaagguacc

SEQ ID NO: 2873820 - RNA, 19 nt, Artificial Sequence
  Description of Artificial Sequence: Synthetic oligonucleotide
auugcuuguuguccucaua

SEQ ID NO: 2873821 - RNA, 19 nt, Artificial Sequence
  Description of Artificial Sequence: Synthetic oligonucleotide
acccauucaugaaucuucu

SEQ ID NO: 2873822 - RNA, 19 nt, Artificial Sequence
  Description of Artificial Sequence: Synthetic oligonucleotide
ugccacucacguugaauuu

SEQ ID NO: 2873823 - RNA, 19 nt, Artificial Sequence
  Description of Artificial Sequence: Synthetic oligonucleotide
uuuccguauuugucuucuc

SEQ ID NO: 2873824 - RNA, 19 nt, Artificial Sequence
  Description of Artificial Sequence: Synthetic oligonucleotide
ccaacggugccauucagga

SEQ ID NO: 2873825 - RNA, 19 nt, Artificial Sequence
  Description of Artificial Sequence: Synthetic oligonucleotide
cuuccacuguugucacuug

SEQ ID NO: 2873826 - RNA, 19 nt, Artificial Sequence
  Description of Artificial Sequence: Synthetic oligonucleotide
agccaacggugccauucag

SEQ ID NO: 2873827 - RNA, 19 nt, Artificial Sequence
  Description of Artificial Sequence: Synthetic oligonucleotide
agugccacucacguugaau

SEQ ID NO: 2873828 - RNA, 19 nt, Artificial Sequence
  Description of Artificial Sequence: Synthetic oligonucleotide
guuggagggucgucaguca

SEQ ID NO: 2873829 - RNA, 19 nt, Artificial Sequence
  Description of Artificial Sequence: Synthetic oligonucleotide
gcuagaacugucuuccacu

SEQ ID NO: 2873830 - RNA, 19 nt, Artificial Sequence
  Description of Artificial Sequence: Synthetic oligonucleotide
gcuuguuguccucauagua

SEQ ID NO: 2873831 - RNA, 19 nt, Artificial Sequence
  Description of Artificial Sequence: Synthetic oligonucleotide
augacccaucggugacggc

SEQ ID NO: 2873832 - RNA, 19 nt, Artificial Sequence
  Description of Artificial Sequence: Synthetic oligonucleotide
gcagugaagccaacggugc

SEQ ID NO: 2873833 - RNA, 19 nt, Artificial Sequence
  Description of Artificial Sequence: Synthetic oligonucleotide
cccugaagaaaaccuuuag

SEQ ID NO: 2873834 - RNA, 19 nt, Artificial Sequence
  Description of Artificial Sequence: Synthetic oligonucleotide
uugcucuggagugccacuc

SEQ ID NO: 2873835 - RNA, 19 nt, Artificial Sequence
  Description of Artificial Sequence: Synthetic oligonucleotide
ggugccauucaggaggcac

SEQ ID NO: 2873836 - RNA, 19 nt, Artificial Sequence
  Description of Artificial Sequence: Synthetic oligonucleotide
augcuuccauccacauccc

SEQ ID NO: 2873837 - RNA, 19 nt, Artificial Sequence
  Description of Artificial Sequence: Synthetic oligonucleotide
accaugcuuccauccacau

SEQ ID NO: 2873838 - RNA, 19 nt, Artificial Sequence
  Description of Artificial Sequence: Synthetic oligonucleotide
auuugucuucucccaccaa

SEQ ID NO: 2873839 - RNA, 19 nt, Artificial Sequence
  Description of Artificial Sequence: Synthetic oligonucleotide
gaggcaccaugcuuccauc

SEQ ID NO: 2873840 - RNA, 19 nt, Artificial Sequence
  Description of Artificial Sequence: Synthetic oligonucleotide
ccauucaggaggcaccaug

SEQ ID NO: 2873841 - RNA, 19 nt, Artificial Sequence
  Description of Artificial Sequence: Synthetic oligonucleotide
gucuucucccaccaaggua

SEQ ID NO: 2873842 - RNA, 19 nt, Artificial Sequence
  Description of Artificial Sequence: Synthetic oligonucleotide
gaccuggugcaguccgcgc

SEQ ID NO: 2873843 - RNA, 19 nt, Artificial Sequence
  Description of Artificial Sequence: Synthetic oligonucleotide
uuacaucauuugcccugaa

SEQ ID NO: 2873844 - RNA, 19 nt, Artificial Sequence
  Description of Artificial Sequence: Synthetic oligonucleotide
ccuuuaggaagccccgcag

SEQ ID NO: 2873845 - RNA, 19 nt, Artificial Sequence
  Description of Artificial Sequence: Synthetic oligonucleotide
cauucauuucugugguaua

SEQ ID NO: 2873846 - RNA, 19 nt, Artificial Sequence
  Description of Artificial Sequence: Synthetic oligonucleotide
uaugagcaauagguggcuu

SEQ ID NO: 2873847 - RNA, 19 nt, Artificial Sequence
  Description of Artificial Sequence: Synthetic oligonucleotide
guuuccguauuugucuucu

SEQ ID NO: 2873848 - RNA, 19 nt, Artificial Sequence
  Description of Artificial Sequence: Synthetic oligonucleotide
caccaugcuuccauccaca

SEQ ID NO: 2873849 - RNA, 19 nt, Artificial Sequence
  Description of Artificial Sequence: Synthetic oligonucleotide
cagaugaauuuaugagcaa

SEQ ID NO: 2873850 - RNA, 19 nt, Artificial Sequence
  Description of Artificial Sequence: Synthetic oligonucleotide
gugccacucacguugaauu

SEQ ID NO: 2873851 - RNA, 19 nt, Artificial Sequence
  Description of Artificial Sequence: Synthetic oligonucleotide
cacucacguugaauuugug

SEQ ID NO: 2873852 - RNA, 19 nt, Artificial Sequence
  Description of Artificial Sequence: Synthetic oligonucleotide
cugugguauagaugaccca

SEQ ID NO: 2873853 - RNA, 19 nt, Artificial Sequence
  Description of Artificial Sequence: Synthetic oligonucleotide
gcuuuguuguuggaggguc

SEQ ID NO: 2873854 - RNA, 19 nt, Artificial Sequence
  Description of Artificial Sequence: Synthetic oligonucleotide
gccaacggugccauucagg

SEQ ID NO: 2873855 - RNA, 19 nt, Artificial Sequence
  Description of Artificial Sequence: Synthetic oligonucleotide
gccacucacguugaauuug

SEQ ID NO: 2873856 - RNA, 19 nt, Artificial Sequence
  Description of Artificial Sequence: Synthetic oligonucleotide
ggucgucagucaugcagug

SEQ ID NO: 2873857 - RNA, 19 nt, Artificial Sequence
  Description of Artificial Sequence: Synthetic oligonucleotide
cgugguggaauaaggaaca

SEQ ID NO: 2873858 - RNA, 19 nt, Artificial Sequence
  Description of Artificial Sequence: Synthetic oligonucleotide
cugcagcaacuccauuuuc

SEQ ID NO: 2873859 - RNA, 19 nt, Artificial Sequence
  Description of Artificial Sequence: Synthetic oligonucleotide
gcaacuccauuuucuuuuc

SEQ ID NO: 2873860 - RNA, 19 nt, Artificial Sequence
  Description of Artificial Sequence: Synthetic oligonucleotide
caccaagguaccaagcuuu

SEQ ID NO: 2873861 - RNA, 19 nt, Artificial Sequence
  Description of Artificial Sequence: Synthetic oligonucleotide
gacccaucggugacggcca

SEQ ID NO: 2873862 - RNA, 19 nt, Artificial Sequence
  Description of Artificial Sequence: Synthetic oligonucleotide
gcaccaugcuuccauccac

SEQ ID NO: 2873863 - RNA, 19 nt, Artificial Sequence
  Description of Artificial Sequence: Synthetic oligonucleotide
ggcaccaugcuuccaucca

SEQ ID NO: 2873864 - RNA, 19 nt, Artificial Sequence
  Description of Artificial Sequence: Synthetic oligonucleotide
cguauuugucuucucccac

SEQ ID NO: 2873865 - RNA, 19 nt, Artificial Sequence
  Description of Artificial Sequence: Synthetic oligonucleotide
uucucccaccaagguacca

SEQ ID NO: 2873866 - RNA, 19 nt, Artificial Sequence
  Description of Artificial Sequence: Synthetic oligonucleotide
aggaagccccgcaggccgc

SEQ ID NO: 2873867 - RNA, 19 nt, Artificial Sequence
  Description of Artificial Sequence: Synthetic oligonucleotide
uuguuguuggagggucguc

SEQ ID NO: 2873868 - RNA, 19 nt, Artificial Sequence
  Description of Artificial Sequence: Synthetic oligonucleotide
gugggacccauucaugaau

SEQ ID NO: 2873869 - RNA, 19 nt, Artificial Sequence
  Description of Artificial Sequence: Synthetic oligonucleotide
uggugcaguccgcgccuca

SEQ ID NO: 2873870 - RNA, 19 nt, Artificial Sequence
  Description of Artificial Sequence: Synthetic oligonucleotide
guuugcccagaugaauuua

SEQ ID NO: 2873871 - RNA, 19 nt, Artificial Sequence
  Description of Artificial Sequence: Synthetic oligonucleotide
aagccccgcaggccgccgu

SEQ ID NO: 2873872 - RNA, 19 nt, Artificial Sequence
  Description of Artificial Sequence: Synthetic oligonucleotide
ggugggacccauucaugaa

SEQ ID NO: 2873873 - RNA, 19 nt, Artificial Sequence
  Description of Artificial Sequence: Synthetic oligonucleotide
gccguggccggugaccugg

SEQ ID NO: 2873874 - RNA, 19 nt, Artificial Sequence
  Description of Artificial Sequence: Synthetic oligonucleotide
cuguugucacuuguaaggu

SEQ ID NO: 2873875 - RNA, 19 nt, Artificial Sequence
  Description of Artificial Sequence: Synthetic oligonucleotide
ccauucaugaaucuucuuu

SEQ ID NO: 2873876 - RNA, 19 nt, Artificial Sequence
  Description of Artificial Sequence: Synthetic oligonucleotide
ccguauuugucuucuccca

SEQ ID NO: 2873877 - RNA, 19 nt, Artificial Sequence
  Description of Artificial Sequence: Synthetic oligonucleotide
gcucuggagugccacucac

SEQ ID NO: 2873878 - RNA, 19 nt, Artificial Sequence
  Description of Artificial Sequence: Synthetic oligonucleotide
cuuucucgugguggaauaa

SEQ ID NO: 2873879 - RNA, 19 nt, Artificial Sequence
  Description of Artificial Sequence: Synthetic oligonucleotide
gugcuagaacugucuucca

SEQ ID NO: 2873880 - RNA, 19 nt, Artificial Sequence
  Description of Artificial Sequence: Synthetic oligonucleotide
gaagccccgcaggccgccg

SEQ ID NO: 2873881 - RNA, 19 nt, Artificial Sequence
  Description of Artificial Sequence: Synthetic oligonucleotide
ggugcaguccgcgccucag

SEQ ID NO: 2873882 - RNA, 19 nt, Artificial Sequence
  Description of Artificial Sequence: Synthetic oligonucleotide
gugaccuggugcaguccgc

SEQ ID NO: 2873883 - RNA, 19 nt, Artificial Sequence
  Description of Artificial Sequence: Synthetic oligonucleotide
auauugcucuggagugcca

SEQ ID NO: 2873884 - RNA, 19 nt, Artificial Sequence
  Description of Artificial Sequence: Synthetic oligonucleotide
gcuuuacaucauuugcccu

SEQ ID NO: 2873885 - RNA, 19 nt, Artificial Sequence
  Description of Artificial Sequence: Synthetic oligonucleotide
accaagguaccaagcuuua

SEQ ID NO: 2873886 - RNA, 19 nt, Artificial Sequence
  Description of Artificial Sequence: Synthetic oligonucleotide
caugugcuagaacugucuu

SEQ ID NO: 2873887 - RNA, 19 nt, Artificial Sequence
  Description of Artificial Sequence: Synthetic oligonucleotide
agguggcuuuguuguugga

SEQ ID NO: 2873888 - RNA, 19 nt, Artificial Sequence
  Description of Artificial Sequence: Synthetic oligonucleotide
gucgucagucaugcaguga

SEQ ID NO: 2873889 - RNA, 19 nt, Artificial Sequence
  Description of Artificial Sequence: Synthetic oligonucleotide
gcgccucaggaccugcagc

SEQ ID NO: 2873890 - RNA, 19 nt, Artificial Sequence
  Description of Artificial Sequence: Synthetic oligonucleotide
cguugaauuugugguuugc

SEQ ID NO: 2873891 - RNA, 19 nt, Artificial Sequence
  Description of Artificial Sequence: Synthetic oligonucleotide
cacguugaauuugugguuu

SEQ ID NO: 2873892 - RNA, 19 nt, Artificial Sequence
  Description of Artificial Sequence: Synthetic oligonucleotide
ggaggcaccaugcuuccau

SEQ ID NO: 2873893 - RNA, 19 nt, Artificial Sequence
  Description of Artificial Sequence: Synthetic oligonucleotide
cugcaugugcuagaacugu

SEQ ID NO: 2873894 - RNA, 19 nt, Artificial Sequence
  Description of Artificial Sequence: Synthetic oligonucleotide
guguagaaggugggaccca

SEQ ID NO: 2873895 - RNA, 19 nt, Artificial Sequence
  Description of Artificial Sequence: Synthetic oligonucleotide
cauccacaucccagaaugu

SEQ ID NO: 2873896 - RNA, 19 nt, Artificial Sequence
  Description of Artificial Sequence: Synthetic oligonucleotide
gugguuugcccagaugaau

SEQ ID NO: 2873897 - RNA, 19 nt, Artificial Sequence
  Description of Artificial Sequence: Synthetic oligonucleotide
ccaugcuuccauccacauc

SEQ ID NO: 2873898 - RNA, 19 nt, Artificial Sequence
  Description of Artificial Sequence: Synthetic oligonucleotide
ccacuguugucacuuguaa

SEQ ID NO: 2873899 - RNA, 19 nt, Artificial Sequence
  Description of Artificial Sequence: Synthetic oligonucleotide
gguuugcccagaugaauuu

SEQ ID NO: 2873900 - RNA, 19 nt, Artificial Sequence
  Description of Artificial Sequence: Synthetic oligonucleotide
aguccgcgccucaggaccu

SEQ ID NO: 2873901 - RNA, 19 nt, Artificial Sequence
  Description of Artificial Sequence: Synthetic oligonucleotide
agccccgcaggccgccgug

SEQ ID NO: 2873902 - RNA, 19 nt, Artificial Sequence
  Description of Artificial Sequence: Synthetic oligonucleotide
ugaagccaacggugccauu

SEQ ID NO: 2873903 - RNA, 19 nt, Artificial Sequence
  Description of Artificial Sequence: Synthetic oligonucleotide
gagggucgucagucaugca

SEQ ID NO: 2873904 - RNA, 19 nt, Artificial Sequence
  Description of Artificial Sequence: Synthetic oligonucleotide
gagcaauagguggcuuugu

SEQ ID NO: 2873905 - RNA, 19 nt, Artificial Sequence
  Description of Artificial Sequence: Synthetic oligonucleotide
cuucuuucucgugguggaa

SEQ ID NO: 2873906 - RNA, 19 nt, Artificial Sequence
  Description of Artificial Sequence: Synthetic oligonucleotide
ccaagguaccaagcuuuac

SEQ ID NO: 2873907 - RNA, 19 nt, Artificial Sequence
  Description of Artificial Sequence: Synthetic oligonucleotide
gcagcaacuccauuuucuu

SEQ ID NO: 2873908 - RNA, 19 nt, Artificial Sequence
  Description of Artificial Sequence: Synthetic oligonucleotide
gcaugugcuagaacugucu

SEQ ID NO: 2873909 - RNA, 19 nt, Artificial Sequence
  Description of Artificial Sequence: Synthetic oligonucleotide
guaccaagcuuuacaucau

SEQ ID NO: 2873910 - RNA, 19 nt, Artificial Sequence
  Description of Artificial Sequence: Synthetic oligonucleotide
gcaguccgcgccucaggac

SEQ ID NO: 2873911 - RNA, 19 nt, Artificial Sequence
  Description of Artificial Sequence: Synthetic oligonucleotide
gucaugcagugaagccaac

SEQ ID NO: 2873912 - RNA, 19 nt, Artificial Sequence
  Description of Artificial Sequence: Synthetic oligonucleotide
ccgcaggccgccguggccg

SEQ ID NO: 2873913 - RNA, 19 nt, Artificial Sequence
  Description of Artificial Sequence: Synthetic oligonucleotide
ccauucauuucugugguau

SEQ ID NO: 2873914 - RNA, 19 nt, Artificial Sequence
  Description of Artificial Sequence: Synthetic oligonucleotide
guggaauaaggaacauauu

SEQ ID NO: 2873915 - RNA, 19 nt, Artificial Sequence
  Description of Artificial Sequence: Synthetic oligonucleotide
gggucgucagucaugcagu

SEQ ID NO: 2873916 - RNA, 19 nt, Artificial Sequence
  Description of Artificial Sequence: Synthetic oligonucleotide
gagugccacucacguugaa

SEQ ID NO: 2873917 - RNA, 19 nt, Artificial Sequence
  Description of Artificial Sequence: Synthetic oligonucleotide
cagcaacuccauuuucuuu

SEQ ID NO: 2873918 - RNA, 19 nt, Artificial Sequence
  Description of Artificial Sequence: Synthetic oligonucleotide
cccaccaagguaccaagcu

SEQ ID NO: 2873919 - RNA, 19 nt, Artificial Sequence
  Description of Artificial Sequence: Synthetic oligonucleotide
ccggugaccuggugcaguc

SEQ ID NO: 2873920 - RNA, 19 nt, Artificial Sequence
  Description of Artificial Sequence: Synthetic oligonucleotide
gggacccauucaugaaucu

SEQ ID NO: 2873921 - RNA, 19 nt, Artificial Sequence
  Description of Artificial Sequence: Synthetic oligonucleotide
ggagugccacucacguuga

SEQ ID NO: 2873922 - RNA, 19 nt, Artificial Sequence
  Description of Artificial Sequence: Synthetic oligonucleotide
acccaucggugacggccaa

SEQ ID NO: 2873923 - RNA, 19 nt, Artificial Sequence
  Description of Artificial Sequence: Synthetic oligonucleotide
ccacucacguugaauuugu

SEQ ID NO: 2873924 - RNA, 19 nt, Artificial Sequence
  Description of Artificial Sequence: Synthetic oligonucleotide
ccaucggugacggccaaaa

SEQ ID NO: 2873925 - RNA, 19 nt, Artificial Sequence
  Description of Artificial Sequence: Synthetic oligonucleotide
gcccugaagaaaaccuuua

SEQ ID NO: 2873926 - RNA, 19 nt, Artificial Sequence
  Description of Artificial Sequence: Synthetic oligonucleotide
caggccgccguggccggug

SEQ ID NO: 2873927 - RNA, 19 nt, Artificial Sequence
  Description of Artificial Sequence: Synthetic oligonucleotide
cacaucccagaauguguuu

SEQ ID NO: 2873928 - RNA, 19 nt, Artificial Sequence
  Description of Artificial Sequence: Synthetic oligonucleotide
cuggugcaguccgcgccuc

SEQ ID NO: 2873929 - RNA, 19 nt, Artificial Sequence
  Description of Artificial Sequence: Synthetic oligonucleotide
aggccgccguggccgguga

SEQ ID NO: 2873930 - RNA, 19 nt, Artificial Sequence
  Description of Artificial Sequence: Synthetic oligonucleotide
ggaagccccgcaggccgcc

SEQ ID NO: 2873931 - RNA, 19 nt, Artificial Sequence
  Description of Artificial Sequence: Synthetic oligonucleotide
gccgccguggccggugacc

SEQ ID NO: 2873932 - RNA, 19 nt, Artificial Sequence
  Description of Artificial Sequence: Synthetic oligonucleotide
ggcuuuguuguuggagggu

SEQ ID NO: 2873933 - RNA, 19 nt, Artificial Sequence
  Description of Artificial Sequence: Synthetic oligonucleotide
gccauucauuucuguggua

SEQ ID NO: 2873934 - RNA, 19 nt, Artificial Sequence
  Description of Artificial Sequence: Synthetic oligonucleotide
gugguggaauaaggaacau

SEQ ID NO: 2873935 - RNA, 19 nt, Artificial Sequence
  Description of Artificial Sequence: Synthetic oligonucleotide
ccacaucccagaauguguu

SEQ ID NO: 2873936 - RNA, 19 nt, Artificial Sequence
  Description of Artificial Sequence: Synthetic oligonucleotide
ggacccauucaugaaucuu

SEQ ID NO: 2873937 - RNA, 19 nt, Artificial Sequence
  Description of Artificial Sequence: Synthetic oligonucleotide
ccugcagcaacuccauuuu

SEQ ID NO: 2873938 - RNA, 19 nt, Artificial Sequence
  Description of Artificial Sequence: Synthetic oligonucleotide
cgcgccucaggaccugcag

SEQ ID NO: 2873939 - RNA, 19 nt, Artificial Sequence
  Description of Artificial Sequence: Synthetic oligonucleotide
cuggagugccacucacguu

SEQ ID NO: 2873940 - RNA, 19 nt, Artificial Sequence
  Description of Artificial Sequence: Synthetic oligonucleotide
guccgcgccucaggaccug

SEQ ID NO: 2873941 - RNA, 19 nt, Artificial Sequence
  Description of Artificial Sequence: Synthetic oligonucleotide
cccgcaggccgccguggcc

SEQ ID NO: 2873942 - RNA, 19 nt, Artificial Sequence
  Description of Artificial Sequence: Synthetic oligonucleotide
guagaaggugggacccauu

SEQ ID NO: 2873943 - RNA, 19 nt, Artificial Sequence
  Description of Artificial Sequence: Synthetic oligonucleotide
ccaccaagguaccaagcuu

SEQ ID NO: 2873944 - RNA, 19 nt, Artificial Sequence
  Description of Artificial Sequence: Synthetic oligonucleotide
ggaccugcagcaacuccau

SEQ ID NO: 2873945 - RNA, 19 nt, Artificial Sequence
  Description of Artificial Sequence: Synthetic oligonucleotide
gccccgcaggccgccgugg

SEQ ID NO: 2873946 - RNA, 19 nt, Artificial Sequence
  Description of Artificial Sequence: Synthetic oligonucleotide
ccuggugcaguccgcgccu

SEQ ID NO: 2873947 - RNA, 19 nt, Artificial Sequence
  Description of Artificial Sequence: Synthetic oligonucleotide
cggugaccuggugcagucc

SEQ ID NO: 2873948 - RNA, 19 nt, Artificial Sequence
  Description of Artificial Sequence: Synthetic oligonucleotide
cgcaggccgccguggccgg

SEQ ID NO: 2873949 - RNA, 19 nt, Artificial Sequence
  Description of Artificial Sequence: Synthetic oligonucleotide
cccauucaugaaucuucuu

SEQ ID NO: 2873950 - RNA, 19 nt, Artificial Sequence
  Description of Artificial Sequence: Synthetic oligonucleotide
ggccgccguggccggugac

SEQ ID NO: 2873951 - RNA, 19 nt, Artificial Sequence
  Description of Artificial Sequence: Synthetic oligonucleotide
cguggccggugaccuggug

SEQ ID NO: 2873952 - RNA, 19 nt, Artificial Sequence
  Description of Artificial Sequence: Synthetic oligonucleotide
ccgcgccucaggaccugca

SEQ ID NO: 2873953 - RNA, 19 nt, Artificial Sequence
  Description of Artificial Sequence: Synthetic oligonucleotide
gccauucaggaggcaccau

SEQ ID NO: 2873954 - RNA, 19 nt, Artificial Sequence
  Description of Artificial Sequence: Synthetic oligonucleotide
cgccguggccggugaccug

SEQ ID NO: 2873955 - RNA, 19 nt, Artificial Sequence
  Description of Artificial Sequence: Synthetic oligonucleotide
cccaucggugacggccaaa

SEQ ID NO: 2873956 - RNA, 19 nt, Artificial Sequence
  Description of Artificial Sequence: Synthetic oligonucleotide
ccgccguggccggugaccu

SEQ ID NO: 2873957 - RNA, 19 nt, Artificial Sequence
  Description of Artificial Sequence: Synthetic oligonucleotide
cggugccauucaggaggca

SEQ ID NO: 2873958 - RNA, 19 nt, Artificial Sequence
  Description of Artificial Sequence: Synthetic oligonucleotide
gcaggccgccguggccggu

SEQ ID NO: 2873959 - RNA, 19 nt, Artificial Sequence
  Description of Artificial Sequence: Synthetic oligonucleotide
auaggagacagccacaucc

SEQ ID NO: 2873960 - RNA, 19 nt, Artificial Sequence
  Description of Artificial Sequence: Synthetic oligonucleotide
uauaauaggagacagccac

SEQ ID NO: 2873961 - RNA, 19 nt, Artificial Sequence
  Description of Artificial Sequence: Synthetic oligonucleotide
ucauagaagagauagagaa

SEQ ID NO: 2873962 - RNA, 19 nt, Artificial Sequence
  Description of Artificial Sequence: Synthetic oligonucleotide
aaagauucaagacccgagg

SEQ ID NO: 2873963 - RNA, 19 nt, Artificial Sequence
  Description of Artificial Sequence: Synthetic oligonucleotide
aacagggugaguuuguguc

SEQ ID NO: 2873964 - RNA, 19 nt, Artificial Sequence
  Description of Artificial Sequence: Synthetic oligonucleotide
acguagaucaccuugaucu

SEQ ID NO: 2873965 - RNA, 19 nt, Artificial Sequence
  Description of Artificial Sequence: Synthetic oligonucleotide
gaagagauagagaacaggg

SEQ ID NO: 2873966 - RNA, 19 nt, Artificial Sequence
  Description of Artificial Sequence: Synthetic oligonucleotide
uguagaaguuauaauagga

SEQ ID NO: 2873967 - RNA, 19 nt, Artificial Sequence
  Description of Artificial Sequence: Synthetic oligonucleotide
guuauaauaggagacagcc

SEQ ID NO: 2873968 - RNA, 19 nt, Artificial Sequence
  Description of Artificial Sequence: Synthetic oligonucleotide
uguuguagaaguuauaaua

SEQ ID NO: 2873969 - RNA, 19 nt, Artificial Sequence
  Description of Artificial Sequence: Synthetic oligonucleotide
uuccaaagauucaagaccc

SEQ ID NO: 2873970 - RNA, 19 nt, Artificial Sequence
  Description of Artificial Sequence: Synthetic oligonucleotide
aagauucaagacccgaggg

SEQ ID NO: 2873971 - RNA, 19 nt, Artificial Sequence
  Description of Artificial Sequence: Synthetic oligonucleotide
ugggcaucgaaacucaagg

SEQ ID NO: 2873972 - RNA, 19 nt, Artificial Sequence
  Description of Artificial Sequence: Synthetic oligonucleotide
cuuccaaagauucaagacc

SEQ ID NO: 2873973 - RNA, 19 nt, Artificial Sequence
  Description of Artificial Sequence: Synthetic oligonucleotide
agagauagagaacagggug

SEQ ID NO: 2873974 - RNA, 19 nt, Artificial Sequence
  Description of Artificial Sequence: Synthetic oligonucleotide
aacucuaguaccuucuuga

SEQ ID NO: 2873975 - RNA, 19 nt, Artificial Sequence
  Description of Artificial Sequence: Synthetic oligonucleotide
agaaguuauaauaggagac

SEQ ID NO: 2873976 - RNA, 19 nt, Artificial Sequence
  Description of Artificial Sequence: Synthetic oligonucleotide
uucuugaucucccuuuugg

SEQ ID NO: 2873977 - RNA, 19 nt, Artificial Sequence
  Description of Artificial Sequence: Synthetic oligonucleotide
aacuccugggcaucgaaac

SEQ ID NO: 2873978 - RNA, 19 nt, Artificial Sequence
  Description of Artificial Sequence: Synthetic oligonucleotide
uagaaguuauaauaggaga

SEQ ID NO: 2873979 - RNA, 19 nt, Artificial Sequence
  Description of Artificial Sequence: Synthetic oligonucleotide
uggauuucgggcaacguag

SEQ ID NO: 2873980 - RNA, 19 nt, Artificial Sequence
  Description of Artificial Sequence: Synthetic oligonucleotide
uuguagaaguuauaauagg

SEQ ID NO: 2873981 - RNA, 19 nt, Artificial Sequence
  Description of Artificial Sequence: Synthetic oligonucleotide
auagaagagauagagaaca

SEQ ID NO: 2873982 - RNA, 19 nt, Artificial Sequence
  Description of Artificial Sequence: Synthetic oligonucleotide
uucaugucuucauagaaga

SEQ ID NO: 2873983 - RNA, 19 nt, Artificial Sequence
  Description of Artificial Sequence: Synthetic oligonucleotide
agaugugucuuaauuagcc

SEQ ID NO: 2873984 - RNA, 19 nt, Artificial Sequence
  Description of Artificial Sequence: Synthetic oligonucleotide
agguauuuggaucagggug

SEQ ID NO: 2873985 - RNA, 19 nt, Artificial Sequence
  Description of Artificial Sequence: Synthetic oligonucleotide
auuuggaucagggugcacc

SEQ ID NO: 2873986 - RNA, 19 nt, Artificial Sequence
  Description of Artificial Sequence: Synthetic oligonucleotide
cuucauagaagagauagag

SEQ ID NO: 2873987 - RNA, 19 nt, Artificial Sequence
  Description of Artificial Sequence: Synthetic oligonucleotide
gucuucauagaagagauag

SEQ ID NO: 2873988 - RNA, 19 nt, Artificial Sequence
  Description of Artificial Sequence: Synthetic oligonucleotide
aaguuauaauaggagacag

SEQ ID NO: 2873989 - RNA, 19 nt, Artificial Sequence
  Description of Artificial Sequence: Synthetic oligonucleotide
guuguagaaguuauaauag

SEQ ID NO: 2873990 - RNA, 19 nt, Artificial Sequence
  Description of Artificial Sequence: Synthetic oligonucleotide
agauaucccagguauuugg

SEQ ID NO: 2873991 - RNA, 19 nt, Artificial Sequence
  Description of Artificial Sequence: Synthetic oligonucleotide
acccauaggacacuuuccc

SEQ ID NO: 2873992 - RNA, 19 nt, Artificial Sequence
  Description of Artificial Sequence: Synthetic oligonucleotide
gaugugucuuaauuagccg

SEQ ID NO: 2873993 - RNA, 19 nt, Artificial Sequence
  Description of Artificial Sequence: Synthetic oligonucleotide
ucuggugucucuuccaaag

SEQ ID NO: 2873994 - RNA, 19 nt, Artificial Sequence
  Description of Artificial Sequence: Synthetic oligonucleotide
ucuuccaaagauucaagac

SEQ ID NO: 2873995 - RNA, 19 nt, Artificial Sequence
  Description of Artificial Sequence: Synthetic oligonucleotide
cauccuuuggauuucgggc

SEQ ID NO: 2873996 - RNA, 19 nt, Artificial Sequence
  Description of Artificial Sequence: Synthetic oligonucleotide
ugauccagcagacucugag

SEQ ID NO: 2873997 - RNA, 19 nt, Artificial Sequence
  Description of Artificial Sequence: Synthetic oligonucleotide
uugggauucuccuucaugu

SEQ ID NO: 2873998 - RNA, 19 nt, Artificial Sequence
  Description of Artificial Sequence: Synthetic oligonucleotide
guagaaguuauaauaggag

SEQ ID NO: 2873999 - RNA, 19 nt, Artificial Sequence
  Description of Artificial Sequence: Synthetic oligonucleotide
ucuugaucucccuuuuggg

SEQ ID NO: 2874000 - RNA, 19 nt, Artificial Sequence
  Description of Artificial Sequence: Synthetic oligonucleotide
agggagcaaggacagaggc

SEQ ID NO: 2874001 - RNA, 19 nt, Artificial Sequence
  Description of Artificial Sequence: Synthetic oligonucleotide
uuugugucaguucccacca

SEQ ID NO: 2874002 - RNA, 19 nt, Artificial Sequence
  Description of Artificial Sequence: Synthetic oligonucleotide
uuagccgugggucuggugu

SEQ ID NO: 2874003 - RNA, 19 nt, Artificial Sequence
  Description of Artificial Sequence: Synthetic oligonucleotide
auccagcagacucugaggg

SEQ ID NO: 2874004 - RNA, 19 nt, Artificial Sequence
  Description of Artificial Sequence: Synthetic oligonucleotide
ugugucuuaauuagccgug

SEQ ID NO: 2874005 - RNA, 19 nt, Artificial Sequence
  Description of Artificial Sequence: Synthetic oligonucleotide
aacguagaucaccuugauc

SEQ ID NO: 2874006 - RNA, 19 nt, Artificial Sequence
  Description of Artificial Sequence: Synthetic oligonucleotide
caugaaguucuccaggaag

SEQ ID NO: 2874007 - RNA, 19 nt, Artificial Sequence
  Description of Artificial Sequence: Synthetic oligonucleotide
ugcaccuuggccauguugu

SEQ ID NO: 2874008 - RNA, 19 nt, Artificial Sequence
  Description of Artificial Sequence: Synthetic oligonucleotide
cuucaugucuucauagaag

SEQ ID NO: 2874009 - RNA, 19 nt, Artificial Sequence
  Description of Artificial Sequence: Synthetic oligonucleotide
acauccuuuggauuucggg

SEQ ID NO: 2874010 - RNA, 19 nt, Artificial Sequence
  Description of Artificial Sequence: Synthetic oligonucleotide
ucuuaauuagccguggguc

SEQ ID NO: 2874011 - RNA, 19 nt, Artificial Sequence
  Description of Artificial Sequence: Synthetic oligonucleotide
ucuccucaggcagagagcg

SEQ ID NO: 2874012 - RNA, 19 nt, Artificial Sequence
  Description of Artificial Sequence: Synthetic oligonucleotide
ucugagggagcaaggacag

SEQ ID NO: 2874013 - RNA, 19 nt, Artificial Sequence
  Description of Artificial Sequence: Synthetic oligonucleotide
aucagggugcaccuuggcc

SEQ ID NO: 2874014 - RNA, 19 nt, Artificial Sequence
  Description of Artificial Sequence: Synthetic oligonucleotide
ucagggugcaccuuggcca

SEQ ID NO: 2874015 - RNA, 19 nt, Artificial Sequence
  Description of Artificial Sequence: Synthetic oligonucleotide
agucuccucaggcagagag

SEQ ID NO: 2874016 - RNA, 19 nt, Artificial Sequence
  Description of Artificial Sequence: Synthetic oligonucleotide
uuauaauaggagacagcca

SEQ ID NO: 2874017 - RNA, 19 nt, Artificial Sequence
  Description of Artificial Sequence: Synthetic oligonucleotide
auaggacacuuucccagcc

SEQ ID NO: 2874018 - RNA, 19 nt, Artificial Sequence
  Description of Artificial Sequence: Synthetic oligonucleotide
ugaucuucugauccagcag

SEQ ID NO: 2874019 - RNA, 19 nt, Artificial Sequence
  Description of Artificial Sequence: Synthetic oligonucleotide
ugagggagcaaggacagag

SEQ ID NO: 2874020 - RNA, 19 nt, Artificial Sequence
  Description of Artificial Sequence: Synthetic oligonucleotide
uuugggauucuccuucaug

SEQ ID NO: 2874021 - RNA, 19 nt, Artificial Sequence
  Description of Artificial Sequence: Synthetic oligonucleotide
guuugugucaguucccacc

SEQ ID NO: 2874022 - RNA, 19 nt, Artificial Sequence
  Description of Artificial Sequence: Synthetic oligonucleotide
caaagauucaagacccgag

SEQ ID NO: 2874023 - RNA, 19 nt, Artificial Sequence
  Description of Artificial Sequence: Synthetic oligonucleotide
ugucuuaauuagccguggg

SEQ ID NO: 2874024 - RNA, 19 nt, Artificial Sequence
  Description of Artificial Sequence: Synthetic oligonucleotide
aguuauaauaggagacagc

SEQ ID NO: 2874025 - RNA, 19 nt, Artificial Sequence
  Description of Artificial Sequence: Synthetic oligonucleotide
agaagagauagagaacagg

SEQ ID NO: 2874026 - RNA, 19 nt, Artificial Sequence
  Description of Artificial Sequence: Synthetic oligonucleotide
gguaccacgacccauagga

SEQ ID NO: 2874027 - RNA, 19 nt, Artificial Sequence
  Description of Artificial Sequence: Synthetic oligonucleotide
uucuccaggaagauauccc

SEQ ID NO: 2874028 - RNA, 19 nt, Artificial Sequence
  Description of Artificial Sequence: Synthetic oligonucleotide
gaucuucugauccagcaga

SEQ ID NO: 2874029 - RNA, 19 nt, Artificial Sequence
  Description of Artificial Sequence: Synthetic oligonucleotide
uugaucuucugauccagca

SEQ ID NO: 2874030 - RNA, 19 nt, Artificial Sequence
  Description of Artificial Sequence: Synthetic oligonucleotide
aauaggagacagccacauc

SEQ ID NO: 2874031 - RNA, 19 nt, Artificial Sequence
  Description of Artificial Sequence: Synthetic oligonucleotide
gauccagcagacucugagg

SEQ ID NO: 2874032 - RNA, 19 nt, Artificial Sequence
  Description of Artificial Sequence: Synthetic oligonucleotide
aucaccuugaucuucugau

SEQ ID NO: 2874033 - RNA, 19 nt, Artificial Sequence
  Description of Artificial Sequence: Synthetic oligonucleotide
aguaccuucuugaucuccc

SEQ ID NO: 2874034 - RNA, 19 nt, Artificial Sequence
  Description of Artificial Sequence: Synthetic oligonucleotide
uagaagagauagagaacag

SEQ ID NO: 2874035 - RNA, 19 nt, Artificial Sequence
  Description of Artificial Sequence: Synthetic oligonucleotide
gaaguuauaauaggagaca

SEQ ID NO: 2874036 - RNA, 19 nt, Artificial Sequence
  Description of Artificial Sequence: Synthetic oligonucleotide
gagacagccacauccuuug

SEQ ID NO: 2874037 - RNA, 19 nt, Artificial Sequence
  Description of Artificial Sequence: Synthetic oligonucleotide
cauagaagagauagagaac

SEQ ID NO: 2874038 - RNA, 19 nt, Artificial Sequence
  Description of Artificial Sequence: Synthetic oligonucleotide
uuuucagcuccacagucuc

SEQ ID NO: 2874039 - RNA, 19 nt, Artificial Sequence
  Description of Artificial Sequence: Synthetic oligonucleotide
cuucugauccagcagacuc

SEQ ID NO: 2874040 - RNA, 19 nt, Artificial Sequence
  Description of Artificial Sequence: Synthetic oligonucleotide
gcagaugugucuuaauuag

SEQ ID NO: 2874041 - RNA, 19 nt, Artificial Sequence
  Description of Artificial Sequence: Synthetic oligonucleotide
ucuccaggaagauauccca

SEQ ID NO: 2874042 - RNA, 19 nt, Artificial Sequence
  Description of Artificial Sequence: Synthetic oligonucleotide
ucucuuccaaagauucaag

SEQ ID NO: 2874043 - RNA, 19 nt, Artificial Sequence
  Description of Artificial Sequence: Synthetic oligonucleotide
ucuucauagaagagauaga

SEQ ID NO: 2874044 - RNA, 19 nt, Artificial Sequence
  Description of Artificial Sequence: Synthetic oligonucleotide
acucugagggagcaaggac

SEQ ID NO: 2874045 - RNA, 19 nt, Artificial Sequence
  Description of Artificial Sequence: Synthetic oligonucleotide
caccuugaucuucugaucc

SEQ ID NO: 2874046 - RNA, 19 nt, Artificial Sequence
  Description of Artificial Sequence: Synthetic oligonucleotide
ucaugucuucauagaagag

SEQ ID NO: 2874047 - RNA, 19 nt, Artificial Sequence
  Description of Artificial Sequence: Synthetic oligonucleotide
uucacgugcugguaccacg

SEQ ID NO: 2874048 - RNA, 19 nt, Artificial Sequence
  Description of Artificial Sequence: Synthetic oligonucleotide
agccaugaaguucuccagg

SEQ ID NO: 2874049 - RNA, 19 nt, Artificial Sequence
  Description of Artificial Sequence: Synthetic oligonucleotide
uagaucaccuugaucuucu

SEQ ID NO: 2874050 - RNA, 19 nt, Artificial Sequence
  Description of Artificial Sequence: Synthetic oligonucleotide
uccaaagauucaagacccg

SEQ ID NO: 2874051 - RNA, 19 nt, Artificial Sequence
  Description of Artificial Sequence: Synthetic oligonucleotide
uaucccagguauuuggauc

SEQ ID NO: 2874052 - RNA, 19 nt, Artificial Sequence
  Description of Artificial Sequence: Synthetic oligonucleotide
agauucaagacccgaggga

SEQ ID NO: 2874053 - RNA, 19 nt, Artificial Sequence
  Description of Artificial Sequence: Synthetic oligonucleotide
uggaucagggugcaccuug

SEQ ID NO: 2874054 - RNA, 19 nt, Artificial Sequence
  Description of Artificial Sequence: Synthetic oligonucleotide
auccuuuggauuucgggca

SEQ ID NO: 2874055 - RNA, 19 nt, Artificial Sequence
  Description of Artificial Sequence: Synthetic oligonucleotide
ugugucaguucccaccacu

SEQ ID NO: 2874056 - RNA, 19 nt, Artificial Sequence
  Description of Artificial Sequence: Synthetic oligonucleotide
auuucgggcaacguagauc

SEQ ID NO: 2874057 - RNA, 19 nt, Artificial Sequence
  Description of Artificial Sequence: Synthetic oligonucleotide
ugaguuugugucaguuccc

SEQ ID NO: 2874058 - RNA, 19 nt, Artificial Sequence
  Description of Artificial Sequence: Synthetic oligonucleotide
uuuggaucagggugcaccu

SEQ ID NO: 2874059 - RNA, 19 nt, Artificial Sequence
  Description of Artificial Sequence: Synthetic oligonucleotide
aucccagguauuuggauca

SEQ ID NO: 2874060 - RNA, 19 nt, Artificial Sequence
  Description of Artificial Sequence: Synthetic oligonucleotide
uuggauuucgggcaacgua

SEQ ID NO: 2874061 - RNA, 19 nt, Artificial Sequence
  Description of Artificial Sequence: Synthetic oligonucleotide
uaccacgacccauaggaca

SEQ ID NO: 2874062 - RNA, 19 nt, Artificial Sequence
  Description of Artificial Sequence: Synthetic oligonucleotide
uuaauuagccgugggucug

SEQ ID NO: 2874063 - RNA, 19 nt, Artificial Sequence
  Description of Artificial Sequence: Synthetic oligonucleotide
aagagauagagaacagggu

SEQ ID NO: 2874064 - RNA, 19 nt, Artificial Sequence
  Description of Artificial Sequence: Synthetic oligonucleotide
acgugcugguaccacgacc

SEQ ID NO: 2874065 - RNA, 19 nt, Artificial Sequence
  Description of Artificial Sequence: Synthetic oligonucleotide
uucugauccagcagacucu

SEQ ID NO: 2874066 - RNA, 19 nt, Artificial Sequence
  Description of Artificial Sequence: Synthetic oligonucleotide
cuccuucaugucuucauag

SEQ ID NO: 2874067 - RNA, 19 nt, Artificial Sequence
  Description of Artificial Sequence: Synthetic oligonucleotide
ggagcaaggacagaggcag

SEQ ID NO: 2874068 - RNA, 19 nt, Artificial Sequence
  Description of Artificial Sequence: Synthetic oligonucleotide
ugucaguucccaccacucc

SEQ ID NO: 2874069 - RNA, 19 nt, Artificial Sequence
  Description of Artificial Sequence: Synthetic oligonucleotide
gguauuuggaucagggugc

SEQ ID NO: 2874070 - RNA, 19 nt, Artificial Sequence
  Description of Artificial Sequence: Synthetic oligonucleotide
aagauaucccagguauuug

SEQ ID NO: 2874071 - RNA, 19 nt, Artificial Sequence
  Description of Artificial Sequence: Synthetic oligonucleotide
agauagagaacagggugag

SEQ ID NO: 2874072 - RNA, 19 nt, Artificial Sequence
  Description of Artificial Sequence: Synthetic oligonucleotide
aguuugugucaguucccac

SEQ ID NO: 2874073 - RNA, 19 nt, Artificial Sequence
  Description of Artificial Sequence: Synthetic oligonucleotide
gagauagagaacaggguga

SEQ ID NO: 2874074 - RNA, 19 nt, Artificial Sequence
  Description of Artificial Sequence: Synthetic oligonucleotide
cacuuucccagccaugaag

SEQ ID NO: 2874075 - RNA, 19 nt, Artificial Sequence
  Description of Artificial Sequence: Synthetic oligonucleotide
cagaugugucuuaauuagc

SEQ ID NO: 2874076 - RNA, 19 nt, Artificial Sequence
  Description of Artificial Sequence: Synthetic oligonucleotide
ucccuuuugggauucuccu

SEQ ID NO: 2874077 - RNA, 19 nt, Artificial Sequence
  Description of Artificial Sequence: Synthetic oligonucleotide
uccuucaugucuucauaga

SEQ ID NO: 2874078 - RNA, 19 nt, Artificial Sequence
  Description of Artificial Sequence: Synthetic oligonucleotide
gauucaagacccgagggaa

SEQ ID NO: 2874079 - RNA, 19 nt, Artificial Sequence
  Description of Artificial Sequence: Synthetic oligonucleotide
uggugucucuuccaaagau

SEQ ID NO: 2874080 - RNA, 19 nt, Artificial Sequence
  Description of Artificial Sequence: Synthetic oligonucleotide
accacgacccauaggacac

SEQ ID NO: 2874081 - RNA, 19 nt, Artificial Sequence
  Description of Artificial Sequence: Synthetic oligonucleotide
caugucuucauagaagaga

SEQ ID NO: 2874082 - RNA, 19 nt, Artificial Sequence
  Description of Artificial Sequence: Synthetic oligonucleotide
cauguuguagaaguuauaa

SEQ ID NO: 2874083 - RNA, 19 nt, Artificial Sequence
  Description of Artificial Sequence: Synthetic oligonucleotide
cucccuuuugggauucucc

SEQ ID NO: 2874084 - RNA, 19 nt, Artificial Sequence
  Description of Artificial Sequence: Synthetic oligonucleotide
acagccacauccuuuggau

SEQ ID NO: 2874085 - RNA, 19 nt, Artificial Sequence
  Description of Artificial Sequence: Synthetic oligonucleotide
cuugaucucccuuuuggga

SEQ ID NO: 2874086 - RNA, 19 nt, Artificial Sequence
  Description of Artificial Sequence: Synthetic oligonucleotide
ccagguauuuggaucaggg

SEQ ID NO: 2874087 - RNA, 19 nt, Artificial Sequence
  Description of Artificial Sequence: Synthetic oligonucleotide
uaggagacagccacauccu

SEQ ID NO: 2874088 - RNA, 19 nt, Artificial Sequence
  Description of Artificial Sequence: Synthetic oligonucleotide
uaauaggagacagccacau

SEQ ID NO: 2874089 - RNA, 19 nt, Artificial Sequence
  Description of Artificial Sequence: Synthetic oligonucleotide
ugucucuuccaaagauuca

SEQ ID NO: 2874090 - RNA, 19 nt, Artificial Sequence
  Description of Artificial Sequence: Synthetic oligonucleotide
agagaacagggugaguuug

SEQ ID NO: 2874091 - RNA, 19 nt, Artificial Sequence
  Description of Artificial Sequence: Synthetic oligonucleotide
auguuguagaaguuauaau

SEQ ID NO: 2874092 - RNA, 19 nt, Artificial Sequence
  Description of Artificial Sequence: Synthetic oligonucleotide
ggcaacguagaucaccuug

SEQ ID NO: 2874093 - RNA, 19 nt, Artificial Sequence
  Description of Artificial Sequence: Synthetic oligonucleotide
cucugagggagcaaggaca

SEQ ID NO: 2874094 - RNA, 19 nt, Artificial Sequence
  Description of Artificial Sequence: Synthetic oligonucleotide
gacacuuucccagccauga

SEQ ID NO: 2874095 - RNA, 19 nt, Artificial Sequence
  Description of Artificial Sequence: Synthetic oligonucleotide
uucaagacccgagggaacu

SEQ ID NO: 2874096 - RNA, 19 nt, Artificial Sequence
  Description of Artificial Sequence: Synthetic oligonucleotide
ucacgugcugguaccacga

SEQ ID NO: 2874097 - RNA, 19 nt, Artificial Sequence
  Description of Artificial Sequence: Synthetic oligonucleotide
accuuggccauguuguaga

SEQ ID NO: 2874098 - RNA, 19 nt, Artificial Sequence
  Description of Artificial Sequence: Synthetic oligonucleotide
uaauuagccgugggucugg

SEQ ID NO: 2874099 - RNA, 19 nt, Artificial Sequence
  Description of Artificial Sequence: Synthetic oligonucleotide
cuuuggauuucgggcaacg

SEQ ID NO: 2874100 - RNA, 19 nt, Artificial Sequence
  Description of Artificial Sequence: Synthetic oligonucleotide
ugggucuggugucucuucc

SEQ ID NO: 2874101 - RNA, 19 nt, Artificial Sequence
  Description of Artificial Sequence: Synthetic oligonucleotide
uccuucacgugcugguacc

SEQ ID NO: 2874102 - RNA, 19 nt, Artificial Sequence
  Description of Artificial Sequence: Synthetic oligonucleotide
cugggcaucgaaacucaag

SEQ ID NO: 2874103 - RNA, 19 nt, Artificial Sequence
  Description of Artificial Sequence: Synthetic oligonucleotide
guucuccaggaagauaucc

SEQ ID NO: 2874104 - RNA, 19 nt, Artificial Sequence
  Description of Artificial Sequence: Synthetic oligonucleotide
agccacauccuuuggauuu

SEQ ID NO: 2874105 - RNA, 19 nt, Artificial Sequence
  Description of Artificial Sequence: Synthetic oligonucleotide
cucuuccaaagauucaaga

SEQ ID NO: 2874106 - RNA, 19 nt, Artificial Sequence
  Description of Artificial Sequence: Synthetic oligonucleotide
cuccaggaagauaucccag

SEQ ID NO: 2874107 - RNA, 19 nt, Artificial Sequence
  Description of Artificial Sequence: Synthetic oligonucleotide
ccauaggacacuuucccag

SEQ ID NO: 2874108 - RNA, 19 nt, Artificial Sequence
  Description of Artificial Sequence: Synthetic oligonucleotide
uuucccagccaugaaguuc

SEQ ID NO: 2874109 - RNA, 19 nt, Artificial Sequence
  Description of Artificial Sequence: Synthetic oligonucleotide
guucccaccacuccuucac

SEQ ID NO: 2874110 - RNA, 19 nt, Artificial Sequence
  Description of Artificial Sequence: Synthetic oligonucleotide
uucccaccacuccuucacg

SEQ ID NO: 2874111 - RNA, 19 nt, Artificial Sequence
  Description of Artificial Sequence: Synthetic oligonucleotide
ucgggcaacguagaucacc

SEQ ID NO: 2874112 - RNA, 19 nt, Artificial Sequence
  Description of Artificial Sequence: Synthetic oligonucleotide
aggacagaggcagaugugu

SEQ ID NO: 2874113 - RNA, 19 nt, Artificial Sequence
  Description of Artificial Sequence: Synthetic oligonucleotide
gugucucuuccaaagauuc

SEQ ID NO: 2874114 - RNA, 19 nt, Artificial Sequence
  Description of Artificial Sequence: Synthetic oligonucleotide
auaucccagguauuuggau

SEQ ID NO: 2874115 - RNA, 19 nt, Artificial Sequence
  Description of Artificial Sequence: Synthetic oligonucleotide
cucuaguaccuucuugauc

SEQ ID NO: 2874116 - RNA, 19 nt, Artificial Sequence
  Description of Artificial Sequence: Synthetic oligonucleotide
acagggugaguuuguguca

SEQ ID NO: 2874117 - RNA, 19 nt, Artificial Sequence
  Description of Artificial Sequence: Synthetic oligonucleotide
ucaccuugaucuucugauc

SEQ ID NO: 2874118 - RNA, 19 nt, Artificial Sequence
  Description of Artificial Sequence: Synthetic oligonucleotide
uccugggcaucgaaacuca

SEQ ID NO: 2874119 - RNA, 19 nt, Artificial Sequence
  Description of Artificial Sequence: Synthetic oligonucleotide
ugguaccacgacccauagg

SEQ ID NO: 2874120 - RNA, 19 nt, Artificial Sequence
  Description of Artificial Sequence: Synthetic oligonucleotide
auucaagacccgagggaac

SEQ ID NO: 2874121 - RNA, 19 nt, Artificial Sequence
  Description of Artificial Sequence: Synthetic oligonucleotide
gugucuuaauuagccgugg

SEQ ID NO: 2874122 - RNA, 19 nt, Artificial Sequence
  Description of Artificial Sequence: Synthetic oligonucleotide
cuuaauuagccgugggucu

SEQ ID NO: 2874123 - RNA, 19 nt, Artificial Sequence
  Description of Artificial Sequence: Synthetic oligonucleotide
gagggagcaaggacagagg

SEQ ID NO: 2874124 - RNA, 19 nt, Artificial Sequence
  Description of Artificial Sequence: Synthetic oligonucleotide
gacagccacauccuuugga

SEQ ID NO: 2874125 - RNA, 19 nt, Artificial Sequence
  Description of Artificial Sequence: Synthetic oligonucleotide
gacccauaggacacuuucc

SEQ ID NO: 2874126 - RNA, 19 nt, Artificial Sequence
  Description of Artificial Sequence: Synthetic oligonucleotide
uuuggauuucgggcaacgu

SEQ ID NO: 2874127 - RNA, 19 nt, Artificial Sequence
  Description of Artificial Sequence: Synthetic oligonucleotide
cagccaugaaguucuccag

SEQ ID NO: 2874128 - RNA, 19 nt, Artificial Sequence
  Description of Artificial Sequence: Synthetic oligonucleotide
uagagaacagggugaguuu

SEQ ID NO: 2874129 - RNA, 19 nt, Artificial Sequence
  Description of Artificial Sequence: Synthetic oligonucleotide
uccucaggcagagagcguc

SEQ ID NO: 2874130 - RNA, 19 nt, Artificial Sequence
  Description of Artificial Sequence: Synthetic oligonucleotide
acucuaguaccuucuugau

SEQ ID NO: 2874131 - RNA, 19 nt, Artificial Sequence
  Description of Artificial Sequence: Synthetic oligonucleotide
acccgagggaacuccuggg

SEQ ID NO: 2874132 - RNA, 19 nt, Artificial Sequence
  Description of Artificial Sequence: Synthetic oligonucleotide
ggcaucgaaacucaaggaa

SEQ ID NO: 2874133 - RNA, 19 nt, Artificial Sequence
  Description of Artificial Sequence: Synthetic oligonucleotide
uccuuuggauuucgggcaa

SEQ ID NO: 2874134 - RNA, 19 nt, Artificial Sequence
  Description of Artificial Sequence: Synthetic oligonucleotide
ucaguucccaccacuccuu

SEQ ID NO: 2874135 - RNA, 19 nt, Artificial Sequence
  Description of Artificial Sequence: Synthetic oligonucleotide
aaggacagaggcagaugug

SEQ ID NO: 2874136 - RNA, 19 nt, Artificial Sequence
  Description of Artificial Sequence: Synthetic oligonucleotide
ugggauucuccuucauguc

SEQ ID NO: 2874137 - RNA, 19 nt, Artificial Sequence
  Description of Artificial Sequence: Synthetic oligonucleotide
uccagcagacucugaggga

SEQ ID NO: 2874138 - RNA, 19 nt, Artificial Sequence
  Description of Artificial Sequence: Synthetic oligonucleotide
cacauccuuuggauuucgg

SEQ ID NO: 2874139 - RNA, 19 nt, Artificial Sequence
  Description of Artificial Sequence: Synthetic oligonucleotide
gucucuuccaaagauucaa

SEQ ID NO: 2874140 - RNA, 19 nt, Artificial Sequence
  Description of Artificial Sequence: Synthetic oligonucleotide
cgugcugguaccacgaccc

SEQ ID NO: 2874141 - RNA, 19 nt, Artificial Sequence
  Description of Artificial Sequence: Synthetic oligonucleotide
gaucagggugcaccuuggc

SEQ ID NO: 2874142 - RNA, 19 nt, Artificial Sequence
  Description of Artificial Sequence: Synthetic oligonucleotide
uuuugggauucuccuucau

SEQ ID NO: 2874143 - RNA, 19 nt, Artificial Sequence
  Description of Artificial Sequence: Synthetic oligonucleotide
gaagauaucccagguauuu

SEQ ID NO: 2874144 - RNA, 19 nt, Artificial Sequence
  Description of Artificial Sequence: Synthetic oligonucleotide
auaauaggagacagccaca

SEQ ID NO: 2874145 - RNA, 19 nt, Artificial Sequence
  Description of Artificial Sequence: Synthetic oligonucleotide
gaguuugugucaguuccca

SEQ ID NO: 2874146 - RNA, 19 nt, Artificial Sequence
  Description of Artificial Sequence: Synthetic oligonucleotide
caagacccgagggaacucc

SEQ ID NO: 2874147 - RNA, 19 nt, Artificial Sequence
  Description of Artificial Sequence: Synthetic oligonucleotide
agacagccacauccuuugg

SEQ ID NO: 2874148 - RNA, 19 nt, Artificial Sequence
  Description of Artificial Sequence: Synthetic oligonucleotide
ucccaccacuccuucacgu

SEQ ID NO: 2874149 - RNA, 19 nt, Artificial Sequence
  Description of Artificial Sequence: Synthetic oligonucleotide
gauucuccuucaugucuuc

SEQ ID NO: 2874150 - RNA, 19 nt, Artificial Sequence
  Description of Artificial Sequence: Synthetic oligonucleotide
ugucuucauagaagagaua

SEQ ID NO: 2874151 - RNA, 19 nt, Artificial Sequence
  Description of Artificial Sequence: Synthetic oligonucleotide
ucaggcagagagcguccca

SEQ ID NO: 2874152 - RNA, 19 nt, Artificial Sequence
  Description of Artificial Sequence: Synthetic oligonucleotide
ccuuuugggauucuccuuc

SEQ ID NO: 2874153 - RNA, 19 nt, Artificial Sequence
  Description of Artificial Sequence: Synthetic oligonucleotide
guagaucaccuugaucuuc

SEQ ID NO: 2874154 - RNA, 19 nt, Artificial Sequence
  Description of Artificial Sequence: Synthetic oligonucleotide
cagggugaguuugugucag

SEQ ID NO: 2874155 - RNA, 19 nt, Artificial Sequence
  Description of Artificial Sequence: Synthetic oligonucleotide
ucuucugauccagcagacu

SEQ ID NO: 2874156 - RNA, 19 nt, Artificial Sequence
  Description of Artificial Sequence: Synthetic oligonucleotide
cuccugggcaucgaaacuc

SEQ ID NO: 2874157 - RNA, 19 nt, Artificial Sequence
  Description of Artificial Sequence: Synthetic oligonucleotide
gucuuaauuagccgugggu

SEQ ID NO: 2874158 - RNA, 19 nt, Artificial Sequence
  Description of Artificial Sequence: Synthetic oligonucleotide
gugcaccuuggccauguug

SEQ ID NO: 2874159 - RNA, 19 nt, Artificial Sequence
  Description of Artificial Sequence: Synthetic oligonucleotide
cugguaccacgacccauag

SEQ ID NO: 2874160 - RNA, 19 nt, Artificial Sequence
  Description of Artificial Sequence: Synthetic oligonucleotide
ggugaguuugugucaguuc

SEQ ID NO: 2874161 - RNA, 19 nt, Artificial Sequence
  Description of Artificial Sequence: Synthetic oligonucleotide
uaccuucuugaucucccuu

SEQ ID NO: 2874162 - RNA, 19 nt, Artificial Sequence
  Description of Artificial Sequence: Synthetic oligonucleotide
aguucccaccacuccuuca

SEQ ID NO: 2874163 - RNA, 19 nt, Artificial Sequence
  Description of Artificial Sequence: Synthetic oligonucleotide
aguucuccaggaagauauc

SEQ ID NO: 2874164 - RNA, 19 nt, Artificial Sequence
  Description of Artificial Sequence: Synthetic oligonucleotide
agaucaccuugaucuucug

SEQ ID NO: 2874165 - RNA, 19 nt, Artificial Sequence
  Description of Artificial Sequence: Synthetic oligonucleotide
gucaguucccaccacuccu

SEQ ID NO: 2874166 - RNA, 19 nt, Artificial Sequence
  Description of Artificial Sequence: Synthetic oligonucleotide
acagaggcagaugugucuu

SEQ ID NO: 2874167 - RNA, 19 nt, Artificial Sequence
  Description of Artificial Sequence: Synthetic oligonucleotide
aauuagccgugggucuggu

SEQ ID NO: 2874168 - RNA, 19 nt, Artificial Sequence
  Description of Artificial Sequence: Synthetic oligonucleotide
ccagcagacucugagggag

SEQ ID NO: 2874169 - RNA, 19 nt, Artificial Sequence
  Description of Artificial Sequence: Synthetic oligonucleotide
caccuuggccauguuguag

SEQ ID NO: 2874170 - RNA, 19 nt, Artificial Sequence
  Description of Artificial Sequence: Synthetic oligonucleotide
agggaacuccugggcaucg

SEQ ID NO: 2874171 - RNA, 19 nt, Artificial Sequence
  Description of Artificial Sequence: Synthetic oligonucleotide
ccagccaugaaguucucca

SEQ ID NO: 2874172 - RNA, 19 nt, Artificial Sequence
  Description of Artificial Sequence: Synthetic oligonucleotide
auuagccgugggucuggug

SEQ ID NO: 2874173 - RNA, 19 nt, Artificial Sequence
  Description of Artificial Sequence: Synthetic oligonucleotide
gaacagggugaguuugugu

SEQ ID NO: 2874174 - RNA, 19 nt, Artificial Sequence
  Description of Artificial Sequence: Synthetic oligonucleotide
uugugucaguucccaccac

SEQ ID NO: 2874175 - RNA, 19 nt, Artificial Sequence
  Description of Artificial Sequence: Synthetic oligonucleotide
cagcagacucugagggagc

SEQ ID NO: 2874176 - RNA, 19 nt, Artificial Sequence
  Description of Artificial Sequence: Synthetic oligonucleotide
agaggcagaugugucuuaa

SEQ ID NO: 2874177 - RNA, 19 nt, Artificial Sequence
  Description of Artificial Sequence: Synthetic oligonucleotide
aagacccgagggaacuccu

SEQ ID NO: 2874178 - RNA, 19 nt, Artificial Sequence
  Description of Artificial Sequence: Synthetic oligonucleotide
gaaguucuccaggaagaua

SEQ ID NO: 2874179 - RNA, 19 nt, Artificial Sequence
  Description of Artificial Sequence: Synthetic oligonucleotide
agcagacucugagggagca

SEQ ID NO: 2874180 - RNA, 19 nt, Artificial Sequence
  Description of Artificial Sequence: Synthetic oligonucleotide
guauuuggaucagggugca

SEQ ID NO: 2874181 - RNA, 19 nt, Artificial Sequence
  Description of Artificial Sequence: Synthetic oligonucleotide
auucuccuucaugucuuca

SEQ ID NO: 2874182 - RNA, 19 nt, Artificial Sequence
  Description of Artificial Sequence: Synthetic oligonucleotide
ucucccuuuugggauucuc

SEQ ID NO: 2874183 - RNA, 19 nt, Artificial Sequence
  Description of Artificial Sequence: Synthetic oligonucleotide
cucaggcagagagcguccc

SEQ ID NO: 2874184 - RNA, 19 nt, Artificial Sequence
  Description of Artificial Sequence: Synthetic oligonucleotide
gucuccucaggcagagagc

SEQ ID NO: 2874185 - RNA, 19 nt, Artificial Sequence
  Description of Artificial Sequence: Synthetic oligonucleotide
gcaacguagaucaccuuga

SEQ ID NO: 2874186 - RNA, 19 nt, Artificial Sequence
  Description of Artificial Sequence: Synthetic oligonucleotide
ucccagguauuuggaucag

SEQ ID NO: 2874187 - RNA, 19 nt, Artificial Sequence
  Description of Artificial Sequence: Synthetic oligonucleotide
ucaagacccgagggaacuc

SEQ ID NO: 2874188 - RNA, 19 nt, Artificial Sequence
  Description of Artificial Sequence: Synthetic oligonucleotide
uggccauguuguagaaguu

SEQ ID NO: 2874189 - RNA, 19 nt, Artificial Sequence
  Description of Artificial Sequence: Synthetic oligonucleotide
acacuuucccagccaugaa

SEQ ID NO: 2874190 - RNA, 19 nt, Artificial Sequence
  Description of Artificial Sequence: Synthetic oligonucleotide
gaucucccuuuugggauuc

SEQ ID NO: 2874191 - RNA, 19 nt, Artificial Sequence
  Description of Artificial Sequence: Synthetic oligonucleotide
ccaccacuccuucacgugc

SEQ ID NO: 2874192 - RNA, 19 nt, Artificial Sequence
  Description of Artificial Sequence: Synthetic oligonucleotide
cuggugucucuuccaaaga

SEQ ID NO: 2874193 - RNA, 19 nt, Artificial Sequence
  Description of Artificial Sequence: Synthetic oligonucleotide
gaacuccugggcaucgaaa

SEQ ID NO: 2874194 - RNA, 19 nt, Artificial Sequence
  Description of Artificial Sequence: Synthetic oligonucleotide
ggaucagggugcaccuugg

SEQ ID NO: 2874195 - RNA, 19 nt, Artificial Sequence
  Description of Artificial Sequence: Synthetic oligonucleotide
gggauucuccuucaugucu

SEQ ID NO: 2874196 - RNA, 19 nt, Artificial Sequence
  Description of Artificial Sequence: Synthetic oligonucleotide
aggagacagccacauccuu

SEQ ID NO: 2874197 - RNA, 19 nt, Artificial Sequence
  Description of Artificial Sequence: Synthetic oligonucleotide
uauuuggaucagggugcac

SEQ ID NO: 2874198 - RNA, 19 nt, Artificial Sequence
  Description of Artificial Sequence: Synthetic oligonucleotide
gauuucgggcaacguagau

SEQ ID NO: 2874199 - RNA, 19 nt, Artificial Sequence
  Description of Artificial Sequence: Synthetic oligonucleotide
gggcaucgaaacucaagga

SEQ ID NO: 2874200 - RNA, 19 nt, Artificial Sequence
  Description of Artificial Sequence: Synthetic oligonucleotide
ugcugguaccacgacccau

SEQ ID NO: 2874201 - RNA, 19 nt, Artificial Sequence
  Description of Artificial Sequence: Synthetic oligonucleotide
cacagucuccucaggcaga

SEQ ID NO: 2874202 - RNA, 19 nt, Artificial Sequence
  Description of Artificial Sequence: Synthetic oligonucleotide
caggaagauaucccaggua

SEQ ID NO: 2874203 - RNA, 19 nt, Artificial Sequence
  Description of Artificial Sequence: Synthetic oligonucleotide
gagggaacuccugggcauc

SEQ ID NO: 2874204 - RNA, 19 nt, Artificial Sequence
  Description of Artificial Sequence: Synthetic oligonucleotide
guaccacgacccauaggac

SEQ ID NO: 2874205 - RNA, 19 nt, Artificial Sequence
  Description of Artificial Sequence: Synthetic oligonucleotide
cagguauuuggaucagggu

SEQ ID NO: 2874206 - RNA, 19 nt, Artificial Sequence
  Description of Artificial Sequence: Synthetic oligonucleotide
uucgggcaacguagaucac

SEQ ID NO: 2874207 - RNA, 19 nt, Artificial Sequence
  Description of Artificial Sequence: Synthetic oligonucleotide
cgacccauaggacacuuuc

SEQ ID NO: 2874208 - RNA, 19 nt, Artificial Sequence
  Description of Artificial Sequence: Synthetic oligonucleotide
agggugaguuugugucagu

SEQ ID NO: 2874209 - RNA, 19 nt, Artificial Sequence
  Description of Artificial Sequence: Synthetic oligonucleotide
gugggucuggugucucuuc

SEQ ID NO: 2874210 - RNA, 19 nt, Artificial Sequence
  Description of Artificial Sequence: Synthetic oligonucleotide
aggcagagagcgucccaaa

SEQ ID NO: 2874211 - RNA, 19 nt, Artificial Sequence
  Description of Artificial Sequence: Synthetic oligonucleotide
cacgugcugguaccacgac

SEQ ID NO: 2874212 - RNA, 19 nt, Artificial Sequence
  Description of Artificial Sequence: Synthetic oligonucleotide
caguucccaccacuccuuc

SEQ ID NO: 2874213 - RNA, 19 nt, Artificial Sequence
  Description of Artificial Sequence: Synthetic oligonucleotide
gagaacagggugaguuugu

SEQ ID NO: 2874214 - RNA, 19 nt, Artificial Sequence
  Description of Artificial Sequence: Synthetic oligonucleotide
gucuggugucucuuccaaa

SEQ ID NO: 2874215 - RNA, 19 nt, Artificial Sequence
  Description of Artificial Sequence: Synthetic oligonucleotide
ccaaagauucaagacccga

SEQ ID NO: 2874216 - RNA, 19 nt, Artificial Sequence
  Description of Artificial Sequence: Synthetic oligonucleotide
cccgagggaacuccugggc

SEQ ID NO: 2874217 - RNA, 19 nt, Artificial Sequence
  Description of Artificial Sequence: Synthetic oligonucleotide
gauagagaacagggugagu

SEQ ID NO: 2874218 - RNA, 19 nt, Artificial Sequence
  Description of Artificial Sequence: Synthetic oligonucleotide
gcaaggacagaggcagaug

SEQ ID NO: 2874219 - RNA, 19 nt, Artificial Sequence
  Description of Artificial Sequence: Synthetic oligonucleotide
cacuccuucacgugcuggu

SEQ ID NO: 2874220 - RNA, 19 nt, Artificial Sequence
  Description of Artificial Sequence: Synthetic oligonucleotide
ggaacuccugggcaucgaa

SEQ ID NO: 2874221 - RNA, 19 nt, Artificial Sequence
  Description of Artificial Sequence: Synthetic oligonucleotide
ggcagagagcgucccaaaa

SEQ ID NO: 2874222 - RNA, 19 nt, Artificial Sequence
  Description of Artificial Sequence: Synthetic oligonucleotide
ccucaggcagagagcgucc

SEQ ID NO: 2874223 - RNA, 19 nt, Artificial Sequence
  Description of Artificial Sequence: Synthetic oligonucleotide
cccaccacuccuucacgug

SEQ ID NO: 2874224 - RNA, 19 nt, Artificial Sequence
  Description of Artificial Sequence: Synthetic oligonucleotide
ggccauguuguagaaguua

SEQ ID NO: 2874225 - RNA, 19 nt, Artificial Sequence
  Description of Artificial Sequence: Synthetic oligonucleotide
gggagcaaggacagaggca

SEQ ID NO: 2874226 - RNA, 19 nt, Artificial Sequence
  Description of Artificial Sequence: Synthetic oligonucleotide
uuggaucagggugcaccuu

SEQ ID NO: 2874227 - RNA, 19 nt, Artificial Sequence
  Description of Artificial Sequence: Synthetic oligonucleotide
ggauuucgggcaacguaga

SEQ ID NO: 2874228 - RNA, 19 nt, Artificial Sequence
  Description of Artificial Sequence: Synthetic oligonucleotide
cccauaggacacuuuccca

SEQ ID NO: 2874229 - RNA, 19 nt, Artificial Sequence
  Description of Artificial Sequence: Synthetic oligonucleotide
gggucuggugucucuucca

SEQ ID NO: 2874230 - RNA, 19 nt, Artificial Sequence
  Description of Artificial Sequence: Synthetic oligonucleotide
ccacauccuuuggauuucg

SEQ ID NO: 2874231 - RNA, 19 nt, Artificial Sequence
  Description of Artificial Sequence: Synthetic oligonucleotide
ggacacuuucccagccaug

SEQ ID NO: 2874232 - RNA, 19 nt, Artificial Sequence
  Description of Artificial Sequence: Synthetic oligonucleotide
cccagguauuuggaucagg

SEQ ID NO: 2874233 - RNA, 19 nt, Artificial Sequence
  Description of Artificial Sequence: Synthetic oligonucleotide
cugauccagcagacucuga

SEQ ID NO: 2874234 - RNA, 19 nt, Artificial Sequence
  Description of Artificial Sequence: Synthetic oligonucleotide
gagcaaggacagaggcaga

SEQ ID NO: 2874235 - RNA, 19 nt, Artificial Sequence
  Description of Artificial Sequence: Synthetic oligonucleotide
gugcugguaccacgaccca

SEQ ID NO: 2874236 - RNA, 19 nt, Artificial Sequence
  Description of Artificial Sequence: Synthetic oligonucleotide
gcugguaccacgacccaua

SEQ ID NO: 2874237 - RNA, 19 nt, Artificial Sequence
  Description of Artificial Sequence: Synthetic oligonucleotide
caccacuccuucacgugcu

SEQ ID NO: 2874238 - RNA, 19 nt, Artificial Sequence
  Description of Artificial Sequence: Synthetic oligonucleotide
gccauguuguagaaguuau

SEQ ID NO: 2874239 - RNA, 19 nt, Artificial Sequence
  Description of Artificial Sequence: Synthetic oligonucleotide
ucccagccaugaaguucuc

SEQ ID NO: 2874240 - RNA, 19 nt, Artificial Sequence
  Description of Artificial Sequence: Synthetic oligonucleotide
caacguagaucaccuugau

SEQ ID NO: 2874241 - RNA, 19 nt, Artificial Sequence
  Description of Artificial Sequence: Synthetic oligonucleotide
ccgagggaacuccugggca

SEQ ID NO: 2874242 - RNA, 19 nt, Artificial Sequence
  Description of Artificial Sequence: Synthetic oligonucleotide
cuuucccagccaugaaguu

SEQ ID NO: 2874243 - RNA, 19 nt, Artificial Sequence
  Description of Artificial Sequence: Synthetic oligonucleotide
cagaggcagaugugucuua

SEQ ID NO: 2874244 - RNA, 19 nt, Artificial Sequence
  Description of Artificial Sequence: Synthetic oligonucleotide
ggauucuccuucaugucuu

SEQ ID NO: 2874245 - RNA, 19 nt, Artificial Sequence
  Description of Artificial Sequence: Synthetic oligonucleotide
ggugucucuuccaaagauu

SEQ ID NO: 2874246 - RNA, 19 nt, Artificial Sequence
  Description of Artificial Sequence: Synthetic oligonucleotide
gccacauccuuuggauuuc

SEQ ID NO: 2874247 - RNA, 19 nt, Artificial Sequence
  Description of Artificial Sequence: Synthetic oligonucleotide
ccaggaagauaucccaggu

SEQ ID NO: 2874248 - RNA, 19 nt, Artificial Sequence
  Description of Artificial Sequence: Synthetic oligonucleotide
ccauguuguagaaguuaua

SEQ ID NO: 2874249 - RNA, 19 nt, Artificial Sequence
  Description of Artificial Sequence: Synthetic oligonucleotide
ccaugaaguucuccaggaa

SEQ ID NO: 2874250 - RNA, 19 nt, Artificial Sequence
  Description of Artificial Sequence: Synthetic oligonucleotide
cccagccaugaaguucucc

SEQ ID NO: 2874251 - RNA, 19 nt, Artificial Sequence
  Description of Artificial Sequence: Synthetic oligonucleotide
aucucccuuuugggauucu

SEQ ID NO: 2874252 - RNA, 19 nt, Artificial Sequence
  Description of Artificial Sequence: Synthetic oligonucleotide
ggagacagccacauccuuu

SEQ ID NO: 2874253 - RNA, 19 nt, Artificial Sequence
  Description of Artificial Sequence: Synthetic oligonucleotide
cagggugcaccuuggccau

SEQ ID NO: 2874254 - RNA, 19 nt, Artificial Sequence
  Description of Artificial Sequence: Synthetic oligonucleotide
ccuuuggauuucgggcaac

SEQ ID NO: 2874255 - RNA, 19 nt, Artificial Sequence
  Description of Artificial Sequence: Synthetic oligonucleotide
agggugcaccuuggccaug

SEQ ID NO: 2874256 - RNA, 19 nt, Artificial Sequence
  Description of Artificial Sequence: Synthetic oligonucleotide
ggaagauaucccagguauu

SEQ ID NO: 2874257 - RNA, 19 nt, Artificial Sequence
  Description of Artificial Sequence: Synthetic oligonucleotide
acgacccauaggacacuuu

SEQ ID NO: 2874258 - RNA, 19 nt, Artificial Sequence
  Description of Artificial Sequence: Synthetic oligonucleotide
cugagggagcaaggacaga

SEQ ID NO: 2874259 - RNA, 19 nt, Artificial Sequence
  Description of Artificial Sequence: Synthetic oligonucleotide
cagccacauccuuuggauu

SEQ ID NO: 2874260 - RNA, 19 nt, Artificial Sequence
  Description of Artificial Sequence: Synthetic oligonucleotide
gcaccuuggccauguugua

SEQ ID NO: 2874261 - RNA, 19 nt, Artificial Sequence
  Description of Artificial Sequence: Synthetic oligonucleotide
cgggcaacguagaucaccu

SEQ ID NO: 2874262 - RNA, 19 nt, Artificial Sequence
  Description of Artificial Sequence: Synthetic oligonucleotide
gggugaguuugugucaguu

SEQ ID NO: 2874263 - RNA, 19 nt, Artificial Sequence
  Description of Artificial Sequence: Synthetic oligonucleotide
gggaacuccugggcaucga

SEQ ID NO: 2874264 - RNA, 19 nt, Artificial Sequence
  Description of Artificial Sequence: Synthetic oligonucleotide
gggugcaccuuggccaugu

SEQ ID NO: 2874265 - RNA, 19 nt, Artificial Sequence
  Description of Artificial Sequence: Synthetic oligonucleotide
ccugggcaucgaaacucaa

SEQ ID NO: 2874266 - RNA, 19 nt, Artificial Sequence
  Description of Artificial Sequence: Synthetic oligonucleotide
cagucuccucaggcagaga

SEQ ID NO: 2874267 - RNA, 19 nt, Artificial Sequence
  Description of Artificial Sequence: Synthetic oligonucleotide
cacgacccauaggacacuu

SEQ ID NO: 2874268 - RNA, 19 nt, Artificial Sequence
  Description of Artificial Sequence: Synthetic oligonucleotide
cccuuuugggauucuccuu

SEQ ID NO: 2874269 - RNA, 19 nt, Artificial Sequence
  Description of Artificial Sequence: Synthetic oligonucleotide
cgagggaacuccugggcau

SEQ ID NO: 2874270 - RNA, 19 nt, Artificial Sequence
  Description of Artificial Sequence: Synthetic oligonucleotide
cguagaucaccuugaucuu

SEQ ID NO: 2874271 - RNA, 19 nt, Artificial Sequence
  Description of Artificial Sequence: Synthetic oligonucleotide
gccgugggucuggugucuc

SEQ ID NO: 2874272 - RNA, 19 nt, Artificial Sequence
  Description of Artificial Sequence: Synthetic oligonucleotide
gggcaacguagaucaccuu

SEQ ID NO: 2874273 - RNA, 19 nt, Artificial Sequence
  Description of Artificial Sequence: Synthetic oligonucleotide
ggugcaccuuggccauguu

SEQ ID NO: 2874274 - RNA, 19 nt, Artificial Sequence
  Description of Artificial Sequence: Synthetic oligonucleotide
ccgugggucuggugucucu

SEQ ID NO: 2874275 - RNA, 19 nt, Artificial Sequence
  Description of Artificial Sequence: Synthetic oligonucleotide
ccacgacccauaggacacu

SEQ ID NO: 2874276 - RNA, 19 nt, Artificial Sequence
  Description of Artificial Sequence: Synthetic oligonucleotide
cgugggucuggugucucuu

SEQ ID NO: 2874277 - RNA, 19 nt, Artificial Sequence
  Description of Artificial Sequence: Synthetic oligonucleotide
uuaaucaggaacaauaacu

SEQ ID NO: 2874278 - RNA, 19 nt, Artificial Sequence
  Description of Artificial Sequence: Synthetic oligonucleotide
aaguuuuagaacuggauca

SEQ ID NO: 2874279 - RNA, 19 nt, Artificial Sequence
  Description of Artificial Sequence: Synthetic oligonucleotide
uuuccuugggcauacaggg

SEQ ID NO: 2874280 - RNA, 19 nt, Artificial Sequence
  Description of Artificial Sequence: Synthetic oligonucleotide
uuuugguuaaucaggaaca

SEQ ID NO: 2874281 - RNA, 19 nt, Artificial Sequence
  Description of Artificial Sequence: Synthetic oligonucleotide
aauaacuuauuuucuaaaa

SEQ ID NO: 2874282 - RNA, 19 nt, Artificial Sequence
  Description of Artificial Sequence: Synthetic oligonucleotide
aagacacaaguuuuagaac

SEQ ID NO: 2874283 - RNA, 19 nt, Artificial Sequence
  Description of Artificial Sequence: Synthetic oligonucleotide
aaaauuggcuuugucugcc

SEQ ID NO: 2874284 - RNA, 19 nt, Artificial Sequence
  Description of Artificial Sequence: Synthetic oligonucleotide
ucugcuuccgaucguagcg

SEQ ID NO: 2874285 - RNA, 19 nt, Artificial Sequence
  Description of Artificial Sequence: Synthetic oligonucleotide
accguaaccacucugcuuc

SEQ ID NO: 2874286 - RNA, 19 nt, Artificial Sequence
  Description of Artificial Sequence: Synthetic oligonucleotide
uuacagaaaguccuucggg

SEQ ID NO: 2874287 - RNA, 19 nt, Artificial Sequence
  Description of Artificial Sequence: Synthetic oligonucleotide
gaagacacaaguuuuagaa

SEQ ID NO: 2874288 - RNA, 19 nt, Artificial Sequence
  Description of Artificial Sequence: Synthetic oligonucleotide
uacccgaugaaaacgagag

SEQ ID NO: 2874289 - RNA, 19 nt, Artificial Sequence
  Description of Artificial Sequence: Synthetic oligonucleotide
agacacaaguuuuagaacu

SEQ ID NO: 2874290 - RNA, 19 nt, Artificial Sequence
  Description of Artificial Sequence: Synthetic oligonucleotide
augaaaacgagagagccgg

SEQ ID NO: 2874291 - RNA, 19 nt, Artificial Sequence
  Description of Artificial Sequence: Synthetic oligonucleotide
ucuuacagaaaguccuucg

SEQ ID NO: 2874292 - RNA, 19 nt, Artificial Sequence
  Description of Artificial Sequence: Synthetic oligonucleotide
uacugggucacuuugugag

SEQ ID NO: 2874293 - RNA, 19 nt, Artificial Sequence
  Description of Artificial Sequence: Synthetic oligonucleotide
cacuuugugaggcugaugc

SEQ ID NO: 2874294 - RNA, 19 nt, Artificial Sequence
  Description of Artificial Sequence: Synthetic oligonucleotide
ugguuaaucaggaacaaua

SEQ ID NO: 2874295 - RNA, 19 nt, Artificial Sequence
  Description of Artificial Sequence: Synthetic oligonucleotide
auacagggaauccuugccc

SEQ ID NO: 2874296 - RNA, 19 nt, Artificial Sequence
  Description of Artificial Sequence: Synthetic oligonucleotide
cucuuaauggccagcaucc

SEQ ID NO: 2874297 - RNA, 19 nt, Artificial Sequence
  Description of Artificial Sequence: Synthetic oligonucleotide
uuaauggccagcauccucu

SEQ ID NO: 2874298 - RNA, 19 nt, Artificial Sequence
  Description of Artificial Sequence: Synthetic oligonucleotide
aacuuauuuucuaaaaggu

SEQ ID NO: 2874299 - RNA, 19 nt, Artificial Sequence
  Description of Artificial Sequence: Synthetic oligonucleotide
aaguccuucggguuuuagg

SEQ ID NO: 2874300 - RNA, 19 nt, Artificial Sequence
  Description of Artificial Sequence: Synthetic oligonucleotide
ggaaaauuggcuuugucug

SEQ ID NO: 2874301 - RNA, 19 nt, Artificial Sequence
  Description of Artificial Sequence: Synthetic oligonucleotide
cauuucuuacagaaagucc

SEQ ID NO: 2874302 - RNA, 19 nt, Artificial Sequence
  Description of Artificial Sequence: Synthetic oligonucleotide
auuucuuacagaaaguccu

SEQ ID NO: 2874303 - RNA, 19 nt, Artificial Sequence
  Description of Artificial Sequence: Synthetic oligonucleotide
cuucuuucggaaaauuggc

SEQ ID NO: 2874304 - RNA, 19 nt, Artificial Sequence
  Description of Artificial Sequence: Synthetic oligonucleotide
uuuuccucuuggaagacac

SEQ ID NO: 2874305 - RNA, 19 nt, Artificial Sequence
  Description of Artificial Sequence: Synthetic oligonucleotide
aaauuggcuuugucugccc

SEQ ID NO: 2874306 - RNA, 19 nt, Artificial Sequence
  Description of Artificial Sequence: Synthetic oligonucleotide
caaguuuuagaacuggauc

SEQ ID NO: 2874307 - RNA, 19 nt, Artificial Sequence
  Description of Artificial Sequence: Synthetic oligonucleotide
uuccgaauuuuccucuugg

SEQ ID NO: 2874308 - RNA, 19 nt, Artificial Sequence
  Description of Artificial Sequence: Synthetic oligonucleotide
cuuacagaaaguccuucgg

SEQ ID NO: 2874309 - RNA, 19 nt, Artificial Sequence
  Description of Artificial Sequence: Synthetic oligonucleotide
auggccagcauccucuucg

SEQ ID NO: 2874310 - RNA, 19 nt, Artificial Sequence
  Description of Artificial Sequence: Synthetic oligonucleotide
uauacugggucacuuugug

SEQ ID NO: 2874311 - RNA, 19 nt, Artificial Sequence
  Description of Artificial Sequence: Synthetic oligonucleotide
acguugaccaucuuugcag

SEQ ID NO: 2874312 - RNA, 19 nt, Artificial Sequence
  Description of Artificial Sequence: Synthetic oligonucleotide
guuuuagguacguugacca

SEQ ID NO: 2874313 - RNA, 19 nt, Artificial Sequence
  Description of Artificial Sequence: Synthetic oligonucleotide
ucggguuuuagguacguug

SEQ ID NO: 2874314 - RNA, 19 nt, Artificial Sequence
  Description of Artificial Sequence: Synthetic oligonucleotide
uuagguacguugaccaucu

SEQ ID NO: 2874315 - RNA, 19 nt, Artificial Sequence
  Description of Artificial Sequence: Synthetic oligonucleotide
aguccuucggguuuuaggu

SEQ ID NO: 2874316 - RNA, 19 nt, Artificial Sequence
  Description of Artificial Sequence: Synthetic oligonucleotide
uuauuuucuaaaaggucau

SEQ ID NO: 2874317 - RNA, 19 nt, Artificial Sequence
  Description of Artificial Sequence: Synthetic oligonucleotide
aaacgagagagccggcguc

SEQ ID NO: 2874318 - RNA, 19 nt, Artificial Sequence
  Description of Artificial Sequence: Synthetic oligonucleotide
uuugugaggcugaugcuug

SEQ ID NO: 2874319 - RNA, 19 nt, Artificial Sequence
  Description of Artificial Sequence: Synthetic oligonucleotide
ucuucgaucugcaguuggg

SEQ ID NO: 2874320 - RNA, 19 nt, Artificial Sequence
  Description of Artificial Sequence: Synthetic oligonucleotide
gaugaaaacgagagagccg

SEQ ID NO: 2874321 - RNA, 19 nt, Artificial Sequence
  Description of Artificial Sequence: Synthetic oligonucleotide
uacagaaaguccuucgggu

SEQ ID NO: 2874322 - RNA, 19 nt, Artificial Sequence
  Description of Artificial Sequence: Synthetic oligonucleotide
acauccaccgcacgaaccg

SEQ ID NO: 2874323 - RNA, 19 nt, Artificial Sequence
  Description of Artificial Sequence: Synthetic oligonucleotide
acaauaacuuauuuucuaa

SEQ ID NO: 2874324 - RNA, 19 nt, Artificial Sequence
  Description of Artificial Sequence: Synthetic oligonucleotide
accacucugcuuccgaucg

SEQ ID NO: 2874325 - RNA, 19 nt, Artificial Sequence
  Description of Artificial Sequence: Synthetic oligonucleotide
aaaacgagagagccggcgu

SEQ ID NO: 2874326 - RNA, 19 nt, Artificial Sequence
  Description of Artificial Sequence: Synthetic oligonucleotide
aguuuuagaacuggaucac

SEQ ID NO: 2874327 - RNA, 19 nt, Artificial Sequence
  Description of Artificial Sequence: Synthetic oligonucleotide
ugucuacccgaugaaaacg

SEQ ID NO: 2874328 - RNA, 19 nt, Artificial Sequence
  Description of Artificial Sequence: Synthetic oligonucleotide
cuuauacugggucacuuug

SEQ ID NO: 2874329 - RNA, 19 nt, Artificial Sequence
  Description of Artificial Sequence: Synthetic oligonucleotide
uuuuagaacuggaucacuu

SEQ ID NO: 2874330 - RNA, 19 nt, Artificial Sequence
  Description of Artificial Sequence: Synthetic oligonucleotide
ugaugcuugccacauuucu

SEQ ID NO: 2874331 - RNA, 19 nt, Artificial Sequence
  Description of Artificial Sequence: Synthetic oligonucleotide
uugcccuucuuauacuggg

SEQ ID NO: 2874332 - RNA, 19 nt, Artificial Sequence
  Description of Artificial Sequence: Synthetic oligonucleotide
uuuucuaaaaggucauuuu

SEQ ID NO: 2874333 - RNA, 19 nt, Artificial Sequence
  Description of Artificial Sequence: Synthetic oligonucleotide
uuuucuacugcuuccgaau

SEQ ID NO: 2874334 - RNA, 19 nt, Artificial Sequence
  Description of Artificial Sequence: Synthetic oligonucleotide
gggaucaccacauccaccg

SEQ ID NO: 2874335 - RNA, 19 nt, Artificial Sequence
  Description of Artificial Sequence: Synthetic oligonucleotide
ugcuugcaccucuuaaugg

SEQ ID NO: 2874336 - RNA, 19 nt, Artificial Sequence
  Description of Artificial Sequence: Synthetic oligonucleotide
acugcuuccgaauuuuccu

SEQ ID NO: 2874337 - RNA, 19 nt, Artificial Sequence
  Description of Artificial Sequence: Synthetic oligonucleotide
ccuucuuucggaaaauugg

SEQ ID NO: 2874338 - RNA, 19 nt, Artificial Sequence
  Description of Artificial Sequence: Synthetic oligonucleotide
uugaccaucuuugcagugg

SEQ ID NO: 2874339 - RNA, 19 nt, Artificial Sequence
  Description of Artificial Sequence: Synthetic oligonucleotide
gaaaacgagagagccggcg

SEQ ID NO: 2874340 - RNA, 19 nt, Artificial Sequence
  Description of Artificial Sequence: Synthetic oligonucleotide
guuaaucaggaacaauaac

SEQ ID NO: 2874341 - RNA, 19 nt, Artificial Sequence
  Description of Artificial Sequence: Synthetic oligonucleotide
aacgagagagccggcgucc

SEQ ID NO: 2874342 - RNA, 19 nt, Artificial Sequence
  Description of Artificial Sequence: Synthetic oligonucleotide
aggaacaauaacuuauuuu

SEQ ID NO: 2874343 - RNA, 19 nt, Artificial Sequence
  Description of Artificial Sequence: Synthetic oligonucleotide
cauacagggaauccuugcc

SEQ ID NO: 2874344 - RNA, 19 nt, Artificial Sequence
  Description of Artificial Sequence: Synthetic oligonucleotide
uacugcuuccgaauuuucc

SEQ ID NO: 2874345 - RNA, 19 nt, Artificial Sequence
  Description of Artificial Sequence: Synthetic oligonucleotide
aauuuuccucuuggaagac

SEQ ID NO: 2874346 - RNA, 19 nt, Artificial Sequence
  Description of Artificial Sequence: Synthetic oligonucleotide
uucuuucggaaaauuggcu

SEQ ID NO: 2874347 - RNA, 19 nt, Artificial Sequence
  Description of Artificial Sequence: Synthetic oligonucleotide
aaucaggaacaauaacuua

SEQ ID NO: 2874348 - RNA, 19 nt, Artificial Sequence
  Description of Artificial Sequence: Synthetic oligonucleotide
aaccacucugcuuccgauc

SEQ ID NO: 2874349 - RNA, 19 nt, Artificial Sequence
  Description of Artificial Sequence: Synthetic oligonucleotide
ugguuuuggccuucuuucg

SEQ ID NO: 2874350 - RNA, 19 nt, Artificial Sequence
  Description of Artificial Sequence: Synthetic oligonucleotide
ucuuucggaaaauuggcuu

SEQ ID NO: 2874351 - RNA, 19 nt, Artificial Sequence
  Description of Artificial Sequence: Synthetic oligonucleotide
cuuaucuccucccaguuca

SEQ ID NO: 2874352 - RNA, 19 nt, Artificial Sequence
  Description of Artificial Sequence: Synthetic oligonucleotide
accaucuuugcaguggagg

SEQ ID NO: 2874353 - RNA, 19 nt, Artificial Sequence
  Description of Artificial Sequence: Synthetic oligonucleotide
auuggcuuugucugcccac

SEQ ID NO: 2874354 - RNA, 19 nt, Artificial Sequence
  Description of Artificial Sequence: Synthetic oligonucleotide
uacguugaccaucuuugca

SEQ ID NO: 2874355 - RNA, 19 nt, Artificial Sequence
  Description of Artificial Sequence: Synthetic oligonucleotide
ccacauuucuuacagaaag

SEQ ID NO: 2874356 - RNA, 19 nt, Artificial Sequence
  Description of Artificial Sequence: Synthetic oligonucleotide
uuauacugggucacuuugu

SEQ ID NO: 2874357 - RNA, 19 nt, Artificial Sequence
  Description of Artificial Sequence: Synthetic oligonucleotide
aauuggcuuugucugccca

SEQ ID NO: 2874358 - RNA, 19 nt, Artificial Sequence
  Description of Artificial Sequence: Synthetic oligonucleotide
uccgggaucaccacaucca

SEQ ID NO: 2874359 - RNA, 19 nt, Artificial Sequence
  Description of Artificial Sequence: Synthetic oligonucleotide
gugguuuuggccuucuuuc

SEQ ID NO: 2874360 - RNA, 19 nt, Artificial Sequence
  Description of Artificial Sequence: Synthetic oligonucleotide
aucaggaacaauaacuuau

SEQ ID NO: 2874361 - RNA, 19 nt, Artificial Sequence
  Description of Artificial Sequence: Synthetic oligonucleotide
uuuagguacguugaccauc

SEQ ID NO: 2874362 - RNA, 19 nt, Artificial Sequence
  Description of Artificial Sequence: Synthetic oligonucleotide
uccuucggguuuuagguac

SEQ ID NO: 2874363 - RNA, 19 nt, Artificial Sequence
  Description of Artificial Sequence: Synthetic oligonucleotide
uggaagacacaaguuuuag

SEQ ID NO: 2874364 - RNA, 19 nt, Artificial Sequence
  Description of Artificial Sequence: Synthetic oligonucleotide
cuugcaccucuuaauggcc

SEQ ID NO: 2874365 - RNA, 19 nt, Artificial Sequence
  Description of Artificial Sequence: Synthetic oligonucleotide
auuuucuaaaaggucauuu

SEQ ID NO: 2874366 - RNA, 19 nt, Artificial Sequence
  Description of Artificial Sequence: Synthetic oligonucleotide
ucuacccgaugaaaacgag

SEQ ID NO: 2874367 - RNA, 19 nt, Artificial Sequence
  Description of Artificial Sequence: Synthetic oligonucleotide
gaucacuuggcccuuucuc

SEQ ID NO: 2874368 - RNA, 19 nt, Artificial Sequence
  Description of Artificial Sequence: Synthetic oligonucleotide
uugucugcccaccguaacc

SEQ ID NO: 2874369 - RNA, 19 nt, Artificial Sequence
  Description of Artificial Sequence: Synthetic oligonucleotide
uuggccuucuuucggaaaa

SEQ ID NO: 2874370 - RNA, 19 nt, Artificial Sequence
  Description of Artificial Sequence: Synthetic oligonucleotide
uccucuuggaagacacaag

SEQ ID NO: 2874371 - RNA, 19 nt, Artificial Sequence
  Description of Artificial Sequence: Synthetic oligonucleotide
acacaaguuuuagaacugg

SEQ ID NO: 2874372 - RNA, 19 nt, Artificial Sequence
  Description of Artificial Sequence: Synthetic oligonucleotide
uacagggaauccuugcccu

SEQ ID NO: 2874373 - RNA, 19 nt, Artificial Sequence
  Description of Artificial Sequence: Synthetic oligonucleotide
uugggcuccacacacucaa

SEQ ID NO: 2874374 - RNA, 19 nt, Artificial Sequence
  Description of Artificial Sequence: Synthetic oligonucleotide
cgaauuuuccucuuggaag

SEQ ID NO: 2874375 - RNA, 19 nt, Artificial Sequence
  Description of Artificial Sequence: Synthetic oligonucleotide
auccucuucgaucugcagu

SEQ ID NO: 2874376 - RNA, 19 nt, Artificial Sequence
  Description of Artificial Sequence: Synthetic oligonucleotide
uucgaucugcaguugggcu

SEQ ID NO: 2874377 - RNA, 19 nt, Artificial Sequence
  Description of Artificial Sequence: Synthetic oligonucleotide
uuggaagacacaaguuuua

SEQ ID NO: 2874378 - RNA, 19 nt, Artificial Sequence
  Description of Artificial Sequence: Synthetic oligonucleotide
gacacaaguuuuagaacug

SEQ ID NO: 2874379 - RNA, 19 nt, Artificial Sequence
  Description of Artificial Sequence: Synthetic oligonucleotide
uuucggaaaauuggcuuug

SEQ ID NO: 2874380 - RNA, 19 nt, Artificial Sequence
  Description of Artificial Sequence: Synthetic oligonucleotide
acugggucacuuugugagg

SEQ ID NO: 2874381 - RNA, 19 nt, Artificial Sequence
  Description of Artificial Sequence: Synthetic oligonucleotide
uccucuucgaucugcaguu

SEQ ID NO: 2874382 - RNA, 19 nt, Artificial Sequence
  Description of Artificial Sequence: Synthetic oligonucleotide
uuugucugcccaccguaac

SEQ ID NO: 2874383 - RNA, 19 nt, Artificial Sequence
  Description of Artificial Sequence: Synthetic oligonucleotide
uuucuuacagaaaguccuu

SEQ ID NO: 2874384 - RNA, 19 nt, Artificial Sequence
  Description of Artificial Sequence: Synthetic oligonucleotide
uccgaauuuuccucuugga

SEQ ID NO: 2874385 - RNA, 19 nt, Artificial Sequence
  Description of Artificial Sequence: Synthetic oligonucleotide
ucuuaucuccucccaguuc

SEQ ID NO: 2874386 - RNA, 19 nt, Artificial Sequence
  Description of Artificial Sequence: Synthetic oligonucleotide
cuuaauggccagcauccuc

SEQ ID NO: 2874387 - RNA, 19 nt, Artificial Sequence
  Description of Artificial Sequence: Synthetic oligonucleotide
cccgaugaaaacgagagag

SEQ ID NO: 2874388 - RNA, 19 nt, Artificial Sequence
  Description of Artificial Sequence: Synthetic oligonucleotide
caauaacuuauuuucuaaa

SEQ ID NO: 2874389 - RNA, 19 nt, Artificial Sequence
  Description of Artificial Sequence: Synthetic oligonucleotide
cucuucgaucugcaguugg

SEQ ID NO: 2874390 - RNA, 19 nt, Artificial Sequence
  Description of Artificial Sequence: Synthetic oligonucleotide
uuccucuuggaagacacaa

SEQ ID NO: 2874391 - RNA, 19 nt, Artificial Sequence
  Description of Artificial Sequence: Synthetic oligonucleotide
uuugguuaaucaggaacaa

SEQ ID NO: 2874392 - RNA, 19 nt, Artificial Sequence
  Description of Artificial Sequence: Synthetic oligonucleotide
gaucaccacauccaccgca

SEQ ID NO: 2874393 - RNA, 19 nt, Artificial Sequence
  Description of Artificial Sequence: Synthetic oligonucleotide
agcgccgcuuuccuugggc

SEQ ID NO: 2874394 - RNA, 19 nt, Artificial Sequence
  Description of Artificial Sequence: Synthetic oligonucleotide
gguuuuggccuucuuucgg

SEQ ID NO: 2874395 - RNA, 19 nt, Artificial Sequence
  Description of Artificial Sequence: Synthetic oligonucleotide
ucuccucccaguucaaaau

SEQ ID NO: 2874396 - RNA, 19 nt, Artificial Sequence
  Description of Artificial Sequence: Synthetic oligonucleotide
uuucuacugcuuccgaauu

SEQ ID NO: 2874397 - RNA, 19 nt, Artificial Sequence
  Description of Artificial Sequence: Synthetic oligonucleotide
aguggaggugucuacccga

SEQ ID NO: 2874398 - RNA, 19 nt, Artificial Sequence
  Description of Artificial Sequence: Synthetic oligonucleotide
ugaggcugaugcuugccac

SEQ ID NO: 2874399 - RNA, 19 nt, Artificial Sequence
  Description of Artificial Sequence: Synthetic oligonucleotide
ucgaucugcaguugggcuc

SEQ ID NO: 2874400 - RNA, 19 nt, Artificial Sequence
  Description of Artificial Sequence: Synthetic oligonucleotide
uugcaccucuuaauggcca

SEQ ID NO: 2874401 - RNA, 19 nt, Artificial Sequence
  Description of Artificial Sequence: Synthetic oligonucleotide
aucuuugcaguggaggugu

SEQ ID NO: 2874402 - RNA, 19 nt, Artificial Sequence
  Description of Artificial Sequence: Synthetic oligonucleotide
ugcuuccgaauuuuccucu

SEQ ID NO: 2874403 - RNA, 19 nt, Artificial Sequence
  Description of Artificial Sequence: Synthetic oligonucleotide
ucuuauacugggucacuuu

SEQ ID NO: 2874404 - RNA, 19 nt, Artificial Sequence
  Description of Artificial Sequence: Synthetic oligonucleotide
gcuugcaccucuuaauggc

SEQ ID NO: 2874405 - RNA, 19 nt, Artificial Sequence
  Description of Artificial Sequence: Synthetic oligonucleotide
gugucuacccgaugaaaac

SEQ ID NO: 2874406 - RNA, 19 nt, Artificial Sequence
  Description of Artificial Sequence: Synthetic oligonucleotide
ugcaccucuuaauggccag

SEQ ID NO: 2874407 - RNA, 19 nt, Artificial Sequence
  Description of Artificial Sequence: Synthetic oligonucleotide
aucaccacauccaccgcac

SEQ ID NO: 2874408 - RNA, 19 nt, Artificial Sequence
  Description of Artificial Sequence: Synthetic oligonucleotide
uucuuaucuccucccaguu

SEQ ID NO: 2874409 - RNA, 19 nt, Artificial Sequence
  Description of Artificial Sequence: Synthetic oligonucleotide
cuccacacacucaagccuc

SEQ ID NO: 2874410 - RNA, 19 nt, Artificial Sequence
  Description of Artificial Sequence: Synthetic oligonucleotide
gaucguagcgccgcuuucc

SEQ ID NO: 2874411 - RNA, 19 nt, Artificial Sequence
  Description of Artificial Sequence: Synthetic oligonucleotide
acagaaaguccuucggguu

SEQ ID NO: 2874412 - RNA, 19 nt, Artificial Sequence
  Description of Artificial Sequence: Synthetic oligonucleotide
uuugcaguggaggugucua

SEQ ID NO: 2874413 - RNA, 19 nt, Artificial Sequence
  Description of Artificial Sequence: Synthetic oligonucleotide
uuuuagguacguugaccau

SEQ ID NO: 2874414 - RNA, 19 nt, Artificial Sequence
  Description of Artificial Sequence: Synthetic oligonucleotide
ucuacugcuuccgaauuuu

SEQ ID NO: 2874415 - RNA, 19 nt, Artificial Sequence
  Description of Artificial Sequence: Synthetic oligonucleotide
uggcuuugucugcccaccg

SEQ ID NO: 2874416 - RNA, 19 nt, Artificial Sequence
  Description of Artificial Sequence: Synthetic oligonucleotide
ugaaaacgagagagccggc

SEQ ID NO: 2874417 - RNA, 19 nt, Artificial Sequence
  Description of Artificial Sequence: Synthetic oligonucleotide
cucugcuuccgaucguagc

SEQ ID NO: 2874418 - RNA, 19 nt, Artificial Sequence
  Description of Artificial Sequence: Synthetic oligonucleotide
ugcaguggaggugucuacc

SEQ ID NO: 2874419 - RNA, 19 nt, Artificial Sequence
  Description of Artificial Sequence: Synthetic oligonucleotide
gguuuuagguacguugacc

SEQ ID NO: 2874420 - RNA, 19 nt, Artificial Sequence
  Description of Artificial Sequence: Synthetic oligonucleotide
aucuccucccaguucaaaa

SEQ ID NO: 2874421 - RNA, 19 nt, Artificial Sequence
  Description of Artificial Sequence: Synthetic oligonucleotide
cuucgaucugcaguugggc

SEQ ID NO: 2874422 - RNA, 19 nt, Artificial Sequence
  Description of Artificial Sequence: Synthetic oligonucleotide
guacguugaccaucuuugc

SEQ ID NO: 2874423 - RNA, 19 nt, Artificial Sequence
  Description of Artificial Sequence: Synthetic oligonucleotide
agagccggcguccgggauc

SEQ ID NO: 2874424 - RNA, 19 nt, Artificial Sequence
  Description of Artificial Sequence: Synthetic oligonucleotide
guuuuggccuucuuucgga

SEQ ID NO: 2874425 - RNA, 19 nt, Artificial Sequence
  Description of Artificial Sequence: Synthetic oligonucleotide
cugggucacuuugugaggc

SEQ ID NO: 2874426 - RNA, 19 nt, Artificial Sequence
  Description of Artificial Sequence: Synthetic oligonucleotide
ucaccacauccaccgcacg

SEQ ID NO: 2874427 - RNA, 19 nt, Artificial Sequence
  Description of Artificial Sequence: Synthetic oligonucleotide
auacugggucacuuuguga

SEQ ID NO: 2874428 - RNA, 19 nt, Artificial Sequence
  Description of Artificial Sequence: Synthetic oligonucleotide
uuggcuuugucugcccacc

SEQ ID NO: 2874429 - RNA, 19 nt, Artificial Sequence
  Description of Artificial Sequence: Synthetic oligonucleotide
uuuccucuuggaagacaca

SEQ ID NO: 2874430 - RNA, 19 nt, Artificial Sequence
  Description of Artificial Sequence: Synthetic oligonucleotide
uucuacugcuuccgaauuu

SEQ ID NO: 2874431 - RNA, 19 nt, Artificial Sequence
  Description of Artificial Sequence: Synthetic oligonucleotide
ggaggugucuacccgauga

SEQ ID NO: 2874432 - RNA, 19 nt, Artificial Sequence
  Description of Artificial Sequence: Synthetic oligonucleotide
uuuuggccuucuuucggaa

SEQ ID NO: 2874433 - RNA, 19 nt, Artificial Sequence
  Description of Artificial Sequence: Synthetic oligonucleotide
uucuuacagaaaguccuuc

SEQ ID NO: 2874434 - RNA, 19 nt, Artificial Sequence
  Description of Artificial Sequence: Synthetic oligonucleotide
aaaguccuucggguuuuag

SEQ ID NO: 2874435 - RNA, 19 nt, Artificial Sequence
  Description of Artificial Sequence: Synthetic oligonucleotide
guccgggaucaccacaucc

SEQ ID NO: 2874436 - RNA, 19 nt, Artificial Sequence
  Description of Artificial Sequence: Synthetic oligonucleotide
cuuccgaucguagcgccgc

SEQ ID NO: 2874437 - RNA, 19 nt, Artificial Sequence
  Description of Artificial Sequence: Synthetic oligonucleotide
agguacguugaccaucuuu

SEQ ID NO: 2874438 - RNA, 19 nt, Artificial Sequence
  Description of Artificial Sequence: Synthetic oligonucleotide
caguggaggugucuacccg

SEQ ID NO: 2874439 - RNA, 19 nt, Artificial Sequence
  Description of Artificial Sequence: Synthetic oligonucleotide
uuuggccuucuuucggaaa

SEQ ID NO: 2874440 - RNA, 19 nt, Artificial Sequence
  Description of Artificial Sequence: Synthetic oligonucleotide
ugcuuccgaucguagcgcc

SEQ ID NO: 2874441 - RNA, 19 nt, Artificial Sequence
  Description of Artificial Sequence: Synthetic oligonucleotide
cugcuuccgaauuuuccuc

SEQ ID NO: 2874442 - RNA, 19 nt, Artificial Sequence
  Description of Artificial Sequence: Synthetic oligonucleotide
uuccuugggcauacaggga

SEQ ID NO: 2874443 - RNA, 19 nt, Artificial Sequence
  Description of Artificial Sequence: Synthetic oligonucleotide
cuuccgaauuuuccucuug

SEQ ID NO: 2874444 - RNA, 19 nt, Artificial Sequence
  Description of Artificial Sequence: Synthetic oligonucleotide
cgaugaaaacgagagagcc

SEQ ID NO: 2874445 - RNA, 19 nt, Artificial Sequence
  Description of Artificial Sequence: Synthetic oligonucleotide
ugugaggcugaugcuugcc

SEQ ID NO: 2874446 - RNA, 19 nt, Artificial Sequence
  Description of Artificial Sequence: Synthetic oligonucleotide
ggcuccacacacucaagcc

SEQ ID NO: 2874447 - RNA, 19 nt, Artificial Sequence
  Description of Artificial Sequence: Synthetic oligonucleotide
cuacccgaugaaaacgaga

SEQ ID NO: 2874448 - RNA, 19 nt, Artificial Sequence
  Description of Artificial Sequence: Synthetic oligonucleotide
gcauacagggaauccuugc

SEQ ID NO: 2874449 - RNA, 19 nt, Artificial Sequence
  Description of Artificial Sequence: Synthetic oligonucleotide
uauuuucuaaaaggucauu

SEQ ID NO: 2874450 - RNA, 19 nt, Artificial Sequence
  Description of Artificial Sequence: Synthetic oligonucleotide
uaaccacucugcuuccgau

SEQ ID NO: 2874451 - RNA, 19 nt, Artificial Sequence
  Description of Artificial Sequence: Synthetic oligonucleotide
uugguuaaucaggaacaau

SEQ ID NO: 2874452 - RNA, 19 nt, Artificial Sequence
  Description of Artificial Sequence: Synthetic oligonucleotide
uccacacacucaagccuca

SEQ ID NO: 2874453 - RNA, 19 nt, Artificial Sequence
  Description of Artificial Sequence: Synthetic oligonucleotide
uugugaggcugaugcuugc

SEQ ID NO: 2874454 - RNA, 19 nt, Artificial Sequence
  Description of Artificial Sequence: Synthetic oligonucleotide
uucuuauacugggucacuu

SEQ ID NO: 2874455 - RNA, 19 nt, Artificial Sequence
  Description of Artificial Sequence: Synthetic oligonucleotide
cuuggaagacacaaguuuu

SEQ ID NO: 2874456 - RNA, 19 nt, Artificial Sequence
  Description of Artificial Sequence: Synthetic oligonucleotide
caucuuugcaguggaggug

SEQ ID NO: 2874457 - RNA, 19 nt, Artificial Sequence
  Description of Artificial Sequence: Synthetic oligonucleotide
guaaccacucugcuuccga

SEQ ID NO: 2874458 - RNA, 19 nt, Artificial Sequence
  Description of Artificial Sequence: Synthetic oligonucleotide
gcuuuccuugggcauacag

SEQ ID NO: 2874459 - RNA, 19 nt, Artificial Sequence
  Description of Artificial Sequence: Synthetic oligonucleotide
ggaagacacaaguuuuaga

SEQ ID NO: 2874460 - RNA, 19 nt, Artificial Sequence
  Description of Artificial Sequence: Synthetic oligonucleotide
guagcgccgcuuuccuugg

SEQ ID NO: 2874461 - RNA, 19 nt, Artificial Sequence
  Description of Artificial Sequence: Synthetic oligonucleotide
auuuuccucuuggaagaca

SEQ ID NO: 2874462 - RNA, 19 nt, Artificial Sequence
  Description of Artificial Sequence: Synthetic oligonucleotide
gaggcugaugcuugccaca

SEQ ID NO: 2874463 - RNA, 19 nt, Artificial Sequence
  Description of Artificial Sequence: Synthetic oligonucleotide
ucuuaauggccagcauccu

SEQ ID NO: 2874464 - RNA, 19 nt, Artificial Sequence
  Description of Artificial Sequence: Synthetic oligonucleotide
gguuaaucaggaacaauaa

SEQ ID NO: 2874465 - RNA, 19 nt, Artificial Sequence
  Description of Artificial Sequence: Synthetic oligonucleotide
aucguagcgccgcuuuccu

SEQ ID NO: 2874466 - RNA, 19 nt, Artificial Sequence
  Description of Artificial Sequence: Synthetic oligonucleotide
gucuacccgaugaaaacga

SEQ ID NO: 2874467 - RNA, 19 nt, Artificial Sequence
  Description of Artificial Sequence: Synthetic oligonucleotide
cccaccguaaccacucugc

SEQ ID NO: 2874468 - RNA, 19 nt, Artificial Sequence
  Description of Artificial Sequence: Synthetic oligonucleotide
ugggcuccacacacucaag

SEQ ID NO: 2874469 - RNA, 19 nt, Artificial Sequence
  Description of Artificial Sequence: Synthetic oligonucleotide
ccgaugaaaacgagagagc

SEQ ID NO: 2874470 - RNA, 19 nt, Artificial Sequence
  Description of Artificial Sequence: Synthetic oligonucleotide
uuaucuccucccaguucaa

SEQ ID NO: 2874471 - RNA, 19 nt, Artificial Sequence
  Description of Artificial Sequence: Synthetic oligonucleotide
uugcaguggaggugucuac

SEQ ID NO: 2874472 - RNA, 19 nt, Artificial Sequence
  Description of Artificial Sequence: Synthetic oligonucleotide
cugaugcuugccacauuuc

SEQ ID NO: 2874473 - RNA, 19 nt, Artificial Sequence
  Description of Artificial Sequence: Synthetic oligonucleotide
agggaauccuugcccuucu

SEQ ID NO: 2874474 - RNA, 19 nt, Artificial Sequence
  Description of Artificial Sequence: Synthetic oligonucleotide
uggaggugucuacccgaug

SEQ ID NO: 2874475 - RNA, 19 nt, Artificial Sequence
  Description of Artificial Sequence: Synthetic oligonucleotide
cuacugcuuccgaauuuuc

SEQ ID NO: 2874476 - RNA, 19 nt, Artificial Sequence
  Description of Artificial Sequence: Synthetic oligonucleotide
acccgaugaaaacgagaga

SEQ ID NO: 2874477 - RNA, 19 nt, Artificial Sequence
  Description of Artificial Sequence: Synthetic oligonucleotide
gcaguggaggugucuaccc

SEQ ID NO: 2874478 - RNA, 19 nt, Artificial Sequence
  Description of Artificial Sequence: Synthetic oligonucleotide
cuugggcauacagggaauc

SEQ ID NO: 2874479 - RNA, 19 nt, Artificial Sequence
  Description of Artificial Sequence: Synthetic oligonucleotide
gggcuccacacacucaagc

SEQ ID NO: 2874480 - RNA, 19 nt, Artificial Sequence
  Description of Artificial Sequence: Synthetic oligonucleotide
ucacuuugugaggcugaug

SEQ ID NO: 2874481 - RNA, 19 nt, Artificial Sequence
  Description of Artificial Sequence: Synthetic oligonucleotide
ugggucacuuugugaggcu

SEQ ID NO: 2874482 - RNA, 19 nt, Artificial Sequence
  Description of Artificial Sequence: Synthetic oligonucleotide
accacauccaccgcacgaa

SEQ ID NO: 2874483 - RNA, 19 nt, Artificial Sequence
  Description of Artificial Sequence: Synthetic oligonucleotide
gaggugucuacccgaugaa

SEQ ID NO: 2874484 - RNA, 19 nt, Artificial Sequence
  Description of Artificial Sequence: Synthetic oligonucleotide
agaaaguccuucggguuuu

SEQ ID NO: 2874485 - RNA, 19 nt, Artificial Sequence
  Description of Artificial Sequence: Synthetic oligonucleotide
ggugucuacccgaugaaaa

SEQ ID NO: 2874486 - RNA, 19 nt, Artificial Sequence
  Description of Artificial Sequence: Synthetic oligonucleotide
gccuucuuucggaaaauug

SEQ ID NO: 2874487 - RNA, 19 nt, Artificial Sequence
  Description of Artificial Sequence: Synthetic oligonucleotide
cuuugucugcccaccguaa

SEQ ID NO: 2874488 - RNA, 19 nt, Artificial Sequence
  Description of Artificial Sequence: Synthetic oligonucleotide
uggccagcauccucuucga

SEQ ID NO: 2874489 - RNA, 19 nt, Artificial Sequence
  Description of Artificial Sequence: Synthetic oligonucleotide
cacuuggcccuuucucuuc

SEQ ID NO: 2874490 - RNA, 19 nt, Artificial Sequence
  Description of Artificial Sequence: Synthetic oligonucleotide
ccuucuuauacugggucac

SEQ ID NO: 2874491 - RNA, 19 nt, Artificial Sequence
  Description of Artificial Sequence: Synthetic oligonucleotide
gaccaucuuugcaguggag

SEQ ID NO: 2874492 - RNA, 19 nt, Artificial Sequence
  Description of Artificial Sequence: Synthetic oligonucleotide
acgagagagccggcguccg

SEQ ID NO: 2874493 - RNA, 19 nt, Artificial Sequence
  Description of Artificial Sequence: Synthetic oligonucleotide
ucuuugcaguggagguguc

SEQ ID NO: 2874494 - RNA, 19 nt, Artificial Sequence
  Description of Artificial Sequence: Synthetic oligonucleotide
ggguuuuagguacguugac

SEQ ID NO: 2874495 - RNA, 19 nt, Artificial Sequence
  Description of Artificial Sequence: Synthetic oligonucleotide
cguagcgccgcuuuccuug

SEQ ID NO: 2874496 - RNA, 19 nt, Artificial Sequence
  Description of Artificial Sequence: Synthetic oligonucleotide
caccacauccaccgcacga

SEQ ID NO: 2874497 - RNA, 19 nt, Artificial Sequence
  Description of Artificial Sequence: Synthetic oligonucleotide
accucuuaauggccagcau

SEQ ID NO: 2874498 - RNA, 19 nt, Artificial Sequence
  Description of Artificial Sequence: Synthetic oligonucleotide
uaucuccucccaguucaaa

SEQ ID NO: 2874499 - RNA, 19 nt, Artificial Sequence
  Description of Artificial Sequence: Synthetic oligonucleotide
agagagccggcguccggga

SEQ ID NO: 2874500 - RNA, 19 nt, Artificial Sequence
  Description of Artificial Sequence: Synthetic oligonucleotide
acucugcuuccgaucguag

SEQ ID NO: 2874501 - RNA, 19 nt, Artificial Sequence
  Description of Artificial Sequence: Synthetic oligonucleotide
caccucuuaauggccagca

SEQ ID NO: 2874502 - RNA, 19 nt, Artificial Sequence
  Description of Artificial Sequence: Synthetic oligonucleotide
uagcgccgcuuuccuuggg

SEQ ID NO: 2874503 - RNA, 19 nt, Artificial Sequence
  Description of Artificial Sequence: Synthetic oligonucleotide
guuuuagaacuggaucacu

SEQ ID NO: 2874504 - RNA, 19 nt, Artificial Sequence
  Description of Artificial Sequence: Synthetic oligonucleotide
gaugcuugccacauuucuu

SEQ ID NO: 2874505 - RNA, 19 nt, Artificial Sequence
  Description of Artificial Sequence: Synthetic oligonucleotide
aggugucuacccgaugaaa

SEQ ID NO: 2874506 - RNA, 19 nt, Artificial Sequence
  Description of Artificial Sequence: Synthetic oligonucleotide
ccuucggguuuuagguacg

SEQ ID NO: 2874507 - RNA, 19 nt, Artificial Sequence
  Description of Artificial Sequence: Synthetic oligonucleotide
uuccgaucguagcgccgcu

SEQ ID NO: 2874508 - RNA, 19 nt, Artificial Sequence
  Description of Artificial Sequence: Synthetic oligonucleotide
aggcugaugcuugccacau

SEQ ID NO: 2874509 - RNA, 19 nt, Artificial Sequence
  Description of Artificial Sequence: Synthetic oligonucleotide
cuuugugaggcugaugcuu

SEQ ID NO: 2874510 - RNA, 19 nt, Artificial Sequence
  Description of Artificial Sequence: Synthetic oligonucleotide
ccgaauuuuccucuuggaa

SEQ ID NO: 2874511 - RNA, 19 nt, Artificial Sequence
  Description of Artificial Sequence: Synthetic oligonucleotide
uuggugguuuuggccuucu

SEQ ID NO: 2874512 - RNA, 19 nt, Artificial Sequence
  Description of Artificial Sequence: Synthetic oligonucleotide
ugcccaccguaaccacucu

SEQ ID NO: 2874513 - RNA, 19 nt, Artificial Sequence
  Description of Artificial Sequence: Synthetic oligonucleotide
gcugaugcuugccacauuu

SEQ ID NO: 2874514 - RNA, 19 nt, Artificial Sequence
  Description of Artificial Sequence: Synthetic oligonucleotide
uggccuucuuucggaaaau

SEQ ID NO: 2874515 - RNA, 19 nt, Artificial Sequence
  Description of Artificial Sequence: Synthetic oligonucleotide
guccuucggguuuuaggua

SEQ ID NO: 2874516 - RNA, 19 nt, Artificial Sequence
  Description of Artificial Sequence: Synthetic oligonucleotide
ccucuuggaagacacaagu

SEQ ID NO: 2874517 - RNA, 19 nt, Artificial Sequence
  Description of Artificial Sequence: Synthetic oligonucleotide
cggaaaauuggcuuugucu

SEQ ID NO: 2874518 - RNA, 19 nt, Artificial Sequence
  Description of Artificial Sequence: Synthetic oligonucleotide
gggucacuuugugaggcug

SEQ ID NO: 2874519 - RNA, 19 nt, Artificial Sequence
  Description of Artificial Sequence: Synthetic oligonucleotide
cuuggugguuuuggccuuc

SEQ ID NO: 2874520 - RNA, 19 nt, Artificial Sequence
  Description of Artificial Sequence: Synthetic oligonucleotide
ggaucaccacauccaccgc

SEQ ID NO: 2874521 - RNA, 19 nt, Artificial Sequence
  Description of Artificial Sequence: Synthetic oligonucleotide
gcuuugucugcccaccgua

SEQ ID NO: 2874522 - RNA, 19 nt, Artificial Sequence
  Description of Artificial Sequence: Synthetic oligonucleotide
gcuccacacacucaagccu

SEQ ID NO: 2874523 - RNA, 19 nt, Artificial Sequence
  Description of Artificial Sequence: Synthetic oligonucleotide
uucggguuuuagguacguu

SEQ ID NO: 2874524 - RNA, 19 nt, Artificial Sequence
  Description of Artificial Sequence: Synthetic oligonucleotide
cccuucuuauacuggguca

SEQ ID NO: 2874525 - RNA, 19 nt, Artificial Sequence
  Description of Artificial Sequence: Synthetic oligonucleotide
gagccggcguccgggauca

SEQ ID NO: 2874526 - RNA, 19 nt, Artificial Sequence
  Description of Artificial Sequence: Synthetic oligonucleotide
cagaaaguccuucggguuu

SEQ ID NO: 2874527 - RNA, 19 nt, Artificial Sequence
  Description of Artificial Sequence: Synthetic oligonucleotide
cggguuuuagguacguuga

SEQ ID NO: 2874528 - RNA, 19 nt, Artificial Sequence
  Description of Artificial Sequence: Synthetic oligonucleotide
caggaacaauaacuuauuu

SEQ ID NO: 2874529 - RNA, 19 nt, Artificial Sequence
  Description of Artificial Sequence: Synthetic oligonucleotide
ccgggaucaccacauccac

SEQ ID NO: 2874530 - RNA, 19 nt, Artificial Sequence
  Description of Artificial Sequence: Synthetic oligonucleotide
ccaucuuugcaguggaggu

SEQ ID NO: 2874531 - RNA, 19 nt, Artificial Sequence
  Description of Artificial Sequence: Synthetic oligonucleotide
ggucacuuugugaggcuga

SEQ ID NO: 2874532 - RNA, 19 nt, Artificial Sequence
  Description of Artificial Sequence: Synthetic oligonucleotide
gcuuccgaucguagcgccg

SEQ ID NO: 2874533 - RNA, 19 nt, Artificial Sequence
  Description of Artificial Sequence: Synthetic oligonucleotide
ucguagcgccgcuuuccuu

SEQ ID NO: 2874534 - RNA, 19 nt, Artificial Sequence
  Description of Artificial Sequence: Synthetic oligonucleotide
cgggaucaccacauccacc

SEQ ID NO: 2874535 - RNA, 19 nt, Artificial Sequence
  Description of Artificial Sequence: Synthetic oligonucleotide
ccacauccaccgcacgaac

SEQ ID NO: 2874536 - RNA, 19 nt, Artificial Sequence
  Description of Artificial Sequence: Synthetic oligonucleotide
uagguacguugaccaucuu

SEQ ID NO: 2874537 - RNA, 19 nt, Artificial Sequence
  Description of Artificial Sequence: Synthetic oligonucleotide
cuucuuauacugggucacu

SEQ ID NO: 2874538 - RNA, 19 nt, Artificial Sequence
  Description of Artificial Sequence: Synthetic oligonucleotide
ccguaaccacucugcuucc

SEQ ID NO: 2874539 - RNA, 19 nt, Artificial Sequence
  Description of Artificial Sequence: Synthetic oligonucleotide
cacucugcuuccgaucgua

SEQ ID NO: 2874540 - RNA, 19 nt, Artificial Sequence
  Description of Artificial Sequence: Synthetic oligonucleotide
gcccaccguaaccacucug

SEQ ID NO: 2874541 - RNA, 19 nt, Artificial Sequence
  Description of Artificial Sequence: Synthetic oligonucleotide
gcaccucuuaauggccagc

SEQ ID NO: 2874542 - RNA, 19 nt, Artificial Sequence
  Description of Artificial Sequence: Synthetic oligonucleotide
uccgaucguagcgccgcuu

SEQ ID NO: 2874543 - RNA, 19 nt, Artificial Sequence
  Description of Artificial Sequence: Synthetic oligonucleotide
cauccaccgcacgaaccga

SEQ ID NO: 2874544 - RNA, 19 nt, Artificial Sequence
  Description of Artificial Sequence: Synthetic oligonucleotide
ggcguccgggaucaccaca

SEQ ID NO: 2874545 - RNA, 19 nt, Artificial Sequence
  Description of Artificial Sequence: Synthetic oligonucleotide
gaaaguccuucggguuuua

SEQ ID NO: 2874546 - RNA, 19 nt, Artificial Sequence
  Description of Artificial Sequence: Synthetic oligonucleotide
ggaucacuuggcccuuucu

SEQ ID NO: 2874547 - RNA, 19 nt, Artificial Sequence
  Description of Artificial Sequence: Synthetic oligonucleotide
cuuugcaguggaggugucu

SEQ ID NO: 2874548 - RNA, 19 nt, Artificial Sequence
  Description of Artificial Sequence: Synthetic oligonucleotide
ccggcguccgggaucacca

SEQ ID NO: 2874549 - RNA, 19 nt, Artificial Sequence
  Description of Artificial Sequence: Synthetic oligonucleotide
gucacuuugugaggcugau

SEQ ID NO: 2874550 - RNA, 19 nt, Artificial Sequence
  Description of Artificial Sequence: Synthetic oligonucleotide
cguaaccacucugcuuccg

SEQ ID NO: 2874551 - RNA, 19 nt, Artificial Sequence
  Description of Artificial Sequence: Synthetic oligonucleotide
caccguaaccacucugcuu

SEQ ID NO: 2874552 - RNA, 19 nt, Artificial Sequence
  Description of Artificial Sequence: Synthetic oligonucleotide
ggcuuugucugcccaccgu

SEQ ID NO: 2874553 - RNA, 19 nt, Artificial Sequence
  Description of Artificial Sequence: Synthetic oligonucleotide
cuucggguuuuagguacgu

SEQ ID NO: 2874554 - RNA, 19 nt, Artificial Sequence
  Description of Artificial Sequence: Synthetic oligonucleotide
ccacacacucaagccucag

SEQ ID NO: 2874555 - RNA, 19 nt, Artificial Sequence
  Description of Artificial Sequence: Synthetic oligonucleotide
guggaggugucuacccgau

SEQ ID NO: 2874556 - RNA, 19 nt, Artificial Sequence
  Description of Artificial Sequence: Synthetic oligonucleotide
gccggcguccgggaucacc

SEQ ID NO: 2874557 - RNA, 19 nt, Artificial Sequence
  Description of Artificial Sequence: Synthetic oligonucleotide
ccucuucgaucugcaguug

SEQ ID NO: 2874558 - RNA, 19 nt, Artificial Sequence
  Description of Artificial Sequence: Synthetic oligonucleotide
cgagagagccggcguccgg

SEQ ID NO: 2874559 - RNA, 19 nt, Artificial Sequence
  Description of Artificial Sequence: Synthetic oligonucleotide
gagagccggcguccgggau

SEQ ID NO: 2874560 - RNA, 19 nt, Artificial Sequence
  Description of Artificial Sequence: Synthetic oligonucleotide
cguugaccaucuuugcagu

SEQ ID NO: 2874561 - RNA, 19 nt, Artificial Sequence
  Description of Artificial Sequence: Synthetic oligonucleotide
gcuuccgaauuuuccucuu

SEQ ID NO: 2874562 - RNA, 19 nt, Artificial Sequence
  Description of Artificial Sequence: Synthetic oligonucleotide
cgaucguagcgccgcuuuc

SEQ ID NO: 2874563 - RNA, 19 nt, Artificial Sequence
  Description of Artificial Sequence: Synthetic oligonucleotide
ccaccguaaccacucugcu

SEQ ID NO: 2874564 - RNA, 19 nt, Artificial Sequence
  Description of Artificial Sequence: Synthetic oligonucleotide
cuuggcccuuucucuucuu

SEQ ID NO: 2874565 - RNA, 19 nt, Artificial Sequence
  Description of Artificial Sequence: Synthetic oligonucleotide
ccuugggcauacagggaau

SEQ ID NO: 2874566 - RNA, 19 nt, Artificial Sequence
  Description of Artificial Sequence: Synthetic oligonucleotide
gcguccgggaucaccacau

SEQ ID NO: 2874567 - RNA, 19 nt, Artificial Sequence
  Description of Artificial Sequence: Synthetic oligonucleotide
ggccuucuuucggaaaauu

SEQ ID NO: 2874568 - RNA, 19 nt, Artificial Sequence
  Description of Artificial Sequence: Synthetic oligonucleotide
agccggcguccgggaucac

SEQ ID NO: 2874569 - RNA, 19 nt, Artificial Sequence
  Description of Artificial Sequence: Synthetic oligonucleotide
cguccgggaucaccacauc

SEQ ID NO: 2874570 - RNA, 19 nt, Artificial Sequence
  Description of Artificial Sequence: Synthetic oligonucleotide
gggaauccuugcccuucuu

SEQ ID NO: 2874571 - RNA, 19 nt, Artificial Sequence
  Description of Artificial Sequence: Synthetic oligonucleotide
ccgaucguagcgccgcuuu

SEQ ID NO: 2874572 - RNA, 19 nt, Artificial Sequence
  Description of Artificial Sequence: Synthetic oligonucleotide
ggcugaugcuugccacauu

SEQ ID NO: 2874573 - RNA, 19 nt, Artificial Sequence
  Description of Artificial Sequence: Synthetic oligonucleotide
cggcguccgggaucaccac

SEQ ID NO: 2874574 - RNA, 19 nt, Artificial Sequence
  Description of Artificial Sequence: Synthetic oligonucleotide
ccacucugcuuccgaucgu

SEQ ID NO: 2874575 - RNA, 19 nt, Artificial Sequence
  Description of Artificial Sequence: Synthetic oligonucleotide
cgcuuuccuugggcauaca

SEQ ID NO: 2874576 - RNA, 19 nt, Artificial Sequence
  Description of Artificial Sequence: Synthetic oligonucleotide
uaaaguagcaucaauauga

SEQ ID NO: 2874577 - RNA, 19 nt, Artificial Sequence
  Description of Artificial Sequence: Synthetic oligonucleotide
uacuguuucacuuagacgc

SEQ ID NO: 2874578 - RNA, 19 nt, Artificial Sequence
  Description of Artificial Sequence: Synthetic oligonucleotide
auugcaguaacuuugcaac

SEQ ID NO: 2874579 - RNA, 19 nt, Artificial Sequence
  Description of Artificial Sequence: Synthetic oligonucleotide
aauaacucguaauuccagc

SEQ ID NO: 2874580 - RNA, 19 nt, Artificial Sequence
  Description of Artificial Sequence: Synthetic oligonucleotide
auaacagaaacccagaaga

SEQ ID NO: 2874581 - RNA, 19 nt, Artificial Sequence
  Description of Artificial Sequence: Synthetic oligonucleotide
ucuguuauauucuuguuag

SEQ ID NO: 2874582 - RNA, 19 nt, Artificial Sequence
  Description of Artificial Sequence: Synthetic oligonucleotide
uaaaauaacucguaauucc

SEQ ID NO: 2874583 - RNA, 19 nt, Artificial Sequence
  Description of Artificial Sequence: Synthetic oligonucleotide
aauaacagaaacccagaag

SEQ ID NO: 2874584 - RNA, 19 nt, Artificial Sequence
  Description of Artificial Sequence: Synthetic oligonucleotide
ugaacauuuguacaauccg

SEQ ID NO: 2874585 - RNA, 19 nt, Artificial Sequence
  Description of Artificial Sequence: Synthetic oligonucleotide
uuauauucuuguuagaaga

SEQ ID NO: 2874586 - RNA, 19 nt, Artificial Sequence
  Description of Artificial Sequence: Synthetic oligonucleotide
agaagagcuccuuuuaucc

SEQ ID NO: 2874587 - RNA, 19 nt, Artificial Sequence
  Description of Artificial Sequence: Synthetic oligonucleotide
uguacaauccguauaaaac

SEQ ID NO: 2874588 - RNA, 19 nt, Artificial Sequence
  Description of Artificial Sequence: Synthetic oligonucleotide
ugauccaagaggcucaugg

SEQ ID NO: 2874589 - RNA, 19 nt, Artificial Sequence
  Description of Artificial Sequence: Synthetic oligonucleotide
cuuguuagaagacagacug

SEQ ID NO: 2874590 - RNA, 19 nt, Artificial Sequence
  Description of Artificial Sequence: Synthetic oligonucleotide
uuugcaacugggaugaaag

SEQ ID NO: 2874591 - RNA, 19 nt, Artificial Sequence
  Description of Artificial Sequence: Synthetic oligonucleotide
aagaggaucaaccgcaguc

SEQ ID NO: 2874592 - RNA, 19 nt, Artificial Sequence
  Description of Artificial Sequence: Synthetic oligonucleotide
aaaaccaaaucugagaaga

SEQ ID NO: 2874593 - RNA, 19 nt, Artificial Sequence
  Description of Artificial Sequence: Synthetic oligonucleotide
uguaaaauaacucguaauu

SEQ ID NO: 2874594 - RNA, 19 nt, Artificial Sequence
  Description of Artificial Sequence: Synthetic oligonucleotide
acucguguaaaauaacucg

SEQ ID NO: 2874595 - RNA, 19 nt, Artificial Sequence
  Description of Artificial Sequence: Synthetic oligonucleotide
uauucuuguuagaagacag

SEQ ID NO: 2874596 - RNA, 19 nt, Artificial Sequence
  Description of Artificial Sequence: Synthetic oligonucleotide
uuugcuaggaagaucacgu

SEQ ID NO: 2874597 - RNA, 19 nt, Artificial Sequence
  Description of Artificial Sequence: Synthetic oligonucleotide
caucaauaugaauagauug

SEQ ID NO: 2874598 - RNA, 19 nt, Artificial Sequence
  Description of Artificial Sequence: Synthetic oligonucleotide
uucaucugauccaagaggc

SEQ ID NO: 2874599 - RNA, 19 nt, Artificial Sequence
  Description of Artificial Sequence: Synthetic oligonucleotide
ugggcuuccacuuaggcag

SEQ ID NO: 2874600 - RNA, 19 nt, Artificial Sequence
  Description of Artificial Sequence: Synthetic oligonucleotide
acuccuugcagccauauuc

SEQ ID NO: 2874601 - RNA, 19 nt, Artificial Sequence
  Description of Artificial Sequence: Synthetic oligonucleotide
aagaucacguuucuuacug

SEQ ID NO: 2874602 - RNA, 19 nt, Artificial Sequence
  Description of Artificial Sequence: Synthetic oligonucleotide
ucguaauuccagcagaaag

SEQ ID NO: 2874603 - RNA, 19 nt, Artificial Sequence
  Description of Artificial Sequence: Synthetic oligonucleotide
uauaaaguagcaucaauau

SEQ ID NO: 2874604 - RNA, 19 nt, Artificial Sequence
  Description of Artificial Sequence: Synthetic oligonucleotide
uuagaagacagacugcugu

SEQ ID NO: 2874605 - RNA, 19 nt, Artificial Sequence
  Description of Artificial Sequence: Synthetic oligonucleotide
ucaaccgcagucaagaagu

SEQ ID NO: 2874606 - RNA, 19 nt, Artificial Sequence
  Description of Artificial Sequence: Synthetic oligonucleotide
uauucuguuauauucuugu

SEQ ID NO: 2874607 - RNA, 19 nt, Artificial Sequence
  Description of Artificial Sequence: Synthetic oligonucleotide
aagagcuccuuuuaucccg

SEQ ID NO: 2874608 - RNA, 19 nt, Artificial Sequence
  Description of Artificial Sequence: Synthetic oligonucleotide
aaccaaaucugagaagagc

SEQ ID NO: 2874609 - RNA, 19 nt, Artificial Sequence
  Description of Artificial Sequence: Synthetic oligonucleotide
ugugcgaauaacagaaacc

SEQ ID NO: 2874610 - RNA, 19 nt, Artificial Sequence
  Description of Artificial Sequence: Synthetic oligonucleotide
aucaauaugaauagauugg

SEQ ID NO: 2874611 - RNA, 19 nt, Artificial Sequence
  Description of Artificial Sequence: Synthetic oligonucleotide
guagcaucaauaugaauag

SEQ ID NO: 2874612 - RNA, 19 nt, Artificial Sequence
  Description of Artificial Sequence: Synthetic oligonucleotide
uguugaugaacauuuguac

SEQ ID NO: 2874613 - RNA, 19 nt, Artificial Sequence
  Description of Artificial Sequence: Synthetic oligonucleotide
aaacacacagaacugugcu

SEQ ID NO: 2874614 - RNA, 19 nt, Artificial Sequence
  Description of Artificial Sequence: Synthetic oligonucleotide
aacagaaacccagaagagg

SEQ ID NO: 2874615 - RNA, 19 nt, Artificial Sequence
  Description of Artificial Sequence: Synthetic oligonucleotide
guuauauucuuguuagaag

SEQ ID NO: 2874616 - RNA, 19 nt, Artificial Sequence
  Description of Artificial Sequence: Synthetic oligonucleotide
uucacuuagacgcucauua

SEQ ID NO: 2874617 - RNA, 19 nt, Artificial Sequence
  Description of Artificial Sequence: Synthetic oligonucleotide
agcaauucauugcaguaac

SEQ ID NO: 2874618 - RNA, 19 nt, Artificial Sequence
  Description of Artificial Sequence: Synthetic oligonucleotide
aauuccuugaugucuuucu

SEQ ID NO: 2874619 - RNA, 19 nt, Artificial Sequence
  Description of Artificial Sequence: Synthetic oligonucleotide
aagacagacugcuguuugc

SEQ ID NO: 2874620 - RNA, 19 nt, Artificial Sequence
  Description of Artificial Sequence: Synthetic oligonucleotide
ugucaguguauaaaguagc

SEQ ID NO: 2874621 - RNA, 19 nt, Artificial Sequence
  Description of Artificial Sequence: Synthetic oligonucleotide
agcagaaagcaauucauug

SEQ ID NO: 2874622 - RNA, 19 nt, Artificial Sequence
  Description of Artificial Sequence: Synthetic oligonucleotide
augaaagucacugucagug

SEQ ID NO: 2874623 - RNA, 19 nt, Artificial Sequence
  Description of Artificial Sequence: Synthetic oligonucleotide
cuuacuguuucacuuagac

SEQ ID NO: 2874624 - RNA, 19 nt, Artificial Sequence
  Description of Artificial Sequence: Synthetic oligonucleotide
auccaagaggcucaugggc

SEQ ID NO: 2874625 - RNA, 19 nt, Artificial Sequence
  Description of Artificial Sequence: Synthetic oligonucleotide
auuuguacaauccguauaa

SEQ ID NO: 2874626 - RNA, 19 nt, Artificial Sequence
  Description of Artificial Sequence: Synthetic oligonucleotide
augaacauuuguacaaucc

SEQ ID NO: 2874627 - RNA, 19 nt, Artificial Sequence
  Description of Artificial Sequence: Synthetic oligonucleotide
uuacuguuucacuuagacg

SEQ ID NO: 2874628 - RNA, 19 nt, Artificial Sequence
  Description of Artificial Sequence: Synthetic oligonucleotide
aguagcaucaauaugaaua

SEQ ID NO: 2874629 - RNA, 19 nt, Artificial Sequence
  Description of Artificial Sequence: Synthetic oligonucleotide
acacacagaacugugcugc

SEQ ID NO: 2874630 - RNA, 19 nt, Artificial Sequence
  Description of Artificial Sequence: Synthetic oligonucleotide
uauauucuuguuagaagac

SEQ ID NO: 2874631 - RNA, 19 nt, Artificial Sequence
  Description of Artificial Sequence: Synthetic oligonucleotide
agucaagaaguguugauga

SEQ ID NO: 2874632 - RNA, 19 nt, Artificial Sequence
  Description of Artificial Sequence: Synthetic oligonucleotide
auaaaguagcaucaauaug

SEQ ID NO: 2874633 - RNA, 19 nt, Artificial Sequence
  Description of Artificial Sequence: Synthetic oligonucleotide
uugaugaacauuuguacaa

SEQ ID NO: 2874634 - RNA, 19 nt, Artificial Sequence
  Description of Artificial Sequence: Synthetic oligonucleotide
ucacugucaguguauaaag

SEQ ID NO: 2874635 - RNA, 19 nt, Artificial Sequence
  Description of Artificial Sequence: Synthetic oligonucleotide
aaaauaacucguaauucca

SEQ ID NO: 2874636 - RNA, 19 nt, Artificial Sequence
  Description of Artificial Sequence: Synthetic oligonucleotide
aauucauugcaguaacuuu

SEQ ID NO: 2874637 - RNA, 19 nt, Artificial Sequence
  Description of Artificial Sequence: Synthetic oligonucleotide
uguuauauucuuguuagaa

SEQ ID NO: 2874638 - RNA, 19 nt, Artificial Sequence
  Description of Artificial Sequence: Synthetic oligonucleotide
ucaaacacacagaacugug

SEQ ID NO: 2874639 - RNA, 19 nt, Artificial Sequence
  Description of Artificial Sequence: Synthetic oligonucleotide
caguguauaaaguagcauc

SEQ ID NO: 2874640 - RNA, 19 nt, Artificial Sequence
  Description of Artificial Sequence: Synthetic oligonucleotide
aauccguauaaaacucugc

SEQ ID NO: 2874641 - RNA, 19 nt, Artificial Sequence
  Description of Artificial Sequence: Synthetic oligonucleotide
aaagcaauucauugcagua

SEQ ID NO: 2874642 - RNA, 19 nt, Artificial Sequence
  Description of Artificial Sequence: Synthetic oligonucleotide
aacuuugcaacugggauga

SEQ ID NO: 2874643 - RNA, 19 nt, Artificial Sequence
  Description of Artificial Sequence: Synthetic oligonucleotide
ucaauaugaauagauugga

SEQ ID NO: 2874644 - RNA, 19 nt, Artificial Sequence
  Description of Artificial Sequence: Synthetic oligonucleotide
uaacuuugcaacugggaug

SEQ ID NO: 2874645 - RNA, 19 nt, Artificial Sequence
  Description of Artificial Sequence: Synthetic oligonucleotide
uguuagaagacagacugcu

SEQ ID NO: 2874646 - RNA, 19 nt, Artificial Sequence
  Description of Artificial Sequence: Synthetic oligonucleotide
uaacucguaauuccagcag

SEQ ID NO: 2874647 - RNA, 19 nt, Artificial Sequence
  Description of Artificial Sequence: Synthetic oligonucleotide
aauuccagcagaaagcaau

SEQ ID NO: 2874648 - RNA, 19 nt, Artificial Sequence
  Description of Artificial Sequence: Synthetic oligonucleotide
agaucucaaacacacagaa

SEQ ID NO: 2874649 - RNA, 19 nt, Artificial Sequence
  Description of Artificial Sequence: Synthetic oligonucleotide
uuuuaucccgucaucucug

SEQ ID NO: 2874650 - RNA, 19 nt, Artificial Sequence
  Description of Artificial Sequence: Synthetic oligonucleotide
uacaauccguauaaaacuc

SEQ ID NO: 2874651 - RNA, 19 nt, Artificial Sequence
  Description of Artificial Sequence: Synthetic oligonucleotide
cugucaguguauaaaguag

SEQ ID NO: 2874652 - RNA, 19 nt, Artificial Sequence
  Description of Artificial Sequence: Synthetic oligonucleotide
uucuguuauauucuuguua

SEQ ID NO: 2874653 - RNA, 19 nt, Artificial Sequence
  Description of Artificial Sequence: Synthetic oligonucleotide
uucuuacuguuucacuuag

SEQ ID NO: 2874654 - RNA, 19 nt, Artificial Sequence
  Description of Artificial Sequence: Synthetic oligonucleotide
aaauaacucguaauuccag

SEQ ID NO: 2874655 - RNA, 19 nt, Artificial Sequence
  Description of Artificial Sequence: Synthetic oligonucleotide
aacucguaauuccagcaga

SEQ ID NO: 2874656 - RNA, 19 nt, Artificial Sequence
  Description of Artificial Sequence: Synthetic oligonucleotide
uccagcagaaagcaauuca

SEQ ID NO: 2874657 - RNA, 19 nt, Artificial Sequence
  Description of Artificial Sequence: Synthetic oligonucleotide
ucucaaacacacagaacug

SEQ ID NO: 2874658 - RNA, 19 nt, Artificial Sequence
  Description of Artificial Sequence: Synthetic oligonucleotide
uaugaauagauuggauaag

SEQ ID NO: 2874659 - RNA, 19 nt, Artificial Sequence
  Description of Artificial Sequence: Synthetic oligonucleotide
aacugugcugccuccgcac

SEQ ID NO: 2874660 - RNA, 19 nt, Artificial Sequence
  Description of Artificial Sequence: Synthetic oligonucleotide
auaacucguaauuccagca

SEQ ID NO: 2874661 - RNA, 19 nt, Artificial Sequence
  Description of Artificial Sequence: Synthetic oligonucleotide
gugcgaauaacagaaaccc

SEQ ID NO: 2874662 - RNA, 19 nt, Artificial Sequence
  Description of Artificial Sequence: Synthetic oligonucleotide
auccguauaaaacucugca

SEQ ID NO: 2874663 - RNA, 19 nt, Artificial Sequence
  Description of Artificial Sequence: Synthetic oligonucleotide
acugggaugaaagucacug

SEQ ID NO: 2874664 - RNA, 19 nt, Artificial Sequence
  Description of Artificial Sequence: Synthetic oligonucleotide
uucuuguuagaagacagac

SEQ ID NO: 2874665 - RNA, 19 nt, Artificial Sequence
  Description of Artificial Sequence: Synthetic oligonucleotide
aguguugaugaacauuugu

SEQ ID NO: 2874666 - RNA, 19 nt, Artificial Sequence
  Description of Artificial Sequence: Synthetic oligonucleotide
ucuuguuagaagacagacu

SEQ ID NO: 2874667 - RNA, 19 nt, Artificial Sequence
  Description of Artificial Sequence: Synthetic oligonucleotide
ugagaguucaucugaucca

SEQ ID NO: 2874668 - RNA, 19 nt, Artificial Sequence
  Description of Artificial Sequence: Synthetic oligonucleotide
aguuccucacacuccuugc

SEQ ID NO: 2874669 - RNA, 19 nt, Artificial Sequence
  Description of Artificial Sequence: Synthetic oligonucleotide
acagacugcuguuugcuag

SEQ ID NO: 2874670 - RNA, 19 nt, Artificial Sequence
  Description of Artificial Sequence: Synthetic oligonucleotide
guugaugaacauuuguaca

SEQ ID NO: 2874671 - RNA, 19 nt, Artificial Sequence
  Description of Artificial Sequence: Synthetic oligonucleotide
gauccaagaggcucauggg

SEQ ID NO: 2874672 - RNA, 19 nt, Artificial Sequence
  Description of Artificial Sequence: Synthetic oligonucleotide
ugggaugaaagucacuguc

SEQ ID NO: 2874673 - RNA, 19 nt, Artificial Sequence
  Description of Artificial Sequence: Synthetic oligonucleotide
caaaucugagaagagcucc

SEQ ID NO: 2874674 - RNA, 19 nt, Artificial Sequence
  Description of Artificial Sequence: Synthetic oligonucleotide
cuguuugcuaggaagauca

SEQ ID NO: 2874675 - RNA, 19 nt, Artificial Sequence
  Description of Artificial Sequence: Synthetic oligonucleotide
gcagaucucaaacacacag

SEQ ID NO: 2874676 - RNA, 19 nt, Artificial Sequence
  Description of Artificial Sequence: Synthetic oligonucleotide
uacucguguaaaauaacuc

SEQ ID NO: 2874677 - RNA, 19 nt, Artificial Sequence
  Description of Artificial Sequence: Synthetic oligonucleotide
aacacacagaacugugcug

SEQ ID NO: 2874678 - RNA, 19 nt, Artificial Sequence
  Description of Artificial Sequence: Synthetic oligonucleotide
guaaaauaacucguaauuc

SEQ ID NO: 2874679 - RNA, 19 nt, Artificial Sequence
  Description of Artificial Sequence: Synthetic oligonucleotide
ucacguuucuuacuguuuc

SEQ ID NO: 2874680 - RNA, 19 nt, Artificial Sequence
  Description of Artificial Sequence: Synthetic oligonucleotide
aaauuccuugaugucuuuc

SEQ ID NO: 2874681 - RNA, 19 nt, Artificial Sequence
  Description of Artificial Sequence: Synthetic oligonucleotide
gaagacagacugcuguuug

SEQ ID NO: 2874682 - RNA, 19 nt, Artificial Sequence
  Description of Artificial Sequence: Synthetic oligonucleotide
caagaaguguugaugaaca

SEQ ID NO: 2874683 - RNA, 19 nt, Artificial Sequence
  Description of Artificial Sequence: Synthetic oligonucleotide
acccagaagaggaucaacc

SEQ ID NO: 2874684 - RNA, 19 nt, Artificial Sequence
  Description of Artificial Sequence: Synthetic oligonucleotide
cagcagaucucaaacacac

SEQ ID NO: 2874685 - RNA, 19 nt, Artificial Sequence
  Description of Artificial Sequence: Synthetic oligonucleotide
aguguauaaaguagcauca

SEQ ID NO: 2874686 - RNA, 19 nt, Artificial Sequence
  Description of Artificial Sequence: Synthetic oligonucleotide
caaacacacagaacugugc

SEQ ID NO: 2874687 - RNA, 19 nt, Artificial Sequence
  Description of Artificial Sequence: Synthetic oligonucleotide
aucccgucaucucugagag

SEQ ID NO: 2874688 - RNA, 19 nt, Artificial Sequence
  Description of Artificial Sequence: Synthetic oligonucleotide
ucaagaaguguugaugaac

SEQ ID NO: 2874689 - RNA, 19 nt, Artificial Sequence
  Description of Artificial Sequence: Synthetic oligonucleotide
aucaaccgcagucaagaag

SEQ ID NO: 2874690 - RNA, 19 nt, Artificial Sequence
  Description of Artificial Sequence: Synthetic oligonucleotide
aggaagaucacguuucuua

SEQ ID NO: 2874691 - RNA, 19 nt, Artificial Sequence
  Description of Artificial Sequence: Synthetic oligonucleotide
uucccagcagaucucaaac

SEQ ID NO: 2874692 - RNA, 19 nt, Artificial Sequence
  Description of Artificial Sequence: Synthetic oligonucleotide
acugucaguguauaaagua

SEQ ID NO: 2874693 - RNA, 19 nt, Artificial Sequence
  Description of Artificial Sequence: Synthetic oligonucleotide
agaacugugcugccuccgc

SEQ ID NO: 2874694 - RNA, 19 nt, Artificial Sequence
  Description of Artificial Sequence: Synthetic oligonucleotide
uguacucguguaaaauaac

SEQ ID NO: 2874695 - RNA, 19 nt, Artificial Sequence
  Description of Artificial Sequence: Synthetic oligonucleotide
gaagagcuccuuuuauccc

SEQ ID NO: 2874696 - RNA, 19 nt, Artificial Sequence
  Description of Artificial Sequence: Synthetic oligonucleotide
gaugaacauuuguacaauc

SEQ ID NO: 2874697 - RNA, 19 nt, Artificial Sequence
  Description of Artificial Sequence: Synthetic oligonucleotide
uaucccgucaucucugaga

SEQ ID NO: 2874698 - RNA, 19 nt, Artificial Sequence
  Description of Artificial Sequence: Synthetic oligonucleotide
accaaaucugagaagagcu

SEQ ID NO: 2874699 - RNA, 19 nt, Artificial Sequence
  Description of Artificial Sequence: Synthetic oligonucleotide
uuguuagaagacagacugc

SEQ ID NO: 2874700 - RNA, 19 nt, Artificial Sequence
  Description of Artificial Sequence: Synthetic oligonucleotide
acuuaggcagcuuuguuuu

SEQ ID NO: 2874701 - RNA, 19 nt, Artificial Sequence
  Description of Artificial Sequence: Synthetic oligonucleotide
agaaacccagaagaggauc

SEQ ID NO: 2874702 - RNA, 19 nt, Artificial Sequence
  Description of Artificial Sequence: Synthetic oligonucleotide
ugcgaauaacagaaaccca

SEQ ID NO: 2874703 - RNA, 19 nt, Artificial Sequence
  Description of Artificial Sequence: Synthetic oligonucleotide
gccauauucuguuauauuc

SEQ ID NO: 2874704 - RNA, 19 nt, Artificial Sequence
  Description of Artificial Sequence: Synthetic oligonucleotide
acagaacugugcugccucc

SEQ ID NO: 2874705 - RNA, 19 nt, Artificial Sequence
  Description of Artificial Sequence: Synthetic oligonucleotide
guuugcuaggaagaucacg

SEQ ID NO: 2874706 - RNA, 19 nt, Artificial Sequence
  Description of Artificial Sequence: Synthetic oligonucleotide
uagacgcucauuacuguac

SEQ ID NO: 2874707 - RNA, 19 nt, Artificial Sequence
  Description of Artificial Sequence: Synthetic oligonucleotide
caauccguauaaaacucug

SEQ ID NO: 2874708 - RNA, 19 nt, Artificial Sequence
  Description of Artificial Sequence: Synthetic oligonucleotide
cagaaagcaauucauugca

SEQ ID NO: 2874709 - RNA, 19 nt, Artificial Sequence
  Description of Artificial Sequence: Synthetic oligonucleotide
uguuucacuuagacgcuca

SEQ ID NO: 2874710 - RNA, 19 nt, Artificial Sequence
  Description of Artificial Sequence: Synthetic oligonucleotide
acuuagacgcucauuacug

SEQ ID NO: 2874711 - RNA, 19 nt, Artificial Sequence
  Description of Artificial Sequence: Synthetic oligonucleotide
gucuuucuccuccaguucc

SEQ ID NO: 2874712 - RNA, 19 nt, Artificial Sequence
  Description of Artificial Sequence: Synthetic oligonucleotide
ugcaguaacuuugcaacug

SEQ ID NO: 2874713 - RNA, 19 nt, Artificial Sequence
  Description of Artificial Sequence: Synthetic oligonucleotide
acgcucauuacuguacucg

SEQ ID NO: 2874714 - RNA, 19 nt, Artificial Sequence
  Description of Artificial Sequence: Synthetic oligonucleotide
uccguauaaaacucugcaa

SEQ ID NO: 2874715 - RNA, 19 nt, Artificial Sequence
  Description of Artificial Sequence: Synthetic oligonucleotide
uuucuuacuguuucacuua

SEQ ID NO: 2874716 - RNA, 19 nt, Artificial Sequence
  Description of Artificial Sequence: Synthetic oligonucleotide
gagaagagcuccuuuuauc

SEQ ID NO: 2874717 - RNA, 19 nt, Artificial Sequence
  Description of Artificial Sequence: Synthetic oligonucleotide
gcagaaagcaauucauugc

SEQ ID NO: 2874718 - RNA, 19 nt, Artificial Sequence
  Description of Artificial Sequence: Synthetic oligonucleotide
ucugagaagagcuccuuuu

SEQ ID NO: 2874719 - RNA, 19 nt, Artificial Sequence
  Description of Artificial Sequence: Synthetic oligonucleotide
ugagaagagcuccuuuuau

SEQ ID NO: 2874720 - RNA, 19 nt, Artificial Sequence
  Description of Artificial Sequence: Synthetic oligonucleotide
agaggugugcgaauaacag

SEQ ID NO: 2874721 - RNA, 19 nt, Artificial Sequence
  Description of Artificial Sequence: Synthetic oligonucleotide
ggaugaaagucacugucag

SEQ ID NO: 2874722 - RNA, 19 nt, Artificial Sequence
  Description of Artificial Sequence: Synthetic oligonucleotide
uuaggcagcuuuguuuucc

SEQ ID NO: 2874723 - RNA, 19 nt, Artificial Sequence
  Description of Artificial Sequence: Synthetic oligonucleotide
agcaucaauaugaauagau

SEQ ID NO: 2874724 - RNA, 19 nt, Artificial Sequence
  Description of Artificial Sequence: Synthetic oligonucleotide
gaauaacagaaacccagaa

SEQ ID NO: 2874725 - RNA, 19 nt, Artificial Sequence
  Description of Artificial Sequence: Synthetic oligonucleotide
cagaagaggaucaaccgca

SEQ ID NO: 2874726 - RNA, 19 nt, Artificial Sequence
  Description of Artificial Sequence: Synthetic oligonucleotide
aaaccaaaucugagaagag

SEQ ID NO: 2874727 - RNA, 19 nt, Artificial Sequence
  Description of Artificial Sequence: Synthetic oligonucleotide
acuguacucguguaaaaua

SEQ ID NO: 2874728 - RNA, 19 nt, Artificial Sequence
  Description of Artificial Sequence: Synthetic oligonucleotide
aacauuuguacaauccgua

SEQ ID NO: 2874729 - RNA, 19 nt, Artificial Sequence
  Description of Artificial Sequence: Synthetic oligonucleotide
guauaaaguagcaucaaua

SEQ ID NO: 2874730 - RNA, 19 nt, Artificial Sequence
  Description of Artificial Sequence: Synthetic oligonucleotide
ugcaacugggaugaaaguc

SEQ ID NO: 2874731 - RNA, 19 nt, Artificial Sequence
  Description of Artificial Sequence: Synthetic oligonucleotide
gaguucaucugauccaaga

SEQ ID NO: 2874732 - RNA, 19 nt, Artificial Sequence
  Description of Artificial Sequence: Synthetic oligonucleotide
auauucuuguuagaagaca

SEQ ID NO: 2874733 - RNA, 19 nt, Artificial Sequence
  Description of Artificial Sequence: Synthetic oligonucleotide
aagcaauucauugcaguaa

SEQ ID NO: 2874734 - RNA, 19 nt, Artificial Sequence
  Description of Artificial Sequence: Synthetic oligonucleotide
auuacuguacucguguaaa

SEQ ID NO: 2874735 - RNA, 19 nt, Artificial Sequence
  Description of Artificial Sequence: Synthetic oligonucleotide
guaauuccagcagaaagca

SEQ ID NO: 2874736 - RNA, 19 nt, Artificial Sequence
  Description of Artificial Sequence: Synthetic oligonucleotide
uccuuuuaucccgucaucu

SEQ ID NO: 2874737 - RNA, 19 nt, Artificial Sequence
  Description of Artificial Sequence: Synthetic oligonucleotide
gcgaauaacagaaacccag

SEQ ID NO: 2874738 - RNA, 19 nt, Artificial Sequence
  Description of Artificial Sequence: Synthetic oligonucleotide
ucguguaaaauaacucgua

SEQ ID NO: 2874739 - RNA, 19 nt, Artificial Sequence
  Description of Artificial Sequence: Synthetic oligonucleotide
gugugcgaauaacagaaac

SEQ ID NO: 2874740 - RNA, 19 nt, Artificial Sequence
  Description of Artificial Sequence: Synthetic oligonucleotide
cguaauuccagcagaaagc

SEQ ID NO: 2874741 - RNA, 19 nt, Artificial Sequence
  Description of Artificial Sequence: Synthetic oligonucleotide
ugcuaggaagaucacguuu

SEQ ID NO: 2874742 - RNA, 19 nt, Artificial Sequence
  Description of Artificial Sequence: Synthetic oligonucleotide
ugaaagucacugucagugu

SEQ ID NO: 2874743 - RNA, 19 nt, Artificial Sequence
  Description of Artificial Sequence: Synthetic oligonucleotide
acauuuguacaauccguau

SEQ ID NO: 2874744 - RNA, 19 nt, Artificial Sequence
  Description of Artificial Sequence: Synthetic oligonucleotide
aaaguagcaucaauaugaa

SEQ ID NO: 2874745 - RNA, 19 nt, Artificial Sequence
  Description of Artificial Sequence: Synthetic oligonucleotide
aagaaguguugaugaacau

SEQ ID NO: 2874746 - RNA, 19 nt, Artificial Sequence
  Description of Artificial Sequence: Synthetic oligonucleotide
augucuuucuccuccaguu

SEQ ID NO: 2874747 - RNA, 19 nt, Artificial Sequence
  Description of Artificial Sequence: Synthetic oligonucleotide
acguuucuuacuguuucac

SEQ ID NO: 2874748 - RNA, 19 nt, Artificial Sequence
  Description of Artificial Sequence: Synthetic oligonucleotide
aaaucugagaagagcuccu

SEQ ID NO: 2874749 - RNA, 19 nt, Artificial Sequence
  Description of Artificial Sequence: Synthetic oligonucleotide
gaaguguugaugaacauuu

SEQ ID NO: 2874750 - RNA, 19 nt, Artificial Sequence
  Description of Artificial Sequence: Synthetic oligonucleotide
uuagacgcucauuacugua

SEQ ID NO: 2874751 - RNA, 19 nt, Artificial Sequence
  Description of Artificial Sequence: Synthetic oligonucleotide
aggugugcgaauaacagaa

SEQ ID NO: 2874752 - RNA, 19 nt, Artificial Sequence
  Description of Artificial Sequence: Synthetic oligonucleotide
uuccacuuaggcagcuuug

SEQ ID NO: 2874753 - RNA, 19 nt, Artificial Sequence
  Description of Artificial Sequence: Synthetic oligonucleotide
ugcagccauauucuguuau

SEQ ID NO: 2874754 - RNA, 19 nt, Artificial Sequence
  Description of Artificial Sequence: Synthetic oligonucleotide
gaaacccagaagaggauca

SEQ ID NO: 2874755 - RNA, 19 nt, Artificial Sequence
  Description of Artificial Sequence: Synthetic oligonucleotide
augggcuuccacuuaggca

SEQ ID NO: 2874756 - RNA, 19 nt, Artificial Sequence
  Description of Artificial Sequence: Synthetic oligonucleotide
ucacuuagacgcucauuac

SEQ ID NO: 2874757 - RNA, 19 nt, Artificial Sequence
  Description of Artificial Sequence: Synthetic oligonucleotide
uuucccagcagaucucaaa

SEQ ID NO: 2874758 - RNA, 19 nt, Artificial Sequence
  Description of Artificial Sequence: Synthetic oligonucleotide
ugaugucuuucuccuccag

SEQ ID NO: 2874759 - RNA, 19 nt, Artificial Sequence
  Description of Artificial Sequence: Synthetic oligonucleotide
gcaguaacuuugcaacugg

SEQ ID NO: 2874760 - RNA, 19 nt, Artificial Sequence
  Description of Artificial Sequence: Synthetic oligonucleotide
cuguacucguguaaaauaa

SEQ ID NO: 2874761 - RNA, 19 nt, Artificial Sequence
  Description of Artificial Sequence: Synthetic oligonucleotide
guaacuuugcaacugggau

SEQ ID NO: 2874762 - RNA, 19 nt, Artificial Sequence
  Description of Artificial Sequence: Synthetic oligonucleotide
cagucaagaaguguugaug

SEQ ID NO: 2874763 - RNA, 19 nt, Artificial Sequence
  Description of Artificial Sequence: Synthetic oligonucleotide
uuuaucccgucaucucuga

SEQ ID NO: 2874764 - RNA, 19 nt, Artificial Sequence
  Description of Artificial Sequence: Synthetic oligonucleotide
ucaucugauccaagaggcu

SEQ ID NO: 2874765 - RNA, 19 nt, Artificial Sequence
  Description of Artificial Sequence: Synthetic oligonucleotide
gaaagucacugucagugua

SEQ ID NO: 2874766 - RNA, 19 nt, Artificial Sequence
  Description of Artificial Sequence: Synthetic oligonucleotide
cauugcaguaacuuugcaa

SEQ ID NO: 2874767 - RNA, 19 nt, Artificial Sequence
  Description of Artificial Sequence: Synthetic oligonucleotide
ucuuacuguuucacuuaga

SEQ ID NO: 2874768 - RNA, 19 nt, Artificial Sequence
  Description of Artificial Sequence: Synthetic oligonucleotide
ggaagaucacguuucuuac

SEQ ID NO: 2874769 - RNA, 19 nt, Artificial Sequence
  Description of Artificial Sequence: Synthetic oligonucleotide
agcuuuguuuucccagcag

SEQ ID NO: 2874770 - RNA, 19 nt, Artificial Sequence
  Description of Artificial Sequence: Synthetic oligonucleotide
ucaguguauaaaguagcau

SEQ ID NO: 2874771 - RNA, 19 nt, Artificial Sequence
  Description of Artificial Sequence: Synthetic oligonucleotide
aguaacuuugcaacuggga

SEQ ID NO: 2874772 - RNA, 19 nt, Artificial Sequence
  Description of Artificial Sequence: Synthetic oligonucleotide
gaggugugcgaauaacaga

SEQ ID NO: 2874773 - RNA, 19 nt, Artificial Sequence
  Description of Artificial Sequence: Synthetic oligonucleotide
uugcaguaacuuugcaacu

SEQ ID NO: 2874774 - RNA, 19 nt, Artificial Sequence
  Description of Artificial Sequence: Synthetic oligonucleotide
ucauugcaguaacuuugca

SEQ ID NO: 2874775 - RNA, 19 nt, Artificial Sequence
  Description of Artificial Sequence: Synthetic oligonucleotide
ugucuuucuccuccaguuc

SEQ ID NO: 2874776 - RNA, 19 nt, Artificial Sequence
  Description of Artificial Sequence: Synthetic oligonucleotide
aaagucacugucaguguau

SEQ ID NO: 2874777 - RNA, 19 nt, Artificial Sequence
  Description of Artificial Sequence: Synthetic oligonucleotide
uuaucccgucaucucugag

SEQ ID NO: 2874778 - RNA, 19 nt, Artificial Sequence
  Description of Artificial Sequence: Synthetic oligonucleotide
caucugauccaagaggcuc

SEQ ID NO: 2874779 - RNA, 19 nt, Artificial Sequence
  Description of Artificial Sequence: Synthetic oligonucleotide
agaggaucaaccgcaguca

SEQ ID NO: 2874780 - RNA, 19 nt, Artificial Sequence
  Description of Artificial Sequence: Synthetic oligonucleotide
ucugagaguucaucugauc

SEQ ID NO: 2874781 - RNA, 19 nt, Artificial Sequence
  Description of Artificial Sequence: Synthetic oligonucleotide
uacuguacucguguaaaau

SEQ ID NO: 2874782 - RNA, 19 nt, Artificial Sequence
  Description of Artificial Sequence: Synthetic oligonucleotide
uguuuucccagcagaucuc

SEQ ID NO: 2874783 - RNA, 19 nt, Artificial Sequence
  Description of Artificial Sequence: Synthetic oligonucleotide
ugaugaacauuuguacaau

SEQ ID NO: 2874784 - RNA, 19 nt, Artificial Sequence
  Description of Artificial Sequence: Synthetic oligonucleotide
uuacuguacucguguaaaa

SEQ ID NO: 2874785 - RNA, 19 nt, Artificial Sequence
  Description of Artificial Sequence: Synthetic oligonucleotide
auauucuguuauauucuug

SEQ ID NO: 2874786 - RNA, 19 nt, Artificial Sequence
  Description of Artificial Sequence: Synthetic oligonucleotide
agaaagcaauucauugcag

SEQ ID NO: 2874787 - RNA, 19 nt, Artificial Sequence
  Description of Artificial Sequence: Synthetic oligonucleotide
aggcucaugggcuuccacu

SEQ ID NO: 2874788 - RNA, 19 nt, Artificial Sequence
  Description of Artificial Sequence: Synthetic oligonucleotide
agacgcucauuacuguacu

SEQ ID NO: 2874789 - RNA, 19 nt, Artificial Sequence
  Description of Artificial Sequence: Synthetic oligonucleotide
uugaugucuuucuccucca

SEQ ID NO: 2874790 - RNA, 19 nt, Artificial Sequence
  Description of Artificial Sequence: Synthetic oligonucleotide
uaggcagcuuuguuuuccc

SEQ ID NO: 2874791 - RNA, 19 nt, Artificial Sequence
  Description of Artificial Sequence: Synthetic oligonucleotide
agaaguguugaugaacauu

SEQ ID NO: 2874792 - RNA, 19 nt, Artificial Sequence
  Description of Artificial Sequence: Synthetic oligonucleotide
uaauuccagcagaaagcaa

SEQ ID NO: 2874793 - RNA, 19 nt, Artificial Sequence
  Description of Artificial Sequence: Synthetic oligonucleotide
ucaucucugagaguucauc

SEQ ID NO: 2874794 - RNA, 19 nt, Artificial Sequence
  Description of Artificial Sequence: Synthetic oligonucleotide
ggcagcuuuguuuucccag

SEQ ID NO: 2874795 - RNA, 19 nt, Artificial Sequence
  Description of Artificial Sequence: Synthetic oligonucleotide
caacugggaugaaagucac

SEQ ID NO: 2874796 - RNA, 19 nt, Artificial Sequence
  Description of Artificial Sequence: Synthetic oligonucleotide
ucacacuccuugcagccau

SEQ ID NO: 2874797 - RNA, 19 nt, Artificial Sequence
  Description of Artificial Sequence: Synthetic oligonucleotide
gaacauuuguacaauccgu

SEQ ID NO: 2874798 - RNA, 19 nt, Artificial Sequence
  Description of Artificial Sequence: Synthetic oligonucleotide
uagaagacagacugcuguu

SEQ ID NO: 2874799 - RNA, 19 nt, Artificial Sequence
  Description of Artificial Sequence: Synthetic oligonucleotide
cccagaagaggaucaaccg

SEQ ID NO: 2874800 - RNA, 19 nt, Artificial Sequence
  Description of Artificial Sequence: Synthetic oligonucleotide
cacagaacugugcugccuc

SEQ ID NO: 2874801 - RNA, 19 nt, Artificial Sequence
  Description of Artificial Sequence: Synthetic oligonucleotide
gaucucaaacacacagaac

SEQ ID NO: 2874802 - RNA, 19 nt, Artificial Sequence
  Description of Artificial Sequence: Synthetic oligonucleotide
uugcaacugggaugaaagu

SEQ ID NO: 2874803 - RNA, 19 nt, Artificial Sequence
  Description of Artificial Sequence: Synthetic oligonucleotide
ucauuacuguacucgugua

SEQ ID NO: 2874804 - RNA, 19 nt, Artificial Sequence
  Description of Artificial Sequence: Synthetic oligonucleotide
uccacuuaggcagcuuugu

SEQ ID NO: 2874805 - RNA, 19 nt, Artificial Sequence
  Description of Artificial Sequence: Synthetic oligonucleotide
aaguguugaugaacauuug

SEQ ID NO: 2874806 - RNA, 19 nt, Artificial Sequence
  Description of Artificial Sequence: Synthetic oligonucleotide
acaauccguauaaaacucu

SEQ ID NO: 2874807 - RNA, 19 nt, Artificial Sequence
  Description of Artificial Sequence: Synthetic oligonucleotide
auucuguuauauucuuguu

SEQ ID NO: 2874808 - RNA, 19 nt, Artificial Sequence
  Description of Artificial Sequence: Synthetic oligonucleotide
cagaggugugcgaauaaca

SEQ ID NO: 2874809 - RNA, 19 nt, Artificial Sequence
  Description of Artificial Sequence: Synthetic oligonucleotide
gucacugucaguguauaaa

SEQ ID NO: 2874810 - RNA, 19 nt, Artificial Sequence
  Description of Artificial Sequence: Synthetic oligonucleotide
uguuugcuaggaagaucac

SEQ ID NO: 2874811 - RNA, 19 nt, Artificial Sequence
  Description of Artificial Sequence: Synthetic oligonucleotide
ggaucaaccgcagucaaga

SEQ ID NO: 2874812 - RNA, 19 nt, Artificial Sequence
  Description of Artificial Sequence: Synthetic oligonucleotide
ccagaagaggaucaaccgc

SEQ ID NO: 2874813 - RNA, 19 nt, Artificial Sequence
  Description of Artificial Sequence: Synthetic oligonucleotide
cauuuguacaauccguaua

SEQ ID NO: 2874814 - RNA, 19 nt, Artificial Sequence
  Description of Artificial Sequence: Synthetic oligonucleotide
cucauuacuguacucgugu

SEQ ID NO: 2874815 - RNA, 19 nt, Artificial Sequence
  Description of Artificial Sequence: Synthetic oligonucleotide
guguaaaauaacucguaau

SEQ ID NO: 2874816 - RNA, 19 nt, Artificial Sequence
  Description of Artificial Sequence: Synthetic oligonucleotide
agaucacguuucuuacugu

SEQ ID NO: 2874817 - RNA, 19 nt, Artificial Sequence
  Description of Artificial Sequence: Synthetic oligonucleotide
cucguguaaaauaacucgu

SEQ ID NO: 2874818 - RNA, 19 nt, Artificial Sequence
  Description of Artificial Sequence: Synthetic oligonucleotide
guuagaagacagacugcug

SEQ ID NO: 2874819 - RNA, 19 nt, Artificial Sequence
  Description of Artificial Sequence: Synthetic oligonucleotide
uuuguacaauccguauaaa

SEQ ID NO: 2874820 - RNA, 19 nt, Artificial Sequence
  Description of Artificial Sequence: Synthetic oligonucleotide
agcuccuuuuaucccguca

SEQ ID NO: 2874821 - RNA, 19 nt, Artificial Sequence
  Description of Artificial Sequence: Synthetic oligonucleotide
cagaucucaaacacacaga

SEQ ID NO: 2874822 - RNA, 19 nt, Artificial Sequence
  Description of Artificial Sequence: Synthetic oligonucleotide
guguugaugaacauuugua

SEQ ID NO: 2874823 - RNA, 19 nt, Artificial Sequence
  Description of Artificial Sequence: Synthetic oligonucleotide
agacagacugcuguuugcu

SEQ ID NO: 2874824 - RNA, 19 nt, Artificial Sequence
  Description of Artificial Sequence: Synthetic oligonucleotide
cuuuuaucccgucaucucu

SEQ ID NO: 2874825 - RNA, 19 nt, Artificial Sequence
  Description of Artificial Sequence: Synthetic oligonucleotide
ucuccuccaguuccucaca

SEQ ID NO: 2874826 - RNA, 19 nt, Artificial Sequence
  Description of Artificial Sequence: Synthetic oligonucleotide
cugcuguuugcuaggaaga

SEQ ID NO: 2874827 - RNA, 19 nt, Artificial Sequence
  Description of Artificial Sequence: Synthetic oligonucleotide
gagaguucaucugauccaa

SEQ ID NO: 2874828 - RNA, 19 nt, Artificial Sequence
  Description of Artificial Sequence: Synthetic oligonucleotide
gaagaucacguuucuuacu

SEQ ID NO: 2874829 - RNA, 19 nt, Artificial Sequence
  Description of Artificial Sequence: Synthetic oligonucleotide
auucuuguuagaagacaga

SEQ ID NO: 2874830 - RNA, 19 nt, Artificial Sequence
  Description of Artificial Sequence: Synthetic oligonucleotide
gcagcuuuguuuucccagc

SEQ ID NO: 2874831 - RNA, 19 nt, Artificial Sequence
  Description of Artificial Sequence: Synthetic oligonucleotide
agccauauucuguuauauu

SEQ ID NO: 2874832 - RNA, 19 nt, Artificial Sequence
  Description of Artificial Sequence: Synthetic oligonucleotide
aaccgcagucaagaagugu

SEQ ID NO: 2874833 - RNA, 19 nt, Artificial Sequence
  Description of Artificial Sequence: Synthetic oligonucleotide
gcuuuguuuucccagcaga

SEQ ID NO: 2874834 - RNA, 19 nt, Artificial Sequence
  Description of Artificial Sequence: Synthetic oligonucleotide
cacacagaacugugcugcc

SEQ ID NO: 2874835 - RNA, 19 nt, Artificial Sequence
  Description of Artificial Sequence: Synthetic oligonucleotide
agaagaggaucaaccgcag

SEQ ID NO: 2874836 - RNA, 19 nt, Artificial Sequence
  Description of Artificial Sequence: Synthetic oligonucleotide
gcaacugggaugaaaguca

SEQ ID NO: 2874837 - RNA, 19 nt, Artificial Sequence
  Description of Artificial Sequence: Synthetic oligonucleotide
gcuaggaagaucacguuuc

SEQ ID NO: 2874838 - RNA, 19 nt, Artificial Sequence
  Description of Artificial Sequence: Synthetic oligonucleotide
cauuacuguacucguguaa

SEQ ID NO: 2874839 - RNA, 19 nt, Artificial Sequence
  Description of Artificial Sequence: Synthetic oligonucleotide
aucugauccaagaggcuca

SEQ ID NO: 2874840 - RNA, 19 nt, Artificial Sequence
  Description of Artificial Sequence: Synthetic oligonucleotide
uuuucccagcagaucucaa

SEQ ID NO: 2874841 - RNA, 19 nt, Artificial Sequence
  Description of Artificial Sequence: Synthetic oligonucleotide
accgcagucaagaaguguu

SEQ ID NO: 2874842 - RNA, 19 nt, Artificial Sequence
  Description of Artificial Sequence: Synthetic oligonucleotide
uagcaucaauaugaauaga

SEQ ID NO: 2874843 - RNA, 19 nt, Artificial Sequence
  Description of Artificial Sequence: Synthetic oligonucleotide
ugugcugccuccgcacagc

SEQ ID NO: 2874844 - RNA, 19 nt, Artificial Sequence
  Description of Artificial Sequence: Synthetic oligonucleotide
guuccucacacuccuugca

SEQ ID NO: 2874845 - RNA, 19 nt, Artificial Sequence
  Description of Artificial Sequence: Synthetic oligonucleotide
gaugaaagucacugucagu

SEQ ID NO: 2874846 - RNA, 19 nt, Artificial Sequence
  Description of Artificial Sequence: Synthetic oligonucleotide
ccguauaaaacucugcaaa

SEQ ID NO: 2874847 - RNA, 19 nt, Artificial Sequence
  Description of Artificial Sequence: Synthetic oligonucleotide
aaacccagaagaggaucaa

SEQ ID NO: 2874848 - RNA, 19 nt, Artificial Sequence
  Description of Artificial Sequence: Synthetic oligonucleotide
guacucguguaaaauaacu

SEQ ID NO: 2874849 - RNA, 19 nt, Artificial Sequence
  Description of Artificial Sequence: Synthetic oligonucleotide
gacgcucauuacuguacuc

SEQ ID NO: 2874850 - RNA, 19 nt, Artificial Sequence
  Description of Artificial Sequence: Synthetic oligonucleotide
caucucugagaguucaucu

SEQ ID NO: 2874851 - RNA, 19 nt, Artificial Sequence
  Description of Artificial Sequence: Synthetic oligonucleotide
gaacugugcugccuccgca

SEQ ID NO: 2874852 - RNA, 19 nt, Artificial Sequence
  Description of Artificial Sequence: Synthetic oligonucleotide
aagucacugucaguguaua

SEQ ID NO: 2874853 - RNA, 19 nt, Artificial Sequence
  Description of Artificial Sequence: Synthetic oligonucleotide
gaucacguuucuuacuguu

SEQ ID NO: 2874854 - RNA, 19 nt, Artificial Sequence
  Description of Artificial Sequence: Synthetic oligonucleotide
gucaagaaguguugaugaa

SEQ ID NO: 2874855 - RNA, 19 nt, Artificial Sequence
  Description of Artificial Sequence: Synthetic oligonucleotide
acuguuucacuuagacgcu

SEQ ID NO: 2874856 - RNA, 19 nt, Artificial Sequence
  Description of Artificial Sequence: Synthetic oligonucleotide
ugcuguuugcuaggaagau

SEQ ID NO: 2874857 - RNA, 19 nt, Artificial Sequence
  Description of Artificial Sequence: Synthetic oligonucleotide
gaggaucaaccgcagucaa

SEQ ID NO: 2874858 - RNA, 19 nt, Artificial Sequence
  Description of Artificial Sequence: Synthetic oligonucleotide
uccuccaguuccucacacu

SEQ ID NO: 2874859 - RNA, 19 nt, Artificial Sequence
  Description of Artificial Sequence: Synthetic oligonucleotide
acugugcugccuccgcaca

SEQ ID NO: 2874860 - RNA, 19 nt, Artificial Sequence
  Description of Artificial Sequence: Synthetic oligonucleotide
uuucacuuagacgcucauu

SEQ ID NO: 2874861 - RNA, 19 nt, Artificial Sequence
  Description of Artificial Sequence: Synthetic oligonucleotide
cuuaggcagcuuuguuuuc

SEQ ID NO: 2874862 - RNA, 19 nt, Artificial Sequence
  Description of Artificial Sequence: Synthetic oligonucleotide
cuugcagccauauucuguu

SEQ ID NO: 2874863 - RNA, 19 nt, Artificial Sequence
  Description of Artificial Sequence: Synthetic oligonucleotide
agucacugucaguguauaa

SEQ ID NO: 2874864 - RNA, 19 nt, Artificial Sequence
  Description of Artificial Sequence: Synthetic oligonucleotide
cagaacugugcugccuccg

SEQ ID NO: 2874865 - RNA, 19 nt, Artificial Sequence
  Description of Artificial Sequence: Synthetic oligonucleotide
guuuucccagcagaucuca

SEQ ID NO: 2874866 - RNA, 19 nt, Artificial Sequence
  Description of Artificial Sequence: Synthetic oligonucleotide
cuguuauauucuuguuaga

SEQ ID NO: 2874867 - RNA, 19 nt, Artificial Sequence
  Description of Artificial Sequence: Synthetic oligonucleotide
acagcagaggugugcgaau

SEQ ID NO: 2874868 - RNA, 19 nt, Artificial Sequence
  Description of Artificial Sequence: Synthetic oligonucleotide
cacuuagacgcucauuacu

SEQ ID NO: 2874869 - RNA, 19 nt, Artificial Sequence
  Description of Artificial Sequence: Synthetic oligonucleotide
cuccuuuuaucccgucauc

SEQ ID NO: 2874870 - RNA, 19 nt, Artificial Sequence
  Description of Artificial Sequence: Synthetic oligonucleotide
gcugccuccgcacagcaga

SEQ ID NO: 2874871 - RNA, 19 nt, Artificial Sequence
  Description of Artificial Sequence: Synthetic oligonucleotide
ccaaaucugagaagagcuc

SEQ ID NO: 2874872 - RNA, 19 nt, Artificial Sequence
  Description of Artificial Sequence: Synthetic oligonucleotide
agcagaggugugcgaauaa

SEQ ID NO: 2874873 - RNA, 19 nt, Artificial Sequence
  Description of Artificial Sequence: Synthetic oligonucleotide
uugcuaggaagaucacguu

SEQ ID NO: 2874874 - RNA, 19 nt, Artificial Sequence
  Description of Artificial Sequence: Synthetic oligonucleotide
acucguaauuccagcagaa

SEQ ID NO: 2874875 - RNA, 19 nt, Artificial Sequence
  Description of Artificial Sequence: Synthetic oligonucleotide
gaucaaccgcagucaagaa

SEQ ID NO: 2874876 - RNA, 19 nt, Artificial Sequence
  Description of Artificial Sequence: Synthetic oligonucleotide
cacguuucuuacuguuuca

SEQ ID NO: 2874877 - RNA, 19 nt, Artificial Sequence
  Description of Artificial Sequence: Synthetic oligonucleotide
aggaucaaccgcagucaag

SEQ ID NO: 2874878 - RNA, 19 nt, Artificial Sequence
  Description of Artificial Sequence: Synthetic oligonucleotide
ccuuuuaucccgucaucuc

SEQ ID NO: 2874879 - RNA, 19 nt, Artificial Sequence
  Description of Artificial Sequence: Synthetic oligonucleotide
caaccgcagucaagaagug

SEQ ID NO: 2874880 - RNA, 19 nt, Artificial Sequence
  Description of Artificial Sequence: Synthetic oligonucleotide
cugagaagagcuccuuuua

SEQ ID NO: 2874881 - RNA, 19 nt, Artificial Sequence
  Description of Artificial Sequence: Synthetic oligonucleotide
gacagacugcuguuugcua

SEQ ID NO: 2874882 - RNA, 19 nt, Artificial Sequence
  Description of Artificial Sequence: Synthetic oligonucleotide
cugugcugccuccgcacag

SEQ ID NO: 2874883 - RNA, 19 nt, Artificial Sequence
  Description of Artificial Sequence: Synthetic oligonucleotide
aacugggaugaaagucacu

SEQ ID NO: 2874884 - RNA, 19 nt, Artificial Sequence
  Description of Artificial Sequence: Synthetic oligonucleotide
auuccagcagaaagcaauu

SEQ ID NO: 2874885 - RNA, 19 nt, Artificial Sequence
  Description of Artificial Sequence: Synthetic oligonucleotide
cucaaacacacagaacugu

SEQ ID NO: 2874886 - RNA, 19 nt, Artificial Sequence
  Description of Artificial Sequence: Synthetic oligonucleotide
cuccuugcagccauauucu

SEQ ID NO: 2874887 - RNA, 19 nt, Artificial Sequence
  Description of Artificial Sequence: Synthetic oligonucleotide
gggaugaaagucacuguca

SEQ ID NO: 2874888 - RNA, 19 nt, Artificial Sequence
  Description of Artificial Sequence: Synthetic oligonucleotide
ucugauccaagaggcucau

SEQ ID NO: 2874889 - RNA, 19 nt, Artificial Sequence
  Description of Artificial Sequence: Synthetic oligonucleotide
acacagaacugugcugccu

SEQ ID NO: 2874890 - RNA, 19 nt, Artificial Sequence
  Description of Artificial Sequence: Synthetic oligonucleotide
cuguuucacuuagacgcuc

SEQ ID NO: 2874891 - RNA, 19 nt, Artificial Sequence
  Description of Artificial Sequence: Synthetic oligonucleotide
cuuagacgcucauuacugu

SEQ ID NO: 2874892 - RNA, 19 nt, Artificial Sequence
  Description of Artificial Sequence: Synthetic oligonucleotide
gaggcucaugggcuuccac

SEQ ID NO: 2874893 - RNA, 19 nt, Artificial Sequence
  Description of Artificial Sequence: Synthetic oligonucleotide
gaagaggaucaaccgcagu

SEQ ID NO: 2874894 - RNA, 19 nt, Artificial Sequence
  Description of Artificial Sequence: Synthetic oligonucleotide
cuuugcaacugggaugaaa

SEQ ID NO: 2874895 - RNA, 19 nt, Artificial Sequence
  Description of Artificial Sequence: Synthetic oligonucleotide
cugccuccgcacagcagag

SEQ ID NO: 2874896 - RNA, 19 nt, Artificial Sequence
  Description of Artificial Sequence: Synthetic oligonucleotide
aggcagcuuuguuuuccca

SEQ ID NO: 2874897 - RNA, 19 nt, Artificial Sequence
  Description of Artificial Sequence: Synthetic oligonucleotide
uccgcacagcagaggugug

SEQ ID NO: 2874898 - RNA, 19 nt, Artificial Sequence
  Description of Artificial Sequence: Synthetic oligonucleotide
aucacguuucuuacuguuu

SEQ ID NO: 2874899 - RNA, 19 nt, Artificial Sequence
  Description of Artificial Sequence: Synthetic oligonucleotide
cacuuaggcagcuuuguuu

SEQ ID NO: 2874900 - RNA, 19 nt, Artificial Sequence
  Description of Artificial Sequence: Synthetic oligonucleotide
uaggaagaucacguuucuu

SEQ ID NO: 2874901 - RNA, 19 nt, Artificial Sequence
  Description of Artificial Sequence: Synthetic oligonucleotide
cagcuuuguuuucccagca

SEQ ID NO: 2874902 - RNA, 19 nt, Artificial Sequence
  Description of Artificial Sequence: Synthetic oligonucleotide
agagcuccuuuuaucccgu

SEQ ID NO: 2874903 - RNA, 19 nt, Artificial Sequence
  Description of Artificial Sequence: Synthetic oligonucleotide
ugccuccgcacagcagagg

SEQ ID NO: 2874904 - RNA, 19 nt, Artificial Sequence
  Description of Artificial Sequence: Synthetic oligonucleotide
cacugucaguguauaaagu

SEQ ID NO: 2874905 - RNA, 19 nt, Artificial Sequence
  Description of Artificial Sequence: Synthetic oligonucleotide
agacugcuguuugcuagga

SEQ ID NO: 2874906 - RNA, 19 nt, Artificial Sequence
  Description of Artificial Sequence: Synthetic oligonucleotide
agcagaucucaaacacaca

SEQ ID NO: 2874907 - RNA, 19 nt, Artificial Sequence
  Description of Artificial Sequence: Synthetic oligonucleotide
uugcagccauauucuguua

SEQ ID NO: 2874908 - RNA, 19 nt, Artificial Sequence
  Description of Artificial Sequence: Synthetic oligonucleotide
gacugcuguuugcuaggaa

SEQ ID NO: 2874909 - RNA, 19 nt, Artificial Sequence
  Description of Artificial Sequence: Synthetic oligonucleotide
cacagcagaggugugcgaa

SEQ ID NO: 2874910 - RNA, 19 nt, Artificial Sequence
  Description of Artificial Sequence: Synthetic oligonucleotide
gcucauuacuguacucgug

SEQ ID NO: 2874911 - RNA, 19 nt, Artificial Sequence
  Description of Artificial Sequence: Synthetic oligonucleotide
cgaauaacagaaacccaga

SEQ ID NO: 2874912 - RNA, 19 nt, Artificial Sequence
  Description of Artificial Sequence: Synthetic oligonucleotide
gcagaggugugcgaauaac

SEQ ID NO: 2874913 - RNA, 19 nt, Artificial Sequence
  Description of Artificial Sequence: Synthetic oligonucleotide
ccagcagaucucaaacaca

SEQ ID NO: 2874914 - RNA, 19 nt, Artificial Sequence
  Description of Artificial Sequence: Synthetic oligonucleotide
cucguaauuccagcagaaa

SEQ ID NO: 2874915 - RNA, 19 nt, Artificial Sequence
  Description of Artificial Sequence: Synthetic oligonucleotide
cugggaugaaagucacugu

SEQ ID NO: 2874916 - RNA, 19 nt, Artificial Sequence
  Description of Artificial Sequence: Synthetic oligonucleotide
acacuccuugcagccauau

SEQ ID NO: 2874917 - RNA, 19 nt, Artificial Sequence
  Description of Artificial Sequence: Synthetic oligonucleotide
cuuccacuuaggcagcuuu

SEQ ID NO: 2874918 - RNA, 19 nt, Artificial Sequence
  Description of Artificial Sequence: Synthetic oligonucleotide
cuccgcacagcagaggugu

SEQ ID NO: 2874919 - RNA, 19 nt, Artificial Sequence
  Description of Artificial Sequence: Synthetic oligonucleotide
ccgcagucaagaaguguug

SEQ ID NO: 2874920 - RNA, 19 nt, Artificial Sequence
  Description of Artificial Sequence: Synthetic oligonucleotide
guuucacuuagacgcucau

SEQ ID NO: 2874921 - RNA, 19 nt, Artificial Sequence
  Description of Artificial Sequence: Synthetic oligonucleotide
ucccgucaucucugagagu

SEQ ID NO: 2874922 - RNA, 19 nt, Artificial Sequence
  Description of Artificial Sequence: Synthetic oligonucleotide
gcuccuuuuaucccgucau

SEQ ID NO: 2874923 - RNA, 19 nt, Artificial Sequence
  Description of Artificial Sequence: Synthetic oligonucleotide
cagcagaaagcaauucauu

SEQ ID NO: 2874924 - RNA, 19 nt, Artificial Sequence
  Description of Artificial Sequence: Synthetic oligonucleotide
gagcuccuuuuaucccguc

SEQ ID NO: 2874925 - RNA, 19 nt, Artificial Sequence
  Description of Artificial Sequence: Synthetic oligonucleotide
cgcacagcagaggugugcg

SEQ ID NO: 2874926 - RNA, 19 nt, Artificial Sequence
  Description of Artificial Sequence: Synthetic oligonucleotide
ccagcagaaagcaauucau

SEQ ID NO: 2874927 - RNA, 19 nt, Artificial Sequence
  Description of Artificial Sequence: Synthetic oligonucleotide
cucacacuccuugcagcca

SEQ ID NO: 2874928 - RNA, 19 nt, Artificial Sequence
  Description of Artificial Sequence: Synthetic oligonucleotide
gcaucaauaugaauagauu

SEQ ID NO: 2874929 - RNA, 19 nt, Artificial Sequence
  Description of Artificial Sequence: Synthetic oligonucleotide
ccuugaugucuuucuccuc

SEQ ID NO: 2874930 - RNA, 19 nt, Artificial Sequence
  Description of Artificial Sequence: Synthetic oligonucleotide
cagaaacccagaagaggau

SEQ ID NO: 2874931 - RNA, 19 nt, Artificial Sequence
  Description of Artificial Sequence: Synthetic oligonucleotide
agaggcucaugggcuucca

SEQ ID NO: 2874932 - RNA, 19 nt, Artificial Sequence
  Description of Artificial Sequence: Synthetic oligonucleotide
cugauccaagaggcucaug

SEQ ID NO: 2874933 - RNA, 19 nt, Artificial Sequence
  Description of Artificial Sequence: Synthetic oligonucleotide
cagccauauucuguuauau

SEQ ID NO: 2874934 - RNA, 19 nt, Artificial Sequence
  Description of Artificial Sequence: Synthetic oligonucleotide
gcagucaagaaguguugau

SEQ ID NO: 2874935 - RNA, 19 nt, Artificial Sequence
  Description of Artificial Sequence: Synthetic oligonucleotide
ggcucaugggcuuccacuu

SEQ ID NO: 2874936 - RNA, 19 nt, Artificial Sequence
  Description of Artificial Sequence: Synthetic oligonucleotide
gccuccgcacagcagaggu

SEQ ID NO: 2874937 - RNA, 19 nt, Artificial Sequence
  Description of Artificial Sequence: Synthetic oligonucleotide
cagcagaggugugcgaaua

SEQ ID NO: 2874938 - RNA, 19 nt, Artificial Sequence
  Description of Artificial Sequence: Synthetic oligonucleotide
ggugugcgaauaacagaaa

SEQ ID NO: 2874939 - RNA, 19 nt, Artificial Sequence
  Description of Artificial Sequence: Synthetic oligonucleotide
ccuccgcacagcagaggug

SEQ ID NO: 2874940 - RNA, 19 nt, Artificial Sequence
  Description of Artificial Sequence: Synthetic oligonucleotide
ccgucaucucugagaguuc

SEQ ID NO: 2874941 - RNA, 19 nt, Artificial Sequence
  Description of Artificial Sequence: Synthetic oligonucleotide
gggcuuccacuuaggcagc

SEQ ID NO: 2874942 - RNA, 19 nt, Artificial Sequence
  Description of Artificial Sequence: Synthetic oligonucleotide
cguuucuuacuguuucacu

SEQ ID NO: 2874943 - RNA, 19 nt, Artificial Sequence
  Description of Artificial Sequence: Synthetic oligonucleotide
gcacagcagaggugugcga

SEQ ID NO: 2874944 - RNA, 19 nt, Artificial Sequence
  Description of Artificial Sequence: Synthetic oligonucleotide
cacacuccuugcagccaua

SEQ ID NO: 2874945 - RNA, 19 nt, Artificial Sequence
  Description of Artificial Sequence: Synthetic oligonucleotide
acuuugcaacugggaugaa

SEQ ID NO: 2874946 - RNA, 19 nt, Artificial Sequence
  Description of Artificial Sequence: Synthetic oligonucleotide
cgcagucaagaaguguuga

SEQ ID NO: 2874947 - RNA, 19 nt, Artificial Sequence
  Description of Artificial Sequence: Synthetic oligonucleotide
cgcucauuacuguacucgu

SEQ ID NO: 2874948 - RNA, 19 nt, Artificial Sequence
  Description of Artificial Sequence: Synthetic oligonucleotide
cacuccuugcagccauauu

SEQ ID NO: 2874949 - RNA, 19 nt, Artificial Sequence
  Description of Artificial Sequence: Synthetic oligonucleotide
ccaagaggcucaugggcuu

SEQ ID NO: 2874950 - RNA, 19 nt, Artificial Sequence
  Description of Artificial Sequence: Synthetic oligonucleotide
ccacuuaggcagcuuuguu

SEQ ID NO: 2874951 - RNA, 19 nt, Artificial Sequence
  Description of Artificial Sequence: Synthetic oligonucleotide
ggcuuccacuuaggcagcu

SEQ ID NO: 2874952 - RNA, 19 nt, Artificial Sequence
  Description of Artificial Sequence: Synthetic oligonucleotide
gcuuccacuuaggcagcuu

SEQ ID NO: 2874953 - RNA, 19 nt, Artificial Sequence
  Description of Artificial Sequence: Synthetic oligonucleotide
uugaguaccacacaguucc

SEQ ID NO: 2874954 - RNA, 19 nt, Artificial Sequence
  Description of Artificial Sequence: Synthetic oligonucleotide
aaaccuguguuccagcagc

SEQ ID NO: 2874955 - RNA, 19 nt, Artificial Sequence
  Description of Artificial Sequence: Synthetic oligonucleotide
uugucauccacauagcagg

SEQ ID NO: 2874956 - RNA, 19 nt, Artificial Sequence
  Description of Artificial Sequence: Synthetic oligonucleotide
aaugaugagcaaccaggcc

SEQ ID NO: 2874957 - RNA, 19 nt, Artificial Sequence
  Description of Artificial Sequence: Synthetic oligonucleotide
auagcagggguucuuaccc

SEQ ID NO: 2874958 - RNA, 19 nt, Artificial Sequence
  Description of Artificial Sequence: Synthetic oligonucleotide
agguucaagggauaauucc

SEQ ID NO: 2874959 - RNA, 19 nt, Artificial Sequence
  Description of Artificial Sequence: Synthetic oligonucleotide
ugagcaaccaggccaaagg

SEQ ID NO: 2874960 - RNA, 19 nt, Artificial Sequence
  Description of Artificial Sequence: Synthetic oligonucleotide
agaagauguagucaaaccu

SEQ ID NO: 2874961 - RNA, 19 nt, Artificial Sequence
  Description of Artificial Sequence: Synthetic oligonucleotide
acaaugaugagcaaccagg

SEQ ID NO: 2874962 - RNA, 19 nt, Artificial Sequence
  Description of Artificial Sequence: Synthetic oligonucleotide
gcaguugucauccacauag

SEQ ID NO: 2874963 - RNA, 19 nt, Artificial Sequence
  Description of Artificial Sequence: Synthetic oligonucleotide
augaugagcaaccaggcca

SEQ ID NO: 2874964 - RNA, 19 nt, Artificial Sequence
  Description of Artificial Sequence: Synthetic oligonucleotide
uuccagggcacaaugauga

SEQ ID NO: 2874965 - RNA, 19 nt, Artificial Sequence
  Description of Artificial Sequence: Synthetic oligonucleotide
aagggauaauuccagggca

SEQ ID NO: 2874966 - RNA, 19 nt, Artificial Sequence
  Description of Artificial Sequence: Synthetic oligonucleotide
uccuacauaagcauucccu

SEQ ID NO: 2874967 - RNA, 19 nt, Artificial Sequence
  Description of Artificial Sequence: Synthetic oligonucleotide
uagaagauguagucaaacc

SEQ ID NO: 2874968 - RNA, 19 nt, Artificial Sequence
  Description of Artificial Sequence: Synthetic oligonucleotide
gaagauguagucaaaccug

SEQ ID NO: 2874969 - RNA, 19 nt, Artificial Sequence
  Description of Artificial Sequence: Synthetic oligonucleotide
acgagcgucagguucaagg

SEQ ID NO: 2874970 - RNA, 19 nt, Artificial Sequence
  Description of Artificial Sequence: Synthetic oligonucleotide
uucccuguguagaagaugu

SEQ ID NO: 2874971 - RNA, 19 nt, Artificial Sequence
  Description of Artificial Sequence: Synthetic oligonucleotide
aauuccagggcacaaugau

SEQ ID NO: 2874972 - RNA, 19 nt, Artificial Sequence
  Description of Artificial Sequence: Synthetic oligonucleotide
agcaccacagcaaagcagc

SEQ ID NO: 2874973 - RNA, 19 nt, Artificial Sequence
  Description of Artificial Sequence: Synthetic oligonucleotide
auaauuccagggcacaaug

SEQ ID NO: 2874974 - RNA, 19 nt, Artificial Sequence
  Description of Artificial Sequence: Synthetic oligonucleotide
auaagcauucccuguguag

SEQ ID NO: 2874975 - RNA, 19 nt, Artificial Sequence
  Description of Artificial Sequence: Synthetic oligonucleotide
cuuuccuacauaagcauuc

SEQ ID NO: 2874976 - RNA, 19 nt, Artificial Sequence
  Description of Artificial Sequence: Synthetic oligonucleotide
uucaagggauaauuccagg

SEQ ID NO: 2874977 - RNA, 19 nt, Artificial Sequence
  Description of Artificial Sequence: Synthetic oligonucleotide
ucauccacauagcaggggu

SEQ ID NO: 2874978 - RNA, 19 nt, Artificial Sequence
  Description of Artificial Sequence: Synthetic oligonucleotide
caaugaugagcaaccaggc

SEQ ID NO: 2874979 - RNA, 19 nt, Artificial Sequence
  Description of Artificial Sequence: Synthetic oligonucleotide
ucuccugaggcccacccag

SEQ ID NO: 2874980 - RNA, 19 nt, Artificial Sequence
  Description of Artificial Sequence: Synthetic oligonucleotide
uguguagaagauguaguca

SEQ ID NO: 2874981 - RNA, 19 nt, Artificial Sequence
  Description of Artificial Sequence: Synthetic oligonucleotide
uaagcauucccuguguaga

SEQ ID NO: 2874982 - RNA, 19 nt, Artificial Sequence
  Description of Artificial Sequence: Synthetic oligonucleotide
gagcaaccaggccaaaggg

SEQ ID NO: 2874983 - RNA, 19 nt, Artificial Sequence
  Description of Artificial Sequence: Synthetic oligonucleotide
ucaauggccuugcuggucu

SEQ ID NO: 2874984 - RNA, 19 nt, Artificial Sequence
  Description of Artificial Sequence: Synthetic oligonucleotide
gaucuuuccuacauaagca

SEQ ID NO: 2874985 - RNA, 19 nt, Artificial Sequence
  Description of Artificial Sequence: Synthetic oligonucleotide
guugucauccacauagcag

SEQ ID NO: 2874986 - RNA, 19 nt, Artificial Sequence
  Description of Artificial Sequence: Synthetic oligonucleotide
aaccaggccaaagggcucc

SEQ ID NO: 2874987 - RNA, 19 nt, Artificial Sequence
  Description of Artificial Sequence: Synthetic oligonucleotide
uucccugcagcaaucggcc

SEQ ID NO: 2874988 - RNA, 19 nt, Artificial Sequence
  Description of Artificial Sequence: Synthetic oligonucleotide
aggccaaagggcuccuucc

SEQ ID NO: 2874989 - RNA, 19 nt, Artificial Sequence
  Description of Artificial Sequence: Synthetic oligonucleotide
uccggaugaaggcugaguc

SEQ ID NO: 2874990 - RNA, 19 nt, Artificial Sequence
  Description of Artificial Sequence: Synthetic oligonucleotide
gcagcucugguccagauag

SEQ ID NO: 2874991 - RNA, 19 nt, Artificial Sequence
  Description of Artificial Sequence: Synthetic oligonucleotide
uguagucaaaccuguguuc

SEQ ID NO: 2874992 - RNA, 19 nt, Artificial Sequence
  Description of Artificial Sequence: Synthetic oligonucleotide
guagucaaaccuguguucc

SEQ ID NO: 2874993 - RNA, 19 nt, Artificial Sequence
  Description of Artificial Sequence: Synthetic oligonucleotide
augggugucagguguuugg

SEQ ID NO: 2874994 - RNA, 19 nt, Artificial Sequence
  Description of Artificial Sequence: Synthetic oligonucleotide
aagauguagucaaaccugu

SEQ ID NO: 2874995 - RNA, 19 nt, Artificial Sequence
  Description of Artificial Sequence: Synthetic oligonucleotide
uaauuccagggcacaauga

SEQ ID NO: 2874996 - RNA, 19 nt, Artificial Sequence
  Description of Artificial Sequence: Synthetic oligonucleotide
cauagcagggguucuuacc

SEQ ID NO: 2874997 - RNA, 19 nt, Artificial Sequence
  Description of Artificial Sequence: Synthetic oligonucleotide
aguaccacacaguucccug

SEQ ID NO: 2874998 - RNA, 19 nt, Artificial Sequence
  Description of Artificial Sequence: Synthetic oligonucleotide
ucugguccagauagcgggg

SEQ ID NO: 2874999 - RNA, 19 nt, Artificial Sequence
  Description of Artificial Sequence: Synthetic oligonucleotide
aucacgaucuuuccuacau

SEQ ID NO: 2875000 - RNA, 19 nt, Artificial Sequence
  Description of Artificial Sequence: Synthetic oligonucleotide
aagggcuccuuccggauga

SEQ ID NO: 2875001 - RNA, 19 nt, Artificial Sequence
  Description of Artificial Sequence: Synthetic oligonucleotide
ugaugagcaaccaggccaa

SEQ ID NO: 2875002 - RNA, 19 nt, Artificial Sequence
  Description of Artificial Sequence: Synthetic oligonucleotide
gauguagucaaaccugugu

SEQ ID NO: 2875003 - RNA, 19 nt, Artificial Sequence
  Description of Artificial Sequence: Synthetic oligonucleotide
auguagucaaaccuguguu

SEQ ID NO: 2875004 - RNA, 19 nt, Artificial Sequence
  Description of Artificial Sequence: Synthetic oligonucleotide
guguagaagauguagucaa

SEQ ID NO: 2875005 - RNA, 19 nt, Artificial Sequence
  Description of Artificial Sequence: Synthetic oligonucleotide
cagggcacaaugaugagca

SEQ ID NO: 2875006 - RNA, 19 nt, Artificial Sequence
  Description of Artificial Sequence: Synthetic oligonucleotide
acauagcagggguucuuac

SEQ ID NO: 2875007 - RNA, 19 nt, Artificial Sequence
  Description of Artificial Sequence: Synthetic oligonucleotide
ucagguucaagggauaauu

SEQ ID NO: 2875008 - RNA, 19 nt, Artificial Sequence
  Description of Artificial Sequence: Synthetic oligonucleotide
agcaaccaggccaaagggc

SEQ ID NO: 2875009 - RNA, 19 nt, Artificial Sequence
  Description of Artificial Sequence: Synthetic oligonucleotide
aucuuuccuacauaagcau

SEQ ID NO: 2875010 - RNA, 19 nt, Artificial Sequence
  Description of Artificial Sequence: Synthetic oligonucleotide
gccaggaucuucucaaugg

SEQ ID NO: 2875011 - RNA, 19 nt, Artificial Sequence
  Description of Artificial Sequence: Synthetic oligonucleotide
aguggcacgagcgucaggu

SEQ ID NO: 2875012 - RNA, 19 nt, Artificial Sequence
  Description of Artificial Sequence: Synthetic oligonucleotide
guagaagauguagucaaac

SEQ ID NO: 2875013 - RNA, 19 nt, Artificial Sequence
  Description of Artificial Sequence: Synthetic oligonucleotide
caggaucuucucaauggcc

SEQ ID NO: 2875014 - RNA, 19 nt, Artificial Sequence
  Description of Artificial Sequence: Synthetic oligonucleotide
guucaagggauaauuccag

SEQ ID NO: 2875015 - RNA, 19 nt, Artificial Sequence
  Description of Artificial Sequence: Synthetic oligonucleotide
uguagaagauguagucaaa

SEQ ID NO: 2875016 - RNA, 19 nt, Artificial Sequence
  Description of Artificial Sequence: Synthetic oligonucleotide
uuccuacauaagcauuccc

SEQ ID NO: 2875017 - RNA, 19 nt, Artificial Sequence
  Description of Artificial Sequence: Synthetic oligonucleotide
ggugucagguguuuggcag

SEQ ID NO: 2875018 - RNA, 19 nt, Artificial Sequence
  Description of Artificial Sequence: Synthetic oligonucleotide
ucuuuccuacauaagcauu

SEQ ID NO: 2875019 - RNA, 19 nt, Artificial Sequence
  Description of Artificial Sequence: Synthetic oligonucleotide
agcucugguccagauagcg

SEQ ID NO: 2875020 - RNA, 19 nt, Artificial Sequence
  Description of Artificial Sequence: Synthetic oligonucleotide
cugaggcccacccagcacc

SEQ ID NO: 2875021 - RNA, 19 nt, Artificial Sequence
  Description of Artificial Sequence: Synthetic oligonucleotide
uccuuccggaugaaggcug

SEQ ID NO: 2875022 - RNA, 19 nt, Artificial Sequence
  Description of Artificial Sequence: Synthetic oligonucleotide
cuguguuccagcagcugcc

SEQ ID NO: 2875023 - RNA, 19 nt, Artificial Sequence
  Description of Artificial Sequence: Synthetic oligonucleotide
agggauaauuccagggcac

SEQ ID NO: 2875024 - RNA, 19 nt, Artificial Sequence
  Description of Artificial Sequence: Synthetic oligonucleotide
cuugaguaccacacaguuc

SEQ ID NO: 2875025 - RNA, 19 nt, Artificial Sequence
  Description of Artificial Sequence: Synthetic oligonucleotide
ucucugagggcuugaguac

SEQ ID NO: 2875026 - RNA, 19 nt, Artificial Sequence
  Description of Artificial Sequence: Synthetic oligonucleotide
auccacauagcagggguuc

SEQ ID NO: 2875027 - RNA, 19 nt, Artificial Sequence
  Description of Artificial Sequence: Synthetic oligonucleotide
acauaagcauucccugugu

SEQ ID NO: 2875028 - RNA, 19 nt, Artificial Sequence
  Description of Artificial Sequence: Synthetic oligonucleotide
gucucugagggcuugagua

SEQ ID NO: 2875029 - RNA, 19 nt, Artificial Sequence
  Description of Artificial Sequence: Synthetic oligonucleotide
aguucccugcagcaaucgg

SEQ ID NO: 2875030 - RNA, 19 nt, Artificial Sequence
  Description of Artificial Sequence: Synthetic oligonucleotide
agucaaaccuguguuccag

SEQ ID NO: 2875031 - RNA, 19 nt, Artificial Sequence
  Description of Artificial Sequence: Synthetic oligonucleotide
gcugaguccagcugugugg

SEQ ID NO: 2875032 - RNA, 19 nt, Artificial Sequence
  Description of Artificial Sequence: Synthetic oligonucleotide
ggcacaaugaugagcaacc

SEQ ID NO: 2875033 - RNA, 19 nt, Artificial Sequence
  Description of Artificial Sequence: Synthetic oligonucleotide
agcagcggccaucacgauc

SEQ ID NO: 2875034 - RNA, 19 nt, Artificial Sequence
  Description of Artificial Sequence: Synthetic oligonucleotide
cgaucuuuccuacauaagc

SEQ ID NO: 2875035 - RNA, 19 nt, Artificial Sequence
  Description of Artificial Sequence: Synthetic oligonucleotide
aagcauucccuguguagaa

SEQ ID NO: 2875036 - RNA, 19 nt, Artificial Sequence
  Description of Artificial Sequence: Synthetic oligonucleotide
aggaucuucucaauggccu

SEQ ID NO: 2875037 - RNA, 19 nt, Artificial Sequence
  Description of Artificial Sequence: Synthetic oligonucleotide
ccuacauaagcauucccug

SEQ ID NO: 2875038 - RNA, 19 nt, Artificial Sequence
  Description of Artificial Sequence: Synthetic oligonucleotide
augaaggcugaguccagcu

SEQ ID NO: 2875039 - RNA, 19 nt, Artificial Sequence
  Description of Artificial Sequence: Synthetic oligonucleotide
caaaccuguguuccagcag

SEQ ID NO: 2875040 - RNA, 19 nt, Artificial Sequence
  Description of Artificial Sequence: Synthetic oligonucleotide
guucccugcagcaaucggc

SEQ ID NO: 2875041 - RNA, 19 nt, Artificial Sequence
  Description of Artificial Sequence: Synthetic oligonucleotide
cacgaucuuuccuacauaa

SEQ ID NO: 2875042 - RNA, 19 nt, Artificial Sequence
  Description of Artificial Sequence: Synthetic oligonucleotide
cagguucaagggauaauuc

SEQ ID NO: 2875043 - RNA, 19 nt, Artificial Sequence
  Description of Artificial Sequence: Synthetic oligonucleotide
gaugaaggcugaguccagc

SEQ ID NO: 2875044 - RNA, 19 nt, Artificial Sequence
  Description of Artificial Sequence: Synthetic oligonucleotide
gaucuucucaauggccuug

SEQ ID NO: 2875045 - RNA, 19 nt, Artificial Sequence
  Description of Artificial Sequence: Synthetic oligonucleotide
ccuugcuggucucugaggg

SEQ ID NO: 2875046 - RNA, 19 nt, Artificial Sequence
  Description of Artificial Sequence: Synthetic oligonucleotide
uugcaguugucauccacau

SEQ ID NO: 2875047 - RNA, 19 nt, Artificial Sequence
  Description of Artificial Sequence: Synthetic oligonucleotide
uugcuggucucugagggcu

SEQ ID NO: 2875048 - RNA, 19 nt, Artificial Sequence
  Description of Artificial Sequence: Synthetic oligonucleotide
guaccacacaguucccugc

SEQ ID NO: 2875049 - RNA, 19 nt, Artificial Sequence
  Description of Artificial Sequence: Synthetic oligonucleotide
agccaggaucuucucaaug

SEQ ID NO: 2875050 - RNA, 19 nt, Artificial Sequence
  Description of Artificial Sequence: Synthetic oligonucleotide
cagcaccacagcaaagcag

SEQ ID NO: 2875051 - RNA, 19 nt, Artificial Sequence
  Description of Artificial Sequence: Synthetic oligonucleotide
agguguuuggcagcagcgg

SEQ ID NO: 2875052 - RNA, 19 nt, Artificial Sequence
  Description of Artificial Sequence: Synthetic oligonucleotide
ggcagcagcggccaucacg

SEQ ID NO: 2875053 - RNA, 19 nt, Artificial Sequence
  Description of Artificial Sequence: Synthetic oligonucleotide
uggcacgagcgucagguuc

SEQ ID NO: 2875054 - RNA, 19 nt, Artificial Sequence
  Description of Artificial Sequence: Synthetic oligonucleotide
aggaccucagccaggaucu

SEQ ID NO: 2875055 - RNA, 19 nt, Artificial Sequence
  Description of Artificial Sequence: Synthetic oligonucleotide
cacagcaaagcagcucugg

SEQ ID NO: 2875056 - RNA, 19 nt, Artificial Sequence
  Description of Artificial Sequence: Synthetic oligonucleotide
cagcaaagcagcucugguc

SEQ ID NO: 2875057 - RNA, 19 nt, Artificial Sequence
  Description of Artificial Sequence: Synthetic oligonucleotide
gguguuuggcagcagcggc

SEQ ID NO: 2875058 - RNA, 19 nt, Artificial Sequence
  Description of Artificial Sequence: Synthetic oligonucleotide
guugcaguugucauccaca

SEQ ID NO: 2875059 - RNA, 19 nt, Artificial Sequence
  Description of Artificial Sequence: Synthetic oligonucleotide
ggcguugcaguugucaucc

SEQ ID NO: 2875060 - RNA, 19 nt, Artificial Sequence
  Description of Artificial Sequence: Synthetic oligonucleotide
uguuuggcagcagcggcca

SEQ ID NO: 2875061 - RNA, 19 nt, Artificial Sequence
  Description of Artificial Sequence: Synthetic oligonucleotide
gggcuugaguaccacacag

SEQ ID NO: 2875062 - RNA, 19 nt, Artificial Sequence
  Description of Artificial Sequence: Synthetic oligonucleotide
ugaguaccacacaguuccc

SEQ ID NO: 2875063 - RNA, 19 nt, Artificial Sequence
  Description of Artificial Sequence: Synthetic oligonucleotide
cugaguccagcuguguggc

SEQ ID NO: 2875064 - RNA, 19 nt, Artificial Sequence
  Description of Artificial Sequence: Synthetic oligonucleotide
gguucaagggauaauucca

SEQ ID NO: 2875065 - RNA, 19 nt, Artificial Sequence
  Description of Artificial Sequence: Synthetic oligonucleotide
ggcuccuuccggaugaagg

SEQ ID NO: 2875066 - RNA, 19 nt, Artificial Sequence
  Description of Artificial Sequence: Synthetic oligonucleotide
caguugucauccacauagc

SEQ ID NO: 2875067 - RNA, 19 nt, Artificial Sequence
  Description of Artificial Sequence: Synthetic oligonucleotide
ucucaauggccuugcuggu

SEQ ID NO: 2875068 - RNA, 19 nt, Artificial Sequence
  Description of Artificial Sequence: Synthetic oligonucleotide
uccugaggcccacccagca

SEQ ID NO: 2875069 - RNA, 19 nt, Artificial Sequence
  Description of Artificial Sequence: Synthetic oligonucleotide
auuccagggcacaaugaug

SEQ ID NO: 2875070 - RNA, 19 nt, Artificial Sequence
  Description of Artificial Sequence: Synthetic oligonucleotide
auucccuguguagaagaug

SEQ ID NO: 2875071 - RNA, 19 nt, Artificial Sequence
  Description of Artificial Sequence: Synthetic oligonucleotide
cucugagggcuugaguacc

SEQ ID NO: 2875072 - RNA, 19 nt, Artificial Sequence
  Description of Artificial Sequence: Synthetic oligonucleotide
uagcagggguucuuacccc

SEQ ID NO: 2875073 - RNA, 19 nt, Artificial Sequence
  Description of Artificial Sequence: Synthetic oligonucleotide
uguguuccagcagcugccc

SEQ ID NO: 2875074 - RNA, 19 nt, Artificial Sequence
  Description of Artificial Sequence: Synthetic oligonucleotide
cacacaguucccugcagca

SEQ ID NO: 2875075 - RNA, 19 nt, Artificial Sequence
  Description of Artificial Sequence: Synthetic oligonucleotide
augagcaaccaggccaaag

SEQ ID NO: 2875076 - RNA, 19 nt, Artificial Sequence
  Description of Artificial Sequence: Synthetic oligonucleotide
aguccagcuguguggccag

SEQ ID NO: 2875077 - RNA, 19 nt, Artificial Sequence
  Description of Artificial Sequence: Synthetic oligonucleotide
ccuguguuccagcagcugc

SEQ ID NO: 2875078 - RNA, 19 nt, Artificial Sequence
  Description of Artificial Sequence: Synthetic oligonucleotide
ucacgaucuuuccuacaua

SEQ ID NO: 2875079 - RNA, 19 nt, Artificial Sequence
  Description of Artificial Sequence: Synthetic oligonucleotide
cccaccaguggcacgagcg

SEQ ID NO: 2875080 - RNA, 19 nt, Artificial Sequence
  Description of Artificial Sequence: Synthetic oligonucleotide
agcauucccuguguagaag

SEQ ID NO: 2875081 - RNA, 19 nt, Artificial Sequence
  Description of Artificial Sequence: Synthetic oligonucleotide
gcuccuuccggaugaaggc

SEQ ID NO: 2875082 - RNA, 19 nt, Artificial Sequence
  Description of Artificial Sequence: Synthetic oligonucleotide
gaugggugucagguguuug

SEQ ID NO: 2875083 - RNA, 19 nt, Artificial Sequence
  Description of Artificial Sequence: Synthetic oligonucleotide
cccagcuccagggugaugg

SEQ ID NO: 2875084 - RNA, 19 nt, Artificial Sequence
  Description of Artificial Sequence: Synthetic oligonucleotide
gagcgucagguucaaggga

SEQ ID NO: 2875085 - RNA, 19 nt, Artificial Sequence
  Description of Artificial Sequence: Synthetic oligonucleotide
agggcuugaguaccacaca

SEQ ID NO: 2875086 - RNA, 19 nt, Artificial Sequence
  Description of Artificial Sequence: Synthetic oligonucleotide
agcuccagggugaugggug

SEQ ID NO: 2875087 - RNA, 19 nt, Artificial Sequence
  Description of Artificial Sequence: Synthetic oligonucleotide
ucuucucaauggccuugcu

SEQ ID NO: 2875088 - RNA, 19 nt, Artificial Sequence
  Description of Artificial Sequence: Synthetic oligonucleotide
cugcccggucuccugaggc

SEQ ID NO: 2875089 - RNA, 19 nt, Artificial Sequence
  Description of Artificial Sequence: Synthetic oligonucleotide
ugaggcccacccagcacca

SEQ ID NO: 2875090 - RNA, 19 nt, Artificial Sequence
  Description of Artificial Sequence: Synthetic oligonucleotide
acgaucuuuccuacauaag

SEQ ID NO: 2875091 - RNA, 19 nt, Artificial Sequence
  Description of Artificial Sequence: Synthetic oligonucleotide
guguuuggcagcagcggcc

SEQ ID NO: 2875092 - RNA, 19 nt, Artificial Sequence
  Description of Artificial Sequence: Synthetic oligonucleotide
accacacaguucccugcag

SEQ ID NO: 2875093 - RNA, 19 nt, Artificial Sequence
  Description of Artificial Sequence: Synthetic oligonucleotide
uccagggugauggguguca

SEQ ID NO: 2875094 - RNA, 19 nt, Artificial Sequence
  Description of Artificial Sequence: Synthetic oligonucleotide
acaguucccugcagcaauc

SEQ ID NO: 2875095 - RNA, 19 nt, Artificial Sequence
  Description of Artificial Sequence: Synthetic oligonucleotide
aauggccuugcuggucucu

SEQ ID NO: 2875096 - RNA, 19 nt, Artificial Sequence
  Description of Artificial Sequence: Synthetic oligonucleotide
ggccaaagggcuccuuccg

SEQ ID NO: 2875097 - RNA, 19 nt, Artificial Sequence
  Description of Artificial Sequence: Synthetic oligonucleotide
ccaggaucuucucaauggc

SEQ ID NO: 2875098 - RNA, 19 nt, Artificial Sequence
  Description of Artificial Sequence: Synthetic oligonucleotide
agcgucagguucaagggau

SEQ ID NO: 2875099 - RNA, 19 nt, Artificial Sequence
  Description of Artificial Sequence: Synthetic oligonucleotide
cuacauaagcauucccugu

SEQ ID NO: 2875100 - RNA, 19 nt, Artificial Sequence
  Description of Artificial Sequence: Synthetic oligonucleotide
agauguagucaaaccugug

SEQ ID NO: 2875101 - RNA, 19 nt, Artificial Sequence
  Description of Artificial Sequence: Synthetic oligonucleotide
uuccggaugaaggcugagu

SEQ ID NO: 2875102 - RNA, 19 nt, Artificial Sequence
  Description of Artificial Sequence: Synthetic oligonucleotide
ugcccggucuccugaggcc

SEQ ID NO: 2875103 - RNA, 19 nt, Artificial Sequence
  Description of Artificial Sequence: Synthetic oligonucleotide
guguuccagcagcugcccg

SEQ ID NO: 2875104 - RNA, 19 nt, Artificial Sequence
  Description of Artificial Sequence: Synthetic oligonucleotide
cgagcgucagguucaaggg

SEQ ID NO: 2875105 - RNA, 19 nt, Artificial Sequence
  Description of Artificial Sequence: Synthetic oligonucleotide
aagcagcucugguccagau

SEQ ID NO: 2875106 - RNA, 19 nt, Artificial Sequence
  Description of Artificial Sequence: Synthetic oligonucleotide
ugcaguugucauccacaua

SEQ ID NO: 2875107 - RNA, 19 nt, Artificial Sequence
  Description of Artificial Sequence: Synthetic oligonucleotide
gauaauuccagggcacaau

SEQ ID NO: 2875108 - RNA, 19 nt, Artificial Sequence
  Description of Artificial Sequence: Synthetic oligonucleotide
caggccaaagggcuccuuc

SEQ ID NO: 2875109 - RNA, 19 nt, Artificial Sequence
  Description of Artificial Sequence: Synthetic oligonucleotide
gccaaagggcuccuuccgg

SEQ ID NO: 2875110 - RNA, 19 nt, Artificial Sequence
  Description of Artificial Sequence: Synthetic oligonucleotide
caaagcagcucugguccag

SEQ ID NO: 2875111 - RNA, 19 nt, Artificial Sequence
  Description of Artificial Sequence: Synthetic oligonucleotide
uggucucugagggcuugag

SEQ ID NO: 2875112 - RNA, 19 nt, Artificial Sequence
  Description of Artificial Sequence: Synthetic oligonucleotide
gcauucccuguguagaaga

SEQ ID NO: 2875113 - RNA, 19 nt, Artificial Sequence
  Description of Artificial Sequence: Synthetic oligonucleotide
caguucccugcagcaaucg

SEQ ID NO: 2875114 - RNA, 19 nt, Artificial Sequence
  Description of Artificial Sequence: Synthetic oligonucleotide
gccaucacgaucuuuccua

SEQ ID NO: 2875115 - RNA, 19 nt, Artificial Sequence
  Description of Artificial Sequence: Synthetic oligonucleotide
ggcugaguccagcugugug

SEQ ID NO: 2875116 - RNA, 19 nt, Artificial Sequence
  Description of Artificial Sequence: Synthetic oligonucleotide
caaccaggccaaagggcuc

SEQ ID NO: 2875117 - RNA, 19 nt, Artificial Sequence
  Description of Artificial Sequence: Synthetic oligonucleotide
cucagccaggaucuucuca

SEQ ID NO: 2875118 - RNA, 19 nt, Artificial Sequence
  Description of Artificial Sequence: Synthetic oligonucleotide
ccggaugaaggcugagucc

SEQ ID NO: 2875119 - RNA, 19 nt, Artificial Sequence
  Description of Artificial Sequence: Synthetic oligonucleotide
cuccugaggcccacccagc

SEQ ID NO: 2875120 - RNA, 19 nt, Artificial Sequence
  Description of Artificial Sequence: Synthetic oligonucleotide
cauaagcauucccugugua

SEQ ID NO: 2875121 - RNA, 19 nt, Artificial Sequence
  Description of Artificial Sequence: Synthetic oligonucleotide
aggcccacccagcaccaca

SEQ ID NO: 2875122 - RNA, 19 nt, Artificial Sequence
  Description of Artificial Sequence: Synthetic oligonucleotide
ggccuugcuggucucugag

SEQ ID NO: 2875123 - RNA, 19 nt, Artificial Sequence
  Description of Artificial Sequence: Synthetic oligonucleotide
cucaauggccuugcugguc

SEQ ID NO: 2875124 - RNA, 19 nt, Artificial Sequence
  Description of Artificial Sequence: Synthetic oligonucleotide
accaguggcacgagcguca

SEQ ID NO: 2875125 - RNA, 19 nt, Artificial Sequence
  Description of Artificial Sequence: Synthetic oligonucleotide
ucccugcagcaaucggccc

SEQ ID NO: 2875126 - RNA, 19 nt, Artificial Sequence
  Description of Artificial Sequence: Synthetic oligonucleotide
ccacacaguucccugcagc

SEQ ID NO: 2875127 - RNA, 19 nt, Artificial Sequence
  Description of Artificial Sequence: Synthetic oligonucleotide
gcagcagcggccaucacga

SEQ ID NO: 2875128 - RNA, 19 nt, Artificial Sequence
  Description of Artificial Sequence: Synthetic oligonucleotide
gggcacaaugaugagcaac

SEQ ID NO: 2875129 - RNA, 19 nt, Artificial Sequence
  Description of Artificial Sequence: Synthetic oligonucleotide
uggccuugcuggucucuga

SEQ ID NO: 2875130 - RNA, 19 nt, Artificial Sequence
  Description of Artificial Sequence: Synthetic oligonucleotide
ggucuccugaggcccaccc

SEQ ID NO: 2875131 - RNA, 19 nt, Artificial Sequence
  Description of Artificial Sequence: Synthetic oligonucleotide
caucacgaucuuuccuaca

SEQ ID NO: 2875132 - RNA, 19 nt, Artificial Sequence
  Description of Artificial Sequence: Synthetic oligonucleotide
agcugcccggucuccugag

SEQ ID NO: 2875133 - RNA, 19 nt, Artificial Sequence
  Description of Artificial Sequence: Synthetic oligonucleotide
agcagcucugguccagaua

SEQ ID NO: 2875134 - RNA, 19 nt, Artificial Sequence
  Description of Artificial Sequence: Synthetic oligonucleotide
auggccuugcuggucucug

SEQ ID NO: 2875135 - RNA, 19 nt, Artificial Sequence
  Description of Artificial Sequence: Synthetic oligonucleotide
cagcucugguccagauagc

SEQ ID NO: 2875136 - RNA, 19 nt, Artificial Sequence
  Description of Artificial Sequence: Synthetic oligonucleotide
ccaucacgaucuuuccuac

SEQ ID NO: 2875137 - RNA, 19 nt, Artificial Sequence
  Description of Artificial Sequence: Synthetic oligonucleotide
gcucugguccagauagcgg

SEQ ID NO: 2875138 - RNA, 19 nt, Artificial Sequence
  Description of Artificial Sequence: Synthetic oligonucleotide
gcggccaucacgaucuuuc

SEQ ID NO: 2875139 - RNA, 19 nt, Artificial Sequence
  Description of Artificial Sequence: Synthetic oligonucleotide
ccagggcacaaugaugagc

SEQ ID NO: 2875140 - RNA, 19 nt, Artificial Sequence
  Description of Artificial Sequence: Synthetic oligonucleotide
gcuugaguaccacacaguu

SEQ ID NO: 2875141 - RNA, 19 nt, Artificial Sequence
  Description of Artificial Sequence: Synthetic oligonucleotide
ugaugggugucagguguuu

SEQ ID NO: 2875142 - RNA, 19 nt, Artificial Sequence
  Description of Artificial Sequence: Synthetic oligonucleotide
acacaguucccugcagcaa

SEQ ID NO: 2875143 - RNA, 19 nt, Artificial Sequence
  Description of Artificial Sequence: Synthetic oligonucleotide
cacccagcaccacagcaaa

SEQ ID NO: 2875144 - RNA, 19 nt, Artificial Sequence
  Description of Artificial Sequence: Synthetic oligonucleotide
gcaaccaggccaaagggcu

SEQ ID NO: 2875145 - RNA, 19 nt, Artificial Sequence
  Description of Artificial Sequence: Synthetic oligonucleotide
cuuccggaugaaggcugag

SEQ ID NO: 2875146 - RNA, 19 nt, Artificial Sequence
  Description of Artificial Sequence: Synthetic oligonucleotide
gaguaccacacaguucccu

SEQ ID NO: 2875147 - RNA, 19 nt, Artificial Sequence
  Description of Artificial Sequence: Synthetic oligonucleotide
gggauaauuccagggcaca

SEQ ID NO: 2875148 - RNA, 19 nt, Artificial Sequence
  Description of Artificial Sequence: Synthetic oligonucleotide
caccaguggcacgagcguc

SEQ ID NO: 2875149 - RNA, 19 nt, Artificial Sequence
  Description of Artificial Sequence: Synthetic oligonucleotide
ccuguguagaagauguagu

SEQ ID NO: 2875150 - RNA, 19 nt, Artificial Sequence
  Description of Artificial Sequence: Synthetic oligonucleotide
cacaguucccugcagcaau

SEQ ID NO: 2875151 - RNA, 19 nt, Artificial Sequence
  Description of Artificial Sequence: Synthetic oligonucleotide
gcagcggccaucacgaucu

SEQ ID NO: 2875152 - RNA, 19 nt, Artificial Sequence
  Description of Artificial Sequence: Synthetic oligonucleotide
ggcacgagcgucagguuca

SEQ ID NO: 2875153 - RNA, 19 nt, Artificial Sequence
  Description of Artificial Sequence: Synthetic oligonucleotide
cugagggcuugaguaccac

SEQ ID NO: 2875154 - RNA, 19 nt, Artificial Sequence
  Description of Artificial Sequence: Synthetic oligonucleotide
ggauaauuccagggcacaa

SEQ ID NO: 2875155 - RNA, 19 nt, Artificial Sequence
  Description of Artificial Sequence: Synthetic oligonucleotide
caauggccuugcuggucuc

SEQ ID NO: 2875156 - RNA, 19 nt, Artificial Sequence
  Description of Artificial Sequence: Synthetic oligonucleotide
gggugucagguguuuggca

SEQ ID NO: 2875157 - RNA, 19 nt, Artificial Sequence
  Description of Artificial Sequence: Synthetic oligonucleotide
ccaaagggcuccuuccgga

SEQ ID NO: 2875158 - RNA, 19 nt, Artificial Sequence
  Description of Artificial Sequence: Synthetic oligonucleotide
agggcacaaugaugagcaa

SEQ ID NO: 2875159 - RNA, 19 nt, Artificial Sequence
  Description of Artificial Sequence: Synthetic oligonucleotide
gggcguugcaguugucauc

SEQ ID NO: 2875160 - RNA, 19 nt, Artificial Sequence
  Description of Artificial Sequence: Synthetic oligonucleotide
ggcccacccagcaccacag

SEQ ID NO: 2875161 - RNA, 19 nt, Artificial Sequence
  Description of Artificial Sequence: Synthetic oligonucleotide
cguugcaguugucauccac

SEQ ID NO: 2875162 - RNA, 19 nt, Artificial Sequence
  Description of Artificial Sequence: Synthetic oligonucleotide
gcaaagcagcucuggucca

SEQ ID NO: 2875163 - RNA, 19 nt, Artificial Sequence
  Description of Artificial Sequence: Synthetic oligonucleotide
cacauagcagggguucuua

SEQ ID NO: 2875164 - RNA, 19 nt, Artificial Sequence
  Description of Artificial Sequence: Synthetic oligonucleotide
cauucccuguguagaagau

SEQ ID NO: 2875165 - RNA, 19 nt, Artificial Sequence
  Description of Artificial Sequence: Synthetic oligonucleotide
caguggcacgagcgucagg

SEQ ID NO: 2875166 - RNA, 19 nt, Artificial Sequence
  Description of Artificial Sequence: Synthetic oligonucleotide
gcugcccggucuccugagg

SEQ ID NO: 2875167 - RNA, 19 nt, Artificial Sequence
  Description of Artificial Sequence: Synthetic oligonucleotide
ccagcuccagggugauggg

SEQ ID NO: 2875168 - RNA, 19 nt, Artificial Sequence
  Description of Artificial Sequence: Synthetic oligonucleotide
gggaggaccucagccagga

SEQ ID NO: 2875169 - RNA, 19 nt, Artificial Sequence
  Description of Artificial Sequence: Synthetic oligonucleotide
cggaugaaggcugagucca

SEQ ID NO: 2875170 - RNA, 19 nt, Artificial Sequence
  Description of Artificial Sequence: Synthetic oligonucleotide
caaagggcuccuuccggau

SEQ ID NO: 2875171 - RNA, 19 nt, Artificial Sequence
  Description of Artificial Sequence: Synthetic oligonucleotide
ggggaggaccucagccagg

SEQ ID NO: 2875172 - RNA, 19 nt, Artificial Sequence
  Description of Artificial Sequence: Synthetic oligonucleotide
gaugagcaaccaggccaaa

SEQ ID NO: 2875173 - RNA, 19 nt, Artificial Sequence
  Description of Artificial Sequence: Synthetic oligonucleotide
ccugaggcccacccagcac

SEQ ID NO: 2875174 - RNA, 19 nt, Artificial Sequence
  Description of Artificial Sequence: Synthetic oligonucleotide
ccacagcaaagcagcucug

SEQ ID NO: 2875175 - RNA, 19 nt, Artificial Sequence
  Description of Artificial Sequence: Synthetic oligonucleotide
ccacccagcaccacagcaa

SEQ ID NO: 2875176 - RNA, 19 nt, Artificial Sequence
  Description of Artificial Sequence: Synthetic oligonucleotide
cccacccagcaccacagca

SEQ ID NO: 2875177 - RNA, 19 nt, Artificial Sequence
  Description of Artificial Sequence: Synthetic oligonucleotide
gcccggucuccugaggccc

SEQ ID NO: 2875178 - RNA, 19 nt, Artificial Sequence
  Description of Artificial Sequence: Synthetic oligonucleotide
cauccacauagcagggguu

SEQ ID NO: 2875179 - RNA, 19 nt, Artificial Sequence
  Description of Artificial Sequence: Synthetic oligonucleotide
cagcugcccggucuccuga

SEQ ID NO: 2875180 - RNA, 19 nt, Artificial Sequence
  Description of Artificial Sequence: Synthetic oligonucleotide
ggccaucacgaucuuuccu

SEQ ID NO: 2875181 - RNA, 19 nt, Artificial Sequence
  Description of Artificial Sequence: Synthetic oligonucleotide
gucagguucaagggauaau

SEQ ID NO: 2875182 - RNA, 19 nt, Artificial Sequence
  Description of Artificial Sequence: Synthetic oligonucleotide
cuccuuccggaugaaggcu

SEQ ID NO: 2875183 - RNA, 19 nt, Artificial Sequence
  Description of Artificial Sequence: Synthetic oligonucleotide
guuccagcagcugcccggu

SEQ ID NO: 2875184 - RNA, 19 nt, Artificial Sequence
  Description of Artificial Sequence: Synthetic oligonucleotide
ggaucuucucaauggccuu

SEQ ID NO: 2875185 - RNA, 19 nt, Artificial Sequence
  Description of Artificial Sequence: Synthetic oligonucleotide
cagcagcugcccggucucc

SEQ ID NO: 2875186 - RNA, 19 nt, Artificial Sequence
  Description of Artificial Sequence: Synthetic oligonucleotide
cggccaucacgaucuuucc

SEQ ID NO: 2875187 - RNA, 19 nt, Artificial Sequence
  Description of Artificial Sequence: Synthetic oligonucleotide
accaggccaaagggcuccu

SEQ ID NO: 2875188 - RNA, 19 nt, Artificial Sequence
  Description of Artificial Sequence: Synthetic oligonucleotide
cacgagcgucagguucaag

SEQ ID NO: 2875189 - RNA, 19 nt, Artificial Sequence
  Description of Artificial Sequence: Synthetic oligonucleotide
ggggcguugcaguugucau

SEQ ID NO: 2875190 - RNA, 19 nt, Artificial Sequence
  Description of Artificial Sequence: Synthetic oligonucleotide
ggcuugaguaccacacagu

SEQ ID NO: 2875191 - RNA, 19 nt, Artificial Sequence
  Description of Artificial Sequence: Synthetic oligonucleotide
ccuuccggaugaaggcuga

SEQ ID NO: 2875192 - RNA, 19 nt, Artificial Sequence
  Description of Artificial Sequence: Synthetic oligonucleotide
gaggcccacccagcaccac

SEQ ID NO: 2875193 - RNA, 19 nt, Artificial Sequence
  Description of Artificial Sequence: Synthetic oligonucleotide
agcggccaucacgaucuuu

SEQ ID NO: 2875194 - RNA, 19 nt, Artificial Sequence
  Description of Artificial Sequence: Synthetic oligonucleotide
cuggucucugagggcuuga

SEQ ID NO: 2875195 - RNA, 19 nt, Artificial Sequence
  Description of Artificial Sequence: Synthetic oligonucleotide
ccaguggcacgagcgucag

SEQ ID NO: 2875196 - RNA, 19 nt, Artificial Sequence
  Description of Artificial Sequence: Synthetic oligonucleotide
gggcuccuuccggaugaag

SEQ ID NO: 2875197 - RNA, 19 nt, Artificial Sequence
  Description of Artificial Sequence: Synthetic oligonucleotide
ccucagccaggaucuucuc

SEQ ID NO: 2875198 - RNA, 19 nt, Artificial Sequence
  Description of Artificial Sequence: Synthetic oligonucleotide
gcccacccagcaccacagc

SEQ ID NO: 2875199 - RNA, 19 nt, Artificial Sequence
  Description of Artificial Sequence: Synthetic oligonucleotide
ccccaccaguggcacgagc

SEQ ID NO: 2875200 - RNA, 19 nt, Artificial Sequence
  Description of Artificial Sequence: Synthetic oligonucleotide
gugaugggugucagguguu

SEQ ID NO: 2875201 - RNA, 19 nt, Artificial Sequence
  Description of Artificial Sequence: Synthetic oligonucleotide
agggcuccuuccggaugaa

SEQ ID NO: 2875202 - RNA, 19 nt, Artificial Sequence
  Description of Artificial Sequence: Synthetic oligonucleotide
cagcuccagggugaugggu

SEQ ID NO: 2875203 - RNA, 19 nt, Artificial Sequence
  Description of Artificial Sequence: Synthetic oligonucleotide
guuuggcagcagcggccau

SEQ ID NO: 2875204 - RNA, 19 nt, Artificial Sequence
  Description of Artificial Sequence: Synthetic oligonucleotide
guggcacgagcgucagguu

SEQ ID NO: 2875205 - RNA, 19 nt, Artificial Sequence
  Description of Artificial Sequence: Synthetic oligonucleotide
cgucagguucaagggauaa

SEQ ID NO: 2875206 - RNA, 19 nt, Artificial Sequence
  Description of Artificial Sequence: Synthetic oligonucleotide
ccaccaguggcacgagcgu

SEQ ID NO: 2875207 - RNA, 19 nt, Artificial Sequence
  Description of Artificial Sequence: Synthetic oligonucleotide
gcgucagguucaagggaua

SEQ ID NO: 2875208 - RNA, 19 nt, Artificial Sequence
  Description of Artificial Sequence: Synthetic oligonucleotide
cccggucuccugaggccca

SEQ ID NO: 2875209 - RNA, 19 nt, Artificial Sequence
  Description of Artificial Sequence: Synthetic oligonucleotide
gcacgagcgucagguucaa

SEQ ID NO: 2875210 - RNA, 19 nt, Artificial Sequence
  Description of Artificial Sequence: Synthetic oligonucleotide
ccggucuccugaggcccac

SEQ ID NO: 2875211 - RNA, 19 nt, Artificial Sequence
  Description of Artificial Sequence: Synthetic oligonucleotide
ggaggaccucagccaggau

SEQ ID NO: 2875212 - RNA, 19 nt, Artificial Sequence
  Description of Artificial Sequence: Synthetic oligonucleotide
cagcagcggccaucacgau

SEQ ID NO: 2875213 - RNA, 19 nt, Artificial Sequence
  Description of Artificial Sequence: Synthetic oligonucleotide
cggucuccugaggcccacc

SEQ ID NO: 2875214 - RNA, 19 nt, Artificial Sequence
  Description of Artificial Sequence: Synthetic oligonucleotide
ccacauagcagggguucuu

SEQ ID NO: 2875215 - RNA, 19 nt, Artificial Sequence
  Description of Artificial Sequence: Synthetic oligonucleotide
ccccagcuccagggugaug

SEQ ID NO: 2875216 - RNA, 19 nt, Artificial Sequence
  Description of Artificial Sequence: Synthetic oligonucleotide
ggaccucagccaggaucuu

SEQ ID NO: 2875217 - RNA, 19 nt, Artificial Sequence
  Description of Artificial Sequence: Synthetic oligonucleotide
cagcggccaucacgaucuu

SEQ ID NO: 2875218 - RNA, 19 nt, Artificial Sequence
  Description of Artificial Sequence: Synthetic oligonucleotide
aacacagugccuuucagcc

SEQ ID NO: 2875219 - RNA, 19 nt, Artificial Sequence
  Description of Artificial Sequence: Synthetic oligonucleotide
ucuucuucagugaacacag

SEQ ID NO: 2875220 - RNA, 19 nt, Artificial Sequence
  Description of Artificial Sequence: Synthetic oligonucleotide
uuugucuuggucauacccg

SEQ ID NO: 2875221 - RNA, 19 nt, Artificial Sequence
  Description of Artificial Sequence: Synthetic oligonucleotide
aaucugcugggucacagac

SEQ ID NO: 2875222 - RNA, 19 nt, Artificial Sequence
  Description of Artificial Sequence: Synthetic oligonucleotide
uuugagguggucuugacac

SEQ ID NO: 2875223 - RNA, 19 nt, Artificial Sequence
  Description of Artificial Sequence: Synthetic oligonucleotide
guuucugguacucagcuag

SEQ ID NO: 2875224 - RNA, 19 nt, Artificial Sequence
  Description of Artificial Sequence: Synthetic oligonucleotide
ucuucagugaacacagugc

SEQ ID NO: 2875225 - RNA, 19 nt, Artificial Sequence
  Description of Artificial Sequence: Synthetic oligonucleotide
aaauauucccuacuggaau

SEQ ID NO: 2875226 - RNA, 19 nt, Artificial Sequence
  Description of Artificial Sequence: Synthetic oligonucleotide
aguuccguaguuucagggc

SEQ ID NO: 2875227 - RNA, 19 nt, Artificial Sequence
  Description of Artificial Sequence: Synthetic oligonucleotide
ucaggaaguccuaagcugc

SEQ ID NO: 2875228 - RNA, 19 nt, Artificial Sequence
  Description of Artificial Sequence: Synthetic oligonucleotide
uucuucagugaacacagug

SEQ ID NO: 2875229 - RNA, 19 nt, Artificial Sequence
  Description of Artificial Sequence: Synthetic oligonucleotide
uaaacuucagguuugcuuu

SEQ ID NO: 2875230 - RNA, 19 nt, Artificial Sequence
  Description of Artificial Sequence: Synthetic oligonucleotide
agucaaggaggauagagcu

SEQ ID NO: 2875231 - RNA, 19 nt, Artificial Sequence
  Description of Artificial Sequence: Synthetic oligonucleotide
cuucagugaacacagugcc

SEQ ID NO: 2875232 - RNA, 19 nt, Artificial Sequence
  Description of Artificial Sequence: Synthetic oligonucleotide
cugguacucagcuagcgcg

SEQ ID NO: 2875233 - RNA, 19 nt, Artificial Sequence
  Description of Artificial Sequence: Synthetic oligonucleotide
cuuugucuuggucauaccc

SEQ ID NO: 2875234 - RNA, 19 nt, Artificial Sequence
  Description of Artificial Sequence: Synthetic oligonucleotide
uuucccuucgcugaguucc

SEQ ID NO: 2875235 - RNA, 19 nt, Artificial Sequence
  Description of Artificial Sequence: Synthetic oligonucleotide
agcaacgccgccgacaugc

SEQ ID NO: 2875236 - RNA, 19 nt, Artificial Sequence
  Description of Artificial Sequence: Synthetic oligonucleotide
uugucuuggucauacccgg

SEQ ID NO: 2875237 - RNA, 19 nt, Artificial Sequence
  Description of Artificial Sequence: Synthetic oligonucleotide
uuaggcaccuuucccuucg

SEQ ID NO: 2875238 - RNA, 19 nt, Artificial Sequence
  Description of Artificial Sequence: Synthetic oligonucleotide
aguuucagggccugggagg

SEQ ID NO: 2875239 - RNA, 19 nt, Artificial Sequence
  Description of Artificial Sequence: Synthetic oligonucleotide
auaaacuucagguuugcuu

SEQ ID NO: 2875240 - RNA, 19 nt, Artificial Sequence
  Description of Artificial Sequence: Synthetic oligonucleotide
aauauucccuacuggaauu

SEQ ID NO: 2875241 - RNA, 19 nt, Artificial Sequence
  Description of Artificial Sequence: Synthetic oligonucleotide
acacugucguuucugguac

SEQ ID NO: 2875242 - RNA, 19 nt, Artificial Sequence
  Description of Artificial Sequence: Synthetic oligonucleotide
agaagcuccaggccgcgcc

SEQ ID NO: 2875243 - RNA, 19 nt, Artificial Sequence
  Description of Artificial Sequence: Synthetic oligonucleotide
aacgccgccgacaugcugc

SEQ ID NO: 2875244 - RNA, 19 nt, Artificial Sequence
  Description of Artificial Sequence: Synthetic oligonucleotide
cuggaagucuucuucagug

SEQ ID NO: 2875245 - RNA, 19 nt, Artificial Sequence
  Description of Artificial Sequence: Synthetic oligonucleotide
gaguuccguaguuucaggg

SEQ ID NO: 2875246 - RNA, 19 nt, Artificial Sequence
  Description of Artificial Sequence: Synthetic oligonucleotide
aagucuucuucagugaaca

SEQ ID NO: 2875247 - RNA, 19 nt, Artificial Sequence
  Description of Artificial Sequence: Synthetic oligonucleotide
uucaccggagcuccgcucg

SEQ ID NO: 2875248 - RNA, 19 nt, Artificial Sequence
  Description of Artificial Sequence: Synthetic oligonucleotide
ugcagaaucugcuggguca

SEQ ID NO: 2875249 - RNA, 19 nt, Artificial Sequence
  Description of Artificial Sequence: Synthetic oligonucleotide
uuugcccucgcccuccggg

SEQ ID NO: 2875250 - RNA, 19 nt, Artificial Sequence
  Description of Artificial Sequence: Synthetic oligonucleotide
ucucacgcuggucauaaac

SEQ ID NO: 2875251 - RNA, 19 nt, Artificial Sequence
  Description of Artificial Sequence: Synthetic oligonucleotide
uugacacugucguuucugg

SEQ ID NO: 2875252 - RNA, 19 nt, Artificial Sequence
  Description of Artificial Sequence: Synthetic oligonucleotide
ugucguuucugguacucag

SEQ ID NO: 2875253 - RNA, 19 nt, Artificial Sequence
  Description of Artificial Sequence: Synthetic oligonucleotide
uccucaggaaguccuaagc

SEQ ID NO: 2875254 - RNA, 19 nt, Artificial Sequence
  Description of Artificial Sequence: Synthetic oligonucleotide
gaacacagugccuuucagc

SEQ ID NO: 2875255 - RNA, 19 nt, Artificial Sequence
  Description of Artificial Sequence: Synthetic oligonucleotide
aaaauauucccuacuggaa

SEQ ID NO: 2875256 - RNA, 19 nt, Artificial Sequence
  Description of Artificial Sequence: Synthetic oligonucleotide
cuucagguuugcuuugagg

SEQ ID NO: 2875257 - RNA, 19 nt, Artificial Sequence
  Description of Artificial Sequence: Synthetic oligonucleotide
guuccguaguuucagggcc

SEQ ID NO: 2875258 - RNA, 19 nt, Artificial Sequence
  Description of Artificial Sequence: Synthetic oligonucleotide
cucaggaaguccuaagcug

SEQ ID NO: 2875259 - RNA, 19 nt, Artificial Sequence
  Description of Artificial Sequence: Synthetic oligonucleotide
ucagcuagcgcggacuuag

SEQ ID NO: 2875260 - RNA, 19 nt, Artificial Sequence
  Description of Artificial Sequence: Synthetic oligonucleotide
ucugguacucagcuagcgc

SEQ ID NO: 2875261 - RNA, 19 nt, Artificial Sequence
  Description of Artificial Sequence: Synthetic oligonucleotide
cagucaaggaggauagagc

SEQ ID NO: 2875262 - RNA, 19 nt, Artificial Sequence
  Description of Artificial Sequence: Synthetic oligonucleotide
gucauacccggucacaagc

SEQ ID NO: 2875263 - RNA, 19 nt, Artificial Sequence
  Description of Artificial Sequence: Synthetic oligonucleotide
aaacuucagguuugcuuug

SEQ ID NO: 2875264 - RNA, 19 nt, Artificial Sequence
  Description of Artificial Sequence: Synthetic oligonucleotide
ucagguuugcuuugaggug

SEQ ID NO: 2875265 - RNA, 19 nt, Artificial Sequence
  Description of Artificial Sequence: Synthetic oligonucleotide
uucccuacuggaauuucug

SEQ ID NO: 2875266 - RNA, 19 nt, Artificial Sequence
  Description of Artificial Sequence: Synthetic oligonucleotide
ugaacacagugccuuucag

SEQ ID NO: 2875267 - RNA, 19 nt, Artificial Sequence
  Description of Artificial Sequence: Synthetic oligonucleotide
agcuuuugcggcccugggc

SEQ ID NO: 2875268 - RNA, 19 nt, Artificial Sequence
  Description of Artificial Sequence: Synthetic oligonucleotide
cuagcgcggacuuaggcac

SEQ ID NO: 2875269 - RNA, 19 nt, Artificial Sequence
  Description of Artificial Sequence: Synthetic oligonucleotide
ugguacucagcuagcgcgg

SEQ ID NO: 2875270 - RNA, 19 nt, Artificial Sequence
  Description of Artificial Sequence: Synthetic oligonucleotide
ucccuacuggaauuucugg

SEQ ID NO: 2875271 - RNA, 19 nt, Artificial Sequence
  Description of Artificial Sequence: Synthetic oligonucleotide
uuuguccccacuauuccuc

SEQ ID NO: 2875272 - RNA, 19 nt, Artificial Sequence
  Description of Artificial Sequence: Synthetic oligonucleotide
ucuuggucauacccgguca

SEQ ID NO: 2875273 - RNA, 19 nt, Artificial Sequence
  Description of Artificial Sequence: Synthetic oligonucleotide
ugcugcagaaucugcuggg

SEQ ID NO: 2875274 - RNA, 19 nt, Artificial Sequence
  Description of Artificial Sequence: Synthetic oligonucleotide
agcuagcgcggacuuaggc

SEQ ID NO: 2875275 - RNA, 19 nt, Artificial Sequence
  Description of Artificial Sequence: Synthetic oligonucleotide
uuugcuuugagguggucuu

SEQ ID NO: 2875276 - RNA, 19 nt, Artificial Sequence
  Description of Artificial Sequence: Synthetic oligonucleotide
acuauuccucaggaagucc

SEQ ID NO: 2875277 - RNA, 19 nt, Artificial Sequence
  Description of Artificial Sequence: Synthetic oligonucleotide
acuggaauuucuggaaguc

SEQ ID NO: 2875278 - RNA, 19 nt, Artificial Sequence
  Description of Artificial Sequence: Synthetic oligonucleotide
uucuuugucuuggucauac

SEQ ID NO: 2875279 - RNA, 19 nt, Artificial Sequence
  Description of Artificial Sequence: Synthetic oligonucleotide
ucuggcacggugcuucuca

SEQ ID NO: 2875280 - RNA, 19 nt, Artificial Sequence
  Description of Artificial Sequence: Synthetic oligonucleotide
ucaaggaggauagagcuuu

SEQ ID NO: 2875281 - RNA, 19 nt, Artificial Sequence
  Description of Artificial Sequence: Synthetic oligonucleotide
cuccgaugcggccagaagc

SEQ ID NO: 2875282 - RNA, 19 nt, Artificial Sequence
  Description of Artificial Sequence: Synthetic oligonucleotide
ugaguuccguaguuucagg

SEQ ID NO: 2875283 - RNA, 19 nt, Artificial Sequence
  Description of Artificial Sequence: Synthetic oligonucleotide
uuuuguccccacuauuccu

SEQ ID NO: 2875284 - RNA, 19 nt, Artificial Sequence
  Description of Artificial Sequence: Synthetic oligonucleotide
cuggucauaaacuucaggu

SEQ ID NO: 2875285 - RNA, 19 nt, Artificial Sequence
  Description of Artificial Sequence: Synthetic oligonucleotide
cuacuggaauuucuggaag

SEQ ID NO: 2875286 - RNA, 19 nt, Artificial Sequence
  Description of Artificial Sequence: Synthetic oligonucleotide
uacuggaauuucuggaagu

SEQ ID NO: 2875287 - RNA, 19 nt, Artificial Sequence
  Description of Artificial Sequence: Synthetic oligonucleotide
acagacucuggcacggugc

SEQ ID NO: 2875288 - RNA, 19 nt, Artificial Sequence
  Description of Artificial Sequence: Synthetic oligonucleotide
aauuucuggaagucuucuu

SEQ ID NO: 2875289 - RNA, 19 nt, Artificial Sequence
  Description of Artificial Sequence: Synthetic oligonucleotide
cacgagaggccuccgaugc

SEQ ID NO: 2875290 - RNA, 19 nt, Artificial Sequence
  Description of Artificial Sequence: Synthetic oligonucleotide
uucugguacucagcuagcg

SEQ ID NO: 2875291 - RNA, 19 nt, Artificial Sequence
  Description of Artificial Sequence: Synthetic oligonucleotide
aagcuuuugcggcccuggg

SEQ ID NO: 2875292 - RNA, 19 nt, Artificial Sequence
  Description of Artificial Sequence: Synthetic oligonucleotide
ucagugaacacagugccuu

SEQ ID NO: 2875293 - RNA, 19 nt, Artificial Sequence
  Description of Artificial Sequence: Synthetic oligonucleotide
cucgucuuggccuggccgg

SEQ ID NO: 2875294 - RNA, 19 nt, Artificial Sequence
  Description of Artificial Sequence: Synthetic oligonucleotide
uggucauaaacuucagguu

SEQ ID NO: 2875295 - RNA, 19 nt, Artificial Sequence
  Description of Artificial Sequence: Synthetic oligonucleotide
ugagguggucuugacacug

SEQ ID NO: 2875296 - RNA, 19 nt, Artificial Sequence
  Description of Artificial Sequence: Synthetic oligonucleotide
gucacaagcuuuugcggcc

SEQ ID NO: 2875297 - RNA, 19 nt, Artificial Sequence
  Description of Artificial Sequence: Synthetic oligonucleotide
uggaagucuucuucaguga

SEQ ID NO: 2875298 - RNA, 19 nt, Artificial Sequence
  Description of Artificial Sequence: Synthetic oligonucleotide
cccacuauuccucaggaag

SEQ ID NO: 2875299 - RNA, 19 nt, Artificial Sequence
  Description of Artificial Sequence: Synthetic oligonucleotide
ucauacccggucacaagcu

SEQ ID NO: 2875300 - RNA, 19 nt, Artificial Sequence
  Description of Artificial Sequence: Synthetic oligonucleotide
gucauaaacuucagguuug

SEQ ID NO: 2875301 - RNA, 19 nt, Artificial Sequence
  Description of Artificial Sequence: Synthetic oligonucleotide
ggucacaagcuuuugcggc

SEQ ID NO: 2875302 - RNA, 19 nt, Artificial Sequence
  Description of Artificial Sequence: Synthetic oligonucleotide
ucauaaacuucagguuugc

SEQ ID NO: 2875303 - RNA, 19 nt, Artificial Sequence
  Description of Artificial Sequence: Synthetic oligonucleotide
uucagugaacacagugccu

SEQ ID NO: 2875304 - RNA, 19 nt, Artificial Sequence
  Description of Artificial Sequence: Synthetic oligonucleotide
uuucugguacucagcuagc

SEQ ID NO: 2875305 - RNA, 19 nt, Artificial Sequence
  Description of Artificial Sequence: Synthetic oligonucleotide
ugggcucugcugcagaauc

SEQ ID NO: 2875306 - RNA, 19 nt, Artificial Sequence
  Description of Artificial Sequence: Synthetic oligonucleotide
cuccggguccgcuucaccg

SEQ ID NO: 2875307 - RNA, 19 nt, Artificial Sequence
  Description of Artificial Sequence: Synthetic oligonucleotide
gacacugucguuucuggua

SEQ ID NO: 2875308 - RNA, 19 nt, Artificial Sequence
  Description of Artificial Sequence: Synthetic oligonucleotide
ugcugggucacagacucug

SEQ ID NO: 2875309 - RNA, 19 nt, Artificial Sequence
  Description of Artificial Sequence: Synthetic oligonucleotide
uccccacuauuccucagga

SEQ ID NO: 2875310 - RNA, 19 nt, Artificial Sequence
  Description of Artificial Sequence: Synthetic oligonucleotide
agaaucugcugggucacag

SEQ ID NO: 2875311 - RNA, 19 nt, Artificial Sequence
  Description of Artificial Sequence: Synthetic oligonucleotide
uccgcuucaccggagcucc

SEQ ID NO: 2875312 - RNA, 19 nt, Artificial Sequence
  Description of Artificial Sequence: Synthetic oligonucleotide
cuugacacugucguuucug

SEQ ID NO: 2875313 - RNA, 19 nt, Artificial Sequence
  Description of Artificial Sequence: Synthetic oligonucleotide
cugaguuccguaguuucag

SEQ ID NO: 2875314 - RNA, 19 nt, Artificial Sequence
  Description of Artificial Sequence: Synthetic oligonucleotide
gaagcuccaggccgcgccg

SEQ ID NO: 2875315 - RNA, 19 nt, Artificial Sequence
  Description of Artificial Sequence: Synthetic oligonucleotide
acuucagguuugcuuugag

SEQ ID NO: 2875316 - RNA, 19 nt, Artificial Sequence
  Description of Artificial Sequence: Synthetic oligonucleotide
uccggguccgcuucaccgg

SEQ ID NO: 2875317 - RNA, 19 nt, Artificial Sequence
  Description of Artificial Sequence: Synthetic oligonucleotide
aaguccuaagcugccaaaa

SEQ ID NO: 2875318 - RNA, 19 nt, Artificial Sequence
  Description of Artificial Sequence: Synthetic oligonucleotide
ggccagaagcuccaggccg

SEQ ID NO: 2875319 - RNA, 19 nt, Artificial Sequence
  Description of Artificial Sequence: Synthetic oligonucleotide
gaagucuucuucagugaac

SEQ ID NO: 2875320 - RNA, 19 nt, Artificial Sequence
  Description of Artificial Sequence: Synthetic oligonucleotide
gucacagacucuggcacgg

SEQ ID NO: 2875321 - RNA, 19 nt, Artificial Sequence
  Description of Artificial Sequence: Synthetic oligonucleotide
gacuuaggcaccuuucccu

SEQ ID NO: 2875322 - RNA, 19 nt, Artificial Sequence
  Description of Artificial Sequence: Synthetic oligonucleotide
ucacgcuggucauaaacuu

SEQ ID NO: 2875323 - RNA, 19 nt, Artificial Sequence
  Description of Artificial Sequence: Synthetic oligonucleotide
ccggucacaagcuuuugcg

SEQ ID NO: 2875324 - RNA, 19 nt, Artificial Sequence
  Description of Artificial Sequence: Synthetic oligonucleotide
acugucguuucugguacuc

SEQ ID NO: 2875325 - RNA, 19 nt, Artificial Sequence
  Description of Artificial Sequence: Synthetic oligonucleotide
uucccuucgcugaguuccg

SEQ ID NO: 2875326 - RNA, 19 nt, Artificial Sequence
  Description of Artificial Sequence: Synthetic oligonucleotide
caagcuuuugcggcccugg

SEQ ID NO: 2875327 - RNA, 19 nt, Artificial Sequence
  Description of Artificial Sequence: Synthetic oligonucleotide
agguggucuugacacuguc

SEQ ID NO: 2875328 - RNA, 19 nt, Artificial Sequence
  Description of Artificial Sequence: Synthetic oligonucleotide
agaggccuccgaugcggcc

SEQ ID NO: 2875329 - RNA, 19 nt, Artificial Sequence
  Description of Artificial Sequence: Synthetic oligonucleotide
cugggucacagacucuggc

SEQ ID NO: 2875330 - RNA, 19 nt, Artificial Sequence
  Description of Artificial Sequence: Synthetic oligonucleotide
gugcuucucacgcugguca

SEQ ID NO: 2875331 - RNA, 19 nt, Artificial Sequence
  Description of Artificial Sequence: Synthetic oligonucleotide
uuccguaguuucagggccu

SEQ ID NO: 2875332 - RNA, 19 nt, Artificial Sequence
  Description of Artificial Sequence: Synthetic oligonucleotide
cuuggucauacccggucac

SEQ ID NO: 2875333 - RNA, 19 nt, Artificial Sequence
  Description of Artificial Sequence: Synthetic oligonucleotide
caggaaguccuaagcugcc

SEQ ID NO: 2875334 - RNA, 19 nt, Artificial Sequence
  Description of Artificial Sequence: Synthetic oligonucleotide
ggcacggugcuucucacgc

SEQ ID NO: 2875335 - RNA, 19 nt, Artificial Sequence
  Description of Artificial Sequence: Synthetic oligonucleotide
uucgcugaguuccguaguu

SEQ ID NO: 2875336 - RNA, 19 nt, Artificial Sequence
  Description of Artificial Sequence: Synthetic oligonucleotide
uauuccucaggaaguccua

SEQ ID NO: 2875337 - RNA, 19 nt, Artificial Sequence
  Description of Artificial Sequence: Synthetic oligonucleotide
guuucagggccugggaggc

SEQ ID NO: 2875338 - RNA, 19 nt, Artificial Sequence
  Description of Artificial Sequence: Synthetic oligonucleotide
cacgcuggucauaaacuuc

SEQ ID NO: 2875339 - RNA, 19 nt, Artificial Sequence
  Description of Artificial Sequence: Synthetic oligonucleotide
aacuucagguuugcuuuga

SEQ ID NO: 2875340 - RNA, 19 nt, Artificial Sequence
  Description of Artificial Sequence: Synthetic oligonucleotide
ugcuuugagguggucuuga

SEQ ID NO: 2875341 - RNA, 19 nt, Artificial Sequence
  Description of Artificial Sequence: Synthetic oligonucleotide
guggucuugacacugucgu

SEQ ID NO: 2875342 - RNA, 19 nt, Artificial Sequence
  Description of Artificial Sequence: Synthetic oligonucleotide
acuuaggcaccuuucccuu

SEQ ID NO: 2875343 - RNA, 19 nt, Artificial Sequence
  Description of Artificial Sequence: Synthetic oligonucleotide
ggucacagacucuggcacg

SEQ ID NO: 2875344 - RNA, 19 nt, Artificial Sequence
  Description of Artificial Sequence: Synthetic oligonucleotide
uacucagcuagcgcggacu

SEQ ID NO: 2875345 - RNA, 19 nt, Artificial Sequence
  Description of Artificial Sequence: Synthetic oligonucleotide
ucacaagcuuuugcggccc

SEQ ID NO: 2875346 - RNA, 19 nt, Artificial Sequence
  Description of Artificial Sequence: Synthetic oligonucleotide
ggacuuaggcaccuuuccc

SEQ ID NO: 2875347 - RNA, 19 nt, Artificial Sequence
  Description of Artificial Sequence: Synthetic oligonucleotide
acgcuggucauaaacuuca

SEQ ID NO: 2875348 - RNA, 19 nt, Artificial Sequence
  Description of Artificial Sequence: Synthetic oligonucleotide
cuuugagguggucuugaca

SEQ ID NO: 2875349 - RNA, 19 nt, Artificial Sequence
  Description of Artificial Sequence: Synthetic oligonucleotide
uggcacggugcuucucacg

SEQ ID NO: 2875350 - RNA, 19 nt, Artificial Sequence
  Description of Artificial Sequence: Synthetic oligonucleotide
ucuugacacugucguuucu

SEQ ID NO: 2875351 - RNA, 19 nt, Artificial Sequence
  Description of Artificial Sequence: Synthetic oligonucleotide
gucuuggucauacccgguc

SEQ ID NO: 2875352 - RNA, 19 nt, Artificial Sequence
  Description of Artificial Sequence: Synthetic oligonucleotide
cacggugcuucucacgcug

SEQ ID NO: 2875353 - RNA, 19 nt, Artificial Sequence
  Description of Artificial Sequence: Synthetic oligonucleotide
uuguccccacuauuccuca

SEQ ID NO: 2875354 - RNA, 19 nt, Artificial Sequence
  Description of Artificial Sequence: Synthetic oligonucleotide
gaaucugcugggucacaga

SEQ ID NO: 2875355 - RNA, 19 nt, Artificial Sequence
  Description of Artificial Sequence: Synthetic oligonucleotide
gugaacacagugccuuuca

SEQ ID NO: 2875356 - RNA, 19 nt, Artificial Sequence
  Description of Artificial Sequence: Synthetic oligonucleotide
uugagguggucuugacacu

SEQ ID NO: 2875357 - RNA, 19 nt, Artificial Sequence
  Description of Artificial Sequence: Synthetic oligonucleotide
guaguuucagggccuggga

SEQ ID NO: 2875358 - RNA, 19 nt, Artificial Sequence
  Description of Artificial Sequence: Synthetic oligonucleotide
aggccuuugcccucgcccu

SEQ ID NO: 2875359 - RNA, 19 nt, Artificial Sequence
  Description of Artificial Sequence: Synthetic oligonucleotide
ugucuuggucauacccggu

SEQ ID NO: 2875360 - RNA, 19 nt, Artificial Sequence
  Description of Artificial Sequence: Synthetic oligonucleotide
ggcaccuuucccuucgcug

SEQ ID NO: 2875361 - RNA, 19 nt, Artificial Sequence
  Description of Artificial Sequence: Synthetic oligonucleotide
cuauuccucaggaaguccu

SEQ ID NO: 2875362 - RNA, 19 nt, Artificial Sequence
  Description of Artificial Sequence: Synthetic oligonucleotide
gaaguccuaagcugccaaa

SEQ ID NO: 2875363 - RNA, 19 nt, Artificial Sequence
  Description of Artificial Sequence: Synthetic oligonucleotide
gaauuucuggaagucuucu

SEQ ID NO: 2875364 - RNA, 19 nt, Artificial Sequence
  Description of Artificial Sequence: Synthetic oligonucleotide
auucccuacuggaauuucu

SEQ ID NO: 2875365 - RNA, 19 nt, Artificial Sequence
  Description of Artificial Sequence: Synthetic oligonucleotide
ggucauaaacuucagguuu

SEQ ID NO: 2875366 - RNA, 19 nt, Artificial Sequence
  Description of Artificial Sequence: Synthetic oligonucleotide
acacagugccuuucagccu

SEQ ID NO: 2875367 - RNA, 19 nt, Artificial Sequence
  Description of Artificial Sequence: Synthetic oligonucleotide
acgagaggccuccgaugcg

SEQ ID NO: 2875368 - RNA, 19 nt, Artificial Sequence
  Description of Artificial Sequence: Synthetic oligonucleotide
gguggucuugacacugucg

SEQ ID NO: 2875369 - RNA, 19 nt, Artificial Sequence
  Description of Artificial Sequence: Synthetic oligonucleotide
uguccccacuauuccucag

SEQ ID NO: 2875370 - RNA, 19 nt, Artificial Sequence
  Description of Artificial Sequence: Synthetic oligonucleotide
uuggucauacccggucaca

SEQ ID NO: 2875371 - RNA, 19 nt, Artificial Sequence
  Description of Artificial Sequence: Synthetic oligonucleotide
uacccggucacaagcuuuu

SEQ ID NO: 2875372 - RNA, 19 nt, Artificial Sequence
  Description of Artificial Sequence: Synthetic oligonucleotide
cacuauuccucaggaaguc

SEQ ID NO: 2875373 - RNA, 19 nt, Artificial Sequence
  Description of Artificial Sequence: Synthetic oligonucleotide
uauucccuacuggaauuuc

SEQ ID NO: 2875374 - RNA, 19 nt, Artificial Sequence
  Description of Artificial Sequence: Synthetic oligonucleotide
gcucgucuuggccuggccg

SEQ ID NO: 2875375 - RNA, 19 nt, Artificial Sequence
  Description of Artificial Sequence: Synthetic oligonucleotide
gucguuucugguacucagc

SEQ ID NO: 2875376 - RNA, 19 nt, Artificial Sequence
  Description of Artificial Sequence: Synthetic oligonucleotide
cuuaggcaccuuucccuuc

SEQ ID NO: 2875377 - RNA, 19 nt, Artificial Sequence
  Description of Artificial Sequence: Synthetic oligonucleotide
cacagacucuggcacggug

SEQ ID NO: 2875378 - RNA, 19 nt, Artificial Sequence
  Description of Artificial Sequence: Synthetic oligonucleotide
cucacgcuggucauaaacu

SEQ ID NO: 2875379 - RNA, 19 nt, Artificial Sequence
  Description of Artificial Sequence: Synthetic oligonucleotide
ggaagucuucuucagugaa

SEQ ID NO: 2875380 - RNA, 19 nt, Artificial Sequence
  Description of Artificial Sequence: Synthetic oligonucleotide
gccgacaugcugccgagcc

SEQ ID NO: 2875381 - RNA, 19 nt, Artificial Sequence
  Description of Artificial Sequence: Synthetic oligonucleotide
cugcagaaucugcuggguc

SEQ ID NO: 2875382 - RNA, 19 nt, Artificial Sequence
  Description of Artificial Sequence: Synthetic oligonucleotide
uugcuuugagguggucuug

SEQ ID NO: 2875383 - RNA, 19 nt, Artificial Sequence
  Description of Artificial Sequence: Synthetic oligonucleotide
gcuagcgcggacuuaggca

SEQ ID NO: 2875384 - RNA, 19 nt, Artificial Sequence
  Description of Artificial Sequence: Synthetic oligonucleotide
gaugcggccagaagcucca

SEQ ID NO: 2875385 - RNA, 19 nt, Artificial Sequence
  Description of Artificial Sequence: Synthetic oligonucleotide
ccuucgcugaguuccguag

SEQ ID NO: 2875386 - RNA, 19 nt, Artificial Sequence
  Description of Artificial Sequence: Synthetic oligonucleotide
uuuugcggcccugggcucu

SEQ ID NO: 2875387 - RNA, 19 nt, Artificial Sequence
  Description of Artificial Sequence: Synthetic oligonucleotide
auauucccuacuggaauuu

SEQ ID NO: 2875388 - RNA, 19 nt, Artificial Sequence
  Description of Artificial Sequence: Synthetic oligonucleotide
ucgucuuggccuggccggg

SEQ ID NO: 2875389 - RNA, 19 nt, Artificial Sequence
  Description of Artificial Sequence: Synthetic oligonucleotide
guuugcuuugagguggucu

SEQ ID NO: 2875390 - RNA, 19 nt, Artificial Sequence
  Description of Artificial Sequence: Synthetic oligonucleotide
uccguaguuucagggccug

SEQ ID NO: 2875391 - RNA, 19 nt, Artificial Sequence
  Description of Artificial Sequence: Synthetic oligonucleotide
gcaccuuucccuucgcuga

SEQ ID NO: 2875392 - RNA, 19 nt, Artificial Sequence
  Description of Artificial Sequence: Synthetic oligonucleotide
uagcgcggacuuaggcacc

SEQ ID NO: 2875393 - RNA, 19 nt, Artificial Sequence
  Description of Artificial Sequence: Synthetic oligonucleotide
cuuucccuucgcugaguuc

SEQ ID NO: 2875394 - RNA, 19 nt, Artificial Sequence
  Description of Artificial Sequence: Synthetic oligonucleotide
caccuuucccuucgcugag

SEQ ID NO: 2875395 - RNA, 19 nt, Artificial Sequence
  Description of Artificial Sequence: Synthetic oligonucleotide
uaggcaccuuucccuucgc

SEQ ID NO: 2875396 - RNA, 19 nt, Artificial Sequence
  Description of Artificial Sequence: Synthetic oligonucleotide
ccuacuggaauuucuggaa

SEQ ID NO: 2875397 - RNA, 19 nt, Artificial Sequence
  Description of Artificial Sequence: Synthetic oligonucleotide
auuccucaggaaguccuaa

SEQ ID NO: 2875398 - RNA, 19 nt, Artificial Sequence
  Description of Artificial Sequence: Synthetic oligonucleotide
accggagcuccgcucgucu

SEQ ID NO: 2875399 - RNA, 19 nt, Artificial Sequence
  Description of Artificial Sequence: Synthetic oligonucleotide
cuucaccggagcuccgcuc

SEQ ID NO: 2875400 - RNA, 19 nt, Artificial Sequence
  Description of Artificial Sequence: Synthetic oligonucleotide
acucagcuagcgcggacuu

SEQ ID NO: 2875401 - RNA, 19 nt, Artificial Sequence
  Description of Artificial Sequence: Synthetic oligonucleotide
cuucucacgcuggucauaa

SEQ ID NO: 2875402 - RNA, 19 nt, Artificial Sequence
  Description of Artificial Sequence: Synthetic oligonucleotide
aggaaguccuaagcugcca

SEQ ID NO: 2875403 - RNA, 19 nt, Artificial Sequence
  Description of Artificial Sequence: Synthetic oligonucleotide
cuuuugcggcccugggcuc

SEQ ID NO: 2875404 - RNA, 19 nt, Artificial Sequence
  Description of Artificial Sequence: Synthetic oligonucleotide
gaggccuccgaugcggcca

SEQ ID NO: 2875405 - RNA, 19 nt, Artificial Sequence
  Description of Artificial Sequence: Synthetic oligonucleotide
ggaaguccuaagcugccaa

SEQ ID NO: 2875406 - RNA, 19 nt, Artificial Sequence
  Description of Artificial Sequence: Synthetic oligonucleotide
uggucuugacacugucguu

SEQ ID NO: 2875407 - RNA, 19 nt, Artificial Sequence
  Description of Artificial Sequence: Synthetic oligonucleotide
cuggcacggugcuucucac

SEQ ID NO: 2875408 - RNA, 19 nt, Artificial Sequence
  Description of Artificial Sequence: Synthetic oligonucleotide
caggccgcgccgcagcaac

SEQ ID NO: 2875409 - RNA, 19 nt, Artificial Sequence
  Description of Artificial Sequence: Synthetic oligonucleotide
cuccgcucgucuuggccug

SEQ ID NO: 2875410 - RNA, 19 nt, Artificial Sequence
  Description of Artificial Sequence: Synthetic oligonucleotide
acaagcuuuugcggcccug

SEQ ID NO: 2875411 - RNA, 19 nt, Artificial Sequence
  Description of Artificial Sequence: Synthetic oligonucleotide
cguaguuucagggccuggg

SEQ ID NO: 2875412 - RNA, 19 nt, Artificial Sequence
  Description of Artificial Sequence: Synthetic oligonucleotide
ggagcuccgcucgucuugg

SEQ ID NO: 2875413 - RNA, 19 nt, Artificial Sequence
  Description of Artificial Sequence: Synthetic oligonucleotide
aggccuccgaugcggccag

SEQ ID NO: 2875414 - RNA, 19 nt, Artificial Sequence
  Description of Artificial Sequence: Synthetic oligonucleotide
cagcuagcgcggacuuagg

SEQ ID NO: 2875415 - RNA, 19 nt, Artificial Sequence
  Description of Artificial Sequence: Synthetic oligonucleotide
guacucagcuagcgcggac

SEQ ID NO: 2875416 - RNA, 19 nt, Artificial Sequence
  Description of Artificial Sequence: Synthetic oligonucleotide
aggcaccuuucccuucgcu

SEQ ID NO: 2875417 - RNA, 19 nt, Artificial Sequence
  Description of Artificial Sequence: Synthetic oligonucleotide
cggucacaagcuuuugcgg

SEQ ID NO: 2875418 - RNA, 19 nt, Artificial Sequence
  Description of Artificial Sequence: Synthetic oligonucleotide
cggacuuaggcaccuuucc

SEQ ID NO: 2875419 - RNA, 19 nt, Artificial Sequence
  Description of Artificial Sequence: Synthetic oligonucleotide
ggcucugcugcagaaucug

SEQ ID NO: 2875420 - RNA, 19 nt, Artificial Sequence
  Description of Artificial Sequence: Synthetic oligonucleotide
cccuacuggaauuucugga

SEQ ID NO: 2875421 - RNA, 19 nt, Artificial Sequence
  Description of Artificial Sequence: Synthetic oligonucleotide
agugccuuucagccuucuu

SEQ ID NO: 2875422 - RNA, 19 nt, Artificial Sequence
  Description of Artificial Sequence: Synthetic oligonucleotide
cuccaggccgcgccgcagc

SEQ ID NO: 2875423 - RNA, 19 nt, Artificial Sequence
  Description of Artificial Sequence: Synthetic oligonucleotide
gagaggccuccgaugcggc

SEQ ID NO: 2875424 - RNA, 19 nt, Artificial Sequence
  Description of Artificial Sequence: Synthetic oligonucleotide
ucaccggagcuccgcucgu

SEQ ID NO: 2875425 - RNA, 19 nt, Artificial Sequence
  Description of Artificial Sequence: Synthetic oligonucleotide
aucugcugggucacagacu

SEQ ID NO: 2875426 - RNA, 19 nt, Artificial Sequence
  Description of Artificial Sequence: Synthetic oligonucleotide
acggugcuucucacgcugg

SEQ ID NO: 2875427 - RNA, 19 nt, Artificial Sequence
  Description of Artificial Sequence: Synthetic oligonucleotide
gcacgagaggccuccgaug

SEQ ID NO: 2875428 - RNA, 19 nt, Artificial Sequence
  Description of Artificial Sequence: Synthetic oligonucleotide
auacccggucacaagcuuu

SEQ ID NO: 2875429 - RNA, 19 nt, Artificial Sequence
  Description of Artificial Sequence: Synthetic oligonucleotide
acucuggcacggugcuucu

SEQ ID NO: 2875430 - RNA, 19 nt, Artificial Sequence
  Description of Artificial Sequence: Synthetic oligonucleotide
cuuugcccucgcccuccgg

SEQ ID NO: 2875431 - RNA, 19 nt, Artificial Sequence
  Description of Artificial Sequence: Synthetic oligonucleotide
cccggucacaagcuuuugc

SEQ ID NO: 2875432 - RNA, 19 nt, Artificial Sequence
  Description of Artificial Sequence: Synthetic oligonucleotide
uuugcggcccugggcucug

SEQ ID NO: 2875433 - RNA, 19 nt, Artificial Sequence
  Description of Artificial Sequence: Synthetic oligonucleotide
cgaugcggccagaagcucc

SEQ ID NO: 2875434 - RNA, 19 nt, Artificial Sequence
  Description of Artificial Sequence: Synthetic oligonucleotide
ucgcugaguuccguaguuu

SEQ ID NO: 2875435 - RNA, 19 nt, Artificial Sequence
  Description of Artificial Sequence: Synthetic oligonucleotide
uucucacgcuggucauaaa

SEQ ID NO: 2875436 - RNA, 19 nt, Artificial Sequence
  Description of Artificial Sequence: Synthetic oligonucleotide
ugcccucgcccuccggguc

SEQ ID NO: 2875437 - RNA, 19 nt, Artificial Sequence
  Description of Artificial Sequence: Synthetic oligonucleotide
gcuuugagguggucuugac

SEQ ID NO: 2875438 - RNA, 19 nt, Artificial Sequence
  Description of Artificial Sequence: Synthetic oligonucleotide
ucacagacucuggcacggu

SEQ ID NO: 2875439 - RNA, 19 nt, Artificial Sequence
  Description of Artificial Sequence: Synthetic oligonucleotide
uccgcucgucuuggccugg

SEQ ID NO: 2875440 - RNA, 19 nt, Artificial Sequence
  Description of Artificial Sequence: Synthetic oligonucleotide
caacgccgccgacaugcug

SEQ ID NO: 2875441 - RNA, 19 nt, Artificial Sequence
  Description of Artificial Sequence: Synthetic oligonucleotide
agcgcggacuuaggcaccu

SEQ ID NO: 2875442 - RNA, 19 nt, Artificial Sequence
  Description of Artificial Sequence: Synthetic oligonucleotide
acagugccuuucagccuuc

SEQ ID NO: 2875443 - RNA, 19 nt, Artificial Sequence
  Description of Artificial Sequence: Synthetic oligonucleotide
gcugaguuccguaguuuca

SEQ ID NO: 2875444 - RNA, 19 nt, Artificial Sequence
  Description of Artificial Sequence: Synthetic oligonucleotide
cugucguuucugguacuca

SEQ ID NO: 2875445 - RNA, 19 nt, Artificial Sequence
  Description of Artificial Sequence: Synthetic oligonucleotide
guccgcuucaccggagcuc

SEQ ID NO: 2875446 - RNA, 19 nt, Artificial Sequence
  Description of Artificial Sequence: Synthetic oligonucleotide
agguuugcuuugagguggu

SEQ ID NO: 2875447 - RNA, 19 nt, Artificial Sequence
  Description of Artificial Sequence: Synthetic oligonucleotide
gcugggucacagacucugg

SEQ ID NO: 2875448 - RNA, 19 nt, Artificial Sequence
  Description of Artificial Sequence: Synthetic oligonucleotide
ggucuugacacugucguuu

SEQ ID NO: 2875449 - RNA, 19 nt, Artificial Sequence
  Description of Artificial Sequence: Synthetic oligonucleotide
cgcugaguuccguaguuuc

SEQ ID NO: 2875450 - RNA, 19 nt, Artificial Sequence
  Description of Artificial Sequence: Synthetic oligonucleotide
ggguccgcuucaccggagc

SEQ ID NO: 2875451 - RNA, 19 nt, Artificial Sequence
  Description of Artificial Sequence: Synthetic oligonucleotide
cgagaggccuccgaugcgg

SEQ ID NO: 2875452 - RNA, 19 nt, Artificial Sequence
  Description of Artificial Sequence: Synthetic oligonucleotide
agcuccaggccgcgccgca

SEQ ID NO: 2875453 - RNA, 19 nt, Artificial Sequence
  Description of Artificial Sequence: Synthetic oligonucleotide
gccgccgacaugcugccga

SEQ ID NO: 2875454 - RNA, 19 nt, Artificial Sequence
  Description of Artificial Sequence: Synthetic oligonucleotide
cuucgcugaguuccguagu

SEQ ID NO: 2875455 - RNA, 19 nt, Artificial Sequence
  Description of Artificial Sequence: Synthetic oligonucleotide
cauaaacuucagguuugcu

SEQ ID NO: 2875456 - RNA, 19 nt, Artificial Sequence
  Description of Artificial Sequence: Synthetic oligonucleotide
cagacucuggcacggugcu

SEQ ID NO: 2875457 - RNA, 19 nt, Artificial Sequence
  Description of Artificial Sequence: Synthetic oligonucleotide
ccacuauuccucaggaagu

SEQ ID NO: 2875458 - RNA, 19 nt, Artificial Sequence
  Description of Artificial Sequence: Synthetic oligonucleotide
accuuucccuucgcugagu

SEQ ID NO: 2875459 - RNA, 19 nt, Artificial Sequence
  Description of Artificial Sequence: Synthetic oligonucleotide
gggccugggaggccuuugc

SEQ ID NO: 2875460 - RNA, 19 nt, Artificial Sequence
  Description of Artificial Sequence: Synthetic oligonucleotide
ggcggcacgagaggccucc

SEQ ID NO: 2875461 - RNA, 19 nt, Artificial Sequence
  Description of Artificial Sequence: Synthetic oligonucleotide
ggugcuucucacgcugguc

SEQ ID NO: 2875462 - RNA, 19 nt, Artificial Sequence
  Description of Artificial Sequence: Synthetic oligonucleotide
gcucugcugcagaaucugc

SEQ ID NO: 2875463 - RNA, 19 nt, Artificial Sequence
  Description of Artificial Sequence: Synthetic oligonucleotide
ccucaggaaguccuaagcu

SEQ ID NO: 2875464 - RNA, 19 nt, Artificial Sequence
  Description of Artificial Sequence: Synthetic oligonucleotide
ccgacaugcugccgagccc

SEQ ID NO: 2875465 - RNA, 19 nt, Artificial Sequence
  Description of Artificial Sequence: Synthetic oligonucleotide
ucccuucgcugaguuccgu

SEQ ID NO: 2875466 - RNA, 19 nt, Artificial Sequence
  Description of Artificial Sequence: Synthetic oligonucleotide
agggccugggaggccuuug

SEQ ID NO: 2875467 - RNA, 19 nt, Artificial Sequence
  Description of Artificial Sequence: Synthetic oligonucleotide
gguacucagcuagcgcgga

SEQ ID NO: 2875468 - RNA, 19 nt, Artificial Sequence
  Description of Artificial Sequence: Synthetic oligonucleotide
ccuccgaugcggccagaag

SEQ ID NO: 2875469 - RNA, 19 nt, Artificial Sequence
  Description of Artificial Sequence: Synthetic oligonucleotide
gcuccgcucgucuuggccu

SEQ ID NO: 2875470 - RNA, 19 nt, Artificial Sequence
  Description of Artificial Sequence: Synthetic oligonucleotide
acccggucacaagcuuuug

SEQ ID NO: 2875471 - RNA, 19 nt, Artificial Sequence
  Description of Artificial Sequence: Synthetic oligonucleotide
ccgcgccgcagcaacgccg

SEQ ID NO: 2875472 - RNA, 19 nt, Artificial Sequence
  Description of Artificial Sequence: Synthetic oligonucleotide
gcggacuuaggcaccuuuc

SEQ ID NO: 2875473 - RNA, 19 nt, Artificial Sequence
  Description of Artificial Sequence: Synthetic oligonucleotide
gcagcaacgccgccgacau

SEQ ID NO: 2875474 - RNA, 19 nt, Artificial Sequence
  Description of Artificial Sequence: Synthetic oligonucleotide
ggaggccuuugcccucgcc

SEQ ID NO: 2875475 - RNA, 19 nt, Artificial Sequence
  Description of Artificial Sequence: Synthetic oligonucleotide
gccgcagcaacgccgccga

SEQ ID NO: 2875476 - RNA, 19 nt, Artificial Sequence
  Description of Artificial Sequence: Synthetic oligonucleotide
gagguggucuugacacugu

SEQ ID NO: 2875477 - RNA, 19 nt, Artificial Sequence
  Description of Artificial Sequence: Synthetic oligonucleotide
cuucuucagugaacacagu

SEQ ID NO: 2875478 - RNA, 19 nt, Artificial Sequence
  Description of Artificial Sequence: Synthetic oligonucleotide
cauacccggucacaagcuu

SEQ ID NO: 2875479 - RNA, 19 nt, Artificial Sequence
  Description of Artificial Sequence: Synthetic oligonucleotide
ggcacgagaggccuccgau

SEQ ID NO: 2875480 - RNA, 19 nt, Artificial Sequence
  Description of Artificial Sequence: Synthetic oligonucleotide
gccuuugcccucgcccucc

SEQ ID NO: 2875481 - RNA, 19 nt, Artificial Sequence
  Description of Artificial Sequence: Synthetic oligonucleotide
gucaaggaggauagagcuu

SEQ ID NO: 2875482 - RNA, 19 nt, Artificial Sequence
  Description of Artificial Sequence: Synthetic oligonucleotide
gcccucgcccuccgggucc

SEQ ID NO: 2875483 - RNA, 19 nt, Artificial Sequence
  Description of Artificial Sequence: Synthetic oligonucleotide
aggccgcgccgcagcaacg

SEQ ID NO: 2875484 - RNA, 19 nt, Artificial Sequence
  Description of Artificial Sequence: Synthetic oligonucleotide
cggccagaagcuccaggcc

SEQ ID NO: 2875485 - RNA, 19 nt, Artificial Sequence
  Description of Artificial Sequence: Synthetic oligonucleotide
augcggccagaagcuccag

SEQ ID NO: 2875486 - RNA, 19 nt, Artificial Sequence
  Description of Artificial Sequence: Synthetic oligonucleotide
gcggcccugggcucugcug

SEQ ID NO: 2875487 - RNA, 19 nt, Artificial Sequence
  Description of Artificial Sequence: Synthetic oligonucleotide
ccuuugcccucgcccuccg

SEQ ID NO: 2875488 - RNA, 19 nt, Artificial Sequence
  Description of Artificial Sequence: Synthetic oligonucleotide
cucuggcacggugcuucuc

SEQ ID NO: 2875489 - RNA, 19 nt, Artificial Sequence
  Description of Artificial Sequence: Synthetic oligonucleotide
ggccgcgccgcagcaacgc

SEQ ID NO: 2875490 - RNA, 19 nt, Artificial Sequence
  Description of Artificial Sequence: Synthetic oligonucleotide
agacucuggcacggugcuu

SEQ ID NO: 2875491 - RNA, 19 nt, Artificial Sequence
  Description of Artificial Sequence: Synthetic oligonucleotide
cagcaacgccgccgacaug

SEQ ID NO: 2875492 - RNA, 19 nt, Artificial Sequence
  Description of Artificial Sequence: Synthetic oligonucleotide
cggagcuccgcucgucuug

SEQ ID NO: 2875493 - RNA, 19 nt, Artificial Sequence
  Description of Artificial Sequence: Synthetic oligonucleotide
ggccuuugcccucgcccuc

SEQ ID NO: 2875494 - RNA, 19 nt, Artificial Sequence
  Description of Artificial Sequence: Synthetic oligonucleotide
caccggagcuccgcucguc

SEQ ID NO: 2875495 - RNA, 19 nt, Artificial Sequence
  Description of Artificial Sequence: Synthetic oligonucleotide
ccgccgacaugcugccgag

SEQ ID NO: 2875496 - RNA, 19 nt, Artificial Sequence
  Description of Artificial Sequence: Synthetic oligonucleotide
gguccgcuucaccggagcu

SEQ ID NO: 2875497 - RNA, 19 nt, Artificial Sequence
  Description of Artificial Sequence: Synthetic oligonucleotide
cacugucguuucugguacu

SEQ ID NO: 2875498 - RNA, 19 nt, Artificial Sequence
  Description of Artificial Sequence: Synthetic oligonucleotide
cagugaacacagugccuuu

SEQ ID NO: 2875499 - RNA, 19 nt, Artificial Sequence
  Description of Artificial Sequence: Synthetic oligonucleotide
ccguaguuucagggccugg

SEQ ID NO: 2875500 - RNA, 19 nt, Artificial Sequence
  Description of Artificial Sequence: Synthetic oligonucleotide
gcuucaccggagcuccgcu

SEQ ID NO: 2875501 - RNA, 19 nt, Artificial Sequence
  Description of Artificial Sequence: Synthetic oligonucleotide
gcugcagaaucugcugggu

SEQ ID NO: 2875502 - RNA, 19 nt, Artificial Sequence
  Description of Artificial Sequence: Synthetic oligonucleotide
gccgcgccgcagcaacgcc

SEQ ID NO: 2875503 - RNA, 19 nt, Artificial Sequence
  Description of Artificial Sequence: Synthetic oligonucleotide
caaggaggauagagcuuuu

SEQ ID NO: 2875504 - RNA, 19 nt, Artificial Sequence
  Description of Artificial Sequence: Synthetic oligonucleotide
gguuugcuuugaggugguc

SEQ ID NO: 2875505 - RNA, 19 nt, Artificial Sequence
  Description of Artificial Sequence: Synthetic oligonucleotide
ggcccugggcucugcugca

SEQ ID NO: 2875506 - RNA, 19 nt, Artificial Sequence
  Description of Artificial Sequence: Synthetic oligonucleotide
cucagcuagcgcggacuua

SEQ ID NO: 2875507 - RNA, 19 nt, Artificial Sequence
  Description of Artificial Sequence: Synthetic oligonucleotide
cacaagcuuuugcggcccu

SEQ ID NO: 2875508 - RNA, 19 nt, Artificial Sequence
  Description of Artificial Sequence: Synthetic oligonucleotide
uugcggcccugggcucugc

SEQ ID NO: 2875509 - RNA, 19 nt, Artificial Sequence
  Description of Artificial Sequence: Synthetic oligonucleotide
gcuccaggccgcgccgcag

SEQ ID NO: 2875510 - RNA, 19 nt, Artificial Sequence
  Description of Artificial Sequence: Synthetic oligonucleotide
cgcuucaccggagcuccgc

SEQ ID NO: 2875511 - RNA, 19 nt, Artificial Sequence
  Description of Artificial Sequence: Synthetic oligonucleotide
gggaggccuuugcccucgc

SEQ ID NO: 2875512 - RNA, 19 nt, Artificial Sequence
  Description of Artificial Sequence: Synthetic oligonucleotide
cguuucugguacucagcua

SEQ ID NO: 2875513 - RNA, 19 nt, Artificial Sequence
  Description of Artificial Sequence: Synthetic oligonucleotide
gcuucucacgcuggucaua

SEQ ID NO: 2875514 - RNA, 19 nt, Artificial Sequence
  Description of Artificial Sequence: Synthetic oligonucleotide
ccccacuauuccucaggaa

SEQ ID NO: 2875515 - RNA, 19 nt, Artificial Sequence
  Description of Artificial Sequence: Synthetic oligonucleotide
ccgcuucaccggagcuccg

SEQ ID NO: 2875516 - RNA, 19 nt, Artificial Sequence
  Description of Artificial Sequence: Synthetic oligonucleotide
cugcugggucacagacucu

SEQ ID NO: 2875517 - RNA, 19 nt, Artificial Sequence
  Description of Artificial Sequence: Synthetic oligonucleotide
gcccugggcucugcugcag

SEQ ID NO: 2875518 - RNA, 19 nt, Artificial Sequence
  Description of Artificial Sequence: Synthetic oligonucleotide
gggcucugcugcagaaucu

SEQ ID NO: 2875519 - RNA, 19 nt, Artificial Sequence
  Description of Artificial Sequence: Synthetic oligonucleotide
gcggcacgagaggccuccg

SEQ ID NO: 2875520 - RNA, 19 nt, Artificial Sequence
  Description of Artificial Sequence: Synthetic oligonucleotide
ccggguccgcuucaccgga

SEQ ID NO: 2875521 - RNA, 19 nt, Artificial Sequence
  Description of Artificial Sequence: Synthetic oligonucleotide
cgcucgucuuggccuggcc

SEQ ID NO: 2875522 - RNA, 19 nt, Artificial Sequence
  Description of Artificial Sequence: Synthetic oligonucleotide
cugggcucugcugcagaau

SEQ ID NO: 2875523 - RNA, 19 nt, Artificial Sequence
  Description of Artificial Sequence: Synthetic oligonucleotide
ccgaugcggccagaagcuc

SEQ ID NO: 2875524 - RNA, 19 nt, Artificial Sequence
  Description of Artificial Sequence: Synthetic oligonucleotide
cgucuuggccuggccgggg

SEQ ID NO: 2875525 - RNA, 19 nt, Artificial Sequence
  Description of Artificial Sequence: Synthetic oligonucleotide
cccuucgcugaguuccgua

SEQ ID NO: 2875526 - RNA, 19 nt, Artificial Sequence
  Description of Artificial Sequence: Synthetic oligonucleotide
cgcagcaacgccgccgaca

SEQ ID NO: 2875527 - RNA, 19 nt, Artificial Sequence
  Description of Artificial Sequence: Synthetic oligonucleotide
gccuccgaugcggccagaa

SEQ ID NO: 2875528 - RNA, 19 nt, Artificial Sequence
  Description of Artificial Sequence: Synthetic oligonucleotide
ccuuucccuucgcugaguu

SEQ ID NO: 2875529 - RNA, 19 nt, Artificial Sequence
  Description of Artificial Sequence: Synthetic oligonucleotide
cccucgcccuccggguccg

SEQ ID NO: 2875530 - RNA, 19 nt, Artificial Sequence
  Description of Artificial Sequence: Synthetic oligonucleotide
cccugggcucugcugcaga

SEQ ID NO: 2875531 - RNA, 19 nt, Artificial Sequence
  Description of Artificial Sequence: Synthetic oligonucleotide
cggguccgcuucaccggag

SEQ ID NO: 2875532 - RNA, 19 nt, Artificial Sequence
  Description of Artificial Sequence: Synthetic oligonucleotide
ccgcucgucuuggccuggc

SEQ ID NO: 2875533 - RNA, 19 nt, Artificial Sequence
  Description of Artificial Sequence: Synthetic oligonucleotide
cagugccuuucagccuucu

SEQ ID NO: 2875534 - RNA, 19 nt, Artificial Sequence
  Description of Artificial Sequence: Synthetic oligonucleotide
cgcccuccggguccgcuuc

SEQ ID NO: 2875535 - RNA, 19 nt, Artificial Sequence
  Description of Artificial Sequence: Synthetic oligonucleotide
cccuccggguccgcuucac

SEQ ID NO: 2875536 - RNA, 19 nt, Artificial Sequence
  Description of Artificial Sequence: Synthetic oligonucleotide
gcccuccggguccgcuuca

SEQ ID NO: 2875537 - RNA, 19 nt, Artificial Sequence
  Description of Artificial Sequence: Synthetic oligonucleotide
cucgcccuccggguccgcu

SEQ ID NO: 2875538 - RNA, 19 nt, Artificial Sequence
  Description of Artificial Sequence: Synthetic oligonucleotide
cgccgacaugcugccgagc

SEQ ID NO: 2875539 - RNA, 19 nt, Artificial Sequence
  Description of Artificial Sequence: Synthetic oligonucleotide
gcaacgccgccgacaugcu

SEQ ID NO: 2875540 - RNA, 19 nt, Artificial Sequence
  Description of Artificial Sequence: Synthetic oligonucleotide
ccgcagcaacgccgccgac

SEQ ID NO: 2875541 - RNA, 19 nt, Artificial Sequence
  Description of Artificial Sequence: Synthetic oligonucleotide
gggcggcacgagaggccuc

SEQ ID NO: 2875542 - RNA, 19 nt, Artificial Sequence
  Description of Artificial Sequence: Synthetic oligonucleotide
cggcacgagaggccuccga

SEQ ID NO: 2875543 - RNA, 19 nt, Artificial Sequence
  Description of Artificial Sequence: Synthetic oligonucleotide
cgcggacuuaggcaccuuu

SEQ ID NO: 2875544 - RNA, 19 nt, Artificial Sequence
  Description of Artificial Sequence: Synthetic oligonucleotide
cgccgccgacaugcugccg

SEQ ID NO: 2875545 - RNA, 19 nt, Artificial Sequence
  Description of Artificial Sequence: Synthetic oligonucleotide
ccggagcuccgcucgucuu

SEQ ID NO: 2875546 - RNA, 19 nt, Artificial Sequence
  Description of Artificial Sequence: Synthetic oligonucleotide
cagggccugggaggccuuu

SEQ ID NO: 2875547 - RNA, 19 nt, Artificial Sequence
  Description of Artificial Sequence: Synthetic oligonucleotide
ggccuccgaugcggccaga

SEQ ID NO: 2875548 - RNA, 19 nt, Artificial Sequence
  Description of Artificial Sequence: Synthetic oligonucleotide
ccucgcccuccggguccgc

SEQ ID NO: 2875549 - RNA, 19 nt, Artificial Sequence
  Description of Artificial Sequence: Synthetic oligonucleotide
gcgcggacuuaggcaccuu

SEQ ID NO: 2875550 - RNA, 19 nt, Artificial Sequence
  Description of Artificial Sequence: Synthetic oligonucleotide
acaaauacaucacaaaugg

SEQ ID NO: 2875551 - RNA, 19 nt, Artificial Sequence
  Description of Artificial Sequence: Synthetic oligonucleotide
ucgauuaacacuaagaaaa

SEQ ID NO: 2875552 - RNA, 19 nt, Artificial Sequence
  Description of Artificial Sequence: Synthetic oligonucleotide
uauaucuucauacccaagg

SEQ ID NO: 2875553 - RNA, 19 nt, Artificial Sequence
  Description of Artificial Sequence: Synthetic oligonucleotide
ucuuugaugauucucaccc

SEQ ID NO: 2875554 - RNA, 19 nt, Artificial Sequence
  Description of Artificial Sequence: Synthetic oligonucleotide
aauaacuucugcuccaagg

SEQ ID NO: 2875555 - RNA, 19 nt, Artificial Sequence
  Description of Artificial Sequence: Synthetic oligonucleotide
uuuauuucgauuaacacua

SEQ ID NO: 2875556 - RNA, 19 nt, Artificial Sequence
  Description of Artificial Sequence: Synthetic oligonucleotide
aauucaucguagcaaaagg

SEQ ID NO: 2875557 - RNA, 19 nt, Artificial Sequence
  Description of Artificial Sequence: Synthetic oligonucleotide
uauaguuuuccacaaauac

SEQ ID NO: 2875558 - RNA, 19 nt, Artificial Sequence
  Description of Artificial Sequence: Synthetic oligonucleotide
ucuguguucacaaaaggag

SEQ ID NO: 2875559 - RNA, 19 nt, Artificial Sequence
  Description of Artificial Sequence: Synthetic oligonucleotide
cauauuaucaguaucugac

SEQ ID NO: 2875560 - RNA, 19 nt, Artificial Sequence
  Description of Artificial Sequence: Synthetic oligonucleotide
uuuuauuucgauuaacacu

SEQ ID NO: 2875561 - RNA, 19 nt, Artificial Sequence
  Description of Artificial Sequence: Synthetic oligonucleotide
acacuaagaaaauauguac

SEQ ID NO: 2875562 - RNA, 19 nt, Artificial Sequence
  Description of Artificial Sequence: Synthetic oligonucleotide
aaauacaucacaaauggcu

SEQ ID NO: 2875563 - RNA, 19 nt, Artificial Sequence
  Description of Artificial Sequence: Synthetic oligonucleotide
agauccagaauucucacac

SEQ ID NO: 2875564 - RNA, 19 nt, Artificial Sequence
  Description of Artificial Sequence: Synthetic oligonucleotide
auuaucaguaucugacugc

SEQ ID NO: 2875565 - RNA, 19 nt, Artificial Sequence
  Description of Artificial Sequence: Synthetic oligonucleotide
ucuuguuagauccagaauu

SEQ ID NO: 2875566 - RNA, 19 nt, Artificial Sequence
  Description of Artificial Sequence: Synthetic oligonucleotide
agaaaguuuugccagggac

SEQ ID NO: 2875567 - RNA, 19 nt, Artificial Sequence
  Description of Artificial Sequence: Synthetic oligonucleotide
uuucgauuaacacuaagaa

SEQ ID NO: 2875568 - RNA, 19 nt, Artificial Sequence
  Description of Artificial Sequence: Synthetic oligonucleotide
uuaacacuaagaaaauaug

SEQ ID NO: 2875569 - RNA, 19 nt, Artificial Sequence
  Description of Artificial Sequence: Synthetic oligonucleotide
auaucuucauacccaaggc

SEQ ID NO: 2875570 - RNA, 19 nt, Artificial Sequence
  Description of Artificial Sequence: Synthetic oligonucleotide
uaacacuaagaaaauaugu

SEQ ID NO: 2875571 - RNA, 19 nt, Artificial Sequence
  Description of Artificial Sequence: Synthetic oligonucleotide
uauuaucaguaucugacug

SEQ ID NO: 2875572 - RNA, 19 nt, Artificial Sequence
  Description of Artificial Sequence: Synthetic oligonucleotide
auauuaacagcuuauacuu

SEQ ID NO: 2875573 - RNA, 19 nt, Artificial Sequence
  Description of Artificial Sequence: Synthetic oligonucleotide
cuugucuauaucuucauac

SEQ ID NO: 2875574 - RNA, 19 nt, Artificial Sequence
  Description of Artificial Sequence: Synthetic oligonucleotide
aucacaaauggcugcaagc

SEQ ID NO: 2875575 - RNA, 19 nt, Artificial Sequence
  Description of Artificial Sequence: Synthetic oligonucleotide
uaguuuuccacaaauacau

SEQ ID NO: 2875576 - RNA, 19 nt, Artificial Sequence
  Description of Artificial Sequence: Synthetic oligonucleotide
auccagaauucucacaccc

SEQ ID NO: 2875577 - RNA, 19 nt, Artificial Sequence
  Description of Artificial Sequence: Synthetic oligonucleotide
uaagaaaauauguacuuuc

SEQ ID NO: 2875578 - RNA, 19 nt, Artificial Sequence
  Description of Artificial Sequence: Synthetic oligonucleotide
aucaguaucugacugcggg

SEQ ID NO: 2875579 - RNA, 19 nt, Artificial Sequence
  Description of Artificial Sequence: Synthetic oligonucleotide
accuuaauaacuucugcuc

SEQ ID NO: 2875580 - RNA, 19 nt, Artificial Sequence
  Description of Artificial Sequence: Synthetic oligonucleotide
aaauucaucguagcaaaag

SEQ ID NO: 2875581 - RNA, 19 nt, Artificial Sequence
  Description of Artificial Sequence: Synthetic oligonucleotide
ugauauuaacagcuuauac

SEQ ID NO: 2875582 - RNA, 19 nt, Artificial Sequence
  Description of Artificial Sequence: Synthetic oligonucleotide
uuucuguguucacaaaagg

SEQ ID NO: 2875583 - RNA, 19 nt, Artificial Sequence
  Description of Artificial Sequence: Synthetic oligonucleotide
ugucuauaucuucauaccc

SEQ ID NO: 2875584 - RNA, 19 nt, Artificial Sequence
  Description of Artificial Sequence: Synthetic oligonucleotide
ucucagaaaguuuugccag

SEQ ID NO: 2875585 - RNA, 19 nt, Artificial Sequence
  Description of Artificial Sequence: Synthetic oligonucleotide
augauucucacccucuugg

SEQ ID NO: 2875586 - RNA, 19 nt, Artificial Sequence
  Description of Artificial Sequence: Synthetic oligonucleotide
ucaucguagcaaaaggucc

SEQ ID NO: 2875587 - RNA, 19 nt, Artificial Sequence
  Description of Artificial Sequence: Synthetic oligonucleotide
gauauuaacagcuuauacu

SEQ ID NO: 2875588 - RNA, 19 nt, Artificial Sequence
  Description of Artificial Sequence: Synthetic oligonucleotide
aauacaucacaaauggcug

SEQ ID NO: 2875589 - RNA, 19 nt, Artificial Sequence
  Description of Artificial Sequence: Synthetic oligonucleotide
auacaucacaaauggcugc

SEQ ID NO: 2875590 - RNA, 19 nt, Artificial Sequence
  Description of Artificial Sequence: Synthetic oligonucleotide
aucuucauacccaaggccc

SEQ ID NO: 2875591 - RNA, 19 nt, Artificial Sequence
  Description of Artificial Sequence: Synthetic oligonucleotide
uuaucaguaucugacugcg

SEQ ID NO: 2875592 - RNA, 19 nt, Artificial Sequence
  Description of Artificial Sequence: Synthetic oligonucleotide
aguggcuucauauuaucag

SEQ ID NO: 2875593 - RNA, 19 nt, Artificial Sequence
  Description of Artificial Sequence: Synthetic oligonucleotide
uccaaggucgccuaaauuc

SEQ ID NO: 2875594 - RNA, 19 nt, Artificial Sequence
  Description of Artificial Sequence: Synthetic oligonucleotide
aaaagguccugccaguacu

SEQ ID NO: 2875595 - RNA, 19 nt, Artificial Sequence
  Description of Artificial Sequence: Synthetic oligonucleotide
guuauuuucaaucuugucu

SEQ ID NO: 2875596 - RNA, 19 nt, Artificial Sequence
  Description of Artificial Sequence: Synthetic oligonucleotide
aaaggagguccccaaguuc

SEQ ID NO: 2875597 - RNA, 19 nt, Artificial Sequence
  Description of Artificial Sequence: Synthetic oligonucleotide
cacaaauacaucacaaaug

SEQ ID NO: 2875598 - RNA, 19 nt, Artificial Sequence
  Description of Artificial Sequence: Synthetic oligonucleotide
uggguuauuuucaaucuug

SEQ ID NO: 2875599 - RNA, 19 nt, Artificial Sequence
  Description of Artificial Sequence: Synthetic oligonucleotide
caguacucuuguuagaucc

SEQ ID NO: 2875600 - RNA, 19 nt, Artificial Sequence
  Description of Artificial Sequence: Synthetic oligonucleotide
aauauguacuuucuguguu

SEQ ID NO: 2875601 - RNA, 19 nt, Artificial Sequence
  Description of Artificial Sequence: Synthetic oligonucleotide
uaucuucauacccaaggcc

SEQ ID NO: 2875602 - RNA, 19 nt, Artificial Sequence
  Description of Artificial Sequence: Synthetic oligonucleotide
uucuguguucacaaaagga

SEQ ID NO: 2875603 - RNA, 19 nt, Artificial Sequence
  Description of Artificial Sequence: Synthetic oligonucleotide
ggauccuugauauuaacag

SEQ ID NO: 2875604 - RNA, 19 nt, Artificial Sequence
  Description of Artificial Sequence: Synthetic oligonucleotide
aauucucacacccuccagu

SEQ ID NO: 2875605 - RNA, 19 nt, Artificial Sequence
  Description of Artificial Sequence: Synthetic oligonucleotide
aacuucugcuccaaggucg

SEQ ID NO: 2875606 - RNA, 19 nt, Artificial Sequence
  Description of Artificial Sequence: Synthetic oligonucleotide
auuaacacuaagaaaauau

SEQ ID NO: 2875607 - RNA, 19 nt, Artificial Sequence
  Description of Artificial Sequence: Synthetic oligonucleotide
uuuggguuauuuucaaucu

SEQ ID NO: 2875608 - RNA, 19 nt, Artificial Sequence
  Description of Artificial Sequence: Synthetic oligonucleotide
aaggagguccccaaguucg

SEQ ID NO: 2875609 - RNA, 19 nt, Artificial Sequence
  Description of Artificial Sequence: Synthetic oligonucleotide
uuuucaaucuugucuauau

SEQ ID NO: 2875610 - RNA, 19 nt, Artificial Sequence
  Description of Artificial Sequence: Synthetic oligonucleotide
uagcaaaagguccugccag

SEQ ID NO: 2875611 - RNA, 19 nt, Artificial Sequence
  Description of Artificial Sequence: Synthetic oligonucleotide
aauggcugcaagcucuuug

SEQ ID NO: 2875612 - RNA, 19 nt, Artificial Sequence
  Description of Artificial Sequence: Synthetic oligonucleotide
uguguucacaaaaggaggu

SEQ ID NO: 2875613 - RNA, 19 nt, Artificial Sequence
  Description of Artificial Sequence: Synthetic oligonucleotide
auaacuucugcuccaaggu

SEQ ID NO: 2875614 - RNA, 19 nt, Artificial Sequence
  Description of Artificial Sequence: Synthetic oligonucleotide
cuguguucacaaaaggagg

SEQ ID NO: 2875615 - RNA, 19 nt, Artificial Sequence
  Description of Artificial Sequence: Synthetic oligonucleotide
gauccuugauauuaacagc

SEQ ID NO: 2875616 - RNA, 19 nt, Artificial Sequence
  Description of Artificial Sequence: Synthetic oligonucleotide
acuauaguuuuccacaaau

SEQ ID NO: 2875617 - RNA, 19 nt, Artificial Sequence
  Description of Artificial Sequence: Synthetic oligonucleotide
uucaucguagcaaaagguc

SEQ ID NO: 2875618 - RNA, 19 nt, Artificial Sequence
  Description of Artificial Sequence: Synthetic oligonucleotide
acuaagaaaauauguacuu

SEQ ID NO: 2875619 - RNA, 19 nt, Artificial Sequence
  Description of Artificial Sequence: Synthetic oligonucleotide
uuugccagggacuauaguu

SEQ ID NO: 2875620 - RNA, 19 nt, Artificial Sequence
  Description of Artificial Sequence: Synthetic oligonucleotide
guuuggguuauuuucaauc

SEQ ID NO: 2875621 - RNA, 19 nt, Artificial Sequence
  Description of Artificial Sequence: Synthetic oligonucleotide
uauuucgauuaacacuaag

SEQ ID NO: 2875622 - RNA, 19 nt, Artificial Sequence
  Description of Artificial Sequence: Synthetic oligonucleotide
agggacuauaguuuuccac

SEQ ID NO: 2875623 - RNA, 19 nt, Artificial Sequence
  Description of Artificial Sequence: Synthetic oligonucleotide
auauguacuuucuguguuc

SEQ ID NO: 2875624 - RNA, 19 nt, Artificial Sequence
  Description of Artificial Sequence: Synthetic oligonucleotide
ucucacacccuccaguggc

SEQ ID NO: 2875625 - RNA, 19 nt, Artificial Sequence
  Description of Artificial Sequence: Synthetic oligonucleotide
ucgccuaaauucaucguag

SEQ ID NO: 2875626 - RNA, 19 nt, Artificial Sequence
  Description of Artificial Sequence: Synthetic oligonucleotide
ugugucaucaccagcuccu

SEQ ID NO: 2875627 - RNA, 19 nt, Artificial Sequence
  Description of Artificial Sequence: Synthetic oligonucleotide
uucgauuaacacuaagaaa

SEQ ID NO: 2875628 - RNA, 19 nt, Artificial Sequence
  Description of Artificial Sequence: Synthetic oligonucleotide
aacacuaagaaaauaugua

SEQ ID NO: 2875629 - RNA, 19 nt, Artificial Sequence
  Description of Artificial Sequence: Synthetic oligonucleotide
uuuccacaaauacaucaca

SEQ ID NO: 2875630 - RNA, 19 nt, Artificial Sequence
  Description of Artificial Sequence: Synthetic oligonucleotide
aucucagaaaguuuugcca

SEQ ID NO: 2875631 - RNA, 19 nt, Artificial Sequence
  Description of Artificial Sequence: Synthetic oligonucleotide
uuugaugauucucacccuc

SEQ ID NO: 2875632 - RNA, 19 nt, Artificial Sequence
  Description of Artificial Sequence: Synthetic oligonucleotide
uguucacaaaaggaggucc

SEQ ID NO: 2875633 - RNA, 19 nt, Artificial Sequence
  Description of Artificial Sequence: Synthetic oligonucleotide
ucgugugucaucaccagcu

SEQ ID NO: 2875634 - RNA, 19 nt, Artificial Sequence
  Description of Artificial Sequence: Synthetic oligonucleotide
agagccaacgcucuggcca

SEQ ID NO: 2875635 - RNA, 19 nt, Artificial Sequence
  Description of Artificial Sequence: Synthetic oligonucleotide
uguuagauccagaauucuc

SEQ ID NO: 2875636 - RNA, 19 nt, Artificial Sequence
  Description of Artificial Sequence: Synthetic oligonucleotide
ucuauaucuucauacccaa

SEQ ID NO: 2875637 - RNA, 19 nt, Artificial Sequence
  Description of Artificial Sequence: Synthetic oligonucleotide
cuuguuagauccagaauuc

SEQ ID NO: 2875638 - RNA, 19 nt, Artificial Sequence
  Description of Artificial Sequence: Synthetic oligonucleotide
aggucgccuaaauucaucg

SEQ ID NO: 2875639 - RNA, 19 nt, Artificial Sequence
  Description of Artificial Sequence: Synthetic oligonucleotide
ucuuuccaccuuaauaacu

SEQ ID NO: 2875640 - RNA, 19 nt, Artificial Sequence
  Description of Artificial Sequence: Synthetic oligonucleotide
uaggguuuggguuauuuuc

SEQ ID NO: 2875641 - RNA, 19 nt, Artificial Sequence
  Description of Artificial Sequence: Synthetic oligonucleotide
ucuccgaagagccaacgcu

SEQ ID NO: 2875642 - RNA, 19 nt, Artificial Sequence
  Description of Artificial Sequence: Synthetic oligonucleotide
uccaccuuaauaacuucug

SEQ ID NO: 2875643 - RNA, 19 nt, Artificial Sequence
  Description of Artificial Sequence: Synthetic oligonucleotide
uggauccuugauauuaaca

SEQ ID NO: 2875644 - RNA, 19 nt, Artificial Sequence
  Description of Artificial Sequence: Synthetic oligonucleotide
caucucagaaaguuuugcc

SEQ ID NO: 2875645 - RNA, 19 nt, Artificial Sequence
  Description of Artificial Sequence: Synthetic oligonucleotide
auauuaucaguaucugacu

SEQ ID NO: 2875646 - RNA, 19 nt, Artificial Sequence
  Description of Artificial Sequence: Synthetic oligonucleotide
ucagaaaguuuugccaggg

SEQ ID NO: 2875647 - RNA, 19 nt, Artificial Sequence
  Description of Artificial Sequence: Synthetic oligonucleotide
uguacuuucuguguucaca

SEQ ID NO: 2875648 - RNA, 19 nt, Artificial Sequence
  Description of Artificial Sequence: Synthetic oligonucleotide
auuucgauuaacacuaaga

SEQ ID NO: 2875649 - RNA, 19 nt, Artificial Sequence
  Description of Artificial Sequence: Synthetic oligonucleotide
uuccacaaauacaucacaa

SEQ ID NO: 2875650 - RNA, 19 nt, Artificial Sequence
  Description of Artificial Sequence: Synthetic oligonucleotide
uucauauuaucaguaucug

SEQ ID NO: 2875651 - RNA, 19 nt, Artificial Sequence
  Description of Artificial Sequence: Synthetic oligonucleotide
ucacaaauggcugcaagcu

SEQ ID NO: 2875652 - RNA, 19 nt, Artificial Sequence
  Description of Artificial Sequence: Synthetic oligonucleotide
auacccaaggcccaucuca

SEQ ID NO: 2875653 - RNA, 19 nt, Artificial Sequence
  Description of Artificial Sequence: Synthetic oligonucleotide
uuagauccagaauucucac

SEQ ID NO: 2875654 - RNA, 19 nt, Artificial Sequence
  Description of Artificial Sequence: Synthetic oligonucleotide
uggucuuuccaccuuaaua

SEQ ID NO: 2875655 - RNA, 19 nt, Artificial Sequence
  Description of Artificial Sequence: Synthetic oligonucleotide
cuaaauucaucguagcaaa

SEQ ID NO: 2875656 - RNA, 19 nt, Artificial Sequence
  Description of Artificial Sequence: Synthetic oligonucleotide
aaaaggagguccccaaguu

SEQ ID NO: 2875657 - RNA, 19 nt, Artificial Sequence
  Description of Artificial Sequence: Synthetic oligonucleotide
auaguuuuccacaaauaca

SEQ ID NO: 2875658 - RNA, 19 nt, Artificial Sequence
  Description of Artificial Sequence: Synthetic oligonucleotide
agcuccuggucuuuccacc

SEQ ID NO: 2875659 - RNA, 19 nt, Artificial Sequence
  Description of Artificial Sequence: Synthetic oligonucleotide
auucucacacccuccagug

SEQ ID NO: 2875660 - RNA, 19 nt, Artificial Sequence
  Description of Artificial Sequence: Synthetic oligonucleotide
cuucauauuaucaguaucu

SEQ ID NO: 2875661 - RNA, 19 nt, Artificial Sequence
  Description of Artificial Sequence: Synthetic oligonucleotide
uuccaccuuaauaacuucu

SEQ ID NO: 2875662 - RNA, 19 nt, Artificial Sequence
  Description of Artificial Sequence: Synthetic oligonucleotide
aagagccaacgcucuggcc

SEQ ID NO: 2875663 - RNA, 19 nt, Artificial Sequence
  Description of Artificial Sequence: Synthetic oligonucleotide
guuagauccagaauucuca

SEQ ID NO: 2875664 - RNA, 19 nt, Artificial Sequence
  Description of Artificial Sequence: Synthetic oligonucleotide
uucucacccucuuggaucc

SEQ ID NO: 2875665 - RNA, 19 nt, Artificial Sequence
  Description of Artificial Sequence: Synthetic oligonucleotide
aagcucuuugaugauucuc

SEQ ID NO: 2875666 - RNA, 19 nt, Artificial Sequence
  Description of Artificial Sequence: Synthetic oligonucleotide
auccuugauauuaacagcu

SEQ ID NO: 2875667 - RNA, 19 nt, Artificial Sequence
  Description of Artificial Sequence: Synthetic oligonucleotide
ggucuuuccaccuuaauaa

SEQ ID NO: 2875668 - RNA, 19 nt, Artificial Sequence
  Description of Artificial Sequence: Synthetic oligonucleotide
cucagaaaguuuugccagg

SEQ ID NO: 2875669 - RNA, 19 nt, Artificial Sequence
  Description of Artificial Sequence: Synthetic oligonucleotide
agaauucucacacccucca

SEQ ID NO: 2875670 - RNA, 19 nt, Artificial Sequence
  Description of Artificial Sequence: Synthetic oligonucleotide
acucuuguuagauccagaa

SEQ ID NO: 2875671 - RNA, 19 nt, Artificial Sequence
  Description of Artificial Sequence: Synthetic oligonucleotide
ucuucauacccaaggccca

SEQ ID NO: 2875672 - RNA, 19 nt, Artificial Sequence
  Description of Artificial Sequence: Synthetic oligonucleotide
gaugauucucacccucuug

SEQ ID NO: 2875673 - RNA, 19 nt, Artificial Sequence
  Description of Artificial Sequence: Synthetic oligonucleotide
cuuaauaacuucugcucca

SEQ ID NO: 2875674 - RNA, 19 nt, Artificial Sequence
  Description of Artificial Sequence: Synthetic oligonucleotide
uaauaacuucugcuccaag

SEQ ID NO: 2875675 - RNA, 19 nt, Artificial Sequence
  Description of Artificial Sequence: Synthetic oligonucleotide
aaaguuuugccagggacua

SEQ ID NO: 2875676 - RNA, 19 nt, Artificial Sequence
  Description of Artificial Sequence: Synthetic oligonucleotide
aacgcucuggccagcgucc

SEQ ID NO: 2875677 - RNA, 19 nt, Artificial Sequence
  Description of Artificial Sequence: Synthetic oligonucleotide
uugaugauucucacccucu

SEQ ID NO: 2875678 - RNA, 19 nt, Artificial Sequence
  Description of Artificial Sequence: Synthetic oligonucleotide
ucaguaucugacugcgggc

SEQ ID NO: 2875679 - RNA, 19 nt, Artificial Sequence
  Description of Artificial Sequence: Synthetic oligonucleotide
gcugcaagcucuuugauga

SEQ ID NO: 2875680 - RNA, 19 nt, Artificial Sequence
  Description of Artificial Sequence: Synthetic oligonucleotide
uuucaaucuugucuauauc

SEQ ID NO: 2875681 - RNA, 19 nt, Artificial Sequence
  Description of Artificial Sequence: Synthetic oligonucleotide
uauguacuuucuguguuca

SEQ ID NO: 2875682 - RNA, 19 nt, Artificial Sequence
  Description of Artificial Sequence: Synthetic oligonucleotide
caaggcccaucucagaaag

SEQ ID NO: 2875683 - RNA, 19 nt, Artificial Sequence
  Description of Artificial Sequence: Synthetic oligonucleotide
cugccaguacucuuguuag

SEQ ID NO: 2875684 - RNA, 19 nt, Artificial Sequence
  Description of Artificial Sequence: Synthetic oligonucleotide
ugucaucaccagcuccugg

SEQ ID NO: 2875685 - RNA, 19 nt, Artificial Sequence
  Description of Artificial Sequence: Synthetic oligonucleotide
acaaauggcugcaagcucu

SEQ ID NO: 2875686 - RNA, 19 nt, Artificial Sequence
  Description of Artificial Sequence: Synthetic oligonucleotide
uaucaguaucugacugcgg

SEQ ID NO: 2875687 - RNA, 19 nt, Artificial Sequence
  Description of Artificial Sequence: Synthetic oligonucleotide
cucuuugaugauucucacc

SEQ ID NO: 2875688 - RNA, 19 nt, Artificial Sequence
  Description of Artificial Sequence: Synthetic oligonucleotide
uucucacacccuccagugg

SEQ ID NO: 2875689 - RNA, 19 nt, Artificial Sequence
  Description of Artificial Sequence: Synthetic oligonucleotide
gggacuauaguuuuccaca

SEQ ID NO: 2875690 - RNA, 19 nt, Artificial Sequence
  Description of Artificial Sequence: Synthetic oligonucleotide
ccuuaauaacuucugcucc

SEQ ID NO: 2875691 - RNA, 19 nt, Artificial Sequence
  Description of Artificial Sequence: Synthetic oligonucleotide
gauccagaauucucacacc

SEQ ID NO: 2875692 - RNA, 19 nt, Artificial Sequence
  Description of Artificial Sequence: Synthetic oligonucleotide
aaagguccugccaguacuc

SEQ ID NO: 2875693 - RNA, 19 nt, Artificial Sequence
  Description of Artificial Sequence: Synthetic oligonucleotide
uaacuucugcuccaagguc

SEQ ID NO: 2875694 - RNA, 19 nt, Artificial Sequence
  Description of Artificial Sequence: Synthetic oligonucleotide
aguaucugacugcgggcgg

SEQ ID NO: 2875695 - RNA, 19 nt, Artificial Sequence
  Description of Artificial Sequence: Synthetic oligonucleotide
cagaauucucacacccucc

SEQ ID NO: 2875696 - RNA, 19 nt, Artificial Sequence
  Description of Artificial Sequence: Synthetic oligonucleotide
uauuaacagcuuauacuuu

SEQ ID NO: 2875697 - RNA, 19 nt, Artificial Sequence
  Description of Artificial Sequence: Synthetic oligonucleotide
uucgugugucaucaccagc

SEQ ID NO: 2875698 - RNA, 19 nt, Artificial Sequence
  Description of Artificial Sequence: Synthetic oligonucleotide
uacaucacaaauggcugca

SEQ ID NO: 2875699 - RNA, 19 nt, Artificial Sequence
  Description of Artificial Sequence: Synthetic oligonucleotide
ucauacccaaggcccaucu

SEQ ID NO: 2875700 - RNA, 19 nt, Artificial Sequence
  Description of Artificial Sequence: Synthetic oligonucleotide
auucaucguagcaaaaggu

SEQ ID NO: 2875701 - RNA, 19 nt, Artificial Sequence
  Description of Artificial Sequence: Synthetic oligonucleotide
caucacaaauggcugcaag

SEQ ID NO: 2875702 - RNA, 19 nt, Artificial Sequence
  Description of Artificial Sequence: Synthetic oligonucleotide
gaauucucacacccuccag

SEQ ID NO: 2875703 - RNA, 19 nt, Artificial Sequence
  Description of Artificial Sequence: Synthetic oligonucleotide
caguaucugacugcgggcg

SEQ ID NO: 2875704 - RNA, 19 nt, Artificial Sequence
  Description of Artificial Sequence: Synthetic oligonucleotide
uccagaauucucacacccu

SEQ ID NO: 2875705 - RNA, 19 nt, Artificial Sequence
  Description of Artificial Sequence: Synthetic oligonucleotide
uugauauuaacagcuuaua

SEQ ID NO: 2875706 - RNA, 19 nt, Artificial Sequence
  Description of Artificial Sequence: Synthetic oligonucleotide
uggcuucauauuaucagua

SEQ ID NO: 2875707 - RNA, 19 nt, Artificial Sequence
  Description of Artificial Sequence: Synthetic oligonucleotide
uagauccagaauucucaca

SEQ ID NO: 2875708 - RNA, 19 nt, Artificial Sequence
  Description of Artificial Sequence: Synthetic oligonucleotide
uugccagggacuauaguuu

SEQ ID NO: 2875709 - RNA, 19 nt, Artificial Sequence
  Description of Artificial Sequence: Synthetic oligonucleotide
gucuauaucuucauaccca

SEQ ID NO: 2875710 - RNA, 19 nt, Artificial Sequence
  Description of Artificial Sequence: Synthetic oligonucleotide
guagcaaaagguccugcca

SEQ ID NO: 2875711 - RNA, 19 nt, Artificial Sequence
  Description of Artificial Sequence: Synthetic oligonucleotide
cacuaagaaaauauguacu

SEQ ID NO: 2875712 - RNA, 19 nt, Artificial Sequence
  Description of Artificial Sequence: Synthetic oligonucleotide
accagcuccuggucuuucc

SEQ ID NO: 2875713 - RNA, 19 nt, Artificial Sequence
  Description of Artificial Sequence: Synthetic oligonucleotide
uucacaaaaggaggucccc

SEQ ID NO: 2875714 - RNA, 19 nt, Artificial Sequence
  Description of Artificial Sequence: Synthetic oligonucleotide
ucugacugcgggcggccgg

SEQ ID NO: 2875715 - RNA, 19 nt, Artificial Sequence
  Description of Artificial Sequence: Synthetic oligonucleotide
ucuugucuauaucuucaua

SEQ ID NO: 2875716 - RNA, 19 nt, Artificial Sequence
  Description of Artificial Sequence: Synthetic oligonucleotide
ugauucucacccucuugga

SEQ ID NO: 2875717 - RNA, 19 nt, Artificial Sequence
  Description of Artificial Sequence: Synthetic oligonucleotide
aaggucgccuaaauucauc

SEQ ID NO: 2875718 - RNA, 19 nt, Artificial Sequence
  Description of Artificial Sequence: Synthetic oligonucleotide
uuaauaacuucugcuccaa

SEQ ID NO: 2875719 - RNA, 19 nt, Artificial Sequence
  Description of Artificial Sequence: Synthetic oligonucleotide
uccgaagagccaacgcucu

SEQ ID NO: 2875720 - RNA, 19 nt, Artificial Sequence
  Description of Artificial Sequence: Synthetic oligonucleotide
uccaguggcuucauauuau

SEQ ID NO: 2875721 - RNA, 19 nt, Artificial Sequence
  Description of Artificial Sequence: Synthetic oligonucleotide
uuggguuauuuucaaucuu

SEQ ID NO: 2875722 - RNA, 19 nt, Artificial Sequence
  Description of Artificial Sequence: Synthetic oligonucleotide
uacucuuguuagauccaga

SEQ ID NO: 2875723 - RNA, 19 nt, Artificial Sequence
  Description of Artificial Sequence: Synthetic oligonucleotide
uuaggguuuggguuauuuu

SEQ ID NO: 2875724 - RNA, 19 nt, Artificial Sequence
  Description of Artificial Sequence: Synthetic oligonucleotide
guacuuucuguguucacaa

SEQ ID NO: 2875725 - RNA, 19 nt, Artificial Sequence
  Description of Artificial Sequence: Synthetic oligonucleotide
cuugauauuaacagcuuau

SEQ ID NO: 2875726 - RNA, 19 nt, Artificial Sequence
  Description of Artificial Sequence: Synthetic oligonucleotide
uuuugccagggacuauagu

SEQ ID NO: 2875727 - RNA, 19 nt, Artificial Sequence
  Description of Artificial Sequence: Synthetic oligonucleotide
guucacaaaaggagguccc

SEQ ID NO: 2875728 - RNA, 19 nt, Artificial Sequence
  Description of Artificial Sequence: Synthetic oligonucleotide
ucacaaaaggaggucccca

SEQ ID NO: 2875729 - RNA, 19 nt, Artificial Sequence
  Description of Artificial Sequence: Synthetic oligonucleotide
guucgugugucaucaccag

SEQ ID NO: 2875730 - RNA, 19 nt, Artificial Sequence
  Description of Artificial Sequence: Synthetic oligonucleotide
gaaaguuuugccagggacu

SEQ ID NO: 2875731 - RNA, 19 nt, Artificial Sequence
  Description of Artificial Sequence: Synthetic oligonucleotide
uuggauccuugauauuaac

SEQ ID NO: 2875732 - RNA, 19 nt, Artificial Sequence
  Description of Artificial Sequence: Synthetic oligonucleotide
cuccgaagagccaacgcuc

SEQ ID NO: 2875733 - RNA, 19 nt, Artificial Sequence
  Description of Artificial Sequence: Synthetic oligonucleotide
acuucugcuccaaggucgc

SEQ ID NO: 2875734 - RNA, 19 nt, Artificial Sequence
  Description of Artificial Sequence: Synthetic oligonucleotide
aguucgugugucaucacca

SEQ ID NO: 2875735 - RNA, 19 nt, Artificial Sequence
  Description of Artificial Sequence: Synthetic oligonucleotide
uuuccaccuuaauaacuuc

SEQ ID NO: 2875736 - RNA, 19 nt, Artificial Sequence
  Description of Artificial Sequence: Synthetic oligonucleotide
uuguuagauccagaauucu

SEQ ID NO: 2875737 - RNA, 19 nt, Artificial Sequence
  Description of Artificial Sequence: Synthetic oligonucleotide
gauuaacacuaagaaaaua

SEQ ID NO: 2875738 - RNA, 19 nt, Artificial Sequence
  Description of Artificial Sequence: Synthetic oligonucleotide
uuauuucgauuaacacuaa

SEQ ID NO: 2875739 - RNA, 19 nt, Artificial Sequence
  Description of Artificial Sequence: Synthetic oligonucleotide
gucuuuccaccuuaauaac

SEQ ID NO: 2875740 - RNA, 19 nt, Artificial Sequence
  Description of Artificial Sequence: Synthetic oligonucleotide
agcaaaagguccugccagu

SEQ ID NO: 2875741 - RNA, 19 nt, Artificial Sequence
  Description of Artificial Sequence: Synthetic oligonucleotide
agcguccacagcaucgccc

SEQ ID NO: 2875742 - RNA, 19 nt, Artificial Sequence
  Description of Artificial Sequence: Synthetic oligonucleotide
aguuuuccacaaauacauc

SEQ ID NO: 2875743 - RNA, 19 nt, Artificial Sequence
  Description of Artificial Sequence: Synthetic oligonucleotide
caaaagguccugccaguac

SEQ ID NO: 2875744 - RNA, 19 nt, Artificial Sequence
  Description of Artificial Sequence: Synthetic oligonucleotide
guacucuuguuagauccag

SEQ ID NO: 2875745 - RNA, 19 nt, Artificial Sequence
  Description of Artificial Sequence: Synthetic oligonucleotide
uuuaggguuuggguuauuu

SEQ ID NO: 2875746 - RNA, 19 nt, Artificial Sequence
  Description of Artificial Sequence: Synthetic oligonucleotide
gagccaacgcucuggccag

SEQ ID NO: 2875747 - RNA, 19 nt, Artificial Sequence
  Description of Artificial Sequence: Synthetic oligonucleotide
cuggccagcguccacagca

SEQ ID NO: 2875748 - RNA, 19 nt, Artificial Sequence
  Description of Artificial Sequence: Synthetic oligonucleotide
gugugucaucaccagcucc

SEQ ID NO: 2875749 - RNA, 19 nt, Artificial Sequence
  Description of Artificial Sequence: Synthetic oligonucleotide
cuauaguuuuccacaaaua

SEQ ID NO: 2875750 - RNA, 19 nt, Artificial Sequence
  Description of Artificial Sequence: Synthetic oligonucleotide
ugaugauucucacccucuu

SEQ ID NO: 2875751 - RNA, 19 nt, Artificial Sequence
  Description of Artificial Sequence: Synthetic oligonucleotide
uccuugauauuaacagcuu

SEQ ID NO: 2875752 - RNA, 19 nt, Artificial Sequence
  Description of Artificial Sequence: Synthetic oligonucleotide
gcuucauauuaucaguauc

SEQ ID NO: 2875753 - RNA, 19 nt, Artificial Sequence
  Description of Artificial Sequence: Synthetic oligonucleotide
aucuugucuauaucuucau

SEQ ID NO: 2875754 - RNA, 19 nt, Artificial Sequence
  Description of Artificial Sequence: Synthetic oligonucleotide
aggguuuggguuauuuuca

SEQ ID NO: 2875755 - RNA, 19 nt, Artificial Sequence
  Description of Artificial Sequence: Synthetic oligonucleotide
cacaaauggcugcaagcuc

SEQ ID NO: 2875756 - RNA, 19 nt, Artificial Sequence
  Description of Artificial Sequence: Synthetic oligonucleotide
ucaucaccagcuccugguc

SEQ ID NO: 2875757 - RNA, 19 nt, Artificial Sequence
  Description of Artificial Sequence: Synthetic oligonucleotide
gucgccuaaauucaucgua

SEQ ID NO: 2875758 - RNA, 19 nt, Artificial Sequence
  Description of Artificial Sequence: Synthetic oligonucleotide
ucacccucuuggauccuug

SEQ ID NO: 2875759 - RNA, 19 nt, Artificial Sequence
  Description of Artificial Sequence: Synthetic oligonucleotide
ucggccgggucuccgaaga

SEQ ID NO: 2875760 - RNA, 19 nt, Artificial Sequence
  Description of Artificial Sequence: Synthetic oligonucleotide
gguuauuuucaaucuuguc

SEQ ID NO: 2875761 - RNA, 19 nt, Artificial Sequence
  Description of Artificial Sequence: Synthetic oligonucleotide
caccuuaauaacuucugcu

SEQ ID NO: 2875762 - RNA, 19 nt, Artificial Sequence
  Description of Artificial Sequence: Synthetic oligonucleotide
aguuuugccagggacuaua

SEQ ID NO: 2875763 - RNA, 19 nt, Artificial Sequence
  Description of Artificial Sequence: Synthetic oligonucleotide
agguccccaaguucgugug

SEQ ID NO: 2875764 - RNA, 19 nt, Artificial Sequence
  Description of Artificial Sequence: Synthetic oligonucleotide
guuuugccagggacuauag

SEQ ID NO: 2875765 - RNA, 19 nt, Artificial Sequence
  Description of Artificial Sequence: Synthetic oligonucleotide
gacuauaguuuuccacaaa

SEQ ID NO: 2875766 - RNA, 19 nt, Artificial Sequence
  Description of Artificial Sequence: Synthetic oligonucleotide
gucuccgaagagccaacgc

SEQ ID NO: 2875767 - RNA, 19 nt, Artificial Sequence
  Description of Artificial Sequence: Synthetic oligonucleotide
uacuuucuguguucacaaa

SEQ ID NO: 2875768 - RNA, 19 nt, Artificial Sequence
  Description of Artificial Sequence: Synthetic oligonucleotide
guggcuucauauuaucagu

SEQ ID NO: 2875769 - RNA, 19 nt, Artificial Sequence
  Description of Artificial Sequence: Synthetic oligonucleotide
cuuuccaccuuaauaacuu

SEQ ID NO: 2875770 - RNA, 19 nt, Artificial Sequence
  Description of Artificial Sequence: Synthetic oligonucleotide
ucugcuccaaggucgccua

SEQ ID NO: 2875771 - RNA, 19 nt, Artificial Sequence
  Description of Artificial Sequence: Synthetic oligonucleotide
uccuggucuuuccaccuua

SEQ ID NO: 2875772 - RNA, 19 nt, Artificial Sequence
  Description of Artificial Sequence: Synthetic oligonucleotide
auuuucaaucuugucuaua

SEQ ID NO: 2875773 - RNA, 19 nt, Artificial Sequence
  Description of Artificial Sequence: Synthetic oligonucleotide
ucguagcaaaagguccugc

SEQ ID NO: 2875774 - RNA, 19 nt, Artificial Sequence
  Description of Artificial Sequence: Synthetic oligonucleotide
ugccaguacucuuguuaga

SEQ ID NO: 2875775 - RNA, 19 nt, Artificial Sequence
  Description of Artificial Sequence: Synthetic oligonucleotide
ggcugcaagcucuuugaug

SEQ ID NO: 2875776 - RNA, 19 nt, Artificial Sequence
  Description of Artificial Sequence: Synthetic oligonucleotide
caacgcucuggccagcguc

SEQ ID NO: 2875777 - RNA, 19 nt, Artificial Sequence
  Description of Artificial Sequence: Synthetic oligonucleotide
ugccagggacuauaguuuu

SEQ ID NO: 2875778 - RNA, 19 nt, Artificial Sequence
  Description of Artificial Sequence: Synthetic oligonucleotide
aguacucuuguuagaucca

SEQ ID NO: 2875779 - RNA, 19 nt, Artificial Sequence
  Description of Artificial Sequence: Synthetic oligonucleotide
ccaccuuaauaacuucugc

SEQ ID NO: 2875780 - RNA, 19 nt, Artificial Sequence
  Description of Artificial Sequence: Synthetic oligonucleotide
ccagaauucucacacccuc

SEQ ID NO: 2875781 - RNA, 19 nt, Artificial Sequence
  Description of Artificial Sequence: Synthetic oligonucleotide
aagguccugccaguacucu

SEQ ID NO: 2875782 - RNA, 19 nt, Artificial Sequence
  Description of Artificial Sequence: Synthetic oligonucleotide
gucaucaccagcuccuggu

SEQ ID NO: 2875783 - RNA, 19 nt, Artificial Sequence
  Description of Artificial Sequence: Synthetic oligonucleotide
aucguagcaaaagguccug

SEQ ID NO: 2875784 - RNA, 19 nt, Artificial Sequence
  Description of Artificial Sequence: Synthetic oligonucleotide
ccuaaauucaucguagcaa

SEQ ID NO: 2875785 - RNA, 19 nt, Artificial Sequence
  Description of Artificial Sequence: Synthetic oligonucleotide
caucguagcaaaagguccu

SEQ ID NO: 2875786 - RNA, 19 nt, Artificial Sequence
  Description of Artificial Sequence: Synthetic oligonucleotide
gauucucacccucuuggau

SEQ ID NO: 2875787 - RNA, 19 nt, Artificial Sequence
  Description of Artificial Sequence: Synthetic oligonucleotide
gccuaaauucaucguagca

SEQ ID NO: 2875788 - RNA, 19 nt, Artificial Sequence
  Description of Artificial Sequence: Synthetic oligonucleotide
aggcccaucucagaaaguu

SEQ ID NO: 2875789 - RNA, 19 nt, Artificial Sequence
  Description of Artificial Sequence: Synthetic oligonucleotide
uaucugacugcgggcggcc

SEQ ID NO: 2875790 - RNA, 19 nt, Artificial Sequence
  Description of Artificial Sequence: Synthetic oligonucleotide
guaucugacugcgggcggc

SEQ ID NO: 2875791 - RNA, 19 nt, Artificial Sequence
  Description of Artificial Sequence: Synthetic oligonucleotide
ccagggacuauaguuuucc

SEQ ID NO: 2875792 - RNA, 19 nt, Artificial Sequence
  Description of Artificial Sequence: Synthetic oligonucleotide
caaaaggagguccccaagu

SEQ ID NO: 2875793 - RNA, 19 nt, Artificial Sequence
  Description of Artificial Sequence: Synthetic oligonucleotide
uccccaaguucguguguca

SEQ ID NO: 2875794 - RNA, 19 nt, Artificial Sequence
  Description of Artificial Sequence: Synthetic oligonucleotide
cguagcaaaagguccugcc

SEQ ID NO: 2875795 - RNA, 19 nt, Artificial Sequence
  Description of Artificial Sequence: Synthetic oligonucleotide
ggacuauaguuuuccacaa

SEQ ID NO: 2875796 - RNA, 19 nt, Artificial Sequence
  Description of Artificial Sequence: Synthetic oligonucleotide
guguucacaaaaggagguc

SEQ ID NO: 2875797 - RNA, 19 nt, Artificial Sequence
  Description of Artificial Sequence: Synthetic oligonucleotide
ccaucucagaaaguuuugc

SEQ ID NO: 2875798 - RNA, 19 nt, Artificial Sequence
  Description of Artificial Sequence: Synthetic oligonucleotide
gcucuuugaugauucucac

SEQ ID NO: 2875799 - RNA, 19 nt, Artificial Sequence
  Description of Artificial Sequence: Synthetic oligonucleotide
cucuggccagcguccacag

SEQ ID NO: 2875800 - RNA, 19 nt, Artificial Sequence
  Description of Artificial Sequence: Synthetic oligonucleotide
gguccugccaguacucuug

SEQ ID NO: 2875801 - RNA, 19 nt, Artificial Sequence
  Description of Artificial Sequence: Synthetic oligonucleotide
cuccaguggcuucauauua

SEQ ID NO: 2875802 - RNA, 19 nt, Artificial Sequence
  Description of Artificial Sequence: Synthetic oligonucleotide
cagcuccuggucuuuccac

SEQ ID NO: 2875803 - RNA, 19 nt, Artificial Sequence
  Description of Artificial Sequence: Synthetic oligonucleotide
ucuggccagcguccacagc

SEQ ID NO: 2875804 - RNA, 19 nt, Artificial Sequence
  Description of Artificial Sequence: Synthetic oligonucleotide
caaguucgugugucaucac

SEQ ID NO: 2875805 - RNA, 19 nt, Artificial Sequence
  Description of Artificial Sequence: Synthetic oligonucleotide
ccaaggucgccuaaauuca

SEQ ID NO: 2875806 - RNA, 19 nt, Artificial Sequence
  Description of Artificial Sequence: Synthetic oligonucleotide
gccagcguccacagcaucg

SEQ ID NO: 2875807 - RNA, 19 nt, Artificial Sequence
  Description of Artificial Sequence: Synthetic oligonucleotide
acccucuuggauccuugau

SEQ ID NO: 2875808 - RNA, 19 nt, Artificial Sequence
  Description of Artificial Sequence: Synthetic oligonucleotide
gagguccccaaguucgugu

SEQ ID NO: 2875809 - RNA, 19 nt, Artificial Sequence
  Description of Artificial Sequence: Synthetic oligonucleotide
cuaagaaaauauguacuuu

SEQ ID NO: 2875810 - RNA, 19 nt, Artificial Sequence
  Description of Artificial Sequence: Synthetic oligonucleotide
cauacccaaggcccaucuc

SEQ ID NO: 2875811 - RNA, 19 nt, Artificial Sequence
  Description of Artificial Sequence: Synthetic oligonucleotide
acugcgggcggccggucca

SEQ ID NO: 2875812 - RNA, 19 nt, Artificial Sequence
  Description of Artificial Sequence: Synthetic oligonucleotide
ccaaguucgugugucauca

SEQ ID NO: 2875813 - RNA, 19 nt, Artificial Sequence
  Description of Artificial Sequence: Synthetic oligonucleotide
ugcuccaaggucgccuaaa

SEQ ID NO: 2875814 - RNA, 19 nt, Artificial Sequence
  Description of Artificial Sequence: Synthetic oligonucleotide
cagaaaguuuugccaggga

SEQ ID NO: 2875815 - RNA, 19 nt, Artificial Sequence
  Description of Artificial Sequence: Synthetic oligonucleotide
uucauacccaaggcccauc

SEQ ID NO: 2875816 - RNA, 19 nt, Artificial Sequence
  Description of Artificial Sequence: Synthetic oligonucleotide
aaguuuugccagggacuau

SEQ ID NO: 2875817 - RNA, 19 nt, Artificial Sequence
  Description of Artificial Sequence: Synthetic oligonucleotide
acacccuccaguggcuuca

SEQ ID NO: 2875818 - RNA, 19 nt, Artificial Sequence
  Description of Artificial Sequence: Synthetic oligonucleotide
gacugcgggcggccggucc

SEQ ID NO: 2875819 - RNA, 19 nt, Artificial Sequence
  Description of Artificial Sequence: Synthetic oligonucleotide
cuuugaugauucucacccu

SEQ ID NO: 2875820 - RNA, 19 nt, Artificial Sequence
  Description of Artificial Sequence: Synthetic oligonucleotide
ggucuccgaagagccaacg

SEQ ID NO: 2875821 - RNA, 19 nt, Artificial Sequence
  Description of Artificial Sequence: Synthetic oligonucleotide
guccccaaguucguguguc

SEQ ID NO: 2875822 - RNA, 19 nt, Artificial Sequence
  Description of Artificial Sequence: Synthetic oligonucleotide
aaggcccaucucagaaagu

SEQ ID NO: 2875823 - RNA, 19 nt, Artificial Sequence
  Description of Artificial Sequence: Synthetic oligonucleotide
ccaguggcuucauauuauc

SEQ ID NO: 2875824 - RNA, 19 nt, Artificial Sequence
  Description of Artificial Sequence: Synthetic oligonucleotide
uggccagcguccacagcau

SEQ ID NO: 2875825 - RNA, 19 nt, Artificial Sequence
  Description of Artificial Sequence: Synthetic oligonucleotide
agguccugccaguacucuu

SEQ ID NO: 2875826 - RNA, 19 nt, Artificial Sequence
  Description of Artificial Sequence: Synthetic oligonucleotide
acccaaggcccaucucaga

SEQ ID NO: 2875827 - RNA, 19 nt, Artificial Sequence
  Description of Artificial Sequence: Synthetic oligonucleotide
cccaucucagaaaguuuug

SEQ ID NO: 2875828 - RNA, 19 nt, Artificial Sequence
  Description of Artificial Sequence: Synthetic oligonucleotide
aucugacugcgggcggccg

SEQ ID NO: 2875829 - RNA, 19 nt, Artificial Sequence
  Description of Artificial Sequence: Synthetic oligonucleotide
cagggacuauaguuuucca

SEQ ID NO: 2875830 - RNA, 19 nt, Artificial Sequence
  Description of Artificial Sequence: Synthetic oligonucleotide
cacacccuccaguggcuuc

SEQ ID NO: 2875831 - RNA, 19 nt, Artificial Sequence
  Description of Artificial Sequence: Synthetic oligonucleotide
cgaagagccaacgcucugg

SEQ ID NO: 2875832 - RNA, 19 nt, Artificial Sequence
  Description of Artificial Sequence: Synthetic oligonucleotide
aaauggcugcaagcucuuu

SEQ ID NO: 2875833 - RNA, 19 nt, Artificial Sequence
  Description of Artificial Sequence: Synthetic oligonucleotide
gccgggucuccgaagagcc

SEQ ID NO: 2875834 - RNA, 19 nt, Artificial Sequence
  Description of Artificial Sequence: Synthetic oligonucleotide
cagcguccacagcaucgcc

SEQ ID NO: 2875835 - RNA, 19 nt, Artificial Sequence
  Description of Artificial Sequence: Synthetic oligonucleotide
acaucacaaauggcugcaa

SEQ ID NO: 2875836 - RNA, 19 nt, Artificial Sequence
  Description of Artificial Sequence: Synthetic oligonucleotide
ccuugauauuaacagcuua

SEQ ID NO: 2875837 - RNA, 19 nt, Artificial Sequence
  Description of Artificial Sequence: Synthetic oligonucleotide
cucggccgggucuccgaag

SEQ ID NO: 2875838 - RNA, 19 nt, Artificial Sequence
  Description of Artificial Sequence: Synthetic oligonucleotide
cucuuguuagauccagaau

SEQ ID NO: 2875839 - RNA, 19 nt, Artificial Sequence
  Description of Artificial Sequence: Synthetic oligonucleotide
cuccagccggcccugccuc

SEQ ID NO: 2875840 - RNA, 19 nt, Artificial Sequence
  Description of Artificial Sequence: Synthetic oligonucleotide
ggguuuggguuauuuucaa

SEQ ID NO: 2875841 - RNA, 19 nt, Artificial Sequence
  Description of Artificial Sequence: Synthetic oligonucleotide
cgccuaaauucaucguagc

SEQ ID NO: 2875842 - RNA, 19 nt, Artificial Sequence
  Description of Artificial Sequence: Synthetic oligonucleotide
ggcuucauauuaucaguau

SEQ ID NO: 2875843 - RNA, 19 nt, Artificial Sequence
  Description of Artificial Sequence: Synthetic oligonucleotide
gggcggccgguccacagcc

SEQ ID NO: 2875844 - RNA, 19 nt, Artificial Sequence
  Description of Artificial Sequence: Synthetic oligonucleotide
ugccucggccgggucuccg

SEQ ID NO: 2875845 - RNA, 19 nt, Artificial Sequence
  Description of Artificial Sequence: Synthetic oligonucleotide
cccaaguucgugugucauc

SEQ ID NO: 2875846 - RNA, 19 nt, Artificial Sequence
  Description of Artificial Sequence: Synthetic oligonucleotide
ggguuauuuucaaucuugu

SEQ ID NO: 2875847 - RNA, 19 nt, Artificial Sequence
  Description of Artificial Sequence: Synthetic oligonucleotide
ccagcguccacagcaucgc

SEQ ID NO: 2875848 - RNA, 19 nt, Artificial Sequence
  Description of Artificial Sequence: Synthetic oligonucleotide
cacccucuuggauccuuga

SEQ ID NO: 2875849 - RNA, 19 nt, Artificial Sequence
  Description of Artificial Sequence: Synthetic oligonucleotide
caagcucuuugaugauucu

SEQ ID NO: 2875850 - RNA, 19 nt, Artificial Sequence
  Description of Artificial Sequence: Synthetic oligonucleotide
ucacacccuccaguggcuu

SEQ ID NO: 2875851 - RNA, 19 nt, Artificial Sequence
  Description of Artificial Sequence: Synthetic oligonucleotide
aggagguccccaaguucgu

SEQ ID NO: 2875852 - RNA, 19 nt, Artificial Sequence
  Description of Artificial Sequence: Synthetic oligonucleotide
ggccgggucuccgaagagc

SEQ ID NO: 2875853 - RNA, 19 nt, Artificial Sequence
  Description of Artificial Sequence: Synthetic oligonucleotide
gccaacgcucuggccagcg

SEQ ID NO: 2875854 - RNA, 19 nt, Artificial Sequence
  Description of Artificial Sequence: Synthetic oligonucleotide
uuuuaggguuuggguuauu

SEQ ID NO: 2875855 - RNA, 19 nt, Artificial Sequence
  Description of Artificial Sequence: Synthetic oligonucleotide
cccaaggcccaucucagaa

SEQ ID NO: 2875856 - RNA, 19 nt, Artificial Sequence
  Description of Artificial Sequence: Synthetic oligonucleotide
cccucuuggauccuugaua

SEQ ID NO: 2875857 - RNA, 19 nt, Artificial Sequence
  Description of Artificial Sequence: Synthetic oligonucleotide
ggagguccccaaguucgug

SEQ ID NO: 2875858 - RNA, 19 nt, Artificial Sequence
  Description of Artificial Sequence: Synthetic oligonucleotide
caaggucgccuaaauucau

SEQ ID NO: 2875859 - RNA, 19 nt, Artificial Sequence
  Description of Artificial Sequence: Synthetic oligonucleotide
uccugccaguacucuuguu

SEQ ID NO: 2875860 - RNA, 19 nt, Artificial Sequence
  Description of Artificial Sequence: Synthetic oligonucleotide
gcggccgguccacagcccc

SEQ ID NO: 2875861 - RNA, 19 nt, Artificial Sequence
  Description of Artificial Sequence: Synthetic oligonucleotide
gguuuggguuauuuucaau

SEQ ID NO: 2875862 - RNA, 19 nt, Artificial Sequence
  Description of Artificial Sequence: Synthetic oligonucleotide
gccggcccugccucggccg

SEQ ID NO: 2875863 - RNA, 19 nt, Artificial Sequence
  Description of Artificial Sequence: Synthetic oligonucleotide
ggucgccuaaauucaucgu

SEQ ID NO: 2875864 - RNA, 19 nt, Artificial Sequence
  Description of Artificial Sequence: Synthetic oligonucleotide
cucacacccuccaguggcu

SEQ ID NO: 2875865 - RNA, 19 nt, Artificial Sequence
  Description of Artificial Sequence: Synthetic oligonucleotide
ucucacccucuuggauccu

SEQ ID NO: 2875866 - RNA, 19 nt, Artificial Sequence
  Description of Artificial Sequence: Synthetic oligonucleotide
caaauggcugcaagcucuu

SEQ ID NO: 2875867 - RNA, 19 nt, Artificial Sequence
  Description of Artificial Sequence: Synthetic oligonucleotide
gcaaaagguccugccagua

SEQ ID NO: 2875868 - RNA, 19 nt, Artificial Sequence
  Description of Artificial Sequence: Synthetic oligonucleotide
guccugccaguacucuugu

SEQ ID NO: 2875869 - RNA, 19 nt, Artificial Sequence
  Description of Artificial Sequence: Synthetic oligonucleotide
ccaaggcccaucucagaaa

SEQ ID NO: 2875870 - RNA, 19 nt, Artificial Sequence
  Description of Artificial Sequence: Synthetic oligonucleotide
ccgaagagccaacgcucug

SEQ ID NO: 2875871 - RNA, 19 nt, Artificial Sequence
  Description of Artificial Sequence: Synthetic oligonucleotide
gcccaucucagaaaguuuu

SEQ ID NO: 2875872 - RNA, 19 nt, Artificial Sequence
  Description of Artificial Sequence: Synthetic oligonucleotide
caccagcuccuggucuuuc

SEQ ID NO: 2875873 - RNA, 19 nt, Artificial Sequence
  Description of Artificial Sequence: Synthetic oligonucleotide
cgugugucaucaccagcuc

SEQ ID NO: 2875874 - RNA, 19 nt, Artificial Sequence
  Description of Artificial Sequence: Synthetic oligonucleotide
ccagcuccuggucuuucca

SEQ ID NO: 2875875 - RNA, 19 nt, Artificial Sequence
  Description of Artificial Sequence: Synthetic oligonucleotide
acgcucuggccagcgucca

SEQ ID NO: 2875876 - RNA, 19 nt, Artificial Sequence
  Description of Artificial Sequence: Synthetic oligonucleotide
cagccggcccugccucggc

SEQ ID NO: 2875877 - RNA, 19 nt, Artificial Sequence
  Description of Artificial Sequence: Synthetic oligonucleotide
cgauuaacacuaagaaaau

SEQ ID NO: 2875878 - RNA, 19 nt, Artificial Sequence
  Description of Artificial Sequence: Synthetic oligonucleotide
cuucauacccaaggcccau

SEQ ID NO: 2875879 - RNA, 19 nt, Artificial Sequence
  Description of Artificial Sequence: Synthetic oligonucleotide
gccagggacuauaguuuuc

SEQ ID NO: 2875880 - RNA, 19 nt, Artificial Sequence
  Description of Artificial Sequence: Synthetic oligonucleotide
gcuccaaggucgccuaaau

SEQ ID NO: 2875881 - RNA, 19 nt, Artificial Sequence
  Description of Artificial Sequence: Synthetic oligonucleotide
gcgggcggccgguccacag

SEQ ID NO: 2875882 - RNA, 19 nt, Artificial Sequence
  Description of Artificial Sequence: Synthetic oligonucleotide
gggucuccgaagagccaac

SEQ ID NO: 2875883 - RNA, 19 nt, Artificial Sequence
  Description of Artificial Sequence: Synthetic oligonucleotide
ggccagcguccacagcauc

SEQ ID NO: 2875884 - RNA, 19 nt, Artificial Sequence
  Description of Artificial Sequence: Synthetic oligonucleotide
acccuccaguggcuucaua

SEQ ID NO: 2875885 - RNA, 19 nt, Artificial Sequence
  Description of Artificial Sequence: Synthetic oligonucleotide
ccugccucggccgggucuc

SEQ ID NO: 2875886 - RNA, 19 nt, Artificial Sequence
  Description of Artificial Sequence: Synthetic oligonucleotide
ugcgggcggccgguccaca

SEQ ID NO: 2875887 - RNA, 19 nt, Artificial Sequence
  Description of Artificial Sequence: Synthetic oligonucleotide
cugcaagcucuuugaugau

SEQ ID NO: 2875888 - RNA, 19 nt, Artificial Sequence
  Description of Artificial Sequence: Synthetic oligonucleotide
ugacugcgggcggccgguc

SEQ ID NO: 2875889 - RNA, 19 nt, Artificial Sequence
  Description of Artificial Sequence: Synthetic oligonucleotide
gguccccaaguucgugugu

SEQ ID NO: 2875890 - RNA, 19 nt, Artificial Sequence
  Description of Artificial Sequence: Synthetic oligonucleotide
cugcuccaaggucgccuaa

SEQ ID NO: 2875891 - RNA, 19 nt, Artificial Sequence
  Description of Artificial Sequence: Synthetic oligonucleotide
cugcgggcggccgguccac

SEQ ID NO: 2875892 - RNA, 19 nt, Artificial Sequence
  Description of Artificial Sequence: Synthetic oligonucleotide
ccagccggcccugccucgg

SEQ ID NO: 2875893 - RNA, 19 nt, Artificial Sequence
  Description of Artificial Sequence: Synthetic oligonucleotide
cugccucggccgggucucc

SEQ ID NO: 2875894 - RNA, 19 nt, Artificial Sequence
  Description of Artificial Sequence: Synthetic oligonucleotide
cugacugcgggcggccggu

SEQ ID NO: 2875895 - RNA, 19 nt, Artificial Sequence
  Description of Artificial Sequence: Synthetic oligonucleotide
gccucggccgggucuccga

SEQ ID NO: 2875896 - RNA, 19 nt, Artificial Sequence
  Description of Artificial Sequence: Synthetic oligonucleotide
cuccuggucuuuccaccuu

SEQ ID NO: 2875897 - RNA, 19 nt, Artificial Sequence
  Description of Artificial Sequence: Synthetic oligonucleotide
cgggcggccgguccacagc

SEQ ID NO: 2875898 - RNA, 19 nt, Artificial Sequence
  Description of Artificial Sequence: Synthetic oligonucleotide
ggcggccgguccacagccc

SEQ ID NO: 2875899 - RNA, 19 nt, Artificial Sequence
  Description of Artificial Sequence: Synthetic oligonucleotide
ggcccaucucagaaaguuu

SEQ ID NO: 2875900 - RNA, 19 nt, Artificial Sequence
  Description of Artificial Sequence: Synthetic oligonucleotide
cucacccucuuggauccuu

SEQ ID NO: 2875901 - RNA, 19 nt, Artificial Sequence
  Description of Artificial Sequence: Synthetic oligonucleotide
cgggucuccgaagagccaa

SEQ ID NO: 2875902 - RNA, 19 nt, Artificial Sequence
  Description of Artificial Sequence: Synthetic oligonucleotide
ccgggucuccgaagagcca

SEQ ID NO: 2875903 - RNA, 19 nt, Artificial Sequence
  Description of Artificial Sequence: Synthetic oligonucleotide
cggccgggucuccgaagag

SEQ ID NO: 2875904 - RNA, 19 nt, Artificial Sequence
  Description of Artificial Sequence: Synthetic oligonucleotide
cgcucuggccagcguccac

SEQ ID NO: 2875905 - RNA, 19 nt, Artificial Sequence
  Description of Artificial Sequence: Synthetic oligonucleotide
ccucggccgggucuccgaa

SEQ ID NO: 2875906 - RNA, 19 nt, Artificial Sequence
  Description of Artificial Sequence: Synthetic oligonucleotide
ccccaaguucgugugucau

SEQ ID NO: 2875907 - RNA, 19 nt, Artificial Sequence
  Description of Artificial Sequence: Synthetic oligonucleotide
ccaacgcucuggccagcgu

SEQ ID NO: 2875908 - RNA, 19 nt, Artificial Sequence
  Description of Artificial Sequence: Synthetic oligonucleotide
cccugccucggccgggucu

SEQ ID NO: 2875909 - RNA, 19 nt, Artificial Sequence
  Description of Artificial Sequence: Synthetic oligonucleotide
gcccugccucggccggguc

SEQ ID NO: 2875910 - RNA, 19 nt, Artificial Sequence
  Description of Artificial Sequence: Synthetic oligonucleotide
ggcccugccucggccgggu

SEQ ID NO: 2875911 - RNA, 19 nt, Artificial Sequence
  Description of Artificial Sequence: Synthetic oligonucleotide
cacccuccaguggcuucau

SEQ ID NO: 2875912 - RNA, 19 nt, Artificial Sequence
  Description of Artificial Sequence: Synthetic oligonucleotide
uguaaaauaauacacguga

SEQ ID NO: 2875913 - RNA, 19 nt, Artificial Sequence
  Description of Artificial Sequence: Synthetic oligonucleotide
aaauaauacacgugaacag

SEQ ID NO: 2875914 - RNA, 19 nt, Artificial Sequence
  Description of Artificial Sequence: Synthetic oligonucleotide
aaaauaauacacgugaaca

SEQ ID NO: 2875915 - RNA, 19 nt, Artificial Sequence
  Description of Artificial Sequence: Synthetic oligonucleotide
aacagggccaacuuugagc

SEQ ID NO: 2875916 - RNA, 19 nt, Artificial Sequence
  Description of Artificial Sequence: Synthetic oligonucleotide
aauaauacacgugaacagg

SEQ ID NO: 2875917 - RNA, 19 nt, Artificial Sequence
  Description of Artificial Sequence: Synthetic oligonucleotide
aaauacagaagcgaugaac

SEQ ID NO: 2875918 - RNA, 19 nt, Artificial Sequence
  Description of Artificial Sequence: Synthetic oligonucleotide
aauuccaaaguuuauuaga

SEQ ID NO: 2875919 - RNA, 19 nt, Artificial Sequence
  Description of Artificial Sequence: Synthetic oligonucleotide
ucagaugacagauggaugc

SEQ ID NO: 2875920 - RNA, 19 nt, Artificial Sequence
  Description of Artificial Sequence: Synthetic oligonucleotide
ugcaacauaaauacagaag

SEQ ID NO: 2875921 - RNA, 19 nt, Artificial Sequence
  Description of Artificial Sequence: Synthetic oligonucleotide
ucuguaaaauaauacacgu

SEQ ID NO: 2875922 - RNA, 19 nt, Artificial Sequence
  Description of Artificial Sequence: Synthetic oligonucleotide
ucucuguaaaauaauacac

SEQ ID NO: 2875923 - RNA, 19 nt, Artificial Sequence
  Description of Artificial Sequence: Synthetic oligonucleotide
aaagacucaucaccaacac

SEQ ID NO: 2875924 - RNA, 19 nt, Artificial Sequence
  Description of Artificial Sequence: Synthetic oligonucleotide
gaagcgaugaacaaaagac

SEQ ID NO: 2875925 - RNA, 19 nt, Artificial Sequence
  Description of Artificial Sequence: Synthetic oligonucleotide
augaacaaaagacucauca

SEQ ID NO: 2875926 - RNA, 19 nt, Artificial Sequence
  Description of Artificial Sequence: Synthetic oligonucleotide
uaaaauaauacacgugaac

SEQ ID NO: 2875927 - RNA, 19 nt, Artificial Sequence
  Description of Artificial Sequence: Synthetic oligonucleotide
uguagaaucgccacauucc

SEQ ID NO: 2875928 - RNA, 19 nt, Artificial Sequence
  Description of Artificial Sequence: Synthetic oligonucleotide
gaaucuucaguguagaauc

SEQ ID NO: 2875929 - RNA, 19 nt, Artificial Sequence
  Description of Artificial Sequence: Synthetic oligonucleotide
gauauguugggucuuuucc

SEQ ID NO: 2875930 - RNA, 19 nt, Artificial Sequence
  Description of Artificial Sequence: Synthetic oligonucleotide
cucuguaaaauaauacacg

SEQ ID NO: 2875931 - RNA, 19 nt, Artificial Sequence
  Description of Artificial Sequence: Synthetic oligonucleotide
uucucuguaaaauaauaca

SEQ ID NO: 2875932 - RNA, 19 nt, Artificial Sequence
  Description of Artificial Sequence: Synthetic oligonucleotide
aauacagaagcgaugaaca

SEQ ID NO: 2875933 - RNA, 19 nt, Artificial Sequence
  Description of Artificial Sequence: Synthetic oligonucleotide
gcaacauaaauacagaagc

SEQ ID NO: 2875934 - RNA, 19 nt, Artificial Sequence
  Description of Artificial Sequence: Synthetic oligonucleotide
aacauaaauacagaagcga

SEQ ID NO: 2875935 - RNA, 19 nt, Artificial Sequence
  Description of Artificial Sequence: Synthetic oligonucleotide
aaaacauuucucaaaguca

SEQ ID NO: 2875936 - RNA, 19 nt, Artificial Sequence
  Description of Artificial Sequence: Synthetic oligonucleotide
caaaguuuauuagacauag

SEQ ID NO: 2875937 - RNA, 19 nt, Artificial Sequence
  Description of Artificial Sequence: Synthetic oligonucleotide
uccaaaguuuauuagacau

SEQ ID NO: 2875938 - RNA, 19 nt, Artificial Sequence
  Description of Artificial Sequence: Synthetic oligonucleotide
uuugguccaagauauguug

SEQ ID NO: 2875939 - RNA, 19 nt, Artificial Sequence
  Description of Artificial Sequence: Synthetic oligonucleotide
ucaaagucaauucuuguua

SEQ ID NO: 2875940 - RNA, 19 nt, Artificial Sequence
  Description of Artificial Sequence: Synthetic oligonucleotide
uguacuugccccaaaugug

SEQ ID NO: 2875941 - RNA, 19 nt, Artificial Sequence
  Description of Artificial Sequence: Synthetic oligonucleotide
caacauaaauacagaagcg

SEQ ID NO: 2875942 - RNA, 19 nt, Artificial Sequence
  Description of Artificial Sequence: Synthetic oligonucleotide
auuccaaaguuuauuagac

SEQ ID NO: 2875943 - RNA, 19 nt, Artificial Sequence
  Description of Artificial Sequence: Synthetic oligonucleotide
aaaucuaugagcgugugua

SEQ ID NO: 2875944 - RNA, 19 nt, Artificial Sequence
  Description of Artificial Sequence: Synthetic oligonucleotide
aaagucaauucuuguuaag

SEQ ID NO: 2875945 - RNA, 19 nt, Artificial Sequence
  Description of Artificial Sequence: Synthetic oligonucleotide
augacagauggaugcagcc

SEQ ID NO: 2875946 - RNA, 19 nt, Artificial Sequence
  Description of Artificial Sequence: Synthetic oligonucleotide
uucucaaagucaauucuug

SEQ ID NO: 2875947 - RNA, 19 nt, Artificial Sequence
  Description of Artificial Sequence: Synthetic oligonucleotide
gaugcagccaaaucuauga

SEQ ID NO: 2875948 - RNA, 19 nt, Artificial Sequence
  Description of Artificial Sequence: Synthetic oligonucleotide
ucaauuccaaaguuuauua

SEQ ID NO: 2875949 - RNA, 19 nt, Artificial Sequence
  Description of Artificial Sequence: Synthetic oligonucleotide
uggaacagggccaacuuug

SEQ ID NO: 2875950 - RNA, 19 nt, Artificial Sequence
  Description of Artificial Sequence: Synthetic oligonucleotide
augugcaacauaaauacag

SEQ ID NO: 2875951 - RNA, 19 nt, Artificial Sequence
  Description of Artificial Sequence: Synthetic oligonucleotide
ugugcaacauaaauacaga

SEQ ID NO: 2875952 - RNA, 19 nt, Artificial Sequence
  Description of Artificial Sequence: Synthetic oligonucleotide
cauaaauacagaagcgaug

SEQ ID NO: 2875953 - RNA, 19 nt, Artificial Sequence
  Description of Artificial Sequence: Synthetic oligonucleotide
aaaucaauuccaaaguuua

SEQ ID NO: 2875954 - RNA, 19 nt, Artificial Sequence
  Description of Artificial Sequence: Synthetic oligonucleotide
ugaacaaaagacucaucac

SEQ ID NO: 2875955 - RNA, 19 nt, Artificial Sequence
  Description of Artificial Sequence: Synthetic oligonucleotide
aaaagacucaucaccaaca

SEQ ID NO: 2875956 - RNA, 19 nt, Artificial Sequence
  Description of Artificial Sequence: Synthetic oligonucleotide
aauacacgugaacaggaaa

SEQ ID NO: 2875957 - RNA, 19 nt, Artificial Sequence
  Description of Artificial Sequence: Synthetic oligonucleotide
uuaaguucucuguaaaaua

SEQ ID NO: 2875958 - RNA, 19 nt, Artificial Sequence
  Description of Artificial Sequence: Synthetic oligonucleotide
aacaggaaaucacuacacu

SEQ ID NO: 2875959 - RNA, 19 nt, Artificial Sequence
  Description of Artificial Sequence: Synthetic oligonucleotide
aaacauuucucaaagucaa

SEQ ID NO: 2875960 - RNA, 19 nt, Artificial Sequence
  Description of Artificial Sequence: Synthetic oligonucleotide
ucaucaccaacacuggaac

SEQ ID NO: 2875961 - RNA, 19 nt, Artificial Sequence
  Description of Artificial Sequence: Synthetic oligonucleotide
aagucaauucuuguuaagu

SEQ ID NO: 2875962 - RNA, 19 nt, Artificial Sequence
  Description of Artificial Sequence: Synthetic oligonucleotide
auucuuguuaaguucucug

SEQ ID NO: 2875963 - RNA, 19 nt, Artificial Sequence
  Description of Artificial Sequence: Synthetic oligonucleotide
gauggaugcagccaaaucu

SEQ ID NO: 2875964 - RNA, 19 nt, Artificial Sequence
  Description of Artificial Sequence: Synthetic oligonucleotide
cugaugccgaagaacagcg

SEQ ID NO: 2875965 - RNA, 19 nt, Artificial Sequence
  Description of Artificial Sequence: Synthetic oligonucleotide
agaagcgaugaacaaaaga

SEQ ID NO: 2875966 - RNA, 19 nt, Artificial Sequence
  Description of Artificial Sequence: Synthetic oligonucleotide
agcgaugaacaaaagacuc

SEQ ID NO: 2875967 - RNA, 19 nt, Artificial Sequence
  Description of Artificial Sequence: Synthetic oligonucleotide
uccaagauauguugggucu

SEQ ID NO: 2875968 - RNA, 19 nt, Artificial Sequence
  Description of Artificial Sequence: Synthetic oligonucleotide
cauuucucaaagucaauuc

SEQ ID NO: 2875969 - RNA, 19 nt, Artificial Sequence
  Description of Artificial Sequence: Synthetic oligonucleotide
ugguccaagauauguuggg

SEQ ID NO: 2875970 - RNA, 19 nt, Artificial Sequence
  Description of Artificial Sequence: Synthetic oligonucleotide
caauuccaaaguuuauuag

SEQ ID NO: 2875971 - RNA, 19 nt, Artificial Sequence
  Description of Artificial Sequence: Synthetic oligonucleotide
uucuuguuaaguucucugu

SEQ ID NO: 2875972 - RNA, 19 nt, Artificial Sequence
  Description of Artificial Sequence: Synthetic oligonucleotide
uucagaugacagauggaug

SEQ ID NO: 2875973 - RNA, 19 nt, Artificial Sequence
  Description of Artificial Sequence: Synthetic oligonucleotide
agauauguugggucuuuuc

SEQ ID NO: 2875974 - RNA, 19 nt, Artificial Sequence
  Description of Artificial Sequence: Synthetic oligonucleotide
auauguugggucuuuuccu

SEQ ID NO: 2875975 - RNA, 19 nt, Artificial Sequence
  Description of Artificial Sequence: Synthetic oligonucleotide
ugcagccaaaucuaugagc

SEQ ID NO: 2875976 - RNA, 19 nt, Artificial Sequence
  Description of Artificial Sequence: Synthetic oligonucleotide
cuguaaaauaauacacgug

SEQ ID NO: 2875977 - RNA, 19 nt, Artificial Sequence
  Description of Artificial Sequence: Synthetic oligonucleotide
ucuuguuaaguucucugua

SEQ ID NO: 2875978 - RNA, 19 nt, Artificial Sequence
  Description of Artificial Sequence: Synthetic oligonucleotide
guagaaucgccacauuccc

SEQ ID NO: 2875979 - RNA, 19 nt, Artificial Sequence
  Description of Artificial Sequence: Synthetic oligonucleotide
gucaauucuuguuaaguuc

SEQ ID NO: 2875980 - RNA, 19 nt, Artificial Sequence
  Description of Artificial Sequence: Synthetic oligonucleotide
uguguacuugccccaaaug

SEQ ID NO: 2875981 - RNA, 19 nt, Artificial Sequence
  Description of Artificial Sequence: Synthetic oligonucleotide
aucaccaacacuggaacag

SEQ ID NO: 2875982 - RNA, 19 nt, Artificial Sequence
  Description of Artificial Sequence: Synthetic oligonucleotide
caaaagacucaucaccaac

SEQ ID NO: 2875983 - RNA, 19 nt, Artificial Sequence
  Description of Artificial Sequence: Synthetic oligonucleotide
uuguuaaguucucuguaaa

SEQ ID NO: 2875984 - RNA, 19 nt, Artificial Sequence
  Description of Artificial Sequence: Synthetic oligonucleotide
gcagccaaaucuaugagcg

SEQ ID NO: 2875985 - RNA, 19 nt, Artificial Sequence
  Description of Artificial Sequence: Synthetic oligonucleotide
agauggaugcagccaaauc

SEQ ID NO: 2875986 - RNA, 19 nt, Artificial Sequence
  Description of Artificial Sequence: Synthetic oligonucleotide
uguuaaguucucuguaaaa

SEQ ID NO: 2875987 - RNA, 19 nt, Artificial Sequence
  Description of Artificial Sequence: Synthetic oligonucleotide
acaggaaaucacuacacuu

SEQ ID NO: 2875988 - RNA, 19 nt, Artificial Sequence
  Description of Artificial Sequence: Synthetic oligonucleotide
cuucuucuucagaugacag

SEQ ID NO: 2875989 - RNA, 19 nt, Artificial Sequence
  Description of Artificial Sequence: Synthetic oligonucleotide
gaugccgaagaacagcgga

SEQ ID NO: 2875990 - RNA, 19 nt, Artificial Sequence
  Description of Artificial Sequence: Synthetic oligonucleotide
agucaauucuuguuaaguu

SEQ ID NO: 2875991 - RNA, 19 nt, Artificial Sequence
  Description of Artificial Sequence: Synthetic oligonucleotide
uuccaaaguuuauuagaca

SEQ ID NO: 2875992 - RNA, 19 nt, Artificial Sequence
  Description of Artificial Sequence: Synthetic oligonucleotide
ucucaaagucaauucuugu

SEQ ID NO: 2875993 - RNA, 19 nt, Artificial Sequence
  Description of Artificial Sequence: Synthetic oligonucleotide
acguuggugccacugggcg

SEQ ID NO: 2875994 - RNA, 19 nt, Artificial Sequence
  Description of Artificial Sequence: Synthetic oligonucleotide
ugagcguguguacuugccc

SEQ ID NO: 2875995 - RNA, 19 nt, Artificial Sequence
  Description of Artificial Sequence: Synthetic oligonucleotide
aagcgaugaacaaaagacu

SEQ ID NO: 2875996 - RNA, 19 nt, Artificial Sequence
  Description of Artificial Sequence: Synthetic oligonucleotide
guucucuguaaaauaauac

SEQ ID NO: 2875997 - RNA, 19 nt, Artificial Sequence
  Description of Artificial Sequence: Synthetic oligonucleotide
uuuugguccaagauauguu

SEQ ID NO: 2875998 - RNA, 19 nt, Artificial Sequence
  Description of Artificial Sequence: Synthetic oligonucleotide
gaggagcccacguuggugc

SEQ ID NO: 2875999 - RNA, 19 nt, Artificial Sequence
  Description of Artificial Sequence: Synthetic oligonucleotide
cacgugaacaggaaaucac

SEQ ID NO: 2876000 - RNA, 19 nt, Artificial Sequence
  Description of Artificial Sequence: Synthetic oligonucleotide
gagcguguguacuugcccc

SEQ ID NO: 2876001 - RNA, 19 nt, Artificial Sequence
  Description of Artificial Sequence: Synthetic oligonucleotide
gugaacaggaaaucacuac

SEQ ID NO: 2876002 - RNA, 19 nt, Artificial Sequence
  Description of Artificial Sequence: Synthetic oligonucleotide
gaacaggaaaucacuacac

SEQ ID NO: 2876003 - RNA, 19 nt, Artificial Sequence
  Description of Artificial Sequence: Synthetic oligonucleotide
auaauacacgugaacagga

SEQ ID NO: 2876004 - RNA, 19 nt, Artificial Sequence
  Description of Artificial Sequence: Synthetic oligonucleotide
uaauacacgugaacaggaa

SEQ ID NO: 2876005 - RNA, 19 nt, Artificial Sequence
  Description of Artificial Sequence: Synthetic oligonucleotide
cuucuucuucuucagauga

SEQ ID NO: 2876006 - RNA, 19 nt, Artificial Sequence
  Description of Artificial Sequence: Synthetic oligonucleotide
uagaaucgccacauucccc

SEQ ID NO: 2876007 - RNA, 19 nt, Artificial Sequence
  Description of Artificial Sequence: Synthetic oligonucleotide
agccaaaucuaugagcgug

SEQ ID NO: 2876008 - RNA, 19 nt, Artificial Sequence
  Description of Artificial Sequence: Synthetic oligonucleotide
acauaaauacagaagcgau

SEQ ID NO: 2876009 - RNA, 19 nt, Artificial Sequence
  Description of Artificial Sequence: Synthetic oligonucleotide
guguagaaucgccacauuc

SEQ ID NO: 2876010 - RNA, 19 nt, Artificial Sequence
  Description of Artificial Sequence: Synthetic oligonucleotide
ucaccaacacuggaacagg

SEQ ID NO: 2876011 - RNA, 19 nt, Artificial Sequence
  Description of Artificial Sequence: Synthetic oligonucleotide
ucuucagaugacagaugga

SEQ ID NO: 2876012 - RNA, 19 nt, Artificial Sequence
  Description of Artificial Sequence: Synthetic oligonucleotide
uacagaagcgaugaacaaa

SEQ ID NO: 2876013 - RNA, 19 nt, Artificial Sequence
  Description of Artificial Sequence: Synthetic oligonucleotide
gacagauggaugcagccaa

SEQ ID NO: 2876014 - RNA, 19 nt, Artificial Sequence
  Description of Artificial Sequence: Synthetic oligonucleotide
ugggucuuuuccuucuucu

SEQ ID NO: 2876015 - RNA, 19 nt, Artificial Sequence
  Description of Artificial Sequence: Synthetic oligonucleotide
uaugagcguguguacuugc

SEQ ID NO: 2876016 - RNA, 19 nt, Artificial Sequence
  Description of Artificial Sequence: Synthetic oligonucleotide
ugaugccgaagaacagcgg

SEQ ID NO: 2876017 - RNA, 19 nt, Artificial Sequence
  Description of Artificial Sequence: Synthetic oligonucleotide
ccaacuuugagcccagggg

SEQ ID NO: 2876018 - RNA, 19 nt, Artificial Sequence
  Description of Artificial Sequence: Synthetic oligonucleotide
guacuugccccaaaugugc

SEQ ID NO: 2876019 - RNA, 19 nt, Artificial Sequence
  Description of Artificial Sequence: Synthetic oligonucleotide
cuuguuaaguucucuguaa

SEQ ID NO: 2876020 - RNA, 19 nt, Artificial Sequence
  Description of Artificial Sequence: Synthetic oligonucleotide
ucugccggaccguggaucc

SEQ ID NO: 2876021 - RNA, 19 nt, Artificial Sequence
  Description of Artificial Sequence: Synthetic oligonucleotide
uguugggucuuuuccuucu

SEQ ID NO: 2876022 - RNA, 19 nt, Artificial Sequence
  Description of Artificial Sequence: Synthetic oligonucleotide
uauguugggucuuuuccuu

SEQ ID NO: 2876023 - RNA, 19 nt, Artificial Sequence
  Description of Artificial Sequence: Synthetic oligonucleotide
caacuuugagcccagggga

SEQ ID NO: 2876024 - RNA, 19 nt, Artificial Sequence
  Description of Artificial Sequence: Synthetic oligonucleotide
ucuaugagcguguguacuu

SEQ ID NO: 2876025 - RNA, 19 nt, Artificial Sequence
  Description of Artificial Sequence: Synthetic oligonucleotide
aucaauuccaaaguuuauu

SEQ ID NO: 2876026 - RNA, 19 nt, Artificial Sequence
  Description of Artificial Sequence: Synthetic oligonucleotide
aggaaaucacuacacuuuu

SEQ ID NO: 2876027 - RNA, 19 nt, Artificial Sequence
  Description of Artificial Sequence: Synthetic oligonucleotide
uuucucugccggaccgugg

SEQ ID NO: 2876028 - RNA, 19 nt, Artificial Sequence
  Description of Artificial Sequence: Synthetic oligonucleotide
gacucaucaccaacacugg

SEQ ID NO: 2876029 - RNA, 19 nt, Artificial Sequence
  Description of Artificial Sequence: Synthetic oligonucleotide
ugcugaugccgaagaacag

SEQ ID NO: 2876030 - RNA, 19 nt, Artificial Sequence
  Description of Artificial Sequence: Synthetic oligonucleotide
uucucugccggaccgugga

SEQ ID NO: 2876031 - RNA, 19 nt, Artificial Sequence
  Description of Artificial Sequence: Synthetic oligonucleotide
auguugggucuuuuccuuc

SEQ ID NO: 2876032 - RNA, 19 nt, Artificial Sequence
  Description of Artificial Sequence: Synthetic oligonucleotide
acauuucucaaagucaauu

SEQ ID NO: 2876033 - RNA, 19 nt, Artificial Sequence
  Description of Artificial Sequence: Synthetic oligonucleotide
augcugaugccgaagaaca

SEQ ID NO: 2876034 - RNA, 19 nt, Artificial Sequence
  Description of Artificial Sequence: Synthetic oligonucleotide
gaacagggccaacuuugag

SEQ ID NO: 2876035 - RNA, 19 nt, Artificial Sequence
  Description of Artificial Sequence: Synthetic oligonucleotide
auacacgugaacaggaaau

SEQ ID NO: 2876036 - RNA, 19 nt, Artificial Sequence
  Description of Artificial Sequence: Synthetic oligonucleotide
guccaagauauguuggguc

SEQ ID NO: 2876037 - RNA, 19 nt, Artificial Sequence
  Description of Artificial Sequence: Synthetic oligonucleotide
acaaaagacucaucaccaa

SEQ ID NO: 2876038 - RNA, 19 nt, Artificial Sequence
  Description of Artificial Sequence: Synthetic oligonucleotide
caccaacacuggaacaggg

SEQ ID NO: 2876039 - RNA, 19 nt, Artificial Sequence
  Description of Artificial Sequence: Synthetic oligonucleotide
augcagccaaaucuaugag

SEQ ID NO: 2876040 - RNA, 19 nt, Artificial Sequence
  Description of Artificial Sequence: Synthetic oligonucleotide
gcggccaccgcuuugcugg

SEQ ID NO: 2876041 - RNA, 19 nt, Artificial Sequence
  Description of Artificial Sequence: Synthetic oligonucleotide
ugacagauggaugcagcca

SEQ ID NO: 2876042 - RNA, 19 nt, Artificial Sequence
  Description of Artificial Sequence: Synthetic oligonucleotide
auacagaagcgaugaacaa

SEQ ID NO: 2876043 - RNA, 19 nt, Artificial Sequence
  Description of Artificial Sequence: Synthetic oligonucleotide
aaaguuuauuagacauaga

SEQ ID NO: 2876044 - RNA, 19 nt, Artificial Sequence
  Description of Artificial Sequence: Synthetic oligonucleotide
agaugacagauggaugcag

SEQ ID NO: 2876045 - RNA, 19 nt, Artificial Sequence
  Description of Artificial Sequence: Synthetic oligonucleotide
caaagucaauucuuguuaa

SEQ ID NO: 2876046 - RNA, 19 nt, Artificial Sequence
  Description of Artificial Sequence: Synthetic oligonucleotide
uacuugccccaaaugugca

SEQ ID NO: 2876047 - RNA, 19 nt, Artificial Sequence
  Description of Artificial Sequence: Synthetic oligonucleotide
uuugcugggagagcgcccu

SEQ ID NO: 2876048 - RNA, 19 nt, Artificial Sequence
  Description of Artificial Sequence: Synthetic oligonucleotide
gugcaacauaaauacagaa

SEQ ID NO: 2876049 - RNA, 19 nt, Artificial Sequence
  Description of Artificial Sequence: Synthetic oligonucleotide
guaaaauaauacacgugaa

SEQ ID NO: 2876050 - RNA, 19 nt, Artificial Sequence
  Description of Artificial Sequence: Synthetic oligonucleotide
aacacuggaacagggccaa

SEQ ID NO: 2876051 - RNA, 19 nt, Artificial Sequence
  Description of Artificial Sequence: Synthetic oligonucleotide
uacacgugaacaggaaauc

SEQ ID NO: 2876052 - RNA, 19 nt, Artificial Sequence
  Description of Artificial Sequence: Synthetic oligonucleotide
ggacccggcaugcugaugc

SEQ ID NO: 2876053 - RNA, 19 nt, Artificial Sequence
  Description of Artificial Sequence: Synthetic oligonucleotide
augagcguguguacuugcc

SEQ ID NO: 2876054 - RNA, 19 nt, Artificial Sequence
  Description of Artificial Sequence: Synthetic oligonucleotide
aguucucuguaaaauaaua

SEQ ID NO: 2876055 - RNA, 19 nt, Artificial Sequence
  Description of Artificial Sequence: Synthetic oligonucleotide
uuuucucugccggaccgug

SEQ ID NO: 2876056 - RNA, 19 nt, Artificial Sequence
  Description of Artificial Sequence: Synthetic oligonucleotide
guuaaguucucuguaaaau

SEQ ID NO: 2876057 - RNA, 19 nt, Artificial Sequence
  Description of Artificial Sequence: Synthetic oligonucleotide
aucuaugagcguguguacu

SEQ ID NO: 2876058 - RNA, 19 nt, Artificial Sequence
  Description of Artificial Sequence: Synthetic oligonucleotide
cuugccccaaaugugcaac

SEQ ID NO: 2876059 - RNA, 19 nt, Artificial Sequence
  Description of Artificial Sequence: Synthetic oligonucleotide
augccgaagaacagcggac

SEQ ID NO: 2876060 - RNA, 19 nt, Artificial Sequence
  Description of Artificial Sequence: Synthetic oligonucleotide
acucaucaccaacacugga

SEQ ID NO: 2876061 - RNA, 19 nt, Artificial Sequence
  Description of Artificial Sequence: Synthetic oligonucleotide
caauucuuguuaaguucuc

SEQ ID NO: 2876062 - RNA, 19 nt, Artificial Sequence
  Description of Artificial Sequence: Synthetic oligonucleotide
acacgugaacaggaaauca

SEQ ID NO: 2876063 - RNA, 19 nt, Artificial Sequence
  Description of Artificial Sequence: Synthetic oligonucleotide
ugccgaagaacagcggaca

SEQ ID NO: 2876064 - RNA, 19 nt, Artificial Sequence
  Description of Artificial Sequence: Synthetic oligonucleotide
ugaggagcccacguuggug

SEQ ID NO: 2876065 - RNA, 19 nt, Artificial Sequence
  Description of Artificial Sequence: Synthetic oligonucleotide
gccaacuuugagcccaggg

SEQ ID NO: 2876066 - RNA, 19 nt, Artificial Sequence
  Description of Artificial Sequence: Synthetic oligonucleotide
aggggaaucuucaguguag

SEQ ID NO: 2876067 - RNA, 19 nt, Artificial Sequence
  Description of Artificial Sequence: Synthetic oligonucleotide
cacguuggugccacugggc

SEQ ID NO: 2876068 - RNA, 19 nt, Artificial Sequence
  Description of Artificial Sequence: Synthetic oligonucleotide
acgugaacaggaaaucacu

SEQ ID NO: 2876069 - RNA, 19 nt, Artificial Sequence
  Description of Artificial Sequence: Synthetic oligonucleotide
uggaugcagccaaaucuau

SEQ ID NO: 2876070 - RNA, 19 nt, Artificial Sequence
  Description of Artificial Sequence: Synthetic oligonucleotide
uuugagcccaggggaaucu

SEQ ID NO: 2876071 - RNA, 19 nt, Artificial Sequence
  Description of Artificial Sequence: Synthetic oligonucleotide
gaucccgccgcccgcgcgg

SEQ ID NO: 2876072 - RNA, 19 nt, Artificial Sequence
  Description of Artificial Sequence: Synthetic oligonucleotide
gaugaacaaaagacucauc

SEQ ID NO: 2876073 - RNA, 19 nt, Artificial Sequence
  Description of Artificial Sequence: Synthetic oligonucleotide
uggugcggccugcacuccg

SEQ ID NO: 2876074 - RNA, 19 nt, Artificial Sequence
  Description of Artificial Sequence: Synthetic oligonucleotide
cuuugcugggagagcgccc

SEQ ID NO: 2876075 - RNA, 19 nt, Artificial Sequence
  Description of Artificial Sequence: Synthetic oligonucleotide
aacuuugagcccaggggaa

SEQ ID NO: 2876076 - RNA, 19 nt, Artificial Sequence
  Description of Artificial Sequence: Synthetic oligonucleotide
cuccgcgucccgcagcugg

SEQ ID NO: 2876077 - RNA, 19 nt, Artificial Sequence
  Description of Artificial Sequence: Synthetic oligonucleotide
agggccaacuuugagccca

SEQ ID NO: 2876078 - RNA, 19 nt, Artificial Sequence
  Description of Artificial Sequence: Synthetic oligonucleotide
ugagcccaggggaaucuuc

SEQ ID NO: 2876079 - RNA, 19 nt, Artificial Sequence
  Description of Artificial Sequence: Synthetic oligonucleotide
cuaugagcguguguacuug

SEQ ID NO: 2876080 - RNA, 19 nt, Artificial Sequence
  Description of Artificial Sequence: Synthetic oligonucleotide
cagaagcgaugaacaaaag

SEQ ID NO: 2876081 - RNA, 19 nt, Artificial Sequence
  Description of Artificial Sequence: Synthetic oligonucleotide
ugccacugggcgucggacc

SEQ ID NO: 2876082 - RNA, 19 nt, Artificial Sequence
  Description of Artificial Sequence: Synthetic oligonucleotide
aacauuucucaaagucaau

SEQ ID NO: 2876083 - RNA, 19 nt, Artificial Sequence
  Description of Artificial Sequence: Synthetic oligonucleotide
ugccggaccguggaucccg

SEQ ID NO: 2876084 - RNA, 19 nt, Artificial Sequence
  Description of Artificial Sequence: Synthetic oligonucleotide
uugccccaaaugugcaaca

SEQ ID NO: 2876085 - RNA, 19 nt, Artificial Sequence
  Description of Artificial Sequence: Synthetic oligonucleotide
ugcacuccgcgucccgcag

SEQ ID NO: 2876086 - RNA, 19 nt, Artificial Sequence
  Description of Artificial Sequence: Synthetic oligonucleotide
agguggugcggccugcacu

SEQ ID NO: 2876087 - RNA, 19 nt, Artificial Sequence
  Description of Artificial Sequence: Synthetic oligonucleotide
agcguguguacuugcccca

SEQ ID NO: 2876088 - RNA, 19 nt, Artificial Sequence
  Description of Artificial Sequence: Synthetic oligonucleotide
accgcuuugcugggagagc

SEQ ID NO: 2876089 - RNA, 19 nt, Artificial Sequence
  Description of Artificial Sequence: Synthetic oligonucleotide
cuucagaugacagauggau

SEQ ID NO: 2876090 - RNA, 19 nt, Artificial Sequence
  Description of Artificial Sequence: Synthetic oligonucleotide
auggaugcagccaaaucua

SEQ ID NO: 2876091 - RNA, 19 nt, Artificial Sequence
  Description of Artificial Sequence: Synthetic oligonucleotide
ucccugcagagguggugcg

SEQ ID NO: 2876092 - RNA, 19 nt, Artificial Sequence
  Description of Artificial Sequence: Synthetic oligonucleotide
gagagcgcccugaggagcc

SEQ ID NO: 2876093 - RNA, 19 nt, Artificial Sequence
  Description of Artificial Sequence: Synthetic oligonucleotide
guuggugccacugggcguc

SEQ ID NO: 2876094 - RNA, 19 nt, Artificial Sequence
  Description of Artificial Sequence: Synthetic oligonucleotide
caggaaaucacuacacuuu

SEQ ID NO: 2876095 - RNA, 19 nt, Artificial Sequence
  Description of Artificial Sequence: Synthetic oligonucleotide
cucaaagucaauucuuguu

SEQ ID NO: 2876096 - RNA, 19 nt, Artificial Sequence
  Description of Artificial Sequence: Synthetic oligonucleotide
cgaagaacagcggacacag

SEQ ID NO: 2876097 - RNA, 19 nt, Artificial Sequence
  Description of Artificial Sequence: Synthetic oligonucleotide
gucccugcagagguggugc

SEQ ID NO: 2876098 - RNA, 19 nt, Artificial Sequence
  Description of Artificial Sequence: Synthetic oligonucleotide
aagauauguugggucuuuu

SEQ ID NO: 2876099 - RNA, 19 nt, Artificial Sequence
  Description of Artificial Sequence: Synthetic oligonucleotide
caccgcuuugcugggagag

SEQ ID NO: 2876100 - RNA, 19 nt, Artificial Sequence
  Description of Artificial Sequence: Synthetic oligonucleotide
caucaccaacacuggaaca

SEQ ID NO: 2876101 - RNA, 19 nt, Artificial Sequence
  Description of Artificial Sequence: Synthetic oligonucleotide
ugggcgucggacccggcau

SEQ ID NO: 2876102 - RNA, 19 nt, Artificial Sequence
  Description of Artificial Sequence: Synthetic oligonucleotide
acuugccccaaaugugcaa

SEQ ID NO: 2876103 - RNA, 19 nt, Artificial Sequence
  Description of Artificial Sequence: Synthetic oligonucleotide
cugggagagcgcccugagg

SEQ ID NO: 2876104 - RNA, 19 nt, Artificial Sequence
  Description of Artificial Sequence: Synthetic oligonucleotide
gguggugcggccugcacuc

SEQ ID NO: 2876105 - RNA, 19 nt, Artificial Sequence
  Description of Artificial Sequence: Synthetic oligonucleotide
ccccaaaugugcaacauaa

SEQ ID NO: 2876106 - RNA, 19 nt, Artificial Sequence
  Description of Artificial Sequence: Synthetic oligonucleotide
cuuugagcccaggggaauc

SEQ ID NO: 2876107 - RNA, 19 nt, Artificial Sequence
  Description of Artificial Sequence: Synthetic oligonucleotide
aguguagaaucgccacauu

SEQ ID NO: 2876108 - RNA, 19 nt, Artificial Sequence
  Description of Artificial Sequence: Synthetic oligonucleotide
uccgcgucccgcagcuggc

SEQ ID NO: 2876109 - RNA, 19 nt, Artificial Sequence
  Description of Artificial Sequence: Synthetic oligonucleotide
ggaaucuucaguguagaau

SEQ ID NO: 2876110 - RNA, 19 nt, Artificial Sequence
  Description of Artificial Sequence: Synthetic oligonucleotide
ggaugcagccaaaucuaug

SEQ ID NO: 2876111 - RNA, 19 nt, Artificial Sequence
  Description of Artificial Sequence: Synthetic oligonucleotide
gacccggcaugcugaugcc

SEQ ID NO: 2876112 - RNA, 19 nt, Artificial Sequence
  Description of Artificial Sequence: Synthetic oligonucleotide
ggaccguggaucccgccgc

SEQ ID NO: 2876113 - RNA, 19 nt, Artificial Sequence
  Description of Artificial Sequence: Synthetic oligonucleotide
acuuugagcccaggggaau

SEQ ID NO: 2876114 - RNA, 19 nt, Artificial Sequence
  Description of Artificial Sequence: Synthetic oligonucleotide
gccacugggcgucggaccc

SEQ ID NO: 2876115 - RNA, 19 nt, Artificial Sequence
  Description of Artificial Sequence: Synthetic oligonucleotide
gcuuugcugggagagcgcc

SEQ ID NO: 2876116 - RNA, 19 nt, Artificial Sequence
  Description of Artificial Sequence: Synthetic oligonucleotide
ugccccaaaugugcaacau

SEQ ID NO: 2876117 - RNA, 19 nt, Artificial Sequence
  Description of Artificial Sequence: Synthetic oligonucleotide
accguggaucccgccgccc

SEQ ID NO: 2876118 - RNA, 19 nt, Artificial Sequence
  Description of Artificial Sequence: Synthetic oligonucleotide
caggggaaucuucagugua

SEQ ID NO: 2876119 - RNA, 19 nt, Artificial Sequence
  Description of Artificial Sequence: Synthetic oligonucleotide
ccacguuggugccacuggg

SEQ ID NO: 2876120 - RNA, 19 nt, Artificial Sequence
  Description of Artificial Sequence: Synthetic oligonucleotide
gaccguggaucccgccgcc

SEQ ID NO: 2876121 - RNA, 19 nt, Artificial Sequence
  Description of Artificial Sequence: Synthetic oligonucleotide
gcgaugaacaaaagacuca

SEQ ID NO: 2876122 - RNA, 19 nt, Artificial Sequence
  Description of Artificial Sequence: Synthetic oligonucleotide
gggagagcgcccugaggag

SEQ ID NO: 2876123 - RNA, 19 nt, Artificial Sequence
  Description of Artificial Sequence: Synthetic oligonucleotide
acccggcaugcugaugccg

SEQ ID NO: 2876124 - RNA, 19 nt, Artificial Sequence
  Description of Artificial Sequence: Synthetic oligonucleotide
cagaugacagauggaugca

SEQ ID NO: 2876125 - RNA, 19 nt, Artificial Sequence
  Description of Artificial Sequence: Synthetic oligonucleotide
agagcgcccugaggagccc

SEQ ID NO: 2876126 - RNA, 19 nt, Artificial Sequence
  Description of Artificial Sequence: Synthetic oligonucleotide
gagguggugcggccugcac

SEQ ID NO: 2876127 - RNA, 19 nt, Artificial Sequence
  Description of Artificial Sequence: Synthetic oligonucleotide
guggaucccgccgcccgcg

SEQ ID NO: 2876128 - RNA, 19 nt, Artificial Sequence
  Description of Artificial Sequence: Synthetic oligonucleotide
gagcccacguuggugccac

SEQ ID NO: 2876129 - RNA, 19 nt, Artificial Sequence
  Description of Artificial Sequence: Synthetic oligonucleotide
ccgcuuugcugggagagcg

SEQ ID NO: 2876130 - RNA, 19 nt, Artificial Sequence
  Description of Artificial Sequence: Synthetic oligonucleotide
gccaccgcuuugcugggag

SEQ ID NO: 2876131 - RNA, 19 nt, Artificial Sequence
  Description of Artificial Sequence: Synthetic oligonucleotide
cucugccggaccguggauc

SEQ ID NO: 2876132 - RNA, 19 nt, Artificial Sequence
  Description of Artificial Sequence: Synthetic oligonucleotide
cagggccaacuuugagccc

SEQ ID NO: 2876133 - RNA, 19 nt, Artificial Sequence
  Description of Artificial Sequence: Synthetic oligonucleotide
cccugaggagcccacguug

SEQ ID NO: 2876134 - RNA, 19 nt, Artificial Sequence
  Description of Artificial Sequence: Synthetic oligonucleotide
ccaaaguuuauuagacaua

SEQ ID NO: 2876135 - RNA, 19 nt, Artificial Sequence
  Description of Artificial Sequence: Synthetic oligonucleotide
ggagagcgcccugaggagc

SEQ ID NO: 2876136 - RNA, 19 nt, Artificial Sequence
  Description of Artificial Sequence: Synthetic oligonucleotide
cccacguuggugccacugg

SEQ ID NO: 2876137 - RNA, 19 nt, Artificial Sequence
  Description of Artificial Sequence: Synthetic oligonucleotide
ucucugccggaccguggau

SEQ ID NO: 2876138 - RNA, 19 nt, Artificial Sequence
  Description of Artificial Sequence: Synthetic oligonucleotide
gugcggccugcacuccgcg

SEQ ID NO: 2876139 - RNA, 19 nt, Artificial Sequence
  Description of Artificial Sequence: Synthetic oligonucleotide
gucggacccggcaugcuga

SEQ ID NO: 2876140 - RNA, 19 nt, Artificial Sequence
  Description of Artificial Sequence: Synthetic oligonucleotide
cacugggcgucggacccgg

SEQ ID NO: 2876141 - RNA, 19 nt, Artificial Sequence
  Description of Artificial Sequence: Synthetic oligonucleotide
gccgaagaacagcggacac

SEQ ID NO: 2876142 - RNA, 19 nt, Artificial Sequence
  Description of Artificial Sequence: Synthetic oligonucleotide
uggaucccgccgcccgcgc

SEQ ID NO: 2876143 - RNA, 19 nt, Artificial Sequence
  Description of Artificial Sequence: Synthetic oligonucleotide
guguguacuugccccaaau

SEQ ID NO: 2876144 - RNA, 19 nt, Artificial Sequence
  Description of Artificial Sequence: Synthetic oligonucleotide
uuggugccacugggcgucg

SEQ ID NO: 2876145 - RNA, 19 nt, Artificial Sequence
  Description of Artificial Sequence: Synthetic oligonucleotide
gcugggagagcgcccugag

SEQ ID NO: 2876146 - RNA, 19 nt, Artificial Sequence
  Description of Artificial Sequence: Synthetic oligonucleotide
ugcggccugcacuccgcgu

SEQ ID NO: 2876147 - RNA, 19 nt, Artificial Sequence
  Description of Artificial Sequence: Synthetic oligonucleotide
ggggaaucuucaguguaga

SEQ ID NO: 2876148 - RNA, 19 nt, Artificial Sequence
  Description of Artificial Sequence: Synthetic oligonucleotide
acacuggaacagggccaac

SEQ ID NO: 2876149 - RNA, 19 nt, Artificial Sequence
  Description of Artificial Sequence: Synthetic oligonucleotide
ccaaaucuaugagcgugug

SEQ ID NO: 2876150 - RNA, 19 nt, Artificial Sequence
  Description of Artificial Sequence: Synthetic oligonucleotide
caguguagaaucgccacau

SEQ ID NO: 2876151 - RNA, 19 nt, Artificial Sequence
  Description of Artificial Sequence: Synthetic oligonucleotide
ggaacagggccaacuuuga

SEQ ID NO: 2876152 - RNA, 19 nt, Artificial Sequence
  Description of Artificial Sequence: Synthetic oligonucleotide
gggaaucuucaguguagaa

SEQ ID NO: 2876153 - RNA, 19 nt, Artificial Sequence
  Description of Artificial Sequence: Synthetic oligonucleotide
agcgcccugaggagcccac

SEQ ID NO: 2876154 - RNA, 19 nt, Artificial Sequence
  Description of Artificial Sequence: Synthetic oligonucleotide
ucggacccggcaugcugau

SEQ ID NO: 2876155 - RNA, 19 nt, Artificial Sequence
  Description of Artificial Sequence: Synthetic oligonucleotide
agagguggugcggccugca

SEQ ID NO: 2876156 - RNA, 19 nt, Artificial Sequence
  Description of Artificial Sequence: Synthetic oligonucleotide
cugggcgucggacccggca

SEQ ID NO: 2876157 - RNA, 19 nt, Artificial Sequence
  Description of Artificial Sequence: Synthetic oligonucleotide
cugcacuccgcgucccgca

SEQ ID NO: 2876158 - RNA, 19 nt, Artificial Sequence
  Description of Artificial Sequence: Synthetic oligonucleotide
gugccacugggcgucggac

SEQ ID NO: 2876159 - RNA, 19 nt, Artificial Sequence
  Description of Artificial Sequence: Synthetic oligonucleotide
cggaccguggaucccgccg

SEQ ID NO: 2876160 - RNA, 19 nt, Artificial Sequence
  Description of Artificial Sequence: Synthetic oligonucleotide
ggaucccgccgcccgcgcg

SEQ ID NO: 2876161 - RNA, 19 nt, Artificial Sequence
  Description of Artificial Sequence: Synthetic oligonucleotide
cagagguggugcggccugc

SEQ ID NO: 2876162 - RNA, 19 nt, Artificial Sequence
  Description of Artificial Sequence: Synthetic oligonucleotide
uggugccacugggcgucgg

SEQ ID NO: 2876163 - RNA, 19 nt, Artificial Sequence
  Description of Artificial Sequence: Synthetic oligonucleotide
gguccaagauauguugggu

SEQ ID NO: 2876164 - RNA, 19 nt, Artificial Sequence
  Description of Artificial Sequence: Synthetic oligonucleotide
ccguggaucccgccgcccg

SEQ ID NO: 2876165 - RNA, 19 nt, Artificial Sequence
  Description of Artificial Sequence: Synthetic oligonucleotide
aucccgccgcccgcgcggc

SEQ ID NO: 2876166 - RNA, 19 nt, Artificial Sequence
  Description of Artificial Sequence: Synthetic oligonucleotide
cacuggaacagggccaacu

SEQ ID NO: 2876167 - RNA, 19 nt, Artificial Sequence
  Description of Artificial Sequence: Synthetic oligonucleotide
gcggccugcacuccgcguc

SEQ ID NO: 2876168 - RNA, 19 nt, Artificial Sequence
  Description of Artificial Sequence: Synthetic oligonucleotide
ggucccugcagagguggug

SEQ ID NO: 2876169 - RNA, 19 nt, Artificial Sequence
  Description of Artificial Sequence: Synthetic oligonucleotide
cgugaacaggaaaucacua

SEQ ID NO: 2876170 - RNA, 19 nt, Artificial Sequence
  Description of Artificial Sequence: Synthetic oligonucleotide
ccggucccugcagaggugg

SEQ ID NO: 2876171 - RNA, 19 nt, Artificial Sequence
  Description of Artificial Sequence: Synthetic oligonucleotide
gcaugcugaugccgaagaa

SEQ ID NO: 2876172 - RNA, 19 nt, Artificial Sequence
  Description of Artificial Sequence: Synthetic oligonucleotide
ggugcggccugcacuccgc

SEQ ID NO: 2876173 - RNA, 19 nt, Artificial Sequence
  Description of Artificial Sequence: Synthetic oligonucleotide
cccaaaugugcaacauaaa

SEQ ID NO: 2876174 - RNA, 19 nt, Artificial Sequence
  Description of Artificial Sequence: Synthetic oligonucleotide
caagauauguugggucuuu

SEQ ID NO: 2876175 - RNA, 19 nt, Artificial Sequence
  Description of Artificial Sequence: Synthetic oligonucleotide
cagccaaaucuaugagcgu

SEQ ID NO: 2876176 - RNA, 19 nt, Artificial Sequence
  Description of Artificial Sequence: Synthetic oligonucleotide
ggugccacugggcgucgga

SEQ ID NO: 2876177 - RNA, 19 nt, Artificial Sequence
  Description of Artificial Sequence: Synthetic oligonucleotide
gccccaaaugugcaacaua

SEQ ID NO: 2876178 - RNA, 19 nt, Artificial Sequence
  Description of Artificial Sequence: Synthetic oligonucleotide
cccggcaugcugaugccga

SEQ ID NO: 2876179 - RNA, 19 nt, Artificial Sequence
  Description of Artificial Sequence: Synthetic oligonucleotide
ggcgucggacccggcaugc

SEQ ID NO: 2876180 - RNA, 19 nt, Artificial Sequence
  Description of Artificial Sequence: Synthetic oligonucleotide
gccaaaucuaugagcgugu

SEQ ID NO: 2876181 - RNA, 19 nt, Artificial Sequence
  Description of Artificial Sequence: Synthetic oligonucleotide
gccugcacuccgcgucccg

SEQ ID NO: 2876182 - RNA, 19 nt, Artificial Sequence
  Description of Artificial Sequence: Synthetic oligonucleotide
acugggcgucggacccggc

SEQ ID NO: 2876183 - RNA, 19 nt, Artificial Sequence
  Description of Artificial Sequence: Synthetic oligonucleotide
guugggucuuuuccuucuu

SEQ ID NO: 2876184 - RNA, 19 nt, Artificial Sequence
  Description of Artificial Sequence: Synthetic oligonucleotide
gggcgucggacccggcaug

SEQ ID NO: 2876185 - RNA, 19 nt, Artificial Sequence
  Description of Artificial Sequence: Synthetic oligonucleotide
gcccacguuggugccacug

SEQ ID NO: 2876186 - RNA, 19 nt, Artificial Sequence
  Description of Artificial Sequence: Synthetic oligonucleotide
cugccggaccguggauccc

SEQ ID NO: 2876187 - RNA, 19 nt, Artificial Sequence
  Description of Artificial Sequence: Synthetic oligonucleotide
ccugcacuccgcgucccgc

SEQ ID NO: 2876188 - RNA, 19 nt, Artificial Sequence
  Description of Artificial Sequence: Synthetic oligonucleotide
ccgaagaacagcggacaca

SEQ ID NO: 2876189 - RNA, 19 nt, Artificial Sequence
  Description of Artificial Sequence: Synthetic oligonucleotide
gcacuccgcgucccgcagc

SEQ ID NO: 2876190 - RNA, 19 nt, Artificial Sequence
  Description of Artificial Sequence: Synthetic oligonucleotide
cagauggaugcagccaaau

SEQ ID NO: 2876191 - RNA, 19 nt, Artificial Sequence
  Description of Artificial Sequence: Synthetic oligonucleotide
cacuccgcgucccgcagcu

SEQ ID NO: 2876192 - RNA, 19 nt, Artificial Sequence
  Description of Artificial Sequence: Synthetic oligonucleotide
gagcgcccugaggagccca

SEQ ID NO: 2876193 - RNA, 19 nt, Artificial Sequence
  Description of Artificial Sequence: Synthetic oligonucleotide
guggugcggccugcacucc

SEQ ID NO: 2876194 - RNA, 19 nt, Artificial Sequence
  Description of Artificial Sequence: Synthetic oligonucleotide
cugaggagcccacguuggu

SEQ ID NO: 2876195 - RNA, 19 nt, Artificial Sequence
  Description of Artificial Sequence: Synthetic oligonucleotide
gggucuuuuccuucuucuu

SEQ ID NO: 2876196 - RNA, 19 nt, Artificial Sequence
  Description of Artificial Sequence: Synthetic oligonucleotide
cccugcagagguggugcgg

SEQ ID NO: 2876197 - RNA, 19 nt, Artificial Sequence
  Description of Artificial Sequence: Synthetic oligonucleotide
cgucggacccggcaugcug

SEQ ID NO: 2876198 - RNA, 19 nt, Artificial Sequence
  Description of Artificial Sequence: Synthetic oligonucleotide
cgcuuugcugggagagcgc

SEQ ID NO: 2876199 - RNA, 19 nt, Artificial Sequence
  Description of Artificial Sequence: Synthetic oligonucleotide
gcccaggggaaucuucagu

SEQ ID NO: 2876200 - RNA, 19 nt, Artificial Sequence
  Description of Artificial Sequence: Synthetic oligonucleotide
gggccaacuuugagcccag

SEQ ID NO: 2876201 - RNA, 19 nt, Artificial Sequence
  Description of Artificial Sequence: Synthetic oligonucleotide
cgaugaacaaaagacucau

SEQ ID NO: 2876202 - RNA, 19 nt, Artificial Sequence
  Description of Artificial Sequence: Synthetic oligonucleotide
cguggaucccgccgcccgc

SEQ ID NO: 2876203 - RNA, 19 nt, Artificial Sequence
  Description of Artificial Sequence: Synthetic oligonucleotide
ccaggggaaucuucagugu

SEQ ID NO: 2876204 - RNA, 19 nt, Artificial Sequence
  Description of Artificial Sequence: Synthetic oligonucleotide
agcccacguuggugccacu

SEQ ID NO: 2876205 - RNA, 19 nt, Artificial Sequence
  Description of Artificial Sequence: Synthetic oligonucleotide
ucccgccgcccgcgcggcc

SEQ ID NO: 2876206 - RNA, 19 nt, Artificial Sequence
  Description of Artificial Sequence: Synthetic oligonucleotide
ggagcccacguuggugcca

SEQ ID NO: 2876207 - RNA, 19 nt, Artificial Sequence
  Description of Artificial Sequence: Synthetic oligonucleotide
acuccgcgucccgcagcug

SEQ ID NO: 2876208 - RNA, 19 nt, Artificial Sequence
  Description of Artificial Sequence: Synthetic oligonucleotide
cgcgcggccaccgcuuugc

SEQ ID NO: 2876209 - RNA, 19 nt, Artificial Sequence
  Description of Artificial Sequence: Synthetic oligonucleotide
ccacugggcgucggacccg

SEQ ID NO: 2876210 - RNA, 19 nt, Artificial Sequence
  Description of Artificial Sequence: Synthetic oligonucleotide
gcgcccugaggagcccacg

SEQ ID NO: 2876211 - RNA, 19 nt, Artificial Sequence
  Description of Artificial Sequence: Synthetic oligonucleotide
ccggaccguggaucccgcc

SEQ ID NO: 2876212 - RNA, 19 nt, Artificial Sequence
  Description of Artificial Sequence: Synthetic oligonucleotide
cccggucccugcagaggug

SEQ ID NO: 2876213 - RNA, 19 nt, Artificial Sequence
  Description of Artificial Sequence: Synthetic oligonucleotide
cggccugcacuccgcgucc

SEQ ID NO: 2876214 - RNA, 19 nt, Artificial Sequence
  Description of Artificial Sequence: Synthetic oligonucleotide
ggccugcacuccgcguccc

SEQ ID NO: 2876215 - RNA, 19 nt, Artificial Sequence
  Description of Artificial Sequence: Synthetic oligonucleotide
cggcaugcugaugccgaag

SEQ ID NO: 2876216 - RNA, 19 nt, Artificial Sequence
  Description of Artificial Sequence: Synthetic oligonucleotide
gccgcccgcgcggccaccg

SEQ ID NO: 2876217 - RNA, 19 nt, Artificial Sequence
  Description of Artificial Sequence: Synthetic oligonucleotide
gcguguguacuugccccaa

SEQ ID NO: 2876218 - RNA, 19 nt, Artificial Sequence
  Description of Artificial Sequence: Synthetic oligonucleotide
ccaccgcuuugcugggaga

SEQ ID NO: 2876219 - RNA, 19 nt, Artificial Sequence
  Description of Artificial Sequence: Synthetic oligonucleotide
cgcggccaccgcuuugcug

SEQ ID NO: 2876220 - RNA, 19 nt, Artificial Sequence
  Description of Artificial Sequence: Synthetic oligonucleotide
gccggaccguggaucccgc

SEQ ID NO: 2876221 - RNA, 19 nt, Artificial Sequence
  Description of Artificial Sequence: Synthetic oligonucleotide
ccccggucccugcagaggu

SEQ ID NO: 2876222 - RNA, 19 nt, Artificial Sequence
  Description of Artificial Sequence: Synthetic oligonucleotide
cggccaccgcuuugcuggg

SEQ ID NO: 2876223 - RNA, 19 nt, Artificial Sequence
  Description of Artificial Sequence: Synthetic oligonucleotide
ccaagauauguugggucuu

SEQ ID NO: 2876224 - RNA, 19 nt, Artificial Sequence
  Description of Artificial Sequence: Synthetic oligonucleotide
ccggcaugcugaugccgaa

SEQ ID NO: 2876225 - RNA, 19 nt, Artificial Sequence
  Description of Artificial Sequence: Synthetic oligonucleotide
cguguguacuugccccaaa

SEQ ID NO: 2876226 - RNA, 19 nt, Artificial Sequence
  Description of Artificial Sequence: Synthetic oligonucleotide
gcccugaggagcccacguu

SEQ ID NO: 2876227 - RNA, 19 nt, Artificial Sequence
  Description of Artificial Sequence: Synthetic oligonucleotide
ggccaccgcuuugcuggga

SEQ ID NO: 2876228 - RNA, 19 nt, Artificial Sequence
  Description of Artificial Sequence: Synthetic oligonucleotide
ccgcgcggccaccgcuuug

SEQ ID NO: 2876229 - RNA, 19 nt, Artificial Sequence
  Description of Artificial Sequence: Synthetic oligonucleotide
ccgcccgcgcggccaccgc

SEQ ID NO: 2876230 - RNA, 19 nt, Artificial Sequence
  Description of Artificial Sequence: Synthetic oligonucleotide
cgcccugaggagcccacgu

SEQ ID NO: 2876231 - RNA, 19 nt, Artificial Sequence
  Description of Artificial Sequence: Synthetic oligonucleotide
cggacccggcaugcugaug

SEQ ID NO: 2876232 - RNA, 19 nt, Artificial Sequence
  Description of Artificial Sequence: Synthetic oligonucleotide
ccgcgucccgcagcuggca

SEQ ID NO: 2876233 - RNA, 19 nt, Artificial Sequence
  Description of Artificial Sequence: Synthetic oligonucleotide
gcgcggccaccgcuuugcu

SEQ ID NO: 2876234 - RNA, 19 nt, Artificial Sequence
  Description of Artificial Sequence: Synthetic oligonucleotide
gcgucggacccggcaugcu

SEQ ID NO: 2876235 - RNA, 19 nt, Artificial Sequence
  Description of Artificial Sequence: Synthetic oligonucleotide
cgucccgcagcuggcauuu

SEQ ID NO: 2876236 - RNA, 19 nt, Artificial Sequence
  Description of Artificial Sequence: Synthetic oligonucleotide
gucccgcagcuggcauuuu

SEQ ID NO: 2876237 - RNA, 19 nt, Artificial Sequence
  Description of Artificial Sequence: Synthetic oligonucleotide
cggucccugcagagguggu

SEQ ID NO: 2876238 - RNA, 19 nt, Artificial Sequence
  Description of Artificial Sequence: Synthetic oligonucleotide
gcccgcgcggccaccgcuu

SEQ ID NO: 2876239 - RNA, 19 nt, Artificial Sequence
  Description of Artificial Sequence: Synthetic oligonucleotide
cgcccgcgcggccaccgcu

SEQ ID NO: 2876240 - RNA, 19 nt, Artificial Sequence
  Description of Artificial Sequence: Synthetic oligonucleotide
cccgcgcggccaccgcuuu

SEQ ID NO: 2876241 - RNA, 19 nt, Artificial Sequence
  Description of Artificial Sequence: Synthetic oligonucleotide
aauaaagcaacccacgagg

SEQ ID NO: 2876242 - RNA, 19 nt, Artificial Sequence
  Description of Artificial Sequence: Synthetic oligonucleotide
aaaagaaaugcucuucugc

SEQ ID NO: 2876243 - RNA, 19 nt, Artificial Sequence
  Description of Artificial Sequence: Synthetic oligonucleotide
ucuuuaaacagccaaauga

SEQ ID NO: 2876244 - RNA, 19 nt, Artificial Sequence
  Description of Artificial Sequence: Synthetic oligonucleotide
aauacaaucaucaccgggc

SEQ ID NO: 2876245 - RNA, 19 nt, Artificial Sequence
  Description of Artificial Sequence: Synthetic oligonucleotide
aaagcacuaagacacaguc

SEQ ID NO: 2876246 - RNA, 19 nt, Artificial Sequence
  Description of Artificial Sequence: Synthetic oligonucleotide
ucaucuauuucucaaaucu

SEQ ID NO: 2876247 - RNA, 19 nt, Artificial Sequence
  Description of Artificial Sequence: Synthetic oligonucleotide
aaauacaaucaucaccggg

SEQ ID NO: 2876248 - RNA, 19 nt, Artificial Sequence
  Description of Artificial Sequence: Synthetic oligonucleotide
aaauaaagcaacccacgag

SEQ ID NO: 2876249 - RNA, 19 nt, Artificial Sequence
  Description of Artificial Sequence: Synthetic oligonucleotide
aaagaaaugcucuucugcu

SEQ ID NO: 2876250 - RNA, 19 nt, Artificial Sequence
  Description of Artificial Sequence: Synthetic oligonucleotide
aaugauguuuacuggagca

SEQ ID NO: 2876251 - RNA, 19 nt, Artificial Sequence
  Description of Artificial Sequence: Synthetic oligonucleotide
aaggaaggcacuuugaaau

SEQ ID NO: 2876252 - RNA, 19 nt, Artificial Sequence
  Description of Artificial Sequence: Synthetic oligonucleotide
uuuaucaugggcaucacau

SEQ ID NO: 2876253 - RNA, 19 nt, Artificial Sequence
  Description of Artificial Sequence: Synthetic oligonucleotide
uuuucaucuguacacuggg

SEQ ID NO: 2876254 - RNA, 19 nt, Artificial Sequence
  Description of Artificial Sequence: Synthetic oligonucleotide
acauaauucagucacagaa

SEQ ID NO: 2876255 - RNA, 19 nt, Artificial Sequence
  Description of Artificial Sequence: Synthetic oligonucleotide
uucucaaaucuccagaucu

SEQ ID NO: 2876256 - RNA, 19 nt, Artificial Sequence
  Description of Artificial Sequence: Synthetic oligonucleotide
aaagaaggaaggcacuuug

SEQ ID NO: 2876257 - RNA, 19 nt, Artificial Sequence
  Description of Artificial Sequence: Synthetic oligonucleotide
agcacuaagacacagucca

SEQ ID NO: 2876258 - RNA, 19 nt, Artificial Sequence
  Description of Artificial Sequence: Synthetic oligonucleotide
aaaugaaccauggcucucc

SEQ ID NO: 2876259 - RNA, 19 nt, Artificial Sequence
  Description of Artificial Sequence: Synthetic oligonucleotide
aucuauuucucaaaucucc

SEQ ID NO: 2876260 - RNA, 19 nt, Artificial Sequence
  Description of Artificial Sequence: Synthetic oligonucleotide
cauguuuucaucuguacac

SEQ ID NO: 2876261 - RNA, 19 nt, Artificial Sequence
  Description of Artificial Sequence: Synthetic oligonucleotide
uggaauuuccagaagguac

SEQ ID NO: 2876262 - RNA, 19 nt, Artificial Sequence
  Description of Artificial Sequence: Synthetic oligonucleotide
uaaauaaagcaacccacga

SEQ ID NO: 2876263 - RNA, 19 nt, Artificial Sequence
  Description of Artificial Sequence: Synthetic oligonucleotide
acuaguuuugcaucccuac

SEQ ID NO: 2876264 - RNA, 19 nt, Artificial Sequence
  Description of Artificial Sequence: Synthetic oligonucleotide
auuuccagaagguacuguc

SEQ ID NO: 2876265 - RNA, 19 nt, Artificial Sequence
  Description of Artificial Sequence: Synthetic oligonucleotide
uauuucucaaaucuccaga

SEQ ID NO: 2876266 - RNA, 19 nt, Artificial Sequence
  Description of Artificial Sequence: Synthetic oligonucleotide
ucaucuguacacugggucg

SEQ ID NO: 2876267 - RNA, 19 nt, Artificial Sequence
  Description of Artificial Sequence: Synthetic oligonucleotide
aaaucuccagaucugauuu

SEQ ID NO: 2876268 - RNA, 19 nt, Artificial Sequence
  Description of Artificial Sequence: Synthetic oligonucleotide
aagaaaugcucuucugcuc

SEQ ID NO: 2876269 - RNA, 19 nt, Artificial Sequence
  Description of Artificial Sequence: Synthetic oligonucleotide
uuuaaacagccaaaugaug

SEQ ID NO: 2876270 - RNA, 19 nt, Artificial Sequence
  Description of Artificial Sequence: Synthetic oligonucleotide
uuucagaucgauaucccca

SEQ ID NO: 2876271 - RNA, 19 nt, Artificial Sequence
  Description of Artificial Sequence: Synthetic oligonucleotide
agccaaaugauguuuacug

SEQ ID NO: 2876272 - RNA, 19 nt, Artificial Sequence
  Description of Artificial Sequence: Synthetic oligonucleotide
auuaaucuguauuucuuug

SEQ ID NO: 2876273 - RNA, 19 nt, Artificial Sequence
  Description of Artificial Sequence: Synthetic oligonucleotide
uuugaaaucccgagcaaca

SEQ ID NO: 2876274 - RNA, 19 nt, Artificial Sequence
  Description of Artificial Sequence: Synthetic oligonucleotide
aaauuguccaucuucuuua

SEQ ID NO: 2876275 - RNA, 19 nt, Artificial Sequence
  Description of Artificial Sequence: Synthetic oligonucleotide
aauucagucacagaauuaa

SEQ ID NO: 2876276 - RNA, 19 nt, Artificial Sequence
  Description of Artificial Sequence: Synthetic oligonucleotide
aaaauacaaucaucaccgg

SEQ ID NO: 2876277 - RNA, 19 nt, Artificial Sequence
  Description of Artificial Sequence: Synthetic oligonucleotide
aauuaaucuguauuucuuu

SEQ ID NO: 2876278 - RNA, 19 nt, Artificial Sequence
  Description of Artificial Sequence: Synthetic oligonucleotide
uguuuacuggagcagggag

SEQ ID NO: 2876279 - RNA, 19 nt, Artificial Sequence
  Description of Artificial Sequence: Synthetic oligonucleotide
ugcucccaguuucagaucg

SEQ ID NO: 2876280 - RNA, 19 nt, Artificial Sequence
  Description of Artificial Sequence: Synthetic oligonucleotide
uuguccaucuucuuuaaac

SEQ ID NO: 2876281 - RNA, 19 nt, Artificial Sequence
  Description of Artificial Sequence: Synthetic oligonucleotide
ugaaccauggcucuccagu

SEQ ID NO: 2876282 - RNA, 19 nt, Artificial Sequence
  Description of Artificial Sequence: Synthetic oligonucleotide
uaucaugggcaucacaugu

SEQ ID NO: 2876283 - RNA, 19 nt, Artificial Sequence
  Description of Artificial Sequence: Synthetic oligonucleotide
gaagguacuguccacuccc

SEQ ID NO: 2876284 - RNA, 19 nt, Artificial Sequence
  Description of Artificial Sequence: Synthetic oligonucleotide
aaccucugcacauaauuca

SEQ ID NO: 2876285 - RNA, 19 nt, Artificial Sequence
  Description of Artificial Sequence: Synthetic oligonucleotide
uggaaauuguccaucuucu

SEQ ID NO: 2876286 - RNA, 19 nt, Artificial Sequence
  Description of Artificial Sequence: Synthetic oligonucleotide
acagaauuaaucuguauuu

SEQ ID NO: 2876287 - RNA, 19 nt, Artificial Sequence
  Description of Artificial Sequence: Synthetic oligonucleotide
ucuauuucucaaaucucca

SEQ ID NO: 2876288 - RNA, 19 nt, Artificial Sequence
  Description of Artificial Sequence: Synthetic oligonucleotide
uguccgaaaagcacuaaga

SEQ ID NO: 2876289 - RNA, 19 nt, Artificial Sequence
  Description of Artificial Sequence: Synthetic oligonucleotide
ucagauguccgaaaagcac

SEQ ID NO: 2876290 - RNA, 19 nt, Artificial Sequence
  Description of Artificial Sequence: Synthetic oligonucleotide
ccgaaaagcacuaagacac

SEQ ID NO: 2876291 - RNA, 19 nt, Artificial Sequence
  Description of Artificial Sequence: Synthetic oligonucleotide
uucagucacagaauuaauc

SEQ ID NO: 2876292 - RNA, 19 nt, Artificial Sequence
  Description of Artificial Sequence: Synthetic oligonucleotide
uccgaaaagcacuaagaca

SEQ ID NO: 2876293 - RNA, 19 nt, Artificial Sequence
  Description of Artificial Sequence: Synthetic oligonucleotide
aucaucaccgggcacuugg

SEQ ID NO: 2876294 - RNA, 19 nt, Artificial Sequence
  Description of Artificial Sequence: Synthetic oligonucleotide
aaugcucuucugcucaucu

SEQ ID NO: 2876295 - RNA, 19 nt, Artificial Sequence
  Description of Artificial Sequence: Synthetic oligonucleotide
cugcacauaauucagucac

SEQ ID NO: 2876296 - RNA, 19 nt, Artificial Sequence
  Description of Artificial Sequence: Synthetic oligonucleotide
ugauguuuacuggagcagg

SEQ ID NO: 2876297 - RNA, 19 nt, Artificial Sequence
  Description of Artificial Sequence: Synthetic oligonucleotide
ucuucuuuaaacagccaaa

SEQ ID NO: 2876298 - RNA, 19 nt, Artificial Sequence
  Description of Artificial Sequence: Synthetic oligonucleotide
uucuuuaaacagccaaaug

SEQ ID NO: 2876299 - RNA, 19 nt, Artificial Sequence
  Description of Artificial Sequence: Synthetic oligonucleotide
agaaaugcucuucugcuca

SEQ ID NO: 2876300 - RNA, 19 nt, Artificial Sequence
  Description of Artificial Sequence: Synthetic oligonucleotide
cuucagauguccgaaaagc

SEQ ID NO: 2876301 - RNA, 19 nt, Artificial Sequence
  Description of Artificial Sequence: Synthetic oligonucleotide
auaauucagucacagaauu

SEQ ID NO: 2876302 - RNA, 19 nt, Artificial Sequence
  Description of Artificial Sequence: Synthetic oligonucleotide
gaaaucccgagcaacagug

SEQ ID NO: 2876303 - RNA, 19 nt, Artificial Sequence
  Description of Artificial Sequence: Synthetic oligonucleotide
uucaucuguacacuggguc

SEQ ID NO: 2876304 - RNA, 19 nt, Artificial Sequence
  Description of Artificial Sequence: Synthetic oligonucleotide
uaguuuugcaucccuacgu

SEQ ID NO: 2876305 - RNA, 19 nt, Artificial Sequence
  Description of Artificial Sequence: Synthetic oligonucleotide
uucagauguccgaaaagca

SEQ ID NO: 2876306 - RNA, 19 nt, Artificial Sequence
  Description of Artificial Sequence: Synthetic oligonucleotide
agaagguacuguccacucc

SEQ ID NO: 2876307 - RNA, 19 nt, Artificial Sequence
  Description of Artificial Sequence: Synthetic oligonucleotide
augggcaucacauguuuuc

SEQ ID NO: 2876308 - RNA, 19 nt, Artificial Sequence
  Description of Artificial Sequence: Synthetic oligonucleotide
agaucgauauccccaaaug

SEQ ID NO: 2876309 - RNA, 19 nt, Artificial Sequence
  Description of Artificial Sequence: Synthetic oligonucleotide
ugaggguggaaauugucca

SEQ ID NO: 2876310 - RNA, 19 nt, Artificial Sequence
  Description of Artificial Sequence: Synthetic oligonucleotide
uuugggacuaguuuugcau

SEQ ID NO: 2876311 - RNA, 19 nt, Artificial Sequence
  Description of Artificial Sequence: Synthetic oligonucleotide
ucgauauccccaaaugaac

SEQ ID NO: 2876312 - RNA, 19 nt, Artificial Sequence
  Description of Artificial Sequence: Synthetic oligonucleotide
cacgaggaaagaaggaagg

SEQ ID NO: 2876313 - RNA, 19 nt, Artificial Sequence
  Description of Artificial Sequence: Synthetic oligonucleotide
uccccaaaagaaaugcucu

SEQ ID NO: 2876314 - RNA, 19 nt, Artificial Sequence
  Description of Artificial Sequence: Synthetic oligonucleotide
cucacagccagccacuggg

SEQ ID NO: 2876315 - RNA, 19 nt, Artificial Sequence
  Description of Artificial Sequence: Synthetic oligonucleotide
aaagcaacccacgaggaaa

SEQ ID NO: 2876316 - RNA, 19 nt, Artificial Sequence
  Description of Artificial Sequence: Synthetic oligonucleotide
aagcacuaagacacagucc

SEQ ID NO: 2876317 - RNA, 19 nt, Artificial Sequence
  Description of Artificial Sequence: Synthetic oligonucleotide
acuaagacacaguccagug

SEQ ID NO: 2876318 - RNA, 19 nt, Artificial Sequence
  Description of Artificial Sequence: Synthetic oligonucleotide
acauguuuucaucuguaca

SEQ ID NO: 2876319 - RNA, 19 nt, Artificial Sequence
  Description of Artificial Sequence: Synthetic oligonucleotide
gaucgauauccccaaauga

SEQ ID NO: 2876320 - RNA, 19 nt, Artificial Sequence
  Description of Artificial Sequence: Synthetic oligonucleotide
cuaguuuugcaucccuacg

SEQ ID NO: 2876321 - RNA, 19 nt, Artificial Sequence
  Description of Artificial Sequence: Synthetic oligonucleotide
cuauuucucaaaucuccag

SEQ ID NO: 2876322 - RNA, 19 nt, Artificial Sequence
  Description of Artificial Sequence: Synthetic oligonucleotide
aaucccgagcaacagugcu

SEQ ID NO: 2876323 - RNA, 19 nt, Artificial Sequence
  Description of Artificial Sequence: Synthetic oligonucleotide
aucuucuuuaaacagccaa

SEQ ID NO: 2876324 - RNA, 19 nt, Artificial Sequence
  Description of Artificial Sequence: Synthetic oligonucleotide
auuucucaaaucuccagau

SEQ ID NO: 2876325 - RNA, 19 nt, Artificial Sequence
  Description of Artificial Sequence: Synthetic oligonucleotide
gaggaaagaaggaaggcac

SEQ ID NO: 2876326 - RNA, 19 nt, Artificial Sequence
  Description of Artificial Sequence: Synthetic oligonucleotide
ucucaaaucuccagaucug

SEQ ID NO: 2876327 - RNA, 19 nt, Artificial Sequence
  Description of Artificial Sequence: Synthetic oligonucleotide
gaaaagcacuaagacacag

SEQ ID NO: 2876328 - RNA, 19 nt, Artificial Sequence
  Description of Artificial Sequence: Synthetic oligonucleotide
gauguuuacuggagcaggg

SEQ ID NO: 2876329 - RNA, 19 nt, Artificial Sequence
  Description of Artificial Sequence: Synthetic oligonucleotide
caguuucagaucgauaucc

SEQ ID NO: 2876330 - RNA, 19 nt, Artificial Sequence
  Description of Artificial Sequence: Synthetic oligonucleotide
uuuugcaucccuacgugau

SEQ ID NO: 2876331 - RNA, 19 nt, Artificial Sequence
  Description of Artificial Sequence: Synthetic oligonucleotide
uuuacuggagcagggagac

SEQ ID NO: 2876332 - RNA, 19 nt, Artificial Sequence
  Description of Artificial Sequence: Synthetic oligonucleotide
aguguccucacagccagcc

SEQ ID NO: 2876333 - RNA, 19 nt, Artificial Sequence
  Description of Artificial Sequence: Synthetic oligonucleotide
uaaccucugcacauaauuc

SEQ ID NO: 2876334 - RNA, 19 nt, Artificial Sequence
  Description of Artificial Sequence: Synthetic oligonucleotide
aacagugcuccgugcuccc

SEQ ID NO: 2876335 - RNA, 19 nt, Artificial Sequence
  Description of Artificial Sequence: Synthetic oligonucleotide
uuuuaucaugggcaucaca

SEQ ID NO: 2876336 - RNA, 19 nt, Artificial Sequence
  Description of Artificial Sequence: Synthetic oligonucleotide
caacccacgaggaaagaag

SEQ ID NO: 2876337 - RNA, 19 nt, Artificial Sequence
  Description of Artificial Sequence: Synthetic oligonucleotide
aguuuugcaucccuacgug

SEQ ID NO: 2876338 - RNA, 19 nt, Artificial Sequence
  Description of Artificial Sequence: Synthetic oligonucleotide
gauauccccaaaugaacca

SEQ ID NO: 2876339 - RNA, 19 nt, Artificial Sequence
  Description of Artificial Sequence: Synthetic oligonucleotide
acagccaaaugauguuuac

SEQ ID NO: 2876340 - RNA, 19 nt, Artificial Sequence
  Description of Artificial Sequence: Synthetic oligonucleotide
uuaucaugggcaucacaug

SEQ ID NO: 2876341 - RNA, 19 nt, Artificial Sequence
  Description of Artificial Sequence: Synthetic oligonucleotide
uuugucagguaaccucugc

SEQ ID NO: 2876342 - RNA, 19 nt, Artificial Sequence
  Description of Artificial Sequence: Synthetic oligonucleotide
uccacuccccaaaagaaau

SEQ ID NO: 2876343 - RNA, 19 nt, Artificial Sequence
  Description of Artificial Sequence: Synthetic oligonucleotide
ucugcacauaauucaguca

SEQ ID NO: 2876344 - RNA, 19 nt, Artificial Sequence
  Description of Artificial Sequence: Synthetic oligonucleotide
uguccucacagccagccac

SEQ ID NO: 2876345 - RNA, 19 nt, Artificial Sequence
  Description of Artificial Sequence: Synthetic oligonucleotide
guggaaauuguccaucuuc

SEQ ID NO: 2876346 - RNA, 19 nt, Artificial Sequence
  Description of Artificial Sequence: Synthetic oligonucleotide
ugaaaucccgagcaacagu

SEQ ID NO: 2876347 - RNA, 19 nt, Artificial Sequence
  Description of Artificial Sequence: Synthetic oligonucleotide
ugucagguaaccucugcac

SEQ ID NO: 2876348 - RNA, 19 nt, Artificial Sequence
  Description of Artificial Sequence: Synthetic oligonucleotide
uguccacuccccaaaagaa

SEQ ID NO: 2876349 - RNA, 19 nt, Artificial Sequence
  Description of Artificial Sequence: Synthetic oligonucleotide
ugggacuaguuuugcaucc

SEQ ID NO: 2876350 - RNA, 19 nt, Artificial Sequence
  Description of Artificial Sequence: Synthetic oligonucleotide
uugucagguaaccucugca

SEQ ID NO: 2876351 - RNA, 19 nt, Artificial Sequence
  Description of Artificial Sequence: Synthetic oligonucleotide
ugggucggccuucagaugu

SEQ ID NO: 2876352 - RNA, 19 nt, Artificial Sequence
  Description of Artificial Sequence: Synthetic oligonucleotide
aguuucagaucgauauccc

SEQ ID NO: 2876353 - RNA, 19 nt, Artificial Sequence
  Description of Artificial Sequence: Synthetic oligonucleotide
guccaucuucuuuaaacag

SEQ ID NO: 2876354 - RNA, 19 nt, Artificial Sequence
  Description of Artificial Sequence: Synthetic oligonucleotide
auguccgaaaagcacuaag

SEQ ID NO: 2876355 - RNA, 19 nt, Artificial Sequence
  Description of Artificial Sequence: Synthetic oligonucleotide
guuucagaucgauaucccc

SEQ ID NO: 2876356 - RNA, 19 nt, Artificial Sequence
  Description of Artificial Sequence: Synthetic oligonucleotide
ugcucuucugcucaucuau

SEQ ID NO: 2876357 - RNA, 19 nt, Artificial Sequence
  Description of Artificial Sequence: Synthetic oligonucleotide
agucacagaauuaaucugu

SEQ ID NO: 2876358 - RNA, 19 nt, Artificial Sequence
  Description of Artificial Sequence: Synthetic oligonucleotide
aggaaggcacuuugaaauc

SEQ ID NO: 2876359 - RNA, 19 nt, Artificial Sequence
  Description of Artificial Sequence: Synthetic oligonucleotide
agugugaggguggaaauug

SEQ ID NO: 2876360 - RNA, 19 nt, Artificial Sequence
  Description of Artificial Sequence: Synthetic oligonucleotide
aucacauguuuucaucugu

SEQ ID NO: 2876361 - RNA, 19 nt, Artificial Sequence
  Description of Artificial Sequence: Synthetic oligonucleotide
guccgaaaagcacuaagac

SEQ ID NO: 2876362 - RNA, 19 nt, Artificial Sequence
  Description of Artificial Sequence: Synthetic oligonucleotide
aaaucccgagcaacagugc

SEQ ID NO: 2876363 - RNA, 19 nt, Artificial Sequence
  Description of Artificial Sequence: Synthetic oligonucleotide
ucuucugcucaucuauuuc

SEQ ID NO: 2876364 - RNA, 19 nt, Artificial Sequence
  Description of Artificial Sequence: Synthetic oligonucleotide
acgaggaaagaaggaaggc

SEQ ID NO: 2876365 - RNA, 19 nt, Artificial Sequence
  Description of Artificial Sequence: Synthetic oligonucleotide
cucugcacauaauucaguc

SEQ ID NO: 2876366 - RNA, 19 nt, Artificial Sequence
  Description of Artificial Sequence: Synthetic oligonucleotide
acaaucaucaccgggcacu

SEQ ID NO: 2876367 - RNA, 19 nt, Artificial Sequence
  Description of Artificial Sequence: Synthetic oligonucleotide
ccaucuucuuuaaacagcc

SEQ ID NO: 2876368 - RNA, 19 nt, Artificial Sequence
  Description of Artificial Sequence: Synthetic oligonucleotide
cuuugaaaucccgagcaac

SEQ ID NO: 2876369 - RNA, 19 nt, Artificial Sequence
  Description of Artificial Sequence: Synthetic oligonucleotide
uaaacagccaaaugauguu

SEQ ID NO: 2876370 - RNA, 19 nt, Artificial Sequence
  Description of Artificial Sequence: Synthetic oligonucleotide
uugaaaucccgagcaacag

SEQ ID NO: 2876371 - RNA, 19 nt, Artificial Sequence
  Description of Artificial Sequence: Synthetic oligonucleotide
cacuuugaaaucccgagca

SEQ ID NO: 2876372 - RNA, 19 nt, Artificial Sequence
  Description of Artificial Sequence: Synthetic oligonucleotide
cuccccaaaagaaaugcuc

SEQ ID NO: 2876373 - RNA, 19 nt, Artificial Sequence
  Description of Artificial Sequence: Synthetic oligonucleotide
auacaaucaucaccgggca

SEQ ID NO: 2876374 - RNA, 19 nt, Artificial Sequence
  Description of Artificial Sequence: Synthetic oligonucleotide
uauccccaaaugaaccaug

SEQ ID NO: 2876375 - RNA, 19 nt, Artificial Sequence
  Description of Artificial Sequence: Synthetic oligonucleotide
ggcacuuugaaaucccgag

SEQ ID NO: 2876376 - RNA, 19 nt, Artificial Sequence
  Description of Artificial Sequence: Synthetic oligonucleotide
caucuauuucucaaaucuc

SEQ ID NO: 2876377 - RNA, 19 nt, Artificial Sequence
  Description of Artificial Sequence: Synthetic oligonucleotide
aauuguccaucuucuuuaa

SEQ ID NO: 2876378 - RNA, 19 nt, Artificial Sequence
  Description of Artificial Sequence: Synthetic oligonucleotide
ucagguaaccucugcacau

SEQ ID NO: 2876379 - RNA, 19 nt, Artificial Sequence
  Description of Artificial Sequence: Synthetic oligonucleotide
uuucucaaaucuccagauc

SEQ ID NO: 2876380 - RNA, 19 nt, Artificial Sequence
  Description of Artificial Sequence: Synthetic oligonucleotide
uucagaucgauauccccaa

SEQ ID NO: 2876381 - RNA, 19 nt, Artificial Sequence
  Description of Artificial Sequence: Synthetic oligonucleotide
cagucacagaauuaaucug

SEQ ID NO: 2876382 - RNA, 19 nt, Artificial Sequence
  Description of Artificial Sequence: Synthetic oligonucleotide
uaauucagucacagaauua

SEQ ID NO: 2876383 - RNA, 19 nt, Artificial Sequence
  Description of Artificial Sequence: Synthetic oligonucleotide
aaaagcacuaagacacagu

SEQ ID NO: 2876384 - RNA, 19 nt, Artificial Sequence
  Description of Artificial Sequence: Synthetic oligonucleotide
gaaccauggcucuccagug

SEQ ID NO: 2876385 - RNA, 19 nt, Artificial Sequence
  Description of Artificial Sequence: Synthetic oligonucleotide
gaaggaaggcacuuugaaa

SEQ ID NO: 2876386 - RNA, 19 nt, Artificial Sequence
  Description of Artificial Sequence: Synthetic oligonucleotide
uuuugucagguaaccucug

SEQ ID NO: 2876387 - RNA, 19 nt, Artificial Sequence
  Description of Artificial Sequence: Synthetic oligonucleotide
aaugaaccauggcucucca

SEQ ID NO: 2876388 - RNA, 19 nt, Artificial Sequence
  Description of Artificial Sequence: Synthetic oligonucleotide
uaaagcaacccacgaggaa

SEQ ID NO: 2876389 - RNA, 19 nt, Artificial Sequence
  Description of Artificial Sequence: Synthetic oligonucleotide
ucaaaucuccagaucugau

SEQ ID NO: 2876390 - RNA, 19 nt, Artificial Sequence
  Description of Artificial Sequence: Synthetic oligonucleotide
ugcacauaauucagucaca

SEQ ID NO: 2876391 - RNA, 19 nt, Artificial Sequence
  Description of Artificial Sequence: Synthetic oligonucleotide
ucugcucaucuauuucuca

SEQ ID NO: 2876392 - RNA, 19 nt, Artificial Sequence
  Description of Artificial Sequence: Synthetic oligonucleotide
caucacauguuuucaucug

SEQ ID NO: 2876393 - RNA, 19 nt, Artificial Sequence
  Description of Artificial Sequence: Synthetic oligonucleotide
gccaaaugauguuuacugg

SEQ ID NO: 2876394 - RNA, 19 nt, Artificial Sequence
  Description of Artificial Sequence: Synthetic oligonucleotide
cuuuaaacagccaaaugau

SEQ ID NO: 2876395 - RNA, 19 nt, Artificial Sequence
  Description of Artificial Sequence: Synthetic oligonucleotide
uugggacuaguuuugcauc

SEQ ID NO: 2876396 - RNA, 19 nt, Artificial Sequence
  Description of Artificial Sequence: Synthetic oligonucleotide
aauuuccagaagguacugu

SEQ ID NO: 2876397 - RNA, 19 nt, Artificial Sequence
  Description of Artificial Sequence: Synthetic oligonucleotide
ugugaggguggaaauuguc

SEQ ID NO: 2876398 - RNA, 19 nt, Artificial Sequence
  Description of Artificial Sequence: Synthetic oligonucleotide
cacauguuuucaucuguac

SEQ ID NO: 2876399 - RNA, 19 nt, Artificial Sequence
  Description of Artificial Sequence: Synthetic oligonucleotide
aucgauauccccaaaugaa

SEQ ID NO: 2876400 - RNA, 19 nt, Artificial Sequence
  Description of Artificial Sequence: Synthetic oligonucleotide
uggagcagggagaccaucu

SEQ ID NO: 2876401 - RNA, 19 nt, Artificial Sequence
  Description of Artificial Sequence: Synthetic oligonucleotide
ucacauguuuucaucugua

SEQ ID NO: 2876402 - RNA, 19 nt, Artificial Sequence
  Description of Artificial Sequence: Synthetic oligonucleotide
cucaucuauuucucaaauc

SEQ ID NO: 2876403 - RNA, 19 nt, Artificial Sequence
  Description of Artificial Sequence: Synthetic oligonucleotide
aagguacuguccacucccc

SEQ ID NO: 2876404 - RNA, 19 nt, Artificial Sequence
  Description of Artificial Sequence: Synthetic oligonucleotide
cacuccccaaaagaaaugc

SEQ ID NO: 2876405 - RNA, 19 nt, Artificial Sequence
  Description of Artificial Sequence: Synthetic oligonucleotide
aaccauggcucuccagugu

SEQ ID NO: 2876406 - RNA, 19 nt, Artificial Sequence
  Description of Artificial Sequence: Synthetic oligonucleotide
cagaauuaaucuguauuuc

SEQ ID NO: 2876407 - RNA, 19 nt, Artificial Sequence
  Description of Artificial Sequence: Synthetic oligonucleotide
gugaggguggaaauugucc

SEQ ID NO: 2876408 - RNA, 19 nt, Artificial Sequence
  Description of Artificial Sequence: Synthetic oligonucleotide
uugcaucccuacgugauug

SEQ ID NO: 2876409 - RNA, 19 nt, Artificial Sequence
  Description of Artificial Sequence: Synthetic oligonucleotide
uccagugugaggguggaaa

SEQ ID NO: 2876410 - RNA, 19 nt, Artificial Sequence
  Description of Artificial Sequence: Synthetic oligonucleotide
ugcucaucuauuucucaaa

SEQ ID NO: 2876411 - RNA, 19 nt, Artificial Sequence
  Description of Artificial Sequence: Synthetic oligonucleotide
aaacagccaaaugauguuu

SEQ ID NO: 2876412 - RNA, 19 nt, Artificial Sequence
  Description of Artificial Sequence: Synthetic oligonucleotide
aagcaacccacgaggaaag

SEQ ID NO: 2876413 - RNA, 19 nt, Artificial Sequence
  Description of Artificial Sequence: Synthetic oligonucleotide
agcaacagugcuccgugcu

SEQ ID NO: 2876414 - RNA, 19 nt, Artificial Sequence
  Description of Artificial Sequence: Synthetic oligonucleotide
ucccgagcaacagugcucc

SEQ ID NO: 2876415 - RNA, 19 nt, Artificial Sequence
  Description of Artificial Sequence: Synthetic oligonucleotide
caucuguacacugggucgg

SEQ ID NO: 2876416 - RNA, 19 nt, Artificial Sequence
  Description of Artificial Sequence: Synthetic oligonucleotide
ucaugggcaucacauguuu

SEQ ID NO: 2876417 - RNA, 19 nt, Artificial Sequence
  Description of Artificial Sequence: Synthetic oligonucleotide
cccaaaugaaccauggcuc

SEQ ID NO: 2876418 - RNA, 19 nt, Artificial Sequence
  Description of Artificial Sequence: Synthetic oligonucleotide
aucccuacgugauuguuuu

SEQ ID NO: 2876419 - RNA, 19 nt, Artificial Sequence
  Description of Artificial Sequence: Synthetic oligonucleotide
uccccaaaugaaccauggc

SEQ ID NO: 2876420 - RNA, 19 nt, Artificial Sequence
  Description of Artificial Sequence: Synthetic oligonucleotide
acuguccacuccccaaaag

SEQ ID NO: 2876421 - RNA, 19 nt, Artificial Sequence
  Description of Artificial Sequence: Synthetic oligonucleotide
aagaaggaaggcacuuuga

SEQ ID NO: 2876422 - RNA, 19 nt, Artificial Sequence
  Description of Artificial Sequence: Synthetic oligonucleotide
aggguggaaauuguccauc

SEQ ID NO: 2876423 - RNA, 19 nt, Artificial Sequence
  Description of Artificial Sequence: Synthetic oligonucleotide
ucacagaauuaaucuguau

SEQ ID NO: 2876424 - RNA, 19 nt, Artificial Sequence
  Description of Artificial Sequence: Synthetic oligonucleotide
ucaccgggcacuuggaauu

SEQ ID NO: 2876425 - RNA, 19 nt, Artificial Sequence
  Description of Artificial Sequence: Synthetic oligonucleotide
ggcacuuggaauuuccaga

SEQ ID NO: 2876426 - RNA, 19 nt, Artificial Sequence
  Description of Artificial Sequence: Synthetic oligonucleotide
aaucuccagaucugauuuu

SEQ ID NO: 2876427 - RNA, 19 nt, Artificial Sequence
  Description of Artificial Sequence: Synthetic oligonucleotide
uuggaauuuccagaaggua

SEQ ID NO: 2876428 - RNA, 19 nt, Artificial Sequence
  Description of Artificial Sequence: Synthetic oligonucleotide
acagccagccacuggguga

SEQ ID NO: 2876429 - RNA, 19 nt, Artificial Sequence
  Description of Artificial Sequence: Synthetic oligonucleotide
ucuuugggacuaguuuugc

SEQ ID NO: 2876430 - RNA, 19 nt, Artificial Sequence
  Description of Artificial Sequence: Synthetic oligonucleotide
uacaaucaucaccgggcac

SEQ ID NO: 2876431 - RNA, 19 nt, Artificial Sequence
  Description of Artificial Sequence: Synthetic oligonucleotide
auaaagcaacccacgagga

SEQ ID NO: 2876432 - RNA, 19 nt, Artificial Sequence
  Description of Artificial Sequence: Synthetic oligonucleotide
gucagguaaccucugcaca

SEQ ID NO: 2876433 - RNA, 19 nt, Artificial Sequence
  Description of Artificial Sequence: Synthetic oligonucleotide
auguuuucaucuguacacu

SEQ ID NO: 2876434 - RNA, 19 nt, Artificial Sequence
  Description of Artificial Sequence: Synthetic oligonucleotide
caguccagugugagggugg

SEQ ID NO: 2876435 - RNA, 19 nt, Artificial Sequence
  Description of Artificial Sequence: Synthetic oligonucleotide
aucaccgggcacuuggaau

SEQ ID NO: 2876436 - RNA, 19 nt, Artificial Sequence
  Description of Artificial Sequence: Synthetic oligonucleotide
ugggcaucacauguuuuca

SEQ ID NO: 2876437 - RNA, 19 nt, Artificial Sequence
  Description of Artificial Sequence: Synthetic oligonucleotide
aucuuugggacuaguuuug

SEQ ID NO: 2876438 - RNA, 19 nt, Artificial Sequence
  Description of Artificial Sequence: Synthetic oligonucleotide
uuugcaucccuacgugauu

SEQ ID NO: 2876439 - RNA, 19 nt, Artificial Sequence
  Description of Artificial Sequence: Synthetic oligonucleotide
gcacauaauucagucacag

SEQ ID NO: 2876440 - RNA, 19 nt, Artificial Sequence
  Description of Artificial Sequence: Synthetic oligonucleotide
acuuugaaaucccgagcaa

SEQ ID NO: 2876441 - RNA, 19 nt, Artificial Sequence
  Description of Artificial Sequence: Synthetic oligonucleotide
guuuugcaucccuacguga

SEQ ID NO: 2876442 - RNA, 19 nt, Artificial Sequence
  Description of Artificial Sequence: Synthetic oligonucleotide
cuguccacuccccaaaaga

SEQ ID NO: 2876443 - RNA, 19 nt, Artificial Sequence
  Description of Artificial Sequence: Synthetic oligonucleotide
guaaccucugcacauaauu

SEQ ID NO: 2876444 - RNA, 19 nt, Artificial Sequence
  Description of Artificial Sequence: Synthetic oligonucleotide
caacagugcuccgugcucc

SEQ ID NO: 2876445 - RNA, 19 nt, Artificial Sequence
  Description of Artificial Sequence: Synthetic oligonucleotide
cuuggaauuuccagaaggu

SEQ ID NO: 2876446 - RNA, 19 nt, Artificial Sequence
  Description of Artificial Sequence: Synthetic oligonucleotide
aacagccaaaugauguuua

SEQ ID NO: 2876447 - RNA, 19 nt, Artificial Sequence
  Description of Artificial Sequence: Synthetic oligonucleotide
agacacaguccagugugag

SEQ ID NO: 2876448 - RNA, 19 nt, Artificial Sequence
  Description of Artificial Sequence: Synthetic oligonucleotide
cagaagguacuguccacuc

SEQ ID NO: 2876449 - RNA, 19 nt, Artificial Sequence
  Description of Artificial Sequence: Synthetic oligonucleotide
cgauauccccaaaugaacc

SEQ ID NO: 2876450 - RNA, 19 nt, Artificial Sequence
  Description of Artificial Sequence: Synthetic oligonucleotide
uguacacugggucggccuu

SEQ ID NO: 2876451 - RNA, 19 nt, Artificial Sequence
  Description of Artificial Sequence: Synthetic oligonucleotide
ccaaaugauguuuacugga

SEQ ID NO: 2876452 - RNA, 19 nt, Artificial Sequence
  Description of Artificial Sequence: Synthetic oligonucleotide
cacagaauuaaucuguauu

SEQ ID NO: 2876453 - RNA, 19 nt, Artificial Sequence
  Description of Artificial Sequence: Synthetic oligonucleotide
ggaaggcacuuugaaaucc

SEQ ID NO: 2876454 - RNA, 19 nt, Artificial Sequence
  Description of Artificial Sequence: Synthetic oligonucleotide
guuuacuggagcagggaga

SEQ ID NO: 2876455 - RNA, 19 nt, Artificial Sequence
  Description of Artificial Sequence: Synthetic oligonucleotide
gaauuaaucuguauuucuu

SEQ ID NO: 2876456 - RNA, 19 nt, Artificial Sequence
  Description of Artificial Sequence: Synthetic oligonucleotide
cauaauucagucacagaau

SEQ ID NO: 2876457 - RNA, 19 nt, Artificial Sequence
  Description of Artificial Sequence: Synthetic oligonucleotide
ucaucaccgggcacuugga

SEQ ID NO: 2876458 - RNA, 19 nt, Artificial Sequence
  Description of Artificial Sequence: Synthetic oligonucleotide
cuucugcucaucuauuucu

SEQ ID NO: 2876459 - RNA, 19 nt, Artificial Sequence
  Description of Artificial Sequence: Synthetic oligonucleotide
aucuguacacugggucggc

SEQ ID NO: 2876460 - RNA, 19 nt, Artificial Sequence
  Description of Artificial Sequence: Synthetic oligonucleotide
ccacgaggaaagaaggaag

SEQ ID NO: 2876461 - RNA, 19 nt, Artificial Sequence
  Description of Artificial Sequence: Synthetic oligonucleotide
gcacuuugaaaucccgagc

SEQ ID NO: 2876462 - RNA, 19 nt, Artificial Sequence
  Description of Artificial Sequence: Synthetic oligonucleotide
cagauguccgaaaagcacu

SEQ ID NO: 2876463 - RNA, 19 nt, Artificial Sequence
  Description of Artificial Sequence: Synthetic oligonucleotide
gagaccaucuuugggacua

SEQ ID NO: 2876464 - RNA, 19 nt, Artificial Sequence
  Description of Artificial Sequence: Synthetic oligonucleotide
gggcacuuggaauuuccag

SEQ ID NO: 2876465 - RNA, 19 nt, Artificial Sequence
  Description of Artificial Sequence: Synthetic oligonucleotide
augaaccauggcucuccag

SEQ ID NO: 2876466 - RNA, 19 nt, Artificial Sequence
  Description of Artificial Sequence: Synthetic oligonucleotide
cacuuggaauuuccagaag

SEQ ID NO: 2876467 - RNA, 19 nt, Artificial Sequence
  Description of Artificial Sequence: Synthetic oligonucleotide
auauccccaaaugaaccau

SEQ ID NO: 2876468 - RNA, 19 nt, Artificial Sequence
  Description of Artificial Sequence: Synthetic oligonucleotide
cuuugggacuaguuuugca

SEQ ID NO: 2876469 - RNA, 19 nt, Artificial Sequence
  Description of Artificial Sequence: Synthetic oligonucleotide
cacugggugacuucuggga

SEQ ID NO: 2876470 - RNA, 19 nt, Artificial Sequence
  Description of Artificial Sequence: Synthetic oligonucleotide
cacauaauucagucacaga

SEQ ID NO: 2876471 - RNA, 19 nt, Artificial Sequence
  Description of Artificial Sequence: Synthetic oligonucleotide
uacuguccacuccccaaaa

SEQ ID NO: 2876472 - RNA, 19 nt, Artificial Sequence
  Description of Artificial Sequence: Synthetic oligonucleotide
ggcaucacauguuuucauc

SEQ ID NO: 2876473 - RNA, 19 nt, Artificial Sequence
  Description of Artificial Sequence: Synthetic oligonucleotide
cucaaaucuccagaucuga

SEQ ID NO: 2876474 - RNA, 19 nt, Artificial Sequence
  Description of Artificial Sequence: Synthetic oligonucleotide
ucagaucgauauccccaaa

SEQ ID NO: 2876475 - RNA, 19 nt, Artificial Sequence
  Description of Artificial Sequence: Synthetic oligonucleotide
caucuuugggacuaguuuu

SEQ ID NO: 2876476 - RNA, 19 nt, Artificial Sequence
  Description of Artificial Sequence: Synthetic oligonucleotide
aagacacaguccaguguga

SEQ ID NO: 2876477 - RNA, 19 nt, Artificial Sequence
  Description of Artificial Sequence: Synthetic oligonucleotide
ucuguacacugggucggcc

SEQ ID NO: 2876478 - RNA, 19 nt, Artificial Sequence
  Description of Artificial Sequence: Synthetic oligonucleotide
acaguccagugugagggug

SEQ ID NO: 2876479 - RNA, 19 nt, Artificial Sequence
  Description of Artificial Sequence: Synthetic oligonucleotide
auuguccaucuucuuuaaa

SEQ ID NO: 2876480 - RNA, 19 nt, Artificial Sequence
  Description of Artificial Sequence: Synthetic oligonucleotide
aggaaagaaggaaggcacu

SEQ ID NO: 2876481 - RNA, 19 nt, Artificial Sequence
  Description of Artificial Sequence: Synthetic oligonucleotide
ugggugacuucugggaaaa

SEQ ID NO: 2876482 - RNA, 19 nt, Artificial Sequence
  Description of Artificial Sequence: Synthetic oligonucleotide
aucccgagcaacagugcuc

SEQ ID NO: 2876483 - RNA, 19 nt, Artificial Sequence
  Description of Artificial Sequence: Synthetic oligonucleotide
auguuuacuggagcaggga

SEQ ID NO: 2876484 - RNA, 19 nt, Artificial Sequence
  Description of Artificial Sequence: Synthetic oligonucleotide
gagcaacagugcuccgugc

SEQ ID NO: 2876485 - RNA, 19 nt, Artificial Sequence
  Description of Artificial Sequence: Synthetic oligonucleotide
cugcucaucuauuucucaa

SEQ ID NO: 2876486 - RNA, 19 nt, Artificial Sequence
  Description of Artificial Sequence: Synthetic oligonucleotide
gccacugggugacuucugg

SEQ ID NO: 2876487 - RNA, 19 nt, Artificial Sequence
  Description of Artificial Sequence: Synthetic oligonucleotide
ugcaucccuacgugauugu

SEQ ID NO: 2876488 - RNA, 19 nt, Artificial Sequence
  Description of Artificial Sequence: Synthetic oligonucleotide
caaaugaaccauggcucuc

SEQ ID NO: 2876489 - RNA, 19 nt, Artificial Sequence
  Description of Artificial Sequence: Synthetic oligonucleotide
ucccaguuucagaucgaua

SEQ ID NO: 2876490 - RNA, 19 nt, Artificial Sequence
  Description of Artificial Sequence: Synthetic oligonucleotide
ccuucagauguccgaaaag

SEQ ID NO: 2876491 - RNA, 19 nt, Artificial Sequence
  Description of Artificial Sequence: Synthetic oligonucleotide
gcacuuggaauuuccagaa

SEQ ID NO: 2876492 - RNA, 19 nt, Artificial Sequence
  Description of Artificial Sequence: Synthetic oligonucleotide
agguacuguccacucccca

SEQ ID NO: 2876493 - RNA, 19 nt, Artificial Sequence
  Description of Artificial Sequence: Synthetic oligonucleotide
guacuguccacuccccaaa

SEQ ID NO: 2876494 - RNA, 19 nt, Artificial Sequence
  Description of Artificial Sequence: Synthetic oligonucleotide
aaucaucaccgggcacuug

SEQ ID NO: 2876495 - RNA, 19 nt, Artificial Sequence
  Description of Artificial Sequence: Synthetic oligonucleotide
auucagucacagaauuaau

SEQ ID NO: 2876496 - RNA, 19 nt, Artificial Sequence
  Description of Artificial Sequence: Synthetic oligonucleotide
cuucuuuaaacagccaaau

SEQ ID NO: 2876497 - RNA, 19 nt, Artificial Sequence
  Description of Artificial Sequence: Synthetic oligonucleotide
acuccccaaaagaaaugcu

SEQ ID NO: 2876498 - RNA, 19 nt, Artificial Sequence
  Description of Artificial Sequence: Synthetic oligonucleotide
ggaauuuccagaagguacu

SEQ ID NO: 2876499 - RNA, 19 nt, Artificial Sequence
  Description of Artificial Sequence: Synthetic oligonucleotide
cuaagacacaguccagugu

SEQ ID NO: 2876500 - RNA, 19 nt, Artificial Sequence
  Description of Artificial Sequence: Synthetic oligonucleotide
agugcuccgugcucccagu

SEQ ID NO: 2876501 - RNA, 19 nt, Artificial Sequence
  Description of Artificial Sequence: Synthetic oligonucleotide
uccgugcucccaguuucag

SEQ ID NO: 2876502 - RNA, 19 nt, Artificial Sequence
  Description of Artificial Sequence: Synthetic oligonucleotide
caaaucuccagaucugauu

SEQ ID NO: 2876503 - RNA, 19 nt, Artificial Sequence
  Description of Artificial Sequence: Synthetic oligonucleotide
gcaucacauguuuucaucu

SEQ ID NO: 2876504 - RNA, 19 nt, Artificial Sequence
  Description of Artificial Sequence: Synthetic oligonucleotide
gguacuguccacuccccaa

SEQ ID NO: 2876505 - RNA, 19 nt, Artificial Sequence
  Description of Artificial Sequence: Synthetic oligonucleotide
uacacugggucggccuuca

SEQ ID NO: 2876506 - RNA, 19 nt, Artificial Sequence
  Description of Artificial Sequence: Synthetic oligonucleotide
ugcuccgugcucccaguuu

SEQ ID NO: 2876507 - RNA, 19 nt, Artificial Sequence
  Description of Artificial Sequence: Synthetic oligonucleotide
caucuucuuuaaacagcca

SEQ ID NO: 2876508 - RNA, 19 nt, Artificial Sequence
  Description of Artificial Sequence: Synthetic oligonucleotide
cccaguuucagaucgauau

SEQ ID NO: 2876509 - RNA, 19 nt, Artificial Sequence
  Description of Artificial Sequence: Synthetic oligonucleotide
agauguccgaaaagcacua

SEQ ID NO: 2876510 - RNA, 19 nt, Artificial Sequence
  Description of Artificial Sequence: Synthetic oligonucleotide
aggcacuuugaaaucccga

SEQ ID NO: 2876511 - RNA, 19 nt, Artificial Sequence
  Description of Artificial Sequence: Synthetic oligonucleotide
gacuaguuuugcaucccua

SEQ ID NO: 2876512 - RNA, 19 nt, Artificial Sequence
  Description of Artificial Sequence: Synthetic oligonucleotide
gucacagaauuaaucugua

SEQ ID NO: 2876513 - RNA, 19 nt, Artificial Sequence
  Description of Artificial Sequence: Synthetic oligonucleotide
gaaagaaggaaggcacuuu

SEQ ID NO: 2876514 - RNA, 19 nt, Artificial Sequence
  Description of Artificial Sequence: Synthetic oligonucleotide
uuacuggagcagggagacc

SEQ ID NO: 2876515 - RNA, 19 nt, Artificial Sequence
  Description of Artificial Sequence: Synthetic oligonucleotide
cugggugacuucugggaaa

SEQ ID NO: 2876516 - RNA, 19 nt, Artificial Sequence
  Description of Artificial Sequence: Synthetic oligonucleotide
gcuccgugcucccaguuuc

SEQ ID NO: 2876517 - RNA, 19 nt, Artificial Sequence
  Description of Artificial Sequence: Synthetic oligonucleotide
cacugggucggccuucaga

SEQ ID NO: 2876518 - RNA, 19 nt, Artificial Sequence
  Description of Artificial Sequence: Synthetic oligonucleotide
ccacugggugacuucuggg

SEQ ID NO: 2876519 - RNA, 19 nt, Artificial Sequence
  Description of Artificial Sequence: Synthetic oligonucleotide
cagccagccacugggugac

SEQ ID NO: 2876520 - RNA, 19 nt, Artificial Sequence
  Description of Artificial Sequence: Synthetic oligonucleotide
accaucuuugggacuaguu

SEQ ID NO: 2876521 - RNA, 19 nt, Artificial Sequence
  Description of Artificial Sequence: Synthetic oligonucleotide
aguccagugugagggugga

SEQ ID NO: 2876522 - RNA, 19 nt, Artificial Sequence
  Description of Artificial Sequence: Synthetic oligonucleotide
gaggguggaaauuguccau

SEQ ID NO: 2876523 - RNA, 19 nt, Artificial Sequence
  Description of Artificial Sequence: Synthetic oligonucleotide
aucaugggcaucacauguu

SEQ ID NO: 2876524 - RNA, 19 nt, Artificial Sequence
  Description of Artificial Sequence: Synthetic oligonucleotide
gauguccgaaaagcacuaa

SEQ ID NO: 2876525 - RNA, 19 nt, Artificial Sequence
  Description of Artificial Sequence: Synthetic oligonucleotide
ccaguuucagaucgauauc

SEQ ID NO: 2876526 - RNA, 19 nt, Artificial Sequence
  Description of Artificial Sequence: Synthetic oligonucleotide
cugggucggccuucagaug

SEQ ID NO: 2876527 - RNA, 19 nt, Artificial Sequence
  Description of Artificial Sequence: Synthetic oligonucleotide
ccccaaaugaaccauggcu

SEQ ID NO: 2876528 - RNA, 19 nt, Artificial Sequence
  Description of Artificial Sequence: Synthetic oligonucleotide
gaaaugcucuucugcucau

SEQ ID NO: 2876529 - RNA, 19 nt, Artificial Sequence
  Description of Artificial Sequence: Synthetic oligonucleotide
cacuaagacacaguccagu

SEQ ID NO: 2876530 - RNA, 19 nt, Artificial Sequence
  Description of Artificial Sequence: Synthetic oligonucleotide
guccacuccccaaaagaaa

SEQ ID NO: 2876531 - RNA, 19 nt, Artificial Sequence
  Description of Artificial Sequence: Synthetic oligonucleotide
agaccaucuuugggacuag

SEQ ID NO: 2876532 - RNA, 19 nt, Artificial Sequence
  Description of Artificial Sequence: Synthetic oligonucleotide
cagaucgauauccccaaau

SEQ ID NO: 2876533 - RNA, 19 nt, Artificial Sequence
  Description of Artificial Sequence: Synthetic oligonucleotide
gggacuaguuuugcauccc

SEQ ID NO: 2876534 - RNA, 19 nt, Artificial Sequence
  Description of Artificial Sequence: Synthetic oligonucleotide
gcaacagugcuccgugcuc

SEQ ID NO: 2876535 - RNA, 19 nt, Artificial Sequence
  Description of Artificial Sequence: Synthetic oligonucleotide
ccacuccccaaaagaaaug

SEQ ID NO: 2876536 - RNA, 19 nt, Artificial Sequence
  Description of Artificial Sequence: Synthetic oligonucleotide
accgggcacuuggaauuuc

SEQ ID NO: 2876537 - RNA, 19 nt, Artificial Sequence
  Description of Artificial Sequence: Synthetic oligonucleotide
cgagcaacagugcuccgug

SEQ ID NO: 2876538 - RNA, 19 nt, Artificial Sequence
  Description of Artificial Sequence: Synthetic oligonucleotide
gccuucagauguccgaaaa

SEQ ID NO: 2876539 - RNA, 19 nt, Artificial Sequence
  Description of Artificial Sequence: Synthetic oligonucleotide
caguguccucacagccagc

SEQ ID NO: 2876540 - RNA, 19 nt, Artificial Sequence
  Description of Artificial Sequence: Synthetic oligonucleotide
cuguacacugggucggccu

SEQ ID NO: 2876541 - RNA, 19 nt, Artificial Sequence
  Description of Artificial Sequence: Synthetic oligonucleotide
gcucaucuauuucucaaau

SEQ ID NO: 2876542 - RNA, 19 nt, Artificial Sequence
  Description of Artificial Sequence: Synthetic oligonucleotide
caucccuacgugauuguuu

SEQ ID NO: 2876543 - RNA, 19 nt, Artificial Sequence
  Description of Artificial Sequence: Synthetic oligonucleotide
ccaaaugaaccauggcucu

SEQ ID NO: 2876544 - RNA, 19 nt, Artificial Sequence
  Description of Artificial Sequence: Synthetic oligonucleotide
cgaggaaagaaggaaggca

SEQ ID NO: 2876545 - RNA, 19 nt, Artificial Sequence
  Description of Artificial Sequence: Synthetic oligonucleotide
agcaacccacgaggaaaga

SEQ ID NO: 2876546 - RNA, 19 nt, Artificial Sequence
  Description of Artificial Sequence: Synthetic oligonucleotide
gcacuaagacacaguccag

SEQ ID NO: 2876547 - RNA, 19 nt, Artificial Sequence
  Description of Artificial Sequence: Synthetic oligonucleotide
cuggagcagggagaccauc

SEQ ID NO: 2876548 - RNA, 19 nt, Artificial Sequence
  Description of Artificial Sequence: Synthetic oligonucleotide
gugcucccaguuucagauc

SEQ ID NO: 2876549 - RNA, 19 nt, Artificial Sequence
  Description of Artificial Sequence: Synthetic oligonucleotide
caucaccgggcacuuggaa

SEQ ID NO: 2876550 - RNA, 19 nt, Artificial Sequence
  Description of Artificial Sequence: Synthetic oligonucleotide
acacugggucggccuucag

SEQ ID NO: 2876551 - RNA, 19 nt, Artificial Sequence
  Description of Artificial Sequence: Synthetic oligonucleotide
ccucacagccagccacugg

SEQ ID NO: 2876552 - RNA, 19 nt, Artificial Sequence
  Description of Artificial Sequence: Synthetic oligonucleotide
cuccgugcucccaguuuca

SEQ ID NO: 2876553 - RNA, 19 nt, Artificial Sequence
  Description of Artificial Sequence: Synthetic oligonucleotide
guacacugggucggccuuc

SEQ ID NO: 2876554 - RNA, 19 nt, Artificial Sequence
  Description of Artificial Sequence: Synthetic oligonucleotide
ggacuaguuuugcaucccu

SEQ ID NO: 2876555 - RNA, 19 nt, Artificial Sequence
  Description of Artificial Sequence: Synthetic oligonucleotide
cagccaaaugauguuuacu

SEQ ID NO: 2876556 - RNA, 19 nt, Artificial Sequence
  Description of Artificial Sequence: Synthetic oligonucleotide
gcaacccacgaggaaagaa

SEQ ID NO: 2876557 - RNA, 19 nt, Artificial Sequence
  Description of Artificial Sequence: Synthetic oligonucleotide
ggaaagaaggaaggcacuu

SEQ ID NO: 2876558 - RNA, 19 nt, Artificial Sequence
  Description of Artificial Sequence: Synthetic oligonucleotide
ggaaauuguccaucuucuu

SEQ ID NO: 2876559 - RNA, 19 nt, Artificial Sequence
  Description of Artificial Sequence: Synthetic oligonucleotide
cccacgaggaaagaaggaa

SEQ ID NO: 2876560 - RNA, 19 nt, Artificial Sequence
  Description of Artificial Sequence: Synthetic oligonucleotide
ggucggccuucagaugucc

SEQ ID NO: 2876561 - RNA, 19 nt, Artificial Sequence
  Description of Artificial Sequence: Synthetic oligonucleotide
acagugcuccgugcuccca

SEQ ID NO: 2876562 - RNA, 19 nt, Artificial Sequence
  Description of Artificial Sequence: Synthetic oligonucleotide
ccaucuuugggacuaguuu

SEQ ID NO: 2876563 - RNA, 19 nt, Artificial Sequence
  Description of Artificial Sequence: Synthetic oligonucleotide
cagguaaccucugcacaua

SEQ ID NO: 2876564 - RNA, 19 nt, Artificial Sequence
  Description of Artificial Sequence: Synthetic oligonucleotide
ggcucuccaguguccucac

SEQ ID NO: 2876565 - RNA, 19 nt, Artificial Sequence
  Description of Artificial Sequence: Synthetic oligonucleotide
cgaaaagcacuaagacaca

SEQ ID NO: 2876566 - RNA, 19 nt, Artificial Sequence
  Description of Artificial Sequence: Synthetic oligonucleotide
caugggcaucacauguuuu

SEQ ID NO: 2876567 - RNA, 19 nt, Artificial Sequence
  Description of Artificial Sequence: Synthetic oligonucleotide
gugugaggguggaaauugu

SEQ ID NO: 2876568 - RNA, 19 nt, Artificial Sequence
  Description of Artificial Sequence: Synthetic oligonucleotide
cgugcucccaguuucagau

SEQ ID NO: 2876569 - RNA, 19 nt, Artificial Sequence
  Description of Artificial Sequence: Synthetic oligonucleotide
gaccaucuuugggacuagu

SEQ ID NO: 2876570 - RNA, 19 nt, Artificial Sequence
  Description of Artificial Sequence: Synthetic oligonucleotide
ggccuucagauguccgaaa

SEQ ID NO: 2876571 - RNA, 19 nt, Artificial Sequence
  Description of Artificial Sequence: Synthetic oligonucleotide
ggagaccaucuuugggacu

SEQ ID NO: 2876572 - RNA, 19 nt, Artificial Sequence
  Description of Artificial Sequence: Synthetic oligonucleotide
gguggaaauuguccaucuu

SEQ ID NO: 2876573 - RNA, 19 nt, Artificial Sequence
  Description of Artificial Sequence: Synthetic oligonucleotide
gggcaucacauguuuucau

SEQ ID NO: 2876574 - RNA, 19 nt, Artificial Sequence
  Description of Artificial Sequence: Synthetic oligonucleotide
cagccacugggugacuucu

SEQ ID NO: 2876575 - RNA, 19 nt, Artificial Sequence
  Description of Artificial Sequence: Synthetic oligonucleotide
cucccaguuucagaucgau

SEQ ID NO: 2876576 - RNA, 19 nt, Artificial Sequence
  Description of Artificial Sequence: Synthetic oligonucleotide
ccucugcacauaauucagu

SEQ ID NO: 2876577 - RNA, 19 nt, Artificial Sequence
  Description of Artificial Sequence: Synthetic oligonucleotide
ggagcagggagaccaucuu

SEQ ID NO: 2876578 - RNA, 19 nt, Artificial Sequence
  Description of Artificial Sequence: Synthetic oligonucleotide
caaucaucaccgggcacuu

SEQ ID NO: 2876579 - RNA, 19 nt, Artificial Sequence
  Description of Artificial Sequence: Synthetic oligonucleotide
cccgagcaacagugcuccg

SEQ ID NO: 2876580 - RNA, 19 nt, Artificial Sequence
  Description of Artificial Sequence: Synthetic oligonucleotide
cagugugaggguggaaauu

SEQ ID NO: 2876581 - RNA, 19 nt, Artificial Sequence
  Description of Artificial Sequence: Synthetic oligonucleotide
ccagugugaggguggaaau

SEQ ID NO: 2876582 - RNA, 19 nt, Artificial Sequence
  Description of Artificial Sequence: Synthetic oligonucleotide
ccgugcucccaguuucaga

SEQ ID NO: 2876583 - RNA, 19 nt, Artificial Sequence
  Description of Artificial Sequence: Synthetic oligonucleotide
gguaaccucugcacauaau

SEQ ID NO: 2876584 - RNA, 19 nt, Artificial Sequence
  Description of Artificial Sequence: Synthetic oligonucleotide
gcucuccaguguccucaca

SEQ ID NO: 2876585 - RNA, 19 nt, Artificial Sequence
  Description of Artificial Sequence: Synthetic oligonucleotide
gcucccaguuucagaucga

SEQ ID NO: 2876586 - RNA, 19 nt, Artificial Sequence
  Description of Artificial Sequence: Synthetic oligonucleotide
gggucggccuucagauguc

SEQ ID NO: 2876587 - RNA, 19 nt, Artificial Sequence
  Description of Artificial Sequence: Synthetic oligonucleotide
ccccaaaagaaaugcucuu

SEQ ID NO: 2876588 - RNA, 19 nt, Artificial Sequence
  Description of Artificial Sequence: Synthetic oligonucleotide
guccagugugaggguggaa

SEQ ID NO: 2876589 - RNA, 19 nt, Artificial Sequence
  Description of Artificial Sequence: Synthetic oligonucleotide
agccagccacugggugacu

SEQ ID NO: 2876590 - RNA, 19 nt, Artificial Sequence
  Description of Artificial Sequence: Synthetic oligonucleotide
gugcuccgugcucccaguu

SEQ ID NO: 2876591 - RNA, 19 nt, Artificial Sequence
  Description of Artificial Sequence: Synthetic oligonucleotide
ccgagcaacagugcuccgu

SEQ ID NO: 2876592 - RNA, 19 nt, Artificial Sequence
  Description of Artificial Sequence: Synthetic oligonucleotide
gcaucccuacgugauuguu

SEQ ID NO: 2876593 - RNA, 19 nt, Artificial Sequence
  Description of Artificial Sequence: Synthetic oligonucleotide
cggccuucagauguccgaa

SEQ ID NO: 2876594 - RNA, 19 nt, Artificial Sequence
  Description of Artificial Sequence: Synthetic oligonucleotide
caccgggcacuuggaauuu

SEQ ID NO: 2876595 - RNA, 19 nt, Artificial Sequence
  Description of Artificial Sequence: Synthetic oligonucleotide
gccagccacugggugacuu

SEQ ID NO: 2876596 - RNA, 19 nt, Artificial Sequence
  Description of Artificial Sequence: Synthetic oligonucleotide
aauuguaauaugugggguc

SEQ ID NO: 2876597 - RNA, 19 nt, Artificial Sequence
  Description of Artificial Sequence: Synthetic oligonucleotide
uuuguugagcuccagggcg

SEQ ID NO: 2876598 - RNA, 19 nt, Artificial Sequence
  Description of Artificial Sequence: Synthetic oligonucleotide
aagaauuguaauauguggg

SEQ ID NO: 2876599 - RNA, 19 nt, Artificial Sequence
  Description of Artificial Sequence: Synthetic oligonucleotide
acugcuuucauccaagcuc

SEQ ID NO: 2876600 - RNA, 19 nt, Artificial Sequence
  Description of Artificial Sequence: Synthetic oligonucleotide
caagaauuguaauaugugg

SEQ ID NO: 2876601 - RNA, 19 nt, Artificial Sequence
  Description of Artificial Sequence: Synthetic oligonucleotide
agaauuguaauaugugggg

SEQ ID NO: 2876602 - RNA, 19 nt, Artificial Sequence
  Description of Artificial Sequence: Synthetic oligonucleotide
agucagagauuucugaggg

SEQ ID NO: 2876603 - RNA, 19 nt, Artificial Sequence
  Description of Artificial Sequence: Synthetic oligonucleotide
acuucauacucacugucac

SEQ ID NO: 2876604 - RNA, 19 nt, Artificial Sequence
  Description of Artificial Sequence: Synthetic oligonucleotide
gaaggaguucuuuacagac

SEQ ID NO: 2876605 - RNA, 19 nt, Artificial Sequence
  Description of Artificial Sequence: Synthetic oligonucleotide
accagaaucacucucugug

SEQ ID NO: 2876606 - RNA, 19 nt, Artificial Sequence
  Description of Artificial Sequence: Synthetic oligonucleotide
aggaguucuuuacagacag

SEQ ID NO: 2876607 - RNA, 19 nt, Artificial Sequence
  Description of Artificial Sequence: Synthetic oligonucleotide
cuuggugacaucuucauca

SEQ ID NO: 2876608 - RNA, 19 nt, Artificial Sequence
  Description of Artificial Sequence: Synthetic oligonucleotide
aaacugcuuucauccaagc

SEQ ID NO: 2876609 - RNA, 19 nt, Artificial Sequence
  Description of Artificial Sequence: Synthetic oligonucleotide
guuuguguccacuucauac

SEQ ID NO: 2876610 - RNA, 19 nt, Artificial Sequence
  Description of Artificial Sequence: Synthetic oligonucleotide
gaguucuuuacagacagcc

SEQ ID NO: 2876611 - RNA, 19 nt, Artificial Sequence
  Description of Artificial Sequence: Synthetic oligonucleotide
uguggggucacugauguag

SEQ ID NO: 2876612 - RNA, 19 nt, Artificial Sequence
  Description of Artificial Sequence: Synthetic oligonucleotide
aucagaguaguguaggcug

SEQ ID NO: 2876613 - RNA, 19 nt, Artificial Sequence
  Description of Artificial Sequence: Synthetic oligonucleotide
gagucagagauuucugagg

SEQ ID NO: 2876614 - RNA, 19 nt, Artificial Sequence
  Description of Artificial Sequence: Synthetic oligonucleotide
aauauguggggucacugau

SEQ ID NO: 2876615 - RNA, 19 nt, Artificial Sequence
  Description of Artificial Sequence: Synthetic oligonucleotide
gauguagugguugacgaag

SEQ ID NO: 2876616 - RNA, 19 nt, Artificial Sequence
  Description of Artificial Sequence: Synthetic oligonucleotide
aaggagugggcuuucugag

SEQ ID NO: 2876617 - RNA, 19 nt, Artificial Sequence
  Description of Artificial Sequence: Synthetic oligonucleotide
uauguggggucacugaugu

SEQ ID NO: 2876618 - RNA, 19 nt, Artificial Sequence
  Description of Artificial Sequence: Synthetic oligonucleotide
uagugguugacgaaggagu

SEQ ID NO: 2876619 - RNA, 19 nt, Artificial Sequence
  Description of Artificial Sequence: Synthetic oligonucleotide
uucaucagaguaguguagg

SEQ ID NO: 2876620 - RNA, 19 nt, Artificial Sequence
  Description of Artificial Sequence: Synthetic oligonucleotide
guagcuguaggccugggcc

SEQ ID NO: 2876621 - RNA, 19 nt, Artificial Sequence
  Description of Artificial Sequence: Synthetic oligonucleotide
gguuuguugagcuccaggg

SEQ ID NO: 2876622 - RNA, 19 nt, Artificial Sequence
  Description of Artificial Sequence: Synthetic oligonucleotide
auuucugaggguuucucug

SEQ ID NO: 2876623 - RNA, 19 nt, Artificial Sequence
  Description of Artificial Sequence: Synthetic oligonucleotide
uuuguguccacuucauacu

SEQ ID NO: 2876624 - RNA, 19 nt, Artificial Sequence
  Description of Artificial Sequence: Synthetic oligonucleotide
uucccugggagucagagau

SEQ ID NO: 2876625 - RNA, 19 nt, Artificial Sequence
  Description of Artificial Sequence: Synthetic oligonucleotide
auuggggacagugacgugg

SEQ ID NO: 2876626 - RNA, 19 nt, Artificial Sequence
  Description of Artificial Sequence: Synthetic oligonucleotide
cuuucugaggguuuguguc

SEQ ID NO: 2876627 - RNA, 19 nt, Artificial Sequence
  Description of Artificial Sequence: Synthetic oligonucleotide
gacaucuucaucagaguag

SEQ ID NO: 2876628 - RNA, 19 nt, Artificial Sequence
  Description of Artificial Sequence: Synthetic oligonucleotide
aguaguguaggcugcccgg

SEQ ID NO: 2876629 - RNA, 19 nt, Artificial Sequence
  Description of Artificial Sequence: Synthetic oligonucleotide
uucuuuacagacagccgcc

SEQ ID NO: 2876630 - RNA, 19 nt, Artificial Sequence
  Description of Artificial Sequence: Synthetic oligonucleotide
aggucauuguacuugguga

SEQ ID NO: 2876631 - RNA, 19 nt, Artificial Sequence
  Description of Artificial Sequence: Synthetic oligonucleotide
uucaccagaaucacucucu

SEQ ID NO: 2876632 - RNA, 19 nt, Artificial Sequence
  Description of Artificial Sequence: Synthetic oligonucleotide
ugguugacgaaggaguggg

SEQ ID NO: 2876633 - RNA, 19 nt, Artificial Sequence
  Description of Artificial Sequence: Synthetic oligonucleotide
ugcuauuggggacagugac

SEQ ID NO: 2876634 - RNA, 19 nt, Artificial Sequence
  Description of Artificial Sequence: Synthetic oligonucleotide
aguccggcuggccuuaggc

SEQ ID NO: 2876635 - RNA, 19 nt, Artificial Sequence
  Description of Artificial Sequence: Synthetic oligonucleotide
augaggucauuguacuugg

SEQ ID NO: 2876636 - RNA, 19 nt, Artificial Sequence
  Description of Artificial Sequence: Synthetic oligonucleotide
cagaaggaguucuuuacag

SEQ ID NO: 2876637 - RNA, 19 nt, Artificial Sequence
  Description of Artificial Sequence: Synthetic oligonucleotide
ucuucaucagaguagugua

SEQ ID NO: 2876638 - RNA, 19 nt, Artificial Sequence
  Description of Artificial Sequence: Synthetic oligonucleotide
acugauguagugguugacg

SEQ ID NO: 2876639 - RNA, 19 nt, Artificial Sequence
  Description of Artificial Sequence: Synthetic oligonucleotide
guugcuauuggggacagug

SEQ ID NO: 2876640 - RNA, 19 nt, Artificial Sequence
  Description of Artificial Sequence: Synthetic oligonucleotide
ucagcaucucgccauggcc

SEQ ID NO: 2876641 - RNA, 19 nt, Artificial Sequence
  Description of Artificial Sequence: Synthetic oligonucleotide
cuuucauccaagcucagca

SEQ ID NO: 2876642 - RNA, 19 nt, Artificial Sequence
  Description of Artificial Sequence: Synthetic oligonucleotide
aagccauucuuccugcaga

SEQ ID NO: 2876643 - RNA, 19 nt, Artificial Sequence
  Description of Artificial Sequence: Synthetic oligonucleotide
uuuacagacagccgccggu

SEQ ID NO: 2876644 - RNA, 19 nt, Artificial Sequence
  Description of Artificial Sequence: Synthetic oligonucleotide
cauacucacugucacuucc

SEQ ID NO: 2876645 - RNA, 19 nt, Artificial Sequence
  Description of Artificial Sequence: Synthetic oligonucleotide
gaggucauuguacuuggug

SEQ ID NO: 2876646 - RNA, 19 nt, Artificial Sequence
  Description of Artificial Sequence: Synthetic oligonucleotide
ugacaucuucaucagagua

SEQ ID NO: 2876647 - RNA, 19 nt, Artificial Sequence
  Description of Artificial Sequence: Synthetic oligonucleotide
uuucugaggguuugugucc

SEQ ID NO: 2876648 - RNA, 19 nt, Artificial Sequence
  Description of Artificial Sequence: Synthetic oligonucleotide
uaauauguggggucacuga

SEQ ID NO: 2876649 - RNA, 19 nt, Artificial Sequence
  Description of Artificial Sequence: Synthetic oligonucleotide
ugcagaaggaguucuuuac

SEQ ID NO: 2876650 - RNA, 19 nt, Artificial Sequence
  Description of Artificial Sequence: Synthetic oligonucleotide
agaaucacucucuguguag

SEQ ID NO: 2876651 - RNA, 19 nt, Artificial Sequence
  Description of Artificial Sequence: Synthetic oligonucleotide
uuguugagcuccagggcgg

SEQ ID NO: 2876652 - RNA, 19 nt, Artificial Sequence
  Description of Artificial Sequence: Synthetic oligonucleotide
gaguaguguaggcugcccg

SEQ ID NO: 2876653 - RNA, 19 nt, Artificial Sequence
  Description of Artificial Sequence: Synthetic oligonucleotide
uccaagcucagcaucucgc

SEQ ID NO: 2876654 - RNA, 19 nt, Artificial Sequence
  Description of Artificial Sequence: Synthetic oligonucleotide
aacugcuuucauccaagcu

SEQ ID NO: 2876655 - RNA, 19 nt, Artificial Sequence
  Description of Artificial Sequence: Synthetic oligonucleotide
uguacaagccauucuuccu

SEQ ID NO: 2876656 - RNA, 19 nt, Artificial Sequence
  Description of Artificial Sequence: Synthetic oligonucleotide
uccggcuggccuuaggccg

SEQ ID NO: 2876657 - RNA, 19 nt, Artificial Sequence
  Description of Artificial Sequence: Synthetic oligonucleotide
gaaacugcuuucauccaag

SEQ ID NO: 2876658 - RNA, 19 nt, Artificial Sequence
  Description of Artificial Sequence: Synthetic oligonucleotide
gaaggagugggcuuucuga

SEQ ID NO: 2876659 - RNA, 19 nt, Artificial Sequence
  Description of Artificial Sequence: Synthetic oligonucleotide
ggugacaucuucaucagag

SEQ ID NO: 2876660 - RNA, 19 nt, Artificial Sequence
  Description of Artificial Sequence: Synthetic oligonucleotide
ucagaguaguguaggcugc

SEQ ID NO: 2876661 - RNA, 19 nt, Artificial Sequence
  Description of Artificial Sequence: Synthetic oligonucleotide
gaugccuuucugcuggcgc

SEQ ID NO: 2876662 - RNA, 19 nt, Artificial Sequence
  Description of Artificial Sequence: Synthetic oligonucleotide
gacguggucagguucacca

SEQ ID NO: 2876663 - RNA, 19 nt, Artificial Sequence
  Description of Artificial Sequence: Synthetic oligonucleotide
guguacaagccauucuucc

SEQ ID NO: 2876664 - RNA, 19 nt, Artificial Sequence
  Description of Artificial Sequence: Synthetic oligonucleotide
ugguguacaagccauucuu

SEQ ID NO: 2876665 - RNA, 19 nt, Artificial Sequence
  Description of Artificial Sequence: Synthetic oligonucleotide
auuguaauaugugggguca

SEQ ID NO: 2876666 - RNA, 19 nt, Artificial Sequence
  Description of Artificial Sequence: Synthetic oligonucleotide
aucuucaucagaguagugu

SEQ ID NO: 2876667 - RNA, 19 nt, Artificial Sequence
  Description of Artificial Sequence: Synthetic oligonucleotide
uucauccaagcucagcauc

SEQ ID NO: 2876668 - RNA, 19 nt, Artificial Sequence
  Description of Artificial Sequence: Synthetic oligonucleotide
cagcaucucgccauggccg

SEQ ID NO: 2876669 - RNA, 19 nt, Artificial Sequence
  Description of Artificial Sequence: Synthetic oligonucleotide
aaggcugcccugcugggug

SEQ ID NO: 2876670 - RNA, 19 nt, Artificial Sequence
  Description of Artificial Sequence: Synthetic oligonucleotide
ucaucagaguaguguaggc

SEQ ID NO: 2876671 - RNA, 19 nt, Artificial Sequence
  Description of Artificial Sequence: Synthetic oligonucleotide
cuuaggccggaaaaggcug

SEQ ID NO: 2876672 - RNA, 19 nt, Artificial Sequence
  Description of Artificial Sequence: Synthetic oligonucleotide
ucuuccugcagaaggaguu

SEQ ID NO: 2876673 - RNA, 19 nt, Artificial Sequence
  Description of Artificial Sequence: Synthetic oligonucleotide
cuucaucagaguaguguag

SEQ ID NO: 2876674 - RNA, 19 nt, Artificial Sequence
  Description of Artificial Sequence: Synthetic oligonucleotide
uucauacucacugucacuu

SEQ ID NO: 2876675 - RNA, 19 nt, Artificial Sequence
  Description of Artificial Sequence: Synthetic oligonucleotide
agaaggaguucuuuacaga

SEQ ID NO: 2876676 - RNA, 19 nt, Artificial Sequence
  Description of Artificial Sequence: Synthetic oligonucleotide
aaucacucucuguguagcu

SEQ ID NO: 2876677 - RNA, 19 nt, Artificial Sequence
  Description of Artificial Sequence: Synthetic oligonucleotide
agagauuucugaggguuuc

SEQ ID NO: 2876678 - RNA, 19 nt, Artificial Sequence
  Description of Artificial Sequence: Synthetic oligonucleotide
guuuguugagcuccagggc

SEQ ID NO: 2876679 - RNA, 19 nt, Artificial Sequence
  Description of Artificial Sequence: Synthetic oligonucleotide
ggagugggcuuucugaggg

SEQ ID NO: 2876680 - RNA, 19 nt, Artificial Sequence
  Description of Artificial Sequence: Synthetic oligonucleotide
ucugucaggcugcugcucu

SEQ ID NO: 2876681 - RNA, 19 nt, Artificial Sequence
  Description of Artificial Sequence: Synthetic oligonucleotide
ucuuuacagacagccgccg

SEQ ID NO: 2876682 - RNA, 19 nt, Artificial Sequence
  Description of Artificial Sequence: Synthetic oligonucleotide
gaaucacucucuguguagc

SEQ ID NO: 2876683 - RNA, 19 nt, Artificial Sequence
  Description of Artificial Sequence: Synthetic oligonucleotide
ggugcuguugcuauugggg

SEQ ID NO: 2876684 - RNA, 19 nt, Artificial Sequence
  Description of Artificial Sequence: Synthetic oligonucleotide
uguagugguugacgaagga

SEQ ID NO: 2876685 - RNA, 19 nt, Artificial Sequence
  Description of Artificial Sequence: Synthetic oligonucleotide
ucacucucuguguagcugu

SEQ ID NO: 2876686 - RNA, 19 nt, Artificial Sequence
  Description of Artificial Sequence: Synthetic oligonucleotide
acagccgccgguuuguuga

SEQ ID NO: 2876687 - RNA, 19 nt, Artificial Sequence
  Description of Artificial Sequence: Synthetic oligonucleotide
ggagucagagauuucugag

SEQ ID NO: 2876688 - RNA, 19 nt, Artificial Sequence
  Description of Artificial Sequence: Synthetic oligonucleotide
cucuguguagcuguaggcc

SEQ ID NO: 2876689 - RNA, 19 nt, Artificial Sequence
  Description of Artificial Sequence: Synthetic oligonucleotide
uacaagccauucuuccugc

SEQ ID NO: 2876690 - RNA, 19 nt, Artificial Sequence
  Description of Artificial Sequence: Synthetic oligonucleotide
aguucuuuacagacagccg

SEQ ID NO: 2876691 - RNA, 19 nt, Artificial Sequence
  Description of Artificial Sequence: Synthetic oligonucleotide
uguagcuguaggccugggc

SEQ ID NO: 2876692 - RNA, 19 nt, Artificial Sequence
  Description of Artificial Sequence: Synthetic oligonucleotide
uguguccacuucauacuca

SEQ ID NO: 2876693 - RNA, 19 nt, Artificial Sequence
  Description of Artificial Sequence: Synthetic oligonucleotide
acaucuucaucagaguagu

SEQ ID NO: 2876694 - RNA, 19 nt, Artificial Sequence
  Description of Artificial Sequence: Synthetic oligonucleotide
ugaggguuucucugucagg

SEQ ID NO: 2876695 - RNA, 19 nt, Artificial Sequence
  Description of Artificial Sequence: Synthetic oligonucleotide
aggguuuguguccacuuca

SEQ ID NO: 2876696 - RNA, 19 nt, Artificial Sequence
  Description of Artificial Sequence: Synthetic oligonucleotide
guagugguugacgaaggag

SEQ ID NO: 2876697 - RNA, 19 nt, Artificial Sequence
  Description of Artificial Sequence: Synthetic oligonucleotide
gucacugauguagugguug

SEQ ID NO: 2876698 - RNA, 19 nt, Artificial Sequence
  Description of Artificial Sequence: Synthetic oligonucleotide
ucacugucacuucccuggg

SEQ ID NO: 2876699 - RNA, 19 nt, Artificial Sequence
  Description of Artificial Sequence: Synthetic oligonucleotide
auacucacugucacuuccc

SEQ ID NO: 2876700 - RNA, 19 nt, Artificial Sequence
  Description of Artificial Sequence: Synthetic oligonucleotide
ugggagucagagauuucug

SEQ ID NO: 2876701 - RNA, 19 nt, Artificial Sequence
  Description of Artificial Sequence: Synthetic oligonucleotide
uuaggccggaaaaggcugc

SEQ ID NO: 2876702 - RNA, 19 nt, Artificial Sequence
  Description of Artificial Sequence: Synthetic oligonucleotide
ucacugauguagugguuga

SEQ ID NO: 2876703 - RNA, 19 nt, Artificial Sequence
  Description of Artificial Sequence: Synthetic oligonucleotide
ccaagaauuguaauaugug

SEQ ID NO: 2876704 - RNA, 19 nt, Artificial Sequence
  Description of Artificial Sequence: Synthetic oligonucleotide
cuuuacagacagccgccgg

SEQ ID NO: 2876705 - RNA, 19 nt, Artificial Sequence
  Description of Artificial Sequence: Synthetic oligonucleotide
guaauauguggggucacug

SEQ ID NO: 2876706 - RNA, 19 nt, Artificial Sequence
  Description of Artificial Sequence: Synthetic oligonucleotide
aggagugggcuuucugagg

SEQ ID NO: 2876707 - RNA, 19 nt, Artificial Sequence
  Description of Artificial Sequence: Synthetic oligonucleotide
agauuucugaggguuucuc

SEQ ID NO: 2876708 - RNA, 19 nt, Artificial Sequence
  Description of Artificial Sequence: Synthetic oligonucleotide
cugaggguuucucugucag

SEQ ID NO: 2876709 - RNA, 19 nt, Artificial Sequence
  Description of Artificial Sequence: Synthetic oligonucleotide
uucuuccugcagaaggagu

SEQ ID NO: 2876710 - RNA, 19 nt, Artificial Sequence
  Description of Artificial Sequence: Synthetic oligonucleotide
uugcuauuggggacaguga

SEQ ID NO: 2876711 - RNA, 19 nt, Artificial Sequence
  Description of Artificial Sequence: Synthetic oligonucleotide
gagagaugccuuucugcug

SEQ ID NO: 2876712 - RNA, 19 nt, Artificial Sequence
  Description of Artificial Sequence: Synthetic oligonucleotide
cugcuuucauccaagcuca

SEQ ID NO: 2876713 - RNA, 19 nt, Artificial Sequence
  Description of Artificial Sequence: Synthetic oligonucleotide
uguaauauguggggucacu

SEQ ID NO: 2876714 - RNA, 19 nt, Artificial Sequence
  Description of Artificial Sequence: Synthetic oligonucleotide
cugauguagugguugacga

SEQ ID NO: 2876715 - RNA, 19 nt, Artificial Sequence
  Description of Artificial Sequence: Synthetic oligonucleotide
agaguaguguaggcugccc

SEQ ID NO: 2876716 - RNA, 19 nt, Artificial Sequence
  Description of Artificial Sequence: Synthetic oligonucleotide
ucauuguacuuggugacau

SEQ ID NO: 2876717 - RNA, 19 nt, Artificial Sequence
  Description of Artificial Sequence: Synthetic oligonucleotide
uacuuggugacaucuucau

SEQ ID NO: 2876718 - RNA, 19 nt, Artificial Sequence
  Description of Artificial Sequence: Synthetic oligonucleotide
uuucauccaagcucagcau

SEQ ID NO: 2876719 - RNA, 19 nt, Artificial Sequence
  Description of Artificial Sequence: Synthetic oligonucleotide
cgggaaacugcuuucaucc

SEQ ID NO: 2876720 - RNA, 19 nt, Artificial Sequence
  Description of Artificial Sequence: Synthetic oligonucleotide
uccagggcgggaaacugcu

SEQ ID NO: 2876721 - RNA, 19 nt, Artificial Sequence
  Description of Artificial Sequence: Synthetic oligonucleotide
ugauguagugguugacgaa

SEQ ID NO: 2876722 - RNA, 19 nt, Artificial Sequence
  Description of Artificial Sequence: Synthetic oligonucleotide
cauucuuccugcagaagga

SEQ ID NO: 2876723 - RNA, 19 nt, Artificial Sequence
  Description of Artificial Sequence: Synthetic oligonucleotide
ugcuguugcuauuggggac

SEQ ID NO: 2876724 - RNA, 19 nt, Artificial Sequence
  Description of Artificial Sequence: Synthetic oligonucleotide
uagcuguaggccugggccc

SEQ ID NO: 2876725 - RNA, 19 nt, Artificial Sequence
  Description of Artificial Sequence: Synthetic oligonucleotide
ucugaggguuucucuguca

SEQ ID NO: 2876726 - RNA, 19 nt, Artificial Sequence
  Description of Artificial Sequence: Synthetic oligonucleotide
ugggugcuguugcuauugg

SEQ ID NO: 2876727 - RNA, 19 nt, Artificial Sequence
  Description of Artificial Sequence: Synthetic oligonucleotide
uacucacugucacuucccu

SEQ ID NO: 2876728 - RNA, 19 nt, Artificial Sequence
  Description of Artificial Sequence: Synthetic oligonucleotide
guaggccugggcccgagag

SEQ ID NO: 2876729 - RNA, 19 nt, Artificial Sequence
  Description of Artificial Sequence: Synthetic oligonucleotide
ggucauuguacuuggugac

SEQ ID NO: 2876730 - RNA, 19 nt, Artificial Sequence
  Description of Artificial Sequence: Synthetic oligonucleotide
auguagugguugacgaagg

SEQ ID NO: 2876731 - RNA, 19 nt, Artificial Sequence
  Description of Artificial Sequence: Synthetic oligonucleotide
agggcgggaaacugcuuuc

SEQ ID NO: 2876732 - RNA, 19 nt, Artificial Sequence
  Description of Artificial Sequence: Synthetic oligonucleotide
ugucacuucccugggaguc

SEQ ID NO: 2876733 - RNA, 19 nt, Artificial Sequence
  Description of Artificial Sequence: Synthetic oligonucleotide
ucugcuggcgccgccaaga

SEQ ID NO: 2876734 - RNA, 19 nt, Artificial Sequence
  Description of Artificial Sequence: Synthetic oligonucleotide
acagacagccgccgguuug

SEQ ID NO: 2876735 - RNA, 19 nt, Artificial Sequence
  Description of Artificial Sequence: Synthetic oligonucleotide
uuggggacagugacguggu

SEQ ID NO: 2876736 - RNA, 19 nt, Artificial Sequence
  Description of Artificial Sequence: Synthetic oligonucleotide
aggcugcccggacugggcc

SEQ ID NO: 2876737 - RNA, 19 nt, Artificial Sequence
  Description of Artificial Sequence: Synthetic oligonucleotide
ggucagguucaccagaauc

SEQ ID NO: 2876738 - RNA, 19 nt, Artificial Sequence
  Description of Artificial Sequence: Synthetic oligonucleotide
guucaccagaaucacucuc

SEQ ID NO: 2876739 - RNA, 19 nt, Artificial Sequence
  Description of Artificial Sequence: Synthetic oligonucleotide
agugguugacgaaggagug

SEQ ID NO: 2876740 - RNA, 19 nt, Artificial Sequence
  Description of Artificial Sequence: Synthetic oligonucleotide
aguguaggcugcccggacu

SEQ ID NO: 2876741 - RNA, 19 nt, Artificial Sequence
  Description of Artificial Sequence: Synthetic oligonucleotide
gggacagugacguggucag

SEQ ID NO: 2876742 - RNA, 19 nt, Artificial Sequence
  Description of Artificial Sequence: Synthetic oligonucleotide
uucugaggguuucucuguc

SEQ ID NO: 2876743 - RNA, 19 nt, Artificial Sequence
  Description of Artificial Sequence: Synthetic oligonucleotide
uggccuuaggccggaaaag

SEQ ID NO: 2876744 - RNA, 19 nt, Artificial Sequence
  Description of Artificial Sequence: Synthetic oligonucleotide
gaauuguaauauguggggu

SEQ ID NO: 2876745 - RNA, 19 nt, Artificial Sequence
  Description of Artificial Sequence: Synthetic oligonucleotide
uugacgaaggagugggcuu

SEQ ID NO: 2876746 - RNA, 19 nt, Artificial Sequence
  Description of Artificial Sequence: Synthetic oligonucleotide
cucagcaucucgccauggc

SEQ ID NO: 2876747 - RNA, 19 nt, Artificial Sequence
  Description of Artificial Sequence: Synthetic oligonucleotide
agugacguggucagguuca

SEQ ID NO: 2876748 - RNA, 19 nt, Artificial Sequence
  Description of Artificial Sequence: Synthetic oligonucleotide
acucacugucacuucccug

SEQ ID NO: 2876749 - RNA, 19 nt, Artificial Sequence
  Description of Artificial Sequence: Synthetic oligonucleotide
ucauacucacugucacuuc

SEQ ID NO: 2876750 - RNA, 19 nt, Artificial Sequence
  Description of Artificial Sequence: Synthetic oligonucleotide
ugaggguuuguguccacuu

SEQ ID NO: 2876751 - RNA, 19 nt, Artificial Sequence
  Description of Artificial Sequence: Synthetic oligonucleotide
uucugaggguuugugucca

SEQ ID NO: 2876752 - RNA, 19 nt, Artificial Sequence
  Description of Artificial Sequence: Synthetic oligonucleotide
gaggguuuguguccacuuc

SEQ ID NO: 2876753 - RNA, 19 nt, Artificial Sequence
  Description of Artificial Sequence: Synthetic oligonucleotide
uguugagcuccagggcggg

SEQ ID NO: 2876754 - RNA, 19 nt, Artificial Sequence
  Description of Artificial Sequence: Synthetic oligonucleotide
gugguugacgaaggagugg

SEQ ID NO: 2876755 - RNA, 19 nt, Artificial Sequence
  Description of Artificial Sequence: Synthetic oligonucleotide
guguaggcugcccggacug

SEQ ID NO: 2876756 - RNA, 19 nt, Artificial Sequence
  Description of Artificial Sequence: Synthetic oligonucleotide
aucacucucuguguagcug

SEQ ID NO: 2876757 - RNA, 19 nt, Artificial Sequence
  Description of Artificial Sequence: Synthetic oligonucleotide
gugcuguugcuauugggga

SEQ ID NO: 2876758 - RNA, 19 nt, Artificial Sequence
  Description of Artificial Sequence: Synthetic oligonucleotide
ggguuucucugucaggcug

SEQ ID NO: 2876759 - RNA, 19 nt, Artificial Sequence
  Description of Artificial Sequence: Synthetic oligonucleotide
ggcugcugcucucagccgg

SEQ ID NO: 2876760 - RNA, 19 nt, Artificial Sequence
  Description of Artificial Sequence: Synthetic oligonucleotide
acguggucagguucaccag

SEQ ID NO: 2876761 - RNA, 19 nt, Artificial Sequence
  Description of Artificial Sequence: Synthetic oligonucleotide
uggggucacugauguagug

SEQ ID NO: 2876762 - RNA, 19 nt, Artificial Sequence
  Description of Artificial Sequence: Synthetic oligonucleotide
gcuauuggggacagugacg

SEQ ID NO: 2876763 - RNA, 19 nt, Artificial Sequence
  Description of Artificial Sequence: Synthetic oligonucleotide
ggggucacugauguagugg

SEQ ID NO: 2876764 - RNA, 19 nt, Artificial Sequence
  Description of Artificial Sequence: Synthetic oligonucleotide
agccauucuuccugcagaa

SEQ ID NO: 2876765 - RNA, 19 nt, Artificial Sequence
  Description of Artificial Sequence: Synthetic oligonucleotide
cuccagggcgggaaacugc

SEQ ID NO: 2876766 - RNA, 19 nt, Artificial Sequence
  Description of Artificial Sequence: Synthetic oligonucleotide
ggggaccugguguacaagc

SEQ ID NO: 2876767 - RNA, 19 nt, Artificial Sequence
  Description of Artificial Sequence: Synthetic oligonucleotide
ugcugggugcuguugcuau

SEQ ID NO: 2876768 - RNA, 19 nt, Artificial Sequence
  Description of Artificial Sequence: Synthetic oligonucleotide
agcaucucgccauggccga

SEQ ID NO: 2876769 - RNA, 19 nt, Artificial Sequence
  Description of Artificial Sequence: Synthetic oligonucleotide
uaguguaggcugcccggac

SEQ ID NO: 2876770 - RNA, 19 nt, Artificial Sequence
  Description of Artificial Sequence: Synthetic oligonucleotide
uguccacuucauacucacu

SEQ ID NO: 2876771 - RNA, 19 nt, Artificial Sequence
  Description of Artificial Sequence: Synthetic oligonucleotide
ugcuuucauccaagcucag

SEQ ID NO: 2876772 - RNA, 19 nt, Artificial Sequence
  Description of Artificial Sequence: Synthetic oligonucleotide
cauuguacuuggugacauc

SEQ ID NO: 2876773 - RNA, 19 nt, Artificial Sequence
  Description of Artificial Sequence: Synthetic oligonucleotide
ugaggucauuguacuuggu

SEQ ID NO: 2876774 - RNA, 19 nt, Artificial Sequence
  Description of Artificial Sequence: Synthetic oligonucleotide
uaggcugcccggacugggc

SEQ ID NO: 2876775 - RNA, 19 nt, Artificial Sequence
  Description of Artificial Sequence: Synthetic oligonucleotide
ucacuucccugggagucag

SEQ ID NO: 2876776 - RNA, 19 nt, Artificial Sequence
  Description of Artificial Sequence: Synthetic oligonucleotide
aaaggcugcccugcugggu

SEQ ID NO: 2876777 - RNA, 19 nt, Artificial Sequence
  Description of Artificial Sequence: Synthetic oligonucleotide
uuguaauauguggggucac

SEQ ID NO: 2876778 - RNA, 19 nt, Artificial Sequence
  Description of Artificial Sequence: Synthetic oligonucleotide
ucagccgggaugaggucau

SEQ ID NO: 2876779 - RNA, 19 nt, Artificial Sequence
  Description of Artificial Sequence: Synthetic oligonucleotide
agcuguaggccugggcccg

SEQ ID NO: 2876780 - RNA, 19 nt, Artificial Sequence
  Description of Artificial Sequence: Synthetic oligonucleotide
guacuuggugacaucuuca

SEQ ID NO: 2876781 - RNA, 19 nt, Artificial Sequence
  Description of Artificial Sequence: Synthetic oligonucleotide
cuauuggggacagugacgu

SEQ ID NO: 2876782 - RNA, 19 nt, Artificial Sequence
  Description of Artificial Sequence: Synthetic oligonucleotide
ggccuuaggccggaaaagg

SEQ ID NO: 2876783 - RNA, 19 nt, Artificial Sequence
  Description of Artificial Sequence: Synthetic oligonucleotide
uaggccugggcccgagaga

SEQ ID NO: 2876784 - RNA, 19 nt, Artificial Sequence
  Description of Artificial Sequence: Synthetic oligonucleotide
cugggugcuguugcuauug

SEQ ID NO: 2876785 - RNA, 19 nt, Artificial Sequence
  Description of Artificial Sequence: Synthetic oligonucleotide
ccgagagaugccuuucugc

SEQ ID NO: 2876786 - RNA, 19 nt, Artificial Sequence
  Description of Artificial Sequence: Synthetic oligonucleotide
aggcugcccugcugggugc

SEQ ID NO: 2876787 - RNA, 19 nt, Artificial Sequence
  Description of Artificial Sequence: Synthetic oligonucleotide
ggcguuggaguccggcugg

SEQ ID NO: 2876788 - RNA, 19 nt, Artificial Sequence
  Description of Artificial Sequence: Synthetic oligonucleotide
ugggaggggaccuggugua

SEQ ID NO: 2876789 - RNA, 19 nt, Artificial Sequence
  Description of Artificial Sequence: Synthetic oligonucleotide
aggguuucucugucaggcu

SEQ ID NO: 2876790 - RNA, 19 nt, Artificial Sequence
  Description of Artificial Sequence: Synthetic oligonucleotide
uugagcuccagggcgggaa

SEQ ID NO: 2876791 - RNA, 19 nt, Artificial Sequence
  Description of Artificial Sequence: Synthetic oligonucleotide
cagugacguggucagguuc

SEQ ID NO: 2876792 - RNA, 19 nt, Artificial Sequence
  Description of Artificial Sequence: Synthetic oligonucleotide
gggugcuguugcuauuggg

SEQ ID NO: 2876793 - RNA, 19 nt, Artificial Sequence
  Description of Artificial Sequence: Synthetic oligonucleotide
gacagugacguggucaggu

SEQ ID NO: 2876794 - RNA, 19 nt, Artificial Sequence
  Description of Artificial Sequence: Synthetic oligonucleotide
gggagucagagauuucuga

SEQ ID NO: 2876795 - RNA, 19 nt, Artificial Sequence
  Description of Artificial Sequence: Synthetic oligonucleotide
guccggcuggccuuaggcc

SEQ ID NO: 2876796 - RNA, 19 nt, Artificial Sequence
  Description of Artificial Sequence: Synthetic oligonucleotide
caucuucaucagaguagug

SEQ ID NO: 2876797 - RNA, 19 nt, Artificial Sequence
  Description of Artificial Sequence: Synthetic oligonucleotide
guaggcugcccggacuggg

SEQ ID NO: 2876798 - RNA, 19 nt, Artificial Sequence
  Description of Artificial Sequence: Synthetic oligonucleotide
agcucagcaucucgccaug

SEQ ID NO: 2876799 - RNA, 19 nt, Artificial Sequence
  Description of Artificial Sequence: Synthetic oligonucleotide
gcugcucucagccgggaug

SEQ ID NO: 2876800 - RNA, 19 nt, Artificial Sequence
  Description of Artificial Sequence: Synthetic oligonucleotide
gcagaaggaguucuuuaca

SEQ ID NO: 2876801 - RNA, 19 nt, Artificial Sequence
  Description of Artificial Sequence: Synthetic oligonucleotide
ugagcuccagggcgggaaa

SEQ ID NO: 2876802 - RNA, 19 nt, Artificial Sequence
  Description of Artificial Sequence: Synthetic oligonucleotide
ugacgaaggagugggcuuu

SEQ ID NO: 2876803 - RNA, 19 nt, Artificial Sequence
  Description of Artificial Sequence: Synthetic oligonucleotide
ccaagcucagcaucucgcc

SEQ ID NO: 2876804 - RNA, 19 nt, Artificial Sequence
  Description of Artificial Sequence: Synthetic oligonucleotide
acaagccauucuuccugca

SEQ ID NO: 2876805 - RNA, 19 nt, Artificial Sequence
  Description of Artificial Sequence: Synthetic oligonucleotide
cagaguaguguaggcugcc

SEQ ID NO: 2876806 - RNA, 19 nt, Artificial Sequence
  Description of Artificial Sequence: Synthetic oligonucleotide
gacagccgccgguuuguug

SEQ ID NO: 2876807 - RNA, 19 nt, Artificial Sequence
  Description of Artificial Sequence: Synthetic oligonucleotide
cucucagccgggaugaggu

SEQ ID NO: 2876808 - RNA, 19 nt, Artificial Sequence
  Description of Artificial Sequence: Synthetic oligonucleotide
uuucugcuggcgccgccaa

SEQ ID NO: 2876809 - RNA, 19 nt, Artificial Sequence
  Description of Artificial Sequence: Synthetic oligonucleotide
uuacagacagccgccgguu

SEQ ID NO: 2876810 - RNA, 19 nt, Artificial Sequence
  Description of Artificial Sequence: Synthetic oligonucleotide
agaugccuuucugcuggcg

SEQ ID NO: 2876811 - RNA, 19 nt, Artificial Sequence
  Description of Artificial Sequence: Synthetic oligonucleotide
aggccggaaaaggcugccc

SEQ ID NO: 2876812 - RNA, 19 nt, Artificial Sequence
  Description of Artificial Sequence: Synthetic oligonucleotide
uuggaguccggcuggccuu

SEQ ID NO: 2876813 - RNA, 19 nt, Artificial Sequence
  Description of Artificial Sequence: Synthetic oligonucleotide
ugucaggcugcugcucuca

SEQ ID NO: 2876814 - RNA, 19 nt, Artificial Sequence
  Description of Artificial Sequence: Synthetic oligonucleotide
gucauuguacuuggugaca

SEQ ID NO: 2876815 - RNA, 19 nt, Artificial Sequence
  Description of Artificial Sequence: Synthetic oligonucleotide
cuggccuuaggccggaaaa

SEQ ID NO: 2876816 - RNA, 19 nt, Artificial Sequence
  Description of Artificial Sequence: Synthetic oligonucleotide
caagcucagcaucucgcca

SEQ ID NO: 2876817 - RNA, 19 nt, Artificial Sequence
  Description of Artificial Sequence: Synthetic oligonucleotide
uucugcuggcgccgccaag

SEQ ID NO: 2876818 - RNA, 19 nt, Artificial Sequence
  Description of Artificial Sequence: Synthetic oligonucleotide
acucucuguguagcuguag

SEQ ID NO: 2876819 - RNA, 19 nt, Artificial Sequence
  Description of Artificial Sequence: Synthetic oligonucleotide
gagaugccuuucugcuggc

SEQ ID NO: 2876820 - RNA, 19 nt, Artificial Sequence
  Description of Artificial Sequence: Synthetic oligonucleotide
guugacgaaggagugggcu

SEQ ID NO: 2876821 - RNA, 19 nt, Artificial Sequence
  Description of Artificial Sequence: Synthetic oligonucleotide
cagaaucacucucugugua

SEQ ID NO: 2876822 - RNA, 19 nt, Artificial Sequence
  Description of Artificial Sequence: Synthetic oligonucleotide
guuggaguccggcuggccu

SEQ ID NO: 2876823 - RNA, 19 nt, Artificial Sequence
  Description of Artificial Sequence: Synthetic oligonucleotide
uaggccggaaaaggcugcc

SEQ ID NO: 2876824 - RNA, 19 nt, Artificial Sequence
  Description of Artificial Sequence: Synthetic oligonucleotide
cuuccugcagaaggaguuc

SEQ ID NO: 2876825 - RNA, 19 nt, Artificial Sequence
  Description of Artificial Sequence: Synthetic oligonucleotide
acagugacguggucagguu

SEQ ID NO: 2876826 - RNA, 19 nt, Artificial Sequence
  Description of Artificial Sequence: Synthetic oligonucleotide
gaguccggcuggccuuagg

SEQ ID NO: 2876827 - RNA, 19 nt, Artificial Sequence
  Description of Artificial Sequence: Synthetic oligonucleotide
gccaagaauuguaauaugu

SEQ ID NO: 2876828 - RNA, 19 nt, Artificial Sequence
  Description of Artificial Sequence: Synthetic oligonucleotide
uguaggccugggcccgaga

SEQ ID NO: 2876829 - RNA, 19 nt, Artificial Sequence
  Description of Artificial Sequence: Synthetic oligonucleotide
gguguacaagccauucuuc

SEQ ID NO: 2876830 - RNA, 19 nt, Artificial Sequence
  Description of Artificial Sequence: Synthetic oligonucleotide
ggaccugguguacaagcca

SEQ ID NO: 2876831 - RNA, 19 nt, Artificial Sequence
  Description of Artificial Sequence: Synthetic oligonucleotide
ucugaggguuuguguccac

SEQ ID NO: 2876832 - RNA, 19 nt, Artificial Sequence
  Description of Artificial Sequence: Synthetic oligonucleotide
cgggaugaggucauuguac

SEQ ID NO: 2876833 - RNA, 19 nt, Artificial Sequence
  Description of Artificial Sequence: Synthetic oligonucleotide
aggccugggcccgagagau

SEQ ID NO: 2876834 - RNA, 19 nt, Artificial Sequence
  Description of Artificial Sequence: Synthetic oligonucleotide
uggucagguucaccagaau

SEQ ID NO: 2876835 - RNA, 19 nt, Artificial Sequence
  Description of Artificial Sequence: Synthetic oligonucleotide
cugcagaaggaguucuuua

SEQ ID NO: 2876836 - RNA, 19 nt, Artificial Sequence
  Description of Artificial Sequence: Synthetic oligonucleotide
gaggggaccugguguacaa

SEQ ID NO: 2876837 - RNA, 19 nt, Artificial Sequence
  Description of Artificial Sequence: Synthetic oligonucleotide
cugggagucagagauuucu

SEQ ID NO: 2876838 - RNA, 19 nt, Artificial Sequence
  Description of Artificial Sequence: Synthetic oligonucleotide
ugacguggucagguucacc

SEQ ID NO: 2876839 - RNA, 19 nt, Artificial Sequence
  Description of Artificial Sequence: Synthetic oligonucleotide
gccgccaagaauuguaaua

SEQ ID NO: 2876840 - RNA, 19 nt, Artificial Sequence
  Description of Artificial Sequence: Synthetic oligonucleotide
gugacaucuucaucagagu

SEQ ID NO: 2876841 - RNA, 19 nt, Artificial Sequence
  Description of Artificial Sequence: Synthetic oligonucleotide
gggaugaggucauuguacu

SEQ ID NO: 2876842 - RNA, 19 nt, Artificial Sequence
  Description of Artificial Sequence: Synthetic oligonucleotide
cuucauacucacugucacu

SEQ ID NO: 2876843 - RNA, 19 nt, Artificial Sequence
  Description of Artificial Sequence: Synthetic oligonucleotide
agugggcuuucugaggguu

SEQ ID NO: 2876844 - RNA, 19 nt, Artificial Sequence
  Description of Artificial Sequence: Synthetic oligonucleotide
cuggcgccgccaagaauug

SEQ ID NO: 2876845 - RNA, 19 nt, Artificial Sequence
  Description of Artificial Sequence: Synthetic oligonucleotide
guaguguaggcugcccgga

SEQ ID NO: 2876846 - RNA, 19 nt, Artificial Sequence
  Description of Artificial Sequence: Synthetic oligonucleotide
ccacuucauacucacuguc

SEQ ID NO: 2876847 - RNA, 19 nt, Artificial Sequence
  Description of Artificial Sequence: Synthetic oligonucleotide
cacugauguagugguugac

SEQ ID NO: 2876848 - RNA, 19 nt, Artificial Sequence
  Description of Artificial Sequence: Synthetic oligonucleotide
gggcguuggaguccggcug

SEQ ID NO: 2876849 - RNA, 19 nt, Artificial Sequence
  Description of Artificial Sequence: Synthetic oligonucleotide
cuguugcuauuggggacag

SEQ ID NO: 2876850 - RNA, 19 nt, Artificial Sequence
  Description of Artificial Sequence: Synthetic oligonucleotide
gggaccugguguacaagcc

SEQ ID NO: 2876851 - RNA, 19 nt, Artificial Sequence
  Description of Artificial Sequence: Synthetic oligonucleotide
cucagccgggaugagguca

SEQ ID NO: 2876852 - RNA, 19 nt, Artificial Sequence
  Description of Artificial Sequence: Synthetic oligonucleotide
gcuuucauccaagcucagc

SEQ ID NO: 2876853 - RNA, 19 nt, Artificial Sequence
  Description of Artificial Sequence: Synthetic oligonucleotide
caucagaguaguguaggcu

SEQ ID NO: 2876854 - RNA, 19 nt, Artificial Sequence
  Description of Artificial Sequence: Synthetic oligonucleotide
gcuguugcuauuggggaca

SEQ ID NO: 2876855 - RNA, 19 nt, Artificial Sequence
  Description of Artificial Sequence: Synthetic oligonucleotide
gcgggaaacugcuuucauc

SEQ ID NO: 2876856 - RNA, 19 nt, Artificial Sequence
  Description of Artificial Sequence: Synthetic oligonucleotide
ucucagccgggaugagguc

SEQ ID NO: 2876857 - RNA, 19 nt, Artificial Sequence
  Description of Artificial Sequence: Synthetic oligonucleotide
gggucacugauguaguggu

SEQ ID NO: 2876858 - RNA, 19 nt, Artificial Sequence
  Description of Artificial Sequence: Synthetic oligonucleotide
agcuccagggcgggaaacu

SEQ ID NO: 2876859 - RNA, 19 nt, Artificial Sequence
  Description of Artificial Sequence: Synthetic oligonucleotide
cuucccugggagucagaga

SEQ ID NO: 2876860 - RNA, 19 nt, Artificial Sequence
  Description of Artificial Sequence: Synthetic oligonucleotide
ugcugcucucagccgggau

SEQ ID NO: 2876861 - RNA, 19 nt, Artificial Sequence
  Description of Artificial Sequence: Synthetic oligonucleotide
cauccaagcucagcaucuc

SEQ ID NO: 2876862 - RNA, 19 nt, Artificial Sequence
  Description of Artificial Sequence: Synthetic oligonucleotide
gccuuaggccggaaaaggc

SEQ ID NO: 2876863 - RNA, 19 nt, Artificial Sequence
  Description of Artificial Sequence: Synthetic oligonucleotide
ggggacagugacgugguca

SEQ ID NO: 2876864 - RNA, 19 nt, Artificial Sequence
  Description of Artificial Sequence: Synthetic oligonucleotide
ccggacugggccugggagg

SEQ ID NO: 2876865 - RNA, 19 nt, Artificial Sequence
  Description of Artificial Sequence: Synthetic oligonucleotide
cugcucucagccgggauga

SEQ ID NO: 2876866 - RNA, 19 nt, Artificial Sequence
  Description of Artificial Sequence: Synthetic oligonucleotide
gccugggcccgagagaugc

SEQ ID NO: 2876867 - RNA, 19 nt, Artificial Sequence
  Description of Artificial Sequence: Synthetic oligonucleotide
ggcuuucugaggguuugug

SEQ ID NO: 2876868 - RNA, 19 nt, Artificial Sequence
  Description of Artificial Sequence: Synthetic oligonucleotide
gggaaacugcuuucaucca

SEQ ID NO: 2876869 - RNA, 19 nt, Artificial Sequence
  Description of Artificial Sequence: Synthetic oligonucleotide
guggucagguucaccagaa

SEQ ID NO: 2876870 - RNA, 19 nt, Artificial Sequence
  Description of Artificial Sequence: Synthetic oligonucleotide
agccgccgguuuguugagc

SEQ ID NO: 2876871 - RNA, 19 nt, Artificial Sequence
  Description of Artificial Sequence: Synthetic oligonucleotide
ugcuggcgccgccaagaau

SEQ ID NO: 2876872 - RNA, 19 nt, Artificial Sequence
  Description of Artificial Sequence: Synthetic oligonucleotide
cuuucugcuggcgccgcca

SEQ ID NO: 2876873 - RNA, 19 nt, Artificial Sequence
  Description of Artificial Sequence: Synthetic oligonucleotide
cugucaggcugcugcucuc

SEQ ID NO: 2876874 - RNA, 19 nt, Artificial Sequence
  Description of Artificial Sequence: Synthetic oligonucleotide
gccggaaaaggcugcccug

SEQ ID NO: 2876875 - RNA, 19 nt, Artificial Sequence
  Description of Artificial Sequence: Synthetic oligonucleotide
gcucucagccgggaugagg

SEQ ID NO: 2876876 - RNA, 19 nt, Artificial Sequence
  Description of Artificial Sequence: Synthetic oligonucleotide
gucacuucccugggaguca

SEQ ID NO: 2876877 - RNA, 19 nt, Artificial Sequence
  Description of Artificial Sequence: Synthetic oligonucleotide
gagauuucugaggguuucu

SEQ ID NO: 2876878 - RNA, 19 nt, Artificial Sequence
  Description of Artificial Sequence: Synthetic oligonucleotide
gucagagauuucugagggu

SEQ ID NO: 2876879 - RNA, 19 nt, Artificial Sequence
  Description of Artificial Sequence: Synthetic oligonucleotide
cgguuuguugagcuccagg

SEQ ID NO: 2876880 - RNA, 19 nt, Artificial Sequence
  Description of Artificial Sequence: Synthetic oligonucleotide
gaccugguguacaagccau

SEQ ID NO: 2876881 - RNA, 19 nt, Artificial Sequence
  Description of Artificial Sequence: Synthetic oligonucleotide
ccggaaaaggcugcccugc

SEQ ID NO: 2876882 - RNA, 19 nt, Artificial Sequence
  Description of Artificial Sequence: Synthetic oligonucleotide
ggaguucuuuacagacagc

SEQ ID NO: 2876883 - RNA, 19 nt, Artificial Sequence
  Description of Artificial Sequence: Synthetic oligonucleotide
gcuuucugaggguuugugu

SEQ ID NO: 2876884 - RNA, 19 nt, Artificial Sequence
  Description of Artificial Sequence: Synthetic oligonucleotide
gacgaaggagugggcuuuc

SEQ ID NO: 2876885 - RNA, 19 nt, Artificial Sequence
  Description of Artificial Sequence: Synthetic oligonucleotide
ugggcccgagagaugccuu

SEQ ID NO: 2876886 - RNA, 19 nt, Artificial Sequence
  Description of Artificial Sequence: Synthetic oligonucleotide
ucccugggagucagagauu

SEQ ID NO: 2876887 - RNA, 19 nt, Artificial Sequence
  Description of Artificial Sequence: Synthetic oligonucleotide
gagcuccagggcgggaaac

SEQ ID NO: 2876888 - RNA, 19 nt, Artificial Sequence
  Description of Artificial Sequence: Synthetic oligonucleotide
uguugcuauuggggacagu

SEQ ID NO: 2876889 - RNA, 19 nt, Artificial Sequence
  Description of Artificial Sequence: Synthetic oligonucleotide
cccggacugggccugggag

SEQ ID NO: 2876890 - RNA, 19 nt, Artificial Sequence
  Description of Artificial Sequence: Synthetic oligonucleotide
uggggacagugacgugguc

SEQ ID NO: 2876891 - RNA, 19 nt, Artificial Sequence
  Description of Artificial Sequence: Synthetic oligonucleotide
cucugucaggcugcugcuc

SEQ ID NO: 2876892 - RNA, 19 nt, Artificial Sequence
  Description of Artificial Sequence: Synthetic oligonucleotide
guguagcuguaggccuggg

SEQ ID NO: 2876893 - RNA, 19 nt, Artificial Sequence
  Description of Artificial Sequence: Synthetic oligonucleotide
cagccgccgguuuguugag

SEQ ID NO: 2876894 - RNA, 19 nt, Artificial Sequence
  Description of Artificial Sequence: Synthetic oligonucleotide
ugcucucagccgggaugag

SEQ ID NO: 2876895 - RNA, 19 nt, Artificial Sequence
  Description of Artificial Sequence: Synthetic oligonucleotide
acgaaggagugggcuuucu

SEQ ID NO: 2876896 - RNA, 19 nt, Artificial Sequence
  Description of Artificial Sequence: Synthetic oligonucleotide
gguuuguguccacuucaua

SEQ ID NO: 2876897 - RNA, 19 nt, Artificial Sequence
  Description of Artificial Sequence: Synthetic oligonucleotide
cccgagagaugccuuucug

SEQ ID NO: 2876898 - RNA, 19 nt, Artificial Sequence
  Description of Artificial Sequence: Synthetic oligonucleotide
cugggccugggaggggacc

SEQ ID NO: 2876899 - RNA, 19 nt, Artificial Sequence
  Description of Artificial Sequence: Synthetic oligonucleotide
gguucaccagaaucacucu

SEQ ID NO: 2876900 - RNA, 19 nt, Artificial Sequence
  Description of Artificial Sequence: Synthetic oligonucleotide
ccuuaggccggaaaaggcu

SEQ ID NO: 2876901 - RNA, 19 nt, Artificial Sequence
  Description of Artificial Sequence: Synthetic oligonucleotide
gguugacgaaggagugggc

SEQ ID NO: 2876902 - RNA, 19 nt, Artificial Sequence
  Description of Artificial Sequence: Synthetic oligonucleotide
ccggcuggccuuaggccgg

SEQ ID NO: 2876903 - RNA, 19 nt, Artificial Sequence
  Description of Artificial Sequence: Synthetic oligonucleotide
cgccaagaauuguaauaug

SEQ ID NO: 2876904 - RNA, 19 nt, Artificial Sequence
  Description of Artificial Sequence: Synthetic oligonucleotide
gcucagcaucucgccaugg

SEQ ID NO: 2876905 - RNA, 19 nt, Artificial Sequence
  Description of Artificial Sequence: Synthetic oligonucleotide
uggaguccggcuggccuua

SEQ ID NO: 2876906 - RNA, 19 nt, Artificial Sequence
  Description of Artificial Sequence: Synthetic oligonucleotide
gcuccagggcgggaaacug

SEQ ID NO: 2876907 - RNA, 19 nt, Artificial Sequence
  Description of Artificial Sequence: Synthetic oligonucleotide
gugacguggucagguucac

SEQ ID NO: 2876908 - RNA, 19 nt, Artificial Sequence
  Description of Artificial Sequence: Synthetic oligonucleotide
ggacagugacguggucagg

SEQ ID NO: 2876909 - RNA, 19 nt, Artificial Sequence
  Description of Artificial Sequence: Synthetic oligonucleotide
cgccgguuuguugagcucc

SEQ ID NO: 2876910 - RNA, 19 nt, Artificial Sequence
  Description of Artificial Sequence: Synthetic oligonucleotide
caccagaaucacucucugu

SEQ ID NO: 2876911 - RNA, 19 nt, Artificial Sequence
  Description of Artificial Sequence: Synthetic oligonucleotide
gagugggcuuucugagggu

SEQ ID NO: 2876912 - RNA, 19 nt, Artificial Sequence
  Description of Artificial Sequence: Synthetic oligonucleotide
cgagagaugccuuucugcu

SEQ ID NO: 2876913 - RNA, 19 nt, Artificial Sequence
  Description of Artificial Sequence: Synthetic oligonucleotide
gcuggcgccgccaagaauu

SEQ ID NO: 2876914 - RNA, 19 nt, Artificial Sequence
  Description of Artificial Sequence: Synthetic oligonucleotide
ugcccggacugggccuggg

SEQ ID NO: 2876915 - RNA, 19 nt, Artificial Sequence
  Description of Artificial Sequence: Synthetic oligonucleotide
cgaaggagugggcuuucug

SEQ ID NO: 2876916 - RNA, 19 nt, Artificial Sequence
  Description of Artificial Sequence: Synthetic oligonucleotide
auguggggucacugaugua

SEQ ID NO: 2876917 - RNA, 19 nt, Artificial Sequence
  Description of Artificial Sequence: Synthetic oligonucleotide
cuguaggccugggcccgag

SEQ ID NO: 2876918 - RNA, 19 nt, Artificial Sequence
  Description of Artificial Sequence: Synthetic oligonucleotide
cagggcgggaaacugcuuu

SEQ ID NO: 2876919 - RNA, 19 nt, Artificial Sequence
  Description of Artificial Sequence: Synthetic oligonucleotide
cacucucuguguagcugua

SEQ ID NO: 2876920 - RNA, 19 nt, Artificial Sequence
  Description of Artificial Sequence: Synthetic oligonucleotide
uggcgccgccaagaauugu

SEQ ID NO: 2876921 - RNA, 19 nt, Artificial Sequence
  Description of Artificial Sequence: Synthetic oligonucleotide
ggaggggaccugguguaca

SEQ ID NO: 2876922 - RNA, 19 nt, Artificial Sequence
  Description of Artificial Sequence: Synthetic oligonucleotide
guggggucacugauguagu

SEQ ID NO: 2876923 - RNA, 19 nt, Artificial Sequence
  Description of Artificial Sequence: Synthetic oligonucleotide
ggcgccgccaagaauugua

SEQ ID NO: 2876924 - RNA, 19 nt, Artificial Sequence
  Description of Artificial Sequence: Synthetic oligonucleotide
guugagcuccagggcggga

SEQ ID NO: 2876925 - RNA, 19 nt, Artificial Sequence
  Description of Artificial Sequence: Synthetic oligonucleotide
cguggucagguucaccaga

SEQ ID NO: 2876926 - RNA, 19 nt, Artificial Sequence
  Description of Artificial Sequence: Synthetic oligonucleotide
cugaggguuuguguccacu

SEQ ID NO: 2876927 - RNA, 19 nt, Artificial Sequence
  Description of Artificial Sequence: Synthetic oligonucleotide
ggaugaggucauuguacuu

SEQ ID NO: 2876928 - RNA, 19 nt, Artificial Sequence
  Description of Artificial Sequence: Synthetic oligonucleotide
gccgccgguuuguugagcu

SEQ ID NO: 2876929 - RNA, 19 nt, Artificial Sequence
  Description of Artificial Sequence: Synthetic oligonucleotide
gcuggccuuaggccggaaa

SEQ ID NO: 2876930 - RNA, 19 nt, Artificial Sequence
  Description of Artificial Sequence: Synthetic oligonucleotide
ccgccaagaauuguaauau

SEQ ID NO: 2876931 - RNA, 19 nt, Artificial Sequence
  Description of Artificial Sequence: Synthetic oligonucleotide
ccugggagucagagauuuc

SEQ ID NO: 2876932 - RNA, 19 nt, Artificial Sequence
  Description of Artificial Sequence: Synthetic oligonucleotide
cagacagccgccgguuugu

SEQ ID NO: 2876933 - RNA, 19 nt, Artificial Sequence
  Description of Artificial Sequence: Synthetic oligonucleotide
cugcuggcgccgccaagaa

SEQ ID NO: 2876934 - RNA, 19 nt, Artificial Sequence
  Description of Artificial Sequence: Synthetic oligonucleotide
ggggcguuggaguccggcu

SEQ ID NO: 2876935 - RNA, 19 nt, Artificial Sequence
  Description of Artificial Sequence: Synthetic oligonucleotide
gcugcccggacugggccug

SEQ ID NO: 2876936 - RNA, 19 nt, Artificial Sequence
  Description of Artificial Sequence: Synthetic oligonucleotide
ccugggcccgagagaugcc

SEQ ID NO: 2876937 - RNA, 19 nt, Artificial Sequence
  Description of Artificial Sequence: Synthetic oligonucleotide
ccgggaugaggucauugua

SEQ ID NO: 2876938 - RNA, 19 nt, Artificial Sequence
  Description of Artificial Sequence: Synthetic oligonucleotide
ggcccgagagaugccuuuc

SEQ ID NO: 2876939 - RNA, 19 nt, Artificial Sequence
  Description of Artificial Sequence: Synthetic oligonucleotide
gggaggggaccugguguac

SEQ ID NO: 2876940 - RNA, 19 nt, Artificial Sequence
  Description of Artificial Sequence: Synthetic oligonucleotide
cugggcccgagagaugccu

SEQ ID NO: 2876941 - RNA, 19 nt, Artificial Sequence
  Description of Artificial Sequence: Synthetic oligonucleotide
cugcccggacugggccugg

SEQ ID NO: 2876942 - RNA, 19 nt, Artificial Sequence
  Description of Artificial Sequence: Synthetic oligonucleotide
ggacugggccugggagggg

SEQ ID NO: 2876943 - RNA, 19 nt, Artificial Sequence
  Description of Artificial Sequence: Synthetic oligonucleotide
cacuucccugggagucaga

SEQ ID NO: 2876944 - RNA, 19 nt, Artificial Sequence
  Description of Artificial Sequence: Synthetic oligonucleotide
agacagccgccgguuuguu

SEQ ID NO: 2876945 - RNA, 19 nt, Artificial Sequence
  Description of Artificial Sequence: Synthetic oligonucleotide
cugcugggugcuguugcua

SEQ ID NO: 2876946 - RNA, 19 nt, Artificial Sequence
  Description of Artificial Sequence: Synthetic oligonucleotide
gccgguuuguugagcucca

SEQ ID NO: 2876947 - RNA, 19 nt, Artificial Sequence
  Description of Artificial Sequence: Synthetic oligonucleotide
ggcgggaaacugcuuucau

SEQ ID NO: 2876948 - RNA, 19 nt, Artificial Sequence
  Description of Artificial Sequence: Synthetic oligonucleotide
ggguuuguguccacuucau

SEQ ID NO: 2876949 - RNA, 19 nt, Artificial Sequence
  Description of Artificial Sequence: Synthetic oligonucleotide
ccgguuuguugagcuccag

SEQ ID NO: 2876950 - RNA, 19 nt, Artificial Sequence
  Description of Artificial Sequence: Synthetic oligonucleotide
gcguuggaguccggcuggc

SEQ ID NO: 2876951 - RNA, 19 nt, Artificial Sequence
  Description of Artificial Sequence: Synthetic oligonucleotide
gcgccgccaagaauuguaa

SEQ ID NO: 2876952 - RNA, 19 nt, Artificial Sequence
  Description of Artificial Sequence: Synthetic oligonucleotide
gcccgagagaugccuuucu

SEQ ID NO: 2876953 - RNA, 19 nt, Artificial Sequence
  Description of Artificial Sequence: Synthetic oligonucleotide
ggaguccggcuggccuuag

SEQ ID NO: 2876954 - RNA, 19 nt, Artificial Sequence
  Description of Artificial Sequence: Synthetic oligonucleotide
cugcugcucucagccggga

SEQ ID NO: 2876955 - RNA, 19 nt, Artificial Sequence
  Description of Artificial Sequence: Synthetic oligonucleotide
gugggcuuucugaggguuu

SEQ ID NO: 2876956 - RNA, 19 nt, Artificial Sequence
  Description of Artificial Sequence: Synthetic oligonucleotide
ccgccgguuuguugagcuc

SEQ ID NO: 2876957 - RNA, 19 nt, Artificial Sequence
  Description of Artificial Sequence: Synthetic oligonucleotide
cguuggaguccggcuggcc

SEQ ID NO: 2876958 - RNA, 19 nt, Artificial Sequence
  Description of Artificial Sequence: Synthetic oligonucleotide
ccugcugggugcuguugcu

SEQ ID NO: 2876959 - RNA, 19 nt, Artificial Sequence
  Description of Artificial Sequence: Synthetic oligonucleotide
gcccggacugggccuggga

SEQ ID NO: 2876960 - RNA, 19 nt, Artificial Sequence
  Description of Artificial Sequence: Synthetic oligonucleotide
gcugcccugcugggugcug

SEQ ID NO: 2876961 - RNA, 19 nt, Artificial Sequence
  Description of Artificial Sequence: Synthetic oligonucleotide
ccugcagaaggaguucuuu

SEQ ID NO: 2876962 - RNA, 19 nt, Artificial Sequence
  Description of Artificial Sequence: Synthetic oligonucleotide
ggccugggcccgagagaug

SEQ ID NO: 2876963 - RNA, 19 nt, Artificial Sequence
  Description of Artificial Sequence: Synthetic oligonucleotide
ggucacugauguagugguu

SEQ ID NO: 2876964 - RNA, 19 nt, Artificial Sequence
  Description of Artificial Sequence: Synthetic oligonucleotide
gggcccgagagaugccuuu

SEQ ID NO: 2876965 - RNA, 19 nt, Artificial Sequence
  Description of Artificial Sequence: Synthetic oligonucleotide
gcugggugcuguugcuauu

SEQ ID NO: 2876966 - RNA, 19 nt, Artificial Sequence
  Description of Artificial Sequence: Synthetic oligonucleotide
gggcuuucugaggguuugu

SEQ ID NO: 2876967 - RNA, 19 nt, Artificial Sequence
  Description of Artificial Sequence: Synthetic oligonucleotide
ggcugcccugcugggugcu

SEQ ID NO: 2876968 - RNA, 19 nt, Artificial Sequence
  Description of Artificial Sequence: Synthetic oligonucleotide
cgccgccaagaauuguaau

SEQ ID NO: 2876969 - RNA, 19 nt, Artificial Sequence
  Description of Artificial Sequence: Synthetic oligonucleotide
gccugggaggggaccuggu

SEQ ID NO: 2876970 - RNA, 19 nt, Artificial Sequence
  Description of Artificial Sequence: Synthetic oligonucleotide
ccagggcgggaaacugcuu

SEQ ID NO: 2876971 - RNA, 19 nt, Artificial Sequence
  Description of Artificial Sequence: Synthetic oligonucleotide
ggcuggccuuaggccggaa

SEQ ID NO: 2876972 - RNA, 19 nt, Artificial Sequence
  Description of Artificial Sequence: Synthetic oligonucleotide
cagccgggaugaggucauu

SEQ ID NO: 2876973 - RNA, 19 nt, Artificial Sequence
  Description of Artificial Sequence: Synthetic oligonucleotide
cggcuggccuuaggccgga

SEQ ID NO: 2876974 - RNA, 19 nt, Artificial Sequence
  Description of Artificial Sequence: Synthetic oligonucleotide
acuuuggcaauauagaucc

SEQ ID NO: 2876975 - RNA, 19 nt, Artificial Sequence
  Description of Artificial Sequence: Synthetic oligonucleotide
aguucuuaaacccauuccc

SEQ ID NO: 2876976 - RNA, 19 nt, Artificial Sequence
  Description of Artificial Sequence: Synthetic oligonucleotide
aauauagauccucauagca

SEQ ID NO: 2876977 - RNA, 19 nt, Artificial Sequence
  Description of Artificial Sequence: Synthetic oligonucleotide
uauguuucagccaucagga

SEQ ID NO: 2876978 - RNA, 19 nt, Artificial Sequence
  Description of Artificial Sequence: Synthetic oligonucleotide
uuuucaguauguuucagcc

SEQ ID NO: 2876979 - RNA, 19 nt, Artificial Sequence
  Description of Artificial Sequence: Synthetic oligonucleotide
aucaggaguucuuaaaccc

SEQ ID NO: 2876980 - RNA, 19 nt, Artificial Sequence
  Description of Artificial Sequence: Synthetic oligonucleotide
ucauuguugcaccagaggc

SEQ ID NO: 2876981 - RNA, 19 nt, Artificial Sequence
  Description of Artificial Sequence: Synthetic oligonucleotide
guauguuucagccaucagg

SEQ ID NO: 2876982 - RNA, 19 nt, Artificial Sequence
  Description of Artificial Sequence: Synthetic oligonucleotide
ugauaccugguacugaggg

SEQ ID NO: 2876983 - RNA, 19 nt, Artificial Sequence
  Description of Artificial Sequence: Synthetic oligonucleotide
acugcuauuuccuuguguc

SEQ ID NO: 2876984 - RNA, 19 nt, Artificial Sequence
  Description of Artificial Sequence: Synthetic oligonucleotide
aauguccuuagccagccuc

SEQ ID NO: 2876985 - RNA, 19 nt, Artificial Sequence
  Description of Artificial Sequence: Synthetic oligonucleotide
auagcauccaucuuggaca

SEQ ID NO: 2876986 - RNA, 19 nt, Artificial Sequence
  Description of Artificial Sequence: Synthetic oligonucleotide
aaaauguccuuagccagcc

SEQ ID NO: 2876987 - RNA, 19 nt, Artificial Sequence
  Description of Artificial Sequence: Synthetic oligonucleotide
ugauuuauugaugucuccg

SEQ ID NO: 2876988 - RNA, 19 nt, Artificial Sequence
  Description of Artificial Sequence: Synthetic oligonucleotide
aagccuagggccgagaggg

SEQ ID NO: 2876989 - RNA, 19 nt, Artificial Sequence
  Description of Artificial Sequence: Synthetic oligonucleotide
gcaauauagauccucauag

SEQ ID NO: 2876990 - RNA, 19 nt, Artificial Sequence
  Description of Artificial Sequence: Synthetic oligonucleotide
auugaugucuccgcuaacc

SEQ ID NO: 2876991 - RNA, 19 nt, Artificial Sequence
  Description of Artificial Sequence: Synthetic oligonucleotide
uuggacaucccuuuguuca

SEQ ID NO: 2876992 - RNA, 19 nt, Artificial Sequence
  Description of Artificial Sequence: Synthetic oligonucleotide
uucaguauguuucagccau

SEQ ID NO: 2876993 - RNA, 19 nt, Artificial Sequence
  Description of Artificial Sequence: Synthetic oligonucleotide
uauagauccucauagcauc

SEQ ID NO: 2876994 - RNA, 19 nt, Artificial Sequence
  Description of Artificial Sequence: Synthetic oligonucleotide
ugguacugaggguagacgg

SEQ ID NO: 2876995 - RNA, 19 nt, Artificial Sequence
  Description of Artificial Sequence: Synthetic oligonucleotide
ugccaaaauguccuuagcc

SEQ ID NO: 2876996 - RNA, 19 nt, Artificial Sequence
  Description of Artificial Sequence: Synthetic oligonucleotide
uguuuguagaagcuguaca

SEQ ID NO: 2876997 - RNA, 19 nt, Artificial Sequence
  Description of Artificial Sequence: Synthetic oligonucleotide
gauuuauugaugucuccgc

SEQ ID NO: 2876998 - RNA, 19 nt, Artificial Sequence
  Description of Artificial Sequence: Synthetic oligonucleotide
guuacagucgcccugggug

SEQ ID NO: 2876999 - RNA, 19 nt, Artificial Sequence
  Description of Artificial Sequence: Synthetic oligonucleotide
uuuagcuccuccacuuugg

SEQ ID NO: 2877000 - RNA, 19 nt, Artificial Sequence
  Description of Artificial Sequence: Synthetic oligonucleotide
cauuucaaacuccacuugg

SEQ ID NO: 2877001 - RNA, 19 nt, Artificial Sequence
  Description of Artificial Sequence: Synthetic oligonucleotide
uccacuuuggcaauauaga

SEQ ID NO: 2877002 - RNA, 19 nt, Artificial Sequence
  Description of Artificial Sequence: Synthetic oligonucleotide
agugauaccugguacugag

SEQ ID NO: 2877003 - RNA, 19 nt, Artificial Sequence
  Description of Artificial Sequence: Synthetic oligonucleotide
uguuucagccaucaggagu

SEQ ID NO: 2877004 - RNA, 19 nt, Artificial Sequence
  Description of Artificial Sequence: Synthetic oligonucleotide
ugugucugccaaaaugucc

SEQ ID NO: 2877005 - RNA, 19 nt, Artificial Sequence
  Description of Artificial Sequence: Synthetic oligonucleotide
acggggauguuacagucgc

SEQ ID NO: 2877006 - RNA, 19 nt, Artificial Sequence
  Description of Artificial Sequence: Synthetic oligonucleotide
cuuuguucacauuccacgc

SEQ ID NO: 2877007 - RNA, 19 nt, Artificial Sequence
  Description of Artificial Sequence: Synthetic oligonucleotide
ucugccaaaauguccuuag

SEQ ID NO: 2877008 - RNA, 19 nt, Artificial Sequence
  Description of Artificial Sequence: Synthetic oligonucleotide
guuuguagaagcuguacac

SEQ ID NO: 2877009 - RNA, 19 nt, Artificial Sequence
  Description of Artificial Sequence: Synthetic oligonucleotide
cuuuucaguauguuucagc

SEQ ID NO: 2877010 - RNA, 19 nt, Artificial Sequence
  Description of Artificial Sequence: Synthetic oligonucleotide
ucuagugauaccugguacu

SEQ ID NO: 2877011 - RNA, 19 nt, Artificial Sequence
  Description of Artificial Sequence: Synthetic oligonucleotide
uuauugaugucuccgcuaa

SEQ ID NO: 2877012 - RNA, 19 nt, Artificial Sequence
  Description of Artificial Sequence: Synthetic oligonucleotide
aaccuugcuacccuuuuca

SEQ ID NO: 2877013 - RNA, 19 nt, Artificial Sequence
  Description of Artificial Sequence: Synthetic oligonucleotide
uugagagaagcgcaggcca

SEQ ID NO: 2877014 - RNA, 19 nt, Artificial Sequence
  Description of Artificial Sequence: Synthetic oligonucleotide
agcaguuucuccugaucgc

SEQ ID NO: 2877015 - RNA, 19 nt, Artificial Sequence
  Description of Artificial Sequence: Synthetic oligonucleotide
cucauagcauccaucuugg

SEQ ID NO: 2877016 - RNA, 19 nt, Artificial Sequence
  Description of Artificial Sequence: Synthetic oligonucleotide
uuucaaacuccacuuggcu

SEQ ID NO: 2877017 - RNA, 19 nt, Artificial Sequence
  Description of Artificial Sequence: Synthetic oligonucleotide
auuucaaacuccacuuggc

SEQ ID NO: 2877018 - RNA, 19 nt, Artificial Sequence
  Description of Artificial Sequence: Synthetic oligonucleotide
uuggcaauauagauccuca

SEQ ID NO: 2877019 - RNA, 19 nt, Artificial Sequence
  Description of Artificial Sequence: Synthetic oligonucleotide
gaguucuuaaacccauucc

SEQ ID NO: 2877020 - RNA, 19 nt, Artificial Sequence
  Description of Artificial Sequence: Synthetic oligonucleotide
gauguuacagucgcccugg

SEQ ID NO: 2877021 - RNA, 19 nt, Artificial Sequence
  Description of Artificial Sequence: Synthetic oligonucleotide
caucaggaguucuuaaacc

SEQ ID NO: 2877022 - RNA, 19 nt, Artificial Sequence
  Description of Artificial Sequence: Synthetic oligonucleotide
uucuuaaacccauucccca

SEQ ID NO: 2877023 - RNA, 19 nt, Artificial Sequence
  Description of Artificial Sequence: Synthetic oligonucleotide
ucacauuccacgcuuccca

SEQ ID NO: 2877024 - RNA, 19 nt, Artificial Sequence
  Description of Artificial Sequence: Synthetic oligonucleotide
caauauagauccucauagc

SEQ ID NO: 2877025 - RNA, 19 nt, Artificial Sequence
  Description of Artificial Sequence: Synthetic oligonucleotide
cauagcauccaucuuggac

SEQ ID NO: 2877026 - RNA, 19 nt, Artificial Sequence
  Description of Artificial Sequence: Synthetic oligonucleotide
agcgcaggccauuucaaac

SEQ ID NO: 2877027 - RNA, 19 nt, Artificial Sequence
  Description of Artificial Sequence: Synthetic oligonucleotide
acccuuuucaguauguuuc

SEQ ID NO: 2877028 - RNA, 19 nt, Artificial Sequence
  Description of Artificial Sequence: Synthetic oligonucleotide
aaacccauuccccaccagu

SEQ ID NO: 2877029 - RNA, 19 nt, Artificial Sequence
  Description of Artificial Sequence: Synthetic oligonucleotide
gaugucuccgcuaaccuug

SEQ ID NO: 2877030 - RNA, 19 nt, Artificial Sequence
  Description of Artificial Sequence: Synthetic oligonucleotide
uccacuuggcucauuguug

SEQ ID NO: 2877031 - RNA, 19 nt, Artificial Sequence
  Description of Artificial Sequence: Synthetic oligonucleotide
ucacaucuauggcuggagg

SEQ ID NO: 2877032 - RNA, 19 nt, Artificial Sequence
  Description of Artificial Sequence: Synthetic oligonucleotide
cacaucuauggcuggaggg

SEQ ID NO: 2877033 - RNA, 19 nt, Artificial Sequence
  Description of Artificial Sequence: Synthetic oligonucleotide
uucuagugauaccugguac

SEQ ID NO: 2877034 - RNA, 19 nt, Artificial Sequence
  Description of Artificial Sequence: Synthetic oligonucleotide
auuuauugaugucuccgcu

SEQ ID NO: 2877035 - RNA, 19 nt, Artificial Sequence
  Description of Artificial Sequence: Synthetic oligonucleotide
uuacagucgcccugggugg

SEQ ID NO: 2877036 - RNA, 19 nt, Artificial Sequence
  Description of Artificial Sequence: Synthetic oligonucleotide
cagcaguuucuccugaucg

SEQ ID NO: 2877037 - RNA, 19 nt, Artificial Sequence
  Description of Artificial Sequence: Synthetic oligonucleotide
caaaauguccuuagccagc

SEQ ID NO: 2877038 - RNA, 19 nt, Artificial Sequence
  Description of Artificial Sequence: Synthetic oligonucleotide
auccucauagcauccaucu

SEQ ID NO: 2877039 - RNA, 19 nt, Artificial Sequence
  Description of Artificial Sequence: Synthetic oligonucleotide
ucagcugcuugagagaagc

SEQ ID NO: 2877040 - RNA, 19 nt, Artificial Sequence
  Description of Artificial Sequence: Synthetic oligonucleotide
ugcucucacaucuauggcu

SEQ ID NO: 2877041 - RNA, 19 nt, Artificial Sequence
  Description of Artificial Sequence: Synthetic oligonucleotide
uuuguucacauuccacgcu

SEQ ID NO: 2877042 - RNA, 19 nt, Artificial Sequence
  Description of Artificial Sequence: Synthetic oligonucleotide
cuguucuagugauaccugg

SEQ ID NO: 2877043 - RNA, 19 nt, Artificial Sequence
  Description of Artificial Sequence: Synthetic oligonucleotide
ccuuuguucacauuccacg

SEQ ID NO: 2877044 - RNA, 19 nt, Artificial Sequence
  Description of Artificial Sequence: Synthetic oligonucleotide
ucuccgcuaaccuugcuac

SEQ ID NO: 2877045 - RNA, 19 nt, Artificial Sequence
  Description of Artificial Sequence: Synthetic oligonucleotide
cuuaaacccauuccccacc

SEQ ID NO: 2877046 - RNA, 19 nt, Artificial Sequence
  Description of Artificial Sequence: Synthetic oligonucleotide
uguucuagugauaccuggu

SEQ ID NO: 2877047 - RNA, 19 nt, Artificial Sequence
  Description of Artificial Sequence: Synthetic oligonucleotide
ucuguucuagugauaccug

SEQ ID NO: 2877048 - RNA, 19 nt, Artificial Sequence
  Description of Artificial Sequence: Synthetic oligonucleotide
uucaaacuccacuuggcuc

SEQ ID NO: 2877049 - RNA, 19 nt, Artificial Sequence
  Description of Artificial Sequence: Synthetic oligonucleotide
cacaggacccuucagcugc

SEQ ID NO: 2877050 - RNA, 19 nt, Artificial Sequence
  Description of Artificial Sequence: Synthetic oligonucleotide
cucauuguugcaccagagg

SEQ ID NO: 2877051 - RNA, 19 nt, Artificial Sequence
  Description of Artificial Sequence: Synthetic oligonucleotide
ucuuaaacccauuccccac

SEQ ID NO: 2877052 - RNA, 19 nt, Artificial Sequence
  Description of Artificial Sequence: Synthetic oligonucleotide
uuccacgcuucccauuugg

SEQ ID NO: 2877053 - RNA, 19 nt, Artificial Sequence
  Description of Artificial Sequence: Synthetic oligonucleotide
ugcuauuuccuugugucug

SEQ ID NO: 2877054 - RNA, 19 nt, Artificial Sequence
  Description of Artificial Sequence: Synthetic oligonucleotide
uucuccugaucgcucacag

SEQ ID NO: 2877055 - RNA, 19 nt, Artificial Sequence
  Description of Artificial Sequence: Synthetic oligonucleotide
cacuuuggcaauauagauc

SEQ ID NO: 2877056 - RNA, 19 nt, Artificial Sequence
  Description of Artificial Sequence: Synthetic oligonucleotide
uuuauugaugucuccgcua

SEQ ID NO: 2877057 - RNA, 19 nt, Artificial Sequence
  Description of Artificial Sequence: Synthetic oligonucleotide
guagaagcuguacaccagc

SEQ ID NO: 2877058 - RNA, 19 nt, Artificial Sequence
  Description of Artificial Sequence: Synthetic oligonucleotide
uuaaacccauuccccacca

SEQ ID NO: 2877059 - RNA, 19 nt, Artificial Sequence
  Description of Artificial Sequence: Synthetic oligonucleotide
auagauccucauagcaucc

SEQ ID NO: 2877060 - RNA, 19 nt, Artificial Sequence
  Description of Artificial Sequence: Synthetic oligonucleotide
auuguugcaccagaggcug

SEQ ID NO: 2877061 - RNA, 19 nt, Artificial Sequence
  Description of Artificial Sequence: Synthetic oligonucleotide
uuucaguauguuucagcca

SEQ ID NO: 2877062 - RNA, 19 nt, Artificial Sequence
  Description of Artificial Sequence: Synthetic oligonucleotide
cuuggcucauuguugcacc

SEQ ID NO: 2877063 - RNA, 19 nt, Artificial Sequence
  Description of Artificial Sequence: Synthetic oligonucleotide
uuuggcaauauagauccuc

SEQ ID NO: 2877064 - RNA, 19 nt, Artificial Sequence
  Description of Artificial Sequence: Synthetic oligonucleotide
cuugcuacccuuuucagua

SEQ ID NO: 2877065 - RNA, 19 nt, Artificial Sequence
  Description of Artificial Sequence: Synthetic oligonucleotide
uauggcuggagggacgggg

SEQ ID NO: 2877066 - RNA, 19 nt, Artificial Sequence
  Description of Artificial Sequence: Synthetic oligonucleotide
ucuauggcuggagggacgg

SEQ ID NO: 2877067 - RNA, 19 nt, Artificial Sequence
  Description of Artificial Sequence: Synthetic oligonucleotide
agaagcgcaggccauuuca

SEQ ID NO: 2877068 - RNA, 19 nt, Artificial Sequence
  Description of Artificial Sequence: Synthetic oligonucleotide
ucccauuuggccuuugcuc

SEQ ID NO: 2877069 - RNA, 19 nt, Artificial Sequence
  Description of Artificial Sequence: Synthetic oligonucleotide
uugaugucuccgcuaaccu

SEQ ID NO: 2877070 - RNA, 19 nt, Artificial Sequence
  Description of Artificial Sequence: Synthetic oligonucleotide
guucuuaaacccauucccc

SEQ ID NO: 2877071 - RNA, 19 nt, Artificial Sequence
  Description of Artificial Sequence: Synthetic oligonucleotide
gaagccuagggccgagagg

SEQ ID NO: 2877072 - RNA, 19 nt, Artificial Sequence
  Description of Artificial Sequence: Synthetic oligonucleotide
acuuggcucauuguugcac

SEQ ID NO: 2877073 - RNA, 19 nt, Artificial Sequence
  Description of Artificial Sequence: Synthetic oligonucleotide
uagaagcuguacaccagca

SEQ ID NO: 2877074 - RNA, 19 nt, Artificial Sequence
  Description of Artificial Sequence: Synthetic oligonucleotide
cucucuguucuagugauac

SEQ ID NO: 2877075 - RNA, 19 nt, Artificial Sequence
  Description of Artificial Sequence: Synthetic oligonucleotide
auuccccaccaguggagcc

SEQ ID NO: 2877076 - RNA, 19 nt, Artificial Sequence
  Description of Artificial Sequence: Synthetic oligonucleotide
uucccauuuggccuuugcu

SEQ ID NO: 2877077 - RNA, 19 nt, Artificial Sequence
  Description of Artificial Sequence: Synthetic oligonucleotide
cuccugaucgcucacagga

SEQ ID NO: 2877078 - RNA, 19 nt, Artificial Sequence
  Description of Artificial Sequence: Synthetic oligonucleotide
uuagcuccuccacuuuggc

SEQ ID NO: 2877079 - RNA, 19 nt, Artificial Sequence
  Description of Artificial Sequence: Synthetic oligonucleotide
gaagcuguacaccagcagu

SEQ ID NO: 2877080 - RNA, 19 nt, Artificial Sequence
  Description of Artificial Sequence: Synthetic oligonucleotide
aucccuuuguucacauucc

SEQ ID NO: 2877081 - RNA, 19 nt, Artificial Sequence
  Description of Artificial Sequence: Synthetic oligonucleotide
cuugagagaagcgcaggcc

SEQ ID NO: 2877082 - RNA, 19 nt, Artificial Sequence
  Description of Artificial Sequence: Synthetic oligonucleotide
cuugugucugccaaaaugu

SEQ ID NO: 2877083 - RNA, 19 nt, Artificial Sequence
  Description of Artificial Sequence: Synthetic oligonucleotide
uccuuagccagccucguuu

SEQ ID NO: 2877084 - RNA, 19 nt, Artificial Sequence
  Description of Artificial Sequence: Synthetic oligonucleotide
ccaaaauguccuuagccag

SEQ ID NO: 2877085 - RNA, 19 nt, Artificial Sequence
  Description of Artificial Sequence: Synthetic oligonucleotide
uccgcuaaccuugcuaccc

SEQ ID NO: 2877086 - RNA, 19 nt, Artificial Sequence
  Description of Artificial Sequence: Synthetic oligonucleotide
uuguucacauuccacgcuu

SEQ ID NO: 2877087 - RNA, 19 nt, Artificial Sequence
  Description of Artificial Sequence: Synthetic oligonucleotide
uacugaggguagacggccg

SEQ ID NO: 2877088 - RNA, 19 nt, Artificial Sequence
  Description of Artificial Sequence: Synthetic oligonucleotide
cuuuagcuccuccacuuug

SEQ ID NO: 2877089 - RNA, 19 nt, Artificial Sequence
  Description of Artificial Sequence: Synthetic oligonucleotide
uccaucuuggacaucccuu

SEQ ID NO: 2877090 - RNA, 19 nt, Artificial Sequence
  Description of Artificial Sequence: Synthetic oligonucleotide
aguauguuucagccaucag

SEQ ID NO: 2877091 - RNA, 19 nt, Artificial Sequence
  Description of Artificial Sequence: Synthetic oligonucleotide
auauagauccucauagcau

SEQ ID NO: 2877092 - RNA, 19 nt, Artificial Sequence
  Description of Artificial Sequence: Synthetic oligonucleotide
uagacggccggcugggaag

SEQ ID NO: 2877093 - RNA, 19 nt, Artificial Sequence
  Description of Artificial Sequence: Synthetic oligonucleotide
uugcucucacaucuauggc

SEQ ID NO: 2877094 - RNA, 19 nt, Artificial Sequence
  Description of Artificial Sequence: Synthetic oligonucleotide
aacccauuccccaccagug

SEQ ID NO: 2877095 - RNA, 19 nt, Artificial Sequence
  Description of Artificial Sequence: Synthetic oligonucleotide
acugaggguagacggccgg

SEQ ID NO: 2877096 - RNA, 19 nt, Artificial Sequence
  Description of Artificial Sequence: Synthetic oligonucleotide
accagaggcugugugugcc

SEQ ID NO: 2877097 - RNA, 19 nt, Artificial Sequence
  Description of Artificial Sequence: Synthetic oligonucleotide
cugaucgcucacaggaccc

SEQ ID NO: 2877098 - RNA, 19 nt, Artificial Sequence
  Description of Artificial Sequence: Synthetic oligonucleotide
ugccucucuguucuaguga

SEQ ID NO: 2877099 - RNA, 19 nt, Artificial Sequence
  Description of Artificial Sequence: Synthetic oligonucleotide
ucuuggacaucccuuuguu

SEQ ID NO: 2877100 - RNA, 19 nt, Artificial Sequence
  Description of Artificial Sequence: Synthetic oligonucleotide
cuagugauaccugguacug

SEQ ID NO: 2877101 - RNA, 19 nt, Artificial Sequence
  Description of Artificial Sequence: Synthetic oligonucleotide
ucuccugaucgcucacagg

SEQ ID NO: 2877102 - RNA, 19 nt, Artificial Sequence
  Description of Artificial Sequence: Synthetic oligonucleotide
ccucauagcauccaucuug

SEQ ID NO: 2877103 - RNA, 19 nt, Artificial Sequence
  Description of Artificial Sequence: Synthetic oligonucleotide
ugcuacccuuuucaguaug

SEQ ID NO: 2877104 - RNA, 19 nt, Artificial Sequence
  Description of Artificial Sequence: Synthetic oligonucleotide
aggguagacggccggcugg

SEQ ID NO: 2877105 - RNA, 19 nt, Artificial Sequence
  Description of Artificial Sequence: Synthetic oligonucleotide
uucacauuccacgcuuccc

SEQ ID NO: 2877106 - RNA, 19 nt, Artificial Sequence
  Description of Artificial Sequence: Synthetic oligonucleotide
uugugucugccaaaauguc

SEQ ID NO: 2877107 - RNA, 19 nt, Artificial Sequence
  Description of Artificial Sequence: Synthetic oligonucleotide
acccauuccccaccagugg

SEQ ID NO: 2877108 - RNA, 19 nt, Artificial Sequence
  Description of Artificial Sequence: Synthetic oligonucleotide
ugcuugagagaagcgcagg

SEQ ID NO: 2877109 - RNA, 19 nt, Artificial Sequence
  Description of Artificial Sequence: Synthetic oligonucleotide
acaucuauggcuggaggga

SEQ ID NO: 2877110 - RNA, 19 nt, Artificial Sequence
  Description of Artificial Sequence: Synthetic oligonucleotide
ucucuguucuagugauacc

SEQ ID NO: 2877111 - RNA, 19 nt, Artificial Sequence
  Description of Artificial Sequence: Synthetic oligonucleotide
uaccugguacugaggguag

SEQ ID NO: 2877112 - RNA, 19 nt, Artificial Sequence
  Description of Artificial Sequence: Synthetic oligonucleotide
uguuacagucgcccugggu

SEQ ID NO: 2877113 - RNA, 19 nt, Artificial Sequence
  Description of Artificial Sequence: Synthetic oligonucleotide
uacccuuuucaguauguuu

SEQ ID NO: 2877114 - RNA, 19 nt, Artificial Sequence
  Description of Artificial Sequence: Synthetic oligonucleotide
uaaacccauuccccaccag

SEQ ID NO: 2877115 - RNA, 19 nt, Artificial Sequence
  Description of Artificial Sequence: Synthetic oligonucleotide
ccuugugucugccaaaaug

SEQ ID NO: 2877116 - RNA, 19 nt, Artificial Sequence
  Description of Artificial Sequence: Synthetic oligonucleotide
gcauccaucuuggacaucc

SEQ ID NO: 2877117 - RNA, 19 nt, Artificial Sequence
  Description of Artificial Sequence: Synthetic oligonucleotide
uauuuccuugugucugcca

SEQ ID NO: 2877118 - RNA, 19 nt, Artificial Sequence
  Description of Artificial Sequence: Synthetic oligonucleotide
ggcugggaagccuagggcc

SEQ ID NO: 2877119 - RNA, 19 nt, Artificial Sequence
  Description of Artificial Sequence: Synthetic oligonucleotide
gacggggauguuacagucg

SEQ ID NO: 2877120 - RNA, 19 nt, Artificial Sequence
  Description of Artificial Sequence: Synthetic oligonucleotide
auguccuuagccagccucg

SEQ ID NO: 2877121 - RNA, 19 nt, Artificial Sequence
  Description of Artificial Sequence: Synthetic oligonucleotide
ucagccaucaggaguucuu

SEQ ID NO: 2877122 - RNA, 19 nt, Artificial Sequence
  Description of Artificial Sequence: Synthetic oligonucleotide
uucagcugcuugagagaag

SEQ ID NO: 2877123 - RNA, 19 nt, Artificial Sequence
  Description of Artificial Sequence: Synthetic oligonucleotide
auaccugguacugagggua

SEQ ID NO: 2877124 - RNA, 19 nt, Artificial Sequence
  Description of Artificial Sequence: Synthetic oligonucleotide
ugagagaagcgcaggccau

SEQ ID NO: 2877125 - RNA, 19 nt, Artificial Sequence
  Description of Artificial Sequence: Synthetic oligonucleotide
guacugaggguagacggcc

SEQ ID NO: 2877126 - RNA, 19 nt, Artificial Sequence
  Description of Artificial Sequence: Synthetic oligonucleotide
uguucacauuccacgcuuc

SEQ ID NO: 2877127 - RNA, 19 nt, Artificial Sequence
  Description of Artificial Sequence: Synthetic oligonucleotide
auguuucagccaucaggag

SEQ ID NO: 2877128 - RNA, 19 nt, Artificial Sequence
  Description of Artificial Sequence: Synthetic oligonucleotide
ucacaggacccuucagcug

SEQ ID NO: 2877129 - RNA, 19 nt, Artificial Sequence
  Description of Artificial Sequence: Synthetic oligonucleotide
uugcaccagaggcugugug

SEQ ID NO: 2877130 - RNA, 19 nt, Artificial Sequence
  Description of Artificial Sequence: Synthetic oligonucleotide
agccacugcuauuuccuug

SEQ ID NO: 2877131 - RNA, 19 nt, Artificial Sequence
  Description of Artificial Sequence: Synthetic oligonucleotide
uggacaucccuuuguucac

SEQ ID NO: 2877132 - RNA, 19 nt, Artificial Sequence
  Description of Artificial Sequence: Synthetic oligonucleotide
ggaguucuuaaacccauuc

SEQ ID NO: 2877133 - RNA, 19 nt, Artificial Sequence
  Description of Artificial Sequence: Synthetic oligonucleotide
accuugcuacccuuuucag

SEQ ID NO: 2877134 - RNA, 19 nt, Artificial Sequence
  Description of Artificial Sequence: Synthetic oligonucleotide
cugcuugagagaagcgcag

SEQ ID NO: 2877135 - RNA, 19 nt, Artificial Sequence
  Description of Artificial Sequence: Synthetic oligonucleotide
uauugaugucuccgcuaac

SEQ ID NO: 2877136 - RNA, 19 nt, Artificial Sequence
  Description of Artificial Sequence: Synthetic oligonucleotide
aguggagccacugcuauuu

SEQ ID NO: 2877137 - RNA, 19 nt, Artificial Sequence
  Description of Artificial Sequence: Synthetic oligonucleotide
agggacggggauguuacag

SEQ ID NO: 2877138 - RNA, 19 nt, Artificial Sequence
  Description of Artificial Sequence: Synthetic oligonucleotide
cugguacugaggguagacg

SEQ ID NO: 2877139 - RNA, 19 nt, Artificial Sequence
  Description of Artificial Sequence: Synthetic oligonucleotide
ugugccucucuguucuagu

SEQ ID NO: 2877140 - RNA, 19 nt, Artificial Sequence
  Description of Artificial Sequence: Synthetic oligonucleotide
cuggguggccuguuuguag

SEQ ID NO: 2877141 - RNA, 19 nt, Artificial Sequence
  Description of Artificial Sequence: Synthetic oligonucleotide
auccaucuuggacaucccu

SEQ ID NO: 2877142 - RNA, 19 nt, Artificial Sequence
  Description of Artificial Sequence: Synthetic oligonucleotide
ugaugucuccgcuaaccuu

SEQ ID NO: 2877143 - RNA, 19 nt, Artificial Sequence
  Description of Artificial Sequence: Synthetic oligonucleotide
aagcgcaggccauuucaaa

SEQ ID NO: 2877144 - RNA, 19 nt, Artificial Sequence
  Description of Artificial Sequence: Synthetic oligonucleotide
auuuggccuuugcucucac

SEQ ID NO: 2877145 - RNA, 19 nt, Artificial Sequence
  Description of Artificial Sequence: Synthetic oligonucleotide
gcucacaggacccuucagc

SEQ ID NO: 2877146 - RNA, 19 nt, Artificial Sequence
  Description of Artificial Sequence: Synthetic oligonucleotide
uuggcucauuguugcacca

SEQ ID NO: 2877147 - RNA, 19 nt, Artificial Sequence
  Description of Artificial Sequence: Synthetic oligonucleotide
uccugaucgcucacaggac

SEQ ID NO: 2877148 - RNA, 19 nt, Artificial Sequence
  Description of Artificial Sequence: Synthetic oligonucleotide
agauccucauagcauccau

SEQ ID NO: 2877149 - RNA, 19 nt, Artificial Sequence
  Description of Artificial Sequence: Synthetic oligonucleotide
caggccauuucaaacucca

SEQ ID NO: 2877150 - RNA, 19 nt, Artificial Sequence
  Description of Artificial Sequence: Synthetic oligonucleotide
uguacaccagcaguuucuc

SEQ ID NO: 2877151 - RNA, 19 nt, Artificial Sequence
  Description of Artificial Sequence: Synthetic oligonucleotide
cucacaucuauggcuggag

SEQ ID NO: 2877152 - RNA, 19 nt, Artificial Sequence
  Description of Artificial Sequence: Synthetic oligonucleotide
ggauguuacagucgcccug

SEQ ID NO: 2877153 - RNA, 19 nt, Artificial Sequence
  Description of Artificial Sequence: Synthetic oligonucleotide
cugccaaaauguccuuagc

SEQ ID NO: 2877154 - RNA, 19 nt, Artificial Sequence
  Description of Artificial Sequence: Synthetic oligonucleotide
cucucacaucuauggcugg

SEQ ID NO: 2877155 - RNA, 19 nt, Artificial Sequence
  Description of Artificial Sequence: Synthetic oligonucleotide
uagcauccaucuuggacau

SEQ ID NO: 2877156 - RNA, 19 nt, Artificial Sequence
  Description of Artificial Sequence: Synthetic oligonucleotide
ucucacaucuauggcugga

SEQ ID NO: 2877157 - RNA, 19 nt, Artificial Sequence
  Description of Artificial Sequence: Synthetic oligonucleotide
aagcuguacaccagcaguu

SEQ ID NO: 2877158 - RNA, 19 nt, Artificial Sequence
  Description of Artificial Sequence: Synthetic oligonucleotide
cuucccauuuggccuuugc

SEQ ID NO: 2877159 - RNA, 19 nt, Artificial Sequence
  Description of Artificial Sequence: Synthetic oligonucleotide
uuccuugugucugccaaaa

SEQ ID NO: 2877160 - RNA, 19 nt, Artificial Sequence
  Description of Artificial Sequence: Synthetic oligonucleotide
guucuagugauaccuggua

SEQ ID NO: 2877161 - RNA, 19 nt, Artificial Sequence
  Description of Artificial Sequence: Synthetic oligonucleotide
ucaguauguuucagccauc

SEQ ID NO: 2877162 - RNA, 19 nt, Artificial Sequence
  Description of Artificial Sequence: Synthetic oligonucleotide
ggggauguuacagucgccc

SEQ ID NO: 2877163 - RNA, 19 nt, Artificial Sequence
  Description of Artificial Sequence: Synthetic oligonucleotide
ucgcucacaggacccuuca

SEQ ID NO: 2877164 - RNA, 19 nt, Artificial Sequence
  Description of Artificial Sequence: Synthetic oligonucleotide
uggcaauauagauccucau

SEQ ID NO: 2877165 - RNA, 19 nt, Artificial Sequence
  Description of Artificial Sequence: Synthetic oligonucleotide
gcuauuuccuugugucugc

SEQ ID NO: 2877166 - RNA, 19 nt, Artificial Sequence
  Description of Artificial Sequence: Synthetic oligonucleotide
gauccucauagcauccauc

SEQ ID NO: 2877167 - RNA, 19 nt, Artificial Sequence
  Description of Artificial Sequence: Synthetic oligonucleotide
cuauuuccuugugucugcc

SEQ ID NO: 2877168 - RNA, 19 nt, Artificial Sequence
  Description of Artificial Sequence: Synthetic oligonucleotide
gacccuucagcugcuugag

SEQ ID NO: 2877169 - RNA, 19 nt, Artificial Sequence
  Description of Artificial Sequence: Synthetic oligonucleotide
ccacuuggcucauuguugc

SEQ ID NO: 2877170 - RNA, 19 nt, Artificial Sequence
  Description of Artificial Sequence: Synthetic oligonucleotide
gcuugagagaagcgcaggc

SEQ ID NO: 2877171 - RNA, 19 nt, Artificial Sequence
  Description of Artificial Sequence: Synthetic oligonucleotide
caucuauggcuggagggac

SEQ ID NO: 2877172 - RNA, 19 nt, Artificial Sequence
  Description of Artificial Sequence: Synthetic oligonucleotide
uagugauaccugguacuga

SEQ ID NO: 2877173 - RNA, 19 nt, Artificial Sequence
  Description of Artificial Sequence: Synthetic oligonucleotide
aucuauggcuggagggacg

SEQ ID NO: 2877174 - RNA, 19 nt, Artificial Sequence
  Description of Artificial Sequence: Synthetic oligonucleotide
gaggguagacggccggcug

SEQ ID NO: 2877175 - RNA, 19 nt, Artificial Sequence
  Description of Artificial Sequence: Synthetic oligonucleotide
uuucuccugaucgcucaca

SEQ ID NO: 2877176 - RNA, 19 nt, Artificial Sequence
  Description of Artificial Sequence: Synthetic oligonucleotide
uuuggccuuugcucucaca

SEQ ID NO: 2877177 - RNA, 19 nt, Artificial Sequence
  Description of Artificial Sequence: Synthetic oligonucleotide
ggaagccuagggccgagag

SEQ ID NO: 2877178 - RNA, 19 nt, Artificial Sequence
  Description of Artificial Sequence: Synthetic oligonucleotide
caucuuggacaucccuuug

SEQ ID NO: 2877179 - RNA, 19 nt, Artificial Sequence
  Description of Artificial Sequence: Synthetic oligonucleotide
agacggccggcugggaagc

SEQ ID NO: 2877180 - RNA, 19 nt, Artificial Sequence
  Description of Artificial Sequence: Synthetic oligonucleotide
cucuguucuagugauaccu

SEQ ID NO: 2877181 - RNA, 19 nt, Artificial Sequence
  Description of Artificial Sequence: Synthetic oligonucleotide
guacaccagcaguuucucc

SEQ ID NO: 2877182 - RNA, 19 nt, Artificial Sequence
  Description of Artificial Sequence: Synthetic oligonucleotide
ccugaucgcucacaggacc

SEQ ID NO: 2877183 - RNA, 19 nt, Artificial Sequence
  Description of Artificial Sequence: Synthetic oligonucleotide
ucauagcauccaucuugga

SEQ ID NO: 2877184 - RNA, 19 nt, Artificial Sequence
  Description of Artificial Sequence: Synthetic oligonucleotide
cauuguugcaccagaggcu

SEQ ID NO: 2877185 - RNA, 19 nt, Artificial Sequence
  Description of Artificial Sequence: Synthetic oligonucleotide
ggcaauauagauccucaua

SEQ ID NO: 2877186 - RNA, 19 nt, Artificial Sequence
  Description of Artificial Sequence: Synthetic oligonucleotide
gugauaccugguacugagg

SEQ ID NO: 2877187 - RNA, 19 nt, Artificial Sequence
  Description of Artificial Sequence: Synthetic oligonucleotide
cauccaucuuggacauccc

SEQ ID NO: 2877188 - RNA, 19 nt, Artificial Sequence
  Description of Artificial Sequence: Synthetic oligonucleotide
aggacccuucagcugcuug

SEQ ID NO: 2877189 - RNA, 19 nt, Artificial Sequence
  Description of Artificial Sequence: Synthetic oligonucleotide
cauuccccaccaguggagc

SEQ ID NO: 2877190 - RNA, 19 nt, Artificial Sequence
  Description of Artificial Sequence: Synthetic oligonucleotide
uggcucauuguugcaccag

SEQ ID NO: 2877191 - RNA, 19 nt, Artificial Sequence
  Description of Artificial Sequence: Synthetic oligonucleotide
gcucucacaucuauggcug

SEQ ID NO: 2877192 - RNA, 19 nt, Artificial Sequence
  Description of Artificial Sequence: Synthetic oligonucleotide
auguuacagucgcccuggg

SEQ ID NO: 2877193 - RNA, 19 nt, Artificial Sequence
  Description of Artificial Sequence: Synthetic oligonucleotide
gauaccugguacugagggu

SEQ ID NO: 2877194 - RNA, 19 nt, Artificial Sequence
  Description of Artificial Sequence: Synthetic oligonucleotide
gugucugccaaaauguccu

SEQ ID NO: 2877195 - RNA, 19 nt, Artificial Sequence
  Description of Artificial Sequence: Synthetic oligonucleotide
ugaggguagacggccggcu

SEQ ID NO: 2877196 - RNA, 19 nt, Artificial Sequence
  Description of Artificial Sequence: Synthetic oligonucleotide
augucuccgcuaaccuugc

SEQ ID NO: 2877197 - RNA, 19 nt, Artificial Sequence
  Description of Artificial Sequence: Synthetic oligonucleotide
uggccuuugcucucacauc

SEQ ID NO: 2877198 - RNA, 19 nt, Artificial Sequence
  Description of Artificial Sequence: Synthetic oligonucleotide
cacgcuucccauuuggccu

SEQ ID NO: 2877199 - RNA, 19 nt, Artificial Sequence
  Description of Artificial Sequence: Synthetic oligonucleotide
gguacugaggguagacggc

SEQ ID NO: 2877200 - RNA, 19 nt, Artificial Sequence
  Description of Artificial Sequence: Synthetic oligonucleotide
caguuucuccugaucgcuc

SEQ ID NO: 2877201 - RNA, 19 nt, Artificial Sequence
  Description of Artificial Sequence: Synthetic oligonucleotide
uccucauagcauccaucuu

SEQ ID NO: 2877202 - RNA, 19 nt, Artificial Sequence
  Description of Artificial Sequence: Synthetic oligonucleotide
gugugugccucucuguucu

SEQ ID NO: 2877203 - RNA, 19 nt, Artificial Sequence
  Description of Artificial Sequence: Synthetic oligonucleotide
caguauguuucagccauca

SEQ ID NO: 2877204 - RNA, 19 nt, Artificial Sequence
  Description of Artificial Sequence: Synthetic oligonucleotide
guuucagccaucaggaguu

SEQ ID NO: 2877205 - RNA, 19 nt, Artificial Sequence
  Description of Artificial Sequence: Synthetic oligonucleotide
auuccacgcuucccauuug

SEQ ID NO: 2877206 - RNA, 19 nt, Artificial Sequence
  Description of Artificial Sequence: Synthetic oligonucleotide
cuccgcuaaccuugcuacc

SEQ ID NO: 2877207 - RNA, 19 nt, Artificial Sequence
  Description of Artificial Sequence: Synthetic oligonucleotide
cuucagcugcuugagagaa

SEQ ID NO: 2877208 - RNA, 19 nt, Artificial Sequence
  Description of Artificial Sequence: Synthetic oligonucleotide
agccaucaggaguucuuaa

SEQ ID NO: 2877209 - RNA, 19 nt, Artificial Sequence
  Description of Artificial Sequence: Synthetic oligonucleotide
ccauuucaaacuccacuug

SEQ ID NO: 2877210 - RNA, 19 nt, Artificial Sequence
  Description of Artificial Sequence: Synthetic oligonucleotide
ugaucgcucacaggacccu

SEQ ID NO: 2877211 - RNA, 19 nt, Artificial Sequence
  Description of Artificial Sequence: Synthetic oligonucleotide
uucagccaucaggaguucu

SEQ ID NO: 2877212 - RNA, 19 nt, Artificial Sequence
  Description of Artificial Sequence: Synthetic oligonucleotide
gcugggaagccuagggccg

SEQ ID NO: 2877213 - RNA, 19 nt, Artificial Sequence
  Description of Artificial Sequence: Synthetic oligonucleotide
aucgcucacaggacccuuc

SEQ ID NO: 2877214 - RNA, 19 nt, Artificial Sequence
  Description of Artificial Sequence: Synthetic oligonucleotide
cuguacaccagcaguuucu

SEQ ID NO: 2877215 - RNA, 19 nt, Artificial Sequence
  Description of Artificial Sequence: Synthetic oligonucleotide
ggccauuucaaacuccacu

SEQ ID NO: 2877216 - RNA, 19 nt, Artificial Sequence
  Description of Artificial Sequence: Synthetic oligonucleotide
aggccauuucaaacuccac

SEQ ID NO: 2877217 - RNA, 19 nt, Artificial Sequence
  Description of Artificial Sequence: Synthetic oligonucleotide
ggacggggauguuacaguc

SEQ ID NO: 2877218 - RNA, 19 nt, Artificial Sequence
  Description of Artificial Sequence: Synthetic oligonucleotide
caccagaggcugugugugc

SEQ ID NO: 2877219 - RNA, 19 nt, Artificial Sequence
  Description of Artificial Sequence: Synthetic oligonucleotide
acagucgcccuggguggcc

SEQ ID NO: 2877220 - RNA, 19 nt, Artificial Sequence
  Description of Artificial Sequence: Synthetic oligonucleotide
uccuugugucugccaaaau

SEQ ID NO: 2877221 - RNA, 19 nt, Artificial Sequence
  Description of Artificial Sequence: Synthetic oligonucleotide
uguccuuagccagccucgu

SEQ ID NO: 2877222 - RNA, 19 nt, Artificial Sequence
  Description of Artificial Sequence: Synthetic oligonucleotide
agaggcugugugugccucu

SEQ ID NO: 2877223 - RNA, 19 nt, Artificial Sequence
  Description of Artificial Sequence: Synthetic oligonucleotide
ggagggacggggauguuac

SEQ ID NO: 2877224 - RNA, 19 nt, Artificial Sequence
  Description of Artificial Sequence: Synthetic oligonucleotide
uugcuacccuuuucaguau

SEQ ID NO: 2877225 - RNA, 19 nt, Artificial Sequence
  Description of Artificial Sequence: Synthetic oligonucleotide
ggacccuucagcugcuuga

SEQ ID NO: 2877226 - RNA, 19 nt, Artificial Sequence
  Description of Artificial Sequence: Synthetic oligonucleotide
gucuccgcuaaccuugcua

SEQ ID NO: 2877227 - RNA, 19 nt, Artificial Sequence
  Description of Artificial Sequence: Synthetic oligonucleotide
ggcugugugugccucucug

SEQ ID NO: 2877228 - RNA, 19 nt, Artificial Sequence
  Description of Artificial Sequence: Synthetic oligonucleotide
ggccuuugcucucacaucu

SEQ ID NO: 2877229 - RNA, 19 nt, Artificial Sequence
  Description of Artificial Sequence: Synthetic oligonucleotide
gagaagcgcaggccauuuc

SEQ ID NO: 2877230 - RNA, 19 nt, Artificial Sequence
  Description of Artificial Sequence: Synthetic oligonucleotide
gugugccucucuguucuag

SEQ ID NO: 2877231 - RNA, 19 nt, Artificial Sequence
  Description of Artificial Sequence: Synthetic oligonucleotide
uggagggacggggauguua

SEQ ID NO: 2877232 - RNA, 19 nt, Artificial Sequence
  Description of Artificial Sequence: Synthetic oligonucleotide
accagcaguuucuccugau

SEQ ID NO: 2877233 - RNA, 19 nt, Artificial Sequence
  Description of Artificial Sequence: Synthetic oligonucleotide
gcucauuguugcaccagag

SEQ ID NO: 2877234 - RNA, 19 nt, Artificial Sequence
  Description of Artificial Sequence: Synthetic oligonucleotide
ggcucauuguugcaccaga

SEQ ID NO: 2877235 - RNA, 19 nt, Artificial Sequence
  Description of Artificial Sequence: Synthetic oligonucleotide
gaagcgcaggccauuucaa

SEQ ID NO: 2877236 - RNA, 19 nt, Artificial Sequence
  Description of Artificial Sequence: Synthetic oligonucleotide
acauuccacgcuucccauu

SEQ ID NO: 2877237 - RNA, 19 nt, Artificial Sequence
  Description of Artificial Sequence: Synthetic oligonucleotide
uacagucgcccuggguggc

SEQ ID NO: 2877238 - RNA, 19 nt, Artificial Sequence
  Description of Artificial Sequence: Synthetic oligonucleotide
cccuuuguucacauuccac

SEQ ID NO: 2877239 - RNA, 19 nt, Artificial Sequence
  Description of Artificial Sequence: Synthetic oligonucleotide
uccuccacuuuggcaauau

SEQ ID NO: 2877240 - RNA, 19 nt, Artificial Sequence
  Description of Artificial Sequence: Synthetic oligonucleotide
cugaggguagacggccggc

SEQ ID NO: 2877241 - RNA, 19 nt, Artificial Sequence
  Description of Artificial Sequence: Synthetic oligonucleotide
ugucugccaaaauguccuu

SEQ ID NO: 2877242 - RNA, 19 nt, Artificial Sequence
  Description of Artificial Sequence: Synthetic oligonucleotide
gccauuucaaacuccacuu

SEQ ID NO: 2877243 - RNA, 19 nt, Artificial Sequence
  Description of Artificial Sequence: Synthetic oligonucleotide
guagacggccggcugggaa

SEQ ID NO: 2877244 - RNA, 19 nt, Artificial Sequence
  Description of Artificial Sequence: Synthetic oligonucleotide
gcaccagaggcugugugug

SEQ ID NO: 2877245 - RNA, 19 nt, Artificial Sequence
  Description of Artificial Sequence: Synthetic oligonucleotide
ccggcugggaagccuaggg

SEQ ID NO: 2877246 - RNA, 19 nt, Artificial Sequence
  Description of Artificial Sequence: Synthetic oligonucleotide
ugucuccgcuaaccuugcu

SEQ ID NO: 2877247 - RNA, 19 nt, Artificial Sequence
  Description of Artificial Sequence: Synthetic oligonucleotide
agagaagcgcaggccauuu

SEQ ID NO: 2877248 - RNA, 19 nt, Artificial Sequence
  Description of Artificial Sequence: Synthetic oligonucleotide
acgcuucccauuuggccuu

SEQ ID NO: 2877249 - RNA, 19 nt, Artificial Sequence
  Description of Artificial Sequence: Synthetic oligonucleotide
gccaucaggaguucuuaaa

SEQ ID NO: 2877250 - RNA, 19 nt, Artificial Sequence
  Description of Artificial Sequence: Synthetic oligonucleotide
gguggccuguuuguagaag

SEQ ID NO: 2877251 - RNA, 19 nt, Artificial Sequence
  Description of Artificial Sequence: Synthetic oligonucleotide
caggaguucuuaaacccau

SEQ ID NO: 2877252 - RNA, 19 nt, Artificial Sequence
  Description of Artificial Sequence: Synthetic oligonucleotide
agcuguacaccagcaguuu

SEQ ID NO: 2877253 - RNA, 19 nt, Artificial Sequence
  Description of Artificial Sequence: Synthetic oligonucleotide
ccauuccccaccaguggag

SEQ ID NO: 2877254 - RNA, 19 nt, Artificial Sequence
  Description of Artificial Sequence: Synthetic oligonucleotide
acccuucagcugcuugaga

SEQ ID NO: 2877255 - RNA, 19 nt, Artificial Sequence
  Description of Artificial Sequence: Synthetic oligonucleotide
cauuccacgcuucccauuu

SEQ ID NO: 2877256 - RNA, 19 nt, Artificial Sequence
  Description of Artificial Sequence: Synthetic oligonucleotide
gaggcugugugugccucuc

SEQ ID NO: 2877257 - RNA, 19 nt, Artificial Sequence
  Description of Artificial Sequence: Synthetic oligonucleotide
ugggaagccuagggccgag

SEQ ID NO: 2877258 - RNA, 19 nt, Artificial Sequence
  Description of Artificial Sequence: Synthetic oligonucleotide
cauuuggccuuugcucuca

SEQ ID NO: 2877259 - RNA, 19 nt, Artificial Sequence
  Description of Artificial Sequence: Synthetic oligonucleotide
cugcuauuuccuugugucu

SEQ ID NO: 2877260 - RNA, 19 nt, Artificial Sequence
  Description of Artificial Sequence: Synthetic oligonucleotide
uuucagccaucaggaguuc

SEQ ID NO: 2877261 - RNA, 19 nt, Artificial Sequence
  Description of Artificial Sequence: Synthetic oligonucleotide
cuauggcuggagggacggg

SEQ ID NO: 2877262 - RNA, 19 nt, Artificial Sequence
  Description of Artificial Sequence: Synthetic oligonucleotide
ccuuuucaguauguuucag

SEQ ID NO: 2877263 - RNA, 19 nt, Artificial Sequence
  Description of Artificial Sequence: Synthetic oligonucleotide
uccccaccaguggagccac

SEQ ID NO: 2877264 - RNA, 19 nt, Artificial Sequence
  Description of Artificial Sequence: Synthetic oligonucleotide
ggguagacggccggcuggg

SEQ ID NO: 2877265 - RNA, 19 nt, Artificial Sequence
  Description of Artificial Sequence: Synthetic oligonucleotide
gccacugcuauuuccuugu

SEQ ID NO: 2877266 - RNA, 19 nt, Artificial Sequence
  Description of Artificial Sequence: Synthetic oligonucleotide
cuccacuuggcucauuguu

SEQ ID NO: 2877267 - RNA, 19 nt, Artificial Sequence
  Description of Artificial Sequence: Synthetic oligonucleotide
cccuuuucaguauguuuca

SEQ ID NO: 2877268 - RNA, 19 nt, Artificial Sequence
  Description of Artificial Sequence: Synthetic oligonucleotide
gagggacggggauguuaca

SEQ ID NO: 2877269 - RNA, 19 nt, Artificial Sequence
  Description of Artificial Sequence: Synthetic oligonucleotide
cccauuuggccuuugcucu

SEQ ID NO: 2877270 - RNA, 19 nt, Artificial Sequence
  Description of Artificial Sequence: Synthetic oligonucleotide
cagaggcugugugugccuc

SEQ ID NO: 2877271 - RNA, 19 nt, Artificial Sequence
  Description of Artificial Sequence: Synthetic oligonucleotide
cacuuggcucauuguugca

SEQ ID NO: 2877272 - RNA, 19 nt, Artificial Sequence
  Description of Artificial Sequence: Synthetic oligonucleotide
ccagcaguuucuccugauc

SEQ ID NO: 2877273 - RNA, 19 nt, Artificial Sequence
  Description of Artificial Sequence: Synthetic oligonucleotide
ccugguacugaggguagac

SEQ ID NO: 2877274 - RNA, 19 nt, Artificial Sequence
  Description of Artificial Sequence: Synthetic oligonucleotide
ugugugccucucuguucua

SEQ ID NO: 2877275 - RNA, 19 nt, Artificial Sequence
  Description of Artificial Sequence: Synthetic oligonucleotide
cacugcuauuuccuugugu

SEQ ID NO: 2877276 - RNA, 19 nt, Artificial Sequence
  Description of Artificial Sequence: Synthetic oligonucleotide
aggcugugugugccucucu

SEQ ID NO: 2877277 - RNA, 19 nt, Artificial Sequence
  Description of Artificial Sequence: Synthetic oligonucleotide
agcauccaucuuggacauc

SEQ ID NO: 2877278 - RNA, 19 nt, Artificial Sequence
  Description of Artificial Sequence: Synthetic oligonucleotide
gcaggccauuucaaacucc

SEQ ID NO: 2877279 - RNA, 19 nt, Artificial Sequence
  Description of Artificial Sequence: Synthetic oligonucleotide
cuaaccuugcuacccuuuu

SEQ ID NO: 2877280 - RNA, 19 nt, Artificial Sequence
  Description of Artificial Sequence: Synthetic oligonucleotide
accaguggagccacugcua

SEQ ID NO: 2877281 - RNA, 19 nt, Artificial Sequence
  Description of Artificial Sequence: Synthetic oligonucleotide
ccaccaguggagccacugc

SEQ ID NO: 2877282 - RNA, 19 nt, Artificial Sequence
  Description of Artificial Sequence: Synthetic oligonucleotide
ccuucagcugcuugagaga

SEQ ID NO: 2877283 - RNA, 19 nt, Artificial Sequence
  Description of Artificial Sequence: Synthetic oligonucleotide
gucugccaaaauguccuua

SEQ ID NO: 2877284 - RNA, 19 nt, Artificial Sequence
  Description of Artificial Sequence: Synthetic oligonucleotide
aggaguucuuaaacccauu

SEQ ID NO: 2877285 - RNA, 19 nt, Artificial Sequence
  Description of Artificial Sequence: Synthetic oligonucleotide
ccauuuggccuuugcucuc

SEQ ID NO: 2877286 - RNA, 19 nt, Artificial Sequence
  Description of Artificial Sequence: Synthetic oligonucleotide
ccacuuuggcaauauagau

SEQ ID NO: 2877287 - RNA, 19 nt, Artificial Sequence
  Description of Artificial Sequence: Synthetic oligonucleotide
accugguacugaggguaga

SEQ ID NO: 2877288 - RNA, 19 nt, Artificial Sequence
  Description of Artificial Sequence: Synthetic oligonucleotide
agucgcccuggguggccug

SEQ ID NO: 2877289 - RNA, 19 nt, Artificial Sequence
  Description of Artificial Sequence: Synthetic oligonucleotide
gcgcaggccauuucaaacu

SEQ ID NO: 2877290 - RNA, 19 nt, Artificial Sequence
  Description of Artificial Sequence: Synthetic oligonucleotide
caccagcaguuucuccuga

SEQ ID NO: 2877291 - RNA, 19 nt, Artificial Sequence
  Description of Artificial Sequence: Synthetic oligonucleotide
agccuagggccgagagggg

SEQ ID NO: 2877292 - RNA, 19 nt, Artificial Sequence
  Description of Artificial Sequence: Synthetic oligonucleotide
gcccuggguggccuguuug

SEQ ID NO: 2877293 - RNA, 19 nt, Artificial Sequence
  Description of Artificial Sequence: Synthetic oligonucleotide
gggauguuacagucgcccu

SEQ ID NO: 2877294 - RNA, 19 nt, Artificial Sequence
  Description of Artificial Sequence: Synthetic oligonucleotide
cccauuccccaccagugga

SEQ ID NO: 2877295 - RNA, 19 nt, Artificial Sequence
  Description of Artificial Sequence: Synthetic oligonucleotide
cugugugugccucucuguu

SEQ ID NO: 2877296 - RNA, 19 nt, Artificial Sequence
  Description of Artificial Sequence: Synthetic oligonucleotide
gggacggggauguuacagu

SEQ ID NO: 2877297 - RNA, 19 nt, Artificial Sequence
  Description of Artificial Sequence: Synthetic oligonucleotide
gcaguuucuccugaucgcu

SEQ ID NO: 2877298 - RNA, 19 nt, Artificial Sequence
  Description of Artificial Sequence: Synthetic oligonucleotide
ggacaucccuuuguucaca

SEQ ID NO: 2877299 - RNA, 19 nt, Artificial Sequence
  Description of Artificial Sequence: Synthetic oligonucleotide
acaggacccuucagcugcu

SEQ ID NO: 2877300 - RNA, 19 nt, Artificial Sequence
  Description of Artificial Sequence: Synthetic oligonucleotide
gccucucuguucuagugau

SEQ ID NO: 2877301 - RNA, 19 nt, Artificial Sequence
  Description of Artificial Sequence: Synthetic oligonucleotide
cuuuggcaauauagauccu

SEQ ID NO: 2877302 - RNA, 19 nt, Artificial Sequence
  Description of Artificial Sequence: Synthetic oligonucleotide
cacauuccacgcuucccau

SEQ ID NO: 2877303 - RNA, 19 nt, Artificial Sequence
  Description of Artificial Sequence: Synthetic oligonucleotide
cagccaucaggaguucuua

SEQ ID NO: 2877304 - RNA, 19 nt, Artificial Sequence
  Description of Artificial Sequence: Synthetic oligonucleotide
gagccacugcuauuuccuu

SEQ ID NO: 2877305 - RNA, 19 nt, Artificial Sequence
  Description of Artificial Sequence: Synthetic oligonucleotide
aaacuccacuuggcucauu

SEQ ID NO: 2877306 - RNA, 19 nt, Artificial Sequence
  Description of Artificial Sequence: Synthetic oligonucleotide
cgcaggccauuucaaacuc

SEQ ID NO: 2877307 - RNA, 19 nt, Artificial Sequence
  Description of Artificial Sequence: Synthetic oligonucleotide
acggccggcugggaagccu

SEQ ID NO: 2877308 - RNA, 19 nt, Artificial Sequence
  Description of Artificial Sequence: Synthetic oligonucleotide
ccuugcuacccuuuucagu

SEQ ID NO: 2877309 - RNA, 19 nt, Artificial Sequence
  Description of Artificial Sequence: Synthetic oligonucleotide
cugggaagccuagggccga

SEQ ID NO: 2877310 - RNA, 19 nt, Artificial Sequence
  Description of Artificial Sequence: Synthetic oligonucleotide
gcugugugugccucucugu

SEQ ID NO: 2877311 - RNA, 19 nt, Artificial Sequence
  Description of Artificial Sequence: Synthetic oligonucleotide
gagagaagcgcaggccauu

SEQ ID NO: 2877312 - RNA, 19 nt, Artificial Sequence
  Description of Artificial Sequence: Synthetic oligonucleotide
cggcugggaagccuagggc

SEQ ID NO: 2877313 - RNA, 19 nt, Artificial Sequence
  Description of Artificial Sequence: Synthetic oligonucleotide
cccaccaguggagccacug

SEQ ID NO: 2877314 - RNA, 19 nt, Artificial Sequence
  Description of Artificial Sequence: Synthetic oligonucleotide
gacggccggcugggaagcc

SEQ ID NO: 2877315 - RNA, 19 nt, Artificial Sequence
  Description of Artificial Sequence: Synthetic oligonucleotide
gcuggagggacggggaugu

SEQ ID NO: 2877316 - RNA, 19 nt, Artificial Sequence
  Description of Artificial Sequence: Synthetic oligonucleotide
guugcaccagaggcugugu

SEQ ID NO: 2877317 - RNA, 19 nt, Artificial Sequence
  Description of Artificial Sequence: Synthetic oligonucleotide
ccaucuuggacaucccuuu

SEQ ID NO: 2877318 - RNA, 19 nt, Artificial Sequence
  Description of Artificial Sequence: Synthetic oligonucleotide
gcuacccuuuucaguaugu

SEQ ID NO: 2877319 - RNA, 19 nt, Artificial Sequence
  Description of Artificial Sequence: Synthetic oligonucleotide
ccacugcuauuuccuugug

SEQ ID NO: 2877320 - RNA, 19 nt, Artificial Sequence
  Description of Artificial Sequence: Synthetic oligonucleotide
gccggcugggaagccuagg

SEQ ID NO: 2877321 - RNA, 19 nt, Artificial Sequence
  Description of Artificial Sequence: Synthetic oligonucleotide
cuacccuuuucaguauguu

SEQ ID NO: 2877322 - RNA, 19 nt, Artificial Sequence
  Description of Artificial Sequence: Synthetic oligonucleotide
gaucgcucacaggacccuu

SEQ ID NO: 2877323 - RNA, 19 nt, Artificial Sequence
  Description of Artificial Sequence: Synthetic oligonucleotide
cggggauguuacagucgcc

SEQ ID NO: 2877324 - RNA, 19 nt, Artificial Sequence
  Description of Artificial Sequence: Synthetic oligonucleotide
cgcucacaggacccuucag

SEQ ID NO: 2877325 - RNA, 19 nt, Artificial Sequence
  Description of Artificial Sequence: Synthetic oligonucleotide
guccuuagccagccucguu

SEQ ID NO: 2877326 - RNA, 19 nt, Artificial Sequence
  Description of Artificial Sequence: Synthetic oligonucleotide
caaacuccacuuggcucau

SEQ ID NO: 2877327 - RNA, 19 nt, Artificial Sequence
  Description of Artificial Sequence: Synthetic oligonucleotide
gcuaaccuugcuacccuuu

SEQ ID NO: 2877328 - RNA, 19 nt, Artificial Sequence
  Description of Artificial Sequence: Synthetic oligonucleotide
ggccggcugggaagccuag

SEQ ID NO: 2877329 - RNA, 19 nt, Artificial Sequence
  Description of Artificial Sequence: Synthetic oligonucleotide
caguggagccacugcuauu

SEQ ID NO: 2877330 - RNA, 19 nt, Artificial Sequence
  Description of Artificial Sequence: Synthetic oligonucleotide
ucgcccuggguggccuguu

SEQ ID NO: 2877331 - RNA, 19 nt, Artificial Sequence
  Description of Artificial Sequence: Synthetic oligonucleotide
gguagacggccggcuggga

SEQ ID NO: 2877332 - RNA, 19 nt, Artificial Sequence
  Description of Artificial Sequence: Synthetic oligonucleotide
gggaagccuagggccgaga

SEQ ID NO: 2877333 - RNA, 19 nt, Artificial Sequence
  Description of Artificial Sequence: Synthetic oligonucleotide
cuccuccacuuuggcaaua

SEQ ID NO: 2877334 - RNA, 19 nt, Artificial Sequence
  Description of Artificial Sequence: Synthetic oligonucleotide
ccuuagccagccucguuuu

SEQ ID NO: 2877335 - RNA, 19 nt, Artificial Sequence
  Description of Artificial Sequence: Synthetic oligonucleotide
ccucucuguucuagugaua

SEQ ID NO: 2877336 - RNA, 19 nt, Artificial Sequence
  Description of Artificial Sequence: Synthetic oligonucleotide
gccuuugcucucacaucua

SEQ ID NO: 2877337 - RNA, 19 nt, Artificial Sequence
  Description of Artificial Sequence: Synthetic oligonucleotide
cccuggguggccuguuugu

SEQ ID NO: 2877338 - RNA, 19 nt, Artificial Sequence
  Description of Artificial Sequence: Synthetic oligonucleotide
gucgcccuggguggccugu

SEQ ID NO: 2877339 - RNA, 19 nt, Artificial Sequence
  Description of Artificial Sequence: Synthetic oligonucleotide
ccagaggcugugugugccu

SEQ ID NO: 2877340 - RNA, 19 nt, Artificial Sequence
  Description of Artificial Sequence: Synthetic oligonucleotide
ccgcuaaccuugcuacccu

SEQ ID NO: 2877341 - RNA, 19 nt, Artificial Sequence
  Description of Artificial Sequence: Synthetic oligonucleotide
ccuggguggccuguuugua

SEQ ID NO: 2877342 - RNA, 19 nt, Artificial Sequence
  Description of Artificial Sequence: Synthetic oligonucleotide
cggccggcugggaagccua

SEQ ID NO: 2877343 - RNA, 19 nt, Artificial Sequence
  Description of Artificial Sequence: Synthetic oligonucleotide
cgcuaaccuugcuacccuu

SEQ ID NO: 2877344 - RNA, 19 nt, Artificial Sequence
  Description of Artificial Sequence: Synthetic oligonucleotide
caggacccuucagcugcuu

SEQ ID NO: 2877345 - RNA, 19 nt, Artificial Sequence
  Description of Artificial Sequence: Synthetic oligonucleotide
cuggagggacggggauguu

SEQ ID NO: 2877346 - RNA, 19 nt, Artificial Sequence
  Description of Artificial Sequence: Synthetic oligonucleotide
ccccaccaguggagccacu

SEQ ID NO: 2877347 - RNA, 19 nt, Artificial Sequence
  Description of Artificial Sequence: Synthetic oligonucleotide
cgcccuggguggccuguuu

SEQ ID NO: 2877348 - RNA, 19 nt, Artificial Sequence
  Description of Artificial Sequence: Synthetic oligonucleotide
cgcuucccauuuggccuuu

SEQ ID NO: 2877349 - RNA, 19 nt, Artificial Sequence
  Description of Artificial Sequence: Synthetic oligonucleotide
aauacaaauggauauguac

SEQ ID NO: 2877350 - RNA, 19 nt, Artificial Sequence
  Description of Artificial Sequence: Synthetic oligonucleotide
uauaaaauuugucauacug

SEQ ID NO: 2877351 - RNA, 19 nt, Artificial Sequence
  Description of Artificial Sequence: Synthetic oligonucleotide
uguacaaauugucacaggg

SEQ ID NO: 2877352 - RNA, 19 nt, Artificial Sequence
  Description of Artificial Sequence: Synthetic oligonucleotide
uaauucaugaaauacuucc

SEQ ID NO: 2877353 - RNA, 19 nt, Artificial Sequence
  Description of Artificial Sequence: Synthetic oligonucleotide
cauucuagaauuaagcagg

SEQ ID NO: 2877354 - RNA, 19 nt, Artificial Sequence
  Description of Artificial Sequence: Synthetic oligonucleotide
auuuguauucccaauaacc

SEQ ID NO: 2877355 - RNA, 19 nt, Artificial Sequence
  Description of Artificial Sequence: Synthetic oligonucleotide
ugaaauacuucccagaaaa

SEQ ID NO: 2877356 - RNA, 19 nt, Artificial Sequence
  Description of Artificial Sequence: Synthetic oligonucleotide
uuuguauucccaauaacca

SEQ ID NO: 2877357 - RNA, 19 nt, Artificial Sequence
  Description of Artificial Sequence: Synthetic oligonucleotide
aauuuguauucccaauaac

SEQ ID NO: 2877358 - RNA, 19 nt, Artificial Sequence
  Description of Artificial Sequence: Synthetic oligonucleotide
ucauucuagaauuaagcag

SEQ ID NO: 2877359 - RNA, 19 nt, Artificial Sequence
  Description of Artificial Sequence: Synthetic oligonucleotide
aauaauccccuuuguauuc

SEQ ID NO: 2877360 - RNA, 19 nt, Artificial Sequence
  Description of Artificial Sequence: Synthetic oligonucleotide
gauauguacaaauugucac

SEQ ID NO: 2877361 - RNA, 19 nt, Artificial Sequence
  Description of Artificial Sequence: Synthetic oligonucleotide
uguauauaaaauuugucau

SEQ ID NO: 2877362 - RNA, 19 nt, Artificial Sequence
  Description of Artificial Sequence: Synthetic oligonucleotide
uucacagacucaaucaccg

SEQ ID NO: 2877363 - RNA, 19 nt, Artificial Sequence
  Description of Artificial Sequence: Synthetic oligonucleotide
uguaauucauucuagaauu

SEQ ID NO: 2877364 - RNA, 19 nt, Artificial Sequence
  Description of Artificial Sequence: Synthetic oligonucleotide
ucuagaauuaagcagggau

SEQ ID NO: 2877365 - RNA, 19 nt, Artificial Sequence
  Description of Artificial Sequence: Synthetic oligonucleotide
auucauucuagaauuaagc

SEQ ID NO: 2877366 - RNA, 19 nt, Artificial Sequence
  Description of Artificial Sequence: Synthetic oligonucleotide
aauucaugaaauacuuccc

SEQ ID NO: 2877367 - RNA, 19 nt, Artificial Sequence
  Description of Artificial Sequence: Synthetic oligonucleotide
aaagagaggagacauucug

SEQ ID NO: 2877368 - RNA, 19 nt, Artificial Sequence
  Description of Artificial Sequence: Synthetic oligonucleotide
uauauaaaauuugucauac

SEQ ID NO: 2877369 - RNA, 19 nt, Artificial Sequence
  Description of Artificial Sequence: Synthetic oligonucleotide
agagaggagacauucugcc

SEQ ID NO: 2877370 - RNA, 19 nt, Artificial Sequence
  Description of Artificial Sequence: Synthetic oligonucleotide
uucauguauauaaaauuug

SEQ ID NO: 2877371 - RNA, 19 nt, Artificial Sequence
  Description of Artificial Sequence: Synthetic oligonucleotide
uaagcagggauucacagac

SEQ ID NO: 2877372 - RNA, 19 nt, Artificial Sequence
  Description of Artificial Sequence: Synthetic oligonucleotide
ucauguauauaaaauuugu

SEQ ID NO: 2877373 - RNA, 19 nt, Artificial Sequence
  Description of Artificial Sequence: Synthetic oligonucleotide
agucauaauuuguauuccc

SEQ ID NO: 2877374 - RNA, 19 nt, Artificial Sequence
  Description of Artificial Sequence: Synthetic oligonucleotide
uuguacuucauguauauaa

SEQ ID NO: 2877375 - RNA, 19 nt, Artificial Sequence
  Description of Artificial Sequence: Synthetic oligonucleotide
auagucauuccuuaauguc

SEQ ID NO: 2877376 - RNA, 19 nt, Artificial Sequence
  Description of Artificial Sequence: Synthetic oligonucleotide
uucauucuagaauuaagca

SEQ ID NO: 2877377 - RNA, 19 nt, Artificial Sequence
  Description of Artificial Sequence: Synthetic oligonucleotide
aucaaauacaaauggauau

SEQ ID NO: 2877378 - RNA, 19 nt, Artificial Sequence
  Description of Artificial Sequence: Synthetic oligonucleotide
auucccaauaaccauagcu

SEQ ID NO: 2877379 - RNA, 19 nt, Artificial Sequence
  Description of Artificial Sequence: Synthetic oligonucleotide
uccuuaaugucuaucaggu

SEQ ID NO: 2877380 - RNA, 19 nt, Artificial Sequence
  Description of Artificial Sequence: Synthetic oligonucleotide
ucugccaacacuccauagg

SEQ ID NO: 2877381 - RNA, 19 nt, Artificial Sequence
  Description of Artificial Sequence: Synthetic oligonucleotide
uaaaauuugucauacugua

SEQ ID NO: 2877382 - RNA, 19 nt, Artificial Sequence
  Description of Artificial Sequence: Synthetic oligonucleotide
uugggcaucaaauacaaau

SEQ ID NO: 2877383 - RNA, 19 nt, Artificial Sequence
  Description of Artificial Sequence: Synthetic oligonucleotide
ucaauagccaucugcaucu

SEQ ID NO: 2877384 - RNA, 19 nt, Artificial Sequence
  Description of Artificial Sequence: Synthetic oligonucleotide
aauucgugggauguucugc

SEQ ID NO: 2877385 - RNA, 19 nt, Artificial Sequence
  Description of Artificial Sequence: Synthetic oligonucleotide
uuguaauucauucuagaau

SEQ ID NO: 2877386 - RNA, 19 nt, Artificial Sequence
  Description of Artificial Sequence: Synthetic oligonucleotide
uacaaauugucacagggau

SEQ ID NO: 2877387 - RNA, 19 nt, Artificial Sequence
  Description of Artificial Sequence: Synthetic oligonucleotide
gagacauucugccuguggg

SEQ ID NO: 2877388 - RNA, 19 nt, Artificial Sequence
  Description of Artificial Sequence: Synthetic oligonucleotide
aauaaccauagcuuguaau

SEQ ID NO: 2877389 - RNA, 19 nt, Artificial Sequence
  Description of Artificial Sequence: Synthetic oligonucleotide
ucuguuuguaacagaguag

SEQ ID NO: 2877390 - RNA, 19 nt, Artificial Sequence
  Description of Artificial Sequence: Synthetic oligonucleotide
uuuguaacagaguaguuuu

SEQ ID NO: 2877391 - RNA, 19 nt, Artificial Sequence
  Description of Artificial Sequence: Synthetic oligonucleotide
uuuguauucuguauucuuc

SEQ ID NO: 2877392 - RNA, 19 nt, Artificial Sequence
  Description of Artificial Sequence: Synthetic oligonucleotide
uuuccuagugguuaauuca

SEQ ID NO: 2877393 - RNA, 19 nt, Artificial Sequence
  Description of Artificial Sequence: Synthetic oligonucleotide
uauguacaaauugucacag

SEQ ID NO: 2877394 - RNA, 19 nt, Artificial Sequence
  Description of Artificial Sequence: Synthetic oligonucleotide
uagucauuccuuaaugucu

SEQ ID NO: 2877395 - RNA, 19 nt, Artificial Sequence
  Description of Artificial Sequence: Synthetic oligonucleotide
auauagucauuccuuaaug

SEQ ID NO: 2877396 - RNA, 19 nt, Artificial Sequence
  Description of Artificial Sequence: Synthetic oligonucleotide
uuuucuacagaugacacua

SEQ ID NO: 2877397 - RNA, 19 nt, Artificial Sequence
  Description of Artificial Sequence: Synthetic oligonucleotide
ugcuguuggacccaguuga

SEQ ID NO: 2877398 - RNA, 19 nt, Artificial Sequence
  Description of Artificial Sequence: Synthetic oligonucleotide
gacacuauuuuauuuagaa

SEQ ID NO: 2877399 - RNA, 19 nt, Artificial Sequence
  Description of Artificial Sequence: Synthetic oligonucleotide
uguauucuucuccaguucu

SEQ ID NO: 2877400 - RNA, 19 nt, Artificial Sequence
  Description of Artificial Sequence: Synthetic oligonucleotide
cauagcuuguaauucauuc

SEQ ID NO: 2877401 - RNA, 19 nt, Artificial Sequence
  Description of Artificial Sequence: Synthetic oligonucleotide
auucgugggauguucugcc

SEQ ID NO: 2877402 - RNA, 19 nt, Artificial Sequence
  Description of Artificial Sequence: Synthetic oligonucleotide
uauucuguauucuucucca

SEQ ID NO: 2877403 - RNA, 19 nt, Artificial Sequence
  Description of Artificial Sequence: Synthetic oligonucleotide
aagagaggagacauucugc

SEQ ID NO: 2877404 - RNA, 19 nt, Artificial Sequence
  Description of Artificial Sequence: Synthetic oligonucleotide
ugggcaucaaauacaaaug

SEQ ID NO: 2877405 - RNA, 19 nt, Artificial Sequence
  Description of Artificial Sequence: Synthetic oligonucleotide
uauagucauuccuuaaugu

SEQ ID NO: 2877406 - RNA, 19 nt, Artificial Sequence
  Description of Artificial Sequence: Synthetic oligonucleotide
uuuugcuugggcaucaaau

SEQ ID NO: 2877407 - RNA, 19 nt, Artificial Sequence
  Description of Artificial Sequence: Synthetic oligonucleotide
uacuucauguauauaaaau

SEQ ID NO: 2877408 - RNA, 19 nt, Artificial Sequence
  Description of Artificial Sequence: Synthetic oligonucleotide
uggucaauagccaucugca

SEQ ID NO: 2877409 - RNA, 19 nt, Artificial Sequence
  Description of Artificial Sequence: Synthetic oligonucleotide
aauuugucauacuguauaa

SEQ ID NO: 2877410 - RNA, 19 nt, Artificial Sequence
  Description of Artificial Sequence: Synthetic oligonucleotide
aauugucacagggauaucu

SEQ ID NO: 2877411 - RNA, 19 nt, Artificial Sequence
  Description of Artificial Sequence: Synthetic oligonucleotide
auauguacaaauugucaca

SEQ ID NO: 2877412 - RNA, 19 nt, Artificial Sequence
  Description of Artificial Sequence: Synthetic oligonucleotide
acuucauguauauaaaauu

SEQ ID NO: 2877413 - RNA, 19 nt, Artificial Sequence
  Description of Artificial Sequence: Synthetic oligonucleotide
uagugguuaauucaugaaa

SEQ ID NO: 2877414 - RNA, 19 nt, Artificial Sequence
  Description of Artificial Sequence: Synthetic oligonucleotide
aauacuucccagaaaauuu

SEQ ID NO: 2877415 - RNA, 19 nt, Artificial Sequence
  Description of Artificial Sequence: Synthetic oligonucleotide
aguugauauagucauuccu

SEQ ID NO: 2877416 - RNA, 19 nt, Artificial Sequence
  Description of Artificial Sequence: Synthetic oligonucleotide
auaaccauagcuuguaauu

SEQ ID NO: 2877417 - RNA, 19 nt, Artificial Sequence
  Description of Artificial Sequence: Synthetic oligonucleotide
uguucugcccaauaauccc

SEQ ID NO: 2877418 - RNA, 19 nt, Artificial Sequence
  Description of Artificial Sequence: Synthetic oligonucleotide
augacacuauuuuauuuag

SEQ ID NO: 2877419 - RNA, 19 nt, Artificial Sequence
  Description of Artificial Sequence: Synthetic oligonucleotide
aaccauagcuuguaauuca

SEQ ID NO: 2877420 - RNA, 19 nt, Artificial Sequence
  Description of Artificial Sequence: Synthetic oligonucleotide
uguauucccaauaaccaua

SEQ ID NO: 2877421 - RNA, 19 nt, Artificial Sequence
  Description of Artificial Sequence: Synthetic oligonucleotide
uguacuucauguauauaaa

SEQ ID NO: 2877422 - RNA, 19 nt, Artificial Sequence
  Description of Artificial Sequence: Synthetic oligonucleotide
agaggagacauucugccug

SEQ ID NO: 2877423 - RNA, 19 nt, Artificial Sequence
  Description of Artificial Sequence: Synthetic oligonucleotide
auucaugaaauacuuccca

SEQ ID NO: 2877424 - RNA, 19 nt, Artificial Sequence
  Description of Artificial Sequence: Synthetic oligonucleotide
cauguauauaaaauuuguc

SEQ ID NO: 2877425 - RNA, 19 nt, Artificial Sequence
  Description of Artificial Sequence: Synthetic oligonucleotide
ucaugaaauacuucccaga

SEQ ID NO: 2877426 - RNA, 19 nt, Artificial Sequence
  Description of Artificial Sequence: Synthetic oligonucleotide
uacaaauggauauguacaa

SEQ ID NO: 2877427 - RNA, 19 nt, Artificial Sequence
  Description of Artificial Sequence: Synthetic oligonucleotide
ugguuaauucaugaaauac

SEQ ID NO: 2877428 - RNA, 19 nt, Artificial Sequence
  Description of Artificial Sequence: Synthetic oligonucleotide
gauucacagacucaaucac

SEQ ID NO: 2877429 - RNA, 19 nt, Artificial Sequence
  Description of Artificial Sequence: Synthetic oligonucleotide
uggauauguacaaauuguc

SEQ ID NO: 2877430 - RNA, 19 nt, Artificial Sequence
  Description of Artificial Sequence: Synthetic oligonucleotide
agacauucugccugugggc

SEQ ID NO: 2877431 - RNA, 19 nt, Artificial Sequence
  Description of Artificial Sequence: Synthetic oligonucleotide
gaugacacuauuuuauuua

SEQ ID NO: 2877432 - RNA, 19 nt, Artificial Sequence
  Description of Artificial Sequence: Synthetic oligonucleotide
ugucuaucaggucuuguac

SEQ ID NO: 2877433 - RNA, 19 nt, Artificial Sequence
  Description of Artificial Sequence: Synthetic oligonucleotide
ugucacagggauaucugcc

SEQ ID NO: 2877434 - RNA, 19 nt, Artificial Sequence
  Description of Artificial Sequence: Synthetic oligonucleotide
aaauacuucccagaaaauu

SEQ ID NO: 2877435 - RNA, 19 nt, Artificial Sequence
  Description of Artificial Sequence: Synthetic oligonucleotide
auaauuuguauucccaaua

SEQ ID NO: 2877436 - RNA, 19 nt, Artificial Sequence
  Description of Artificial Sequence: Synthetic oligonucleotide
uuuccagucauaauuugua

SEQ ID NO: 2877437 - RNA, 19 nt, Artificial Sequence
  Description of Artificial Sequence: Synthetic oligonucleotide
ucauaauuuguauucccaa

SEQ ID NO: 2877438 - RNA, 19 nt, Artificial Sequence
  Description of Artificial Sequence: Synthetic oligonucleotide
auaaaauuugucauacugu

SEQ ID NO: 2877439 - RNA, 19 nt, Artificial Sequence
  Description of Artificial Sequence: Synthetic oligonucleotide
aucuguuuguaacagagua

SEQ ID NO: 2877440 - RNA, 19 nt, Artificial Sequence
  Description of Artificial Sequence: Synthetic oligonucleotide
uccauaggcuugcuguugg

SEQ ID NO: 2877441 - RNA, 19 nt, Artificial Sequence
  Description of Artificial Sequence: Synthetic oligonucleotide
guauucuguauucuucucc

SEQ ID NO: 2877442 - RNA, 19 nt, Artificial Sequence
  Description of Artificial Sequence: Synthetic oligonucleotide
uucccaauaaccauagcuu

SEQ ID NO: 2877443 - RNA, 19 nt, Artificial Sequence
  Description of Artificial Sequence: Synthetic oligonucleotide
uuaauucaugaaauacuuc

SEQ ID NO: 2877444 - RNA, 19 nt, Artificial Sequence
  Description of Artificial Sequence: Synthetic oligonucleotide
auagcuuguaauucauucu

SEQ ID NO: 2877445 - RNA, 19 nt, Artificial Sequence
  Description of Artificial Sequence: Synthetic oligonucleotide
ucccaauaaccauagcuug

SEQ ID NO: 2877446 - RNA, 19 nt, Artificial Sequence
  Description of Artificial Sequence: Synthetic oligonucleotide
uuuuccuagugguuaauuc

SEQ ID NO: 2877447 - RNA, 19 nt, Artificial Sequence
  Description of Artificial Sequence: Synthetic oligonucleotide
uguuggacccaguugauau

SEQ ID NO: 2877448 - RNA, 19 nt, Artificial Sequence
  Description of Artificial Sequence: Synthetic oligonucleotide
uucuucuccaguucuuucc

SEQ ID NO: 2877449 - RNA, 19 nt, Artificial Sequence
  Description of Artificial Sequence: Synthetic oligonucleotide
cuuaaugucuaucaggucu

SEQ ID NO: 2877450 - RNA, 19 nt, Artificial Sequence
  Description of Artificial Sequence: Synthetic oligonucleotide
auguucugcccaauaaucc

SEQ ID NO: 2877451 - RNA, 19 nt, Artificial Sequence
  Description of Artificial Sequence: Synthetic oligonucleotide
auucacagacucaaucacc

SEQ ID NO: 2877452 - RNA, 19 nt, Artificial Sequence
  Description of Artificial Sequence: Synthetic oligonucleotide
cacagacucaaucaccggg

SEQ ID NO: 2877453 - RNA, 19 nt, Artificial Sequence
  Description of Artificial Sequence: Synthetic oligonucleotide
gacugcaucuguuuguaac

SEQ ID NO: 2877454 - RNA, 19 nt, Artificial Sequence
  Description of Artificial Sequence: Synthetic oligonucleotide
cuggucaauagccaucugc

SEQ ID NO: 2877455 - RNA, 19 nt, Artificial Sequence
  Description of Artificial Sequence: Synthetic oligonucleotide
ugcccaauaauccccuuug

SEQ ID NO: 2877456 - RNA, 19 nt, Artificial Sequence
  Description of Artificial Sequence: Synthetic oligonucleotide
aucugcaucuguaagacug

SEQ ID NO: 2877457 - RNA, 19 nt, Artificial Sequence
  Description of Artificial Sequence: Synthetic oligonucleotide
uagaauuaagcagggauuc

SEQ ID NO: 2877458 - RNA, 19 nt, Artificial Sequence
  Description of Artificial Sequence: Synthetic oligonucleotide
ucuacagaugacacuauuu

SEQ ID NO: 2877459 - RNA, 19 nt, Artificial Sequence
  Description of Artificial Sequence: Synthetic oligonucleotide
ucuguaagacugcaucugu

SEQ ID NO: 2877460 - RNA, 19 nt, Artificial Sequence
  Description of Artificial Sequence: Synthetic oligonucleotide
cauuccuuaaugucuauca

SEQ ID NO: 2877461 - RNA, 19 nt, Artificial Sequence
  Description of Artificial Sequence: Synthetic oligonucleotide
uugcuugggcaucaaauac

SEQ ID NO: 2877462 - RNA, 19 nt, Artificial Sequence
  Description of Artificial Sequence: Synthetic oligonucleotide
uucuguauucuucuccagu

SEQ ID NO: 2877463 - RNA, 19 nt, Artificial Sequence
  Description of Artificial Sequence: Synthetic oligonucleotide
uagcuuguaauucauucua

SEQ ID NO: 2877464 - RNA, 19 nt, Artificial Sequence
  Description of Artificial Sequence: Synthetic oligonucleotide
uuaauucgugggauguucu

SEQ ID NO: 2877465 - RNA, 19 nt, Artificial Sequence
  Description of Artificial Sequence: Synthetic oligonucleotide
uuugcuugggcaucaaaua

SEQ ID NO: 2877466 - RNA, 19 nt, Artificial Sequence
  Description of Artificial Sequence: Synthetic oligonucleotide
agggauaucugccaacacu

SEQ ID NO: 2877467 - RNA, 19 nt, Artificial Sequence
  Description of Artificial Sequence: Synthetic oligonucleotide
uuuaauucgugggauguuc

SEQ ID NO: 2877468 - RNA, 19 nt, Artificial Sequence
  Description of Artificial Sequence: Synthetic oligonucleotide
uaucaggucuuguacuuca

SEQ ID NO: 2877469 - RNA, 19 nt, Artificial Sequence
  Description of Artificial Sequence: Synthetic oligonucleotide
ugcuugggcaucaaauaca

SEQ ID NO: 2877470 - RNA, 19 nt, Artificial Sequence
  Description of Artificial Sequence: Synthetic oligonucleotide
uuaagcagggauucacaga

SEQ ID NO: 2877471 - RNA, 19 nt, Artificial Sequence
  Description of Artificial Sequence: Synthetic oligonucleotide
gauguucugcccaauaauc

SEQ ID NO: 2877472 - RNA, 19 nt, Artificial Sequence
  Description of Artificial Sequence: Synthetic oligonucleotide
cugccaacacuccauaggc

SEQ ID NO: 2877473 - RNA, 19 nt, Artificial Sequence
  Description of Artificial Sequence: Synthetic oligonucleotide
gaauuaagcagggauucac

SEQ ID NO: 2877474 - RNA, 19 nt, Artificial Sequence
  Description of Artificial Sequence: Synthetic oligonucleotide
acugcaucuguuuguaaca

SEQ ID NO: 2877475 - RNA, 19 nt, Artificial Sequence
  Description of Artificial Sequence: Synthetic oligonucleotide
uaggcuugcuguuggaccc

SEQ ID NO: 2877476 - RNA, 19 nt, Artificial Sequence
  Description of Artificial Sequence: Synthetic oligonucleotide
guaagacugcaucuguuug

SEQ ID NO: 2877477 - RNA, 19 nt, Artificial Sequence
  Description of Artificial Sequence: Synthetic oligonucleotide
auggauauguacaaauugu

SEQ ID NO: 2877478 - RNA, 19 nt, Artificial Sequence
  Description of Artificial Sequence: Synthetic oligonucleotide
uugauauagucauuccuua

SEQ ID NO: 2877479 - RNA, 19 nt, Artificial Sequence
  Description of Artificial Sequence: Synthetic oligonucleotide
ucuucuccaguucuuucca

SEQ ID NO: 2877480 - RNA, 19 nt, Artificial Sequence
  Description of Artificial Sequence: Synthetic oligonucleotide
ucugcaucuguaagacugc

SEQ ID NO: 2877481 - RNA, 19 nt, Artificial Sequence
  Description of Artificial Sequence: Synthetic oligonucleotide
aauuaagcagggauucaca

SEQ ID NO: 2877482 - RNA, 19 nt, Artificial Sequence
  Description of Artificial Sequence: Synthetic oligonucleotide
guauauaaaauuugucaua

SEQ ID NO: 2877483 - RNA, 19 nt, Artificial Sequence
  Description of Artificial Sequence: Synthetic oligonucleotide
uuggacccaguugauauag

SEQ ID NO: 2877484 - RNA, 19 nt, Artificial Sequence
  Description of Artificial Sequence: Synthetic oligonucleotide
uguaagacugcaucuguuu

SEQ ID NO: 2877485 - RNA, 19 nt, Artificial Sequence
  Description of Artificial Sequence: Synthetic oligonucleotide
cuuguaauucauucuagaa

SEQ ID NO: 2877486 - RNA, 19 nt, Artificial Sequence
  Description of Artificial Sequence: Synthetic oligonucleotide
uuguauucccaauaaccau

SEQ ID NO: 2877487 - RNA, 19 nt, Artificial Sequence
  Description of Artificial Sequence: Synthetic oligonucleotide
acccaguugauauagucau

SEQ ID NO: 2877488 - RNA, 19 nt, Artificial Sequence
  Description of Artificial Sequence: Synthetic oligonucleotide
agugguuaauucaugaaau

SEQ ID NO: 2877489 - RNA, 19 nt, Artificial Sequence
  Description of Artificial Sequence: Synthetic oligonucleotide
gucaauagccaucugcauc

SEQ ID NO: 2877490 - RNA, 19 nt, Artificial Sequence
  Description of Artificial Sequence: Synthetic oligonucleotide
auauaaaauuugucauacu

SEQ ID NO: 2877491 - RNA, 19 nt, Artificial Sequence
  Description of Artificial Sequence: Synthetic oligonucleotide
uugucacagggauaucugc

SEQ ID NO: 2877492 - RNA, 19 nt, Artificial Sequence
  Description of Artificial Sequence: Synthetic oligonucleotide
gauaucugccaacacucca

SEQ ID NO: 2877493 - RNA, 19 nt, Artificial Sequence
  Description of Artificial Sequence: Synthetic oligonucleotide
uuccuagugguuaauucau

SEQ ID NO: 2877494 - RNA, 19 nt, Artificial Sequence
  Description of Artificial Sequence: Synthetic oligonucleotide
uaauucauucuagaauuaa

SEQ ID NO: 2877495 - RNA, 19 nt, Artificial Sequence
  Description of Artificial Sequence: Synthetic oligonucleotide
ugacacuauuuuauuuaga

SEQ ID NO: 2877496 - RNA, 19 nt, Artificial Sequence
  Description of Artificial Sequence: Synthetic oligonucleotide
ugauauagucauuccuuaa

SEQ ID NO: 2877497 - RNA, 19 nt, Artificial Sequence
  Description of Artificial Sequence: Synthetic oligonucleotide
acagaugacacuauuuuau

SEQ ID NO: 2877498 - RNA, 19 nt, Artificial Sequence
  Description of Artificial Sequence: Synthetic oligonucleotide
gacucaaucaccgggagaa

SEQ ID NO: 2877499 - RNA, 19 nt, Artificial Sequence
  Description of Artificial Sequence: Synthetic oligonucleotide
auguacaaauugucacagg

SEQ ID NO: 2877500 - RNA, 19 nt, Artificial Sequence
  Description of Artificial Sequence: Synthetic oligonucleotide
auuugucauacuguauaag

SEQ ID NO: 2877501 - RNA, 19 nt, Artificial Sequence
  Description of Artificial Sequence: Synthetic oligonucleotide
uacagaugacacuauuuua

SEQ ID NO: 2877502 - RNA, 19 nt, Artificial Sequence
  Description of Artificial Sequence: Synthetic oligonucleotide
uaaccauagcuuguaauuc

SEQ ID NO: 2877503 - RNA, 19 nt, Artificial Sequence
  Description of Artificial Sequence: Synthetic oligonucleotide
acuauuuuauuuagaaaau

SEQ ID NO: 2877504 - RNA, 19 nt, Artificial Sequence
  Description of Artificial Sequence: Synthetic oligonucleotide
ucuaucaggucuuguacuu

SEQ ID NO: 2877505 - RNA, 19 nt, Artificial Sequence
  Description of Artificial Sequence: Synthetic oligonucleotide
aaaauuugucauacuguau

SEQ ID NO: 2877506 - RNA, 19 nt, Artificial Sequence
  Description of Artificial Sequence: Synthetic oligonucleotide
gacauucugccugugggcc

SEQ ID NO: 2877507 - RNA, 19 nt, Artificial Sequence
  Description of Artificial Sequence: Synthetic oligonucleotide
ccagucauaauuuguauuc

SEQ ID NO: 2877508 - RNA, 19 nt, Artificial Sequence
  Description of Artificial Sequence: Synthetic oligonucleotide
uaauucgugggauguucug

SEQ ID NO: 2877509 - RNA, 19 nt, Artificial Sequence
  Description of Artificial Sequence: Synthetic oligonucleotide
caucaaauacaaauggaua

SEQ ID NO: 2877510 - RNA, 19 nt, Artificial Sequence
  Description of Artificial Sequence: Synthetic oligonucleotide
gauauagucauuccuuaau

SEQ ID NO: 2877511 - RNA, 19 nt, Artificial Sequence
  Description of Artificial Sequence: Synthetic oligonucleotide
caugaaauacuucccagaa

SEQ ID NO: 2877512 - RNA, 19 nt, Artificial Sequence
  Description of Artificial Sequence: Synthetic oligonucleotide
aauagccaucugcaucugu

SEQ ID NO: 2877513 - RNA, 19 nt, Artificial Sequence
  Description of Artificial Sequence: Synthetic oligonucleotide
auucuagaauuaagcaggg

SEQ ID NO: 2877514 - RNA, 19 nt, Artificial Sequence
  Description of Artificial Sequence: Synthetic oligonucleotide
guauucccaauaaccauag

SEQ ID NO: 2877515 - RNA, 19 nt, Artificial Sequence
  Description of Artificial Sequence: Synthetic oligonucleotide
aaaagagaggagacauucu

SEQ ID NO: 2877516 - RNA, 19 nt, Artificial Sequence
  Description of Artificial Sequence: Synthetic oligonucleotide
ucacagacucaaucaccgg

SEQ ID NO: 2877517 - RNA, 19 nt, Artificial Sequence
  Description of Artificial Sequence: Synthetic oligonucleotide
uccagucauaauuuguauu

SEQ ID NO: 2877518 - RNA, 19 nt, Artificial Sequence
  Description of Artificial Sequence: Synthetic oligonucleotide
caguugauauagucauucc

SEQ ID NO: 2877519 - RNA, 19 nt, Artificial Sequence
  Description of Artificial Sequence: Synthetic oligonucleotide
uugcuguuggacccaguug

SEQ ID NO: 2877520 - RNA, 19 nt, Artificial Sequence
  Description of Artificial Sequence: Synthetic oligonucleotide
ggauucacagacucaauca

SEQ ID NO: 2877521 - RNA, 19 nt, Artificial Sequence
  Description of Artificial Sequence: Synthetic oligonucleotide
uccuagugguuaauucaug

SEQ ID NO: 2877522 - RNA, 19 nt, Artificial Sequence
  Description of Artificial Sequence: Synthetic oligonucleotide
auucuguauucuucuccag

SEQ ID NO: 2877523 - RNA, 19 nt, Artificial Sequence
  Description of Artificial Sequence: Synthetic oligonucleotide
gcaucuguuuguaacagag

SEQ ID NO: 2877524 - RNA, 19 nt, Artificial Sequence
  Description of Artificial Sequence: Synthetic oligonucleotide
cuucauguauauaaaauuu

SEQ ID NO: 2877525 - RNA, 19 nt, Artificial Sequence
  Description of Artificial Sequence: Synthetic oligonucleotide
cagucauaauuuguauucc

SEQ ID NO: 2877526 - RNA, 19 nt, Artificial Sequence
  Description of Artificial Sequence: Synthetic oligonucleotide
guacuucauguauauaaaa

SEQ ID NO: 2877527 - RNA, 19 nt, Artificial Sequence
  Description of Artificial Sequence: Synthetic oligonucleotide
uuccagucauaauuuguau

SEQ ID NO: 2877528 - RNA, 19 nt, Artificial Sequence
  Description of Artificial Sequence: Synthetic oligonucleotide
aaauacaaauggauaugua

SEQ ID NO: 2877529 - RNA, 19 nt, Artificial Sequence
  Description of Artificial Sequence: Synthetic oligonucleotide
augaaauacuucccagaaa

SEQ ID NO: 2877530 - RNA, 19 nt, Artificial Sequence
  Description of Artificial Sequence: Synthetic oligonucleotide
uucuacagaugacacuauu

SEQ ID NO: 2877531 - RNA, 19 nt, Artificial Sequence
  Description of Artificial Sequence: Synthetic oligonucleotide
gucauaauuuguauuccca

SEQ ID NO: 2877532 - RNA, 19 nt, Artificial Sequence
  Description of Artificial Sequence: Synthetic oligonucleotide
ugugggccuggucaauagc

SEQ ID NO: 2877533 - RNA, 19 nt, Artificial Sequence
  Description of Artificial Sequence: Synthetic oligonucleotide
ucgugggauguucugccca

SEQ ID NO: 2877534 - RNA, 19 nt, Artificial Sequence
  Description of Artificial Sequence: Synthetic oligonucleotide
ugcaucuguuuguaacaga

SEQ ID NO: 2877535 - RNA, 19 nt, Artificial Sequence
  Description of Artificial Sequence: Synthetic oligonucleotide
uucugcccaauaauccccu

SEQ ID NO: 2877536 - RNA, 19 nt, Artificial Sequence
  Description of Artificial Sequence: Synthetic oligonucleotide
guuaauucaugaaauacuu

SEQ ID NO: 2877537 - RNA, 19 nt, Artificial Sequence
  Description of Artificial Sequence: Synthetic oligonucleotide
caaauggauauguacaaau

SEQ ID NO: 2877538 - RNA, 19 nt, Artificial Sequence
  Description of Artificial Sequence: Synthetic oligonucleotide
aguucuuuccagucauaau

SEQ ID NO: 2877539 - RNA, 19 nt, Artificial Sequence
  Description of Artificial Sequence: Synthetic oligonucleotide
uauucccaauaaccauagc

SEQ ID NO: 2877540 - RNA, 19 nt, Artificial Sequence
  Description of Artificial Sequence: Synthetic oligonucleotide
aaauugucacagggauauc

SEQ ID NO: 2877541 - RNA, 19 nt, Artificial Sequence
  Description of Artificial Sequence: Synthetic oligonucleotide
uguuuguaacagaguaguu

SEQ ID NO: 2877542 - RNA, 19 nt, Artificial Sequence
  Description of Artificial Sequence: Synthetic oligonucleotide
acagggauaucugccaaca

SEQ ID NO: 2877543 - RNA, 19 nt, Artificial Sequence
  Description of Artificial Sequence: Synthetic oligonucleotide
ucacagggauaucugccaa

SEQ ID NO: 2877544 - RNA, 19 nt, Artificial Sequence
  Description of Artificial Sequence: Synthetic oligonucleotide
aucugccaacacuccauag

SEQ ID NO: 2877545 - RNA, 19 nt, Artificial Sequence
  Description of Artificial Sequence: Synthetic oligonucleotide
guucugcccaauaaucccc

SEQ ID NO: 2877546 - RNA, 19 nt, Artificial Sequence
  Description of Artificial Sequence: Synthetic oligonucleotide
agcuuguaauucauucuag

SEQ ID NO: 2877547 - RNA, 19 nt, Artificial Sequence
  Description of Artificial Sequence: Synthetic oligonucleotide
gacccaguugauauaguca

SEQ ID NO: 2877548 - RNA, 19 nt, Artificial Sequence
  Description of Artificial Sequence: Synthetic oligonucleotide
aagacugcaucuguuugua

SEQ ID NO: 2877549 - RNA, 19 nt, Artificial Sequence
  Description of Artificial Sequence: Synthetic oligonucleotide
ugggccuggucaauagcca

SEQ ID NO: 2877550 - RNA, 19 nt, Artificial Sequence
  Description of Artificial Sequence: Synthetic oligonucleotide
caaauugucacagggauau

SEQ ID NO: 2877551 - RNA, 19 nt, Artificial Sequence
  Description of Artificial Sequence: Synthetic oligonucleotide
ggauauguacaaauuguca

SEQ ID NO: 2877552 - RNA, 19 nt, Artificial Sequence
  Description of Artificial Sequence: Synthetic oligonucleotide
uccccuuuguauucuguau

SEQ ID NO: 2877553 - RNA, 19 nt, Artificial Sequence
  Description of Artificial Sequence: Synthetic oligonucleotide
uaauccccuuuguauucug

SEQ ID NO: 2877554 - RNA, 19 nt, Artificial Sequence
  Description of Artificial Sequence: Synthetic oligonucleotide
uuucuacagaugacacuau

SEQ ID NO: 2877555 - RNA, 19 nt, Artificial Sequence
  Description of Artificial Sequence: Synthetic oligonucleotide
ggagacauucugccugugg

SEQ ID NO: 2877556 - RNA, 19 nt, Artificial Sequence
  Description of Artificial Sequence: Synthetic oligonucleotide
uaucugccaacacuccaua

SEQ ID NO: 2877557 - RNA, 19 nt, Artificial Sequence
  Description of Artificial Sequence: Synthetic oligonucleotide
guacaaauugucacaggga

SEQ ID NO: 2877558 - RNA, 19 nt, Artificial Sequence
  Description of Artificial Sequence: Synthetic oligonucleotide
cuagugguuaauucaugaa

SEQ ID NO: 2877559 - RNA, 19 nt, Artificial Sequence
  Description of Artificial Sequence: Synthetic oligonucleotide
gggauucacagacucaauc

SEQ ID NO: 2877560 - RNA, 19 nt, Artificial Sequence
  Description of Artificial Sequence: Synthetic oligonucleotide
cuguauucuucuccaguuc

SEQ ID NO: 2877561 - RNA, 19 nt, Artificial Sequence
  Description of Artificial Sequence: Synthetic oligonucleotide
ucauuccuuaaugucuauc

SEQ ID NO: 2877562 - RNA, 19 nt, Artificial Sequence
  Description of Artificial Sequence: Synthetic oligonucleotide
uauucuucuccaguucuuu

SEQ ID NO: 2877563 - RNA, 19 nt, Artificial Sequence
  Description of Artificial Sequence: Synthetic oligonucleotide
ugccaacacuccauaggcu

SEQ ID NO: 2877564 - RNA, 19 nt, Artificial Sequence
  Description of Artificial Sequence: Synthetic oligonucleotide
agaauuaagcagggauuca

SEQ ID NO: 2877565 - RNA, 19 nt, Artificial Sequence
  Description of Artificial Sequence: Synthetic oligonucleotide
gugggccuggucaauagcc

SEQ ID NO: 2877566 - RNA, 19 nt, Artificial Sequence
  Description of Artificial Sequence: Synthetic oligonucleotide
uucgugggauguucugccc

SEQ ID NO: 2877567 - RNA, 19 nt, Artificial Sequence
  Description of Artificial Sequence: Synthetic oligonucleotide
acagacucaaucaccggga

SEQ ID NO: 2877568 - RNA, 19 nt, Artificial Sequence
  Description of Artificial Sequence: Synthetic oligonucleotide
cuagaauuaagcagggauu

SEQ ID NO: 2877569 - RNA, 19 nt, Artificial Sequence
  Description of Artificial Sequence: Synthetic oligonucleotide
cugcaucuguuuguaacag

SEQ ID NO: 2877570 - RNA, 19 nt, Artificial Sequence
  Description of Artificial Sequence: Synthetic oligonucleotide
ugcaucuguaagacugcau

SEQ ID NO: 2877571 - RNA, 19 nt, Artificial Sequence
  Description of Artificial Sequence: Synthetic oligonucleotide
caaauacaaauggauaugu

SEQ ID NO: 2877572 - RNA, 19 nt, Artificial Sequence
  Description of Artificial Sequence: Synthetic oligonucleotide
gguuaauucaugaaauacu

SEQ ID NO: 2877573 - RNA, 19 nt, Artificial Sequence
  Description of Artificial Sequence: Synthetic oligonucleotide
gggauaucugccaacacuc

SEQ ID NO: 2877574 - RNA, 19 nt, Artificial Sequence
  Description of Artificial Sequence: Synthetic oligonucleotide
cagacucaaucaccgggag

SEQ ID NO: 2877575 - RNA, 19 nt, Artificial Sequence
  Description of Artificial Sequence: Synthetic oligonucleotide
uucuagaauuaagcaggga

SEQ ID NO: 2877576 - RNA, 19 nt, Artificial Sequence
  Description of Artificial Sequence: Synthetic oligonucleotide
uagccaucugcaucuguaa

SEQ ID NO: 2877577 - RNA, 19 nt, Artificial Sequence
  Description of Artificial Sequence: Synthetic oligonucleotide
aggucuuguacuucaugua

SEQ ID NO: 2877578 - RNA, 19 nt, Artificial Sequence
  Description of Artificial Sequence: Synthetic oligonucleotide
cuguuuguaacagaguagu

SEQ ID NO: 2877579 - RNA, 19 nt, Artificial Sequence
  Description of Artificial Sequence: Synthetic oligonucleotide
uuuuaauucgugggauguu

SEQ ID NO: 2877580 - RNA, 19 nt, Artificial Sequence
  Description of Artificial Sequence: Synthetic oligonucleotide
cauaauuuguauucccaau

SEQ ID NO: 2877581 - RNA, 19 nt, Artificial Sequence
  Description of Artificial Sequence: Synthetic oligonucleotide
agacucaaucaccgggaga

SEQ ID NO: 2877582 - RNA, 19 nt, Artificial Sequence
  Description of Artificial Sequence: Synthetic oligonucleotide
auaucugccaacacuccau

SEQ ID NO: 2877583 - RNA, 19 nt, Artificial Sequence
  Description of Artificial Sequence: Synthetic oligonucleotide
gcuuguaauucauucuaga

SEQ ID NO: 2877584 - RNA, 19 nt, Artificial Sequence
  Description of Artificial Sequence: Synthetic oligonucleotide
auaauccccuuuguauucu

SEQ ID NO: 2877585 - RNA, 19 nt, Artificial Sequence
  Description of Artificial Sequence: Synthetic oligonucleotide
cauaggcuugcuguuggac

SEQ ID NO: 2877586 - RNA, 19 nt, Artificial Sequence
  Description of Artificial Sequence: Synthetic oligonucleotide
gugguuaauucaugaaaua

SEQ ID NO: 2877587 - RNA, 19 nt, Artificial Sequence
  Description of Artificial Sequence: Synthetic oligonucleotide
caacacuccauaggcuugc

SEQ ID NO: 2877588 - RNA, 19 nt, Artificial Sequence
  Description of Artificial Sequence: Synthetic oligonucleotide
cuuuccagucauaauuugu

SEQ ID NO: 2877589 - RNA, 19 nt, Artificial Sequence
  Description of Artificial Sequence: Synthetic oligonucleotide
cugccugugggccugguca

SEQ ID NO: 2877590 - RNA, 19 nt, Artificial Sequence
  Description of Artificial Sequence: Synthetic oligonucleotide
caggucuuguacuucaugu

SEQ ID NO: 2877591 - RNA, 19 nt, Artificial Sequence
  Description of Artificial Sequence: Synthetic oligonucleotide
ccaguugauauagucauuc

SEQ ID NO: 2877592 - RNA, 19 nt, Artificial Sequence
  Description of Artificial Sequence: Synthetic oligonucleotide
cacagggauaucugccaac

SEQ ID NO: 2877593 - RNA, 19 nt, Artificial Sequence
  Description of Artificial Sequence: Synthetic oligonucleotide
aauccccuuuguauucugu

SEQ ID NO: 2877594 - RNA, 19 nt, Artificial Sequence
  Description of Artificial Sequence: Synthetic oligonucleotide
ugggauguucugcccaaua

SEQ ID NO: 2877595 - RNA, 19 nt, Artificial Sequence
  Description of Artificial Sequence: Synthetic oligonucleotide
agucauuccuuaaugucua

SEQ ID NO: 2877596 - RNA, 19 nt, Artificial Sequence
  Description of Artificial Sequence: Synthetic oligonucleotide
ggacccaguugauauaguc

SEQ ID NO: 2877597 - RNA, 19 nt, Artificial Sequence
  Description of Artificial Sequence: Synthetic oligonucleotide
cuacagaugacacuauuuu

SEQ ID NO: 2877598 - RNA, 19 nt, Artificial Sequence
  Description of Artificial Sequence: Synthetic oligonucleotide
cugugggccuggucaauag

SEQ ID NO: 2877599 - RNA, 19 nt, Artificial Sequence
  Description of Artificial Sequence: Synthetic oligonucleotide
auagccaucugcaucugua

SEQ ID NO: 2877600 - RNA, 19 nt, Artificial Sequence
  Description of Artificial Sequence: Synthetic oligonucleotide
auacuucccagaaaauuuu

SEQ ID NO: 2877601 - RNA, 19 nt, Artificial Sequence
  Description of Artificial Sequence: Synthetic oligonucleotide
caauaauccccuuuguauu

SEQ ID NO: 2877602 - RNA, 19 nt, Artificial Sequence
  Description of Artificial Sequence: Synthetic oligonucleotide
acauucugccugugggccu

SEQ ID NO: 2877603 - RNA, 19 nt, Artificial Sequence
  Description of Artificial Sequence: Synthetic oligonucleotide
auccccuuuguauucugua

SEQ ID NO: 2877604 - RNA, 19 nt, Artificial Sequence
  Description of Artificial Sequence: Synthetic oligonucleotide
ccuagugguuaauucauga

SEQ ID NO: 2877605 - RNA, 19 nt, Artificial Sequence
  Description of Artificial Sequence: Synthetic oligonucleotide
acuccauaggcuugcuguu

SEQ ID NO: 2877606 - RNA, 19 nt, Artificial Sequence
  Description of Artificial Sequence: Synthetic oligonucleotide
acacuccauaggcuugcug

SEQ ID NO: 2877607 - RNA, 19 nt, Artificial Sequence
  Description of Artificial Sequence: Synthetic oligonucleotide
gccaucugcaucuguaaga

SEQ ID NO: 2877608 - RNA, 19 nt, Artificial Sequence
  Description of Artificial Sequence: Synthetic oligonucleotide
cuaucaggucuuguacuuc

SEQ ID NO: 2877609 - RNA, 19 nt, Artificial Sequence
  Description of Artificial Sequence: Synthetic oligonucleotide
uggacccaguugauauagu

SEQ ID NO: 2877610 - RNA, 19 nt, Artificial Sequence
  Description of Artificial Sequence: Synthetic oligonucleotide
cagggauucacagacucaa

SEQ ID NO: 2877611 - RNA, 19 nt, Artificial Sequence
  Description of Artificial Sequence: Synthetic oligonucleotide
guaauucauucuagaauua

SEQ ID NO: 2877612 - RNA, 19 nt, Artificial Sequence
  Description of Artificial Sequence: Synthetic oligonucleotide
ccaucugcaucuguaagac

SEQ ID NO: 2877613 - RNA, 19 nt, Artificial Sequence
  Description of Artificial Sequence: Synthetic oligonucleotide
acaaauugucacagggaua

SEQ ID NO: 2877614 - RNA, 19 nt, Artificial Sequence
  Description of Artificial Sequence: Synthetic oligonucleotide
gagaggagacauucugccu

SEQ ID NO: 2877615 - RNA, 19 nt, Artificial Sequence
  Description of Artificial Sequence: Synthetic oligonucleotide
cagggauaucugccaacac

SEQ ID NO: 2877616 - RNA, 19 nt, Artificial Sequence
  Description of Artificial Sequence: Synthetic oligonucleotide
ccaauaauccccuuuguau

SEQ ID NO: 2877617 - RNA, 19 nt, Artificial Sequence
  Description of Artificial Sequence: Synthetic oligonucleotide
cuccauaggcuugcuguug

SEQ ID NO: 2877618 - RNA, 19 nt, Artificial Sequence
  Description of Artificial Sequence: Synthetic oligonucleotide
accauagcuuguaauucau

SEQ ID NO: 2877619 - RNA, 19 nt, Artificial Sequence
  Description of Artificial Sequence: Synthetic oligonucleotide
cucaaucaccgggagaaaa

SEQ ID NO: 2877620 - RNA, 19 nt, Artificial Sequence
  Description of Artificial Sequence: Synthetic oligonucleotide
ggauaucugccaacacucc

SEQ ID NO: 2877621 - RNA, 19 nt, Artificial Sequence
  Description of Artificial Sequence: Synthetic oligonucleotide
caauaaccauagcuuguaa

SEQ ID NO: 2877622 - RNA, 19 nt, Artificial Sequence
  Description of Artificial Sequence: Synthetic oligonucleotide
gggauguucugcccaauaa

SEQ ID NO: 2877623 - RNA, 19 nt, Artificial Sequence
  Description of Artificial Sequence: Synthetic oligonucleotide
ggucuuguacuucauguau

SEQ ID NO: 2877624 - RNA, 19 nt, Artificial Sequence
  Description of Artificial Sequence: Synthetic oligonucleotide
gaggagacauucugccugu

SEQ ID NO: 2877625 - RNA, 19 nt, Artificial Sequence
  Description of Artificial Sequence: Synthetic oligonucleotide
gaaauacuucccagaaaau

SEQ ID NO: 2877626 - RNA, 19 nt, Artificial Sequence
  Description of Artificial Sequence: Synthetic oligonucleotide
ccaacacuccauaggcuug

SEQ ID NO: 2877627 - RNA, 19 nt, Artificial Sequence
  Description of Artificial Sequence: Synthetic oligonucleotide
gucuuguacuucauguaua

SEQ ID NO: 2877628 - RNA, 19 nt, Artificial Sequence
  Description of Artificial Sequence: Synthetic oligonucleotide
ugccugugggccuggucaa

SEQ ID NO: 2877629 - RNA, 19 nt, Artificial Sequence
  Description of Artificial Sequence: Synthetic oligonucleotide
aagcagggauucacagacu

SEQ ID NO: 2877630 - RNA, 19 nt, Artificial Sequence
  Description of Artificial Sequence: Synthetic oligonucleotide
guuggacccaguugauaua

SEQ ID NO: 2877631 - RNA, 19 nt, Artificial Sequence
  Description of Artificial Sequence: Synthetic oligonucleotide
agacugcaucuguuuguaa

SEQ ID NO: 2877632 - RNA, 19 nt, Artificial Sequence
  Description of Artificial Sequence: Synthetic oligonucleotide
caucuguuuguaacagagu

SEQ ID NO: 2877633 - RNA, 19 nt, Artificial Sequence
  Description of Artificial Sequence: Synthetic oligonucleotide
ggauguucugcccaauaau

SEQ ID NO: 2877634 - RNA, 19 nt, Artificial Sequence
  Description of Artificial Sequence: Synthetic oligonucleotide
cuugcuguuggacccaguu

SEQ ID NO: 2877635 - RNA, 19 nt, Artificial Sequence
  Description of Artificial Sequence: Synthetic oligonucleotide
gcuugggcaucaaauacaa

SEQ ID NO: 2877636 - RNA, 19 nt, Artificial Sequence
  Description of Artificial Sequence: Synthetic oligonucleotide
ucugcccaauaauccccuu

SEQ ID NO: 2877637 - RNA, 19 nt, Artificial Sequence
  Description of Artificial Sequence: Synthetic oligonucleotide
caauagccaucugcaucug

SEQ ID NO: 2877638 - RNA, 19 nt, Artificial Sequence
  Description of Artificial Sequence: Synthetic oligonucleotide
cuugggcaucaaauacaaa

SEQ ID NO: 2877639 - RNA, 19 nt, Artificial Sequence
  Description of Artificial Sequence: Synthetic oligonucleotide
cugcaucuguaagacugca

SEQ ID NO: 2877640 - RNA, 19 nt, Artificial Sequence
  Description of Artificial Sequence: Synthetic oligonucleotide
cuuguacuucauguauaua

SEQ ID NO: 2877641 - RNA, 19 nt, Artificial Sequence
  Description of Artificial Sequence: Synthetic oligonucleotide
gccaacacuccauaggcuu

SEQ ID NO: 2877642 - RNA, 19 nt, Artificial Sequence
  Description of Artificial Sequence: Synthetic oligonucleotide
cuguaagacugcaucuguu

SEQ ID NO: 2877643 - RNA, 19 nt, Artificial Sequence
  Description of Artificial Sequence: Synthetic oligonucleotide
auucugccugugggccugg

SEQ ID NO: 2877644 - RNA, 19 nt, Artificial Sequence
  Description of Artificial Sequence: Synthetic oligonucleotide
acucaaucaccgggagaaa

SEQ ID NO: 2877645 - RNA, 19 nt, Artificial Sequence
  Description of Artificial Sequence: Synthetic oligonucleotide
aucaggucuuguacuucau

SEQ ID NO: 2877646 - RNA, 19 nt, Artificial Sequence
  Description of Artificial Sequence: Synthetic oligonucleotide
agggauucacagacucaau

SEQ ID NO: 2877647 - RNA, 19 nt, Artificial Sequence
  Description of Artificial Sequence: Synthetic oligonucleotide
aggagacauucugccugug

SEQ ID NO: 2877648 - RNA, 19 nt, Artificial Sequence
  Description of Artificial Sequence: Synthetic oligonucleotide
cccaauaauccccuuugua

SEQ ID NO: 2877649 - RNA, 19 nt, Artificial Sequence
  Description of Artificial Sequence: Synthetic oligonucleotide
ccaauaaccauagcuugua

SEQ ID NO: 2877650 - RNA, 19 nt, Artificial Sequence
  Description of Artificial Sequence: Synthetic oligonucleotide
ggucaauagccaucugcau

SEQ ID NO: 2877651 - RNA, 19 nt, Artificial Sequence
  Description of Artificial Sequence: Synthetic oligonucleotide
aggcuugcuguuggaccca

SEQ ID NO: 2877652 - RNA, 19 nt, Artificial Sequence
  Description of Artificial Sequence: Synthetic oligonucleotide
cccaauaaccauagcuugu

SEQ ID NO: 2877653 - RNA, 19 nt, Artificial Sequence
  Description of Artificial Sequence: Synthetic oligonucleotide
guauucuucuccaguucuu

SEQ ID NO: 2877654 - RNA, 19 nt, Artificial Sequence
  Description of Artificial Sequence: Synthetic oligonucleotide
gcagggauucacagacuca

SEQ ID NO: 2877655 - RNA, 19 nt, Artificial Sequence
  Description of Artificial Sequence: Synthetic oligonucleotide
gucauuccuuaaugucuau

SEQ ID NO: 2877656 - RNA, 19 nt, Artificial Sequence
  Description of Artificial Sequence: Synthetic oligonucleotide
cuguuggacccaguugaua

SEQ ID NO: 2877657 - RNA, 19 nt, Artificial Sequence
  Description of Artificial Sequence: Synthetic oligonucleotide
ggcuugcuguuggacccag

SEQ ID NO: 2877658 - RNA, 19 nt, Artificial Sequence
  Description of Artificial Sequence: Synthetic oligonucleotide
cugcccaauaauccccuuu

SEQ ID NO: 2877659 - RNA, 19 nt, Artificial Sequence
  Description of Artificial Sequence: Synthetic oligonucleotide
uucugccugugggccuggu

SEQ ID NO: 2877660 - RNA, 19 nt, Artificial Sequence
  Description of Artificial Sequence: Synthetic oligonucleotide
gcccaauaauccccuuugu

SEQ ID NO: 2877661 - RNA, 19 nt, Artificial Sequence
  Description of Artificial Sequence: Synthetic oligonucleotide
ccuggucaauagccaucug

SEQ ID NO: 2877662 - RNA, 19 nt, Artificial Sequence
  Description of Artificial Sequence: Synthetic oligonucleotide
ccuuuguauucuguauucu

SEQ ID NO: 2877663 - RNA, 19 nt, Artificial Sequence
  Description of Artificial Sequence: Synthetic oligonucleotide
ccauaggcuugcuguugga

SEQ ID NO: 2877664 - RNA, 19 nt, Artificial Sequence
  Description of Artificial Sequence: Synthetic oligonucleotide
gggccuggucaauagccau

SEQ ID NO: 2877665 - RNA, 19 nt, Artificial Sequence
  Description of Artificial Sequence: Synthetic oligonucleotide
ccccuuuguauucuguauu

SEQ ID NO: 2877666 - RNA, 19 nt, Artificial Sequence
  Description of Artificial Sequence: Synthetic oligonucleotide
cgugggauguucugcccaa

SEQ ID NO: 2877667 - RNA, 19 nt, Artificial Sequence
  Description of Artificial Sequence: Synthetic oligonucleotide
ccauagcuuguaauucauu

SEQ ID NO: 2877668 - RNA, 19 nt, Artificial Sequence
  Description of Artificial Sequence: Synthetic oligonucleotide
gugggauguucugcccaau

SEQ ID NO: 2877669 - RNA, 19 nt, Artificial Sequence
  Description of Artificial Sequence: Synthetic oligonucleotide
gcuguuggacccaguugau

SEQ ID NO: 2877670 - RNA, 19 nt, Artificial Sequence
  Description of Artificial Sequence: Synthetic oligonucleotide
ccugugggccuggucaaua

SEQ ID NO: 2877671 - RNA, 19 nt, Artificial Sequence
  Description of Artificial Sequence: Synthetic oligonucleotide
cccaguugauauagucauu

SEQ ID NO: 2877672 - RNA, 19 nt, Artificial Sequence
  Description of Artificial Sequence: Synthetic oligonucleotide
gcuugcuguuggacccagu

SEQ ID NO: 2877673 - RNA, 19 nt, Artificial Sequence
  Description of Artificial Sequence: Synthetic oligonucleotide
gccugugggccuggucaau

SEQ ID NO: 2877674 - RNA, 19 nt, Artificial Sequence
  Description of Artificial Sequence: Synthetic oligonucleotide
aauauuauucuucuucucc

SEQ ID NO: 2877675 - RNA, 19 nt, Artificial Sequence
  Description of Artificial Sequence: Synthetic oligonucleotide
aacaauauuauucuucuuc

SEQ ID NO: 2877676 - RNA, 19 nt, Artificial Sequence
  Description of Artificial Sequence: Synthetic oligonucleotide
aaugguaaauuucugcugg

SEQ ID NO: 2877677 - RNA, 19 nt, Artificial Sequence
  Description of Artificial Sequence: Synthetic oligonucleotide
ucagcuacauauaaguugg

SEQ ID NO: 2877678 - RNA, 19 nt, Artificial Sequence
  Description of Artificial Sequence: Synthetic oligonucleotide
aaaauaguggcaauagacc

SEQ ID NO: 2877679 - RNA, 19 nt, Artificial Sequence
  Description of Artificial Sequence: Synthetic oligonucleotide
agcuucacaaaauaguggc

SEQ ID NO: 2877680 - RNA, 19 nt, Artificial Sequence
  Description of Artificial Sequence: Synthetic oligonucleotide
uuauuugucuccuacaaug

SEQ ID NO: 2877681 - RNA, 19 nt, Artificial Sequence
  Description of Artificial Sequence: Synthetic oligonucleotide
auauuauucuucuucuccc

SEQ ID NO: 2877682 - RNA, 19 nt, Artificial Sequence
  Description of Artificial Sequence: Synthetic oligonucleotide
auugaacuccaacugagcc

SEQ ID NO: 2877683 - RNA, 19 nt, Artificial Sequence
  Description of Artificial Sequence: Synthetic oligonucleotide
aagagaagcacuugugugg

SEQ ID NO: 2877684 - RNA, 19 nt, Artificial Sequence
  Description of Artificial Sequence: Synthetic oligonucleotide
aauuuugccagauaccaca

SEQ ID NO: 2877685 - RNA, 19 nt, Artificial Sequence
  Description of Artificial Sequence: Synthetic oligonucleotide
aaauaguggcaauagaccu

SEQ ID NO: 2877686 - RNA, 19 nt, Artificial Sequence
  Description of Artificial Sequence: Synthetic oligonucleotide
auaaguuggaucugaauuc

SEQ ID NO: 2877687 - RNA, 19 nt, Artificial Sequence
  Description of Artificial Sequence: Synthetic oligonucleotide
auuguguucucucacugcc

SEQ ID NO: 2877688 - RNA, 19 nt, Artificial Sequence
  Description of Artificial Sequence: Synthetic oligonucleotide
uaucaauuuugccagauac

SEQ ID NO: 2877689 - RNA, 19 nt, Artificial Sequence
  Description of Artificial Sequence: Synthetic oligonucleotide
uauaaguuggaucugaauu

SEQ ID NO: 2877690 - RNA, 19 nt, Artificial Sequence
  Description of Artificial Sequence: Synthetic oligonucleotide
caaaauaguggcaauagac

SEQ ID NO: 2877691 - RNA, 19 nt, Artificial Sequence
  Description of Artificial Sequence: Synthetic oligonucleotide
uugagaaaugucaagagaa

SEQ ID NO: 2877692 - RNA, 19 nt, Artificial Sequence
  Description of Artificial Sequence: Synthetic oligonucleotide
uggguaaacaauauuauuc

SEQ ID NO: 2877693 - RNA, 19 nt, Artificial Sequence
  Description of Artificial Sequence: Synthetic oligonucleotide
uuaucauugaacuccaacu

SEQ ID NO: 2877694 - RNA, 19 nt, Artificial Sequence
  Description of Artificial Sequence: Synthetic oligonucleotide
uaaacaauauuauucuucu

SEQ ID NO: 2877695 - RNA, 19 nt, Artificial Sequence
  Description of Artificial Sequence: Synthetic oligonucleotide
ucuccaugauaccaaagcg

SEQ ID NO: 2877696 - RNA, 19 nt, Artificial Sequence
  Description of Artificial Sequence: Synthetic oligonucleotide
aagaguaccucuuuaauua

SEQ ID NO: 2877697 - RNA, 19 nt, Artificial Sequence
  Description of Artificial Sequence: Synthetic oligonucleotide
uagaccuucuccaugauac

SEQ ID NO: 2877698 - RNA, 19 nt, Artificial Sequence
  Description of Artificial Sequence: Synthetic oligonucleotide
ucuuuaauuaucugagccc

SEQ ID NO: 2877699 - RNA, 19 nt, Artificial Sequence
  Description of Artificial Sequence: Synthetic oligonucleotide
uaucauugaacuccaacug

SEQ ID NO: 2877700 - RNA, 19 nt, Artificial Sequence
  Description of Artificial Sequence: Synthetic oligonucleotide
cuucuuaucauugaacucc

SEQ ID NO: 2877701 - RNA, 19 nt, Artificial Sequence
  Description of Artificial Sequence: Synthetic oligonucleotide
cucuuuaauuaucugagcc

SEQ ID NO: 2877702 - RNA, 19 nt, Artificial Sequence
  Description of Artificial Sequence: Synthetic oligonucleotide
uauuugucuccuacaaugg

SEQ ID NO: 2877703 - RNA, 19 nt, Artificial Sequence
  Description of Artificial Sequence: Synthetic oligonucleotide
uuugccagauaccacaucu

SEQ ID NO: 2877704 - RNA, 19 nt, Artificial Sequence
  Description of Artificial Sequence: Synthetic oligonucleotide
uauuuuauuugucuccuac

SEQ ID NO: 2877705 - RNA, 19 nt, Artificial Sequence
  Description of Artificial Sequence: Synthetic oligonucleotide
uuugcuguauuuuauuugu

SEQ ID NO: 2877706 - RNA, 19 nt, Artificial Sequence
  Description of Artificial Sequence: Synthetic oligonucleotide
uuugagaaaugucaagaga

SEQ ID NO: 2877707 - RNA, 19 nt, Artificial Sequence
  Description of Artificial Sequence: Synthetic oligonucleotide
ugucuugugcuucuaagag

SEQ ID NO: 2877708 - RNA, 19 nt, Artificial Sequence
  Description of Artificial Sequence: Synthetic oligonucleotide
uguggaugcaugauugggg

SEQ ID NO: 2877709 - RNA, 19 nt, Artificial Sequence
  Description of Artificial Sequence: Synthetic oligonucleotide
uuuuauuugucuccuacaa

SEQ ID NO: 2877710 - RNA, 19 nt, Artificial Sequence
  Description of Artificial Sequence: Synthetic oligonucleotide
ucaauuuugccagauacca

SEQ ID NO: 2877711 - RNA, 19 nt, Artificial Sequence
  Description of Artificial Sequence: Synthetic oligonucleotide
ucauugaacuccaacugag

SEQ ID NO: 2877712 - RNA, 19 nt, Artificial Sequence
  Description of Artificial Sequence: Synthetic oligonucleotide
uacaaugguaaauuucugc

SEQ ID NO: 2877713 - RNA, 19 nt, Artificial Sequence
  Description of Artificial Sequence: Synthetic oligonucleotide
ucugaauuccacauugugu

SEQ ID NO: 2877714 - RNA, 19 nt, Artificial Sequence
  Description of Artificial Sequence: Synthetic oligonucleotide
acaauauuauucuucuucu

SEQ ID NO: 2877715 - RNA, 19 nt, Artificial Sequence
  Description of Artificial Sequence: Synthetic oligonucleotide
cuuuaauuaucugagcccc

SEQ ID NO: 2877716 - RNA, 19 nt, Artificial Sequence
  Description of Artificial Sequence: Synthetic oligonucleotide
ugagaaaugucaagagaag

SEQ ID NO: 2877717 - RNA, 19 nt, Artificial Sequence
  Description of Artificial Sequence: Synthetic oligonucleotide
cucguaucaauuuugccag

SEQ ID NO: 2877718 - RNA, 19 nt, Artificial Sequence
  Description of Artificial Sequence: Synthetic oligonucleotide
uccaugauaccaaagcgac

SEQ ID NO: 2877719 - RNA, 19 nt, Artificial Sequence
  Description of Artificial Sequence: Synthetic oligonucleotide
ucuuugagaaaugucaaga

SEQ ID NO: 2877720 - RNA, 19 nt, Artificial Sequence
  Description of Artificial Sequence: Synthetic oligonucleotide
ucgaauguugucuugcgug

SEQ ID NO: 2877721 - RNA, 19 nt, Artificial Sequence
  Description of Artificial Sequence: Synthetic oligonucleotide
cucagcuacauauaaguug

SEQ ID NO: 2877722 - RNA, 19 nt, Artificial Sequence
  Description of Artificial Sequence: Synthetic oligonucleotide
uuguguggaugcaugauug

SEQ ID NO: 2877723 - RNA, 19 nt, Artificial Sequence
  Description of Artificial Sequence: Synthetic oligonucleotide
ucuugugcuucuaagagua

SEQ ID NO: 2877724 - RNA, 19 nt, Artificial Sequence
  Description of Artificial Sequence: Synthetic oligonucleotide
ucaagagaagcacuugugu

SEQ ID NO: 2877725 - RNA, 19 nt, Artificial Sequence
  Description of Artificial Sequence: Synthetic oligonucleotide
cuuugagaaaugucaagag

SEQ ID NO: 2877726 - RNA, 19 nt, Artificial Sequence
  Description of Artificial Sequence: Synthetic oligonucleotide
ugaacuccaacugagccag

SEQ ID NO: 2877727 - RNA, 19 nt, Artificial Sequence
  Description of Artificial Sequence: Synthetic oligonucleotide
ugguggguaaacaauauua

SEQ ID NO: 2877728 - RNA, 19 nt, Artificial Sequence
  Description of Artificial Sequence: Synthetic oligonucleotide
uaccucuuuaauuaucuga

SEQ ID NO: 2877729 - RNA, 19 nt, Artificial Sequence
  Description of Artificial Sequence: Synthetic oligonucleotide
ugaucgauggacaugccuc

SEQ ID NO: 2877730 - RNA, 19 nt, Artificial Sequence
  Description of Artificial Sequence: Synthetic oligonucleotide
agacgcuucaggcacuggc

SEQ ID NO: 2877731 - RNA, 19 nt, Artificial Sequence
  Description of Artificial Sequence: Synthetic oligonucleotide
cuuaucauugaacuccaac

SEQ ID NO: 2877732 - RNA, 19 nt, Artificial Sequence
  Description of Artificial Sequence: Synthetic oligonucleotide
cuccaacugagccagagcc

SEQ ID NO: 2877733 - RNA, 19 nt, Artificial Sequence
  Description of Artificial Sequence: Synthetic oligonucleotide
cugagguagacucagcuac

SEQ ID NO: 2877734 - RNA, 19 nt, Artificial Sequence
  Description of Artificial Sequence: Synthetic oligonucleotide
cuacauauaaguuggaucu

SEQ ID NO: 2877735 - RNA, 19 nt, Artificial Sequence
  Description of Artificial Sequence: Synthetic oligonucleotide
aauuccacauuguguucuc

SEQ ID NO: 2877736 - RNA, 19 nt, Artificial Sequence
  Description of Artificial Sequence: Synthetic oligonucleotide
gagaaaugucaagagaagc

SEQ ID NO: 2877737 - RNA, 19 nt, Artificial Sequence
  Description of Artificial Sequence: Synthetic oligonucleotide
ugucaagagaagcacuugu

SEQ ID NO: 2877738 - RNA, 19 nt, Artificial Sequence
  Description of Artificial Sequence: Synthetic oligonucleotide
ucuucucccaucuuugaga

SEQ ID NO: 2877739 - RNA, 19 nt, Artificial Sequence
  Description of Artificial Sequence: Synthetic oligonucleotide
uguauuuuauuugucuccu

SEQ ID NO: 2877740 - RNA, 19 nt, Artificial Sequence
  Description of Artificial Sequence: Synthetic oligonucleotide
ucuaagaguaccucuuuaa

SEQ ID NO: 2877741 - RNA, 19 nt, Artificial Sequence
  Description of Artificial Sequence: Synthetic oligonucleotide
aucaauuuugccagauacc

SEQ ID NO: 2877742 - RNA, 19 nt, Artificial Sequence
  Description of Artificial Sequence: Synthetic oligonucleotide
gaaaugucaagagaagcac

SEQ ID NO: 2877743 - RNA, 19 nt, Artificial Sequence
  Description of Artificial Sequence: Synthetic oligonucleotide
guaaacaauauuauucuuc

SEQ ID NO: 2877744 - RNA, 19 nt, Artificial Sequence
  Description of Artificial Sequence: Synthetic oligonucleotide
gaucgauggacaugccucg

SEQ ID NO: 2877745 - RNA, 19 nt, Artificial Sequence
  Description of Artificial Sequence: Synthetic oligonucleotide
ugugcuucuaagaguaccu

SEQ ID NO: 2877746 - RNA, 19 nt, Artificial Sequence
  Description of Artificial Sequence: Synthetic oligonucleotide
acggagacgcuucaggcac

SEQ ID NO: 2877747 - RNA, 19 nt, Artificial Sequence
  Description of Artificial Sequence: Synthetic oligonucleotide
guggcaauagaccuucucc

SEQ ID NO: 2877748 - RNA, 19 nt, Artificial Sequence
  Description of Artificial Sequence: Synthetic oligonucleotide
guaacggagacgcuucagg

SEQ ID NO: 2877749 - RNA, 19 nt, Artificial Sequence
  Description of Artificial Sequence: Synthetic oligonucleotide
caagagaagcacuugugug

SEQ ID NO: 2877750 - RNA, 19 nt, Artificial Sequence
  Description of Artificial Sequence: Synthetic oligonucleotide
auuuuauuugucuccuaca

SEQ ID NO: 2877751 - RNA, 19 nt, Artificial Sequence
  Description of Artificial Sequence: Synthetic oligonucleotide
ucuugcgugcuucgggugg

SEQ ID NO: 2877752 - RNA, 19 nt, Artificial Sequence
  Description of Artificial Sequence: Synthetic oligonucleotide
ugauaccaaagcgaccucg

SEQ ID NO: 2877753 - RNA, 19 nt, Artificial Sequence
  Description of Artificial Sequence: Synthetic oligonucleotide
uugucuugcgugcuucggg

SEQ ID NO: 2877754 - RNA, 19 nt, Artificial Sequence
  Description of Artificial Sequence: Synthetic oligonucleotide
aaagcgaccucggccaugg

SEQ ID NO: 2877755 - RNA, 19 nt, Artificial Sequence
  Description of Artificial Sequence: Synthetic oligonucleotide
auuucugcuggucuccgag

SEQ ID NO: 2877756 - RNA, 19 nt, Artificial Sequence
  Description of Artificial Sequence: Synthetic oligonucleotide
accucuuuaauuaucugag

SEQ ID NO: 2877757 - RNA, 19 nt, Artificial Sequence
  Description of Artificial Sequence: Synthetic oligonucleotide
uaagaguaccucuuuaauu

SEQ ID NO: 2877758 - RNA, 19 nt, Artificial Sequence
  Description of Artificial Sequence: Synthetic oligonucleotide
uccuacaaugguaaauuuc

SEQ ID NO: 2877759 - RNA, 19 nt, Artificial Sequence
  Description of Artificial Sequence: Synthetic oligonucleotide
auaguggcaauagaccuuc

SEQ ID NO: 2877760 - RNA, 19 nt, Artificial Sequence
  Description of Artificial Sequence: Synthetic oligonucleotide
uugaacuccaacugagcca

SEQ ID NO: 2877761 - RNA, 19 nt, Artificial Sequence
  Description of Artificial Sequence: Synthetic oligonucleotide
aucugaauuccacauugug

SEQ ID NO: 2877762 - RNA, 19 nt, Artificial Sequence
  Description of Artificial Sequence: Synthetic oligonucleotide
uuugucuccuacaauggua

SEQ ID NO: 2877763 - RNA, 19 nt, Artificial Sequence
  Description of Artificial Sequence: Synthetic oligonucleotide
aucauugaacuccaacuga

SEQ ID NO: 2877764 - RNA, 19 nt, Artificial Sequence
  Description of Artificial Sequence: Synthetic oligonucleotide
aucuuugagaaaugucaag

SEQ ID NO: 2877765 - RNA, 19 nt, Artificial Sequence
  Description of Artificial Sequence: Synthetic oligonucleotide
gaagcacuuguguggaugc

SEQ ID NO: 2877766 - RNA, 19 nt, Artificial Sequence
  Description of Artificial Sequence: Synthetic oligonucleotide
uuuauuugucuccuacaau

SEQ ID NO: 2877767 - RNA, 19 nt, Artificial Sequence
  Description of Artificial Sequence: Synthetic oligonucleotide
cacaaaauaguggcaauag

SEQ ID NO: 2877768 - RNA, 19 nt, Artificial Sequence
  Description of Artificial Sequence: Synthetic oligonucleotide
uagacucagcuacauauaa

SEQ ID NO: 2877769 - RNA, 19 nt, Artificial Sequence
  Description of Artificial Sequence: Synthetic oligonucleotide
uggcaauagaccuucucca

SEQ ID NO: 2877770 - RNA, 19 nt, Artificial Sequence
  Description of Artificial Sequence: Synthetic oligonucleotide
uugucuccuacaaugguaa

SEQ ID NO: 2877771 - RNA, 19 nt, Artificial Sequence
  Description of Artificial Sequence: Synthetic oligonucleotide
uccgagguucaccaggcag

SEQ ID NO: 2877772 - RNA, 19 nt, Artificial Sequence
  Description of Artificial Sequence: Synthetic oligonucleotide
uucuuaucauugaacucca

SEQ ID NO: 2877773 - RNA, 19 nt, Artificial Sequence
  Description of Artificial Sequence: Synthetic oligonucleotide
uaacggagacgcuucaggc

SEQ ID NO: 2877774 - RNA, 19 nt, Artificial Sequence
  Description of Artificial Sequence: Synthetic oligonucleotide
ggaucugaauuccacauug

SEQ ID NO: 2877775 - RNA, 19 nt, Artificial Sequence
  Description of Artificial Sequence: Synthetic oligonucleotide
ucucccaucuuugagaaau

SEQ ID NO: 2877776 - RNA, 19 nt, Artificial Sequence
  Description of Artificial Sequence: Synthetic oligonucleotide
gauaccaaagcgaccucgg

SEQ ID NO: 2877777 - RNA, 19 nt, Artificial Sequence
  Description of Artificial Sequence: Synthetic oligonucleotide
caugucuugugcuucuaag

SEQ ID NO: 2877778 - RNA, 19 nt, Artificial Sequence
  Description of Artificial Sequence: Synthetic oligonucleotide
uaaauuucugcuggucucc

SEQ ID NO: 2877779 - RNA, 19 nt, Artificial Sequence
  Description of Artificial Sequence: Synthetic oligonucleotide
auaccaaagcgaccucggc

SEQ ID NO: 2877780 - RNA, 19 nt, Artificial Sequence
  Description of Artificial Sequence: Synthetic oligonucleotide
uguguggaugcaugauugg

SEQ ID NO: 2877781 - RNA, 19 nt, Artificial Sequence
  Description of Artificial Sequence: Synthetic oligonucleotide
cagcuucacaaaauagugg

SEQ ID NO: 2877782 - RNA, 19 nt, Artificial Sequence
  Description of Artificial Sequence: Synthetic oligonucleotide
acaaaauaguggcaauaga

SEQ ID NO: 2877783 - RNA, 19 nt, Artificial Sequence
  Description of Artificial Sequence: Synthetic oligonucleotide
guaaauuucugcuggucuc

SEQ ID NO: 2877784 - RNA, 19 nt, Artificial Sequence
  Description of Artificial Sequence: Synthetic oligonucleotide
accaaagcgaccucggcca

SEQ ID NO: 2877785 - RNA, 19 nt, Artificial Sequence
  Description of Artificial Sequence: Synthetic oligonucleotide
uuggaucugaauuccacau

SEQ ID NO: 2877786 - RNA, 19 nt, Artificial Sequence
  Description of Artificial Sequence: Synthetic oligonucleotide
gacucagcuacauauaagu

SEQ ID NO: 2877787 - RNA, 19 nt, Artificial Sequence
  Description of Artificial Sequence: Synthetic oligonucleotide
caaugguaaauuucugcug

SEQ ID NO: 2877788 - RNA, 19 nt, Artificial Sequence
  Description of Artificial Sequence: Synthetic oligonucleotide
agguucaccaggcaguugu

SEQ ID NO: 2877789 - RNA, 19 nt, Artificial Sequence
  Description of Artificial Sequence: Synthetic oligonucleotide
cucuaccugagguagacuc

SEQ ID NO: 2877790 - RNA, 19 nt, Artificial Sequence
  Description of Artificial Sequence: Synthetic oligonucleotide
aacggagacgcuucaggca

SEQ ID NO: 2877791 - RNA, 19 nt, Artificial Sequence
  Description of Artificial Sequence: Synthetic oligonucleotide
acauuguguucucucacug

SEQ ID NO: 2877792 - RNA, 19 nt, Artificial Sequence
  Description of Artificial Sequence: Synthetic oligonucleotide
aaauuucugcuggucuccg

SEQ ID NO: 2877793 - RNA, 19 nt, Artificial Sequence
  Description of Artificial Sequence: Synthetic oligonucleotide
aguggcaauagaccuucuc

SEQ ID NO: 2877794 - RNA, 19 nt, Artificial Sequence
  Description of Artificial Sequence: Synthetic oligonucleotide
auggacaugccucguauca

SEQ ID NO: 2877795 - RNA, 19 nt, Artificial Sequence
  Description of Artificial Sequence: Synthetic oligonucleotide
acuccaacugagccagagc

SEQ ID NO: 2877796 - RNA, 19 nt, Artificial Sequence
  Description of Artificial Sequence: Synthetic oligonucleotide
aaugucaagagaagcacuu

SEQ ID NO: 2877797 - RNA, 19 nt, Artificial Sequence
  Description of Artificial Sequence: Synthetic oligonucleotide
aguuggaucugaauuccac

SEQ ID NO: 2877798 - RNA, 19 nt, Artificial Sequence
  Description of Artificial Sequence: Synthetic oligonucleotide
uccacauuguguucucuca

SEQ ID NO: 2877799 - RNA, 19 nt, Artificial Sequence
  Description of Artificial Sequence: Synthetic oligonucleotide
aaaugucaagagaagcacu

SEQ ID NO: 2877800 - RNA, 19 nt, Artificial Sequence
  Description of Artificial Sequence: Synthetic oligonucleotide
ucaggcacuggccucuacc

SEQ ID NO: 2877801 - RNA, 19 nt, Artificial Sequence
  Description of Artificial Sequence: Synthetic oligonucleotide
agaccuucuccaugauacc

SEQ ID NO: 2877802 - RNA, 19 nt, Artificial Sequence
  Description of Artificial Sequence: Synthetic oligonucleotide
ucuuugcuguauuuuauuu

SEQ ID NO: 2877803 - RNA, 19 nt, Artificial Sequence
  Description of Artificial Sequence: Synthetic oligonucleotide
augucuugugcuucuaaga

SEQ ID NO: 2877804 - RNA, 19 nt, Artificial Sequence
  Description of Artificial Sequence: Synthetic oligonucleotide
aguaccucuuuaauuaucu

SEQ ID NO: 2877805 - RNA, 19 nt, Artificial Sequence
  Description of Artificial Sequence: Synthetic oligonucleotide
ucuaccugagguagacuca

SEQ ID NO: 2877806 - RNA, 19 nt, Artificial Sequence
  Description of Artificial Sequence: Synthetic oligonucleotide
uugugcuucuaagaguacc

SEQ ID NO: 2877807 - RNA, 19 nt, Artificial Sequence
  Description of Artificial Sequence: Synthetic oligonucleotide
ugcuucuaagaguaccucu

SEQ ID NO: 2877808 - RNA, 19 nt, Artificial Sequence
  Description of Artificial Sequence: Synthetic oligonucleotide
cauugaacuccaacugagc

SEQ ID NO: 2877809 - RNA, 19 nt, Artificial Sequence
  Description of Artificial Sequence: Synthetic oligonucleotide
ucggccaugguaacggaga

SEQ ID NO: 2877810 - RNA, 19 nt, Artificial Sequence
  Description of Artificial Sequence: Synthetic oligonucleotide
uugugguggguaaacaaua

SEQ ID NO: 2877811 - RNA, 19 nt, Artificial Sequence
  Description of Artificial Sequence: Synthetic oligonucleotide
cauuguguucucucacugc

SEQ ID NO: 2877812 - RNA, 19 nt, Artificial Sequence
  Description of Artificial Sequence: Synthetic oligonucleotide
aacuccaacugagccagag

SEQ ID NO: 2877813 - RNA, 19 nt, Artificial Sequence
  Description of Artificial Sequence: Synthetic oligonucleotide
uuucugcuggucuccgagg

SEQ ID NO: 2877814 - RNA, 19 nt, Artificial Sequence
  Description of Artificial Sequence: Synthetic oligonucleotide
uguugucuugcgugcuucg

SEQ ID NO: 2877815 - RNA, 19 nt, Artificial Sequence
  Description of Artificial Sequence: Synthetic oligonucleotide
auauaaguuggaucugaau

SEQ ID NO: 2877816 - RNA, 19 nt, Artificial Sequence
  Description of Artificial Sequence: Synthetic oligonucleotide
ugucuuugcuguauuuuau

SEQ ID NO: 2877817 - RNA, 19 nt, Artificial Sequence
  Description of Artificial Sequence: Synthetic oligonucleotide
ucuccuacaaugguaaauu

SEQ ID NO: 2877818 - RNA, 19 nt, Artificial Sequence
  Description of Artificial Sequence: Synthetic oligonucleotide
uucucucacugccaugucu

SEQ ID NO: 2877819 - RNA, 19 nt, Artificial Sequence
  Description of Artificial Sequence: Synthetic oligonucleotide
gcuacauauaaguuggauc

SEQ ID NO: 2877820 - RNA, 19 nt, Artificial Sequence
  Description of Artificial Sequence: Synthetic oligonucleotide
uguguucucucacugccau

SEQ ID NO: 2877821 - RNA, 19 nt, Artificial Sequence
  Description of Artificial Sequence: Synthetic oligonucleotide
ugcaugauugggguaaaac

SEQ ID NO: 2877822 - RNA, 19 nt, Artificial Sequence
  Description of Artificial Sequence: Synthetic oligonucleotide
ucuccgagguucaccaggc

SEQ ID NO: 2877823 - RNA, 19 nt, Artificial Sequence
  Description of Artificial Sequence: Synthetic oligonucleotide
ugccucguaucaauuuugc

SEQ ID NO: 2877824 - RNA, 19 nt, Artificial Sequence
  Description of Artificial Sequence: Synthetic oligonucleotide
aguugugguggguaaacaa

SEQ ID NO: 2877825 - RNA, 19 nt, Artificial Sequence
  Description of Artificial Sequence: Synthetic oligonucleotide
caauauuauucuucuucuc

SEQ ID NO: 2877826 - RNA, 19 nt, Artificial Sequence
  Description of Artificial Sequence: Synthetic oligonucleotide
aaacaauauuauucuucuu

SEQ ID NO: 2877827 - RNA, 19 nt, Artificial Sequence
  Description of Artificial Sequence: Synthetic oligonucleotide
ugugguggguaaacaauau

SEQ ID NO: 2877828 - RNA, 19 nt, Artificial Sequence
  Description of Artificial Sequence: Synthetic oligonucleotide
gucuccgagguucaccagg

SEQ ID NO: 2877829 - RNA, 19 nt, Artificial Sequence
  Description of Artificial Sequence: Synthetic oligonucleotide
acauauaaguuggaucuga

SEQ ID NO: 2877830 - RNA, 19 nt, Artificial Sequence
  Description of Artificial Sequence: Synthetic oligonucleotide
uucuaagaguaccucuuua

SEQ ID NO: 2877831 - RNA, 19 nt, Artificial Sequence
  Description of Artificial Sequence: Synthetic oligonucleotide
uggucuccgagguucacca

SEQ ID NO: 2877832 - RNA, 19 nt, Artificial Sequence
  Description of Artificial Sequence: Synthetic oligonucleotide
cuacaaugguaaauuucug

SEQ ID NO: 2877833 - RNA, 19 nt, Artificial Sequence
  Description of Artificial Sequence: Synthetic oligonucleotide
ccaucuuugagaaauguca

SEQ ID NO: 2877834 - RNA, 19 nt, Artificial Sequence
  Description of Artificial Sequence: Synthetic oligonucleotide
accagcuucacaaaauagu

SEQ ID NO: 2877835 - RNA, 19 nt, Artificial Sequence
  Description of Artificial Sequence: Synthetic oligonucleotide
acuggccucuaccugaggu

SEQ ID NO: 2877836 - RNA, 19 nt, Artificial Sequence
  Description of Artificial Sequence: Synthetic oligonucleotide
agauaccacaucuugucuu

SEQ ID NO: 2877837 - RNA, 19 nt, Artificial Sequence
  Description of Artificial Sequence: Synthetic oligonucleotide
ucucucacugccaugucuu

SEQ ID NO: 2877838 - RNA, 19 nt, Artificial Sequence
  Description of Artificial Sequence: Synthetic oligonucleotide
ugagguagacucagcuaca

SEQ ID NO: 2877839 - RNA, 19 nt, Artificial Sequence
  Description of Artificial Sequence: Synthetic oligonucleotide
accugagguagacucagcu

SEQ ID NO: 2877840 - RNA, 19 nt, Artificial Sequence
  Description of Artificial Sequence: Synthetic oligonucleotide
cuccaugauaccaaagcga

SEQ ID NO: 2877841 - RNA, 19 nt, Artificial Sequence
  Description of Artificial Sequence: Synthetic oligonucleotide
uucacaaaauaguggcaau

SEQ ID NO: 2877842 - RNA, 19 nt, Artificial Sequence
  Description of Artificial Sequence: Synthetic oligonucleotide
ugucuugcgugcuucgggu

SEQ ID NO: 2877843 - RNA, 19 nt, Artificial Sequence
  Description of Artificial Sequence: Synthetic oligonucleotide
guuggaucugaauuccaca

SEQ ID NO: 2877844 - RNA, 19 nt, Artificial Sequence
  Description of Artificial Sequence: Synthetic oligonucleotide
caauuuugccagauaccac

SEQ ID NO: 2877845 - RNA, 19 nt, Artificial Sequence
  Description of Artificial Sequence: Synthetic oligonucleotide
ccagcuucacaaaauagug

SEQ ID NO: 2877846 - RNA, 19 nt, Artificial Sequence
  Description of Artificial Sequence: Synthetic oligonucleotide
uaccacaucuugucuuugc

SEQ ID NO: 2877847 - RNA, 19 nt, Artificial Sequence
  Description of Artificial Sequence: Synthetic oligonucleotide
aauguugucuugcgugcuu

SEQ ID NO: 2877848 - RNA, 19 nt, Artificial Sequence
  Description of Artificial Sequence: Synthetic oligonucleotide
guguggaugcaugauuggg

SEQ ID NO: 2877849 - RNA, 19 nt, Artificial Sequence
  Description of Artificial Sequence: Synthetic oligonucleotide
uacauauaaguuggaucug

SEQ ID NO: 2877850 - RNA, 19 nt, Artificial Sequence
  Description of Artificial Sequence: Synthetic oligonucleotide
ucaccaggcaguuguggug

SEQ ID NO: 2877851 - RNA, 19 nt, Artificial Sequence
  Description of Artificial Sequence: Synthetic oligonucleotide
aauuucugcuggucuccga

SEQ ID NO: 2877852 - RNA, 19 nt, Artificial Sequence
  Description of Artificial Sequence: Synthetic oligonucleotide
aauaguggcaauagaccuu

SEQ ID NO: 2877853 - RNA, 19 nt, Artificial Sequence
  Description of Artificial Sequence: Synthetic oligonucleotide
ugaauuccacauuguguuc

SEQ ID NO: 2877854 - RNA, 19 nt, Artificial Sequence
  Description of Artificial Sequence: Synthetic oligonucleotide
ucacaaaauaguggcaaua

SEQ ID NO: 2877855 - RNA, 19 nt, Artificial Sequence
  Description of Artificial Sequence: Synthetic oligonucleotide
uggucgaauguugucuugc

SEQ ID NO: 2877856 - RNA, 19 nt, Artificial Sequence
  Description of Artificial Sequence: Synthetic oligonucleotide
caugauaccaaagcgaccu

SEQ ID NO: 2877857 - RNA, 19 nt, Artificial Sequence
  Description of Artificial Sequence: Synthetic oligonucleotide
uccaacugagccagagccu

SEQ ID NO: 2877858 - RNA, 19 nt, Artificial Sequence
  Description of Artificial Sequence: Synthetic oligonucleotide
ugagccagagccugaucga

SEQ ID NO: 2877859 - RNA, 19 nt, Artificial Sequence
  Description of Artificial Sequence: Synthetic oligonucleotide
accacaucuugucuuugcu

SEQ ID NO: 2877860 - RNA, 19 nt, Artificial Sequence
  Description of Artificial Sequence: Synthetic oligonucleotide
uuccacauuguguucucuc

SEQ ID NO: 2877861 - RNA, 19 nt, Artificial Sequence
  Description of Artificial Sequence: Synthetic oligonucleotide
gcuguauuuuauuugucuc

SEQ ID NO: 2877862 - RNA, 19 nt, Artificial Sequence
  Description of Artificial Sequence: Synthetic oligonucleotide
uggccucuaccugagguag

SEQ ID NO: 2877863 - RNA, 19 nt, Artificial Sequence
  Description of Artificial Sequence: Synthetic oligonucleotide
accucggccaugguaacgg

SEQ ID NO: 2877864 - RNA, 19 nt, Artificial Sequence
  Description of Artificial Sequence: Synthetic oligonucleotide
cugaauuccacauuguguu

SEQ ID NO: 2877865 - RNA, 19 nt, Artificial Sequence
  Description of Artificial Sequence: Synthetic oligonucleotide
aauagaccuucuccaugau

SEQ ID NO: 2877866 - RNA, 19 nt, Artificial Sequence
  Description of Artificial Sequence: Synthetic oligonucleotide
cuucacaaaauaguggcaa

SEQ ID NO: 2877867 - RNA, 19 nt, Artificial Sequence
  Description of Artificial Sequence: Synthetic oligonucleotide
augguaacggagacgcuuc

SEQ ID NO: 2877868 - RNA, 19 nt, Artificial Sequence
  Description of Artificial Sequence: Synthetic oligonucleotide
gccaugguaacggagacgc

SEQ ID NO: 2877869 - RNA, 19 nt, Artificial Sequence
  Description of Artificial Sequence: Synthetic oligonucleotide
ccucguaucaauuuugcca

SEQ ID NO: 2877870 - RNA, 19 nt, Artificial Sequence
  Description of Artificial Sequence: Synthetic oligonucleotide
caucuuugagaaaugucaa

SEQ ID NO: 2877871 - RNA, 19 nt, Artificial Sequence
  Description of Artificial Sequence: Synthetic oligonucleotide
gccagagccugaucgaugg

SEQ ID NO: 2877872 - RNA, 19 nt, Artificial Sequence
  Description of Artificial Sequence: Synthetic oligonucleotide
gguagacucagcuacauau

SEQ ID NO: 2877873 - RNA, 19 nt, Artificial Sequence
  Description of Artificial Sequence: Synthetic oligonucleotide
gucaagagaagcacuugug

SEQ ID NO: 2877874 - RNA, 19 nt, Artificial Sequence
  Description of Artificial Sequence: Synthetic oligonucleotide
agagaagcacuugugugga

SEQ ID NO: 2877875 - RNA, 19 nt, Artificial Sequence
  Description of Artificial Sequence: Synthetic oligonucleotide
agaguaccucuuuaauuau

SEQ ID NO: 2877876 - RNA, 19 nt, Artificial Sequence
  Description of Artificial Sequence: Synthetic oligonucleotide
augauaccaaagcgaccuc

SEQ ID NO: 2877877 - RNA, 19 nt, Artificial Sequence
  Description of Artificial Sequence: Synthetic oligonucleotide
uuccaccagcuucacaaaa

SEQ ID NO: 2877878 - RNA, 19 nt, Artificial Sequence
  Description of Artificial Sequence: Synthetic oligonucleotide
gacgcuucaggcacuggcc

SEQ ID NO: 2877879 - RNA, 19 nt, Artificial Sequence
  Description of Artificial Sequence: Synthetic oligonucleotide
ggguaaacaauauuauucu

SEQ ID NO: 2877880 - RNA, 19 nt, Artificial Sequence
  Description of Artificial Sequence: Synthetic oligonucleotide
guaccucuuuaauuaucug

SEQ ID NO: 2877881 - RNA, 19 nt, Artificial Sequence
  Description of Artificial Sequence: Synthetic oligonucleotide
augguaaauuucugcuggu

SEQ ID NO: 2877882 - RNA, 19 nt, Artificial Sequence
  Description of Artificial Sequence: Synthetic oligonucleotide
caccaggcaguuguggugg

SEQ ID NO: 2877883 - RNA, 19 nt, Artificial Sequence
  Description of Artificial Sequence: Synthetic oligonucleotide
ccagauaccacaucuuguc

SEQ ID NO: 2877884 - RNA, 19 nt, Artificial Sequence
  Description of Artificial Sequence: Synthetic oligonucleotide
uuuugccagauaccacauc

SEQ ID NO: 2877885 - RNA, 19 nt, Artificial Sequence
  Description of Artificial Sequence: Synthetic oligonucleotide
ggucgaauguugucuugcg

SEQ ID NO: 2877886 - RNA, 19 nt, Artificial Sequence
  Description of Artificial Sequence: Synthetic oligonucleotide
gauggacaugccucguauc

SEQ ID NO: 2877887 - RNA, 19 nt, Artificial Sequence
  Description of Artificial Sequence: Synthetic oligonucleotide
auguugucuugcgugcuuc

SEQ ID NO: 2877888 - RNA, 19 nt, Artificial Sequence
  Description of Artificial Sequence: Synthetic oligonucleotide
uggaucugaauuccacauu

SEQ ID NO: 2877889 - RNA, 19 nt, Artificial Sequence
  Description of Artificial Sequence: Synthetic oligonucleotide
cacaucuugucuuugcugu

SEQ ID NO: 2877890 - RNA, 19 nt, Artificial Sequence
  Description of Artificial Sequence: Synthetic oligonucleotide
agacucagcuacauauaag

SEQ ID NO: 2877891 - RNA, 19 nt, Artificial Sequence
  Description of Artificial Sequence: Synthetic oligonucleotide
acugccaugucuugugcuu

SEQ ID NO: 2877892 - RNA, 19 nt, Artificial Sequence
  Description of Artificial Sequence: Synthetic oligonucleotide
gguaaauuucugcuggucu

SEQ ID NO: 2877893 - RNA, 19 nt, Artificial Sequence
  Description of Artificial Sequence: Synthetic oligonucleotide
ugguaaauuucugcugguc

SEQ ID NO: 2877894 - RNA, 19 nt, Artificial Sequence
  Description of Artificial Sequence: Synthetic oligonucleotide
ucccaucuuugagaaaugu

SEQ ID NO: 2877895 - RNA, 19 nt, Artificial Sequence
  Description of Artificial Sequence: Synthetic oligonucleotide
gaauuccacauuguguucu

SEQ ID NO: 2877896 - RNA, 19 nt, Artificial Sequence
  Description of Artificial Sequence: Synthetic oligonucleotide
guugucuugcgugcuucgg

SEQ ID NO: 2877897 - RNA, 19 nt, Artificial Sequence
  Description of Artificial Sequence: Synthetic oligonucleotide
gcaauagaccuucuccaug

SEQ ID NO: 2877898 - RNA, 19 nt, Artificial Sequence
  Description of Artificial Sequence: Synthetic oligonucleotide
ccuacaaugguaaauuucu

SEQ ID NO: 2877899 - RNA, 19 nt, Artificial Sequence
  Description of Artificial Sequence: Synthetic oligonucleotide
cauauaaguuggaucugaa

SEQ ID NO: 2877900 - RNA, 19 nt, Artificial Sequence
  Description of Artificial Sequence: Synthetic oligonucleotide
agcuacauauaaguuggau

SEQ ID NO: 2877901 - RNA, 19 nt, Artificial Sequence
  Description of Artificial Sequence: Synthetic oligonucleotide
gaccuucuccaugauacca

SEQ ID NO: 2877902 - RNA, 19 nt, Artificial Sequence
  Description of Artificial Sequence: Synthetic oligonucleotide
acaugccucguaucaauuu

SEQ ID NO: 2877903 - RNA, 19 nt, Artificial Sequence
  Description of Artificial Sequence: Synthetic oligonucleotide
auagaccuucuccaugaua

SEQ ID NO: 2877904 - RNA, 19 nt, Artificial Sequence
  Description of Artificial Sequence: Synthetic oligonucleotide
ucuuaucauugaacuccaa

SEQ ID NO: 2877905 - RNA, 19 nt, Artificial Sequence
  Description of Artificial Sequence: Synthetic oligonucleotide
augucaagagaagcacuug

SEQ ID NO: 2877906 - RNA, 19 nt, Artificial Sequence
  Description of Artificial Sequence: Synthetic oligonucleotide
ugguaacggagacgcuuca

SEQ ID NO: 2877907 - RNA, 19 nt, Artificial Sequence
  Description of Artificial Sequence: Synthetic oligonucleotide
cagagccugaucgauggac

SEQ ID NO: 2877908 - RNA, 19 nt, Artificial Sequence
  Description of Artificial Sequence: Synthetic oligonucleotide
gccugaucgauggacaugc

SEQ ID NO: 2877909 - RNA, 19 nt, Artificial Sequence
  Description of Artificial Sequence: Synthetic oligonucleotide
cucggccaugguaacggag

SEQ ID NO: 2877910 - RNA, 19 nt, Artificial Sequence
  Description of Artificial Sequence: Synthetic oligonucleotide
gaguaccucuuuaauuauc

SEQ ID NO: 2877911 - RNA, 19 nt, Artificial Sequence
  Description of Artificial Sequence: Synthetic oligonucleotide
aaguuggaucugaauucca

SEQ ID NO: 2877912 - RNA, 19 nt, Artificial Sequence
  Description of Artificial Sequence: Synthetic oligonucleotide
ccuuccaccagcuucacaa

SEQ ID NO: 2877913 - RNA, 19 nt, Artificial Sequence
  Description of Artificial Sequence: Synthetic oligonucleotide
cuugugcuucuaagaguac

SEQ ID NO: 2877914 - RNA, 19 nt, Artificial Sequence
  Description of Artificial Sequence: Synthetic oligonucleotide
ucguaucaauuuugccaga

SEQ ID NO: 2877915 - RNA, 19 nt, Artificial Sequence
  Description of Artificial Sequence: Synthetic oligonucleotide
acgcuucaggcacuggccu

SEQ ID NO: 2877916 - RNA, 19 nt, Artificial Sequence
  Description of Artificial Sequence: Synthetic oligonucleotide
ugccaugucuugugcuucu

SEQ ID NO: 2877917 - RNA, 19 nt, Artificial Sequence
  Description of Artificial Sequence: Synthetic oligonucleotide
ccucuuuaauuaucugagc

SEQ ID NO: 2877918 - RNA, 19 nt, Artificial Sequence
  Description of Artificial Sequence: Synthetic oligonucleotide
guggaugcaugauuggggu

SEQ ID NO: 2877919 - RNA, 19 nt, Artificial Sequence
  Description of Artificial Sequence: Synthetic oligonucleotide
agagccugaucgauggaca

SEQ ID NO: 2877920 - RNA, 19 nt, Artificial Sequence
  Description of Artificial Sequence: Synthetic oligonucleotide
uugccagauaccacaucuu

SEQ ID NO: 2877921 - RNA, 19 nt, Artificial Sequence
  Description of Artificial Sequence: Synthetic oligonucleotide
ucgauggacaugccucgua

SEQ ID NO: 2877922 - RNA, 19 nt, Artificial Sequence
  Description of Artificial Sequence: Synthetic oligonucleotide
uaccugagguagacucagc

SEQ ID NO: 2877923 - RNA, 19 nt, Artificial Sequence
  Description of Artificial Sequence: Synthetic oligonucleotide
cuugcgugcuucggguggg

SEQ ID NO: 2877924 - RNA, 19 nt, Artificial Sequence
  Description of Artificial Sequence: Synthetic oligonucleotide
aacugagccagagccugau

SEQ ID NO: 2877925 - RNA, 19 nt, Artificial Sequence
  Description of Artificial Sequence: Synthetic oligonucleotide
augccucguaucaauuuug

SEQ ID NO: 2877926 - RNA, 19 nt, Artificial Sequence
  Description of Artificial Sequence: Synthetic oligonucleotide
cgaauguugucuugcgugc

SEQ ID NO: 2877927 - RNA, 19 nt, Artificial Sequence
  Description of Artificial Sequence: Synthetic oligonucleotide
ccuucuuaucauugaacuc

SEQ ID NO: 2877928 - RNA, 19 nt, Artificial Sequence
  Description of Artificial Sequence: Synthetic oligonucleotide
guaucaauuuugccagaua

SEQ ID NO: 2877929 - RNA, 19 nt, Artificial Sequence
  Description of Artificial Sequence: Synthetic oligonucleotide
ggguccuuccaccagcuuc

SEQ ID NO: 2877930 - RNA, 19 nt, Artificial Sequence
  Description of Artificial Sequence: Synthetic oligonucleotide
cugcuggucuccgagguuc

SEQ ID NO: 2877931 - RNA, 19 nt, Artificial Sequence
  Description of Artificial Sequence: Synthetic oligonucleotide
acuuguguggaugcaugau

SEQ ID NO: 2877932 - RNA, 19 nt, Artificial Sequence
  Description of Artificial Sequence: Synthetic oligonucleotide
cucccaucuuugagaaaug

SEQ ID NO: 2877933 - RNA, 19 nt, Artificial Sequence
  Description of Artificial Sequence: Synthetic oligonucleotide
cuaagaguaccucuuuaau

SEQ ID NO: 2877934 - RNA, 19 nt, Artificial Sequence
  Description of Artificial Sequence: Synthetic oligonucleotide
cuucuucucccaucuuuga

SEQ ID NO: 2877935 - RNA, 19 nt, Artificial Sequence
  Description of Artificial Sequence: Synthetic oligonucleotide
uggacaugccucguaucaa

SEQ ID NO: 2877936 - RNA, 19 nt, Artificial Sequence
  Description of Artificial Sequence: Synthetic oligonucleotide
ugucuccuacaaugguaaa

SEQ ID NO: 2877937 - RNA, 19 nt, Artificial Sequence
  Description of Artificial Sequence: Synthetic oligonucleotide
auuuugccagauaccacau

SEQ ID NO: 2877938 - RNA, 19 nt, Artificial Sequence
  Description of Artificial Sequence: Synthetic oligonucleotide
gaccucggccaugguaacg

SEQ ID NO: 2877939 - RNA, 19 nt, Artificial Sequence
  Description of Artificial Sequence: Synthetic oligonucleotide
aucuugucuuugcuguauu

SEQ ID NO: 2877940 - RNA, 19 nt, Artificial Sequence
  Description of Artificial Sequence: Synthetic oligonucleotide
cucucacugccaugucuug

SEQ ID NO: 2877941 - RNA, 19 nt, Artificial Sequence
  Description of Artificial Sequence: Synthetic oligonucleotide
ggaugcaugauugggguaa

SEQ ID NO: 2877942 - RNA, 19 nt, Artificial Sequence
  Description of Artificial Sequence: Synthetic oligonucleotide
cuggucuccgagguucacc

SEQ ID NO: 2877943 - RNA, 19 nt, Artificial Sequence
  Description of Artificial Sequence: Synthetic oligonucleotide
uggaugcaugauuggggua

SEQ ID NO: 2877944 - RNA, 19 nt, Artificial Sequence
  Description of Artificial Sequence: Synthetic oligonucleotide
aggcacuggccucuaccug

SEQ ID NO: 2877945 - RNA, 19 nt, Artificial Sequence
  Description of Artificial Sequence: Synthetic oligonucleotide
gucuugugcuucuaagagu

SEQ ID NO: 2877946 - RNA, 19 nt, Artificial Sequence
  Description of Artificial Sequence: Synthetic oligonucleotide
ggcacuggccucuaccuga

SEQ ID NO: 2877947 - RNA, 19 nt, Artificial Sequence
  Description of Artificial Sequence: Synthetic oligonucleotide
aagcacuuguguggaugca

SEQ ID NO: 2877948 - RNA, 19 nt, Artificial Sequence
  Description of Artificial Sequence: Synthetic oligonucleotide
agcacuuguguggaugcau

SEQ ID NO: 2877949 - RNA, 19 nt, Artificial Sequence
  Description of Artificial Sequence: Synthetic oligonucleotide
cacuuguguggaugcauga

SEQ ID NO: 2877950 - RNA, 19 nt, Artificial Sequence
  Description of Artificial Sequence: Synthetic oligonucleotide
guggguaaacaauauuauu

SEQ ID NO: 2877951 - RNA, 19 nt, Artificial Sequence
  Description of Artificial Sequence: Synthetic oligonucleotide
uccuuccaccagcuucaca

SEQ ID NO: 2877952 - RNA, 19 nt, Artificial Sequence
  Description of Artificial Sequence: Synthetic oligonucleotide
gucuugcgugcuucgggug

SEQ ID NO: 2877953 - RNA, 19 nt, Artificial Sequence
  Description of Artificial Sequence: Synthetic oligonucleotide
guauuuuauuugucuccua

SEQ ID NO: 2877954 - RNA, 19 nt, Artificial Sequence
  Description of Artificial Sequence: Synthetic oligonucleotide
auaccacaucuugucuuug

SEQ ID NO: 2877955 - RNA, 19 nt, Artificial Sequence
  Description of Artificial Sequence: Synthetic oligonucleotide
ccaugauaccaaagcgacc

SEQ ID NO: 2877956 - RNA, 19 nt, Artificial Sequence
  Description of Artificial Sequence: Synthetic oligonucleotide
ccacaucuugucuuugcug

SEQ ID NO: 2877957 - RNA, 19 nt, Artificial Sequence
  Description of Artificial Sequence: Synthetic oligonucleotide
acucagcuacauauaaguu

SEQ ID NO: 2877958 - RNA, 19 nt, Artificial Sequence
  Description of Artificial Sequence: Synthetic oligonucleotide
gccucguaucaauuuugcc

SEQ ID NO: 2877959 - RNA, 19 nt, Artificial Sequence
  Description of Artificial Sequence: Synthetic oligonucleotide
ucugcuggucuccgagguu

SEQ ID NO: 2877960 - RNA, 19 nt, Artificial Sequence
  Description of Artificial Sequence: Synthetic oligonucleotide
guugugguggguaaacaau

SEQ ID NO: 2877961 - RNA, 19 nt, Artificial Sequence
  Description of Artificial Sequence: Synthetic oligonucleotide
auuccacauuguguucucu

SEQ ID NO: 2877962 - RNA, 19 nt, Artificial Sequence
  Description of Artificial Sequence: Synthetic oligonucleotide
ccaacugagccagagccug

SEQ ID NO: 2877963 - RNA, 19 nt, Artificial Sequence
  Description of Artificial Sequence: Synthetic oligonucleotide
cacauuguguucucucacu

SEQ ID NO: 2877964 - RNA, 19 nt, Artificial Sequence
  Description of Artificial Sequence: Synthetic oligonucleotide
agccugaucgauggacaug

SEQ ID NO: 2877965 - RNA, 19 nt, Artificial Sequence
  Description of Artificial Sequence: Synthetic oligonucleotide
guguucucucacugccaug

SEQ ID NO: 2877966 - RNA, 19 nt, Artificial Sequence
  Description of Artificial Sequence: Synthetic oligonucleotide
aggcaguugugguggguaa

SEQ ID NO: 2877967 - RNA, 19 nt, Artificial Sequence
  Description of Artificial Sequence: Synthetic oligonucleotide
accuucuccaugauaccaa

SEQ ID NO: 2877968 - RNA, 19 nt, Artificial Sequence
  Description of Artificial Sequence: Synthetic oligonucleotide
ccccuucuuaucauugaac

SEQ ID NO: 2877969 - RNA, 19 nt, Artificial Sequence
  Description of Artificial Sequence: Synthetic oligonucleotide
agguagacucagcuacaua

SEQ ID NO: 2877970 - RNA, 19 nt, Artificial Sequence
  Description of Artificial Sequence: Synthetic oligonucleotide
guagacucagcuacauaua

SEQ ID NO: 2877971 - RNA, 19 nt, Artificial Sequence
  Description of Artificial Sequence: Synthetic oligonucleotide
gguaacggagacgcuucag

SEQ ID NO: 2877972 - RNA, 19 nt, Artificial Sequence
  Description of Artificial Sequence: Synthetic oligonucleotide
ccacauuguguucucucac

SEQ ID NO: 2877973 - RNA, 19 nt, Artificial Sequence
  Description of Artificial Sequence: Synthetic oligonucleotide
gaucugaauuccacauugu

SEQ ID NO: 2877974 - RNA, 19 nt, Artificial Sequence
  Description of Artificial Sequence: Synthetic oligonucleotide
cuuguguggaugcaugauu

SEQ ID NO: 2877975 - RNA, 19 nt, Artificial Sequence
  Description of Artificial Sequence: Synthetic oligonucleotide
cccuucuuaucauugaacu

SEQ ID NO: 2877976 - RNA, 19 nt, Artificial Sequence
  Description of Artificial Sequence: Synthetic oligonucleotide
uaguggcaauagaccuucu

SEQ ID NO: 2877977 - RNA, 19 nt, Artificial Sequence
  Description of Artificial Sequence: Synthetic oligonucleotide
gguaaacaauauuauucuu

SEQ ID NO: 2877978 - RNA, 19 nt, Artificial Sequence
  Description of Artificial Sequence: Synthetic oligonucleotide
uucaggcacuggccucuac

SEQ ID NO: 2877979 - RNA, 19 nt, Artificial Sequence
  Description of Artificial Sequence: Synthetic oligonucleotide
cugaucgauggacaugccu

SEQ ID NO: 2877980 - RNA, 19 nt, Artificial Sequence
  Description of Artificial Sequence: Synthetic oligonucleotide
gucgaauguugucuugcgu

SEQ ID NO: 2877981 - RNA, 19 nt, Artificial Sequence
  Description of Artificial Sequence: Synthetic oligonucleotide
gugcuucuaagaguaccuc

SEQ ID NO: 2877982 - RNA, 19 nt, Artificial Sequence
  Description of Artificial Sequence: Synthetic oligonucleotide
uucucccaucuuugagaaa

SEQ ID NO: 2877983 - RNA, 19 nt, Artificial Sequence
  Description of Artificial Sequence: Synthetic oligonucleotide
gcacuuguguggaugcaug

SEQ ID NO: 2877984 - RNA, 19 nt, Artificial Sequence
  Description of Artificial Sequence: Synthetic oligonucleotide
gagacgcuucaggcacugg

SEQ ID NO: 2877985 - RNA, 19 nt, Artificial Sequence
  Description of Artificial Sequence: Synthetic oligonucleotide
gaugcaugauugggguaaa

SEQ ID NO: 2877986 - RNA, 19 nt, Artificial Sequence
  Description of Artificial Sequence: Synthetic oligonucleotide
cugccaugucuugugcuuc

SEQ ID NO: 2877987 - RNA, 19 nt, Artificial Sequence
  Description of Artificial Sequence: Synthetic oligonucleotide
gucuuugcuguauuuuauu

SEQ ID NO: 2877988 - RNA, 19 nt, Artificial Sequence
  Description of Artificial Sequence: Synthetic oligonucleotide
gcaguugugguggguaaac

SEQ ID NO: 2877989 - RNA, 19 nt, Artificial Sequence
  Description of Artificial Sequence: Synthetic oligonucleotide
gguggguaaacaauauuau

SEQ ID NO: 2877990 - RNA, 19 nt, Artificial Sequence
  Description of Artificial Sequence: Synthetic oligonucleotide
aucgauggacaugccucgu

SEQ ID NO: 2877991 - RNA, 19 nt, Artificial Sequence
  Description of Artificial Sequence: Synthetic oligonucleotide
agccagagccugaucgaug

SEQ ID NO: 2877992 - RNA, 19 nt, Artificial Sequence
  Description of Artificial Sequence: Synthetic oligonucleotide
caugccucguaucaauuuu

SEQ ID NO: 2877993 - RNA, 19 nt, Artificial Sequence
  Description of Artificial Sequence: Synthetic oligonucleotide
ggccaugguaacggagacg

SEQ ID NO: 2877994 - RNA, 19 nt, Artificial Sequence
  Description of Artificial Sequence: Synthetic oligonucleotide
uugcgugcuucgggugggg

SEQ ID NO: 2877995 - RNA, 19 nt, Artificial Sequence
  Description of Artificial Sequence: Synthetic oligonucleotide
cagauaccacaucuugucu

SEQ ID NO: 2877996 - RNA, 19 nt, Artificial Sequence
  Description of Artificial Sequence: Synthetic oligonucleotide
caugguaacggagacgcuu

SEQ ID NO: 2877997 - RNA, 19 nt, Artificial Sequence
  Description of Artificial Sequence: Synthetic oligonucleotide
gagguucaccaggcaguug

SEQ ID NO: 2877998 - RNA, 19 nt, Artificial Sequence
  Description of Artificial Sequence: Synthetic oligonucleotide
cuggccucuaccugaggua

SEQ ID NO: 2877999 - RNA, 19 nt, Artificial Sequence
  Description of Artificial Sequence: Synthetic oligonucleotide
gcuucacaaaauaguggca

SEQ ID NO: 2878000 - RNA, 19 nt, Artificial Sequence
  Description of Artificial Sequence: Synthetic oligonucleotide
gucuccuacaaugguaaau

SEQ ID NO: 2878001 - RNA, 19 nt, Artificial Sequence
  Description of Artificial Sequence: Synthetic oligonucleotide
gagccugaucgauggacau

SEQ ID NO: 2878002 - RNA, 19 nt, Artificial Sequence
  Description of Artificial Sequence: Synthetic oligonucleotide
caaagcgaccucggccaug

SEQ ID NO: 2878003 - RNA, 19 nt, Artificial Sequence
  Description of Artificial Sequence: Synthetic oligonucleotide
caggcacuggccucuaccu

SEQ ID NO: 2878004 - RNA, 19 nt, Artificial Sequence
  Description of Artificial Sequence: Synthetic oligonucleotide
gcgaccucggccaugguaa

SEQ ID NO: 2878005 - RNA, 19 nt, Artificial Sequence
  Description of Artificial Sequence: Synthetic oligonucleotide
caguugugguggguaaaca

SEQ ID NO: 2878006 - RNA, 19 nt, Artificial Sequence
  Description of Artificial Sequence: Synthetic oligonucleotide
cacuggccucuaccugagg

SEQ ID NO: 2878007 - RNA, 19 nt, Artificial Sequence
  Description of Artificial Sequence: Synthetic oligonucleotide
cagcuacauauaaguugga

SEQ ID NO: 2878008 - RNA, 19 nt, Artificial Sequence
  Description of Artificial Sequence: Synthetic oligonucleotide
caacugagccagagccuga

SEQ ID NO: 2878009 - RNA, 19 nt, Artificial Sequence
  Description of Artificial Sequence: Synthetic oligonucleotide
cuucuaagaguaccucuuu

SEQ ID NO: 2878010 - RNA, 19 nt, Artificial Sequence
  Description of Artificial Sequence: Synthetic oligonucleotide
ggcaauagaccuucuccau

SEQ ID NO: 2878011 - RNA, 19 nt, Artificial Sequence
  Description of Artificial Sequence: Synthetic oligonucleotide
gugguggguaaacaauauu

SEQ ID NO: 2878012 - RNA, 19 nt, Artificial Sequence
  Description of Artificial Sequence: Synthetic oligonucleotide
gagguagacucagcuacau

SEQ ID NO: 2878013 - RNA, 19 nt, Artificial Sequence
  Description of Artificial Sequence: Synthetic oligonucleotide
gccucuaccugagguagac

SEQ ID NO: 2878014 - RNA, 19 nt, Artificial Sequence
  Description of Artificial Sequence: Synthetic oligonucleotide
ggagacgcuucaggcacug

SEQ ID NO: 2878015 - RNA, 19 nt, Artificial Sequence
  Description of Artificial Sequence: Synthetic oligonucleotide
ggucuccgagguucaccag

SEQ ID NO: 2878016 - RNA, 19 nt, Artificial Sequence
  Description of Artificial Sequence: Synthetic oligonucleotide
ggacaugccucguaucaau

SEQ ID NO: 2878017 - RNA, 19 nt, Artificial Sequence
  Description of Artificial Sequence: Synthetic oligonucleotide
gguucaccaggcaguugug

SEQ ID NO: 2878018 - RNA, 19 nt, Artificial Sequence
  Description of Artificial Sequence: Synthetic oligonucleotide
cacugccaugucuugugcu

SEQ ID NO: 2878019 - RNA, 19 nt, Artificial Sequence
  Description of Artificial Sequence: Synthetic oligonucleotide
augcaugauugggguaaaa

SEQ ID NO: 2878020 - RNA, 19 nt, Artificial Sequence
  Description of Artificial Sequence: Synthetic oligonucleotide
cuccuacaaugguaaauuu

SEQ ID NO: 2878021 - RNA, 19 nt, Artificial Sequence
  Description of Artificial Sequence: Synthetic oligonucleotide
ccugaucgauggacaugcc

SEQ ID NO: 2878022 - RNA, 19 nt, Artificial Sequence
  Description of Artificial Sequence: Synthetic oligonucleotide
aagcgaccucggccauggu

SEQ ID NO: 2878023 - RNA, 19 nt, Artificial Sequence
  Description of Artificial Sequence: Synthetic oligonucleotide
gacaugccucguaucaauu

SEQ ID NO: 2878024 - RNA, 19 nt, Artificial Sequence
  Description of Artificial Sequence: Synthetic oligonucleotide
caucuugucuuugcuguau

SEQ ID NO: 2878025 - RNA, 19 nt, Artificial Sequence
  Description of Artificial Sequence: Synthetic oligonucleotide
gcuucuaagaguaccucuu

SEQ ID NO: 2878026 - RNA, 19 nt, Artificial Sequence
  Description of Artificial Sequence: Synthetic oligonucleotide
ccugagguagacucagcua

SEQ ID NO: 2878027 - RNA, 19 nt, Artificial Sequence
  Description of Artificial Sequence: Synthetic oligonucleotide
ccuucuccaugauaccaaa

SEQ ID NO: 2878028 - RNA, 19 nt, Artificial Sequence
  Description of Artificial Sequence: Synthetic oligonucleotide
gcacuggccucuaccugag

SEQ ID NO: 2878029 - RNA, 19 nt, Artificial Sequence
  Description of Artificial Sequence: Synthetic oligonucleotide
gagccagagccugaucgau

SEQ ID NO: 2878030 - RNA, 19 nt, Artificial Sequence
  Description of Artificial Sequence: Synthetic oligonucleotide
gagaagcacuuguguggau

SEQ ID NO: 2878031 - RNA, 19 nt, Artificial Sequence
  Description of Artificial Sequence: Synthetic oligonucleotide
cuccgagguucaccaggca

SEQ ID NO: 2878032 - RNA, 19 nt, Artificial Sequence
  Description of Artificial Sequence: Synthetic oligonucleotide
ccgagguucaccaggcagu

SEQ ID NO: 2878033 - RNA, 19 nt, Artificial Sequence
  Description of Artificial Sequence: Synthetic oligonucleotide
gaacuccaacugagccaga

SEQ ID NO: 2878034 - RNA, 19 nt, Artificial Sequence
  Description of Artificial Sequence: Synthetic oligonucleotide
ccaugucuugugcuucuaa

SEQ ID NO: 2878035 - RNA, 19 nt, Artificial Sequence
  Description of Artificial Sequence: Synthetic oligonucleotide
guccuuccaccagcuucac

SEQ ID NO: 2878036 - RNA, 19 nt, Artificial Sequence
  Description of Artificial Sequence: Synthetic oligonucleotide
gcuucaggcacuggccucu

SEQ ID NO: 2878037 - RNA, 19 nt, Artificial Sequence
  Description of Artificial Sequence: Synthetic oligonucleotide
cggccaugguaacggagac

SEQ ID NO: 2878038 - RNA, 19 nt, Artificial Sequence
  Description of Artificial Sequence: Synthetic oligonucleotide
cgcuucaggcacuggccuc

SEQ ID NO: 2878039 - RNA, 19 nt, Artificial Sequence
  Description of Artificial Sequence: Synthetic oligonucleotide
gcuggucuccgagguucac

SEQ ID NO: 2878040 - RNA, 19 nt, Artificial Sequence
  Description of Artificial Sequence: Synthetic oligonucleotide
cgaccucggccaugguaac

SEQ ID NO: 2878041 - RNA, 19 nt, Artificial Sequence
  Description of Artificial Sequence: Synthetic oligonucleotide
ggccucuaccugagguaga

SEQ ID NO: 2878042 - RNA, 19 nt, Artificial Sequence
  Description of Artificial Sequence: Synthetic oligonucleotide
cgauggacaugccucguau

SEQ ID NO: 2878043 - RNA, 19 nt, Artificial Sequence
  Description of Artificial Sequence: Synthetic oligonucleotide
cuucaggcacuggccucua

SEQ ID NO: 2878044 - RNA, 19 nt, Artificial Sequence
  Description of Artificial Sequence: Synthetic oligonucleotide
ccagagccugaucgaugga

SEQ ID NO: 2878045 - RNA, 19 nt, Artificial Sequence
  Description of Artificial Sequence: Synthetic oligonucleotide
ccucggccaugguaacgga

SEQ ID NO: 2878046 - RNA, 19 nt, Artificial Sequence
  Description of Artificial Sequence: Synthetic oligonucleotide
gccaugucuugugcuucua

SEQ ID NO: 2878047 - RNA, 19 nt, Artificial Sequence
  Description of Artificial Sequence: Synthetic oligonucleotide
ccaugguaacggagacgcu

SEQ ID NO: 2878048 - RNA, 19 nt, Artificial Sequence
  Description of Artificial Sequence: Synthetic oligonucleotide
ccaaagcgaccucggccau

SEQ ID NO: 2878049 - RNA, 19 nt, Artificial Sequence
  Description of Artificial Sequence: Synthetic oligonucleotide
ccucuaccugagguagacu

SEQ ID NO: 2878050 - RNA, 19 nt, Artificial Sequence
  Description of Artificial Sequence: Synthetic oligonucleotide
gggguccuuccaccagcuu

SEQ ID NO: 2878051 - RNA, 19 nt, Artificial Sequence
  Description of Artificial Sequence: Synthetic oligonucleotide
cgagguucaccaggcaguu

SEQ ID NO: 2878052 - RNA, 19 nt, Artificial Sequence
  Description of Artificial Sequence: Synthetic oligonucleotide
ccaggcaguuguggugggu

SEQ ID NO: 2878053 - RNA, 19 nt, Artificial Sequence
  Description of Artificial Sequence: Synthetic oligonucleotide
cggagacgcuucaggcacu

SEQ ID NO: 2878054 - RNA, 19 nt, Artificial Sequence
  Description of Artificial Sequence: Synthetic oligonucleotide
auuuaaaagaagcauaucc

SEQ ID NO: 2878055 - RNA, 19 nt, Artificial Sequence
  Description of Artificial Sequence: Synthetic oligonucleotide
aaaauaauauuccauuagc

SEQ ID NO: 2878056 - RNA, 19 nt, Artificial Sequence
  Description of Artificial Sequence: Synthetic oligonucleotide
auaaauuauuuauauacac

SEQ ID NO: 2878057 - RNA, 19 nt, Artificial Sequence
  Description of Artificial Sequence: Synthetic oligonucleotide
aaauuauuuauauacacau

SEQ ID NO: 2878058 - RNA, 19 nt, Artificial Sequence
  Description of Artificial Sequence: Synthetic oligonucleotide
ucagaaauuuaaaagaagc

SEQ ID NO: 2878059 - RNA, 19 nt, Artificial Sequence
  Description of Artificial Sequence: Synthetic oligonucleotide
aaauucuacuuucugauag

SEQ ID NO: 2878060 - RNA, 19 nt, Artificial Sequence
  Description of Artificial Sequence: Synthetic oligonucleotide
aaaauuauaacaacccugg

SEQ ID NO: 2878061 - RNA, 19 nt, Artificial Sequence
  Description of Artificial Sequence: Synthetic oligonucleotide
uauacagagaucaugcucc

SEQ ID NO: 2878062 - RNA, 19 nt, Artificial Sequence
  Description of Artificial Sequence: Synthetic oligonucleotide
auucacaugugcuauauac

SEQ ID NO: 2878063 - RNA, 19 nt, Artificial Sequence
  Description of Artificial Sequence: Synthetic oligonucleotide
uuuaaaagaagcauaucca

SEQ ID NO: 2878064 - RNA, 19 nt, Artificial Sequence
  Description of Artificial Sequence: Synthetic oligonucleotide
uaaaacuccauuauuuugc

SEQ ID NO: 2878065 - RNA, 19 nt, Artificial Sequence
  Description of Artificial Sequence: Synthetic oligonucleotide
aaaacuccauuauuuugcc

SEQ ID NO: 2878066 - RNA, 19 nt, Artificial Sequence
  Description of Artificial Sequence: Synthetic oligonucleotide
aguauuaccaacuucaaaa

SEQ ID NO: 2878067 - RNA, 19 nt, Artificial Sequence
  Description of Artificial Sequence: Synthetic oligonucleotide
aauuauaacaacccugggu

SEQ ID NO: 2878068 - RNA, 19 nt, Artificial Sequence
  Description of Artificial Sequence: Synthetic oligonucleotide
uuugcuacagcauuuaaga

SEQ ID NO: 2878069 - RNA, 19 nt, Artificial Sequence
  Description of Artificial Sequence: Synthetic oligonucleotide
cuauauacagagaucaugc

SEQ ID NO: 2878070 - RNA, 19 nt, Artificial Sequence
  Description of Artificial Sequence: Synthetic oligonucleotide
acuuucagaaaguauuacc

SEQ ID NO: 2878071 - RNA, 19 nt, Artificial Sequence
  Description of Artificial Sequence: Synthetic oligonucleotide
uaaauuauuuauauacaca

SEQ ID NO: 2878072 - RNA, 19 nt, Artificial Sequence
  Description of Artificial Sequence: Synthetic oligonucleotide
uuuaaauucuacuuucuga

SEQ ID NO: 2878073 - RNA, 19 nt, Artificial Sequence
  Description of Artificial Sequence: Synthetic oligonucleotide
aauaauauuccauuagcuu

SEQ ID NO: 2878074 - RNA, 19 nt, Artificial Sequence
  Description of Artificial Sequence: Synthetic oligonucleotide
ugcuacagcauuuaagagg

SEQ ID NO: 2878075 - RNA, 19 nt, Artificial Sequence
  Description of Artificial Sequence: Synthetic oligonucleotide
uuuaagaggacuaaaccaa

SEQ ID NO: 2878076 - RNA, 19 nt, Artificial Sequence
  Description of Artificial Sequence: Synthetic oligonucleotide
agugacguuauucaugagg

SEQ ID NO: 2878077 - RNA, 19 nt, Artificial Sequence
  Description of Artificial Sequence: Synthetic oligonucleotide
caaaacacauucaacauug

SEQ ID NO: 2878078 - RNA, 19 nt, Artificial Sequence
  Description of Artificial Sequence: Synthetic oligonucleotide
aacagaacuugaucagugc

SEQ ID NO: 2878079 - RNA, 19 nt, Artificial Sequence
  Description of Artificial Sequence: Synthetic oligonucleotide
aacaguaucauggaagcag

SEQ ID NO: 2878080 - RNA, 19 nt, Artificial Sequence
  Description of Artificial Sequence: Synthetic oligonucleotide
acaugugcuauauacagag

SEQ ID NO: 2878081 - RNA, 19 nt, Artificial Sequence
  Description of Artificial Sequence: Synthetic oligonucleotide
auuaccaacuucaaaacac

SEQ ID NO: 2878082 - RNA, 19 nt, Artificial Sequence
  Description of Artificial Sequence: Synthetic oligonucleotide
ugaucagugcaucacauug

SEQ ID NO: 2878083 - RNA, 19 nt, Artificial Sequence
  Description of Artificial Sequence: Synthetic oligonucleotide
aagaggacuaaaccaaguc

SEQ ID NO: 2878084 - RNA, 19 nt, Artificial Sequence
  Description of Artificial Sequence: Synthetic oligonucleotide
auuauaacaacccuggguu

SEQ ID NO: 2878085 - RNA, 19 nt, Artificial Sequence
  Description of Artificial Sequence: Synthetic oligonucleotide
uaaacaguaucauggaagc

SEQ ID NO: 2878086 - RNA, 19 nt, Artificial Sequence
  Description of Artificial Sequence: Synthetic oligonucleotide
uuaaauucuacuuucugau

SEQ ID NO: 2878087 - RNA, 19 nt, Artificial Sequence
  Description of Artificial Sequence: Synthetic oligonucleotide
aacccuggguuuuaaauuc

SEQ ID NO: 2878088 - RNA, 19 nt, Artificial Sequence
  Description of Artificial Sequence: Synthetic oligonucleotide
gaacaguagacucugagac

SEQ ID NO: 2878089 - RNA, 19 nt, Artificial Sequence
  Description of Artificial Sequence: Synthetic oligonucleotide
uuaaaagaagcauauccac

SEQ ID NO: 2878090 - RNA, 19 nt, Artificial Sequence
  Description of Artificial Sequence: Synthetic oligonucleotide
aauucuacuuucugauagg

SEQ ID NO: 2878091 - RNA, 19 nt, Artificial Sequence
  Description of Artificial Sequence: Synthetic oligonucleotide
auauacagagaucaugcuc

SEQ ID NO: 2878092 - RNA, 19 nt, Artificial Sequence
  Description of Artificial Sequence: Synthetic oligonucleotide
aaaagaagcauauccacuu

SEQ ID NO: 2878093 - RNA, 19 nt, Artificial Sequence
  Description of Artificial Sequence: Synthetic oligonucleotide
uuuuaaauucuacuuucug

SEQ ID NO: 2878094 - RNA, 19 nt, Artificial Sequence
  Description of Artificial Sequence: Synthetic oligonucleotide
uuaaaacuccauuauuuug

SEQ ID NO: 2878095 - RNA, 19 nt, Artificial Sequence
  Description of Artificial Sequence: Synthetic oligonucleotide
cuucaaaacacauucaaca

SEQ ID NO: 2878096 - RNA, 19 nt, Artificial Sequence
  Description of Artificial Sequence: Synthetic oligonucleotide
ucagaaaguauuaccaacu

SEQ ID NO: 2878097 - RNA, 19 nt, Artificial Sequence
  Description of Artificial Sequence: Synthetic oligonucleotide
cauuuaagaggacuaaacc

SEQ ID NO: 2878098 - RNA, 19 nt, Artificial Sequence
  Description of Artificial Sequence: Synthetic oligonucleotide
aaauuauaacaacccuggg

SEQ ID NO: 2878099 - RNA, 19 nt, Artificial Sequence
  Description of Artificial Sequence: Synthetic oligonucleotide
auaauauuccauuagcuuu

SEQ ID NO: 2878100 - RNA, 19 nt, Artificial Sequence
  Description of Artificial Sequence: Synthetic oligonucleotide
auacacauucuuuacacug

SEQ ID NO: 2878101 - RNA, 19 nt, Artificial Sequence
  Description of Artificial Sequence: Synthetic oligonucleotide
aaugcugcaacagaacuug

SEQ ID NO: 2878102 - RNA, 19 nt, Artificial Sequence
  Description of Artificial Sequence: Synthetic oligonucleotide
agcucagaaauuuaaaaga

SEQ ID NO: 2878103 - RNA, 19 nt, Artificial Sequence
  Description of Artificial Sequence: Synthetic oligonucleotide
uccaucuuuagcuuaaaac

SEQ ID NO: 2878104 - RNA, 19 nt, Artificial Sequence
  Description of Artificial Sequence: Synthetic oligonucleotide
uuagcuuaaaacuccauua

SEQ ID NO: 2878105 - RNA, 19 nt, Artificial Sequence
  Description of Artificial Sequence: Synthetic oligonucleotide
auuagcuuuucauguauuc

SEQ ID NO: 2878106 - RNA, 19 nt, Artificial Sequence
  Description of Artificial Sequence: Synthetic oligonucleotide
aaauaauauuccauuagcu

SEQ ID NO: 2878107 - RNA, 19 nt, Artificial Sequence
  Description of Artificial Sequence: Synthetic oligonucleotide
uacacauucuuuacacugg

SEQ ID NO: 2878108 - RNA, 19 nt, Artificial Sequence
  Description of Artificial Sequence: Synthetic oligonucleotide
aacuucaaaacacauucaa

SEQ ID NO: 2878109 - RNA, 19 nt, Artificial Sequence
  Description of Artificial Sequence: Synthetic oligonucleotide
acauucuuuacacuggucu

SEQ ID NO: 2878110 - RNA, 19 nt, Artificial Sequence
  Description of Artificial Sequence: Synthetic oligonucleotide
ucaugcuccaucuuuagcu

SEQ ID NO: 2878111 - RNA, 19 nt, Artificial Sequence
  Description of Artificial Sequence: Synthetic oligonucleotide
uuuacacuggucuaggauc

SEQ ID NO: 2878112 - RNA, 19 nt, Artificial Sequence
  Description of Artificial Sequence: Synthetic oligonucleotide
guaaacaguaucauggaag

SEQ ID NO: 2878113 - RNA, 19 nt, Artificial Sequence
  Description of Artificial Sequence: Synthetic oligonucleotide
acuaaaccaagucucacug

SEQ ID NO: 2878114 - RNA, 19 nt, Artificial Sequence
  Description of Artificial Sequence: Synthetic oligonucleotide
ucauguauucacaugugcu

SEQ ID NO: 2878115 - RNA, 19 nt, Artificial Sequence
  Description of Artificial Sequence: Synthetic oligonucleotide
aacuccauuauuuugccua

SEQ ID NO: 2878116 - RNA, 19 nt, Artificial Sequence
  Description of Artificial Sequence: Synthetic oligonucleotide
aauuuaaaagaagcauauc

SEQ ID NO: 2878117 - RNA, 19 nt, Artificial Sequence
  Description of Artificial Sequence: Synthetic oligonucleotide
aucacauugaacaguagac

SEQ ID NO: 2878118 - RNA, 19 nt, Artificial Sequence
  Description of Artificial Sequence: Synthetic oligonucleotide
acagagaucaugcuccauc

SEQ ID NO: 2878119 - RNA, 19 nt, Artificial Sequence
  Description of Artificial Sequence: Synthetic oligonucleotide
uugaacaguagacucugag

SEQ ID NO: 2878120 - RNA, 19 nt, Artificial Sequence
  Description of Artificial Sequence: Synthetic oligonucleotide
uaucauggaagcagugacg

SEQ ID NO: 2878121 - RNA, 19 nt, Artificial Sequence
  Description of Artificial Sequence: Synthetic oligonucleotide
uucauguauucacaugugc

SEQ ID NO: 2878122 - RNA, 19 nt, Artificial Sequence
  Description of Artificial Sequence: Synthetic oligonucleotide
uuaagaggacuaaaccaag

SEQ ID NO: 2878123 - RNA, 19 nt, Artificial Sequence
  Description of Artificial Sequence: Synthetic oligonucleotide
cuuucagaaaguauuacca

SEQ ID NO: 2878124 - RNA, 19 nt, Artificial Sequence
  Description of Artificial Sequence: Synthetic oligonucleotide
agaaauuuaaaagaagcau

SEQ ID NO: 2878125 - RNA, 19 nt, Artificial Sequence
  Description of Artificial Sequence: Synthetic oligonucleotide
uauuaccaacuucaaaaca

SEQ ID NO: 2878126 - RNA, 19 nt, Artificial Sequence
  Description of Artificial Sequence: Synthetic oligonucleotide
aaacacauucaacauugga

SEQ ID NO: 2878127 - RNA, 19 nt, Artificial Sequence
  Description of Artificial Sequence: Synthetic oligonucleotide
aucuuuagcuuaaaacucc

SEQ ID NO: 2878128 - RNA, 19 nt, Artificial Sequence
  Description of Artificial Sequence: Synthetic oligonucleotide
uucagaaaguauuaccaac

SEQ ID NO: 2878129 - RNA, 19 nt, Artificial Sequence
  Description of Artificial Sequence: Synthetic oligonucleotide
aacacauucaacauuggaa

SEQ ID NO: 2878130 - RNA, 19 nt, Artificial Sequence
  Description of Artificial Sequence: Synthetic oligonucleotide
uuuagcuuaaaacuccauu

SEQ ID NO: 2878131 - RNA, 19 nt, Artificial Sequence
  Description of Artificial Sequence: Synthetic oligonucleotide
acacauucaacauuggaaa

SEQ ID NO: 2878132 - RNA, 19 nt, Artificial Sequence
  Description of Artificial Sequence: Synthetic oligonucleotide
aacuugaucagugcaucac

SEQ ID NO: 2878133 - RNA, 19 nt, Artificial Sequence
  Description of Artificial Sequence: Synthetic oligonucleotide
uauuccauuagcuuuucau

SEQ ID NO: 2878134 - RNA, 19 nt, Artificial Sequence
  Description of Artificial Sequence: Synthetic oligonucleotide
uuucugauaggucauuaaa

SEQ ID NO: 2878135 - RNA, 19 nt, Artificial Sequence
  Description of Artificial Sequence: Synthetic oligonucleotide
cagugcaucacauugaaca

SEQ ID NO: 2878136 - RNA, 19 nt, Artificial Sequence
  Description of Artificial Sequence: Synthetic oligonucleotide
acacauacacauucuuuac

SEQ ID NO: 2878137 - RNA, 19 nt, Artificial Sequence
  Description of Artificial Sequence: Synthetic oligonucleotide
uuccauuagcuuuucaugu

SEQ ID NO: 2878138 - RNA, 19 nt, Artificial Sequence
  Description of Artificial Sequence: Synthetic oligonucleotide
gaagcagugacguuauuca

SEQ ID NO: 2878139 - RNA, 19 nt, Artificial Sequence
  Description of Artificial Sequence: Synthetic oligonucleotide
uucugauaggucauuaaaa

SEQ ID NO: 2878140 - RNA, 19 nt, Artificial Sequence
  Description of Artificial Sequence: Synthetic oligonucleotide
cucagaaauuuaaaagaag

SEQ ID NO: 2878141 - RNA, 19 nt, Artificial Sequence
  Description of Artificial Sequence: Synthetic oligonucleotide
cagcucagaaauuuaaaag

SEQ ID NO: 2878142 - RNA, 19 nt, Artificial Sequence
  Description of Artificial Sequence: Synthetic oligonucleotide
gacucugagacuuucagaa

SEQ ID NO: 2878143 - RNA, 19 nt, Artificial Sequence
  Description of Artificial Sequence: Synthetic oligonucleotide
uagacucugagacuuucag

SEQ ID NO: 2878144 - RNA, 19 nt, Artificial Sequence
  Description of Artificial Sequence: Synthetic oligonucleotide
gaggguauggaaaugcugc

SEQ ID NO: 2878145 - RNA, 19 nt, Artificial Sequence
  Description of Artificial Sequence: Synthetic oligonucleotide
caucuuuagcuuaaaacuc

SEQ ID NO: 2878146 - RNA, 19 nt, Artificial Sequence
  Description of Artificial Sequence: Synthetic oligonucleotide
cucugagacuuucagaaag

SEQ ID NO: 2878147 - RNA, 19 nt, Artificial Sequence
  Description of Artificial Sequence: Synthetic oligonucleotide
ugaacaguagacucugaga

SEQ ID NO: 2878148 - RNA, 19 nt, Artificial Sequence
  Description of Artificial Sequence: Synthetic oligonucleotide
uucaaaacacauucaacau

SEQ ID NO: 2878149 - RNA, 19 nt, Artificial Sequence
  Description of Artificial Sequence: Synthetic oligonucleotide
uauuuugccuacaauuuua

SEQ ID NO: 2878150 - RNA, 19 nt, Artificial Sequence
  Description of Artificial Sequence: Synthetic oligonucleotide
uauggaaaugcugcaacag

SEQ ID NO: 2878151 - RNA, 19 nt, Artificial Sequence
  Description of Artificial Sequence: Synthetic oligonucleotide
ugcaacagaacuugaucag

SEQ ID NO: 2878152 - RNA, 19 nt, Artificial Sequence
  Description of Artificial Sequence: Synthetic oligonucleotide
uggaaaugcugcaacagaa

SEQ ID NO: 2878153 - RNA, 19 nt, Artificial Sequence
  Description of Artificial Sequence: Synthetic oligonucleotide
agaggacuaaaccaagucu

SEQ ID NO: 2878154 - RNA, 19 nt, Artificial Sequence
  Description of Artificial Sequence: Synthetic oligonucleotide
uaaaccaagucucacugua

SEQ ID NO: 2878155 - RNA, 19 nt, Artificial Sequence
  Description of Artificial Sequence: Synthetic oligonucleotide
augugcuauauacagagau

SEQ ID NO: 2878156 - RNA, 19 nt, Artificial Sequence
  Description of Artificial Sequence: Synthetic oligonucleotide
cacauugaacaguagacuc

SEQ ID NO: 2878157 - RNA, 19 nt, Artificial Sequence
  Description of Artificial Sequence: Synthetic oligonucleotide
agugcaucacauugaacag

SEQ ID NO: 2878158 - RNA, 19 nt, Artificial Sequence
  Description of Artificial Sequence: Synthetic oligonucleotide
uggguuuuaaauucuacuu

SEQ ID NO: 2878159 - RNA, 19 nt, Artificial Sequence
  Description of Artificial Sequence: Synthetic oligonucleotide
cucacuguaaacaguauca

SEQ ID NO: 2878160 - RNA, 19 nt, Artificial Sequence
  Description of Artificial Sequence: Synthetic oligonucleotide
ucaaaacacauucaacauu

SEQ ID NO: 2878161 - RNA, 19 nt, Artificial Sequence
  Description of Artificial Sequence: Synthetic oligonucleotide
uguaaacaguaucauggaa

SEQ ID NO: 2878162 - RNA, 19 nt, Artificial Sequence
  Description of Artificial Sequence: Synthetic oligonucleotide
caagucucacuguaaacag

SEQ ID NO: 2878163 - RNA, 19 nt, Artificial Sequence
  Description of Artificial Sequence: Synthetic oligonucleotide
uuucauguauucacaugug

SEQ ID NO: 2878164 - RNA, 19 nt, Artificial Sequence
  Description of Artificial Sequence: Synthetic oligonucleotide
ucuuuagcuuaaaacucca

SEQ ID NO: 2878165 - RNA, 19 nt, Artificial Sequence
  Description of Artificial Sequence: Synthetic oligonucleotide
accacaguuugcuacagca

SEQ ID NO: 2878166 - RNA, 19 nt, Artificial Sequence
  Description of Artificial Sequence: Synthetic oligonucleotide
uuucagcucagaaauuuaa

SEQ ID NO: 2878167 - RNA, 19 nt, Artificial Sequence
  Description of Artificial Sequence: Synthetic oligonucleotide
uuucagaaaguauuaccaa

SEQ ID NO: 2878168 - RNA, 19 nt, Artificial Sequence
  Description of Artificial Sequence: Synthetic oligonucleotide
acuucaaaacacauucaac

SEQ ID NO: 2878169 - RNA, 19 nt, Artificial Sequence
  Description of Artificial Sequence: Synthetic oligonucleotide
guaucauggaagcagugac

SEQ ID NO: 2878170 - RNA, 19 nt, Artificial Sequence
  Description of Artificial Sequence: Synthetic oligonucleotide
aucaugcuccaucuuuagc

SEQ ID NO: 2878171 - RNA, 19 nt, Artificial Sequence
  Description of Artificial Sequence: Synthetic oligonucleotide
ucuaggaucugcucagucu

SEQ ID NO: 2878172 - RNA, 19 nt, Artificial Sequence
  Description of Artificial Sequence: Synthetic oligonucleotide
uuacacuggucuaggaucu

SEQ ID NO: 2878173 - RNA, 19 nt, Artificial Sequence
  Description of Artificial Sequence: Synthetic oligonucleotide
aaccacaguuugcuacagc

SEQ ID NO: 2878174 - RNA, 19 nt, Artificial Sequence
  Description of Artificial Sequence: Synthetic oligonucleotide
ugugcuauauacagagauc

SEQ ID NO: 2878175 - RNA, 19 nt, Artificial Sequence
  Description of Artificial Sequence: Synthetic oligonucleotide
guauuaccaacuucaaaac

SEQ ID NO: 2878176 - RNA, 19 nt, Artificial Sequence
  Description of Artificial Sequence: Synthetic oligonucleotide
ucucacuguaaacaguauc

SEQ ID NO: 2878177 - RNA, 19 nt, Artificial Sequence
  Description of Artificial Sequence: Synthetic oligonucleotide
acuccauuauuuugccuac

SEQ ID NO: 2878178 - RNA, 19 nt, Artificial Sequence
  Description of Artificial Sequence: Synthetic oligonucleotide
uuauucaugaggguaugga

SEQ ID NO: 2878179 - RNA, 19 nt, Artificial Sequence
  Description of Artificial Sequence: Synthetic oligonucleotide
uauucaugaggguauggaa

SEQ ID NO: 2878180 - RNA, 19 nt, Artificial Sequence
  Description of Artificial Sequence: Synthetic oligonucleotide
ugaggguauggaaaugcug

SEQ ID NO: 2878181 - RNA, 19 nt, Artificial Sequence
  Description of Artificial Sequence: Synthetic oligonucleotide
cagaaauuuaaaagaagca

SEQ ID NO: 2878182 - RNA, 19 nt, Artificial Sequence
  Description of Artificial Sequence: Synthetic oligonucleotide
aaguauuaccaacuucaaa

SEQ ID NO: 2878183 - RNA, 19 nt, Artificial Sequence
  Description of Artificial Sequence: Synthetic oligonucleotide
uuagcuuuucauguauuca

SEQ ID NO: 2878184 - RNA, 19 nt, Artificial Sequence
  Description of Artificial Sequence: Synthetic oligonucleotide
aagaagcauauccacuuau

SEQ ID NO: 2878185 - RNA, 19 nt, Artificial Sequence
  Description of Artificial Sequence: Synthetic oligonucleotide
uauauacagagaucaugcu

SEQ ID NO: 2878186 - RNA, 19 nt, Artificial Sequence
  Description of Artificial Sequence: Synthetic oligonucleotide
uuauuuugccuacaauuuu

SEQ ID NO: 2878187 - RNA, 19 nt, Artificial Sequence
  Description of Artificial Sequence: Synthetic oligonucleotide
acagaacuugaucagugca

SEQ ID NO: 2878188 - RNA, 19 nt, Artificial Sequence
  Description of Artificial Sequence: Synthetic oligonucleotide
uauacacauacacauucuu

SEQ ID NO: 2878189 - RNA, 19 nt, Artificial Sequence
  Description of Artificial Sequence: Synthetic oligonucleotide
cuaggaucugcucagucug

SEQ ID NO: 2878190 - RNA, 19 nt, Artificial Sequence
  Description of Artificial Sequence: Synthetic oligonucleotide
agaacuugaucagugcauc

SEQ ID NO: 2878191 - RNA, 19 nt, Artificial Sequence
  Description of Artificial Sequence: Synthetic oligonucleotide
ugcaucacauugaacagua

SEQ ID NO: 2878192 - RNA, 19 nt, Artificial Sequence
  Description of Artificial Sequence: Synthetic oligonucleotide
gaucugcucagucugcccc

SEQ ID NO: 2878193 - RNA, 19 nt, Artificial Sequence
  Description of Artificial Sequence: Synthetic oligonucleotide
ucgaaccacaguuugcuac

SEQ ID NO: 2878194 - RNA, 19 nt, Artificial Sequence
  Description of Artificial Sequence: Synthetic oligonucleotide
cuuuucauguauucacaug

SEQ ID NO: 2878195 - RNA, 19 nt, Artificial Sequence
  Description of Artificial Sequence: Synthetic oligonucleotide
gguuuuaaauucuacuuuc

SEQ ID NO: 2878196 - RNA, 19 nt, Artificial Sequence
  Description of Artificial Sequence: Synthetic oligonucleotide
uaagaggacuaaaccaagu

SEQ ID NO: 2878197 - RNA, 19 nt, Artificial Sequence
  Description of Artificial Sequence: Synthetic oligonucleotide
uucaugaggguauggaaau

SEQ ID NO: 2878198 - RNA, 19 nt, Artificial Sequence
  Description of Artificial Sequence: Synthetic oligonucleotide
uagcuuaaaacuccauuau

SEQ ID NO: 2878199 - RNA, 19 nt, Artificial Sequence
  Description of Artificial Sequence: Synthetic oligonucleotide
aaccaagucucacuguaaa

SEQ ID NO: 2878200 - RNA, 19 nt, Artificial Sequence
  Description of Artificial Sequence: Synthetic oligonucleotide
accaagucucacuguaaac

SEQ ID NO: 2878201 - RNA, 19 nt, Artificial Sequence
  Description of Artificial Sequence: Synthetic oligonucleotide
aauauuccauuagcuuuuc

SEQ ID NO: 2878202 - RNA, 19 nt, Artificial Sequence
  Description of Artificial Sequence: Synthetic oligonucleotide
ucugagacuuucagaaagu

SEQ ID NO: 2878203 - RNA, 19 nt, Artificial Sequence
  Description of Artificial Sequence: Synthetic oligonucleotide
gaggacuaaaccaagucuc

SEQ ID NO: 2878204 - RNA, 19 nt, Artificial Sequence
  Description of Artificial Sequence: Synthetic oligonucleotide
uccauuauuuugccuacaa

SEQ ID NO: 2878205 - RNA, 19 nt, Artificial Sequence
  Description of Artificial Sequence: Synthetic oligonucleotide
caacagaacuugaucagug

SEQ ID NO: 2878206 - RNA, 19 nt, Artificial Sequence
  Description of Artificial Sequence: Synthetic oligonucleotide
guuugcuacagcauuuaag

SEQ ID NO: 2878207 - RNA, 19 nt, Artificial Sequence
  Description of Artificial Sequence: Synthetic oligonucleotide
uacagcauuuaagaggacu

SEQ ID NO: 2878208 - RNA, 19 nt, Artificial Sequence
  Description of Artificial Sequence: Synthetic oligonucleotide
auuauuuugccuacaauuu

SEQ ID NO: 2878209 - RNA, 19 nt, Artificial Sequence
  Description of Artificial Sequence: Synthetic oligonucleotide
caugaggguauggaaaugc

SEQ ID NO: 2878210 - RNA, 19 nt, Artificial Sequence
  Description of Artificial Sequence: Synthetic oligonucleotide
uggucuaggaucugcucag

SEQ ID NO: 2878211 - RNA, 19 nt, Artificial Sequence
  Description of Artificial Sequence: Synthetic oligonucleotide
ucacauugaacaguagacu

SEQ ID NO: 2878212 - RNA, 19 nt, Artificial Sequence
  Description of Artificial Sequence: Synthetic oligonucleotide
uugcuacagcauuuaagag

SEQ ID NO: 2878213 - RNA, 19 nt, Artificial Sequence
  Description of Artificial Sequence: Synthetic oligonucleotide
aaaacacauucaacauugg

SEQ ID NO: 2878214 - RNA, 19 nt, Artificial Sequence
  Description of Artificial Sequence: Synthetic oligonucleotide
uucuuuacacuggucuagg

SEQ ID NO: 2878215 - RNA, 19 nt, Artificial Sequence
  Description of Artificial Sequence: Synthetic oligonucleotide
auucuuuacacuggucuag

SEQ ID NO: 2878216 - RNA, 19 nt, Artificial Sequence
  Description of Artificial Sequence: Synthetic oligonucleotide
uucagcucagaaauuuaaa

SEQ ID NO: 2878217 - RNA, 19 nt, Artificial Sequence
  Description of Artificial Sequence: Synthetic oligonucleotide
gaucaugcuccaucuuuag

SEQ ID NO: 2878218 - RNA, 19 nt, Artificial Sequence
  Description of Artificial Sequence: Synthetic oligonucleotide
aauuauuuauauacacaua

SEQ ID NO: 2878219 - RNA, 19 nt, Artificial Sequence
  Description of Artificial Sequence: Synthetic oligonucleotide
acaacccuggguuuuaaau

SEQ ID NO: 2878220 - RNA, 19 nt, Artificial Sequence
  Description of Artificial Sequence: Synthetic oligonucleotide
uauccacuuaucucuauua

SEQ ID NO: 2878221 - RNA, 19 nt, Artificial Sequence
  Description of Artificial Sequence: Synthetic oligonucleotide
gaagcauauccacuuaucu

SEQ ID NO: 2878222 - RNA, 19 nt, Artificial Sequence
  Description of Artificial Sequence: Synthetic oligonucleotide
auggaaaugcugcaacaga

SEQ ID NO: 2878223 - RNA, 19 nt, Artificial Sequence
  Description of Artificial Sequence: Synthetic oligonucleotide
cauuauuuugccuacaauu

SEQ ID NO: 2878224 - RNA, 19 nt, Artificial Sequence
  Description of Artificial Sequence: Synthetic oligonucleotide
acuugaucagugcaucaca

SEQ ID NO: 2878225 - RNA, 19 nt, Artificial Sequence
  Description of Artificial Sequence: Synthetic oligonucleotide
aaagaagcauauccacuua

SEQ ID NO: 2878226 - RNA, 19 nt, Artificial Sequence
  Description of Artificial Sequence: Synthetic oligonucleotide
uccacuuaucucuauuaau

SEQ ID NO: 2878227 - RNA, 19 nt, Artificial Sequence
  Description of Artificial Sequence: Synthetic oligonucleotide
aucauggaagcagugacgu

SEQ ID NO: 2878228 - RNA, 19 nt, Artificial Sequence
  Description of Artificial Sequence: Synthetic oligonucleotide
caucacauugaacaguaga

SEQ ID NO: 2878229 - RNA, 19 nt, Artificial Sequence
  Description of Artificial Sequence: Synthetic oligonucleotide
aaacuccauuauuuugccu

SEQ ID NO: 2878230 - RNA, 19 nt, Artificial Sequence
  Description of Artificial Sequence: Synthetic oligonucleotide
cacuguaaacaguaucaug

SEQ ID NO: 2878231 - RNA, 19 nt, Artificial Sequence
  Description of Artificial Sequence: Synthetic oligonucleotide
aguaucauggaagcaguga

SEQ ID NO: 2878232 - RNA, 19 nt, Artificial Sequence
  Description of Artificial Sequence: Synthetic oligonucleotide
cauugaacaguagacucug

SEQ ID NO: 2878233 - RNA, 19 nt, Artificial Sequence
  Description of Artificial Sequence: Synthetic oligonucleotide
uuuucagcucagaaauuua

SEQ ID NO: 2878234 - RNA, 19 nt, Artificial Sequence
  Description of Artificial Sequence: Synthetic oligonucleotide
agaagcauauccacuuauc

SEQ ID NO: 2878235 - RNA, 19 nt, Artificial Sequence
  Description of Artificial Sequence: Synthetic oligonucleotide
uaaauucuacuuucugaua

SEQ ID NO: 2878236 - RNA, 19 nt, Artificial Sequence
  Description of Artificial Sequence: Synthetic oligonucleotide
acuggucuaggaucugcuc

SEQ ID NO: 2878237 - RNA, 19 nt, Artificial Sequence
  Description of Artificial Sequence: Synthetic oligonucleotide
guuauucaugaggguaugg

SEQ ID NO: 2878238 - RNA, 19 nt, Artificial Sequence
  Description of Artificial Sequence: Synthetic oligonucleotide
gguauggaaaugcugcaac

SEQ ID NO: 2878239 - RNA, 19 nt, Artificial Sequence
  Description of Artificial Sequence: Synthetic oligonucleotide
aucagugcaucacauugaa

SEQ ID NO: 2878240 - RNA, 19 nt, Artificial Sequence
  Description of Artificial Sequence: Synthetic oligonucleotide
gcuauauacagagaucaug

SEQ ID NO: 2878241 - RNA, 19 nt, Artificial Sequence
  Description of Artificial Sequence: Synthetic oligonucleotide
gagacuuucagaaaguauu

SEQ ID NO: 2878242 - RNA, 19 nt, Artificial Sequence
  Description of Artificial Sequence: Synthetic oligonucleotide
acaguagacucugagacuu

SEQ ID NO: 2878243 - RNA, 19 nt, Artificial Sequence
  Description of Artificial Sequence: Synthetic oligonucleotide
uaccaacuucaaaacacau

SEQ ID NO: 2878244 - RNA, 19 nt, Artificial Sequence
  Description of Artificial Sequence: Synthetic oligonucleotide
auucaugaggguauggaaa

SEQ ID NO: 2878245 - RNA, 19 nt, Artificial Sequence
  Description of Artificial Sequence: Synthetic oligonucleotide
agcuuaaaacuccauuauu

SEQ ID NO: 2878246 - RNA, 19 nt, Artificial Sequence
  Description of Artificial Sequence: Synthetic oligonucleotide
acacuggucuaggaucugc

SEQ ID NO: 2878247 - RNA, 19 nt, Artificial Sequence
  Description of Artificial Sequence: Synthetic oligonucleotide
ugcucgaaccacaguuugc

SEQ ID NO: 2878248 - RNA, 19 nt, Artificial Sequence
  Description of Artificial Sequence: Synthetic oligonucleotide
uauaacaacccuggguuuu

SEQ ID NO: 2878249 - RNA, 19 nt, Artificial Sequence
  Description of Artificial Sequence: Synthetic oligonucleotide
auucuacuuucugauaggu

SEQ ID NO: 2878250 - RNA, 19 nt, Artificial Sequence
  Description of Artificial Sequence: Synthetic oligonucleotide
guauggaaaugcugcaaca

SEQ ID NO: 2878251 - RNA, 19 nt, Artificial Sequence
  Description of Artificial Sequence: Synthetic oligonucleotide
gcuacagcauuuaagagga

SEQ ID NO: 2878252 - RNA, 19 nt, Artificial Sequence
  Description of Artificial Sequence: Synthetic oligonucleotide
gacguuauucaugagggua

SEQ ID NO: 2878253 - RNA, 19 nt, Artificial Sequence
  Description of Artificial Sequence: Synthetic oligonucleotide
gacuuucagaaaguauuac

SEQ ID NO: 2878254 - RNA, 19 nt, Artificial Sequence
  Description of Artificial Sequence: Synthetic oligonucleotide
aagcagugacguuauucau

SEQ ID NO: 2878255 - RNA, 19 nt, Artificial Sequence
  Description of Artificial Sequence: Synthetic oligonucleotide
cauguauucacaugugcua

SEQ ID NO: 2878256 - RNA, 19 nt, Artificial Sequence
  Description of Artificial Sequence: Synthetic oligonucleotide
aaacaguaucauggaagca

SEQ ID NO: 2878257 - RNA, 19 nt, Artificial Sequence
  Description of Artificial Sequence: Synthetic oligonucleotide
agacucugagacuuucaga

SEQ ID NO: 2878258 - RNA, 19 nt, Artificial Sequence
  Description of Artificial Sequence: Synthetic oligonucleotide
uccauuagcuuuucaugua

SEQ ID NO: 2878259 - RNA, 19 nt, Artificial Sequence
  Description of Artificial Sequence: Synthetic oligonucleotide
auccacuuaucucuauuaa

SEQ ID NO: 2878260 - RNA, 19 nt, Artificial Sequence
  Description of Artificial Sequence: Synthetic oligonucleotide
uuauaacaacccuggguuu

SEQ ID NO: 2878261 - RNA, 19 nt, Artificial Sequence
  Description of Artificial Sequence: Synthetic oligonucleotide
acauugaacaguagacucu

SEQ ID NO: 2878262 - RNA, 19 nt, Artificial Sequence
  Description of Artificial Sequence: Synthetic oligonucleotide
ugcugcaacagaacuugau

SEQ ID NO: 2878263 - RNA, 19 nt, Artificial Sequence
  Description of Artificial Sequence: Synthetic oligonucleotide
gaacuugaucagugcauca

SEQ ID NO: 2878264 - RNA, 19 nt, Artificial Sequence
  Description of Artificial Sequence: Synthetic oligonucleotide
cacuuaucucuauuaauaa

SEQ ID NO: 2878265 - RNA, 19 nt, Artificial Sequence
  Description of Artificial Sequence: Synthetic oligonucleotide
auauccacuuaucucuauu

SEQ ID NO: 2878266 - RNA, 19 nt, Artificial Sequence
  Description of Artificial Sequence: Synthetic oligonucleotide
agcagugacguuauucaug

SEQ ID NO: 2878267 - RNA, 19 nt, Artificial Sequence
  Description of Artificial Sequence: Synthetic oligonucleotide
ugcuauauacagagaucau

SEQ ID NO: 2878268 - RNA, 19 nt, Artificial Sequence
  Description of Artificial Sequence: Synthetic oligonucleotide
uguauucacaugugcuaua

SEQ ID NO: 2878269 - RNA, 19 nt, Artificial Sequence
  Description of Artificial Sequence: Synthetic oligonucleotide
gacuaaaccaagucucacu

SEQ ID NO: 2878270 - RNA, 19 nt, Artificial Sequence
  Description of Artificial Sequence: Synthetic oligonucleotide
uaggaucugcucagucugc

SEQ ID NO: 2878271 - RNA, 19 nt, Artificial Sequence
  Description of Artificial Sequence: Synthetic oligonucleotide
ccaucuuuagcuuaaaacu

SEQ ID NO: 2878272 - RNA, 19 nt, Artificial Sequence
  Description of Artificial Sequence: Synthetic oligonucleotide
auguauucacaugugcuau

SEQ ID NO: 2878273 - RNA, 19 nt, Artificial Sequence
  Description of Artificial Sequence: Synthetic oligonucleotide
gcagugacguuauucauga

SEQ ID NO: 2878274 - RNA, 19 nt, Artificial Sequence
  Description of Artificial Sequence: Synthetic oligonucleotide
cuguaaacaguaucaugga

SEQ ID NO: 2878275 - RNA, 19 nt, Artificial Sequence
  Description of Artificial Sequence: Synthetic oligonucleotide
aggguauggaaaugcugca

SEQ ID NO: 2878276 - RNA, 19 nt, Artificial Sequence
  Description of Artificial Sequence: Synthetic oligonucleotide
ucagugcaucacauugaac

SEQ ID NO: 2878277 - RNA, 19 nt, Artificial Sequence
  Description of Artificial Sequence: Synthetic oligonucleotide
gcauuuaagaggacuaaac

SEQ ID NO: 2878278 - RNA, 19 nt, Artificial Sequence
  Description of Artificial Sequence: Synthetic oligonucleotide
ucacuguaaacaguaucau

SEQ ID NO: 2878279 - RNA, 19 nt, Artificial Sequence
  Description of Artificial Sequence: Synthetic oligonucleotide
ugcucagucugccccuccc

SEQ ID NO: 2878280 - RNA, 19 nt, Artificial Sequence
  Description of Artificial Sequence: Synthetic oligonucleotide
aagucucacuguaaacagu

SEQ ID NO: 2878281 - RNA, 19 nt, Artificial Sequence
  Description of Artificial Sequence: Synthetic oligonucleotide
agucucacuguaaacagua

SEQ ID NO: 2878282 - RNA, 19 nt, Artificial Sequence
  Description of Artificial Sequence: Synthetic oligonucleotide
gaucagugcaucacauuga

SEQ ID NO: 2878283 - RNA, 19 nt, Artificial Sequence
  Description of Artificial Sequence: Synthetic oligonucleotide
aacaacccuggguuuuaaa

SEQ ID NO: 2878284 - RNA, 19 nt, Artificial Sequence
  Description of Artificial Sequence: Synthetic oligonucleotide
acaguaucauggaagcagu

SEQ ID NO: 2878285 - RNA, 19 nt, Artificial Sequence
  Description of Artificial Sequence: Synthetic oligonucleotide
gugcucgaaccacaguuug

SEQ ID NO: 2878286 - RNA, 19 nt, Artificial Sequence
  Description of Artificial Sequence: Synthetic oligonucleotide
auacagagaucaugcucca

SEQ ID NO: 2878287 - RNA, 19 nt, Artificial Sequence
  Description of Artificial Sequence: Synthetic oligonucleotide
acagcauuuaagaggacua

SEQ ID NO: 2878288 - RNA, 19 nt, Artificial Sequence
  Description of Artificial Sequence: Synthetic oligonucleotide
uauucacaugugcuauaua

SEQ ID NO: 2878289 - RNA, 19 nt, Artificial Sequence
  Description of Artificial Sequence: Synthetic oligonucleotide
ucaugaggguauggaaaug

SEQ ID NO: 2878290 - RNA, 19 nt, Artificial Sequence
  Description of Artificial Sequence: Synthetic oligonucleotide
cuggguuuuaaauucuacu

SEQ ID NO: 2878291 - RNA, 19 nt, Artificial Sequence
  Description of Artificial Sequence: Synthetic oligonucleotide
agcauuuaagaggacuaaa

SEQ ID NO: 2878292 - RNA, 19 nt, Artificial Sequence
  Description of Artificial Sequence: Synthetic oligonucleotide
uuuugccuacaauuuuauu

SEQ ID NO: 2878293 - RNA, 19 nt, Artificial Sequence
  Description of Artificial Sequence: Synthetic oligonucleotide
cauggaagcagugacguua

SEQ ID NO: 2878294 - RNA, 19 nt, Artificial Sequence
  Description of Artificial Sequence: Synthetic oligonucleotide
caacuucaaaacacauuca

SEQ ID NO: 2878295 - RNA, 19 nt, Artificial Sequence
  Description of Artificial Sequence: Synthetic oligonucleotide
aguuugcuacagcauuuaa

SEQ ID NO: 2878296 - RNA, 19 nt, Artificial Sequence
  Description of Artificial Sequence: Synthetic oligonucleotide
auacacauacacauucuuu

SEQ ID NO: 2878297 - RNA, 19 nt, Artificial Sequence
  Description of Artificial Sequence: Synthetic oligonucleotide
cuuucugauaggucauuaa

SEQ ID NO: 2878298 - RNA, 19 nt, Artificial Sequence
  Description of Artificial Sequence: Synthetic oligonucleotide
agcuuuucauguauucaca

SEQ ID NO: 2878299 - RNA, 19 nt, Artificial Sequence
  Description of Artificial Sequence: Synthetic oligonucleotide
gagaucaugcuccaucuuu

SEQ ID NO: 2878300 - RNA, 19 nt, Artificial Sequence
  Description of Artificial Sequence: Synthetic oligonucleotide
auauuccauuagcuuuuca

SEQ ID NO: 2878301 - RNA, 19 nt, Artificial Sequence
  Description of Artificial Sequence: Synthetic oligonucleotide
cauucuuuacacuggucua

SEQ ID NO: 2878302 - RNA, 19 nt, Artificial Sequence
  Description of Artificial Sequence: Synthetic oligonucleotide
ucccacagggugcucgaac

SEQ ID NO: 2878303 - RNA, 19 nt, Artificial Sequence
  Description of Artificial Sequence: Synthetic oligonucleotide
uugaucagugcaucacauu

SEQ ID NO: 2878304 - RNA, 19 nt, Artificial Sequence
  Description of Artificial Sequence: Synthetic oligonucleotide
cauccccucccacagggug

SEQ ID NO: 2878305 - RNA, 19 nt, Artificial Sequence
  Description of Artificial Sequence: Synthetic oligonucleotide
aaaccaagucucacuguaa

SEQ ID NO: 2878306 - RNA, 19 nt, Artificial Sequence
  Description of Artificial Sequence: Synthetic oligonucleotide
caguaucauggaagcagug

SEQ ID NO: 2878307 - RNA, 19 nt, Artificial Sequence
  Description of Artificial Sequence: Synthetic oligonucleotide
gaaccacaguuugcuacag

SEQ ID NO: 2878308 - RNA, 19 nt, Artificial Sequence
  Description of Artificial Sequence: Synthetic oligonucleotide
acguuauucaugaggguau

SEQ ID NO: 2878309 - RNA, 19 nt, Artificial Sequence
  Description of Artificial Sequence: Synthetic oligonucleotide
ggaagcagugacguuauuc

SEQ ID NO: 2878310 - RNA, 19 nt, Artificial Sequence
  Description of Artificial Sequence: Synthetic oligonucleotide
cacaugugcuauauacaga

SEQ ID NO: 2878311 - RNA, 19 nt, Artificial Sequence
  Description of Artificial Sequence: Synthetic oligonucleotide
aggacuaaaccaagucuca

SEQ ID NO: 2878312 - RNA, 19 nt, Artificial Sequence
  Description of Artificial Sequence: Synthetic oligonucleotide
auuuugccuacaauuuuau

SEQ ID NO: 2878313 - RNA, 19 nt, Artificial Sequence
  Description of Artificial Sequence: Synthetic oligonucleotide
cacauucaacauuggaaaa

SEQ ID NO: 2878314 - RNA, 19 nt, Artificial Sequence
  Description of Artificial Sequence: Synthetic oligonucleotide
agacuuucagaaaguauua

SEQ ID NO: 2878315 - RNA, 19 nt, Artificial Sequence
  Description of Artificial Sequence: Synthetic oligonucleotide
auccccucccacagggugc

SEQ ID NO: 2878316 - RNA, 19 nt, Artificial Sequence
  Description of Artificial Sequence: Synthetic oligonucleotide
acucugagacuuucagaaa

SEQ ID NO: 2878317 - RNA, 19 nt, Artificial Sequence
  Description of Artificial Sequence: Synthetic oligonucleotide
ccacuuaucucuauuaaua

SEQ ID NO: 2878318 - RNA, 19 nt, Artificial Sequence
  Description of Artificial Sequence: Synthetic oligonucleotide
cagggugcucgaaccacag

SEQ ID NO: 2878319 - RNA, 19 nt, Artificial Sequence
  Description of Artificial Sequence: Synthetic oligonucleotide
gcucagaaauuuaaaagaa

SEQ ID NO: 2878320 - RNA, 19 nt, Artificial Sequence
  Description of Artificial Sequence: Synthetic oligonucleotide
ggaaaugcugcaacagaac

SEQ ID NO: 2878321 - RNA, 19 nt, Artificial Sequence
  Description of Artificial Sequence: Synthetic oligonucleotide
aucugcucagucugccccu

SEQ ID NO: 2878322 - RNA, 19 nt, Artificial Sequence
  Description of Artificial Sequence: Synthetic oligonucleotide
accaacuucaaaacacauu

SEQ ID NO: 2878323 - RNA, 19 nt, Artificial Sequence
  Description of Artificial Sequence: Synthetic oligonucleotide
agaucaugcuccaucuuua

SEQ ID NO: 2878324 - RNA, 19 nt, Artificial Sequence
  Description of Artificial Sequence: Synthetic oligonucleotide
acuuucugauaggucauua

SEQ ID NO: 2878325 - RNA, 19 nt, Artificial Sequence
  Description of Artificial Sequence: Synthetic oligonucleotide
ccaagucucacuguaaaca

SEQ ID NO: 2878326 - RNA, 19 nt, Artificial Sequence
  Description of Artificial Sequence: Synthetic oligonucleotide
cuuuacacuggucuaggau

SEQ ID NO: 2878327 - RNA, 19 nt, Artificial Sequence
  Description of Artificial Sequence: Synthetic oligonucleotide
augaggguauggaaaugcu

SEQ ID NO: 2878328 - RNA, 19 nt, Artificial Sequence
  Description of Artificial Sequence: Synthetic oligonucleotide
ccuggguuuuaaauucuac

SEQ ID NO: 2878329 - RNA, 19 nt, Artificial Sequence
  Description of Artificial Sequence: Synthetic oligonucleotide
acaguuugcuacagcauuu

SEQ ID NO: 2878330 - RNA, 19 nt, Artificial Sequence
  Description of Artificial Sequence: Synthetic oligonucleotide
caugugcuauauacagaga

SEQ ID NO: 2878331 - RNA, 19 nt, Artificial Sequence
  Description of Artificial Sequence: Synthetic oligonucleotide
cuugaucagugcaucacau

SEQ ID NO: 2878332 - RNA, 19 nt, Artificial Sequence
  Description of Artificial Sequence: Synthetic oligonucleotide
cccacagggugcucgaacc

SEQ ID NO: 2878333 - RNA, 19 nt, Artificial Sequence
  Description of Artificial Sequence: Synthetic oligonucleotide
cagagaucaugcuccaucu

SEQ ID NO: 2878334 - RNA, 19 nt, Artificial Sequence
  Description of Artificial Sequence: Synthetic oligonucleotide
agagaucaugcuccaucuu

SEQ ID NO: 2878335 - RNA, 19 nt, Artificial Sequence
  Description of Artificial Sequence: Synthetic oligonucleotide
gcuuaaaacuccauuauuu

SEQ ID NO: 2878336 - RNA, 19 nt, Artificial Sequence
  Description of Artificial Sequence: Synthetic oligonucleotide
auaacaacccuggguuuua

SEQ ID NO: 2878337 - RNA, 19 nt, Artificial Sequence
  Description of Artificial Sequence: Synthetic oligonucleotide
cagaacuugaucagugcau

SEQ ID NO: 2878338 - RNA, 19 nt, Artificial Sequence
  Description of Artificial Sequence: Synthetic oligonucleotide
guagacucugagacuuuca

SEQ ID NO: 2878339 - RNA, 19 nt, Artificial Sequence
  Description of Artificial Sequence: Synthetic oligonucleotide
augcuccaucuuuagcuua

SEQ ID NO: 2878340 - RNA, 19 nt, Artificial Sequence
  Description of Artificial Sequence: Synthetic oligonucleotide
ucauggaagcagugacguu

SEQ ID NO: 2878341 - RNA, 19 nt, Artificial Sequence
  Description of Artificial Sequence: Synthetic oligonucleotide
ggguuuuaaauucuacuuu

SEQ ID NO: 2878342 - RNA, 19 nt, Artificial Sequence
  Description of Artificial Sequence: Synthetic oligonucleotide
cacaguuugcuacagcauu

SEQ ID NO: 2878343 - RNA, 19 nt, Artificial Sequence
  Description of Artificial Sequence: Synthetic oligonucleotide
cuaaaccaagucucacugu

SEQ ID NO: 2878344 - RNA, 19 nt, Artificial Sequence
  Description of Artificial Sequence: Synthetic oligonucleotide
uacacuggucuaggaucug

SEQ ID NO: 2878345 - RNA, 19 nt, Artificial Sequence
  Description of Artificial Sequence: Synthetic oligonucleotide
auggaagcagugacguuau

SEQ ID NO: 2878346 - RNA, 19 nt, Artificial Sequence
  Description of Artificial Sequence: Synthetic oligonucleotide
ggacuaaaccaagucucac

SEQ ID NO: 2878347 - RNA, 19 nt, Artificial Sequence
  Description of Artificial Sequence: Synthetic oligonucleotide
cuacagcauuuaagaggac

SEQ ID NO: 2878348 - RNA, 19 nt, Artificial Sequence
  Description of Artificial Sequence: Synthetic oligonucleotide
uacuuucugauaggucauu

SEQ ID NO: 2878349 - RNA, 19 nt, Artificial Sequence
  Description of Artificial Sequence: Synthetic oligonucleotide
auugaacaguagacucuga

SEQ ID NO: 2878350 - RNA, 19 nt, Artificial Sequence
  Description of Artificial Sequence: Synthetic oligonucleotide
guauucacaugugcuauau

SEQ ID NO: 2878351 - RNA, 19 nt, Artificial Sequence
  Description of Artificial Sequence: Synthetic oligonucleotide
caacccuggguuuuaaauu

SEQ ID NO: 2878352 - RNA, 19 nt, Artificial Sequence
  Description of Artificial Sequence: Synthetic oligonucleotide
acagggugcucgaaccaca

SEQ ID NO: 2878353 - RNA, 19 nt, Artificial Sequence
  Description of Artificial Sequence: Synthetic oligonucleotide
uaacaacccuggguuuuaa

SEQ ID NO: 2878354 - RNA, 19 nt, Artificial Sequence
  Description of Artificial Sequence: Synthetic oligonucleotide
cagugacguuauucaugag

SEQ ID NO: 2878355 - RNA, 19 nt, Artificial Sequence
  Description of Artificial Sequence: Synthetic oligonucleotide
cuccaucuuuagcuuaaaa

SEQ ID NO: 2878356 - RNA, 19 nt, Artificial Sequence
  Description of Artificial Sequence: Synthetic oligonucleotide
agggugcucgaaccacagu

SEQ ID NO: 2878357 - RNA, 19 nt, Artificial Sequence
  Description of Artificial Sequence: Synthetic oligonucleotide
cugagacuuucagaaagua

SEQ ID NO: 2878358 - RNA, 19 nt, Artificial Sequence
  Description of Artificial Sequence: Synthetic oligonucleotide
cuacuuucugauaggucau

SEQ ID NO: 2878359 - RNA, 19 nt, Artificial Sequence
  Description of Artificial Sequence: Synthetic oligonucleotide
uacagagaucaugcuccau

SEQ ID NO: 2878360 - RNA, 19 nt, Artificial Sequence
  Description of Artificial Sequence: Synthetic oligonucleotide
cagaaaguauuaccaacuu

SEQ ID NO: 2878361 - RNA, 19 nt, Artificial Sequence
  Description of Artificial Sequence: Synthetic oligonucleotide
cagcauuuaagaggacuaa

SEQ ID NO: 2878362 - RNA, 19 nt, Artificial Sequence
  Description of Artificial Sequence: Synthetic oligonucleotide
cuuuagcuuaaaacuccau

SEQ ID NO: 2878363 - RNA, 19 nt, Artificial Sequence
  Description of Artificial Sequence: Synthetic oligonucleotide
acccuggguuuuaaauucu

SEQ ID NO: 2878364 - RNA, 19 nt, Artificial Sequence
  Description of Artificial Sequence: Synthetic oligonucleotide
uccccucccacagggugcu

SEQ ID NO: 2878365 - RNA, 19 nt, Artificial Sequence
  Description of Artificial Sequence: Synthetic oligonucleotide
ucugcucagucugccccuc

SEQ ID NO: 2878366 - RNA, 19 nt, Artificial Sequence
  Description of Artificial Sequence: Synthetic oligonucleotide
cauuagcuuuucauguauu

SEQ ID NO: 2878367 - RNA, 19 nt, Artificial Sequence
  Description of Artificial Sequence: Synthetic oligonucleotide
gggugcucgaaccacaguu

SEQ ID NO: 2878368 - RNA, 19 nt, Artificial Sequence
  Description of Artificial Sequence: Synthetic oligonucleotide
cugcucagucugccccucc

SEQ ID NO: 2878369 - RNA, 19 nt, Artificial Sequence
  Description of Artificial Sequence: Synthetic oligonucleotide
caugcuccaucuuuagcuu

SEQ ID NO: 2878370 - RNA, 19 nt, Artificial Sequence
  Description of Artificial Sequence: Synthetic oligonucleotide
gugcaucacauugaacagu

SEQ ID NO: 2878371 - RNA, 19 nt, Artificial Sequence
  Description of Artificial Sequence: Synthetic oligonucleotide
gcucagucugccccucccc

SEQ ID NO: 2878372 - RNA, 19 nt, Artificial Sequence
  Description of Artificial Sequence: Synthetic oligonucleotide
cacuggucuaggaucugcu

SEQ ID NO: 2878373 - RNA, 19 nt, Artificial Sequence
  Description of Artificial Sequence: Synthetic oligonucleotide
uggaagcagugacguuauu

SEQ ID NO: 2878374 - RNA, 19 nt, Artificial Sequence
  Description of Artificial Sequence: Synthetic oligonucleotide
cuccauuauuuugccuaca

SEQ ID NO: 2878375 - RNA, 19 nt, Artificial Sequence
  Description of Artificial Sequence: Synthetic oligonucleotide
cucgaaccacaguuugcua

SEQ ID NO: 2878376 - RNA, 19 nt, Artificial Sequence
  Description of Artificial Sequence: Synthetic oligonucleotide
gcucgaaccacaguuugcu

SEQ ID NO: 2878377 - RNA, 19 nt, Artificial Sequence
  Description of Artificial Sequence: Synthetic oligonucleotide
cgaaccacaguuugcuaca

SEQ ID NO: 2878378 - RNA, 19 nt, Artificial Sequence
  Description of Artificial Sequence: Synthetic oligonucleotide
gcaucacauugaacaguag

SEQ ID NO: 2878379 - RNA, 19 nt, Artificial Sequence
  Description of Artificial Sequence: Synthetic oligonucleotide
caguuugcuacagcauuua

SEQ ID NO: 2878380 - RNA, 19 nt, Artificial Sequence
  Description of Artificial Sequence: Synthetic oligonucleotide
cauauccacuuaucucuau

SEQ ID NO: 2878381 - RNA, 19 nt, Artificial Sequence
  Description of Artificial Sequence: Synthetic oligonucleotide
gcaacagaacuugaucagu

SEQ ID NO: 2878382 - RNA, 19 nt, Artificial Sequence
  Description of Artificial Sequence: Synthetic oligonucleotide
ggguauggaaaugcugcaa

SEQ ID NO: 2878383 - RNA, 19 nt, Artificial Sequence
  Description of Artificial Sequence: Synthetic oligonucleotide
augcugcaacagaacuuga

SEQ ID NO: 2878384 - RNA, 19 nt, Artificial Sequence
  Description of Artificial Sequence: Synthetic oligonucleotide
cguuauucaugaggguaug

SEQ ID NO: 2878385 - RNA, 19 nt, Artificial Sequence
  Description of Artificial Sequence: Synthetic oligonucleotide
cccucccacagggugcucg

SEQ ID NO: 2878386 - RNA, 19 nt, Artificial Sequence
  Description of Artificial Sequence: Synthetic oligonucleotide
ccauuagcuuuucauguau

SEQ ID NO: 2878387 - RNA, 19 nt, Artificial Sequence
  Description of Artificial Sequence: Synthetic oligonucleotide
gcauauccacuuaucucua

SEQ ID NO: 2878388 - RNA, 19 nt, Artificial Sequence
  Description of Artificial Sequence: Synthetic oligonucleotide
gucucacuguaaacaguau

SEQ ID NO: 2878389 - RNA, 19 nt, Artificial Sequence
  Description of Artificial Sequence: Synthetic oligonucleotide
ccauuauuuugccuacaau

SEQ ID NO: 2878390 - RNA, 19 nt, Artificial Sequence
  Description of Artificial Sequence: Synthetic oligonucleotide
ggugcucgaaccacaguuu

SEQ ID NO: 2878391 - RNA, 19 nt, Artificial Sequence
  Description of Artificial Sequence: Synthetic oligonucleotide
cccuggguuuuaaauucua

SEQ ID NO: 2878392 - RNA, 19 nt, Artificial Sequence
  Description of Artificial Sequence: Synthetic oligonucleotide
ccccauccccucccacagg

SEQ ID NO: 2878393 - RNA, 19 nt, Artificial Sequence
  Description of Artificial Sequence: Synthetic oligonucleotide
ccacaguuugcuacagcau

SEQ ID NO: 2878394 - RNA, 19 nt, Artificial Sequence
  Description of Artificial Sequence: Synthetic oligonucleotide
caguagacucugagacuuu

SEQ ID NO: 2878395 - RNA, 19 nt, Artificial Sequence
  Description of Artificial Sequence: Synthetic oligonucleotide
ccucccacagggugcucga

SEQ ID NO: 2878396 - RNA, 19 nt, Artificial Sequence
  Description of Artificial Sequence: Synthetic oligonucleotide
gcuccaucuuuagcuuaaa

SEQ ID NO: 2878397 - RNA, 19 nt, Artificial Sequence
  Description of Artificial Sequence: Synthetic oligonucleotide
ggucuaggaucugcucagu

SEQ ID NO: 2878398 - RNA, 19 nt, Artificial Sequence
  Description of Artificial Sequence: Synthetic oligonucleotide
ccauccccucccacagggu

SEQ ID NO: 2878399 - RNA, 19 nt, Artificial Sequence
  Description of Artificial Sequence: Synthetic oligonucleotide
ccccucccacagggugcuc

SEQ ID NO: 2878400 - RNA, 19 nt, Artificial Sequence
  Description of Artificial Sequence: Synthetic oligonucleotide
uuaaguaucuuucagaucc

SEQ ID NO: 2878401 - RNA, 19 nt, Artificial Sequence
  Description of Artificial Sequence: Synthetic oligonucleotide
acaaguuuugcacuguggc

SEQ ID NO: 2878402 - RNA, 19 nt, Artificial Sequence
  Description of Artificial Sequence: Synthetic oligonucleotide
uguauaugaauuaaguauc

SEQ ID NO: 2878403 - RNA, 19 nt, Artificial Sequence
  Description of Artificial Sequence: Synthetic oligonucleotide
uuuuguauaugaauuaagu

SEQ ID NO: 2878404 - RNA, 19 nt, Artificial Sequence
  Description of Artificial Sequence: Synthetic oligonucleotide
aauccguugaugcugagug

SEQ ID NO: 2878405 - RNA, 19 nt, Artificial Sequence
  Description of Artificial Sequence: Synthetic oligonucleotide
uaugaauuaaguaucuuuc

SEQ ID NO: 2878406 - RNA, 19 nt, Artificial Sequence
  Description of Artificial Sequence: Synthetic oligonucleotide
aauuuucugauauuccaug

SEQ ID NO: 2878407 - RNA, 19 nt, Artificial Sequence
  Description of Artificial Sequence: Synthetic oligonucleotide
uccacuaccagcuuuacca

SEQ ID NO: 2878408 - RNA, 19 nt, Artificial Sequence
  Description of Artificial Sequence: Synthetic oligonucleotide
aguuacaugauguugagaa

SEQ ID NO: 2878409 - RNA, 19 nt, Artificial Sequence
  Description of Artificial Sequence: Synthetic oligonucleotide
ucugauauuccauggauug

SEQ ID NO: 2878410 - RNA, 19 nt, Artificial Sequence
  Description of Artificial Sequence: Synthetic oligonucleotide
auuccuggcguuuauaggg

SEQ ID NO: 2878411 - RNA, 19 nt, Artificial Sequence
  Description of Artificial Sequence: Synthetic oligonucleotide
uccaacucgaguuacauga

SEQ ID NO: 2878412 - RNA, 19 nt, Artificial Sequence
  Description of Artificial Sequence: Synthetic oligonucleotide
aaugggaugacacuccacu

SEQ ID NO: 2878413 - RNA, 19 nt, Artificial Sequence
  Description of Artificial Sequence: Synthetic oligonucleotide
aacacguugguguagggug

SEQ ID NO: 2878414 - RNA, 19 nt, Artificial Sequence
  Description of Artificial Sequence: Synthetic oligonucleotide
ucauaaacaaaaucugggc

SEQ ID NO: 2878415 - RNA, 19 nt, Artificial Sequence
  Description of Artificial Sequence: Synthetic oligonucleotide
agagaccacauucauaagg

SEQ ID NO: 2878416 - RNA, 19 nt, Artificial Sequence
  Description of Artificial Sequence: Synthetic oligonucleotide
cauaaacaaaaucugggcc

SEQ ID NO: 2878417 - RNA, 19 nt, Artificial Sequence
  Description of Artificial Sequence: Synthetic oligonucleotide
agagucauaaacaaaaucu

SEQ ID NO: 2878418 - RNA, 19 nt, Artificial Sequence
  Description of Artificial Sequence: Synthetic oligonucleotide
aagugcugaaaguuuuccc

SEQ ID NO: 2878419 - RNA, 19 nt, Artificial Sequence
  Description of Artificial Sequence: Synthetic oligonucleotide
auaaacaaaaucugggcca

SEQ ID NO: 2878420 - RNA, 19 nt, Artificial Sequence
  Description of Artificial Sequence: Synthetic oligonucleotide
agauccaucauucaauugu

SEQ ID NO: 2878421 - RNA, 19 nt, Artificial Sequence
  Description of Artificial Sequence: Synthetic oligonucleotide
gauggcuagagucauaaac

SEQ ID NO: 2878422 - RNA, 19 nt, Artificial Sequence
  Description of Artificial Sequence: Synthetic oligonucleotide
ugugaggaagugcugaaag

SEQ ID NO: 2878423 - RNA, 19 nt, Artificial Sequence
  Description of Artificial Sequence: Synthetic oligonucleotide
acagagaccacauucauaa

SEQ ID NO: 2878424 - RNA, 19 nt, Artificial Sequence
  Description of Artificial Sequence: Synthetic oligonucleotide
auuuucugauauuccaugg

SEQ ID NO: 2878425 - RNA, 19 nt, Artificial Sequence
  Description of Artificial Sequence: Synthetic oligonucleotide
agugugaacacguuggugu

SEQ ID NO: 2878426 - RNA, 19 nt, Artificial Sequence
  Description of Artificial Sequence: Synthetic oligonucleotide
uuugcacuguggcugaagg

SEQ ID NO: 2878427 - RNA, 19 nt, Artificial Sequence
  Description of Artificial Sequence: Synthetic oligonucleotide
ucaauugugguuucucucc

SEQ ID NO: 2878428 - RNA, 19 nt, Artificial Sequence
  Description of Artificial Sequence: Synthetic oligonucleotide
uuuaccacauuccuggcgu

SEQ ID NO: 2878429 - RNA, 19 nt, Artificial Sequence
  Description of Artificial Sequence: Synthetic oligonucleotide
caugugaauccguugaugc

SEQ ID NO: 2878430 - RNA, 19 nt, Artificial Sequence
  Description of Artificial Sequence: Synthetic oligonucleotide
uggauugugaggaagugcu

SEQ ID NO: 2878431 - RNA, 19 nt, Artificial Sequence
  Description of Artificial Sequence: Synthetic oligonucleotide
uuuguauaugaauuaagua

SEQ ID NO: 2878432 - RNA, 19 nt, Artificial Sequence
  Description of Artificial Sequence: Synthetic oligonucleotide
ucgaguuacaugauguuga

SEQ ID NO: 2878433 - RNA, 19 nt, Artificial Sequence
  Description of Artificial Sequence: Synthetic oligonucleotide
uugaauuuucugauauucc

SEQ ID NO: 2878434 - RNA, 19 nt, Artificial Sequence
  Description of Artificial Sequence: Synthetic oligonucleotide
guaucuuucagauccauca

SEQ ID NO: 2878435 - RNA, 19 nt, Artificial Sequence
  Description of Artificial Sequence: Synthetic oligonucleotide
uuuucaucacuucgaauug

SEQ ID NO: 2878436 - RNA, 19 nt, Artificial Sequence
  Description of Artificial Sequence: Synthetic oligonucleotide
aacaaaaucugggccacac

SEQ ID NO: 2878437 - RNA, 19 nt, Artificial Sequence
  Description of Artificial Sequence: Synthetic oligonucleotide
aucacuucgaauuguccac

SEQ ID NO: 2878438 - RNA, 19 nt, Artificial Sequence
  Description of Artificial Sequence: Synthetic oligonucleotide
acauucauuacauccccgg

SEQ ID NO: 2878439 - RNA, 19 nt, Artificial Sequence
  Description of Artificial Sequence: Synthetic oligonucleotide
uggagaacaaguuuugcac

SEQ ID NO: 2878440 - RNA, 19 nt, Artificial Sequence
  Description of Artificial Sequence: Synthetic oligonucleotide
aaguuuugcacuguggcug

SEQ ID NO: 2878441 - RNA, 19 nt, Artificial Sequence
  Description of Artificial Sequence: Synthetic oligonucleotide
ucuuucagauccaucauuc

SEQ ID NO: 2878442 - RNA, 19 nt, Artificial Sequence
  Description of Artificial Sequence: Synthetic oligonucleotide
gaauuaaguaucuuucaga

SEQ ID NO: 2878443 - RNA, 19 nt, Artificial Sequence
  Description of Artificial Sequence: Synthetic oligonucleotide
auaugaauuaaguaucuuu

SEQ ID NO: 2878444 - RNA, 19 nt, Artificial Sequence
  Description of Artificial Sequence: Synthetic oligonucleotide
augacacuccacuaccagc

SEQ ID NO: 2878445 - RNA, 19 nt, Artificial Sequence
  Description of Artificial Sequence: Synthetic oligonucleotide
agucauaaacaaaaucugg

SEQ ID NO: 2878446 - RNA, 19 nt, Artificial Sequence
  Description of Artificial Sequence: Synthetic oligonucleotide
uuuucugauauuccaugga

SEQ ID NO: 2878447 - RNA, 19 nt, Artificial Sequence
  Description of Artificial Sequence: Synthetic oligonucleotide
agugcugaaaguuuuccca

SEQ ID NO: 2878448 - RNA, 19 nt, Artificial Sequence
  Description of Artificial Sequence: Synthetic oligonucleotide
uucucugccaugugaaucc

SEQ ID NO: 2878449 - RNA, 19 nt, Artificial Sequence
  Description of Artificial Sequence: Synthetic oligonucleotide
uagagucauaaacaaaauc

SEQ ID NO: 2878450 - RNA, 19 nt, Artificial Sequence
  Description of Artificial Sequence: Synthetic oligonucleotide
auugugguuucucuccaac

SEQ ID NO: 2878451 - RNA, 19 nt, Artificial Sequence
  Description of Artificial Sequence: Synthetic oligonucleotide
ugauauuccauggauugug

SEQ ID NO: 2878452 - RNA, 19 nt, Artificial Sequence
  Description of Artificial Sequence: Synthetic oligonucleotide
uucgaauuguccacuggag

SEQ ID NO: 2878453 - RNA, 19 nt, Artificial Sequence
  Description of Artificial Sequence: Synthetic oligonucleotide
uuucugauauuccauggau

SEQ ID NO: 2878454 - RNA, 19 nt, Artificial Sequence
  Description of Artificial Sequence: Synthetic oligonucleotide
ugacacuccacuaccagcu

SEQ ID NO: 2878455 - RNA, 19 nt, Artificial Sequence
  Description of Artificial Sequence: Synthetic oligonucleotide
uucagauccaucauucaau

SEQ ID NO: 2878456 - RNA, 19 nt, Artificial Sequence
  Description of Artificial Sequence: Synthetic oligonucleotide
ugugaauccguugaugcug

SEQ ID NO: 2878457 - RNA, 19 nt, Artificial Sequence
  Description of Artificial Sequence: Synthetic oligonucleotide
gagaacaaguuuugcacug

SEQ ID NO: 2878458 - RNA, 19 nt, Artificial Sequence
  Description of Artificial Sequence: Synthetic oligonucleotide
gauguugagaaugggauga

SEQ ID NO: 2878459 - RNA, 19 nt, Artificial Sequence
  Description of Artificial Sequence: Synthetic oligonucleotide
augaauuaaguaucuuuca

SEQ ID NO: 2878460 - RNA, 19 nt, Artificial Sequence
  Description of Artificial Sequence: Synthetic oligonucleotide
acauuccuggcguuuauag

SEQ ID NO: 2878461 - RNA, 19 nt, Artificial Sequence
  Description of Artificial Sequence: Synthetic oligonucleotide
caaaaucugggccacacuc

SEQ ID NO: 2878462 - RNA, 19 nt, Artificial Sequence
  Description of Artificial Sequence: Synthetic oligonucleotide
ugugguuucucuccaacuc

SEQ ID NO: 2878463 - RNA, 19 nt, Artificial Sequence
  Description of Artificial Sequence: Synthetic oligonucleotide
auucccguggguucucugc

SEQ ID NO: 2878464 - RNA, 19 nt, Artificial Sequence
  Description of Artificial Sequence: Synthetic oligonucleotide
uccaucauucaauuguggu

SEQ ID NO: 2878465 - RNA, 19 nt, Artificial Sequence
  Description of Artificial Sequence: Synthetic oligonucleotide
ugccaugugaauccguuga

SEQ ID NO: 2878466 - RNA, 19 nt, Artificial Sequence
  Description of Artificial Sequence: Synthetic oligonucleotide
auuccauggauugugagga

SEQ ID NO: 2878467 - RNA, 19 nt, Artificial Sequence
  Description of Artificial Sequence: Synthetic oligonucleotide
cucuccagugggcagaugg

SEQ ID NO: 2878468 - RNA, 19 nt, Artificial Sequence
  Description of Artificial Sequence: Synthetic oligonucleotide
uugguguagggugagcugg

SEQ ID NO: 2878469 - RNA, 19 nt, Artificial Sequence
  Description of Artificial Sequence: Synthetic oligonucleotide
ugcacuguggcugaaggcc

SEQ ID NO: 2878470 - RNA, 19 nt, Artificial Sequence
  Description of Artificial Sequence: Synthetic oligonucleotide
aacaaguuuugcacugugg

SEQ ID NO: 2878471 - RNA, 19 nt, Artificial Sequence
  Description of Artificial Sequence: Synthetic oligonucleotide
uuucucuccaacucgaguu

SEQ ID NO: 2878472 - RNA, 19 nt, Artificial Sequence
  Description of Artificial Sequence: Synthetic oligonucleotide
gaugacacuccacuaccag

SEQ ID NO: 2878473 - RNA, 19 nt, Artificial Sequence
  Description of Artificial Sequence: Synthetic oligonucleotide
auucauuacauccccggga

SEQ ID NO: 2878474 - RNA, 19 nt, Artificial Sequence
  Description of Artificial Sequence: Synthetic oligonucleotide
uguagggugagcugggaac

SEQ ID NO: 2878475 - RNA, 19 nt, Artificial Sequence
  Description of Artificial Sequence: Synthetic oligonucleotide
uucauuacauccccgggau

SEQ ID NO: 2878476 - RNA, 19 nt, Artificial Sequence
  Description of Artificial Sequence: Synthetic oligonucleotide
ucgaauuguccacuggaga

SEQ ID NO: 2878477 - RNA, 19 nt, Artificial Sequence
  Description of Artificial Sequence: Synthetic oligonucleotide
ugauguugagaaugggaug

SEQ ID NO: 2878478 - RNA, 19 nt, Artificial Sequence
  Description of Artificial Sequence: Synthetic oligonucleotide
aacucgaguuacaugaugu

SEQ ID NO: 2878479 - RNA, 19 nt, Artificial Sequence
  Description of Artificial Sequence: Synthetic oligonucleotide
ugggccacacucaaauucc

SEQ ID NO: 2878480 - RNA, 19 nt, Artificial Sequence
  Description of Artificial Sequence: Synthetic oligonucleotide
agcuugaauuuucugauau

SEQ ID NO: 2878481 - RNA, 19 nt, Artificial Sequence
  Description of Artificial Sequence: Synthetic oligonucleotide
ugagaaugggaugacacuc

SEQ ID NO: 2878482 - RNA, 19 nt, Artificial Sequence
  Description of Artificial Sequence: Synthetic oligonucleotide
auggauugugaggaagugc

SEQ ID NO: 2878483 - RNA, 19 nt, Artificial Sequence
  Description of Artificial Sequence: Synthetic oligonucleotide
caugucucucuccaguggg

SEQ ID NO: 2878484 - RNA, 19 nt, Artificial Sequence
  Description of Artificial Sequence: Synthetic oligonucleotide
auucaauugugguuucucu

SEQ ID NO: 2878485 - RNA, 19 nt, Artificial Sequence
  Description of Artificial Sequence: Synthetic oligonucleotide
ugggcagauggcuagaguc

SEQ ID NO: 2878486 - RNA, 19 nt, Artificial Sequence
  Description of Artificial Sequence: Synthetic oligonucleotide
ucccacagagaccacauuc

SEQ ID NO: 2878487 - RNA, 19 nt, Artificial Sequence
  Description of Artificial Sequence: Synthetic oligonucleotide
ucaucacuucgaauugucc

SEQ ID NO: 2878488 - RNA, 19 nt, Artificial Sequence
  Description of Artificial Sequence: Synthetic oligonucleotide
ugagugagggcugaucucc

SEQ ID NO: 2878489 - RNA, 19 nt, Artificial Sequence
  Description of Artificial Sequence: Synthetic oligonucleotide
accacauucauaaggcuuc

SEQ ID NO: 2878490 - RNA, 19 nt, Artificial Sequence
  Description of Artificial Sequence: Synthetic oligonucleotide
uucaauugugguuucucuc

SEQ ID NO: 2878491 - RNA, 19 nt, Artificial Sequence
  Description of Artificial Sequence: Synthetic oligonucleotide
aauuguccacuggagaaca

SEQ ID NO: 2878492 - RNA, 19 nt, Artificial Sequence
  Description of Artificial Sequence: Synthetic oligonucleotide
gugguuucucuccaacucg

SEQ ID NO: 2878493 - RNA, 19 nt, Artificial Sequence
  Description of Artificial Sequence: Synthetic oligonucleotide
cuuuaccacauuccuggcg

SEQ ID NO: 2878494 - RNA, 19 nt, Artificial Sequence
  Description of Artificial Sequence: Synthetic oligonucleotide
aaaucugggccacacucaa

SEQ ID NO: 2878495 - RNA, 19 nt, Artificial Sequence
  Description of Artificial Sequence: Synthetic oligonucleotide
auauuccauggauugugag

SEQ ID NO: 2878496 - RNA, 19 nt, Artificial Sequence
  Description of Artificial Sequence: Synthetic oligonucleotide
uguccacuggagaacaagu

SEQ ID NO: 2878497 - RNA, 19 nt, Artificial Sequence
  Description of Artificial Sequence: Synthetic oligonucleotide
cauucauuacauccccggg

SEQ ID NO: 2878498 - RNA, 19 nt, Artificial Sequence
  Description of Artificial Sequence: Synthetic oligonucleotide
ugggaugacacuccacuac

SEQ ID NO: 2878499 - RNA, 19 nt, Artificial Sequence
  Description of Artificial Sequence: Synthetic oligonucleotide
guugagaaugggaugacac

SEQ ID NO: 2878500 - RNA, 19 nt, Artificial Sequence
  Description of Artificial Sequence: Synthetic oligonucleotide
uccguugaugcugagugag

SEQ ID NO: 2878501 - RNA, 19 nt, Artificial Sequence
  Description of Artificial Sequence: Synthetic oligonucleotide
acuggagaacaaguuuugc

SEQ ID NO: 2878502 - RNA, 19 nt, Artificial Sequence
  Description of Artificial Sequence: Synthetic oligonucleotide
uugagaaugggaugacacu

SEQ ID NO: 2878503 - RNA, 19 nt, Artificial Sequence
  Description of Artificial Sequence: Synthetic oligonucleotide
uaaacaaaaucugggccac

SEQ ID NO: 2878504 - RNA, 19 nt, Artificial Sequence
  Description of Artificial Sequence: Synthetic oligonucleotide
cacacucaaauucccgugg

SEQ ID NO: 2878505 - RNA, 19 nt, Artificial Sequence
  Description of Artificial Sequence: Synthetic oligonucleotide
acuucgaauuguccacugg

SEQ ID NO: 2878506 - RNA, 19 nt, Artificial Sequence
  Description of Artificial Sequence: Synthetic oligonucleotide
gaagugcugaaaguuuucc

SEQ ID NO: 2878507 - RNA, 19 nt, Artificial Sequence
  Description of Artificial Sequence: Synthetic oligonucleotide
acacucaaauucccguggg

SEQ ID NO: 2878508 - RNA, 19 nt, Artificial Sequence
  Description of Artificial Sequence: Synthetic oligonucleotide
uugaugcugagugagggcu

SEQ ID NO: 2878509 - RNA, 19 nt, Artificial Sequence
  Description of Artificial Sequence: Synthetic oligonucleotide
caugauguugagaauggga

SEQ ID NO: 2878510 - RNA, 19 nt, Artificial Sequence
  Description of Artificial Sequence: Synthetic oligonucleotide
gauccaucauucaauugug

SEQ ID NO: 2878511 - RNA, 19 nt, Artificial Sequence
  Description of Artificial Sequence: Synthetic oligonucleotide
uucaucacuucgaauuguc

SEQ ID NO: 2878512 - RNA, 19 nt, Artificial Sequence
  Description of Artificial Sequence: Synthetic oligonucleotide
auggcuagagucauaaaca

SEQ ID NO: 2878513 - RNA, 19 nt, Artificial Sequence
  Description of Artificial Sequence: Synthetic oligonucleotide
gaacaaguuuugcacugug

SEQ ID NO: 2878514 - RNA, 19 nt, Artificial Sequence
  Description of Artificial Sequence: Synthetic oligonucleotide
cugaucuccggcugaaggc

SEQ ID NO: 2878515 - RNA, 19 nt, Artificial Sequence
  Description of Artificial Sequence: Synthetic oligonucleotide
caucacuucgaauugucca

SEQ ID NO: 2878516 - RNA, 19 nt, Artificial Sequence
  Description of Artificial Sequence: Synthetic oligonucleotide
uccacuggagaacaaguuu

SEQ ID NO: 2878517 - RNA, 19 nt, Artificial Sequence
  Description of Artificial Sequence: Synthetic oligonucleotide
aaaaucugggccacacuca

SEQ ID NO: 2878518 - RNA, 19 nt, Artificial Sequence
  Description of Artificial Sequence: Synthetic oligonucleotide
augauguugagaaugggau

SEQ ID NO: 2878519 - RNA, 19 nt, Artificial Sequence
  Description of Artificial Sequence: Synthetic oligonucleotide
uucugauauuccauggauu

SEQ ID NO: 2878520 - RNA, 19 nt, Artificial Sequence
  Description of Artificial Sequence: Synthetic oligonucleotide
uaaguaucuuucagaucca

SEQ ID NO: 2878521 - RNA, 19 nt, Artificial Sequence
  Description of Artificial Sequence: Synthetic oligonucleotide
gauugugaggaagugcuga

SEQ ID NO: 2878522 - RNA, 19 nt, Artificial Sequence
  Description of Artificial Sequence: Synthetic oligonucleotide
cucaaauucccguggguuc

SEQ ID NO: 2878523 - RNA, 19 nt, Artificial Sequence
  Description of Artificial Sequence: Synthetic oligonucleotide
ucagauccaucauucaauu

SEQ ID NO: 2878524 - RNA, 19 nt, Artificial Sequence
  Description of Artificial Sequence: Synthetic oligonucleotide
ugguuucucuccaacucga

SEQ ID NO: 2878525 - RNA, 19 nt, Artificial Sequence
  Description of Artificial Sequence: Synthetic oligonucleotide
uggguucucugccauguga

SEQ ID NO: 2878526 - RNA, 19 nt, Artificial Sequence
  Description of Artificial Sequence: Synthetic oligonucleotide
aucauucaauugugguuuc

SEQ ID NO: 2878527 - RNA, 19 nt, Artificial Sequence
  Description of Artificial Sequence: Synthetic oligonucleotide
ugaucuccggcugaaggcc

SEQ ID NO: 2878528 - RNA, 19 nt, Artificial Sequence
  Description of Artificial Sequence: Synthetic oligonucleotide
uccauggauugugaggaag

SEQ ID NO: 2878529 - RNA, 19 nt, Artificial Sequence
  Description of Artificial Sequence: Synthetic oligonucleotide
uaucuuucagauccaucau

SEQ ID NO: 2878530 - RNA, 19 nt, Artificial Sequence
  Description of Artificial Sequence: Synthetic oligonucleotide
aucugggccacacucaaau

SEQ ID NO: 2878531 - RNA, 19 nt, Artificial Sequence
  Description of Artificial Sequence: Synthetic oligonucleotide
cacauucauuacauccccg

SEQ ID NO: 2878532 - RNA, 19 nt, Artificial Sequence
  Description of Artificial Sequence: Synthetic oligonucleotide
ucaaauucccguggguucu

SEQ ID NO: 2878533 - RNA, 19 nt, Artificial Sequence
  Description of Artificial Sequence: Synthetic oligonucleotide
gagaaugggaugacacucc

SEQ ID NO: 2878534 - RNA, 19 nt, Artificial Sequence
  Description of Artificial Sequence: Synthetic oligonucleotide
ugagcugggaacucuggau

SEQ ID NO: 2878535 - RNA, 19 nt, Artificial Sequence
  Description of Artificial Sequence: Synthetic oligonucleotide
cuggagaacaaguuuugca

SEQ ID NO: 2878536 - RNA, 19 nt, Artificial Sequence
  Description of Artificial Sequence: Synthetic oligonucleotide
cugggccacacucaaauuc

SEQ ID NO: 2878537 - RNA, 19 nt, Artificial Sequence
  Description of Artificial Sequence: Synthetic oligonucleotide
ucugccaugugaauccguu

SEQ ID NO: 2878538 - RNA, 19 nt, Artificial Sequence
  Description of Artificial Sequence: Synthetic oligonucleotide
aguaucuuucagauccauc

SEQ ID NO: 2878539 - RNA, 19 nt, Artificial Sequence
  Description of Artificial Sequence: Synthetic oligonucleotide
uuccuggcguuuauagggc

SEQ ID NO: 2878540 - RNA, 19 nt, Artificial Sequence
  Description of Artificial Sequence: Synthetic oligonucleotide
cccagugugaacacguugg

SEQ ID NO: 2878541 - RNA, 19 nt, Artificial Sequence
  Description of Artificial Sequence: Synthetic oligonucleotide
ugaacacguugguguaggg

SEQ ID NO: 2878542 - RNA, 19 nt, Artificial Sequence
  Description of Artificial Sequence: Synthetic oligonucleotide
gcuagagucauaaacaaaa

SEQ ID NO: 2878543 - RNA, 19 nt, Artificial Sequence
  Description of Artificial Sequence: Synthetic oligonucleotide
uugugguuucucuccaacu

SEQ ID NO: 2878544 - RNA, 19 nt, Artificial Sequence
  Description of Artificial Sequence: Synthetic oligonucleotide
ugaaggcccugccaugucu

SEQ ID NO: 2878545 - RNA, 19 nt, Artificial Sequence
  Description of Artificial Sequence: Synthetic oligonucleotide
cuucgaauuguccacugga

SEQ ID NO: 2878546 - RNA, 19 nt, Artificial Sequence
  Description of Artificial Sequence: Synthetic oligonucleotide
uuguccacuggagaacaag

SEQ ID NO: 2878547 - RNA, 19 nt, Artificial Sequence
  Description of Artificial Sequence: Synthetic oligonucleotide
agaaugggaugacacucca

SEQ ID NO: 2878548 - RNA, 19 nt, Artificial Sequence
  Description of Artificial Sequence: Synthetic oligonucleotide
ugguguagggugagcuggg

SEQ ID NO: 2878549 - RNA, 19 nt, Artificial Sequence
  Description of Artificial Sequence: Synthetic oligonucleotide
cucgaguuacaugauguug

SEQ ID NO: 2878550 - RNA, 19 nt, Artificial Sequence
  Description of Artificial Sequence: Synthetic oligonucleotide
gaauuguccacuggagaac

SEQ ID NO: 2878551 - RNA, 19 nt, Artificial Sequence
  Description of Artificial Sequence: Synthetic oligonucleotide
gugaacacguugguguagg

SEQ ID NO: 2878552 - RNA, 19 nt, Artificial Sequence
  Description of Artificial Sequence: Synthetic oligonucleotide
gcugaucuccggcugaagg

SEQ ID NO: 2878553 - RNA, 19 nt, Artificial Sequence
  Description of Artificial Sequence: Synthetic oligonucleotide
ucuccagugggcagauggc

SEQ ID NO: 2878554 - RNA, 19 nt, Artificial Sequence
  Description of Artificial Sequence: Synthetic oligonucleotide
aauugugguuucucuccaa

SEQ ID NO: 2878555 - RNA, 19 nt, Artificial Sequence
  Description of Artificial Sequence: Synthetic oligonucleotide
guugaugcugagugagggc

SEQ ID NO: 2878556 - RNA, 19 nt, Artificial Sequence
  Description of Artificial Sequence: Synthetic oligonucleotide
augugaauccguugaugcu

SEQ ID NO: 2878557 - RNA, 19 nt, Artificial Sequence
  Description of Artificial Sequence: Synthetic oligonucleotide
uucccguggguucucugcc

SEQ ID NO: 2878558 - RNA, 19 nt, Artificial Sequence
  Description of Artificial Sequence: Synthetic oligonucleotide
aguuuugcacuguggcuga

SEQ ID NO: 2878559 - RNA, 19 nt, Artificial Sequence
  Description of Artificial Sequence: Synthetic oligonucleotide
uuucaucacuucgaauugu

SEQ ID NO: 2878560 - RNA, 19 nt, Artificial Sequence
  Description of Artificial Sequence: Synthetic oligonucleotide
ugugaacacguugguguag

SEQ ID NO: 2878561 - RNA, 19 nt, Artificial Sequence
  Description of Artificial Sequence: Synthetic oligonucleotide
cacuggagaacaaguuuug

SEQ ID NO: 2878562 - RNA, 19 nt, Artificial Sequence
  Description of Artificial Sequence: Synthetic oligonucleotide
auugugaggaagugcugaa

SEQ ID NO: 2878563 - RNA, 19 nt, Artificial Sequence
  Description of Artificial Sequence: Synthetic oligonucleotide
agugagggcugaucuccgg

SEQ ID NO: 2878564 - RNA, 19 nt, Artificial Sequence
  Description of Artificial Sequence: Synthetic oligonucleotide
guugguguagggugagcug

SEQ ID NO: 2878565 - RNA, 19 nt, Artificial Sequence
  Description of Artificial Sequence: Synthetic oligonucleotide
cauucaauugugguuucuc

SEQ ID NO: 2878566 - RNA, 19 nt, Artificial Sequence
  Description of Artificial Sequence: Synthetic oligonucleotide
uuuugcacuguggcugaag

SEQ ID NO: 2878567 - RNA, 19 nt, Artificial Sequence
  Description of Artificial Sequence: Synthetic oligonucleotide
gauauuccauggauuguga

SEQ ID NO: 2878568 - RNA, 19 nt, Artificial Sequence
  Description of Artificial Sequence: Synthetic oligonucleotide
acaaaaucugggccacacu

SEQ ID NO: 2878569 - RNA, 19 nt, Artificial Sequence
  Description of Artificial Sequence: Synthetic oligonucleotide
uucucuccaacucgaguua

SEQ ID NO: 2878570 - RNA, 19 nt, Artificial Sequence
  Description of Artificial Sequence: Synthetic oligonucleotide
agaccacauucauaaggcu

SEQ ID NO: 2878571 - RNA, 19 nt, Artificial Sequence
  Description of Artificial Sequence: Synthetic oligonucleotide
ugagggcugaucuccggcu

SEQ ID NO: 2878572 - RNA, 19 nt, Artificial Sequence
  Description of Artificial Sequence: Synthetic oligonucleotide
uugcacuguggcugaaggc

SEQ ID NO: 2878573 - RNA, 19 nt, Artificial Sequence
  Description of Artificial Sequence: Synthetic oligonucleotide
caacucgaguuacaugaug

SEQ ID NO: 2878574 - RNA, 19 nt, Artificial Sequence
  Description of Artificial Sequence: Synthetic oligonucleotide
gcguuuauagggcuucucc

SEQ ID NO: 2878575 - RNA, 19 nt, Artificial Sequence
  Description of Artificial Sequence: Synthetic oligonucleotide
gggaugacacuccacuacc

SEQ ID NO: 2878576 - RNA, 19 nt, Artificial Sequence
  Description of Artificial Sequence: Synthetic oligonucleotide
auccaucauucaauugugg

SEQ ID NO: 2878577 - RNA, 19 nt, Artificial Sequence
  Description of Artificial Sequence: Synthetic oligonucleotide
ucuccaacucgaguuacau

SEQ ID NO: 2878578 - RNA, 19 nt, Artificial Sequence
  Description of Artificial Sequence: Synthetic oligonucleotide
auguugagaaugggaugac

SEQ ID NO: 2878579 - RNA, 19 nt, Artificial Sequence
  Description of Artificial Sequence: Synthetic oligonucleotide
cauggauugugaggaagug

SEQ ID NO: 2878580 - RNA, 19 nt, Artificial Sequence
  Description of Artificial Sequence: Synthetic oligonucleotide
ugucucucuccagugggca

SEQ ID NO: 2878581 - RNA, 19 nt, Artificial Sequence
  Description of Artificial Sequence: Synthetic oligonucleotide
acucaaauucccguggguu

SEQ ID NO: 2878582 - RNA, 19 nt, Artificial Sequence
  Description of Artificial Sequence: Synthetic oligonucleotide
aaguaucuuucagauccau

SEQ ID NO: 2878583 - RNA, 19 nt, Artificial Sequence
  Description of Artificial Sequence: Synthetic oligonucleotide
cagauccaucauucaauug

SEQ ID NO: 2878584 - RNA, 19 nt, Artificial Sequence
  Description of Artificial Sequence: Synthetic oligonucleotide
augucucucuccagugggc

SEQ ID NO: 2878585 - RNA, 19 nt, Artificial Sequence
  Description of Artificial Sequence: Synthetic oligonucleotide
cuuucagauccaucauuca

SEQ ID NO: 2878586 - RNA, 19 nt, Artificial Sequence
  Description of Artificial Sequence: Synthetic oligonucleotide
ucucugccaugugaauccg

SEQ ID NO: 2878587 - RNA, 19 nt, Artificial Sequence
  Description of Artificial Sequence: Synthetic oligonucleotide
guucucugccaugugaauc

SEQ ID NO: 2878588 - RNA, 19 nt, Artificial Sequence
  Description of Artificial Sequence: Synthetic oligonucleotide
ucacuucgaauuguccacu

SEQ ID NO: 2878589 - RNA, 19 nt, Artificial Sequence
  Description of Artificial Sequence: Synthetic oligonucleotide
uccagugggcagauggcua

SEQ ID NO: 2878590 - RNA, 19 nt, Artificial Sequence
  Description of Artificial Sequence: Synthetic oligonucleotide
uccccagcuugaauuuucu

SEQ ID NO: 2878591 - RNA, 19 nt, Artificial Sequence
  Description of Artificial Sequence: Synthetic oligonucleotide
gaauuuucugauauuccau

SEQ ID NO: 2878592 - RNA, 19 nt, Artificial Sequence
  Description of Artificial Sequence: Synthetic oligonucleotide
guauaugaauuaaguaucu

SEQ ID NO: 2878593 - RNA, 19 nt, Artificial Sequence
  Description of Artificial Sequence: Synthetic oligonucleotide
cguuuauagggcuucuccc

SEQ ID NO: 2878594 - RNA, 19 nt, Artificial Sequence
  Description of Artificial Sequence: Synthetic oligonucleotide
gugagggcugaucuccggc

SEQ ID NO: 2878595 - RNA, 19 nt, Artificial Sequence
  Description of Artificial Sequence: Synthetic oligonucleotide
ucauucaauugugguuucu

SEQ ID NO: 2878596 - RNA, 19 nt, Artificial Sequence
  Description of Artificial Sequence: Synthetic oligonucleotide
cuccaacucgaguuacaug

SEQ ID NO: 2878597 - RNA, 19 nt, Artificial Sequence
  Description of Artificial Sequence: Synthetic oligonucleotide
cacuucgaauuguccacug

SEQ ID NO: 2878598 - RNA, 19 nt, Artificial Sequence
  Description of Artificial Sequence: Synthetic oligonucleotide
ccacauucauuacaucccc

SEQ ID NO: 2878599 - RNA, 19 nt, Artificial Sequence
  Description of Artificial Sequence: Synthetic oligonucleotide
aaacaaaaucugggccaca

SEQ ID NO: 2878600 - RNA, 19 nt, Artificial Sequence
  Description of Artificial Sequence: Synthetic oligonucleotide
acucgaguuacaugauguu

SEQ ID NO: 2878601 - RNA, 19 nt, Artificial Sequence
  Description of Artificial Sequence: Synthetic oligonucleotide
cuccacuaccagcuuuacc

SEQ ID NO: 2878602 - RNA, 19 nt, Artificial Sequence
  Description of Artificial Sequence: Synthetic oligonucleotide
aaggcccugccaugucucu

SEQ ID NO: 2878603 - RNA, 19 nt, Artificial Sequence
  Description of Artificial Sequence: Synthetic oligonucleotide
ucucuccaacucgaguuac

SEQ ID NO: 2878604 - RNA, 19 nt, Artificial Sequence
  Description of Artificial Sequence: Synthetic oligonucleotide
gagugagggcugaucuccg

SEQ ID NO: 2878605 - RNA, 19 nt, Artificial Sequence
  Description of Artificial Sequence: Synthetic oligonucleotide
uccuggcguuuauagggcu

SEQ ID NO: 2878606 - RNA, 19 nt, Artificial Sequence
  Description of Artificial Sequence: Synthetic oligonucleotide
caauugugguuucucucca

SEQ ID NO: 2878607 - RNA, 19 nt, Artificial Sequence
  Description of Artificial Sequence: Synthetic oligonucleotide
ugaauccguugaugcugag

SEQ ID NO: 2878608 - RNA, 19 nt, Artificial Sequence
  Description of Artificial Sequence: Synthetic oligonucleotide
cuccccagcuugaauuuuc

SEQ ID NO: 2878609 - RNA, 19 nt, Artificial Sequence
  Description of Artificial Sequence: Synthetic oligonucleotide
cugccaugugaauccguug

SEQ ID NO: 2878610 - RNA, 19 nt, Artificial Sequence
  Description of Artificial Sequence: Synthetic oligonucleotide
aggccuucccacagagacc

SEQ ID NO: 2878611 - RNA, 19 nt, Artificial Sequence
  Description of Artificial Sequence: Synthetic oligonucleotide
caucauucaauugugguuu

SEQ ID NO: 2878612 - RNA, 19 nt, Artificial Sequence
  Description of Artificial Sequence: Synthetic oligonucleotide
cugggaacucuggaugaag

SEQ ID NO: 2878613 - RNA, 19 nt, Artificial Sequence
  Description of Artificial Sequence: Synthetic oligonucleotide
cagagaccacauucauaag

SEQ ID NO: 2878614 - RNA, 19 nt, Artificial Sequence
  Description of Artificial Sequence: Synthetic oligonucleotide
augggaugacacuccacua

SEQ ID NO: 2878615 - RNA, 19 nt, Artificial Sequence
  Description of Artificial Sequence: Synthetic oligonucleotide
agugggcagauggcuagag

SEQ ID NO: 2878616 - RNA, 19 nt, Artificial Sequence
  Description of Artificial Sequence: Synthetic oligonucleotide
gaugcugagugagggcuga

SEQ ID NO: 2878617 - RNA, 19 nt, Artificial Sequence
  Description of Artificial Sequence: Synthetic oligonucleotide
auccguugaugcugaguga

SEQ ID NO: 2878618 - RNA, 19 nt, Artificial Sequence
  Description of Artificial Sequence: Synthetic oligonucleotide
uugugaggaagugcugaaa

SEQ ID NO: 2878619 - RNA, 19 nt, Artificial Sequence
  Description of Artificial Sequence: Synthetic oligonucleotide
caaguuuugcacuguggcu

SEQ ID NO: 2878620 - RNA, 19 nt, Artificial Sequence
  Description of Artificial Sequence: Synthetic oligonucleotide
gaaugggaugacacuccac

SEQ ID NO: 2878621 - RNA, 19 nt, Artificial Sequence
  Description of Artificial Sequence: Synthetic oligonucleotide
aggaagugcugaaaguuuu

SEQ ID NO: 2878622 - RNA, 19 nt, Artificial Sequence
  Description of Artificial Sequence: Synthetic oligonucleotide
acuccacuaccagcuuuac

SEQ ID NO: 2878623 - RNA, 19 nt, Artificial Sequence
  Description of Artificial Sequence: Synthetic oligonucleotide
cagauggcuagagucauaa

SEQ ID NO: 2878624 - RNA, 19 nt, Artificial Sequence
  Description of Artificial Sequence: Synthetic oligonucleotide
gugagcugggaacucugga

SEQ ID NO: 2878625 - RNA, 19 nt, Artificial Sequence
  Description of Artificial Sequence: Synthetic oligonucleotide
cagugugaacacguuggug

SEQ ID NO: 2878626 - RNA, 19 nt, Artificial Sequence
  Description of Artificial Sequence: Synthetic oligonucleotide
guuucucuccaacucgagu

SEQ ID NO: 2878627 - RNA, 19 nt, Artificial Sequence
  Description of Artificial Sequence: Synthetic oligonucleotide
ucauuacauccccgggauu

SEQ ID NO: 2878628 - RNA, 19 nt, Artificial Sequence
  Description of Artificial Sequence: Synthetic oligonucleotide
gaguuacaugauguugaga

SEQ ID NO: 2878629 - RNA, 19 nt, Artificial Sequence
  Description of Artificial Sequence: Synthetic oligonucleotide
ggagaacaaguuuugcacu

SEQ ID NO: 2878630 - RNA, 19 nt, Artificial Sequence
  Description of Artificial Sequence: Synthetic oligonucleotide
cuggcguuuauagggcuuc

SEQ ID NO: 2878631 - RNA, 19 nt, Artificial Sequence
  Description of Artificial Sequence: Synthetic oligonucleotide
acacuccacuaccagcuuu

SEQ ID NO: 2878632 - RNA, 19 nt, Artificial Sequence
  Description of Artificial Sequence: Synthetic oligonucleotide
cuagagucauaaacaaaau

SEQ ID NO: 2878633 - RNA, 19 nt, Artificial Sequence
  Description of Artificial Sequence: Synthetic oligonucleotide
uagggcuucuccccagcuu

SEQ ID NO: 2878634 - RNA, 19 nt, Artificial Sequence
  Description of Artificial Sequence: Synthetic oligonucleotide
agggcugaucuccggcuga

SEQ ID NO: 2878635 - RNA, 19 nt, Artificial Sequence
  Description of Artificial Sequence: Synthetic oligonucleotide
cguugaugcugagugaggg

SEQ ID NO: 2878636 - RNA, 19 nt, Artificial Sequence
  Description of Artificial Sequence: Synthetic oligonucleotide
gaaggcccugccaugucuc

SEQ ID NO: 2878637 - RNA, 19 nt, Artificial Sequence
  Description of Artificial Sequence: Synthetic oligonucleotide
guuacaugauguugagaau

SEQ ID NO: 2878638 - RNA, 19 nt, Artificial Sequence
  Description of Artificial Sequence: Synthetic oligonucleotide
acguugguguagggugagc

SEQ ID NO: 2878639 - RNA, 19 nt, Artificial Sequence
  Description of Artificial Sequence: Synthetic oligonucleotide
gugaauccguugaugcuga

SEQ ID NO: 2878640 - RNA, 19 nt, Artificial Sequence
  Description of Artificial Sequence: Synthetic oligonucleotide
uuccauggauugugaggaa

SEQ ID NO: 2878641 - RNA, 19 nt, Artificial Sequence
  Description of Artificial Sequence: Synthetic oligonucleotide
ccaugucucucuccagugg

SEQ ID NO: 2878642 - RNA, 19 nt, Artificial Sequence
  Description of Artificial Sequence: Synthetic oligonucleotide
ccacacucaaauucccgug

SEQ ID NO: 2878643 - RNA, 19 nt, Artificial Sequence
  Description of Artificial Sequence: Synthetic oligonucleotide
cacuaccagcuuuaccaca

SEQ ID NO: 2878644 - RNA, 19 nt, Artificial Sequence
  Description of Artificial Sequence: Synthetic oligonucleotide
gccaugucucucuccagug

SEQ ID NO: 2878645 - RNA, 19 nt, Artificial Sequence
  Description of Artificial Sequence: Synthetic oligonucleotide
ccagugggcagauggcuag

SEQ ID NO: 2878646 - RNA, 19 nt, Artificial Sequence
  Description of Artificial Sequence: Synthetic oligonucleotide
ucccguggguucucugcca

SEQ ID NO: 2878647 - RNA, 19 nt, Artificial Sequence
  Description of Artificial Sequence: Synthetic oligonucleotide
ggccuucccacagagacca

SEQ ID NO: 2878648 - RNA, 19 nt, Artificial Sequence
  Description of Artificial Sequence: Synthetic oligonucleotide
cacagagaccacauucaua

SEQ ID NO: 2878649 - RNA, 19 nt, Artificial Sequence
  Description of Artificial Sequence: Synthetic oligonucleotide
agauggcuagagucauaaa

SEQ ID NO: 2878650 - RNA, 19 nt, Artificial Sequence
  Description of Artificial Sequence: Synthetic oligonucleotide
gaacacguugguguagggu

SEQ ID NO: 2878651 - RNA, 19 nt, Artificial Sequence
  Description of Artificial Sequence: Synthetic oligonucleotide
cugccaugucucucuccag

SEQ ID NO: 2878652 - RNA, 19 nt, Artificial Sequence
  Description of Artificial Sequence: Synthetic oligonucleotide
gugugaacacguuggugua

SEQ ID NO: 2878653 - RNA, 19 nt, Artificial Sequence
  Description of Artificial Sequence: Synthetic oligonucleotide
ggccacacucaaauucccg

SEQ ID NO: 2878654 - RNA, 19 nt, Artificial Sequence
  Description of Artificial Sequence: Synthetic oligonucleotide
cgaguuacaugauguugag

SEQ ID NO: 2878655 - RNA, 19 nt, Artificial Sequence
  Description of Artificial Sequence: Synthetic oligonucleotide
cacuccacuaccagcuuua

SEQ ID NO: 2878656 - RNA, 19 nt, Artificial Sequence
  Description of Artificial Sequence: Synthetic oligonucleotide
uuaccacauuccuggcguu

SEQ ID NO: 2878657 - RNA, 19 nt, Artificial Sequence
  Description of Artificial Sequence: Synthetic oligonucleotide
auuacauccccgggauuuu

SEQ ID NO: 2878658 - RNA, 19 nt, Artificial Sequence
  Description of Artificial Sequence: Synthetic oligonucleotide
cauuacauccccgggauuu

SEQ ID NO: 2878659 - RNA, 19 nt, Artificial Sequence
  Description of Artificial Sequence: Synthetic oligonucleotide
cgaauuguccacuggagaa

SEQ ID NO: 2878660 - RNA, 19 nt, Artificial Sequence
  Description of Artificial Sequence: Synthetic oligonucleotide
cacguugguguagggugag

SEQ ID NO: 2878661 - RNA, 19 nt, Artificial Sequence
  Description of Artificial Sequence: Synthetic oligonucleotide
agggugagcugggaacucu

SEQ ID NO: 2878662 - RNA, 19 nt, Artificial Sequence
  Description of Artificial Sequence: Synthetic oligonucleotide
cucuccaacucgaguuaca

SEQ ID NO: 2878663 - RNA, 19 nt, Artificial Sequence
  Description of Artificial Sequence: Synthetic oligonucleotide
guguagggugagcugggaa

SEQ ID NO: 2878664 - RNA, 19 nt, Artificial Sequence
  Description of Artificial Sequence: Synthetic oligonucleotide
gaauccguugaugcugagu

SEQ ID NO: 2878665 - RNA, 19 nt, Artificial Sequence
  Description of Artificial Sequence: Synthetic oligonucleotide
gguuucucuccaacucgag

SEQ ID NO: 2878666 - RNA, 19 nt, Artificial Sequence
  Description of Artificial Sequence: Synthetic oligonucleotide
gaggaagugcugaaaguuu

SEQ ID NO: 2878667 - RNA, 19 nt, Artificial Sequence
  Description of Artificial Sequence: Synthetic oligonucleotide
ccugccaugucucucucca

SEQ ID NO: 2878668 - RNA, 19 nt, Artificial Sequence
  Description of Artificial Sequence: Synthetic oligonucleotide
guagggugagcugggaacu

SEQ ID NO: 2878669 - RNA, 19 nt, Artificial Sequence
  Description of Artificial Sequence: Synthetic oligonucleotide
accacauuccuggcguuua

SEQ ID NO: 2878670 - RNA, 19 nt, Artificial Sequence
  Description of Artificial Sequence: Synthetic oligonucleotide
ggaagugcugaaaguuuuc

SEQ ID NO: 2878671 - RNA, 19 nt, Artificial Sequence
  Description of Artificial Sequence: Synthetic oligonucleotide
guggguucucugccaugug

SEQ ID NO: 2878672 - RNA, 19 nt, Artificial Sequence
  Description of Artificial Sequence: Synthetic oligonucleotide
uccccagugugaacacguu

SEQ ID NO: 2878673 - RNA, 19 nt, Artificial Sequence
  Description of Artificial Sequence: Synthetic oligonucleotide
uaccacauuccuggcguuu

SEQ ID NO: 2878674 - RNA, 19 nt, Artificial Sequence
  Description of Artificial Sequence: Synthetic oligonucleotide
ccacuaccagcuuuaccac

SEQ ID NO: 2878675 - RNA, 19 nt, Artificial Sequence
  Description of Artificial Sequence: Synthetic oligonucleotide
ccaugugaauccguugaug

SEQ ID NO: 2878676 - RNA, 19 nt, Artificial Sequence
  Description of Artificial Sequence: Synthetic oligonucleotide
ccguugaugcugagugagg

SEQ ID NO: 2878677 - RNA, 19 nt, Artificial Sequence
  Description of Artificial Sequence: Synthetic oligonucleotide
aggcccugccaugucucuc

SEQ ID NO: 2878678 - RNA, 19 nt, Artificial Sequence
  Description of Artificial Sequence: Synthetic oligonucleotide
uggcguuuauagggcuucu

SEQ ID NO: 2878679 - RNA, 19 nt, Artificial Sequence
  Description of Artificial Sequence: Synthetic oligonucleotide
ggauugugaggaagugcug

SEQ ID NO: 2878680 - RNA, 19 nt, Artificial Sequence
  Description of Artificial Sequence: Synthetic oligonucleotide
uagggugagcugggaacuc

SEQ ID NO: 2878681 - RNA, 19 nt, Artificial Sequence
  Description of Artificial Sequence: Synthetic oligonucleotide
gccacacucaaauucccgu

SEQ ID NO: 2878682 - RNA, 19 nt, Artificial Sequence
  Description of Artificial Sequence: Synthetic oligonucleotide
cagcuugaauuuucugaua

SEQ ID NO: 2878683 - RNA, 19 nt, Artificial Sequence
  Description of Artificial Sequence: Synthetic oligonucleotide
gcacuguggcugaaggccc

SEQ ID NO: 2878684 - RNA, 19 nt, Artificial Sequence
  Description of Artificial Sequence: Synthetic oligonucleotide
ccagcuugaauuuucugau

SEQ ID NO: 2878685 - RNA, 19 nt, Artificial Sequence
  Description of Artificial Sequence: Synthetic oligonucleotide
caaauucccguggguucuc

SEQ ID NO: 2878686 - RNA, 19 nt, Artificial Sequence
  Description of Artificial Sequence: Synthetic oligonucleotide
cuguggcugaaggcccugc

SEQ ID NO: 2878687 - RNA, 19 nt, Artificial Sequence
  Description of Artificial Sequence: Synthetic oligonucleotide
gggcagauggcuagaguca

SEQ ID NO: 2878688 - RNA, 19 nt, Artificial Sequence
  Description of Artificial Sequence: Synthetic oligonucleotide
ggaugacacuccacuacca

SEQ ID NO: 2878689 - RNA, 19 nt, Artificial Sequence
  Description of Artificial Sequence: Synthetic oligonucleotide
cugauauuccauggauugu

SEQ ID NO: 2878690 - RNA, 19 nt, Artificial Sequence
  Description of Artificial Sequence: Synthetic oligonucleotide
gcugaaaguuuucccacau

SEQ ID NO: 2878691 - RNA, 19 nt, Artificial Sequence
  Description of Artificial Sequence: Synthetic oligonucleotide
ccagcuuuaccacauuccu

SEQ ID NO: 2878692 - RNA, 19 nt, Artificial Sequence
  Description of Artificial Sequence: Synthetic oligonucleotide
ccccagugugaacacguug

SEQ ID NO: 2878693 - RNA, 19 nt, Artificial Sequence
  Description of Artificial Sequence: Synthetic oligonucleotide
ggcuagagucauaaacaaa

SEQ ID NO: 2878694 - RNA, 19 nt, Artificial Sequence
  Description of Artificial Sequence: Synthetic oligonucleotide
ggguucucugccaugugaa

SEQ ID NO: 2878695 - RNA, 19 nt, Artificial Sequence
  Description of Artificial Sequence: Synthetic oligonucleotide
auuguccacuggagaacaa

SEQ ID NO: 2878696 - RNA, 19 nt, Artificial Sequence
  Description of Artificial Sequence: Synthetic oligonucleotide
cacucaaauucccgugggu

SEQ ID NO: 2878697 - RNA, 19 nt, Artificial Sequence
  Description of Artificial Sequence: Synthetic oligonucleotide
ccaucauucaauugugguu

SEQ ID NO: 2878698 - RNA, 19 nt, Artificial Sequence
  Description of Artificial Sequence: Synthetic oligonucleotide
gggccacacucaaauuccc

SEQ ID NO: 2878699 - RNA, 19 nt, Artificial Sequence
  Description of Artificial Sequence: Synthetic oligonucleotide
ccauggauugugaggaagu

SEQ ID NO: 2878700 - RNA, 19 nt, Artificial Sequence
  Description of Artificial Sequence: Synthetic oligonucleotide
gaucuccggcugaaggccu

SEQ ID NO: 2878701 - RNA, 19 nt, Artificial Sequence
  Description of Artificial Sequence: Synthetic oligonucleotide
ucucuccagugggcagaug

SEQ ID NO: 2878702 - RNA, 19 nt, Artificial Sequence
  Description of Artificial Sequence: Synthetic oligonucleotide
gugggcagauggcuagagu

SEQ ID NO: 2878703 - RNA, 19 nt, Artificial Sequence
  Description of Artificial Sequence: Synthetic oligonucleotide
ccacuggagaacaaguuuu

SEQ ID NO: 2878704 - RNA, 19 nt, Artificial Sequence
  Description of Artificial Sequence: Synthetic oligonucleotide
cugaaaguuuucccacauu

SEQ ID NO: 2878705 - RNA, 19 nt, Artificial Sequence
  Description of Artificial Sequence: Synthetic oligonucleotide
ggcguuuauagggcuucuc

SEQ ID NO: 2878706 - RNA, 19 nt, Artificial Sequence
  Description of Artificial Sequence: Synthetic oligonucleotide
gacacuccacuaccagcuu

SEQ ID NO: 2878707 - RNA, 19 nt, Artificial Sequence
  Description of Artificial Sequence: Synthetic oligonucleotide
cuccagugggcagauggcu

SEQ ID NO: 2878708 - RNA, 19 nt, Artificial Sequence
  Description of Artificial Sequence: Synthetic oligonucleotide
cacauuccuggcguuuaua

SEQ ID NO: 2878709 - RNA, 19 nt, Artificial Sequence
  Description of Artificial Sequence: Synthetic oligonucleotide
gguucucugccaugugaau

SEQ ID NO: 2878710 - RNA, 19 nt, Artificial Sequence
  Description of Artificial Sequence: Synthetic oligonucleotide
cccugccaugucucucucc

SEQ ID NO: 2878711 - RNA, 19 nt, Artificial Sequence
  Description of Artificial Sequence: Synthetic oligonucleotide
ggcugaucuccggcugaag

SEQ ID NO: 2878712 - RNA, 19 nt, Artificial Sequence
  Description of Artificial Sequence: Synthetic oligonucleotide
gguguagggugagcuggga

SEQ ID NO: 2878713 - RNA, 19 nt, Artificial Sequence
  Description of Artificial Sequence: Synthetic oligonucleotide
ggcccugccaugucucucu

SEQ ID NO: 2878714 - RNA, 19 nt, Artificial Sequence
  Description of Artificial Sequence: Synthetic oligonucleotide
cacuguggcugaaggcccu

SEQ ID NO: 2878715 - RNA, 19 nt, Artificial Sequence
  Description of Artificial Sequence: Synthetic oligonucleotide
cucugccaugugaauccgu

SEQ ID NO: 2878716 - RNA, 19 nt, Artificial Sequence
  Description of Artificial Sequence: Synthetic oligonucleotide
ccuucccacagagaccaca

SEQ ID NO: 2878717 - RNA, 19 nt, Artificial Sequence
  Description of Artificial Sequence: Synthetic oligonucleotide
guuuugcacuguggcugaa

SEQ ID NO: 2878718 - RNA, 19 nt, Artificial Sequence
  Description of Artificial Sequence: Synthetic oligonucleotide
ggcagauggcuagagucau

SEQ ID NO: 2878719 - RNA, 19 nt, Artificial Sequence
  Description of Artificial Sequence: Synthetic oligonucleotide
gccaugugaauccguugau

SEQ ID NO: 2878720 - RNA, 19 nt, Artificial Sequence
  Description of Artificial Sequence: Synthetic oligonucleotide
cagugggcagauggcuaga

SEQ ID NO: 2878721 - RNA, 19 nt, Artificial Sequence
  Description of Artificial Sequence: Synthetic oligonucleotide
aucuccggcugaaggccuu

SEQ ID NO: 2878722 - RNA, 19 nt, Artificial Sequence
  Description of Artificial Sequence: Synthetic oligonucleotide
gcugggaacucuggaugaa

SEQ ID NO: 2878723 - RNA, 19 nt, Artificial Sequence
  Description of Artificial Sequence: Synthetic oligonucleotide
ccguggguucucugccaug

SEQ ID NO: 2878724 - RNA, 19 nt, Artificial Sequence
  Description of Artificial Sequence: Synthetic oligonucleotide
ccagugugaacacguuggu

SEQ ID NO: 2878725 - RNA, 19 nt, Artificial Sequence
  Description of Artificial Sequence: Synthetic oligonucleotide
cuaccagcuuuaccacauu

SEQ ID NO: 2878726 - RNA, 19 nt, Artificial Sequence
  Description of Artificial Sequence: Synthetic oligonucleotide
ccacagagaccacauucau

SEQ ID NO: 2878727 - RNA, 19 nt, Artificial Sequence
  Description of Artificial Sequence: Synthetic oligonucleotide
cguugguguagggugagcu

SEQ ID NO: 2878728 - RNA, 19 nt, Artificial Sequence
  Description of Artificial Sequence: Synthetic oligonucleotide
ccaacucgaguuacaugau

SEQ ID NO: 2878729 - RNA, 19 nt, Artificial Sequence
  Description of Artificial Sequence: Synthetic oligonucleotide
gggcugaucuccggcugaa

SEQ ID NO: 2878730 - RNA, 19 nt, Artificial Sequence
  Description of Artificial Sequence: Synthetic oligonucleotide
gcccugccaugucucucuc

SEQ ID NO: 2878731 - RNA, 19 nt, Artificial Sequence
  Description of Artificial Sequence: Synthetic oligonucleotide
gcagauggcuagagucaua

SEQ ID NO: 2878732 - RNA, 19 nt, Artificial Sequence
  Description of Artificial Sequence: Synthetic oligonucleotide
cucucuccagugggcagau

SEQ ID NO: 2878733 - RNA, 19 nt, Artificial Sequence
  Description of Artificial Sequence: Synthetic oligonucleotide
cguggguucucugccaugu

SEQ ID NO: 2878734 - RNA, 19 nt, Artificial Sequence
  Description of Artificial Sequence: Synthetic oligonucleotide
ccuggcguuuauagggcuu

SEQ ID NO: 2878735 - RNA, 19 nt, Artificial Sequence
  Description of Artificial Sequence: Synthetic oligonucleotide
ccacauuccuggcguuuau

SEQ ID NO: 2878736 - RNA, 19 nt, Artificial Sequence
  Description of Artificial Sequence: Synthetic oligonucleotide
gccuucccacagagaccac

SEQ ID NO: 2878737 - RNA, 19 nt, Artificial Sequence
  Description of Artificial Sequence: Synthetic oligonucleotide
cccguggguucucugccau

SEQ ID NO: 2878738 - RNA, 19 nt, Artificial Sequence
  Description of Artificial Sequence: Synthetic oligonucleotide
aaagaaaucacauuucagg

SEQ ID NO: 2878739 - RNA, 19 nt, Artificial Sequence
  Description of Artificial Sequence: Synthetic oligonucleotide
aaaauagugacaaauggcc

SEQ ID NO: 2878740 - RNA, 19 nt, Artificial Sequence
  Description of Artificial Sequence: Synthetic oligonucleotide
aauuuggcaaaauagugac

SEQ ID NO: 2878741 - RNA, 19 nt, Artificial Sequence
  Description of Artificial Sequence: Synthetic oligonucleotide
aauuuaaccaguuuggaga

SEQ ID NO: 2878742 - RNA, 19 nt, Artificial Sequence
  Description of Artificial Sequence: Synthetic oligonucleotide
aaucaauuuaaccaguuug

SEQ ID NO: 2878743 - RNA, 19 nt, Artificial Sequence
  Description of Artificial Sequence: Synthetic oligonucleotide
aaaacaugaagauuuggag

SEQ ID NO: 2878744 - RNA, 19 nt, Artificial Sequence
  Description of Artificial Sequence: Synthetic oligonucleotide
gaaaucacauuucaggugg

SEQ ID NO: 2878745 - RNA, 19 nt, Artificial Sequence
  Description of Artificial Sequence: Synthetic oligonucleotide
uucugaaucaauuuaacca

SEQ ID NO: 2878746 - RNA, 19 nt, Artificial Sequence
  Description of Artificial Sequence: Synthetic oligonucleotide
ucaagauucaauaucuuca

SEQ ID NO: 2878747 - RNA, 19 nt, Artificial Sequence
  Description of Artificial Sequence: Synthetic oligonucleotide
ucugaaucaauuuaaccag

SEQ ID NO: 2878748 - RNA, 19 nt, Artificial Sequence
  Description of Artificial Sequence: Synthetic oligonucleotide
acugguuugucccugagac

SEQ ID NO: 2878749 - RNA, 19 nt, Artificial Sequence
  Description of Artificial Sequence: Synthetic oligonucleotide
aauaucuucagugaaacaa

SEQ ID NO: 2878750 - RNA, 19 nt, Artificial Sequence
  Description of Artificial Sequence: Synthetic oligonucleotide
uuuaucuggaaauuguuga

SEQ ID NO: 2878751 - RNA, 19 nt, Artificial Sequence
  Description of Artificial Sequence: Synthetic oligonucleotide
auuuggagaguucugaauc

SEQ ID NO: 2878752 - RNA, 19 nt, Artificial Sequence
  Description of Artificial Sequence: Synthetic oligonucleotide
aagaaaucacauuucaggu

SEQ ID NO: 2878753 - RNA, 19 nt, Artificial Sequence
  Description of Artificial Sequence: Synthetic oligonucleotide
aaacaugaagauuuggaga

SEQ ID NO: 2878754 - RNA, 19 nt, Artificial Sequence
  Description of Artificial Sequence: Synthetic oligonucleotide
aauagugacaaauggccug

SEQ ID NO: 2878755 - RNA, 19 nt, Artificial Sequence
  Description of Artificial Sequence: Synthetic oligonucleotide
aauggccugguuucaaagc

SEQ ID NO: 2878756 - RNA, 19 nt, Artificial Sequence
  Description of Artificial Sequence: Synthetic oligonucleotide
ucagugaaacaaaauuugg

SEQ ID NO: 2878757 - RNA, 19 nt, Artificial Sequence
  Description of Artificial Sequence: Synthetic oligonucleotide
aaaauuuggcaaaauagug

SEQ ID NO: 2878758 - RNA, 19 nt, Artificial Sequence
  Description of Artificial Sequence: Synthetic oligonucleotide
uuucagguggaaaacauga

SEQ ID NO: 2878759 - RNA, 19 nt, Artificial Sequence
  Description of Artificial Sequence: Synthetic oligonucleotide
caaaauagugacaaauggc

SEQ ID NO: 2878760 - RNA, 19 nt, Artificial Sequence
  Description of Artificial Sequence: Synthetic oligonucleotide
acaaaauuuggcaaaauag

SEQ ID NO: 2878761 - RNA, 19 nt, Artificial Sequence
  Description of Artificial Sequence: Synthetic oligonucleotide
caugagagacucaaaaucc

SEQ ID NO: 2878762 - RNA, 19 nt, Artificial Sequence
  Description of Artificial Sequence: Synthetic oligonucleotide
ucuguggaaguuuggaugg

SEQ ID NO: 2878763 - RNA, 19 nt, Artificial Sequence
  Description of Artificial Sequence: Synthetic oligonucleotide
ucaugagagacucaaaauc

SEQ ID NO: 2878764 - RNA, 19 nt, Artificial Sequence
  Description of Artificial Sequence: Synthetic oligonucleotide
ugugguggaaguuugggag

SEQ ID NO: 2878765 - RNA, 19 nt, Artificial Sequence
  Description of Artificial Sequence: Synthetic oligonucleotide
acagacaguucucucaggc

SEQ ID NO: 2878766 - RNA, 19 nt, Artificial Sequence
  Description of Artificial Sequence: Synthetic oligonucleotide
ucuucagugaaacaaaauu

SEQ ID NO: 2878767 - RNA, 19 nt, Artificial Sequence
  Description of Artificial Sequence: Synthetic oligonucleotide
ucagguggaaaacaugaag

SEQ ID NO: 2878768 - RNA, 19 nt, Artificial Sequence
  Description of Artificial Sequence: Synthetic oligonucleotide
accaucuagucucacagac

SEQ ID NO: 2878769 - RNA, 19 nt, Artificial Sequence
  Description of Artificial Sequence: Synthetic oligonucleotide
aucuggaaauuguugacac

SEQ ID NO: 2878770 - RNA, 19 nt, Artificial Sequence
  Description of Artificial Sequence: Synthetic oligonucleotide
gaaccaucuagucucacag

SEQ ID NO: 2878771 - RNA, 19 nt, Artificial Sequence
  Description of Artificial Sequence: Synthetic oligonucleotide
uuguugacacucaagauuc

SEQ ID NO: 2878772 - RNA, 19 nt, Artificial Sequence
  Description of Artificial Sequence: Synthetic oligonucleotide
aacaaaauuuggcaaaaua

SEQ ID NO: 2878773 - RNA, 19 nt, Artificial Sequence
  Description of Artificial Sequence: Synthetic oligonucleotide
acacucaagauucaauauc

SEQ ID NO: 2878774 - RNA, 19 nt, Artificial Sequence
  Description of Artificial Sequence: Synthetic oligonucleotide
aacuccaucucucugaguu

SEQ ID NO: 2878775 - RNA, 19 nt, Artificial Sequence
  Description of Artificial Sequence: Synthetic oligonucleotide
aaaacuccaucucucugag

SEQ ID NO: 2878776 - RNA, 19 nt, Artificial Sequence
  Description of Artificial Sequence: Synthetic oligonucleotide
ugaaacaaaauuuggcaaa

SEQ ID NO: 2878777 - RNA, 19 nt, Artificial Sequence
  Description of Artificial Sequence: Synthetic oligonucleotide
uuuggcaaaauagugacaa

SEQ ID NO: 2878778 - RNA, 19 nt, Artificial Sequence
  Description of Artificial Sequence: Synthetic oligonucleotide
aaauuuggcaaaauaguga

SEQ ID NO: 2878779 - RNA, 19 nt, Artificial Sequence
  Description of Artificial Sequence: Synthetic oligonucleotide
gcaaaauagugacaaaugg

SEQ ID NO: 2878780 - RNA, 19 nt, Artificial Sequence
  Description of Artificial Sequence: Synthetic oligonucleotide
auuuaaccaguuuggagag

SEQ ID NO: 2878781 - RNA, 19 nt, Artificial Sequence
  Description of Artificial Sequence: Synthetic oligonucleotide
caucuagucucacagacag

SEQ ID NO: 2878782 - RNA, 19 nt, Artificial Sequence
  Description of Artificial Sequence: Synthetic oligonucleotide
aucaauuuaaccaguuugg

SEQ ID NO: 2878783 - RNA, 19 nt, Artificial Sequence
  Description of Artificial Sequence: Synthetic oligonucleotide
agacaguucucucaggcuc

SEQ ID NO: 2878784 - RNA, 19 nt, Artificial Sequence
  Description of Artificial Sequence: Synthetic oligonucleotide
accucaagagaccucaggg

SEQ ID NO: 2878785 - RNA, 19 nt, Artificial Sequence
  Description of Artificial Sequence: Synthetic oligonucleotide
aaaagaaaucacauuucag

SEQ ID NO: 2878786 - RNA, 19 nt, Artificial Sequence
  Description of Artificial Sequence: Synthetic oligonucleotide
ugacggacagcacaucugg

SEQ ID NO: 2878787 - RNA, 19 nt, Artificial Sequence
  Description of Artificial Sequence: Synthetic oligonucleotide
gauucaauaucuucaguga

SEQ ID NO: 2878788 - RNA, 19 nt, Artificial Sequence
  Description of Artificial Sequence: Synthetic oligonucleotide
ugauguuucuuuaucugga

SEQ ID NO: 2878789 - RNA, 19 nt, Artificial Sequence
  Description of Artificial Sequence: Synthetic oligonucleotide
uucuuuaucuggaaauugu

SEQ ID NO: 2878790 - RNA, 19 nt, Artificial Sequence
  Description of Artificial Sequence: Synthetic oligonucleotide
uguuucuuuaucuggaaau

SEQ ID NO: 2878791 - RNA, 19 nt, Artificial Sequence
  Description of Artificial Sequence: Synthetic oligonucleotide
ucugauguuucuuuaucug

SEQ ID NO: 2878792 - RNA, 19 nt, Artificial Sequence
  Description of Artificial Sequence: Synthetic oligonucleotide
aaauggccugguuucaaag

SEQ ID NO: 2878793 - RNA, 19 nt, Artificial Sequence
  Description of Artificial Sequence: Synthetic oligonucleotide
cugauguuucuuuaucugg

SEQ ID NO: 2878794 - RNA, 19 nt, Artificial Sequence
  Description of Artificial Sequence: Synthetic oligonucleotide
aagcacagucaugagagac

SEQ ID NO: 2878795 - RNA, 19 nt, Artificial Sequence
  Description of Artificial Sequence: Synthetic oligonucleotide
cagugaaacaaaauuuggc

SEQ ID NO: 2878796 - RNA, 19 nt, Artificial Sequence
  Description of Artificial Sequence: Synthetic oligonucleotide
aaagcaucguccagaaaac

SEQ ID NO: 2878797 - RNA, 19 nt, Artificial Sequence
  Description of Artificial Sequence: Synthetic oligonucleotide
aacuuguccaaguuaggga

SEQ ID NO: 2878798 - RNA, 19 nt, Artificial Sequence
  Description of Artificial Sequence: Synthetic oligonucleotide
caauuuaaccaguuuggag

SEQ ID NO: 2878799 - RNA, 19 nt, Artificial Sequence
  Description of Artificial Sequence: Synthetic oligonucleotide
aucucucugaguuccuugc

SEQ ID NO: 2878800 - RNA, 19 nt, Artificial Sequence
  Description of Artificial Sequence: Synthetic oligonucleotide
caagauucaauaucuucag

SEQ ID NO: 2878801 - RNA, 19 nt, Artificial Sequence
  Description of Artificial Sequence: Synthetic oligonucleotide
cuuuaucuggaaauuguug

SEQ ID NO: 2878802 - RNA, 19 nt, Artificial Sequence
  Description of Artificial Sequence: Synthetic oligonucleotide
gaagaguugaucuggcaac

SEQ ID NO: 2878803 - RNA, 19 nt, Artificial Sequence
  Description of Artificial Sequence: Synthetic oligonucleotide
agaaaucacauuucaggug

SEQ ID NO: 2878804 - RNA, 19 nt, Artificial Sequence
  Description of Artificial Sequence: Synthetic oligonucleotide
uggugaaccaucuagucuc

SEQ ID NO: 2878805 - RNA, 19 nt, Artificial Sequence
  Description of Artificial Sequence: Synthetic oligonucleotide
gaagcaagcacagucauga

SEQ ID NO: 2878806 - RNA, 19 nt, Artificial Sequence
  Description of Artificial Sequence: Synthetic oligonucleotide
uccaaguuagggaagaguu

SEQ ID NO: 2878807 - RNA, 19 nt, Artificial Sequence
  Description of Artificial Sequence: Synthetic oligonucleotide
ucaauaucuucagugaaac

SEQ ID NO: 2878808 - RNA, 19 nt, Artificial Sequence
  Description of Artificial Sequence: Synthetic oligonucleotide
ucacauuucagguggaaaa

SEQ ID NO: 2878809 - RNA, 19 nt, Artificial Sequence
  Description of Artificial Sequence: Synthetic oligonucleotide
ugaagauuuggagaguucu

SEQ ID NO: 2878810 - RNA, 19 nt, Artificial Sequence
  Description of Artificial Sequence: Synthetic oligonucleotide
guucugaaucaauuuaacc

SEQ ID NO: 2878811 - RNA, 19 nt, Artificial Sequence
  Description of Artificial Sequence: Synthetic oligonucleotide
ucacagacaguucucucag

SEQ ID NO: 2878812 - RNA, 19 nt, Artificial Sequence
  Description of Artificial Sequence: Synthetic oligonucleotide
uucaauaucuucagugaaa

SEQ ID NO: 2878813 - RNA, 19 nt, Artificial Sequence
  Description of Artificial Sequence: Synthetic oligonucleotide
uccagaaaacuccaucucu

SEQ ID NO: 2878814 - RNA, 19 nt, Artificial Sequence
  Description of Artificial Sequence: Synthetic oligonucleotide
gaaaacuccaucucucuga

SEQ ID NO: 2878815 - RNA, 19 nt, Artificial Sequence
  Description of Artificial Sequence: Synthetic oligonucleotide
auggauaacuucuccaugu

SEQ ID NO: 2878816 - RNA, 19 nt, Artificial Sequence
  Description of Artificial Sequence: Synthetic oligonucleotide
ugguuucaaagcaucgucc

SEQ ID NO: 2878817 - RNA, 19 nt, Artificial Sequence
  Description of Artificial Sequence: Synthetic oligonucleotide
aaacuuuucugauguuucu

SEQ ID NO: 2878818 - RNA, 19 nt, Artificial Sequence
  Description of Artificial Sequence: Synthetic oligonucleotide
ugaucuggcaacugguuug

SEQ ID NO: 2878819 - RNA, 19 nt, Artificial Sequence
  Description of Artificial Sequence: Synthetic oligonucleotide
ugugcaaacuuuucugaug

SEQ ID NO: 2878820 - RNA, 19 nt, Artificial Sequence
  Description of Artificial Sequence: Synthetic oligonucleotide
ccugagagaacccagagcc

SEQ ID NO: 2878821 - RNA, 19 nt, Artificial Sequence
  Description of Artificial Sequence: Synthetic oligonucleotide
gaguugaucuggcaacugg

SEQ ID NO: 2878822 - RNA, 19 nt, Artificial Sequence
  Description of Artificial Sequence: Synthetic oligonucleotide
uagucucacagacaguucu

SEQ ID NO: 2878823 - RNA, 19 nt, Artificial Sequence
  Description of Artificial Sequence: Synthetic oligonucleotide
ucucugaguuccuugcagg

SEQ ID NO: 2878824 - RNA, 19 nt, Artificial Sequence
  Description of Artificial Sequence: Synthetic oligonucleotide
guuuggagaggucagacuc

SEQ ID NO: 2878825 - RNA, 19 nt, Artificial Sequence
  Description of Artificial Sequence: Synthetic oligonucleotide
uuuggagaguucugaauca

SEQ ID NO: 2878826 - RNA, 19 nt, Artificial Sequence
  Description of Artificial Sequence: Synthetic oligonucleotide
agucaugagagacucaaaa

SEQ ID NO: 2878827 - RNA, 19 nt, Artificial Sequence
  Description of Artificial Sequence: Synthetic oligonucleotide
caaacuuuucugauguuuc

SEQ ID NO: 2878828 - RNA, 19 nt, Artificial Sequence
  Description of Artificial Sequence: Synthetic oligonucleotide
caucuggugaaccaucuag

SEQ ID NO: 2878829 - RNA, 19 nt, Artificial Sequence
  Description of Artificial Sequence: Synthetic oligonucleotide
uagggaagaguugaucugg

SEQ ID NO: 2878830 - RNA, 19 nt, Artificial Sequence
  Description of Artificial Sequence: Synthetic oligonucleotide
aagauuuggagaguucuga

SEQ ID NO: 2878831 - RNA, 19 nt, Artificial Sequence
  Description of Artificial Sequence: Synthetic oligonucleotide
uucugauguuucuuuaucu

SEQ ID NO: 2878832 - RNA, 19 nt, Artificial Sequence
  Description of Artificial Sequence: Synthetic oligonucleotide
cucaagauucaauaucuuc

SEQ ID NO: 2878833 - RNA, 19 nt, Artificial Sequence
  Description of Artificial Sequence: Synthetic oligonucleotide
gaaauuguugacacucaag

SEQ ID NO: 2878834 - RNA, 19 nt, Artificial Sequence
  Description of Artificial Sequence: Synthetic oligonucleotide
uuaucuggaaauuguugac

SEQ ID NO: 2878835 - RNA, 19 nt, Artificial Sequence
  Description of Artificial Sequence: Synthetic oligonucleotide
ugacacucaagauucaaua

SEQ ID NO: 2878836 - RNA, 19 nt, Artificial Sequence
  Description of Artificial Sequence: Synthetic oligonucleotide
gagaggucagacucugugg

SEQ ID NO: 2878837 - RNA, 19 nt, Artificial Sequence
  Description of Artificial Sequence: Synthetic oligonucleotide
uuucuuuaucuggaaauug

SEQ ID NO: 2878838 - RNA, 19 nt, Artificial Sequence
  Description of Artificial Sequence: Synthetic oligonucleotide
uuagggaagaguugaucug

SEQ ID NO: 2878839 - RNA, 19 nt, Artificial Sequence
  Description of Artificial Sequence: Synthetic oligonucleotide
cuggcaacugguuuguccc

SEQ ID NO: 2878840 - RNA, 19 nt, Artificial Sequence
  Description of Artificial Sequence: Synthetic oligonucleotide
ugacaaauggccugguuuc

SEQ ID NO: 2878841 - RNA, 19 nt, Artificial Sequence
  Description of Artificial Sequence: Synthetic oligonucleotide
cucuguggaaguuuggaug

SEQ ID NO: 2878842 - RNA, 19 nt, Artificial Sequence
  Description of Artificial Sequence: Synthetic oligonucleotide
ugagagacucaaaauccga

SEQ ID NO: 2878843 - RNA, 19 nt, Artificial Sequence
  Description of Artificial Sequence: Synthetic oligonucleotide
acuuguccaaguuagggaa

SEQ ID NO: 2878844 - RNA, 19 nt, Artificial Sequence
  Description of Artificial Sequence: Synthetic oligonucleotide
uuaaccaguuuggagaggu

SEQ ID NO: 2878845 - RNA, 19 nt, Artificial Sequence
  Description of Artificial Sequence: Synthetic oligonucleotide
uuggauggauaacuucucc

SEQ ID NO: 2878846 - RNA, 19 nt, Artificial Sequence
  Description of Artificial Sequence: Synthetic oligonucleotide
ugguuugucccugagaccu

SEQ ID NO: 2878847 - RNA, 19 nt, Artificial Sequence
  Description of Artificial Sequence: Synthetic oligonucleotide
ucuggcaacugguuugucc

SEQ ID NO: 2878848 - RNA, 19 nt, Artificial Sequence
  Description of Artificial Sequence: Synthetic oligonucleotide
uuucaaagcaucguccaga

SEQ ID NO: 2878849 - RNA, 19 nt, Artificial Sequence
  Description of Artificial Sequence: Synthetic oligonucleotide
uggaaguuuggauggauaa

SEQ ID NO: 2878850 - RNA, 19 nt, Artificial Sequence
  Description of Artificial Sequence: Synthetic oligonucleotide
aaauagugacaaauggccu

SEQ ID NO: 2878851 - RNA, 19 nt, Artificial Sequence
  Description of Artificial Sequence: Synthetic oligonucleotide
ucuagucucacagacaguu

SEQ ID NO: 2878852 - RNA, 19 nt, Artificial Sequence
  Description of Artificial Sequence: Synthetic oligonucleotide
aguucugaaucaauuuaac

SEQ ID NO: 2878853 - RNA, 19 nt, Artificial Sequence
  Description of Artificial Sequence: Synthetic oligonucleotide
auagugacaaauggccugg

SEQ ID NO: 2878854 - RNA, 19 nt, Artificial Sequence
  Description of Artificial Sequence: Synthetic oligonucleotide
ugucccugagaccucaaga

SEQ ID NO: 2878855 - RNA, 19 nt, Artificial Sequence
  Description of Artificial Sequence: Synthetic oligonucleotide
agaguucugaaucaauuua

SEQ ID NO: 2878856 - RNA, 19 nt, Artificial Sequence
  Description of Artificial Sequence: Synthetic oligonucleotide
uggaaaacaugaagauuug

SEQ ID NO: 2878857 - RNA, 19 nt, Artificial Sequence
  Description of Artificial Sequence: Synthetic oligonucleotide
gagaccucagggcaggcag

SEQ ID NO: 2878858 - RNA, 19 nt, Artificial Sequence
  Description of Artificial Sequence: Synthetic oligonucleotide
uggauggauaacuucucca

SEQ ID NO: 2878859 - RNA, 19 nt, Artificial Sequence
  Description of Artificial Sequence: Synthetic oligonucleotide
cuggaaauuguugacacuc

SEQ ID NO: 2878860 - RNA, 19 nt, Artificial Sequence
  Description of Artificial Sequence: Synthetic oligonucleotide
uaucuucagugaaacaaaa

SEQ ID NO: 2878861 - RNA, 19 nt, Artificial Sequence
  Description of Artificial Sequence: Synthetic oligonucleotide
caaaauuuggcaaaauagu

SEQ ID NO: 2878862 - RNA, 19 nt, Artificial Sequence
  Description of Artificial Sequence: Synthetic oligonucleotide
cuugcaggaagcaagcaca

SEQ ID NO: 2878863 - RNA, 19 nt, Artificial Sequence
  Description of Artificial Sequence: Synthetic oligonucleotide
auucaauaucuucagugaa

SEQ ID NO: 2878864 - RNA, 19 nt, Artificial Sequence
  Description of Artificial Sequence: Synthetic oligonucleotide
aaguuugggaggucuccag

SEQ ID NO: 2878865 - RNA, 19 nt, Artificial Sequence
  Description of Artificial Sequence: Synthetic oligonucleotide
auaacuucuccauguggug

SEQ ID NO: 2878866 - RNA, 19 nt, Artificial Sequence
  Description of Artificial Sequence: Synthetic oligonucleotide
agaaaacuccaucucucug

SEQ ID NO: 2878867 - RNA, 19 nt, Artificial Sequence
  Description of Artificial Sequence: Synthetic oligonucleotide
ucuuuaucuggaaauuguu

SEQ ID NO: 2878868 - RNA, 19 nt, Artificial Sequence
  Description of Artificial Sequence: Synthetic oligonucleotide
aguuugggaggucuccagg

SEQ ID NO: 2878869 - RNA, 19 nt, Artificial Sequence
  Description of Artificial Sequence: Synthetic oligonucleotide
uuccugagagaacccagag

SEQ ID NO: 2878870 - RNA, 19 nt, Artificial Sequence
  Description of Artificial Sequence: Synthetic oligonucleotide
agaggucagacucugugga

SEQ ID NO: 2878871 - RNA, 19 nt, Artificial Sequence
  Description of Artificial Sequence: Synthetic oligonucleotide
ugagagaacccagagccug

SEQ ID NO: 2878872 - RNA, 19 nt, Artificial Sequence
  Description of Artificial Sequence: Synthetic oligonucleotide
ugaaucaauuuaaccaguu

SEQ ID NO: 2878873 - RNA, 19 nt, Artificial Sequence
  Description of Artificial Sequence: Synthetic oligonucleotide
gucccugagaccucaagag

SEQ ID NO: 2878874 - RNA, 19 nt, Artificial Sequence
  Description of Artificial Sequence: Synthetic oligonucleotide
cugaguuccuugcaggaag

SEQ ID NO: 2878875 - RNA, 19 nt, Artificial Sequence
  Description of Artificial Sequence: Synthetic oligonucleotide
uaucuggaaauuguugaca

SEQ ID NO: 2878876 - RNA, 19 nt, Artificial Sequence
  Description of Artificial Sequence: Synthetic oligonucleotide
ugaaccaucuagucucaca

SEQ ID NO: 2878877 - RNA, 19 nt, Artificial Sequence
  Description of Artificial Sequence: Synthetic oligonucleotide
uccaugugguggaaguuug

SEQ ID NO: 2878878 - RNA, 19 nt, Artificial Sequence
  Description of Artificial Sequence: Synthetic oligonucleotide
gagacucaaaauccgaaaa

SEQ ID NO: 2878879 - RNA, 19 nt, Artificial Sequence
  Description of Artificial Sequence: Synthetic oligonucleotide
gcaagcacagucaugagag

SEQ ID NO: 2878880 - RNA, 19 nt, Artificial Sequence
  Description of Artificial Sequence: Synthetic oligonucleotide
uggcaaaauagugacaaau

SEQ ID NO: 2878881 - RNA, 19 nt, Artificial Sequence
  Description of Artificial Sequence: Synthetic oligonucleotide
uggaaauuguugacacuca

SEQ ID NO: 2878882 - RNA, 19 nt, Artificial Sequence
  Description of Artificial Sequence: Synthetic oligonucleotide
uggauaacuucuccaugug

SEQ ID NO: 2878883 - RNA, 19 nt, Artificial Sequence
  Description of Artificial Sequence: Synthetic oligonucleotide
guuagggaagaguugaucu

SEQ ID NO: 2878884 - RNA, 19 nt, Artificial Sequence
  Description of Artificial Sequence: Synthetic oligonucleotide
aguuagggaagaguugauc

SEQ ID NO: 2878885 - RNA, 19 nt, Artificial Sequence
  Description of Artificial Sequence: Synthetic oligonucleotide
agggaugacggacagcaca

SEQ ID NO: 2878886 - RNA, 19 nt, Artificial Sequence
  Description of Artificial Sequence: Synthetic oligonucleotide
gaccucaagagaccucagg

SEQ ID NO: 2878887 - RNA, 19 nt, Artificial Sequence
  Description of Artificial Sequence: Synthetic oligonucleotide
ucuggugaaccaucuaguc

SEQ ID NO: 2878888 - RNA, 19 nt, Artificial Sequence
  Description of Artificial Sequence: Synthetic oligonucleotide
agaacccagagccugugca

SEQ ID NO: 2878889 - RNA, 19 nt, Artificial Sequence
  Description of Artificial Sequence: Synthetic oligonucleotide
uccugagagaacccagagc

SEQ ID NO: 2878890 - RNA, 19 nt, Artificial Sequence
  Description of Artificial Sequence: Synthetic oligonucleotide
gaggucuccagggaugacg

SEQ ID NO: 2878891 - RNA, 19 nt, Artificial Sequence
  Description of Artificial Sequence: Synthetic oligonucleotide
uuccuugcaggaagcaagc

SEQ ID NO: 2878892 - RNA, 19 nt, Artificial Sequence
  Description of Artificial Sequence: Synthetic oligonucleotide
ugaguuccuugcaggaagc

SEQ ID NO: 2878893 - RNA, 19 nt, Artificial Sequence
  Description of Artificial Sequence: Synthetic oligonucleotide
uucuccaugugguggaagu

SEQ ID NO: 2878894 - RNA, 19 nt, Artificial Sequence
  Description of Artificial Sequence: Synthetic oligonucleotide
uugacacucaagauucaau

SEQ ID NO: 2878895 - RNA, 19 nt, Artificial Sequence
  Description of Artificial Sequence: Synthetic oligonucleotide
uugcaggaagcaagcacag

SEQ ID NO: 2878896 - RNA, 19 nt, Artificial Sequence
  Description of Artificial Sequence: Synthetic oligonucleotide
agagacucaaaauccgaaa

SEQ ID NO: 2878897 - RNA, 19 nt, Artificial Sequence
  Description of Artificial Sequence: Synthetic oligonucleotide
auggccugguuucaaagca

SEQ ID NO: 2878898 - RNA, 19 nt, Artificial Sequence
  Description of Artificial Sequence: Synthetic oligonucleotide
gauaacuucuccauguggu

SEQ ID NO: 2878899 - RNA, 19 nt, Artificial Sequence
  Description of Artificial Sequence: Synthetic oligonucleotide
ggauaacuucuccaugugg

SEQ ID NO: 2878900 - RNA, 19 nt, Artificial Sequence
  Description of Artificial Sequence: Synthetic oligonucleotide
uucaaagcaucguccagaa

SEQ ID NO: 2878901 - RNA, 19 nt, Artificial Sequence
  Description of Artificial Sequence: Synthetic oligonucleotide
agguggaaaacaugaagau

SEQ ID NO: 2878902 - RNA, 19 nt, Artificial Sequence
  Description of Artificial Sequence: Synthetic oligonucleotide
guuucaaagcaucguccag

SEQ ID NO: 2878903 - RNA, 19 nt, Artificial Sequence
  Description of Artificial Sequence: Synthetic oligonucleotide
agcaucguccagaaaacuc

SEQ ID NO: 2878904 - RNA, 19 nt, Artificial Sequence
  Description of Artificial Sequence: Synthetic oligonucleotide
gaaguuuggauggauaacu

SEQ ID NO: 2878905 - RNA, 19 nt, Artificial Sequence
  Description of Artificial Sequence: Synthetic oligonucleotide
aguucucucaggcucggga

SEQ ID NO: 2878906 - RNA, 19 nt, Artificial Sequence
  Description of Artificial Sequence: Synthetic oligonucleotide
gacaguucucucaggcucg

SEQ ID NO: 2878907 - RNA, 19 nt, Artificial Sequence
  Description of Artificial Sequence: Synthetic oligonucleotide
cugguuucaaagcaucguc

SEQ ID NO: 2878908 - RNA, 19 nt, Artificial Sequence
  Description of Artificial Sequence: Synthetic oligonucleotide
aacugguuugucccugaga

SEQ ID NO: 2878909 - RNA, 19 nt, Artificial Sequence
  Description of Artificial Sequence: Synthetic oligonucleotide
cucaagagaccucagggca

SEQ ID NO: 2878910 - RNA, 19 nt, Artificial Sequence
  Description of Artificial Sequence: Synthetic oligonucleotide
uuugggaggucuccaggga

SEQ ID NO: 2878911 - RNA, 19 nt, Artificial Sequence
  Description of Artificial Sequence: Synthetic oligonucleotide
gaagauuuggagaguucug

SEQ ID NO: 2878912 - RNA, 19 nt, Artificial Sequence
  Description of Artificial Sequence: Synthetic oligonucleotide
acagcacaucuggugaacc

SEQ ID NO: 2878913 - RNA, 19 nt, Artificial Sequence
  Description of Artificial Sequence: Synthetic oligonucleotide
ucguccagaaaacuccauc

SEQ ID NO: 2878914 - RNA, 19 nt, Artificial Sequence
  Description of Artificial Sequence: Synthetic oligonucleotide
caugugguggaaguuuggg

SEQ ID NO: 2878915 - RNA, 19 nt, Artificial Sequence
  Description of Artificial Sequence: Synthetic oligonucleotide
acggacagcacaucuggug

SEQ ID NO: 2878916 - RNA, 19 nt, Artificial Sequence
  Description of Artificial Sequence: Synthetic oligonucleotide
aagaguugaucuggcaacu

SEQ ID NO: 2878917 - RNA, 19 nt, Artificial Sequence
  Description of Artificial Sequence: Synthetic oligonucleotide
uugaucuggcaacugguuu

SEQ ID NO: 2878918 - RNA, 19 nt, Artificial Sequence
  Description of Artificial Sequence: Synthetic oligonucleotide
aaccaucuagucucacaga

SEQ ID NO: 2878919 - RNA, 19 nt, Artificial Sequence
  Description of Artificial Sequence: Synthetic oligonucleotide
cuuguccaaguuagggaag

SEQ ID NO: 2878920 - RNA, 19 nt, Artificial Sequence
  Description of Artificial Sequence: Synthetic oligonucleotide
uuuaaccaguuuggagagg

SEQ ID NO: 2878921 - RNA, 19 nt, Artificial Sequence
  Description of Artificial Sequence: Synthetic oligonucleotide
uucagguggaaaacaugaa

SEQ ID NO: 2878922 - RNA, 19 nt, Artificial Sequence
  Description of Artificial Sequence: Synthetic oligonucleotide
ucuggaaauuguugacacu

SEQ ID NO: 2878923 - RNA, 19 nt, Artificial Sequence
  Description of Artificial Sequence: Synthetic oligonucleotide
cagacucuguggaaguuug

SEQ ID NO: 2878924 - RNA, 19 nt, Artificial Sequence
  Description of Artificial Sequence: Synthetic oligonucleotide
ucccugagaccucaagaga

SEQ ID NO: 2878925 - RNA, 19 nt, Artificial Sequence
  Description of Artificial Sequence: Synthetic oligonucleotide
aguuuggagaggucagacu

SEQ ID NO: 2878926 - RNA, 19 nt, Artificial Sequence
  Description of Artificial Sequence: Synthetic oligonucleotide
cucucugaguuccuugcag

SEQ ID NO: 2878927 - RNA, 19 nt, Artificial Sequence
  Description of Artificial Sequence: Synthetic oligonucleotide
acagucaugagagacucaa

SEQ ID NO: 2878928 - RNA, 19 nt, Artificial Sequence
  Description of Artificial Sequence: Synthetic oligonucleotide
guggaaaacaugaagauuu

SEQ ID NO: 2878929 - RNA, 19 nt, Artificial Sequence
  Description of Artificial Sequence: Synthetic oligonucleotide
gagaccucaagagaccuca

SEQ ID NO: 2878930 - RNA, 19 nt, Artificial Sequence
  Description of Artificial Sequence: Synthetic oligonucleotide
ggcaaaauagugacaaaug

SEQ ID NO: 2878931 - RNA, 19 nt, Artificial Sequence
  Description of Artificial Sequence: Synthetic oligonucleotide
cucacagacaguucucuca

SEQ ID NO: 2878932 - RNA, 19 nt, Artificial Sequence
  Description of Artificial Sequence: Synthetic oligonucleotide
agauuuggagaguucugaa

SEQ ID NO: 2878933 - RNA, 19 nt, Artificial Sequence
  Description of Artificial Sequence: Synthetic oligonucleotide
aaacaaaauuuggcaaaau

SEQ ID NO: 2878934 - RNA, 19 nt, Artificial Sequence
  Description of Artificial Sequence: Synthetic oligonucleotide
ggaaaacaugaagauuugg

SEQ ID NO: 2878935 - RNA, 19 nt, Artificial Sequence
  Description of Artificial Sequence: Synthetic oligonucleotide
cacucaagauucaauaucu

SEQ ID NO: 2878936 - RNA, 19 nt, Artificial Sequence
  Description of Artificial Sequence: Synthetic oligonucleotide
augugguggaaguuuggga

SEQ ID NO: 2878937 - RNA, 19 nt, Artificial Sequence
  Description of Artificial Sequence: Synthetic oligonucleotide
ugggaggucuccagggaug

SEQ ID NO: 2878938 - RNA, 19 nt, Artificial Sequence
  Description of Artificial Sequence: Synthetic oligonucleotide
ggagaggucagacucugug

SEQ ID NO: 2878939 - RNA, 19 nt, Artificial Sequence
  Description of Artificial Sequence: Synthetic oligonucleotide
gaguucugaaucaauuuaa

SEQ ID NO: 2878940 - RNA, 19 nt, Artificial Sequence
  Description of Artificial Sequence: Synthetic oligonucleotide
cuucagugaaacaaaauuu

SEQ ID NO: 2878941 - RNA, 19 nt, Artificial Sequence
  Description of Artificial Sequence: Synthetic oligonucleotide
uuguccaaguuagggaaga

SEQ ID NO: 2878942 - RNA, 19 nt, Artificial Sequence
  Description of Artificial Sequence: Synthetic oligonucleotide
gcaggaagcaagcacaguc

SEQ ID NO: 2878943 - RNA, 19 nt, Artificial Sequence
  Description of Artificial Sequence: Synthetic oligonucleotide
agccugugcaaacuuuucu

SEQ ID NO: 2878944 - RNA, 19 nt, Artificial Sequence
  Description of Artificial Sequence: Synthetic oligonucleotide
cacauuucagguggaaaac

SEQ ID NO: 2878945 - RNA, 19 nt, Artificial Sequence
  Description of Artificial Sequence: Synthetic oligonucleotide
auuucagguggaaaacaug

SEQ ID NO: 2878946 - RNA, 19 nt, Artificial Sequence
  Description of Artificial Sequence: Synthetic oligonucleotide
uugucccugagaccucaag

SEQ ID NO: 2878947 - RNA, 19 nt, Artificial Sequence
  Description of Artificial Sequence: Synthetic oligonucleotide
uucucucaggcucgggaac

SEQ ID NO: 2878948 - RNA, 19 nt, Artificial Sequence
  Description of Artificial Sequence: Synthetic oligonucleotide
acauuucagguggaaaaca

SEQ ID NO: 2878949 - RNA, 19 nt, Artificial Sequence
  Description of Artificial Sequence: Synthetic oligonucleotide
ucucucugaguuccuugca

SEQ ID NO: 2878950 - RNA, 19 nt, Artificial Sequence
  Description of Artificial Sequence: Synthetic oligonucleotide
aggucagacucuguggaag

SEQ ID NO: 2878951 - RNA, 19 nt, Artificial Sequence
  Description of Artificial Sequence: Synthetic oligonucleotide
aacuuuucugauguuucuu

SEQ ID NO: 2878952 - RNA, 19 nt, Artificial Sequence
  Description of Artificial Sequence: Synthetic oligonucleotide
auaucuucagugaaacaaa

SEQ ID NO: 2878953 - RNA, 19 nt, Artificial Sequence
  Description of Artificial Sequence: Synthetic oligonucleotide
uguugacacucaagauuca

SEQ ID NO: 2878954 - RNA, 19 nt, Artificial Sequence
  Description of Artificial Sequence: Synthetic oligonucleotide
acucuguggaaguuuggau

SEQ ID NO: 2878955 - RNA, 19 nt, Artificial Sequence
  Description of Artificial Sequence: Synthetic oligonucleotide
gugcaaacuuuucugaugu

SEQ ID NO: 2878956 - RNA, 19 nt, Artificial Sequence
  Description of Artificial Sequence: Synthetic oligonucleotide
gaugacggacagcacaucu

SEQ ID NO: 2878957 - RNA, 19 nt, Artificial Sequence
  Description of Artificial Sequence: Synthetic oligonucleotide
agggaagaguugaucuggc

SEQ ID NO: 2878958 - RNA, 19 nt, Artificial Sequence
  Description of Artificial Sequence: Synthetic oligonucleotide
uggagaguucugaaucaau

SEQ ID NO: 2878959 - RNA, 19 nt, Artificial Sequence
  Description of Artificial Sequence: Synthetic oligonucleotide
aggucuccagggaugacgg

SEQ ID NO: 2878960 - RNA, 19 nt, Artificial Sequence
  Description of Artificial Sequence: Synthetic oligonucleotide
aggcucgggaacuugucca

SEQ ID NO: 2878961 - RNA, 19 nt, Artificial Sequence
  Description of Artificial Sequence: Synthetic oligonucleotide
aggaagcaagcacagucau

SEQ ID NO: 2878962 - RNA, 19 nt, Artificial Sequence
  Description of Artificial Sequence: Synthetic oligonucleotide
aguugaucuggcaacuggu

SEQ ID NO: 2878963 - RNA, 19 nt, Artificial Sequence
  Description of Artificial Sequence: Synthetic oligonucleotide
ggaagaguugaucuggcaa

SEQ ID NO: 2878964 - RNA, 19 nt, Artificial Sequence
  Description of Artificial Sequence: Synthetic oligonucleotide
gcaucguccagaaaacucc

SEQ ID NO: 2878965 - RNA, 19 nt, Artificial Sequence
  Description of Artificial Sequence: Synthetic oligonucleotide
caagagaccucagggcagg

SEQ ID NO: 2878966 - RNA, 19 nt, Artificial Sequence
  Description of Artificial Sequence: Synthetic oligonucleotide
augaagauuuggagaguuc

SEQ ID NO: 2878967 - RNA, 19 nt, Artificial Sequence
  Description of Artificial Sequence: Synthetic oligonucleotide
uugggaggucuccagggau

SEQ ID NO: 2878968 - RNA, 19 nt, Artificial Sequence
  Description of Artificial Sequence: Synthetic oligonucleotide
aaucacauuucagguggaa

SEQ ID NO: 2878969 - RNA, 19 nt, Artificial Sequence
  Description of Artificial Sequence: Synthetic oligonucleotide
acccagagccugugcaaac

SEQ ID NO: 2878970 - RNA, 19 nt, Artificial Sequence
  Description of Artificial Sequence: Synthetic oligonucleotide
aagagaccucagggcaggc

SEQ ID NO: 2878971 - RNA, 19 nt, Artificial Sequence
  Description of Artificial Sequence: Synthetic oligonucleotide
gacucuguggaaguuugga

SEQ ID NO: 2878972 - RNA, 19 nt, Artificial Sequence
  Description of Artificial Sequence: Synthetic oligonucleotide
gacacucaagauucaauau

SEQ ID NO: 2878973 - RNA, 19 nt, Artificial Sequence
  Description of Artificial Sequence: Synthetic oligonucleotide
cugguuugucccugagacc

SEQ ID NO: 2878974 - RNA, 19 nt, Artificial Sequence
  Description of Artificial Sequence: Synthetic oligonucleotide
gauuuggagaguucugaau

SEQ ID NO: 2878975 - RNA, 19 nt, Artificial Sequence
  Description of Artificial Sequence: Synthetic oligonucleotide
aagcaucguccagaaaacu

SEQ ID NO: 2878976 - RNA, 19 nt, Artificial Sequence
  Description of Artificial Sequence: Synthetic oligonucleotide
uggaaguuugggaggucuc

SEQ ID NO: 2878977 - RNA, 19 nt, Artificial Sequence
  Description of Artificial Sequence: Synthetic oligonucleotide
uguccaaguuagggaagag

SEQ ID NO: 2878978 - RNA, 19 nt, Artificial Sequence
  Description of Artificial Sequence: Synthetic oligonucleotide
guccagaaaacuccaucuc

SEQ ID NO: 2878979 - RNA, 19 nt, Artificial Sequence
  Description of Artificial Sequence: Synthetic oligonucleotide
uuggcaaaauagugacaaa

SEQ ID NO: 2878980 - RNA, 19 nt, Artificial Sequence
  Description of Artificial Sequence: Synthetic oligonucleotide
gagagacucaaaauccgaa

SEQ ID NO: 2878981 - RNA, 19 nt, Artificial Sequence
  Description of Artificial Sequence: Synthetic oligonucleotide
gaccucagggcaggcaggg

SEQ ID NO: 2878982 - RNA, 19 nt, Artificial Sequence
  Description of Artificial Sequence: Synthetic oligonucleotide
gagaguucugaaucaauuu

SEQ ID NO: 2878983 - RNA, 19 nt, Artificial Sequence
  Description of Artificial Sequence: Synthetic oligonucleotide
gaaguuugggaggucucca

SEQ ID NO: 2878984 - RNA, 19 nt, Artificial Sequence
  Description of Artificial Sequence: Synthetic oligonucleotide
aaacuccaucucucugagu

SEQ ID NO: 2878985 - RNA, 19 nt, Artificial Sequence
  Description of Artificial Sequence: Synthetic oligonucleotide
caggcucgggaacuugucc

SEQ ID NO: 2878986 - RNA, 19 nt, Artificial Sequence
  Description of Artificial Sequence: Synthetic oligonucleotide
ucugaguuccuugcaggaa

SEQ ID NO: 2878987 - RNA, 19 nt, Artificial Sequence
  Description of Artificial Sequence: Synthetic oligonucleotide
aaguuuggauggauaacuu

SEQ ID NO: 2878988 - RNA, 19 nt, Artificial Sequence
  Description of Artificial Sequence: Synthetic oligonucleotide
cuagucucacagacaguuc

SEQ ID NO: 2878989 - RNA, 19 nt, Artificial Sequence
  Description of Artificial Sequence: Synthetic oligonucleotide
aucacauuucagguggaaa

SEQ ID NO: 2878990 - RNA, 19 nt, Artificial Sequence
  Description of Artificial Sequence: Synthetic oligonucleotide
agucucacagacaguucuc

SEQ ID NO: 2878991 - RNA, 19 nt, Artificial Sequence
  Description of Artificial Sequence: Synthetic oligonucleotide
cccugagaccucaagagac

SEQ ID NO: 2878992 - RNA, 19 nt, Artificial Sequence
  Description of Artificial Sequence: Synthetic oligonucleotide
ccucaagagaccucagggc

SEQ ID NO: 2878993 - RNA, 19 nt, Artificial Sequence
  Description of Artificial Sequence: Synthetic oligonucleotide
cacagacaguucucucagg

SEQ ID NO: 2878994 - RNA, 19 nt, Artificial Sequence
  Description of Artificial Sequence: Synthetic oligonucleotide
gaaucaauuuaaccaguuu

SEQ ID NO: 2878995 - RNA, 19 nt, Artificial Sequence
  Description of Artificial Sequence: Synthetic oligonucleotide
ugagaccucaagagaccuc

SEQ ID NO: 2878996 - RNA, 19 nt, Artificial Sequence
  Description of Artificial Sequence: Synthetic oligonucleotide
uuggagaguucugaaucaa

SEQ ID NO: 2878997 - RNA, 19 nt, Artificial Sequence
  Description of Artificial Sequence: Synthetic oligonucleotide
aucuggugaaccaucuagu

SEQ ID NO: 2878998 - RNA, 19 nt, Artificial Sequence
  Description of Artificial Sequence: Synthetic oligonucleotide
caguuuggagaggucagac

SEQ ID NO: 2878999 - RNA, 19 nt, Artificial Sequence
  Description of Artificial Sequence: Synthetic oligonucleotide
aaaucacauuucaggugga

SEQ ID NO: 2879000 - RNA, 19 nt, Artificial Sequence
  Description of Artificial Sequence: Synthetic oligonucleotide
ucgggaacuuguccaaguu

SEQ ID NO: 2879001 - RNA, 19 nt, Artificial Sequence
  Description of Artificial Sequence: Synthetic oligonucleotide
gagaacccagagccugugc

SEQ ID NO: 2879002 - RNA, 19 nt, Artificial Sequence
  Description of Artificial Sequence: Synthetic oligonucleotide
uguggaaguuuggauggau

SEQ ID NO: 2879003 - RNA, 19 nt, Artificial Sequence
  Description of Artificial Sequence: Synthetic oligonucleotide
ucucucaggcucgggaacu

SEQ ID NO: 2879004 - RNA, 19 nt, Artificial Sequence
  Description of Artificial Sequence: Synthetic oligonucleotide
ucaggcucgggaacuuguc

SEQ ID NO: 2879005 - RNA, 19 nt, Artificial Sequence
  Description of Artificial Sequence: Synthetic oligonucleotide
caauaucuucagugaaaca

SEQ ID NO: 2879006 - RNA, 19 nt, Artificial Sequence
  Description of Artificial Sequence: Synthetic oligonucleotide
agcacagucaugagagacu

SEQ ID NO: 2879007 - RNA, 19 nt, Artificial Sequence
  Description of Artificial Sequence: Synthetic oligonucleotide
ucagacucuguggaaguuu

SEQ ID NO: 2879008 - RNA, 19 nt, Artificial Sequence
  Description of Artificial Sequence: Synthetic oligonucleotide
aacccagagccugugcaaa

SEQ ID NO: 2879009 - RNA, 19 nt, Artificial Sequence
  Description of Artificial Sequence: Synthetic oligonucleotide
ucaaagcaucguccagaaa

SEQ ID NO: 2879010 - RNA, 19 nt, Artificial Sequence
  Description of Artificial Sequence: Synthetic oligonucleotide
gucaugagagacucaaaau

SEQ ID NO: 2879011 - RNA, 19 nt, Artificial Sequence
  Description of Artificial Sequence: Synthetic oligonucleotide
cucugaguuccuugcagga

SEQ ID NO: 2879012 - RNA, 19 nt, Artificial Sequence
  Description of Artificial Sequence: Synthetic oligonucleotide
ccaaguuagggaagaguug

SEQ ID NO: 2879013 - RNA, 19 nt, Artificial Sequence
  Description of Artificial Sequence: Synthetic oligonucleotide
auuuggcaaaauagugaca

SEQ ID NO: 2879014 - RNA, 19 nt, Artificial Sequence
  Description of Artificial Sequence: Synthetic oligonucleotide
ggaaguuugggaggucucc

SEQ ID NO: 2879015 - RNA, 19 nt, Artificial Sequence
  Description of Artificial Sequence: Synthetic oligonucleotide
uggccugguuucaaagcau

SEQ ID NO: 2879016 - RNA, 19 nt, Artificial Sequence
  Description of Artificial Sequence: Synthetic oligonucleotide
gaacccagagccugugcaa

SEQ ID NO: 2879017 - RNA, 19 nt, Artificial Sequence
  Description of Artificial Sequence: Synthetic oligonucleotide
caucguccagaaaacucca

SEQ ID NO: 2879018 - RNA, 19 nt, Artificial Sequence
  Description of Artificial Sequence: Synthetic oligonucleotide
guucucucaggcucgggaa

SEQ ID NO: 2879019 - RNA, 19 nt, Artificial Sequence
  Description of Artificial Sequence: Synthetic oligonucleotide
agaguugaucuggcaacug

SEQ ID NO: 2879020 - RNA, 19 nt, Artificial Sequence
  Description of Artificial Sequence: Synthetic oligonucleotide
ggaaauuguugacacucaa

SEQ ID NO: 2879021 - RNA, 19 nt, Artificial Sequence
  Description of Artificial Sequence: Synthetic oligonucleotide
augacggacagcacaucug

SEQ ID NO: 2879022 - RNA, 19 nt, Artificial Sequence
  Description of Artificial Sequence: Synthetic oligonucleotide
gacagcacaucuggugaac

SEQ ID NO: 2879023 - RNA, 19 nt, Artificial Sequence
  Description of Artificial Sequence: Synthetic oligonucleotide
agugacaaauggccugguu

SEQ ID NO: 2879024 - RNA, 19 nt, Artificial Sequence
  Description of Artificial Sequence: Synthetic oligonucleotide
uaaccaguuuggagagguc

SEQ ID NO: 2879025 - RNA, 19 nt, Artificial Sequence
  Description of Artificial Sequence: Synthetic oligonucleotide
agcacaucuggugaaccau

SEQ ID NO: 2879026 - RNA, 19 nt, Artificial Sequence
  Description of Artificial Sequence: Synthetic oligonucleotide
ccuugcaggaagcaagcac

SEQ ID NO: 2879027 - RNA, 19 nt, Artificial Sequence
  Description of Artificial Sequence: Synthetic oligonucleotide
ggaacuuguccaaguuagg

SEQ ID NO: 2879028 - RNA, 19 nt, Artificial Sequence
  Description of Artificial Sequence: Synthetic oligonucleotide
gacaaauggccugguuuca

SEQ ID NO: 2879029 - RNA, 19 nt, Artificial Sequence
  Description of Artificial Sequence: Synthetic oligonucleotide
cauuucagguggaaaacau

SEQ ID NO: 2879030 - RNA, 19 nt, Artificial Sequence
  Description of Artificial Sequence: Synthetic oligonucleotide
ccugagaccucaagagacc

SEQ ID NO: 2879031 - RNA, 19 nt, Artificial Sequence
  Description of Artificial Sequence: Synthetic oligonucleotide
ggaaguuuggauggauaac

SEQ ID NO: 2879032 - RNA, 19 nt, Artificial Sequence
  Description of Artificial Sequence: Synthetic oligonucleotide
acaguucucucaggcucgg

SEQ ID NO: 2879033 - RNA, 19 nt, Artificial Sequence
  Description of Artificial Sequence: Synthetic oligonucleotide
guugacacucaagauucaa

SEQ ID NO: 2879034 - RNA, 19 nt, Artificial Sequence
  Description of Artificial Sequence: Synthetic oligonucleotide
gguuccugagagaacccag

SEQ ID NO: 2879035 - RNA, 19 nt, Artificial Sequence
  Description of Artificial Sequence: Synthetic oligonucleotide
cugaaucaauuuaaccagu

SEQ ID NO: 2879036 - RNA, 19 nt, Artificial Sequence
  Description of Artificial Sequence: Synthetic oligonucleotide
aaguuagggaagaguugau

SEQ ID NO: 2879037 - RNA, 19 nt, Artificial Sequence
  Description of Artificial Sequence: Synthetic oligonucleotide
caacugguuugucccugag

SEQ ID NO: 2879038 - RNA, 19 nt, Artificial Sequence
  Description of Artificial Sequence: Synthetic oligonucleotide
agagaacccagagccugug

SEQ ID NO: 2879039 - RNA, 19 nt, Artificial Sequence
  Description of Artificial Sequence: Synthetic oligonucleotide
uggcaacugguuugucccu

SEQ ID NO: 2879040 - RNA, 19 nt, Artificial Sequence
  Description of Artificial Sequence: Synthetic oligonucleotide
agguuccugagagaaccca

SEQ ID NO: 2879041 - RNA, 19 nt, Artificial Sequence
  Description of Artificial Sequence: Synthetic oligonucleotide
guuccugagagaacccaga

SEQ ID NO: 2879042 - RNA, 19 nt, Artificial Sequence
  Description of Artificial Sequence: Synthetic oligonucleotide
agacucuguggaaguuugg

SEQ ID NO: 2879043 - RNA, 19 nt, Artificial Sequence
  Description of Artificial Sequence: Synthetic oligonucleotide
caaauggccugguuucaaa

SEQ ID NO: 2879044 - RNA, 19 nt, Artificial Sequence
  Description of Artificial Sequence: Synthetic oligonucleotide
agagccugugcaaacuuuu

SEQ ID NO: 2879045 - RNA, 19 nt, Artificial Sequence
  Description of Artificial Sequence: Synthetic oligonucleotide
ugcaaacuuuucugauguu

SEQ ID NO: 2879046 - RNA, 19 nt, Artificial Sequence
  Description of Artificial Sequence: Synthetic oligonucleotide
cuggugaaccaucuagucu

SEQ ID NO: 2879047 - RNA, 19 nt, Artificial Sequence
  Description of Artificial Sequence: Synthetic oligonucleotide
acaaauggccugguuucaa

SEQ ID NO: 2879048 - RNA, 19 nt, Artificial Sequence
  Description of Artificial Sequence: Synthetic oligonucleotide
ucucaggcucgggaacuug

SEQ ID NO: 2879049 - RNA, 19 nt, Artificial Sequence
  Description of Artificial Sequence: Synthetic oligonucleotide
cagaaaacuccaucucucu

SEQ ID NO: 2879050 - RNA, 19 nt, Artificial Sequence
  Description of Artificial Sequence: Synthetic oligonucleotide
uuugucccugagaccucaa

SEQ ID NO: 2879051 - RNA, 19 nt, Artificial Sequence
  Description of Artificial Sequence: Synthetic oligonucleotide
uggagaggucagacucugu

SEQ ID NO: 2879052 - RNA, 19 nt, Artificial Sequence
  Description of Artificial Sequence: Synthetic oligonucleotide
cuucuccaugugguggaag

SEQ ID NO: 2879053 - RNA, 19 nt, Artificial Sequence
  Description of Artificial Sequence: Synthetic oligonucleotide
cagcacaucuggugaacca

SEQ ID NO: 2879054 - RNA, 19 nt, Artificial Sequence
  Description of Artificial Sequence: Synthetic oligonucleotide
agaccucagggcaggcagg

SEQ ID NO: 2879055 - RNA, 19 nt, Artificial Sequence
  Description of Artificial Sequence: Synthetic oligonucleotide
ggauggauaacuucuccau

SEQ ID NO: 2879056 - RNA, 19 nt, Artificial Sequence
  Description of Artificial Sequence: Synthetic oligonucleotide
ccagggaugacggacagca

SEQ ID NO: 2879057 - RNA, 19 nt, Artificial Sequence
  Description of Artificial Sequence: Synthetic oligonucleotide
acaucuggugaaccaucua

SEQ ID NO: 2879058 - RNA, 19 nt, Artificial Sequence
  Description of Artificial Sequence: Synthetic oligonucleotide
guuucuuuaucuggaaauu

SEQ ID NO: 2879059 - RNA, 19 nt, Artificial Sequence
  Description of Artificial Sequence: Synthetic oligonucleotide
guuugucccugagaccuca

SEQ ID NO: 2879060 - RNA, 19 nt, Artificial Sequence
  Description of Artificial Sequence: Synthetic oligonucleotide
ccugugcaaacuuuucuga

SEQ ID NO: 2879061 - RNA, 19 nt, Artificial Sequence
  Description of Artificial Sequence: Synthetic oligonucleotide
gccugguuucaaagcaucg

SEQ ID NO: 2879062 - RNA, 19 nt, Artificial Sequence
  Description of Artificial Sequence: Synthetic oligonucleotide
gagccugugcaaacuuuuc

SEQ ID NO: 2879063 - RNA, 19 nt, Artificial Sequence
  Description of Artificial Sequence: Synthetic oligonucleotide
ucuccaugugguggaaguu

SEQ ID NO: 2879064 - RNA, 19 nt, Artificial Sequence
  Description of Artificial Sequence: Synthetic oligonucleotide
gcacagucaugagagacuc

SEQ ID NO: 2879065 - RNA, 19 nt, Artificial Sequence
  Description of Artificial Sequence: Synthetic oligonucleotide
ccaugugguggaaguuugg

SEQ ID NO: 2879066 - RNA, 19 nt, Artificial Sequence
  Description of Artificial Sequence: Synthetic oligonucleotide
agagaccucagggcaggca

SEQ ID NO: 2879067 - RNA, 19 nt, Artificial Sequence
  Description of Artificial Sequence: Synthetic oligonucleotide
cacaucuggugaaccaucu

SEQ ID NO: 2879068 - RNA, 19 nt, Artificial Sequence
  Description of Artificial Sequence: Synthetic oligonucleotide
ggaagcaagcacagucaug

SEQ ID NO: 2879069 - RNA, 19 nt, Artificial Sequence
  Description of Artificial Sequence: Synthetic oligonucleotide
caagcacagucaugagaga

SEQ ID NO: 2879070 - RNA, 19 nt, Artificial Sequence
  Description of Artificial Sequence: Synthetic oligonucleotide
acucaagauucaauaucuu

SEQ ID NO: 2879071 - RNA, 19 nt, Artificial Sequence
  Description of Artificial Sequence: Synthetic oligonucleotide
uccagggaugacggacagc

SEQ ID NO: 2879072 - RNA, 19 nt, Artificial Sequence
  Description of Artificial Sequence: Synthetic oligonucleotide
caugaagauuuggagaguu

SEQ ID NO: 2879073 - RNA, 19 nt, Artificial Sequence
  Description of Artificial Sequence: Synthetic oligonucleotide
guggaaguuugggaggucu

SEQ ID NO: 2879074 - RNA, 19 nt, Artificial Sequence
  Description of Artificial Sequence: Synthetic oligonucleotide
uagugacaaauggccuggu

SEQ ID NO: 2879075 - RNA, 19 nt, Artificial Sequence
  Description of Artificial Sequence: Synthetic oligonucleotide
guggaaguuuggauggaua

SEQ ID NO: 2879076 - RNA, 19 nt, Artificial Sequence
  Description of Artificial Sequence: Synthetic oligonucleotide
gggaagaguugaucuggca

SEQ ID NO: 2879077 - RNA, 19 nt, Artificial Sequence
  Description of Artificial Sequence: Synthetic oligonucleotide
cagggaugacggacagcac

SEQ ID NO: 2879078 - RNA, 19 nt, Artificial Sequence
  Description of Artificial Sequence: Synthetic oligonucleotide
cugugcaaacuuuucugau

SEQ ID NO: 2879079 - RNA, 19 nt, Artificial Sequence
  Description of Artificial Sequence: Synthetic oligonucleotide
agaccucaagagaccucag

SEQ ID NO: 2879080 - RNA, 19 nt, Artificial Sequence
  Description of Artificial Sequence: Synthetic oligonucleotide
cagacaguucucucaggcu

SEQ ID NO: 2879081 - RNA, 19 nt, Artificial Sequence
  Description of Artificial Sequence: Synthetic oligonucleotide
guccaaguuagggaagagu

SEQ ID NO: 2879082 - RNA, 19 nt, Artificial Sequence
  Description of Artificial Sequence: Synthetic oligonucleotide
aucuggcaacugguuuguc

SEQ ID NO: 2879083 - RNA, 19 nt, Artificial Sequence
  Description of Artificial Sequence: Synthetic oligonucleotide
ggcaacugguuugucccug

SEQ ID NO: 2879084 - RNA, 19 nt, Artificial Sequence
  Description of Artificial Sequence: Synthetic oligonucleotide
gucucacagacaguucucu

SEQ ID NO: 2879085 - RNA, 19 nt, Artificial Sequence
  Description of Artificial Sequence: Synthetic oligonucleotide
cucgggaacuuguccaagu

SEQ ID NO: 2879086 - RNA, 19 nt, Artificial Sequence
  Description of Artificial Sequence: Synthetic oligonucleotide
aucuagucucacagacagu

SEQ ID NO: 2879087 - RNA, 19 nt, Artificial Sequence
  Description of Artificial Sequence: Synthetic oligonucleotide
cacagucaugagagacuca

SEQ ID NO: 2879088 - RNA, 19 nt, Artificial Sequence
  Description of Artificial Sequence: Synthetic oligonucleotide
cagucaugagagacucaaa

SEQ ID NO: 2879089 - RNA, 19 nt, Artificial Sequence
  Description of Artificial Sequence: Synthetic oligonucleotide
ccaucuagucucacagaca

SEQ ID NO: 2879090 - RNA, 19 nt, Artificial Sequence
  Description of Artificial Sequence: Synthetic oligonucleotide
cucaggcucgggaacuugu

SEQ ID NO: 2879091 - RNA, 19 nt, Artificial Sequence
  Description of Artificial Sequence: Synthetic oligonucleotide
gugaaccaucuagucucac

SEQ ID NO: 2879092 - RNA, 19 nt, Artificial Sequence
  Description of Artificial Sequence: Synthetic oligonucleotide
ggacagcacaucuggugaa

SEQ ID NO: 2879093 - RNA, 19 nt, Artificial Sequence
  Description of Artificial Sequence: Synthetic oligonucleotide
cugagagaacccagagccu

SEQ ID NO: 2879094 - RNA, 19 nt, Artificial Sequence
  Description of Artificial Sequence: Synthetic oligonucleotide
gcaaacuuuucugauguuu

SEQ ID NO: 2879095 - RNA, 19 nt, Artificial Sequence
  Description of Artificial Sequence: Synthetic oligonucleotide
cugagaccucaagagaccu

SEQ ID NO: 2879096 - RNA, 19 nt, Artificial Sequence
  Description of Artificial Sequence: Synthetic oligonucleotide
ggucagacucuguggaagu

SEQ ID NO: 2879097 - RNA, 19 nt, Artificial Sequence
  Description of Artificial Sequence: Synthetic oligonucleotide
caguucucucaggcucggg

SEQ ID NO: 2879098 - RNA, 19 nt, Artificial Sequence
  Description of Artificial Sequence: Synthetic oligonucleotide
gguggaaaacaugaagauu

SEQ ID NO: 2879099 - RNA, 19 nt, Artificial Sequence
  Description of Artificial Sequence: Synthetic oligonucleotide
gagagaacccagagccugu

SEQ ID NO: 2879100 - RNA, 19 nt, Artificial Sequence
  Description of Artificial Sequence: Synthetic oligonucleotide
gcaacugguuugucccuga

SEQ ID NO: 2879101 - RNA, 19 nt, Artificial Sequence
  Description of Artificial Sequence: Synthetic oligonucleotide
aucguccagaaaacuccau

SEQ ID NO: 2879102 - RNA, 19 nt, Artificial Sequence
  Description of Artificial Sequence: Synthetic oligonucleotide
guugaucuggcaacugguu

SEQ ID NO: 2879103 - RNA, 19 nt, Artificial Sequence
  Description of Artificial Sequence: Synthetic oligonucleotide
acuucuccaugugguggaa

SEQ ID NO: 2879104 - RNA, 19 nt, Artificial Sequence
  Description of Artificial Sequence: Synthetic oligonucleotide
ggugaaccaucuagucuca

SEQ ID NO: 2879105 - RNA, 19 nt, Artificial Sequence
  Description of Artificial Sequence: Synthetic oligonucleotide
gcacaucuggugaaccauc

SEQ ID NO: 2879106 - RNA, 19 nt, Artificial Sequence
  Description of Artificial Sequence: Synthetic oligonucleotide
cguccagaaaacuccaucu

SEQ ID NO: 2879107 - RNA, 19 nt, Artificial Sequence
  Description of Artificial Sequence: Synthetic oligonucleotide
cuguggaaguuuggaugga

SEQ ID NO: 2879108 - RNA, 19 nt, Artificial Sequence
  Description of Artificial Sequence: Synthetic oligonucleotide
gcucgggaacuuguccaag

SEQ ID NO: 2879109 - RNA, 19 nt, Artificial Sequence
  Description of Artificial Sequence: Synthetic oligonucleotide
ggcucgggaacuuguccaa

SEQ ID NO: 2879110 - RNA, 19 nt, Artificial Sequence
  Description of Artificial Sequence: Synthetic oligonucleotide
gacggacagcacaucuggu

SEQ ID NO: 2879111 - RNA, 19 nt, Artificial Sequence
  Description of Artificial Sequence: Synthetic oligonucleotide
cuccaugugguggaaguuu

SEQ ID NO: 2879112 - RNA, 19 nt, Artificial Sequence
  Description of Artificial Sequence: Synthetic oligonucleotide
gggaugacggacagcacau

SEQ ID NO: 2879113 - RNA, 19 nt, Artificial Sequence
  Description of Artificial Sequence: Synthetic oligonucleotide
ggaugacggacagcacauc

SEQ ID NO: 2879114 - RNA, 19 nt, Artificial Sequence
  Description of Artificial Sequence: Synthetic oligonucleotide
gguuugucccugagaccuc

SEQ ID NO: 2879115 - RNA, 19 nt, Artificial Sequence
  Description of Artificial Sequence: Synthetic oligonucleotide
gguggaaguuugggagguc

SEQ ID NO: 2879116 - RNA, 19 nt, Artificial Sequence
  Description of Artificial Sequence: Synthetic oligonucleotide
ccugguuucaaagcaucgu

SEQ ID NO: 2879117 - RNA, 19 nt, Artificial Sequence
  Description of Artificial Sequence: Synthetic oligonucleotide
ggucuccagggaugacgga

SEQ ID NO: 2879118 - RNA, 19 nt, Artificial Sequence
  Description of Artificial Sequence: Synthetic oligonucleotide
gucagacucuguggaaguu

SEQ ID NO: 2879119 - RNA, 19 nt, Artificial Sequence
  Description of Artificial Sequence: Synthetic oligonucleotide
ggaggucuccagggaugac

SEQ ID NO: 2879120 - RNA, 19 nt, Artificial Sequence
  Description of Artificial Sequence: Synthetic oligonucleotide
cgggaacuuguccaaguua

SEQ ID NO: 2879121 - RNA, 19 nt, Artificial Sequence
  Description of Artificial Sequence: Synthetic oligonucleotide
ccagagccugugcaaacuu

SEQ ID NO: 2879122 - RNA, 19 nt, Artificial Sequence
  Description of Artificial Sequence: Synthetic oligonucleotide
cccagagccugugcaaacu

SEQ ID NO: 2879123 - RNA, 19 nt, Artificial Sequence
  Description of Artificial Sequence: Synthetic oligonucleotide
cucucaggcucgggaacuu

SEQ ID NO: 2879124 - RNA, 19 nt, Artificial Sequence
  Description of Artificial Sequence: Synthetic oligonucleotide
auuagauuaaaccauuugc

SEQ ID NO: 2879125 - RNA, 19 nt, Artificial Sequence
  Description of Artificial Sequence: Synthetic oligonucleotide
ucuugauuagauuaaacca

SEQ ID NO: 2879126 - RNA, 19 nt, Artificial Sequence
  Description of Artificial Sequence: Synthetic oligonucleotide
uuagauuaaaccauuugca

SEQ ID NO: 2879127 - RNA, 19 nt, Artificial Sequence
  Description of Artificial Sequence: Synthetic oligonucleotide
uucuugauuagauuaaacc

SEQ ID NO: 2879128 - RNA, 19 nt, Artificial Sequence
  Description of Artificial Sequence: Synthetic oligonucleotide
uucaguuugaacuucuuga

SEQ ID NO: 2879129 - RNA, 19 nt, Artificial Sequence
  Description of Artificial Sequence: Synthetic oligonucleotide
uaaaccauuugcaauucug

SEQ ID NO: 2879130 - RNA, 19 nt, Artificial Sequence
  Description of Artificial Sequence: Synthetic oligonucleotide
gauuagauuaaaccauuug

SEQ ID NO: 2879131 - RNA, 19 nt, Artificial Sequence
  Description of Artificial Sequence: Synthetic oligonucleotide
aauucugcacugucgcaac

SEQ ID NO: 2879132 - RNA, 19 nt, Artificial Sequence
  Description of Artificial Sequence: Synthetic oligonucleotide
accauuugcaauucugcac

SEQ ID NO: 2879133 - RNA, 19 nt, Artificial Sequence
  Description of Artificial Sequence: Synthetic oligonucleotide
ugcaauucugcacugucgc

SEQ ID NO: 2879134 - RNA, 19 nt, Artificial Sequence
  Description of Artificial Sequence: Synthetic oligonucleotide
aguuugaacuucuugauua

SEQ ID NO: 2879135 - RNA, 19 nt, Artificial Sequence
  Description of Artificial Sequence: Synthetic oligonucleotide
auugaaacccucgcaaagc

SEQ ID NO: 2879136 - RNA, 19 nt, Artificial Sequence
  Description of Artificial Sequence: Synthetic oligonucleotide
uagauuaaaccauuugcaa

SEQ ID NO: 2879137 - RNA, 19 nt, Artificial Sequence
  Description of Artificial Sequence: Synthetic oligonucleotide
aaccauuugcaauucugca

SEQ ID NO: 2879138 - RNA, 19 nt, Artificial Sequence
  Description of Artificial Sequence: Synthetic oligonucleotide
accucauugaaacccucgc

SEQ ID NO: 2879139 - RNA, 19 nt, Artificial Sequence
  Description of Artificial Sequence: Synthetic oligonucleotide
agauuaaaccauuugcaau

SEQ ID NO: 2879140 - RNA, 19 nt, Artificial Sequence
  Description of Artificial Sequence: Synthetic oligonucleotide
uugcaauucugcacugucg

SEQ ID NO: 2879141 - RNA, 19 nt, Artificial Sequence
  Description of Artificial Sequence: Synthetic oligonucleotide
uugaaacccucgcaaagcc

SEQ ID NO: 2879142 - RNA, 19 nt, Artificial Sequence
  Description of Artificial Sequence: Synthetic oligonucleotide
uugaacuucuugauuagau

SEQ ID NO: 2879143 - RNA, 19 nt, Artificial Sequence
  Description of Artificial Sequence: Synthetic oligonucleotide
gaacuucuugauuagauua

SEQ ID NO: 2879144 - RNA, 19 nt, Artificial Sequence
  Description of Artificial Sequence: Synthetic oligonucleotide
uuugcaauucugcacuguc

SEQ ID NO: 2879145 - RNA, 19 nt, Artificial Sequence
  Description of Artificial Sequence: Synthetic oligonucleotide
uugauuagauuaaaccauu

SEQ ID NO: 2879146 - RNA, 19 nt, Artificial Sequence
  Description of Artificial Sequence: Synthetic oligonucleotide
cauugaaacccucgcaaag

SEQ ID NO: 2879147 - RNA, 19 nt, Artificial Sequence
  Description of Artificial Sequence: Synthetic oligonucleotide
gauuaaaccauuugcaauu

SEQ ID NO: 2879148 - RNA, 19 nt, Artificial Sequence
  Description of Artificial Sequence: Synthetic oligonucleotide
auuaaaccauuugcaauuc

SEQ ID NO: 2879149 - RNA, 19 nt, Artificial Sequence
  Description of Artificial Sequence: Synthetic oligonucleotide
ucaguuugaacuucuugau

SEQ ID NO: 2879150 - RNA, 19 nt, Artificial Sequence
  Description of Artificial Sequence: Synthetic oligonucleotide
guuugaacuucuugauuag

SEQ ID NO: 2879151 - RNA, 19 nt, Artificial Sequence
  Description of Artificial Sequence: Synthetic oligonucleotide
cuucuugauuagauuaaac

SEQ ID NO: 2879152 - RNA, 19 nt, Artificial Sequence
  Description of Artificial Sequence: Synthetic oligonucleotide
gaaacccucgcaaagccug

SEQ ID NO: 2879153 - RNA, 19 nt, Artificial Sequence
  Description of Artificial Sequence: Synthetic oligonucleotide
agcggcuucggcuuccacg

SEQ ID NO: 2879154 - RNA, 19 nt, Artificial Sequence
  Description of Artificial Sequence: Synthetic oligonucleotide
cuucaguuugaacuucuug

SEQ ID NO: 2879155 - RNA, 19 nt, Artificial Sequence
  Description of Artificial Sequence: Synthetic oligonucleotide
cuugauuagauuaaaccau

SEQ ID NO: 2879156 - RNA, 19 nt, Artificial Sequence
  Description of Artificial Sequence: Synthetic oligonucleotide
uucuucaguuugaacuucu

SEQ ID NO: 2879157 - RNA, 19 nt, Artificial Sequence
  Description of Artificial Sequence: Synthetic oligonucleotide
ucauugaaacccucgcaaa

SEQ ID NO: 2879158 - RNA, 19 nt, Artificial Sequence
  Description of Artificial Sequence: Synthetic oligonucleotide
ugauuagauuaaaccauuu

SEQ ID NO: 2879159 - RNA, 19 nt, Artificial Sequence
  Description of Artificial Sequence: Synthetic oligonucleotide
agcagcccucaucugaggg

SEQ ID NO: 2879160 - RNA, 19 nt, Artificial Sequence
  Description of Artificial Sequence: Synthetic oligonucleotide
ucuaggagcagcccucauc

SEQ ID NO: 2879161 - RNA, 19 nt, Artificial Sequence
  Description of Artificial Sequence: Synthetic oligonucleotide
uuugaacuucuugauuaga

SEQ ID NO: 2879162 - RNA, 19 nt, Artificial Sequence
  Description of Artificial Sequence: Synthetic oligonucleotide
aacuucuugauuagauuaa

SEQ ID NO: 2879163 - RNA, 19 nt, Artificial Sequence
  Description of Artificial Sequence: Synthetic oligonucleotide
caccucauugaaacccucg

SEQ ID NO: 2879164 - RNA, 19 nt, Artificial Sequence
  Description of Artificial Sequence: Synthetic oligonucleotide
ugaaacccucgcaaagccu

SEQ ID NO: 2879165 - RNA, 19 nt, Artificial Sequence
  Description of Artificial Sequence: Synthetic oligonucleotide
ugaggggcccggcuggccg

SEQ ID NO: 2879166 - RNA, 19 nt, Artificial Sequence
  Description of Artificial Sequence: Synthetic oligonucleotide
cucauugaaacccucgcaa

SEQ ID NO: 2879167 - RNA, 19 nt, Artificial Sequence
  Description of Artificial Sequence: Synthetic oligonucleotide
aggagcagcccucaucuga

SEQ ID NO: 2879168 - RNA, 19 nt, Artificial Sequence
  Description of Artificial Sequence: Synthetic oligonucleotide
aucugaggggcccggcugg

SEQ ID NO: 2879169 - RNA, 19 nt, Artificial Sequence
  Description of Artificial Sequence: Synthetic oligonucleotide
aagagcggcuucggcuucc

SEQ ID NO: 2879170 - RNA, 19 nt, Artificial Sequence
  Description of Artificial Sequence: Synthetic oligonucleotide
cauuugcaauucugcacug

SEQ ID NO: 2879171 - RNA, 19 nt, Artificial Sequence
  Description of Artificial Sequence: Synthetic oligonucleotide
uuucuucaguuugaacuuc

SEQ ID NO: 2879172 - RNA, 19 nt, Artificial Sequence
  Description of Artificial Sequence: Synthetic oligonucleotide
cuaggagcagcccucaucu

SEQ ID NO: 2879173 - RNA, 19 nt, Artificial Sequence
  Description of Artificial Sequence: Synthetic oligonucleotide
aacccucgcaaagccugac

SEQ ID NO: 2879174 - RNA, 19 nt, Artificial Sequence
  Description of Artificial Sequence: Synthetic oligonucleotide
uucugcacugucgcaacac

SEQ ID NO: 2879175 - RNA, 19 nt, Artificial Sequence
  Description of Artificial Sequence: Synthetic oligonucleotide
acuucuugauuagauuaaa

SEQ ID NO: 2879176 - RNA, 19 nt, Artificial Sequence
  Description of Artificial Sequence: Synthetic oligonucleotide
acccucgcaaagccugacg

SEQ ID NO: 2879177 - RNA, 19 nt, Artificial Sequence
  Description of Artificial Sequence: Synthetic oligonucleotide
auuugcaauucugcacugu

SEQ ID NO: 2879178 - RNA, 19 nt, Artificial Sequence
  Description of Artificial Sequence: Synthetic oligonucleotide
caucugaggggcccggcug

SEQ ID NO: 2879179 - RNA, 19 nt, Artificial Sequence
  Description of Artificial Sequence: Synthetic oligonucleotide
cagcccucaucugaggggc

SEQ ID NO: 2879180 - RNA, 19 nt, Artificial Sequence
  Description of Artificial Sequence: Synthetic oligonucleotide
gagcagcccucaucugagg

SEQ ID NO: 2879181 - RNA, 19 nt, Artificial Sequence
  Description of Artificial Sequence: Synthetic oligonucleotide
gcggcuucggcuuccacgc

SEQ ID NO: 2879182 - RNA, 19 nt, Artificial Sequence
  Description of Artificial Sequence: Synthetic oligonucleotide
gcagcccucaucugagggg

SEQ ID NO: 2879183 - RNA, 19 nt, Artificial Sequence
  Description of Artificial Sequence: Synthetic oligonucleotide
auucugcacugucgcaaca

SEQ ID NO: 2879184 - RNA, 19 nt, Artificial Sequence
  Description of Artificial Sequence: Synthetic oligonucleotide
ggaggggccacccgggaag

SEQ ID NO: 2879185 - RNA, 19 nt, Artificial Sequence
  Description of Artificial Sequence: Synthetic oligonucleotide
caauucugcacugucgcaa

SEQ ID NO: 2879186 - RNA, 19 nt, Artificial Sequence
  Description of Artificial Sequence: Synthetic oligonucleotide
ggcuucggcuuccacgcgg

SEQ ID NO: 2879187 - RNA, 19 nt, Artificial Sequence
  Description of Artificial Sequence: Synthetic oligonucleotide
aaacccucgcaaagccuga

SEQ ID NO: 2879188 - RNA, 19 nt, Artificial Sequence
  Description of Artificial Sequence: Synthetic oligonucleotide
ggagcagcccucaucugag

SEQ ID NO: 2879189 - RNA, 19 nt, Artificial Sequence
  Description of Artificial Sequence: Synthetic oligonucleotide
gaggggcccggcuggccgg

SEQ ID NO: 2879190 - RNA, 19 nt, Artificial Sequence
  Description of Artificial Sequence: Synthetic oligonucleotide
gaagagcggcuucggcuuc

SEQ ID NO: 2879191 - RNA, 19 nt, Artificial Sequence
  Description of Artificial Sequence: Synthetic oligonucleotide
gggccacccgggaagagcg

SEQ ID NO: 2879192 - RNA, 19 nt, Artificial Sequence
  Description of Artificial Sequence: Synthetic oligonucleotide
acccgggaagagcggcuuc

SEQ ID NO: 2879193 - RNA, 19 nt, Artificial Sequence
  Description of Artificial Sequence: Synthetic oligonucleotide
ccauuugcaauucugcacu

SEQ ID NO: 2879194 - RNA, 19 nt, Artificial Sequence
  Description of Artificial Sequence: Synthetic oligonucleotide
uucggcuuccacgcggcau

SEQ ID NO: 2879195 - RNA, 19 nt, Artificial Sequence
  Description of Artificial Sequence: Synthetic oligonucleotide
uggccggaggggccacccg

SEQ ID NO: 2879196 - RNA, 19 nt, Artificial Sequence
  Description of Artificial Sequence: Synthetic oligonucleotide
gggaagagcggcuucggcu

SEQ ID NO: 2879197 - RNA, 19 nt, Artificial Sequence
  Description of Artificial Sequence: Synthetic oligonucleotide
ggccggaggggccacccgg

SEQ ID NO: 2879198 - RNA, 19 nt, Artificial Sequence
  Description of Artificial Sequence: Synthetic oligonucleotide
gcaauucugcacugucgca

SEQ ID NO: 2879199 - RNA, 19 nt, Artificial Sequence
  Description of Artificial Sequence: Synthetic oligonucleotide
agcccucaucugaggggcc

SEQ ID NO: 2879200 - RNA, 19 nt, Artificial Sequence
  Description of Artificial Sequence: Synthetic oligonucleotide
ggcccggcuggccggaggg

SEQ ID NO: 2879201 - RNA, 19 nt, Artificial Sequence
  Description of Artificial Sequence: Synthetic oligonucleotide
ccucauugaaacccucgca

SEQ ID NO: 2879202 - RNA, 19 nt, Artificial Sequence
  Description of Artificial Sequence: Synthetic oligonucleotide
caguuugaacuucuugauu

SEQ ID NO: 2879203 - RNA, 19 nt, Artificial Sequence
  Description of Artificial Sequence: Synthetic oligonucleotide
cuggccggaggggccaccc

SEQ ID NO: 2879204 - RNA, 19 nt, Artificial Sequence
  Description of Artificial Sequence: Synthetic oligonucleotide
cccgggaagagcggcuucg

SEQ ID NO: 2879205 - RNA, 19 nt, Artificial Sequence
  Description of Artificial Sequence: Synthetic oligonucleotide
gcuucggcuuccacgcggc

SEQ ID NO: 2879206 - RNA, 19 nt, Artificial Sequence
  Description of Artificial Sequence: Synthetic oligonucleotide
ggggccacccgggaagagc

SEQ ID NO: 2879207 - RNA, 19 nt, Artificial Sequence
  Description of Artificial Sequence: Synthetic oligonucleotide
cugaggggcccggcuggcc

SEQ ID NO: 2879208 - RNA, 19 nt, Artificial Sequence
  Description of Artificial Sequence: Synthetic oligonucleotide
gaggggccacccgggaaga

SEQ ID NO: 2879209 - RNA, 19 nt, Artificial Sequence
  Description of Artificial Sequence: Synthetic oligonucleotide
agagcggcuucggcuucca

SEQ ID NO: 2879210 - RNA, 19 nt, Artificial Sequence
  Description of Artificial Sequence: Synthetic oligonucleotide
gagcggcuucggcuuccac

SEQ ID NO: 2879211 - RNA, 19 nt, Artificial Sequence
  Description of Artificial Sequence: Synthetic oligonucleotide
gccacccgggaagagcggc

SEQ ID NO: 2879212 - RNA, 19 nt, Artificial Sequence
  Description of Artificial Sequence: Synthetic oligonucleotide
gcccucaucugaggggccc

SEQ ID NO: 2879213 - RNA, 19 nt, Artificial Sequence
  Description of Artificial Sequence: Synthetic oligonucleotide
aggggccacccgggaagag

SEQ ID NO: 2879214 - RNA, 19 nt, Artificial Sequence
  Description of Artificial Sequence: Synthetic oligonucleotide
gccggaggggccacccggg

SEQ ID NO: 2879215 - RNA, 19 nt, Artificial Sequence
  Description of Artificial Sequence: Synthetic oligonucleotide
cuucggcuuccacgcggca

SEQ ID NO: 2879216 - RNA, 19 nt, Artificial Sequence
  Description of Artificial Sequence: Synthetic oligonucleotide
cccucaucugaggggcccg

SEQ ID NO: 2879217 - RNA, 19 nt, Artificial Sequence
  Description of Artificial Sequence: Synthetic oligonucleotide
gggcccggcuggccggagg

SEQ ID NO: 2879218 - RNA, 19 nt, Artificial Sequence
  Description of Artificial Sequence: Synthetic oligonucleotide
ccgggaagagcggcuucgg

SEQ ID NO: 2879219 - RNA, 19 nt, Artificial Sequence
  Description of Artificial Sequence: Synthetic oligonucleotide
cgggaagagcggcuucggc

SEQ ID NO: 2879220 - RNA, 19 nt, Artificial Sequence
  Description of Artificial Sequence: Synthetic oligonucleotide
ccggcuggccggaggggcc

SEQ ID NO: 2879221 - RNA, 19 nt, Artificial Sequence
  Description of Artificial Sequence: Synthetic oligonucleotide
cccggcuggccggaggggc

SEQ ID NO: 2879222 - RNA, 19 nt, Artificial Sequence
  Description of Artificial Sequence: Synthetic oligonucleotide
ggccacccgggaagagcgg

SEQ ID NO: 2879223 - RNA, 19 nt, Artificial Sequence
  Description of Artificial Sequence: Synthetic oligonucleotide
aggggcccggcuggccgga

SEQ ID NO: 2879224 - RNA, 19 nt, Artificial Sequence
  Description of Artificial Sequence: Synthetic oligonucleotide
cggcuucggcuuccacgcg

SEQ ID NO: 2879225 - RNA, 19 nt, Artificial Sequence
  Description of Artificial Sequence: Synthetic oligonucleotide
gcuggccggaggggccacc

SEQ ID NO: 2879226 - RNA, 19 nt, Artificial Sequence
  Description of Artificial Sequence: Synthetic oligonucleotide
cggcuuccacgcggcaucc

SEQ ID NO: 2879227 - RNA, 19 nt, Artificial Sequence
  Description of Artificial Sequence: Synthetic oligonucleotide
cacccgggaagagcggcuu

SEQ ID NO: 2879228 - RNA, 19 nt, Artificial Sequence
  Description of Artificial Sequence: Synthetic oligonucleotide
ccacccgggaagagcggcu

SEQ ID NO: 2879229 - RNA, 19 nt, Artificial Sequence
  Description of Artificial Sequence: Synthetic oligonucleotide
ccggaggggccacccggga

SEQ ID NO: 2879230 - RNA, 19 nt, Artificial Sequence
  Description of Artificial Sequence: Synthetic oligonucleotide
ggcuggccggaggggccac

SEQ ID NO: 2879231 - RNA, 19 nt, Artificial Sequence
  Description of Artificial Sequence: Synthetic oligonucleotide
ggggcccggcuggccggag

SEQ ID NO: 2879232 - RNA, 19 nt, Artificial Sequence
  Description of Artificial Sequence: Synthetic oligonucleotide
cggaggggccacccgggaa

SEQ ID NO: 2879233 - RNA, 19 nt, Artificial Sequence
  Description of Artificial Sequence: Synthetic oligonucleotide
ggcuuccacgcggcauccu

SEQ ID NO: 2879234 - RNA, 19 nt, Artificial Sequence
  Description of Artificial Sequence: Synthetic oligonucleotide
cggcuggccggaggggcca

SEQ ID NO: 2879235 - RNA, 19 nt, Artificial Sequence
  Description of Artificial Sequence: Synthetic oligonucleotide
aacgcuuagagacaccgcc

SEQ ID NO: 2879236 - RNA, 19 nt, Artificial Sequence
  Description of Artificial Sequence: Synthetic oligonucleotide
cuaaaugucagucucccgg

SEQ ID NO: 2879237 - RNA, 19 nt, Artificial Sequence
  Description of Artificial Sequence: Synthetic oligonucleotide
uuggggaacgcuuagagac

SEQ ID NO: 2879238 - RNA, 19 nt, Artificial Sequence
  Description of Artificial Sequence: Synthetic oligonucleotide
aaggcagcaucccaaaaug

SEQ ID NO: 2879239 - RNA, 19 nt, Artificial Sequence
  Description of Artificial Sequence: Synthetic oligonucleotide
ucauaggcagggcagauga

SEQ ID NO: 2879240 - RNA, 19 nt, Artificial Sequence
  Description of Artificial Sequence: Synthetic oligonucleotide
gaucuugugggacaggcug

SEQ ID NO: 2879241 - RNA, 19 nt, Artificial Sequence
  Description of Artificial Sequence: Synthetic oligonucleotide
ucuuggggaacgcuuagag

SEQ ID NO: 2879242 - RNA, 19 nt, Artificial Sequence
  Description of Artificial Sequence: Synthetic oligonucleotide
agucggcuggcucauaggc

SEQ ID NO: 2879243 - RNA, 19 nt, Artificial Sequence
  Description of Artificial Sequence: Synthetic oligonucleotide
aaaggcagcaucccaaaau

SEQ ID NO: 2879244 - RNA, 19 nt, Artificial Sequence
  Description of Artificial Sequence: Synthetic oligonucleotide
agcaucccaaaaugcaccc

SEQ ID NO: 2879245 - RNA, 19 nt, Artificial Sequence
  Description of Artificial Sequence: Synthetic oligonucleotide
gauugcuguagucggcugg

SEQ ID NO: 2879246 - RNA, 19 nt, Artificial Sequence
  Description of Artificial Sequence: Synthetic oligonucleotide
ugguuagaguccuggaucc

SEQ ID NO: 2879247 - RNA, 19 nt, Artificial Sequence
  Description of Artificial Sequence: Synthetic oligonucleotide
ugugcagugagggcaaggg

SEQ ID NO: 2879248 - RNA, 19 nt, Artificial Sequence
  Description of Artificial Sequence: Synthetic oligonucleotide
ucucuaaaugucagucucc

SEQ ID NO: 2879249 - RNA, 19 nt, Artificial Sequence
  Description of Artificial Sequence: Synthetic oligonucleotide
agagacaccgccuccaccu

SEQ ID NO: 2879250 - RNA, 19 nt, Artificial Sequence
  Description of Artificial Sequence: Synthetic oligonucleotide
ucuaaaugucagucucccg

SEQ ID NO: 2879251 - RNA, 19 nt, Artificial Sequence
  Description of Artificial Sequence: Synthetic oligonucleotide
agaguccuggauccaaagg

SEQ ID NO: 2879252 - RNA, 19 nt, Artificial Sequence
  Description of Artificial Sequence: Synthetic oligonucleotide
ucggcuggcucauaggcag

SEQ ID NO: 2879253 - RNA, 19 nt, Artificial Sequence
  Description of Artificial Sequence: Synthetic oligonucleotide
uaaaugucagucucccgga

SEQ ID NO: 2879254 - RNA, 19 nt, Artificial Sequence
  Description of Artificial Sequence: Synthetic oligonucleotide
uaggcagggcagaugacag

SEQ ID NO: 2879255 - RNA, 19 nt, Artificial Sequence
  Description of Artificial Sequence: Synthetic oligonucleotide
aaugucagucucccggaga

SEQ ID NO: 2879256 - RNA, 19 nt, Artificial Sequence
  Description of Artificial Sequence: Synthetic oligonucleotide
accgccuccaccuccgagc

SEQ ID NO: 2879257 - RNA, 19 nt, Artificial Sequence
  Description of Artificial Sequence: Synthetic oligonucleotide
auugcuguagucggcuggc

SEQ ID NO: 2879258 - RNA, 19 nt, Artificial Sequence
  Description of Artificial Sequence: Synthetic oligonucleotide
acaggcuggacaccuucgc

SEQ ID NO: 2879259 - RNA, 19 nt, Artificial Sequence
  Description of Artificial Sequence: Synthetic oligonucleotide
uggguugugggucucugca

SEQ ID NO: 2879260 - RNA, 19 nt, Artificial Sequence
  Description of Artificial Sequence: Synthetic oligonucleotide
guugccugugccucggacg

SEQ ID NO: 2879261 - RNA, 19 nt, Artificial Sequence
  Description of Artificial Sequence: Synthetic oligonucleotide
gucucuaaaugucagucuc

SEQ ID NO: 2879262 - RNA, 19 nt, Artificial Sequence
  Description of Artificial Sequence: Synthetic oligonucleotide
uccaaaggcagcaucccaa

SEQ ID NO: 2879263 - RNA, 19 nt, Artificial Sequence
  Description of Artificial Sequence: Synthetic oligonucleotide
uugugggacaggcuggaca

SEQ ID NO: 2879264 - RNA, 19 nt, Artificial Sequence
  Description of Artificial Sequence: Synthetic oligonucleotide
uccaccuccgagcgcaggg

SEQ ID NO: 2879265 - RNA, 19 nt, Artificial Sequence
  Description of Artificial Sequence: Synthetic oligonucleotide
cucuaaaugucagucuccc

SEQ ID NO: 2879266 - RNA, 19 nt, Artificial Sequence
  Description of Artificial Sequence: Synthetic oligonucleotide
aggcuggacaccuucgcuc

SEQ ID NO: 2879267 - RNA, 19 nt, Artificial Sequence
  Description of Artificial Sequence: Synthetic oligonucleotide
cagcaucccaaaaugcacc

SEQ ID NO: 2879268 - RNA, 19 nt, Artificial Sequence
  Description of Artificial Sequence: Synthetic oligonucleotide
uagaguccuggauccaaag

SEQ ID NO: 2879269 - RNA, 19 nt, Artificial Sequence
  Description of Artificial Sequence: Synthetic oligonucleotide
ugugggucucugcagcggc

SEQ ID NO: 2879270 - RNA, 19 nt, Artificial Sequence
  Description of Artificial Sequence: Synthetic oligonucleotide
ucugcagcggcccgagcag

SEQ ID NO: 2879271 - RNA, 19 nt, Artificial Sequence
  Description of Artificial Sequence: Synthetic oligonucleotide
ggaacgcuuagagacaccg

SEQ ID NO: 2879272 - RNA, 19 nt, Artificial Sequence
  Description of Artificial Sequence: Synthetic oligonucleotide
uccuggauccaaaggcagc

SEQ ID NO: 2879273 - RNA, 19 nt, Artificial Sequence
  Description of Artificial Sequence: Synthetic oligonucleotide
uugccugugccucggacgu

SEQ ID NO: 2879274 - RNA, 19 nt, Artificial Sequence
  Description of Artificial Sequence: Synthetic oligonucleotide
guugugggucucugcagcg

SEQ ID NO: 2879275 - RNA, 19 nt, Artificial Sequence
  Description of Artificial Sequence: Synthetic oligonucleotide
guagucggcuggcucauag

SEQ ID NO: 2879276 - RNA, 19 nt, Artificial Sequence
  Description of Artificial Sequence: Synthetic oligonucleotide
cucggucucuaaaugucag

SEQ ID NO: 2879277 - RNA, 19 nt, Artificial Sequence
  Description of Artificial Sequence: Synthetic oligonucleotide
agacaccgccuccaccucc

SEQ ID NO: 2879278 - RNA, 19 nt, Artificial Sequence
  Description of Artificial Sequence: Synthetic oligonucleotide
uuagaguccuggauccaaa

SEQ ID NO: 2879279 - RNA, 19 nt, Artificial Sequence
  Description of Artificial Sequence: Synthetic oligonucleotide
uucgcucgcagcuggguug

SEQ ID NO: 2879280 - RNA, 19 nt, Artificial Sequence
  Description of Artificial Sequence: Synthetic oligonucleotide
uuucgacggccggagaccg

SEQ ID NO: 2879281 - RNA, 19 nt, Artificial Sequence
  Description of Artificial Sequence: Synthetic oligonucleotide
gagucggggcgcgugaucg

SEQ ID NO: 2879282 - RNA, 19 nt, Artificial Sequence
  Description of Artificial Sequence: Synthetic oligonucleotide
ucugccacuucuuggggaa

SEQ ID NO: 2879283 - RNA, 19 nt, Artificial Sequence
  Description of Artificial Sequence: Synthetic oligonucleotide
agagcggaucuugugggac

SEQ ID NO: 2879284 - RNA, 19 nt, Artificial Sequence
  Description of Artificial Sequence: Synthetic oligonucleotide
aaaaugcaccccaucccug

SEQ ID NO: 2879285 - RNA, 19 nt, Artificial Sequence
  Description of Artificial Sequence: Synthetic oligonucleotide
uggauccaaaggcagcauc

SEQ ID NO: 2879286 - RNA, 19 nt, Artificial Sequence
  Description of Artificial Sequence: Synthetic oligonucleotide
ugugccucggacgugccug

SEQ ID NO: 2879287 - RNA, 19 nt, Artificial Sequence
  Description of Artificial Sequence: Synthetic oligonucleotide
augucagucucccggagau

SEQ ID NO: 2879288 - RNA, 19 nt, Artificial Sequence
  Description of Artificial Sequence: Synthetic oligonucleotide
ugcaccccaucccuggccc

SEQ ID NO: 2879289 - RNA, 19 nt, Artificial Sequence
  Description of Artificial Sequence: Synthetic oligonucleotide
gauccaaaggcagcauccc

SEQ ID NO: 2879290 - RNA, 19 nt, Artificial Sequence
  Description of Artificial Sequence: Synthetic oligonucleotide
cccaaaaugcaccccaucc

SEQ ID NO: 2879291 - RNA, 19 nt, Artificial Sequence
  Description of Artificial Sequence: Synthetic oligonucleotide
gucagucucccggagauug

SEQ ID NO: 2879292 - RNA, 19 nt, Artificial Sequence
  Description of Artificial Sequence: Synthetic oligonucleotide
augcaccccaucccuggcc

SEQ ID NO: 2879293 - RNA, 19 nt, Artificial Sequence
  Description of Artificial Sequence: Synthetic oligonucleotide
agccucugccacuucuugg

SEQ ID NO: 2879294 - RNA, 19 nt, Artificial Sequence
  Description of Artificial Sequence: Synthetic oligonucleotide
uuagagacaccgccuccac

SEQ ID NO: 2879295 - RNA, 19 nt, Artificial Sequence
  Description of Artificial Sequence: Synthetic oligonucleotide
acucccggagggcggaggc

SEQ ID NO: 2879296 - RNA, 19 nt, Artificial Sequence
  Description of Artificial Sequence: Synthetic oligonucleotide
auaggcagggcagaugaca

SEQ ID NO: 2879297 - RNA, 19 nt, Artificial Sequence
  Description of Artificial Sequence: Synthetic oligonucleotide
gagcgcagggcgcaggcag

SEQ ID NO: 2879298 - RNA, 19 nt, Artificial Sequence
  Description of Artificial Sequence: Synthetic oligonucleotide
ugccacuucuuggggaacg

SEQ ID NO: 2879299 - RNA, 19 nt, Artificial Sequence
  Description of Artificial Sequence: Synthetic oligonucleotide
uggggaacgcuuagagaca

SEQ ID NO: 2879300 - RNA, 19 nt, Artificial Sequence
  Description of Artificial Sequence: Synthetic oligonucleotide
aggcagcaucccaaaaugc

SEQ ID NO: 2879301 - RNA, 19 nt, Artificial Sequence
  Description of Artificial Sequence: Synthetic oligonucleotide
uagucggcuggcucauagg

SEQ ID NO: 2879302 - RNA, 19 nt, Artificial Sequence
  Description of Artificial Sequence: Synthetic oligonucleotide
uagagacaccgccuccacc

SEQ ID NO: 2879303 - RNA, 19 nt, Artificial Sequence
  Description of Artificial Sequence: Synthetic oligonucleotide
aggcagggcagaugacagc

SEQ ID NO: 2879304 - RNA, 19 nt, Artificial Sequence
  Description of Artificial Sequence: Synthetic oligonucleotide
agaccguugccugugccuc

SEQ ID NO: 2879305 - RNA, 19 nt, Artificial Sequence
  Description of Artificial Sequence: Synthetic oligonucleotide
ggauccaaaggcagcaucc

SEQ ID NO: 2879306 - RNA, 19 nt, Artificial Sequence
  Description of Artificial Sequence: Synthetic oligonucleotide
ccaaaaugcaccccauccc

SEQ ID NO: 2879307 - RNA, 19 nt, Artificial Sequence
  Description of Artificial Sequence: Synthetic oligonucleotide
gguugugggucucugcagc

SEQ ID NO: 2879308 - RNA, 19 nt, Artificial Sequence
  Description of Artificial Sequence: Synthetic oligonucleotide
gccucugccacuucuuggg

SEQ ID NO: 2879309 - RNA, 19 nt, Artificial Sequence
  Description of Artificial Sequence: Synthetic oligonucleotide
gacaggcuggacaccuucg

SEQ ID NO: 2879310 - RNA, 19 nt, Artificial Sequence
  Description of Artificial Sequence: Synthetic oligonucleotide
gugcagugagggcaagggg

SEQ ID NO: 2879311 - RNA, 19 nt, Artificial Sequence
  Description of Artificial Sequence: Synthetic oligonucleotide
cuuucgacggccggagacc

SEQ ID NO: 2879312 - RNA, 19 nt, Artificial Sequence
  Description of Artificial Sequence: Synthetic oligonucleotide
cuuccacucccggagggcg

SEQ ID NO: 2879313 - RNA, 19 nt, Artificial Sequence
  Description of Artificial Sequence: Synthetic oligonucleotide
ggcuggacaccuucgcucg

SEQ ID NO: 2879314 - RNA, 19 nt, Artificial Sequence
  Description of Artificial Sequence: Synthetic oligonucleotide
uuccacucccggagggcgg

SEQ ID NO: 2879315 - RNA, 19 nt, Artificial Sequence
  Description of Artificial Sequence: Synthetic oligonucleotide
auccaaaggcagcauccca

SEQ ID NO: 2879316 - RNA, 19 nt, Artificial Sequence
  Description of Artificial Sequence: Synthetic oligonucleotide
cuucuuggggaacgcuuag

SEQ ID NO: 2879317 - RNA, 19 nt, Artificial Sequence
  Description of Artificial Sequence: Synthetic oligonucleotide
aucuugugggacaggcugg

SEQ ID NO: 2879318 - RNA, 19 nt, Artificial Sequence
  Description of Artificial Sequence: Synthetic oligonucleotide
ugaucggccggucgaggcu

SEQ ID NO: 2879319 - RNA, 19 nt, Artificial Sequence
  Description of Artificial Sequence: Synthetic oligonucleotide
agagccugggcccgggugu

SEQ ID NO: 2879320 - RNA, 19 nt, Artificial Sequence
  Description of Artificial Sequence: Synthetic oligonucleotide
agauugcuguagucggcug

SEQ ID NO: 2879321 - RNA, 19 nt, Artificial Sequence
  Description of Artificial Sequence: Synthetic oligonucleotide
ugcuguagucggcuggcuc

SEQ ID NO: 2879322 - RNA, 19 nt, Artificial Sequence
  Description of Artificial Sequence: Synthetic oligonucleotide
ucggucucuaaaugucagu

SEQ ID NO: 2879323 - RNA, 19 nt, Artificial Sequence
  Description of Artificial Sequence: Synthetic oligonucleotide
uggacaccuucgcucgcag

SEQ ID NO: 2879324 - RNA, 19 nt, Artificial Sequence
  Description of Artificial Sequence: Synthetic oligonucleotide
ucccaaaaugcaccccauc

SEQ ID NO: 2879325 - RNA, 19 nt, Artificial Sequence
  Description of Artificial Sequence: Synthetic oligonucleotide
aguccuggauccaaaggca

SEQ ID NO: 2879326 - RNA, 19 nt, Artificial Sequence
  Description of Artificial Sequence: Synthetic oligonucleotide
ccagagcggaucuuguggg

SEQ ID NO: 2879327 - RNA, 19 nt, Artificial Sequence
  Description of Artificial Sequence: Synthetic oligonucleotide
uggggcucggucucuaaau

SEQ ID NO: 2879328 - RNA, 19 nt, Artificial Sequence
  Description of Artificial Sequence: Synthetic oligonucleotide
caaaaugcaccccaucccu

SEQ ID NO: 2879329 - RNA, 19 nt, Artificial Sequence
  Description of Artificial Sequence: Synthetic oligonucleotide
gugaucggccggucgaggc

SEQ ID NO: 2879330 - RNA, 19 nt, Artificial Sequence
  Description of Artificial Sequence: Synthetic oligonucleotide
ucccggagggcggaggcgg

SEQ ID NO: 2879331 - RNA, 19 nt, Artificial Sequence
  Description of Artificial Sequence: Synthetic oligonucleotide
cuuggggaacgcuuagaga

SEQ ID NO: 2879332 - RNA, 19 nt, Artificial Sequence
  Description of Artificial Sequence: Synthetic oligonucleotide
cccagagcggaucuugugg

SEQ ID NO: 2879333 - RNA, 19 nt, Artificial Sequence
  Description of Artificial Sequence: Synthetic oligonucleotide
acggccggagaccguugcc

SEQ ID NO: 2879334 - RNA, 19 nt, Artificial Sequence
  Description of Artificial Sequence: Synthetic oligonucleotide
ggcagggcagaugacagcc

SEQ ID NO: 2879335 - RNA, 19 nt, Artificial Sequence
  Description of Artificial Sequence: Synthetic oligonucleotide
gaccguugccugugccucg

SEQ ID NO: 2879336 - RNA, 19 nt, Artificial Sequence
  Description of Artificial Sequence: Synthetic oligonucleotide
cuuagagacaccgccucca

SEQ ID NO: 2879337 - RNA, 19 nt, Artificial Sequence
  Description of Artificial Sequence: Synthetic oligonucleotide
gaacgcuuagagacaccgc

SEQ ID NO: 2879338 - RNA, 19 nt, Artificial Sequence
  Description of Artificial Sequence: Synthetic oligonucleotide
guccuggauccaaaggcag

SEQ ID NO: 2879339 - RNA, 19 nt, Artificial Sequence
  Description of Artificial Sequence: Synthetic oligonucleotide
caccuucgcucgcagcugg

SEQ ID NO: 2879340 - RNA, 19 nt, Artificial Sequence
  Description of Artificial Sequence: Synthetic oligonucleotide
ccggagauugcuguagucg

SEQ ID NO: 2879341 - RNA, 19 nt, Artificial Sequence
  Description of Artificial Sequence: Synthetic oligonucleotide
ucccggagauugcuguagu

SEQ ID NO: 2879342 - RNA, 19 nt, Artificial Sequence
  Description of Artificial Sequence: Synthetic oligonucleotide
cggagauugcuguagucgg

SEQ ID NO: 2879343 - RNA, 19 nt, Artificial Sequence
  Description of Artificial Sequence: Synthetic oligonucleotide
agcggaucuugugggacag

SEQ ID NO: 2879344 - RNA, 19 nt, Artificial Sequence
  Description of Artificial Sequence: Synthetic oligonucleotide
cuggguugugggucucugc

SEQ ID NO: 2879345 - RNA, 19 nt, Artificial Sequence
  Description of Artificial Sequence: Synthetic oligonucleotide
uucuuggggaacgcuuaga

SEQ ID NO: 2879346 - RNA, 19 nt, Artificial Sequence
  Description of Artificial Sequence: Synthetic oligonucleotide
cuggcucauaggcagggca

SEQ ID NO: 2879347 - RNA, 19 nt, Artificial Sequence
  Description of Artificial Sequence: Synthetic oligonucleotide
cuggccccagcacaucccc

SEQ ID NO: 2879348 - RNA, 19 nt, Artificial Sequence
  Description of Artificial Sequence: Synthetic oligonucleotide
gagcggaucuugugggaca

SEQ ID NO: 2879349 - RNA, 19 nt, Artificial Sequence
  Description of Artificial Sequence: Synthetic oligonucleotide
gcuguagucggcuggcuca

SEQ ID NO: 2879350 - RNA, 19 nt, Artificial Sequence
  Description of Artificial Sequence: Synthetic oligonucleotide
gacggccggagaccguugc

SEQ ID NO: 2879351 - RNA, 19 nt, Artificial Sequence
  Description of Artificial Sequence: Synthetic oligonucleotide
ugggucucugcagcggccc

SEQ ID NO: 2879352 - RNA, 19 nt, Artificial Sequence
  Description of Artificial Sequence: Synthetic oligonucleotide
cucggacgugccugcagag

SEQ ID NO: 2879353 - RNA, 19 nt, Artificial Sequence
  Description of Artificial Sequence: Synthetic oligonucleotide
gcuuucgacggccggagac

SEQ ID NO: 2879354 - RNA, 19 nt, Artificial Sequence
  Description of Artificial Sequence: Synthetic oligonucleotide
cauaggcagggcagaugac

SEQ ID NO: 2879355 - RNA, 19 nt, Artificial Sequence
  Description of Artificial Sequence: Synthetic oligonucleotide
caccuccgagcgcagggcg
